United States Patent Application Publication US 2007/0048756 A1 - sequence listing, part 2

SEQ ID NO: 35233 - DNA, 33 bp, Homo sapien
agtaagttccagtggcaatgtcagaaagaactt

SEQ ID NO: 35234 - DNA, 33 bp, Homo sapien
agtaagttccagtggccatgtcagaaagaactt

SEQ ID NO: 35235 - DNA, 33 bp, Homo sapien
ctacaacgtcagtgaaactcgtaataattttgc

SEQ ID NO: 35236 - DNA, 33 bp, Homo sapien
ctacaacgtcagtgaatctcgtaataattttgc

SEQ ID NO: 35237 - DNA, 33 bp, Homo sapien
agctgtcactaacttacgcagacacatgaagga

SEQ ID NO: 35238 - DNA, 33 bp, Homo sapien
agctgtcactaacttatgcagacacatgaagga

SEQ ID NO: 35239 - DNA, 33 bp, Homo sapien
ttaaaacaaccctgaaatacatgctggatttta

SEQ ID NO: 35240 - DNA, 33 bp, Homo sapien
ttaaaacaaccctgaagtacatgctggatttta

SEQ ID NO: 35241 - DNA, 33 bp, Homo sapien
ttagaggcactatagcagaatggtttaatacct

SEQ ID NO: 35242 - DNA, 33 bp, Homo sapien
ttagaggcactatagccgaatggtttaatacct

SEQ ID NO: 35243 - DNA, 33 bp, Homo sapien
atgaagtactaatacacgctacagtgtggatga

SEQ ID NO: 35244 - DNA, 33 bp, Homo sapien
atgaagtactaatacatgctacagtgtggatga

SEQ ID NO: 35245 - DNA, 33 bp, Homo sapien
ccaacaaccatctgaaggtatctgaaaaggatt

SEQ ID NO: 35246 - DNA, 33 bp, Homo sapien
ccaacaaccatctgaatgtatctgaaaaggatt

SEQ ID NO: 35247 - DNA, 33 bp, Homo sapien
catagtcaattaaagacattttctcccaaatca

SEQ ID NO: 35248 - DNA, 33 bp, Homo sapien
catagtcaattaaagatattttctcccaaatca

SEQ ID NO: 35249 - DNA, 33 bp, Homo sapien
gcaccagagaatcttacagttggaaaggttccc

SEQ ID NO: 35250 - DNA, 33 bp, Homo sapien
gcaccagagaatcttagagttggaaaggttccc

SEQ ID NO: 35251 - DNA, 33 bp, Homo sapien
gatgtatttaacttgaatagtctgaatttgact

SEQ ID NO: 35252 - DNA, 33 bp, Homo sapien
gatgtatttaacttgagtagtctgaatttgact

SEQ ID NO: 35253 - DNA, 33 bp, Homo sapien
ggtattggctccattacgtagacaggtaaatgg

SEQ ID NO: 35254 - DNA, 33 bp, Homo sapien
ggtattggctccattatgtagacaggtaaatgg

SEQ ID NO: 35255 - DNA, 33 bp, Homo sapien
cattttacagcagatacaagccaagcggcttct

SEQ ID NO: 35256 - DNA, 33 bp, Homo sapien
cattttacagcagatataagccaagcggcttct

SEQ ID NO: 35257 - DNA, 33 bp, Homo sapien
aagtcagagaagctatgaaaacctgatgatgac

SEQ ID NO: 35258 - DNA, 33 bp, Homo sapien
aagtcagagaagctattaaaacctgatgatgac

SEQ ID NO: 35259 - DNA, 33 bp, Homo sapien
tgccaatcaggtaggcaaaaatgacttgttttc

SEQ ID NO: 35260 - DNA, 33 bp, Homo sapien
tgccaatcaggtaggcgaaaatgacttgttttc

SEQ ID NO: 35261 - DNA, 33 bp, Homo sapien
gatgtctttattccccacttctcctttcatttg

SEQ ID NO: 35262 - DNA, 33 bp, Homo sapien
gatgtctttattccccgcttctcctttcatttg

SEQ ID NO: 35263 - DNA, 33 bp, Homo sapien
tcacaatttttacatacctgtctctgttttttg

SEQ ID NO: 35264 - DNA, 33 bp, Homo sapien
tcacaatttttacatatctgtctctgttttttg

SEQ ID NO: 35265 - DNA, 33 bp, Homo sapien
gattttaattcctgaaattcacactaaatctat

SEQ ID NO: 35266 - DNA, 33 bp, Homo sapien
gattttaattcctgaatttcacactaaatctat

SEQ ID NO: 35267 - DNA, 33 bp, Homo sapien
gaaggtagtttgtatacgcaagaacagagatgc

SEQ ID NO: 35268 - DNA, 33 bp, Homo sapien
gaaggtagtttgtataggcaagaacagagatgc

SEQ ID NO: 35269 - DNA, 33 bp, Homo sapien
tgagggccctaaattcaatgtttaagcctaggg

SEQ ID NO: 35270 - DNA, 33 bp, Homo sapien
tgagggccctaaattcgatgtttaagcctaggg

SEQ ID NO: 35271 - DNA, 33 bp, Homo sapien
agaatgtgttattaaaagtgcagactcccaggg

SEQ ID NO: 35272 - DNA, 33 bp, Homo sapien
agaatgtgttattaaaggtgcagactcccaggg

SEQ ID NO: 35273 - DNA, 33 bp, Homo sapien
ttaaaaatgtgcatgactaatatttgctgtaga

SEQ ID NO: 35274 - DNA, 33 bp, Homo sapien
ttaaaaatgtgcatgagtaatatttgctgtaga

SEQ ID NO: 35275 - DNA, 33 bp, Homo sapien
tgcctatctgacataaacacttggatgcctagc

SEQ ID NO: 35276 - DNA, 33 bp, Homo sapien
tgcctatctgacataaccacttggatgcctagc

SEQ ID NO: 35277 - DNA, 33 bp, Homo sapien
atacaacatggatacaaaacacttatatcattg

SEQ ID NO: 35278 - DNA, 33 bp, Homo sapien
atacaacatggatacagaacacttatatcattg

SEQ ID NO: 35279 - DNA, 33 bp, Homo sapien
tcattgactcaccacaaattctacaaacatccc

SEQ ID NO: 35280 - DNA, 33 bp, Homo sapien
tcattgactcaccacagattctacaaacatccc

SEQ ID NO: 35281 - DNA, 33 bp, Homo sapien
aagaaaaaggaaaagcaatccttgacagaaatg

SEQ ID NO: 35282 - DNA, 33 bp, Homo sapien
aagaaaaaggaaaagcgatccttgacagaaatg

SEQ ID NO: 35283 - DNA, 33 bp, Homo sapien
tgtttctattaaaaacaaaaagctctgtggcgg

SEQ ID NO: 35284 - DNA, 33 bp, Homo sapien
tgtttctattaaaaacgaaaagctctgtggcgg

SEQ ID NO: 35285 - DNA, 33 bp, Homo sapien
aacagccaggcctagaataaaagagcagctctg

SEQ ID NO: 35286 - DNA, 33 bp, Homo sapien
aacagccaggcctagactaaaagagcagctctg

SEQ ID NO: 35287 - DNA, 33 bp, Homo sapien
tacccctgctagtggaaaaatggctgggtagcc

SEQ ID NO: 35288 - DNA, 33 bp, Homo sapien
tacccctgctagtggagaaatggctgggtagcc

SEQ ID NO: 35289 - DNA, 33 bp, Homo sapien
tgcatattgacaattccgaaattcgtatgtcca

SEQ ID NO: 35290 - DNA, 33 bp, Homo sapien
tgcatattgacaattctgaaattcgtatgtcca

SEQ ID NO: 35291 - DNA, 33 bp, Homo sapien
tagtgaaccattatacagcaatcttcctttttc

SEQ ID NO: 35292 - DNA, 33 bp, Homo sapien
tagtgaaccattatacggcaatcttcctttttc

SEQ ID NO: 35293 - DNA, 33 bp, Homo sapien
aaaatattttgcccagacagtgctatagttcta

SEQ ID NO: 35294 - DNA, 33 bp, Homo sapien
aaaatattttgcccagccagtgctatagttcta

SEQ ID NO: 35295 - DNA, 33 bp, Homo sapien
aatggcaagatagttacgtggcttaagtgagat

SEQ ID NO: 35296 - DNA, 33 bp, Homo sapien
aatggcaagatagttatgtggcttaagtgagat

SEQ ID NO: 35297 - DNA, 33 bp, Homo sapien
taaaactggaaaagcacacctacttcatatacc

SEQ ID NO: 35298 - DNA, 33 bp, Homo sapien
taaaactggaaaagcagacctacttcatatacc

SEQ ID NO: 35299 - DNA, 33 bp, Homo sapien
gtagcaattgttatccaaaacaaggagaatatg

SEQ ID NO: 35300 - DNA, 33 bp, Homo sapien
gtagcaattgttatcccaaacaaggagaatatg

SEQ ID NO: 35301 - DNA, 33 bp, Homo sapien
gaccatcaaaagggaacgaaagcagtaagcaga

SEQ ID NO: 35302 - DNA, 33 bp, Homo sapien
gaccatcaaaagggaaggaaagcagtaagcaga

SEQ ID NO: 35303 - DNA, 33 bp, Homo sapien
gagatgatagtaagagacctaaagaataaggcc

SEQ ID NO: 35304 - DNA, 33 bp, Homo sapien
gagatgatagtaagaggcctaaagaataaggcc

SEQ ID NO: 35305 - DNA, 33 bp, Homo sapien
gtggtcagttttggaacagtgcgatgtggtgct

SEQ ID NO: 35306 - DNA, 33 bp, Homo sapien
gtggtcagttttggaatagtgcgatgtggtgct

SEQ ID NO: 35307 - DNA, 33 bp, Homo sapien
tcccacagtttattgaaagaacccagaggtaaa

SEQ ID NO: 35308 - DNA, 33 bp, Homo sapien
tcccacagtttattgagagaacccagaggtaaa

SEQ ID NO: 35309 - DNA, 33 bp, Homo sapien
gtggtctttggctagacagcattggcaattttt

SEQ ID NO: 35310 - DNA, 33 bp, Homo sapien
gtggtctttggctagagagcattggcaattttt

SEQ ID NO: 35311 - DNA, 33 bp, Homo sapien
gatttgaataacacaacgctgaagtactggatc

SEQ ID NO: 35312 - DNA, 33 bp, Homo sapien
gatttgaataacacaatgctgaagtactggatc

SEQ ID NO: 35313 - DNA, 33 bp, Homo sapien
acctctgtatcttccacaccttaaacagtgcct

SEQ ID NO: 35314 - DNA, 33 bp, Homo sapien
acctctgtatcttccataccttaaacagtgcct

SEQ ID NO: 35315 - DNA, 33 bp, Homo sapien
tttggagctccgatcacgagtcagaagaatggg

SEQ ID NO: 35316 - DNA, 33 bp, Homo sapien
tttggagctccgatcatgagtcagaagaatggg

SEQ ID NO: 35317 - DNA, 33 bp, Homo sapien
gtatttaatgtggcaacaaaattacatactttt

SEQ ID NO: 35318 - DNA, 33 bp, Homo sapien
gtatttaatgtggcaataaaattacatactttt

SEQ ID NO: 35319 - DNA, 33 bp, Homo sapien
ctcagggaatgatctaggaagaaagtcagtgcc

SEQ ID NO: 35320 - DNA, 33 bp, Homo sapien
ctcagggaatgatctatgaagaaagtcagtgcc

SEQ ID NO: 35321 - DNA, 33 bp, Homo sapien
ttaagagcctttagaggaattgttttgagaggg

SEQ ID NO: 35322 - DNA, 33 bp, Homo sapien
ttaagagcctttagagtaattgttttgagaggg

SEQ ID NO: 35323 - DNA, 33 bp, Homo sapien
agcattagtctagatcaactaaaaggagtaaag

SEQ ID NO: 35324 - DNA, 33 bp, Homo sapien
agcattagtctagatccactaaaaggagtaaag

SEQ ID NO: 35325 - DNA, 33 bp, Homo sapien
gaagctaaagacatcaaattaccaggctttgaa

SEQ ID NO: 35326 - DNA, 33 bp, Homo sapien
gaagctaaagacatcacattaccaggctttgaa

SEQ ID NO: 35327 - DNA, 33 bp, Homo sapien
cattaccagagctatactaggcaaggacaaaaa

SEQ ID NO: 35328 - DNA, 33 bp, Homo sapien
cattaccagagctatattaggcaaggacaaaaa

SEQ ID NO: 35329 - DNA, 33 bp, Homo sapien
tctttttattcaccacacagaaaattgccaatt

SEQ ID NO: 35330 - DNA, 33 bp, Homo sapien
tctttttattcaccacgcagaaaattgccaatt

SEQ ID NO: 35331 - DNA, 33 bp, Homo sapien
gacttccttgtgcagacgattttcttatcttct

SEQ ID NO: 35332 - DNA, 33 bp, Homo sapien
gacttccttgtgcagatgattttcttatcttct

SEQ ID NO: 35333 - DNA, 33 bp, Homo sapien
ttgataatggtgtttaaaaattaatctaccaga

SEQ ID NO: 35334 - DNA, 33 bp, Homo sapien
ttgataatggtgtttacaaattaatctaccaga

SEQ ID NO: 35335 - DNA, 33 bp, Homo sapien
gtgctacgtggagttccattaatgtgtaactca

SEQ ID NO: 35336 - DNA, 33 bp, Homo sapien
gtgctacgtggagttctattaatgtgtaactca

SEQ ID NO: 35337 - DNA, 33 bp, Homo sapien
tgttgatggcaccacaatctatgttgtctccta

SEQ ID NO: 35338 - DNA, 33 bp, Homo sapien
tgttgatggcaccacagtctatgttgtctccta

SEQ ID NO: 35339 - DNA, 33 bp, Homo sapien
attactatgtccccagaagtgaaggtgtaaaac

SEQ ID NO: 35340 - DNA, 33 bp, Homo sapien
attactatgtccccaggagtgaaggtgtaaaac

SEQ ID NO: 35341 - DNA, 33 bp, Homo sapien
cagattcagctttgtcacttagcaaaatgagct

SEQ ID NO: 35342 - DNA, 33 bp, Homo sapien
cagattcagctttgtcgcttagcaaaatgagct

SEQ ID NO: 35343 - DNA, 33 bp, Homo sapien
aaaaagagtaaatctacaacaaggatcagcaaa

SEQ ID NO: 35344 - DNA, 33 bp, Homo sapien
aaaaagagtaaatctataacaaggatcagcaaa

SEQ ID NO: 35345 - DNA, 33 bp, Homo sapien
acagcctttatcacataaaacctctcattaatg

SEQ ID NO: 35346 - DNA, 33 bp, Homo sapien
acagcctttatcacatgaaacctctcattaatg

SEQ ID NO: 35347 - DNA, 33 bp, Homo sapien
tctctcttcctaaatgcagtacctgatgcttac

SEQ ID NO: 35348 - DNA, 33 bp, Homo sapien
tctctcttcctaaatgtagtacctgatgcttac

SEQ ID NO: 35349 - DNA, 33 bp, Homo sapien
agggcagtgcaagaaaatgctggaaaataatgg

SEQ ID NO: 35350 - DNA, 33 bp, Homo sapien
agggcagtgcaagaaactgctggaaaataatgg

SEQ ID NO: 35351 - DNA, 33 bp, Homo sapien
aaatgagagatgccacaacatataggacaacta

SEQ ID NO: 35352 - DNA, 33 bp, Homo sapien
aaatgagagatgccacgacatataggacaacta

SEQ ID NO: 35353 - DNA, 33 bp, Homo sapien
gaggaacaaattttagcacaatgttattaatag

SEQ ID NO: 35354 - DNA, 33 bp, Homo sapien
gaggaacaaattttaggacaatgttattaatag

SEQ ID NO: 35355 - DNA, 33 bp, Homo sapien
cacaggagtgtgttatcaaagtgagtttggctt

SEQ ID NO: 35356 - DNA, 33 bp, Homo sapien
cacaggagtgtgttatgaaagtgagtttggctt

SEQ ID NO: 35357 - DNA, 33 bp, Homo sapien
ccagaatcaagcttaagggcacacaatagagac

SEQ ID NO: 35358 - DNA, 33 bp, Homo sapien
ccagaatcaagcttaatggcacacaatagagac

SEQ ID NO: 35359 - DNA, 33 bp, Homo sapien
ttacattatttaagtacgagccaaagcagatac

SEQ ID NO: 35360 - DNA, 33 bp, Homo sapien
ttacattatttaagtatgagccaaagcagatac

SEQ ID NO: 35361 - DNA, 33 bp, Homo sapien
ctgagaagttggatcacctgatctttcggtcat

SEQ ID NO: 35362 - DNA, 33 bp, Homo sapien
ctgagaagttggatcatctgatctttcggtcat

SEQ ID NO: 35363 - DNA, 33 bp, Homo sapien
ttctgtgacattcagacatggaatttgaagctt

SEQ ID NO: 35364 - DNA, 33 bp, Homo sapien
ttctgtgacattcagatatggaatttgaagctt

SEQ ID NO: 35365 - DNA, 33 bp, Homo sapien
atttggaaacatctgtaaaatgttgagtaaaaa

SEQ ID NO: 35366 - DNA, 33 bp, Homo sapien
atttggaaacatctgtgaaatgttgagtaaaaa

SEQ ID NO: 35367 - DNA, 33 bp, Homo sapien
gctctcttctgcatcaccatgtcatttttatta

SEQ ID NO: 35368 - DNA, 33 bp, Homo sapien
gctctcttctgcatcatcatgtcatttttatta

SEQ ID NO: 35369 - DNA, 33 bp, Homo sapien
gctcagttattcttagaccactcagataaaagt

SEQ ID NO: 35370 - DNA, 33 bp, Homo sapien
gctcagttattcttaggccactcagataaaagt

SEQ ID NO: 35371 - DNA, 33 bp, Homo sapien
ctcactctgaaggactaactgtcattggttcca

SEQ ID NO: 35372 - DNA, 33 bp, Homo sapien
ctcactctgaaggactcactgtcattggttcca

SEQ ID NO: 35373 - DNA, 33 bp, Homo sapien
tcttcttctctccccaataacatcctcaatatc

SEQ ID NO: 35374 - DNA, 33 bp, Homo sapien
tcttcttctctccccagtaacatcctcaatatc

SEQ ID NO: 35375 - DNA, 33 bp, Homo sapien
aaaataacatacatgaaagctctttgtaaaaaa

SEQ ID NO: 35376 - DNA, 33 bp, Homo sapien
aaaataacatacatgacagctctttgtaaaaaa

SEQ ID NO: 35377 - DNA, 33 bp, Homo sapien
atgcagtgttatgtagcagaaagatgtttggca

SEQ ID NO: 35378 - DNA, 33 bp, Homo sapien
atgcagtgttatgtagtagaaagatgtttggca

SEQ ID NO: 35379 - DNA, 33 bp, Homo sapien
gagttaaaagttggacaaatagcattctgccaa

SEQ ID NO: 35380 - DNA, 33 bp, Homo sapien
gagttaaaagttggaccaatagcattctgccaa

SEQ ID NO: 35381 - DNA, 33 bp, Homo sapien
catatctgtgacatgaaatgctaatacctacta

SEQ ID NO: 35382 - DNA, 33 bp, Homo sapien
catatctgtgacatgagatgctaatacctacta

SEQ ID NO: 35383 - DNA, 33 bp, Homo sapien
ttgactacattgccctaaaagttcactagcatg

SEQ ID NO: 35384 - DNA, 33 bp, Homo sapien
ttgactacattgccctgaaagttcactagcatg

SEQ ID NO: 35385 - DNA, 33 bp, Homo sapien
aatgagtatatatgacagtcaaggaaatataga

SEQ ID NO: 35386 - DNA, 33 bp, Homo sapien
aatgagtatatatgacggtcaaggaaatataga

SEQ ID NO: 35387 - DNA, 33 bp, Homo sapien
ccagataccttactaaacactttctcaatgaat

SEQ ID NO: 35388 - DNA, 33 bp, Homo sapien
ccagataccttactaagcactttctcaatgaat

SEQ ID NO: 35389 - DNA, 33 bp, Homo sapien
atggtataattcaccaatgaaggatttggggca

SEQ ID NO: 35390 - DNA, 33 bp, Homo sapien
atggtataattcaccagtgaaggatttggggca

SEQ ID NO: 35391 - DNA, 33 bp, Homo sapien
tcttagctaccagacactagttctttatctctg

SEQ ID NO: 35392 - DNA, 33 bp, Homo sapien
tcttagctaccagacagtagttctttatctctg

SEQ ID NO: 35393 - DNA, 33 bp, Homo sapien
attgtgctcctggaacagcagaatccttctcta

SEQ ID NO: 35394 - DNA, 33 bp, Homo sapien
attgtgctcctggaacggcagaatccttctcta

SEQ ID NO: 35395 - DNA, 33 bp, Homo sapien
tttataatagcaaaaactgaaaacaatacaagc

SEQ ID NO: 35396 - DNA, 33 bp, Homo sapien
tttataatagcaaaaagtgaaaacaatacaagc

SEQ ID NO: 35397 - DNA, 33 bp, Homo sapien
tttgatttctaattaaagtccagatacacagaa

SEQ ID NO: 35398 - DNA, 33 bp, Homo sapien
tttgatttctaattaaggtccagatacacagaa

SEQ ID NO: 35399 - DNA, 33 bp, Homo sapien
ccaggagagggcaaggaatagtcatttgcactc

SEQ ID NO: 35400 - DNA, 33 bp, Homo sapien
ccaggagagggcaagggatagtcatttgcactc

SEQ ID NO: 35401 - DNA, 33 bp, Homo sapien
atgtgtggttctgcggcatatcaaaaaacgttt

SEQ ID NO: 35402 - DNA, 33 bp, Homo sapien
atgtgtggttctgcgggatatcaaaaaacgttt

SEQ ID NO: 35403 - DNA, 33 bp, Homo sapien
aggttctgcaataagcaaaagttaaatttgatg

SEQ ID NO: 35404 - DNA, 33 bp, Homo sapien
aggttctgcaataagcgaaagttaaatttgatg

SEQ ID NO: 35405 - DNA, 33 bp, Homo sapien
agttgatacaacctctaaattgtgtcctatgct

SEQ ID NO: 35406 - DNA, 33 bp, Homo sapien
agttgatacaacctctgaattgtgtcctatgct

SEQ ID NO: 35407 - DNA, 33 bp, Homo sapien
tgaaccctgaagacatgatgcaaagtgagagaa

SEQ ID NO: 35408 - DNA, 33 bp, Homo sapien
tgaaccctgaagacattatgcaaagtgagagaa

SEQ ID NO: 35409 - DNA, 33 bp, Homo sapien
gatgtctaaggcttcaagaaagttccctcaaaa

SEQ ID NO: 35410 - DNA, 33 bp, Homo sapien
gatgtctaaggcttcatgaaagttccctcaaaa

SEQ ID NO: 35411 - DNA, 33 bp, Homo sapien
gtatcaaagttaggtcaagttctgatcattatt

SEQ ID NO: 35412 - DNA, 33 bp, Homo sapien
gtatcaaagttaggtcgagttctgatcattatt

SEQ ID NO: 35413 - DNA, 33 bp, Homo sapien
ttgaataggataccagacagagtcctaaggtcc

SEQ ID NO: 35414 - DNA, 33 bp, Homo sapien
ttgaataggataccaggcagagtcctaaggtcc

SEQ ID NO: 35415 - DNA, 33 bp, Homo sapien
atccacctcacttacagataatttctgagcaga

SEQ ID NO: 35416 - DNA, 33 bp, Homo sapien
atccacctcacttacatataatttctgagcaga

SEQ ID NO: 35417 - DNA, 33 bp, Homo sapien
tagacaggcttatctacgctctggaacatttta

SEQ ID NO: 35418 - DNA, 33 bp, Homo sapien
tagacaggcttatctatgctctggaacatttta

SEQ ID NO: 35419 - DNA, 33 bp, Homo sapien
tttagaagatgggccacattagaagcagtgtgt

SEQ ID NO: 35420 - DNA, 33 bp, Homo sapien
tttagaagatgggccatattagaagcagtgtgt

SEQ ID NO: 35421 - DNA, 33 bp, Homo sapien
ttctcagatcaatttcccgcatttttcttgctc

SEQ ID NO: 35422 - DNA, 33 bp, Homo sapien
ttctcagatcaatttctcgcatttttcttgctc

SEQ ID NO: 35423 - DNA, 33 bp, Homo sapien
agtcaccacctaggcaaaagctaggatagaggg

SEQ ID NO: 35424 - DNA, 33 bp, Homo sapien
agtcaccacctaggcagaagctaggatagaggg

SEQ ID NO: 35425 - DNA, 33 bp, Homo sapien
gcaatatgtgataatcgcatcgtggtaaatggg

SEQ ID NO: 35426 - DNA, 33 bp, Homo sapien
gcaatatgtgataatctcatcgtggtaaatggg

SEQ ID NO: 35427 - DNA, 33 bp, Homo sapien
tgagcaactgttatgcactggctccatagtaat

SEQ ID NO: 35428 - DNA, 33 bp, Homo sapien
tgagcaactgttatgcgctggctccatagtaat

SEQ ID NO: 35429 - DNA, 33 bp, Homo sapien
caagtaaattaataaacgcaagattgaaagaaa

SEQ ID NO: 35430 - DNA, 33 bp, Homo sapien
caagtaaattaataaatgcaagattgaaagaaa

SEQ ID NO: 35431 - DNA, 33 bp, Homo sapien
acagggcctttgctagcataaccaagaccataa

SEQ ID NO: 35432 - DNA, 33 bp, Homo sapien
acagggcctttgctagtataaccaagaccataa

SEQ ID NO: 35433 - DNA, 33 bp, Homo sapien
ctgttgcaaaaaaatccccaatattcttatcta

SEQ ID NO: 35434 - DNA, 33 bp, Homo sapien
ctgttgcaaaaaaatctccaatattcttatcta

SEQ ID NO: 35435 - DNA, 33 bp, Homo sapien
agaagactggtcttgacatatgcctgaaaaatc

SEQ ID NO: 35436 - DNA, 33 bp, Homo sapien
agaagactggtcttgatatatgcctgaaaaatc

SEQ ID NO: 35437 - DNA, 33 bp, Homo sapien
aaaaaatgaagcaatacgaattaataaccagag

SEQ ID NO: 35438 - DNA, 33 bp, Homo sapien
aaaaaatgaagcaatatgaattaataaccagag

SEQ ID NO: 35439 - DNA, 33 bp, Homo sapien
tctttgagcatagtaacggcataaactgataaa

SEQ ID NO: 35440 - DNA, 33 bp, Homo sapien
tctttgagcatagtaagggcataaactgataaa

SEQ ID NO: 35441 - DNA, 33 bp, Homo sapien
acacattcatctatcaactgatcttatgcaata

SEQ ID NO: 35442 - DNA, 33 bp, Homo sapien
acacattcatctatcacctgatcttatgcaata

SEQ ID NO: 35443 - DNA, 33 bp, Homo sapien
tgtgggccactggttgaaaaggaagtgaggcac

SEQ ID NO: 35444 - DNA, 33 bp, Homo sapien
tgtgggccactggttggaaaggaagtgaggcac

SEQ ID NO: 35445 - DNA, 33 bp, Homo sapien
attgccctatttggacacatttgtaaaaagcat

SEQ ID NO: 35446 - DNA, 33 bp, Homo sapien
attgccctatttggacgcatttgtaaaaagcat

SEQ ID NO: 35447 - DNA, 33 bp, Homo sapien
tctctgggaaaagagaacagattgtgctaaaga

SEQ ID NO: 35448 - DNA, 33 bp, Homo sapien
tctctgggaaaagagagcagattgtgctaaaga

SEQ ID NO: 35449 - DNA, 33 bp, Homo sapien
tgggctgcaggctaccaatttctatcttccttc

SEQ ID NO: 35450 - DNA, 33 bp, Homo sapien
tgggctgcaggctaccgatttctatcttccttc

SEQ ID NO: 35451 - DNA, 33 bp, Homo sapien
aaagtcactgaagaggaaaccttaaaaaaagta

SEQ ID NO: 35452 - DNA, 33 bp, Homo sapien
aaagtcactgaagagggaaccttaaaaaaagta

SEQ ID NO: 35453 - DNA, 33 bp, Homo sapien
tgatacaaagagcaaacgtaaatatccctttca

SEQ ID NO: 35454 - DNA, 33 bp, Homo sapien
tgatacaaagagcaaatgtaaatatccctttca

SEQ ID NO: 35455 - DNA, 33 bp, Homo sapien
tatctcatgcacactacggtaaagcctactgaa

SEQ ID NO: 35456 - DNA, 33 bp, Homo sapien
tatctcatgcacactatggtaaagcctactgaa

SEQ ID NO: 35457 - DNA, 33 bp, Homo sapien
ccaaatagatatggacagagtattatgcctgaa

SEQ ID NO: 35458 - DNA, 33 bp, Homo sapien
ccaaatagatatggacggagtattatgcctgaa

SEQ ID NO: 35459 - DNA, 33 bp, Homo sapien
taaaattaaaagctaaatagaaatgcttactaa

SEQ ID NO: 35460 - DNA, 33 bp, Homo sapien
taaaattaaaagctaagtagaaatgcttactaa

SEQ ID NO: 35461 - DNA, 33 bp, Homo sapien
gcataagtcaggctacagaatagtcacaataag

SEQ ID NO: 35462 - DNA, 33 bp, Homo sapien
gcataagtcaggctacggaatagtcacaataag

SEQ ID NO: 35463 - DNA, 33 bp, Homo sapien
ggttacagttttaataacagtgatcaaggaggt

SEQ ID NO: 35464 - DNA, 33 bp, Homo sapien
ggttacagttttaatatcagtgatcaaggaggt

SEQ ID NO: 35465 - DNA, 33 bp, Homo sapien
cttatatacatgatcaataaggccagggttgtt

SEQ ID NO: 35466 - DNA, 33 bp, Homo sapien
cttatatacatgatcagtaaggccagggttgtt

SEQ ID NO: 35467 - DNA, 33 bp, Homo sapien
gcagtccatctctttcaagccccttgtcaggga

SEQ ID NO: 35468 - DNA, 33 bp, Homo sapien
gcagtccatctctttcgagccccttgtcaggga

SEQ ID NO: 35469 - DNA, 33 bp, Homo sapien
acaagtgtttagcttaactccagccagtagaca

SEQ ID NO: 35470 - DNA, 33 bp, Homo sapien
acaagtgtttagcttagctccagccagtagaca

SEQ ID NO: 35471 - DNA, 33 bp, Homo sapien
ttttcaaagtggttgcaccgattttaaaatccc

SEQ ID NO: 35472 - DNA, 33 bp, Homo sapien
ttttcaaagtggttgctccgattttaaaatccc

SEQ ID NO: 35473 - DNA, 33 bp, Homo sapien
cttttacaccattgtaaagccaaaataacatta

SEQ ID NO: 35474 - DNA, 33 bp, Homo sapien
cttttacaccattgtacagccaaaataacatta

SEQ ID NO: 35475 - DNA, 33 bp, Homo sapien
aattggagaacttcaacgcagtgaaatacagaa

SEQ ID NO: 35476 - DNA, 33 bp, Homo sapien
aattggagaacttcaatgcagtgaaatacagaa

SEQ ID NO: 35477 - DNA, 33 bp, Homo sapien
tttcaggaaaattaaaagagaccaaaaatgcag

SEQ ID NO: 35478 - DNA, 33 bp, Homo sapien
tttcaggaaaattaaatgagaccaaaaatgcag

SEQ ID NO: 35479 - DNA, 33 bp, Homo sapien
ggattcacaatagtgacactgtaatagaaacta

SEQ ID NO: 35480 - DNA, 33 bp, Homo sapien
ggattcacaatagtgagactgtaatagaaacta

SEQ ID NO: 35481 - DNA, 33 bp, Homo sapien
atcctgtttctgactcgaagttacatttattcg

SEQ ID NO: 35482 - DNA, 33 bp, Homo sapien
atcctgtttctgactctaagttacatttattcg

SEQ ID NO: 35483 - DNA, 33 bp, Homo sapien
cccaaggcgactgcaacgatgtacctgtggatt

SEQ ID NO: 35484 - DNA, 33 bp, Homo sapien
cccaaggcgactgcaatgatgtacctgtggatt

SEQ ID NO: 35485 - DNA, 33 bp, Homo sapien
gctcatgcaattcctgaactctctaatattgcg

SEQ ID NO: 35486 - DNA, 33 bp, Homo sapien
gctcatgcaattcctggactctctaatattgcg

SEQ ID NO: 35487 - DNA, 33 bp, Homo sapien
gaacatgaggccaaataaaactaggcaagcata

SEQ ID NO: 35488 - DNA, 33 bp, Homo sapien
gaacatgaggccaaatcaaactaggcaagcata

SEQ ID NO: 35489 - DNA, 33 bp, Homo sapien
atttctcccgagtttagactggagctcatttta

SEQ ID NO: 35490 - DNA, 33 bp, Homo sapien
atttctcccgagtttatactggagctcatttta

SEQ ID NO: 35491 - DNA, 33 bp, Homo sapien
acattttagttgctagaaggtcttgctttaata

SEQ ID NO: 35492 - DNA, 33 bp, Homo sapien
acattttagttgctaggaggtcttgctttaata

SEQ ID NO: 35493 - DNA, 33 bp, Homo sapien
ggatattgcttggcacagtacacaactctgttc

SEQ ID NO: 35494 - DNA, 33 bp, Homo sapien
ggatattgcttggcacggtacacaactctgttc

SEQ ID NO: 35495 - DNA, 33 bp, Homo sapien
aggcaactctaccttaccctacacaacaatgaa

SEQ ID NO: 35496 - DNA, 33 bp, Homo sapien
aggcaactctaccttatcctacacaacaatgaa

SEQ ID NO: 35497 - DNA, 33 bp, Homo sapien
ctgtcaagtacaaaacaaaactgcagaataaaa

SEQ ID NO: 35498 - DNA, 33 bp, Homo sapien
ctgtcaagtacaaaacgaaactgcagaataaaa

SEQ ID NO: 35499 - DNA, 33 bp, Homo sapien
aaagtctgacttatcaatatatccaatagagtt

SEQ ID NO: 35500 - DNA, 33 bp, Homo sapien
aaagtctgacttatcagtatatccaatagagtt

SEQ ID NO: 35501 - DNA, 33 bp, Homo sapien
tttctgagtcagattcccttcctgctctcctct

SEQ ID NO: 35502 - DNA, 33 bp, Homo sapien
tttctgagtcagattcgcttcctgctctcctct

SEQ ID NO: 35503 - DNA, 33 bp, Homo sapien
tctctcagtgaaaaaacggtgattgaagaactt

SEQ ID NO: 35504 - DNA, 33 bp, Homo sapien
tctctcagtgaaaaaatggtgattgaagaactt

SEQ ID NO: 35505 - DNA, 33 bp, Homo sapien
agacattaggtggcataaggcgatcagaaaaag

SEQ ID NO: 35506 - DNA, 33 bp, Homo sapien
agacattaggtggcatgaggcgatcagaaaaag

SEQ ID NO: 35507 - DNA, 33 bp, Homo sapien
agcatgagattgtcaaaatgaccctcatgatta

SEQ ID NO: 35508 - DNA, 33 bp, Homo sapien
agcatgagattgtcaagatgaccctcatgatta

SEQ ID NO: 35509 - DNA, 33 bp, Homo sapien
acgtggtagttggctacgagctaaagtttcagc

SEQ ID NO: 35510 - DNA, 33 bp, Homo sapien
acgtggtagttggctatgagctaaagtttcagc

SEQ ID NO: 35511 - DNA, 33 bp, Homo sapien
tgtcagtggtgctgagaatttgaaagggatgct

SEQ ID NO: 35512 - DNA, 33 bp, Homo sapien
tgtcagtggtgctgaggatttgaaagggatgct

SEQ ID NO: 35513 - DNA, 33 bp, Homo sapien
catattaactggtgaaactcttgaatttgtata

SEQ ID NO: 35514 - DNA, 33 bp, Homo sapien
catattaactggtgaagctcttgaatttgtata

SEQ ID NO: 35515 - DNA, 33 bp, Homo sapien
aatacttcaatttggactaagagtggttatgga

SEQ ID NO: 35516 - DNA, 33 bp, Homo sapien
aatacttcaatttggagtaagagtggttatgga

SEQ ID NO: 35517 - DNA, 33 bp, Homo sapien
cagaattgtgaaccaacgaatttctgttcatta

SEQ ID NO: 35518 - DNA, 33 bp, Homo sapien
cagaattgtgaaccaatgaatttctgttcatta

SEQ ID NO: 35519 - DNA, 33 bp, Homo sapien
aacttgcccaagaaacggttgagaattagtgga

SEQ ID NO: 35520 - DNA, 33 bp, Homo sapien
aacttgcccaagaaactgttgagaattagtgga

SEQ ID NO: 35521 - DNA, 33 bp, Homo sapien
agttggatctaagcaacagaagtttggcttctc

SEQ ID NO: 35522 - DNA, 33 bp, Homo sapien
agttggatctaagcaagagaagtttggcttctc

SEQ ID NO: 35523 - DNA, 33 bp, Homo sapien
tggtcacagtggtgtaataaagtagcaaaggca

SEQ ID NO: 35524 - DNA, 33 bp, Homo sapien
tggtcacagtggtgtagtaaagtagcaaaggca

SEQ ID NO: 35525 - DNA, 33 bp, Homo sapien
gcataagaaattgccaatattcactttgggaga

SEQ ID NO: 35526 - DNA, 33 bp, Homo sapien
gcataagaaattgccagtattcactttgggaga

SEQ ID NO: 35527 - DNA, 33 bp, Homo sapien
aaataattccaagaaccatttgcctggactctg

SEQ ID NO: 35528 - DNA, 33 bp, Homo sapien
aaataattccaagaacgatttgcctggactctg

SEQ ID NO: 35529 - DNA, 33 bp, Homo sapien
gaaagataggaccaaactagcttttataccaaa

SEQ ID NO: 35530 - DNA, 33 bp, Homo sapien
gaaagataggaccaaattagcttttataccaaa

SEQ ID NO: 35531 - DNA, 33 bp, Homo sapien
gtagaccatatcttcaaggacgtagcaagagga

SEQ ID NO: 35532 - DNA, 33 bp, Homo sapien
gtagaccatatcttcacggacgtagcaagagga

SEQ ID NO: 35533 - DNA, 33 bp, Homo sapien
tttataatagcaataaaattgaaacaacttaag

SEQ ID NO: 35534 - DNA, 33 bp, Homo sapien
tttataatagcaataagattgaaacaacttaag

SEQ ID NO: 35535 - DNA, 33 bp, Homo sapien
agacatgctagacttcccatcttcttgctcaac

SEQ ID NO: 35536 - DNA, 33 bp, Homo sapien
agacatgctagacttcgcatcttcttgctcaac

SEQ ID NO: 35537 - DNA, 33 bp, Homo sapien
atgagagccctgggaacctaaacaaagccagtg

SEQ ID NO: 35538 - DNA, 33 bp, Homo sapien
atgagagccctgggaagctaaacaaagccagtg

SEQ ID NO: 35539 - DNA, 33 bp, Homo sapien
aaatgcagaaagagaaaaaaagtaaattccagc

SEQ ID NO: 35540 - DNA, 33 bp, Homo sapien
aaatgcagaaagagaagaaaagtaaattccagc

SEQ ID NO: 35541 - DNA, 33 bp, Homo sapien
gcttgtatgtttctaacaattgatacacttccg

SEQ ID NO: 35542 - DNA, 33 bp, Homo sapien
gcttgtatgtttctaataattgatacacttccg

SEQ ID NO: 35543 - DNA, 33 bp, Homo sapien
gccctgcttgcattcccatctcagattctgaca

SEQ ID NO: 35544 - DNA, 33 bp, Homo sapien
gccctgcttgcattcctatctcagattctgaca

SEQ ID NO: 35545 - DNA, 33 bp, Homo sapien
ggcaatttataaaatgccaattatctcagtgta

SEQ ID NO: 35546 - DNA, 33 bp, Homo sapien
ggcaatttataaaatgtcaattatctcagtgta

SEQ ID NO: 35547 - DNA, 33 bp, Homo sapien
catgagaatagccaggaaaacctgctcccatga

SEQ ID NO: 35548 - DNA, 33 bp, Homo sapien
catgagaatagccagggaaacctgctcccatga

SEQ ID NO: 35549 - DNA, 33 bp, Homo sapien
tctcttcctctcttccagcaggtcatcctgtca

SEQ ID NO: 35550 - DNA, 33 bp, Homo sapien
tctcttcctctcttccggcaggtcatcctgtca

SEQ ID NO: 35551 - DNA, 33 bp, Homo sapien
tccagtctttcttggacgtatgtgatccaggct

SEQ ID NO: 35552 - DNA, 33 bp, Homo sapien
tccagtctttcttggaggtatgtgatccaggct

SEQ ID NO: 35553 - DNA, 33 bp, Homo sapien
ctaaaatacagatgaactgcttatggtaaactt

SEQ ID NO: 35554 - DNA, 33 bp, Homo sapien
ctaaaatacagatgaattgcttatggtaaactt

SEQ ID NO: 35555 - DNA, 33 bp, Homo sapien
actttatcatcacatacgagtttccgtctgtaa

SEQ ID NO: 35556 - DNA, 33 bp, Homo sapien
actttatcatcacatatgagtttccgtctgtaa

SEQ ID NO: 35557 - DNA, 33 bp, Homo sapien
gactgctttagacttacaagagcaaaaaatgtt

SEQ ID NO: 35558 - DNA, 33 bp, Homo sapien
gactgctttagacttagaagagcaaaaaatgtt

SEQ ID NO: 35559 - DNA, 33 bp, Homo sapien
actcatacttagtcaaaagaaactttactgtcc

SEQ ID NO: 35560 - DNA, 33 bp, Homo sapien
actcatacttagtcaagagaaactttactgtcc

SEQ ID NO: 35561 - DNA, 33 bp, Homo sapien
aattagctgcactgaactaaagaaaaactgctc

SEQ ID NO: 35562 - DNA, 33 bp, Homo sapien
aattagctgcactgaattaaagaaaaactgctc

SEQ ID NO: 35563 - DNA, 33 bp, Homo sapien
accagacttcaaaataggctacaaacgtgtagt

SEQ ID NO: 35564 - DNA, 33 bp, Homo sapien
accagacttcaaaatatgctacaaacgtgtagt

SEQ ID NO: 35565 - DNA, 33 bp, Homo sapien
acctttgcaagaaaaaacacaaatcatggatga

SEQ ID NO: 35566 - DNA, 33 bp, Homo sapien
acctttgcaagaaaaaccacaaatcatggatga

SEQ ID NO: 35567 - DNA, 33 bp, Homo sapien
tcttcattattgctcaaaaaatagcagtgatgg

SEQ ID NO: 35568 - DNA, 33 bp, Homo sapien
tcttcattattgctcagaaaatagcagtgatgg

SEQ ID NO: 35569 - DNA, 33 bp, Homo sapien
agtgataaagaaaatgaagaagcagagctaaag

SEQ ID NO: 35570 - DNA, 33 bp, Homo sapien
agtgataaagaaaatgcagaagcagagctaaag

SEQ ID NO: 35571 - DNA, 33 bp, Homo sapien
gtacctctttccaaacaaaatcacctcctatca

SEQ ID NO: 35572 - DNA, 33 bp, Homo sapien
gtacctctttccaaacgaaatcacctcctatca

SEQ ID NO: 35573 - DNA, 33 bp, Homo sapien
agaaatgtttttcataagtagcctggctcctcc

SEQ ID NO: 35574 - DNA, 33 bp, Homo sapien
agaaatgtttttcataggtagcctggctcctcc

SEQ ID NO: 35575 - DNA, 33 bp, Homo sapien
tttggagaaacactacactttgtaaagaaatag

SEQ ID NO: 35576 - DNA, 33 bp, Homo sapien
tttggagaaacactacgctttgtaaagaaatag

SEQ ID NO: 35577 - DNA, 33 bp, Homo sapien
taatgcaaatgcccatcaaaagcactgcatgaa

SEQ ID NO: 35578 - DNA, 33 bp, Homo sapien
taatgcaaatgcccatgaaaagcactgcatgaa

SEQ ID NO: 35579 - DNA, 33 bp, Homo sapien
aatgttagctgactcaaaaaggaaaacaaaaac

SEQ ID NO: 35580 - DNA, 33 bp, Homo sapien
aatgttagctgactcataaaggaaaacaaaaac

SEQ ID NO: 35581 - DNA, 33 bp, Homo sapien
cacaggaacatgattaacagatgaggaacctgg

SEQ ID NO: 35582 - DNA, 33 bp, Homo sapien
cacaggaacatgattagcagatgaggaacctgg

SEQ ID NO: 35583 - DNA, 33 bp, Homo sapien
gttaaaatgtaaaatgaaatataggatcacaaa

SEQ ID NO: 35584 - DNA, 33 bp, Homo sapien
gttaaaatgtaaaatgtaatataggatcacaaa

SEQ ID NO: 35585 - DNA, 33 bp, Homo sapien
atagagagtaggtgcacagctttagtaatagta

SEQ ID NO: 35586 - DNA, 33 bp, Homo sapien
atagagagtaggtgcatagctttagtaatagta

SEQ ID NO: 35587 - DNA, 33 bp, Homo sapien
atatcagcatattagcaaattaatgaagaaatg

SEQ ID NO: 35588 - DNA, 33 bp, Homo sapien
atatcagcatattagcgaattaatgaagaaatg

SEQ ID NO: 35589 - DNA, 33 bp, Homo sapien
aaccaataacaaaaataacatgattacgtcaat

SEQ ID NO: 35590 - DNA, 33 bp, Homo sapien
aaccaataacaaaaatgacatgattacgtcaat

SEQ ID NO: 35591 - DNA, 33 bp, Homo sapien
aggagtgtgcagtacacgatgcttagcttttta

SEQ ID NO: 35592 - DNA, 33 bp, Homo sapien
aggagtgtgcagtacatgatgcttagcttttta

SEQ ID NO: 35593 - DNA, 33 bp, Homo sapien
agaagacattacgaagaaaacaggagaaaagtt

SEQ ID NO: 35594 - DNA, 33 bp, Homo sapien
agaagacattacgaaggaaacaggagaaaagtt

SEQ ID NO: 35595 - DNA, 33 bp, Homo sapien
gttgaactgtaaatcacccaggtaaaactgagg

SEQ ID NO: 35596 - DNA, 33 bp, Homo sapien
gttgaactgtaaatcatccaggtaaaactgagg

SEQ ID NO: 35597 - DNA, 33 bp, Homo sapien
aatcttgactaatataactaaggactctatagg

SEQ ID NO: 35598 - DNA, 33 bp, Homo sapien
aatcttgactaatatatctaaggactctatagg

SEQ ID NO: 35599 - DNA, 33 bp, Homo sapien
tcaatgttaaagtacaaagtaaacacttcctgt

SEQ ID NO: 35600 - DNA, 33 bp, Homo sapien
tcaatgttaaagtacagagtaaacacttcctgt

SEQ ID NO: 35601 - DNA, 33 bp, Homo sapien
gcataacacaaaatataaagtaagtgcatctct

SEQ ID NO: 35602 - DNA, 33 bp, Homo sapien
gcataacacaaaatattaagtaagtgcatctct

SEQ ID NO: 35603 - DNA, 33 bp, Homo sapien
gaattatatactaaaacaattggccaagataat

SEQ ID NO: 35604 - DNA, 33 bp, Homo sapien
gaattatatactaaaagaattggccaagataat

SEQ ID NO: 35605 - DNA, 33 bp, Homo sapien
aatagtttactgatacagagaagttcccataga

SEQ ID NO: 35606 - DNA, 33 bp, Homo sapien
aatagtttactgatacggagaagttcccataga

SEQ ID NO: 35607 - DNA, 33 bp, Homo sapien
atatatatatttgtcacgagttgggaaggtggt

SEQ ID NO: 35608 - DNA, 33 bp, Homo sapien
atatatatatttgtcatgagttgggaaggtggt

SEQ ID NO: 35609 - DNA, 33 bp, Homo sapien
cctgactgatgggcacacagggaattataaaag

SEQ ID NO: 35610 - DNA, 33 bp, Homo sapien
cctgactgatgggcacgcagggaattataaaag

SEQ ID NO: 35611 - DNA, 33 bp, Homo sapien
ttctgataaaacacctaaaaaatttctgttgtc

SEQ ID NO: 35612 - DNA, 33 bp, Homo sapien
ttctgataaaacacctgaaaaatttctgttgtc

SEQ ID NO: 35613 - DNA, 33 bp, Homo sapien
atgggactcccttgaaatcgtcttctttagccc

SEQ ID NO: 35614 - DNA, 33 bp, Homo sapien
atgggactcccttgaattcgtcttctttagccc

SEQ ID NO: 35615 - DNA, 33 bp, Homo sapien
tcctcttgtttctcatcaaccaagaaaagtggc

SEQ ID NO: 35616 - DNA, 33 bp, Homo sapien
tcctcttgtttctcattaaccaagaaaagtggc

SEQ ID NO: 35617 - DNA, 33 bp, Homo sapien
gatctaagaactgtgagactacagaaggctatt

SEQ ID NO: 35618 - DNA, 33 bp, Homo sapien
gatctaagaactgtgatactacagaaggctatt

SEQ ID NO: 35619 - DNA, 33 bp, Homo sapien
aggagactggagagacgccatgacaacctgcca

SEQ ID NO: 35620 - DNA, 33 bp, Homo sapien
aggagactggagagactccatgacaacctgcca

SEQ ID NO: 35621 - DNA, 33 bp, Homo sapien
acctgtgaatcacagacattacgtagaacaagc

SEQ ID NO: 35622 - DNA, 33 bp, Homo sapien
acctgtgaatcacagatattacgtagaacaagc

SEQ ID NO: 35623 - DNA, 33 bp, Homo sapien
gtagttcttatcttccaatgggttacaggatta

SEQ ID NO: 35624 - DNA, 33 bp, Homo sapien
gtagttcttatcttccgatgggttacaggatta

SEQ ID NO: 35625 - DNA, 33 bp, Homo sapien
cctaacagcattttcaggtagcatttcaaattt

SEQ ID NO: 35626 - DNA, 33 bp, Homo sapien
cctaacagcattttcatgtagcatttcaaattt

SEQ ID NO: 35627 - DNA, 33 bp, Homo sapien
gtaccctgattgaagaagactgatgcttaacag

SEQ ID NO: 35628 - DNA, 33 bp, Homo sapien
gtaccctgattgaagaggactgatgcttaacag

SEQ ID NO: 35629 - DNA, 33 bp, Homo sapien
aatagtgaaacctagaatatacggatcattgtt

SEQ ID NO: 35630 - DNA, 33 bp, Homo sapien
aatagtgaaacctagactatacggatcattgtt

SEQ ID NO: 35631 - DNA, 33 bp, Homo sapien
ttttgccaattctcaagtatttcaaatccataa

SEQ ID NO: 35632 - DNA, 33 bp, Homo sapien
ttttgccaattctcaattatttcaaatccataa

SEQ ID NO: 35633 - DNA, 33 bp, Homo sapien
tgtcttctttgacttccagcatagcctctgata

SEQ ID NO: 35634 - DNA, 33 bp, Homo sapien
tgtcttctttgacttctagcatagcctctgata

SEQ ID NO: 35635 - DNA, 33 bp, Homo sapien
gcagtctgtctgatcacgcaggaccctggttca

SEQ ID NO: 35636 - DNA, 33 bp, Homo sapien
gcagtctgtctgatcatgcaggaccctggttca

SEQ ID NO: 35637 - DNA, 33 bp, Homo sapien
actgtatgtgtgaaatcagtgtgttgaatagcc

SEQ ID NO: 35638 - DNA, 33 bp, Homo sapien
actgtatgtgtgaaattagtgtgttgaatagcc

SEQ ID NO: 35639 - DNA, 33 bp, Homo sapien
aatatgcataagaatgacaaagacaaattttag

SEQ ID NO: 35640 - DNA, 33 bp, Homo sapien
aatatgcataagaatggcaaagacaaattttag

SEQ ID NO: 35641 - DNA, 33 bp, Homo sapien
agggctgtctaaaaataaacagtgtcttctaca

SEQ ID NO: 35642 - DNA, 33 bp, Homo sapien
agggctgtctaaaaatgaacagtgtcttctaca

SEQ ID NO: 35643 - DNA, 33 bp, Homo sapien
tgtgacttgctacctccgaagaccttaactctg

SEQ ID NO: 35644 - DNA, 33 bp, Homo sapien
tgtgacttgctacctctgaagaccttaactctg

SEQ ID NO: 35645 - DNA, 33 bp, Homo sapien
gcttttctatacacatgaggcagaggaactttg

SEQ ID NO: 35646 - DNA, 33 bp, Homo sapien
gcttttctatacacattaggcagaggaactttg

SEQ ID NO: 35647 - DNA, 33 bp, Homo sapien
acctggctcttcttacactgcaattcaccgcct

SEQ ID NO: 35648 - DNA, 33 bp, Homo sapien
acctggctcttcttacgctgcaattcaccgcct

SEQ ID NO: 35649 - DNA, 33 bp, Homo sapien
cagtttgtagtggcccaaaacaattaaaatagt

SEQ ID NO: 35650 - DNA, 33 bp, Homo sapien
cagtttgtagtggcccgaaacaattaaaatagt

SEQ ID NO: 35651 - DNA, 33 bp, Homo sapien
acagaattataagtgcaagataattctcagaga

SEQ ID NO: 35652 - DNA, 33 bp, Homo sapien
acagaattataagtgccagataattctcagaga

SEQ ID NO: 35653 - DNA, 33 bp, Homo sapien
gctacaatataaacacaatgaaagcagggattt

SEQ ID NO: 35654 - DNA, 33 bp, Homo sapien
gctacaatataaacaccatgaaagcagggattt

SEQ ID NO: 35655 - DNA, 33 bp, Homo sapien
acccaaagtccacagacgatacttgatctagcc

SEQ ID NO: 35656 - DNA, 33 bp, Homo sapien
acccaaagtccacagatgatacttgatctagcc

SEQ ID NO: 35657 - DNA, 33 bp, Homo sapien
ccccagaaacacaagcacaaaacaaaaaccaac

SEQ ID NO: 35658 - DNA, 33 bp, Homo sapien
ccccagaaacacaagctcaaaacaaaaaccaac

SEQ ID NO: 35659 - DNA, 33 bp, Homo sapien
gtaatgatatcttgaaccttaatggacatggag

SEQ ID NO: 35660 - DNA, 33 bp, Homo sapien
gtaatgatatcttgaatcttaatggacatggag

SEQ ID NO: 35661 - DNA, 33 bp, Homo sapien
attagattacaaaaaacagtgtcttccatctag

SEQ ID NO: 35662 - DNA, 33 bp, Homo sapien
attagattacaaaaaatagtgtcttccatctag

SEQ ID NO: 35663 - DNA, 33 bp, Homo sapien
catcattagctgaaagaaaaagagtgataaaat

SEQ ID NO: 35664 - DNA, 33 bp, Homo sapien
catcattagctgaaaggaaaagagtgataaaat

SEQ ID NO: 35665 - DNA, 33 bp, Homo sapien
ttcaaagcttgtttccagaattttaaggtaagt

SEQ ID NO: 35666 - DNA, 33 bp, Homo sapien
ttcaaagcttgtttccggaattttaaggtaagt

SEQ ID NO: 35667 - DNA, 33 bp, Homo sapien
ccaaagtctcatctgagataagacaagtccctt

SEQ ID NO: 35668 - DNA, 33 bp, Homo sapien
ccaaagtctcatctgatataagacaagtccctt

SEQ ID NO: 35669 - DNA, 33 bp, Homo sapien
ggcagtgttctatgaacgttagttaggtaagat

SEQ ID NO: 35670 - DNA, 33 bp, Homo sapien
ggcagtgttctatgaatgttagttaggtaagat

SEQ ID NO: 35671 - DNA, 33 bp, Homo sapien
attggatctctacatcacattataaacaaaaaa

SEQ ID NO: 35672 - DNA, 33 bp, Homo sapien
attggatctctacatctcattataaacaaaaaa

SEQ ID NO: 35673 - DNA, 33 bp, Homo sapien
acattagccatattcaaatcatagtattgtact

SEQ ID NO: 35674 - DNA, 33 bp, Homo sapien
acattagccatattcacatcatagtattgtact

SEQ ID NO: 35675 - DNA, 33 bp, Homo sapien
acctgggctttccatagacctgaaaagagagaa

SEQ ID NO: 35676 - DNA, 33 bp, Homo sapien
acctgggctttccatatacctgaaaagagagaa

SEQ ID NO: 35677 - DNA, 33 bp, Homo sapien
ataaagtgtttaaaaccagtcacctttctctct

SEQ ID NO: 35678 - DNA, 33 bp, Homo sapien
ataaagtgtttaaaactagtcacctttctctct

SEQ ID NO: 35679 - DNA, 33 bp, Homo sapien
cttgatactggtgagcaagcagtgactgagaaa

SEQ ID NO: 35680 - DNA, 33 bp, Homo sapien
cttgatactggtgagcgagcagtgactgagaaa

SEQ ID NO: 35681 - DNA, 33 bp, Homo sapien
tctaaggtcatcctgcagagtcagttctcattt

SEQ ID NO: 35682 - DNA, 33 bp, Homo sapien
tctaaggtcatcctgcggagtcagttctcattt

SEQ ID NO: 35683 - DNA, 33 bp, Homo sapien
gagtttattcaggaagcacaatgtgaaattagt

SEQ ID NO: 35684 - DNA, 33 bp, Homo sapien
gagtttattcaggaaggacaatgtgaaattagt

SEQ ID NO: 35685 - DNA, 33 bp, Homo sapien
actgtgaccttcagtacgaggaaatagctatca

SEQ ID NO: 35686 - DNA, 33 bp, Homo sapien
actgtgaccttcagtatgaggaaatagctatca

SEQ ID NO: 35687 - DNA, 33 bp, Homo sapien
caagttgtgcacgacacattaagcacatcactg

SEQ ID NO: 35688 - DNA, 33 bp, Homo sapien
caagttgtgcacgacatattaagcacatcactg

SEQ ID NO: 35689 - DNA, 33 bp, Homo sapien
cctgttgcagggatcactctgtgcaatcgtatg

SEQ ID NO: 35690 - DNA, 33 bp, Homo sapien
cctgttgcagggatcattctgtgcaatcgtatg

SEQ ID NO: 35691 - DNA, 33 bp, Homo sapien
ttatggagccattgtaacactaagccacttgaa

SEQ ID NO: 35692 - DNA, 33 bp, Homo sapien
ttatggagccattgtagcactaagccacttgaa

SEQ ID NO: 35693 - DNA, 33 bp, Homo sapien
atgctattccaagaacaatcattgagtttaata

SEQ ID NO: 35694 - DNA, 33 bp, Homo sapien
atgctattccaagaacgatcattgagtttaata

SEQ ID NO: 35695 - DNA, 33 bp, Homo sapien
ctcaggtgcagaaagacagattgtcacaattat

SEQ ID NO: 35696 - DNA, 33 bp, Homo sapien
ctcaggtgcagaaagatagattgtcacaattat

SEQ ID NO: 35697 - DNA, 33 bp, Homo sapien
gcagaggcatacttggaagaaacagataataag

SEQ ID NO: 35698 - DNA, 33 bp, Homo sapien
gcagaggcatacttggtagaaacagataataag

SEQ ID NO: 35699 - DNA, 33 bp, Homo sapien
agcctccaaatccacacagtaacattggtgtgc

SEQ ID NO: 35700 - DNA, 33 bp, Homo sapien
agcctccaaatccacatagtaacattggtgtgc

SEQ ID NO: 35701 - DNA, 33 bp, Homo sapien
ttggtcataaggaaagcatcacagaattgctct

SEQ ID NO: 35702 - DNA, 33 bp, Homo sapien
ttggtcataaggaaaggatcacagaattgctct

SEQ ID NO: 35703 - DNA, 33 bp, Homo sapien
tctgcagaattaaagacgtgatgtgacaaaaga

SEQ ID NO: 35704 - DNA, 33 bp, Homo sapien
tctgcagaattaaagatgtgatgtgacaaaaga

SEQ ID NO: 35705 - DNA, 33 bp, Homo sapien
ccaaattgctcaaaccaacctagtctaaatctg

SEQ ID NO: 35706 - DNA, 33 bp, Homo sapien
ccaaattgctcaaaccgacctagtctaaatctg

SEQ ID NO: 35707 - DNA, 33 bp, Homo sapien
tggaacaaaagtgtaacatcaagcatctataag

SEQ ID NO: 35708 - DNA, 33 bp, Homo sapien
tggaacaaaagtgtaatatcaagcatctataag

SEQ ID NO: 35709 - DNA, 33 bp, Homo sapien
gaacattataagcccactgagattacacaagtg

SEQ ID NO: 35710 - DNA, 33 bp, Homo sapien
gaacattataagcccattgagattacacaagtg

SEQ ID NO: 35711 - DNA, 33 bp, Homo sapien
aaatccctctgaaaaaagagtatgcactagaca

SEQ ID NO: 35712 - DNA, 33 bp, Homo sapien
aaatccctctgaaaaaggagtatgcactagaca

SEQ ID NO: 35713 - DNA, 33 bp, Homo sapien
aaactggagataagtggaaagtacatatttgtc

SEQ ID NO: 35714 - DNA, 33 bp, Homo sapien
aaactggagataagtgtaaagtacatatttgtc

SEQ ID NO: 35715 - DNA, 33 bp, Homo sapien
tactcatttctttattgaagtgagccaccccaa

SEQ ID NO: 35716 - DNA, 33 bp, Homo sapien
tactcatttctttatttaagtgagccaccccaa

SEQ ID NO: 35717 - DNA, 33 bp, Homo sapien
cattttaataataaccactgtgactggtgtaag

SEQ ID NO: 35718 - DNA, 33 bp, Homo sapien
cattttaataataacctctgtgactggtgtaag

SEQ ID NO: 35719 - DNA, 33 bp, Homo sapien
tcctgcaatgactgaacataagtcccctccgaa

SEQ ID NO: 35720 - DNA, 33 bp, Homo sapien
tcctgcaatgactgaagataagtcccctccgaa

SEQ ID NO: 35721 - DNA, 33 bp, Homo sapien
gataaaatgctataaacggggtctatttgtata

SEQ ID NO: 35722 - DNA, 33 bp, Homo sapien
gataaaatgctataaatggggtctatttgtata

SEQ ID NO: 35723 - DNA, 33 bp, Homo sapien
ggtattacaagtggtcagaaagaaaagacaaat

SEQ ID NO: 35724 - DNA, 33 bp, Homo sapien
ggtattacaagtggtcggaaagaaaagacaaat

SEQ ID NO: 35725 - DNA, 33 bp, Homo sapien
tggaaagtgtagtaatcataacagaggctggca

SEQ ID NO: 35726 - DNA, 33 bp, Homo sapien
tggaaagtgtagtaattataacagaggctggca

SEQ ID NO: 35727 - DNA, 33 bp, Homo sapien
tgatgttgagttgtaaagttctgtgtcttattt

SEQ ID NO: 35728 - DNA, 33 bp, Homo sapien
tgatgttgagttgtaaggttctgtgtcttattt

SEQ ID NO: 35729 - DNA, 33 bp, Homo sapien
ttgtattcttggataacgtagtaagaacaatgt

SEQ ID NO: 35730 - DNA, 33 bp, Homo sapien
ttgtattcttggataatgtagtaagaacaatgt

SEQ ID NO: 35731 - DNA, 33 bp, Homo sapien
tgtcttttggtagctgcagcctcttgtattctt

SEQ ID NO: 35732 - DNA, 33 bp, Homo sapien
tgtcttttggtagctgtagcctcttgtattctt

SEQ ID NO: 35733 - DNA, 33 bp, Homo sapien
tctgatgctatgacacaatgggggctctgctga

SEQ ID NO: 35734 - DNA, 33 bp, Homo sapien
tctgatgctatgacacgatgggggctctgctga

SEQ ID NO: 35735 - DNA, 33 bp, Homo sapien
ggagtggatctcaacaatcccttcaagcctcca

SEQ ID NO: 35736 - DNA, 33 bp, Homo sapien
ggagtggatctcaacagtcccttcaagcctcca

SEQ ID NO: 35737 - DNA, 33 bp, Homo sapien
tgaactgccactcctgaaagctccataaagtga

SEQ ID NO: 35738 - DNA, 33 bp, Homo sapien
tgaactgccactcctgtaagctccataaagtga

SEQ ID NO: 35739 - DNA, 33 bp, Homo sapien
agaatacaaagagtctgaatgaactgccactcc

SEQ ID NO: 35740 - DNA, 33 bp, Homo sapien
agaatacaaagagtcttaatgaactgccactcc

SEQ ID NO: 35741 - DNA, 33 bp, Homo sapien
agatgaaattcagtaaaagaacacatccaacag

SEQ ID NO: 35742 - DNA, 33 bp, Homo sapien
agatgaaattcagtaagagaacacatccaacag

SEQ ID NO: 35743 - DNA, 33 bp, Homo sapien
ttttacagaggtctaaaagaacgtggcaaaaaa

SEQ ID NO: 35744 - DNA, 33 bp, Homo sapien
ttttacagaggtctaagagaacgtggcaaaaaa

SEQ ID NO: 35745 - DNA, 33 bp, Homo sapien
aagtgggagctttgcacgaggaacaatacagat

SEQ ID NO: 35746 - DNA, 33 bp, Homo sapien
aagtgggagctttgcaggaggaacaatacagat

SEQ ID NO: 35747 - DNA, 33 bp, Homo sapien
ctatttacctgttttacgtacatgatctcattt

SEQ ID NO: 35748 - DNA, 33 bp, Homo sapien
ctatttacctgttttatgtacatgatctcattt

SEQ ID NO: 35749 - DNA, 33 bp, Homo sapien
catttgttatgcctttaaaaactagtttctata

SEQ ID NO: 35750 - DNA, 33 bp, Homo sapien
catttgttatgccttttaaaactagtttctata

SEQ ID NO: 35751 - DNA, 33 bp, Homo sapien
cccaaagcaggactacaacactgggatacatgc

SEQ ID NO: 35752 - DNA, 33 bp, Homo sapien
cccaaagcaggactacgacactgggatacatgc

SEQ ID NO: 35753 - DNA, 33 bp, Homo sapien
tcttgttcctttcaaaataatctcccctgagca

SEQ ID NO: 35754 - DNA, 33 bp, Homo sapien
tcttgttcctttcaaagtaatctcccctgagca

SEQ ID NO: 35755 - DNA, 33 bp, Homo sapien
acatgccagatatcagcccaggcgaagctgaat

SEQ ID NO: 35756 - DNA, 33 bp, Homo sapien
acatgccagatatcagtccaggcgaagctgaat

SEQ ID NO: 35757 - DNA, 33 bp, Homo sapien
gttttctattttggtaccatgtttcactcagtt

SEQ ID NO: 35758 - DNA, 33 bp, Homo sapien
gttttctattttggtatcatgtttcactcagtt

SEQ ID NO: 35759 - DNA, 33 bp, Homo sapien
cagatttagcatggtacaattcagcgactatta

SEQ ID NO: 35760 - DNA, 33 bp, Homo sapien
cagatttagcatggtataattcagcgactatta

SEQ ID NO: 35761 - DNA, 33 bp, Homo sapien
aggttttgaagagcgacgtgagagagttttctt

SEQ ID NO: 35762 - DNA, 33 bp, Homo sapien
aggttttgaagagcgatgtgagagagttttctt

SEQ ID NO: 35763 - DNA, 33 bp, Homo sapien
gtcaagataaaacgccaaggaggagcatagcag

SEQ ID NO: 35764 - DNA, 33 bp, Homo sapien
gtcaagataaaacgcctaggaggagcatagcag

SEQ ID NO: 35765 - DNA, 33 bp, Homo sapien
ttagttgcatattctacaacacatggtttcctc

SEQ ID NO: 35766 - DNA, 33 bp, Homo sapien
ttagttgcatattctagaacacatggtttcctc

SEQ ID NO: 35767 - DNA, 33 bp, Homo sapien
gaaccaaatatgtccacgcatagttctctagtc

SEQ ID NO: 35768 - DNA, 33 bp, Homo sapien
gaaccaaatatgtccatgcatagttctctagtc

SEQ ID NO: 35769 - DNA, 33 bp, Homo sapien
aaggaactagggtgtcactgtgcagacttagaa

SEQ ID NO: 35770 - DNA, 33 bp, Homo sapien
aaggaactagggtgtcgctgtgcagacttagaa

SEQ ID NO: 35771 - DNA, 33 bp, Homo sapien
agcagcatgatctagacaattgtatttggctaa

SEQ ID NO: 35772 - DNA, 33 bp, Homo sapien
agcagcatgatctagataattgtatttggctaa

SEQ ID NO: 35773 - DNA, 33 bp, Homo sapien
tttacttctgttgtaacgctgactggagcaaag

SEQ ID NO: 35774 - DNA, 33 bp, Homo sapien
tttacttctgttgtaatgctgactggagcaaag

SEQ ID NO: 35775 - DNA, 33 bp, Homo sapien
ccagcaacgttgccacaatgaacatccttgaca

SEQ ID NO: 35776 - DNA, 33 bp, Homo sapien
ccagcaacgttgccacgatgaacatccttgaca

SEQ ID NO: 35777 - DNA, 33 bp, Homo sapien
aataggcactgttaaccgtccactctttcttga

SEQ ID NO: 35778 - DNA, 33 bp, Homo sapien
aataggcactgttaactgtccactctttcttga

SEQ ID NO: 35779 - DNA, 33 bp, Homo sapien
agattcaaaatctaaaacatgtctgatattgat

SEQ ID NO: 35780 - DNA, 33 bp, Homo sapien
agattcaaaatctaaagcatgtctgatattgat

SEQ ID NO: 35781 - DNA, 33 bp, Homo sapien
taggatatcactttaactggagagagtattcta

SEQ ID NO: 35782 - DNA, 33 bp, Homo sapien
taggatatcactttaattggagagagtattcta

SEQ ID NO: 35783 - DNA, 33 bp, Homo sapien
aatgaggaaactattaaaagcgtcacaactgga

SEQ ID NO: 35784 - DNA, 33 bp, Homo sapien
aatgaggaaactattacaagcgtcacaactgga

SEQ ID NO: 35785 - DNA, 33 bp, Homo sapien
tgtcctaaccattataacctacactaccttcaa

SEQ ID NO: 35786 - DNA, 33 bp, Homo sapien
tgtcctaaccattataccctacactaccttcaa

SEQ ID NO: 35787 - DNA, 33 bp, Homo sapien
ctcccctattctccaacgtaagatggaccagcc

SEQ ID NO: 35788 - DNA, 33 bp, Homo sapien
ctcccctattctccaatgtaagatggaccagcc

SEQ ID NO: 35789 - DNA, 33 bp, Homo sapien
ggtgtctggtgttaaccgacccaagatgatgca

SEQ ID NO: 35790 - DNA, 33 bp, Homo sapien
ggtgtctggtgttaactgacccaagatgatgca

SEQ ID NO: 35791 - DNA, 33 bp, Homo sapien
taagtgagaaatggaaatgcacgcttgttactg

SEQ ID NO: 35792 - DNA, 33 bp, Homo sapien
taagtgagaaatggaagtgcacgcttgttactg

SEQ ID NO: 35793 - DNA, 33 bp, Homo sapien
aaatcgtgtcctaataaagcgtggcagaaattt

SEQ ID NO: 35794 - DNA, 33 bp, Homo sapien
aaatcgtgtcctaatagagcgtggcagaaattt

SEQ ID NO: 35795 - DNA, 33 bp, Homo sapien
ctggccaactttatcaagctctaattcagcttc

SEQ ID NO: 35796 - DNA, 33 bp, Homo sapien
ctggccaactttatcatgctctaattcagcttc

SEQ ID NO: 35797 - DNA, 33 bp, Homo sapien
aaaatctatggtccaccacagacggactttctc

SEQ ID NO: 35798 - DNA, 33 bp, Homo sapien
aaaatctatggtccactacagacggactttctc

SEQ ID NO: 35799 - DNA, 33 bp, Homo sapien
gagaggcctttcataactcttttgcatcccttt

SEQ ID NO: 35800 - DNA, 33 bp, Homo sapien
gagaggcctttcataagtcttttgcatcccttt

SEQ ID NO: 35801 - DNA, 33 bp, Homo sapien
aggtgaaggttgcctagaagaaggtcaggcaaa

SEQ ID NO: 35802 - DNA, 33 bp, Homo sapien
aggtgaaggttgcctataagaaggtcaggcaaa

SEQ ID NO: 35803 - DNA, 33 bp, Homo sapien
cctcattaaggccaccccacaaatgaaactcac

SEQ ID NO: 35804 - DNA, 33 bp, Homo sapien
cctcattaaggccacctcacaaatgaaactcac

SEQ ID NO: 35805 - DNA, 33 bp, Homo sapien
atggtggctcataaaaacttctccacttaattc

SEQ ID NO: 35806 - DNA, 33 bp, Homo sapien
atggtggctcataaaaccttctccacttaattc

SEQ ID NO: 35807 - DNA, 33 bp, Homo sapien
tctacttctactccaggctacattaaaatctac

SEQ ID NO: 35808 - DNA, 33 bp, Homo sapien
tctacttctactccagtctacattaaaatctac

SEQ ID NO: 35809 - DNA, 33 bp, Homo sapien
tgtccatgtttacacactattgtttccacttat

SEQ ID NO: 35810 - DNA, 33 bp, Homo sapien
tgtccatgtttacacagtattgtttccacttat

SEQ ID NO: 35811 - DNA, 33 bp, Homo sapien
atcacagaatcagatgcaaccttaggtcagatt

SEQ ID NO: 35812 - DNA, 33 bp, Homo sapien
atcacagaatcagatgtaaccttaggtcagatt

SEQ ID NO: 35813 - DNA, 33 bp, Homo sapien
gctgccctgacactgccgacattttcagattcc

SEQ ID NO: 35814 - DNA, 33 bp, Homo sapien
gctgccctgacactgctgacattttcagattcc

SEQ ID NO: 35815 - DNA, 33 bp, Homo sapien
cctctattggactagactcataagaggattctt

SEQ ID NO: 35816 - DNA, 33 bp, Homo sapien
cctctattggactagattcataagaggattctt

SEQ ID NO: 35817 - DNA, 33 bp, Homo sapien
ccataaatgggacatacgtaatagaacgaattc

SEQ ID NO: 35818 - DNA, 33 bp, Homo sapien
ccataaatgggacatatgtaatagaacgaattc

SEQ ID NO: 35819 - DNA, 33 bp, Homo sapien
gccttttcgaaagaagaacagataagtatgagc

SEQ ID NO: 35820 - DNA, 33 bp, Homo sapien
gccttttcgaaagaagcacagataagtatgagc

SEQ ID NO: 35821 - DNA, 33 bp, Homo sapien
gtggatttgtggctgacgactgggttatatata

SEQ ID NO: 35822 - DNA, 33 bp, Homo sapien
gtggatttgtggctgatgactgggttatatata

SEQ ID NO: 35823 - DNA, 33 bp, Homo sapien
atcaaggtggtgctagccactagaaagaccaaa

SEQ ID NO: 35824 - DNA, 33 bp, Homo sapien
atcaaggtggtgctagtcactagaaagaccaaa

SEQ ID NO: 35825 - DNA, 33 bp, Homo sapien
tagtttgtgatatgcactctctgtaatggtttg

SEQ ID NO: 35826 - DNA, 33 bp, Homo sapien
tagtttgtgatatgcagtctctgtaatggtttg

SEQ ID NO: 35827 - DNA, 33 bp, Homo sapien
ttctgttttacatgaaggaccacagttgtaatg

SEQ ID NO: 35828 - DNA, 33 bp, Homo sapien
ttctgttttacatgaatgaccacagttgtaatg

SEQ ID NO: 35829 - DNA, 33 bp, Homo sapien
gccacacccttagccaatcttgggctggatttc

SEQ ID NO: 35830 - DNA, 33 bp, Homo sapien
gccacacccttagccagtcttgggctggatttc

SEQ ID NO: 35831 - DNA, 33 bp, Homo sapien
cctccattatgttaacagtagaatgtcaagaca

SEQ ID NO: 35832 - DNA, 33 bp, Homo sapien
cctccattatgttaactgtagaatgtcaagaca

SEQ ID NO: 35833 - DNA, 33 bp, Homo sapien
tccagaatataatgcacaccaagacatgaatga

SEQ ID NO: 35834 - DNA, 33 bp, Homo sapien
tccagaatataatgcataccaagacatgaatga

SEQ ID NO: 35835 - DNA, 33 bp, Homo sapien
gtgtaattgtaaaatacggcactagagaaattg

SEQ ID NO: 35836 - DNA, 33 bp, Homo sapien
gtgtaattgtaaaatatggcactagagaaattg

SEQ ID NO: 35837 - DNA, 33 bp, Homo sapien
ttatttaagctgaatagaacttttgagatgata

SEQ ID NO: 35838 - DNA, 33 bp, Homo sapien
ttatttaagctgaatataacttttgagatgata

SEQ ID NO: 35839 - DNA, 33 bp, Homo sapien
agtggcatgcttcaccaggaagagttcagcttc

SEQ ID NO: 35840 - DNA, 33 bp, Homo sapien
agtggcatgcttcaccgggaagagttcagcttc

SEQ ID NO: 35841 - DNA, 33 bp, Homo sapien
tgtagcaggctgggaaataaatggaatcatcat

SEQ ID NO: 35842 - DNA, 33 bp, Homo sapien
tgtagcaggctgggaagtaaatggaatcatcat

SEQ ID NO: 35843 - DNA, 33 bp, Homo sapien
aaatagaagcaatactgaatcactaaaaaggct

SEQ ID NO: 35844 - DNA, 33 bp, Homo sapien
aaatagaagcaatacttaatcactaaaaaggct

SEQ ID NO: 35845 - DNA, 33 bp, Homo sapien
atatataacaaattcaataagagtgaggagaat

SEQ ID NO: 35846 - DNA, 33 bp, Homo sapien
atatataacaaattcagtaagagtgaggagaat

SEQ ID NO: 35847 - DNA, 33 bp, Homo sapien
aacaggctgaaattttaaaaaagacgtatgtgg

SEQ ID NO: 35848 - DNA, 33 bp, Homo sapien
aacaggctgaaatttttaaaaagacgtatgtgg

SEQ ID NO: 35849 - DNA, 33 bp, Homo sapien
cagttgtgtcccttgacagttaatactaaaacc

SEQ ID NO: 35850 - DNA, 33 bp, Homo sapien
cagttgtgtcccttgatagttaatactaaaacc

SEQ ID NO: 35851 - DNA, 33 bp, Homo sapien
cattcttatccttgaaactcatagctggctaga

SEQ ID NO: 35852 - DNA, 33 bp, Homo sapien
cattcttatccttgaacctcatagctggctaga

SEQ ID NO: 35853 - DNA, 33 bp, Homo sapien
aagtcctctgtacttcaccacttttctcacctc

SEQ ID NO: 35854 - DNA, 33 bp, Homo sapien
aagtcctctgtacttcgccacttttctcacctc

SEQ ID NO: 35855 - DNA, 33 bp, Homo sapien
gctctcatagttcagacgtgagttagttattac

SEQ ID NO: 35856 - DNA, 33 bp, Homo sapien
gctctcatagttcagatgtgagttagttattac

SEQ ID NO: 35857 - DNA, 33 bp, Homo sapien
agttactttttaaggaagcttagtatggcctgg

SEQ ID NO: 35858 - DNA, 33 bp, Homo sapien
agttactttttaaggatgcttagtatggcctgg

SEQ ID NO: 35859 - DNA, 33 bp, Homo sapien
tattgttattgtttcagctctatgactgtagga

SEQ ID NO: 35860 - DNA, 33 bp, Homo sapien
tattgttattgtttcatctctatgactgtagga

SEQ ID NO: 35861 - DNA, 33 bp, Homo sapien
cagggaggaatagcaagtggctgtattaaatag

SEQ ID NO: 35862 - DNA, 33 bp, Homo sapien
cagggaggaatagcaattggctgtattaaatag

SEQ ID NO: 35863 - DNA, 33 bp, Homo sapien
tgggagttgtctaggcaaagagggaagcagggc

SEQ ID NO: 35864 - DNA, 33 bp, Homo sapien
tgggagttgtctaggcgaagagggaagcagggc

SEQ ID NO: 35865 - DNA, 33 bp, Homo sapien
agtttgagggaagagcagagaaagagcttaaac

SEQ ID NO: 35866 - DNA, 33 bp, Homo sapien
agtttgagggaagagcggagaaagagcttaaac

SEQ ID NO: 35867 - DNA, 33 bp, Homo sapien
aggttctaaggtaagacagtgtcaggcatgctt

SEQ ID NO: 35868 - DNA, 33 bp, Homo sapien
aggttctaaggtaagagagtgtcaggcatgctt

SEQ ID NO: 35869 - DNA, 33 bp, Homo sapien
ccaaacaatcaagcaaatatacagaataattgc

SEQ ID NO: 35870 - DNA, 33 bp, Homo sapien
ccaaacaatcaagcaactatacagaataattgc

SEQ ID NO: 35871 - DNA, 33 bp, Homo sapien
ttaaatagattggcaacaccgaatgttgatgaa

SEQ ID NO: 35872 - DNA, 33 bp, Homo sapien
ttaaatagattggcaataccgaatgttgatgaa

SEQ ID NO: 35873 - DNA, 33 bp, Homo sapien
tttttgtttagaaaccagaatgttggagattaa

SEQ ID NO: 35874 - DNA, 33 bp, Homo sapien
tttttgtttagaaaccggaatgttggagattaa

SEQ ID NO: 35875 - DNA, 33 bp, Homo sapien
gtcctgtatcagaataatatgtgttccttgttg

SEQ ID NO: 35876 - DNA, 33 bp, Homo sapien
gtcctgtatcagaatagtatgtgttccttgttg

SEQ ID NO: 35877 - DNA, 33 bp, Homo sapien
tctctaagtgataatacatggactcaagctata

SEQ ID NO: 35878 - DNA, 33 bp, Homo sapien
tctctaagtgataatatatggactcaagctata

SEQ ID NO: 35879 - DNA, 33 bp, Homo sapien
gcacatcactgttttacctcacagcatataccg

SEQ ID NO: 35880 - DNA, 33 bp, Homo sapien
gcacatcactgttttatctcacagcatataccg

SEQ ID NO: 35881 - DNA, 33 bp, Homo sapien
gtaaattaagttgctccctttgccaaaaaattg

SEQ ID NO: 35882 - DNA, 33 bp, Homo sapien
gtaaattaagttgctcgctttgccaaaaaattg

SEQ ID NO: 35883 - DNA, 33 bp, Homo sapien
ggtctttcttgggggacagctttcaaatatgtc

SEQ ID NO: 35884 - DNA, 33 bp, Homo sapien
ggtctttcttgggggatagctttcaaatatgtc

SEQ ID NO: 35885 - DNA, 33 bp, Homo sapien
gggtggtccggaatggcggaagtaaatcgacag

SEQ ID NO: 35886 - DNA, 33 bp, Homo sapien
gggtggtccggaatggtggaagtaaatcgacag

SEQ ID NO: 35887 - DNA, 33 bp, Homo sapien
ttatttgcaaaatctgaaactagaaaatttaaa

SEQ ID NO: 35888 - DNA, 33 bp, Homo sapien
ttatttgcaaaatctggaactagaaaatttaaa

SEQ ID NO: 35889 - DNA, 33 bp, Homo sapien
atcctttttagtgtcacagttgaagattttgag

SEQ ID NO: 35890 - DNA, 33 bp, Homo sapien
atcctttttagtgtcagagttgaagattttgag

SEQ ID NO: 35891 - DNA, 33 bp, Homo sapien
cttatgaggaaaatgacaaggttagggcacaac

SEQ ID NO: 35892 - DNA, 33 bp, Homo sapien
cttatgaggaaaatgataaggttagggcacaac

SEQ ID NO: 35893 - DNA, 33 bp, Homo sapien
ttggaaagctgaagtacgtggttccttgtagaa

SEQ ID NO: 35894 - DNA, 33 bp, Homo sapien
ttggaaagctgaagtatgtggttccttgtagaa

SEQ ID NO: 35895 - DNA, 33 bp, Homo sapien
ataactgccaaaataacgtcatgttaattccaa

SEQ ID NO: 35896 - DNA, 33 bp, Homo sapien
ataactgccaaaataatgtcatgttaattccaa

SEQ ID NO: 35897 - DNA, 33 bp, Homo sapien
attgtatttagaaggaaaaataagaccaaagaa

SEQ ID NO: 35898 - DNA, 33 bp, Homo sapien
attgtatttagaaggagaaataagaccaaagaa

SEQ ID NO: 35899 - DNA, 33 bp, Homo sapien
tctgggtgtcagatataaacaagggctgctcag

SEQ ID NO: 35900 - DNA, 33 bp, Homo sapien
tctgggtgtcagatatgaacaagggctgctcag

SEQ ID NO: 35901 - DNA, 33 bp, Homo sapien
ggacagattttggcaaataagtagagggaatat

SEQ ID NO: 35902 - DNA, 33 bp, Homo sapien
ggacagattttggcaactaagtagagggaatat

SEQ ID NO: 35903 - DNA, 33 bp, Homo sapien
cagactcaaagcaacacacacattgccaggccc

SEQ ID NO: 35904 - DNA, 33 bp, Homo sapien
cagactcaaagcaacagacacattgccaggccc

SEQ ID NO: 35905 - DNA, 33 bp, Homo sapien
agggattctgaaagagaaagcaatatgttttaa

SEQ ID NO: 35906 - DNA, 33 bp, Homo sapien
agggattctgaaagaggaagcaatatgttttaa

SEQ ID NO: 35907 - DNA, 33 bp, Homo sapien
atatatgcttcacaaaaacattaatgcacaaat

SEQ ID NO: 35908 - DNA, 33 bp, Homo sapien
atatatgcttcacaaagacattaatgcacaaat

SEQ ID NO: 35909 - DNA, 33 bp, Homo sapien
gggtaaatatcaagaaacgcagttactggccat

SEQ ID NO: 35910 - DNA, 33 bp, Homo sapien
gggtaaatatcaagaagcgcagttactggccat

SEQ ID NO: 35911 - DNA, 33 bp, Homo sapien
caggctcaaattcgaaccagcaaaattaaactt

SEQ ID NO: 35912 - DNA, 33 bp, Homo sapien
caggctcaaattcgaagcagcaaaattaaactt

SEQ ID NO: 35913 - DNA, 33 bp, Homo sapien
tgcacatattttgacactaggaagtgagtgagg

SEQ ID NO: 35914 - DNA, 33 bp, Homo sapien
tgcacatattttgacattaggaagtgagtgagg

SEQ ID NO: 35915 - DNA, 33 bp, Homo sapien
ggatatgcagttgaaacatctatggaaattatc

SEQ ID NO: 35916 - DNA, 33 bp, Homo sapien
ggatatgcagttgaaatatctatggaaattatc

SEQ ID NO: 35917 - DNA, 33 bp, Homo sapien
cctgatagtcaacgtaataaagtttaaggatgc

SEQ ID NO: 35918 - DNA, 33 bp, Homo sapien
cctgatagtcaacgtattaaagtttaaggatgc

SEQ ID NO: 35919 - DNA, 33 bp, Homo sapien
taataagtgaactgaaaggatttgtgaatgatt

SEQ ID NO: 35920 - DNA, 33 bp, Homo sapien
taataagtgaactgaatggatttgtgaatgatt

SEQ ID NO: 35921 - DNA, 33 bp, Homo sapien
gatcctttgtttccaaagcaactccatttcctt

SEQ ID NO: 35922 - DNA, 33 bp, Homo sapien
gatcctttgtttccaatgcaactccatttcctt

SEQ ID NO: 35923 - DNA, 33 bp, Homo sapien
ctgagaacttctaataactcagtgaaataagat

SEQ ID NO: 35924 - DNA, 33 bp, Homo sapien
ctgagaacttctaatagctcagtgaaataagat

SEQ ID NO: 35925 - DNA, 33 bp, Homo sapien
tctccatagagcatctcaaatcaacttgtaaca

SEQ ID NO: 35926 - DNA, 33 bp, Homo sapien
tctccatagagcatcttaaatcaacttgtaaca

SEQ ID NO: 35927 - DNA, 33 bp, Homo sapien
atttgacttaagttaccgaaccagagagctgcc

SEQ ID NO: 35928 - DNA, 33 bp, Homo sapien
atttgacttaagttactgaaccagagagctgcc

SEQ ID NO: 35929 - DNA, 33 bp, Homo sapien
tcttcaccaatactccacagctattgagactcc

SEQ ID NO: 35930 - DNA, 33 bp, Homo sapien
tcttcaccaatactccgcagctattgagactcc

SEQ ID NO: 35931 - DNA, 33 bp, Homo sapien
ttttaaatgttgaaaactaatgaacatatatag

SEQ ID NO: 35932 - DNA, 33 bp, Homo sapien
ttttaaatgttgaaaagtaatgaacatatatag

SEQ ID NO: 35933 - DNA, 33 bp, Homo sapien
gcctggtaataaatcaactttatgcagtatttt

SEQ ID NO: 35934 - DNA, 33 bp, Homo sapien
gcctggtaataaatcagctttatgcagtatttt

SEQ ID NO: 35935 - DNA, 33 bp, Homo sapien
tgattttccacactaacagtcttttgcatctac

SEQ ID NO: 35936 - DNA, 33 bp, Homo sapien
tgattttccacactaatagtcttttgcatctac

SEQ ID NO: 35937 - DNA, 33 bp, Homo sapien
ccgtcctggacattgaaagagtgctttgaattg

SEQ ID NO: 35938 - DNA, 33 bp, Homo sapien
ccgtcctggacattgagagagtgctttgaattg

SEQ ID NO: 35939 - DNA, 33 bp, Homo sapien
aacttatgactatgaacacccaagctgaggatg

SEQ ID NO: 35940 - DNA, 33 bp, Homo sapien
aacttatgactatgaagacccaagctgaggatg

SEQ ID NO: 35941 - DNA, 33 bp, Homo sapien
agggcctggaaaattaaggcaattgcttagggc

SEQ ID NO: 35942 - DNA, 33 bp, Homo sapien
agggcctggaaaattagggcaattgcttagggc

SEQ ID NO: 35943 - DNA, 33 bp, Homo sapien
aggaactgtggttggcgatcctctaggttctat

SEQ ID NO: 35944 - DNA, 33 bp, Homo sapien
aggaactgtggttggctatcctctaggttctat

SEQ ID NO: 35945 - DNA, 33 bp, Homo sapien
ttcaagttgccagttaacaagatatcagtcacc

SEQ ID NO: 35946 - DNA, 33 bp, Homo sapien
ttcaagttgccagttagcaagatatcagtcacc

SEQ ID NO: 35947 - DNA, 33 bp, Homo sapien
taaaaggtcttactaaatgtatacactctgtca

SEQ ID NO: 35948 - DNA, 33 bp, Homo sapien
taaaaggtcttactaattgtatacactctgtca

SEQ ID NO: 35949 - DNA, 33 bp, Homo sapien
tctctgcctggagatgaagtagagctctcttaa

SEQ ID NO: 35950 - DNA, 33 bp, Homo sapien
tctctgcctggagatggagtagagctctcttaa

SEQ ID NO: 35951 - DNA, 33 bp, Homo sapien
aggaagagaattgtaactgaaatgcattgcaac

SEQ ID NO: 35952 - DNA, 33 bp, Homo sapien
aggaagagaattgtaattgaaatgcattgcaac

SEQ ID NO: 35953 - DNA, 33 bp, Homo sapien
gttcacaatttcaaataacctctatgtgataat

SEQ ID NO: 35954 - DNA, 33 bp, Homo sapien
gttcacaatttcaaattacctctatgtgataat

SEQ ID NO: 35955 - DNA, 33 bp, Homo sapien
tgtaaaatgacaaatgaacccttaacagaataa

SEQ ID NO: 35956 - DNA, 33 bp, Homo sapien
tgtaaaatgacaaatggacccttaacagaataa

SEQ ID NO: 35957 - DNA, 33 bp, Homo sapien
ttcttccttaagttaccgcaggttagatttctg

SEQ ID NO: 35958 - DNA, 33 bp, Homo sapien
ttcttccttaagttactgcaggttagatttctg

SEQ ID NO: 35959 - DNA, 33 bp, Homo sapien
agagaattcatccataccttgtccaagaccacc

SEQ ID NO: 35960 - DNA, 33 bp, Homo sapien
agagaattcatccatatcttgtccaagaccacc

SEQ ID NO: 35961 - DNA, 33 bp, Homo sapien
tataaagtgatcaaaaacctcctgaagcatttt

SEQ ID NO: 35962 - DNA, 33 bp, Homo sapien
tataaagtgatcaaaatcctcctgaagcatttt

SEQ ID NO: 35963 - DNA, 33 bp, Homo sapien
gaggccatggccttcactcttataccaaaccac

SEQ ID NO: 35964 - DNA, 33 bp, Homo sapien
gaggccatggccttcattcttataccaaaccac

SEQ ID NO: 35965 - DNA, 33 bp, Homo sapien
aggagcagaggaaaagccaattttgcatttgtc

SEQ ID NO: 35966 - DNA, 33 bp, Homo sapien
aggagcagaggaaaagtcaattttgcatttgtc

SEQ ID NO: 35967 - DNA, 33 bp, Homo sapien
agatgtctaagaaacaacaaggtagagaagtcc

SEQ ID NO: 35968 - DNA, 33 bp, Homo sapien
agatgtctaagaaacagcaaggtagagaagtcc

SEQ ID NO: 35969 - DNA, 33 bp, Homo sapien
tagcaggggcaggaaccctcatggaaaacggtc

SEQ ID NO: 35970 - DNA, 33 bp, Homo sapien
tagcaggggcaggaactctcatggaaaacggtc

SEQ ID NO: 35971 - DNA, 33 bp, Homo sapien
ctaactggtcacagctaagcatttctctgggtt

SEQ ID NO: 35972 - DNA, 33 bp, Homo sapien
ctaactggtcacagctcagcatttctctgggtt

SEQ ID NO: 35973 - DNA, 33 bp, Homo sapien
ggggtctctatatacagtagcacacttctgccc

SEQ ID NO: 35974 - DNA, 33 bp, Homo sapien
ggggtctctatatacattagcacacttctgccc

SEQ ID NO: 35975 - DNA, 33 bp, Homo sapien
gaaaacctcatccaaaaaataacaaagcatagt

SEQ ID NO: 35976 - DNA, 33 bp, Homo sapien
gaaaacctcatccaaagaataacaaagcatagt

SEQ ID NO: 35977 - DNA, 33 bp, Homo sapien
ctattagtgcatcagagtaaaagcagttgtcat

SEQ ID NO: 35978 - DNA, 33 bp, Homo sapien
ctattagtgcatcagattaaaagcagttgtcat

SEQ ID NO: 35979 - DNA, 33 bp, Homo sapien
tttcatggggaatacaaaattggaataacgcct

SEQ ID NO: 35980 - DNA, 33 bp, Homo sapien
tttcatggggaatacacaattggaataacgcct

SEQ ID NO: 35981 - DNA, 33 bp, Homo sapien
tattttactcaaaagcagctcttctaaaattga

SEQ ID NO: 35982 - DNA, 33 bp, Homo sapien
tattttactcaaaagcggctcttctaaaattga

SEQ ID NO: 35983 - DNA, 33 bp, Homo sapien
ttggggacataagaccagaccagagagtgtggt

SEQ ID NO: 35984 - DNA, 33 bp, Homo sapien
ttggggacataagaccggaccagagagtgtggt

SEQ ID NO: 35985 - DNA, 33 bp, Homo sapien
attatgatggcatccacgtagccctggtaaatc

SEQ ID NO: 35986 - DNA, 33 bp, Homo sapien
attatgatggcatccatgtagccctggtaaatc

SEQ ID NO: 35987 - DNA, 33 bp, Homo sapien
tctttctactttacgacagtgtgacttacaatg

SEQ ID NO: 35988 - DNA, 33 bp, Homo sapien
tctttctactttacgatagtgtgacttacaatg

SEQ ID NO: 35989 - DNA, 33 bp, Homo sapien
gataagaagaggaatccagtagaggaaaagatt

SEQ ID NO: 35990 - DNA, 33 bp, Homo sapien
gataagaagaggaatcgagtagaggaaaagatt

SEQ ID NO: 35991 - DNA, 33 bp, Homo sapien
agcagcttcaatggaacgatgagaagtagaatc

SEQ ID NO: 35992 - DNA, 33 bp, Homo sapien
agcagcttcaatggaatgatgagaagtagaatc

SEQ ID NO: 35993 - DNA, 33 bp, Homo sapien
ctgctgactgcctcaccctgactcacaatggct

SEQ ID NO: 35994 - DNA, 33 bp, Homo sapien
ctgctgactgcctcactctgactcacaatggct

SEQ ID NO: 35995 - DNA, 33 bp, Homo sapien
gaaaacagaaaaatgacgtgatgaggaaaatgg

SEQ ID NO: 35996 - DNA, 33 bp, Homo sapien
gaaaacagaaaaatgaggtgatgaggaaaatgg

SEQ ID NO: 35997 - DNA, 33 bp, Homo sapien
cgtgacaaggaagaccaagatggaatatatgag

SEQ ID NO: 35998 - DNA, 33 bp, Homo sapien
cgtgacaaggaagaccgagatggaatatatgag

SEQ ID NO: 35999 - DNA, 33 bp, Homo sapien
gatatatagtaacacaactgcagagactagaaa

SEQ ID NO: 36000 - DNA, 33 bp, Homo sapien
gatatatagtaacacagctgcagagactagaaa

SEQ ID NO: 36001 - DNA, 33 bp, Homo sapien
ggaaagaattttgcaaaggactctccagctaac

SEQ ID NO: 36002 - DNA, 33 bp, Homo sapien
ggaaagaattttgcaagggactctccagctaac

SEQ ID NO: 36003 - DNA, 33 bp, Homo sapien
taaatttcagtcttaacgttatattgactcagc

SEQ ID NO: 36004 - DNA, 33 bp, Homo sapien
taaatttcagtcttaatgttatattgactcagc

SEQ ID NO: 36005 - DNA, 33 bp, Homo sapien
gaatatccagattacaactgtgcttatcctctt

SEQ ID NO: 36006 - DNA, 33 bp, Homo sapien
gaatatccagattacagctgtgcttatcctctt

SEQ ID NO: 36007 - DNA, 33 bp, Homo sapien
tatttatacttctaaccggatgaactcaccatg

SEQ ID NO: 36008 - DNA, 33 bp, Homo sapien
tatttatacttctaactggatgaactcaccatg

SEQ ID NO: 36009 - DNA, 33 bp, Homo sapien
catgttgtgagtagcactgatctagataattcc

SEQ ID NO: 36010 - DNA, 33 bp, Homo sapien
catgttgtgagtagcattgatctagataattcc

SEQ ID NO: 36011 - DNA, 33 bp, Homo sapien
ttttagtgatggaaaacttttaaatctgtagtt

SEQ ID NO: 36012 - DNA, 33 bp, Homo sapien
ttttagtgatggaaaatttttaaatctgtagtt

SEQ ID NO: 36013 - DNA, 33 bp, Homo sapien
cagctgatgaagggaacgcccaaagctggggag

SEQ ID NO: 36014 - DNA, 33 bp, Homo sapien
cagctgatgaagggaaggcccaaagctggggag

SEQ ID NO: 36015 - DNA, 33 bp, Homo sapien
gagttggcagagagcacattaagattttgctaa

SEQ ID NO: 36016 - DNA, 33 bp, Homo sapien
gagttggcagagagcagattaagattttgctaa

SEQ ID NO: 36017 - DNA, 33 bp, Homo sapien
tgctcacaaaacctccacacttgcctactacat

SEQ ID NO: 36018 - DNA, 33 bp, Homo sapien
tgctcacaaaacctccgcacttgcctactacat

SEQ ID NO: 36019 - DNA, 33 bp, Homo sapien
ttgctgttgacatttacacatttctttggacac

SEQ ID NO: 36020 - DNA, 33 bp, Homo sapien
ttgctgttgacatttatacatttctttggacac

SEQ ID NO: 36021 - DNA, 33 bp, Homo sapien
ggaataatagtcattgcagtctcaaaacggtgg

SEQ ID NO: 36022 - DNA, 33 bp, Homo sapien
ggaataatagtcattggagtctcaaaacggtgg

SEQ ID NO: 36023 - DNA, 33 bp, Homo sapien
tgatactggttacagccaaggttcaaaaaggaa

SEQ ID NO: 36024 - DNA, 33 bp, Homo sapien
tgatactggttacagctaaggttcaaaaaggaa

SEQ ID NO: 36025 - DNA, 33 bp, Homo sapien
ataaaaggaaaagaccaatgtttgcagtgtaaa

SEQ ID NO: 36026 - DNA, 33 bp, Homo sapien
ataaaaggaaaagaccgatgtttgcagtgtaaa

SEQ ID NO: 36027 - DNA, 33 bp, Homo sapien
aaattcaaaatttacaacatgaattcaacatac

SEQ ID NO: 36028 - DNA, 33 bp, Homo sapien
aaattcaaaatttacagcatgaattcaacatac

SEQ ID NO: 36029 - DNA, 33 bp, Homo sapien
atgaaacaaccattaaaacaaaactgagcaaag

SEQ ID NO: 36030 - DNA, 33 bp, Homo sapien
atgaaacaaccattaagacaaaactgagcaaag

SEQ ID NO: 36031 - DNA, 33 bp, Homo sapien
taaactactcattttggaaaggtacgtaagtgg

SEQ ID NO: 36032 - DNA, 33 bp, Homo sapien
taaactactcattttgtaaaggtacgtaagtgg

SEQ ID NO: 36033 - DNA, 33 bp, Homo sapien
gtaggatagaaacaaaaagatactagtgcctat

SEQ ID NO: 36034 - DNA, 33 bp, Homo sapien
gtaggatagaaacaaagagatactagtgcctat

SEQ ID NO: 36035 - DNA, 33 bp, Homo sapien
tagaagctccctcacaagagtgatgtcttagtc

SEQ ID NO: 36036 - DNA, 33 bp, Homo sapien
tagaagctccctcacaggagtgatgtcttagtc

SEQ ID NO: 36037 - DNA, 33 bp, Homo sapien
ttgtacccaagaatagaaccttacttttgtcac

SEQ ID NO: 36038 - DNA, 33 bp, Homo sapien
ttgtacccaagaataggaccttacttttgtcac

SEQ ID NO: 36039 - DNA, 33 bp, Homo sapien
aagagaacagaagaaaaaatcagtgaactagaa

SEQ ID NO: 36040 - DNA, 33 bp, Homo sapien
aagagaacagaagaaagaatcagtgaactagaa

SEQ ID NO: 36041 - DNA, 33 bp, Homo sapien
ccctaattcaagtataaagtatcacctacaaag

SEQ ID NO: 36042 - DNA, 33 bp, Homo sapien
ccctaattcaagtatacagtatcacctacaaag

SEQ ID NO: 36043 - DNA, 33 bp, Homo sapien
gttcaatattctaaagcagtcattcatgtaagt

SEQ ID NO: 36044 - DNA, 33 bp, Homo sapien
gttcaatattctaaaggagtcattcatgtaagt

SEQ ID NO: 36045 - DNA, 33 bp, Homo sapien
tcattcagggttattacgagtatgtgaaagtgg

SEQ ID NO: 36046 - DNA, 33 bp, Homo sapien
tcattcagggttattatgagtatgtgaaagtgg

SEQ ID NO: 36047 - DNA, 33 bp, Homo sapien
ataagaaacttaaacaagtcaaccagcaaaaca

SEQ ID NO: 36048 - DNA, 33 bp, Homo sapien
ataagaaacttaaacaggtcaaccagcaaaaca

SEQ ID NO: 36049 - DNA, 33 bp, Homo sapien
tttatttgactagacacaagctaatttactagt

SEQ ID NO: 36050 - DNA, 33 bp, Homo sapien
tttatttgactagacagaagctaatttactagt

SEQ ID NO: 36051 - DNA, 33 bp, Homo sapien
gactcatagtaaatacagcgtttatttcaaatt

SEQ ID NO: 36052 - DNA, 33 bp, Homo sapien
gactcatagtaaatacggcgtttatttcaaatt

SEQ ID NO: 36053 - DNA, 33 bp, Homo sapien
attgtgttttgtcatacattcaaagctgcttct

SEQ ID NO: 36054 - DNA, 33 bp, Homo sapien
attgtgttttgtcatatattcaaagctgcttct

SEQ ID NO: 36055 - DNA, 33 bp, Homo sapien
gaggagtcgatatgaaagaaacaacggctcttg

SEQ ID NO: 36056 - DNA, 33 bp, Homo sapien
gaggagtcgatatgaaggaaacaacggctcttg

SEQ ID NO: 36057 - DNA, 33 bp, Homo sapien
ccacttttttcctttcacaagcatttctctcca

SEQ ID NO: 36058 - DNA, 33 bp, Homo sapien
ccacttttttcctttcgcaagcatttctctcca

SEQ ID NO: 36059 - DNA, 33 bp, Homo sapien
tgagagcctatgagaacgcctgtttctttgcaa

SEQ ID NO: 36060 - DNA, 33 bp, Homo sapien
tgagagcctatgagaatgcctgtttctttgcaa

SEQ ID NO: 36061 - DNA, 33 bp, Homo sapien
cacatttagcaaacaggaatggaggaaccacta

SEQ ID NO: 36062 - DNA, 33 bp, Homo sapien
cacatttagcaaacagtaatggaggaaccacta

SEQ ID NO: 36063 - DNA, 33 bp, Homo sapien
tatttttactgagacactgggaaaattagattc

SEQ ID NO: 36064 - DNA, 33 bp, Homo sapien
tatttttactgagacattgggaaaattagattc

SEQ ID NO: 36065 - DNA, 33 bp, Homo sapien
ttgaaaacagtaaatacgtagataagttgagtg

SEQ ID NO: 36066 - DNA, 33 bp, Homo sapien
ttgaaaacagtaaatatgtagataagttgagtg

SEQ ID NO: 36067 - DNA, 33 bp, Homo sapien
aatatggaaaatactacgacttttcagctgttt

SEQ ID NO: 36068 - DNA, 33 bp, Homo sapien
aatatggaaaatactatgacttttcagctgttt

SEQ ID NO: 36069 - DNA, 33 bp, Homo sapien
tggctaaataactctccagaaaggatgcaccta

SEQ ID NO: 36070 - DNA, 33 bp, Homo sapien
tggctaaataactctctagaaaggatgcaccta

SEQ ID NO: 36071 - DNA, 33 bp, Homo sapien
tacatggatagaaacaactacggaggttttaaa

SEQ ID NO: 36072 - DNA, 33 bp, Homo sapien
tacatggatagaaacagctacggaggttttaaa

SEQ ID NO: 36073 - DNA, 33 bp, Homo sapien
tacaatctcagagcagaaagactgaggagaaaa

SEQ ID NO: 36074 - DNA, 33 bp, Homo sapien
tacaatctcagagcagtaagactgaggagaaaa

SEQ ID NO: 36075 - DNA, 33 bp, Homo sapien
aagactactgggattacattgatgaggaaaaac

SEQ ID NO: 36076 - DNA, 33 bp, Homo sapien
aagactactgggattatattgatgaggaaaaac

SEQ ID NO: 36077 - DNA, 33 bp, Homo sapien
ctccatacaaggtaacacagaatccttggaatt

SEQ ID NO: 36078 - DNA, 33 bp, Homo sapien
ctccatacaaggtaacgcagaatccttggaatt

SEQ ID NO: 36079 - DNA, 33 bp, Homo sapien
acttgaccacagatggaataagaccaagtgagg

SEQ ID NO: 36080 - DNA, 33 bp, Homo sapien
acttgaccacagatggcataagaccaagtgagg

SEQ ID NO: 36081 - DNA, 33 bp, Homo sapien
aaagaaattattgatacgctgggtttcattaaa

SEQ ID NO: 36082 - DNA, 33 bp, Homo sapien
aaagaaattattgatatgctgggtttcattaaa

SEQ ID NO: 36083 - DNA, 33 bp, Homo sapien
aagaatcattgagatgcaattaatgcttgttaa

SEQ ID NO: 36084 - DNA, 33 bp, Homo sapien
aagaatcattgagatgtaattaatgcttgttaa

SEQ ID NO: 36085 - DNA, 33 bp, Homo sapien
gccactattgcaaacacatactacgtcaaagat

SEQ ID NO: 36086 - DNA, 33 bp, Homo sapien
gccactattgcaaacagatactacgtcaaagat

SEQ ID NO: 36087 - DNA, 33 bp, Homo sapien
tcactacttctactctaaatcactttgtcatgc

SEQ ID NO: 36088 - DNA, 33 bp, Homo sapien
tcactacttctactctcaatcactttgtcatgc

SEQ ID NO: 36089 - DNA, 33 bp, Homo sapien
ataatctgctcttagaagactataaccccataa

SEQ ID NO: 36090 - DNA, 33 bp, Homo sapien
ataatctgctcttagaggactataaccccataa

SEQ ID NO: 36091 - DNA, 33 bp, Homo sapien
ccacaccaccctaaacaagtcatcatagtagaa

SEQ ID NO: 36092 - DNA, 33 bp, Homo sapien
ccacaccaccctaaacgagtcatcatagtagaa

SEQ ID NO: 36093 - DNA, 33 bp, Homo sapien
agtgcctatcccataacaggtgacaataaatat

SEQ ID NO: 36094 - DNA, 33 bp, Homo sapien
agtgcctatcccataataggtgacaataaatat

SEQ ID NO: 36095 - DNA, 33 bp, Homo sapien
taaatctgaacataaaccagaaaatcgcaggag

SEQ ID NO: 36096 - DNA, 33 bp, Homo sapien
taaatctgaacataaatcagaaaatcgcaggag

SEQ ID NO: 36097 - DNA, 33 bp, Homo sapien
actgctgtctggttaggaagcagagtcttatat

SEQ ID NO: 36098 - DNA, 33 bp, Homo sapien
actgctgtctggttagtaagcagagtcttatat

SEQ ID NO: 36099 - DNA, 33 bp, Homo sapien
gtgtaattagagtccccgaaggaagttgtggaa

SEQ ID NO: 36100 - DNA, 33 bp, Homo sapien
gtgtaattagagtccctgaaggaagttgtggaa

SEQ ID NO: 36101 - DNA, 33 bp, Homo sapien
atggagactggatttaacctcccaatggaaaca

SEQ ID NO: 36102 - DNA, 33 bp, Homo sapien
atggagactggatttaccctcccaatggaaaca

SEQ ID NO: 36103 - DNA, 33 bp, Homo sapien
atataggacatataatcaactcaaattgaagga

SEQ ID NO: 36104 - DNA, 33 bp, Homo sapien
atataggacatataatgaactcaaattgaagga

SEQ ID NO: 36105 - DNA, 33 bp, Homo sapien
atcatatgacaaatcaagagcaagagaaagagg

SEQ ID NO: 36106 - DNA, 33 bp, Homo sapien
atcatatgacaaatcaggagcaagagaaagagg

SEQ ID NO: 36107 - DNA, 33 bp, Homo sapien
gaaatggtcctgcaaaattgtctcttgtgggga

SEQ ID NO: 36108 - DNA, 33 bp, Homo sapien
gaaatggtcctgcaaagttgtctcttgtgggga

SEQ ID NO: 36109 - DNA, 33 bp, Homo sapien
taatcaaactcaacaacgtataggtatccagtg

SEQ ID NO: 36110 - DNA, 33 bp, Homo sapien
taatcaaactcaacaatgtataggtatccagtg

SEQ ID NO: 36111 - DNA, 33 bp, Homo sapien
ttggaattcctagctaacagaactgtgaaaaaa

SEQ ID NO: 36112 - DNA, 33 bp, Homo sapien
ttggaattcctagctaccagaactgtgaaaaaa

SEQ ID NO: 36113 - DNA, 33 bp, Homo sapien
tttcttggaagatctgaactaaaacctgctgcc

SEQ ID NO: 36114 - DNA, 33 bp, Homo sapien
tttcttggaagatctggactaaaacctgctgcc

SEQ ID NO: 36115 - DNA, 33 bp, Homo sapien
taggagtactatatgtaaactgtagccatttaa

SEQ ID NO: 36116 - DNA, 33 bp, Homo sapien
taggagtactatatgtgaactgtagccatttaa

SEQ ID NO: 36117 - DNA, 33 bp, Homo sapien
tatggattacaatacaaaacatcacaatttatt

SEQ ID NO: 36118 - DNA, 33 bp, Homo sapien
tatggattacaatacagaacatcacaatttatt

SEQ ID NO: 36119 - DNA, 33 bp, Homo sapien
ggaataacattgtcaggactgtaaatgctaaag

SEQ ID NO: 36120 - DNA, 33 bp, Homo sapien
ggaataacattgtcagtactgtaaatgctaaag

SEQ ID NO: 36121 - DNA, 33 bp, Homo sapien
aatccatgagtgagaaaaactaatatcatgtga

SEQ ID NO: 36122 - DNA, 33 bp, Homo sapien
aatccatgagtgagaagaactaatatcatgtga

SEQ ID NO: 36123 - DNA, 33 bp, Homo sapien
aactcagaggagaaaaccagtagcccagagata

SEQ ID NO: 36124 - DNA, 33 bp, Homo sapien
aactcagaggagaaaatcagtagcccagagata

SEQ ID NO: 36125 - DNA, 33 bp, Homo sapien
ttgaaccagcatcacacacttctaaattgatag

SEQ ID NO: 36126 - DNA, 33 bp, Homo sapien
ttgaaccagcatcacagacttctaaattgatag

SEQ ID NO: 36127 - DNA, 33 bp, Homo sapien
gaaatctgagtttggagattgcaattgaggttt

SEQ ID NO: 36128 - DNA, 33 bp, Homo sapien
gaaatctgagtttggatattgcaattgaggttt

SEQ ID NO: 36129 - DNA, 33 bp, Homo sapien
taaggaaatgtcccaacaagtatatgcttgaat

SEQ ID NO: 36130 - DNA, 33 bp, Homo sapien
taaggaaatgtcccaagaagtatatgcttgaat

SEQ ID NO: 36131 - DNA, 33 bp, Homo sapien
ttttctgcatctaaggaaccccaatgactatat

SEQ ID NO: 36132 - DNA, 33 bp, Homo sapien
ttttctgcatctaagggaccccaatgactatat

SEQ ID NO: 36133 - DNA, 33 bp, Homo sapien
tggaaatgagctcacaactcccaggacagaccc

SEQ ID NO: 36134 - DNA, 33 bp, Homo sapien
tggaaatgagctcacatctcccaggacagaccc

SEQ ID NO: 36135 - DNA, 33 bp, Homo sapien
gtgtaaaagaaaaggcacaaatgattgtaaggt

SEQ ID NO: 36136 - DNA, 33 bp, Homo sapien
gtgtaaaagaaaaggcgcaaatgattgtaaggt

SEQ ID NO: 36137 - DNA, 33 bp, Homo sapien
acctctgggcaactacactggttttctcttcac

SEQ ID NO: 36138 - DNA, 33 bp, Homo sapien
acctctgggcaactacgctggttttctcttcac

SEQ ID NO: 36139 - DNA, 33 bp, Homo sapien
gatggttgtgaagatcaaatgagaaaaactaca

SEQ ID NO: 36140 - DNA, 33 bp, Homo sapien
gatggttgtgaagatccaatgagaaaaactaca

SEQ ID NO: 36141 - DNA, 33 bp, Homo sapien
ctatagtaagtgtccacgttaaggtgtttgata

SEQ ID NO: 36142 - DNA, 33 bp, Homo sapien
ctatagtaagtgtccatgttaaggtgtttgata

SEQ ID NO: 36143 - DNA, 33 bp, Homo sapien
ttcaaatgctggctgccaataaacaatattcta

SEQ ID NO: 36144 - DNA, 33 bp, Homo sapien
ttcaaatgctggctgctaataaacaatattcta

SEQ ID NO: 36145 - DNA, 33 bp, Homo sapien
tgtatcgcttttgtcacatttgtgccacatatc

SEQ ID NO: 36146 - DNA, 33 bp, Homo sapien
tgtatcgcttttgtcatatttgtgccacatatc

SEQ ID NO: 36147 - DNA, 33 bp, Homo sapien
gagtgaagaaaatctccaaagtttcaaaagcaa

SEQ ID NO: 36148 - DNA, 33 bp, Homo sapien
gagtgaagaaaatctctaaagtttcaaaagcaa

SEQ ID NO: 36149 - DNA, 33 bp, Homo sapien
taaatcagagcttggcacttctctgttcaaagc

SEQ ID NO: 36150 - DNA, 33 bp, Homo sapien
taaatcagagcttggcgcttctctgttcaaagc

SEQ ID NO: 36151 - DNA, 33 bp, Homo sapien
acattctgtcctctctcactctattctgatgat

SEQ ID NO: 36152 - DNA, 33 bp, Homo sapien
acattctgtcctctcttactctattctgatgat

SEQ ID NO: 36153 - DNA, 33 bp, Homo sapien
tttttttttttcctggaatacagtcttaggcaa

SEQ ID NO: 36154 - DNA, 33 bp, Homo sapien
tttttttttttcctgggatacagtcttaggcaa

SEQ ID NO: 36155 - DNA, 33 bp, Homo sapien
acaccagcacataacaataagtccagaaccaag

SEQ ID NO: 36156 - DNA, 33 bp, Homo sapien
acaccagcacataacagtaagtccagaaccaag

SEQ ID NO: 36157 - DNA, 33 bp, Homo sapien
tagatgtagaaaacaaattccagcagctaagag

SEQ ID NO: 36158 - DNA, 33 bp, Homo sapien
tagatgtagaaaacaagttccagcagctaagag

SEQ ID NO: 36159 - DNA, 33 bp, Homo sapien
atttcactattgcattaaaattcctaagattat

SEQ ID NO: 36160 - DNA, 33 bp, Homo sapien
atttcactattgcattcaaattcctaagattat

SEQ ID NO: 36161 - DNA, 33 bp, Homo sapien
attctattgcctctgacactactctaatccaga

SEQ ID NO: 36162 - DNA, 33 bp, Homo sapien
attctattgcctctgatactactctaatccaga

SEQ ID NO: 36163 - DNA, 33 bp, Homo sapien
tagctcctaaatgtctcaactgaacctccttcc

SEQ ID NO: 36164 - DNA, 33 bp, Homo sapien
tagctcctaaatgtcttaactgaacctccttcc

SEQ ID NO: 36165 - DNA, 33 bp, Homo sapien
ttcctccacaatttaacgatttccaaagtcatt

SEQ ID NO: 36166 - DNA, 33 bp, Homo sapien
ttcctccacaatttaatgatttccaaagtcatt

SEQ ID NO: 36167 - DNA, 33 bp, Homo sapien
gatgagatttgtcaaacttaatagaaaatccac

SEQ ID NO: 36168 - DNA, 33 bp, Homo sapien
gatgagatttgtcaaagttaatagaaaatccac

SEQ ID NO: 36169 - DNA, 33 bp, Homo sapien
aggtggaacaaaccaacgcttagattaatgagt

SEQ ID NO: 36170 - DNA, 33 bp, Homo sapien
aggtggaacaaaccaatgcttagattaatgagt

SEQ ID NO: 36171 - DNA, 33 bp, Homo sapien
tattttaactacttgaaaagtttgagcagtgag

SEQ ID NO: 36172 - DNA, 33 bp, Homo sapien
tattttaactacttgagaagtttgagcagtgag

SEQ ID NO: 36173 - DNA, 33 bp, Homo sapien
tctctataaaatctcccctttgcagtcaaggaa

SEQ ID NO: 36174 - DNA, 33 bp, Homo sapien
tctctataaaatctcctctttgcagtcaaggaa

SEQ ID NO: 36175 - DNA, 33 bp, Homo sapien
catttaatctgcatgacaaccatatgtattcct

SEQ ID NO: 36176 - DNA, 33 bp, Homo sapien
catttaatctgcatgagaaccatatgtattcct

SEQ ID NO: 36177 - DNA, 33 bp, Homo sapien
atagaattcggtcaccgattttttccaacttaa

SEQ ID NO: 36178 - DNA, 33 bp, Homo sapien
atagaattcggtcacctattttttccaacttaa

SEQ ID NO: 36179 - DNA, 33 bp, Homo sapien
gtataaatgtctgttgcataacccagtgcttgt

SEQ ID NO: 36180 - DNA, 33 bp, Homo sapien
gtataaatgtctgttgtataacccagtgcttgt

SEQ ID NO: 36181 - DNA, 33 bp, Homo sapien
gcttcccaacagagaaaccatgaatgctttatg

SEQ ID NO: 36182 - DNA, 33 bp, Homo sapien
gcttcccaacagagaacccatgaatgctttatg

SEQ ID NO: 36183 - DNA, 33 bp, Homo sapien
agaaactcagttttgcacttatggaggacctcc

SEQ ID NO: 36184 - DNA, 33 bp, Homo sapien
agaaactcagttttgcgcttatggaggacctcc

SEQ ID NO: 36185 - DNA, 33 bp, Homo sapien
ggtgaacatatttccaggtgtttccttaccaga

SEQ ID NO: 36186 - DNA, 33 bp, Homo sapien
ggtgaacatatttccatgtgtttccttaccaga

SEQ ID NO: 36187 - DNA, 33 bp, Homo sapien
aaactgctgttatgaaagtttcaaatgacctct

SEQ ID NO: 36188 - DNA, 33 bp, Homo sapien
aaactgctgttatgaaggtttcaaatgacctct

SEQ ID NO: 36189 - DNA, 33 bp, Homo sapien
aggaaatttctgggcaatagaggaaatattctg

SEQ ID NO: 36190 - DNA, 33 bp, Homo sapien
aggaaatttctgggcagtagaggaaatattctg

SEQ ID NO: 36191 - DNA, 33 bp, Homo sapien
agtatctcaaataataacggtgataatggtgat

SEQ ID NO: 36192 - DNA, 33 bp, Homo sapien
agtatctcaaataataccggtgataatggtgat

SEQ ID NO: 36193 - DNA, 33 bp, Homo sapien
atgatgtgattcagacactcagaggaattgctt

SEQ ID NO: 36194 - DNA, 33 bp, Homo sapien
atgatgtgattcagactctcagaggaattgctt

SEQ ID NO: 36195 - DNA, 33 bp, Homo sapien
tcttccttgtgtgcaaactctacccagtaagtg

SEQ ID NO: 36196 - DNA, 33 bp, Homo sapien
tcttccttgtgtgcaatctctacccagtaagtg

SEQ ID NO: 36197 - DNA, 33 bp, Homo sapien
ccttgcaaagacagacaaagagcttcctctggc

SEQ ID NO: 36198 - DNA, 33 bp, Homo sapien
ccttgcaaagacagacgaagagcttcctctggc

SEQ ID NO: 36199 - DNA, 33 bp, Homo sapien
acttctccccgtctcacatttaagtgactttat

SEQ ID NO: 36200 - DNA, 33 bp, Homo sapien
acttctccccgtctcatatttaagtgactttat

SEQ ID NO: 36201 - DNA, 33 bp, Homo sapien
actggaaactaaaatcaatgaatatgagctcag

SEQ ID NO: 36202 - DNA, 33 bp, Homo sapien
actggaaactaaaatctatgaatatgagctcag

SEQ ID NO: 36203 - DNA, 33 bp, Homo sapien
cttgggttcaggcaaagaagatgtaaagagata

SEQ ID NO: 36204 - DNA, 33 bp, Homo sapien
cttgggttcaggcaaataagatgtaaagagata

SEQ ID NO: 36205 - DNA, 33 bp, Homo sapien
ataagttccctcttccaatggatggttttaatt

SEQ ID NO: 36206 - DNA, 33 bp, Homo sapien
ataagttccctcttccgatggatggttttaatt

SEQ ID NO: 36207 - DNA, 33 bp, Homo sapien
gcctttaagaaacaaaagtgtgtgtgacacaga

SEQ ID NO: 36208 - DNA, 33 bp, Homo sapien
gcctttaagaaacaaacgtgtgtgtgacacaga

SEQ ID NO: 36209 - DNA, 33 bp, Homo sapien
tctctcaacttcccgaactgcccaccgcagagt

SEQ ID NO: 36210 - DNA, 33 bp, Homo sapien
tctctcaacttcccgacctgcccaccgcagagt

SEQ ID NO: 36211 - DNA, 33 bp, Homo sapien
ccgaccctttccttccgatcagttcctgaaact

SEQ ID NO: 36212 - DNA, 33 bp, Homo sapien
ccgaccctttccttcctatcagttcctgaaact

SEQ ID NO: 36213 - DNA, 33 bp, Homo sapien
aaataaaaagttaaatcatccctgtgtgctcta

SEQ ID NO: 36214 - DNA, 33 bp, Homo sapien
aaataaaaagttaaatgatccctgtgtgctcta

SEQ ID NO: 36215 - DNA, 33 bp, Homo sapien
tctaggaaactcagtgcagtacgatcttagacc

SEQ ID NO: 36216 - DNA, 33 bp, Homo sapien
tctaggaaactcagtgtagtacgatcttagacc

SEQ ID NO: 36217 - DNA, 33 bp, Homo sapien
aaagactttaaggcaacctttcgttatcttttg

SEQ ID NO: 36218 - DNA, 33 bp, Homo sapien
aaagactttaaggcaagctttcgttatcttttg

SEQ ID NO: 36219 - DNA, 33 bp, Homo sapien
gattctttttgcaacaatctcttaccaagtagt

SEQ ID NO: 36220 - DNA, 33 bp, Homo sapien
gattctttttgcaacagtctcttaccaagtagt

SEQ ID NO: 36221 - DNA, 33 bp, Homo sapien
atttggataaaattgaacagttaggcctgcttc

SEQ ID NO: 36222 - DNA, 33 bp, Homo sapien
atttggataaaattgagcagttaggcctgcttc

SEQ ID NO: 36223 - DNA, 33 bp, Homo sapien
aaataaatatcttagaagtggtgtttaccatga

SEQ ID NO: 36224 - DNA, 33 bp, Homo sapien
aaataaatatcttagatgtggtgtttaccatga

SEQ ID NO: 36225 - DNA, 33 bp, Homo sapien
gagtagccttggcaaacagctgacacgaatgaa

SEQ ID NO: 36226 - DNA, 33 bp, Homo sapien
gagtagccttggcaaatagctgacacgaatgaa

SEQ ID NO: 36227 - DNA, 33 bp, Homo sapien
atgtcttgtgtagaggaaacagctgctttcagt

SEQ ID NO: 36228 - DNA, 33 bp, Homo sapien
atgtcttgtgtagagggaacagctgctttcagt

SEQ ID NO: 36229 - DNA, 33 bp, Homo sapien
tcatttcacagttaccaagtctctaccagagat

SEQ ID NO: 36230 - DNA, 33 bp, Homo sapien
tcatttcacagttaccgagtctctaccagagat

SEQ ID NO: 36231 - DNA, 33 bp, Homo sapien
ttgatctttcacacaaaaattactaaggtatat

SEQ ID NO: 36232 - DNA, 33 bp, Homo sapien
ttgatctttcacacaagaattactaaggtatat

SEQ ID NO: 36233 - DNA, 33 bp, Homo sapien
tgagtagactaaggaaacaccagttaggaaaag

SEQ ID NO: 36234 - DNA, 33 bp, Homo sapien
tgagtagactaaggaagcaccagttaggaaaag

SEQ ID NO: 36235 - DNA, 33 bp, Homo sapien
ccatgtttcccatatgaagtcctcacaacacag

SEQ ID NO: 36236 - DNA, 33 bp, Homo sapien
ccatgtttcccatatgcagtcctcacaacacag

SEQ ID NO: 36237 - DNA, 33 bp, Homo sapien
gtgcagagcaaacatacctgaaggctaaaagtt

SEQ ID NO: 36238 - DNA, 33 bp, Homo sapien
gtgcagagcaaacatatctgaaggctaaaagtt

SEQ ID NO: 36239 - DNA, 33 bp, Homo sapien
acaagtttatctatcactcctgtggcaacatgg

SEQ ID NO: 36240 - DNA, 33 bp, Homo sapien
acaagtttatctatcattcctgtggcaacatgg

SEQ ID NO: 36241 - DNA, 33 bp, Homo sapien
ttgtattcaattggccacagattatagttactt

SEQ ID NO: 36242 - DNA, 33 bp, Homo sapien
ttgtattcaattggccgcagattatagttactt

SEQ ID NO: 36243 - DNA, 33 bp, Homo sapien
atctattggtagaggaggacaattaaagatcca

SEQ ID NO: 36244 - DNA, 33 bp, Homo sapien
atctattggtagaggatgacaattaaagatcca

SEQ ID NO: 36245 - DNA, 33 bp, Homo sapien
acatggctaggaagccaactgcaaatgctctgg

SEQ ID NO: 36246 - DNA, 33 bp, Homo sapien
acatggctaggaagccgactgcaaatgctctgg

SEQ ID NO: 36247 - DNA, 33 bp, Homo sapien
gtgattttgatttcaaaccacatgaatgaatta

SEQ ID NO: 36248 - DNA, 33 bp, Homo sapien
gtgattttgatttcaagccacatgaatgaatta

SEQ ID NO: 36249 - DNA, 33 bp, Homo sapien
taaaaaatgtaatgcaacttcttagtctttttc

SEQ ID NO: 36250 - DNA, 33 bp, Homo sapien
taaaaaatgtaatgcagcttcttagtctttttc

SEQ ID NO: 36251 - DNA, 33 bp, Homo sapien
atgatttactgaagcaaagaatattgccagcaa

SEQ ID NO: 36252 - DNA, 33 bp, Homo sapien
atgatttactgaagcagagaatattgccagcaa

SEQ ID NO: 36253 - DNA, 33 bp, Homo sapien
gattcactgaatgagaatagtagcccacaaatc

SEQ ID NO: 36254 - DNA, 33 bp, Homo sapien
gattcactgaatgagattagtagcccacaaatc

SEQ ID NO: 36255 - DNA, 33 bp, Homo sapien
gaaattcttctgatatcaaaatgtacatctaga

SEQ ID NO: 36256 - DNA, 33 bp, Homo sapien
gaaattcttctgatattaaaatgtacatctaga

SEQ ID NO: 36257 - DNA, 33 bp, Homo sapien
agagacgaatgggcacaggaatgacgccatcaa

SEQ ID NO: 36258 - DNA, 33 bp, Homo sapien
agagacgaatgggcacgggaatgacgccatcaa

SEQ ID NO: 36259 - DNA, 33 bp, Homo sapien
agtcgggggactaatacgaatgaaacatggttt

SEQ ID NO: 36260 - DNA, 33 bp, Homo sapien
agtcgggggactaatatgaatgaaacatggttt

SEQ ID NO: 36261 - DNA, 33 bp, Homo sapien
atacattgaatgcaaccatgtggcctcagtctt

SEQ ID NO: 36262 - DNA, 33 bp, Homo sapien
atacattgaatgcaactatgtggcctcagtctt

SEQ ID NO: 36263 - DNA, 33 bp, Homo sapien
attacatcaactggcccaaatgagaaatcaaac

SEQ ID NO: 36264 - DNA, 33 bp, Homo sapien
attacatcaactggcctaaatgagaaatcaaac

SEQ ID NO: 36265 - DNA, 33 bp, Homo sapien
tgattttctcattttacctcttcctgatggggt

SEQ ID NO: 36266 - DNA, 33 bp, Homo sapien
tgattttctcattttatctcttcctgatggggt

SEQ ID NO: 36267 - DNA, 33 bp, Homo sapien
ttacatagtagttaagaactctgctcaagtgtg

SEQ ID NO: 36268 - DNA, 33 bp, Homo sapien
ttacatagtagttaagtactctgctcaagtgtg

SEQ ID NO: 36269 - DNA, 33 bp, Homo sapien
acaataattatgtgagaacaccattttattcct

SEQ ID NO: 36270 - DNA, 33 bp, Homo sapien
acaataattatgtgaggacaccattttattcct

SEQ ID NO: 36271 - DNA, 33 bp, Homo sapien
tagcaacccagaagccaacgtgtaagtttaaat

SEQ ID NO: 36272 - DNA, 33 bp, Homo sapien
tagcaacccagaagcctacgtgtaagtttaaat

SEQ ID NO: 36273 - DNA, 33 bp, Homo sapien
agtagctaacattaacagagtacttattacttg

SEQ ID NO: 36274 - DNA, 33 bp, Homo sapien
agtagctaacattaactgagtacttattacttg

SEQ ID NO: 36275 - DNA, 33 bp, Homo sapien
ggagttggatgaggggaaaatactgtatagaaa

SEQ ID NO: 36276 - DNA, 33 bp, Homo sapien
ggagttggatgagggggaaatactgtatagaaa

SEQ ID NO: 36277 - DNA, 33 bp, Homo sapien
aaatacaagatataacagagtggctactacaaa

SEQ ID NO: 36278 - DNA, 33 bp, Homo sapien
aaatacaagatataacggagtggctactacaaa

SEQ ID NO: 36279 - DNA, 33 bp, Homo sapien
gccaatttcctcaataagcttctctgctgaaag

SEQ ID NO: 36280 - DNA, 33 bp, Homo sapien
gccaatttcctcaatacgcttctctgctgaaag

SEQ ID NO: 36281 - DNA, 33 bp, Homo sapien
ctcactctctcaatcacgaacaacaaccacata

SEQ ID NO: 36282 - DNA, 33 bp, Homo sapien
ctcactctctcaatcatgaacaacaaccacata

SEQ ID NO: 36283 - DNA, 33 bp, Homo sapien
ctatgagagaagagacagaagaacaaacctgtg

SEQ ID NO: 36284 - DNA, 33 bp, Homo sapien
ctatgagagaagagaccgaagaacaaacctgtg

SEQ ID NO: 36285 - DNA, 33 bp, Homo sapien
ctgtctttcctgactacgctgtctcaagggcaa

SEQ ID NO: 36286 - DNA, 33 bp, Homo sapien
ctgtctttcctgactatgctgtctcaagggcaa

SEQ ID NO: 36287 - DNA, 33 bp, Homo sapien
tagtcagattactgcaaggaaaaagcaattgta

SEQ ID NO: 36288 - DNA, 33 bp, Homo sapien
tagtcagattactgcagggaaaaagcaattgta

SEQ ID NO: 36289 - DNA, 33 bp, Homo sapien
atgctaaaaatgtaacaaagtccgtcagcttag

SEQ ID NO: 36290 - DNA, 33 bp, Homo sapien
atgctaaaaatgtaacgaagtccgtcagcttag

SEQ ID NO: 36291 - DNA, 33 bp, Homo sapien
ttagttccactgcctccagctttccctacacaa

SEQ ID NO: 36292 - DNA, 33 bp, Homo sapien
ttagttccactgcctctagctttccctacacaa

SEQ ID NO: 36293 - DNA, 33 bp, Homo sapien
ccgataaaagcaagaagaattcaagtaccatgg

SEQ ID NO: 36294 - DNA, 33 bp, Homo sapien
ccgataaaagcaagaataattcaagtaccatgg

SEQ ID NO: 36295 - DNA, 33 bp, Homo sapien
acaaacaacaaggtcactcgcacagtcactttc

SEQ ID NO: 36296 - DNA, 33 bp, Homo sapien
acaaacaacaaggtcattcgcacagtcactttc

SEQ ID NO: 36297 - DNA, 33 bp, Homo sapien
cttctttggaacataaccactttttagaattac

SEQ ID NO: 36298 - DNA, 33 bp, Homo sapien
cttctttggaacataatcactttttagaattac

SEQ ID NO: 36299 - DNA, 33 bp, Homo sapien
ccaccgtgcacggcctcaaatatcttacttaat

SEQ ID NO: 36300 - DNA, 33 bp, Homo sapien
ccaccgtgcacggccttaaatatcttacttaat

SEQ ID NO: 36301 - DNA, 33 bp, Homo sapien
tttagagtggctaaggaaccagcaatcttctag

SEQ ID NO: 36302 - DNA, 33 bp, Homo sapien
tttagagtggctaaggcaccagcaatcttctag

SEQ ID NO: 36303 - DNA, 33 bp, Homo sapien
tattgacttgctgctacggtttctgaacatttt

SEQ ID NO: 36304 - DNA, 33 bp, Homo sapien
tattgacttgctgctatggtttctgaacatttt

SEQ ID NO: 36305 - DNA, 33 bp, Homo sapien
ccagcaatcccattccagcttatatactcaaag

SEQ ID NO: 36306 - DNA, 33 bp, Homo sapien
ccagcaatcccattcctgcttatatactcaaag

SEQ ID NO: 36307 - DNA, 33 bp, Homo sapien
tatgaatgaatgcacgcaatctagaagaaaggt

SEQ ID NO: 36308 - DNA, 33 bp, Homo sapien
tatgaatgaatgcacgtaatctagaagaaaggt

SEQ ID NO: 36309 - DNA, 33 bp, Homo sapien
tgtcaatgaaaacctaagaccagaacctaagat

SEQ ID NO: 36310 - DNA, 33 bp, Homo sapien
tgtcaatgaaaacctaggaccagaacctaagat

SEQ ID NO: 36311 - DNA, 33 bp, Homo sapien
tgaggatgattcaatacggggcagaaaaaatgg

SEQ ID NO: 36312 - DNA, 33 bp, Homo sapien
tgaggatgattcaatatggggcagaaaaaatgg

SEQ ID NO: 36313 - DNA, 33 bp, Homo sapien
agtgaatttagaaggaagatggagtctttgtgc

SEQ ID NO: 36314 - DNA, 33 bp, Homo sapien
agtgaatttagaaggacgatggagtctttgtgc

SEQ ID NO: 36315 - DNA, 33 bp, Homo sapien
tgactgttgctcagaacctagcttaaatatcag

SEQ ID NO: 36316 - DNA, 33 bp, Homo sapien
tgactgttgctcagaatctagcttaaatatcag

SEQ ID NO: 36317 - DNA, 33 bp, Homo sapien
tttttaatgctcatgacgtgaccacaaaatcca

SEQ ID NO: 36318 - DNA, 33 bp, Homo sapien
tttttaatgctcatgatgtgaccacaaaatcca

SEQ ID NO: 36319 - DNA, 33 bp, Homo sapien
tattagatagactataaaagtgtgatggatatt

SEQ ID NO: 36320 - DNA, 33 bp, Homo sapien
tattagatagactatagaagtgtgatggatatt

SEQ ID NO: 36321 - DNA, 33 bp, Homo sapien
tctcttaagcaggtaaagcatttgcattttgtt

SEQ ID NO: 36322 - DNA, 33 bp, Homo sapien
tctcttaagcaggtaaggcatttgcattttgtt

SEQ ID NO: 36323 - DNA, 33 bp, Homo sapien
caaatttattgtctacaaaaacaagtaaccctg

SEQ ID NO: 36324 - DNA, 33 bp, Homo sapien
caaatttattgtctacgaaaacaagtaaccctg

SEQ ID NO: 36325 - DNA, 33 bp, Homo sapien
gtttccaggaaccctaaggtacgtgattagatt

SEQ ID NO: 36326 - DNA, 33 bp, Homo sapien
gtttccaggaaccctacggtacgtgattagatt

SEQ ID NO: 36327 - DNA, 33 bp, Homo sapien
tgatctctaatcaaaaatgtttgggaaatactg

SEQ ID NO: 36328 - DNA, 33 bp, Homo sapien
tgatctctaatcaaaagtgtttgggaaatactg

SEQ ID NO: 36329 - DNA, 33 bp, Homo sapien
cttagctgtggaactccctgatttactgtgaag

SEQ ID NO: 36330 - DNA, 33 bp, Homo sapien
cttagctgtggaactctctgatttactgtgaag

SEQ ID NO: 36331 - DNA, 33 bp, Homo sapien
aacagatacaggagaacgtagctaaagtttaag

SEQ ID NO: 36332 - DNA, 33 bp, Homo sapien
aacagatacaggagaatgtagctaaagtttaag

SEQ ID NO: 36333 - DNA, 33 bp, Homo sapien
atacaggacacgcagtgaaatttggatttcaat

SEQ ID NO: 36334 - DNA, 33 bp, Homo sapien
atacaggacacgcagttaaatttggatttcaat

SEQ ID NO: 36335 - DNA, 33 bp, Homo sapien
ggctgggttttcactacggaaatggaatggatt

SEQ ID NO: 36336 - DNA, 33 bp, Homo sapien
ggctgggttttcactatggaaatggaatggatt

SEQ ID NO: 36337 - DNA, 33 bp, Homo sapien
taatttctaaggcatgacaacatctatgatttc

SEQ ID NO: 36338 - DNA, 33 bp, Homo sapien
taatttctaaggcatggcaacatctatgatttc

SEQ ID NO: 36339 - DNA, 33 bp, Homo sapien
attagccattcacttacgtttgtcaaaaaatat

SEQ ID NO: 36340 - DNA, 33 bp, Homo sapien
attagccattcacttatgtttgtcaaaaaatat

SEQ ID NO: 36341 - DNA, 33 bp, Homo sapien
ttggtcatcactaaaaaatggggttttaatatg

SEQ ID NO: 36342 - DNA, 33 bp, Homo sapien
ttggtcatcactaaaagatggggttttaatatg

SEQ ID NO: 36343 - DNA, 33 bp, Homo sapien
gaaataatctagcaaactgaagtgtaagtaaag

SEQ ID NO: 36344 - DNA, 33 bp, Homo sapien
gaaataatctagcaaattgaagtgtaagtaaag

SEQ ID NO: 36345 - DNA, 33 bp, Homo sapien
ataggaataacagaaccgatgactcaacaatga

SEQ ID NO: 36346 - DNA, 33 bp, Homo sapien
ataggaataacagaactgatgactcaacaatga

SEQ ID NO: 36347 - DNA, 33 bp, Homo sapien
ggatctaattaagccaaagaatttctccacaac

SEQ ID NO: 36348 - DNA, 33 bp, Homo sapien
ggatctaattaagccatagaatttctccacaac

SEQ ID NO: 36349 - DNA, 33 bp, Homo sapien
caattctgatagaatacagtaatggattgagga

SEQ ID NO: 36350 - DNA, 33 bp, Homo sapien
caattctgatagaatatagtaatggattgagga

SEQ ID NO: 36351 - DNA, 33 bp, Homo sapien
tagcctgtttcactcacccaagaaaatctatat

SEQ ID NO: 36352 - DNA, 33 bp, Homo sapien
tagcctgtttcactcatccaagaaaatctatat

SEQ ID NO: 36353 - DNA, 33 bp, Homo sapien
attaagatatagcctcaaatttcctccatatta

SEQ ID NO: 36354 - DNA, 33 bp, Homo sapien
attaagatatagcctccaatttcctccatatta

SEQ ID NO: 36355 - DNA, 33 bp, Homo sapien
tgacctaagagtgagacaagaccttgttttttc

SEQ ID NO: 36356 - DNA, 33 bp, Homo sapien
tgacctaagagtgagataagaccttgttttttc

SEQ ID NO: 36357 - DNA, 33 bp, Homo sapien
aagagtgactaaacggcaatgaatcacacatcc

SEQ ID NO: 36358 - DNA, 33 bp, Homo sapien
aagagtgactaaacggtaatgaatcacacatcc

SEQ ID NO: 36359 - DNA, 33 bp, Homo sapien
tttatttttgtcatgacgataatagaaagcaat

SEQ ID NO: 36360 - DNA, 33 bp, Homo sapien
tttatttttgtcatgatgataatagaaagcaat

SEQ ID NO: 36361 - DNA, 33 bp, Homo sapien
acttcttgctgagagcagaacttatcgagcagg

SEQ ID NO: 36362 - DNA, 33 bp, Homo sapien
acttcttgctgagagccgaacttatcgagcagg

SEQ ID NO: 36363 - DNA, 33 bp, Homo sapien
agccaaactgtagggacatgtagcaaatgggtt

SEQ ID NO: 36364 - DNA, 33 bp, Homo sapien
agccaaactgtagggatatgtagcaaatgggtt

SEQ ID NO: 36365 - DNA, 33 bp, Homo sapien
acagggtgatttctacccagaacagaaaatgta

SEQ ID NO: 36366 - DNA, 33 bp, Homo sapien
acagggtgatttctacgcagaacagaaaatgta

SEQ ID NO: 36367 - DNA, 33 bp, Homo sapien
ctgattcagaaatggaagtacgggaaagtgtcc

SEQ ID NO: 36368 - DNA, 33 bp, Homo sapien
ctgattcagaaatggaggtacgggaaagtgtcc

SEQ ID NO: 36369 - DNA, 33 bp, Homo sapien
tctatagtagctagcacaaaattcagatgtatt

SEQ ID NO: 36370 - DNA, 33 bp, Homo sapien
tctatagtagctagcataaaattcagatgtatt

SEQ ID NO: 36371 - DNA, 33 bp, Homo sapien
attacttggtctttctcacctctgaaacaccct

SEQ ID NO: 36372 - DNA, 33 bp, Homo sapien
attacttggtctttcttacctctgaaacaccct

SEQ ID NO: 36373 - DNA, 33 bp, Homo sapien
gcttctgttgagttcacatcaaaatctacagcc

SEQ ID NO: 36374 - DNA, 33 bp, Homo sapien
gcttctgttgagttcagatcaaaatctacagcc

SEQ ID NO: 36375 - DNA, 33 bp, Homo sapien
agtcaactggtgaacaaaagatgcaacaaagag

SEQ ID NO: 36376 - DNA, 33 bp, Homo sapien
agtcaactggtgaacagaagatgcaacaaagag

SEQ ID NO: 36377 - DNA, 33 bp, Homo sapien
taataaatgctttgaaagaaacaagcaaaggga

SEQ ID NO: 36378 - DNA, 33 bp, Homo sapien
taataaatgctttgaaggaaacaagcaaaggga

SEQ ID NO: 36379 - DNA, 33 bp, Homo sapien
gggctacaatttactgacaatgccctgaatttg

SEQ ID NO: 36380 - DNA, 33 bp, Homo sapien
gggctacaatttactggcaatgccctgaatttg

SEQ ID NO: 36381 - DNA, 33 bp, Homo sapien
attctaatttccactgcagctcataagcttctt

SEQ ID NO: 36382 - DNA, 33 bp, Homo sapien
attctaatttccactgtagctcataagcttctt

SEQ ID NO: 36383 - DNA, 33 bp, Homo sapien
acagtagtgtgtagcaagttttatacattttgt

SEQ ID NO: 36384 - DNA, 33 bp, Homo sapien
acagtagtgtgtagcatgttttatacattttgt

SEQ ID NO: 36385 - DNA, 33 bp, Homo sapien
gcagatctgcttagtaaaaattctttgtttcct

SEQ ID NO: 36386 - DNA, 33 bp, Homo sapien
gcagatctgcttagtagaaattctttgtttcct

SEQ ID NO: 36387 - DNA, 33 bp, Homo sapien
atgtaagttattttgacgacatctttatctgat

SEQ ID NO: 36388 - DNA, 33 bp, Homo sapien
atgtaagttattttgatgacatctttatctgat

SEQ ID NO: 36389 - DNA, 33 bp, Homo sapien
actgagatgtggaagaccaaaggagaataagtt

SEQ ID NO: 36390 - DNA, 33 bp, Homo sapien
actgagatgtggaagatcaaaggagaataagtt

SEQ ID NO: 36391 - DNA, 33 bp, Homo sapien
tgaatccttgaccaacaagagacaggaactgat

SEQ ID NO: 36392 - DNA, 33 bp, Homo sapien
tgaatccttgaccaacgagagacaggaactgat

SEQ ID NO: 36393 - DNA, 33 bp, Homo sapien
ggtcaaggattcaacaaatgggctatcattcct

SEQ ID NO: 36394 - DNA, 33 bp, Homo sapien
ggtcaaggattcaacatatgggctatcattcct

SEQ ID NO: 36395 - DNA, 33 bp, Homo sapien
tgacttttattaaatgcatttccagcatcaatg

SEQ ID NO: 36396 - DNA, 33 bp, Homo sapien
tgacttttattaaatgtatttccagcatcaatg

SEQ ID NO: 36397 - DNA, 33 bp, Homo sapien
ctgataaacaaattcaatacagttgaaggctat

SEQ ID NO: 36398 - DNA, 33 bp, Homo sapien
ctgataaacaaattcagtacagttgaaggctat

SEQ ID NO: 36399 - DNA, 33 bp, Homo sapien
tgatgcaagaaatggaagaggacacaaaaatat

SEQ ID NO: 36400 - DNA, 33 bp, Homo sapien
tgatgcaagaaatggaggaggacacaaaaatat

SEQ ID NO: 36401 - DNA, 33 bp, Homo sapien
cttgccacaaagaaccgaagaggatcgagactt

SEQ ID NO: 36402 - DNA, 33 bp, Homo sapien
cttgccacaaagaacctaagaggatcgagactt

SEQ ID NO: 36403 - DNA, 33 bp, Homo sapien
tttttactatttccaacgctcttcatttctttg

SEQ ID NO: 36404 - DNA, 33 bp, Homo sapien
tttttactatttccaatgctcttcatttctttg

SEQ ID NO: 36405 - DNA, 33 bp, Homo sapien
attattagcaattacaatgaaaacatgtgatgt

SEQ ID NO: 36406 - DNA, 33 bp, Homo sapien
attattagcaattacagtgaaaacatgtgatgt

SEQ ID NO: 36407 - DNA, 33 bp, Homo sapien
atatagaagaactgaaaaatgacctaattgaca

SEQ ID NO: 36408 - DNA, 33 bp, Homo sapien
atatagaagaactgaacaatgacctaattgaca

SEQ ID NO: 36409 - DNA, 33 bp, Homo sapien
tcacctatactgcctgcaagttgtagctgtttt

SEQ ID NO: 36410 - DNA, 33 bp, Homo sapien
tcacctatactgcctgtaagttgtagctgtttt

SEQ ID NO: 36411 - DNA, 33 bp, Homo sapien
gtactggagaaaaactaaatgccaggcatatga

SEQ ID NO: 36412 - DNA, 33 bp, Homo sapien
gtactggagaaaaactcaatgccaggcatatga

SEQ ID NO: 36413 - DNA, 33 bp, Homo sapien
agtacctttattcgaacagtcaaaaactaaaaa

SEQ ID NO: 36414 - DNA, 33 bp, Homo sapien
agtacctttattcgaagagtcaaaaactaaaaa

SEQ ID NO: 36415 - DNA, 33 bp, Homo sapien
cttctttgtgtggatacaacagtttagccactc

SEQ ID NO: 36416 - DNA, 33 bp, Homo sapien
cttctttgtgtggatataacagtttagccactc

SEQ ID NO: 36417 - DNA, 33 bp, Homo sapien
atttagtcacacttcactacctccaaatatgaa

SEQ ID NO: 36418 - DNA, 33 bp, Homo sapien
atttagtcacacttcattacctccaaatatgaa

SEQ ID NO: 36419 - DNA, 33 bp, Homo sapien
atatataggctgtttcactttaaaggagtaaaa

SEQ ID NO: 36420 - DNA, 33 bp, Homo sapien
atatataggctgtttcgctttaaaggagtaaaa

SEQ ID NO: 36421 - DNA, 33 bp, Homo sapien
accattgaatacctaacctgccaacagcacaaa

SEQ ID NO: 36422 - DNA, 33 bp, Homo sapien
accattgaatacctaatctgccaacagcacaaa

SEQ ID NO: 36423 - DNA, 33 bp, Homo sapien
aaaaaagagcatagcacctatctctctctctct

SEQ ID NO: 36424 - DNA, 33 bp, Homo sapien
aaaaaagagcatagcatctatctctctctctct

SEQ ID NO: 36425 - DNA, 33 bp, Homo sapien
aaagtttaaaattagccactttcatccatttca

SEQ ID NO: 36426 - DNA, 33 bp, Homo sapien
aaagtttaaaattagcgactttcatccatttca

SEQ ID NO: 36427 - DNA, 33 bp, Homo sapien
ttcctgttgtacatgaatacgtgctttatagtg

SEQ ID NO: 36428 - DNA, 33 bp, Homo sapien
ttcctgttgtacatgagtacgtgctttatagtg

SEQ ID NO: 36429 - DNA, 33 bp, Homo sapien
attgtaaaagttcggcaaaaatgaaagatgtag

SEQ ID NO: 36430 - DNA, 33 bp, Homo sapien
attgtaaaagttcggcgaaaatgaaagatgtag

SEQ ID NO: 36431 - DNA, 33 bp, Homo sapien
atttgagtgcagaattaaactacatctttcatt

SEQ ID NO: 36432 - DNA, 33 bp, Homo sapien
atttgagtgcagaattcaactacatctttcatt

SEQ ID NO: 36433 - DNA, 33 bp, Homo sapien
tggcataaactagttacgggtgggatgtcacat

SEQ ID NO: 36434 - DNA, 33 bp, Homo sapien
tggcataaactagttatgggtgggatgtcacat

SEQ ID NO: 36435 - DNA, 33 bp, Homo sapien
tactttttcttaccacacagatatacccacaaa

SEQ ID NO: 36436 - DNA, 33 bp, Homo sapien
tactttttcttaccacgcagatatacccacaaa

SEQ ID NO: 36437 - DNA, 33 bp, Homo sapien
ggtaacatgataaagaataccaggaggggaagt

SEQ ID NO: 36438 - DNA, 33 bp, Homo sapien
ggtaacatgataaagagtaccaggaggggaagt

SEQ ID NO: 36439 - DNA, 33 bp, Homo sapien
acaaaagaagtgaaggacctctttaaggagaat

SEQ ID NO: 36440 - DNA, 33 bp, Homo sapien
acaaaagaagtgaagggcctctttaaggagaat

SEQ ID NO: 36441 - DNA, 33 bp, Homo sapien
aacaaaagaaaactccaaagtataggaatactg

SEQ ID NO: 36442 - DNA, 33 bp, Homo sapien
aacaaaagaaaactccgaagtataggaatactg

SEQ ID NO: 36443 - DNA, 33 bp, Homo sapien
cagacaagcttgtccaatcaatggctggtgcta

SEQ ID NO: 36444 - DNA, 33 bp, Homo sapien
cagacaagcttgtccagtcaatggctggtgcta

SEQ ID NO: 36445 - DNA, 33 bp, Homo sapien
cagtgttgcctaactccgacccatgtacagtca

SEQ ID NO: 36446 - DNA, 33 bp, Homo sapien
cagtgttgcctaactctgacccatgtacagtca

SEQ ID NO: 36447 - DNA, 33 bp, Homo sapien
ttaatacaggtaaatccaaaggcaaatgtatgt

SEQ ID NO: 36448 - DNA, 33 bp, Homo sapien
ttaatacaggtaaatctaaaggcaaatgtatgt

SEQ ID NO: 36449 - DNA, 33 bp, Homo sapien
tctcttcttcctgacacatgctttcactgacat

SEQ ID NO: 36450 - DNA, 33 bp, Homo sapien
tctcttcttcctgacatatgctttcactgacat

SEQ ID NO: 36451 - DNA, 33 bp, Homo sapien
ttttaaattgttgcaacagaggtgtaatagatg

SEQ ID NO: 36452 - DNA, 33 bp, Homo sapien
ttttaaattgttgcaatagaggtgtaatagatg

SEQ ID NO: 36453 - DNA, 33 bp, Homo sapien
catgtaaaattgtctaccaattcaaaagaaggc

SEQ ID NO: 36454 - DNA, 33 bp, Homo sapien
catgtaaaattgtctatcaattcaaaagaaggc

SEQ ID NO: 36455 - DNA, 33 bp, Homo sapien
tcaatgtgaggaagtacagtgtagtgatcaaga

SEQ ID NO: 36456 - DNA, 33 bp, Homo sapien
tcaatgtgaggaagtatagtgtagtgatcaaga

SEQ ID NO: 36457 - DNA, 33 bp, Homo sapien
atattttaatgcaaggaccttcaaaagaattta

SEQ ID NO: 36458 - DNA, 33 bp, Homo sapien
atattttaatgcaaggtccttcaaaagaattta

SEQ ID NO: 36459 - DNA, 33 bp, Homo sapien
cattcctcggcttgtaaaggcatcactccaatc

SEQ ID NO: 36460 - DNA, 33 bp, Homo sapien
cattcctcggcttgtagaggcatcactccaatc

SEQ ID NO: 36461 - DNA, 33 bp, Homo sapien
taaaatagatgctccacattattacctctctta

SEQ ID NO: 36462 - DNA, 33 bp, Homo sapien
taaaatagatgctccatattattacctctctta

SEQ ID NO: 36463 - DNA, 33 bp, Homo sapien
ctgactctagcaggttaaaatggagagaaaatg

SEQ ID NO: 36464 - DNA, 33 bp, Homo sapien
ctgactctagcaggtttaaatggagagaaaatg

SEQ ID NO: 36465 - DNA, 33 bp, Homo sapien
atgccattagagaaaaatatgaaaatgttcagt

SEQ ID NO: 36466 - DNA, 33 bp, Homo sapien
atgccattagagaaaattatgaaaatgttcagt

SEQ ID NO: 36467 - DNA, 33 bp, Homo sapien
ctccaaagagaacttacaggaaatggacctact

SEQ ID NO: 36468 - DNA, 33 bp, Homo sapien
ctccaaagagaacttataggaaatggacctact

SEQ ID NO: 36469 - DNA, 33 bp, Homo sapien
actcatcactgctatgaatttgcctaaggagaa

SEQ ID NO: 36470 - DNA, 33 bp, Homo sapien
actcatcactgctatggatttgcctaaggagaa

SEQ ID NO: 36471 - DNA, 33 bp, Homo sapien
tattttattgtgacaacggataatattttttga

SEQ ID NO: 36472 - DNA, 33 bp, Homo sapien
tattttattgtgacaatggataatattttttga

SEQ ID NO: 36473 - DNA, 33 bp, Homo sapien
gatgttatttgggggagtaagagatttagacaa

SEQ ID NO: 36474 - DNA, 33 bp, Homo sapien
gatgttatttgggggattaagagatttagacaa

SEQ ID NO: 36475 - DNA, 33 bp, Homo sapien
cccttttcattacccacagctgaaatgcagggc

SEQ ID NO: 36476 - DNA, 33 bp, Homo sapien
cccttttcattacccatagctgaaatgcagggc

SEQ ID NO: 36477 - DNA, 33 bp, Homo sapien
ttcttataggacagaaactcaagtaacctaatt

SEQ ID NO: 36478 - DNA, 33 bp, Homo sapien
ttcttataggacagaatctcaagtaacctaatt

SEQ ID NO: 36479 - DNA, 33 bp, Homo sapien
tattttgttcctagataactctaacactaaata

SEQ ID NO: 36480 - DNA, 33 bp, Homo sapien
tattttgttcctagatgactctaacactaaata

SEQ ID NO: 36481 - DNA, 33 bp, Homo sapien
atcttaactagaataaaagcatcataaaattaa

SEQ ID NO: 36482 - DNA, 33 bp, Homo sapien
atcttaactagaataagagcatcataaaattaa

SEQ ID NO: 36483 - DNA, 33 bp, Homo sapien
aaatatttatcgatgcaaaaagtatagattttt

SEQ ID NO: 36484 - DNA, 33 bp, Homo sapien
aaatatttatcgatgcgaaaagtatagattttt

SEQ ID NO: 36485 - DNA, 33 bp, Homo sapien
tcatatccatttttacaaagaaatcccagactg

SEQ ID NO: 36486 - DNA, 33 bp, Homo sapien
tcatatccatttttacgaagaaatcccagactg

SEQ ID NO: 36487 - DNA, 33 bp, Homo sapien
gaattccttccacctaagaacctgtgaggtcaa

SEQ ID NO: 36488 - DNA, 33 bp, Homo sapien
gaattccttccacctacgaacctgtgaggtcaa

SEQ ID NO: 36489 - DNA, 33 bp, Homo sapien
tgtcatgcctaaggaaaatgctgagctctctga

SEQ ID NO: 36490 - DNA, 33 bp, Homo sapien
tgtcatgcctaaggaagatgctgagctctctga

SEQ ID NO: 36491 - DNA, 33 bp, Homo sapien
tctcttctgtgattgactaccttctgcatatgc

SEQ ID NO: 36492 - DNA, 33 bp, Homo sapien
tctcttctgtgattgagtaccttctgcatatgc

SEQ ID NO: 36493 - DNA, 33 bp, Homo sapien
attatgactattccagaaaaattagaatacata

SEQ ID NO: 36494 - DNA, 33 bp, Homo sapien
attatgactattccaggaaaattagaatacata

SEQ ID NO: 36495 - DNA, 33 bp, Homo sapien
ttttaaattcaccaataactgtatcacctccat

SEQ ID NO: 36496 - DNA, 33 bp, Homo sapien
ttttaaattcaccaatcactgtatcacctccat

SEQ ID NO: 36497 - DNA, 33 bp, Homo sapien
taatactattgtatcaagaaactgtttgatgca

SEQ ID NO: 36498 - DNA, 33 bp, Homo sapien
taatactattgtatcaggaaactgtttgatgca

SEQ ID NO: 36499 - DNA, 33 bp, Homo sapien
accctagacacacatacataccccatcaccatc

SEQ ID NO: 36500 - DNA, 33 bp, Homo sapien
accctagacacacatagataccccatcaccatc

SEQ ID NO: 36501 - DNA, 33 bp, Homo sapien
ttaggatatggggcaaacatcttctctgtgtct

SEQ ID NO: 36502 - DNA, 33 bp, Homo sapien
ttaggatatggggcaagcatcttctctgtgtct

SEQ ID NO: 36503 - DNA, 33 bp, Homo sapien
agcaatctaaagaagcaccaagataattacttg

SEQ ID NO: 36504 - DNA, 33 bp, Homo sapien
agcaatctaaagaagcgccaagataattacttg

SEQ ID NO: 36505 - DNA, 33 bp, Homo sapien
aaaatactgctgggaaatgaatagacaataact

SEQ ID NO: 36506 - DNA, 33 bp, Homo sapien
aaaatactgctgggaagtgaatagacaataact

SEQ ID NO: 36507 - DNA, 33 bp, Homo sapien
acaaatcagtggtttcccgaagttggagattga

SEQ ID NO: 36508 - DNA, 33 bp, Homo sapien
acaaatcagtggtttctcgaagttggagattga

SEQ ID NO: 36509 - DNA, 33 bp, Homo sapien
gctttatgagttttgacgaatgcatactttcat

SEQ ID NO: 36510 - DNA, 33 bp, Homo sapien
gctttatgagttttgatgaatgcatactttcat

SEQ ID NO: 36511 - DNA, 33 bp, Homo sapien
tccaattaggaaataaatacatggaaaagtgtt

SEQ ID NO: 36512 - DNA, 33 bp, Homo sapien
tccaattaggaaataagtacatggaaaagtgtt

SEQ ID NO: 36513 - DNA, 33 bp, Homo sapien
ttcaagcatgaataatcaggacaagaacttaaa

SEQ ID NO: 36514 - DNA, 33 bp, Homo sapien
ttcaagcatgaataattaggacaagaacttaaa

SEQ ID NO: 36515 - DNA, 33 bp, Homo sapien
ctaaggataattaatagagtttttgtgtcttgg

SEQ ID NO: 36516 - DNA, 33 bp, Homo sapien
ctaaggataattaatatagtttttgtgtcttgg

SEQ ID NO: 36517 - DNA, 33 bp, Homo sapien
cagtacataatattcaaagttggtctgaccaga

SEQ ID NO: 36518 - DNA, 33 bp, Homo sapien
cagtacataatattcagagttggtctgaccaga

SEQ ID NO: 36519 - DNA, 33 bp, Homo sapien
gagaactgtctgataacgtatagactcaggcat

SEQ ID NO: 36520 - DNA, 33 bp, Homo sapien
gagaactgtctgataatgtatagactcaggcat

SEQ ID NO: 36521 - DNA, 33 bp, Homo sapien
gccttgtattttgctaagtatggtgattctgcg

SEQ ID NO: 36522 - DNA, 33 bp, Homo sapien
gccttgtattttgctacgtatggtgattctgcg

SEQ ID NO: 36523 - DNA, 33 bp, Homo sapien
tatgcttctgggataaatgtccatgggaatgtg

SEQ ID NO: 36524 - DNA, 33 bp, Homo sapien
tatgcttctgggataagtgtccatgggaatgtg

SEQ ID NO: 36525 - DNA, 33 bp, Homo sapien
tctgttaaaaccaacaaagactgtctgatacac

SEQ ID NO: 36526 - DNA, 33 bp, Homo sapien
tctgttaaaaccaacagagactgtctgatacac

SEQ ID NO: 36527 - DNA, 33 bp, Homo sapien
ggacatgcagttatccaaaggattgttcattca

SEQ ID NO: 36528 - DNA, 33 bp, Homo sapien
ggacatgcagttatccgaaggattgttcattca

SEQ ID NO: 36529 - DNA, 33 bp, Homo sapien
atacaaaaaaatattaaccaggcagtggtgcat

SEQ ID NO: 36530 - DNA, 33 bp, Homo sapien
atacaaaaaaatattagccaggcagtggtgcat

SEQ ID NO: 36531 - DNA, 33 bp, Homo sapien
attattgagatcttgaaaggtgacattaaatct

SEQ ID NO: 36532 - DNA, 33 bp, Homo sapien
attattgagatcttgagaggtgacattaaatct

SEQ ID NO: 36533 - DNA, 33 bp, Homo sapien
cattcagatagctctaacaaaatatcacaaact

SEQ ID NO: 36534 - DNA, 33 bp, Homo sapien
cattcagatagctctatcaaaatatcacaaact

SEQ ID NO: 36535 - DNA, 33 bp, Homo sapien
agcaagggtgaataaaccaggaagactttgtaa

SEQ ID NO: 36536 - DNA, 33 bp, Homo sapien
agcaagggtgaataaatcaggaagactttgtaa

SEQ ID NO: 36537 - DNA, 33 bp, Homo sapien
atactattattatgacaactggtgccatgacca

SEQ ID NO: 36538 - DNA, 33 bp, Homo sapien
atactattattatgactactggtgccatgacca

SEQ ID NO: 36539 - DNA, 33 bp, Homo sapien
tattgtttctactccaaacacaatccctgacca

SEQ ID NO: 36540 - DNA, 33 bp, Homo sapien
tattgtttctactccagacacaatccctgacca

SEQ ID NO: 36541 - DNA, 33 bp, Homo sapien
gcattgctacaggagaaagtattattgtttatg

SEQ ID NO: 36542 - DNA, 33 bp, Homo sapien
gcattgctacaggagacagtattattgtttatg

SEQ ID NO: 36543 - DNA, 33 bp, Homo sapien
aatcagaagtcacaaaatacttttcactcattg

SEQ ID NO: 36544 - DNA, 33 bp, Homo sapien
aatcagaagtcacaaagtacttttcactcattg

SEQ ID NO: 36545 - DNA, 33 bp, Homo sapien
cccatatgcagaaggaaaaagaagggcagcttt

SEQ ID NO: 36546 - DNA, 33 bp, Homo sapien
cccatatgcagaaggataaagaagggcagcttt

SEQ ID NO: 36547 - DNA, 33 bp, Homo sapien
gatacatagctgcatacacactgagagctgctt

SEQ ID NO: 36548 - DNA, 33 bp, Homo sapien
gatacatagctgcatagacactgagagctgctt

SEQ ID NO: 36549 - DNA, 33 bp, Homo sapien
ggcttttggatctctcggaagacgaaaggcctt

SEQ ID NO: 36550 - DNA, 33 bp, Homo sapien
ggcttttggatctctctgaagacgaaaggcctt

SEQ ID NO: 36551 - DNA, 33 bp, Homo sapien
ctgtagcagagtcaaaattaaataagacacagt

SEQ ID NO: 36552 - DNA, 33 bp, Homo sapien
ctgtagcagagtcaaatttaaataagacacagt

SEQ ID NO: 36553 - DNA, 33 bp, Homo sapien
ctgagcatttctgccaaaacagtttctcagtca

SEQ ID NO: 36554 - DNA, 33 bp, Homo sapien
ctgagcatttctgccagaacagtttctcagtca

SEQ ID NO: 36555 - DNA, 33 bp, Homo sapien
cattttcatgtaccataacataccttcttaacc

SEQ ID NO: 36556 - DNA, 33 bp, Homo sapien
cattttcatgtaccatgacataccttcttaacc

SEQ ID NO: 36557 - DNA, 33 bp, Homo sapien
agacgccgatgtcaaacgcctgtccatcacatc

SEQ ID NO: 36558 - DNA, 33 bp, Homo sapien
agacgccgatgtcaaatgcctgtccatcacatc

SEQ ID NO: 36559 - DNA, 33 bp, Homo sapien
ctcactgtgatatccacggaacccctcatcaaa

SEQ ID NO: 36560 - DNA, 33 bp, Homo sapien
ctcactgtgatatccatggaacccctcatcaaa

SEQ ID NO: 36561 - DNA, 33 bp, Homo sapien
accatctcaattaatccattcaatttctacttg

SEQ ID NO: 36562 - DNA, 33 bp, Homo sapien
accatctcaattaatctattcaatttctacttg

SEQ ID NO: 36563 - DNA, 33 bp, Homo sapien
ctgctgcttctcagtcgatctcagttaacactg

SEQ ID NO: 36564 - DNA, 33 bp, Homo sapien
ctgctgcttctcagtctatctcagttaacactg

SEQ ID NO: 36565 - DNA, 33 bp, Homo sapien
tctgtctaccagcagactccttttttccctcct

SEQ ID NO: 36566 - DNA, 33 bp, Homo sapien
tctgtctaccagcagagtccttttttccctcct

SEQ ID NO: 36567 - DNA, 33 bp, Homo sapien
tgaaaaagattggataactttctgccagattgt

SEQ ID NO: 36568 - DNA, 33 bp, Homo sapien
tgaaaaagattggatacctttctgccagattgt

SEQ ID NO: 36569 - DNA, 33 bp, Homo sapien
tctctgaaaactctgaactgaggcaggagaaag

SEQ ID NO: 36570 - DNA, 33 bp, Homo sapien
tctctgaaaactctgatctgaggcaggagaaag

SEQ ID NO: 36571 - DNA, 33 bp, Homo sapien
ctgctaattcaggttgcatattctggcctatat

SEQ ID NO: 36572 - DNA, 33 bp, Homo sapien
ctgctaattcaggttgtatattctggcctatat

SEQ ID NO: 36573 - DNA, 33 bp, Homo sapien
tgaagcttccagggacaaatacttatacatgta

SEQ ID NO: 36574 - DNA, 33 bp, Homo sapien
tgaagcttccagggacgaatacttatacatgta

SEQ ID NO: 36575 - DNA, 33 bp, Homo sapien
atctttaacatagtcacattttgcctctgtaat

SEQ ID NO: 36576 - DNA, 33 bp, Homo sapien
atctttaacatagtcatattttgcctctgtaat

SEQ ID NO: 36577 - DNA, 33 bp, Homo sapien
ttttccaaaaatgggacgacagaaagagcctga

SEQ ID NO: 36578 - DNA, 33 bp, Homo sapien
ttttccaaaaatgggatgacagaaagagcctga

SEQ ID NO: 36579 - DNA, 33 bp, Homo sapien
tggggagtattaaatgaagcaatgggttaaatg

SEQ ID NO: 36580 - DNA, 33 bp, Homo sapien
tggggagtattaaatggagcaatgggttaaatg

SEQ ID NO: 36581 - DNA, 33 bp, Homo sapien
attgtgaaaataatgcgcactttcattagactg

SEQ ID NO: 36582 - DNA, 33 bp, Homo sapien
attgtgaaaataatgctcactttcattagactg

SEQ ID NO: 36583 - DNA, 33 bp, Homo sapien
aaactgttttcacgtacaaaatttgtcaagggt

SEQ ID NO: 36584 - DNA, 33 bp, Homo sapien
aaactgttttcacgtagaaaatttgtcaagggt

SEQ ID NO: 36585 - DNA, 33 bp, Homo sapien
atagacctgtataccaaaaacatcaaggaaaaa

SEQ ID NO: 36586 - DNA, 33 bp, Homo sapien
atagacctgtataccagaaacatcaaggaaaaa

SEQ ID NO: 36587 - DNA, 33 bp, Homo sapien
gtggtgagaagagtaacagaaacagaaattgaa

SEQ ID NO: 36588 - DNA, 33 bp, Homo sapien
gtggtgagaagagtaagagaaacagaaattgaa

SEQ ID NO: 36589 - DNA, 33 bp, Homo sapien
ttggatttttggtatacaaagatgatgaatttt

SEQ ID NO: 36590 - DNA, 33 bp, Homo sapien
ttggatttttggtatataaagatgatgaatttt

SEQ ID NO: 36591 - DNA, 33 bp, Homo sapien
aacccaggagaccaaagaatgtaaacatgaaag

SEQ ID NO: 36592 - DNA, 33 bp, Homo sapien
aacccaggagaccaaataatgtaaacatgaaag

SEQ ID NO: 36593 - DNA, 33 bp, Homo sapien
tataaaatgttcatacaatgttgagcttatttt

SEQ ID NO: 36594 - DNA, 33 bp, Homo sapien
tataaaatgttcataccatgttgagcttatttt

SEQ ID NO: 36595 - DNA, 33 bp, Homo sapien
tcagtaagctgaactaacattaacactggtcta

SEQ ID NO: 36596 - DNA, 33 bp, Homo sapien
tcagtaagctgaactaccattaacactggtcta

SEQ ID NO: 36597 - DNA, 33 bp, Homo sapien
aatcacatgatgtatgcaaccaatactttcact

SEQ ID NO: 36598 - DNA, 33 bp, Homo sapien
aatcacatgatgtatggaaccaatactttcact

SEQ ID NO: 36599 - DNA, 33 bp, Homo sapien
catcatgacataatccagcagagaatttatctt

SEQ ID NO: 36600 - DNA, 33 bp, Homo sapien
catcatgacataatccggcagagaatttatctt

SEQ ID NO: 36601 - DNA, 33 bp, Homo sapien
ctttaccagaatgcccaataatctaggctagtt

SEQ ID NO: 36602 - DNA, 33 bp, Homo sapien
ctttaccagaatgcccgataatctaggctagtt

SEQ ID NO: 36603 - DNA, 33 bp, Homo sapien
gaaggaactccggatacaatgtcttggctgttg

SEQ ID NO: 36604 - DNA, 33 bp, Homo sapien
gaaggaactccggatataatgtcttggctgttg

SEQ ID NO: 36605 - DNA, 33 bp, Homo sapien
taaataaaattgtgtcactatcttgttttaaac

SEQ ID NO: 36606 - DNA, 33 bp, Homo sapien
taaataaaattgtgtccctatcttgttttaaac

SEQ ID NO: 36607 - DNA, 33 bp, Homo sapien
tctgttaaaagtatcaataggaatgcgttaggg

SEQ ID NO: 36608 - DNA, 33 bp, Homo sapien
tctgttaaaagtatcagtaggaatgcgttaggg

SEQ ID NO: 36609 - DNA, 33 bp, Homo sapien
tatacagggtcctatgacaggtattatatttta

SEQ ID NO: 36610 - DNA, 33 bp, Homo sapien
tatacagggtcctatggcaggtattatatttta

SEQ ID NO: 36611 - DNA, 33 bp, Homo sapien
aaacattcaactacaaagtggcccaatcattgt

SEQ ID NO: 36612 - DNA, 33 bp, Homo sapien
aaacattcaactacaatgtggcccaatcattgt

SEQ ID NO: 36613 - DNA, 33 bp, Homo sapien
agtactcacaacagaaagatgtctagactgttt

SEQ ID NO: 36614 - DNA, 33 bp, Homo sapien
agtactcacaacagaaggatgtctagactgttt

SEQ ID NO: 36615 - DNA, 33 bp, Homo sapien
aatttgaagaaatccaagagtcctgcaaatgac

SEQ ID NO: 36616 - DNA, 33 bp, Homo sapien
aatttgaagaaatccaggagtcctgcaaatgac

SEQ ID NO: 36617 - DNA, 33 bp, Homo sapien
ttctaacattaatacaaattgggtctctttctg

SEQ ID NO: 36618 - DNA, 33 bp, Homo sapien
ttctaacattaatacagattgggtctctttctg

SEQ ID NO: 36619 - DNA, 33 bp, Homo sapien
ttctcaagttagagaacggcaaatcaaaggcct

SEQ ID NO: 36620 - DNA, 33 bp, Homo sapien
ttctcaagttagagaatggcaaatcaaaggcct

SEQ ID NO: 36621 - DNA, 33 bp, Homo sapien
aaaaggaattcttagacggtgaagcatttgaca

SEQ ID NO: 36622 - DNA, 33 bp, Homo sapien
aaaaggaattcttagatggtgaagcatttgaca

SEQ ID NO: 36623 - DNA, 33 bp, Homo sapien
aaaccaaagtgctttaactaagacatatgattt

SEQ ID NO: 36624 - DNA, 33 bp, Homo sapien
aaaccaaagtgctttatctaagacatatgattt

SEQ ID NO: 36625 - DNA, 33 bp, Homo sapien
ataatttcacggacaaatcatttaaatgagcag

SEQ ID NO: 36626 - DNA, 33 bp, Homo sapien
ataatttcacggacaagtcatttaaatgagcag

SEQ ID NO: 36627 - DNA, 33 bp, Homo sapien
ctgggggcaaatgaccgactgagacactagcca

SEQ ID NO: 36628 - DNA, 33 bp, Homo sapien
ctgggggcaaatgacctactgagacactagcca

SEQ ID NO: 36629 - DNA, 33 bp, Homo sapien
taaatggtattctgaccgatgttatgtaggaac

SEQ ID NO: 36630 - DNA, 33 bp, Homo sapien
taaatggtattctgactgatgttatgtaggaac

SEQ ID NO: 36631 - DNA, 33 bp, Homo sapien
tgcaatcataaaaaagaaggcagactccaagaa

SEQ ID NO: 36632 - DNA, 33 bp, Homo sapien
tgcaatcataaaaaaggaggcagactccaagaa

SEQ ID NO: 36633 - DNA, 33 bp, Homo sapien
ttgaacagagggcgaaaggagcagacacaagag

SEQ ID NO: 36634 - DNA, 33 bp, Homo sapien
ttgaacagagggcgaacggagcagacacaagag

SEQ ID NO: 36635 - DNA, 33 bp, Homo sapien
ctatgaaagtgatttgaaaggaagttcagaaac

SEQ ID NO: 36636 - DNA, 33 bp, Homo sapien
ctatgaaagtgatttgcaaggaagttcagaaac

SEQ ID NO: 36637 - DNA, 33 bp, Homo sapien
attggccttttatttaaggttagctcatccctt

SEQ ID NO: 36638 - DNA, 33 bp, Homo sapien
attggccttttatttatggttagctcatccctt

SEQ ID NO: 36639 - DNA, 33 bp, Homo sapien
ttcctgccacaagccactgaggaagtgaggcct

SEQ ID NO: 36640 - DNA, 33 bp, Homo sapien
ttcctgccacaagccagtgaggaagtgaggcct

SEQ ID NO: 36641 - DNA, 33 bp, Homo sapien
gttggtaaattccttgcaggaggtgcagtgtcc

SEQ ID NO: 36642 - DNA, 33 bp, Homo sapien
gttggtaaattccttgtaggaggtgcagtgtcc

SEQ ID NO: 36643 - DNA, 33 bp, Homo sapien
atgggatagttagggaagagactctgatggaac

SEQ ID NO: 36644 - DNA, 33 bp, Homo sapien
atgggatagttagggatgagactctgatggaac

SEQ ID NO: 36645 - DNA, 33 bp, Homo sapien
atgtcctttcattttccctcccagattccacat

SEQ ID NO: 36646 - DNA, 33 bp, Homo sapien
atgtcctttcattttctctcccagattccacat

SEQ ID NO: 36647 - DNA, 33 bp, Homo sapien
agagcttgcgttattaactaatccagaccagtt

SEQ ID NO: 36648 - DNA, 33 bp, Homo sapien
agagcttgcgttattagctaatccagaccagtt

SEQ ID NO: 36649 - DNA, 33 bp, Homo sapien
tggctttagggttaccaaatccaatgtgtatgg

SEQ ID NO: 36650 - DNA, 33 bp, Homo sapien
tggctttagggttaccgaatccaatgtgtatgg

SEQ ID NO: 36651 - DNA, 33 bp, Homo sapien
ttatcttgtcttatgaataaaatgttcaaggaa

SEQ ID NO: 36652 - DNA, 33 bp, Homo sapien
ttatcttgtcttatgattaaaatgttcaaggaa

SEQ ID NO: 36653 - DNA, 33 bp, Homo sapien
tctaaagtacaacagccctccctaaccatggtg

SEQ ID NO: 36654 - DNA, 33 bp, Homo sapien
tctaaagtacaacagctctccctaaccatggtg

SEQ ID NO: 36655 - DNA, 33 bp, Homo sapien
actcaccataaataaccagtcttttggtagata

SEQ ID NO: 36656 - DNA, 33 bp, Homo sapien
actcaccataaataactagtcttttggtagata

SEQ ID NO: 36657 - DNA, 33 bp, Homo sapien
aatagactgccagacaatacatagactcagaca

SEQ ID NO: 36658 - DNA, 33 bp, Homo sapien
aatagactgccagacagtacatagactcagaca

SEQ ID NO: 36659 - DNA, 33 bp, Homo sapien
aagagcaagccatgtgaatatctggacaacaaa

SEQ ID NO: 36660 - DNA, 33 bp, Homo sapien
aagagcaagccatgtggatatctggacaacaaa

SEQ ID NO: 36661 - DNA, 33 bp, Homo sapien
aggtctggtccctcacccaatgtgaacctataa

SEQ ID NO: 36662 - DNA, 33 bp, Homo sapien
aggtctggtccctcactcaatgtgaacctataa

SEQ ID NO: 36663 - DNA, 33 bp, Homo sapien
atgtccacaaagagaacttaatatattgtacat

SEQ ID NO: 36664 - DNA, 33 bp, Homo sapien
atgtccacaaagagaatttaatatattgtacat

SEQ ID NO: 36665 - DNA, 33 bp, Homo sapien
tgttttgagtgctacactaaacaaacaaataat

SEQ ID NO: 36666 - DNA, 33 bp, Homo sapien
tgttttgagtgctacattaaacaaacaaataat

SEQ ID NO: 36667 - DNA, 33 bp, Homo sapien
taaattaaattgatgaagtttgaaaattactta

SEQ ID NO: 36668 - DNA, 33 bp, Homo sapien
taaattaaattgatgaggtttgaaaattactta

SEQ ID NO: 36669 - DNA, 33 bp, Homo sapien
ataatccaggaccgtgaacaggtgggcagtgtg

SEQ ID NO: 36670 - DNA, 33 bp, Homo sapien
ataatccaggaccgtggacaggtgggcagtgtg

SEQ ID NO: 36671 - DNA, 33 bp, Homo sapien
tacgatgagagataacactgagaggtatggata

SEQ ID NO: 36672 - DNA, 33 bp, Homo sapien
tacgatgagagataaccctgagaggtatggata

SEQ ID NO: 36673 - DNA, 33 bp, Homo sapien
cagatctggtttccaacagtatggctatttcaa

SEQ ID NO: 36674 - DNA, 33 bp, Homo sapien
cagatctggtttccaatagtatggctatttcaa

SEQ ID NO: 36675 - DNA, 33 bp, Homo sapien
tttcgtcttctgaagaaatttctggagttttta

SEQ ID NO: 36676 - DNA, 33 bp, Homo sapien
tttcgtcttctgaagacatttctggagttttta

SEQ ID NO: 36677 - DNA, 33 bp, Homo sapien
ccctatgatgatgaccaggagaaataaagcagc

SEQ ID NO: 36678 - DNA, 33 bp, Homo sapien
ccctatgatgatgaccgggagaaataaagcagc

SEQ ID NO: 36679 - DNA, 33 bp, Homo sapien
ttcattctgttgatgggcattagagtagtttct

SEQ ID NO: 36680 - DNA, 33 bp, Homo sapien
ttcattctgttgatggtcattagagtagtttct

SEQ ID NO: 36681 - DNA, 33 bp, Homo sapien
catgtgatggcctagaccacctttggaaatgtt

SEQ ID NO: 36682 - DNA, 33 bp, Homo sapien
catgtgatggcctagatcacctttggaaatgtt

SEQ ID NO: 36683 - DNA, 33 bp, Homo sapien
tgaaataaccgtatgacaagcccaagtgacaca

SEQ ID NO: 36684 - DNA, 33 bp, Homo sapien
tgaaataaccgtatgataagcccaagtgacaca

SEQ ID NO: 36685 - DNA, 33 bp, Homo sapien
atgaaaatttaacctaagacaaaatgttgagca

SEQ ID NO: 36686 - DNA, 33 bp, Homo sapien
atgaaaatttaacctaggacaaaatgttgagca

SEQ ID NO: 36687 - DNA, 33 bp, Homo sapien
gcaaatcatctacactaactgggcagtatagtc

SEQ ID NO: 36688 - DNA, 33 bp, Homo sapien
gcaaatcatctacactgactgggcagtatagtc

SEQ ID NO: 36689 - DNA, 33 bp, Homo sapien
ctttcactggtgattcaaaaatagaggtttgtg

SEQ ID NO: 36690 - DNA, 33 bp, Homo sapien
ctttcactggtgattctaaaatagaggtttgtg

SEQ ID NO: 36691 - DNA, 33 bp, Homo sapien
atagccagtaaggatacgagtcctgccagtagc

SEQ ID NO: 36692 - DNA, 33 bp, Homo sapien
atagccagtaaggatatgagtcctgccagtagc

SEQ ID NO: 36693 - DNA, 33 bp, Homo sapien
aatctaccaattcaaaacccttacacccaacca

SEQ ID NO: 36694 - DNA, 33 bp, Homo sapien
aatctaccaattcaaagcccttacacccaacca

SEQ ID NO: 36695 - DNA, 33 bp, Homo sapien
tgaactctttctcccaacttcttcactttggct

SEQ ID NO: 36696 - DNA, 33 bp, Homo sapien
tgaactctttctcccaccttcttcactttggct

SEQ ID NO: 36697 - DNA, 33 bp, Homo sapien
tatgcaagaaatcataatacatttagaaattcc

SEQ ID NO: 36698 - DNA, 33 bp, Homo sapien
tatgcaagaaatcatagtacatttagaaattcc

SEQ ID NO: 36699 - DNA, 33 bp, Homo sapien
cagcataaaaccagcaagaaatgatatgttaat

SEQ ID NO: 36700 - DNA, 33 bp, Homo sapien
cagcataaaaccagcatgaaatgatatgttaat

SEQ ID NO: 36701 - DNA, 33 bp, Homo sapien
tccctggtccctgaaaaatacattcttaggtca

SEQ ID NO: 36702 - DNA, 33 bp, Homo sapien
tccctggtccctgaaagatacattcttaggtca

SEQ ID NO: 36703 - DNA, 33 bp, Homo sapien
tcaggctgaatgtagacgcgcaagtgagtagga

SEQ ID NO: 36704 - DNA, 33 bp, Homo sapien
tcaggctgaatgtagatgcgcaagtgagtagga

SEQ ID NO: 36705 - DNA, 33 bp, Homo sapien
cagtcacttgtagaacagatcaatgtatttttg

SEQ ID NO: 36706 - DNA, 33 bp, Homo sapien
cagtcacttgtagaacggatcaatgtatttttg

SEQ ID NO: 36707 - DNA, 33 bp, Homo sapien
ccaagacatcaatgccgggaatcttgactgagc

SEQ ID NO: 36708 - DNA, 33 bp, Homo sapien
ccaagacatcaatgcctggaatcttgactgagc

SEQ ID NO: 36709 - DNA, 33 bp, Homo sapien
gctaatttttcactgtcaaagtactctttcttg

SEQ ID NO: 36710 - DNA, 33 bp, Homo sapien
gctaatttttcactgttaaagtactctttcttg

SEQ ID NO: 36711 - DNA, 33 bp, Homo sapien
tttgagaattttgtgtgaattgatatgtgggag

SEQ ID NO: 36712 - DNA, 33 bp, Homo sapien
tttgagaattttgtgttaattgatatgtgggag

SEQ ID NO: 36713 - DNA, 33 bp, Homo sapien
gaataagttaatggaaacctagtctattcttga

SEQ ID NO: 36714 - DNA, 33 bp, Homo sapien
gaataagttaatggaagcctagtctattcttga

SEQ ID NO: 36715 - DNA, 33 bp, Homo sapien
accgtaggctgaggacacacatttgattcctct

SEQ ID NO: 36716 - DNA, 33 bp, Homo sapien
accgtaggctgaggacgcacatttgattcctct

SEQ ID NO: 36717 - DNA, 33 bp, Homo sapien
taatgagaacaaaaaacatgataacaactcaaa

SEQ ID NO: 36718 - DNA, 33 bp, Homo sapien
taatgagaacaaaaaatatgataacaactcaaa

SEQ ID NO: 36719 - DNA, 33 bp, Homo sapien
gaaactgtcattctcaaacaacatgaagaaaac

SEQ ID NO: 36720 - DNA, 33 bp, Homo sapien
gaaactgtcattctcagacaacatgaagaaaac

SEQ ID NO: 36721 - DNA, 33 bp, Homo sapien
aagtgctagtcatagagaatgaatattttgatt

SEQ ID NO: 36722 - DNA, 33 bp, Homo sapien
aagtgctagtcatagataatgaatattttgatt

SEQ ID NO: 36723 - DNA, 33 bp, Homo sapien
ttatttcacaatcttacgctgattcatggttcc

SEQ ID NO: 36724 - DNA, 33 bp, Homo sapien
ttatttcacaatcttatgctgattcatggttcc

SEQ ID NO: 36725 - DNA, 33 bp, Homo sapien
aacattaagactaggaagttcaatttctatgtt

SEQ ID NO: 36726 - DNA, 33 bp, Homo sapien
aacattaagactaggaggttcaatttctatgtt

SEQ ID NO: 36727 - DNA, 33 bp, Homo sapien
agggcaagctgtagaacaattacttgaacacaa

SEQ ID NO: 36728 - DNA, 33 bp, Homo sapien
agggcaagctgtagaataattacttgaacacaa

SEQ ID NO: 36729 - DNA, 33 bp, Homo sapien
aataagaaagccattaacctcctctatgttgct

SEQ ID NO: 36730 - DNA, 33 bp, Homo sapien
aataagaaagccattatcctcctctatgttgct

SEQ ID NO: 36731 - DNA, 33 bp, Homo sapien
attaaatggcagtttacctctaagcaaacccat

SEQ ID NO: 36732 - DNA, 33 bp, Homo sapien
attaaatggcagtttatctctaagcaaacccat

SEQ ID NO: 36733 - DNA, 33 bp, Homo sapien
aaatgaggtcttaaagcagaagagttttcaaaa

SEQ ID NO: 36734 - DNA, 33 bp, Homo sapien
aaatgaggtcttaaaggagaagagttttcaaaa

SEQ ID NO: 36735 - DNA, 33 bp, Homo sapien
ttaaagtagataattaagatgaaatgtctaaat

SEQ ID NO: 36736 - DNA, 33 bp, Homo sapien
ttaaagtagataattaggatgaaatgtctaaat

SEQ ID NO: 36737 - DNA, 33 bp, Homo sapien
cccaaatctacctctccgacttcattttgtatc

SEQ ID NO: 36738 - DNA, 33 bp, Homo sapien
cccaaatctacctctctgacttcattttgtatc

SEQ ID NO: 36739 - DNA, 33 bp, Homo sapien
gagatagacttggtcaccaaggagcaatagctt

SEQ ID NO: 36740 - DNA, 33 bp, Homo sapien
gagatagacttggtcatcaaggagcaatagctt

SEQ ID NO: 36741 - DNA, 33 bp, Homo sapien
tttcagggttgggtacagcacaaaacagagatt

SEQ ID NO: 36742 - DNA, 33 bp, Homo sapien
tttcagggttgggtacggcacaaaacagagatt

SEQ ID NO: 36743 - DNA, 33 bp, Homo sapien
tggatgctgagttaacaatttatactttttgaa

SEQ ID NO: 36744 - DNA, 33 bp, Homo sapien
tggatgctgagttaaccatttatactttttgaa

SEQ ID NO: 36745 - DNA, 33 bp, Homo sapien
gtaaaatgttccagtacatgagagtccagaaga

SEQ ID NO: 36746 - DNA, 33 bp, Homo sapien
gtaaaatgttccagtatatgagagtccagaaga

SEQ ID NO: 36747 - DNA, 33 bp, Homo sapien
atgccatgtgtttcaacttatttttgccttagc

SEQ ID NO: 36748 - DNA, 33 bp, Homo sapien
atgccatgtgtttcaatttatttttgccttagc

SEQ ID NO: 36749 - DNA, 33 bp, Homo sapien
atagacaactcttcagaaattactttagccaca

SEQ ID NO: 36750 - DNA, 33 bp, Homo sapien
atagacaactcttcaggaattactttagccaca

SEQ ID NO: 36751 - DNA, 33 bp, Homo sapien
cctggcaacttaaaaacgctaagcaaattaaaa

SEQ ID NO: 36752 - DNA, 33 bp, Homo sapien
cctggcaacttaaaaatgctaagcaaattaaaa

SEQ ID NO: 36753 - DNA, 33 bp, Homo sapien
gaccaggcttgaaaaaagagtagtgttaaagaa

SEQ ID NO: 36754 - DNA, 33 bp, Homo sapien
gaccaggcttgaaaaaggagtagtgttaaagaa

SEQ ID NO: 36755 - DNA, 33 bp, Homo sapien
ctggcagttttatataaccgtagtaactacaat

SEQ ID NO: 36756 - DNA, 33 bp, Homo sapien
ctggcagttttatatacccgtagtaactacaat

SEQ ID NO: 36757 - DNA, 33 bp, Homo sapien
ccagtaatgccaccaagttcatgtagctgtcca

SEQ ID NO: 36758 - DNA, 33 bp, Homo sapien
ccagtaatgccaccaatttcatgtagctgtcca

SEQ ID NO: 36759 - DNA, 33 bp, Homo sapien
tcatatccaaataaccaaagcagatcctatttt

SEQ ID NO: 36760 - DNA, 33 bp, Homo sapien
tcatatccaaataaccgaagcagatcctatttt

SEQ ID NO: 36761 - DNA, 33 bp, Homo sapien
aggcaaaagatagaacacttcagtcagacaaga

SEQ ID NO: 36762 - DNA, 33 bp, Homo sapien
aggcaaaagatagaacgcttcagtcagacaaga

SEQ ID NO: 36763 - DNA, 33 bp, Homo sapien
ataaatttgtgcaacacgaaggtcatcggtgac

SEQ ID NO: 36764 - DNA, 33 bp, Homo sapien
ataaatttgtgcaacaggaaggtcatcggtgac

SEQ ID NO: 36765 - DNA, 33 bp, Homo sapien
tcactagctaagcaaaccattttctgctaagca

SEQ ID NO: 36766 - DNA, 33 bp, Homo sapien
tcactagctaagcaaatcattttctgctaagca

SEQ ID NO: 36767 - DNA, 33 bp, Homo sapien
attattaaagtgtagacccgattacaattttcc

SEQ ID NO: 36768 - DNA, 33 bp, Homo sapien
attattaaagtgtagatccgattacaattttcc

SEQ ID NO: 36769 - DNA, 33 bp, Homo sapien
aggtcaagaatcttaacagatgaccatcaaagt

SEQ ID NO: 36770 - DNA, 33 bp, Homo sapien
aggtcaagaatcttaatagatgaccatcaaagt

SEQ ID NO: 36771 - DNA, 33 bp, Homo sapien
agtgctgggaattttacggaacttctagctggt

SEQ ID NO: 36772 - DNA, 33 bp, Homo sapien
agtgctgggaattttatggaacttctagctggt

SEQ ID NO: 36773 - DNA, 33 bp, Homo sapien
cgaatataaaactgaacagaccaagtggagaca

SEQ ID NO: 36774 - DNA, 33 bp, Homo sapien
cgaatataaaactgaagagaccaagtggagaca

SEQ ID NO: 36775 - DNA, 33 bp, Homo sapien
ttgcaaatttggcatcagagataacatttacat

SEQ ID NO: 36776 - DNA, 33 bp, Homo sapien
ttgcaaatttggcatcggagataacatttacat

SEQ ID NO: 36777 - DNA, 33 bp, Homo sapien
tagtgaagattaccaacggggatgacagaccag

SEQ ID NO: 36778 - DNA, 33 bp, Homo sapien
tagtgaagattaccaatggggatgacagaccag

SEQ ID NO: 36779 - DNA, 33 bp, Homo sapien
tttcatagtgtgggaaacattgtaaaaatcaaa

SEQ ID NO: 36780 - DNA, 33 bp, Homo sapien
tttcatagtgtgggaagcattgtaaaaatcaaa

SEQ ID NO: 36781 - DNA, 33 bp, Homo sapien
acaatacagactacaaaaagatgtaaggtggag

SEQ ID NO: 36782 - DNA, 33 bp, Homo sapien
acaatacagactacaagaagatgtaaggtggag

SEQ ID NO: 36783 - DNA, 33 bp, Homo sapien
ataaagaaaatgagtaaaagatgtgacctaggc

SEQ ID NO: 36784 - DNA, 33 bp, Homo sapien
ataaagaaaatgagtacaagatgtgacctaggc

SEQ ID NO: 36785 - DNA, 33 bp, Homo sapien
tttaaagaaatcccagacattttcattcggtct

SEQ ID NO: 36786 - DNA, 33 bp, Homo sapien
tttaaagaaatcccagccattttcattcggtct

SEQ ID NO: 36787 - DNA, 33 bp, Homo sapien
ctgtcacctgaagtctcaatttagttattttca

SEQ ID NO: 36788 - DNA, 33 bp, Homo sapien
ctgtcacctgaagtctgaatttagttattttca

SEQ ID NO: 36789 - DNA, 33 bp, Homo sapien
ctagagccatagtgccaaccactggccaaacct

SEQ ID NO: 36790 - DNA, 33 bp, Homo sapien
ctagagccatagtgccgaccactggccaaacct

SEQ ID NO: 36791 - DNA, 33 bp, Homo sapien
ttccttgtgtttatagacatgttgctataagtg

SEQ ID NO: 36792 - DNA, 33 bp, Homo sapien
ttccttgtgtttataggcatgttgctataagtg

SEQ ID NO: 36793 - DNA, 33 bp, Homo sapien
aatatagagttggctacgtgatgtaccttgatg

SEQ ID NO: 36794 - DNA, 33 bp, Homo sapien
aatatagagttggctatgtgatgtaccttgatg

SEQ ID NO: 36795 - DNA, 33 bp, Homo sapien
ccctatttcttttttccctactcactcattaat

SEQ ID NO: 36796 - DNA, 33 bp, Homo sapien
ccctatttcttttttcgctactcactcattaat

SEQ ID NO: 36797 - DNA, 33 bp, Homo sapien
tgagtaattacttaatcatcatgcaactaacat

SEQ ID NO: 36798 - DNA, 33 bp, Homo sapien
tgagtaattacttaatgatcatgcaactaacat

SEQ ID NO: 36799 - DNA, 33 bp, Homo sapien
gagccagggaatcaggaaatggtggtaatagga

SEQ ID NO: 36800 - DNA, 33 bp, Homo sapien
gagccagggaatcagggaatggtggtaatagga

SEQ ID NO: 36801 - DNA, 33 bp, Homo sapien
gtatacattgtgaaaagattaaatgaagctaat

SEQ ID NO: 36802 - DNA, 33 bp, Homo sapien
gtatacattgtgaaaatattaaatgaagctaat

SEQ ID NO: 36803 - DNA, 33 bp, Homo sapien
tgtctaataggcccctcaagcttaccatgttca

SEQ ID NO: 36804 - DNA, 33 bp, Homo sapien
tgtctaataggccccttaagcttaccatgttca

SEQ ID NO: 36805 - DNA, 33 bp, Homo sapien
gaccatgataggagcagacttttacgtatatta

SEQ ID NO: 36806 - DNA, 33 bp, Homo sapien
gaccatgataggagcatacttttacgtatatta

SEQ ID NO: 36807 - DNA, 33 bp, Homo sapien
agattgggtctcagaacagtgccaatgtctgat

SEQ ID NO: 36808 - DNA, 33 bp, Homo sapien
agattgggtctcagaatagtgccaatgtctgat

SEQ ID NO: 36809 - DNA, 33 bp, Homo sapien
agacaaattcctgagacagaggagctcagaggg

SEQ ID NO: 36810 - DNA, 33 bp, Homo sapien
agacaaattcctgagatagaggagctcagaggg

SEQ ID NO: 36811 - DNA, 33 bp, Homo sapien
cgacagattcttgcatcagtgagatgtaaactt

SEQ ID NO: 36812 - DNA, 33 bp, Homo sapien
cgacagattcttgcatgagtgagatgtaaactt

SEQ ID NO: 36813 - DNA, 33 bp, Homo sapien
catctgggctccctgacgaagtgttgctattga

SEQ ID NO: 36814 - DNA, 33 bp, Homo sapien
catctgggctccctgatgaagtgttgctattga

SEQ ID NO: 36815 - DNA, 33 bp, Homo sapien
actcagggagactttccctctaccctccttcct

SEQ ID NO: 36816 - DNA, 33 bp, Homo sapien
actcagggagactttctctctaccctccttcct

SEQ ID NO: 36817 - DNA, 33 bp, Homo sapien
aatggtactttgtatactaaatgatttgctgaa

SEQ ID NO: 36818 - DNA, 33 bp, Homo sapien
aatggtactttgtatattaaatgatttgctgaa

SEQ ID NO: 36819 - DNA, 33 bp, Homo sapien
cacaaatggtcgcatacgaaccacctttcccca

SEQ ID NO: 36820 - DNA, 33 bp, Homo sapien
cacaaatggtcgcatatgaaccacctttcccca

SEQ ID NO: 36821 - DNA, 33 bp, Homo sapien
ggaatgggtcaaactccattctggaaatataat

SEQ ID NO: 36822 - DNA, 33 bp, Homo sapien
ggaatgggtcaaactctattctggaaatataat

SEQ ID NO: 36823 - DNA, 33 bp, Homo sapien
cttgtatctattctaccctgtaatttgtgcaaa

SEQ ID NO: 36824 - DNA, 33 bp, Homo sapien
cttgtatctattctactctgtaatttgtgcaaa

SEQ ID NO: 36825 - DNA, 33 bp, Homo sapien
gtgttcttggtggtcaaccagttttcctgtcta

SEQ ID NO: 36826 - DNA, 33 bp, Homo sapien
gtgttcttggtggtcatccagttttcctgtcta

SEQ ID NO: 36827 - DNA, 33 bp, Homo sapien
aatttctgttttgccaatacaatttcattagcc

SEQ ID NO: 36828 - DNA, 33 bp, Homo sapien
aatttctgttttgccagtacaatttcattagcc

SEQ ID NO: 36829 - DNA, 33 bp, Homo sapien
ataagtcctgaatcacaatgcctggtacagaga

SEQ ID NO: 36830 - DNA, 33 bp, Homo sapien
ataagtcctgaatcacgatgcctggtacagaga

SEQ ID NO: 36831 - DNA, 33 bp, Homo sapien
atgagtctatatgatgaagaaaaccatgttgtc

SEQ ID NO: 36832 - DNA, 33 bp, Homo sapien
atgagtctatatgatgcagaaaaccatgttgtc

SEQ ID NO: 36833 - DNA, 33 bp, Homo sapien
tgcagtcttccatgcccatcaacttcaggaaac

SEQ ID NO: 36834 - DNA, 33 bp, Homo sapien
tgcagtcttccatgccgatcaacttcaggaaac

SEQ ID NO: 36835 - DNA, 33 bp, Homo sapien
accttttcctttgtgacagtgagattaagaact

SEQ ID NO: 36836 - DNA, 33 bp, Homo sapien
accttttcctttgtgagagtgagattaagaact

SEQ ID NO: 36837 - DNA, 33 bp, Homo sapien
ttagaaaaaggaagaacgtagctcacaaagcaa

SEQ ID NO: 36838 - DNA, 33 bp, Homo sapien
ttagaaaaaggaagaatgtagctcacaaagcaa

SEQ ID NO: 36839 - DNA, 33 bp, Homo sapien
aattgtgacaacgctacgtgctgccaaggatgc

SEQ ID NO: 36840 - DNA, 33 bp, Homo sapien
aattgtgacaacgctatgtgctgccaaggatgc

SEQ ID NO: 36841 - DNA, 33 bp, Homo sapien
caagaatgcggacccacaagtgtgtgtttggga

SEQ ID NO: 36842 - DNA, 33 bp, Homo sapien
caagaatgcggacccataagtgtgtgtttggga

SEQ ID NO: 36843 - DNA, 33 bp, Homo sapien
gatttttcctcttcaacgtctaaggctttatgg

SEQ ID NO: 36844 - DNA, 33 bp, Homo sapien
gatttttcctcttcaatgtctaaggctttatgg

SEQ ID NO: 36845 - DNA, 33 bp, Homo sapien
catgaagaaggtacacaatgcagagctgttgac

SEQ ID NO: 36846 - DNA, 33 bp, Homo sapien
catgaagaaggtacacgatgcagagctgttgac

SEQ ID NO: 36847 - DNA, 33 bp, Homo sapien
gtgatgaaattgccaaaaatctctagatcttac

SEQ ID NO: 36848 - DNA, 33 bp, Homo sapien
gtgatgaaattgccaagaatctctagatcttac

SEQ ID NO: 36849 - DNA, 33 bp, Homo sapien
gtctggagtctttgtacgtatttggcagaactg

SEQ ID NO: 36850 - DNA, 33 bp, Homo sapien
gtctggagtctttgtatgtatttggcagaactg

SEQ ID NO: 36851 - DNA, 33 bp, Homo sapien
ggactgagagaatggaaaaactgatccacagga

SEQ ID NO: 36852 - DNA, 33 bp, Homo sapien
ggactgagagaatggacaaactgatccacagga

SEQ ID NO: 36853 - DNA, 33 bp, Homo sapien
aggagagagtacaaaaacatatagttaccatgc

SEQ ID NO: 36854 - DNA, 33 bp, Homo sapien
aggagagagtacaaaagcatatagttaccatgc

SEQ ID NO: 36855 - DNA, 33 bp, Homo sapien
atgatgtgaacactggaccacaaaaagggcttt

SEQ ID NO: 36856 - DNA, 33 bp, Homo sapien
atgatgtgaacactgggccacaaaaagggcttt

SEQ ID NO: 36857 - DNA, 33 bp, Homo sapien
tctgctgtttgtcttaaccttgaagataagcca

SEQ ID NO: 36858 - DNA, 33 bp, Homo sapien
tctgctgtttgtcttagccttgaagataagcca

SEQ ID NO: 36859 - DNA, 33 bp, Homo sapien
tgttgtggaatgtatcactattgtactcttcgt

SEQ ID NO: 36860 - DNA, 33 bp, Homo sapien
tgttgtggaatgtatcgctattgtactcttcgt

SEQ ID NO: 36861 - DNA, 33 bp, Homo sapien
ggggaaagaggacttacgatgtttctgtcttct

SEQ ID NO: 36862 - DNA, 33 bp, Homo sapien
ggggaaagaggacttatgatgtttctgtcttct

SEQ ID NO: 36863 - DNA, 33 bp, Homo sapien
aattgatgttcagagaagttaagaatgttgtac

SEQ ID NO: 36864 - DNA, 33 bp, Homo sapien
aattgatgttcagagaggttaagaatgttgtac

SEQ ID NO: 36865 - DNA, 33 bp, Homo sapien
tctctcaatttccttcacataatgtatcctatg

SEQ ID NO: 36866 - DNA, 33 bp, Homo sapien
tctctcaatttccttctcataatgtatcctatg

SEQ ID NO: 36867 - DNA, 33 bp, Homo sapien
gttgcctttgtacccaaaaggtgcatccaagta

SEQ ID NO: 36868 - DNA, 33 bp, Homo sapien
gttgcctttgtacccagaaggtgcatccaagta

SEQ ID NO: 36869 - DNA, 33 bp, Homo sapien
tatgtggaaattttgacaccaatgaatgtgaat

SEQ ID NO: 36870 - DNA, 33 bp, Homo sapien
tatgtggaaattttgataccaatgaatgtgaat

SEQ ID NO: 36871 - DNA, 33 bp, Homo sapien
gtagccagattcaaaaaggctggactccatcta

SEQ ID NO: 36872 - DNA, 33 bp, Homo sapien
gtagccagattcaaaagggctggactccatcta

SEQ ID NO: 36873 - DNA, 33 bp, Homo sapien
ctcccccaagccactgaagattgctaagggtct

SEQ ID NO: 36874 - DNA, 33 bp, Homo sapien
ctcccccaagccactggagattgctaagggtct

SEQ ID NO: 36875 - DNA, 33 bp, Homo sapien
gctattttaccatgagaagactcaaacaatcca

SEQ ID NO: 36876 - DNA, 33 bp, Homo sapien
gctattttaccatgaggagactcaaacaatcca

SEQ ID NO: 36877 - DNA, 33 bp, Homo sapien
tgacacaccataatgacgacattgagagcgtga

SEQ ID NO: 36878 - DNA, 33 bp, Homo sapien
tgacacaccataatgatgacattgagagcgtga

SEQ ID NO: 36879 - DNA, 33 bp, Homo sapien
aactgaatctatttgtgaatctaccacctctca

SEQ ID NO: 36880 - DNA, 33 bp, Homo sapien
aactgaatctatttgttaatctaccacctctca

SEQ ID NO: 36881 - DNA, 33 bp, Homo sapien
aagctgtattttttctaaagtcgcattgttaaa

SEQ ID NO: 36882 - DNA, 33 bp, Homo sapien
aagctgtattttttctgaagtcgcattgttaaa

SEQ ID NO: 36883 - DNA, 33 bp, Homo sapien
ctttctttgaatttaccaaatctgtttgtgtga

SEQ ID NO: 36884 - DNA, 33 bp, Homo sapien
ctttctttgaatttacgaaatctgtttgtgtga

SEQ ID NO: 36885 - DNA, 33 bp, Homo sapien
ttgtagatcctggctgaaattaaagacaagaaa

SEQ ID NO: 36886 - DNA, 33 bp, Homo sapien
ttgtagatcctggctgcaattaaagacaagaaa

SEQ ID NO: 36887 - DNA, 33 bp, Homo sapien
gtcacaatcatttatcactagctataacttttg

SEQ ID NO: 36888 - DNA, 33 bp, Homo sapien
gtcacaatcatttatccctagctataacttttg

SEQ ID NO: 36889 - DNA, 33 bp, Homo sapien
taatgagctatcaaaactattatacctcatcac

SEQ ID NO: 36890 - DNA, 33 bp, Homo sapien
taatgagctatcaaaattattatacctcatcac

SEQ ID NO: 36891 - DNA, 33 bp, Homo sapien
agacttgctgttctaaataatgtcccacatttt

SEQ ID NO: 36892 - DNA, 33 bp, Homo sapien
agacttgctgttctaagtaatgtcccacatttt

SEQ ID NO: 36893 - DNA, 33 bp, Homo sapien
ccagcagttgcctgacggtactgatctcacaaa

SEQ ID NO: 36894 - DNA, 33 bp, Homo sapien
ccagcagttgcctgactgtactgatctcacaaa

SEQ ID NO: 36895 - DNA, 33 bp, Homo sapien
tgtcaaaaaagactagaatgttctttctgctca

SEQ ID NO: 36896 - DNA, 33 bp, Homo sapien
tgtcaaaaaagactaggatgttctttctgctca

SEQ ID NO: 36897 - DNA, 33 bp, Homo sapien
gaccacctgtgacaacaccattggaagacaaaa

SEQ ID NO: 36898 - DNA, 33 bp, Homo sapien
gaccacctgtgacaaccccattggaagacaaaa

SEQ ID NO: 36899 - DNA, 33 bp, Homo sapien
ctggctttcacaagaaatgagtagcagagacag

SEQ ID NO: 36900 - DNA, 33 bp, Homo sapien
ctggctttcacaagaagtgagtagcagagacag

SEQ ID NO: 36901 - DNA, 33 bp, Homo sapien
tagagacactggcaatcacgcagaaggctggcc

SEQ ID NO: 36902 - DNA, 33 bp, Homo sapien
tagagacactggcaattacgcagaaggctggcc

SEQ ID NO: 36903 - DNA, 33 bp, Homo sapien
cctcactataatatggcccaactcttaggaaac

SEQ ID NO: 36904 - DNA, 33 bp, Homo sapien
cctcactataatatgggccaactcttaggaaac

SEQ ID NO: 36905 - DNA, 33 bp, Homo sapien
aacacagtacaaatgcagagttctcaaatatgt

SEQ ID NO: 36906 - DNA, 33 bp, Homo sapien
aacacagtacaaatgcggagttctcaaatatgt

SEQ ID NO: 36907 - DNA, 33 bp, Homo sapien
tagaacttactgcatacactgacttttgcccat

SEQ ID NO: 36908 - DNA, 33 bp, Homo sapien
tagaacttactgcatatactgacttttgcccat

SEQ ID NO: 36909 - DNA, 33 bp, Homo sapien
ctctcattatcccttggactctaatggctgttg

SEQ ID NO: 36910 - DNA, 33 bp, Homo sapien
ctctcattatcccttgtactctaatggctgttg

SEQ ID NO: 36911 - DNA, 33 bp, Homo sapien
ggatgtgcctgatttacggaatcttacagtgag

SEQ ID NO: 36912 - DNA, 33 bp, Homo sapien
ggatgtgcctgatttatggaatcttacagtgag

SEQ ID NO: 36913 - DNA, 33 bp, Homo sapien
agaagtagctctctcccgctagagaacagctgc

SEQ ID NO: 36914 - DNA, 33 bp, Homo sapien
agaagtagctctctcctgctagagaacagctgc

SEQ ID NO: 36915 - DNA, 33 bp, Homo sapien
gtaaattactttcaacaaatatccctattccag

SEQ ID NO: 36916 - DNA, 33 bp, Homo sapien
gtaaattactttcaactaatatccctattccag

SEQ ID NO: 36917 - DNA, 33 bp, Homo sapien
gagccatgaaagggaaagagtccctggacctgg

SEQ ID NO: 36918 - DNA, 33 bp, Homo sapien
gagccatgaaagggaaggagtccctggacctgg

SEQ ID NO: 36919 - DNA, 33 bp, Homo sapien
ggtttggctattaaaagctcattcagttggctc

SEQ ID NO: 36920 - DNA, 33 bp, Homo sapien
ggtttggctattaaaatctcattcagttggctc

SEQ ID NO: 36921 - DNA, 33 bp, Homo sapien
aagaagaaagaagcacagaacatgcctctagaa

SEQ ID NO: 36922 - DNA, 33 bp, Homo sapien
aagaagaaagaagcacggaacatgcctctagaa

SEQ ID NO: 36923 - DNA, 33 bp, Homo sapien
gaccaactaattaacaaacgggtccaggtaatt

SEQ ID NO: 36924 - DNA, 33 bp, Homo sapien
gaccaactaattaacagacgggtccaggtaatt

SEQ ID NO: 36925 - DNA, 33 bp, Homo sapien
agaaatcagccttaaacgttgaaatccagaaag

SEQ ID NO: 36926 - DNA, 33 bp, Homo sapien
agaaatcagccttaaatgttgaaatccagaaag

SEQ ID NO: 36927 - DNA, 33 bp, Homo sapien
gaaaatagattgtgcacgggcaagggttgaagt

SEQ ID NO: 36928 - DNA, 33 bp, Homo sapien
gaaaatagattgtgcatgggcaagggttgaagt

SEQ ID NO: 36929 - DNA, 33 bp, Homo sapien
cctgctgctctgtgcaagtgaagtcttggcaaa

SEQ ID NO: 36930 - DNA, 33 bp, Homo sapien
cctgctgctctgtgcaggtgaagtcttggcaaa

SEQ ID NO: 36931 - DNA, 33 bp, Homo sapien
aaatttggagcaatcacgacttaaaccaggagt

SEQ ID NO: 36932 - DNA, 33 bp, Homo sapien
aaatttggagcaatcatgacttaaaccaggagt

SEQ ID NO: 36933 - DNA, 33 bp, Homo sapien
ggagcctgaggttggaatagcacgttcacttac

SEQ ID NO: 36934 - DNA, 33 bp, Homo sapien
ggagcctgaggttggagtagcacgttcacttac

SEQ ID NO: 36935 - DNA, 33 bp, Homo sapien
atgtatggccagagaactgaaaatggcttatca

SEQ ID NO: 36936 - DNA, 33 bp, Homo sapien
atgtatggccagagaattgaaaatggcttatca

SEQ ID NO: 36937 - DNA, 33 bp, Homo sapien
actgctgtagtaacccaccattagtcctcttgc

SEQ ID NO: 36938 - DNA, 33 bp, Homo sapien
actgctgtagtaacccgccattagtcctcttgc

SEQ ID NO: 36939 - DNA, 33 bp, Homo sapien
gagaatgaaagaggtacgtcaaagatagaatca

SEQ ID NO: 36940 - DNA, 33 bp, Homo sapien
gagaatgaaagaggtatgtcaaagatagaatca

SEQ ID NO: 36941 - DNA, 33 bp, Homo sapien
ggccgaattggcgtcaatatgaccctgtgaaag

SEQ ID NO: 36942 - DNA, 33 bp, Homo sapien
ggccgaattggcgtcagtatgaccctgtgaaag

SEQ ID NO: 36943 - DNA, 33 bp, Homo sapien
tgctccctaggaaagcaagatgtttatgcaggc

SEQ ID NO: 36944 - DNA, 33 bp, Homo sapien
tgctccctaggaaagcgagatgtttatgcaggc

SEQ ID NO: 36945 - DNA, 33 bp, Homo sapien
aatctgcaagttgtaacactgcaaaagagtaag

SEQ ID NO: 36946 - DNA, 33 bp, Homo sapien
aatctgcaagttgtaatactgcaaaagagtaag

SEQ ID NO: 36947 - DNA, 33 bp, Homo sapien
ttaagaaaatcattgaagataccatcccggcta

SEQ ID NO: 36948 - DNA, 33 bp, Homo sapien
ttaagaaaatcattgacgataccatcccggcta

SEQ ID NO: 36949 - DNA, 33 bp, Homo sapien
tatgtgaagtttcacccgaatttcaatctcagc

SEQ ID NO: 36950 - DNA, 33 bp, Homo sapien
tatgtgaagtttcacctgaatttcaatctcagc

SEQ ID NO: 36951 - DNA, 33 bp, Homo sapien
tttgtattttggtagacacggagttacaccagg

SEQ ID NO: 36952 - DNA, 33 bp, Homo sapien
tttgtattttggtagagacggagttacaccagg

SEQ ID NO: 36953 - DNA, 33 bp, Homo sapien
gttatgtcaatcaggaccaactatttaaccgca

SEQ ID NO: 36954 - DNA, 33 bp, Homo sapien
gttatgtcaatcaggagcaactatttaaccgca

SEQ ID NO: 36955 - DNA, 33 bp, Homo sapien
gtgcagggctggttaaagtgtatatttcccagc

SEQ ID NO: 36956 - DNA, 33 bp, Homo sapien
gtgcagggctggttaacgtgtatatttcccagc

SEQ ID NO: 36957 - DNA, 33 bp, Homo sapien
aatgccaggagctactaagtaaacagcataggg

SEQ ID NO: 36958 - DNA, 33 bp, Homo sapien
aatgccaggagctactgagtaaacagcataggg

SEQ ID NO: 36959 - DNA, 33 bp, Homo sapien
cccataatataaaaacacagtaatccttaagtc

SEQ ID NO: 36960 - DNA, 33 bp, Homo sapien
cccataatataaaaacgcagtaatccttaagtc

SEQ ID NO: 36961 - DNA, 33 bp, Homo sapien
ctttgtctaaaacaacactttcactaggctcag

SEQ ID NO: 36962 - DNA, 33 bp, Homo sapien
ctttgtctaaaacaaccctttcactaggctcag

SEQ ID NO: 36963 - DNA, 33 bp, Homo sapien
cttatcattcccttccagatcacctctaccaga

SEQ ID NO: 36964 - DNA, 33 bp, Homo sapien
cttatcattcccttccggatcacctctaccaga

SEQ ID NO: 36965 - DNA, 33 bp, Homo sapien
gtgggctggccataaaccaatcaaaacctccta

SEQ ID NO: 36966 - DNA, 33 bp, Homo sapien
gtgggctggccataaatcaatcaaaacctccta

SEQ ID NO: 36967 - DNA, 33 bp, Homo sapien
ttccacctttccctacggcttacctcagtccca

SEQ ID NO: 36968 - DNA, 33 bp, Homo sapien
ttccacctttccctactgcttacctcagtccca

SEQ ID NO: 36969 - DNA, 33 bp, Homo sapien
gagatgaactgaagaaaggattgttaagcaaca

SEQ ID NO: 36970 - DNA, 33 bp, Homo sapien
gagatgaactgaagaagggattgttaagcaaca

SEQ ID NO: 36971 - DNA, 33 bp, Homo sapien
ttgtatgaggagttgacatagctcctgaaagag

SEQ ID NO: 36972 - DNA, 33 bp, Homo sapien
ttgtatgaggagttgagatagctcctgaaagag

SEQ ID NO: 36973 - DNA, 33 bp, Homo sapien
cagtgtactgtgtttccagatgatttggcctga

SEQ ID NO: 36974 - DNA, 33 bp, Homo sapien
cagtgtactgtgtttctagatgatttggcctga

SEQ ID NO: 36975 - DNA, 33 bp, Homo sapien
atctgaaagctcaaccaaagaggatgatctgct

SEQ ID NO: 36976 - DNA, 33 bp, Homo sapien
atctgaaagctcaaccgaagaggatgatctgct

SEQ ID NO: 36977 - DNA, 33 bp, Homo sapien
tttgatgaggcactttcaaactctttggcccat

SEQ ID NO: 36978 - DNA, 33 bp, Homo sapien
tttgatgaggcacttttaaactctttggcccat

SEQ ID NO: 36979 - DNA, 33 bp, Homo sapien
tggtgtggcttgcaaggctctacacaatctggt

SEQ ID NO: 36980 - DNA, 33 bp, Homo sapien
tggtgtggcttgcaagtctctacacaatctggt

SEQ ID NO: 36981 - DNA, 33 bp, Homo sapien
aaaatggtttctgctaaatgatcttacagtcaa

SEQ ID NO: 36982 - DNA, 33 bp, Homo sapien
aaaatggtttctgctagatgatcttacagtcaa

SEQ ID NO: 36983 - DNA, 33 bp, Homo sapien
gatatagtgccctaaactttagaaaaccagttt

SEQ ID NO: 36984 - DNA, 33 bp, Homo sapien
gatatagtgccctaaattttagaaaaccagttt

SEQ ID NO: 36985 - DNA, 33 bp, Homo sapien
aaggtcagtggtgtaactacaaaggccgatcta

SEQ ID NO: 36986 - DNA, 33 bp, Homo sapien
aaggtcagtggtgtaattacaaaggccgatcta

SEQ ID NO: 36987 - DNA, 33 bp, Homo sapien
atattgaatttggcaacgaatatgacaccaaag

SEQ ID NO: 36988 - DNA, 33 bp, Homo sapien
atattgaatttggcaatgaatatgacaccaaag

SEQ ID NO: 36989 - DNA, 33 bp, Homo sapien
taatgcctgagggtaaaggaaaacccatcttcc

SEQ ID NO: 36990 - DNA, 33 bp, Homo sapien
taatgcctgagggtaagggaaaacccatcttcc

SEQ ID NO: 36991 - DNA, 33 bp, Homo sapien
gtcccattttggcttccagaggatttgaaatct

SEQ ID NO: 36992 - DNA, 33 bp, Homo sapien
gtcccattttggcttctagaggatttgaaatct

SEQ ID NO: 36993 - DNA, 33 bp, Homo sapien
gtgctgaataatgaagcagtgtctaaaggcttg

SEQ ID NO: 36994 - DNA, 33 bp, Homo sapien
gtgctgaataatgaagtagtgtctaaaggcttg

SEQ ID NO: 36995 - DNA, 33 bp, Homo sapien
ggtaatttaagtcctacgatgagtttattaaca

SEQ ID NO: 36996 - DNA, 33 bp, Homo sapien
ggtaatttaagtcctatgatgagtttattaaca

SEQ ID NO: 36997 - DNA, 33 bp, Homo sapien
gtatttatttctaagcacataaaatcattttaa

SEQ ID NO: 36998 - DNA, 33 bp, Homo sapien
gtatttatttctaagcgcataaaatcattttaa

SEQ ID NO: 36999 - DNA, 33 bp, Homo sapien
aacaaaattaaacatacaggcaaaaagatatgg

SEQ ID NO: 37000 - DNA, 33 bp, Homo sapien
aacaaaattaaacatagaggcaaaaagatatgg

SEQ ID NO: 37001 - DNA, 33 bp, Homo sapien
aaatgtttgtaccaaccagaattcttgttcttt

SEQ ID NO: 37002 - DNA, 33 bp, Homo sapien
aaatgtttgtaccaactagaattcttgttcttt

SEQ ID NO: 37003 - DNA, 33 bp, Homo sapien
attatgaagttttcaccgtagaactggaggctt

SEQ ID NO: 37004 - DNA, 33 bp, Homo sapien
attatgaagttttcactgtagaactggaggctt

SEQ ID NO: 37005 - DNA, 33 bp, Homo sapien
actaagaatttgaagcaaagtgttggagactgc

SEQ ID NO: 37006 - DNA, 33 bp, Homo sapien
actaagaatttgaagctaagtgttggagactgc

SEQ ID NO: 37007 - DNA, 33 bp, Homo sapien
tacacatagctgacaaactcaagactacgctgc

SEQ ID NO: 37008 - DNA, 33 bp, Homo sapien
tacacatagctgacaatctcaagactacgctgc

SEQ ID NO: 37009 - DNA, 33 bp, Homo sapien
cattgcacagaatctcccaaatgtctcagaaat

SEQ ID NO: 37010 - DNA, 33 bp, Homo sapien
cattgcacagaatctctcaaatgtctcagaaat

SEQ ID NO: 37011 - DNA, 33 bp, Homo sapien
ataatgtcgatataaaaaaagagacaactcaat

SEQ ID NO: 37012 - DNA, 33 bp, Homo sapien
ataatgtcgatataaacaaagagacaactcaat

SEQ ID NO: 37013 - DNA, 33 bp, Homo sapien
aatcaagttcaatggaagcaatcctgtaccagt

SEQ ID NO: 37014 - DNA, 33 bp, Homo sapien
aatcaagttcaatggaggcaatcctgtaccagt

SEQ ID NO: 37015 - DNA, 33 bp, Homo sapien
tcaaagtttgcttcctaaagtcttattaacaac

SEQ ID NO: 37016 - DNA, 33 bp, Homo sapien
tcaaagtttgcttcctgaagtcttattaacaac

SEQ ID NO: 37017 - DNA, 33 bp, Homo sapien
gtgagtcttcagttcaccctactggtctttcaa

SEQ ID NO: 37018 - DNA, 33 bp, Homo sapien
gtgagtcttcagttcatcctactggtctttcaa

SEQ ID NO: 37019 - DNA, 33 bp, Homo sapien
gctcatgtaaggaaaaaggaacatatgttgttt

SEQ ID NO: 37020 - DNA, 33 bp, Homo sapien
gctcatgtaaggaaaagggaacatatgttgttt

SEQ ID NO: 37021 - DNA, 33 bp, Homo sapien
aaagggcataataacagaacgtacgaacattta

SEQ ID NO: 37022 - DNA, 33 bp, Homo sapien
aaagggcataataacataacgtacgaacattta

SEQ ID NO: 37023 - DNA, 33 bp, Homo sapien
cataaataatagggaacaattagaagcaatcta

SEQ ID NO: 37024 - DNA, 33 bp, Homo sapien
cataaataatagggaataattagaagcaatcta

SEQ ID NO: 37025 - DNA, 33 bp, Homo sapien
agagtttccatcattaccaatactgagtatata

SEQ ID NO: 37026 - DNA, 33 bp, Homo sapien
agagtttccatcattagcaatactgagtatata

SEQ ID NO: 37027 - DNA, 33 bp, Homo sapien
agaactaaatgggaaaaaaagatacacattcaa

SEQ ID NO: 37028 - DNA, 33 bp, Homo sapien
agaactaaatgggaaagaaagatacacattcaa

SEQ ID NO: 37029 - DNA, 33 bp, Homo sapien
cattttacatgactgccattttatgtgaacaca

SEQ ID NO: 37030 - DNA, 33 bp, Homo sapien
cattttacatgactgctattttatgtgaacaca

SEQ ID NO: 37031 - DNA, 33 bp, Homo sapien
cagatgagtaaaaataacaatgccaatttaaaa

SEQ ID NO: 37032 - DNA, 33 bp, Homo sapien
cagatgagtaaaaatagcaatgccaatttaaaa

SEQ ID NO: 37033 - DNA, 33 bp, Homo sapien
ttttaccttgcaaaacaaactctatactcgtga

SEQ ID NO: 37034 - DNA, 33 bp, Homo sapien
ttttaccttgcaaaactaactctatactcgtga

SEQ ID NO: 37035 - DNA, 33 bp, Homo sapien
tagacaatggcaaaaccgtgagaggaaaaaatc

SEQ ID NO: 37036 - DNA, 33 bp, Homo sapien
tagacaatggcaaaactgtgagaggaaaaaatc

SEQ ID NO: 37037 - DNA, 33 bp, Homo sapien
aaagattaaatgtaccaaatggaaataattaag

SEQ ID NO: 37038 - DNA, 33 bp, Homo sapien
aaagattaaatgtaccgaatggaaataattaag

SEQ ID NO: 37039 - DNA, 33 bp, Homo sapien
tagcaggacttcacaaggtgttgccactgagca

SEQ ID NO: 37040 - DNA, 33 bp, Homo sapien
tagcaggacttcacaatgtgttgccactgagca

SEQ ID NO: 37041 - DNA, 33 bp, Homo sapien
gaccttccagtatctaggttggaaatcctctaa

SEQ ID NO: 37042 - DNA, 33 bp, Homo sapien
gaccttccagtatctatgttggaaatcctctaa

SEQ ID NO: 37043 - DNA, 33 bp, Homo sapien
gtttaaaatccaagataataataagcaaaactc

SEQ ID NO: 37044 - DNA, 33 bp, Homo sapien
gtttaaaatccaagatgataataagcaaaactc

SEQ ID NO: 37045 - DNA, 33 bp, Homo sapien
atatgttcttaacacaatatctgattataaaca

SEQ ID NO: 37046 - DNA, 33 bp, Homo sapien
atatgttcttaacacagtatctgattataaaca

SEQ ID NO: 37047 - DNA, 33 bp, Homo sapien
gttcatggaagggaagaatcaacattgtgaaaa

SEQ ID NO: 37048 - DNA, 33 bp, Homo sapien
gttcatggaagggaagcatcaacattgtgaaaa

SEQ ID NO: 37049 - DNA, 33 bp, Homo sapien
ctcctagtgtctatcacgcagttatcgtcatct

SEQ ID NO: 37050 - DNA, 33 bp, Homo sapien
ctcctagtgtctatcatgcagttatcgtcatct

SEQ ID NO: 37051 - DNA, 33 bp, Homo sapien
gtgttgggattaaacaagagtacatataggctg

SEQ ID NO: 37052 - DNA, 33 bp, Homo sapien
gtgttgggattaaacaggagtacatataggctg

SEQ ID NO: 37053 - DNA, 33 bp, Homo sapien
tttctgcagtgaggaacgggccagatgattgat

SEQ ID NO: 37054 - DNA, 33 bp, Homo sapien
tttctgcagtgaggaatgggccagatgattgat

SEQ ID NO: 37055 - DNA, 33 bp, Homo sapien
ctagccaggcctgagaacgtaggagacacaagt

SEQ ID NO: 37056 - DNA, 33 bp, Homo sapien
ctagccaggcctgagagcgtaggagacacaagt

SEQ ID NO: 37057 - DNA, 33 bp, Homo sapien
cttaaaataaccaaaacttcgaagcatttaaat

SEQ ID NO: 37058 - DNA, 33 bp, Homo sapien
cttaaaataaccaaaatttcgaagcatttaaat

SEQ ID NO: 37059 - DNA, 33 bp, Homo sapien
aattactaattttccaaagtagagatgatatat

SEQ ID NO: 37060 - DNA, 33 bp, Homo sapien
aattactaattttccagagtagagatgatatat

SEQ ID NO: 37061 - DNA, 33 bp, Homo sapien
aaagaaatgcaaagcaatatttatctggttcac

SEQ ID NO: 37062 - DNA, 33 bp, Homo sapien
aaagaaatgcaaagcagtatttatctggttcac

SEQ ID NO: 37063 - DNA, 33 bp, Homo sapien
caaagtaggagacaggaaatgtaaagagaggaa

SEQ ID NO: 37064 - DNA, 33 bp, Homo sapien
caaagtaggagacagggaatgtaaagagaggaa

SEQ ID NO: 37065 - DNA, 33 bp, Homo sapien
ttggatgtcaccaaaaagtattctactaatcct

SEQ ID NO: 37066 - DNA, 33 bp, Homo sapien
ttggatgtcaccaaaatgtattctactaatcct

SEQ ID NO: 37067 - DNA, 33 bp, Homo sapien
ttggtagaattttccactgaagtcatctctggg

SEQ ID NO: 37068 - DNA, 33 bp, Homo sapien
ttggtagaattttccattgaagtcatctctggg

SEQ ID NO: 37069 - DNA, 33 bp, Homo sapien
atggtctatgaatttacgagcttaaatatgcct

SEQ ID NO: 37070 - DNA, 33 bp, Homo sapien
atggtctatgaatttatgagcttaaatatgcct

SEQ ID NO: 37071 - DNA, 33 bp, Homo sapien
ctaacttccctgtcccaagagtgtacaccaccc

SEQ ID NO: 37072 - DNA, 33 bp, Homo sapien
ctaacttccctgtcccgagagtgtacaccaccc

SEQ ID NO: 37073 - DNA, 33 bp, Homo sapien
ttttgtttctctttccaagaagtggttctccat

SEQ ID NO: 37074 - DNA, 33 bp, Homo sapien
ttttgtttctctttccgagaagtggttctccat

SEQ ID NO: 37075 - DNA, 33 bp, Homo sapien
actctgcacttactgaataatctctccatttcc

SEQ ID NO: 37076 - DNA, 33 bp, Homo sapien
actctgcacttactgagtaatctctccatttcc

SEQ ID NO: 37077 - DNA, 33 bp, Homo sapien
acagcaaataagtggaacaatcgagctctgaag

SEQ ID NO: 37078 - DNA, 33 bp, Homo sapien
acagcaaataagtggagcaatcgagctctgaag

SEQ ID NO: 37079 - DNA, 33 bp, Homo sapien
tctccagcctctagaaatgaaccctcaaaccag

SEQ ID NO: 37080 - DNA, 33 bp, Homo sapien
tctccagcctctagaactgaaccctcaaaccag

SEQ ID NO: 37081 - DNA, 33 bp, Homo sapien
ttcatcttgtagtgtaaccgccccaaatacaga

SEQ ID NO: 37082 - DNA, 33 bp, Homo sapien
ttcatcttgtagtgtagccgccccaaatacaga

SEQ ID NO: 37083 - DNA, 33 bp, Homo sapien
aatcttcctcagagcaactaggaaaccaattcc

SEQ ID NO: 37084 - DNA, 33 bp, Homo sapien
aatcttcctcagagcagctaggaaaccaattcc

SEQ ID NO: 37085 - DNA, 33 bp, Homo sapien
acaccaatagatgcagaaaaaggattggaaaaa

SEQ ID NO: 37086 - DNA, 33 bp, Homo sapien
acaccaatagatgcaggaaaaggattggaaaaa

SEQ ID NO: 37087 - DNA, 33 bp, Homo sapien
ggaacagtgcagctaacaattcacctcaggcga

SEQ ID NO: 37088 - DNA, 33 bp, Homo sapien
ggaacagtgcagctaataattcacctcaggcga

SEQ ID NO: 37089 - DNA, 33 bp, Homo sapien
ttatttgagaggcgggaaaggcagaatcactag

SEQ ID NO: 37090 - DNA, 33 bp, Homo sapien
ttatttgagaggcgggcaaggcagaatcactag

SEQ ID NO: 37091 - DNA, 33 bp, Homo sapien
tgtgtcaccctagaaacaaagataacacactcc

SEQ ID NO: 37092 - DNA, 33 bp, Homo sapien
tgtgtcaccctagaaagaaagataacacactcc

SEQ ID NO: 37093 - DNA, 33 bp, Homo sapien
aaaagataatgaccaaatgtttcactttatgaa

SEQ ID NO: 37094 - DNA, 33 bp, Homo sapien
aaaagataatgaccaagtgtttcactttatgaa

SEQ ID NO: 37095 - DNA, 33 bp, Homo sapien
aaactgctagtttcaagaattcttttgtaaaac

SEQ ID NO: 37096 - DNA, 33 bp, Homo sapien
aaactgctagtttcaataattcttttgtaaaac

SEQ ID NO: 37097 - DNA, 33 bp, Homo sapien
tactagggattcaaaaatgacagctatgattcc

SEQ ID NO: 37098 - DNA, 33 bp, Homo sapien
tactagggattcaaaagtgacagctatgattcc

SEQ ID NO: 37099 - DNA, 33 bp, Homo sapien
cactttgtcacatgaaacaacttgtactttaaa

SEQ ID NO: 37100 - DNA, 33 bp, Homo sapien
cactttgtcacatgaagcaacttgtactttaaa

SEQ ID NO: 37101 - DNA, 33 bp, Homo sapien
caaaacactgtagacacgtaaagtaaaatgagg

SEQ ID NO: 37102 - DNA, 33 bp, Homo sapien
caaaacactgtagacaggtaaagtaaaatgagg

SEQ ID NO: 37103 - DNA, 33 bp, Homo sapien
gaaataagcaagaaatgaagttgtatgcattaa

SEQ ID NO: 37104 - DNA, 33 bp, Homo sapien
gaaataagcaagaaattaagttgtatgcattaa

SEQ ID NO: 37105 - DNA, 33 bp, Homo sapien
aatctttcaggaaaataatttggagtagatgtt

SEQ ID NO: 37106 - DNA, 33 bp, Homo sapien
aatctttcaggaaaatcatttggagtagatgtt

SEQ ID NO: 37107 - DNA, 33 bp, Homo sapien
atggtcaattttcatgaatgtccatgtttactt

SEQ ID NO: 37108 - DNA, 33 bp, Homo sapien
atggtcaattttcatgtatgtccatgtttactt

SEQ ID NO: 37109 - DNA, 33 bp, Homo sapien
gaagcatgttcctgaacggcgggcagtgacatg

SEQ ID NO: 37110 - DNA, 33 bp, Homo sapien
gaagcatgttcctgaatggcgggcagtgacatg

SEQ ID NO: 37111 - DNA, 33 bp, Homo sapien
ccactacttcttatcacgtggggtggctggtca

SEQ ID NO: 37112 - DNA, 33 bp, Homo sapien
ccactacttcttatcatgtggggtggctggtca

SEQ ID NO: 37113 - DNA, 33 bp, Homo sapien
ttgagcaacagaccaactctcaacaggataggg

SEQ ID NO: 37114 - DNA, 33 bp, Homo sapien
ttgagcaacagaccaattctcaacaggataggg

SEQ ID NO: 37115 - DNA, 33 bp, Homo sapien
tatatgcctgttctgacataatagaaaagtttt

SEQ ID NO: 37116 - DNA, 33 bp, Homo sapien
tatatgcctgttctgatataatagaaaagtttt

SEQ ID NO: 37117 - DNA, 33 bp, Homo sapien
agggaggaaactgaaacgctgctcagagttgtt

SEQ ID NO: 37118 - DNA, 33 bp, Homo sapien
agggaggaaactgaaatgctgctcagagttgtt

SEQ ID NO: 37119 - DNA, 33 bp, Homo sapien
atacccaatatatggacgggaaaagtgtagttt

SEQ ID NO: 37120 - DNA, 33 bp, Homo sapien
atacccaatatatggatgggaaaagtgtagttt

SEQ ID NO: 37121 - DNA, 33 bp, Homo sapien
ttgagacaaggtcaagaacttgatatctgccga

SEQ ID NO: 37122 - DNA, 33 bp, Homo sapien
ttgagacaaggtcaaggacttgatatctgccga

SEQ ID NO: 37123 - DNA, 33 bp, Homo sapien
tgctgcttttgtcgcacgtaatcacttcctctt

SEQ ID NO: 37124 - DNA, 33 bp, Homo sapien
tgctgcttttgtcgcatgtaatcacttcctctt

SEQ ID NO: 37125 - DNA, 33 bp, Homo sapien
tgatatctttgagcacactggtagattgaggga

SEQ ID NO: 37126 - DNA, 33 bp, Homo sapien
tgatatctttgagcaccctggtagattgaggga

SEQ ID NO: 37127 - DNA, 33 bp, Homo sapien
agtgtactttcctaacaaggaagggaagcacaa

SEQ ID NO: 37128 - DNA, 33 bp, Homo sapien
agtgtactttcctaacgaggaagggaagcacaa

SEQ ID NO: 37129 - DNA, 33 bp, Homo sapien
agtccatgatacaacaatggatagagtggcgga

SEQ ID NO: 37130 - DNA, 33 bp, Homo sapien
agtccatgatacaacactggatagagtggcgga

SEQ ID NO: 37131 - DNA, 33 bp, Homo sapien
tgcctttcatgcaaaaactcctcaaaatttttc

SEQ ID NO: 37132 - DNA, 33 bp, Homo sapien
tgcctttcatgcaaaacctcctcaaaatttttc

SEQ ID NO: 37133 - DNA, 33 bp, Homo sapien
ttcaaattctagatagcacaactgagttcattt

SEQ ID NO: 37134 - DNA, 33 bp, Homo sapien
ttcaaattctagatagtacaactgagttcattt

SEQ ID NO: 37135 - DNA, 33 bp, Homo sapien
agtagaaggagaaagacagcatgacagagagag

SEQ ID NO: 37136 - DNA, 33 bp, Homo sapien
agtagaaggagaaagagagcatgacagagagag

SEQ ID NO: 37137 - DNA, 33 bp, Homo sapien
ttacatagtctcagctaaagcgctccaggcagg

SEQ ID NO: 37138 - DNA, 33 bp, Homo sapien
ttacatagtctcagctgaagcgctccaggcagg

SEQ ID NO: 37139 - DNA, 33 bp, Homo sapien
ctgagcaaggcattacaagttagcatattcatc

SEQ ID NO: 37140 - DNA, 33 bp, Homo sapien
ctgagcaaggcattactagttagcatattcatc

SEQ ID NO: 37141 - DNA, 33 bp, Homo sapien
ataaaagtacagaaaaggaaaccagatacccat

SEQ ID NO: 37142 - DNA, 33 bp, Homo sapien
ataaaagtacagaaaatgaaaccagatacccat

SEQ ID NO: 37143 - DNA, 33 bp, Homo sapien
tggcctgtgtaaggcagtatttagatatttgca

SEQ ID NO: 37144 - DNA, 33 bp, Homo sapien
tggcctgtgtaaggcattatttagatatttgca

SEQ ID NO: 37145 - DNA, 33 bp, Homo sapien
tttcagaagtcttgccagatgttttctttgttt

SEQ ID NO: 37146 - DNA, 33 bp, Homo sapien
tttcagaagtcttgccggatgttttctttgttt

SEQ ID NO: 37147 - DNA, 33 bp, Homo sapien
gtctcataattcttaccacagatatccaatttg

SEQ ID NO: 37148 - DNA, 33 bp, Homo sapien
gtctcataattcttactacagatatccaatttg

SEQ ID NO: 37149 - DNA, 33 bp, Homo sapien
tttcaaactcatatcacagtgttttagatgcta

SEQ ID NO: 37150 - DNA, 33 bp, Homo sapien
tttcaaactcatatcagagtgttttagatgcta

SEQ ID NO: 37151 - DNA, 33 bp, Homo sapien
tcatactcataattttaaaaagccatctttttc

SEQ ID NO: 37152 - DNA, 33 bp, Homo sapien
tcatactcataatttttaaaagccatctttttc

SEQ ID NO: 37153 - DNA, 33 bp, Homo sapien
tttattttgtagactaaacttaagacctaagta

SEQ ID NO: 37154 - DNA, 33 bp, Homo sapien
tttattttgtagactacacttaagacctaagta

SEQ ID NO: 37155 - DNA, 33 bp, Homo sapien
aaagtgagtgataggaagtaggagactgggtca

SEQ ID NO: 37156 - DNA, 33 bp, Homo sapien
aaagtgagtgataggaggtaggagactgggtca

SEQ ID NO: 37157 - DNA, 33 bp, Homo sapien
tgacttcgtaattgtacatattcatgggataca

SEQ ID NO: 37158 - DNA, 33 bp, Homo sapien
tgacttcgtaattgtatatattcatgggataca

SEQ ID NO: 37159 - DNA, 33 bp, Homo sapien
tagttccagcttataaatgagaatatgcagtat

SEQ ID NO: 37160 - DNA, 33 bp, Homo sapien
tagttccagcttataagtgagaatatgcagtat

SEQ ID NO: 37161 - DNA, 33 bp, Homo sapien
attagttatgcaatgtcaaatgtgtactctttc

SEQ ID NO: 37162 - DNA, 33 bp, Homo sapien
attagttatgcaatgttaaatgtgtactctttc

SEQ ID NO: 37163 - DNA, 33 bp, Homo sapien
agacagtcttaatgcaatataaccagttttata

SEQ ID NO: 37164 - DNA, 33 bp, Homo sapien
agacagtcttaatgcagtataaccagttttata

SEQ ID NO: 37165 - DNA, 33 bp, Homo sapien
ggtaggtgctaaagagcaattgttaggactcta

SEQ ID NO: 37166 - DNA, 33 bp, Homo sapien
ggtaggtgctaaagaggaattgttaggactcta

SEQ ID NO: 37167 - DNA, 33 bp, Homo sapien
taactgcaaaaatcaaatctgttttcctagttg

SEQ ID NO: 37168 - DNA, 33 bp, Homo sapien
taactgcaaaaatcaagtctgttttcctagttg

SEQ ID NO: 37169 - DNA, 33 bp, Homo sapien
cgtattttaaacagcaatagaacttgagagcta

SEQ ID NO: 37170 - DNA, 33 bp, Homo sapien
cgtattttaaacagcagtagaacttgagagcta

SEQ ID NO: 37171 - DNA, 33 bp, Homo sapien
tgtcaatccaagatacagatggctaatccacag

SEQ ID NO: 37172 - DNA, 33 bp, Homo sapien
tgtcaatccaagatacggatggctaatccacag

SEQ ID NO: 37173 - DNA, 33 bp, Homo sapien
aggcatctgtagacacaaaattgttgttttagt

SEQ ID NO: 37174 - DNA, 33 bp, Homo sapien
aggcatctgtagacactaaattgttgttttagt

SEQ ID NO: 37175 - DNA, 33 bp, Homo sapien
acaatgccatattgagacccataaataaaggat

SEQ ID NO: 37176 - DNA, 33 bp, Homo sapien
acaatgccatattgagccccataaataaaggat

SEQ ID NO: 37177 - DNA, 33 bp, Homo sapien
atctttatgaagcacaatattatggttgaactc

SEQ ID NO: 37178 - DNA, 33 bp, Homo sapien
atctttatgaagcacagtattatggttgaactc

SEQ ID NO: 37179 - DNA, 33 bp, Homo sapien
ttcttaaatccataaaccaaaaattcccctgtt

SEQ ID NO: 37180 - DNA, 33 bp, Homo sapien
ttcttaaatccataaatcaaaaattcccctgtt

SEQ ID NO: 37181 - DNA, 33 bp, Homo sapien
tattttcagaattctaactttgttgcaagcctt

SEQ ID NO: 37182 - DNA, 33 bp, Homo sapien
tattttcagaattctagctttgttgcaagcctt

SEQ ID NO: 37183 - DNA, 33 bp, Homo sapien
cacttcactgtttaaaccatttcatctttcctc

SEQ ID NO: 37184 - DNA, 33 bp, Homo sapien
cacttcactgtttaaatcatttcatctttcctc

SEQ ID NO: 37185 - DNA, 33 bp, Homo sapien
tccttgttcctctcaaatcgaaactcacattcc

SEQ ID NO: 37186 - DNA, 33 bp, Homo sapien
tccttgttcctctcaagtcgaaactcacattcc

SEQ ID NO: 37187 - DNA, 33 bp, Homo sapien
gagtggacagagagggaaaaagttttaaaagag

SEQ ID NO: 37188 - DNA, 33 bp, Homo sapien
gagtggacagagagggtaaaagttttaaaagag

SEQ ID NO: 37189 - DNA, 33 bp, Homo sapien
agtgatgaggacaaaaagatatgagtatccttg

SEQ ID NO: 37190 - DNA, 33 bp, Homo sapien
agtgatgaggacaaaacgatatgagtatccttg

SEQ ID NO: 37191 - DNA, 33 bp, Homo sapien
atgagatattcaattacgcaaagtgattgtaag

SEQ ID NO: 37192 - DNA, 33 bp, Homo sapien
atgagatattcaattatgcaaagtgattgtaag

SEQ ID NO: 37193 - DNA, 33 bp, Homo sapien
gataaactcagtgtaactaaactgacttcccaa

SEQ ID NO: 37194 - DNA, 33 bp, Homo sapien
gataaactcagtgtaattaaactgacttcccaa

SEQ ID NO: 37195 - DNA, 33 bp, Homo sapien
ggacaattccctttcccattgtttttgttgctg

SEQ ID NO: 37196 - DNA, 33 bp, Homo sapien
ggacaattccctttcctattgtttttgttgctg

SEQ ID NO: 37197 - DNA, 33 bp, Homo sapien
gcggtaagctagtcaacggtaaggggcctagac

SEQ ID NO: 37198 - DNA, 33 bp, Homo sapien
gcggtaagctagtcaagggtaaggggcctagac

SEQ ID NO: 37199 - DNA, 33 bp, Homo sapien
agacttcacctacaaaaggagtctttcttgatc

SEQ ID NO: 37200 - DNA, 33 bp, Homo sapien
agacttcacctacaaagggagtctttcttgatc

SEQ ID NO: 37201 - DNA, 33 bp, Homo sapien
agtgatgaaaagttagaacatcccagaaatgtc

SEQ ID NO: 37202 - DNA, 33 bp, Homo sapien
agtgatgaaaagttaggacatcccagaaatgtc

SEQ ID NO: 37203 - DNA, 33 bp, Homo sapien
cagtaattaaagcaccactagagctgggaatgg

SEQ ID NO: 37204 - DNA, 33 bp, Homo sapien
cagtaattaaagcaccgctagagctgggaatgg

SEQ ID NO: 37205 - DNA, 33 bp, Homo sapien
actcagggattctatcgcctagcttcagaagca

SEQ ID NO: 37206 - DNA, 33 bp, Homo sapien
actcagggattctatctcctagcttcagaagca

SEQ ID NO: 37207 - DNA, 33 bp, Homo sapien
aagagtggtgtagagaaaatagaaataatggtc

SEQ ID NO: 37208 - DNA, 33 bp, Homo sapien
aagagtggtgtagagataatagaaataatggtc

SEQ ID NO: 37209 - DNA, 33 bp, Homo sapien
aggtgtaattgaaatacaataaactgtgcacat

SEQ ID NO: 37210 - DNA, 33 bp, Homo sapien
aggtgtaattgaaatataataaactgtgcacat

SEQ ID NO: 37211 - DNA, 33 bp, Homo sapien
aaactattaacagtatcaacagtgtgaacagac

SEQ ID NO: 37212 - DNA, 33 bp, Homo sapien
aaactattaacagtattaacagtgtgaacagac

SEQ ID NO: 37213 - DNA, 33 bp, Homo sapien
tctcagtgcaaccactaaaggtttcgtggcagt

SEQ ID NO: 37214 - DNA, 33 bp, Homo sapien
tctcagtgcaaccactgaaggtttcgtggcagt

SEQ ID NO: 37215 - DNA, 33 bp, Homo sapien
ttactgcttttgattaagattgaaatttcaatt

SEQ ID NO: 37216 - DNA, 33 bp, Homo sapien
ttactgcttttgattacgattgaaatttcaatt

SEQ ID NO: 37217 - DNA, 33 bp, Homo sapien
tattgctaaggtaatacgccagataggatttgc

SEQ ID NO: 37218 - DNA, 33 bp, Homo sapien
tattgctaaggtaatatgccagataggatttgc

SEQ ID NO: 37219 - DNA, 33 bp, Homo sapien
gtttgggccaatcgtaaaccacaggaatgcagg

SEQ ID NO: 37220 - DNA, 33 bp, Homo sapien
gtttgggccaatcgtacaccacaggaatgcagg

SEQ ID NO: 37221 - DNA, 33 bp, Homo sapien
tttcctacatacaaacaatgaacaactataatt

SEQ ID NO: 37222 - DNA, 33 bp, Homo sapien
tttcctacatacaaacgatgaacaactataatt

SEQ ID NO: 37223 - DNA, 33 bp, Homo sapien
ctcttctgggtaccgagatgctataaaggcagc

SEQ ID NO: 37224 - DNA, 33 bp, Homo sapien
ctcttctgggtaccgatatgctataaaggcagc

SEQ ID NO: 37225 - DNA, 33 bp, Homo sapien
ttccttggcattcttcaaaatgaattgaaaact

SEQ ID NO: 37226 - DNA, 33 bp, Homo sapien
ttccttggcattcttcgaaatgaattgaaaact

SEQ ID NO: 37227 - DNA, 33 bp, Homo sapien
caagggttgtgcatgacaatagcaggtaattta

SEQ ID NO: 37228 - DNA, 33 bp, Homo sapien
caagggttgtgcatgataatagcaggtaattta

SEQ ID NO: 37229 - DNA, 33 bp, Homo sapien
ggtgtatcaagctagaactatttttctattttt

SEQ ID NO: 37230 - DNA, 33 bp, Homo sapien
ggtgtatcaagctagagctatttttctattttt

SEQ ID NO: 37231 - DNA, 33 bp, Homo sapien
ataggcagggtttagacatcagaaaatagaaaa

SEQ ID NO: 37232 - DNA, 33 bp, Homo sapien
ataggcagggtttagagatcagaaaatagaaaa

SEQ ID NO: 37233 - DNA, 33 bp, Homo sapien
atgcctctctaaaataagtttactgttagataa

SEQ ID NO: 37234 - DNA, 33 bp, Homo sapien
atgcctctctaaaataggtttactgttagataa

SEQ ID NO: 37235 - DNA, 33 bp, Homo sapien
acttcaaagattagcacagagtcacattcccac

SEQ ID NO: 37236 - DNA, 33 bp, Homo sapien
acttcaaagattagcatagagtcacattcccac

SEQ ID NO: 37237 - DNA, 33 bp, Homo sapien
agggggattccagggaccaaattcaggtcattt

SEQ ID NO: 37238 - DNA, 33 bp, Homo sapien
agggggattccagggatcaaattcaggtcattt

SEQ ID NO: 37239 - DNA, 33 bp, Homo sapien
aggctgtatctacacacaaatcagcttgggaaa

SEQ ID NO: 37240 - DNA, 33 bp, Homo sapien
aggctgtatctacacataaatcagcttgggaaa

SEQ ID NO: 37241 - DNA, 33 bp, Homo sapien
ccagtatgttattaccagagaatcatgatctga

SEQ ID NO: 37242 - DNA, 33 bp, Homo sapien
ccagtatgttattaccggagaatcatgatctga

SEQ ID NO: 37243 - DNA, 33 bp, Homo sapien
cctcttctttttagacagatttacgtaaagcaa

SEQ ID NO: 37244 - DNA, 33 bp, Homo sapien
cctcttctttttagacggatttacgtaaagcaa

SEQ ID NO: 37245 - DNA, 33 bp, Homo sapien
tcattttctgctaaaccgaatcactaacatttc

SEQ ID NO: 37246 - DNA, 33 bp, Homo sapien
tcattttctgctaaactgaatcactaacatttc

SEQ ID NO: 37247 - DNA, 33 bp, Homo sapien
aaggttaatatgaacaatgataagacaggttga

SEQ ID NO: 37248 - DNA, 33 bp, Homo sapien
aaggttaatatgaacagtgataagacaggttga

SEQ ID NO: 37249 - DNA, 33 bp, Homo sapien
caaagcacaactaaggaagcaggaccagggctg

SEQ ID NO: 37250 - DNA, 33 bp, Homo sapien
caaagcacaactaagggagcaggaccagggctg

SEQ ID NO: 37251 - DNA, 33 bp, Homo sapien
ttggaagcttaagaaacgttagtgctaaacaaa

SEQ ID NO: 37252 - DNA, 33 bp, Homo sapien
ttggaagcttaagaaatgttagtgctaaacaaa

SEQ ID NO: 37253 - DNA, 33 bp, Homo sapien
ttgtaacttctgtgacagcagggatatatctgt

SEQ ID NO: 37254 - DNA, 33 bp, Homo sapien
ttgtaacttctgtgactgcagggatatatctgt

SEQ ID NO: 37255 - DNA, 33 bp, Homo sapien
ttaagatgaatcattacaagtgaaatgacccta

SEQ ID NO: 37256 - DNA, 33 bp, Homo sapien
ttaagatgaatcattataagtgaaatgacccta

SEQ ID NO: 37257 - DNA, 33 bp, Homo sapien
gctcagtctaggttaacgggaagctagggcaag

SEQ ID NO: 37258 - DNA, 33 bp, Homo sapien
gctcagtctaggttaatgggaagctagggcaag

SEQ ID NO: 37259 - DNA, 33 bp, Homo sapien
accagaaataattggaacttaaaagatgctagg

SEQ ID NO: 37260 - DNA, 33 bp, Homo sapien
accagaaataattggagcttaaaagatgctagg

SEQ ID NO: 37261 - DNA, 33 bp, Homo sapien
gggtgagtttgccttacctaaatcccatggtga

SEQ ID NO: 37262 - DNA, 33 bp, Homo sapien
gggtgagtttgccttatctaaatcccatggtga

SEQ ID NO: 37263 - DNA, 33 bp, Homo sapien
tttcagcttctctccaatgcatcctttagttag

SEQ ID NO: 37264 - DNA, 33 bp, Homo sapien
tttcagcttctctccattgcatcctttagttag

SEQ ID NO: 37265 - DNA, 33 bp, Homo sapien
catctgatcttttacaaacctgacaaaaacaag

SEQ ID NO: 37266 - DNA, 33 bp, Homo sapien
catctgatcttttacacacctgacaaaaacaag

SEQ ID NO: 37267 - DNA, 33 bp, Homo sapien
ggggagaagaaaagcaactatatcacttgacta

SEQ ID NO: 37268 - DNA, 33 bp, Homo sapien
ggggagaagaaaagcacctatatcacttgacta

SEQ ID NO: 37269 - DNA, 33 bp, Homo sapien
tggctattcttttccccacattacacatcctct

SEQ ID NO: 37270 - DNA, 33 bp, Homo sapien
tggctattcttttccctacattacacatcctct

SEQ ID NO: 37271 - DNA, 33 bp, Homo sapien
aattggtgcaacagaaattaagttcatcagaaa

SEQ ID NO: 37272 - DNA, 33 bp, Homo sapien
aattggtgcaacagaagttaagttcatcagaaa

SEQ ID NO: 37273 - DNA, 33 bp, Homo sapien
aaagtgatttgcaaaacgagactaaggtagaaa

SEQ ID NO: 37274 - DNA, 33 bp, Homo sapien
aaagtgatttgcaaaatgagactaaggtagaaa

SEQ ID NO: 37275 - DNA, 33 bp, Homo sapien
tcattacagatttcataagctccagaaggtcag

SEQ ID NO: 37276 - DNA, 33 bp, Homo sapien
tcattacagatttcattagctccagaaggtcag

SEQ ID NO: 37277 - DNA, 33 bp, Homo sapien
tgcacatacaagagctaaaaaaaatgtaactcc

SEQ ID NO: 37278 - DNA, 33 bp, Homo sapien
tgcacatacaagagctcaaaaaaatgtaactcc

SEQ ID NO: 37279 - DNA, 33 bp, Homo sapien
tagaaggattaagcagacacaggttagaaggca

SEQ ID NO: 37280 - DNA, 33 bp, Homo sapien
tagaaggattaagcaggcacaggttagaaggca

SEQ ID NO: 37281 - DNA, 33 bp, Homo sapien
aagcctgagcactatacattaggttggtacaaa

SEQ ID NO: 37282 - DNA, 33 bp, Homo sapien
aagcctgagcactatatattaggttggtacaaa

SEQ ID NO: 37283 - DNA, 33 bp, Homo sapien
aaatatacagaataaaacaaccagctcttgtaa

SEQ ID NO: 37284 - DNA, 33 bp, Homo sapien
aaatatacagaataaagcaaccagctcttgtaa

SEQ ID NO: 37285 - DNA, 33 bp, Homo sapien
ataccacaggttttcaagtctagatgtaaaaga

SEQ ID NO: 37286 - DNA, 33 bp, Homo sapien
ataccacaggttttcaggtctagatgtaaaaga

SEQ ID NO: 37287 - DNA, 33 bp, Homo sapien
gtataatcttgcttgacccttacccctcaggca

SEQ ID NO: 37288 - DNA, 33 bp, Homo sapien
gtataatcttgcttgatccttacccctcaggca

SEQ ID NO: 37289 - DNA, 33 bp, Homo sapien
tgtgttacgttatttcaaatcccactatcttat

SEQ ID NO: 37290 - DNA, 33 bp, Homo sapien
tgtgttacgttatttcgaatcccactatcttat

SEQ ID NO: 37291 - DNA, 33 bp, Homo sapien
agaacacatgcaaacaaaaaggtacacatttaa

SEQ ID NO: 37292 - DNA, 33 bp, Homo sapien
agaacacatgcaaacagaaaggtacacatttaa

SEQ ID NO: 37293 - DNA, 33 bp, Homo sapien
tgatgaaccaaaggacagagtcatggctactca

SEQ ID NO: 37294 - DNA, 33 bp, Homo sapien
tgatgaaccaaaggacggagtcatggctactca

SEQ ID NO: 37295 - DNA, 33 bp, Homo sapien
tatggcttcaacctgcaaactaataattgtctt

SEQ ID NO: 37296 - DNA, 33 bp, Homo sapien
tatggcttcaacctgcgaactaataattgtctt

SEQ ID NO: 37297 - DNA, 33 bp, Homo sapien
tgtcagaaatagggcaaattaatacatttttcc

SEQ ID NO: 37298 - DNA, 33 bp, Homo sapien
tgtcagaaatagggcatattaatacatttttcc

SEQ ID NO: 37299 - DNA, 33 bp, Homo sapien
ttgtagaagcacagaaatcaaaagtgtagctaa

SEQ ID NO: 37300 - DNA, 33 bp, Homo sapien
ttgtagaagcacagaagtcaaaagtgtagctaa

SEQ ID NO: 37301 - DNA, 33 bp, Homo sapien
tgggaaagttgcacaggagtctgatgaacaaac

SEQ ID NO: 37302 - DNA, 33 bp, Homo sapien
tgggaaagttgcacagtagtctgatgaacaaac

SEQ ID NO: 37303 - DNA, 33 bp, Homo sapien
tcagaaagagctacaacgtgactaaaggaggca

SEQ ID NO: 37304 - DNA, 33 bp, Homo sapien
tcagaaagagctacaatgtgactaaaggaggca

SEQ ID NO: 37305 - DNA, 33 bp, Homo sapien
ctcaaaatgtgaccctcagactactattattaa

SEQ ID NO: 37306 - DNA, 33 bp, Homo sapien
ctcaaaatgtgacccttagactactattattaa

SEQ ID NO: 37307 - DNA, 33 bp, Homo sapien
agcttttgttttagtcacaatgatagtgaaaat

SEQ ID NO: 37308 - DNA, 33 bp, Homo sapien
agcttttgttttagtctcaatgatagtgaaaat

SEQ ID NO: 37309 - DNA, 33 bp, Homo sapien
aaaacaggacgaataaaaacagattgcatttgg

SEQ ID NO: 37310 - DNA, 33 bp, Homo sapien
aaaacaggacgaataagaacagattgcatttgg

SEQ ID NO: 37311 - DNA, 33 bp, Homo sapien
agtggtcaactatcaacgctgaaaacaggacga

SEQ ID NO: 37312 - DNA, 33 bp, Homo sapien
agtggtcaactatcaatgctgaaaacaggacga

SEQ ID NO: 37313 - DNA, 33 bp, Homo sapien
gttctgatcttgttagccccattcaatggcttt

SEQ ID NO: 37314 - DNA, 33 bp, Homo sapien
gttctgatcttgttagtcccattcaatggcttt

SEQ ID NO: 37315 - DNA, 33 bp, Homo sapien
tggatcaattggaaataacaaatgaaaagaata

SEQ ID NO: 37316 - DNA, 33 bp, Homo sapien
tggatcaattggaaatcacaaatgaaaagaata

SEQ ID NO: 37317 - DNA, 33 bp, Homo sapien
attgaaacatcactacaaaccccataattatgt

SEQ ID NO: 37318 - DNA, 33 bp, Homo sapien
attgaaacatcactacgaaccccataattatgt

SEQ ID NO: 37319 - DNA, 33 bp, Homo sapien
cagtaagtgccaaatgcaatgttcactctgaaa

SEQ ID NO: 37320 - DNA, 33 bp, Homo sapien
cagtaagtgccaaatggaatgttcactctgaaa

SEQ ID NO: 37321 - DNA, 33 bp, Homo sapien
gaggtaaagaaatggtaacagcaattatggatt

SEQ ID NO: 37322 - DNA, 33 bp, Homo sapien
gaggtaaagaaatggtgacagcaattatggatt

SEQ ID NO: 37323 - DNA, 33 bp, Homo sapien
aagtttgcttatgaaaatgtcatttaaagaagt

SEQ ID NO: 37324 - DNA, 33 bp, Homo sapien
aagtttgcttatgaaagtgtcatttaaagaagt

SEQ ID NO: 37325 - DNA, 33 bp, Homo sapien
ctcactgcaacatctacccaatcggttcaagca

SEQ ID NO: 37326 - DNA, 33 bp, Homo sapien
ctcactgcaacatctatccaatcggttcaagca

SEQ ID NO: 37327 - DNA, 33 bp, Homo sapien
gattacaggaataatacacttctaaattgctaa

SEQ ID NO: 37328 - DNA, 33 bp, Homo sapien
gattacaggaataatatacttctaaattgctaa

SEQ ID NO: 37329 - DNA, 33 bp, Homo sapien
ccttgatgtaaccaaaaagtcccaaagaatatc

SEQ ID NO: 37330 - DNA, 33 bp, Homo sapien
ccttgatgtaaccaaacagtcccaaagaatatc

SEQ ID NO: 37331 - DNA, 33 bp, Homo sapien
tttctatgttatcttacgcccaaagccccactg

SEQ ID NO: 37332 - DNA, 33 bp, Homo sapien
tttctatgttatcttatgcccaaagccccactg

SEQ ID NO: 37333 - DNA, 33 bp, Homo sapien
tctttgtgtggttctacgtatatgtgttttgta

SEQ ID NO: 37334 - DNA, 33 bp, Homo sapien
tctttgtgtggttctatgtatatgtgttttgta

SEQ ID NO: 37335 - DNA, 33 bp, Homo sapien
tggacttcaaaagtaaggatggggcatatgtta

SEQ ID NO: 37336 - DNA, 33 bp, Homo sapien
tggacttcaaaagtaatgatggggcatatgtta

SEQ ID NO: 37337 - DNA, 33 bp, Homo sapien
tgtgtaatctggattcaatggacaagtctcaga

SEQ ID NO: 37338 - DNA, 33 bp, Homo sapien
tgtgtaatctggattcgatggacaagtctcaga

SEQ ID NO: 37339 - DNA, 33 bp, Homo sapien
ttaaaactttgaggaactacttgagacttcagc

SEQ ID NO: 37340 - DNA, 33 bp, Homo sapien
ttaaaactttgaggaattacttgagacttcagc

SEQ ID NO: 37341 - DNA, 33 bp, Homo sapien
gggtcttatgctcctgaaatgtattctctacag

SEQ ID NO: 37342 - DNA, 33 bp, Homo sapien
gggtcttatgctcctgcaatgtattctctacag

SEQ ID NO: 37343 - DNA, 33 bp, Homo sapien
tcctgaagatgttcaacccgtccacttctctct

SEQ ID NO: 37344 - DNA, 33 bp, Homo sapien
tcctgaagatgttcaatccgtccacttctctct

SEQ ID NO: 37345 - DNA, 33 bp, Homo sapien
catgggtaatggtgaacggcttcgctgaatatt

SEQ ID NO: 37346 - DNA, 33 bp, Homo sapien
catgggtaatggtgaatggcttcgctgaatatt

SEQ ID NO: 37347 - DNA, 33 bp, Homo sapien
cacaaagaaaagaacacactccacaaacctctg

SEQ ID NO: 37348 - DNA, 33 bp, Homo sapien
cacaaagaaaagaacagactccacaaacctctg

SEQ ID NO: 37349 - DNA, 33 bp, Homo sapien
tagttgatggatagagaagctcagtgtgtgggt

SEQ ID NO: 37350 - DNA, 33 bp, Homo sapien
tagttgatggatagagtagctcagtgtgtgggt

SEQ ID NO: 37351 - DNA, 33 bp, Homo sapien
aataattgaaaaaagaccatgcaaacttaagaa

SEQ ID NO: 37352 - DNA, 33 bp, Homo sapien
aataattgaaaaaagatcatgcaaacttaagaa

SEQ ID NO: 37353 - DNA, 33 bp, Homo sapien
aatagcaaaatgataaacctaaaagcaattata

SEQ ID NO: 37354 - DNA, 33 bp, Homo sapien
aatagcaaaatgataagcctaaaagcaattata

SEQ ID NO: 37355 - DNA, 33 bp, Homo sapien
ccaacgtgtctccaaccattcccttttacatat

SEQ ID NO: 37356 - DNA, 33 bp, Homo sapien
ccaacgtgtctccaactattcccttttacatat

SEQ ID NO: 37357 - DNA, 33 bp, Homo sapien
ttcaataactatgagcaattattataagcatgg

SEQ ID NO: 37358 - DNA, 33 bp, Homo sapien
ttcaataactatgagcgattattataagcatgg

SEQ ID NO: 37359 - DNA, 33 bp, Homo sapien
atatttacagcctgtacatctaaaaaagggcta

SEQ ID NO: 37360 - DNA, 33 bp, Homo sapien
atatttacagcctgtatatctaaaaaagggcta

SEQ ID NO: 37361 - DNA, 33 bp, Homo sapien
tattgacattttgaccaagtgattctttgttct

SEQ ID NO: 37362 - DNA, 33 bp, Homo sapien
tattgacattttgaccgagtgattctttgttct

SEQ ID NO: 37363 - DNA, 33 bp, Homo sapien
tccatgctttgatagacgatactcaaaactgtg

SEQ ID NO: 37364 - DNA, 33 bp, Homo sapien
tccatgctttgatagatgatactcaaaactgtg

SEQ ID NO: 37365 - DNA, 33 bp, Homo sapien
cagttttatctagctccaggtaacttcataaat

SEQ ID NO: 37366 - DNA, 33 bp, Homo sapien
cagttttatctagctctaggtaacttcataaat

SEQ ID NO: 37367 - DNA, 33 bp, Homo sapien
cagttattatccatcaacctagaaactattggg

SEQ ID NO: 37368 - DNA, 33 bp, Homo sapien
cagttattatccatcatcctagaaactattggg

SEQ ID NO: 37369 - DNA, 33 bp, Homo sapien
aaatcttgtgttctggaaaattatacttcattt

SEQ ID NO: 37370 - DNA, 33 bp, Homo sapien
aaatcttgtgttctgggaaattatacttcattt

SEQ ID NO: 37371 - DNA, 33 bp, Homo sapien
atgtaaccagtttagagagagcttttaggataa

SEQ ID NO: 37372 - DNA, 33 bp, Homo sapien
atgtaaccagtttagatagagcttttaggataa

SEQ ID NO: 37373 - DNA, 33 bp, Homo sapien
attgcattaggctaaaagaactggtcaagaaaa

SEQ ID NO: 37374 - DNA, 33 bp, Homo sapien
attgcattaggctaaaggaactggtcaagaaaa

SEQ ID NO: 37375 - DNA, 33 bp, Homo sapien
aaatctgtgctacctacactattactacattgc

SEQ ID NO: 37376 - DNA, 33 bp, Homo sapien
aaatctgtgctacctatactattactacattgc

SEQ ID NO: 37377 - DNA, 33 bp, Homo sapien
gcatctgtggttatcgccaggcttctatatttt

SEQ ID NO: 37378 - DNA, 33 bp, Homo sapien
gcatctgtggttatcgtcaggcttctatatttt

SEQ ID NO: 37379 - DNA, 33 bp, Homo sapien
ttacatattgcccattcaagatttgtggttatt

SEQ ID NO: 37380 - DNA, 33 bp, Homo sapien
ttacatattgcccattgaagatttgtggttatt

SEQ ID NO: 37381 - DNA, 33 bp, Homo sapien
tttcatatacagtggaagtatacagatgttatc

SEQ ID NO: 37382 - DNA, 33 bp, Homo sapien
tttcatatacagtggaggtatacagatgttatc

SEQ ID NO: 37383 - DNA, 33 bp, Homo sapien
ctttaacatggcctaccaatgagaataaaataa

SEQ ID NO: 37384 - DNA, 33 bp, Homo sapien
ctttaacatggcctactaatgagaataaaataa

SEQ ID NO: 37385 - DNA, 33 bp, Homo sapien
acagtccaagcatcacaaatatttgattcggta

SEQ ID NO: 37386 - DNA, 33 bp, Homo sapien
acagtccaagcatcacgaatatttgattcggta

SEQ ID NO: 37387 - DNA, 33 bp, Homo sapien
tggcctatgaagaacaggatgaaccttcccttt

SEQ ID NO: 37388 - DNA, 33 bp, Homo sapien
tggcctatgaagaacatgatgaaccttcccttt

SEQ ID NO: 37389 - DNA, 33 bp, Homo sapien
agagatgtaattttgaaccagtttttcatttgc

SEQ ID NO: 37390 - DNA, 33 bp, Homo sapien
agagatgtaattttgagccagtttttcatttgc

SEQ ID NO: 37391 - DNA, 33 bp, Homo sapien
gaatcagcttaggagaaaagagtgggaaaagag

SEQ ID NO: 37392 - DNA, 33 bp, Homo sapien
gaatcagcttaggagagaagagtgggaaaagag

SEQ ID NO: 37393 - DNA, 33 bp, Homo sapien
atgacaaccaaagtagaacaagagaagaggcaa

SEQ ID NO: 37394 - DNA, 33 bp, Homo sapien
atgacaaccaaagtagcacaagagaagaggcaa

SEQ ID NO: 37395 - DNA, 33 bp, Homo sapien
gctgtgcccctacagccgacttctacctggact

SEQ ID NO: 37396 - DNA, 33 bp, Homo sapien
gctgtgcccctacagctgacttctacctggact

SEQ ID NO: 37397 - DNA, 33 bp, Homo sapien
ggtaggtagattaaatcatgaaggctctgccct

SEQ ID NO: 37398 - DNA, 33 bp, Homo sapien
ggtaggtagattaaattatgaaggctctgccct

SEQ ID NO: 37399 - DNA, 33 bp, Homo sapien
cagaaacatgaatgaagatatgacaggaaccaa

SEQ ID NO: 37400 - DNA, 33 bp, Homo sapien
cagaaacatgaatgaatatatgacaggaaccaa

SEQ ID NO: 37401 - DNA, 33 bp, Homo sapien
ttaggtgtgggataaaagtggaaaatgcagttt

SEQ ID NO: 37402 - DNA, 33 bp, Homo sapien
ttaggtgtgggataaaggtggaaaatgcagttt

SEQ ID NO: 37403 - DNA, 33 bp, Homo sapien
taactattgaagaaaaatacattgtgcttctgg

SEQ ID NO: 37404 - DNA, 33 bp, Homo sapien
taactattgaagaaaactacattgtgcttctgg

SEQ ID NO: 37405 - DNA, 33 bp, Homo sapien
aattcccaggaaaatccctgtaaacctgttgct

SEQ ID NO: 37406 - DNA, 33 bp, Homo sapien
aattcccaggaaaatctctgtaaacctgttgct

SEQ ID NO: 37407 - DNA, 33 bp, Homo sapien
ttctagcctacgcagcaatattatcgatatggt

SEQ ID NO: 37408 - DNA, 33 bp, Homo sapien
ttctagcctacgcagcgatattatcgatatggt

SEQ ID NO: 37409 - DNA, 33 bp, Homo sapien
tatctttcctaatcaacgcatatgaagacacct

SEQ ID NO: 37410 - DNA, 33 bp, Homo sapien
tatctttcctaatcaatgcatatgaagacacct

SEQ ID NO: 37411 - DNA, 33 bp, Homo sapien
agtctcttgtaatctagagcttttctaccattt

SEQ ID NO: 37412 - DNA, 33 bp, Homo sapien
agtctcttgtaatctatagcttttctaccattt

SEQ ID NO: 37413 - DNA, 33 bp, Homo sapien
gcttcaaaataagccacagagagactgaatcgc

SEQ ID NO: 37414 - DNA, 33 bp, Homo sapien
gcttcaaaataagccatagagagactgaatcgc

SEQ ID NO: 37415 - DNA, 33 bp, Homo sapien
tgcgaagctcattagacagcgactggcatttag

SEQ ID NO: 37416 - DNA, 33 bp, Homo sapien
tgcgaagctcattagatagcgactggcatttag

SEQ ID NO: 37417 - DNA, 33 bp, Homo sapien
atgcagtgagggaagaggatcaagtcaaatgga

SEQ ID NO: 37418 - DNA, 33 bp, Homo sapien
atgcagtgagggaagatgatcaagtcaaatgga

SEQ ID NO: 37419 - DNA, 33 bp, Homo sapien
aatcaactgaagaagaactttgggaactcattt

SEQ ID NO: 37420 - DNA, 33 bp, Homo sapien
aatcaactgaagaagagctttgggaactcattt

SEQ ID NO: 37421 - DNA, 33 bp, Homo sapien
taggggacacaaatacacatcacataggaattg

SEQ ID NO: 37422 - DNA, 33 bp, Homo sapien
taggggacacaaatacccatcacataggaattg

SEQ ID NO: 37423 - DNA, 33 bp, Homo sapien
taattatgcatcaatgacaaattcgtattggcc

SEQ ID NO: 37424 - DNA, 33 bp, Homo sapien
taattatgcatcaatgccaaattcgtattggcc

SEQ ID NO: 37425 - DNA, 33 bp, Homo sapien
taaacaggcatttaaaaatgtatgagcattcag

SEQ ID NO: 37426 - DNA, 33 bp, Homo sapien
taaacaggcatttaaagatgtatgagcattcag

SEQ ID NO: 37427 - DNA, 33 bp, Homo sapien
caagacatggggctgagaaattgtattcctggt

SEQ ID NO: 37428 - DNA, 33 bp, Homo sapien
caagacatggggctgataaattgtattcctggt

SEQ ID NO: 37429 - DNA, 33 bp, Homo sapien
tggtctgtctggttcaacattatgtcctcatga

SEQ ID NO: 37430 - DNA, 33 bp, Homo sapien
tggtctgtctggttcatcattatgtcctcatga

SEQ ID NO: 37431 - DNA, 33 bp, Homo sapien
tattaatccagactctgaaccccattatagcta

SEQ ID NO: 37432 - DNA, 33 bp, Homo sapien
tattaatccagactcttaaccccattatagcta

SEQ ID NO: 37433 - DNA, 33 bp, Homo sapien
tgcatcttaacatcaaacagccagaatccccaa

SEQ ID NO: 37434 - DNA, 33 bp, Homo sapien
tgcatcttaacatcaagcagccagaatccccaa

SEQ ID NO: 37435 - DNA, 33 bp, Homo sapien
atcctcaagcatcaaaaccatattccttgcaaa

SEQ ID NO: 37436 - DNA, 33 bp, Homo sapien
atcctcaagcatcaaagccatattccttgcaaa

SEQ ID NO: 37437 - DNA, 33 bp, Homo sapien
atggaaaagttcaagaaaatacgtgtttaggca

SEQ ID NO: 37438 - DNA, 33 bp, Homo sapien
atggaaaagttcaagacaatacgtgtttaggca

SEQ ID NO: 37439 - DNA, 33 bp, Homo sapien
ctttaaaacatatccaatatcttaatatgtcat

SEQ ID NO: 37440 - DNA, 33 bp, Homo sapien
ctttaaaacatatccagtatcttaatatgtcat

SEQ ID NO: 37441 - DNA, 33 bp, Homo sapien
tctttaaaacaatttccacaatttgaacattgg

SEQ ID NO: 37442 - DNA, 33 bp, Homo sapien
tctttaaaacaatttctacaatttgaacattgg

SEQ ID NO: 37443 - DNA, 33 bp, Homo sapien
gacagaattgacgaaaattgccgaaggatcaga

SEQ ID NO: 37444 - DNA, 33 bp, Homo sapien
gacagaattgacgaaacttgccgaaggatcaga

SEQ ID NO: 37445 - DNA, 33 bp, Homo sapien
ggagtgcggaactttacgctggatggtgcatat

SEQ ID NO: 37446 - DNA, 33 bp, Homo sapien
ggagtgcggaactttatgctggatggtgcatat

SEQ ID NO: 37447 - DNA, 33 bp, Homo sapien
taatgggatgaactaacgtaaaagtctaagtat

SEQ ID NO: 37448 - DNA, 33 bp, Homo sapien
taatgggatgaactaatgtaaaagtctaagtat

SEQ ID NO: 37449 - DNA, 33 bp, Homo sapien
ggctggatgaaaggccaaccaaacttcaaaggg

SEQ ID NO: 37450 - DNA, 33 bp, Homo sapien
ggctggatgaaaggccgaccaaacttcaaaggg

SEQ ID NO: 37451 - DNA, 33 bp, Homo sapien
atatgtcagtgtgagacgaaagagattaaataa

SEQ ID NO: 37452 - DNA, 33 bp, Homo sapien
atatgtcagtgtgagatgaaagagattaaataa

SEQ ID NO: 37453 - DNA, 33 bp, Homo sapien
cccatccagcaagagcacatctggagagagggg

SEQ ID NO: 37454 - DNA, 33 bp, Homo sapien
cccatccagcaagagcgcatctggagagagggg

SEQ ID NO: 37455 - DNA, 33 bp, Homo sapien
cacaatctccataacaagaatcagcagcatata

SEQ ID NO: 37456 - DNA, 33 bp, Homo sapien
cacaatctccataacaggaatcagcagcatata

SEQ ID NO: 37457 - DNA, 33 bp, Homo sapien
gaaactcacacatcaaagagaaaaagagaaaac

SEQ ID NO: 37458 - DNA, 33 bp, Homo sapien
gaaactcacacatcaaggagaaaaagagaaaac

SEQ ID NO: 37459 - DNA, 33 bp, Homo sapien
ctgcccctcaccttgaataaacataaggcattc

SEQ ID NO: 37460 - DNA, 33 bp, Homo sapien
ctgcccctcaccttgagtaaacataaggcattc

SEQ ID NO: 37461 - DNA, 33 bp, Homo sapien
aacttttctgcgactaacctcagtacctagcac

SEQ ID NO: 37462 - DNA, 33 bp, Homo sapien
aacttttctgcgactagcctcagtacctagcac

SEQ ID NO: 37463 - DNA, 33 bp, Homo sapien
caggctaggtgccttaagttcaaatcctagctc

SEQ ID NO: 37464 - DNA, 33 bp, Homo sapien
caggctaggtgccttaggttcaaatcctagctc

SEQ ID NO: 37465 - DNA, 33 bp, Homo sapien
cagaatccagcaggcaaattgtaaagagatcca

SEQ ID NO: 37466 - DNA, 33 bp, Homo sapien
cagaatccagcaggcacattgtaaagagatcca

SEQ ID NO: 37467 - DNA, 33 bp, Homo sapien
cctgttcatgctgttacaggtattgtcccaata

SEQ ID NO: 37468 - DNA, 33 bp, Homo sapien
cctgttcatgctgttataggtattgtcccaata

SEQ ID NO: 37469 - DNA, 33 bp, Homo sapien
tttttcaaagaattcacaccatgtgccacatct

SEQ ID NO: 37470 - DNA, 33 bp, Homo sapien
tttttcaaagaattcataccatgtgccacatct

SEQ ID NO: 37471 - DNA, 33 bp, Homo sapien
tgagtaacgctgctgaagttaacatcccctctc

SEQ ID NO: 37472 - DNA, 33 bp, Homo sapien
tgagtaacgctgctgaggttaacatcccctctc

SEQ ID NO: 37473 - DNA, 33 bp, Homo sapien
catgaatgcttaccaaaatttgtcgtattgtta

SEQ ID NO: 37474 - DNA, 33 bp, Homo sapien
catgaatgcttaccaagatttgtcgtattgtta

SEQ ID NO: 37475 - DNA, 33 bp, Homo sapien
ccttctacatgtatcaactgaaattctactgta

SEQ ID NO: 37476 - DNA, 33 bp, Homo sapien
ccttctacatgtatcagctgaaattctactgta

SEQ ID NO: 37477 - DNA, 33 bp, Homo sapien
agctgtaatttgatccactttcttgttgctgaa

SEQ ID NO: 37478 - DNA, 33 bp, Homo sapien
agctgtaatttgatccgctttcttgttgctgaa

SEQ ID NO: 37479 - DNA, 33 bp, Homo sapien
ttctaagggttctaggccagcagcagtattgtt

SEQ ID NO: 37480 - DNA, 33 bp, Homo sapien
ttctaagggttctaggtcagcagcagtattgtt

SEQ ID NO: 37481 - DNA, 33 bp, Homo sapien
ataaggaaccaagtgaagaaatcaatttattta

SEQ ID NO: 37482 - DNA, 33 bp, Homo sapien
ataaggaaccaagtgaggaaatcaatttattta

SEQ ID NO: 37483 - DNA, 33 bp, Homo sapien
tcacataccatgtaataaacttatttgctatct

SEQ ID NO: 37484 - DNA, 33 bp, Homo sapien
tcacataccatgtaattaacttatttgctatct

SEQ ID NO: 37485 - DNA, 33 bp, Homo sapien
ggagttggccaaaagaatagtggagagagagac

SEQ ID NO: 37486 - DNA, 33 bp, Homo sapien
ggagttggccaaaagagtagtggagagagagac

SEQ ID NO: 37487 - DNA, 33 bp, Homo sapien
aggagcacacatgagaatctatttttttcccca

SEQ ID NO: 37488 - DNA, 33 bp, Homo sapien
aggagcacacatgagattctatttttttcccca

SEQ ID NO: 37489 - DNA, 33 bp, Homo sapien
agtgatgatgattcagcctcaaaagatttcctg

SEQ ID NO: 37490 - DNA, 33 bp, Homo sapien
agtgatgatgattcaggctcaaaagatttcctg

SEQ ID NO: 37491 - DNA, 33 bp, Homo sapien
aatgattgcggtggaacacagcattttaaaggt

SEQ ID NO: 37492 - DNA, 33 bp, Homo sapien
aatgattgcggtggaatacagcattttaaaggt

SEQ ID NO: 37493 - DNA, 33 bp, Homo sapien
ctccaaaacagcaacagaagtatacctttaaaa

SEQ ID NO: 37494 - DNA, 33 bp, Homo sapien
ctccaaaacagcaacataagtatacctttaaaa

SEQ ID NO: 37495 - DNA, 33 bp, Homo sapien
ccagccacatacttcacacttgatagatttttc

SEQ ID NO: 37496 - DNA, 33 bp, Homo sapien
ccagccacatacttcatacttgatagatttttc

SEQ ID NO: 37497 - DNA, 33 bp, Homo sapien
atttgaaaatttgccaatagatttgagaacatt

SEQ ID NO: 37498 - DNA, 33 bp, Homo sapien
atttgaaaatttgccagtagatttgagaacatt

SEQ ID NO: 37499 - DNA, 33 bp, Homo sapien
ctttccatttaggtgaaatgttctcaaaaagtg

SEQ ID NO: 37500 - DNA, 33 bp, Homo sapien
ctttccatttaggtgacatgttctcaaaaagtg

SEQ ID NO: 37501 - DNA, 33 bp, Homo sapien
ataccacaaccaggcacacaaaatcatctcctt

SEQ ID NO: 37502 - DNA, 33 bp, Homo sapien
ataccacaaccaggcatacaaaatcatctcctt

SEQ ID NO: 37503 - DNA, 33 bp, Homo sapien
ttgggcttgggtgctcaccgtcagcagcaaaga

SEQ ID NO: 37504 - DNA, 33 bp, Homo sapien
ttgggcttgggtgctcgccgtcagcagcaaaga

SEQ ID NO: 37505 - DNA, 33 bp, Homo sapien
tccataaaacagatggcaagatggagttaggag

SEQ ID NO: 37506 - DNA, 33 bp, Homo sapien
tccataaaacagatggtaagatggagttaggag

SEQ ID NO: 37507 - DNA, 33 bp, Homo sapien
tatgggaccatgctaacgggcaacctttgagaa

SEQ ID NO: 37508 - DNA, 33 bp, Homo sapien
tatgggaccatgctaatgggcaacctttgagaa

SEQ ID NO: 37509 - DNA, 33 bp, Homo sapien
aaaatataatggattacgaatctgacgacctga

SEQ ID NO: 37510 - DNA, 33 bp, Homo sapien
aaaatataatggattatgaatctgacgacctga

SEQ ID NO: 37511 - DNA, 33 bp, Homo sapien
ttatgatttgttccagaatttccaggattcggc

SEQ ID NO: 37512 - DNA, 33 bp, Homo sapien
ttatgatttgttccaggatttccaggattcggc

SEQ ID NO: 37513 - DNA, 33 bp, Homo sapien
ttcctggaagggatgacgacaggtacgttatgc

SEQ ID NO: 37514 - DNA, 33 bp, Homo sapien
ttcctggaagggatgatgacaggtacgttatgc

SEQ ID NO: 37515 - DNA, 33 bp, Homo sapien
ccctgagggcagagaccatatcattttcatctt

SEQ ID NO: 37516 - DNA, 33 bp, Homo sapien
ccctgagggcagagacgatatcattttcatctt

SEQ ID NO: 37517 - DNA, 33 bp, Homo sapien
aggctgttagctgttaccatttttcaagattga

SEQ ID NO: 37518 - DNA, 33 bp, Homo sapien
aggctgttagctgttatcatttttcaagattga

SEQ ID NO: 37519 - DNA, 33 bp, Homo sapien
atgatttagatgattccaccatactacacaagc

SEQ ID NO: 37520 - DNA, 33 bp, Homo sapien
atgatttagatgattctaccatactacacaagc

SEQ ID NO: 37521 - DNA, 33 bp, Homo sapien
gtgatttggcaactggcagagactggccagctt

SEQ ID NO: 37522 - DNA, 33 bp, Homo sapien
gtgatttggcaactggtagagactggccagctt

SEQ ID NO: 37523 - DNA, 33 bp, Homo sapien
ttgccaaataagtagagtcaatgattcacaata

SEQ ID NO: 37524 - DNA, 33 bp, Homo sapien
ttgccaaataagtagattcaatgattcacaata

SEQ ID NO: 37525 - DNA, 33 bp, Homo sapien
agatgaggtacaaagcaccatgcatgaggtaat

SEQ ID NO: 37526 - DNA, 33 bp, Homo sapien
agatgaggtacaaagcgccatgcatgaggtaat

SEQ ID NO: 37527 - DNA, 33 bp, Homo sapien
tagaatataatcacccaatgagttcttactgac

SEQ ID NO: 37528 - DNA, 33 bp, Homo sapien
tagaatataatcacccgatgagttcttactgac

SEQ ID NO: 37529 - DNA, 33 bp, Homo sapien
gcttgagatagagttcaaagagcaaaaagatac

SEQ ID NO: 37530 - DNA, 33 bp, Homo sapien
gcttgagatagagttcgaagagcaaaaagatac

SEQ ID NO: 37531 - DNA, 33 bp, Homo sapien
gccctttccatgatgacagaggtctagcataat

SEQ ID NO: 37532 - DNA, 33 bp, Homo sapien
gccctttccatgatgagagaggtctagcataat

SEQ ID NO: 37533 - DNA, 33 bp, Homo sapien
ctgtcaggatgacttacatgtgttgctgaaagg

SEQ ID NO: 37534 - DNA, 33 bp, Homo sapien
ctgtcaggatgacttatatgtgttgctgaaagg

SEQ ID NO: 37535 - DNA, 33 bp, Homo sapien
tcactttgaacaaaaaagcatcaatggaaagat

SEQ ID NO: 37536 - DNA, 33 bp, Homo sapien
tcactttgaacaaaaacgcatcaatggaaagat

SEQ ID NO: 37537 - DNA, 33 bp, Homo sapien
tgaagcccagtgttcaaaatggaaattaagtac

SEQ ID NO: 37538 - DNA, 33 bp, Homo sapien
tgaagcccagtgttcacaatggaaattaagtac

SEQ ID NO: 37539 - DNA, 33 bp, Homo sapien
agctgccatgatcaagactgacttcaggccctg

SEQ ID NO: 37540 - DNA, 33 bp, Homo sapien
agctgccatgatcaagtctgacttcaggccctg

SEQ ID NO: 37541 - DNA, 33 bp, Homo sapien
ggccccagtcattccaaaaatcaaggtcagtgc

SEQ ID NO: 37542 - DNA, 33 bp, Homo sapien
ggccccagtcattccacaaatcaaggtcagtgc

SEQ ID NO: 37543 - DNA, 33 bp, Homo sapien
tccttgtgctcatcaacttacattgtgatcatc

SEQ ID NO: 37544 - DNA, 33 bp, Homo sapien
tccttgtgctcatcaagttacattgtgatcatc

SEQ ID NO: 37545 - DNA, 33 bp, Homo sapien
ctttattgttagctacagccataactctcaggc

SEQ ID NO: 37546 - DNA, 33 bp, Homo sapien
ctttattgttagctacggccataactctcaggc

SEQ ID NO: 37547 - DNA, 33 bp, Homo sapien
ccccaaagtttctaaaattgatcaaaagaagac

SEQ ID NO: 37548 - DNA, 33 bp, Homo sapien
ccccaaagtttctaaagttgatcaaaagaagac

SEQ ID NO: 37549 - DNA, 33 bp, Homo sapien
gagcctagaattataaaaaaagagtcagaaata

SEQ ID NO: 37550 - DNA, 33 bp, Homo sapien
gagcctagaattataagaaaagagtcagaaata

SEQ ID NO: 37551 - DNA, 33 bp, Homo sapien
attattgagacttaaaatgttcttgtcagagta

SEQ ID NO: 37552 - DNA, 33 bp, Homo sapien
attattgagacttaaagtgttcttgtcagagta

SEQ ID NO: 37553 - DNA, 33 bp, Homo sapien
ttagctcccacttacaactgagaacatgaggta

SEQ ID NO: 37554 - DNA, 33 bp, Homo sapien
ttagctcccacttacatctgagaacatgaggta

SEQ ID NO: 37555 - DNA, 33 bp, Homo sapien
tatcacctctaagatcccttccagctttgcagt

SEQ ID NO: 37556 - DNA, 33 bp, Homo sapien
tatcacctctaagatctcttccagctttgcagt

SEQ ID NO: 37557 - DNA, 33 bp, Homo sapien
catgtactatacacacactacacataccgtgga

SEQ ID NO: 37558 - DNA, 33 bp, Homo sapien
catgtactatacacaccctacacataccgtgga

SEQ ID NO: 37559 - DNA, 33 bp, Homo sapien
gagtgatcaggagtaactgaagcatcttcaagt

SEQ ID NO: 37560 - DNA, 33 bp, Homo sapien
gagtgatcaggagtaagtgaagcatcttcaagt

SEQ ID NO: 37561 - DNA, 33 bp, Homo sapien
gttttagagtcaatatcaggagtgagaaagagg

SEQ ID NO: 37562 - DNA, 33 bp, Homo sapien
gttttagagtcaatatgaggagtgagaaagagg

SEQ ID NO: 37563 - DNA, 33 bp, Homo sapien
gaggttgaatatttaccgaggccactcctgctt

SEQ ID NO: 37564 - DNA, 33 bp, Homo sapien
gaggttgaatatttactgaggccactcctgctt

SEQ ID NO: 37565 - DNA, 33 bp, Homo sapien
tctaacagtgatggaaacattgaaaaatggcag

SEQ ID NO: 37566 - DNA, 33 bp, Homo sapien
tctaacagtgatggaagcattgaaaaatggcag

SEQ ID NO: 37567 - DNA, 33 bp, Homo sapien
cagtaaaggaaatactaaagagtgttcattaaa

SEQ ID NO: 37568 - DNA, 33 bp, Homo sapien
cagtaaaggaaatacttaagagtgttcattaaa

SEQ ID NO: 37569 - DNA, 33 bp, Homo sapien
tgccgttgagcacagacgaagtaatcggaacac

SEQ ID NO: 37570 - DNA, 33 bp, Homo sapien
tgccgttgagcacagatgaagtaatcggaacac

SEQ ID NO: 37571 - DNA, 33 bp, Homo sapien
cttcattaattttctaaatcaacctcatgttcc

SEQ ID NO: 37572 - DNA, 33 bp, Homo sapien
cttcattaattttctatatcaacctcatgttcc

SEQ ID NO: 37573 - DNA, 33 bp, Homo sapien
aaatggcaaacaagtcaatcgcaaacaaagtga

SEQ ID NO: 37574 - DNA, 33 bp, Homo sapien
aaatggcaaacaagtctatcgcaaacaaagtga

SEQ ID NO: 37575 - DNA, 33 bp, Homo sapien
ttagcttaagacatccaatgtacaagagcacaa

SEQ ID NO: 37576 - DNA, 33 bp, Homo sapien
ttagcttaagacatccgatgtacaagagcacaa

SEQ ID NO: 37577 - DNA, 33 bp, Homo sapien
tcaatcacacaaacgaagttaaattattatata

SEQ ID NO: 37578 - DNA, 33 bp, Homo sapien
tcaatcacacaaacgacgttaaattattatata

SEQ ID NO: 37579 - DNA, 33 bp, Homo sapien
cctgcacacctacataggttcctaacatgagtt

SEQ ID NO: 37580 - DNA, 33 bp, Homo sapien
cctgcacacctacatatgttcctaacatgagtt

SEQ ID NO: 37581 - DNA, 33 bp, Homo sapien
ccatttctaatattaaggatggtcttacttttc

SEQ ID NO: 37582 - DNA, 33 bp, Homo sapien
ccatttctaatattaatgatggtcttacttttc

SEQ ID NO: 37583 - DNA, 33 bp, Homo sapien
cactgacttctcacatcactccagttaaattac

SEQ ID NO: 37584 - DNA, 33 bp, Homo sapien
cactgacttctcacattactccagttaaattac

SEQ ID NO: 37585 - DNA, 33 bp, Homo sapien
tgatatggttagaaaagtagattggaccagagt

SEQ ID NO: 37586 - DNA, 33 bp, Homo sapien
tgatatggttagaaaattagattggaccagagt

SEQ ID NO: 37587 - DNA, 33 bp, Homo sapien
aacttcttgagtataaaaactccttcacaatat

SEQ ID NO: 37588 - DNA, 33 bp, Homo sapien
aacttcttgagtataagaactccttcacaatat

SEQ ID NO: 37589 - DNA, 33 bp, Homo sapien
acagcaattacctctaagaagtcagaccagatg

SEQ ID NO: 37590 - DNA, 33 bp, Homo sapien
acagcaattacctctacgaagtcagaccagatg

SEQ ID NO: 37591 - DNA, 33 bp, Homo sapien
gtataatggacataggaactgttaacagcaatt

SEQ ID NO: 37592 - DNA, 33 bp, Homo sapien
gtataatggacatagggactgttaacagcaatt

SEQ ID NO: 37593 - DNA, 33 bp, Homo sapien
cagaaaaactaaggcaagattacagggagggaa

SEQ ID NO: 37594 - DNA, 33 bp, Homo sapien
cagaaaaactaaggcatgattacagggagggaa

SEQ ID NO: 37595 - DNA, 33 bp, Homo sapien
acctgactgagttagaaggaacctgaactagct

SEQ ID NO: 37596 - DNA, 33 bp, Homo sapien
acctgactgagttagacggaacctgaactagct

SEQ ID NO: 37597 - DNA, 33 bp, Homo sapien
aggtctcattaaacacagcctaatcacctaccc

SEQ ID NO: 37598 - DNA, 33 bp, Homo sapien
aggtctcattaaacacggcctaatcacctaccc

SEQ ID NO: 37599 - DNA, 33 bp, Homo sapien
tttgcaggttgattgaccttgcaatgattgtct

SEQ ID NO: 37600 - DNA, 33 bp, Homo sapien
tttgcaggttgattgatcttgcaatgattgtct

SEQ ID NO: 37601 - DNA, 33 bp, Homo sapien
gcagaaagaaaagagcaaattatcaaccagtca

SEQ ID NO: 37602 - DNA, 33 bp, Homo sapien
gcagaaagaaaagagcgaattatcaaccagtca

SEQ ID NO: 37603 - DNA, 33 bp, Homo sapien
aagtaaggagatagggaaaggtgtattaacatg

SEQ ID NO: 37604 - DNA, 33 bp, Homo sapien
aagtaaggagataggggaaggtgtattaacatg

SEQ ID NO: 37605 - DNA, 33 bp, Homo sapien
atcacagtaaacaaggaaaggtattcttaagta

SEQ ID NO: 37606 - DNA, 33 bp, Homo sapien
atcacagtaaacaaggtaaggtattcttaagta

SEQ ID NO: 37607 - DNA, 33 bp, Homo sapien
agataactaacacacacagaatcacacatatac

SEQ ID NO: 37608 - DNA, 33 bp, Homo sapien
agataactaacacacatagaatcacacatatac

SEQ ID NO: 37609 - DNA, 33 bp, Homo sapien
cccatttttcacattaccctaatctgtttggtc

SEQ ID NO: 37610 - DNA, 33 bp, Homo sapien
cccatttttcacattatcctaatctgtttggtc

SEQ ID NO: 37611 - DNA, 33 bp, Homo sapien
aagaaaccataacctccccaagtggacaaacca

SEQ ID NO: 37612 - DNA, 33 bp, Homo sapien
aagaaaccataacctctccaagtggacaaacca

SEQ ID NO: 37613 - DNA, 33 bp, Homo sapien
cctgttttgatttacactggacatgtttgctta

SEQ ID NO: 37614 - DNA, 33 bp, Homo sapien
cctgttttgatttacattggacatgtttgctta

SEQ ID NO: 37615 - DNA, 33 bp, Homo sapien
aagataagagctgcaaacattttaaggaataat

SEQ ID NO: 37616 - DNA, 33 bp, Homo sapien
aagataagagctgcaaccattttaaggaataat

SEQ ID NO: 37617 - DNA, 33 bp, Homo sapien
gtttgtaatgctgaaacttaatacttacaacac

SEQ ID NO: 37618 - DNA, 33 bp, Homo sapien
gtttgtaatgctgaaagttaatacttacaacac

SEQ ID NO: 37619 - DNA, 33 bp, Homo sapien
gtgtctttcgaaaaaactcaaggtaggaataaa

SEQ ID NO: 37620 - DNA, 33 bp, Homo sapien
gtgtctttcgaaaaaattcaaggtaggaataaa

SEQ ID NO: 37621 - DNA, 33 bp, Homo sapien
tactgggaatagcagacgagtcaggattttaca

SEQ ID NO: 37622 - DNA, 33 bp, Homo sapien
tactgggaatagcagatgagtcaggattttaca

SEQ ID NO: 37623 - DNA, 33 bp, Homo sapien
agaggtgcttttgaaaaacttaaggcctccctg

SEQ ID NO: 37624 - DNA, 33 bp, Homo sapien
agaggtgcttttgaaacacttaaggcctccctg

SEQ ID NO: 37625 - DNA, 33 bp, Homo sapien
tggtgggaaaaccatgaatttgtatatttagct

SEQ ID NO: 37626 - DNA, 33 bp, Homo sapien
tggtgggaaaaccatgtatttgtatatttagct

SEQ ID NO: 37627 - DNA, 33 bp, Homo sapien
atctattccaatatgcagagaacaaggaaagca

SEQ ID NO: 37628 - DNA, 33 bp, Homo sapien
atctattccaatatgcggagaacaaggaaagca

SEQ ID NO: 37629 - DNA, 33 bp, Homo sapien
ctagagggaggcagacaaagtgcatgaaaatag

SEQ ID NO: 37630 - DNA, 33 bp, Homo sapien
ctagagggaggcagacgaagtgcatgaaaatag

SEQ ID NO: 37631 - DNA, 33 bp, Homo sapien
aatcaatagctatccaccttaacataaaaatgt

SEQ ID NO: 37632 - DNA, 33 bp, Homo sapien
aatcaatagctatccatcttaacataaaaatgt

SEQ ID NO: 37633 - DNA, 33 bp, Homo sapien
taggtagttttacaacacaggaagatctttttc

SEQ ID NO: 37634 - DNA, 33 bp, Homo sapien
taggtagttttacaacccaggaagatctttttc

SEQ ID NO: 37635 - DNA, 33 bp, Homo sapien
tttttcagataaaaaaatcctcaatggctttaa

SEQ ID NO: 37636 - DNA, 33 bp, Homo sapien
tttttcagataaaaaattcctcaatggctttaa

SEQ ID NO: 37637 - DNA, 33 bp, Homo sapien
agtgtttgtgttcaacccttccttaaagctttt

SEQ ID NO: 37638 - DNA, 33 bp, Homo sapien
agtgtttgtgttcaactcttccttaaagctttt

SEQ ID NO: 37639 - DNA, 33 bp, Homo sapien
caaatcacctttataccggcataccttagagag

SEQ ID NO: 37640 - DNA, 33 bp, Homo sapien
caaatcacctttatactggcataccttagagag

SEQ ID NO: 37641 - DNA, 33 bp, Homo sapien
gaattgccacagtgaaactagccttcagcaacc

SEQ ID NO: 37642 - DNA, 33 bp, Homo sapien
gaattgccacagtgaacctagccttcagcaacc

SEQ ID NO: 37643 - DNA, 33 bp, Homo sapien
tcatgttgtttcatgcactaacacaacatccat

SEQ ID NO: 37644 - DNA, 33 bp, Homo sapien
tcatgttgtttcatgcgctaacacaacatccat

SEQ ID NO: 37645 - DNA, 33 bp, Homo sapien
cgtttcaaaatattaccgatcactgataatgca

SEQ ID NO: 37646 - DNA, 33 bp, Homo sapien
cgtttcaaaatattactgatcactgataatgca

SEQ ID NO: 37647 - DNA, 33 bp, Homo sapien
tgaatatttcaagccactgagactcaccactca

SEQ ID NO: 37648 - DNA, 33 bp, Homo sapien
tgaatatttcaagccattgagactcaccactca

SEQ ID NO: 37649 - DNA, 33 bp, Homo sapien
aattcaaactgactaaatatctaaaactgaatt

SEQ ID NO: 37650 - DNA, 33 bp, Homo sapien
aattcaaactgactaagtatctaaaactgaatt

SEQ ID NO: 37651 - DNA, 33 bp, Homo sapien
agaagtttatttggcacactcactcagatatca

SEQ ID NO: 37652 - DNA, 33 bp, Homo sapien
agaagtttatttggcatactcactcagatatca

SEQ ID NO: 37653 - DNA, 33 bp, Homo sapien
aagatttcaccttgaaatgtaccacctacccat

SEQ ID NO: 37654 - DNA, 33 bp, Homo sapien
aagatttcaccttgaagtgtaccacctacccat

SEQ ID NO: 37655 - DNA, 33 bp, Homo sapien
aattgagtttacgatccattgattggtcagttc

SEQ ID NO: 37656 - DNA, 33 bp, Homo sapien
aattgagtttacgatctattgattggtcagttc

SEQ ID NO: 37657 - DNA, 33 bp, Homo sapien
aaccaagcacttggctaaattaaaagaataaaa

SEQ ID NO: 37658 - DNA, 33 bp, Homo sapien
aaccaagcacttggctgaattaaaagaataaaa

SEQ ID NO: 37659 - DNA, 33 bp, Homo sapien
gaactattacaacccaaaagtattgatattgat

SEQ ID NO: 37660 - DNA, 33 bp, Homo sapien
gaactattacaacccagaagtattgatattgat

SEQ ID NO: 37661 - DNA, 33 bp, Homo sapien
tcattgaactataagaactcatatgatttgttc

SEQ ID NO: 37662 - DNA, 33 bp, Homo sapien
tcattgaactataagacctcatatgatttgttc

SEQ ID NO: 37663 - DNA, 33 bp, Homo sapien
tataacattgatacaagaatcagttaaaagttg

SEQ ID NO: 37664 - DNA, 33 bp, Homo sapien
tataacattgatacaataatcagttaaaagttg

SEQ ID NO: 37665 - DNA, 33 bp, Homo sapien
atgggagcaagggaaaatgccctagttaggctg

SEQ ID NO: 37666 - DNA, 33 bp, Homo sapien
atgggagcaagggaaagtgccctagttaggctg

SEQ ID NO: 37667 - DNA, 33 bp, Homo sapien
agtccccatatgagagaatctgcagtggatcct

SEQ ID NO: 37668 - DNA, 33 bp, Homo sapien
agtccccatatgagagtatctgcagtggatcct

SEQ ID NO: 37669 - DNA, 33 bp, Homo sapien
agtgagaaagttaccacaggggtgccaaaaagc

SEQ ID NO: 37670 - DNA, 33 bp, Homo sapien
agtgagaaagttaccagaggggtgccaaaaagc

SEQ ID NO: 37671 - DNA, 33 bp, Homo sapien
gaggaactaaaggtgaaaaggacagaatggctg

SEQ ID NO: 37672 - DNA, 33 bp, Homo sapien
gaggaactaaaggtgacaaggacagaatggctg

SEQ ID NO: 37673 - DNA, 33 bp, Homo sapien
ttgaagtggataaaagaagcacagaaggaatca

SEQ ID NO: 37674 - DNA, 33 bp, Homo sapien
ttgaagtggataaaagcagcacagaaggaatca

SEQ ID NO: 37675 - DNA, 33 bp, Homo sapien
tctggaggctttagagaaaaatctgcttctttg

SEQ ID NO: 37676 - DNA, 33 bp, Homo sapien
tctggaggctttagaggaaaatctgcttctttg

SEQ ID NO: 37677 - DNA, 33 bp, Homo sapien
atctgaatcctgctgaaaaattctggaaggcag

SEQ ID NO: 37678 - DNA, 33 bp, Homo sapien
atctgaatcctgctgagaaattctggaaggcag

SEQ ID NO: 37679 - DNA, 33 bp, Homo sapien
atatcaacaccagaaacgtgctgtgaagtatag

SEQ ID NO: 37680 - DNA, 33 bp, Homo sapien
atatcaacaccagaaatgtgctgtgaagtatag

SEQ ID NO: 37681 - DNA, 33 bp, Homo sapien
ttagtccattctcgtacggttataaagatacca

SEQ ID NO: 37682 - DNA, 33 bp, Homo sapien
ttagtccattctcgtatggttataaagatacca

SEQ ID NO: 37683 - DNA, 33 bp, Homo sapien
gttaccactggacgacaactgctacatttctca

SEQ ID NO: 37684 - DNA, 33 bp, Homo sapien
gttaccactggacgacgactgctacatttctca

SEQ ID NO: 37685 - DNA, 33 bp, Homo sapien
aaacacattttttacacagatcaagacatcaca

SEQ ID NO: 37686 - DNA, 33 bp, Homo sapien
aaacacattttttacatagatcaagacatcaca

SEQ ID NO: 37687 - DNA, 33 bp, Homo sapien
acataaagaaattgagaacagattagtgattgc

SEQ ID NO: 37688 - DNA, 33 bp, Homo sapien
acataaagaaattgaggacagattagtgattgc

SEQ ID NO: 37689 - DNA, 33 bp, Homo sapien
cttcctactgggaatacagataaaatagaagct

SEQ ID NO: 37690 - DNA, 33 bp, Homo sapien
cttcctactgggaatagagataaaatagaagct

SEQ ID NO: 37691 - DNA, 33 bp, Homo sapien
cagagtcctcatgactcaattacttcctgaaga

SEQ ID NO: 37692 - DNA, 33 bp, Homo sapien
cagagtcctcatgacttaattacttcctgaaga

SEQ ID NO: 37693 - DNA, 33 bp, Homo sapien
tcaggagagtgtatgaccacatggatttcctgt

SEQ ID NO: 37694 - DNA, 33 bp, Homo sapien
tcaggagagtgtatgatcacatggatttcctgt

SEQ ID NO: 37695 - DNA, 33 bp, Homo sapien
gtgtttgggtcatgggaactgtgatagttaata

SEQ ID NO: 37696 - DNA, 33 bp, Homo sapien
gtgtttgggtcatggggactgtgatagttaata

SEQ ID NO: 37697 - DNA, 33 bp, Homo sapien
atggttctgcaggctgcataggaaacacagtgg

SEQ ID NO: 37698 - DNA, 33 bp, Homo sapien
atggttctgcaggctgtataggaaacacagtgg

SEQ ID NO: 37699 - DNA, 33 bp, Homo sapien
gtggaggaagtttctacgcagcaaagtgttcaa

SEQ ID NO: 37700 - DNA, 33 bp, Homo sapien
gtggaggaagtttctatgcagcaaagtgttcaa

SEQ ID NO: 37701 - DNA, 33 bp, Homo sapien
aaacacatatttgggacgttccctctgccagaa

SEQ ID NO: 37702 - DNA, 33 bp, Homo sapien
aaacacatatttgggatgttccctctgccagaa

SEQ ID NO: 37703 - DNA, 33 bp, Homo sapien
tatatttggcttggtacgtagatagtggctaaa

SEQ ID NO: 37704 - DNA, 33 bp, Homo sapien
tatatttggcttggtatgtagatagtggctaaa

SEQ ID NO: 37705 - DNA, 33 bp, Homo sapien
tgacatatgagattataactatggtccagtgaa

SEQ ID NO: 37706 - DNA, 33 bp, Homo sapien
tgacatatgagattatgactatggtccagtgaa

SEQ ID NO: 37707 - DNA, 33 bp, Homo sapien
gagtggattcaggataagctttaaactttggga

SEQ ID NO: 37708 - DNA, 33 bp, Homo sapien
gagtggattcaggataggctttaaactttggga

SEQ ID NO: 37709 - DNA, 33 bp, Homo sapien
ggtaatttagcatcttaaaacttcagtttactt

SEQ ID NO: 37710 - DNA, 33 bp, Homo sapien
ggtaatttagcatctttaaacttcagtttactt

SEQ ID NO: 37711 - DNA, 33 bp, Homo sapien
ccagcatgatgttctgaaaactgaaaacaaagg

SEQ ID NO: 37712 - DNA, 33 bp, Homo sapien
ccagcatgatgttctgcaaactgaaaacaaagg

SEQ ID NO: 37713 - DNA, 33 bp, Homo sapien
catgttgaaccaggtacattttgagtaagcaaa

SEQ ID NO: 37714 - DNA, 33 bp, Homo sapien
catgttgaaccaggtatattttgagtaagcaaa

SEQ ID NO: 37715 - DNA, 33 bp, Homo sapien
accctgccaggaagaaaagtctctgagttgcca

SEQ ID NO: 37716 - DNA, 33 bp, Homo sapien
accctgccaggaagaacagtctctgagttgcca

SEQ ID NO: 37717 - DNA, 33 bp, Homo sapien
tcatctaacaaatcataataattctaacagtgg

SEQ ID NO: 37718 - DNA, 33 bp, Homo sapien
tcatctaacaaatcatgataattctaacagtgg

SEQ ID NO: 37719 - DNA, 33 bp, Homo sapien
cttccttgttctggtaccttatactcagtaatg

SEQ ID NO: 37720 - DNA, 33 bp, Homo sapien
cttccttgttctggtagcttatactcagtaatg

SEQ ID NO: 37721 - DNA, 33 bp, Homo sapien
ctgatgttgatttatgaagctctaagatttgca

SEQ ID NO: 37722 - DNA, 33 bp, Homo sapien
ctgatgttgatttatgcagctctaagatttgca

SEQ ID NO: 37723 - DNA, 33 bp, Homo sapien
ttctcttgggagtgaaaaagtcgcacaagatct

SEQ ID NO: 37724 - DNA, 33 bp, Homo sapien
ttctcttgggagtgaataagtcgcacaagatct

SEQ ID NO: 37725 - DNA, 33 bp, Homo sapien
tgctgtgagtactgaaatagtgaatgtcgaacc

SEQ ID NO: 37726 - DNA, 33 bp, Homo sapien
tgctgtgagtactgaattagtgaatgtcgaacc

SEQ ID NO: 37727 - DNA, 33 bp, Homo sapien
caaattctcccactcactgaaatttatttctaa

SEQ ID NO: 37728 - DNA, 33 bp, Homo sapien
caaattctcccactcattgaaatttatttctaa

SEQ ID NO: 37729 - DNA, 33 bp, Homo sapien
aggactaaaatttccaatgaaagacagaaggtt

SEQ ID NO: 37730 - DNA, 33 bp, Homo sapien
aggactaaaatttccagtgaaagacagaaggtt

SEQ ID NO: 37731 - DNA, 33 bp, Homo sapien
tgcacacgtatacccacctaatgtttaccacag

SEQ ID NO: 37732 - DNA, 33 bp, Homo sapien
tgcacacgtatacccatctaatgtttaccacag

SEQ ID NO: 37733 - DNA, 33 bp, Homo sapien
ggagggaacagaaaaacgtcatgtggtttctga

SEQ ID NO: 37734 - DNA, 33 bp, Homo sapien
ggagggaacagaaaaatgtcatgtggtttctga

SEQ ID NO: 37735 - DNA, 33 bp, Homo sapien
taaaactttaaaaaacactatgctcatcactgc

SEQ ID NO: 37736 - DNA, 33 bp, Homo sapien
taaaactttaaaaaacgctatgctcatcactgc

SEQ ID NO: 37737 - DNA, 33 bp, Homo sapien
ttttgaatattttggactagctcaagtttattc

SEQ ID NO: 37738 - DNA, 33 bp, Homo sapien
ttttgaatattttggattagctcaagtttattc

SEQ ID NO: 37739 - DNA, 33 bp, Homo sapien
atgatatgtacactgacgtaggccatacataga

SEQ ID NO: 37740 - DNA, 33 bp, Homo sapien
atgatatgtacactgatgtaggccatacataga

SEQ ID NO: 37741 - DNA, 33 bp, Homo sapien
agataggaagcagagagaaccatttagtaggtg

SEQ ID NO: 37742 - DNA, 33 bp, Homo sapien
agataggaagcagagataaccatttagtaggtg

SEQ ID NO: 37743 - DNA, 33 bp, Homo sapien
ctgcttcctatctccaacatagacttaaccttc

SEQ ID NO: 37744 - DNA, 33 bp, Homo sapien
ctgcttcctatctccagcatagacttaaccttc

SEQ ID NO: 37745 - DNA, 33 bp, Homo sapien
attatataaatagagaggaatgttggagtgtaa

SEQ ID NO: 37746 - DNA, 33 bp, Homo sapien
attatataaatagagatgaatgttggagtgtaa

SEQ ID NO: 37747 - DNA, 33 bp, Homo sapien
catctttcaactggtcccaatgcatctatttta

SEQ ID NO: 37748 - DNA, 33 bp, Homo sapien
catctttcaactggtctcaatgcatctatttta

SEQ ID NO: 37749 - DNA, 33 bp, Homo sapien
agatgggagagaattcaccaaaaggacatatct

SEQ ID NO: 37750 - DNA, 33 bp, Homo sapien
agatgggagagaattcgccaaaaggacatatct

SEQ ID NO: 37751 - DNA, 33 bp, Homo sapien
catattaacagaaacacgacaagcactttctcc

SEQ ID NO: 37752 - DNA, 33 bp, Homo sapien
catattaacagaaacatgacaagcactttctcc

SEQ ID NO: 37753 - DNA, 33 bp, Homo sapien
gaactattttcaagcagtctgtgtccaggtatg

SEQ ID NO: 37754 - DNA, 33 bp, Homo sapien
gaactattttcaagcattctgtgtccaggtatg

SEQ ID NO: 37755 - DNA, 33 bp, Homo sapien
acaggtacgcagtcacagaaaaagaatcctggt

SEQ ID NO: 37756 - DNA, 33 bp, Homo sapien
acaggtacgcagtcacggaaaaagaatcctggt

SEQ ID NO: 37757 - DNA, 33 bp, Homo sapien
cctgcttatatgaaaacgaggagtctgagtata

SEQ ID NO: 37758 - DNA, 33 bp, Homo sapien
cctgcttatatgaaaaggaggagtctgagtata

SEQ ID NO: 37759 - DNA, 33 bp, Homo sapien
tatgatacatgcaggaaaatattgaaagtacta

SEQ ID NO: 37760 - DNA, 33 bp, Homo sapien
tatgatacatgcaggagaatattgaaagtacta

SEQ ID NO: 37761 - DNA, 33 bp, Homo sapien
agagtccctaaacataacaatgggccgttttct

SEQ ID NO: 37762 - DNA, 33 bp, Homo sapien
agagtccctaaacatagcaatgggccgttttct

SEQ ID NO: 37763 - DNA, 33 bp, Homo sapien
gataaagtcatgttgaatacagaattgaggctg

SEQ ID NO: 37764 - DNA, 33 bp, Homo sapien
gataaagtcatgttgagtacagaattgaggctg

SEQ ID NO: 37765 - DNA, 33 bp, Homo sapien
cctgtcagacctgttagctgtataaggcattta

SEQ ID NO: 37766 - DNA, 33 bp, Homo sapien
cctgtcagacctgttatctgtataaggcattta

SEQ ID NO: 37767 - DNA, 33 bp, Homo sapien
gaaagagttcattgtaagtaaatttttggaaag

SEQ ID NO: 37768 - DNA, 33 bp, Homo sapien
gaaagagttcattgtaggtaaatttttggaaag

SEQ ID NO: 37769 - DNA, 33 bp, Homo sapien
caatgttgtaatttcaagtcttagatttgaatc

SEQ ID NO: 37770 - DNA, 33 bp, Homo sapien
caatgttgtaatttcaggtcttagatttgaatc

SEQ ID NO: 37771 - DNA, 33 bp, Homo sapien
tattcccttttgaaaaatcatttccaggtttta

SEQ ID NO: 37772 - DNA, 33 bp, Homo sapien
tattcccttttgaaaagtcatttccaggtttta

SEQ ID NO: 37773 - DNA, 33 bp, Homo sapien
atattttggacaaagagagttaatctaagtagg

SEQ ID NO: 37774 - DNA, 33 bp, Homo sapien
atattttggacaaagatagttaatctaagtagg

SEQ ID NO: 37775 - DNA, 33 bp, Homo sapien
tattttgctctgttgaaaatctcctatggattc

SEQ ID NO: 37776 - DNA, 33 bp, Homo sapien
tattttgctctgttgacaatctcctatggattc

SEQ ID NO: 37777 - DNA, 33 bp, Homo sapien
tatgggccaatgcacagtcatttctagctgagt

SEQ ID NO: 37778 - DNA, 33 bp, Homo sapien
tatgggccaatgcacattcatttctagctgagt

SEQ ID NO: 37779 - DNA, 33 bp, Homo sapien
aagggctgaaggcaaaatttcggcagattgaag

SEQ ID NO: 37780 - DNA, 33 bp, Homo sapien
aagggctgaaggcaaagtttcggcagattgaag

SEQ ID NO: 37781 - DNA, 33 bp, Homo sapien
ccactgcgtccagccaatctgtttattctaaat

SEQ ID NO: 37782 - DNA, 33 bp, Homo sapien
ccactgcgtccagccattctgtttattctaaat

SEQ ID NO: 37783 - DNA, 33 bp, Homo sapien
aggagaagctagaaaaataaaaccatcaagttt

SEQ ID NO: 37784 - DNA, 33 bp, Homo sapien
aggagaagctagaaaagtaaaaccatcaagttt

SEQ ID NO: 37785 - DNA, 33 bp, Homo sapien
gattctgttgatggtaactaactaaagtggagc

SEQ ID NO: 37786 - DNA, 33 bp, Homo sapien
gattctgttgatggtagctaactaaagtggagc

SEQ ID NO: 37787 - DNA, 33 bp, Homo sapien
gcaagcaatctaagtcgcttctcattttaccta

SEQ ID NO: 37788 - DNA, 33 bp, Homo sapien
gcaagcaatctaagtctcttctcattttaccta

SEQ ID NO: 37789 - DNA, 33 bp, Homo sapien
tacagggctgaagaaactattgaagaaggagga

SEQ ID NO: 37790 - DNA, 33 bp, Homo sapien
tacagggctgaagaaattattgaagaaggagga

SEQ ID NO: 37791 - DNA, 33 bp, Homo sapien
catcgggtttgtctgacgattaaacgacttcat

SEQ ID NO: 37792 - DNA, 33 bp, Homo sapien
catcgggtttgtctgaggattaaacgacttcat

SEQ ID NO: 37793 - DNA, 33 bp, Homo sapien
agcatatagaggatgaccaataaatccttcctg

SEQ ID NO: 37794 - DNA, 33 bp, Homo sapien
agcatatagaggatgatcaataaatccttcctg

SEQ ID NO: 37795 - DNA, 33 bp, Homo sapien
aaagggattactaaacagtagctggaaggtata

SEQ ID NO: 37796 - DNA, 33 bp, Homo sapien
aaagggattactaaacggtagctggaaggtata

SEQ ID NO: 37797 - DNA, 33 bp, Homo sapien
attatcgtgaccttccaatccactgtcatatgg

SEQ ID NO: 37798 - DNA, 33 bp, Homo sapien
attatcgtgaccttccgatccactgtcatatgg

SEQ ID NO: 37799 - DNA, 33 bp, Homo sapien
tgttatgtagcagaaagaagtaaatcttggctg

SEQ ID NO: 37800 - DNA, 33 bp, Homo sapien
tgttatgtagcagaaataagtaaatcttggctg

SEQ ID NO: 37801 - DNA, 33 bp, Homo sapien
tatattgatatttttacgaataagcgtccttac

SEQ ID NO: 37802 - DNA, 33 bp, Homo sapien
tatattgatatttttatgaataagcgtccttac

SEQ ID NO: 37803 - DNA, 33 bp, Homo sapien
gtctttaggtacactacggattgtagaattagg

SEQ ID NO: 37804 - DNA, 33 bp, Homo sapien
gtctttaggtacactatggattgtagaattagg

SEQ ID NO: 37805 - DNA, 33 bp, Homo sapien
tccttactcttactttaaaaatggtgaaaaatt

SEQ ID NO: 37806 - DNA, 33 bp, Homo sapien
tccttactcttacttttaaaatggtgaaaaatt

SEQ ID NO: 37807 - DNA, 33 bp, Homo sapien
tcttgagctttaccaaagtagaatagcacataa

SEQ ID NO: 37808 - DNA, 33 bp, Homo sapien
tcttgagctttaccaaggtagaatagcacataa

SEQ ID NO: 37809 - DNA, 33 bp, Homo sapien
atatgtttgatgtttcccactagaatgcaaatt

SEQ ID NO: 37810 - DNA, 33 bp, Homo sapien
atatgtttgatgtttctcactagaatgcaaatt

SEQ ID NO: 37811 - DNA, 33 bp, Homo sapien
tatgtacagattgataactctattgcttcaggg

SEQ ID NO: 37812 - DNA, 33 bp, Homo sapien
tatgtacagattgatatctctattgcttcaggg

SEQ ID NO: 37813 - DNA, 33 bp, Homo sapien
actgatgatgatagtcaactgaatgagtctagc

SEQ ID NO: 37814 - DNA, 33 bp, Homo sapien
actgatgatgatagtccactgaatgagtctagc

SEQ ID NO: 37815 - DNA, 33 bp, Homo sapien
tcttcattacaagttaaccttagagcagacagt

SEQ ID NO: 37816 - DNA, 33 bp, Homo sapien
tcttcattacaagttagccttagagcagacagt

SEQ ID NO: 37817 - DNA, 33 bp, Homo sapien
gatgatgccttctacccacaatctcttatgata

SEQ ID NO: 37818 - DNA, 33 bp, Homo sapien
gatgatgccttctacctacaatctcttatgata

SEQ ID NO: 37819 - DNA, 33 bp, Homo sapien
gatccttctggataaactgaattgggttcccat

SEQ ID NO: 37820 - DNA, 33 bp, Homo sapien
gatccttctggataaattgaattgggttcccat

SEQ ID NO: 37821 - DNA, 33 bp, Homo sapien
ttacttctaatagtgccataatgctggaaattg

SEQ ID NO: 37822 - DNA, 33 bp, Homo sapien
ttacttctaatagtgctataatgctggaaattg

SEQ ID NO: 37823 - DNA, 33 bp, Homo sapien
gccacctttggctataactacacagcattaatt

SEQ ID NO: 37824 - DNA, 33 bp, Homo sapien
gccacctttggctatacctacacagcattaatt

SEQ ID NO: 37825 - DNA, 33 bp, Homo sapien
gactattatgacctctaaatgtagtattctaaa

SEQ ID NO: 37826 - DNA, 33 bp, Homo sapien
gactattatgacctctgaatgtagtattctaaa

SEQ ID NO: 37827 - DNA, 33 bp, Homo sapien
caggaagcaatacacaaaactgagcaaatggga

SEQ ID NO: 37828 - DNA, 33 bp, Homo sapien
caggaagcaatacacagaactgagcaaatggga

SEQ ID NO: 37829 - DNA, 33 bp, Homo sapien
gagggagtgggcctaacagatccctctagtatg

SEQ ID NO: 37830 - DNA, 33 bp, Homo sapien
gagggagtgggcctaatagatccctctagtatg

SEQ ID NO: 37831 - DNA, 33 bp, Homo sapien
ggtgggaaatttgccccagatagagacacacaa

SEQ ID NO: 37832 - DNA, 33 bp, Homo sapien
ggtgggaaatttgccctagatagagacacacaa

SEQ ID NO: 37833 - DNA, 33 bp, Homo sapien
cacactcaagtttgtcaataagcctcttacaga

SEQ ID NO: 37834 - DNA, 33 bp, Homo sapien
cacactcaagtttgtccataagcctcttacaga

SEQ ID NO: 37835 - DNA, 33 bp, Homo sapien
ctgtgcttcagttttaacagaggctacttacat

SEQ ID NO: 37836 - DNA, 33 bp, Homo sapien
ctgtgcttcagttttagcagaggctacttacat

SEQ ID NO: 37837 - DNA, 33 bp, Homo sapien
aatattccactttcagcctagatttttcattct

SEQ ID NO: 37838 - DNA, 33 bp, Homo sapien
aatattccactttcaggctagatttttcattct

SEQ ID NO: 37839 - DNA, 33 bp, Homo sapien
tgattcaggctcatccagattatttaagacagt

SEQ ID NO: 37840 - DNA, 33 bp, Homo sapien
tgattcaggctcatccggattatttaagacagt

SEQ ID NO: 37841 - DNA, 33 bp, Homo sapien
cattgggaaacagaaactgaaactacaatgata

SEQ ID NO: 37842 - DNA, 33 bp, Homo sapien
cattgggaaacagaaattgaaactacaatgata

SEQ ID NO: 37843 - DNA, 33 bp, Homo sapien
caaaggattctcgtgagactcaaataaattatg

SEQ ID NO: 37844 - DNA, 33 bp, Homo sapien
caaaggattctcgtgatactcaaataaattatg

SEQ ID NO: 37845 - DNA, 33 bp, Homo sapien
ctgaggcacttacagacggtagatcatttcctt

SEQ ID NO: 37846 - DNA, 33 bp, Homo sapien
ctgaggcacttacagatggtagatcatttcctt

SEQ ID NO: 37847 - DNA, 33 bp, Homo sapien
gctgctgagtcaagacagtataaggcagcatta

SEQ ID NO: 37848 - DNA, 33 bp, Homo sapien
gctgctgagtcaagaccgtataaggcagcatta

SEQ ID NO: 37849 - DNA, 33 bp, Homo sapien
tatgtaagttccttcaagttcagaatctgttag

SEQ ID NO: 37850 - DNA, 33 bp, Homo sapien
tatgtaagttccttcaggttcagaatctgttag

SEQ ID NO: 37851 - DNA, 33 bp, Homo sapien
agacaaacaggttgaaatgataaagaaaactac

SEQ ID NO: 37852 - DNA, 33 bp, Homo sapien
agacaaacaggttgaagtgataaagaaaactac

SEQ ID NO: 37853 - DNA, 33 bp, Homo sapien
ggaattgagactgataaatctataaacccactt

SEQ ID NO: 37854 - DNA, 33 bp, Homo sapien
ggaattgagactgatagatctataaacccactt

SEQ ID NO: 37855 - DNA, 33 bp, Homo sapien
taataggcctatagtaaaaagtatcaagaagga

SEQ ID NO: 37856 - DNA, 33 bp, Homo sapien
taataggcctatagtagaaagtatcaagaagga

SEQ ID NO: 37857 - DNA, 33 bp, Homo sapien
tctatccatgagactacgtaggtgtgttactgt

SEQ ID NO: 37858 - DNA, 33 bp, Homo sapien
tctatccatgagactatgtaggtgtgttactgt

SEQ ID NO: 37859 - DNA, 33 bp, Homo sapien
gggactacataaacatgaaatcacataacattt

SEQ ID NO: 37860 - DNA, 33 bp, Homo sapien
gggactacataaacattaaatcacataacattt

SEQ ID NO: 37861 - DNA, 33 bp, Homo sapien
cctagctagctatggacgatctatttattttaa

SEQ ID NO: 37862 - DNA, 33 bp, Homo sapien
cctagctagctatggatgatctatttattttaa

SEQ ID NO: 37863 - DNA, 33 bp, Homo sapien
acattttaaaaaaatcaaagtgtctctatattc

SEQ ID NO: 37864 - DNA, 33 bp, Homo sapien
acattttaaaaaaatctaagtgtctctatattc

SEQ ID NO: 37865 - DNA, 33 bp, Homo sapien
ataatgtagtagaaaaatggaggcaatatggct

SEQ ID NO: 37866 - DNA, 33 bp, Homo sapien
ataatgtagtagaaaattggaggcaatatggct

SEQ ID NO: 37867 - DNA, 33 bp, Homo sapien
tgctgcttgtaaaacacatggcagagcagcaga

SEQ ID NO: 37868 - DNA, 33 bp, Homo sapien
tgctgcttgtaaaacatatggcagagcagcaga

SEQ ID NO: 37869 - DNA, 33 bp, Homo sapien
gagagttaaagagaaaaaaaactgtgcccacat

SEQ ID NO: 37870 - DNA, 33 bp, Homo sapien
gagagttaaagagaaagaaaactgtgcccacat

SEQ ID NO: 37871 - DNA, 33 bp, Homo sapien
tccccattgcaaagcacgaagcatggaaatcac

SEQ ID NO: 37872 - DNA, 33 bp, Homo sapien
tccccattgcaaagcatgaagcatggaaatcac

SEQ ID NO: 37873 - DNA, 33 bp, Homo sapien
gtattgttgatccattgaatgaagagataaaat

SEQ ID NO: 37874 - DNA, 33 bp, Homo sapien
gtattgttgatccatttaatgaagagataaaat

SEQ ID NO: 37875 - DNA, 33 bp, Homo sapien
taatctgagaccaataagataaaattagtcttt

SEQ ID NO: 37876 - DNA, 33 bp, Homo sapien
taatctgagaccaatatgataaaattagtcttt

SEQ ID NO: 37877 - DNA, 33 bp, Homo sapien
gcaaaagtctgcatgaaccattttaaggactcc

SEQ ID NO: 37878 - DNA, 33 bp, Homo sapien
gcaaaagtctgcatgagccattttaaggactcc

SEQ ID NO: 37879 - DNA, 33 bp, Homo sapien
gaaattcaaatgcagaataagaactttttaggc

SEQ ID NO: 37880 - DNA, 33 bp, Homo sapien
gaaattcaaatgcagagtaagaactttttaggc

SEQ ID NO: 37881 - DNA, 33 bp, Homo sapien
acttaaatatcctcaaaagctttacaatcaagt

SEQ ID NO: 37882 - DNA, 33 bp, Homo sapien
acttaaatatcctcaatagctttacaatcaagt

SEQ ID NO: 37883 - DNA, 33 bp, Homo sapien
tctcttcaggcatttccccttgtgttatgaaca

SEQ ID NO: 37884 - DNA, 33 bp, Homo sapien
tctcttcaggcatttctccttgtgttatgaaca

SEQ ID NO: 37885 - DNA, 33 bp, Homo sapien
taaaatatacgaacagccaatacacatatgaaa

SEQ ID NO: 37886 - DNA, 33 bp, Homo sapien
taaaatatacgaacaggcaatacacatatgaaa

SEQ ID NO: 37887 - DNA, 33 bp, Homo sapien
aaataaatagtgatgacggttgaacaacaattt

SEQ ID NO: 37888 - DNA, 33 bp, Homo sapien
aaataaatagtgatgatggttgaacaacaattt

SEQ ID NO: 37889 - DNA, 33 bp, Homo sapien
acttctgcatattttaacttctttcagtacttc

SEQ ID NO: 37890 - DNA, 33 bp, Homo sapien
acttctgcatattttatcttctttcagtacttc

SEQ ID NO: 37891 - DNA, 33 bp, Homo sapien
catttgaaatttgaaactgaccaagtcaccggc

SEQ ID NO: 37892 - DNA, 33 bp, Homo sapien
catttgaaatttgaaattgaccaagtcaccggc

SEQ ID NO: 37893 - DNA, 33 bp, Homo sapien
accagctacttggacacgttgggcagcctcagg

SEQ ID NO: 37894 - DNA, 33 bp, Homo sapien
accagctacttggacatgttgggcagcctcagg

SEQ ID NO: 37895 - DNA, 33 bp, Homo sapien
caattgtggccacttaccatttcagagggatag

SEQ ID NO: 37896 - DNA, 33 bp, Homo sapien
caattgtggccacttatcatttcagagggatag

SEQ ID NO: 37897 - DNA, 33 bp, Homo sapien
tactattttaaagcagcaactacaactgaaatg

SEQ ID NO: 37898 - DNA, 33 bp, Homo sapien
tactattttaaagcaggaactacaactgaaatg

SEQ ID NO: 37899 - DNA, 33 bp, Homo sapien
aatcaggccaagcataataatactaaaacttat

SEQ ID NO: 37900 - DNA, 33 bp, Homo sapien
aatcaggccaagcatagtaatactaaaacttat

SEQ ID NO: 37901 - DNA, 33 bp, Homo sapien
cagggaaattgaggtaaagaaggagtttaattc

SEQ ID NO: 37902 - DNA, 33 bp, Homo sapien
cagggaaattgaggtagagaaggagtttaattc

SEQ ID NO: 37903 - DNA, 33 bp, Homo sapien
gagactgtatttcaaaccatgaattgaacctgg

SEQ ID NO: 37904 - DNA, 33 bp, Homo sapien
gagactgtatttcaaagcatgaattgaacctgg

SEQ ID NO: 37905 - DNA, 33 bp, Homo sapien
ggtattcttttagcaacgtgatatgatttggct

SEQ ID NO: 37906 - DNA, 33 bp, Homo sapien
ggtattcttttagcaatgtgatatgatttggct

SEQ ID NO: 37907 - DNA, 33 bp, Homo sapien
agaatcagataaagtacatgagttgatacggtt

SEQ ID NO: 37908 - DNA, 33 bp, Homo sapien
agaatcagataaagtatatgagttgatacggtt

SEQ ID NO: 37909 - DNA, 33 bp, Homo sapien
atgaactaaattttggaatgacaaagacagaat

SEQ ID NO: 37910 - DNA, 33 bp, Homo sapien
atgaactaaattttggcatgacaaagacagaat

SEQ ID NO: 37911 - DNA, 33 bp, Homo sapien
agtgtaaaataggtaaatagccaccaggttaaa

SEQ ID NO: 37912 - DNA, 33 bp, Homo sapien
agtgtaaaataggtaactagccaccaggttaaa

SEQ ID NO: 37913 - DNA, 33 bp, Homo sapien
atcgcatctttaagtacggtggtcattcaaaac

SEQ ID NO: 37914 - DNA, 33 bp, Homo sapien
atcgcatctttaagtatggtggtcattcaaaac

SEQ ID NO: 37915 - DNA, 33 bp, Homo sapien
acacaaaaagtgagtaaggcttatatagtccta

SEQ ID NO: 37916 - DNA, 33 bp, Homo sapien
acacaaaaagtgagtagggcttatatagtccta

SEQ ID NO: 37917 - DNA, 33 bp, Homo sapien
attatatggatagatacggatttaagtaatgga

SEQ ID NO: 37918 - DNA, 33 bp, Homo sapien
attatatggatagatatggatttaagtaatgga

SEQ ID NO: 37919 - DNA, 33 bp, Homo sapien
attatgtgtgtcatagacgtatttcattgaatg

SEQ ID NO: 37920 - DNA, 33 bp, Homo sapien
attatgtgtgtcataggcgtatttcattgaatg

SEQ ID NO: 37921 - DNA, 33 bp, Homo sapien
caagaaaactggaatcagaggctatactgctaa

SEQ ID NO: 37922 - DNA, 33 bp, Homo sapien
caagaaaactggaatcggaggctatactgctaa

SEQ ID NO: 37923 - DNA, 33 bp, Homo sapien
ccaacttttccagcacaatttgttaaagagact

SEQ ID NO: 37924 - DNA, 33 bp, Homo sapien
ccaacttttccagcacgatttgttaaagagact

SEQ ID NO: 37925 - DNA, 33 bp, Homo sapien
atataagtaactctcgaaactcaataacatgaa

SEQ ID NO: 37926 - DNA, 33 bp, Homo sapien
atataagtaactctcggaactcaataacatgaa

SEQ ID NO: 37927 - DNA, 33 bp, Homo sapien
tttcttcagtgttaaaagttttaatagcaagcc

SEQ ID NO: 37928 - DNA, 33 bp, Homo sapien
tttcttcagtgttaaacgttttaatagcaagcc

SEQ ID NO: 37929 - DNA, 33 bp, Homo sapien
gagccagaatgcttcactgaaacacaagtctaa

SEQ ID NO: 37930 - DNA, 33 bp, Homo sapien
gagccagaatgcttcattgaaacacaagtctaa

SEQ ID NO: 37931 - DNA, 33 bp, Homo sapien
attctgagaaactgcaaatacaagagtggctct

SEQ ID NO: 37932 - DNA, 33 bp, Homo sapien
attctgagaaactgcagatacaagagtggctct

SEQ ID NO: 37933 - DNA, 33 bp, Homo sapien
tgtgtttgtgcatatccgaaccatacaaaacaa

SEQ ID NO: 37934 - DNA, 33 bp, Homo sapien
tgtgtttgtgcatatctgaaccatacaaaacaa

SEQ ID NO: 37935 - DNA, 33 bp, Homo sapien
gaatagaaattagaagaagtaggagttatgagt

SEQ ID NO: 37936 - DNA, 33 bp, Homo sapien
gaatagaaattagaagtagtaggagttatgagt

SEQ ID NO: 37937 - DNA, 33 bp, Homo sapien
tttctatattcattcaagtcacctactatgtgt

SEQ ID NO: 37938 - DNA, 33 bp, Homo sapien
tttctatattcattcatgtcacctactatgtgt

SEQ ID NO: 37939 - DNA, 33 bp, Homo sapien
ggcattgaaaataccgaaaaacattggagaaca

SEQ ID NO: 37940 - DNA, 33 bp, Homo sapien
ggcattgaaaataccgcaaaacattggagaaca

SEQ ID NO: 37941 - DNA, 33 bp, Homo sapien
caagagttactccttacgtcttccgtttctcgg

SEQ ID NO: 37942 - DNA, 33 bp, Homo sapien
caagagttactccttatgtcttccgtttctcgg

SEQ ID NO: 37943 - DNA, 33 bp, Homo sapien
tccagtcatgaatgaaaagtgaaaaaaatcctt

SEQ ID NO: 37944 - DNA, 33 bp, Homo sapien
tccagtcatgaatgaagagtgaaaaaaatcctt

SEQ ID NO: 37945 - DNA, 33 bp, Homo sapien
tttggtgtcctatcaaaaaagttattgctaagc

SEQ ID NO: 37946 - DNA, 33 bp, Homo sapien
tttggtgtcctatcaagaaagttattgctaagc

SEQ ID NO: 37947 - DNA, 33 bp, Homo sapien
cccataggatgtacacaaccagaataatcccta

SEQ ID NO: 37948 - DNA, 33 bp, Homo sapien
cccataggatgtacaccaccagaataatcccta

SEQ ID NO: 37949 - DNA, 33 bp, Homo sapien
aatgttgataacatggaaggctatatgtgtgtg

SEQ ID NO: 37950 - DNA, 33 bp, Homo sapien
aatgttgataacatgggaggctatatgtgtgtg

SEQ ID NO: 37951 - DNA, 33 bp, Homo sapien
ataaaagagacatttaagtttcacccagttgtt

SEQ ID NO: 37952 - DNA, 33 bp, Homo sapien
ataaaagagacatttacgtttcacccagttgtt

SEQ ID NO: 37953 - DNA, 33 bp, Homo sapien
cttgccagaaaatccacagtggactttacattt

SEQ ID NO: 37954 - DNA, 33 bp, Homo sapien
cttgccagaaaatccatagtggactttacattt

SEQ ID NO: 37955 - DNA, 33 bp, Homo sapien
gtgtcttccccattaacacattgactatgtttg

SEQ ID NO: 37956 - DNA, 33 bp, Homo sapien
gtgtcttccccattaagacattgactatgtttg

SEQ ID NO: 37957 - DNA, 33 bp, Homo sapien
catgtgcccagcataacagtacatacaggaaat

SEQ ID NO: 37958 - DNA, 33 bp, Homo sapien
catgtgcccagcataatagtacatacaggaaat

SEQ ID NO: 37959 - DNA, 33 bp, Homo sapien
aagagtgataagatacaaagttagataaagaca

SEQ ID NO: 37960 - DNA, 33 bp, Homo sapien
aagagtgataagatacgaagttagataaagaca

SEQ ID NO: 37961 - DNA, 33 bp, Homo sapien
cttcataaatatttcaacttttcctcactccct

SEQ ID NO: 37962 - DNA, 33 bp, Homo sapien
cttcataaatatttcaccttttcctcactccct

SEQ ID NO: 37963 - DNA, 33 bp, Homo sapien
ataccataaaagaaaacatttataagctggact

SEQ ID NO: 37964 - DNA, 33 bp, Homo sapien
ataccataaaagaaaagatttataagctggact

SEQ ID NO: 37965 - DNA, 33 bp, Homo sapien
atgatattataatgacagatacatgttgttaac

SEQ ID NO: 37966 - DNA, 33 bp, Homo sapien
atgatattataatgacggatacatgttgttaac

SEQ ID NO: 37967 - DNA, 33 bp, Homo sapien
actgtatttctatagcaaaggtcaagacccttt

SEQ ID NO: 37968 - DNA, 33 bp, Homo sapien
actgtatttctatagcgaaggtcaagacccttt

SEQ ID NO: 37969 - DNA, 33 bp, Homo sapien
agagaagagctagaaacggatacaatccaaaca

SEQ ID NO: 37970 - DNA, 33 bp, Homo sapien
agagaagagctagaaatggatacaatccaaaca

SEQ ID NO: 37971 - DNA, 33 bp, Homo sapien
gaaagggaaaaaaataagtgaatagaggagcaa

SEQ ID NO: 37972 - DNA, 33 bp, Homo sapien
gaaagggaaaaaaatacgtgaatagaggagcaa

SEQ ID NO: 37973 - DNA, 33 bp, Homo sapien
gatcaaaagactcatgacaacatttcaccagtt

SEQ ID NO: 37974 - DNA, 33 bp, Homo sapien
gatcaaaagactcatggcaacatttcaccagtt

SEQ ID NO: 37975 - DNA, 33 bp, Homo sapien
tgcaaggatttgaaaccagaatgcatgattgtc

SEQ ID NO: 37976 - DNA, 33 bp, Homo sapien
tgcaaggatttgaaactagaatgcatgattgtc

SEQ ID NO: 37977 - DNA, 33 bp, Homo sapien
aaactgtcaaaccataccatcaaacatacttct

SEQ ID NO: 37978 - DNA, 33 bp, Homo sapien
aaactgtcaaaccatagcatcaaacatacttct

SEQ ID NO: 37979 - DNA, 33 bp, Homo sapien
agtgggtattgaagatcaccagactctatgaca

SEQ ID NO: 37980 - DNA, 33 bp, Homo sapien
agtgggtattgaagatgaccagactctatgaca

SEQ ID NO: 37981 - DNA, 33 bp, Homo sapien
gtattccagggtagaagtgttttttcttcagta

SEQ ID NO: 37982 - DNA, 33 bp, Homo sapien
gtattccagggtagaattgttttttcttcagta

SEQ ID NO: 37983 - DNA, 33 bp, Homo sapien
aactcttcatgataacaatacatgtgctgagta

SEQ ID NO: 37984 - DNA, 33 bp, Homo sapien
aactcttcatgataacgatacatgtgctgagta

SEQ ID NO: 37985 - DNA, 33 bp, Homo sapien
actgattactaggaacaacctttagcaaaaatt

SEQ ID NO: 37986 - DNA, 33 bp, Homo sapien
actgattactaggaactacctttagcaaaaatt

SEQ ID NO: 37987 - DNA, 33 bp, Homo sapien
aacaattaggggctgcaaaaattaaatgcatat

SEQ ID NO: 37988 - DNA, 33 bp, Homo sapien
aacaattaggggctgcgaaaattaaatgcatat

SEQ ID NO: 37989 - DNA, 33 bp, Homo sapien
gtaaatatcttgaaagaagtcatactgcccaaa

SEQ ID NO: 37990 - DNA, 33 bp, Homo sapien
gtaaatatcttgaaagtagtcatactgcccaaa

SEQ ID NO: 37991 - DNA, 33 bp, Homo sapien
actcaatgccagcccacgaacacagctaggata

SEQ ID NO: 37992 - DNA, 33 bp, Homo sapien
actcaatgccagcccaggaacacagctaggata

SEQ ID NO: 37993 - DNA, 33 bp, Homo sapien
ggttttacctccaagaccctgaccaaattctta

SEQ ID NO: 37994 - DNA, 33 bp, Homo sapien
ggttttacctccaagatcctgaccaaattctta

SEQ ID NO: 37995 - DNA, 33 bp, Homo sapien
gacagctgtagtaaaacctcagttcttatcttc

SEQ ID NO: 37996 - DNA, 33 bp, Homo sapien
gacagctgtagtaaaatctcagttcttatcttc

SEQ ID NO: 37997 - DNA, 33 bp, Homo sapien
tacatttatatattgacgatgtctttctaaaag

SEQ ID NO: 37998 - DNA, 33 bp, Homo sapien
tacatttatatattgatgatgtctttctaaaag

SEQ ID NO: 37999 - DNA, 33 bp, Homo sapien
attcatatattatcacccaaagtacatagttta

SEQ ID NO: 38000 - DNA, 33 bp, Homo sapien
attcatatattatcactcaaagtacatagttta

SEQ ID NO: 38001 - DNA, 33 bp, Homo sapien
tatacaagcttcttcacagctgtagagacttca

SEQ ID NO: 38002 - DNA, 33 bp, Homo sapien
tatacaagcttcttcatagctgtagagacttca

SEQ ID NO: 38003 - DNA, 33 bp, Homo sapien
ttatccttggaaatcactatttttcctgcattc

SEQ ID NO: 38004 - DNA, 33 bp, Homo sapien
ttatccttggaaatcattatttttcctgcattc

SEQ ID NO: 38005 - DNA, 33 bp, Homo sapien
ttgtattctttcaaccaaagataatatacaaac

SEQ ID NO: 38006 - DNA, 33 bp, Homo sapien
ttgtattctttcaaccgaagataatatacaaac

SEQ ID NO: 38007 - DNA, 33 bp, Homo sapien
ataactaacagttttcaccttctctaatttcat

SEQ ID NO: 38008 - DNA, 33 bp, Homo sapien
ataactaacagttttcgccttctctaatttcat

SEQ ID NO: 38009 - DNA, 33 bp, Homo sapien
aagaaggtgggaaggacagttttacattatgtg

SEQ ID NO: 38010 - DNA, 33 bp, Homo sapien
aagaaggtgggaaggatagttttacattatgtg

SEQ ID NO: 38011 - DNA, 33 bp, Homo sapien
aatatttctttcagcaccttgcaactcagtcct

SEQ ID NO: 38012 - DNA, 33 bp, Homo sapien
aatatttctttcagcatcttgcaactcagtcct

SEQ ID NO: 38013 - DNA, 33 bp, Homo sapien
ctggttctgactctaaatctctttactttctct

SEQ ID NO: 38014 - DNA, 33 bp, Homo sapien
ctggttctgactctaactctctttactttctct

SEQ ID NO: 38015 - DNA, 33 bp, Homo sapien
agaattaaatacatagaactgaaggaaccaatg

SEQ ID NO: 38016 - DNA, 33 bp, Homo sapien
agaattaaatacataggactgaaggaaccaatg

SEQ ID NO: 38017 - DNA, 33 bp, Homo sapien
cataatcattttccaacttaatgtgaccattct

SEQ ID NO: 38018 - DNA, 33 bp, Homo sapien
cataatcattttccaatttaatgtgaccattct

SEQ ID NO: 38019 - DNA, 33 bp, Homo sapien
tatgctgtttccttcacccaagcaaagataagc

SEQ ID NO: 38020 - DNA, 33 bp, Homo sapien
tatgctgtttccttcatccaagcaaagataagc

SEQ ID NO: 38021 - DNA, 33 bp, Homo sapien
taatcagtcaactctagatttaatcagtctgga

SEQ ID NO: 38022 - DNA, 33 bp, Homo sapien
taatcagtcaactctatatttaatcagtctgga

SEQ ID NO: 38023 - DNA, 33 bp, Homo sapien
tagtcttagcaccaacactttctaataaatgtg

SEQ ID NO: 38024 - DNA, 33 bp, Homo sapien
tagtcttagcaccaacgctttctaataaatgtg

SEQ ID NO: 38025 - DNA, 33 bp, Homo sapien
atgtctgctgtattcacccggtcatgctaaaaa

SEQ ID NO: 38026 - DNA, 33 bp, Homo sapien
atgtctgctgtattcatccggtcatgctaaaaa

SEQ ID NO: 38027 - DNA, 33 bp, Homo sapien
tgaagaggagaacagagaattggaattatacag

SEQ ID NO: 38028 - DNA, 33 bp, Homo sapien
tgaagaggagaacagataattggaattatacag

SEQ ID NO: 38029 - DNA, 33 bp, Homo sapien
aaagctgtataaagcacattgatggggatataa

SEQ ID NO: 38030 - DNA, 33 bp, Homo sapien
aaagctgtataaagcagattgatggggatataa

SEQ ID NO: 38031 - DNA, 33 bp, Homo sapien
taatatcttccctatcaagtatcaaacatatca

SEQ ID NO: 38032 - DNA, 33 bp, Homo sapien
taatatcttccctatctagtatcaaacatatca

SEQ ID NO: 38033 - DNA, 33 bp, Homo sapien
attatgtgcaactaccacagtttatcactccct

SEQ ID NO: 38034 - DNA, 33 bp, Homo sapien
attatgtgcaactaccgcagtttatcactccct

SEQ ID NO: 38035 - DNA, 33 bp, Homo sapien
catagtgattgacaaaagagttgtacagacaat

SEQ ID NO: 38036 - DNA, 33 bp, Homo sapien
catagtgattgacaaatgagttgtacagacaat

SEQ ID NO: 38037 - DNA, 33 bp, Homo sapien
cagaaaaataagaggcaacaaatgaaatgagtt

SEQ ID NO: 38038 - DNA, 33 bp, Homo sapien
cagaaaaataagaggccacaaatgaaatgagtt

SEQ ID NO: 38039 - DNA, 33 bp, Homo sapien
atcaagtagcacctacaatgggatatacacccc

SEQ ID NO: 38040 - DNA, 33 bp, Homo sapien
atcaagtagcacctacgatgggatatacacccc

SEQ ID NO: 38041 - DNA, 33 bp, Homo sapien
ataaattacataagccactagcctaactatgaa

SEQ ID NO: 38042 - DNA, 33 bp, Homo sapien
ataaattacataagccgctagcctaactatgaa

SEQ ID NO: 38043 - DNA, 33 bp, Homo sapien
tcctcaatccctgataactattccttttcccat

SEQ ID NO: 38044 - DNA, 33 bp, Homo sapien
tcctcaatccctgatagctattccttttcccat

SEQ ID NO: 38045 - DNA, 33 bp, Homo sapien
cacctagaacttctgacccatttgatgaatgtg

SEQ ID NO: 38046 - DNA, 33 bp, Homo sapien
cacctagaacttctgatccatttgatgaatgtg

SEQ ID NO: 38047 - DNA, 33 bp, Homo sapien
aggtagaaagaatatcaattacagagccttgtg

SEQ ID NO: 38048 - DNA, 33 bp, Homo sapien
aggtagaaagaatatccattacagagccttgtg

SEQ ID NO: 38049 - DNA, 33 bp, Homo sapien
tccaactccaactacaagtcaccactttcttaa

SEQ ID NO: 38050 - DNA, 33 bp, Homo sapien
tccaactccaactacaggtcaccactttcttaa

SEQ ID NO: 38051 - DNA, 33 bp, Homo sapien
gggaaacacattaaaaaaaggcaagtaggagca

SEQ ID NO: 38052 - DNA, 33 bp, Homo sapien
gggaaacacattaaaacaaggcaagtaggagca

SEQ ID NO: 38053 - DNA, 33 bp, Homo sapien
tgtagttgggagctgaaaagtcctatgtattct

SEQ ID NO: 38054 - DNA, 33 bp, Homo sapien
tgtagttgggagctgagaagtcctatgtattct

SEQ ID NO: 38055 - DNA, 33 bp, Homo sapien
tatcagttgtggagaacattttgtgtatttttc

SEQ ID NO: 38056 - DNA, 33 bp, Homo sapien
tatcagttgtggagaagattttgtgtatttttc

SEQ ID NO: 38057 - DNA, 33 bp, Homo sapien
acatccatttaattcaccaaccttgccctgaaa

SEQ ID NO: 38058 - DNA, 33 bp, Homo sapien
acatccatttaattcatcaaccttgccctgaaa

SEQ ID NO: 38059 - DNA, 33 bp, Homo sapien
ccatctagtcatactacagaaccacatgctgtc

SEQ ID NO: 38060 - DNA, 33 bp, Homo sapien
ccatctagtcatactatagaaccacatgctgtc

SEQ ID NO: 38061 - DNA, 33 bp, Homo sapien
ttcctttcactttggaaaagatttcttgacatt

SEQ ID NO: 38062 - DNA, 33 bp, Homo sapien
ttcctttcactttggataagatttcttgacatt

SEQ ID NO: 38063 - DNA, 33 bp, Homo sapien
gtagaaaacagaacctaaagcaaaacttacatg

SEQ ID NO: 38064 - DNA, 33 bp, Homo sapien
gtagaaaacagaacctgaagcaaaacttacatg

SEQ ID NO: 38065 - DNA, 33 bp, Homo sapien
gaaaattggtattgcaatcttgaagagcaagag

SEQ ID NO: 38066 - DNA, 33 bp, Homo sapien
gaaaattggtattgcagtcttgaagagcaagag

SEQ ID NO: 38067 - DNA, 33 bp, Homo sapien
ggcaagtcagtagatacagcaaactttatttct

SEQ ID NO: 38068 - DNA, 33 bp, Homo sapien
ggcaagtcagtagatagagcaaactttatttct

SEQ ID NO: 38069 - DNA, 33 bp, Homo sapien
atttaaataatgtttccatcctttgcactattg

SEQ ID NO: 38070 - DNA, 33 bp, Homo sapien
atttaaataatgtttctatcctttgcactattg

SEQ ID NO: 38071 - DNA, 33 bp, Homo sapien
gaattcagagctcccaggtccgctccccatgga

SEQ ID NO: 38072 - DNA, 33 bp, Homo sapien
gaattcagagctcccatgtccgctccccatgga

SEQ ID NO: 38073 - DNA, 33 bp, Homo sapien
tcctttgctattaaaacctgtattgttgctata

SEQ ID NO: 38074 - DNA, 33 bp, Homo sapien
tcctttgctattaaaagctgtattgttgctata

SEQ ID NO: 38075 - DNA, 33 bp, Homo sapien
taacttttctgctttacaatcgtttctcacacc

SEQ ID NO: 38076 - DNA, 33 bp, Homo sapien
taacttttctgctttataatcgtttctcacacc

SEQ ID NO: 38077 - DNA, 33 bp, Homo sapien
ttccagtaccacatgaagtctaagtcctccatg

SEQ ID NO: 38078 - DNA, 33 bp, Homo sapien
ttccagtaccacatgatgtctaagtcctccatg

SEQ ID NO: 38079 - DNA, 33 bp, Homo sapien
aaggcttctgtacttaccccagcctccaatggc

SEQ ID NO: 38080 - DNA, 33 bp, Homo sapien
aaggcttctgtacttatcccagcctccaatggc

SEQ ID NO: 38081 - DNA, 33 bp, Homo sapien
aatgtgatttctgtcaactaacatcaaggatga

SEQ ID NO: 38082 - DNA, 33 bp, Homo sapien
aatgtgatttctgtcagctaacatcaaggatga

SEQ ID NO: 38083 - DNA, 33 bp, Homo sapien
cacaaggaaagacatacagagttgccccagcaa

SEQ ID NO: 38084 - DNA, 33 bp, Homo sapien
cacaaggaaagacatatagagttgccccagcaa

SEQ ID NO: 38085 - DNA, 33 bp, Homo sapien
taaaattaaaatgaaaagatgctaaccaacaac

SEQ ID NO: 38086 - DNA, 33 bp, Homo sapien
taaaattaaaatgaaaggatgctaaccaacaac

SEQ ID NO: 38087 - DNA, 33 bp, Homo sapien
aggcaggtatcgatggcattcgctttaccactt

SEQ ID NO: 38088 - DNA, 33 bp, Homo sapien
aggcaggtatcgatggtattcgctttaccactt

SEQ ID NO: 38089 - DNA, 33 bp, Homo sapien
cagtttcttcaaaggcaacaggaaggagaagtg

SEQ ID NO: 38090 - DNA, 33 bp, Homo sapien
cagtttcttcaaaggcgacaggaaggagaagtg

SEQ ID NO: 38091 - DNA, 33 bp, Homo sapien
agattatgctatccaactatttagagaagttga

SEQ ID NO: 38092 - DNA, 33 bp, Homo sapien
agattatgctatccaagtatttagagaagttga

SEQ ID NO: 38093 - DNA, 33 bp, Homo sapien
gaagtcgaagatcaacacaccagcagactcagt

SEQ ID NO: 38094 - DNA, 33 bp, Homo sapien
gaagtcgaagatcaacgcaccagcagactcagt

SEQ ID NO: 38095 - DNA, 33 bp, Homo sapien
tgcttcaaattgacacaaaatctaataattcag

SEQ ID NO: 38096 - DNA, 33 bp, Homo sapien
tgcttcaaattgacacgaaatctaataattcag

SEQ ID NO: 38097 - DNA, 33 bp, Homo sapien
attgagaataaactacccttaaggcttcagtag

SEQ ID NO: 38098 - DNA, 33 bp, Homo sapien
attgagaataaactactcttaaggcttcagtag

SEQ ID NO: 38099 - DNA, 33 bp, Homo sapien
gagacctcaagaacaaagctaactgtgaattta

SEQ ID NO: 38100 - DNA, 33 bp, Homo sapien
gagacctcaagaacaatgctaactgtgaattta

SEQ ID NO: 38101 - DNA, 33 bp, Homo sapien
gtttcataggaaagaaaagcaatgcattctgga

SEQ ID NO: 38102 - DNA, 33 bp, Homo sapien
gtttcataggaaagaagagcaatgcattctgga

SEQ ID NO: 38103 - DNA, 33 bp, Homo sapien
cagcaataaaattagcaaaaaagggctgagtag

SEQ ID NO: 38104 - DNA, 33 bp, Homo sapien
cagcaataaaattagccaaaaagggctgagtag

SEQ ID NO: 38105 - DNA, 33 bp, Homo sapien
tcctcttcactccactgagacgatcaccacgtc

SEQ ID NO: 38106 - DNA, 33 bp, Homo sapien
tcctcttcactccacttagacgatcaccacgtc

SEQ ID NO: 38107 - DNA, 33 bp, Homo sapien
aacatttaagatgtacaggcattacagttaagg

SEQ ID NO: 38108 - DNA, 33 bp, Homo sapien
aacatttaagatgtactggcattacagttaagg

SEQ ID NO: 38109 - DNA, 33 bp, Homo sapien
aacaaagtagagaaaaaacagaaaatcagaaag

SEQ ID NO: 38110 - DNA, 33 bp, Homo sapien
aacaaagtagagaaaagacagaaaatcagaaag

SEQ ID NO: 38111 - DNA, 33 bp, Homo sapien
aaatgaagaaagataacgtcaaaaaaatcgaga

SEQ ID NO: 38112 - DNA, 33 bp, Homo sapien
aaatgaagaaagataatgtcaaaaaaatcgaga

SEQ ID NO: 38113 - DNA, 33 bp, Homo sapien
tgtcaatgttcttctccatcccaaatactgccc

SEQ ID NO: 38114 - DNA, 33 bp, Homo sapien
tgtcaatgttcttctctatcccaaatactgccc

SEQ ID NO: 38115 - DNA, 33 bp, Homo sapien
tcttgcaattgaagaactaaatagcgtttctaa

SEQ ID NO: 38116 - DNA, 33 bp, Homo sapien
tcttgcaattgaagaagtaaatagcgtttctaa

SEQ ID NO: 38117 - DNA, 33 bp, Homo sapien
tcttgaagacagcataaaatcgaatctttcttt

SEQ ID NO: 38118 - DNA, 33 bp, Homo sapien
tcttgaagacagcatacaatcgaatctttcttt

SEQ ID NO: 38119 - DNA, 33 bp, Homo sapien
gtatgatatttgattaaagaaggcagagatgat

SEQ ID NO: 38120 - DNA, 33 bp, Homo sapien
gtatgatatttgattagagaaggcagagatgat

SEQ ID NO: 38121 - DNA, 33 bp, Homo sapien
tttaatgtttttgatcccatgcatgtcaatttc

SEQ ID NO: 38122 - DNA, 33 bp, Homo sapien
tttaatgtttttgatctcatgcatgtcaatttc

SEQ ID NO: 38123 - DNA, 33 bp, Homo sapien
tgggattttctcatagaagaacaaggtaattta

SEQ ID NO: 38124 - DNA, 33 bp, Homo sapien
tgggattttctcataggagaacaaggtaattta

SEQ ID NO: 38125 - DNA, 33 bp, Homo sapien
gtatttctgcccttcaaagatacaaattgaaaa

SEQ ID NO: 38126 - DNA, 33 bp, Homo sapien
gtatttctgcccttcagagatacaaattgaaaa

SEQ ID NO: 38127 - DNA, 33 bp, Homo sapien; identical to SEQ ID NO: 38125

SEQ ID NO: 38128 - DNA, 33 bp, Homo sapien; identical to SEQ ID NO: 38126

SEQ ID NO: 38129 - DNA, 33 bp, Homo sapien
ggaggttgggcctttgaaagatggttaggttgc

SEQ ID NO: 38130 - DNA, 33 bp, Homo sapien
ggaggttgggcctttggaagatggttaggttgc

SEQ ID NO: 38131 - DNA, 33 bp, Homo sapien
ggaccactcttgtgggaaatgtttctaatgaag

SEQ ID NO: 38132 - DNA, 33 bp, Homo sapien
ggaccactcttgtggggaatgtttctaatgaag

SEQ ID NO: 38133 - DNA, 33 bp, Homo sapien
ttattccagtttccaaagtcttgttcttcattt

SEQ ID NO: 38134 - DNA, 33 bp, Homo sapien
ttattccagtttccaatgtcttgttcttcattt

SEQ ID NO: 38135 - DNA, 33 bp, Homo sapien
ttcgttaataggaaagcagcaaccttgttaaac

SEQ ID NO: 38136 - DNA, 33 bp, Homo sapien
ttcgttaataggaaagtagcaaccttgttaaac

SEQ ID NO: 38137 - DNA, 33 bp, Homo sapien
atgtggaataattttcgcttggtgaagttgagt

SEQ ID NO: 38138 - DNA, 33 bp, Homo sapien
atgtggaataattttctcttggtgaagttgagt

SEQ ID NO: 38139 - DNA, 33 bp, Homo sapien
aggttgtgtttaaggacgtgaagaagattagaa

SEQ ID NO: 38140 - DNA, 33 bp, Homo sapien
aggttgtgtttaaggatgtgaagaagattagaa

SEQ ID NO: 38141 - DNA, 33 bp, Homo sapien
tataaaaaattatcccacctccatacatgttaa

SEQ ID NO: 38142 - DNA, 33 bp, Homo sapien
tataaaaaattatcccgcctccatacatgttaa

SEQ ID NO: 38143 - DNA, 33 bp, Homo sapien
tgattcaattatctgcaaccaggcccctcccat

SEQ ID NO: 38144 - DNA, 33 bp, Homo sapien
tgattcaattatctgcgaccaggcccctcccat

SEQ ID NO: 38145 - DNA, 33 bp, Homo sapien
atagataagtgcagtacagttgacactgcatac

SEQ ID NO: 38146 - DNA, 33 bp, Homo sapien
atagataagtgcagtagagttgacactgcatac

SEQ ID NO: 38147 - DNA, 33 bp, Homo sapien
taaagagttaaatgtaaaactcacaactatatg

SEQ ID NO: 38148 - DNA, 33 bp, Homo sapien
taaagagttaaatgtagaactcacaactatatg

SEQ ID NO: 38149 - DNA, 33 bp, Homo sapien
tcttattcaacaaagacgatttacttccataaa

SEQ ID NO: 38150 - DNA, 33 bp, Homo sapien
tcttattcaacaaagatgatttacttccataaa

SEQ ID NO: 38151 - DNA, 33 bp, Homo sapien
acttagcatcatgtaaatatagtcattaaaatg

SEQ ID NO: 38152 - DNA, 33 bp, Homo sapien
acttagcatcatgtaagtatagtcattaaaatg

SEQ ID NO: 38153 - DNA, 33 bp, Homo sapien
taatgtggaaaatttacagccttaggagtatgt

SEQ ID NO: 38154 - DNA, 33 bp, Homo sapien
taatgtggaaaatttatagccttaggagtatgt

SEQ ID NO: 38155 - DNA, 33 bp, Homo sapien
gctagaatgtaagatccatgggggtcgagaaat

SEQ ID NO: 38156 - DNA, 33 bp, Homo sapien
gctagaatgtaagatctatgggggtcgagaaat

SEQ ID NO: 38157 - DNA, 33 bp, Homo sapien
gggcgtatgtagcagacaaagagtgagatcttg

SEQ ID NO: 38158 - DNA, 33 bp, Homo sapien
gggcgtatgtagcagataaagagtgagatcttg

SEQ ID NO: 38159 - DNA, 33 bp, Homo sapien
gagatacacaggtgcactaagtatagatttgag

SEQ ID NO: 38160 - DNA, 33 bp, Homo sapien
gagatacacaggtgcagtaagtatagatttgag

SEQ ID NO: 38161 - DNA, 33 bp, Homo sapien
ttttgtgagtcttatcaacagaccagattctca

SEQ ID NO: 38162 - DNA, 33 bp, Homo sapien
ttttgtgagtcttatcgacagaccagattctca

SEQ ID NO: 38163 - DNA, 33 bp, Homo sapien
acctgagagattaaaaattcaaaggtgacccag

SEQ ID NO: 38164 - DNA, 33 bp, Homo sapien
acctgagagattaaaagttcaaaggtgacccag

SEQ ID NO: 38165 - DNA, 33 bp, Homo sapien
gatccttccttcacacggaaacatttcatccta

SEQ ID NO: 38166 - DNA, 33 bp, Homo sapien
gatccttccttcacactgaaacatttcatccta

SEQ ID NO: 38167 - DNA, 33 bp, Homo sapien
gttccaggcaaaatcaaacttacatcaattcat

SEQ ID NO: 38168 - DNA, 33 bp, Homo sapien
gttccaggcaaaatcatacttacatcaattcat

SEQ ID NO: 38169 - DNA, 33 bp, Homo sapien
ttacagtaaaatatataaccgcggtgccacaag

SEQ ID NO: 38170 - DNA, 33 bp, Homo sapien
ttacagtaaaatatatgaccgcggtgccacaag

SEQ ID NO: 38171 - DNA, 33 bp, Homo sapien
gaggcttctgaattacggagatccaaatagact

SEQ ID NO: 38172 - DNA, 33 bp, Homo sapien
gaggcttctgaattactgagatccaaatagact

SEQ ID NO: 38173 - DNA, 33 bp, Homo sapien
caagcattttacttctaacaatcgaggagcaag

SEQ ID NO: 38174 - DNA, 33 bp, Homo sapien
caagcattttacttctcacaatcgaggagcaag

SEQ ID NO: 38175 - DNA, 33 bp, Homo sapien
aggagctgaaaagttccattgcaaaatgtacga

SEQ ID NO: 38176 - DNA, 33 bp, Homo sapien
aggagctgaaaagttctattgcaaaatgtacga

SEQ ID NO: 38177 - DNA, 33 bp, Homo sapien
gttctggcctgaaccaaactagctgaccttggt

SEQ ID NO: 38178 - DNA, 33 bp, Homo sapien
gttctggcctgaaccagactagctgaccttggt

SEQ ID NO: 38179 - DNA, 33 bp, Homo sapien
gttgttaaactgtctcactaaagtaataattag

SEQ ID NO: 38180 - DNA, 33 bp, Homo sapien
gttgttaaactgtctctctaaagtaataattag

SEQ ID NO: 38181 - DNA, 33 bp, Homo sapien
gagctcaggaattgggaaagttggctcaagcat

SEQ ID NO: 38182 - DNA, 33 bp, Homo sapien
gagctcaggaattgggcaagttggctcaagcat

SEQ ID NO: 38183 - DNA, 33 bp, Homo sapien
gtcagtcaactcaatagcttatactgtgttatc

SEQ ID NO: 38184 - DNA, 33 bp, Homo sapien
gtcagtcaactcaatatcttatactgtgttatc

SEQ ID NO: 38185 - DNA, 33 bp, Homo sapien
tgtgaagaacagcaaaaggtatataagtcttca

SEQ ID NO: 38186 - DNA, 33 bp, Homo sapien
tgtgaagaacagcaaagggtatataagtcttca

SEQ ID NO: 38187 - DNA, 33 bp, Homo sapien
gaccctcatcttcacaaaaacttttaaaaatta

SEQ ID NO: 38188 - DNA, 33 bp, Homo sapien
gaccctcatcttcacagaaacttttaaaaatta

SEQ ID NO: 38189 - DNA, 33 bp, Homo sapien
tttgcacatatccaccaaaagactcaaggaata

SEQ ID NO: 38190 - DNA, 33 bp, Homo sapien
tttgcacatatccacccaaagactcaaggaata

SEQ ID NO: 38191 - DNA, 33 bp, Homo sapien
gagcttttcctaaatagcagttacagtgcaatt

SEQ ID NO: 38192 - DNA, 33 bp, Homo sapien
gagcttttcctaaatatcagttacagtgcaatt

SEQ ID NO: 38193 - DNA, 33 bp, Homo sapien
atctgtctatgtcttcaccgaaaaattatttta

SEQ ID NO: 38194 - DNA, 33 bp, Homo sapien
atctgtctatgtcttctccgaaaaattatttta

SEQ ID NO: 38195 - DNA, 33 bp, Homo sapien
gcttttggcaggatcccatttctcaaaatgctt

SEQ ID NO: 38196 - DNA, 33 bp, Homo sapien
gcttttggcaggatcctatttctcaaaatgctt

SEQ ID NO: 38197 - DNA, 33 bp, Homo sapien
ttataaataatggcctcacaatcatcatacttt

SEQ ID NO: 38198 - DNA, 33 bp, Homo sapien
ttataaataatggccttacaatcatcatacttt

SEQ ID NO: 38199 - DNA, 33 bp, Homo sapien
aattatagattttataagtcagtgtatttccgt

SEQ ID NO: 38200 - DNA, 33 bp, Homo sapien
aattatagattttatatgtcagtgtatttccgt

SEQ ID NO: 38201 - DNA, 33 bp, Homo sapien
tcttaatggagaattagaatgggtgtaagttct

SEQ ID NO: 38202 - DNA, 33 bp, Homo sapien
tcttaatggagaattataatgggtgtaagttct

SEQ ID NO: 38203 - DNA, 33 bp, Homo sapien
tatcacagaataatcaaagaaaatgcatagaca

SEQ ID NO: 38204 - DNA, 33 bp, Homo sapien
tatcacagaataatcagagaaaatgcatagaca

SEQ ID NO: 38205 - DNA, 33 bp, Homo sapien
ataagactcatagaaaatagctgcccttctcat

SEQ ID NO: 38206 - DNA, 33 bp, Homo sapien
ataagactcatagaaagtagctgcccttctcat

SEQ ID NO: 38207 - DNA, 33 bp, Homo sapien
aatttgtattacaagacgtgtaaaaagttcaca

SEQ ID NO: 38208 - DNA, 33 bp, Homo sapien
aatttgtattacaagaggtgtaaaaagttcaca

SEQ ID NO: 38209 - DNA, 33 bp, Homo sapien
atgctgttattacaaacatctaggctttgagag

SEQ ID NO: 38210 - DNA, 33 bp, Homo sapien
atgctgttattacaaatatctaggctttgagag

SEQ ID NO: 38211 - DNA, 33 bp, Homo sapien
cacataaagtgcttacaaaccagagctatacaa

SEQ ID NO: 38212 - DNA, 33 bp, Homo sapien
cacataaagtgcttacgaaccagagctatacaa

SEQ ID NO: 38213 - DNA, 33 bp, Homo sapien
attttctccattgtgaaccaggtagaccttagt

SEQ ID NO: 38214 - DNA, 33 bp, Homo sapien
attttctccattgtgacccaggtagaccttagt

SEQ ID NO: 38215 - DNA, 33 bp, Homo sapien
cttttacttattcttcaagcaagggaataacca

SEQ ID NO: 38216 - DNA, 33 bp, Homo sapien
cttttacttattcttccagcaagggaataacca

SEQ ID NO: 38217 - DNA, 33 bp, Homo sapien
agatagctggtacagaatatatgtccaatattt

SEQ ID NO: 38218 - DNA, 33 bp, Homo sapien
agatagctggtacagagtatatgtccaatattt

SEQ ID NO: 38219 - DNA, 33 bp, Homo sapien
catagaaaacatttacccagtttatattcatca

SEQ ID NO: 38220 - DNA, 33 bp, Homo sapien
catagaaaacatttactcagtttatattcatca

SEQ ID NO: 38221 - DNA, 33 bp, Homo sapien
ggaagaaatctcttgcgaaccatagctttaaaa

SEQ ID NO: 38222 - DNA, 33 bp, Homo sapien
ggaagaaatctcttgctaaccatagctttaaaa

SEQ ID NO: 38223 - DNA, 33 bp, Homo sapien
atccatttagtctgaaacataggtcgttattat

SEQ ID NO: 38224 - DNA, 33 bp, Homo sapien
atccatttagtctgaagcataggtcgttattat

SEQ ID NO: 38225 - DNA, 33 bp, Homo sapien
tatacttataaatgaacagatagaacacttgaa

SEQ ID NO: 38226 - DNA, 33 bp, Homo sapien
tatacttataaatgaatagatagaacacttgaa

SEQ ID NO: 38227 - DNA, 33 bp, Homo sapien
agaagagctgtaattcacaaccatgattgtctg

SEQ ID NO: 38228 - DNA, 33 bp, Homo sapien
agaagagctgtaattcgcaaccatgattgtctg

SEQ ID NO: 38229 - DNA, 33 bp, Homo sapien
tgaagtgctaaagaagcaatatttttcacaaaa

SEQ ID NO: 38230 - DNA, 33 bp, Homo sapien
tgaagtgctaaagaagtaatatttttcacaaaa

SEQ ID NO: 38231 - DNA, 33 bp, Homo sapien
aacctcagtattgtaccatttatgtttgtatgt

SEQ ID NO: 38232 - DNA, 33 bp, Homo sapien
aacctcagtattgtacgatttatgtttgtatgt

SEQ ID NO: 38233 - DNA, 33 bp, Homo sapien
ctgccaaatcactataacattgctcattaattt

SEQ ID NO: 38234 - DNA, 33 bp, Homo sapien
ctgccaaatcactataccattgctcattaattt

SEQ ID NO: 38235 - DNA, 33 bp, Homo sapien
gttgcaaagtatgaaaaccgataagaactgtca

SEQ ID NO: 38236 - DNA, 33 bp, Homo sapien
gttgcaaagtatgaaacccgataagaactgtca

SEQ ID NO: 38237 - DNA, 33 bp, Homo sapien
gccccgtgtctctcaaacaatgaatatgataat

SEQ ID NO: 38238 - DNA, 33 bp, Homo sapien
gccccgtgtctctcaaccaatgaatatgataat

SEQ ID NO: 38239 - DNA, 33 bp, Homo sapien
atttatgtgctgataacgagggaaaattatttt

SEQ ID NO: 38240 - DNA, 33 bp, Homo sapien
atttatgtgctgataatgagggaaaattatttt

SEQ ID NO: 38241 - DNA, 33 bp, Homo sapien
agctcacctacttaacagtaatctcagttcatc

SEQ ID NO: 38242 - DNA, 33 bp, Homo sapien
agctcacctacttaacggtaatctcagttcatc

SEQ ID NO: 38243 - DNA, 33 bp, Homo sapien
atttcaggaacataacagtatgagtgaatattt

SEQ ID NO: 38244 - DNA, 33 bp, Homo sapien
atttcaggaacataacggtatgagtgaatattt

SEQ ID NO: 38245 - DNA, 33 bp, Homo sapien
taagaggactaataaaatgaggaattcaatgac

SEQ ID NO: 38246 - DNA, 33 bp, Homo sapien
taagaggactaataaagtgaggaattcaatgac

SEQ ID NO: 38247 - DNA, 33 bp, Homo sapien
cataaatgtctccaagaaactggacatatcaaa

SEQ ID NO: 38248 - DNA, 33 bp, Homo sapien
cataaatgtctccaaggaactggacatatcaaa

SEQ ID NO: 38249 - DNA, 33 bp, Homo sapien
tataaacgaactcttcaataggactagagtgaa

SEQ ID NO: 38250 - DNA, 33 bp, Homo sapien
tataaacgaactcttcgataggactagagtgaa

SEQ ID NO: 38251 - DNA, 33 bp, Homo sapien
tagctagcaacatttaagacaatgaaatataaa

SEQ ID NO: 38252 - DNA, 33 bp, Homo sapien
tagctagcaacatttaggacaatgaaatataaa

SEQ ID NO: 38253 - DNA, 33 bp, Homo sapien
tcctcagagacatagacaaaaactgataccttt

SEQ ID NO: 38254 - DNA, 33 bp, Homo sapien
tcctcagagacatagataaaaactgataccttt

SEQ ID NO: 38255 - DNA, 33 bp, Homo sapien
cacatggtacaacgtgcatcaatcttgaagaca

SEQ ID NO: 38256 - DNA, 33 bp, Homo sapien
cacatggtacaacgtggatcaatcttgaagaca

SEQ ID NO: 38257 - DNA, 33 bp, Homo sapien
tagagctacataagataacatttttgtgtagga

SEQ ID NO: 38258 - DNA, 33 bp, Homo sapien
tagagctacataagatcacatttttgtgtagga

SEQ ID NO: 38259 - DNA, 33 bp, Homo sapien
ccctttgaattaataactgctagaaaatatatt

SEQ ID NO: 38260 - DNA, 33 bp, Homo sapien
ccctttgaattaataagtgctagaaaatatatt

SEQ ID NO: 38261 - DNA, 33 bp, Homo sapien
gtgtggtatcccctgaaattttcacactaatgt

SEQ ID NO: 38262 - DNA, 33 bp, Homo sapien
gtgtggtatcccctgagattttcacactaatgt

SEQ ID NO: 38263 - DNA, 33 bp, Homo sapien
tccaccagcaaaaatactacagtttgctgaagg

SEQ ID NO: 38264 - DNA, 33 bp, Homo sapien
tccaccagcaaaaatattacagtttgctgaagg

SEQ ID NO: 38265 - DNA, 33 bp, Homo sapien
catgtgaactttagaacgataagtaatctgctg

SEQ ID NO: 38266 - DNA, 33 bp, Homo sapien
catgtgaactttagaatgataagtaatctgctg

SEQ ID NO: 38267 - DNA, 33 bp, Homo sapien
taaaaactgggacatgacaagcctataaacaac

SEQ ID NO: 38268 - DNA, 33 bp, Homo sapien
taaaaactgggacatgccaagcctataaacaac

SEQ ID NO: 38269 - DNA, 33 bp, Homo sapien
gaatggagtaattcaacgtaaaaacttagatat

SEQ ID NO: 38270 - DNA, 33 bp, Homo sapien
gaatggagtaattcaaggtaaaaacttagatat

SEQ ID NO: 38271 - DNA, 33 bp, Homo sapien
atgttttcctagaaaaatttgagccatttttac

SEQ ID NO: 38272 - DNA, 33 bp, Homo sapien
atgttttcctagaaaattttgagccatttttac

SEQ ID NO: 38273 - DNA, 33 bp, Homo sapien
ggcatgaaacaggcaaatagacccataaaatct

SEQ ID NO: 38274 - DNA, 33 bp, Homo sapien
ggcatgaaacaggcaactagacccataaaatct

SEQ ID NO: 38275 - DNA, 33 bp, Homo sapien
tactgctttggtaaacggaatgtcccttgtgtc

SEQ ID NO: 38276 - DNA, 33 bp, Homo sapien
tactgctttggtaaactgaatgtcccttgtgtc

SEQ ID NO: 38277 - DNA, 33 bp, Homo sapien
tatcctcttaattacaactgagaaatcaaacac

SEQ ID NO: 38278 - DNA, 33 bp, Homo sapien
tatcctcttaattacagctgagaaatcaaacac

SEQ ID NO: 38279 - DNA, 33 bp, Homo sapien
atttagaaacttgtaacatttctcagttttaaa

SEQ ID NO: 38280 - DNA, 33 bp, Homo sapien
atttagaaacttgtaatatttctcagttttaaa

SEQ ID NO: 38281 - DNA, 33 bp, Homo sapien
ctaattccagcacttacgacttttattcctaat

SEQ ID NO: 38282 - DNA, 33 bp, Homo sapien
ctaattccagcacttatgacttttattcctaat

SEQ ID NO: 38283 - DNA, 33 bp, Homo sapien
gatcttggagtgaaaaaattgaaagatactgat

SEQ ID NO: 38284 - DNA, 33 bp, Homo sapien
gatcttggagtgaaaagattgaaagatactgat

SEQ ID NO: 38285 - DNA, 33 bp, Homo sapien
gttagataccaaactgcaggttgagaatgctca

SEQ ID NO: 38286 - DNA, 33 bp, Homo sapien
gttagataccaaactgtaggttgagaatgctca

SEQ ID NO: 38287 - DNA, 33 bp, Homo sapien
gagtctgaatcatcaacgcaaaaagaacaagga

SEQ ID NO: 38288 - DNA, 33 bp, Homo sapien
gagtctgaatcatcaatgcaaaaagaacaagga

SEQ ID NO: 38289 - DNA, 33 bp, Homo sapien
aaatagaaatggtgctaacatagaagagaccac

SEQ ID NO: 38290 - DNA, 33 bp, Homo sapien
aaatagaaatggtgcttacatagaagagaccac

SEQ ID NO: 38291 - DNA, 33 bp, Homo sapien
tattttttgcaatagacctgaggttgtctcagt

SEQ ID NO: 38292 - DNA, 33 bp, Homo sapien
tattttttgcaatagatctgaggttgtctcagt

SEQ ID NO: 38293 - DNA, 33 bp, Homo sapien
aaataactgttcaaaacgtgaatttctaaggct

SEQ ID NO: 38294 - DNA, 33 bp, Homo sapien
aaataactgttcaaaatgtgaatttctaaggct

SEQ ID NO: 38295 - DNA, 33 bp, Homo sapien
tctaaatgatgcttctcaaatctaatttatgta

SEQ ID NO: 38296 - DNA, 33 bp, Homo sapien
tctaaatgatgcttctgaaatctaatttatgta

SEQ ID NO: 38297 - DNA, 33 bp, Homo sapien
aactttcataagccaacatgagataactcaacc

SEQ ID NO: 38298 - DNA, 33 bp, Homo sapien
aactttcataagccaagatgagataactcaacc

SEQ ID NO: 38299 - DNA, 33 bp, Homo sapien
aaaatctgcagtttccagaaaagataacaacaa

SEQ ID NO: 38300 - DNA, 33 bp, Homo sapien
aaaatctgcagtttccggaaaagataacaacaa

SEQ ID NO: 38301 - DNA, 33 bp, Homo sapien
cttatattaaagattacgcatgattttaaataa

SEQ ID NO: 38302 - DNA, 33 bp, Homo sapien
cttatattaaagattatgcatgattttaaataa

SEQ ID NO: 38303 - DNA, 33 bp, Homo sapien
gtagaggtaatggatacgtcaattaacttgatt

SEQ ID NO: 38304 - DNA, 33 bp, Homo sapien
gtagaggtaatggatatgtcaattaacttgatt

SEQ ID NO: 38305 - DNA, 33 bp, Homo sapien
tatgggaaagtccaaactaaatctctatttcgg

SEQ ID NO: 38306 - DNA, 33 bp, Homo sapien
tatgggaaagtccaaattaaatctctatttcgg

SEQ ID NO: 38307 - DNA, 33 bp, Homo sapien
tttcactctgaaaccaaatgaccaaatcattca

SEQ ID NO: 38308 - DNA, 33 bp, Homo sapien
tttcactctgaaaccagatgaccaaatcattca

SEQ ID NO: 38309 - DNA, 33 bp, Homo sapien
ttatggttaagtctctcacacttattagcactt

SEQ ID NO: 38310 - DNA, 33 bp, Homo sapien
ttatggttaagtctcttacacttattagcactt

SEQ ID NO: 38311 - DNA, 33 bp, Homo sapien
ttagagagctttcttcacttcgtcatgatggtt

SEQ ID NO: 38312 - DNA, 33 bp, Homo sapien
ttagagagctttcttcgcttcgtcatgatggtt

SEQ ID NO: 38313 - DNA, 33 bp, Homo sapien
gctcctggtagccttacaaatgaagtccaaacc

SEQ ID NO: 38314 - DNA, 33 bp, Homo sapien
gctcctggtagccttagaaatgaagtccaaacc

SEQ ID NO: 38315 - DNA, 33 bp, Homo sapien
tgactggagtcagataaggagaaagatggggtg

SEQ ID NO: 38316 - DNA, 33 bp, Homo sapien
tgactggagtcagatagggagaaagatggggtg

SEQ ID NO: 38317 - DNA, 33 bp, Homo sapien
gcttctttgttgagaacgatttccagattccca

SEQ ID NO: 38318 - DNA, 33 bp, Homo sapien
gcttctttgttgagaatgatttccagattccca

SEQ ID NO: 38319 - DNA, 33 bp, Homo sapien
tcccacacacttgaatcatgtaccctgtctctg

SEQ ID NO: 38320 - DNA, 33 bp, Homo sapien
tcccacacacttgaattatgtaccctgtctctg

SEQ ID NO: 38321 - DNA, 33 bp, Homo sapien
aaaagcagtcgtaaaactttctaggactgagtc

SEQ ID NO: 38322 - DNA, 33 bp, Homo sapien
aaaagcagtcgtaaaagtttctaggactgagtc

SEQ ID NO: 38323 - DNA, 33 bp, Homo sapien
attggtgatcagaatgaaaaatggtaaaaccta

SEQ ID NO: 38324 - DNA, 33 bp, Homo sapien
attggtgatcagaatgcaaaatggtaaaaccta

SEQ ID NO: 38325 - DNA, 33 bp, Homo sapien
caatcagcaaggacaacaacatttcattctctt

SEQ ID NO: 38326 - DNA, 33 bp, Homo sapien
caatcagcaaggacaagaacatttcattctctt

SEQ ID NO: 38327 - DNA, 33 bp, Homo sapien
tttatttggctattttaaaaaatgctgtggttt

SEQ ID NO: 38328 - DNA, 33 bp, Homo sapien
tttatttggctatttttaaaaatgctgtggttt

SEQ ID NO: 38329 - DNA, 33 bp, Homo sapien
aactggaattgagatacgttttagaagtagttg

SEQ ID NO: 38330 - DNA, 33 bp, Homo sapien
aactggaattgagatatgttttagaagtagttg

SEQ ID NO: 38331 - DNA, 33 bp, Homo sapien
cttcccagtgtaaatcaaagtaatcatgaatgc

SEQ ID NO: 38332 - DNA, 33 bp, Homo sapien
cttcccagtgtaaatctaagtaatcatgaatgc

SEQ ID NO: 38333 - DNA, 33 bp, Homo sapien
taaaggtaaagctagaaccaaataaatgatgta

SEQ ID NO: 38334 - DNA, 33 bp, Homo sapien
taaaggtaaagctagagccaaataaatgatgta

SEQ ID NO: 38335 - DNA, 33 bp, Homo sapien
gaagaatatctgaggacggtcattgatgttttt

SEQ ID NO: 38336 - DNA, 33 bp, Homo sapien
gaagaatatctgaggatggtcattgatgttttt

SEQ ID NO: 38337 - DNA, 33 bp, Homo sapien
gaataaatgagatgaacggcagaaaatagatca

SEQ ID NO: 38338 - DNA, 33 bp, Homo sapien
gaataaatgagatgaatggcagaaaatagatca

SEQ ID NO: 38339 - DNA, 33 bp, Homo sapien
agagactgaggtagaacgtgagaagctctgtat

SEQ ID NO: 38340 - DNA, 33 bp, Homo sapien
agagactgaggtagaatgtgagaagctctgtat

SEQ ID NO: 38341 - DNA, 33 bp, Homo sapien
gtgatgatttgtttaactacagtgattcctcct

SEQ ID NO: 38342 - DNA, 33 bp, Homo sapien
gtgatgatttgtttaattacagtgattcctcct

SEQ ID NO: 38343 - DNA, 33 bp, Homo sapien
gaaatatcaaagcaaaataaagaaatagacagt

SEQ ID NO: 38344 - DNA, 33 bp, Homo sapien
gaaatatcaaagcaaactaaagaaatagacagt

SEQ ID NO: 38345 - DNA, 33 bp, Homo sapien
cctctatgaaccaggaagttagccttcaccaga

SEQ ID NO: 38346 - DNA, 33 bp, Homo sapien
cctctatgaaccaggacgttagccttcaccaga

SEQ ID NO: 38347 - DNA, 33 bp, Homo sapien
aattttatttgataacactaggatttgctgaag

SEQ ID NO: 38348 - DNA, 33 bp, Homo sapien
aattttatttgataactctaggatttgctgaag

SEQ ID NO: 38349 - DNA, 33 bp, Homo sapien
aataatgattaaaatgcacataaggaagataaa

SEQ ID NO: 38350 - DNA, 33 bp, Homo sapien
aataatgattaaaatggacataaggaagataaa

SEQ ID NO: 38351 - DNA, 33 bp, Homo sapien
tgggatctaaaaatcaaaatgattgaactcttg

SEQ ID NO: 38352 - DNA, 33 bp, Homo sapien
tgggatctaaaaatcagaatgattgaactcttg

SEQ ID NO: 38353 - DNA, 33 bp, Homo sapien
ttttatatcagcaccacgctattttgcttacta

SEQ ID NO: 38354 - DNA, 33 bp, Homo sapien
ttttatatcagcaccatgctattttgcttacta

SEQ ID NO: 38355 - DNA, 33 bp, Homo sapien
aattttgacatcaataacagaaagagtattgtg

SEQ ID NO: 38356 - DNA, 33 bp, Homo sapien
aattttgacatcaatagcagaaagagtattgtg

SEQ ID NO: 38357 - DNA, 33 bp, Homo sapien
attttaaattattccactgcctaatgacctcct

SEQ ID NO: 38358 - DNA, 33 bp, Homo sapien
attttaaattattccattgcctaatgacctcct

SEQ ID NO: 38359 - DNA, 33 bp, Homo sapien
tatgaagaaataaaaaagcactggtacaaataa

SEQ ID NO: 38360 - DNA, 33 bp, Homo sapien
tatgaagaaataaaaaggcactggtacaaataa

SEQ ID NO: 38361 - DNA, 33 bp, Homo sapien
gaaagcaattcataaactacaaaagatctgaga

SEQ ID NO: 38362 - DNA, 33 bp, Homo sapien
gaaagcaattcataaagtacaaaagatctgaga

SEQ ID NO: 38363 - DNA, 33 bp, Homo sapien
atatactataggaagaatctctcaatggatagt

SEQ ID NO: 38364 - DNA, 33 bp, Homo sapien
atatactataggaagactctctcaatggatagt

SEQ ID NO: 38365 - DNA, 33 bp, Homo sapien
ataattcatgttagaaagcatgtagcactttga

SEQ ID NO: 38366 - DNA, 33 bp, Homo sapien
ataattcatgttagaaggcatgtagcactttga

SEQ ID NO: 38367 - DNA, 33 bp, Homo sapien
attgatagttcctacccaggttgacagcttgat

SEQ ID NO: 38368 - DNA, 33 bp, Homo sapien
attgatagttcctacctaggttgacagcttgat

SEQ ID NO: 38369 - DNA, 33 bp, Homo sapien
ttcaggaaatttgtcagaaaactcaaaaaccta

SEQ ID NO: 38370 - DNA, 33 bp, Homo sapien
ttcaggaaatttgtcataaaactcaaaaaccta

SEQ ID NO: 38371 - DNA, 33 bp, Homo sapien
actattgtttccagcaaaggtgatcaactttta

SEQ ID NO: 38372 - DNA, 33 bp, Homo sapien
actattgtttccagcataggtgatcaactttta

SEQ ID NO: 38373 - DNA, 33 bp, Homo sapien
ctattattttggaaaacctttgcatcctaatct

SEQ ID NO: 38374 - DNA, 33 bp, Homo sapien
ctattattttggaaaatctttgcatcctaatct

SEQ ID NO: 38375 - DNA, 33 bp, Homo sapien
atgtgaacaacatttcaaggacagcttttggta

SEQ ID NO: 38376 - DNA, 33 bp, Homo sapien
atgtgaacaacatttcgaggacagcttttggta

SEQ ID NO: 38377 - DNA, 33 bp, Homo sapien
aagatgtactctaaccggaaaattcctaattat

SEQ ID NO: 38378 - DNA, 33 bp, Homo sapien
aagatgtactctaacctgaaaattcctaattat

SEQ ID NO: 38379 - DNA, 33 bp, Homo sapien
tgactaatctctttacaccataaaagttgtgtt

SEQ ID NO: 38380 - DNA, 33 bp, Homo sapien
tgactaatctctttactccataaaagttgtgtt

SEQ ID NO: 38381 - DNA, 33 bp, Homo sapien
catatgtaccactataacttataccagactacc

SEQ ID NO: 38382 - DNA, 33 bp, Homo sapien
catatgtaccactataccttataccagactacc

SEQ ID NO: 38383 - DNA, 33 bp, Homo sapien
ctcataatgccattaaccaataacttctagtat

SEQ ID NO: 38384 - DNA, 33 bp, Homo sapien
ctcataatgccattaatcaataacttctagtat

SEQ ID NO: 38385 - DNA, 33 bp, Homo sapien
agtaaagacaaatccacagtaagcagtcaatcc

SEQ ID NO: 38386 - DNA, 33 bp, Homo sapien
agtaaagacaaatccagagtaagcagtcaatcc

SEQ ID NO: 38387 - DNA, 33 bp, Homo sapien
gatttgtctttacttcaagtcaagtgattttgc

SEQ ID NO: 38388 - DNA, 33 bp, Homo sapien
gatttgtctttacttcgagtcaagtgattttgc

SEQ ID NO: 38389 - DNA, 33 bp, Homo sapien
attgcctcagagatgacagaaaaattataatca

SEQ ID NO: 38390 - DNA, 33 bp, Homo sapien
attgcctcagagatgagagaaaaattataatca

SEQ ID NO: 38391 - DNA, 33 bp, Homo sapien
actgtcctttatatcccgagagtcccacatgat

SEQ ID NO: 38392 - DNA, 33 bp, Homo sapien
actgtcctttatatcctgagagtcccacatgat

SEQ ID NO: 38393 - DNA, 33 bp, Homo sapien
aaccatcctgaacctgcaactcttactgagaaa

SEQ ID NO: 38394 - DNA, 33 bp, Homo sapien
aaccatcctgaacctggaactcttactgagaaa

SEQ ID NO: 38395 - DNA, 33 bp, Homo sapien
ctggaatatgggtttacgtgttgaaaggatttt

SEQ ID NO: 38396 - DNA, 33 bp, Homo sapien
ctggaatatgggtttatgtgttgaaaggatttt

SEQ ID NO: 38397 - DNA, 33 bp, Homo sapien
agtcccattatagcaaccccttcctctgcttgt

SEQ ID NO: 38398 - DNA, 33 bp, Homo sapien
agtcccattatagcaatcccttcctctgcttgt

SEQ ID NO: 38399 - DNA, 33 bp, Homo sapien
agattcatccgaactgcataacttcgcacatat

SEQ ID NO: 38400 - DNA, 33 bp, Homo sapien
agattcatccgaactgtataacttcgcacatat

SEQ ID NO: 38401 - DNA, 33 bp, Homo sapien
tatttcaacaactaaaagcaaacaatattgaaa

SEQ ID NO: 38402 - DNA, 33 bp, Homo sapien
tatttcaacaactaaaggcaaacaatattgaaa

SEQ ID NO: 38403 - DNA, 33 bp, Homo sapien
cagccacagcaggataagccaatggttagagtt

SEQ ID NO: 38404 - DNA, 33 bp, Homo sapien
cagccacagcaggataggccaatggttagagtt

SEQ ID NO: 38405 - DNA, 33 bp, Homo sapien
acagctgagatgtcaacggccaatttaattcta

SEQ ID NO: 38406 - DNA, 33 bp, Homo sapien
acagctgagatgtcaatggccaatttaattcta

SEQ ID NO: 38407 - DNA, 33 bp, Homo sapien
ttattttgttttatcaatctgtgggccaatcca

SEQ ID NO: 38408 - DNA, 33 bp, Homo sapien
ttattttgttttatcagtctgtgggccaatcca

SEQ ID NO: 38409 - DNA, 33 bp, Homo sapien
gattagtgccctaagccgaatgacaattaactt

SEQ ID NO: 38410 - DNA, 33 bp, Homo sapien
gattagtgccctaagctgaatgacaattaactt

SEQ ID NO: 38411 - DNA, 33 bp, Homo sapien
actttattttgtccacaagttggtctgccagcc

SEQ ID NO: 38412 - DNA, 33 bp, Homo sapien
actttattttgtccacgagttggtctgccagcc

SEQ ID NO: 38413 - DNA, 33 bp, Homo sapien
aaagcctttttagtagcccatatttatttatgt

SEQ ID NO: 38414 - DNA, 33 bp, Homo sapien
aaagcctttttagtaggccatatttatttatgt

SEQ ID NO: 38415 - DNA, 33 bp, Homo sapien
tggtaattatggtctaacaagtcactacgttag

SEQ ID NO: 38416 - DNA, 33 bp, Homo sapien
tggtaattatggtctaccaagtcactacgttag

SEQ ID NO: 38417 - DNA, 33 bp, Homo sapien
cctgagttctaaactaccaaaatggttgatatt

SEQ ID NO: 38418 - DNA, 33 bp, Homo sapien
cctgagttctaaactagcaaaatggttgatatt

SEQ ID NO: 38419 - DNA, 33 bp, Homo sapien
gtgcctattttgtgcaactcactgtgataggga

SEQ ID NO: 38420 - DNA, 33 bp, Homo sapien
gtgcctattttgtgcatctcactgtgataggga

SEQ ID NO: 38421 - DNA, 33 bp, Homo sapien
aaaagttcagataaacacttgtgatgattgggc

SEQ ID NO: 38422 - DNA, 33 bp, Homo sapien
aaaagttcagataaacgcttgtgatgattgggc

SEQ ID NO: 38423 - DNA, 33 bp, Homo sapien
tttgtacatggtgtgacgtaactgcatatctat

SEQ ID NO: 38424 - DNA, 33 bp, Homo sapien
tttgtacatggtgtgatgtaactgcatatctat

SEQ ID NO: 38425 - DNA, 33 bp, Homo sapien
cactaaaaatgcttgacgggacaaaaatataat

SEQ ID NO: 38426 - DNA, 33 bp, Homo sapien
cactaaaaatgcttgatgggacaaaaatataat

SEQ ID NO: 38427 - DNA, 33 bp, Homo sapien
aggaggggtccattcacatgggtgaggggctta

SEQ ID NO: 38428 - DNA, 33 bp, Homo sapien
aggaggggtccattcatatgggtgaggggctta

SEQ ID NO: 38429 - DNA, 33 bp, Homo sapien
tttgtacactcctagaagacaggaaatttactt

SEQ ID NO: 38430 - DNA, 33 bp, Homo sapien
tttgtacactcctagaggacaggaaatttactt

SEQ ID NO: 38431 - DNA, 33 bp, Homo sapien
ggttaagtgcctttgagaatttatttatgtacg

SEQ ID NO: 38432 - DNA, 33 bp, Homo sapien
ggttaagtgcctttgataatttatttatgtacg

SEQ ID NO: 38433 - DNA, 33 bp, Homo sapien
caagtagaacaaataccggccaactcaaactgc

SEQ ID NO: 38434 - DNA, 33 bp, Homo sapien
caagtagaacaaatactggccaactcaaactgc

SEQ ID NO: 38435 - DNA, 33 bp, Homo sapien
cggttttaggctttagacctaccactctcacaa

SEQ ID NO: 38436 - DNA, 33 bp, Homo sapien
cggttttaggctttagccctaccactctcacaa

SEQ ID NO: 38437 - DNA, 33 bp, Homo sapien
gaattttattgctgtcaaaacttaaagcctggt

SEQ ID NO: 38438 - DNA, 33 bp, Homo sapien
gaattttattgctgtccaaacttaaagcctggt

SEQ ID NO: 38439 - DNA, 33 bp, Homo sapien
gatagtgcacagtcaaacaaaagaatcaaataa

SEQ ID NO: 38440 - DNA, 33 bp, Homo sapien
gatagtgcacagtcaaccaaaagaatcaaataa

SEQ ID NO: 38441 - DNA, 33 bp, Homo sapien
tatttgtattgaattaagaattgatttgtgaga

SEQ ID NO: 38442 - DNA, 33 bp, Homo sapien
tatttgtattgaattatgaattgatttgtgaga

SEQ ID NO: 38443 - DNA, 33 bp, Homo sapien
cgtcagtttgtagatcaaaaatcttcctaagtt

SEQ ID NO: 38444 - DNA, 33 bp, Homo sapien
cgtcagtttgtagatcgaaaatcttcctaagtt

SEQ ID NO: 38445 - DNA, 33 bp, Homo sapien
aattaccagtagagtacgtctgtgtccctaaat

SEQ ID NO: 38446 - DNA, 33 bp, Homo sapien
aattaccagtagagtatgtctgtgtccctaaat

SEQ ID NO: 38447 - DNA, 33 bp, Homo sapien
agacactgaaaatagacggaatattcaaatggg

SEQ ID NO: 38448 - DNA, 33 bp, Homo sapien
agacactgaaaatagatggaatattcaaatggg

SEQ ID NO: 38449 - DNA, 33 bp, Homo sapien
tcaacatggttctcaactgctactttattttag

SEQ ID NO: 38450 - DNA, 33 bp, Homo sapien
tcaacatggttctcaattgctactttattttag

SEQ ID NO: 38451 - DNA, 33 bp, Homo sapien
atgaattctaccagaaatctgcttaatgtctgc

SEQ ID NO: 38452 - DNA, 33 bp, Homo sapien
atgaattctaccagaagtctgcttaatgtctgc

SEQ ID NO: 38453 - DNA, 33 bp, Homo sapien
gacttcattgaaagaaattattggccaagtgtg

SEQ ID NO: 38454 - DNA, 33 bp, Homo sapien
gacttcattgaaagaagttattggccaagtgtg

SEQ ID NO: 38455 - DNA, 33 bp, Homo sapien
taaaagtccctgtgtccaaacctgtctcataga

SEQ ID NO: 38456 - DNA, 33 bp, Homo sapien
taaaagtccctgtgtcgaaacctgtctcataga

SEQ ID NO: 38457 - DNA, 33 bp, Homo sapien
aacccattccaaatagaaaatgctcaaataaag

SEQ ID NO: 38458 - DNA, 33 bp, Homo sapien
aacccattccaaataggaaatgctcaaataaag

SEQ ID NO: 38459 - DNA, 33 bp, Homo sapien
ccaaaccttgtatccaatggaagtatactttag

SEQ ID NO: 38460 - DNA, 33 bp, Homo sapien
ccaaaccttgtatccactggaagtatactttag

SEQ ID NO: 38461 - DNA, 33 bp, Homo sapien
ccatcaaccccagcccactgaagagtgagcgac

SEQ ID NO: 38462 - DNA, 33 bp, Homo sapien
ccatcaaccccagcccgctgaagagtgagcgac

SEQ ID NO: 38463 - DNA, 33 bp, Homo sapien
accatgcttgtttaaaccgttttgaactttctt

SEQ ID NO: 38464 - DNA, 33 bp, Homo sapien
accatgcttgtttaaatcgttttgaactttctt

SEQ ID NO: 38465 - DNA, 33 bp, Homo sapien
agtttgtccagatacaaaacacaagagggaaag

SEQ ID NO: 38466 - DNA, 33 bp, Homo sapien
agtttgtccagatacagaacacaagagggaaag

SEQ ID NO: 38467 - DNA, 33 bp, Homo sapien
tactatcttatctctacgaaattctaacttggc

SEQ ID NO: 38468 - DNA, 33 bp, Homo sapien
tactatcttatctctatgaaattctaacttggc

SEQ ID NO: 38469 - DNA, 33 bp, Homo sapien
aagaaacaaagtgggacgggtgtaatgatggaa

SEQ ID NO: 38470 - DNA, 33 bp, Homo sapien
aagaaacaaagtgggatgggtgtaatgatggaa

SEQ ID NO: 38471 - DNA, 33 bp, Homo sapien
catggaacatagatcccagtaaggttgaaggat

SEQ ID NO: 38472 - DNA, 33 bp, Homo sapien
catggaacatagatcctagtaaggttgaaggat

SEQ ID NO: 38473 - DNA, 33 bp, Homo sapien
tattgcaagccagtgacgtacatgattcctggg

SEQ ID NO: 38474 - DNA, 33 bp, Homo sapien
tattgcaagccagtgatgtacatgattcctggg

SEQ ID NO: 38475 - DNA, 33 bp, Homo sapien
gcccaaatgcctattaaccaacaagtggataaa

SEQ ID NO: 38476 - DNA, 33 bp, Homo sapien
gcccaaatgcctattacccaacaagtggataaa

SEQ ID NO: 38477 - DNA, 33 bp, Homo sapien
atatgtattttgctaaccttgctacctctttcc

SEQ ID NO: 38478 - DNA, 33 bp, Homo sapien
atatgtattttgctaagcttgctacctctttcc

SEQ ID NO: 38479 - DNA, 33 bp, Homo sapien
ctgacttcacaatcacagatttcattgtcatta

SEQ ID NO: 38480 - DNA, 33 bp, Homo sapien
ctgacttcacaatcactgatttcattgtcatta

SEQ ID NO: 38481 - DNA, 33 bp, Homo sapien
tttgataataataataaaggagatctcagagaa

SEQ ID NO: 38482 - DNA, 33 bp, Homo sapien
tttgataataataatacaggagatctcagagaa

SEQ ID NO: 38483 - DNA, 33 bp, Homo sapien
gaggtaagatcaaagacgtgagtgggagccaga

SEQ ID NO: 38484 - DNA, 33 bp, Homo sapien
gaggtaagatcaaagaggtgagtgggagccaga

SEQ ID NO: 38485 - DNA, 33 bp, Homo sapien
caattgtttgagatgacagttataccagttact

SEQ ID NO: 38486 - DNA, 33 bp, Homo sapien
caattgtttgagatgatagttataccagttact

SEQ ID NO: 38487 - DNA, 33 bp, Homo sapien
aatgcaaaaggaacccacaatgcttcacacagg

SEQ ID NO: 38488 - DNA, 33 bp, Homo sapien
aatgcaaaaggaacccgcaatgcttcacacagg

SEQ ID NO: 38489 - DNA, 33 bp, Homo sapien
aaatgaaatatggattaaagttgaggaagtctt

SEQ ID NO: 38490 - DNA, 33 bp, Homo sapien
aaatgaaatatggattcaagttgaggaagtctt

SEQ ID NO: 38491 - DNA, 33 bp, Homo sapien
agaggatactttctaacgggagacaaaggcaat

SEQ ID NO: 38492 - DNA, 33 bp, Homo sapien
agaggatactttctaatgggagacaaaggcaat

SEQ ID NO: 38493 - DNA, 33 bp, Homo sapien
cttttgctccctaaaaccctaactgtagctatt

SEQ ID NO: 38494 - DNA, 33 bp, Homo sapien
cttttgctccctaaaatcctaactgtagctatt

SEQ ID NO: 38495 - DNA, 33 bp, Homo sapien
agacatttcaatatcacacttaagaaccaatgt

SEQ ID NO: 38496 - DNA, 33 bp, Homo sapien
agacatttcaatatcatacttaagaaccaatgt

SEQ ID NO: 38497 - DNA, 33 bp, Homo sapien
cagcatccatcaaaaaacactggtccagctctc

SEQ ID NO: 38498 - DNA, 33 bp, Homo sapien
cagcatccatcaaaaaccactggtccagctctc

SEQ ID NO: 38499 - DNA, 33 bp, Homo sapien
aaatagttgcaagagacgaattgacacatggtt

SEQ ID NO: 38500 - DNA, 33 bp, Homo sapien
aaatagttgcaagagatgaattgacacatggtt

SEQ ID NO: 38501 - DNA, 33 bp, Homo sapien
attctgtaaatctccaaacttcattaattattg

SEQ ID NO: 38502 - DNA, 33 bp, Homo sapien
attctgtaaatctccagacttcattaattattg

SEQ ID NO: 38503 - DNA, 33 bp, Homo sapien
acaagagagaactgctaaaataattccttatgg

SEQ ID NO: 38504 - DNA, 33 bp, Homo sapien
acaagagagaactgctgaaataattccttatgg

SEQ ID NO: 38505 - DNA, 33 bp, Homo sapien
agggagctggaatacaaacagtggctgaaacat

SEQ ID NO: 38506 - DNA, 33 bp, Homo sapien
agggagctggaatacagacagtggctgaaacat

SEQ ID NO: 38507 - DNA, 33 bp, Homo sapien
atttgtttgtaagataaactcaaaaactaatag

SEQ ID NO: 38508 - DNA, 33 bp, Homo sapien
atttgtttgtaagatagactcaaaaactaatag

SEQ ID NO: 38509 - DNA, 33 bp, Homo sapien
agtggtgatattataaagttgtcttgttctagg

SEQ ID NO: 38510 - DNA, 33 bp, Homo sapien
agtggtgatattataaggttgtcttgttctagg

SEQ ID NO: 38511 - DNA, 33 bp, Homo sapien
ctgatgtcacttcaaaaaaacattgttcagtgg

SEQ ID NO: 38512 - DNA, 33 bp, Homo sapien
ctgatgtcacttcaaacaaacattgttcagtgg

SEQ ID NO: 38513 - DNA, 33 bp, Homo sapien
agtgttgtaacttttaaaatggattctggagtt

SEQ ID NO: 38514 - DNA, 33 bp, Homo sapien
agtgttgtaacttttacaatggattctggagtt

SEQ ID NO: 38515 - DNA, 33 bp, Homo sapien
tgatgcagacgtcttcccattctctccttcaag

SEQ ID NO: 38516 - DNA, 33 bp, Homo sapien
tgatgcagacgtcttctcattctctccttcaag

SEQ ID NO: 38517 - DNA, 33 bp, Homo sapien
gacaaaactgcactagcctacttacgttgattt

SEQ ID NO: 38518 - DNA, 33 bp, Homo sapien
gacaaaactgcactaggctacttacgttgattt

SEQ ID NO: 38519 - DNA, 33 bp, Homo sapien
gagggaaaaagatcacacaaaaagtagaagcct

SEQ ID NO: 38520 - DNA, 33 bp, Homo sapien
gagggaaaaagatcacgcaaaaagtagaagcct

SEQ ID NO: 38521 - DNA, 33 bp, Homo sapien
agcatccaggtgatccacaggggaagcatcttt

SEQ ID NO: 38522 - DNA, 33 bp, Homo sapien
agcatccaggtgatccgcaggggaagcatcttt

SEQ ID NO: 38523 - DNA, 33 bp, Homo sapien
aacaaatgagggttggaagatattgttgatata

SEQ ID NO: 38524 - DNA, 33 bp, Homo sapien
aacaaatgagggttggcagatattgttgatata

SEQ ID NO: 38525 - DNA, 33 bp, Homo sapien
tgttgtcagcattcacccttttgtctgcctttt

SEQ ID NO: 38526 - DNA, 33 bp, Homo sapien
tgttgtcagcattcactcttttgtctgcctttt

SEQ ID NO: 38527 - DNA, 33 bp, Homo sapien
ttggcttagatatagcacttgatggtaccaact

SEQ ID NO: 38528 - DNA, 33 bp, Homo sapien
ttggcttagatatagcgcttgatggtaccaact

SEQ ID NO: 38529 - DNA, 33 bp, Homo sapien
tactagttctgctctaggccgtggtacccgctg

SEQ ID NO: 38530 - DNA, 33 bp, Homo sapien
tactagttctgctctatgccgtggtacccgctg

SEQ ID NO: 38531 - DNA, 33 bp, Homo sapien
ttaaaatgtagctctaagcaaactgacacacac

SEQ ID NO: 38532 - DNA, 33 bp, Homo sapien
ttaaaatgtagctctaggcaaactgacacacac

SEQ ID NO: 38533 - DNA, 33 bp, Homo sapien
gtttcagactgatttaacaactattaagcctaa

SEQ ID NO: 38534 - DNA, 33 bp, Homo sapien
gtttcagactgatttagcaactattaagcctaa

SEQ ID NO: 38535 - DNA, 33 bp, Homo sapien
cataatcagatttacagtcctgtgctataattt

SEQ ID NO: 38536 - DNA, 33 bp, Homo sapien
cataatcagatttacattcctgtgctataattt

SEQ ID NO: 38537 - DNA, 33 bp, Homo sapien
tgctataattattctggaactgcactctgcttg

SEQ ID NO: 38538 - DNA, 33 bp, Homo sapien
tgctataattattctgtaactgcactctgcttg

SEQ ID NO: 38539 - DNA, 33 bp, Homo sapien
gccaaaagtagatacccagaaaacatatctttt

SEQ ID NO: 38540 - DNA, 33 bp, Homo sapien
gccaaaagtagatacctagaaaacatatctttt

SEQ ID NO: 38541 - DNA, 33 bp, Homo sapien
aagcaattaggatagaacaatgaattaaaaata

SEQ ID NO: 38542 - DNA, 33 bp, Homo sapien
aagcaattaggatagagcaatgaattaaaaata

SEQ ID NO: 38543 - DNA, 33 bp, Homo sapien
tatattgttaggtatgcaaaaagggacaacaca

SEQ ID NO: 38544 - DNA, 33 bp, Homo sapien
tatattgttaggtatgtaaaaagggacaacaca

SEQ ID NO: 38545 - DNA, 33 bp, Homo sapien
aacagaatttgaataacctagttctgtgcaaac

SEQ ID NO: 38546 - DNA, 33 bp, Homo sapien
aacagaatttgaataatctagttctgtgcaaac

SEQ ID NO: 38547 - DNA, 33 bp, Homo sapien
tacacagacaagtgaagggtgaagaaaaagagt

SEQ ID NO: 38548 - DNA, 33 bp, Homo sapien
tacacagacaagtgaatggtgaagaaaaagagt

SEQ ID NO: 38549 - DNA, 33 bp, Homo sapien
tagaatagacagaagaagatgtgaaatctcggg

SEQ ID NO: 38550 - DNA, 33 bp, Homo sapien
tagaatagacagaagaggatgtgaaatctcggg

SEQ ID NO: 38551 - DNA, 33 bp, Homo sapien
taaaactaaaaccaaaagacggataaggagtta

SEQ ID NO: 38552 - DNA, 33 bp, Homo sapien
taaaactaaaaccaaacgacggataaggagtta

SEQ ID NO: 38553 - DNA, 33 bp, Homo sapien
tgctatttactgtggagctgatgtctcaaactt

SEQ ID NO: 38554 - DNA, 33 bp, Homo sapien
tgctatttactgtggatctgatgtctcaaactt

SEQ ID NO: 38555 - DNA, 33 bp, Homo sapien
tttctgtcatactccacatccagtccatcagca

SEQ ID NO: 38556 - DNA, 33 bp, Homo sapien
tttctgtcatactccatatccagtccatcagca

SEQ ID NO: 38557 - DNA, 33 bp, Homo sapien
tttttcctgcttcacaaattctaacagctcagt

SEQ ID NO: 38558 - DNA, 33 bp, Homo sapien
tttttcctgcttcacagattctaacagctcagt

SEQ ID NO: 38559 - DNA, 33 bp, Homo sapien
tttatcttgtactttaccctattaattcatcac

SEQ ID NO: 38560 - DNA, 33 bp, Homo sapien
tttatcttgtactttagcctattaattcatcac

SEQ ID NO: 38561 - DNA, 33 bp, Homo sapien
tgcagtgaggaaagcgaaattgttgaatacctt

SEQ ID NO: 38562 - DNA, 33 bp, Homo sapien
tgcagtgaggaaagcggaattgttgaatacctt

SEQ ID NO: 38563 - DNA, 33 bp, Homo sapien
agaccttcaaagagaagtaggctaccacacaat

SEQ ID NO: 38564 - DNA, 33 bp, Homo sapien
agaccttcaaagagaattaggctaccacacaat

SEQ ID NO: 38565 - DNA, 33 bp, Homo sapien
cactcatcaaccttgaatcaaccttgagtcaag

SEQ ID NO: 38566 - DNA, 33 bp, Homo sapien
cactcatcaaccttgagtcaaccttgagtcaag

SEQ ID NO: 38567 - DNA, 33 bp, Homo sapien
gttatttcatcaattaccataaacagcaaaatt

SEQ ID NO: 38568 - DNA, 33 bp, Homo sapien
gttatttcatcaattatcataaacagcaaaatt

SEQ ID NO: 38569 - DNA, 33 bp, Homo sapien
tattaagaaaatggaaaattatacctacacaat

SEQ ID NO: 38570 - DNA, 33 bp, Homo sapien
tattaagaaaatggaagattatacctacacaat

SEQ ID NO: 38571 - DNA, 33 bp, Homo sapien
gcaaagaacaatgacacggaaagataagaaaca

SEQ ID NO: 38572 - DNA, 33 bp, Homo sapien
gcaaagaacaatgacatggaaagataagaaaca

SEQ ID NO: 38573 - DNA, 33 bp, Homo sapien
gcaccagaagatattaactgtgatagcttggag

SEQ ID NO: 38574 - DNA, 33 bp, Homo sapien
gcaccagaagatattagctgtgatagcttggag

SEQ ID NO: 38575 - DNA, 33 bp, Homo sapien
tatatttgttgaaatacaacagctttgcattct

SEQ ID NO: 38576 - DNA, 33 bp, Homo sapien
tatatttgttgaaatagaacagctttgcattct

SEQ ID NO: 38577 - DNA, 33 bp, Homo sapien
accacctccacgctaccgtaacatcccagagga

SEQ ID NO: 38578 - DNA, 33 bp, Homo sapien
accacctccacgctactgtaacatcccagagga

SEQ ID NO: 38579 - DNA, 33 bp, Homo sapien
taggccacttgaataccgcagaaaaaaattcct

SEQ ID NO: 38580 - DNA, 33 bp, Homo sapien
taggccacttgaatactgcagaaaaaaattcct

SEQ ID NO: 38581 - DNA, 33 bp, Homo sapien
tatattagtgacactaccttgatcaaattgtaa

SEQ ID NO: 38582 - DNA, 33 bp, Homo sapien
tatattagtgacactatcttgatcaaattgtaa

SEQ ID NO: 38583 - DNA, 33 bp, Homo sapien
gtttcatcatttccaaaatacaggtggtaattg

SEQ ID NO: 38584 - DNA, 33 bp, Homo sapien
gtttcatcatttccaacatacaggtggtaattg

SEQ ID NO: 38585 - DNA, 33 bp, Homo sapien
aaggtcaagataaaaacagaagcagctggagag

SEQ ID NO: 38586 - DNA, 33 bp, Homo sapien
aaggtcaagataaaaagagaagcagctggagag

SEQ ID NO: 38587 - DNA, 33 bp, Homo sapien
aactaataactgcctaactaagttttaatgcag

SEQ ID NO: 38588 - DNA, 33 bp, Homo sapien
aactaataactgcctacctaagttttaatgcag

SEQ ID NO: 38589 - DNA, 33 bp, Homo sapien
caatttatcttttacacggatgccaaacataca

SEQ ID NO: 38590 - DNA, 33 bp, Homo sapien
caatttatcttttacatggatgccaaacataca

SEQ ID NO: 38591 - DNA, 33 bp, Homo sapien
attctcttagaaatttcaaatgtcactaatgat

SEQ ID NO: 38592 - DNA, 33 bp, Homo sapien
attctcttagaaattttaaatgtcactaatgat

SEQ ID NO: 38593 - DNA, 33 bp, Homo sapien
agagctgaggttcaaacctaaatgtcatgccct

SEQ ID NO: 38594 - DNA, 33 bp, Homo sapien
agagctgaggttcaaatctaaatgtcatgccct

SEQ ID NO: 38595 - DNA, 33 bp, Homo sapien
agttgggaatggagaaaaggatgtgttgaagaa

SEQ ID NO: 38596 - DNA, 33 bp, Homo sapien
agttgggaatggagaagaggatgtgttgaagaa

SEQ ID NO: 38597 - DNA, 33 bp, Homo sapien
gaatgttctcttctaccgcatttaaagttctcc

SEQ ID NO: 38598 - DNA, 33 bp, Homo sapien
gaatgttctcttctactgcatttaaagttctcc

SEQ ID NO: 38599 - DNA, 33 bp, Homo sapien
gggaataattctgtaaacagagtgtccaatttg

SEQ ID NO: 38600 - DNA, 33 bp, Homo sapien
gggaataattctgtaaccagagtgtccaatttg

SEQ ID NO: 38601 - DNA, 33 bp, Homo sapien
tcagtacaaagagcatcaaacctttggggagtg

SEQ ID NO: 38602 - DNA, 33 bp, Homo sapien
tcagtacaaagagcattaaacctttggggagtg

SEQ ID NO: 38603 - DNA, 33 bp, Homo sapien
gacccacattgctgtcagaatgaacggattcaa

SEQ ID NO: 38604 - DNA, 33 bp, Homo sapien
gacccacattgctgtcggaatgaacggattcaa

SEQ ID NO: 38605 - DNA, 33 bp, Homo sapien
tttaattcttttgacagtgccttttatagagaa

SEQ ID NO: 38606 - DNA, 33 bp, Homo sapien
tttaattcttttgacattgccttttatagagaa

SEQ ID NO: 38607 - DNA, 33 bp, Homo sapien
tatagaagtcctacaaatgaatactaaaacctg

SEQ ID NO: 38608 - DNA, 33 bp, Homo sapien
tatagaagtcctacaactgaatactaaaacctg

SEQ ID NO: 38609 - DNA, 33 bp, Homo sapien
gttactgaggctaacactagtcttagtcacaag

SEQ ID NO: 38610 - DNA, 33 bp, Homo sapien
gttactgaggctaacattagtcttagtcacaag

SEQ ID NO: 38611 - DNA, 33 bp, Homo sapien
gttaggagtggccagactatatttacatgagaa

SEQ ID NO: 38612 - DNA, 33 bp, Homo sapien
gttaggagtggccagattatatttacatgagaa

SEQ ID NO: 38613 - DNA, 33 bp, Homo sapien
tctactctaacaacagccaaataatatacaaag

SEQ ID NO: 38614 - DNA, 33 bp, Homo sapien
tctactctaacaacagtcaaataatatacaaag

SEQ ID NO: 38615 - DNA, 33 bp, Homo sapien
tttagaggtgtagcctaaagtggactacagaac

SEQ ID NO: 38616 - DNA, 33 bp, Homo sapien
tttagaggtgtagcctgaagtggactacagaac

SEQ ID NO: 38617 - DNA, 33 bp, Homo sapien
ctcttcttcctgttaaatacacatttccatagc

SEQ ID NO: 38618 - DNA, 33 bp, Homo sapien
ctcttcttcctgttaagtacacatttccatagc

SEQ ID NO: 38619 - DNA, 33 bp, Homo sapien
atttgaatctcaccatcaaataattgtcaattg

SEQ ID NO: 38620 - DNA, 33 bp, Homo sapien
atttgaatctcaccatgaaataattgtcaattg

SEQ ID NO: 38621 - DNA, 33 bp, Homo sapien
atataatggaaggggcaagatagctttcttcga

SEQ ID NO: 38622 - DNA, 33 bp, Homo sapien
atataatggaaggggcgagatagctttcttcga

SEQ ID NO: 38623 - DNA, 33 bp, Homo sapien
ttgaaaagtttgttagacacccacaagggcatt

SEQ ID NO: 38624 - DNA, 33 bp, Homo sapien
ttgaaaagtttgttaggcacccacaagggcatt

SEQ ID NO: 38625 - DNA, 33 bp, Homo sapien
gaaaagtactgagttacagtgaggaaaagtatc

SEQ ID NO: 38626 - DNA, 33 bp, Homo sapien
gaaaagtactgagttagagtgaggaaaagtatc

SEQ ID NO: 38627 - DNA, 33 bp, Homo sapien
ctcagaaaaatgtagaaatgttacaggacctcc

SEQ ID NO: 38628 - DNA, 33 bp, Homo sapien
ctcagaaaaatgtagagatgttacaggacctcc

SEQ ID NO: 38629 - DNA, 33 bp, Homo sapien
ctgttgcaacctggaccggtgtgcgcatacttg

SEQ ID NO: 38630 - DNA, 33 bp, Homo sapien
ctgttgcaacctggactggtgtgcgcatacttg

SEQ ID NO: 38631 - DNA, 33 bp, Homo sapien
aatattagcttcagtgaaagttttgtagaataa

SEQ ID NO: 38632 - DNA, 33 bp, Homo sapien
aatattagcttcagtggaagttttgtagaataa

SEQ ID NO: 38633 - DNA, 33 bp, Homo sapien
ttgtgtatgatgaatcacttctttctcattgct

SEQ ID NO: 38634 - DNA, 33 bp, Homo sapien
ttgtgtatgatgaatcgcttctttctcattgct

SEQ ID NO: 38635 - DNA, 33 bp, Homo sapien
cagagaccttcacaacagcatttcccatcacag

SEQ ID NO: 38636 - DNA, 33 bp, Homo sapien
cagagaccttcacaactgcatttcccatcacag

SEQ ID NO: 38637 - DNA, 33 bp, Homo sapien
tagaataactataacaatatgctggtatcacta

SEQ ID NO: 38638 - DNA, 33 bp, Homo sapien
tagaataactataacagtatgctggtatcacta

SEQ ID NO: 38639 - DNA, 33 bp, Homo sapien
aagccatagcagataaataaaggtatataacaa

SEQ ID NO: 38640 - DNA, 33 bp, Homo sapien
aagccatagcagataagtaaaggtatataacaa

SEQ ID NO: 38641 - DNA, 33 bp, Homo sapien
tggagttcaaattcaaactaaaaaatccaatat

SEQ ID NO: 38642 - DNA, 33 bp, Homo sapien
tggagttcaaattcaacctaaaaaatccaatat

SEQ ID NO: 38643 - DNA, 33 bp, Homo sapien
tacattatcaagaaaaactgtctaatagcagta

SEQ ID NO: 38644 - DNA, 33 bp, Homo sapien
tacattatcaagaaaacctgtctaatagcagta

SEQ ID NO: 38645 - DNA, 33 bp, Homo sapien
agtaaatcaggtgagaagcatgataaggtacac

SEQ ID NO: 38646 - DNA, 33 bp, Homo sapien
agtaaatcaggtgagaggcatgataaggtacac

SEQ ID NO: 38647 - DNA, 33 bp, Homo sapien
tactctgactgaaatacgaggttactgcagaat

SEQ ID NO: 38648 - DNA, 33 bp, Homo sapien
tactctgactgaaatatgaggttactgcagaat

SEQ ID NO: 38649 - DNA, 33 bp, Homo sapien
ggtgtgttctaccgcaagtaaccaatctatttt

SEQ ID NO: 38650 - DNA, 33 bp, Homo sapien
ggtgtgttctaccgcacgtaaccaatctatttt

SEQ ID NO: 38651 - DNA, 33 bp, Homo sapien
ttgattttctgattaacgtacaactccttctct

SEQ ID NO: 38652 - DNA, 33 bp, Homo sapien
ttgattttctgattaatgtacaactccttctct

SEQ ID NO: 38653 - DNA, 33 bp, Homo sapien
ggacaaaacaacagcacatctcatccattctac

SEQ ID NO: 38654 - DNA, 33 bp, Homo sapien
ggacaaaacaacagcatatctcatccattctac

SEQ ID NO: 38655 - DNA, 33 bp, Homo sapien
atccatacatcttacaaaaccgtctttgaggga

SEQ ID NO: 38656 - DNA, 33 bp, Homo sapien
atccatacatcttacataaccgtctttgaggga

SEQ ID NO: 38657 - DNA, 33 bp, Homo sapien
tcctcaataccaattaacacattttatgactct

SEQ ID NO: 38658 - DNA, 33 bp, Homo sapien
tcctcaataccaattagcacattttatgactct

SEQ ID NO: 38659 - DNA, 33 bp, Homo sapien
cacagagatacacgaaatgacgttctgattaat

SEQ ID NO: 38660 - DNA, 33 bp, Homo sapien
cacagagatacacgaattgacgttctgattaat

SEQ ID NO: 38661 - DNA, 33 bp, Homo sapien
taaaatgtctacagaaacatttagcagaaagaa

SEQ ID NO: 38662 - DNA, 33 bp, Homo sapien
taaaatgtctacagaaccatttagcagaaagaa

SEQ ID NO: 38663 - DNA, 33 bp, Homo sapien
gccagctagaagccgacggtcagtactcgttta

SEQ ID NO: 38664 - DNA, 33 bp, Homo sapien
gccagctagaagccgatggtcagtactcgttta

SEQ ID NO: 38665 - DNA, 33 bp, Homo sapien
tcaaaagtggcacaaacggtataactgctatac

SEQ ID NO: 38666 - DNA, 33 bp, Homo sapien
tcaaaagtggcacaaatggtataactgctatac

SEQ ID NO: 38667 - DNA, 33 bp, Homo sapien
attatagaatacatacgcagagcaccagtgaat

SEQ ID NO: 38668 - DNA, 33 bp, Homo sapien
attatagaatacatactcagagcaccagtgaat

SEQ ID NO: 38669 - DNA, 33 bp, Homo sapien
acacgcacatccaatcaaacaactatctacaca

SEQ ID NO: 38670 - DNA, 33 bp, Homo sapien
acacgcacatccaatcgaacaactatctacaca

SEQ ID NO: 38671 - DNA, 33 bp, Homo sapien
caactatctacacagaaaaagcactttcataaa

SEQ ID NO: 38672 - DNA, 33 bp, Homo sapien
caactatctacacagagaaagcactttcataaa

SEQ ID NO: 38673 - DNA, 33 bp, Homo sapien
atttagctcttttgataagccttgccagaactc

SEQ ID NO: 38674 - DNA, 33 bp, Homo sapien
atttagctcttttgatgagccttgccagaactc

SEQ ID NO: 38675 - DNA, 33 bp, Homo sapien
gctgtatccttagtgacagaacagtggctggca

SEQ ID NO: 38676 - DNA, 33 bp, Homo sapien
gctgtatccttagtgagagaacagtggctggca

SEQ ID NO: 38677 - DNA, 33 bp, Homo sapien
tccttttttgtatgagcctcagatgacacagcc

SEQ ID NO: 38678 - DNA, 33 bp, Homo sapien
tccttttttgtatgagtctcagatgacacagcc

SEQ ID NO: 38679 - DNA, 33 bp, Homo sapien
tcctccagaggggaacgctttaaaccagtgaaa

SEQ ID NO: 38680 - DNA, 33 bp, Homo sapien
tcctccagaggggaactctttaaaccagtgaaa

SEQ ID NO: 38681 - DNA, 33 bp, Homo sapien
acctagcacagaaaaaagttcctacatgataag

SEQ ID NO: 38682 - DNA, 33 bp, Homo sapien
acctagcacagaaaaatgttcctacatgataag

SEQ ID NO: 38683 - DNA, 33 bp, Homo sapien
ccaagccagcttttacaaattcagaaactatgt

SEQ ID NO: 38684 - DNA, 33 bp, Homo sapien
ccaagccagcttttaccaattcagaaactatgt

SEQ ID NO: 38685 - DNA, 33 bp, Homo sapien
aaaggagaaaggacctgagaaaatcctccccac

SEQ ID NO: 38686 - DNA, 33 bp, Homo sapien
aaaggagaaaggaccttagaaaatcctccccac

SEQ ID NO: 38687 - DNA, 33 bp, Homo sapien
ggaaagccaaaggaagcaaaggtagctacacag

SEQ ID NO: 38688 - DNA, 33 bp, Homo sapien
ggaaagccaaaggaaggaaaggtagctacacag

SEQ ID NO: 38689 - DNA, 33 bp, Homo sapien
acttaaattttgttagcattgctctcaacagga

SEQ ID NO: 38690 - DNA, 33 bp, Homo sapien
acttaaattttgttagtattgctctcaacagga

SEQ ID NO: 38691 - DNA, 33 bp, Homo sapien
ttgagaaattgatggaatattagaaagaataat

SEQ ID NO: 38692 - DNA, 33 bp, Homo sapien
ttgagaaattgatggagtattagaaagaataat

SEQ ID NO: 38693 - DNA, 33 bp, Homo sapien
ttatttgtgagtatcaaaatctcaagggcagaa

SEQ ID NO: 38694 - DNA, 33 bp, Homo sapien
ttatttgtgagtatcagaatctcaagggcagaa

SEQ ID NO: 38695 - DNA, 33 bp, Homo sapien
ctaagtgatagtggaaaaatatgggaatagtgc

SEQ ID NO: 38696 - DNA, 33 bp, Homo sapien
ctaagtgatagtggaagaatatgggaatagtgc

SEQ ID NO: 38697 - DNA, 33 bp, Homo sapien
gtgaacttctcttctacccactaacaatgtttt

SEQ ID NO: 38698 - DNA, 33 bp, Homo sapien
gtgaacttctcttctatccactaacaatgtttt

SEQ ID NO: 38699 - DNA, 33 bp, Homo sapien
tgtttagtatgaccaaataaatattcccagctg

SEQ ID NO: 38700 - DNA, 33 bp, Homo sapien
tgtttagtatgaccaactaaatattcccagctg

SEQ ID NO: 38701 - DNA, 33 bp, Homo sapien
tgatccactggctcaactgtttagtatgaccaa

SEQ ID NO: 38702 - DNA, 33 bp, Homo sapien
tgatccactggctcaattgtttagtatgaccaa

SEQ ID NO: 38703 - DNA, 33 bp, Homo sapien
gtagcagtaggcatgaagagaaacacattctgc

SEQ ID NO: 38704 - DNA, 33 bp, Homo sapien
gtagcagtaggcatgatgagaaacacattctgc

SEQ ID NO: 38705 - DNA, 33 bp, Homo sapien
tcctgagtctgtcatacgatcagtttattacta

SEQ ID NO: 38706 - DNA, 33 bp, Homo sapien
tcctgagtctgtcatatgatcagtttattacta

SEQ ID NO: 38707 - DNA, 33 bp, Homo sapien
ttgttcaagggctagacagtcaatctttgaaga

SEQ ID NO: 38708 - DNA, 33 bp, Homo sapien
ttgttcaagggctagatagtcaatctttgaaga

SEQ ID NO: 38709 - DNA, 33 bp, Homo sapien
atatttaatcagaaaaagtattccaagttggag

SEQ ID NO: 38710 - DNA, 33 bp, Homo sapien
atatttaatcagaaaaggtattccaagttggag

SEQ ID NO: 38711 - DNA, 33 bp, Homo sapien
aaacaaaaattcatgaacctgaaaagactccag

SEQ ID NO: 38712 - DNA, 33 bp, Homo sapien
aaacaaaaattcatgagcctgaaaagactccag

SEQ ID NO: 38713 - DNA, 33 bp, Homo sapien
tggagaacatctgctaaggtaatgtgaaaggga

SEQ ID NO: 38714 - DNA, 33 bp, Homo sapien
tggagaacatctgctagggtaatgtgaaaggga

SEQ ID NO: 38715 - DNA, 33 bp, Homo sapien
ccaaccagagctctcagactttcagagtgatca

SEQ ID NO: 38716 - DNA, 33 bp, Homo sapien
ccaaccagagctctcatactttcagagtgatca

SEQ ID NO: 38717 - DNA, 33 bp, Homo sapien
tggatagtagcattcaagatgagtcagttgaat

SEQ ID NO: 38718 - DNA, 33 bp, Homo sapien
tggatagtagcattcaggatgagtcagttgaat

SEQ ID NO: 38719 - DNA, 33 bp, Homo sapien
acttagaaaattggaacagacatacagatacat

SEQ ID NO: 38720 - DNA, 33 bp, Homo sapien
acttagaaaattggaatagacatacagatacat

SEQ ID NO: 38721 - DNA, 33 bp, Homo sapien
tacaatagttggatgcccaggtagataactatt

SEQ ID NO: 38722 - DNA, 33 bp, Homo sapien
tacaatagttggatgctcaggtagataactatt

SEQ ID NO: 38723 - DNA, 33 bp, Homo sapien
agagaggcttaaaataatatattctggacacat

SEQ ID NO: 38724 - DNA, 33 bp, Homo sapien
agagaggcttaaaatagtatattctggacacat

SEQ ID NO: 38725 - DNA, 33 bp, Homo sapien
gtggaaaattctccagcataggccacagagcaa

SEQ ID NO: 38726 - DNA, 33 bp, Homo sapien
gtggaaaattctccagtataggccacagagcaa

SEQ ID NO: 38727 - DNA, 33 bp, Homo sapien
gccaccaagtctatacacagctaggtttcattt

SEQ ID NO: 38728 - DNA, 33 bp, Homo sapien
gccaccaagtctatacgcagctaggtttcattt

SEQ ID NO: 38729 - DNA, 33 bp, Homo sapien
cgtgtatctgtgacacaccccaactcttcatat

SEQ ID NO: 38730 - DNA, 33 bp, Homo sapien
cgtgtatctgtgacaccccccaactcttcatat

SEQ ID NO: 38731 - DNA, 33 bp, Homo sapien
ttacctcaccgctctaagtgaaattccctaatt

SEQ ID NO: 38732 - DNA, 33 bp, Homo sapien
ttacctcaccgctctacgtgaaattccctaatt

SEQ ID NO: 38733 - DNA, 33 bp, Homo sapien
attggtataaagtagacgcttaaagtaaacata

SEQ ID NO: 38734 - DNA, 33 bp, Homo sapien
attggtataaagtagatgcttaaagtaaacata

SEQ ID NO: 38735 - DNA, 33 bp, Homo sapien
gcttctggagttcacacgactgaggttcttacg

SEQ ID NO: 38736 - DNA, 33 bp, Homo sapien
gcttctggagttcacatgactgaggttcttacg

SEQ ID NO: 38737 - DNA, 33 bp, Homo sapien
acttaaacagtgcaaccaggaaggaaatacctc

SEQ ID NO: 38738 - DNA, 33 bp, Homo sapien
acttaaacagtgcaacgaggaaggaaatacctc

SEQ ID NO: 38739 - DNA, 33 bp, Homo sapien
taaatcttaactggccacctttcattatcgtcc

SEQ ID NO: 38740 - DNA, 33 bp, Homo sapien
taaatcttaactggccgcctttcattatcgtcc

SEQ ID NO: 38741 - DNA, 33 bp, Homo sapien
taaatagaagaagtacaattaatgtctcaaaag

SEQ ID NO: 38742 - DNA, 33 bp, Homo sapien
taaatagaagaagtaccattaatgtctcaaaag

SEQ ID NO: 38743 - DNA, 33 bp, Homo sapien
tcatggtaatttcaaaccaaaagacatacaatg

SEQ ID NO: 38744 - DNA, 33 bp, Homo sapien
tcatggtaatttcaaagcaaaagacatacaatg

SEQ ID NO: 38745 - DNA, 33 bp, Homo sapien
aatactatcgtgtagcacattattttgacccga

SEQ ID NO: 38746 - DNA, 33 bp, Homo sapien
aatactatcgtgtagcgcattattttgacccga

SEQ ID NO: 38747 - DNA, 33 bp, Homo sapien
catataattagaatgaatagagacagcttttta

SEQ ID NO: 38748 - DNA, 33 bp, Homo sapien
catataattagaatgagtagagacagcttttta

SEQ ID NO: 38749 - DNA, 33 bp, Homo sapien
tcatctcctgtgaaaacactaccttcttttgga

SEQ ID NO: 38750 - DNA, 33 bp, Homo sapien
tcatctcctgtgaaaagactaccttcttttgga

SEQ ID NO: 38751 - DNA, 33 bp, Homo sapien
aactatacctctatataacaccattggctagaa

SEQ ID NO: 38752 - DNA, 33 bp, Homo sapien
aactatacctctatatgacaccattggctagaa

SEQ ID NO: 38753 - DNA, 33 bp, Homo sapien
tgatatcattcctaccaaaaatattccaaaaac

SEQ ID NO: 38754 - DNA, 33 bp, Homo sapien
tgatatcattcctaccgaaaatattccaaaaac

SEQ ID NO: 38755 - DNA, 33 bp, Homo sapien
aaatatttgctaaataataacacaatttctcaa

SEQ ID NO: 38756 - DNA, 33 bp, Homo sapien
aaatatttgctaaatagtaacacaatttctcaa

SEQ ID NO: 38757 - DNA, 33 bp, Homo sapien
tatttacaatactaagcctattcaatcatgaac

SEQ ID NO: 38758 - DNA, 33 bp, Homo sapien
tatttacaatactaaggctattcaatcatgaac

SEQ ID NO: 38759 - DNA, 33 bp, Homo sapien
agaaataaagtgtctgcaaagtgctaacagtcc

SEQ ID NO: 38760 - DNA, 33 bp, Homo sapien
agaaataaagtgtctggaaagtgctaacagtcc

SEQ ID NO: 38761 - DNA, 33 bp, Homo sapien
gggaatttcgaacacaaaactcacatatctcta

SEQ ID NO: 38762 - DNA, 33 bp, Homo sapien
gggaatttcgaacacataactcacatatctcta

SEQ ID NO: 38763 - DNA, 33 bp, Homo sapien
tgttgcctggcaaaaccatgtgaactggtgctg

SEQ ID NO: 38764 - DNA, 33 bp, Homo sapien
tgttgcctggcaaaactatgtgaactggtgctg

SEQ ID NO: 38765 - DNA, 33 bp, Homo sapien
acacaagtaaacataaaatccactggaatacta

SEQ ID NO: 38766 - DNA, 33 bp, Homo sapien
acacaagtaaacataatatccactggaatacta

SEQ ID NO: 38767 - DNA, 33 bp, Homo sapien
gagagactattgccaaattagtgactggttttc

SEQ ID NO: 38768 - DNA, 33 bp, Homo sapien
gagagactattgccaatttagtgactggttttc

SEQ ID NO: 38769 - DNA, 33 bp, Homo sapien
tgtgatatgttttatgacaacgtgaattgatca

SEQ ID NO: 38770 - DNA, 33 bp, Homo sapien
tgtgatatgttttatggcaacgtgaattgatca

SEQ ID NO: 38771 - DNA, 33 bp, Homo sapien
ctaatgggtctctttaacattcacaataaaaga

SEQ ID NO: 38772 - DNA, 33 bp, Homo sapien
ctaatgggtctctttatcattcacaataaaaga

SEQ ID NO: 38773 - DNA, 33 bp, Homo sapien
tagatgattttatacaaaggtgtgatgttttct

SEQ ID NO: 38774 - DNA, 33 bp, Homo sapien
tagatgattttatacataggtgtgatgttttct

SEQ ID NO: 38775 - DNA, 33 bp, Homo sapien
acccaatgtgatatacagatttaatacaatttc

SEQ ID NO: 38776 - DNA, 33 bp, Homo sapien
acccaatgtgatatactgatttaatacaatttc

SEQ ID NO: 38777 - DNA, 33 bp, Homo sapien
attgatatagtggcaaaactaaatacatttcac

SEQ ID NO: 38778 - DNA, 33 bp, Homo sapien
attgatatagtggcaatactaaatacatttcac

SEQ ID NO: 38779 - DNA, 33 bp, Homo sapien
attgaactccccaaagcactacaaaatctgtta

SEQ ID NO: 38780 - DNA, 33 bp, Homo sapien
attgaactccccaaagtactacaaaatctgtta

SEQ ID NO: 38781 - DNA, 33 bp, Homo sapien
tttgaatattcatgaccgtagagtggcagttat

SEQ ID NO: 38782 - DNA, 33 bp, Homo sapien
tttgaatattcatgactgtagagtggcagttat

SEQ ID NO: 38783 - DNA, 33 bp, Homo sapien
tatgaagggaacaacaatgaaacaatacccaga

SEQ ID NO: 38784 - DNA, 33 bp, Homo sapien
tatgaagggaacaacagtgaaacaatacccaga

SEQ ID NO: 38785 - DNA, 33 bp, Homo sapien
acatagttaaaggacccagatcacattttgcat

SEQ ID NO: 38786 - DNA, 33 bp, Homo sapien
acatagttaaaggacctagatcacattttgcat

SEQ ID NO: 38787 - DNA, 33 bp, Homo sapien
catatcctcaaagataagtcaaggaagtatcaa

SEQ ID NO: 38788 - DNA, 33 bp, Homo sapien
catatcctcaaagataggtcaaggaagtatcaa

SEQ ID NO: 38789 - DNA, 33 bp, Homo sapien
aataaccataagattacgttgtgaaggaagcct

SEQ ID NO: 38790 - DNA, 33 bp, Homo sapien
aataaccataagattatgttgtgaaggaagcct

SEQ ID NO: 38791 - DNA, 33 bp, Homo sapien
ttgagtagcaaaataaaagtaaagcctaaacat

SEQ ID NO: 38792 - DNA, 33 bp, Homo sapien
ttgagtagcaaaataagagtaaagcctaaacat

SEQ ID NO: 38793 - DNA, 33 bp, Homo sapien
caaacactgcctggtccgaaagttaatggacat

SEQ ID NO: 38794 - DNA, 33 bp, Homo sapien
caaacactgcctggtctgaaagttaatggacat

SEQ ID NO: 38795 - DNA, 33 bp, Homo sapien
agtaatttactacaagaaactagaccttaaaca

SEQ ID NO: 38796 - DNA, 33 bp, Homo sapien
agtaatttactacaaggaactagaccttaaaca

SEQ ID NO: 38797 - DNA, 33 bp, Homo sapien
ttattctgtatatttaagggtcatgggttctag

SEQ ID NO: 38798 - DNA, 33 bp, Homo sapien
ttattctgtatatttatgggtcatgggttctag

SEQ ID NO: 38799 - DNA, 33 bp, Homo sapien
atttatttgctacagccatatcaccttctattt

SEQ ID NO: 38800 - DNA, 33 bp, Homo sapien
atttatttgctacagctatatcaccttctattt

SEQ ID NO: 38801 - DNA, 33 bp, Homo sapien
ctcagcctattttttcactgggtcatttaaaaa

SEQ ID NO: 38802 - DNA, 33 bp, Homo sapien
ctcagcctattttttcgctgggtcatttaaaaa

SEQ ID NO: 38803 - DNA, 33 bp, Homo sapien
ttaaacaatcttcaccacgtctgcctttaaaaa

SEQ ID NO: 38804 - DNA, 33 bp, Homo sapien
ttaaacaatcttcaccgcgtctgcctttaaaaa

SEQ ID NO: 38805 - DNA, 33 bp, Homo sapien
ataattaaagatttgcaattctcactctttatt

SEQ ID NO: 38806 - DNA, 33 bp, Homo sapien
ataattaaagatttgcgattctcactctttatt

SEQ ID NO: 38807 - DNA, 33 bp, Homo sapien
cagttgtcttgctttacctgtaagattcttttt

SEQ ID NO: 38808 - DNA, 33 bp, Homo sapien
cagttgtcttgctttatctgtaagattcttttt

SEQ ID NO: 38809 - DNA, 33 bp, Homo sapien
caaaccatacctccaaaattttgtttgcaaatg

SEQ ID NO: 38810 - DNA, 33 bp, Homo sapien
caaaccatacctccaacattttgtttgcaaatg

SEQ ID NO: 38811 - DNA, 33 bp, Homo sapien
gcattgtaaaactaacacaactgacccatagac

SEQ ID NO: 38812 - DNA, 33 bp, Homo sapien
gcattgtaaaactaacgcaactgacccatagac

SEQ ID NO: 38813 - DNA, 33 bp, Homo sapien
tctccttttttgtaacaacacctttcataatga

SEQ ID NO: 38814 - DNA, 33 bp, Homo sapien
tctccttttttgtaacgacacctttcataatga

SEQ ID NO: 38815 - DNA, 33 bp, Homo sapien
tagaaggcttactcaaaatatcaataatttgta

SEQ ID NO: 38816 - DNA, 33 bp, Homo sapien
tagaaggcttactcaacatatcaataatttgta

SEQ ID NO: 38817 - DNA, 33 bp, Homo sapien
taaagaaattgtagaaacacgagaatcaggaaa

SEQ ID NO: 38818 - DNA, 33 bp, Homo sapien
taaagaaattgtagaaccacgagaatcaggaaa

SEQ ID NO: 38819 - DNA, 33 bp, Homo sapien
tcagtggaaatgagtacgcacaaggtactaaga

SEQ ID NO: 38820 - DNA, 33 bp, Homo sapien
tcagtggaaatgagtatgcacaaggtactaaga

SEQ ID NO: 38821 - DNA, 33 bp, Homo sapien
gtcactatctccttgactatgaattttatattt

SEQ ID NO: 38822 - DNA, 33 bp, Homo sapien
gtcactatctccttgagtatgaattttatattt

SEQ ID NO: 38823 - DNA, 33 bp, Homo sapien
acactaaaactatagacactcctttcacaaaat

SEQ ID NO: 38824 - DNA, 33 bp, Homo sapien
acactaaaactatagagactcctttcacaaaat

SEQ ID NO: 38825 - DNA, 33 bp, Homo sapien
gggcagaaagcagtaaagattggaaaacaatgc

SEQ ID NO: 38826 - DNA, 33 bp, Homo sapien
gggcagaaagcagtaacgattggaaaacaatgc

SEQ ID NO: 38827 - DNA, 33 bp, Homo sapien
gaattcatcacgtggaccaataagttttggaag

SEQ ID NO: 38828 - DNA, 33 bp, Homo sapien
gaattcatcacgtggatcaataagttttggaag

SEQ ID NO: 38829 - DNA, 33 bp, Homo sapien
ggagtcattagagaggccacagcttgagaaaaa

SEQ ID NO: 38830 - DNA, 33 bp, Homo sapien
ggagtcattagagaggtcacagcttgagaaaaa

SEQ ID NO: 38831 - DNA, 33 bp, Homo sapien
gataagtaaagccagacaaagaaatcacaagaa

SEQ ID NO: 38832 - DNA, 33 bp, Homo sapien
gataagtaaagccagataaagaaatcacaagaa

SEQ ID NO: 38833 - DNA, 33 bp, Homo sapien
tcaaaaatcctcagcaatctatcactttaagcc

SEQ ID NO: 38834 - DNA, 33 bp, Homo sapien
tcaaaaatcctcagcagtctatcactttaagcc

SEQ ID NO: 38835 - DNA, 33 bp, Homo sapien
tatattcttcaacgagactacataactttgtaa

SEQ ID NO: 38836 - DNA, 33 bp, Homo sapien
tatattcttcaacgaggctacataactttgtaa

SEQ ID NO: 38837 - DNA, 33 bp, Homo sapien
aacaaagaaatgtttaaagtgaaattcatcaaa

SEQ ID NO: 38838 - DNA, 33 bp, Homo sapien
aacaaagaaatgtttacagtgaaattcatcaaa

SEQ ID NO: 38839 - DNA, 33 bp, Homo sapien
tagctatttcaccagagaatctatagttagcaa

SEQ ID NO: 38840 - DNA, 33 bp, Homo sapien
tagctatttcaccagataatctatagttagcaa

SEQ ID NO: 38841 - DNA, 33 bp, Homo sapien
accacaggatccctcacgatgtctttttatagt

SEQ ID NO: 38842 - DNA, 33 bp, Homo sapien
accacaggatccctcatgatgtctttttatagt

SEQ ID NO: 38843 - DNA, 33 bp, Homo sapien
tagttgaatttatggactatggatttattatca

SEQ ID NO: 38844 - DNA, 33 bp, Homo sapien
tagttgaatttatggattatggatttattatca

SEQ ID NO: 38845 - DNA, 33 bp, Homo sapien
ttctttgaacaatctccgaatttctttcctcag

SEQ ID NO: 38846 - DNA, 33 bp, Homo sapien
ttctttgaacaatctctgaatttctttcctcag

SEQ ID NO: 38847 - DNA, 33 bp, Homo sapien
tataatcctggaacaaaccaccatgagttatta

SEQ ID NO: 38848 - DNA, 33 bp, Homo sapien
tataatcctggaacaacccaccatgagttatta

SEQ ID NO: 38849 - DNA, 33 bp, Homo sapien
ctccatgattggcctacacctacctctctaaac

SEQ ID NO: 38850 - DNA, 33 bp, Homo sapien
ctccatgattggcctatacctacctctctaaac

SEQ ID NO: 38851 - DNA, 33 bp, Homo sapien
tgtcctgatcaatgacaaatcacggcttttctt

SEQ ID NO: 38852 - DNA, 33 bp, Homo sapien
tgtcctgatcaatgactaatcacggcttttctt

SEQ ID NO: 38853 - DNA, 33 bp, Homo sapien
tcatgtttttttcctcacctagactgaataacc

SEQ ID NO: 38854 - DNA, 33 bp, Homo sapien
tcatgtttttttcctcgcctagactgaataacc

SEQ ID NO: 38855 - DNA, 33 bp, Homo sapien
ctgtgtttatgtcctacgccttgtatgaaaaga

SEQ ID NO: 38856 - DNA, 33 bp, Homo sapien
ctgtgtttatgtcctatgccttgtatgaaaaga

SEQ ID NO: 38857 - DNA, 33 bp, Homo sapien
aaaagtaatgatattcaacgataggcatgatac

SEQ ID NO: 38858 - DNA, 33 bp, Homo sapien
aaaagtaatgatattcgacgataggcatgatac

SEQ ID NO: 38859 - DNA, 33 bp, Homo sapien
agtcttgcccattaaacgactgattaatgattc

SEQ ID NO: 38860 - DNA, 33 bp, Homo sapien
agtcttgcccattaaatgactgattaatgattc

SEQ ID NO: 38861 - DNA, 33 bp, Homo sapien
gaacagagccactcaaattgaatgtaaacagca

SEQ ID NO: 38862 - DNA, 33 bp, Homo sapien
gaacagagccactcaatttgaatgtaaacagca

SEQ ID NO: 38863 - DNA, 33 bp, Homo sapien
cagtatattggagagaaaacgttgggaagaaac

SEQ ID NO: 38864 - DNA, 33 bp, Homo sapien
cagtatattggagagacaacgttgggaagaaac

SEQ ID NO: 38865 - DNA, 33 bp, Homo sapien
tcatttaccaagaagacgattttggttttgttc

SEQ ID NO: 38866 - DNA, 33 bp, Homo sapien
tcatttaccaagaagaggattttggttttgttc

SEQ ID NO: 38867 - DNA, 33 bp, Homo sapien
gttgggtctgctcatcacagattatttcaactg

SEQ ID NO: 38868 - DNA, 33 bp, Homo sapien
gttgggtctgctcatctcagattatttcaactg

SEQ ID NO: 38869 - DNA, 33 bp, Homo sapien
ttcctggcatctccaaacttctggtgtcacccc

SEQ ID NO: 38870 - DNA, 33 bp, Homo sapien
ttcctggcatctccaagcttctggtgtcacccc

SEQ ID NO: 38871 - DNA, 33 bp, Homo sapien
caatctgaagaactaacggaatgttgggaaaat

SEQ ID NO: 38872 - DNA, 33 bp, Homo sapien
caatctgaagaactaatggaatgttgggaaaat

SEQ ID NO: 38873 - DNA, 33 bp, Homo sapien
ctaaataattcccacacgaagagctattgttct

SEQ ID NO: 38874 - DNA, 33 bp, Homo sapien
ctaaataattcccacatgaagagctattgttct

SEQ ID NO: 38875 - DNA, 33 bp, Homo sapien
tagtaaggtttcaatcaaattaaggtagccatt

SEQ ID NO: 38876 - DNA, 33 bp, Homo sapien
tagtaaggtttcaatcgaattaaggtagccatt

SEQ ID NO: 38877 - DNA, 33 bp, Homo sapien
attttattaaggtggaaggtacataaaataatg

SEQ ID NO: 38878 - DNA, 33 bp, Homo sapien
attttattaaggtggagggtacataaaataatg

SEQ ID NO: 38879 - DNA, 33 bp, Homo sapien
gaagttcttcatgtcaaaaatattaagcatcaa

SEQ ID NO: 38880 - DNA, 33 bp, Homo sapien
gaagttcttcatgtcagaaatattaagcatcaa

SEQ ID NO: 38881 - DNA, 33 bp, Homo sapien
tggagcatctccttcaatacaatgcttcaacat

SEQ ID NO: 38882 - DNA, 33 bp, Homo sapien
tggagcatctccttcagtacaatgcttcaacat

SEQ ID NO: 38883 - DNA, 33 bp, Homo sapien
aattggaggaacatgaagaatatctggggcatg

SEQ ID NO: 38884 - DNA, 33 bp, Homo sapien
aattggaggaacatgaggaatatctggggcatg

SEQ ID NO: 38885 - DNA, 33 bp, Homo sapien
aaatttgagaaaatcacagcaataatttgacac

SEQ ID NO: 38886 - DNA, 33 bp, Homo sapien
aaatttgagaaaatcagagcaataatttgacac

SEQ ID NO: 38887 - DNA, 33 bp, Homo sapien
ggccaccttgaactgacagtgcttaaatccttt

SEQ ID NO: 38888 - DNA, 33 bp, Homo sapien
ggccaccttgaactgatagtgcttaaatccttt

SEQ ID NO: 38889 - DNA, 33 bp, Homo sapien
cttaccttagaaaaaccgatctgtaactgttaa

SEQ ID NO: 38890 - DNA, 33 bp, Homo sapien
cttaccttagaaaaactgatctgtaactgttaa

SEQ ID NO: 38891 - DNA, 33 bp, Homo sapien
agtaagttcccagaacaacagtaactttaatta

SEQ ID NO: 38892 - DNA, 33 bp, Homo sapien
agtaagttcccagaacgacagtaactttaatta

SEQ ID NO: 38893 - DNA, 33 bp, Homo sapien
aaacacactcataataaaagatttagtgcccta

SEQ ID NO: 38894 - DNA, 33 bp, Homo sapien
aaacacactcataatagaagatttagtgcccta

SEQ ID NO: 38895 - DNA, 33 bp, Homo sapien
taagagaggtattaaaatgttccctgggataaa

SEQ ID NO: 38896 - DNA, 33 bp, Homo sapien
taagagaggtattaaagtgttccctgggataaa

SEQ ID NO: 38897 - DNA, 33 bp, Homo sapien
aattgtctttactagacatatctaagccttaca

SEQ ID NO: 38898 - DNA, 33 bp, Homo sapien
aattgtctttactagagatatctaagccttaca

SEQ ID NO: 38899 - DNA, 33 bp, Homo sapien
cttggttttcagttaacagttcttggagaagtg

SEQ ID NO: 38900 - DNA, 33 bp, Homo sapien
cttggttttcagttaatagttcttggagaagtg

SEQ ID NO: 38901 - DNA, 33 bp, Homo sapien
cactttgcaaaaatacagacatgcaagtatatt

SEQ ID NO: 38902 - DNA, 33 bp, Homo sapien
cactttgcaaaaatacggacatgcaagtatatt

SEQ ID NO: 38903 - DNA, 33 bp, Homo sapien
atcatgtttatttgttcaaatcaggccactgac

SEQ ID NO: 38904 - DNA, 33 bp, Homo sapien
atcatgtttatttgttgaaatcaggccactgac

SEQ ID NO: 38905 - DNA, 33 bp, Homo sapien
caacagtctgtacataggccagtgttcatttat

SEQ ID NO: 38906 - DNA, 33 bp, Homo sapien
caacagtctgtacatatgccagtgttcatttat

SEQ ID NO: 38907 - DNA, 33 bp, Homo sapien
gtggtttcacaagaaaagaattattcaaatcca

SEQ ID NO: 38908 - DNA, 33 bp, Homo sapien
gtggtttcacaagaaaggaattattcaaatcca

SEQ ID NO: 38909 - DNA, 33 bp, Homo sapien
ttcaacaatgtacccaatgggctggcctaatag

SEQ ID NO: 38910 - DNA, 33 bp, Homo sapien
ttcaacaatgtacccagtgggctggcctaatag

SEQ ID NO: 38911 - DNA, 33 bp, Homo sapien
tactgcaaactatacaccatataggaaatacat

SEQ ID NO: 38912 - DNA, 33 bp, Homo sapien
tactgcaaactatacatcatataggaaatacat

SEQ ID NO: 38913 - DNA, 33 bp, Homo sapien
gtctgcctattacagagatggaattaaggcaat

SEQ ID NO: 38914 - DNA, 33 bp, Homo sapien
gtctgcctattacagatatggaattaaggcaat

SEQ ID NO: 38915 - DNA, 33 bp, Homo sapien
gaacataccaaatgaacgcaaaaacagcagaaa

SEQ ID NO: 38916 - DNA, 33 bp, Homo sapien
gaacataccaaatgaatgcaaaaacagcagaaa

SEQ ID NO: 38917 - DNA, 33 bp, Homo sapien
agagtaattaaaggaacccattttcatagagca

SEQ ID NO: 38918 - DNA, 33 bp, Homo sapien
agagtaattaaaggaatccattttcatagagca

SEQ ID NO: 38919 - DNA, 33 bp, Homo sapien
tgctctttctcagatcagaagtataaggtacct

SEQ ID NO: 38920 - DNA, 33 bp, Homo sapien
tgctctttctcagatcggaagtataaggtacct

SEQ ID NO: 38921 - DNA, 33 bp, Homo sapien
gggaaggagtgaaaatgaggtttttgatagcca

SEQ ID NO: 38922 - DNA, 33 bp, Homo sapien
gggaaggagtgaaaattaggtttttgatagcca

SEQ ID NO: 38923 - DNA, 33 bp, Homo sapien
gcaactgacaaaatccgaatactcagaatctat

SEQ ID NO: 38924 - DNA, 33 bp, Homo sapien
gcaactgacaaaatcctaatactcagaatctat

SEQ ID NO: 38925 - DNA, 33 bp, Homo sapien
cattgtaggtggagtcagaaataataatcctaa

SEQ ID NO: 38926 - DNA, 33 bp, Homo sapien
cattgtaggtggagtcggaaataataatcctaa

SEQ ID NO: 38927 - DNA, 33 bp, Homo sapien
atcaaatgtaacttgacagtgaataaagagaca

SEQ ID NO: 38928 - DNA, 33 bp, Homo sapien
atcaaatgtaacttgatagtgaataaagagaca

SEQ ID NO: 38929 - DNA, 33 bp, Homo sapien
tagccctactgaattgcacctttaaaaaagtca

SEQ ID NO: 38930 - DNA, 33 bp, Homo sapien
tagccctactgaattggacctttaaaaaagtca

SEQ ID NO: 38931 - DNA, 33 bp, Homo sapien
cgtatgaacattcaaaatggtaagtgataattt

SEQ ID NO: 38932 - DNA, 33 bp, Homo sapien
cgtatgaacattcaaagtggtaagtgataattt

SEQ ID NO: 38933 - DNA, 33 bp, Homo sapien
tcagtcctaagagttaaatgtcaaattgttgaa

SEQ ID NO: 38934 - DNA, 33 bp, Homo sapien
tcagtcctaagagttagatgtcaaattgttgaa

SEQ ID NO: 38935 - DNA, 33 bp, Homo sapien
tcttaatttagtaggacctgataacagctatga

SEQ ID NO: 38936 - DNA, 33 bp, Homo sapien
tcttaatttagtaggatctgataacagctatga

SEQ ID NO: 38937 - DNA, 33 bp, Homo sapien
ataaggtaaaatcacacgacaaggtgttctgga

SEQ ID NO: 38938 - DNA, 33 bp, Homo sapien
ataaggtaaaatcacatgacaaggtgttctgga

SEQ ID NO: 38939 - DNA, 33 bp, Homo sapien
catagaaatgaaataaagttgtacctggtctcc

SEQ ID NO: 38940 - DNA, 33 bp, Homo sapien
catagaaatgaaataaggttgtacctggtctcc

SEQ ID NO: 38941 - DNA, 33 bp, Homo sapien
cataggaatcacataaataagagaaggtgtgtc

SEQ ID NO: 38942 - DNA, 33 bp, Homo sapien
cataggaatcacataagtaagagaaggtgtgtc

SEQ ID NO: 38943 - DNA, 33 bp, Homo sapien
tagataccacttagtacggacacaccttctctt

SEQ ID NO: 38944 - DNA, 33 bp, Homo sapien
tagataccacttagtatggacacaccttctctt

SEQ ID NO: 38945 - DNA, 33 bp, Homo sapien
atagagcttcagatataacattttcaaaactgc

SEQ ID NO: 38946 - DNA, 33 bp, Homo sapien
atagagcttcagatatcacattttcaaaactgc

SEQ ID NO: 38947 - DNA, 33 bp, Homo sapien
aatggatgcagcattacagaaggcaggatggtg

SEQ ID NO: 38948 - DNA, 33 bp, Homo sapien
aatggatgcagcattatagaaggcaggatggtg

SEQ ID NO: 38949 - DNA, 33 bp, Homo sapien
gttttgttctccataggatttaccagttgcaac

SEQ ID NO: 38950 - DNA, 33 bp, Homo sapien
gttttgttctccatagtatttaccagttgcaac

SEQ ID NO: 38951 - DNA, 33 bp, Homo sapien
agctgtgaaagtgggaacactgcaaagagtcca

SEQ ID NO: 38952 - DNA, 33 bp, Homo sapien
agctgtgaaagtgggaccactgcaaagagtcca

SEQ ID NO: 38953 - DNA, 33 bp, Homo sapien
tagatatgtagagccactagcatgcaatgccag

SEQ ID NO: 38954 - DNA, 33 bp, Homo sapien
tagatatgtagagccattagcatgcaatgccag

SEQ ID NO: 38955 - DNA, 33 bp, Homo sapien
ttcaacctccacaacaatatgtttcaaagtcag

SEQ ID NO: 38956 - DNA, 33 bp, Homo sapien
ttcaacctccacaacagtatgtttcaaagtcag

SEQ ID NO: 38957 - DNA, 33 bp, Homo sapien
tttattctcagtcaacagaattacttttttcta

SEQ ID NO: 38958 - DNA, 33 bp, Homo sapien
tttattctcagtcaactgaattacttttttcta

SEQ ID NO: 38959 - DNA, 33 bp, Homo sapien
agtaaagagcataaaacgtgtcaggaataaatt

SEQ ID NO: 38960 - DNA, 33 bp, Homo sapien
agtaaagagcataaaaggtgtcaggaataaatt

SEQ ID NO: 38961 - DNA, 33 bp, Homo sapien
tcaacaaagaagagtgcataaaacatctaatga

SEQ ID NO: 38962 - DNA, 33 bp, Homo sapien
tcaacaaagaagagtggataaaacatctaatga

SEQ ID NO: 38963 - DNA, 33 bp, Homo sapien
gttagacttcctcatactagtatttatgtatct

SEQ ID NO: 38964 - DNA, 33 bp, Homo sapien
gttagacttcctcatagtagtatttatgtatct

SEQ ID NO: 38965 - DNA, 33 bp, Homo sapien
ttttccagtatgtcaacggagagtatttagaaa

SEQ ID NO: 38966 - DNA, 33 bp, Homo sapien
ttttccagtatgtcaagggagagtatttagaaa

SEQ ID NO: 38967 - DNA, 33 bp, Homo sapien
tttcattacagtggtaaatttgaacgtgaatcc

SEQ ID NO: 38968 - DNA, 33 bp, Homo sapien
tttcattacagtggtagatttgaacgtgaatcc

SEQ ID NO: 38969 - DNA, 33 bp, Homo sapien
atatgtaaaaacaagacaatctcacgtacacaa

SEQ ID NO: 38970 - DNA, 33 bp, Homo sapien
atatgtaaaaacaagagaatctcacgtacacaa

SEQ ID NO: 38971 - DNA, 33 bp, Homo sapien
tatcactgagaatgaactgagccatgaaatact

SEQ ID NO: 38972 - DNA, 33 bp, Homo sapien
tatcactgagaatgaattgagccatgaaatact

SEQ ID NO: 38973 - DNA, 33 bp, Homo sapien
agaaagccaaggctagccatctagacagagaga

SEQ ID NO: 38974 - DNA, 33 bp, Homo sapien
agaaagccaaggctagtcatctagacagagaga

SEQ ID NO: 38975 - DNA, 33 bp, Homo sapien
ctgatgcatggtgacagctatcactagctagtg

SEQ ID NO: 38976 - DNA, 33 bp, Homo sapien
ctgatgcatggtgacatctatcactagctagtg

SEQ ID NO: 38977 - DNA, 33 bp, Homo sapien
ggatatcagaaataaacgccaaactgtagtttc

SEQ ID NO: 38978 - DNA, 33 bp, Homo sapien
ggatatcagaaataaatgccaaactgtagtttc

SEQ ID NO: 38979 - DNA, 33 bp, Homo sapien
caattcatttggttcaaacaatctctagcagag

SEQ ID NO: 38980 - DNA, 33 bp, Homo sapien
caattcatttggttcatacaatctctagcagag

SEQ ID NO: 38981 - DNA, 33 bp, Homo sapien
tgtcattatagtaacaagttgatttctttttat

SEQ ID NO: 38982 - DNA, 33 bp, Homo sapien
tgtcattatagtaacatgttgatttctttttat

SEQ ID NO: 38983 - DNA, 33 bp, Homo sapien
ggtattttaaagagaacggctggcaaagtttta

SEQ ID NO: 38984 - DNA, 33 bp, Homo sapien
ggtattttaaagagaatggctggcaaagtttta

SEQ ID NO: 38985 - DNA, 33 bp, Homo sapien
agattaacagggtgaaagagataacagtgtctc

SEQ ID NO: 38986 - DNA, 33 bp, Homo sapien
agattaacagggtgaatgagataacagtgtctc

SEQ ID NO: 38987 - DNA, 33 bp, Homo sapien
tttaagtgccgtccccactttaaccttctttgc

SEQ ID NO: 38988 - DNA, 33 bp, Homo sapien
tttaagtgccgtcccctctttaaccttctttgc

SEQ ID NO: 38989 - DNA, 33 bp, Homo sapien
tctgagactaagaagaaaaagagatttaattgg

SEQ ID NO: 38990 - DNA, 33 bp, Homo sapien
tctgagactaagaagacaaagagatttaattgg

SEQ ID NO: 38991 - DNA, 33 bp, Homo sapien
gacctgttctgagccacagggcagcccattgcc

SEQ ID NO: 38992 - DNA, 33 bp, Homo sapien
gacctgttctgagccagagggcagcccattgcc

SEQ ID NO: 38993 - DNA, 33 bp, Homo sapien
tactgtgttccagcaacgccctgccagagctat

SEQ ID NO: 38994 - DNA, 33 bp, Homo sapien
tactgtgttccagcaatgccctgccagagctat

SEQ ID NO: 38995 - DNA, 33 bp, Homo sapien
gtaatatcccaaaataagatttccaagtttttt

SEQ ID NO: 38996 - DNA, 33 bp, Homo sapien
gtaatatcccaaaatatgatttccaagtttttt

SEQ ID NO: 38997 - DNA, 33 bp, Homo sapien
ttaattgcacattttcaaattactcaaatagtc

SEQ ID NO: 38998 - DNA, 33 bp, Homo sapien
ttaattgcacattttctaattactcaaatagtc

SEQ ID NO: 38999 - DNA, 33 bp, Homo sapien
acacacttaaaataggcacagtgaaagttctag

SEQ ID NO: 39000 - DNA, 33 bp, Homo sapien
acacacttaaaataggtacagtgaaagttctag

SEQ ID NO: 39001 - DNA, 33 bp, Homo sapien
ataaaaaggttaggtaataattgacaaaattga

SEQ ID NO: 39002 - DNA, 33 bp, Homo sapien
ataaaaaggttaggtagtaattgacaaaattga

SEQ ID NO: 39003 - DNA, 33 bp, Homo sapien
taatgtatgccatgagaatagttactgaaatat

SEQ ID NO: 39004 - DNA, 33 bp, Homo sapien
taatgtatgccatgagtatagttactgaaatat

SEQ ID NO: 39005 - DNA, 33 bp, Homo sapien
agcaggaaaggattcacgtcatttgatgcacca

SEQ ID NO: 39006 - DNA, 33 bp, Homo sapien
agcaggaaaggattcatgtcatttgatgcacca

SEQ ID NO: 39007 - DNA, 33 bp, Homo sapien
gagtaaaaagaactacaaggacgtcacgaaatg

SEQ ID NO: 39008 - DNA, 33 bp, Homo sapien
gagtaaaaagaactaccaggacgtcacgaaatg

SEQ ID NO: 39009 - DNA, 33 bp, Homo sapien
accttaaaagtcagaaagacctgagctctaatc

SEQ ID NO: 39010 - DNA, 33 bp, Homo sapien
accttaaaagtcagaaggacctgagctctaatc

SEQ ID NO: 39011 - DNA, 33 bp, Homo sapien
ggacctgagtccattaagatctgcatttattgg

SEQ ID NO: 39012 - DNA, 33 bp, Homo sapien
ggacctgagtccattatgatctgcatttattgg

SEQ ID NO: 39013 - DNA, 33 bp, Homo sapien
ttgctttgggagatcaatcaggctcttggtggg

SEQ ID NO: 39014 - DNA, 33 bp, Homo sapien
ttgctttgggagatcagtcaggctcttggtggg

SEQ ID NO: 39015 - DNA, 33 bp, Homo sapien
aggacaggtttggcagcattgtatccttgtctt

SEQ ID NO: 39016 - DNA, 33 bp, Homo sapien
aggacaggtttggcagtattgtatccttgtctt

SEQ ID NO: 39017 - DNA, 33 bp, Homo sapien
gctggttaacttcaggaagctttatctccaaac

SEQ ID NO: 39018 - DNA, 33 bp, Homo sapien
gctggttaacttcaggtagctttatctccaaac

SEQ ID NO: 39019 - DNA, 33 bp, Homo sapien
gagggaatattgagctaaaaagataatggagga

SEQ ID NO: 39020 - DNA, 33 bp, Homo sapien
gagggaatattgagctgaaaagataatggagga

SEQ ID NO: 39021 - DNA, 33 bp, Homo sapien
ttaactttactgtagaccacatagctgaggcaa

SEQ ID NO: 39022 - DNA, 33 bp, Homo sapien
ttaactttactgtagatcacatagctgaggcaa

SEQ ID NO: 39023 - DNA, 33 bp, Homo sapien
catgaaataaagcaaaatgttcatcgcgaatga

SEQ ID NO: 39024 - DNA, 33 bp, Homo sapien
catgaaataaagcaaagtgttcatcgcgaatga

SEQ ID NO: 39025 - DNA, 33 bp, Homo sapien
gtatgaacatctctacacaaactagaaaaccta

SEQ ID NO: 39026 - DNA, 33 bp, Homo sapien
gtatgaacatctctacgcaaactagaaaaccta

SEQ ID NO: 39027 - DNA, 33 bp, Homo sapien
actcaagacttaggaactgctgatgtatttgtg

SEQ ID NO: 39028 - DNA, 33 bp, Homo sapien
actcaagacttaggaagtgctgatgtatttgtg

SEQ ID NO: 39029 - DNA, 33 bp, Homo sapien
cagtttcttttaaatcacagtaagcattttcca

SEQ ID NO: 39030 - DNA, 33 bp, Homo sapien
cagtttcttttaaatctcagtaagcattttcca

SEQ ID NO: 39031 - DNA, 33 bp, Homo sapien
acttctacttcgtcaaatatgaaaacatttgtg

SEQ ID NO: 39032 - DNA, 33 bp, Homo sapien
acttctacttcgtcaactatgaaaacatttgtg

SEQ ID NO: 39033 - DNA, 33 bp, Homo sapien
aacacgcaaatgtaagaagctaatgacattgtt

SEQ ID NO: 39034 - DNA, 33 bp, Homo sapien
aacacgcaaatgtaaggagctaatgacattgtt

SEQ ID NO: 39035 - DNA, 33 bp, Homo sapien
catttaccaaatagtcaccaagaagaatggaca

SEQ ID NO: 39036 - DNA, 33 bp, Homo sapien
catttaccaaatagtcgccaagaagaatggaca

SEQ ID NO: 39037 - DNA, 33 bp, Homo sapien
tacatttgtttgcataggacattaataattcca

SEQ ID NO: 39038 - DNA, 33 bp, Homo sapien
tacatttgtttgcatatgacattaataattcca

SEQ ID NO: 39039 - DNA, 33 bp, Homo sapien
tccatgatgacaatcacaacatgaaaccaaaca

SEQ ID NO: 39040 - DNA, 33 bp, Homo sapien
tccatgatgacaatcagaacatgaaaccaaaca

SEQ ID NO: 39041 - DNA, 33 bp, Homo sapien
cctgaaaaagcttcagaactctaaccagcaaga

SEQ ID NO: 39042 - DNA, 33 bp, Homo sapien
cctgaaaaagcttcaggactctaaccagcaaga

SEQ ID NO: 39043 - DNA, 33 bp, Homo sapien
agtagaattattgttaccagaggctaggaaagg

SEQ ID NO: 39044 - DNA, 33 bp, Homo sapien
agtagaattattgttagcagaggctaggaaagg

SEQ ID NO: 39045 - DNA, 33 bp, Homo sapien
atgtggaagctaaaagaaaattgaactcatgaa

SEQ ID NO: 39046 - DNA, 33 bp, Homo sapien
atgtggaagctaaaaggaaattgaactcatgaa

SEQ ID NO: 39047 - DNA, 33 bp, Homo sapien
gcccatcttctgagacaattccacacatttcgg

SEQ ID NO: 39048 - DNA, 33 bp, Homo sapien
gcccatcttctgagacgattccacacatttcgg

SEQ ID NO: 39049 - DNA, 33 bp, Homo sapien
atgttgttccttctgacagaatattgttgtcac

SEQ ID NO: 39050 - DNA, 33 bp, Homo sapien
atgttgttccttctgatagaatattgttgtcac

SEQ ID NO: 39051 - DNA, 33 bp, Homo sapien
aacaataaagtaggacgcagtcacattagatag

SEQ ID NO: 39052 - DNA, 33 bp, Homo sapien
aacaataaagtaggactcagtcacattagatag

SEQ ID NO: 39053 - DNA, 33 bp, Homo sapien
taaagttatcctaaaaataaaattccatacaca

SEQ ID NO: 39054 - DNA, 33 bp, Homo sapien
taaagttatcctaaaagtaaaattccatacaca

SEQ ID NO: 39055 - DNA, 33 bp, Homo sapien
ccttgtatgagagcaacaaaagaagattccagg

SEQ ID NO: 39056 - DNA, 33 bp, Homo sapien
ccttgtatgagagcaataaaagaagattccagg

SEQ ID NO: 39057 - DNA, 33 bp, Homo sapien
ttacaataatgacggacgaggaagcaaggcatg

SEQ ID NO: 39058 - DNA, 33 bp, Homo sapien
ttacaataatgacggatgaggaagcaaggcatg

SEQ ID NO: 39059 - DNA, 33 bp, Homo sapien
acagagattatcagacggaatcaaaaccaaaac

SEQ ID NO: 39060 - DNA, 33 bp, Homo sapien
acagagattatcagactgaatcaaaaccaaaac

SEQ ID NO: 39061 - DNA, 33 bp, Homo sapien
atatataaacacatacaaagcatacataatcaa

SEQ ID NO: 39062 - DNA, 33 bp, Homo sapien
atatataaacacatacgaagcatacataatcaa

SEQ ID NO: 39063 - DNA, 33 bp, Homo sapien
tcaagcaaatgacaaacgatcttcctgagcaat

SEQ ID NO: 39064 - DNA, 33 bp, Homo sapien
tcaagcaaatgacaaaggatcttcctgagcaat

SEQ ID NO: 39065 - DNA, 33 bp, Homo sapien
tctttatcttacctaccatccaggtgcaactcg

SEQ ID NO: 39066 - DNA, 33 bp, Homo sapien
tctttatcttacctactatccaggtgcaactcg

SEQ ID NO: 39067 - DNA, 33 bp, Homo sapien
actaatagatttgaaacgcaagtctgaatcatg

SEQ ID NO: 39068 - DNA, 33 bp, Homo sapien
actaatagatttgaaatgcaagtctgaatcatg

SEQ ID NO: 39069 - DNA, 33 bp, Homo sapien
aggaaacccaagtataagtacaagaaaaacatt

SEQ ID NO: 39070 - DNA, 33 bp, Homo sapien
aggaaacccaagtataggtacaagaaaaacatt

SEQ ID NO: 39071 - DNA, 33 bp, Homo sapien
atagttaacgtgcacaataccctggaatataaa

SEQ ID NO: 39072 - DNA, 33 bp, Homo sapien
atagttaacgtgcacattaccctggaatataaa

SEQ ID NO: 39073 - DNA, 33 bp, Homo sapien
gtttgttgcttaataaaacaggcactttttggc

SEQ ID NO: 39074 - DNA, 33 bp, Homo sapien
gtttgttgcttaataatacaggcactttttggc

SEQ ID NO: 39075 - DNA, 33 bp, Homo sapien
tgcagttttatgcaagcccgtgaaccactcctg

SEQ ID NO: 39076 - DNA, 33 bp, Homo sapien
tgcagttttatgcaagtccgtgaaccactcctg

SEQ ID NO: 39077 - DNA, 33 bp, Homo sapien
ctgcttggccaaagagcattattttccctgggg

SEQ ID NO: 39078 - DNA, 33 bp, Homo sapien
ctgcttggccaaagaggattattttccctgggg

SEQ ID NO: 39079 - DNA, 33 bp, Homo sapien
tgagccaaagcatacactccccagaaaggcaga

SEQ ID NO: 39080 - DNA, 33 bp, Homo sapien
tgagccaaagcatacattccccagaaaggcaga

SEQ ID NO: 39081 - DNA, 33 bp, Homo sapien
agaataactgaaaaaaaactctactcaaatgag

SEQ ID NO: 39082 - DNA, 33 bp, Homo sapien
agaataactgaaaaaatactctactcaaatgag

SEQ ID NO: 39083 - DNA, 33 bp, Homo sapien
ataagcaaatatatggaaccacattttaaaaaa

SEQ ID NO: 39084 - DNA, 33 bp, Homo sapien
ataagcaaatatatgggaccacattttaaaaaa

SEQ ID NO: 39085 - DNA, 33 bp, Homo sapien
gcttctgctagaggaaaagtagaagaaaaagtc

SEQ ID NO: 39086 - DNA, 33 bp, Homo sapien
gcttctgctagaggaacagtagaagaaaaagtc

SEQ ID NO: 39087 - DNA, 33 bp, Homo sapien
ttatggccagtgttaaacttgtcaaaagagtgt

SEQ ID NO: 39088 - DNA, 33 bp, Homo sapien
ttatggccagtgttaatcttgtcaaaagagtgt

SEQ ID NO: 39089 - DNA, 33 bp, Homo sapien
tttaatgtttgtgatacgagattatttctgtca

SEQ ID NO: 39090 - DNA, 33 bp, Homo sapien
tttaatgtttgtgatatgagattatttctgtca

SEQ ID NO: 39091 - DNA, 33 bp, Homo sapien
acttcatagaaagcccacatggagttatacaat

SEQ ID NO: 39092 - DNA, 33 bp, Homo sapien
acttcatagaaagcccgcatggagttatacaat

SEQ ID NO: 39093 - DNA, 33 bp, Homo sapien
gattaggctcacataccaatattaatcagactt

SEQ ID NO: 39094 - DNA, 33 bp, Homo sapien
gattaggctcacatactaatattaatcagactt

SEQ ID NO: 39095 - DNA, 33 bp, Homo sapien
tttagaaatagcctaacatcatacaatgaaaca

SEQ ID NO: 39096 - DNA, 33 bp, Homo sapien
tttagaaatagcctaatatcatacaatgaaaca

SEQ ID NO: 39097 - DNA, 33 bp, Homo sapien
gctgatgaaattatacactgccacgccctttac

SEQ ID NO: 39098 - DNA, 33 bp, Homo sapien
gctgatgaaattatactctgccacgccctttac

SEQ ID NO: 39099 - DNA, 33 bp, Homo sapien
ataactacttatcaccaattattacttaaagca

SEQ ID NO: 39100 - DNA, 33 bp, Homo sapien
ataactacttatcaccgattattacttaaagca

SEQ ID NO: 39101 - DNA, 33 bp, Homo sapien
tgtgcatccaaatcacccgatgaacttgatcat

SEQ ID NO: 39102 - DNA, 33 bp, Homo sapien
tgtgcatccaaatcacgcgatgaacttgatcat

SEQ ID NO: 39103 - DNA, 33 bp, Homo sapien
aggtctctaaacttgacgtgcaaagattcattt

SEQ ID NO: 39104 - DNA, 33 bp, Homo sapien
aggtctctaaacttgatgtgcaaagattcattt

SEQ ID NO: 39105 - DNA, 33 bp, Homo sapien
agaatcctatcagtaaagagaaattagataaaa

SEQ ID NO: 39106 - DNA, 33 bp, Homo sapien
agaatcctatcagtaaggagaaattagataaaa

SEQ ID NO: 39107 - DNA, 33 bp, Homo sapien
ctaccaggcaatggctcagatataaggtaaaca

SEQ ID NO: 39108 - DNA, 33 bp, Homo sapien
ctaccaggcaatggcttagatataaggtaaaca

SEQ ID NO: 39109 - DNA, 33 bp, Homo sapien
tttctactcctattgaagctgttaacatgtccc

SEQ ID NO: 39110 - DNA, 33 bp, Homo sapien
tttctactcctattgaggctgttaacatgtccc

SEQ ID NO: 39111 - DNA, 33 bp, Homo sapien
ccagtcagtttttacactgaatctctctatacc

SEQ ID NO: 39112 - DNA, 33 bp, Homo sapien
ccagtcagtttttacattgaatctctctatacc

SEQ ID NO: 39113 - DNA, 33 bp, Homo sapien
catctgactgcgcaacagccaaaccctatgctt

SEQ ID NO: 39114 - DNA, 33 bp, Homo sapien
catctgactgcgcaacggccaaaccctatgctt

SEQ ID NO: 39115 - DNA, 33 bp, Homo sapien
cctttcagaaaaataaataagagcagtaggata

SEQ ID NO: 39116 - DNA, 33 bp, Homo sapien
cctttcagaaaaataagtaagagcagtaggata

SEQ ID NO: 39117 - DNA, 33 bp, Homo sapien
aaatttaaaaacaaataacttcagacagtttct

SEQ ID NO: 39118 - DNA, 33 bp, Homo sapien
aaatttaaaaacaaatcacttcagacagtttct

SEQ ID NO: 39119 - DNA, 33 bp, Homo sapien
ttgaaaggggccagtagagagctcagactttgg

SEQ ID NO: 39120 - DNA, 33 bp, Homo sapien
ttgaaaggggccagtatagagctcagactttgg

SEQ ID NO: 39121 - DNA, 33 bp, Homo sapien
cttgtctactgcattaactacaactttcagaaa

SEQ ID NO: 39122 - DNA, 33 bp, Homo sapien
cttgtctactgcattagctacaactttcagaaa

SEQ ID NO: 39123 - DNA, 33 bp, Homo sapien
ttattcttttctgcaaccatttttcccatgtat

SEQ ID NO: 39124 - DNA, 33 bp, Homo sapien
ttattcttttctgcaatcatttttcccatgtat

SEQ ID NO: 39125 - DNA, 33 bp, Homo sapien
cagcaagttaacatgaagttttaacaaagagat

SEQ ID NO: 39126 - DNA, 33 bp, Homo sapien
cagcaagttaacatgaggttttaacaaagagat

SEQ ID NO: 39127 - DNA, 33 bp, Homo sapien
gcttctgggtggacgacgggttggtagtttaat

SEQ ID NO: 39128 - DNA, 33 bp, Homo sapien
gcttctgggtggacgatgggttggtagtttaat

SEQ ID NO: 39129 - DNA, 33 bp, Homo sapien
tgttatcctaatatcaataaaaagcccacagat

SEQ ID NO: 39130 - DNA, 33 bp, Homo sapien
tgttatcctaatatcagtaaaaagcccacagat

SEQ ID NO: 39131 - DNA, 33 bp, Homo sapien
cctctcatgcctcaaaagtccctgtctattctt

SEQ ID NO: 39132 - DNA, 33 bp, Homo sapien
cctctcatgcctcaaatgtccctgtctattctt

SEQ ID NO: 39133 - DNA, 33 bp, Homo sapien
ttcttagggaaatccaatgaatggaaaagacaa

SEQ ID NO: 39134 - DNA, 33 bp, Homo sapien
ttcttagggaaatccagtgaatggaaaagacaa

SEQ ID NO: 39135 - DNA, 33 bp, Homo sapien
aacagatggcatccaaacaaatgtttttaaagc

SEQ ID NO: 39136 - DNA, 33 bp, Homo sapien
aacagatggcatccaaccaaatgtttttaaagc

SEQ ID NO: 39137 - DNA, 33 bp, Homo sapien
tggttcacggccaaaccgtaccacaaagtgata

SEQ ID NO: 39138 - DNA, 33 bp, Homo sapien
tggttcacggccaaactgtaccacaaagtgata

SEQ ID NO: 39139 - DNA, 33 bp, Homo sapien
tgcaagtagtaaatccacttcacgtaatgcatt

SEQ ID NO: 39140 - DNA, 33 bp, Homo sapien
tgcaagtagtaaatcctcttcacgtaatgcatt

SEQ ID NO: 39141 - DNA, 33 bp, Homo sapien
ttatcagtgataaaggaaagacaaagtagatat

SEQ ID NO: 39142 - DNA, 33 bp, Homo sapien
ttatcagtgataaagggaagacaaagtagatat

SEQ ID NO: 39143 - DNA, 33 bp, Homo sapien
gcattgggaagaatcactcatgtaatctctttt

SEQ ID NO: 39144 - DNA, 33 bp, Homo sapien
gcattgggaagaatcattcatgtaatctctttt

SEQ ID NO: 39145 - DNA, 33 bp, Homo sapien
attgagtcttccaatacgtaaacgtttcatatg

SEQ ID NO: 39146 - DNA, 33 bp, Homo sapien
attgagtcttccaatatgtaaacgtttcatatg

SEQ ID NO: 39147 - DNA, 33 bp, Homo sapien
aggaaaacaaaaatcaacaagtgggatctgatc

SEQ ID NO: 39148 - DNA, 33 bp, Homo sapien
aggaaaacaaaaatcagcaagtgggatctgatc

SEQ ID NO: 39149 - DNA, 33 bp, Homo sapien
ttgaatcagaccaaaaccattcttcaaaaacct

SEQ ID NO: 39150 - DNA, 33 bp, Homo sapien
ttgaatcagaccaaaagcattcttcaaaaacct

SEQ ID NO: 39151 - DNA, 33 bp, Homo sapien
tccacaggccgcggacaattaccatacttggcc

SEQ ID NO: 39152 - DNA, 33 bp, Homo sapien
tccacaggccgcggaccattaccatacttggcc

SEQ ID NO: 39153 - DNA, 33 bp, Homo sapien
tttgaatatattgagacgaagtgaatgtatttt

SEQ ID NO: 39154 - DNA, 33 bp, Homo sapien
tttgaatatattgagatgaagtgaatgtatttt

SEQ ID NO: 39155 - DNA, 33 bp, Homo sapien
tccaccccttaactcccagcatctggtgcttgc

SEQ ID NO: 39156 - DNA, 33 bp, Homo sapien
tccaccccttaactcctagcatctggtgcttgc

SEQ ID NO: 39157 - DNA, 33 bp, Homo sapien
gaagtctttttcaaaccacttctagccatccat

SEQ ID NO: 39158 - DNA, 33 bp, Homo sapien
gaagtctttttcaaacgacttctagccatccat

SEQ ID NO: 39159 - DNA, 33 bp, Homo sapien
ttttcgatattctacacgaaactggatttttac

SEQ ID NO: 39160 - DNA, 33 bp, Homo sapien
ttttcgatattctacatgaaactggatttttac

SEQ ID NO: 39161 - DNA, 33 bp, Homo sapien
tggtttatgctcaatacgtaaaatatcctatca

SEQ ID NO: 39162 - DNA, 33 bp, Homo sapien
tggtttatgctcaataggtaaaatatcctatca

SEQ ID NO: 39163 - DNA, 33 bp, Homo sapien
agcagaggaaaaaatacctgaaagagtaactgc

SEQ ID NO: 39164 - DNA, 33 bp, Homo sapien
agcagaggaaaaaatatctgaaagagtaactgc

SEQ ID NO: 39165 - DNA, 33 bp, Homo sapien
agaggcttttaggcaacgggaatagtttgtaca

SEQ ID NO: 39166 - DNA, 33 bp, Homo sapien
agaggcttttaggcaatgggaatagtttgtaca

SEQ ID NO: 39167 - DNA, 33 bp, Homo sapien
ctcaggcgagacagtacgtgtgatcaaattatg

SEQ ID NO: 39168 - DNA, 33 bp, Homo sapien
ctcaggcgagacagtatgtgtgatcaaattatg

SEQ ID NO: 39169 - DNA, 33 bp, Homo sapien
cttgtaaggtgcttaaatcaagtgctccatagt

SEQ ID NO: 39170 - DNA, 33 bp, Homo sapien
cttgtaaggtgcttaagtcaagtgctccatagt

SEQ ID NO: 39171 - DNA, 33 bp, Homo sapien
attgtagagtccagtcacctctcaagcttgtgg

SEQ ID NO: 39172 - DNA, 33 bp, Homo sapien
attgtagagtccagtcccctctcaagcttgtgg

SEQ ID NO: 39173 - DNA, 33 bp, Homo sapien
tgtcactataaaactgaacaattcaaggataca

SEQ ID NO: 39174 - DNA, 33 bp, Homo sapien
tgtcactataaaactggacaattcaaggataca

SEQ ID NO: 39175 - DNA, 33 bp, Homo sapien
tcctactgtccacaaccagtcatcagtcatgtg

SEQ ID NO: 39176 - DNA, 33 bp, Homo sapien
tcctactgtccacaactagtcatcagtcatgtg

SEQ ID NO: 39177 - DNA, 33 bp, Homo sapien
tgtgtgcactgctacaacaatttttggaatttc

SEQ ID NO: 39178 - DNA, 33 bp, Homo sapien
tgtgtgcactgctacagcaatttttggaatttc

SEQ ID NO: 39179 - DNA, 33 bp, Homo sapien
atccatctcaagttaaggtttgtataaggtata

SEQ ID NO: 39180 - DNA, 33 bp, Homo sapien
atccatctcaagttaatgtttgtataaggtata

SEQ ID NO: 39181 - DNA, 33 bp, Homo sapien
ccttcattgcatatacaaaagtgaggaggaaga

SEQ ID NO: 39182 - DNA, 33 bp, Homo sapien
ccttcattgcatataccaaagtgaggaggaaga

SEQ ID NO: 39183 - DNA, 33 bp, Homo sapien
aggtggaggttttcaaacttcaattcttgactt

SEQ ID NO: 39184 - DNA, 33 bp, Homo sapien
aggtggaggttttcaagcttcaattcttgactt

SEQ ID NO: 39185 - DNA, 33 bp, Homo sapien
acagcacttggcagccacaaaggtttggagctt

SEQ ID NO: 39186 - DNA, 33 bp, Homo sapien
acagcacttggcagcctcaaaggtttggagctt

SEQ ID NO: 39187 - DNA, 33 bp, Homo sapien
tggatcaatggacagtaaagaaaatcaacagca

SEQ ID NO: 39188 - DNA, 33 bp, Homo sapien
tggatcaatggacagtgaagaaaatcaacagca

SEQ ID NO: 39189 - DNA, 33 bp, Homo sapien
tgaaggttgttccagaagcacatacacagctgc

SEQ ID NO: 39190 - DNA, 33 bp, Homo sapien
tgaaggttgttccagaggcacatacacagctgc

SEQ ID NO: 39191 - DNA, 33 bp, Homo sapien
tgaatcagtgtatttccaccatagtcataaact

SEQ ID NO: 39192 - DNA, 33 bp, Homo sapien
tgaatcagtgtatttctaccatagtcataaact

SEQ ID NO: 39193 - DNA, 33 bp, Homo sapien
ccctgtgacataggtaccaatttcacctacttt

SEQ ID NO: 39194 - DNA, 33 bp, Homo sapien
ccctgtgacataggtatcaatttcacctacttt

SEQ ID NO: 39195 - DNA, 33 bp, Homo sapien
ttttgtattataacaacgagaagtcttaagagt

SEQ ID NO: 39196 - DNA, 33 bp, Homo sapien
ttttgtattataacaatgagaagtcttaagagt

SEQ ID NO: 39197 - DNA, 33 bp, Homo sapien
ggcagtccagttgccacgtgaaatagagaaata

SEQ ID NO: 39198 - DNA, 33 bp, Homo sapien
ggcagtccagttgccatgtgaaatagagaaata

SEQ ID NO: 39199 - DNA, 33 bp, Homo sapien
ataagacagatatcggcagaaaagctttagctg

SEQ ID NO: 39200 - DNA, 33 bp, Homo sapien
ataagacagatatcggtagaaaagctttagctg

SEQ ID NO: 39201 - DNA, 33 bp, Homo sapien
tctgttcaacacaaataatatacccaaagttaa

SEQ ID NO: 39202 - DNA, 33 bp, Homo sapien
tctgttcaacacaaatgatatacccaaagttaa

SEQ ID NO: 39203 - DNA, 33 bp, Homo sapien
tagaaggtttagtgaacgcaaggagttagaaga

SEQ ID NO: 39204 - DNA, 33 bp, Homo sapien
tagaaggtttagtgaatgcaaggagttagaaga

SEQ ID NO: 39205 - DNA, 33 bp, Homo sapien
tacctttatcaccttcacaagaacagaaatctt

SEQ ID NO: 39206 - DNA, 33 bp, Homo sapien
tacctttatcaccttcgcaagaacagaaatctt

SEQ ID NO: 39207 - DNA, 33 bp, Homo sapien
aattaaattttacatccccattattcctccctg

SEQ ID NO: 39208 - DNA, 33 bp, Homo sapien
aattaaattttacatctccattattcctccctg

SEQ ID NO: 39209 - DNA, 33 bp, Homo sapien
acttcctctttttctacaacacaagtatctttg

SEQ ID NO: 39210 - DNA, 33 bp, Homo sapien
acttcctctttttctataacacaagtatctttg

SEQ ID NO: 39211 - DNA, 33 bp, Homo sapien
tgatatggctagtactgaaaacacatgggaaaa

SEQ ID NO: 39212 - DNA, 33 bp, Homo sapien
tgatatggctagtacttaaaacacatgggaaaa

SEQ ID NO: 39213 - DNA, 33 bp, Homo sapien
catgcagagagaactcaaatccctggtgctctg

SEQ ID NO: 39214 - DNA, 33 bp, Homo sapien
catgcagagagaactcgaatccctggtgctctg

SEQ ID NO: 39215 - DNA, 33 bp, Homo sapien
accagggctcatccaaacctctgtaatttttaa

SEQ ID NO: 39216 - DNA, 33 bp, Homo sapien
accagggctcatccaagcctctgtaatttttaa

SEQ ID NO: 39217 - DNA, 33 bp, Homo sapien
agtgtactgaataatacctgaaaaagtgatttt

SEQ ID NO: 39218 - DNA, 33 bp, Homo sapien
agtgtactgaataatatctgaaaaagtgatttt

SEQ ID NO: 39219 - DNA, 33 bp, Homo sapien
gtgttgtagaaaagcaaaacaaatcaataacaa

SEQ ID NO: 39220 - DNA, 33 bp, Homo sapien
gtgttgtagaaaagcagaacaaatcaataacaa

SEQ ID NO: 39221 - DNA, 33 bp, Homo sapien
gcaaactacaggccaaatctggttagtggcctg

SEQ ID NO: 39222 - DNA, 33 bp, Homo sapien
gcaaactacaggccaagtctggttagtggcctg

SEQ ID NO: 39223 - DNA, 33 bp, Homo sapien
gctatcactgtttgaacatttattatatggcag

SEQ ID NO: 39224 - DNA, 33 bp, Homo sapien
gctatcactgtttgaatatttattatatggcag

SEQ ID NO: 39225 - DNA, 33 bp, Homo sapien
tatgtattctttatggcatctctacagtgtagt

SEQ ID NO: 39226 - DNA, 33 bp, Homo sapien
tatgtattctttatggtatctctacagtgtagt

SEQ ID NO: 39227 - DNA, 33 bp, Homo sapien
tttcacactaacccaaagacattgtttttctct

SEQ ID NO: 39228 - DNA, 33 bp, Homo sapien
tttcacactaacccaaggacattgtttttctct

SEQ ID NO: 39229 - DNA, 33 bp, Homo sapien
gcatgtatgctaagcacgaaaaccagtgttgag

SEQ ID NO: 39230 - DNA, 33 bp, Homo sapien
gcatgtatgctaagcaggaaaaccagtgttgag

SEQ ID NO: 39231 - DNA, 33 bp, Homo sapien
ttagtgactacaattaacctcccttcaccactg

SEQ ID NO: 39232 - DNA, 33 bp, Homo sapien
ttagtgactacaattagcctcccttcaccactg

SEQ ID NO: 39233 - DNA, 33 bp, Homo sapien
aggtgtgtttaactaactggaacaacactgaat

SEQ ID NO: 39234 - DNA, 33 bp, Homo sapien
aggtgtgtttaactaattggaacaacactgaat

SEQ ID NO: 39235 - DNA, 33 bp, Homo sapien
gtactctccaactctccaaaccaagatagttat

SEQ ID NO: 39236 - DNA, 33 bp, Homo sapien
gtactctccaactctcgaaaccaagatagttat

SEQ ID NO: 39237 - DNA, 33 bp, Homo sapien
acacactgctttttccacagcaagtgttcaaca

SEQ ID NO: 39238 - DNA, 33 bp, Homo sapien
acacactgctttttccgcagcaagtgttcaaca

SEQ ID NO: 39239 - DNA, 33 bp, Homo sapien
ctttgcttcctttcaacgttcttgcttattgtt

SEQ ID NO: 39240 - DNA, 33 bp, Homo sapien
ctttgcttcctttcaatgttcttgcttattgtt

SEQ ID NO: 39241 - DNA, 33 bp, Homo sapien
ggatatatgtgtccatcaagtttagtaataaag

SEQ ID NO: 39242 - DNA, 33 bp, Homo sapien
ggatatatgtgtccatgaagtttagtaataaag

SEQ ID NO: 39243 - DNA, 33 bp, Homo sapien
cagcctaactcaaagaacctgacagagtaaata

SEQ ID NO: 39244 - DNA, 33 bp, Homo sapien
cagcctaactcaaagaccctgacagagtaaata

SEQ ID NO: 39245 - DNA, 33 bp, Homo sapien
agtaaagtctgaatcaggttcaataactttcac

SEQ ID NO: 39246 - DNA, 33 bp, Homo sapien
agtaaagtctgaatcatgttcaataactttcac

SEQ ID NO: 39247 - DNA, 33 bp, Homo sapien
ccatttcaggactttacatagctctctctcagt

SEQ ID NO: 39248 - DNA, 33 bp, Homo sapien
ccatttcaggactttatatagctctctctcagt

SEQ ID NO: 39249 - DNA, 33 bp, Homo sapien
tcatgcactatttgtcaaatgcctgtgtaatat

SEQ ID NO: 39250 - DNA, 33 bp, Homo sapien
tcatgcactatttgtcgaatgcctgtgtaatat

SEQ ID NO: 39251 - DNA, 33 bp, Homo sapien
aatctcaattgtcgacagcagtacaacaacata

SEQ ID NO: 39252 - DNA, 33 bp, Homo sapien
aatctcaattgtcgacggcagtacaacaacata

SEQ ID NO: 39253 - DNA, 33 bp, Homo sapien
gtcactctaaatccacagtcatgaacatcaaga

SEQ ID NO: 39254 - DNA, 33 bp, Homo sapien
gtcactctaaatccacggtcatgaacatcaaga

SEQ ID NO: 39255 - DNA, 33 bp, Homo sapien
cttcctggagccaaaacggaggaaacttctatt

SEQ ID NO: 39256 - DNA, 33 bp, Homo sapien
cttcctggagccaaaatggaggaaacttctatt

SEQ ID NO: 39257 - DNA, 33 bp, Homo sapien
aaagggtgtacaccaaataaataactttgtaac

SEQ ID NO: 39258 - DNA, 33 bp, Homo sapien
aaagggtgtacaccaagtaaataactttgtaac

SEQ ID NO: 39259 - DNA, 33 bp, Homo sapien
tgtggttgtacgtgagaagcaatgtatgacact

SEQ ID NO: 39260 - DNA, 33 bp, Homo sapien
tgtggttgtacgtgaggagcaatgtatgacact

SEQ ID NO: 39261 - DNA, 33 bp, Homo sapien
catcccagtctttagcccattatcatttattgt

SEQ ID NO: 39262 - DNA, 33 bp, Homo sapien
catcccagtctttagctcattatcatttattgt

SEQ ID NO: 39263 - DNA, 33 bp, Homo sapien
aactcaatttacataccaggaacaagagttata

SEQ ID NO: 39264 - DNA, 33 bp, Homo sapien
aactcaatttacatacgaggaacaagagttata

SEQ ID NO: 39265 - DNA, 33 bp, Homo sapien
gtgaagatgctaacaaggatggctataagcaaa

SEQ ID NO: 39266 - DNA, 33 bp, Homo sapien
gtgaagatgctaacaatgatggctataagcaaa

SEQ ID NO: 39267 - DNA, 33 bp, Homo sapien
accacccaatgctgagaagagatgaatcagtca

SEQ ID NO: 39268 - DNA, 33 bp, Homo sapien
accacccaatgctgaggagagatgaatcagtca

SEQ ID NO: 39269 - DNA, 33 bp, Homo sapien
gtccagtatatctttccactacataaacttaca

SEQ ID NO: 39270 - DNA, 33 bp, Homo sapien
gtccagtatatctttcgactacataaacttaca

SEQ ID NO: 39271 - DNA, 33 bp, Homo sapien
tacctctttgttcaagccagaaaactagatgtc

SEQ ID NO: 39272 - DNA, 33 bp, Homo sapien
tacctctttgttcaaggcagaaaactagatgtc

SEQ ID NO: 39273 - DNA, 33 bp, Homo sapien
catatttgaccctaaactgggtaatcagcaatc

SEQ ID NO: 39274 - DNA, 33 bp, Homo sapien
catatttgaccctaaattgggtaatcagcaatc

SEQ ID NO: 39275 - DNA, 33 bp, Homo sapien
cttccagaagtctaaaatgtcaagattattggt

SEQ ID NO: 39276 - DNA, 33 bp, Homo sapien
cttccagaagtctaaagtgtcaagattattggt

SEQ ID NO: 39277 - DNA, 33 bp, Homo sapien
aatatatgtcattcaggaattgtttgactcatt

SEQ ID NO: 39278 - DNA, 33 bp, Homo sapien
aatatatgtcattcagtaattgtttgactcatt

SEQ ID NO: 39279 - DNA, 33 bp, Homo sapien
gtccttcatagcaatacgggtttgaatgcctct

SEQ ID NO: 39280 - DNA, 33 bp, Homo sapien
gtccttcatagcaatatgggtttgaatgcctct

SEQ ID NO: 39281 - DNA, 33 bp, Homo sapien
caggaatcactttatgaaccatgaccgtctccc

SEQ ID NO: 39282 - DNA, 33 bp, Homo sapien
caggaatcactttatggaccatgaccgtctccc

SEQ ID NO: 39283 - DNA, 33 bp, Homo sapien
aggattgcccatgtgaagtaatttatcaaaata

SEQ ID NO: 39284 - DNA, 33 bp, Homo sapien
aggattgcccatgtgaggtaatttatcaaaata

SEQ ID NO: 39285 - DNA, 33 bp, Homo sapien
actaaggtcacattaccgctaggatcagaaaag

SEQ ID NO: 39286 - DNA, 33 bp, Homo sapien
actaaggtcacattactgctaggatcagaaaag

SEQ ID NO: 39287 - DNA, 33 bp, Homo sapien
tccatctggttataaaaatccttctctgctgag

SEQ ID NO: 39288 - DNA, 33 bp, Homo sapien
tccatctggttataaagatccttctctgctgag

SEQ ID NO: 39289 - DNA, 33 bp, Homo sapien
gaagttgaatcaatcacaaagtataactaacta

SEQ ID NO: 39290 - DNA, 33 bp, Homo sapien
gaagttgaatcaatcataaagtataactaacta

SEQ ID NO: 39291 - DNA, 33 bp, Homo sapien
gggtgctggatcaaaacggacagaacataaagt

SEQ ID NO: 39292 - DNA, 33 bp, Homo sapien
gggtgctggatcaaaagggacagaacataaagt

SEQ ID NO: 39293 - DNA, 33 bp, Homo sapien
attttgtaaagcctaaaaactcacctaatgcca

SEQ ID NO: 39294 - DNA, 33 bp, Homo sapien
attttgtaaagcctaacaactcacctaatgcca

SEQ ID NO: 39295 - DNA, 33 bp, Homo sapien
acatactggcttatggaagtcctgatctcagtg

SEQ ID NO: 39296 - DNA, 33 bp, Homo sapien
acatactggcttatgggagtcctgatctcagtg

SEQ ID NO: 39297 - DNA, 33 bp, Homo sapien
aaggaatacaaattaaacattgataggtaatat

SEQ ID NO: 39298 - DNA, 33 bp, Homo sapien
aaggaatacaaattaagcattgataggtaatat

SEQ ID NO: 39299 - DNA, 33 bp, Homo sapien
atggcatacttaataaatcttcaatgtgaagta

SEQ ID NO: 39300 - DNA, 33 bp, Homo sapien
atggcatacttaataattcttcaatgtgaagta

SEQ ID NO: 39301 - DNA, 33 bp, Homo sapien
caatataccactgaaactgtcatatagtcatga

SEQ ID NO: 39302 - DNA, 33 bp, Homo sapien
caatataccactgaaattgtcatatagtcatga

SEQ ID NO: 39303 - DNA, 33 bp, Homo sapien
tttctaaaatctactcacgctttcattcaaata

SEQ ID NO: 39304 - DNA, 33 bp, Homo sapien
tttctaaaatctactcgcgctttcattcaaata

SEQ ID NO: 39305 - DNA, 33 bp, Homo sapien
taatttacagtcttggccacctgggagaagtca

SEQ ID NO: 39306 - DNA, 33 bp, Homo sapien
taatttacagtcttggtcacctgggagaagtca

SEQ ID NO: 39307 - DNA, 33 bp, Homo sapien
tctcacattcacattgaaacataggatactttt

SEQ ID NO: 39308 - DNA, 33 bp, Homo sapien
tctcacattcacattggaacataggatactttt

SEQ ID NO: 39309 - DNA, 33 bp, Homo sapien
atcgtaaagcactaaccgaatttgaagatatta

SEQ ID NO: 39310 - DNA, 33 bp, Homo sapien
atcgtaaagcactaactgaatttgaagatatta

SEQ ID NO: 39311 - DNA, 33 bp, Homo sapien
caaatagtgcaagaaacggggcaaatgaaaact

SEQ ID NO: 39312 - DNA, 33 bp, Homo sapien
caaatagtgcaagaaatggggcaaatgaaaact

SEQ ID NO: 39313 - DNA, 33 bp, Homo sapien
agcacaaacgatgctacgtaactttcaaggcta

SEQ ID NO: 39314 - DNA, 33 bp, Homo sapien
agcacaaacgatgctatgtaactttcaaggcta

SEQ ID NO: 39315 - DNA, 33 bp, Homo sapien
tgtaaccaataaaacaatggactaaaatttata

SEQ ID NO: 39316 - DNA, 33 bp, Homo sapien
tgtaaccaataaaacagtggactaaaatttata

SEQ ID NO: 39317 - DNA, 33 bp, Homo sapien
ttgtgagatttctgcccagtaattttctaaaag

SEQ ID NO: 39318 - DNA, 33 bp, Homo sapien
ttgtgagatttctgcctagtaattttctaaaag

SEQ ID NO: 39319 - DNA, 33 bp, Homo sapien
aagagaatttctttaacaaaacccacagtgaca

SEQ ID NO: 39320 - DNA, 33 bp, Homo sapien
aagagaatttctttaataaaacccacagtgaca

SEQ ID NO: 39321 - DNA, 33 bp, Homo sapien
aacattcttctgtgaggacgagtccctggtagc

SEQ ID NO: 39322 - DNA, 33 bp, Homo sapien
aacattcttctgtgagtacgagtccctggtagc

SEQ ID NO: 39323 - DNA, 33 bp, Homo sapien
ttaccaacgagacaagaaatctcacaaataaat

SEQ ID NO: 39324 - DNA, 33 bp, Homo sapien
ttaccaacgagacaagtaatctcacaaataaat

SEQ ID NO: 39325 - DNA, 33 bp, Homo sapien
tgataagaactcaccaaacaagtatctgctgtc

SEQ ID NO: 39326 - DNA, 33 bp, Homo sapien
tgataagaactcaccacacaagtatctgctgtc

SEQ ID NO: 39327 - DNA, 33 bp, Homo sapien
tttatcattaagactccatgcatttcctagtta

SEQ ID NO: 39328 - DNA, 33 bp, Homo sapien
tttatcattaagactctatgcatttcctagtta

SEQ ID NO: 39329 - DNA, 33 bp, Homo sapien
ctatattgtggaacaaaaacagaacccccatga

SEQ ID NO: 39330 - DNA, 33 bp, Homo sapien
ctatattgtggaacaacaacagaacccccatga

SEQ ID NO: 39331 - DNA, 33 bp, Homo sapien
tacattaaaatgattcaagtgcagagtcatata

SEQ ID NO: 39332 - DNA, 33 bp, Homo sapien
tacattaaaatgattcgagtgcagagtcatata

SEQ ID NO: 39333 - DNA, 33 bp, Homo sapien
aagctgagctgtaatacctttgcaaaactgcct

SEQ ID NO: 39334 - DNA, 33 bp, Homo sapien
aagctgagctgtaatatctttgcaaaactgcct

SEQ ID NO: 39335 - DNA, 33 bp, Homo sapien
attctggacacatctccgaaggaccgagagtta

SEQ ID NO: 39336 - DNA, 33 bp, Homo sapien
attctggacacatctctgaaggaccgagagtta

SEQ ID NO: 39337 - DNA, 33 bp, Homo sapien
aatgctcttactcggaatatttttttttattta

SEQ ID NO: 39338 - DNA, 33 bp, Homo sapien
aatgctcttactcggattatttttttttattta

SEQ ID NO: 39339 - DNA, 33 bp, Homo sapien
ggatttgaactcagggcccatctccacagggta

SEQ ID NO: 39340 - DNA, 33 bp, Homo sapien
ggatttgaactcagggtccatctccacagggta

SEQ ID NO: 39341 - DNA, 33 bp, Homo sapien
tatatatagtcttttaacttcatagggaaggat

SEQ ID NO: 39342 - DNA, 33 bp, Homo sapien
tatatatagtcttttaccttcatagggaaggat

SEQ ID NO: 39343 - DNA, 33 bp, Homo sapien
tgttttaacatattcaatcatgttcctctttgg

SEQ ID NO: 39344 - DNA, 33 bp, Homo sapien
tgttttaacatattcagtcatgttcctctttgg

SEQ ID NO: 39345 - DNA, 33 bp, Homo sapien
aatctatttttagtgaaccagctacctccctga

SEQ ID NO: 39346 - DNA, 33 bp, Homo sapien
aatctatttttagtgacccagctacctccctga

SEQ ID NO: 39347 - DNA, 33 bp, Homo sapien
ccaacaaacaaacaaactaacattgtatatcgg

SEQ ID NO: 39348 - DNA, 33 bp, Homo sapien
ccaacaaacaaacaaagtaacattgtatatcgg

SEQ ID NO: 39349 - DNA, 33 bp, Homo sapien
ccaagtttacaaccataagaatcttactctaca

SEQ ID NO: 39350 - DNA, 33 bp, Homo sapien
ccaagtttacaaccatgagaatcttactctaca

SEQ ID NO: 39351 - DNA, 33 bp, Homo sapien
gcccattctgggaaaaaaagtaacatgatgaca

SEQ ID NO: 39352 - DNA, 33 bp, Homo sapien
gcccattctgggaaaacaagtaacatgatgaca

SEQ ID NO: 39353 - DNA, 33 bp, Homo sapien
aaaagcatctattccaaaattggagaaagtggt

SEQ ID NO: 39354 - DNA, 33 bp, Homo sapien
aaaagcatctattccagaattggagaaagtggt

SEQ ID NO: 39355 - DNA, 33 bp, Homo sapien
aaggcaaaaatggtaaaagccttgctagggtct

SEQ ID NO: 39356 - DNA, 33 bp, Homo sapien
aaggcaaaaatggtaagagccttgctagggtct

SEQ ID NO: 39357 - DNA, 33 bp, Homo sapien
aaaatgagccttcaaaatgcctcagaaaaccaa

SEQ ID NO: 39358 - DNA, 33 bp, Homo sapien
aaaatgagccttcaaagtgcctcagaaaaccaa

SEQ ID NO: 39359 - DNA, 33 bp, Homo sapien
tgcactatgctttaaacgagtttgactacattt

SEQ ID NO: 39360 - DNA, 33 bp, Homo sapien
tgcactatgctttaaatgagtttgactacattt

SEQ ID NO: 39361 - DNA, 33 bp, Homo sapien
actaaacctataatccaaaacatatatcctgtt

SEQ ID NO: 39362 - DNA, 33 bp, Homo sapien
actaaacctataatccgaaacatatatcctgtt

SEQ ID NO: 39363 - DNA, 33 bp, Homo sapien
taatgtaatgtcacaaaatggcagatagatgat

SEQ ID NO: 39364 - DNA, 33 bp, Homo sapien
taatgtaatgtcacaagatggcagatagatgat

SEQ ID NO: 39365 - DNA, 33 bp, Homo sapien
acatcaggttcttcaaacttcaatttacaacat

SEQ ID NO: 39366 - DNA, 33 bp, Homo sapien
acatcaggttcttcaatcttcaatttacaacat

SEQ ID NO: 39367 - DNA, 33 bp, Homo sapien
aatttattacagaaatgatcctgacatcttaaa

SEQ ID NO: 39368 - DNA, 33 bp, Homo sapien
aatttattacagaaattatcctgacatcttaaa

SEQ ID NO: 39369 - DNA, 33 bp, Homo sapien
cattcttgttttgctacagaagagttctggaaa

SEQ ID NO: 39370 - DNA, 33 bp, Homo sapien
cattcttgttttgctatagaagagttctggaaa

SEQ ID NO: 39371 - DNA, 33 bp, Homo sapien
ctttagcctcttgtcaaaaatattgttgggccc

SEQ ID NO: 39372 - DNA, 33 bp, Homo sapien
ctttagcctcttgtcagaaatattgttgggccc

SEQ ID NO: 39373 - DNA, 33 bp, Homo sapien
ttgagcactgactacacccaaggagatgctaag

SEQ ID NO: 39374 - DNA, 33 bp, Homo sapien
ttgagcactgactacatccaaggagatgctaag

SEQ ID NO: 39375 - DNA, 33 bp, Homo sapien
agaggtgtttccctaacgcctaagttgtgagtg

SEQ ID NO: 39376 - DNA, 33 bp, Homo sapien
agaggtgtttccctaatgcctaagttgtgagtg

SEQ ID NO: 39377 - DNA, 33 bp, Homo sapien
ttcaatctctgagaaacgaatagtaggctctgc

SEQ ID NO: 39378 - DNA, 33 bp, Homo sapien
ttcaatctctgagaaatgaatagtaggctctgc

SEQ ID NO: 39379 - DNA, 33 bp, Homo sapien
ctgacagacccactagacaatgctcaaatgggg

SEQ ID NO: 39380 - DNA, 33 bp, Homo sapien
ctgacagacccactaggcaatgctcaaatgggg

SEQ ID NO: 39381 - DNA, 33 bp, Homo sapien
gaagaagtacagatctcaatgtttgcctgaaat

SEQ ID NO: 39382 - DNA, 33 bp, Homo sapien
gaagaagtacagatcttaatgtttgcctgaaat

SEQ ID NO: 39383 - DNA, 33 bp, Homo sapien
tgttgcatcttggcaaacctggaatgtcacaac

SEQ ID NO: 39384 - DNA, 33 bp, Homo sapien
tgttgcatcttggcaagcctggaatgtcacaac

SEQ ID NO: 39385 - DNA, 33 bp, Homo sapien
ccagtaaggttcactcgagatactatgtcagca

SEQ ID NO: 39386 - DNA, 33 bp, Homo sapien
ccagtaaggttcactctagatactatgtcagca

SEQ ID NO: 39387 - DNA, 33 bp, Homo sapien
tagttcacatcaaatcagaaataaaaacctaaa

SEQ ID NO: 39388 - DNA, 33 bp, Homo sapien
tagttcacatcaaatcggaaataaaaacctaaa

SEQ ID NO: 39389 - DNA, 33 bp, Homo sapien
gcaattaacagcattaacaaaactaggtgctta

SEQ ID NO: 39390 - DNA, 33 bp, Homo sapien
gcaattaacagcattagcaaaactaggtgctta

SEQ ID NO: 39391 - DNA, 33 bp, Homo sapien
tgtaataaaacaaagacggatgataacaaatgc

SEQ ID NO: 39392 - DNA, 33 bp, Homo sapien
tgtaataaaacaaagatggatgataacaaatgc

SEQ ID NO: 39393 - DNA, 33 bp, Homo sapien
gagtattaagtgttaacgtggctgtctagaacc

SEQ ID NO: 39394 - DNA, 33 bp, Homo sapien
gagtattaagtgttaatgtggctgtctagaacc

SEQ ID NO: 39395 - DNA, 33 bp, Homo sapien
aacgtgttagcacaaaaattggagcttgtaaat

SEQ ID NO: 39396 - DNA, 33 bp, Homo sapien
aacgtgttagcacaaatattggagcttgtaaat

SEQ ID NO: 39397 - DNA, 33 bp, Homo sapien
ttttattatgcaaccaaccttgccttatgtcat

SEQ ID NO: 39398 - DNA, 33 bp, Homo sapien
ttttattatgcaaccagccttgccttatgtcat

SEQ ID NO: 39399 - DNA, 33 bp, Homo sapien
ttctgtgctttcttagcaaattgtaccatcttc

SEQ ID NO: 39400 - DNA, 33 bp, Homo sapien
ttctgtgctttcttagtaaattgtaccatcttc

SEQ ID NO: 39401 - DNA, 33 bp, Homo sapien
atgctctttatccaaacggggcctctacacaca

SEQ ID NO: 39402 - DNA, 33 bp, Homo sapien
atgctctttatccaaagggggcctctacacaca

SEQ ID NO: 39403 - DNA, 33 bp, Homo sapien
tcatattgtggttgaacagacaggcagttggcc

SEQ ID NO: 39404 - DNA, 33 bp, Homo sapien
tcatattgtggttgaatagacaggcagttggcc

SEQ ID NO: 39405 - DNA, 33 bp, Homo sapien
cttcatgccaacaggacactgaaggtctgaaag

SEQ ID NO: 39406 - DNA, 33 bp, Homo sapien
cttcatgccaacaggatactgaaggtctgaaag

SEQ ID NO: 39407 - DNA, 33 bp, Homo sapien
atgctgttaattaaaaaccagagatttacatct

SEQ ID NO: 39408 - DNA, 33 bp, Homo sapien
atgctgttaattaaaagccagagatttacatct

SEQ ID NO: 39409 - DNA, 33 bp, Homo sapien
ttattgtgttgtcacccggagaacttacaagca

SEQ ID NO: 39410 - DNA, 33 bp, Homo sapien
ttattgtgttgtcacctggagaacttacaagca

SEQ ID NO: 39411 - DNA, 33 bp, Homo sapien
tataaaatacctgacacctatacattttccctc

SEQ ID NO: 39412 - DNA, 33 bp, Homo sapien
tataaaatacctgacatctatacattttccctc

SEQ ID NO: 39413 - DNA, 33 bp, Homo sapien
tatgccatctcaaggagaactctgccagtatca

SEQ ID NO: 39414 - DNA, 33 bp, Homo sapien
tatgccatctcaaggataactctgccagtatca

SEQ ID NO: 39415 - DNA, 33 bp, Homo sapien
ggagaaattaacagccagatagctcctcagtgg

SEQ ID NO: 39416 - DNA, 33 bp, Homo sapien
ggagaaattaacagccggatagctcctcagtgg

SEQ ID NO: 39417 - DNA, 33 bp, Homo sapien
aatgaaagtttttgtacaacatgaagcttctga

SEQ ID NO: 39418 - DNA, 33 bp, Homo sapien
aatgaaagtttttgtagaacatgaagcttctga

SEQ ID NO: 39419 - DNA, 33 bp, Homo sapien
catgtagtaaatgctcaacaaatattactaaca

SEQ ID NO: 39420 - DNA, 33 bp, Homo sapien
catgtagtaaatgctcgacaaatattactaaca

SEQ ID NO: 39421 - DNA, 33 bp, Homo sapien
attaagtgttgcttaggatccaaaaataatagt

SEQ ID NO: 39422 - DNA, 33 bp, Homo sapien
attaagtgttgcttagtatccaaaaataatagt

SEQ ID NO: 39423 - DNA, 33 bp, Homo sapien
cgtgacatatgcccaacagtcaagggtggaaaa

SEQ ID NO: 39424 - DNA, 33 bp, Homo sapien
cgtgacatatgcccaagagtcaagggtggaaaa

SEQ ID NO: 39425 - DNA, 33 bp, Homo sapien
atgagtgtctgccgggaaattcctggcactacg

SEQ ID NO: 39426 - DNA, 33 bp, Homo sapien
atgagtgtctgccgggcaattcctggcactacg

SEQ ID NO: 39427 - DNA, 33 bp, Homo sapien
cctctcccaagtcttaccctgagtacactccag

SEQ ID NO: 39428 - DNA, 33 bp, Homo sapien
cctctcccaagtcttatcctgagtacactccag

SEQ ID NO: 39429 - DNA, 33 bp, Homo sapien
tcacatatcttctccagatgatgattccgattt

SEQ ID NO: 39430 - DNA, 33 bp, Homo sapien
tcacatatcttctccatatgatgattccgattt

SEQ ID NO: 39431 - DNA, 33 bp, Homo sapien
tggttttaagcagagaaatgaaaggaacagatt

SEQ ID NO: 39432 - DNA, 33 bp, Homo sapien
tggttttaagcagagacatgaaaggaacagatt

SEQ ID NO: 39433 - DNA, 33 bp, Homo sapien
ctactaatactgtggccaaatccaaggatgggt

SEQ ID NO: 39434 - DNA, 33 bp, Homo sapien
ctactaatactgtggctaaatccaaggatgggt

SEQ ID NO: 39435 - DNA, 33 bp, Homo sapien
cagaccctggtctctacgaatccagagtctact

SEQ ID NO: 39436 - DNA, 33 bp, Homo sapien
cagaccctggtctctatgaatccagagtctact

SEQ ID NO: 39437 - DNA, 33 bp, Homo sapien
tggttagagacaagacggattcaagaaagtgaa

SEQ ID NO: 39438 - DNA, 33 bp, Homo sapien
tggttagagacaagactgattcaagaaagtgaa

SEQ ID NO: 39439 - DNA, 33 bp, Homo sapien
tcctacagctctagcaccttccaaaatcataac

SEQ ID NO: 39440 - DNA, 33 bp, Homo sapien
tcctacagctctagcatcttccaaaatcataac

SEQ ID NO: 39441 - DNA, 33 bp, Homo sapien
cccagactctggagaaattccaatagaagctga

SEQ ID NO: 39442 - DNA, 33 bp, Homo sapien
cccagactctggagaagttccaatagaagctga

SEQ ID NO: 39443 - DNA, 33 bp, Homo sapien
atcaataaaatgaatgacatcactgaatccaag

SEQ ID NO: 39444 - DNA, 33 bp, Homo sapien
atcaataaaatgaatggcatcactgaatccaag

SEQ ID NO: 39445 - DNA, 33 bp, Homo sapien
tgatgttactgtggtacgactcctaagggtggg

SEQ ID NO: 39446 - DNA, 33 bp, Homo sapien
tgatgttactgtggtaggactcctaagggtggg

SEQ ID NO: 39447 - DNA, 33 bp, Homo sapien
ctccacaatttcacaccgcagaaccactgaagc

SEQ ID NO: 39448 - DNA, 33 bp, Homo sapien
ctccacaatttcacactgcagaaccactgaagc

SEQ ID NO: 39449 - DNA, 33 bp, Homo sapien
tttatcaagacaagtacgcaatgaggaagttgg

SEQ ID NO: 39450 - DNA, 33 bp, Homo sapien
tttatcaagacaagtatgcaatgaggaagttgg

SEQ ID NO: 39451 - DNA, 33 bp, Homo sapien
gtgatgcaagacctcaatccccaagttggatga

SEQ ID NO: 39452 - DNA, 33 bp, Homo sapien
gtgatgcaagacctcagtccccaagttggatga

SEQ ID NO: 39453 - DNA, 33 bp, Homo sapien
gttcttttgcttcccccggattggcagttccta

SEQ ID NO: 39454 - DNA, 33 bp, Homo sapien
gttcttttgcttcccctggattggcagttccta

SEQ ID NO: 39455 - DNA, 33 bp, Homo sapien
ctgagcaactcaggaaaagaagaagaaaaacat

SEQ ID NO: 39456 - DNA, 33 bp, Homo sapien
ctgagcaactcaggaagagaagaagaaaaacat

SEQ ID NO: 39457 - DNA, 33 bp, Homo sapien
taaaacaccttcagaaaagagcactttaaccta

SEQ ID NO: 39458 - DNA, 33 bp, Homo sapien
taaaacaccttcagaatagagcactttaaccta

SEQ ID NO: 39459 - DNA, 33 bp, Homo sapien
gaaactctgcccttgaggaaacgggccttagct

SEQ ID NO: 39460 - DNA, 33 bp, Homo sapien
gaaactctgcccttgatgaaacgggccttagct

SEQ ID NO: 39461 - DNA, 33 bp, Homo sapien
actgtttatttctttccctgttttccatgtgcc

SEQ ID NO: 39462 - DNA, 33 bp, Homo sapien
actgtttatttctttctctgttttccatgtgcc

SEQ ID NO: 39463 - DNA, 33 bp, Homo sapien
gctggtatagtttgtcccttccccactgtatgg

SEQ ID NO: 39464 - DNA, 33 bp, Homo sapien
gctggtatagtttgtctcttccccactgtatgg

SEQ ID NO: 39465 - DNA, 33 bp, Homo sapien
aatttcctaagaagcacataacgaattcatgtt

SEQ ID NO: 39466 - DNA, 33 bp, Homo sapien
aatttcctaagaagcatataacgaattcatgtt

SEQ ID NO: 39467 - DNA, 33 bp, Homo sapien
ctcaataatttgctgacaaaaactcttacattt

SEQ ID NO: 39468 - DNA, 33 bp, Homo sapien
ctcaataatttgctgataaaaactcttacattt

SEQ ID NO: 39469 - DNA, 33 bp, Homo sapien
tggcagtccagggaccagggagaacatggacag

SEQ ID NO: 39470 - DNA, 33 bp, Homo sapien
tggcagtccagggaccggggagaacatggacag

SEQ ID NO: 39471 - DNA, 33 bp, Homo sapien
cttaaacttacataccaccttcccacacacata

SEQ ID NO: 39472 - DNA, 33 bp, Homo sapien
cttaaacttacatacctccttcccacacacata

SEQ ID NO: 39473 - DNA, 33 bp, Homo sapien
gcagaagggtattttacagcttttcgaagaaga

SEQ ID NO: 39474 - DNA, 33 bp, Homo sapien
gcagaagggtattttatagcttttcgaagaaga

SEQ ID NO: 39475 - DNA, 33 bp, Homo sapien
ttgtaggattctcagtaaattaattctttctcg

SEQ ID NO: 39476 - DNA, 33 bp, Homo sapien
ttgtaggattctcagtgaattaattctttctcg

SEQ ID NO: 39477 - DNA, 33 bp, Homo sapien
ccattttctcaaagacaacttctatattctcat

SEQ ID NO: 39478 - DNA, 33 bp, Homo sapien
ccattttctcaaagacgacttctatattctcat

SEQ ID NO: 39479 - DNA, 33 bp, Homo sapien
cttctgctagtatgaaacttgagcaagcatggg

SEQ ID NO: 39480 - DNA, 33 bp, Homo sapien
cttctgctagtatgaatcttgagcaagcatggg

SEQ ID NO: 39481 - DNA, 33 bp, Homo sapien
ctattacacaagaccaaccatcatcatatattt

SEQ ID NO: 39482 - DNA, 33 bp, Homo sapien
ctattacacaagaccatccatcatcatatattt

SEQ ID NO: 39483 - DNA, 33 bp, Homo sapien
ttatgccaatacactacgcaaccgtgttagagg

SEQ ID NO: 39484 - DNA, 33 bp, Homo sapien
ttatgccaatacactatgcaaccgtgttagagg

SEQ ID NO: 39485 - DNA, 33 bp, Homo sapien
cagtggacttgattcacctgttactttccagca

SEQ ID NO: 39486 - DNA, 33 bp, Homo sapien
cagtggacttgattcatctgttactttccagca

SEQ ID NO: 39487 - DNA, 33 bp, Homo sapien
aaataaataaccctcaaatcacagcagggcatg

SEQ ID NO: 39488 - DNA, 33 bp, Homo sapien
aaataaataaccctcacatcacagcagggcatg

SEQ ID NO: 39489 - DNA, 33 bp, Homo sapien
gcaggtgcaggtctacaggactgattaggaatg

SEQ ID NO: 39490 - DNA, 33 bp, Homo sapien
gcaggtgcaggtctaccggactgattaggaatg

SEQ ID NO: 39491 - DNA, 33 bp, Homo sapien
ttgcatgaaaatgctgcatgtaagagtttctcc

SEQ ID NO: 39492 - DNA, 33 bp, Homo sapien
ttgcatgaaaatgctggatgtaagagtttctcc

SEQ ID NO: 39493 - DNA, 33 bp, Homo sapien
tgaaggagatcaagtacgtgaatgcacctagtg

SEQ ID NO: 39494 - DNA, 33 bp, Homo sapien
tgaaggagatcaagtatgtgaatgcacctagtg

SEQ ID NO: 39495 - DNA, 33 bp, Homo sapien
ggatcaaatccaggaccaattacaagaaaggac

SEQ ID NO: 39496 - DNA, 33 bp, Homo sapien
ggatcaaatccaggacgaattacaagaaaggac

SEQ ID NO: 39497 - DNA, 33 bp, Homo sapien
gagagtcttcaccaaagtcaacccaagtgactt

SEQ ID NO: 39498 - DNA, 33 bp, Homo sapien
gagagtcttcaccaaattcaacccaagtgactt

SEQ ID NO: 39499 - DNA, 33 bp, Homo sapien
aacaattgcaatagagccatcaaagatcactga

SEQ ID NO: 39500 - DNA, 33 bp, Homo sapien
aacaattgcaatagaggcatcaaagatcactga

SEQ ID NO: 39501 - DNA, 33 bp, Homo sapien
tagctcattccagcaccggcccaaaagtccaag

SEQ ID NO: 39502 - DNA, 33 bp, Homo sapien
tagctcattccagcactggcccaaaagtccaag

SEQ ID NO: 39503 - DNA, 33 bp, Homo sapien
ggttccagtgactatacacgtagacttaggaac

SEQ ID NO: 39504 - DNA, 33 bp, Homo sapien
ggttccagtgactatatacgtagacttaggaac

SEQ ID NO: 39505 - DNA, 33 bp, Homo sapien
tctgtgtcctcatagaaaaaacattgacaagaa

SEQ ID NO: 39506 - DNA, 33 bp, Homo sapien
tctgtgtcctcatagagaaaacattgacaagaa

SEQ ID NO: 39507 - DNA, 33 bp, Homo sapien
cattattctctgcaggccatagctttctgtttg

SEQ ID NO: 39508 - DNA, 33 bp, Homo sapien
cattattctctgcaggtcatagctttctgtttg

SEQ ID NO: 39509 - DNA, 33 bp, Homo sapien
tggatcaggaatcagaagtcatatggatctgcc

SEQ ID NO: 39510 - DNA, 33 bp, Homo sapien
tggatcaggaatcagatgtcatatggatctgcc

SEQ ID NO: 39511 - DNA, 33 bp, Homo sapien
ctatctcactcaaagacgtagctcaagaggcac

SEQ ID NO: 39512 - DNA, 33 bp, Homo sapien
ctatctcactcaaagatgtagctcaagaggcac

SEQ ID NO: 39513 - DNA, 33 bp, Homo sapien
cagagagaatccaatccgactctcagccaatca

SEQ ID NO: 39514 - DNA, 33 bp, Homo sapien
cagagagaatccaatctgactctcagccaatca

SEQ ID NO: 39515 - DNA, 33 bp, Homo sapien
ttctggcttaaatgtcccttaaatctactttcc

SEQ ID NO: 39516 - DNA, 33 bp, Homo sapien
ttctggcttaaatgtctcttaaatctactttcc

SEQ ID NO: 39517 - DNA, 33 bp, Homo sapien
gagaaattgagcattcacttcccttgggaattg

SEQ ID NO: 39518 - DNA, 33 bp, Homo sapien
gagaaattgagcattcgcttcccttgggaattg

SEQ ID NO: 39519 - DNA, 33 bp, Homo sapien
tataaaccaccaaaatcagaactacaggcaatc

SEQ ID NO: 39520 - DNA, 33 bp, Homo sapien
tataaaccaccaaaatgagaactacaggcaatc

SEQ ID NO: 39521 - DNA, 33 bp, Homo sapien
cagcagctccctatcactgaatcctgaattctc

SEQ ID NO: 39522 - DNA, 33 bp, Homo sapien
cagcagctccctatcattgaatcctgaattctc

SEQ ID NO: 39523 - DNA, 33 bp, Homo sapien
aataatctatttgccaaaagaactcatcacaaa

SEQ ID NO: 39524 - DNA, 33 bp, Homo sapien
aataatctatttgccagaagaactcatcacaaa

SEQ ID NO: 39525 - DNA, 33 bp, Homo sapien
ttatcaggcatataaaactgaggctagaagttg

SEQ ID NO: 39526 - DNA, 33 bp, Homo sapien
ttatcaggcatataaagctgaggctagaagttg

SEQ ID NO: 39527 - DNA, 33 bp, Homo sapien
ccctgtggatcacaaacagcatataattggata

SEQ ID NO: 39528 - DNA, 33 bp, Homo sapien
ccctgtggatcacaaagagcatataattggata

SEQ ID NO: 39529 - DNA, 33 bp, Homo sapien
ctacactagtgaagaaatgagtatgtaatagaa

SEQ ID NO: 39530 - DNA, 33 bp, Homo sapien
ctacactagtgaagaagtgagtatgtaatagaa

SEQ ID NO: 39531 - DNA, 33 bp, Homo sapien
ggtggtatatttatagacctgtgctttacagaa

SEQ ID NO: 39532 - DNA, 33 bp, Homo sapien
ggtggtatatttatagccctgtgctttacagaa

SEQ ID NO: 39533 - DNA, 33 bp, Homo sapien
ctttgtgaagtagcaaatgaaggttggagtatg

SEQ ID NO: 39534 - DNA, 33 bp, Homo sapien
ctttgtgaagtagcaagtgaaggttggagtatg

SEQ ID NO: 39535 - DNA, 33 bp, Homo sapien
tcagtaattaactatccagtgaatgaatgtgta

SEQ ID NO: 39536 - DNA, 33 bp, Homo sapien
tcagtaattaactatcgagtgaatgaatgtgta

SEQ ID NO: 39537 - DNA, 33 bp, Homo sapien
tgctctcatcactctgaatcccaaacctcattt

SEQ ID NO: 39538 - DNA, 33 bp, Homo sapien
tgctctcatcactctgcatcccaaacctcattt

SEQ ID NO: 39539 - DNA, 33 bp, Homo sapien
tcagatgtattttgaacttactgctggcctagc

SEQ ID NO: 39540 - DNA, 33 bp, Homo sapien
tcagatgtattttgaagttactgctggcctagc

SEQ ID NO: 39541 - DNA, 33 bp, Homo sapien
ttctgcaagttccttacgtctcctccttccatt

SEQ ID NO: 39542 - DNA, 33 bp, Homo sapien
ttctgcaagttccttatgtctcctccttccatt

SEQ ID NO: 39543 - DNA, 33 bp, Homo sapien
atagtggcctggaacaacacgtagccatatagg

SEQ ID NO: 39544 - DNA, 33 bp, Homo sapien
atagtggcctggaacagcacgtagccatatagg

SEQ ID NO: 39545 - DNA, 33 bp, Homo sapien
gtcacaggtaaggaacagatggcttcaaatatg

SEQ ID NO: 39546 - DNA, 33 bp, Homo sapien
gtcacaggtaaggaacggatggcttcaaatatg

SEQ ID NO: 39547 - DNA, 33 bp, Homo sapien
atctgctactcacagaagtcaatgtaattcttt

SEQ ID NO: 39548 - DNA, 33 bp, Homo sapien
atctgctactcacagaggtcaatgtaattcttt

SEQ ID NO: 39549 - DNA, 33 bp, Homo sapien
cgtttcagaaaatttcacaggttggtttcatag

SEQ ID NO: 39550 - DNA, 33 bp, Homo sapien
cgtttcagaaaatttcgcaggttggtttcatag

SEQ ID NO: 39551 - DNA, 33 bp, Homo sapien
tctttttcttctttcaactgatttttggactca

SEQ ID NO: 39552 - DNA, 33 bp, Homo sapien
tctttttcttctttcagctgatttttggactca

SEQ ID NO: 39553 - DNA, 33 bp, Homo sapien
tgatacaaacgataccaaagtttctcctagtct

SEQ ID NO: 39554 - DNA, 33 bp, Homo sapien
tgatacaaacgataccgaagtttctcctagtct

SEQ ID NO: 39555 - DNA, 33 bp, Homo sapien
ctgttcatttgttgagaaaatttatattgagtc

SEQ ID NO: 39556 - DNA, 33 bp, Homo sapien
ctgttcatttgttgagcaaatttatattgagtc

SEQ ID NO: 39557 - DNA, 33 bp, Homo sapien
gagggagatatagaagccaggaaaggggagcaa

SEQ ID NO: 39558 - DNA, 33 bp, Homo sapien
gagggagatatagaagtcaggaaaggggagcaa

SEQ ID NO: 39559 - DNA, 33 bp, Homo sapien
accacttggaggctgaaagtatcattaacaaaa

SEQ ID NO: 39560 - DNA, 33 bp, Homo sapien
accacttggaggctgacagtatcattaacaaaa

SEQ ID NO: 39561 - DNA, 33 bp, Homo sapien
ttaagtttacataagggaagcttttagaaatca

SEQ ID NO: 39562 - DNA, 33 bp, Homo sapien
ttaagtttacataaggtaagcttttagaaatca

SEQ ID NO: 39563 - DNA, 33 bp, Homo sapien
gtgatattctcaactccgaaagtgagacccatc

SEQ ID NO: 39564 - DNA, 33 bp, Homo sapien
gtgatattctcaactctgaaagtgagacccatc

SEQ ID NO: 39565 - DNA, 33 bp, Homo sapien
tgcatcatcatcagaggcaaagaagaacattac

SEQ ID NO: 39566 - DNA, 33 bp, Homo sapien
tgcatcatcatcagagtcaaagaagaacattac

SEQ ID NO: 39567 - DNA, 33 bp, Homo sapien
tatgtctcaaaaaaaaataggtgttacaatact

SEQ ID NO: 39568 - DNA, 33 bp, Homo sapien
tatgtctcaaaaaaaattaggtgttacaatact

SEQ ID NO: 39569 - DNA, 33 bp, Homo sapien
atttctcataatgctaggggtgataaggtggtt

SEQ ID NO: 39570 - DNA, 33 bp, Homo sapien
atttctcataatgctatgggtgataaggtggtt

SEQ ID NO: 39571 - DNA, 33 bp, Homo sapien
gcattttttccaaaccaaggacctctgggtatg

SEQ ID NO: 39572 - DNA, 33 bp, Homo sapien
gcattttttccaaaccgaggacctctgggtatg

SEQ ID NO: 39573 - DNA, 33 bp, Homo sapien
gagtaaaaggaaccacagcatagaattttggtg

SEQ ID NO: 39574 - DNA, 33 bp, Homo sapien
gagtaaaaggaaccacggcatagaattttggtg

SEQ ID NO: 39575 - DNA, 33 bp, Homo sapien
atgtttcaggatgatccgagtacccgccacatg

SEQ ID NO: 39576 - DNA, 33 bp, Homo sapien
atgtttcaggatgatctgagtacccgccacatg

SEQ ID NO: 39577 - DNA, 33 bp, Homo sapien
catgtgagacaccagcagctgaagaggaggcca

SEQ ID NO: 39578 - DNA, 33 bp, Homo sapien
catgtgagacaccagcggctgaagaggaggcca

SEQ ID NO: 39579 - DNA, 33 bp, Homo sapien
tttgtagggacatgaacgaaagaggtggagcct

SEQ ID NO: 39580 - DNA, 33 bp, Homo sapien
tttgtagggacatgaatgaaagaggtggagcct

SEQ ID NO: 39581 - DNA, 33 bp, Homo sapien
ttaggcttatatgcagaagtaatgtttactctt

SEQ ID NO: 39582 - DNA, 33 bp, Homo sapien
ttaggcttatatgcaggagtaatgtttactctt

SEQ ID NO: 39583 - DNA, 33 bp, Homo sapien
ctatggtagctgtgtggaacttcagttgacctc

SEQ ID NO: 39584 - DNA, 33 bp, Homo sapien
ctatggtagctgtgtgtaacttcagttgacctc

SEQ ID NO: 39585 - DNA, 33 bp, Homo sapien
gctaccatagggagagcaaaacacaggattcca

SEQ ID NO: 39586 - DNA, 33 bp, Homo sapien
gctaccatagggagaggaaaacacaggattcca

SEQ ID NO: 39587 - DNA, 33 bp, Homo sapien
taaattgaaggtgaatcagatgatccgtgggaa

SEQ ID NO: 39588 - DNA, 33 bp, Homo sapien
taaattgaaggtgaattagatgatccgtgggaa

SEQ ID NO: 39589 - DNA, 33 bp, Homo sapien
cattacttttcgagtaccagtggcaacagtgag

SEQ ID NO: 39590 - DNA, 33 bp, Homo sapien
cattacttttcgagtatcagtggcaacagtgag

SEQ ID NO: 39591 - DNA, 33 bp, Homo sapien
gagtggtttacttcgcagaggatggtagcaagc

SEQ ID NO: 39592 - DNA, 33 bp, Homo sapien
gagtggtttacttcgcggaggatggtagcaagc

SEQ ID NO: 39593 - DNA, 33 bp, Homo sapien
ttatttctcaaaaataaagttcttggagaatgc

SEQ ID NO: 39594 - DNA, 33 bp, Homo sapien
ttatttctcaaaaatatagttcttggagaatgc

SEQ ID NO: 39595 - DNA, 33 bp, Homo sapien
taatgatagcaataaaacttatcataaattcat

SEQ ID NO: 39596 - DNA, 33 bp, Homo sapien
taatgatagcaataaaccttatcataaattcat

SEQ ID NO: 39597 - DNA, 33 bp, Homo sapien
ctctcccacattcttaccctgacctttccttta

SEQ ID NO: 39598 - DNA, 33 bp, Homo sapien
ctctcccacattcttatcctgacctttccttta

SEQ ID NO: 39599 - DNA, 33 bp, Homo sapien
aagagcacatggtctaggctaggccaattaaag

SEQ ID NO: 39600 - DNA, 33 bp, Homo sapien
aagagcacatggtctatgctaggccaattaaag

SEQ ID NO: 39601 - DNA, 33 bp, Homo sapien
tttttcacctaaagtggcactcaaggtcaaagt

SEQ ID NO: 39602 - DNA, 33 bp, Homo sapien
tttttcacctaaagtgtcactcaaggtcaaagt

SEQ ID NO: 39603 - DNA, 33 bp, Homo sapien
tattgtggggtttattcaaatccaagaaagagt

SEQ ID NO: 39604 - DNA, 33 bp, Homo sapien
tattgtggggtttattgaaatccaagaaagagt

SEQ ID NO: 39605 - DNA, 33 bp, Homo sapien
tcacaagttaaatggaagaaatgaggttttttt

SEQ ID NO: 39606 - DNA, 33 bp, Homo sapien
tcacaagttaaatggatgaaatgaggttttttt

SEQ ID NO: 39607 - DNA, 33 bp, Homo sapien
tttcctttcattcacaatgactcttgttacagc

SEQ ID NO: 39608 - DNA, 33 bp, Homo sapien
tttcctttcattcacagtgactcttgttacagc

SEQ ID NO: 39609 - DNA, 33 bp, Homo sapien
agacaacatccaaaaacggctaacttgaacaaa

SEQ ID NO: 39610 - DNA, 33 bp, Homo sapien
agacaacatccaaaaagggctaacttgaacaaa

SEQ ID NO: 39611 - DNA, 33 bp, Homo sapien
atagacctgggtgtcaacgtcttccacatcttg

SEQ ID NO: 39612 - DNA, 33 bp, Homo sapien
atagacctgggtgtcagcgtcttccacatcttg

SEQ ID NO: 39613 - DNA, 33 bp, Homo sapien
tagttcattagcggtacgaaatggtaaggacct

SEQ ID NO: 39614 - DNA, 33 bp, Homo sapien
tagttcattagcggtatgaaatggtaaggacct

SEQ ID NO: 39615 - DNA, 33 bp, Homo sapien
gagcattcggtgttaccggtctctcaaaatctt

SEQ ID NO: 39616 - DNA, 33 bp, Homo sapien
gagcattcggtgttactggtctctcaaaatctt

SEQ ID NO: 39617 - DNA, 33 bp, Homo sapien
gaaatgctagctttgcaccatttgttagctatg

SEQ ID NO: 39618 - DNA, 33 bp, Homo sapien
gaaatgctagctttgcgccatttgttagctatg

SEQ ID NO: 39619 - DNA, 33 bp, Homo sapien
ctctaaactattctcccacactatttcctttag

SEQ ID NO: 39620 - DNA, 33 bp, Homo sapien
ctctaaactattctcctacactatttcctttag

SEQ ID NO: 39621 - DNA, 33 bp, Homo sapien
ccatacaaacatagccaaaaaaatagagtaaca

SEQ ID NO: 39622 - DNA, 33 bp, Homo sapien
ccatacaaacatagccgaaaaaatagagtaaca

SEQ ID NO: 39623 - DNA, 33 bp, Homo sapien
aaatgcttaaaatttacgtgagttttctgcata

SEQ ID NO: 39624 - DNA, 33 bp, Homo sapien
aaatgcttaaaatttatgtgagttttctgcata

SEQ ID NO: 39625 - DNA, 33 bp, Homo sapien
cttcaataattacatacggattcctagtcccaa

SEQ ID NO: 39626 - DNA, 33 bp, Homo sapien
cttcaataattacatatggattcctagtcccaa

SEQ ID NO: 39627 - DNA, 33 bp, Homo sapien
tgagaagtaaatgtgaaaaagtatatgaagagc

SEQ ID NO: 39628 - DNA, 33 bp, Homo sapien
tgagaagtaaatgtgagaaagtatatgaagagc

SEQ ID NO: 39629 - DNA, 33 bp, Homo sapien
catatacaaaactcaacttccatgtgtttcctg

SEQ ID NO: 39630 - DNA, 33 bp, Homo sapien
catatacaaaactcaatttccatgtgtttcctg

SEQ ID NO: 39631 - DNA, 33 bp, Homo sapien
gaaaatggtatctccaatcatagtatttcatca

SEQ ID NO: 39632 - DNA, 33 bp, Homo sapien
gaaaatggtatctccagtcatagtatttcatca

SEQ ID NO: 39633 - DNA, 33 bp, Homo sapien
tataacttcagagaaaagacagatcattataca

SEQ ID NO: 39634 - DNA, 33 bp, Homo sapien
tataacttcagagaaaggacagatcattataca

SEQ ID NO: 39635 - DNA, 33 bp, Homo sapien
tcctattctgtttttaagatgatgaatatgatc

SEQ ID NO: 39636 - DNA, 33 bp, Homo sapien
tcctattctgtttttacgatgatgaatatgatc

SEQ ID NO: 39637 - DNA, 33 bp, Homo sapien
ttatttaaaattgccaataaacctgatttcata

SEQ ID NO: 39638 - DNA, 33 bp, Homo sapien
ttatttaaaattgccagtaaacctgatttcata

SEQ ID NO: 39639 - DNA, 33 bp, Homo sapien
tgctgatggaaatttcaatatcatcctttgctc

SEQ ID NO: 39640 - DNA, 33 bp, Homo sapien
tgctgatggaaatttcgatatcatcctttgctc

SEQ ID NO: 39641 - DNA, 33 bp, Homo sapien
agagaagtaaaactgaaacgacctcagattcta

SEQ ID NO: 39642 - DNA, 33 bp, Homo sapien
agagaagtaaaactgagacgacctcagattcta

SEQ ID NO: 39643 - DNA, 33 bp, Homo sapien
tttctcacatttcaaacctagagttatatttca

SEQ ID NO: 39644 - DNA, 33 bp, Homo sapien
tttctcacatttcaaatctagagttatatttca

SEQ ID NO: 39645 - DNA, 33 bp, Homo sapien
gtagccgttaagctccacaaatcacatttaatc

SEQ ID NO: 39646 - DNA, 33 bp, Homo sapien
gtagccgttaagctccgcaaatcacatttaatc

SEQ ID NO: 39647 - DNA, 33 bp, Homo sapien
ggtagttgtcttgagtaaatatctctactaata

SEQ ID NO: 39648 - DNA, 33 bp, Homo sapien
ggtagttgtcttgagttaatatctctactaata

SEQ ID NO: 39649 - DNA, 33 bp, Homo sapien
cgctaatttggtctataaagtccaggctggctt

SEQ ID NO: 39650 - DNA, 33 bp, Homo sapien
cgctaatttggtctatgaagtccaggctggctt

SEQ ID NO: 39651 - DNA, 33 bp, Homo sapien
ctgtgtagcctttaaaaaattgtggtaaaatat

SEQ ID NO: 39652 - DNA, 33 bp, Homo sapien
ctgtgtagcctttaaacaattgtggtaaaatat

SEQ ID NO: 39653 - DNA, 33 bp, Homo sapien
catttcaggacaccatcatctgccagttttcca

SEQ ID NO: 39654 - DNA, 33 bp, Homo sapien
catttcaggacaccattatctgccagttttcca

SEQ ID NO: 39655 - DNA, 33 bp, Homo sapien
cagacttccatttagaacaaagttaggaactgc

SEQ ID NO: 39656 - DNA, 33 bp, Homo sapien
cagacttccatttagatcaaagttaggaactgc

SEQ ID NO: 39657 - DNA, 33 bp, Homo sapien
ctttccagttcatagacggagttgtgcttaaga

SEQ ID NO: 39658 - DNA, 33 bp, Homo sapien
ctttccagttcatagatggagttgtgcttaaga

SEQ ID NO: 39659 - DNA, 33 bp, Homo sapien
acaaacttgtgagcaaaagtgtattttcttaag

SEQ ID NO: 39660 - DNA, 33 bp, Homo sapien
acaaacttgtgagcaacagtgtattttcttaag

SEQ ID NO: 39661 - DNA, 33 bp, Homo sapien
ctgatagctgtagacaaacatactcattaagtc

SEQ ID NO: 39662 - DNA, 33 bp, Homo sapien
ctgatagctgtagacagacatactcattaagtc

SEQ ID NO: 39663 - DNA, 33 bp, Homo sapien
catgggtctcaaacagaaagttacattgttaat

SEQ ID NO: 39664 - DNA, 33 bp, Homo sapien
catgggtctcaaacaggaagttacattgttaat

SEQ ID NO: 39665 - DNA, 33 bp, Homo sapien
aatgtatatgtagattaaaaatgtttactagtt

SEQ ID NO: 39666 - DNA, 33 bp, Homo sapien
aatgtatatgtagatttaaaatgtttactagtt

SEQ ID NO: 39667 - DNA, 33 bp, Homo sapien
ggcttctaggccatgcaaggacattgggaaggg

SEQ ID NO: 39668 - DNA, 33 bp, Homo sapien
ggcttctaggccatgcgaggacattgggaaggg

SEQ ID NO: 39669 - DNA, 33 bp, Homo sapien
aatagtcaagagaggcaaaaggtccttgcagcc

SEQ ID NO: 39670 - DNA, 33 bp, Homo sapien
aatagtcaagagaggccaaaggtccttgcagcc

SEQ ID NO: 39671 - DNA, 33 bp, Homo sapien
aatggctgtgatggccagagacagaaatatgga

SEQ ID NO: 39672 - DNA, 33 bp, Homo sapien
aatggctgtgatggccggagacagaaatatgga

SEQ ID NO: 39673 - DNA, 33 bp, Homo sapien
gcataatactctattgcaaggagatgacatact

SEQ ID NO: 39674 - DNA, 33 bp, Homo sapien
gcataatactctattgtaaggagatgacatact

SEQ ID NO: 39675 - DNA, 33 bp, Homo sapien
gtggctagtgcaactgcagaactgggatttttg

SEQ ID NO: 39676 - DNA, 33 bp, Homo sapien
gtggctagtgcaactgtagaactgggatttttg

SEQ ID NO: 39677 - DNA, 33 bp, Homo sapien
cagaggcagatttcaccccatagctttctaaca

SEQ ID NO: 39678 - DNA, 33 bp, Homo sapien
cagaggcagatttcactccatagctttctaaca

SEQ ID NO: 39679 - DNA, 33 bp, Homo sapien
tagaaaatatcctcaaagagtaaaatgcattgc

SEQ ID NO: 39680 - DNA, 33 bp, Homo sapien
tagaaaatatcctcaaggagtaaaatgcattgc

SEQ ID NO: 39681 - DNA, 33 bp, Homo sapien
atatattgcaggaaaacagtcttcttagtgtcc

SEQ ID NO: 39682 - DNA, 33 bp, Homo sapien
atatattgcaggaaaatagtcttcttagtgtcc

SEQ ID NO: 39683 - DNA, 33 bp, Homo sapien
aaaatcatcctggataacataaataagagctac

SEQ ID NO: 39684 - DNA, 33 bp, Homo sapien
aaaatcatcctggatagcataaataagagctac

SEQ ID NO: 39685 - DNA, 33 bp, Homo sapien
attggtctttcaatctaacaacggaaaatttct

SEQ ID NO: 39686 - DNA, 33 bp, Homo sapien
attggtctttcaatctgacaacggaaaatttct

SEQ ID NO: 39687 - DNA, 33 bp, Homo sapien
tccatcacctagttcacagacaggctcacagca

SEQ ID NO: 39688 - DNA, 33 bp, Homo sapien
tccatcacctagttcatagacaggctcacagca

SEQ ID NO: 39689 - DNA, 33 bp, Homo sapien
attgagtgcttatgatcatcaggcactaggtta

SEQ ID NO: 39690 - DNA, 33 bp, Homo sapien
attgagtgcttatgattatcaggcactaggtta

SEQ ID NO: 39691 - DNA, 33 bp, Homo sapien
tacaactctaaaagcaactttgcattaaaaaaa

SEQ ID NO: 39692 - DNA, 33 bp, Homo sapien
tacaactctaaaagcatctttgcattaaaaaaa

SEQ ID NO: 39693 - DNA, 33 bp, Homo sapien
accttcatgagtagagaaaggacttctgaaagt

SEQ ID NO: 39694 - DNA, 33 bp, Homo sapien
accttcatgagtagaggaaggacttctgaaagt

SEQ ID NO: 39695 - DNA, 33 bp, Homo sapien
atattgcctcttagcaacaaagggatccaaatt

SEQ ID NO: 39696 - DNA, 33 bp, Homo sapien
atattgcctcttagcagcaaagggatccaaatt

SEQ ID NO: 39697 - DNA, 33 bp, Homo sapien
atcactgaatcttgtacgcttgaaaggcagaaa

SEQ ID NO: 39698 - DNA, 33 bp, Homo sapien
atcactgaatcttgtatgcttgaaaggcagaaa

SEQ ID NO: 39699 - DNA, 33 bp, Homo sapien
cacgtcataaacacaccgtataattgattcctg

SEQ ID NO: 39700 - DNA, 33 bp, Homo sapien
cacgtcataaacacactgtataattgattcctg

SEQ ID NO: 39701 - DNA, 33 bp, Homo sapien
ttgactgtagttaaaacacctggttctgcttta

SEQ ID NO: 39702 - DNA, 33 bp, Homo sapien
ttgactgtagttaaaagacctggttctgcttta

SEQ ID NO: 39703 - DNA, 33 bp, Homo sapien
attgtttcggtacttccacccatctggtgaact

SEQ ID NO: 39704 - DNA, 33 bp, Homo sapien
attgtttcggtacttctacccatctggtgaact

SEQ ID NO: 39705 - DNA, 33 bp, Homo sapien
agagccagactgatcaactatttttaaggtttc

SEQ ID NO: 39706 - DNA, 33 bp, Homo sapien
agagccagactgatcacctatttttaaggtttc

SEQ ID NO: 39707 - DNA, 33 bp, Homo sapien
ttgtatttaaactctgaataaaaacatggaata

SEQ ID NO: 39708 - DNA, 33 bp, Homo sapien
ttgtatttaaactctgcataaaaacatggaata

SEQ ID NO: 39709 - DNA, 33 bp, Homo sapien
gctaagcactaaatcaatcatcgagaattattc

SEQ ID NO: 39710 - DNA, 33 bp, Homo sapien
gctaagcactaaatcagtcatcgagaattattc

SEQ ID NO: 39711 - DNA, 33 bp, Homo sapien
ggcattttagaatcagaagaatatcagagttga

SEQ ID NO: 39712 - DNA, 33 bp, Homo sapien
ggcattttagaatcaggagaatatcagagttga

SEQ ID NO: 39713 - DNA, 33 bp, Homo sapien
tatgtgaatgtttgcactatggtacagtagtgg

SEQ ID NO: 39714 - DNA, 33 bp, Homo sapien
tatgtgaatgtttgcattatggtacagtagtgg

SEQ ID NO: 39715 - DNA, 33 bp, Homo sapien
catgtcttctctgagtcacccaaccaagtatca

SEQ ID NO: 39716 - DNA, 33 bp, Homo sapien
catgtcttctctgagttacccaaccaagtatca

SEQ ID NO: 39717 - DNA, 33 bp, Homo sapien
cccatatttctgtctgaagtacacacctatccc

SEQ ID NO: 39718 - DNA, 33 bp, Homo sapien
cccatatttctgtctgtagtacacacctatccc

SEQ ID NO: 39719 - DNA, 33 bp, Homo sapien
tgttccttctgtcagcactcttgtccagagaag

SEQ ID NO: 39720 - DNA, 33 bp, Homo sapien
tgttccttctgtcagcgctcttgtccagagaag

SEQ ID NO: 39721 - DNA, 33 bp, Homo sapien
tccctattctcagcaaattaaaagccaatattt

SEQ ID NO: 39722 - DNA, 33 bp, Homo sapien
tccctattctcagcaatttaaaagccaatattt

SEQ ID NO: 39723 - DNA, 33 bp, Homo sapien
tgacctctgcacttccaaggtattcagtttttt

SEQ ID NO: 39724 - DNA, 33 bp, Homo sapien
tgacctctgcacttcccaggtattcagtttttt

SEQ ID NO: 39725 - DNA, 33 bp, Homo sapien
tggtgggtcactgtagccaaaggaaaatactaa

SEQ ID NO: 39726 - DNA, 33 bp, Homo sapien
tggtgggtcactgtagtcaaaggaaaatactaa

SEQ ID NO: 39727 - DNA, 33 bp, Homo sapien
aaataaatgtcagggccacctctgtgcaagaac

SEQ ID NO: 39728 - DNA, 33 bp, Homo sapien
aaataaatgtcagggctacctctgtgcaagaac

SEQ ID NO: 39729 - DNA, 33 bp, Homo sapien
ggagcaaccaggacccagaaagggcatatggaa

SEQ ID NO: 39730 - DNA, 33 bp, Homo sapien
ggagcaaccaggacccggaaagggcatatggaa

SEQ ID NO: 39731 - DNA, 33 bp, Homo sapien
ttttcttaaaggtttaaacatgtaggacctcag

SEQ ID NO: 39732 - DNA, 33 bp, Homo sapien
ttttcttaaaggtttacacatgtaggacctcag

SEQ ID NO: 39733 - DNA, 33 bp, Homo sapien
tttgccataacacatacagaacctaataatttc

SEQ ID NO: 39734 - DNA, 33 bp, Homo sapien
tttgccataacacatagagaacctaataatttc

SEQ ID NO: 39735 - DNA, 33 bp, Homo sapien
ccactcagggccactaagtagacactggccaaa

SEQ ID NO: 39736 - DNA, 33 bp, Homo sapien
ccactcagggccactacgtagacactggccaaa

SEQ ID NO: 39737 - DNA, 33 bp, Homo sapien
ctgttcatggaagccaatgctaaagacctctga

SEQ ID NO: 39738 - DNA, 33 bp, Homo sapien
ctgttcatggaagccactgctaaagacctctga

SEQ ID NO: 39739 - DNA, 33 bp, Homo sapien
ggtttgcaatctgggcagcaatgtaaagtttca

SEQ ID NO: 39740 - DNA, 33 bp, Homo sapien
ggtttgcaatctgggcggcaatgtaaagtttca

SEQ ID NO: 39741 - DNA, 33 bp, Homo sapien
aataatgccttttaaaatatttcccatgtcttt

SEQ ID NO: 39742 - DNA, 33 bp, Homo sapien
aataatgccttttaaagtatttcccatgtcttt

SEQ ID NO: 39743 - DNA, 33 bp, Homo sapien
aggtcagaagcaaagggcaccaccagaatgttg

SEQ ID NO: 39744 - DNA, 33 bp, Homo sapien
aggtcagaagcaaaggtcaccaccagaatgttg

SEQ ID NO: 39745 - DNA, 33 bp, Homo sapien
attgtgatcataaaaaatcattaaggtatttag

SEQ ID NO: 39746 - DNA, 33 bp, Homo sapien
attgtgatcataaaaagtcattaaggtatttag

SEQ ID NO: 39747 - DNA, 33 bp, Homo sapien
aagaaatgtaatttccaagtccgattgtgtggt

SEQ ID NO: 39748 - DNA, 33 bp, Homo sapien
aagaaatgtaatttccgagtccgattgtgtggt

SEQ ID NO: 39749 - DNA, 33 bp, Homo sapien
tagtcaaaaagatgcacagcaaatcactgatat

SEQ ID NO: 39750 - DNA, 33 bp, Homo sapien
tagtcaaaaagatgcagagcaaatcactgatat

SEQ ID NO: 39751 - DNA, 33 bp, Homo sapien
aaccagcatagcacaacgatagctctcacaccc

SEQ ID NO: 39752 - DNA, 33 bp, Homo sapien
aaccagcatagcacaatgatagctctcacaccc

SEQ ID NO: 39753 - DNA, 33 bp, Homo sapien
aatttgaactctagagactataacctttttgct

SEQ ID NO: 39754 - DNA, 33 bp, Homo sapien
aatttgaactctagagcctataacctttttgct

SEQ ID NO: 39755 - DNA, 33 bp, Homo sapien
ttaaagccagtcacaaattgacattctggtttt

SEQ ID NO: 39756 - DNA, 33 bp, Homo sapien
ttaaagccagtcacaagttgacattctggtttt

SEQ ID NO: 39757 - DNA, 33 bp, Homo sapien
gactctcagaaagtgaataaacctgtctatctg

SEQ ID NO: 39758 - DNA, 33 bp, Homo sapien
gactctcagaaagtgactaaacctgtctatctg

SEQ ID NO: 39759 - DNA, 33 bp, Homo sapien
gataaggaaaaaaaaccgcaaaacagcaagaaa

SEQ ID NO: 39760 - DNA, 33 bp, Homo sapien
gataaggaaaaaaaactgcaaaacagcaagaaa

SEQ ID NO: 39761 - DNA, 33 bp, Homo sapien
ttcatttgtctacttgaagattcagttcaagag

SEQ ID NO: 39762 - DNA, 33 bp, Homo sapien
ttcatttgtctacttgtagattcagttcaagag

SEQ ID NO: 39763 - DNA, 33 bp, Homo sapien
aatgtatggttgtgtacagcagaaactaactct

SEQ ID NO: 39764 - DNA, 33 bp, Homo sapien
aatgtatggttgtgtatagcagaaactaactct

SEQ ID NO: 39765 - DNA, 33 bp, Homo sapien
aacttgctcggcgtacacatctagatgtctact

SEQ ID NO: 39766 - DNA, 33 bp, Homo sapien
aacttgctcggcgtacccatctagatgtctact

SEQ ID NO: 39767 - DNA, 33 bp, Homo sapien
ttcttttttccaaacagtgacattcctgtgttc

SEQ ID NO: 39768 - DNA, 33 bp, Homo sapien
ttcttttttccaaacattgacattcctgtgttc

SEQ ID NO: 39769 - DNA, 33 bp, Homo sapien
gggacctgaagcgagtaaaggaacacaggaatg

SEQ ID NO: 39770 - DNA, 33 bp, Homo sapien
gggacctgaagcgagtgaaggaacacaggaatg

SEQ ID NO: 39771 - DNA, 33 bp, Homo sapien
tttgctgaatgcccaccatgtgtcaagcactct

SEQ ID NO: 39772 - DNA, 33 bp, Homo sapien
tttgctgaatgcccactatgtgtcaagcactct

SEQ ID NO: 39773 - DNA, 33 bp, Homo sapien
ctgttagatggtaagcaccatttagagtatggg

SEQ ID NO: 39774 - DNA, 33 bp, Homo sapien
ctgttagatggtaagcgccatttagagtatggg

SEQ ID NO: 39775 - DNA, 33 bp, Homo sapien
tcttgctatttgaatacgaatggggggaagttt

SEQ ID NO: 39776 - DNA, 33 bp, Homo sapien
tcttgctatttgaataggaatggggggaagttt

SEQ ID NO: 39777 - DNA, 33 bp, Homo sapien
ggttttctaaagcacaacatttcacaaccttat

SEQ ID NO: 39778 - DNA, 33 bp, Homo sapien
ggttttctaaagcacagcatttcacaaccttat

SEQ ID NO: 39779 - DNA, 33 bp, Homo sapien
caaccagggactgctcaaattccttcattgtca

SEQ ID NO: 39780 - DNA, 33 bp, Homo sapien
caaccagggactgctccaattccttcattgtca

SEQ ID NO: 39781 - DNA, 33 bp, Homo sapien
ctgatcctctcatagccgcaagattaacacata

SEQ ID NO: 39782 - DNA, 33 bp, Homo sapien
ctgatcctctcatagctgcaagattaacacata

SEQ ID NO: 39783 - DNA, 33 bp, Homo sapien
tttgtggcttaaggcacggtttgtttgggccat

SEQ ID NO: 39784 - DNA, 33 bp, Homo sapien
tttgtggcttaaggcatggtttgtttgggccat

SEQ ID NO: 39785 - DNA, 33 bp, Homo sapien
ctggctccaggtaacacaaccagtacaaagcaa

SEQ ID NO: 39786 - DNA, 33 bp, Homo sapien
ctggctccaggtaacataaccagtacaaagcaa

SEQ ID NO: 39787 - DNA, 33 bp, Homo sapien
gaactatctgcccaacagaaaagaggggaatat

SEQ ID NO: 39788 - DNA, 33 bp, Homo sapien
gaactatctgcccaacggaaaagaggggaatat

SEQ ID NO: 39789 - DNA, 33 bp, Homo sapien
cccatcacaatcatcactcccttgcaaaaataa

SEQ ID NO: 39790 - DNA, 33 bp, Homo sapien
cccatcacaatcatcattcccttgcaaaaataa

SEQ ID NO: 39791 - DNA, 33 bp, Homo sapien
aggtgttgttatgtgaatagggggtaacgaaac

SEQ ID NO: 39792 - DNA, 33 bp, Homo sapien
aggtgttgttatgtgagtagggggtaacgaaac

SEQ ID NO: 39793 - DNA, 33 bp, Homo sapien
atgttgcaaacaccagaatggggccatgagtga

SEQ ID NO: 39794 - DNA, 33 bp, Homo sapien
atgttgcaaacaccaggatggggccatgagtga

SEQ ID NO: 39795 - DNA, 33 bp, Homo sapien
aataaggataacatggaaaatacaaaaagaagt

SEQ ID NO: 39796 - DNA, 33 bp, Homo sapien
aataaggataacatggcaaatacaaaaagaagt

SEQ ID NO: 39797 - DNA, 33 bp, Homo sapien
gagcttccatatagcaaggcagtactttgcttc

SEQ ID NO: 39798 - DNA, 33 bp, Homo sapien
gagcttccatatagcacggcagtactttgcttc

SEQ ID NO: 39799 - DNA, 33 bp, Homo sapien
actttaaaaccctaacaatgtgttagtgcagca

SEQ ID NO: 39800 - DNA, 33 bp, Homo sapien
actttaaaaccctaaccatgtgttagtgcagca

SEQ ID NO: 39801 - DNA, 33 bp, Homo sapien
ttagctttaaagtcacgcagtaagctgtctgca

SEQ ID NO: 39802 - DNA, 33 bp, Homo sapien
ttagctttaaagtcactcagtaagctgtctgca

SEQ ID NO: 39803 - DNA, 33 bp, Homo sapien
tggatggtagctcgaagtagggaatgtggaggc

SEQ ID NO: 39804 - DNA, 33 bp, Homo sapien
tggatggtagctcgaattagggaatgtggaggc

SEQ ID NO: 39805 - DNA, 33 bp, Homo sapien
gaggagacttaccagacaccaagggcccaggtg

SEQ ID NO: 39806 - DNA, 33 bp, Homo sapien
gaggagacttaccagagaccaagggcccaggtg

SEQ ID NO: 39807 - DNA, 33 bp, Homo sapien
atatgttatcttacaccgcaaaaggggcttttc

SEQ ID NO: 39808 - DNA, 33 bp, Homo sapien
atatgttatcttacacggcaaaaggggcttttc

SEQ ID NO: 39809 - DNA, 33 bp, Homo sapien
tttctcaatggcatcaataacagaacaaaatca

SEQ ID NO: 39810 - DNA, 33 bp, Homo sapien
tttctcaatggcatcagtaacagaacaaaatca

SEQ ID NO: 39811 - DNA, 33 bp, Homo sapien
acactgtaaaggcaaaatctcactggtttctct

SEQ ID NO: 39812 - DNA, 33 bp, Homo sapien
acactgtaaaggcaaagtctcactggtttctct

SEQ ID NO: 39813 - DNA, 33 bp, Homo sapien
aataaacacagacaaccaaattttaaccacatt

SEQ ID NO: 39814 - DNA, 33 bp, Homo sapien
aataaacacagacaacgaaattttaaccacatt

SEQ ID NO: 39815 - DNA, 33 bp, Homo sapien
ggtctcatggcagacagtaagagttgtttgggg

SEQ ID NO: 39816 - DNA, 33 bp, Homo sapien
ggtctcatggcagacattaagagttgtttgggg

SEQ ID NO: 39817 - DNA, 33 bp, Homo sapien
aacatcttgagaacgcagagaaagaagccagat

SEQ ID NO: 39818 - DNA, 33 bp, Homo sapien
aacatcttgagaacgcggagaaagaagccagat

SEQ ID NO: 39819 - DNA, 33 bp, Homo sapien
cctcatactgctgaaaaggctagaggggtagga

SEQ ID NO: 39820 - DNA, 33 bp, Homo sapien
cctcatactgctgaaatggctagaggggtagga

SEQ ID NO: 39821 - DNA, 33 bp, Homo sapien
aactagtacatacatagggtttaatagtcaatt

SEQ ID NO: 39822 - DNA, 33 bp, Homo sapien
aactagtacatacatatggtttaatagtcaatt

SEQ ID NO: 39823 - DNA, 33 bp, Homo sapien
ggatcttattcaaatgcacctactgcctcagta

SEQ ID NO: 39824 - DNA, 33 bp, Homo sapien
ggatcttattcaaatgtacctactgcctcagta

SEQ ID NO: 39825 - DNA, 33 bp, Homo sapien
ggacaggaaggttccacgccatggtggtggtaa

SEQ ID NO: 39826 - DNA, 33 bp, Homo sapien
ggacaggaaggttccatgccatggtggtggtaa

SEQ ID NO: 39827 - DNA, 33 bp, Homo sapien
agacatggaaacaacaaagctgagccctgggac

SEQ ID NO: 39828 - DNA, 33 bp, Homo sapien
agacatggaaacaacacagctgagccctgggac

SEQ ID NO: 39829 - DNA, 33 bp, Homo sapien
tttgttgtgaggtccacctataagaagacagga

SEQ ID NO: 39830 - DNA, 33 bp, Homo sapien
tttgttgtgaggtccatctataagaagacagga

SEQ ID NO: 39831 - DNA, 33 bp, Homo sapien
tataaaacttctactcactctttaaatatcagc

SEQ ID NO: 39832 - DNA, 33 bp, Homo sapien
tataaaacttctactcgctctttaaatatcagc

SEQ ID NO: 39833 - DNA, 33 bp, Homo sapien
cacattaagtgcaaagaaaatgcatatcattat

SEQ ID NO: 39834 - DNA, 33 bp, Homo sapien
cacattaagtgcaaaggaaatgcatatcattat

SEQ ID NO: 39835 - DNA, 33 bp, Homo sapien
ctctcagctacctcggacacccgtgattccatt

SEQ ID NO: 39836 - DNA, 33 bp, Homo sapien
ctctcagctacctcgggcacccgtgattccatt

SEQ ID NO: 39837 - DNA, 33 bp, Homo sapien
attgcaacactatttcaaatggaatcacgggtg

SEQ ID NO: 39838 - DNA, 33 bp, Homo sapien
attgcaacactatttctaatggaatcacgggtg

SEQ ID NO: 39839 - DNA, 33 bp, Homo sapien
tgaattaggtccaccaaagaaatgactgcaaag

SEQ ID NO: 39840 - DNA, 33 bp, Homo sapien
tgaattaggtccaccagagaaatgactgcaaag

SEQ ID NO: 39841 - DNA, 33 bp, Homo sapien
cagtctattagtctgcaaatacgctccctctgg

SEQ ID NO: 39842 - DNA, 33 bp, Homo sapien
cagtctattagtctgccaatacgctccctctgg

SEQ ID NO: 39843 - DNA, 33 bp, Homo sapien
aaagattgcatttctcaactaagaaaactcttt

SEQ ID NO: 39844 - DNA, 33 bp, Homo sapien
aaagattgcatttctcgactaagaaaactcttt

SEQ ID NO: 39845 - DNA, 33 bp, Homo sapien
catgctggggggacacacctgttgccactagag

SEQ ID NO: 39846 - DNA, 33 bp, Homo sapien
catgctggggggacacgcctgttgccactagag

SEQ ID NO: 39847 - DNA, 33 bp, Homo sapien
ccatgccatgcatagacaaaatacttagagaaa

SEQ ID NO: 39848 - DNA, 33 bp, Homo sapien
ccatgccatgcatagataaaatacttagagaaa

SEQ ID NO: 39849 - DNA, 33 bp, Homo sapien
gaaatccactggttgcagaagtgttacccttgg

SEQ ID NO: 39850 - DNA, 33 bp, Homo sapien
gaaatccactggttgcggaagtgttacccttgg

SEQ ID NO: 39851 - DNA, 33 bp, Homo sapien
tagggttataaattcaatagacatatgatctgc

SEQ ID NO: 39852 - DNA, 33 bp, Homo sapien
tagggttataaattcactagacatatgatctgc

SEQ ID NO: 39853 - DNA, 33 bp, Homo sapien
ctgaatgattttgggacgaggtgtcttctggtg

SEQ ID NO: 39854 - DNA, 33 bp, Homo sapien
ctgaatgattttgggatgaggtgtcttctggtg

SEQ ID NO: 39855 - DNA, 33 bp, Homo sapien
tttttttttgacagaactacaatgttgaagcaa

SEQ ID NO: 39856 - DNA, 33 bp, Homo sapien
tttttttttgacagaattacaatgttgaagcaa

SEQ ID NO: 39857 - DNA, 33 bp, Homo sapien
gcagtcgtgtccttccgctaaataccatggaat

SEQ ID NO: 39858 - DNA, 33 bp, Homo sapien
gcagtcgtgtccttcctctaaataccatggaat

SEQ ID NO: 39859 - DNA, 33 bp, Homo sapien
gaggagtccaacacccactccaaactctcaaag

SEQ ID NO: 39860 - DNA, 33 bp, Homo sapien
gaggagtccaacacccgctccaaactctcaaag

SEQ ID NO: 39861 - DNA, 33 bp, Homo sapien
aatagtgattctcggtgacagaaatatctttaa

SEQ ID NO: 39862 - DNA, 33 bp, Homo sapien
aatagtgattctcggttacagaaatatctttaa

SEQ ID NO: 39863 - DNA, 33 bp, Homo sapien
ctcagcaaccttttgacgagtcccatttccaga

SEQ ID NO: 39864 - DNA, 33 bp, Homo sapien
ctcagcaaccttttgatgagtcccatttccaga

SEQ ID NO: 39865 - DNA, 33 bp, Homo sapien
atgactgctgtaaaaactgtgtaggacctgcct

SEQ ID NO: 39866 - DNA, 33 bp, Homo sapien
atgactgctgtaaaaagtgtgtaggacctgcct

SEQ ID NO: 39867 - DNA, 33 bp, Homo sapien
aacttagtagaatttcaccacgtgagtaaatgg

SEQ ID NO: 39868 - DNA, 33 bp, Homo sapien
aacttagtagaatttctccacgtgagtaaatgg

SEQ ID NO: 39869 - DNA, 33 bp, Homo sapien
tagtctttatcttttaactctcattgcactgcc

SEQ ID NO: 39870 - DNA, 33 bp, Homo sapien
tagtctttatcttttacctctcattgcactgcc

SEQ ID NO: 39871 - DNA, 33 bp, Homo sapien
taatttttaacgagtacctacacagtggcatag

SEQ ID NO: 39872 - DNA, 33 bp, Homo sapien
taatttttaacgagtatctacacagtggcatag

SEQ ID NO: 39873 - DNA, 33 bp, Homo sapien
tgagcagctattcaagcccagattttgcagaat

SEQ ID NO: 39874 - DNA, 33 bp, Homo sapien
tgagcagctattcaagtccagattttgcagaat

SEQ ID NO: 39875 - DNA, 33 bp, Homo sapien
gggctgaagctgataccgaggatgatggaacag

SEQ ID NO: 39876 - DNA, 33 bp, Homo sapien
gggctgaagctgatactgaggatgatggaacag

SEQ ID NO: 39877 - DNA, 33 bp, Homo sapien
tttattgaattgaccacgtttttttcaccctgg

SEQ ID NO: 39878 - DNA, 33 bp, Homo sapien
tttattgaattgaccatgtttttttcaccctgg

SEQ ID NO: 39879 - DNA, 33 bp, Homo sapien
ttgtacaaaggtaaacaatatgctgtttttcct

SEQ ID NO: 39880 - DNA, 33 bp, Homo sapien
ttgtacaaaggtaaacgatatgctgtttttcct

SEQ ID NO: 39881 - DNA, 33 bp, Homo sapien
actacaacagtgacaacgttggaaagaaaagaa

SEQ ID NO: 39882 - DNA, 33 bp, Homo sapien
actacaacagtgacaaggttggaaagaaaagaa

SEQ ID NO: 39883 - DNA, 33 bp, Homo sapien
gtttttggcaatgttgaaggagtttaacagatt

SEQ ID NO: 39884 - DNA, 33 bp, Homo sapien
gtttttggcaatgttgtaggagtttaacagatt

SEQ ID NO: 39885 - DNA, 33 bp, Homo sapien
aaagctctaatataaaagaaatgtggctgggtg

SEQ ID NO: 39886 - DNA, 33 bp, Homo sapien
aaagctctaatataaacgaaatgtggctgggtg

SEQ ID NO: 39887 - DNA, 33 bp, Homo sapien
tgtctgtgatggacataacagttcccagaaact

SEQ ID NO: 39888 - DNA, 33 bp, Homo sapien
tgtctgtgatggacatgacagttcccagaaact

SEQ ID NO: 39889 - DNA, 33 bp, Homo sapien
gctctgtgctcccctaacaaaagaggagttggt

SEQ ID NO: 39890 - DNA, 33 bp, Homo sapien
gctctgtgctcccctatcaaaagaggagttggt

SEQ ID NO: 39891 - DNA, 33 bp, Homo sapien
tgaaattttaatgcgaaagaagcattgcatatg

SEQ ID NO: 39892 - DNA, 33 bp, Homo sapien
tgaaattttaatgcgacagaagcattgcatatg

SEQ ID NO: 39893 - DNA, 33 bp, Homo sapien
cttcttgtaatcaaagactaatccttttaacag

SEQ ID NO: 39894 - DNA, 33 bp, Homo sapien
cttcttgtaatcaaaggctaatccttttaacag

SEQ ID NO: 39895 - DNA, 33 bp, Homo sapien
cactgaagagactgaaagtggttcactgtgcct

SEQ ID NO: 39896 - DNA, 33 bp, Homo sapien
cactgaagagactgaaggtggttcactgtgcct

SEQ ID NO: 39897 - DNA, 33 bp, Homo sapien
gcatatttcacgtgaaagaaacagcagtagcaa

SEQ ID NO: 39898 - DNA, 33 bp, Homo sapien
gcatatttcacgtgaaggaaacagcagtagcaa

SEQ ID NO: 39899 - DNA, 33 bp, Homo sapien
acaaatccaaaatatggatgggtctgtttctgg

SEQ ID NO: 39900 - DNA, 33 bp, Homo sapien
acaaatccaaaatatgtatgggtctgtttctgg

SEQ ID NO: 39901 - DNA, 33 bp, Homo sapien
aaactggctgataaaaaaaagtacacaggtaaa

SEQ ID NO: 39902 - DNA, 33 bp, Homo sapien
aaactggctgataaaagaaagtacacaggtaaa

SEQ ID NO: 39903 - DNA, 33 bp, Homo sapien
tccaggaacagaaaccaaaacataacatcagaa

SEQ ID NO: 39904 - DNA, 33 bp, Homo sapien
tccaggaacagaaaccgaaacataacatcagaa

SEQ ID NO: 39905 - DNA, 33 bp, Homo sapien
taaattgaccgtgtaacccttgtcaagtttgag

SEQ ID NO: 39906 - DNA, 33 bp, Homo sapien
taaattgaccgtgtaatccttgtcaagtttgag

SEQ ID NO: 39907 - DNA, 33 bp, Homo sapien
tggactaggacaattaccaagagcaagaaggga

SEQ ID NO: 39908 - DNA, 33 bp, Homo sapien
tggactaggacaattatcaagagcaagaaggga

SEQ ID NO: 39909 - DNA, 33 bp, Homo sapien
ggcaaagcaagtgctacgttttgtttgtcccca

SEQ ID NO: 39910 - DNA, 33 bp, Homo sapien
ggcaaagcaagtgctatgttttgtttgtcccca

SEQ ID NO: 39911 - DNA, 33 bp, Homo sapien
gctacttctattgtccccaacttctggccttct

SEQ ID NO: 39912 - DNA, 33 bp, Homo sapien
gctacttctattgtccgcaacttctggccttct

SEQ ID NO: 39913 - DNA, 33 bp, Homo sapien
tttcagtccttgaagaactctttcagcacctac

SEQ ID NO: 39914 - DNA, 33 bp, Homo sapien
tttcagtccttgaagacctctttcagcacctac

SEQ ID NO: 39915 - DNA, 33 bp, Homo sapien
ttttgcagatgttaccagattcagtttgctaat

SEQ ID NO: 39916 - DNA, 33 bp, Homo sapien
ttttgcagatgttaccggattcagtttgctaat

SEQ ID NO: 39917 - DNA, 33 bp, Homo sapien
aagaggtgattctgacgaagagtaaaggtggtg

SEQ ID NO: 39918 - DNA, 33 bp, Homo sapien
aagaggtgattctgactaagagtaaaggtggtg

SEQ ID NO: 39919 - DNA, 33 bp, Homo sapien
catgagagtggatccactataattggaattagt

SEQ ID NO: 39920 - DNA, 33 bp, Homo sapien
catgagagtggatccattataattggaattagt

SEQ ID NO: 39921 - DNA, 33 bp, Homo sapien
attaaagcagctagtacataattggccctaaat

SEQ ID NO: 39922 - DNA, 33 bp, Homo sapien
attaaagcagctagtatataattggccctaaat

SEQ ID NO: 39923 - DNA, 33 bp, Homo sapien
taactattgtccaagaaagcttgtaaattctct

SEQ ID NO: 39924 - DNA, 33 bp, Homo sapien
taactattgtccaagagagcttgtaaattctct

SEQ ID NO: 39925 - DNA, 33 bp, Homo sapien
aaacagaggatagaaactggagatagaaattga

SEQ ID NO: 39926 - DNA, 33 bp, Homo sapien
aaacagaggatagaaattggagatagaaattga

SEQ ID NO: 39927 - DNA, 33 bp, Homo sapien
atgagctggagtggataaaaaatctgcaacaaa

SEQ ID NO: 39928 - DNA, 33 bp, Homo sapien
atgagctggagtggatcaaaaatctgcaacaaa

SEQ ID NO: 39929 - DNA, 33 bp, Homo sapien
gtcctaagggagcagaagtatgaaatgggctgc

SEQ ID NO: 39930 - DNA, 33 bp, Homo sapien
gtcctaagggagcagaggtatgaaatgggctgc

SEQ ID NO: 39931 - DNA, 33 bp, Homo sapien
gatcatatcttttatcgcttttcagcaccacac

SEQ ID NO: 39932 - DNA, 33 bp, Homo sapien
gatcatatcttttatctcttttcagcaccacac

SEQ ID NO: 39933 - DNA, 33 bp, Homo sapien
ttatatgcctcttatgaaatagaacattcataa

SEQ ID NO: 39934 - DNA, 33 bp, Homo sapien
ttatatgcctcttatgtaatagaacattcataa

SEQ ID NO: 39935 - DNA, 33 bp, Homo sapien
cttattctaccaaaaaaaggaagcgagactaaa

SEQ ID NO: 39936 - DNA, 33 bp, Homo sapien
cttattctaccaaaaagaggaagcgagactaaa

SEQ ID NO: 39937 - DNA, 33 bp, Homo sapien
aatgagggggttgctcaaaacagaagctgctca

SEQ ID NO: 39938 - DNA, 33 bp, Homo sapien
aatgagggggttgctcgaaacagaagctgctca

SEQ ID NO: 39939 - DNA, 33 bp, Homo sapien
tgaatgctgggtagtccatggtcacactcatca

SEQ ID NO: 39940 - DNA, 33 bp, Homo sapien
tgaatgctgggtagtctatggtcacactcatca

SEQ ID NO: 39941 - DNA, 33 bp, Homo sapien
ctccaattgtgatcaacacctagggagaccaat

SEQ ID NO: 39942 - DNA, 33 bp, Homo sapien
ctccaattgtgatcaatacctagggagaccaat

SEQ ID NO: 39943 - DNA, 33 bp, Homo sapien
ccagcagatatacctaaagtcagccaagtctga

SEQ ID NO: 39944 - DNA, 33 bp, Homo sapien
ccagcagatatacctagagtcagccaagtctga

SEQ ID NO: 39945 - DNA, 33 bp, Homo sapien
tgggtatgtaagcatcaagctaaggtcgaggct

SEQ ID NO: 39946 - DNA, 33 bp, Homo sapien
tgggtatgtaagcatccagctaaggtcgaggct

SEQ ID NO: 39947 - DNA, 33 bp, Homo sapien
tccatctgtctttgccaattatggtgacgttaa

SEQ ID NO: 39948 - DNA, 33 bp, Homo sapien
tccatctgtctttgccgattatggtgacgttaa

SEQ ID NO: 39949 - DNA, 33 bp, Homo sapien
cagagggtagaggggcccggaacatgcagttca

SEQ ID NO: 39950 - DNA, 33 bp, Homo sapien
cagagggtagaggggctcggaacatgcagttca

SEQ ID NO: 39951 - DNA, 33 bp, Homo sapien
ttttttttaagcctgccctgaagattttgtttt

SEQ ID NO: 39952 - DNA, 33 bp, Homo sapien
ttttttttaagcctgctctgaagattttgtttt

SEQ ID NO: 39953 - DNA, 33 bp, Homo sapien
tgtgcctagactgtacagagtggtttatgctaa

SEQ ID NO: 39954 - DNA, 33 bp, Homo sapien
tgtgcctagactgtacggagtggtttatgctaa

SEQ ID NO: 39955 - DNA, 33 bp, Homo sapien
aaggatgtactctggccaaaagaaagaaatcct

SEQ ID NO: 39956 - DNA, 33 bp, Homo sapien
aaggatgtactctggctaaaagaaagaaatcct

SEQ ID NO: 39957 - DNA, 33 bp, Homo sapien
ataaagggaatacgtaagaaacaacagtaataa

SEQ ID NO: 39958 - DNA, 33 bp, Homo sapien
ataaagggaatacgtaggaaacaacagtaataa

SEQ ID NO: 39959 - DNA, 33 bp, Homo sapien
tttaagataatccaccaggacaagataataaag

SEQ ID NO: 39960 - DNA, 33 bp, Homo sapien
tttaagataatccaccgggacaagataataaag

SEQ ID NO: 39961 - DNA, 33 bp, Homo sapien
aacaggaatattaaacagtaagttcaaaagaat

SEQ ID NO: 39962 - DNA, 33 bp, Homo sapien
aacaggaatattaaacggtaagttcaaaagaat

SEQ ID NO: 39963 - DNA, 33 bp, Homo sapien
tttgagcaatgtcttgaattatataacacttgg

SEQ ID NO: 39964 - DNA, 33 bp, Homo sapien
tttgagcaatgtcttggattatataacacttgg

SEQ ID NO: 39965 - DNA, 33 bp, Homo sapien
gaaacaaagcaacagaatatgatttgtgttgat

SEQ ID NO: 39966 - DNA, 33 bp, Homo sapien
gaaacaaagcaacagagtatgatttgtgttgat

SEQ ID NO: 39967 - DNA, 33 bp, Homo sapien
ttcatcatatttgccacggtattttaattactg

SEQ ID NO: 39968 - DNA, 33 bp, Homo sapien
ttcatcatatttgccatggtattttaattactg

SEQ ID NO: 39969 - DNA, 33 bp, Homo sapien
ataaggatgaatgtataagtgtttacttgtgtg

SEQ ID NO: 39970 - DNA, 33 bp, Homo sapien
ataaggatgaatgtatgagtgtttacttgtgtg

SEQ ID NO: 39971 - DNA, 33 bp, Homo sapien
caggggtcgttggaggaacagacaatatgcaaa

SEQ ID NO: 39972 - DNA, 33 bp, Homo sapien
caggggtcgttggagggacagacaatatgcaaa

SEQ ID NO: 39973 - DNA, 33 bp, Homo sapien
taaaactcaaatccctcagaacttgcagtctgg

SEQ ID NO: 39974 - DNA, 33 bp, Homo sapien
taaaactcaaatcccttagaacttgcagtctgg

SEQ ID NO: 39975 - DNA, 33 bp, Homo sapien
taccataaccatgtaactctatcaggaaattga

SEQ ID NO: 39976 - DNA, 33 bp, Homo sapien
taccataaccatgtaattctatcaggaaattga

SEQ ID NO: 39977 - DNA, 33 bp, Homo sapien
ttgcactgactcaagaaacagagaaataattca

SEQ ID NO: 39978 - DNA, 33 bp, Homo sapien
ttgcactgactcaagacacagagaaataattca

SEQ ID NO: 39979 - DNA, 33 bp, Homo sapien
gggccaaagaggacccggattgctttgttttgt

SEQ ID NO: 39980 - DNA, 33 bp, Homo sapien
gggccaaagaggaccctgattgctttgttttgt

SEQ ID NO: 39981 - DNA, 33 bp, Homo sapien
gctggaaaatgtttaaaagcattgtgaactcca

SEQ ID NO: 39982 - DNA, 33 bp, Homo sapien
gctggaaaatgtttaagagcattgtgaactcca

SEQ ID NO: 39983 - DNA, 33 bp, Homo sapien
aggcaacacagcttataagaatccatgtctaat

SEQ ID NO: 39984 - DNA, 33 bp, Homo sapien
aggcaacacagcttattagaatccatgtctaat

SEQ ID NO: 39985 - DNA, 33 bp, Homo sapien
actcagagataccaaacaatgatggttattcct

SEQ ID NO: 39986 - DNA, 33 bp, Homo sapien
actcagagataccaaagaatgatggttattcct

SEQ ID NO: 39987 - DNA, 33 bp, Homo sapien
aatagacctctaaccaagcctaacttaattgct

SEQ ID NO: 39988 - DNA, 33 bp, Homo sapien
aatagacctctaaccaggcctaacttaattgct

SEQ ID NO: 39989 - DNA, 33 bp, Homo sapien
tgtggtgtgtacataacaaatagatttctccag

SEQ ID NO: 39990 - DNA, 33 bp, Homo sapien
tgtggtgtgtacataataaatagatttctccag

SEQ ID NO: 39991 - DNA, 33 bp, Homo sapien
gctccatccctgcagcaaactccggcctggaca

SEQ ID NO: 39992 - DNA, 33 bp, Homo sapien
gctccatccctgcagcgaactccggcctggaca

SEQ ID NO: 39993 - DNA, 33 bp, Homo sapien
aagggactttactagccgaaacagaaactaaga

SEQ ID NO: 39994 - DNA, 33 bp, Homo sapien
aagggactttactagctgaaacagaaactaaga

SEQ ID NO: 39995 - DNA, 33 bp, Homo sapien
ttctttgaaatattaaaaacatatgcagtgaat

SEQ ID NO: 39996 - DNA, 33 bp, Homo sapien
ttctttgaaatattaataacatatgcagtgaat

SEQ ID NO: 39997 - DNA, 33 bp, Homo sapien
gatgatgctgtctctacacagaatgttgagttt

SEQ ID NO: 39998 - DNA, 33 bp, Homo sapien
gatgatgctgtctctatacagaatgttgagttt

SEQ ID NO: 39999 - DNA, 33 bp, Homo sapien
aacatgagaaaaatacccagaagttcttcaagt

SEQ ID NO: 40000 - DNA, 33 bp, Homo sapien
aacatgagaaaaatacgcagaagttcttcaagt

SEQ ID NO: 40001 - DNA, 33 bp, Homo sapien
gttcataacaaatttcaaggataaactttgtaa

SEQ ID NO: 40002 - DNA, 33 bp, Homo sapien
gttcataacaaatttccaggataaactttgtaa

SEQ ID NO: 40003 - DNA, 33 bp, Homo sapien
gacttccaagcaattacaaatatgatcaaaaga

SEQ ID NO: 40004 - DNA, 33 bp, Homo sapien
gacttccaagcaattataaatatgatcaaaaga

SEQ ID NO: 40005 - DNA, 33 bp, Homo sapien
cttcccttggactgaggacttttctttactttt

SEQ ID NO: 40006 - DNA, 33 bp, Homo sapien
cttcccttggactgagtacttttctttactttt

SEQ ID NO: 40007 - DNA, 33 bp, Homo sapien
gataaaactgtaaagactaccaccgctggccag

SEQ ID NO: 40008 - DNA, 33 bp, Homo sapien
gataaaactgtaaagattaccaccgctggccag

SEQ ID NO: 40009 - DNA, 33 bp, Homo sapien
gccccttgtttgctaacatcagaaaatactcca

SEQ ID NO: 40010 - DNA, 33 bp, Homo sapien
gccccttgtttgctaagatcagaaaatactcca

SEQ ID NO: 40011 - DNA, 33 bp, Homo sapien
gccttgcagtataggaactcatagcaaattttt

SEQ ID NO: 40012 - DNA, 33 bp, Homo sapien
gccttgcagtataggatctcatagcaaattttt

SEQ ID NO: 40013 - DNA, 33 bp, Homo sapien
gctctagatccccagaatcccatatagtagcca

SEQ ID NO: 40014 - DNA, 33 bp, Homo sapien
gctctagatccccagagtcccatatagtagcca

SEQ ID NO: 40015 - DNA, 33 bp, Homo sapien
tactttggagctgatacagtattaggttgttcc

SEQ ID NO: 40016 - DNA, 33 bp, Homo sapien
tactttggagctgatatagtattaggttgttcc

SEQ ID NO: 40017 - DNA, 33 bp, Homo sapien
atgttatcttgtgttacacatttgagacaaaat

SEQ ID NO: 40018 - DNA, 33 bp, Homo sapien
atgttatcttgtgttatacatttgagacaaaat

SEQ ID NO: 40019 - DNA, 33 bp, Homo sapien
ttgtggatatggacatgacattggcaaggcctg

SEQ ID NO: 40020 - DNA, 33 bp, Homo sapien
ttgtggatatggacattacattggcaaggcctg

SEQ ID NO: 40021 - DNA, 33 bp, Homo sapien
tggcaaggcctgtgtgcaattaagttttaagaa

SEQ ID NO: 40022 - DNA, 33 bp, Homo sapien
tggcaaggcctgtgtggaattaagttttaagaa

SEQ ID NO: 40023 - DNA, 33 bp, Homo sapien
cattcttttcggtggccacaaagtattgtcatt

SEQ ID NO: 40024 - DNA, 33 bp, Homo sapien
cattcttttcggtggctacaaagtattgtcatt

SEQ ID NO: 40025 - DNA, 33 bp, Homo sapien
atccccatcaatggccgctaagagctgttcttt

SEQ ID NO: 40026 - DNA, 33 bp, Homo sapien
atccccatcaatggcctctaagagctgttcttt

SEQ ID NO: 40027 - DNA, 33 bp, Homo sapien
tcaaatgtttccatacacatgcgctgtatccct

SEQ ID NO: 40028 - DNA, 33 bp, Homo sapien
tcaaatgtttccatacgcatgcgctgtatccct

SEQ ID NO: 40029 - DNA, 33 bp, Homo sapien
gtctacagcctgtgacacttgtcatgccagtat

SEQ ID NO: 40030 - DNA, 33 bp, Homo sapien
gtctacagcctgtgacgcttgtcatgccagtat

SEQ ID NO: 40031 - DNA, 33 bp, Homo sapien
ttcccaaatctcggctaaagtcacctcaggaca

SEQ ID NO: 40032 - DNA, 33 bp, Homo sapien
ttcccaaatctcggctgaagtcacctcaggaca

SEQ ID NO: 40033 - DNA, 33 bp, Homo sapien
ggccttccttagtgggacattcataatcctgta

SEQ ID NO: 40034 - DNA, 33 bp, Homo sapien
ggccttccttagtggggcattcataatcctgta

SEQ ID NO: 40035 - DNA, 33 bp, Homo sapien
aggctgcacgtagtgacgtctggaagacccatt

SEQ ID NO: 40036 - DNA, 33 bp, Homo sapien
aggctgcacgtagtgatgtctggaagacccatt

SEQ ID NO: 40037 - DNA, 33 bp, Homo sapien
actctcagtgtcctcacgagaagcatcacaggc

SEQ ID NO: 40038 - DNA, 33 bp, Homo sapien
actctcagtgtcctcatgagaagcatcacaggc

SEQ ID NO: 40039 - DNA, 33 bp, Homo sapien
agtgacgtggccactccgactctcagtgtcctc

SEQ ID NO: 40040 - DNA, 33 bp, Homo sapien
agtgacgtggccactcggactctcagtgtcctc

SEQ ID NO: 40041 - DNA, 33 bp, Homo sapien
gtaatctcaagttttaagtagagtaactgagat

SEQ ID NO: 40042 - DNA, 33 bp, Homo sapien
gtaatctcaagttttaggtagagtaactgagat

SEQ ID NO: 40043 - DNA, 33 bp, Homo sapien
gtgtagtaaaaattgacggataatgtacttaaa

SEQ ID NO: 40044 - DNA, 33 bp, Homo sapien
gtgtagtaaaaattgatggataatgtacttaaa

SEQ ID NO: 40045 - DNA, 33 bp, Homo sapien
gattattaatattctgcaagttctggtaattgc

SEQ ID NO: 40046 - DNA, 33 bp, Homo sapien
gattattaatattctggaagttctggtaattgc

SEQ ID NO: 40047 - DNA, 33 bp, Homo sapien
ttctatacataggaccgcttttcaaataactgc

SEQ ID NO: 40048 - DNA, 33 bp, Homo sapien
ttctatacataggacctcttttcaaataactgc

SEQ ID NO: 40049 - DNA, 33 bp, Homo sapien
ggttagtgaaagagggaatcttgcatgacaccg

SEQ ID NO: 40050 - DNA, 33 bp, Homo sapien
ggttagtgaaagagggtatcttgcatgacaccg

SEQ ID NO: 40051 - DNA, 33 bp, Homo sapien
aaaaccaaaagagtgaacagggaacaacaacaa

SEQ ID NO: 40052 - DNA, 33 bp, Homo sapien
aaaaccaaaagagtgagcagggaacaacaacaa

SEQ ID NO: 40053 - DNA, 33 bp, Homo sapien
taggtaaagtaatctcacaagctgccaaagaac

SEQ ID NO: 40054 - DNA, 33 bp, Homo sapien
taggtaaagtaatctcgcaagctgccaaagaac

SEQ ID NO: 40055 - DNA, 33 bp, Homo sapien
ggttatgtataaaaaaacgccattgtcaattaa

SEQ ID NO: 40056 - DNA, 33 bp, Homo sapien
ggttatgtataaaaaaccgccattgtcaattaa

SEQ ID NO: 40057 - DNA, 33 bp, Homo sapien
actctagcatctggaacgctccgttgtatattc

SEQ ID NO: 40058 - DNA, 33 bp, Homo sapien
actctagcatctggaatgctccgttgtatattc

SEQ ID NO: 40059 - DNA, 33 bp, Homo sapien
gtttcatgtgctccctaaggaaagttatgctct

SEQ ID NO: 40060 - DNA, 33 bp, Homo sapien
gtttcatgtgctccctcaggaaagttatgctct

SEQ ID NO: 40061 - DNA, 33 bp, Homo sapien
tgtgtgaaggatcctaggctcgcttttgttcat

SEQ ID NO: 40062 - DNA, 33 bp, Homo sapien
tgtgtgaaggatcctatgctcgcttttgttcat

SEQ ID NO: 40063 - DNA, 33 bp, Homo sapien
tggttttagtggctaccgagctgtggacatatg

SEQ ID NO: 40064 - DNA, 33 bp, Homo sapien
tggttttagtggctactgagctgtggacatatg

SEQ ID NO: 40065 - DNA, 33 bp, Homo sapien
agcagaaatcagccacaaaaaacacttaagaca

SEQ ID NO: 40066 - DNA, 33 bp, Homo sapien
agcagaaatcagccaccaaaaacacttaagaca

SEQ ID NO: 40067 - DNA, 33 bp, Homo sapien
ggtttctttcacataacgtagcattttcaaggt

SEQ ID NO: 40068 - DNA, 33 bp, Homo sapien
ggtttctttcacataatgtagcattttcaaggt

SEQ ID NO: 40069 - DNA, 33 bp, Homo sapien
agtaacatagttgccaatagtacgactttgtgg

SEQ ID NO: 40070 - DNA, 33 bp, Homo sapien
agtaacatagttgccagtagtacgactttgtgg

SEQ ID NO: 40071 - DNA, 33 bp, Homo sapien
gaaagcacatgagtaacgggaaaggcaagacta

SEQ ID NO: 40072 - DNA, 33 bp, Homo sapien
gaaagcacatgagtaatgggaaaggcaagacta

SEQ ID NO: 40073 - DNA, 33 bp, Homo sapien
agttataattttgcaacttcaacttaggaagaa

SEQ ID NO: 40074 - DNA, 33 bp, Homo sapien
agttataattttgcaatttcaacttaggaagaa

SEQ ID NO: 40075 - DNA, 33 bp, Homo sapien
gttcactaagttccagccacattggcttcctgt

SEQ ID NO: 40076 - DNA, 33 bp, Homo sapien
gttcactaagttccaggcacattggcttcctgt

SEQ ID NO: 40077 - DNA, 33 bp, Homo sapien
agaaagagccagcaaaagaataatacccagaaa

SEQ ID NO: 40078 - DNA, 33 bp, Homo sapien
agaaagagccagcaaaggaataatacccagaaa

SEQ ID NO: 40079 - DNA, 33 bp, Homo sapien
caaaagtagactagtaggctgaaatgcaatagt

SEQ ID NO: 40080 - DNA, 33 bp, Homo sapien
caaaagtagactagtatgctgaaatgcaatagt

SEQ ID NO: 40081 - DNA, 33 bp, Homo sapien
ccgattccttccttaaatggattatacctctca

SEQ ID NO: 40082 - DNA, 33 bp, Homo sapien
ccgattccttccttaagtggattatacctctca

SEQ ID NO: 40083 - DNA, 33 bp, Homo sapien
gacagaccaaaatggaagcttagctgagagaca

SEQ ID NO: 40084 - DNA, 33 bp, Homo sapien
gacagaccaaaatggacgcttagctgagagaca

SEQ ID NO: 40085 - DNA, 33 bp, Homo sapien
ttttagtacatctccaaactctcaaacacagac

SEQ ID NO: 40086 - DNA, 33 bp, Homo sapien
ttttagtacatctccagactctcaaacacagac

SEQ ID NO: 40087 - DNA, 33 bp, Homo sapien
aacatgaatgaggtaaagttcattaagcccaca

SEQ ID NO: 40088 - DNA, 33 bp, Homo sapien
aacatgaatgaggtaaggttcattaagcccaca

SEQ ID NO: 40089 - DNA, 33 bp, Homo sapien
ttctaatgcaaataacaggtagaaaattggaag

SEQ ID NO: 40090 - DNA, 33 bp, Homo sapien
ttctaatgcaaataacgggtagaaaattggaag

SEQ ID NO: 40091 - DNA, 33 bp, Homo sapien
aaaacgaatatcatacaggatgtttagttccat

SEQ ID NO: 40092 - DNA, 33 bp, Homo sapien
aaaacgaatatcatacgggatgtttagttccat

SEQ ID NO: 40093 - DNA, 33 bp, Homo sapien
tttggtaaaaacatgacaaatgacccatgagcc

SEQ ID NO: 40094 - DNA, 33 bp, Homo sapien
tttggtaaaaacatgataaatgacccatgagcc

SEQ ID NO: 40095 - DNA, 33 bp, Homo sapien
tagtctgtaaatataacgcacgtatataagaga

SEQ ID NO: 40096 - DNA, 33 bp, Homo sapien
tagtctgtaaatataatgcacgtatataagaga

SEQ ID NO: 40097 - DNA, 33 bp, Homo sapien
atgactaccttccctcaagaacaatcacaaggt

SEQ ID NO: 40098 - DNA, 33 bp, Homo sapien
atgactaccttccctcgagaacaatcacaaggt

SEQ ID NO: 40099 - DNA, 33 bp, Homo sapien
attttgatcataaaccacagagacagcaactgg

SEQ ID NO: 40100 - DNA, 33 bp, Homo sapien
attttgatcataaaccgcagagacagcaactgg

SEQ ID NO: 40101 - DNA, 33 bp, Homo sapien
aatggttagtcagatccgagttagagatgtgtt

SEQ ID NO: 40102 - DNA, 33 bp, Homo sapien
aatggttagtcagatcggagttagagatgtgtt

SEQ ID NO: 40103 - DNA, 33 bp, Homo sapien
tccttttgatcctgacgcattattagattagca

SEQ ID NO: 40104 - DNA, 33 bp, Homo sapien
tccttttgatcctgactcattattagattagca

SEQ ID NO: 40105 - DNA, 33 bp, Homo sapien
tctctacctaaaaatcccttcctcaaagaaacc

SEQ ID NO: 40106 - DNA, 33 bp, Homo sapien
tctctacctaaaaatcgcttcctcaaagaaacc

SEQ ID NO: 40107 - DNA, 33 bp, Homo sapien
tagccagttaaaggaacctcagattagtccaca

SEQ ID NO: 40108 - DNA, 33 bp, Homo sapien
tagccagttaaaggaatctcagattagtccaca

SEQ ID NO: 40109 - DNA, 33 bp, Homo sapien
gatttaggctaacaaaagttgctgttgatagaa

SEQ ID NO: 40110 - DNA, 33 bp, Homo sapien
gatttaggctaacaaaggttgctgttgatagaa

SEQ ID NO: 40111 - DNA, 33 bp, Homo sapien
cctggaagatggtgaactctctgaacctcccca

SEQ ID NO: 40112 - DNA, 33 bp, Homo sapien
cctggaagatggtgaagtctctgaacctcccca

SEQ ID NO: 40113 - DNA, 33 bp, Homo sapien
tccccaaccctgctcaagcttccctttgcacct

SEQ ID NO: 40114 - DNA, 33 bp, Homo sapien
tccccaaccctgctcaggcttccctttgcacct

SEQ ID NO: 40115 - DNA, 33 bp, Homo sapien
tttgccaccatttggaacttcagcagtcaatga

SEQ ID NO: 40116 - DNA, 33 bp, Homo sapien
tttgccaccatttggagcttcagcagtcaatga

SEQ ID NO: 40117 - DNA, 33 bp, Homo sapien
actcctagttctatccccttgagaatctctagc

SEQ ID NO: 40118 - DNA, 33 bp, Homo sapien
actcctagttctatcctcttgagaatctctagc

SEQ ID NO: 40119 - DNA, 33 bp, Homo sapien
tcactaataaaaggcacacaattaatcctgctg

SEQ ID NO: 40120 - DNA, 33 bp, Homo sapien
tcactaataaaaggcagacaattaatcctgctg

SEQ ID NO: 40121 - DNA, 33 bp, Homo sapien
ggcagtaggaggccacaccattcataacattgg

SEQ ID NO: 40122 - DNA, 33 bp, Homo sapien
ggcagtaggaggccacgccattcataacattgg

SEQ ID NO: 40123 - DNA, 33 bp, Homo sapien
aacaacaaggtacctgcagtctggcatgcatcc

SEQ ID NO: 40124 - DNA, 33 bp, Homo sapien
aacaacaaggtacctgtagtctggcatgcatcc

SEQ ID NO: 40125 - DNA, 33 bp, Homo sapien
ggcttatattcaaaaacgttcaatccagcctgt

SEQ ID NO: 40126 - DNA, 33 bp, Homo sapien
ggcttatattcaaaaatgttcaatccagcctgt

SEQ ID NO: 40127 - DNA, 33 bp, Homo sapien
gacctttatttcctcaaaatgagtctatttaaa

SEQ ID NO: 40128 - DNA, 33 bp, Homo sapien
gacctttatttcctcagaatgagtctatttaaa

SEQ ID NO: 40129 - DNA, 33 bp, Homo sapien
taattcactgaatgacacttttgctacatgaag

SEQ ID NO: 40130 - DNA, 33 bp, Homo sapien
taattcactgaatgacgcttttgctacatgaag

SEQ ID NO: 40131 - DNA, 33 bp, Homo sapien
tattcctggtccattaaggcagcagctgcgtag

SEQ ID NO: 40132 - DNA, 33 bp, Homo sapien
tattcctggtccattacggcagcagctgcgtag

SEQ ID NO: 40133 - DNA, 33 bp, Homo sapien
atttaatggaaatatcaaaatcataatgtcatt

SEQ ID NO: 40134 - DNA, 33 bp, Homo sapien
atttaatggaaatatcgaaatcataatgtcatt

SEQ ID NO: 40135 - DNA, 33 bp, Homo sapien
atgttgccagaaattgaaccagaagtctcttta

SEQ ID NO: 40136 - DNA, 33 bp, Homo sapien
atgttgccagaaattggaccagaagtctcttta

SEQ ID NO: 40137 - DNA, 33 bp, Homo sapien
gcctccatcactatcacgctagggtgaccttcc

SEQ ID NO: 40138 - DNA, 33 bp, Homo sapien
gcctccatcactatcaggctagggtgaccttcc

SEQ ID NO: 40139 - DNA, 33 bp, Homo sapien
ccaaactctaagaaggaaagtagaaaagaaaac

SEQ ID NO: 40140 - DNA, 33 bp, Homo sapien
ccaaactctaagaaggtaagtagaaaagaaaac

SEQ ID NO: 40141 - DNA, 33 bp, Homo sapien
ggtctctacttagctcgatcattgttgttagac

SEQ ID NO: 40142 - DNA, 33 bp, Homo sapien
ggtctctacttagctctatcattgttgttagac

SEQ ID NO: 40143 - DNA, 33 bp, Homo sapien
tcaaagtaaaagggtaacattagccatttctag

SEQ ID NO: 40144 - DNA, 33 bp, Homo sapien
tcaaagtaaaagggtatcattagccatttctag

SEQ ID NO: 40145 - DNA, 33 bp, Homo sapien
ggtgtgagtggagttacggttagaattttgatt

SEQ ID NO: 40146 - DNA, 33 bp, Homo sapien
ggtgtgagtggagttatggttagaattttgatt

SEQ ID NO: 40147 - DNA, 33 bp, Homo sapien
ggtgagtggtaaagccacagcctggtttcaggg

SEQ ID NO: 40148 - DNA, 33 bp, Homo sapien
ggtgagtggtaaagccgcagcctggtttcaggg

SEQ ID NO: 40149 - DNA, 33 bp, Homo sapien
gaaggaccagaaactcacatttcctgtggcctc

SEQ ID NO: 40150 - DNA, 33 bp, Homo sapien
gaaggaccagaaactcgcatttcctgtggcctc

SEQ ID NO: 40151 - DNA, 33 bp, Homo sapien
actatttggtttgaagaaaggcagcgtacacag

SEQ ID NO: 40152 - DNA, 33 bp, Homo sapien
actatttggtttgaaggaaggcagcgtacacag

SEQ ID NO: 40153 - DNA, 33 bp, Homo sapien
gctcctggtgcctgtcaccttcctaccagtagg

SEQ ID NO: 40154 - DNA, 33 bp, Homo sapien
gctcctggtgcctgtccccttcctaccagtagg

SEQ ID NO: 40155 - DNA, 33 bp, Homo sapien
ttcctggtcgaagcagaagtcctgtgggtgtgc

SEQ ID NO: 40156 - DNA, 33 bp, Homo sapien
ttcctggtcgaagcagcagtcctgtgggtgtgc

SEQ ID NO: 40157 - DNA, 33 bp, Homo sapien
ggtagcctaaggggacactctccaggacagtag

SEQ ID NO: 40158 - DNA, 33 bp, Homo sapien
ggtagcctaaggggacgctctccaggacagtag

SEQ ID NO: 40159 - DNA, 33 bp, Homo sapien
aggctgagctggactacgaagaccaagtgtctt

SEQ ID NO: 40160 - DNA, 33 bp, Homo sapien
aggctgagctggactatgaagaccaagtgtctt

SEQ ID NO: 40161 - DNA, 33 bp, Homo sapien
ctccatttcaaataaccgagggccagaaaggtt

SEQ ID NO: 40162 - DNA, 33 bp, Homo sapien
ctccatttcaaataactgagggccagaaaggtt

SEQ ID NO: 40163 - DNA, 33 bp, Homo sapien
acctacttcagtgacaatgcctagatatgcacc

SEQ ID NO: 40164 - DNA, 33 bp, Homo sapien
acctacttcagtgacagtgcctagatatgcacc

SEQ ID NO: 40165 - DNA, 33 bp, Homo sapien
aaataggagcaggatcaacttccagatatacag

SEQ ID NO: 40166 - DNA, 33 bp, Homo sapien
aaataggagcaggatcgacttccagatatacag

SEQ ID NO: 40167 - DNA, 33 bp, Homo sapien
ttgcctgtacttctcaccttctatttgttcatt

SEQ ID NO: 40168 - DNA, 33 bp, Homo sapien
ttgcctgtacttctcatcttctatttgttcatt

SEQ ID NO: 40169 - DNA, 33 bp, Homo sapien
ctggaacttcagttgcagactggaatagatact

SEQ ID NO: 40170 - DNA, 33 bp, Homo sapien
ctggaacttcagttgcggactggaatagatact

SEQ ID NO: 40171 - DNA, 33 bp, Homo sapien
tagccataaacaggaactaatccagtgagacat

SEQ ID NO: 40172 - DNA, 33 bp, Homo sapien
tagccataaacaggaagtaatccagtgagacat

SEQ ID NO: 40173 - DNA, 33 bp, Homo sapien
aaacagcccccatcaccacggacctcgcccaca

SEQ ID NO: 40174 - DNA, 33 bp, Homo sapien
aaacagcccccatcactacggacctcgcccaca

SEQ ID NO: 40175 - DNA, 33 bp, Homo sapien
gtacaatttacacctcacttgactgcggatgtg

SEQ ID NO: 40176 - DNA, 33 bp, Homo sapien
gtacaatttacacctcgcttgactgcggatgtg

SEQ ID NO: 40177 - DNA, 33 bp, Homo sapien
aagaagctgtgtcagaagaaccaggcaggccat

SEQ ID NO: 40178 - DNA, 33 bp, Homo sapien
aagaagctgtgtcagacgaaccaggcaggccat

SEQ ID NO: 40179 - DNA, 33 bp, Homo sapien
tgatgcagcctgcagaagggtggagactcacac

SEQ ID NO: 40180 - DNA, 33 bp, Homo sapien
tgatgcagcctgcagaggggtggagactcacac

SEQ ID NO: 40181 - DNA, 33 bp, Homo sapien
ttagttgcaaccaaaaatagttgtgatcactaa

SEQ ID NO: 40182 - DNA, 33 bp, Homo sapien
ttagttgcaaccaaaattagttgtgatcactaa

SEQ ID NO: 40183 - DNA, 33 bp, Homo sapien
atctgttctaggatacaacaagaaggatccacg

SEQ ID NO: 40184 - DNA, 33 bp, Homo sapien
atctgttctaggataccacaagaaggatccacg

SEQ ID NO: 40185 - DNA, 33 bp, Homo sapien
tctgagacctaagtgaaacaagaacttgaccat

SEQ ID NO: 40186 - DNA, 33 bp, Homo sapien
tctgagacctaagtgagacaagaacttgaccat

SEQ ID NO: 40187 - DNA, 33 bp, Homo sapien
attttaatcattaaaactcatctttagccaagt

SEQ ID NO: 40188 - DNA, 33 bp, Homo sapien
attttaatcattaaaagtcatctttagccaagt

SEQ ID NO: 40189 - DNA, 33 bp, Homo sapien
tgacagagttactggcacaggaatagactaatc

SEQ ID NO: 40190 - DNA, 33 bp, Homo sapien
tgacagagttactggcgcaggaatagactaatc

SEQ ID NO: 40191 - DNA, 33 bp, Homo sapien
agatttccttgtttacaaagtgaaggactaaga

SEQ ID NO: 40192 - DNA, 33 bp, Homo sapien
agatttccttgtttacgaagtgaaggactaaga

SEQ ID NO: 40193 - DNA, 33 bp, Homo sapien
tttgctccagaaattacagggccgaaatggatt

SEQ ID NO: 40194 - DNA, 33 bp, Homo sapien
tttgctccagaaattatagggccgaaatggatt

SEQ ID NO: 40195 - DNA, 33 bp, Homo sapien
tctataacagaatcaactatatccattaatccc

SEQ ID NO: 40196 - DNA, 33 bp, Homo sapien
tctataacagaatcaattatatccattaatccc

SEQ ID NO: 40197 - DNA, 33 bp, Homo sapien
ggaattctacccaaaactactcccaagagccac

SEQ ID NO: 40198 - DNA, 33 bp, Homo sapien
ggaattctacccaaaattactcccaagagccac

SEQ ID NO: 40199 - DNA, 33 bp, Homo sapien
tatggactacagtggaagactctcgaataaatc

SEQ ID NO: 40200 - DNA, 33 bp, Homo sapien
tatggactacagtggaggactctcgaataaatc

SEQ ID NO: 40201 - DNA, 33 bp, Homo sapien
cccttgctatacccagacacttgtttgccttgt

SEQ ID NO: 40202 - DNA, 33 bp, Homo sapien
cccttgctatacccagccacttgtttgccttgt

SEQ ID NO: 40203 - DNA, 33 bp, Homo sapien
catgtttttatgggctaaattgtgtcttgcccc

SEQ ID NO: 40204 - DNA, 33 bp, Homo sapien
catgtttttatgggctgaattgtgtcttgcccc

SEQ ID NO: 40205 - DNA, 33 bp, Homo sapien
tttagaaaggcataaaagacatattcatacttt

SEQ ID NO: 40206 - DNA, 33 bp, Homo sapien
tttagaaaggcataaacgacatattcatacttt

SEQ ID NO: 40207 - DNA, 33 bp, Homo sapien
caaaatatatcttggaagtagaatgaatagggc

SEQ ID NO: 40208 - DNA, 33 bp, Homo sapien
caaaatatatcttggaggtagaatgaatagggc

SEQ ID NO: 40209 - DNA, 33 bp, Homo sapien
ggtcactggagtaatccgagttcctgtaaatga

SEQ ID NO: 40210 - DNA, 33 bp, Homo sapien
ggtcactggagtaatctgagttcctgtaaatga

SEQ ID NO: 40211 - DNA, 33 bp, Homo sapien
ggagacaagaattagcactgtgacaccagttct

SEQ ID NO: 40212 - DNA, 33 bp, Homo sapien
ggagacaagaattagcgctgtgacaccagttct

SEQ ID NO: 40213 - DNA, 33 bp, Homo sapien
ttttatcttgaactcccatgatttgatgtcctt

SEQ ID NO: 40214 - DNA, 33 bp, Homo sapien
ttttatcttgaactcctatgatttgatgtcctt

SEQ ID NO: 40215 - DNA, 33 bp, Homo sapien
gtcagggatcttacacaatgattttttatttac

SEQ ID NO: 40216 - DNA, 33 bp, Homo sapien
gtcagggatcttacacgatgattttttatttac

SEQ ID NO: 40217 - DNA, 33 bp, Homo sapien
tgaatctgagcctttaagactcaaaattcaaga

SEQ ID NO: 40218 - DNA, 33 bp, Homo sapien
tgaatctgagcctttaggactcaaaattcaaga

SEQ ID NO: 40219 - DNA, 33 bp, Homo sapien
gctgcctccaacagaccgaaacttgtcactggg

SEQ ID NO: 40220 - DNA, 33 bp, Homo sapien
gctgcctccaacagacggaaacttgtcactggg

SEQ ID NO: 40221 - DNA, 33 bp, Homo sapien
gtacctggctgccctaccaagagatttgatttg

SEQ ID NO: 40222 - DNA, 33 bp, Homo sapien
gtacctggctgccctatcaagagatttgatttg

SEQ ID NO: 40223 - DNA, 33 bp, Homo sapien
gtgggagagaagagacactaagaaaaaccaaca

SEQ ID NO: 40224 - DNA, 33 bp, Homo sapien
gtgggagagaagagaccctaagaaaaaccaaca

SEQ ID NO: 40225 - DNA, 33 bp, Homo sapien
cctttccctttgactacactgcatgccctgtga

SEQ ID NO: 40226 - DNA, 33 bp, Homo sapien
cctttccctttgactatactgcatgccctgtga

SEQ ID NO: 40227 - DNA, 33 bp, Homo sapien
tgccttcttcctaaaccagtgccagctccccac

SEQ ID NO: 40228 - DNA, 33 bp, Homo sapien
tgccttcttcctaaacgagtgccagctccccac

SEQ ID NO: 40229 - DNA, 33 bp, Homo sapien
tcttcactccttcagcccctactgtggcttccc

SEQ ID NO: 40230 - DNA, 33 bp, Homo sapien
tcttcactccttcagctcctactgtggcttccc

SEQ ID NO: 40231 - DNA, 33 bp, Homo sapien
ggtgattctttataccgccaactttaagcacca

SEQ ID NO: 40232 - DNA, 33 bp, Homo sapien
ggtgattctttatacctccaactttaagcacca

SEQ ID NO: 40233 - DNA, 33 bp, Homo sapien
agtcaaattgccaccacctaatattgagcactc

SEQ ID NO: 40234 - DNA, 33 bp, Homo sapien
agtcaaattgccaccatctaatattgagcactc

SEQ ID NO: 40235 - DNA, 33 bp, Homo sapien
gtgttatgtatcttgaacaaaactaactgctac

SEQ ID NO: 40236 - DNA, 33 bp, Homo sapien
gtgttatgtatcttgagcaaaactaactgctac

SEQ ID NO: 40237 - DNA, 33 bp, Homo sapien
agcacttctagaatgcccatataggacagtcta

SEQ ID NO: 40238 - DNA, 33 bp, Homo sapien
agcacttctagaatgcgcatataggacagtcta

SEQ ID NO: 40239 - DNA, 33 bp, Homo sapien
ctgatggtgctccattcaaataacaatgtctag

SEQ ID NO: 40240 - DNA, 33 bp, Homo sapien
ctgatggtgctccatttaaataacaatgtctag

SEQ ID NO: 40241 - DNA, 33 bp, Homo sapien
gatcgttctgggtctcggaatcatccggtggga

SEQ ID NO: 40242 - DNA, 33 bp, Homo sapien
gatcgttctgggtctctgaatcatccggtggga

SEQ ID NO: 40243 - DNA, 33 bp, Homo sapien
tgattaatgccacttccagagctggtccataaa

SEQ ID NO: 40244 - DNA, 33 bp, Homo sapien
tgattaatgccacttctagagctggtccataaa

SEQ ID NO: 40245 - DNA, 33 bp, Homo sapien
ggtttcataaaaaaccaatcaatcagtctgtga

SEQ ID NO: 40246 - DNA, 33 bp, Homo sapien
ggtttcataaaaaaccgatcaatcagtctgtga

SEQ ID NO: 40247 - DNA, 33 bp, Homo sapien
acgttccctttcctcaaaatgccagcagcaaga

SEQ ID NO: 40248 - DNA, 33 bp, Homo sapien
acgttccctttcctcacaatgccagcagcaaga

SEQ ID NO: 40249 - DNA, 33 bp, Homo sapien
ctgtcttcactgttccaagagtcctgaggaaga

SEQ ID NO: 40250 - DNA, 33 bp, Homo sapien
ctgtcttcactgttccgagagtcctgaggaaga

SEQ ID NO: 40251 - DNA, 33 bp, Homo sapien
gtcagtcgcccctaaccatctcatcctcagcca

SEQ ID NO: 40252 - DNA, 33 bp, Homo sapien
gtcagtcgcccctaactatctcatcctcagcca

SEQ ID NO: 40253 - DNA, 33 bp, Homo sapien
cttcagaagcttgacacagggccagagtagcaa

SEQ ID NO: 40254 - DNA, 33 bp, Homo sapien
cttcagaagcttgacatagggccagagtagcaa

SEQ ID NO: 40255 - DNA, 33 bp, Homo sapien
gaggaagggccactcaacctgtagacctattta

SEQ ID NO: 40256 - DNA, 33 bp, Homo sapien
gaggaagggccactcagcctgtagacctattta

SEQ ID NO: 40257 - DNA, 33 bp, Homo sapien
tttgaatttcttgtacgcaggtatgcctaattt

SEQ ID NO: 40258 - DNA, 33 bp, Homo sapien
tttgaatttcttgtactcaggtatgcctaattt

SEQ ID NO: 40259 - DNA, 33 bp, Homo sapien
aattgaatcaaactcaaattggtagttgaatcc

SEQ ID NO: 40260 - DNA, 33 bp, Homo sapien
aattgaatcaaactcagattggtagttgaatcc

SEQ ID NO: 40261 - DNA, 33 bp, Homo sapien
aagctgcccttctccacccactcatgaactctt

SEQ ID NO: 40262 - DNA, 33 bp, Homo sapien
aagctgcccttctccatccactcatgaactctt

SEQ ID NO: 40263 - DNA, 33 bp, Homo sapien
ttttgcaagagatgaaactgaggtctagaaagg

SEQ ID NO: 40264 - DNA, 33 bp, Homo sapien
ttttgcaagagatgaagctgaggtctagaaagg

SEQ ID NO: 40265 - DNA, 33 bp, Homo sapien
acatcaagtaagtgagaaaacagaatgaatggg

SEQ ID NO: 40266 - DNA, 33 bp, Homo sapien
acatcaagtaagtgaggaaacagaatgaatggg

SEQ ID NO: 40267 - DNA, 33 bp, Homo sapien
cttaaacactattcaaaaactgatcctaacagt

SEQ ID NO: 40268 - DNA, 33 bp, Homo sapien
cttaaacactattcaacaactgatcctaacagt

SEQ ID NO: 40269 - DNA, 33 bp, Homo sapien
ttattctttctttcctaaccagctttctctgct

SEQ ID NO: 40270 - DNA, 33 bp, Homo sapien
ttattctttctttccttaccagctttctctgct

SEQ ID NO: 40271 - DNA, 33 bp, Homo sapien
acatgaaaaggaaagaacccacaagtactaacg

SEQ ID NO: 40272 - DNA, 33 bp, Homo sapien
acatgaaaaggaaagatcccacaagtactaacg

SEQ ID NO: 40273 - DNA, 33 bp, Homo sapien
ctattaccttagaacacagtcagaataattttc

SEQ ID NO: 40274 - DNA, 33 bp, Homo sapien
ctattaccttagaacagagtcagaataattttc

SEQ ID NO: 40275 - DNA, 33 bp, Homo sapien
ccagagtcaaaaccacaggcatcattgaaacca

SEQ ID NO: 40276 - DNA, 33 bp, Homo sapien
ccagagtcaaaaccacgggcatcattgaaacca

SEQ ID NO: 40277 - DNA, 33 bp, Homo sapien
gaaaagatttgtaaaacgacgtacaatatgaag

SEQ ID NO: 40278 - DNA, 33 bp, Homo sapien
gaaaagatttgtaaaatgacgtacaatatgaag

SEQ ID NO: 40279 - DNA, 33 bp, Homo sapien
cccagggcctcaatgagcctggtccatgaagtg

SEQ ID NO: 40280 - DNA, 33 bp, Homo sapien
cccagggcctcaatgatcctggtccatgaagtg

SEQ ID NO: 40281 - DNA, 33 bp, Homo sapien
atgacaaattcaacaaataaatatggagtccta

SEQ ID NO: 40282 - DNA, 33 bp, Homo sapien
atgacaaattcaacaagtaaatatggagtccta

SEQ ID NO: 40283 - DNA, 33 bp, Homo sapien
tgaatactctggctgaggatttagtctgttctc

SEQ ID NO: 40284 - DNA, 33 bp, Homo sapien
tgaatactctggctgatgatttagtctgttctc

SEQ ID NO: 40285 - DNA, 33 bp, Homo sapien; identical to SEQ ID NO: 40283

SEQ ID NO: 40286 - DNA, 33 bp, Homo sapien; identical to SEQ ID NO: 40284

SEQ ID NO: 40287 - DNA, 33 bp, Homo sapien
gtcactgtaagagcagaacttcctctgatccga

SEQ ID NO: 40288 - DNA, 33 bp, Homo sapien
gtcactgtaagagcaggacttcctctgatccga

SEQ ID NO: 40289 - DNA, 33 bp, Homo sapien; identical to SEQ ID NO: 40287

SEQ ID NO: 40290 - DNA, 33 bp, Homo sapien; identical to SEQ ID NO: 40288

SEQ ID NO: 40291 - DNA, 33 bp, Homo sapien
tggacattttggagaaccaggttatagacgtct

SEQ ID NO: 40292 - DNA, 33 bp, Homo sapien
tggacattttggagaatcaggttatagacgtct

SEQ ID NO: 40293 - DNA, 33 bp, Homo sapien
actggggagactcacaaactctgggtggtagca

SEQ ID NO: 40294 - DNA, 33 bp, Homo sapien
actggggagactcacacactctgggtggtagca

SEQ ID NO: 40295 - DNA, 33 bp, Homo sapien
tttaatgacattataacgagctgggttaaatta

SEQ ID NO: 40296 - DNA, 33 bp, Homo sapien
tttaatgacattataatgagctgggttaaatta

SEQ ID NO: 40297 - DNA, 33 bp, Homo sapien
tagcaccttctgtctgcactattcctcctgaca

SEQ ID NO: 40298 - DNA, 33 bp, Homo sapien
tagcaccttctgtctgtactattcctcctgaca

SEQ ID NO: 40299 - DNA, 33 bp, Homo sapien
aaggctttctccctccagctctttcctaccctc

SEQ ID NO: 40300 - DNA, 33 bp, Homo sapien
aaggctttctccctccggctctttcctaccctc

SEQ ID NO: 40301 - DNA, 33 bp, Homo sapien
gaagttgccagtcatccgagaatgtgggttggt

SEQ ID NO: 40302 - DNA, 33 bp, Homo sapien
gaagttgccagtcatctgagaatgtgggttggt

SEQ ID NO: 40303 - DNA, 33 bp, Homo sapien
tccaggggccctttccagagccatctgcagcca

SEQ ID NO: 40304 - DNA, 33 bp, Homo sapien
tccaggggccctttccggagccatctgcagcca

SEQ ID NO: 40305 - DNA, 33 bp, Homo sapien
tgaggtcacaaatgaacgtttaatagagagcaa

SEQ ID NO: 40306 - DNA, 33 bp, Homo sapien
tgaggtcacaaatgaatgtttaatagagagcaa

SEQ ID NO: 40307 - DNA, 33 bp, Homo sapien
ataaaccattaaaacacgaagcttgcaatcgga

SEQ ID NO: 40308 - DNA, 33 bp, Homo sapien
ataaaccattaaaacatgaagcttgcaatcgga

SEQ ID NO: 40309 - DNA, 33 bp, Homo sapien
tagggaagctttcttaactggagatttgattgt

SEQ ID NO: 40310 - DNA, 33 bp, Homo sapien
tagggaagctttcttagctggagatttgattgt

SEQ ID NO: 40311 - DNA, 33 bp, Homo sapien
gggaggacttctcagacgaggaaatgcaagggc

SEQ ID NO: 40312 - DNA, 33 bp, Homo sapien
gggaggacttctcagatgaggaaatgcaagggc

SEQ ID NO: 40313 - DNA, 33 bp, Homo sapien
attgccagctgagtcaaggagttgtttactctg

SEQ ID NO: 40314 - DNA, 33 bp, Homo sapien
attgccagctgagtcacggagttgtttactctg

SEQ ID NO: 40315 - DNA, 33 bp, Homo sapien
tgggacaatgactgaacagaggggacaaggcct

SEQ ID NO: 40316 - DNA, 33 bp, Homo sapien
tgggacaatgactgaatagaggggacaaggcct

SEQ ID NO: 40317 - DNA, 33 bp, Homo sapien
cagcgccaaaggaggccaccattatcctattca

SEQ ID NO: 40318 - DNA, 33 bp, Homo sapien
cagcgccaaaggaggctaccattatcctattca

SEQ ID NO: 40319 - DNA, 33 bp, Homo sapien
ctttttgagtacatgagacctggaggttcttgg

SEQ ID NO: 40320 - DNA, 33 bp, Homo sapien
ctttttgagtacatgatacctggaggttcttgg

SEQ ID NO: 40321 - DNA, 33 bp, Homo sapien
cactccaaagtccttcaaccacaaggtccactc

SEQ ID NO: 40322 - DNA, 33 bp, Homo sapien
cactccaaagtccttcgaccacaaggtccactc

SEQ ID NO: 40323 - DNA, 33 bp, Homo sapien
cctttgtatttggccacatctcggtttcctctg

SEQ ID NO: 40324 - DNA, 33 bp, Homo sapien
cctttgtatttggccatatctcggtttcctctg

SEQ ID NO: 40325 - DNA, 33 bp, Homo sapien
ctgtaaaaatcattcacggaggctctgacccaa

SEQ ID NO: 40326 - DNA, 33 bp, Homo sapien
ctgtaaaaatcattcatggaggctctgacccaa

SEQ ID NO: 40327 - DNA, 33 bp, Homo sapien
atctactgagtgttcaaccttgcgctggccccc

SEQ ID NO: 40328 - DNA, 33 bp, Homo sapien
atctactgagtgttcacccttgcgctggccccc

SEQ ID NO: 40329 - DNA, 33 bp, Homo sapien
tcaggagacttctggcaccactgtcttcaccaa

SEQ ID NO: 40330 - DNA, 33 bp, Homo sapien
tcaggagacttctggcgccactgtcttcaccaa

SEQ ID NO: 40331 - DNA, 33 bp, Homo sapien
tcaggtacacaggtaacaggacagcccctggtg

SEQ ID NO: 40332 - DNA, 33 bp, Homo sapien
tcaggtacacaggtaagaggacagcccctggtg

SEQ ID NO: 40333 - DNA, 33 bp, Homo sapien
atgtcacagtgtttcacgtccaatacttcaatt

SEQ ID NO: 40334 - DNA, 33 bp, Homo sapien
atgtcacagtgtttcatgtccaatacttcaatt

SEQ ID NO: 40335 - DNA, 33 bp, Homo sapien
gtttacatttctgtaactaaaaggcccatttgg

SEQ ID NO: 40336 - DNA, 33 bp, Homo sapien
gtttacatttctgtaattaaaaggcccatttgg

SEQ ID NO: 40337 - DNA, 33 bp, Homo sapien
atgaagaaaactgtaagtcacgtgctccatagc

SEQ ID NO: 40338 - DNA, 33 bp, Homo sapien
atgaagaaaactgtaattcacgtgctccatagc

SEQ ID NO: 40339 - DNA, 33 bp, Homo sapien
acagagacagctgggacagtagaagagagaagc

SEQ ID NO: 40340 - DNA, 33 bp, Homo sapien
acagagacagctgggatagtagaagagagaagc

SEQ ID NO: 40341 - DNA, 33 bp, Homo sapien
ggggctctgatgtgtgcattaagagtggcaaga

SEQ ID NO: 40342 - DNA, 33 bp, Homo sapien
ggggctctgatgtgtgtattaagagtggcaaga

SEQ ID NO: 40343 - DNA, 33 bp, Homo sapien
cagtgccaggaactcaaatcctttgatgacagt

SEQ ID NO: 40344 - DNA, 33 bp, Homo sapien
cagtgccaggaactcagatcctttgatgacagt

SEQ ID NO: 40345 - DNA, 33 bp, Homo sapien
tgattttattgaactaaatatttgctggaccag

SEQ ID NO: 40346 - DNA, 33 bp, Homo sapien
tgattttattgaactacatatttgctggaccag

SEQ ID NO: 40347 - DNA, 33 bp, Homo sapien
ttttcctagcttatccacaaaaatattataaga

SEQ ID NO: 40348 - DNA, 33 bp, Homo sapien
ttttcctagcttatccgcaaaaatattataaga

SEQ ID NO: 40349 - DNA, 33 bp, Homo sapien
cacccctgggcagagaagtgcaactttaagaga

SEQ ID NO: 40350 - DNA, 33 bp, Homo sapien
cacccctgggcagagaggtgcaactttaagaga

SEQ ID NO: 40351 - DNA, 33 bp, Homo sapien
tgaaaactgaaatggcaatacctggaaagaacc

SEQ ID NO: 40352 - DNA, 33 bp, Homo sapien
tgaaaactgaaatggcgatacctggaaagaacc

SEQ ID NO: 40353 - DNA, 33 bp, Homo sapien
tatgaaagtggcgctcaaagcgttaacttagag

SEQ ID NO: 40354 - DNA, 33 bp, Homo sapien
tatgaaagtggcgctcgaagcgttaacttagag

SEQ ID NO: 40355 - DNA, 33 bp, Homo sapien
tcccccagtgaacagacgaggaaatggaagctc

SEQ ID NO: 40356 - DNA, 33 bp, Homo sapien
tcccccagtgaacagatgaggaaatggaagctc

SEQ ID NO: 40357 - DNA, 33 bp, Homo sapien
gtgctcttctgggcacacaaaacaatgaatatc

SEQ ID NO: 40358 - DNA, 33 bp, Homo sapien
gtgctcttctgggcacgcaaaacaatgaatatc

SEQ ID NO: 40359 - DNA, 33 bp, Homo sapien
tgtgggtatgagaggtgaaatcaagagaaggaa

SEQ ID NO: 40360 - DNA, 33 bp, Homo sapien
tgtgggtatgagaggttaaatcaagagaaggaa

SEQ ID NO: 40361 - DNA, 33 bp, Homo sapien
ctcccccatccttttgaacagacagcagacaag

SEQ ID NO: 40362 - DNA, 33 bp, Homo sapien
ctcccccatccttttggacagacagcagacaag

SEQ ID NO: 40363 - DNA, 33 bp, Homo sapien
aagcacatgcaaatcaaaacatggttaagacag

SEQ ID NO: 40364 - DNA, 33 bp, Homo sapien
aagcacatgcaaatcagaacatggttaagacag

SEQ ID NO: 40365 - DNA, 33 bp, Homo sapien
ggcctggcctgcccccactgtctctcactgatg

SEQ ID NO: 40366 - DNA, 33 bp, Homo sapien
ggcctggcctgcccccgctgtctctcactgatg

SEQ ID NO: 40367 - DNA, 33 bp, Homo sapien
gagttgtaggatgacaaagtgggaatgggccat

SEQ ID NO: 40368 - DNA, 33 bp, Homo sapien
gagttgtaggatgacagagtgggaatgggccat

SEQ ID NO: 40369 - DNA, 33 bp, Homo sapien
tacaacatcctttactcacatctccttcaggga

SEQ ID NO: 40370 - DNA, 33 bp, Homo sapien
tacaacatcctttactgacatctccttcaggga

SEQ ID NO: 40371 - DNA, 33 bp, Homo sapien
tggggatcagagcagcaagaggtgggaggcaaa

SEQ ID NO: 40372 - DNA, 33 bp, Homo sapien
tggggatcagagcagcgagaggtgggaggcaaa

SEQ ID NO: 40373 - DNA, 33 bp, Homo sapien
ttgaactggagaacaacggaagcaaacctgtgt

SEQ ID NO: 40374 - DNA, 33 bp, Homo sapien
ttgaactggagaacaatggaagcaaacctgtgt

SEQ ID NO: 40375 - DNA, 33 bp, Homo sapien
ctctgatttaacacaagttaggttaatttaagg

SEQ ID NO: 40376 - DNA, 33 bp, Homo sapien
ctctgatttaacacaatttaggttaatttaagg

SEQ ID NO: 40377 - DNA, 33 bp, Homo sapien
tgtctggtgacaaaaactgtccacatcaagcag

SEQ ID NO: 40378 - DNA, 33 bp, Homo sapien
tgtctggtgacaaaaagtgtccacatcaagcag

SEQ ID NO: 40379 - DNA, 33 bp, Homo sapien
tcccactgtggagtcacggttatcaaggacctt

SEQ ID NO: 40380 - DNA, 33 bp, Homo sapien
tcccactgtggagtcatggttatcaaggacctt

SEQ ID NO: 40381 - DNA, 33 bp, Homo sapien
ctcagcttctggaggaacgtaatcattctccac

SEQ ID NO: 40382 - DNA, 33 bp, Homo sapien
ctcagcttctggaggagcgtaatcattctccac

SEQ ID NO: 40383 - DNA, 33 bp, Homo sapien
agagagagcaggccaacgattgcagggtaacct

SEQ ID NO: 40384 - DNA, 33 bp, Homo sapien
agagagagcaggccaatgattgcagggtaacct

SEQ ID NO: 40385 - DNA, 33 bp, Homo sapien
cccagtggtaagatgacgagtgaactagaaagc

SEQ ID NO: 40386 - DNA, 33 bp, Homo sapien
cccagtggtaagatgaggagtgaactagaaagc

SEQ ID NO: 40387 - DNA, 33 bp, Homo sapien
gctggatcagggtgaacagaaagagaggaagta

SEQ ID NO: 40388 - DNA, 33 bp, Homo sapien
gctggatcagggtgaatagaaagagaggaagta

SEQ ID NO: 40389 - DNA, 33 bp, Homo sapien
catagaggcagagactaagatagggactcagag

SEQ ID NO: 40390 - DNA, 33 bp, Homo sapien
catagaggcagagactgagatagggactcagag

SEQ ID NO: 40391 - DNA, 33 bp, Homo sapien
gggaaagaaggggaaccataaactggacatgag

SEQ ID NO: 40392 - DNA, 33 bp, Homo sapien
gggaaagaaggggaactataaactggacatgag

SEQ ID NO: 40393 - DNA, 33 bp, Homo sapien
ctgctctgggaacaaaacgtcctgaggatgctg

SEQ ID NO: 40394 - DNA, 33 bp, Homo sapien
ctgctctgggaacaaagcgtcctgaggatgctg

SEQ ID NO: 40395 - DNA, 33 bp, Homo sapien
tcagagtctgcaaggacctagccagcaacctct

SEQ ID NO: 40396 - DNA, 33 bp, Homo sapien
tcagagtctgcaaggatctagccagcaacctct

SEQ ID NO: 40397 - DNA, 33 bp, Homo sapien
tgacagtgcagctctacatacttcttatcctgg

SEQ ID NO: 40398 - DNA, 33 bp, Homo sapien
tgacagtgcagctctagatacttcttatcctgg

SEQ ID NO: 40399 - DNA, 33 bp, Homo sapien
agattggcatcaagcaaatttgaccaggggcta

SEQ ID NO: 40400 - DNA, 33 bp, Homo sapien
agattggcatcaagcacatttgaccaggggcta

SEQ ID NO: 40401 - DNA, 33 bp, Homo sapien
cagacagacaaacagactccaaattccaaatct

SEQ ID NO: 40402 - DNA, 33 bp, Homo sapien
cagacagacaaacagattccaaattccaaatct

SEQ ID NO: 40403 - DNA, 33 bp, Homo sapien
taatgcatcacctctgaaagtcacatttttacc

SEQ ID NO: 40404 - DNA, 33 bp, Homo sapien
taatgcatcacctctggaagtcacatttttacc

SEQ ID NO: 40405 - DNA, 33 bp, Homo sapien
gcaatttgttctatgaccacactgtttagtatg

SEQ ID NO: 40406 - DNA, 33 bp, Homo sapien
gcaatttgttctatgatcacactgtttagtatg

SEQ ID NO: 40407 - DNA, 33 bp, Homo sapien
taggaaggccaagagaaaagatcctttggttca

SEQ ID NO: 40408 - DNA, 33 bp, Homo sapien
taggaaggccaagagagaagatcctttggttca

SEQ ID NO: 40409 - DNA, 33 bp, Homo sapien
gtttagaactttcaggcatcccgtggcatttac

SEQ ID NO: 40410 - DNA, 33 bp, Homo sapien
gtttagaactttcaggtatcccgtggcatttac

SEQ ID NO: 40411 - DNA, 33 bp, Homo sapien
tgacaaatgaaattccagaagcacaagaagaaa

SEQ ID NO: 40412 - DNA, 33 bp, Homo sapien
tgacaaatgaaattccggaagcacaagaagaaa

SEQ ID NO: 40413 - DNA, 33 bp, Homo sapien
ctaaaataatttttcacgggaatgtcttaatag

SEQ ID NO: 40414 - DNA, 33 bp, Homo sapien
ctaaaataatttttcatgggaatgtcttaatag

SEQ ID NO: 40415 - DNA, 33 bp, Homo sapien
aatccttgagttttaacagttaagtgtaccaca

SEQ ID NO: 40416 - DNA, 33 bp, Homo sapien
aatccttgagttttaagagttaagtgtaccaca

SEQ ID NO: 40417 - DNA, 33 bp, Homo sapien
cctgaatgcaagggccaaaactaatctcatcaa

SEQ ID NO: 40418 - DNA, 33 bp, Homo sapien
cctgaatgcaagggccgaaactaatctcatcaa

SEQ ID NO: 40419 - DNA, 33 bp, Homo sapien
ttgttcggaaatctaacattgagatggtaatgg

SEQ ID NO: 40420 - DNA, 33 bp, Homo sapien
ttgttcggaaatctaatattgagatggtaatgg

SEQ ID NO: 40421 - DNA, 33 bp, Homo sapien
ctcatgtgaaaggtccggaaaatagtctaccgt

SEQ ID NO: 40422 - DNA, 33 bp, Homo sapien
ctcatgtgaaaggtcctgaaaatagtctaccgt

SEQ ID NO: 40423 - DNA, 33 bp, Homo sapien
aggggaaggaatcataacagaggggagagtagc

SEQ ID NO: 40424 - DNA, 33 bp, Homo sapien
aggggaaggaatcatagcagaggggagagtagc

SEQ ID NO: 40425 - DNA, 33 bp, Homo sapien
tgacagaattggacttaaaaaagaagtgcattt

SEQ ID NO: 40426 - DNA, 33 bp, Homo sapien
tgacagaattggactttaaaaagaagtgcattt

SEQ ID NO: 40427 - DNA, 33 bp, Homo sapien
ttttattctaagtgaaatggaaaaccattcgag

SEQ ID NO: 40428 - DNA, 33 bp, Homo sapien
ttttattctaagtgaagtggaaaaccattcgag

SEQ ID NO: 40429 - DNA, 33 bp, Homo sapien
cttctggtccctgcatcatcattatatggctct

SEQ ID NO: 40430 - DNA, 33 bp, Homo sapien
cttctggtccctgcattatcattatatggctct

SEQ ID NO: 40431 - DNA, 33 bp, Homo sapien
ccagctgtgattgagacacccaggatgaggagg

SEQ ID NO: 40432 - DNA, 33 bp, Homo sapien
ccagctgtgattgagatacccaggatgaggagg

SEQ ID NO: 40433 - DNA, 33 bp, Homo sapien
caggccctcgaaagccaaaaggaaaaatggccc

SEQ ID NO: 40434 - DNA, 33 bp, Homo sapien
caggccctcgaaagccgaaaggaaaaatggccc

SEQ ID NO: 40435 - DNA, 33 bp, Homo sapien
gaaaatgggaggagaacgccgcgtggactgaag

SEQ ID NO: 40436 - DNA, 33 bp, Homo sapien
gaaaatgggaggagaatgccgcgtggactgaag

SEQ ID NO: 40437 - DNA, 33 bp, Homo sapien
agctgtcttagctggacagatgacaatggactt

SEQ ID NO: 40438 - DNA, 33 bp, Homo sapien
agctgtcttagctggagagatgacaatggactt

SEQ ID NO: 40439 - DNA, 33 bp, Homo sapien
atcctgttggatgcagccgtagggccttctctg

SEQ ID NO: 40440 - DNA, 33 bp, Homo sapien
atcctgttggatgcagtcgtagggccttctctg

SEQ ID NO: 40441 - DNA, 33 bp, Homo sapien
gtgtgggagtcctaaactctaccacttactgga

SEQ ID NO: 40442 - DNA, 33 bp, Homo sapien
gtgtgggagtcctaaagtctaccacttactgga

SEQ ID NO: 40443 - DNA, 33 bp, Homo sapien
ccacaggctcttctggcccaaattgaagcttat

SEQ ID NO: 40444 - DNA, 33 bp, Homo sapien
ccacaggctcttctggtccaaattgaagcttat

SEQ ID NO: 40445 - DNA, 33 bp, Homo sapien
ggaggatgggactggacaaatgggcctctcagg

SEQ ID NO: 40446 - DNA, 33 bp, Homo sapien
ggaggatgggactggagaaatgggcctctcagg

SEQ ID NO: 40447 - DNA, 33 bp, Homo sapien
cataacttctctgaagacttattggtttcaaca

SEQ ID NO: 40448 - DNA, 33 bp, Homo sapien
cataacttctctgaagccttattggtttcaaca

SEQ ID NO: 40449 - DNA, 33 bp, Homo sapien
gaattatctggatctcaccatccactcatctct

SEQ ID NO: 40450 - DNA, 33 bp, Homo sapien
gaattatctggatctcgccatccactcatctct

SEQ ID NO: 40451 - DNA, 33 bp, Homo sapien
ctgctaagaagagctacgttttaaatggaaatg

SEQ ID NO: 40452 - DNA, 33 bp, Homo sapien
ctgctaagaagagctatgttttaaatggaaatg

SEQ ID NO: 40453 - DNA, 33 bp, Homo sapien
agcctgaatccaccacggaacctatggttttct

SEQ ID NO: 40454 - DNA, 33 bp, Homo sapien
agcctgaatccaccactgaacctatggttttct

SEQ ID NO: 40455 - DNA, 33 bp, Homo sapien
gatatgacccagcgggaagaccaggaggattaa

SEQ ID NO: 40456 - DNA, 33 bp, Homo sapien
gatatgacccagcgggtagaccaggaggattaa

SEQ ID NO: 40457 - DNA, 33 bp, Homo sapien
taggggctggcaagaaagttacgtggggtcttt

SEQ ID NO: 40458 - DNA, 33 bp, Homo sapien
taggggctggcaagaatgttacgtggggtcttt

SEQ ID NO: 40459 - DNA, 33 bp, Homo sapien
ccccaattctggtgccagatgctctatacttcc

SEQ ID NO: 40460 - DNA, 33 bp, Homo sapien
ccccaattctggtgccggatgctctatacttcc

SEQ ID NO: 40461 - DNA, 33 bp, Homo sapien
acatgggaaaacataaaatttccaggctccaaa

SEQ ID NO: 40462 - DNA, 33 bp, Homo sapien
acatgggaaaacataacatttccaggctccaaa

SEQ ID NO: 40463 - DNA, 33 bp, Homo sapien
aatgccttgaatacccacctgtcaaatgaagaa

SEQ ID NO: 40464 - DNA, 33 bp, Homo sapien
aatgccttgaatacccgcctgtcaaatgaagaa

SEQ ID NO: 40465 - DNA, 33 bp, Homo sapien
gggagggaaatcaaaacgtgcattcatgagcag

SEQ ID NO: 40466 - DNA, 33 bp, Homo sapien
gggagggaaatcaaaatgtgcattcatgagcag

SEQ ID NO: 40467 - DNA, 33 bp, Homo sapien
ttatttttatcgctcacggatttcctgggaaat

SEQ ID NO: 40468 - DNA, 33 bp, Homo sapien
ttatttttatcgctcatggatttcctgggaaat

SEQ ID NO: 40469 - DNA, 33 bp, Homo sapien
ctctgatgactataacaacatcctttaggggac

SEQ ID NO: 40470 - DNA, 33 bp, Homo sapien
ctctgatgactataacgacatcctttaggggac

SEQ ID NO: 40471 - DNA, 33 bp, Homo sapien
atgaaaactcctgtcccgactacatgatgcatc

SEQ ID NO: 40472 - DNA, 33 bp, Homo sapien
atgaaaactcctgtcctgactacatgatgcatc

SEQ ID NO: 40473 - DNA, 33 bp, Homo sapien
gaagaaagtcaggtgaaagacagctcttcaggg

SEQ ID NO: 40474 - DNA, 33 bp, Homo sapien
gaagaaagtcaggtgagagacagctcttcaggg

SEQ ID NO: 40475 - DNA, 33 bp, Homo sapien
tgagacccagttccaccaagagaatccccacat

SEQ ID NO: 40476 - DNA, 33 bp, Homo sapien
tgagacccagttccactaagagaatccccacat

SEQ ID NO: 40477 - DNA, 33 bp, Homo sapien
aaacacaagccctggactcagttcgaaatgggt

SEQ ID NO: 40478 - DNA, 33 bp, Homo sapien
aaacacaagccctggagtcagttcgaaatgggt

SEQ ID NO: 40479 - DNA, 33 bp, Homo sapien
acttccccactctgatcaaggccattccaacca

SEQ ID NO: 40480 - DNA, 33 bp, Homo sapien
acttccccactctgattaaggccattccaacca

SEQ ID NO: 40481 - DNA, 33 bp, Homo sapien
ggttctgaacatgagaataagtgtatacagtaa

SEQ ID NO: 40482 - DNA, 33 bp, Homo sapien
ggttctgaacatgagagtaagtgtatacagtaa

SEQ ID NO: 40483 - DNA, 33 bp, Homo sapien
ggtgacataaagacttcaacggagtgagagagt

SEQ ID NO: 40484 - DNA, 33 bp, Homo sapien
ggtgacataaagacttgaacggagtgagagagt

SEQ ID NO: 40485 - DNA, 33 bp, Homo sapien
ggtaacaaaagagttacgctcaactcaggccag

SEQ ID NO: 40486 - DNA, 33 bp, Homo sapien
ggtaacaaaagagttatgctcaactcaggccag

SEQ ID NO: 40487 - DNA, 33 bp, Homo sapien
gtgggaaactttgatgaaccctttctggtaagt

SEQ ID NO: 40488 - DNA, 33 bp, Homo sapien
gtgggaaactttgatggaccctttctggtaagt

SEQ ID NO: 40489 - DNA, 33 bp, Homo sapien
gtaactcctagggccgcacttcacttgtgtagc

SEQ ID NO: 40490 - DNA, 33 bp, Homo sapien
gtaactcctagggccgtacttcacttgtgtagc

SEQ ID NO: 40491 - DNA, 33 bp, Homo sapien
ccacttggactgaaagaacccaagtaaaagaag

SEQ ID NO: 40492 - DNA, 33 bp, Homo sapien
ccacttggactgaaagcacccaagtaaaagaag

SEQ ID NO: 40493 - DNA, 33 bp, Homo sapien
tgccacacatctggcacggagccaaggcagaag

SEQ ID NO: 40494 - DNA, 33 bp, Homo sapien
tgccacacatctggcatggagccaaggcagaag

SEQ ID NO: 40495 - DNA, 33 bp, Homo sapien
cactgttcacatttcacaaagggtgcagcagag

SEQ ID NO: 40496 - DNA, 33 bp, Homo sapien
cactgttcacatttcagaaagggtgcagcagag

SEQ ID NO: 40497 - DNA, 33 bp, Homo sapien
cctgtgtcatcctgcacgaactgtttgtgtaaa

SEQ ID NO: 40498 - DNA, 33 bp, Homo sapien
cctgtgtcatcctgcatgaactgtttgtgtaaa

SEQ ID NO: 40499 - DNA, 33 bp, Homo sapien
tcattagccgtcaacacgagttactgtcctacc

SEQ ID NO: 40500 - DNA, 33 bp, Homo sapien
tcattagccgtcaacatgagttactgtcctacc

SEQ ID NO: 40501 - DNA, 33 bp, Homo sapien
ttggtggttaaaaatccgaccataatctaccac

SEQ ID NO: 40502 - DNA, 33 bp, Homo sapien
ttggtggttaaaaatctgaccataatctaccac

SEQ ID NO: 40503 - DNA, 33 bp, Homo sapien
gattcagcagaccttcaaggaagcggcttctgg

SEQ ID NO: 40504 - DNA, 33 bp, Homo sapien
gattcagcagaccttcgaggaagcggcttctgg

SEQ ID NO: 40505 - DNA, 33 bp, Homo sapien
gtcagtgccacttaccaaaagcttcatagccat

SEQ ID NO: 40506 - DNA, 33 bp, Homo sapien
gtcagtgccacttaccgaaagcttcatagccat

SEQ ID NO: 40507 - DNA, 33 bp, Homo sapien
cagtctagcccggatcactatccaagaacccgc

SEQ ID NO: 40508 - DNA, 33 bp, Homo sapien
cagtctagcccggatcgctatccaagaacccgc

SEQ ID NO: 40509 - DNA, 33 bp, Homo sapien
ttgctctggctggaccatgctaagcagacagtc

SEQ ID NO: 40510 - DNA, 33 bp, Homo sapien
ttgctctggctggaccgtgctaagcagacagtc

SEQ ID NO: 40511 - DNA, 33 bp, Homo sapien
tccatcttcttaagaccgtatgccccagccacc

SEQ ID NO: 40512 - DNA, 33 bp, Homo sapien
tccatcttcttaagactgtatgccccagccacc

SEQ ID NO: 40513 - DNA, 33 bp, Homo sapien
tggtccccagttgtgccaccagtctctagttgg

SEQ ID NO: 40514 - DNA, 33 bp, Homo sapien
tggtccccagttgtgctaccagtctctagttgg

SEQ ID NO: 40515 - DNA, 33 bp, Homo sapien
aggactaaggacttcactgaaatgaggctgatt

SEQ ID NO: 40516 - DNA, 33 bp, Homo sapien
aggactaaggacttcagtgaaatgaggctgatt

SEQ ID NO: 40517 - DNA, 33 bp, Homo sapien
aagaaaagacttcacaaaagaaatcaatatatc

SEQ ID NO: 40518 - DNA, 33 bp, Homo sapien
aagaaaagacttcacagaagaaatcaatatatc

SEQ ID NO: 40519 - DNA, 33 bp, Homo sapien
acctctaacaacaaaaatgcctctgtgtccaga

SEQ ID NO: 40520 - DNA, 33 bp, Homo sapien
acctctaacaacaaaagtgcctctgtgtccaga

SEQ ID NO: 40521 - DNA, 33 bp, Homo sapien
ggtcatttgggtttcaaaggatgaaagtctgcc

SEQ ID NO: 40522 - DNA, 33 bp, Homo sapien
ggtcatttgggtttcacaggatgaaagtctgcc

SEQ ID NO: 40523 - DNA, 33 bp, Homo sapien
ctctccaaaccagagagggttaactttttgaca

SEQ ID NO: 40524 - DNA, 33 bp, Homo sapien
ctctccaaaccagagatggttaactttttgaca

SEQ ID NO: 40525 - DNA, 33 bp, Homo sapien
tagctctactactaaccagcaatgtaactgtgg

SEQ ID NO: 40526 - DNA, 33 bp, Homo sapien
tagctctactactaactagcaatgtaactgtgg

SEQ ID NO: 40527 - DNA, 33 bp, Homo sapien
agagcaaaaagctaagaatgggaagcaagactc

SEQ ID NO: 40528 - DNA, 33 bp, Homo sapien
agagcaaaaagctaagtatgggaagcaagactc

SEQ ID NO: 40529 - DNA, 33 bp, Homo sapien
tatttgggataggaataaaccagtccaaacaga

SEQ ID NO: 40530 - DNA, 33 bp, Homo sapien
tatttgggataggaatgaaccagtccaaacaga

SEQ ID NO: 40531 - DNA, 33 bp, Homo sapien
gaactgcggagatttacatagacaccacaacca

SEQ ID NO: 40532 - DNA, 33 bp, Homo sapien
gaactgcggagatttagatagacaccacaacca

SEQ ID NO: 40533 - DNA, 33 bp, Homo sapien
cactcaaaaactgaccagagaattggctaccag

SEQ ID NO: 40534 - DNA, 33 bp, Homo sapien
cactcaaaaactgaccggagaattggctaccag

SEQ ID NO: 40535 - DNA, 33 bp, Homo sapien
gagggagtcatccaaacttcagagtctgcactg

SEQ ID NO: 40536 - DNA, 33 bp, Homo sapien
gagggagtcatccaaatttcagagtctgcactg

SEQ ID NO: 40537 - DNA, 33 bp, Homo sapien
tatatgccaataaaacgcaagctgagaagcaaa

SEQ ID NO: 40538 - DNA, 33 bp, Homo sapien
tatatgccaataaaactcaagctgagaagcaaa

SEQ ID NO: 40539 - DNA, 33 bp, Homo sapien
ataatttgaggtcagacaatgtaatggctccag

SEQ ID NO: 40540 - DNA, 33 bp, Homo sapien
ataatttgaggtcagataatgtaatggctccag

SEQ ID NO: 40541 - DNA, 33 bp, Homo sapien
aggacattttgtattcaacacatcttagaacag

SEQ ID NO: 40542 - DNA, 33 bp, Homo sapien
aggacattttgtattcgacacatcttagaacag

SEQ ID NO: 40543 - DNA, 33 bp, Homo sapien
caactctgggctctaacaaattagcattgggaa

SEQ ID NO: 40544 - DNA, 33 bp, Homo sapien
caactctgggctctaataaattagcattgggaa

SEQ ID NO: 40545 - DNA, 33 bp, Homo sapien
gggaagtaacatcataaaaggccccagacccag

SEQ ID NO: 40546 - DNA, 33 bp, Homo sapien
gggaagtaacatcatagaaggccccagacccag

SEQ ID NO: 40547 - DNA, 33 bp, Homo sapien
atgatctcactaggtgcagatttataagaccct

SEQ ID NO: 40548 - DNA, 33 bp, Homo sapien
atgatctcactaggtgtagatttataagaccct

SEQ ID NO: 40549 - DNA, 33 bp, Homo sapien
ggtgttctgctgaccccgggatgacagatacga

SEQ ID NO: 40550 - DNA, 33 bp, Homo sapien
ggtgttctgctgaccctgggatgacagatacga

SEQ ID NO: 40551 - DNA, 33 bp, Homo sapien
gggtcagcagaacacccatcatcatggaaggca

SEQ ID NO: 40552 - DNA, 33 bp, Homo sapien
gggtcagcagaacacctatcatcatggaaggca

SEQ ID NO: 40553 - DNA, 33 bp, Homo sapien
agttgtagactgaggacctgtttcctatccagg

SEQ ID NO: 40554 - DNA, 33 bp, Homo sapien
agttgtagactgaggatctgtttcctatccagg

SEQ ID NO: 40555 - DNA, 33 bp, Homo sapien
cacccaaatgttgggggagataactaggcgatg

SEQ ID NO: 40556 - DNA, 33 bp, Homo sapien
cacccaaatgttggggtagataactaggcgatg

SEQ ID NO: 40557 - DNA, 33 bp, Homo sapien
tgagtgaaatctgaaaacttactacctatttgg

SEQ ID NO: 40558 - DNA, 33 bp, Homo sapien
tgagtgaaatctgaaatcttactacctatttgg

SEQ ID NO: 40559 - DNA, 33 bp, Homo sapien
tgtcctggttctattaaagcccactctcaaggg

SEQ ID NO: 40560 - DNA, 33 bp, Homo sapien
tgtcctggttctattagagcccactctcaaggg

SEQ ID NO: 40561 - DNA, 33 bp, Homo sapien
gcatcaatgggctaacagagtgtaatgggctga

SEQ ID NO: 40562 - DNA, 33 bp, Homo sapien
gcatcaatgggctaacggagtgtaatgggctga

SEQ ID NO: 40563 - DNA, 33 bp, Homo sapien
ggaatttggaacgcaacagaaggaaaaatgggg

SEQ ID NO: 40564 - DNA, 33 bp, Homo sapien
ggaatttggaacgcaatagaaggaaaaatgggg

SEQ ID NO: 40565 - DNA, 33 bp, Homo sapien
gatttttatgtttctgcagagaagtacttttct

SEQ ID NO: 40566 - DNA, 33 bp, Homo sapien
gatttttatgtttctgtagagaagtacttttct

SEQ ID NO: 40567 - DNA, 33 bp, Homo sapien
taagaccacagatttcacctgagaggctgacag

SEQ ID NO: 40568 - DNA, 33 bp, Homo sapien
taagaccacagatttcgcctgagaggctgacag

SEQ ID NO: 40569 - DNA, 33 bp, Homo sapien
aggaaatgtgggagctcagagcagtgaaggagc

SEQ ID NO: 40570 - DNA, 33 bp, Homo sapien
aggaaatgtgggagcttagagcagtgaaggagc

SEQ ID NO: 40571 - DNA, 33 bp, Homo sapien
ggtgtacagagccatgaaaagaagtctcatgga

SEQ ID NO: 40572 - DNA, 33 bp, Homo sapien
ggtgtacagagccatgcaaagaagtctcatgga

SEQ ID NO: 40573 - DNA, 33 bp, Homo sapien
gaggagaaaagctgagcatcccagcctggttag

SEQ ID NO: 40574 - DNA, 33 bp, Homo sapien
gaggagaaaagctgagtatcccagcctggttag

SEQ ID NO: 40575 - DNA, 33 bp, Homo sapien
acagatggaaaagacacggggagcttggacaac

SEQ ID NO: 40576 - DNA, 33 bp, Homo sapien
acagatggaaaagacatggggagcttggacaac

SEQ ID NO: 40577 - DNA, 33 bp, Homo sapien
ctttccttcctcattacgaccatccaccttgtc

SEQ ID NO: 40578 - DNA, 33 bp, Homo sapien
ctttccttcctcattatgaccatccaccttgtc

SEQ ID NO: 40579 - DNA, 33 bp, Homo sapien
tagatttttgattcaaagaagcaagagcctcct

SEQ ID NO: 40580 - DNA, 33 bp, Homo sapien
tagatttttgattcaaggaagcaagagcctcct

SEQ ID NO: 40581 - DNA, 33 bp, Homo sapien
taaggcacctcctggaagatcttgcagccctct

SEQ ID NO: 40582 - DNA, 33 bp, Homo sapien
taaggcacctcctggaggatcttgcagccctct

SEQ ID NO: 40583 - DNA, 33 bp, Homo sapien
ctggtgaattacccctcaacctgagaagcactt

SEQ ID NO: 40584 - DNA, 33 bp, Homo sapien
ctggtgaattaccccttaacctgagaagcactt

SEQ ID NO: 40585 - DNA, 33 bp, Homo sapien
ggtatcagatttggcactcacccattcatatcc

SEQ ID NO: 40586 - DNA, 33 bp, Homo sapien
ggtatcagatttggcattcacccattcatatcc

SEQ ID NO: 40587 - DNA, 33 bp, Homo sapien
cctttagtgaagtccaagcattctctgaagcaa

SEQ ID NO: 40588 - DNA, 33 bp, Homo sapien
cctttagtgaagtccaggcattctctgaagcaa

SEQ ID NO: 40589 - DNA, 33 bp, Homo sapien
tcaactcaagtctaaaagagaatttatcacaac

SEQ ID NO: 40590 - DNA, 33 bp, Homo sapien
tcaactcaagtctaaaggagaatttatcacaac

SEQ ID NO: 40591 - DNA, 33 bp, Homo sapien
cccaaatagaacaaaacgagtaaaaggaaactc

SEQ ID NO: 40592 - DNA, 33 bp, Homo sapien
cccaaatagaacaaaaggagtaaaaggaaactc

SEQ ID NO: 40593 - DNA, 33 bp, Homo sapien
acgcagaatggcctaacgcagtgctatgatgaa

SEQ ID NO: 40594 - DNA, 33 bp, Homo sapien
acgcagaatggcctaatgcagtgctatgatgaa

SEQ ID NO: 40595 - DNA, 33 bp, Homo sapien
tttagcctcttttttgcatctgccaggaaattg

SEQ ID NO: 40596 - DNA, 33 bp, Homo sapien
tttagcctcttttttgtatctgccaggaaattg

SEQ ID NO: 40597 - DNA, 33 bp, Homo sapien
aaagttgtacggcgaacgactgaaggagccaaa

SEQ ID NO: 40598 - DNA, 33 bp, Homo sapien
aaagttgtacggcgaatgactgaaggagccaaa

SEQ ID NO: 40599 - DNA, 33 bp, Homo sapien
taatcgtgcatatttcaaaactaagtgttcttc

SEQ ID NO: 40600 - DNA, 33 bp, Homo sapien
taatcgtgcatatttcgaaactaagtgttcttc

SEQ ID NO: 40601 - DNA, 33 bp, Homo sapien
ggaagagtggaataacaatgatggtaatagttt

SEQ ID NO: 40602 - DNA, 33 bp, Homo sapien
ggaagagtggaataacgatgatggtaatagttt

SEQ ID NO: 40603 - DNA, 33 bp, Homo sapien
acaggaaacattactacacatttctgcctaaaa

SEQ ID NO: 40604 - DNA, 33 bp, Homo sapien
acaggaaacattactagacatttctgcctaaaa

SEQ ID NO: 40605 - DNA, 33 bp, Homo sapien
gtacccaggacagtgaaatacagaaaacagagc

SEQ ID NO: 40606 - DNA, 33 bp, Homo sapien
gtacccaggacagtgagatacagaaaacagagc

SEQ ID NO: 40607 - DNA, 33 bp, Homo sapien
ataaatatgcaaccaactctcttatttgcattt

SEQ ID NO: 40608 - DNA, 33 bp, Homo sapien
ataaatatgcaaccaagtctcttatttgcattt

SEQ ID NO: 40609 - DNA, 33 bp, Homo sapien
cccacgtccatagaacaaaaggaagtttacttt

SEQ ID NO: 40610 - DNA, 33 bp, Homo sapien
cccacgtccatagaacgaaaggaagtttacttt

SEQ ID NO: 40611 - DNA, 33 bp, Homo sapien
cctttccaaacacatcagaaatatagatagcat

SEQ ID NO: 40612 - DNA, 33 bp, Homo sapien
cctttccaaacacatcggaaatatagatagcat

SEQ ID NO: 40613 - DNA, 33 bp, Homo sapien
gtgcaggtcacctcgacggtcaccgcgcgggga

SEQ ID NO: 40614 - DNA, 33 bp, Homo sapien
gtgcaggtcacctcgatggtcaccgcgcgggga

SEQ ID NO: 40615 - DNA, 33 bp, Homo sapien
agccattccagttcaaacctcttcaagcagaag

SEQ ID NO: 40616 - DNA, 33 bp, Homo sapien
agccattccagttcaagcctcttcaagcagaag

SEQ ID NO: 40617 - DNA, 33 bp, Homo sapien
ggcacttgggtctccacgagcttctgcctgctt

SEQ ID NO: 40618 - DNA, 33 bp, Homo sapien
ggcacttgggtctccatgagcttctgcctgctt

SEQ ID NO: 40619 - DNA, 33 bp, Homo sapien
atgaatttaggtttcaccttgctggtgatgaag

SEQ ID NO: 40620 - DNA, 33 bp, Homo sapien
atgaatttaggtttcatcttgctggtgatgaag

SEQ ID NO: 40621 - DNA, 33 bp, Homo sapien
tatttggagctatttgaagcaatagtaatatga

SEQ ID NO: 40622 - DNA, 33 bp, Homo sapien
tatttggagctatttgcagcaatagtaatatga

SEQ ID NO: 40623 - DNA, 33 bp, Homo sapien
ttcaaggtgtgaatcaagccaggtgcggtggtg

SEQ ID NO: 40624 - DNA, 33 bp, Homo sapien
ttcaaggtgtgaatcaggccaggtgcggtggtg

SEQ ID NO: 40625 - DNA, 33 bp, Homo sapien
gtcttggtgtgagtgaaagggaaccaataatct

SEQ ID NO: 40626 - DNA, 33 bp, Homo sapien
gtcttggtgtgagtgagagggaaccaataatct

SEQ ID NO: 40627 - DNA, 33 bp, Homo sapien
tcctctgccccaagtaagatagaaggataccca

SEQ ID NO: 40628 - DNA, 33 bp, Homo sapien
tcctctgccccaagtaggatagaaggataccca

SEQ ID NO: 40629 - DNA, 33 bp, Homo sapien
gtgtggctaagcaatacgccaagatcacacagc

SEQ ID NO: 40630 - DNA, 33 bp, Homo sapien
gtgtggctaagcaatatgccaagatcacacagc

SEQ ID NO: 40631 - DNA, 33 bp, Homo sapien
ttcctgaagaaggggacctaaggagagaagaaa

SEQ ID NO: 40632 - DNA, 33 bp, Homo sapien
ttcctgaagaaggggatctaaggagagaagaaa

SEQ ID NO: 40633 - DNA, 33 bp, Homo sapien
tgaagcccccaattcccacagcttttccattaa

SEQ ID NO: 40634 - DNA, 33 bp, Homo sapien
tgaagcccccaattcctacagcttttccattaa

SEQ ID NO: 40635 - DNA, 33 bp, Homo sapien
gggacagtgtagtccacagaatgccaactggct

SEQ ID NO: 40636 - DNA, 33 bp, Homo sapien
gggacagtgtagtccatagaatgccaactggct

SEQ ID NO: 40637 - DNA, 33 bp, Homo sapien
ttatctccctgttgcaatcttagttggacaagt

SEQ ID NO: 40638 - DNA, 33 bp, Homo sapien
ttatctccctgttgcagtcttagttggacaagt

SEQ ID NO: 40639 - DNA, 33 bp, Homo sapien
accacttcccaaattagcttgaaatgttagtgg

SEQ ID NO: 40640 - DNA, 33 bp, Homo sapien
accacttcccaaattatcttgaaatgttagtgg

SEQ ID NO: 40641 - DNA, 33 bp, Homo sapien
ccgtaagccaaggaaaagactcatgcattgaat

SEQ ID NO: 40642 - DNA, 33 bp, Homo sapien
ccgtaagccaaggaaaggactcatgcattgaat

SEQ ID NO: 40643 - DNA, 33 bp, Homo sapien
tccagtggaacacacaaacgtgtaggcaactaa

SEQ ID NO: 40644 - DNA, 33 bp, Homo sapien
tccagtggaacacacagacgtgtaggcaactaa

SEQ ID NO: 40645 - DNA, 33 bp, Homo sapien
gacctgctgctctgtgcacacctgagatttgga

SEQ ID NO: 40646 - DNA, 33 bp, Homo sapien
gacctgctgctctgtgtacacctgagatttgga

SEQ ID NO: 40647 - DNA, 33 bp, Homo sapien
tcggagtaggtgaagacgtcgccaggttcctgg

SEQ ID NO: 40648 - DNA, 33 bp, Homo sapien
tcggagtaggtgaagatgtcgccaggttcctgg

SEQ ID NO: 40649 - DNA, 33 bp, Homo sapien
ggaccacctcttgaggaagtcaaagaaggggtt

SEQ ID NO: 40650 - DNA, 33 bp, Homo sapien
ggaccacctcttgagggagtcaaagaaggggtt

SEQ ID NO: 40651 - DNA, 33 bp, Homo sapien
tagctatgacatagaaaacaaaggcctggtcaa

SEQ ID NO: 40652 - DNA, 33 bp, Homo sapien
tagctatgacatagaagacaaaggcctggtcaa

SEQ ID NO: 40653 - DNA, 33 bp, Homo sapien
accagctgatatgttacctccactgggaagact

SEQ ID NO: 40654 - DNA, 33 bp, Homo sapien
accagctgatatgttatctccactgggaagact

SEQ ID NO: 40655 - DNA, 33 bp, Homo sapien
atgccagctttgtacaccttgtttatatcctgt

SEQ ID NO: 40656 - DNA, 33 bp, Homo sapien
atgccagctttgtacatcttgtttatatcctgt

SEQ ID NO: 40657 - DNA, 33 bp, Homo sapien
accatttccttctcaacctttgctctccgataa

SEQ ID NO: 40658 - DNA, 33 bp, Homo sapien
accatttccttctcaatctttgctctccgataa

SEQ ID NO: 40659 - DNA, 33 bp, Homo sapien
agtggactgggaatccaagaatcttcagaaatt

SEQ ID NO: 40660 - DNA, 33 bp, Homo sapien
agtggactgggaatccgagaatcttcagaaatt

SEQ ID NO: 40661 - DNA, 33 bp, Homo sapien
atgaggcaatggagtcacaaagcagtcaaagta

SEQ ID NO: 40662 - DNA, 33 bp, Homo sapien
atgaggcaatggagtcgcaaagcagtcaaagta

SEQ ID NO: 40663 - DNA, 33 bp, Homo sapien
agattcaaatcccttccctattgcttcctggct

SEQ ID NO: 40664 - DNA, 33 bp, Homo sapien
agattcaaatcccttctctattgcttcctggct

SEQ ID NO: 40665 - DNA, 33 bp, Homo sapien
tgtggccactcaaagacgtgtcaacaccagaac

SEQ ID NO: 40666 - DNA, 33 bp, Homo sapien
tgtggccactcaaagatgtgtcaacaccagaac

SEQ ID NO: 40667 - DNA, 33 bp, Homo sapien
gaaactgaagctagaaagaacctgaggaaagaa

SEQ ID NO: 40668 - DNA, 33 bp, Homo sapien
gaaactgaagctagaatgaacctgaggaaagaa

SEQ ID NO: 40669 - DNA, 33 bp, Homo sapien
aggtccaggaaaaagaacccaggagtcctgcct

SEQ ID NO: 40670 - DNA, 33 bp, Homo sapien
aggtccaggaaaaagaccccaggagtcctgcct

SEQ ID NO: 40671 - DNA, 33 bp, Homo sapien
cccactttccaaagtccgaagggtaaataccca

SEQ ID NO: 40672 - DNA, 33 bp, Homo sapien
cccactttccaaagtctgaagggtaaataccca

SEQ ID NO: 40673 - DNA, 33 bp, Homo sapien
cagacacatggcgagcacgatgtaaaagctggt

SEQ ID NO: 40674 - DNA, 33 bp, Homo sapien
cagacacatggcgagcgcgatgtaaaagctggt

SEQ ID NO: 40675 - DNA, 33 bp, Homo sapien
agttggctgcagacagcagatgaggccaaggtc

SEQ ID NO: 40676 - DNA, 33 bp, Homo sapien
agttggctgcagacagtagatgaggccaaggtc

SEQ ID NO: 40677 - DNA, 33 bp, Homo sapien
ccactttatggatgagaaattgagacacaaaga

SEQ ID NO: 40678 - DNA, 33 bp, Homo sapien
ccactttatggatgaggaattgagacacaaaga

SEQ ID NO: 40679 - DNA, 33 bp, Homo sapien
cttctgttgggtcttacatggggctttgagcag

SEQ ID NO: 40680 - DNA, 33 bp, Homo sapien
cttctgttgggtcttatatggggctttgagcag

SEQ ID NO: 40681 - DNA, 33 bp, Homo sapien
aactggtgttcttagaaggctcaggactaaact

SEQ ID NO: 40682 - DNA, 33 bp, Homo sapien
aactggtgttcttagacggctcaggactaaact

SEQ ID NO: 40683 - DNA, 33 bp, Homo sapien
gttaagatccaggtgcagagattgaagtgtggg

SEQ ID NO: 40684 - DNA, 33 bp, Homo sapien
gttaagatccaggtgcggagattgaagtgtggg

SEQ ID NO: 40685 - DNA, 33 bp, Homo sapien
ccttgagttgaggtctaaattctggctcaggaa

SEQ ID NO: 40686 - DNA, 33 bp, Homo sapien
ccttgagttgaggtctgaattctggctcaggaa

SEQ ID NO: 40687 - DNA, 33 bp, Homo sapien
atataggtcccaagcaaagaggtaacctagatc

SEQ ID NO: 40688 - DNA, 33 bp, Homo sapien
atataggtcccaagcagagaggtaacctagatc

SEQ ID NO: 40689 - DNA, 33 bp, Homo sapien
ccagcagcaaatgaaaagataaacaacttgtgt

SEQ ID NO: 40690 - DNA, 33 bp, Homo sapien
ccagcagcaaatgaaaggataaacaacttgtgt

SEQ ID NO: 40691 - DNA, 33 bp, Homo sapien
tcctgtgacaataagaatagagaagcaacgtca

SEQ ID NO: 40692 - DNA, 33 bp, Homo sapien
tcctgtgacaataagagtagagaagcaacgtca

SEQ ID NO: 40693 - DNA, 33 bp, Homo sapien
ccctgcccatggtacaaaccttttaacacagtt

SEQ ID NO: 40694 - DNA, 33 bp, Homo sapien
ccctgcccatggtacacaccttttaacacagtt

SEQ ID NO: 40695 - DNA, 33 bp, Homo sapien
ccatacaggccacaacagggtgaaaactgatag

SEQ ID NO: 40696 - DNA, 33 bp, Homo sapien
ccatacaggccacaaccgggtgaaaactgatag

SEQ ID NO: 40697 - DNA, 33 bp, Homo sapien
acaagttgtccaaaaaatcaatggcatcccatt

SEQ ID NO: 40698 - DNA, 33 bp, Homo sapien
acaagttgtccaaaaattcaatggcatcccatt

SEQ ID NO: 40699 - DNA, 33 bp, Homo sapien
attatttcttgccccaatcaaatgtgacttttt

SEQ ID NO: 40700 - DNA, 33 bp, Homo sapien
attatttcttgccccagtcaaatgtgacttttt

SEQ ID NO: 40701 - DNA, 33 bp, Homo sapien
tccaggctactgtcagaccccaggtaatgttac

SEQ ID NO: 40702 - DNA, 33 bp, Homo sapien
tccaggctactgtcagtccccaggtaatgttac

SEQ ID NO: 40703 - DNA, 33 bp, Homo sapien
gaaagaaaggaacaccacctcccatcaccttca

SEQ ID NO: 40704 - DNA, 33 bp, Homo sapien
gaaagaaaggaacaccgcctcccatcaccttca

SEQ ID NO: 40705 - DNA, 33 bp, Homo sapien
actttagatgggactgaaaagacactaaggtta

SEQ ID NO: 40706 - DNA, 33 bp, Homo sapien
actttagatgggactggaaagacactaaggtta

SEQ ID NO: 40707 - DNA, 33 bp, Homo sapien
agacagatagatgagcagagaaagggattgatg

SEQ ID NO: 40708 - DNA, 33 bp, Homo sapien
agacagatagatgagcggagaaagggattgatg

SEQ ID NO: 40709 - DNA, 33 bp, Homo sapien
cctgcttacctaacagacagaagaaggccagat

SEQ ID NO: 40710 - DNA, 33 bp, Homo sapien
cctgcttacctaacaggcagaagaaggccagat

SEQ ID NO: 40711 - DNA, 33 bp, Homo sapien
gaacgttgtctgctaacgatttgcaaggtctcc

SEQ ID NO: 40712 - DNA, 33 bp, Homo sapien
gaacgttgtctgctaatgatttgcaaggtctcc

SEQ ID NO: 40713 - DNA, 33 bp, Homo sapien
tggatcctgagaaatgaaaggagtgccgctgcc

SEQ ID NO: 40714 - DNA, 33 bp, Homo sapien
tggatcctgagaaatggaaggagtgccgctgcc

SEQ ID NO: 40715 - DNA, 33 bp, Homo sapien
cagaggtgacttagaaacaactcaggcatgagg

SEQ ID NO: 40716 - DNA, 33 bp, Homo sapien
cagaggtgacttagaaccaactcaggcatgagg

SEQ ID NO: 40717 - DNA, 33 bp, Homo sapien
gtactgctactctgaccggttattttggagatg

SEQ ID NO: 40718 - DNA, 33 bp, Homo sapien
gtactgctactctgactggttattttggagatg

SEQ ID NO: 40719 - DNA, 33 bp, Homo sapien
cccataaacccacctccgaagtggacctaataa

SEQ ID NO: 40720 - DNA, 33 bp, Homo sapien
cccataaacccacctctgaagtggacctaataa

SEQ ID NO: 40721 - DNA, 33 bp, Homo sapien
gccctgtaatggggtaccacaagaagaccagct

SEQ ID NO: 40722 - DNA, 33 bp, Homo sapien
gccctgtaatggggtatcacaagaagaccagct

SEQ ID NO: 40723 - DNA, 33 bp, Homo sapien
tggaagcaagataacgcaccaagaaagctgagg

SEQ ID NO: 40724 - DNA, 33 bp, Homo sapien
tggaagcaagataacgtaccaagaaagctgagg

SEQ ID NO: 40725 - DNA, 33 bp, Homo sapien
agaagaaacttcctgacgcttctataaagttgg

SEQ ID NO: 40726 - DNA, 33 bp, Homo sapien
agaagaaacttcctgatgcttctataaagttgg

SEQ ID NO: 40727 - DNA, 33 bp, Homo sapien
tggaaggaagtgagaacgaaagagatagctttg

SEQ ID NO: 40728 - DNA, 33 bp, Homo sapien
tggaaggaagtgagaatgaaagagatagctttg

SEQ ID NO: 40729 - DNA, 33 bp, Homo sapien
tgaattgcctctttataacttccgtccatttta

SEQ ID NO: 40730 - DNA, 33 bp, Homo sapien
tgaattgcctctttatcacttccgtccatttta

SEQ ID NO: 40731 - DNA, 33 bp, Homo sapien
aataaaacatgatacccgaaagccataaggaaa

SEQ ID NO: 40732 - DNA, 33 bp, Homo sapien
aataaaacatgatacctgaaagccataaggaaa

SEQ ID NO: 40733 - DNA, 33 bp, Homo sapien
atattacataaaattacaggagaatgttgtttt

SEQ ID NO: 40734 - DNA, 33 bp, Homo sapien
atattacataaaattataggagaatgttgtttt

SEQ ID NO: 40735 - DNA, 33 bp, Homo sapien
aggcacttggttatcacccctagctcccaggta

SEQ ID NO: 40736 - DNA, 33 bp, Homo sapien
aggcacttggttatcatccctagctcccaggta

SEQ ID NO: 40737 - DNA, 33 bp, Homo sapien
gacaacaatctgtgaccacatcctctctagatc

SEQ ID NO: 40738 - DNA, 33 bp, Homo sapien
gacaacaatctgtgactacatcctctctagatc

SEQ ID NO: 40739 - DNA, 33 bp, Homo sapien
tagcgggagagtcaacggtacttcatccattct

SEQ ID NO: 40740 - DNA, 33 bp, Homo sapien
tagcgggagagtcaactgtacttcatccattct

SEQ ID NO: 40741 - DNA, 33 bp, Homo sapien
gggcatgattatgtaacaatgtggacagctact

SEQ ID NO: 40742 - DNA, 33 bp, Homo sapien
gggcatgattatgtaataatgtggacagctact

SEQ ID NO: 40743 - DNA, 33 bp, Homo sapien
tcccctatcaaagcaaccagcagggacagatgg

SEQ ID NO: 40744 - DNA, 33 bp, Homo sapien
tcccctatcaaagcaatcagcagggacagatgg

SEQ ID NO: 40745 - DNA, 33 bp, Homo sapien
aatgggtctgagtatacgtctgcatttcatgtg

SEQ ID NO: 40746 - DNA, 33 bp, Homo sapien
aatgggtctgagtatatgtctgcatttcatgtg

SEQ ID NO: 40747 - DNA, 33 bp, Homo sapien
atactctaaatattaacactgtgtaggctacta

SEQ ID NO: 40748 - DNA, 33 bp, Homo sapien
atactctaaatattaatactgtgtaggctacta

SEQ ID NO: 40749 - DNA, 33 bp, Homo sapien
taggtctttgtgattccaggacatgtgccctta

SEQ ID NO: 40750 - DNA, 33 bp, Homo sapien
taggtctttgtgattctaggacatgtgccctta

SEQ ID NO: 40751 - DNA, 33 bp, Homo sapien
aggtgatagggagccactgagagttctgagtgg

SEQ ID NO: 40752 - DNA, 33 bp, Homo sapien
aggtgatagggagccattgagagttctgagtgg

SEQ ID NO: 40753 - DNA, 33 bp, Homo sapien
tacagagccttctgggccataggacttcaggct

SEQ ID NO: 40754 - DNA, 33 bp, Homo sapien
tacagagccttctgggtcataggacttcaggct

SEQ ID NO: 40755 - DNA, 33 bp, Homo sapien
gtataagttatacctcaataaagctgttaaaac

SEQ ID NO: 40756 - DNA, 33 bp, Homo sapien
gtataagttatacctcgataaagctgttaaaac

SEQ ID NO: 40757 - DNA, 33 bp, Homo sapien
aagcttttagtgaaccagaacatctgtacagac

SEQ ID NO: 40758 - DNA, 33 bp, Homo sapien
aagcttttagtgaaccggaacatctgtacagac

SEQ ID NO: 40759 - DNA, 33 bp, Homo sapien
agctgttgggtgtggacgttttggctaagccac

SEQ ID NO: 40760 - DNA, 33 bp, Homo sapien
agctgttgggtgtggaggttttggctaagccac

SEQ ID NO: 40761 - DNA, 33 bp, Homo sapien
gaaaaaccacagtgcaactgctttattcagaag

SEQ ID NO: 40762 - DNA, 33 bp, Homo sapien
gaaaaaccacagtgcatctgctttattcagaag

SEQ ID NO: 40763 - DNA, 33 bp, Homo sapien
gtaaggggaccggtcactgacagctgctcactg

SEQ ID NO: 40764 - DNA, 33 bp, Homo sapien
gtaaggggaccggtcattgacagctgctcactg

SEQ ID NO: 40765 - DNA, 33 bp, Homo sapien
cattggtgctctttatcaaacccttcagtcaaa

SEQ ID NO: 40766 - DNA, 33 bp, Homo sapien
cattggtgctctttatgaaacccttcagtcaaa

SEQ ID NO: 40767 - DNA, 33 bp, Homo sapien
caggcagatcgagaaaaatcaggacacaccaga

SEQ ID NO: 40768 - DNA, 33 bp, Homo sapien
caggcagatcgagaaagatcaggacacaccaga

SEQ ID NO: 40769 - DNA, 33 bp, Homo sapien
gaactttcctagggcacatgagagtttttggca

SEQ ID NO: 40770 - DNA, 33 bp, Homo sapien
gaactttcctagggcatatgagagtttttggca

SEQ ID NO: 40771 - DNA, 33 bp, Homo sapien
attaaaagcactctatcagctattacgtatgaa

SEQ ID NO: 40772 - DNA, 33 bp, Homo sapien
attaaaagcactctattagctattacgtatgaa

SEQ ID NO: 40773 - DNA, 33 bp, Homo sapien
tgcaggccattgtaaaaaagcctttagttagta

SEQ ID NO: 40774 - DNA, 33 bp, Homo sapien
tgcaggccattgtaaacaagcctttagttagta

SEQ ID NO: 40775 - DNA, 33 bp, Homo sapien
atgccatctgtaaaataaatgtgtagactagat

SEQ ID NO: 40776 - DNA, 33 bp, Homo sapien
atgccatctgtaaaatgaatgtgtagactagat

SEQ ID NO: 40777 - DNA, 33 bp, Homo sapien
attgtggaggaagccaactaatgctacatccag

SEQ ID NO: 40778 - DNA, 33 bp, Homo sapien
attgtggaggaagccagctaatgctacatccag

SEQ ID NO: 40779 - DNA, 33 bp, Homo sapien
caggaccctaagaaaaggcagccttctgatacc

SEQ ID NO: 40780 - DNA, 33 bp, Homo sapien
caggaccctaagaaaatgcagccttctgatacc

SEQ ID NO: 40781 - DNA, 33 bp, Homo sapien
gccaaagactgagaaccatggacctagactgtg

SEQ ID NO: 40782 - DNA, 33 bp, Homo sapien
gccaaagactgagaactatggacctagactgtg

SEQ ID NO: 40783 - DNA, 33 bp, Homo sapien
aattcaagggctaatgcagttgctgaatttgaa

SEQ ID NO: 40784 - DNA, 33 bp, Homo sapien
aattcaagggctaatggagttgctgaatttgaa

SEQ ID NO: 40785 - DNA, 33 bp, Homo sapien
acataaatgacctcatcatctcttgggtgcaag

SEQ ID NO: 40786 - DNA, 33 bp, Homo sapien
acataaatgacctcatgatctcttgggtgcaag

SEQ ID NO: 40787 - DNA, 33 bp, Homo sapien
tgaataatgaagaggggattttcattcactaat

SEQ ID NO: 40788 - DNA, 33 bp, Homo sapien
tgaataatgaagagggtattttcattcactaat

SEQ ID NO: 40789 - DNA, 33 bp, Homo sapien
agacacccatttgggaactcccagaaataaata

SEQ ID NO: 40790 - DNA, 33 bp, Homo sapien
agacacccatttgggacctcccagaaataaata

SEQ ID NO: 40791 - DNA, 33 bp, Homo sapien
atatggatttttcagaggtacagggcatctttg

SEQ ID NO: 40792 - DNA, 33 bp, Homo sapien
atatggatttttcagatgtacagggcatctttg

SEQ ID NO: 40793 - DNA, 33 bp, Homo sapien
gatgcctgttgttaagcatacttgctccaaaat

SEQ ID NO: 40794 - DNA, 33 bp, Homo sapien
gatgcctgttgttaagtatacttgctccaaaat

SEQ ID NO: 40795 - DNA, 33 bp, Homo sapien
acttttaagataatgaacgtggatttattttgt

SEQ ID NO: 40796 - DNA, 33 bp, Homo sapien
acttttaagataatgagcgtggatttattttgt

SEQ ID NO: 40797 - DNA, 33 bp, Homo sapien
catgcaggaagtggcagaaaacaaacattatag

SEQ ID NO: 40798 - DNA, 33 bp, Homo sapien
catgcaggaagtggcataaaacaaacattatag

SEQ ID NO: 40799 - DNA, 33 bp, Homo sapien
gtttaaaaacaaattcccttgttgatggcactt

SEQ ID NO: 40800 - DNA, 33 bp, Homo sapien
gtttaaaaacaaattctcttgttgatggcactt

SEQ ID NO: 40801 - DNA, 33 bp, Homo sapien
accctcccattcataacctacatacgtgcctat

SEQ ID NO: 40802 - DNA, 33 bp, Homo sapien
accctcccattcataatctacatacgtgcctat

SEQ ID NO: 40803 - DNA, 33 bp, Homo sapien
atagttctttgaagtccctgttaaagtacacac

SEQ ID NO: 40804 - DNA, 33 bp, Homo sapien
atagttctttgaagtctctgttaaagtacacac

SEQ ID NO: 40805 - DNA, 33 bp, Homo sapien
ctattcactgaatctaaacaatggacaagatat

SEQ ID NO: 40806 - DNA, 33 bp, Homo sapien
ctattcactgaatctacacaatggacaagatat

SEQ ID NO: 40807 - DNA, 33 bp, Homo sapien
tagaatcaccttgggaagcttcagcgaaatact

SEQ ID NO: 40808 - DNA, 33 bp, Homo sapien
tagaatcaccttgggatgcttcagcgaaatact

SEQ ID NO: 40809 - DNA, 33 bp, Homo sapien
tgaggctgtcttcccacgcctatctcagacatc

SEQ ID NO: 40810 - DNA, 33 bp, Homo sapien
tgaggctgtcttcccaggcctatctcagacatc

SEQ ID NO: 40811 - DNA, 33 bp, Homo sapien
tttttttctctccagaccttttccaaggataat

SEQ ID NO: 40812 - DNA, 33 bp, Homo sapien
tttttttctctccagatcttttccaaggataat

SEQ ID NO: 40813 - DNA, 33 bp, Homo sapien
tatggaaagccaactactaggtgctcagtaaat

SEQ ID NO: 40814 - DNA, 33 bp, Homo sapien
tatggaaagccaactagtaggtgctcagtaaat

SEQ ID NO: 40815 - DNA, 33 bp, Homo sapien
cataaactatgttgaactagaaatgaatacagc

SEQ ID NO: 40816 - DNA, 33 bp, Homo sapien
cataaactatgttgaattagaaatgaatacagc

SEQ ID NO: 40817 - DNA, 33 bp, Homo sapien
ccatgtggagtgggtaccagagtaaaattaaga

SEQ ID NO: 40818 - DNA, 33 bp, Homo sapien
ccatgtggagtgggtatcagagtaaaattaaga

SEQ ID NO: 40819 - DNA, 33 bp, Homo sapien
gcaaataactagaaaaatgctatggtgaggtgg

SEQ ID NO: 40820 - DNA, 33 bp, Homo sapien
gcaaataactagaaaagtgctatggtgaggtgg

SEQ ID NO: 40821 - DNA, 33 bp, Homo sapien
caagagaattcatcgtaaaacagaactagatca

SEQ ID NO: 40822 - DNA, 33 bp, Homo sapien
caagagaattcatcgttaaacagaactagatca

SEQ ID NO: 40823 - DNA, 33 bp, Homo sapien
gaaaggaaggaagataaagtatgaatttacaga

SEQ ID NO: 40824 - DNA, 33 bp, Homo sapien
gaaaggaaggaagatagagtatgaatttacaga

SEQ ID NO: 40825 - DNA, 33 bp, Homo sapien
tttcttattctcttcaaattccttttttatagc

SEQ ID NO: 40826 - DNA, 33 bp, Homo sapien
tttcttattctcttcagattccttttttatagc

SEQ ID NO: 40827 - DNA, 33 bp, Homo sapien
aaaaccaaactacataagcatttagagtaaaag

SEQ ID NO: 40828 - DNA, 33 bp, Homo sapien
aaaaccaaactacataggcatttagagtaaaag

SEQ ID NO: 40829 - DNA, 33 bp, Homo sapien
agaagtaatataaagaacttccagagagtaaaa

SEQ ID NO: 40830 - DNA, 33 bp, Homo sapien
agaagtaatataaagatcttccagagagtaaaa

SEQ ID NO: 40831 - DNA, 33 bp, Homo sapien
gaaagtatagtcaagacgcaaaactgggtgctg

SEQ ID NO: 40832 - DNA, 33 bp, Homo sapien
gaaagtatagtcaagaggcaaaactgggtgctg

SEQ ID NO: 40833 - DNA, 33 bp, Homo sapien
ctgccgcaggactcaaactacaagatgagcttc

SEQ ID NO: 40834 - DNA, 33 bp, Homo sapien
ctgccgcaggactcaagctacaagatgagcttc

SEQ ID NO: 40835 - DNA, 33 bp, Homo sapien
gagaaaaaatctggagcagagtgctgttccaac

SEQ ID NO: 40836 - DNA, 33 bp, Homo sapien
gagaaaaaatctggagtagagtgctgttccaac

SEQ ID NO: 40837 - DNA, 33 bp, Homo sapien
gagatgccagtgttcaaggacctcctttaatat

SEQ ID NO: 40838 - DNA, 33 bp, Homo sapien
gagatgccagtgttcagggacctcctttaatat

SEQ ID NO: 40839 - DNA, 33 bp, Homo sapien
ttatggtcaagttcacagagacaaaaagtagaa

SEQ ID NO: 40840 - DNA, 33 bp, Homo sapien
ttatggtcaagttcacggagacaaaaagtagaa

SEQ ID NO: 40841 - DNA, 33 bp, Homo sapien
gatgattctattagcacaatccaagtcaggcaa

SEQ ID NO: 40842 - DNA, 33 bp, Homo sapien
gatgattctattagcataatccaagtcaggcaa

SEQ ID NO: 40843 - DNA, 33 bp, Homo sapien
ggcaatcagaagtctacgataaatgcatttgaa

SEQ ID NO: 40844 - DNA, 33 bp, Homo sapien
ggcaatcagaagtctatgataaatgcatttgaa

SEQ ID NO: 40845 - DNA, 33 bp, Homo sapien
actagcctaggccaaaatgacaatacctcaact

SEQ ID NO: 40846 - DNA, 33 bp, Homo sapien
actagcctaggccaaactgacaatacctcaact

SEQ ID NO: 40847 - DNA, 33 bp, Homo sapien
cccaatgccccttataaagcactccagaagaga

SEQ ID NO: 40848 - DNA, 33 bp, Homo sapien
cccaatgccccttatacagcactccagaagaga

SEQ ID NO: 40849 - DNA, 33 bp, Homo sapien
tctcaactcctatctgcatgtatgctttcagca

SEQ ID NO: 40850 - DNA, 33 bp, Homo sapien
tctcaactcctatctgtatgtatgctttcagca

SEQ ID NO: 40851 - DNA, 33 bp, Homo sapien
caacccaaatgtggataagcaacatgtggcata

SEQ ID NO: 40852 - DNA, 33 bp, Homo sapien
caacccaaatgtggatgagcaacatgtggcata

SEQ ID NO: 40853 - DNA, 33 bp, Homo sapien
ctatgtgatcgagggcaatttacttaactctct

SEQ ID NO: 40854 - DNA, 33 bp, Homo sapien
ctatgtgatcgagggcgatttacttaactctct

SEQ ID NO: 40855 - DNA, 33 bp, Homo sapien
aactgttaggcatccaagtgtagagtccaagtc

SEQ ID NO: 40856 - DNA, 33 bp, Homo sapien
aactgttaggcatccaggtgtagagtccaagtc

SEQ ID NO: 40857 - DNA, 33 bp, Homo sapien
cttcatgtcacatttcaaatcctattacctcta

SEQ ID NO: 40858 - DNA, 33 bp, Homo sapien
cttcatgtcacatttcgaatcctattacctcta

SEQ ID NO: 40859 - DNA, 33 bp, Homo sapien
gccttagagaagccaaattgactcatggctttc

SEQ ID NO: 40860 - DNA, 33 bp, Homo sapien
gccttagagaagccaagttgactcatggctttc

SEQ ID NO: 40861 - DNA, 33 bp, Homo sapien
agtagaaacaggatacaagagtagtttcgaggt

SEQ ID NO: 40862 - DNA, 33 bp, Homo sapien
agtagaaacaggatacgagagtagtttcgaggt

SEQ ID NO: 40863 - DNA, 33 bp, Homo sapien
gtctcaggttcctggggatgcattatttttgtg

SEQ ID NO: 40864 - DNA, 33 bp, Homo sapien
gtctcaggttcctgggtatgcattatttttgtg

SEQ ID NO: 40865 - DNA, 33 bp, Homo sapien
aatgctgtaagtcaggcattattcactttgcca

SEQ ID NO: 40866 - DNA, 33 bp, Homo sapien
aatgctgtaagtcaggtattattcactttgcca

SEQ ID NO: 40867 - DNA, 33 bp, Homo sapien
acacacataaaacacacagcatggtgcccacca

SEQ ID NO: 40868 - DNA, 33 bp, Homo sapien
acacacataaaacacagagcatggtgcccacca

SEQ ID NO: 40869 - DNA, 33 bp, Homo sapien
tcatcaccctgacatccagtaccctgaatgtac

SEQ ID NO: 40870 - DNA, 33 bp, Homo sapien
tcatcaccctgacatcgagtaccctgaatgtac

SEQ ID NO: 40871 - DNA, 33 bp, Homo sapien
gccatatacagttggaagttactggtttatgaa

SEQ ID NO: 40872 - DNA, 33 bp, Homo sapien
gccatatacagttggacgttactggtttatgaa

SEQ ID NO: 40873 - DNA, 33 bp, Homo sapien
atctctaaattgcacaccacacaagtatagaaa

SEQ ID NO: 40874 - DNA, 33 bp, Homo sapien
atctctaaattgcacatcacacaagtatagaaa

SEQ ID NO: 40875 - DNA, 33 bp, Homo sapien
cgggatggcggactcagtagtatcccagactct

SEQ ID NO: 40876 - DNA, 33 bp, Homo sapien
cgggatggcggactcattagtatcccagactct

SEQ ID NO: 40877 - DNA, 33 bp, Homo sapien
atctactgtcttgctcacttttgctttctgttt

SEQ ID NO: 40878 - DNA, 33 bp, Homo sapien
atctactgtcttgctcgcttttgctttctgttt

SEQ ID NO: 40879 - DNA, 33 bp, Homo sapien
ggtgttgttattgaggcctgtataacattctaa

SEQ ID NO: 40880 - DNA, 33 bp, Homo sapien
ggtgttgttattgaggtctgtataacattctaa

SEQ ID NO: 40881 - DNA, 33 bp, Homo sapien
tagctagtcagtttaactccttaatacatatgg

SEQ ID NO: 40882 - DNA, 33 bp, Homo sapien
tagctagtcagtttaagtccttaatacatatgg

SEQ ID NO: 40883 - DNA, 33 bp, Homo sapien
tgtttctcaaccttcaacataattgtcctgaga

SEQ ID NO: 40884 - DNA, 33 bp, Homo sapien
tgtttctcaaccttcagcataattgtcctgaga

SEQ ID NO: 40885 - DNA, 33 bp, Homo sapien
ttactttggcatgatgaaaatggttaattttat

SEQ ID NO: 40886 - DNA, 33 bp, Homo sapien
ttactttggcatgatggaaatggttaattttat

SEQ ID NO: 40887 - DNA, 33 bp, Homo sapien
tgtgtaagggcttatcaaatcaacaaacattta

SEQ ID NO: 40888 - DNA, 33 bp, Homo sapien
tgtgtaagggcttatcgaatcaacaaacattta

SEQ ID NO: 40889 - DNA, 33 bp, Homo sapien
catttatcatcaaagcaatcaattaagattcta

SEQ ID NO: 40890 - DNA, 33 bp, Homo sapien
catttatcatcaaagccatcaattaagattcta

SEQ ID NO: 40891 - DNA, 33 bp, Homo sapien
gggcattacctcttaccctctaccaggcagtta

SEQ ID NO: 40892 - DNA, 33 bp, Homo sapien
gggcattacctcttactctctaccaggcagtta

SEQ ID NO: 40893 - DNA, 33 bp, Homo sapien
atctctcgtacctgaccgcgaacactgcctgtc

SEQ ID NO: 40894 - DNA, 33 bp, Homo sapien
atctctcgtacctgactgcgaacactgcctgtc

SEQ ID NO: 40895 - DNA, 33 bp, Homo sapien
aagtaatgtctgcagccctgaataaccagtgat

SEQ ID NO: 40896 - DNA, 33 bp, Homo sapien
aagtaatgtctgcagctctgaataaccagtgat

SEQ ID NO: 40897 - DNA, 33 bp, Homo sapien
gtgtagactttcccaactccacttgctttcctg

SEQ ID NO: 40898 - DNA, 33 bp, Homo sapien
gtgtagactttcccaattccacttgctttcctg

SEQ ID NO: 40899 - DNA, 33 bp, Homo sapien
acacactgtgtgcaacaaaccaattgagtgtaa

SEQ ID NO: 40900 - DNA, 33 bp, Homo sapien
acacactgtgtgcaaccaaccaattgagtgtaa

SEQ ID NO: 40901 - DNA, 33 bp, Homo sapien
caggggcgtgtatgtacaggtaaaaaacatagt

SEQ ID NO: 40902 - DNA, 33 bp, Homo sapien
caggggcgtgtatgtataggtaaaaaacatagt

SEQ ID NO: 40903 - DNA, 33 bp, Homo sapien
tctcctcttatctgcaagggatactacatttca

SEQ ID NO: 40904 - DNA, 33 bp, Homo sapien
tctcctcttatctgcaggggatactacatttca

SEQ ID NO: 40905 - DNA, 33 bp, Homo sapien
ccaaatctgaaaaaccaggaatattggctaggt

SEQ ID NO: 40906 - DNA, 33 bp, Homo sapien
ccaaatctgaaaaacccggaatattggctaggt

SEQ ID NO: 40907 - DNA, 33 bp, Homo sapien
acattccattacatcaaactcttagctctaaga

SEQ ID NO: 40908 - DNA, 33 bp, Homo sapien
acattccattacatcacactcttagctctaaga

SEQ ID NO: 40909 - DNA, 33 bp, Homo sapien
agtttggtactttttacataatctatgacatat

SEQ ID NO: 40910 - DNA, 33 bp, Homo sapien
agtttggtactttttatataatctatgacatat

SEQ ID NO: 40911 - DNA, 33 bp, Homo sapien
ttctcctacttggcacaagaaagtggagggcaa

SEQ ID NO: 40912 - DNA, 33 bp, Homo sapien
ttctcctacttggcaccagaaagtggagggcaa

SEQ ID NO: 40913 - DNA, 33 bp, Homo sapien
gggcacttcttgtaccaagcaagcatccactgt

SEQ ID NO: 40914 - DNA, 33 bp, Homo sapien
gggcacttcttgtaccgagcaagcatccactgt

SEQ ID NO: 40915 - DNA, 33 bp, Homo sapien
aggcacaaattaccaaatctcactcaaaaaata

SEQ ID NO: 40916 - DNA, 33 bp, Homo sapien
aggcacaaattaccaagtctcactcaaaaaata

SEQ ID NO: 40917 - DNA, 33 bp, Homo sapien
tagtgttgttctctcaatcctaatattgataat

SEQ ID NO: 40918 - DNA, 33 bp, Homo sapien
tagtgttgttctctcattcctaatattgataat

SEQ ID NO: 40919 - DNA, 33 bp, Homo sapien
agctcaatagctcaatcaactccaagcacaaga

SEQ ID NO: 40920 - DNA, 33 bp, Homo sapien
agctcaatagctcaatgaactccaagcacaaga

SEQ ID NO: 40921 - DNA, 33 bp, Homo sapien
tgccgtcttcaagttcactagtttttttcttca

SEQ ID NO: 40922 - DNA, 33 bp, Homo sapien
tgccgtcttcaagttcgctagtttttttcttca

SEQ ID NO: 40923 - DNA, 33 bp, Homo sapien
aatagagacatggaaaatataaaaagactcaaa

SEQ ID NO: 40924 - DNA, 33 bp, Homo sapien
aatagagacatggaaagtataaaaagactcaaa

SEQ ID NO: 40925 - DNA, 33 bp, Homo sapien
catgaaagtagggggaacatatccacgcctcat

SEQ ID NO: 40926 - DNA, 33 bp, Homo sapien
catgaaagtagggggagcatatccacgcctcat

SEQ ID NO: 40927 - DNA, 33 bp, Homo sapien
gtcaatcagccatcaaaaaagccaacagcttga

SEQ ID NO: 40928 - DNA, 33 bp, Homo sapien
gtcaatcagccatcaagaaagccaacagcttga

SEQ ID NO: 40929 - DNA, 33 bp, Homo sapien
ttctgtgagccacacaatatcttcaccatatat

SEQ ID NO: 40930 - DNA, 33 bp, Homo sapien
ttctgtgagccacacagtatcttcaccatatat

SEQ ID NO: 40931 - DNA, 33 bp, Homo sapien
aacaaactcatttagactagagacactgtgatt

SEQ ID NO: 40932 - DNA, 33 bp, Homo sapien
aacaaactcatttagattagagacactgtgatt

SEQ ID NO: 40933 - DNA, 33 bp, Homo sapien
catctgggtttactaactggcacttaactggaa

SEQ ID NO: 40934 - DNA, 33 bp, Homo sapien
catctgggtttactaattggcacttaactggaa

SEQ ID NO: 40935 - DNA, 33 bp, Homo sapien
taactgctggtggaaaggtttcatggtacaaca

SEQ ID NO: 40936 - DNA, 33 bp, Homo sapien
taactgctggtggaaatgtttcatggtacaaca

SEQ ID NO: 40937 - DNA, 33 bp, Homo sapien
cattaggtagccttcacattggcttatttcact

SEQ ID NO: 40938 - DNA, 33 bp, Homo sapien
cattaggtagccttcagattggcttatttcact

SEQ ID NO: 40939 - DNA, 33 bp, Homo sapien
aggataatacaaaccaatcataaagcatgatat

SEQ ID NO: 40940 - DNA, 33 bp, Homo sapien
aggataatacaaaccagtcataaagcatgatat

SEQ ID NO: 40941 - DNA, 33 bp, Homo sapien
gacccaaaggaagaaacatttgccaggacatgc

SEQ ID NO: 40942 - DNA, 33 bp, Homo sapien
gacccaaaggaagaaatatttgccaggacatgc

SEQ ID NO: 40943 - DNA, 33 bp, Homo sapien
acaccattagcaggaacgtagattcgtgtagcc

SEQ ID NO: 40944 - DNA, 33 bp, Homo sapien
acaccattagcaggaatgtagattcgtgtagcc

SEQ ID NO: 40945 - DNA, 33 bp, Homo sapien
ccttcagacagaattcaaaatagctgttttcag

SEQ ID NO: 40946 - DNA, 33 bp, Homo sapien
ccttcagacagaattccaaatagctgttttcag

SEQ ID NO: 40947 - DNA, 33 bp, Homo sapien
gaccaaagataaagaaatggtgtctctgataaa

SEQ ID NO: 40948 - DNA, 33 bp, Homo sapien
gaccaaagataaagaagtggtgtctctgataaa

SEQ ID NO: 40949 - DNA, 33 bp, Homo sapien
ttgaaaaggattagaaactcaaagaccaatcag

SEQ ID NO: 40950 - DNA, 33 bp, Homo sapien
ttgaaaaggattagaagctcaaagaccaatcag

SEQ ID NO: 40951 - DNA, 33 bp, Homo sapien
ttctctcttcagtacaaaccaacagtgatagca

SEQ ID NO: 40952 - DNA, 33 bp, Homo sapien
ttctctcttcagtacagaccaacagtgatagca

SEQ ID NO: 40953 - DNA, 33 bp, Homo sapien
atctatgttcatcgggacattgacctgcagttt

SEQ ID NO: 40954 - DNA, 33 bp, Homo sapien
atctatgttcatcggggcattgacctgcagttt

SEQ ID NO: 40955 - DNA, 33 bp, Homo sapien
agacatggaatcaacgcagatgctcatcaatgg

SEQ ID NO: 40956 - DNA, 33 bp, Homo sapien
agacatggaatcaacggagatgctcatcaatgg

SEQ ID NO: 40957 - DNA, 33 bp, Homo sapien
caccattctgatgaataaattcccagccaatgc

SEQ ID NO: 40958 - DNA, 33 bp, Homo sapien
caccattctgatgaatgaattcccagccaatgc

SEQ ID NO: 40959 - DNA, 33 bp, Homo sapien
tagagtcccattgaacagtagggtgaatatagt

SEQ ID NO: 40960 - DNA, 33 bp, Homo sapien
tagagtcccattgaacggtagggtgaatatagt

SEQ ID NO: 40961 - DNA, 33 bp, Homo sapien
aaaactgtgagtgcccaaagtgtgagaggggga

SEQ ID NO: 40962 - DNA, 33 bp, Homo sapien
aaaactgtgagtgcccgaagtgtgagaggggga

SEQ ID NO: 40963 - DNA, 33 bp, Homo sapien
ctaaccaatggtactacggataaagaaaatttg

SEQ ID NO: 40964 - DNA, 33 bp, Homo sapien
ctaaccaatggtactatggataaagaaaatttg

SEQ ID NO: 40965 - DNA, 33 bp, Homo sapien
gtaatttcactacttacgtagtcagaggtggga

SEQ ID NO: 40966 - DNA, 33 bp, Homo sapien
gtaatttcactacttatgtagtcagaggtggga

SEQ ID NO: 40967 - DNA, 33 bp, Homo sapien
cccagcaatcccattacgtggtatacacccaaa

SEQ ID NO: 40968 - DNA, 33 bp, Homo sapien
cccagcaatcccattatgtggtatacacccaaa

SEQ ID NO: 40969 - DNA, 33 bp, Homo sapien
cctctgcagccacttacattctgaaaatactct

SEQ ID NO: 40970 - DNA, 33 bp, Homo sapien
cctctgcagccacttagattctgaaaatactct

SEQ ID NO: 40971 - DNA, 33 bp, Homo sapien
actacatgcaaaataagtgtgatacatgcatct

SEQ ID NO: 40972 - DNA, 33 bp, Homo sapien
actacatgcaaaataattgtgatacatgcatct

SEQ ID NO: 40973 - DNA, 33 bp, Homo sapien
ctgctgttattcccaaacttctcaatgttacat

SEQ ID NO: 40974 - DNA, 33 bp, Homo sapien
ctgctgttattcccaaccttctcaatgttacat

SEQ ID NO: 40975 - DNA, 33 bp, Homo sapien
tgcaggcaaccacagcaataagagaattttttc

SEQ ID NO: 40976 - DNA, 33 bp, Homo sapien
tgcaggcaaccacagcgataagagaattttttc

SEQ ID NO: 40977 - DNA, 33 bp, Homo sapien
gtagtaatgaagactccaataattgtcctgtgg

SEQ ID NO: 40978 - DNA, 33 bp, Homo sapien
gtagtaatgaagactctaataattgtcctgtgg

SEQ ID NO: 40979 - DNA, 33 bp, Homo sapien
aacagtgtagaaagcaatacaagagatatgctt

SEQ ID NO: 40980 - DNA, 33 bp, Homo sapien
aacagtgtagaaagcattacaagagatatgctt

SEQ ID NO: 40981 - DNA, 33 bp, Homo sapien
tttgtgccacgccataacactgtggaaacaaca

SEQ ID NO: 40982 - DNA, 33 bp, Homo sapien
tttgtgccacgccataccactgtggaaacaaca

SEQ ID NO: 40983 - DNA, 33 bp, Homo sapien
gttgaatgaacagccaaagcaaaatccttttat

SEQ ID NO: 40984 - DNA, 33 bp, Homo sapien
gttgaatgaacagccagagcaaaatccttttat

SEQ ID NO: 40985 - DNA, 33 bp, Homo sapien
tttgtaaatcctaaaaccgacacaaagaaaata

SEQ ID NO: 40986 - DNA, 33 bp, Homo sapien
tttgtaaatcctaaaatcgacacaaagaaaata

SEQ ID NO: 40987 - DNA, 33 bp, Homo sapien
gggaccaggaaaagacccgagagacggaactcg

SEQ ID NO: 40988 - DNA, 33 bp, Homo sapien
gggaccaggaaaagacgcgagagacggaactcg

SEQ ID NO: 40989 - DNA, 33 bp, Homo sapien
aacaagcaaataaaaaaattacacactgtgata

SEQ ID NO: 40990 - DNA, 33 bp, Homo sapien
aacaagcaaataaaaagattacacactgtgata

SEQ ID NO: 40991 - DNA, 33 bp, Homo sapien
agtttctggtaattcaagacagtagaaggtaat

SEQ ID NO: 40992 - DNA, 33 bp, Homo sapien
agtttctggtaattcaggacagtagaaggtaat

SEQ ID NO: 40993 - DNA, 33 bp, Homo sapien
acttggattataactacgtcataagaagctcag

SEQ ID NO: 40994 - DNA, 33 bp, Homo sapien
acttggattataactatgtcataagaagctcag

SEQ ID NO: 40995 - DNA, 33 bp, Homo sapien
tcatttccctgctttacgtcctgcaaaagttcc

SEQ ID NO: 40996 - DNA, 33 bp, Homo sapien
tcatttccctgctttaggtcctgcaaaagttcc

SEQ ID NO: 40997 - DNA, 33 bp, Homo sapien
catgcttcatcattcacattaattatgctgatg

SEQ ID NO: 40998 - DNA, 33 bp, Homo sapien
catgcttcatcattcagattaattatgctgatg

SEQ ID NO: 40999 - DNA, 33 bp, Homo sapien
acatatagatatccctaaagacttattgcagtt

SEQ ID NO: 41000 - DNA, 33 bp, Homo sapien
acatatagatatccctgaagacttattgcagtt

SEQ ID NO: 41001 - DNA, 33 bp, Homo sapien
attactacatttaaaaaactcaagcatcagtaa

SEQ ID NO: 41002 - DNA, 33 bp, Homo sapien
attactacatttaaaagactcaagcatcagtaa

SEQ ID NO: 41003 - DNA, 33 bp, Homo sapien
cccttatggcttaataaaatttgatcaattact

SEQ ID NO: 41004 - DNA, 33 bp, Homo sapien
cccttatggcttaatacaatttgatcaattact

SEQ ID NO: 41005 - DNA, 33 bp, Homo sapien
ttatcccagatattcgaacaattgctagcaagg

SEQ ID NO: 41006 - DNA, 33 bp, Homo sapien
ttatcccagatattcggacaattgctagcaagg

SEQ ID NO: 41007 - DNA, 33 bp, Homo sapien
tattcttcctaagcaacggcagagaactcatac

SEQ ID NO: 41008 - DNA, 33 bp, Homo sapien
tattcttcctaagcaatggcagagaactcatac

SEQ ID NO: 41009 - DNA, 33 bp, Homo sapien
aggttctaggcctctaaggctggtctaggacta

SEQ ID NO: 41010 - DNA, 33 bp, Homo sapien
aggttctaggcctctagggctggtctaggacta

SEQ ID NO: 41011 - DNA, 33 bp, Homo sapien
gaaatggacagatggacgctgtaaggtagagac

SEQ ID NO: 41012 - DNA, 33 bp, Homo sapien
gaaatggacagatggatgctgtaaggtagagac

SEQ ID NO: 41013 - DNA, 33 bp, Homo sapien
tgcaaaattgcatacgaccggagtaaagtcaac

SEQ ID NO: 41014 - DNA, 33 bp, Homo sapien
tgcaaaattgcatacggccggagtaaagtcaac

SEQ ID NO: 41015 - DNA, 33 bp, Homo sapien
gtccttgcaactgacaagaagcagaatatagtg

SEQ ID NO: 41016 - DNA, 33 bp, Homo sapien
gtccttgcaactgacaggaagcagaatatagtg

SEQ ID NO: 41017 - DNA, 33 bp, Homo sapien
gtagagttgtagagaacgtgagaaaccatgggc

SEQ ID NO: 41018 - DNA, 33 bp, Homo sapien
gtagagttgtagagaatgtgagaaaccatgggc

SEQ ID NO: 41019 - DNA, 33 bp, Homo sapien
gtttcctttgtgtcacaagacagagagagagag

SEQ ID NO: 41020 - DNA, 33 bp, Homo sapien
gtttcctttgtgtcacgagacagagagagagag

SEQ ID NO: 41021 - DNA, 33 bp, Homo sapien
acaaataagctgattgaaagacatgggaggggc

SEQ ID NO: 41022 - DNA, 33 bp, Homo sapien
acaaataagctgattggaagacatgggaggggc

SEQ ID NO: 41023 - DNA, 33 bp, Homo sapien
agaatgattgttttcagacattaggcaacatgc

SEQ ID NO: 41024 - DNA, 33 bp, Homo sapien
agaatgattgttttcatacattaggcaacatgc

SEQ ID NO: 41025 - DNA, 33 bp, Homo sapien
gtggaaagaggttttccatcccaagtgtatcag

SEQ ID NO: 41026 - DNA, 33 bp, Homo sapien
gtggaaagaggttttctatcccaagtgtatcag

SEQ ID NO: 41027 - DNA, 33 bp, Homo sapien
aagaggtgaaaagtgacacaacttaaaggttat

SEQ ID NO: 41028 - DNA, 33 bp, Homo sapien
aagaggtgaaaagtgatacaacttaaaggttat

SEQ ID NO: 41029 - DNA, 33 bp, Homo sapien
cttcttgcctggaatccatgaggtttctagaac

SEQ ID NO: 41030 - DNA, 33 bp, Homo sapien
cttcttgcctggaatctatgaggtttctagaac

SEQ ID NO: 41031 - DNA, 33 bp, Homo sapien
ggaaaaacaaagaaacaaggtgcaatattcccc

SEQ ID NO: 41032 - DNA, 33 bp, Homo sapien
ggaaaaacaaagaaacgaggtgcaatattcccc

SEQ ID NO: 41033 - DNA, 33 bp, Homo sapien
aattctaagccccccaaacatctgaacaaatcc

SEQ ID NO: 41034 - DNA, 33 bp, Homo sapien
aattctaagccccccagacatctgaacaaatcc

SEQ ID NO: 41035 - DNA, 33 bp, Homo sapien
aaagttaatctgaaaaattaattcaggtcatga

SEQ ID NO: 41036 - DNA, 33 bp, Homo sapien
aaagttaatctgaaaagttaattcaggtcatga

SEQ ID NO: 41037 - DNA, 33 bp, Homo sapien
acagtggatcacaaaagaaatcagtcaaggaac

SEQ ID NO: 41038 - DNA, 33 bp, Homo sapien
acagtggatcacaaaataaatcagtcaaggaac

SEQ ID NO: 41039 - DNA, 33 bp, Homo sapien
tcattgtagtaagcacaaatgtagttcatccaa

SEQ ID NO: 41040 - DNA, 33 bp, Homo sapien
tcattgtagtaagcacgaatgtagttcatccaa

SEQ ID NO: 41041 - DNA, 33 bp, Homo sapien
ttaggggccacccttcaaatctctgtgtatcct

SEQ ID NO: 41042 - DNA, 33 bp, Homo sapien
ttaggggccacccttcgaatctctgtgtatcct

SEQ ID NO: 41043 - DNA, 33 bp, Homo sapien
cagaagagccaaaggaccatgagaaaggattag

SEQ ID NO: 41044 - DNA, 33 bp, Homo sapien
cagaagagccaaaggagcatgagaaaggattag

SEQ ID NO: 41045 - DNA, 33 bp, Homo sapien
ctcactcattacctgaggctcttttcccccacc

SEQ ID NO: 41046 - DNA, 33 bp, Homo sapien
ctcactcattacctgatgctcttttcccccacc

SEQ ID NO: 41047 - DNA, 33 bp, Homo sapien
atgctccaacattaacacatacaactttgcaac

SEQ ID NO: 41048 - DNA, 33 bp, Homo sapien
atgctccaacattaacgcatacaactttgcaac

SEQ ID NO: 41049 - DNA, 33 bp, Homo sapien
gcactgacagatactaagggaagttagtcccca

SEQ ID NO: 41050 - DNA, 33 bp, Homo sapien
gcactgacagatactaggggaagttagtcccca

SEQ ID NO: 41051 - DNA, 33 bp, Homo sapien
tttctgtttattcaaaggttgtctggtttacag

SEQ ID NO: 41052 - DNA, 33 bp, Homo sapien
tttctgtttattcaaatgttgtctggtttacag

SEQ ID NO: 41053 - DNA, 33 bp, Homo sapien
agctctgtgagggcaaagactgtgctgacacgg

SEQ ID NO: 41054 - DNA, 33 bp, Homo sapien
agctctgtgagggcaaggactgtgctgacacgg

SEQ ID NO: 41055 - DNA, 33 bp, Homo sapien
cacagcccttaccacaatgaaagatgattgttt

SEQ ID NO: 41056 - DNA, 33 bp, Homo sapien
cacagcccttaccacactgaaagatgattgttt

SEQ ID NO: 41057 - DNA, 33 bp, Homo sapien
ccaaatatgtcatacactagcctatgttgggaa

SEQ ID NO: 41058 - DNA, 33 bp, Homo sapien
ccaaatatgtcatacagtagcctatgttgggaa

SEQ ID NO: 41059 - DNA, 33 bp, Homo sapien
ggtaggttttatagtcaagctcacaggaccatg

SEQ ID NO: 41060 - DNA, 33 bp, Homo sapien
ggtaggttttatagtcgagctcacaggaccatg

SEQ ID NO: 41061 - DNA, 33 bp, Homo sapien
ctcagtaaatggtagacgcttccactgccggtg

SEQ ID NO: 41062 - DNA, 33 bp, Homo sapien
ctcagtaaatggtagatgcttccactgccggtg

SEQ ID NO: 41063 - DNA, 33 bp, Homo sapien
agcttccgggatacacaaggccagaaagctgga

SEQ ID NO: 41064 - DNA, 33 bp, Homo sapien
agcttccgggatacacgaggccagaaagctgga

SEQ ID NO: 41065 - DNA, 33 bp, Homo sapien
gccaccaatagacagcaaggttttcagttctgt

SEQ ID NO: 41066 - DNA, 33 bp, Homo sapien
gccaccaatagacagcgaggttttcagttctgt

SEQ ID NO: 41067 - DNA, 33 bp, Homo sapien
ttctctagggcaaacgaccatttggagaaggtt

SEQ ID NO: 41068 - DNA, 33 bp, Homo sapien
ttctctagggcaaacggccatttggagaaggtt

SEQ ID NO: 41069 - DNA, 33 bp, Homo sapien
acctcaaagtaggcaacggttccagcctcctgt

SEQ ID NO: 41070 - DNA, 33 bp, Homo sapien
acctcaaagtaggcaagggttccagcctcctgt

SEQ ID NO: 41071 - DNA, 33 bp, Homo sapien
aatggagagagtctacactctgatttccagtag

SEQ ID NO: 41072 - DNA, 33 bp, Homo sapien
aatggagagagtctacgctctgatttccagtag

SEQ ID NO: 41073 - DNA, 33 bp, Homo sapien
taatattaaagatgcaagtttactttaaaaggt

SEQ ID NO: 41074 - DNA, 33 bp, Homo sapien
taatattaaagatgcatgtttactttaaaaggt

SEQ ID NO: 41075 - DNA, 33 bp, Homo sapien
actctttcaaacggaaaaaattcatttcaaaag

SEQ ID NO: 41076 - DNA, 33 bp, Homo sapien
actctttcaaacggaacaaattcatttcaaaag

SEQ ID NO: 41077 - DNA, 33 bp, Homo sapien
aggacacaaggcataaagaagctgcttgttcat

SEQ ID NO: 41078 - DNA, 33 bp, Homo sapien
aggacacaaggcataaggaagctgcttgttcat

SEQ ID NO: 41079 - DNA, 33 bp, Homo sapien
gctggaaataatagaaactggttccagtgtcac

SEQ ID NO: 41080 - DNA, 33 bp, Homo sapien
gctggaaataatagaacctggttccagtgtcac

SEQ ID NO: 41081 - DNA, 33 bp, Homo sapien
ggccctgctgtactcaagccaattctctgtcct

SEQ ID NO: 41082 - DNA, 33 bp, Homo sapien
ggccctgctgtactcaggccaattctctgtcct

SEQ ID NO: 41083 - DNA, 33 bp, Homo sapien
gaattatacgaaatctaaaagaaccagcaggct

SEQ ID NO: 41084 - DNA, 33 bp, Homo sapien
gaattatacgaaatctgaaagaaccagcaggct

SEQ ID NO: 41085 - DNA, 33 bp, Homo sapien
tgagcacttgaaatgcaaatagtccaaactaag

SEQ ID NO: 41086 - DNA, 33 bp, Homo sapien
tgagcacttgaaatgcgaatagtccaaactaag

SEQ ID NO: 41087 - DNA, 33 bp, Homo sapien
gtaagctgccacataaaggagctagaatacatc

SEQ ID NO: 41088 - DNA, 33 bp, Homo sapien
gtaagctgccacataagggagctagaatacatc

SEQ ID NO: 41089 - DNA, 33 bp, Homo sapien
gtcatcaaattcctgcaccagtatgagtttgac

SEQ ID NO: 41090 - DNA, 33 bp, Homo sapien
gtcatcaaattcctgcgccagtatgagtttgac

SEQ ID NO: 41091 - DNA, 33 bp, Homo sapien
cggcccccagagctaccactgtggctgacaccg

SEQ ID NO: 41092 - DNA, 33 bp, Homo sapien
cggcccccagagctacgactgtggctgacaccg

SEQ ID NO: 41093 - DNA, 33 bp, Homo sapien
caacattttggcttaacaaattgcaaatatgaa

SEQ ID NO: 41094 - DNA, 33 bp, Homo sapien
caacattttggcttaagaaattgcaaatatgaa

SEQ ID NO: 41095 - DNA, 33 bp, Homo sapien
aaggaaagcattcaaggactaagccctgagcat

SEQ ID NO: 41096 - DNA, 33 bp, Homo sapien
aaggaaagcattcaagtactaagccctgagcat

SEQ ID NO: 41097 - DNA, 33 bp, Homo sapien
atgcctgagtgcagtaagtttcagagagaatgg

SEQ ID NO: 41098 - DNA, 33 bp, Homo sapien
atgcctgagtgcagtaggtttcagagagaatgg

SEQ ID NO: 41099 - DNA, 33 bp, Homo sapien
agtcagagacagaagcaatggcagatgagtgat

SEQ ID NO: 41100 - DNA, 33 bp, Homo sapien
agtcagagacagaagcgatggcagatgagtgat

SEQ ID NO: 41101 - DNA, 33 bp, Homo sapien
cttggatagctgaggaataattataggggaaag

SEQ ID NO: 41102 - DNA, 33 bp, Homo sapien
cttggatagctgaggagtaattataggggaaag

SEQ ID NO: 41103 - DNA, 33 bp, Homo sapien
ggtctctagaatcgctaacttatatttcaattt

SEQ ID NO: 41104 - DNA, 33 bp, Homo sapien
ggtctctagaatcgctgacttatatttcaattt

SEQ ID NO: 41105 - DNA, 33 bp, Homo sapien
gaagtaacatttgggcaatgtaaagggttggca

SEQ ID NO: 41106 - DNA, 33 bp, Homo sapien
gaagtaacatttgggcgatgtaaagggttggca

SEQ ID NO: 41107 - DNA, 33 bp, Homo sapien
catatgtctgtttccccaaatgatacattcatt

SEQ ID NO: 41108 - DNA, 33 bp, Homo sapien
catatgtctgtttccctaaatgatacattcatt

SEQ ID NO: 41109 - DNA, 33 bp, Homo sapien
tctatgactcataaacacagtaattctttccaa

SEQ ID NO: 41110 - DNA, 33 bp, Homo sapien
tctatgactcataaacgcagtaattctttccaa

SEQ ID NO: 41111 - DNA, 33 bp, Homo sapien
cctatagtcctgaatacgataaacctggagcta

SEQ ID NO: 41112 - DNA, 33 bp, Homo sapien
cctatagtcctgaatatgataaacctggagcta

SEQ ID NO: 41113 - DNA, 33 bp, Homo sapien
atccctgtgttaagtacgcaagcttttggccca

SEQ ID NO: 41114 - DNA, 33 bp, Homo sapien
atccctgtgttaagtatgcaagcttttggccca

SEQ ID NO: 41115 - DNA, 33 bp, Homo sapien
tacaaagttccagaaacggtcaagttgcaaata

SEQ ID NO: 41116 - DNA, 33 bp, Homo sapien
tacaaagttccagaaatggtcaagttgcaaata

SEQ ID NO: 41117 - DNA, 33 bp, Homo sapien
atctggagtctcacccaatagttcctagctctt

SEQ ID NO: 41118 - DNA, 33 bp, Homo sapien
atctggagtctcaccccatagttcctagctctt

SEQ ID NO: 41119 - DNA, 33 bp, Homo sapien
aggccttatatgaggaaagaagagctaggaact

SEQ ID NO: 41120 - DNA, 33 bp, Homo sapien
aggccttatatgaggagagaagagctaggaact

SEQ ID NO: 41121 - DNA, 33 bp, Homo sapien
gatgtgtcatcattgactacagtgatcagttgg

SEQ ID NO: 41122 - DNA, 33 bp, Homo sapien
gatgtgtcatcattgagtacagtgatcagttgg

SEQ ID NO: 41123 - DNA, 33 bp, Homo sapien
cggactcagcattcaggaacatttatttgtgac

SEQ ID NO: 41124 - DNA, 33 bp, Homo sapien
cggactcagcattcagtaacatttatttgtgac

SEQ ID NO: 41125 - DNA, 33 bp, Homo sapien
agagtgttcatactaactacctccacacagaga

SEQ ID NO: 41126 - DNA, 33 bp, Homo sapien
agagtgttcatactaattacctccacacagaga

SEQ ID NO: 41127 - DNA, 33 bp, Homo sapien
tggctgttcctgtaaaacaaaggatagaaacag

SEQ ID NO: 41128 - DNA, 33 bp, Homo sapien
tggctgttcctgtaaagcaaaggatagaaacag

SEQ ID NO: 41129 - DNA, 33 bp, Homo sapien
aaacaagttagccccacgtgatcactgtccctt

SEQ ID NO: 41130 - DNA, 33 bp, Homo sapien
aaacaagttagccccatgtgatcactgtccctt

SEQ ID NO: 41131 - DNA, 33 bp, Homo sapien
gtttgtactcttgaaagactttaagaagaggtt

SEQ ID NO: 41132 - DNA, 33 bp, Homo sapien
gtttgtactcttgaaatactttaagaagaggtt

SEQ ID NO: 41133 - DNA, 33 bp, Homo sapien
gggaagcattataacactgtcctcagggtttgt

SEQ ID NO: 41134 - DNA, 33 bp, Homo sapien
gggaagcattataacattgtcctcagggtttgt

SEQ ID NO: 41135 - DNA, 33 bp, Homo sapien
ctatttaaacactttaagcagctgtgtttaaag

SEQ ID NO: 41136 - DNA, 33 bp, Homo sapien
ctatttaaacactttacgcagctgtgtttaaag

SEQ ID NO: 41137 - DNA, 33 bp, Homo sapien
tgggagtaacatttaaaagatttgaatctcttg

SEQ ID NO: 41138 - DNA, 33 bp, Homo sapien
tgggagtaacatttaatagatttgaatctcttg

SEQ ID NO: 41139 - DNA, 33 bp, Homo sapien
ggtggagctaacagcgccacagtcttctatctg

SEQ ID NO: 41140 - DNA, 33 bp, Homo sapien
ggtggagctaacagcgtcacagtcttctatctg

SEQ ID NO: 41141 - DNA, 33 bp, Homo sapien
tggagtctactgcacaaatcttcccgaagctgc

SEQ ID NO: 41142 - DNA, 33 bp, Homo sapien
tggagtctactgcacatatcttcccgaagctgc

SEQ ID NO: 41143 - DNA, 33 bp, Homo sapien
aacatttactgatagacggctttcttcttcttc

SEQ ID NO: 41144 - DNA, 33 bp, Homo sapien
aacatttactgatagatggctttcttcttcttc

SEQ ID NO: 41145 - DNA, 33 bp, Homo sapien
tcacaaaatccataggcaaaagtgcatctgggc

SEQ ID NO: 41146 - DNA, 33 bp, Homo sapien
tcacaaaatccataggtaaaagtgcatctgggc

SEQ ID NO: 41147 - DNA, 33 bp, Homo sapien
gtcttatttaccactaagtcttcagtacctaga

SEQ ID NO: 41148 - DNA, 33 bp, Homo sapien
gtcttatttaccactatgtcttcagtacctaga

SEQ ID NO: 41149 - DNA, 33 bp, Homo sapien
ccccacagatcacctcaagcaaagatactccta

SEQ ID NO: 41150 - DNA, 33 bp, Homo sapien
ccccacagatcacctccagcaaagatactccta

SEQ ID NO: 41151 - DNA, 33 bp, Homo sapien
tatttgtgacatgaaacgtatttcgcaaagttt

SEQ ID NO: 41152 - DNA, 33 bp, Homo sapien
tatttgtgacatgaaatgtatttcgcaaagttt

SEQ ID NO: 41153 - DNA, 33 bp, Homo sapien
gcaatgtcctatagtccacgtatccagccacac

SEQ ID NO: 41154 - DNA, 33 bp, Homo sapien
gcaatgtcctatagtctacgtatccagccacac

SEQ ID NO: 41155 - DNA, 33 bp, Homo sapien
caggcaggtaccagaaagtaagtcctcagcagg

SEQ ID NO: 41156 - DNA, 33 bp, Homo sapien
caggcaggtaccagaacgtaagtcctcagcagg

SEQ ID NO: 41157 - DNA, 33 bp, Homo sapien
gctataaatgttatgaactttataaccccagaa

SEQ ID NO: 41158 - DNA, 33 bp, Homo sapien
gctataaatgttatgatctttataaccccagaa

SEQ ID NO: 41159 - DNA, 33 bp, Homo sapien
ttaaaagattaaatcacatttagtgccaatcct

SEQ ID NO: 41160 - DNA, 33 bp, Homo sapien
ttaaaagattaaatcatatttagtgccaatcct

SEQ ID NO: 41161 - DNA, 33 bp, Homo sapien
ctgtttggtacagagacgctcaaagcttttccc

SEQ ID NO: 41162 - DNA, 33 bp, Homo sapien
ctgtttggtacagagatgctcaaagcttttccc

SEQ ID NO: 41163 - DNA, 33 bp, Homo sapien
tagatcaattctctcactcatggcagtgcacca

SEQ ID NO: 41164 - DNA, 33 bp, Homo sapien
tagatcaattctctcattcatggcagtgcacca

SEQ ID NO: 41165 - DNA, 33 bp, Homo sapien
ctaagatactatcaacaacctgtgtgattcaaa

SEQ ID NO: 41166 - DNA, 33 bp, Homo sapien
ctaagatactatcaactacctgtgtgattcaaa

SEQ ID NO: 41167 - DNA, 33 bp, Homo sapien
agcacatctgtttacaatatggcttcctgaata

SEQ ID NO: 41168 - DNA, 33 bp, Homo sapien
agcacatctgtttacagtatggcttcctgaata

SEQ ID NO: 41169 - DNA, 33 bp, Homo sapien
aactcttaaccactgcactataaggccccttcc

SEQ ID NO: 41170 - DNA, 33 bp, Homo sapien
aactcttaaccactgcgctataaggccccttcc

SEQ ID NO: 41171 - DNA, 33 bp, Homo sapien
gctaattcagacttcagatgcgctggggaaaat

SEQ ID NO: 41172 - DNA, 33 bp, Homo sapien
gctaattcagacttcatatgcgctggggaaaat

SEQ ID NO: 41173 - DNA, 33 bp, Homo sapien
tccctgtggcattctgcagtgttttgtgtccct

SEQ ID NO: 41174 - DNA, 33 bp, Homo sapien
tccctgtggcattctgtagtgttttgtgtccct

SEQ ID NO: 41175 - DNA, 33 bp, Homo sapien
tgtctacttctttctacgtagacacagttacag

SEQ ID NO: 41176 - DNA, 33 bp, Homo sapien
tgtctacttctttctatgtagacacagttacag

SEQ ID NO: 41177 - DNA, 33 bp, Homo sapien
tgatctctcttttccccacagtttgttgtattt

SEQ ID NO: 41178 - DNA, 33 bp, Homo sapien
tgatctctcttttccctacagtttgttgtattt

SEQ ID NO: 41179 - DNA, 33 bp, Homo sapien
gtaaagcccgatcatacgaattcgttctattct

SEQ ID NO: 41180 - DNA, 33 bp, Homo sapien
gtaaagcccgatcatatgaattcgttctattct

SEQ ID NO: 41181 - DNA, 33 bp, Homo sapien
actagtttttccaacactacacttacagcactg

SEQ ID NO: 41182 - DNA, 33 bp, Homo sapien
actagtttttccaacattacacttacagcactg

SEQ ID NO: 41183 - DNA, 33 bp, Homo sapien
gcaaggagaccattgacgcaggatatgaaattt

SEQ ID NO: 41184 - DNA, 33 bp, Homo sapien
gcaaggagaccattgatgcaggatatgaaattt

SEQ ID NO: 41185 - DNA, 33 bp, Homo sapien
gtgcacatatctacaactcaggatgggacttgc

SEQ ID NO: 41186 - DNA, 33 bp, Homo sapien
gtgcacatatctacaagtcaggatgggacttgc

SEQ ID NO: 41187 - DNA, 33 bp, Homo sapien
ggcatggagaggtgatcatacagttggtgttca

SEQ ID NO: 41188 - DNA, 33 bp, Homo sapien
ggcatggagaggtgattatacagttggtgttca

SEQ ID NO: 41189 - DNA, 33 bp, Homo sapien
ggtgctgtgaatccacagtatgtcctaggggca

SEQ ID NO: 41190 - DNA, 33 bp, Homo sapien
ggtgctgtgaatccactgtatgtcctaggggca

SEQ ID NO: 41191 - DNA, 33 bp, Homo sapien
gtctagtggagagcccagacatttaacaaaaac

SEQ ID NO: 41192 - DNA, 33 bp, Homo sapien
gtctagtggagagcccggacatttaacaaaaac

SEQ ID NO: 41193 - DNA, 33 bp, Homo sapien
acaaaagcaagaaaatcatggccaggtgcaagg

SEQ ID NO: 41194 - DNA, 33 bp, Homo sapien
acaaaagcaagaaaattatggccaggtgcaagg

SEQ ID NO: 41195 - DNA, 33 bp, Homo sapien
tctggaagcactgagaagctatattgataggtg

SEQ ID NO: 41196 - DNA, 33 bp, Homo sapien
tctggaagcactgagaggctatattgataggtg

SEQ ID NO: 41197 - DNA, 33 bp, Homo sapien
ttcctccagcttaacaacatttcctgttcctcc

SEQ ID NO: 41198 - DNA, 33 bp, Homo sapien
ttcctccagcttaacagcatttcctgttcctcc

SEQ ID NO: 41199 - DNA, 33 bp, Homo sapien
ttagtttccttaacatcaagtgtggcagaagca

SEQ ID NO: 41200 - DNA, 33 bp, Homo sapien
ttagtttccttaacattaagtgtggcagaagca

SEQ ID NO: 41201 - DNA, 33 bp, Homo sapien
aactacctactcacaagtcaggctctgttttca

SEQ ID NO: 41202 - DNA, 33 bp, Homo sapien
aactacctactcacaattcaggctctgttttca

SEQ ID NO: 41203 - DNA, 33 bp, Homo sapien
aacctaggtcacatataaaacccttttgccttg

SEQ ID NO: 41204 - DNA, 33 bp, Homo sapien
aacctaggtcacatatgaaacccttttgccttg

SEQ ID NO: 41205 - DNA, 33 bp, Homo sapien
ctccactacaactaaacggcagagcttagattc

SEQ ID NO: 41206 - DNA, 33 bp, Homo sapien
ctccactacaactaaatggcagagcttagattc

SEQ ID NO: 41207 - DNA, 33 bp, Homo sapien
tttgccttaaaatgcccacaggatgaagactga

SEQ ID NO: 41208 - DNA, 33 bp, Homo sapien
tttgccttaaaatgcctacaggatgaagactga

SEQ ID NO: 41209 - DNA, 33 bp, Homo sapien
taccttcttctcattcactggttagggattctt

SEQ ID NO: 41210 - DNA, 33 bp, Homo sapien
taccttcttctcattcgctggttagggattctt

SEQ ID NO: 41211 - DNA, 33 bp, Homo sapien
gagaactaggttgctacaaataattaagcattt

SEQ ID NO: 41212 - DNA, 33 bp, Homo sapien
gagaactaggttgctataaataattaagcattt

SEQ ID NO: 41213 - DNA, 33 bp, Homo sapien
ttgaagcaccaaaggaaaaaaggaatggcttag

SEQ ID NO: 41214 - DNA, 33 bp, Homo sapien
ttgaagcaccaaaggagaaaaggaatggcttag

SEQ ID NO: 41215 - DNA, 33 bp, Homo sapien
atggctcatctcaggactaccccagagttgctt

SEQ ID NO: 41216 - DNA, 33 bp, Homo sapien
atggctcatctcaggattaccccagagttgctt

SEQ ID NO: 41217 - DNA, 33 bp, Homo sapien
atcccgtgaacacttgcaggaagctttacaaag

SEQ ID NO: 41218 - DNA, 33 bp, Homo sapien
atcccgtgaacacttggaggaagctttacaaag

SEQ ID NO: 41219 - DNA, 33 bp, Homo sapien
gtttcttcagaaaatacgaaggcagtttgtaat

SEQ ID NO: 41220 - DNA, 33 bp, Homo sapien
gtttcttcagaaaatatgaaggcagtttgtaat

SEQ ID NO: 41221 - DNA, 33 bp, Homo sapien
acaaacggtaataaaaacatgagcatttgttga

SEQ ID NO: 41222 - DNA, 33 bp, Homo sapien
acaaacggtaataaaagcatgagcatttgttga

SEQ ID NO: 41223 - DNA, 33 bp, Homo sapien
acaaacagcaggtgacaaaaaatcctctgagaa

SEQ ID NO: 41224 - DNA, 33 bp, Homo sapien
acaaacagcaggtgaccaaaaatcctctgagaa

SEQ ID NO: 41225 - DNA, 33 bp, Homo sapien
ctttggagtgagatcaatacctaacaacattga

SEQ ID NO: 41226 - DNA, 33 bp, Homo sapien
ctttggagtgagatcagtacctaacaacattga

SEQ ID NO: 41227 - DNA, 33 bp, Homo sapien
taattcacttctaggactcaaagagccattgtc

SEQ ID NO: 41228 - DNA, 33 bp, Homo sapien
taattcacttctaggattcaaagagccattgtc

SEQ ID NO: 41229 - DNA, 33 bp, Homo sapien
aagctcaactgtcagaaaggttaaatctatcaa

SEQ ID NO: 41230 - DNA, 33 bp, Homo sapien
aagctcaactgtcagagaggttaaatctatcaa

SEQ ID NO: 41231 - DNA, 33 bp, Homo sapien
aatttactaagcacacactatgtaccaagaact

SEQ ID NO: 41232 - DNA, 33 bp, Homo sapien
aatttactaagcacacgctatgtaccaagaact

SEQ ID NO: 41233 - DNA, 33 bp, Homo sapien
aaatctcatatgttgccctcctcaaagatttta

SEQ ID NO: 41234 - DNA, 33 bp, Homo sapien
aaatctcatatgttgctctcctcaaagatttta

SEQ ID NO: 41235 - DNA, 33 bp, Homo sapien
ccaggaattctgaaggaccctctatccttgaca

SEQ ID NO: 41236 - DNA, 33 bp, Homo sapien
ccaggaattctgaaggtccctctatccttgaca

SEQ ID NO: 41237 - DNA, 33 bp, Homo sapien
gaagagtgtttctgcaacaaaagttccaaactc

SEQ ID NO: 41238 - DNA, 33 bp, Homo sapien
gaagagtgtttctgcagcaaaagttccaaactc

SEQ ID NO: 41239 - DNA, 33 bp, Homo sapien
ccatcctacctgaaatcagagccaaggagagta

SEQ ID NO: 41240 - DNA, 33 bp, Homo sapien
ccatcctacctgaaatgagagccaaggagagta

SEQ ID NO: 41241 - DNA, 33 bp, Homo sapien
aagagctgggacaaagcaaggagattcatctat

SEQ ID NO: 41242 - DNA, 33 bp, Homo sapien
aagagctgggacaaagtaaggagattcatctat

SEQ ID NO: 41243 - DNA, 33 bp, Homo sapien
ctcggaggatgcctagaagatgttgggaacaga

SEQ ID NO: 41244 - DNA, 33 bp, Homo sapien
ctcggaggatgcctaggagatgttgggaacaga

SEQ ID NO: 41245 - DNA, 33 bp, Homo sapien
ctcaattccacaatggcatggaaatgagtcacc

SEQ ID NO: 41246 - DNA, 33 bp, Homo sapien
ctcaattccacaatggtatggaaatgagtcacc

SEQ ID NO: 41247 - DNA, 33 bp, Homo sapien
tactgacaaaaggctccagttgggctgaacatg

SEQ ID NO: 41248 - DNA, 33 bp, Homo sapien
tactgacaaaaggctctagttgggctgaacatg

SEQ ID NO: 41249 - DNA, 33 bp, Homo sapien
tagagagaaaggacaaaggaaaaatgaagtgga

SEQ ID NO: 41250 - DNA, 33 bp, Homo sapien
tagagagaaaggacaagggaaaaatgaagtgga

SEQ ID NO: 41251 - DNA, 33 bp, Homo sapien
gagctggaagcactgactatgcaatctttctgc

SEQ ID NO: 41252 - DNA, 33 bp, Homo sapien
gagctggaagcactgattatgcaatctttctgc

SEQ ID NO: 41253 - DNA, 33 bp, Homo sapien
aatggtttctcctagacctttgcttccctgatg

SEQ ID NO: 41254 - DNA, 33 bp, Homo sapien
aatggtttctcctagatctttgcttccctgatg

SEQ ID NO: 41255 - DNA, 33 bp, Homo sapien
atgccatcaaaatcagaaggttgcttatctccc

SEQ ID NO: 41256 - DNA, 33 bp, Homo sapien
atgccatcaaaatcaggaggttgcttatctccc

SEQ ID NO: 41257 - DNA, 33 bp, Homo sapien
tagtttcttgacccagactaacctggaaatgat

SEQ ID NO: 41258 - DNA, 33 bp, Homo sapien
tagtttcttgacccaggctaacctggaaatgat

SEQ ID NO: 41259 - DNA, 33 bp, Homo sapien
gatttggctccaaaaaccttacatctagattgt

SEQ ID NO: 41260 - DNA, 33 bp, Homo sapien
gatttggctccaaaaatcttacatctagattgt

SEQ ID NO: 41261 - DNA, 33 bp, Homo sapien
taagatgatgatggcaaaagggtgagagtaaat

SEQ ID NO: 41262 - DNA, 33 bp, Homo sapien
taagatgatgatggcagaagggtgagagtaaat

SEQ ID NO: 41263 - DNA, 33 bp, Homo sapien
aaactacaggtatcaactcattcaggaatcctg

SEQ ID NO: 41264 - DNA, 33 bp, Homo sapien
aaactacaggtatcaattcattcaggaatcctg

SEQ ID NO: 41265 - DNA, 33 bp, Homo sapien
ttaaatataaagacacaaatgggataaaagtaa

SEQ ID NO: 41266 - DNA, 33 bp, Homo sapien
ttaaatataaagacacgaatgggataaaagtaa

SEQ ID NO: 41267 - DNA, 33 bp, Homo sapien
ttttaactaggctaccacagattcaatggttat

SEQ ID NO: 41268 - DNA, 33 bp, Homo sapien
ttttaactaggctaccgcagattcaatggttat

SEQ ID NO: 41269 - DNA, 33 bp, Homo sapien
aacttatcctcagaacaaatctatgaagtggat

SEQ ID NO: 41270 - DNA, 33 bp, Homo sapien
aacttatcctcagaacgaatctatgaagtggat

SEQ ID NO: 41271 - DNA, 33 bp, Homo sapien
gtgttctctccaaacacggttttctagcaggcc

SEQ ID NO: 41272 - DNA, 33 bp, Homo sapien
gtgttctctccaaacatggttttctagcaggcc

SEQ ID NO: 41273 - DNA, 33 bp, Homo sapien
aattatacattcaaaaagtacatgaacatccat

SEQ ID NO: 41274 - DNA, 33 bp, Homo sapien
aattatacattcaaaacgtacatgaacatccat

SEQ ID NO: 41275 - DNA, 33 bp, Homo sapien
atcttcacagagaccacaattcaccattttttt

SEQ ID NO: 41276 - DNA, 33 bp, Homo sapien
atcttcacagagaccataattcaccattttttt

SEQ ID NO: 41277 - DNA, 33 bp, Homo sapien
gctccacttttgtggaacttacgtgaaatgtcc

SEQ ID NO: 41278 - DNA, 33 bp, Homo sapien
gctccacttttgtggagcttacgtgaaatgtcc

SEQ ID NO: 41279 - DNA, 33 bp, Homo sapien
aatctgttctctgctccagaggaagacagtcca

SEQ ID NO: 41280 - DNA, 33 bp, Homo sapien
aatctgttctctgctctagaggaagacagtcca

SEQ ID NO: 41281 - DNA, 33 bp, Homo sapien
ccttggtctctaagacaatcaagaactatttac

SEQ ID NO: 41282 - DNA, 33 bp, Homo sapien
ccttggtctctaagacgatcaagaactatttac

SEQ ID NO: 41283 - DNA, 33 bp, Homo sapien
caaaattgtgtagggacgagctttgaagatgga

SEQ ID NO: 41284 - DNA, 33 bp, Homo sapien
caaaattgtgtagggaggagctttgaagatgga

SEQ ID NO: 41285 - DNA, 33 bp, Homo sapien
cagagaaactgaagtccaaacctgtgccattca

SEQ ID NO: 41286 - DNA, 33 bp, Homo sapien
cagagaaactgaagtctaaacctgtgccattca

SEQ ID NO: 41287 - DNA, 33 bp, Homo sapien
taaccccaactccatacataaccttgaagttgg

SEQ ID NO: 41288 - DNA, 33 bp, Homo sapien
taaccccaactccatatataaccttgaagttgg

SEQ ID NO: 41289 - DNA, 33 bp, Homo sapien
ttccacctgatataacacaatgcatatttgtta

SEQ ID NO: 41290 - DNA, 33 bp, Homo sapien
ttccacctgatataactcaatgcatatttgtta

SEQ ID NO: 41291 - DNA, 33 bp, Homo sapien
agcatggcataaaaaaattgaatactatgtagg

SEQ ID NO: 41292 - DNA, 33 bp, Homo sapien
agcatggcataaaaaatttgaatactatgtagg

SEQ ID NO: 41293 - DNA, 33 bp, Homo sapien
aggcatttcctgtttacagggtgtgtattctaa

SEQ ID NO: 41294 - DNA, 33 bp, Homo sapien
aggcatttcctgtttagagggtgtgtattctaa

SEQ ID NO: 41295 - DNA, 33 bp, Homo sapien
ccaattgatgaagccacgatggaatagctagag

SEQ ID NO: 41296 - DNA, 33 bp, Homo sapien
ccaattgatgaagccatgatggaatagctagag

SEQ ID NO: 41297 - DNA, 33 bp, Homo sapien
tagagctggtggttacagaataaactagaaggc

SEQ ID NO: 41298 - DNA, 33 bp, Homo sapien
tagagctggtggttacggaataaactagaaggc

SEQ ID NO: 41299 - DNA, 33 bp, Homo sapien
aaaaaaaactcaagcacgtgtaaactgcaaatt

SEQ ID NO: 41300 - DNA, 33 bp, Homo sapien
aaaaaaaactcaagcatgtgtaaactgcaaatt

SEQ ID NO: 41301 - DNA, 33 bp, Homo sapien
aactagcctggcagccacggacaggatgagaag

SEQ ID NO: 41302 - DNA, 33 bp, Homo sapien
aactagcctggcagccccggacaggatgagaag

SEQ ID NO: 41303 - DNA, 33 bp, Homo sapien
caggaacgggaaaccacgagagaagggtgagcc

SEQ ID NO: 41304 - DNA, 33 bp, Homo sapien
caggaacgggaaaccatgagagaagggtgagcc

SEQ ID NO: 41305 - DNA, 33 bp, Homo sapien
tattaaaataattaaacgaacatgtgcatatac

SEQ ID NO: 41306 - DNA, 33 bp, Homo sapien
tattaaaataattaaatgaacatgtgcatatac

SEQ ID NO: 41307 - DNA, 33 bp, Homo sapien
aggcttattttcaagcagaaatgacagcatggc

SEQ ID NO: 41308 - DNA, 33 bp, Homo sapien
aggcttattttcaagcggaaatgacagcatggc

SEQ ID NO: 41309 - DNA, 33 bp, Homo sapien
aattcaaaattttgcccataccagattataaat

SEQ ID NO: 41310 - DNA, 33 bp, Homo sapien
aattcaaaattttgcctataccagattataaat

SEQ ID NO: 41311 - DNA, 33 bp, Homo sapien
attttaaaaggaatacaagtaatgccctgaaaa

SEQ ID NO: 41312 - DNA, 33 bp, Homo sapien
attttaaaaggaatacgagtaatgccctgaaaa

SEQ ID NO: 41313 - DNA, 33 bp, Homo sapien
tttagctgtttatcacactcaagttaatttctg

SEQ ID NO: 41314 - DNA, 33 bp, Homo sapien
tttagctgtttatcacgctcaagttaatttctg

SEQ ID NO: 41315 - DNA, 33 bp, Homo sapien
aaacaatgcggattaaaacaatgtcctgcagta

SEQ ID NO: 41316 - DNA, 33 bp, Homo sapien
aaacaatgcggattaagacaatgtcctgcagta

SEQ ID NO: 41317 - DNA, 33 bp, Homo sapien
agataggaatgttgacaaaaggagtagcagtgc

SEQ ID NO: 41318 - DNA, 33 bp, Homo sapien
agataggaatgttgaccaaaggagtagcagtgc

SEQ ID NO: 41319 - DNA, 33 bp, Homo sapien
tcagaacaatagttggaaaatagtagatgctca

SEQ ID NO: 41320 - DNA, 33 bp, Homo sapien
tcagaacaatagttgggaaatagtagatgctca

SEQ ID NO: 41321 - DNA, 33 bp, Homo sapien
tagtgtcccacacaaaactctcccacctcactc

SEQ ID NO: 41322 - DNA, 33 bp, Homo sapien
tagtgtcccacacaaacctctcccacctcactc

SEQ ID NO: 41323 - DNA, 33 bp, Homo sapien
gaacataattgatgcccagtcaaagatgatctt

SEQ ID NO: 41324 - DNA, 33 bp, Homo sapien
gaacataattgatgcctagtcaaagatgatctt

SEQ ID NO: 41325 - DNA, 33 bp, Homo sapien
gtatgaatgccttaaaggtaggatggacatcaa

SEQ ID NO: 41326 - DNA, 33 bp, Homo sapien
gtatgaatgccttaaatgtaggatggacatcaa

SEQ ID NO: 41327 - DNA, 33 bp, Homo sapien
gcacaacaagcttaagaaactttgtggatttat

SEQ ID NO: 41328 - DNA, 33 bp, Homo sapien
gcacaacaagcttaagtaactttgtggatttat

SEQ ID NO: 41329 - DNA, 33 bp, Homo sapien
gtgagaatagtgcaataactatctatccccttt

SEQ ID NO: 41330 - DNA, 33 bp, Homo sapien
gtgagaatagtgcaatgactatctatccccttt

SEQ ID NO: 41331 - DNA, 33 bp, Homo sapien
tcatcatccagaatcaatatctctactggcaga

SEQ ID NO: 41332 - DNA, 33 bp, Homo sapien
tcatcatccagaatcagtatctctactggcaga

SEQ ID NO: 41333 - DNA, 33 bp, Homo sapien
tggtagtcagatttagaaaagacagcatctggc

SEQ ID NO: 41334 - DNA, 33 bp, Homo sapien
tggtagtcagatttaggaaagacagcatctggc

SEQ ID NO: 41335 - DNA, 33 bp, Homo sapien
cgcctggccttgattcaataactttaaatcatc

SEQ ID NO: 41336 - DNA, 33 bp, Homo sapien
cgcctggccttgattctataactttaaatcatc

SEQ ID NO: 41337 - DNA, 33 bp, Homo sapien
tcctcatccaaaagaacaatcaagttttgtttt

SEQ ID NO: 41338 - DNA, 33 bp, Homo sapien
tcctcatccaaaagaagaatcaagttttgtttt

SEQ ID NO: 41339 - DNA, 33 bp, Homo sapien
gaaaagggaaagcatacggtgattgtcatggcc

SEQ ID NO: 41340 - DNA, 33 bp, Homo sapien
gaaaagggaaagcatatggtgattgtcatggcc

SEQ ID NO: 41341 - DNA, 33 bp, Homo sapien
gggaagaggtgaatgcaaatgcctagggcctaa

SEQ ID NO: 41342 - DNA, 33 bp, Homo sapien
gggaagaggtgaatgcgaatgcctagggcctaa

SEQ ID NO: 41343 - DNA, 33 bp, Homo sapien
taggtagctgggccaaatctcagtgccttagta

SEQ ID NO: 41344 - DNA, 33 bp, Homo sapien
taggtagctgggccaattctcagtgccttagta

SEQ ID NO: 41345 - DNA, 33 bp, Homo sapien
tatccagcttctcatccctactggcaacaggag

SEQ ID NO: 41346 - DNA, 33 bp, Homo sapien
tatccagcttctcatctctactggcaacaggag

SEQ ID NO: 41347 - DNA, 33 bp, Homo sapien
acccaaagttcatggacctttttatgactgcag

SEQ ID NO: 41348 - DNA, 33 bp, Homo sapien
acccaaagttcatggagctttttatgactgcag

SEQ ID NO: 41349 - DNA, 33 bp, Homo sapien
aggttatgcatagtgaccaaaccccgcctggta

SEQ ID NO: 41350 - DNA, 33 bp, Homo sapien
aggttatgcatagtgatcaaaccccgcctggta

SEQ ID NO: 41351 - DNA, 33 bp, Homo sapien
tggcatctctgaagacagaatgtggaatttaat

SEQ ID NO: 41352 - DNA, 33 bp, Homo sapien
tggcatctctgaagacggaatgtggaatttaat

SEQ ID NO: 41353 - DNA, 33 bp, Homo sapien
aataatacattctatccagaagggcagaagttg

SEQ ID NO: 41354 - DNA, 33 bp, Homo sapien
aataatacattctatctagaagggcagaagttg

SEQ ID NO: 41355 - DNA, 33 bp, Homo sapien
gcacctggtagacccaataaacattgaatggct

SEQ ID NO: 41356 - DNA, 33 bp, Homo sapien
gcacctggtagacccagtaaacattgaatggct

SEQ ID NO: 41357 - DNA, 33 bp, Homo sapien
ctgtttatacgtaatacggactcaacaaacctt

SEQ ID NO: 41358 - DNA, 33 bp, Homo sapien
ctgtttatacgtaatagggactcaacaaacctt

SEQ ID NO: 41359 - DNA, 33 bp, Homo sapien
ttcaagtaatttggaccaaggctgatgtgaatt

SEQ ID NO: 41360 - DNA, 33 bp, Homo sapien
ttcaagtaatttggacgaaggctgatgtgaatt

SEQ ID NO: 41361 - DNA, 33 bp, Homo sapien
gtacaaaataataaacacattctgccaaaataa

SEQ ID NO: 41362 - DNA, 33 bp, Homo sapien
gtacaaaataataaacgcattctgccaaaataa

SEQ ID NO: 41363 - DNA, 33 bp, Homo sapien
cccacagaccaaataaacttcgggtagaaataa

SEQ ID NO: 41364 - DNA, 33 bp, Homo sapien
cccacagaccaaataatcttcgggtagaaataa

SEQ ID NO: 41365 - DNA, 33 bp, Homo sapien
cacagactgtcataagaaccacaaggagtataa

SEQ ID NO: 41366 - DNA, 33 bp, Homo sapien
cacagactgtcataaggaccacaaggagtataa

SEQ ID NO: 41367 - DNA, 33 bp, Homo sapien
gtgcaagctagttgaacagatatgttgtccagg

SEQ ID NO: 41368 - DNA, 33 bp, Homo sapien
gtgcaagctagttgaatagatatgttgtccagg

SEQ ID NO: 41369 - DNA, 33 bp, Homo sapien
cctcagccggtcattagggcaccttgctatgga

SEQ ID NO: 41370 - DNA, 33 bp, Homo sapien
cctcagccggtcattatggcaccttgctatgga

SEQ ID NO: 41371 - DNA, 33 bp, Homo sapien
ctcctctctacaagcagagaacattgactaggg

SEQ ID NO: 41372 - DNA, 33 bp, Homo sapien
ctcctctctacaagcatagaacattgactaggg

SEQ ID NO: 41373 - DNA, 33 bp, Homo sapien
acataaccatacccagaatatgaaatttggtgg

SEQ ID NO: 41374 - DNA, 33 bp, Homo sapien
acataaccatacccagcatatgaaatttggtgg

SEQ ID NO: 41375 - DNA, 33 bp, Homo sapien
tctttgtagaaccaacaaagacatgatattttt

SEQ ID NO: 41376 - DNA, 33 bp, Homo sapien
tctttgtagaaccaaccaagacatgatattttt

SEQ ID NO: 41377 - DNA, 33 bp, Homo sapien
attttaacaaagataaatgagaacaccagcatt

SEQ ID NO: 41378 - DNA, 33 bp, Homo sapien
attttaacaaagataactgagaacaccagcatt

SEQ ID NO: 41379 - DNA, 33 bp, Homo sapien
tcatcaacttcactaccggtctcctgtcaatag

SEQ ID NO: 41380 - DNA, 33 bp, Homo sapien
tcatcaacttcactactggtctcctgtcaatag

SEQ ID NO: 41381 - DNA, 33 bp, Homo sapien
gtgctctctccagagcggaggggctggctcatc

SEQ ID NO: 41382 - DNA, 33 bp, Homo sapien
gtgctctctccagagctgaggggctggctcatc

SEQ ID NO: 41383 - DNA, 33 bp, Homo sapien
tccactgctggggagaacatgagaagtcacaat

SEQ ID NO: 41384 - DNA, 33 bp, Homo sapien
tccactgctggggagagcatgagaagtcacaat

SEQ ID NO: 41385 - DNA, 33 bp, Homo sapien
tccttttggacttgataacatttctaagattaa

SEQ ID NO: 41386 - DNA, 33 bp, Homo sapien
tccttttggacttgatcacatttctaagattaa

SEQ ID NO: 41387 - DNA, 33 bp, Homo sapien
ggacatctgtctcccaaagaacggggtcactca

SEQ ID NO: 41388 - DNA, 33 bp, Homo sapien
ggacatctgtctcccatagaacggggtcactca

SEQ ID NO: 41389 - DNA, 33 bp, Homo sapien
ggctttgggctcagaaaaatcgtggtcctcaac

SEQ ID NO: 41390 - DNA, 33 bp, Homo sapien
ggctttgggctcagaacaatcgtggtcctcaac

SEQ ID NO: 41391 - DNA, 33 bp, Homo sapien
cccaaattccttaatccaaattcaaggctgcaa

SEQ ID NO: 41392 - DNA, 33 bp, Homo sapien
cccaaattccttaatctaaattcaaggctgcaa

SEQ ID NO: 41393 - DNA, 33 bp, Homo sapien
ccaggtgactagcacaataaattaaaatcctct

SEQ ID NO: 41394 - DNA, 33 bp, Homo sapien
ccaggtgactagcacagtaaattaaaatcctct

SEQ ID NO: 41395 - DNA, 33 bp, Homo sapien
caggcgctgcagagcacaagtatttaatgcttt

SEQ ID NO: 41396 - DNA, 33 bp, Homo sapien
caggcgctgcagagcagaagtatttaatgcttt

SEQ ID NO: 41397 - DNA, 33 bp, Homo sapien
aaaataattggtctcaagatgtgactccctcta

SEQ ID NO: 41398 - DNA, 33 bp, Homo sapien
aaaataattggtctcaggatgtgactccctcta

SEQ ID NO: 41399 - DNA, 33 bp, Homo sapien
acttcccctggagagacgttacttactgggaat

SEQ ID NO: 41400 - DNA, 33 bp, Homo sapien
acttcccctggagagatgttacttactgggaat

SEQ ID NO: 41401 - DNA, 33 bp, Homo sapien
tggacccggtgtctgacgcaatgcccggcacgt

SEQ ID NO: 41402 - DNA, 33 bp, Homo sapien
tggacccggtgtctgatgcaatgcccggcacgt

SEQ ID NO: 41403 - DNA, 33 bp, Homo sapien
agcccaacaaataaacagagaaatcacaaggca

SEQ ID NO: 41404 - DNA, 33 bp, Homo sapien
agcccaacaaataaacggagaaatcacaaggca

SEQ ID NO: 41405 - DNA, 33 bp, Homo sapien
atctaccgagcacccaacaaggtatacgcagag

SEQ ID NO: 41406 - DNA, 33 bp, Homo sapien
atctaccgagcacccagcaaggtatacgcagag

SEQ ID NO: 41407 - DNA, 33 bp, Homo sapien
tcaggctcctaaagcaaatctttataccagcaa

SEQ ID NO: 41408 - DNA, 33 bp, Homo sapien
tcaggctcctaaagcagatctttataccagcaa

SEQ ID NO: 41409 - DNA, 33 bp, Homo sapien
tgcccagatcccatcccgacggctatctccaca

SEQ ID NO: 41410 - DNA, 33 bp, Homo sapien
tgcccagatcccatcctgacggctatctccaca

SEQ ID NO: 41411 - DNA, 33 bp, Homo sapien
tctgaggcaggagcagcctaaacagagcaaggg

SEQ ID NO: 41412 - DNA, 33 bp, Homo sapien
tctgaggcaggagcaggctaaacagagcaaggg

SEQ ID NO: 41413 - DNA, 33 bp, Homo sapien
aggattcagacagaccaccttgtttccctgggc

SEQ ID NO: 41414 - DNA, 33 bp, Homo sapien
aggattcagacagaccgccttgtttccctgggc

SEQ ID NO: 41415 - DNA, 33 bp, Homo sapien
attttgacaggtagaaacagcaggggggaattc

SEQ ID NO: 41416 - DNA, 33 bp, Homo sapien
attttgacaggtagaaccagcaggggggaattc

SEQ ID NO: 41417 - DNA, 33 bp, Homo sapien
tctcctcctccagtaccaacagccagatgtgtc

SEQ ID NO: 41418 - DNA, 33 bp, Homo sapien
tctcctcctccagtacgaacagccagatgtgtc

SEQ ID NO: 41419 - DNA, 33 bp, Homo sapien
aacttcacatctcccagtagtagggattttgct

SEQ ID NO: 41420 - DNA, 33 bp, Homo sapien
aacttcacatctcccattagtagggattttgct

SEQ ID NO: 41421 - DNA, 33 bp, Homo sapien
ctttctgcctttctcactaaacccatctggttg

SEQ ID NO: 41422 - DNA, 33 bp, Homo sapien
ctttctgcctttctcagtaaacccatctggttg

SEQ ID NO: 41423 - DNA, 33 bp, Homo sapien
cgagagaagcctgggacgttgggtgacaatgtg

SEQ ID NO: 41424 - DNA, 33 bp, Homo sapien
cgagagaagcctgggatgttgggtgacaatgtg

SEQ ID NO: 41425 - DNA, 33 bp, Homo sapien
atagtaatgtttattacagatggctttggtcga

SEQ ID NO: 41426 - DNA, 33 bp, Homo sapien
atagtaatgtttattatagatggctttggtcga

SEQ ID NO: 41427 - DNA, 33 bp, Homo sapien
gagaagattctttgtaaagtcggagcccagaga

SEQ ID NO: 41428 - DNA, 33 bp, Homo sapien
gagaagattctttgtatagtcggagcccagaga

SEQ ID NO: 41429 - DNA, 33 bp, Homo sapien
ttgatttccttttgtgccaattcacagggggtg

SEQ ID NO: 41430 - DNA, 33 bp, Homo sapien
ttgatttccttttgtgtcaattcacagggggtg

SEQ ID NO: 41431 - DNA, 33 bp, Homo sapien
aatttaagacacctcaaagaatttaacttgctc

SEQ ID NO: 41432 - DNA, 33 bp, Homo sapien
aatttaagacacctcagagaatttaacttgctc

SEQ ID NO: 41433 - DNA, 33 bp, Homo sapien
ttgagccaggcctggaaaagctaaatggcatct

SEQ ID NO: 41434 - DNA, 33 bp, Homo sapien
ttgagccaggcctggacaagctaaatggcatct

SEQ ID NO: 41435 - DNA, 33 bp, Homo sapien
tgtgtgaagatagcccacaggggattctgacat

SEQ ID NO: 41436 - DNA, 33 bp, Homo sapien
tgtgtgaagatagcccgcaggggattctgacat

SEQ ID NO: 41437 - DNA, 33 bp, Homo sapien
gacattgttggcggcaaaaaaaggctggcccca

SEQ ID NO: 41438 - DNA, 33 bp, Homo sapien
gacattgttggcggcagaaaaaggctggcccca

SEQ ID NO: 41439 - DNA, 33 bp, Homo sapien
gtttaagcaacattcactcatccgctctcaggc

SEQ ID NO: 41440 - DNA, 33 bp, Homo sapien
gtttaagcaacattcattcatccgctctcaggc

SEQ ID NO: 41441 - DNA, 33 bp, Homo sapien
agagagtaaagtaccaaacttgcagggctttgt

SEQ ID NO: 41442 - DNA, 33 bp, Homo sapien
agagagtaaagtaccacacttgcagggctttgt

SEQ ID NO: 41443 - DNA, 33 bp, Homo sapien
tgtgccagacattgacaaacctatttgtctagg

SEQ ID NO: 41444 - DNA, 33 bp, Homo sapien
tgtgccagacattgactaacctatttgtctagg

SEQ ID NO: 41445 - DNA, 33 bp, Homo sapien
tgtgctctcaacaggaactcttttggtcacact

SEQ ID NO: 41446 - DNA, 33 bp, Homo sapien
tgtgctctcaacaggagctcttttggtcacact

SEQ ID NO: 41447 - DNA, 33 bp, Homo sapien
aaacccttctgagcacagtgaaaatcctagcaa

SEQ ID NO: 41448 - DNA, 33 bp, Homo sapien
aaacccttctgagcacggtgaaaatcctagcaa

SEQ ID NO: 41449 - DNA, 33 bp, Homo sapien
cccccatagcctgtgcgcttacctatgaagaca

SEQ ID NO: 41450 - DNA, 33 bp, Homo sapien
cccccatagcctgtgctcttacctatgaagaca

SEQ ID NO: 41451 - DNA, 33 bp, Homo sapien
gtttgtgtatgtaagaccagaattggaaaccag

SEQ ID NO: 41452 - DNA, 33 bp, Homo sapien
gtttgtgtatgtaagatcagaattggaaaccag

SEQ ID NO: 41453 - DNA, 33 bp, Homo sapien
tgttgggatgactatacacttggtaattctggg

SEQ ID NO: 41454 - DNA, 33 bp, Homo sapien
tgttgggatgactatatacttggtaattctggg

SEQ ID NO: 41455 - DNA, 33 bp, Homo sapien
gagttaaacctgagagaccagatgagagagcaa

SEQ ID NO: 41456 - DNA, 33 bp, Homo sapien
gagttaaacctgagaggccagatgagagagcaa

SEQ ID NO: 41457 - DNA, 33 bp, Homo sapien
tgcttagaggacaatcactgttatgcccacggg

SEQ ID NO: 41458 - DNA, 33 bp, Homo sapien
tgcttagaggacaatcgctgttatgcccacggg

SEQ ID NO: 41459 - DNA, 33 bp, Homo sapien
taagaatggagaaagcaatacccacctcatagt

SEQ ID NO: 41460 - DNA, 33 bp, Homo sapien
taagaatggagaaagccatacccacctcatagt

SEQ ID NO: 41461 - DNA, 33 bp, Homo sapien
ggtgaggcagcattaaccagaacatacctaatg

SEQ ID NO: 41462 - DNA, 33 bp, Homo sapien
ggtgaggcagcattaagcagaacatacctaatg

SEQ ID NO: 41463 - DNA, 33 bp, Homo sapien
gagaattgagttgaaaatttaaagaaggagttg

SEQ ID NO: 41464 - DNA, 33 bp, Homo sapien
gagaattgagttgaaactttaaagaaggagttg

SEQ ID NO: 41465 - DNA, 33 bp, Homo sapien
tttccaaaaatatagcagacagaaatgaaggta

SEQ ID NO: 41466 - DNA, 33 bp, Homo sapien
tttccaaaaatatagcggacagaaatgaaggta

SEQ ID NO: 41467 - DNA, 33 bp, Homo sapien
tcttcagtgtccttcaaagtcttccatgttctg

SEQ ID NO: 41468 - DNA, 33 bp, Homo sapien
tcttcagtgtccttcagagtcttccatgttctg

SEQ ID NO: 41469 - DNA, 33 bp, Homo sapien
ctcctgggggtaagaggatgacgagtcctgtat

SEQ ID NO: 41470 - DNA, 33 bp, Homo sapien
ctcctgggggtaagagtatgacgagtcctgtat

SEQ ID NO: 41471 - DNA, 33 bp, Homo sapien
aatacgcgtcagagcaaacccggaacccgggcc

SEQ ID NO: 41472 - DNA, 33 bp, Homo sapien
aatacgcgtcagagcagacccggaacccgggcc

SEQ ID NO: 41473 - DNA, 33 bp, Homo sapien
agctgtggaaccttagacaagttacttaacctc

SEQ ID NO: 41474 - DNA, 33 bp, Homo sapien
agctgtggaaccttagtcaagttacttaacctc

SEQ ID NO: 41475 - DNA, 33 bp, Homo sapien
cgtggggcacaggagccgagtgtgtctagctgg

SEQ ID NO: 41476 - DNA, 33 bp, Homo sapien
cgtggggcacaggagcggagtgtgtctagctgg

SEQ ID NO: 41477 - DNA, 33 bp, Homo sapien
tacaggtgctgagccacgggggagcagatggag

SEQ ID NO: 41478 - DNA, 33 bp, Homo sapien
tacaggtgctgagccatgggggagcagatggag

SEQ ID NO: 41479 - DNA, 33 bp, Homo sapien
cagggtgacttgcatccactgccatatttgagc

SEQ ID NO: 41480 - DNA, 33 bp, Homo sapien
cagggtgacttgcatctactgccatatttgagc

SEQ ID NO: 41481 - DNA, 33 bp, Homo sapien
tttccagctctggtaccgggtaaggacatctgg

SEQ ID NO: 41482 - DNA, 33 bp, Homo sapien
tttccagctctggtactgggtaaggacatctgg

SEQ ID NO: 41483 - DNA, 33 bp, Homo sapien
accctctcttacttcactcatagcacctatcgt

SEQ ID NO: 41484 - DNA, 33 bp, Homo sapien
accctctcttacttcattcatagcacctatcgt

SEQ ID NO: 41485 - DNA, 33 bp, Homo sapien
caccttgtgggcaacccgacctatccagggact

SEQ ID NO: 41486 - DNA, 33 bp, Homo sapien
caccttgtgggcaacctgacctatccagggact

SEQ ID NO: 41487 - DNA, 33 bp, Homo sapien
aggacatgggctgtcaatcacattctccatcct

SEQ ID NO: 41488 - DNA, 33 bp, Homo sapien
aggacatgggctgtcagtcacattctccatcct

SEQ ID NO: 41489 - DNA, 33 bp, Homo sapien
gaggttggattaatacaagtaccaacaactcac

SEQ ID NO: 41490 - DNA, 33 bp, Homo sapien
gaggttggattaatacgagtaccaacaactcac

SEQ ID NO: 41491 - DNA, 33 bp, Homo sapien
ttgaggggcaaacttaccctgttcatgtttgtg

SEQ ID NO: 41492 - DNA, 33 bp, Homo sapien
ttgaggggcaaacttatcctgttcatgtttgtg

SEQ ID NO: 41493 - DNA, 33 bp, Homo sapien
gccgggcttcacctcgaaaaggtctactggggg

SEQ ID NO: 41494 - DNA, 33 bp, Homo sapien
gccgggcttcacctcgcaaaggtctactggggg

SEQ ID NO: 41495 - DNA, 33 bp, Homo sapien
tttgttgagcagaatgccaccacttgcctctga

SEQ ID NO: 41496 - DNA, 33 bp, Homo sapien
tttgttgagcagaatgtcaccacttgcctctga

SEQ ID NO: 41497 - DNA, 33 bp, Homo sapien
agggcaagtccaaacaaagaagaacacaaacaa

SEQ ID NO: 41498 - DNA, 33 bp, Homo sapien
agggcaagtccaaacagagaagaacacaaacaa

SEQ ID NO: 41499 - DNA, 33 bp, Homo sapien
atagccaaactccaacccagcttcttcttagcg

SEQ ID NO: 41500 - DNA, 33 bp, Homo sapien
atagccaaactccaactcagcttcttcttagcg

SEQ ID NO: 41501 - DNA, 33 bp, Homo sapien
gttatctttcaagtccaaccctatatccctgcc

SEQ ID NO: 41502 - DNA, 33 bp, Homo sapien
gttatctttcaagtccgaccctatatccctgcc

SEQ ID NO: 41503 - DNA, 33 bp, Homo sapien
gctcatccaagccccaatgatggctaagactgg

SEQ ID NO: 41504 - DNA, 33 bp, Homo sapien
gctcatccaagccccagtgatggctaagactgg

SEQ ID NO: 41505 - DNA, 33 bp, Homo sapien
caggccctggtctaggcacattataaacgtcat

SEQ ID NO: 41506 - DNA, 33 bp, Homo sapien
caggccctggtctaggtacattataaacgtcat

SEQ ID NO: 41507 - DNA, 33 bp, Homo sapien
ttgtatatcttaaacactagcaaaccagcatat

SEQ ID NO: 41508 - DNA, 33 bp, Homo sapien
ttgtatatcttaaacagtagcaaaccagcatat

SEQ ID NO: 41509 - DNA, 33 bp, Homo sapien
ggcttatagctgctgaagagtatcattagttta

SEQ ID NO: 41510 - DNA, 33 bp, Homo sapien
ggcttatagctgctgaggagtatcattagttta

SEQ ID NO: 41511 - DNA, 33 bp, Homo sapien
acctgggcaaagcataaagggtcttccccagta

SEQ ID NO: 41512 - DNA, 33 bp, Homo sapien
acctgggcaaagcatagagggtcttccccagta

SEQ ID NO: 41513 - DNA, 33 bp, Homo sapien
gccaaaacccagaggcaatagtgttggtttttc

SEQ ID NO: 41514 - DNA, 33 bp, Homo sapien
gccaaaacccagaggcgatagtgttggtttttc

SEQ ID NO: 41515 - DNA, 33 bp, Homo sapien
gcatagctggattggaactctgacctctccctt

SEQ ID NO: 41516 - DNA, 33 bp, Homo sapien
gcatagctggattggagctctgacctctccctt

SEQ ID NO: 41517 - DNA, 33 bp, Homo sapien
cccaagaaaaaagtcacgtaagtgttggtaaag

SEQ ID NO: 41518 - DNA, 33 bp, Homo sapien
cccaagaaaaaagtcatgtaagtgttggtaaag

SEQ ID NO: 41519 - DNA, 33 bp, Homo sapien
acaatcaagggagccacgtaaattaaagttaaa

SEQ ID NO: 41520 - DNA, 33 bp, Homo sapien
acaatcaagggagccatgtaaattaaagttaaa

SEQ ID NO: 41521 - DNA, 33 bp, Homo sapien
tccctcacctagcaaaatgggttataatgatgg

SEQ ID NO: 41522 - DNA, 33 bp, Homo sapien
tccctcacctagcaaagtgggttataatgatgg

SEQ ID NO: 41523 - DNA, 33 bp, Homo sapien
agaggaattaagtcgacgggaaatatgtgtgtg

SEQ ID NO: 41524 - DNA, 33 bp, Homo sapien
agaggaattaagtcgatgggaaatatgtgtgtg

SEQ ID NO: 41525 - DNA, 33 bp, Homo sapien
gcctagaatacagtcaaccttcagtaagtgttt

SEQ ID NO: 41526 - DNA, 33 bp, Homo sapien
gcctagaatacagtcacccttcagtaagtgttt

SEQ ID NO: 41527 - DNA, 33 bp, Homo sapien
agtggtcagaggcaggacaattagtttctttta

SEQ ID NO: 41528 - DNA, 33 bp, Homo sapien
agtggtcagaggcagggcaattagtttctttta

SEQ ID NO: 41529 - DNA, 33 bp, Homo sapien
tgatctctttacacaacccaaaatcatagatcc

SEQ ID NO: 41530 - DNA, 33 bp, Homo sapien
tgatctctttacacaagccaaaatcatagatcc

SEQ ID NO: 41531 - DNA, 33 bp, Homo sapien
ggaaatgttgcaggacaagcaggttcacatgct

SEQ ID NO: 41532 - DNA, 33 bp, Homo sapien
ggaaatgttgcaggaccagcaggttcacatgct

SEQ ID NO: 41533 - DNA, 33 bp, Homo sapien
cctgacacaacgcacacacaaacacataaaccc

SEQ ID NO: 41534 - DNA, 33 bp, Homo sapien
cctgacacaacgcacagacaaacacataaaccc

SEQ ID NO: 41535 - DNA, 33 bp, Homo sapien
ccccatttccctaagcagactctatctcactgt

SEQ ID NO: 41536 - DNA, 33 bp, Homo sapien
ccccatttccctaagcggactctatctcactgt

SEQ ID NO: 41537 - DNA, 33 bp, Homo sapien
aagaagtgaatgtataagagggagtagatgctt

SEQ ID NO: 41538 - DNA, 33 bp, Homo sapien
aagaagtgaatgtataggagggagtagatgctt

SEQ ID NO: 41539 - DNA, 33 bp, Homo sapien
ctctgccctggggatacaggaggtgcccaataa

SEQ ID NO: 41540 - DNA, 33 bp, Homo sapien
ctctgccctggggatataggaggtgcccaataa

SEQ ID NO: 41541 - DNA, 33 bp, Homo sapien
gctttgaagatgacaaaatccacttgctaaata

SEQ ID NO: 41542 - DNA, 33 bp, Homo sapien
gctttgaagatgacaatatccacttgctaaata

SEQ ID NO: 41543 - DNA, 33 bp, Homo sapien
gggctggctaaagatgccaaagttgtgcatcct

SEQ ID NO: 41544 - DNA, 33 bp, Homo sapien
gggctggctaaagatgtcaaagttgtgcatcct

SEQ ID NO: 41545 - DNA, 33 bp, Homo sapien
gtttgtttccacaggacctcgggggcctatgtc

SEQ ID NO: 41546 - DNA, 33 bp, Homo sapien
gtttgtttccacaggatctcgggggcctatgtc

SEQ ID NO: 41547 - DNA, 33 bp, Homo sapien
aggcaggtcgctcggcagagagaggggcctgga

SEQ ID NO: 41548 - DNA, 33 bp, Homo sapien
aggcaggtcgctcggcggagagaggggcctgga

SEQ ID NO: 41549 - DNA, 33 bp, Homo sapien
tttctctaactcagagccctgcagcatgttatc

SEQ ID NO: 41550 - DNA, 33 bp, Homo sapien
tttctctaactcagagtcctgcagcatgttatc

SEQ ID NO: 41551 - DNA, 33 bp, Homo sapien
agatagtgctcattgaagtttgggatttgtgta

SEQ ID NO: 41552 - DNA, 33 bp, Homo sapien
agatagtgctcattgatgtttgggatttgtgta

SEQ ID NO: 41553 - DNA, 33 bp, Homo sapien
gcacctgcgtgtaaaaatctcatgtctacatgg

SEQ ID NO: 41554 - DNA, 33 bp, Homo sapien
gcacctgcgtgtaaaactctcatgtctacatgg

SEQ ID NO: 41555 - DNA, 33 bp, Homo sapien
tttcagcagtgccataaccagggagctaataat

SEQ ID NO: 41556 - DNA, 33 bp, Homo sapien
tttcagcagtgccatagccagggagctaataat

SEQ ID NO: 41557 - DNA, 33 bp, Homo sapien
ctgctgtcaggagaaaacctgctcatctaacat

SEQ ID NO: 41558 - DNA, 33 bp, Homo sapien
ctgctgtcaggagaaaccctgctcatctaacat

SEQ ID NO: 41559 - DNA, 33 bp, Homo sapien
ctcaaactaagccgcaaaggaggcgtctgctca

SEQ ID NO: 41560 - DNA, 33 bp, Homo sapien
ctcaaactaagccgcagaggaggcgtctgctca

SEQ ID NO: 41561 - DNA, 33 bp, Homo sapien
tagtacaaagaattgacagtggatttctttcca

SEQ ID NO: 41562 - DNA, 33 bp, Homo sapien
tagtacaaagaattgagagtggatttctttcca

SEQ ID NO: 41563 - DNA, 33 bp, Homo sapien
agctgttaaactataactactcgaagtcagctg

SEQ ID NO: 41564 - DNA, 33 bp, Homo sapien
agctgttaaactataagtactcgaagtcagctg

SEQ ID NO: 41565 - DNA, 33 bp, Homo sapien
ctccatcctatctaccaggatcattgcaatagc

SEQ ID NO: 41566 - DNA, 33 bp, Homo sapien
ctccatcctatctaccgggatcattgcaatagc

SEQ ID NO: 41567 - DNA, 33 bp, Homo sapien
aaccgtcttttcatgccaaaaatggtcaaacac

SEQ ID NO: 41568 - DNA, 33 bp, Homo sapien
aaccgtcttttcatgctaaaaatggtcaaacac

SEQ ID NO: 41569 - DNA, 33 bp, Homo sapien
agtggcaaagaatttgcagctatctttcacaac

SEQ ID NO: 41570 - DNA, 33 bp, Homo sapien
agtggcaaagaatttgtagctatctttcacaac

SEQ ID NO: 41571 - DNA, 33 bp, Homo sapien
cgtatagaaaccacaacttcatactgagtcctc

SEQ ID NO: 41572 - DNA, 33 bp, Homo sapien
cgtatagaaaccacaagttcatactgagtcctc

SEQ ID NO: 41573 - DNA, 33 bp, Homo sapien
taatttgagcatcaaaacgtccctattgaacaa

SEQ ID NO: 41574 - DNA, 33 bp, Homo sapien
taatttgagcatcaaagcgtccctattgaacaa

SEQ ID NO: 41575 - DNA, 33 bp, Homo sapien
atgaaagaactcttccagatggaggaaactaaa

SEQ ID NO: 41576 - DNA, 33 bp, Homo sapien
atgaaagaactcttccggatggaggaaactaaa

SEQ ID NO: 41577 - DNA, 33 bp, Homo sapien
tttgctttcacaggccactattggttttacctc

SEQ ID NO: 41578 - DNA, 33 bp, Homo sapien
tttgctttcacaggccgctattggttttacctc

SEQ ID NO: 41579 - DNA, 33 bp, Homo sapien
ctggcgacagactgacaaggagctgcggctggc

SEQ ID NO: 41580 - DNA, 33 bp, Homo sapien
ctggcgacagactgacgaggagctgcggctggc

SEQ ID NO: 41581 - DNA, 33 bp, Homo sapien
ttaaaatttgctaattgaaaagcatttgcccac

SEQ ID NO: 41582 - DNA, 33 bp, Homo sapien
ttaaaatttgctaatttaaaagcatttgcccac

SEQ ID NO: 41583 - DNA, 33 bp, Homo sapien
gttccagtgctagggccagggaaagtgagagaa

SEQ ID NO: 41584 - DNA, 33 bp, Homo sapien
gttccagtgctagggctagggaaagtgagagaa

SEQ ID NO: 41585 - DNA, 33 bp, Homo sapien
cttcatcatcatggtacaaaaattctgtggtga

SEQ ID NO: 41586 - DNA, 33 bp, Homo sapien
cttcatcatcatggtataaaaattctgtggtga

SEQ ID NO: 41587 - DNA, 33 bp, Homo sapien
actacaggtttctcaaacgtaatgattaaggcc

SEQ ID NO: 41588 - DNA, 33 bp, Homo sapien
actacaggtttctcaaccgtaatgattaaggcc

SEQ ID NO: 41589 - DNA, 33 bp, Homo sapien
tgggagtttggctgaacctagagcggcctctgg

SEQ ID NO: 41590 - DNA, 33 bp, Homo sapien
tgggagtttggctgaatctagagcggcctctgg

SEQ ID NO: 41591 - DNA, 33 bp, Homo sapien
acaaagatgattcaaacgtgagtctttccttct

SEQ ID NO: 41592 - DNA, 33 bp, Homo sapien
acaaagatgattcaaatgtgagtctttccttct

SEQ ID NO: 41593 - DNA, 33 bp, Homo sapien
cctgccattctggctcacctcaaagtctagact

SEQ ID NO: 41594 - DNA, 33 bp, Homo sapien
cctgccattctggctcgcctcaaagtctagact

SEQ ID NO: 41595 - DNA, 33 bp, Homo sapien
tgtattgtagaatagtaacagatttacaggaaa

SEQ ID NO: 41596 - DNA, 33 bp, Homo sapien
tgtattgtagaatagttacagatttacaggaaa

SEQ ID NO: 41597 - DNA, 33 bp, Homo sapien
tgaattgaaagattcagaacatagccctgggaa

SEQ ID NO: 41598 - DNA, 33 bp, Homo sapien
tgaattgaaagattcataacatagccctgggaa

SEQ ID NO: 41599 - DNA, 33 bp, Homo sapien
ataaacttcctacatgacatctgggcccgtgtc

SEQ ID NO: 41600 - DNA, 33 bp, Homo sapien
ataaacttcctacatggcatctgggcccgtgtc

SEQ ID NO: 41601 - DNA, 33 bp, Homo sapien
gcacatgcatacgagaaaacttattatttacat

SEQ ID NO: 41602 - DNA, 33 bp, Homo sapien
gcacatgcatacgagagaacttattatttacat

SEQ ID NO: 41603 - DNA, 33 bp, Homo sapien
cactcaaccctctgaaagatcagcaggacagat

SEQ ID NO: 41604 - DNA, 33 bp, Homo sapien
cactcaaccctctgaaggatcagcaggacagat

SEQ ID NO: 41605 - DNA, 33 bp, Homo sapien
attctcacatgtttaaacttgacattaaacttc

SEQ ID NO: 41606 - DNA, 33 bp, Homo sapien
attctcacatgtttaaccttgacattaaacttc

SEQ ID NO: 41607 - DNA, 33 bp, Homo sapien
taagaatgtgttcacagggattttttaaaagcc

SEQ ID NO: 41608 - DNA, 33 bp, Homo sapien
taagaatgtgttcacatggattttttaaaagcc

SEQ ID NO: 41609 - DNA, 33 bp, Homo sapien
ctgacacagcaaagaaacttaatgagactcaat

SEQ ID NO: 41610 - DNA, 33 bp, Homo sapien
ctgacacagcaaagaatcttaatgagactcaat

SEQ ID NO: 41611 - DNA, 33 bp, Homo sapien
tggtctgtgtgtcaaaacaaaggccactagata

SEQ ID NO: 41612 - DNA, 33 bp, Homo sapien
tggtctgtgtgtcaaatcaaaggccactagata

SEQ ID NO: 41613 - DNA, 33 bp, Homo sapien
atgtctttgcactgaagaattagttacttattc

SEQ ID NO: 41614 - DNA, 33 bp, Homo sapien
atgtctttgcactgaataattagttacttattc

SEQ ID NO: 41615 - DNA, 33 bp, Homo sapien
ccaagataatagggaaacttgttgtccacctct

SEQ ID NO: 41616 - DNA, 33 bp, Homo sapien
ccaagataatagggaagcttgttgtccacctct

SEQ ID NO: 41617 - DNA, 33 bp, Homo sapien
ccaaatgtatgaaaataacccccacccaaatta

SEQ ID NO: 41618 - DNA, 33 bp, Homo sapien
ccaaatgtatgaaaattacccccacccaaatta

SEQ ID NO: 41619 - DNA, 33 bp, Homo sapien
aaaaacttgaagtagacagtaagagaattggac

SEQ ID NO: 41620 - DNA, 33 bp, Homo sapien
aaaaacttgaagtagatagtaagagaattggac

SEQ ID NO: 41621 - DNA, 33 bp, Homo sapien
gtgaattggcaccttacgcaaatgaggattggc

SEQ ID NO: 41622 - DNA, 33 bp, Homo sapien
gtgaattggcaccttatgcaaatgaggattggc

SEQ ID NO: 41623 - DNA, 33 bp, Homo sapien
ggtcagggactaaggacagtacacccagtccta

SEQ ID NO: 41624 - DNA, 33 bp, Homo sapien
ggtcagggactaaggagagtacacccagtccta

SEQ ID NO: 41625 - DNA, 33 bp, Homo sapien
ggtccaaaggtcttgaaaaacaagcatgaaact

SEQ ID NO: 41626 - DNA, 33 bp, Homo sapien
ggtccaaaggtcttgataaacaagcatgaaact

SEQ ID NO: 41627 - DNA, 33 bp, Homo sapien
gctataaagcacgagacaaggaaagggttgtct

SEQ ID NO: 41628 - DNA, 33 bp, Homo sapien
gctataaagcacgagataaggaaagggttgtct

SEQ ID NO: 41629 - DNA, 33 bp, Homo sapien
gtatatcagggaagacaaattctataacaaaca

SEQ ID NO: 41630 - DNA, 33 bp, Homo sapien
gtatatcagggaagacgaattctataacaaaca

SEQ ID NO: 41631 - DNA, 33 bp, Homo sapien
cagtatgtacagctaccaacgtgtttccttttc

SEQ ID NO: 41632 - DNA, 33 bp, Homo sapien
cagtatgtacagctacgaacgtgtttccttttc

SEQ ID NO: 41633 - DNA, 33 bp, Homo sapien
caatatcttccagacccgatgttttcctatagg

SEQ ID NO: 41634 - DNA, 33 bp, Homo sapien
caatatcttccagacctgatgttttcctatagg

SEQ ID NO: 41635 - DNA, 33 bp, Homo sapien
aactttttgagttgaacgctaactttgatgttt

SEQ ID NO: 41636 - DNA, 33 bp, Homo sapien
aactttttgagttgaatgctaactttgatgttt

SEQ ID NO: 41637 - DNA, 33 bp, Homo sapien
accaatgagtcaaaggaactggccatgcctcta

SEQ ID NO: 41638 - DNA, 33 bp, Homo sapien
accaatgagtcaaagggactggccatgcctcta

SEQ ID NO: 41639 - DNA, 33 bp, Homo sapien
tgaggttttctaaggcagagatcattagcaaga

SEQ ID NO: 41640 - DNA, 33 bp, Homo sapien
tgaggttttctaaggcggagatcattagcaaga

SEQ ID NO: 41641 - DNA, 33 bp, Homo sapien
taactaatccttccgacgtctggtgcaaaacag

SEQ ID NO: 41642 - DNA, 33 bp, Homo sapien
taactaatccttccgatgtctggtgcaaaacag

SEQ ID NO: 41643 - DNA, 33 bp, Homo sapien
agagtgatctgggacaactatgctaatgctcct

SEQ ID NO: 41644 - DNA, 33 bp, Homo sapien
agagtgatctgggacacctatgctaatgctcct

SEQ ID NO: 41645 - DNA, 33 bp, Homo sapien
tttccagatcatcccgcattccaagctcatttc

SEQ ID NO: 41646 - DNA, 33 bp, Homo sapien
tttccagatcatcccgtattccaagctcatttc

SEQ ID NO: 41647 - DNA, 33 bp, Homo sapien
cactgctatcatccaccggcttggatctaccat

SEQ ID NO: 41648 - DNA, 33 bp, Homo sapien
cactgctatcatccactggcttggatctaccat

SEQ ID NO: 41649 - DNA, 33 bp, Homo sapien
agatattggtttgttaactcctagcttctaata

SEQ ID NO: 41650 - DNA, 33 bp, Homo sapien
agatattggtttgttatctcctagcttctaata

SEQ ID NO: 41651 - DNA, 33 bp, Homo sapien
tagatactgttcatcaagtcttgctatgtgcca

SEQ ID NO: 41652 - DNA, 33 bp, Homo sapien
tagatactgttcatcacgtcttgctatgtgcca

SEQ ID NO: 41653 - DNA, 33 bp, Homo sapien
acactttttttctctcactctaggagctcaagt

SEQ ID NO: 41654 - DNA, 33 bp, Homo sapien
acactttttttctctcgctctaggagctcaagt

SEQ ID NO: 41655 - DNA, 33 bp, Homo sapien
aatgtagaatttccagcattggaagccccagtt

SEQ ID NO: 41656 - DNA, 33 bp, Homo sapien
aatgtagaatttccaggattggaagccccagtt

SEQ ID NO: 41657 - DNA, 33 bp, Homo sapien
aaataaacaagtggtacgtaaacaaaagcaata

SEQ ID NO: 41658 - DNA, 33 bp, Homo sapien
aaataaacaagtggtatgtaaacaaaagcaata

SEQ ID NO: 41659 - DNA, 33 bp, Homo sapien
aggcaatgactcatacagtaatagttgatagag

SEQ ID NO: 41660 - DNA, 33 bp, Homo sapien
aggcaatgactcatacggtaatagttgatagag

SEQ ID NO: 41661 - DNA, 33 bp, Homo sapien
attcccaaaatatacaactcattgatatctgaa

SEQ ID NO: 41662 - DNA, 33 bp, Homo sapien
attcccaaaatatacacctcattgatatctgaa

SEQ ID NO: 41663 - DNA, 33 bp, Homo sapien
acatagaagcatctaccgaatcaacaaggggtc

SEQ ID NO: 41664 - DNA, 33 bp, Homo sapien
acatagaagcatctactgaatcaacaaggggtc

SEQ ID NO: 41665 - DNA, 33 bp, Homo sapien
acactagaatcacttacgaaacttttaaaacac

SEQ ID NO: 41666 - DNA, 33 bp, Homo sapien
acactagaatcacttatgaaacttttaaaacac

SEQ ID NO: 41667 - DNA, 33 bp, Homo sapien
gatatgtaagtaaaagcctttgtgacactttag

SEQ ID NO: 41668 - DNA, 33 bp, Homo sapien
gatatgtaagtaaaaggctttgtgacactttag

SEQ ID NO: 41669 - DNA, 33 bp, Homo sapien
aagaaggtcatttctgaaaatttgcctgggagc

SEQ ID NO: 41670 - DNA, 33 bp, Homo sapien
aagaaggtcatttctgtaaatttgcctgggagc

SEQ ID NO: 41671 - DNA, 33 bp, Homo sapien
ctgtcatacatttacaaacaaaaggatccagca

SEQ ID NO: 41672 - DNA, 33 bp, Homo sapien
ctgtcatacatttacacacaaaaggatccagca

SEQ ID NO: 41673 - DNA, 33 bp, Homo sapien
taccatccagatggaacgagcaatgagaagggg

SEQ ID NO: 41674 - DNA, 33 bp, Homo sapien
taccatccagatggaatgagcaatgagaagggg

SEQ ID NO: 41675 - DNA, 33 bp, Homo sapien
ctaatgtctccagagagcatcaaaaccatgacg

SEQ ID NO: 41676 - DNA, 33 bp, Homo sapien
ctaatgtctccagagatcatcaaaaccatgacg

SEQ ID NO: 41677 - DNA, 33 bp, Homo sapien
ggaacaatcttgcaaaagctgtaaagtaggaat

SEQ ID NO: 41678 - DNA, 33 bp, Homo sapien
ggaacaatcttgcaaaggctgtaaagtaggaat

SEQ ID NO: 41679 - DNA, 33 bp, Homo sapien
ccttcacttgggaatcaaggttcatactgcaat

SEQ ID NO: 41680 - DNA, 33 bp, Homo sapien
ccttcacttgggaatcgaggttcatactgcaat

SEQ ID NO: 41681 - DNA, 33 bp, Homo sapien
ggaagctgctaacacaacatattcatctctaga

SEQ ID NO: 41682 - DNA, 33 bp, Homo sapien
ggaagctgctaacacaccatattcatctctaga

SEQ ID NO: 41683 - DNA, 33 bp, Homo sapien
gctcttacaaaatccaaattcattagcacagtt

SEQ ID NO: 41684 - DNA, 33 bp, Homo sapien
gctcttacaaaatccagattcattagcacagtt

SEQ ID NO: 41685 - DNA, 33 bp, Homo sapien
gaattctttgtctacaaatgtaacttttgcact

SEQ ID NO: 41686 - DNA, 33 bp, Homo sapien
gaattctttgtctacagatgtaacttttgcact

SEQ ID NO: 41687 - DNA, 33 bp, Homo sapien
acaatgaagatacagaacaaagctgttggaaca

SEQ ID NO: 41688 - DNA, 33 bp, Homo sapien
acaatgaagatacagagcaaagctgttggaaca

SEQ ID NO: 41689 - DNA, 33 bp, Homo sapien
tatttatttttccttccccatctggttcacatg

SEQ ID NO: 41690 - DNA, 33 bp, Homo sapien
tatttatttttccttcgccatctggttcacatg

SEQ ID NO: 41691 - DNA, 33 bp, Homo sapien
ggggcaaaccaatctccgaatcctttataatca

SEQ ID NO: 41692 - DNA, 33 bp, Homo sapien
ggggcaaaccaatctctgaatcctttataatca

SEQ ID NO: 41693 - DNA, 33 bp, Homo sapien
gagcttgggctggagaacctgtactacatcttc

SEQ ID NO: 41694 - DNA, 33 bp, Homo sapien
gagcttgggctggagaccctgtactacatcttc

SEQ ID NO: 41695 - DNA, 33 bp, Homo sapien
cttatcctgcccaagacgtgaactagccaacac

SEQ ID NO: 41696 - DNA, 33 bp, Homo sapien
cttatcctgcccaagatgtgaactagccaacac

SEQ ID NO: 41697 - DNA, 33 bp, Homo sapien
actgttagatggatccagagtggccactgctag

SEQ ID NO: 41698 - DNA, 33 bp, Homo sapien
actgttagatggatccggagtggccactgctag

SEQ ID NO: 41699 - DNA, 33 bp, Homo sapien
actaaggacatgcccaaatatcctgaagttggg

SEQ ID NO: 41700 - DNA, 33 bp, Homo sapien
actaaggacatgcccagatatcctgaagttggg

SEQ ID NO: 41701 - DNA, 33 bp, Homo sapien
acaaacaaaaaacatacctgaaaatatttcaca

SEQ ID NO: 41702 - DNA, 33 bp, Homo sapien
acaaacaaaaaacatatctgaaaatatttcaca

SEQ ID NO: 41703 - DNA, 33 bp, Homo sapien
tgtgtatataataacacgacctcaaaatacaga

SEQ ID NO: 41704 - DNA, 33 bp, Homo sapien
tgtgtatataataacatgacctcaaaatacaga

SEQ ID NO: 41705 - DNA, 33 bp, Homo sapien
agattcaaagacttaaactttcagaataaggca

SEQ ID NO: 41706 - DNA, 33 bp, Homo sapien
agattcaaagacttaagctttcagaataaggca

SEQ ID NO: 41707 - DNA, 33 bp, Homo sapien
gaactgcttaaagaaccctatactgtttgactt

SEQ ID NO: 41708 - DNA, 33 bp, Homo sapien
gaactgcttaaagaactctatactgtttgactt

SEQ ID NO: 41709 - DNA, 33 bp, Homo sapien
gacccccagaaaaatacgagtgtggtggaggaa

SEQ ID NO: 41710 - DNA, 33 bp, Homo sapien
gacccccagaaaaatatgagtgtggtggaggaa

SEQ ID NO: 41711 - DNA, 33 bp, Homo sapien
ctattattgttttaaaattctccatgacattgc

SEQ ID NO: 41712 - DNA, 33 bp, Homo sapien
ctattattgttttaaagttctccatgacattgc

SEQ ID NO: 41713 - DNA, 33 bp, Homo sapien
ccaggggagccatcaaatccatgttcgggtgac

SEQ ID NO: 41714 - DNA, 33 bp, Homo sapien
ccaggggagccatcaagtccatgttcgggtgac

SEQ ID NO: 41715 - DNA, 33 bp, Homo sapien
cacttacctgaataaacaatgacaaggagatat

SEQ ID NO: 41716 - DNA, 33 bp, Homo sapien
cacttacctgaataaagaatgacaaggagatat

SEQ ID NO: 41717 - DNA, 33 bp, Homo sapien
ggggtgaaagaactccacagaatgtataccaac

SEQ ID NO: 41718 - DNA, 33 bp, Homo sapien
ggggtgaaagaactccgcagaatgtataccaac

SEQ ID NO: 41719 - DNA, 33 bp, Homo sapien
cccagagccgatatgtaaagtctatttattctt

SEQ ID NO: 41720 - DNA, 33 bp, Homo sapien
cccagagccgatatgtcaagtctatttattctt

SEQ ID NO: 41721 - DNA, 33 bp, Homo sapien
caacaacaacaacaaactcacactggctcctgg

SEQ ID NO: 41722 - DNA, 33 bp, Homo sapien
caacaacaacaacaaattcacactggctcctgg

SEQ ID NO: 41723 - DNA, 33 bp, Homo sapien
taaatgtttctggagcacctactatgtgtctac

SEQ ID NO: 41724 - DNA, 33 bp, Homo sapien
taaatgtttctggagcgcctactatgtgtctac

SEQ ID NO: 41725 - DNA, 33 bp, Homo sapien
tttgaagatggttttacaatgtttctgatacaa

SEQ ID NO: 41726 - DNA, 33 bp, Homo sapien
tttgaagatggttttataatgtttctgatacaa

SEQ ID NO: 41727 - DNA, 33 bp, Homo sapien
ttattccataaagcccaacgaagtagatgttaa

SEQ ID NO: 41728 - DNA, 33 bp, Homo sapien
ttattccataaagcccgacgaagtagatgttaa

SEQ ID NO: 41729 - DNA, 33 bp, Homo sapien
ggatactcagcaactacatttgaactcacccat

SEQ ID NO: 41730 - DNA, 33 bp, Homo sapien
ggatactcagcaactagatttgaactcacccat

SEQ ID NO: 41731 - DNA, 33 bp, Homo sapien
ttggaagttcttgctcacagactcagatttttg

SEQ ID NO: 41732 - DNA, 33 bp, Homo sapien
ttggaagttcttgctcgcagactcagatttttg

SEQ ID NO: 41733 - DNA, 33 bp, Homo sapien
aacaaatgaaagccaaataagtgcataaaaaaa

SEQ ID NO: 41734 - DNA, 33 bp, Homo sapien
aacaaatgaaagccaattaagtgcataaaaaaa

SEQ ID NO: 41735 - DNA, 33 bp, Homo sapien
gcaagcaacataaatcaactgtggagaaaaata

SEQ ID NO: 41736 - DNA, 33 bp, Homo sapien
gcaagcaacataaatcgactgtggagaaaaata

SEQ ID NO: 41737 - DNA, 33 bp, Homo sapien
catgccctgagtcatccgaatcctctcgtaaat

SEQ ID NO: 41738 - DNA, 33 bp, Homo sapien
catgccctgagtcatctgaatcctctcgtaaat

SEQ ID NO: 41739 - DNA, 33 bp, Homo sapien
ccaacctaaccatttacggctcctattcccact

SEQ ID NO: 41740 - DNA, 33 bp, Homo sapien
ccaacctaaccatttatggctcctattcccact

SEQ ID NO: 41741 - DNA, 33 bp, Homo sapien
tataactgaaacatacagaatccaccacatcag

SEQ ID NO: 41742 - DNA, 33 bp, Homo sapien
tataactgaaacatacggaatccaccacatcag

SEQ ID NO: 41743 - DNA, 33 bp, Homo sapien
cctttgagtaaacagaatcctcctttcctgtgg

SEQ ID NO: 41744 - DNA, 33 bp, Homo sapien
cctttgagtaaacagagtcctcctttcctgtgg

SEQ ID NO: 41745 - DNA, 33 bp, Homo sapien
tgagacaaagtttgagcatctacacttctcctc

SEQ ID NO: 41746 - DNA, 33 bp, Homo sapien
tgagacaaagtttgaggatctacacttctcctc

SEQ ID NO: 41747 - DNA, 33 bp, Homo sapien
aattattgtcatatgaagaagcattaaagagta

SEQ ID NO: 41748 - DNA, 33 bp, Homo sapien
aattattgtcatatgacgaagcattaaagagta

SEQ ID NO: 41749 - DNA, 33 bp, Homo sapien
cccctctttctgtcaaattatgactcaccaatg

SEQ ID NO: 41750 - DNA, 33 bp, Homo sapien
cccctctttctgtcaagttatgactcaccaatg

SEQ ID NO: 41751 - DNA, 33 bp, Homo sapien
atgggagacaatcataaccccaaatcttcccac

SEQ ID NO: 41752 - DNA, 33 bp, Homo sapien
atgggagacaatcatagccccaaatcttcccac

SEQ ID NO: 41753 - DNA, 33 bp, Homo sapien
ctcacctggccaccacaagaggctttgcagatg

SEQ ID NO: 41754 - DNA, 33 bp, Homo sapien
ctcacctggccaccacgagaggctttgcagatg

SEQ ID NO: 41755 - DNA, 33 bp, Homo sapien
atgagtctttagagtgaatgaggttatttcttc

SEQ ID NO: 41756 - DNA, 33 bp, Homo sapien
atgagtctttagagtgtatgaggttatttcttc

SEQ ID NO: 41757 - DNA, 33 bp, Homo sapien
gtctttctgtctgctgacaccagagagaaaggt

SEQ ID NO: 41758 - DNA, 33 bp, Homo sapien
gtctttctgtctgctggcaccagagagaaaggt

SEQ ID NO: 41759 - DNA, 33 bp, Homo sapien
agccaatatgggtaaaacactgaacatggtgtc

SEQ ID NO: 41760 - DNA, 33 bp, Homo sapien
agccaatatgggtaaagcactgaacatggtgtc

SEQ ID NO: 41761 - DNA, 33 bp, Homo sapien
tttgctcttactcttcaaattagctgctaccaa

SEQ ID NO: 41762 - DNA, 33 bp, Homo sapien
tttgctcttactcttcgaattagctgctaccaa

SEQ ID NO: 41763 - DNA, 33 bp, Homo sapien
atggaccggcagctccacaatgccaagtctgag

SEQ ID NO: 41764 - DNA, 33 bp, Homo sapien
atggaccggcagctccgcaatgccaagtctgag

SEQ ID NO: 41765 - DNA, 33 bp, Homo sapien
gactgactgatagacaagtgacagatacataga

SEQ ID NO: 41766 - DNA, 33 bp, Homo sapien
gactgactgatagacaggtgacagatacataga

SEQ ID NO: 41767 - DNA, 33 bp, Homo sapien
ttaaaacaatagtgagcaaggctgtgcttgtgt

SEQ ID NO: 41768 - DNA, 33 bp, Homo sapien
ttaaaacaatagtgaggaaggctgtgcttgtgt

SEQ ID NO: 41769 - DNA, 33 bp, Homo sapien
agcaaggtgctgacaaaagagtggtctcagggg

SEQ ID NO: 41770 - DNA, 33 bp, Homo sapien
agcaaggtgctgacaagagagtggtctcagggg

SEQ ID NO: 41771 - DNA, 33 bp, Homo sapien
tacgttctctgggacccagacactgcaggcagc

SEQ ID NO: 41772 - DNA, 33 bp, Homo sapien
tacgttctctgggacctagacactgcaggcagc

SEQ ID NO: 41773 - DNA, 33 bp, Homo sapien
cctcaccagaggactcaccttccatcccattta

SEQ ID NO: 41774 - DNA, 33 bp, Homo sapien
cctcaccagaggactcgccttccatcccattta

SEQ ID NO: 41775 - DNA, 33 bp, Homo sapien
gttgttcatcacactacagcatcaattttattc

SEQ ID NO: 41776 - DNA, 33 bp, Homo sapien
gttgttcatcacactagagcatcaattttattc

SEQ ID NO: 41777 - DNA, 33 bp, Homo sapien
tttcacagtaatactcaaaggtagacttcatag

SEQ ID NO: 41778 - DNA, 33 bp, Homo sapien
tttcacagtaatactctaaggtagacttcatag

SEQ ID NO: 41779 - DNA, 33 bp, Homo sapien
ctttgtgactacatggccagtaagtgatggcag

SEQ ID NO: 41780 - DNA, 33 bp, Homo sapien
ctttgtgactacatggtcagtaagtgatggcag

SEQ ID NO: 41781 - DNA, 33 bp, Homo sapien
tggactatatctcccaactctcatgtaggtgac

SEQ ID NO: 41782 - DNA, 33 bp, Homo sapien
tggactatatctcccatctctcatgtaggtgac

SEQ ID NO: 41783 - DNA, 33 bp, Homo sapien
tttgtctggtacagtacactcctattccatagt

SEQ ID NO: 41784 - DNA, 33 bp, Homo sapien
tttgtctggtacagtagactcctattccatagt

SEQ ID NO: 41785 - DNA, 33 bp, Homo sapien
caaagtgttcagtgaacaggggacttcgcaact

SEQ ID NO: 41786 - DNA, 33 bp, Homo sapien
caaagtgttcagtgaataggggacttcgcaact

SEQ ID NO: 41787 - DNA, 33 bp, Homo sapien
gctggagacattaacccccatgttcttagcttc

SEQ ID NO: 41788 - DNA, 33 bp, Homo sapien
gctggagacattaaccgccatgttcttagcttc

SEQ ID NO: 41789 - DNA, 33 bp, Homo sapien
ctgagatttaaactgaacaataacctctgcgtt

SEQ ID NO: 41790 - DNA, 33 bp, Homo sapien
ctgagatttaaactgagcaataacctctgcgtt

SEQ ID NO: 41791 - DNA, 33 bp, Homo sapien
caagcctcctccaggcaaagtctggatcaggtg

SEQ ID NO: 41792 - DNA, 33 bp, Homo sapien
caagcctcctccaggcgaagtctggatcaggtg

SEQ ID NO: 41793 - DNA, 33 bp, Homo sapien
acaagccaattaaataagggcaaagaatttgaa

SEQ ID NO: 41794 - DNA, 33 bp, Homo sapien
acaagccaattaaatatgggcaaagaatttgaa

SEQ ID NO: 41795 - DNA, 33 bp, Homo sapien
aaagaactggccacataatccagtgttagtgtc

SEQ ID NO: 41796 - DNA, 33 bp, Homo sapien
aaagaactggccacatcatccagtgttagtgtc

SEQ ID NO: 41797 - DNA, 33 bp, Homo sapien
actacaaccatcatgcccatcactgtaacccta

SEQ ID NO: 41798 - DNA, 33 bp, Homo sapien
actacaaccatcatgctcatcactgtaacccta

SEQ ID NO: 41799 - DNA, 33 bp, Homo sapien
tcttcattaatttctaacgccacttctctccag

SEQ ID NO: 41800 - DNA, 33 bp, Homo sapien
tcttcattaatttctagcgccacttctctccag

SEQ ID NO: 41801 - DNA, 33 bp, Homo sapien
aagtttagggataatgcattaagtgtactacat

SEQ ID NO: 41802 - DNA, 33 bp, Homo sapien
aagtttagggataatgtattaagtgtactacat

SEQ ID NO: 41803 - DNA, 33 bp, Homo sapien
ttctaatcatctgtcaaagtagtaagtggttaa

SEQ ID NO: 41804 - DNA, 33 bp, Homo sapien
ttctaatcatctgtcagagtagtaagtggttaa

SEQ ID NO: 41805 - DNA, 33 bp, Homo sapien
actgattttggaaacacgatctctaaagagata

SEQ ID NO: 41806 - DNA, 33 bp, Homo sapien
actgattttggaaacaggatctctaaagagata

SEQ ID NO: 41807 - DNA, 33 bp, Homo sapien
gttgaaatgatcttgcccttcggagttactgat

SEQ ID NO: 41808 - DNA, 33 bp, Homo sapien
gttgaaatgatcttgctcttcggagttactgat

SEQ ID NO: 41809 - DNA, 33 bp, Homo sapien
acatttgtgtgcagaaatgatttataaacacag

SEQ ID NO: 41810 - DNA, 33 bp, Homo sapien
acatttgtgtgcagaagtgatttataaacacag

SEQ ID NO: 41811 - DNA, 33 bp, Homo sapien
ggaaagtgaatcaaaacatgaccagttcacaca

SEQ ID NO: 41812 - DNA, 33 bp, Homo sapien
ggaaagtgaatcaaaatatgaccagttcacaca

SEQ ID NO: 41813 - DNA, 33 bp, Homo sapien
agcagtctaacttgtacctttatgtggtttgtg

SEQ ID NO: 41814 - DNA, 33 bp, Homo sapien
agcagtctaacttgtatctttatgtggtttgtg

SEQ ID NO: 41815 - DNA, 33 bp, Homo sapien
tggcatcttcattcttaaacccctaaatgccac

SEQ ID NO: 41816 - DNA, 33 bp, Homo sapien
tggcatcttcattcttgaacccctaaatgccac

SEQ ID NO: 41817 - DNA, 33 bp, Homo sapien
tacggaggggcttcagaaaagattacagcagtg

SEQ ID NO: 41818 - DNA, 33 bp, Homo sapien
tacggaggggcttcagcaaagattacagcagtg

SEQ ID NO: 41819 - DNA, 33 bp, Homo sapien
cacctttagcatgcacaatttcaccatatattt

SEQ ID NO: 41820 - DNA, 33 bp, Homo sapien
cacctttagcatgcacgatttcaccatatattt

SEQ ID NO: 41821 - DNA, 33 bp, Homo sapien
gtttcaaccagcagtcaaatagatagattggga

SEQ ID NO: 41822 - DNA, 33 bp, Homo sapien
gtttcaaccagcagtcgaatagatagattggga

SEQ ID NO: 41823 - DNA, 33 bp, Homo sapien
taataccgattacttaccatttctgttagaatt

SEQ ID NO: 41824 - DNA, 33 bp, Homo sapien
taataccgattacttatcatttctgttagaatt

SEQ ID NO: 41825 - DNA, 33 bp, Homo sapien
atataggaaaggtgaaatcaaagtctatattta

SEQ ID NO: 41826 - DNA, 33 bp, Homo sapien
atataggaaaggtgaattcaaagtctatattta

SEQ ID NO: 41827 - DNA, 33 bp, Homo sapien
agctgccagtttttcacagtaattcaattggga

SEQ ID NO: 41828 - DNA, 33 bp, Homo sapien
agctgccagtttttcatagtaattcaattggga

SEQ ID NO: 41829 - DNA, 33 bp, Homo sapien
gggttgaggaggtgtcaagaattaacagaaatt

SEQ ID NO: 41830 - DNA, 33 bp, Homo sapien
gggttgaggaggtgtcgagaattaacagaaatt

SEQ ID NO: 41831 - DNA, 33 bp, Homo sapien
attcccattctacttacgcagccttgtttcaga

SEQ ID NO: 41832 - DNA, 33 bp, Homo sapien
attcccattctacttatgcagccttgtttcaga

SEQ ID NO: 41833 - DNA, 33 bp, Homo sapien
aatacattattcagtgcacttcctaagaaataa

SEQ ID NO: 41834 - DNA, 33 bp, Homo sapien
aatacattattcagtgtacttcctaagaaataa

SEQ ID NO: 41835 - DNA, 33 bp, Homo sapien
ctggctgaggtctgcaaggagccagaagcaata

SEQ ID NO: 41836 - DNA, 33 bp, Homo sapien
ctggctgaggtctgcacggagccagaagcaata

SEQ ID NO: 41837 - DNA, 33 bp, Homo sapien
gaatgaggatagcatacacagtgcaccaagttg

SEQ ID NO: 41838 - DNA, 33 bp, Homo sapien
gaatgaggatagcatatacagtgcaccaagttg

SEQ ID NO: 41839 - DNA, 33 bp, Homo sapien
aaaaaatgccatttaaaaatactattcctagaa

SEQ ID NO: 41840 - DNA, 33 bp, Homo sapien
aaaaaatgccatttaagaatactattcctagaa

SEQ ID NO: 41841 - DNA, 33 bp, Homo sapien
cgtttggcaaagtacaatatctattcatgactc

SEQ ID NO: 41842 - DNA, 33 bp, Homo sapien
cgtttggcaaagtacagtatctattcatgactc

SEQ ID NO: 41843 - DNA, 33 bp, Homo sapien
agacacaaacagcaaactagtcagaaagaaaat

SEQ ID NO: 41844 - DNA, 33 bp, Homo sapien
agacacaaacagcaaagtagtcagaaagaaaat

SEQ ID NO: 41845 - DNA, 33 bp, Homo sapien
aggagattaataaggacagaaggaagtcaggtg

SEQ ID NO: 41846 - DNA, 33 bp, Homo sapien
aggagattaataaggatagaaggaagtcaggtg

SEQ ID NO: 41847 - DNA, 33 bp, Homo sapien
ggccaacttagacacacagagagacaaatgaag

SEQ ID NO: 41848 - DNA, 33 bp, Homo sapien
ggccaacttagacacatagagagacaaatgaag

SEQ ID NO: 41849 - DNA, 33 bp, Homo sapien
tactggggatattgaagtgaacaaaaccgacaa

SEQ ID NO: 41850 - DNA, 33 bp, Homo sapien
tactggggatattgaattgaacaaaaccgacaa

SEQ ID NO: 41851 - DNA, 33 bp, Homo sapien
atggtttggatgcaccactccacaaaggcaggg

SEQ ID NO: 41852 - DNA, 33 bp, Homo sapien
atggtttggatgcaccgctccacaaaggcaggg

SEQ ID NO: 41853 - DNA, 33 bp, Homo sapien
aaagagagatggagaaatcaataaagtttattt

SEQ ID NO: 41854 - DNA, 33 bp, Homo sapien
aaagagagatggagaagtcaataaagtttattt

SEQ ID NO: 41855 - DNA, 33 bp, Homo sapien
ctgactaggtctactgcatatgttagtctccta

SEQ ID NO: 41856 - DNA, 33 bp, Homo sapien
ctgactaggtctactgtatatgttagtctccta

SEQ ID NO: 41857 - DNA, 33 bp, Homo sapien
acgtccatacttgcaaagcccccaagaaggcag

SEQ ID NO: 41858 - DNA, 33 bp, Homo sapien
acgtccatacttgcaaggcccccaagaaggcag

SEQ ID NO: 41859 - DNA, 33 bp, Homo sapien
cagagtggctggaccaaacctgaacacacagat

SEQ ID NO: 41860 - DNA, 33 bp, Homo sapien
cagagtggctggaccagacctgaacacacagat

SEQ ID NO: 41861 - DNA, 33 bp, Homo sapien
aaaggagcctcaactacgtactttagtgcaact

SEQ ID NO: 41862 - DNA, 33 bp, Homo sapien
aaaggagcctcaactatgtactttagtgcaact

SEQ ID NO: 41863 - DNA, 33 bp, Homo sapien
ctctttttctctctaccattctcaacctgtatt

SEQ ID NO: 41864 - DNA, 33 bp, Homo sapien
ctctttttctctctactattctcaacctgtatt

SEQ ID NO: 41865 - DNA, 33 bp, Homo sapien
aaacctagaatatggcacacgttttggcttatt

SEQ ID NO: 41866 - DNA, 33 bp, Homo sapien
aaacctagaatatggcgcacgttttggcttatt

SEQ ID NO: 41867 - DNA, 33 bp, Homo sapien
gccatcctggttttcaatatgaaacaatgtgat

SEQ ID NO: 41868 - DNA, 33 bp, Homo sapien
gccatcctggttttcagtatgaaacaatgtgat

SEQ ID NO: 41869 - DNA, 33 bp, Homo sapien
taggccatttttattccatgccagattacatag

SEQ ID NO: 41870 - DNA, 33 bp, Homo sapien
taggccatttttattcgatgccagattacatag

SEQ ID NO: 41871 - DNA, 33 bp, Homo sapien
agtataattgataacgaaatatccaatcactag

SEQ ID NO: 41872 - DNA, 33 bp, Homo sapien
agtataattgataacggaatatccaatcactag

SEQ ID NO: 41873 - DNA, 33 bp, Homo sapien
cagagccaaagacatcaagagtaagagtaatta

SEQ ID NO: 41874 - DNA, 33 bp, Homo sapien
cagagccaaagacatccagagtaagagtaatta

SEQ ID NO: 41875 - DNA, 33 bp, Homo sapien
ataattgttaactgaacatctttgcttacattt

SEQ ID NO: 41876 - DNA, 33 bp, Homo sapien
ataattgttaactgaatatctttgcttacattt

SEQ ID NO: 41877 - DNA, 33 bp, Homo sapien
cactccttatcctcaggacatatgttttaagac

SEQ ID NO: 41878 - DNA, 33 bp, Homo sapien
cactccttatcctcagtacatatgttttaagac

SEQ ID NO: 41879 - DNA, 33 bp, Homo sapien
caacattcagccaaacagtttacaactctgcct

SEQ ID NO: 41880 - DNA, 33 bp, Homo sapien
caacattcagccaaacggtttacaactctgcct

SEQ ID NO: 41881 - DNA, 33 bp, Homo sapien
tgtcataattcttgtccaataagttgccttgtg

SEQ ID NO: 41882 - DNA, 33 bp, Homo sapien
tgtcataattcttgtctaataagttgccttgtg

SEQ ID NO: 41883 - DNA, 33 bp, Homo sapien
ttgtggactataaagcactattttttttttctt

SEQ ID NO: 41884 - DNA, 33 bp, Homo sapien
ttgtggactataaagcgctattttttttttctt

SEQ ID NO: 41885 - DNA, 33 bp, Homo sapien
ctcttggtttggggtacaaggcgggtgccattt

SEQ ID NO: 41886 - DNA, 33 bp, Homo sapien
ctcttggtttggggtagaaggcgggtgccattt

SEQ ID NO: 41887 - DNA, 33 bp, Homo sapien
cagtacgcccaaaagacatcatcaagtcttgaa

SEQ ID NO: 41888 - DNA, 33 bp, Homo sapien
cagtacgcccaaaagatatcatcaagtcttgaa

SEQ ID NO: 41889 - DNA, 33 bp, Homo sapien
ggtgaggagtctcactaaaatgacttcagtatt

SEQ ID NO: 41890 - DNA, 33 bp, Homo sapien
ggtgaggagtctcacttaaatgacttcagtatt

SEQ ID NO: 41891 - DNA, 33 bp, Homo sapien
tgctgtgaggtttacacgagattttgacacggc

SEQ ID NO: 41892 - DNA, 33 bp, Homo sapien
tgctgtgaggtttacatgagattttgacacggc

SEQ ID NO: 41893 - DNA, 33 bp, Homo sapien
gaggacatcaaggtaccagggaagtgcagaggg

SEQ ID NO: 41894 - DNA, 33 bp, Homo sapien
gaggacatcaaggtactagggaagtgcagaggg

SEQ ID NO: 41895 - DNA, 33 bp, Homo sapien
gggacaggtctccctcaatgggttagaatacag

SEQ ID NO: 41896 - DNA, 33 bp, Homo sapien
gggacaggtctccctcgatgggttagaatacag

SEQ ID NO: 41897 - DNA, 33 bp, Homo sapien
ggctcagtgaggttaacacagattcagagctgt

SEQ ID NO: 41898 - DNA, 33 bp, Homo sapien
ggctcagtgaggttaagacagattcagagctgt

SEQ ID NO: 41899 - DNA, 33 bp, Homo sapien
agagaggtctgatgtagccacactgtcttgtct

SEQ ID NO: 41900 - DNA, 33 bp, Homo sapien
agagaggtctgatgtatccacactgtcttgtct

SEQ ID NO: 41901 - DNA, 33 bp, Homo sapien
gcggccttcccagtaaagtgctttctgtgcctg

SEQ ID NO: 41902 - DNA, 33 bp, Homo sapien
gcggccttcccagtaaggtgctttctgtgcctg

SEQ ID NO: 41903 - DNA, 33 bp, Homo sapien
agaactaaggttgaaaagcaggcggtagtgaag

SEQ ID NO: 41904 - DNA, 33 bp, Homo sapien
agaactaaggttgaaaggcaggcggtagtgaag

SEQ ID NO: 41905 - DNA, 33 bp, Homo sapien
gtggtttcaccttctacggttttagttacctgt

SEQ ID NO: 41906 - DNA, 33 bp, Homo sapien
gtggtttcaccttctatggttttagttacctgt

SEQ ID NO: 41907 - DNA, 33 bp, Homo sapien
gctttctaaatgctctcacatccattatcatat

SEQ ID NO: 41908 - DNA, 33 bp, Homo sapien
gctttctaaatgctcttacatccattatcatat

SEQ ID NO: 41909 - DNA, 33 bp, Homo sapien
acaatagtctccaaaggcttcatatatcttgac

SEQ ID NO: 41910 - DNA, 33 bp, Homo sapien
acaatagtctccaaagtcttcatatatcttgac

SEQ ID NO: 41911 - DNA, 33 bp, Homo sapien
aaaaaaaaaattgtcagaagagattcgagtcag

SEQ ID NO: 41912 - DNA, 33 bp, Homo sapien
aaaaaaaaaattgtcataagagattcgagtcag

SEQ ID NO: 41913 - DNA, 33 bp, Homo sapien
agaatgagtaagattacgccatgaagttcttag

SEQ ID NO: 41914 - DNA, 33 bp, Homo sapien
agaatgagtaagattatgccatgaagttcttag

SEQ ID NO: 41915 - DNA, 33 bp, Homo sapien
ttgctagccgcgtgtgcagtaaggagcaggcaa

SEQ ID NO: 41916 - DNA, 33 bp, Homo sapien
ttgctagccgcgtgtgtagtaaggagcaggcaa

SEQ ID NO: 41917 - DNA, 33 bp, Homo sapien
gggggtgctcacaagaagtaggatggaaaagaa

SEQ ID NO: 41918 - DNA, 33 bp, Homo sapien
gggggtgctcacaagaggtaggatggaaaagaa

SEQ ID NO: 41919 - DNA, 33 bp, Homo sapien
cctattctccatacaacctcgccagcatgtgtt

SEQ ID NO: 41920 - DNA, 33 bp, Homo sapien
cctattctccatacaatctcgccagcatgtgtt

SEQ ID NO: 41921 - DNA, 33 bp, Homo sapien
ctgtctggaaaatcccaaagttaaagtgaagaa

SEQ ID NO: 41922 - DNA, 33 bp, Homo sapien
ctgtctggaaaatcccgaagttaaagtgaagaa

SEQ ID NO: 41923 - DNA, 33 bp, Homo sapien
attgcagaatgttcaaagagattcagattttta

SEQ ID NO: 41924 - DNA, 33 bp, Homo sapien
attgcagaatgttcaaggagattcagattttta

SEQ ID NO: 41925 - DNA, 33 bp, Homo sapien
ggaactcaagagcacaatagtcttgcatcacta

SEQ ID NO: 41926 - DNA, 33 bp, Homo sapien
ggaactcaagagcacagtagtcttgcatcacta

SEQ ID NO: 41927 - DNA, 33 bp, Homo sapien
tggaagctgtagagcgaagagtatctttctcct

SEQ ID NO: 41928 - DNA, 33 bp, Homo sapien
tggaagctgtagagcgtagagtatctttctcct

SEQ ID NO: 41929 - DNA, 33 bp, Homo sapien
accagaaagacacagaaggagggcccaaggagg

SEQ ID NO: 41930 - DNA, 33 bp, Homo sapien
accagaaagacacagatggagggcccaaggagg

SEQ ID NO: 41931 - DNA, 33 bp, Homo sapien
gcaggaaaatgcagaactgtttcatagtcccag

SEQ ID NO: 41932 - DNA, 33 bp, Homo sapien
gcaggaaaatgcagaagtgtttcatagtcccag

SEQ ID NO: 41933 - DNA, 33 bp, Homo sapien
tctccaacttcagaaacagagaatgtcgccatc

SEQ ID NO: 41934 - DNA, 33 bp, Homo sapien
tctccaacttcagaaagagagaatgtcgccatc

SEQ ID NO: 41935 - DNA, 33 bp, Homo sapien
ggaagaaagagaaatcggagttggactgaggaa

SEQ ID NO: 41936 - DNA, 33 bp, Homo sapien
ggaagaaagagaaatctgagttggactgaggaa

SEQ ID NO: 41937 - DNA, 33 bp, Homo sapien
gcactaacaaggggccactacgggcaagttctt

SEQ ID NO: 41938 - DNA, 33 bp, Homo sapien
gcactaacaaggggccgctacgggcaagttctt

SEQ ID NO: 41939 - DNA, 33 bp, Homo sapien
gtaggggttcaggactcacattagaaatccctg

SEQ ID NO: 41940 - DNA, 33 bp, Homo sapien
gtaggggttcaggacttacattagaaatccctg

SEQ ID NO: 41941 - DNA, 33 bp, Homo sapien
gaagaagtaagtacaacgtaactggttgagaaa

SEQ ID NO: 41942 - DNA, 33 bp, Homo sapien
gaagaagtaagtacaatgtaactggttgagaaa

SEQ ID NO: 41943 - DNA, 33 bp, Homo sapien
tctgagcaggttaaaaagaatgataatgcctag

SEQ ID NO: 41944 - DNA, 33 bp, Homo sapien
tctgagcaggttaaaaggaatgataatgcctag

SEQ ID NO: 41945 - DNA, 33 bp, Homo sapien
gatctggccaaagccaagatagaagctcccgtg

SEQ ID NO: 41946 - DNA, 33 bp, Homo sapien
gatctggccaaagccaggatagaagctcccgtg

SEQ ID NO: 41947 - DNA, 33 bp, Homo sapien
tactgcaatggaatgacctaagatgtattattg

SEQ ID NO: 41948 - DNA, 33 bp, Homo sapien
tactgcaatggaatgatctaagatgtattattg

SEQ ID NO: 41949 - DNA, 33 bp, Homo sapien
ccagcagccctttaaacagtttgtctcaaatgt

SEQ ID NO: 41950 - DNA, 33 bp, Homo sapien
ccagcagccctttaaatagtttgtctcaaatgt

SEQ ID NO: 41951 - DNA, 33 bp, Homo sapien
aatatcagaaaggttacgaagtattttgcacat

SEQ ID NO: 41952 - DNA, 33 bp, Homo sapien
aatatcagaaaggttatgaagtattttgcacat

SEQ ID NO: 41953 - DNA, 33 bp, Homo sapien
ctaaaggcagtttccacgctaaaattctgtggt

SEQ ID NO: 41954 - DNA, 33 bp, Homo sapien
ctaaaggcagtttccatgctaaaattctgtggt

SEQ ID NO: 41955 - DNA, 33 bp, Homo sapien
tctgatttcagattaacgggatttctgggtgac

SEQ ID NO: 41956 - DNA, 33 bp, Homo sapien
tctgatttcagattaatgggatttctgggtgac

SEQ ID NO: 41957 - DNA, 33 bp, Homo sapien
tatggcttgtacttcaatcaagaatgtagtata

SEQ ID NO: 41958 - DNA, 33 bp, Homo sapien
tatggcttgtacttcagtcaagaatgtagtata

SEQ ID NO: 41959 - DNA, 33 bp, Homo sapien
gataaactacagaaaccgagaataagcatttag

SEQ ID NO: 41960 - DNA, 33 bp, Homo sapien
gataaactacagaaactgagaataagcatttag

SEQ ID NO: 41961 - DNA, 33 bp, Homo sapien
gcctctggagcttgccaagaataaataattcaa

SEQ ID NO: 41962 - DNA, 33 bp, Homo sapien
gcctctggagcttgcccagaataaataattcaa

SEQ ID NO: 41963 - DNA, 33 bp, Homo sapien
agaaagaacactgagcaaggaattggcaggcct

SEQ ID NO: 41964 - DNA, 33 bp, Homo sapien
agaaagaacactgagcgaggaattggcaggcct

SEQ ID NO: 41965 - DNA, 33 bp, Homo sapien
tacgatctaaccttgcagattccttgccgctga

SEQ ID NO: 41966 - DNA, 33 bp, Homo sapien
tacgatctaaccttgcggattccttgccgctga

SEQ ID NO: 41967 - DNA, 33 bp, Homo sapien
ctgattcaatgtgaaaagggattacaaaaggag

SEQ ID NO: 41968 - DNA, 33 bp, Homo sapien
ctgattcaatgtgaaaggggattacaaaaggag

SEQ ID NO: 41969 - DNA, 33 bp, Homo sapien
atcacccaaaatttgacggcttaaaataatgat

SEQ ID NO: 41970 - DNA, 33 bp, Homo sapien
atcacccaaaatttgatggcttaaaataatgat

SEQ ID NO: 41971 - DNA, 33 bp, Homo sapien
atgagatggtatctgaagaagatgaatctgttt

SEQ ID NO: 41972 - DNA, 33 bp, Homo sapien
atgagatggtatctgaggaagatgaatctgttt

SEQ ID NO: 41973 - DNA, 33 bp, Homo sapien
catagtcaatgtatgccaaaggaatttttgatt

SEQ ID NO: 41974 - DNA, 33 bp, Homo sapien
catagtcaatgtatgctaaaggaatttttgatt

SEQ ID NO: 41975 - DNA, 33 bp, Homo sapien
cacagaattagaaaacagtattctaacgttcat

SEQ ID NO: 41976 - DNA, 33 bp, Homo sapien
cacagaattagaaaaccgtattctaacgttcat

SEQ ID NO: 41977 - DNA, 33 bp, Homo sapien
tcactgatgggacccacgttctataagaccatt

SEQ ID NO: 41978 - DNA, 33 bp, Homo sapien
tcactgatgggacccaggttctataagaccatt

SEQ ID NO: 41979 - DNA, 33 bp, Homo sapien
aatcataggctcaggcaagcacgttggaaagat

SEQ ID NO: 41980 - DNA, 33 bp, Homo sapien
aatcataggctcaggccagcacgttggaaagat

SEQ ID NO: 41981 - DNA, 33 bp, Homo sapien
actgctatctctttccactcagacttcccctct

SEQ ID NO: 41982 - DNA, 33 bp, Homo sapien
actgctatctctttcccctcagacttcccctct

SEQ ID NO: 41983 - DNA, 33 bp, Homo sapien
ctgggcaggcaaaaacaacaaatgtcctttgct

SEQ ID NO: 41984 - DNA, 33 bp, Homo sapien
ctgggcaggcaaaaacgacaaatgtcctttgct

SEQ ID NO: 41985 - DNA, 33 bp, Homo sapien
cttagaggaggagaaacgacacaagtaccctgt

SEQ ID NO: 41986 - DNA, 33 bp, Homo sapien
cttagaggaggagaaatgacacaagtaccctgt

SEQ ID NO: 41987 - DNA, 33 bp, Homo sapien
attttatacagataggacataagacacacagcc

SEQ ID NO: 41988 - DNA, 33 bp, Homo sapien
attttatacagatagggcataagacacacagcc

SEQ ID NO: 41989 - DNA, 33 bp, Homo sapien
tttatcaataatgaaaagcattttatacagata

SEQ ID NO: 41990 - DNA, 33 bp, Homo sapien
tttatcaataatgaaaggcattttatacagata

SEQ ID NO: 41991 - DNA, 33 bp, Homo sapien
catgagcacaagattacattaacaaacggaatc

SEQ ID NO: 41992 - DNA, 33 bp, Homo sapien
catgagcacaagattatattaacaaacggaatc

SEQ ID NO: 41993 - DNA, 33 bp, Homo sapien
cacgaatatgtactgaacacctcatgtgtgcca

SEQ ID NO: 41994 - DNA, 33 bp, Homo sapien
cacgaatatgtactgagcacctcatgtgtgcca

SEQ ID NO: 41995 - DNA, 33 bp, Homo sapien
caagtgaggacttccacgggggtgcctccacat

SEQ ID NO: 41996 - DNA, 33 bp, Homo sapien
caagtgaggacttccatgggggtgcctccacat

SEQ ID NO: 41997 - DNA, 33 bp, Homo sapien
agtttgggaataataacgatattgcccagcaga

SEQ ID NO: 41998 - DNA, 33 bp, Homo sapien
agtttgggaataataatgatattgcccagcaga

SEQ ID NO: 41999 - DNA, 33 bp, Homo sapien
gtaactagagatgagacgggagctaaattactg

SEQ ID NO: 42000 - DNA, 33 bp, Homo sapien
gtaactagagatgagatgggagctaaattactg

SEQ ID NO: 42001 - DNA, 33 bp, Homo sapien
gacatctttgtggtgacggaatggttctgcctt

SEQ ID NO: 42002 - DNA, 33 bp, Homo sapien
gacatctttgtggtgatggaatggttctgcctt

SEQ ID NO: 42003 - DNA, 33 bp, Homo sapien
aaccctaagttagatggatatgtctggtttgtc

SEQ ID NO: 42004 - DNA, 33 bp, Homo sapien
aaccctaagttagatgtatatgtctggtttgtc

SEQ ID NO: 42005 - DNA, 33 bp, Homo sapien
aatgccttgacgcctcattgagtttgaactttc

SEQ ID NO: 42006 - DNA, 33 bp, Homo sapien
aatgccttgacgcctcgttgagtttgaactttc

SEQ ID NO: 42007 - DNA, 33 bp, Homo sapien
cattcaataatcaatcaatccagcatccatgct

SEQ ID NO: 42008 - DNA, 33 bp, Homo sapien
cattcaataatcaatccatccagcatccatgct

SEQ ID NO: 42009 - DNA, 33 bp, Homo sapien
aaggatagagactgaacggaaggtactggaagg

SEQ ID NO: 42010 - DNA, 33 bp, Homo sapien
aaggatagagactgaatggaaggtactggaagg

SEQ ID NO: 42011 - DNA, 33 bp, Homo sapien
taattggctgtttctacgattgtcattcactta

SEQ ID NO: 42012 - DNA, 33 bp, Homo sapien
taattggctgtttctatgattgtcattcactta

SEQ ID NO: 42013 - DNA, 33 bp, Homo sapien
catatgcagttgtaaaaactaatgcagagagat

SEQ ID NO: 42014 - DNA, 33 bp, Homo sapien
catatgcagttgtaaacactaatgcagagagat

SEQ ID NO: 42015 - DNA, 33 bp, Homo sapien
agtaacaagcccaaggaagacttattgcccagg

SEQ ID NO: 42016 - DNA, 33 bp, Homo sapien
agtaacaagcccaagggagacttattgcccagg

SEQ ID NO: 42017 - DNA, 33 bp, Homo sapien
cactgagagtcctcaactaggtcattgccatgg

SEQ ID NO: 42018 - DNA, 33 bp, Homo sapien
cactgagagtcctcaattaggtcattgccatgg

SEQ ID NO: 42019 - DNA, 33 bp, Homo sapien
atcttcttccaacaaacagcagccaatataatc

SEQ ID NO: 42020 - DNA, 33 bp, Homo sapien
atcttcttccaacaaagagcagccaatataatc

SEQ ID NO: 42021 - DNA, 33 bp, Homo sapien
tctcacggattatataaagtgaaccggaaagta

SEQ ID NO: 42022 - DNA, 33 bp, Homo sapien
tctcacggattatatagagtgaaccggaaagta

SEQ ID NO: 42023 - DNA, 33 bp, Homo sapien
cacaaacaggcatacactgcaaggtcttatggt

SEQ ID NO: 42024 - DNA, 33 bp, Homo sapien
cacaaacaggcatacagtgcaaggtcttatggt

SEQ ID NO: 42025 - DNA, 33 bp, Homo sapien
tcttatcctagctttcaataatttccaagtttt

SEQ ID NO: 42026 - DNA, 33 bp, Homo sapien
tcttatcctagctttcgataatttccaagtttt

SEQ ID NO: 42027 - DNA, 33 bp, Homo sapien
gttcaatcatattgtaactatcatctccgtgta

SEQ ID NO: 42028 - DNA, 33 bp, Homo sapien
gttcaatcatattgtatctatcatctccgtgta

SEQ ID NO: 42029 - DNA, 33 bp, Homo sapien
atatgaagaatgtgacaacctacttctgcccaa

SEQ ID NO: 42030 - DNA, 33 bp, Homo sapien
atatgaagaatgtgacgacctacttctgcccaa

SEQ ID NO: 42031 - DNA, 33 bp, Homo sapien
agtagagcctgaagacaggactgaatgactgca

SEQ ID NO: 42032 - DNA, 33 bp, Homo sapien
agtagagcctgaagacgggactgaatgactgca

SEQ ID NO: 42033 - DNA, 33 bp, Homo sapien
tcctcaatttaattacaaacaccttcaacagag

SEQ ID NO: 42034 - DNA, 33 bp, Homo sapien
tcctcaatttaattacgaacaccttcaacagag

SEQ ID NO: 42035 - DNA, 33 bp, Homo sapien
atgccgtttggtcagaaggatgaaaaatggttt

SEQ ID NO: 42036 - DNA, 33 bp, Homo sapien
atgccgtttggtcagagggatgaaaaatggttt

SEQ ID NO: 42037 - DNA, 33 bp, Homo sapien
attgtatacaagctaaaaattaatcttcatata

SEQ ID NO: 42038 - DNA, 33 bp, Homo sapien
attgtatacaagctaagaattaatcttcatata

SEQ ID NO: 42039 - DNA, 33 bp, Homo sapien
tatcgtttgaccaacacctgactctttttttca

SEQ ID NO: 42040 - DNA, 33 bp, Homo sapien
tatcgtttgaccaacatctgactctttttttca

SEQ ID NO: 42041 - DNA, 33 bp, Homo sapien
cacattgcccagagacaactacagccatcagtt

SEQ ID NO: 42042 - DNA, 33 bp, Homo sapien
cacattgcccagagacgactacagccatcagtt

SEQ ID NO: 42043 - DNA, 33 bp, Homo sapien
gggttctgtaaccattcaatccattatttcctc

SEQ ID NO: 42044 - DNA, 33 bp, Homo sapien
gggttctgtaaccatttaatccattatttcctc

SEQ ID NO: 42045 - DNA, 33 bp, Homo sapien
gaaaggatcactctaactacttatgtcttagtc

SEQ ID NO: 42046 - DNA, 33 bp, Homo sapien
gaaaggatcactctaattacttatgtcttagtc

SEQ ID NO: 42047 - DNA, 33 bp, Homo sapien
tcagaaagaaatggaaaagaagaagataccaga

SEQ ID NO: 42048 - DNA, 33 bp, Homo sapien
tcagaaagaaatggaagagaagaagataccaga

SEQ ID NO: 42049 - DNA, 33 bp, Homo sapien
gtttcccaactcatgaaccaatattacctttta

SEQ ID NO: 42050 - DNA, 33 bp, Homo sapien
gtttcccaactcatgagccaatattacctttta

SEQ ID NO: 42051 - DNA, 33 bp, Homo sapien
actataggctgtctacaagaacttggtccaaat

SEQ ID NO: 42052 - DNA, 33 bp, Homo sapien
actataggctgtctaccagaacttggtccaaat

SEQ ID NO: 42053 - DNA, 33 bp, Homo sapien
agtattgcctttcttacaaatcaggtctctata

SEQ ID NO: 42054 - DNA, 33 bp, Homo sapien
agtattgcctttcttataaatcaggtctctata

SEQ ID NO: 42055 - DNA, 33 bp, Homo sapien
ttcacaaaagtatatcaagatgtaagtgtgaac

SEQ ID NO: 42056 - DNA, 33 bp, Homo sapien
ttcacaaaagtatatcgagatgtaagtgtgaac

SEQ ID NO: 42057 - DNA, 33 bp, Homo sapien
acccttccctatcctacggtcataaacaaatgc

SEQ ID NO: 42058 - DNA, 33 bp, Homo sapien
acccttccctatcctatggtcataaacaaatgc

SEQ ID NO: 42059 - DNA, 33 bp, Homo sapien
ctgtatcagacaaaaccagcagctgtgaggcta

SEQ ID NO: 42060 - DNA, 33 bp, Homo sapien
ctgtatcagacaaaactagcagctgtgaggcta

SEQ ID NO: 42061 - DNA, 33 bp, Homo sapien
ctaactactttttacccataagaggcagtgcag

SEQ ID NO: 42062 - DNA, 33 bp, Homo sapien
ctaactactttttacctataagaggcagtgcag

SEQ ID NO: 42063 - DNA, 33 bp, Homo sapien
atataatgatctgtgccgcaatatactataatt

SEQ ID NO: 42064 - DNA, 33 bp, Homo sapien
atataatgatctgtgctgcaatatactataatt

SEQ ID NO: 42065 - DNA, 33 bp, Homo sapien
agaaaacaggacactacgccaggtgcgatggct

SEQ ID NO: 42066 - DNA, 33 bp, Homo sapien
agaaaacaggacactatgccaggtgcgatggct

SEQ ID NO: 42067 - DNA, 33 bp, Homo sapien
taagaagggcagctaacttagaactgggagatt

SEQ ID NO: 42068 - DNA, 33 bp, Homo sapien
taagaagggcagctaatttagaactgggagatt

SEQ ID NO: 42069 - DNA, 33 bp, Homo sapien
tgtgtgaagtcagaaactatgttttgtgtgtct

SEQ ID NO: 42070 - DNA, 33 bp, Homo sapien
tgtgtgaagtcagaaattatgttttgtgtgtct

SEQ ID NO: 42071 - DNA, 33 bp, Homo sapien
gtgtgaaaagcattaaatactctggagtctctt

SEQ ID NO: 42072 - DNA, 33 bp, Homo sapien
gtgtgaaaagcattaattactctggagtctctt

SEQ ID NO: 42073 - DNA, 33 bp, Homo sapien
aaccactgtgttcttccccagctcaagtaagtg

SEQ ID NO: 42074 - DNA, 33 bp, Homo sapien
aaccactgtgttcttctccagctcaagtaagtg

SEQ ID NO: 42075 - DNA, 33 bp, Homo sapien
ttttataatgtttccacgtttgaaatttcttct

SEQ ID NO: 42076 - DNA, 33 bp, Homo sapien
ttttataatgtttccatgtttgaaatttcttct

SEQ ID NO: 42077 - DNA, 33 bp, Homo sapien
gattctggatgtaacaccgagacgaacagttgt

SEQ ID NO: 42078 - DNA, 33 bp, Homo sapien
gattctggatgtaacatcgagacgaacagttgt

SEQ ID NO: 42079 - DNA, 33 bp, Homo sapien
acagaattagtactagcagcgctcccaggagac

SEQ ID NO: 42080 - DNA, 33 bp, Homo sapien
acagaattagtactagtagcgctcccaggagac

SEQ ID NO: 42081 - DNA, 33 bp, Homo sapien
tcaatttgagcagaaccggtatctttgccatac

SEQ ID NO: 42082 - DNA, 33 bp, Homo sapien
tcaatttgagcagaactggtatctttgccatac

SEQ ID NO: 42083 - DNA, 33 bp, Homo sapien
caaacaagtttaccgccaaaagaactgcagtga

SEQ ID NO: 42084 - DNA, 33 bp, Homo sapien
caaacaagtttaccgctaaaagaactgcagtga

SEQ ID NO: 42085 - DNA, 33 bp, Homo sapien
ccaagaggaatgaaaacaaaagtcctcataaag

SEQ ID NO: 42086 - DNA, 33 bp, Homo sapien
ccaagaggaatgaaaataaaagtcctcataaag

SEQ ID NO: 42087 - DNA, 33 bp, Homo sapien
cttatccttagcccaaagcaaccagtaacctat

SEQ ID NO: 42088 - DNA, 33 bp, Homo sapien
cttatccttagcccaaggcaaccagtaacctat

SEQ ID NO: 42089 - DNA, 33 bp, Homo sapien
caatccagttttaaaacgtcttcataactccaa

SEQ ID NO: 42090 - DNA, 33 bp, Homo sapien
caatccagttttaaaatgtcttcataactccaa

SEQ ID NO: 42091 - DNA, 33 bp, Homo sapien
atcaaaattgcattcaatattctgggaatgttt

SEQ ID NO: 42092 - DNA, 33 bp, Homo sapien
atcaaaattgcattcagtattctgggaatgttt

SEQ ID NO: 42093 - DNA, 33 bp, Homo sapien
caagcaatcagaagcccagaacagaagatggca

SEQ ID NO: 42094 - DNA, 33 bp, Homo sapien
caagcaatcagaagcctagaacagaagatggca

SEQ ID NO: 42095 - DNA, 33 bp, Homo sapien
tctaaagctatatgctaaaaggaaaatatttgg

SEQ ID NO: 42096 - DNA, 33 bp, Homo sapien
tctaaagctatatgctgaaaggaaaatatttgg

SEQ ID NO: 42097 - DNA, 33 bp, Homo sapien
gtgttcactcatatcaactctttatttttattt

SEQ ID NO: 42098 - DNA, 33 bp, Homo sapien
gtgttcactcatatcacctctttatttttattt

SEQ ID NO: 42099 - DNA, 33 bp, Homo sapien
ctcccttagctcccggcagcagccacctggtat

SEQ ID NO: 42100 - DNA, 33 bp, Homo sapien
ctcccttagctcccggtagcagccacctggtat

SEQ ID NO: 42101 - DNA, 33 bp, Homo sapien
tcagagaagaaacccacgtgaatcaaagaaacg

SEQ ID NO: 42102 - DNA, 33 bp, Homo sapien
tcagagaagaaacccatgtgaatcaaagaaacg

SEQ ID NO: 42103 - DNA, 33 bp, Homo sapien
tctttggtataggaaacaatcttagtttacctt

SEQ ID NO: 42104 - DNA, 33 bp, Homo sapien
tctttggtataggaaagaatcttagtttacctt

SEQ ID NO: 42105 - DNA, 33 bp, Homo sapien
tcattagtaagtgaatgagtaggaacatgcatg

SEQ ID NO: 42106 - DNA, 33 bp, Homo sapien
tcattagtaagtgaattagtaggaacatgcatg

SEQ ID NO: 42107 - DNA, 33 bp, Homo sapien
atttctccctattgaaatcctatgcacctgtca

SEQ ID NO: 42108 - DNA, 33 bp, Homo sapien
atttctccctattgaagtcctatgcacctgtca

SEQ ID NO: 42109 - DNA, 33 bp, Homo sapien
cccatgttcttgtcaccatatgaaattgtctct

SEQ ID NO: 42110 - DNA, 33 bp, Homo sapien
cccatgttcttgtcacgatatgaaattgtctct

SEQ ID NO: 42111 - DNA, 33 bp, Homo sapien
accccagtgtgctctaacctgtaagaaaatgtc

SEQ ID NO: 42112 - DNA, 33 bp, Homo sapien
accccagtgtgctctatcctgtaagaaaatgtc

SEQ ID NO: 42113 - DNA, 33 bp, Homo sapien
tgtcattgcttattccaatttctccaattacct

SEQ ID NO: 42114 - DNA, 33 bp, Homo sapien
tgtcattgcttattcccatttctccaattacct

SEQ ID NO: 42115 - DNA, 33 bp, Homo sapien
gccagtaaggaaatccactcataatgcccattg

SEQ ID NO: 42116 - DNA, 33 bp, Homo sapien
gccagtaaggaaatccgctcataatgcccattg

SEQ ID NO: 42117 - DNA, 33 bp, Homo sapien
gaatccttgctcccaaacaataatctgtgatct

SEQ ID NO: 42118 - DNA, 33 bp, Homo sapien
gaatccttgctcccaaccaataatctgtgatct

SEQ ID NO: 42119 - DNA, 33 bp, Homo sapien
gagccctacctcaggaaatagggatgaagacca

SEQ ID NO: 42120 - DNA, 33 bp, Homo sapien
gagccctacctcaggatatagggatgaagacca

SEQ ID NO: 42121 - DNA, 33 bp, Homo sapien
taagaacattttaagcaaataacagcctatgca

SEQ ID NO: 42122 - DNA, 33 bp, Homo sapien
taagaacattttaagcgaataacagcctatgca

SEQ ID NO: 42123 - DNA, 33 bp, Homo sapien
ttgtttaattcccaaccatctaaagggatttgt

SEQ ID NO: 42124 - DNA, 33 bp, Homo sapien
ttgtttaattcccaacgatctaaagggatttgt

SEQ ID NO: 42125 - DNA, 33 bp, Homo sapien
aaattagatattaaacacttcaaccacataaga

SEQ ID NO: 42126 - DNA, 33 bp, Homo sapien
aaattagatattaaacgcttcaaccacataaga

SEQ ID NO: 42127 - DNA, 33 bp, Homo sapien
tgcatattaccaagtgaaagaagccatcctgaa

SEQ ID NO: 42128 - DNA, 33 bp, Homo sapien
tgcatattaccaagtggaagaagccatcctgaa

SEQ ID NO: 42129 - DNA, 33 bp, Homo sapien
ccttcgcttatcctcagatttttggaaactatt

SEQ ID NO: 42130 - DNA, 33 bp, Homo sapien
ccttcgcttatcctcatatttttggaaactatt

SEQ ID NO: 42131 - DNA, 33 bp, Homo sapien
atgaaaggaatttgacccaggacaagggataca

SEQ ID NO: 42132 - DNA, 33 bp, Homo sapien
atgaaaggaatttgactcaggacaagggataca

SEQ ID NO: 42133 - DNA, 33 bp, Homo sapien
gacccactctgtcagacgattaaattagttccc

SEQ ID NO: 42134 - DNA, 33 bp, Homo sapien
gacccactctgtcagatgattaaattagttccc

SEQ ID NO: 42135 - DNA, 33 bp, Homo sapien
caaacctgcacatttacgcccttgtgtcttata

SEQ ID NO: 42136 - DNA, 33 bp, Homo sapien
caaacctgcacatttatgcccttgtgtcttata

SEQ ID NO: 42137 - DNA, 33 bp, Homo sapien
cctcctggagctaacactctggtaccggatagc

SEQ ID NO: 42138 - DNA, 33 bp, Homo sapien
cctcctggagctaacattctggtaccggatagc

SEQ ID NO: 42139 - DNA, 33 bp, Homo sapien
agaggttatgcaagctcaaatgtggaaagtttt

SEQ ID NO: 42140 - DNA, 33 bp, Homo sapien
agaggttatgcaagctgaaatgtggaaagtttt

SEQ ID NO: 42141 - DNA, 33 bp, Homo sapien
ccctcttcttggaacacgtgacatggtgaccag

SEQ ID NO: 42142 - DNA, 33 bp, Homo sapien
ccctcttcttggaacaggtgacatggtgaccag

SEQ ID NO: 42143 - DNA, 33 bp, Homo sapien
agagcctcagaaaaagcaatatgaaacataggg

SEQ ID NO: 42144 - DNA, 33 bp, Homo sapien
agagcctcagaaaaaggaatatgaaacataggg

SEQ ID NO: 42145 - DNA, 33 bp, Homo sapien
caggacctaagaagtcaaggaagtatttcttaa

SEQ ID NO: 42146 - DNA, 33 bp, Homo sapien
caggacctaagaagtcgaggaagtatttcttaa

SEQ ID NO: 42147 - DNA, 33 bp, Homo sapien
gagcatgactttaatacagagcttagactgggt

SEQ ID NO: 42148 - DNA, 33 bp, Homo sapien
gagcatgactttaatatagagcttagactgggt

SEQ ID NO: 42149 - DNA, 33 bp, Homo sapien
caagggtcctaaaagacacagaaaacttgtgtg

SEQ ID NO: 42150 - DNA, 33 bp, Homo sapien
caagggtcctaaaagagacagaaaacttgtgtg

SEQ ID NO: 42151 - DNA, 33 bp, Homo sapien
gaggaaaaggcgcagcaaagcagtgagcagctc

SEQ ID NO: 42152 - DNA, 33 bp, Homo sapien
gaggaaaaggcgcagcgaagcagtgagcagctc

SEQ ID NO: 42153 - DNA, 33 bp, Homo sapien
gagaacaatggtatcacagttttgtaataaaac

SEQ ID NO: 42154 - DNA, 33 bp, Homo sapien
gagaacaatggtatcagagttttgtaataaaac

SEQ ID NO: 42155 - DNA, 33 bp, Homo sapien
agcccgtgatatggagcaaactacccagctgag

SEQ ID NO: 42156 - DNA, 33 bp, Homo sapien
agcccgtgatatggaggaaactacccagctgag

SEQ ID NO: 42157 - DNA, 33 bp, Homo sapien
gcagttttgatccagacgcccagctccacaagt

SEQ ID NO: 42158 - DNA, 33 bp, Homo sapien
gcagttttgatccagatgcccagctccacaagt

SEQ ID NO: 42159 - DNA, 33 bp, Homo sapien
cgcattttacacaaatcatagttttctgtgtgt

SEQ ID NO: 42160 - DNA, 33 bp, Homo sapien
cgcattttacacaaattatagttttctgtgtgt

SEQ ID NO: 42161 - DNA, 33 bp, Homo sapien
gaaggctgggtatttacgaaacagaacgcgttg

SEQ ID NO: 42162 - DNA, 33 bp, Homo sapien
gaaggctgggtatttaggaaacagaacgcgttg

SEQ ID NO: 42163 - DNA, 33 bp, Homo sapien
agacattcttaaagagaccttaattcagaaatc

SEQ ID NO: 42164 - DNA, 33 bp, Homo sapien
agacattcttaaagagtccttaattcagaaatc

SEQ ID NO: 42165 - DNA, 33 bp, Homo sapien
catgaaggtgtgaagaagtctctgctcccttag

SEQ ID NO: 42166 - DNA, 33 bp, Homo sapien
catgaaggtgtgaagaggtctctgctcccttag

SEQ ID NO: 42167 - DNA, 33 bp, Homo sapien
aagattggaggcaaccactgggcaaatgctcac

SEQ ID NO: 42168 - DNA, 33 bp, Homo sapien
aagattggaggcaaccgctgggcaaatgctcac

SEQ ID NO: 42169 - DNA, 33 bp, Homo sapien
cccaaagcctggcccaaatcattctaccgaggc

SEQ ID NO: 42170 - DNA, 33 bp, Homo sapien
cccaaagcctggcccacatcattctaccgaggc

SEQ ID NO: 42171 - DNA, 33 bp, Homo sapien
taaggcctcatctataaaataatatctacccaa

SEQ ID NO: 42172 - DNA, 33 bp, Homo sapien
taaggcctcatctatagaataatatctacccaa

SEQ ID NO: 42173 - DNA, 33 bp, Homo sapien
ccacacagcctccgtaacataggttccagctcc

SEQ ID NO: 42174 - DNA, 33 bp, Homo sapien
ccacacagcctccgtagcataggttccagctcc

SEQ ID NO: 42175 - DNA, 33 bp, Homo sapien
tgttagtaggccacaaagaatcagggatacaga

SEQ ID NO: 42176 - DNA, 33 bp, Homo sapien
tgttagtaggccacaaggaatcagggatacaga

SEQ ID NO: 42177 - DNA, 33 bp, Homo sapien
ggatgtaaatcacacaaaaagaagttccactta

SEQ ID NO: 42178 - DNA, 33 bp, Homo sapien
ggatgtaaatcacacacaaagaagttccactta

SEQ ID NO: 42179 - DNA, 33 bp, Homo sapien
tcctttcgctcctccaatagctaggcatcccct

SEQ ID NO: 42180 - DNA, 33 bp, Homo sapien
tcctttcgctcctccagtagctaggcatcccct

SEQ ID NO: 42181 - DNA, 33 bp, Homo sapien
gtgtggcaccggccagccattttgtctcttagc

SEQ ID NO: 42182 - DNA, 33 bp, Homo sapien
gtgtggcaccggccaggcattttgtctcttagc

SEQ ID NO: 42183 - DNA, 33 bp, Homo sapien
caaaaccatatgttcaagtctctgaaggtctga

SEQ ID NO: 42184 - DNA, 33 bp, Homo sapien
caaaaccatatgttcaggtctctgaaggtctga

SEQ ID NO: 42185 - DNA, 33 bp, Homo sapien
aaaggccttcaagaccaagacagggacttcaga

SEQ ID NO: 42186 - DNA, 33 bp, Homo sapien
aaaggccttcaagaccgagacagggacttcaga

SEQ ID NO: 42187 - DNA, 33 bp, Homo sapien
ggctgtgtcagcgaaggctggaagaaggatgct

SEQ ID NO: 42188 - DNA, 33 bp, Homo sapien
ggctgtgtcagcgaagtctggaagaaggatgct

SEQ ID NO: 42189 - DNA, 33 bp, Homo sapien
ccactcttagagcctaaaagttaatgggttata

SEQ ID NO: 42190 - DNA, 33 bp, Homo sapien
ccactcttagagcctagaagttaatgggttata

SEQ ID NO: 42191 - DNA, 33 bp, Homo sapien
attcttaaccaaaagagtctaagatcagaacgt

SEQ ID NO: 42192 - DNA, 33 bp, Homo sapien
attcttaaccaaaagattctaagatcagaacgt

SEQ ID NO: 42193 - DNA, 33 bp, Homo sapien
cactctttccccaaaccgtttctctcccagtgt

SEQ ID NO: 42194 - DNA, 33 bp, Homo sapien
cactctttccccaaactgtttctctcccagtgt

SEQ ID NO: 42195 - DNA, 33 bp, Homo sapien
gtgtcttgtaacgttaacctgattagcttttac

SEQ ID NO: 42196 - DNA, 33 bp, Homo sapien
gtgtcttgtaacgttaccctgattagcttttac

SEQ ID NO: 42197 - DNA, 33 bp, Homo sapien
actttgaaactatccactacagttcaaataaca

SEQ ID NO: 42198 - DNA, 33 bp, Homo sapien
actttgaaactatccattacagttcaaataaca

SEQ ID NO: 42199 - DNA, 33 bp, Homo sapien
acagactttcttttagccccaaagcatgctatt

SEQ ID NO: 42200 - DNA, 33 bp, Homo sapien
acagactttcttttagtcccaaagcatgctatt

SEQ ID NO: 42201 - DNA, 33 bp, Homo sapien
acgtttgaaatagctgaaaattctgtaactctg

SEQ ID NO: 42202 - DNA, 33 bp, Homo sapien
acgtttgaaatagctggaaattctgtaactctg

SEQ ID NO: 42203 - DNA, 33 bp, Homo sapien
acctttccctggccaacatttagcagcttactg

SEQ ID NO: 42204 - DNA, 33 bp, Homo sapien
acctttccctggccaatatttagcagcttactg

SEQ ID NO: 42205 - DNA, 33 bp, Homo sapien
gcctctgaatgaggagaagaatatgacttcaag

SEQ ID NO: 42206 - DNA, 33 bp, Homo sapien
gcctctgaatgaggagcagaatatgacttcaag

SEQ ID NO: 42207 - DNA, 33 bp, Homo sapien
aaggtttctcaccccccaatatttgctcaggcc

SEQ ID NO: 42208 - DNA, 33 bp, Homo sapien
aaggtttctcaccccctaatatttgctcaggcc

SEQ ID NO: 42209 - DNA, 33 bp, Homo sapien
agtccccagaccgcaactgcttcctcttcccta

SEQ ID NO: 42210 - DNA, 33 bp, Homo sapien
agtccccagaccgcaagtgcttcctcttcccta

SEQ ID NO: 42211 - DNA, 33 bp, Homo sapien
tgctagaaagaaggtaaaaacactggacttaca

SEQ ID NO: 42212 - DNA, 33 bp, Homo sapien
tgctagaaagaaggtacaaacactggacttaca

SEQ ID NO: 42213 - DNA, 33 bp, Homo sapien
ttaaacctcactcacaatatctcatacctcggt

SEQ ID NO: 42214 - DNA, 33 bp, Homo sapien
ttaaacctcactcacagtatctcatacctcggt

SEQ ID NO: 42215 - DNA, 33 bp, Homo sapien
catgaagccaagcagaaagatgaccgttcccta

SEQ ID NO: 42216 - DNA, 33 bp, Homo sapien
catgaagccaagcagacagatgaccgttcccta

SEQ ID NO: 42217 - DNA, 33 bp, Homo sapien
tgttacttgcagcatgaaggccagtcccttagt

SEQ ID NO: 42218 - DNA, 33 bp, Homo sapien
tgttacttgcagcatggaggccagtcccttagt

SEQ ID NO: 42219 - DNA, 33 bp, Homo sapien
aaccctctgctccacacggctggtatattgttg

SEQ ID NO: 42220 - DNA, 33 bp, Homo sapien
aaccctctgctccacatggctggtatattgttg

SEQ ID NO: 42221 - DNA, 33 bp, Homo sapien
aaggtctcacagctaactgggggtagagggtct

SEQ ID NO: 42222 - DNA, 33 bp, Homo sapien
aaggtctcacagctaattgggggtagagggtct

SEQ ID NO: 42223 - DNA, 33 bp, Homo sapien
ttcaggaccactatgaataaagcggccgcacac

SEQ ID NO: 42224 - DNA, 33 bp, Homo sapien
ttcaggaccactatgagtaaagcggccgcacac

SEQ ID NO: 42225 - DNA, 33 bp, Homo sapien
gagttagaaaactgcaaggatctggcagagatg

SEQ ID NO: 42226 - DNA, 33 bp, Homo sapien
gagttagaaaactgcagggatctggcagagatg

SEQ ID NO: 42227 - DNA, 33 bp, Homo sapien
gctcagaaacagggcacccagagtaccttcaac

SEQ ID NO: 42228 - DNA, 33 bp, Homo sapien
gctcagaaacagggcatccagagtaccttcaac

SEQ ID NO: 42229 - DNA, 33 bp, Homo sapien
gccatctcttctaaaacttctccaaactccact

SEQ ID NO: 42230 - DNA, 33 bp, Homo sapien
gccatctcttctaaaatttctccaaactccact

SEQ ID NO: 42231 - DNA, 33 bp, Homo sapien
gtgatcagccaacttacccagtcccagcttccc

SEQ ID NO: 42232 - DNA, 33 bp, Homo sapien
gtgatcagccaacttatccagtcccagcttccc

SEQ ID NO: 42233 - DNA, 33 bp, Homo sapien
agcctgaagatgatgcacttaggaataacctta

SEQ ID NO: 42234 - DNA, 33 bp, Homo sapien
agcctgaagatgatgcgcttaggaataacctta

SEQ ID NO: 42235 - DNA, 33 bp, Homo sapien
ccttgtccagttgctagcatatgtttatggtgt

SEQ ID NO: 42236 - DNA, 33 bp, Homo sapien
ccttgtccagttgctatcatatgtttatggtgt

SEQ ID NO: 42237 - DNA, 33 bp, Homo sapien
cttttccatgcaaggaagatctaagaccagaaa

SEQ ID NO: 42238 - DNA, 33 bp, Homo sapien
cttttccatgcaaggacgatctaagaccagaaa

SEQ ID NO: 42239 - DNA, 33 bp, Homo sapien
cttccaccacctaataacacacagtgacatttt

SEQ ID NO: 42240 - DNA, 33 bp, Homo sapien
cttccaccacctaatagcacacagtgacatttt

SEQ ID NO: 42241 - DNA, 33 bp, Homo sapien
ggctcagtatccctagaattctgccttaaattc

SEQ ID NO: 42242 - DNA, 33 bp, Homo sapien
ggctcagtatccctagtattctgccttaaattc

SEQ ID NO: 42243 - DNA, 33 bp, Homo sapien
caattcaggccaagaccaccctttccatcagaa

SEQ ID NO: 42244 - DNA, 33 bp, Homo sapien
caattcaggccaagactaccctttccatcagaa

SEQ ID NO: 42245 - DNA, 33 bp, Homo sapien
gggatgtgattgtcttaaaaaagagatgaaaat

SEQ ID NO: 42246 - DNA, 33 bp, Homo sapien
gggatgtgattgtcttcaaaaagagatgaaaat

SEQ ID NO: 42247 - DNA, 33 bp, Homo sapien
ggtccctactagtttacagtatgcgtgtgtgtg

SEQ ID NO: 42248 - DNA, 33 bp, Homo sapien
ggtccctactagtttagagtatgcgtgtgtgtg

SEQ ID NO: 42249 - DNA, 33 bp, Homo sapien
tttcttgttaaatgacaagtggcttacttaatt

SEQ ID NO: 42250 - DNA, 33 bp, Homo sapien
tttcttgttaaatgaccagtggcttacttaatt

SEQ ID NO: 42251 - DNA, 33 bp, Homo sapien
gtactgatgtgcattacaaacttggcataggca

SEQ ID NO: 42252 - DNA, 33 bp, Homo sapien
gtactgatgtgcattagaaacttggcataggca

SEQ ID NO: 42253 - DNA, 33 bp, Homo sapien
catcctccccatccaccgacttctgcttgtaga

SEQ ID NO: 42254 - DNA, 33 bp, Homo sapien
catcctccccatccactgacttctgcttgtaga

SEQ ID NO: 42255 - DNA, 33 bp, Homo sapien
gatatatagtaagctcaataaactttagccatt

SEQ ID NO: 42256 - DNA, 33 bp, Homo sapien
gatatatagtaagctcgataaactttagccatt

SEQ ID NO: 42257 - DNA, 33 bp, Homo sapien
ctctgtgccataaaaacgaggataataaaagta

SEQ ID NO: 42258 - DNA, 33 bp, Homo sapien
ctctgtgccataaaaatgaggataataaaagta

SEQ ID NO: 42259 - DNA, 33 bp, Homo sapien
acatatacagcaacccacctcaaaggtttccct

SEQ ID NO: 42260 - DNA, 33 bp, Homo sapien
acatatacagcaacccgcctcaaaggtttccct

SEQ ID NO: 42261 - DNA, 33 bp, Homo sapien
ctggcaggcagtgcaacgagaattaggtctcaa

SEQ ID NO: 42262 - DNA, 33 bp, Homo sapien
ctggcaggcagtgcaaggagaattaggtctcaa

SEQ ID NO: 42263 - DNA, 33 bp, Homo sapien
taacctttctagcctccctaagaaattggtata

SEQ ID NO: 42264 - DNA, 33 bp, Homo sapien
taacctttctagcctctctaagaaattggtata

SEQ ID NO: 42265 - DNA, 33 bp, Homo sapien
aagcaccaggaaggcgaatagggatgccagagc

SEQ ID NO: 42266 - DNA, 33 bp, Homo sapien
aagcaccaggaaggcgcatagggatgccagagc

SEQ ID NO: 42267 - DNA, 33 bp, Homo sapien
ggtctgttatttaccaactggattgctttaggt

SEQ ID NO: 42268 - DNA, 33 bp, Homo sapien
ggtctgttatttaccagctggattgctttaggt

SEQ ID NO: 42269 - DNA, 33 bp, Homo sapien
ctcactccttcctgtgaaatgcttatttttgcc

SEQ ID NO: 42270 - DNA, 33 bp, Homo sapien
ctcactccttcctgtggaatgcttatttttgcc

SEQ ID NO: 42271 - DNA, 33 bp, Homo sapien
taaatttctgataataacaccaagtcattactg

SEQ ID NO: 42272 - DNA, 33 bp, Homo sapien
taaatttctgataataccaccaagtcattactg

SEQ ID NO: 42273 - DNA, 33 bp, Homo sapien
gtatgtagagaagaagccttcctgttcagcctg

SEQ ID NO: 42274 - DNA, 33 bp, Homo sapien
gtatgtagagaagaaggcttcctgttcagcctg

SEQ ID NO: 42275 - DNA, 33 bp, Homo sapien
tgttctccaatgtcaacctttgcagacctgctc

SEQ ID NO: 42276 - DNA, 33 bp, Homo sapien
tgttctccaatgtcaatctttgcagacctgctc

SEQ ID NO: 42277 - DNA, 33 bp, Homo sapien
cgtaggcaaagctgaacggaagccagcagctaa

SEQ ID NO: 42278 - DNA, 33 bp, Homo sapien
cgtaggcaaagctgaatggaagccagcagctaa

SEQ ID NO: 42279 - DNA, 33 bp, Homo sapien
ctaagaatccctgctacaagcaaagcctacaca

SEQ ID NO: 42280 - DNA, 33 bp, Homo sapien
ctaagaatccctgctataagcaaagcctacaca

SEQ ID NO: 42281 - DNA, 33 bp, Homo sapien
cttcatgctcactacaaccaagatgggaaggat

SEQ ID NO: 42282 - DNA, 33 bp, Homo sapien
cttcatgctcactacagccaagatgggaaggat

SEQ ID NO: 42283 - DNA, 33 bp, Homo sapien
atggcttaaaagaatccctgttgtttgagctta

SEQ ID NO: 42284 - DNA, 33 bp, Homo sapien
atggcttaaaagaatctctgttgtttgagctta

SEQ ID NO: 42285 - DNA, 33 bp, Homo sapien
aaatgcattgatagaaaagagcaccatgttaac

SEQ ID NO: 42286 - DNA, 33 bp, Homo sapien
aaatgcattgatagaacagagcaccatgttaac

SEQ ID NO: 42287 - DNA, 33 bp, Homo sapien
gatatgcacctgataacggcagggagttggatt

SEQ ID NO: 42288 - DNA, 33 bp, Homo sapien
gatatgcacctgataatggcagggagttggatt

SEQ ID NO: 42289 - DNA, 33 bp, Homo sapien
cctgtttctaataccgcagctgaaatcactttg

SEQ ID NO: 42290 - DNA, 33 bp, Homo sapien
cctgtttctaataccgtagctgaaatcactttg

SEQ ID NO: 42291 - DNA, 33 bp, Homo sapien
tgagctgcaaagaaaccgaggagacagagacag

SEQ ID NO: 42292 - DNA, 33 bp, Homo sapien
tgagctgcaaagaaactgaggagacagagacag

SEQ ID NO: 42293 - DNA, 33 bp, Homo sapien
ggcacaatttttatacgcagtacaatgttggct

SEQ ID NO: 42294 - DNA, 33 bp, Homo sapien
ggcacaatttttatactcagtacaatgttggct

SEQ ID NO: 42295 - DNA, 33 bp, Homo sapien
cagcaagaaagaaagcacaagagatgagagaat

SEQ ID NO: 42296 - DNA, 33 bp, Homo sapien
cagcaagaaagaaagcgcaagagatgagagaat

SEQ ID NO: 42297 - DNA, 33 bp, Homo sapien
gtcatttgttccatagaagctgataactaatac

SEQ ID NO: 42298 - DNA, 33 bp, Homo sapien
gtcatttgttccatagcagctgataactaatac

SEQ ID NO: 42299 - DNA, 33 bp, Homo sapien
acaaaacgttgtctcacggtgagtcaggaatcc

SEQ ID NO: 42300 - DNA, 33 bp, Homo sapien
acaaaacgttgtctcatggtgagtcaggaatcc

SEQ ID NO: 42301 - DNA, 33 bp, Homo sapien
tactgtagaggtaggcactgcattaatacttgt

SEQ ID NO: 42302 - DNA, 33 bp, Homo sapien
tactgtagaggtaggcgctgcattaatacttgt

SEQ ID NO: 42303 - DNA, 33 bp, Homo sapien
aggcaggtgctccagacgggtgatattgctgtc

SEQ ID NO: 42304 - DNA, 33 bp, Homo sapien
aggcaggtgctccagatgggtgatattgctgtc

SEQ ID NO: 42305 - DNA, 33 bp, Homo sapien
gaaagaagtagaaccaccattgtagcacctgcc

SEQ ID NO: 42306 - DNA, 33 bp, Homo sapien
gaaagaagtagaaccagcattgtagcacctgcc

SEQ ID NO: 42307 - DNA, 33 bp, Homo sapien
agcacagatttagcgcaccgtctacttgctttt

SEQ ID NO: 42308 - DNA, 33 bp, Homo sapien
agcacagatttagcgcgccgtctacttgctttt

SEQ ID NO: 42309 - DNA, 33 bp, Homo sapien
aactgttcaaaggcaccggggcagaatttgtct

SEQ ID NO: 42310 - DNA, 33 bp, Homo sapien
aactgttcaaaggcactggggcagaatttgtct

SEQ ID NO: 42311 - DNA, 33 bp, Homo sapien
gaggctcaggccctacacagcaaggtagaggag

SEQ ID NO: 42312 - DNA, 33 bp, Homo sapien
gaggctcaggccctacgcagcaaggtagaggag

SEQ ID NO: 42313 - DNA, 33 bp, Homo sapien
agatggcacctccatagcagggtgacttcagtt

SEQ ID NO: 42314 - DNA, 33 bp, Homo sapien
agatggcacctccatatcagggtgacttcagtt

SEQ ID NO: 42315 - DNA, 33 bp, Homo sapien
tttaaaattttttgtacgaatggggtctcagct

SEQ ID NO: 42316 - DNA, 33 bp, Homo sapien
tttaaaattttttgtaggaatggggtctcagct

SEQ ID NO: 42317 - DNA, 33 bp, Homo sapien
ttcctggaggccttgcccgccttgatggcagaa

SEQ ID NO: 42318 - DNA, 33 bp, Homo sapien
ttcctggaggccttgctcgccttgatggcagaa

SEQ ID NO: 42319 - DNA, 33 bp, Homo sapien
gtgaaccatggacttccagtttaggtccactgg

SEQ ID NO: 42320 - DNA, 33 bp, Homo sapien
gtgaaccatggacttctagtttaggtccactgg

SEQ ID NO: 42321 - DNA, 33 bp, Homo sapien
caaagagagcccgtcacgtcaaagaaaccaact

SEQ ID NO: 42322 - DNA, 33 bp, Homo sapien
caaagagagcccgtcatgtcaaagaaaccaact

SEQ ID NO: 42323 - DNA, 33 bp, Homo sapien
ttggcaaagcttcagtaaaaagggcactgtcat

SEQ ID NO: 42324 - DNA, 33 bp, Homo sapien
ttggcaaagcttcagtgaaaagggcactgtcat

SEQ ID NO: 42325 - DNA, 33 bp, Homo sapien
gcaatgcacaatctataaaaccttatgcagtgg

SEQ ID NO: 42326 - DNA, 33 bp, Homo sapien
gcaatgcacaatctatgaaaccttatgcagtgg

SEQ ID NO: 42327 - DNA, 33 bp, Homo sapien
tcagcccagatattacactttcccactatcttc

SEQ ID NO: 42328 - DNA, 33 bp, Homo sapien
tcagcccagatattacgctttcccactatcttc

SEQ ID NO: 42329 - DNA, 33 bp, Homo sapien
cggctggcaggttacgccccggaacagtcagtc

SEQ ID NO: 42330 - DNA, 33 bp, Homo sapien
cggctggcaggttacgtcccggaacagtcagtc

SEQ ID NO: 42331 - DNA, 33 bp, Homo sapien
acaacatttaagatacaaaaatgtgcgcaaaat

SEQ ID NO: 42332 - DNA, 33 bp, Homo sapien
acaacatttaagatacgaaaatgtgcgcaaaat

SEQ ID NO: 42333 - DNA, 33 bp, Homo sapien
gctgaaagatccaacccccctgcacatgaacac

SEQ ID NO: 42334 - DNA, 33 bp, Homo sapien
gctgaaagatccaacctccctgcacatgaacac

SEQ ID NO: 42335 - DNA, 33 bp, Homo sapien
tggagagaggcaataacggccaccttacagtcg

SEQ ID NO: 42336 - DNA, 33 bp, Homo sapien
tggagagaggcaataatggccaccttacagtcg

SEQ ID NO: 42337 - DNA, 33 bp, Homo sapien
cctttttaaagatacaagttacacactgtgcaa

SEQ ID NO: 42338 - DNA, 33 bp, Homo sapien
cctttttaaagatacacgttacacactgtgcaa

SEQ ID NO: 42339 - DNA, 33 bp, Homo sapien
tggtttgaagattaaccgcaggggtatagtaca

SEQ ID NO: 42340 - DNA, 33 bp, Homo sapien
tggtttgaagattaactgcaggggtatagtaca

SEQ ID NO: 42341 - DNA, 33 bp, Homo sapien
aaacaataatgactgacaattttcccccaaatt

SEQ ID NO: 42342 - DNA, 33 bp, Homo sapien
aaacaataatgactgagaattttcccccaaatt

SEQ ID NO: 42343 - DNA, 33 bp, Homo sapien
tccctccagaaaataacgggacctcatacaatt

SEQ ID NO: 42344 - DNA, 33 bp, Homo sapien
tccctccagaaaataatgggacctcatacaatt

SEQ ID NO: 42345 - DNA, 33 bp, Homo sapien
cctctgggtctcagaaagtgaggagtgagaaca

SEQ ID NO: 42346 - DNA, 33 bp, Homo sapien
cctctgggtctcagaaggtgaggagtgagaaca

SEQ ID NO: 42347 - DNA, 33 bp, Homo sapien
atgatttatcttgaaacgtgacagactcatgac

SEQ ID NO: 42348 - DNA, 33 bp, Homo sapien
atgatttatcttgaaatgtgacagactcatgac

SEQ ID NO: 42349 - DNA, 33 bp, Homo sapien
ttggtattacagtacactctttagttggaaatt

SEQ ID NO: 42350 - DNA, 33 bp, Homo sapien
ttggtattacagtacattctttagttggaaatt

SEQ ID NO: 42351 - DNA, 33 bp, Homo sapien
ttctggctttccaagcgcaagccggtctggccc

SEQ ID NO: 42352 - DNA, 33 bp, Homo sapien
ttctggctttccaagctcaagccggtctggccc

SEQ ID NO: 42353 - DNA, 33 bp, Homo sapien
gcaagttcaacctacacagtgcagctccagttc

SEQ ID NO: 42354 - DNA, 33 bp, Homo sapien
gcaagttcaacctacatagtgcagctccagttc

SEQ ID NO: 42355 - DNA, 33 bp, Homo sapien
cattggtttggttgcaagggaaattcagctttt

SEQ ID NO: 42356 - DNA, 33 bp, Homo sapien
cattggtttggttgcaggggaaattcagctttt

SEQ ID NO: 42357 - DNA, 33 bp, Homo sapien
cctctccctaatgtgtcaactattaacaacagg

SEQ ID NO: 42358 - DNA, 33 bp, Homo sapien
cctctccctaatgtgtgaactattaacaacagg

SEQ ID NO: 42359 - DNA, 33 bp, Homo sapien
atctactagcttaagcagcatccctcctgaaat

SEQ ID NO: 42360 - DNA, 33 bp, Homo sapien
atctactagcttaagctgcatccctcctgaaat

SEQ ID NO: 42361 - DNA, 33 bp, Homo sapien
gatggaacaaaagagacaccattgacactgaca

SEQ ID NO: 42362 - DNA, 33 bp, Homo sapien
gatggaacaaaagagataccattgacactgaca

SEQ ID NO: 42363 - DNA, 33 bp, Homo sapien
aagatgagaccaacaacaggagcgtgacagagg

SEQ ID NO: 42364 - DNA, 33 bp, Homo sapien
aagatgagaccaacaagaggagcgtgacagagg

SEQ ID NO: 42365 - DNA, 33 bp, Homo sapien
atgtggcatatgctacacaactaacatgcagaa

SEQ ID NO: 42366 - DNA, 33 bp, Homo sapien
atgtggcatatgctacgcaactaacatgcagaa

SEQ ID NO: 42367 - DNA, 33 bp, Homo sapien
tcctctcatttccacaatggttaccaaacaact

SEQ ID NO: 42368 - DNA, 33 bp, Homo sapien
tcctctcatttccacattggttaccaaacaact

SEQ ID NO: 42369 - DNA, 33 bp, Homo sapien
cttcagctgaaatgaccatttctcctctcattt

SEQ ID NO: 42370 - DNA, 33 bp, Homo sapien
cttcagctgaaatgacgatttctcctctcattt

SEQ ID NO: 42371 - DNA, 33 bp, Homo sapien
ctgcaatgagcccgtaagtttgctgattacccc

SEQ ID NO: 42372 - DNA, 33 bp, Homo sapien
ctgcaatgagcccgtacgtttgctgattacccc

SEQ ID NO: 42373 - DNA, 33 bp, Homo sapien
tttataagaaaattgcaaaggtgtgtcaatagg

SEQ ID NO: 42374 - DNA, 33 bp, Homo sapien
tttataagaaaattgcgaaggtgtgtcaatagg

SEQ ID NO: 42375 - DNA, 33 bp, Homo sapien
ctcccttgtctgatgaagctgctcctgcgtagt

SEQ ID NO: 42376 - DNA, 33 bp, Homo sapien
ctcccttgtctgatgaggctgctcctgcgtagt

SEQ ID NO: 42377 - DNA, 33 bp, Homo sapien
ctctcattgagagcaacttcaaaccacctcata

SEQ ID NO: 42378 - DNA, 33 bp, Homo sapien
ctctcattgagagcaatttcaaaccacctcata

SEQ ID NO: 42379 - DNA, 33 bp, Homo sapien
ctatgtgtaaataagaaacaaagtgggttggtg

SEQ ID NO: 42380 - DNA, 33 bp, Homo sapien
ctatgtgtaaataagatacaaagtgggttggtg

SEQ ID NO: 42381 - DNA, 33 bp, Homo sapien
atcctcccactacccacacttcaggatagggac

SEQ ID NO: 42382 - DNA, 33 bp, Homo sapien
atcctcccactacccagacttcaggatagggac

SEQ ID NO: 42383 - DNA, 33 bp, Homo sapien
aaagaaacacaaagaaccgattaagtcacaatg

SEQ ID NO: 42384 - DNA, 33 bp, Homo sapien
aaagaaacacaaagaagcgattaagtcacaatg

SEQ ID NO: 42385 - DNA, 33 bp, Homo sapien
aatgtgtatttgagaaatggcctattgtttaac

SEQ ID NO: 42386 - DNA, 33 bp, Homo sapien
aatgtgtatttgagaattggcctattgtttaac

SEQ ID NO: 42387 - DNA, 33 bp, Homo sapien
atttacaataccatcaaaaagattaggatagaa

SEQ ID NO: 42388 - DNA, 33 bp, Homo sapien
atttacaataccatcagaaagattaggatagaa

SEQ ID NO: 42389 - DNA, 33 bp, Homo sapien
aatacaaaagcatgcaaagacaggaaagtacaa

SEQ ID NO: 42390 - DNA, 33 bp, Homo sapien
aatacaaaagcatgcagagacaggaaagtacaa

SEQ ID NO: 42391 - DNA, 33 bp, Homo sapien
attcctcagcagtataaattatcttaacagaag

SEQ ID NO: 42392 - DNA, 33 bp, Homo sapien
attcctcagcagtatacattatcttaacagaag

SEQ ID NO: 42393 - DNA, 33 bp, Homo sapien
gaaaaccatgtgaaaactgaacctgcagatatg

SEQ ID NO: 42394 - DNA, 33 bp, Homo sapien
gaaaaccatgtgaaaattgaacctgcagatatg

SEQ ID NO: 42395 - DNA, 33 bp, Homo sapien
ggcattaactgagactaaatctatgactgaagg

SEQ ID NO: 42396 - DNA, 33 bp, Homo sapien
ggcattaactgagactgaatctatgactgaagg

SEQ ID NO: 42397 - DNA, 33 bp, Homo sapien
aaggccttagagacacagaaaagccaatagata

SEQ ID NO: 42398 - DNA, 33 bp, Homo sapien
aaggccttagagacactgaaaagccaatagata

SEQ ID NO: 42399 - DNA, 33 bp, Homo sapien
aagggccattaatttacgctaaaatcattgagt

SEQ ID NO: 42400 - DNA, 33 bp, Homo sapien
aagggccattaatttatgctaaaatcattgagt

SEQ ID NO: 42401 - DNA, 33 bp, Homo sapien
tgattacaaggagatacacctgctcagtggaaa

SEQ ID NO: 42402 - DNA, 33 bp, Homo sapien
tgattacaaggagatatacctgctcagtggaaa

SEQ ID NO: 42403 - DNA, 33 bp, Homo sapien
tggcccagtatgataaacagttcacccaactac

SEQ ID NO: 42404 - DNA, 33 bp, Homo sapien
tggcccagtatgataagcagttcacccaactac

SEQ ID NO: 42405 - DNA, 33 bp, Homo sapien
ctccgtagaaggcaacgggttcagattggaaca

SEQ ID NO: 42406 - DNA, 33 bp, Homo sapien
ctccgtagaaggcaactggttcagattggaaca

SEQ ID NO: 42407 - DNA, 33 bp, Homo sapien
atgctgttgtccttcaaagttcattaaaagttc

SEQ ID NO: 42408 - DNA, 33 bp, Homo sapien
atgctgttgtccttcacagttcattaaaagttc

SEQ ID NO: 42409 - DNA, 33 bp, Homo sapien
tattaaattgtacccactcctctagtgctcctt

SEQ ID NO: 42410 - DNA, 33 bp, Homo sapien
tattaaattgtacccattcctctagtgctcctt

SEQ ID NO: 42411 - DNA, 33 bp, Homo sapien
taacttgctgtgataactagaaagcatcatcgt

SEQ ID NO: 42412 - DNA, 33 bp, Homo sapien
taacttgctgtgataattagaaagcatcatcgt

SEQ ID NO: 42413 - DNA, 33 bp, Homo sapien
tgagagcttagaatcaaccccatgtcattcact

SEQ ID NO: 42414 - DNA, 33 bp, Homo sapien
tgagagcttagaatcatccccatgtcattcact

SEQ ID NO: 42415 - DNA, 33 bp, Homo sapien
acagaccaaacataaaaagataagcaccaagaa

SEQ ID NO: 42416 - DNA, 33 bp, Homo sapien
acagaccaaacataaagagataagcaccaagaa

SEQ ID NO: 42417 - DNA, 33 bp, Homo sapien
ggctttcttcagctacaatggatcacaacatca

SEQ ID NO: 42418 - DNA, 33 bp, Homo sapien
ggctttcttcagctacgatggatcacaacatca

SEQ ID NO: 42419 - DNA, 33 bp, Homo sapien
ggaaagctttattagacctgctggaaatttccc

SEQ ID NO: 42420 - DNA, 33 bp, Homo sapien
ggaaagctttattagagctgctggaaatttccc

SEQ ID NO: 42421 - DNA, 33 bp, Homo sapien
gctaatacctccctcaacaggaaagagaagaag

SEQ ID NO: 42422 - DNA, 33 bp, Homo sapien
gctaatacctccctcagcaggaaagagaagaag

SEQ ID NO: 42423 - DNA, 33 bp, Homo sapien
tagataggctgggtgcaatttctcatgcctcta

SEQ ID NO: 42424 - DNA, 33 bp, Homo sapien
tagataggctgggtgcgatttctcatgcctcta

SEQ ID NO: 42425 - DNA, 33 bp, Homo sapien
ttttttatagtggctacattagagttagttttc

SEQ ID NO: 42426 - DNA, 33 bp, Homo sapien
ttttttatagtggctatattagagttagttttc

SEQ ID NO: 42427 - DNA, 33 bp, Homo sapien
tgctagtgtctcaaaaatcagtaaaactttatt

SEQ ID NO: 42428 - DNA, 33 bp, Homo sapien
tgctagtgtctcaaaagtcagtaaaactttatt

SEQ ID NO: 42429 - DNA, 33 bp, Homo sapien
acatttttgctttctcaagttttctgttaatgg

SEQ ID NO: 42430 - DNA, 33 bp, Homo sapien
acatttttgctttctccagttttctgttaatgg

SEQ ID NO: 42431 - DNA, 33 bp, Homo sapien
ccagggaccctgtatacggccaattcaagaaga

SEQ ID NO: 42432 - DNA, 33 bp, Homo sapien
ccagggaccctgtatatggccaattcaagaaga

SEQ ID NO: 42433 - DNA, 33 bp, Homo sapien
gtggctgtgatcacaaaaaaaggccaccatata

SEQ ID NO: 42434 - DNA, 33 bp, Homo sapien
gtggctgtgatcacaagaaaaggccaccatata

SEQ ID NO: 42435 - DNA, 33 bp, Homo sapien
accaaactagcaaagacgtaagattttaaaata

SEQ ID NO: 42436 - DNA, 33 bp, Homo sapien
accaaactagcaaagatgtaagattttaaaata

SEQ ID NO: 42437 - DNA, 33 bp, Homo sapien
ttctaaatagtacagacggagcttctctaagag

SEQ ID NO: 42438 - DNA, 33 bp, Homo sapien
ttctaaatagtacagatggagcttctctaagag

SEQ ID NO: 42439 - DNA, 33 bp, Homo sapien
gaagtgaaataggatacgtagtgtgacaggtgt

SEQ ID NO: 42440 - DNA, 33 bp, Homo sapien
gaagtgaaataggatatgtagtgtgacaggtgt

SEQ ID NO: 42441 - DNA, 33 bp, Homo sapien
aaatgtgataaacatgaaaggaaaatgagctta

SEQ ID NO: 42442 - DNA, 33 bp, Homo sapien
aaatgtgataaacatgtaaggaaaatgagctta

SEQ ID NO: 42443 - DNA, 33 bp, Homo sapien
catatcattgagtgaaaaataatactatttaat

SEQ ID NO: 42444 - DNA, 33 bp, Homo sapien
catatcattgagtgaagaataatactatttaat

SEQ ID NO: 42445 - DNA, 33 bp, Homo sapien
atatgagtgtggaagacaggtgacttgaagaga

SEQ ID NO: 42446 - DNA, 33 bp, Homo sapien
atatgagtgtggaagataggtgacttgaagaga

SEQ ID NO: 42447 - DNA, 33 bp, Homo sapien
atcaattgtagaaaaacgtttcttgtggatcta

SEQ ID NO: 42448 - DNA, 33 bp, Homo sapien
atcaattgtagaaaaatgtttcttgtggatcta

SEQ ID NO: 42449 - DNA, 33 bp, Homo sapien
aataagcaggaactcaataaatagaatgaatga

SEQ ID NO: 42450 - DNA, 33 bp, Homo sapien
aataagcaggaactcagtaaatagaatgaatga

SEQ ID NO: 42451 - DNA, 33 bp, Homo sapien
tcttgccacatgactacaccccaggcacttcac

SEQ ID NO: 42452 - DNA, 33 bp, Homo sapien
tcttgccacatgactataccccaggcacttcac

SEQ ID NO: 42453 - DNA, 33 bp, Homo sapien
cagagtattgagatagaagacccccaatgacaa

SEQ ID NO: 42454 - DNA, 33 bp, Homo sapien
cagagtattgagatagcagacccccaatgacaa

SEQ ID NO: 42455 - DNA, 33 bp, Homo sapien
tatagaatgcttcttccctactgtatcttatta

SEQ ID NO: 42456 - DNA, 33 bp, Homo sapien
tatagaatgcttcttctctactgtatcttatta

SEQ ID NO: 42457 - DNA, 33 bp, Homo sapien
ctatgatatgtgacaaaaaactacagtaaaaaa

SEQ ID NO: 42458 - DNA, 33 bp, Homo sapien
ctatgatatgtgacaagaaactacagtaaaaaa

SEQ ID NO: 42459 - DNA, 33 bp, Homo sapien
cctgctttcaggagaactactaaatttaaaatt

SEQ ID NO: 42460 - DNA, 33 bp, Homo sapien
cctgctttcaggagaattactaaatttaaaatt

SEQ ID NO: 42461 - DNA, 33 bp, Homo sapien
aggttcagtaaaaataaggtacaaaggataaca

SEQ ID NO: 42462 - DNA, 33 bp, Homo sapien
aggttcagtaaaaatacggtacaaaggataaca

SEQ ID NO: 42463 - DNA, 33 bp, Homo sapien
gaatgttggctctaccacctagttagctatgtg

SEQ ID NO: 42464 - DNA, 33 bp, Homo sapien
gaatgttggctctaccgcctagttagctatgtg

SEQ ID NO: 42465 - DNA, 33 bp, Homo sapien
tcaaaaaattaaaaaaatctcaggcctggtggt

SEQ ID NO: 42466 - DNA, 33 bp, Homo sapien
tcaaaaaattaaaaaagtctcaggcctggtggt

SEQ ID NO: 42467 - DNA, 33 bp, Homo sapien
tccacatcaccataaccagtcaatatctttggg

SEQ ID NO: 42468 - DNA, 33 bp, Homo sapien
tccacatcaccataactagtcaatatctttggg

SEQ ID NO: 42469 - DNA, 33 bp, Homo sapien
tgacctgctcaagcaccggcaagaaattaactt

SEQ ID NO: 42470 - DNA, 33 bp, Homo sapien
tgacctgctcaagcacgggcaagaaattaactt

SEQ ID NO: 42471 - DNA, 33 bp, Homo sapien
taatctgtttaggtaaggaactgcttatttgaa

SEQ ID NO: 42472 - DNA, 33 bp, Homo sapien
taatctgtttaggtaatgaactgcttatttgaa

SEQ ID NO: 42473 - DNA, 33 bp, Homo sapien
taagtagtaagctgtacgatacaaattaaaatt

SEQ ID NO: 42474 - DNA, 33 bp, Homo sapien
taagtagtaagctgtatgatacaaattaaaatt

SEQ ID NO: 42475 - DNA, 33 bp, Homo sapien
gactctgtatttttcaccttttttctcactgta

SEQ ID NO: 42476 - DNA, 33 bp, Homo sapien
gactctgtatttttcatcttttttctcactgta

SEQ ID NO: 42477 - DNA, 33 bp, Homo sapien
tacaaaaggagacatacggatggcaaataatca

SEQ ID NO: 42478 - DNA, 33 bp, Homo sapien
tacaaaaggagacatatggatggcaaataatca

SEQ ID NO: 42479 - DNA, 33 bp, Homo sapien
ttaagcatctgggaaactaacataaggccctct

SEQ ID NO: 42480 - DNA, 33 bp, Homo sapien
ttaagcatctgggaaagtaacataaggccctct

SEQ ID NO: 42481 - DNA, 33 bp, Homo sapien
agaagactctgagcaagttatataagtcctgtt

SEQ ID NO: 42482 - DNA, 33 bp, Homo sapien
agaagactctgagcaatttatataagtcctgtt

SEQ ID NO: 42483 - DNA, 33 bp, Homo sapien
tatatggtagaaactgaacactaatattcatga

SEQ ID NO: 42484 - DNA, 33 bp, Homo sapien
tatatggtagaaactggacactaatattcatga

SEQ ID NO: 42485 - DNA, 33 bp, Homo sapien
aaagcttatccaaaaaataaaaatcacaaatca

SEQ ID NO: 42486 - DNA, 33 bp, Homo sapien
aaagcttatccaaaaactaaaaatcacaaatca

SEQ ID NO: 42487 - DNA, 33 bp, Homo sapien
aatatgcttaatatcactaatcattgcaaatca

SEQ ID NO: 42488 - DNA, 33 bp, Homo sapien
aatatgcttaatatcagtaatcattgcaaatca

SEQ ID NO: 42489 - DNA, 33 bp, Homo sapien
aatgtcagatggtacaatcactgtggagaacaa

SEQ ID NO: 42490 - DNA, 33 bp, Homo sapien
aatgtcagatggtacagtcactgtggagaacaa

SEQ ID NO: 42491 - DNA, 33 bp, Homo sapien
ctagaacatttgactacctatatggaaaaatat

SEQ ID NO: 42492 - DNA, 33 bp, Homo sapien
ctagaacatttgactatctatatggaaaaatat

SEQ ID NO: 42493 - DNA, 33 bp, Homo sapien
atgacaaatgtctgcaaagaaaatcacaaagaa

SEQ ID NO: 42494 - DNA, 33 bp, Homo sapien
atgacaaatgtctgcacagaaaatcacaaagaa

SEQ ID NO: 42495 - DNA, 33 bp, Homo sapien
tatcctttccagtcagaatgctttttatttatt

SEQ ID NO: 42496 - DNA, 33 bp, Homo sapien
tatcctttccagtcagtatgctttttatttatt

SEQ ID NO: 42497 - DNA, 33 bp, Homo sapien
ttatctcctcaaaacaacaagaattctgcacct

SEQ ID NO: 42498 - DNA, 33 bp, Homo sapien
ttatctcctcaaaacagcaagaattctgcacct

SEQ ID NO: 42499 - DNA, 33 bp, Homo sapien
caacctctatctcacaataatcctgagggagct

SEQ ID NO: 42500 - DNA, 33 bp, Homo sapien
caacctctatctcacagtaatcctgagggagct

SEQ ID NO: 42501 - DNA, 33 bp, Homo sapien
accacccctgctcaaactattctgaaaaataga

SEQ ID NO: 42502 - DNA, 33 bp, Homo sapien
accacccctgctcaaattattctgaaaaataga

SEQ ID NO: 42503 - DNA, 33 bp, Homo sapien
tcctttgctctattaacgtggtttattacactg

SEQ ID NO: 42504 - DNA, 33 bp, Homo sapien
tcctttgctctattaatgtggtttattacactg

SEQ ID NO: 42505 - DNA, 33 bp, Homo sapien
atccaggacacactgaagcaagcagggggtggg

SEQ ID NO: 42506 - DNA, 33 bp, Homo sapien
atccaggacacactgaggcaagcagggggtggg

SEQ ID NO: 42507 - DNA, 33 bp, Homo sapien
atgtaggaactcacaaaacagaggtatcctcag

SEQ ID NO: 42508 - DNA, 33 bp, Homo sapien
atgtaggaactcacaacacagaggtatcctcag

SEQ ID NO: 42509 - DNA, 33 bp, Homo sapien
ctttaaggtggaaatacgtacagctgggacaaa

SEQ ID NO: 42510 - DNA, 33 bp, Homo sapien
ctttaaggtggaaatatgtacagctgggacaaa

SEQ ID NO: 42511 - DNA, 33 bp, Homo sapien
atttgtgtggtctccacatattaatctagggtt

SEQ ID NO: 42512 - DNA, 33 bp, Homo sapien
atttgtgtggtctccatatattaatctagggtt

SEQ ID NO: 42513 - DNA, 33 bp, Homo sapien
agaggaaatataaacaagcactagatatatggc

SEQ ID NO: 42514 - DNA, 33 bp, Homo sapien
agaggaaatataaacaggcactagatatatggc

SEQ ID NO: 42515 - DNA, 33 bp, Homo sapien
ttgtaattagcaaaaaattctccttggctcaca

SEQ ID NO: 42516 - DNA, 33 bp, Homo sapien
ttgtaattagcaaaaagttctccttggctcaca

SEQ ID NO: 42517 - DNA, 33 bp, Homo sapien
ccaccactaagcaacaatagattttatatgtgt

SEQ ID NO: 42518 - DNA, 33 bp, Homo sapien
ccaccactaagcaacagtagattttatatgtgt

SEQ ID NO: 42519 - DNA, 33 bp, Homo sapien
aactcagatggctttaacgaagtcattttcttg

SEQ ID NO: 42520 - DNA, 33 bp, Homo sapien
aactcagatggctttagcgaagtcattttcttg

SEQ ID NO: 42521 - DNA, 33 bp, Homo sapien
gttaatgtgaaatacaccaaacttaagtttcca

SEQ ID NO: 42522 - DNA, 33 bp, Homo sapien
gttaatgtgaaatacagcaaacttaagtttcca

SEQ ID NO: 42523 - DNA, 33 bp, Homo sapien
tgtgtccccccgataacctattctggacaccta

SEQ ID NO: 42524 - DNA, 33 bp, Homo sapien
tgtgtccccccgataagctattctggacaccta

SEQ ID NO: 42525 - DNA, 33 bp, Homo sapien
ggcagtttggagatgactcaaacaactgagttg

SEQ ID NO: 42526 - DNA, 33 bp, Homo sapien
ggcagtttggagatgattcaaacaactgagttg

SEQ ID NO: 42527 - DNA, 33 bp, Homo sapien
ccatattgcagctaacaaaactgaagggtagga

SEQ ID NO: 42528 - DNA, 33 bp, Homo sapien
ccatattgcagctaacgaaactgaagggtagga

SEQ ID NO: 42529 - DNA, 33 bp, Homo sapien
cttcttataaaaatgccctggagaaattgtctc

SEQ ID NO: 42530 - DNA, 33 bp, Homo sapien
cttcttataaaaatgctctggagaaattgtctc

SEQ ID NO: 42531 - DNA, 33 bp, Homo sapien
ggacttcttgttgccaatatccagagaggcagc

SEQ ID NO: 42532 - DNA, 33 bp, Homo sapien
ggacttcttgttgccactatccagagaggcagc

SEQ ID NO: 42533 - DNA, 33 bp, Homo sapien
acagggcaagcacggacctggctgtcagcaaac

SEQ ID NO: 42534 - DNA, 33 bp, Homo sapien
acagggcaagcacggatctggctgtcagcaaac

SEQ ID NO: 42535 - DNA, 33 bp, Homo sapien
agttcgaggatgggcaagaggtccaatactgcc

SEQ ID NO: 42536 - DNA, 33 bp, Homo sapien
agttcgaggatgggcacgaggtccaatactgcc

SEQ ID NO: 42537 - DNA, 33 bp, Homo sapien
ttgatgctgcttgtgaaaagagacagggcgatc

SEQ ID NO: 42538 - DNA, 33 bp, Homo sapien
ttgatgctgcttgtgacaagagacagggcgatc

SEQ ID NO: 42539 - DNA, 33 bp, Homo sapien
ttcatttccttacctccatgctgtgtttgttaa

SEQ ID NO: 42540 - DNA, 33 bp, Homo sapien
ttcatttccttacctcgatgctgtgtttgttaa

SEQ ID NO: 42541 - DNA, 33 bp, Homo sapien
tctccagggtgaataccaactcatttgcaattc

SEQ ID NO: 42542 - DNA, 33 bp, Homo sapien
tctccagggtgaatactaactcatttgcaattc

SEQ ID NO: 42543 - DNA, 33 bp, Homo sapien
tctagccttctgtgaacggaccagtgctgcacc

SEQ ID NO: 42544 - DNA, 33 bp, Homo sapien
tctagccttctgtgaatggaccagtgctgcacc

SEQ ID NO: 42545 - DNA, 33 bp, Homo sapien
atgttaccttcaaaccaaaagcttaatcttcaa

SEQ ID NO: 42546 - DNA, 33 bp, Homo sapien
atgttaccttcaaaccgaaagcttaatcttcaa

SEQ ID NO: 42547 - DNA, 33 bp, Homo sapien
cttgacagttaatatcacgaagctgctccctta

SEQ ID NO: 42548 - DNA, 33 bp, Homo sapien
cttgacagttaatatcgcgaagctgctccctta

SEQ ID NO: 42549 - DNA, 33 bp, Homo sapien
gtgtgacaaaagagaacgtaacctctatccccc

SEQ ID NO: 42550 - DNA, 33 bp, Homo sapien
gtgtgacaaaagagaatgtaacctctatccccc

SEQ ID NO: 42551 - DNA, 33 bp, Homo sapien
ctgccaaaaacaagccaagtgagtaagccaaga

SEQ ID NO: 42552 - DNA, 33 bp, Homo sapien
ctgccaaaaacaagccgagtgagtaagccaaga

SEQ ID NO: 42553 - DNA, 33 bp, Homo sapien
ccactgaatccgaataaagctgaataagctccc

SEQ ID NO: 42554 - DNA, 33 bp, Homo sapien
ccactgaatccgaatagagctgaataagctccc

SEQ ID NO: 42555 - DNA, 33 bp, Homo sapien
gcctctcaaactttaacgtgcgtacagatcaca

SEQ ID NO: 42556 - DNA, 33 bp, Homo sapien
gcctctcaaactttaatgtgcgtacagatcaca

SEQ ID NO: 42557 - DNA, 33 bp, Homo sapien
gatagttttcctagaaagccagactttagctgt

SEQ ID NO: 42558 - DNA, 33 bp, Homo sapien
gatagttttcctagaaggccagactttagctgt

SEQ ID NO: 42559 - DNA, 33 bp, Homo sapien
ccttgttctctccagccctgtgcttttgcgcat

SEQ ID NO: 42560 - DNA, 33 bp, Homo sapien
ccttgttctctccagctctgtgcttttgcgcat

SEQ ID NO: 42561 - DNA, 33 bp, Homo sapien
agacaagtataaaaggacattcaagaaaaatca

SEQ ID NO: 42562 - DNA, 33 bp, Homo sapien
agacaagtataaaagggcattcaagaaaaatca

SEQ ID NO: 42563 - DNA, 33 bp, Homo sapien
gttatgacttcctcaccgctcattccctcctaa

SEQ ID NO: 42564 - DNA, 33 bp, Homo sapien
gttatgacttcctcactgctcattccctcctaa

SEQ ID NO: 42565 - DNA, 33 bp, Homo sapien
gacccaggagagctaacagtggggttctagtct

SEQ ID NO: 42566 - DNA, 33 bp, Homo sapien
gacccaggagagctaatagtggggttctagtct

SEQ ID NO: 42567 - DNA, 33 bp, Homo sapien
cctcctaaattttcctaaactccttagcccaat

SEQ ID NO: 42568 - DNA, 33 bp, Homo sapien
cctcctaaattttcctgaactccttagcccaat

SEQ ID NO: 42569 - DNA, 33 bp, Homo sapien
cctgctgcaagagatccatccgttgaaatagct

SEQ ID NO: 42570 - DNA, 33 bp, Homo sapien
cctgctgcaagagatcgatccgttgaaatagct

SEQ ID NO: 42571 - DNA, 33 bp, Homo sapien
catcaaatgctagtgcagaccagagccctaaag

SEQ ID NO: 42572 - DNA, 33 bp, Homo sapien
catcaaatgctagtgcggaccagagccctaaag

SEQ ID NO: 42573 - DNA, 33 bp, Homo sapien
gataaggaggctcaaaaacatgggatctaacac

SEQ ID NO: 42574 - DNA, 33 bp, Homo sapien
gataaggaggctcaaacacatgggatctaacac

SEQ ID NO: 42575 - DNA, 33 bp, Homo sapien
tccccatcagcattacaatggtttgtgagccag

SEQ ID NO: 42576 - DNA, 33 bp, Homo sapien
tccccatcagcattacgatggtttgtgagccag

SEQ ID NO: 42577 - DNA, 33 bp, Homo sapien
gtaccctgcggacatccagcgaccctttatttt

SEQ ID NO: 42578 - DNA, 33 bp, Homo sapien
gtaccctgcggacatcgagcgaccctttatttt

SEQ ID NO: 42579 - DNA, 33 bp, Homo sapien
tttaaaaatattgcaacgatgtctcacaaatag

SEQ ID NO: 42580 - DNA, 33 bp, Homo sapien
tttaaaaatattgcaatgatgtctcacaaatag

SEQ ID NO: 42581 - DNA, 33 bp, Homo sapien
tctcaggcagacaaaagataaacactgcccaga

SEQ ID NO: 42582 - DNA, 33 bp, Homo sapien
tctcaggcagacaaaatataaacactgcccaga

SEQ ID NO: 42583 - DNA, 33 bp, Homo sapien
gtgcatttctccaaatcatctctattaagtctc

SEQ ID NO: 42584 - DNA, 33 bp, Homo sapien
gtgcatttctccaaattatctctattaagtctc

SEQ ID NO: 42585 - DNA, 33 bp, Homo sapien
ctcatcagtggtagaactgcagccaagtgcaac

SEQ ID NO: 42586 - DNA, 33 bp, Homo sapien
ctcatcagtggtagaattgcagccaagtgcaac

SEQ ID NO: 42587 - DNA, 33 bp, Homo sapien
tataaattggtgcaaccgatttgaaggatagct

SEQ ID NO: 42588 - DNA, 33 bp, Homo sapien
tataaattggtgcaactgatttgaaggatagct

SEQ ID NO: 42589 - DNA, 33 bp, Homo sapien
aaggagccagggatcaacctctgtatctgaaga

SEQ ID NO: 42590 - DNA, 33 bp, Homo sapien
aaggagccagggatcatcctctgtatctgaaga

SEQ ID NO: 42591 - DNA, 33 bp, Homo sapien
ggccttatttctttgacggttgttggctgaagg

SEQ ID NO: 42592 - DNA, 33 bp, Homo sapien
ggccttatttctttgatggttgttggctgaagg

SEQ ID NO: 42593 - DNA, 33 bp, Homo sapien
acttttgtctgattgcactctccttctttcccc

SEQ ID NO: 42594 - DNA, 33 bp, Homo sapien
acttttgtctgattgcgctctccttctttcccc

SEQ ID NO: 42595 - DNA, 33 bp, Homo sapien
tgtccttcaaatctggcccactggtaaatgtgg

SEQ ID NO: 42596 - DNA, 33 bp, Homo sapien
tgtccttcaaatctggtccactggtaaatgtgg

SEQ ID NO: 42597 - DNA, 33 bp, Homo sapien
agtaggtgctcagtgaaattaggttaaatagtt

SEQ ID NO: 42598 - DNA, 33 bp, Homo sapien
agtaggtgctcagtgatattaggttaaatagtt

SEQ ID NO: 42599 - DNA, 33 bp, Homo sapien
tttgagactgcacaaacgctggaatataatggg

SEQ ID NO: 42600 - DNA, 33 bp, Homo sapien
tttgagactgcacaaaggctggaatataatggg

SEQ ID NO: 42601 - DNA, 33 bp, Homo sapien
atattcatttccaataccagtgtcctgacctcc

SEQ ID NO: 42602 - DNA, 33 bp, Homo sapien
atattcatttccaatagcagtgtcctgacctcc

SEQ ID NO: 42603 - DNA, 33 bp, Homo sapien
gcagtgaagtggatacagaagaaaaaatatccc

SEQ ID NO: 42604 - DNA, 33 bp, Homo sapien
gcagtgaagtggatacggaagaaaaaatatccc

SEQ ID NO: 42605 - DNA, 33 bp, Homo sapien
gccggatcttctcctacgtacctgcttcatttt

SEQ ID NO: 42606 - DNA, 33 bp, Homo sapien
gccggatcttctcctatgtacctgcttcatttt

SEQ ID NO: 42607 - DNA, 33 bp, Homo sapien
aaactcagtacaaacacgcaagcggccctttag

SEQ ID NO: 42608 - DNA, 33 bp, Homo sapien
aaactcagtacaaacatgcaagcggccctttag

SEQ ID NO: 42609 - DNA, 33 bp, Homo sapien
ggacaagatctagataacagtgtgtgggtgcag

SEQ ID NO: 42610 - DNA, 33 bp, Homo sapien
ggacaagatctagatagcagtgtgtgggtgcag

SEQ ID NO: 42611 - DNA, 33 bp, Homo sapien
attcagggatacaataaggagaaagatacacag

SEQ ID NO: 42612 - DNA, 33 bp, Homo sapien
attcagggatacaatagggagaaagatacacag

SEQ ID NO: 42613 - DNA, 33 bp, Homo sapien
ctatttcctggagtcaaatttaaaagagagatg

SEQ ID NO: 42614 - DNA, 33 bp, Homo sapien
ctatttcctggagtcagatttaaaagagagatg

SEQ ID NO: 42615 - DNA, 33 bp, Homo sapien
acagtttgtgcactcaaatggtgtcaaaccaca

SEQ ID NO: 42616 - DNA, 33 bp, Homo sapien
acagtttgtgcactcagatggtgtcaaaccaca

SEQ ID NO: 42617 - DNA, 33 bp, Homo sapien
caaagggcagtaagccagatgccttctttcccc

SEQ ID NO: 42618 - DNA, 33 bp, Homo sapien
caaagggcagtaagccggatgccttctttcccc

SEQ ID NO: 42619 - DNA, 33 bp, Homo sapien
aaatcaaggaacttggccaaatatcagcattgg

SEQ ID NO: 42620 - DNA, 33 bp, Homo sapien
aaatcaaggaacttggtcaaatatcagcattgg

SEQ ID NO: 42621 - DNA, 33 bp, Homo sapien
cattctaagtatgtcaatatcaaagagaagtgg

SEQ ID NO: 42622 - DNA, 33 bp, Homo sapien
cattctaagtatgtcagtatcaaagagaagtgg

SEQ ID NO: 42623 - DNA, 33 bp, Homo sapien
gtactcagagggacacagatgattgaggagatc

SEQ ID NO: 42624 - DNA, 33 bp, Homo sapien
gtactcagagggacactgatgattgaggagatc

SEQ ID NO: 42625 - DNA, 33 bp, Homo sapien
aagtcctgctctaccccctctgcagggctaggg

SEQ ID NO: 42626 - DNA, 33 bp, Homo sapien
aagtcctgctctaccctctctgcagggctaggg

SEQ ID NO: 42627 - DNA, 33 bp, Homo sapien
gatggaaacaaaatgccagtattaatccaaaag

SEQ ID NO: 42628 - DNA, 33 bp, Homo sapien
gatggaaacaaaatgctagtattaatccaaaag

SEQ ID NO: 42629 - DNA, 33 bp, Homo sapien
aaccagattgtggaaaaccagctgagccagtct

SEQ ID NO: 42630 - DNA, 33 bp, Homo sapien
aaccagattgtggaaagccagctgagccagtct

SEQ ID NO: 42631 - DNA, 33 bp, Homo sapien
gaaaatgggttttgcccggagccttaagattgg

SEQ ID NO: 42632 - DNA, 33 bp, Homo sapien
gaaaatgggttttgcctggagccttaagattgg

SEQ ID NO: 42633 - DNA, 33 bp, Homo sapien
acaagtcaaagcttacagaactggtctggctct

SEQ ID NO: 42634 - DNA, 33 bp, Homo sapien
acaagtcaaagcttacggaactggtctggctct

SEQ ID NO: 42635 - DNA, 33 bp, Homo sapien
tttgtgagggtaaataaatatctgtgtttctgt

SEQ ID NO: 42636 - DNA, 33 bp, Homo sapien
tttgtgagggtaaatatatatctgtgtttctgt

SEQ ID NO: 42637 - DNA, 33 bp, Homo sapien
catctgggaaacggacagagcctcttaaaatgc

SEQ ID NO: 42638 - DNA, 33 bp, Homo sapien
catctgggaaacggacggagcctcttaaaatgc

SEQ ID NO: 42639 - DNA, 33 bp, Homo sapien
gggaaagacagtgtccaaaagcgagagatttcc

SEQ ID NO: 42640 - DNA, 33 bp, Homo sapien
gggaaagacagtgtccgaaagcgagagatttcc

SEQ ID NO: 42641 - DNA, 33 bp, Homo sapien
ttaaaacaaggaacagaaacctggaatcatcct

SEQ ID NO: 42642 - DNA, 33 bp, Homo sapien
ttaaaacaaggaacagtaacctggaatcatcct

SEQ ID NO: 42643 - DNA, 33 bp, Homo sapien
gcttgcattgtattaaacttcctgcaaataaca

SEQ ID NO: 42644 - DNA, 33 bp, Homo sapien
gcttgcattgtattaaccttcctgcaaataaca

SEQ ID NO: 42645 - DNA, 33 bp, Homo sapien
atgaaaccgtatatggaaaactcacaaccaaca

SEQ ID NO: 42646 - DNA, 33 bp, Homo sapien
atgaaaccgtatatggcaaactcacaaccaaca

SEQ ID NO: 42647 - DNA, 33 bp, Homo sapien
ggtactggtctaaaaacaggtacgtagtcaaat

SEQ ID NO: 42648 - DNA, 33 bp, Homo sapien
ggtactggtctaaaaataggtacgtagtcaaat

SEQ ID NO: 42649 - DNA, 33 bp, Homo sapien
tttaatgacaacttaacgagaggagttaataag

SEQ ID NO: 42650 - DNA, 33 bp, Homo sapien
tttaatgacaacttaatgagaggagttaataag

SEQ ID NO: 42651 - DNA, 33 bp, Homo sapien
agctcaaagagagaaacggtgctcaggcaaaaa

SEQ ID NO: 42652 - DNA, 33 bp, Homo sapien
agctcaaagagagaaatggtgctcaggcaaaaa

SEQ ID NO: 42653 - DNA, 33 bp, Homo sapien
gaggcagtaaatggtgcaagtatgaaagagttg

SEQ ID NO: 42654 - DNA, 33 bp, Homo sapien
gaggcagtaaatggtgtaagtatgaaagagttg

SEQ ID NO: 42655 - DNA, 33 bp, Homo sapien
cttgctctacttttggacaacaagaatggttgg

SEQ ID NO: 42656 - DNA, 33 bp, Homo sapien
cttgctctacttttgggcaacaagaatggttgg

SEQ ID NO: 42657 - DNA, 33 bp, Homo sapien
gggtgactctctaagaaaaggatgaaagtacag

SEQ ID NO: 42658 - DNA, 33 bp, Homo sapien
gggtgactctctaagacaaggatgaaagtacag

SEQ ID NO: 42659 - DNA, 33 bp, Homo sapien
aatgccttcattgtgcaacagcgtggtccctgg

SEQ ID NO: 42660 - DNA, 33 bp, Homo sapien
aatgccttcattgtgccacagcgtggtccctgg

SEQ ID NO: 42661 - DNA, 33 bp, Homo sapien
ggtcaggccaagacagcaaagcactgacagggg

SEQ ID NO: 42662 - DNA, 33 bp, Homo sapien
ggtcaggccaagacaggaaagcactgacagggg

SEQ ID NO: 42663 - DNA, 33 bp, Homo sapien
tggtagagtggtctcacatgataaactgttaat

SEQ ID NO: 42664 - DNA, 33 bp, Homo sapien
tggtagagtggtctcagatgataaactgttaat

SEQ ID NO: 42665 - DNA, 33 bp, Homo sapien
caggtcttgactcctcactcagcagggtctggg

SEQ ID NO: 42666 - DNA, 33 bp, Homo sapien
caggtcttgactcctcgctcagcagggtctggg

SEQ ID NO: 42667 - DNA, 33 bp, Homo sapien
accttgcctgatgtacacgaatgttgtgaagat

SEQ ID NO: 42668 - DNA, 33 bp, Homo sapien
accttgcctgatgtacgcgaatgttgtgaagat

SEQ ID NO: 42669 - DNA, 33 bp, Homo sapien
gataggaactgaatccacaccatagaaagaact

SEQ ID NO: 42670 - DNA, 33 bp, Homo sapien
gataggaactgaatccgcaccatagaaagaact

SEQ ID NO: 42671 - DNA, 33 bp, Homo sapien
aaaccacagcctgttacctgagtgaggctgcat

SEQ ID NO: 42672 - DNA, 33 bp, Homo sapien
aaaccacagcctgttatctgagtgaggctgcat

SEQ ID NO: 42673 - DNA, 33 bp, Homo sapien
tgtataatctccaaagacatatatatccaacag

SEQ ID NO: 42674 - DNA, 33 bp, Homo sapien
tgtataatctccaaaggcatatatatccaacag

SEQ ID NO: 42675 - DNA, 33 bp, Homo sapien
ctctgttcccagcttacgatatatcctggctcc

SEQ ID NO: 42676 - DNA, 33 bp, Homo sapien
ctctgttcccagcttatgatatatcctggctcc

SEQ ID NO: 42677 - DNA, 33 bp, Homo sapien
ggaatctggaacctgacgtagcctcaggccaaa

SEQ ID NO: 42678 - DNA, 33 bp, Homo sapien
ggaatctggaacctgatgtagcctcaggccaaa

SEQ ID NO: 42679 - DNA, 33 bp, Homo sapien
agaagttcaaaatcaacgtactagcagacttgt

SEQ ID NO: 42680 - DNA, 33 bp, Homo sapien
agaagttcaaaatcaaggtactagcagacttgt

SEQ ID NO: 42681 - DNA, 33 bp, Homo sapien
tttattcccactcaaacggagacaaatattgtg

SEQ ID NO: 42682 - DNA, 33 bp, Homo sapien
tttattcccactcaaatggagacaaatattgtg

SEQ ID NO: 42683 - DNA, 33 bp, Homo sapien
gggtatatttggacaccaataactacttccttg

SEQ ID NO: 42684 - DNA, 33 bp, Homo sapien
gggtatatttggacactaataactacttccttg

SEQ ID NO: 42685 - DNA, 33 bp, Homo sapien
caaaatgtactgtctacagcattacctggatat

SEQ ID NO: 42686 - DNA, 33 bp, Homo sapien
caaaatgtactgtctatagcattacctggatat

SEQ ID NO: 42687 - DNA, 33 bp, Homo sapien
cacttttctacattgcccctacttgcagacatc

SEQ ID NO: 42688 - DNA, 33 bp, Homo sapien
cacttttctacattgcgcctacttgcagacatc

SEQ ID NO: 42689 - DNA, 33 bp, Homo sapien
gcaggatttgaggccaggcagtccaacttcaga

SEQ ID NO: 42690 - DNA, 33 bp, Homo sapien
gcaggatttgaggccatgcagtccaacttcaga

SEQ ID NO: 42691 - DNA, 33 bp, Homo sapien
tgaaatgtttatcttcacaatttaaatgcttca

SEQ ID NO: 42692 - DNA, 33 bp, Homo sapien
tgaaatgtttatcttctcaatttaaatgcttca

SEQ ID NO: 42693 - DNA, 33 bp, Homo sapien
tagccttagcagaaaccaacacatcttgaggac

SEQ ID NO: 42694 - DNA, 33 bp, Homo sapien
tagccttagcagaaactaacacatcttgaggac

SEQ ID NO: 42695 - DNA, 33 bp, Homo sapien
aacattagtgatagaaaaatatcaggtctggcc

SEQ ID NO: 42696 - DNA, 33 bp, Homo sapien
aacattagtgatagaacaatatcaggtctggcc

SEQ ID NO: 42697 - DNA, 33 bp, Homo sapien
tcttgaatgatgtgtgcttcacattgtggccga

SEQ ID NO: 42698 - DNA, 33 bp, Homo sapien
tcttgaatgatgtgtggttcacattgtggccga

SEQ ID NO: 42699 - DNA, 33 bp, Homo sapien
aaatagctctgccaaccggtgtcatttctctat

SEQ ID NO: 42700 - DNA, 33 bp, Homo sapien
aaatagctctgccaactggtgtcatttctctat

SEQ ID NO: 42701 - DNA, 33 bp, Homo sapien
cattatttctgaatctcaatccagtattccaac

SEQ ID NO: 42702 - DNA, 33 bp, Homo sapien
cattatttctgaatcttaatccagtattccaac

SEQ ID NO: 42703 - DNA, 33 bp, Homo sapien
tgtccagaaggaaacaagatactctagatgtgg

SEQ ID NO: 42704 - DNA, 33 bp, Homo sapien
tgtccagaaggaaacacgatactctagatgtgg

SEQ ID NO: 42705 - DNA, 33 bp, Homo sapien
cacttaggtggggacacaatagctattttcaaa

SEQ ID NO: 42706 - DNA, 33 bp, Homo sapien
cacttaggtggggacataatagctattttcaaa

SEQ ID NO: 42707 - DNA, 33 bp, Homo sapien
tatgatgttagtcagacgggcctctttctgact

SEQ ID NO: 42708 - DNA, 33 bp, Homo sapien
tatgatgttagtcagatgggcctctttctgact

SEQ ID NO: 42709 - DNA, 33 bp, Homo sapien
tcacaacccttgagagaccaagcaatgccccaa

SEQ ID NO: 42710 - DNA, 33 bp, Homo sapien
tcacaacccttgagagtccaagcaatgccccaa

SEQ ID NO: 42711 - DNA, 33 bp, Homo sapien
tgaacaaggtaaaatccaaccaagaggctgccc

SEQ ID NO: 42712 - DNA, 33 bp, Homo sapien
tgaacaaggtaaaatctaaccaagaggctgccc

SEQ ID NO: 42713 - DNA, 33 bp, Homo sapien
cttgttcataattctgaagtaagtctcagcaca

SEQ ID NO: 42714 - DNA, 33 bp, Homo sapien
cttgttcataattctggagtaagtctcagcaca

SEQ ID NO: 42715 - DNA, 33 bp, Homo sapien
ttgctggagaaatgagaagccacagaattcctc

SEQ ID NO: 42716 - DNA, 33 bp, Homo sapien
ttgctggagaaatgaggagccacagaattcctc

SEQ ID NO: 42717 - DNA, 33 bp, Homo sapien
ctaaaagcacttgaaaggcccatgatagaaata

SEQ ID NO: 42718 - DNA, 33 bp, Homo sapien
ctaaaagcacttgaaatgcccatgatagaaata

SEQ ID NO: 42719 - DNA, 33 bp, Homo sapien
aatagaacatgatcctgaaatgagctgggattt

SEQ ID NO: 42720 - DNA, 33 bp, Homo sapien
aatagaacatgatccttaaatgagctgggattt

SEQ ID NO: 42721 - DNA, 33 bp, Homo sapien
agctctagaagaagtacatcagactttattagg

SEQ ID NO: 42722 - DNA, 33 bp, Homo sapien
agctctagaagaagtatatcagactttattagg

SEQ ID NO: 42723 - DNA, 33 bp, Homo sapien
agtgccctttgattctcaagctgaggtcagcca

SEQ ID NO: 42724 - DNA, 33 bp, Homo sapien
agtgccctttgattctgaagctgaggtcagcca

SEQ ID NO: 42725 - DNA, 33 bp, Homo sapien
tgttacaacacataagactataatgcgattcag

SEQ ID NO: 42726 - DNA, 33 bp, Homo sapien
tgttacaacacataagtctataatgcgattcag

SEQ ID NO: 42727 - DNA, 33 bp, Homo sapien
tggcttaactgacacaggggattctagtgcttt

SEQ ID NO: 42728 - DNA, 33 bp, Homo sapien
tggcttaactgacacatgggattctagtgcttt

SEQ ID NO: 42729 - DNA, 33 bp, Homo sapien
ttggtagaggtgcagcaatttttgcagtgaaac

SEQ ID NO: 42730 - DNA, 33 bp, Homo sapien
ttggtagaggtgcagcgatttttgcagtgaaac

SEQ ID NO: 42731 - DNA, 33 bp, Homo sapien
taagtctcttgctaaagattgagaagtgcggtg

SEQ ID NO: 42732 - DNA, 33 bp, Homo sapien
taagtctcttgctaaatattgagaagtgcggtg

SEQ ID NO: 42733 - DNA, 33 bp, Homo sapien
ataaatttctcagtaaagaacaacttcacattt

SEQ ID NO: 42734 - DNA, 33 bp, Homo sapien
ataaatttctcagtaaggaacaacttcacattt

SEQ ID NO: 42735 - DNA, 33 bp, Homo sapien
gagtaaaattccagtcaacaagaatagaaactt

SEQ ID NO: 42736 - DNA, 33 bp, Homo sapien
gagtaaaattccagtcgacaagaatagaaactt

SEQ ID NO: 42737 - DNA, 33 bp, Homo sapien
gttaccatcagtggtaagttgtttgtttgtttt

SEQ ID NO: 42738 - DNA, 33 bp, Homo sapien
gttaccatcagtggtatgttgtttgtttgtttt

SEQ ID NO: 42739 - DNA, 33 bp, Homo sapien
atgcacacagtgaggacgcagtcatacttgctg

SEQ ID NO: 42740 - DNA, 33 bp, Homo sapien
atgcacacagtgaggatgcagtcatacttgctg

SEQ ID NO: 42741 - DNA, 33 bp, Homo sapien
catggttagcttctgaacgacatttttaggtct

SEQ ID NO: 42742 - DNA, 33 bp, Homo sapien
catggttagcttctgatcgacatttttaggtct

SEQ ID NO: 42743 - DNA, 33 bp, Homo sapien
atccaatcacttcttacagtccactgctccctc

SEQ ID NO: 42744 - DNA, 33 bp, Homo sapien
atccaatcacttcttatagtccactgctccctc

SEQ ID NO: 42745 - DNA, 33 bp, Homo sapien
tcttcattgtaactacccaacctcatcagaact

SEQ ID NO: 42746 - DNA, 33 bp, Homo sapien
tcttcattgtaactactcaacctcatcagaact

SEQ ID NO: 42747 - DNA, 33 bp, Homo sapien
aggagaagaatatcaaaggatcatcctaacatt

SEQ ID NO: 42748 - DNA, 33 bp, Homo sapien
aggagaagaatatcaagggatcatcctaacatt

SEQ ID NO: 42749 - DNA, 33 bp, Homo sapien
agaggccagggaacaccgtgaatggccctttct

SEQ ID NO: 42750 - DNA, 33 bp, Homo sapien
agaggccagggaacactgtgaatggccctttct

SEQ ID NO: 42751 - DNA, 33 bp, Homo sapien
gttgttggattcaacaagtattaactgagcacc

SEQ ID NO: 42752 - DNA, 33 bp, Homo sapien
gttgttggattcaacaggtattaactgagcacc

SEQ ID NO: 42753 - DNA, 33 bp, Homo sapien
agagacagctagcctcaacatcattcctgatct

SEQ ID NO: 42754 - DNA, 33 bp, Homo sapien
agagacagctagcctcgacatcattcctgatct

SEQ ID NO: 42755 - DNA, 33 bp, Homo sapien
gagtctccactgagaacttacctccccatcaag

SEQ ID NO: 42756 - DNA, 33 bp, Homo sapien
gagtctccactgagaagttacctccccatcaag

SEQ ID NO: 42757 - DNA, 33 bp, Homo sapien
atctgagtgacaaagacagtcttcttagcttct

SEQ ID NO: 42758 - DNA, 33 bp, Homo sapien
atctgagtgacaaagagagtcttcttagcttct

SEQ ID NO: 42759 - DNA, 33 bp, Homo sapien
aatgcttgtaaatgaaaatgacacctgcgtgta

SEQ ID NO: 42760 - DNA, 33 bp, Homo sapien
aatgcttgtaaatgaatatgacacctgcgtgta

SEQ ID NO: 42761 - DNA, 33 bp, Homo sapien
ccattttatactcagactcaaagtgcatcagga

SEQ ID NO: 42762 - DNA, 33 bp, Homo sapien
ccattttatactcagattcaaagtgcatcagga

SEQ ID NO: 42763 - DNA, 33 bp, Homo sapien
gctgtccttccaacttaaacctgaggcaatgta

SEQ ID NO: 42764 - DNA, 33 bp, Homo sapien
gctgtccttccaacttgaacctgaggcaatgta

SEQ ID NO: 42765 - DNA, 33 bp, Homo sapien
gacaaagaactcagcccaattagtctaaagcca

SEQ ID NO: 42766 - DNA, 33 bp, Homo sapien
gacaaagaactcagcctaattagtctaaagcca

SEQ ID NO: 42767 - DNA, 33 bp, Homo sapien
caaggcttctcaccaggaagtggaattggaaat

SEQ ID NO: 42768 - DNA, 33 bp, Homo sapien
caaggcttctcaccagtaagtggaattggaaat

SEQ ID NO: 42769 - DNA, 33 bp, Homo sapien
gagctggagccaagaaagtgaaaaggaagtgag

SEQ ID NO: 42770 - DNA, 33 bp, Homo sapien
gagctggagccaagaaggtgaaaaggaagtgag

SEQ ID NO: 42771 - DNA, 33 bp, Homo sapien
ccttactatctagcacaaggccaggacatggta

SEQ ID NO: 42772 - DNA, 33 bp, Homo sapien
ccttactatctagcacgaggccaggacatggta

SEQ ID NO: 42773 - DNA, 33 bp, Homo sapien
gtgtttcaaacctttcaactgacttaaccaatt

SEQ ID NO: 42774 - DNA, 33 bp, Homo sapien
gtgtttcaaacctttcgactgacttaaccaatt

SEQ ID NO: 42775 - DNA, 33 bp, Homo sapien
cctgtcttgcttccacaaattatcctcataact

SEQ ID NO: 42776 - DNA, 33 bp, Homo sapien
cctgtcttgcttccaccaattatcctcataact

SEQ ID NO: 42777 - DNA, 33 bp, Homo sapien
aattcttttgttctcaaatgactactttctccc

SEQ ID NO: 42778 - DNA, 33 bp, Homo sapien
aattcttttgttctcagatgactactttctccc

SEQ ID NO: 42779 - DNA, 33 bp, Homo sapien
ctgtgcacacaattagaagccactatcagcggt

SEQ ID NO: 42780 - DNA, 33 bp, Homo sapien
ctgtgcacacaattagcagccactatcagcggt

SEQ ID NO: 42781 - DNA, 33 bp, Homo sapien
cagtcaaattggattacgcatgcttccgacctt

SEQ ID NO: 42782 - DNA, 33 bp, Homo sapien
cagtcaaattggattatgcatgcttccgacctt

SEQ ID NO: 42783 - DNA, 33 bp, Homo sapien
atccaacaatccactactaggtgtgtacccaga

SEQ ID NO: 42784 - DNA, 33 bp, Homo sapien
atccaacaatccactattaggtgtgtacccaga

SEQ ID NO: 42785 - DNA, 33 bp, Homo sapien
cctgtgatagatatcaaaacagtatcagacaca

SEQ ID NO: 42786 - DNA, 33 bp, Homo sapien
cctgtgatagatatcagaacagtatcagacaca

SEQ ID NO: 42787 - DNA, 33 bp, Homo sapien
tttgtctgacctgtaaactgggaagctgaaatt

SEQ ID NO: 42788 - DNA, 33 bp, Homo sapien
tttgtctgacctgtaatctgggaagctgaaatt

SEQ ID NO: 42789 - DNA, 33 bp, Homo sapien
tatggtagtggaacaaagattctaacatgaact

SEQ ID NO: 42790 - DNA, 33 bp, Homo sapien
tatggtagtggaacaaggattctaacatgaact

SEQ ID NO: 42791 - DNA, 33 bp, Homo sapien
tcctatcatttaattacggcttagctcccagac

SEQ ID NO: 42792 - DNA, 33 bp, Homo sapien
tcctatcatttaattatggcttagctcccagac

SEQ ID NO: 42793 - DNA, 33 bp, Homo sapien
tttgtttagcagtcacagacaatcaatagagca

SEQ ID NO: 42794 - DNA, 33 bp, Homo sapien
tttgtttagcagtcacggacaatcaatagagca

SEQ ID NO: 42795 - DNA, 33 bp, Homo sapien
tcatattcccattaacaccttcttacacttgtc

SEQ ID NO: 42796 - DNA, 33 bp, Homo sapien
tcatattcccattaaccccttcttacacttgtc

SEQ ID NO: 42797 - DNA, 33 bp, Homo sapien
attacaggagagggagaaatgagctctaagatt

SEQ ID NO: 42798 - DNA, 33 bp, Homo sapien
attacaggagagggagcaatgagctctaagatt

SEQ ID NO: 42799 - DNA, 33 bp, Homo sapien
ctcttttgagatgttgaagactctctcactcca

SEQ ID NO: 42800 - DNA, 33 bp, Homo sapien
ctcttttgagatgttggagactctctcactcca

SEQ ID NO: 42801 - DNA, 33 bp, Homo sapien
tggggttcttatgaagaagaatacatctaatta

SEQ ID NO: 42802 - DNA, 33 bp, Homo sapien
tggggttcttatgaaggagaatacatctaatta

SEQ ID NO: 42803 - DNA, 33 bp, Homo sapien
ggcctgaatgctcctgcactgggcactcctgtc

SEQ ID NO: 42804 - DNA, 33 bp, Homo sapien
ggcctgaatgctcctgtactgggcactcctgtc

SEQ ID NO: 42805 - DNA, 33 bp, Homo sapien
ctgtcagatctggagacaggagcagcgtaacag

SEQ ID NO: 42806 - DNA, 33 bp, Homo sapien
ctgtcagatctggagataggagcagcgtaacag

SEQ ID NO: 42807 - DNA, 33 bp, Homo sapien
gggcagaaaggacttcacgaggcctcaccagag

SEQ ID NO: 42808 - DNA, 33 bp, Homo sapien
gggcagaaaggacttcgcgaggcctcaccagag

SEQ ID NO: 42809 - DNA, 33 bp, Homo sapien
aaaatccaacaagtcaggaaaccgaggcccaca

SEQ ID NO: 42810 - DNA, 33 bp, Homo sapien
aaaatccaacaagtcatgaaaccgaggcccaca

SEQ ID NO: 42811 - DNA, 33 bp, Homo sapien
ctttatcaaaaaagtacatgacacaggcctgcc

SEQ ID NO: 42812 - DNA, 33 bp, Homo sapien
ctttatcaaaaaagtatatgacacaggcctgcc

SEQ ID NO: 42813 - DNA, 33 bp, Homo sapien
attatgagaatctccactgaacttataaaatat

SEQ ID NO: 42814 - DNA, 33 bp, Homo sapien
attatgagaatctccattgaacttataaaatat

SEQ ID NO: 42815 - DNA, 33 bp, Homo sapien
aaaatggaacttggagaaattcgaacaagaggt

SEQ ID NO: 42816 - DNA, 33 bp, Homo sapien
aaaatggaacttggagtaattcgaacaagaggt

SEQ ID NO: 42817 - DNA, 33 bp, Homo sapien
ttttattgattaggaacggattggaggcaaaac

SEQ ID NO: 42818 - DNA, 33 bp, Homo sapien
ttttattgattaggaatggattggaggcaaaac

SEQ ID NO: 42819 - DNA, 33 bp, Homo sapien
atcctggtttctatcacgggcgcaacgccacgg

SEQ ID NO: 42820 - DNA, 33 bp, Homo sapien
atcctggtttctatcatgggcgcaacgccacgg

SEQ ID NO: 42821 - DNA, 33 bp, Homo sapien
agaacacaagatttaccctctaaggtcttggtt

SEQ ID NO: 42822 - DNA, 33 bp, Homo sapien
agaacacaagatttactctctaaggtcttggtt

SEQ ID NO: 42823 - DNA, 33 bp, Homo sapien
gagaaaagctgaaccaccttgcaggaaagcaag

SEQ ID NO: 42824 - DNA, 33 bp, Homo sapien
gagaaaagctgaaccatcttgcaggaaagcaag

SEQ ID NO: 42825 - DNA, 33 bp, Homo sapien
gagacatgagaaaagaacccgtgaaatctggag

SEQ ID NO: 42826 - DNA, 33 bp, Homo sapien
gagacatgagaaaagatcccgtgaaatctggag

SEQ ID NO: 42827 - DNA, 33 bp, Homo sapien
tggagtgaatagtgggaaatgcatcatctttgg

SEQ ID NO: 42828 - DNA, 33 bp, Homo sapien
tggagtgaatagtggggaatgcatcatctttgg

SEQ ID NO: 42829 - DNA, 33 bp, Homo sapien
agtggaactgaaggacaacctgcagccgagaag

SEQ ID NO: 42830 - DNA, 33 bp, Homo sapien
agtggaactgaaggacgacctgcagccgagaag

SEQ ID NO: 42831 - DNA, 33 bp, Homo sapien
aggaggtctttatggaaatatgtcaggcccttc

SEQ ID NO: 42832 - DNA, 33 bp, Homo sapien
aggaggtctttatggagatatgtcaggcccttc

SEQ ID NO: 42833 - DNA, 33 bp, Homo sapien
tatgtaccttgtctccagctcataccatctttc

SEQ ID NO: 42834 - DNA, 33 bp, Homo sapien
tatgtaccttgtctccggctcataccatctttc

SEQ ID NO: 42835 - DNA, 33 bp, Homo sapien
ctgcaccctagaggagaaccgttcaggacaggc

SEQ ID NO: 42836 - DNA, 33 bp, Homo sapien
ctgcaccctagaggagcaccgttcaggacaggc

SEQ ID NO: 42837 - DNA, 33 bp, Homo sapien
cactccagaagagacacgaggtgccggaatggg

SEQ ID NO: 42838 - DNA, 33 bp, Homo sapien
cactccagaagagacatgaggtgccggaatggg

SEQ ID NO: 42839 - DNA, 33 bp, Homo sapien
gggaaaataggctccagctagggtgaacatgtt

SEQ ID NO: 42840 - DNA, 33 bp, Homo sapien
gggaaaataggctccatctagggtgaacatgtt

SEQ ID NO: 42841 - DNA, 33 bp, Homo sapien
cagtctgggaatgccaaatgttgagcccaggct

SEQ ID NO: 42842 - DNA, 33 bp, Homo sapien
cagtctgggaatgccagatgttgagcccaggct

SEQ ID NO: 42843 - DNA, 33 bp, Homo sapien
gaacagggtattgcagaacaaggagccaggcac

SEQ ID NO: 42844 - DNA, 33 bp, Homo sapien
gaacagggtattgcaggacaaggagccaggcac

SEQ ID NO: 42845 - DNA, 33 bp, Homo sapien
ctgtttcacattctcaaggcgtttgtacattct

SEQ ID NO: 42846 - DNA, 33 bp, Homo sapien
ctgtttcacattctcatggcgtttgtacattct

SEQ ID NO: 42847 - DNA, 33 bp, Homo sapien
tcactagaaggctcacaagtcaagttgaggttt

SEQ ID NO: 42848 - DNA, 33 bp, Homo sapien
tcactagaaggctcaccagtcaagttgaggttt

SEQ ID NO: 42849 - DNA, 33 bp, Homo sapien
aaacttcagattccacaatgctgaccaacagcc

SEQ ID NO: 42850 - DNA, 33 bp, Homo sapien
aaacttcagattccacgatgctgaccaacagcc

SEQ ID NO: 42851 - DNA, 33 bp, Homo sapien
gttcaaacgcctctgacatttacaaaagggcag

SEQ ID NO: 42852 - DNA, 33 bp, Homo sapien
gttcaaacgcctctgatatttacaaaagggcag

SEQ ID NO: 42853 - DNA, 33 bp, Homo sapien
tcattgtcctcatgcaatcattagcatccagct

SEQ ID NO: 42854 - DNA, 33 bp, Homo sapien
tcattgtcctcatgcattcattagcatccagct

SEQ ID NO: 42855 - DNA, 33 bp, Homo sapien
gtgttcataaaaagcaatgagtcctttctatac

SEQ ID NO: 42856 - DNA, 33 bp, Homo sapien
gtgttcataaaaagcagtgagtcctttctatac

SEQ ID NO: 42857 - DNA, 33 bp, Homo sapien
ccagtgctggatacaacagtgagcagaattctg

SEQ ID NO: 42858 - DNA, 33 bp, Homo sapien
ccagtgctggatacaatagtgagcagaattctg

SEQ ID NO: 42859 - DNA, 33 bp, Homo sapien
catagatttggaatataatacaggtgaggaata

SEQ ID NO: 42860 - DNA, 33 bp, Homo sapien
catagatttggaatatgatacaggtgaggaata

SEQ ID NO: 42861 - DNA, 33 bp, Homo sapien
tggaccagaactcacaatacagaaaatagtaga

SEQ ID NO: 42862 - DNA, 33 bp, Homo sapien
tggaccagaactcacagtacagaaaatagtaga

SEQ ID NO: 42863 - DNA, 33 bp, Homo sapien
ctgaaaagtcccacgaactgttgtctataaact

SEQ ID NO: 42864 - DNA, 33 bp, Homo sapien
ctgaaaagtcccacgatctgttgtctataaact

SEQ ID NO: 42865 - DNA, 33 bp, Homo sapien
tcggcattgtacagatcacctagatagaaaatt

SEQ ID NO: 42866 - DNA, 33 bp, Homo sapien
tcggcattgtacagattacctagatagaaaatt

SEQ ID NO: 42867 - DNA, 33 bp, Homo sapien
cattacgttgctatggacaccgagtttccaggt

SEQ ID NO: 42868 - DNA, 33 bp, Homo sapien
cattacgttgctatggtcaccgagtttccaggt

SEQ ID NO: 42869 - DNA, 33 bp, Homo sapien
agctactgttattttaggatagcacacttccct

SEQ ID NO: 42870 - DNA, 33 bp, Homo sapien
agctactgttattttatgatagcacacttccct

SEQ ID NO: 42871 - DNA, 33 bp, Homo sapien
ttgggagagcaaattcaaaaggtcgtaggaaca

SEQ ID NO: 42872 - DNA, 33 bp, Homo sapien
ttgggagagcaaattcgaaaggtcgtaggaaca

SEQ ID NO: 42873 - DNA, 33 bp, Homo sapien
tcaaagatccttgacaagcttggtatggacagt

SEQ ID NO: 42874 - DNA, 33 bp, Homo sapien
tcaaagatccttgacaggcttggtatggacagt

SEQ ID NO: 42875 - DNA, 33 bp, Homo sapien
catcattttttttcaaacatccagctttatatt

SEQ ID NO: 42876 - DNA, 33 bp, Homo sapien
catcattttttttcaagcatccagctttatatt

SEQ ID NO: 42877 - DNA, 33 bp, Homo sapien
tctaacagcagttaaaggtgcttctttagaagg

SEQ ID NO: 42878 - DNA, 33 bp, Homo sapien
tctaacagcagttaaatgtgcttctttagaagg

SEQ ID NO: 42879 - DNA, 33 bp, Homo sapien
tctatgagacgggaaacgtgctagcagaactct

SEQ ID NO: 42880 - DNA, 33 bp, Homo sapien
tctatgagacgggaaatgtgctagcagaactct

SEQ ID NO: 42881 - DNA, 33 bp, Homo sapien
tctcctcgctaaggaaaccttttgggttaagag

SEQ ID NO: 42882 - DNA, 33 bp, Homo sapien
tctcctcgctaaggaagccttttgggttaagag

SEQ ID NO: 42883 - DNA, 33 bp, Homo sapien
ctctggaccagagataaccacagggtctgagag

SEQ ID NO: 42884 - DNA, 33 bp, Homo sapien
ctctggaccagagatagccacagggtctgagag

SEQ ID NO: 42885 - DNA, 33 bp, Homo sapien
atagtctgataccaaaaggccagaagatgcagg

SEQ ID NO: 42886 - DNA, 33 bp, Homo sapien
atagtctgataccaaagggccagaagatgcagg

SEQ ID NO: 42887 - DNA, 33 bp, Homo sapien
gattttgcctcacagaactctgtcttctcctct

SEQ ID NO: 42888 - DNA, 33 bp, Homo sapien
gattttgcctcacagacctctgtcttctcctct

SEQ ID NO: 42889 - DNA, 33 bp, Homo sapien
aaaaatcttgaaaacaccacattatatatagaa

SEQ ID NO: 42890 - DNA, 33 bp, Homo sapien
aaaaatcttgaaaacagcacattatatatagaa

SEQ ID NO: 42891 - DNA, 33 bp, Homo sapien
gggggagggaaccagcagattaaatgctcgtct

SEQ ID NO: 42892 - DNA, 33 bp, Homo sapien
gggggagggaaccagcggattaaatgctcgtct

SEQ ID NO: 42893 - DNA, 33 bp, Homo sapien
aggatgaggttgttaactgggcctgtgcaggct

SEQ ID NO: 42894 - DNA, 33 bp, Homo sapien
aggatgaggttgttaattgggcctgtgcaggct

SEQ ID NO: 42895 - DNA, 33 bp, Homo sapien
actagtcaggagttgaactggtttgagcttcaa

SEQ ID NO: 42896 - DNA, 33 bp, Homo sapien
actagtcaggagttgagctggtttgagcttcaa

SEQ ID NO: 42897 - DNA, 33 bp, Homo sapien
cttaagttgtatctcacatattcagaaacttag

SEQ ID NO: 42898 - DNA, 33 bp, Homo sapien
cttaagttgtatctcatatattcagaaacttag

SEQ ID NO: 42899 - DNA, 33 bp, Homo sapien
aatcactccagggtcagataccagaaaaataga

SEQ ID NO: 42900 - DNA, 33 bp, Homo sapien
aatcactccagggtcatataccagaaaaataga

SEQ ID NO: 42901 - DNA, 33 bp, Homo sapien
caacactgttaacccaccttagcagtcagactt

SEQ ID NO: 42902 - DNA, 33 bp, Homo sapien
caacactgttaacccatcttagcagtcagactt

SEQ ID NO: 42903 - DNA, 33 bp, Homo sapien
tactgatgatgatgccacagatgaaataaacaa

SEQ ID NO: 42904 - DNA, 33 bp, Homo sapien
tactgatgatgatgccgcagatgaaataaacaa

SEQ ID NO: 42905 - DNA, 33 bp, Homo sapien
ctgtttgtatactacactctcaaacccaggcaa

SEQ ID NO: 42906 - DNA, 33 bp, Homo sapien
ctgtttgtatactacattctcaaacccaggcaa

SEQ ID NO: 42907 - DNA, 33 bp, Homo sapien
ggattgagtttcaggcaagggtaggatgtccaa

SEQ ID NO: 42908 - DNA, 33 bp, Homo sapien
ggattgagtttcaggcgagggtaggatgtccaa

SEQ ID NO: 42909 - DNA, 33 bp, Homo sapien
ggcaaatactgaggcacctttgacctcctgcac

SEQ ID NO: 42910 - DNA, 33 bp, Homo sapien
ggcaaatactgaggcatctttgacctcctgcac

SEQ ID NO: 42911 - DNA, 33 bp, Homo sapien
catgttgaatgtaaggaacctgtaggatgtgca

SEQ ID NO: 42912 - DNA, 33 bp, Homo sapien
catgttgaatgtaagggacctgtaggatgtgca

SEQ ID NO: 42913 - DNA, 33 bp, Homo sapien
ccaaacattagtgttggattccaggttctctac

SEQ ID NO: 42914 - DNA, 33 bp, Homo sapien
ccaaacattagtgttgtattccaggttctctac

SEQ ID NO: 42915 - DNA, 33 bp, Homo sapien
caagacaactaagaaaagtgcaaatattcatga

SEQ ID NO: 42916 - DNA, 33 bp, Homo sapien
caagacaactaagaaaggtgcaaatattcatga

SEQ ID NO: 42917 - DNA, 33 bp, Homo sapien
acgttgatgtctctcaatataattagtgaaaac

SEQ ID NO: 42918 - DNA, 33 bp, Homo sapien
acgttgatgtctctcagtataattagtgaaaac

SEQ ID NO: 42919 - DNA, 33 bp, Homo sapien
caagcagtgccaagcaatacactcttaaggggt

SEQ ID NO: 42920 - DNA, 33 bp, Homo sapien
caagcagtgccaagcagtacactcttaaggggt

SEQ ID NO: 42921 - DNA, 33 bp, Homo sapien
ctgggtggaggtaagacgtagttgctgtgttca

SEQ ID NO: 42922 - DNA, 33 bp, Homo sapien
ctgggtggaggtaagatgtagttgctgtgttca

SEQ ID NO: 42923 - DNA, 33 bp, Homo sapien
ctggagttgtcttaatcaatggccacaagtttt

SEQ ID NO: 42924 - DNA, 33 bp, Homo sapien
ctggagttgtcttaatgaatggccacaagtttt

SEQ ID NO: 42925 - DNA, 33 bp, Homo sapien
tgaagaaaaaacaaagaagctgtaaatgccata

SEQ ID NO: 42926 - DNA, 33 bp, Homo sapien
tgaagaaaaaacaaaggagctgtaaatgccata

SEQ ID NO: 42927 - DNA, 33 bp, Homo sapien
ctccacatccttgtaccgagcactacttacatt

SEQ ID NO: 42928 - DNA, 33 bp, Homo sapien
ctccacatccttgtactgagcactacttacatt

SEQ ID NO: 42929 - DNA, 33 bp, Homo sapien
tgagaggccgcacgctcagatgcctggtagaga

SEQ ID NO: 42930 - DNA, 33 bp, Homo sapien
tgagaggccgcacgcttagatgcctggtagaga

SEQ ID NO: 42931 - DNA, 33 bp, Homo sapien
gggttataaaggcttacgaagtccaacttttgg

SEQ ID NO: 42932 - DNA, 33 bp, Homo sapien
gggttataaaggcttatgaagtccaacttttgg

SEQ ID NO: 42933 - DNA, 33 bp, Homo sapien
cctgggcctcaccgtcacctcttttcttggact

SEQ ID NO: 42934 - DNA, 33 bp, Homo sapien
cctgggcctcaccgtcgcctcttttcttggact

SEQ ID NO: 42935 - DNA, 33 bp, Homo sapien
aatcccagagcgccaaagaagtggaatcagcag

SEQ ID NO: 42936 - DNA, 33 bp, Homo sapien
aatcccagagcgccaaggaagtggaatcagcag

SEQ ID NO: 42937 - DNA, 33 bp, Homo sapien
ggtggtttatggtcacaattgtttccttcaagt

SEQ ID NO: 42938 - DNA, 33 bp, Homo sapien
ggtggtttatggtcacgattgtttccttcaagt

SEQ ID NO: 42939 - DNA, 33 bp, Homo sapien
ttgtcaacaacactggaagtgctttcgtggttg

SEQ ID NO: 42940 - DNA, 33 bp, Homo sapien
ttgtcaacaacactgggagtgctttcgtggttg

SEQ ID NO: 42941 - DNA, 33 bp, Homo sapien
tctgttatcaccattaaattcagagagaaaagg

SEQ ID NO: 42942 - DNA, 33 bp, Homo sapien
tctgttatcaccattacattcagagagaaaagg

SEQ ID NO: 42943 - DNA, 33 bp, Homo sapien
taagccctgggaatatcaagatagaccttagct

SEQ ID NO: 42944 - DNA, 33 bp, Homo sapien
taagccctgggaatatgaagatagaccttagct

SEQ ID NO: 42945 - DNA, 33 bp, Homo sapien
cagaatcatggtaaaactttctgagttatatcc

SEQ ID NO: 42946 - DNA, 33 bp, Homo sapien
cagaatcatggtaaaattttctgagttatatcc

SEQ ID NO: 42947 - DNA, 33 bp, Homo sapien
agaagcaggtcctaaacgaaaaatcctcttttg

SEQ ID NO: 42948 - DNA, 33 bp, Homo sapien
agaagcaggtcctaaatgaaaaatcctcttttg

SEQ ID NO: 42949 - DNA, 33 bp, Homo sapien
ccaaacgtaccatgaagcttaaatagtcaccca

SEQ ID NO: 42950 - DNA, 33 bp, Homo sapien
ccaaacgtaccatgaatcttaaatagtcaccca

SEQ ID NO: 42951 - DNA, 33 bp, Homo sapien
tcacttgacttgttgaaaatataatcctctcct

SEQ ID NO: 42952 - DNA, 33 bp, Homo sapien
tcacttgacttgttgacaatataatcctctcct

SEQ ID NO: 42953 - DNA, 33 bp, Homo sapien
agtctgtattcattaacgggtcacgttgcacac

SEQ ID NO: 42954 - DNA, 33 bp, Homo sapien
agtctgtattcattaatgggtcacgttgcacac

SEQ ID NO: 42955 - DNA, 33 bp, Homo sapien
tcacttctagtaacacactataattcaactggc

SEQ ID NO: 42956 - DNA, 33 bp, Homo sapien
tcacttctagtaacacgctataattcaactggc

SEQ ID NO: 42957 - DNA, 33 bp, Homo sapien
attgttcccactgcaaaagtaactcaagctata

SEQ ID NO: 42958 - DNA, 33 bp, Homo sapien
attgttcccactgcaacagtaactcaagctata

SEQ ID NO: 42959 - DNA, 33 bp, Homo sapien
ctcagctatatacacaatgacacgtatctgctg

SEQ ID NO: 42960 - DNA, 33 bp, Homo sapien
ctcagctatatacacattgacacgtatctgctg

SEQ ID NO: 42961 - DNA, 33 bp, Homo sapien
ttagacagcaggcagacggcattctctgttaag

SEQ ID NO: 42962 - DNA, 33 bp, Homo sapien
ttagacagcaggcagagggcattctctgttaag

SEQ ID NO: 42963 - DNA, 33 bp, Homo sapien
tgttgaagctttcacactgggcttaaaaatctc

SEQ ID NO: 42964 - DNA, 33 bp, Homo sapien
tgttgaagctttcacattgggcttaaaaatctc

SEQ ID NO: 42965 - DNA, 33 bp, Homo sapien
ttaatatgtccagcaccatttgccaatattcag

SEQ ID NO: 42966 - DNA, 33 bp, Homo sapien
ttaatatgtccagcactatttgccaatattcag

SEQ ID NO: 42967 - DNA, 33 bp, Homo sapien
atgccacagccgcagtcaagtagttgctacaga

SEQ ID NO: 42968 - DNA, 33 bp, Homo sapien
atgccacagccgcagttaagtagttgctacaga

SEQ ID NO: 42969 - DNA, 33 bp, Homo sapien
cacagcaccctttggccccagtgtgatttaaaa

SEQ ID NO: 42970 - DNA, 33 bp, Homo sapien
cacagcaccctttggctccagtgtgatttaaaa

SEQ ID NO: 42971 - DNA, 33 bp, Homo sapien
tacttcccatcctgacacagtagaaggggaagt

SEQ ID NO: 42972 - DNA, 33 bp, Homo sapien
tacttcccatcctgacgcagtagaaggggaagt

SEQ ID NO: 42973 - DNA, 33 bp, Homo sapien
ttcacagcggttactgaaagtgtgagtttatct

SEQ ID NO: 42974 - DNA, 33 bp, Homo sapien
ttcacagcggttactgcaagtgtgagtttatct

SEQ ID NO: 42975 - DNA, 33 bp, Homo sapien
caggtcttcactatcaaagtgagttctctgagg

SEQ ID NO: 42976 - DNA, 33 bp, Homo sapien
caggtcttcactatcacagtgagttctctgagg

SEQ ID NO: 42977 - DNA, 33 bp, Homo sapien
cagcaaaataagaagacgctgagcctgtccttg

SEQ ID NO: 42978 - DNA, 33 bp, Homo sapien
cagcaaaataagaagatgctgagcctgtccttg

SEQ ID NO: 42979 - DNA, 33 bp, Homo sapien
aactttctccagctaacagacttttacaacaat

SEQ ID NO: 42980 - DNA, 33 bp, Homo sapien
aactttctccagctaatagacttttacaacaat

SEQ ID NO: 42981 - DNA, 33 bp, Homo sapien
ctgctcaacttggtcacatagtaacagcaagta

SEQ ID NO: 42982 - DNA, 33 bp, Homo sapien
ctgctcaacttggtcatatagtaacagcaagta

SEQ ID NO: 42983 - DNA, 33 bp, Homo sapien
aggactggtagcgacccgagaatgcagtgagac

SEQ ID NO: 42984 - DNA, 33 bp, Homo sapien
aggactggtagcgacctgagaatgcagtgagac

SEQ ID NO: 42985 - DNA, 33 bp, Homo sapien
taatgattacacaataagtgccagagtactgtg

SEQ ID NO: 42986 - DNA, 33 bp, Homo sapien
taatgattacacaataggtgccagagtactgtg

SEQ ID NO: 42987 - DNA, 33 bp, Homo sapien
tacctccttaaatcacaaggcccttggagctga

SEQ ID NO: 42988 - DNA, 33 bp, Homo sapien
tacctccttaaatcacgaggcccttggagctga

SEQ ID NO: 42989 - DNA, 33 bp, Homo sapien
atctgttcaggtattacgctaggtgctggagat

SEQ ID NO: 42990 - DNA, 33 bp, Homo sapien
atctgttcaggtattatgctaggtgctggagat

SEQ ID NO: 42991 - DNA, 33 bp, Homo sapien
ttactgaagaaactaccgcttttatttgttttt

SEQ ID NO: 42992 - DNA, 33 bp, Homo sapien
ttactgaagaaactactgcttttatttgttttt

SEQ ID NO: 42993 - DNA, 33 bp, Homo sapien
cttttcatgtaagccaagagccaaacggctgtt

SEQ ID NO: 42994 - DNA, 33 bp, Homo sapien
cttttcatgtaagccaggagccaaacggctgtt

SEQ ID NO: 42995 - DNA, 33 bp, Homo sapien
caatgcaacacataaacgactattggcagtagc

SEQ ID NO: 42996 - DNA, 33 bp, Homo sapien
caatgcaacacataaatgactattggcagtagc

SEQ ID NO: 42997 - DNA, 33 bp, Homo sapien
aacagcccattggctcacattagtcatttaggt

SEQ ID NO: 42998 - DNA, 33 bp, Homo sapien
aacagcccattggctcgcattagtcatttaggt

SEQ ID NO: 42999 - DNA, 33 bp, Homo sapien
tacaaacatgaagcaacccctttcagctgctcc

SEQ ID NO: 43000 - DNA, 33 bp, Homo sapien
tacaaacatgaagcaatccctttcagctgctcc

SEQ ID NO: 43001 - DNA, 33 bp, Homo sapien
ttaatgtgcctacaaacgacacagggatctcat

SEQ ID NO: 43002 - DNA, 33 bp, Homo sapien
ttaatgtgcctacaaatgacacagggatctcat

SEQ ID NO: 43003 - DNA, 33 bp, Homo sapien
cacagtggccaacttccattagcattacaggac

SEQ ID NO: 43004 - DNA, 33 bp, Homo sapien
cacagtggccaacttctattagcattacaggac

SEQ ID NO: 43005 - DNA, 33 bp, Homo sapien
atagatgctgtggatacggggaaaatgagaccc

SEQ ID NO: 43006 - DNA, 33 bp, Homo sapien
atagatgctgtggatatggggaaaatgagaccc

SEQ ID NO: 43007 - DNA, 33 bp, Homo sapien
ataatctagatccacagtctcctacgtttttga

SEQ ID NO: 43008 - DNA, 33 bp, Homo sapien
ataatctagatccacattctcctacgtttttga

SEQ ID NO: 43009 - DNA, 33 bp, Homo sapien
aaaagaattgtcagcagacctgcaccacaagaa

SEQ ID NO: 43010 - DNA, 33 bp, Homo sapien
aaaagaattgtcagcatacctgcaccacaagaa

SEQ ID NO: 43011 - DNA, 33 bp, Homo sapien
gtttcttaactggatacggtatgccaaaagaca

SEQ ID NO: 43012 - DNA, 33 bp, Homo sapien
gtttcttaactggatatggtatgccaaaagaca

SEQ ID NO: 43013 - DNA, 33 bp, Homo sapien
ccagcctttacactcaggcttatggtctgcagg

SEQ ID NO: 43014 - DNA, 33 bp, Homo sapien
ccagcctttacactcatgcttatggtctgcagg

SEQ ID NO: 43015 - DNA, 33 bp, Homo sapien
aggaaaacatgataccggcctccagctgctgat

SEQ ID NO: 43016 - DNA, 33 bp, Homo sapien
aggaaaacatgatacctgcctccagctgctgat

SEQ ID NO: 43017 - DNA, 33 bp, Homo sapien
taaaagatttggataaacgtcaaagggaaagct

SEQ ID NO: 43018 - DNA, 33 bp, Homo sapien
taaaagatttggataatcgtcaaagggaaagct

SEQ ID NO: 43019 - DNA, 33 bp, Homo sapien
ctctctctgttgagcaaatgaggaagatagaag

SEQ ID NO: 43020 - DNA, 33 bp, Homo sapien
ctctctctgttgagcagatgaggaagatagaag

SEQ ID NO: 43021 - DNA, 33 bp, Homo sapien
ggtgaaaggcatctcacgctgcaggaattctga

SEQ ID NO: 43022 - DNA, 33 bp, Homo sapien
ggtgaaaggcatctcatgctgcaggaattctga

SEQ ID NO: 43023 - DNA, 33 bp, Homo sapien
ggtattaagtgtgaaacacctcagaccctatta

SEQ ID NO: 43024 - DNA, 33 bp, Homo sapien
ggtattaagtgtgaaatacctcagaccctatta

SEQ ID NO: 43025 - DNA, 33 bp, Homo sapien
catgggtggcagattaccaattaggaagcatgg

SEQ ID NO: 43026 - DNA, 33 bp, Homo sapien
catgggtggcagattatcaattaggaagcatgg

SEQ ID NO: 43027 - DNA, 33 bp, Homo sapien
agtgagctttaatgaaactaagtctccccttca

SEQ ID NO: 43028 - DNA, 33 bp, Homo sapien
agtgagctttaatgaagctaagtctccccttca

SEQ ID NO: 43029 - DNA, 33 bp, Homo sapien
gcttccactggtccacaactgtctatggaatga

SEQ ID NO: 43030 - DNA, 33 bp, Homo sapien
gcttccactggtccaccactgtctatggaatga

SEQ ID NO: 43031 - DNA, 33 bp, Homo sapien
aatggagactgacctaagattaactggcaccat

SEQ ID NO: 43032 - DNA, 33 bp, Homo sapien
aatggagactgacctacgattaactggcaccat

SEQ ID NO: 43033 - DNA, 33 bp, Homo sapien
ctacacaagttgattacaaagtccttttggagg

SEQ ID NO: 43034 - DNA, 33 bp, Homo sapien
ctacacaagttgattataaagtccttttggagg

SEQ ID NO: 43035 - DNA, 33 bp, Homo sapien
tataaataagtgcaagaaaatttctggaagtaa

SEQ ID NO: 43036 - DNA, 33 bp, Homo sapien
tataaataagtgcaaggaaatttctggaagtaa

SEQ ID NO: 43037 - DNA, 33 bp, Homo sapien
caattcaaagtcaagactacagggcttttagtt

SEQ ID NO: 43038 - DNA, 33 bp, Homo sapien
caattcaaagtcaagattacagggcttttagtt

SEQ ID NO: 43039 - DNA, 33 bp, Homo sapien
cccagagcagataaccaatatttgagtgggaac

SEQ ID NO: 43040 - DNA, 33 bp, Homo sapien
cccagagcagataaccgatatttgagtgggaac

SEQ ID NO: 43041 - DNA, 33 bp, Homo sapien
ggagggagtggttgacaatattaatgatgtcca

SEQ ID NO: 43042 - DNA, 33 bp, Homo sapien
ggagggagtggttgacgatattaatgatgtcca

SEQ ID NO: 43043 - DNA, 33 bp, Homo sapien
ttggccaggcactaaactcaggagggaactttg

SEQ ID NO: 43044 - DNA, 33 bp, Homo sapien
ttggccaggcactaaagtcaggagggaactttg

SEQ ID NO: 43045 - DNA, 33 bp, Homo sapien
gatgactattaatttacctatgcttcctgtctt

SEQ ID NO: 43046 - DNA, 33 bp, Homo sapien
gatgactattaatttatctatgcttcctgtctt

SEQ ID NO: 43047 - DNA, 33 bp, Homo sapien
gtctcaaacacagagacgggagaaacaggtaaa

SEQ ID NO: 43048 - DNA, 33 bp, Homo sapien
gtctcaaacacagagatgggagaaacaggtaaa

SEQ ID NO: 43049 - DNA, 33 bp, Homo sapien
acggaaagctttgtaacgatacgtgtggttacg

SEQ ID NO: 43050 - DNA, 33 bp, Homo sapien
acggaaagctttgtaatgatacgtgtggttacg

SEQ ID NO: 43051 - DNA, 33 bp, Homo sapien
acccaaatggacttcccctcacttctaccactg

SEQ ID NO: 43052 - DNA, 33 bp, Homo sapien
acccaaatggacttcctctcacttctaccactg

SEQ ID NO: 43053 - DNA, 33 bp, Homo sapien
ctattttcagcatttaaaacaatgtttggcaca

SEQ ID NO: 43054 - DNA, 33 bp, Homo sapien
ctattttcagcatttagaacaatgtttggcaca

SEQ ID NO: 43055 - DNA, 33 bp, Homo sapien
caggctcataactttaagctatctggaattttt

SEQ ID NO: 43056 - DNA, 33 bp, Homo sapien
caggctcataactttaggctatctggaattttt

SEQ ID NO: 43057 - DNA, 33 bp, Homo sapien
ctcatttcacaggctcactatgagacccaatgt

SEQ ID NO: 43058 - DNA, 33 bp, Homo sapien
ctcatttcacaggctcgctatgagacccaatgt

SEQ ID NO: 43059 - DNA, 33 bp, Homo sapien
ttgtttaaccctttgagataatgatttgatcat

SEQ ID NO: 43060 - DNA, 33 bp, Homo sapien
ttgtttaaccctttgatataatgatttgatcat

SEQ ID NO: 43061 - DNA, 33 bp, Homo sapien
tagtattagtataaaaatcgatacataggccaa

SEQ ID NO: 43062 - DNA, 33 bp, Homo sapien
tagtattagtataaaactcgatacataggccaa

SEQ ID NO: 43063 - DNA, 33 bp, Homo sapien
ctcagcccgtgaattccccattgctcaaaatgg

SEQ ID NO: 43064 - DNA, 33 bp, Homo sapien
ctcagcccgtgaattcgccattgctcaaaatgg

SEQ ID NO: 43065 - DNA, 33 bp, Homo sapien
ttaggttcagttagtccctagtgcatactgagt

SEQ ID NO: 43066 - DNA, 33 bp, Homo sapien
ttaggttcagttagtctctagtgcatactgagt

SEQ ID NO: 43067 - DNA, 33 bp, Homo sapien
gtctgttttgtggtaacaacagttgactccttt

SEQ ID NO: 43068 - DNA, 33 bp, Homo sapien
gtctgttttgtggtaataacagttgactccttt

SEQ ID NO: 43069 - DNA, 33 bp, Homo sapien
ccatagtgatgacatccatttgatttttaaaaa

SEQ ID NO: 43070 - DNA, 33 bp, Homo sapien
ccatagtgatgacatcgatttgatttttaaaaa

SEQ ID NO: 43071 - DNA, 33 bp, Homo sapien
gcttaactctctagaccaatttttctctactac

SEQ ID NO: 43072 - DNA, 33 bp, Homo sapien
gcttaactctctagactaatttttctctactac

SEQ ID NO: 43073 - DNA, 33 bp, Homo sapien
ggaagtgctccaaagtgaccaacctttctttaa

SEQ ID NO: 43074 - DNA, 33 bp, Homo sapien
ggaagtgctccaaagttaccaacctttctttaa

SEQ ID NO: 43075 - DNA, 33 bp, Homo sapien
cattacagtttggagaacggggatgaaactatc

SEQ ID NO: 43076 - DNA, 33 bp, Homo sapien
cattacagtttggagagcggggatgaaactatc

SEQ ID NO: 43077 - DNA, 33 bp, Homo sapien
ataagaggtgttaggagacttaaggagaaacag

SEQ ID NO: 43078 - DNA, 33 bp, Homo sapien
ataagaggtgttaggatacttaaggagaaacag

SEQ ID NO: 43079 - DNA, 33 bp, Homo sapien
gagaaacaggcttctcggacctacagggaaatt

SEQ ID NO: 43080 - DNA, 33 bp, Homo sapien
gagaaacaggcttctctgacctacagggaaatt

SEQ ID NO: 43081 - DNA, 33 bp, Homo sapien
tacagctgggtcgacacaccatcctgccccaga

SEQ ID NO: 43082 - DNA, 33 bp, Homo sapien
tacagctgggtcgacataccatcctgccccaga

SEQ ID NO: 43083 - DNA, 33 bp, Homo sapien
taaagctgtgtataagaaagtgttgagcttact

SEQ ID NO: 43084 - DNA, 33 bp, Homo sapien
taaagctgtgtataaggaagtgttgagcttact

SEQ ID NO: 43085 - DNA, 33 bp, Homo sapien
catgcatacaaggtcaagtagcacaaggctaat

SEQ ID NO: 43086 - DNA, 33 bp, Homo sapien
catgcatacaaggtcacgtagcacaaggctaat

SEQ ID NO: 43087 - DNA, 33 bp, Homo sapien
acacctgatggcttaaggacacctaggtggcct

SEQ ID NO: 43088 - DNA, 33 bp, Homo sapien
acacctgatggcttaatgacacctaggtggcct

SEQ ID NO: 43089 - DNA, 33 bp, Homo sapien
tggaagggtgggggaaccatcagactaccatgc

SEQ ID NO: 43090 - DNA, 33 bp, Homo sapien
tggaagggtgggggaatcatcagactaccatgc

SEQ ID NO: 43091 - DNA, 33 bp, Homo sapien
tgtataaatataccacaatgtatttatccactt

SEQ ID NO: 43092 - DNA, 33 bp, Homo sapien
tgtataaatataccacgatgtatttatccactt

SEQ ID NO: 43093 - DNA, 33 bp, Homo sapien
cccttgctaatcacgaagctggctgaattgtgt

SEQ ID NO: 43094 - DNA, 33 bp, Homo sapien
cccttgctaatcacgaggctggctgaattgtgt

SEQ ID NO: 43095 - DNA, 33 bp, Homo sapien
cagctctaaagtggcaaaattccacctggtctt

SEQ ID NO: 43096 - DNA, 33 bp, Homo sapien
cagctctaaagtggcagaattccacctggtctt

SEQ ID NO: 43097 - DNA, 33 bp, Homo sapien
attctccaaaacataactactatagcctactgt

SEQ ID NO: 43098 - DNA, 33 bp, Homo sapien
attctccaaaacataattactatagcctactgt

SEQ ID NO: 43099 - DNA, 33 bp, Homo sapien
ggatgtagcggcattaagtaaacatagaattcc

SEQ ID NO: 43100 - DNA, 33 bp, Homo sapien
ggatgtagcggcattaggtaaacatagaattcc

SEQ ID NO: 43101 - DNA, 33 bp, Homo sapien
agaagtcctgggagcaatatcaacaaagggtta

SEQ ID NO: 43102 - DNA, 33 bp, Homo sapien
agaagtcctgggagcagtatcaacaaagggtta

SEQ ID NO: 43103 - DNA, 33 bp, Homo sapien
gctttgctgaagaatcacagatgaatgacatga

SEQ ID NO: 43104 - DNA, 33 bp, Homo sapien
gctttgctgaagaatcgcagatgaatgacatga

SEQ ID NO: 43105 - DNA, 33 bp, Homo sapien
ctgacccccaggtaaaattctgtatccttctct

SEQ ID NO: 43106 - DNA, 33 bp, Homo sapien
ctgacccccaggtaaagttctgtatccttctct

SEQ ID NO: 43107 - DNA, 33 bp, Homo sapien
acatctgtacaccccccagtaaggactacaagt

SEQ ID NO: 43108 - DNA, 33 bp, Homo sapien
acatctgtacacccccgagtaaggactacaagt

SEQ ID NO: 43109 - DNA, 33 bp, Homo sapien
tttcataatatagtcactcacactttagaggaa

SEQ ID NO: 43110 - DNA, 33 bp, Homo sapien
tttcataatatagtcattcacactttagaggaa

SEQ ID NO: 43111 - DNA, 33 bp, Homo sapien
tactgacctggttatcacttcttcctttaagga

SEQ ID NO: 43112 - DNA, 33 bp, Homo sapien
tactgacctggttatcgcttcttcctttaagga

SEQ ID NO: 43113 - DNA, 33 bp, Homo sapien
ttttatgtatagttcacgtctgggaggaaatgt

SEQ ID NO: 43114 - DNA, 33 bp, Homo sapien
ttttatgtatagttcatgtctgggaggaaatgt

SEQ ID NO: 43115 - DNA, 33 bp, Homo sapien
gaagtcttagaaattacgtaaatccaactcctt

SEQ ID NO: 43116 - DNA, 33 bp, Homo sapien
gaagtcttagaaattatgtaaatccaactcctt

SEQ ID NO: 43117 - DNA, 33 bp, Homo sapien
aagcaattacctcccaatgctggcctatacata

SEQ ID NO: 43118 - DNA, 33 bp, Homo sapien
aagcaattacctcccagtgctggcctatacata

SEQ ID NO: 43119 - DNA, 33 bp, Homo sapien
actctacacatacaaactgaggaagagccatgt

SEQ ID NO: 43120 - DNA, 33 bp, Homo sapien
actctacacatacaaattgaggaagagccatgt

SEQ ID NO: 43121 - DNA, 33 bp, Homo sapien
attggcaaaaattttacgtctgataacactgag

SEQ ID NO: 43122 - DNA, 33 bp, Homo sapien
attggcaaaaattttatgtctgataacactgag

SEQ ID NO: 43123 - DNA, 33 bp, Homo sapien
ggcaattcctagatgaagatattggaataacta

SEQ ID NO: 43124 - DNA, 33 bp, Homo sapien
ggcaattcctagatgaggatattggaataacta

SEQ ID NO: 43125 - DNA, 33 bp, Homo sapien
catgtccataacaactaagctgagaaggccagg

SEQ ID NO: 43126 - DNA, 33 bp, Homo sapien
catgtccataacaactgagctgagaaggccagg

SEQ ID NO: 43127 - DNA, 33 bp, Homo sapien
gaaagtatactgtaagacaacaaaacaacttca

SEQ ID NO: 43128 - DNA, 33 bp, Homo sapien
gaaagtatactgtaagccaacaaaacaacttca

SEQ ID NO: 43129 - DNA, 33 bp, Homo sapien
caatagtttcttactgcatctcgggaacagatt

SEQ ID NO: 43130 - DNA, 33 bp, Homo sapien
caatagtttcttactggatctcgggaacagatt

SEQ ID NO: 43131 - DNA, 33 bp, Homo sapien
aatgttaaatgccaccaccaagaggtcaagtaa

SEQ ID NO: 43132 - DNA, 33 bp, Homo sapien
aatgttaaatgccaccgccaagaggtcaagtaa

SEQ ID NO: 43133 - DNA, 33 bp, Homo sapien
ctctttccttcagtcaacaggtttaatacgggc

SEQ ID NO: 43134 - DNA, 33 bp, Homo sapien
ctctttccttcagtcatcaggtttaatacgggc

SEQ ID NO: 43135 - DNA, 33 bp, Homo sapien
atttgcggtacaaggaccaggtcttagagtgtt

SEQ ID NO: 43136 - DNA, 33 bp, Homo sapien
atttgcggtacaaggatcaggtcttagagtgtt

SEQ ID NO: 43137 - DNA, 33 bp, Homo sapien
gagatgttttgtattaaggcagctggtctgtgg

SEQ ID NO: 43138 - DNA, 33 bp, Homo sapien
gagatgttttgtattacggcagctggtctgtgg

SEQ ID NO: 43139 - DNA, 33 bp, Homo sapien
atctacatgatggtaccaataattcaagaaaac

SEQ ID NO: 43140 - DNA, 33 bp, Homo sapien
atctacatgatggtactaataattcaagaaaac

SEQ ID NO: 43141 - DNA, 33 bp, Homo sapien
cattgcatgtctaaagaaatcaagaaacaatga

SEQ ID NO: 43142 - DNA, 33 bp, Homo sapien
cattgcatgtctaaaggaatcaagaaacaatga

SEQ ID NO: 43143 - DNA, 33 bp, Homo sapien
tcccgagctgtgtgcacctttggatttgagagt

SEQ ID NO: 43144 - DNA, 33 bp, Homo sapien
tcccgagctgtgtgcatctttggatttgagagt

SEQ ID NO: 43145 - DNA, 33 bp, Homo sapien
cttctttgaccaaacactcatgcaaattgatat

SEQ ID NO: 43146 - DNA, 33 bp, Homo sapien
cttctttgaccaaacattcatgcaaattgatat

SEQ ID NO: 43147 - DNA, 33 bp, Homo sapien
atgtgaaaactagcaaagggtactcagatgact

SEQ ID NO: 43148 - DNA, 33 bp, Homo sapien
atgtgaaaactagcaaggggtactcagatgact

SEQ ID NO: 43149 - DNA, 33 bp, Homo sapien
ctgggaatgaagttcacgagagcacaaagaatg

SEQ ID NO: 43150 - DNA, 33 bp, Homo sapien
ctgggaatgaagttcatgagagcacaaagaatg

SEQ ID NO: 43151 - DNA, 33 bp, Homo sapien
tccaaagctgtaaatacaaggtggattgtgatg

SEQ ID NO: 43152 - DNA, 33 bp, Homo sapien
tccaaagctgtaaatataaggtggattgtgatg

SEQ ID NO: 43153 - DNA, 33 bp, Homo sapien
ttcaaatgaggacaacaaacagtcatatgtcat

SEQ ID NO: 43154 - DNA, 33 bp, Homo sapien
ttcaaatgaggacaacgaacagtcatatgtcat

SEQ ID NO: 43155 - DNA, 33 bp, Homo sapien
tgaaaaagaataaagcagcaatctatcccattc

SEQ ID NO: 43156 - DNA, 33 bp, Homo sapien
tgaaaaagaataaagcggcaatctatcccattc

SEQ ID NO: 43157 - DNA, 33 bp, Homo sapien
agacaggcctctaaagcacaaagcagaagtaca

SEQ ID NO: 43158 - DNA, 33 bp, Homo sapien
agacaggcctctaaagtacaaagcagaagtaca

SEQ ID NO: 43159 - DNA, 33 bp, Homo sapien
atgatacagactcccagaacaggaaagaaaaat

SEQ ID NO: 43160 - DNA, 33 bp, Homo sapien
atgatacagactcccataacaggaaagaaaaat

SEQ ID NO: 43161 - DNA, 33 bp, Homo sapien
acaacagaaaagtacaaaagaatttgccagagg

SEQ ID NO: 43162 - DNA, 33 bp, Homo sapien
acaacagaaaagtacataagaatttgccagagg

SEQ ID NO: 43163 - DNA, 33 bp, Homo sapien
atgtgtgcattctctacggtgcacttcatattc

SEQ ID NO: 43164 - DNA, 33 bp, Homo sapien
atgtgtgcattctctatggtgcacttcatattc

SEQ ID NO: 43165 - DNA, 33 bp, Homo sapien
ttttgcttaatttaacagtcaatatggaaggcc

SEQ ID NO: 43166 - DNA, 33 bp, Homo sapien
ttttgcttaatttaaccgtcaatatggaaggcc

SEQ ID NO: 43167 - DNA, 33 bp, Homo sapien
caaatgtgactgatagaaaactgactaggactc

SEQ ID NO: 43168 - DNA, 33 bp, Homo sapien
caaatgtgactgataggaaactgactaggactc

SEQ ID NO: 43169 - DNA, 33 bp, Homo sapien
gttctacaagtctatggcagggcaatagctggg

SEQ ID NO: 43170 - DNA, 33 bp, Homo sapien
gttctacaagtctatgtcagggcaatagctggg

SEQ ID NO: 43171 - DNA, 33 bp, Homo sapien
tcctcttccactaccactgagccattgtctttc

SEQ ID NO: 43172 - DNA, 33 bp, Homo sapien
tcctcttccactaccattgagccattgtctttc

SEQ ID NO: 43173 - DNA, 33 bp, Homo sapien
atcgctcttttttctcaaccatcactttggaca

SEQ ID NO: 43174 - DNA, 33 bp, Homo sapien
atcgctcttttttctcgaccatcactttggaca

SEQ ID NO: 43175 - DNA, 33 bp, Homo sapien
cagggaaccagtctaacggctgcaaagccttcc

SEQ ID NO: 43176 - DNA, 33 bp, Homo sapien
cagggaaccagtctaatggctgcaaagccttcc

SEQ ID NO: 43177 - DNA, 33 bp, Homo sapien
atactatctaaaagggacaaggttcacatttgt

SEQ ID NO: 43178 - DNA, 33 bp, Homo sapien
atactatctaaaagggccaaggttcacatttgt

SEQ ID NO: 43179 - DNA, 33 bp, Homo sapien
ttattgatgagaacaaagaagctaagagacatt

SEQ ID NO: 43180 - DNA, 33 bp, Homo sapien
ttattgatgagaacaatgaagctaagagacatt

SEQ ID NO: 43181 - DNA, 33 bp, Homo sapien
ctgctttctcctcccaatagtgaagtttactgt

SEQ ID NO: 43182 - DNA, 33 bp, Homo sapien
ctgctttctcctcccagtagtgaagtttactgt

SEQ ID NO: 43183 - DNA, 33 bp, Homo sapien
tccccccagcccaaaccgacaaaccgagatttt

SEQ ID NO: 43184 - DNA, 33 bp, Homo sapien
tccccccagcccaaactgacaaaccgagatttt

SEQ ID NO: 43185 - DNA, 33 bp, Homo sapien
cattctttaaggtggacgctatgattatcccca

SEQ ID NO: 43186 - DNA, 33 bp, Homo sapien
cattctttaaggtggatgctatgattatcccca

SEQ ID NO: 43187 - DNA, 33 bp, Homo sapien
caaatgcttgggtcacacagaatatttgcagcc

SEQ ID NO: 43188 - DNA, 33 bp, Homo sapien
caaatgcttgggtcacgcagaatatttgcagcc

SEQ ID NO: 43189 - DNA, 33 bp, Homo sapien
ttgacaaagcaagacaaatgacctggaaattaa

SEQ ID NO: 43190 - DNA, 33 bp, Homo sapien
ttgacaaagcaagacagatgacctggaaattaa

SEQ ID NO: 43191 - DNA, 33 bp, Homo sapien
accatccaaagaacaaggttaagccagaataaa

SEQ ID NO: 43192 - DNA, 33 bp, Homo sapien
accatccaaagaacaatgttaagccagaataaa

SEQ ID NO: 43193 - DNA, 33 bp, Homo sapien
gtgctgtgggtaccgacccaggatgcaaacacc

SEQ ID NO: 43194 - DNA, 33 bp, Homo sapien
gtgctgtgggtaccgatccaggatgcaaacacc

SEQ ID NO: 43195 - DNA, 33 bp, Homo sapien
atgttctgtctgcttccctggtattctctaagc

SEQ ID NO: 43196 - DNA, 33 bp, Homo sapien
atgttctgtctgcttcgctggtattctctaagc

SEQ ID NO: 43197 - DNA, 33 bp, Homo sapien
ataagtgtaagtcaaaaatgaaagtacaactct

SEQ ID NO: 43198 - DNA, 33 bp, Homo sapien
ataagtgtaagtcaaagatgaaagtacaactct

SEQ ID NO: 43199 - DNA, 33 bp, Homo sapien
aagaagcagattttaaaggccaagagccatttt

SEQ ID NO: 43200 - DNA, 33 bp, Homo sapien
aagaagcagattttaatggccaagagccatttt

SEQ ID NO: 43201 - DNA, 33 bp, Homo sapien
cttacagctgccttagaaatttccccttttgct

SEQ ID NO: 43202 - DNA, 33 bp, Homo sapien
cttacagctgccttagcaatttccccttttgct

SEQ ID NO: 43203 - DNA, 33 bp, Homo sapien
cgtgcctcggtttttcaaactgcaaaatgggaa

SEQ ID NO: 43204 - DNA, 33 bp, Homo sapien
cgtgcctcggtttttccaactgcaaaatgggaa

SEQ ID NO: 43205 - DNA, 33 bp, Homo sapien
cagaggggataaagtcagaatggtagtcccgca

SEQ ID NO: 43206 - DNA, 33 bp, Homo sapien
cagaggggataaagtcggaatggtagtcccgca

SEQ ID NO: 43207 - DNA, 33 bp, Homo sapien
ctaaagaaaagggaataaaagtgtgactggact

SEQ ID NO: 43208 - DNA, 33 bp, Homo sapien
ctaaagaaaagggaatgaaagtgtgactggact

SEQ ID NO: 43209 - DNA, 33 bp, Homo sapien
gcagaggaacacaacacgaaattcacattcaat

SEQ ID NO: 43210 - DNA, 33 bp, Homo sapien
gcagaggaacacaacatgaaattcacattcaat

SEQ ID NO: 43211 - DNA, 33 bp, Homo sapien
agaatttcaggcagcaacggtggaacattaaac

SEQ ID NO: 43212 - DNA, 33 bp, Homo sapien
agaatttcaggcagcagcggtggaacattaaac

SEQ ID NO: 43213 - DNA, 33 bp, Homo sapien
tttgtgaggtcccgtgcaatatgagaatgcaaa

SEQ ID NO: 43214 - DNA, 33 bp, Homo sapien
tttgtgaggtcccgtgtaatatgagaatgcaaa

SEQ ID NO: 43215 - DNA, 33 bp, Homo sapien
agagtaagtgagatccacagctcacaccatacc

SEQ ID NO: 43216 - DNA, 33 bp, Homo sapien
agagtaagtgagatccgcagctcacaccatacc

SEQ ID NO: 43217 - DNA, 33 bp, Homo sapien
cagacaaaagtcaccacgttgtgctagcaaaca

SEQ ID NO: 43218 - DNA, 33 bp, Homo sapien
cagacaaaagtcaccatgttgtgctagcaaaca

SEQ ID NO: 43219 - DNA, 33 bp, Homo sapien
aaaatagaaagaatgaataagatcaggtgtttg

SEQ ID NO: 43220 - DNA, 33 bp, Homo sapien
aaaatagaaagaatgagtaagatcaggtgtttg

SEQ ID NO: 43221 - DNA, 33 bp, Homo sapien
ctatgctctatctccacgagttcagtcatttta

SEQ ID NO: 43222 - DNA, 33 bp, Homo sapien
ctatgctctatctccatgagttcagtcatttta

SEQ ID NO: 43223 - DNA, 33 bp, Homo sapien
ttacaatatggctggaactctcagacgagaagt

SEQ ID NO: 43224 - DNA, 33 bp, Homo sapien
ttacaatatggctggagctctcagacgagaagt

SEQ ID NO: 43225 - DNA, 33 bp, Homo sapien
tttgaagtgtacttagaaatccagttctattct

SEQ ID NO: 43226 - DNA, 33 bp, Homo sapien
tttgaagtgtacttagcaatccagttctattct

SEQ ID NO: 43227 - DNA, 33 bp, Homo sapien
ccctgtctctcaaagaaaaaagacacccaaaac

SEQ ID NO: 43228 - DNA, 33 bp, Homo sapien
ccctgtctctcaaagacaaaagacacccaaaac

SEQ ID NO: 43229 - DNA, 33 bp, Homo sapien
tcaatggacctctataactatgtagggatgctc

SEQ ID NO: 43230 - DNA, 33 bp, Homo sapien
tcaatggacctctatagctatgtagggatgctc

SEQ ID NO: 43231 - DNA, 33 bp, Homo sapien
ccctggctccttggtgaattaagcatccctgga

SEQ ID NO: 43232 - DNA, 33 bp, Homo sapien
ccctggctccttggtggattaagcatccctgga

SEQ ID NO: 43233 - DNA, 33 bp, Homo sapien
catgttccttcttaaaacaattgctagcaaggg

SEQ ID NO: 43234 - DNA, 33 bp, Homo sapien
catgttccttcttaaaccaattgctagcaaggg

SEQ ID NO: 43235 - DNA, 33 bp, Homo sapien
tcctcaggctgtgtgaaaaggggaggaagagac

SEQ ID NO: 43236 - DNA, 33 bp, Homo sapien
tcctcaggctgtgtgagaaggggaggaagagac

SEQ ID NO: 43237 - DNA, 33 bp, Homo sapien
aaggggatgtattccacagtatcagatgatgca

SEQ ID NO: 43238 - DNA, 33 bp, Homo sapien
aaggggatgtattccatagtatcagatgatgca

SEQ ID NO: 43239 - DNA, 33 bp, Homo sapien
ccatgtgcttgggatacaaggatgaagaagaca

SEQ ID NO: 43240 - DNA, 33 bp, Homo sapien
ccatgtgcttgggatataaggatgaagaagaca

SEQ ID NO: 43241 - DNA, 33 bp, Homo sapien
catcagagctttgccccctttgtagtattacag

SEQ ID NO: 43242 - DNA, 33 bp, Homo sapien
catcagagctttgccctctttgtagtattacag

SEQ ID NO: 43243 - DNA, 33 bp, Homo sapien
aggctcaagtgataaacgagtctgacccagctt

SEQ ID NO: 43244 - DNA, 33 bp, Homo sapien
aggctcaagtgataaaggagtctgacccagctt

SEQ ID NO: 43245 - DNA, 33 bp, Homo sapien
tgcccccaggtatcatgaatctgctgtcacttt

SEQ ID NO: 43246 - DNA, 33 bp, Homo sapien
tgcccccaggtatcattaatctgctgtcacttt

SEQ ID NO: 43247 - DNA, 33 bp, Homo sapien
aagaagggaaacacaaattctgctttggacttg

SEQ ID NO: 43248 - DNA, 33 bp, Homo sapien
aagaagggaaacacaagttctgctttggacttg

SEQ ID NO: 43249 - DNA, 33 bp, Homo sapien
tccagctttctctagcaccccaggaagaatcct

SEQ ID NO: 43250 - DNA, 33 bp, Homo sapien
tccagctttctctagcgccccaggaagaatcct

SEQ ID NO: 43251 - DNA, 33 bp, Homo sapien
aacaggtgcactgggacgcttgcttaaataata

SEQ ID NO: 43252 - DNA, 33 bp, Homo sapien
aacaggtgcactgggatgcttgcttaaataata

SEQ ID NO: 43253 - DNA, 33 bp, Homo sapien
aatgctgacatacaccacagttcttccacacct

SEQ ID NO: 43254 - DNA, 33 bp, Homo sapien
aatgctgacatacaccgcagttcttccacacct

SEQ ID NO: 43255 - DNA, 33 bp, Homo sapien
aggaagccaagcaatacaattacatcgcaattg

SEQ ID NO: 43256 - DNA, 33 bp, Homo sapien
aggaagccaagcaatataattacatcgcaattg

SEQ ID NO: 43257 - DNA, 33 bp, Homo sapien
accacagaagaggatacagggtactctgagact

SEQ ID NO: 43258 - DNA, 33 bp, Homo sapien
accacagaagaggatagagggtactctgagact

SEQ ID NO: 43259 - DNA, 33 bp, Homo sapien
agcactaggtagttccgcgatctccattgccct

SEQ ID NO: 43260 - DNA, 33 bp, Homo sapien
agcactaggtagttcctcgatctccattgccct

SEQ ID NO: 43261 - DNA, 33 bp, Homo sapien
gctgcctgcatatttgcataatcactggaccac

SEQ ID NO: 43262 - DNA, 33 bp, Homo sapien
gctgcctgcatatttgtataatcactggaccac

SEQ ID NO: 43263 - DNA, 33 bp, Homo sapien
gatatacctgaaacaccgtcaaatcatttattc

SEQ ID NO: 43264 - DNA, 33 bp, Homo sapien
gatatacctgaaacactgtcaaatcatttattc

SEQ ID NO: 43265 - DNA, 33 bp, Homo sapien
atcccaggctttgggaagtcgagtgtgggcgga

SEQ ID NO: 43266 - DNA, 33 bp, Homo sapien
atcccaggctttgggaggtcgagtgtgggcgga

SEQ ID NO: 43267 - DNA, 33 bp, Homo sapien
acaaccttgggaggtaaaaacagcaaatgagac

SEQ ID NO: 43268 - DNA, 33 bp, Homo sapien
acaaccttgggaggtagaaacagcaaatgagac

SEQ ID NO: 43269 - DNA, 33 bp, Homo sapien
tctggcgcttaggtataaatatatgagctttta

SEQ ID NO: 43270 - DNA, 33 bp, Homo sapien
tctggcgcttaggtatcaatatatgagctttta

SEQ ID NO: 43271 - DNA, 33 bp, Homo sapien
caatagaaagaccaaaatctacatgcccagagc

SEQ ID NO: 43272 - DNA, 33 bp, Homo sapien
caatagaaagaccaaattctacatgcccagagc

SEQ ID NO: 43273 - DNA, 33 bp, Homo sapien
gtttttccttcaatctcacatgagagagtttca

SEQ ID NO: 43274 - DNA, 33 bp, Homo sapien
gtttttccttcaatcttacatgagagagtttca

SEQ ID NO: 43275 - DNA, 33 bp, Homo sapien
cctttgcctcggaaaaagagcgactcaagtaca

SEQ ID NO: 43276 - DNA, 33 bp, Homo sapien
cctttgcctcggaaaaggagcgactcaagtaca

SEQ ID NO: 43277 - DNA, 33 bp, Homo sapien
gctgtctccattccagcctcttcatgaatcaac

SEQ ID NO: 43278 - DNA, 33 bp, Homo sapien
gctgtctccattccaggctcttcatgaatcaac

SEQ ID NO: 43279 - DNA, 33 bp, Homo sapien
tacaaattactttgggaaattccatttgaaaca

SEQ ID NO: 43280 - DNA, 33 bp, Homo sapien
tacaaattactttgggcaattccatttgaaaca

SEQ ID NO: 43281 - DNA, 33 bp, Homo sapien
tgattccatgattctacatatctactgaccact

SEQ ID NO: 43282 - DNA, 33 bp, Homo sapien
tgattccatgattctatatatctactgaccact

SEQ ID NO: 43283 - DNA, 33 bp, Homo sapien
ttacactggttagatcacttttgttttttgcga

SEQ ID NO: 43284 - DNA, 33 bp, Homo sapien
ttacactggttagatcccttttgttttttgcga

SEQ ID NO: 43285 - DNA, 33 bp, Homo sapien
aatgtgactccttaagaaccaaatgcagtctga

SEQ ID NO: 43286 - DNA, 33 bp, Homo sapien
aatgtgactccttaagtaccaaatgcagtctga

SEQ ID NO: 43287 - DNA, 33 bp, Homo sapien
cgcaatcttctcataactcccaagtgttttgct

SEQ ID NO: 43288 - DNA, 33 bp, Homo sapien
cgcaatcttctcataattcccaagtgttttgct

SEQ ID NO: 43289 - DNA, 33 bp, Homo sapien
ggggctgctgattctgcagtgagaaggaactaa

SEQ ID NO: 43290 - DNA, 33 bp, Homo sapien
ggggctgctgattctgtagtgagaaggaactaa

SEQ ID NO: 43291 - DNA, 33 bp, Homo sapien
tcccttccttccctatgaagcagcctatcttta

SEQ ID NO: 43292 - DNA, 33 bp, Homo sapien
tcccttccttccctattaagcagcctatcttta

SEQ ID NO: 43293 - DNA, 33 bp, Homo sapien
gaacacctaggatatggaaagaattcctgccag

SEQ ID NO: 43294 - DNA, 33 bp, Homo sapien
gaacacctaggatatgtaaagaattcctgccag

SEQ ID NO: 43295 - DNA, 33 bp, Homo sapien
tgcagggtaatttgcaaaatctcagaatcaggg

SEQ ID NO: 43296 - DNA, 33 bp, Homo sapien
tgcagggtaatttgcagaatctcagaatcaggg

SEQ ID NO: 43297 - DNA, 33 bp, Homo sapien
agaattctttagagtacgctggcaagtgcaatt

SEQ ID NO: 43298 - DNA, 33 bp, Homo sapien
agaattctttagagtatgctggcaagtgcaatt

SEQ ID NO: 43299 - DNA, 33 bp, Homo sapien
atgaactcataatccaccttattctccttccat

SEQ ID NO: 43300 - DNA, 33 bp, Homo sapien
atgaactcataatccatcttattctccttccat

SEQ ID NO: 43301 - DNA, 33 bp, Homo sapien
tctaagttctaaacaactgctgtgactactgtt

SEQ ID NO: 43302 - DNA, 33 bp, Homo sapien
tctaagttctaaacaattgctgtgactactgtt

SEQ ID NO: 43303 - DNA, 33 bp, Homo sapien
atgaaccacacccttgaatcagacgctctctct

SEQ ID NO: 43304 - DNA, 33 bp, Homo sapien
atgaaccacacccttggatcagacgctctctct

SEQ ID NO: 43305 - DNA, 33 bp, Homo sapien
agcctcgcatctgatactaagcagtgggtgcgt

SEQ ID NO: 43306 - DNA, 33 bp, Homo sapien
agcctcgcatctgatagtaagcagtgggtgcgt

SEQ ID NO: 43307 - DNA, 33 bp, Homo sapien
ttggcttgattaaagaccagtttttcagttctg

SEQ ID NO: 43308 - DNA, 33 bp, Homo sapien
ttggcttgattaaagatcagtttttcagttctg

SEQ ID NO: 43309 - DNA, 33 bp, Homo sapien
catccccaacttctgaaaaataatttgataaat

SEQ ID NO: 43310 - DNA, 33 bp, Homo sapien
catccccaacttctgataaataatttgataaat

SEQ ID NO: 43311 - DNA, 33 bp, Homo sapien
actttttcagtcctaacgcttctctttttaatt

SEQ ID NO: 43312 - DNA, 33 bp, Homo sapien
actttttcagtcctaatgcttctctttttaatt

SEQ ID NO: 43313 - DNA, 33 bp, Homo sapien
actaactggcttaaaacgtaaacgaccactaag

SEQ ID NO: 43314 - DNA, 33 bp, Homo sapien
actaactggcttaaaatgtaaacgaccactaag

SEQ ID NO: 43315 - DNA, 33 bp, Homo sapien
tgatcactttgggaaacagagctgtcaaaagag

SEQ ID NO: 43316 - DNA, 33 bp, Homo sapien
tgatcactttgggaaatagagctgtcaaaagag

SEQ ID NO: 43317 - DNA, 33 bp, Homo sapien
gtcactatatttagaacgtttacgactttggtt

SEQ ID NO: 43318 - DNA, 33 bp, Homo sapien
gtcactatatttagaatgtttacgactttggtt

SEQ ID NO: 43319 - DNA, 33 bp, Homo sapien
agatgaggatgaaagaaacctggtgcctgagca

SEQ ID NO: 43320 - DNA, 33 bp, Homo sapien
agatgaggatgaaagacacctggtgcctgagca

SEQ ID NO: 43321 - DNA, 33 bp, Homo sapien
cccaacccagtccagagcttctgacttcatggc

SEQ ID NO: 43322 - DNA, 33 bp, Homo sapien
cccaacccagtccagatcttctgacttcatggc

SEQ ID NO: 43323 - DNA, 33 bp, Homo sapien
gagccaggaccaaaagaaagacatagttgtcat

SEQ ID NO: 43324 - DNA, 33 bp, Homo sapien
gagccaggaccaaaaggaagacatagttgtcat

SEQ ID NO: 43325 - DNA, 33 bp, Homo sapien
gagcatcggccaagtacaaaatatccaacaata

SEQ ID NO: 43326 - DNA, 33 bp, Homo sapien
gagcatcggccaagtataaaatatccaacaata

SEQ ID NO: 43327 - DNA, 33 bp, Homo sapien
gagttggtccaggctacgtgaggctgcgttagc

SEQ ID NO: 43328 - DNA, 33 bp, Homo sapien
gagttggtccaggctatgtgaggctgcgttagc

SEQ ID NO: 43329 - DNA, 33 bp, Homo sapien
ttctccttagcttctacgggagccaagatggcc

SEQ ID NO: 43330 - DNA, 33 bp, Homo sapien
ttctccttagcttctatgggagccaagatggcc

SEQ ID NO: 43331 - DNA, 33 bp, Homo sapien
taacaaaattgagtcacggtaaaattattgtta

SEQ ID NO: 43332 - DNA, 33 bp, Homo sapien
taacaaaattgagtcatggtaaaattattgtta

SEQ ID NO: 43333 - DNA, 33 bp, Homo sapien
caaagctcccacttgcactcaattctgttgcag

SEQ ID NO: 43334 - DNA, 33 bp, Homo sapien
caaagctcccacttgcgctcaattctgttgcag

SEQ ID NO: 43335 - DNA, 33 bp, Homo sapien
actctcatttattaagacaaatatgcacctccc

SEQ ID NO: 43336 - DNA, 33 bp, Homo sapien
actctcatttattaagtcaaatatgcacctccc

SEQ ID NO: 43337 - DNA, 33 bp, Homo sapien
accatctggcataaaaaaaagacatgcaaagag

SEQ ID NO: 43338 - DNA, 33 bp, Homo sapien
accatctggcataaaagaaagacatgcaaagag

SEQ ID NO: 43339 - DNA, 33 bp, Homo sapien
tcatatctgagatttccttctgcgcctcagact

SEQ ID NO: 43340 - DNA, 33 bp, Homo sapien
tcatatctgagatttctttctgcgcctcagact

SEQ ID NO: 43341 - DNA, 33 bp, Homo sapien
gcatgtggcaacactaaaataaattggcagact

SEQ ID NO: 43342 - DNA, 33 bp, Homo sapien
gcatgtggcaacactagaataaattggcagact

SEQ ID NO: 43343 - DNA, 33 bp, Homo sapien
tagcttatgcagacctaaagcaatatacctctg

SEQ ID NO: 43344 - DNA, 33 bp, Homo sapien
tagcttatgcagacctgaagcaatatacctctg

SEQ ID NO: 43345 - DNA, 33 bp, Homo sapien
gtttttcttgacacaaacactttaagctccaag

SEQ ID NO: 43346 - DNA, 33 bp, Homo sapien
gtttttcttgacacaagcactttaagctccaag

SEQ ID NO: 43347 - DNA, 33 bp, Homo sapien
caataaacctgttgaccgaaaagtactcactgg

SEQ ID NO: 43348 - DNA, 33 bp, Homo sapien
caataaacctgttgactgaaaagtactcactgg

SEQ ID NO: 43349 - DNA, 33 bp, Homo sapien
gctaccactttttggacagaaggaaaataggtt

SEQ ID NO: 43350 - DNA, 33 bp, Homo sapien
gctaccactttttggatagaaggaaaataggtt

SEQ ID NO: 43351 - DNA, 33 bp, Homo sapien
attttacacaattacaaaggatgactaaaaaaa

SEQ ID NO: 43352 - DNA, 33 bp, Homo sapien
attttacacaattacataggatgactaaaaaaa

SEQ ID NO: 43353 - DNA, 33 bp, Homo sapien
aagaacttgggatcaaatagggggatagaatat

SEQ ID NO: 43354 - DNA, 33 bp, Homo sapien
aagaacttgggatcaagtagggggatagaatat

SEQ ID NO: 43355 - DNA, 33 bp, Homo sapien
tccacattaggatataacaagaatctgtataga

SEQ ID NO: 43356 - DNA, 33 bp, Homo sapien
tccacattaggatatagcaagaatctgtataga

SEQ ID NO: 43357 - DNA, 33 bp, Homo sapien
gaatacttgcctgtgacggttctcaggcttcat

SEQ ID NO: 43358 - DNA, 33 bp, Homo sapien
gaatacttgcctgtgatggttctcaggcttcat

SEQ ID NO: 43359 - DNA, 33 bp, Homo sapien
tagtcttccttcctctcaaaagcaggcctcctt

SEQ ID NO: 43360 - DNA, 33 bp, Homo sapien
tagtcttccttcctctgaaaagcaggcctcctt

SEQ ID NO: 43361 - DNA, 33 bp, Homo sapien
gtctcctttgaattcccgctgtcctcatccttg

SEQ ID NO: 43362 - DNA, 33 bp, Homo sapien
gtctcctttgaattcctgctgtcctcatccttg

SEQ ID NO: 43363 - DNA, 33 bp, Homo sapien
cagtgccgagcttgccaaggattagagcctccc

SEQ ID NO: 43364 - DNA, 33 bp, Homo sapien
cagtgccgagcttgccgaggattagagcctccc

SEQ ID NO: 43365 - DNA, 33 bp, Homo sapien
ttcagaacctctaatacaacattttgcagaacg

SEQ ID NO: 43366 - DNA, 33 bp, Homo sapien
ttcagaacctctaatagaacattttgcagaacg

SEQ ID NO: 43367 - DNA, 33 bp, Homo sapien
aatctaaaatgacatcaattgcaagatgctaca

SEQ ID NO: 43368 - DNA, 33 bp, Homo sapien
aatctaaaatgacatcgattgcaagatgctaca

SEQ ID NO: 43369 - DNA, 33 bp, Homo sapien
gatcttaatttattcaatctctatgtcagaata

SEQ ID NO: 43370 - DNA, 33 bp, Homo sapien
gatcttaatttattcagtctctatgtcagaata

SEQ ID NO: 43371 - DNA, 33 bp, Homo sapien
caagcaaggaagccctcagccatttagcactca

SEQ ID NO: 43372 - DNA, 33 bp, Homo sapien
caagcaaggaagccctgagccatttagcactca

SEQ ID NO: 43373 - DNA, 33 bp, Homo sapien
tctgagggccataaaacgagcaaactgagagag

SEQ ID NO: 43374 - DNA, 33 bp, Homo sapien
tctgagggccataaaatgagcaaactgagagag

SEQ ID NO: 43375 - DNA, 33 bp, Homo sapien
tctttctaactagcaaaaccagctgctgggaca

SEQ ID NO: 43376 - DNA, 33 bp, Homo sapien
tctttctaactagcaagaccagctgctgggaca

SEQ ID NO: 43377 - DNA, 33 bp, Homo sapien
cagtgtacacgaatataactaagtctgaagtag

SEQ ID NO: 43378 - DNA, 33 bp, Homo sapien
cagtgtacacgaatatgactaagtctgaagtag

SEQ ID NO: 43379 - DNA, 33 bp, Homo sapien
tctaccttctattaaacgaggatcttatcaatc

SEQ ID NO: 43380 - DNA, 33 bp, Homo sapien
tctaccttctattaaatgaggatcttatcaatc

SEQ ID NO: 43381 - DNA, 33 bp, Homo sapien
tctattcaatttcctacgcagagcaaaagaagc

SEQ ID NO: 43382 - DNA, 33 bp, Homo sapien
tctattcaatttcctatgcagagcaaaagaagc

SEQ ID NO: 43383 - DNA, 33 bp, Homo sapien
aacaagaggggccatgccactttacattataag

SEQ ID NO: 43384 - DNA, 33 bp, Homo sapien
aacaagaggggccatgtcactttacattataag

SEQ ID NO: 43385 - DNA, 33 bp, Homo sapien
cttatgcagcccactcaatgccaacgctaacag

SEQ ID NO: 43386 - DNA, 33 bp, Homo sapien
cttatgcagcccactcgatgccaacgctaacag

SEQ ID NO: 43387 - DNA, 33 bp, Homo sapien
caggaaatgtgacagacatttatgtgatttatg

SEQ ID NO: 43388 - DNA, 33 bp, Homo sapien
caggaaatgtgacagatatttatgtgatttatg

SEQ ID NO: 43389 - DNA, 33 bp, Homo sapien
gggagaaggaaggaacaaacaggcaaggttcag

SEQ ID NO: 43390 - DNA, 33 bp, Homo sapien
gggagaaggaaggaacgaacaggcaaggttcag

SEQ ID NO: 43391 - DNA, 33 bp, Homo sapien
gattctgtcttgcccaatattgtaataccagtg

SEQ ID NO: 43392 - DNA, 33 bp, Homo sapien
gattctgtcttgcccactattgtaataccagtg

SEQ ID NO: 43393 - DNA, 33 bp, Homo sapien
accattagtgactccaagtaatcctctgatact

SEQ ID NO: 43394 - DNA, 33 bp, Homo sapien
accattagtgactccaggtaatcctctgatact

SEQ ID NO: 43395 - DNA, 33 bp, Homo sapien
catttaagccttcttcccagtgtaagggatgtg

SEQ ID NO: 43396 - DNA, 33 bp, Homo sapien
catttaagccttcttctcagtgtaagggatgtg

SEQ ID NO: 43397 - DNA, 33 bp, Homo sapien
gctttcattatgataacgttttcagtcacatga

SEQ ID NO: 43398 - DNA, 33 bp, Homo sapien
gctttcattatgataaggttttcagtcacatga

SEQ ID NO: 43399 - DNA, 33 bp, Homo sapien
ccctgggttcagctgacggtgtttctggagctg

SEQ ID NO: 43400 - DNA, 33 bp, Homo sapien
ccctgggttcagctgatggtgtttctggagctg

SEQ ID NO: 43401 - DNA, 33 bp, Homo sapien
ctctccttcaataacaacaactcctgcggcaac

SEQ ID NO: 43402 - DNA, 33 bp, Homo sapien
ctctccttcaataacaccaactcctgcggcaac

SEQ ID NO: 43403 - DNA, 33 bp, Homo sapien
caggagaaggcaaagcagaattcaggtgggact

SEQ ID NO: 43404 - DNA, 33 bp, Homo sapien
caggagaaggcaaagcggaattcaggtgggact

SEQ ID NO: 43405 - DNA, 33 bp, Homo sapien
tcaggaagggaggtaaatgccaagagtggcgct

SEQ ID NO: 43406 - DNA, 33 bp, Homo sapien
tcaggaagggaggtaagtgccaagagtggcgct

SEQ ID NO: 43407 - DNA, 33 bp, Homo sapien
aagagcatgccaagcacaaagaagagcaggaag

SEQ ID NO: 43408 - DNA, 33 bp, Homo sapien
aagagcatgccaagcagaaagaagagcaggaag

SEQ ID NO: 43409 - DNA, 33 bp, Homo sapien
attcagttctaccaacactcattgcatgttgct

SEQ ID NO: 43410 - DNA, 33 bp, Homo sapien
attcagttctaccaacgctcattgcatgttgct

SEQ ID NO: 43411 - DNA, 33 bp, Homo sapien
agctttggtccgtggcaactgggagaagggcct

SEQ ID NO: 43412 - DNA, 33 bp, Homo sapien
agctttggtccgtggcgactgggagaagggcct

SEQ ID NO: 43413 - DNA, 33 bp, Homo sapien
aaggcgaaggagaagcaagcacttttttcacaa

SEQ ID NO: 43414 - DNA, 33 bp, Homo sapien
aaggcgaaggagaagcgagcacttttttcacaa

SEQ ID NO: 43415 - DNA, 33 bp, Homo sapien
gccaatggccgtgtgccctattacagctagcat

SEQ ID NO: 43416 - DNA, 33 bp, Homo sapien
gccaatggccgtgtgctctattacagctagcat

SEQ ID NO: 43417 - DNA, 33 bp, Homo sapien
tgccctcctcattctagctgttaggaatcacgt

SEQ ID NO: 43418 - DNA, 33 bp, Homo sapien
tgccctcctcattctatctgttaggaatcacgt

SEQ ID NO: 43419 - DNA, 33 bp, Homo sapien
tagactcaaaagtacccgcacgatcagataagt

SEQ ID NO: 43420 - DNA, 33 bp, Homo sapien
tagactcaaaagtacctgcacgatcagataagt

SEQ ID NO: 43421 - DNA, 33 bp, Homo sapien
atatggtgggattggacatattagttcatataa

SEQ ID NO: 43422 - DNA, 33 bp, Homo sapien
atatggtgggattggatatattagttcatataa

SEQ ID NO: 43423 - DNA, 33 bp, Homo sapien
agctgttattgtaacactgagctccttgaaacc

SEQ ID NO: 43424 - DNA, 33 bp, Homo sapien
agctgttattgtaacattgagctccttgaaacc

SEQ ID NO: 43425 - DNA, 33 bp, Homo sapien
tcatgtgttagccctaagaattgtagtccaaca

SEQ ID NO: 43426 - DNA, 33 bp, Homo sapien
tcatgtgttagccctacgaattgtagtccaaca

SEQ ID NO: 43427 - DNA, 33 bp, Homo sapien
aaacaattccttttcacagcacaaagtcccttc

SEQ ID NO: 43428 - DNA, 33 bp, Homo sapien
aaacaattccttttcatagcacaaagtcccttc

SEQ ID NO: 43429 - DNA, 33 bp, Homo sapien
ttttccaatctgtaaaatgagtctctgtgaaga

SEQ ID NO: 43430 - DNA, 33 bp, Homo sapien
ttttccaatctgtaaattgagtctctgtgaaga

SEQ ID NO: 43431 - DNA, 33 bp, Homo sapien
ttaggcagacctgagaaccaatggacaagtaaa

SEQ ID NO: 43432 - DNA, 33 bp, Homo sapien
ttaggcagacctgagagccaatggacaagtaaa

SEQ ID NO: 43433 - DNA, 33 bp, Homo sapien; identical to SEQ ID NO: 43431

SEQ ID NO: 43434 - DNA, 33 bp, Homo sapien; identical to SEQ ID NO: 43432

SEQ ID NO: 43435 - DNA, 33 bp, Homo sapien
tttgatcgatgaattacgcgaaaattaaaccca

SEQ ID NO: 43436 - DNA, 33 bp, Homo sapien
tttgatcgatgaattatgcgaaaattaaaccca

SEQ ID NO: 43437 - DNA, 33 bp, Homo sapien
gatggcttacaccgcaactcaggctccaaatgt

SEQ ID NO: 43438 - DNA, 33 bp, Homo sapien
gatggcttacaccgcagctcaggctccaaatgt

SEQ ID NO: 43439 - DNA, 33 bp, Homo sapien
aagcacaggtctgtcacgttgagggagatgaaa

SEQ ID NO: 43440 - DNA, 33 bp, Homo sapien
aagcacaggtctgtcatgttgagggagatgaaa

SEQ ID NO: 43441 - DNA, 33 bp, Homo sapien
acacttctggggctgccaattgcttaaagaagg

SEQ ID NO: 43442 - DNA, 33 bp, Homo sapien
acacttctggggctgctaattgcttaaagaagg

SEQ ID NO: 43443 - DNA, 33 bp, Homo sapien
atttaccacaccctcactatatgcagatgttta

SEQ ID NO: 43444 - DNA, 33 bp, Homo sapien
atttaccacaccctcagtatatgcagatgttta

SEQ ID NO: 43445 - DNA, 33 bp, Homo sapien
ggatatctccttaaccaaataactgagcatcat

SEQ ID NO: 43446 - DNA, 33 bp, Homo sapien
ggatatctccttaaccgaataactgagcatcat

SEQ ID NO: 43447 - DNA, 33 bp, Homo sapien
cttaggcttagttccacgtgcaggctggatgca

SEQ ID NO: 43448 - DNA, 33 bp, Homo sapien
cttaggcttagttccatgtgcaggctggatgca

SEQ ID NO: 43449 - DNA, 33 bp, Homo sapien
atcttttgttacttacagccaaaggcatttgaa

SEQ ID NO: 43450 - DNA, 33 bp, Homo sapien
atcttttgttacttacggccaaaggcatttgaa

SEQ ID NO: 43451 - DNA, 33 bp, Homo sapien
ttccttatgatagttacggcactctacaaggat

SEQ ID NO: 43452 - DNA, 33 bp, Homo sapien
ttccttatgatagttatggcactctacaaggat

SEQ ID NO: 43453 - DNA, 33 bp, Homo sapien
tccctacttcatcaaacgttaccttctcagagg

SEQ ID NO: 43454 - DNA, 33 bp, Homo sapien
tccctacttcatcaaatgttaccttctcagagg

SEQ ID NO: 43455 - DNA, 33 bp, Homo sapien
ggacactgcccaaagaagtctttaacgccattc

SEQ ID NO: 43456 - DNA, 33 bp, Homo sapien
ggacactgcccaaagaggtctttaacgccattc

SEQ ID NO: 43457 - DNA, 33 bp, Homo sapien
accctccacaggaacccgagctccacaggactc

SEQ ID NO: 43458 - DNA, 33 bp, Homo sapien
accctccacaggaacctgagctccacaggactc

SEQ ID NO: 43459 - DNA, 33 bp, Homo sapien
gaggctctcgggacacactctcctcaccctttt

SEQ ID NO: 43460 - DNA, 33 bp, Homo sapien
gaggctctcgggacacgctctcctcaccctttt

SEQ ID NO: 43461 - DNA, 33 bp, Homo sapien
cttcttgttttggttacaggagcccacaaatcc

SEQ ID NO: 43462 - DNA, 33 bp, Homo sapien
cttcttgttttggttataggagcccacaaatcc

SEQ ID NO: 43463 - DNA, 33 bp, Homo sapien
tcttggatgtctgcacaacaggcaacagagtat

SEQ ID NO: 43464 - DNA, 33 bp, Homo sapien
tcttggatgtctgcaccacaggcaacagagtat

SEQ ID NO: 43465 - DNA, 33 bp, Homo sapien
ggttagttgctcgctgcatgtggagtccagtta

SEQ ID NO: 43466 - DNA, 33 bp, Homo sapien
ggttagttgctcgctgtatgtggagtccagtta

SEQ ID NO: 43467 - DNA, 33 bp, Homo sapien
aagcgccaactcatcaccaagctaggagggaga

SEQ ID NO: 43468 - DNA, 33 bp, Homo sapien
aagcgccaactcatcatcaagctaggagggaga

SEQ ID NO: 43469 - DNA, 33 bp, Homo sapien
gcacacccgcttggccactttttcaacttactt

SEQ ID NO: 43470 - DNA, 33 bp, Homo sapien
gcacacccgcttggccgctttttcaacttactt

SEQ ID NO: 43471 - DNA, 33 bp, Homo sapien
cattgccttcagcatacagttcaaacttcctag

SEQ ID NO: 43472 - DNA, 33 bp, Homo sapien
cattgccttcagcatagagttcaaacttcctag

SEQ ID NO: 43473 - DNA, 33 bp, Homo sapien
tgccctaataaaagaccgcaactcccaggctat

SEQ ID NO: 43474 - DNA, 33 bp, Homo sapien
tgccctaataaaagactgcaactcccaggctat

SEQ ID NO: 43475 - DNA, 33 bp, Homo sapien
agctccagagcaaatgaaaagacaggaagacca

SEQ ID NO: 43476 - DNA, 33 bp, Homo sapien
agctccagagcaaatggaaagacaggaagacca

SEQ ID NO: 43477 - DNA, 33 bp, Homo sapien
taaaaacattgctccactgctatcattgtagac

SEQ ID NO: 43478 - DNA, 33 bp, Homo sapien
taaaaacattgctccattgctatcattgtagac

SEQ ID NO: 43479 - DNA, 33 bp, Homo sapien
gtggcctaatccttgacgttagccaaaagttga

SEQ ID NO: 43480 - DNA, 33 bp, Homo sapien
gtggcctaatccttgatgttagccaaaagttga

SEQ ID NO: 43481 - DNA, 33 bp, Homo sapien
caactctctctctagcaagaaatatctgaatta

SEQ ID NO: 43482 - DNA, 33 bp, Homo sapien
caactctctctctagcgagaaatatctgaatta

SEQ ID NO: 43483 - DNA, 33 bp, Homo sapien
tgtagtggtgtttttaagaggctaccaattcct

SEQ ID NO: 43484 - DNA, 33 bp, Homo sapien
tgtagtggtgtttttaggaggctaccaattcct

SEQ ID NO: 43485 - DNA, 33 bp, Homo sapien
atgcacttatttggaaaggaggggggcagtttt

SEQ ID NO: 43486 - DNA, 33 bp, Homo sapien
atgcacttatttggaacggaggggggcagtttt

SEQ ID NO: 43487 - DNA, 33 bp, Homo sapien
ttgcctcctcctcaagcagatgtaaccacccca

SEQ ID NO: 43488 - DNA, 33 bp, Homo sapien
ttgcctcctcctcaagtagatgtaaccacccca

SEQ ID NO: 43489 - DNA, 33 bp, Homo sapien
atgtgaaatagaacaacgtaaaaaggatattcg

SEQ ID NO: 43490 - DNA, 33 bp, Homo sapien
atgtgaaatagaacaatgtaaaaaggatattcg

SEQ ID NO: 43491 - DNA, 33 bp, Homo sapien
cttcaagggcagaaacaatgaaaaagaaagagg

SEQ ID NO: 43492 - DNA, 33 bp, Homo sapien
cttcaagggcagaaaccatgaaaaagaaagagg

SEQ ID NO: 43493 - DNA, 33 bp, Homo sapien
cagcgggcctttcatcaacagagcccatttcaa

SEQ ID NO: 43494 - DNA, 33 bp, Homo sapien
cagcgggcctttcatcgacagagcccatttcaa

SEQ ID NO: 43495 - DNA, 33 bp, Homo sapien
cttttcttttttttctaaacagcttcattgaga

SEQ ID NO: 43496 - DNA, 33 bp, Homo sapien
cttttcttttttttctgaacagcttcattgaga

SEQ ID NO: 43497 - DNA, 33 bp, Homo sapien
cccttttccaccactgaaccaactacactgttg

SEQ ID NO: 43498 - DNA, 33 bp, Homo sapien
cccttttccaccactggaccaactacactgttg

SEQ ID NO: 43499 - DNA, 33 bp, Homo sapien
taacatcctccctgatcaagtttttgacaagcc

SEQ ID NO: 43500 - DNA, 33 bp, Homo sapien
taacatcctccctgatgaagtttttgacaagcc

SEQ ID NO: 43501 - DNA, 33 bp, Homo sapien
cctggctatacattaacacatcttagagaagta

SEQ ID NO: 43502 - DNA, 33 bp, Homo sapien
cctggctatacattaatacatcttagagaagta

SEQ ID NO: 43503 - DNA, 33 bp, Homo sapien
taagtaaaaagaatgacgtttaagctgagatct

SEQ ID NO: 43504 - DNA, 33 bp, Homo sapien
taagtaaaaagaatgatgtttaagctgagatct

SEQ ID NO: 43505 - DNA, 33 bp, Homo sapien
cataactccattggctaaaaatcacatccccat

SEQ ID NO: 43506 - DNA, 33 bp, Homo sapien
cataactccattggctgaaaatcacatccccat

SEQ ID NO: 43507 - DNA, 33 bp, Homo sapien; identical to SEQ ID NO: 43505

SEQ ID NO: 43508 - DNA, 33 bp, Homo sapien; identical to SEQ ID NO: 43506

SEQ ID NO: 43509 - DNA, 33 bp, Homo sapien
ataataaccaattcttaaaagcaaccaagatat

SEQ ID NO: 43510 - DNA, 33 bp, Homo sapien
ataataaccaattcttgaaagcaaccaagatat

SEQ ID NO: 43511 - DNA, 33 bp, Homo sapien
ggacccctgcacaatgcaattattgtaccttca

SEQ ID NO: 43512 - DNA, 33 bp, Homo sapien
ggacccctgcacaatggaattattgtaccttca

SEQ ID NO: 43513 - DNA, 33 bp, Homo sapien
ttgaataacaaaaaacaagtacgatgtaagaac

SEQ ID NO: 43514 - DNA, 33 bp, Homo sapien
ttgaataacaaaaaacgagtacgatgtaagaac

SEQ ID NO: 43515 - DNA, 33 bp, Homo sapien
gggaggcgccaacaagaaggaaagagaagttgg

SEQ ID NO: 43516 - DNA, 33 bp, Homo sapien
gggaggcgccaacaaggaggaaagagaagttgg

SEQ ID NO: 43517 - DNA, 33 bp, Homo sapien
agagttgaaacagaaaataattgataaggtgtc

SEQ ID NO: 43518 - DNA, 33 bp, Homo sapien
agagttgaaacagaaagtaattgataaggtgtc

SEQ ID NO: 43519 - DNA, 33 bp, Homo sapien
tacttggtccacccgacgggcagagtctaggag

SEQ ID NO: 43520 - DNA, 33 bp, Homo sapien
tacttggtccacccgatgggcagagtctaggag

SEQ ID NO: 43521 - DNA, 33 bp, Homo sapien
ctcagtattcaagtcaactaggaatgtcccata

SEQ ID NO: 43522 - DNA, 33 bp, Homo sapien
ctcagtattcaagtcatctaggaatgtcccata

SEQ ID NO: 43523 - DNA, 33 bp, Homo sapien
agagtctggacccagaagcaacctactccatcc

SEQ ID NO: 43524 - DNA, 33 bp, Homo sapien
agagtctggacccagaggcaacctactccatcc

SEQ ID NO: 43525 - DNA, 33 bp, Homo sapien
ggaaacagattaaatacattcggtatgactcta

SEQ ID NO: 43526 - DNA, 33 bp, Homo sapien
ggaaacagattaaatatattcggtatgactcta

SEQ ID NO: 43527 - DNA, 33 bp, Homo sapien
gtatcggtggctgagacgaagtgaaggaaaagg

SEQ ID NO: 43528 - DNA, 33 bp, Homo sapien
gtatcggtggctgagatgaagtgaaggaaaagg

SEQ ID NO: 43529 - DNA, 33 bp, Homo sapien
aaatgagattagtcaacgtatcagtcagagtcc

SEQ ID NO: 43530 - DNA, 33 bp, Homo sapien
aaatgagattagtcaatgtatcagtcagagtcc

SEQ ID NO: 43531 - DNA, 33 bp, Homo sapien
aacccatgaggtcaacactactgttgcaataat

SEQ ID NO: 43532 - DNA, 33 bp, Homo sapien
aacccatgaggtcaactctactgttgcaataat

SEQ ID NO: 43533 - DNA, 33 bp, Homo sapien
ttagttttagcagtacacttgcggataactttt

SEQ ID NO: 43534 - DNA, 33 bp, Homo sapien
ttagttttagcagtacgcttgcggataactttt

SEQ ID NO: 43535 - DNA, 33 bp, Homo sapien
tggtcagttgttgtcaatctattctgcccaggc

SEQ ID NO: 43536 - DNA, 33 bp, Homo sapien
tggtcagttgttgtcactctattctgcccaggc

SEQ ID NO: 43537 - DNA, 33 bp, Homo sapien
acattcacaattgggacatattttgacaaaatg

SEQ ID NO: 43538 - DNA, 33 bp, Homo sapien
acattcacaattgggatatattttgacaaaatg

SEQ ID NO: 43539 - DNA, 33 bp, Homo sapien
aaatacaaatggcaaacacatagatgaaaagag

SEQ ID NO: 43540 - DNA, 33 bp, Homo sapien
aaatacaaatggcaaatacatagatgaaaagag

SEQ ID NO: 43541 - DNA, 33 bp, Homo sapien
cattggcgagaaatgaccctggcatcaaatccc

SEQ ID NO: 43542 - DNA, 33 bp, Homo sapien
cattggcgagaaatgatcctggcatcaaatccc

SEQ ID NO: 43543 - DNA, 33 bp, Homo sapien
aacagactaactctgaagtgtcgttgatttgac

SEQ ID NO: 43544 - DNA, 33 bp, Homo sapien
aacagactaactctgaggtgtcgttgatttgac

SEQ ID NO: 43545 - DNA, 33 bp, Homo sapien
tttgtaacatgattccaagctcagcgcaggggc

SEQ ID NO: 43546 - DNA, 33 bp, Homo sapien
tttgtaacatgattcctagctcagcgcaggggc

SEQ ID NO: 43547 - DNA, 33 bp, Homo sapien
gcagaaattcaactaacgccacatatcagaact

SEQ ID NO: 43548 - DNA, 33 bp, Homo sapien
gcagaaattcaactaatgccacatatcagaact

SEQ ID NO: 43549 - DNA, 33 bp, Homo sapien
aatgattaagtaattacgtggaatcagaggcag

SEQ ID NO: 43550 - DNA, 33 bp, Homo sapien
aatgattaagtaattatgtggaatcagaggcag

SEQ ID NO: 43551 - DNA, 33 bp, Homo sapien
acccactgtaataaaacggatctggtcatccag

SEQ ID NO: 43552 - DNA, 33 bp, Homo sapien
acccactgtaataaaatggatctggtcatccag

SEQ ID NO: 43553 - DNA, 33 bp, Homo sapien
taggtttcaaaacttacgcaattgtgatttcca

SEQ ID NO: 43554 - DNA, 33 bp, Homo sapien
taggtttcaaaacttatgcaattgtgatttcca

SEQ ID NO: 43555 - DNA, 33 bp, Homo sapien
atggagcttgccactcaaagtgtggtttgagga

SEQ ID NO: 43556 - DNA, 33 bp, Homo sapien
atggagcttgccactcgaagtgtggtttgagga

SEQ ID NO: 43557 - DNA, 33 bp, Homo sapien
cctaatatttgctaacccagtgcagacagatga

SEQ ID NO: 43558 - DNA, 33 bp, Homo sapien
cctaatatttgctaactcagtgcagacagatga

SEQ ID NO: 43559 - DNA, 33 bp, Homo sapien
acctgggctgcactaaccctggatcctcctatt

SEQ ID NO: 43560 - DNA, 33 bp, Homo sapien
acctgggctgcactaatcctggatcctcctatt

SEQ ID NO: 43561 - DNA, 33 bp, Homo sapien
atttcacagagacagaaagtgagattcaaagag

SEQ ID NO: 43562 - DNA, 33 bp, Homo sapien
atttcacagagacagagagtgagattcaaagag

SEQ ID NO: 43563 - DNA, 33 bp, Homo sapien
ctggagggcatgatgacggcataaaagcagatt

SEQ ID NO: 43564 - DNA, 33 bp, Homo sapien
ctggagggcatgatgatggcataaaagcagatt

SEQ ID NO: 43565 - DNA, 33 bp, Homo sapien
ggctgcaggattataaagagtgctcagaagatg

SEQ ID NO: 43566 - DNA, 33 bp, Homo sapien
ggctgcaggattataaggagtgctcagaagatg

SEQ ID NO: 43567 - DNA, 33 bp, Homo sapien
aaaacagacatgatcccgctttcgagctgctta

SEQ ID NO: 43568 - DNA, 33 bp, Homo sapien
aaaacagacatgatcctgctttcgagctgctta

SEQ ID NO: 43569 - DNA, 33 bp, Homo sapien
ctatgaccaaccaggacgaagcccaagaaggga

SEQ ID NO: 43570 - DNA, 33 bp, Homo sapien
ctatgaccaaccaggatgaagcccaagaaggga

SEQ ID NO: 43571 - DNA, 33 bp, Homo sapien
ccaaagaagagtgtaaataaaattgatgaggtg

SEQ ID NO: 43572 - DNA, 33 bp, Homo sapien
ccaaagaagagtgtaagtaaaattgatgaggtg

SEQ ID NO: 43573 - DNA, 33 bp, Homo sapien
attaagtcttgatgatcagtaggtttttgtctg

SEQ ID NO: 43574 - DNA, 33 bp, Homo sapien
attaagtcttgatgatgagtaggtttttgtctg

SEQ ID NO: 43575 - DNA, 33 bp, Homo sapien
atttaattccctgcaaaccaaactgttaaacaa

SEQ ID NO: 43576 - DNA, 33 bp, Homo sapien
atttaattccctgcaagccaaactgttaaacaa

SEQ ID NO: 43577 - DNA, 33 bp, Homo sapien
gagagttaaagtatcaaggaaaagtcactagtc

SEQ ID NO: 43578 - DNA, 33 bp, Homo sapien
gagagttaaagtatcagggaaaagtcactagtc

SEQ ID NO: 43579 - DNA, 33 bp, Homo sapien
ccacactgcctttaaccacgagccatataccaa

SEQ ID NO: 43580 - DNA, 33 bp, Homo sapien
ccacactgcctttaacgacgagccatataccaa

SEQ ID NO: 43581 - DNA, 33 bp, Homo sapien
ctgacaggctcttcaaagtcaatgcaacttttc

SEQ ID NO: 43582 - DNA, 33 bp, Homo sapien
ctgacaggctcttcaacgtcaatgcaacttttc

SEQ ID NO: 43583 - DNA, 33 bp, Homo sapien
cacatcaacgagaaaacgatagagcctactttc

SEQ ID NO: 43584 - DNA, 33 bp, Homo sapien
cacatcaacgagaaaatgatagagcctactttc

SEQ ID NO: 43585 - DNA, 33 bp, Homo sapien
atctaaagcagactcccactatatgcctttgtt

SEQ ID NO: 43586 - DNA, 33 bp, Homo sapien
atctaaagcagactcctactatatgcctttgtt

SEQ ID NO: 43587 - DNA, 33 bp, Homo sapien
taaataagtgctattgccaaccatgaggaatca

SEQ ID NO: 43588 - DNA, 33 bp, Homo sapien
taaataagtgctattgtcaaccatgaggaatca

SEQ ID NO: 43589 - DNA, 33 bp, Homo sapien
aaggcaaacgaaatccaacctatctttggctta

SEQ ID NO: 43590 - DNA, 33 bp, Homo sapien
aaggcaaacgaaatccgacctatctttggctta

SEQ ID NO: 43591 - DNA, 33 bp, Homo sapien
ctctccacaacaatatcagaatcgagtaagagg

SEQ ID NO: 43592 - DNA, 33 bp, Homo sapien
ctctccacaacaatattagaatcgagtaagagg

SEQ ID NO: 43593 - DNA, 33 bp, Homo sapien
ccacttccaggataatgaaagaccttacaacat

SEQ ID NO: 43594 - DNA, 33 bp, Homo sapien
ccacttccaggataattaaagaccttacaacat

SEQ ID NO: 43595 - DNA, 33 bp, Homo sapien
aagctaaagtggtatccatgagccagatcatga

SEQ ID NO: 43596 - DNA, 33 bp, Homo sapien
aagctaaagtggtatctatgagccagatcatga

SEQ ID NO: 43597 - DNA, 33 bp, Homo sapien
cttgcacatttcctcaacccaggacactctcag

SEQ ID NO: 43598 - DNA, 33 bp, Homo sapien
cttgcacatttcctcagcccaggacactctcag

SEQ ID NO: 43599 - DNA, 33 bp, Homo sapien
aaggagacctaagttgcaatctgagagacctct

SEQ ID NO: 43600 - DNA, 33 bp, Homo sapien
aaggagacctaagttgtaatctgagagacctct

SEQ ID NO: 43601 - DNA, 33 bp, Homo sapien
agtcttcaaaatgtaacgtactgagagtataat

SEQ ID NO: 43602 - DNA, 33 bp, Homo sapien
agtcttcaaaatgtaatgtactgagagtataat

SEQ ID NO: 43603 - DNA, 33 bp, Homo sapien
ttctgataactgaaacccctccacagtctcaat

SEQ ID NO: 43604 - DNA, 33 bp, Homo sapien
ttctgataactgaaactcctccacagtctcaat

SEQ ID NO: 43605 - DNA, 33 bp, Homo sapien
aagacggatgaagaagcaagatcaagactagca

SEQ ID NO: 43606 - DNA, 33 bp, Homo sapien
aagacggatgaagaaggaagatcaagactagca

SEQ ID NO: 43607 - DNA, 33 bp, Homo sapien
tagtctgcagagagtacaggaactacttaactt

SEQ ID NO: 43608 - DNA, 33 bp, Homo sapien
tagtctgcagagagtataggaactacttaactt

SEQ ID NO: 43609 - DNA, 33 bp, Homo sapien
tgtgagctgcagcacaaatgctctgttgattcc

SEQ ID NO: 43610 - DNA, 33 bp, Homo sapien
tgtgagctgcagcacagatgctctgttgattcc

SEQ ID NO: 43611 - DNA, 33 bp, Homo sapien
atgccataggcggccacctgtcagtgagtacag

SEQ ID NO: 43612 - DNA, 33 bp, Homo sapien
atgccataggcggccatctgtcagtgagtacag

SEQ ID NO: 43613 - DNA, 33 bp, Homo sapien
tattagtcatcatgtcaaaatgaaaatatagcc

SEQ ID NO: 43614 - DNA, 33 bp, Homo sapien
tattagtcatcatgtcgaaatgaaaatatagcc

SEQ ID NO: 43615 - DNA, 33 bp, Homo sapien
aattaaagagagaacaaatatttaaacaggtgc

SEQ ID NO: 43616 - DNA, 33 bp, Homo sapien
aattaaagagagaacagatatttaaacaggtgc

SEQ ID NO: 43617 - DNA, 33 bp, Homo sapien
atggtggtaaatgtgacgggtgcttacacactg

SEQ ID NO: 43618 - DNA, 33 bp, Homo sapien
atggtggtaaatgtgatgggtgcttacacactg

SEQ ID NO: 43619 - DNA, 33 bp, Homo sapien
aacagcagccatatacagcaaacatgggtctgg

SEQ ID NO: 43620 - DNA, 33 bp, Homo sapien
aacagcagccatatacggcaaacatgggtctgg

SEQ ID NO: 43621 - DNA, 33 bp, Homo sapien
tgctgtgttatagtctcaacgtctgtgtcttcc

SEQ ID NO: 43622 - DNA, 33 bp, Homo sapien
tgctgtgttatagtcttaacgtctgtgtcttcc

SEQ ID NO: 43623 - DNA, 33 bp, Homo sapien
tgttagatgtagattacgtcagttacatacaag

SEQ ID NO: 43624 - DNA, 33 bp, Homo sapien
tgttagatgtagattaggtcagttacatacaag

SEQ ID NO: 43625 - DNA, 33 bp, Homo sapien
ttgttcttggtagacacgaccacacttcttgct

SEQ ID NO: 43626 - DNA, 33 bp, Homo sapien
ttgttcttggtagacatgaccacacttcttgct

SEQ ID NO: 43627 - DNA, 33 bp, Homo sapien
aacagctttggatgagacacttaatctgctgaa

SEQ ID NO: 43628 - DNA, 33 bp, Homo sapien
aacagctttggatgagccacttaatctgctgaa

SEQ ID NO: 43629 - DNA, 33 bp, Homo sapien
tgctaaaagttgtgaacgaccactttgggaagt

SEQ ID NO: 43630 - DNA, 33 bp, Homo sapien
tgctaaaagttgtgaatgaccactttgggaagt

SEQ ID NO: 43631 - DNA, 33 bp, Homo sapien
ctgctgcttttacttacccttgattcactcctc

SEQ ID NO: 43632 - DNA, 33 bp, Homo sapien
ctgctgcttttacttatccttgattcactcctc

SEQ ID NO: 43633 - DNA, 33 bp, Homo sapien
gaagaaacatattttaagaacatgaaagagtat

SEQ ID NO: 43634 - DNA, 33 bp, Homo sapien
gaagaaacatattttaggaacatgaaagagtat

SEQ ID NO: 43635 - DNA, 33 bp, Homo sapien
gctggaactgagttcagagtaactgtgagttat

SEQ ID NO: 43636 - DNA, 33 bp, Homo sapien
gctggaactgagttcatagtaactgtgagttat

SEQ ID NO: 43637 - DNA, 33 bp, Homo sapien
atccttttggttcctacgggcgctgcacggttt

SEQ ID NO: 43638 - DNA, 33 bp, Homo sapien
atccttttggttcctatgggcgctgcacggttt

SEQ ID NO: 43639 - DNA, 33 bp, Homo sapien
agataacctagaacctcaagacctccagtggct

SEQ ID NO: 43640 - DNA, 33 bp, Homo sapien
agataacctagaacctgaagacctccagtggct

SEQ ID NO: 43641 - DNA, 33 bp, Homo sapien
acaccagaagttcagaaaagtaaatatgattct

SEQ ID NO: 43642 - DNA, 33 bp, Homo sapien
acaccagaagttcagacaagtaaatatgattct

SEQ ID NO: 43643 - DNA, 33 bp, Homo sapien
ccaacacacccaggaacaagtccaaccccacaa

SEQ ID NO: 43644 - DNA, 33 bp, Homo sapien
ccaacacacccaggaagaagtccaaccccacaa

SEQ ID NO: 43645 - DNA, 33 bp, Homo sapien
ccctggattttattcaatatttcacaggtcaaa

SEQ ID NO: 43646 - DNA, 33 bp, Homo sapien
ccctggattttattcactatttcacaggtcaaa

SEQ ID NO: 43647 - DNA, 33 bp, Homo sapien
ataaatcaagctttaaagaaaaacaaactctaa

SEQ ID NO: 43648 - DNA, 33 bp, Homo sapien
ataaatcaagctttaaggaaaaacaaactctaa

SEQ ID NO: 43649 - DNA, 33 bp, Homo sapien
ccttccctacttgaaacaaccgtatgtggtttg

SEQ ID NO: 43650 - DNA, 33 bp, Homo sapien
ccttccctacttgaaataaccgtatgtggtttg

SEQ ID NO: 43651 - DNA, 33 bp, Homo sapien
ttaaaaggacctcaaaagaattgttgtttggta

SEQ ID NO: 43652 - DNA, 33 bp, Homo sapien
ttaaaaggacctcaaacgaattgttgtttggta

SEQ ID NO: 43653 - DNA, 33 bp, Homo sapien
gggctgagtgacagaaagagtgaggaagagcaa

SEQ ID NO: 43654 - DNA, 33 bp, Homo sapien
gggctgagtgacagaaggagtgaggaagagcaa

SEQ ID NO: 43655 - DNA, 33 bp, Homo sapien
tctctttagaatgaacaaaggtctgggtcctct

SEQ ID NO: 43656 - DNA, 33 bp, Homo sapien
tctctttagaatgaacgaaggtctgggtcctct

SEQ ID NO: 43657 - DNA, 33 bp, Homo sapien
aaaactggaaaatcctaagctagattatatttt

SEQ ID NO: 43658 - DNA, 33 bp, Homo sapien
aaaactggaaaatcctgagctagattatatttt

SEQ ID NO: 43659 - DNA, 33 bp, Homo sapien
atgtgtagactaaagaaaagagtaacataacgg

SEQ ID NO: 43660 - DNA, 33 bp, Homo sapien
atgtgtagactaaagagaagagtaacataacgg

SEQ ID NO: 43661 - DNA, 33 bp, Homo sapien
agatggaaatgtgccaagctggtataagcccag

SEQ ID NO: 43662 - DNA, 33 bp, Homo sapien
agatggaaatgtgccaggctggtataagcccag

SEQ ID NO: 43663 - DNA, 33 bp, Homo sapien
aggacctttcaccttgactatatggcattatgt

SEQ ID NO: 43664 - DNA, 33 bp, Homo sapien
aggacctttcaccttgtctatatggcattatgt

SEQ ID NO: 43665 - DNA, 33 bp, Homo sapien
agatatttagccctgactaattaccctggattc

SEQ ID NO: 43666 - DNA, 33 bp, Homo sapien
agatatttagccctgagtaattaccctggattc

SEQ ID NO: 43667 - DNA, 33 bp, Homo sapien
atgcttttttgtggccaaggcacattattttag

SEQ ID NO: 43668 - DNA, 33 bp, Homo sapien
atgcttttttgtggccgaggcacattattttag

SEQ ID NO: 43669 - DNA, 33 bp, Homo sapien
atctttacaggatccacgtcattacattagctt

SEQ ID NO: 43670 - DNA, 33 bp, Homo sapien
atctttacaggatccatgtcattacattagctt

SEQ ID NO: 43671 - DNA, 33 bp, Homo sapien
cataagtatcaaaagaaaagttaatcacagtgt

SEQ ID NO: 43672 - DNA, 33 bp, Homo sapien
cataagtatcaaaagagaagttaatcacagtgt

SEQ ID NO: 43673 - DNA, 33 bp, Homo sapien
ctagtctgaaagggaaatgtaggaagtgtacta

SEQ ID NO: 43674 - DNA, 33 bp, Homo sapien
ctagtctgaaagggaagtgtaggaagtgtacta

SEQ ID NO: 43675 - DNA, 33 bp, Homo sapien
ttggtgaattaaaagaagatttcatgggagggc

SEQ ID NO: 43676 - DNA, 33 bp, Homo sapien
ttggtgaattaaaagaggatttcatgggagggc

SEQ ID NO: 43677 - DNA, 33 bp, Homo sapien
atcacatttccccaaaatttagatgtggtaatc

SEQ ID NO: 43678 - DNA, 33 bp, Homo sapien
atcacatttccccaaagtttagatgtggtaatc

SEQ ID NO: 43679 - DNA, 33 bp, Homo sapien
taaagttgaattgaaaaattacttctcagaaaa

SEQ ID NO: 43680 - DNA, 33 bp, Homo sapien
taaagttgaattgaaagattacttctcagaaaa

SEQ ID NO: 43681 - DNA, 33 bp, Homo sapien
taaagcaggggcaagacgaaacctgagcagctc

SEQ ID NO: 43682 - DNA, 33 bp, Homo sapien
taaagcaggggcaagatgaaacctgagcagctc

SEQ ID NO: 43683 - DNA, 33 bp, Homo sapien
gctgagttttagcagacgctggtgaccatctgc

SEQ ID NO: 43684 - DNA, 33 bp, Homo sapien
gctgagttttagcagatgctggtgaccatctgc

SEQ ID NO: 43685 - DNA, 33 bp, Homo sapien
gtggcaattcaggtacaatatttagcactttac

SEQ ID NO: 43686 - DNA, 33 bp, Homo sapien
gtggcaattcaggtactatatttagcactttac

SEQ ID NO: 43687 - DNA, 33 bp, Homo sapien
ctctgtataatggaagaatctcagaatcagagc

SEQ ID NO: 43688 - DNA, 33 bp, Homo sapien
ctctgtataatggaagcatctcagaatcagagc

SEQ ID NO: 43689 - DNA, 33 bp, Homo sapien
cccacgctgatgttacccaataggcaggacaaa

SEQ ID NO: 43690 - DNA, 33 bp, Homo sapien
cccacgctgatgttactcaataggcaggacaaa

SEQ ID NO: 43691 - DNA, 33 bp, Homo sapien
cactgctcctcttttcccacacctcagtgtagc

SEQ ID NO: 43692 - DNA, 33 bp, Homo sapien
cactgctcctcttttctcacacctcagtgtagc

SEQ ID NO: 43693 - DNA, 33 bp, Homo sapien
agaaacaatataatgaagcattatgcctgataa

SEQ ID NO: 43694 - DNA, 33 bp, Homo sapien
agaaacaatataatgaggcattatgcctgataa

SEQ ID NO: 43695 - DNA, 33 bp, Homo sapien
ttgctgtagggttgaacgagaaacaatataatg

SEQ ID NO: 43696 - DNA, 33 bp, Homo sapien
ttgctgtagggttgaatgagaaacaatataatg

SEQ ID NO: 43697 - DNA, 33 bp, Homo sapien
ggaaacatttttggtcgacacagcaagggtagt

SEQ ID NO: 43698 - DNA, 33 bp, Homo sapien
ggaaacatttttggtctacacagcaagggtagt

SEQ ID NO: 43699 - DNA, 33 bp, Homo sapien
tttgaaaaatagttgaaggaactagggtggttt

SEQ ID NO: 43700 - DNA, 33 bp, Homo sapien
tttgaaaaatagttgagggaactagggtggttt

SEQ ID NO: 43701 - DNA, 33 bp, Homo sapien
ttccaacagagctcgcggagactggcctgcaaa

SEQ ID NO: 43702 - DNA, 33 bp, Homo sapien
ttccaacagagctcgctgagactggcctgcaaa

SEQ ID NO: 43703 - DNA, 33 bp, Homo sapien
tcatcagagatctagacgctgagcttgtacaca

SEQ ID NO: 43704 - DNA, 33 bp, Homo sapien
tcatcagagatctagatgctgagcttgtacaca

SEQ ID NO: 43705 - DNA, 33 bp, Homo sapien
ctttcatgagcgttccaacatcaccactgtcat

SEQ ID NO: 43706 - DNA, 33 bp, Homo sapien
ctttcatgagcgttcccacatcaccactgtcat

SEQ ID NO: 43707 - DNA, 33 bp, Homo sapien
ctggagatcccaatacccagaagctattgctgt

SEQ ID NO: 43708 - DNA, 33 bp, Homo sapien
ctggagatcccaatactcagaagctattgctgt

SEQ ID NO: 43709 - DNA, 33 bp, Homo sapien
tgtgtgatattcttcaagttttggagtcagaac

SEQ ID NO: 43710 - DNA, 33 bp, Homo sapien
tgtgtgatattcttcaggttttggagtcagaac

SEQ ID NO: 43711 - DNA, 33 bp, Homo sapien
caactcaactcaaagtcaactctcaactcaaag

SEQ ID NO: 43712 - DNA, 33 bp, Homo sapien
caactcaactcaaagtgaactctcaactcaaag

SEQ ID NO: 43713 - DNA, 33 bp, Homo sapien
agatttgcagccatgcagagaacgatagaatca

SEQ ID NO: 43714 - DNA, 33 bp, Homo sapien
agatttgcagccatgcggagaacgatagaatca

SEQ ID NO: 43715 - DNA, 33 bp, Homo sapien
tattatttattccaaacgtgatggcttttaact

SEQ ID NO: 43716 - DNA, 33 bp, Homo sapien
tattatttattccaaatgtgatggcttttaact

SEQ ID NO: 43717 - DNA, 33 bp, Homo sapien
gtgtccgtaagagcacacaataaggtgtatggt

SEQ ID NO: 43718 - DNA, 33 bp, Homo sapien
gtgtccgtaagagcacccaataaggtgtatggt

SEQ ID NO: 43719 - DNA, 33 bp, Homo sapien
ggtgatgaggaagatcaacagaggagaatgggc

SEQ ID NO: 43720 - DNA, 33 bp, Homo sapien
ggtgatgaggaagatcgacagaggagaatgggc

SEQ ID NO: 43721 - DNA, 33 bp, Homo sapien
acatttaagaaataaacatgatgtaatgggatg

SEQ ID NO: 43722 - DNA, 33 bp, Homo sapien
acatttaagaaataaagatgatgtaatgggatg

SEQ ID NO: 43723 - DNA, 33 bp, Homo sapien
agggtggagttagaaaagtacttgtgggagaaa

SEQ ID NO: 43724 - DNA, 33 bp, Homo sapien
agggtggagttagaaaggtacttgtgggagaaa

SEQ ID NO: 43725 - DNA, 33 bp, Homo sapien
tcctcccctaatgctcacttttattgtacagaa

SEQ ID NO: 43726 - DNA, 33 bp, Homo sapien
tcctcccctaatgctcccttttattgtacagaa

SEQ ID NO: 43727 - DNA, 33 bp, Homo sapien
ccagcaattcccataacagaatttctcttctcc

SEQ ID NO: 43728 - DNA, 33 bp, Homo sapien
ccagcaattcccataatagaatttctcttctcc

SEQ ID NO: 43729 - DNA, 33 bp, Homo sapien
tgctggagagaatgaacggttcaaggaacagag

SEQ ID NO: 43730 - DNA, 33 bp, Homo sapien
tgctggagagaatgaatggttcaaggaacagag

SEQ ID NO: 43731 - DNA, 33 bp, Homo sapien
ggcaacagataaggccaattttcaagatatatc

SEQ ID NO: 43732 - DNA, 33 bp, Homo sapien
ggcaacagataaggcctattttcaagatatatc

SEQ ID NO: 43733 - DNA, 33 bp, Homo sapien
aagctagggataaccactgaaagattctttttg

SEQ ID NO: 43734 - DNA, 33 bp, Homo sapien
aagctagggataaccattgaaagattctttttg

SEQ ID NO: 43735 - DNA, 33 bp, Homo sapien
ctcccaagcagactgaaccattcacatttcaac

SEQ ID NO: 43736 - DNA, 33 bp, Homo sapien
ctcccaagcagactgatccattcacatttcaac

SEQ ID NO: 43737 - DNA, 33 bp, Homo sapien
cttgtgtcaagccataaaacattactaatagct

SEQ ID NO: 43738 - DNA, 33 bp, Homo sapien
cttgtgtcaagccatacaacattactaatagct

SEQ ID NO: 43739 - DNA, 33 bp, Homo sapien
gaggaggaaatgaccccaaaatgccaaatgcca

SEQ ID NO: 43740 - DNA, 33 bp, Homo sapien
gaggaggaaatgaccctaaaatgccaaatgcca

SEQ ID NO: 43741 - DNA, 33 bp, Homo sapien
caaagaatggattctcccctagagtgtctggag

SEQ ID NO: 43742 - DNA, 33 bp, Homo sapien
caaagaatggattctcgcctagagtgtctggag

SEQ ID NO: 43743 - DNA, 33 bp, Homo sapien
ttctctcccttcccgaacaactctaactcgtct

SEQ ID NO: 43744 - DNA, 33 bp, Homo sapien
ttctctcccttcccgagcaactctaactcgtct

SEQ ID NO: 43745 - DNA, 33 bp, Homo sapien
gtttgcacaggctgaactaacctccctgtgatt

SEQ ID NO: 43746 - DNA, 33 bp, Homo sapien
gtttgcacaggctgaattaacctccctgtgatt

SEQ ID NO: 43747 - DNA, 33 bp, Homo sapien
ctgtactttgggcccgaccgttcagtttacatg

SEQ ID NO: 43748 - DNA, 33 bp, Homo sapien
ctgtactttgggcccggccgttcagtttacatg

SEQ ID NO: 43749 - DNA, 33 bp, Homo sapien
gataaagcaacttctaagctggatggatcatgt

SEQ ID NO: 43750 - DNA, 33 bp, Homo sapien
gataaagcaacttctaggctggatggatcatgt

SEQ ID NO: 43751 - DNA, 33 bp, Homo sapien
tggaagaacgcttctacagcataggctgaggag

SEQ ID NO: 43752 - DNA, 33 bp, Homo sapien
tggaagaacgcttctatagcataggctgaggag

SEQ ID NO: 43753 - DNA, 33 bp, Homo sapien
tcctttctttctatacactgcaatggagtcact

SEQ ID NO: 43754 - DNA, 33 bp, Homo sapien
tcctttctttctatacgctgcaatggagtcact

SEQ ID NO: 43755 - DNA, 33 bp, Homo sapien
ggtgaggggcaaaagccaggtgtgtttctcaag

SEQ ID NO: 43756 - DNA, 33 bp, Homo sapien
ggtgaggggcaaaagctaggtgtgtttctcaag

SEQ ID NO: 43757 - DNA, 33 bp, Homo sapien
actgtagagctacacacgtaaaattgctaaatt

SEQ ID NO: 43758 - DNA, 33 bp, Homo sapien
actgtagagctacacatgtaaaattgctaaatt

SEQ ID NO: 43759 - DNA, 33 bp, Homo sapien
atgggcaccctctttcacattttttttcttggc

SEQ ID NO: 43760 - DNA, 33 bp, Homo sapien
atgggcaccctctttcgcattttttttcttggc

SEQ ID NO: 43761 - DNA, 33 bp, Homo sapien
agctagggacagatcacataacctggggacttc

SEQ ID NO: 43762 - DNA, 33 bp, Homo sapien
agctagggacagatcatataacctggggacttc

SEQ ID NO: 43763 - DNA, 33 bp, Homo sapien
cttaaaaagcacaacaatcctttaagaggagca

SEQ ID NO: 43764 - DNA, 33 bp, Homo sapien
cttaaaaagcacaacagtcctttaagaggagca

SEQ ID NO: 43765 - DNA, 33 bp, Homo sapien
gaaaacgagaattcaaatagagttcaggtggca

SEQ ID NO: 43766 - DNA, 33 bp, Homo sapien
gaaaacgagaattcaagtagagttcaggtggca

SEQ ID NO: 43767 - DNA, 33 bp, Homo sapien
ctttcatgaaactttcaatctagggagagatga

SEQ ID NO: 43768 - DNA, 33 bp, Homo sapien
ctttcatgaaactttccatctagggagagatga

SEQ ID NO: 43769 - DNA, 33 bp, Homo sapien
gaaaactagcaagaaacttcatagtgctactaa

SEQ ID NO: 43770 - DNA, 33 bp, Homo sapien
gaaaactagcaagaaagttcatagtgctactaa

SEQ ID NO: 43771 - DNA, 33 bp, Homo sapien
taatttcatgcaaccaccaacatatccattgtt

SEQ ID NO: 43772 - DNA, 33 bp, Homo sapien
taatttcatgcaaccatcaacatatccattgtt

SEQ ID NO: 43773 - DNA, 33 bp, Homo sapien
tctctctctcatagtaaacatagcacaaggtac

SEQ ID NO: 43774 - DNA, 33 bp, Homo sapien
tctctctctcatagtatacatagcacaaggtac

SEQ ID NO: 43775 - DNA, 33 bp, Homo sapien
agctgtagtccttacaaaattgtccaatttgtt

SEQ ID NO: 43776 - DNA, 33 bp, Homo sapien
agctgtagtccttacagaattgtccaatttgtt

SEQ ID NO: 43777 - DNA, 33 bp, Homo sapien
gattactctcataaacaacgactcctgacaaat

SEQ ID NO: 43778 - DNA, 33 bp, Homo sapien
gattactctcataaacgacgactcctgacaaat

SEQ ID NO: 43779 - DNA, 33 bp, Homo sapien
ctgctctaccaactagacatttccctgtctctc

SEQ ID NO: 43780 - DNA, 33 bp, Homo sapien
ctgctctaccaactagccatttccctgtctctc

SEQ ID NO: 43781 - DNA, 33 bp, Homo sapien
ataccagtttatgtaaagcgaacgtttcacagt

SEQ ID NO: 43782 - DNA, 33 bp, Homo sapien
ataccagtttatgtaacgcgaacgtttcacagt

SEQ ID NO: 43783 - DNA, 33 bp, Homo sapien
agtaaatattatctctcaccgctattactatag

SEQ ID NO: 43784 - DNA, 33 bp, Homo sapien
agtaaatattatctcttaccgctattactatag

SEQ ID NO: 43785 - DNA, 33 bp, Homo sapien
ctccaagttgtaatgacgagagatttgagaatt

SEQ ID NO: 43786 - DNA, 33 bp, Homo sapien
ctccaagttgtaatgatgagagatttgagaatt

SEQ ID NO: 43787 - DNA, 33 bp, Homo sapien
ggcagtggcaaagttaaatgaaaaaacctgtat

SEQ ID NO: 43788 - DNA, 33 bp, Homo sapien
ggcagtggcaaagttagatgaaaaaacctgtat

SEQ ID NO: 43789 - DNA, 33 bp, Homo sapien
aaggtaaaatgagcctcaacttacgtcaagaat

SEQ ID NO: 43790 - DNA, 33 bp, Homo sapien
aaggtaaaatgagccttaacttacgtcaagaat

SEQ ID NO: 43791 - DNA, 33 bp, Homo sapien
gtataagagttttagaacctttgaaggaatcta

SEQ ID NO: 43792 - DNA, 33 bp, Homo sapien
gtataagagttttagagcctttgaaggaatcta

SEQ ID NO: 43793 - DNA, 33 bp, Homo sapien
agatgagagctctaaaagtagaattgacaaacc

SEQ ID NO: 43794 - DNA, 33 bp, Homo sapien
agatgagagctctaaaggtagaattgacaaacc

SEQ ID NO: 43795 - DNA, 33 bp, Homo sapien
aagttaagaacacagacgaaaagtcaaacaatc

SEQ ID NO: 43796 - DNA, 33 bp, Homo sapien
aagttaagaacacagatgaaaagtcaaacaatc

SEQ ID NO: 43797 - DNA, 33 bp, Homo sapien
aggaggtgtctgataaggagtcaaagaattgat

SEQ ID NO: 43798 - DNA, 33 bp, Homo sapien
aggaggtgtctgataatgagtcaaagaattgat

SEQ ID NO: 43799 - DNA, 33 bp, Homo sapien
ggtggtcacatgagaaatgatacctgttactac

SEQ ID NO: 43800 - DNA, 33 bp, Homo sapien
ggtggtcacatgagaagtgatacctgttactac

SEQ ID NO: 43801 - DNA, 33 bp, Homo sapien
attatttttccagaccaacacatctaccaagta

SEQ ID NO: 43802 - DNA, 33 bp, Homo sapien
attatttttccagaccgacacatctaccaagta

SEQ ID NO: 43803 - DNA, 33 bp, Homo sapien
tctactgatccgtaaaagataaccactgcaaat

SEQ ID NO: 43804 - DNA, 33 bp, Homo sapien
tctactgatccgtaaatgataaccactgcaaat

SEQ ID NO: 43805 - DNA, 33 bp, Homo sapien
tcccctcatcacataccctggcatgctccagca

SEQ ID NO: 43806 - DNA, 33 bp, Homo sapien
tcccctcatcacatacgctggcatgctccagca

SEQ ID NO: 43807 - DNA, 33 bp, Homo sapien
cagactggacttgggacgattctcctttgcagc

SEQ ID NO: 43808 - DNA, 33 bp, Homo sapien
cagactggacttgggatgattctcctttgcagc

SEQ ID NO: 43809 - DNA, 33 bp, Homo sapien
aagaagatgaccgggcaattttgactcccagga

SEQ ID NO: 43810 - DNA, 33 bp, Homo sapien
aagaagatgaccgggcgattttgactcccagga

SEQ ID NO: 43811 - DNA, 33 bp, Homo sapien
ggccggtgtgagccatcaccaggtgttcagaag

SEQ ID NO: 43812 - DNA, 33 bp, Homo sapien
ggccggtgtgagccattaccaggtgttcagaag

SEQ ID NO: 43813 - DNA, 33 bp, Homo sapien
actaaagtgagcttccagaggggaaaggctaag

SEQ ID NO: 43814 - DNA, 33 bp, Homo sapien
actaaagtgagcttccggaggggaaaggctaag

SEQ ID NO: 43815 - DNA, 33 bp, Homo sapien
tagctggtggcagataagcagcacagctcagtg

SEQ ID NO: 43816 - DNA, 33 bp, Homo sapien
tagctggtggcagatacgcagcacagctcagtg

SEQ ID NO: 43817 - DNA, 33 bp, Homo sapien
tggtatggaaagcaaacggagaaacgatggaac

SEQ ID NO: 43818 - DNA, 33 bp, Homo sapien
tggtatggaaagcaaatggagaaacgatggaac

SEQ ID NO: 43819 - DNA, 33 bp, Homo sapien
ccctggtaatgcttcacacaaaacataggatgg

SEQ ID NO: 43820 - DNA, 33 bp, Homo sapien
ccctggtaatgcttcagacaaaacataggatgg

SEQ ID NO: 43821 - DNA, 33 bp, Homo sapien
agggtcaagagaggcccatctgtgagcattaag

SEQ ID NO: 43822 - DNA, 33 bp, Homo sapien
agggtcaagagaggcctatctgtgagcattaag

SEQ ID NO: 43823 - DNA, 33 bp, Homo sapien
aattatactcttctaccgaaaaatgcaaaacca

SEQ ID NO: 43824 - DNA, 33 bp, Homo sapien
aattatactcttctactgaaaaatgcaaaacca

SEQ ID NO: 43825 - DNA, 33 bp, Homo sapien
acacggcatcagtaaaatcctccagtggttccc

SEQ ID NO: 43826 - DNA, 33 bp, Homo sapien
acacggcatcagtaaagtcctccagtggttccc

SEQ ID NO: 43827 - DNA, 33 bp, Homo sapien
gagaagaaatggaaaagaacacggcatcagtaa

SEQ ID NO: 43828 - DNA, 33 bp, Homo sapien
gagaagaaatggaaaataacacggcatcagtaa

SEQ ID NO: 43829 - DNA, 33 bp, Homo sapien
atccagagctcttccaaaggcatttccaaacac

SEQ ID NO: 43830 - DNA, 33 bp, Homo sapien
atccagagctcttccagaggcatttccaaacac

SEQ ID NO: 43831 - DNA, 33 bp, Homo sapien
aggaatgggctgatcccgatccagaaaactaag

SEQ ID NO: 43832 - DNA, 33 bp, Homo sapien
aggaatgggctgatcctgatccagaaaactaag

SEQ ID NO: 43833 - DNA, 33 bp, Homo sapien
gttcctttaaaacaaacagtagcataacgatta

SEQ ID NO: 43834 - DNA, 33 bp, Homo sapien
gttcctttaaaacaaatagtagcataacgatta

SEQ ID NO: 43835 - DNA, 33 bp, Homo sapien
ttatgggttgttatagaaatcaaatgattgatc

SEQ ID NO: 43836 - DNA, 33 bp, Homo sapien
ttatgggttgttataggaatcaaatgattgatc

SEQ ID NO: 43837 - DNA, 33 bp, Homo sapien
gaaagactaggtctcacggttacatagtgaaca

SEQ ID NO: 43838 - DNA, 33 bp, Homo sapien
gaaagactaggtctcatggttacatagtgaaca

SEQ ID NO: 43839 - DNA, 33 bp, Homo sapien
agagatggacttggagacgtggttgtcattcac

SEQ ID NO: 43840 - DNA, 33 bp, Homo sapien
agagatggacttggagtcgtggttgtcattcac

SEQ ID NO: 43841 - DNA, 33 bp, Homo sapien
ttaatgttgctttgaccgaattgactgtgtgca

SEQ ID NO: 43842 - DNA, 33 bp, Homo sapien
ttaatgttgctttgactgaattgactgtgtgca

SEQ ID NO: 43843 - DNA, 33 bp, Homo sapien
tcaaaaacaccataaaatcagaaggcaaaagta

SEQ ID NO: 43844 - DNA, 33 bp, Homo sapien
tcaaaaacaccataaagtcagaaggcaaaagta

SEQ ID NO: 43845 - DNA, 33 bp, Homo sapien
taggaagagtggttccactacataggtgaccta

SEQ ID NO: 43846 - DNA, 33 bp, Homo sapien
taggaagagtggttcctctacataggtgaccta

SEQ ID NO: 43847 - DNA, 33 bp, Homo sapien
tttcgagtcaacaaaaagttaggtcacctatgt

SEQ ID NO: 43848 - DNA, 33 bp, Homo sapien
tttcgagtcaacaaaaggttaggtcacctatgt

SEQ ID NO: 43849 - DNA, 33 bp, Homo sapien
ttataggagaagtctaccctaacaagtacttgt

SEQ ID NO: 43850 - DNA, 33 bp, Homo sapien
ttataggagaagtctatcctaacaagtacttgt

SEQ ID NO: 43851 - DNA, 33 bp, Homo sapien
actcattgagtcctcacggcaacactgagcagt

SEQ ID NO: 43852 - DNA, 33 bp, Homo sapien
actcattgagtcctcatggcaacactgagcagt

SEQ ID NO: 43853 - DNA, 33 bp, Homo sapien
ggctgcatgaggtcctcactgaagttgtaccta

SEQ ID NO: 43854 - DNA, 33 bp, Homo sapien
ggctgcatgaggtcctgactgaagttgtaccta

SEQ ID NO: 43855 - DNA, 33 bp, Homo sapien
ccctctccaacaagaacgggaagaacgtggagc

SEQ ID NO: 43856 - DNA, 33 bp, Homo sapien
ccctctccaacaagaatgggaagaacgtggagc

SEQ ID NO: 43857 - DNA, 33 bp, Homo sapien
ggtggaagtgctcagaaatgggattattggaac

SEQ ID NO: 43858 - DNA, 33 bp, Homo sapien
ggtggaagtgctcagagatgggattattggaac

SEQ ID NO: 43859 - DNA, 33 bp, Homo sapien
ccctttaaaagccaaacgcctacatctagaagg

SEQ ID NO: 43860 - DNA, 33 bp, Homo sapien
ccctttaaaagccaaatgcctacatctagaagg

SEQ ID NO: 43861 - DNA, 33 bp, Homo sapien
ccgtattacagtgccacgttggaaaacgctaca

SEQ ID NO: 43862 - DNA, 33 bp, Homo sapien
ccgtattacagtgccatgttggaaaacgctaca

SEQ ID NO: 43863 - DNA, 33 bp, Homo sapien
gaataaacataagcaacttagtcccttgaacaa

SEQ ID NO: 43864 - DNA, 33 bp, Homo sapien
gaataaacataagcaatttagtcccttgaacaa

SEQ ID NO: 43865 - DNA, 33 bp, Homo sapien
cacagtagggtcttacacaggttttaatgtatg

SEQ ID NO: 43866 - DNA, 33 bp, Homo sapien
cacagtagggtcttacgcaggttttaatgtatg

SEQ ID NO: 43867 - DNA, 33 bp, Homo sapien
aaaagtgggcagagaacgaagcacgcaggtgtt

SEQ ID NO: 43868 - DNA, 33 bp, Homo sapien
aaaagtgggcagagaatgaagcacgcaggtgtt

SEQ ID NO: 43869 - DNA, 33 bp, Homo sapien
gttttcagtgttgtaacagtgggggaaccaggc

SEQ ID NO: 43870 - DNA, 33 bp, Homo sapien
gttttcagtgttgtaatagtgggggaaccaggc

SEQ ID NO: 43871 - DNA, 33 bp, Homo sapien
aaatccagacataccaaatgctcctgatgagag

SEQ ID NO: 43872 - DNA, 33 bp, Homo sapien
aaatccagacataccacatgctcctgatgagag

SEQ ID NO: 43873 - DNA, 33 bp, Homo sapien
gatccttagctactcacacttattttggtatga

SEQ ID NO: 43874 - DNA, 33 bp, Homo sapien
gatccttagctactcatacttattttggtatga

SEQ ID NO: 43875 - DNA, 33 bp, Homo sapien
ctcagcagggcttaggaatcagaaacatcagat

SEQ ID NO: 43876 - DNA, 33 bp, Homo sapien
ctcagcagggcttaggcatcagaaacatcagat

SEQ ID NO: 43877 - DNA, 33 bp, Homo sapien
ccaatcaacttagactcagaactgacagagatt

SEQ ID NO: 43878 - DNA, 33 bp, Homo sapien
ccaatcaacttagactgagaactgacagagatt

SEQ ID NO: 43879 - DNA, 33 bp, Homo sapien
tggtcctcactgcacccagcttgctctggcggg

SEQ ID NO: 43880 - DNA, 33 bp, Homo sapien
tggtcctcactgcacctagcttgctctggcggg

SEQ ID NO: 43881 - DNA, 33 bp, Homo sapien
ttgtaatgggggtttacgcacactgcctaatta

SEQ ID NO: 43882 - DNA, 33 bp, Homo sapien
ttgtaatgggggtttatgcacactgcctaatta

SEQ ID NO: 43883 - DNA, 33 bp, Homo sapien
cagcaacttcagagaccaaggcataaaaggcat

SEQ ID NO: 43884 - DNA, 33 bp, Homo sapien
cagcaacttcagagactaaggcataaaaggcat

SEQ ID NO: 43885 - DNA, 33 bp, Homo sapien
gccctcagtctaacaacctgcaaagaagtgaat

SEQ ID NO: 43886 - DNA, 33 bp, Homo sapien
gccctcagtctaacaatctgcaaagaagtgaat

SEQ ID NO: 43887 - DNA, 33 bp, Homo sapien
agagggctccatgtgcaaggaactgagagtggt

SEQ ID NO: 43888 - DNA, 33 bp, Homo sapien
agagggctccatgtgcgaggaactgagagtggt

SEQ ID NO: 43889 - DNA, 33 bp, Homo sapien
caacaactaagtcggaagaaaggcccacgcagg

SEQ ID NO: 43890 - DNA, 33 bp, Homo sapien
caacaactaagtcggaggaaaggcccacgcagg

SEQ ID NO: 43891 - DNA, 33 bp, Homo sapien
tgtggattgtgggaccagagcattcaggacttt

SEQ ID NO: 43892 - DNA, 33 bp, Homo sapien
tgtggattgtgggaccggagcattcaggacttt

SEQ ID NO: 43893 - DNA, 33 bp, Homo sapien
tgagccttggtgagacagacaggcaagtctttg

SEQ ID NO: 43894 - DNA, 33 bp, Homo sapien
tgagccttggtgagacggacaggcaagtctttg

SEQ ID NO: 43895 - DNA, 33 bp, Homo sapien
tcgtgtccttctttacactctttgctattagtc

SEQ ID NO: 43896 - DNA, 33 bp, Homo sapien
tcgtgtccttctttacgctctttgctattagtc

SEQ ID NO: 43897 - DNA, 33 bp, Homo sapien
gccattcctctcaccaatacagctcagcttccc

SEQ ID NO: 43898 - DNA, 33 bp, Homo sapien
gccattcctctcaccagtacagctcagcttccc

SEQ ID NO: 43899 - DNA, 33 bp, Homo sapien
tgggcctttcaatacccgagtgttccttctaaa

SEQ ID NO: 43900 - DNA, 33 bp, Homo sapien
tgggcctttcaatacctgagtgttccttctaaa

SEQ ID NO: 43901 - DNA, 33 bp, Homo sapien
aaaaagtgagagtggcaaaaagtatacttgata

SEQ ID NO: 43902 - DNA, 33 bp, Homo sapien
aaaaagtgagagtggcgaaaagtatacttgata

SEQ ID NO: 43903 - DNA, 33 bp, Homo sapien
gcccacacggcgctgcacgatgctgccacggca

SEQ ID NO: 43904 - DNA, 33 bp, Homo sapien
gcccacacggcgctgcgcgatgctgccacggca

SEQ ID NO: 43905 - DNA, 33 bp, Homo sapien
gagcagaaaatagaaaatgccaggagaggaacc

SEQ ID NO: 43906 - DNA, 33 bp, Homo sapien
gagcagaaaatagaaactgccaggagaggaacc

SEQ ID NO: 43907 - DNA, 33 bp, Homo sapien
caggtgattctcaaaccgggcctagcagagtcc

SEQ ID NO: 43908 - DNA, 33 bp, Homo sapien
caggtgattctcaaactgggcctagcagagtcc

SEQ ID NO: 43909 - DNA, 33 bp, Homo sapien
taacttacgttacagacgtgatcaccctgaagc

SEQ ID NO: 43910 - DNA, 33 bp, Homo sapien
taacttacgttacagatgtgatcaccctgaagc

SEQ ID NO: 43911 - DNA, 33 bp, Homo sapien
tgttgtgatcgttggacgatatttaatctgtat

SEQ ID NO: 43912 - DNA, 33 bp, Homo sapien
tgttgtgatcgttggatgatatttaatctgtat

SEQ ID NO: 43913 - DNA, 33 bp, Homo sapien
tttagtggtaagagagacccagaagcattaaga

SEQ ID NO: 43914 - DNA, 33 bp, Homo sapien
tttagtggtaagagaggcccagaagcattaaga

SEQ ID NO: 43915 - DNA, 33 bp, Homo sapien
cagggggtttcaaaagcatttgactcaacaagg

SEQ ID NO: 43916 - DNA, 33 bp, Homo sapien
cagggggtttcaaaagtatttgactcaacaagg

SEQ ID NO: 43917 - DNA, 33 bp, Homo sapien
attctgagatctttccactatttcaggctctag

SEQ ID NO: 43918 - DNA, 33 bp, Homo sapien
attctgagatctttccgctatttcaggctctag

SEQ ID NO: 43919 - DNA, 33 bp, Homo sapien
gcctgcagctaggctacagagagttctggaaga

SEQ ID NO: 43920 - DNA, 33 bp, Homo sapien
gcctgcagctaggctagagagagttctggaaga

SEQ ID NO: 43921 - DNA, 33 bp, Homo sapien
aaataaattgaattggccagtctagcttgcaaa

SEQ ID NO: 43922 - DNA, 33 bp, Homo sapien
aaataaattgaattggtcagtctagcttgcaaa

SEQ ID NO: 43923 - DNA, 33 bp, Homo sapien
cttggaggttgccaaaaacaggactccttctac

SEQ ID NO: 43924 - DNA, 33 bp, Homo sapien
cttggaggttgccaaagacaggactccttctac

SEQ ID NO: 43925 - DNA, 33 bp, Homo sapien
cctcagcctgggtggaggaagaactggacactg

SEQ ID NO: 43926 - DNA, 33 bp, Homo sapien
cctcagcctgggtggatgaagaactggacactg

SEQ ID NO: 43927 - DNA, 33 bp, Homo sapien
cttcatcagccactcaataaccatgggctgagc

SEQ ID NO: 43928 - DNA, 33 bp, Homo sapien
cttcatcagccactcagtaaccatgggctgagc

SEQ ID NO: 43929 - DNA, 33 bp, Homo sapien
aacatttcagagaggccagaaggctttccccag

SEQ ID NO: 43930 - DNA, 33 bp, Homo sapien
aacatttcagagaggctagaaggctttccccag

SEQ ID NO: 43931 - DNA, 33 bp, Homo sapien
tttatacatgcaagtgaaggtataattcaatac

SEQ ID NO: 43932 - DNA, 33 bp, Homo sapien
tttatacatgcaagtggaggtataattcaatac

SEQ ID NO: 43933 - DNA, 33 bp, Homo sapien
cagattttacagctgaccccttccccttgtgca

SEQ ID NO: 43934 - DNA, 33 bp, Homo sapien
cagattttacagctgatcccttccccttgtgca

SEQ ID NO: 43935 - DNA, 33 bp, Homo sapien
ggcttgtaactgcagacctacttatgtattgag

SEQ ID NO: 43936 - DNA, 33 bp, Homo sapien
ggcttgtaactgcagatctacttatgtattgag

SEQ ID NO: 43937 - DNA, 33 bp, Homo sapien
atattctacaaaactacatatatggcatgtaaa

SEQ ID NO: 43938 - DNA, 33 bp, Homo sapien
atattctacaaaactatatatatggcatgtaaa

SEQ ID NO: 43939 - DNA, 33 bp, Homo sapien
cccattgactttctgcgctcctggatgagattt

SEQ ID NO: 43940 - DNA, 33 bp, Homo sapien
cccattgactttctgctctcctggatgagattt

SEQ ID NO: 43941 - DNA, 33 bp, Homo sapien
gcagattgtatatccaaaataaacagttaaaag

SEQ ID NO: 43942 - DNA, 33 bp, Homo sapien
gcagattgtatatccagaataaacagttaaaag

SEQ ID NO: 43943 - DNA, 33 bp, Homo sapien
cttgaacttggcccaccccaaatcagttcctat

SEQ ID NO: 43944 - DNA, 33 bp, Homo sapien
cttgaacttggcccactccaaatcagttcctat

SEQ ID NO: 43945 - DNA, 33 bp, Homo sapien
aacagataagtgtctaagggaaaattcttattc

SEQ ID NO: 43946 - DNA, 33 bp, Homo sapien
aacagataagtgtctaggggaaaattcttattc

SEQ ID NO: 43947 - DNA, 33 bp, Homo sapien
aacacattccccaatacccctactcttgatggc

SEQ ID NO: 43948 - DNA, 33 bp, Homo sapien
aacacattccccaatatccctactcttgatggc

SEQ ID NO: 43949 - DNA, 33 bp, Homo sapien
actggatgattcaatccatgctgtagcttcaat

SEQ ID NO: 43950 - DNA, 33 bp, Homo sapien
actggatgattcaatctatgctgtagcttcaat

SEQ ID NO: 43951 - DNA, 33 bp, Homo sapien
ctattattataattcaactcaacttcattagcg

SEQ ID NO: 43952 - DNA, 33 bp, Homo sapien
ctattattataattcagctcaacttcattagcg

SEQ ID NO: 43953 - DNA, 33 bp, Homo sapien
agacacatagttatccaattcactaaggttgaa

SEQ ID NO: 43954 - DNA, 33 bp, Homo sapien
agacacatagttatccgattcactaaggttgaa

SEQ ID NO: 43955 - DNA, 33 bp, Homo sapien
tttgctttaagctggaagggggattttgtatgt

SEQ ID NO: 43956 - DNA, 33 bp, Homo sapien
tttgctttaagctggaggggggattttgtatgt

SEQ ID NO: 43957 - DNA, 33 bp, Homo sapien
tgtgcttgctggcacagtctttatcgccactat

SEQ ID NO: 43958 - DNA, 33 bp, Homo sapien
tgtgcttgctggcacattctttatcgccactat

SEQ ID NO: 43959 - DNA, 33 bp, Homo sapien
tacttacaggatgaccaattaacacttggagac

SEQ ID NO: 43960 - DNA, 33 bp, Homo sapien
tacttacaggatgacctattaacacttggagac

SEQ ID NO: 43961 - DNA, 33 bp, Homo sapien
agttcttcctgcagggaaacctaaccaagtaag

SEQ ID NO: 43962 - DNA, 33 bp, Homo sapien
agttcttcctgcaggggaacctaaccaagtaag

SEQ ID NO: 43963 - DNA, 33 bp, Homo sapien
aacatgttttaagttacgatctggcctccacag

SEQ ID NO: 43964 - DNA, 33 bp, Homo sapien
aacatgttttaagttatgatctggcctccacag

SEQ ID NO: 43965 - DNA, 33 bp, Homo sapien
atgaaaaggatgcagaacgagtggaagccatga

SEQ ID NO: 43966 - DNA, 33 bp, Homo sapien
atgaaaaggatgcagagcgagtggaagccatga

SEQ ID NO: 43967 - DNA, 33 bp, Homo sapien
ccagaagactttgtcacggtttgtgtcaggatc

SEQ ID NO: 43968 - DNA, 33 bp, Homo sapien
ccagaagactttgtcagggtttgtgtcaggatc

SEQ ID NO: 43969 - DNA, 33 bp, Homo sapien
gggcccacacctacaccgagttgaccaatgtct

SEQ ID NO: 43970 - DNA, 33 bp, Homo sapien
gggcccacacctacactgagttgaccaatgtct

SEQ ID NO: 43971 - DNA, 33 bp, Homo sapien
cactgacatcaccacaagttgttgctctcagtt

SEQ ID NO: 43972 - DNA, 33 bp, Homo sapien
cactgacatcaccacaggttgttgctctcagtt

SEQ ID NO: 43973 - DNA, 33 bp, Homo sapien
ctgtgttaggaagatgacaagctaagcaccata

SEQ ID NO: 43974 - DNA, 33 bp, Homo sapien
ctgtgttaggaagatgccaagctaagcaccata

SEQ ID NO: 43975 - DNA, 33 bp, Homo sapien
acttgcaactgtcataccacacgtgcaaaattt

SEQ ID NO: 43976 - DNA, 33 bp, Homo sapien
acttgcaactgtcatatcacacgtgcaaaattt

SEQ ID NO: 43977 - DNA, 33 bp, Homo sapien
taaaatgccatgtttaacaggtactactagaac

SEQ ID NO: 43978 - DNA, 33 bp, Homo sapien
taaaatgccatgtttagcaggtactactagaac

SEQ ID NO: 43979 - DNA, 33 bp, Homo sapien
tttactgtccaacaaaagtatcagatcacattc

SEQ ID NO: 43980 - DNA, 33 bp, Homo sapien
tttactgtccaacaaacgtatcagatcacattc

SEQ ID NO: 43981 - DNA, 33 bp, Homo sapien
agcaggattctacataggctgagattttagtac

SEQ ID NO: 43982 - DNA, 33 bp, Homo sapien
agcaggattctacatatgctgagattttagtac

SEQ ID NO: 43983 - DNA, 33 bp, Homo sapien
tctgacacaaagaaaacgtgttcaatacatgca

SEQ ID NO: 43984 - DNA, 33 bp, Homo sapien
tctgacacaaagaaaatgtgttcaatacatgca

SEQ ID NO: 43985 - DNA, 33 bp, Homo sapien
taaaaaatgtaaagtcccttcttgtttatatgg

SEQ ID NO: 43986 - DNA, 33 bp, Homo sapien
taaaaaatgtaaagtctcttcttgtttatatgg

SEQ ID NO: 43987 - DNA, 33 bp, Homo sapien
tctaccaaataatgcaacggttttgactacaac

SEQ ID NO: 43988 - DNA, 33 bp, Homo sapien
tctaccaaataatgcagcggttttgactacaac

SEQ ID NO: 43989 - DNA, 33 bp, Homo sapien
tgtatgtgactccagcacctttgtgggcaaccc

SEQ ID NO: 43990 - DNA, 33 bp, Homo sapien
tgtatgtgactccagcgcctttgtgggcaaccc

SEQ ID NO: 43991 - DNA, 33 bp, Homo sapien
cacacttattgaaaagcctatttctattacatt

SEQ ID NO: 43992 - DNA, 33 bp, Homo sapien
cacacttattgaaaaggctatttctattacatt

SEQ ID NO: 43993 - DNA, 33 bp, Homo sapien
tttgggaaggtttatacagcactgttgaaggag

SEQ ID NO: 43994 - DNA, 33 bp, Homo sapien
tttgggaaggtttatatagcactgttgaaggag

SEQ ID NO: 43995 - DNA, 33 bp, Homo sapien
tgggaactatttgaaaatgcagcatgaaggaag

SEQ ID NO: 43996 - DNA, 33 bp, Homo sapien
tgggaactatttgaaagtgcagcatgaaggaag

SEQ ID NO: 43997 - DNA, 33 bp, Homo sapien
cataaaaaagctcttaactataatctaaaaaca

SEQ ID NO: 43998 - DNA, 33 bp, Homo sapien
cataaaaaagctcttagctataatctaaaaaca

SEQ ID NO: 43999 - DNA, 33 bp, Homo sapien
gatgagactgtggacaactgtagcagcatagga

SEQ ID NO: 44000 - DNA, 33 bp, Homo sapien
gatgagactgtggacagctgtagcagcatagga

SEQ ID NO: 44001 - DNA, 33 bp, Homo sapien
gatgagagaacagcaacggacaaagagaccaaa

SEQ ID NO: 44002 - DNA, 33 bp, Homo sapien
gatgagagaacagcaatggacaaagagaccaaa

SEQ ID NO: 44003 - DNA, 33 bp, Homo sapien
atggtgaaatacttcaaaagccttaggaagaat

SEQ ID NO: 44004 - DNA, 33 bp, Homo sapien
atggtgaaatacttcagaagccttaggaagaat

SEQ ID NO: 44005 - DNA, 33 bp, Homo sapien
tttctgttgtcatacactctgatattacttcaa

SEQ ID NO: 44006 - DNA, 33 bp, Homo sapien
tttctgttgtcatacattctgatattacttcaa

SEQ ID NO: 44007 - DNA, 33 bp, Homo sapien
gtgttgctataaaataatacctgaggctgtgta

SEQ ID NO: 44008 - DNA, 33 bp, Homo sapien
gtgttgctataaaatagtacctgaggctgtgta

SEQ ID NO: 44009 - DNA, 33 bp, Homo sapien
agagatgggagtgataacagctctagttagctg

SEQ ID NO: 44010 - DNA, 33 bp, Homo sapien
agagatgggagtgatagcagctctagttagctg

SEQ ID NO: 44011 - DNA, 33 bp, Homo sapien
tgctactcaactataaactatactacaggacta

SEQ ID NO: 44012 - DNA, 33 bp, Homo sapien
tgctactcaactataagctatactacaggacta

SEQ ID NO: 44013 - DNA, 33 bp, Homo sapien
acaggtcaacttgacacagagaggctacagcct

SEQ ID NO: 44014 - DNA, 33 bp, Homo sapien
acaggtcaacttgacatagagaggctacagcct

SEQ ID NO: 44015 - DNA, 33 bp, Homo sapien
gtatcatctggtcacactggtctgctagtagtt

SEQ ID NO: 44016 - DNA, 33 bp, Homo sapien
gtatcatctggtcacattggtctgctagtagtt

SEQ ID NO: 44017 - DNA, 33 bp, Homo sapien
tctcagactaagtgtgaattattaacagaaatc

SEQ ID NO: 44018 - DNA, 33 bp, Homo sapien
tctcagactaagtgtggattattaacagaaatc

SEQ ID NO: 44019 - DNA, 33 bp, Homo sapien
tttattttgactaagcaaggatatgctgagtgc

SEQ ID NO: 44020 - DNA, 33 bp, Homo sapien
tttattttgactaagccaggatatgctgagtgc

SEQ ID NO: 44021 - DNA, 33 bp, Homo sapien
gaatcctgttattataaaacggttcagtgtgct

SEQ ID NO: 44022 - DNA, 33 bp, Homo sapien
gaatcctgttattatagaacggttcagtgtgct

SEQ ID NO: 44023 - DNA, 33 bp, Homo sapien
aacaaccctgagtgcaaggtcaagctaaaccaa

SEQ ID NO: 44024 - DNA, 33 bp, Homo sapien
aacaaccctgagtgcatggtcaagctaaaccaa

SEQ ID NO: 44025 - DNA, 33 bp, Homo sapien
cagggtcaaattactacctgtatccttctgatg

SEQ ID NO: 44026 - DNA, 33 bp, Homo sapien
cagggtcaaattactatctgtatccttctgatg

SEQ ID NO: 44027 - DNA, 33 bp, Homo sapien
cagtataagtgatgtgaatgaatttgggaacaa

SEQ ID NO: 44028 - DNA, 33 bp, Homo sapien
cagtataagtgatgtgtatgaatttgggaacaa

SEQ ID NO: 44029 - DNA, 33 bp, Homo sapien
tgttgattggcaaaggaaacaggataagcagct

SEQ ID NO: 44030 - DNA, 33 bp, Homo sapien
tgttgattggcaaagggaacaggataagcagct

SEQ ID NO: 44031 - DNA, 33 bp, Homo sapien
ttttaggattataacaatggtggaaaaaaaaag

SEQ ID NO: 44032 - DNA, 33 bp, Homo sapien
ttttaggattataacagtggtggaaaaaaaaag

SEQ ID NO: 44033 - DNA, 33 bp, Homo sapien
gctgacatcatttttccctgtatctaggtccat

SEQ ID NO: 44034 - DNA, 33 bp, Homo sapien
gctgacatcatttttctctgtatctaggtccat

SEQ ID NO: 44035 - DNA, 33 bp, Homo sapien
tcagcttcattttccacgcagagaacaaggctg

SEQ ID NO: 44036 - DNA, 33 bp, Homo sapien
tcagcttcattttccatgcagagaacaaggctg

SEQ ID NO: 44037 - DNA, 33 bp, Homo sapien
ttctagttgacccttaccccaactaacaggggc

SEQ ID NO: 44038 - DNA, 33 bp, Homo sapien
ttctagttgacccttatcccaactaacaggggc

SEQ ID NO: 44039 - DNA, 33 bp, Homo sapien
cacagattgatttctacaagcaaattaaatgaa

SEQ ID NO: 44040 - DNA, 33 bp, Homo sapien
cacagattgatttctataagcaaattaaatgaa

SEQ ID NO: 44041 - DNA, 33 bp, Homo sapien
cttgtgctagcctaaagtgagtcaagctctagc

SEQ ID NO: 44042 - DNA, 33 bp, Homo sapien
cttgtgctagcctaaattgagtcaagctctagc

SEQ ID NO: 44043 - DNA, 33 bp, Homo sapien
ccatgtgtgcacaaaagatgtgtgtttgcacag

SEQ ID NO: 44044 - DNA, 33 bp, Homo sapien
ccatgtgtgcacaaaatatgtgtgtttgcacag

SEQ ID NO: 44045 - DNA, 33 bp, Homo sapien
tgcttccagtgacttgcatcattactcttagcc

SEQ ID NO: 44046 - DNA, 33 bp, Homo sapien
tgcttccagtgacttgtatcattactcttagcc

SEQ ID NO: 44047 - DNA, 33 bp, Homo sapien
agtgctttaacgagtacgtttgttaatattcgg

SEQ ID NO: 44048 - DNA, 33 bp, Homo sapien
agtgctttaacgagtatgtttgttaatattcgg

SEQ ID NO: 44049 - DNA, 33 bp, Homo sapien
taaactcctgaggagcaaaagtcttgcaacatc

SEQ ID NO: 44050 - DNA, 33 bp, Homo sapien
taaactcctgaggagcgaaagtcttgcaacatc

SEQ ID NO: 44051 - DNA, 33 bp, Homo sapien
catctccttagtttgaatactcctactgtagca

SEQ ID NO: 44052 - DNA, 33 bp, Homo sapien
catctccttagtttgagtactcctactgtagca

SEQ ID NO: 44053 - DNA, 33 bp, Homo sapien
ccacagccttaaataccgccattagcagggcat

SEQ ID NO: 44054 - DNA, 33 bp, Homo sapien
ccacagccttaaatactgccattagcagggcat

SEQ ID NO: 44055 - DNA, 33 bp, Homo sapien
gatagagttagtgtaaccagggcaatcttgtgt

SEQ ID NO: 44056 - DNA, 33 bp, Homo sapien
gatagagttagtgtaatcagggcaatcttgtgt

SEQ ID NO: 44057 - DNA, 33 bp, Homo sapien
aaagacagaatgagaacggggtggtgtcataag

SEQ ID NO: 44058 - DNA, 33 bp, Homo sapien
aaagacagaatgagaatggggtggtgtcataag

SEQ ID NO: 44059 - DNA, 33 bp, Homo sapien
tgtcatggctagaaaactggcttaaagacaaag

SEQ ID NO: 44060 - DNA, 33 bp, Homo sapien
tgtcatggctagaaaattggcttaaagacaaag

SEQ ID NO: 44061 - DNA, 33 bp, Homo sapien
gagcaaggagtggaaacgtagaagttcatgtca

SEQ ID NO: 44062 - DNA, 33 bp, Homo sapien
gagcaaggagtggaaaggtagaagttcatgtca

SEQ ID NO: 44063 - DNA, 33 bp, Homo sapien
actggctgcttctaggacagggtcaggtaatat

SEQ ID NO: 44064 - DNA, 33 bp, Homo sapien
actggctgcttctagggcagggtcaggtaatat

SEQ ID NO: 44065 - DNA, 33 bp, Homo sapien
agcaggctagaaggaaacatgtggtactggatt

SEQ ID NO: 44066 - DNA, 33 bp, Homo sapien
agcaggctagaaggaaccatgtggtactggatt

SEQ ID NO: 44067 - DNA, 33 bp, Homo sapien
agggcctggcatataacagacactcaacaaaat

SEQ ID NO: 44068 - DNA, 33 bp, Homo sapien
agggcctggcatataatagacactcaacaaaat

SEQ ID NO: 44069 - DNA, 33 bp, Homo sapien
gaggaaaacgaatgatcaatagaaagtagtgcc

SEQ ID NO: 44070 - DNA, 33 bp, Homo sapien
gaggaaaacgaatgattaatagaaagtagtgcc

SEQ ID NO: 44071 - DNA, 33 bp, Homo sapien
tcacaactgtaatacgaatagttctatacttat

SEQ ID NO: 44072 - DNA, 33 bp, Homo sapien
tcacaactgtaatacggatagttctatacttat

SEQ ID NO: 44073 - DNA, 33 bp, Homo sapien
gtcacacgtttaaatgaactgatctcatgagga

SEQ ID NO: 44074 - DNA, 33 bp, Homo sapien
gtcacacgtttaaatggactgatctcatgagga

SEQ ID NO: 44075 - DNA, 33 bp, Homo sapien
aaagtgcagtttgttactaaaagattaaaatac

SEQ ID NO: 44076 - DNA, 33 bp, Homo sapien
aaagtgcagtttgttattaaaagattaaaatac

SEQ ID NO: 44077 - DNA, 33 bp, Homo sapien
taaatatttatttggcaaggacattgttaagat

SEQ ID NO: 44078 - DNA, 33 bp, Homo sapien
taaatatttatttggcgaggacattgttaagat

SEQ ID NO: 44079 - DNA, 33 bp, Homo sapien
aaagaagtcagatggaaaactctggaaaatcca

SEQ ID NO: 44080 - DNA, 33 bp, Homo sapien
aaagaagtcagatggagaactctggaaaatcca

SEQ ID NO: 44081 - DNA, 33 bp, Homo sapien
ctggtatgaaagcattcaatgcgatggtggtct

SEQ ID NO: 44082 - DNA, 33 bp, Homo sapien
ctggtatgaaagcattgaatgcgatggtggtct

SEQ ID NO: 44083 - DNA, 33 bp, Homo sapien
tttggcaaatgcgaaacagcagatggaatgttt

SEQ ID NO: 44084 - DNA, 33 bp, Homo sapien
tttggcaaatgcgaaagagcagatggaatgttt

SEQ ID NO: 44085 - DNA, 33 bp, Homo sapien
caagacaagtatttcaacagaagccaggtcaaa

SEQ ID NO: 44086 - DNA, 33 bp, Homo sapien
caagacaagtatttcatcagaagccaggtcaaa

SEQ ID NO: 44087 - DNA, 33 bp, Homo sapien
ttgtaatgtggctatccctctggagtgaaaaag

SEQ ID NO: 44088 - DNA, 33 bp, Homo sapien
ttgtaatgtggctatctctctggagtgaaaaag

SEQ ID NO: 44089 - DNA, 33 bp, Homo sapien
ttatgtctgagaaacactaaagattcatagtca

SEQ ID NO: 44090 - DNA, 33 bp, Homo sapien
ttatgtctgagaaacagtaaagattcatagtca

SEQ ID NO: 44091 - DNA, 33 bp, Homo sapien
gcaatcaagatcatgaacatatccagcgttccc

SEQ ID NO: 44092 - DNA, 33 bp, Homo sapien
gcaatcaagatcatgagcatatccagcgttccc

SEQ ID NO: 44093 - DNA, 33 bp, Homo sapien
catgaggatatgttcaagaggaatgttccaagc

SEQ ID NO: 44094 - DNA, 33 bp, Homo sapien
catgaggatatgttcaggaggaatgttccaagc

SEQ ID NO: 44095 - DNA, 33 bp, Homo sapien
attgatagtgacaaagacactcattttacttcc

SEQ ID NO: 44096 - DNA, 33 bp, Homo sapien
attgatagtgacaaaggcactcattttacttcc

SEQ ID NO: 44097 - DNA, 33 bp, Homo sapien
gtttctttatagtaacgcaagaacatcctcaca

SEQ ID NO: 44098 - DNA, 33 bp, Homo sapien
gtttctttatagtaactcaagaacatcctcaca

SEQ ID NO: 44099 - DNA, 33 bp, Homo sapien
ttactataaagaaacacctgagacttggtaatt

SEQ ID NO: 44100 - DNA, 33 bp, Homo sapien
ttactataaagaaacatctgagacttggtaatt

SEQ ID NO: 44101 - DNA, 33 bp, Homo sapien
aaataatgcctatgaacgacaagcagggtcctg

SEQ ID NO: 44102 - DNA, 33 bp, Homo sapien
aaataatgcctatgaatgacaagcagggtcctg

SEQ ID NO: 44103 - DNA, 33 bp, Homo sapien
ccttcaggtcacagcacagaagtattttggttg

SEQ ID NO: 44104 - DNA, 33 bp, Homo sapien
ccttcaggtcacagcagagaagtattttggttg

SEQ ID NO: 44105 - DNA, 33 bp, Homo sapien
ggcttagggcccatcaagggagatattgtgtgc

SEQ ID NO: 44106 - DNA, 33 bp, Homo sapien
ggcttagggcccatcatgggagatattgtgtgc

SEQ ID NO: 44107 - DNA, 33 bp, Homo sapien
gttttgcatttcaagaagttcttggtgaatata

SEQ ID NO: 44108 - DNA, 33 bp, Homo sapien
gttttgcatttcaagaggttcttggtgaatata

SEQ ID NO: 44109 - DNA, 33 bp, Homo sapien
tgcccaaccctactaaagatacaggaaacatta

SEQ ID NO: 44110 - DNA, 33 bp, Homo sapien
tgcccaaccctactaaggatacaggaaacatta

SEQ ID NO: 44111 - DNA, 33 bp, Homo sapien
aaggtattttttacaacagccctatggtgtagg

SEQ ID NO: 44112 - DNA, 33 bp, Homo sapien
aaggtattttttacaagagccctatggtgtagg

SEQ ID NO: 44113 - DNA, 33 bp, Homo sapien
tgtctcttggtagatacgtaacctgttcacatt

SEQ ID NO: 44114 - DNA, 33 bp, Homo sapien
tgtctcttggtagatatgtaacctgttcacatt

SEQ ID NO: 44115 - DNA, 33 bp, Homo sapien
agcccagtcctgccttcaacagattcaatgagt

SEQ ID NO: 44116 - DNA, 33 bp, Homo sapien
agcccagtcctgcctttaacagattcaatgagt

SEQ ID NO: 44117 - DNA, 33 bp, Homo sapien
aacataagaaacaataaagtggccacaattttg

SEQ ID NO: 44118 - DNA, 33 bp, Homo sapien
aacataagaaacaatacagtggccacaattttg

SEQ ID NO: 44119 - DNA, 33 bp, Homo sapien
tgtaactttaagtagcagaataacttcacattt

SEQ ID NO: 44120 - DNA, 33 bp, Homo sapien
tgtaactttaagtagcggaataacttcacattt

SEQ ID NO: 44121 - DNA, 33 bp, Homo sapien
gtcaccacttaataaactagattgtgagtttct

SEQ ID NO: 44122 - DNA, 33 bp, Homo sapien
gtcaccacttaataaattagattgtgagtttct

SEQ ID NO: 44123 - DNA, 33 bp, Homo sapien
ggcttcctgcttttgccaatatcccttttcgtt

SEQ ID NO: 44124 - DNA, 33 bp, Homo sapien
ggcttcctgcttttgctaatatcccttttcgtt

SEQ ID NO: 44125 - DNA, 33 bp, Homo sapien
aagccgatgccaggaacattggtgaggaagctg

SEQ ID NO: 44126 - DNA, 33 bp, Homo sapien
aagccgatgccaggaatattggtgaggaagctg

SEQ ID NO: 44127 - DNA, 33 bp, Homo sapien
cacaaagcaatgtccacagaactccaactggag

SEQ ID NO: 44128 - DNA, 33 bp, Homo sapien
cacaaagcaatgtccagagaactccaactggag

SEQ ID NO: 44129 - DNA, 33 bp, Homo sapien
agtaaattctcttcaaatactttctcatatgtt

SEQ ID NO: 44130 - DNA, 33 bp, Homo sapien
agtaaattctcttcaagtactttctcatatgtt

SEQ ID NO: 44131 - DNA, 33 bp, Homo sapien
atttccaaacattctagaacaggtttacgacaa

SEQ ID NO: 44132 - DNA, 33 bp, Homo sapien
atttccaaacattctataacaggtttacgacaa

SEQ ID NO: 44133 - DNA, 33 bp, Homo sapien
aaaaatttggtagtaacctattggtcgcatttt

SEQ ID NO: 44134 - DNA, 33 bp, Homo sapien
aaaaatttggtagtaatctattggtcgcatttt

SEQ ID NO: 44135 - DNA, 33 bp, Homo sapien
tatgattttatatcagcatgacttatttctcca

SEQ ID NO: 44136 - DNA, 33 bp, Homo sapien
tatgattttatatcaggatgacttatttctcca

SEQ ID NO: 44137 - DNA, 33 bp, Homo sapien
ttctagctactaaaagcctgagataagaggatc

SEQ ID NO: 44138 - DNA, 33 bp, Homo sapien
ttctagctactaaaaggctgagataagaggatc

SEQ ID NO: 44139 - DNA, 33 bp, Homo sapien
gaattacagatgcagagaatttacccatcagta

SEQ ID NO: 44140 - DNA, 33 bp, Homo sapien
gaattacagatgcagataatttacccatcagta

SEQ ID NO: 44141 - DNA, 33 bp, Homo sapien
aaagtatttgcaactcacatatctgataagaga

SEQ ID NO: 44142 - DNA, 33 bp, Homo sapien
aaagtatttgcaactcgcatatctgataagaga

SEQ ID NO: 44143 - DNA, 33 bp, Homo sapien
aaggcactcaactctaacctgtgaaagccctgg

SEQ ID NO: 44144 - DNA, 33 bp, Homo sapien
aaggcactcaactctagcctgtgaaagccctgg

SEQ ID NO: 44145 - DNA, 33 bp, Homo sapien
gaacagtgctaaggacaagagatatcaggtaag

SEQ ID NO: 44146 - DNA, 33 bp, Homo sapien
gaacagtgctaaggacgagagatatcaggtaag

SEQ ID NO: 44147 - DNA, 33 bp, Homo sapien
tttgttaaaatgtttacagacatgaagaggaca

SEQ ID NO: 44148 - DNA, 33 bp, Homo sapien
tttgttaaaatgtttatagacatgaagaggaca

SEQ ID NO: 44149 - DNA, 33 bp, Homo sapien
agctcaaactcacaaaaatgaataaatgtgaaa

SEQ ID NO: 44150 - DNA, 33 bp, Homo sapien
agctcaaactcacaaacatgaataaatgtgaaa

SEQ ID NO: 44151 - DNA, 33 bp, Homo sapien
ttctcaataaatatcaagataaaatgtcataca

SEQ ID NO: 44152 - DNA, 33 bp, Homo sapien
ttctcaataaatatcaggataaaatgtcataca

SEQ ID NO: 44153 - DNA, 33 bp, Homo sapien
tgaaaaaataaaacgacatagccttggagacat

SEQ ID NO: 44154 - DNA, 33 bp, Homo sapien
tgaaaaaataaaacgatatagccttggagacat

SEQ ID NO: 44155 - DNA, 33 bp, Homo sapien
gctagtccagaccccaaaagactttaatgagga

SEQ ID NO: 44156 - DNA, 33 bp, Homo sapien
gctagtccagaccccacaagactttaatgagga

SEQ ID NO: 44157 - DNA, 33 bp, Homo sapien
atgtaaagcacagatacaaggattaacctcaag

SEQ ID NO: 44158 - DNA, 33 bp, Homo sapien
atgtaaagcacagatagaaggattaacctcaag

SEQ ID NO: 44159 - DNA, 33 bp, Homo sapien
accactttaccccaaagcttgagagtgaagaag

SEQ ID NO: 44160 - DNA, 33 bp, Homo sapien
accactttaccccaaatcttgagagtgaagaag

SEQ ID NO: 44161 - DNA, 33 bp, Homo sapien
tagatgacaatatctggattttattctgtggga

SEQ ID NO: 44162 - DNA, 33 bp, Homo sapien
tagatgacaatatctgtattttattctgtggga

SEQ ID NO: 44163 - DNA, 33 bp, Homo sapien
ttcgttcctggagcccaaagtagcaagcttcta

SEQ ID NO: 44164 - DNA, 33 bp, Homo sapien
ttcgttcctggagccccaagtagcaagcttcta

SEQ ID NO: 44165 - DNA, 33 bp, Homo sapien
caagaaatacctattaaatccagcagaactaat

SEQ ID NO: 44166 - DNA, 33 bp, Homo sapien
caagaaatacctattacatccagcagaactaat

SEQ ID NO: 44167 - DNA, 33 bp, Homo sapien
aggatggctcgagtcaggtaaattgaggcttcg

SEQ ID NO: 44168 - DNA, 33 bp, Homo sapien
aggatggctcgagtcatgtaaattgaggcttcg

SEQ ID NO: 44169 - DNA, 33 bp, Homo sapien
ctgacagttcaaaatacctgtcttaaggaagct

SEQ ID NO: 44170 - DNA, 33 bp, Homo sapien
ctgacagttcaaaatagctgtcttaaggaagct

SEQ ID NO: 44171 - DNA, 33 bp, Homo sapien
gcacatacatcaataaatagccacaaagattac

SEQ ID NO: 44172 - DNA, 33 bp, Homo sapien
gcacatacatcaataagtagccacaaagattac

SEQ ID NO: 44173 - DNA, 33 bp, Homo sapien
gactcctgatgagctagccctgccagcacttaa

SEQ ID NO: 44174 - DNA, 33 bp, Homo sapien
gactcctgatgagctatccctgccagcacttaa

SEQ ID NO: 44175 - DNA, 33 bp, Homo sapien
ttcccttggaataagaccagagtgagtctttga

SEQ ID NO: 44176 - DNA, 33 bp, Homo sapien
ttcccttggaataagatcagagtgagtctttga

SEQ ID NO: 44177 - DNA, 33 bp, Homo sapien
ggcagccatgaataaaaactcattaaaccgtgt

SEQ ID NO: 44178 - DNA, 33 bp, Homo sapien
ggcagccatgaataaagactcattaaaccgtgt

SEQ ID NO: 44179 - DNA, 33 bp, Homo sapien
cttacttctgcccttacgaatttagtttggggc

SEQ ID NO: 44180 - DNA, 33 bp, Homo sapien
cttacttctgcccttatgaatttagtttggggc

SEQ ID NO: 44181 - DNA, 33 bp, Homo sapien
tcagtattccttggtacataatcctcattcctg

SEQ ID NO: 44182 - DNA, 33 bp, Homo sapien
tcagtattccttggtatataatcctcattcctg

SEQ ID NO: 44183 - DNA, 33 bp, Homo sapien
aggctatgtggaatctcaaggaagaaaattata

SEQ ID NO: 44184 - DNA, 33 bp, Homo sapien
aggctatgtggaatctgaaggaagaaaattata

SEQ ID NO: 44185 - DNA, 33 bp, Homo sapien
ctacaatttttgcccccaaccatctttctgacc

SEQ ID NO: 44186 - DNA, 33 bp, Homo sapien
ctacaatttttgccccgaaccatctttctgacc

SEQ ID NO: 44187 - DNA, 33 bp, Homo sapien
tcttaccataacctccaagactctacaattttt

SEQ ID NO: 44188 - DNA, 33 bp, Homo sapien
tcttaccataacctccgagactctacaattttt

SEQ ID NO: 44189 - DNA, 33 bp, Homo sapien
aaggatgaaaatgagaaataaccgtgtgataga

SEQ ID NO: 44190 - DNA, 33 bp, Homo sapien
aaggatgaaaatgagagataaccgtgtgataga

SEQ ID NO: 44191 - DNA, 33 bp, Homo sapien
tagggcagggtctttacgtcatcaaacgacaca

SEQ ID NO: 44192 - DNA, 33 bp, Homo sapien
tagggcagggtctttatgtcatcaaacgacaca

SEQ ID NO: 44193 - DNA, 33 bp, Homo sapien
gaaatcactgctttggaacctgaaactatggat

SEQ ID NO: 44194 - DNA, 33 bp, Homo sapien
gaaatcactgctttgggacctgaaactatggat

SEQ ID NO: 44195 - DNA, 33 bp, Homo sapien
gggggagctaagaagacgagcttaagcttgcag

SEQ ID NO: 44196 - DNA, 33 bp, Homo sapien
gggggagctaagaagatgagcttaagcttgcag

SEQ ID NO: 44197 - DNA, 33 bp, Homo sapien
ctcttttccagataaccggcacactactggatt

SEQ ID NO: 44198 - DNA, 33 bp, Homo sapien
ctcttttccagataactggcacactactggatt

SEQ ID NO: 44199 - DNA, 33 bp, Homo sapien
ggagtctaatcttccacgtggccggagatgcag

SEQ ID NO: 44200 - DNA, 33 bp, Homo sapien
ggagtctaatcttccatgtggccggagatgcag

SEQ ID NO: 44201 - DNA, 33 bp, Homo sapien
gagggtccaagtcaacaaagagtggaagggatg

SEQ ID NO: 44202 - DNA, 33 bp, Homo sapien
gagggtccaagtcaaccaagagtggaagggatg

SEQ ID NO: 44203 - DNA, 33 bp, Homo sapien
ccatgtaacagtctggccagttttctgtagggc

SEQ ID NO: 44204 - DNA, 33 bp, Homo sapien
ccatgtaacagtctggtcagttttctgtagggc

SEQ ID NO: 44205 - DNA, 33 bp, Homo sapien
ggagctcttgtaaggcacaccttgtagtgacaa

SEQ ID NO: 44206 - DNA, 33 bp, Homo sapien
ggagctcttgtaaggcgcaccttgtagtgacaa

SEQ ID NO: 44207 - DNA, 33 bp, Homo sapien
agcaccagagtaacagacctgattgattatgtt

SEQ ID NO: 44208 - DNA, 33 bp, Homo sapien
agcaccagagtaacagtcctgattgattatgtt

SEQ ID NO: 44209 - DNA, 33 bp, Homo sapien
gttgaggggagagttccacatactacatttagt

SEQ ID NO: 44210 - DNA, 33 bp, Homo sapien
gttgaggggagagttctacatactacatttagt

SEQ ID NO: 44211 - DNA, 33 bp, Homo sapien
gatttaaacaacaccaccacaaaaagcaagggg

SEQ ID NO: 44212 - DNA, 33 bp, Homo sapien
gatttaaacaacaccatcacaaaaagcaagggg

SEQ ID NO: 44213 - DNA, 33 bp, Homo sapien
acactctaacactaaactgtgtcatcgcctctc

SEQ ID NO: 44214 - DNA, 33 bp, Homo sapien
acactctaacactaaattgtgtcatcgcctctc

SEQ ID NO: 44215 - DNA, 33 bp, Homo sapien
aatttaatcagatttgcaaagacccatcttcct

SEQ ID NO: 44216 - DNA, 33 bp, Homo sapien
aatttaatcagatttgtaaagacccatcttcct

SEQ ID NO: 44217 - DNA, 33 bp, Homo sapien
cttcctacaactttcaaccccagcctgaaataa

SEQ ID NO: 44218 - DNA, 33 bp, Homo sapien
cttcctacaactttcacccccagcctgaaataa

SEQ ID NO: 44219 - DNA, 33 bp, Homo sapien
tcctcctgcagtcccacggatggcagataaagt

SEQ ID NO: 44220 - DNA, 33 bp, Homo sapien
tcctcctgcagtcccatggatggcagataaagt

SEQ ID NO: 44221 - DNA, 33 bp, Homo sapien
atgtaagattttagaactgaataccattcagag

SEQ ID NO: 44222 - DNA, 33 bp, Homo sapien
atgtaagattttagaagtgaataccattcagag

SEQ ID NO: 44223 - DNA, 33 bp, Homo sapien
caatggagctacattactaaaggccatagaaac

SEQ ID NO: 44224 - DNA, 33 bp, Homo sapien
caatggagctacattattaaaggccatagaaac

SEQ ID NO: 44225 - DNA, 33 bp, Homo sapien
aagcattgtggagagaataaagacgattaatat

SEQ ID NO: 44226 - DNA, 33 bp, Homo sapien
aagcattgtggagagagtaaagacgattaatat

SEQ ID NO: 44227 - DNA, 33 bp, Homo sapien
gatggcagcatagaagcacaagtttctagtccc

SEQ ID NO: 44228 - DNA, 33 bp, Homo sapien
gatggcagcatagaagtacaagtttctagtccc

SEQ ID NO: 44229 - DNA, 33 bp, Homo sapien
gagagatccctcagctaaagagttctctcatgg

SEQ ID NO: 44230 - DNA, 33 bp, Homo sapien
gagagatccctcagcttaagagttctctcatgg

SEQ ID NO: 44231 - DNA, 33 bp, Homo sapien
agcaggcagtcttgtcaaaaacccttaactaag

SEQ ID NO: 44232 - DNA, 33 bp, Homo sapien
agcaggcagtcttgtccaaaacccttaactaag

SEQ ID NO: 44233 - DNA, 33 bp, Homo sapien
tcattgagctgcaaggaaataaagatagacaac

SEQ ID NO: 44234 - DNA, 33 bp, Homo sapien
tcattgagctgcaaggtaataaagatagacaac

SEQ ID NO: 44235 - DNA, 33 bp, Homo sapien
acctttgaagaggaccagccagttatttatttc

SEQ ID NO: 44236 - DNA, 33 bp, Homo sapien
acctttgaagaggaccggccagttatttatttc

SEQ ID NO: 44237 - DNA, 33 bp, Homo sapien
tattttacttagcacaaggttctcaaattcgtc

SEQ ID NO: 44238 - DNA, 33 bp, Homo sapien
tattttacttagcacagggttctcaaattcgtc

SEQ ID NO: 44239 - DNA, 33 bp, Homo sapien
acctaggtgatgggcccgaatttgtatggaaat

SEQ ID NO: 44240 - DNA, 33 bp, Homo sapien
acctaggtgatgggcctgaatttgtatggaaat

SEQ ID NO: 44241 - DNA, 33 bp, Homo sapien; identical to SEQ ID NO: 44239

SEQ ID NO: 44242 - DNA, 33 bp, Homo sapien; identical to SEQ ID NO: 44240

SEQ ID NO: 44243 - DNA, 33 bp, Homo sapien
aggcaactgtctgagcagcatttgttaactaat

SEQ ID NO: 44244 - DNA, 33 bp, Homo sapien
aggcaactgtctgagcggcatttgttaactaat

SEQ ID NO: 44245 - DNA, 33 bp, Homo sapien
cagctttgttattttcacttatgattgacttgg

SEQ ID NO: 44246 - DNA, 33 bp, Homo sapien
cagctttgttattttcgcttatgattgacttgg

SEQ ID NO: 44247 - DNA, 33 bp, Homo sapien
gtgtagcttgctttgaaaagtagaagtgaatta

SEQ ID NO: 44248 - DNA, 33 bp, Homo sapien
gtgtagcttgctttgacaagtagaagtgaatta

SEQ ID NO: 44249 - DNA, 33 bp, Homo sapien
aggtaaactggtctcaaccctgctaaactaaaa

SEQ ID NO: 44250 - DNA, 33 bp, Homo sapien
aggtaaactggtctcagccctgctaaactaaaa

SEQ ID NO: 44251 - DNA, 33 bp, Homo sapien
ttgcatcgaggaactgcaggattatgtaaacca

SEQ ID NO: 44252 - DNA, 33 bp, Homo sapien
ttgcatcgaggaactgtaggattatgtaaacca

SEQ ID NO: 44253 - DNA, 33 bp, Homo sapien
tatcttccatcaaactaagaacattttcagcat

SEQ ID NO: 44254 - DNA, 33 bp, Homo sapien
tatcttccatcaaactgagaacattttcagcat

SEQ ID NO: 44255 - DNA, 33 bp, Homo sapien
ttttgacttatttggacagttttcagaatttca

SEQ ID NO: 44256 - DNA, 33 bp, Homo sapien
ttttgacttatttggatagttttcagaatttca

SEQ ID NO: 44257 - DNA, 33 bp, Homo sapien
atctctctgctaacatcacctatctgttattgc

SEQ ID NO: 44258 - DNA, 33 bp, Homo sapien
atctctctgctaacattacctatctgttattgc

SEQ ID NO: 44259 - DNA, 33 bp, Homo sapien
ttttaccaaaaagacacgtgtgtttgtatgtta

SEQ ID NO: 44260 - DNA, 33 bp, Homo sapien
ttttaccaaaaagacatgtgtgtttgtatgtta

SEQ ID NO: 44261 - DNA, 33 bp, Homo sapien
atgttgctgcaaagcacgggattttattctttt

SEQ ID NO: 44262 - DNA, 33 bp, Homo sapien
atgttgctgcaaagcatgggattttattctttt

SEQ ID NO: 44263 - DNA, 33 bp, Homo sapien
attctcacactgtataactgcaaaaccacacat

SEQ ID NO: 44264 - DNA, 33 bp, Homo sapien
attctcacactgtatagctgcaaaaccacacat

SEQ ID NO: 44265 - DNA, 33 bp, Homo sapien
acatagagtgaaggcaacagtcattaagatctt

SEQ ID NO: 44266 - DNA, 33 bp, Homo sapien
acatagagtgaaggcaccagtcattaagatctt

SEQ ID NO: 44267 - DNA, 33 bp, Homo sapien
tataatgtggcccaaagaatgccgatgcctgaa

SEQ ID NO: 44268 - DNA, 33 bp, Homo sapien
tataatgtggcccaaataatgccgatgcctgaa

SEQ ID NO: 44269 - DNA, 33 bp, Homo sapien
atctgcaaactaaaagaaattatcctgaaccca

SEQ ID NO: 44270 - DNA, 33 bp, Homo sapien
atctgcaaactaaaagtaattatcctgaaccca

SEQ ID NO: 44271 - DNA, 33 bp, Homo sapien
agtgtttggtctaacaacaccattgaccttagt

SEQ ID NO: 44272 - DNA, 33 bp, Homo sapien
agtgtttggtctaacatcaccattgaccttagt

SEQ ID NO: 44273 - DNA, 33 bp, Homo sapien
agctctttcataactccctccaaatatcccttt

SEQ ID NO: 44274 - DNA, 33 bp, Homo sapien
agctctttcataactcgctccaaatatcccttt

SEQ ID NO: 44275 - DNA, 33 bp, Homo sapien
tgctcaggatctgctcactgatacttggctctg

SEQ ID NO: 44276 - DNA, 33 bp, Homo sapien
tgctcaggatctgctcgctgatacttggctctg

SEQ ID NO: 44277 - DNA, 33 bp, Homo sapien
ctcataatgaaggtcaaagtgctgattgacctg

SEQ ID NO: 44278 - DNA, 33 bp, Homo sapien
ctcataatgaaggtcagagtgctgattgacctg

SEQ ID NO: 44279 - DNA, 33 bp, Homo sapien
aattttgtacactttaaatgaatgctgagcaat

SEQ ID NO: 44280 - DNA, 33 bp, Homo sapien
aattttgtacactttacatgaatgctgagcaat

SEQ ID NO: 44281 - DNA, 33 bp, Homo sapien
tcatgttatatgcaaacagaaacgttttcactt

SEQ ID NO: 44282 - DNA, 33 bp, Homo sapien
tcatgttatatgcaaagagaaacgttttcactt

SEQ ID NO: 44283 - DNA, 33 bp, Homo sapien
ttatagccattttaacagtatgagatagtattt

SEQ ID NO: 44284 - DNA, 33 bp, Homo sapien
ttatagccattttaacggtatgagatagtattt

SEQ ID NO: 44285 - DNA, 33 bp, Homo sapien
acaatatattccaacagcccactagtccttaaa

SEQ ID NO: 44286 - DNA, 33 bp, Homo sapien
acaatatattccaacatcccactagtccttaaa

SEQ ID NO: 44287 - DNA, 33 bp, Homo sapien
ttaattaaaaacccaactgagagtgacatcagc

SEQ ID NO: 44288 - DNA, 33 bp, Homo sapien
ttaattaaaaacccaattgagagtgacatcagc

SEQ ID NO: 44289 - DNA, 33 bp, Homo sapien
catacattggtgttgaataggtgtatctgtgga

SEQ ID NO: 44290 - DNA, 33 bp, Homo sapien
catacattggtgttgagtaggtgtatctgtgga

SEQ ID NO: 44291 - DNA, 33 bp, Homo sapien
aacataagacgtgaaacagtaaaaatcctagag

SEQ ID NO: 44292 - DNA, 33 bp, Homo sapien
aacataagacgtgaaagagtaaaaatcctagag

SEQ ID NO: 44293 - DNA, 33 bp, Homo sapien
aaaagttccttgcttacagtaaatgttaatgaa

SEQ ID NO: 44294 - DNA, 33 bp, Homo sapien
aaaagttccttgcttatagtaaatgttaatgaa

SEQ ID NO: 44295 - DNA, 33 bp, Homo sapien
aactagatttccttaactctctcaaaaacccag

SEQ ID NO: 44296 - DNA, 33 bp, Homo sapien
aactagatttccttaagtctctcaaaaacccag

SEQ ID NO: 44297 - DNA, 33 bp, Homo sapien
catggttataaaggacaacttgagtgaacagtc

SEQ ID NO: 44298 - DNA, 33 bp, Homo sapien
catggttataaaggacgacttgagtgaacagtc

SEQ ID NO: 44299 - DNA, 33 bp, Homo sapien
gatccttttattctgacgctagctagttatttt

SEQ ID NO: 44300 - DNA, 33 bp, Homo sapien
gatccttttattctgatgctagctagttatttt

SEQ ID NO: 44301 - DNA, 33 bp, Homo sapien
ctttcttagaagtcaacgaagtttctggaaaac

SEQ ID NO: 44302 - DNA, 33 bp, Homo sapien
ctttcttagaagtcaatgaagtttctggaaaac

SEQ ID NO: 44303 - DNA, 33 bp, Homo sapien
cgtcaatatttgcacacccttaacgaggccgtg

SEQ ID NO: 44304 - DNA, 33 bp, Homo sapien
cgtcaatatttgcacatccttaacgaggccgtg

SEQ ID NO: 44305 - DNA, 33 bp, Homo sapien
aacctaacttcatttaaagctcatagttttggt

SEQ ID NO: 44306 - DNA, 33 bp, Homo sapien
aacctaacttcatttacagctcatagttttggt

SEQ ID NO: 44307 - DNA, 33 bp, Homo sapien
acttcaaacaatctgccgaatacactttgggaa

SEQ ID NO: 44308 - DNA, 33 bp, Homo sapien
acttcaaacaatctgctgaatacactttgggaa

SEQ ID NO: 44309 - DNA, 33 bp, Homo sapien
tgcttctccactggggaacatcagggtcagccc

SEQ ID NO: 44310 - DNA, 33 bp, Homo sapien
tgcttctccactgggggacatcagggtcagccc

SEQ ID NO: 44311 - DNA, 33 bp, Homo sapien
ttattgcctaagaaaacatattgctctggcatc

SEQ ID NO: 44312 - DNA, 33 bp, Homo sapien
ttattgcctaagaaaagatattgctctggcatc

SEQ ID NO: 44313 - DNA, 33 bp, Homo sapien
atctttgaaatcaggacagacctaaacaaatct

SEQ ID NO: 44314 - DNA, 33 bp, Homo sapien
atctttgaaatcaggagagacctaaacaaatct

SEQ ID NO: 44315 - DNA, 33 bp, Homo sapien
accactaatatgtccacgcttatctctgaaatc

SEQ ID NO: 44316 - DNA, 33 bp, Homo sapien
accactaatatgtccaggcttatctctgaaatc

SEQ ID NO: 44317 - DNA, 33 bp, Homo sapien
gacaaatctgaatttgaaacagagttaaagcct

SEQ ID NO: 44318 - DNA, 33 bp, Homo sapien
gacaaatctgaatttgtaacagagttaaagcct

SEQ ID NO: 44319 - DNA, 33 bp, Homo sapien
ggtatacaaaaattccccagacttagtctctca

SEQ ID NO: 44320 - DNA, 33 bp, Homo sapien
ggtatacaaaaattcctcagacttagtctctca

SEQ ID NO: 44321 - DNA, 33 bp, Homo sapien
aatcttatcctgacaaaggctcattgttctcaa

SEQ ID NO: 44322 - DNA, 33 bp, Homo sapien
aatcttatcctgacaagggctcattgttctcaa

SEQ ID NO: 44323 - DNA, 33 bp, Homo sapien
acacccctttgtgtaaacattatgccaattaca

SEQ ID NO: 44324 - DNA, 33 bp, Homo sapien
acacccctttgtgtaatcattatgccaattaca

SEQ ID NO: 44325 - DNA, 33 bp, Homo sapien
gccacctgatactacaccatgtgttttacgtga

SEQ ID NO: 44326 - DNA, 33 bp, Homo sapien
gccacctgatactacatcatgtgttttacgtga

SEQ ID NO: 44327 - DNA, 33 bp, Homo sapien
tacttccctttctcaaacatggtgtgctctttc

SEQ ID NO: 44328 - DNA, 33 bp, Homo sapien
tacttccctttctcaagcatggtgtgctctttc

SEQ ID NO: 44329 - DNA, 33 bp, Homo sapien
aggctaggtctgcaggaaaaaaagcatggtaag

SEQ ID NO: 44330 - DNA, 33 bp, Homo sapien
aggctaggtctgcaggcaaaaaagcatggtaag

SEQ ID NO: 44331 - DNA, 33 bp, Homo sapien
atctgaagacagaagacatcctccagtattaga

SEQ ID NO: 44332 - DNA, 33 bp, Homo sapien
atctgaagacagaagagatcctccagtattaga

SEQ ID NO: 44333 - DNA, 33 bp, Homo sapien
tccaaaaaagatggcaatatcattccttcaaag

SEQ ID NO: 44334 - DNA, 33 bp, Homo sapien
tccaaaaaagatggcagtatcattccttcaaag

SEQ ID NO: 44335 - DNA, 33 bp, Homo sapien
aaacctgcaataggtaaagtcccagtcttccag

SEQ ID NO: 44336 - DNA, 33 bp, Homo sapien
aaacctgcaataggtacagtcccagtcttccag

SEQ ID NO: 44337 - DNA, 33 bp, Homo sapien
tcaagatgcaacagtccaattctcaaagttaaa

SEQ ID NO: 44338 - DNA, 33 bp, Homo sapien
tcaagatgcaacagtctaattctcaaagttaaa

SEQ ID NO: 44339 - DNA, 33 bp, Homo sapien
gctgtttctactgcccagagtgcatagttggta

SEQ ID NO: 44340 - DNA, 33 bp, Homo sapien
gctgtttctactgcccggagtgcatagttggta

SEQ ID NO: 44341 - DNA, 33 bp, Homo sapien
ttccttgcctttaaaactgcacactaattatgc

SEQ ID NO: 44342 - DNA, 33 bp, Homo sapien
ttccttgcctttaaaattgcacactaattatgc

SEQ ID NO: 44343 - DNA, 33 bp, Homo sapien
catatggcagacactcaactttagaaagccaaa

SEQ ID NO: 44344 - DNA, 33 bp, Homo sapien
catatggcagacactcgactttagaaagccaaa

SEQ ID NO: 44345 - DNA, 33 bp, Homo sapien
cctgctggctctgcaaagctagacaaggaattt

SEQ ID NO: 44346 - DNA, 33 bp, Homo sapien
cctgctggctctgcaaggctagacaaggaattt

SEQ ID NO: 44347 - DNA, 33 bp, Homo sapien
agcatcaacatagacaaggactttggagcaacc

SEQ ID NO: 44348 - DNA, 33 bp, Homo sapien
agcatcaacatagacatggactttggagcaacc

SEQ ID NO: 44349 - DNA, 33 bp, Homo sapien
agcatctccttgacaaacttcttgtgactcatt

SEQ ID NO: 44350 - DNA, 33 bp, Homo sapien
agcatctccttgacaaccttcttgtgactcatt

SEQ ID NO: 44351 - DNA, 33 bp, Homo sapien
taaatactttagaagacgcaagttgttatttgg

SEQ ID NO: 44352 - DNA, 33 bp, Homo sapien
taaatactttagaagatgcaagttgttatttgg

SEQ ID NO: 44353 - DNA, 33 bp, Homo sapien
gtcaccatgttgaagaaaatgaggccaaactgg

SEQ ID NO: 44354 - DNA, 33 bp, Homo sapien
gtcaccatgttgaagagaatgaggccaaactgg

SEQ ID NO: 44355 - DNA, 33 bp, Homo sapien
cattctttatataaaaatcactggatcctgttt

SEQ ID NO: 44356 - DNA, 33 bp, Homo sapien
cattctttatataaaagtcactggatcctgttt

SEQ ID NO: 44357 - DNA, 33 bp, Homo sapien
ccacaaaatagacataaaaatacaagctatgtc

SEQ ID NO: 44358 - DNA, 33 bp, Homo sapien
ccacaaaatagacatacaaatacaagctatgtc

SEQ ID NO: 44359 - DNA, 33 bp, Homo sapien
cattcgtatgtctggaccttttttgttgatgaa

SEQ ID NO: 44360 - DNA, 33 bp, Homo sapien
cattcgtatgtctggatcttttttgttgatgaa

SEQ ID NO: 44361 - DNA, 33 bp, Homo sapien
agcattactagctctaacatttgtagaacttga

SEQ ID NO: 44362 - DNA, 33 bp, Homo sapien
agcattactagctctagcatttgtagaacttga

SEQ ID NO: 44363 - DNA, 33 bp, Homo sapien
tcctgtgtccatgaaacacatcactaatcaatc

SEQ ID NO: 44364 - DNA, 33 bp, Homo sapien
tcctgtgtccatgaaagacatcactaatcaatc

SEQ ID NO: 44365 - DNA, 33 bp, Homo sapien
tctcagtgaagcacaaatcagacaagagcctgt

SEQ ID NO: 44366 - DNA, 33 bp, Homo sapien
tctcagtgaagcacaagtcagacaagagcctgt

SEQ ID NO: 44367 - DNA, 33 bp, Homo sapien
aggaagactaaatatcacaaatcaacagtcaga

SEQ ID NO: 44368 - DNA, 33 bp, Homo sapien
aggaagactaaatatcgcaaatcaacagtcaga

SEQ ID NO: 44369 - DNA, 33 bp, Homo sapien
gaggcaaactcatcaacagcattcacttggcca

SEQ ID NO: 44370 - DNA, 33 bp, Homo sapien
gaggcaaactcatcaagagcattcacttggcca

SEQ ID NO: 44371 - DNA, 33 bp, Homo sapien
gaaatcccccaacctgaaatgaatatcgggttg

SEQ ID NO: 44372 - DNA, 33 bp, Homo sapien
gaaatcccccaacctggaatgaatatcgggttg

SEQ ID NO: 44373 - DNA, 33 bp, Homo sapien
tatccatttgccaacaatatattagaaaatatt

SEQ ID NO: 44374 - DNA, 33 bp, Homo sapien
tatccatttgccaacagtatattagaaaatatt

SEQ ID NO: 44375 - DNA, 33 bp, Homo sapien
gttatattctaaatcccgcaaagtggagacagg

SEQ ID NO: 44376 - DNA, 33 bp, Homo sapien
gttatattctaaatcctgcaaagtggagacagg

SEQ ID NO: 44377 - DNA, 33 bp, Homo sapien
cccccaaaaggaagcgaaggttattggatacct

SEQ ID NO: 44378 - DNA, 33 bp, Homo sapien
cccccaaaaggaagcggaggttattggatacct

SEQ ID NO: 44379 - DNA, 33 bp, Homo sapien
actagttcttggcttgcagagcttgaagcaggt

SEQ ID NO: 44380 - DNA, 33 bp, Homo sapien
actagttcttggcttgtagagcttgaagcaggt

SEQ ID NO: 44381 - DNA, 33 bp, Homo sapien
tgagtcagttgcaaccagagagaacttaggtgt

SEQ ID NO: 44382 - DNA, 33 bp, Homo sapien
tgagtcagttgcaaccggagagaacttaggtgt

SEQ ID NO: 44383 - DNA, 33 bp, Homo sapien
ctgagctgtagggatgacaattaaaataaacag

SEQ ID NO: 44384 - DNA, 33 bp, Homo sapien
ctgagctgtagggatgccaattaaaataaacag

SEQ ID NO: 44385 - DNA, 33 bp, Homo sapien
attagatgctcaaagaaaagatatgtgcaagga

SEQ ID NO: 44386 - DNA, 33 bp, Homo sapien
attagatgctcaaagacaagatatgtgcaagga

SEQ ID NO: 44387 - DNA, 33 bp, Homo sapien
tactttcaggtagacaagtgatcaattaacatc

SEQ ID NO: 44388 - DNA, 33 bp, Homo sapien
tactttcaggtagacaggtgatcaattaacatc

SEQ ID NO: 44389 - DNA, 33 bp, Homo sapien
ctttgcatggagatcaacctcttctatccagta

SEQ ID NO: 44390 - DNA, 33 bp, Homo sapien
ctttgcatggagatcatcctcttctatccagta

SEQ ID NO: 44391 - DNA, 33 bp, Homo sapien
tggagcctgggattcacggcttatatgggtgca

SEQ ID NO: 44392 - DNA, 33 bp, Homo sapien
tggagcctgggattcatggcttatatgggtgca

SEQ ID NO: 44393 - DNA, 33 bp, Homo sapien
aagtttttgtgacagaaactgccaactatccgc

SEQ ID NO: 44394 - DNA, 33 bp, Homo sapien
aagtttttgtgacagagactgccaactatccgc

SEQ ID NO: 44395 - DNA, 33 bp, Homo sapien
ttaatatggatctaaaagcaagaccctttcatt

SEQ ID NO: 44396 - DNA, 33 bp, Homo sapien
ttaatatggatctaaatgcaagaccctttcatt

SEQ ID NO: 44397 - DNA, 33 bp, Homo sapien
gtatcacaagtacttgaagaagattctagactc

SEQ ID NO: 44398 - DNA, 33 bp, Homo sapien
gtatcacaagtacttggagaagattctagactc

SEQ ID NO: 44399 - DNA, 33 bp, Homo sapien
tagagtgggattagaaaatggagataaagttaa

SEQ ID NO: 44400 - DNA, 33 bp, Homo sapien
tagagtgggattagaagatggagataaagttaa

SEQ ID NO: 44401 - DNA, 33 bp, Homo sapien
aataggtgctctttcaactcacaatggaaaggg

SEQ ID NO: 44402 - DNA, 33 bp, Homo sapien
aataggtgctctttcagctcacaatggaaaggg

SEQ ID NO: 44403 - DNA, 33 bp, Homo sapien
ccatcacatgatagaaagatggtaggtacagca

SEQ ID NO: 44404 - DNA, 33 bp, Homo sapien
ccatcacatgatagaaggatggtaggtacagca

SEQ ID NO: 44405 - DNA, 33 bp, Homo sapien
tactatggaatagatacgaaggtaggtcctgtt

SEQ ID NO: 44406 - DNA, 33 bp, Homo sapien
tactatggaatagatatgaaggtaggtcctgtt

SEQ ID NO: 44407 - DNA, 33 bp, Homo sapien
gtatagaagactaatactaagcatcttaaactt

SEQ ID NO: 44408 - DNA, 33 bp, Homo sapien
gtatagaagactaatagtaagcatcttaaactt

SEQ ID NO: 44409 - DNA, 33 bp, Homo sapien
gaatttcaaacttgtcacttaactgacttttat

SEQ ID NO: 44410 - DNA, 33 bp, Homo sapien
gaatttcaaacttgtcgcttaactgacttttat

SEQ ID NO: 44411 - DNA, 33 bp, Homo sapien
ctgattttttttcactaaattcattcactcatt

SEQ ID NO: 44412 - DNA, 33 bp, Homo sapien
ctgattttttttcactgaattcattcactcatt

SEQ ID NO: 44413 - DNA, 33 bp, Homo sapien
ctacattaaatcttaccatcctaattccaccat

SEQ ID NO: 44414 - DNA, 33 bp, Homo sapien
ctacattaaatcttacgatcctaattccaccat

SEQ ID NO: 44415 - DNA, 33 bp, Homo sapien
aggccattttaataacagcattgtgggacaagt

SEQ ID NO: 44416 - DNA, 33 bp, Homo sapien
aggccattttaataacggcattgtgggacaagt

SEQ ID NO: 44417 - DNA, 33 bp, Homo sapien
agtatcttcctcagaaacctaaaatatcacaaa

SEQ ID NO: 44418 - DNA, 33 bp, Homo sapien
agtatcttcctcagaatcctaaaatatcacaaa

SEQ ID NO: 44419 - DNA, 33 bp, Homo sapien
aacatctttgtatcagaaagcccttgtgatttc

SEQ ID NO: 44420 - DNA, 33 bp, Homo sapien
aacatctttgtatcaggaagcccttgtgatttc

SEQ ID NO: 44421 - DNA, 33 bp, Homo sapien
gccttcaagtttgtgacaccttgttagagaagc

SEQ ID NO: 44422 - DNA, 33 bp, Homo sapien
gccttcaagtttgtgataccttgttagagaagc

SEQ ID NO: 44423 - DNA, 33 bp, Homo sapien
tcgggtcatgcttttacgctttgtttggcagga

SEQ ID NO: 44424 - DNA, 33 bp, Homo sapien
tcgggtcatgcttttatgctttgtttggcagga

SEQ ID NO: 44425 - DNA, 33 bp, Homo sapien
aaaaaagctcatcctcactggccattagagaga

SEQ ID NO: 44426 - DNA, 33 bp, Homo sapien
aaaaaagctcatcctcgctggccattagagaga

SEQ ID NO: 44427 - DNA, 33 bp, Homo sapien
ttgcattgtctagtaaagctaactgtctctcat

SEQ ID NO: 44428 - DNA, 33 bp, Homo sapien
ttgcattgtctagtaaggctaactgtctctcat

SEQ ID NO: 44429 - DNA, 33 bp, Homo sapien
ggtggagaagagactggaattgagactggctag

SEQ ID NO: 44430 - DNA, 33 bp, Homo sapien
ggtggagaagagactgtaattgagactggctag

SEQ ID NO: 44431 - DNA, 33 bp, Homo sapien
acctagggctaccctgaactttaagatgacttt

SEQ ID NO: 44432 - DNA, 33 bp, Homo sapien
acctagggctaccctgcactttaagatgacttt

SEQ ID NO: 44433 - DNA, 33 bp, Homo sapien
gctgcaggaatcttggaagtaaagactaaactg

SEQ ID NO: 44434 - DNA, 33 bp, Homo sapien
gctgcaggaatcttggcagtaaagactaaactg

SEQ ID NO: 44435 - DNA, 33 bp, Homo sapien
ccttacaaagtatacactctgatttatatgagt

SEQ ID NO: 44436 - DNA, 33 bp, Homo sapien
ccttacaaagtatacattctgatttatatgagt

SEQ ID NO: 44437 - DNA, 33 bp, Homo sapien
gcactgtgatgcctgcaatcgtttaattgttac

SEQ ID NO: 44438 - DNA, 33 bp, Homo sapien
gcactgtgatgcctgccatcgtttaattgttac

SEQ ID NO: 44439 - DNA, 33 bp, Homo sapien
aagctggctctgccaaacaagaatagcatgatc

SEQ ID NO: 44440 - DNA, 33 bp, Homo sapien
aagctggctctgccaaccaagaatagcatgatc

SEQ ID NO: 44441 - DNA, 33 bp, Homo sapien
catcttgattgctttacagaccaacaatccttt

SEQ ID NO: 44442 - DNA, 33 bp, Homo sapien
catcttgattgctttatagaccaacaatccttt

SEQ ID NO: 44443 - DNA, 33 bp, Homo sapien
tcagtatctatactgaaactagaggtaacattg

SEQ ID NO: 44444 - DNA, 33 bp, Homo sapien
tcagtatctatactgagactagaggtaacattg

SEQ ID NO: 44445 - DNA, 33 bp, Homo sapien
gtgtacatctctgcaacgttctcaaggcacctc

SEQ ID NO: 44446 - DNA, 33 bp, Homo sapien
gtgtacatctctgcaatgttctcaaggcacctc

SEQ ID NO: 44447 - DNA, 33 bp, Homo sapien
ctcctgcctcttcttcactgttgcatctttctt

SEQ ID NO: 44448 - DNA, 33 bp, Homo sapien
ctcctgcctcttcttcgctgttgcatctttctt

SEQ ID NO: 44449 - DNA, 33 bp, Homo sapien
cttccaacaacctcaaagagcaagtaaatagat

SEQ ID NO: 44450 - DNA, 33 bp, Homo sapien
cttccaacaacctcaatgagcaagtaaatagat

SEQ ID NO: 44451 - DNA, 33 bp, Homo sapien
ctaagcactgggaatacaaaggtgactgaaagg

SEQ ID NO: 44452 - DNA, 33 bp, Homo sapien
ctaagcactgggaatagaaaggtgactgaaagg

SEQ ID NO: 44453 - DNA, 33 bp, Homo sapien
agtctaattttagaccagatggttgaccatgtc

SEQ ID NO: 44454 - DNA, 33 bp, Homo sapien
agtctaattttagaccggatggttgaccatgtc

SEQ ID NO: 44455 - DNA, 33 bp, Homo sapien
gataatagcaggattacctctatgttttaggac

SEQ ID NO: 44456 - DNA, 33 bp, Homo sapien
gataatagcaggattatctctatgttttaggac

SEQ ID NO: 44457 - DNA, 33 bp, Homo sapien
tggcaaggtgcacagaaatgagggtgaaagaac

SEQ ID NO: 44458 - DNA, 33 bp, Homo sapien
tggcaaggtgcacagagatgagggtgaaagaac

SEQ ID NO: 44459 - DNA, 33 bp, Homo sapien
cttagtaccataggaaaaagctctgtgatcaat

SEQ ID NO: 44460 - DNA, 33 bp, Homo sapien
cttagtaccataggaacaagctctgtgatcaat

SEQ ID NO: 44461 - DNA, 33 bp, Homo sapien
tcttgcattccagtcacctaaagctactaaact

SEQ ID NO: 44462 - DNA, 33 bp, Homo sapien
tcttgcattccagtcatctaaagctactaaact

SEQ ID NO: 44463 - DNA, 33 bp, Homo sapien
tactctttaaagtcaaatctctacagacagaaa

SEQ ID NO: 44464 - DNA, 33 bp, Homo sapien
tactctttaaagtcaagtctctacagacagaaa

SEQ ID NO: 44465 - DNA, 33 bp, Homo sapien
cacagctgaagaccaaaaaagacagaagtcttg

SEQ ID NO: 44466 - DNA, 33 bp, Homo sapien
cacagctgaagaccaagaaagacagaagtcttg

SEQ ID NO: 44467 - DNA, 33 bp, Homo sapien
aaaaaaattgatggcactcatttaaaaaaatta

SEQ ID NO: 44468 - DNA, 33 bp, Homo sapien
aaaaaaattgatggcagtcatttaaaaaaatta

SEQ ID NO: 44469 - DNA, 33 bp, Homo sapien
aaccatgtatagctaaactctgaactgaactgt

SEQ ID NO: 44470 - DNA, 33 bp, Homo sapien
aaccatgtatagctaacctctgaactgaactgt

SEQ ID NO: 44471 - DNA, 33 bp, Homo sapien
cagtttacacagcttacggtttctttcaattct

SEQ ID NO: 44472 - DNA, 33 bp, Homo sapien
cagtttacacagcttatggtttctttcaattct

SEQ ID NO: 44473 - DNA, 33 bp, Homo sapien
ctgtctttagctgacaatatcatttgaaatgtt

SEQ ID NO: 44474 - DNA, 33 bp, Homo sapien
ctgtctttagctgacagtatcatttgaaatgtt

SEQ ID NO: 44475 - DNA, 33 bp, Homo sapien
gaatctaagttaagccaaccagtatcttggatc

SEQ ID NO: 44476 - DNA, 33 bp, Homo sapien
gaatctaagttaagccgaccagtatcttggatc

SEQ ID NO: 44477 - DNA, 33 bp, Homo sapien
cagacacacagagagcaagatagagagagggag

SEQ ID NO: 44478 - DNA, 33 bp, Homo sapien
cagacacacagagagcgagatagagagagggag

SEQ ID NO: 44479 - DNA, 33 bp, Homo sapien
gagcattatgtggcacaggtgacatctgcaaat

SEQ ID NO: 44480 - DNA, 33 bp, Homo sapien
gagcattatgtggcaccggtgacatctgcaaat

SEQ ID NO: 44481 - DNA, 33 bp, Homo sapien
cactaactaatcaacactcctttgcgaatacag

SEQ ID NO: 44482 - DNA, 33 bp, Homo sapien
cactaactaatcaacattcctttgcgaatacag

SEQ ID NO: 44483 - DNA, 33 bp, Homo sapien
acttcctgaagctgtaggaggaactggcacatc

SEQ ID NO: 44484 - DNA, 33 bp, Homo sapien
acttcctgaagctgtatgaggaactggcacatc

SEQ ID NO: 44485 - DNA, 33 bp, Homo sapien
tcatcttagcagatggaaagtctatgcttctag

SEQ ID NO: 44486 - DNA, 33 bp, Homo sapien
tcatcttagcagatgggaagtctatgcttctag

SEQ ID NO: 44487 - DNA, 33 bp, Homo sapien
ttattaccttgtataagaagaagtcctaggtta

SEQ ID NO: 44488 - DNA, 33 bp, Homo sapien
ttattaccttgtataataagaagtcctaggtta

SEQ ID NO: 44489 - DNA, 33 bp, Homo sapien
atgaggaagggactgaaggtctcactagacttt

SEQ ID NO: 44490 - DNA, 33 bp, Homo sapien
atgaggaagggactgagggtctcactagacttt

SEQ ID NO: 44491 - DNA, 33 bp, Homo sapien
cttctttgagaattcaagttttaaaatctgttc

SEQ ID NO: 44492 - DNA, 33 bp, Homo sapien
cttctttgagaattcaggttttaaaatctgttc

SEQ ID NO: 44493 - DNA, 33 bp, Homo sapien
ttgggtcattgcaaacggaagccaaaccagtca

SEQ ID NO: 44494 - DNA, 33 bp, Homo sapien
ttgggtcattgcaaactgaagccaaaccagtca

SEQ ID NO: 44495 - DNA, 33 bp, Homo sapien
taaatctgatgattgcactgagttaaagaacat

SEQ ID NO: 44496 - DNA, 33 bp, Homo sapien
taaatctgatgattgctctgagttaaagaacat

SEQ ID NO: 44497 - DNA, 33 bp, Homo sapien
tggagcttgagcaccaagttccagtgtgtgctc

SEQ ID NO: 44498 - DNA, 33 bp, Homo sapien
tggagcttgagcaccatgttccagtgtgtgctc

SEQ ID NO: 44499 - DNA, 33 bp, Homo sapien
agggatgacttggttaaattttagcaccttctt

SEQ ID NO: 44500 - DNA, 33 bp, Homo sapien
agggatgacttggttagattttagcaccttctt

SEQ ID NO: 44501 - DNA, 33 bp, Homo sapien
tatgtagtatgaacagacaactatataaccaac

SEQ ID NO: 44502 - DNA, 33 bp, Homo sapien
tatgtagtatgaacaggcaactatataaccaac

SEQ ID NO: 44503 - DNA, 33 bp, Homo sapien
tatgcagtggagttgacaataattgtgaaataa

SEQ ID NO: 44504 - DNA, 33 bp, Homo sapien
tatgcagtggagttgataataattgtgaaataa

SEQ ID NO: 44505 - DNA, 33 bp, Homo sapien
cattgcaaatgttcaacagctttcatcccctat

SEQ ID NO: 44506 - DNA, 33 bp, Homo sapien
cattgcaaatgttcaatagctttcatcccctat

SEQ ID NO: 44507 - DNA, 33 bp, Homo sapien
gaaactcaccggggaagagtcattttctatcgg

SEQ ID NO: 44508 - DNA, 33 bp, Homo sapien
gaaactcaccggggaatagtcattttctatcgg

SEQ ID NO: 44509 - DNA, 33 bp, Homo sapien
tttaactgaaaatgccaacaaaggccaaagaac

SEQ ID NO: 44510 - DNA, 33 bp, Homo sapien
tttaactgaaaatgcccacaaaggccaaagaac

SEQ ID NO: 44511 - DNA, 33 bp, Homo sapien; identical to SEQ ID NO: 44509

SEQ ID NO: 44512 - DNA, 33 bp, Homo sapien; identical to SEQ ID NO: 44510

SEQ ID NO: 44513 - DNA, 33 bp, Homo sapien
tgctgataacacctgcactgggaagacctgtca

SEQ ID NO: 44514 - DNA, 33 bp, Homo sapien
tgctgataacacctgcgctgggaagacctgtca

SEQ ID NO: 44515 - DNA, 33 bp, Homo sapien
gagaacctcaagttaaaagagaccacaattgtt

SEQ ID NO: 44516 - DNA, 33 bp, Homo sapien
gagaacctcaagttaagagagaccacaattgtt

SEQ ID NO: 44517 - DNA, 33 bp, Homo sapien
tcccaaaactgaaataggaagtggacctaataa

SEQ ID NO: 44518 - DNA, 33 bp, Homo sapien
tcccaaaactgaaatatgaagtggacctaataa

SEQ ID NO: 44519 - DNA, 33 bp, Homo sapien
ggagtggctgcattaacattattacagcgggaa

SEQ ID NO: 44520 - DNA, 33 bp, Homo sapien
ggagtggctgcattaagattattacagcgggaa

SEQ ID NO: 44521 - DNA, 33 bp, Homo sapien; identical to SEQ ID NO: 44519

SEQ ID NO: 44522 - DNA, 33 bp, Homo sapien; identical to SEQ ID NO: 44520

SEQ ID NO: 44523 - DNA, 33 bp, Homo sapien
gtgaacaagtttcctcactgataaaatgagaat

SEQ ID NO: 44524 - DNA, 33 bp, Homo sapien
gtgaacaagtttcctcgctgataaaatgagaat

SEQ ID NO: 44525 - DNA, 33 bp, Homo sapien
tccatgagaaaaggagaccaatcaagacaaatg

SEQ ID NO: 44526 - DNA, 33 bp, Homo sapien
tccatgagaaaaggaggccaatcaagacaaatg

SEQ ID NO: 44527 - DNA, 33 bp, Homo sapien; identical to SEQ ID NO: 44525

SEQ ID NO: 44528 - DNA, 33 bp, Homo sapien; identical to SEQ ID NO: 44526

SEQ ID NO: 44529 - DNA, 33 bp, Homo sapien
actatctcctttgcaagaatcaaattcagctga

SEQ ID NO: 44530 - DNA, 33 bp, Homo sapien
actatctcctttgcaataatcaaattcagctga

SEQ ID NO: 44531 - DNA, 33 bp, Homo sapien; identical to SEQ ID NO: 44529

SEQ ID NO: 44532 - DNA, 33 bp, Homo sapien; identical to SEQ ID NO: 44530

SEQ ID NO: 44533 - DNA, 33 bp, Homo sapien
ccttacaagagctggacggatgctgactcttgt

SEQ ID NO: 44534 - DNA, 33 bp, Homo sapien
ccttacaagagctggatggatgctgactcttgt

SEQ ID NO: 44535 - DNA, 33 bp, Homo sapien
gaagttgagggcctgaatcaacggatttggctg

SEQ ID NO: 44536 - DNA, 33 bp, Homo sapien
gaagttgagggcctgagtcaacggatttggctg

SEQ ID NO: 44537 - DNA, 33 bp, Homo sapien
tccacaggcggccacaatgtcctgttttgctcc

SEQ ID NO: 44538 - DNA, 33 bp, Homo sapien
tccacaggcggccacattgtcctgttttgctcc

SEQ ID NO: 44539 - DNA, 33 bp, Homo sapien
catgtgttaaataatacgctgtagctagttctc

SEQ ID NO: 44540 - DNA, 33 bp, Homo sapien
catgtgttaaataatatgctgtagctagttctc

SEQ ID NO: 44541 - DNA, 33 bp, Homo sapien
ttgtgaagactttctcaatatgataaccatgtg

SEQ ID NO: 44542 - DNA, 33 bp, Homo sapien
ttgtgaagactttctcgatatgataaccatgtg

SEQ ID NO: 44543 - DNA, 33 bp, Homo sapien
gttcccttaggctgagcattgttttttgtttgt

SEQ ID NO: 44544 - DNA, 33 bp, Homo sapien
gttcccttaggctgaggattgttttttgtttgt

SEQ ID NO: 44545 - DNA, 33 bp, Homo sapien
gctaatgggtggactcagaaaaatggtgatacc

SEQ ID NO: 44546 - DNA, 33 bp, Homo sapien
gctaatgggtggactctgaaaaatggtgatacc

SEQ ID NO: 44547 - DNA, 33 bp, Homo sapien
ccgaactctttgctcaagatgtaattaaggtta

SEQ ID NO: 44548 - DNA, 33 bp, Homo sapien
ccgaactctttgctcaggatgtaattaaggtta

SEQ ID NO: 44549 - DNA, 33 bp, Homo sapien
ggttgataggtgcaaactggcctgagcaggagg

SEQ ID NO: 44550 - DNA, 33 bp, Homo sapien
ggttgataggtgcaaattggcctgagcaggagg

SEQ ID NO: 44551 - DNA, 33 bp, Homo sapien; identical to SEQ ID NO: 44549

SEQ ID NO: 44552 - DNA, 33 bp, Homo sapien; identical to SEQ ID NO: 44550

SEQ ID NO: 44553 - DNA, 33 bp, Homo sapien
ttacctcatttaatacacatcagaaacctatga

SEQ ID NO: 44554 - DNA, 33 bp, Homo sapien
ttacctcatttaatactcatcagaaacctatga

SEQ ID NO: 44555 - DNA, 33 bp, Homo sapien
ttgtcagtggtatggcagagcactggagcatgg

SEQ ID NO: 44556 - DNA, 33 bp, Homo sapien
ttgtcagtggtatggcggagcactggagcatgg

SEQ ID NO: 44557 - DNA, 33 bp, Homo sapien
ttgttgtgttgtggccaacaatatgtgccatcc

SEQ ID NO: 44558 - DNA, 33 bp, Homo sapien
ttgttgtgttgtggcctacaatatgtgccatcc

SEQ ID NO: 44559 - DNA, 33 bp, Homo sapien
ttcacatcacacaaacaagttcattctcaaccc

SEQ ID NO: 44560 - DNA, 33 bp, Homo sapien
ttcacatcacacaaacgagttcattctcaaccc

SEQ ID NO: 44561 - DNA, 33 bp, Homo sapien
atgagaagatgaggaacgtcattttatgtaaag

SEQ ID NO: 44562 - DNA, 33 bp, Homo sapien
atgagaagatgaggaatgtcattttatgtaaag

SEQ ID NO: 44563 - DNA, 33 bp, Homo sapien; identical to SEQ ID NO: 44561

SEQ ID NO: 44564 - DNA, 33 bp, Homo sapien; identical to SEQ ID NO: 44562

SEQ ID NO: 44565 - DNA, 33 bp, Homo sapien
agaaacttatttctaacgttccagagtctggga

SEQ ID NO: 44566 - DNA, 33 bp, Homo sapien
agaaacttatttctaatgttccagagtctggga

SEQ ID NO: 44567 - DNA, 33 bp, Homo sapien
catacatggaacctaccgacaccttgatcatgg

SEQ ID NO: 44568 - DNA, 33 bp, Homo sapien
catacatggaacctactgacaccttgatcatgg

SEQ ID NO: 44569 - DNA, 33 bp, Homo sapien
atgtttctgagcaatgcagaacagctttttggt

SEQ ID NO: 44570 - DNA, 33 bp, Homo sapien
atgtttctgagcaatggagaacagctttttggt

SEQ ID NO: 44571 - DNA, 33 bp, Homo sapien
ccaaaagctctgcccccagttctcctgtatggt

SEQ ID NO: 44572 - DNA, 33 bp, Homo sapien
ccaaaagctctgcccctagttctcctgtatggt

SEQ ID NO: 44573 - DNA, 33 bp, Homo sapien
aatgatgggctcacaacggcaatctgcattcca

SEQ ID NO: 44574 - DNA, 33 bp, Homo sapien
aatgatgggctcacaatggcaatctgcattcca

SEQ ID NO: 44575 - DNA, 33 bp, Homo sapien; identical to SEQ ID NO: 44573

SEQ ID NO: 44576 - DNA, 33 bp, Homo sapien; identical to SEQ ID NO: 44574

SEQ ID NO: 44577 - DNA, 33 bp, Homo sapien
tttggttatagcaacaaagtggtgaacctcatg

SEQ ID NO: 44578 - DNA, 33 bp, Homo sapien
tttggttatagcaacagagtggtgaacctcatg

SEQ ID NO: 44579 - DNA, 33 bp, Homo sapien; identical to SEQ ID NO: 44577

SEQ ID NO: 44580 - DNA, 33 bp, Homo sapien; identical to SEQ ID NO: 44578

SEQ ID NO: 44581 - DNA, 33 bp, Homo sapien
ctacaacatgggaggacggcaagacccagagtg

SEQ ID NO: 44582 - DNA, 33 bp, Homo sapien
ctacaacatgggaggagggcaagacccagagtg

SEQ ID NO: 44583 - DNA, 33 bp, Homo sapien
ctatcatgaacttcaacgtgaaaggtacagtag

SEQ ID NO: 44584 - DNA, 33 bp, Homo sapien
ctatcatgaacttcaatgtgaaaggtacagtag

SEQ ID NO: 44585 - DNA, 33 bp, Homo sapien
aaagataaacaatgaacgaagagaagtccctcc

SEQ ID NO: 44586 - DNA, 33 bp, Homo sapien
aaagataaacaatgaaggaagagaagtccctcc

SEQ ID NO: 44587 - DNA, 33 bp, Homo sapien
ccctaactgcttggccaaactctgcatccttct

SEQ ID NO: 44588 - DNA, 33 bp, Homo sapien
ccctaactgcttggcctaactctgcatccttct

SEQ ID NO: 44589 - DNA, 33 bp, Homo sapien
acaagctgctggatgtcaagaggagcagatcag

SEQ ID NO: 44590 - DNA, 33 bp, Homo sapien
acaagctgctggatgttaagaggagcagatcag

SEQ ID NO: 44591 - DNA, 33 bp, Homo sapien
tatcacagcatgattacagtaatacacaacatc

SEQ ID NO: 44592 - DNA, 33 bp, Homo sapien
tatcacagcatgattagagtaatacacaacatc

SEQ ID NO: 44593 - DNA, 33 bp, Homo sapien
ccctcttcatatcacaaaaatcagttcattctc

SEQ ID NO: 44594 - DNA, 33 bp, Homo sapien
ccctcttcatatcacacaaatcagttcattctc

SEQ ID NO: 44595 - DNA, 33 bp, Homo sapien
agtctgcaactgaccccagtgccccctaccttt

SEQ ID NO: 44596 - DNA, 33 bp, Homo sapien
agtctgcaactgaccctagtgccccctaccttt

SEQ ID NO: 44597 - DNA, 33 bp, Homo sapien
cctattgaacagcgcaatctttcctcgagaaat

SEQ ID NO: 44598 - DNA, 33 bp, Homo sapien
cctattgaacagcgcactctttcctcgagaaat

SEQ ID NO: 44599 - DNA, 33 bp, Homo sapien
gaagccaaagctattcaagaaagtggttttcca

SEQ ID NO: 44600 - DNA, 33 bp, Homo sapien
gaagccaaagctattcgagaaagtggttttcca

SEQ ID NO: 44601 - DNA, 33 bp, Homo sapien
ttcttgatcttttacaaccctatgagaagtatg

SEQ ID NO: 44602 - DNA, 33 bp, Homo sapien
ttcttgatcttttacagccctatgagaagtatg

SEQ ID NO: 44603 - DNA, 33 bp, Homo sapien
tgtcaagtgattgtctaagaattttaaaaccta

SEQ ID NO: 44604 - DNA, 33 bp, Homo sapien
tgtcaagtgattgtctcagaattttaaaaccta

SEQ ID NO: 44605 - DNA, 33 bp, Homo sapien
cacatggaaaaagggacatgaacgcgagcaatg

SEQ ID NO: 44606 - DNA, 33 bp, Homo sapien
cacatggaaaaagggagatgaacgcgagcaatg

SEQ ID NO: 44607 - DNA, 33 bp, Homo sapien
cccaggtaagtaagcaagtaggagagttagact

SEQ ID NO: 44608 - DNA, 33 bp, Homo sapien
cccaggtaagtaagcaggtaggagagttagact

SEQ ID NO: 44609 - DNA, 33 bp, Homo sapien
aatgagaaaagtaccaacaatttcatatatatt

SEQ ID NO: 44610 - DNA, 33 bp, Homo sapien
aatgagaaaagtaccatcaatttcatatatatt

SEQ ID NO: 44611 - DNA, 33 bp, Homo sapien
atgaatactgaaactacctctttgcagtaatca

SEQ ID NO: 44612 - DNA, 33 bp, Homo sapien
atgaatactgaaactatctctttgcagtaatca

SEQ ID NO: 44613 - DNA, 33 bp, Homo sapien
ctcggagccttttcagccccccatgtggtgcat

SEQ ID NO: 44614 - DNA, 33 bp, Homo sapien
ctcggagccttttcagtcccccatgtggtgcat

SEQ ID NO: 44615 - DNA, 33 bp, Homo sapien
tgctagggcaagatggcacattcagcaaaagct

SEQ ID NO: 44616 - DNA, 33 bp, Homo sapien
tgctagggcaagatggtacattcagcaaaagct

SEQ ID NO: 44617 - DNA, 33 bp, Homo sapien
caaaagatcatggggaatccagtgctgacatta

SEQ ID NO: 44618 - DNA, 33 bp, Homo sapien
caaaagatcatggggattccagtgctgacatta

SEQ ID NO: 44619 - DNA, 33 bp, Homo sapien; identical to SEQ ID NO: 44617

SEQ ID NO: 44620 - DNA, 33 bp, Homo sapien; identical to SEQ ID NO: 44618

SEQ ID NO: 44621 - DNA, 33 bp, Homo sapien
aactcatgtacactcacaccaacaatgtaaaag

SEQ ID NO: 44622 - DNA, 33 bp, Homo sapien
aactcatgtacactcataccaacaatgtaaaag

SEQ ID NO: 44623 - DNA, 33 bp, Homo sapien
tctgagtacagacacaacttaaaaaattacaca

SEQ ID NO: 44624 - DNA, 33 bp, Homo sapien
tctgagtacagacacatcttaaaaaattacaca

SEQ ID NO: 44625 - DNA, 33 bp, Homo sapien
ccaatatagccaaaccaattgactccaggcttc

SEQ ID NO: 44626 - DNA, 33 bp, Homo sapien
ccaatatagccaaacccattgactccaggcttc

SEQ ID NO: 44627 - DNA, 33 bp, Homo sapien
gtgccttgggaatgccactggcgctgcacaaga

SEQ ID NO: 44628 - DNA, 33 bp, Homo sapien
gtgccttgggaatgccgctggcgctgcacaaga

SEQ ID NO: 44629 - DNA, 33 bp, Homo sapien
aaagtgctaggtaatacggtaaatgtatcttca

SEQ ID NO: 44630 - DNA, 33 bp, Homo sapien
aaagtgctaggtaatatggtaaatgtatcttca

SEQ ID NO: 44631 - DNA, 33 bp, Homo sapien
ctatcagctgatgaaacaataaacaaatgggag

SEQ ID NO: 44632 - DNA, 33 bp, Homo sapien
ctatcagctgatgaaagaataaacaaatgggag

SEQ ID NO: 44633 - DNA, 33 bp, Homo sapien
tgtatatgaatacagacaatggagctgagctgg

SEQ ID NO: 44634 - DNA, 33 bp, Homo sapien
tgtatatgaatacagagaatggagctgagctgg

SEQ ID NO: 44635 - DNA, 33 bp, Homo sapien
aaccagaagtcagctagctaagccatttgtctg

SEQ ID NO: 44636 - DNA, 33 bp, Homo sapien
aaccagaagtcagctatctaagccatttgtctg

SEQ ID NO: 44637 - DNA, 33 bp, Homo sapien
ctgaagtagctctgccaatttctgtgttgaagt

SEQ ID NO: 44638 - DNA, 33 bp, Homo sapien
ctgaagtagctctgccgatttctgtgttgaagt

SEQ ID NO: 44639 - DNA, 33 bp, Homo sapien
acatagtaaagggctcaattaatatgttagagc

SEQ ID NO: 44640 - DNA, 33 bp, Homo sapien
acatagtaaagggctcgattaatatgttagagc

SEQ ID NO: 44641 - DNA, 33 bp, Homo sapien
tgtttcacaccaaaagactgtgtgctcctccac

SEQ ID NO: 44642 - DNA, 33 bp, Homo sapien
tgtttcacaccaaaagcctgtgtgctcctccac

SEQ ID NO: 44643 - DNA, 33 bp, Homo sapien
aaatcctattaaattggatggatagctcccatt

SEQ ID NO: 44644 - DNA, 33 bp, Homo sapien
aaatcctattaaattgtatggatagctcccatt

SEQ ID NO: 44645 - DNA, 33 bp, Homo sapien
ttatttatatttggaacaagtagagaaacaggc

SEQ ID NO: 44646 - DNA, 33 bp, Homo sapien
ttatttatatttggaataagtagagaaacaggc

SEQ ID NO: 44647 - DNA, 33 bp, Homo sapien
gcttatattccaagcaaacctgacagctcattg

SEQ ID NO: 44648 - DNA, 33 bp, Homo sapien
gcttatattccaagcacacctgacagctcattg

SEQ ID NO: 44649 - DNA, 33 bp, Homo sapien
gatccttaattccccaacttgcttcatctcctc

SEQ ID NO: 44650 - DNA, 33 bp, Homo sapien
gatccttaattccccaccttgcttcatctcctc

SEQ ID NO: 44651 - DNA, 33 bp, Homo sapien
gtatatgattaggacaaaaagcttctggttggg

SEQ ID NO: 44652 - DNA, 33 bp, Homo sapien
gtatatgattaggacagaaagcttctggttggg

SEQ ID NO: 44653 - DNA, 33 bp, Homo sapien
ctgggcttcgccttcaacagcctttccctttcc

SEQ ID NO: 44654 - DNA, 33 bp, Homo sapien
ctgggcttcgccttcatcagcctttccctttcc

SEQ ID NO: 44655 - DNA, 33 bp, Homo sapien
gctggccactaaagtaagaatacccttctcatg

SEQ ID NO: 44656 - DNA, 33 bp, Homo sapien
gctggccactaaagtaggaatacccttctcatg

SEQ ID NO: 44657 - DNA, 33 bp, Homo sapien
cttaaagtcatacatacagttggcaaaataatt

SEQ ID NO: 44658 - DNA, 33 bp, Homo sapien
cttaaagtcatacatatagttggcaaaataatt

SEQ ID NO: 44659 - DNA, 33 bp, Homo sapien
agatgacaatggaataagtgtggaaggctgctg

SEQ ID NO: 44660 - DNA, 33 bp, Homo sapien
agatgacaatggaataggtgtggaaggctgctg

SEQ ID NO: 44661 - DNA, 33 bp, Homo sapien
tagtctatttgtgctactacaacaaaatatatc

SEQ ID NO: 44662 - DNA, 33 bp, Homo sapien
tagtctatttgtgctagtacaacaaaatatatc

SEQ ID NO: 44663 - DNA, 33 bp, Homo sapien
tccactgataaagctgcatccttgtgctcacat

SEQ ID NO: 44664 - DNA, 33 bp, Homo sapien
tccactgataaagctgtatccttgtgctcacat

SEQ ID NO: 44665 - DNA, 33 bp, Homo sapien
catccatgacaactccaatttagtggaaggact

SEQ ID NO: 44666 - DNA, 33 bp, Homo sapien
catccatgacaactccgatttagtggaaggact

SEQ ID NO: 44667 - DNA, 33 bp, Homo sapien
tctccatggtagtgaaaacgacactggagtcta

SEQ ID NO: 44668 - DNA, 33 bp, Homo sapien
tctccatggtagtgaagacgacactggagtcta

SEQ ID NO: 44669 - DNA, 33 bp, Homo sapien
ttctgggtcagggacacaatccagtctctggat

SEQ ID NO: 44670 - DNA, 33 bp, Homo sapien
ttctgggtcagggacagaatccagtctctggat

SEQ ID NO: 44671 - DNA, 33 bp, Homo sapien
gccactgttcgctcaacgactccaggaatggtc

SEQ ID NO: 44672 - DNA, 33 bp, Homo sapien
gccactgttcgctcaatgactccaggaatggtc

SEQ ID NO: 44673 - DNA, 33 bp, Homo sapien
tggtgacaaagttttaccagtccactcaaaatg

SEQ ID NO: 44674 - DNA, 33 bp, Homo sapien
tggtgacaaagttttatcagtccactcaaaatg

SEQ ID NO: 44675 - DNA, 33 bp, Homo sapien
cacaaaagaatgtacccgagtctgttataacca

SEQ ID NO: 44676 - DNA, 33 bp, Homo sapien
cacaaaagaatgtacctgagtctgttataacca

SEQ ID NO: 44677 - DNA, 33 bp, Homo sapien
atgtctcctctagctacgaatattgatggtgat

SEQ ID NO: 44678 - DNA, 33 bp, Homo sapien
atgtctcctctagctatgaatattgatggtgat

SEQ ID NO: 44679 - DNA, 33 bp, Homo sapien
ttccttattgaacagcacaatctttcctcaaga

SEQ ID NO: 44680 - DNA, 33 bp, Homo sapien
ttccttattgaacagcgcaatctttcctcaaga

SEQ ID NO: 44681 - DNA, 33 bp, Homo sapien
cctgaaaataaggcaaatctcacgtatacaagc

SEQ ID NO: 44682 - DNA, 33 bp, Homo sapien
cctgaaaataaggcaattctcacgtatacaagc

SEQ ID NO: 44683 - DNA, 33 bp, Homo sapien
atttagcctatttaaactgctccaggttttgct

SEQ ID NO: 44684 - DNA, 33 bp, Homo sapien
atttagcctatttaaattgctccaggttttgct

SEQ ID NO: 44685 - DNA, 33 bp, Homo sapien
atcttcacaaaatatcagacacagtggaagggg

SEQ ID NO: 44686 - DNA, 33 bp, Homo sapien
atcttcacaaaatatcggacacagtggaagggg

SEQ ID NO: 44687 - DNA, 33 bp, Homo sapien
tgaaatctatacaagaatcatctaactacagcc

SEQ ID NO: 44688 - DNA, 33 bp, Homo sapien
tgaaatctatacaagagtcatctaactacagcc

SEQ ID NO: 44689 - DNA, 33 bp, Homo sapien
gtcttccttttgagaccgaggggaagaaataat

SEQ ID NO: 44690 - DNA, 33 bp, Homo sapien
gtcttccttttgagactgaggggaagaaataat

SEQ ID NO: 44691 - DNA, 33 bp, Homo sapien
cttctcacctacatagaatcatcagcctagaaa

SEQ ID NO: 44692 - DNA, 33 bp, Homo sapien
cttctcacctacatagtatcatcagcctagaaa

SEQ ID NO: 44693 - DNA, 33 bp, Homo sapien
gaggattttagttttccaacgtggcatggctca

SEQ ID NO: 44694 - DNA, 33 bp, Homo sapien
gaggattttagttttctaacgtggcatggctca

SEQ ID NO: 44695 - DNA, 33 bp, Homo sapien
gccaaagagcttcaaactggggagacagaacca

SEQ ID NO: 44696 - DNA, 33 bp, Homo sapien
gccaaagagcttcaaattggggagacagaacca

SEQ ID NO: 44697 - DNA, 33 bp, Homo sapien
atattccagagactgaactaaaagtcttaaggg

SEQ ID NO: 44698 - DNA, 33 bp, Homo sapien
atattccagagactgagctaaaagtcttaaggg

SEQ ID NO: 44699 - DNA, 33 bp, Homo sapien
tgagcctcttgtatccaggactttaccagtttt

SEQ ID NO: 44700 - DNA, 33 bp, Homo sapien
tgagcctcttgtatccgggactttaccagtttt

SEQ ID NO: 44701 - DNA, 33 bp, Homo sapien
accaggaataaagaaacgtatctagagcaggtc

SEQ ID NO: 44702 - DNA, 33 bp, Homo sapien
accaggaataaagaaatgtatctagagcaggtc

SEQ ID NO: 44703 - DNA, 33 bp, Homo sapien
atgtgaaatttggtaaatatatggtgcatttct

SEQ ID NO: 44704 - DNA, 33 bp, Homo sapien
atgtgaaatttggtaactatatggtgcatttct

SEQ ID NO: 44705 - DNA, 33 bp, Homo sapien
taaatttagtaagacaaaagtaagtcatttttg

SEQ ID NO: 44706 - DNA, 33 bp, Homo sapien
taaatttagtaagacataagtaagtcatttttg

SEQ ID NO: 44707 - DNA, 33 bp, Homo sapien
ctatctgctaaaaggaacctagcagggcctaga

SEQ ID NO: 44708 - DNA, 33 bp, Homo sapien
ctatctgctaaaaggagcctagcagggcctaga

SEQ ID NO: 44709 - DNA, 33 bp, Homo sapien
aactattaccaataaacctggcagcacaatgta

SEQ ID NO: 44710 - DNA, 33 bp, Homo sapien
aactattaccaataaatctggcagcacaatgta

SEQ ID NO: 44711 - DNA, 33 bp, Homo sapien
ggggtagaccaaatagacgtgaaggcaatttgt

SEQ ID NO: 44712 - DNA, 33 bp, Homo sapien
ggggtagaccaaataggcgtgaaggcaatttgt

SEQ ID NO: 44713 - DNA, 33 bp, Homo sapien
cagtctggctggtgagaataggaatgtttcctt

SEQ ID NO: 44714 - DNA, 33 bp, Homo sapien
cagtctggctggtgagtataggaatgtttcctt

SEQ ID NO: 44715 - DNA, 33 bp, Homo sapien
cccagggggatctgataaggataaggtctggac

SEQ ID NO: 44716 - DNA, 33 bp, Homo sapien
cccagggggatctgatgaggataaggtctggac

SEQ ID NO: 44717 - DNA, 33 bp, Homo sapien
aacaagtggacagtcacctagaaaataaagtca

SEQ ID NO: 44718 - DNA, 33 bp, Homo sapien
aacaagtggacagtcatctagaaaataaagtca

SEQ ID NO: 44719 - DNA, 33 bp, Homo sapien
catgttaatgatagcaaggtttagattctacac

SEQ ID NO: 44720 - DNA, 33 bp, Homo sapien
catgttaatgatagcagggtttagattctacac

SEQ ID NO: 44721 - DNA, 33 bp, Homo sapien
gaggctgccagaacaactgcgcgctaaggcgct

SEQ ID NO: 44722 - DNA, 33 bp, Homo sapien
gaggctgccagaacaattgcgcgctaaggcgct

SEQ ID NO: 44723 - DNA, 33 bp, Homo sapien
tgtgttgcaaagacagacaagaaagctgagccc

SEQ ID NO: 44724 - DNA, 33 bp, Homo sapien
tgtgttgcaaagacaggcaagaaagctgagccc

SEQ ID NO: 44725 - DNA, 33 bp, Homo sapien
tgaaacaatacttacaaccttactatctatctg

SEQ ID NO: 44726 - DNA, 33 bp, Homo sapien
tgaaacaatacttacagccttactatctatctg

SEQ ID NO: 44727 - DNA, 33 bp, Homo sapien
gtgtttcttacaatgaacctcagtcaaaaaagt

SEQ ID NO: 44728 - DNA, 33 bp, Homo sapien
gtgtttcttacaatgagcctcagtcaaaaaagt

SEQ ID NO: 44729 - DNA, 33 bp, Homo sapien
agctttggagagaacactgaagaaggatggacc

SEQ ID NO: 44730 - DNA, 33 bp, Homo sapien
agctttggagagaacattgaagaaggatggacc

SEQ ID NO: 44731 - DNA, 33 bp, Homo sapien
agtaaataatgaatgaaacgaatgttgaaagaa

SEQ ID NO: 44732 - DNA, 33 bp, Homo sapien
agtaaataatgaatgagacgaatgttgaaagaa

SEQ ID NO: 44733 - DNA, 33 bp, Homo sapien
atctaagtgacagaacaggtacagtacagcact

SEQ ID NO: 44734 - DNA, 33 bp, Homo sapien
atctaagtgacagaacgggtacagtacagcact

SEQ ID NO: 44735 - DNA, 33 bp, Homo sapien
ctgcaagtcgctgagacgaaatgtttctaagtt

SEQ ID NO: 44736 - DNA, 33 bp, Homo sapien
ctgcaagtcgctgagatgaaatgtttctaagtt

SEQ ID NO: 44737 - DNA, 33 bp, Homo sapien
aaccaaagtctcaaaacagccatcaacacctgg

SEQ ID NO: 44738 - DNA, 33 bp, Homo sapien
aaccaaagtctcaaaagagccatcaacacctgg

SEQ ID NO: 44739 - DNA, 33 bp, Homo sapien
ggctgaggtgggagacggaatgatccaagccat

SEQ ID NO: 44740 - DNA, 33 bp, Homo sapien
ggctgaggtgggagactgaatgatccaagccat

SEQ ID NO: 44741 - DNA, 33 bp, Homo sapien
catacttttgagtctgaatgaattttgtcttag

SEQ ID NO: 44742 - DNA, 33 bp, Homo sapien
catacttttgagtctggatgaattttgtcttag

SEQ ID NO: 44743 - DNA, 33 bp, Homo sapien
tggcgctttaggataacgaccacacaaaagtgc

SEQ ID NO: 44744 - DNA, 33 bp, Homo sapien
tggcgctttaggataatgaccacacaaaagtgc

SEQ ID NO: 44745 - DNA, 33 bp, Homo sapien
gtgtatcatagcccaaaacttgcccaatctgcc

SEQ ID NO: 44746 - DNA, 33 bp, Homo sapien
gtgtatcatagcccaacacttgcccaatctgcc

SEQ ID NO: 44747 - DNA, 33 bp, Homo sapien
acttaaataaacaaaaagtcattcaatcatggg

SEQ ID NO: 44748 - DNA, 33 bp, Homo sapien
acttaaataaacaaaaggtcattcaatcatggg

SEQ ID NO: 44749 - DNA, 33 bp, Homo sapien
cacctcaccttccccaactgtagcatgtgtgca

SEQ ID NO: 44750 - DNA, 33 bp, Homo sapien
cacctcaccttccccacctgtagcatgtgtgca

SEQ ID NO: 44751 - DNA, 33 bp, Homo sapien
aataaatgagacaaaaatatgcataccaaagct

SEQ ID NO: 44752 - DNA, 33 bp, Homo sapien
aataaatgagacaaaagtatgcataccaaagct

SEQ ID NO: 44753 - DNA, 33 bp, Homo sapien
ccttaaagatgtgcaaactttgggctcagtaat

SEQ ID NO: 44754 - DNA, 33 bp, Homo sapien
ccttaaagatgtgcaacctttgggctcagtaat

SEQ ID NO: 44755 - DNA, 33 bp, Homo sapien
gcgagccatttagataccctccctgagatttaa

SEQ ID NO: 44756 - DNA, 33 bp, Homo sapien
gcgagccatttagatatcctccctgagatttaa

SEQ ID NO: 44757 - DNA, 33 bp, Homo sapien
caaaaatcaaagagccaattcttgagagcattg

SEQ ID NO: 44758 - DNA, 33 bp, Homo sapien
caaaaatcaaagagcctattcttgagagcattg

SEQ ID NO: 44759 - DNA, 33 bp, Homo sapien
ctcctgtagattttgcccacattcctttttgtg

SEQ ID NO: 44760 - DNA, 33 bp, Homo sapien
ctcctgtagattttgctcacattcctttttgtg

SEQ ID NO: 44761 - DNA, 33 bp, Homo sapien
ctgcatctccagaggaacaagcagaaacccagc

SEQ ID NO: 44762 - DNA, 33 bp, Homo sapien
ctgcatctccagaggagcaagcagaaacccagc

SEQ ID NO: 44763 - DNA, 33 bp, Homo sapien
tagtaaatggcctgaacgggctttgaatccagg

SEQ ID NO: 44764 - DNA, 33 bp, Homo sapien
tagtaaatggcctgaatgggctttgaatccagg

SEQ ID NO: 44765 - DNA, 33 bp, Homo sapien
gggaagtacacgatccagatataaacagaacaa

SEQ ID NO: 44766 - DNA, 33 bp, Homo sapien
gggaagtacacgatcctgatataaacagaacaa

SEQ ID NO: 44767 - DNA, 33 bp, Homo sapien
ttatactcatgctgtagggaaatgttctgttta

SEQ ID NO: 44768 - DNA, 33 bp, Homo sapien
ttatactcatgctgtatggaaatgttctgttta

SEQ ID NO: 44769 - DNA, 33 bp, Homo sapien
taatgcaggattgcgacatttaaacagaacatt

SEQ ID NO: 44770 - DNA, 33 bp, Homo sapien
taatgcaggattgcgatatttaaacagaacatt

SEQ ID NO: 44771 - DNA, 33 bp, Homo sapien
gctgaattgtgattaactgggggagccatatat

SEQ ID NO: 44772 - DNA, 33 bp, Homo sapien
gctgaattgtgattaattgggggagccatatat

SEQ ID NO: 44773 - DNA, 33 bp, Homo sapien
gctgctctacacagtccacaaacctgtccattt

SEQ ID NO: 44774 - DNA, 33 bp, Homo sapien
gctgctctacacagtctacaaacctgtccattt

SEQ ID NO: 44775 - DNA, 33 bp, Homo sapien
tttgacctctttctaacgccatttcaatctata

SEQ ID NO: 44776 - DNA, 33 bp, Homo sapien
tttgacctctttctaatgccatttcaatctata

SEQ ID NO: 44777 - DNA, 33 bp, Homo sapien
gactcacagagagaaaaagtagtgtggtggatg

SEQ ID NO: 44778 - DNA, 33 bp, Homo sapien
gactcacagagagaaagagtagtgtggtggatg

SEQ ID NO: 44779 - DNA, 33 bp, Homo sapien
aagtttgctctgctcaagatgtagccagcgaac

SEQ ID NO: 44780 - DNA, 33 bp, Homo sapien
aagtttgctctgctcaggatgtagccagcgaac

SEQ ID NO: 44781 - DNA, 33 bp, Homo sapien
agcaaactttctgttcaactagtgccaagaaag

SEQ ID NO: 44782 - DNA, 33 bp, Homo sapien
agcaaactttctgttcgactagtgccaagaaag

SEQ ID NO: 44783 - DNA, 33 bp, Homo sapien
agaccgttacctggcacgctggccacaatctac

SEQ ID NO: 44784 - DNA, 33 bp, Homo sapien
agaccgttacctggcatgctggccacaatctac

SEQ ID NO: 44785 - DNA, 33 bp, Homo sapien
tttaatactaaatgacccctgttaagaattcct

SEQ ID NO: 44786 - DNA, 33 bp, Homo sapien
tttaatactaaatgactcctgttaagaattcct

SEQ ID NO: 44787 - DNA, 33 bp, Homo sapien
ttttgaaagatgctaccggtagtttttccaggg

SEQ ID NO: 44788 - DNA, 33 bp, Homo sapien
ttttgaaagatgctactggtagtttttccaggg

SEQ ID NO: 44789 - DNA, 33 bp, Homo sapien
catttcatagtttgtaaacatttttgtcaacat

SEQ ID NO: 44790 - DNA, 33 bp, Homo sapien
catttcatagtttgtacacatttttgtcaacat

SEQ ID NO: 44791 - DNA, 33 bp, Homo sapien
accattagcaaaggaaatatcctgttttgatta

SEQ ID NO: 44792 - DNA, 33 bp, Homo sapien
accattagcaaaggaagtatcctgttttgatta

SEQ ID NO: 44793 - DNA, 33 bp, Homo sapien
ttcacatggcgagatacccgtcttatcaataga

SEQ ID NO: 44794 - DNA, 33 bp, Homo sapien
ttcacatggcgagatatccgtcttatcaataga

SEQ ID NO: 44795 - DNA, 33 bp, Homo sapien
cctctgtggaaccacaatcacattcctcattgt

SEQ ID NO: 44796 - DNA, 33 bp, Homo sapien
cctctgtggaaccacagtcacattcctcattgt

SEQ ID NO: 44797 - DNA, 33 bp, Homo sapien
tatccactacttcacacgtcattgcaagcttct

SEQ ID NO: 44798 - DNA, 33 bp, Homo sapien
tatccactacttcacaggtcattgcaagcttct

SEQ ID NO: 44799 - DNA, 33 bp, Homo sapien
acaaatggttttttcagtcctatccaaatttat

SEQ ID NO: 44800 - DNA, 33 bp, Homo sapien
acaaatggttttttcattcctatccaaatttat

SEQ ID NO: 44801 - DNA, 33 bp, Homo sapien
cacttgaacatataaagtccatgtcttcagtga

SEQ ID NO: 44802 - DNA, 33 bp, Homo sapien
cacttgaacatataaattccatgtcttcagtga

SEQ ID NO: 44803 - DNA, 33 bp, Homo sapien
agggtagattctgccacgtaggggacatgaatg

SEQ ID NO: 44804 - DNA, 33 bp, Homo sapien
agggtagattctgccatgtaggggacatgaatg

SEQ ID NO: 44805 - DNA, 33 bp, Homo sapien
agtgaagaaacaagggcatcagagctgaggcta

SEQ ID NO: 44806 - DNA, 33 bp, Homo sapien
agtgaagaaacaagggtatcagagctgaggcta

SEQ ID NO: 44807 - DNA, 33 bp, Homo sapien
tcagggataggagatgcaaagaaggttttgtgg

SEQ ID NO: 44808 - DNA, 33 bp, Homo sapien
tcagggataggagatggaaagaaggttttgtgg

SEQ ID NO: 44809 - DNA, 33 bp, Homo sapien
tctggcaccttgccccagaaaatccctgtggaa

SEQ ID NO: 44810 - DNA, 33 bp, Homo sapien
tctggcaccttgccccggaaaatccctgtggaa

SEQ ID NO: 44811 - DNA, 33 bp, Homo sapien
aaagcagggggccaaccagtttgtctgtggaat

SEQ ID NO: 44812 - DNA, 33 bp, Homo sapien
aaagcagggggccaacgagtttgtctgtggaat

SEQ ID NO: 44813 - DNA, 33 bp, Homo sapien
ttgtgccggtttagcacaaattcattttctcag

SEQ ID NO: 44814 - DNA, 33 bp, Homo sapien
ttgtgccggtttagcagaaattcattttctcag

SEQ ID NO: 44815 - DNA, 33 bp, Homo sapien
actactacctgtaatcaataaacatagctttgg

SEQ ID NO: 44816 - DNA, 33 bp, Homo sapien
actactacctgtaatcgataaacatagctttgg

SEQ ID NO: 44817 - DNA, 33 bp, Homo sapien
aagcaaaggcaatttacggtctgtctaggaatt

SEQ ID NO: 44818 - DNA, 33 bp, Homo sapien
aagcaaaggcaatttatggtctgtctaggaatt

SEQ ID NO: 44819 - DNA, 33 bp, Homo sapien
tctcaaggcaaatggccctagccagtggagaag

SEQ ID NO: 44820 - DNA, 33 bp, Homo sapien
tctcaaggcaaatggctctagccagtggagaag

SEQ ID NO: 44821 - DNA, 33 bp, Homo sapien
actgttggcatatgctcagatacctaaaaaaca

SEQ ID NO: 44822 - DNA, 33 bp, Homo sapien
actgttggcatatgcttagatacctaaaaaaca

SEQ ID NO: 44823 - DNA, 33 bp, Homo sapien
aatggggtaagatgcaatctatggaggacaatt

SEQ ID NO: 44824 - DNA, 33 bp, Homo sapien
aatggggtaagatgcagtctatggaggacaatt

SEQ ID NO: 44825 - DNA, 33 bp, Homo sapien
gattcaggtggccccaagtctctgaagatatta

SEQ ID NO: 44826 - DNA, 33 bp, Homo sapien
gattcaggtggccccaggtctctgaagatatta

SEQ ID NO: 44827 - DNA, 33 bp, Homo sapien
ccatcctctggcttcaggctgaacaagtaagat

SEQ ID NO: 44828 - DNA, 33 bp, Homo sapien
ccatcctctggcttcatgctgaacaagtaagat

SEQ ID NO: 44829 - DNA, 33 bp, Homo sapien
caggcagaagaagctacaaaggactgacctgac

SEQ ID NO: 44830 - DNA, 33 bp, Homo sapien
caggcagaagaagctataaaggactgacctgac

SEQ ID NO: 44831 - DNA, 33 bp, Homo sapien
aagacactcattgttccagtccaagatctcaaa

SEQ ID NO: 44832 - DNA, 33 bp, Homo sapien
aagacactcattgttctagtccaagatctcaaa

SEQ ID NO: 44833 - DNA, 33 bp, Homo sapien
tttttcacttggaaaactcatctccaacttacc

SEQ ID NO: 44834 - DNA, 33 bp, Homo sapien
tttttcacttggaaaattcatctccaacttacc

SEQ ID NO: 44835 - DNA, 33 bp, Homo sapien
gaatttgaaagaaacaatggtgggaatggggaa

SEQ ID NO: 44836 - DNA, 33 bp, Homo sapien
gaatttgaaagaaacagtggtgggaatggggaa

SEQ ID NO: 44837 - DNA, 33 bp, Homo sapien
tgataaaatgtggtaaatccatatgataaaata

SEQ ID NO: 44838 - DNA, 33 bp, Homo sapien
tgataaaatgtggtaagtccatatgataaaata

SEQ ID NO: 44839 - DNA, 33 bp, Homo sapien; identical to SEQ ID NO: 44837

SEQ ID NO: 44840 - DNA, 33 bp, Homo sapien; identical to SEQ ID NO: 44838

SEQ ID NO: 44841 - DNA, 33 bp, Homo sapien
ggaatggaaaagaacacgatgagaattagacac

SEQ ID NO: 44842 - DNA, 33 bp, Homo sapien
ggaatggaaaagaacatgatgagaattagacac

SEQ ID NO: 44843 - DNA, 33 bp, Homo sapien
cagctgttgggatcacacaaagagtcaccaggc

SEQ ID NO: 44844 - DNA, 33 bp, Homo sapien
cagctgttgggatcacgcaaagagtcaccaggc

SEQ ID NO: 44845 - DNA, 33 bp, Homo sapien
gatcatatattgacagcaaattatttctccttt

SEQ ID NO: 44846 - DNA, 33 bp, Homo sapien
gatcatatattgacagtaaattatttctccttt

SEQ ID NO: 44847 - DNA, 33 bp, Homo sapien
taatgcgtaatgtgaacagtaagtgccacttat

SEQ ID NO: 44848 - DNA, 33 bp, Homo sapien
taatgcgtaatgtgaatagtaagtgccacttat

SEQ ID NO: 44849 - DNA, 33 bp, Homo sapien
tgtctgtgtctctagccgaccaggtaaggagag

SEQ ID NO: 44850 - DNA, 33 bp, Homo sapien
tgtctgtgtctctagctgaccaggtaaggagag

SEQ ID NO: 44851 - DNA, 33 bp, Homo sapien
aatcccacaagaataccatattgccaatatgtc

SEQ ID NO: 44852 - DNA, 33 bp, Homo sapien
aatcccacaagaatactatattgccaatatgtc

SEQ ID NO: 44853 - DNA, 33 bp, Homo sapien
attcatctgttatcctaaaagcaaacaaatccc

SEQ ID NO: 44854 - DNA, 33 bp, Homo sapien
attcatctgttatcctgaaagcaaacaaatccc

SEQ ID NO: 44855 - DNA, 33 bp, Homo sapien
tactattatactgttagggttagtaagagacag

SEQ ID NO: 44856 - DNA, 33 bp, Homo sapien
tactattatactgttatggttagtaagagacag

SEQ ID NO: 44857 - DNA, 33 bp, Homo sapien
ctgacaacatcatcaccacctgtctcttactaa

SEQ ID NO: 44858 - DNA, 33 bp, Homo sapien
ctgacaacatcatcacgacctgtctcttactaa

SEQ ID NO: 44859 - DNA, 33 bp, Homo sapien
cagataatgtagttcaataaaagtgtttgctgt

SEQ ID NO: 44860 - DNA, 33 bp, Homo sapien
cagataatgtagttcagtaaaagtgtttgctgt

SEQ ID NO: 44861 - DNA, 33 bp, Homo sapien
aaattcatcatggcaacgtaaatcaatagctta

SEQ ID NO: 44862 - DNA, 33 bp, Homo sapien
aaattcatcatggcaatgtaaatcaatagctta

SEQ ID NO: 44863 - DNA, 33 bp, Homo sapien
gaaattctgatagtttcaaaatctttatctcca

SEQ ID NO: 44864 - DNA, 33 bp, Homo sapien
gaaattctgatagtttgaaaatctttatctcca

SEQ ID NO: 44865 - DNA, 33 bp, Homo sapien
actagtaggctgaacacaacaaaggaaagagtc

SEQ ID NO: 44866 - DNA, 33 bp, Homo sapien
actagtaggctgaacataacaaaggaaagagtc

SEQ ID NO: 44867 - DNA, 33 bp, Homo sapien
ctccactcctgcttcaatctttcagaaggaaaa

SEQ ID NO: 44868 - DNA, 33 bp, Homo sapien
ctccactcctgcttcagtctttcagaaggaaaa

SEQ ID NO: 44869 - DNA, 33 bp, Homo sapien
aattggtctatgctatcaatgagtaactttttt

SEQ ID NO: 44870 - DNA, 33 bp, Homo sapien
aattggtctatgctattaatgagtaactttttt

SEQ ID NO: 44871 - DNA, 33 bp, Homo sapien
agttctagtctttctcacaataaataaataaag

SEQ ID NO: 44872 - DNA, 33 bp, Homo sapien
agttctagtctttctcgcaataaataaataaag

SEQ ID NO: 44873 - DNA, 33 bp, Homo sapien
cactcctacatcaacccggagcatccaagccag

SEQ ID NO: 44874 - DNA, 33 bp, Homo sapien
cactcctacatcaacctggagcatccaagccag

SEQ ID NO: 44875 - DNA, 33 bp, Homo sapien
gccacaggagcttttaacctttaaatgactgga

SEQ ID NO: 44876 - DNA, 33 bp, Homo sapien
gccacaggagcttttaccctttaaatgactgga

SEQ ID NO: 44877 - DNA, 33 bp, Homo sapien
caacacctgtggaagaacgaaagcaataggatt

SEQ ID NO: 44878 - DNA, 33 bp, Homo sapien
caacacctgtggaagagcgaaagcaataggatt

SEQ ID NO: 44879 - DNA, 33 bp, Homo sapien
gaacacactcaaactaagataatttaacatagg

SEQ ID NO: 44880 - DNA, 33 bp, Homo sapien
gaacacactcaaactacgataatttaacatagg

SEQ ID NO: 44881 - DNA, 33 bp, Homo sapien
aggggaagggcctactaaaggagatttaatctt

SEQ ID NO: 44882 - DNA, 33 bp, Homo sapien
aggggaagggcctactgaaggagatttaatctt

SEQ ID NO: 44883 - DNA, 33 bp, Homo sapien
gaacctcttcctgagacgcaggtactgggcgcc

SEQ ID NO: 44884 - DNA, 33 bp, Homo sapien
gaacctcttcctgagatgcaggtactgggcgcc

SEQ ID NO: 44885 - DNA, 33 bp, Homo sapien
aagaattggtcaccagaattctaaagagtaatg

SEQ ID NO: 44886 - DNA, 33 bp, Homo sapien
aagaattggtcaccaggattctaaagagtaatg

SEQ ID NO: 44887 - DNA, 33 bp, Homo sapien; identical to SEQ ID NO: 44885

SEQ ID NO: 44888 - DNA, 33 bp, Homo sapien; identical to SEQ ID NO: 44886

SEQ ID NO: 44889 - DNA, 33 bp, Homo sapien
acataagatttcaggaaactgctacgaggttct

SEQ ID NO: 44890 - DNA, 33 bp, Homo sapien
acataagatttcaggacactgctacgaggttct

SEQ ID NO: 44891 - DNA, 33 bp, Homo sapien
ccattgctgttgtgatcaattttcagttctgcc

SEQ ID NO: 44892 - DNA, 33 bp, Homo sapien
ccattgctgttgtgattaattttcagttctgcc

SEQ ID NO: 44893 - DNA, 33 bp, Homo sapien
caaacaaaagctgcacaaagtcacaaaaatgct

SEQ ID NO: 44894 - DNA, 33 bp, Homo sapien
caaacaaaagctgcactaagtcacaaaaatgct

SEQ ID NO: 44895 - DNA, 33 bp, Homo sapien
aagatctgggtgctaaatatactcatcactact

SEQ ID NO: 44896 - DNA, 33 bp, Homo sapien
aagatctgggtgctaagtatactcatcactact

SEQ ID NO: 44897 - DNA, 33 bp, Homo sapien
accattaatgtgcaaaaaaaattaaggtataaa

SEQ ID NO: 44898 - DNA, 33 bp, Homo sapien
accattaatgtgcaaacaaaattaaggtataaa

SEQ ID NO: 44899 - DNA, 33 bp, Homo sapien
tatgtctatacatttacggaacttaatagtttc

SEQ ID NO: 44900 - DNA, 33 bp, Homo sapien
tatgtctatacatttatggaacttaatagtttc

SEQ ID NO: 44901 - DNA, 33 bp, Homo sapien
agtaattcctgcatgaacttgagacataatatt

SEQ ID NO: 44902 - DNA, 33 bp, Homo sapien
agtaattcctgcatgaccttgagacataatatt

SEQ ID NO: 44903 - DNA, 33 bp, Homo sapien
aattagcaaaagtaaacaggtcatgaaaaacaa

SEQ ID NO: 44904 - DNA, 33 bp, Homo sapien
aattagcaaaagtaaagaggtcatgaaaaacaa

SEQ ID NO: 44905 - DNA, 33 bp, Homo sapien
agggtctttagtcttaaaacttcagacttgatg

SEQ ID NO: 44906 - DNA, 33 bp, Homo sapien
agggtctttagtcttagaacttcagacttgatg

SEQ ID NO: 44907 - DNA, 33 bp, Homo sapien
ccttcttgagtctcaaccttaccacactttagg

SEQ ID NO: 44908 - DNA, 33 bp, Homo sapien
ccttcttgagtctcaatcttaccacactttagg

SEQ ID NO: 44909 - DNA, 33 bp, Homo sapien
atgggcaatctctgtccaggtaaaataaacttc

SEQ ID NO: 44910 - DNA, 33 bp, Homo sapien
atgggcaatctctgtctaggtaaaataaacttc

SEQ ID NO: 44911 - DNA, 33 bp, Homo sapien
agactatgtaagactacgtaagaggaaaatgaa

SEQ ID NO: 44912 - DNA, 33 bp, Homo sapien
agactatgtaagactatgtaagaggaaaatgaa

SEQ ID NO: 44913 - DNA, 33 bp, Homo sapien
aaacaaattcaaaaacggaagcaggtctcccat

SEQ ID NO: 44914 - DNA, 33 bp, Homo sapien
aaacaaattcaaaaactgaagcaggtctcccat

SEQ ID NO: 44915 - DNA, 33 bp, Homo sapien
gaattctggaattgccactttttagctatatga

SEQ ID NO: 44916 - DNA, 33 bp, Homo sapien
gaattctggaattgccgctttttagctatatga

SEQ ID NO: 44917 - DNA, 33 bp, Homo sapien
ttgctaagtttgttgaacgtccataaatagtcc

SEQ ID NO: 44918 - DNA, 33 bp, Homo sapien
ttgctaagtttgttgagcgtccataaatagtcc

SEQ ID NO: 44919 - DNA, 33 bp, Homo sapien
aagctgtgataagcccagagaagtgtgcccgcc

SEQ ID NO: 44920 - DNA, 33 bp, Homo sapien
aagctgtgataagcccggagaagtgtgcccgcc

SEQ ID NO: 44921 - DNA, 33 bp, Homo sapien
gtggttactgctttgaaaagtgtgtggatttct

SEQ ID NO: 44922 - DNA, 33 bp, Homo sapien
gtggttactgctttgataagtgtgtggatttct

SEQ ID NO: 44923 - DNA, 33 bp, Homo sapien
attaaccagggaacaaatctaattgagaacata

SEQ ID NO: 44924 - DNA, 33 bp, Homo sapien
attaaccagggaacaagtctaattgagaacata

SEQ ID NO: 44925 - DNA, 33 bp, Homo sapien
attgataaattaatggcatctttaaaagaaata

SEQ ID NO: 44926 - DNA, 33 bp, Homo sapien
attgataaattaatggtatctttaaaagaaata

SEQ ID NO: 44927 - DNA, 33 bp, Homo sapien
gacaaaaggatcccaaatgaaaaagctgccaca

SEQ ID NO: 44928 - DNA, 33 bp, Homo sapien
gacaaaaggatcccaagtgaaaaagctgccaca

SEQ ID NO: 44929 - DNA, 33 bp, Homo sapien
agtctccagttataaaagagaaggcaaattatt

SEQ ID NO: 44930 - DNA, 33 bp, Homo sapien
agtctccagttataaacgagaaggcaaattatt

SEQ ID NO: 44931 - DNA, 33 bp, Homo sapien
tttctttggggcaaaccaaagcaatgagaatag

SEQ ID NO: 44932 - DNA, 33 bp, Homo sapien
tttctttggggcaaactaaagcaatgagaatag

SEQ ID NO: 44933 - DNA, 33 bp, Homo sapien
acttgagtggtggttacggaggggctgttctgg

SEQ ID NO: 44934 - DNA, 33 bp, Homo sapien
acttgagtggtggttagggaggggctgttctgg

SEQ ID NO: 44935 - DNA, 33 bp, Homo sapien
aggtagatcgtgaggccaagagattgtgaccat

SEQ ID NO: 44936 - DNA, 33 bp, Homo sapien
aggtagatcgtgaggctaagagattgtgaccat

SEQ ID NO: 44937 - DNA, 33 bp, Homo sapien
cttgggtagcaatgtgaaaaaggcactgaagca

SEQ ID NO: 44938 - DNA, 33 bp, Homo sapien
cttgggtagcaatgtggaaaaggcactgaagca

SEQ ID NO: 44939 - DNA, 33 bp, Homo sapien
tctagaacatgggcaacttactggagctcctta

SEQ ID NO: 44940 - DNA, 33 bp, Homo sapien
tctagaacatgggcaatttactggagctcctta

SEQ ID NO: 44941 - DNA, 33 bp, Homo sapien
tcattcctcagcataaatcttatgaggtcttta

SEQ ID NO: 44942 - DNA, 33 bp, Homo sapien
tcattcctcagcataagtcttatgaggtcttta

SEQ ID NO: 44943 - DNA, 33 bp, Homo sapien; identical to SEQ ID NO: 44941

SEQ ID NO: 44944 - DNA, 33 bp, Homo sapien; identical to SEQ ID NO: 44942

SEQ ID NO: 44945 - DNA, 33 bp, Homo sapien
gccatgctccaatgtcacaggttgatctcagac

SEQ ID NO: 44946 - DNA, 33 bp, Homo sapien
gccatgctccaatgtcgcaggttgatctcagac

SEQ ID NO: 44947 - DNA, 33 bp, Homo sapien
aacacagaatgcttaacagatctagaagagggc

SEQ ID NO: 44948 - DNA, 33 bp, Homo sapien
aacacagaatgcttaagagatctagaagagggc

SEQ ID NO: 44949 - DNA, 33 bp, Homo sapien
agttcctccagactgaagaactctttgctgagg

SEQ ID NO: 44950 - DNA, 33 bp, Homo sapien
agttcctccagactgacgaactctttgctgagg

SEQ ID NO: 44951 - DNA, 33 bp, Homo sapien
aagaatcattgaatacaattccacagaggcagg

SEQ ID NO: 44952 - DNA, 33 bp, Homo sapien
aagaatcattgaatactattccacagaggcagg

SEQ ID NO: 44953 - DNA, 33 bp, Homo sapien
tgaacttgtaaatgaaatgcacccctttaactg

SEQ ID NO: 44954 - DNA, 33 bp, Homo sapien
tgaacttgtaaatgaagtgcacccctttaactg

SEQ ID NO: 44955 - DNA, 33 bp, Homo sapien
gtgctagtttgagtgacctagaacaagctagtt

SEQ ID NO: 44956 - DNA, 33 bp, Homo sapien
gtgctagtttgagtgatctagaacaagctagtt

SEQ ID NO: 44957 - DNA, 33 bp, Homo sapien
gagcattaaactttcaacatgcagtaatagctt

SEQ ID NO: 44958 - DNA, 33 bp, Homo sapien
gagcattaaactttcagcatgcagtaatagctt

SEQ ID NO: 44959 - DNA, 33 bp, Homo sapien
aaaataaggcttcaaaaaaatatatcagcatgt

SEQ ID NO: 44960 - DNA, 33 bp, Homo sapien
aaaataaggcttcaaataaatatatcagcatgt

SEQ ID NO: 44961 - DNA, 33 bp, Homo sapien; identical to SEQ ID NO: 44959

SEQ ID NO: 44962 - DNA, 33 bp, Homo sapien; identical to SEQ ID NO: 44960

SEQ ID NO: 44963 - DNA, 33 bp, Homo sapien
tgttgtgaggaccagaactagccctcaattaag

SEQ ID NO: 44964 - DNA, 33 bp, Homo sapien
tgttgtgaggaccagacctagccctcaattaag

SEQ ID NO: 44965 - DNA, 33 bp, Homo sapien
atgtggcagataatacacaatggaatactattt

SEQ ID NO: 44966 - DNA, 33 bp, Homo sapien
atgtggcagataatacgcaatggaatactattt

SEQ ID NO: 44967 - DNA, 33 bp, Homo sapien
agtgcaggtagaatcaatcaagatcattcagat

SEQ ID NO: 44968 - DNA, 33 bp, Homo sapien
agtgcaggtagaatcagtcaagatcattcagat

SEQ ID NO: 44969 - DNA, 33 bp, Homo sapien; identical to SEQ ID NO: 44967

SEQ ID NO: 44970 - DNA, 33 bp, Homo sapien; identical to SEQ ID NO: 44968

SEQ ID NO: 44971 - DNA, 33 bp, Homo sapien
ttaagttacttgaaaacgccaaatcataatcta

SEQ ID NO: 44972 - DNA, 33 bp, Homo sapien
ttaagttacttgaaaaggccaaatcataatcta

SEQ ID NO: 44973 - DNA, 33 bp, Homo sapien
atgtcttgaatgtcaaatgtgaaaagtaaccaa

SEQ ID NO: 44974 - DNA, 33 bp, Homo sapien
atgtcttgaatgtcaagtgtgaaaagtaaccaa

SEQ ID NO: 44975 - DNA, 33 bp, Homo sapien
aaaggaatcaaggaaaacttcatgaaggaggag

SEQ ID NO: 44976 - DNA, 33 bp, Homo sapien
aaaggaatcaaggaaagcttcatgaaggaggag

SEQ ID NO: 44977 - DNA, 33 bp, Homo sapien
gccataaagcaagtaaatgcttgtaaatgtatt

SEQ ID NO: 44978 - DNA, 33 bp, Homo sapien
gccataaagcaagtaagtgcttgtaaatgtatt

SEQ ID NO: 44979 - DNA, 33 bp, Homo sapien
gcacccaaattggccaactccaagtgagaagct

SEQ ID NO: 44980 - DNA, 33 bp, Homo sapien
gcacccaaattggccacctccaagtgagaagct

SEQ ID NO: 44981 - DNA, 33 bp, Homo sapien
aggtgttttaaactgccaagtttgtagtaatct

SEQ ID NO: 44982 - DNA, 33 bp, Homo sapien
aggtgttttaaactgctaagtttgtagtaatct

SEQ ID NO: 44983 - DNA, 33 bp, Homo sapien
ttctaaatgtcctctccacttccagtcctgctc

SEQ ID NO: 44984 - DNA, 33 bp, Homo sapien
ttctaaatgtcctctctacttccagtcctgctc

SEQ ID NO: 44985 - DNA, 33 bp, Homo sapien
ggagctttaagcaaagcattggcatgatcgggt

SEQ ID NO: 44986 - DNA, 33 bp, Homo sapien
ggagctttaagcaaagtattggcatgatcgggt

SEQ ID NO: 44987 - DNA, 33 bp, Homo sapien
ggcatgatcgggtccacgttgaagaaggaatta

SEQ ID NO: 44988 - DNA, 33 bp, Homo sapien
ggcatgatcgggtccatgttgaagaaggaatta

SEQ ID NO: 44989 - DNA, 33 bp, Homo sapien
gtggtcaatacttaaacgaattcaaatgtcttc

SEQ ID NO: 44990 - DNA, 33 bp, Homo sapien
gtggtcaatacttaaaggaattcaaatgtcttc

SEQ ID NO: 44991 - DNA, 33 bp, Homo sapien
gtgttattatcaatgacattcctatgcctggct

SEQ ID NO: 44992 - DNA, 33 bp, Homo sapien
gtgttattatcaatgatattcctatgcctggct

SEQ ID NO: 44993 - DNA, 33 bp, Homo sapien
tctctttggagaacagcactggacactaaagca

SEQ ID NO: 44994 - DNA, 33 bp, Homo sapien
tctctttggagaacaggactggacactaaagca

SEQ ID NO: 44995 - DNA, 33 bp, Homo sapien
tttaaaaaatttattacgatgatttacaaaaat

SEQ ID NO: 44996 - DNA, 33 bp, Homo sapien
tttaaaaaatttattatgatgatttacaaaaat

SEQ ID NO: 44997 - DNA, 33 bp, Homo sapien
tcttaagattatttctcaattctctgaacagct

SEQ ID NO: 44998 - DNA, 33 bp, Homo sapien
tcttaagattatttcttaattctctgaacagct

SEQ ID NO: 44999 - DNA, 33 bp, Homo sapien
gccccaccaagccggaactaggagggcactttc

SEQ ID NO: 45000 - DNA, 33 bp, Homo sapien
gccccaccaagccggagctaggagggcactttc

SEQ ID NO: 45001 - DNA, 33 bp, Homo sapien
gactggaaatatagaaatgaggggtgtcacctc

SEQ ID NO: 45002 - DNA, 33 bp, Homo sapien
gactggaaatatagaagtgaggggtgtcacctc

SEQ ID NO: 45003 - DNA, 33 bp, Homo sapien
agacaattcctagataccgagagaggtccaagc

SEQ ID NO: 45004 - DNA, 33 bp, Homo sapien
agacaattcctagatatcgagagaggtccaagc

SEQ ID NO: 45005 - DNA, 33 bp, Homo sapien
acagtcaaccacagtcggaaaatgttaaataga

SEQ ID NO: 45006 - DNA, 33 bp, Homo sapien
acagtcaaccacagtctgaaaatgttaaataga

SEQ ID NO: 45007 - DNA, 33 bp, Homo sapien
gtcaaaaccatcaaccagaacaatgtcttaaaa

SEQ ID NO: 45008 - DNA, 33 bp, Homo sapien
gtcaaaaccatcaaccggaacaatgtcttaaaa

SEQ ID NO: 45009 - DNA, 33 bp, Homo sapien
aggttagattcagaagcacctcctttaggaatt

SEQ ID NO: 45010 - DNA, 33 bp, Homo sapien
aggttagattcagaagtacctcctttaggaatt

SEQ ID NO: 45011 - DNA, 33 bp, Homo sapien
atttttgccagagacaacttgtggaatgttctg

SEQ ID NO: 45012 - DNA, 33 bp, Homo sapien
atttttgccagagacagcttgtggaatgttctg

SEQ ID NO: 45013 - DNA, 33 bp, Homo sapien
gaatttctaaagctacaacccacaagacttctc

SEQ ID NO: 45014 - DNA, 33 bp, Homo sapien
gaatttctaaagctacgacccacaagacttctc

SEQ ID NO: 45015 - DNA, 33 bp, Homo sapien
ggcatcaggcacacaacataagtgaagttacct

SEQ ID NO: 45016 - DNA, 33 bp, Homo sapien
ggcatcaggcacacaatataagtgaagttacct

SEQ ID NO: 45017 - DNA, 33 bp, Homo sapien
tattattttgatgaaccatttgagagtaagatg

SEQ ID NO: 45018 - DNA, 33 bp, Homo sapien
tattattttgatgaactatttgagagtaagatg

SEQ ID NO: 45019 - DNA, 33 bp, Homo sapien
gggcaaaatatttcaacagacactttaccaaaa

SEQ ID NO: 45020 - DNA, 33 bp, Homo sapien
gggcaaaatatttcaagagacactttaccaaaa

SEQ ID NO: 45021 - DNA, 33 bp, Homo sapien
aacatttcctgtaagacgaggaataaaacaagt

SEQ ID NO: 45022 - DNA, 33 bp, Homo sapien
aacatttcctgtaagatgaggaataaaacaagt

SEQ ID NO: 45023 - DNA, 33 bp, Homo sapien
taaaaggtggatctaccattgaaacaatttcaa

SEQ ID NO: 45024 - DNA, 33 bp, Homo sapien
taaaaggtggatctactattgaaacaatttcaa

SEQ ID NO: 45025 - DNA, 33 bp, Homo sapien
gccgggaccttcaacaatatcagagtcaggcta

SEQ ID NO: 45026 - DNA, 33 bp, Homo sapien
gccgggaccttcaacagtatcagagtcaggcta

SEQ ID NO: 45027 - DNA, 33 bp, Homo sapien
aatcttgatttctttacgatcatttaagtgtga

SEQ ID NO: 45028 - DNA, 33 bp, Homo sapien
aatcttgatttctttatgatcatttaagtgtga

SEQ ID NO: 45029 - DNA, 33 bp, Homo sapien
taagatttttgccaaaagttgaaaatatcttta

SEQ ID NO: 45030 - DNA, 33 bp, Homo sapien
taagatttttgccaaatgttgaaaatatcttta

SEQ ID NO: 45031 - DNA, 33 bp, Homo sapien
agggttaatgcaaaaaatgaaatattattgtga

SEQ ID NO: 45032 - DNA, 33 bp, Homo sapien
agggttaatgcaaaaagtgaaatattattgtga

SEQ ID NO: 45033 - DNA, 33 bp, Homo sapien
caactaatgggaaaacgagaggattgctgataa

SEQ ID NO: 45034 - DNA, 33 bp, Homo sapien
caactaatgggaaaactagaggattgctgataa

SEQ ID NO: 45035 - DNA, 33 bp, Homo sapien
tcttgctgtcttattccaactaaaaaattctgt

SEQ ID NO: 45036 - DNA, 33 bp, Homo sapien
tcttgctgtcttattctaactaaaaaattctgt

SEQ ID NO: 45037 - DNA, 33 bp, Homo sapien
tttgatcctcaaaacaatcgtgggaaataggca

SEQ ID NO: 45038 - DNA, 33 bp, Homo sapien
tttgatcctcaaaacagtcgtgggaaataggca

SEQ ID NO: 45039 - DNA, 33 bp, Homo sapien
tgccctctttcctgaacagatcgtcattgaact

SEQ ID NO: 45040 - DNA, 33 bp, Homo sapien
tgccctctttcctgaatagatcgtcattgaact

SEQ ID NO: 45041 - DNA, 33 bp, Homo sapien
tgccttacttgcctcaccatggtcccagccctg

SEQ ID NO: 45042 - DNA, 33 bp, Homo sapien
tgccttacttgcctcatcatggtcccagccctg

SEQ ID NO: 45043 - DNA, 33 bp, Homo sapien
atgcaatttggcctcaacctgctgatacagaac

SEQ ID NO: 45044 - DNA, 33 bp, Homo sapien
atgcaatttggcctcaccctgctgatacagaac

SEQ ID NO: 45045 - DNA, 33 bp, Homo sapien
aacagtgcctacttcacaggatttttaaataag

SEQ ID NO: 45046 - DNA, 33 bp, Homo sapien
aacagtgcctacttcataggatttttaaataag

SEQ ID NO: 45047 - DNA, 33 bp, Homo sapien
gttccaccattacctcaaagattacacatttaa

SEQ ID NO: 45048 - DNA, 33 bp, Homo sapien
gttccaccattacctccaagattacacatttaa

SEQ ID NO: 45049 - DNA, 33 bp, Homo sapien
ttaatgaggtaacgaactattgcctttatgttg

SEQ ID NO: 45050 - DNA, 33 bp, Homo sapien
ttaatgaggtaacgaattattgcctttatgttg

SEQ ID NO: 45051 - DNA, 33 bp, Homo sapien
gtcaggaccttgtggaaccgctcagagttaact

SEQ ID NO: 45052 - DNA, 33 bp, Homo sapien
gtcaggaccttgtggagccgctcagagttaact

SEQ ID NO: 45053 - DNA, 33 bp, Homo sapien
gccgggcactgattaccggcgtcttcttatgtg

SEQ ID NO: 45054 - DNA, 33 bp, Homo sapien
gccgggcactgattactggcgtcttcttatgtg

SEQ ID NO: 45055 - DNA, 33 bp, Homo sapien
gaaaaccttgaagagacagtcggagagggcgga

SEQ ID NO: 45056 - DNA, 33 bp, Homo sapien
gaaaaccttgaagagatagtcggagagggcgga

SEQ ID NO: 45057 - DNA, 33 bp, Homo sapien
gcctatcctcttctcacgtgccttttaattttt

SEQ ID NO: 45058 - DNA, 33 bp, Homo sapien
gcctatcctcttctcatgtgccttttaattttt

SEQ ID NO: 45059 - DNA, 33 bp, Homo sapien
tctctactgtaaaccaagatcaatgtggaatca

SEQ ID NO: 45060 - DNA, 33 bp, Homo sapien
tctctactgtaaaccaggatcaatgtggaatca

SEQ ID NO: 45061 - DNA, 33 bp, Homo sapien
ttgtccttatttacaaaaaatgattacagctat

SEQ ID NO: 45062 - DNA, 33 bp, Homo sapien
ttgtccttatttacaacaaatgattacagctat

SEQ ID NO: 45063 - DNA, 33 bp, Homo sapien
ccttgctaaggaaatgaaagtttttacaggatg

SEQ ID NO: 45064 - DNA, 33 bp, Homo sapien
ccttgctaaggaaatggaagtttttacaggatg

SEQ ID NO: 45065 - DNA, 33 bp, Homo sapien
cttttctgtaagactgaagttaaatgggttggg

SEQ ID NO: 45066 - DNA, 33 bp, Homo sapien
cttttctgtaagactggagttaaatgggttggg

SEQ ID NO: 45067 - DNA, 33 bp, Homo sapien
atctgacttttgagtaactaattctgtcgacag

SEQ ID NO: 45068 - DNA, 33 bp, Homo sapien
atctgacttttgagtagctaattctgtcgacag

SEQ ID NO: 45069 - DNA, 33 bp, Homo sapien
acgctgcctaaagacaaggtacaggcctgggat

SEQ ID NO: 45070 - DNA, 33 bp, Homo sapien
acgctgcctaaagacagggtacaggcctgggat

SEQ ID NO: 45071 - DNA, 33 bp, Homo sapien
ggcctctaaaggaataaggattggatttagatc

SEQ ID NO: 45072 - DNA, 33 bp, Homo sapien
ggcctctaaaggaatagggattggatttagatc

SEQ ID NO: 45073 - DNA, 33 bp, Homo sapien
ttgttttgaaagaacaaatttcagatgtctcag

SEQ ID NO: 45074 - DNA, 33 bp, Homo sapien
ttgttttgaaagaacagatttcagatgtctcag

SEQ ID NO: 45075 - DNA, 33 bp, Homo sapien
aatacaaggataataactagcttccactgagtg

SEQ ID NO: 45076 - DNA, 33 bp, Homo sapien
aatacaaggataataagtagcttccactgagtg

SEQ ID NO: 45077 - DNA, 33 bp, Homo sapien
ctctgctatctagtagccactaaggacacaaag

SEQ ID NO: 45078 - DNA, 33 bp, Homo sapien
ctctgctatctagtaggcactaaggacacaaag

SEQ ID NO: 45079 - DNA, 33 bp, Homo sapien
caagtatctacctctcactattactgagcagtc

SEQ ID NO: 45080 - DNA, 33 bp, Homo sapien
caagtatctacctctccctattactgagcagtc

SEQ ID NO: 45081 - DNA, 33 bp, Homo sapien
tactggtaacttagatcagctttaaaatgatca

SEQ ID NO: 45082 - DNA, 33 bp, Homo sapien
tactggtaacttagattagctttaaaatgatca

SEQ ID NO: 45083 - DNA, 33 bp, Homo sapien
gatgttgagagactaactgaaatagcatgtgaa

SEQ ID NO: 45084 - DNA, 33 bp, Homo sapien
gatgttgagagactaattgaaatagcatgtgaa

SEQ ID NO: 45085 - DNA, 33 bp, Homo sapien
attataccttataaaacgctatgtgccaccacc

SEQ ID NO: 45086 - DNA, 33 bp, Homo sapien
attataccttataaaatgctatgtgccaccacc

SEQ ID NO: 45087 - DNA, 33 bp, Homo sapien
tcctttccactttctcaaatctgtcacagctct

SEQ ID NO: 45088 - DNA, 33 bp, Homo sapien
tcctttccactttctcgaatctgtcacagctct

SEQ ID NO: 45089 - DNA, 33 bp, Homo sapien
tcctgaagaaaatccaagtctctcaatctcccc

SEQ ID NO: 45090 - DNA, 33 bp, Homo sapien
tcctgaagaaaatccaggtctctcaatctcccc

SEQ ID NO: 45091 - DNA, 33 bp, Homo sapien
ccctaaagctgtattaacaaagtctcaaaaagt

SEQ ID NO: 45092 - DNA, 33 bp, Homo sapien
ccctaaagctgtattagcaaagtctcaaaaagt

SEQ ID NO: 45093 - DNA, 33 bp, Homo sapien
ctttagttcccagtcacagatggggtggttgtt

SEQ ID NO: 45094 - DNA, 33 bp, Homo sapien
ctttagttcccagtcatagatggggtggttgtt

SEQ ID NO: 45095 - DNA, 33 bp, Homo sapien
aatggggaaaagtatgacaaggtgtggttatat

SEQ ID NO: 45096 - DNA, 33 bp, Homo sapien
aatggggaaaagtatgccaaggtgtggttatat

SEQ ID NO: 45097 - DNA, 33 bp, Homo sapien
caaatgtttgtccccaaatcttcatgtagtggt

SEQ ID NO: 45098 - DNA, 33 bp, Homo sapien
caaatgtttgtccccagatcttcatgtagtggt

SEQ ID NO: 45099 - DNA, 33 bp, Homo sapien
ttgatggaccacttgccattagttagtggccag

SEQ ID NO: 45100 - DNA, 33 bp, Homo sapien
ttgatggaccacttgctattagttagtggccag

SEQ ID NO: 45101 - DNA, 33 bp, Homo sapien
ggccataagaaagaatcaagtcgtgccatttgt

SEQ ID NO: 45102 - DNA, 33 bp, Homo sapien
ggccataagaaagaatgaagtcgtgccatttgt

SEQ ID NO: 45103 - DNA, 33 bp, Homo sapien
acatgaaagaccttaacgggagaagtgtccagc

SEQ ID NO: 45104 - DNA, 33 bp, Homo sapien
acatgaaagaccttaaggggagaagtgtccagc

SEQ ID NO: 45105 - DNA, 33 bp, Homo sapien
gtttccactgacagctaaaaggtagagtgtcaa

SEQ ID NO: 45106 - DNA, 33 bp, Homo sapien
gtttccactgacagctgaaaggtagagtgtcaa

SEQ ID NO: 45107 - DNA, 33 bp, Homo sapien
ggggcttcattgttaacagacctgccctgtaag

SEQ ID NO: 45108 - DNA, 33 bp, Homo sapien
ggggcttcattgttaatagacctgccctgtaag

SEQ ID NO: 45109 - DNA, 33 bp, Homo sapien
agtaatgtaccctacaaagcgaatcagaaacag

SEQ ID NO: 45110 - DNA, 33 bp, Homo sapien
agtaatgtaccctacacagcgaatcagaaacag

SEQ ID NO: 45111 - DNA, 33 bp, Homo sapien
ataagagctgttgctcagagaacaatagttgac

SEQ ID NO: 45112 - DNA, 33 bp, Homo sapien
ataagagctgttgctcggagaacaatagttgac

SEQ ID NO: 45113 - DNA, 33 bp, Homo sapien
agtgctgtttacaagaataatccattggagatc

SEQ ID NO: 45114 - DNA, 33 bp, Homo sapien
agtgctgtttacaagagtaatccattggagatc

SEQ ID NO: 45115 - DNA, 33 bp, Homo sapien
tattaattgctgtgacaggcaacaattaactct

SEQ ID NO: 45116 - DNA, 33 bp, Homo sapien
tattaattgctgtgacgggcaacaattaactct

SEQ ID NO: 45117 - DNA, 33 bp, Homo sapien
ctacaagttgaagcaacagattttcagctatta

SEQ ID NO: 45118 - DNA, 33 bp, Homo sapien
ctacaagttgaagcaatagattttcagctatta

SEQ ID NO: 45119 - DNA, 33 bp, Homo sapien
taggaagcagcaatataagcatattatttagga

SEQ ID NO: 45120 - DNA, 33 bp, Homo sapien
taggaagcagcaatatgagcatattatttagga

SEQ ID NO: 45121 - DNA, 33 bp, Homo sapien
caaggaaagtgtcagggatatcaaggctacagc

SEQ ID NO: 45122 - DNA, 33 bp, Homo sapien
caaggaaagtgtcaggtatatcaaggctacagc

SEQ ID NO: 45123 - DNA, 33 bp, Homo sapien
ctgcaggtgagcattaagcttgcaactcactgg

SEQ ID NO: 45124 - DNA, 33 bp, Homo sapien
ctgcaggtgagcattaggcttgcaactcactgg

SEQ ID NO: 45125 - DNA, 33 bp, Homo sapien
gtgacattcacttggaagaagtggtaatacaaa

SEQ ID NO: 45126 - DNA, 33 bp, Homo sapien
gtgacattcacttggatgaagtggtaatacaaa

SEQ ID NO: 45127 - DNA, 33 bp, Homo sapien
caaaccagtgcaacaactgtacatgttttgttt

SEQ ID NO: 45128 - DNA, 33 bp, Homo sapien
caaaccagtgcaacaattgtacatgttttgttt

SEQ ID NO: 45129 - DNA, 33 bp, Homo sapien; identical to SEQ ID NO: 45127

SEQ ID NO: 45130 - DNA, 33 bp, Homo sapien; identical to SEQ ID NO: 45128

SEQ ID NO: 45131 - DNA, 33 bp, Homo sapien
gtgagtaggttatctgcaaactctacgtcattt

SEQ ID NO: 45132 - DNA, 33 bp, Homo sapien
gtgagtaggttatctgtaaactctacgtcattt

SEQ ID NO: 45133 - DNA, 33 bp, Homo sapien
tgtaactgcttgtcagaatgcaaagagcactgt

SEQ ID NO: 45134 - DNA, 33 bp, Homo sapien
tgtaactgcttgtcaggatgcaaagagcactgt

SEQ ID NO: 45135 - DNA, 33 bp, Homo sapien
ctatatggtgaatataacagattaaatatgaca

SEQ ID NO: 45136 - DNA, 33 bp, Homo sapien
ctatatggtgaatatagcagattaaatatgaca

SEQ ID NO: 45137 - DNA, 33 bp, Homo sapien
cttctttttgtttcccgcgatgcttcttctcat

SEQ ID NO: 45138 - DNA, 33 bp, Homo sapien
cttctttttgtttccctcgatgcttcttctcat

SEQ ID NO: 45139 - DNA, 33 bp, Homo sapien
aaaaggtcaaagacggaaagaggagaacagtta

SEQ ID NO: 45140 - DNA, 33 bp, Homo sapien
aaaaggtcaaagacgggaagaggagaacagtta

SEQ ID NO: 45141 - DNA, 33 bp, Homo sapien
tttggatctctgatagcaatgccagaagtgcca

SEQ ID NO: 45142 - DNA, 33 bp, Homo sapien
tttggatctctgataggaatgccagaagtgcca

SEQ ID NO: 45143 - DNA, 33 bp, Homo sapien
gcctctctcaatacacgagcttatgtcaacctg

SEQ ID NO: 45144 - DNA, 33 bp, Homo sapien
gcctctctcaatacactagcttatgtcaacctg

SEQ ID NO: 45145 - DNA, 33 bp, Homo sapien
ttacatcaaccttcataagtagtattggtttgt

SEQ ID NO: 45146 - DNA, 33 bp, Homo sapien
ttacatcaaccttcatgagtagtattggtttgt

SEQ ID NO: 45147 - DNA, 33 bp, Homo sapien
attaaattaatttttgaagcctcttgactgatg

SEQ ID NO: 45148 - DNA, 33 bp, Homo sapien
attaaattaatttttggagcctcttgactgatg

SEQ ID NO: 45149 - DNA, 33 bp, Homo sapien
cttgtagttcagtaaaagaacgacagcagtaaa

SEQ ID NO: 45150 - DNA, 33 bp, Homo sapien
cttgtagttcagtaaaggaacgacagcagtaaa

SEQ ID NO: 45151 - DNA, 33 bp, Homo sapien
agttttcttttcttcacgtcattgggccattgc

SEQ ID NO: 45152 - DNA, 33 bp, Homo sapien
agttttcttttcttcatgtcattgggccattgc

SEQ ID NO: 45153 - DNA, 33 bp, Homo sapien
aggcattttaccgaaactgggatgtgaatgggg

SEQ ID NO: 45154 - DNA, 33 bp, Homo sapien
aggcattttaccgaaagtgggatgtgaatgggg

SEQ ID NO: 45155 - DNA, 33 bp, Homo sapien; identical to SEQ ID NO: 45153

SEQ ID NO: 45156 - DNA, 33 bp, Homo sapien; identical to SEQ ID NO: 45154

SEQ ID NO: 45157 - DNA, 33 bp, Homo sapien
tactctatgattcaagaacttatgagcaggagc

SEQ ID NO: 45158 - DNA, 33 bp, Homo sapien
tactctatgattcaaggacttatgagcaggagc

SEQ ID NO: 45159 - DNA, 33 bp, Homo sapien
ggcagcatcagcacaaagataattaccaaaaag

SEQ ID NO: 45160 - DNA, 33 bp, Homo sapien
ggcagcatcagcacaaggataattaccaaaaag

SEQ ID NO: 45161 - DNA, 33 bp, Homo sapien
ttacatacctattcacaatgtgttttccgtttt

SEQ ID NO: 45162 - DNA, 33 bp, Homo sapien
ttacatacctattcacgatgtgttttccgtttt

SEQ ID NO: 45163 - DNA, 33 bp, Homo sapien
ttgtggtatgggcaaaagtctaaggcagcactg

SEQ ID NO: 45164 - DNA, 33 bp, Homo sapien
ttgtggtatgggcaaaggtctaaggcagcactg

SEQ ID NO: 45165 - DNA, 33 bp, Homo sapien
ttggaggaagaagcaaagataaagatctgattt

SEQ ID NO: 45166 - DNA, 33 bp, Homo sapien
ttggaggaagaagcaatgataaagatctgattt

SEQ ID NO: 45167 - DNA, 33 bp, Homo sapien
tgtctgaactcaacatcaaggttctttggtctt

SEQ ID NO: 45168 - DNA, 33 bp, Homo sapien
tgtctgaactcaacatgaaggttctttggtctt

SEQ ID NO: 45169 - DNA, 33 bp, Homo sapien; identical to SEQ ID NO: 45167

SEQ ID NO: 45170 - DNA, 33 bp, Homo sapien; identical to SEQ ID NO: 45168

SEQ ID NO: 45171 - DNA, 33 bp, Homo sapien
gaaattcctcttgtacactgtctgccacagaac

SEQ ID NO: 45172 - DNA, 33 bp, Homo sapien
gaaattcctcttgtacgctgtctgccacagaac

SEQ ID NO: 45173 - DNA, 33 bp, Homo sapien
aaggtgacataactaacgaaaaaagcacaattc

SEQ ID NO: 45174 - DNA, 33 bp, Homo sapien
aaggtgacataactaatgaaaaaagcacaattc

SEQ ID NO: 45175 - DNA, 33 bp, Homo sapien
tattagacacaagggcccagtaccgaaggaaag

SEQ ID NO: 45176 - DNA, 33 bp, Homo sapien
tattagacacaagggctcagtaccgaaggaaag

SEQ ID NO: 45177 - DNA, 33 bp, Homo sapien
acaaagctgcaaagcaatcttggttacttttca

SEQ ID NO: 45178 - DNA, 33 bp, Homo sapien
acaaagctgcaaagcactcttggttacttttca

SEQ ID NO: 45179 - DNA, 33 bp, Homo sapien
atataaaaataagtaaaaggcttcaggctttga

SEQ ID NO: 45180 - DNA, 33 bp, Homo sapien
atataaaaataagtaataggcttcaggctttga

SEQ ID NO: 45181 - DNA, 33 bp, Homo sapien
agaagttgactgaatgacaaaaatactacacac

SEQ ID NO: 45182 - DNA, 33 bp, Homo sapien
agaagttgactgaatggcaaaaatactacacac

SEQ ID NO: 45183 - DNA, 33 bp, Homo sapien
gagcacccggggcatactaagtgttagcagcta

SEQ ID NO: 45184 - DNA, 33 bp, Homo sapien
gagcacccggggcatagtaagtgttagcagcta

SEQ ID NO: 45185 - DNA, 33 bp, Homo sapien
tagtagttgtaaaggccgagtcaagagaaagtc

SEQ ID NO: 45186 - DNA, 33 bp, Homo sapien
tagtagttgtaaaggctgagtcaagagaaagtc

SEQ ID NO: 45187 - DNA, 33 bp, Homo sapien
tatcattttatgcttacccctataaagttacac

SEQ ID NO: 45188 - DNA, 33 bp, Homo sapien
tatcattttatgcttatccctataaagttacac

SEQ ID NO: 45189 - DNA, 33 bp, Homo sapien
gttacttagctttagacatctgtttcctcctct

SEQ ID NO: 45190 - DNA, 33 bp, Homo sapien
gttacttagctttagatatctgtttcctcctct

SEQ ID NO: 45191 - DNA, 33 bp, Homo sapien
aaaagcaatcttgaaacgcaaggaggaacattt

SEQ ID NO: 45192 - DNA, 33 bp, Homo sapien
aaaagcaatcttgaaatgcaaggaggaacattt

SEQ ID NO: 45193 - DNA, 33 bp, Homo sapien
cacataagatttgtaaagtcagagtttgaggaa

SEQ ID NO: 45194 - DNA, 33 bp, Homo sapien
cacataagatttgtaaggtcagagtttgaggaa

SEQ ID NO: 45195 - DNA, 33 bp, Homo sapien
aggcgcgttttagtagacatgaggtttcgccat

SEQ ID NO: 45196 - DNA, 33 bp, Homo sapien
aggcgcgttttagtaggcatgaggtttcgccat

SEQ ID NO: 45197 - DNA, 33 bp, Homo sapien
atgccttggttgaaacgctaaccttcctccacc

SEQ ID NO: 45198 - DNA, 33 bp, Homo sapien
atgccttggttgaaactctaaccttcctccacc

SEQ ID NO: 45199 - DNA, 33 bp, Homo sapien
ggttgttgagttcttccagtggggtgttgcaaa

SEQ ID NO: 45200 - DNA, 33 bp, Homo sapien
ggttgttgagttcttcgagtggggtgttgcaaa

SEQ ID NO: 45201 - DNA, 33 bp, Homo sapien
agtggggtgttgcaaagtagaaactgagggaga

SEQ ID NO: 45202 - DNA, 33 bp, Homo sapien
agtggggtgttgcaaattagaaactgagggaga

SEQ ID NO: 45203 - DNA, 33 bp, Homo sapien
tgctgtttctactgaaagtcttcttctctggct

SEQ ID NO: 45204 - DNA, 33 bp, Homo sapien
tgctgtttctactgaaggtcttcttctctggct

SEQ ID NO: 45205 - DNA, 33 bp, Homo sapien
tgtcctgttggcagaacctaaggggagtctagg

SEQ ID NO: 45206 - DNA, 33 bp, Homo sapien
tgtcctgttggcagaatctaaggggagtctagg

SEQ ID NO: 45207 - DNA, 33 bp, Homo sapien; identical to SEQ ID NO: 45205

SEQ ID NO: 45208 - DNA, 33 bp, Homo sapien; identical to SEQ ID NO: 45206

SEQ ID NO: 45209 - DNA, 33 bp, Homo sapien
actgaaaaaaataacaaaagaccaacaagaatc

SEQ ID NO: 45210 - DNA, 33 bp, Homo sapien
actgaaaaaaataacagaagaccaacaagaatc

SEQ ID NO: 45211 - DNA, 33 bp, Homo sapien
agcacacagtccaggaagggagatagagagata

SEQ ID NO: 45212 - DNA, 33 bp, Homo sapien
agcacacagtccaggaggggagatagagagata

SEQ ID NO: 45213 - DNA, 33 bp, Homo sapien
agcacctcacagccatcagggtggttattatca

SEQ ID NO: 45214 - DNA, 33 bp, Homo sapien
agcacctcacagccattagggtggttattatca

SEQ ID NO: 45215 - DNA, 33 bp, Homo sapien
tgttattattaatctccatcctgcagcctagaa

SEQ ID NO: 45216 - DNA, 33 bp, Homo sapien
tgttattattaatctctatcctgcagcctagaa

SEQ ID NO: 45217 - DNA, 33 bp, Homo sapien
gaatatgttgtaatgaaagtagtgactgaaact

SEQ ID NO: 45218 - DNA, 33 bp, Homo sapien
gaatatgttgtaatgagagtagtgactgaaact

SEQ ID NO: 45219 - DNA, 33 bp, Homo sapien
ctggcctaactgatgaagaaagcacagtggttc

SEQ ID NO: 45220 - DNA, 33 bp, Homo sapien
ctggcctaactgatgaggaaagcacagtggttc

SEQ ID NO: 45221 - DNA, 33 bp, Homo sapien
cacacatgaaagaaacaaccggggctctacaga

SEQ ID NO: 45222 - DNA, 33 bp, Homo sapien
cacacatgaaagaaaccaccggggctctacaga

SEQ ID NO: 45223 - DNA, 33 bp, Homo sapien
ggaatgaagtctgttacataaaattctccaggt

SEQ ID NO: 45224 - DNA, 33 bp, Homo sapien
ggaatgaagtctgttatataaaattctccaggt

SEQ ID NO: 45225 - DNA, 33 bp, Homo sapien
atcaagtgaaaaaggacgatcgagaggcaacat

SEQ ID NO: 45226 - DNA, 33 bp, Homo sapien
atcaagtgaaaaaggatgatcgagaggcaacat

SEQ ID NO: 45227 - DNA, 33 bp, Homo sapien; identical to SEQ ID NO: 45225

SEQ ID NO: 45228 - DNA, 33 bp, Homo sapien; identical to SEQ ID NO: 45226

SEQ ID NO: 45229 - DNA, 33 bp, Homo sapien
gggacaaactcatagtcacctttgtccaggagg

SEQ ID NO: 45230 - DNA, 33 bp, Homo sapien
gggacaaactcatagttacctttgtccaggagg

SEQ ID NO: 45231 - DNA, 33 bp, Homo sapien; identical to SEQ ID NO: 45229

SEQ ID NO: 45232 - DNA, 33 bp, Homo sapien; identical to SEQ ID NO: 45230

SEQ ID NO: 45233 - DNA, 33 bp, Homo sapien
gtcacatctgcacacacagagacagttgagcct

SEQ ID NO: 45234 - DNA, 33 bp, Homo sapien
gtcacatctgcacacatagagacagttgagcct

SEQ ID NO: 45235 - DNA, 33 bp, Homo sapien
gtcctagaagccttcccagctgtacagaaaatc

SEQ ID NO: 45236 - DNA, 33 bp, Homo sapien
gtcctagaagccttcctagctgtacagaaaatc

SEQ ID NO: 45237 - DNA, 33 bp, Homo sapien
agtgggcatatgaataccgatcaggaaaaatat

SEQ ID NO: 45238 - DNA, 33 bp, Homo sapien
agtgggcatatgaatagcgatcaggaaaaatat

SEQ ID NO: 45239 - DNA, 33 bp, Homo sapien
agggttgagtaacttacaactgaaaatgatctc

SEQ ID NO: 45240 - DNA, 33 bp, Homo sapien
agggttgagtaacttagaactgaaaatgatctc

SEQ ID NO: 45241 - DNA, 33 bp, Homo sapien
actaatcaatatacaaggataaatgagtagtac

SEQ ID NO: 45242 - DNA, 33 bp, Homo sapien
actaatcaatatacaatgataaatgagtagtac

SEQ ID NO: 45243 - DNA, 33 bp, Homo sapien; identical to SEQ ID NO: 45241

SEQ ID NO: 45244 - DNA, 33 bp, Homo sapien; identical to SEQ ID NO: 45242

SEQ ID NO: 45245 - DNA, 33 bp, Homo sapien
atatgagaagaaggtaaatggaagcctcctagc

SEQ ID NO: 45246 - DNA, 33 bp, Homo sapien
atatgagaagaaggtagatggaagcctcctagc

SEQ ID NO: 45247 - DNA, 33 bp, Homo sapien
tttgtggatcatgtgacgaaataacaaagcata

SEQ ID NO: 45248 - DNA, 33 bp, Homo sapien
tttgtggatcatgtgatgaaataacaaagcata

SEQ ID NO: 45249 - DNA, 33 bp, Homo sapien
ttagaggaaatttgcaatgaatatttagtcaca

SEQ ID NO: 45250 - DNA, 33 bp, Homo sapien
ttagaggaaatttgcagtgaatatttagtcaca

SEQ ID NO: 45251 - DNA, 33 bp, Homo sapien
cccataagcatgagtcaagcctagtaaatgttt

SEQ ID NO: 45252 - DNA, 33 bp, Homo sapien
cccataagcatgagtcgagcctagtaaatgttt

SEQ ID NO: 45253 - DNA, 33 bp, Homo sapien
ctagtaaatgtttttcaaagagcgcagtatgga

SEQ ID NO: 45254 - DNA, 33 bp, Homo sapien
ctagtaaatgtttttccaagagcgcagtatgga

SEQ ID NO: 45255 - DNA, 33 bp, Homo sapien
gctgactcttagaaccataataatgcttcgcca

SEQ ID NO: 45256 - DNA, 33 bp, Homo sapien
gctgactcttagaaccgtaataatgcttcgcca

SEQ ID NO: 45257 - DNA, 33 bp, Homo sapien
ttgaggaaatgaattacagacgaggacatatca

SEQ ID NO: 45258 - DNA, 33 bp, Homo sapien
ttgaggaaatgaattatagacgaggacatatca

SEQ ID NO: 45259 - DNA, 33 bp, Homo sapien
aacatactgattcagaccaatgactcagaacag

SEQ ID NO: 45260 - DNA, 33 bp, Homo sapien
aacatactgattcagatcaatgactcagaacag

SEQ ID NO: 45261 - DNA, 33 bp, Homo sapien
gtgtctcccacaatcaagaaatatacctcctcc

SEQ ID NO: 45262 - DNA, 33 bp, Homo sapien
gtgtctcccacaatcaggaaatatacctcctcc

SEQ ID NO: 45263 - DNA, 33 bp, Homo sapien
aaaggctcaagagctaagtttaggccactgttt

SEQ ID NO: 45264 - DNA, 33 bp, Homo sapien
aaaggctcaagagctaggtttaggccactgttt

SEQ ID NO: 45265 - DNA, 33 bp, Homo sapien
ttaccatattgtttacacattacagaggtacga

SEQ ID NO: 45266 - DNA, 33 bp, Homo sapien
ttaccatattgtttactcattacagaggtacga

SEQ ID NO: 45267 - DNA, 33 bp, Homo sapien
attccaggagagctccagcaaataccagaacaa

SEQ ID NO: 45268 - DNA, 33 bp, Homo sapien
attccaggagagctccggcaaataccagaacaa

SEQ ID NO: 45269 - DNA, 33 bp, Homo sapien
tcgtccatatgctgtacgagtggtttgggcaag

SEQ ID NO: 45270 - DNA, 33 bp, Homo sapien
tcgtccatatgctgtatgagtggtttgggcaag

SEQ ID NO: 45271 - DNA, 33 bp, Homo sapien
ggtggtatagataccaccaagtttctccactat

SEQ ID NO: 45272 - DNA, 33 bp, Homo sapien
ggtggtatagataccatcaagtttctccactat

SEQ ID NO: 45273 - DNA, 33 bp, Homo sapien
ttcttaaaaagaaagcccatgtcaaagagagaa

SEQ ID NO: 45274 - DNA, 33 bp, Homo sapien
ttcttaaaaagaaagctcatgtcaaagagagaa

SEQ ID NO: 45275 - DNA, 33 bp, Homo sapien
atatggccagtccccaaaaattctacctattct

SEQ ID NO: 45276 - DNA, 33 bp, Homo sapien
atatggccagtccccagaaattctacctattct

SEQ ID NO: 45277 - DNA, 33 bp, Homo sapien
atttattgcacatccaatacacaccaggtcctg

SEQ ID NO: 45278 - DNA, 33 bp, Homo sapien
atttattgcacatccagtacacaccaggtcctg

SEQ ID NO: 45279 - DNA, 33 bp, Homo sapien
ggcaaaaactgacaaacgctatttcaagccagg

SEQ ID NO: 45280 - DNA, 33 bp, Homo sapien
ggcaaaaactgacaaatgctatttcaagccagg

SEQ ID NO: 45281 - DNA, 33 bp, Homo sapien
caacaacatccttcaaatccttcgaaacacctg

SEQ ID NO: 45282 - DNA, 33 bp, Homo sapien
caacaacatccttcaagtccttcgaaacacctg

SEQ ID NO: 45283 - DNA, 33 bp, Homo sapien
cagaaacttgataatcagacaagatgatggatg

SEQ ID NO: 45284 - DNA, 33 bp, Homo sapien
cagaaacttgataatccgacaagatgatggatg

SEQ ID NO: 45285 - DNA, 33 bp, Homo sapien
cagatctgaataaggacgattgtcacataaaat

SEQ ID NO: 45286 - DNA, 33 bp, Homo sapien
cagatctgaataaggatgattgtcacataaaat

SEQ ID NO: 45287 - DNA, 33 bp, Homo sapien
ggataattttgaatgcactagaagaaatgccta

SEQ ID NO: 45288 - DNA, 33 bp, Homo sapien
ggataattttgaatgcgctagaagaaatgccta

SEQ ID NO: 45289 - DNA, 33 bp, Homo sapien
aaaacttgtgcaaaagcaccaatggccacagag

SEQ ID NO: 45290 - DNA, 33 bp, Homo sapien
aaaacttgtgcaaaagtaccaatggccacagag

SEQ ID NO: 45291 - DNA, 33 bp, Homo sapien
ctttgagcttaggttacaattaggtccgtgccc

SEQ ID NO: 45292 - DNA, 33 bp, Homo sapien
ctttgagcttaggttagaattaggtccgtgccc

SEQ ID NO: 45293 - DNA, 33 bp, Homo sapien
ctgttgccaaaggacacatcctttctgtggagg

SEQ ID NO: 45294 - DNA, 33 bp, Homo sapien
ctgttgccaaaggacatatcctttctgtggagg

SEQ ID NO: 45295 - DNA, 33 bp, Homo sapien
ttgatagctacactcacctcccttctacctcac

SEQ ID NO: 45296 - DNA, 33 bp, Homo sapien
ttgatagctacactcatctcccttctacctcac

SEQ ID NO: 45297 - DNA, 33 bp, Homo sapien
cactttgaaaatgatacgtgagtaaaatcatac

SEQ ID NO: 45298 - DNA, 33 bp, Homo sapien
cactttgaaaatgataggtgagtaaaatcatac

SEQ ID NO: 45299 - DNA, 33 bp, Homo sapien
gctctttgttaagttgcatcagtaatgcctcat

SEQ ID NO: 45300 - DNA, 33 bp, Homo sapien
gctctttgttaagttgtatcagtaatgcctcat

SEQ ID NO: 45301 - DNA, 33 bp, Homo sapien
aggcagtatagaggccagatcccaagttgactt

SEQ ID NO: 45302 - DNA, 33 bp, Homo sapien
aggcagtatagaggccggatcccaagttgactt

SEQ ID NO: 45303 - DNA, 33 bp, Homo sapien
tgtgttactatgcgacaagtactgctcaccgcc

SEQ ID NO: 45304 - DNA, 33 bp, Homo sapien
tgtgttactatgcgacgagtactgctcaccgcc

SEQ ID NO: 45305 - DNA, 33 bp, Homo sapien
agccccttctattacaaatgccaccaaattacc

SEQ ID NO: 45306 - DNA, 33 bp, Homo sapien
agccccttctattacagatgccaccaaattacc

SEQ ID NO: 45307 - DNA, 33 bp, Homo sapien
tgattatcttcaaaggaacaatttctcttaaaa

SEQ ID NO: 45308 - DNA, 33 bp, Homo sapien
tgattatcttcaaagggacaatttctcttaaaa

SEQ ID NO: 45309 - DNA, 33 bp, Homo sapien
tcaacaggagactgaaaactactgagaactcaa

SEQ ID NO: 45310 - DNA, 33 bp, Homo sapien
tcaacaggagactgaagactactgagaactcaa

SEQ ID NO: 45311 - DNA, 33 bp, Homo sapien
cttatggcagatatacaagaaccaatgaaatac

SEQ ID NO: 45312 - DNA, 33 bp, Homo sapien
cttatggcagatatacgagaaccaatgaaatac

SEQ ID NO: 45313 - DNA, 33 bp, Homo sapien
tggcctttgcagatacagtaaccatgtaagaaa

SEQ ID NO: 45314 - DNA, 33 bp, Homo sapien
tggcctttgcagatacggtaaccatgtaagaaa

SEQ ID NO: 45315 - DNA, 33 bp, Homo sapien
tggcagctggtaccaaaaatagtaggaagccaa

SEQ ID NO: 45316 - DNA, 33 bp, Homo sapien
tggcagctggtaccaagaatagtaggaagccaa

SEQ ID NO: 45317 - DNA, 33 bp, Homo sapien
atagaggtaaagttcccagtgtagccttccctt

SEQ ID NO: 45318 - DNA, 33 bp, Homo sapien
atagaggtaaagttcctagtgtagccttccctt

SEQ ID NO: 45319 - DNA, 33 bp, Homo sapien
tttttgaagaataatagtaacttcctgcatttt

SEQ ID NO: 45320 - DNA, 33 bp, Homo sapien
tttttgaagaataatattaacttcctgcatttt

SEQ ID NO: 45321 - DNA, 33 bp, Homo sapien
taggagtcagaaaatactacacacttcaactta

SEQ ID NO: 45322 - DNA, 33 bp, Homo sapien
taggagtcagaaaatattacacacttcaactta

SEQ ID NO: 45323 - DNA, 33 bp, Homo sapien
cttctctcaattcccccctttgcagtactctgt

SEQ ID NO: 45324 - DNA, 33 bp, Homo sapien
cttctctcaattccccgctttgcagtactctgt

SEQ ID NO: 45325 - DNA, 33 bp, Homo sapien
tgtacctcaaaataccacacaaggttccctaat

SEQ ID NO: 45326 - DNA, 33 bp, Homo sapien
tgtacctcaaaataccgcacaaggttccctaat

SEQ ID NO: 45327 - DNA, 33 bp, Homo sapien
actgcatgagtaagaaagcatgactcagaactc

SEQ ID NO: 45328 - DNA, 33 bp, Homo sapien
actgcatgagtaagaaggcatgactcagaactc

SEQ ID NO: 45329 - DNA, 33 bp, Homo sapien
cactgctttaaataacgagatgtcatgtgaact

SEQ ID NO: 45330 - DNA, 33 bp, Homo sapien
cactgctttaaataactagatgtcatgtgaact

SEQ ID NO: 45331 - DNA, 33 bp, Homo sapien
caaatgtgtgtgaataataaaaagattctgagc

SEQ ID NO: 45332 - DNA, 33 bp, Homo sapien
caaatgtgtgtgaatagtaaaaagattctgagc

SEQ ID NO: 45333 - DNA, 33 bp, Homo sapien
atctatttaaactaacaagcttctgaacagcaa

SEQ ID NO: 45334 - DNA, 33 bp, Homo sapien
atctatttaaactaacgagcttctgaacagcaa

SEQ ID NO: 45335 - DNA, 33 bp, Homo sapien
acagaccacataattacaattaaaacactccct

SEQ ID NO: 45336 - DNA, 33 bp, Homo sapien
acagaccacataattagaattaaaacactccct

SEQ ID NO: 45337 - DNA, 33 bp, Homo sapien
taaaaatctcaaattgacaacctaacttcatca

SEQ ID NO: 45338 - DNA, 33 bp, Homo sapien
taaaaatctcaaattggcaacctaacttcatca

SEQ ID NO: 45339 - DNA, 33 bp, Homo sapien
cagcatttgttataatcaggcctttaaaaacaa

SEQ ID NO: 45340 - DNA, 33 bp, Homo sapien
cagcatttgttataatgaggcctttaaaaacaa

SEQ ID NO: 45341 - DNA, 33 bp, Homo sapien
actgctatcctctgagaagaactggacttcaat

SEQ ID NO: 45342 - DNA, 33 bp, Homo sapien
actgctatcctctgaggagaactggacttcaat

SEQ ID NO: 45343 - DNA, 33 bp, Homo sapien
atattgacagtgactacaggtgaaaatggtggc

SEQ ID NO: 45344 - DNA, 33 bp, Homo sapien
atattgacagtgactataggtgaaaatggtggc

SEQ ID NO: 45345 - DNA, 33 bp, Homo sapien
ctaaatatatttcctaaaagcagtttctcatct

SEQ ID NO: 45346 - DNA, 33 bp, Homo sapien
ctaaatatatttcctacaagcagtttctcatct

SEQ ID NO: 45347 - DNA, 33 bp, Homo sapien
catactgcaggaaacaatgggttaagctatatg

SEQ ID NO: 45348 - DNA, 33 bp, Homo sapien
catactgcaggaaacagtgggttaagctatatg

SEQ ID NO: 45349 - DNA, 33 bp, Homo sapien
attctattaatgagaaagtgtgaagtaggagac

SEQ ID NO: 45350 - DNA, 33 bp, Homo sapien
attctattaatgagaacgtgtgaagtaggagac

SEQ ID NO: 45351 - DNA, 33 bp, Homo sapien
gccacagaattaggaccatgggagtagcttgaa

SEQ ID NO: 45352 - DNA, 33 bp, Homo sapien
gccacagaattaggactatgggagtagcttgaa

SEQ ID NO: 45353 - DNA, 33 bp, Homo sapien
aaagaattcaaagtagaaaatcaaatggtggtc

SEQ ID NO: 45354 - DNA, 33 bp, Homo sapien
aaagaattcaaagtagtaaatcaaatggtggtc

SEQ ID NO: 45355 - DNA, 33 bp, Homo sapien
cagggggcagccctaactaggaaccgcttggag

SEQ ID NO: 45356 - DNA, 33 bp, Homo sapien
cagggggcagccctaagtaggaaccgcttggag

SEQ ID NO: 45357 - DNA, 33 bp, Homo sapien
aatctatgtcatgttcaaggcagagacagatgt

SEQ ID NO: 45358 - DNA, 33 bp, Homo sapien
aatctatgtcatgttcgaggcagagacagatgt

SEQ ID NO: 45359 - DNA, 33 bp, Homo sapien
aatagcccaagtataacggtagctgctgtttat

SEQ ID NO: 45360 - DNA, 33 bp, Homo sapien
aatagcccaagtataatggtagctgctgtttat

SEQ ID NO: 45361 - DNA, 33 bp, Homo sapien
gggctattgttatcatcaatcccagggcttttg

SEQ ID NO: 45362 - DNA, 33 bp, Homo sapien
gggctattgttatcatgaatcccagggcttttg

SEQ ID NO: 45363 - DNA, 33 bp, Homo sapien
aacaatggattgaatcgcagggctgaaaaaaaa

SEQ ID NO: 45364 - DNA, 33 bp, Homo sapien
aacaatggattgaatctcagggctgaaaaaaaa

SEQ ID NO: 45365 - DNA, 33 bp, Homo sapien
actcaacattacttaaatctccactatcttcta

SEQ ID NO: 45366 - DNA, 33 bp, Homo sapien
actcaacattacttaagtctccactatcttcta

SEQ ID NO: 45367 - DNA, 33 bp, Homo sapien
gcgccatcacaaagtcaaaaaattctgaatcaa

SEQ ID NO: 45368 - DNA, 33 bp, Homo sapien
gcgccatcacaaagtcgaaaaattctgaatcaa

SEQ ID NO: 45369 - DNA, 33 bp, Homo sapien
atacttcctggctttgaaacttacaataacgat

SEQ ID NO: 45370 - DNA, 33 bp, Homo sapien
atacttcctggctttgcaacttacaataacgat

SEQ ID NO: 45371 - DNA, 33 bp, Homo sapien
tgctacatgtctaccaccatcctggtcatgctg

SEQ ID NO: 45372 - DNA, 33 bp, Homo sapien
tgctacatgtctaccatcatcctggtcatgctg

SEQ ID NO: 45373 - DNA, 33 bp, Homo sapien
cagtgctggctcatgacgcaaggaaaaagatct

SEQ ID NO: 45374 - DNA, 33 bp, Homo sapien
cagtgctggctcatgatgcaaggaaaaagatct

SEQ ID NO: 45375 - DNA, 33 bp, Homo sapien
tgttgattaagatttgcaagtaaggaaactgat

SEQ ID NO: 45376 - DNA, 33 bp, Homo sapien
tgttgattaagatttgtaagtaaggaaactgat

SEQ ID NO: 45377 - DNA, 33 bp, Homo sapien
cagtgccttactttgaagtggccttgactggct

SEQ ID NO: 45378 - DNA, 33 bp, Homo sapien
cagtgccttactttgaggtggccttgactggct

SEQ ID NO: 45379 - DNA, 33 bp, Homo sapien
atcacatattttccagaaagctgtccagtgctg

SEQ ID NO: 45380 - DNA, 33 bp, Homo sapien
atcacatattttccaggaagctgtccagtgctg

SEQ ID NO: 45381 - DNA, 33 bp, Homo sapien
aataaatgtttgatgaatatagaagcacggtaa

SEQ ID NO: 45382 - DNA, 33 bp, Homo sapien
aataaatgtttgatgagtatagaagcacggtaa

SEQ ID NO: 45383 - DNA, 33 bp, Homo sapien
gtaacaggtattataaagagacccaaaggggag

SEQ ID NO: 45384 - DNA, 33 bp, Homo sapien
gtaacaggtattataaggagacccaaaggggag

SEQ ID NO: 45385 - DNA, 33 bp, Homo sapien
gggggataagatgggagaagtagtaatgtgaat

SEQ ID NO: 45386 - DNA, 33 bp, Homo sapien
gggggataagatgggataagtagtaatgtgaat

SEQ ID NO: 45387 - DNA, 33 bp, Homo sapien
acactacttattataaacgccttgaaatgtgac

SEQ ID NO: 45388 - DNA, 33 bp, Homo sapien
acactacttattataagcgccttgaaatgtgac

SEQ ID NO: 45389 - DNA, 33 bp, Homo sapien
ggttctcttggctctacgtccctcttgggtggg

SEQ ID NO: 45390 - DNA, 33 bp, Homo sapien
ggttctcttggctctatgtccctcttgggtggg

SEQ ID NO: 45391 - DNA, 33 bp, Homo sapien
tatagtctagatacaaatccattaccatatata

SEQ ID NO: 45392 - DNA, 33 bp, Homo sapien
tatagtctagatacaagtccattaccatatata

SEQ ID NO: 45393 - DNA, 33 bp, Homo sapien
atgttgtagcgagattcaacttttgtagcccag

SEQ ID NO: 45394 - DNA, 33 bp, Homo sapien
atgttgtagcgagatttaacttttgtagcccag

SEQ ID NO: 45395 - DNA, 33 bp, Homo sapien
tcttttcttgtattccagaggcaattgctgtta

SEQ ID NO: 45396 - DNA, 33 bp, Homo sapien
tcttttcttgtattccggaggcaattgctgtta

SEQ ID NO: 45397 - DNA, 33 bp, Homo sapien
caggaagctggggggacgccagaaggcacagca

SEQ ID NO: 45398 - DNA, 33 bp, Homo sapien
caggaagctggggggatgccagaaggcacagca

SEQ ID NO: 45399 - DNA, 33 bp, Homo sapien
ggtgcccatgtgtatacgtaaggactgatatct

SEQ ID NO: 45400 - DNA, 33 bp, Homo sapien
ggtgcccatgtgtatatgtaaggactgatatct

SEQ ID NO: 45401 - DNA, 33 bp, Homo sapien
agccttcacaaggaacacagccctaatgatatc

SEQ ID NO: 45402 - DNA, 33 bp, Homo sapien
agccttcacaaggaacgcagccctaatgatatc

SEQ ID NO: 45403 - DNA, 33 bp, Homo sapien
ggtttgaactagtgcagtcatacaaacatggga

SEQ ID NO: 45404 - DNA, 33 bp, Homo sapien
ggtttgaactagtgcattcatacaaacatggga

SEQ ID NO: 45405 - DNA, 33 bp, Homo sapien
acctaagactctcctcaatttattcctttggct

SEQ ID NO: 45406 - DNA, 33 bp, Homo sapien
acctaagactctcctcgatttattcctttggct

SEQ ID NO: 45407 - DNA, 33 bp, Homo sapien
attaattaatggccaaaaaatcagttgagacac

SEQ ID NO: 45408 - DNA, 33 bp, Homo sapien
attaattaatggccaacaaatcagttgagacac

SEQ ID NO: 45409 - DNA, 33 bp, Homo sapien
ccataaatgctgttatcagagacttacttcttt

SEQ ID NO: 45410 - DNA, 33 bp, Homo sapien
ccataaatgctgttattagagacttacttcttt

SEQ ID NO: 45411 - DNA, 33 bp, Homo sapien
aatgccaacaatgctaagttcttaggcctgagg

SEQ ID NO: 45412 - DNA, 33 bp, Homo sapien
aatgccaacaatgctaggttcttaggcctgagg

SEQ ID NO: 45413 - DNA, 33 bp, Homo sapien
acagtaggtgctcagcaagtgggggctgaatgt

SEQ ID NO: 45414 - DNA, 33 bp, Homo sapien
acagtaggtgctcagcgagtgggggctgaatgt

SEQ ID NO: 45415 - DNA, 33 bp, Homo sapien
gaagagctgccacaaaacaatatatgatttatt

SEQ ID NO: 45416 - DNA, 33 bp, Homo sapien
gaagagctgccacaaagcaatatatgatttatt

SEQ ID NO: 45417 - DNA, 33 bp, Homo sapien
atcattcttcttactaaaacatgagctaacctt

SEQ ID NO: 45418 - DNA, 33 bp, Homo sapien
atcattcttcttactacaacatgagctaacctt

SEQ ID NO: 45419 - DNA, 33 bp, Homo sapien
tgtcaggggatgaatcagaagaaatgaaactgg

SEQ ID NO: 45420 - DNA, 33 bp, Homo sapien
tgtcaggggatgaatcggaagaaatgaaactgg

SEQ ID NO: 45421 - DNA, 33 bp, Homo sapien
aaaggaggactgttcaccttgaatgtccaatca

SEQ ID NO: 45422 - DNA, 33 bp, Homo sapien
aaaggaggactgttcatcttgaatgtccaatca

SEQ ID NO: 45423 - DNA, 33 bp, Homo sapien
ttcgggaggaaaaaaacataaggctccaggagt

SEQ ID NO: 45424 - DNA, 33 bp, Homo sapien
ttcgggaggaaaaaaatataaggctccaggagt

SEQ ID NO: 45425 - DNA, 33 bp, Homo sapien
cattataagctttcatcactgcaaatgtaagaa

SEQ ID NO: 45426 - DNA, 33 bp, Homo sapien
cattataagctttcatgactgcaaatgtaagaa

SEQ ID NO: 45427 - DNA, 33 bp, Homo sapien
cgttatcgaggttgtaaaagaccttccaagatg

SEQ ID NO: 45428 - DNA, 33 bp, Homo sapien
cgttatcgaggttgtagaagaccttccaagatg

SEQ ID NO: 45429 - DNA, 33 bp, Homo sapien
ttaaatctaataataaaaagttgagcttgcatt

SEQ ID NO: 45430 - DNA, 33 bp, Homo sapien
ttaaatctaataataagaagttgagcttgcatt

SEQ ID NO: 45431 - DNA, 33 bp, Homo sapien
actggaccatccatacggaggtgttgctttcac

SEQ ID NO: 45432 - DNA, 33 bp, Homo sapien
actggaccatccatactgaggtgttgctttcac

SEQ ID NO: 45433 - DNA, 33 bp, Homo sapien
agaaaggccacaaataagaggaagagagagaga

SEQ ID NO: 45434 - DNA, 33 bp, Homo sapien
agaaaggccacaaataggaggaagagagagaga

SEQ ID NO: 45435 - DNA, 33 bp, Homo sapien
gagtcatttctacataaccagcattgttacaca

SEQ ID NO: 45436 - DNA, 33 bp, Homo sapien
gagtcatttctacatacccagcattgttacaca

SEQ ID NO: 45437 - DNA, 33 bp, Homo sapien
taaatataagatgtacaatggaaattttctcca

SEQ ID NO: 45438 - DNA, 33 bp, Homo sapien
taaatataagatgtaccatggaaattttctcca

SEQ ID NO: 45439 - DNA, 33 bp, Homo sapien
tttaagcttccttccaactctgctattcagtat

SEQ ID NO: 45440 - DNA, 33 bp, Homo sapien
tttaagcttccttccagctctgctattcagtat

SEQ ID NO: 45441 - DNA, 33 bp, Homo sapien
ggatagggtactgttacggttcagctgttccct

SEQ ID NO: 45442 - DNA, 33 bp, Homo sapien
ggatagggtactgttatggttcagctgttccct

SEQ ID NO: 45443 - DNA, 33 bp, Homo sapien
atcaccctttataaaaccactggtgtgaagaaa

SEQ ID NO: 45444 - DNA, 33 bp, Homo sapien
atcaccctttataaaatcactggtgtgaagaaa

SEQ ID NO: 45445 - DNA, 33 bp, Homo sapien
ggtgtgagcgtcccccaaagacttcttttcttc

SEQ ID NO: 45446 - DNA, 33 bp, Homo sapien
ggtgtgagcgtcccccgaagacttcttttcttc

SEQ ID NO: 45447 - DNA, 33 bp, Homo sapien
attgtaattctctaacccactgtttaagatcct

SEQ ID NO: 45448 - DNA, 33 bp, Homo sapien
attgtaattctctaactcactgtttaagatcct

SEQ ID NO: 45449 - DNA, 33 bp, Homo sapien
ggtcattgaatttaataagcccaagagaattag

SEQ ID NO: 45450 - DNA, 33 bp, Homo sapien
ggtcattgaatttaatgagcccaagagaattag

SEQ ID NO: 45451 - DNA, 33 bp, Homo sapien
agatcatttccttgcacgtaatgagagctgtgt

SEQ ID NO: 45452 - DNA, 33 bp, Homo sapien
agatcatttccttgcatgtaatgagagctgtgt

SEQ ID NO: 45453 - DNA, 33 bp, Homo sapien
acgctctttggtcccaatattgacttctgaatt

SEQ ID NO: 45454 - DNA, 33 bp, Homo sapien
acgctctttggtcccagtattgacttctgaatt

SEQ ID NO: 45455 - DNA, 33 bp, Homo sapien
ctctgcaccctccccaaaatacactgttgttac

SEQ ID NO: 45456 - DNA, 33 bp, Homo sapien
ctctgcaccctccccagaatacactgttgttac

SEQ ID NO: 45457 - DNA, 33 bp, Homo sapien
cagatggtgatagttgaaattcattttgaatgc

SEQ ID NO: 45458 - DNA, 33 bp, Homo sapien
cagatggtgatagttggaattcattttgaatgc

SEQ ID NO: 45459 - DNA, 33 bp, Homo sapien
aagggtgagcaggtgaaaaaggcagttttctct

SEQ ID NO: 45460 - DNA, 33 bp, Homo sapien
aagggtgagcaggtgagaaaggcagttttctct

SEQ ID NO: 45461 - DNA, 33 bp, Homo sapien
ttgatcttttattatcacctaaagttaacagta

SEQ ID NO: 45462 - DNA, 33 bp, Homo sapien
ttgatcttttattatcccctaaagttaacagta

SEQ ID NO: 45463 - DNA, 33 bp, Homo sapien
atggggttattcccagactccatgtggcgctgg

SEQ ID NO: 45464 - DNA, 33 bp, Homo sapien
atggggttattcccaggctccatgtggcgctgg

SEQ ID NO: 45465 - DNA, 33 bp, Homo sapien
tgccgatccttgtcaaaatgagattccaggtcc

SEQ ID NO: 45466 - DNA, 33 bp, Homo sapien
tgccgatccttgtcaagatgagattccaggtcc

SEQ ID NO: 45467 - DNA, 33 bp, Homo sapien
gggcagaaacagcttacaaatctcagttatatc

SEQ ID NO: 45468 - DNA, 33 bp, Homo sapien
gggcagaaacagcttataaatctcagttatatc

SEQ ID NO: 45469 - DNA, 33 bp, Homo sapien
aaaggacttgcaggtaccaagcataacaggaat

SEQ ID NO: 45470 - DNA, 33 bp, Homo sapien
aaaggacttgcaggtagcaagcataacaggaat

SEQ ID NO: 45471 - DNA, 33 bp, Homo sapien
ctgtacaacacagagcaactcaaacttcttggc

SEQ ID NO: 45472 - DNA, 33 bp, Homo sapien
ctgtacaacacagagcgactcaaacttcttggc

SEQ ID NO: 45473 - DNA, 33 bp, Homo sapien
tttgttgtgaaaaggaaaaaccaaatgatccga

SEQ ID NO: 45474 - DNA, 33 bp, Homo sapien
tttgttgtgaaaaggacaaaccaaatgatccga

SEQ ID NO: 45475 - DNA, 33 bp, Homo sapien
taatttaaggtcttgaacatgaggatacctgtc

SEQ ID NO: 45476 - DNA, 33 bp, Homo sapien
taatttaaggtcttgagcatgaggatacctgtc

SEQ ID NO: 45477 - DNA, 33 bp, Homo sapien
tggttcttgaaatgtacagcattaacatctcaa

SEQ ID NO: 45478 - DNA, 33 bp, Homo sapien
tggttcttgaaatgtatagcattaacatctcaa

SEQ ID NO: 45479 - DNA, 33 bp, Homo sapien
ttacattctacaataaaataatggaaggaccat

SEQ ID NO: 45480 - DNA, 33 bp, Homo sapien
ttacattctacaataagataatggaaggaccat

SEQ ID NO: 45481 - DNA, 33 bp, Homo sapien
aaggcctctctgtgaacacctggtcctctgatg

SEQ ID NO: 45482 - DNA, 33 bp, Homo sapien
aaggcctctctgtgaatacctggtcctctgatg

SEQ ID NO: 45483 - DNA, 33 bp, Homo sapien
caaattgttggagctactaattgtacctactgt

SEQ ID NO: 45484 - DNA, 33 bp, Homo sapien
caaattgttggagctattaattgtacctactgt

SEQ ID NO: 45485 - DNA, 33 bp, Homo sapien
tgtactttagacttgacgtgacctggactccag

SEQ ID NO: 45486 - DNA, 33 bp, Homo sapien
tgtactttagacttgatgtgacctggactccag

SEQ ID NO: 45487 - DNA, 33 bp, Homo sapien
cctttcaaccataaagccagaagatatccatca

SEQ ID NO: 45488 - DNA, 33 bp, Homo sapien
cctttcaaccataaaggcagaagatatccatca

SEQ ID NO: 45489 - DNA, 33 bp, Homo sapien
ctaaattcctatcaagcatcctctagggctgca

SEQ ID NO: 45490 - DNA, 33 bp, Homo sapien
ctaaattcctatcaagtatcctctagggctgca

SEQ ID NO: 45491 - DNA, 33 bp, Homo sapien
attatacattaccccacgcttatgaagaactgg

SEQ ID NO: 45492 - DNA, 33 bp, Homo sapien
attatacattaccccatgcttatgaagaactgg

SEQ ID NO: 45493 - DNA, 33 bp, Homo sapien
tcagctaggcttctgccaaaacctctaccttct

SEQ ID NO: 45494 - DNA, 33 bp, Homo sapien
tcagctaggcttctgcgaaaacctctaccttct

SEQ ID NO: 45495 - DNA, 33 bp, Homo sapien
ggacaatgtggatgataaaaggagatggctgaa

SEQ ID NO: 45496 - DNA, 33 bp, Homo sapien
ggacaatgtggatgattaaaggagatggctgaa

SEQ ID NO: 45497 - DNA, 33 bp, Homo sapien
aattcacaaaacctgaagtctagtagaaactta

SEQ ID NO: 45498 - DNA, 33 bp, Homo sapien
aattcacaaaacctgaggtctagtagaaactta

SEQ ID NO: 45499 - DNA, 33 bp, Homo sapien
ggcttggtggttttccggagtggtaacatttga

SEQ ID NO: 45500 - DNA, 33 bp, Homo sapien
ggcttggtggttttcctgagtggtaacatttga

SEQ ID NO: 45501 - DNA, 33 bp, Homo sapien
ccgactgtcctacagaacttagtaaccatctat

SEQ ID NO: 45502 - DNA, 33 bp, Homo sapien
ccgactgtcctacagagcttagtaaccatctat

SEQ ID NO: 45503 - DNA, 33 bp, Homo sapien
tttactcgactctggacctatcatctgaggtga

SEQ ID NO: 45504 - DNA, 33 bp, Homo sapien
tttactcgactctggatctatcatctgaggtga

SEQ ID NO: 45505 - DNA, 33 bp, Homo sapien
gagcaggaggtggtaaagcaacccggtagagcc

SEQ ID NO: 45506 - DNA, 33 bp, Homo sapien
gagcaggaggtggtaaggcaacccggtagagcc

SEQ ID NO: 45507 - DNA, 33 bp, Homo sapien
tggctatccctatagaaatgtgggagagaaggg

SEQ ID NO: 45508 - DNA, 33 bp, Homo sapien
tggctatccctatagagatgtgggagagaaggg

SEQ ID NO: 45509 - DNA, 33 bp, Homo sapien
taatgaatagatgaaaagaatttagtgttctcc

SEQ ID NO: 45510 - DNA, 33 bp, Homo sapien
taatgaatagatgaaatgaatttagtgttctcc

SEQ ID NO: 45511 - DNA, 33 bp, Homo sapien
tttcacagttatacagaaggactcaggctatga

SEQ ID NO: 45512 - DNA, 33 bp, Homo sapien
tttcacagttatacaggaggactcaggctatga

SEQ ID NO: 45513 - DNA, 33 bp, Homo sapien
catccatacataaaacactaggaagagatgtct

SEQ ID NO: 45514 - DNA, 33 bp, Homo sapien
catccatacataaaacgctaggaagagatgtct

SEQ ID NO: 45515 - DNA, 33 bp, Homo sapien
agaagtgccgagcaaacggggaagagcgcctta

SEQ ID NO: 45516 - DNA, 33 bp, Homo sapien
agaagtgccgagcaaagggggaagagcgcctta

SEQ ID NO: 45517 - DNA, 33 bp, Homo sapien
aggccatcgcttggcaacaagactcaagccccc

SEQ ID NO: 45518 - DNA, 33 bp, Homo sapien
aggccatcgcttggcagcaagactcaagccccc

SEQ ID NO: 45519 - DNA, 33 bp, Homo sapien
tgaagctgagatgtgaaagtttagaagccaggc

SEQ ID NO: 45520 - DNA, 33 bp, Homo sapien
tgaagctgagatgtgacagtttagaagccaggc

SEQ ID NO: 45521 - DNA, 33 bp, Homo sapien
ttctaaagccctctgccactgatacaagttctg

SEQ ID NO: 45522 - DNA, 33 bp, Homo sapien
ttctaaagccctctgctactgatacaagttctg

SEQ ID NO: 45523 - DNA, 33 bp, Homo sapien
caattcttagaccttcaagaggacttcccagtg

SEQ ID NO: 45524 - DNA, 33 bp, Homo sapien
caattcttagaccttcgagaggacttcccagtg

SEQ ID NO: 45525 - DNA, 33 bp, Homo sapien
ctatcatgtgggttgaaaatgactccaaactcc

SEQ ID NO: 45526 - DNA, 33 bp, Homo sapien
ctatcatgtgggttgagaatgactccaaactcc

SEQ ID NO: 45527 - DNA, 33 bp, Homo sapien
taaaagactgctacaaccatggacattactaat

SEQ ID NO: 45528 - DNA, 33 bp, Homo sapien
taaaagactgctacaagcatggacattactaat

SEQ ID NO: 45529 - DNA, 33 bp, Homo sapien
ccttttcttcagcaaccggtaaataattgcctt

SEQ ID NO: 45530 - DNA, 33 bp, Homo sapien
ccttttcttcagcaactggtaaataattgcctt

SEQ ID NO: 45531 - DNA, 33 bp, Homo sapien
tagggacacctgcccaatgacgatggtgaccag

SEQ ID NO: 45532 - DNA, 33 bp, Homo sapien
tagggacacctgcccagtgacgatggtgaccag

SEQ ID NO: 45533 - DNA, 33 bp, Homo sapien
ccacttttatataagaagattgaagcaggaatg

SEQ ID NO: 45534 - DNA, 33 bp, Homo sapien
ccacttttatataagatgattgaagcaggaatg

SEQ ID NO: 45535 - DNA, 33 bp, Homo sapien
gccactggccagagtaagaggaagactgaagtg

SEQ ID NO: 45536 - DNA, 33 bp, Homo sapien
gccactggccagagtaggaggaagactgaagtg

SEQ ID NO: 45537 - DNA, 33 bp, Homo sapien
taaccctcccattaacactgcaaggaaagtagt

SEQ ID NO: 45538 - DNA, 33 bp, Homo sapien
taaccctcccattaaccctgcaaggaaagtagt

SEQ ID NO: 45539 - DNA, 33 bp, Homo sapien
tttctcttgtcagagacgtagagaggatgtggg

SEQ ID NO: 45540 - DNA, 33 bp, Homo sapien
tttctcttgtcagagatgtagagaggatgtggg

SEQ ID NO: 45541 - DNA, 33 bp, Homo sapien
ccagcctgaagcactagcagattctgcatcaag

SEQ ID NO: 45542 - DNA, 33 bp, Homo sapien
ccagcctgaagcactatcagattctgcatcaag

SEQ ID NO: 45543 - DNA, 33 bp, Homo sapien
tcagttctacttggaaaagaaagagggggttgt

SEQ ID NO: 45544 - DNA, 33 bp, Homo sapien
tcagttctacttggaagagaaagagggggttgt

SEQ ID NO: 45545 - DNA, 33 bp, Homo sapien
actgaaaaagggaggcacaacacaagaatttct

SEQ ID NO: 45546 - DNA, 33 bp, Homo sapien
actgaaaaagggaggcgcaacacaagaatttct

SEQ ID NO: 45547 - DNA, 33 bp, Homo sapien
ctggtgaaaggaaatgcaggattcttgattcct

SEQ ID NO: 45548 - DNA, 33 bp, Homo sapien
ctggtgaaaggaaatgtaggattcttgattcct

SEQ ID NO: 45549 - DNA, 33 bp, Homo sapien
tccgcacctggctcagacaatgactaacaaaag

SEQ ID NO: 45550 - DNA, 33 bp, Homo sapien
tccgcacctggctcaggcaatgactaacaaaag

SEQ ID NO: 45551 - DNA, 33 bp, Homo sapien
tattctgggcagctcaaaaggatggaactggga

SEQ ID NO: 45552 - DNA, 33 bp, Homo sapien
tattctgggcagctcagaaggatggaactggga

SEQ ID NO: 45553 - DNA, 33 bp, Homo sapien
atacaagtaaaatgccacaaaagaatgtgcaat

SEQ ID NO: 45554 - DNA, 33 bp, Homo sapien
atacaagtaaaatgccgcaaaagaatgtgcaat

SEQ ID NO: 45555 - DNA, 33 bp, Homo sapien
aaaatgtcaactctgaaaggaacttggtgacca

SEQ ID NO: 45556 - DNA, 33 bp, Homo sapien
aaaatgtcaactctgacaggaacttggtgacca

SEQ ID NO: 45557 - DNA, 33 bp, Homo sapien
cttttattataacaacccacactctccataacg

SEQ ID NO: 45558 - DNA, 33 bp, Homo sapien
cttttattataacaacgcacactctccataacg

SEQ ID NO: 45559 - DNA, 33 bp, Homo sapien
acacatttgaaccataacattcttcccctaacc

SEQ ID NO: 45560 - DNA, 33 bp, Homo sapien
acacatttgaaccatagcattcttcccctaacc

SEQ ID NO: 45561 - DNA, 33 bp, Homo sapien
cccaactcctcataccagcacattggtgattag

SEQ ID NO: 45562 - DNA, 33 bp, Homo sapien
cccaactcctcataccggcacattggtgattag

SEQ ID NO: 45563 - DNA, 33 bp, Homo sapien
ctctcagcatcattcactccattttgttctcct

SEQ ID NO: 45564 - DNA, 33 bp, Homo sapien
ctctcagcatcattcattccattttgttctcct

SEQ ID NO: 45565 - DNA, 33 bp, Homo sapien
ctaggtattgacgtaacgtatctcaaaataata

SEQ ID NO: 45566 - DNA, 33 bp, Homo sapien
ctaggtattgacgtaatgtatctcaaaataata

SEQ ID NO: 45567 - DNA, 33 bp, Homo sapien
ttcttcaattttcacaataagaacctggtgggg

SEQ ID NO: 45568 - DNA, 33 bp, Homo sapien
ttcttcaattttcacagtaagaacctggtgggg

SEQ ID NO: 45569 - DNA, 33 bp, Homo sapien
tggcatcaacaacatacggaggttcaaattccg

SEQ ID NO: 45570 - DNA, 33 bp, Homo sapien
tggcatcaacaacatatggaggttcaaattccg

SEQ ID NO: 45571 - DNA, 33 bp, Homo sapien
tttcacaaaggtataggatcatatagtcattac

SEQ ID NO: 45572 - DNA, 33 bp, Homo sapien
tttcacaaaggtatagtatcatatagtcattac

SEQ ID NO: 45573 - DNA, 33 bp, Homo sapien
tcatatttgccagttacgtgtctcagtttcttt

SEQ ID NO: 45574 - DNA, 33 bp, Homo sapien
tcatatttgccagttatgtgtctcagtttcttt

SEQ ID NO: 45575 - DNA, 33 bp, Homo sapien
tgccatctagtggtagaagtgcagcatgactcc

SEQ ID NO: 45576 - DNA, 33 bp, Homo sapien
tgccatctagtggtaggagtgcagcatgactcc

SEQ ID NO: 45577 - DNA, 33 bp, Homo sapien
ctctccgcattccccccagtttctcccctccct

SEQ ID NO: 45578 - DNA, 33 bp, Homo sapien
ctctccgcattcccccgagtttctcccctccct

SEQ ID NO: 45579 - DNA, 33 bp, Homo sapien
gtgcacacagcgtctacccagtgcttcctttgt

SEQ ID NO: 45580 - DNA, 33 bp, Homo sapien
gtgcacacagcgtctatccagtgcttcctttgt

SEQ ID NO: 45581 - DNA, 33 bp, Homo sapien
atcagtccaggagatacctaaagttctcactga

SEQ ID NO: 45582 - DNA, 33 bp, Homo sapien
atcagtccaggagatatctaaagttctcactga

SEQ ID NO: 45583 - DNA, 33 bp, Homo sapien
atttatttaccataacggtgtatactcaggcag

SEQ ID NO: 45584 - DNA, 33 bp, Homo sapien
atttatttaccataactgtgtatactcaggcag

SEQ ID NO: 45585 - DNA, 33 bp, Homo sapien
cctcccaggtaactacagatttgcacacctccg

SEQ ID NO: 45586 - DNA, 33 bp, Homo sapien
cctcccaggtaactacggatttgcacacctccg

SEQ ID NO: 45587 - DNA, 33 bp, Homo sapien
ctcactctggaaaaacgatcttcacaatactat

SEQ ID NO: 45588 - DNA, 33 bp, Homo sapien
ctcactctggaaaaactatcttcacaatactat

SEQ ID NO: 45589 - DNA, 33 bp, Homo sapien
caaaacacatgatttcacagaccatacagcttt

SEQ ID NO: 45590 - DNA, 33 bp, Homo sapien
caaaacacatgatttcgcagaccatacagcttt

SEQ ID NO: 45591 - DNA, 33 bp, Homo sapien
gaggagaaaaggaagcagaggcatcaattacaa

SEQ ID NO: 45592 - DNA, 33 bp, Homo sapien
gaggagaaaaggaagccgaggcatcaattacaa

SEQ ID NO: 45593 - DNA, 33 bp, Homo sapien
tgtcattgatagtagacggaaataacacttaaa

SEQ ID NO: 45594 - DNA, 33 bp, Homo sapien
tgtcattgatagtagagggaaataacacttaaa

SEQ ID NO: 45595 - DNA, 33 bp, Homo sapien
acagacctgtgtacacccatctgtattgggagt

SEQ ID NO: 45596 - DNA, 33 bp, Homo sapien
acagacctgtgtacactcatctgtattgggagt

SEQ ID NO: 45597 - DNA, 33 bp, Homo sapien
ggggtgaaggcggcgcaaagaactggaagagcc

SEQ ID NO: 45598 - DNA, 33 bp, Homo sapien
ggggtgaaggcggcgcgaagaactggaagagcc

SEQ ID NO: 45599 - DNA, 33 bp, Homo sapien
aaaatgtactgggccacgcacttaagattggtg

SEQ ID NO: 45600 - DNA, 33 bp, Homo sapien
aaaatgtactgggccatgcacttaagattggtg

SEQ ID NO: 45601 - DNA, 33 bp, Homo sapien
aatattcaggatttagaaggagaagctgccttt

SEQ ID NO: 45602 - DNA, 33 bp, Homo sapien
aatattcaggatttagcaggagaagctgccttt

SEQ ID NO: 45603 - DNA, 33 bp, Homo sapien
gataaatgctctagaaaaccctgatattgcaat

SEQ ID NO: 45604 - DNA, 33 bp, Homo sapien
gataaatgctctagaagaccctgatattgcaat

SEQ ID NO: 45605 - DNA, 33 bp, Homo sapien
ggatggaaaattggacagtcaaagagtaacagt

SEQ ID NO: 45606 - DNA, 33 bp, Homo sapien
ggatggaaaattggaccgtcaaagagtaacagt

SEQ ID NO: 45607 - DNA, 33 bp, Homo sapien
aatggaaaagcaacgccctgggaaaacaacctt

SEQ ID NO: 45608 - DNA, 33 bp, Homo sapien
aatggaaaagcaacgctctgggaaaacaacctt

SEQ ID NO: 45609 - DNA, 33 bp, Homo sapien
caccccggagcccttccagccttgacacacagc

SEQ ID NO: 45610 - DNA, 33 bp, Homo sapien
caccccggagcccttctagccttgacacacagc

SEQ ID NO: 45611 - DNA, 33 bp, Homo sapien
tggtcggctgagtggcagaaggtggggcggaaa

SEQ ID NO: 45612 - DNA, 33 bp, Homo sapien
tggtcggctgagtggcggaaggtggggcggaaa

SEQ ID NO: 45613 - DNA, 33 bp, Homo sapien
gccccaatctttccaaagaagcaggtgtttctg

SEQ ID NO: 45614 - DNA, 33 bp, Homo sapien
gccccaatctttccaaggaagcaggtgtttctg

SEQ ID NO: 45615 - DNA, 33 bp, Homo sapien
taagtgctacggtctacagaaggccatggaaga

SEQ ID NO: 45616 - DNA, 33 bp, Homo sapien
taagtgctacggtctagagaaggccatggaaga

SEQ ID NO: 45617 - DNA, 33 bp, Homo sapien
ttatttgaggtgcttaactgattacttttaatt

SEQ ID NO: 45618 - DNA, 33 bp, Homo sapien
ttatttgaggtgcttagctgattacttttaatt

SEQ ID NO: 45619 - DNA, 33 bp, Homo sapien
agtgctgctgtatctaaccattgtttttgtttt

SEQ ID NO: 45620 - DNA, 33 bp, Homo sapien
agtgctgctgtatctacccattgtttttgtttt

SEQ ID NO: 45621 - DNA, 33 bp, Homo sapien
atcatttacaataatgccaagtgtataaaatcc

SEQ ID NO: 45622 - DNA, 33 bp, Homo sapien
atcatttacaataatgtcaagtgtataaaatcc

SEQ ID NO: 45623 - DNA, 33 bp, Homo sapien
ctggactacagttctaccatctattttttaagc

SEQ ID NO: 45624 - DNA, 33 bp, Homo sapien
ctggactacagttctatcatctattttttaagc

SEQ ID NO: 45625 - DNA, 33 bp, Homo sapien
ctttagcaacattttcaactcagtgggcactgc

SEQ ID NO: 45626 - DNA, 33 bp, Homo sapien
ctttagcaacattttcgactcagtgggcactgc

SEQ ID NO: 45627 - DNA, 33 bp, Homo sapien
gaacagagaagagctacatttaggcctccacta

SEQ ID NO: 45628 - DNA, 33 bp, Homo sapien
gaacagagaagagctatatttaggcctccacta

SEQ ID NO: 45629 - DNA, 33 bp, Homo sapien
ttcacttgtcaaatgcccataactgagagtatt

SEQ ID NO: 45630 - DNA, 33 bp, Homo sapien
ttcacttgtcaaatgctcataactgagagtatt

SEQ ID NO: 45631 - DNA, 33 bp, Homo sapien
cggctgttaaccgaaaagttggtggttcgagcc

SEQ ID NO: 45632 - DNA, 33 bp, Homo sapien
cggctgttaaccgaaaggttggtggttcgagcc

SEQ ID NO: 45633 - DNA, 33 bp, Homo sapien
ctttcaaaaatgtgaccgaaatcaggacattta

SEQ ID NO: 45634 - DNA, 33 bp, Homo sapien
ctttcaaaaatgtgactgaaatcaggacattta

SEQ ID NO: 45635 - DNA, 33 bp, Homo sapien
agatgtcctgcaaacagaaaatacagcacataa

SEQ ID NO: 45636 - DNA, 33 bp, Homo sapien
agatgtcctgcaaacataaaatacagcacataa

SEQ ID NO: 45637 - DNA, 33 bp, Homo sapien
gaagagcacaggaaaacgtccaagatggagagg

SEQ ID NO: 45638 - DNA, 33 bp, Homo sapien
gaagagcacaggaaaaggtccaagatggagagg

SEQ ID NO: 45639 - DNA, 33 bp, Homo sapien
cttaaacaatgactaccattttgataaaaggac

SEQ ID NO: 45640 - DNA, 33 bp, Homo sapien
cttaaacaatgactactattttgataaaaggac

SEQ ID NO: 45641 - DNA, 33 bp, Homo sapien
taccttctttccccctcaatgaaaatacaacaa

SEQ ID NO: 45642 - DNA, 33 bp, Homo sapien
taccttctttcccccttaatgaaaatacaacaa

SEQ ID NO: 45643 - DNA, 33 bp, Homo sapien
tttcttgctataatacagagttcagtcttgata

SEQ ID NO: 45644 - DNA, 33 bp, Homo sapien
tttcttgctataatacggagttcagtcttgata

SEQ ID NO: 45645 - DNA, 33 bp, Homo sapien
catgcatcacactccacatatgaaacccttctt

SEQ ID NO: 45646 - DNA, 33 bp, Homo sapien
catgcatcacactccagatatgaaacccttctt

SEQ ID NO: 45647 - DNA, 33 bp, Homo sapien
tgtgtttatatatatacgtttatgtcgtgaaag

SEQ ID NO: 45648 - DNA, 33 bp, Homo sapien
tgtgtttatatatatatgtttatgtcgtgaaag

SEQ ID NO: 45649 - DNA, 33 bp, Homo sapien
ttgatgttagccctgcgagtttcatttaaggct

SEQ ID NO: 45650 - DNA, 33 bp, Homo sapien
ttgatgttagccctgctagtttcatttaaggct

SEQ ID NO: 45651 - DNA, 33 bp, Homo sapien
agaagaaagcttctcccgctcactcaggtagcc

SEQ ID NO: 45652 - DNA, 33 bp, Homo sapien
agaagaaagcttctcctgctcactcaggtagcc

SEQ ID NO: 45653 - DNA, 33 bp, Homo sapien; identical to SEQ ID NO: 45651

SEQ ID NO: 45654 - DNA, 33 bp, Homo sapien; identical to SEQ ID NO: 45652

SEQ ID NO: 45655 - DNA, 33 bp, Homo sapien
gcctgatacacaccataatggagctataagtcc

SEQ ID NO: 45656 - DNA, 33 bp, Homo sapien
gcctgatacacaccatgatggagctataagtcc

SEQ ID NO: 45657 - DNA, 33 bp, Homo sapien
accagtagttggctgaccatttaaaaagaaaca

SEQ ID NO: 45658 - DNA, 33 bp, Homo sapien
accagtagttggctgatcatttaaaaagaaaca

SEQ ID NO: 45659 - DNA, 33 bp, Homo sapien
cattaccattaatggaggtatgaatggattggc

SEQ ID NO: 45660 - DNA, 33 bp, Homo sapien
cattaccattaatggatgtatgaatggattggc

SEQ ID NO: 45661 - DNA, 33 bp, Homo sapien
gggttgtgttttaggacgtaatcattgtcttct

SEQ ID NO: 45662 - DNA, 33 bp, Homo sapien
gggttgtgttttaggatgtaatcattgtcttct

SEQ ID NO: 45663 - DNA, 33 bp, Homo sapien
tccctcttttcccctgccagggctatcctgcat

SEQ ID NO: 45664 - DNA, 33 bp, Homo sapien
tccctcttttcccctgtcagggctatcctgcat

SEQ ID NO: 45665 - DNA, 33 bp, Homo sapien
ccttcccctgaaactaaccggtcaatatgtcag

SEQ ID NO: 45666 - DNA, 33 bp, Homo sapien
ccttcccctgaaactagccggtcaatatgtcag

SEQ ID NO: 45667 - DNA, 33 bp, Homo sapien
ccaaaaggattaagcccagaatgaaggaatgct

SEQ ID NO: 45668 - DNA, 33 bp, Homo sapien
ccaaaaggattaagccgagaatgaaggaatgct

SEQ ID NO: 45669 - DNA, 33 bp, Homo sapien
ctttgtatctagtcgccgcaagatgcactatgt

SEQ ID NO: 45670 - DNA, 33 bp, Homo sapien
ctttgtatctagtcgctgcaagatgcactatgt

SEQ ID NO: 45671 - DNA, 33 bp, Homo sapien
attttctataaatgaaataatacctgcgttctt

SEQ ID NO: 45672 - DNA, 33 bp, Homo sapien
attttctataaatgaactaatacctgcgttctt

SEQ ID NO: 45673 - DNA, 33 bp, Homo sapien
caggaaggaggttaatcatgtaacaaatcctgt

SEQ ID NO: 45674 - DNA, 33 bp, Homo sapien
caggaaggaggttaattatgtaacaaatcctgt

SEQ ID NO: 45675 - DNA, 33 bp, Homo sapien
ggctacatacaaacaaatgaaagatgtaatcaa

SEQ ID NO: 45676 - DNA, 33 bp, Homo sapien
ggctacatacaaacaagtgaaagatgtaatcaa

SEQ ID NO: 45677 - DNA, 33 bp, Homo sapien
tttcaggcaggagagtaaatcgggcatccgtta

SEQ ID NO: 45678 - DNA, 33 bp, Homo sapien
tttcaggcaggagagttaatcgggcatccgtta

SEQ ID NO: 45679 - DNA, 33 bp, Homo sapien
acatcctagaagtttaacagctcatcctatgcc

SEQ ID NO: 45680 - DNA, 33 bp, Homo sapien
acatcctagaagtttagcagctcatcctatgcc

SEQ ID NO: 45681 - DNA, 33 bp, Homo sapien
ccatgctcatttgtaccactcttttgtttgtac

SEQ ID NO: 45682 - DNA, 33 bp, Homo sapien
ccatgctcatttgtacgactcttttgtttgtac

SEQ ID NO: 45683 - DNA, 33 bp, Homo sapien
gaagatttgcctggtgcagtgtaaaacaaacag

SEQ ID NO: 45684 - DNA, 33 bp, Homo sapien
gaagatttgcctggtggagtgtaaaacaaacag

SEQ ID NO: 45685 - DNA, 33 bp, Homo sapien
ctccctgctattcttcaaagttgttatctgcag

SEQ ID NO: 45686 - DNA, 33 bp, Homo sapien
ctccctgctattcttctaagttgttatctgcag

SEQ ID NO: 45687 - DNA, 33 bp, Homo sapien
aaataaagaagctagagcaaaatacgaaatgat

SEQ ID NO: 45688 - DNA, 33 bp, Homo sapien
aaataaagaagctagatcaaaatacgaaatgat

SEQ ID NO: 45689 - DNA, 33 bp, Homo sapien
tttccaaaatagttaccgctttggtatgggaag

SEQ ID NO: 45690 - DNA, 33 bp, Homo sapien
tttccaaaatagttactgctttggtatgggaag

SEQ ID NO: 45691 - DNA, 33 bp, Homo sapien
cacaaggctttcaacccatcccctcttctgacc

SEQ ID NO: 45692 - DNA, 33 bp, Homo sapien
cacaaggctttcaacctatcccctcttctgacc

SEQ ID NO: 45693 - DNA, 33 bp, Homo sapien
attttggattggaatcaaggttctgcattcaca

SEQ ID NO: 45694 - DNA, 33 bp, Homo sapien
attttggattggaatcgaggttctgcattcaca

SEQ ID NO: 45695 - DNA, 33 bp, Homo sapien
gatgttcagcacggtacgaatgactgccatctc

SEQ ID NO: 45696 - DNA, 33 bp, Homo sapien
gatgttcagcacggtaggaatgactgccatctc

SEQ ID NO: 45697 - DNA, 33 bp, Homo sapien; identical to SEQ ID NO: 45695

SEQ ID NO: 45698 - DNA, 33 bp, Homo sapien; identical to SEQ ID NO: 45696

SEQ ID NO: 45699 - DNA, 33 bp, Homo sapien
cattctcttaagcaaacgtgtataacttgcata

SEQ ID NO: 45700 - DNA, 33 bp, Homo sapien
cattctcttaagcaaatgtgtataacttgcata

SEQ ID NO: 45701 - DNA, 33 bp, Homo sapien
tgacacgtacactaataaagaattgaacatttg

SEQ ID NO: 45702 - DNA, 33 bp, Homo sapien
tgacacgtacactaatgaagaattgaacatttg

SEQ ID NO: 45703 - DNA, 33 bp, Homo sapien; identical to SEQ ID NO: 45701

SEQ ID NO: 45704 - DNA, 33 bp, Homo sapien; identical to SEQ ID NO: 45702

SEQ ID NO: 45705 - DNA, 33 bp, Homo sapien
cagtgttttaacattccctggccataccacacg

SEQ ID NO: 45706 - DNA, 33 bp, Homo sapien
cagtgttttaacattctctggccataccacacg

SEQ ID NO: 45707 - DNA, 33 bp, Homo sapien
catgtgagactgggaacggagaaaagctacctg

SEQ ID NO: 45708 - DNA, 33 bp, Homo sapien
catgtgagactgggaatggagaaaagctacctg

SEQ ID NO: 45709 - DNA, 33 bp, Homo sapien
aaaataatgcagaggacaataataatcttgagt

SEQ ID NO: 45710 - DNA, 33 bp, Homo sapien
aaaataatgcagaggataataataatcttgagt

SEQ ID NO: 45711 - DNA, 33 bp, Homo sapien
tgggctattgacaagccatttgtacctcaatat

SEQ ID NO: 45712 - DNA, 33 bp, Homo sapien
tgggctattgacaagctatttgtacctcaatat

SEQ ID NO: 45713 - DNA, 33 bp, Homo sapien
tattctttacataccacgacaagtactgagctt

SEQ ID NO: 45714 - DNA, 33 bp, Homo sapien
tattctttacataccaggacaagtactgagctt

SEQ ID NO: 45715 - DNA, 33 bp, Homo sapien
tctcacaaagtaaaagacttgatttctgatata

SEQ ID NO: 45716 - DNA, 33 bp, Homo sapien
tctcacaaagtaaaaggcttgatttctgatata

SEQ ID NO: 45717 - DNA, 33 bp, Homo sapien
caatggagcctccatacaaagacccaaaaggac

SEQ ID NO: 45718 - DNA, 33 bp, Homo sapien
caatggagcctccatataaagacccaaaaggac

SEQ ID NO: 45719 - DNA, 33 bp, Homo sapien
cccactcttcagactccaagaagttcttttggt

SEQ ID NO: 45720 - DNA, 33 bp, Homo sapien
cccactcttcagactctaagaagttcttttggt

SEQ ID NO: 45721 - DNA, 33 bp, Homo sapien
taggaaggaaaaggaaagagaggagctttgacc

SEQ ID NO: 45722 - DNA, 33 bp, Homo sapien
taggaaggaaaaggaaggagaggagctttgacc

SEQ ID NO: 45723 - DNA, 33 bp, Homo sapien
ccagaaataaactgaacagaggcttaaaagaaa

SEQ ID NO: 45724 - DNA, 33 bp, Homo sapien
ccagaaataaactgaagagaggcttaaaagaaa

SEQ ID NO: 45725 - DNA, 33 bp, Homo sapien
cacactgctctcaaaaatgtaaattcgaaagct

SEQ ID NO: 45726 - DNA, 33 bp, Homo sapien
cacactgctctcaaaagtgtaaattcgaaagct

SEQ ID NO: 45727 - DNA, 33 bp, Homo sapien
aggaaaagtgttcatacactgattcatctctaa

SEQ ID NO: 45728 - DNA, 33 bp, Homo sapien
aggaaaagtgttcatatactgattcatctctaa

SEQ ID NO: 45729 - DNA, 33 bp, Homo sapien
tacaccttaatcataagcctttactccagaaga

SEQ ID NO: 45730 - DNA, 33 bp, Homo sapien
tacaccttaatcataatcctttactccagaaga

SEQ ID NO: 45731 - DNA, 33 bp, Homo sapien
ccagttcttatcccacacaagcattttaatgcc

SEQ ID NO: 45732 - DNA, 33 bp, Homo sapien
ccagttcttatcccacgcaagcattttaatgcc

SEQ ID NO: 45733 - DNA, 33 bp, Homo sapien
tgaacagaaatgaccaatgctgtagatgatgca

SEQ ID NO: 45734 - DNA, 33 bp, Homo sapien
tgaacagaaatgaccagtgctgtagatgatgca

SEQ ID NO: 45735 - DNA, 33 bp, Homo sapien
cttaaactggaagctaccgatcaagtccagccc

SEQ ID NO: 45736 - DNA, 33 bp, Homo sapien
cttaaactggaagctagcgatcaagtccagccc

SEQ ID NO: 45737 - DNA, 33 bp, Homo sapien
ataatttagctggagaaagcatcagaaaaatcc

SEQ ID NO: 45738 - DNA, 33 bp, Homo sapien
ataatttagctggagagagcatcagaaaaatcc

SEQ ID NO: 45739 - DNA, 33 bp, Homo sapien
ccttacatacttatcaacacgttaaatttgctt

SEQ ID NO: 45740 - DNA, 33 bp, Homo sapien
ccttacatacttatcagcacgttaaatttgctt

SEQ ID NO: 45741 - DNA, 33 bp, Homo sapien
caacaggtaccacataataagaacatttcctaa

SEQ ID NO: 45742 - DNA, 33 bp, Homo sapien
caacaggtaccacatactaagaacatttcctaa

SEQ ID NO: 45743 - DNA, 33 bp, Homo sapien
tctgatgtgtcaaaatgaggaaggtaatagtac

SEQ ID NO: 45744 - DNA, 33 bp, Homo sapien
tctgatgtgtcaaaattaggaaggtaatagtac

SEQ ID NO: 45745 - DNA, 33 bp, Homo sapien
aatgtcccctcataagcctgtgagatccttcat

SEQ ID NO: 45746 - DNA, 33 bp, Homo sapien
aatgtcccctcataagtctgtgagatccttcat

SEQ ID NO: 45747 - DNA, 33 bp, Homo sapien
gacattagcttaaataagaagagaacaataaag

SEQ ID NO: 45748 - DNA, 33 bp, Homo sapien
gacattagcttaaataggaagagaacaataaag

SEQ ID NO: 45749 - DNA, 33 bp, Homo sapien
tggagaacccattgcaacttccctgctatatga

SEQ ID NO: 45750 - DNA, 33 bp, Homo sapien
tggagaacccattgcaccttccctgctatatga

SEQ ID NO: 45751 - DNA, 33 bp, Homo sapien
ctctgagtctatctagaagagcccaggtcccat

SEQ ID NO: 45752 - DNA, 33 bp, Homo sapien
ctctgagtctatctaggagagcccaggtcccat

SEQ ID NO: 45753 - DNA, 33 bp, Homo sapien
tattaagctgttgtggaacaaagatttttttat

SEQ ID NO: 45754 - DNA, 33 bp, Homo sapien
tattaagctgttgtgggacaaagatttttttat

SEQ ID NO: 45755 - DNA, 33 bp, Homo sapien
agttttacatggacagaacaaaaaaagagagca

SEQ ID NO: 45756 - DNA, 33 bp, Homo sapien
agttttacatggacaggacaaaaaaagagagca

SEQ ID NO: 45757 - DNA, 33 bp, Homo sapien
ttcctatatagagcatcaaatgtgtctattcct

SEQ ID NO: 45758 - DNA, 33 bp, Homo sapien
ttcctatatagagcattaaatgtgtctattcct

SEQ ID NO: 45759 - DNA, 33 bp, Homo sapien
tgtatgttaggtttccacgaaaagaggtaggta

SEQ ID NO: 45760 - DNA, 33 bp, Homo sapien
tgtatgttaggtttccgcgaaaagaggtaggta

SEQ ID NO: 45761 - DNA, 33 bp, Homo sapien
agttaatgtggtttagcaaaaataaaggatttg

SEQ ID NO: 45762 - DNA, 33 bp, Homo sapien
agttaatgtggtttaggaaaaataaaggatttg

SEQ ID NO: 45763 - DNA, 33 bp, Homo sapien
taactgaccttctccacacacattgataatttt

SEQ ID NO: 45764 - DNA, 33 bp, Homo sapien
taactgaccttctccatacacattgataatttt

SEQ ID NO: 45765 - DNA, 33 bp, Homo sapien
tagtgggactctggaaatggcagcctggctaag

SEQ ID NO: 45766 - DNA, 33 bp, Homo sapien
tagtgggactctggaagtggcagcctggctaag

SEQ ID NO: 45767 - DNA, 33 bp, Homo sapien
atcacagaagaagaaacattcaagtcactatca

SEQ ID NO: 45768 - DNA, 33 bp, Homo sapien
atcacagaagaagaaatattcaagtcactatca

SEQ ID NO: 45769 - DNA, 33 bp, Homo sapien
gcagctcgatctcaatcagagactgctaggaat

SEQ ID NO: 45770 - DNA, 33 bp, Homo sapien
gcagctcgatctcaatgagagactgctaggaat

SEQ ID NO: 45771 - DNA, 33 bp, Homo sapien
cagtcaagaccaggtacggttcatgcctgtaat

SEQ ID NO: 45772 - DNA, 33 bp, Homo sapien
cagtcaagaccaggtatggttcatgcctgtaat

SEQ ID NO: 45773 - DNA, 33 bp, Homo sapien
agatgttggggatgggaaagacaagaggaagaa

SEQ ID NO: 45774 - DNA, 33 bp, Homo sapien
agatgttggggatggggaagacaagaggaagaa

SEQ ID NO: 45775 - DNA, 33 bp, Homo sapien
cactttgaggagtttcaagtcataaacccatag

SEQ ID NO: 45776 - DNA, 33 bp, Homo sapien
cactttgaggagtttcgagtcataaacccatag

SEQ ID NO: 45777 - DNA, 33 bp, Homo sapien
aggcagtttccccaacaaatcactggtacggca

SEQ ID NO: 45778 - DNA, 33 bp, Homo sapien
aggcagtttccccaacgaatcactggtacggca

SEQ ID NO: 45779 - DNA, 33 bp, Homo sapien
tcttgaccaagaggggacccattcagttggctg

SEQ ID NO: 45780 - DNA, 33 bp, Homo sapien
tcttgaccaagagggggcccattcagttggctg

SEQ ID NO: 45781 - DNA, 33 bp, Homo sapien
attctcatatctccaaattcatggacaaaggtt

SEQ ID NO: 45782 - DNA, 33 bp, Homo sapien
attctcatatctccaacttcatggacaaaggtt

SEQ ID NO: 45783 - DNA, 33 bp, Homo sapien
gataagcttctgggaaaacacttaacccaaagt

SEQ ID NO: 45784 - DNA, 33 bp, Homo sapien
gataagcttctgggaagacacttaacccaaagt

SEQ ID NO: 45785 - DNA, 33 bp, Homo sapien
gtaggaatcaagacaacgcagaaagtttaggaa

SEQ ID NO: 45786 - DNA, 33 bp, Homo sapien
gtaggaatcaagacaatgcagaaagtttaggaa

SEQ ID NO: 45787 - DNA, 33 bp, Homo sapien
cagaagcacaaatggacaggtttgcctttaaaa

SEQ ID NO: 45788 - DNA, 33 bp, Homo sapien
cagaagcacaaatggataggtttgcctttaaaa

SEQ ID NO: 45789 - DNA, 33 bp, Homo sapien
acatcagactggaaaccgagttctgtccacata

SEQ ID NO: 45790 - DNA, 33 bp, Homo sapien
acatcagactggaaactgagttctgtccacata

SEQ ID NO: 45791 - DNA, 33 bp, Homo sapien
cctggcctaaaatgaacgtctttataggtaaca

SEQ ID NO: 45792 - DNA, 33 bp, Homo sapien
cctggcctaaaatgaatgtctttataggtaaca

SEQ ID NO: 45793 - DNA, 33 bp, Homo sapien
aataaatcatacagaaaaagatttacagggaga

SEQ ID NO: 45794 - DNA, 33 bp, Homo sapien
aataaatcatacagaagaagatttacagggaga

SEQ ID NO: 45795 - DNA, 33 bp, Homo sapien
acttccaaaacacagaccaaataaattccaaga

SEQ ID NO: 45796 - DNA, 33 bp, Homo sapien
acttccaaaacacagagcaaataaattccaaga

SEQ ID NO: 45797 - DNA, 33 bp, Homo sapien
aagattggatatataacgtaaaaagtacaagga

SEQ ID NO: 45798 - DNA, 33 bp, Homo sapien
aagattggatatataatgtaaaaagtacaagga

SEQ ID NO: 45799 - DNA, 33 bp, Homo sapien
cctacagcaatgattcgcaactaatggggcatt

SEQ ID NO: 45800 - DNA, 33 bp, Homo sapien
cctacagcaatgattctcaactaatggggcatt

SEQ ID NO: 45801 - DNA, 33 bp, Homo sapien
gtgagtctatttggcagcaagtcttatagactc

SEQ ID NO: 45802 - DNA, 33 bp, Homo sapien
gtgagtctatttggcatcaagtcttatagactc

SEQ ID NO: 45803 - DNA, 33 bp, Homo sapien
aataaagcctagagaccatcgggcaatatgcga

SEQ ID NO: 45804 - DNA, 33 bp, Homo sapien
aataaagcctagagacgatcgggcaatatgcga

SEQ ID NO: 45805 - DNA, 33 bp, Homo sapien
gcaaaagtgtgaaagaatcagagaggagtcata

SEQ ID NO: 45806 - DNA, 33 bp, Homo sapien
gcaaaagtgtgaaagagtcagagaggagtcata

SEQ ID NO: 45807 - DNA, 33 bp, Homo sapien
ccagccgatataaagcgcatcatcaaattttcc

SEQ ID NO: 45808 - DNA, 33 bp, Homo sapien
ccagccgatataaagctcatcatcaaattttcc

SEQ ID NO: 45809 - DNA, 33 bp, Homo sapien
cagagtgcagtgacaccaccacagctcactgta

SEQ ID NO: 45810 - DNA, 33 bp, Homo sapien
cagagtgcagtgacactaccacagctcactgta

SEQ ID NO: 45811 - DNA, 33 bp, Homo sapien
agaccaccacaattgacaatccatcgatttagt

SEQ ID NO: 45812 - DNA, 33 bp, Homo sapien
agaccaccacaattgagaatccatcgatttagt

SEQ ID NO: 45813 - DNA, 33 bp, Homo sapien
gaaatctcaatatctccaaggtatgcctgacta

SEQ ID NO: 45814 - DNA, 33 bp, Homo sapien
gaaatctcaatatctctaaggtatgcctgacta

SEQ ID NO: 45815 - DNA, 33 bp, Homo sapien
gacccaaaaatgagaaaaatgtctgcatgggag

SEQ ID NO: 45816 - DNA, 33 bp, Homo sapien
gacccaaaaatgagaagaatgtctgcatgggag

SEQ ID NO: 45817 - DNA, 33 bp, Homo sapien
tttagccatttggacccatctcttagcatgcct

SEQ ID NO: 45818 - DNA, 33 bp, Homo sapien
tttagccatttggacctatctcttagcatgcct

SEQ ID NO: 45819 - DNA, 33 bp, Homo sapien
ccagaggtggaacaagccttgcttaaactgcaa

SEQ ID NO: 45820 - DNA, 33 bp, Homo sapien
ccagaggtggaacaaggcttgcttaaactgcaa

SEQ ID NO: 45821 - DNA, 33 bp, Homo sapien
aatattaccatccacacagttgcctgagttaga

SEQ ID NO: 45822 - DNA, 33 bp, Homo sapien
aatattaccatccacatagttgcctgagttaga

SEQ ID NO: 45823 - DNA, 33 bp, Homo sapien
gctcatactgaatagacagataggtatgtgacc

SEQ ID NO: 45824 - DNA, 33 bp, Homo sapien
gctcatactgaatagatagataggtatgtgacc

SEQ ID NO: 45825 - DNA, 33 bp, Homo sapien
aggaaaaaagtgtgcacaaaataaagctagatt

SEQ ID NO: 45826 - DNA, 33 bp, Homo sapien
aggaaaaaagtgtgcagaaaataaagctagatt

SEQ ID NO: 45827 - DNA, 33 bp, Homo sapien
agtgaaggcatagcaccgggtgttcagtagtag

SEQ ID NO: 45828 - DNA, 33 bp, Homo sapien
agtgaaggcatagcactgggtgttcagtagtag

SEQ ID NO: 45829 - DNA, 33 bp, Homo sapien
aggtcctgtccttcaacagaaatctagagttat

SEQ ID NO: 45830 - DNA, 33 bp, Homo sapien
aggtcctgtccttcaagagaaatctagagttat

SEQ ID NO: 45831 - DNA, 33 bp, Homo sapien
gttctttctcatttccactatatcctcccaacc

SEQ ID NO: 45832 - DNA, 33 bp, Homo sapien
gttctttctcatttcccctatatcctcccaacc

SEQ ID NO: 45833 - DNA, 33 bp, Homo sapien
tgacgtgctatgatgtaaagccgtttctggtac

SEQ ID NO: 45834 - DNA, 33 bp, Homo sapien
tgacgtgctatgatgtgaagccgtttctggtac

SEQ ID NO: 45835 - DNA, 33 bp, Homo sapien
tttacatttttgccagaatgaaagataagcaaa

SEQ ID NO: 45836 - DNA, 33 bp, Homo sapien
tttacatttttgccagcatgaaagataagcaaa

SEQ ID NO: 45837 - DNA, 33 bp, Homo sapien
gtcttttcctatccacgaaacaacgttatctgc

SEQ ID NO: 45838 - DNA, 33 bp, Homo sapien
gtcttttcctatccactaaacaacgttatctgc

SEQ ID NO: 45839 - DNA, 33 bp, Homo sapien
gaaaggcatatacacaactcatccccccacatg

SEQ ID NO: 45840 - DNA, 33 bp, Homo sapien
gaaaggcatatacacacctcatccccccacatg

SEQ ID NO: 45841 - DNA, 33 bp, Homo sapien
tctgaagtcttaactgccagcagaaaaactcca

SEQ ID NO: 45842 - DNA, 33 bp, Homo sapien
tctgaagtcttaactgtcagcagaaaaactcca

SEQ ID NO: 45843 - DNA, 33 bp, Homo sapien; identical to SEQ ID NO: 45841

SEQ ID NO: 45844 - DNA, 33 bp, Homo sapien; identical to SEQ ID NO: 45842

SEQ ID NO: 45845 - DNA, 33 bp, Homo sapien
cacccacttgtaaatacgctatctctactctgc

SEQ ID NO: 45846 - DNA, 33 bp, Homo sapien
cacccacttgtaaatatgctatctctactctgc

SEQ ID NO: 45847 - DNA, 33 bp, Homo sapien
agccaaggctaccctacgcagaggaaataatat

SEQ ID NO: 45848 - DNA, 33 bp, Homo sapien
agccaaggctaccctatgcagaggaaataatat

SEQ ID NO: 45849 - DNA, 33 bp, Homo sapien
tttctacacaaggctagtaatgcctcccccttt

SEQ ID NO: 45850 - DNA, 33 bp, Homo sapien
tttctacacaaggctattaatgcctcccccttt

SEQ ID NO: 45851 - DNA, 33 bp, Homo sapien
tccatgtgttgtctctaactgatttagcttttt

SEQ ID NO: 45852 - DNA, 33 bp, Homo sapien
tccatgtgttgtctctcactgatttagcttttt

SEQ ID NO: 45853 - DNA, 33 bp, Homo sapien
tgacatagccatcacaaatcagggagtttacat

SEQ ID NO: 45854 - DNA, 33 bp, Homo sapien
tgacatagccatcacatatcagggagtttacat

SEQ ID NO: 45855 - DNA, 33 bp, Homo sapien
attggctaaaaggtctaaagcacaacctttgac

SEQ ID NO: 45856 - DNA, 33 bp, Homo sapien
attggctaaaaggtcttaagcacaacctttgac

SEQ ID NO: 45857 - DNA, 33 bp, Homo sapien
cagttaacgatcctgaacaattctctttatttc

SEQ ID NO: 45858 - DNA, 33 bp, Homo sapien
cagttaacgatcctgagcaattctctttatttc

SEQ ID NO: 45859 - DNA, 33 bp, Homo sapien
gatgaactggattaaactatatgcaacaacatg

SEQ ID NO: 45860 - DNA, 33 bp, Homo sapien
gatgaactggattaaattatatgcaacaacatg

SEQ ID NO: 45861 - DNA, 33 bp, Homo sapien
attaggaaggaaaatgaagaggatttctagata

SEQ ID NO: 45862 - DNA, 33 bp, Homo sapien
attaggaaggaaaatggagaggatttctagata

SEQ ID NO: 45863 - DNA, 33 bp, Homo sapien
aacaagggcccacacactgaagtcttcttcagc

SEQ ID NO: 45864 - DNA, 33 bp, Homo sapien
aacaagggcccacacattgaagtcttcttcagc

SEQ ID NO: 45865 - DNA, 33 bp, Homo sapien
gatggaggagttgggacagtgaccgatacttgg

SEQ ID NO: 45866 - DNA, 33 bp, Homo sapien
gatggaggagttgggagagtgaccgatacttgg

SEQ ID NO: 45867 - DNA, 33 bp, Homo sapien
gcaacacacctgctacactgaaattaacccaca

SEQ ID NO: 45868 - DNA, 33 bp, Homo sapien
gcaacacacctgctacgctgaaattaacccaca

SEQ ID NO: 45869 - DNA, 33 bp, Homo sapien
tttaagctaccaacataatatctctgagtgggg

SEQ ID NO: 45870 - DNA, 33 bp, Homo sapien
tttaagctaccaacatgatatctctgagtgggg

SEQ ID NO: 45871 - DNA, 33 bp, Homo sapien
agtggggagttgggaagaaatgttctagcacac

SEQ ID NO: 45872 - DNA, 33 bp, Homo sapien
agtggggagttgggaataaatgttctagcacac

SEQ ID NO: 45873 - DNA, 33 bp, Homo sapien
ctgttgcaatttctacaataacatgactgagct

SEQ ID NO: 45874 - DNA, 33 bp, Homo sapien
ctgttgcaatttctaccataacatgactgagct

SEQ ID NO: 45875 - DNA, 33 bp, Homo sapien
acacatgaatgaaagcaaaacaacaggccaggt

SEQ ID NO: 45876 - DNA, 33 bp, Homo sapien
acacatgaatgaaagctaaacaacaggccaggt

SEQ ID NO: 45877 - DNA, 33 bp, Homo sapien
acacgtgggactgtaaaattcactgtcaaattc

SEQ ID NO: 45878 - DNA, 33 bp, Homo sapien
acacgtgggactgtaagattcactgtcaaattc

SEQ ID NO: 45879 - DNA, 33 bp, Homo sapien
gaatcaggcaatatccaattagggtttgactta

SEQ ID NO: 45880 - DNA, 33 bp, Homo sapien
gaatcaggcaatatccgattagggtttgactta

SEQ ID NO: 45881 - DNA, 33 bp, Homo sapien
tttctcacatgggaaaccagtttagtccacttt

SEQ ID NO: 45882 - DNA, 33 bp, Homo sapien
tttctcacatgggaaatcagtttagtccacttt

SEQ ID NO: 45883 - DNA, 33 bp, Homo sapien
cctttgcataagcctacgaaattccacttgtcc

SEQ ID NO: 45884 - DNA, 33 bp, Homo sapien
cctttgcataagcctatgaaattccacttgtcc

SEQ ID NO: 45885 - DNA, 33 bp, Homo sapien
gtaagtgtttaacaaccggctctccagattaaa

SEQ ID NO: 45886 - DNA, 33 bp, Homo sapien
gtaagtgtttaacaactggctctccagattaaa

SEQ ID NO: 45887 - DNA, 33 bp, Homo sapien
actgtaaaatgtggaactggctgaatggagggc

SEQ ID NO: 45888 - DNA, 33 bp, Homo sapien
actgtaaaatgtggaattggctgaatggagggc

SEQ ID NO: 45889 - DNA, 33 bp, Homo sapien
tcagtctgtggtgttacggacaatggttatcta

SEQ ID NO: 45890 - DNA, 33 bp, Homo sapien
tcagtctgtggtgttatggacaatggttatcta

SEQ ID NO: 45891 - DNA, 33 bp, Homo sapien
acatacataaaccaacaagcagatgacaccttc

SEQ ID NO: 45892 - DNA, 33 bp, Homo sapien
acatacataaaccaacgagcagatgacaccttc

SEQ ID NO: 45893 - DNA, 33 bp, Homo sapien
caagataagtctacctaacagagttgttatgag

SEQ ID NO: 45894 - DNA, 33 bp, Homo sapien
caagataagtctaccttacagagttgttatgag

SEQ ID NO: 45895 - DNA, 33 bp, Homo sapien
tatttgccaccaaagacagtcttgtgagactaa

SEQ ID NO: 45896 - DNA, 33 bp, Homo sapien
tatttgccaccaaagagagtcttgtgagactaa

SEQ ID NO: 45897 - DNA, 33 bp, Homo sapien
ggtatagacttgtaaaactaggtcagagtatct

SEQ ID NO: 45898 - DNA, 33 bp, Homo sapien
ggtatagacttgtaaagctaggtcagagtatct

SEQ ID NO: 45899 - DNA, 33 bp, Homo sapien
agagtactctgggtagaacttgtattttccagt

SEQ ID NO: 45900 - DNA, 33 bp, Homo sapien
agagtactctgggtaggacttgtattttccagt

SEQ ID NO: 45901 - DNA, 33 bp, Homo sapien
ataagagagaggcttaccatattttatagacca

SEQ ID NO: 45902 - DNA, 33 bp, Homo sapien
ataagagagaggcttatcatattttatagacca

SEQ ID NO: 45903 - DNA, 33 bp, Homo sapien
cttgtttaaggaattacaggagcaacagatatc

SEQ ID NO: 45904 - DNA, 33 bp, Homo sapien
cttgtttaaggaattataggagcaacagatatc

SEQ ID NO: 45905 - DNA, 33 bp, Homo sapien
gccttccctgaaagtaacactagaagctagata

SEQ ID NO: 45906 - DNA, 33 bp, Homo sapien
gccttccctgaaagtagcactagaagctagata

SEQ ID NO: 45907 - DNA, 33 bp, Homo sapien
catttggaaatgtagcccaaggaaaaaatttag

SEQ ID NO: 45908 - DNA, 33 bp, Homo sapien
catttggaaatgtagctcaaggaaaaaatttag

SEQ ID NO: 45909 - DNA, 33 bp, Homo sapien
gcgacggaaccaacgcgctacctggcggccaga

SEQ ID NO: 45910 - DNA, 33 bp, Homo sapien
gcgacggaaccaacgctctacctggcggccaga

SEQ ID NO: 45911 - DNA, 33 bp, Homo sapien
acagaagcaggtcatgaactagaagtctacaag

SEQ ID NO: 45912 - DNA, 33 bp, Homo sapien
acagaagcaggtcatgtactagaagtctacaag

SEQ ID NO: 45913 - DNA, 33 bp, Homo sapien
ccaggccttcagccccaagtttagatatctggg

SEQ ID NO: 45914 - DNA, 33 bp, Homo sapien
ccaggccttcagccccgagtttagatatctggg

SEQ ID NO: 45915 - DNA, 33 bp, Homo sapien
ggtagattagatcctccctaagatttcctccaa

SEQ ID NO: 45916 - DNA, 33 bp, Homo sapien
ggtagattagatcctctctaagatttcctccaa

SEQ ID NO: 45917 - DNA, 33 bp, Homo sapien
agtggctccccagaaaagcagctgcaggtagac

SEQ ID NO: 45918 - DNA, 33 bp, Homo sapien
agtggctccccagaaacgcagctgcaggtagac

SEQ ID NO: 45919 - DNA, 33 bp, Homo sapien
aaagttgctgtctcaacgctagctgtcaagaga

SEQ ID NO: 45920 - DNA, 33 bp, Homo sapien
aaagttgctgtctcaatgctagctgtcaagaga

SEQ ID NO: 45921 - DNA, 33 bp, Homo sapien
agggttccctaaactccatgtacagggccgcca

SEQ ID NO: 45922 - DNA, 33 bp, Homo sapien
agggttccctaaactctatgtacagggccgcca

SEQ ID NO: 45923 - DNA, 33 bp, Homo sapien
ttaccaaactgactcaatcgccaccaattttgt

SEQ ID NO: 45924 - DNA, 33 bp, Homo sapien
ttaccaaactgactcagtcgccaccaattttgt

SEQ ID NO: 45925 - DNA, 33 bp, Homo sapien
cattcggaggaaataaagccgtgagcaccggtt

SEQ ID NO: 45926 - DNA, 33 bp, Homo sapien
cattcggaggaaataaggccgtgagcaccggtt

SEQ ID NO: 45927 - DNA, 33 bp, Homo sapien
tgactctaccattgtcaaggttgcccctatgct

SEQ ID NO: 45928 - DNA, 33 bp, Homo sapien
tgactctaccattgtctaggttgcccctatgct

SEQ ID NO: 45929 - DNA, 33 bp, Homo sapien
taggaagaagggggatcaattttgaggagactg

SEQ ID NO: 45930 - DNA, 33 bp, Homo sapien
taggaagaagggggatgaattttgaggagactg

SEQ ID NO: 45931 - DNA, 33 bp, Homo sapien
ttgctctttacacaaacaagcaaaaaaaccagt

SEQ ID NO: 45932 - DNA, 33 bp, Homo sapien
ttgctctttacacaaataagcaaaaaaaccagt

SEQ ID NO: 45933 - DNA, 33 bp, Homo sapien
cttcctagactcaaccaagactggcccccacta

SEQ ID NO: 45934 - DNA, 33 bp, Homo sapien
cttcctagactcaaccgagactggcccccacta

SEQ ID NO: 45935 - DNA, 33 bp, Homo sapien
ggtgaaggtaagagaaacatctgtataggaggc

SEQ ID NO: 45936 - DNA, 33 bp, Homo sapien
ggtgaaggtaagagaagcatctgtataggaggc

SEQ ID NO: 45937 - DNA, 33 bp, Homo sapien
ctcattcaggcagctacatggattcagtcattc

SEQ ID NO: 45938 - DNA, 33 bp, Homo sapien
ctcattcaggcagctagatggattcagtcattc

SEQ ID NO: 45939 - DNA, 33 bp, Homo sapien
attgcctctgcacttacatgtataggttttttt

SEQ ID NO: 45940 - DNA, 33 bp, Homo sapien
attgcctctgcacttatatgtataggttttttt

SEQ ID NO: 45941 - DNA, 33 bp, Homo sapien
cacaggactggataaaaggccttagaaccagtt

SEQ ID NO: 45942 - DNA, 33 bp, Homo sapien
cacaggactggataaagggccttagaaccagtt

SEQ ID NO: 45943 - DNA, 33 bp, Homo sapien
ccttcagaacaaaacccaggtgctaaaagaact

SEQ ID NO: 45944 - DNA, 33 bp, Homo sapien
ccttcagaacaaaacctaggtgctaaaagaact

SEQ ID NO: 45945 - DNA, 33 bp, Homo sapien
tagatactccacataccggtaaaaaggaatttc

SEQ ID NO: 45946 - DNA, 33 bp, Homo sapien
tagatactccacatactggtaaaaaggaatttc

SEQ ID NO: 45947 - DNA, 33 bp, Homo sapien
cgggcatccctgctaacacctgctcgaaggagt

SEQ ID NO: 45948 - DNA, 33 bp, Homo sapien
cgggcatccctgctaatacctgctcgaaggagt

SEQ ID NO: 45949 - DNA, 33 bp, Homo sapien
tcctgatcataaattacccagacagtagacaaa

SEQ ID NO: 45950 - DNA, 33 bp, Homo sapien
tcctgatcataaattatccagacagtagacaaa

SEQ ID NO: 45951 - DNA, 33 bp, Homo sapien
ccacatgctttcttctcacatgcccagttgcac

SEQ ID NO: 45952 - DNA, 33 bp, Homo sapien
ccacatgctttcttctgacatgcccagttgcac

SEQ ID NO: 45953 - DNA, 33 bp, Homo sapien
gtctcacccttcttgacctgatttttggagccg

SEQ ID NO: 45954 - DNA, 33 bp, Homo sapien
gtctcacccttcttgatctgatttttggagccg

SEQ ID NO: 45955 - DNA, 33 bp, Homo sapien
gtagctctcagaaggcacgagaagagaaggcac

SEQ ID NO: 45956 - DNA, 33 bp, Homo sapien
gtagctctcagaaggcgcgagaagagaaggcac

SEQ ID NO: 45957 - DNA, 33 bp, Homo sapien
ttagtttaatgccaaaatattcctgcttttttc

SEQ ID NO: 45958 - DNA, 33 bp, Homo sapien
ttagtttaatgccaaattattcctgcttttttc

SEQ ID NO: 45959 - DNA, 33 bp, Homo sapien
gaccttcatgaaattcaaattaccatctcaaag

SEQ ID NO: 45960 - DNA, 33 bp, Homo sapien
gaccttcatgaaattctaattaccatctcaaag

SEQ ID NO: 45961 - DNA, 33 bp, Homo sapien
cattcagtagttttgaatacactctgagtgaca

SEQ ID NO: 45962 - DNA, 33 bp, Homo sapien
cattcagtagttttgagtacactctgagtgaca

SEQ ID NO: 45963 - DNA, 33 bp, Homo sapien
gcagagactcaggagacagcataactgatgcag

SEQ ID NO: 45964 - DNA, 33 bp, Homo sapien
gcagagactcaggagagagcataactgatgcag

SEQ ID NO: 45965 - DNA, 33 bp, Homo sapien
accaaaggactccagacagatcagcaatcaaca

SEQ ID NO: 45966 - DNA, 33 bp, Homo sapien
accaaaggactccagagagatcagcaatcaaca

SEQ ID NO: 45967 - DNA, 33 bp, Homo sapien
aaagtaaggcactgaaaaaacttgcttgtactg

SEQ ID NO: 45968 - DNA, 33 bp, Homo sapien
aaagtaaggcactgaagaaacttgcttgtactg

SEQ ID NO: 45969 - DNA, 33 bp, Homo sapien
ttttagcccttgatgacggccctgaaggcctgt

SEQ ID NO: 45970 - DNA, 33 bp, Homo sapien
ttttagcccttgatgatggccctgaaggcctgt

SEQ ID NO: 45971 - DNA, 33 bp, Homo sapien
gtttgcaatgacatggaagtgaatacggcagga

SEQ ID NO: 45972 - DNA, 33 bp, Homo sapien
gtttgcaatgacatggtagtgaatacggcagga

SEQ ID NO: 45973 - DNA, 33 bp, Homo sapien
gcagagtataaggaggaccatagtgggaggcgc

SEQ ID NO: 45974 - DNA, 33 bp, Homo sapien
gcagagtataaggagggccatagtgggaggcgc

SEQ ID NO: 45975 - DNA, 33 bp, Homo sapien
agtttttgaatgaatgaataaatacggccagtt

SEQ ID NO: 45976 - DNA, 33 bp, Homo sapien
agtttttgaatgaatggataaatacggccagtt

SEQ ID NO: 45977 - DNA, 33 bp, Homo sapien
caggcattattcgaccaatttggtaaataggaa

SEQ ID NO: 45978 - DNA, 33 bp, Homo sapien
caggcattattcgacccatttggtaaataggaa

SEQ ID NO: 45979 - DNA, 33 bp, Homo sapien
cttagtcacggtagcaaaaaaaatgaaagcgct

SEQ ID NO: 45980 - DNA, 33 bp, Homo sapien
cttagtcacggtagcagaaaaaatgaaagcgct

SEQ ID NO: 45981 - DNA, 33 bp, Homo sapien
aggaatcgggagtggacggaatgcggtaaaact

SEQ ID NO: 45982 - DNA, 33 bp, Homo sapien
aggaatcgggagtggatggaatgcggtaaaact

SEQ ID NO: 45983 - DNA, 33 bp, Homo sapien
cttcagctaagatgaacctaaggtgaaatgagt

SEQ ID NO: 45984 - DNA, 33 bp, Homo sapien
cttcagctaagatgaatctaaggtgaaatgagt

SEQ ID NO: 45985 - DNA, 33 bp, Homo sapien
acatctgaaaacaaccaaggatccatctgggct

SEQ ID NO: 45986 - DNA, 33 bp, Homo sapien
acatctgaaaacaaccgaggatccatctgggct

SEQ ID NO: 45987 - DNA, 33 bp, Homo sapien
taagaatagtgcctaaaattctgtcttgggcag

SEQ ID NO: 45988 - DNA, 33 bp, Homo sapien
taagaatagtgcctaagattctgtcttgggcag

SEQ ID NO: 45989 - DNA, 33 bp, Homo sapien
gttttagcagttttgccctcaggaagaatacaa

SEQ ID NO: 45990 - DNA, 33 bp, Homo sapien
gttttagcagttttgctctcaggaagaatacaa

SEQ ID NO: 45991 - DNA, 33 bp, Homo sapien
gaaagctttgaagtccagaaaatgcaaatacag

SEQ ID NO: 45992 - DNA, 33 bp, Homo sapien
gaaagctttgaagtcccgaaaatgcaaatacag

SEQ ID NO: 45993 - DNA, 33 bp, Homo sapien
ctttgaaaattccagacatagcaatggatttta

SEQ ID NO: 45994 - DNA, 33 bp, Homo sapien
ctttgaaaattccagatatagcaatggatttta

SEQ ID NO: 45995 - DNA, 33 bp, Homo sapien
aagaatttgtgattaaataaacatggataaagc

SEQ ID NO: 45996 - DNA, 33 bp, Homo sapien
aagaatttgtgattaagtaaacatggataaagc

SEQ ID NO: 45997 - DNA, 33 bp, Homo sapien
ttgttttcactgatacactgatggttcaaaagc

SEQ ID NO: 45998 - DNA, 33 bp, Homo sapien
ttgttttcactgatacgctgatggttcaaaagc

SEQ ID NO: 45999 - DNA, 33 bp, Homo sapien
ccagatcaggtctggaaagtcttcagaagtatt

SEQ ID NO: 46000 - DNA, 33 bp, Homo sapien
ccagatcaggtctggagagtcttcagaagtatt

SEQ ID NO: 46001 - DNA, 33 bp, Homo sapien
atttcatttcatcagtaaagctttgtgtggaag

SEQ ID NO: 46002 - DNA, 33 bp, Homo sapien
atttcatttcatcagtgaagctttgtgtggaag

SEQ ID NO: 46003 - DNA, 33 bp, Homo sapien
cttttgtcatagaaagcctgtaagaccattcac

SEQ ID NO: 46004 - DNA, 33 bp, Homo sapien
cttttgtcatagaaaggctgtaagaccattcac

SEQ ID NO: 46005 - DNA, 33 bp, Homo sapien
gactatagaggtacaccggtccccaaagactgg

SEQ ID NO: 46006 - DNA, 33 bp, Homo sapien
gactatagaggtacactggtccccaaagactgg

SEQ ID NO: 46007 - DNA, 33 bp, Homo sapien
atgcttctttaaaatagcaggttccagagttaa

SEQ ID NO: 46008 - DNA, 33 bp, Homo sapien
atgcttctttaaaatatcaggttccagagttaa

SEQ ID NO: 46009 - DNA, 33 bp, Homo sapien
gcccagcaacgtaaacgaagtcaatctcttttt

SEQ ID NO: 46010 - DNA, 33 bp, Homo sapien
gcccagcaacgtaaactaagtcaatctcttttt

SEQ ID NO: 46011 - DNA, 33 bp, Homo sapien
cagagcctagcaccaaactggaggatgagcctc

SEQ ID NO: 46012 - DNA, 33 bp, Homo sapien
cagagcctagcaccaacctggaggatgagcctc

SEQ ID NO: 46013 - DNA, 33 bp, Homo sapien
taatcattacactacaatgatttccaaaagaca

SEQ ID NO: 46014 - DNA, 33 bp, Homo sapien
taatcattacactacagtgatttccaaaagaca

SEQ ID NO: 46015 - DNA, 33 bp, Homo sapien
cataaggtcctaagtacagtgtctatcatacag

SEQ ID NO: 46016 - DNA, 33 bp, Homo sapien
cataaggtcctaagtatagtgtctatcatacag

SEQ ID NO: 46017 - DNA, 33 bp, Homo sapien
ccctggtccaagaggcacttcatgttctggagc

SEQ ID NO: 46018 - DNA, 33 bp, Homo sapien
ccctggtccaagaggcgcttcatgttctggagc

SEQ ID NO: 46019 - DNA, 33 bp, Homo sapien
acaggtcctggagaaaataaaggaagaagtaca

SEQ ID NO: 46020 - DNA, 33 bp, Homo sapien
acaggtcctggagaaagtaaaggaagaagtaca

SEQ ID NO: 46021 - DNA, 33 bp, Homo sapien
caggcatgtgacaagaacagggtctgagagagg

SEQ ID NO: 46022 - DNA, 33 bp, Homo sapien
caggcatgtgacaagagcagggtctgagagagg

SEQ ID NO: 46023 - DNA, 33 bp, Homo sapien
tggagagactttgacaaaacaggtcagcacaat

SEQ ID NO: 46024 - DNA, 33 bp, Homo sapien
tggagagactttgacagaacaggtcagcacaat

SEQ ID NO: 46025 - DNA, 33 bp, Homo sapien
gtaaaataagtctcaaattcagcctagaaaaaa

SEQ ID NO: 46026 - DNA, 33 bp, Homo sapien
gtaaaataagtctcaagttcagcctagaaaaaa

SEQ ID NO: 46027 - DNA, 33 bp, Homo sapien
ctacattctgactccgcaagaaacatctgttca

SEQ ID NO: 46028 - DNA, 33 bp, Homo sapien
ctacattctgactccggaagaaacatctgttca

SEQ ID NO: 46029 - DNA, 33 bp, Homo sapien
tctgcagttctgaaaaacactggctccttgtac

SEQ ID NO: 46030 - DNA, 33 bp, Homo sapien
tctgcagttctgaaaaccactggctccttgtac

SEQ ID NO: 46031 - DNA, 33 bp, Homo sapien
tgcgtggcaaaagaacagatgtctatgacatta

SEQ ID NO: 46032 - DNA, 33 bp, Homo sapien
tgcgtggcaaaagaacggatgtctatgacatta

SEQ ID NO: 46033 - DNA, 33 bp, Homo sapien
tattagagtccccttacgatcaggaccatcaca

SEQ ID NO: 46034 - DNA, 33 bp, Homo sapien
tattagagtccccttatgatcaggaccatcaca

SEQ ID NO: 46035 - DNA, 33 bp, Homo sapien
ggcaacccacagagcaaaagaaattcactatat

SEQ ID NO: 46036 - DNA, 33 bp, Homo sapien
ggcaacccacagagcagaagaaattcactatat

SEQ ID NO: 46037 - DNA, 33 bp, Homo sapien
cattaccattgtgtgacgatcacctacagtatt

SEQ ID NO: 46038 - DNA, 33 bp, Homo sapien
cattaccattgtgtgatgatcacctacagtatt

SEQ ID NO: 46039 - DNA, 33 bp, Homo sapien
gggactatgtcgcgccaatcacaaagggagtgg

SEQ ID NO: 46040 - DNA, 33 bp, Homo sapien
gggactatgtcgcgcccatcacaaagggagtgg

SEQ ID NO: 46041 - DNA, 33 bp, Homo sapien
taataccaggtattgcaccagacactggagact

SEQ ID NO: 46042 - DNA, 33 bp, Homo sapien
taataccaggtattgcgccagacactggagact

SEQ ID NO: 46043 - DNA, 33 bp, Homo sapien
gtaaatctagaagcaacaggtagatggttccag

SEQ ID NO: 46044 - DNA, 33 bp, Homo sapien
gtaaatctagaagcaataggtagatggttccag

SEQ ID NO: 46045 - DNA, 33 bp, Homo sapien
agcatcatcagggatcacctagtctaagagagg

SEQ ID NO: 46046 - DNA, 33 bp, Homo sapien
agcatcatcagggatcgcctagtctaagagagg

SEQ ID NO: 46047 - DNA, 33 bp, Homo sapien
agatcactttgcgaacactctgtgaagatcccc

SEQ ID NO: 46048 - DNA, 33 bp, Homo sapien
agatcactttgcgaacgctctgtgaagatcccc

SEQ ID NO: 46049 - DNA, 33 bp, Homo sapien
tcctagagtttagttacgccacaaccaaagaga

SEQ ID NO: 46050 - DNA, 33 bp, Homo sapien
tcctagagtttagttatgccacaaccaaagaga

SEQ ID NO: 46051 - DNA, 33 bp, Homo sapien
ttccttcttactcatcccgtgccatctaccctt

SEQ ID NO: 46052 - DNA, 33 bp, Homo sapien
ttccttcttactcatctcgtgccatctaccctt

SEQ ID NO: 46053 - DNA, 33 bp, Homo sapien
aatacagacagttttacatccatatccaccaca

SEQ ID NO: 46054 - DNA, 33 bp, Homo sapien
aatacagacagttttatatccatatccaccaca

SEQ ID NO: 46055 - DNA, 33 bp, Homo sapien
aatcaattttatgaaacgcacatttgtgaaaaa

SEQ ID NO: 46056 - DNA, 33 bp, Homo sapien
aatcaattttatgaaatgcacatttgtgaaaaa

SEQ ID NO: 46057 - DNA, 33 bp, Homo sapien
gaagaaaggctcatcaaagtttgaattttatga

SEQ ID NO: 46058 - DNA, 33 bp, Homo sapien
gaagaaaggctcatcagagtttgaattttatga

SEQ ID NO: 46059 - DNA, 33 bp, Homo sapien
atgtcctttaacaaaacaggattacatacagca

SEQ ID NO: 46060 - DNA, 33 bp, Homo sapien
atgtcctttaacaaaataggattacatacagca

SEQ ID NO: 46061 - DNA, 33 bp, Homo sapien
tgagaggaggtggaaaatatgctcagtgtcagg

SEQ ID NO: 46062 - DNA, 33 bp, Homo sapien
tgagaggaggtggaaattatgctcagtgtcagg

SEQ ID NO: 46063 - DNA, 33 bp, Homo sapien
taggcaggtggaggaccgagagtgaaatagaga

SEQ ID NO: 46064 - DNA, 33 bp, Homo sapien
taggcaggtggaggacggagagtgaaatagaga

SEQ ID NO: 46065 - DNA, 33 bp, Homo sapien
gagaatgcctgctcaaagcctgagtggaatgtc

SEQ ID NO: 46066 - DNA, 33 bp, Homo sapien
gagaatgcctgctcaaggcctgagtggaatgtc

SEQ ID NO: 46067 - DNA, 33 bp, Homo sapien
agtgctgcttcaatgaataccttagacgtttac

SEQ ID NO: 46068 - DNA, 33 bp, Homo sapien
agtgctgcttcaatgagtaccttagacgtttac

SEQ ID NO: 46069 - DNA, 33 bp, Homo sapien
gagcccatgttaaataccatcaaactattccta

SEQ ID NO: 46070 - DNA, 33 bp, Homo sapien
gagcccatgttaaatagcatcaaactattccta

SEQ ID NO: 46071 - DNA, 33 bp, Homo sapien
atccaacagagtttgaactccttgaggcaagag

SEQ ID NO: 46072 - DNA, 33 bp, Homo sapien
atccaacagagtttgagctccttgaggcaagag

SEQ ID NO: 46073 - DNA, 33 bp, Homo sapien
ttggtgaccgatttgaatatgtagcacatgaca

SEQ ID NO: 46074 - DNA, 33 bp, Homo sapien
ttggtgaccgatttgactatgtagcacatgaca

SEQ ID NO: 46075 - DNA, 33 bp, Homo sapien
caaaacaaaacacacacaatacctggcaaggaa

SEQ ID NO: 46076 - DNA, 33 bp, Homo sapien
caaaacaaaacacacagaatacctggcaaggaa

SEQ ID NO: 46077 - DNA, 33 bp, Homo sapien
tctcagctacgccggacgactgcgggagttcaa

SEQ ID NO: 46078 - DNA, 33 bp, Homo sapien
tctcagctacgccggatgactgcgggagttcaa

SEQ ID NO: 46079 - DNA, 33 bp, Homo sapien
atataatgtaaacgggaataactgcatagtact

SEQ ID NO: 46080 - DNA, 33 bp, Homo sapien
atataatgtaaacggggataactgcatagtact

SEQ ID NO: 46081 - DNA, 33 bp, Homo sapien
ttaaatgataaagtaaaccttagcgatgcatat

SEQ ID NO: 46082 - DNA, 33 bp, Homo sapien
ttaaatgataaagtaagccttagcgatgcatat

SEQ ID NO: 46083 - DNA, 33 bp, Homo sapien
atggtcttacctaagccgagagagaactctgga

SEQ ID NO: 46084 - DNA, 33 bp, Homo sapien
atggtcttacctaagctgagagagaactctgga

SEQ ID NO: 46085 - DNA, 33 bp, Homo sapien
ccagctaagatgcctccctactttatagggttg

SEQ ID NO: 46086 - DNA, 33 bp, Homo sapien
ccagctaagatgcctctctactttatagggttg

SEQ ID NO: 46087 - DNA, 33 bp, Homo sapien
gagaccttagtctatacgccaggttgcaatgtc

SEQ ID NO: 46088 - DNA, 33 bp, Homo sapien
gagaccttagtctatatgccaggttgcaatgtc

SEQ ID NO: 46089 - DNA, 33 bp, Homo sapien
acagaccccggccctcacaaactctgatgttac

SEQ ID NO: 46090 - DNA, 33 bp, Homo sapien
acagaccccggccctcgcaaactctgatgttac

SEQ ID NO: 46091 - DNA, 33 bp, Homo sapien
tggtgaatgaacagaacgtggagcagccagcct

SEQ ID NO: 46092 - DNA, 33 bp, Homo sapien
tggtgaatgaacagaaggtggagcagccagcct

SEQ ID NO: 46093 - DNA, 33 bp, Homo sapien
gaccccctgatgcttccacgtgctcctcatctg

SEQ ID NO: 46094 - DNA, 33 bp, Homo sapien
gaccccctgatgcttctacgtgctcctcatctg

SEQ ID NO: 46095 - DNA, 33 bp, Homo sapien
aaacaatcctaagtgccaactactacacatgga

SEQ ID NO: 46096 - DNA, 33 bp, Homo sapien
aaacaatcctaagtgctaactactacacatgga

SEQ ID NO: 46097 - DNA, 33 bp, Homo sapien
aactggttgctcttcactcatggtcaaggagag

SEQ ID NO: 46098 - DNA, 33 bp, Homo sapien
aactggttgctcttcattcatggtcaaggagag

SEQ ID NO: 46099 - DNA, 33 bp, Homo sapien
catgggctgaactttacgtgagtgagaaataca

SEQ ID NO: 46100 - DNA, 33 bp, Homo sapien
catgggctgaactttatgtgagtgagaaataca

SEQ ID NO: 46101 - DNA, 33 bp, Homo sapien
ggtacacatttctaagaagaaaagatttgctgt

SEQ ID NO: 46102 - DNA, 33 bp, Homo sapien
ggtacacatttctaaggagaaaagatttgctgt

SEQ ID NO: 46103 - DNA, 33 bp, Homo sapien
aggctgagaacagaacaggagtgaccatcctta

SEQ ID NO: 46104 - DNA, 33 bp, Homo sapien
aggctgagaacagaacgggagtgaccatcctta

SEQ ID NO: 46105 - DNA, 33 bp, Homo sapien
tgctcaagatcaaacaggtagtgagctgtggga

SEQ ID NO: 46106 - DNA, 33 bp, Homo sapien
tgctcaagatcaaacatgtagtgagctgtggga

SEQ ID NO: 46107 - DNA, 33 bp, Homo sapien
cgtcacctgctcatacaccagtcacaactgtag

SEQ ID NO: 46108 - DNA, 33 bp, Homo sapien
cgtcacctgctcatacgccagtcacaactgtag

SEQ ID NO: 46109 - DNA, 33 bp, Homo sapien
ctcctagcagagaagtaaaagttgacctcgacc

SEQ ID NO: 46110 - DNA, 33 bp, Homo sapien
ctcctagcagagaagtgaaagttgacctcgacc

SEQ ID NO: 46111 - DNA, 33 bp, Homo sapien
ggccactttcctgttaagaagcatattaaatga

SEQ ID NO: 46112 - DNA, 33 bp, Homo sapien
ggccactttcctgttacgaagcatattaaatga

SEQ ID NO: 46113 - DNA, 33 bp, Homo sapien
tactcacacacgtctacacaatatacacacaag

SEQ ID NO: 46114 - DNA, 33 bp, Homo sapien
tactcacacacgtctatacaatatacacacaag

SEQ ID NO: 46115 - DNA, 33 bp, Homo sapien
tactctcttgaagtataaatgtggtgtattaca

SEQ ID NO: 46116 - DNA, 33 bp, Homo sapien
tactctcttgaagtattaatgtggtgtattaca

SEQ ID NO: 46117 - DNA, 33 bp, Homo sapien
gcccaactccagttctcaagttgcaagggccca

SEQ ID NO: 46118 - DNA, 33 bp, Homo sapien
gcccaactccagttcttaagttgcaagggccca

SEQ ID NO: 46119 - DNA, 33 bp, Homo sapien
accttatgaggtattgaagattaggaccacaac

SEQ ID NO: 46120 - DNA, 33 bp, Homo sapien
accttatgaggtattggagattaggaccacaac

SEQ ID NO: 46121 - DNA, 33 bp, Homo sapien
gagcagtaagctgttaccagcaatttgttgtta

SEQ ID NO: 46122 - DNA, 33 bp, Homo sapien
gagcagtaagctgttatcagcaatttgttgtta

SEQ ID NO: 46123 - DNA, 33 bp, Homo sapien
gccaaaagaaaatgtcaatctaaaatcatgctc

SEQ ID NO: 46124 - DNA, 33 bp, Homo sapien
gccaaaagaaaatgtcgatctaaaatcatgctc

SEQ ID NO: 46125 - DNA, 33 bp, Homo sapien
gttgaataatgaagtacaacatcgttcctaaaa

SEQ ID NO: 46126 - DNA, 33 bp, Homo sapien
gttgaataatgaagtataacatcgttcctaaaa

SEQ ID NO: 46127 - DNA, 33 bp, Homo sapien
ttcagcccaacactcaagtgattgtgactctaa

SEQ ID NO: 46128 - DNA, 33 bp, Homo sapien
ttcagcccaacactcatgtgattgtgactctaa

SEQ ID NO: 46129 - DNA, 33 bp, Homo sapien
ttacaaacgtggaaaaagatacagatgagaaga

SEQ ID NO: 46130 - DNA, 33 bp, Homo sapien
ttacaaacgtggaaaaggatacagatgagaaga

SEQ ID NO: 46131 - DNA, 33 bp, Homo sapien
tcattattgtcattcaatctgaagaatttttta

SEQ ID NO: 46132 - DNA, 33 bp, Homo sapien
tcattattgtcattcagtctgaagaatttttta

SEQ ID NO: 46133 - DNA, 33 bp, Homo sapien
cctcataaaggaaaaacgtgctgtatcattcaa

SEQ ID NO: 46134 - DNA, 33 bp, Homo sapien
cctcataaaggaaaaaggtgctgtatcattcaa

SEQ ID NO: 46135 - DNA, 33 bp, Homo sapien
ttcttttcttcctaacactgtccactataatta

SEQ ID NO: 46136 - DNA, 33 bp, Homo sapien
ttcttttcttcctaacgctgtccactataatta

SEQ ID NO: 46137 - DNA, 33 bp, Homo sapien
cagttctgtagattagaagtccaaactgggttt

SEQ ID NO: 46138 - DNA, 33 bp, Homo sapien
cagttctgtagattaggagtccaaactgggttt

SEQ ID NO: 46139 - DNA, 33 bp, Homo sapien
agaactgcatggacgaccaagcatgtagagacc

SEQ ID NO: 46140 - DNA, 33 bp, Homo sapien
agaactgcatggacgatcaagcatgtagagacc

SEQ ID NO: 46141 - DNA, 33 bp, Homo sapien
atagaaaagcaagaacccaatactgagcattac

SEQ ID NO: 46142 - DNA, 33 bp, Homo sapien
atagaaaagcaagaactcaatactgagcattac

SEQ ID NO: 46143 - DNA, 33 bp, Homo sapien
gtccttgaatcaggaaaatggctctggtcaaac

SEQ ID NO: 46144 - DNA, 33 bp, Homo sapien
gtccttgaatcaggaagatggctctggtcaaac

SEQ ID NO: 46145 - DNA, 33 bp, Homo sapien
gctcaggcagaaatacagtaagttcaactgaat

SEQ ID NO: 46146 - DNA, 33 bp, Homo sapien
gctcaggcagaaataccgtaagttcaactgaat

SEQ ID NO: 46147 - DNA, 33 bp, Homo sapien
acttcttcacagctaggatatgtctctaccaga

SEQ ID NO: 46148 - DNA, 33 bp, Homo sapien
acttcttcacagctagtatatgtctctaccaga

SEQ ID NO: 46149 - DNA, 33 bp, Homo sapien
agtactaccctctgtactaatgaccctccatga

SEQ ID NO: 46150 - DNA, 33 bp, Homo sapien
agtactaccctctgtattaatgaccctccatga

SEQ ID NO: 46151 - DNA, 33 bp, Homo sapien
catacattttatagacaagaaccatttaataat

SEQ ID NO: 46152 - DNA, 33 bp, Homo sapien
catacattttatagacgagaaccatttaataat

SEQ ID NO: 46153 - DNA, 33 bp, Homo sapien
tgctgtaaagttcagaagatggctgaaaatttt

SEQ ID NO: 46154 - DNA, 33 bp, Homo sapien
tgctgtaaagttcagacgatggctgaaaatttt

SEQ ID NO: 46155 - DNA, 33 bp, Homo sapien
gggtaagtagagtagaatcctaggcactgagaa

SEQ ID NO: 46156 - DNA, 33 bp, Homo sapien
gggtaagtagagtagattcctaggcactgagaa

SEQ ID NO: 46157 - DNA, 33 bp, Homo sapien
gatgcctgcgctgaacaaatatacactaataga

SEQ ID NO: 46158 - DNA, 33 bp, Homo sapien
gatgcctgcgctgaacgaatatacactaataga

SEQ ID NO: 46159 - DNA, 33 bp, Homo sapien
actgtgagaaaacagactaatacagacgtgatc

SEQ ID NO: 46160 - DNA, 33 bp, Homo sapien
actgtgagaaaacagattaatacagacgtgatc

SEQ ID NO: 46161 - DNA, 33 bp, Homo sapien
tcaaataacacagtaacaagcacaaagcctgtt

SEQ ID NO: 46162 - DNA, 33 bp, Homo sapien
tcaaataacacagtaataagcacaaagcctgtt

SEQ ID NO: 46163 - DNA, 33 bp, Homo sapien
gttcagcaatgccctaccataaaatagaagtgg

SEQ ID NO: 46164 - DNA, 33 bp, Homo sapien
gttcagcaatgccctatcataaaatagaagtgg

SEQ ID NO: 46165 - DNA, 33 bp, Homo sapien
tgctgagtcaaacagcacattaaagtacagtga

SEQ ID NO: 46166 - DNA, 33 bp, Homo sapien
tgctgagtcaaacagctcattaaagtacagtga

SEQ ID NO: 46167 - DNA, 33 bp, Homo sapien
ataaattattttggcaccaacattatccataga

SEQ ID NO: 46168 - DNA, 33 bp, Homo sapien
ataaattattttggcagcaacattatccataga

SEQ ID NO: 46169 - DNA, 33 bp, Homo sapien
ataaaagtgaatcccaaccctgttttatctttt

SEQ ID NO: 46170 - DNA, 33 bp, Homo sapien
ataaaagtgaatcccatccctgttttatctttt

SEQ ID NO: 46171 - DNA, 33 bp, Homo sapien
gcactcaagcagacacacatatttagaaaagaa

SEQ ID NO: 46172 - DNA, 33 bp, Homo sapien
gcactcaagcagacacgcatatttagaaaagaa

SEQ ID NO: 46173 - DNA, 33 bp, Homo sapien
gatgcagcattatttacaatagctaaaacctaa

SEQ ID NO: 46174 - DNA, 33 bp, Homo sapien
gatgcagcattatttagaatagctaaaacctaa

SEQ ID NO: 46175 - DNA, 33 bp, Homo sapien
attcctaaccgcaaggaactctgggaaataaag

SEQ ID NO: 46176 - DNA, 33 bp, Homo sapien
attcctaaccgcaagggactctgggaaataaag

SEQ ID NO: 46177 - DNA, 33 bp, Homo sapien
agtcaacaaatgaacaatgtaaaacaaaccata

SEQ ID NO: 46178 - DNA, 33 bp, Homo sapien
agtcaacaaatgaacagtgtaaaacaaaccata

SEQ ID NO: 46179 - DNA, 33 bp, Homo sapien
attttcaacaaaagtgcactgccccgtgtataa

SEQ ID NO: 46180 - DNA, 33 bp, Homo sapien
attttcaacaaaagtgtactgccccgtgtataa

SEQ ID NO: 46181 - DNA, 33 bp, Homo sapien
taaggcagaactaggaaaaccaatcaggagagg

SEQ ID NO: 46182 - DNA, 33 bp, Homo sapien
taaggcagaactaggagaaccaatcaggagagg

SEQ ID NO: 46183 - DNA, 33 bp, Homo sapien
cactttgctatgaaaaatggattcagacattgc

SEQ ID NO: 46184 - DNA, 33 bp, Homo sapien
cactttgctatgaaaattggattcagacattgc

SEQ ID NO: 46185 - DNA, 33 bp, Homo sapien
ttcaggcttggagtctaacttctctaattgttc

SEQ ID NO: 46186 - DNA, 33 bp, Homo sapien
ttcaggcttggagtctgacttctctaattgttc

SEQ ID NO: 46187 - DNA, 33 bp, Homo sapien
accaactcaaagaatgaaaggattctagaaaca

SEQ ID NO: 46188 - DNA, 33 bp, Homo sapien
accaactcaaagaatggaaggattctagaaaca

SEQ ID NO: 46189 - DNA, 33 bp, Homo sapien
gtgttcaactatgaaccgaacagtagatagagt

SEQ ID NO: 46190 - DNA, 33 bp, Homo sapien
gtgttcaactatgaacggaacagtagatagagt

SEQ ID NO: 46191 - DNA, 33 bp, Homo sapien
tcataagtatctaaaaaagtgaccagggcagta

SEQ ID NO: 46192 - DNA, 33 bp, Homo sapien
tcataagtatctaaaagagtgaccagggcagta

SEQ ID NO: 46193 - DNA, 33 bp, Homo sapien
cgaatcacacacactaaaaaccctgggtgacag

SEQ ID NO: 46194 - DNA, 33 bp, Homo sapien
cgaatcacacacactagaaaccctgggtgacag

SEQ ID NO: 46195 - DNA, 33 bp, Homo sapien
agttgaactgtgataaccagaatttctaaaatg

SEQ ID NO: 46196 - DNA, 33 bp, Homo sapien
agttgaactgtgataagcagaatttctaaaatg

SEQ ID NO: 46197 - DNA, 33 bp, Homo sapien
tcacacttggtatagaagatttagatgagattt

SEQ ID NO: 46198 - DNA, 33 bp, Homo sapien
tcacacttggtatagacgatttagatgagattt

SEQ ID NO: 46199 - DNA, 33 bp, Homo sapien
ttccccagttccaagagtcaaggacacacctgt

SEQ ID NO: 46200 - DNA, 33 bp, Homo sapien
ttccccagttccaagattcaaggacacacctgt

SEQ ID NO: 46201 - DNA, 33 bp, Homo sapien
gtgagtaaacaataacaataagtgacaactctc

SEQ ID NO: 46202 - DNA, 33 bp, Homo sapien
gtgagtaaacaataacgataagtgacaactctc

SEQ ID NO: 46203 - DNA, 33 bp, Homo sapien
aaatgagtaatccataaccccatctctactctt

SEQ ID NO: 46204 - DNA, 33 bp, Homo sapien
aaatgagtaatccatacccccatctctactctt

SEQ ID NO: 46205 - DNA, 33 bp, Homo sapien
ctccacagcttgtaaaactgtatatttttaaat

SEQ ID NO: 46206 - DNA, 33 bp, Homo sapien
ctccacagcttgtaaacctgtatatttttaaat

SEQ ID NO: 46207 - DNA, 33 bp, Homo sapien
acaggttgaatttgaaatgcttgtgccatatct

SEQ ID NO: 46208 - DNA, 33 bp, Homo sapien
acaggttgaatttgaagtgcttgtgccatatct

SEQ ID NO: 46209 - DNA, 33 bp, Homo sapien
gccaggagtacagtcaatcctattccagatatg

SEQ ID NO: 46210 - DNA, 33 bp, Homo sapien
gccaggagtacagtcagtcctattccagatatg

SEQ ID NO: 46211 - DNA, 33 bp, Homo sapien
tgtttgtatatcttgacccacttcctgactttg

SEQ ID NO: 46212 - DNA, 33 bp, Homo sapien
tgtttgtatatcttgagccacttcctgactttg

SEQ ID NO: 46213 - DNA, 33 bp, Homo sapien
cttactcaactctaaacactccagttcctggca

SEQ ID NO: 46214 - DNA, 33 bp, Homo sapien
cttactcaactctaaatactccagttcctggca

SEQ ID NO: 46215 - DNA, 33 bp, Homo sapien
tagtctgaaatgtaagcaaggaagtcactgaca

SEQ ID NO: 46216 - DNA, 33 bp, Homo sapien
tagtctgaaatgtaaggaaggaagtcactgaca

SEQ ID NO: 46217 - DNA, 33 bp, Homo sapien
cttttggttagacaggcagttctgtttgtttga

SEQ ID NO: 46218 - DNA, 33 bp, Homo sapien
cttttggttagacaggtagttctgtttgtttga

SEQ ID NO: 46219 - DNA, 33 bp, Homo sapien
cactaagcattcgtcaagaagataaatgaataa

SEQ ID NO: 46220 - DNA, 33 bp, Homo sapien
cactaagcattcgtcaggaagataaatgaataa

SEQ ID NO: 46221 - DNA, 33 bp, Homo sapien
cacttcttggatcgaggaattcccctaaactat

SEQ ID NO: 46222 - DNA, 33 bp, Homo sapien
cacttcttggatcgagtaattcccctaaactat

SEQ ID NO: 46223 - DNA, 33 bp, Homo sapien
taggactttgtgataaaagagcttagtaatgtg

SEQ ID NO: 46224 - DNA, 33 bp, Homo sapien
taggactttgtgataagagagcttagtaatgtg

SEQ ID NO: 46225 - DNA, 33 bp, Homo sapien
caagagaactactgagaagtctgcatcagttcc

SEQ ID NO: 46226 - DNA, 33 bp, Homo sapien
caagagaactactgaggagtctgcatcagttcc

SEQ ID NO: 46227 - DNA, 33 bp, Homo sapien
tatagtcagtatctagaaaatattgggtgaagg

SEQ ID NO: 46228 - DNA, 33 bp, Homo sapien
tatagtcagtatctaggaaatattgggtgaagg

SEQ ID NO: 46229 - DNA, 33 bp, Homo sapien
ctgaccttctagaaaacgaggcacattgggatg

SEQ ID NO: 46230 - DNA, 33 bp, Homo sapien
ctgaccttctagaaaatgaggcacattgggatg

SEQ ID NO: 46231 - DNA, 33 bp, Homo sapien
gcccagtttttctgacacttattacaacattcc

SEQ ID NO: 46232 - DNA, 33 bp, Homo sapien
gcccagtttttctgacgcttattacaacattcc

SEQ ID NO: 46233 - DNA, 33 bp, Homo sapien
attaaaggcaaagggaagaaatacatctgggct

SEQ ID NO: 46234 - DNA, 33 bp, Homo sapien
attaaaggcaaagggaggaaatacatctgggct

SEQ ID NO: 46235 - DNA, 33 bp, Homo sapien
agccttctcatcatacagatacaatggaattcc

SEQ ID NO: 46236 - DNA, 33 bp, Homo sapien
agccttctcatcatacggatacaatggaattcc

SEQ ID NO: 46237 - DNA, 33 bp, Homo sapien
cttatttgtgttagaaaatactaaaaccagccc

SEQ ID NO: 46238 - DNA, 33 bp, Homo sapien
cttatttgtgttagaacatactaaaaccagccc

SEQ ID NO: 46239 - DNA, 33 bp, Homo sapien
agcgtcttctttcaaaatttaatgtctcatacc

SEQ ID NO: 46240 - DNA, 33 bp, Homo sapien
agcgtcttctttcaaactttaatgtctcatacc

SEQ ID NO: 46241 - DNA, 33 bp, Homo sapien
ttaaaagctacatccacctcagtacttttatct

SEQ ID NO: 46242 - DNA, 33 bp, Homo sapien
ttaaaagctacatccatctcagtacttttatct

SEQ ID NO: 46243 - DNA, 33 bp, Homo sapien
actctacttcctttgaaagatgtcagagataat

SEQ ID NO: 46244 - DNA, 33 bp, Homo sapien
actctacttcctttgagagatgtcagagataat

SEQ ID NO: 46245 - DNA, 33 bp, Homo sapien
tgtgtccttggatttacaacctcaatttgcata

SEQ ID NO: 46246 - DNA, 33 bp, Homo sapien
tgtgtccttggatttataacctcaatttgcata

SEQ ID NO: 46247 - DNA, 33 bp, Homo sapien
acaagtatgataatgacatggaggaaatttttt

SEQ ID NO: 46248 - DNA, 33 bp, Homo sapien
acaagtatgataatgatatggaggaaatttttt

SEQ ID NO: 46249 - DNA, 33 bp, Homo sapien
ccaaccaccattatgaataagcatataaagtcg

SEQ ID NO: 46250 - DNA, 33 bp, Homo sapien
ccaaccaccattatgactaagcatataaagtcg

SEQ ID NO: 46251 - DNA, 33 bp, Homo sapien
ttaactatgtagcagacagttcacaaattaatt

SEQ ID NO: 46252 - DNA, 33 bp, Homo sapien
ttaactatgtagcagagagttcacaaattaatt

SEQ ID NO: 46253 - DNA, 33 bp, Homo sapien
gaaaaaagcctacagaataatgatgtaaagaaa

SEQ ID NO: 46254 - DNA, 33 bp, Homo sapien
gaaaaaagcctacagagtaatgatgtaaagaaa

SEQ ID NO: 46255 - DNA, 33 bp, Homo sapien
gaagtgaaatgaagcacagatgagaaaagtctt

SEQ ID NO: 46256 - DNA, 33 bp, Homo sapien
gaagtgaaatgaagcagagatgagaaaagtctt

SEQ ID NO: 46257 - DNA, 33 bp, Homo sapien
tcattaagtacctcaacttaccagaccccttat

SEQ ID NO: 46258 - DNA, 33 bp, Homo sapien
tcattaagtacctcaatttaccagaccccttat

SEQ ID NO: 46259 - DNA, 33 bp, Homo sapien
taagggatagagactaggaataccaagccagta

SEQ ID NO: 46260 - DNA, 33 bp, Homo sapien
taagggatagagactatgaataccaagccagta

SEQ ID NO: 46261 - DNA, 33 bp, Homo sapien
ttgtctgtgataagaccgagcgtttagagttta

SEQ ID NO: 46262 - DNA, 33 bp, Homo sapien
ttgtctgtgataagactgagcgtttagagttta

SEQ ID NO: 46263 - DNA, 33 bp, Homo sapien
ctggatccagactgcccatgcctatatacaact

SEQ ID NO: 46264 - DNA, 33 bp, Homo sapien
ctggatccagactgcctatgcctatatacaact

SEQ ID NO: 46265 - DNA, 33 bp, Homo sapien
gagtactaatgggttccaacaaagaaacagtaa

SEQ ID NO: 46266 - DNA, 33 bp, Homo sapien
gagtactaatgggttctaacaaagaaacagtaa

SEQ ID NO: 46267 - DNA, 33 bp, Homo sapien
gtagtcagaatttttacgtggcagcttagggaa

SEQ ID NO: 46268 - DNA, 33 bp, Homo sapien
gtagtcagaatttttatgtggcagcttagggaa

SEQ ID NO: 46269 - DNA, 33 bp, Homo sapien
agtttgctatagcaaaagagtcagctactgtga

SEQ ID NO: 46270 - DNA, 33 bp, Homo sapien
agtttgctatagcaaatgagtcagctactgtga

SEQ ID NO: 46271 - DNA, 33 bp, Homo sapien
tggattacttgggttcgagagggctttcccacc

SEQ ID NO: 46272 - DNA, 33 bp, Homo sapien
tggattacttgggttctagagggctttcccacc

SEQ ID NO: 46273 - DNA, 33 bp, Homo sapien
catagctgcaagagaaaagggcttcaattcttc

SEQ ID NO: 46274 - DNA, 33 bp, Homo sapien
catagctgcaagagaatagggcttcaattcttc

SEQ ID NO: 46275 - DNA, 33 bp, Homo sapien
tgtaatgatctttaaacgctatatttcagaaat

SEQ ID NO: 46276 - DNA, 33 bp, Homo sapien
tgtaatgatctttaaatgctatatttcagaaat

SEQ ID NO: 46277 - DNA, 33 bp, Homo sapien
tacgcagaatcttgtgaaagactactaaagtga

SEQ ID NO: 46278 - DNA, 33 bp, Homo sapien
tacgcagaatcttgtggaagactactaaagtga

SEQ ID NO: 46279 - DNA, 33 bp, Homo sapien
cctcactatcactggcctgactaccactggacc

SEQ ID NO: 46280 - DNA, 33 bp, Homo sapien
cctcactatcactggcttgactaccactggacc

SEQ ID NO: 46281 - DNA, 33 bp, Homo sapien
agccagcttaatagtacagagagaggctagtta

SEQ ID NO: 46282 - DNA, 33 bp, Homo sapien
agccagcttaatagtagagagagaggctagtta

SEQ ID NO: 46283 - DNA, 33 bp, Homo sapien
ttttttacctgacgtacaagcccctttacaata

SEQ ID NO: 46284 - DNA, 33 bp, Homo sapien
ttttttacctgacgtagaagcccctttacaata

SEQ ID NO: 46285 - DNA, 33 bp, Homo sapien
ctgtatttacctctcaatagcactggtgatatt

SEQ ID NO: 46286 - DNA, 33 bp, Homo sapien
ctgtatttacctctcagtagcactggtgatatt

SEQ ID NO: 46287 - DNA, 33 bp, Homo sapien
tgggtcaggttgtcacaattcaaggatcagccc

SEQ ID NO: 46288 - DNA, 33 bp, Homo sapien
tgggtcaggttgtcacgattcaaggatcagccc

SEQ ID NO: 46289 - DNA, 33 bp, Homo sapien
agcaaacaaaatgttcaaattaccattgatgcc

SEQ ID NO: 46290 - DNA, 33 bp, Homo sapien
agcaaacaaaatgttcgaattaccattgatgcc

SEQ ID NO: 46291 - DNA, 33 bp, Homo sapien
ttcatttaatatactgaagaactatcaaaatga

SEQ ID NO: 46292 - DNA, 33 bp, Homo sapien
ttcatttaatatactgtagaactatcaaaatga

SEQ ID NO: 46293 - DNA, 33 bp, Homo sapien
tatgtacatttattcaatatgtgtgcattagga

SEQ ID NO: 46294 - DNA, 33 bp, Homo sapien
tatgtacatttattcagtatgtgtgcattagga

SEQ ID NO: 46295 - DNA, 33 bp, Homo sapien
agctttggcttgagaaacagaaacctatacctt

SEQ ID NO: 46296 - DNA, 33 bp, Homo sapien
agctttggcttgagaatcagaaacctatacctt

SEQ ID NO: 46297 - DNA, 33 bp, Homo sapien
tcctcttttggtagtaagggtatatgtctgttc

SEQ ID NO: 46298 - DNA, 33 bp, Homo sapien
tcctcttttggtagtaggggtatatgtctgttc

SEQ ID NO: 46299 - DNA, 33 bp, Homo sapien
ttgaccagactggctacgtctagtggtatttat

SEQ ID NO: 46300 - DNA, 33 bp, Homo sapien
ttgaccagactggctatgtctagtggtatttat

SEQ ID NO: 46301 - DNA, 33 bp, Homo sapien
aaatctatgtgactgacaagaacttgaagcatt

SEQ ID NO: 46302 - DNA, 33 bp, Homo sapien
aaatctatgtgactgagaagaacttgaagcatt

SEQ ID NO: 46303 - DNA, 33 bp, Homo sapien
accttgtgcatactcacattgtttctctaatca

SEQ ID NO: 46304 - DNA, 33 bp, Homo sapien
accttgtgcatactcatattgtttctctaatca

SEQ ID NO: 46305 - DNA, 33 bp, Homo sapien
gcccacagcaggcaaaagcggacctcagcagcc

SEQ ID NO: 46306 - DNA, 33 bp, Homo sapien
gcccacagcaggcaaaggcggacctcagcagcc

SEQ ID NO: 46307 - DNA, 33 bp, Homo sapien
acaacgccctttgttaagtgaaggtgtgactga

SEQ ID NO: 46308 - DNA, 33 bp, Homo sapien
acaacgccctttgttacgtgaaggtgtgactga

SEQ ID NO: 46309 - DNA, 33 bp, Homo sapien
taaaagtcaaggatggccagtaagtccctacag

SEQ ID NO: 46310 - DNA, 33 bp, Homo sapien
taaaagtcaaggatggtcagtaagtccctacag

SEQ ID NO: 46311 - DNA, 33 bp, Homo sapien
tattattttattatctaaaggtcagtggttaaa

SEQ ID NO: 46312 - DNA, 33 bp, Homo sapien
tattattttattatcttaaggtcagtggttaaa

SEQ ID NO: 46313 - DNA, 33 bp, Homo sapien
tgatgttacttagaaccgttattacttagaaca

SEQ ID NO: 46314 - DNA, 33 bp, Homo sapien
tgatgttacttagaactgttattacttagaaca

SEQ ID NO: 46315 - DNA, 33 bp, Homo sapien
aatacagtgttgaatacgatggcagcagtttca

SEQ ID NO: 46316 - DNA, 33 bp, Homo sapien
aatacagtgttgaatatgatggcagcagtttca

SEQ ID NO: 46317 - DNA, 33 bp, Homo sapien
agtgtgatgttcataaagtgccaaaactcaatg

SEQ ID NO: 46318 - DNA, 33 bp, Homo sapien
agtgtgatgttcataaggtgccaaaactcaatg

SEQ ID NO: 46319 - DNA, 33 bp, Homo sapien
cagctgggctttcatgcaggtggtgcttttctt

SEQ ID NO: 46320 - DNA, 33 bp, Homo sapien
cagctgggctttcatggaggtggtgcttttctt

SEQ ID NO: 46321 - DNA, 33 bp, Homo sapien
cctgtctttcagtaaggatacgtgggcaacatg

SEQ ID NO: 46322 - DNA, 33 bp, Homo sapien
cctgtctttcagtaagtatacgtgggcaacatg

SEQ ID NO: 46323 - DNA, 33 bp, Homo sapien
tcagacctagttgtcaagcccaccctggagaaa

SEQ ID NO: 46324 - DNA, 33 bp, Homo sapien
tcagacctagttgtcaggcccaccctggagaaa

SEQ ID NO: 46325 - DNA, 33 bp, Homo sapien
tcaattactgcattccagatattaattcattca

SEQ ID NO: 46326 - DNA, 33 bp, Homo sapien
tcaattactgcattcctgatattaattcattca

SEQ ID NO: 46327 - DNA, 33 bp, Homo sapien
ttcttttcacctccccagactgtgccagtaaat

SEQ ID NO: 46328 - DNA, 33 bp, Homo sapien
ttcttttcacctccccggactgtgccagtaaat

SEQ ID NO: 46329 - DNA, 33 bp, Homo sapien
ctgaacacaaaggcagaatcatttgttcccacg

SEQ ID NO: 46330 - DNA, 33 bp, Homo sapien
ctgaacacaaaggcagtatcatttgttcccacg

SEQ ID NO: 46331 - DNA, 33 bp, Homo sapien
aaatgtctgaagagaaaaataactgaatgggat

SEQ ID NO: 46332 - DNA, 33 bp, Homo sapien
aaatgtctgaagagaagaataactgaatgggat

SEQ ID NO: 46333 - DNA, 33 bp, Homo sapien
ttattttggaccatatgaaattgttgttttgta

SEQ ID NO: 46334 - DNA, 33 bp, Homo sapien
ttattttggaccatattaaattgttgttttgta

SEQ ID NO: 46335 - DNA, 33 bp, Homo sapien
cttaagccttgtatcaaagagaataaaatgggc

SEQ ID NO: 46336 - DNA, 33 bp, Homo sapien
cttaagccttgtatcagagagaataaaatgggc

SEQ ID NO: 46337 - DNA, 33 bp, Homo sapien
acagtcttcaaggaacacttttatgtgcgttta

SEQ ID NO: 46338 - DNA, 33 bp, Homo sapien
acagtcttcaaggaacgcttttatgtgcgttta

SEQ ID NO: 46339 - DNA, 33 bp, Homo sapien
aacaattacaataaaagttggtaagctcgaggt

SEQ ID NO: 46340 - DNA, 33 bp, Homo sapien
aacaattacaataaaatttggtaagctcgaggt

SEQ ID NO: 46341 - DNA, 33 bp, Homo sapien
aatcctttgagaggaaatgttctcttagtacct

SEQ ID NO: 46342 - DNA, 33 bp, Homo sapien
aatcctttgagaggaagtgttctcttagtacct

SEQ ID NO: 46343 - DNA, 33 bp, Homo sapien
gctcttacatctttacaacctcaccagtcctgc

SEQ ID NO: 46344 - DNA, 33 bp, Homo sapien
gctcttacatctttaccacctcaccagtcctgc

SEQ ID NO: 46345 - DNA, 33 bp, Homo sapien
cggttgatgaaccaaaggtaggaaaacttcaga

SEQ ID NO: 46346 - DNA, 33 bp, Homo sapien
cggttgatgaaccaaatgtaggaaaacttcaga

SEQ ID NO: 46347 - DNA, 33 bp, Homo sapien
gcctcttgaagtagggaaaaagagcctggggaa

SEQ ID NO: 46348 - DNA, 33 bp, Homo sapien
gcctcttgaagtagggtaaaagagcctggggaa

SEQ ID NO: 46349 - DNA, 33 bp, Homo sapien
actcagactttcaccccgcaagctgtaaaattt

SEQ ID NO: 46350 - DNA, 33 bp, Homo sapien
actcagactttcacccggcaagctgtaaaattt

SEQ ID NO: 46351 - DNA, 33 bp, Homo sapien
ggtggaaagtagggaacatccaatcaaactaat

SEQ ID NO: 46352 - DNA, 33 bp, Homo sapien
ggtggaaagtagggaatatccaatcaaactaat

SEQ ID NO: 46353 - DNA, 33 bp, Homo sapien
atactatttctgtacacataaaaggatgcctta

SEQ ID NO: 46354 - DNA, 33 bp, Homo sapien
atactatttctgtacatataaaaggatgcctta

SEQ ID NO: 46355 - DNA, 33 bp, Homo sapien
gctaagagccagaaaggatcccaattttgccat

SEQ ID NO: 46356 - DNA, 33 bp, Homo sapien
gctaagagccagaaagtatcccaattttgccat

SEQ ID NO: 46357 - DNA, 33 bp, Homo sapien
tatgtcgtctatcagcactcatcacactgcctt

SEQ ID NO: 46358 - DNA, 33 bp, Homo sapien
tatgtcgtctatcagctctcatcacactgcctt

SEQ ID NO: 46359 - DNA, 33 bp, Homo sapien
tgtcacatacaaaagacatttggagctgttatc

SEQ ID NO: 46360 - DNA, 33 bp, Homo sapien
tgtcacatacaaaagatatttggagctgttatc

SEQ ID NO: 46361 - DNA, 33 bp, Homo sapien
actgtgaagttttctaactcaagaggctttcta

SEQ ID NO: 46362 - DNA, 33 bp, Homo sapien
actgtgaagttttctagctcaagaggctttcta

SEQ ID NO: 46363 - DNA, 33 bp, Homo sapien
ttgagtaaagaatgaacgaatgaaagactgaga

SEQ ID NO: 46364 - DNA, 33 bp, Homo sapien
ttgagtaaagaatgaaggaatgaaagactgaga

SEQ ID NO: 46365 - DNA, 33 bp, Homo sapien
gcaccatgtggaggaaatgacttttttttttcc

SEQ ID NO: 46366 - DNA, 33 bp, Homo sapien
gcaccatgtggaggaattgacttttttttttcc

SEQ ID NO: 46367 - DNA, 33 bp, Homo sapien
tgctcagctgacactcacatcccagagacattc

SEQ ID NO: 46368 - DNA, 33 bp, Homo sapien
tgctcagctgacactcccatcccagagacattc

SEQ ID NO: 46369 - DNA, 33 bp, Homo sapien
gccagggtctggtaagcctcctagcagggtctg

SEQ ID NO: 46370 - DNA, 33 bp, Homo sapien
gccagggtctggtaagtctcctagcagggtctg

SEQ ID NO: 46371 - DNA, 33 bp, Homo sapien
cagcagccaagaagccaagctgcaattttctga

SEQ ID NO: 46372 - DNA, 33 bp, Homo sapien
cagcagccaagaagccgagctgcaattttctga

SEQ ID NO: 46373 - DNA, 33 bp, Homo sapien
agaagggaaccagcacaatgcaagaatgcagaa

SEQ ID NO: 46374 - DNA, 33 bp, Homo sapien
agaagggaaccagcacgatgcaagaatgcagaa

SEQ ID NO: 46375 - DNA, 33 bp, Homo sapien
cttacaccagacagaaaggctatcattaaaaag

SEQ ID NO: 46376 - DNA, 33 bp, Homo sapien
cttacaccagacagaatggctatcattaaaaag

SEQ ID NO: 46377 - DNA, 33 bp, Homo sapien
tgctctgcttttgaacccttatctcagacaaaa

SEQ ID NO: 46378 - DNA, 33 bp, Homo sapien
tgctctgcttttgaactcttatctcagacaaaa

SEQ ID NO: 46379 - DNA, 33 bp, Homo sapien
ggtaaaatattgttcaatcattacaaccacttt

SEQ ID NO: 46380 - DNA, 33 bp, Homo sapien
ggtaaaatattgttcagtcattacaaccacttt

SEQ ID NO: 46381 - DNA, 33 bp, Homo sapien
ctttagttaactattcccttcgtgttgaacatt

SEQ ID NO: 46382 - DNA, 33 bp, Homo sapien
ctttagttaactattctcttcgtgttgaacatt

SEQ ID NO: 46383 - DNA, 33 bp, Homo sapien
cagtccccactttccccataggccagatatcct

SEQ ID NO: 46384 - DNA, 33 bp, Homo sapien
cagtccccactttccctataggccagatatcct

SEQ ID NO: 46385 - DNA, 33 bp, Homo sapien
cacagacttatgcttacacacaggtaggccagc

SEQ ID NO: 46386 - DNA, 33 bp, Homo sapien
cacagacttatgcttatacacaggtaggccagc

SEQ ID NO: 46387 - DNA, 33 bp, Homo sapien
aaattcctgagcagataagagtgggaaatggaa

SEQ ID NO: 46388 - DNA, 33 bp, Homo sapien
aaattcctgagcagatgagagtgggaaatggaa

SEQ ID NO: 46389 - DNA, 33 bp, Homo sapien
tgggagtgttttcagaacataatgttgtcactc

SEQ ID NO: 46390 - DNA, 33 bp, Homo sapien
tgggagtgttttcagagcataatgttgtcactc

SEQ ID NO: 46391 - DNA, 33 bp, Homo sapien
cttcactgggtttagccactctttaccagcatc

SEQ ID NO: 46392 - DNA, 33 bp, Homo sapien
cttcactgggtttagctactctttaccagcatc

SEQ ID NO: 46393 - DNA, 33 bp, Homo sapien
gatccttgaaagctaactaggtgacaggtgcaa

SEQ ID NO: 46394 - DNA, 33 bp, Homo sapien
gatccttgaaagctaattaggtgacaggtgcaa

SEQ ID NO: 46395 - DNA, 33 bp, Homo sapien
taaagtttggttatagacctgactgtgatttat

SEQ ID NO: 46396 - DNA, 33 bp, Homo sapien
taaagtttggttatagtcctgactgtgatttat

SEQ ID NO: 46397 - DNA, 33 bp, Homo sapien
atcagatattcagatacgcaccaataggtattt

SEQ ID NO: 46398 - DNA, 33 bp, Homo sapien
atcagatattcagatatgcaccaataggtattt

SEQ ID NO: 46399 - DNA, 33 bp, Homo sapien
gggagggagagaacgacacaggttgtgctggtt

SEQ ID NO: 46400 - DNA, 33 bp, Homo sapien
gggagggagagaacgatacaggttgtgctggtt

SEQ ID NO: 46401 - DNA, 33 bp, Homo sapien
ggcatcttggtgagtacacaggaaggtgatgaa

SEQ ID NO: 46402 - DNA, 33 bp, Homo sapien
ggcatcttggtgagtatacaggaaggtgatgaa

SEQ ID NO: 46403 - DNA, 33 bp, Homo sapien
aattcaccatccaagcaaaaatgataactttga

SEQ ID NO: 46404 - DNA, 33 bp, Homo sapien
aattcaccatccaagcgaaaatgataactttga

SEQ ID NO: 46405 - DNA, 33 bp, Homo sapien
taagaaaattaaatgacataaactccacgacaa

SEQ ID NO: 46406 - DNA, 33 bp, Homo sapien
taagaaaattaaatgagataaactccacgacaa

SEQ ID NO: 46407 - DNA, 33 bp, Homo sapien
tgttttatctctactcaaaaccaaagtgattga

SEQ ID NO: 46408 - DNA, 33 bp, Homo sapien
tgttttatctctactccaaaccaaagtgattga

SEQ ID NO: 46409 - DNA, 33 bp, Homo sapien
actgttcaacccaagccatgatggttcttgaga

SEQ ID NO: 46410 - DNA, 33 bp, Homo sapien
actgttcaacccaagctatgatggttcttgaga

SEQ ID NO: 46411 - DNA, 33 bp, Homo sapien
aacttttgagagaaatcagaggttgagcttgga

SEQ ID NO: 46412 - DNA, 33 bp, Homo sapien
aacttttgagagaaattagaggttgagcttgga

SEQ ID NO: 46413 - DNA, 33 bp, Homo sapien
actgggctggacatccaagaagtctcactcaga

SEQ ID NO: 46414 - DNA, 33 bp, Homo sapien
actgggctggacatccgagaagtctcactcaga

SEQ ID NO: 46415 - DNA, 33 bp, Homo sapien
cagcatcaacagccaaacatctgagtgagactt

SEQ ID NO: 46416 - DNA, 33 bp, Homo sapien
cagcatcaacagccaaccatctgagtgagactt

SEQ ID NO: 46417 - DNA, 33 bp, Homo sapien
cacctggtcctcttagaaggctgtctctgggga

SEQ ID NO: 46418 - DNA, 33 bp, Homo sapien
cacctggtcctcttaggaggctgtctctgggga

SEQ ID NO: 46419 - DNA, 33 bp, Homo sapien
acagtccatatcattccagctcataagtggatt

SEQ ID NO: 46420 - DNA, 33 bp, Homo sapien
acagtccatatcattctagctcataagtggatt

SEQ ID NO: 46421 - DNA, 33 bp, Homo sapien
cagatatatgttgacacaaaggactcagaaatg

SEQ ID NO: 46422 - DNA, 33 bp, Homo sapien
cagatatatgttgacataaaggactcagaaatg

SEQ ID NO: 46423 - DNA, 33 bp, Homo sapien
gagggacaaggggagacagataggtagatagag

SEQ ID NO: 46424 - DNA, 33 bp, Homo sapien
gagggacaaggggagatagataggtagatagag

SEQ ID NO: 46425 - DNA, 33 bp, Homo sapien
agcatattcttaaggcacatattttgaggaatg

SEQ ID NO: 46426 - DNA, 33 bp, Homo sapien
agcatattcttaaggcgcatattttgaggaatg

SEQ ID NO: 46427 - DNA, 33 bp, Homo sapien
ctatatattgtctacaaaatgtgattttaattt

SEQ ID NO: 46428 - DNA, 33 bp, Homo sapien
ctatatattgtctacataatgtgattttaattt

SEQ ID NO: 46429 - DNA, 33 bp, Homo sapien
ccagaaattgctcagtaacatccaggcaactct

SEQ ID NO: 46430 - DNA, 33 bp, Homo sapien
ccagaaattgctcagttacatccaggcaactct

SEQ ID NO: 46431 - DNA, 33 bp, Homo sapien
tgccagctatccacagcaaaatagaggaccaag

SEQ ID NO: 46432 - DNA, 33 bp, Homo sapien
tgccagctatccacagtaaaatagaggaccaag

SEQ ID NO: 46433 - DNA, 33 bp, Homo sapien
gcatgtggtgaatccaactgggcttgtgtccta

SEQ ID NO: 46434 - DNA, 33 bp, Homo sapien
gcatgtggtgaatccagctgggcttgtgtccta

SEQ ID NO: 46435 - DNA, 33 bp, Homo sapien
agaccctctgtttccacgtcttgacatcatctg

SEQ ID NO: 46436 - DNA, 33 bp, Homo sapien
agaccctctgtttccaggtcttgacatcatctg

SEQ ID NO: 46437 - DNA, 33 bp, Homo sapien
caataagaacagctaaaatatgtggacaatatg

SEQ ID NO: 46438 - DNA, 33 bp, Homo sapien
caataagaacagctaacatatgtggacaatatg

SEQ ID NO: 46439 - DNA, 33 bp, Homo sapien
cagcaatagccaactaggttgttttagcttccc

SEQ ID NO: 46440 - DNA, 33 bp, Homo sapien
cagcaatagccaactatgttgttttagcttccc

SEQ ID NO: 46441 - DNA, 33 bp, Homo sapien
aactggatttactctacaggcatatttcgaaga

SEQ ID NO: 46442 - DNA, 33 bp, Homo sapien
aactggatttactctataggcatatttcgaaga

SEQ ID NO: 46443 - DNA, 33 bp, Homo sapien
tactcattgatcatttaaaaaagaacacagatg

SEQ ID NO: 46444 - DNA, 33 bp, Homo sapien
tactcattgatcattttaaaaagaacacagatg

SEQ ID NO: 46445 - DNA, 33 bp, Homo sapien
ctgagggattgagtacacttgacattgaaaaat

SEQ ID NO: 46446 - DNA, 33 bp, Homo sapien
ctgagggattgagtacgcttgacattgaaaaat

SEQ ID NO: 46447 - DNA, 33 bp, Homo sapien
cactagaatctctgaaacacttctttgcatgag

SEQ ID NO: 46448 - DNA, 33 bp, Homo sapien
cactagaatctctgaagcacttctttgcatgag

SEQ ID NO: 46449 - DNA, 33 bp, Homo sapien
actaactatgcatacacatcaaagttcatttgt

SEQ ID NO: 46450 - DNA, 33 bp, Homo sapien
actaactatgcatacatatcaaagttcatttgt

SEQ ID NO: 46451 - DNA, 33 bp, Homo sapien
gtccaagatagcctacaggacccaaaaggagga

SEQ ID NO: 46452 - DNA, 33 bp, Homo sapien
gtccaagatagcctacgggacccaaaaggagga

SEQ ID NO: 46453 - DNA, 33 bp, Homo sapien
aagattagagttcaggaatatatctgttaacta

SEQ ID NO: 46454 - DNA, 33 bp, Homo sapien
aagattagagttcaggtatatatctgttaacta

SEQ ID NO: 46455 - DNA, 33 bp, Homo sapien
tagtctcatcaaccataaaaagctttgcagcgt

SEQ ID NO: 46456 - DNA, 33 bp, Homo sapien
tagtctcatcaaccatgaaaagctttgcagcgt

SEQ ID NO: 46457 - DNA, 33 bp, Homo sapien
ttaaagtgcttatctgcagctcaagcaaggaga

SEQ ID NO: 46458 - DNA, 33 bp, Homo sapien
ttaaagtgcttatctgtagctcaagcaaggaga

SEQ ID NO: 46459 - DNA, 33 bp, Homo sapien
caagcttttgtgcaagcctcaaagtgtttaggg

SEQ ID NO: 46460 - DNA, 33 bp, Homo sapien
caagcttttgtgcaaggctcaaagtgtttaggg

SEQ ID NO: 46461 - DNA, 33 bp, Homo sapien
tcagggcagatgagaagcggggtcctgacacac

SEQ ID NO: 46462 - DNA, 33 bp, Homo sapien
tcagggcagatgagaatcggggtcctgacacac

SEQ ID NO: 46463 - DNA, 33 bp, Homo sapien
ggtcccatgcttggcactccattttgtactgtt

SEQ ID NO: 46464 - DNA, 33 bp, Homo sapien
ggtcccatgcttggcattccattttgtactgtt

SEQ ID NO: 46465 - DNA, 33 bp, Homo sapien
gtcccaacaatttcctaaatctcactggctgct

SEQ ID NO: 46466 - DNA, 33 bp, Homo sapien
gtcccaacaatttcctgaatctcactggctgct

SEQ ID NO: 46467 - DNA, 33 bp, Homo sapien
ctatagtttttcatgacccagacagcactattt

SEQ ID NO: 46468 - DNA, 33 bp, Homo sapien
ctatagtttttcatgatccagacagcactattt

SEQ ID NO: 46469 - DNA, 33 bp, Homo sapien
acctccagataaaagaacctggcttgaagtatt

SEQ ID NO: 46470 - DNA, 33 bp, Homo sapien
acctccagataaaagagcctggcttgaagtatt

SEQ ID NO: 46471 - DNA, 33 bp, Homo sapien
caggtagaatttttcactcgatgtggaggtgaa

SEQ ID NO: 46472 - DNA, 33 bp, Homo sapien
caggtagaatttttcattcgatgtggaggtgaa

SEQ ID NO: 46473 - DNA, 33 bp, Homo sapien
tagtggcctttttgaaaatgactgcagacaaac

SEQ ID NO: 46474 - DNA, 33 bp, Homo sapien
tagtggcctttttgaagatgactgcagacaaac

SEQ ID NO: 46475 - DNA, 33 bp, Homo sapien
agttttgcttcatagagatgtgttcttctccct

SEQ ID NO: 46476 - DNA, 33 bp, Homo sapien
agttttgcttcatagatatgtgttcttctccct

SEQ ID NO: 46477 - DNA, 33 bp, Homo sapien
ttgaaatgcatgttgacacccttccttctgcaa

SEQ ID NO: 46478 - DNA, 33 bp, Homo sapien
ttgaaatgcatgttgagacccttccttctgcaa

SEQ ID NO: 46479 - DNA, 33 bp, Homo sapien
ggccagggtacttcaccaagaggcaaaagagct

SEQ ID NO: 46480 - DNA, 33 bp, Homo sapien
ggccagggtacttcacgaagaggcaaaagagct

SEQ ID NO: 46481 - DNA, 33 bp, Homo sapien
agtcttgtgattgggcaacatggggcacctctg

SEQ ID NO: 46482 - DNA, 33 bp, Homo sapien
agtcttgtgattgggcgacatggggcacctctg

SEQ ID NO: 46483 - DNA, 33 bp, Homo sapien
ctttctttaagaagcccatttacagtatccaaa

SEQ ID NO: 46484 - DNA, 33 bp, Homo sapien
ctttctttaagaagcctatttacagtatccaaa

SEQ ID NO: 46485 - DNA, 33 bp, Homo sapien
cctgagcatcagacaaactgcaagcagactggt

SEQ ID NO: 46486 - DNA, 33 bp, Homo sapien
cctgagcatcagacaagctgcaagcagactggt

SEQ ID NO: 46487 - DNA, 33 bp, Homo sapien
tgaaacagttctacaacgctgtaagtaaatctg

SEQ ID NO: 46488 - DNA, 33 bp, Homo sapien
tgaaacagttctacaatgctgtaagtaaatctg

SEQ ID NO: 46489 - DNA, 33 bp, Homo sapien
caaatagaaagacctgaacccttatcctaattg

SEQ ID NO: 46490 - DNA, 33 bp, Homo sapien
caaatagaaagacctggacccttatcctaattg

SEQ ID NO: 46491 - DNA, 33 bp, Homo sapien
gcagatctttcctctaactgagaaacaagagta

SEQ ID NO: 46492 - DNA, 33 bp, Homo sapien
gcagatctttcctctagctgagaaacaagagta

SEQ ID NO: 46493 - DNA, 33 bp, Homo sapien
agttagaagcatctgaaaatggagatttgaggg

SEQ ID NO: 46494 - DNA, 33 bp, Homo sapien
agttagaagcatctgataatggagatttgaggg

SEQ ID NO: 46495 - DNA, 33 bp, Homo sapien
ccccaaattctctagagctagctaagcaatgga

SEQ ID NO: 46496 - DNA, 33 bp, Homo sapien
ccccaaattctctagatctagctaagcaatgga

SEQ ID NO: 46497 - DNA, 33 bp, Homo sapien
gtctcctatgcaccagaccttgtgggattgttt

SEQ ID NO: 46498 - DNA, 33 bp, Homo sapien
gtctcctatgcaccaggccttgtgggattgttt

SEQ ID NO: 46499 - DNA, 33 bp, Homo sapien
gtgatgtataaatgaacgcataaaggaatgaat

SEQ ID NO: 46500 - DNA, 33 bp, Homo sapien
gtgatgtataaatgaatgcataaaggaatgaat

SEQ ID NO: 46501 - DNA, 33 bp, Homo sapien
ccccaaatgctcctaacatccagacattgtggc

SEQ ID NO: 46502 - DNA, 33 bp, Homo sapien
ccccaaatgctcctaatatccagacattgtggc

SEQ ID NO: 46503 - DNA, 33 bp, Homo sapien
gctaaatcaggccgtaaactgccatcagctggg

SEQ ID NO: 46504 - DNA, 33 bp, Homo sapien
gctaaatcaggccgtacactgccatcagctggg

SEQ ID NO: 46505 - DNA, 33 bp, Homo sapien
tccttttggtcatctcacttgatgaggacagaa

SEQ ID NO: 46506 - DNA, 33 bp, Homo sapien
tccttttggtcatctcgcttgatgaggacagaa

SEQ ID NO: 46507 - DNA, 33 bp, Homo sapien
gagatggctccatcaaacacccaatgacccaga

SEQ ID NO: 46508 - DNA, 33 bp, Homo sapien
gagatggctccatcaagcacccaatgacccaga

SEQ ID NO: 46509 - DNA, 33 bp, Homo sapien
ttgagccctggcaaaaacctattacaggatcgc

SEQ ID NO: 46510 - DNA, 33 bp, Homo sapien
ttgagccctggcaaaaccctattacaggatcgc

SEQ ID NO: 46511 - DNA, 33 bp, Homo sapien
tttgtacagtatctggaacaataaacataggaa

SEQ ID NO: 46512 - DNA, 33 bp, Homo sapien
tttgtacagtatctggcacaataaacataggaa

SEQ ID NO: 46513 - DNA, 33 bp, Homo sapien
cacagcttatatgtcaactccttatgaagatgt

SEQ ID NO: 46514 - DNA, 33 bp, Homo sapien
cacagcttatatgtcagctccttatgaagatgt

SEQ ID NO: 46515 - DNA, 33 bp, Homo sapien
agaatgtttcacagtgaattgtttacatttatg

SEQ ID NO: 46516 - DNA, 33 bp, Homo sapien
agaatgtttcacagtgcattgtttacatttatg

SEQ ID NO: 46517 - DNA, 33 bp, Homo sapien
tttcttcctctagtaccacctgctccttgttct

SEQ ID NO: 46518 - DNA, 33 bp, Homo sapien
tttcttcctctagtactacctgctccttgttct

SEQ ID NO: 46519 - DNA, 33 bp, Homo sapien
aggaaaggtggcccaactcagtctccagacatc

SEQ ID NO: 46520 - DNA, 33 bp, Homo sapien
aggaaaggtggcccaattcagtctccagacatc

SEQ ID NO: 46521 - DNA, 33 bp, Homo sapien
tggattaagaatagtcaccatcatttagtcaac

SEQ ID NO: 46522 - DNA, 33 bp, Homo sapien
tggattaagaatagtcgccatcatttagtcaac

SEQ ID NO: 46523 - DNA, 33 bp, Homo sapien
aaaatgtagtaatcaccaaaggaaatacacagt

SEQ ID NO: 46524 - DNA, 33 bp, Homo sapien
aaaatgtagtaatcacgaaaggaaatacacagt

SEQ ID NO: 46525 - DNA, 33 bp, Homo sapien
cattcctgtcttctacaccatctgtaaattcct

SEQ ID NO: 46526 - DNA, 33 bp, Homo sapien
cattcctgtcttctacgccatctgtaaattcct

SEQ ID NO: 46527 - DNA, 33 bp, Homo sapien
tatttataggtgtttcaattttggctcaaccaa

SEQ ID NO: 46528 - DNA, 33 bp, Homo sapien
tatttataggtgtttccattttggctcaaccaa

SEQ ID NO: 46529 - DNA, 33 bp, Homo sapien
ccaggatagacactgaaatttagagattctccg

SEQ ID NO: 46530 - DNA, 33 bp, Homo sapien
ccaggatagacactgagatttagagattctccg

SEQ ID NO: 46531 - DNA, 33 bp, Homo sapien
ctccttctagcccctaacaaccaccatttctgt

SEQ ID NO: 46532 - DNA, 33 bp, Homo sapien
ctccttctagcccctagcaaccaccatttctgt

SEQ ID NO: 46533 - DNA, 33 bp, Homo sapien
tttctgtctctatcaacttgaccattctaggca

SEQ ID NO: 46534 - DNA, 33 bp, Homo sapien
tttctgtctctatcaatttgaccattctaggca

SEQ ID NO: 46535 - DNA, 33 bp, Homo sapien
gttagagagacagacaaaaccttgtttactgtc

SEQ ID NO: 46536 - DNA, 33 bp, Homo sapien
gttagagagacagacataaccttgtttactgtc

SEQ ID NO: 46537 - DNA, 33 bp, Homo sapien
agactagtcaggaagacggggtgatgcctgatg

SEQ ID NO: 46538 - DNA, 33 bp, Homo sapien
agactagtcaggaagatggggtgatgcctgatg

SEQ ID NO: 46539 - DNA, 33 bp, Homo sapien
gaagtttacataaaaaattgcttacttggcatc

SEQ ID NO: 46540 - DNA, 33 bp, Homo sapien
gaagtttacataaaaatttgcttacttggcatc

SEQ ID NO: 46541 - DNA, 33 bp, Homo sapien
cctcctccatttccagaaagcttgcctaatatg

SEQ ID NO: 46542 - DNA, 33 bp, Homo sapien
cctcctccatttccaggaagcttgcctaatatg

SEQ ID NO: 46543 - DNA, 33 bp, Homo sapien
tggactacctacatcaaaaaaacccaaaatatt

SEQ ID NO: 46544 - DNA, 33 bp, Homo sapien
tggactacctacatcagaaaaacccaaaatatt

SEQ ID NO: 46545 - DNA, 33 bp, Homo sapien
tctctagctcttcttcattagaactgttctaga

SEQ ID NO: 46546 - DNA, 33 bp, Homo sapien
tctctagctcttcttcgttagaactgttctaga

SEQ ID NO: 46547 - DNA, 33 bp, Homo sapien
catatgcgtcaataaacgaataggtattttgaa

SEQ ID NO: 46548 - DNA, 33 bp, Homo sapien
catatgcgtcaataaaggaataggtattttgaa

SEQ ID NO: 46549 - DNA, 33 bp, Homo sapien
gatgtttccataattacaagtcatgctaagagt

SEQ ID NO: 46550 - DNA, 33 bp, Homo sapien
gatgtttccataattataagtcatgctaagagt

SEQ ID NO: 46551 - DNA, 33 bp, Homo sapien
tggctctaggctggtgcactgccatattcatca

SEQ ID NO: 46552 - DNA, 33 bp, Homo sapien
tggctctaggctggtgtactgccatattcatca

SEQ ID NO: 46553 - DNA, 33 bp, Homo sapien
ctgccatattcatcacacaacggcctcacagta

SEQ ID NO: 46554 - DNA, 33 bp, Homo sapien
ctgccatattcatcacgcaacggcctcacagta

SEQ ID NO: 46555 - DNA, 33 bp, Homo sapien
agttgttctagcagagactatttgcctgggctt

SEQ ID NO: 46556 - DNA, 33 bp, Homo sapien
agttgttctagcagagtctatttgcctgggctt

SEQ ID NO: 46557 - DNA, 33 bp, Homo sapien
gtccttaaaactcaaccagctgaagcacaaaga

SEQ ID NO: 46558 - DNA, 33 bp, Homo sapien
gtccttaaaactcaactagctgaagcacaaaga

SEQ ID NO: 46559 - DNA, 33 bp, Homo sapien
gaaatgcataggtcacagaataaagcctggatg

SEQ ID NO: 46560 - DNA, 33 bp, Homo sapien
gaaatgcataggtcacggaataaagcctggatg

SEQ ID NO: 46561 - DNA, 33 bp, Homo sapien
gattactcagcttacactggcagttctgatcca

SEQ ID NO: 46562 - DNA, 33 bp, Homo sapien
gattactcagcttacattggcagttctgatcca

SEQ ID NO: 46563 - DNA, 33 bp, Homo sapien
ggatatcacagctaaccgactctcttaaactca

SEQ ID NO: 46564 - DNA, 33 bp, Homo sapien
ggatatcacagctaactgactctcttaaactca

SEQ ID NO: 46565 - DNA, 33 bp, Homo sapien
gatgttgatcacattggcaagaccaactgttct

SEQ ID NO: 46566 - DNA, 33 bp, Homo sapien
gatgttgatcacattgtcaagaccaactgttct

SEQ ID NO: 46567 - DNA, 33 bp, Homo sapien
tttataacaatctccacaaaacgaaagcctgaa

SEQ ID NO: 46568 - DNA, 33 bp, Homo sapien
tttataacaatctccataaaacgaaagcctgaa

SEQ ID NO: 46569 - DNA, 33 bp, Homo sapien
tttttcagactcttcaacaagactgcattttgg

SEQ ID NO: 46570 - DNA, 33 bp, Homo sapien
tttttcagactcttcagcaagactgcattttgg

SEQ ID NO: 46571 - DNA, 33 bp, Homo sapien
cggtgctgatttagtacgaagtcaagaaatact

SEQ ID NO: 46572 - DNA, 33 bp, Homo sapien
cggtgctgatttagtaggaagtcaagaaatact

SEQ ID NO: 46573 - DNA, 33 bp, Homo sapien
gtcaagaaatactgccaaaacttcaggaatgaa

SEQ ID NO: 46574 - DNA, 33 bp, Homo sapien
gtcaagaaatactgcccaaacttcaggaatgaa

SEQ ID NO: 46575 - DNA, 33 bp, Homo sapien
caactccgtggctttacgaaaatttctgtacct

SEQ ID NO: 46576 - DNA, 33 bp, Homo sapien
caactccgtggctttatgaaaatttctgtacct

SEQ ID NO: 46577 - DNA, 33 bp, Homo sapien
tctgggagcacagcataacacttctgggagcac

SEQ ID NO: 46578 - DNA, 33 bp, Homo sapien
tctgggagcacagcatcacacttctgggagcac

SEQ ID NO: 46579 - DNA, 33 bp, Homo sapien
atggtgacatgtgtaaatacaggctcctgataa

SEQ ID NO: 46580 - DNA, 33 bp, Homo sapien
atggtgacatgtgtaactacaggctcctgataa

SEQ ID NO: 46581 - DNA, 33 bp, Homo sapien
gccacaacactggtacaagatgatattggtgtg

SEQ ID NO: 46582 - DNA, 33 bp, Homo sapien
gccacaacactggtacgagatgatattggtgtg

SEQ ID NO: 46583 - DNA, 33 bp, Homo sapien
ttgagaaggctgtgaaaagcagcgagtcagaag

SEQ ID NO: 46584 - DNA, 33 bp, Homo sapien
ttgagaaggctgtgaagagcagcgagtcagaag

SEQ ID NO: 46585 - DNA, 33 bp, Homo sapien
tgattgctgtccctaaatcgtgcatatattctc

SEQ ID NO: 46586 - DNA, 33 bp, Homo sapien
tgattgctgtccctaagtcgtgcatatattctc

SEQ ID NO: 46587 - DNA, 33 bp, Homo sapien
tgaaatccccaacttgaaactccaattacttca

SEQ ID NO: 46588 - DNA, 33 bp, Homo sapien
tgaaatccccaacttgcaactccaattacttca

SEQ ID NO: 46589 - DNA, 33 bp, Homo sapien
gtaaattgaagtcctcacaatagcccacaaggc

SEQ ID NO: 46590 - DNA, 33 bp, Homo sapien
gtaaattgaagtcctcgcaatagcccacaaggc

SEQ ID NO: 46591 - DNA, 33 bp, Homo sapien
ctggtctggccacacacacaattcacaatttcc

SEQ ID NO: 46592 - DNA, 33 bp, Homo sapien
ctggtctggccacacatacaattcacaatttcc

SEQ ID NO: 46593 - DNA, 33 bp, Homo sapien
aggacccaaaagacaaggtttctctgtgttacc

SEQ ID NO: 46594 - DNA, 33 bp, Homo sapien
aggacccaaaagacaatgtttctctgtgttacc

SEQ ID NO: 46595 - DNA, 33 bp, Homo sapien
tccgtgcatgggacaaaatgatgcattcaggaa

SEQ ID NO: 46596 - DNA, 33 bp, Homo sapien
tccgtgcatgggacaagatgatgcattcaggaa

SEQ ID NO: 46597 - DNA, 33 bp, Homo sapien
tattgcacacattcagaaaatatatgaaatata

SEQ ID NO: 46598 - DNA, 33 bp, Homo sapien
tattgcacacattcagtaaatatatgaaatata

SEQ ID NO: 46599 - DNA, 33 bp, Homo sapien
gaagtgtatcacatagaaccttgcagttatttg

SEQ ID NO: 46600 - DNA, 33 bp, Homo sapien
gaagtgtatcacataggaccttgcagttatttg

SEQ ID NO: 46601 - DNA, 33 bp, Homo sapien
cagtgtctattgcacacggtggacatctctgcc

SEQ ID NO: 46602 - DNA, 33 bp, Homo sapien
cagtgtctattgcacatggtggacatctctgcc

SEQ ID NO: 46603 - DNA, 33 bp, Homo sapien
gccaagtgagcactcaactaactggaccctgca

SEQ ID NO: 46604 - DNA, 33 bp, Homo sapien
gccaagtgagcactcagctaactggaccctgca

SEQ ID NO: 46605 - DNA, 33 bp, Homo sapien
tcaagctctagaaatgcaaagccaccttaatgt

SEQ ID NO: 46606 - DNA, 33 bp, Homo sapien
tcaagctctagaaatggaaagccaccttaatgt

SEQ ID NO: 46607 - DNA, 33 bp, Homo sapien
tacaggggggaaaaccaaatcccaggagactaa

SEQ ID NO: 46608 - DNA, 33 bp, Homo sapien
tacaggggggaaaaccgaatcccaggagactaa

SEQ ID NO: 46609 - DNA, 33 bp, Homo sapien
gacatgctctaggcctcaatctcccattggaat

SEQ ID NO: 46610 - DNA, 33 bp, Homo sapien
gacatgctctaggcctgaatctcccattggaat

SEQ ID NO: 46611 - DNA, 33 bp, Homo sapien
ccatattaaatgagacagagattccagaaccat

SEQ ID NO: 46612 - DNA, 33 bp, Homo sapien
ccatattaaatgagacggagattccagaaccat

SEQ ID NO: 46613 - DNA, 33 bp, Homo sapien
tcaagtcttagcagagccaattgggttagtact

SEQ ID NO: 46614 - DNA, 33 bp, Homo sapien
tcaagtcttagcagagtcaattgggttagtact

SEQ ID NO: 46615 - DNA, 33 bp, Homo sapien
cagggggaagggatgacaagttcagtcctggac

SEQ ID NO: 46616 - DNA, 33 bp, Homo sapien
cagggggaagggatgagaagttcagtcctggac

SEQ ID NO: 46617 - DNA, 33 bp, Homo sapien
cccagcttccactctcaacgctcaatgtcagtc

SEQ ID NO: 46618 - DNA, 33 bp, Homo sapien
cccagcttccactctcgacgctcaatgtcagtc

SEQ ID NO: 46619 - DNA, 33 bp, Homo sapien
tggaatttttatgtcaactctcaggaattagac

SEQ ID NO: 46620 - DNA, 33 bp, Homo sapien
tggaatttttatgtcagctctcaggaattagac

SEQ ID NO: 46621 - DNA, 33 bp, Homo sapien
gtttatttagcttcccaaccacagacaaaaagt

SEQ ID NO: 46622 - DNA, 33 bp, Homo sapien
gtttatttagcttccccaccacagacaaaaagt

SEQ ID NO: 46623 - DNA, 33 bp, Homo sapien
aactattcatttccagaacttgcccatactttc

SEQ ID NO: 46624 - DNA, 33 bp, Homo sapien
aactattcatttccagcacttgcccatactttc

SEQ ID NO: 46625 - DNA, 33 bp, Homo sapien
acataacagtccttcaggcacttgaagaagggg

SEQ ID NO: 46626 - DNA, 33 bp, Homo sapien
acataacagtccttcatgcacttgaagaagggg

SEQ ID NO: 46627 - DNA, 33 bp, Homo sapien
atggggaaacatatccagatgtatctcaggtaa

SEQ ID NO: 46628 - DNA, 33 bp, Homo sapien
atggggaaacatatccggatgtatctcaggtaa

SEQ ID NO: 46629 - DNA, 33 bp, Homo sapien
gatcttccctagatggcattagttatgcaagac

SEQ ID NO: 46630 - DNA, 33 bp, Homo sapien
gatcttccctagatggtattagttatgcaagac

SEQ ID NO: 46631 - DNA, 33 bp, Homo sapien
gaggggagttattttaagatgcagggattgggg

SEQ ID NO: 46632 - DNA, 33 bp, Homo sapien
gaggggagttattttaggatgcagggattgggg

SEQ ID NO: 46633 - DNA, 33 bp, Homo sapien
atctaaggtgtgtccaagtttttgtataatcac

SEQ ID NO: 46634 - DNA, 33 bp, Homo sapien
atctaaggtgtgtccaggtttttgtataatcac

SEQ ID NO: 46635 - DNA, 33 bp, Homo sapien
tccctctctattggataaggggctgagtagagt

SEQ ID NO: 46636 - DNA, 33 bp, Homo sapien
tccctctctattggatgaggggctgagtagagt

SEQ ID NO: 46637 - DNA, 33 bp, Homo sapien
tgctgttcttactgtcagaagccacccagtttc

SEQ ID NO: 46638 - DNA, 33 bp, Homo sapien
tgctgttcttactgtcggaagccacccagtttc

SEQ ID NO: 46639 - DNA, 33 bp, Homo sapien
ctaaaatgtctgcttcgatcctgagttgctttc

SEQ ID NO: 46640 - DNA, 33 bp, Homo sapien
ctaaaatgtctgcttctatcctgagttgctttc

SEQ ID NO: 46641 - DNA, 33 bp, Homo sapien
tgaattagaataggtgaaaataaggttcagttt

SEQ ID NO: 46642 - DNA, 33 bp, Homo sapien
tgaattagaataggtggaaataaggttcagttt

SEQ ID NO: 46643 - DNA, 33 bp, Homo sapien
tgaataaatgaggaaacaaacactgtggtgggg

SEQ ID NO: 46644 - DNA, 33 bp, Homo sapien
tgaataaatgaggaaataaacactgtggtgggg

SEQ ID NO: 46645 - DNA, 33 bp, Homo sapien; identical to SEQ ID NO: 46643

SEQ ID NO: 46646 - DNA, 33 bp, Homo sapien; identical to SEQ ID NO: 46644

SEQ ID NO: 46647 - DNA, 33 bp, Homo sapien
aagaaggattagccccagaaagtccctgaagta

SEQ ID NO: 46648 - DNA, 33 bp, Homo sapien
aagaaggattagcccctgaaagtccctgaagta

SEQ ID NO: 46649 - DNA, 33 bp, Homo sapien
atcattttcagccagccagtgccaaaaaatatc

SEQ ID NO: 46650 - DNA, 33 bp, Homo sapien
atcattttcagccagctagtgccaaaaaatatc

SEQ ID NO: 46651 - DNA, 33 bp, Homo sapien
ctatctcccattgaaaccctggattaacctgct

SEQ ID NO: 46652 - DNA, 33 bp, Homo sapien
ctatctcccattgaaatcctggattaacctgct

SEQ ID NO: 46653 - DNA, 33 bp, Homo sapien
tgtccaaagtgcctagcatactgccttaaatgg

SEQ ID NO: 46654 - DNA, 33 bp, Homo sapien
tgtccaaagtgcctagtatactgccttaaatgg

SEQ ID NO: 46655 - DNA, 33 bp, Homo sapien
aggatggatttggggaaggatcaagtgaaccat

SEQ ID NO: 46656 - DNA, 33 bp, Homo sapien
aggatggatttggggagggatcaagtgaaccat

SEQ ID NO: 46657 - DNA, 33 bp, Homo sapien
aatacatggagccaagcacttgaacactcacac

SEQ ID NO: 46658 - DNA, 33 bp, Homo sapien
aatacatggagccaaggacttgaacactcacac

SEQ ID NO: 46659 - DNA, 33 bp, Homo sapien
gaacacatgagtgaagaaaaatgacattccctt

SEQ ID NO: 46660 - DNA, 33 bp, Homo sapien
gaacacatgagtgaaggaaaatgacattccctt

SEQ ID NO: 46661 - DNA, 33 bp, Homo sapien
agaaaattttatgaatcaacacattaaagagag

SEQ ID NO: 46662 - DNA, 33 bp, Homo sapien
agaaaattttatgaatgaacacattaaagagag

SEQ ID NO: 46663 - DNA, 33 bp, Homo sapien
gaggtcccacttcacccggcagtttgaatgatt

SEQ ID NO: 46664 - DNA, 33 bp, Homo sapien
gaggtcccacttcacctggcagtttgaatgatt

SEQ ID NO: 46665 - DNA, 33 bp, Homo sapien
gcttgagatcctatcaaggaggctgtgatgtca

SEQ ID NO: 46666 - DNA, 33 bp, Homo sapien
gcttgagatcctatcagggaggctgtgatgtca

SEQ ID NO: 46667 - DNA, 33 bp, Homo sapien
gttgccagtgcacttacctcctttaaatcatga

SEQ ID NO: 46668 - DNA, 33 bp, Homo sapien
gttgccagtgcacttatctcctttaaatcatga

SEQ ID NO: 46669 - DNA, 33 bp, Homo sapien
ctggtgggttaatataagaaatttggaactgat

SEQ ID NO: 46670 - DNA, 33 bp, Homo sapien
ctggtgggttaatataggaaatttggaactgat

SEQ ID NO: 46671 - DNA, 33 bp, Homo sapien
accttggcctaggcaccgatttccatcactggg

SEQ ID NO: 46672 - DNA, 33 bp, Homo sapien
accttggcctaggcactgatttccatcactggg

SEQ ID NO: 46673 - DNA, 33 bp, Homo sapien
tggggtaaaacgagaacttcaataagctgatgg

SEQ ID NO: 46674 - DNA, 33 bp, Homo sapien
tggggtaaaacgagaatttcaataagctgatgg

SEQ ID NO: 46675 - DNA, 33 bp, Homo sapien
ctacttcagcgtcacacagtgcctggttatcat

SEQ ID NO: 46676 - DNA, 33 bp, Homo sapien
ctacttcagcgtcacatagtgcctggttatcat

SEQ ID NO: 46677 - DNA, 33 bp, Homo sapien
tgttgatcagggatagcagatgtcattgagatg

SEQ ID NO: 46678 - DNA, 33 bp, Homo sapien
tgttgatcagggatagtagatgtcattgagatg

SEQ ID NO: 46679 - DNA, 33 bp, Homo sapien
gaacacctcaactgtaaccccatacacccatag

SEQ ID NO: 46680 - DNA, 33 bp, Homo sapien
gaacacctcaactgtacccccatacacccatag

SEQ ID NO: 46681 - DNA, 33 bp, Homo sapien
tgccttcccaaaataaaacctgaaatgaaatct

SEQ ID NO: 46682 - DNA, 33 bp, Homo sapien
tgccttcccaaaataagacctgaaatgaaatct

SEQ ID NO: 46683 - DNA, 33 bp, Homo sapien
cccctcctcccaggaactcagtcgtcttaggca

SEQ ID NO: 46684 - DNA, 33 bp, Homo sapien
cccctcctcccaggaattcagtcgtcttaggca

SEQ ID NO: 46685 - DNA, 33 bp, Homo sapien
ctagtgtatgctcttacatataccaagaaaaat

SEQ ID NO: 46686 - DNA, 33 bp, Homo sapien
ctagtgtatgctcttagatataccaagaaaaat

SEQ ID NO: 46687 - DNA, 33 bp, Homo sapien
cttcctgttttctgaacgtaatatcaaaggaaa

SEQ ID NO: 46688 - DNA, 33 bp, Homo sapien
cttcctgttttctgaatgtaatatcaaaggaaa

SEQ ID NO: 46689 - DNA, 33 bp, Homo sapien
catgtggctcttttcacataggcttggatgggc

SEQ ID NO: 46690 - DNA, 33 bp, Homo sapien
catgtggctcttttcatataggcttggatgggc

SEQ ID NO: 46691 - DNA, 33 bp, Homo sapien
tttgtagggatatccaagaggtgtcaagtacag

SEQ ID NO: 46692 - DNA, 33 bp, Homo sapien
tttgtagggatatccacgaggtgtcaagtacag

SEQ ID NO: 46693 - DNA, 33 bp, Homo sapien
ccttctcaggatgaaagaatgctgctgattgtt

SEQ ID NO: 46694 - DNA, 33 bp, Homo sapien
ccttctcaggatgaaataatgctgctgattgtt

SEQ ID NO: 46695 - DNA, 33 bp, Homo sapien
aaatacctattgtttagctctacatccacttca

SEQ ID NO: 46696 - DNA, 33 bp, Homo sapien
aaatacctattgtttatctctacatccacttca

SEQ ID NO: 46697 - DNA, 33 bp, Homo sapien
atgcctgttgtcatggaacttagcaaagaaaaa

SEQ ID NO: 46698 - DNA, 33 bp, Homo sapien
atgcctgttgtcatggtacttagcaaagaaaaa

SEQ ID NO: 46699 - DNA, 33 bp, Homo sapien
gatgcaagtgcctctacgaatgtggtgcagaag

SEQ ID NO: 46700 - DNA, 33 bp, Homo sapien
gatgcaagtgcctctatgaatgtggtgcagaag

SEQ ID NO: 46701 - DNA, 33 bp, Homo sapien
aaaccttctagtcccaaaaactgctagattatc

SEQ ID NO: 46702 - DNA, 33 bp, Homo sapien
aaaccttctagtcccacaaactgctagattatc

SEQ ID NO: 46703 - DNA, 33 bp, Homo sapien; identical to SEQ ID NO: 46701

SEQ ID NO: 46704 - DNA, 33 bp, Homo sapien; identical to SEQ ID NO: 46702

SEQ ID NO: 46705 - DNA, 33 bp, Homo sapien
aaatgcagaaagaagaactcccttatcagtaag

SEQ ID NO: 46706 - DNA, 33 bp, Homo sapien
aaatgcagaaagaagacctcccttatcagtaag

SEQ ID NO: 46707 - DNA, 33 bp, Homo sapien
tgagaacaccgcattcaaacaggaggcttatca

SEQ ID NO: 46708 - DNA, 33 bp, Homo sapien
tgagaacaccgcattccaacaggaggcttatca

SEQ ID NO: 46709 - DNA, 33 bp, Homo sapien
aaggcatccaatttcaatcttatacatagggct

SEQ ID NO: 46710 - DNA, 33 bp, Homo sapien
aaggcatccaatttcagtcttatacatagggct

SEQ ID NO: 46711 - DNA, 33 bp, Homo sapien
tcaagtacagtgggtgcagtaaagggatttcac

SEQ ID NO: 46712 - DNA, 33 bp, Homo sapien
tcaagtacagtgggtgtagtaaagggatttcac

SEQ ID NO: 46713 - DNA, 33 bp, Homo sapien
aaacaaacattgtacaaaaaagagtaaatgcag

SEQ ID NO: 46714 - DNA, 33 bp, Homo sapien
aaacaaacattgtacagaaaagagtaaatgcag

SEQ ID NO: 46715 - DNA, 33 bp, Homo sapien
aataattgaatcgataaactgtggtacacactc

SEQ ID NO: 46716 - DNA, 33 bp, Homo sapien
aataattgaatcgatacactgtggtacacactc

SEQ ID NO: 46717 - DNA, 33 bp, Homo sapien
caaattatcaaaagagaatctcgaaagcagcaa

SEQ ID NO: 46718 - DNA, 33 bp, Homo sapien
caaattatcaaaagagtatctcgaaagcagcaa

SEQ ID NO: 46719 - DNA, 33 bp, Homo sapien
ctttggatagatacaccgtagttggattgctgg

SEQ ID NO: 46720 - DNA, 33 bp, Homo sapien
ctttggatagatacactgtagttggattgctgg

SEQ ID NO: 46721 - DNA, 33 bp, Homo sapien
tatgaaagggttgcctaaactcccatggttatt

SEQ ID NO: 46722 - DNA, 33 bp, Homo sapien
tatgaaagggttgccttaactcccatggttatt

SEQ ID NO: 46723 - DNA, 33 bp, Homo sapien
tgtaaatacctggcctcaaggtgctgacgtgat

SEQ ID NO: 46724 - DNA, 33 bp, Homo sapien
tgtaaatacctggccttaaggtgctgacgtgat

SEQ ID NO: 46725 - DNA, 33 bp, Homo sapien
caagaatcttccagaaactcaagaaattctcca

SEQ ID NO: 46726 - DNA, 33 bp, Homo sapien
caagaatcttccagaatctcaagaaattctcca

SEQ ID NO: 46727 - DNA, 33 bp, Homo sapien
gtgtgctaactgggaacaatgttaacaaatatg

SEQ ID NO: 46728 - DNA, 33 bp, Homo sapien
gtgtgctaactgggaataatgttaacaaatatg

SEQ ID NO: 46729 - DNA, 33 bp, Homo sapien
atatgtgtgaaaatggaaaaaggtcaagattga

SEQ ID NO: 46730 - DNA, 33 bp, Homo sapien
atatgtgtgaaaatgggaaaaggtcaagattga

SEQ ID NO: 46731 - DNA, 33 bp, Homo sapien
agaaagttgatgcttccacaattttgagtcatg

SEQ ID NO: 46732 - DNA, 33 bp, Homo sapien
agaaagttgatgcttctacaattttgagtcatg

SEQ ID NO: 46733 - DNA, 33 bp, Homo sapien
gcacacttttgagccacctacctacagttgttg

SEQ ID NO: 46734 - DNA, 33 bp, Homo sapien
gcacacttttgagccagctacctacagttgttg

SEQ ID NO: 46735 - DNA, 33 bp, Homo sapien
taactggtatgacagggaatctcaaaaaaggaa

SEQ ID NO: 46736 - DNA, 33 bp, Homo sapien
taactggtatgacaggtaatctcaaaaaaggaa

SEQ ID NO: 46737 - DNA, 33 bp, Homo sapien
ctccccagcactggaaatgatttatggagcagt

SEQ ID NO: 46738 - DNA, 33 bp, Homo sapien
ctccccagcactggaactgatttatggagcagt

SEQ ID NO: 46739 - DNA, 33 bp, Homo sapien
catctcagaggaacaacatgaggctagttatcc

SEQ ID NO: 46740 - DNA, 33 bp, Homo sapien
catctcagaggaacaatatgaggctagttatcc

SEQ ID NO: 46741 - DNA, 33 bp, Homo sapien
gctgttgaactgtcagaatgaggagtttagata

SEQ ID NO: 46742 - DNA, 33 bp, Homo sapien
gctgttgaactgtcaggatgaggagtttagata

SEQ ID NO: 46743 - DNA, 33 bp, Homo sapien
ggaatccacttaatgcagatgggttgcacttaa

SEQ ID NO: 46744 - DNA, 33 bp, Homo sapien
ggaatccacttaatgcggatgggttgcacttaa

SEQ ID NO: 46745 - DNA, 33 bp, Homo sapien
tttggatactccatgaaaatttgttccaatgca

SEQ ID NO: 46746 - DNA, 33 bp, Homo sapien
tttggatactccatgacaatttgttccaatgca

SEQ ID NO: 46747 - DNA, 33 bp, Homo sapien
aataactttgtaaacaccatgtatcttgccaat

SEQ ID NO: 46748 - DNA, 33 bp, Homo sapien
aataactttgtaaacatcatgtatcttgccaat

SEQ ID NO: 46749 - DNA, 33 bp, Homo sapien
tacatgaaaatcacagacaatgaaataaaaaag

SEQ ID NO: 46750 - DNA, 33 bp, Homo sapien
tacatgaaaatcacaggcaatgaaataaaaaag

SEQ ID NO: 46751 - DNA, 33 bp, Homo sapien
ataacctcaggtaataggcagactttgagaatc

SEQ ID NO: 46752 - DNA, 33 bp, Homo sapien
ataacctcaggtaatatgcagactttgagaatc

SEQ ID NO: 46753 - DNA, 33 bp, Homo sapien
gacctgctaatcatgacagaagattctttattg

SEQ ID NO: 46754 - DNA, 33 bp, Homo sapien
gacctgctaatcatgagagaagattctttattg

SEQ ID NO: 46755 - DNA, 33 bp, Homo sapien
gatacctaagctctgacgctgcaccctcaaata

SEQ ID NO: 46756 - DNA, 33 bp, Homo sapien
gatacctaagctctgatgctgcaccctcaaata

SEQ ID NO: 46757 - DNA, 33 bp, Homo sapien
tatgggagtgagtgatgaatgaaatgacatatc

SEQ ID NO: 46758 - DNA, 33 bp, Homo sapien
tatgggagtgagtgattaatgaaatgacatatc

SEQ ID NO: 46759 - DNA, 33 bp, Homo sapien
atggattttgaatctaagaaaagaacagtccta

SEQ ID NO: 46760 - DNA, 33 bp, Homo sapien
atggattttgaatctaggaaaagaacagtccta

SEQ ID NO: 46761 - DNA, 33 bp, Homo sapien
caaataagtaccaaacaaaatcagataaaacct

SEQ ID NO: 46762 - DNA, 33 bp, Homo sapien
caaataagtaccaaacgaaatcagataaaacct

SEQ ID NO: 46763 - DNA, 33 bp, Homo sapien
taaaatttcccgaggaatccatgagcaggtgga

SEQ ID NO: 46764 - DNA, 33 bp, Homo sapien
taaaatttcccgaggagtccatgagcaggtgga

SEQ ID NO: 46765 - DNA, 33 bp, Homo sapien
ttcctggcatgatgtaacaatggtggagcagtc

SEQ ID NO: 46766 - DNA, 33 bp, Homo sapien
ttcctggcatgatgtagcaatggtggagcagtc

SEQ ID NO: 46767 - DNA, 33 bp, Homo sapien
tttcacttgaacataaatgtaggtctatttctg

SEQ ID NO: 46768 - DNA, 33 bp, Homo sapien
tttcacttgaacataattgtaggtctatttctg

SEQ ID NO: 46769 - DNA, 33 bp, Homo sapien
agcaatgagaatcaacaatctatatctacaaac

SEQ ID NO: 46770 - DNA, 33 bp, Homo sapien
agcaatgagaatcaacgatctatatctacaaac

SEQ ID NO: 46771 - DNA, 33 bp, Homo sapien
ggagcacagcactcagacaaggggagtatctct

SEQ ID NO: 46772 - DNA, 33 bp, Homo sapien
ggagcacagcactcagccaaggggagtatctct

SEQ ID NO: 46773 - DNA, 33 bp, Homo sapien
gtttaccaaagaagaccgaaacatggcccacgt

SEQ ID NO: 46774 - DNA, 33 bp, Homo sapien
gtttaccaaagaagactgaaacatggcccacgt

SEQ ID NO: 46775 - DNA, 33 bp, Homo sapien
ggcatgttaggaaaaacgtggaaggtgttgaac

SEQ ID NO: 46776 - DNA, 33 bp, Homo sapien
ggcatgttaggaaaaatgtggaaggtgttgaac

SEQ ID NO: 46777 - DNA, 33 bp, Homo sapien
tcaataacattgatatcaacccttcctactcaa

SEQ ID NO: 46778 - DNA, 33 bp, Homo sapien
tcaataacattgatatgaacccttcctactcaa

SEQ ID NO: 46779 - DNA, 33 bp, Homo sapien
ctaatcttactgtgaacgccaccaggagctttg

SEQ ID NO: 46780 - DNA, 33 bp, Homo sapien
ctaatcttactgtgaatgccaccaggagctttg

SEQ ID NO: 46781 - DNA, 33 bp, Homo sapien
gggtatgcaactggcccaggaccttactgaatg

SEQ ID NO: 46782 - DNA, 33 bp, Homo sapien
gggtatgcaactggcctaggaccttactgaatg

SEQ ID NO: 46783 - DNA, 33 bp, Homo sapien
agccactttcccaaacaagagaggattgctctg

SEQ ID NO: 46784 - DNA, 33 bp, Homo sapien
agccactttcccaaacgagagaggattgctctg

SEQ ID NO: 46785 - DNA, 33 bp, Homo sapien
cggcatgtacatgtgagtatttcctgtgatccc

SEQ ID NO: 46786 - DNA, 33 bp, Homo sapien
cggcatgtacatgtgattatttcctgtgatccc

SEQ ID NO: 46787 - DNA, 33 bp, Homo sapien
aggccacctgattctacctccttgttttagccc

SEQ ID NO: 46788 - DNA, 33 bp, Homo sapien
aggccacctgattctatctccttgttttagccc

SEQ ID NO: 46789 - DNA, 33 bp, Homo sapien
acactacaaagttacacagttacccaggctacc

SEQ ID NO: 46790 - DNA, 33 bp, Homo sapien
acactacaaagttacatagttacccaggctacc

SEQ ID NO: 46791 - DNA, 33 bp, Homo sapien
acaaccaacatttcaaagttcaataatttgctg

SEQ ID NO: 46792 - DNA, 33 bp, Homo sapien
acaaccaacatttcaatgttcaataatttgctg

SEQ ID NO: 46793 - DNA, 33 bp, Homo sapien
gtccaggttctttctactacagcatctttcctc

SEQ ID NO: 46794 - DNA, 33 bp, Homo sapien
gtccaggttctttctattacagcatctttcctc

SEQ ID NO: 46795 - DNA, 33 bp, Homo sapien
tgtcaaaggagagagcaaagcatgcctctgaga

SEQ ID NO: 46796 - DNA, 33 bp, Homo sapien
tgtcaaaggagagagcgaagcatgcctctgaga

SEQ ID NO: 46797 - DNA, 33 bp, Homo sapien
gcatggcaacccctgacacactgccaggctgcc

SEQ ID NO: 46798 - DNA, 33 bp, Homo sapien
gcatggcaacccctgatacactgccaggctgcc

SEQ ID NO: 46799 - DNA, 33 bp, Homo sapien
atttcagataatgattaaaaaattggatgatct

SEQ ID NO: 46800 - DNA, 33 bp, Homo sapien
atttcagataatgattgaaaaattggatgatct

SEQ ID NO: 46801 - DNA, 33 bp, Homo sapien
agaataaccaagcagaaatacaaagtaagcact

SEQ ID NO: 46802 - DNA, 33 bp, Homo sapien
agaataaccaagcagagatacaaagtaagcact

SEQ ID NO: 46803 - DNA, 33 bp, Homo sapien
atttttcccgcgctcccgactcatagatgtaag

SEQ ID NO: 46804 - DNA, 33 bp, Homo sapien
atttttcccgcgctcctgactcatagatgtaag

SEQ ID NO: 46805 - DNA, 33 bp, Homo sapien
aacctttagctgttgaagtttctcagggcatgg

SEQ ID NO: 46806 - DNA, 33 bp, Homo sapien
aacctttagctgttgaggtttctcagggcatgg

SEQ ID NO: 46807 - DNA, 33 bp, Homo sapien
caaggtgagcgaggaaacaaattcactgaagac

SEQ ID NO: 46808 - DNA, 33 bp, Homo sapien
caaggtgagcgaggaatcaaattcactgaagac

SEQ ID NO: 46809 - DNA, 33 bp, Homo sapien
ctgaagctcttgaagacgctgttgaatgtattt

SEQ ID NO: 46810 - DNA, 33 bp, Homo sapien
ctgaagctcttgaagatgctgttgaatgtattt

SEQ ID NO: 46811 - DNA, 33 bp, Homo sapien
tggtgtcctaatctcacgatggaggagatgatt

SEQ ID NO: 46812 - DNA, 33 bp, Homo sapien
tggtgtcctaatctcatgatggaggagatgatt

SEQ ID NO: 46813 - DNA, 33 bp, Homo sapien
aggaagtcactatctagatactaatcctttcct

SEQ ID NO: 46814 - DNA, 33 bp, Homo sapien
aggaagtcactatctatatactaatcctttcct

SEQ ID NO: 46815 - DNA, 33 bp, Homo sapien
gagacaagttagacaaatgtaagactaaatagt

SEQ ID NO: 46816 - DNA, 33 bp, Homo sapien
gagacaagttagacaactgtaagactaaatagt

SEQ ID NO: 46817 - DNA, 33 bp, Homo sapien
aatttttattttcaatgaactgtcatctcctgc

SEQ ID NO: 46818 - DNA, 33 bp, Homo sapien
aatttttattttcaattaactgtcatctcctgc

SEQ ID NO: 46819 - DNA, 33 bp, Homo sapien
ttaccccttacaatgaatcagcggctttccaag

SEQ ID NO: 46820 - DNA, 33 bp, Homo sapien
ttaccccttacaatgagtcagcggctttccaag

SEQ ID NO: 46821 - DNA, 33 bp, Homo sapien
taaataacctttggtaactgcccatatctttta

SEQ ID NO: 46822 - DNA, 33 bp, Homo sapien
taaataacctttggtagctgcccatatctttta

SEQ ID NO: 46823 - DNA, 33 bp, Homo sapien
atacaaattatttaaaccctccagccgcagttt

SEQ ID NO: 46824 - DNA, 33 bp, Homo sapien
atacaaattatttaaatcctccagccgcagttt

SEQ ID NO: 46825 - DNA, 33 bp, Homo sapien
tagtcagaaggaatcaactacttcaggattaaa

SEQ ID NO: 46826 - DNA, 33 bp, Homo sapien
tagtcagaaggaatcacctacttcaggattaaa

SEQ ID NO: 46827 - DNA, 33 bp, Homo sapien
atttcctgtgtgcatcagaaagcaagaaaagtg

SEQ ID NO: 46828 - DNA, 33 bp, Homo sapien
atttcctgtgtgcatcggaaagcaagaaaagtg

SEQ ID NO: 46829 - DNA, 33 bp, Homo sapien
cagctgtcctgtgtccactgtacccttgagaac

SEQ ID NO: 46830 - DNA, 33 bp, Homo sapien
cagctgtcctgtgtcctctgtacccttgagaac

SEQ ID NO: 46831 - DNA, 33 bp, Homo sapien
acggtctgctaatgacacatcgctttgacttgt

SEQ ID NO: 46832 - DNA, 33 bp, Homo sapien
acggtctgctaatgacgcatcgctttgacttgt

SEQ ID NO: 46833 - DNA, 33 bp, Homo sapien
atcctgttctgcatgcacagaggtgatgctact

SEQ ID NO: 46834 - DNA, 33 bp, Homo sapien
atcctgttctgcatgcgcagaggtgatgctact

SEQ ID NO: 46835 - DNA, 33 bp, Homo sapien
ggcagtcattgaatggcatagacttgagattag

SEQ ID NO: 46836 - DNA, 33 bp, Homo sapien
ggcagtcattgaatgggatagacttgagattag

SEQ ID NO: 46837 - DNA, 33 bp, Homo sapien
gtttgctctgctgcaacgaaagtcagtattgat

SEQ ID NO: 46838 - DNA, 33 bp, Homo sapien
gtttgctctgctgcaaggaaagtcagtattgat

SEQ ID NO: 46839 - DNA, 33 bp, Homo sapien
taacagcaccagcttacgccgtaaacatctgat

SEQ ID NO: 46840 - DNA, 33 bp, Homo sapien
taacagcaccagcttatgccgtaaacatctgat

SEQ ID NO: 46841 - DNA, 33 bp, Homo sapien
acttcctagcaggcccaagaaacttaagtccag

SEQ ID NO: 46842 - DNA, 33 bp, Homo sapien
acttcctagcaggcccgagaaacttaagtccag

SEQ ID NO: 46843 - DNA, 33 bp, Homo sapien
gctgcttcattagtcacactattggcttttcat

SEQ ID NO: 46844 - DNA, 33 bp, Homo sapien
gctgcttcattagtcatactattggcttttcat

SEQ ID NO: 46845 - DNA, 33 bp, Homo sapien
ttcccttctgcttatacgctgatttctattggt

SEQ ID NO: 46846 - DNA, 33 bp, Homo sapien
ttcccttctgcttatatgctgatttctattggt

SEQ ID NO: 46847 - DNA, 33 bp, Homo sapien
ttgaaatctagagagaactgtacaaatattaag

SEQ ID NO: 46848 - DNA, 33 bp, Homo sapien
ttgaaatctagagagacctgtacaaatattaag

SEQ ID NO: 46849 - DNA, 33 bp, Homo sapien
tgcacttcagtgagaaaagacagaaaatgaaca

SEQ ID NO: 46850 - DNA, 33 bp, Homo sapien
tgcacttcagtgagaagagacagaaaatgaaca

SEQ ID NO: 46851 - DNA, 33 bp, Homo sapien
ctttggcaataagataagtaagggtcactccct

SEQ ID NO: 46852 - DNA, 33 bp, Homo sapien
ctttggcaataagataggtaagggtcactccct

SEQ ID NO: 46853 - DNA, 33 bp, Homo sapien
ctatgttccaataacaaaacaataggaggtgca

SEQ ID NO: 46854 - DNA, 33 bp, Homo sapien
ctatgttccaataacataacaataggaggtgca

SEQ ID NO: 46855 - DNA, 33 bp, Homo sapien
aagtggagtttgaaaccaaatgggatagatcat

SEQ ID NO: 46856 - DNA, 33 bp, Homo sapien
aagtggagtttgaaactaaatgggatagatcat

SEQ ID NO: 46857 - DNA, 33 bp, Homo sapien
ccactctgttctatacactgatcagcccaaacc

SEQ ID NO: 46858 - DNA, 33 bp, Homo sapien
ccactctgttctatactctgatcagcccaaacc

SEQ ID NO: 46859 - DNA, 33 bp, Homo sapien
tctgtcattgtcaccaactataattcccggtcc

SEQ ID NO: 46860 - DNA, 33 bp, Homo sapien
tctgtcattgtcaccagctataattcccggtcc

SEQ ID NO: 46861 - DNA, 33 bp, Homo sapien
tccaataaactaccaactgagtgcaacagatgg

SEQ ID NO: 46862 - DNA, 33 bp, Homo sapien
tccaataaactaccaattgagtgcaacagatgg

SEQ ID NO: 46863 - DNA, 33 bp, Homo sapien
atactcctgtagcaaccggaccagaaaaaacca

SEQ ID NO: 46864 - DNA, 33 bp, Homo sapien
atactcctgtagcaactggaccagaaaaaacca

SEQ ID NO: 46865 - DNA, 33 bp, Homo sapien
agataggcaaagaagacacaagatacaagtata

SEQ ID NO: 46866 - DNA, 33 bp, Homo sapien
agataggcaaagaagatacaagatacaagtata

SEQ ID NO: 46867 - DNA, 33 bp, Homo sapien
gctttggcatataaggaaaagtgtctctacatt

SEQ ID NO: 46868 - DNA, 33 bp, Homo sapien
gctttggcatataaggcaaagtgtctctacatt

SEQ ID NO: 46869 - DNA, 33 bp, Homo sapien
aaagtaaacttccccaatctttcctgacttgat

SEQ ID NO: 46870 - DNA, 33 bp, Homo sapien
aaagtaaacttccccagtctttcctgacttgat

SEQ ID NO: 46871 - DNA, 33 bp, Homo sapien
cagaggtttgtgctgcggattaaatgagttatt

SEQ ID NO: 46872 - DNA, 33 bp, Homo sapien
cagaggtttgtgctgctgattaaatgagttatt

SEQ ID NO: 46873 - DNA, 33 bp, Homo sapien
gaatcagaacatggtccatatcttttatctcca

SEQ ID NO: 46874 - DNA, 33 bp, Homo sapien
gaatcagaacatggtctatatcttttatctcca

SEQ ID NO: 46875 - DNA, 33 bp, Homo sapien
ccagtaccttttgagagagtccaggtagatttc

SEQ ID NO: 46876 - DNA, 33 bp, Homo sapien
ccagtaccttttgagatagtccaggtagatttc

SEQ ID NO: 46877 - DNA, 33 bp, Homo sapien
tacctttcttagtgccaaagaaggcaaagccca

SEQ ID NO: 46878 - DNA, 33 bp, Homo sapien
tacctttcttagtgccgaagaaggcaaagccca

SEQ ID NO: 46879 - DNA, 33 bp, Homo sapien
ggagaaggactgaagccatgttcactaaaagga

SEQ ID NO: 46880 - DNA, 33 bp, Homo sapien
ggagaaggactgaagctatgttcactaaaagga

SEQ ID NO: 46881 - DNA, 33 bp, Homo sapien
ctcttctgtcttccacacttccttaaaccgggc

SEQ ID NO: 46882 - DNA, 33 bp, Homo sapien
ctcttctgtcttccacgcttccttaaaccgggc

SEQ ID NO: 46883 - DNA, 33 bp, Homo sapien
ctatgtaggacagttacgtgacagggagaaatc

SEQ ID NO: 46884 - DNA, 33 bp, Homo sapien
ctatgtaggacagttatgtgacagggagaaatc

SEQ ID NO: 46885 - DNA, 33 bp, Homo sapien
aatagctcctgagacaaggacgaggatgcaggc

SEQ ID NO: 46886 - DNA, 33 bp, Homo sapien
aatagctcctgagacagggacgaggatgcaggc

SEQ ID NO: 46887 - DNA, 33 bp, Homo sapien
tgcacagcacactacacattgcaaacgacttcc

SEQ ID NO: 46888 - DNA, 33 bp, Homo sapien
tgcacagcacactacagattgcaaacgacttcc

SEQ ID NO: 46889 - DNA, 33 bp, Homo sapien
gggtgagtgttggagacatgggtatgtagaggt

SEQ ID NO: 46890 - DNA, 33 bp, Homo sapien
gggtgagtgttggagagatgggtatgtagaggt

SEQ ID NO: 46891 - DNA, 33 bp, Homo sapien
aagcgtgtgtgaagaacgggttagaattacctg

SEQ ID NO: 46892 - DNA, 33 bp, Homo sapien
aagcgtgtgtgaagaaggggttagaattacctg

SEQ ID NO: 46893 - DNA, 33 bp, Homo sapien
ctttccctgggccaaaaagcaaccgagaagggt

SEQ ID NO: 46894 - DNA, 33 bp, Homo sapien
ctttccctgggccaaagagcaaccgagaagggt

SEQ ID NO: 46895 - DNA, 33 bp, Homo sapien
ctgcaacctggacttacagcccttgagtcttca

SEQ ID NO: 46896 - DNA, 33 bp, Homo sapien
ctgcaacctggacttatagcccttgagtcttca

SEQ ID NO: 46897 - DNA, 33 bp, Homo sapien
ttcacagctggagggaagcttaagacagaggac

SEQ ID NO: 46898 - DNA, 33 bp, Homo sapien
ttcacagctggagggaggcttaagacagaggac

SEQ ID NO: 46899 - DNA, 33 bp, Homo sapien
gataaaagaggttgctcagagactcctagtgag

SEQ ID NO: 46900 - DNA, 33 bp, Homo sapien
gataaaagaggttgcttagagactcctagtgag

SEQ ID NO: 46901 - DNA, 33 bp, Homo sapien
aaagacgtgccacacagaagcatgaaggtaagg

SEQ ID NO: 46902 - DNA, 33 bp, Homo sapien
aaagacgtgccacacataagcatgaaggtaagg

SEQ ID NO: 46903 - DNA, 33 bp, Homo sapien
acaaaagggaatgccaactttctcaattttgaa

SEQ ID NO: 46904 - DNA, 33 bp, Homo sapien
acaaaagggaatgccagctttctcaattttgaa

SEQ ID NO: 46905 - DNA, 33 bp, Homo sapien
ggatggtgaggaagcactaacacttgttccaag

SEQ ID NO: 46906 - DNA, 33 bp, Homo sapien
ggatggtgaggaagcagtaacacttgttccaag

SEQ ID NO: 46907 - DNA, 33 bp, Homo sapien
gtatgtcccttcattcactcaacagacattaac

SEQ ID NO: 46908 - DNA, 33 bp, Homo sapien
gtatgtcccttcattcgctcaacagacattaac

SEQ ID NO: 46909 - DNA, 33 bp, Homo sapien
agcttgtccatgttgtaaaagagttctcgggcc

SEQ ID NO: 46910 - DNA, 33 bp, Homo sapien
agcttgtccatgttgtcaaagagttctcgggcc

SEQ ID NO: 46911 - DNA, 33 bp, Homo sapien
aggagtagactcgaaactgggacatcttgtgtt

SEQ ID NO: 46912 - DNA, 33 bp, Homo sapien
aggagtagactcgaaattgggacatcttgtgtt

SEQ ID NO: 46913 - DNA, 33 bp, Homo sapien
tccagtcccttcatgaatacacagagactagac

SEQ ID NO: 46914 - DNA, 33 bp, Homo sapien
tccagtcccttcatgagtacacagagactagac

SEQ ID NO: 46915 - DNA, 33 bp, Homo sapien
tattacttcagctatacaaaattattgttgaga

SEQ ID NO: 46916 - DNA, 33 bp, Homo sapien
tattacttcagctatataaaattattgttgaga

SEQ ID NO: 46917 - DNA, 33 bp, Homo sapien
cctgggaaaaatggtacccaacttgtcattgac

SEQ ID NO: 46918 - DNA, 33 bp, Homo sapien
cctgggaaaaatggtatccaacttgtcattgac

SEQ ID NO: 46919 - DNA, 33 bp, Homo sapien
tccctcccctcttcagcccatttcaatttagac

SEQ ID NO: 46920 - DNA, 33 bp, Homo sapien
tccctcccctcttcagtccatttcaatttagac

SEQ ID NO: 46921 - DNA, 33 bp, Homo sapien
ttcagctcctgatatcaaggtcacacctcctcc

SEQ ID NO: 46922 - DNA, 33 bp, Homo sapien
ttcagctcctgatatccaggtcacacctcctcc

SEQ ID NO: 46923 - DNA, 33 bp, Homo sapien
ctttgctttcaaaaagccttcaggaaataaaga

SEQ ID NO: 46924 - DNA, 33 bp, Homo sapien
ctttgctttcaaaaaggcttcaggaaataaaga

SEQ ID NO: 46925 - DNA, 33 bp, Homo sapien
catctaaggtaactaacactccctgagttggtg

SEQ ID NO: 46926 - DNA, 33 bp, Homo sapien
catctaaggtaactaagactccctgagttggtg

SEQ ID NO: 46927 - DNA, 33 bp, Homo sapien
cctgagcccaggaagccgcgaaatgaacaaacc

SEQ ID NO: 46928 - DNA, 33 bp, Homo sapien
cctgagcccaggaagctgcgaaatgaacaaacc

SEQ ID NO: 46929 - DNA, 33 bp, Homo sapien
gaaggatgaaaagaacccattgcacagaattct

SEQ ID NO: 46930 - DNA, 33 bp, Homo sapien
gaaggatgaaaagaactcattgcacagaattct

SEQ ID NO: 46931 - DNA, 33 bp, Homo sapien
tctgagactcactggaagtcctgttcctttgcc

SEQ ID NO: 46932 - DNA, 33 bp, Homo sapien
tctgagactcactggaggtcctgttcctttgcc

SEQ ID NO: 46933 - DNA, 33 bp, Homo sapien
ataaggtgtagcagaaagaactcaatttttttt

SEQ ID NO: 46934 - DNA, 33 bp, Homo sapien
ataaggtgtagcagaacgaactcaatttttttt

SEQ ID NO: 46935 - DNA, 33 bp, Homo sapien
gttatagatcatctaacgtgtttaactgaattg

SEQ ID NO: 46936 - DNA, 33 bp, Homo sapien
gttatagatcatctaaggtgtttaactgaattg

SEQ ID NO: 46937 - DNA, 33 bp, Homo sapien
ctacatactgaattgtaaaaggatcttagccct

SEQ ID NO: 46938 - DNA, 33 bp, Homo sapien
ctacatactgaattgtgaaaggatcttagccct

SEQ ID NO: 46939 - DNA, 33 bp, Homo sapien
tatacctatacggaagcaagactccaggggaac

SEQ ID NO: 46940 - DNA, 33 bp, Homo sapien
tatacctatacggaaggaagactccaggggaac

SEQ ID NO: 46941 - DNA, 33 bp, Homo sapien
gaatccctcctaatgacgaaacgagacattatc

SEQ ID NO: 46942 - DNA, 33 bp, Homo sapien
gaatccctcctaatgatgaaacgagacattatc

SEQ ID NO: 46943 - DNA, 33 bp, Homo sapien
ggatgatggaagattaagcctgtgttggcatgg

SEQ ID NO: 46944 - DNA, 33 bp, Homo sapien
ggatgatggaagattaggcctgtgttggcatgg

SEQ ID NO: 46945 - DNA, 33 bp, Homo sapien
caaaattcaacccttacctcaatttccacccaa

SEQ ID NO: 46946 - DNA, 33 bp, Homo sapien
caaaattcaacccttatctcaatttccacccaa

SEQ ID NO: 46947 - DNA, 33 bp, Homo sapien
tcacctaccatgctcgcccttgcttgttgttgc

SEQ ID NO: 46948 - DNA, 33 bp, Homo sapien
tcacctaccatgctcgtccttgcttgttgttgc

SEQ ID NO: 46949 - DNA, 33 bp, Homo sapien
ctatccttaaaatgcaaaacacataagattctc

SEQ ID NO: 46950 - DNA, 33 bp, Homo sapien
ctatccttaaaatgcagaacacataagattctc

SEQ ID NO: 46951 - DNA, 33 bp, Homo sapien
tcctcattacagaaaacgcagactatacgaaag

SEQ ID NO: 46952 - DNA, 33 bp, Homo sapien
tcctcattacagaaaatgcagactatacgaaag

SEQ ID NO: 46953 - DNA, 33 bp, Homo sapien
gattttaagctacagaccagttttattagcaaa

SEQ ID NO: 46954 - DNA, 33 bp, Homo sapien
gattttaagctacagatcagttttattagcaaa

SEQ ID NO: 46955 - DNA, 33 bp, Homo sapien
cagtcagacaggttcacgtgaagacagacaggt

SEQ ID NO: 46956 - DNA, 33 bp, Homo sapien
cagtcagacaggttcaggtgaagacagacaggt

SEQ ID NO: 46957 - DNA, 33 bp, Homo sapien
gaaatattcatgggaaaataagaaatcataatg

SEQ ID NO: 46958 - DNA, 33 bp, Homo sapien
gaaatattcatgggaagataagaaatcataatg

SEQ ID NO: 46959 - DNA, 33 bp, Homo sapien
cctctgtgaaggagaacgggtcagggtctcact

SEQ ID NO: 46960 - DNA, 33 bp, Homo sapien
cctctgtgaaggagaatgggtcagggtctcact

SEQ ID NO: 46961 - DNA, 33 bp, Homo sapien
aagaagctgatgggcaacctggatgagaacagt

SEQ ID NO: 46962 - DNA, 33 bp, Homo sapien
aagaagctgatgggcagcctggatgagaacagt

SEQ ID NO: 46963 - DNA, 33 bp, Homo sapien
agaaaacaagtacacaagtgattcagtcaaaat

SEQ ID NO: 46964 - DNA, 33 bp, Homo sapien
agaaaacaagtacacaggtgattcagtcaaaat

SEQ ID NO: 46965 - DNA, 33 bp, Homo sapien
ctgaagctcttttccgacccgttgtctcggttc

SEQ ID NO: 46966 - DNA, 33 bp, Homo sapien
ctgaagctcttttccggcccgttgtctcggttc

SEQ ID NO: 46967 - DNA, 33 bp, Homo sapien
acaaccaagctcctagcaagcctggctgtccat

SEQ ID NO: 46968 - DNA, 33 bp, Homo sapien
acaaccaagctcctagtaagcctggctgtccat

SEQ ID NO: 46969 - DNA, 33 bp, Homo sapien
ggttcattataacaaactgttcgcttaaatcca

SEQ ID NO: 46970 - DNA, 33 bp, Homo sapien
ggttcattataacaaattgttcgcttaaatcca

SEQ ID NO: 46971 - DNA, 33 bp, Homo sapien
catcctttgtaagggtaacattaggagcatagg

SEQ ID NO: 46972 - DNA, 33 bp, Homo sapien
catcctttgtaagggtgacattaggagcatagg

SEQ ID NO: 46973 - DNA, 33 bp, Homo sapien
actttcccttgtcttaaaagatccagctcatca

SEQ ID NO: 46974 - DNA, 33 bp, Homo sapien
actttcccttgtcttataagatccagctcatca

SEQ ID NO: 46975 - DNA, 33 bp, Homo sapien
aagaaggtaagcctcaagtatgcagcttaaaaa

SEQ ID NO: 46976 - DNA, 33 bp, Homo sapien
aagaaggtaagcctcacgtatgcagcttaaaaa

SEQ ID NO: 46977 - DNA, 33 bp, Homo sapien
gggctcaccctcctcaactaacatgggcatgat

SEQ ID NO: 46978 - DNA, 33 bp, Homo sapien
gggctcaccctcctcagctaacatgggcatgat

SEQ ID NO: 46979 - DNA, 33 bp, Homo sapien
tttccctgccttatccagccttatctttgtgtc

SEQ ID NO: 46980 - DNA, 33 bp, Homo sapien
tttccctgccttatcctgccttatctttgtgtc

SEQ ID NO: 46981 - DNA, 33 bp, Homo sapien
tgattaagagtcaacagtatacaaatcataacg

SEQ ID NO: 46982 - DNA, 33 bp, Homo sapien
tgattaagagtcaacattatacaaatcataacg

SEQ ID NO: 46983 - DNA, 33 bp, Homo sapien
tagctaaaacagggacggaagagaagcagcttt

SEQ ID NO: 46984 - DNA, 33 bp, Homo sapien
tagctaaaacagggactgaagagaagcagcttt

SEQ ID NO: 46985 - DNA, 33 bp, Homo sapien
gcagagacacaatgacacctctaagaatcaggg

SEQ ID NO: 46986 - DNA, 33 bp, Homo sapien
gcagagacacaatgacgcctctaagaatcaggg

SEQ ID NO: 46987 - DNA, 33 bp, Homo sapien
tctgaacctatgattcgatctttactaagagac

SEQ ID NO: 46988 - DNA, 33 bp, Homo sapien
tctgaacctatgattctatctttactaagagac

SEQ ID NO: 46989 - DNA, 33 bp, Homo sapien
aggccatcccattagaatagaagtagtgtctgg

SEQ ID NO: 46990 - DNA, 33 bp, Homo sapien
aggccatcccattagagtagaagtagtgtctgg

SEQ ID NO: 46991 - DNA, 33 bp, Homo sapien
ctgtagtaccagctacgcagaagttcgaagctg

SEQ ID NO: 46992 - DNA, 33 bp, Homo sapien
ctgtagtaccagctactcagaagttcgaagctg

SEQ ID NO: 46993 - DNA, 33 bp, Homo sapien
ggccatctgcttttcacctgccagtcagtaaaa

SEQ ID NO: 46994 - DNA, 33 bp, Homo sapien
ggccatctgcttttcatctgccagtcagtaaaa

SEQ ID NO: 46995 - DNA, 33 bp, Homo sapien
cttttctcccctgcaaacttctccatccaaccc

SEQ ID NO: 46996 - DNA, 33 bp, Homo sapien
cttttctcccctgcaagcttctccatccaaccc

SEQ ID NO: 46997 - DNA, 33 bp, Homo sapien
tgccattattcagtcaagtctggaaacatacat

SEQ ID NO: 46998 - DNA, 33 bp, Homo sapien
tgccattattcagtcaggtctggaaacatacat

SEQ ID NO: 46999 - DNA, 33 bp, Homo sapien
cgcccaagccgagaaacaacttagaagacagac

SEQ ID NO: 47000 - DNA, 33 bp, Homo sapien
cgcccaagccgagaaataacttagaagacagac

SEQ ID NO: 47001 - DNA, 33 bp, Homo sapien
gccacattccatgccacgcagcggtaggttccc

SEQ ID NO: 47002 - DNA, 33 bp, Homo sapien
gccacattccatgccatgcagcggtaggttccc

SEQ ID NO: 47003 - DNA, 33 bp, Homo sapien
ctgaaaagcagtaaggaagcaccaaaagaccat

SEQ ID NO: 47004 - DNA, 33 bp, Homo sapien
ctgaaaagcagtaagggagcaccaaaagaccat

SEQ ID NO: 47005 - DNA, 33 bp, Homo sapien
gccaggggcacatcacacaatgagacacagcgg

SEQ ID NO: 47006 - DNA, 33 bp, Homo sapien
gccaggggcacatcacgcaatgagacacagcgg

SEQ ID NO: 47007 - DNA, 33 bp, Homo sapien
caatctacaaccaatcaattttaccaatgagga

SEQ ID NO: 47008 - DNA, 33 bp, Homo sapien
caatctacaaccaatctattttaccaatgagga

SEQ ID NO: 47009 - DNA, 33 bp, Homo sapien
tggtaaataaggcaaccgtctagaggaacaagc

SEQ ID NO: 47010 - DNA, 33 bp, Homo sapien
tggtaaataaggcaactgtctagaggaacaagc

SEQ ID NO: 47011 - DNA, 33 bp, Homo sapien
caacactaagatcccactatgggtcacatacct

SEQ ID NO: 47012 - DNA, 33 bp, Homo sapien
caacactaagatcccattatgggtcacatacct

SEQ ID NO: 47013 - DNA, 33 bp, Homo sapien
aggtaacaagaattccagaaactctaactgcct

SEQ ID NO: 47014 - DNA, 33 bp, Homo sapien
aggtaacaagaattccggaaactctaactgcct

SEQ ID NO: 47015 - DNA, 33 bp, Homo sapien
aaacaattttggacataagattataaaatgcct

SEQ ID NO: 47016 - DNA, 33 bp, Homo sapien
aaacaattttggacattagattataaaatgcct

SEQ ID NO: 47017 - DNA, 33 bp, Homo sapien
tgccatcaccctcatacgcttggcctgaccttg

SEQ ID NO: 47018 - DNA, 33 bp, Homo sapien
tgccatcaccctcatatgcttggcctgaccttg

SEQ ID NO: 47019 - DNA, 33 bp, Homo sapien
aacacaagcttaggaaatcagataatgcagctc

SEQ ID NO: 47020 - DNA, 33 bp, Homo sapien
aacacaagcttaggaagtcagataatgcagctc

SEQ ID NO: 47021 - DNA, 33 bp, Homo sapien
tcccttacaagccaacaagtaaccatatccata

SEQ ID NO: 47022 - DNA, 33 bp, Homo sapien
tcccttacaagccaacgagtaaccatatccata

SEQ ID NO: 47023 - DNA, 33 bp, Homo sapien
atttaattagtgcctacagtagaaaagggcatc

SEQ ID NO: 47024 - DNA, 33 bp, Homo sapien
atttaattagtgcctatagtagaaaagggcatc

SEQ ID NO: 47025 - DNA, 33 bp, Homo sapien
ggcacgactcactgccactggtagttaaaattc

SEQ ID NO: 47026 - DNA, 33 bp, Homo sapien
ggcacgactcactgcctctggtagttaaaattc

SEQ ID NO: 47027 - DNA, 33 bp, Homo sapien
gaaagcaaatgtgccaaacaatcatttagaaaa

SEQ ID NO: 47028 - DNA, 33 bp, Homo sapien
gaaagcaaatgtgccagacaatcatttagaaaa

SEQ ID NO: 47029 - DNA, 33 bp, Homo sapien
aacatcattcagataaactttacgcctttataa

SEQ ID NO: 47030 - DNA, 33 bp, Homo sapien
aacatcattcagataacctttacgcctttataa

SEQ ID NO: 47031 - DNA, 33 bp, Homo sapien
tcagcttagaaatgagaatcagtaactgcttta

SEQ ID NO: 47032 - DNA, 33 bp, Homo sapien
tcagcttagaaatgaggatcagtaactgcttta

SEQ ID NO: 47033 - DNA, 33 bp, Homo sapien
tcctggtgtctaatctaaatcctactaacattc

SEQ ID NO: 47034 - DNA, 33 bp, Homo sapien
tcctggtgtctaatctgaatcctactaacattc

SEQ ID NO: 47035 - DNA, 33 bp, Homo sapien
caatttggtcatctgtaaaatggcataagcacc

SEQ ID NO: 47036 - DNA, 33 bp, Homo sapien
caatttggtcatctgtgaaatggcataagcacc

SEQ ID NO: 47037 - DNA, 33 bp, Homo sapien
attgggtctcttctcacatttctaagttttcag

SEQ ID NO: 47038 - DNA, 33 bp, Homo sapien
attgggtctcttctcagatttctaagttttcag

SEQ ID NO: 47039 - DNA, 33 bp, Homo sapien
ggacactatacataagaacaggctcacatggga

SEQ ID NO: 47040 - DNA, 33 bp, Homo sapien
ggacactatacataaggacaggctcacatggga

SEQ ID NO: 47041 - DNA, 33 bp, Homo sapien
acaatattggccactacgaggaggatgccaaat

SEQ ID NO: 47042 - DNA, 33 bp, Homo sapien
acaatattggccactatgaggaggatgccaaat

SEQ ID NO: 47043 - DNA, 33 bp, Homo sapien
gtcttcttgctgtcataaatcagtagctcaaag

SEQ ID NO: 47044 - DNA, 33 bp, Homo sapien
gtcttcttgctgtcatcaatcagtagctcaaag

SEQ ID NO: 47045 - DNA, 33 bp, Homo sapien
gtacatccaagtaagaactgcttgtagtaatgt

SEQ ID NO: 47046 - DNA, 33 bp, Homo sapien
gtacatccaagtaagacctgcttgtagtaatgt

SEQ ID NO: 47047 - DNA, 33 bp, Homo sapien
cagatgatatctccaacaaaggtaagcttggtg

SEQ ID NO: 47048 - DNA, 33 bp, Homo sapien
cagatgatatctccaataaaggtaagcttggtg

SEQ ID NO: 47049 - DNA, 33 bp, Homo sapien
aacaaattatcacttagatgggtcgagtaagtt

SEQ ID NO: 47050 - DNA, 33 bp, Homo sapien
aacaaattatcacttatatgggtcgagtaagtt

SEQ ID NO: 47051 - DNA, 33 bp, Homo sapien
tttgctaacggatctcactaccaaaccaattgt

SEQ ID NO: 47052 - DNA, 33 bp, Homo sapien
tttgctaacggatctcgctaccaaaccaattgt

SEQ ID NO: 47053 - DNA, 33 bp, Homo sapien
ggcaacaatagggaaaactggtctcaaaaaaca

SEQ ID NO: 47054 - DNA, 33 bp, Homo sapien
ggcaacaatagggaaacctggtctcaaaaaaca

SEQ ID NO: 47055 - DNA, 33 bp, Homo sapien
aattcgttctgggttccctgatattagacttaa

SEQ ID NO: 47056 - DNA, 33 bp, Homo sapien
aattcgttctgggttctctgatattagacttaa

SEQ ID NO: 47057 - DNA, 33 bp, Homo sapien
gacactggcacaataacccatgtggataattgg

SEQ ID NO: 47058 - DNA, 33 bp, Homo sapien
gacactggcacaataagccatgtggataattgg

SEQ ID NO: 47059 - DNA, 33 bp, Homo sapien
cagccattccagtagacaatgatgtattcttga

SEQ ID NO: 47060 - DNA, 33 bp, Homo sapien
cagccattccagtagataatgatgtattcttga

SEQ ID NO: 47061 - DNA, 33 bp, Homo sapien
ggaaaattggtcccaaatcagacgaagttaagc

SEQ ID NO: 47062 - DNA, 33 bp, Homo sapien
ggaaaattggtcccaagtcagacgaagttaagc

SEQ ID NO: 47063 - DNA, 33 bp, Homo sapien
cctccagctgtgtgacaatcttccagacgtgtg

SEQ ID NO: 47064 - DNA, 33 bp, Homo sapien
cctccagctgtgtgacgatcttccagacgtgtg

SEQ ID NO: 47065 - DNA, 33 bp, Homo sapien
aatgccaacatgatgcccaaagaaaatgctcat

SEQ ID NO: 47066 - DNA, 33 bp, Homo sapien
aatgccaacatgatgctcaaagaaaatgctcat

SEQ ID NO: 47067 - DNA, 33 bp, Homo sapien
aagaggcagaagcagagaatacttgtctttgtg

SEQ ID NO: 47068 - DNA, 33 bp, Homo sapien
aagaggcagaagcagataatacttgtctttgtg

SEQ ID NO: 47069 - DNA, 33 bp, Homo sapien
agaagctggaggaagacaggctgggaaagagac

SEQ ID NO: 47070 - DNA, 33 bp, Homo sapien
agaagctggaggaagagaggctgggaaagagac

SEQ ID NO: 47071 - DNA, 33 bp, Homo sapien
atatattgccaactgactacctgacatttccac

SEQ ID NO: 47072 - DNA, 33 bp, Homo sapien
atatattgccaactgattacctgacatttccac

SEQ ID NO: 47073 - DNA, 33 bp, Homo sapien
gaagacagtcacctaaagagaaagtacagacaa

SEQ ID NO: 47074 - DNA, 33 bp, Homo sapien
gaagacagtcacctaaggagaaagtacagacaa

SEQ ID NO: 47075 - DNA, 33 bp, Homo sapien
gccacagcactgagcaagtaagccaagttccaa

SEQ ID NO: 47076 - DNA, 33 bp, Homo sapien
gccacagcactgagcaggtaagccaagttccaa

SEQ ID NO: 47077 - DNA, 33 bp, Homo sapien
ttaaatactgtattcaatcacctaagaaaacag

SEQ ID NO: 47078 - DNA, 33 bp, Homo sapien
ttaaatactgtattcagtcacctaagaaaacag

SEQ ID NO: 47079 - DNA, 33 bp, Homo sapien
cccggcccaaatcttacatggttcttgagggag

SEQ ID NO: 47080 - DNA, 33 bp, Homo sapien
cccggcccaaatcttatatggttcttgagggag

SEQ ID NO: 47081 - DNA, 33 bp, Homo sapien
cttagaactgtccaaccgtaagattgtcccaag

SEQ ID NO: 47082 - DNA, 33 bp, Homo sapien
cttagaactgtccaactgtaagattgtcccaag

SEQ ID NO: 47083 - DNA, 33 bp, Homo sapien
actgtgagtagtagcaaaaaggggcagagatga

SEQ ID NO: 47084 - DNA, 33 bp, Homo sapien
actgtgagtagtagcataaaggggcagagatga

SEQ ID NO: 47085 - DNA, 33 bp, Homo sapien
tggacttgaaggacaacgatggatcagggaaaa

SEQ ID NO: 47086 - DNA, 33 bp, Homo sapien
tggacttgaaggacaatgatggatcagggaaaa

SEQ ID NO: 47087 - DNA, 33 bp, Homo sapien
tcctatcttcttgacccgatgccttatacccca

SEQ ID NO: 47088 - DNA, 33 bp, Homo sapien
tcctatcttcttgacctgatgccttatacccca

SEQ ID NO: 47089 - DNA, 33 bp, Homo sapien
ttgatcttgatactagacctttacatcttaagt

SEQ ID NO: 47090 - DNA, 33 bp, Homo sapien
ttgatcttgatactaggcctttacatcttaagt

SEQ ID NO: 47091 - DNA, 33 bp, Homo sapien
agaaaggctacagataccacctcatctcaggaa

SEQ ID NO: 47092 - DNA, 33 bp, Homo sapien
agaaaggctacagatatcacctcatctcaggaa

SEQ ID NO: 47093 - DNA, 33 bp, Homo sapien
cgtggcaaattgtttaacgtgtcatgtaattta

SEQ ID NO: 47094 - DNA, 33 bp, Homo sapien
cgtggcaaattgtttatcgtgtcatgtaattta

SEQ ID NO: 47095 - DNA, 33 bp, Homo sapien
ttatgtatccttctaccagaaagacttcctgaa

SEQ ID NO: 47096 - DNA, 33 bp, Homo sapien
ttatgtatccttctacgagaaagacttcctgaa

SEQ ID NO: 47097 - DNA, 33 bp, Homo sapien
gccctcctttgcctcaaagtcagaaagaacaca

SEQ ID NO: 47098 - DNA, 33 bp, Homo sapien
gccctcctttgcctcagagtcagaaagaacaca

SEQ ID NO: 47099 - DNA, 33 bp, Homo sapien
tagatggctatcgtaacggccagagagccagcc

SEQ ID NO: 47100 - DNA, 33 bp, Homo sapien
tagatggctatcgtaatggccagagagccagcc

SEQ ID NO: 47101 - DNA, 33 bp, Homo sapien
ctagtaggtggaaacaaacaatatgcaactttt

SEQ ID NO: 47102 - DNA, 33 bp, Homo sapien
ctagtaggtggaaacagacaatatgcaactttt

SEQ ID NO: 47103 - DNA, 33 bp, Homo sapien
cttatttcagtctgggacactgttcaaggggat

SEQ ID NO: 47104 - DNA, 33 bp, Homo sapien
cttatttcagtctggggcactgttcaaggggat

SEQ ID NO: 47105 - DNA, 33 bp, Homo sapien
ctcaggtgctgatcaacggaatgtgagtgcctg

SEQ ID NO: 47106 - DNA, 33 bp, Homo sapien
ctcaggtgctgatcaatggaatgtgagtgcctg

SEQ ID NO: 47107 - DNA, 33 bp, Homo sapien
ccattgtgctcaccacagtcgtctgcatcatgc

SEQ ID NO: 47108 - DNA, 33 bp, Homo sapien
ccattgtgctcaccacggtcgtctgcatcatgc

SEQ ID NO: 47109 - DNA, 33 bp, Homo sapien
gaccagcacactcaaactgtggcccttgaactg

SEQ ID NO: 47110 - DNA, 33 bp, Homo sapien
gaccagcacactcaaattgtggcccttgaactg

SEQ ID NO: 47111 - DNA, 33 bp, Homo sapien
ctcttctgtcatataacaggtttcctcatttat

SEQ ID NO: 47112 - DNA, 33 bp, Homo sapien
ctcttctgtcatataataggtttcctcatttat

SEQ ID NO: 47113 - DNA, 33 bp, Homo sapien
gcatggggtttctctaagtcagcaaaaagcacc

SEQ ID NO: 47114 - DNA, 33 bp, Homo sapien
gcatggggtttctctaggtcagcaaaaagcacc

SEQ ID NO: 47115 - DNA, 33 bp, Homo sapien
caaattcaaagataaacaaggcacagattttgc

SEQ ID NO: 47116 - DNA, 33 bp, Homo sapien
caaattcaaagataaataaggcacagattttgc

SEQ ID NO: 47117 - DNA, 33 bp, Homo sapien
ctggccaacagggaaaaacctcattgctactaa

SEQ ID NO: 47118 - DNA, 33 bp, Homo sapien
ctggccaacagggaaagacctcattgctactaa

SEQ ID NO: 47119 - DNA, 33 bp, Homo sapien
acagcagaagcaaacccgactgaaactgttaag

SEQ ID NO: 47120 - DNA, 33 bp, Homo sapien
acagcagaagcaaacctgactgaaactgttaag

SEQ ID NO: 47121 - DNA, 33 bp, Homo sapien
aggagattgtgtatgtaaagcaatttgtaagca

SEQ ID NO: 47122 - DNA, 33 bp, Homo sapien
aggagattgtgtatgtgaagcaatttgtaagca

SEQ ID NO: 47123 - DNA, 33 bp, Homo sapien
catgcactgatccaccacacgatgggagctggt

SEQ ID NO: 47124 - DNA, 33 bp, Homo sapien
catgcactgatccaccgcacgatgggagctggt

SEQ ID NO: 47125 - DNA, 33 bp, Homo sapien
agcagcaagccaaagcaaggagagatttctggc

SEQ ID NO: 47126 - DNA, 33 bp, Homo sapien
agcagcaagccaaagcgaggagagatttctggc

SEQ ID NO: 47127 - DNA, 33 bp, Homo sapien
gctggcagaaaagggaaagatataaggccatca

SEQ ID NO: 47128 - DNA, 33 bp, Homo sapien
gctggcagaaaagggacagatataaggccatca

SEQ ID NO: 47129 - DNA, 33 bp, Homo sapien
gcattgctgtagtagacgtagggtactggaggg

SEQ ID NO: 47130 - DNA, 33 bp, Homo sapien
gcattgctgtagtagatgtagggtactggaggg

SEQ ID NO: 47131 - DNA, 33 bp, Homo sapien
ctgtctggaatgcacaaagcctcatttcttacg

SEQ ID NO: 47132 - DNA, 33 bp, Homo sapien
ctgtctggaatgcacagagcctcatttcttacg

SEQ ID NO: 47133 - DNA, 33 bp, Homo sapien
tcccaggtgcttcccaagacctctgtgtctccc

SEQ ID NO: 47134 - DNA, 33 bp, Homo sapien
tcccaggtgcttcccaggacctctgtgtctccc

SEQ ID NO: 47135 - DNA, 33 bp, Homo sapien
tggaaaccctccctgacgccgaagcagggtcac

SEQ ID NO: 47136 - DNA, 33 bp, Homo sapien
tggaaaccctccctgatgccgaagcagggtcac

SEQ ID NO: 47137 - DNA, 33 bp, Homo sapien
accagcattccagtcacggtagtacctgcatcc

SEQ ID NO: 47138 - DNA, 33 bp, Homo sapien
accagcattccagtcatggtagtacctgcatcc

SEQ ID NO: 47139 - DNA, 33 bp, Homo sapien
tccctgttctcaaggaggctacagtccaggctc

SEQ ID NO: 47140 - DNA, 33 bp, Homo sapien
tccctgttctcaaggatgctacagtccaggctc

SEQ ID NO: 47141 - DNA, 33 bp, Homo sapien
ggctgacttttctgcaaacttggaaatgaatga

SEQ ID NO: 47142 - DNA, 33 bp, Homo sapien
ggctgacttttctgcagacttggaaatgaatga

SEQ ID NO: 47143 - DNA, 33 bp, Homo sapien
aaaaaaatatagtatacactggcaggatgaagt

SEQ ID NO: 47144 - DNA, 33 bp, Homo sapien
aaaaaaatatagtatagactggcaggatgaagt

SEQ ID NO: 47145 - DNA, 33 bp, Homo sapien
acatggatcttcaaaaacacagtcacgtcccct

SEQ ID NO: 47146 - DNA, 33 bp, Homo sapien
acatggatcttcaaaagcacagtcacgtcccct

SEQ ID NO: 47147 - DNA, 33 bp, Homo sapien
tgtatcagggagcacactggcccatttcacatg

SEQ ID NO: 47148 - DNA, 33 bp, Homo sapien
tgtatcagggagcacattggcccatttcacatg

SEQ ID NO: 47149 - DNA, 33 bp, Homo sapien
tttgttagcagtttagaagagtcgttgaatgag

SEQ ID NO: 47150 - DNA, 33 bp, Homo sapien
tttgttagcagtttaggagagtcgttgaatgag

SEQ ID NO: 47151 - DNA, 33 bp, Homo sapien
gaagacattcacacaaacttgctaactggtctc

SEQ ID NO: 47152 - DNA, 33 bp, Homo sapien
gaagacattcacacaaccttgctaactggtctc

SEQ ID NO: 47153 - DNA, 33 bp, Homo sapien
atttagaggacagtaacagaagtctccatgata

SEQ ID NO: 47154 - DNA, 33 bp, Homo sapien
atttagaggacagtaatagaagtctccatgata

SEQ ID NO: 47155 - DNA, 33 bp, Homo sapien
tttttcttgggtaacaccatttttcctaagact

SEQ ID NO: 47156 - DNA, 33 bp, Homo sapien
tttttcttgggtaacatcatttttcctaagact

SEQ ID NO: 47157 - DNA, 33 bp, Homo sapien
gtgtgggacaagtaccgggaggccttaaagaga

SEQ ID NO: 47158 - DNA, 33 bp, Homo sapien
gtgtgggacaagtacctggaggccttaaagaga

SEQ ID NO: 47159 - DNA, 33 bp, Homo sapien
tattccaaacttagaactgaagaggccagcaac

SEQ ID NO: 47160 - DNA, 33 bp, Homo sapien
tattccaaacttagaattgaagaggccagcaac

SEQ ID NO: 47161 - DNA, 33 bp, Homo sapien
gggatgaagagacaaaagtcagagacaggggat

SEQ ID NO: 47162 - DNA, 33 bp, Homo sapien
gggatgaagagacaaacgtcagagacaggggat

SEQ ID NO: 47163 - DNA, 33 bp, Homo sapien
taggtgctgttaactcccctgttctgcagatgt

SEQ ID NO: 47164 - DNA, 33 bp, Homo sapien
taggtgctgttaactctcctgttctgcagatgt

SEQ ID NO: 47165 - DNA, 33 bp, Homo sapien
ctcaccacctggaccactctactaacacctgtt

SEQ ID NO: 47166 - DNA, 33 bp, Homo sapien
ctcaccacctggaccattctactaacacctgtt

SEQ ID NO: 47167 - DNA, 33 bp, Homo sapien
gcattgaggattagagacatggcaatgctaaga

SEQ ID NO: 47168 - DNA, 33 bp, Homo sapien
gcattgaggattagagtcatggcaatgctaaga

SEQ ID NO: 47169 - DNA, 33 bp, Homo sapien
tccatcaatagtgaaacggataaatgatagtgt

SEQ ID NO: 47170 - DNA, 33 bp, Homo sapien
tccatcaatagtgaaatggataaatgatagtgt

SEQ ID NO: 47171 - DNA, 33 bp, Homo sapien
gggcgtaaatctgcaccacttgttccggggcat

SEQ ID NO: 47172 - DNA, 33 bp, Homo sapien
gggcgtaaatctgcacgacttgttccggggcat

SEQ ID NO: 47173 - DNA, 33 bp, Homo sapien
ggggctgtttgtatcccagtattagctcctgtt

SEQ ID NO: 47174 - DNA, 33 bp, Homo sapien
ggggctgtttgtatcctagtattagctcctgtt

SEQ ID NO: 47175 - DNA, 33 bp, Homo sapien
tcctaggaatgctttaagagaagaggcagctgg

SEQ ID NO: 47176 - DNA, 33 bp, Homo sapien
tcctaggaatgctttaggagaagaggcagctgg

SEQ ID NO: 47177 - DNA, 33 bp, Homo sapien
agaaaccttctacccactggcgcagtcactcct

SEQ ID NO: 47178 - DNA, 33 bp, Homo sapien
agaaaccttctacccattggcgcagtcactcct

SEQ ID NO: 47179 - DNA, 33 bp, Homo sapien
ttgtaagcatgtatcaacacttcacttcttttt

SEQ ID NO: 47180 - DNA, 33 bp, Homo sapien
ttgtaagcatgtatcagcacttcacttcttttt

SEQ ID NO: 47181 - DNA, 33 bp, Homo sapien
attcaatttatggatacatttgatgttttattt

SEQ ID NO: 47182 - DNA, 33 bp, Homo sapien
attcaatttatggatatatttgatgttttattt

SEQ ID NO: 47183 - DNA, 33 bp, Homo sapien
ttccgtctcagacttccagtttccctccctaga

SEQ ID NO: 47184 - DNA, 33 bp, Homo sapien
ttccgtctcagacttctagtttccctccctaga

SEQ ID NO: 47185 - DNA, 33 bp, Homo sapien
aagtctgagacggaaaggagacttttcattgaa

SEQ ID NO: 47186 - DNA, 33 bp, Homo sapien
aagtctgagacggaaatgagacttttcattgaa

SEQ ID NO: 47187 - DNA, 33 bp, Homo sapien
gcaatccctgagaccaaaagaaacgcagagttc

SEQ ID NO: 47188 - DNA, 33 bp, Homo sapien
gcaatccctgagaccagaagaaacgcagagttc

SEQ ID NO: 47189 - DNA, 33 bp, Homo sapien
cacagcgaagacccaaatgaggttcaagagaag

SEQ ID NO: 47190 - DNA, 33 bp, Homo sapien
cacagcgaagacccaactgaggttcaagagaag

SEQ ID NO: 47191 - DNA, 33 bp, Homo sapien
aatccacagtgaactaaggcatgtttgttaaac

SEQ ID NO: 47192 - DNA, 33 bp, Homo sapien
aatccacagtgaactacggcatgtttgttaaac

SEQ ID NO: 47193 - DNA, 33 bp, Homo sapien
cgagaagcatggagtaagaaaccacaaacagca

SEQ ID NO: 47194 - DNA, 33 bp, Homo sapien
cgagaagcatggagtaggaaaccacaaacagca

SEQ ID NO: 47195 - DNA, 33 bp, Homo sapien
tgcttgttgcttagacaatgcctagtccagata

SEQ ID NO: 47196 - DNA, 33 bp, Homo sapien
tgcttgttgcttagaccatgcctagtccagata

SEQ ID NO: 47197 - DNA, 33 bp, Homo sapien
aatttacaacgctaaaagacagccatcaggtca

SEQ ID NO: 47198 - DNA, 33 bp, Homo sapien
aatttacaacgctaaatgacagccatcaggtca

SEQ ID NO: 47199 - DNA, 33 bp, Homo sapien
ggaatgccagtattccactttatatgatagtac

SEQ ID NO: 47200 - DNA, 33 bp, Homo sapien
ggaatgccagtattccgctttatatgatagtac

SEQ ID NO: 47201 - DNA, 33 bp, Homo sapien
agaatctgacgtggggcatatgatgagaaataa

SEQ ID NO: 47202 - DNA, 33 bp, Homo sapien
agaatctgacgtggggtatatgatgagaaataa

SEQ ID NO: 47203 - DNA, 33 bp, Homo sapien
ttttttgcaatctccaaaatttaaggttagaaa

SEQ ID NO: 47204 - DNA, 33 bp, Homo sapien
ttttttgcaatctccagaatttaaggttagaaa

SEQ ID NO: 47205 - DNA, 33 bp, Homo sapien
tgtcttgttttgttccaatgggttctcaaagtt

SEQ ID NO: 47206 - DNA, 33 bp, Homo sapien
tgtcttgttttgttccgatgggttctcaaagtt

SEQ ID NO: 47207 - DNA, 33 bp, Homo sapien
ctgctcagttatcagaaagttatcaaccagggt

SEQ ID NO: 47208 - DNA, 33 bp, Homo sapien
ctgctcagttatcagagagttatcaaccagggt

SEQ ID NO: 47209 - DNA, 33 bp, Homo sapien
tacagacaagggaatagtattcaacactaaaaa

SEQ ID NO: 47210 - DNA, 33 bp, Homo sapien
tacagacaagggaatattattcaacactaaaaa

SEQ ID NO: 47211 - DNA, 33 bp, Homo sapien
tgaggccatcttagatcagtctatagccagctg

SEQ ID NO: 47212 - DNA, 33 bp, Homo sapien
tgaggccatcttagattagtctatagccagctg

SEQ ID NO: 47213 - DNA, 33 bp, Homo sapien
gagatgcctccaaaaccgagctggcaagtattc

SEQ ID NO: 47214 - DNA, 33 bp, Homo sapien
gagatgcctccaaaactgagctggcaagtattc

SEQ ID NO: 47215 - DNA, 33 bp, Homo sapien
gtgcttccctgggcacagattacagctttggca

SEQ ID NO: 47216 - DNA, 33 bp, Homo sapien
gtgcttccctgggcacggattacagctttggca

SEQ ID NO: 47217 - DNA, 33 bp, Homo sapien
aatcttcaaaagtgtcaaagtcatgaaagttaa

SEQ ID NO: 47218 - DNA, 33 bp, Homo sapien
aatcttcaaaagtgtccaagtcatgaaagttaa

SEQ ID NO: 47219 - DNA, 33 bp, Homo sapien
tttagtgattgaaatacctgtaatatcaatatt

SEQ ID NO: 47220 - DNA, 33 bp, Homo sapien
tttagtgattgaaatagctgtaatatcaatatt

SEQ ID NO: 47221 - DNA, 33 bp, Homo sapien
gagaccactgtgttcaactggactggaagccac

SEQ ID NO: 47222 - DNA, 33 bp, Homo sapien
gagaccactgtgttcagctggactggaagccac

SEQ ID NO: 47223 - DNA, 33 bp, Homo sapien
gctgtgtggaactgcccgatactttacttgaac

SEQ ID NO: 47224 - DNA, 33 bp, Homo sapien
gctgtgtggaactgcctgatactttacttgaac

SEQ ID NO: 47225 - DNA, 33 bp, Homo sapien
ttaaactggctttgcacagctactaaaggagtg

SEQ ID NO: 47226 - DNA, 33 bp, Homo sapien
ttaaactggctttgcagagctactaaaggagtg

SEQ ID NO: 47227 - DNA, 33 bp, Homo sapien
ggcatccatttcaaatcaagcaaggtgcatatc

SEQ ID NO: 47228 - DNA, 33 bp, Homo sapien
ggcatccatttcaaattaagcaaggtgcatatc

SEQ ID NO: 47229 - DNA, 33 bp, Homo sapien
ggaatagcccaacaaaatgccccaggatgtttc

SEQ ID NO: 47230 - DNA, 33 bp, Homo sapien
ggaatagcccaacaaactgccccaggatgtttc

SEQ ID NO: 47231 - DNA, 33 bp, Homo sapien
ggcttagctctgaacaaattacttcctgctcaa

SEQ ID NO: 47232 - DNA, 33 bp, Homo sapien
ggcttagctctgaacatattacttcctgctcaa

SEQ ID NO: 47233 - DNA, 33 bp, Homo sapien
atgaataagaccaaaactaaacccacaacttcc

SEQ ID NO: 47234 - DNA, 33 bp, Homo sapien
atgaataagaccaaaattaaacccacaacttcc

SEQ ID NO: 47235 - DNA, 33 bp, Homo sapien
gaaagcccagggcttacacaaagtgcagcaagg

SEQ ID NO: 47236 - DNA, 33 bp, Homo sapien
gaaagcccagggcttatacaaagtgcagcaagg

SEQ ID NO: 47237 - DNA, 33 bp, Homo sapien
tgctgtcaaaaagtccaaagctgttgtaatttc

SEQ ID NO: 47238 - DNA, 33 bp, Homo sapien
tgctgtcaaaaagtccgaagctgttgtaatttc

SEQ ID NO: 47239 - DNA, 33 bp, Homo sapien
gcatttgtttgttggaaccattgtgctctggtg

SEQ ID NO: 47240 - DNA, 33 bp, Homo sapien
gcatttgtttgttggagccattgtgctctggtg

SEQ ID NO: 47241 - DNA, 33 bp, Homo sapien
tcagaagcttctacagaaaaccactaatggaga

SEQ ID NO: 47242 - DNA, 33 bp, Homo sapien
tcagaagcttctacaggaaaccactaatggaga

SEQ ID NO: 47243 - DNA, 33 bp, Homo sapien
tgcgcaggggacacacagctatctcagaggagc

SEQ ID NO: 47244 - DNA, 33 bp, Homo sapien
tgcgcaggggacacacggctatctcagaggagc

SEQ ID NO: 47245 - DNA, 33 bp, Homo sapien
gggtgtcataagatgccgcagtgcactcaacgc

SEQ ID NO: 47246 - DNA, 33 bp, Homo sapien
gggtgtcataagatgcggcagtgcactcaacgc

SEQ ID NO: 47247 - DNA, 33 bp, Homo sapien
catctagtgtgggaaacgggtaagaaaacattc

SEQ ID NO: 47248 - DNA, 33 bp, Homo sapien
catctagtgtgggaaatgggtaagaaaacattc

SEQ ID NO: 47249 - DNA, 33 bp, Homo sapien
gttcaaacaagaggagacctgaacagctggggg

SEQ ID NO: 47250 - DNA, 33 bp, Homo sapien
gttcaaacaagaggaggcctgaacagctggggg

SEQ ID NO: 47251 - DNA, 33 bp, Homo sapien
gcttcccaggggattaggaagttcaaacaagag

SEQ ID NO: 47252 - DNA, 33 bp, Homo sapien
gcttcccaggggattatgaagttcaaacaagag

SEQ ID NO: 47253 - DNA, 33 bp, Homo sapien
cctctattaaataagcacctgcgactggctggt

SEQ ID NO: 47254 - DNA, 33 bp, Homo sapien
cctctattaaataagcgcctgcgactggctggt

SEQ ID NO: 47255 - DNA, 33 bp, Homo sapien
ggttcaattttagtaacatcagcaacaatggta

SEQ ID NO: 47256 - DNA, 33 bp, Homo sapien
ggttcaattttagtaagatcagcaacaatggta

SEQ ID NO: 47257 - DNA, 33 bp, Homo sapien
taaaattgaaccaaaccggttttatcatgggtt

SEQ ID NO: 47258 - DNA, 33 bp, Homo sapien
taaaattgaaccaaactggttttatcatgggtt

SEQ ID NO: 47259 - DNA, 33 bp, Homo sapien
agagtgtctgcttaccagagaaggctcatgaag

SEQ ID NO: 47260 - DNA, 33 bp, Homo sapien
agagtgtctgcttaccggagaaggctcatgaag

SEQ ID NO: 47261 - DNA, 33 bp, Homo sapien
tctccaggctgatgtacaggatgcgctcgtagg

SEQ ID NO: 47262 - DNA, 33 bp, Homo sapien
tctccaggctgatgtagaggatgcgctcgtagg

SEQ ID NO: 47263 - DNA, 33 bp, Homo sapien
tcttcgtgatcgacaacggcgcggatgactggc

SEQ ID NO: 47264 - DNA, 33 bp, Homo sapien
tcttcgtgatcgacaatggcgcggatgactggc

SEQ ID NO: 47265 - DNA, 33 bp, Homo sapien
agcctctaaagtctcaaccagctccgatgattt

SEQ ID NO: 47266 - DNA, 33 bp, Homo sapien
agcctctaaagtctcatccagctccgatgattt

SEQ ID NO: 47267 - DNA, 33 bp, Homo sapien
tggacagtgctttactaactgctctaaaaatgt

SEQ ID NO: 47268 - DNA, 33 bp, Homo sapien
tggacagtgctttactcactgctctaaaaatgt

SEQ ID NO: 47269 - DNA, 33 bp, Homo sapien
acgtgaggacactctacgcttccttccttctga

SEQ ID NO: 47270 - DNA, 33 bp, Homo sapien
acgtgaggacactctatgcttccttccttctga

SEQ ID NO: 47271 - DNA, 33 bp, Homo sapien
agttctcagagaaagaaagccaagtttcggcat

SEQ ID NO: 47272 - DNA, 33 bp, Homo sapien
agttctcagagaaagacagccaagtttcggcat

SEQ ID NO: 47273 - DNA, 33 bp, Homo sapien
ttgagtctcacaatagccccataagaaaagtga

SEQ ID NO: 47274 - DNA, 33 bp, Homo sapien
ttgagtctcacaatagtcccataagaaaagtga

SEQ ID NO: 47275 - DNA, 33 bp, Homo sapien
ggatgggcctgtcggtaaccctttctgactgtc

SEQ ID NO: 47276 - DNA, 33 bp, Homo sapien
ggatgggcctgtcggtcaccctttctgactgtc

SEQ ID NO: 47277 - DNA, 33 bp, Homo sapien
cattgagactagcacccggaacctagtaaacgc

SEQ ID NO: 47278 - DNA, 33 bp, Homo sapien
cattgagactagcacctggaacctagtaaacgc

SEQ ID NO: 47279 - DNA, 33 bp, Homo sapien
catctccgtgttctagacagggcacctctagag

SEQ ID NO: 47280 - DNA, 33 bp, Homo sapien
catctccgtgttctagccagggcacctctagag

SEQ ID NO: 47281 - DNA, 33 bp, Homo sapien
tatttgctcatgttaccagtattgctactactc

SEQ ID NO: 47282 - DNA, 33 bp, Homo sapien
tatttgctcatgttactagtattgctactactc

SEQ ID NO: 47283 - DNA, 33 bp, Homo sapien
tattggctgtaaaactcagccctgtcaattcag

SEQ ID NO: 47284 - DNA, 33 bp, Homo sapien
tattggctgtaaaacttagccctgtcaattcag

SEQ ID NO: 47285 - DNA, 33 bp, Homo sapien
ataaagcaactgaagcagagaaggtaagagatg

SEQ ID NO: 47286 - DNA, 33 bp, Homo sapien
ataaagcaactgaagccgagaaggtaagagatg

SEQ ID NO: 47287 - DNA, 33 bp, Homo sapien
aggtggtaatagtgtcacctccatctgttgatc

SEQ ID NO: 47288 - DNA, 33 bp, Homo sapien
aggtggtaatagtgtcgcctccatctgttgatc

SEQ ID NO: 47289 - DNA, 33 bp, Homo sapien
tggcgttttggagcacagacctttcaaagactc

SEQ ID NO: 47290 - DNA, 33 bp, Homo sapien
tggcgttttggagcacggacctttcaaagactc

SEQ ID NO: 47291 - DNA, 33 bp, Homo sapien
gaccgggatggtttccagattcacatgcacatg

SEQ ID NO: 47292 - DNA, 33 bp, Homo sapien
gaccgggatggtttccggattcacatgcacatg

SEQ ID NO: 47293 - DNA, 33 bp, Homo sapien
gccaggagggtcagacaggagagaacagatctg

SEQ ID NO: 47294 - DNA, 33 bp, Homo sapien
gccaggagggtcagacgggagagaacagatctg

SEQ ID NO: 47295 - DNA, 33 bp, Homo sapien
tcaacatgaagccctacgtttgcctctgggatc

SEQ ID NO: 47296 - DNA, 33 bp, Homo sapien
tcaacatgaagccctatgtttgcctctgggatc

SEQ ID NO: 47297 - DNA, 33 bp, Homo sapien
ccaggaagtgcttgtgaagatcaaaatattttt

SEQ ID NO: 47298 - DNA, 33 bp, Homo sapien
ccaggaagtgcttgtgcagatcaaaatattttt

SEQ ID NO: 47299 - DNA, 33 bp, Homo sapien
ctcacaatgttttccagccagaaatgaccataa

SEQ ID NO: 47300 - DNA, 33 bp, Homo sapien
ctcacaatgttttccatccagaaatgaccataa

SEQ ID NO: 47301 - DNA, 33 bp, Homo sapien
aggacaaaaggaagagccccaaaggagagagca

SEQ ID NO: 47302 - DNA, 33 bp, Homo sapien
aggacaaaaggaagaggcccaaaggagagagca

SEQ ID NO: 47303 - DNA, 33 bp, Homo sapien
tgggtcatcgcaaaaaagagaaagctatgctta

SEQ ID NO: 47304 - DNA, 33 bp, Homo sapien
tgggtcatcgcaaaaaggagaaagctatgctta

SEQ ID NO: 47305 - DNA, 33 bp, Homo sapien
cagcttttggctacctgaggagcagcaaggacc

SEQ ID NO: 47306 - DNA, 33 bp, Homo sapien
cagcttttggctaccttaggagcagcaaggacc

SEQ ID NO: 47307 - DNA, 33 bp, Homo sapien
tccccagtggggcagacgttattattgggaagt

SEQ ID NO: 47308 - DNA, 33 bp, Homo sapien
tccccagtggggcagatgttattattgggaagt

SEQ ID NO: 47309 - DNA, 33 bp, Homo sapien
ctcattttgatcctcacgcacatgcttgttgtc

SEQ ID NO: 47310 - DNA, 33 bp, Homo sapien
ctcattttgatcctcaggcacatgcttgttgtc

SEQ ID NO: 47311 - DNA, 33 bp, Homo sapien
accacatgattagaagaccctagatttcttctg

SEQ ID NO: 47312 - DNA, 33 bp, Homo sapien
accacatgattagaagtccctagatttcttctg

SEQ ID NO: 47313 - DNA, 33 bp, Homo sapien
aaagaagcgcctgccacaatgggagtgagggag

SEQ ID NO: 47314 - DNA, 33 bp, Homo sapien
aaagaagcgcctgccagaatgggagtgagggag

SEQ ID NO: 47315 - DNA, 33 bp, Homo sapien
tggctactcaggaattgaaaatgacagcggtag

SEQ ID NO: 47316 - DNA, 33 bp, Homo sapien
tggctactcaggaatttaaaatgacagcggtag

SEQ ID NO: 47317 - DNA, 33 bp, Homo sapien
tgagtgatcccacagaaagcaaaagcaagcgcc

SEQ ID NO: 47318 - DNA, 33 bp, Homo sapien
tgagtgatcccacagagagcaaaagcaagcgcc

SEQ ID NO: 47319 - DNA, 33 bp, Homo sapien
gatgacaaaacagaggaccagaaactaagctgc

SEQ ID NO: 47320 - DNA, 33 bp, Homo sapien
gatgacaaaacagaggcccagaaactaagctgc

SEQ ID NO: 47321 - DNA, 33 bp, Homo sapien
ctgctcagtgtcaaatgaacaggaaagtcagct

SEQ ID NO: 47322 - DNA, 33 bp, Homo sapien
ctgctcagtgtcaaattaacaggaaagtcagct

SEQ ID NO: 47323 - DNA, 33 bp, Homo sapien
atctttagaattctagaaagcaccctgactcaa

SEQ ID NO: 47324 - DNA, 33 bp, Homo sapien
atctttagaattctaggaagcaccctgactcaa

SEQ ID NO: 47325 - DNA, 33 bp, Homo sapien
ttcctttttactcacacagattcacccaacaag

SEQ ID NO: 47326 - DNA, 33 bp, Homo sapien
ttcctttttactcacagagattcacccaacaag

SEQ ID NO: 47327 - DNA, 33 bp, Homo sapien
tgaacacgaggcgtagacactcagtcaatggta

SEQ ID NO: 47328 - DNA, 33 bp, Homo sapien
tgaacacgaggcgtaggcactcagtcaatggta

SEQ ID NO: 47329 - DNA, 33 bp, Homo sapien
tcatctatagaatgggcatactaactttactcc

SEQ ID NO: 47330 - DNA, 33 bp, Homo sapien
tcatctatagaatggggatactaactttactcc

SEQ ID NO: 47331 - DNA, 33 bp, Homo sapien
ccacacaggtctatgcactctgagaggtcacaa

SEQ ID NO: 47332 - DNA, 33 bp, Homo sapien
ccacacaggtctatgcgctctgagaggtcacaa

SEQ ID NO: 47333 - DNA, 33 bp, Homo sapien
aatagagagcatcgaaggatttaaacactagag

SEQ ID NO: 47334 - DNA, 33 bp, Homo sapien
aatagagagcatcgaatgatttaaacactagag

SEQ ID NO: 47335 - DNA, 33 bp, Homo sapien
tctttgaattttcctccaacttctccatgcgta

SEQ ID NO: 47336 - DNA, 33 bp, Homo sapien
tctttgaattttcctctaacttctccatgcgta

SEQ ID NO: 47337 - DNA, 33 bp, Homo sapien
aacattacttctgaaaggtacagctgtgtaaga

SEQ ID NO: 47338 - DNA, 33 bp, Homo sapien
aacattacttctgaaatgtacagctgtgtaaga

SEQ ID NO: 47339 - DNA, 33 bp, Homo sapien
cgtgcttcttccgtaacgggctcccttccatca

SEQ ID NO: 47340 - DNA, 33 bp, Homo sapien
cgtgcttcttccgtaatgggctcccttccatca

SEQ ID NO: 47341 - DNA, 33 bp, Homo sapien
agctccatatcttggcactgtgacttcctggga

SEQ ID NO: 47342 - DNA, 33 bp, Homo sapien
agctccatatcttggcgctgtgacttcctggga

SEQ ID NO: 47343 - DNA, 33 bp, Homo sapien
aagcaactaggaagggcactttaggcagcatga

SEQ ID NO: 47344 - DNA, 33 bp, Homo sapien
aagcaactaggaagggtactttaggcagcatga

SEQ ID NO: 47345 - DNA, 33 bp, Homo sapien
tggttgtgtccttttccatccctaaatctgtct

SEQ ID NO: 47346 - DNA, 33 bp, Homo sapien
tggttgtgtccttttctatccctaaatctgtct

SEQ ID NO: 47347 - DNA, 33 bp, Homo sapien
ttccaaagttcccagacaggtcttgcttctgtc

SEQ ID NO: 47348 - DNA, 33 bp, Homo sapien
ttccaaagttcccagataggtcttgcttctgtc

SEQ ID NO: 47349 - DNA, 33 bp, Homo sapien
cagtgtgaacaggcgcacaatattctagctgga

SEQ ID NO: 47350 - DNA, 33 bp, Homo sapien
cagtgtgaacaggcgcgcaatattctagctgga

SEQ ID NO: 47351 - DNA, 33 bp, Homo sapien
aaccatagttttccaaaaggcaggatgagtaat

SEQ ID NO: 47352 - DNA, 33 bp, Homo sapien
aaccatagttttccaagaggcaggatgagtaat

SEQ ID NO: 47353 - DNA, 33 bp, Homo sapien
tgtgacatgagcaaaaattttctactaccagaa

SEQ ID NO: 47354 - DNA, 33 bp, Homo sapien
tgtgacatgagcaaaagttttctactaccagaa

SEQ ID NO: 47355 - DNA, 33 bp, Homo sapien
gagcgacagttgaatacaccaatgggaccctgg

SEQ ID NO: 47356 - DNA, 33 bp, Homo sapien
gagcgacagttgaatataccaatgggaccctgg

SEQ ID NO: 47357 - DNA, 33 bp, Homo sapien
ttcaagccctggcaaaagtccagacacccagga

SEQ ID NO: 47358 - DNA, 33 bp, Homo sapien
ttcaagccctggcaaaggtccagacacccagga

SEQ ID NO: 47359 - DNA, 33 bp, Homo sapien
cttgcctataatccccacagtagacttcctcac

SEQ ID NO: 47360 - DNA, 33 bp, Homo sapien
cttgcctataatccccgcagtagacttcctcac

SEQ ID NO: 47361 - DNA, 33 bp, Homo sapien
atgcttctttaacttacagtctatctccatcaa

SEQ ID NO: 47362 - DNA, 33 bp, Homo sapien
atgcttctttaacttatagtctatctccatcaa

SEQ ID NO: 47363 - DNA, 33 bp, Homo sapien
ggttttcagacaagaacaggaatgtttctaaac

SEQ ID NO: 47364 - DNA, 33 bp, Homo sapien
ggttttcagacaagaataggaatgtttctaaac

SEQ ID NO: 47365 - DNA, 33 bp, Homo sapien
tctgtaacacatgaaaacacaagccgcctttct

SEQ ID NO: 47366 - DNA, 33 bp, Homo sapien
tctgtaacacatgaaagcacaagccgcctttct

SEQ ID NO: 47367 - DNA, 33 bp, Homo sapien
gagtatgaaaagtccactgatacagttttattt

SEQ ID NO: 47368 - DNA, 33 bp, Homo sapien
gagtatgaaaagtccattgatacagttttattt

SEQ ID NO: 47369 - DNA, 33 bp, Homo sapien
aaagcacatgcaattaacaaaaacacagacaaa

SEQ ID NO: 47370 - DNA, 33 bp, Homo sapien
aaagcacatgcaattagcaaaaacacagacaaa

SEQ ID NO: 47371 - DNA, 33 bp, Homo sapien
gaagatgaagaagtgaatagaggagttttggtc

SEQ ID NO: 47372 - DNA, 33 bp, Homo sapien
gaagatgaagaagtgagtagaggagttttggtc

SEQ ID NO: 47373 - DNA, 33 bp, Homo sapien
cttccttttggaaacccacaatgccaggcaccc

SEQ ID NO: 47374 - DNA, 33 bp, Homo sapien
cttccttttggaaacctacaatgccaggcaccc

SEQ ID NO: 47375 - DNA, 33 bp, Homo sapien
taaatgtgtattgtacagaattgactgaacttc

SEQ ID NO: 47376 - DNA, 33 bp, Homo sapien
taaatgtgtattgtacggaattgactgaacttc

SEQ ID NO: 47377 - DNA, 33 bp, Homo sapien
acttccctcaagttcaatcatctcacagatatt

SEQ ID NO: 47378 - DNA, 33 bp, Homo sapien
acttccctcaagttcattcatctcacagatatt

SEQ ID NO: 47379 - DNA, 33 bp, Homo sapien
gcacggattggttccaccgaccggaagggccac

SEQ ID NO: 47380 - DNA, 33 bp, Homo sapien
gcacggattggttccatcgaccggaagggccac

SEQ ID NO: 47381 - DNA, 33 bp, Homo sapien
tatagctaatgcaaagcagtttcttatttctct

SEQ ID NO: 47382 - DNA, 33 bp, Homo sapien
tatagctaatgcaaagtagtttcttatttctct

SEQ ID NO: 47383 - DNA, 33 bp, Homo sapien
caccaattgtacattccctgcatccaatctgct

SEQ ID NO: 47384 - DNA, 33 bp, Homo sapien
caccaattgtacattctctgcatccaatctgct

SEQ ID NO: 47385 - DNA, 33 bp, Homo sapien
gcgtcctgttacctgacctttattccctgatgc

SEQ ID NO: 47386 - DNA, 33 bp, Homo sapien
gcgtcctgttacctgatctttattccctgatgc

SEQ ID NO: 47387 - DNA, 33 bp, Homo sapien
gcagggtgttggtaaaccacaacggatagtgca

SEQ ID NO: 47388 - DNA, 33 bp, Homo sapien
gcagggtgttggtaaagcacaacggatagtgca

SEQ ID NO: 47389 - DNA, 33 bp, Homo sapien
gctattcagaagcagaaattgaaaactggcagc

SEQ ID NO: 47390 - DNA, 33 bp, Homo sapien
gctattcagaagcagagattgaaaactggcagc

SEQ ID NO: 47391 - DNA, 33 bp, Homo sapien
tttaaatcagttcaagcccactttctctccaat

SEQ ID NO: 47392 - DNA, 33 bp, Homo sapien
tttaaatcagttcaaggccactttctctccaat

SEQ ID NO: 47393 - DNA, 33 bp, Homo sapien
ttcagtaacctctgaacgattgttccctggaag

SEQ ID NO: 47394 - DNA, 33 bp, Homo sapien
ttcagtaacctctgaatgattgttccctggaag

SEQ ID NO: 47395 - DNA, 33 bp, Homo sapien
gactatttctatttcccaatggttgttctcaat

SEQ ID NO: 47396 - DNA, 33 bp, Homo sapien
gactatttctatttccgaatggttgttctcaat

SEQ ID NO: 47397 - DNA, 33 bp, Homo sapien
gccaggcatgctggctcaaacctatggtcacag

SEQ ID NO: 47398 - DNA, 33 bp, Homo sapien
gccaggcatgctggctgaaacctatggtcacag

SEQ ID NO: 47399 - DNA, 33 bp, Homo sapien
gttttgaaaaatttacaatgtagccatcatcat

SEQ ID NO: 47400 - DNA, 33 bp, Homo sapien
gttttgaaaaatttaccatgtagccatcatcat

SEQ ID NO: 47401 - DNA, 33 bp, Homo sapien
cttccacaaggttacacgatattgctaaatgtg

SEQ ID NO: 47402 - DNA, 33 bp, Homo sapien
cttccacaaggttacatgatattgctaaatgtg

SEQ ID NO: 47403 - DNA, 33 bp, Homo sapien
gaaacaaattcaggcaaaactgctatgtcggta

SEQ ID NO: 47404 - DNA, 33 bp, Homo sapien
gaaacaaattcaggcagaactgctatgtcggta

SEQ ID NO: 47405 - DNA, 33 bp, Homo sapien
ctgtgagagaaccacaagagaattagagttcaa

SEQ ID NO: 47406 - DNA, 33 bp, Homo sapien
ctgtgagagaaccacaggagaattagagttcaa

SEQ ID NO: 47407 - DNA, 33 bp, Homo sapien
ggttgctaaggctctcagaatctaatactattt

SEQ ID NO: 47408 - DNA, 33 bp, Homo sapien
ggttgctaaggctctcggaatctaatactattt

SEQ ID NO: 47409 - DNA, 33 bp, Homo sapien
cctgaatgagctaccactgccaatggtgtcacg

SEQ ID NO: 47410 - DNA, 33 bp, Homo sapien
cctgaatgagctaccagtgccaatggtgtcacg

SEQ ID NO: 47411 - DNA, 33 bp, Homo sapien
gtcttttggtctcagaataatgcctacaaccaa

SEQ ID NO: 47412 - DNA, 33 bp, Homo sapien
gtcttttggtctcagagtaatgcctacaaccaa

SEQ ID NO: 47413 - DNA, 33 bp, Homo sapien
gttaacttcctagataaccattgtagaggaaca

SEQ ID NO: 47414 - DNA, 33 bp, Homo sapien
gttaacttcctagatatccattgtagaggaaca

SEQ ID NO: 47415 - DNA, 33 bp, Homo sapien
agtgtcatctctttgacagtatagttcctgttt

SEQ ID NO: 47416 - DNA, 33 bp, Homo sapien
agtgtcatctctttgatagtatagttcctgttt

SEQ ID NO: 47417 - DNA, 33 bp, Homo sapien
tttgtgtttgtgaaaagaggtgaatggtatata

SEQ ID NO: 47418 - DNA, 33 bp, Homo sapien
tttgtgtttgtgaaaataggtgaatggtatata

SEQ ID NO: 47419 - DNA, 33 bp, Homo sapien
acagggaatggaattgaagggagcccagaatac

SEQ ID NO: 47420 - DNA, 33 bp, Homo sapien
acagggaatggaattggagggagcccagaatac

SEQ ID NO: 47421 - DNA, 33 bp, Homo sapien
ccaatccctcgcaagcacatttccaactacatg

SEQ ID NO: 47422 - DNA, 33 bp, Homo sapien
ccaatccctcgcaagcgcatttccaactacatg

SEQ ID NO: 47423 - DNA, 33 bp, Homo sapien
aatggagatagtaaaaactctcccatacttgaa

SEQ ID NO: 47424 - DNA, 33 bp, Homo sapien
aatggagatagtaaaacctctcccatacttgaa

SEQ ID NO: 47425 - DNA, 33 bp, Homo sapien
tctggaaacactgtcccctgtcaggctggtgaa

SEQ ID NO: 47426 - DNA, 33 bp, Homo sapien
tctggaaacactgtcctctgtcaggctggtgaa

SEQ ID NO: 47427 - DNA, 33 bp, Homo sapien
caaagcaggcagattacatgaccccagtagttc

SEQ ID NO: 47428 - DNA, 33 bp, Homo sapien
caaagcaggcagattatatgaccccagtagttc

SEQ ID NO: 47429 - DNA, 33 bp, Homo sapien
tcctcgagtgagaacacgggattttaagtcagt

SEQ ID NO: 47430 - DNA, 33 bp, Homo sapien
tcctcgagtgagaacatgggattttaagtcagt

SEQ ID NO: 47431 - DNA, 33 bp, Homo sapien
aattccatgaagacaacgtataatgttttcaac

SEQ ID NO: 47432 - DNA, 33 bp, Homo sapien
aattccatgaagacaatgtataatgttttcaac

SEQ ID NO: 47433 - DNA, 33 bp, Homo sapien
cactatccctgtcataatatatcaaaataaatg

SEQ ID NO: 47434 - DNA, 33 bp, Homo sapien
cactatccctgtcatagtatatcaaaataaatg

SEQ ID NO: 47435 - DNA, 33 bp, Homo sapien
ggatgaaaactaattaaatcaatacacttggtg

SEQ ID NO: 47436 - DNA, 33 bp, Homo sapien
ggatgaaaactaattagatcaatacacttggtg

SEQ ID NO: 47437 - DNA, 33 bp, Homo sapien
ccacaatgcttttcaacttatttccccttccta

SEQ ID NO: 47438 - DNA, 33 bp, Homo sapien
ccacaatgcttttcaatttatttccccttccta

SEQ ID NO: 47439 - DNA, 33 bp, Homo sapien
caccaactcttgccagcatctaacaccaaactc

SEQ ID NO: 47440 - DNA, 33 bp, Homo sapien
caccaactcttgccaggatctaacaccaaactc

SEQ ID NO: 47441 - DNA, 33 bp, Homo sapien
ttgacccttagcaacacagcagttccaattccg

SEQ ID NO: 47442 - DNA, 33 bp, Homo sapien
ttgacccttagcaacatagcagttccaattccg

SEQ ID NO: 47443 - DNA, 33 bp, Homo sapien
agtatttctgaaagggaatattgatttggtacg

SEQ ID NO: 47444 - DNA, 33 bp, Homo sapien
agtatttctgaaaggggatattgatttggtacg

SEQ ID NO: 47445 - DNA, 33 bp, Homo sapien
aggcagagaagaagcacaagaacccaccataca

SEQ ID NO: 47446 - DNA, 33 bp, Homo sapien
aggcagagaagaagcagaagaacccaccataca

SEQ ID NO: 47447 - DNA, 33 bp, Homo sapien
tccattttacaaatgacaaaatagaggcttaga

SEQ ID NO: 47448 - DNA, 33 bp, Homo sapien
tccattttacaaatgagaaaatagaggcttaga

SEQ ID NO: 47449 - DNA, 33 bp, Homo sapien
tttaaaatttcaacaacttctttcatagcacct

SEQ ID NO: 47450 - DNA, 33 bp, Homo sapien
tttaaaatttcaacaatttctttcatagcacct

SEQ ID NO: 47451 - DNA, 33 bp, Homo sapien
gtctaatattcttcaaaattcttggacttccct

SEQ ID NO: 47452 - DNA, 33 bp, Homo sapien
gtctaatattcttcaagattcttggacttccct

SEQ ID NO: 47453 - DNA, 33 bp, Homo sapien
gcacaggctctgggtaacctatctcgggccttc

SEQ ID NO: 47454 - DNA, 33 bp, Homo sapien
gcacaggctctgggtatcctatctcgggccttc

SEQ ID NO: 47455 - DNA, 33 bp, Homo sapien
gacattctcttcctgacgagtatctacgtccaa

SEQ ID NO: 47456 - DNA, 33 bp, Homo sapien
gacattctcttcctgatgagtatctacgtccaa

SEQ ID NO: 47457 - DNA, 33 bp, Homo sapien
gatcaggaaaaacagacgagaggattgctagag

SEQ ID NO: 47458 - DNA, 33 bp, Homo sapien
gatcaggaaaaacagatgagaggattgctagag

SEQ ID NO: 47459 - DNA, 33 bp, Homo sapien
agctacctagcaccacaaatagaactaatatta

SEQ ID NO: 47460 - DNA, 33 bp, Homo sapien
agctacctagcaccacgaatagaactaatatta

SEQ ID NO: 47461 - DNA, 33 bp, Homo sapien
ccttggtgacctttaaaggcaaaatgtgagaaa

SEQ ID NO: 47462 - DNA, 33 bp, Homo sapien
ccttggtgacctttaagggcaaaatgtgagaaa

SEQ ID NO: 47463 - DNA, 33 bp, Homo sapien
aaccactgacagtcgacgtgattagctttctgt

SEQ ID NO: 47464 - DNA, 33 bp, Homo sapien
aaccactgacagtcgatgtgattagctttctgt

SEQ ID NO: 47465 - DNA, 33 bp, Homo sapien
gaaacctcttaaggtccacatcaactgataatt

SEQ ID NO: 47466 - DNA, 33 bp, Homo sapien
gaaacctcttaaggtctacatcaactgataatt

SEQ ID NO: 47467 - DNA, 33 bp, Homo sapien
aacaagcaaacaaaaacctcactaaaatgacat

SEQ ID NO: 47468 - DNA, 33 bp, Homo sapien
aacaagcaaacaaaaatctcactaaaatgacat

SEQ ID NO: 47469 - DNA, 33 bp, Homo sapien
tgattcggaggtgtaaatggaatataatagagg

SEQ ID NO: 47470 - DNA, 33 bp, Homo sapien
tgattcggaggtgtaagtggaatataatagagg

SEQ ID NO: 47471 - DNA, 33 bp, Homo sapien
gggacaggggacacaacggtgaaagatgtgagg

SEQ ID NO: 47472 - DNA, 33 bp, Homo sapien
gggacaggggacacaatggtgaaagatgtgagg

SEQ ID NO: 47473 - DNA, 33 bp, Homo sapien
cccctgagagaattcacgttgccagcaataaac

SEQ ID NO: 47474 - DNA, 33 bp, Homo sapien
cccctgagagaattcatgttgccagcaataaac

SEQ ID NO: 47475 - DNA, 33 bp, Homo sapien
cagacaccaaaaaacacacagggcaagaaccaa

SEQ ID NO: 47476 - DNA, 33 bp, Homo sapien
cagacaccaaaaaacagacagggcaagaaccaa

SEQ ID NO: 47477 - DNA, 33 bp, Homo sapien
cttgctgaagagtgacaaaggagtgtgtgtgtg

SEQ ID NO: 47478 - DNA, 33 bp, Homo sapien
cttgctgaagagtgacgaaggagtgtgtgtgtg

SEQ ID NO: 47479 - DNA, 33 bp, Homo sapien
tcatatgctcttaaacacacttggtataggaac

SEQ ID NO: 47480 - DNA, 33 bp, Homo sapien
tcatatgctcttaaacgcacttggtataggaac

SEQ ID NO: 47481 - DNA, 33 bp, Homo sapien
tggcctactctggttacggggacactgacgccc

SEQ ID NO: 47482 - DNA, 33 bp, Homo sapien
tggcctactctggttatggggacactgacgccc

SEQ ID NO: 47483 - DNA, 33 bp, Homo sapien
aggcagttgagttacaatgaagatccttcctgg

SEQ ID NO: 47484 - DNA, 33 bp, Homo sapien
aggcagttgagttacagtgaagatccttcctgg

SEQ ID NO: 47485 - DNA, 33 bp, Homo sapien
gagagactaagtttcccagagtaacatggttag

SEQ ID NO: 47486 - DNA, 33 bp, Homo sapien
gagagactaagtttcctagagtaacatggttag

SEQ ID NO: 47487 - DNA, 33 bp, Homo sapien
aggctctccttttccccgcttgcctgatccaga

SEQ ID NO: 47488 - DNA, 33 bp, Homo sapien
aggctctccttttccctgcttgcctgatccaga

SEQ ID NO: 47489 - DNA, 33 bp, Homo sapien
catcttcatcatggtccccaaccctagctgccc

SEQ ID NO: 47490 - DNA, 33 bp, Homo sapien
catcttcatcatggtctccaaccctagctgccc

SEQ ID NO: 47491 - DNA, 33 bp, Homo sapien
gaaaaaggaagcatgacagatcagaaagcagaa

SEQ ID NO: 47492 - DNA, 33 bp, Homo sapien
gaaaaaggaagcatgagagatcagaaagcagaa

SEQ ID NO: 47493 - DNA, 33 bp, Homo sapien
tacacagcaggaactcaatagtgttgctaactc

SEQ ID NO: 47494 - DNA, 33 bp, Homo sapien
tacacagcaggaactccatagtgttgctaactc

SEQ ID NO: 47495 - DNA, 33 bp, Homo sapien
ctccccttcctctctcactgattgatttcaccg

SEQ ID NO: 47496 - DNA, 33 bp, Homo sapien
ctccccttcctctctcgctgattgatttcaccg

SEQ ID NO: 47497 - DNA, 33 bp, Homo sapien
gaccagtgaagaaagaatcaggagcactggcct

SEQ ID NO: 47498 - DNA, 33 bp, Homo sapien
gaccagtgaagaaagagtcaggagcactggcct

SEQ ID NO: 47499 - DNA, 33 bp, Homo sapien
tctgatggcctcaataaatgatcaactccagtc

SEQ ID NO: 47500 - DNA, 33 bp, Homo sapien
tctgatggcctcaatagatgatcaactccagtc

SEQ ID NO: 47501 - DNA, 33 bp, Homo sapien
tccacccagtaggcaaaccaaaagatgcttcct

SEQ ID NO: 47502 - DNA, 33 bp, Homo sapien
tccacccagtaggcaagccaaaagatgcttcct

SEQ ID NO: 47503 - DNA, 33 bp, Homo sapien
cttttcctcttaagctcagagtagctagaacag

SEQ ID NO: 47504 - DNA, 33 bp, Homo sapien
cttttcctcttaagcttagagtagctagaacag

SEQ ID NO: 47505 - DNA, 33 bp, Homo sapien
tacggctctctcccaacggaagtccttcagaga

SEQ ID NO: 47506 - DNA, 33 bp, Homo sapien
tacggctctctcccaatggaagtccttcagaga

SEQ ID NO: 47507 - DNA, 33 bp, Homo sapien
tctcacatctacccacaactttcctctgtagct

SEQ ID NO: 47508 - DNA, 33 bp, Homo sapien
tctcacatctacccacgactttcctctgtagct

SEQ ID NO: 47509 - DNA, 33 bp, Homo sapien
aggtaaaacattttaacatcttgagtgtctgaa

SEQ ID NO: 47510 - DNA, 33 bp, Homo sapien
aggtaaaacattttaagatcttgagtgtctgaa

SEQ ID NO: 47511 - DNA, 33 bp, Homo sapien
cgccttaacgctgagggcataacgaaggtaaag

SEQ ID NO: 47512 - DNA, 33 bp, Homo sapien
cgccttaacgctgaggtcataacgaaggtaaag

SEQ ID NO: 47513 - DNA, 33 bp, Homo sapien
caggttaagaaggcatcaaaattttggtcagaa

SEQ ID NO: 47514 - DNA, 33 bp, Homo sapien
caggttaagaaggcatgaaaattttggtcagaa

SEQ ID NO: 47515 - DNA, 33 bp, Homo sapien
acaggttctgaaaaccacttctctaccttcacc

SEQ ID NO: 47516 - DNA, 33 bp, Homo sapien
acaggttctgaaaaccgcttctctaccttcacc

SEQ ID NO: 47517 - DNA, 33 bp, Homo sapien
aacaaaaataagatcaagtgaaatgggaaaacc

SEQ ID NO: 47518 - DNA, 33 bp, Homo sapien
aacaaaaataagatcacgtgaaatgggaaaacc

SEQ ID NO: 47519 - DNA, 33 bp, Homo sapien
gtgacagacgttctaccgcttccaatcggaggc

SEQ ID NO: 47520 - DNA, 33 bp, Homo sapien
gtgacagacgttctactgcttccaatcggaggc

SEQ ID NO: 47521 - DNA, 33 bp, Homo sapien
cctgcgatgacacagcaaatctatgacaagttt

SEQ ID NO: 47522 - DNA, 33 bp, Homo sapien
cctgcgatgacacagcgaatctatgacaagttt

SEQ ID NO: 47523 - DNA, 33 bp, Homo sapien
gcaggaagtagggtgccataacactgtgcagat

SEQ ID NO: 47524 - DNA, 33 bp, Homo sapien
gcaggaagtagggtgctataacactgtgcagat

SEQ ID NO: 47525 - DNA, 33 bp, Homo sapien
gggaagccaccttcaacgttttctggaacaagg

SEQ ID NO: 47526 - DNA, 33 bp, Homo sapien
gggaagccaccttcaatgttttctggaacaagg

SEQ ID NO: 47527 - DNA, 33 bp, Homo sapien
agaggtagcagtgaacaggaattgtggcactgc

SEQ ID NO: 47528 - DNA, 33 bp, Homo sapien
agaggtagcagtgaacgggaattgtggcactgc

SEQ ID NO: 47529 - DNA, 33 bp, Homo sapien
tgtgtgtgcctagcaaatgctccctctgttccc

SEQ ID NO: 47530 - DNA, 33 bp, Homo sapien
tgtgtgtgcctagcaagtgctccctctgttccc

SEQ ID NO: 47531 - DNA, 33 bp, Homo sapien
caggatgccctcttccactcagacagggacagt

SEQ ID NO: 47532 - DNA, 33 bp, Homo sapien
caggatgccctcttcctctcagacagggacagt

SEQ ID NO: 47533 - DNA, 33 bp, Homo sapien
ccagggtgttaaaggacgtggcttctctacgtc

SEQ ID NO: 47534 - DNA, 33 bp, Homo sapien
ccagggtgttaaaggatgtggcttctctacgtc

SEQ ID NO: 47535 - DNA, 33 bp, Homo sapien
gaaatgcgaaagatacaccaggttataaaccta

SEQ ID NO: 47536 - DNA, 33 bp, Homo sapien
gaaatgcgaaagataccccaggttataaaccta

SEQ ID NO: 47537 - DNA, 33 bp, Homo sapien
cttctcaactttagcactgattaggtgacaaag

SEQ ID NO: 47538 - DNA, 33 bp, Homo sapien
cttctcaactttagcagtgattaggtgacaaag

SEQ ID NO: 47539 - DNA, 33 bp, Homo sapien
acataagaactgagggcaaggagtcatgtgcca

SEQ ID NO: 47540 - DNA, 33 bp, Homo sapien
acataagaactgagggtaaggagtcatgtgcca

SEQ ID NO: 47541 - DNA, 33 bp, Homo sapien
acttgacgattaagaaaaggcctgtagaaaaat

SEQ ID NO: 47542 - DNA, 33 bp, Homo sapien
acttgacgattaagaagaggcctgtagaaaaat

SEQ ID NO: 47543 - DNA, 33 bp, Homo sapien
cattttagtcaagtcccatctcccctgccataa

SEQ ID NO: 47544 - DNA, 33 bp, Homo sapien
cattttagtcaagtcctatctcccctgccataa

SEQ ID NO: 47545 - DNA, 33 bp, Homo sapien
tttggatagccagataagaatcttcccctcagg

SEQ ID NO: 47546 - DNA, 33 bp, Homo sapien
tttggatagccagatatgaatcttcccctcagg

SEQ ID NO: 47547 - DNA, 33 bp, Homo sapien
aggcagcatgatcgtacaaaacaagccaaacac

SEQ ID NO: 47548 - DNA, 33 bp, Homo sapien
aggcagcatgatcgtataaaacaagccaaacac

SEQ ID NO: 47549 - DNA, 33 bp, Homo sapien
ttgctcagggaattaaagcaccgtctacagatg

SEQ ID NO: 47550 - DNA, 33 bp, Homo sapien
ttgctcagggaattaaggcaccgtctacagatg

SEQ ID NO: 47551 - DNA, 33 bp, Homo sapien
tgttggagtaatagggaaaaggggcatgaacaa

SEQ ID NO: 47552 - DNA, 33 bp, Homo sapien
tgttggagtaataggggaaaggggcatgaacaa

SEQ ID NO: 47553 - DNA, 33 bp, Homo sapien
aagacatggacttctaataattaggactgctgg

SEQ ID NO: 47554 - DNA, 33 bp, Homo sapien
aagacatggacttctagtaattaggactgctgg

SEQ ID NO: 47555 - DNA, 33 bp, Homo sapien
aataatcaacaagctaccacggaaagatctata

SEQ ID NO: 47556 - DNA, 33 bp, Homo sapien
aataatcaacaagctatcacggaaagatctata

SEQ ID NO: 47557 - DNA, 33 bp, Homo sapien
aactcaggcatcctaaactttttgccccacaag

SEQ ID NO: 47558 - DNA, 33 bp, Homo sapien
aactcaggcatcctaagctttttgccccacaag

SEQ ID NO: 47559 - DNA, 33 bp, Homo sapien
aaaaaacagaaagggaaaggcatcacttaaaac

SEQ ID NO: 47560 - DNA, 33 bp, Homo sapien
aaaaaacagaaagggagaggcatcacttaaaac

SEQ ID NO: 47561 - DNA, 33 bp, Homo sapien
atcagattccacaaaaaaaaggggagcataatt

SEQ ID NO: 47562 - DNA, 33 bp, Homo sapien
atcagattccacaaaataaaggggagcataatt

SEQ ID NO: 47563 - DNA, 33 bp, Homo sapien
gtaggtgatttgcctgaagttatacaacttgta

SEQ ID NO: 47564 - DNA, 33 bp, Homo sapien
gtaggtgatttgcctgcagttatacaacttgta

SEQ ID NO: 47565 - DNA, 33 bp, Homo sapien
ggcactggaactcacaatggggaacaggaagtg

SEQ ID NO: 47566 - DNA, 33 bp, Homo sapien
ggcactggaactcacactggggaacaggaagtg

SEQ ID NO: 47567 - DNA, 33 bp, Homo sapien
ggtgaggaaagctacaaatcttcatttattcat

SEQ ID NO: 47568 - DNA, 33 bp, Homo sapien
ggtgaggaaagctacagatcttcatttattcat

SEQ ID NO: 47569 - DNA, 33 bp, Homo sapien
gctatgggaggcttcacggaggtgatagagctt

SEQ ID NO: 47570 - DNA, 33 bp, Homo sapien
gctatgggaggcttcatggaggtgatagagctt

SEQ ID NO: 47571 - DNA, 33 bp, Homo sapien
tgacaaactgacttaaacctcacaaccacacag

SEQ ID NO: 47572 - DNA, 33 bp, Homo sapien
tgacaaactgacttaaccctcacaaccacacag

SEQ ID NO: 47573 - DNA, 33 bp, Homo sapien
ccagggaggccattaaaggaaggactggccaga

SEQ ID NO: 47574 - DNA, 33 bp, Homo sapien
ccagggaggccattaagggaaggactggccaga

SEQ ID NO: 47575 - DNA, 33 bp, Homo sapien
gccccaaagggtcttccattcctgcttcttctc

SEQ ID NO: 47576 - DNA, 33 bp, Homo sapien
gccccaaagggtcttctattcctgcttcttctc

SEQ ID NO: 47577 - DNA, 33 bp, Homo sapien
attctgctgcttcgtgcaccctgaacccaaaca

SEQ ID NO: 47578 - DNA, 33 bp, Homo sapien
attctgctgcttcgtgtaccctgaacccaaaca

SEQ ID NO: 47579 - DNA, 33 bp, Homo sapien
gtcttcccagctataactcctgatcctgccagg

SEQ ID NO: 47580 - DNA, 33 bp, Homo sapien
gtcttcccagctataattcctgatcctgccagg

SEQ ID NO: 47581 - DNA, 33 bp, Homo sapien
taggattattgtgtgcagaaaatgaagaattct

SEQ ID NO: 47582 - DNA, 33 bp, Homo sapien
taggattattgtgtgcggaaaatgaagaattct

SEQ ID NO: 47583 - DNA, 33 bp, Homo sapien
gtctgggactttaccgacctggctccttatctg

SEQ ID NO: 47584 - DNA, 33 bp, Homo sapien
gtctgggactttaccgtcctggctccttatctg

SEQ ID NO: 47585 - DNA, 33 bp, Homo sapien
atgtcttctgaaaatacgtctaaatttctccaa

SEQ ID NO: 47586 - DNA, 33 bp, Homo sapien
atgtcttctgaaaatatgtctaaatttctccaa

SEQ ID NO: 47587 - DNA, 33 bp, Homo sapien
agcagaaaactccccaccatcatgttaactggg

SEQ ID NO: 47588 - DNA, 33 bp, Homo sapien
agcagaaaactccccatcatcatgttaactggg

SEQ ID NO: 47589 - DNA, 33 bp, Homo sapien
aaatgtttgataaagacaacatctcagagtaca

SEQ ID NO: 47590 - DNA, 33 bp, Homo sapien
aaatgtttgataaagagaacatctcagagtaca

SEQ ID NO: 47591 - DNA, 33 bp, Homo sapien
ggaaatatgtgtgggcaaaactaatgcctaccc

SEQ ID NO: 47592 - DNA, 33 bp, Homo sapien
ggaaatatgtgtgggcgaaactaatgcctaccc

SEQ ID NO: 47593 - DNA, 33 bp, Homo sapien
aaagaaacctaagtcacaataaccatgaggtgc

SEQ ID NO: 47594 - DNA, 33 bp, Homo sapien
aaagaaacctaagtcataataaccatgaggtgc

SEQ ID NO: 47595 - DNA, 33 bp, Homo sapien
tctatcaatttgggagaagctgggatactggcc

SEQ ID NO: 47596 - DNA, 33 bp, Homo sapien
tctatcaatttgggaggagctgggatactggcc

SEQ ID NO: 47597 - DNA, 33 bp, Homo sapien
gtctaccctcaggttcacaaccttcctagtcat

SEQ ID NO: 47598 - DNA, 33 bp, Homo sapien
gtctaccctcaggttctcaaccttcctagtcat

SEQ ID NO: 47599 - DNA, 33 bp, Homo sapien
gatgggaacaaaggccagaggtgccaagaactc

SEQ ID NO: 47600 - DNA, 33 bp, Homo sapien
gatgggaacaaaggcctgaggtgccaagaactc

SEQ ID NO: 47601 - DNA, 33 bp, Homo sapien
atactttcagccataaacagggagaggaaaaag

SEQ ID NO: 47602 - DNA, 33 bp, Homo sapien
atactttcagccataagcagggagaggaaaaag

SEQ ID NO: 47603 - DNA, 33 bp, Homo sapien
cttgaaggagtctctacaaaaactaaccaaccc

SEQ ID NO: 47604 - DNA, 33 bp, Homo sapien
cttgaaggagtctctagaaaaactaaccaaccc

SEQ ID NO: 47605 - DNA, 33 bp, Homo sapien
tggactggagtttgaacgaggtaacgatcaaga

SEQ ID NO: 47606 - DNA, 33 bp, Homo sapien
tggactggagtttgaatgaggtaacgatcaaga

SEQ ID NO: 47607 - DNA, 33 bp, Homo sapien
aggggtgagaagtcacacgtaaccttccaagta

SEQ ID NO: 47608 - DNA, 33 bp, Homo sapien
aggggtgagaagtcactcgtaaccttccaagta

SEQ ID NO: 47609 - DNA, 33 bp, Homo sapien
ggagcagctgatttaacgtgaccccatcggtgc

SEQ ID NO: 47610 - DNA, 33 bp, Homo sapien
ggagcagctgatttaatgtgaccccatcggtgc

SEQ ID NO: 47611 - DNA, 33 bp, Homo sapien
ctgagaatgtggggccacaccagtcaaggcggc

SEQ ID NO: 47612 - DNA, 33 bp, Homo sapien
ctgagaatgtggggccgcaccagtcaaggcggc

SEQ ID NO: 47613 - DNA, 33 bp, Homo sapien
gtttgctgtgtggcctaaagcaagttgtctgcc

SEQ ID NO: 47614 - DNA, 33 bp, Homo sapien
gtttgctgtgtggccttaagcaagttgtctgcc

SEQ ID NO: 47615 - DNA, 33 bp, Homo sapien
tgaacccagatctcctaacaagaagccagtgtt

SEQ ID NO: 47616 - DNA, 33 bp, Homo sapien
tgaacccagatctcctgacaagaagccagtgtt

SEQ ID NO: 47617 - DNA, 33 bp, Homo sapien
agaggcacagccacgcacacctgtttctttgtc

SEQ ID NO: 47618 - DNA, 33 bp, Homo sapien
agaggcacagccacgcgcacctgtttctttgtc

SEQ ID NO: 47619 - DNA, 33 bp, Homo sapien
attatacgttactctcacagacataatttcact

SEQ ID NO: 47620 - DNA, 33 bp, Homo sapien
attatacgttactctcgcagacataatttcact

SEQ ID NO: 47621 - DNA, 33 bp, Homo sapien
gggccattacctggacactgtttctttgccatg

SEQ ID NO: 47622 - DNA, 33 bp, Homo sapien
gggccattacctggacgctgtttctttgccatg

SEQ ID NO: 47623 - DNA, 33 bp, Homo sapien
gctgctgtgctgagaactgactgcaggagtaca

SEQ ID NO: 47624 - DNA, 33 bp, Homo sapien
gctgctgtgctgagaattgactgcaggagtaca

SEQ ID NO: 47625 - DNA, 33 bp, Homo sapien
catacaaaacacctgagaatacttactatgtgc

SEQ ID NO: 47626 - DNA, 33 bp, Homo sapien
catacaaaacacctgataatacttactatgtgc

SEQ ID NO: 47627 - DNA, 33 bp, Homo sapien
gaactccctttgtgaactgtgaagagctataca

SEQ ID NO: 47628 - DNA, 33 bp, Homo sapien
gaactccctttgtgaattgtgaagagctataca

SEQ ID NO: 47629 - DNA, 33 bp, Homo sapien
tgctcagagacctgaaacatctcccatgtgtcc

SEQ ID NO: 47630 - DNA, 33 bp, Homo sapien
tgctcagagacctgaagcatctcccatgtgtcc

SEQ ID NO: 47631 - DNA, 33 bp, Homo sapien
gactcaggggctgagacaaaactgggaaaagtg

SEQ ID NO: 47632 - DNA, 33 bp, Homo sapien
gactcaggggctgagagaaaactgggaaaagtg

SEQ ID NO: 47633 - DNA, 33 bp, Homo sapien
ggcacagtgtgaaggaagttatggaggagaggc

SEQ ID NO: 47634 - DNA, 33 bp, Homo sapien
ggcacagtgtgaaggaggttatggaggagaggc

SEQ ID NO: 47635 - DNA, 33 bp, Homo sapien
acgagtcaggagagccagattctggtttcagct

SEQ ID NO: 47636 - DNA, 33 bp, Homo sapien
acgagtcaggagagccggattctggtttcagct

SEQ ID NO: 47637 - DNA, 33 bp, Homo sapien
tgccacctgctctggaaaagaagtaccagctga

SEQ ID NO: 47638 - DNA, 33 bp, Homo sapien
tgccacctgctctggagaagaagtaccagctga

SEQ ID NO: 47639 - DNA, 33 bp, Homo sapien
gacatgatgacatttacgttttagagagaacac

SEQ ID NO: 47640 - DNA, 33 bp, Homo sapien
gacatgatgacatttatgttttagagagaacac

SEQ ID NO: 47641 - DNA, 33 bp, Homo sapien
cagaggagacctgagaaattatctggaccatcc

SEQ ID NO: 47642 - DNA, 33 bp, Homo sapien
cagaggagacctgagagattatctggaccatcc

SEQ ID NO: 47643 - DNA, 33 bp, Homo sapien
ccttatcaattctcagaactttcctaacatagt

SEQ ID NO: 47644 - DNA, 33 bp, Homo sapien
ccttatcaattctcaggactttcctaacatagt

SEQ ID NO: 47645 - DNA, 33 bp, Homo sapien
ggaagaaaggaagaaaattgacagtggataatg

SEQ ID NO: 47646 - DNA, 33 bp, Homo sapien
ggaagaaaggaagaaatttgacagtggataatg

SEQ ID NO: 47647 - DNA, 33 bp, Homo sapien
gtctggctggagttccccttttgaaagtgtcca

SEQ ID NO: 47648 - DNA, 33 bp, Homo sapien
gtctggctggagttcctcttttgaaagtgtcca

SEQ ID NO: 47649 - DNA, 33 bp, Homo sapien
tcttacaggagaaagcacaaagagctgtaagag

SEQ ID NO: 47650 - DNA, 33 bp, Homo sapien
tcttacaggagaaagcccaaagagctgtaagag

SEQ ID NO: 47651 - DNA, 33 bp, Homo sapien
gccttgtcataattgccctgtatgtcataccca

SEQ ID NO: 47652 - DNA, 33 bp, Homo sapien
gccttgtcataattgctctgtatgtcataccca

SEQ ID NO: 47653 - DNA, 33 bp, Homo sapien
tccttttcccattctgccactcattgtgtgacc

SEQ ID NO: 47654 - DNA, 33 bp, Homo sapien
tccttttcccattctgtcactcattgtgtgacc

SEQ ID NO: 47655 - DNA, 33 bp, Homo sapien
atacagtcattgagtcaagcctagaagtttctg

SEQ ID NO: 47656 - DNA, 33 bp, Homo sapien
atacagtcattgagtcgagcctagaagtttctg

SEQ ID NO: 47657 - DNA, 33 bp, Homo sapien
tactgtcatcatctgcaatctaagtaatgcaga

SEQ ID NO: 47658 - DNA, 33 bp, Homo sapien
tactgtcatcatctgcgatctaagtaatgcaga

SEQ ID NO: 47659 - DNA, 33 bp, Homo sapien
ttggggagtaaagagaagagtttccttacaaat

SEQ ID NO: 47660 - DNA, 33 bp, Homo sapien
ttggggagtaaagagaggagtttccttacaaat

SEQ ID NO: 47661 - DNA, 33 bp, Homo sapien
ccatgtctccgtaacacgcctctcgtggggtct

SEQ ID NO: 47662 - DNA, 33 bp, Homo sapien
ccatgtctccgtaacaggcctctcgtggggtct

SEQ ID NO: 47663 - DNA, 33 bp, Homo sapien
cccgctcccgacttcaacattggctcagccttc

SEQ ID NO: 47664 - DNA, 33 bp, Homo sapien
cccgctcccgacttcagcattggctcagccttc

SEQ ID NO: 47665 - DNA, 33 bp, Homo sapien
ctcttacgggctgagcaagaacatcagagggca

SEQ ID NO: 47666 - DNA, 33 bp, Homo sapien
ctcttacgggctgagcgagaacatcagagggca

SEQ ID NO: 47667 - DNA, 33 bp, Homo sapien
aggtcagagacgtccccaagatgtcagcaagta

SEQ ID NO: 47668 - DNA, 33 bp, Homo sapien
aggtcagagacgtccctaagatgtcagcaagta

SEQ ID NO: 47669 - DNA, 33 bp, Homo sapien
acgatctcttgacatacggtttctggctgagag

SEQ ID NO: 47670 - DNA, 33 bp, Homo sapien
acgatctcttgacatatggtttctggctgagag

SEQ ID NO: 47671 - DNA, 33 bp, Homo sapien
gcccttccaaagatcaatagccacccaacccgc

SEQ ID NO: 47672 - DNA, 33 bp, Homo sapien
gcccttccaaagatcagtagccacccaacccgc

SEQ ID NO: 47673 - DNA, 33 bp, Homo sapien
taaagtagtccttgccaaaactctccattacat

SEQ ID NO: 47674 - DNA, 33 bp, Homo sapien
taaagtagtccttgcccaaactctccattacat

SEQ ID NO: 47675 - DNA, 33 bp, Homo sapien
agaacttgtgacaagactctctcctaacaaaaa

SEQ ID NO: 47676 - DNA, 33 bp, Homo sapien
agaacttgtgacaagattctctcctaacaaaaa

SEQ ID NO: 47677 - DNA, 33 bp, Homo sapien
ataaatgtagaagtgcacaccagcatcaacaga

SEQ ID NO: 47678 - DNA, 33 bp, Homo sapien
ataaatgtagaagtgcgcaccagcatcaacaga

SEQ ID NO: 47679 - DNA, 33 bp, Homo sapien
aggacagaagttgaggaacttgggaccccaaag

SEQ ID NO: 47680 - DNA, 33 bp, Homo sapien
aggacagaagttgagggacttgggaccccaaag

SEQ ID NO: 47681 - DNA, 33 bp, Homo sapien
ccacatgtcatcatcacctggtactgacaggcc

SEQ ID NO: 47682 - DNA, 33 bp, Homo sapien
ccacatgtcatcatcatctggtactgacaggcc

SEQ ID NO: 47683 - DNA, 33 bp, Homo sapien
gaacctttgccgaacacctgggacaaatctttt

SEQ ID NO: 47684 - DNA, 33 bp, Homo sapien
gaacctttgccgaacatctgggacaaatctttt

SEQ ID NO: 47685 - DNA, 33 bp, Homo sapien
gcctctgaactcaaaaccatcaggcctggagga

SEQ ID NO: 47686 - DNA, 33 bp, Homo sapien
gcctctgaactcaaaagcatcaggcctggagga

SEQ ID NO: 47687 - DNA, 33 bp, Homo sapien
tcaatatcaattgaacaaaatggttgagagtta

SEQ ID NO: 47688 - DNA, 33 bp, Homo sapien
tcaatatcaattgaacgaaatggttgagagtta

SEQ ID NO: 47689 - DNA, 33 bp, Homo sapien
tttccaggaaccaccacgctaaactaatgtaat

SEQ ID NO: 47690 - DNA, 33 bp, Homo sapien
tttccaggaaccaccatgctaaactaatgtaat

SEQ ID NO: 47691 - DNA, 33 bp, Homo sapien
aagtgaccatctttgaccgctgggcaccacatt

SEQ ID NO: 47692 - DNA, 33 bp, Homo sapien
aagtgaccatctttgatcgctgggcaccacatt

SEQ ID NO: 47693 - DNA, 33 bp, Homo sapien
atgctggcggtcatacaggacagagcaaaggac

SEQ ID NO: 47694 - DNA, 33 bp, Homo sapien
atgctggcggtcatacgggacagagcaaaggac

SEQ ID NO: 47695 - DNA, 33 bp, Homo sapien
cccaaatatgtattgccaatctcaggtacctct

SEQ ID NO: 47696 - DNA, 33 bp, Homo sapien
cccaaatatgtattgctaatctcaggtacctct

SEQ ID NO: 47697 - DNA, 33 bp, Homo sapien
ggatgaagaaacatgacgcaggaagtcacccta

SEQ ID NO: 47698 - DNA, 33 bp, Homo sapien
ggatgaagaaacatgatgcaggaagtcacccta

SEQ ID NO: 47699 - DNA, 33 bp, Homo sapien
agccaattcaagtgagacccaggataagagagg

SEQ ID NO: 47700 - DNA, 33 bp, Homo sapien
agccaattcaagtgagtcccaggataagagagg

SEQ ID NO: 47701 - DNA, 33 bp, Homo sapien
catctccagaaatgacggagcagaaagtccccc

SEQ ID NO: 47702 - DNA, 33 bp, Homo sapien
catctccagaaatgactgagcagaaagtccccc

SEQ ID NO: 47703 - DNA, 33 bp, Homo sapien
tgtgcacccaagctgaaaaataatagagctgtc

SEQ ID NO: 47704 - DNA, 33 bp, Homo sapien
tgtgcacccaagctgagaaataatagagctgtc

SEQ ID NO: 47705 - DNA, 33 bp, Homo sapien
tgacccaatgtcatccaacagacccaagtgcac

SEQ ID NO: 47706 - DNA, 33 bp, Homo sapien
tgacccaatgtcatccgacagacccaagtgcac

SEQ ID NO: 47707 - DNA, 33 bp, Homo sapien
cagcccaagcttcccagagtcgagccttaatcc

SEQ ID NO: 47708 - DNA, 33 bp, Homo sapien
cagcccaagcttcccatagtcgagccttaatcc

SEQ ID NO: 47709 - DNA, 33 bp, Homo sapien
ggatcagggaataagaacttctcttctgcaagc

SEQ ID NO: 47710 - DNA, 33 bp, Homo sapien
ggatcagggaataagagcttctcttctgcaagc

SEQ ID NO: 47711 - DNA, 33 bp, Homo sapien
gaggatttgtgtcctcagaaacacccttcaagg

SEQ ID NO: 47712 - DNA, 33 bp, Homo sapien
gaggatttgtgtcctcggaaacacccttcaagg

SEQ ID NO: 47713 - DNA, 33 bp, Homo sapien
aaatcaaatcgccttaccgcagcctaggagggc

SEQ ID NO: 47714 - DNA, 33 bp, Homo sapien
aaatcaaatcgccttatcgcagcctaggagggc

SEQ ID NO: 47715 - DNA, 33 bp, Homo sapien
attcagctgttcaataagcaccattttgtgtct

SEQ ID NO: 47716 - DNA, 33 bp, Homo sapien
attcagctgttcaataggcaccattttgtgtct

SEQ ID NO: 47717 - DNA, 33 bp, Homo sapien
actagaccttgaaagacgggaactccaggtgaa

SEQ ID NO: 47718 - DNA, 33 bp, Homo sapien
actagaccttgaaagatgggaactccaggtgaa

SEQ ID NO: 47719 - DNA, 33 bp, Homo sapien
agtattgtctacatggaagggtggctgtgaaga

SEQ ID NO: 47720 - DNA, 33 bp, Homo sapien
agtattgtctacatggcagggtggctgtgaaga

SEQ ID NO: 47721 - DNA, 33 bp, Homo sapien
cccaggcccattctacaataaaggtatgggcac

SEQ ID NO: 47722 - DNA, 33 bp, Homo sapien
cccaggcccattctacgataaaggtatgggcac

SEQ ID NO: 47723 - DNA, 33 bp, Homo sapien
agggcttcctcgccacagtgcagtatcagatgc

SEQ ID NO: 47724 - DNA, 33 bp, Homo sapien
agggcttcctcgccacggtgcagtatcagatgc

SEQ ID NO: 47725 - DNA, 33 bp, Homo sapien
gggtttgcattcagaaagatttgggatagggat

SEQ ID NO: 47726 - DNA, 33 bp, Homo sapien
gggtttgcattcagaaggatttgggatagggat

SEQ ID NO: 47727 - DNA, 33 bp, Homo sapien
tcctctacctctcacaatcctcagctgtgtcct

SEQ ID NO: 47728 - DNA, 33 bp, Homo sapien
tcctctacctctcacagtcctcagctgtgtcct

SEQ ID NO: 47729 - DNA, 33 bp, Homo sapien
catcctcccacagacgcagccacatcaccaaga

SEQ ID NO: 47730 - DNA, 33 bp, Homo sapien
catcctcccacagacgtagccacatcaccaaga

SEQ ID NO: 47731 - DNA, 33 bp, Homo sapien
ttccggtggaagttaccgccttctaacaaacta

SEQ ID NO: 47732 - DNA, 33 bp, Homo sapien
ttccggtggaagttactgccttctaacaaacta

SEQ ID NO: 47733 - DNA, 33 bp, Homo sapien
cccagtgtcatagggaactgaaatgccttgaga

SEQ ID NO: 47734 - DNA, 33 bp, Homo sapien
cccagtgtcatagggagctgaaatgccttgaga

SEQ ID NO: 47735 - DNA, 33 bp, Homo sapien
aggaaacagacttgatcagggattcctcagcca

SEQ ID NO: 47736 - DNA, 33 bp, Homo sapien
aggaaacagacttgattagggattcctcagcca

SEQ ID NO: 47737 - DNA, 33 bp, Homo sapien
ggagaatttggtacaagctcttcctccaaacat

SEQ ID NO: 47738 - DNA, 33 bp, Homo sapien
ggagaatttggtacaatctcttcctccaaacat

SEQ ID NO: 47739 - DNA, 33 bp, Homo sapien
gggaaaaagcaaggacagaaggcttcttgggtt

SEQ ID NO: 47740 - DNA, 33 bp, Homo sapien
gggaaaaagcaaggaccgaaggcttcttgggtt

SEQ ID NO: 47741 - DNA, 33 bp, Homo sapien
gactaactcaacagctgagctctcttctatctg

SEQ ID NO: 47742 - DNA, 33 bp, Homo sapien
gactaactcaacagcttagctctcttctatctg

SEQ ID NO: 47743 - DNA, 33 bp, Homo sapien
ggatcactccatgttaagattaaagatgtgact

SEQ ID NO: 47744 - DNA, 33 bp, Homo sapien
ggatcactccatgttacgattaaagatgtgact

SEQ ID NO: 47745 - DNA, 33 bp, Homo sapien
gtacactaacctcccaatgacactgcgtactca

SEQ ID NO: 47746 - DNA, 33 bp, Homo sapien
gtacactaacctcccagtgacactgcgtactca

SEQ ID NO: 47747 - DNA, 33 bp, Homo sapien
ggaggcgtgtcattgcaatagtgtttagacagg

SEQ ID NO: 47748 - DNA, 33 bp, Homo sapien
ggaggcgtgtcattgcgatagtgtttagacagg

SEQ ID NO: 47749 - DNA, 33 bp, Homo sapien
gtcaccagtggtactccccgcctaagtccatag

SEQ ID NO: 47750 - DNA, 33 bp, Homo sapien
gtcaccagtggtactctccgcctaagtccatag

SEQ ID NO: 47751 - DNA, 33 bp, Homo sapien
ctttctctcttccagcccccattccatttccag

SEQ ID NO: 47752 - DNA, 33 bp, Homo sapien
ctttctctcttccagcgcccattccatttccag

SEQ ID NO: 47753 - DNA, 33 bp, Homo sapien
ttttccctctagttcaagctcaaatctcactca

SEQ ID NO: 47754 - DNA, 33 bp, Homo sapien
ttttccctctagttcaggctcaaatctcactca

SEQ ID NO: 47755 - DNA, 33 bp, Homo sapien
ggggcttgagagaatacgagaggaggacagagg

SEQ ID NO: 47756 - DNA, 33 bp, Homo sapien
ggggcttgagagaatatgagaggaggacagagg

SEQ ID NO: 47757 - DNA, 33 bp, Homo sapien
ccataattacactctacgtcctcagtaatgcgc

SEQ ID NO: 47758 - DNA, 33 bp, Homo sapien
ccataattacactctaggtcctcagtaatgcgc

SEQ ID NO: 47759 - DNA, 33 bp, Homo sapien
ccaaatgccctaacaaaactcaccgtatgtttg

SEQ ID NO: 47760 - DNA, 33 bp, Homo sapien
ccaaatgccctaacaacactcaccgtatgtttg

SEQ ID NO: 47761 - DNA, 33 bp, Homo sapien
aagacgttttggtagcagaattaaccagtattt

SEQ ID NO: 47762 - DNA, 33 bp, Homo sapien
aagacgttttggtagcggaattaaccagtattt

SEQ ID NO: 47763 - DNA, 33 bp, Homo sapien
gttcccatcttctcaaatccttgcatttaccag

SEQ ID NO: 47764 - DNA, 33 bp, Homo sapien
gttcccatcttctcaactccttgcatttaccag

SEQ ID NO: 47765 - DNA, 33 bp, Homo sapien
actccacccaacagtacaagaatgcatggaata

SEQ ID NO: 47766 - DNA, 33 bp, Homo sapien
actccacccaacagtagaagaatgcatggaata

SEQ ID NO: 47767 - DNA, 33 bp, Homo sapien
tttcccagattttaaaccatgaattctaattgt

SEQ ID NO: 47768 - DNA, 33 bp, Homo sapien
tttcccagattttaaagcatgaattctaattgt

SEQ ID NO: 47769 - DNA, 33 bp, Homo sapien
ggtactgattggtaaacgacatcttatttgaat

SEQ ID NO: 47770 - DNA, 33 bp, Homo sapien
ggtactgattggtaaatgacatcttatttgaat

SEQ ID NO: 47771 - DNA, 33 bp, Homo sapien
catccaagtacatgaaaaagtggtagtcagaat

SEQ ID NO: 47772 - DNA, 33 bp, Homo sapien
catccaagtacatgaagaagtggtagtcagaat

SEQ ID NO: 47773 - DNA, 33 bp, Homo sapien
tcacaggaggcttttacggagtcctgtccaagg

SEQ ID NO: 47774 - DNA, 33 bp, Homo sapien
tcacaggaggcttttatggagtcctgtccaagg

SEQ ID NO: 47775 - DNA, 33 bp, Homo sapien
gagcttcctgttgctaagtagatacaccaagct

SEQ ID NO: 47776 - DNA, 33 bp, Homo sapien
gagcttcctgttgctaggtagatacaccaagct

SEQ ID NO: 47777 - DNA, 33 bp, Homo sapien
catttccaatcttccaaactaagctgtattttt

SEQ ID NO: 47778 - DNA, 33 bp, Homo sapien
catttccaatcttccatactaagctgtattttt

SEQ ID NO: 47779 - DNA, 33 bp, Homo sapien
aaagactgagatctcccagataaaccggaacat

SEQ ID NO: 47780 - DNA, 33 bp, Homo sapien
aaagactgagatctcctagataaaccggaacat

SEQ ID NO: 47781 - DNA, 33 bp, Homo sapien
gttgacctcaaaattacgacttgcattcttaac

SEQ ID NO: 47782 - DNA, 33 bp, Homo sapien
gttgacctcaaaattatgacttgcattcttaac

SEQ ID NO: 47783 - DNA, 33 bp, Homo sapien
gactaggattgagtagacaccccataaatactt

SEQ ID NO: 47784 - DNA, 33 bp, Homo sapien
gactaggattgagtaggcaccccataaatactt

SEQ ID NO: 47785 - DNA, 33 bp, Homo sapien
gaggataggaagtaggaaggatcttgttgaaga

SEQ ID NO: 47786 - DNA, 33 bp, Homo sapien
gaggataggaagtaggcaggatcttgttgaaga

SEQ ID NO: 47787 - DNA, 33 bp, Homo sapien
gatcttgtgaggtaataatggtgggcaggaaat

SEQ ID NO: 47788 - DNA, 33 bp, Homo sapien
gatcttgtgaggtaattatggtgggcaggaaat

SEQ ID NO: 47789 - DNA, 33 bp, Homo sapien
gggggaagatttagaacagatgctgagagctga

SEQ ID NO: 47790 - DNA, 33 bp, Homo sapien
gggggaagatttagaatagatgctgagagctga

SEQ ID NO: 47791 - DNA, 33 bp, Homo sapien
cacaagaggtagaaaacggtacacctgtagagc

SEQ ID NO: 47792 - DNA, 33 bp, Homo sapien
cacaagaggtagaaaatggtacacctgtagagc

SEQ ID NO: 47793 - DNA, 33 bp, Homo sapien
atccaccaaaggcgtacaggtctaacgtagcaa

SEQ ID NO: 47794 - DNA, 33 bp, Homo sapien
atccaccaaaggcgtataggtctaacgtagcaa

SEQ ID NO: 47795 - DNA, 33 bp, Homo sapien
aggggtccttaaagaacggccctcagatccctg

SEQ ID NO: 47796 - DNA, 33 bp, Homo sapien
aggggtccttaaagaatggccctcagatccctg

SEQ ID NO: 47797 - DNA, 33 bp, Homo sapien
taaaataaaatgaaagcctgaccatggatctcc

SEQ ID NO: 47798 - DNA, 33 bp, Homo sapien
taaaataaaatgaaagtctgaccatggatctcc

SEQ ID NO: 47799 - DNA, 33 bp, Homo sapien
gggctggcaaggcaaacaggtgtcaggccacag

SEQ ID NO: 47800 - DNA, 33 bp, Homo sapien
gggctggcaaggcaaagaggtgtcaggccacag

SEQ ID NO: 47801 - DNA, 33 bp, Homo sapien
ttgttcccaccgcatcacaagacttgctctcca

SEQ ID NO: 47802 - DNA, 33 bp, Homo sapien
ttgttcccaccgcatcgcaagacttgctctcca

SEQ ID NO: 47803 - DNA, 33 bp, Homo sapien
aagcaaaaagctgtgaacaagtgtagcaaatct

SEQ ID NO: 47804 - DNA, 33 bp, Homo sapien
aagcaaaaagctgtgagcaagtgtagcaaatct

SEQ ID NO: 47805 - DNA, 33 bp, Homo sapien
attcccggttcctgtccatggttcaccaattca

SEQ ID NO: 47806 - DNA, 33 bp, Homo sapien
attcccggttcctgtctatggttcaccaattca

SEQ ID NO: 47807 - DNA, 33 bp, Homo sapien
agcattccctgggaaacggagagcgagagacca

SEQ ID NO: 47808 - DNA, 33 bp, Homo sapien
agcattccctgggaaatggagagcgagagacca

SEQ ID NO: 47809 - DNA, 33 bp, Homo sapien
tcagtctttcttgccacagatctctgtccttta

SEQ ID NO: 47810 - DNA, 33 bp, Homo sapien
tcagtctttcttgccatagatctctgtccttta

SEQ ID NO: 47811 - DNA, 33 bp, Homo sapien
tttgtcattcactcccagagaagaggatgacta

SEQ ID NO: 47812 - DNA, 33 bp, Homo sapien
tttgtcattcactcccggagaagaggatgacta

SEQ ID NO: 47813 - DNA, 33 bp, Homo sapien
aactgaagccagagacccaagttaggtggaaat

SEQ ID NO: 47814 - DNA, 33 bp, Homo sapien
aactgaagccagagacgcaagttaggtggaaat

SEQ ID NO: 47815 - DNA, 33 bp, Homo sapien
cagacaaaggaatgtacaactgttttatggtgg

SEQ ID NO: 47816 - DNA, 33 bp, Homo sapien
cagacaaaggaatgtagaactgttttatggtgg

SEQ ID NO: 47817 - DNA, 33 bp, Homo sapien
gtttgttccctttagcacttttatgtcctcaca

SEQ ID NO: 47818 - DNA, 33 bp, Homo sapien
gtttgttccctttagcgcttttatgtcctcaca

SEQ ID NO: 47819 - DNA, 33 bp, Homo sapien
taagcgggtgtaactacggtgcttttatactgc

SEQ ID NO: 47820 - DNA, 33 bp, Homo sapien
taagcgggtgtaactatggtgcttttatactgc

SEQ ID NO: 47821 - DNA, 33 bp, Homo sapien
gggcaagtgagaagaaagtgagggcgtgtagag

SEQ ID NO: 47822 - DNA, 33 bp, Homo sapien
gggcaagtgagaagaaggtgagggcgtgtagag

SEQ ID NO: 47823 - DNA, 33 bp, Homo sapien
tggaaagtgatacagaccagatcccttctgaaa

SEQ ID NO: 47824 - DNA, 33 bp, Homo sapien
tggaaagtgatacagatcagatcccttctgaaa

SEQ ID NO: 47825 - DNA, 33 bp, Homo sapien
ttcaacccctaacttcactagcagaatgcacct

SEQ ID NO: 47826 - DNA, 33 bp, Homo sapien
ttcaacccctaacttcgctagcagaatgcacct

SEQ ID NO: 47827 - DNA, 33 bp, Homo sapien
gagtcattagagctgacgttctttcctctggca

SEQ ID NO: 47828 - DNA, 33 bp, Homo sapien
gagtcattagagctgaggttctttcctctggca

SEQ ID NO: 47829 - DNA, 33 bp, Homo sapien
gattaagtcctgttgacagtatgtactgtgata

SEQ ID NO: 47830 - DNA, 33 bp, Homo sapien
gattaagtcctgttgatagtatgtactgtgata

SEQ ID NO: 47831 - DNA, 33 bp, Homo sapien
attggacgagaagaaacaatctcctgtggagaa

SEQ ID NO: 47832 - DNA, 33 bp, Homo sapien
attggacgagaagaaagaatctcctgtggagaa

SEQ ID NO: 47833 - DNA, 33 bp, Homo sapien
tttctgtccacggcacaggcggcagctctctcc

SEQ ID NO: 47834 - DNA, 33 bp, Homo sapien
tttctgtccacggcaccggcggcagctctctcc

SEQ ID NO: 47835 - DNA, 33 bp, Homo sapien
attttgattccacataagaaggatattctaact

SEQ ID NO: 47836 - DNA, 33 bp, Homo sapien
attttgattccacataggaaggatattctaact

SEQ ID NO: 47837 - DNA, 33 bp, Homo sapien
agcccattgttttttcaagacatcctgttttac

SEQ ID NO: 47838 - DNA, 33 bp, Homo sapien
agcccattgttttttcgagacatcctgttttac

SEQ ID NO: 47839 - DNA, 33 bp, Homo sapien
ctctagcctacagcacagtgagataataagttt

SEQ ID NO: 47840 - DNA, 33 bp, Homo sapien
ctctagcctacagcacggtgagataataagttt

SEQ ID NO: 47841 - DNA, 33 bp, Homo sapien
agaaagtttacactgcaacacttcttaggaaac

SEQ ID NO: 47842 - DNA, 33 bp, Homo sapien
agaaagtttacactgcgacacttcttaggaaac

SEQ ID NO: 47843 - DNA, 33 bp, Homo sapien
gcaggttgaacttctcaaatgcagttatttgcc

SEQ ID NO: 47844 - DNA, 33 bp, Homo sapien
gcaggttgaacttctcgaatgcagttatttgcc

SEQ ID NO: 47845 - DNA, 33 bp, Homo sapien
atcaggaatatgcaggaacaagacaagcagctt

SEQ ID NO: 47846 - DNA, 33 bp, Homo sapien
atcaggaatatgcaggcacaagacaagcagctt

SEQ ID NO: 47847 - DNA, 33 bp, Homo sapien
ggggaagacagctgtacgctagccaaagagaga

SEQ ID NO: 47848 - DNA, 33 bp, Homo sapien
ggggaagacagctgtatgctagccaaagagaga

SEQ ID NO: 47849 - DNA, 33 bp, Homo sapien
gagctgactaatataccgagagtgagggcctcc

SEQ ID NO: 47850 - DNA, 33 bp, Homo sapien
gagctgactaatatactgagagtgagggcctcc

SEQ ID NO: 47851 - DNA, 33 bp, Homo sapien
gccccctgaatgtgcccatagacttttgagggc

SEQ ID NO: 47852 - DNA, 33 bp, Homo sapien
gccccctgaatgtgccgatagacttttgagggc

SEQ ID NO: 47853 - DNA, 33 bp, Homo sapien
tgtgtcagtgacattcacaccaaaccacagcag

SEQ ID NO: 47854 - DNA, 33 bp, Homo sapien
tgtgtcagtgacattctcaccaaaccacagcag

SEQ ID NO: 47855 - DNA, 33 bp, Homo sapien
caggctacccaccttcacaaaatagagacggtc

SEQ ID NO: 47856 - DNA, 33 bp, Homo sapien
caggctacccaccttcgcaaaatagagacggtc

SEQ ID NO: 47857 - DNA, 33 bp, Homo sapien
agttctctccactgtacattcagggattttttc

SEQ ID NO: 47858 - DNA, 33 bp, Homo sapien
agttctctccactgtatattcagggattttttc

SEQ ID NO: 47859 - DNA, 33 bp, Homo sapien
cacgtgaaacattgaaatacattacccaaagga

SEQ ID NO: 47860 - DNA, 33 bp, Homo sapien
cacgtgaaacattgaactacattacccaaagga

SEQ ID NO: 47861 - DNA, 33 bp, Homo sapien
agggtaaagacaagaaggacatccagctatgaa

SEQ ID NO: 47862 - DNA, 33 bp, Homo sapien
agggtaaagacaagaatgacatccagctatgaa

SEQ ID NO: 47863 - DNA, 33 bp, Homo sapien
ttctaattttatcaaaagtcttatcaaaaacaa

SEQ ID NO: 47864 - DNA, 33 bp, Homo sapien
ttctaattttatcaaaggtcttatcaaaaacaa

SEQ ID NO: 47865 - DNA, 33 bp, Homo sapien
ctgttgcatttgtctacgtgtcggtttttgtac

SEQ ID NO: 47866 - DNA, 33 bp, Homo sapien
ctgttgcatttgtctatgtgtcggtttttgtac

SEQ ID NO: 47867 - DNA, 33 bp, Homo sapien; identical to SEQ ID NO: 47865

SEQ ID NO: 47868 - DNA, 33 bp, Homo sapien; identical to SEQ ID NO: 47866

SEQ ID NO: 47869 - DNA, 33 bp, Homo sapien
tatgatcttagttcaacctcatacgccatatgg

SEQ ID NO: 47870 - DNA, 33 bp, Homo sapien
tatgatcttagttcaatctcatacgccatatgg

SEQ ID NO: 47871 - DNA, 33 bp, Homo sapien
tgggtactttcaatgagcctgtaattctatggt

SEQ ID NO: 47872 - DNA, 33 bp, Homo sapien
tgggtactttcaatgatcctgtaattctatggt

SEQ ID NO: 47873 - DNA, 33 bp, Homo sapien
ctgtggtcaacactgcacttacttgggcctcct

SEQ ID NO: 47874 - DNA, 33 bp, Homo sapien
ctgtggtcaacactgcgcttacttgggcctcct

SEQ ID NO: 47875 - DNA, 33 bp, Homo sapien
gtcaataagatagtcaaacttcagaggagtagg

SEQ ID NO: 47876 - DNA, 33 bp, Homo sapien
gtcaataagatagtcagacttcagaggagtagg

SEQ ID NO: 47877 - DNA, 33 bp, Homo sapien
atggatgatgactcagccaggacctgggaaaga

SEQ ID NO: 47878 - DNA, 33 bp, Homo sapien
atggatgatgactcaggcaggacctgggaaaga

SEQ ID NO: 47879 - DNA, 33 bp, Homo sapien
gaagagaattaatttgcagaaagctatgccatg

SEQ ID NO: 47880 - DNA, 33 bp, Homo sapien
gaagagaattaatttggagaaagctatgccatg

SEQ ID NO: 47881 - DNA, 33 bp, Homo sapien
gaaacagccaatggccacagagtcaggactgcc

SEQ ID NO: 47882 - DNA, 33 bp, Homo sapien
gaaacagccaatggccgcagagtcaggactgcc

SEQ ID NO: 47883 - DNA, 33 bp, Homo sapien
acctgtcacctggaaaatcaattatcatgccta

SEQ ID NO: 47884 - DNA, 33 bp, Homo sapien
acctgtcacctggaaagtcaattatcatgccta

SEQ ID NO: 47885 - DNA, 33 bp, Homo sapien
caagcaggaagtgacactaagacaaagtagtca

SEQ ID NO: 47886 - DNA, 33 bp, Homo sapien
caagcaggaagtgacagtaagacaaagtagtca

SEQ ID NO: 47887 - DNA, 33 bp, Homo sapien
tcagccaatagacattcaatactgccaaaatga

SEQ ID NO: 47888 - DNA, 33 bp, Homo sapien
tcagccaatagacatttaatactgccaaaatga

SEQ ID NO: 47889 - DNA, 33 bp, Homo sapien
ccaaacctctcacttacatagttttccaaacca

SEQ ID NO: 47890 - DNA, 33 bp, Homo sapien
ccaaacctctcacttatatagttttccaaacca

SEQ ID NO: 47891 - DNA, 33 bp, Homo sapien
tgactttcatggccaaaggtagacacaggcact

SEQ ID NO: 47892 - DNA, 33 bp, Homo sapien
tgactttcatggccaatggtagacacaggcact

SEQ ID NO: 47893 - DNA, 33 bp, Homo sapien
ccatgtgatcaaaaagccaggagtagctctagg

SEQ ID NO: 47894 - DNA, 33 bp, Homo sapien
ccatgtgatcaaaaagtcaggagtagctctagg

SEQ ID NO: 47895 - DNA, 33 bp, Homo sapien
tgtcctctaatgtcataagtaaagtgctcagcc

SEQ ID NO: 47896 - DNA, 33 bp, Homo sapien
tgtcctctaatgtcatgagtaaagtgctcagcc

SEQ ID NO: 47897 - DNA, 33 bp, Homo sapien
caaatttcttagtaaacgctgttgattgtccag

SEQ ID NO: 47898 - DNA, 33 bp, Homo sapien
caaatttcttagtaaatgctgttgattgtccag

SEQ ID NO: 47899 - DNA, 33 bp, Homo sapien
ccaagcattcctctaacctatgacaggctttat

SEQ ID NO: 47900 - DNA, 33 bp, Homo sapien
ccaagcattcctctaagctatgacaggctttat

SEQ ID NO: 47901 - DNA, 33 bp, Homo sapien
gagaaaattatgaaaactgagacgtgcaatgtt

SEQ ID NO: 47902 - DNA, 33 bp, Homo sapien
gagaaaattatgaaaagtgagacgtgcaatgtt

SEQ ID NO: 47903 - DNA, 33 bp, Homo sapien
gaggaattaaggttgacggcattaagatggaat

SEQ ID NO: 47904 - DNA, 33 bp, Homo sapien
gaggaattaaggttgatggcattaagatggaat

SEQ ID NO: 47905 - DNA, 33 bp, Homo sapien
gttctcacaggaactaacagagcaagaactcac

SEQ ID NO: 47906 - DNA, 33 bp, Homo sapien
gttctcacaggaactagcagagcaagaactcac

SEQ ID NO: 47907 - DNA, 33 bp, Homo sapien
ggcagaaggtgaaatgcagcagacatcacatgg

SEQ ID NO: 47908 - DNA, 33 bp, Homo sapien
ggcagaaggtgaaatggagcagacatcacatgg

SEQ ID NO: 47909 - DNA, 33 bp, Homo sapien
gcaccaaaggattacaggttaactctttcaggg

SEQ ID NO: 47910 - DNA, 33 bp, Homo sapien
gcaccaaaggattacatgttaactctttcaggg

SEQ ID NO: 47911 - DNA, 33 bp, Homo sapien
ttttgccagcatggaacgttcattgctgactct

SEQ ID NO: 47912 - DNA, 33 bp, Homo sapien
ttttgccagcatggaatgttcattgctgactct

SEQ ID NO: 47913 - DNA, 33 bp, Homo sapien
tcactagcagacttgcaatataacaaatgcaaa

SEQ ID NO: 47914 - DNA, 33 bp, Homo sapien
tcactagcagacttgcgatataacaaatgcaaa

SEQ ID NO: 47915 - DNA, 33 bp, Homo sapien
actatgaaaactgactcaagaagaaataaaaat

SEQ ID NO: 47916 - DNA, 33 bp, Homo sapien
actatgaaaactgactgaagaagaaataaaaat

SEQ ID NO: 47917 - DNA, 33 bp, Homo sapien
gcctgggagccaagcgaaacagagccatatttc

SEQ ID NO: 47918 - DNA, 33 bp, Homo sapien
gcctgggagccaagcggaacagagccatatttc

SEQ ID NO: 47919 - DNA, 33 bp, Homo sapien
tacaagacgagtaaagaaagcttgactacctat

SEQ ID NO: 47920 - DNA, 33 bp, Homo sapien
tacaagacgagtaaaggaagcttgactacctat

SEQ ID NO: 47921 - DNA, 33 bp, Homo sapien
atggaagatgaagaaacagcagatagttgcagg

SEQ ID NO: 47922 - DNA, 33 bp, Homo sapien
atggaagatgaagaaatagcagatagttgcagg

SEQ ID NO: 47923 - DNA, 33 bp, Homo sapien
aagctgacagagaaccaatatgtcacacggcta

SEQ ID NO: 47924 - DNA, 33 bp, Homo sapien
aagctgacagagaaccgatatgtcacacggcta

SEQ ID NO: 47925 - DNA, 33 bp, Homo sapien
gaaatatggacaatagcagtggctggcaaatgg

SEQ ID NO: 47926 - DNA, 33 bp, Homo sapien
gaaatatggacaatagtagtggctggcaaatgg

SEQ ID NO: 47927 - DNA, 33 bp, Homo sapien
gctttagggctataaggacttggcatggtttgg

SEQ ID NO: 47928 - DNA, 33 bp, Homo sapien
gctttagggctataagtacttggcatggtttgg

SEQ ID NO: 47929 - DNA, 33 bp, Homo sapien
cagagagaagccagaaatattgtgcaaatggat

SEQ ID NO: 47930 - DNA, 33 bp, Homo sapien
cagagagaagccagaagtattgtgcaaatggat

SEQ ID NO: 47931 - DNA, 33 bp, Homo sapien
aggtatgtaactccagccgcaatatctagtaaa

SEQ ID NO: 47932 - DNA, 33 bp, Homo sapien
aggtatgtaactccagtcgcaatatctagtaaa

SEQ ID NO: 47933 - DNA, 33 bp, Homo sapien
ctcagctcccagcaaaatgatggctccaaataa

SEQ ID NO: 47934 - DNA, 33 bp, Homo sapien
ctcagctcccagcaaagtgatggctccaaataa

SEQ ID NO: 47935 - DNA, 33 bp, Homo sapien
gaagaaatacagccaagtagggggattaggatg

SEQ ID NO: 47936 - DNA, 33 bp, Homo sapien
gaagaaatacagccaattagggggattaggatg

SEQ ID NO: 47937 - DNA, 33 bp, Homo sapien
tcctaacagtactacacacattgtctcactcca

SEQ ID NO: 47938 - DNA, 33 bp, Homo sapien
tcctaacagtactacatacattgtctcactcca

SEQ ID NO: 47939 - DNA, 33 bp, Homo sapien
tgagcctccaactgcacatattatgacacgtta

SEQ ID NO: 47940 - DNA, 33 bp, Homo sapien
tgagcctccaactgcagatattatgacacgtta

SEQ ID NO: 47941 - DNA, 33 bp, Homo sapien
tccagcctctaaacccacctgtgtctacacagt

SEQ ID NO: 47942 - DNA, 33 bp, Homo sapien
tccagcctctaaacccccctgtgtctacacagt

SEQ ID NO: 47943 - DNA, 33 bp, Homo sapien
aactgtgaaaaaccgaagatctctctaagaaga

SEQ ID NO: 47944 - DNA, 33 bp, Homo sapien
aactgtgaaaaaccgatgatctctctaagaaga

SEQ ID NO: 47945 - DNA, 33 bp, Homo sapien
gtgctgtaataaacaccgaagtgcagctatctc

SEQ ID NO: 47946 - DNA, 33 bp, Homo sapien
gtgctgtaataaacacggaagtgcagctatctc

SEQ ID NO: 47947 - DNA, 33 bp, Homo sapien
tgtgcatcaaataatgaacggataaagaaaatg

SEQ ID NO: 47948 - DNA, 33 bp, Homo sapien
tgtgcatcaaataatggacggataaagaaaatg

SEQ ID NO: 47949 - DNA, 33 bp, Homo sapien
gggaggagatgttggacgaaggatacaaaattt

SEQ ID NO: 47950 - DNA, 33 bp, Homo sapien
gggaggagatgttggatgaaggatacaaaattt

SEQ ID NO: 47951 - DNA, 33 bp, Homo sapien
tagatttgggaggagacgaacaaaaccagctca

SEQ ID NO: 47952 - DNA, 33 bp, Homo sapien
tagatttgggaggagatgaacaaaaccagctca

SEQ ID NO: 47953 - DNA, 33 bp, Homo sapien
aggacatcacagacagaagagtggtcctatgtc

SEQ ID NO: 47954 - DNA, 33 bp, Homo sapien
aggacatcacagacaggagagtggtcctatgtc

SEQ ID NO: 47955 - DNA, 33 bp, Homo sapien
acttggcacaaaaaacaacggattattcttctc

SEQ ID NO: 47956 - DNA, 33 bp, Homo sapien
acttggcacaaaaaacgacggattattcttctc

SEQ ID NO: 47957 - DNA, 33 bp, Homo sapien
ttgtgttgggtgtatacgtacttacaattgttg

SEQ ID NO: 47958 - DNA, 33 bp, Homo sapien
ttgtgttgggtgtatatgtacttacaattgttg

SEQ ID NO: 47959 - DNA, 33 bp, Homo sapien
agcatctctgtagatcaaagaactcctgctgcc

SEQ ID NO: 47960 - DNA, 33 bp, Homo sapien
agcatctctgtagatccaagaactcctgctgcc

SEQ ID NO: 47961 - DNA, 33 bp, Homo sapien
aggtttatttgacttacgcatcttcaggctgta

SEQ ID NO: 47962 - DNA, 33 bp, Homo sapien
aggtttatttgacttatgcatcttcaggctgta

SEQ ID NO: 47963 - DNA, 33 bp, Homo sapien
tgacactctagagagaaaaaaagcaggtaagcc

SEQ ID NO: 47964 - DNA, 33 bp, Homo sapien
tgacactctagagagagaaaaagcaggtaagcc

SEQ ID NO: 47965 - DNA, 33 bp, Homo sapien
tagggagatgattctgacacttctaatggaaca

SEQ ID NO: 47966 - DNA, 33 bp, Homo sapien
tagggagatgattctgtcacttctaatggaaca

SEQ ID NO: 47967 - DNA, 33 bp, Homo sapien
acctgtggtgcagacaaaagagaaaaatcagat

SEQ ID NO: 47968 - DNA, 33 bp, Homo sapien
acctgtggtgcagacagaagagaaaaatcagat

SEQ ID NO: 47969 - DNA, 33 bp, Homo sapien
gagaaatgcaacttgcacctttttctttccatc

SEQ ID NO: 47970 - DNA, 33 bp, Homo sapien
gagaaatgcaacttgcgcctttttctttccatc

SEQ ID NO: 47971 - DNA, 33 bp, Homo sapien
agcaaaattcagagaaatagagctgaggttcta

SEQ ID NO: 47972 - DNA, 33 bp, Homo sapien
agcaaaattcagagaagtagagctgaggttcta

SEQ ID NO: 47973 - DNA, 33 bp, Homo sapien
tcacaccctacaatcaatcagtgaacaatatct

SEQ ID NO: 47974 - DNA, 33 bp, Homo sapien
tcacaccctacaatcagtcagtgaacaatatct

SEQ ID NO: 47975 - DNA, 33 bp, Homo sapien
catcaactgagtaaccactgctggctaagagtt

SEQ ID NO: 47976 - DNA, 33 bp, Homo sapien
catcaactgagtaaccgctgctggctaagagtt

SEQ ID NO: 47977 - DNA, 33 bp, Homo sapien
agtgtatatggtgttactaaagtaggaaagaga

SEQ ID NO: 47978 - DNA, 33 bp, Homo sapien
agtgtatatggtgttattaaagtaggaaagaga

SEQ ID NO: 47979 - DNA, 33 bp, Homo sapien
cctttataaagtgtaacactcaccgcgaaggtc

SEQ ID NO: 47980 - DNA, 33 bp, Homo sapien
cctttataaagtgtaatactcaccgcgaaggtc

SEQ ID NO: 47981 - DNA, 33 bp, Homo sapien
ttaacctccatcctgggactttataggcttgcc

SEQ ID NO: 47982 - DNA, 33 bp, Homo sapien
ttaacctccatcctggtactttataggcttgcc

SEQ ID NO: 47983 - DNA, 33 bp, Homo sapien
gcaggcctagtacataaggaatggattcagata

SEQ ID NO: 47984 - DNA, 33 bp, Homo sapien
gcaggcctagtacatatggaatggattcagata

SEQ ID NO: 47985 - DNA, 33 bp, Homo sapien
aattgagtgtccaagacgaggtttccagtcagt

SEQ ID NO: 47986 - DNA, 33 bp, Homo sapien
aattgagtgtccaagatgaggtttccagtcagt

SEQ ID NO: 47987 - DNA, 33 bp, Homo sapien
cctcaggtgcaggctgaacttctcaaatgcagt

SEQ ID NO: 47988 - DNA, 33 bp, Homo sapien
cctcaggtgcaggctggacttctcaaatgcagt

SEQ ID NO: 47989 - DNA, 33 bp, Homo sapien
ggataaggacgaagacccattttaactgcttcc

SEQ ID NO: 47990 - DNA, 33 bp, Homo sapien
ggataaggacgaagacgcattttaactgcttcc

SEQ ID NO: 47991 - DNA, 33 bp, Homo sapien
ggcatgagggcattgaagatgtgcatagtgacg

SEQ ID NO: 47992 - DNA, 33 bp, Homo sapien
ggcatgagggcattgaggatgtgcatagtgacg

SEQ ID NO: 47993 - DNA, 33 bp, Homo sapien
ggccttcaacagactgaatggtccccacccaca

SEQ ID NO: 47994 - DNA, 33 bp, Homo sapien
ggccttcaacagactggatggtccccacccaca

SEQ ID NO: 47995 - DNA, 33 bp, Homo sapien
gcacaaggttgcaaaccagaaaaatgtatctgt

SEQ ID NO: 47996 - DNA, 33 bp, Homo sapien
gcacaaggttgcaaactagaaaaatgtatctgt

SEQ ID NO: 47997 - DNA, 33 bp, Homo sapien
ggactgaaagaaactacgctattggatctcctg

SEQ ID NO: 47998 - DNA, 33 bp, Homo sapien
ggactgaaagaaactatgctattggatctcctg

SEQ ID NO: 47999 - DNA, 33 bp, Homo sapien
cagtctcaggctctacacagacccactgaatca

SEQ ID NO: 48000 - DNA, 33 bp, Homo sapien
cagtctcaggctctacgcagacccactgaatca

SEQ ID NO: 48001 - DNA, 33 bp, Homo sapien
cttccctaagaaacaacggaagagaaggagctt

SEQ ID NO: 48002 - DNA, 33 bp, Homo sapien
cttccctaagaaacaatggaagagaaggagctt

SEQ ID NO: 48003 - DNA, 33 bp, Homo sapien
aagcagcataggcacaaataaagaagccccatg

SEQ ID NO: 48004 - DNA, 33 bp, Homo sapien
aagcagcataggcacacataaagaagccccatg

SEQ ID NO: 48005 - DNA, 33 bp, Homo sapien
caggatcctcgggcctcaccattagtgtacact

SEQ ID NO: 48006 - DNA, 33 bp, Homo sapien
caggatcctcgggccttaccattagtgtacact

SEQ ID NO: 48007 - DNA, 33 bp, Homo sapien
tgaaatagaactaacaacgtattgctgtaagca

SEQ ID NO: 48008 - DNA, 33 bp, Homo sapien
tgaaatagaactaacatcgtattgctgtaagca

SEQ ID NO: 48009 - DNA, 33 bp, Homo sapien
tcagaagcacttcaggaaatatagcagtttaga

SEQ ID NO: 48010 - DNA, 33 bp, Homo sapien
tcagaagcacttcagggaatatagcagtttaga

SEQ ID NO: 48011 - DNA, 33 bp, Homo sapien
aatgtaaaaagtcataactcaatcttggaaagt

SEQ ID NO: 48012 - DNA, 33 bp, Homo sapien
aatgtaaaaagtcatatctcaatcttggaaagt

SEQ ID NO: 48013 - DNA, 33 bp, Homo sapien
aaagtagattaaaacacagatgataaagctaat

SEQ ID NO: 48014 - DNA, 33 bp, Homo sapien
aaagtagattaaaacatagatgataaagctaat

SEQ ID NO: 48015 - DNA, 33 bp, Homo sapien
tgtaggatacaaaactcagagatggaggctgtg

SEQ ID NO: 48016 - DNA, 33 bp, Homo sapien
tgtaggatacaaaacttagagatggaggctgtg

SEQ ID NO: 48017 - DNA, 33 bp, Homo sapien
gcaaattgtatgtgtacgatttggtgtcttttt

SEQ ID NO: 48018 - DNA, 33 bp, Homo sapien
gcaaattgtatgtgtatgatttggtgtcttttt

SEQ ID NO: 48019 - DNA, 33 bp, Homo sapien
tgccaatctgagttggaaagtgagaaaacaatt

SEQ ID NO: 48020 - DNA, 33 bp, Homo sapien
tgccaatctgagttgggaagtgagaaaacaatt

SEQ ID NO: 48021 - DNA, 33 bp, Homo sapien
cctaacattcagaggcccaaggaaagtggagac

SEQ ID NO: 48022 - DNA, 33 bp, Homo sapien
cctaacattcagaggctcaaggaaagtggagac

SEQ ID NO: 48023 - DNA, 33 bp, Homo sapien
gatccaaagctcaaagaaaacctttttgatgtc

SEQ ID NO: 48024 - DNA, 33 bp, Homo sapien
gatccaaagctcaaaggaaacctttttgatgtc

SEQ ID NO: 48025 - DNA, 33 bp, Homo sapien
gatactagaaggtacacgctgacttctgaaggg

SEQ ID NO: 48026 - DNA, 33 bp, Homo sapien
gatactagaaggtacatgctgacttctgaaggg

SEQ ID NO: 48027 - DNA, 33 bp, Homo sapien
cacagtcggtttctccacctttctgtagtcagt

SEQ ID NO: 48028 - DNA, 33 bp, Homo sapien
cacagtcggtttctccgcctttctgtagtcagt

SEQ ID NO: 48029 - DNA, 33 bp, Homo sapien
aggaaggtatgtttagaccatatttagaagcag

SEQ ID NO: 48030 - DNA, 33 bp, Homo sapien
aggaaggtatgtttaggccatatttagaagcag

SEQ ID NO: 48031 - DNA, 33 bp, Homo sapien
actgaatgtcagggacactgttctctttctacg

SEQ ID NO: 48032 - DNA, 33 bp, Homo sapien
actgaatgtcagggactctgttctctttctacg

SEQ ID NO: 48033 - DNA, 33 bp, Homo sapien
tcatttgatgtctccccctgggttccctggtcc

SEQ ID NO: 48034 - DNA, 33 bp, Homo sapien
tcatttgatgtctcccgctgggttccctggtcc

SEQ ID NO: 48035 - DNA, 33 bp, Homo sapien
aagctctagaagactacgctaatctttaaggaa

SEQ ID NO: 48036 - DNA, 33 bp, Homo sapien
aagctctagaagactatgctaatctttaaggaa

SEQ ID NO: 48037 - DNA, 33 bp, Homo sapien
tccctagttatgagtacaaatatgcaccccaga

SEQ ID NO: 48038 - DNA, 33 bp, Homo sapien
tccctagttatgagtataaatatgcaccccaga

SEQ ID NO: 48039 - DNA, 33 bp, Homo sapien
cactggctgacagggaactttgagctatcagtg

SEQ ID NO: 48040 - DNA, 33 bp, Homo sapien
cactggctgacagggagctttgagctatcagtg

SEQ ID NO: 48041 - DNA, 33 bp, Homo sapien
tcttctccccatctcccctttctgtgcctttct

SEQ ID NO: 48042 - DNA, 33 bp, Homo sapien
tcttctccccatctcctctttctgtgcctttct

SEQ ID NO: 48043 - DNA, 33 bp, Homo sapien
ttttaaaaaatcaaacagtacagaaatacataa

SEQ ID NO: 48044 - DNA, 33 bp, Homo sapien
ttttaaaaaatcaaacggtacagaaatacataa

SEQ ID NO: 48045 - DNA, 33 bp, Homo sapien
aaataaaacatacaaccataaaaattgcaaaga

SEQ ID NO: 48046 - DNA, 33 bp, Homo sapien
aaataaaacatacaactataaaaattgcaaaga

SEQ ID NO: 48047 - DNA, 33 bp, Homo sapien
aacaatgtggagcatacgggtattctgtgagca

SEQ ID NO: 48048 - DNA, 33 bp, Homo sapien
aacaatgtggagcatatgggtattctgtgagca

SEQ ID NO: 48049 - DNA, 33 bp, Homo sapien
agaacaagaatcatgacgttaatatcaaacaag

SEQ ID NO: 48050 - DNA, 33 bp, Homo sapien
agaacaagaatcatgaggttaatatcaaacaag

SEQ ID NO: 48051 - DNA, 33 bp, Homo sapien
caccaaattctgttttaaaaaatctctgaagta

SEQ ID NO: 48052 - DNA, 33 bp, Homo sapien
caccaaattctgtttttaaaaatctctgaagta

SEQ ID NO: 48053 - DNA, 33 bp, Homo sapien
atcctgacgacaactagaaggcaagtataacca

SEQ ID NO: 48054 - DNA, 33 bp, Homo sapien
atcctgacgacaactataaggcaagtataacca

SEQ ID NO: 48055 - DNA, 33 bp, Homo sapien
ttagttcttctttccagtcacacaattactatt

SEQ ID NO: 48056 - DNA, 33 bp, Homo sapien
ttagttcttctttccattcacacaattactatt

SEQ ID NO: 48057 - DNA, 33 bp, Homo sapien
ttcgtagcttatacacacaggcattttgttctt

SEQ ID NO: 48058 - DNA, 33 bp, Homo sapien
ttcgtagcttatacacgcaggcattttgttctt

SEQ ID NO: 48059 - DNA, 33 bp, Homo sapien
ctataaaagcatttaagtagtatgcaggattat

SEQ ID NO: 48060 - DNA, 33 bp, Homo sapien
ctataaaagcatttaattagtatgcaggattat

SEQ ID NO: 48061 - DNA, 33 bp, Homo sapien
ggaggaagtttgagaaggcaagagggaacagaa

SEQ ID NO: 48062 - DNA, 33 bp, Homo sapien
ggaggaagtttgagaatgcaagagggaacagaa

SEQ ID NO: 48063 - DNA, 33 bp, Homo sapien
gatcctaggctccttacatctcatcgtaccacc

SEQ ID NO: 48064 - DNA, 33 bp, Homo sapien
gatcctaggctccttatatctcatcgtaccacc

SEQ ID NO: 48065 - DNA, 33 bp, Homo sapien
tagcagttttaactgacgatcctagaaatctta

SEQ ID NO: 48066 - DNA, 33 bp, Homo sapien
tagcagttttaactgatgatcctagaaatctta

SEQ ID NO: 48067 - DNA, 33 bp, Homo sapien
aagattgtgtttggtacaccaagtgttcaataa

SEQ ID NO: 48068 - DNA, 33 bp, Homo sapien
aagattgtgtttggtataccaagtgttcaataa

SEQ ID NO: 48069 - DNA, 33 bp, Homo sapien
cacaatcccatctctaaaaatctttgaattctt

SEQ ID NO: 48070 - DNA, 33 bp, Homo sapien
cacaatcccatctctataaatctttgaattctt

SEQ ID NO: 48071 - DNA, 33 bp, Homo sapien
aacgtttgtttcaaagcatgtttgaaagtgata

SEQ ID NO: 48072 - DNA, 33 bp, Homo sapien
aacgtttgtttcaaagtatgtttgaaagtgata

SEQ ID NO: 48073 - DNA, 33 bp, Homo sapien
tagttacatttcagacacttgaattattaatga

SEQ ID NO: 48074 - DNA, 33 bp, Homo sapien
tagttacatttcagactcttgaattattaatga

SEQ ID NO: 48075 - DNA, 33 bp, Homo sapien
gatgaagaagccattaagtatatatttgagaca

SEQ ID NO: 48076 - DNA, 33 bp, Homo sapien
gatgaagaagccattatgtatatatttgagaca

SEQ ID NO: 48077 - DNA, 33 bp, Homo sapien
tgccacttaagtgttacgtctagggaaatacta

SEQ ID NO: 48078 - DNA, 33 bp, Homo sapien
tgccacttaagtgttatgtctagggaaatacta

SEQ ID NO: 48079 - DNA, 33 bp, Homo sapien
tctaggactgagagataagcatgcactaagatg

SEQ ID NO: 48080 - DNA, 33 bp, Homo sapien
tctaggactgagagatgagcatgcactaagatg

SEQ ID NO: 48081 - DNA, 33 bp, Homo sapien
cccaggataggacataccttagtgaacctctca

SEQ ID NO: 48082 - DNA, 33 bp, Homo sapien
cccaggataggacatatcttagtgaacctctca

SEQ ID NO: 48083 - DNA, 33 bp, Homo sapien
atagctgaactaaacgaaaatgaaaatataatg

SEQ ID NO: 48084 - DNA, 33 bp, Homo sapien
atagctgaactaaacgcaaatgaaaatataatg

SEQ ID NO: 48085 - DNA, 33 bp, Homo sapien
ggacagaggtgaggaaaaagatgccacagaatg

SEQ ID NO: 48086 - DNA, 33 bp, Homo sapien
ggacagaggtgaggaagaagatgccacagaatg

SEQ ID NO: 48087 - DNA, 33 bp, Homo sapien
tcagctctctactagacgtctccactggcacct

SEQ ID NO: 48088 - DNA, 33 bp, Homo sapien
tcagctctctactagatgtctccactggcacct

SEQ ID NO: 48089 - DNA, 33 bp, Homo sapien
ctgaatgtgatttaaacttcattgtcagaggtg

SEQ ID NO: 48090 - DNA, 33 bp, Homo sapien
ctgaatgtgatttaaatttcattgtcagaggtg

SEQ ID NO: 48091 - DNA, 33 bp, Homo sapien
ggaggttggaagtgagacagaagtcaccctttt

SEQ ID NO: 48092 - DNA, 33 bp, Homo sapien
ggaggttggaagtgaggcagaagtcaccctttt

SEQ ID NO: 48093 - DNA, 33 bp, Homo sapien
ctgctgaatcaccaaactgcattggtaaacaga

SEQ ID NO: 48094 - DNA, 33 bp, Homo sapien
ctgctgaatcaccaaagtgcattggtaaacaga

SEQ ID NO: 48095 - DNA, 33 bp, Homo sapien
aaacatgaagaaattacagaaaggcaagtttta

SEQ ID NO: 48096 - DNA, 33 bp, Homo sapien
aaacatgaagaaattagagaaaggcaagtttta

SEQ ID NO: 48097 - DNA, 33 bp, Homo sapien
tagcaagtgatttcaaccgggaaacatgaagaa

SEQ ID NO: 48098 - DNA, 33 bp, Homo sapien
tagcaagtgatttcaagcgggaaacatgaagaa

SEQ ID NO: 48099 - DNA, 33 bp, Homo sapien
aatactttgtcattgcgaagaataatcaggtaa

SEQ ID NO: 48100 - DNA, 33 bp, Homo sapien
aatactttgtcattgctaagaataatcaggtaa

SEQ ID NO: 48101 - DNA, 33 bp, Homo sapien
tttaaaaattaatgacagatttcaaaatctcca

SEQ ID NO: 48102 - DNA, 33 bp, Homo sapien
tttaaaaattaatgacggatttcaaaatctcca

SEQ ID NO: 48103 - DNA, 33 bp, Homo sapien
cacagactagaaccacaatacctgggtttgact

SEQ ID NO: 48104 - DNA, 33 bp, Homo sapien
cacagactagaaccacgatacctgggtttgact

SEQ ID NO: 48105 - DNA, 33 bp, Homo sapien
aaagcacttgcctgctcagaatttgaggagcag

SEQ ID NO: 48106 - DNA, 33 bp, Homo sapien
aaagcacttgcctgcttagaatttgaggagcag

SEQ ID NO: 48107 - DNA, 33 bp, Homo sapien
aagacagaactttaagccattgctgcttacagg

SEQ ID NO: 48108 - DNA, 33 bp, Homo sapien
aagacagaactttaagtcattgctgcttacagg

SEQ ID NO: 48109 - DNA, 33 bp, Homo sapien
tacccacctcaatgaactgctttgatgattaaa

SEQ ID NO: 48110 - DNA, 33 bp, Homo sapien
tacccacctcaatgaattgctttgatgattaaa

SEQ ID NO: 48111 - DNA, 33 bp, Homo sapien
gttcatacactcataaaaaactccaaaggtgat

SEQ ID NO: 48112 - DNA, 33 bp, Homo sapien
gttcatacactcataagaaactccaaaggtgat

SEQ ID NO: 48113 - DNA, 33 bp, Homo sapien
tccaaagtgtagaaaacgcagcattcctgctgg

SEQ ID NO: 48114 - DNA, 33 bp, Homo sapien
tccaaagtgtagaaaatgcagcattcctgctgg

SEQ ID NO: 48115 - DNA, 33 bp, Homo sapien
ccttctacaaagggaaaattgtacacctgacaa

SEQ ID NO: 48116 - DNA, 33 bp, Homo sapien
ccttctacaaagggaatattgtacacctgacaa

SEQ ID NO: 48117 - DNA, 33 bp, Homo sapien
tcatctgctcctgaacagatagtgctcctcagt

SEQ ID NO: 48118 - DNA, 33 bp, Homo sapien
tcatctgctcctgaacggatagtgctcctcagt

SEQ ID NO: 48119 - DNA, 33 bp, Homo sapien
ttcttgtaggtggaggccactgttccccgagcc

SEQ ID NO: 48120 - DNA, 33 bp, Homo sapien
ttcttgtaggtggaggtcactgttccccgagcc

SEQ ID NO: 48121 - DNA, 33 bp, Homo sapien
ttttagatttccaaaaacttcccttctccacct

SEQ ID NO: 48122 - DNA, 33 bp, Homo sapien
ttttagatttccaaaaccttcccttctccacct

SEQ ID NO: 48123 - DNA, 33 bp, Homo sapien
catgtgttgggctaaggaattcattttcttctc

SEQ ID NO: 48124 - DNA, 33 bp, Homo sapien
catgtgttgggctaagtaattcattttcttctc

SEQ ID NO: 48125 - DNA, 33 bp, Homo sapien
atatctttggaatttggatgcaatatatcctca

SEQ ID NO: 48126 - DNA, 33 bp, Homo sapien
atatctttggaatttgtatgcaatatatcctca

SEQ ID NO: 48127 - DNA, 33 bp, Homo sapien
ccctgagcctcactcaaaattaatagtgttatg

SEQ ID NO: 48128 - DNA, 33 bp, Homo sapien
ccctgagcctcactcagaattaatagtgttatg

SEQ ID NO: 48129 - DNA, 33 bp, Homo sapien
cttatgccttgttaaaaccagtcatatatacat

SEQ ID NO: 48130 - DNA, 33 bp, Homo sapien
cttatgccttgttaaacccagtcatatatacat

SEQ ID NO: 48131 - DNA, 33 bp, Homo sapien
gcagggaacatggaccaacttatgcaaccttaa

SEQ ID NO: 48132 - DNA, 33 bp, Homo sapien
gcagggaacatggacccacttatgcaaccttaa

SEQ ID NO: 48133 - DNA, 33 bp, Homo sapien
gagaagatttataacacggaatttggtccatca

SEQ ID NO: 48134 - DNA, 33 bp, Homo sapien
gagaagatttataacatggaatttggtccatca

SEQ ID NO: 48135 - DNA, 33 bp, Homo sapien
gctgccaaaaaggagaaaccagagattagcata

SEQ ID NO: 48136 - DNA, 33 bp, Homo sapien
gctgccaaaaaggagacaccagagattagcata

SEQ ID NO: 48137 - DNA, 33 bp, Homo sapien
ccaagataaagaccaaatcttgattgtagacag

SEQ ID NO: 48138 - DNA, 33 bp, Homo sapien
ccaagataaagaccaactcttgattgtagacag

SEQ ID NO: 48139 - DNA, 33 bp, Homo sapien
tggtatacgctcacaaaaaaataaatcattctg

SEQ ID NO: 48140 - DNA, 33 bp, Homo sapien
tggtatacgctcacaataaaataaatcattctg

SEQ ID NO: 48141 - DNA, 33 bp, Homo sapien
atttatggagattatgcacttggtgcccacatt

SEQ ID NO: 48142 - DNA, 33 bp, Homo sapien
atttatggagattatggacttggtgcccacatt

SEQ ID NO: 48143 - DNA, 33 bp, Homo sapien
aacaacttatgtgaaaatcaaaaaggcatatgc

SEQ ID NO: 48144 - DNA, 33 bp, Homo sapien
aacaacttatgtgaaagtcaaaaaggcatatgc

SEQ ID NO: 48145 - DNA, 33 bp, Homo sapien
catgctcaaaggtgacaatgttgttgatgactc

SEQ ID NO: 48146 - DNA, 33 bp, Homo sapien
catgctcaaaggtgacgatgttgttgatgactc

SEQ ID NO: 48147 - DNA, 33 bp, Homo sapien
aagagaaaacgtttgcaatgatcagggccacta

SEQ ID NO: 48148 - DNA, 33 bp, Homo sapien
aagagaaaacgtttgcgatgatcagggccacta

SEQ ID NO: 48149 - DNA, 33 bp, Homo sapien
catatattggaatagacaaaataacgctggtct

SEQ ID NO: 48150 - DNA, 33 bp, Homo sapien
catatattggaatagataaaataacgctggtct

SEQ ID NO: 48151 - DNA, 33 bp, Homo sapien
gatcggataatgggacaaaatgcttatgaatgg

SEQ ID NO: 48152 - DNA, 33 bp, Homo sapien
gatcggataatgggacgaaatgcttatgaatgg

SEQ ID NO: 48153 - DNA, 33 bp, Homo sapien
tttagaaacagctgcacgtggaaactgataaca

SEQ ID NO: 48154 - DNA, 33 bp, Homo sapien
tttagaaacagctgcatgtggaaactgataaca

SEQ ID NO: 48155 - DNA, 33 bp, Homo sapien
tcgttttagaccagcactgacgtttttgtcatc

SEQ ID NO: 48156 - DNA, 33 bp, Homo sapien
tcgttttagaccagcattgacgtttttgtcatc

SEQ ID NO: 48157 - DNA, 33 bp, Homo sapien
gtccttgcagatttaactggtatttgaagaaat

SEQ ID NO: 48158 - DNA, 33 bp, Homo sapien
gtccttgcagatttaattggtatttgaagaaat

SEQ ID NO: 48159 - DNA, 33 bp, Homo sapien
gtgcaagactttaccacgcataaagatcctata

SEQ ID NO: 48160 - DNA, 33 bp, Homo sapien
gtgcaagactttaccatgcataaagatcctata

SEQ ID NO: 48161 - DNA, 33 bp, Homo sapien
caacagatttcctatcaagggcaagtgatgtat

SEQ ID NO: 48162 - DNA, 33 bp, Homo sapien
caacagatttcctatcgagggcaagtgatgtat

SEQ ID NO: 48163 - DNA, 33 bp, Homo sapien
tgcatctgacaagaacgactttgcagtttctca

SEQ ID NO: 48164 - DNA, 33 bp, Homo sapien
tgcatctgacaagaactactttgcagtttctca

SEQ ID NO: 48165 - DNA, 33 bp, Homo sapien
tgttcatatgcactcaacgtttagctctcacat

SEQ ID NO: 48166 - DNA, 33 bp, Homo sapien
tgttcatatgcactcagcgtttagctctcacat

SEQ ID NO: 48167 - DNA, 33 bp, Homo sapien
ctctgtatttgacagacggcagtaatttacaag

SEQ ID NO: 48168 - DNA, 33 bp, Homo sapien
ctctgtatttgacagatggcagtaatttacaag

SEQ ID NO: 48169 - DNA, 33 bp, Homo sapien
cattcaagtttagctacgcttccaggatatgcc

SEQ ID NO: 48170 - DNA, 33 bp, Homo sapien
cattcaagtttagctatgcttccaggatatgcc

SEQ ID NO: 48171 - DNA, 33 bp, Homo sapien
ctactaccactactgccataacaatgatgatga

SEQ ID NO: 48172 - DNA, 33 bp, Homo sapien
ctactaccactactgctataacaatgatgatga

SEQ ID NO: 48173 - DNA, 33 bp, Homo sapien
caggtgttttagtctaaccaaacctgccagaac

SEQ ID NO: 48174 - DNA, 33 bp, Homo sapien
caggtgttttagtctacccaaacctgccagaac

SEQ ID NO: 48175 - DNA, 33 bp, Homo sapien
cagccagatatctcagaacaaaattcaaatcct

SEQ ID NO: 48176 - DNA, 33 bp, Homo sapien
cagccagatatctcaggacaaaattcaaatcct

SEQ ID NO: 48177 - DNA, 33 bp, Homo sapien
ctcccaacacgatggaagtaaaacatgtagtta

SEQ ID NO: 48178 - DNA, 33 bp, Homo sapien
ctcccaacacgatggaggtaaaacatgtagtta

SEQ ID NO: 48179 - DNA, 33 bp, Homo sapien
aggtcaggaagaggtaagccatgggatttttgc

SEQ ID NO: 48180 - DNA, 33 bp, Homo sapien
aggtcaggaagaggtaggccatgggatttttgc

SEQ ID NO: 48181 - DNA, 33 bp, Homo sapien
taggtgagttgaggtacgtgaactcttggggta

SEQ ID NO: 48182 - DNA, 33 bp, Homo sapien
taggtgagttgaggtaggtgaactcttggggta

SEQ ID NO: 48183 - DNA, 33 bp, Homo sapien
acaagcatgatatagacggtgtgaggtacccaa

SEQ ID NO: 48184 - DNA, 33 bp, Homo sapien
acaagcatgatatagatggtgtgaggtacccaa

SEQ ID NO: 48185 - DNA, 33 bp, Homo sapien
tgagaggctctcctccaatcctgtactggtttt

SEQ ID NO: 48186 - DNA, 33 bp, Homo sapien
tgagaggctctcctccgatcctgtactggtttt

SEQ ID NO: 48187 - DNA, 33 bp, Homo sapien
ccaggtgtagtgaccgaaaagaccctggaatgg

SEQ ID NO: 48188 - DNA, 33 bp, Homo sapien
ccaggtgtagtgaccggaaagaccctggaatgg

SEQ ID NO: 48189 - DNA, 33 bp, Homo sapien
tctgtgccctggaacacagtactaccatgcctg

SEQ ID NO: 48190 - DNA, 33 bp, Homo sapien
tctgtgccctggaacatagtactaccatgcctg

SEQ ID NO: 48191 - DNA, 33 bp, Homo sapien
ttcttttcctcatagaacatcatacctgagagg

SEQ ID NO: 48192 - DNA, 33 bp, Homo sapien
ttcttttcctcatagaccatcatacctgagagg

SEQ ID NO: 48193 - DNA, 33 bp, Homo sapien
aaatggtaaagcaggaacacaacaaacatgaaa

SEQ ID NO: 48194 - DNA, 33 bp, Homo sapien
aaatggtaaagcaggatcacaacaaacatgaaa

SEQ ID NO: 48195 - DNA, 33 bp, Homo sapien
aaatagtagctgaaaacgactcaagtcttggga

SEQ ID NO: 48196 - DNA, 33 bp, Homo sapien
aaatagtagctgaaaatgactcaagtcttggga

SEQ ID NO: 48197 - DNA, 33 bp, Homo sapien
aagcttcttgtaaccacgattctgcaccgtcct

SEQ ID NO: 48198 - DNA, 33 bp, Homo sapien
aagcttcttgtaaccatgattctgcaccgtcct

SEQ ID NO: 48199 - DNA, 33 bp, Homo sapien
gtgttaagcactttagcatgccttgtactgaac

SEQ ID NO: 48200 - DNA, 33 bp, Homo sapien
gtgttaagcactttagtatgccttgtactgaac

SEQ ID NO: 48201 - DNA, 33 bp, Homo sapien
gcctcttggctcaacaagaaagagtgctggagg

SEQ ID NO: 48202 - DNA, 33 bp, Homo sapien
gcctcttggctcaacaggaaagagtgctggagg

SEQ ID NO: 48203 - DNA, 33 bp, Homo sapien
tgcaagtatgttaagaggagggacaaagacagg

SEQ ID NO: 48204 - DNA, 33 bp, Homo sapien
tgcaagtatgttaagatgagggacaaagacagg

SEQ ID NO: 48205 - DNA, 33 bp, Homo sapien
acatatagaaacaatcccattagtcagcagtgg

SEQ ID NO: 48206 - DNA, 33 bp, Homo sapien
acatatagaaacaatctcattagtcagcagtgg

SEQ ID NO: 48207 - DNA, 33 bp, Homo sapien
gagcttctttcttaacaagtgccaccagatgtc

SEQ ID NO: 48208 - DNA, 33 bp, Homo sapien
gagcttctttcttaacgagtgccaccagatgtc

SEQ ID NO: 48209 - DNA, 33 bp, Homo sapien
tccaagtttatccttacagggaacaaaggcatc

SEQ ID NO: 48210 - DNA, 33 bp, Homo sapien
tccaagtttatccttatagggaacaaaggcatc

SEQ ID NO: 48211 - DNA, 33 bp, Homo sapien
gatgttacaattgaggaaaactgggtaaaaagg

SEQ ID NO: 48212 - DNA, 33 bp, Homo sapien
gatgttacaattgagggaaactgggtaaaaagg

SEQ ID NO: 48213 - DNA, 33 bp, Homo sapien
catgtaacaacatggacgaactaccaattatgt

SEQ ID NO: 48214 - DNA, 33 bp, Homo sapien
catgtaacaacatggatgaactaccaattatgt

SEQ ID NO: 48215 - DNA, 33 bp, Homo sapien
gctggaaagtccaaaactatggtactggctggc

SEQ ID NO: 48216 - DNA, 33 bp, Homo sapien
gctggaaagtccaaaagtatggtactggctggc

SEQ ID NO: 48217 - DNA, 33 bp, Homo sapien
aatctaagtctagggaagtaagagttcagccag

SEQ ID NO: 48218 - DNA, 33 bp, Homo sapien
aatctaagtctagggaggtaagagttcagccag

SEQ ID NO: 48219 - DNA, 33 bp, Homo sapien
tccattcctattctagacctaacattgtgtttg

SEQ ID NO: 48220 - DNA, 33 bp, Homo sapien
tccattcctattctaggcctaacattgtgtttg

SEQ ID NO: 48221 - DNA, 33 bp, Homo sapien
aggataaatggtatcaatgaaatatgagaggac

SEQ ID NO: 48222 - DNA, 33 bp, Homo sapien
aggataaatggtatcagtgaaatatgagaggac

SEQ ID NO: 48223 - DNA, 33 bp, Homo sapien
agatacatattgaacaatagatcctagcaacag

SEQ ID NO: 48224 - DNA, 33 bp, Homo sapien
agatacatattgaacagtagatcctagcaacag

SEQ ID NO: 48225 - DNA, 33 bp, Homo sapien
gtcaaaacatagtgccaagagaaaaatgcccaa

SEQ ID NO: 48226 - DNA, 33 bp, Homo sapien
gtcaaaacatagtgcctagagaaaaatgcccaa

SEQ ID NO: 48227 - DNA, 33 bp, Homo sapien
ggtctaatcagtatgaagccattgatctaatgg

SEQ ID NO: 48228 - DNA, 33 bp, Homo sapien
ggtctaatcagtatgatgccattgatctaatgg

SEQ ID NO: 48229 - DNA, 33 bp, Homo sapien
tctaagaaccctggaccactagaaatttcacca

SEQ ID NO: 48230 - DNA, 33 bp, Homo sapien
tctaagaaccctggacgactagaaatttcacca

SEQ ID NO: 48231 - DNA, 33 bp, Homo sapien
ggggtgatggaataaagaatctgtttcaaatag

SEQ ID NO: 48232 - DNA, 33 bp, Homo sapien
ggggtgatggaataaataatctgtttcaaatag

SEQ ID NO: 48233 - DNA, 33 bp, Homo sapien
tgtaggaaatctgttacggagtgatctctgtat

SEQ ID NO: 48234 - DNA, 33 bp, Homo sapien
tgtaggaaatctgttatggagtgatctctgtat

SEQ ID NO: 48235 - DNA, 33 bp, Homo sapien
tcagttcccataaatccctcatggctatccttc

SEQ ID NO: 48236 - DNA, 33 bp, Homo sapien
tcagttcccataaatctctcatggctatccttc

SEQ ID NO: 48237 - DNA, 33 bp, Homo sapien
ttacacaactgtgagaaatagttaaacagtcta

SEQ ID NO: 48238 - DNA, 33 bp, Homo sapien
ttacacaactgtgagatatagttaaacagtcta

SEQ ID NO: 48239 - DNA, 33 bp, Homo sapien
cttaggttcaaaatacaactctgccagatatat

SEQ ID NO: 48240 - DNA, 33 bp, Homo sapien
cttaggttcaaaatactactctgccagatatat

SEQ ID NO: 48241 - DNA, 33 bp, Homo sapien
tccttctctgcagtaactgacttagtttgcatc

SEQ ID NO: 48242 - DNA, 33 bp, Homo sapien
tccttctctgcagtaattgacttagtttgcatc

SEQ ID NO: 48243 - DNA, 33 bp, Homo sapien
atcaaagctttaactacggcttccaagaaaata

SEQ ID NO: 48244 - DNA, 33 bp, Homo sapien
atcaaagctttaactatggcttccaagaaaata

SEQ ID NO: 48245 - DNA, 33 bp, Homo sapien
gtacattgtgaaataaccaccatcaaacagtaa

SEQ ID NO: 48246 - DNA, 33 bp, Homo sapien
gtacattgtgaaataatcaccatcaaacagtaa

SEQ ID NO: 48247 - DNA, 33 bp, Homo sapien
aaaatacacacataaaatagaaagaacagagga

SEQ ID NO: 48248 - DNA, 33 bp, Homo sapien
aaaatacacacataaagtagaaagaacagagga

SEQ ID NO: 48249 - DNA, 33 bp, Homo sapien
tgtgctcccataacaaccttgtcaagtaggtat

SEQ ID NO: 48250 - DNA, 33 bp, Homo sapien
tgtgctcccataacaatcttgtcaagtaggtat

SEQ ID NO: 48251 - DNA, 33 bp, Homo sapien
ttcacattccaattccccggctgcgaactcatg

SEQ ID NO: 48252 - DNA, 33 bp, Homo sapien
ttcacattccaattcctcggctgcgaactcatg

SEQ ID NO: 48253 - DNA, 33 bp, Homo sapien
gatgacaatcagcagacaaagaaaagacttgtt

SEQ ID NO: 48254 - DNA, 33 bp, Homo sapien
gatgacaatcagcagagaaagaaaagacttgtt

SEQ ID NO: 48255 - DNA, 33 bp, Homo sapien
gctaggtacagggaaacagtacgaagcagaatg

SEQ ID NO: 48256 - DNA, 33 bp, Homo sapien
gctaggtacagggaaagagtacgaagcagaatg

SEQ ID NO: 48257 - DNA, 33 bp, Homo sapien
atgtctcacctcaaagccaagatagcaagcatt

SEQ ID NO: 48258 - DNA, 33 bp, Homo sapien
atgtctcacctcaaagtcaagatagcaagcatt

SEQ ID NO: 48259 - DNA, 33 bp, Homo sapien
caaactcaactgtaaacttgaacttgaggcagg

SEQ ID NO: 48260 - DNA, 33 bp, Homo sapien
caaactcaactgtaaatttgaacttgaggcagg

SEQ ID NO: 48261 - DNA, 33 bp, Homo sapien
gcatctgcacagaagaagatagaaagagacact

SEQ ID NO: 48262 - DNA, 33 bp, Homo sapien
gcatctgcacagaagaggatagaaagagacact

SEQ ID NO: 48263 - DNA, 33 bp, Homo sapien
ctctgtagttttagacagtcaatagtatgtttt

SEQ ID NO: 48264 - DNA, 33 bp, Homo sapien
ctctgtagttttagacggtcaatagtatgtttt

SEQ ID NO: 48265 - DNA, 33 bp, Homo sapien
ataccagtctcaaatacagcaaagagacagact

SEQ ID NO: 48266 - DNA, 33 bp, Homo sapien
ataccagtctcaaatatagcaaagagacagact

SEQ ID NO: 48267 - DNA, 33 bp, Homo sapien
ggagtgagcataagagccataattacaggaatc

SEQ ID NO: 48268 - DNA, 33 bp, Homo sapien
ggagtgagcataagaggcataattacaggaatc

SEQ ID NO: 48269 - DNA, 33 bp, Homo sapien
gccggaatgccgtctcgctccacaactaacctt

SEQ ID NO: 48270 - DNA, 33 bp, Homo sapien
gccggaatgccgtctctctccacaactaacctt

SEQ ID NO: 48271 - DNA, 33 bp, Homo sapien
ctttgctgttgattcacgataggttattgtttt

SEQ ID NO: 48272 - DNA, 33 bp, Homo sapien
ctttgctgttgattcatgataggttattgtttt

SEQ ID NO: 48273 - DNA, 33 bp, Homo sapien
ggtccaaagtggacgagaatcccattgttaaga

SEQ ID NO: 48274 - DNA, 33 bp, Homo sapien
ggtccaaagtggacgataatcccattgttaaga

SEQ ID NO: 48275 - DNA, 33 bp, Homo sapien
aaaggagagaaatcaacggggagacaattcata

SEQ ID NO: 48276 - DNA, 33 bp, Homo sapien
aaaggagagaaatcaagggggagacaattcata

SEQ ID NO: 48277 - DNA, 33 bp, Homo sapien
ccttaacacctcatccagaacatagggtgagta

SEQ ID NO: 48278 - DNA, 33 bp, Homo sapien
ccttaacacctcatccggaacatagggtgagta

SEQ ID NO: 48279 - DNA, 33 bp, Homo sapien
gtaggggtcactgtaacgaggctttgctctcac

SEQ ID NO: 48280 - DNA, 33 bp, Homo sapien
gtaggggtcactgtaatgaggctttgctctcac

SEQ ID NO: 48281 - DNA, 33 bp, Homo sapien
atgaagcagagtggcacgaaaaaatctggtgtc

SEQ ID NO: 48282 - DNA, 33 bp, Homo sapien
atgaagcagagtggcatgaaaaaatctggtgtc

SEQ ID NO: 48283 - DNA, 33 bp, Homo sapien
cagtctcatgctttccactggagaaccccttgt

SEQ ID NO: 48284 - DNA, 33 bp, Homo sapien
cagtctcatgctttccgctggagaaccccttgt

SEQ ID NO: 48285 - DNA, 33 bp, Homo sapien
agcaataatgaaggaaagcaacaatttgtgcaa

SEQ ID NO: 48286 - DNA, 33 bp, Homo sapien
agcaataatgaaggaacgcaacaatttgtgcaa

SEQ ID NO: 48287 - DNA, 33 bp, Homo sapien
cccaggaatggtcttacataagggtctcaataa

SEQ ID NO: 48288 - DNA, 33 bp, Homo sapien
cccaggaatggtcttatataagggtctcaataa

SEQ ID NO: 48289 - DNA, 33 bp, Homo sapien
tccagccctcctcctccgaatagaccagccttt

SEQ ID NO: 48290 - DNA, 33 bp, Homo sapien
tccagccctcctcctctgaatagaccagccttt

SEQ ID NO: 48291 - DNA, 33 bp, Homo sapien
cattttcagttttcagcagctttccatccactc

SEQ ID NO: 48292 - DNA, 33 bp, Homo sapien
cattttcagttttcaggagctttccatccactc

SEQ ID NO: 48293 - DNA, 33 bp, Homo sapien
ccaccttctgataaccaagagcctatttggcct

SEQ ID NO: 48294 - DNA, 33 bp, Homo sapien
ccaccttctgataaccgagagcctatttggcct

SEQ ID NO: 48295 - DNA, 33 bp, Homo sapien
gtgcacacgcctctgagagtctgggatttctag

SEQ ID NO: 48296 - DNA, 33 bp, Homo sapien
gtgcacacgcctctgatagtctgggatttctag

SEQ ID NO: 48297 - DNA, 33 bp, Homo sapien
aagatgtaaagtgctacctaaacgtgatgcatt

SEQ ID NO: 48298 - DNA, 33 bp, Homo sapien
aagatgtaaagtgctatctaaacgtgatgcatt

SEQ ID NO: 48299 - DNA, 33 bp, Homo sapien
agctcaaaggtctttacagcaagaaatagttgg

SEQ ID NO: 48300 - DNA, 33 bp, Homo sapien
agctcaaaggtctttatagcaagaaatagttgg

SEQ ID NO: 48301 - DNA, 33 bp, Homo sapien
tgggaagggtgctgtgaagggtgtggaactgct

SEQ ID NO: 48302 - DNA, 33 bp, Homo sapien
tgggaagggtgctgtgtagggtgtggaactgct

SEQ ID NO: 48303 - DNA, 33 bp, Homo sapien
tttctctctgcaggaaagtgcctcttcagatct

SEQ ID NO: 48304 - DNA, 33 bp, Homo sapien
tttctctctgcaggaacgtgcctcttcagatct

SEQ ID NO: 48305 - DNA, 33 bp, Homo sapien
tcatcacattctatcaagggagacaaattagtt

SEQ ID NO: 48306 - DNA, 33 bp, Homo sapien
tcatcacattctatcaggggagacaaattagtt

SEQ ID NO: 48307 - DNA, 33 bp, Homo sapien
aactctgatgctttagaattctatttacacacc

SEQ ID NO: 48308 - DNA, 33 bp, Homo sapien
aactctgatgctttagcattctatttacacacc

SEQ ID NO: 48309 - DNA, 33 bp, Homo sapien
ctgcctggcacactacaggtgttccaaatatgt

SEQ ID NO: 48310 - DNA, 33 bp, Homo sapien
ctgcctggcacactacgggtgttccaaatatgt

SEQ ID NO: 48311 - DNA, 33 bp, Homo sapien
tcctctctcaaatgatcaggggtaatgtccatg

SEQ ID NO: 48312 - DNA, 33 bp, Homo sapien
tcctctctcaaatgattaggggtaatgtccatg

SEQ ID NO: 48313 - DNA, 33 bp, Homo sapien
tgttatcactatgtacggggtttcctctctcaa

SEQ ID NO: 48314 - DNA, 33 bp, Homo sapien
tgttatcactatgtactgggtttcctctctcaa

SEQ ID NO: 48315 - DNA, 33 bp, Homo sapien
ggccgagtgacgcgaccggttatatttgcccaa

SEQ ID NO: 48316 - DNA, 33 bp, Homo sapien
ggccgagtgacgcgactggttatatttgcccaa

SEQ ID NO: 48317 - DNA, 33 bp, Homo sapien
tctccccaaaagtcacagcctcctccttcttct

SEQ ID NO: 48318 - DNA, 33 bp, Homo sapien
tctccccaaaagtcacggcctcctccttcttct

SEQ ID NO: 48319 - DNA, 33 bp, Homo sapien
aggacgtggcatcttgaaacaaaggggttgagg

SEQ ID NO: 48320 - DNA, 33 bp, Homo sapien
aggacgtggcatcttggaacaaaggggttgagg

SEQ ID NO: 48321 - DNA, 33 bp, Homo sapien
ttgaggttgcagtgtaacggctccagttaacac

SEQ ID NO: 48322 - DNA, 33 bp, Homo sapien
ttgaggttgcagtgtatcggctccagttaacac

SEQ ID NO: 48323 - DNA, 33 bp, Homo sapien
gctctggggagtgataaggaagagttcggggtt

SEQ ID NO: 48324 - DNA, 33 bp, Homo sapien
gctctggggagtgatacggaagagttcggggtt

SEQ ID NO: 48325 - DNA, 33 bp, Homo sapien
cctaaagattgagttacgcttagttagaatcac

SEQ ID NO: 48326 - DNA, 33 bp, Homo sapien
cctaaagattgagttatgcttagttagaatcac

SEQ ID NO: 48327 - DNA, 33 bp, Homo sapien
cctcacccctatgtgccatgtgtgccccacaag

SEQ ID NO: 48328 - DNA, 33 bp, Homo sapien
cctcacccctatgtgctatgtgtgccccacaag

SEQ ID NO: 48329 - DNA, 33 bp, Homo sapien
ctctaattttaacttcacaggaagtctgtgcat

SEQ ID NO: 48330 - DNA, 33 bp, Homo sapien
ctctaattttaacttcgcaggaagtctgtgcat

SEQ ID NO: 48331 - DNA, 33 bp, Homo sapien
tctattattttcacaaaaaccagaaaccatggg

SEQ ID NO: 48332 - DNA, 33 bp, Homo sapien
tctattattttcacaacaaccagaaaccatggg

SEQ ID NO: 48333 - DNA, 33 bp, Homo sapien
ggtacaacagctttggaatacattctggatctt

SEQ ID NO: 48334 - DNA, 33 bp, Homo sapien
ggtacaacagctttgggatacattctggatctt

SEQ ID NO: 48335 - DNA, 33 bp, Homo sapien
ttgcatgaagcaaaaaacctagtaagtgagaaa

SEQ ID NO: 48336 - DNA, 33 bp, Homo sapien
ttgcatgaagcaaaaagcctagtaagtgagaaa

SEQ ID NO: 48337 - DNA, 33 bp, Homo sapien
gcagcctccaaatatacctgtacgtcggcctct

SEQ ID NO: 48338 - DNA, 33 bp, Homo sapien
gcagcctccaaatatatctgtacgtcggcctct

SEQ ID NO: 48339 - DNA, 33 bp, Homo sapien
gcttgataaagtagtacagcatggtgattaaaa

SEQ ID NO: 48340 - DNA, 33 bp, Homo sapien
gcttgataaagtagtatagcatggtgattaaaa

SEQ ID NO: 48341 - DNA, 33 bp, Homo sapien
tcagatgtctttcttccaaccagcacaggtcct

SEQ ID NO: 48342 - DNA, 33 bp, Homo sapien
tcagatgtctttcttctaaccagcacaggtcct

SEQ ID NO: 48343 - DNA, 33 bp, Homo sapien
agagaaagccaagaaccgctctgagctgatgtt

SEQ ID NO: 48344 - DNA, 33 bp, Homo sapien
agagaaagccaagaactgctctgagctgatgtt

SEQ ID NO: 48345 - DNA, 33 bp, Homo sapien
ggctgctgttagtccaagggaagcccttagcca

SEQ ID NO: 48346 - DNA, 33 bp, Homo sapien
ggctgctgttagtccaggggaagcccttagcca

SEQ ID NO: 48347 - DNA, 33 bp, Homo sapien
ggccaggccccccggacagagagacagcaccgg

SEQ ID NO: 48348 - DNA, 33 bp, Homo sapien
ggccaggccccccggatagagagacagcaccgg

SEQ ID NO: 48349 - DNA, 33 bp, Homo sapien
aactgaagggtgagtgaatgagaaacaggtgag

SEQ ID NO: 48350 - DNA, 33 bp, Homo sapien
aactgaagggtgagtggatgagaaacaggtgag

SEQ ID NO: 48351 - DNA, 33 bp, Homo sapien
ggaatctgacctagacagagaaagtttacctga

SEQ ID NO: 48352 - DNA, 33 bp, Homo sapien
ggaatctgacctagacggagaaagtttacctga

SEQ ID NO: 48353 - DNA, 33 bp, Homo sapien
ctcctaacactcttcaaatctttctttcctatc

SEQ ID NO: 48354 - DNA, 33 bp, Homo sapien
ctcctaacactcttcagatctttctttcctatc

SEQ ID NO: 48355 - DNA, 33 bp, Homo sapien
aagtgaagaggaggaaagagtgtacctacaatt

SEQ ID NO: 48356 - DNA, 33 bp, Homo sapien
aagtgaagaggaggaaggagtgtacctacaatt

SEQ ID NO: 48357 - DNA, 33 bp, Homo sapien
ctagttcaggatttgcaaggcaaaaagaaaatc

SEQ ID NO: 48358 - DNA, 33 bp, Homo sapien
ctagttcaggatttgcgaggcaaaaagaaaatc

SEQ ID NO: 48359 - DNA, 33 bp, Homo sapien
ggtcatctattcccacgccttcacctaatagat

SEQ ID NO: 48360 - DNA, 33 bp, Homo sapien
ggtcatctattcccactccttcacctaatagat

SEQ ID NO: 48361 - DNA, 33 bp, Homo sapien
tttctgatcaccctaaatcaatgttctcccagt

SEQ ID NO: 48362 - DNA, 33 bp, Homo sapien
tttctgatcaccctaagtcaatgttctcccagt

SEQ ID NO: 48363 - DNA, 33 bp, Homo sapien
gggtccccactgagtaccaatggctccatactc

SEQ ID NO: 48364 - DNA, 33 bp, Homo sapien
gggtccccactgagtatcaatggctccatactc

SEQ ID NO: 48365 - DNA, 33 bp, Homo sapien
tttatagatttcttcaacattgaggattttggt

SEQ ID NO: 48366 - DNA, 33 bp, Homo sapien
tttatagatttcttcaccattgaggattttggt

SEQ ID NO: 48367 - DNA, 33 bp, Homo sapien
attgttgggaaaagaaactgtacagcagaaggg

SEQ ID NO: 48368 - DNA, 33 bp, Homo sapien
attgttgggaaaagaagctgtacagcagaaggg

SEQ ID NO: 48369 - DNA, 33 bp, Homo sapien
ggacccctttcctaacaggcaactttgtacatt

SEQ ID NO: 48370 - DNA, 33 bp, Homo sapien
ggacccctttcctaacgggcaactttgtacatt

SEQ ID NO: 48371 - DNA, 33 bp, Homo sapien
ttttttgggccaattacgcaaaaggtaaaggaa

SEQ ID NO: 48372 - DNA, 33 bp, Homo sapien
ttttttgggccaattatgcaaaaggtaaaggaa

SEQ ID NO: 48373 - DNA, 33 bp, Homo sapien
acaattaaccacctgtaaatgacaagacctgaa

SEQ ID NO: 48374 - DNA, 33 bp, Homo sapien
acaattaaccacctgtgaatgacaagacctgaa

SEQ ID NO: 48375 - DNA, 33 bp, Homo sapien
gaggagaaggtcaagaactttcatgtagaggga

SEQ ID NO: 48376 - DNA, 33 bp, Homo sapien
gaggagaaggtcaagagctttcatgtagaggga

SEQ ID NO: 48377 - DNA, 33 bp, Homo sapien
gcctctgtcttaaacaataagtgtaagatgaca

SEQ ID NO: 48378 - DNA, 33 bp, Homo sapien
gcctctgtcttaaacagtaagtgtaagatgaca

SEQ ID NO: 48379 - DNA, 33 bp, Homo sapien
cccggccacttgctacacgcctccaatcttcat

SEQ ID NO: 48380 - DNA, 33 bp, Homo sapien
cccggccacttgctacgcgcctccaatcttcat

SEQ ID NO: 48381 - DNA, 33 bp, Homo sapien
gctacactagcaaatgccaaagtgggctgaatt

SEQ ID NO: 48382 - DNA, 33 bp, Homo sapien
gctacactagcaaatgtcaaagtgggctgaatt

SEQ ID NO: 48383 - DNA, 33 bp, Homo sapien
tggaggtttccactgaacagtacttcctctgca

SEQ ID NO: 48384 - DNA, 33 bp, Homo sapien
tggaggtttccactgagcagtacttcctctgca

SEQ ID NO: 48385 - DNA, 33 bp, Homo sapien
attggactcaggaggaaacatgtgtcttctcag

SEQ ID NO: 48386 - DNA, 33 bp, Homo sapien
attggactcaggaggatacatgtgtcttctcag

SEQ ID NO: 48387 - DNA, 33 bp, Homo sapien
aaccaactccatgccacagactcatgagcaaaa

SEQ ID NO: 48388 - DNA, 33 bp, Homo sapien
aaccaactccatgccatagactcatgagcaaaa

SEQ ID NO: 48389 - DNA, 33 bp, Homo sapien
catggaacaaggggcaatcattgaaagaaatga

SEQ ID NO: 48390 - DNA, 33 bp, Homo sapien
catggaacaaggggcagtcattgaaagaaatga

SEQ ID NO: 48391 - DNA, 33 bp, Homo sapien
tattcatatcctgtgccgagtttttaatgagat

SEQ ID NO: 48392 - DNA, 33 bp, Homo sapien
tattcatatcctgtgctgagtttttaatgagat

SEQ ID NO: 48393 - DNA, 33 bp, Homo sapien
aacagacacacggaccaggagagagaaactaga

SEQ ID NO: 48394 - DNA, 33 bp, Homo sapien
aacagacacacggaccgggagagagaaactaga

SEQ ID NO: 48395 - DNA, 33 bp, Homo sapien
ctatacaccaacaacaaggtagctgaaaaagaa

SEQ ID NO: 48396 - DNA, 33 bp, Homo sapien
ctatacaccaacaacatggtagctgaaaaagaa

SEQ ID NO: 48397 - DNA, 33 bp, Homo sapien
ctggtggccttaacagcagaacaagcaatgcag

SEQ ID NO: 48398 - DNA, 33 bp, Homo sapien
ctggtggccttaacagtagaacaagcaatgcag

SEQ ID NO: 48399 - DNA, 33 bp, Homo sapien
tcagttgctgaaagaaagtgtgttaaaaatctc

SEQ ID NO: 48400 - DNA, 33 bp, Homo sapien
tcagttgctgaaagaaggtgtgttaaaaatctc

SEQ ID NO: 48401 - DNA, 33 bp, Homo sapien
taaagaattcagctgcaaagccatacggtcctg

SEQ ID NO: 48402 - DNA, 33 bp, Homo sapien
taaagaattcagctgcgaagccatacggtcctg

SEQ ID NO: 48403 - DNA, 33 bp, Homo sapien
ggagaggatgtagagacgatagggagatggcag

SEQ ID NO: 48404 - DNA, 33 bp, Homo sapien
ggagaggatgtagagatgatagggagatggcag

SEQ ID NO: 48405 - DNA, 33 bp, Homo sapien
ctagccaacagaagaacttactttctcaaccac

SEQ ID NO: 48406 - DNA, 33 bp, Homo sapien
ctagccaacagaagaatttactttctcaaccac

SEQ ID NO: 48407 - DNA, 33 bp, Homo sapien
aaacagttgatgaacacatattttgtatgttat

SEQ ID NO: 48408 - DNA, 33 bp, Homo sapien
aaacagttgatgaacatatattttgtatgttat

SEQ ID NO: 48409 - DNA, 33 bp, Homo sapien
atcttctagacactgcaagtatgtaactgatcc

SEQ ID NO: 48410 - DNA, 33 bp, Homo sapien
atcttctagacactgcgagtatgtaactgatcc

SEQ ID NO: 48411 - DNA, 33 bp, Homo sapien
agcaaaaattaagtaacccacacaggtcatcat

SEQ ID NO: 48412 - DNA, 33 bp, Homo sapien
agcaaaaattaagtaatccacacaggtcatcat

SEQ ID NO: 48413 - DNA, 33 bp, Homo sapien
ataacagcatcctgggccccaaattatttctac

SEQ ID NO: 48414 - DNA, 33 bp, Homo sapien
ataacagcatcctgggtcccaaattatttctac

SEQ ID NO: 48415 - DNA, 33 bp, Homo sapien
gtccactaaggtttgacgacatatcctcaaata

SEQ ID NO: 48416 - DNA, 33 bp, Homo sapien
gtccactaaggtttgatgacatatcctcaaata

SEQ ID NO: 48417 - DNA, 33 bp, Homo sapien
aggccctggctctcacaggaacagctgctcagg

SEQ ID NO: 48418 - DNA, 33 bp, Homo sapien
aggccctggctctcacgggaacagctgctcagg

SEQ ID NO: 48419 - DNA, 33 bp, Homo sapien
ggaacagaaggggcaggacttgaatagaaaaat

SEQ ID NO: 48420 - DNA, 33 bp, Homo sapien
ggaacagaaggggcagtacttgaatagaaaaat

SEQ ID NO: 48421 - DNA, 33 bp, Homo sapien
ccttacttaacatatgcattggatgagttgcat

SEQ ID NO: 48422 - DNA, 33 bp, Homo sapien
ccttacttaacatatgtattggatgagttgcat

SEQ ID NO: 48423 - DNA, 33 bp, Homo sapien
tgtgtttcactgagcccatcatatgcaggaaag

SEQ ID NO: 48424 - DNA, 33 bp, Homo sapien
tgtgtttcactgagcctatcatatgcaggaaag

SEQ ID NO: 48425 - DNA, 33 bp, Homo sapien
accaaaaacatctaccaatgtgtctaggaggaa

SEQ ID NO: 48426 - DNA, 33 bp, Homo sapien
accaaaaacatctacccatgtgtctaggaggaa

SEQ ID NO: 48427 - DNA, 33 bp, Homo sapien
gcacagggtaggagaactaagggcccttgagga

SEQ ID NO: 48428 - DNA, 33 bp, Homo sapien
gcacagggtaggagaagtaagggcccttgagga

SEQ ID NO: 48429 - DNA, 33 bp, Homo sapien
ataaccctctttactcagaatcgattgctgcca

SEQ ID NO: 48430 - DNA, 33 bp, Homo sapien
ataaccctctttactcggaatcgattgctgcca

SEQ ID NO: 48431 - DNA, 33 bp, Homo sapien
ttaatgttgtgaaccaatagtgtccccaggaat

SEQ ID NO: 48432 - DNA, 33 bp, Homo sapien
ttaatgttgtgaaccagtagtgtccccaggaat

SEQ ID NO: 48433 - DNA, 33 bp, Homo sapien
caaattacagtgatccaaatctgcttatcttca

SEQ ID NO: 48434 - DNA, 33 bp, Homo sapien
caaattacagtgatcccaatctgcttatcttca

SEQ ID NO: 48435 - DNA, 33 bp, Homo sapien
ttgttgattttcttgcaatatgatatatttaat

SEQ ID NO: 48436 - DNA, 33 bp, Homo sapien
ttgttgattttcttgctatatgatatatttaat

SEQ ID NO: 48437 - DNA, 33 bp, Homo sapien
gagaagatgcttgataaaattttgattattttt

SEQ ID NO: 48438 - DNA, 33 bp, Homo sapien
gagaagatgcttgatataattttgattattttt

SEQ ID NO: 48439 - DNA, 33 bp, Homo sapien
taagatgagaagaagacatagaatgttgagaat

SEQ ID NO: 48440 - DNA, 33 bp, Homo sapien
taagatgagaagaagagatagaatgttgagaat

SEQ ID NO: 48441 - DNA, 33 bp, Homo sapien
gtcatttcaggtttccaaagctattgaacaacc

SEQ ID NO: 48442 - DNA, 33 bp, Homo sapien
gtcatttcaggtttccgaagctattgaacaacc

SEQ ID NO: 48443 - DNA, 33 bp, Homo sapien
taaaacatctcgaaacagaagtatgccatcaat

SEQ ID NO: 48444 - DNA, 33 bp, Homo sapien
taaaacatctcgaaaccgaagtatgccatcaat

SEQ ID NO: 48445 - DNA, 33 bp, Homo sapien
caaaactgggtataatcagcaacttttaatgaa

SEQ ID NO: 48446 - DNA, 33 bp, Homo sapien
caaaactgggtataatgagcaacttttaatgaa

SEQ ID NO: 48447 - DNA, 33 bp, Homo sapien
aggggggacagcagcacatagtgaaccagctgt

SEQ ID NO: 48448 - DNA, 33 bp, Homo sapien
aggggggacagcagcatatagtgaaccagctgt

SEQ ID NO: 48449 - DNA, 33 bp, Homo sapien
ccaagatgagctaacaaaaaataataataaaat

SEQ ID NO: 48450 - DNA, 33 bp, Homo sapien
ccaagatgagctaacacaaaataataataaaat

SEQ ID NO: 48451 - DNA, 33 bp, Homo sapien
gaaaatgaaaggatgaatagaaagccatacatg

SEQ ID NO: 48452 - DNA, 33 bp, Homo sapien
gaaaatgaaaggatgagtagaaagccatacatg

SEQ ID NO: 48453 - DNA, 33 bp, Homo sapien
ccctctcctgggcagaataacccatgaacatcc

SEQ ID NO: 48454 - DNA, 33 bp, Homo sapien
ccctctcctgggcagagtaacccatgaacatcc

SEQ ID NO: 48455 - DNA, 33 bp, Homo sapien
agttttacttgaacaaccagtgtggaactatgc

SEQ ID NO: 48456 - DNA, 33 bp, Homo sapien
agttttacttgaacaagcagtgtggaactatgc

SEQ ID NO: 48457 - DNA, 33 bp, Homo sapien
actagtactgcttctacatcttttttcaggttg

SEQ ID NO: 48458 - DNA, 33 bp, Homo sapien
actagtactgcttctatatcttttttcaggttg

SEQ ID NO: 48459 - DNA, 33 bp, Homo sapien
ccgaggtaaagagcaaatatatagatcatgaac

SEQ ID NO: 48460 - DNA, 33 bp, Homo sapien
ccgaggtaaagagcaagtatatagatcatgaac

SEQ ID NO: 48461 - DNA, 33 bp, Homo sapien
taaatgtcaattcaaaattcaggaagttcacca

SEQ ID NO: 48462 - DNA, 33 bp, Homo sapien
taaatgtcaattcaaagttcaggaagttcacca

SEQ ID NO: 48463 - DNA, 33 bp, Homo sapien
tcatgcattataaaccaaacccctctatcattg

SEQ ID NO: 48464 - DNA, 33 bp, Homo sapien
tcatgcattataaaccgaacccctctatcattg

SEQ ID NO: 48465 - DNA, 33 bp, Homo sapien
catattaggtcaacaaatgatggccagggttat

SEQ ID NO: 48466 - DNA, 33 bp, Homo sapien
catattaggtcaacaagtgatggccagggttat

SEQ ID NO: 48467 - DNA, 33 bp, Homo sapien
taaaagaaaaatcttacgtcaattgtgaggtaa

SEQ ID NO: 48468 - DNA, 33 bp, Homo sapien
taaaagaaaaatcttatgtcaattgtgaggtaa

SEQ ID NO: 48469 - DNA, 33 bp, Homo sapien
cagaatataacattgaatattgagtgtgggtaa

SEQ ID NO: 48470 - DNA, 33 bp, Homo sapien
cagaatataacattgactattgagtgtgggtaa

SEQ ID NO: 48471 - DNA, 33 bp, Homo sapien
tctctgtaagctaaacaggcatatgtggcctag

SEQ ID NO: 48472 - DNA, 33 bp, Homo sapien
tctctgtaagctaaaccggcatatgtggcctag

SEQ ID NO: 48473 - DNA, 33 bp, Homo sapien
tcccttaggccttctaactaggccacatatgcc

SEQ ID NO: 48474 - DNA, 33 bp, Homo sapien
tcccttaggccttctagctaggccacatatgcc

SEQ ID NO: 48475 - DNA, 33 bp, Homo sapien
ctcacccttgaaacataaactagaggctcggga

SEQ ID NO: 48476 - DNA, 33 bp, Homo sapien
ctcacccttgaaacatgaactagaggctcggga

SEQ ID NO: 48477 - DNA, 33 bp, Homo sapien
cccaactacataaatacctcagctaaataaaaa

SEQ ID NO: 48478 - DNA, 33 bp, Homo sapien
cccaactacataaatatctcagctaaataaaaa

SEQ ID NO: 48479 - DNA, 33 bp, Homo sapien
ctacaaaagctcttccaaataggtttacatttt

SEQ ID NO: 48480 - DNA, 33 bp, Homo sapien
ctacaaaagctcttcccaataggtttacatttt

SEQ ID NO: 48481 - DNA, 33 bp, Homo sapien
tctgggtagatgcttaaattccaaaactgtatg

SEQ ID NO: 48482 - DNA, 33 bp, Homo sapien
tctgggtagatgcttatattccaaaactgtatg

SEQ ID NO: 48483 - DNA, 33 bp, Homo sapien
tgtggatttttaacataaccatgagtctaaaaa

SEQ ID NO: 48484 - DNA, 33 bp, Homo sapien
tgtggatttttaacatcaccatgagtctaaaaa

SEQ ID NO: 48485 - DNA, 33 bp, Homo sapien; identical to SEQ ID NO: 48483

SEQ ID NO: 48486 - DNA, 33 bp, Homo sapien; identical to SEQ ID NO: 48484

SEQ ID NO: 48487 - DNA, 33 bp, Homo sapien
tattttcctggtcttaagtctttctatcagtac

SEQ ID NO: 48488 - DNA, 33 bp, Homo sapien
tattttcctggtcttatgtctttctatcagtac

SEQ ID NO: 48489 - DNA, 33 bp, Homo sapien
cctccctttttgtagcaccaacaaagtcaatca

SEQ ID NO: 48490 - DNA, 33 bp, Homo sapien
cctccctttttgtagcgccaacaaagtcaatca

SEQ ID NO: 48491 - DNA, 33 bp, Homo sapien
aacacagatgttaacgaatttgtgatattcatt

SEQ ID NO: 48492 - DNA, 33 bp, Homo sapien
aacacagatgttaacggatttgtgatattcatt

SEQ ID NO: 48493 - DNA, 33 bp, Homo sapien
gtcctcagaatgcagaaataagaaacacagata

SEQ ID NO: 48494 - DNA, 33 bp, Homo sapien
gtcctcagaatgcagagataagaaacacagata

SEQ ID NO: 48495 - DNA, 33 bp, Homo sapien
aatgcctcagggtaaacctcttaagaatgtagc

SEQ ID NO: 48496 - DNA, 33 bp, Homo sapien
aatgcctcagggtaaatctcttaagaatgtagc

SEQ ID NO: 48497 - DNA, 33 bp, Homo sapien
tgggttatagagaaaaatgtgacaatgccttca

SEQ ID NO: 48498 - DNA, 33 bp, Homo sapien
tgggttatagagaaaagtgtgacaatgccttca

SEQ ID NO: 48499 - DNA, 33 bp, Homo sapien
aatagaggacagaatactagaatggcagaatct

SEQ ID NO: 48500 - DNA, 33 bp, Homo sapien
aatagaggacagaatattagaatggcagaatct

SEQ ID NO: 48501 - DNA, 33 bp, Homo sapien
agctgtcagcacaggcaagacggataactggtg

SEQ ID NO: 48502 - DNA, 33 bp, Homo sapien
agctgtcagcacaggcgagacggataactggtg

SEQ ID NO: 48503 - DNA, 33 bp, Homo sapien
ttcagagaagagtcaaagcttcagtcatgacct

SEQ ID NO: 48504 - DNA, 33 bp, Homo sapien
ttcagagaagagtcaacgcttcagtcatgacct

SEQ ID NO: 48505 - DNA, 33 bp, Homo sapien
acgcctgacccacttaagtatgcaaatttcttt

SEQ ID NO: 48506 - DNA, 33 bp, Homo sapien
acgcctgacccacttaggtatgcaaatttcttt

SEQ ID NO: 48507 - DNA, 33 bp, Homo sapien
ttcgttaggctgtataagcaaagtataattctt

SEQ ID NO: 48508 - DNA, 33 bp, Homo sapien
ttcgttaggctgtatatgcaaagtataattctt

SEQ ID NO: 48509 - DNA, 33 bp, Homo sapien
cagccataatggacaacgaccataataagatgg

SEQ ID NO: 48510 - DNA, 33 bp, Homo sapien
cagccataatggacaatgaccataataagatgg

SEQ ID NO: 48511 - DNA, 33 bp, Homo sapien
aatctcatgggtgaatcagaacagattaattca

SEQ ID NO: 48512 - DNA, 33 bp, Homo sapien
aatctcatgggtgaattagaacagattaattca

SEQ ID NO: 48513 - DNA, 33 bp, Homo sapien
tgaaaaggtggttgtgccaaactgattggtgaa

SEQ ID NO: 48514 - DNA, 33 bp, Homo sapien
tgaaaaggtggttgtgtcaaactgattggtgaa

SEQ ID NO: 48515 - DNA, 33 bp, Homo sapien; identical to SEQ ID NO: 48513

SEQ ID NO: 48516 - DNA, 33 bp, Homo sapien; identical to SEQ ID NO: 48514

SEQ ID NO: 48517 - DNA, 33 bp, Homo sapien
ttaagtgggatatttacaccatttaaattcaag

SEQ ID NO: 48518 - DNA, 33 bp, Homo sapien
ttaagtgggatatttagaccatttaaattcaag

SEQ ID NO: 48519 - DNA, 33 bp, Homo sapien
ggttttgtgttttctccaacttgtccctctgta

SEQ ID NO: 48520 - DNA, 33 bp, Homo sapien
ggttttgtgttttctctaacttgtccctctgta

SEQ ID NO: 48521 - DNA, 33 bp, Homo sapien
caagggtcactattctcacatcagataaaacag

SEQ ID NO: 48522 - DNA, 33 bp, Homo sapien
caagggtcactattcttacatcagataaaacag

SEQ ID NO: 48523 - DNA, 33 bp, Homo sapien
catgaagacttaactacgctaaatatatatgca

SEQ ID NO: 48524 - DNA, 33 bp, Homo sapien
catgaagacttaactatgctaaatatatatgca

SEQ ID NO: 48525 - DNA, 33 bp, Homo sapien
taaaactatcaaagcccctcctgccttagtttc

SEQ ID NO: 48526 - DNA, 33 bp, Homo sapien
taaaactatcaaagcctctcctgccttagtttc

SEQ ID NO: 48527 - DNA, 33 bp, Homo sapien
aataagagttatgtaaaaaattgccttcttctg

SEQ ID NO: 48528 - DNA, 33 bp, Homo sapien
aataagagttatgtaataaattgccttcttctg

SEQ ID NO: 48529 - DNA, 33 bp, Homo sapien
attatagtaagtaaaaatggcaaaacacagaaa

SEQ ID NO: 48530 - DNA, 33 bp, Homo sapien
attatagtaagtaaaattggcaaaacacagaaa

SEQ ID NO: 48531 - DNA, 33 bp, Homo sapien
acaatgaacaaatgaacaaagtatgatataacc

SEQ ID NO: 48532 - DNA, 33 bp, Homo sapien
acaatgaacaaatgaataaagtatgatataacc

SEQ ID NO: 48533 - DNA, 33 bp, Homo sapien
ttcaaaatgcaaatagactagaaattatggcct

SEQ ID NO: 48534 - DNA, 33 bp, Homo sapien
ttcaaaatgcaaatagtctagaaattatggcct

SEQ ID NO: 48535 - DNA, 33 bp, Homo sapien
cagacttctctgtacccaatgaactggcatagt

SEQ ID NO: 48536 - DNA, 33 bp, Homo sapien
cagacttctctgtacctaatgaactggcatagt

SEQ ID NO: 48537 - DNA, 33 bp, Homo sapien
tgcctcagatcaatcactacttttgtgatatct

SEQ ID NO: 48538 - DNA, 33 bp, Homo sapien
tgcctcagatcaatcattacttttgtgatatct

SEQ ID NO: 48539 - DNA, 33 bp, Homo sapien
tgaataccaagctgcaatgagcaaggacaagtt

SEQ ID NO: 48540 - DNA, 33 bp, Homo sapien
tgaataccaagctgcagtgagcaaggacaagtt

SEQ ID NO: 48541 - DNA, 33 bp, Homo sapien
ttgctctctcttactacatcaccaccattttca

SEQ ID NO: 48542 - DNA, 33 bp, Homo sapien
ttgctctctcttactatatcaccaccattttca

SEQ ID NO: 48543 - DNA, 33 bp, Homo sapien
ttatcaaattgaaaaacggtgaggagtaaagag

SEQ ID NO: 48544 - DNA, 33 bp, Homo sapien
ttatcaaattgaaaaatggtgaggagtaaagag

SEQ ID NO: 48545 - DNA, 33 bp, Homo sapien
ttccagcagccatctaaaaggtaataaatatgg

SEQ ID NO: 48546 - DNA, 33 bp, Homo sapien
ttccagcagccatctagaaggtaataaatatgg

SEQ ID NO: 48547 - DNA, 33 bp, Homo sapien
caggcatatcctttagaaagcatatcgtgatat

SEQ ID NO: 48548 - DNA, 33 bp, Homo sapien
caggcatatcctttagcaagcatatcgtgatat

SEQ ID NO: 48549 - DNA, 33 bp, Homo sapien
atttaaaatatttcacaatcggtatagccctgg

SEQ ID NO: 48550 - DNA, 33 bp, Homo sapien
atttaaaatatttcactatcggtatagccctgg

SEQ ID NO: 48551 - DNA, 33 bp, Homo sapien
taccatcctgggtaagaaaggctgccaagagcc

SEQ ID NO: 48552 - DNA, 33 bp, Homo sapien
taccatcctgggtaaggaaggctgccaagagcc

SEQ ID NO: 48553 - DNA, 33 bp, Homo sapien
aaatgtctgataaaaaatagatgttgtgcctgt

SEQ ID NO: 48554 - DNA, 33 bp, Homo sapien
aaatgtctgataaaaagtagatgttgtgcctgt

SEQ ID NO: 48555 - DNA, 33 bp, Homo sapien
aggacaaatccaggaaggtacatagctacccca

SEQ ID NO: 48556 - DNA, 33 bp, Homo sapien
aggacaaatccaggaatgtacatagctacccca

SEQ ID NO: 48557 - DNA, 33 bp, Homo sapien
atactgaaaacacataacactcatcaactgcca

SEQ ID NO: 48558 - DNA, 33 bp, Homo sapien
atactgaaaacacatatcactcatcaactgcca

SEQ ID NO: 48559 - DNA, 33 bp, Homo sapien
cagctccagcttaataccatttaattgtctcaa

SEQ ID NO: 48560 - DNA, 33 bp, Homo sapien
cagctccagcttaatatcatttaattgtctcaa

SEQ ID NO: 48561 - DNA, 33 bp, Homo sapien
ataaagacaatataaacgtatatgtggtgtgtg

SEQ ID NO: 48562 - DNA, 33 bp, Homo sapien
ataaagacaatataaatgtatatgtggtgtgtg

SEQ ID NO: 48563 - DNA, 33 bp, Homo sapien
catatcttacacattcaaaactataaattatac

SEQ ID NO: 48564 - DNA, 33 bp, Homo sapien
catatcttacacattcgaaactataaattatac

SEQ ID NO: 48565 - DNA, 33 bp, Homo sapien
gtctataggagataagccacagtaaaacgttga

SEQ ID NO: 48566 - DNA, 33 bp, Homo sapien
gtctataggagataaggcacagtaaaacgttga

SEQ ID NO: 48567 - DNA, 33 bp, Homo sapien
tttgttctgttttgcacgtctttatcattttgc

SEQ ID NO: 48568 - DNA, 33 bp, Homo sapien
tttgttctgttttgcatgtctttatcattttgc

SEQ ID NO: 48569 - DNA, 33 bp, Homo sapien
aatgggtagtgatggaaacacctcctttcatac

SEQ ID NO: 48570 - DNA, 33 bp, Homo sapien
aatgggtagtgatggagacacctcctttcatac

SEQ ID NO: 48571 - DNA, 33 bp, Homo sapien
gtgaattaatttctacaaagagttcttggtaaa

SEQ ID NO: 48572 - DNA, 33 bp, Homo sapien
gtgaattaatttctacgaagagttcttggtaaa

SEQ ID NO: 48573 - DNA, 33 bp, Homo sapien
atgtaacatgaaaattcaagggaatcctttcaa

SEQ ID NO: 48574 - DNA, 33 bp, Homo sapien
atgtaacatgaaaatttaagggaatcctttcaa

SEQ ID NO: 48575 - DNA, 33 bp, Homo sapien
gacttgcccaagattacggaaccaatcaggcat

SEQ ID NO: 48576 - DNA, 33 bp, Homo sapien
gacttgcccaagattatggaaccaatcaggcat

SEQ ID NO: 48577 - DNA, 33 bp, Homo sapien
ccatcacaagcgctacactcaatcagggagttc

SEQ ID NO: 48578 - DNA, 33 bp, Homo sapien
ccatcacaagcgctacgctcaatcagggagttc

SEQ ID NO: 48579 - DNA, 33 bp, Homo sapien
tcaagggtgatgactaaccaaccaacaagctcg

SEQ ID NO: 48580 - DNA, 33 bp, Homo sapien
tcaagggtgatgactatccaaccaacaagctcg

SEQ ID NO: 48581 - DNA, 33 bp, Homo sapien
tggtacagaagattaaaaggaggtttggatatt

SEQ ID NO: 48582 - DNA, 33 bp, Homo sapien
tggtacagaagattaagaggaggtttggatatt

SEQ ID NO: 48583 - DNA, 33 bp, Homo sapien
ggatcagagagaaggaacctattgtagataata

SEQ ID NO: 48584 - DNA, 33 bp, Homo sapien
ggatcagagagaaggagcctattgtagataata

SEQ ID NO: 48585 - DNA, 33 bp, Homo sapien
caatcaccgagctgaagaaacaaggaaaactcc

SEQ ID NO: 48586 - DNA, 33 bp, Homo sapien
caatcaccgagctgaataaacaaggaaaactcc

SEQ ID NO: 48587 - DNA, 33 bp, Homo sapien
tttgtcatggtggaaacggggtcatgggaaaat

SEQ ID NO: 48588 - DNA, 33 bp, Homo sapien
tttgtcatggtggaaatggggtcatgggaaaat

SEQ ID NO: 48589 - DNA, 33 bp, Homo sapien
aggaaaaatcatacaaatatagctctgaaatct

SEQ ID NO: 48590 - DNA, 33 bp, Homo sapien
aggaaaaatcatacaattatagctctgaaatct

SEQ ID NO: 48591 - DNA, 33 bp, Homo sapien
catgatgcctactctacggtcactctgagttaa

SEQ ID NO: 48592 - DNA, 33 bp, Homo sapien
catgatgcctactctatggtcactctgagttaa

SEQ ID NO: 48593 - DNA, 33 bp, Homo sapien
aaatccacttccagccaattcaatttctcatcc

SEQ ID NO: 48594 - DNA, 33 bp, Homo sapien
aaatccacttccagcccattcaatttctcatcc

SEQ ID NO: 48595 - DNA, 33 bp, Homo sapien
cactgaaggaaaagcactcatttttatttttat

SEQ ID NO: 48596 - DNA, 33 bp, Homo sapien
cactgaaggaaaagcattcatttttatttttat

SEQ ID NO: 48597 - DNA, 33 bp, Homo sapien
agatgttgctatgagacgattgatttattcttg

SEQ ID NO: 48598 - DNA, 33 bp, Homo sapien
agatgttgctatgagatgattgatttattcttg

SEQ ID NO: 48599 - DNA, 33 bp, Homo sapien
tctgactcttctcctacgtaactggagatagag

SEQ ID NO: 48600 - DNA, 33 bp, Homo sapien
tctgactcttctcctatgtaactggagatagag

SEQ ID NO: 48601 - DNA, 33 bp, Homo sapien
cccagaactctgtgggaacattataatatagtt

SEQ ID NO: 48602 - DNA, 33 bp, Homo sapien
cccagaactctgtggggacattataatatagtt

SEQ ID NO: 48603 - DNA, 33 bp, Homo sapien
ttccccacagtgcctactacagcatctgacatg

SEQ ID NO: 48604 - DNA, 33 bp, Homo sapien
ttccccacagtgcctagtacagcatctgacatg

SEQ ID NO: 48605 - DNA, 33 bp, Homo sapien
ccattttgcctcctgacgtatgcccagtttcgt

SEQ ID NO: 48606 - DNA, 33 bp, Homo sapien
ccattttgcctcctgatgtatgcccagtttcgt

SEQ ID NO: 48607 - DNA, 33 bp, Homo sapien
aaggtaatctagtttaacagagtttgtcaaatt

SEQ ID NO: 48608 - DNA, 33 bp, Homo sapien
aaggtaatctagtttatcagagtttgtcaaatt

SEQ ID NO: 48609 - DNA, 33 bp, Homo sapien
agatgaggaatcctaacgctaattctagttctt

SEQ ID NO: 48610 - DNA, 33 bp, Homo sapien
agatgaggaatcctaatgctaattctagttctt

SEQ ID NO: 48611 - DNA, 33 bp, Homo sapien
tgttttgaaatcacaaccatatgacaagcactg

SEQ ID NO: 48612 - DNA, 33 bp, Homo sapien
tgttttgaaatcacaatcatatgacaagcactg

SEQ ID NO: 48613 - DNA, 33 bp, Homo sapien
tgtaagcttgtaatccacattcaggaaataata

SEQ ID NO: 48614 - DNA, 33 bp, Homo sapien
tgtaagcttgtaatccgcattcaggaaataata

SEQ ID NO: 48615 - DNA, 33 bp, Homo sapien
ccttttatgaaatacaacttaattttctcaaag

SEQ ID NO: 48616 - DNA, 33 bp, Homo sapien
ccttttatgaaatacagcttaattttctcaaag

SEQ ID NO: 48617 - DNA, 33 bp, Homo sapien
cttcctttccttcctcaatcctccgaaataatc

SEQ ID NO: 48618 - DNA, 33 bp, Homo sapien
cttcctttccttcctcgatcctccgaaataatc

SEQ ID NO: 48619 - DNA, 33 bp, Homo sapien
gagacattcaggggaaagttttgacacataaaa

SEQ ID NO: 48620 - DNA, 33 bp, Homo sapien
gagacattcaggggaaggttttgacacataaaa

SEQ ID NO: 48621 - DNA, 33 bp, Homo sapien
aaactcaaggaactcaacagtttttatgtgtca

SEQ ID NO: 48622 - DNA, 33 bp, Homo sapien
aaactcaaggaactcaccagtttttatgtgtca

SEQ ID NO: 48623 - DNA, 33 bp, Homo sapien
gaactacagattaggaacgaactctcagtatga

SEQ ID NO: 48624 - DNA, 33 bp, Homo sapien
gaactacagattaggaccgaactctcagtatga

SEQ ID NO: 48625 - DNA, 33 bp, Homo sapien
agcttatcacggagaaaacaggtacttaacata

SEQ ID NO: 48626 - DNA, 33 bp, Homo sapien
agcttatcacggagaagacaggtacttaacata

SEQ ID NO: 48627 - DNA, 33 bp, Homo sapien
gatggtctttcaatcccatatgacattttaacc

SEQ ID NO: 48628 - DNA, 33 bp, Homo sapien
gatggtctttcaatcctatatgacattttaacc

SEQ ID NO: 48629 - DNA, 33 bp, Homo sapien
agcttctgaagctcaagctctgtagttctaacc

SEQ ID NO: 48630 - DNA, 33 bp, Homo sapien
agcttctgaagctcaatctctgtagttctaacc

SEQ ID NO: 48631 - DNA, 33 bp, Homo sapien
agcttacattcaaaagaaggataccaacaataa

SEQ ID NO: 48632 - DNA, 33 bp, Homo sapien
agcttacattcaaaaggaggataccaacaataa

SEQ ID NO: 48633 - DNA, 33 bp, Homo sapien
aatgagactgggaacacgctagtagaagcaatg

SEQ ID NO: 48634 - DNA, 33 bp, Homo sapien
aatgagactgggaacatgctagtagaagcaatg

SEQ ID NO: 48635 - DNA, 33 bp, Homo sapien
actcatcaccaaatcccgatggaccagcctcta

SEQ ID NO: 48636 - DNA, 33 bp, Homo sapien
actcatcaccaaatcctgatggaccagcctcta

SEQ ID NO: 48637 - DNA, 33 bp, Homo sapien
aatatattatcagtacaaatgtgtagtctatgt

SEQ ID NO: 48638 - DNA, 33 bp, Homo sapien
aatatattatcagtacgaatgtgtagtctatgt

SEQ ID NO: 48639 - DNA, 33 bp, Homo sapien
atgtatacctctgcaaacctttgcccccatgct

SEQ ID NO: 48640 - DNA, 33 bp, Homo sapien
atgtatacctctgcaagcctttgcccccatgct

SEQ ID NO: 48641 - DNA, 33 bp, Homo sapien
attttctaccaaagccacacatcaaggagccca

SEQ ID NO: 48642 - DNA, 33 bp, Homo sapien
attttctaccaaagccgcacatcaaggagccca

SEQ ID NO: 48643 - DNA, 33 bp, Homo sapien
agatgtaccaaagcccactaggatctactttaa

SEQ ID NO: 48644 - DNA, 33 bp, Homo sapien
agatgtaccaaagcccgctaggatctactttaa

SEQ ID NO: 48645 - DNA, 33 bp, Homo sapien
tcaggtcagatgctgaagtgacaacaacagcac

SEQ ID NO: 48646 - DNA, 33 bp, Homo sapien
tcaggtcagatgctgaggtgacaacaacagcac

SEQ ID NO: 48647 - DNA, 33 bp, Homo sapien
aggctctggggctaggaatataaatatgcaaaa

SEQ ID NO: 48648 - DNA, 33 bp, Homo sapien
aggctctggggctaggtatataaatatgcaaaa

SEQ ID NO: 48649 - DNA, 33 bp, Homo sapien
ggagttcctgacactacggaaaactaatgagaa

SEQ ID NO: 48650 - DNA, 33 bp, Homo sapien
ggagttcctgacactatggaaaactaatgagaa

SEQ ID NO: 48651 - DNA, 33 bp, Homo sapien
cctgcacagatacgtaaataattctggttgaag

SEQ ID NO: 48652 - DNA, 33 bp, Homo sapien
cctgcacagatacgtacataattctggttgaag

SEQ ID NO: 48653 - DNA, 33 bp, Homo sapien
agtggaaatgcacacaatctctggcagtaacat

SEQ ID NO: 48654 - DNA, 33 bp, Homo sapien
agtggaaatgcacacattctctggcagtaacat

SEQ ID NO: 48655 - DNA, 33 bp, Homo sapien
ttgtttacacaacaaccgagtagcaaaaatatg

SEQ ID NO: 48656 - DNA, 33 bp, Homo sapien
ttgtttacacaacaactgagtagcaaaaatatg

SEQ ID NO: 48657 - DNA, 33 bp, Homo sapien
gcaatgatgtattgcacaaatcaaatgagagaa

SEQ ID NO: 48658 - DNA, 33 bp, Homo sapien
gcaatgatgtattgcagaaatcaaatgagagaa

SEQ ID NO: 48659 - DNA, 33 bp, Homo sapien
gcccttgaacctatggcatcatcgacacatagc

SEQ ID NO: 48660 - DNA, 33 bp, Homo sapien
gcccttgaacctatggtatcatcgacacatagc

SEQ ID NO: 48661 - DNA, 33 bp, Homo sapien
ctactttgttgctgtacgcacggggcccttctc

SEQ ID NO: 48662 - DNA, 33 bp, Homo sapien
ctactttgttgctgtatgcacggggcccttctc

SEQ ID NO: 48663 - DNA, 33 bp, Homo sapien
ttgacaatcagtttgaacaatcactgatctaat

SEQ ID NO: 48664 - DNA, 33 bp, Homo sapien
ttgacaatcagtttgagcaatcactgatctaat

SEQ ID NO: 48665 - DNA, 33 bp, Homo sapien
aacatcaaactaatagaagagagccttatactg

SEQ ID NO: 48666 - DNA, 33 bp, Homo sapien
aacatcaaactaataggagagagccttatactg

SEQ ID NO: 48667 - DNA, 33 bp, Homo sapien
tttgtcatatgctgataaggagttcatatattt

SEQ ID NO: 48668 - DNA, 33 bp, Homo sapien
tttgtcatatgctgatgaggagttcatatattt

SEQ ID NO: 48669 - DNA, 33 bp, Homo sapien
caagcagaggctaaatcaccttttttgtcatat

SEQ ID NO: 48670 - DNA, 33 bp, Homo sapien
caagcagaggctaaattaccttttttgtcatat

SEQ ID NO: 48671 - DNA, 33 bp, Homo sapien
tgatgctttcataaaaatggctaactgacttat

SEQ ID NO: 48672 - DNA, 33 bp, Homo sapien
tgatgctttcataaaagtggctaactgacttat

SEQ ID NO: 48673 - DNA, 33 bp, Homo sapien
cagatgcagtgtcaaccctacaaaagcaatgaa

SEQ ID NO: 48674 - DNA, 33 bp, Homo sapien
cagatgcagtgtcaactctacaaaagcaatgaa

SEQ ID NO: 48675 - DNA, 33 bp, Homo sapien
gattactttttacatcaaaccatttctttattg

SEQ ID NO: 48676 - DNA, 33 bp, Homo sapien
gattactttttacatcgaaccatttctttattg

SEQ ID NO: 48677 - DNA, 33 bp, Homo sapien
gaactggagccaggtaacagaattcatcatctt

SEQ ID NO: 48678 - DNA, 33 bp, Homo sapien
gaactggagccaggtagcagaattcatcatctt

SEQ ID NO: 48679 - DNA, 33 bp, Homo sapien
agtgtggaaggataggaaagaaagttgaactat

SEQ ID NO: 48680 - DNA, 33 bp, Homo sapien
agtgtggaaggataggtaagaaagttgaactat

SEQ ID NO: 48681 - DNA, 33 bp, Homo sapien
agactattcacctttacgtttagtcttccctga

SEQ ID NO: 48682 - DNA, 33 bp, Homo sapien
agactattcacctttatgtttagtcttccctga

SEQ ID NO: 48683 - DNA, 33 bp, Homo sapien
tagcagaattgatggacatattttaggaataga

SEQ ID NO: 48684 - DNA, 33 bp, Homo sapien
tagcagaattgatggatatattttaggaataga

SEQ ID NO: 48685 - DNA, 33 bp, Homo sapien
tactatttttgctatacacagtcattttctgta

SEQ ID NO: 48686 - DNA, 33 bp, Homo sapien
tactatttttgctatatacagtcattttctgta

SEQ ID NO: 48687 - DNA, 33 bp, Homo sapien
tatgataaaatagtgcagatgacagcagggagg

SEQ ID NO: 48688 - DNA, 33 bp, Homo sapien
tatgataaaatagtgcggatgacagcagggagg

SEQ ID NO: 48689 - DNA, 33 bp, Homo sapien
cggcaggacaacgaagactgggaaagactcaca

SEQ ID NO: 48690 - DNA, 33 bp, Homo sapien
cggcaggacaacgaaggctgggaaagactcaca

SEQ ID NO: 48691 - DNA, 33 bp, Homo sapien
gaagtaaagaagaggaaatatggtgtgttgaga

SEQ ID NO: 48692 - DNA, 33 bp, Homo sapien
gaagtaaagaagaggagatatggtgtgttgaga

SEQ ID NO: 48693 - DNA, 33 bp, Homo sapien
ccaccagaatgttagcagatgtgtccttgcagg

SEQ ID NO: 48694 - DNA, 33 bp, Homo sapien
ccaccagaatgttagcggatgtgtccttgcagg

SEQ ID NO: 48695 - DNA, 33 bp, Homo sapien
gctgaatccatgccaaaacttcatttctctctc

SEQ ID NO: 48696 - DNA, 33 bp, Homo sapien
gctgaatccatgccaagacttcatttctctctc

SEQ ID NO: 48697 - DNA, 33 bp, Homo sapien
cctcatggcttggtgcgattctccatagtgtgt

SEQ ID NO: 48698 - DNA, 33 bp, Homo sapien
cctcatggcttggtgctattctccatagtgtgt

SEQ ID NO: 48699 - DNA, 33 bp, Homo sapien
gtctcagctttgtttgcagtagtaatcattggg

SEQ ID NO: 48700 - DNA, 33 bp, Homo sapien
gtctcagctttgtttgtagtagtaatcattggg

SEQ ID NO: 48701 - DNA, 33 bp, Homo sapien
cagatgataaggtagcgatccagtgccatgaca

SEQ ID NO: 48702 - DNA, 33 bp, Homo sapien
cagatgataaggtagctatccagtgccatgaca

SEQ ID NO: 48703 - DNA, 33 bp, Homo sapien
ctcccttctggtaagaacagccaaatgaccaga

SEQ ID NO: 48704 - DNA, 33 bp, Homo sapien
ctcccttctggtaagatcagccaaatgaccaga

SEQ ID NO: 48705 - DNA, 33 bp, Homo sapien
cccaaatattaaaatcacaaactctgcagaggc

SEQ ID NO: 48706 - DNA, 33 bp, Homo sapien
cccaaatattaaaatcgcaaactctgcagaggc

SEQ ID NO: 48707 - DNA, 33 bp, Homo sapien
tgctgtaacaaactaccgcagattcggtggctt

SEQ ID NO: 48708 - DNA, 33 bp, Homo sapien
tgctgtaacaaactactgcagattcggtggctt

SEQ ID NO: 48709 - DNA, 33 bp, Homo sapien
ttgaagtaatgagaagcaagagagaacacccat

SEQ ID NO: 48710 - DNA, 33 bp, Homo sapien
ttgaagtaatgagaaggaagagagaacacccat

SEQ ID NO: 48711 - DNA, 33 bp, Homo sapien
atgatgatttatggaactggaattaaaactcaa

SEQ ID NO: 48712 - DNA, 33 bp, Homo sapien
atgatgatttatggaattggaattaaaactcaa

SEQ ID NO: 48713 - DNA, 33 bp, Homo sapien
ttcattgaacttcttccctatgccagactttaa

SEQ ID NO: 48714 - DNA, 33 bp, Homo sapien
ttcattgaacttcttctctatgccagactttaa

SEQ ID NO: 48715 - DNA, 33 bp, Homo sapien
tctcatcctgaaattcccctcatacattttcta

SEQ ID NO: 48716 - DNA, 33 bp, Homo sapien
tctcatcctgaaattctcctcatacattttcta

SEQ ID NO: 48717 - DNA, 33 bp, Homo sapien
cattatagaccacttacagaccaattatatcta

SEQ ID NO: 48718 - DNA, 33 bp, Homo sapien
cattatagaccacttatagaccaattatatcta

SEQ ID NO: 48719 - DNA, 33 bp, Homo sapien
gttaggtcaatggggacaagatattggaaaaga

SEQ ID NO: 48720 - DNA, 33 bp, Homo sapien
gttaggtcaatggggagaagatattggaaaaga

SEQ ID NO: 48721 - DNA, 33 bp, Homo sapien
gacacctaaaattaaaaataacacctgtgctat

SEQ ID NO: 48722 - DNA, 33 bp, Homo sapien
gacacctaaaattaaagataacacctgtgctat

SEQ ID NO: 48723 - DNA, 33 bp, Homo sapien
tgttgctctttctgcaaggctagtctggaaaga

SEQ ID NO: 48724 - DNA, 33 bp, Homo sapien
tgttgctctttctgcagggctagtctggaaaga

SEQ ID NO: 48725 - DNA, 33 bp, Homo sapien
gggaattctcctcttcccaggattgcaaaggtc

SEQ ID NO: 48726 - DNA, 33 bp, Homo sapien
gggaattctcctcttctcaggattgcaaaggtc

SEQ ID NO: 48727 - DNA, 33 bp, Homo sapien
tgatataggtttatgaagtgactatatggtgat

SEQ ID NO: 48728 - DNA, 33 bp, Homo sapien
tgatataggtttatgaggtgactatatggtgat

SEQ ID NO: 48729 - DNA, 33 bp, Homo sapien
tacagggtctaaataagtaggttacgtgccaat

SEQ ID NO: 48730 - DNA, 33 bp, Homo sapien
tacagggtctaaataattaggttacgtgccaat

SEQ ID NO: 48731 - DNA, 33 bp, Homo sapien
ttgcacttaggagaaaattagccaatccattta

SEQ ID NO: 48732 - DNA, 33 bp, Homo sapien
ttgcacttaggagaaagttagccaatccattta

SEQ ID NO: 48733 - DNA, 33 bp, Homo sapien
tccctaacagtcctcaaaaaaattacaaactgc

SEQ ID NO: 48734 - DNA, 33 bp, Homo sapien
tccctaacagtcctcagaaaaattacaaactgc

SEQ ID NO: 48735 - DNA, 33 bp, Homo sapien
taaccctacatacataccttctaagttagcccc

SEQ ID NO: 48736 - DNA, 33 bp, Homo sapien
taaccctacatacatatcttctaagttagcccc

SEQ ID NO: 48737 - DNA, 33 bp, Homo sapien
ataagaggttcagttgaagcataaggaaatgaa

SEQ ID NO: 48738 - DNA, 33 bp, Homo sapien
ataagaggttcagttggagcataaggaaatgaa

SEQ ID NO: 48739 - DNA, 33 bp, Homo sapien
tacagaaatccccacaactttttgctcattcga

SEQ ID NO: 48740 - DNA, 33 bp, Homo sapien
tacagaaatccccacagctttttgctcattcga

SEQ ID NO: 48741 - DNA, 33 bp, Homo sapien
aacagagccccagataaattcctaaggttccag

SEQ ID NO: 48742 - DNA, 33 bp, Homo sapien
aacagagccccagatacattcctaaggttccag

SEQ ID NO: 48743 - DNA, 33 bp, Homo sapien
gaggtgttaaacagacaggaggagtagacagtg

SEQ ID NO: 48744 - DNA, 33 bp, Homo sapien
gaggtgttaaacagacgggaggagtagacagtg

SEQ ID NO: 48745 - DNA, 33 bp, Homo sapien
tgggagggacaggatcggaggtaattgaatcat

SEQ ID NO: 48746 - DNA, 33 bp, Homo sapien
tgggagggacaggatctgaggtaattgaatcat

SEQ ID NO: 48747 - DNA, 33 bp, Homo sapien
agtaactctcttttcacagctccactagtcagt

SEQ ID NO: 48748 - DNA, 33 bp, Homo sapien
agtaactctcttttcatagctccactagtcagt

SEQ ID NO: 48749 - DNA, 33 bp, Homo sapien
ggctgtggcttagaaaacttgtttaaatagtat

SEQ ID NO: 48750 - DNA, 33 bp, Homo sapien
ggctgtggcttagaaaccttgtttaaatagtat

SEQ ID NO: 48751 - DNA, 33 bp, Homo sapien
aagattaaaatgcagtgaattctcagtctatac

SEQ ID NO: 48752 - DNA, 33 bp, Homo sapien
aagattaaaatgcagttaattctcagtctatac

SEQ ID NO: 48753 - DNA, 33 bp, Homo sapien
atctctctcttacccccaacgtgactctctcca

SEQ ID NO: 48754 - DNA, 33 bp, Homo sapien
atctctctcttacccctaacgtgactctctcca

SEQ ID NO: 48755 - DNA, 33 bp, Homo sapien
cgcttgtatacaaggagcacatgaaattttgct

SEQ ID NO: 48756 - DNA, 33 bp, Homo sapien
cgcttgtatacaaggatcacatgaaattttgct

SEQ ID NO: 48757 - DNA, 33 bp, Homo sapien
aatgcatattttgtgaatattgaaggacttaga

SEQ ID NO: 48758 - DNA, 33 bp, Homo sapien
aatgcatattttgtgagtattgaaggacttaga

SEQ ID NO: 48759 - DNA, 33 bp, Homo sapien
acaccatatttgcaccaatgaaaaacagtaatc

SEQ ID NO: 48760 - DNA, 33 bp, Homo sapien
acaccatatttgcaccgatgaaaaacagtaatc

SEQ ID NO: 48761 - DNA, 33 bp, Homo sapien
ttgtctggatacctccccacatacaccatattt

SEQ ID NO: 48762 - DNA, 33 bp, Homo sapien
ttgtctggatacctcctcacatacaccatattt

SEQ ID NO: 48763 - DNA, 33 bp, Homo sapien
taaataaaataaagagaaatgttcaggacacct

SEQ ID NO: 48764 - DNA, 33 bp, Homo sapien
taaataaaataaagaggaatgttcaggacacct

SEQ ID NO: 48765 - DNA, 33 bp, Homo sapien
accaaaaaacgaccacaaattgagaactcctgt

SEQ ID NO: 48766 - DNA, 33 bp, Homo sapien
accaaaaaacgaccacgaattgagaactcctgt

SEQ ID NO: 48767 - DNA, 33 bp, Homo sapien
agagtcaaagctagcacgtcctctttagccatc

SEQ ID NO: 48768 - DNA, 33 bp, Homo sapien
agagtcaaagctagcatgtcctctttagccatc

SEQ ID NO: 48769 - DNA, 33 bp, Homo sapien
tgggacttttgactaagggccctgagaactgga

SEQ ID NO: 48770 - DNA, 33 bp, Homo sapien
tgggacttttgactaatggccctgagaactgga

SEQ ID NO: 48771 - DNA, 33 bp, Homo sapien
ctcactctcacccttaaaattatgaaaaagtag

SEQ ID NO: 48772 - DNA, 33 bp, Homo sapien
ctcactctcacccttacaattatgaaaaagtag

SEQ ID NO: 48773 - DNA, 33 bp, Homo sapien
taatgtacatgggagcactagtaatatctcttc

SEQ ID NO: 48774 - DNA, 33 bp, Homo sapien
taatgtacatgggagcgctagtaatatctcttc

SEQ ID NO: 48775 - DNA, 33 bp, Homo sapien
tcatgtacaaagggaaaccttatcacactaaca

SEQ ID NO: 48776 - DNA, 33 bp, Homo sapien
tcatgtacaaagggaacccttatcacactaaca

SEQ ID NO: 48777 - DNA, 33 bp, Homo sapien
ggcagaaactctgagaaaggccagcagatgggg

SEQ ID NO: 48778 - DNA, 33 bp, Homo sapien
ggcagaaactctgagagaggccagcagatgggg

SEQ ID NO: 48779 - DNA, 33 bp, Homo sapien
cagaactccagattgcacagacagagggtttgg

SEQ ID NO: 48780 - DNA, 33 bp, Homo sapien
cagaactccagattgcgcagacagagggtttgg

SEQ ID NO: 48781 - DNA, 33 bp, Homo sapien
taaagggttgctgtaacaatgtacctttgactg

SEQ ID NO: 48782 - DNA, 33 bp, Homo sapien
taaagggttgctgtaataatgtacctttgactg

SEQ ID NO: 48783 - DNA, 33 bp, Homo sapien
ctaaaaatcactggaccgcgttgctaacttcca

SEQ ID NO: 48784 - DNA, 33 bp, Homo sapien
ctaaaaatcactggactgcgttgctaacttcca

SEQ ID NO: 48785 - DNA, 33 bp, Homo sapien
tagtgccattcataaccgtgaatcgtgctgcaa

SEQ ID NO: 48786 - DNA, 33 bp, Homo sapien
tagtgccattcataactgtgaatcgtgctgcaa

SEQ ID NO: 48787 - DNA, 33 bp, Homo sapien
tttttcttatgccaacagcctgcttatcataca

SEQ ID NO: 48788 - DNA, 33 bp, Homo sapien
tttttcttatgccaactgcctgcttatcataca

SEQ ID NO: 48789 - DNA, 33 bp, Homo sapien
gctgaattctggatttgaaaccatatgaataac

SEQ ID NO: 48790 - DNA, 33 bp, Homo sapien
gctgaattctggattttaaaccatatgaataac

SEQ ID NO: 48791 - DNA, 33 bp, Homo sapien
cattctaagctgaccggattggctactgcttta

SEQ ID NO: 48792 - DNA, 33 bp, Homo sapien
cattctaagctgaccgtattggctactgcttta

SEQ ID NO: 48793 - DNA, 33 bp, Homo sapien
actctgaaatctaccaggagacaaagcctcagt

SEQ ID NO: 48794 - DNA, 33 bp, Homo sapien
actctgaaatctaccatgagacaaagcctcagt

SEQ ID NO: 48795 - DNA, 33 bp, Homo sapien
ataaagaaggactcaacgaccaaatgtgttact

SEQ ID NO: 48796 - DNA, 33 bp, Homo sapien
ataaagaaggactcaatgaccaaatgtgttact

SEQ ID NO: 48797 - DNA, 33 bp, Homo sapien
taatgttttcatgatgcagactgctaggtcaca

SEQ ID NO: 48798 - DNA, 33 bp, Homo sapien
taatgttttcatgatggagactgctaggtcaca

SEQ ID NO: 48799 - DNA, 33 bp, Homo sapien
gacaagcagagacgaaaacaagaatgcgttcag

SEQ ID NO: 48800 - DNA, 33 bp, Homo sapien
gacaagcagagacgaagacaagaatgcgttcag

SEQ ID NO: 48801 - DNA, 33 bp, Homo sapien
atacccatcaagaaaacaccatgtgtcaaaata

SEQ ID NO: 48802 - DNA, 33 bp, Homo sapien
atacccatcaagaaaataccatgtgtcaaaata

SEQ ID NO: 48803 - DNA, 33 bp, Homo sapien
acagtgtaacaacagtaacataaatcggatttc

SEQ ID NO: 48804 - DNA, 33 bp, Homo sapien
acagtgtaacaacagtgacataaatcggatttc

SEQ ID NO: 48805 - DNA, 33 bp, Homo sapien
tgatacagagacttacagcacctgatttttcat

SEQ ID NO: 48806 - DNA, 33 bp, Homo sapien
tgatacagagacttacggcacctgatttttcat

SEQ ID NO: 48807 - DNA, 33 bp, Homo sapien
tgagtgattagaaaacagtgtggtcacagtgca

SEQ ID NO: 48808 - DNA, 33 bp, Homo sapien
tgagtgattagaaaactgtgtggtcacagtgca

SEQ ID NO: 48809 - DNA, 33 bp, Homo sapien
ctggctttcactaataaaattctatcgcaccgt

SEQ ID NO: 48810 - DNA, 33 bp, Homo sapien
ctggctttcactaatataattctatcgcaccgt

SEQ ID NO: 48811 - DNA, 33 bp, Homo sapien
agaaaggatcgcaaagaaactggaatatagagg

SEQ ID NO: 48812 - DNA, 33 bp, Homo sapien
agaaaggatcgcaaagtaactggaatatagagg

SEQ ID NO: 48813 - DNA, 33 bp, Homo sapien
catggatacggaaactaaactctgatgtatggt

SEQ ID NO: 48814 - DNA, 33 bp, Homo sapien
catggatacggaaactgaactctgatgtatggt

SEQ ID NO: 48815 - DNA, 33 bp, Homo sapien
ggattgacaaactaaaggagatagtgggactgt

SEQ ID NO: 48816 - DNA, 33 bp, Homo sapien
ggattgacaaactaaatgagatagtgggactgt

SEQ ID NO: 48817 - DNA, 33 bp, Homo sapien
atgtttatgagcaaacaaaaggtatctaataag

SEQ ID NO: 48818 - DNA, 33 bp, Homo sapien
atgtttatgagcaaacgaaaggtatctaataag

SEQ ID NO: 48819 - DNA, 33 bp, Homo sapien
aaaggttctgggaaggcacaaatgtgacacatg

SEQ ID NO: 48820 - DNA, 33 bp, Homo sapien
aaaggttctgggaaggtacaaatgtgacacatg

SEQ ID NO: 48821 - DNA, 33 bp, Homo sapien
agatggcactcagtgacgtagtgtgtacttgag

SEQ ID NO: 48822 - DNA, 33 bp, Homo sapien
agatggcactcagtgatgtagtgtgtacttgag

SEQ ID NO: 48823 - DNA, 33 bp, Homo sapien
aaatcattgcaaaaaaattgtatggtatgtcaa

SEQ ID NO: 48824 - DNA, 33 bp, Homo sapien
aaatcattgcaaaaaatttgtatggtatgtcaa

SEQ ID NO: 48825 - DNA, 33 bp, Homo sapien
tactgaaaaaaaatccagaaaatgtagccaaac

SEQ ID NO: 48826 - DNA, 33 bp, Homo sapien
tactgaaaaaaaatcccgaaaatgtagccaaac

SEQ ID NO: 48827 - DNA, 33 bp, Homo sapien
ctgcctagacacgcagacatttccatacatcct

SEQ ID NO: 48828 - DNA, 33 bp, Homo sapien
ctgcctagacacgcaggcatttccatacatcct

SEQ ID NO: 48829 - DNA, 33 bp, Homo sapien
aacaactttgatctgacggaatacttagaaata

SEQ ID NO: 48830 - DNA, 33 bp, Homo sapien
aacaactttgatctgatggaatacttagaaata

SEQ ID NO: 48831 - DNA, 33 bp, Homo sapien
aatgtatttacaacaccggatgtccataaccag

SEQ ID NO: 48832 - DNA, 33 bp, Homo sapien
aatgtatttacaacactggatgtccataaccag

SEQ ID NO: 48833 - DNA, 33 bp, Homo sapien
taattcttatttagaaaccatcatcttactcaa

SEQ ID NO: 48834 - DNA, 33 bp, Homo sapien
taattcttatttagaagccatcatcttactcaa

SEQ ID NO: 48835 - DNA, 33 bp, Homo sapien
ggaagctgagagttaaagtatctagatcctgga

SEQ ID NO: 48836 - DNA, 33 bp, Homo sapien
ggaagctgagagttaacgtatctagatcctgga

SEQ ID NO: 48837 - DNA, 33 bp, Homo sapien
acttctaatttagctcaagcatctatcctggca

SEQ ID NO: 48838 - DNA, 33 bp, Homo sapien
acttctaatttagctccagcatctatcctggca

SEQ ID NO: 48839 - DNA, 33 bp, Homo sapien
ggatggtgggcaagtaaagtggtctgaagaatg

SEQ ID NO: 48840 - DNA, 33 bp, Homo sapien
ggatggtgggcaagtagagtggtctgaagaatg

SEQ ID NO: 48841 - DNA, 33 bp, Homo sapien
attcctgaggcttacccggaagaacttgctggt

SEQ ID NO: 48842 - DNA, 33 bp, Homo sapien
attcctgaggcttacctggaagaacttgctggt

SEQ ID NO: 48843 - DNA, 33 bp, Homo sapien
aatgctaacatccacaccagtaggagaaactac

SEQ ID NO: 48844 - DNA, 33 bp, Homo sapien
aatgctaacatccacatcagtaggagaaactac

SEQ ID NO: 48845 - DNA, 33 bp, Homo sapien
accaaagctgctgtcaatcctgaggccagatat

SEQ ID NO: 48846 - DNA, 33 bp, Homo sapien
accaaagctgctgtcattcctgaggccagatat

SEQ ID NO: 48847 - DNA, 33 bp, Homo sapien
cagttgtgactaataaccctaaaactaaaatgg

SEQ ID NO: 48848 - DNA, 33 bp, Homo sapien
cagttgtgactaataatcctaaaactaaaatgg

SEQ ID NO: 48849 - DNA, 33 bp, Homo sapien
tccccaactggttccactattgcagctctgatt

SEQ ID NO: 48850 - DNA, 33 bp, Homo sapien
tccccaactggttccagtattgcagctctgatt

SEQ ID NO: 48851 - DNA, 33 bp, Homo sapien
actgtagtgatccccacgctcatctctttcact

SEQ ID NO: 48852 - DNA, 33 bp, Homo sapien
actgtagtgatccccatgctcatctctttcact

SEQ ID NO: 48853 - DNA, 33 bp, Homo sapien
ctgttgatcctctatacaggttgtcaatcctct

SEQ ID NO: 48854 - DNA, 33 bp, Homo sapien
ctgttgatcctctatataggttgtcaatcctct

SEQ ID NO: 48855 - DNA, 33 bp, Homo sapien
aatgatacacagcaaacgtacacagagttcagt

SEQ ID NO: 48856 - DNA, 33 bp, Homo sapien
aatgatacacagcaaatgtacacagagttcagt

SEQ ID NO: 48857 - DNA, 33 bp, Homo sapien
atttcacagtcaaaggcccgtagcaaatcgcac

SEQ ID NO: 48858 - DNA, 33 bp, Homo sapien
atttcacagtcaaaggtccgtagcaaatcgcac

SEQ ID NO: 48859 - DNA, 33 bp, Homo sapien
acacagacatttctccaagaggggcaatggatt

SEQ ID NO: 48860 - DNA, 33 bp, Homo sapien
acacagacatttctccgagaggggcaatggatt

SEQ ID NO: 48861 - DNA, 33 bp, Homo sapien
acctgcatcacaattacgccaaggatcagtgct

SEQ ID NO: 48862 - DNA, 33 bp, Homo sapien
acctgcatcacaattatgccaaggatcagtgct

SEQ ID NO: 48863 - DNA, 33 bp, Homo sapien
ttaatgtatgtattgaagatagaagttaagtac

SEQ ID NO: 48864 - DNA, 33 bp, Homo sapien
ttaatgtatgtattgaggatagaagttaagtac

SEQ ID NO: 48865 - DNA, 33 bp, Homo sapien
ttccgcttactgggaaaatgatcagcctttggg

SEQ ID NO: 48866 - DNA, 33 bp, Homo sapien
ttccgcttactgggaacatgatcagcctttggg

SEQ ID NO: 48867 - DNA, 33 bp, Homo sapien
ttccattctcatgacccaactttctgaattgcg

SEQ ID NO: 48868 - DNA, 33 bp, Homo sapien
ttccattctcatgacctaactttctgaattgcg

SEQ ID NO: 48869 - DNA, 33 bp, Homo sapien
cttttgctatacccaaaaagtgttgtatgttgt

SEQ ID NO: 48870 - DNA, 33 bp, Homo sapien
cttttgctatacccaataagtgttgtatgttgt

SEQ ID NO: 48871 - DNA, 33 bp, Homo sapien
aaatgtatgaataagaataaaaaccatgtaaag

SEQ ID NO: 48872 - DNA, 33 bp, Homo sapien
aaatgtatgaataagactaaaaaccatgtaaag

SEQ ID NO: 48873 - DNA, 33 bp, Homo sapien
aattgctgaactttgaccctcagagtcttcatc

SEQ ID NO: 48874 - DNA, 33 bp, Homo sapien
aattgctgaactttgatcctcagagtcttcatc

SEQ ID NO: 48875 - DNA, 33 bp, Homo sapien
cagtgggaatgaaaacaacatccatttagcaaa

SEQ ID NO: 48876 - DNA, 33 bp, Homo sapien
cagtgggaatgaaaacgacatccatttagcaaa

SEQ ID NO: 48877 - DNA, 33 bp, Homo sapien
aagattgggtgagatcaattaaaggcaatatgt

SEQ ID NO: 48878 - DNA, 33 bp, Homo sapien
aagattgggtgagatccattaaaggcaatatgt

SEQ ID NO: 48879 - DNA, 33 bp, Homo sapien
ataatgcactcacaggcactttgcaaactctag

SEQ ID NO: 48880 - DNA, 33 bp, Homo sapien
ataatgcactcacaggtactttgcaaactctag

SEQ ID NO: 48881 - DNA, 33 bp, Homo sapien
ctttctccccatgatgaactataataatccttg

SEQ ID NO: 48882 - DNA, 33 bp, Homo sapien
ctttctccccatgatggactataataatccttg

SEQ ID NO: 48883 - DNA, 33 bp, Homo sapien
tctttctgtcactaaaactaacacaaaaattta

SEQ ID NO: 48884 - DNA, 33 bp, Homo sapien
tctttctgtcactaaacctaacacaaaaattta

SEQ ID NO: 48885 - DNA, 33 bp, Homo sapien
agatccaaggaacttacgttgaaatccagttcc

SEQ ID NO: 48886 - DNA, 33 bp, Homo sapien
agatccaaggaacttatgttgaaatccagttcc

SEQ ID NO: 48887 - DNA, 33 bp, Homo sapien
ggttgaacatggcagacagtgtttctacctcaa

SEQ ID NO: 48888 - DNA, 33 bp, Homo sapien
ggttgaacatggcagatagtgtttctacctcaa

SEQ ID NO: 48889 - DNA, 33 bp, Homo sapien
ctagagaagtcctaaaagattggtcctaaatta

SEQ ID NO: 48890 - DNA, 33 bp, Homo sapien
ctagagaagtcctaaaggattggtcctaaatta

SEQ ID NO: 48891 - DNA, 33 bp, Homo sapien
ctacgggaaattatataacaactctgtgtctgt

SEQ ID NO: 48892 - DNA, 33 bp, Homo sapien
ctacgggaaattatatgacaactctgtgtctgt

SEQ ID NO: 48893 - DNA, 33 bp, Homo sapien
ctgcaaagaagtgagagtcgagctaacatttct

SEQ ID NO: 48894 - DNA, 33 bp, Homo sapien
ctgcaaagaagtgagattcgagctaacatttct

SEQ ID NO: 48895 - DNA, 33 bp, Homo sapien
atcatgtgagtactaagcaaaagaagactaatg

SEQ ID NO: 48896 - DNA, 33 bp, Homo sapien
atcatgtgagtactaatcaaaagaagactaatg

SEQ ID NO: 48897 - DNA, 33 bp, Homo sapien
gattgtataacaagaaggtctggatgagaaccc

SEQ ID NO: 48898 - DNA, 33 bp, Homo sapien
gattgtataacaagaatgtctggatgagaaccc

SEQ ID NO: 48899 - DNA, 33 bp, Homo sapien
agtggaacagtgtgcacggtcaatagagttaaa

SEQ ID NO: 48900 - DNA, 33 bp, Homo sapien
agtggaacagtgtgcatggtcaatagagttaaa

SEQ ID NO: 48901 - DNA, 33 bp, Homo sapien
ttttaattgactgataaaatttcaacaaataaa

SEQ ID NO: 48902 - DNA, 33 bp, Homo sapien
ttttaattgactgatagaatttcaacaaataaa

SEQ ID NO: 48903 - DNA, 33 bp, Homo sapien
gggaggcacgatgtgacgtaattaaatcatggg

SEQ ID NO: 48904 - DNA, 33 bp, Homo sapien
gggaggcacgatgtgatgtaattaaatcatggg

SEQ ID NO: 48905 - DNA, 33 bp, Homo sapien
catcaggaagacttaacgcttgtaaattaaata

SEQ ID NO: 48906 - DNA, 33 bp, Homo sapien
catcaggaagacttaatgcttgtaaattaaata

SEQ ID NO: 48907 - DNA, 33 bp, Homo sapien
ccccatatgctttctcacctcttgaatcctcac

SEQ ID NO: 48908 - DNA, 33 bp, Homo sapien
ccccatatgctttctcgcctcttgaatcctcac

SEQ ID NO: 48909 - DNA, 33 bp, Homo sapien
taactttgtacctgctaactgtctctggcaatg

SEQ ID NO: 48910 - DNA, 33 bp, Homo sapien
taactttgtacctgctgactgtctctggcaatg

SEQ ID NO: 48911 - DNA, 33 bp, Homo sapien
acaaatagtaacatcccgaaaaattttggccat

SEQ ID NO: 48912 - DNA, 33 bp, Homo sapien
acaaatagtaacatcctgaaaaattttggccat

SEQ ID NO: 48913 - DNA, 33 bp, Homo sapien
ctcaacctgcagctacaacagatagcatcacat

SEQ ID NO: 48914 - DNA, 33 bp, Homo sapien
ctcaacctgcagctacgacagatagcatcacat

SEQ ID NO: 48915 - DNA, 33 bp, Homo sapien
gatggctgtgtgaggcacactcctgggaagtca

SEQ ID NO: 48916 - DNA, 33 bp, Homo sapien
gatggctgtgtgaggcgcactcctgggaagtca

SEQ ID NO: 48917 - DNA, 33 bp, Homo sapien
cggatagggctcaaaacagatttaactgaggtt

SEQ ID NO: 48918 - DNA, 33 bp, Homo sapien
cggatagggctcaaaagagatttaactgaggtt

SEQ ID NO: 48919 - DNA, 33 bp, Homo sapien
aggtataccacttcagcagcaattaatatttat

SEQ ID NO: 48920 - DNA, 33 bp, Homo sapien
aggtataccacttcagtagcaattaatatttat

SEQ ID NO: 48921 - DNA, 33 bp, Homo sapien
ttgggctaaagagctcaagactttatgatacta

SEQ ID NO: 48922 - DNA, 33 bp, Homo sapien
ttgggctaaagagctcgagactttatgatacta

SEQ ID NO: 48923 - DNA, 33 bp, Homo sapien
taaaagtcacatagtcccagtaaagcagtagaa

SEQ ID NO: 48924 - DNA, 33 bp, Homo sapien
taaaagtcacatagtctcagtaaagcagtagaa

SEQ ID NO: 48925 - DNA, 33 bp, Homo sapien
gaggccactttccctccccacacagtaacttat

SEQ ID NO: 48926 - DNA, 33 bp, Homo sapien
gaggccactttccctctccacacagtaacttat

SEQ ID NO: 48927 - DNA, 33 bp, Homo sapien
gtgaaagcagtgatacagagcatgaatgatgac

SEQ ID NO: 48928 - DNA, 33 bp, Homo sapien
gtgaaagcagtgataccgagcatgaatgatgac

SEQ ID NO: 48929 - DNA, 33 bp, Homo sapien
ttcatgagggactatccacaaaggtattttggg

SEQ ID NO: 48930 - DNA, 33 bp, Homo sapien
ttcatgagggactatctacaaaggtattttggg

SEQ ID NO: 48931 - DNA, 33 bp, Homo sapien
agcagtgaaacacttaacagtcttgtctgaaca

SEQ ID NO: 48932 - DNA, 33 bp, Homo sapien
agcagtgaaacacttaccagtcttgtctgaaca

SEQ ID NO: 48933 - DNA, 33 bp, Homo sapien
aaaccaaatgctcctacgaaaaaataagcaaac

SEQ ID NO: 48934 - DNA, 33 bp, Homo sapien
aaaccaaatgctcctatgaaaaaataagcaaac

SEQ ID NO: 48935 - DNA, 33 bp, Homo sapien
ttctgatcagaaaccacaaagttacaaggaaac

SEQ ID NO: 48936 - DNA, 33 bp, Homo sapien
ttctgatcagaaaccataaagttacaaggaaac

SEQ ID NO: 48937 - DNA, 33 bp, Homo sapien
ccactttagcttccctaaaaatagtaactgctc

SEQ ID NO: 48938 - DNA, 33 bp, Homo sapien
ccactttagcttccctgaaaatagtaactgctc

SEQ ID NO: 48939 - DNA, 33 bp, Homo sapien
tctgcaccagctgaagaaaatctcagacggcac

SEQ ID NO: 48940 - DNA, 33 bp, Homo sapien
tctgcaccagctgaaggaaatctcagacggcac

SEQ ID NO: 48941 - DNA, 33 bp, Homo sapien
caaatcatgtatttatcaatgcaaccatcccag

SEQ ID NO: 48942 - DNA, 33 bp, Homo sapien
caaatcatgtatttattaatgcaaccatcccag

SEQ ID NO: 48943 - DNA, 33 bp, Homo sapien
gctacaaccaccacacaatactcattggtaccc

SEQ ID NO: 48944 - DNA, 33 bp, Homo sapien
gctacaaccaccacacgatactcattggtaccc

SEQ ID NO: 48945 - DNA, 33 bp, Homo sapien
ttgtaatgtcattaaagaaacattcattaaaga

SEQ ID NO: 48946 - DNA, 33 bp, Homo sapien
ttgtaatgtcattaaataaacattcattaaaga

SEQ ID NO: 48947 - DNA, 33 bp, Homo sapien
agtcattggttaacagaaataaacaagtgtatt

SEQ ID NO: 48948 - DNA, 33 bp, Homo sapien
agtcattggttaacaggaataaacaagtgtatt

SEQ ID NO: 48949 - DNA, 33 bp, Homo sapien
ttatccctactgccaaccacttttcttcatgct

SEQ ID NO: 48950 - DNA, 33 bp, Homo sapien
ttatccctactgccaatcacttttcttcatgct

SEQ ID NO: 48951 - DNA, 33 bp, Homo sapien
ctactgcaaaactcatcatatcagtaatttgct

SEQ ID NO: 48952 - DNA, 33 bp, Homo sapien
ctactgcaaaactcattatatcagtaatttgct

SEQ ID NO: 48953 - DNA, 33 bp, Homo sapien
accagcaggaggacaacagtagagatctggaga

SEQ ID NO: 48954 - DNA, 33 bp, Homo sapien
accagcaggaggacaatagtagagatctggaga

SEQ ID NO: 48955 - DNA, 33 bp, Homo sapien
ttgcttccttggaccaactgtcttctggtttat

SEQ ID NO: 48956 - DNA, 33 bp, Homo sapien
ttgcttccttggaccacctgtcttctggtttat

SEQ ID NO: 48957 - DNA, 33 bp, Homo sapien
gagaattgccaagctaagggttctgcaggaaga

SEQ ID NO: 48958 - DNA, 33 bp, Homo sapien
gagaattgccaagctaggggttctgcaggaaga

SEQ ID NO: 48959 - DNA, 33 bp, Homo sapien
tgtgggtcttcagctcagactgggtgaagggaa

SEQ ID NO: 48960 - DNA, 33 bp, Homo sapien
tgtgggtcttcagctcggactgggtgaagggaa

SEQ ID NO: 48961 - DNA, 33 bp, Homo sapien
gactctgaaaaactggcacaacttagggaacag

SEQ ID NO: 48962 - DNA, 33 bp, Homo sapien
gactctgaaaaactggtacaacttagggaacag

SEQ ID NO: 48963 - DNA, 33 bp, Homo sapien
agaagataaaaatcaagcaattaagcatttgta

SEQ ID NO: 48964 - DNA, 33 bp, Homo sapien
agaagataaaaatcaatcaattaagcatttgta

SEQ ID NO: 48965 - DNA, 33 bp, Homo sapien
ataaagcaagcacaaaaaacaaatatcatgaac

SEQ ID NO: 48966 - DNA, 33 bp, Homo sapien
ataaagcaagcacaaagaacaaatatcatgaac

SEQ ID NO: 48967 - DNA, 33 bp, Homo sapien
gcaagcacacactgtaaatcttccaccaaaact

SEQ ID NO: 48968 - DNA, 33 bp, Homo sapien
gcaagcacacactgtacatcttccaccaaaact

SEQ ID NO: 48969 - DNA, 33 bp, Homo sapien
agatatattgaaaaaactatggagaaagatata

SEQ ID NO: 48970 - DNA, 33 bp, Homo sapien
agatatattgaaaaaagtatggagaaagatata

SEQ ID NO: 48971 - DNA, 33 bp, Homo sapien
atcagacactgggttaagcactaggaatgtaga

SEQ ID NO: 48972 - DNA, 33 bp, Homo sapien
atcagacactgggttaggcactaggaatgtaga

SEQ ID NO: 48973 - DNA, 33 bp, Homo sapien
aagttttaggatctcaaaaataaagtttattct

SEQ ID NO: 48974 - DNA, 33 bp, Homo sapien
aagttttaggatctcagaaataaagtttattct

SEQ ID NO: 48975 - DNA, 33 bp, Homo sapien
tccaaagaatctagataagcatctcgaagagat

SEQ ID NO: 48976 - DNA, 33 bp, Homo sapien
tccaaagaatctagatcagcatctcgaagagat

SEQ ID NO: 48977 - DNA, 33 bp, Homo sapien
ctacatgaggactctaaaatagttaaagtcata

SEQ ID NO: 48978 - DNA, 33 bp, Homo sapien
ctacatgaggactctataatagttaaagtcata

SEQ ID NO: 48979 - DNA, 33 bp, Homo sapien
atctacagaacttcaccgcgtgtcttcatgctt

SEQ ID NO: 48980 - DNA, 33 bp, Homo sapien
atctacagaacttcactgcgtgtcttcatgctt

SEQ ID NO: 48981 - DNA, 33 bp, Homo sapien
aagcttcagtttctcactagtacctgggtgtct

SEQ ID NO: 48982 - DNA, 33 bp, Homo sapien
aagcttcagtttctcagtagtacctgggtgtct

SEQ ID NO: 48983 - DNA, 33 bp, Homo sapien
gctagagctgtcttgcactactcttgtcatctt

SEQ ID NO: 48984 - DNA, 33 bp, Homo sapien
gctagagctgtcttgcgctactcttgtcatctt

SEQ ID NO: 48985 - DNA, 33 bp, Homo sapien
aaagtagctctttcagactctaaatgccaggct

SEQ ID NO: 48986 - DNA, 33 bp, Homo sapien
aaagtagctctttcagtctctaaatgccaggct

SEQ ID NO: 48987 - DNA, 33 bp, Homo sapien
tcttgggctgagcttccacaaagtaaccctgtc

SEQ ID NO: 48988 - DNA, 33 bp, Homo sapien
tcttgggctgagcttctacaaagtaaccctgtc

SEQ ID NO: 48989 - DNA, 33 bp, Homo sapien
actagaaagatatatcacaaagccagagcactc

SEQ ID NO: 48990 - DNA, 33 bp, Homo sapien
actagaaagatatatcgcaaagccagagcactc

SEQ ID NO: 48991 - DNA, 33 bp, Homo sapien
taaaatttcaagatgacgtgtggtggcggcaaa

SEQ ID NO: 48992 - DNA, 33 bp, Homo sapien
taaaatttcaagatgatgtgtggtggcggcaaa

SEQ ID NO: 48993 - DNA, 33 bp, Homo sapien
tcaccttccaacaacaacatattgggaataaaa

SEQ ID NO: 48994 - DNA, 33 bp, Homo sapien
tcaccttccaacaacaccatattgggaataaaa

SEQ ID NO: 48995 - DNA, 33 bp, Homo sapien
ttctttatatatcactaagtctcaggtattctt

SEQ ID NO: 48996 - DNA, 33 bp, Homo sapien
ttctttatatatcactgagtctcaggtattctt

SEQ ID NO: 48997 - DNA, 33 bp, Homo sapien
tgctgctttgagggagcattaggttatgttatt

SEQ ID NO: 48998 - DNA, 33 bp, Homo sapien
tgctgctttgagggagtattaggttatgttatt

SEQ ID NO: 48999 - DNA, 33 bp, Homo sapien
acagaatgtggagataagaaggaacttttccaa

SEQ ID NO: 49000 - DNA, 33 bp, Homo sapien
acagaatgtggagataggaaggaacttttccaa

SEQ ID NO: 49001 - DNA, 33 bp, Homo sapien
tagctctcgtaatcatcagtttcttaagtcatt

SEQ ID NO: 49002 - DNA, 33 bp, Homo sapien
tagctctcgtaatcatgagtttcttaagtcatt

SEQ ID NO: 49003 - DNA, 33 bp, Homo sapien
atgtggctagtatgaccgactaagtgaattttt

SEQ ID NO: 49004 - DNA, 33 bp, Homo sapien
atgtggctagtatgactgactaagtgaattttt

SEQ ID NO: 49005 - DNA, 33 bp, Homo sapien
aaccactagcttgtaaagactagaagaaataca

SEQ ID NO: 49006 - DNA, 33 bp, Homo sapien
aaccactagcttgtaatgactagaagaaataca

SEQ ID NO: 49007 - DNA, 33 bp, Homo sapien
caattccttggccagaagcttaacagtgccagc

SEQ ID NO: 49008 - DNA, 33 bp, Homo sapien
caattccttggccagaggcttaacagtgccagc

SEQ ID NO: 49009 - DNA, 33 bp, Homo sapien
tttgggtggtacaaccggctagggagattggct

SEQ ID NO: 49010 - DNA, 33 bp, Homo sapien
tttgggtggtacaacctgctagggagattggct

SEQ ID NO: 49011 - DNA, 33 bp, Homo sapien
taacttttgattgcacaagtggcgtgtggtatg

SEQ ID NO: 49012 - DNA, 33 bp, Homo sapien
taacttttgattgcacgagtggcgtgtggtatg

SEQ ID NO: 49013 - DNA, 33 bp, Homo sapien
gggtaacagagttagaaacaaagatatttcacc

SEQ ID NO: 49014 - DNA, 33 bp, Homo sapien
gggtaacagagttagagacaaagatatttcacc

SEQ ID NO: 49015 - DNA, 33 bp, Homo sapien
ttgctacttcaaactacctggcagtttacttaa

SEQ ID NO: 49016 - DNA, 33 bp, Homo sapien
ttgctacttcaaactatctggcagtttacttaa

SEQ ID NO: 49017 - DNA, 33 bp, Homo sapien
gaagggtctgggaaagaaagatgaaaagtatat

SEQ ID NO: 49018 - DNA, 33 bp, Homo sapien
gaagggtctgggaaaggaagatgaaaagtatat

SEQ ID NO: 49019 - DNA, 33 bp, Homo sapien
ttgttggtgaaagaaacatcctaacccttgaca

SEQ ID NO: 49020 - DNA, 33 bp, Homo sapien
ttgttggtgaaagaaatatcctaacccttgaca

SEQ ID NO: 49021 - DNA, 33 bp, Homo sapien
tccaggaagtatgtcacgatgcaatggagaaat

SEQ ID NO: 49022 - DNA, 33 bp, Homo sapien
tccaggaagtatgtcatgatgcaatggagaaat

SEQ ID NO: 49023 - DNA, 33 bp, Homo sapien
aaagctgcttaagtagcagaggaagacagataa

SEQ ID NO: 49024 - DNA, 33 bp, Homo sapien
aaagctgcttaagtaggagaggaagacagataa

SEQ ID NO: 49025 - DNA, 33 bp, Homo sapien
cagccgaattctatcacggctacaaagaggagc

SEQ ID NO: 49026 - DNA, 33 bp, Homo sapien
cagccgaattctatcagggctacaaagaggagc

SEQ ID NO: 49027 - DNA, 33 bp, Homo sapien; identical to SEQ ID NO: 49025

SEQ ID NO: 49028 - DNA, 33 bp, Homo sapien; identical to SEQ ID NO: 49026

SEQ ID NO: 49029 - DNA, 33 bp, Homo sapien
acttgcgcatgtatacaacggcatttgaagagg

SEQ ID NO: 49030 - DNA, 33 bp, Homo sapien
acttgcgcatgtatacgacggcatttgaagagg

SEQ ID NO: 49031 - DNA, 33 bp, Homo sapien
caggtcatgttaaaaaagactgagttttgtaca

SEQ ID NO: 49032 - DNA, 33 bp, Homo sapien
caggtcatgttaaaaaggactgagttttgtaca

SEQ ID NO: 49033 - DNA, 33 bp, Homo sapien
atctccttgcttggccaccctgaacttaaactc

SEQ ID NO: 49034 - DNA, 33 bp, Homo sapien
atctccttgcttggccgccctgaacttaaactc

SEQ ID NO: 49035 - DNA, 33 bp, Homo sapien
tgaaagaattgccaagaagccattagaataatg

SEQ ID NO: 49036 - DNA, 33 bp, Homo sapien
tgaaagaattgccaagtagccattagaataatg

SEQ ID NO: 49037 - DNA, 33 bp, Homo sapien
atgtgtcatattcactaactataatacaattga

SEQ ID NO: 49038 - DNA, 33 bp, Homo sapien
atgtgtcatattcactgactataatacaattga

SEQ ID NO: 49039 - DNA, 33 bp, Homo sapien
tcttgttcttgatcttcaacttgttcttgttct

SEQ ID NO: 49040 - DNA, 33 bp, Homo sapien
tcttgttcttgatcttgaacttgttcttgttct

SEQ ID NO: 49041 - DNA, 33 bp, Homo sapien
aataatctcagcactacgtatttggtgttttag

SEQ ID NO: 49042 - DNA, 33 bp, Homo sapien
aataatctcagcactatgtatttggtgttttag

SEQ ID NO: 49043 - DNA, 33 bp, Homo sapien
ttgttcactgcagagccaaatattatggtatga

SEQ ID NO: 49044 - DNA, 33 bp, Homo sapien
ttgttcactgcagagcgaaatattatggtatga

SEQ ID NO: 49045 - DNA, 33 bp, Homo sapien
aggaagtgctacttcacgtatttgtgagagttt

SEQ ID NO: 49046 - DNA, 33 bp, Homo sapien
aggaagtgctacttcatgtatttgtgagagttt

SEQ ID NO: 49047 - DNA, 33 bp, Homo sapien
acctcctttgaggtccactgatctagaagcact

SEQ ID NO: 49048 - DNA, 33 bp, Homo sapien
acctcctttgaggtccgctgatctagaagcact

SEQ ID NO: 49049 - DNA, 33 bp, Homo sapien
ggaagatgtggagcagaaaggagagggaactct

SEQ ID NO: 49050 - DNA, 33 bp, Homo sapien
ggaagatgtggagcaggaaggagagggaactct

SEQ ID NO: 49051 - DNA, 33 bp, Homo sapien
aaacaggtccaaagcaagttgagtgtgatggga

SEQ ID NO: 49052 - DNA, 33 bp, Homo sapien
aaacaggtccaaagcaggttgagtgtgatggga

SEQ ID NO: 49053 - DNA, 33 bp, Homo sapien
cgtaaagacacaaatacgaaaaagtgcacctgg

SEQ ID NO: 49054 - DNA, 33 bp, Homo sapien
cgtaaagacacaaatatgaaaaagtgcacctgg

SEQ ID NO: 49055 - DNA, 33 bp, Homo sapien
aaattccaggcacaccaatagcagggagggaac

SEQ ID NO: 49056 - DNA, 33 bp, Homo sapien
aaattccaggcacaccgatagcagggagggaac

SEQ ID NO: 49057 - DNA, 33 bp, Homo sapien
gcccactagtctcagaggggttgtcgtacttgc

SEQ ID NO: 49058 - DNA, 33 bp, Homo sapien
gcccactagtctcagatgggttgtcgtacttgc

SEQ ID NO: 49059 - DNA, 33 bp, Homo sapien
aaatccatttccatcaggtcccagcctcacttt

SEQ ID NO: 49060 - DNA, 33 bp, Homo sapien
aaatccatttccatcatgtcccagcctcacttt

SEQ ID NO: 49061 - DNA, 33 bp, Homo sapien
tggtaacatattaaacaagtggccatctgggtg

SEQ ID NO: 49062 - DNA, 33 bp, Homo sapien
tggtaacatattaaacgagtggccatctgggtg

SEQ ID NO: 49063 - DNA, 33 bp, Homo sapien
gataatctgattctacactttcctctattcaca

SEQ ID NO: 49064 - DNA, 33 bp, Homo sapien
gataatctgattctactctttcctctattcaca

SEQ ID NO: 49065 - DNA, 33 bp, Homo sapien
ttcagttgcagctaaaagactcagcaagcttag

SEQ ID NO: 49066 - DNA, 33 bp, Homo sapien
ttcagttgcagctaaatgactcagcaagcttag

SEQ ID NO: 49067 - DNA, 33 bp, Homo sapien
ggatgaagtgcaaaaacgttcatagcaagagtc

SEQ ID NO: 49068 - DNA, 33 bp, Homo sapien
ggatgaagtgcaaaaatgttcatagcaagagtc

SEQ ID NO: 49069 - DNA, 33 bp, Homo sapien
ttctgcctttaagatacggtgaaaaaacatatg

SEQ ID NO: 49070 - DNA, 33 bp, Homo sapien
ttctgcctttaagatatggtgaaaaaacatatg

SEQ ID NO: 49071 - DNA, 33 bp, Homo sapien
actaatttgtttcactcaagactcacattctct

SEQ ID NO: 49072 - DNA, 33 bp, Homo sapien
actaatttgtttcacttaagactcacattctct

SEQ ID NO: 49073 - DNA, 33 bp, Homo sapien
caaaagttctgggcaacgtagtttttaactttc

SEQ ID NO: 49074 - DNA, 33 bp, Homo sapien
caaaagttctgggcaatgtagtttttaactttc

SEQ ID NO: 49075 - DNA, 33 bp, Homo sapien
tacagatacattccacacaaatttgatttcaaa

SEQ ID NO: 49076 - DNA, 33 bp, Homo sapien
tacagatacattccacgcaaatttgatttcaaa

SEQ ID NO: 49077 - DNA, 33 bp, Homo sapien
taaaatcctttacaagacaagcaaatactgaga

SEQ ID NO: 49078 - DNA, 33 bp, Homo sapien
taaaatcctttacaagccaagcaaatactgaga

SEQ ID NO: 49079 - DNA, 33 bp, Homo sapien; identical to SEQ ID NO: 49077

SEQ ID NO: 49080 - DNA, 33 bp, Homo sapien; identical to SEQ ID NO: 49078

SEQ ID NO: 49081 - DNA, 33 bp, Homo sapien
ttctattccttaaaaccaacggagcccagaaat

SEQ ID NO: 49082 - DNA, 33 bp, Homo sapien
ttctattccttaaaactaacggagcccagaaat

SEQ ID NO: 49083 - DNA, 33 bp, Homo sapien
tcagatttacactaagaaatggcaacgtttgcc

SEQ ID NO: 49084 - DNA, 33 bp, Homo sapien
tcagatttacactaaggaatggcaacgtttgcc

SEQ ID NO: 49085 - DNA, 33 bp, Homo sapien
agaactctgataaacaatatgtttggcattctg

SEQ ID NO: 49086 - DNA, 33 bp, Homo sapien
agaactctgataaacagtatgtttggcattctg

SEQ ID NO: 49087 - DNA, 33 bp, Homo sapien
tcatcaatgttcttcacgatgatggttttgcat

SEQ ID NO: 49088 - DNA, 33 bp, Homo sapien
tcatcaatgttcttcatgatgatggttttgcat

SEQ ID NO: 49089 - DNA, 33 bp, Homo sapien
tcaaagagaggtaaaacctgggcaagaacaagt

SEQ ID NO: 49090 - DNA, 33 bp, Homo sapien
tcaaagagaggtaaaagctgggcaagaacaagt

SEQ ID NO: 49091 - DNA, 33 bp, Homo sapien
atcaaatatgttttctcaccaaagggatttagg

SEQ ID NO: 49092 - DNA, 33 bp, Homo sapien
atcaaatatgttttctgaccaaagggatttagg

SEQ ID NO: 49093 - DNA, 33 bp, Homo sapien
tgtgtaagatctggaaagaaaagagagaccatc

SEQ ID NO: 49094 - DNA, 33 bp, Homo sapien
tgtgtaagatctggaacgaaaagagagaccatc

SEQ ID NO: 49095 - DNA, 33 bp, Homo sapien
tcatggcacaagaaacaagcaattaaaatggaa

SEQ ID NO: 49096 - DNA, 33 bp, Homo sapien
tcatggcacaagaaacgagcaattaaaatggaa

SEQ ID NO: 49097 - DNA, 33 bp, Homo sapien
aggcttcagttcctcaccacatggatctctcca

SEQ ID NO: 49098 - DNA, 33 bp, Homo sapien
aggcttcagttcctcagcacatggatctctcca

SEQ ID NO: 49099 - DNA, 33 bp, Homo sapien
ggaacctgaacccaagaaatcctttgcattggt

SEQ ID NO: 49100 - DNA, 33 bp, Homo sapien
ggaacctgaacccaagcaatcctttgcattggt

SEQ ID NO: 49101 - DNA, 33 bp, Homo sapien
tgttctccaggaacacagcccctccaaagcact

SEQ ID NO: 49102 - DNA, 33 bp, Homo sapien
tgttctccaggaacacggcccctccaaagcact

SEQ ID NO: 49103 - DNA, 33 bp, Homo sapien
cataaattcctatcaaggttaccagccctcccc

SEQ ID NO: 49104 - DNA, 33 bp, Homo sapien
cataaattcctatcaatgttaccagccctcccc

SEQ ID NO: 49105 - DNA, 33 bp, Homo sapien
tcaaagcaatttaagcaatttattggcacaaga

SEQ ID NO: 49106 - DNA, 33 bp, Homo sapien
tcaaagcaatttaagcgatttattggcacaaga

SEQ ID NO: 49107 - DNA, 33 bp, Homo sapien
gggaccccatgggaaacattaatccatgcacca

SEQ ID NO: 49108 - DNA, 33 bp, Homo sapien
gggaccccatgggaaatattaatccatgcacca

SEQ ID NO: 49109 - DNA, 33 bp, Homo sapien
tgaaacatcagccagaacatagtaagagggggc

SEQ ID NO: 49110 - DNA, 33 bp, Homo sapien
tgaaacatcagccagagcatagtaagagggggc

SEQ ID NO: 49111 - DNA, 33 bp, Homo sapien
ggtctggccattgttacctggttctaagaaaat

SEQ ID NO: 49112 - DNA, 33 bp, Homo sapien
ggtctggccattgttatctggttctaagaaaat

SEQ ID NO: 49113 - DNA, 33 bp, Homo sapien
atactcattactctaacagctagaaagcatcag

SEQ ID NO: 49114 - DNA, 33 bp, Homo sapien
atactcattactctaagagctagaaagcatcag

SEQ ID NO: 49115 - DNA, 33 bp, Homo sapien
ccgtggatgaaacctcactgggctgcaggcatc

SEQ ID NO: 49116 - DNA, 33 bp, Homo sapien
ccgtggatgaaacctcgctgggctgcaggcatc

SEQ ID NO: 49117 - DNA, 33 bp, Homo sapien
aaaactagatgctacaatcatatatctgtttaa

SEQ ID NO: 49118 - DNA, 33 bp, Homo sapien
aaaactagatgctacagtcatatatctgtttaa

SEQ ID NO: 49119 - DNA, 33 bp, Homo sapien
gagccgggatttttccaaatgaccaattactaa

SEQ ID NO: 49120 - DNA, 33 bp, Homo sapien
gagccgggatttttccgaatgaccaattactaa

SEQ ID NO: 49121 - DNA, 33 bp, Homo sapien
ctcaataaatgcctgaggaatgaatgacggaat

SEQ ID NO: 49122 - DNA, 33 bp, Homo sapien
ctcaataaatgcctgatgaatgaatgacggaat

SEQ ID NO: 49123 - DNA, 33 bp, Homo sapien
gtgtttcctgcaaaacagtgcccatctcaacca

SEQ ID NO: 49124 - DNA, 33 bp, Homo sapien
gtgtttcctgcaaaacggtgcccatctcaacca

SEQ ID NO: 49125 - DNA, 33 bp, Homo sapien
tgaagttgtgcaagaacgtcctgttggctgggg

SEQ ID NO: 49126 - DNA, 33 bp, Homo sapien
tgaagttgtgcaagaatgtcctgttggctgggg

SEQ ID NO: 49127 - DNA, 33 bp, Homo sapien
gtgaggattcttgtcaatattcacacctgcatg

SEQ ID NO: 49128 - DNA, 33 bp, Homo sapien
gtgaggattcttgtcattattcacacctgcatg

SEQ ID NO: 49129 - DNA, 33 bp, Homo sapien
ctttttgaaggcaaagactacaacttatcttcc

SEQ ID NO: 49130 - DNA, 33 bp, Homo sapien
ctttttgaaggcaaagtctacaacttatcttcc

SEQ ID NO: 49131 - DNA, 33 bp, Homo sapien
tttctatctccttagaagtcttctcaacctcct

SEQ ID NO: 49132 - DNA, 33 bp, Homo sapien
tttctatctccttagaggtcttctcaacctcct

SEQ ID NO: 49133 - DNA, 33 bp, Homo sapien
tcctgagctgaaagagaagagaaggggtgtgtg

SEQ ID NO: 49134 - DNA, 33 bp, Homo sapien
tcctgagctgaaagaggagagaaggggtgtgtg

SEQ ID NO: 49135 - DNA, 33 bp, Homo sapien
ggagttcaggtgcaacagcttggaatgcagaga

SEQ ID NO: 49136 - DNA, 33 bp, Homo sapien
ggagttcaggtgcaacggcttggaatgcagaga

SEQ ID NO: 49137 - DNA, 33 bp, Homo sapien
cttagaatagaagcaaataccagtcaaagcagg

SEQ ID NO: 49138 - DNA, 33 bp, Homo sapien
cttagaatagaagcaactaccagtcaaagcagg

SEQ ID NO: 49139 - DNA, 33 bp, Homo sapien
gtttataaaagattgccgagatgtagttgactg

SEQ ID NO: 49140 - DNA, 33 bp, Homo sapien
gtttataaaagattgctgagatgtagttgactg

SEQ ID NO: 49141 - DNA, 33 bp, Homo sapien
ggcccatgaagtagaacagagtttcaatttctt

SEQ ID NO: 49142 - DNA, 33 bp, Homo sapien
ggcccatgaagtagaagagagtttcaatttctt

SEQ ID NO: 49143 - DNA, 33 bp, Homo sapien
ccagccctgagatggaagacttaggtgtgagcc

SEQ ID NO: 49144 - DNA, 33 bp, Homo sapien
ccagccctgagatggatgacttaggtgtgagcc

SEQ ID NO: 49145 - DNA, 33 bp, Homo sapien
tccagctgctgtgacaatgaggtccctctctac

SEQ ID NO: 49146 - DNA, 33 bp, Homo sapien
tccagctgctgtgacattgaggtccctctctac

SEQ ID NO: 49147 - DNA, 33 bp, Homo sapien
acttaaggtggcgacacacctcttgcaaggtga

SEQ ID NO: 49148 - DNA, 33 bp, Homo sapien
acttaaggtggcgacatacctcttgcaaggtga

SEQ ID NO: 49149 - DNA, 33 bp, Homo sapien
atgcccaaatcctggaaaagcagcagatccaaa

SEQ ID NO: 49150 - DNA, 33 bp, Homo sapien
atgcccaaatcctggagaagcagcagatccaaa

SEQ ID NO: 49151 - DNA, 33 bp, Homo sapien
tgtgtttcacaaagcaacgtggccctaaacagc

SEQ ID NO: 49152 - DNA, 33 bp, Homo sapien
tgtgtttcacaaagcagcgtggccctaaacagc

SEQ ID NO: 49153 - DNA, 33 bp, Homo sapien
gccacttgtcctccaacgtgttttcaggactag

SEQ ID NO: 49154 - DNA, 33 bp, Homo sapien
gccacttgtcctccaatgtgttttcaggactag

SEQ ID NO: 49155 - DNA, 33 bp, Homo sapien
ggcactgcaccttttcccttaattacatacaaa

SEQ ID NO: 49156 - DNA, 33 bp, Homo sapien
ggcactgcaccttttcgcttaattacatacaaa

SEQ ID NO: 49157 - DNA, 33 bp, Homo sapien
tcaatattgttgggtcaaatacacacaacattt

SEQ ID NO: 49158 - DNA, 33 bp, Homo sapien
tcaatattgttgggtcgaatacacacaacattt

SEQ ID NO: 49159 - DNA, 33 bp, Homo sapien
gctctgaggtgccagaaccatagggcggggtcc

SEQ ID NO: 49160 - DNA, 33 bp, Homo sapien
gctctgaggtgccagagccatagggcggggtcc

SEQ ID NO: 49161 - DNA, 33 bp, Homo sapien
gcagagttaaactgacgcccccaaacacacaca

SEQ ID NO: 49162 - DNA, 33 bp, Homo sapien
gcagagttaaactgactcccccaaacacacaca

SEQ ID NO: 49163 - DNA, 33 bp, Homo sapien
ggttttcagggaaacaatcctctatcaggagta

SEQ ID NO: 49164 - DNA, 33 bp, Homo sapien
ggttttcagggaaacagtcctctatcaggagta

SEQ ID NO: 49165 - DNA, 33 bp, Homo sapien
gctctcttaagctctcagaaggcagggaaccca

SEQ ID NO: 49166 - DNA, 33 bp, Homo sapien
gctctcttaagctctcggaaggcagggaaccca

SEQ ID NO: 49167 - DNA, 33 bp, Homo sapien
ggctcatgtaacacccaaggaagctgctctccg

SEQ ID NO: 49168 - DNA, 33 bp, Homo sapien
ggctcatgtaacacccgaggaagctgctctccg

SEQ ID NO: 49169 - DNA, 33 bp, Homo sapien
agatgtctgcttggcaccgttaagcacaggtgt

SEQ ID NO: 49170 - DNA, 33 bp, Homo sapien
agatgtctgcttggcatcgttaagcacaggtgt

SEQ ID NO: 49171 - DNA, 33 bp, Homo sapien
tcacggtagacacatagattgtactgctgcatg

SEQ ID NO: 49172 - DNA, 33 bp, Homo sapien
tcacggtagacacatatattgtactgctgcatg

SEQ ID NO: 49173 - DNA, 33 bp, Homo sapien
tgagttaagcacctaaaaggagtttgcttccat

SEQ ID NO: 49174 - DNA, 33 bp, Homo sapien
tgagttaagcacctaacaggagtttgcttccat

SEQ ID NO: 49175 - DNA, 33 bp, Homo sapien
ccagagagagctagggaagaatatcctgggagc

SEQ ID NO: 49176 - DNA, 33 bp, Homo sapien
ccagagagagctagggcagaatatcctgggagc

SEQ ID NO: 49177 - DNA, 33 bp, Homo sapien
tcaacaatttgcagacgcttacagttctctcca

SEQ ID NO: 49178 - DNA, 33 bp, Homo sapien
tcaacaatttgcagactcttacagttctctcca

SEQ ID NO: 49179 - DNA, 33 bp, Homo sapien
cttcatctgttggttggaatgcagcacatatga

SEQ ID NO: 49180 - DNA, 33 bp, Homo sapien
cttcatctgttggttgtaatgcagcacatatga

SEQ ID NO: 49181 - DNA, 33 bp, Homo sapien
ttagaaaggaccttagaaatcatctatcccctc

SEQ ID NO: 49182 - DNA, 33 bp, Homo sapien
ttagaaaggaccttaggaatcatctatcccctc

SEQ ID NO: 49183 - DNA, 33 bp, Homo sapien
atgtgaccattcgacacaggtgtggattttccg

SEQ ID NO: 49184 - DNA, 33 bp, Homo sapien
atgtgaccattcgacataggtgtggattttccg

SEQ ID NO: 49185 - DNA, 33 bp, Homo sapien
gtcagtccagaattaacggtgtgctcggggatg

SEQ ID NO: 49186 - DNA, 33 bp, Homo sapien
gtcagtccagaattaatggtgtgctcggggatg

SEQ ID NO: 49187 - DNA, 33 bp, Homo sapien
tggagcagatggtagggattaaaggaatagcca

SEQ ID NO: 49188 - DNA, 33 bp, Homo sapien
tggagcagatggtaggtattaaaggaatagcca

SEQ ID NO: 49189 - DNA, 33 bp, Homo sapien
taaattcaatttgcaacataaacaataaaaaag

SEQ ID NO: 49190 - DNA, 33 bp, Homo sapien
taaattcaatttgcaatataaacaataaaaaag

SEQ ID NO: 49191 - DNA, 33 bp, Homo sapien
gggcccttttagtgcacgatgacagaggccttt

SEQ ID NO: 49192 - DNA, 33 bp, Homo sapien
gggcccttttagtgcatgatgacagaggccttt

SEQ ID NO: 49193 - DNA, 33 bp, Homo sapien
gaccacaaggcataggaaagggaagtgtgctgg

SEQ ID NO: 49194 - DNA, 33 bp, Homo sapien
gaccacaaggcatagggaagggaagtgtgctgg

SEQ ID NO: 49195 - DNA, 33 bp, Homo sapien
aaggatgaaatgagacaatatgtgaaaacacaa

SEQ ID NO: 49196 - DNA, 33 bp, Homo sapien
aaggatgaaatgagacgatatgtgaaaacacaa

SEQ ID NO: 49197 - DNA, 33 bp, Homo sapien
ggaggcaattgcttcccatcatcaggaaaggtc

SEQ ID NO: 49198 - DNA, 33 bp, Homo sapien
ggaggcaattgcttcctatcatcaggaaaggtc

SEQ ID NO: 49199 - DNA, 33 bp, Homo sapien
caaattctccttaaaaatcagaatatctggcaa

SEQ ID NO: 49200 - DNA, 33 bp, Homo sapien
caaattctccttaaaagtcagaatatctggcaa

SEQ ID NO: 49201 - DNA, 33 bp, Homo sapien
caatgcttcaaaaaaaaaatgatatccttgcaa

SEQ ID NO: 49202 - DNA, 33 bp, Homo sapien
caatgcttcaaaaaaataatgatatccttgcaa

SEQ ID NO: 49203 - DNA, 33 bp, Homo sapien
agcctgtatatatttgcataaggtccattaact

SEQ ID NO: 49204 - DNA, 33 bp, Homo sapien
agcctgtatatatttgtataaggtccattaact

SEQ ID NO: 49205 - DNA, 33 bp, Homo sapien
gctaaaggacttaaagaatactggacaatccat

SEQ ID NO: 49206 - DNA, 33 bp, Homo sapien
gctaaaggacttaaaggatactggacaatccat

SEQ ID NO: 49207 - DNA, 33 bp, Homo sapien
attagaacatagctaccagggacaatgaaatag

SEQ ID NO: 49208 - DNA, 33 bp, Homo sapien
attagaacatagctactagggacaatgaaatag

SEQ ID NO: 49209 - DNA, 33 bp, Homo sapien
tctagaactgagaacaaggccaaaaatgtcacc

SEQ ID NO: 49210 - DNA, 33 bp, Homo sapien
tctagaactgagaacagggccaaaaatgtcacc

SEQ ID NO: 49211 - DNA, 33 bp, Homo sapien
aacccagaaagctccaacattttctaacctctt

SEQ ID NO: 49212 - DNA, 33 bp, Homo sapien
aacccagaaagctccagcattttctaacctctt

SEQ ID NO: 49213 - DNA, 33 bp, Homo sapien
gccagtggctcatgaacggccccaagcccctag

SEQ ID NO: 49214 - DNA, 33 bp, Homo sapien
gccagtggctcatgaatggccccaagcccctag

SEQ ID NO: 49215 - DNA, 33 bp, Homo sapien
aagtggaggcaagaaaaggatcctagttttcaa

SEQ ID NO: 49216 - DNA, 33 bp, Homo sapien
aagtggaggcaagaaagggatcctagttttcaa

SEQ ID NO: 49217 - DNA, 33 bp, Homo sapien
acaaaacagtaaatctaagagaaagagacaaat

SEQ ID NO: 49218 - DNA, 33 bp, Homo sapien
acaaaacagtaaatctgagagaaagagacaaat

SEQ ID NO: 49219 - DNA, 33 bp, Homo sapien
gaaggagctgttctggcactgtaaacttgaacc

SEQ ID NO: 49220 - DNA, 33 bp, Homo sapien
gaaggagctgttctggtactgtaaacttgaacc

SEQ ID NO: 49221 - DNA, 33 bp, Homo sapien
gatttatttgatctcacatgggcatagtgtaag

SEQ ID NO: 49222 - DNA, 33 bp, Homo sapien
gatttatttgatctcagatgggcatagtgtaag

SEQ ID NO: 49223 - DNA, 33 bp, Homo sapien
tctagttttacttgagcatccgtgttaagagag

SEQ ID NO: 49224 - DNA, 33 bp, Homo sapien
tctagttttacttgagtatccgtgttaagagag

SEQ ID NO: 49225 - DNA, 33 bp, Homo sapien
aattcaacctaatagtaaaaggagtgagctgga

SEQ ID NO: 49226 - DNA, 33 bp, Homo sapien
aattcaacctaatagtgaaaggagtgagctgga

SEQ ID NO: 49227 - DNA, 33 bp, Homo sapien
aatatggagctccaaaaagagtgtaggattgaa

SEQ ID NO: 49228 - DNA, 33 bp, Homo sapien
aatatggagctccaaagagagtgtaggattgaa

SEQ ID NO: 49229 - DNA, 33 bp, Homo sapien
tgtctcgttcatatcccatgctcagtgaattag

SEQ ID NO: 49230 - DNA, 33 bp, Homo sapien
tgtctcgttcatatccgatgctcagtgaattag

SEQ ID NO: 49231 - DNA, 33 bp, Homo sapien
acatctgagcttcaggaaaggaaaaggaagccc

SEQ ID NO: 49232 - DNA, 33 bp, Homo sapien
acatctgagcttcagggaaggaaaaggaagccc

SEQ ID NO: 49233 - DNA, 33 bp, Homo sapien
tgactctgggcaaatcacatatctgggcctcag

SEQ ID NO: 49234 - DNA, 33 bp, Homo sapien
tgactctgggcaaatcgcatatctgggcctcag

SEQ ID NO: 49235 - DNA, 33 bp, Homo sapien
ttgagacttcatgtgacataatgtggaggagag

SEQ ID NO: 49236 - DNA, 33 bp, Homo sapien
ttgagacttcatgtgatataatgtggaggagag

SEQ ID NO: 49237 - DNA, 33 bp, Homo sapien
cctcctgggagaagaaatgtccttaagttgtcc

SEQ ID NO: 49238 - DNA, 33 bp, Homo sapien
cctcctgggagaagaagtgtccttaagttgtcc

SEQ ID NO: 49239 - DNA, 33 bp, Homo sapien
acacagggattcgaaacggatcgcctcactgtg

SEQ ID NO: 49240 - DNA, 33 bp, Homo sapien
acacagggattcgaaatggatcgcctcactgtg

SEQ ID NO: 49241 - DNA, 33 bp, Homo sapien
tgaggaagtgaggacacgccgagtgacaagaga

SEQ ID NO: 49242 - DNA, 33 bp, Homo sapien
tgaggaagtgaggacatgccgagtgacaagaga

SEQ ID NO: 49243 - DNA, 33 bp, Homo sapien
gagcactggcatgaaggatcccagctcctgaac

SEQ ID NO: 49244 - DNA, 33 bp, Homo sapien
gagcactggcatgaagtatcccagctcctgaac

SEQ ID NO: 49245 - DNA, 33 bp, Homo sapien
caacaatccttaaaaaataatgagatcggtact

SEQ ID NO: 49246 - DNA, 33 bp, Homo sapien
caacaatccttaaaaattaatgagatcggtact

SEQ ID NO: 49247 - DNA, 33 bp, Homo sapien
gcctcatcttcaggtaccatgtttttaattgat

SEQ ID NO: 49248 - DNA, 33 bp, Homo sapien
gcctcatcttcaggtatcatgtttttaattgat

SEQ ID NO: 49249 - DNA, 33 bp, Homo sapien
gcttcacggaggaagaagtcatagctgcaggaa

SEQ ID NO: 49250 - DNA, 33 bp, Homo sapien
gcttcacggaggaagaggtcatagctgcaggaa

SEQ ID NO: 49251 - DNA, 33 bp, Homo sapien
agttgtgtgacactgacggtcaataatgtagga

SEQ ID NO: 49252 - DNA, 33 bp, Homo sapien
agttgtgtgacactgatggtcaataatgtagga

SEQ ID NO: 49253 - DNA, 33 bp, Homo sapien
gccatagttcaggcaaagaatgatgacctgaac

SEQ ID NO: 49254 - DNA, 33 bp, Homo sapien
gccatagttcaggcaaggaatgatgacctgaac

SEQ ID NO: 49255 - DNA, 33 bp, Homo sapien
agatagggagtaagggaaagaaagctatctcct

SEQ ID NO: 49256 - DNA, 33 bp, Homo sapien
agatagggagtaaggggaagaaagctatctcct

SEQ ID NO: 49257 - DNA, 33 bp, Homo sapien
tgaggcacctggttacgcttcacctcttgtttc

SEQ ID NO: 49258 - DNA, 33 bp, Homo sapien
tgaggcacctggttactcttcacctcttgtttc

SEQ ID NO: 49259 - DNA, 33 bp, Homo sapien
ttgtgatatgataagaagtatagatattggtct

SEQ ID NO: 49260 - DNA, 33 bp, Homo sapien
ttgtgatatgataagaggtatagatattggtct

SEQ ID NO: 49261 - DNA, 33 bp, Homo sapien
tatcgctgctgagatcaaacacttcatccatct

SEQ ID NO: 49262 - DNA, 33 bp, Homo sapien
tatcgctgctgagatcgaacacttcatccatct

SEQ ID NO: 49263 - DNA, 33 bp, Homo sapien
caacttcacctcggagaagcagaggagctcagc

SEQ ID NO: 49264 - DNA, 33 bp, Homo sapien
caacttcacctcggagcagcagaggagctcagc

SEQ ID NO: 49265 - DNA, 33 bp, Homo sapien
ctgcatcccaattaacagaagactcacatcaag

SEQ ID NO: 49266 - DNA, 33 bp, Homo sapien
ctgcatcccaattaacggaagactcacatcaag

SEQ ID NO: 49267 - DNA, 33 bp, Homo sapien
agagctcagatctctgcataggactgactgatg

SEQ ID NO: 49268 - DNA, 33 bp, Homo sapien
agagctcagatctctgtataggactgactgatg

SEQ ID NO: 49269 - DNA, 33 bp, Homo sapien
aagttgaagcatctaccagaaggccttgcgcag

SEQ ID NO: 49270 - DNA, 33 bp, Homo sapien
aagttgaagcatctactagaaggccttgcgcag

SEQ ID NO: 49271 - DNA, 33 bp, Homo sapien
aatgtcagtataaaagactttacaagattaagg

SEQ ID NO: 49272 - DNA, 33 bp, Homo sapien
aatgtcagtataaaagcctttacaagattaagg

SEQ ID NO: 49273 - DNA, 33 bp, Homo sapien
tgaatctaagaacaaacagtacacagacggcat

SEQ ID NO: 49274 - DNA, 33 bp, Homo sapien
tgaatctaagaacaaagagtacacagacggcat

SEQ ID NO: 49275 - DNA, 33 bp, Homo sapien
gtgccttttaatcagaaccatgccgtctgtgta

SEQ ID NO: 49276 - DNA, 33 bp, Homo sapien
gtgccttttaatcagagccatgccgtctgtgta

SEQ ID NO: 49277 - DNA, 33 bp, Homo sapien
gtcttgacgcagcctcaatccatcttgcaggag

SEQ ID NO: 49278 - DNA, 33 bp, Homo sapien
gtcttgacgcagcctcgatccatcttgcaggag

SEQ ID NO: 49279 - DNA, 33 bp, Homo sapien
gaggaaagaagccttacggtgtacagaatcccc

SEQ ID NO: 49280 - DNA, 33 bp, Homo sapien
gaggaaagaagccttagggtgtacagaatcccc

SEQ ID NO: 49281 - DNA, 33 bp, Homo sapien
cagcagggagagaggaaacagtgtcagaagggg

SEQ ID NO: 49282 - DNA, 33 bp, Homo sapien
cagcagggagagaggagacagtgtcagaagggg

SEQ ID NO: 49283 - DNA, 33 bp, Homo sapien
tgttaaacactggtaaatctgctaaatttgtgt

SEQ ID NO: 49284 - DNA, 33 bp, Homo sapien
tgttaaacactggtaagtctgctaaatttgtgt

SEQ ID NO: 49285 - DNA, 33 bp, Homo sapien
ctaaggccagtgccaacgtctcctattaaacat

SEQ ID NO: 49286 - DNA, 33 bp, Homo sapien
ctaaggccagtgccaatgtctcctattaaacat

SEQ ID NO: 49287 - DNA, 33 bp, Homo sapien
agtttaactctggatacgtaggaaggaaggatc

SEQ ID NO: 49288 - DNA, 33 bp, Homo sapien
agtttaactctggatatgtaggaaggaaggatc

SEQ ID NO: 49289 - DNA, 33 bp, Homo sapien
tgagcatggaacttcacaaggaatagagaggca

SEQ ID NO: 49290 - DNA, 33 bp, Homo sapien
tgagcatggaacttcataaggaatagagaggca

SEQ ID NO: 49291 - DNA, 33 bp, Homo sapien
agaacaaacatgggacacatcagggttaaaatc

SEQ ID NO: 49292 - DNA, 33 bp, Homo sapien
agaacaaacatgggacgcatcagggttaaaatc

SEQ ID NO: 49293 - DNA, 33 bp, Homo sapien
acgtaaatgaagaacaataacagactgtgctga

SEQ ID NO: 49294 - DNA, 33 bp, Homo sapien
acgtaaatgaagaacagtaacagactgtgctga

SEQ ID NO: 49295 - DNA, 33 bp, Homo sapien
tacacatggacggcaacggacaaaagtagatac

SEQ ID NO: 49296 - DNA, 33 bp, Homo sapien
tacacatggacggcaatggacaaaagtagatac

SEQ ID NO: 49297 - DNA, 33 bp, Homo sapien
cagggctccactctccagaatcagtaaaagaag

SEQ ID NO: 49298 - DNA, 33 bp, Homo sapien
cagggctccactctccggaatcagtaaaagaag

SEQ ID NO: 49299 - DNA, 33 bp, Homo sapien
ctgatgttctccagtaactcagtcttcagctct

SEQ ID NO: 49300 - DNA, 33 bp, Homo sapien
ctgatgttctccagtagctcagtcttcagctct

SEQ ID NO: 49301 - DNA, 33 bp, Homo sapien
gaattacttcaagggaatatagagaaatagctt

SEQ ID NO: 49302 - DNA, 33 bp, Homo sapien
gaattacttcaagggactatagagaaatagctt

SEQ ID NO: 49303 - DNA, 33 bp, Homo sapien
aataaacgtgcactagaaattttaaatactggt

SEQ ID NO: 49304 - DNA, 33 bp, Homo sapien
aataaacgtgcactaggaattttaaatactggt

SEQ ID NO: 49305 - DNA, 33 bp, Homo sapien
gtccctagatcatgcactcatagtatttggccc

SEQ ID NO: 49306 - DNA, 33 bp, Homo sapien
gtccctagatcatgcattcatagtatttggccc

SEQ ID NO: 49307 - DNA, 33 bp, Homo sapien
aaagttttcactcatacaggttcataatcaaag

SEQ ID NO: 49308 - DNA, 33 bp, Homo sapien
aaagttttcactcatataggttcataatcaaag

SEQ ID NO: 49309 - DNA, 33 bp, Homo sapien
agtacttggaggggtccaacatatgacactgtc

SEQ ID NO: 49310 - DNA, 33 bp, Homo sapien
agtacttggaggggtcgaacatatgacactgtc

SEQ ID NO: 49311 - DNA, 33 bp, Homo sapien
attttacaaaagaaaaactcaaaagcaggtggt

SEQ ID NO: 49312 - DNA, 33 bp, Homo sapien
attttacaaaagaaaatctcaaaagcaggtggt

SEQ ID NO: 49313 - DNA, 33 bp, Homo sapien
ttgcacatcattgatacagctttgaataagtta

SEQ ID NO: 49314 - DNA, 33 bp, Homo sapien
ttgcacatcattgatagagctttgaataagtta

SEQ ID NO: 49315 - DNA, 33 bp, Homo sapien
tagtgttgcaatgaaagtggtaggattcaggat

SEQ ID NO: 49316 - DNA, 33 bp, Homo sapien
tagtgttgcaatgaaattggtaggattcaggat

SEQ ID NO: 49317 - DNA, 33 bp, Homo sapien
tttgaggttgtgatgactattatcccttgtgta

SEQ ID NO: 49318 - DNA, 33 bp, Homo sapien
tttgaggttgtgatgattattatcccttgtgta

SEQ ID NO: 49319 - DNA, 33 bp, Homo sapien
cagttgatgtgatggaaaatgaagagaaaaagc

SEQ ID NO: 49320 - DNA, 33 bp, Homo sapien
cagttgatgtgatggagaatgaagagaaaaagc

SEQ ID NO: 49321 - DNA, 33 bp, Homo sapien
caggaacttagaactcaatgttattaagagagc

SEQ ID NO: 49322 - DNA, 33 bp, Homo sapien
caggaacttagaactccatgttattaagagagc

SEQ ID NO: 49323 - DNA, 33 bp, Homo sapien
aagaagtgcacccaaaagaccataggcaatagt

SEQ ID NO: 49324 - DNA, 33 bp, Homo sapien
aagaagtgcacccaaaggaccataggcaatagt

SEQ ID NO: 49325 - DNA, 33 bp, Homo sapien
aggctgctgtagcccccctgtaataaaacctaa

SEQ ID NO: 49326 - DNA, 33 bp, Homo sapien
aggctgctgtagcccctctgtaataaaacctaa

SEQ ID NO: 49327 - DNA, 33 bp, Homo sapien
ctttggagcagaacaacacaaatcgggagcaca

SEQ ID NO: 49328 - DNA, 33 bp, Homo sapien
ctttggagcagaacaatacaaatcgggagcaca

SEQ ID NO: 49329 - DNA, 33 bp, Homo sapien
atgtatctgctgggaaaacatccatagagggaa

SEQ ID NO: 49330 - DNA, 33 bp, Homo sapien
atgtatctgctgggaagacatccatagagggaa

SEQ ID NO: 49331 - DNA, 33 bp, Homo sapien
agggaagttttcactaataagtgtgaggactgt

SEQ ID NO: 49332 - DNA, 33 bp, Homo sapien
agggaagttttcactagtaagtgtgaggactgt

SEQ ID NO: 49333 - DNA, 33 bp, Homo sapien
ctacttccaacagtccaaggttggcttctctgc

SEQ ID NO: 49334 - DNA, 33 bp, Homo sapien
ctacttccaacagtccgaggttggcttctctgc

SEQ ID NO: 49335 - DNA, 33 bp, Homo sapien
ccctaagtgctaggacagtcactcccctaaatg

SEQ ID NO: 49336 - DNA, 33 bp, Homo sapien
ccctaagtgctaggacggtcactcccctaaatg

SEQ ID NO: 49337 - DNA, 33 bp, Homo sapien
acttgggatatgctgcaattattccttttatta

SEQ ID NO: 49338 - DNA, 33 bp, Homo sapien
acttgggatatgctgcgattattccttttatta

SEQ ID NO: 49339 - DNA, 33 bp, Homo sapien
aaacagtatctcatcccaatatgtacctttgag

SEQ ID NO: 49340 - DNA, 33 bp, Homo sapien
aaacagtatctcatcctaatatgtacctttgag

SEQ ID NO: 49341 - DNA, 33 bp, Homo sapien
agaactacatctactaaatttgggggcagctac

SEQ ID NO: 49342 - DNA, 33 bp, Homo sapien
agaactacatctactacatttgggggcagctac

SEQ ID NO: 49343 - DNA, 33 bp, Homo sapien
aaacagctattcagcgacagggaaatactgaca

SEQ ID NO: 49344 - DNA, 33 bp, Homo sapien
aaacagctattcagcggcagggaaatactgaca

SEQ ID NO: 49345 - DNA, 33 bp, Homo sapien
tctatggcctgagaagaaggtgaatatttcggt

SEQ ID NO: 49346 - DNA, 33 bp, Homo sapien
tctatggcctgagaaggaggtgaatatttcggt

SEQ ID NO: 49347 - DNA, 33 bp, Homo sapien
gcagtcaggagtaacacggactgtgccagagag

SEQ ID NO: 49348 - DNA, 33 bp, Homo sapien
gcagtcaggagtaacatggactgtgccagagag

SEQ ID NO: 49349 - DNA, 33 bp, Homo sapien
acgggagcaaaggaacagcagtcaggagtaaca

SEQ ID NO: 49350 - DNA, 33 bp, Homo sapien
acgggagcaaaggaacggcagtcaggagtaaca

SEQ ID NO: 49351 - DNA, 33 bp, Homo sapien
tctgcattgtcttgaaagatgaataggactcgt

SEQ ID NO: 49352 - DNA, 33 bp, Homo sapien
tctgcattgtcttgaaggatgaataggactcgt

SEQ ID NO: 49353 - DNA, 33 bp, Homo sapien
gtattggaactagatcacaggttacacacatat

SEQ ID NO: 49354 - DNA, 33 bp, Homo sapien
gtattggaactagatcgcaggttacacacatat

SEQ ID NO: 49355 - DNA, 33 bp, Homo sapien
caccctacaaaaggtaccaatttatattcacac

SEQ ID NO: 49356 - DNA, 33 bp, Homo sapien
caccctacaaaaggtatcaatttatattcacac

SEQ ID NO: 49357 - DNA, 33 bp, Homo sapien
ttagtattagtatagccattccaactttatttt

SEQ ID NO: 49358 - DNA, 33 bp, Homo sapien
ttagtattagtatagcgattccaactttatttt

SEQ ID NO: 49359 - DNA, 33 bp, Homo sapien
ttcagtcttgaaggatcaacaaaactttccagg

SEQ ID NO: 49360 - DNA, 33 bp, Homo sapien
ttcagtcttgaaggatgaacaaaactttccagg

SEQ ID NO: 49361 - DNA, 33 bp, Homo sapien
tggcctgaagcttttaactaaggctgggaatcc

SEQ ID NO: 49362 - DNA, 33 bp, Homo sapien
tggcctgaagcttttacctaaggctgggaatcc

SEQ ID NO: 49363 - DNA, 33 bp, Homo sapien
gagactttgggaaaagcaagagcactgaagtca

SEQ ID NO: 49364 - DNA, 33 bp, Homo sapien
gagactttgggaaaaggaagagcactgaagtca

SEQ ID NO: 49365 - DNA, 33 bp, Homo sapien
aatgagcaatcagaccaaactggaatgacagta

SEQ ID NO: 49366 - DNA, 33 bp, Homo sapien
aatgagcaatcagaccgaactggaatgacagta

SEQ ID NO: 49367 - DNA, 33 bp, Homo sapien
gacactcactgacttacgggtcagcacaactca

SEQ ID NO: 49368 - DNA, 33 bp, Homo sapien
gacactcactgacttatgggtcagcacaactca

SEQ ID NO: 49369 - DNA, 33 bp, Homo sapien
ggtttctccatgagaccgctctggacactggtt

SEQ ID NO: 49370 - DNA, 33 bp, Homo sapien
ggtttctccatgagactgctctggacactggtt

SEQ ID NO: 49371 - DNA, 33 bp, Homo sapien
gttggagtaaaggtaacgatacaaagcaaatcc

SEQ ID NO: 49372 - DNA, 33 bp, Homo sapien
gttggagtaaaggtaatgatacaaagcaaatcc

SEQ ID NO: 49373 - DNA, 33 bp, Homo sapien
actttcctcactgtccacctcatttctctctcc

SEQ ID NO: 49374 - DNA, 33 bp, Homo sapien
actttcctcactgtccgcctcatttctctctcc

SEQ ID NO: 49375 - DNA, 33 bp, Homo sapien
gaaatctcaactatcccctgaaattcctatggc

SEQ ID NO: 49376 - DNA, 33 bp, Homo sapien
gaaatctcaactatccgctgaaattcctatggc

SEQ ID NO: 49377 - DNA, 33 bp, Homo sapien
agatttccaagctccacagtgacactgttaagg

SEQ ID NO: 49378 - DNA, 33 bp, Homo sapien
agatttccaagctccatagtgacactgttaagg

SEQ ID NO: 49379 - DNA, 33 bp, Homo sapien
tctggaccagtaatgaactcctaagatactgac

SEQ ID NO: 49380 - DNA, 33 bp, Homo sapien
tctggaccagtaatgacctcctaagatactgac

SEQ ID NO: 49381 - DNA, 33 bp, Homo sapien
taccgtctgtgtaccagatagcacagcatagta

SEQ ID NO: 49382 - DNA, 33 bp, Homo sapien
taccgtctgtgtaccatatagcacagcatagta

SEQ ID NO: 49383 - DNA, 33 bp, Homo sapien
accaggctcttgagtacggatctgtgtcagtaa

SEQ ID NO: 49384 - DNA, 33 bp, Homo sapien
accaggctcttgagtatggatctgtgtcagtaa

SEQ ID NO: 49385 - DNA, 33 bp, Homo sapien
ccggtagtgtgattgccaaagtgaatggcagat

SEQ ID NO: 49386 - DNA, 33 bp, Homo sapien
ccggtagtgtgattgctaaagtgaatggcagat

SEQ ID NO: 49387 - DNA, 33 bp, Homo sapien
atgatcactgaagatacgtaaaattgttcaccc

SEQ ID NO: 49388 - DNA, 33 bp, Homo sapien
atgatcactgaagatatgtaaaattgttcaccc

SEQ ID NO: 49389 - DNA, 33 bp, Homo sapien
acatttgtaccacattcaatcattggttaggag

SEQ ID NO: 49390 - DNA, 33 bp, Homo sapien
acatttgtaccacatttaatcattggttaggag

SEQ ID NO: 49391 - DNA, 33 bp, Homo sapien
ctaaagcggcagacaccgtacagaaacttgaat

SEQ ID NO: 49392 - DNA, 33 bp, Homo sapien
ctaaagcggcagacactgtacagaaacttgaat

SEQ ID NO: 49393 - DNA, 33 bp, Homo sapien
gtgagggagagaaagacatttggcagcgttaat

SEQ ID NO: 49394 - DNA, 33 bp, Homo sapien
gtgagggagagaaagagatttggcagcgttaat

SEQ ID NO: 49395 - DNA, 33 bp, Homo sapien
cagggactggaaattacatgggagcagcaacat

SEQ ID NO: 49396 - DNA, 33 bp, Homo sapien
cagggactggaaattatatgggagcagcaacat

SEQ ID NO: 49397 - DNA, 33 bp, Homo sapien
ttggcatcaccatttgcatatctggtagatata

SEQ ID NO: 49398 - DNA, 33 bp, Homo sapien
ttggcatcaccatttgtatatctggtagatata

SEQ ID NO: 49399 - DNA, 33 bp, Homo sapien
agttccaattaacctacctcatcttcctctttt

SEQ ID NO: 49400 - DNA, 33 bp, Homo sapien
agttccaattaacctagctcatcttcctctttt

SEQ ID NO: 49401 - DNA, 33 bp, Homo sapien
ctgaacaaatgaccaccgaggggaggagaagac

SEQ ID NO: 49402 - DNA, 33 bp, Homo sapien
ctgaacaaatgaccactgaggggaggagaagac

SEQ ID NO: 49403 - DNA, 33 bp, Homo sapien
cagtaatgatgcagtcagacagtttggttttgt

SEQ ID NO: 49404 - DNA, 33 bp, Homo sapien
cagtaatgatgcagtcggacagtttggttttgt

SEQ ID NO: 49405 - DNA, 33 bp, Homo sapien
caaaacattgaggtgaaggatatttttcacagg

SEQ ID NO: 49406 - DNA, 33 bp, Homo sapien
caaaacattgaggtgagggatatttttcacagg

SEQ ID NO: 49407 - DNA, 33 bp, Homo sapien
aacattaaaggccacgcaaattctgtaattttt

SEQ ID NO: 49408 - DNA, 33 bp, Homo sapien
aacattaaaggccacggaaattctgtaattttt

SEQ ID NO: 49409 - DNA, 33 bp, Homo sapien
gcattaatgactttatagaggcaaaagagtgag

SEQ ID NO: 49410 - DNA, 33 bp, Homo sapien
gcattaatgactttatggaggcaaaagagtgag

SEQ ID NO: 49411 - DNA, 33 bp, Homo sapien
ttcgcaccagccaatgaaaaactggatggactc

SEQ ID NO: 49412 - DNA, 33 bp, Homo sapien
ttcgcaccagccaatgcaaaactggatggactc

SEQ ID NO: 49413 - DNA, 33 bp, Homo sapien
ttacattctcacctgcaattggaaaaagggttc

SEQ ID NO: 49414 - DNA, 33 bp, Homo sapien
ttacattctcacctgcgattggaaaaagggttc

SEQ ID NO: 49415 - DNA, 33 bp, Homo sapien
agtctcacagttttgacgagactgtgaactctt

SEQ ID NO: 49416 - DNA, 33 bp, Homo sapien
agtctcacagttttgatgagactgtgaactctt

SEQ ID NO: 49417 - DNA, 33 bp, Homo sapien
gttagattttggacacactaaacttgaggtgac

SEQ ID NO: 49418 - DNA, 33 bp, Homo sapien
gttagattttggacacgctaaacttgaggtgac

SEQ ID NO: 49419 - DNA, 33 bp, Homo sapien
gctgcaagtaatagcaagaacagtcagaaaaat

SEQ ID NO: 49420 - DNA, 33 bp, Homo sapien
gctgcaagtaatagcatgaacagtcagaaaaat

SEQ ID NO: 49421 - DNA, 33 bp, Homo sapien
gctgcaaggccccaaactagaagatgtgcataa

SEQ ID NO: 49422 - DNA, 33 bp, Homo sapien
gctgcaaggccccaaagtagaagatgtgcataa

SEQ ID NO: 49423 - DNA, 33 bp, Homo sapien
aggaaatcttggccagaaagaaaatcctataag

SEQ ID NO: 49424 - DNA, 33 bp, Homo sapien
aggaaatcttggccaggaagaaaatcctataag

SEQ ID NO: 49425 - DNA, 33 bp, Homo sapien
gagcaaattaggaaaacgtacccttcgcttgag

SEQ ID NO: 49426 - DNA, 33 bp, Homo sapien
gagcaaattaggaaaatgtacccttcgcttgag

SEQ ID NO: 49427 - DNA, 33 bp, Homo sapien
catgttgagttccttcacaaacgcaagataatg

SEQ ID NO: 49428 - DNA, 33 bp, Homo sapien
catgttgagttccttcccaaacgcaagataatg

SEQ ID NO: 49429 - DNA, 33 bp, Homo sapien
ctgttctgggaatcgaaggaacatttcctagtg

SEQ ID NO: 49430 - DNA, 33 bp, Homo sapien
ctgttctgggaatcgagggaacatttcctagtg

SEQ ID NO: 49431 - DNA, 33 bp, Homo sapien
aacctgaacccacttacgtggaaaactgatgtc

SEQ ID NO: 49432 - DNA, 33 bp, Homo sapien
aacctgaacccacttatgtggaaaactgatgtc

SEQ ID NO: 49433 - DNA, 33 bp, Homo sapien
atagtttgccaaaattcaagaacattaattctt

SEQ ID NO: 49434 - DNA, 33 bp, Homo sapien
atagtttgccaaaatttaagaacattaattctt

SEQ ID NO: 49435 - DNA, 33 bp, Homo sapien
ggcaacgcagccttaactccagttcagggtcct

SEQ ID NO: 49436 - DNA, 33 bp, Homo sapien
ggcaacgcagccttaagtccagttcagggtcct

SEQ ID NO: 49437 - DNA, 33 bp, Homo sapien
aaggctgggcaagcaaaacttactgatgttttg

SEQ ID NO: 49438 - DNA, 33 bp, Homo sapien
aaggctgggcaagcaacacttactgatgttttg

SEQ ID NO: 49439 - DNA, 33 bp, Homo sapien
cttgaaatggccaaagaaaccagagagatcaca

SEQ ID NO: 49440 - DNA, 33 bp, Homo sapien
cttgaaatggccaaaggaaccagagagatcaca

SEQ ID NO: 49441 - DNA, 33 bp, Homo sapien
gttccaatttaatgtaataagcattgcaatagg

SEQ ID NO: 49442 - DNA, 33 bp, Homo sapien
gttccaatttaatgtagtaagcattgcaatagg

SEQ ID NO: 49443 - DNA, 33 bp, Homo sapien
aaaaagactccaaaaacgtttgcctctgtgacc

SEQ ID NO: 49444 - DNA, 33 bp, Homo sapien
aaaaagactccaaaaatgtttgcctctgtgacc

SEQ ID NO: 49445 - DNA, 33 bp, Homo sapien
gctatgttgtccaaaacatcatcaggatggcta

SEQ ID NO: 49446 - DNA, 33 bp, Homo sapien
gctatgttgtccaaaagatcatcaggatggcta

SEQ ID NO: 49447 - DNA, 33 bp, Homo sapien
tgttagagaggttccactgctagagagtcaagt

SEQ ID NO: 49448 - DNA, 33 bp, Homo sapien
tgttagagaggttccattgctagagagtcaagt

SEQ ID NO: 49449 - DNA, 33 bp, Homo sapien
acaaggggaatttggcagagttcagggaaggga

SEQ ID NO: 49450 - DNA, 33 bp, Homo sapien
acaaggggaatttggcggagttcagggaaggga

SEQ ID NO: 49451 - DNA, 33 bp, Homo sapien
tggtgtcagctctctggaagtgtcacactagca

SEQ ID NO: 49452 - DNA, 33 bp, Homo sapien
tggtgtcagctctctgtaagtgtcacactagca

SEQ ID NO: 49453 - DNA, 33 bp, Homo sapien
ggtgatatgagtgagaaggactaaattctgttg

SEQ ID NO: 49454 - DNA, 33 bp, Homo sapien
ggtgatatgagtgagacggactaaattctgttg

SEQ ID NO: 49455 - DNA, 33 bp, Homo sapien
aggactaaaagtgtgactagaagcagctggaag

SEQ ID NO: 49456 - DNA, 33 bp, Homo sapien
aggactaaaagtgtgattagaagcagctggaag

SEQ ID NO: 49457 - DNA, 33 bp, Homo sapien
gggaagacactatggtaaaggtgaacctggtta

SEQ ID NO: 49458 - DNA, 33 bp, Homo sapien
gggaagacactatggtcaaggtgaacctggtta

SEQ ID NO: 49459 - DNA, 33 bp, Homo sapien
agaccagatatgcacactgagcaacagagatta

SEQ ID NO: 49460 - DNA, 33 bp, Homo sapien
agaccagatatgcacattgagcaacagagatta

SEQ ID NO: 49461 - DNA, 33 bp, Homo sapien
tgacacctcttgtgtgaaaaaaagtctatataa

SEQ ID NO: 49462 - DNA, 33 bp, Homo sapien
tgacacctcttgtgtggaaaaaagtctatataa

SEQ ID NO: 49463 - DNA, 33 bp, Homo sapien
ctttatttttaactcaactaccacatgtctaac

SEQ ID NO: 49464 - DNA, 33 bp, Homo sapien
ctttatttttaactcagctaccacatgtctaac

SEQ ID NO: 49465 - DNA, 33 bp, Homo sapien
aacgtgataacttggcagacagtcacacatcca

SEQ ID NO: 49466 - DNA, 33 bp, Homo sapien
aacgtgataacttggcggacagtcacacatcca

SEQ ID NO: 49467 - DNA, 33 bp, Homo sapien
aagtaaacatttttacagagttcacagcttcca

SEQ ID NO: 49468 - DNA, 33 bp, Homo sapien
aagtaaacatttttacggagttcacagcttcca

SEQ ID NO: 49469 - DNA, 33 bp, Homo sapien
aaaataataaattgcacagcgcttcatcattag

SEQ ID NO: 49470 - DNA, 33 bp, Homo sapien
aaaataataaattgcatagcgcttcatcattag

SEQ ID NO: 49471 - DNA, 33 bp, Homo sapien
atatctacatctgcaccgtgagcaaccctatca

SEQ ID NO: 49472 - DNA, 33 bp, Homo sapien
atatctacatctgcactgtgagcaaccctatca

SEQ ID NO: 49473 - DNA, 33 bp, Homo sapien
ccaaggtggtcttagaaaggatgtagtggggca

SEQ ID NO: 49474 - DNA, 33 bp, Homo sapien
ccaaggtggtcttagataggatgtagtggggca

SEQ ID NO: 49475 - DNA, 33 bp, Homo sapien
gtgactccaggcttcacggcaccctgggcgctc

SEQ ID NO: 49476 - DNA, 33 bp, Homo sapien
gtgactccaggcttcatggcaccctgggcgctc

SEQ ID NO: 49477 - DNA, 33 bp, Homo sapien
tcttatatgccctctacgttcttctgtgatttt

SEQ ID NO: 49478 - DNA, 33 bp, Homo sapien
tcttatatgccctctatgttcttctgtgatttt

SEQ ID NO: 49479 - DNA, 33 bp, Homo sapien
tggggttttcaagaccacaaatccaatatggac

SEQ ID NO: 49480 - DNA, 33 bp, Homo sapien
tggggttttcaagaccgcaaatccaatatggac

SEQ ID NO: 49481 - DNA, 33 bp, Homo sapien
gggagagaaacagcacgaaggtcaaggagagga

SEQ ID NO: 49482 - DNA, 33 bp, Homo sapien
gggagagaaacagcactaaggtcaaggagagga

SEQ ID NO: 49483 - DNA, 33 bp, Homo sapien
gtgtgtagtcacctcggccaaaacccggctttg

SEQ ID NO: 49484 - DNA, 33 bp, Homo sapien
gtgtgtagtcacctcgtccaaaacccggctttg

SEQ ID NO: 49485 - DNA, 33 bp, Homo sapien
tttgcaatccaagaagacttaccggagagaact

SEQ ID NO: 49486 - DNA, 33 bp, Homo sapien
tttgcaatccaagaagtcttaccggagagaact

SEQ ID NO: 49487 - DNA, 33 bp, Homo sapien
catttctttaacttcaaaaaagacattaaccaa

SEQ ID NO: 49488 - DNA, 33 bp, Homo sapien
catttctttaacttcagaaaagacattaaccaa

SEQ ID NO: 49489 - DNA, 33 bp, Homo sapien
ttgagataagagaaaaacatctgtctcctgctc

SEQ ID NO: 49490 - DNA, 33 bp, Homo sapien
ttgagataagagaaaagcatctgtctcctgctc

SEQ ID NO: 49491 - DNA, 33 bp, Homo sapien
cccataagattaaaaaatggcagagaattgacc

SEQ ID NO: 49492 - DNA, 33 bp, Homo sapien
cccataagattaaaaattggcagagaattgacc

SEQ ID NO: 49493 - DNA, 33 bp, Homo sapien
ttttaagccagtggcactgacatgagtgagatt

SEQ ID NO: 49494 - DNA, 33 bp, Homo sapien
ttttaagccagtggcattgacatgagtgagatt

SEQ ID NO: 49495 - DNA, 33 bp, Homo sapien
attttttatgctgtcacgttctttgtagtattt

SEQ ID NO: 49496 - DNA, 33 bp, Homo sapien
attttttatgctgtcatgttctttgtagtattt

SEQ ID NO: 49497 - DNA, 33 bp, Homo sapien
tgaggttcccatctaaccatgccttcagaacac

SEQ ID NO: 49498 - DNA, 33 bp, Homo sapien
tgaggttcccatctaatcatgccttcagaacac

SEQ ID NO: 49499 - DNA, 33 bp, Homo sapien
gacacattgaccttcaccaagattccctcgcct

SEQ ID NO: 49500 - DNA, 33 bp, Homo sapien
gacacattgaccttcatcaagattccctcgcct

SEQ ID NO: 49501 - DNA, 33 bp, Homo sapien
ttcacatcagcccccaatcccaaggtcatacca

SEQ ID NO: 49502 - DNA, 33 bp, Homo sapien
ttcacatcagcccccagtcccaaggtcatacca

SEQ ID NO: 49503 - DNA, 33 bp, Homo sapien
agcaggagaataggcaccgcaggttttggggaa

SEQ ID NO: 49504 - DNA, 33 bp, Homo sapien
agcaggagaataggcatcgcaggttttggggaa

SEQ ID NO: 49505 - DNA, 33 bp, Homo sapien
accttggccatgatgacagccattttagtggag

SEQ ID NO: 49506 - DNA, 33 bp, Homo sapien
accttggccatgatgagagccattttagtggag

SEQ ID NO: 49507 - DNA, 33 bp, Homo sapien
atattctagccaaacaccatgtggaaatatggg

SEQ ID NO: 49508 - DNA, 33 bp, Homo sapien
atattctagccaaacatcatgtggaaatatggg

SEQ ID NO: 49509 - DNA, 33 bp, Homo sapien
ccgtaagtgccagaatcatgactgtcttgctcc

SEQ ID NO: 49510 - DNA, 33 bp, Homo sapien
ccgtaagtgccagaattatgactgtcttgctcc

SEQ ID NO: 49511 - DNA, 33 bp, Homo sapien
aatggaaccattaagacgaagttaagctctaaa

SEQ ID NO: 49512 - DNA, 33 bp, Homo sapien
aatggaaccattaagatgaagttaagctctaaa

SEQ ID NO: 49513 - DNA, 33 bp, Homo sapien
agacagaaagataccactactgctgccaaccgt

SEQ ID NO: 49514 - DNA, 33 bp, Homo sapien
agacagaaagataccattactgctgccaaccgt

SEQ ID NO: 49515 - DNA, 33 bp, Homo sapien
gctccccatacttctaagagctcacaatcaagt

SEQ ID NO: 49516 - DNA, 33 bp, Homo sapien
gctccccatacttctaggagctcacaatcaagt

SEQ ID NO: 49517 - DNA, 33 bp, Homo sapien
tgaatagtaggcttagcatccgggagatgaaat

SEQ ID NO: 49518 - DNA, 33 bp, Homo sapien
tgaatagtaggcttagtatccgggagatgaaat

SEQ ID NO: 49519 - DNA, 33 bp, Homo sapien
acatctatttaaaactcacacagagaattttgg

SEQ ID NO: 49520 - DNA, 33 bp, Homo sapien
acatctatttaaaacttacacagagaattttgg

SEQ ID NO: 49521 - DNA, 33 bp, Homo sapien
catgcacatattcagcaattttactagtctgtt

SEQ ID NO: 49522 - DNA, 33 bp, Homo sapien
catgcacatattcagccattttactagtctgtt

SEQ ID NO: 49523 - DNA, 33 bp, Homo sapien
atgattttgaaggaagacaagtcagaggcatgg

SEQ ID NO: 49524 - DNA, 33 bp, Homo sapien
atgattttgaaggaaggcaagtcagaggcatgg

SEQ ID NO: 49525 - DNA, 33 bp, Homo sapien
cactgaggagagcttcaaaaccccttgcctgtg

SEQ ID NO: 49526 - DNA, 33 bp, Homo sapien
cactgaggagagcttcgaaaccccttgcctgtg

SEQ ID NO: 49527 - DNA, 33 bp, Homo sapien
cagcatctctgaaccaagaagggaaagcttgag

SEQ ID NO: 49528 - DNA, 33 bp, Homo sapien
cagcatctctgaaccacgaagggaaagcttgag

SEQ ID NO: 49529 - DNA, 33 bp, Homo sapien
ggccccacatttgaaactgagctttcctctacc

SEQ ID NO: 49530 - DNA, 33 bp, Homo sapien
ggccccacatttgaaattgagctttcctctacc

SEQ ID NO: 49531 - DNA, 33 bp, Homo sapien
gtaagttagagttgccagagagaatctcctgaa

SEQ ID NO: 49532 - DNA, 33 bp, Homo sapien
gtaagttagagttgcctgagagaatctcctgaa

SEQ ID NO: 49533 - DNA, 33 bp, Homo sapien
actggtttactctaggaatgtgcaattttcatt

SEQ ID NO: 49534 - DNA, 33 bp, Homo sapien
actggtttactctagggatgtgcaattttcatt

SEQ ID NO: 49535 - DNA, 33 bp, Homo sapien
acctcttgtaggctccactatccattattccta

SEQ ID NO: 49536 - DNA, 33 bp, Homo sapien
acctcttgtaggctccgctatccattattccta

SEQ ID NO: 49537 - DNA, 33 bp, Homo sapien
aatagctattataaaccggattcacttctttat

SEQ ID NO: 49538 - DNA, 33 bp, Homo sapien
aatagctattataaacgggattcacttctttat

SEQ ID NO: 49539 - DNA, 33 bp, Homo sapien
ggattacttgataacacggagggaaattcagca

SEQ ID NO: 49540 - DNA, 33 bp, Homo sapien
ggattacttgataacatggagggaaattcagca

SEQ ID NO: 49541 - DNA, 33 bp, Homo sapien
ttgtacagtctcctgaagtttaattttaattaa

SEQ ID NO: 49542 - DNA, 33 bp, Homo sapien
ttgtacagtctcctgaggtttaattttaattaa

SEQ ID NO: 49543 - DNA, 33 bp, Homo sapien
gagtgacctggtcaaacacctcatatcttccac

SEQ ID NO: 49544 - DNA, 33 bp, Homo sapien
gagtgacctggtcaaatacctcatatcttccac

SEQ ID NO: 49545 - DNA, 33 bp, Homo sapien
aacacttgtgcatacacggtgttctctccaacc

SEQ ID NO: 49546 - DNA, 33 bp, Homo sapien
aacacttgtgcatacatggtgttctctccaacc

SEQ ID NO: 49547 - DNA, 33 bp, Homo sapien
actagaataaaactaacgtactgtaggtggtgg

SEQ ID NO: 49548 - DNA, 33 bp, Homo sapien
actagaataaaactaatgtactgtaggtggtgg

SEQ ID NO: 49549 - DNA, 33 bp, Homo sapien
ggtggggtgttgttgacgtagatgtgtattttg

SEQ ID NO: 49550 - DNA, 33 bp, Homo sapien
ggtggggtgttgttgatgtagatgtgtattttg

SEQ ID NO: 49551 - DNA, 33 bp, Homo sapien
tatgcatctcttcataggtaccctttgtaataa

SEQ ID NO: 49552 - DNA, 33 bp, Homo sapien
tatgcatctcttcatatgtaccctttgtaataa

SEQ ID NO: 49553 - DNA, 33 bp, Homo sapien
tggggtttcctcagaacggacaactgaaacctg

SEQ ID NO: 49554 - DNA, 33 bp, Homo sapien
tggggtttcctcagaatggacaactgaaacctg

SEQ ID NO: 49555 - DNA, 33 bp, Homo sapien
attcagagaattggaacacttcttgggctgaag

SEQ ID NO: 49556 - DNA, 33 bp, Homo sapien
attcagagaattggaagacttcttgggctgaag

SEQ ID NO: 49557 - DNA, 33 bp, Homo sapien
aggcagcaaaaataggcccatgtcacttctggg

SEQ ID NO: 49558 - DNA, 33 bp, Homo sapien
aggcagcaaaaataggtccatgtcacttctggg

SEQ ID NO: 49559 - DNA, 33 bp, Homo sapien
agtttaaagttcttagaccttagaggaattaga

SEQ ID NO: 49560 - DNA, 33 bp, Homo sapien
agtttaaagttcttaggccttagaggaattaga

SEQ ID NO: 49561 - DNA, 33 bp, Homo sapien
acacacggacaaactcaaccttactcacaggtc

SEQ ID NO: 49562 - DNA, 33 bp, Homo sapien
acacacggacaaactcgaccttactcacaggtc

SEQ ID NO: 49563 - DNA, 33 bp, Homo sapien
cagtacatccattttaaggacattaccccttct

SEQ ID NO: 49564 - DNA, 33 bp, Homo sapien
cagtacatccattttagggacattaccccttct

SEQ ID NO: 49565 - DNA, 33 bp, Homo sapien
attattatcttaacacaataacatgaccttttc

SEQ ID NO: 49566 - DNA, 33 bp, Homo sapien
attattatcttaacacgataacatgaccttttc

SEQ ID NO: 49567 - DNA, 33 bp, Homo sapien
atgcaccattgttttacgtaccactcaagatga

SEQ ID NO: 49568 - DNA, 33 bp, Homo sapien
atgcaccattgttttatgtaccactcaagatga

SEQ ID NO: 49569 - DNA, 33 bp, Homo sapien
tgaggtcgaggtatggaaaaatactgaagcact

SEQ ID NO: 49570 - DNA, 33 bp, Homo sapien
tgaggtcgaggtatggcaaaatactgaagcact

SEQ ID NO: 49571 - DNA, 33 bp, Homo sapien
gcatcccttttgaggtgacagtaaagatactcc

SEQ ID NO: 49572 - DNA, 33 bp, Homo sapien
gcatcccttttgaggttacagtaaagatactcc

SEQ ID NO: 49573 - DNA, 33 bp, Homo sapien
atccatggcctcaggaaaaagctgttcacatca

SEQ ID NO: 49574 - DNA, 33 bp, Homo sapien
atccatggcctcaggagaaagctgttcacatca

SEQ ID NO: 49575 - DNA, 33 bp, Homo sapien
taacagtagattattaagccacaggtaaagaaa

SEQ ID NO: 49576 - DNA, 33 bp, Homo sapien
taacagtagattattatgccacaggtaaagaaa

SEQ ID NO: 49577 - DNA, 33 bp, Homo sapien
cccttgtggatttacagggtacagcccacttcc

SEQ ID NO: 49578 - DNA, 33 bp, Homo sapien
cccttgtggatttacatggtacagcccacttcc

SEQ ID NO: 49579 - DNA, 33 bp, Homo sapien
acaaaatcaaaggagaacatttggcactttaag

SEQ ID NO: 49580 - DNA, 33 bp, Homo sapien
acaaaatcaaaggagatcatttggcactttaag

SEQ ID NO: 49581 - DNA, 33 bp, Homo sapien
tgaccaccattcacaaccctactgctttcatcc

SEQ ID NO: 49582 - DNA, 33 bp, Homo sapien
tgaccaccattcacaatcctactgctttcatcc

SEQ ID NO: 49583 - DNA, 33 bp, Homo sapien
ctgcagctccctgaacacagtgaagatactccc

SEQ ID NO: 49584 - DNA, 33 bp, Homo sapien
ctgcagctccctgaacgcagtgaagatactccc

SEQ ID NO: 49585 - DNA, 33 bp, Homo sapien
tatccccatttcacagcacgtaatcccaggttt

SEQ ID NO: 49586 - DNA, 33 bp, Homo sapien
tatccccatttcacaggacgtaatcccaggttt

SEQ ID NO: 49587 - DNA, 33 bp, Homo sapien
gccttaaacaccagcaacttgtcccgacaccag

SEQ ID NO: 49588 - DNA, 33 bp, Homo sapien
gccttaaacaccagcagcttgtcccgacaccag

SEQ ID NO: 49589 - DNA, 33 bp, Homo sapien
cgcccggccttcttatcactcttactcaagcaa

SEQ ID NO: 49590 - DNA, 33 bp, Homo sapien
cgcccggccttcttattactcttactcaagcaa

SEQ ID NO: 49591 - DNA, 33 bp, Homo sapien
gtggaccaagacagtacggcagcatgattagga

SEQ ID NO: 49592 - DNA, 33 bp, Homo sapien
gtggaccaagacagtatggcagcatgattagga

SEQ ID NO: 49593 - DNA, 33 bp, Homo sapien
atattaaggcctctcacggggttattatgagca

SEQ ID NO: 49594 - DNA, 33 bp, Homo sapien
atattaaggcctctcatggggttattatgagca

SEQ ID NO: 49595 - DNA, 33 bp, Homo sapien
acccagaatacgagccccgctggaggagttggt

SEQ ID NO: 49596 - DNA, 33 bp, Homo sapien
acccagaatacgagcctcgctggaggagttggt

SEQ ID NO: 49597 - DNA, 33 bp, Homo sapien
ccctcgcatcgagaagaatcctggccagtgccc

SEQ ID NO: 49598 - DNA, 33 bp, Homo sapien
ccctcgcatcgagaagcatcctggccagtgccc

SEQ ID NO: 49599 - DNA, 33 bp, Homo sapien
caaaacagactaaacactcatgtgaaagtccag

SEQ ID NO: 49600 - DNA, 33 bp, Homo sapien
caaaacagactaaacattcatgtgaaagtccag

SEQ ID NO: 49601 - DNA, 33 bp, Homo sapien
tcctaaagcagaactactacatgactctcaact

SEQ ID NO: 49602 - DNA, 33 bp, Homo sapien
tcctaaagcagaactagtacatgactctcaact

SEQ ID NO: 49603 - DNA, 33 bp, Homo sapien
tgcaaaagcttatacgccatcatgaggttacag

SEQ ID NO: 49604 - DNA, 33 bp, Homo sapien
tgcaaaagcttatacgtcatcatgaggttacag

SEQ ID NO: 49605 - DNA, 33 bp, Homo sapien
gtgcatcccagcccaaacctagcaatagacaca

SEQ ID NO: 49606 - DNA, 33 bp, Homo sapien
gtgcatcccagcccaagcctagcaatagacaca

SEQ ID NO: 49607 - DNA, 33 bp, Homo sapien
tcagagaacttgaagccaaaaggatttaaaacc

SEQ ID NO: 49608 - DNA, 33 bp, Homo sapien
tcagagaacttgaagcgaaaaggatttaaaacc

SEQ ID NO: 49609 - DNA, 33 bp, Homo sapien
ctagcctctaattcccactctagaacagctggc

SEQ ID NO: 49610 - DNA, 33 bp, Homo sapien
ctagcctctaattcccgctctagaacagctggc

SEQ ID NO: 49611 - DNA, 33 bp, Homo sapien
tatgcctgtagcccaacgtgtttgtatatgtgt

SEQ ID NO: 49612 - DNA, 33 bp, Homo sapien
tatgcctgtagcccaatgtgtttgtatatgtgt

SEQ ID NO: 49613 - DNA, 33 bp, Homo sapien
gctctcactgaatccaatctacatcaggacact

SEQ ID NO: 49614 - DNA, 33 bp, Homo sapien
gctctcactgaatccagtctacatcaggacact

SEQ ID NO: 49615 - DNA, 33 bp, Homo sapien
aggagagaagagatggcatcctgagctcaagtt

SEQ ID NO: 49616 - DNA, 33 bp, Homo sapien
aggagagaagagatggtatcctgagctcaagtt

SEQ ID NO: 49617 - DNA, 33 bp, Homo sapien
aagaaaagacttaaaacgttcttggataggaag

SEQ ID NO: 49618 - DNA, 33 bp, Homo sapien
aagaaaagacttaaaaggttcttggataggaag

SEQ ID NO: 49619 - DNA, 33 bp, Homo sapien
agagaatgcttgaagacgatccacttgggcttt

SEQ ID NO: 49620 - DNA, 33 bp, Homo sapien
agagaatgcttgaagaggatccacttgggcttt

SEQ ID NO: 49621 - DNA, 33 bp, Homo sapien
aatgttgctatgacaactccaaatcaactaagc

SEQ ID NO: 49622 - DNA, 33 bp, Homo sapien
aatgttgctatgacaattccaaatcaactaagc

SEQ ID NO: 49623 - DNA, 33 bp, Homo sapien
tttcaaatgcatatgacctgcgctgagaggaca

SEQ ID NO: 49624 - DNA, 33 bp, Homo sapien
tttcaaatgcatatgatctgcgctgagaggaca

SEQ ID NO: 49625 - DNA, 33 bp, Homo sapien
tagccatccctgtaaacgtaaactgatatttca

SEQ ID NO: 49626 - DNA, 33 bp, Homo sapien
tagccatccctgtaaatgtaaactgatatttca

SEQ ID NO: 49627 - DNA, 33 bp, Homo sapien
agccacatgacacacaagccaaaccctgacagt

SEQ ID NO: 49628 - DNA, 33 bp, Homo sapien
agccacatgacacacacgccaaaccctgacagt

SEQ ID NO: 49629 - DNA, 33 bp, Homo sapien
ggcattctaaatcaggaaccacggtgagcaaac

SEQ ID NO: 49630 - DNA, 33 bp, Homo sapien
ggcattctaaatcagggaccacggtgagcaaac

SEQ ID NO: 49631 - DNA, 33 bp, Homo sapien
tcacacatactgatacacagctcttccctctgg

SEQ ID NO: 49632 - DNA, 33 bp, Homo sapien
tcacacatactgatacgcagctcttccctctgg

SEQ ID NO: 49633 - DNA, 33 bp, Homo sapien
tcatctgacaacagtgaactcaatccattcaaa

SEQ ID NO: 49634 - DNA, 33 bp, Homo sapien
tcatctgacaacagtggactcaatccattcaaa

SEQ ID NO: 49635 - DNA, 33 bp, Homo sapien
ttggcagtagaagggacataagggtggtgcagg

SEQ ID NO: 49636 - DNA, 33 bp, Homo sapien
ttggcagtagaagggatataagggtggtgcagg

SEQ ID NO: 49637 - DNA, 33 bp, Homo sapien
gccaataaaccaaggaataatacttcaccaaaa

SEQ ID NO: 49638 - DNA, 33 bp, Homo sapien
gccaataaaccaaggagtaatacttcaccaaaa

SEQ ID NO: 49639 - DNA, 33 bp, Homo sapien
ttaggtttcttgtgggacacccaggttaaacat

SEQ ID NO: 49640 - DNA, 33 bp, Homo sapien
ttaggtttcttgtggggcacccaggttaaacat

SEQ ID NO: 49641 - DNA, 33 bp, Homo sapien
ctttgcaatggcaatcaaagtgaatctcacact

SEQ ID NO: 49642 - DNA, 33 bp, Homo sapien
ctttgcaatggcaatcgaagtgaatctcacact

SEQ ID NO: 49643 - DNA, 33 bp, Homo sapien
ctcaagcagctacatacaggtgcatgctacacc

SEQ ID NO: 49644 - DNA, 33 bp, Homo sapien
ctcaagcagctacatagaggtgcatgctacacc

SEQ ID NO: 49645 - DNA, 33 bp, Homo sapien
ctgggctaaaggacaccgacacaggacccactg

SEQ ID NO: 49646 - DNA, 33 bp, Homo sapien
ctgggctaaaggacactgacacaggacccactg

SEQ ID NO: 49647 - DNA, 33 bp, Homo sapien
tcctggtcagttcccacagctaaggatctggcc

SEQ ID NO: 49648 - DNA, 33 bp, Homo sapien
tcctggtcagttcccatagctaaggatctggcc

SEQ ID NO: 49649 - DNA, 33 bp, Homo sapien
tactcaggtatgacagaagaggtgcattcaaat

SEQ ID NO: 49650 - DNA, 33 bp, Homo sapien
tactcaggtatgacaggagaggtgcattcaaat

SEQ ID NO: 49651 - DNA, 33 bp, Homo sapien
gtattcttcccaatgccgcattcagttacatga

SEQ ID NO: 49652 - DNA, 33 bp, Homo sapien
gtattcttcccaatgctgcattcagttacatga

SEQ ID NO: 49653 - DNA, 33 bp, Homo sapien
ccatgatgtggttcaacaaacgtgtgatttctc

SEQ ID NO: 49654 - DNA, 33 bp, Homo sapien
ccatgatgtggttcaataaacgtgtgatttctc

SEQ ID NO: 49655 - DNA, 33 bp, Homo sapien
ggctatgccacattcaatagcacttccgtttgg

SEQ ID NO: 49656 - DNA, 33 bp, Homo sapien
ggctatgccacattcagtagcacttccgtttgg

SEQ ID NO: 49657 - DNA, 33 bp, Homo sapien
tgagcattagtctttaacagggaggaggaacca

SEQ ID NO: 49658 - DNA, 33 bp, Homo sapien
tgagcattagtctttaccagggaggaggaacca

SEQ ID NO: 49659 - DNA, 33 bp, Homo sapien
gaaaagactgggtcacaagtaggactggcagca

SEQ ID NO: 49660 - DNA, 33 bp, Homo sapien
gaaaagactgggtcacgagtaggactggcagca

SEQ ID NO: 49661 - DNA, 33 bp, Homo sapien
tctagagactgaaattcaaggcccagttcttgc

SEQ ID NO: 49662 - DNA, 33 bp, Homo sapien
tctagagactgaaattgaaggcccagttcttgc

SEQ ID NO: 49663 - DNA, 33 bp, Homo sapien
gaaggactagaccccaagatacctgaattccct

SEQ ID NO: 49664 - DNA, 33 bp, Homo sapien
gaaggactagaccccacgatacctgaattccct

SEQ ID NO: 49665 - DNA, 33 bp, Homo sapien
tggatatacaatttaccgaagtgtttgcctcct

SEQ ID NO: 49666 - DNA, 33 bp, Homo sapien
tggatatacaatttactgaagtgtttgcctcct

SEQ ID NO: 49667 - DNA, 33 bp, Homo sapien
tgtaactggggctcacagaagttaatttgccca

SEQ ID NO: 49668 - DNA, 33 bp, Homo sapien
tgtaactggggctcacggaagttaatttgccca

SEQ ID NO: 49669 - DNA, 33 bp, Homo sapien
tttccatcaccttcacaataaaatccaatctct

SEQ ID NO: 49670 - DNA, 33 bp, Homo sapien
tttccatcaccttcacgataaaatccaatctct

SEQ ID NO: 49671 - DNA, 33 bp, Homo sapien
ttatgacctacgagccaaatctggcctgctgcc

SEQ ID NO: 49672 - DNA, 33 bp, Homo sapien
ttatgacctacgagcccaatctggcctgctgcc

SEQ ID NO: 49673 - DNA, 33 bp, Homo sapien
attggattgtggggcccatctttcacgtctgcc

SEQ ID NO: 49674 - DNA, 33 bp, Homo sapien
attggattgtggggccgatctttcacgtctgcc

SEQ ID NO: 49675 - DNA, 33 bp, Homo sapien
acttctcatcatacgaataggaagaatatcatt

SEQ ID NO: 49676 - DNA, 33 bp, Homo sapien
acttctcatcatacgactaggaagaatatcatt

SEQ ID NO: 49677 - DNA, 33 bp, Homo sapien
agatatatctttcaccaagaaaacctcaaataa

SEQ ID NO: 49678 - DNA, 33 bp, Homo sapien
agatatatctttcacccagaaaacctcaaataa

SEQ ID NO: 49679 - DNA, 33 bp, Homo sapien
gtgggagggtgcaaagcctctttgtcgccactt

SEQ ID NO: 49680 - DNA, 33 bp, Homo sapien
gtgggagggtgcaaagtctctttgtcgccactt

SEQ ID NO: 49681 - DNA, 33 bp, Homo sapien
gtaatcagaggctgaacaatgtagagcctttta

SEQ ID NO: 49682 - DNA, 33 bp, Homo sapien
gtaatcagaggctgaataatgtagagcctttta

SEQ ID NO: 49683 - DNA, 33 bp, Homo sapien
aagacccttaagccaacaagactctccttcctt

SEQ ID NO: 49684 - DNA, 33 bp, Homo sapien
aagacccttaagccaagaagactctccttcctt

SEQ ID NO: 49685 - DNA, 33 bp, Homo sapien
caagtagctgggattaaaaagatgtgccaccac

SEQ ID NO: 49686 - DNA, 33 bp, Homo sapien
caagtagctgggattacaaagatgtgccaccac

SEQ ID NO: 49687 - DNA, 33 bp, Homo sapien
taacataggaccttccaatgaattactggtcaa

SEQ ID NO: 49688 - DNA, 33 bp, Homo sapien
taacataggaccttccgatgaattactggtcaa

SEQ ID NO: 49689 - DNA, 33 bp, Homo sapien
gcttttggtggacagtcacctggaacattaatt

SEQ ID NO: 49690 - DNA, 33 bp, Homo sapien
gcttttggtggacagttacctggaacattaatt

SEQ ID NO: 49691 - DNA, 33 bp, Homo sapien
aactcaataaactcaaaatatacacatacttac

SEQ ID NO: 49692 - DNA, 33 bp, Homo sapien
aactcaataaactcaagatatacacatacttac

SEQ ID NO: 49693 - DNA, 33 bp, Homo sapien
actggacaggaaagtcaaaaccagtttgtgaaa

SEQ ID NO: 49694 - DNA, 33 bp, Homo sapien
actggacaggaaagtcgaaaccagtttgtgaaa

SEQ ID NO: 49695 - DNA, 33 bp, Homo sapien
caaaagcattcaattacggtcaaaccatctgga

SEQ ID NO: 49696 - DNA, 33 bp, Homo sapien
caaaagcattcaattatggtcaaaccatctgga

SEQ ID NO: 49697 - DNA, 33 bp, Homo sapien
tcatttgtgttgcaaacggcaataacttgggcc

SEQ ID NO: 49698 - DNA, 33 bp, Homo sapien
tcatttgtgttgcaaatggcaataacttgggcc

SEQ ID NO: 49699 - DNA, 33 bp, Homo sapien
tttggtgcctataaccaaaaagcactctacatg

SEQ ID NO: 49700 - DNA, 33 bp, Homo sapien
tttggtgcctataacccaaaagcactctacatg

SEQ ID NO: 49701 - DNA, 33 bp, Homo sapien
gaaaagaaattgagacaacagggttttgggtta

SEQ ID NO: 49702 - DNA, 33 bp, Homo sapien
gaaaagaaattgagactacagggttttgggtta

SEQ ID NO: 49703 - DNA, 33 bp, Homo sapien
acaaatgtcatcacctaaaggctttcatttata

SEQ ID NO: 49704 - DNA, 33 bp, Homo sapien
acaaatgtcatcacctgaaggctttcatttata

SEQ ID NO: 49705 - DNA, 33 bp, Homo sapien
aaactttaattttcccaataatggctgtgagag

SEQ ID NO: 49706 - DNA, 33 bp, Homo sapien
aaactttaattttcccgataatggctgtgagag

SEQ ID NO: 49707 - DNA, 33 bp, Homo sapien
ttattctgcctgataacacaaagtagtgggcct

SEQ ID NO: 49708 - DNA, 33 bp, Homo sapien
ttattctgcctgataagacaaagtagtgggcct

SEQ ID NO: 49709 - DNA, 33 bp, Homo sapien
cgtagttctgacccctgaagagatgcatggcta

SEQ ID NO: 49710 - DNA, 33 bp, Homo sapien
cgtagttctgaccccttaagagatgcatggcta

SEQ ID NO: 49711 - DNA, 33 bp, Homo sapien
attgttcgatttgctacaatgaaatctgctagt

SEQ ID NO: 49712 - DNA, 33 bp, Homo sapien
attgttcgatttgctagaatgaaatctgctagt

SEQ ID NO: 49713 - DNA, 33 bp, Homo sapien
acagccattaaatttcaaagtggttatacagaa

SEQ ID NO: 49714 - DNA, 33 bp, Homo sapien
acagccattaaatttcgaagtggttatacagaa

SEQ ID NO: 49715 - DNA, 33 bp, Homo sapien
agattttaccacaccaacatttttagtgactga

SEQ ID NO: 49716 - DNA, 33 bp, Homo sapien
agattttaccacaccagcatttttagtgactga

SEQ ID NO: 49717 - DNA, 33 bp, Homo sapien
aaaggaggagagttaaagagttgggggtggtag

SEQ ID NO: 49718 - DNA, 33 bp, Homo sapien
aaaggaggagagttaaggagttgggggtggtag

SEQ ID NO: 49719 - DNA, 33 bp, Homo sapien
tccagaaactggagtcaatgttaggaaagattc

SEQ ID NO: 49720 - DNA, 33 bp, Homo sapien
tccagaaactggagtcgatgttaggaaagattc

SEQ ID NO: 49721 - DNA, 33 bp, Homo sapien
ggtggagagtagacaacgtttctggcattttca

SEQ ID NO: 49722 - DNA, 33 bp, Homo sapien
ggtggagagtagacaatgtttctggcattttca

SEQ ID NO: 49723 - DNA, 33 bp, Homo sapien
gactgagagatcataccaaacaaaaaagaggac

SEQ ID NO: 49724 - DNA, 33 bp, Homo sapien
gactgagagatcatacgaaacaaaaaagaggac

SEQ ID NO: 49725 - DNA, 33 bp, Homo sapien
gacatcttgatttcacacttttaatttccagat

SEQ ID NO: 49726 - DNA, 33 bp, Homo sapien
gacatcttgatttcacgcttttaatttccagat

SEQ ID NO: 49727 - DNA, 33 bp, Homo sapien
tactgctgttactgtacgggaatcctaggttct

SEQ ID NO: 49728 - DNA, 33 bp, Homo sapien
tactgctgttactgtatgggaatcctaggttct

SEQ ID NO: 49729 - DNA, 33 bp, Homo sapien
tcatataggtgataataaatcatgtgtatgtat

SEQ ID NO: 49730 - DNA, 33 bp, Homo sapien
tcatataggtgataatgaatcatgtgtatgtat

SEQ ID NO: 49731 - DNA, 33 bp, Homo sapien
tatttgttgagcatccaactttatcataattac

SEQ ID NO: 49732 - DNA, 33 bp, Homo sapien
tatttgttgagcatccgactttatcataattac

SEQ ID NO: 49733 - DNA, 33 bp, Homo sapien
gattttatgcagggtacagtatggtctgaatgt

SEQ ID NO: 49734 - DNA, 33 bp, Homo sapien
gattttatgcagggtatagtatggtctgaatgt

SEQ ID NO: 49735 - DNA, 33 bp, Homo sapien
atattcttcaaagttccaacaaagatgcactac

SEQ ID NO: 49736 - DNA, 33 bp, Homo sapien
atattcttcaaagttctaacaaagatgcactac

SEQ ID NO: 49737 - DNA, 33 bp, Homo sapien
aatcctctcctctttaccagccctaactcttca

SEQ ID NO: 49738 - DNA, 33 bp, Homo sapien
aatcctctcctctttatcagccctaactcttca

SEQ ID NO: 49739 - DNA, 33 bp, Homo sapien
agtagatctggtggtacgattaaagttactatt

SEQ ID NO: 49740 - DNA, 33 bp, Homo sapien
agtagatctggtggtatgattaaagttactatt

SEQ ID NO: 49741 - DNA, 33 bp, Homo sapien
atatactatcaacaaacattagcaattactatt

SEQ ID NO: 49742 - DNA, 33 bp, Homo sapien
atatactatcaacaaatattagcaattactatt

SEQ ID NO: 49743 - DNA, 33 bp, Homo sapien
tttctatattgcccaaaaaccagggtctctcca

SEQ ID NO: 49744 - DNA, 33 bp, Homo sapien
tttctatattgcccaagaaccagggtctctcca

SEQ ID NO: 49745 - DNA, 33 bp, Homo sapien
aagtaaaagatttgaacaagcactaatatccta

SEQ ID NO: 49746 - DNA, 33 bp, Homo sapien
aagtaaaagatttgaagaagcactaatatccta

SEQ ID NO: 49747 - DNA, 33 bp, Homo sapien
ccacccagatcctgagacataagggaaagccag

SEQ ID NO: 49748 - DNA, 33 bp, Homo sapien
ccacccagatcctgaggcataagggaaagccag

SEQ ID NO: 49749 - DNA, 33 bp, Homo sapien
agaaaaatcaagtctaagagttactagtttgcc

SEQ ID NO: 49750 - DNA, 33 bp, Homo sapien
agaaaaatcaagtctaggagttactagtttgcc

SEQ ID NO: 49751 - DNA, 33 bp, Homo sapien
tctttggcctctgacagtaccactcaactgaca

SEQ ID NO: 49752 - DNA, 33 bp, Homo sapien
tctttggcctctgacattaccactcaactgaca

SEQ ID NO: 49753 - DNA, 33 bp, Homo sapien
aatcctagtggcctagaatcatatctttctgtc

SEQ ID NO: 49754 - DNA, 33 bp, Homo sapien
aatcctagtggcctagcatcatatctttctgtc

SEQ ID NO: 49755 - DNA, 33 bp, Homo sapien
gtgtctcactgcctacaggaaatcttcacctga

SEQ ID NO: 49756 - DNA, 33 bp, Homo sapien
gtgtctcactgcctactggaaatcttcacctga

SEQ ID NO: 49757 - DNA, 33 bp, Homo sapien
aagttcttgtatgtcaacaggtcatattatttt

SEQ ID NO: 49758 - DNA, 33 bp, Homo sapien
aagttcttgtatgtcagcaggtcatattatttt

SEQ ID NO: 49759 - DNA, 33 bp, Homo sapien
atctcttctgcaggacaaaggaatccagtttac

SEQ ID NO: 49760 - DNA, 33 bp, Homo sapien
atctcttctgcaggacgaaggaatccagtttac

SEQ ID NO: 49761 - DNA, 33 bp, Homo sapien
acaaaagtggacaatacacatctcttctgcagg

SEQ ID NO: 49762 - DNA, 33 bp, Homo sapien
acaaaagtggacaatatacatctcttctgcagg

SEQ ID NO: 49763 - DNA, 33 bp, Homo sapien
aggttttctactgctaataattggcaagaggaa

SEQ ID NO: 49764 - DNA, 33 bp, Homo sapien
aggttttctactgctagtaattggcaagaggaa

SEQ ID NO: 49765 - DNA, 33 bp, Homo sapien
ctttctctaagatctactaagacaaaatccttc

SEQ ID NO: 49766 - DNA, 33 bp, Homo sapien
ctttctctaagatctattaagacaaaatccttc

SEQ ID NO: 49767 - DNA, 33 bp, Homo sapien
aggagatagacacagaatcaggtagggcatttc

SEQ ID NO: 49768 - DNA, 33 bp, Homo sapien
aggagatagacacagagtcaggtagggcatttc

SEQ ID NO: 49769 - DNA, 33 bp, Homo sapien
aaatgtctagtagtggaatttggatcctgagac

SEQ ID NO: 49770 - DNA, 33 bp, Homo sapien
aaatgtctagtagtggtatttggatcctgagac

SEQ ID NO: 49771 - DNA, 33 bp, Homo sapien
aaccaagtctgcctgacgctaaagacttaggtt

SEQ ID NO: 49772 - DNA, 33 bp, Homo sapien
aaccaagtctgcctgatgctaaagacttaggtt

SEQ ID NO: 49773 - DNA, 33 bp, Homo sapien
taccgagagcaagacaatacataatcgactatt

SEQ ID NO: 49774 - DNA, 33 bp, Homo sapien
taccgagagcaagacagtacataatcgactatt

SEQ ID NO: 49775 - DNA, 33 bp, Homo sapien
caggagaaagaggtaaagaagacagagtattcc

SEQ ID NO: 49776 - DNA, 33 bp, Homo sapien
caggagaaagaggtaaggaagacagagtattcc

SEQ ID NO: 49777 - DNA, 33 bp, Homo sapien
cttgcttgtaaatgaacataatgacagcagtat

SEQ ID NO: 49778 - DNA, 33 bp, Homo sapien
cttgcttgtaaatgaagataatgacagcagtat

SEQ ID NO: 49779 - DNA, 33 bp, Homo sapien
ggaatcctatggagaaaatgggacctttcaggt

SEQ ID NO: 49780 - DNA, 33 bp, Homo sapien
ggaatcctatggagaagatgggacctttcaggt

SEQ ID NO: 49781 - DNA, 33 bp, Homo sapien
gaaggcaagaatctaacggtggagataagcaca

SEQ ID NO: 49782 - DNA, 33 bp, Homo sapien
gaaggcaagaatctaatggtggagataagcaca

SEQ ID NO: 49783 - DNA, 33 bp, Homo sapien
aatatctcgaaatatacacttggaccaatcact

SEQ ID NO: 49784 - DNA, 33 bp, Homo sapien
aatatctcgaaatatatacttggaccaatcact

SEQ ID NO: 49785 - DNA, 33 bp, Homo sapien
tgtgtgatcacagaaaaaaatccaacaggatgt

SEQ ID NO: 49786 - DNA, 33 bp, Homo sapien
tgtgtgatcacagaaagaaatccaacaggatgt

SEQ ID NO: 49787 - DNA, 33 bp, Homo sapien
atgaatgactataataaaatacgggcctagatc

SEQ ID NO: 49788 - DNA, 33 bp, Homo sapien
atgaatgactataatacaatacgggcctagatc

SEQ ID NO: 49789 - DNA, 33 bp, Homo sapien
gagagctacaaaataaatgaagcgaaagtgata

SEQ ID NO: 49790 - DNA, 33 bp, Homo sapien
gagagctacaaaataagtgaagcgaaagtgata

SEQ ID NO: 49791 - DNA, 33 bp, Homo sapien
tgtgggacatataaacagtgggatactatgcag

SEQ ID NO: 49792 - DNA, 33 bp, Homo sapien
tgtgggacatataaaccgtgggatactatgcag

SEQ ID NO: 49793 - DNA, 33 bp, Homo sapien
tttaggacatatacaaactcttaaaagtcaata

SEQ ID NO: 49794 - DNA, 33 bp, Homo sapien
tttaggacatatacaatctcttaaaagtcaata

SEQ ID NO: 49795 - DNA, 33 bp, Homo sapien
gaaggaagattagtcacggcaccaagttagata

SEQ ID NO: 49796 - DNA, 33 bp, Homo sapien
gaaggaagattagtcatggcaccaagttagata

SEQ ID NO: 49797 - DNA, 33 bp, Homo sapien
gttggccaaatctgaacgatgaaagccaattac

SEQ ID NO: 49798 - DNA, 33 bp, Homo sapien
gttggccaaatctgaatgatgaaagccaattac

SEQ ID NO: 49799 - DNA, 33 bp, Homo sapien
ggagatgagacagttaaatttacttcctctttt

SEQ ID NO: 49800 - DNA, 33 bp, Homo sapien
ggagatgagacagttagatttacttcctctttt

SEQ ID NO: 49801 - DNA, 33 bp, Homo sapien
tttgtgccatgataaaaaatttgggctggtaaa

SEQ ID NO: 49802 - DNA, 33 bp, Homo sapien
tttgtgccatgataaagaatttgggctggtaaa

SEQ ID NO: 49803 - DNA, 33 bp, Homo sapien
atctgtggatctttcccagtcctgtctacttac

SEQ ID NO: 49804 - DNA, 33 bp, Homo sapien
atctgtggatctttcctagtcctgtctacttac

SEQ ID NO: 49805 - DNA, 33 bp, Homo sapien
ggtcatgataaaatgacgtgctaactgattgag

SEQ ID NO: 49806 - DNA, 33 bp, Homo sapien
ggtcatgataaaatgatgtgctaactgattgag

SEQ ID NO: 49807 - DNA, 33 bp, Homo sapien
cctgagtgatagggataagatgagtatttcttg

SEQ ID NO: 49808 - DNA, 33 bp, Homo sapien
cctgagtgatagggatgagatgagtatttcttg

SEQ ID NO: 49809 - DNA, 33 bp, Homo sapien
ttcctgttggtggacacctgcactgacttcttt

SEQ ID NO: 49810 - DNA, 33 bp, Homo sapien
ttcctgttggtggacatctgcactgacttcttt

SEQ ID NO: 49811 - DNA, 33 bp, Homo sapien
ttcaaaccatattaaaaaccaaactctatataa

SEQ ID NO: 49812 - DNA, 33 bp, Homo sapien
ttcaaaccatattaaacaccaaactctatataa

SEQ ID NO: 49813 - DNA, 33 bp, Homo sapien
agaagtaaatagactacagaggctcttaaatgt

SEQ ID NO: 49814 - DNA, 33 bp, Homo sapien
agaagtaaatagactatagaggctcttaaatgt

SEQ ID NO: 49815 - DNA, 33 bp, Homo sapien
tcgatcaattttcttacggacatttaaagagcc

SEQ ID NO: 49816 - DNA, 33 bp, Homo sapien
tcgatcaattttcttatggacatttaaagagcc

SEQ ID NO: 49817 - DNA, 33 bp, Homo sapien
ttattgctatcaccaacgatttccgaacaagaa

SEQ ID NO: 49818 - DNA, 33 bp, Homo sapien
ttattgctatcaccaatgatttccgaacaagaa

SEQ ID NO: 49819 - DNA, 33 bp, Homo sapien
cctgttaggagtggaaaatgaggaaagtagaga

SEQ ID NO: 49820 - DNA, 33 bp, Homo sapien
cctgttaggagtggaagatgaggaaagtagaga

SEQ ID NO: 49821 - DNA, 33 bp, Homo sapien
aagagtaaggctgaaacccaaagggaatgcgac

SEQ ID NO: 49822 - DNA, 33 bp, Homo sapien
aagagtaaggctgaaatccaaagggaatgcgac

SEQ ID NO: 49823 - DNA, 33 bp, Homo sapien
tcaatctcttaggaaaaaagccatgagtgtgaa

SEQ ID NO: 49824 - DNA, 33 bp, Homo sapien
tcaatctcttaggaaagaagccatgagtgtgaa

SEQ ID NO: 49825 - DNA, 33 bp, Homo sapien
aagacacatatccttcgatgcaacaattctact

SEQ ID NO: 49826 - DNA, 33 bp, Homo sapien
aagacacatatccttctatgcaacaattctact

SEQ ID NO: 49827 - DNA, 33 bp, Homo sapien
tgggggactgtaccaccggactgctgtatggca

SEQ ID NO: 49828 - DNA, 33 bp, Homo sapien
tgggggactgtaccactggactgctgtatggca

SEQ ID NO: 49829 - DNA, 33 bp, Homo sapien
ctgcagtgagactgacacctttgaactgaaaaa

SEQ ID NO: 49830 - DNA, 33 bp, Homo sapien
ctgcagtgagactgacgcctttgaactgaaaaa

SEQ ID NO: 49831 - DNA, 33 bp, Homo sapien
aaagggaaaacatggccaaataactacacaatg

SEQ ID NO: 49832 - DNA, 33 bp, Homo sapien
aaagggaaaacatggctaaataactacacaatg

SEQ ID NO: 49833 - DNA, 33 bp, Homo sapien
aaggggaaatatggcaaataaatcatttcacag

SEQ ID NO: 49834 - DNA, 33 bp, Homo sapien
aaggggaaatatggcagataaatcatttcacag

SEQ ID NO: 49835 - DNA, 33 bp, Homo sapien
tggcagagacatgaagactaagacacttgaagt

SEQ ID NO: 49836 - DNA, 33 bp, Homo sapien
tggcagagacatgaaggctaagacacttgaagt

SEQ ID NO: 49837 - DNA, 33 bp, Homo sapien
cccgtgggaaagacccagcttaaagtcacctat

SEQ ID NO: 49838 - DNA, 33 bp, Homo sapien
cccgtgggaaagacccggcttaaagtcacctat

SEQ ID NO: 49839 - DNA, 33 bp, Homo sapien
tgtactgtcaattgaacgtatggtttgagacat

SEQ ID NO: 49840 - DNA, 33 bp, Homo sapien
tgtactgtcaattgaatgtatggtttgagacat

SEQ ID NO: 49841 - DNA, 33 bp, Homo sapien
tatctactaatcctaaaacagagagcctcttct

SEQ ID NO: 49842 - DNA, 33 bp, Homo sapien
tatctactaatcctaagacagagagcctcttct

SEQ ID NO: 49843 - DNA, 33 bp, Homo sapien
agtcacgctgttagcacatctagtcaaactgat

SEQ ID NO: 49844 - DNA, 33 bp, Homo sapien
agtcacgctgttagcatatctagtcaaactgat

SEQ ID NO: 49845 - DNA, 33 bp, Homo sapien
tcaagatgaaagaaagaagagaccatacccaaa

SEQ ID NO: 49846 - DNA, 33 bp, Homo sapien
tcaagatgaaagaaaggagagaccatacccaaa

SEQ ID NO: 49847 - DNA, 33 bp, Homo sapien
caccgaaactactctcactatggatactaagac

SEQ ID NO: 49848 - DNA, 33 bp, Homo sapien
caccgaaactactctcgctatggatactaagac

SEQ ID NO: 49849 - DNA, 33 bp, Homo sapien
aaattccttttctctcaattgactgttttgctt

SEQ ID NO: 49850 - DNA, 33 bp, Homo sapien
aaattccttttctctctattgactgttttgctt

SEQ ID NO: 49851 - DNA, 33 bp, Homo sapien
gttccgggacgcaagcccagaaaaagataatta

SEQ ID NO: 49852 - DNA, 33 bp, Homo sapien
gttccgggacgcaagcgcagaaaaagataatta

SEQ ID NO: 49853 - DNA, 33 bp, Homo sapien
gcttttctgccaagacagacatcaggcttaaac

SEQ ID NO: 49854 - DNA, 33 bp, Homo sapien
gcttttctgccaagacggacatcaggcttaaac

SEQ ID NO: 49855 - DNA, 33 bp, Homo sapien
attacctcctaaagacagtatctctcgatatag

SEQ ID NO: 49856 - DNA, 33 bp, Homo sapien
attacctcctaaagactgtatctctcgatatag

SEQ ID NO: 49857 - DNA, 33 bp, Homo sapien
aaggaagtaagatagacagaaacgtttatgctg

SEQ ID NO: 49858 - DNA, 33 bp, Homo sapien
aaggaagtaagatagatagaaacgtttatgctg

SEQ ID NO: 49859 - DNA, 33 bp, Homo sapien
tgtctgtgaaataaccaagttcagcaaagagag

SEQ ID NO: 49860 - DNA, 33 bp, Homo sapien
tgtctgtgaaataaccgagttcagcaaagagag

SEQ ID NO: 49861 - DNA, 33 bp, Homo sapien
tacaaaatggctactaactttcatacttaatgg

SEQ ID NO: 49862 - DNA, 33 bp, Homo sapien
tacaaaatggctactagctttcatacttaatgg

SEQ ID NO: 49863 - DNA, 33 bp, Homo sapien
tactttaagactatgtaaaaatatcctgttcat

SEQ ID NO: 49864 - DNA, 33 bp, Homo sapien
tactttaagactatgttaaaatatcctgttcat

SEQ ID NO: 49865 - DNA, 33 bp, Homo sapien
gacaaatccttttagcactaataaatttcagag

SEQ ID NO: 49866 - DNA, 33 bp, Homo sapien
gacaaatccttttagcgctaataaatttcagag

SEQ ID NO: 49867 - DNA, 33 bp, Homo sapien
taggttactatgtagccattaaaatgcagctat

SEQ ID NO: 49868 - DNA, 33 bp, Homo sapien
taggttactatgtagctattaaaatgcagctat

SEQ ID NO: 49869 - DNA, 33 bp, Homo sapien
cgaatagataattcacaaagaagagtggtaaat

SEQ ID NO: 49870 - DNA, 33 bp, Homo sapien
cgaatagataattcacgaagaagagtggtaaat

SEQ ID NO: 49871 - DNA, 33 bp, Homo sapien
gacattttcctttagaactcatactcaagggag

SEQ ID NO: 49872 - DNA, 33 bp, Homo sapien
gacattttcctttagatctcatactcaagggag

SEQ ID NO: 49873 - DNA, 33 bp, Homo sapien
gtatctggaagcctaacctctctgtcagcaatc

SEQ ID NO: 49874 - DNA, 33 bp, Homo sapien
gtatctggaagcctaatctctctgtcagcaatc

SEQ ID NO: 49875 - DNA, 33 bp, Homo sapien
ccattattgcatgtcaaaggtcattttgataca

SEQ ID NO: 49876 - DNA, 33 bp, Homo sapien
ccattattgcatgtcagaggtcattttgataca

SEQ ID NO: 49877 - DNA, 33 bp, Homo sapien
aacaaatcccacaaaagctacatcagagaggta

SEQ ID NO: 49878 - DNA, 33 bp, Homo sapien
aacaaatcccacaaaatctacatcagagaggta

SEQ ID NO: 49879 - DNA, 33 bp, Homo sapien
ttcttgagggaacataaaagtaaccagtaacgc

SEQ ID NO: 49880 - DNA, 33 bp, Homo sapien
ttcttgagggaacatagaagtaaccagtaacgc

SEQ ID NO: 49881 - DNA, 33 bp, Homo sapien
cttattccacaactaaaaatcttcacctgtttt

SEQ ID NO: 49882 - DNA, 33 bp, Homo sapien
cttattccacaactaagaatcttcacctgtttt

SEQ ID NO: 49883 - DNA, 33 bp, Homo sapien
tacagggagaggtcaaatgaggtaagacttctg

SEQ ID NO: 49884 - DNA, 33 bp, Homo sapien
tacagggagaggtcaattgaggtaagacttctg

SEQ ID NO: 49885 - DNA, 33 bp, Homo sapien
caaaaagctgaaattacgttaagatgaaaagag

SEQ ID NO: 49886 - DNA, 33 bp, Homo sapien
caaaaagctgaaattatgttaagatgaaaagag

SEQ ID NO: 49887 - DNA, 33 bp, Homo sapien
tcttaccaggtaagaaacatactgcttcttatc

SEQ ID NO: 49888 - DNA, 33 bp, Homo sapien
tcttaccaggtaagaaccatactgcttcttatc

SEQ ID NO: 49889 - DNA, 33 bp, Homo sapien
agatgggaaattttgacctaggtggtatttcag

SEQ ID NO: 49890 - DNA, 33 bp, Homo sapien
agatgggaaattttgatctaggtggtatttcag

SEQ ID NO: 49891 - DNA, 33 bp, Homo sapien
tagagatagctatttacgccacacacgagagaa

SEQ ID NO: 49892 - DNA, 33 bp, Homo sapien
tagagatagctatttatgccacacacgagagaa

SEQ ID NO: 49893 - DNA, 33 bp, Homo sapien
agggtgagacataaaacgcttggcaggagaaaa

SEQ ID NO: 49894 - DNA, 33 bp, Homo sapien
agggtgagacataaaatgcttggcaggagaaaa

SEQ ID NO: 49895 - DNA, 33 bp, Homo sapien
tttagagcacttagcacggtacataagtgcccc

SEQ ID NO: 49896 - DNA, 33 bp, Homo sapien
tttagagcacttagcatggtacataagtgcccc

SEQ ID NO: 49897 - DNA, 33 bp, Homo sapien
tgatcatgagacgctacggctaaagtgttccaa

SEQ ID NO: 49898 - DNA, 33 bp, Homo sapien
tgatcatgagacgctatggctaaagtgttccaa

SEQ ID NO: 49899 - DNA, 33 bp, Homo sapien
ttgaaaatgaaaaatccaaacagaatgttagac

SEQ ID NO: 49900 - DNA, 33 bp, Homo sapien
ttgaaaatgaaaaatcgaaacagaatgttagac

SEQ ID NO: 49901 - DNA, 33 bp, Homo sapien
ctttatgtttgagaaaagattgttcagtagtct

SEQ ID NO: 49902 - DNA, 33 bp, Homo sapien
ctttatgtttgagaaacgattgttcagtagtct

SEQ ID NO: 49903 - DNA, 33 bp, Homo sapien
tagtggtctgagtagtcaacatttatttaggac

SEQ ID NO: 49904 - DNA, 33 bp, Homo sapien
tagtggtctgagtagtgaacatttatttaggac

SEQ ID NO: 49905 - DNA, 33 bp, Homo sapien
gactgctatttctaaacgatgtcacaatggata

SEQ ID NO: 49906 - DNA, 33 bp, Homo sapien
gactgctatttctaaatgatgtcacaatggata

SEQ ID NO: 49907 - DNA, 33 bp, Homo sapien
caaatgcactcacttcccttgtgtaaataccta

SEQ ID NO: 49908 - DNA, 33 bp, Homo sapien
caaatgcactcacttctcttgtgtaaataccta

SEQ ID NO: 49909 - DNA, 33 bp, Homo sapien
tgctgtttttatattaactaagccaatgcatag

SEQ ID NO: 49910 - DNA, 33 bp, Homo sapien
tgctgtttttatattatctaagccaatgcatag

SEQ ID NO: 49911 - DNA, 33 bp, Homo sapien
tgaagcaatctgaacacagaaaccatctttgat

SEQ ID NO: 49912 - DNA, 33 bp, Homo sapien
tgaagcaatctgaacatagaaaccatctttgat

SEQ ID NO: 49913 - DNA, 33 bp, Homo sapien
ctgaattgtccacatccgaaaattaaagctcag

SEQ ID NO: 49914 - DNA, 33 bp, Homo sapien
ctgaattgtccacatctgaaaattaaagctcag

SEQ ID NO: 49915 - DNA, 33 bp, Homo sapien
agatttgtattaagtgacaaaagtttcctcttg

SEQ ID NO: 49916 - DNA, 33 bp, Homo sapien
agatttgtattaagtgtcaaaagtttcctcttg

SEQ ID NO: 49917 - DNA, 33 bp, Homo sapien
tgtgcagggcatctgaagtttctaatttccagc

SEQ ID NO: 49918 - DNA, 33 bp, Homo sapien
tgtgcagggcatctgaggtttctaatttccagc

SEQ ID NO: 49919 - DNA, 33 bp, Homo sapien
gaaattcatcagtcaagaattacttggtattcc

SEQ ID NO: 49920 - DNA, 33 bp, Homo sapien
gaaattcatcagtcaataattacttggtattcc

SEQ ID NO: 49921 - DNA, 33 bp, Homo sapien
ttgaataatcagagaaaattcaacacaggagat

SEQ ID NO: 49922 - DNA, 33 bp, Homo sapien
ttgaataatcagagaagattcaacacaggagat

SEQ ID NO: 49923 - DNA, 33 bp, Homo sapien
gatgtttaggaaagcaacccacatttggagtca

SEQ ID NO: 49924 - DNA, 33 bp, Homo sapien
gatgtttaggaaagcagcccacatttggagtca

SEQ ID NO: 49925 - DNA, 33 bp, Homo sapien
ggcctcccatagctcaatcaatctctgtctatg

SEQ ID NO: 49926 - DNA, 33 bp, Homo sapien
ggcctcccatagctcagtcaatctctgtctatg

SEQ ID NO: 49927 - DNA, 33 bp, Homo sapien
aagcgagccatgtaacaatctgggtaagaggtt

SEQ ID NO: 49928 - DNA, 33 bp, Homo sapien
aagcgagccatgtaacgatctgggtaagaggtt

SEQ ID NO: 49929 - DNA, 33 bp, Homo sapien
ctaagtgccatgaaaacatatctgttctttcca

SEQ ID NO: 49930 - DNA, 33 bp, Homo sapien
ctaagtgccatgaaaatatatctgttctttcca

SEQ ID NO: 49931 - DNA, 33 bp, Homo sapien
tatgcttcactgtgaccaggatgagaagactac

SEQ ID NO: 49932 - DNA, 33 bp, Homo sapien
tatgcttcactgtgactaggatgagaagactac

SEQ ID NO: 49933 - DNA, 33 bp, Homo sapien
cagaactgagtcacatcatgataacttgctgaa

SEQ ID NO: 49934 - DNA, 33 bp, Homo sapien
cagaactgagtcacatgatgataacttgctgaa

SEQ ID NO: 49935 - DNA, 33 bp, Homo sapien
ggcagatggatcaaaaatggatgaaagagaagg

SEQ ID NO: 49936 - DNA, 33 bp, Homo sapien
ggcagatggatcaaaagtggatgaaagagaagg

SEQ ID NO: 49937 - DNA, 33 bp, Homo sapien
gtggtaatgtggaagacagatctgatgagaagt

SEQ ID NO: 49938 - DNA, 33 bp, Homo sapien
gtggtaatgtggaagatagatctgatgagaagt

SEQ ID NO: 49939 - DNA, 33 bp, Homo sapien
tgagtgaccaacagaaatggaggaattatgtat

SEQ ID NO: 49940 - DNA, 33 bp, Homo sapien
tgagtgaccaacagaagtggaggaattatgtat

SEQ ID NO: 49941 - DNA, 33 bp, Homo sapien
agacagatctaatctaccaattctaagtgtctt

SEQ ID NO: 49942 - DNA, 33 bp, Homo sapien
agacagatctaatctatcaattctaagtgtctt

SEQ ID NO: 49943 - DNA, 33 bp, Homo sapien
cctctctaatgttctacctttcagtttctaaag

SEQ ID NO: 49944 - DNA, 33 bp, Homo sapien
cctctctaatgttctagctttcagtttctaaag

SEQ ID NO: 49945 - DNA, 33 bp, Homo sapien
gctaatcttctgctggaactgtcatacgttatc

SEQ ID NO: 49946 - DNA, 33 bp, Homo sapien
gctaatcttctgctgggactgtcatacgttatc

SEQ ID NO: 49947 - DNA, 33 bp, Homo sapien
gctgggaatcgagggacgaagtaaaagtgaagc

SEQ ID NO: 49948 - DNA, 33 bp, Homo sapien
gctgggaatcgagggatgaagtaaaagtgaagc

SEQ ID NO: 49949 - DNA, 33 bp, Homo sapien
ggaagagagggactaacgttggtgagtatgaca

SEQ ID NO: 49950 - DNA, 33 bp, Homo sapien
ggaagagagggactaatgttggtgagtatgaca

SEQ ID NO: 49951 - DNA, 33 bp, Homo sapien
ttgagtggatctttgaaatgaggggacaggatt

SEQ ID NO: 49952 - DNA, 33 bp, Homo sapien
ttgagtggatctttgagatgaggggacaggatt

SEQ ID NO: 49953 - DNA, 33 bp, Homo sapien
taattatagctttgccagcaatttaaaaagtga

SEQ ID NO: 49954 - DNA, 33 bp, Homo sapien
taattatagctttgccggcaatttaaaaagtga

SEQ ID NO: 49955 - DNA, 33 bp, Homo sapien
tattagaacaaatggccgaaagttctagtctta

SEQ ID NO: 49956 - DNA, 33 bp, Homo sapien
tattagaacaaatggctgaaagttctagtctta

SEQ ID NO: 49957 - DNA, 33 bp, Homo sapien
aaataggatgtagagacgattgaaataagataa

SEQ ID NO: 49958 - DNA, 33 bp, Homo sapien
aaataggatgtagagatgattgaaataagataa

SEQ ID NO: 49959 - DNA, 33 bp, Homo sapien
aaggactgaggtctagaagaattggtgcagcag

SEQ ID NO: 49960 - DNA, 33 bp, Homo sapien
aaggactgaggtctagcagaattggtgcagcag

SEQ ID NO: 49961 - DNA, 33 bp, Homo sapien
agaggcaatggccctgaaatttaaacatttgcc

SEQ ID NO: 49962 - DNA, 33 bp, Homo sapien
agaggcaatggccctggaatttaaacatttgcc

SEQ ID NO: 49963 - DNA, 33 bp, Homo sapien
ctgaccagaaatcttaccctcacctggaaatga

SEQ ID NO: 49964 - DNA, 33 bp, Homo sapien
ctgaccagaaatcttatcctcacctggaaatga

SEQ ID NO: 49965 - DNA, 33 bp, Homo sapien
actgcaacttctgtgccctgtgaatatctgaat

SEQ ID NO: 49966 - DNA, 33 bp, Homo sapien
actgcaacttctgtgctctgtgaatatctgaat

SEQ ID NO: 49967 - DNA, 33 bp, Homo sapien
agaaagatgtgaaaagaactgcaaaggaaagga

SEQ ID NO: 49968 - DNA, 33 bp, Homo sapien
agaaagatgtgaaaaggactgcaaaggaaagga

SEQ ID NO: 49969 - DNA, 33 bp, Homo sapien
agagctacccaagttcaaggaaccatgtgagcc

SEQ ID NO: 49970 - DNA, 33 bp, Homo sapien
agagctacccaagttcgaggaaccatgtgagcc

SEQ ID NO: 49971 - DNA, 33 bp, Homo sapien
aggagtctgaagaggacggggagtcgtggatgc

SEQ ID NO: 49972 - DNA, 33 bp, Homo sapien
aggagtctgaagaggatggggagtcgtggatgc

SEQ ID NO: 49973 - DNA, 33 bp, Homo sapien
atagaaccaggagagacacaaaggcaacgtgga

SEQ ID NO: 49974 - DNA, 33 bp, Homo sapien
atagaaccaggagagagacaaaggcaacgtgga

SEQ ID NO: 49975 - DNA, 33 bp, Homo sapien
tggaaagtcatagtccaagacattttcttggtg

SEQ ID NO: 49976 - DNA, 33 bp, Homo sapien
tggaaagtcatagtcccagacattttcttggtg

SEQ ID NO: 49977 - DNA, 33 bp, Homo sapien
caaagaacatggactacgtgccccaagaagttc

SEQ ID NO: 49978 - DNA, 33 bp, Homo sapien
caaagaacatggactatgtgccccaagaagttc

SEQ ID NO: 49979 - DNA, 33 bp, Homo sapien
ccttaagagatacttacgaaagtgtttgggtaa

SEQ ID NO: 49980 - DNA, 33 bp, Homo sapien
ccttaagagatacttatgaaagtgtttgggtaa

SEQ ID NO: 49981 - DNA, 33 bp, Homo sapien
ggacataatgaaacaacgttatgaaacacaagg

SEQ ID NO: 49982 - DNA, 33 bp, Homo sapien
ggacataatgaaacaatgttatgaaacacaagg

SEQ ID NO: 49983 - DNA, 33 bp, Homo sapien
gagatcaagtcggccacgatgggacaggaactc

SEQ ID NO: 49984 - DNA, 33 bp, Homo sapien
gagatcaagtcggccatgatgggacaggaactc

SEQ ID NO: 49985 - DNA, 33 bp, Homo sapien
gagccactcagaaggacgttgctgagttcctgt

SEQ ID NO: 49986 - DNA, 33 bp, Homo sapien
gagccactcagaaggatgttgctgagttcctgt

SEQ ID NO: 49987 - DNA, 33 bp, Homo sapien
gcagtattattattgaacatagccttgaatgat

SEQ ID NO: 49988 - DNA, 33 bp, Homo sapien
gcagtattattattgagcatagccttgaatgat

SEQ ID NO: 49989 - DNA, 33 bp, Homo sapien
gcagagtagatggaacagattggaacagtttgg

SEQ ID NO: 49990 - DNA, 33 bp, Homo sapien
gcagagtagatggaacggattggaacagtttgg

SEQ ID NO: 49991 - DNA, 33 bp, Homo sapien
tgagaagtagggactcaatgctaaaagagatag

SEQ ID NO: 49992 - DNA, 33 bp, Homo sapien
tgagaagtagggactcgatgctaaaagagatag

SEQ ID NO: 49993 - DNA, 33 bp, Homo sapien
gcagaagtgatacgacacccctggacagcatgc

SEQ ID NO: 49994 - DNA, 33 bp, Homo sapien
gcagaagtgatacgacgcccctggacagcatgc

SEQ ID NO: 49995 - DNA, 33 bp, Homo sapien
tctttatcctcatcaaaaggcttagacttcagt

SEQ ID NO: 49996 - DNA, 33 bp, Homo sapien
tctttatcctcatcaagaggcttagacttcagt

SEQ ID NO: 49997 - DNA, 33 bp, Homo sapien
ttttggctgtgcaaacaaaacatttggccgtag

SEQ ID NO: 49998 - DNA, 33 bp, Homo sapien
ttttggctgtgcaaacgaaacatttggccgtag

SEQ ID NO: 49999 - DNA, 33 bp, Homo sapien
gctcatgattttgcacagaggcccattgcccca

SEQ ID NO: 50000 - DNA, 33 bp, Homo sapien
gctcatgattttgcacggaggcccattgcccca

SEQ ID NO: 50001 - DNA, 33 bp, Homo sapien
aaattcatttattcatcactggatacctcaata

SEQ ID NO: 50002 - DNA, 33 bp, Homo sapien
aaattcatttattcattactggatacctcaata

SEQ ID NO: 50003 - DNA, 33 bp, Homo sapien
ttcagctcctggagtcaaatgttcctacttcca

SEQ ID NO: 50004 - DNA, 33 bp, Homo sapien
ttcagctcctggagtcgaatgttcctacttcca

SEQ ID NO: 50005 - DNA, 33 bp, Homo sapien
attgtatggatgaagcaagctcatctctgtgaa

SEQ ID NO: 50006 - DNA, 33 bp, Homo sapien
attgtatggatgaagcgagctcatctctgtgaa

SEQ ID NO: 50007 - DNA, 33 bp, Homo sapien
ctaagtgtagtgctacagaaagaaaggctgtaa

SEQ ID NO: 50008 - DNA, 33 bp, Homo sapien
ctaagtgtagtgctaccgaaagaaaggctgtaa

SEQ ID NO: 50009 - DNA, 33 bp, Homo sapien
tgagagctaagttccaagagaaagagatcttgt

SEQ ID NO: 50010 - DNA, 33 bp, Homo sapien
tgagagctaagttccatgagaaagagatcttgt

SEQ ID NO: 50011 - DNA, 33 bp, Homo sapien
acatttctggtgtgtgcaacttggctcgtgggc

SEQ ID NO: 50012 - DNA, 33 bp, Homo sapien
acatttctggtgtgtgtaacttggctcgtgggc

SEQ ID NO: 50013 - DNA, 33 bp, Homo sapien
ttctgccagataggcacgattcccacctctgcc

SEQ ID NO: 50014 - DNA, 33 bp, Homo sapien
ttctgccagataggcatgattcccacctctgcc

SEQ ID NO: 50015 - DNA, 33 bp, Homo sapien
gcttaagatactacacagtctcacccgggcaca

SEQ ID NO: 50016 - DNA, 33 bp, Homo sapien
gcttaagatactacacggtctcacccgggcaca

SEQ ID NO: 50017 - DNA, 33 bp, Homo sapien
ttctatttgtaaaaacaagaccacagagaactg

SEQ ID NO: 50018 - DNA, 33 bp, Homo sapien
ttctatttgtaaaaacgagaccacagagaactg

SEQ ID NO: 50019 - DNA, 33 bp, Homo sapien
aggcaacagcaagaagacccaggcctctggtga

SEQ ID NO: 50020 - DNA, 33 bp, Homo sapien
aggcaacagcaagaagtcccaggcctctggtga

SEQ ID NO: 50021 - DNA, 33 bp, Homo sapien
tgcatactgggggctcaacaggaaagccactag

SEQ ID NO: 50022 - DNA, 33 bp, Homo sapien
tgcatactgggggctcgacaggaaagccactag

SEQ ID NO: 50023 - DNA, 33 bp, Homo sapien
aacaactttctgaaccaagtgccacactcactc

SEQ ID NO: 50024 - DNA, 33 bp, Homo sapien
aacaactttctgaaccgagtgccacactcactc

SEQ ID NO: 50025 - DNA, 33 bp, Homo sapien
ggccaaagccttactcacatttttcttttgcct

SEQ ID NO: 50026 - DNA, 33 bp, Homo sapien
ggccaaagccttactcgcatttttcttttgcct

SEQ ID NO: 50027 - DNA, 33 bp, Homo sapien
aactcagcgttcttcaagaaaattgctgccaca

SEQ ID NO: 50028 - DNA, 33 bp, Homo sapien
aactcagcgttcttcaggaaaattgctgccaca

SEQ ID NO: 50029 - DNA, 33 bp, Homo sapien
tctgaaccacagagccaataggtcactgagatg

SEQ ID NO: 50030 - DNA, 33 bp, Homo sapien
tctgaaccacagagccgataggtcactgagatg

SEQ ID NO: 50031 - DNA, 33 bp, Homo sapien
agagagaaaggcagagaaatgactgcaattccc

SEQ ID NO: 50032 - DNA, 33 bp, Homo sapien
agagagaaaggcagagcaatgactgcaattccc

SEQ ID NO: 50033 - DNA, 33 bp, Homo sapien
tccctcctttagtcaccaccaattatagagggc

SEQ ID NO: 50034 - DNA, 33 bp, Homo sapien
tccctcctttagtcactaccaattatagagggc

SEQ ID NO: 50035 - DNA, 33 bp, Homo sapien
ggtccacacagtagacggaaggtgcccggtcag

SEQ ID NO: 50036 - DNA, 33 bp, Homo sapien
ggtccacacagtagactgaaggtgcccggtcag

SEQ ID NO: 50037 - DNA, 33 bp, Homo sapien
cttgggagcccccctcaactctcatcttccttc

SEQ ID NO: 50038 - DNA, 33 bp, Homo sapien
cttgggagcccccctcgactctcatcttccttc

SEQ ID NO: 50039 - DNA, 33 bp, Homo sapien
tttcgggaaccacatacatcacttcatgtaaca

SEQ ID NO: 50040 - DNA, 33 bp, Homo sapien
tttcgggaaccacatatatcacttcatgtaaca

SEQ ID NO: 50041 - DNA, 33 bp, Homo sapien
gtcacagcaacagaaaatggaccaacacaagta

SEQ ID NO: 50042 - DNA, 33 bp, Homo sapien
gtcacagcaacagaaagtggaccaacacaagta

SEQ ID NO: 50043 - DNA, 33 bp, Homo sapien
acaaattaaaaacaaacagatcactgtgctggc

SEQ ID NO: 50044 - DNA, 33 bp, Homo sapien
acaaattaaaaacaaagagatcactgtgctggc

SEQ ID NO: 50045 - DNA, 33 bp, Homo sapien
gcacagaaactccacaagaattagagactctag

SEQ ID NO: 50046 - DNA, 33 bp, Homo sapien
gcacagaaactccacatgaattagagactctag

SEQ ID NO: 50047 - DNA, 33 bp, Homo sapien
gtggggtagagcttgaagagagtgagggagttc

SEQ ID NO: 50048 - DNA, 33 bp, Homo sapien
gtggggtagagcttgaggagagtgagggagttc

SEQ ID NO: 50049 - DNA, 33 bp, Homo sapien
caaaaggtgatttccacagaccagcatgcccta

SEQ ID NO: 50050 - DNA, 33 bp, Homo sapien
caaaaggtgatttccagagaccagcatgcccta

SEQ ID NO: 50051 - DNA, 33 bp, Homo sapien
actactttgtgacattcaaattcttcagaatgc

SEQ ID NO: 50052 - DNA, 33 bp, Homo sapien
actactttgtgacattgaaattcttcagaatgc

SEQ ID NO: 50053 - DNA, 33 bp, Homo sapien
aaatcctgcatcatggaatcttagaactggaag

SEQ ID NO: 50054 - DNA, 33 bp, Homo sapien
aaatcctgcatcatggcatcttagaactggaag

SEQ ID NO: 50055 - DNA, 33 bp, Homo sapien
agacaaaacacaaacaaaaaggctgaaatccca

SEQ ID NO: 50056 - DNA, 33 bp, Homo sapien
agacaaaacacaaacagaaaggctgaaatccca

SEQ ID NO: 50057 - DNA, 33 bp, Homo sapien
atgagatgtaaatgaaatagttacttaaggtct

SEQ ID NO: 50058 - DNA, 33 bp, Homo sapien
atgagatgtaaatgaagtagttacttaaggtct

SEQ ID NO: 50059 - DNA, 33 bp, Homo sapien
ttataccatttccatgacagatttctacaagag

SEQ ID NO: 50060 - DNA, 33 bp, Homo sapien
ttataccatttccatggcagatttctacaagag

SEQ ID NO: 50061 - DNA, 33 bp, Homo sapien
gttctggcttctgaaactgcagtggcggttccc

SEQ ID NO: 50062 - DNA, 33 bp, Homo sapien
gttctggcttctgaaattgcagtggcggttccc

SEQ ID NO: 50063 - DNA, 33 bp, Homo sapien
acacctgatggaataaccctttcgtgagatgct

SEQ ID NO: 50064 - DNA, 33 bp, Homo sapien
acacctgatggaataatcctttcgtgagatgct

SEQ ID NO: 50065 - DNA, 33 bp, Homo sapien
tgagtgttcctttggaagtatgccactcatttt

SEQ ID NO: 50066 - DNA, 33 bp, Homo sapien
tgagtgttcctttggacgtatgccactcatttt

SEQ ID NO: 50067 - DNA, 33 bp, Homo sapien
gccaggtacccactctaaacacagacaacaggt

SEQ ID NO: 50068 - DNA, 33 bp, Homo sapien
gccaggtacccactctgaacacagacaacaggt

SEQ ID NO: 50069 - DNA, 33 bp, Homo sapien
aatcacagaatcttaaatacggtattgtctgtc

SEQ ID NO: 50070 - DNA, 33 bp, Homo sapien
aatcacagaatcttaagtacggtattgtctgtc

SEQ ID NO: 50071 - DNA, 33 bp, Homo sapien
tagattacctctgcttaaagaaatatttatcca

SEQ ID NO: 50072 - DNA, 33 bp, Homo sapien
tagattacctctgcttcaagaaatatttatcca

SEQ ID NO: 50073 - DNA, 33 bp, Homo sapien
ttggtgacaagttatcagagacaaatcaccaat

SEQ ID NO: 50074 - DNA, 33 bp, Homo sapien
ttggtgacaagttatcggagacaaatcaccaat

SEQ ID NO: 50075 - DNA, 33 bp, Homo sapien
cactagctgaaacactaaacttcctaaaacaaa

SEQ ID NO: 50076 - DNA, 33 bp, Homo sapien
cactagctgaaacactgaacttcctaaaacaaa

SEQ ID NO: 50077 - DNA, 33 bp, Homo sapien
tcaggaagcctccccacactgcatcttcttctc

SEQ ID NO: 50078 - DNA, 33 bp, Homo sapien
tcaggaagcctccccatactgcatcttcttctc

SEQ ID NO: 50079 - DNA, 33 bp, Homo sapien
ttctctttcataatccccttcttattttaacac

SEQ ID NO: 50080 - DNA, 33 bp, Homo sapien
ttctctttcataatcctcttcttattttaacac

SEQ ID NO: 50081 - DNA, 33 bp, Homo sapien
aatgtcctcgccaccaaaaatactgcctgaata

SEQ ID NO: 50082 - DNA, 33 bp, Homo sapien
aatgtcctcgccaccagaaatactgcctgaata

SEQ ID NO: 50083 - DNA, 33 bp, Homo sapien
gacagagcttcaacaaatgtaaagtcaaaagaa

SEQ ID NO: 50084 - DNA, 33 bp, Homo sapien
gacagagcttcaacaagtgtaaagtcaaaagaa

SEQ ID NO: 50085 - DNA, 33 bp, Homo sapien
gtgctccttcgtgctccgactcttctcactgtt

SEQ ID NO: 50086 - DNA, 33 bp, Homo sapien
gtgctccttcgtgctctgactcttctcactgtt

SEQ ID NO: 50087 - DNA, 33 bp, Homo sapien
taaaaggcactttagccacagcctgacaaggtg

SEQ ID NO: 50088 - DNA, 33 bp, Homo sapien
taaaaggcactttagctacagcctgacaaggtg

SEQ ID NO: 50089 - DNA, 33 bp, Homo sapien
atggtaaaatataagcaaaggactcgtactgct

SEQ ID NO: 50090 - DNA, 33 bp, Homo sapien
atggtaaaatataagcgaaggactcgtactgct

SEQ ID NO: 50091 - DNA, 33 bp, Homo sapien
agatttgagctgagcccattaggacaaatagat

SEQ ID NO: 50092 - DNA, 33 bp, Homo sapien
agatttgagctgagcctattaggacaaatagat

SEQ ID NO: 50093 - DNA, 33 bp, Homo sapien
ctttaaatgactatcaagaaatctatttggtga

SEQ ID NO: 50094 - DNA, 33 bp, Homo sapien
ctttaaatgactatcaggaaatctatttggtga

SEQ ID NO: 50095 - DNA, 33 bp, Homo sapien
ttctttgggaaggtgacgcacattggaggaaat

SEQ ID NO: 50096 - DNA, 33 bp, Homo sapien
ttctttgggaaggtgatgcacattggaggaaat

SEQ ID NO: 50097 - DNA, 33 bp, Homo sapien
atatcacacttttagaataataagacagcaaga

SEQ ID NO: 50098 - DNA, 33 bp, Homo sapien
atatcacacttttagagtaataagacagcaaga

SEQ ID NO: 50099 - DNA, 33 bp, Homo sapien
agtaaaagctaagacactatttatgctaaattc

SEQ ID NO: 50100 - DNA, 33 bp, Homo sapien
agtaaaagctaagacagtatttatgctaaattc

SEQ ID NO: 50101 - DNA, 33 bp, Homo sapien
accagggcttactataactcactccttagattc

SEQ ID NO: 50102 - DNA, 33 bp, Homo sapien
accagggcttactatagctcactccttagattc

SEQ ID NO: 50103 - DNA, 33 bp, Homo sapien
ggaacatcagcgtgcacagaaatggagagttga

SEQ ID NO: 50104 - DNA, 33 bp, Homo sapien
ggaacatcagcgtgcatagaaatggagagttga

SEQ ID NO: 50105 - DNA, 33 bp, Homo sapien
catcagccggcaaccaatacctctgaggacata

SEQ ID NO: 50106 - DNA, 33 bp, Homo sapien
catcagccggcaaccattacctctgaggacata

SEQ ID NO: 50107 - DNA, 33 bp, Homo sapien
aggttagataagattaagggagttggaggatca

SEQ ID NO: 50108 - DNA, 33 bp, Homo sapien
aggttagataagattacgggagttggaggatca

SEQ ID NO: 50109 - DNA, 33 bp, Homo sapien
gttggtggaagaaccacagtgagatgtttgtgt

SEQ ID NO: 50110 - DNA, 33 bp, Homo sapien
gttggtggaagaaccatagtgagatgtttgtgt

SEQ ID NO: 50111 - DNA, 33 bp, Homo sapien
ggaagggcagtattcaccccagaaaagctagga

SEQ ID NO: 50112 - DNA, 33 bp, Homo sapien
ggaagggcagtattcatcccagaaaagctagga

SEQ ID NO: 50113 - DNA, 33 bp, Homo sapien
ttgttaggacagcgtggaatatattttagagag

SEQ ID NO: 50114 - DNA, 33 bp, Homo sapien
ttgttaggacagcgtgtaatatattttagagag

SEQ ID NO: 50115 - DNA, 33 bp, Homo sapien
cctgcctctgtgacacaagccagagattttaat

SEQ ID NO: 50116 - DNA, 33 bp, Homo sapien
cctgcctctgtgacacgagccagagattttaat

SEQ ID NO: 50117 - DNA, 33 bp, Homo sapien
atggagactaaaagaactgaaagacacagcctc

SEQ ID NO: 50118 - DNA, 33 bp, Homo sapien
atggagactaaaagaattgaaagacacagcctc

SEQ ID NO: 50119 - DNA, 33 bp, Homo sapien
ttctctgccatctgctaactgctttgggcctca

SEQ ID NO: 50120 - DNA, 33 bp, Homo sapien
ttctctgccatctgctgactgctttgggcctca

SEQ ID NO: 50121 - DNA, 33 bp, Homo sapien
tgagtggaatcctccaaaaatgaacacagattc

SEQ ID NO: 50122 - DNA, 33 bp, Homo sapien
tgagtggaatcctccagaaatgaacacagattc

SEQ ID NO: 50123 - DNA, 33 bp, Homo sapien
agctaagtgttagaaccaagaccaaactgcagg

SEQ ID NO: 50124 - DNA, 33 bp, Homo sapien
agctaagtgttagaacgaagaccaaactgcagg

SEQ ID NO: 50125 - DNA, 33 bp, Homo sapien
cctgaaaaaaaggcgccagctattaaaaggggc

SEQ ID NO: 50126 - DNA, 33 bp, Homo sapien
cctgaaaaaaaggcgctagctattaaaaggggc

SEQ ID NO: 50127 - DNA, 33 bp, Homo sapien
tcttacttaataaccacctgagcataaacccat

SEQ ID NO: 50128 - DNA, 33 bp, Homo sapien
tcttacttaataaccatctgagcataaacccat

SEQ ID NO: 50129 - DNA, 33 bp, Homo sapien
aaaaggagaacaatgacaaaggagtaaatggtg

SEQ ID NO: 50130 - DNA, 33 bp, Homo sapien
aaaaggagaacaatgagaaaggagtaaatggtg

SEQ ID NO: 50131 - DNA, 33 bp, Homo sapien
tattgaagactaacatcaggtgacagtggatat

SEQ ID NO: 50132 - DNA, 33 bp, Homo sapien
tattgaagactaacattaggtgacagtggatat

SEQ ID NO: 50133 - DNA, 33 bp, Homo sapien
acctgggtagccttagacaagttactcagccta

SEQ ID NO: 50134 - DNA, 33 bp, Homo sapien
acctgggtagccttaggcaagttactcagccta

SEQ ID NO: 50135 - DNA, 33 bp, Homo sapien
atgtattgagcaagtacctaatgaaagaagcca

SEQ ID NO: 50136 - DNA, 33 bp, Homo sapien
atgtattgagcaagtagctaatgaaagaagcca

SEQ ID NO: 50137 - DNA, 33 bp, Homo sapien
tgtttttaaactaacccattcctgctcccctat

SEQ ID NO: 50138 - DNA, 33 bp, Homo sapien
tgtttttaaactaacctattcctgctcccctat

SEQ ID NO: 50139 - DNA, 33 bp, Homo sapien
tctcctcacctataaaatggaaggccctacttc

SEQ ID NO: 50140 - DNA, 33 bp, Homo sapien
tctcctcacctataaagtggaaggccctacttc

SEQ ID NO: 50141 - DNA, 33 bp, Homo sapien
acgaggtgcttctggacgagccctttctagctg

SEQ ID NO: 50142 - DNA, 33 bp, Homo sapien
acgaggtgcttctggatgagccctttctagctg

SEQ ID NO: 50143 - DNA, 33 bp, Homo sapien
agtgataggtataagacggactaaactagtctt

SEQ ID NO: 50144 - DNA, 33 bp, Homo sapien
agtgataggtataagatggactaaactagtctt

SEQ ID NO: 50145 - DNA, 33 bp, Homo sapien
cgctgacttgcctgctaaaaagctttgacctca

SEQ ID NO: 50146 - DNA, 33 bp, Homo sapien
cgctgacttgcctgctgaaaagctttgacctca

SEQ ID NO: 50147 - DNA, 33 bp, Homo sapien
aatattcaccaatgaacccatcacttacagaaa

SEQ ID NO: 50148 - DNA, 33 bp, Homo sapien
aatattcaccaatgaagccatcacttacagaaa

SEQ ID NO: 50149 - DNA, 33 bp, Homo sapien
cccaaagatgtctacacactaatccccagaaca

SEQ ID NO: 50150 - DNA, 33 bp, Homo sapien
cccaaagatgtctacatactaatccccagaaca

SEQ ID NO: 50151 - DNA, 33 bp, Homo sapien
ttaagcaaagcaactacgaaggaggaggagaag

SEQ ID NO: 50152 - DNA, 33 bp, Homo sapien
ttaagcaaagcaactatgaaggaggaggagaag

SEQ ID NO: 50153 - DNA, 33 bp, Homo sapien
ctgatatggacgggcaagtctagccatggggtg

SEQ ID NO: 50154 - DNA, 33 bp, Homo sapien
ctgatatggacgggcaggtctagccatggggtg

SEQ ID NO: 50155 - DNA, 33 bp, Homo sapien
aattcagtaaatcaaacaagacatgctaaagag

SEQ ID NO: 50156 - DNA, 33 bp, Homo sapien
aattcagtaaatcaaagaagacatgctaaagag

SEQ ID NO: 50157 - DNA, 33 bp, Homo sapien
atcatgctcctagaacaccttccaggtcaaacc

SEQ ID NO: 50158 - DNA, 33 bp, Homo sapien
atcatgctcctagaacgccttccaggtcaaacc

SEQ ID NO: 50159 - DNA, 33 bp, Homo sapien
agcatcaccatcacaacgatcagaaagtttaaa

SEQ ID NO: 50160 - DNA, 33 bp, Homo sapien
agcatcaccatcacaatgatcagaaagtttaaa

SEQ ID NO: 50161 - DNA, 33 bp, Homo sapien
ataacacatacctctacatccctcagaaagttt

SEQ ID NO: 50162 - DNA, 33 bp, Homo sapien
ataacacatacctctatatccctcagaaagttt

SEQ ID NO: 50163 - DNA, 33 bp, Homo sapien
gatgaatttagagcagcacattttttaaaactt

SEQ ID NO: 50164 - DNA, 33 bp, Homo sapien
gatgaatttagagcaggacattttttaaaactt

SEQ ID NO: 50165 - DNA, 33 bp, Homo sapien
gtgggtaatcttgggagggagtctgcaaatcaa

SEQ ID NO: 50166 - DNA, 33 bp, Homo sapien
gtgggtaatcttgggatggagtctgcaaatcaa

SEQ ID NO: 50167 - DNA, 33 bp, Homo sapien
ctctatgggttagtcgaatctgtgagaggatgg

SEQ ID NO: 50168 - DNA, 33 bp, Homo sapien
ctctatgggttagtcggatctgtgagaggatgg

SEQ ID NO: 50169 - DNA, 33 bp, Homo sapien
ttagacatctactttacggtcggtataaaggca

SEQ ID NO: 50170 - DNA, 33 bp, Homo sapien
ttagacatctactttatggtcggtataaaggca

SEQ ID NO: 50171 - DNA, 33 bp, Homo sapien
tcctatcgcccttctacctacatgcatttatac

SEQ ID NO: 50172 - DNA, 33 bp, Homo sapien
tcctatcgcccttctatctacatgcatttatac

SEQ ID NO: 50173 - DNA, 33 bp, Homo sapien
tgctgtttctacccagacagatcttcacatggg

SEQ ID NO: 50174 - DNA, 33 bp, Homo sapien
tgctgtttctacccaggcagatcttcacatggg

SEQ ID NO: 50175 - DNA, 33 bp, Homo sapien
tctatgtcccccattacagtgcctggcacagtg

SEQ ID NO: 50176 - DNA, 33 bp, Homo sapien
tctatgtcccccattatagtgcctggcacagtg

SEQ ID NO: 50177 - DNA, 33 bp, Homo sapien
ctgtcctcaaaacagacgctctcccagcaggcc

SEQ ID NO: 50178 - DNA, 33 bp, Homo sapien
ctgtcctcaaaacagatgctctcccagcaggcc

SEQ ID NO: 50179 - DNA, 33 bp, Homo sapien
agcctaagcttccccacgtgaaagagtggaaac

SEQ ID NO: 50180 - DNA, 33 bp, Homo sapien
agcctaagcttccccatgtgaaagagtggaaac

SEQ ID NO: 50181 - DNA, 33 bp, Homo sapien
cctgaaaccctcctccactctaataggctggat

SEQ ID NO: 50182 - DNA, 33 bp, Homo sapien
cctgaaaccctcctccgctctaataggctggat

SEQ ID NO: 50183 - DNA, 33 bp, Homo sapien
cactcttgcctggatacggtgcatggatcatgg

SEQ ID NO: 50184 - DNA, 33 bp, Homo sapien
cactcttgcctggatatggtgcatggatcatgg

SEQ ID NO: 50185 - DNA, 33 bp, Homo sapien
gctttcgtttctctataacattccttgcttctt

SEQ ID NO: 50186 - DNA, 33 bp, Homo sapien
gctttcgtttctctatcacattccttgcttctt

SEQ ID NO: 50187 - DNA, 33 bp, Homo sapien
acctgtatgtaggccaatacaactcactttccc

SEQ ID NO: 50188 - DNA, 33 bp, Homo sapien
acctgtatgtaggccagtacaactcactttccc

SEQ ID NO: 50189 - DNA, 33 bp, Homo sapien
gcagagcttaggaagaaatacagcctaaggagg

SEQ ID NO: 50190 - DNA, 33 bp, Homo sapien
gcagagcttaggaagacatacagcctaaggagg

SEQ ID NO: 50191 - DNA, 33 bp, Homo sapien
gaacaagtggtaaatacccccattagcactttg

SEQ ID NO: 50192 - DNA, 33 bp, Homo sapien
gaacaagtggtaaatatccccattagcactttg

SEQ ID NO: 50193 - DNA, 33 bp, Homo sapien
ggagcgtttctcaaataaaaatagaaggttgtt

SEQ ID NO: 50194 - DNA, 33 bp, Homo sapien
ggagcgtttctcaaatgaaaatagaaggttgtt

SEQ ID NO: 50195 - DNA, 33 bp, Homo sapien
ggccataattgctccaagtgaaatccccaatac

SEQ ID NO: 50196 - DNA, 33 bp, Homo sapien
ggccataattgctccaggtgaaatccccaatac

SEQ ID NO: 50197 - DNA, 33 bp, Homo sapien
caagtctcaattgaaaagtttccttccaagaag

SEQ ID NO: 50198 - DNA, 33 bp, Homo sapien
caagtctcaattgaaatgtttccttccaagaag

SEQ ID NO: 50199 - DNA, 33 bp, Homo sapien
tcggtttgagctcctcccctatatacgcatacc

SEQ ID NO: 50200 - DNA, 33 bp, Homo sapien
tcggtttgagctcctctcctatatacgcatacc

SEQ ID NO: 50201 - DNA, 33 bp, Homo sapien
gaggtgtatcgggcctcaaagtatttttacctg

SEQ ID NO: 50202 - DNA, 33 bp, Homo sapien
gaggtgtatcgggccttaaagtatttttacctg

SEQ ID NO: 50203 - DNA, 33 bp, Homo sapien
ctggaaacagaaacaactgtagaaattatattg

SEQ ID NO: 50204 - DNA, 33 bp, Homo sapien
ctggaaacagaaacaagtgtagaaattatattg

SEQ ID NO: 50205 - DNA, 33 bp, Homo sapien
gctggatgacacaaaaggatttactatggttct

SEQ ID NO: 50206 - DNA, 33 bp, Homo sapien
gctggatgacacaaaatgatttactatggttct

SEQ ID NO: 50207 - DNA, 33 bp, Homo sapien
gtggtttgatggagaaagaaacaagaagagttg

SEQ ID NO: 50208 - DNA, 33 bp, Homo sapien
gtggtttgatggagaaggaaacaagaagagttg

SEQ ID NO: 50209 - DNA, 33 bp, Homo sapien
ggatgtctcttcaacccacaaagtctttacttc

SEQ ID NO: 50210 - DNA, 33 bp, Homo sapien
ggatgtctcttcaacctacaaagtctttacttc

SEQ ID NO: 50211 - DNA, 33 bp, Homo sapien
agagaggacatttcccactttgagcaactccat

SEQ ID NO: 50212 - DNA, 33 bp, Homo sapien
agagaggacatttcccgctttgagcaactccat

SEQ ID NO: 50213 - DNA, 33 bp, Homo sapien
attctttatgagaatacgcagtttcaattttat

SEQ ID NO: 50214 - DNA, 33 bp, Homo sapien
attctttatgagaatatgcagtttcaattttat

SEQ ID NO: 50215 - DNA, 33 bp, Homo sapien
ttctttgccatgtatacctcataaatctgagtt

SEQ ID NO: 50216 - DNA, 33 bp, Homo sapien
ttctttgccatgtatatctcataaatctgagtt

SEQ ID NO: 50217 - DNA, 33 bp, Homo sapien
cactttctggctaaataatctcaagcaaatcaa

SEQ ID NO: 50218 - DNA, 33 bp, Homo sapien
cactttctggctaaatgatctcaagcaaatcaa

SEQ ID NO: 50219 - DNA, 33 bp, Homo sapien
aatacactagatgttccccttcttgaactggtg

SEQ ID NO: 50220 - DNA, 33 bp, Homo sapien
aatacactagatgttctccttcttgaactggtg

SEQ ID NO: 50221 - DNA, 33 bp, Homo sapien
aaccactgtgacatccagagtgcaggaaggagt

SEQ ID NO: 50222 - DNA, 33 bp, Homo sapien
aaccactgtgacatccggagtgcaggaaggagt

SEQ ID NO: 50223 - DNA, 33 bp, Homo sapien
tttgagaagcaaggagccagaaccacagtatgt

SEQ ID NO: 50224 - DNA, 33 bp, Homo sapien
tttgagaagcaaggaggcagaaccacagtatgt

SEQ ID NO: 50225 - DNA, 33 bp, Homo sapien
ttaaaaagagtgaaaaatagaggtgcaaatcct

SEQ ID NO: 50226 - DNA, 33 bp, Homo sapien
ttaaaaagagtgaaaagtagaggtgcaaatcct

SEQ ID NO: 50227 - DNA, 33 bp, Homo sapien
ggaaaagaagttactacagttttgcatagaaag

SEQ ID NO: 50228 - DNA, 33 bp, Homo sapien
ggaaaagaagttactatagttttgcatagaaag

SEQ ID NO: 50229 - DNA, 33 bp, Homo sapien
atgactcaatgtgatacgaaccttcatagctct

SEQ ID NO: 50230 - DNA, 33 bp, Homo sapien
atgactcaatgtgatatgaaccttcatagctct

SEQ ID NO: 50231 - DNA, 33 bp, Homo sapien
taaattccagaatatccatgaggagtcttggaa

SEQ ID NO: 50232 - DNA, 33 bp, Homo sapien
taaattccagaatatctatgaggagtcttggaa

SEQ ID NO: 50233 - DNA, 33 bp, Homo sapien
gtttcaggagtgtgagcagatctccaaaacaaa

SEQ ID NO: 50234 - DNA, 33 bp, Homo sapien
gtttcaggagtgtgagtagatctccaaaacaaa

SEQ ID NO: 50235 - DNA, 33 bp, Homo sapien
aagaaatcgtggatgacgacaatatgaatttga

SEQ ID NO: 50236 - DNA, 33 bp, Homo sapien
aagaaatcgtggatgatgacaatatgaatttga

SEQ ID NO: 50237 - DNA, 33 bp, Homo sapien
ctggcacagagtatccaagctagaaaagttaaa

SEQ ID NO: 50238 - DNA, 33 bp, Homo sapien
ctggcacagagtatccgagctagaaaagttaaa

SEQ ID NO: 50239 - DNA, 33 bp, Homo sapien
ttttttttgagtcaccactgctattaggtgctt

SEQ ID NO: 50240 - DNA, 33 bp, Homo sapien
ttttttttgagtcaccgctgctattaggtgctt

SEQ ID NO: 50241 - DNA, 33 bp, Homo sapien
taggtcttcctggaaccgtgccaaaaagagaaa

SEQ ID NO: 50242 - DNA, 33 bp, Homo sapien
taggtcttcctggaactgtgccaaaaagagaaa

SEQ ID NO: 50243 - DNA, 33 bp, Homo sapien
tctctccagccaaagaagagaaaaggggcaaca

SEQ ID NO: 50244 - DNA, 33 bp, Homo sapien
tctctccagccaaagaggagaaaaggggcaaca

SEQ ID NO: 50245 - DNA, 33 bp, Homo sapien
gtagaatatgtggtcacggctatagatgtgact

SEQ ID NO: 50246 - DNA, 33 bp, Homo sapien
gtagaatatgtggtcatggctatagatgtgact

SEQ ID NO: 50247 - DNA, 33 bp, Homo sapien
aagtgcagctttaataagaatagtttcatcagt

SEQ ID NO: 50248 - DNA, 33 bp, Homo sapien
aagtgcagctttaatatgaatagtttcatcagt

SEQ ID NO: 50249 - DNA, 33 bp, Homo sapien
gctgagtagcaataaagtggtacaggtggttac

SEQ ID NO: 50250 - DNA, 33 bp, Homo sapien
gctgagtagcaataaattggtacaggtggttac

SEQ ID NO: 50251 - DNA, 33 bp, Homo sapien
gacaaggccaccaaaacgataaatcagcttagt

SEQ ID NO: 50252 - DNA, 33 bp, Homo sapien
gacaaggccaccaaaaggataaatcagcttagt

SEQ ID NO: 50253 - DNA, 33 bp, Homo sapien
gctaccaaagcaatcaaaattaaacctctggat

SEQ ID NO: 50254 - DNA, 33 bp, Homo sapien
gctaccaaagcaatcagaattaaacctctggat

SEQ ID NO: 50255 - DNA, 33 bp, Homo sapien
cctgttactttctccacagggtaattccctccc

SEQ ID NO: 50256 - DNA, 33 bp, Homo sapien
cctgttactttctccatagggtaattccctccc

SEQ ID NO: 50257 - DNA, 33 bp, Homo sapien
cttggaaaatgagccaactgagaaactgttgaa

SEQ ID NO: 50258 - DNA, 33 bp, Homo sapien
cttggaaaatgagccacctgagaaactgttgaa

SEQ ID NO: 50259 - DNA, 33 bp, Homo sapien
gctttgttaacttagcctcttcctctatggaga

SEQ ID NO: 50260 - DNA, 33 bp, Homo sapien
gctttgttaacttagcttcttcctctatggaga

SEQ ID NO: 50261 - DNA, 33 bp, Homo sapien
tttccaagctaagaaaaggaagtgaattgttcg

SEQ ID NO: 50262 - DNA, 33 bp, Homo sapien
tttccaagctaagaaagggaagtgaattgttcg

SEQ ID NO: 50263 - DNA, 33 bp, Homo sapien
tgttccttaaagatgacgtcacttcacacacaa

SEQ ID NO: 50264 - DNA, 33 bp, Homo sapien
tgttccttaaagatgatgtcacttcacacacaa

SEQ ID NO: 50265 - DNA, 33 bp, Homo sapien
ttctgtcttaattgccccttggtgcagtgaatt

SEQ ID NO: 50266 - DNA, 33 bp, Homo sapien
ttctgtcttaattgcctcttggtgcagtgaatt

SEQ ID NO: 50267 - DNA, 33 bp, Homo sapien
aatactagtaaaatgtaaaaatgaagtgttatc

SEQ ID NO: 50268 - DNA, 33 bp, Homo sapien
aatactagtaaaatgtgaaaatgaagtgttatc

SEQ ID NO: 50269 - DNA, 33 bp, Homo sapien
gtcatgtcttacacaccgcaagcctatggtatg

SEQ ID NO: 50270 - DNA, 33 bp, Homo sapien
gtcatgtcttacacactgcaagcctatggtatg

SEQ ID NO: 50271 - DNA, 33 bp, Homo sapien
gcctgagctctgaaacgctaaataaaccacatc

SEQ ID NO: 50272 - DNA, 33 bp, Homo sapien
gcctgagctctgaaactctaaataaaccacatc

SEQ ID NO: 50273 - DNA, 33 bp, Homo sapien
tgttttttctgcacaacggagggcctgctgacg

SEQ ID NO: 50274 - DNA, 33 bp, Homo sapien
tgttttttctgcacaatggagggcctgctgacg

SEQ ID NO: 50275 - DNA, 33 bp, Homo sapien
gtgaggctgcattttaacacagtatcaatctcc

SEQ ID NO: 50276 - DNA, 33 bp, Homo sapien
gtgaggctgcattttagcacagtatcaatctcc

SEQ ID NO: 50277 - DNA, 33 bp, Homo sapien
tgccctgatataaaccacctgggaatctaaggg

SEQ ID NO: 50278 - DNA, 33 bp, Homo sapien
tgccctgatataaaccgcctgggaatctaaggg

SEQ ID NO: 50279 - DNA, 33 bp, Homo sapien
tgcagtttggtggcaacagagtctgacagaaca

SEQ ID NO: 50280 - DNA, 33 bp, Homo sapien
tgcagtttggtggcaatagagtctgacagaaca

SEQ ID NO: 50281 - DNA, 33 bp, Homo sapien
ttccccataagctacactggtccaggccataaa

SEQ ID NO: 50282 - DNA, 33 bp, Homo sapien
ttccccataagctacattggtccaggccataaa

SEQ ID NO: 50283 - DNA, 33 bp, Homo sapien
caccaccaaaaacttaaggaaagtgacactctt

SEQ ID NO: 50284 - DNA, 33 bp, Homo sapien
caccaccaaaaacttagggaaagtgacactctt

SEQ ID NO: 50285 - DNA, 33 bp, Homo sapien
acctgctagagtcatacgttcggggaattaagt

SEQ ID NO: 50286 - DNA, 33 bp, Homo sapien
acctgctagagtcatatgttcggggaattaagt

SEQ ID NO: 50287 - DNA, 33 bp, Homo sapien
accagacggaaaagaacgaggatctccagggtg

SEQ ID NO: 50288 - DNA, 33 bp, Homo sapien
accagacggaaaagaatgaggatctccagggtg

SEQ ID NO: 50289 - DNA, 33 bp, Homo sapien
cagtgtttcttctataacccagacattgcaaag

SEQ ID NO: 50290 - DNA, 33 bp, Homo sapien
cagtgtttcttctataccccagacattgcaaag

SEQ ID NO: 50291 - DNA, 33 bp, Homo sapien
caaaatgggttttggcaattcaagatctgtatt

SEQ ID NO: 50292 - DNA, 33 bp, Homo sapien
caaaatgggttttggcgattcaagatctgtatt

SEQ ID NO: 50293 - DNA, 33 bp, Homo sapien
gcaggctatagttgcaccattttgtctaaccct

SEQ ID NO: 50294 - DNA, 33 bp, Homo sapien
gcaggctatagttgcatcattttgtctaaccct

SEQ ID NO: 50295 - DNA, 33 bp, Homo sapien
tcttgctgtccttaagacatgtgtgtttattgt

SEQ ID NO: 50296 - DNA, 33 bp, Homo sapien
tcttgctgtccttaaggcatgtgtgtttattgt

SEQ ID NO: 50297 - DNA, 33 bp, Homo sapien
gttcacccagggtttgaacgctgccacccaggg

SEQ ID NO: 50298 - DNA, 33 bp, Homo sapien
gttcacccagggtttgtacgctgccacccaggg

SEQ ID NO: 50299 - DNA, 33 bp, Homo sapien
cctgggcctgctgtgaaagccagaatgaagcat

SEQ ID NO: 50300 - DNA, 33 bp, Homo sapien
cctgggcctgctgtgagagccagaatgaagcat

SEQ ID NO: 50301 - DNA, 33 bp, Homo sapien
caggatctgctggtcacaggaagacagcacaat

SEQ ID NO: 50302 - DNA, 33 bp, Homo sapien
caggatctgctggtcagaggaagacagcacaat

SEQ ID NO: 50303 - DNA, 33 bp, Homo sapien
tcagcgtttaaagaagaagattggctccagttc

SEQ ID NO: 50304 - DNA, 33 bp, Homo sapien
tcagcgtttaaagaaggagattggctccagttc

SEQ ID NO: 50305 - DNA, 33 bp, Homo sapien
tcacattcatgtatgcacgttcttccatagagg

SEQ ID NO: 50306 - DNA, 33 bp, Homo sapien
tcacattcatgtatgcgcgttcttccatagagg

SEQ ID NO: 50307 - DNA, 33 bp, Homo sapien
ttgttttgccttcccacaatctcctggtacttg

SEQ ID NO: 50308 - DNA, 33 bp, Homo sapien
ttgttttgccttcccataatctcctggtacttg

SEQ ID NO: 50309 - DNA, 33 bp, Homo sapien
accccacccccttaatcatcagtcatcgactgt

SEQ ID NO: 50310 - DNA, 33 bp, Homo sapien
accccacccccttaattatcagtcatcgactgt

SEQ ID NO: 50311 - DNA, 33 bp, Homo sapien
ttttctagatgaagctcaccagaggcttaggga

SEQ ID NO: 50312 - DNA, 33 bp, Homo sapien
ttttctagatgaagctgaccagaggcttaggga

SEQ ID NO: 50313 - DNA, 33 bp, Homo sapien
acaggggtacccttcacagtgtatctgcgagaa

SEQ ID NO: 50314 - DNA, 33 bp, Homo sapien
acaggggtacccttcagagtgtatctgcgagaa

SEQ ID NO: 50315 - DNA, 33 bp, Homo sapien
tgatcatgtcgcctaccgcaaagggattgcaaa

SEQ ID NO: 50316 - DNA, 33 bp, Homo sapien
tgatcatgtcgcctactgcaaagggattgcaaa

SEQ ID NO: 50317 - DNA, 33 bp, Homo sapien
ataaacaaagagtggaaaagatctgcttacatg

SEQ ID NO: 50318 - DNA, 33 bp, Homo sapien
ataaacaaagagtggataagatctgcttacatg

SEQ ID NO: 50319 - DNA, 33 bp, Homo sapien
tttcatgctgcataacaatctttttaacctaga

SEQ ID NO: 50320 - DNA, 33 bp, Homo sapien
tttcatgctgcataaccatctttttaacctaga

SEQ ID NO: 50321 - DNA, 33 bp, Homo sapien
ttttaaaagccatgctaaaactggattagttat

SEQ ID NO: 50322 - DNA, 33 bp, Homo sapien
ttttaaaagccatgctgaaactggattagttat

SEQ ID NO: 50323 - DNA, 33 bp, Homo sapien
gatatgcagtggaatcaagagacagaagaggga

SEQ ID NO: 50324 - DNA, 33 bp, Homo sapien
gatatgcagtggaatcgagagacagaagaggga

SEQ ID NO: 50325 - DNA, 33 bp, Homo sapien
ctgggattacaaacgtcaaccactgtgcccagc

SEQ ID NO: 50326 - DNA, 33 bp, Homo sapien
ctgggattacaaacgtgaaccactgtgcccagc

SEQ ID NO: 50327 - DNA, 33 bp, Homo sapien
tggctctctccctgaaagctcttagaagaaagc

SEQ ID NO: 50328 - DNA, 33 bp, Homo sapien
tggctctctccctgaaggctcttagaagaaagc

SEQ ID NO: 50329 - DNA, 33 bp, Homo sapien
catctgagtttgttcagccaattataactaatt

SEQ ID NO: 50330 - DNA, 33 bp, Homo sapien
catctgagtttgttcatccaattataactaatt

SEQ ID NO: 50331 - DNA, 33 bp, Homo sapien
gaatagtatgtaaggagcaaaattttgtctcta

SEQ ID NO: 50332 - DNA, 33 bp, Homo sapien
gaatagtatgtaaggatcaaaattttgtctcta

SEQ ID NO: 50333 - DNA, 33 bp, Homo sapien
aatgaagacagggagacagaacggtgatgagtc

SEQ ID NO: 50334 - DNA, 33 bp, Homo sapien
aatgaagacagggagagagaacggtgatgagtc

SEQ ID NO: 50335 - DNA, 33 bp, Homo sapien
cctcaagatggcattacagatcccattttcaga

SEQ ID NO: 50336 - DNA, 33 bp, Homo sapien
cctcaagatggcattatagatcccattttcaga

SEQ ID NO: 50337 - DNA, 33 bp, Homo sapien
gccttggaacctgaaaaagagaaagtagaatga

SEQ ID NO: 50338 - DNA, 33 bp, Homo sapien
gccttggaacctgaaagagagaaagtagaatga

SEQ ID NO: 50339 - DNA, 33 bp, Homo sapien
gcaataggtgccttcacctgccttggaacctga

SEQ ID NO: 50340 - DNA, 33 bp, Homo sapien
gcaataggtgccttcagctgccttggaacctga

SEQ ID NO: 50341 - DNA, 33 bp, Homo sapien
ttccttggtgtcctacaaacttggcatattcag

SEQ ID NO: 50342 - DNA, 33 bp, Homo sapien
ttccttggtgtcctacgaacttggcatattcag

SEQ ID NO: 50343 - DNA, 33 bp, Homo sapien
cttttctgtggctcaactaaattacatttattg

SEQ ID NO: 50344 - DNA, 33 bp, Homo sapien
cttttctgtggctcaattaaattacatttattg

SEQ ID NO: 50345 - DNA, 33 bp, Homo sapien
ctgttgatagagatgtaaattagtacactatta

SEQ ID NO: 50346 - DNA, 33 bp, Homo sapien
ctgttgatagagatgtgaattagtacactatta

SEQ ID NO: 50347 - DNA, 33 bp, Homo sapien
ggcttttggtggatcaatgaagataatgtgcca

SEQ ID NO: 50348 - DNA, 33 bp, Homo sapien
ggcttttggtggatcagtgaagataatgtgcca

SEQ ID NO: 50349 - DNA, 33 bp, Homo sapien
ctcttcaaattaactacgcatcatacttgctag

SEQ ID NO: 50350 - DNA, 33 bp, Homo sapien
ctcttcaaattaactatgcatcatacttgctag

SEQ ID NO: 50351 - DNA, 33 bp, Homo sapien
tgaagagatacctgtaagcccacgtttgttgca

SEQ ID NO: 50352 - DNA, 33 bp, Homo sapien
tgaagagatacctgtaggcccacgtttgttgca

SEQ ID NO: 50353 - DNA, 33 bp, Homo sapien
gcaaatgcttcacaacagttgtccttggtctaa

SEQ ID NO: 50354 - DNA, 33 bp, Homo sapien
gcaaatgcttcacaactgttgtccttggtctaa

SEQ ID NO: 50355 - DNA, 33 bp, Homo sapien
tctctgggctgaatcaactattccttccttgat

SEQ ID NO: 50356 - DNA, 33 bp, Homo sapien
tctctgggctgaatcagctattccttccttgat

SEQ ID NO: 50357 - DNA, 33 bp, Homo sapien
taataaaaagacctaccgactagagttgccgtg

SEQ ID NO: 50358 - DNA, 33 bp, Homo sapien
taataaaaagacctactgactagagttgccgtg

SEQ ID NO: 50359 - DNA, 33 bp, Homo sapien
tcaacagtaacaagaaatatgtctgtgagtgca

SEQ ID NO: 50360 - DNA, 33 bp, Homo sapien
tcaacagtaacaagaagtatgtctgtgagtgca

SEQ ID NO: 50361 - DNA, 33 bp, Homo sapien
tgtcctcagcctctaccagtatgctgtattctc

SEQ ID NO: 50362 - DNA, 33 bp, Homo sapien
tgtcctcagcctctactagtatgctgtattctc

SEQ ID NO: 50363 - DNA, 33 bp, Homo sapien
tttagaaatgttagaagccgtttacataattgc

SEQ ID NO: 50364 - DNA, 33 bp, Homo sapien
tttagaaatgttagaatccgtttacataattgc

SEQ ID NO: 50365 - DNA, 33 bp, Homo sapien
aaataagctgtataaaattaatgcgtggtggct

SEQ ID NO: 50366 - DNA, 33 bp, Homo sapien
aaataagctgtataaagttaatgcgtggtggct

SEQ ID NO: 50367 - DNA, 33 bp, Homo sapien
atgaatgagttagccaataaggactgagtgctt

SEQ ID NO: 50368 - DNA, 33 bp, Homo sapien
atgaatgagttagccagtaaggactgagtgctt

SEQ ID NO: 50369 - DNA, 33 bp, Homo sapien
tgtcacgtggccagcaatattagatggggtata

SEQ ID NO: 50370 - DNA, 33 bp, Homo sapien
tgtcacgtggccagcagtattagatggggtata

SEQ ID NO: 50371 - DNA, 33 bp, Homo sapien
aattacagaagtagatcagaagatttggtgtta

SEQ ID NO: 50372 - DNA, 33 bp, Homo sapien
aattacagaagtagatgagaagatttggtgtta

SEQ ID NO: 50373 - DNA, 33 bp, Homo sapien
ttcttcatttgcttcaatcatcctcaaacaatg

SEQ ID NO: 50374 - DNA, 33 bp, Homo sapien
ttcttcatttgcttcagtcatcctcaaacaatg

SEQ ID NO: 50375 - DNA, 33 bp, Homo sapien
ctggatatttatacagacatagaggactttgaa

SEQ ID NO: 50376 - DNA, 33 bp, Homo sapien
ctggatatttatacagccatagaggactttgaa

SEQ ID NO: 50377 - DNA, 33 bp, Homo sapien
tcagtagcagctagtccatttgggattaaagac

SEQ ID NO: 50378 - DNA, 33 bp, Homo sapien
tcagtagcagctagtctatttgggattaaagac

SEQ ID NO: 50379 - DNA, 33 bp, Homo sapien
agtcccaagaaaaactaagctacgtcaacagta

SEQ ID NO: 50380 - DNA, 33 bp, Homo sapien
agtcccaagaaaaactgagctacgtcaacagta

SEQ ID NO: 50381 - DNA, 33 bp, Homo sapien
atcagccagtgaaatacggaatttgaccccaaa

SEQ ID NO: 50382 - DNA, 33 bp, Homo sapien
atcagccagtgaaatatggaatttgaccccaaa

SEQ ID NO: 50383 - DNA, 33 bp, Homo sapien
gggcaaggaatcatataaaaccaggccagtgga

SEQ ID NO: 50384 - DNA, 33 bp, Homo sapien
gggcaaggaatcatatcaaaccaggccagtgga

SEQ ID NO: 50385 - DNA, 33 bp, Homo sapien
ggactcactcactaaacgcttgtcaaataagta

SEQ ID NO: 50386 - DNA, 33 bp, Homo sapien
ggactcactcactaaatgcttgtcaaataagta

SEQ ID NO: 50387 - DNA, 33 bp, Homo sapien
agaaaattatttctaaacttgacacgaaagtag

SEQ ID NO: 50388 - DNA, 33 bp, Homo sapien
agaaaattatttctaagcttgacacgaaagtag

SEQ ID NO: 50389 - DNA, 33 bp, Homo sapien
tatatccattcagaggaacacaacagatcagag

SEQ ID NO: 50390 - DNA, 33 bp, Homo sapien
tatatccattcagagggacacaacagatcagag

SEQ ID NO: 50391 - DNA, 33 bp, Homo sapien
atattagtatgctatacatttcaccttggcttg

SEQ ID NO: 50392 - DNA, 33 bp, Homo sapien
atattagtatgctatatatttcaccttggcttg

SEQ ID NO: 50393 - DNA, 33 bp, Homo sapien
gattgcagctgaagtaaacaaaactctgtgatc

SEQ ID NO: 50394 - DNA, 33 bp, Homo sapien
gattgcagctgaagtagacaaaactctgtgatc

SEQ ID NO: 50395 - DNA, 33 bp, Homo sapien
aagataatactggaaaagaggacacttgccaga

SEQ ID NO: 50396 - DNA, 33 bp, Homo sapien
aagataatactggaaaggaggacacttgccaga

SEQ ID NO: 50397 - DNA, 33 bp, Homo sapien
gttgaatagttgtaaaagagactgcatgacaca

SEQ ID NO: 50398 - DNA, 33 bp, Homo sapien
gttgaatagttgtaaaggagactgcatgacaca

SEQ ID NO: 50399 - DNA, 33 bp, Homo sapien
gcctgtgactttccaaaatccatttaatatgtc

SEQ ID NO: 50400 - DNA, 33 bp, Homo sapien
gcctgtgactttccaacatccatttaatatgtc

SEQ ID NO: 50401 - DNA, 33 bp, Homo sapien
aactgtgtaccaaaacaccaagagcatctttgc

SEQ ID NO: 50402 - DNA, 33 bp, Homo sapien
aactgtgtaccaaaacgccaagagcatctttgc

SEQ ID NO: 50403 - DNA, 33 bp, Homo sapien
aggacttaataatacacagcaggattaacctgc

SEQ ID NO: 50404 - DNA, 33 bp, Homo sapien
aggacttaataatacagagcaggattaacctgc

SEQ ID NO: 50405 - DNA, 33 bp, Homo sapien
agattgctggtgaaacagtaaagcaaaaggggt

SEQ ID NO: 50406 - DNA, 33 bp, Homo sapien
agattgctggtgaaacggtaaagcaaaaggggt

SEQ ID NO: 50407 - DNA, 33 bp, Homo sapien
taataagagaccacagaatacaggctcaacaag

SEQ ID NO: 50408 - DNA, 33 bp, Homo sapien
taataagagaccacaggatacaggctcaacaag

SEQ ID NO: 50409 - DNA, 33 bp, Homo sapien
tgacaaaatgatatgaaggggcaacgataggag

SEQ ID NO: 50410 - DNA, 33 bp, Homo sapien
tgacaaaatgatatgacggggcaacgataggag

SEQ ID NO: 50411 - DNA, 33 bp, Homo sapien
cccaattttggattacagattataaagctccac

SEQ ID NO: 50412 - DNA, 33 bp, Homo sapien
cccaattttggattacggattataaagctccac

SEQ ID NO: 50413 - DNA, 33 bp, Homo sapien
ggcttctactggcaacaccatcttttgctattt

SEQ ID NO: 50414 - DNA, 33 bp, Homo sapien
ggcttctactggcaacgccatcttttgctattt

SEQ ID NO: 50415 - DNA, 33 bp, Homo sapien
taaagcatacattgtaaccaaaattttggaagc

SEQ ID NO: 50416 - DNA, 33 bp, Homo sapien
taaagcatacattgtagccaaaattttggaagc

SEQ ID NO: 50417 - DNA, 33 bp, Homo sapien
actttttatagctgaccgtagtagatagaatca

SEQ ID NO: 50418 - DNA, 33 bp, Homo sapien
actttttatagctgactgtagtagatagaatca

SEQ ID NO: 50419 - DNA, 33 bp, Homo sapien
cagttcctggttttcacgtctaatggatttttc

SEQ ID NO: 50420 - DNA, 33 bp, Homo sapien
cagttcctggttttcatgtctaatggatttttc

SEQ ID NO: 50421 - DNA, 33 bp, Homo sapien
gattgatgacatcatacgccattggctcctatt

SEQ ID NO: 50422 - DNA, 33 bp, Homo sapien
gattgatgacatcatatgccattggctcctatt

SEQ ID NO: 50423 - DNA, 33 bp, Homo sapien
acctgtgggctcagacaatgctttgaggatatg

SEQ ID NO: 50424 - DNA, 33 bp, Homo sapien
acctgtgggctcagacgatgctttgaggatatg

SEQ ID NO: 50425 - DNA, 33 bp, Homo sapien
tgaaggaagcatgaaacggaaagggttagaagc

SEQ ID NO: 50426 - DNA, 33 bp, Homo sapien
tgaaggaagcatgaaatggaaagggttagaagc

SEQ ID NO: 50427 - DNA, 33 bp, Homo sapien
ggctagagagccttcaatcttagtgtctgtatg

SEQ ID NO: 50428 - DNA, 33 bp, Homo sapien
ggctagagagccttcactcttagtgtctgtatg

SEQ ID NO: 50429 - DNA, 33 bp, Homo sapien
tgagcactctcactcacggtattgatcaagcag

SEQ ID NO: 50430 - DNA, 33 bp, Homo sapien
tgagcactctcactcatggtattgatcaagcag

SEQ ID NO: 50431 - DNA, 33 bp, Homo sapien
gggtaactttgaataaaaaatcccacacagtac

SEQ ID NO: 50432 - DNA, 33 bp, Homo sapien
gggtaactttgaataacaaatcccacacagtac

SEQ ID NO: 50433 - DNA, 33 bp, Homo sapien
tacagaatagttcttcacaaaaggattcaatgc

SEQ ID NO: 50434 - DNA, 33 bp, Homo sapien
tacagaatagttcttcgcaaaaggattcaatgc

SEQ ID NO: 50435 - DNA, 33 bp, Homo sapien
ataagcagaacactgaagagaatgaacaaccca

SEQ ID NO: 50436 - DNA, 33 bp, Homo sapien
ataagcagaacactgaggagaatgaacaaccca

SEQ ID NO: 50437 - DNA, 33 bp, Homo sapien
agtgttgagactacaacaacgaataaaatgaac

SEQ ID NO: 50438 - DNA, 33 bp, Homo sapien
agtgttgagactacaataacgaataaaatgaac

SEQ ID NO: 50439 - DNA, 33 bp, Homo sapien
gtcacaggccaagtcaagggaataagaacaagc

SEQ ID NO: 50440 - DNA, 33 bp, Homo sapien
gtcacaggccaagtcaggggaataagaacaagc

SEQ ID NO: 50441 - DNA, 33 bp, Homo sapien
ctggtgaggaaagagaacacgtgggagttttta

SEQ ID NO: 50442 - DNA, 33 bp, Homo sapien
ctggtgaggaaagagagcacgtgggagttttta

SEQ ID NO: 50443 - DNA, 33 bp, Homo sapien
tcttcttcctggttaaaaaagacagtgaaactt

SEQ ID NO: 50444 - DNA, 33 bp, Homo sapien
tcttcttcctggttaacaaagacagtgaaactt

SEQ ID NO: 50445 - DNA, 33 bp, Homo sapien
ggcccagaaaggtgaactgacttactcaagttc

SEQ ID NO: 50446 - DNA, 33 bp, Homo sapien
ggcccagaaaggtgaagtgacttactcaagttc

SEQ ID NO: 50447 - DNA, 33 bp, Homo sapien
ccacactggtacagctcagaagtgccacgttgg

SEQ ID NO: 50448 - DNA, 33 bp, Homo sapien
ccacactggtacagctgagaagtgccacgttgg

SEQ ID NO: 50449 - DNA, 33 bp, Homo sapien
tcaagagatgaacataagaatgtaatatcactt

SEQ ID NO: 50450 - DNA, 33 bp, Homo sapien
tcaagagatgaacatatgaatgtaatatcactt

SEQ ID NO: 50451 - DNA, 33 bp, Homo sapien
tcatgggcttgaagaaggaggatatccactaca

SEQ ID NO: 50452 - DNA, 33 bp, Homo sapien
tcatgggcttgaagaatgaggatatccactaca

SEQ ID NO: 50453 - DNA, 33 bp, Homo sapien
atgagacctgctctctgaacaagtttttaagtg

SEQ ID NO: 50454 - DNA, 33 bp, Homo sapien
atgagacctgctctcttaacaagtttttaagtg

SEQ ID NO: 50455 - DNA, 33 bp, Homo sapien
catgtggctaagtcctaaattctctccctgaaa

SEQ ID NO: 50456 - DNA, 33 bp, Homo sapien
catgtggctaagtcctgaattctctccctgaaa

SEQ ID NO: 50457 - DNA, 33 bp, Homo sapien
ccatgtgtcagacagaataatggtgagtttttc

SEQ ID NO: 50458 - DNA, 33 bp, Homo sapien
ccatgtgtcagacagagtaatggtgagtttttc

SEQ ID NO: 50459 - DNA, 33 bp, Homo sapien
aagctaaagacattccaaaattcccagtggtgt

SEQ ID NO: 50460 - DNA, 33 bp, Homo sapien
aagctaaagacattccgaaattcccagtggtgt

SEQ ID NO: 50461 - DNA, 33 bp, Homo sapien
atattactctaataaacgtttaccaaagagaaa

SEQ ID NO: 50462 - DNA, 33 bp, Homo sapien
atattactctaataaatgtttaccaaagagaaa

SEQ ID NO: 50463 - DNA, 33 bp, Homo sapien
aatgaatcaccaactaagataaggaggagtact

SEQ ID NO: 50464 - DNA, 33 bp, Homo sapien
aatgaatcaccaactaggataaggaggagtact

SEQ ID NO: 50465 - DNA, 33 bp, Homo sapien
tatactgttactaatacacaggagtttcttata

SEQ ID NO: 50466 - DNA, 33 bp, Homo sapien
tatactgttactaatagacaggagtttcttata

SEQ ID NO: 50467 - DNA, 33 bp, Homo sapien
gattcctctatctctaacataaaaaccattgac

SEQ ID NO: 50468 - DNA, 33 bp, Homo sapien
gattcctctatctctaccataaaaaccattgac

SEQ ID NO: 50469 - DNA, 33 bp, Homo sapien
caagagctgaaaaaaacgcagccataagctatt

SEQ ID NO: 50470 - DNA, 33 bp, Homo sapien
caagagctgaaaaaaatgcagccataagctatt

SEQ ID NO: 50471 - DNA, 33 bp, Homo sapien
gtctgatgttttgataacttgatgttttgatgg

SEQ ID NO: 50472 - DNA, 33 bp, Homo sapien
gtctgatgttttgatatcttgatgttttgatgg

SEQ ID NO: 50473 - DNA, 33 bp, Homo sapien
tcagagcaagaaatgaccagattactaaaccca

SEQ ID NO: 50474 - DNA, 33 bp, Homo sapien
tcagagcaagaaatgagcagattactaaaccca

SEQ ID NO: 50475 - DNA, 33 bp, Homo sapien
caaccaactggttatcaaaggacaaaacagaaa

SEQ ID NO: 50476 - DNA, 33 bp, Homo sapien
caaccaactggttatcgaaggacaaaacagaaa

SEQ ID NO: 50477 - DNA, 33 bp, Homo sapien; identical to SEQ ID NO: 50475

SEQ ID NO: 50478 - DNA, 33 bp, Homo sapien; identical to SEQ ID NO: 50476

SEQ ID NO: 50479 - DNA, 33 bp, Homo sapien; identical to SEQ ID NO: 50475

SEQ ID NO: 50480 - DNA, 33 bp, Homo sapien; identical to SEQ ID NO: 50476

SEQ ID NO: 50481 - DNA, 33 bp, Homo sapien
ggtattttcctaagaaccaactttttgtttggt

SEQ ID NO: 50482 - DNA, 33 bp, Homo sapien
ggtattttcctaagaatcaactttttgtttggt

SEQ ID NO: 50483 - DNA, 33 bp, Homo sapien
tgtttgcttcctttgaaggctttcttctgaaga

SEQ ID NO: 50484 - DNA, 33 bp, Homo sapien
tgtttgcttcctttgagggctttcttctgaaga

SEQ ID NO: 50485 - DNA, 33 bp, Homo sapien
aactttctgaaatgacggcaattctttcgttag

SEQ ID NO: 50486 - DNA, 33 bp, Homo sapien
aactttctgaaatgactgcaattctttcgttag

SEQ ID NO: 50487 - DNA, 33 bp, Homo sapien
ccctttgcttaatctcacctataagataaatca

SEQ ID NO: 50488 - DNA, 33 bp, Homo sapien
ccctttgcttaatctcgcctataagataaatca

SEQ ID NO: 50489 - DNA, 33 bp, Homo sapien
ttaagaaggattctgacgtcacagcacttacta

SEQ ID NO: 50490 - DNA, 33 bp, Homo sapien
ttaagaaggattctgatgtcacagcacttacta

SEQ ID NO: 50491 - DNA, 33 bp, Homo sapien
taattttaatcagctaacatttatgaagcaccc

SEQ ID NO: 50492 - DNA, 33 bp, Homo sapien
taattttaatcagctagcatttatgaagcaccc

SEQ ID NO: 50493 - DNA, 33 bp, Homo sapien
caggtctgaccgacaacgaagggctaagcctga

SEQ ID NO: 50494 - DNA, 33 bp, Homo sapien
caggtctgaccgacaatgaagggctaagcctga

SEQ ID NO: 50495 - DNA, 33 bp, Homo sapien
cccaggaccttgaaaacggaatggtaacacatg

SEQ ID NO: 50496 - DNA, 33 bp, Homo sapien
cccaggaccttgaaaatggaatggtaacacatg

SEQ ID NO: 50497 - DNA, 33 bp, Homo sapien
atcattttttataagcagaactactgtccaatt

SEQ ID NO: 50498 - DNA, 33 bp, Homo sapien
atcattttttataagcggaactactgtccaatt

SEQ ID NO: 50499 - DNA, 33 bp, Homo sapien
atgcaaatatgaaaaaccatggtctctgccctc

SEQ ID NO: 50500 - DNA, 33 bp, Homo sapien
atgcaaatatgaaaaagcatggtctctgccctc

SEQ ID NO: 50501 - DNA, 33 bp, Homo sapien
gatatgccagtgagtgaattatttaagatgcat

SEQ ID NO: 50502 - DNA, 33 bp, Homo sapien
gatatgccagtgagtggattatttaagatgcat

SEQ ID NO: 50503 - DNA, 33 bp, Homo sapien
actcactggcatatcactgaatctcaataacaa

SEQ ID NO: 50504 - DNA, 33 bp, Homo sapien
actcactggcatatcattgaatctcaataacaa

SEQ ID NO: 50505 - DNA, 33 bp, Homo sapien
attttactgtcaagaactctgaggcttagagag

SEQ ID NO: 50506 - DNA, 33 bp, Homo sapien
attttactgtcaagaagtctgaggcttagagag

SEQ ID NO: 50507 - DNA, 33 bp, Homo sapien
ttgtacaccctcctaaaagtaggcatctgatct

SEQ ID NO: 50508 - DNA, 33 bp, Homo sapien
ttgtacaccctcctaagagtaggcatctgatct

SEQ ID NO: 50509 - DNA, 33 bp, Homo sapien
ttctaggttggtttaaccatttattgcagacag

SEQ ID NO: 50510 - DNA, 33 bp, Homo sapien
ttctaggttggtttaatcatttattgcagacag

SEQ ID NO: 50511 - DNA, 33 bp, Homo sapien
gtcatgacagaaaaaacggtgctttcttttgag

SEQ ID NO: 50512 - DNA, 33 bp, Homo sapien
gtcatgacagaaaaaatggtgctttcttttgag

SEQ ID NO: 50513 - DNA, 33 bp, Homo sapien
ctggggaaggtcagtacggtgtgcaataacaca

SEQ ID NO: 50514 - DNA, 33 bp, Homo sapien
ctggggaaggtcagtatggtgtgcaataacaca

SEQ ID NO: 50515 - DNA, 33 bp, Homo sapien
aaacaatagctctgctcaaccttctacggtagc

SEQ ID NO: 50516 - DNA, 33 bp, Homo sapien
aaacaatagctctgcttaaccttctacggtagc

SEQ ID NO: 50517 - DNA, 33 bp, Homo sapien
atttatttgctgggcaatgattgtggttagtag

SEQ ID NO: 50518 - DNA, 33 bp, Homo sapien
atttatttgctgggcagtgattgtggttagtag

SEQ ID NO: 50519 - DNA, 33 bp, Homo sapien
gttctgcagtcagcaaacctctagctgggggta

SEQ ID NO: 50520 - DNA, 33 bp, Homo sapien
gttctgcagtcagcaagcctctagctgggggta

SEQ ID NO: 50521 - DNA, 33 bp, Homo sapien
tcgaaagcagaggacacgagaacacaaagaata

SEQ ID NO: 50522 - DNA, 33 bp, Homo sapien
tcgaaagcagaggacatgagaacacaaagaata

SEQ ID NO: 50523 - DNA, 33 bp, Homo sapien
atttatagaatgttaactatacccaaccacaaa

SEQ ID NO: 50524 - DNA, 33 bp, Homo sapien
atttatagaatgttaattatacccaaccacaaa

SEQ ID NO: 50525 - DNA, 33 bp, Homo sapien
tctggaataatgagggcattagcaacagaaata

SEQ ID NO: 50526 - DNA, 33 bp, Homo sapien
tctggaataatgagggtattagcaacagaaata

SEQ ID NO: 50527 - DNA, 33 bp, Homo sapien
tttttgcatgatggaaattaggaaacattaaaa

SEQ ID NO: 50528 - DNA, 33 bp, Homo sapien
tttttgcatgatggaagttaggaaacattaaaa

SEQ ID NO: 50529 - DNA, 33 bp, Homo sapien
tttgactgacacagaaaagtagtcctcatttca

SEQ ID NO: 50530 - DNA, 33 bp, Homo sapien
tttgactgacacagaagagtagtcctcatttca

SEQ ID NO: 50531 - DNA, 33 bp, Homo sapien
cagaaaggatagttccacggcttaggaagggac

SEQ ID NO: 50532 - DNA, 33 bp, Homo sapien
cagaaaggatagttccgcggcttaggaagggac

SEQ ID NO: 50533 - DNA, 33 bp, Homo sapien
tgtgatcctgtgaaagaccagatgcagccacat

SEQ ID NO: 50534 - DNA, 33 bp, Homo sapien
tgtgatcctgtgaaaggccagatgcagccacat

SEQ ID NO: 50535 - DNA, 33 bp, Homo sapien
ctgtggacctggctaccactagtgcaggcagct

SEQ ID NO: 50536 - DNA, 33 bp, Homo sapien
ctgtggacctggctactactagtgcaggcagct

SEQ ID NO: 50537 - DNA, 33 bp, Homo sapien
tttcagagtagtgagacactttagcattcctgt

SEQ ID NO: 50538 - DNA, 33 bp, Homo sapien
tttcagagtagtgagatactttagcattcctgt

SEQ ID NO: 50539 - DNA, 33 bp, Homo sapien
tttataaaaagagaaacattactgaggactcct

SEQ ID NO: 50540 - DNA, 33 bp, Homo sapien
tttataaaaagagaaagattactgaggactcct

SEQ ID NO: 50541 - DNA, 33 bp, Homo sapien
cttatcatttgtcccaacgaatctgaagaagcc

SEQ ID NO: 50542 - DNA, 33 bp, Homo sapien
cttatcatttgtcccagcgaatctgaagaagcc

SEQ ID NO: 50543 - DNA, 33 bp, Homo sapien
caactgttccaatcccaagaaaattagacattc

SEQ ID NO: 50544 - DNA, 33 bp, Homo sapien
caactgttccaatcccgagaaaattagacattc

SEQ ID NO: 50545 - DNA, 33 bp, Homo sapien
caagatatttggcaagcctgtaagaggactgct

SEQ ID NO: 50546 - DNA, 33 bp, Homo sapien
caagatatttggcaaggctgtaagaggactgct

SEQ ID NO: 50547 - DNA, 33 bp, Homo sapien
tttctctgactttatgaaatgagacattatgta

SEQ ID NO: 50548 - DNA, 33 bp, Homo sapien
tttctctgactttatgtaatgagacattatgta

SEQ ID NO: 50549 - DNA, 33 bp, Homo sapien
taagcctaagtatcccactggagtaagcccttt

SEQ ID NO: 50550 - DNA, 33 bp, Homo sapien
taagcctaagtatcccgctggagtaagcccttt

SEQ ID NO: 50551 - DNA, 33 bp, Homo sapien
gcactaatgtctatcacgtgagatggagggcat

SEQ ID NO: 50552 - DNA, 33 bp, Homo sapien
gcactaatgtctatcatgtgagatggagggcat

SEQ ID NO: 50553 - DNA, 33 bp, Homo sapien
aggaatggtctttaacaatgggcttagtgggga

SEQ ID NO: 50554 - DNA, 33 bp, Homo sapien
aggaatggtctttaacgatgggcttagtgggga

SEQ ID NO: 50555 - DNA, 33 bp, Homo sapien
atgcaaaattcacatacagttttataacataac

SEQ ID NO: 50556 - DNA, 33 bp, Homo sapien
atgcaaaattcacatagagttttataacataac

SEQ ID NO: 50557 - DNA, 33 bp, Homo sapien
catgacaggaatattaggtattgtgctttattt

SEQ ID NO: 50558 - DNA, 33 bp, Homo sapien
catgacaggaatattatgtattgtgctttattt

SEQ ID NO: 50559 - DNA, 33 bp, Homo sapien
tgaaagtaaaagactcaaaaaagatgtatcata

SEQ ID NO: 50560 - DNA, 33 bp, Homo sapien
tgaaagtaaaagactcgaaaaagatgtatcata

SEQ ID NO: 50561 - DNA, 33 bp, Homo sapien
catgtagaaaatgaagactgtcagatttaaatc

SEQ ID NO: 50562 - DNA, 33 bp, Homo sapien
catgtagaaaatgaaggctgtcagatttaaatc

SEQ ID NO: 50563 - DNA, 33 bp, Homo sapien
gtcctggggattacaacgaacatattcttttta

SEQ ID NO: 50564 - DNA, 33 bp, Homo sapien
gtcctggggattacaatgaacatattcttttta

SEQ ID NO: 50565 - DNA, 33 bp, Homo sapien
tataattatttctttacgcaattgacttttaag

SEQ ID NO: 50566 - DNA, 33 bp, Homo sapien
tataattatttctttatgcaattgacttttaag

SEQ ID NO: 50567 - DNA, 33 bp, Homo sapien
caatcatcttacattacgagatgaaaattgcac

SEQ ID NO: 50568 - DNA, 33 bp, Homo sapien
caatcatcttacattatgagatgaaaattgcac

SEQ ID NO: 50569 - DNA, 33 bp, Homo sapien
taataagcatactacccaataggtattttttct

SEQ ID NO: 50570 - DNA, 33 bp, Homo sapien
taataagcatactaccgaataggtattttttct

SEQ ID NO: 50571 - DNA, 33 bp, Homo sapien
gggactccagccaccccacaaacgggctcttgg

SEQ ID NO: 50572 - DNA, 33 bp, Homo sapien
gggactccagccaccctacaaacgggctcttgg

SEQ ID NO: 50573 - DNA, 33 bp, Homo sapien
atgcatataaagtgccaaacagagatcctgcca

SEQ ID NO: 50574 - DNA, 33 bp, Homo sapien
atgcatataaagtgcccaacagagatcctgcca

SEQ ID NO: 50575 - DNA, 33 bp, Homo sapien
gctggtatctgctaagacaggtcactggcttct

SEQ ID NO: 50576 - DNA, 33 bp, Homo sapien
gctggtatctgctaaggcaggtcactggcttct

SEQ ID NO: 50577 - DNA, 33 bp, Homo sapien
agatacttggggctccaattctaagagaacctg

SEQ ID NO: 50578 - DNA, 33 bp, Homo sapien
agatacttggggctccgattctaagagaacctg

SEQ ID NO: 50579 - DNA, 33 bp, Homo sapien
gctttttataccaacaccgacagaaagaattga

SEQ ID NO: 50580 - DNA, 33 bp, Homo sapien
gctttttataccaacatcgacagaaagaattga

SEQ ID NO: 50581 - DNA, 33 bp, Homo sapien
agaatgaaatgttataagtggaagtgctttgtg

SEQ ID NO: 50582 - DNA, 33 bp, Homo sapien
agaatgaaatgttatatgtggaagtgctttgtg

SEQ ID NO: 50583 - DNA, 33 bp, Homo sapien
tatctcctgttcataaggttttcatactctggg

SEQ ID NO: 50584 - DNA, 33 bp, Homo sapien
tatctcctgttcataatgttttcatactctggg

SEQ ID NO: 50585 - DNA, 33 bp, Homo sapien
gaggcaggcaatgagcacccccatgttatggct

SEQ ID NO: 50586 - DNA, 33 bp, Homo sapien
gaggcaggcaatgagcgcccccatgttatggct

SEQ ID NO: 50587 - DNA, 33 bp, Homo sapien
ggtgacatttgagacaatccttaaagcagggtt

SEQ ID NO: 50588 - DNA, 33 bp, Homo sapien
ggtgacatttgagacagtccttaaagcagggtt

SEQ ID NO: 50589 - DNA, 33 bp, Homo sapien
acatgttgaatggccaatctgatctcttcctat

SEQ ID NO: 50590 - DNA, 33 bp, Homo sapien
acatgttgaatggccagtctgatctcttcctat

SEQ ID NO: 50591 - DNA, 33 bp, Homo sapien
gctctaatctcctgtgcatgatttatcaccaga

SEQ ID NO: 50592 - DNA, 33 bp, Homo sapien
gctctaatctcctgtgtatgatttatcaccaga

SEQ ID NO: 50593 - DNA, 33 bp, Homo sapien
tgtttttagaggcatagtagacacacatgtgag

SEQ ID NO: 50594 - DNA, 33 bp, Homo sapien
tgtttttagaggcatattagacacacatgtgag

SEQ ID NO: 50595 - DNA, 33 bp, Homo sapien
tctcttcttcaaccttcgctttctggccttgaa

SEQ ID NO: 50596 - DNA, 33 bp, Homo sapien
tctcttcttcaaccttggctttctggccttgaa

SEQ ID NO: 50597 - DNA, 33 bp, Homo sapien
cctttgaaaagttaaacatatgatccaagtcag

SEQ ID NO: 50598 - DNA, 33 bp, Homo sapien
cctttgaaaagttaaagatatgatccaagtcag

SEQ ID NO: 50599 - DNA, 33 bp, Homo sapien
tctggtgctcgatactaaacactaaatagttat

SEQ ID NO: 50600 - DNA, 33 bp, Homo sapien
tctggtgctcgatactcaacactaaatagttat

SEQ ID NO: 50601 - DNA, 33 bp, Homo sapien
ataatcccactactcaaattcccaaaatgtatc

SEQ ID NO: 50602 - DNA, 33 bp, Homo sapien
ataatcccactactcagattcccaaaatgtatc

SEQ ID NO: 50603 - DNA, 33 bp, Homo sapien
tatcttcctctctgacaatcattcagtgtatac

SEQ ID NO: 50604 - DNA, 33 bp, Homo sapien
tatcttcctctctgacgatcattcagtgtatac

SEQ ID NO: 50605 - DNA, 33 bp, Homo sapien
aaaataaaaccccaaaattgtatatgtgctata

SEQ ID NO: 50606 - DNA, 33 bp, Homo sapien
aaaataaaaccccaaagttgtatatgtgctata

SEQ ID NO: 50607 - DNA, 33 bp, Homo sapien
gaacaaggcatttacccacaagccaaagagagc

SEQ ID NO: 50608 - DNA, 33 bp, Homo sapien
gaacaaggcatttacctacaagccaaagagagc

SEQ ID NO: 50609 - DNA, 33 bp, Homo sapien
tttattactggtaacccaaagtgataagatatg

SEQ ID NO: 50610 - DNA, 33 bp, Homo sapien
tttattactggtaacctaaagtgataagatatg

SEQ ID NO: 50611 - DNA, 33 bp, Homo sapien
ctcatagttacaagcgaccctgaattctagtaa

SEQ ID NO: 50612 - DNA, 33 bp, Homo sapien
ctcatagttacaagcgtccctgaattctagtaa

SEQ ID NO: 50613 - DNA, 33 bp, Homo sapien
tacagacaagactgatcaacagggatatggctg

SEQ ID NO: 50614 - DNA, 33 bp, Homo sapien
tacagacaagactgattaacagggatatggctg

SEQ ID NO: 50615 - DNA, 33 bp, Homo sapien
tcttttaaaacactgcactttacagacaagact

SEQ ID NO: 50616 - DNA, 33 bp, Homo sapien
tcttttaaaacactgcgctttacagacaagact

SEQ ID NO: 50617 - DNA, 33 bp, Homo sapien
cctgggaagataagctaaaaatcaacatcacca

SEQ ID NO: 50618 - DNA, 33 bp, Homo sapien
cctgggaagataagcttaaaatcaacatcacca

SEQ ID NO: 50619 - DNA, 33 bp, Homo sapien
tcaaaggtatctaaatcaagcaggcaaagttat

SEQ ID NO: 50620 - DNA, 33 bp, Homo sapien
tcaaaggtatctaaattaagcaggcaaagttat

SEQ ID NO: 50621 - DNA, 33 bp, Homo sapien
gctattttacctctgacgtctataacataatta

SEQ ID NO: 50622 - DNA, 33 bp, Homo sapien
gctattttacctctgatgtctataacataatta

SEQ ID NO: 50623 - DNA, 33 bp, Homo sapien
ttcaagtctgtaagccaaaacataggtctaatg

SEQ ID NO: 50624 - DNA, 33 bp, Homo sapien
ttcaagtctgtaagccgaaacataggtctaatg

SEQ ID NO: 50625 - DNA, 33 bp, Homo sapien
cactttctgattaacccggaaatttagttagcc

SEQ ID NO: 50626 - DNA, 33 bp, Homo sapien
cactttctgattaacctggaaatttagttagcc

SEQ ID NO: 50627 - DNA, 33 bp, Homo sapien
gggctgctctgttgtaaacaaatttaagggccg

SEQ ID NO: 50628 - DNA, 33 bp, Homo sapien
gggctgctctgttgtatacaaatttaagggccg

SEQ ID NO: 50629 - DNA, 33 bp, Homo sapien
accagtcatgttgaaaaaaggtcatgtccatgt

SEQ ID NO: 50630 - DNA, 33 bp, Homo sapien
accagtcatgttgaaagaaggtcatgtccatgt

SEQ ID NO: 50631 - DNA, 33 bp, Homo sapien
aaaaacaggaatgttgaatgggaagttagatat

SEQ ID NO: 50632 - DNA, 33 bp, Homo sapien
aaaaacaggaatgttggatgggaagttagatat

SEQ ID NO: 50633 - DNA, 33 bp, Homo sapien
ttgcatacataaccgaagataagtcactgtacc

SEQ ID NO: 50634 - DNA, 33 bp, Homo sapien
ttgcatacataaccgaggataagtcactgtacc

SEQ ID NO: 50635 - DNA, 33 bp, Homo sapien
ccaagccctgttggacactttaattacagcctt

SEQ ID NO: 50636 - DNA, 33 bp, Homo sapien
ccaagccctgttggacgctttaattacagcctt

SEQ ID NO: 50637 - DNA, 33 bp, Homo sapien
atgagtgtgggcagaacgtgtgacttcccccca

SEQ ID NO: 50638 - DNA, 33 bp, Homo sapien
atgagtgtgggcagaatgtgtgacttcccccca

SEQ ID NO: 50639 - DNA, 33 bp, Homo sapien
catacagctgtggaaaagatgatttagttaatc

SEQ ID NO: 50640 - DNA, 33 bp, Homo sapien
catacagctgtggaaatgatgatttagttaatc

SEQ ID NO: 50641 - DNA, 33 bp, Homo sapien
tttcattatccattcaatctccaggtctagagg

SEQ ID NO: 50642 - DNA, 33 bp, Homo sapien
tttcattatccattcagtctccaggtctagagg

SEQ ID NO: 50643 - DNA, 33 bp, Homo sapien
cctgcttaatgagacccctaatacctcatagag

SEQ ID NO: 50644 - DNA, 33 bp, Homo sapien
cctgcttaatgagaccgctaatacctcatagag

SEQ ID NO: 50645 - DNA, 33 bp, Homo sapien
tagatataccacctcaaagcagacttgctgaat

SEQ ID NO: 50646 - DNA, 33 bp, Homo sapien
tagatataccacctcacagcagacttgctgaat

SEQ ID NO: 50647 - DNA, 33 bp, Homo sapien
agaaatgttatttgaacgatgggtgcaatttag

SEQ ID NO: 50648 - DNA, 33 bp, Homo sapien
agaaatgttatttgaatgatgggtgcaatttag

SEQ ID NO: 50649 - DNA, 33 bp, Homo sapien
tcaagtgcaaatatgacaaaagaagatgtggga

SEQ ID NO: 50650 - DNA, 33 bp, Homo sapien
tcaagtgcaaatatgagaaaagaagatgtggga

SEQ ID NO: 50651 - DNA, 33 bp, Homo sapien
ttaaacaaaaatatctaaagggcagagtaatta

SEQ ID NO: 50652 - DNA, 33 bp, Homo sapien
ttaaacaaaaatatctcaagggcagagtaatta

SEQ ID NO: 50653 - DNA, 33 bp, Homo sapien
aatcacagctgctacccgaaatgtggcctctta

SEQ ID NO: 50654 - DNA, 33 bp, Homo sapien
aatcacagctgctacctgaaatgtggcctctta

SEQ ID NO: 50655 - DNA, 33 bp, Homo sapien
atttttaacaggaccaaatcattgcagggcctt

SEQ ID NO: 50656 - DNA, 33 bp, Homo sapien
atttttaacaggaccagatcattgcagggcctt

SEQ ID NO: 50657 - DNA, 33 bp, Homo sapien
cagtgagtgtaaggaaaaacagcatgagttaag

SEQ ID NO: 50658 - DNA, 33 bp, Homo sapien
cagtgagtgtaaggaagaacagcatgagttaag

SEQ ID NO: 50659 - DNA, 33 bp, Homo sapien
cagcacctgatacagaataggtggtcaaaagat

SEQ ID NO: 50660 - DNA, 33 bp, Homo sapien
cagcacctgatacagagtaggtggtcaaaagat

SEQ ID NO: 50661 - DNA, 33 bp, Homo sapien
tgcattgctttgcttacctagatgttacatgga

SEQ ID NO: 50662 - DNA, 33 bp, Homo sapien
tgcattgctttgcttatctagatgttacatgga

SEQ ID NO: 50663 - DNA, 33 bp, Homo sapien
ggagagccagtggtgaccagaaggtttgggtca

SEQ ID NO: 50664 - DNA, 33 bp, Homo sapien
ggagagccagtggtgatcagaaggtttgggtca

SEQ ID NO: 50665 - DNA, 33 bp, Homo sapien
agtaaaggtagcatgcccaaatcagtggtaagt

SEQ ID NO: 50666 - DNA, 33 bp, Homo sapien
agtaaaggtagcatgcgcaaatcagtggtaagt

SEQ ID NO: 50667 - DNA, 33 bp, Homo sapien
aaagtcactctcaagaagtcactactcactaat

SEQ ID NO: 50668 - DNA, 33 bp, Homo sapien
aaagtcactctcaagaggtcactactcactaat

SEQ ID NO: 50669 - DNA, 33 bp, Homo sapien
ctgtcctggaagaagacagctacacaaagacca

SEQ ID NO: 50670 - DNA, 33 bp, Homo sapien
ctgtcctggaagaagatagctacacaaagacca

SEQ ID NO: 50671 - DNA, 33 bp, Homo sapien
gactgtttgtaaattccaggtcaaatgttgttt

SEQ ID NO: 50672 - DNA, 33 bp, Homo sapien
gactgtttgtaaattcgaggtcaaatgttgttt

SEQ ID NO: 50673 - DNA, 33 bp, Homo sapien
tttatatctttactgcaagtttgaaggcacttt

SEQ ID NO: 50674 - DNA, 33 bp, Homo sapien
tttatatctttactgctagtttgaaggcacttt

SEQ ID NO: 50675 - DNA, 33 bp, Homo sapien
gtatagcacacagaaaatccattgagttttggt

SEQ ID NO: 50676 - DNA, 33 bp, Homo sapien
gtatagcacacagaaagtccattgagttttggt

SEQ ID NO: 50677 - DNA, 33 bp, Homo sapien
tactcacataccaaaaacatgataaataacaga

SEQ ID NO: 50678 - DNA, 33 bp, Homo sapien
tactcacataccaaaagcatgataaataacaga

SEQ ID NO: 50679 - DNA, 33 bp, Homo sapien
atttttgaaatccataggaagaacagtttgtca

SEQ ID NO: 50680 - DNA, 33 bp, Homo sapien
atttttgaaatccatatgaagaacagtttgtca

SEQ ID NO: 50681 - DNA, 33 bp, Homo sapien
agtcaaggctttctaggatgataaaataaaatt

SEQ ID NO: 50682 - DNA, 33 bp, Homo sapien
agtcaaggctttctagtatgataaaataaaatt

SEQ ID NO: 50683 - DNA, 33 bp, Homo sapien
aatttgagaatcgttgaaaaagctagttatatt

SEQ ID NO: 50684 - DNA, 33 bp, Homo sapien
aatttgagaatcgttgtaaaagctagttatatt

SEQ ID NO: 50685 - DNA, 33 bp, Homo sapien
attcacatgcttgaaggctattcacactgcttt

SEQ ID NO: 50686 - DNA, 33 bp, Homo sapien
attcacatgcttgaagtctattcacactgcttt

SEQ ID NO: 50687 - DNA, 33 bp, Homo sapien
cacagttaattaaggacgtatgttccatgttta

SEQ ID NO: 50688 - DNA, 33 bp, Homo sapien
cacagttaattaaggaggtatgttccatgttta

SEQ ID NO: 50689 - DNA, 33 bp, Homo sapien
ccaatagacgtgaaaccaaatgttgtgttagaa

SEQ ID NO: 50690 - DNA, 33 bp, Homo sapien
ccaatagacgtgaaactaaatgttgtgttagaa

SEQ ID NO: 50691 - DNA, 33 bp, Homo sapien
cagctcaggggcattacggaacctgctgacaag

SEQ ID NO: 50692 - DNA, 33 bp, Homo sapien
cagctcaggggcattatggaacctgctgacaag

SEQ ID NO: 50693 - DNA, 33 bp, Homo sapien
ttaatattctagtaaacgctttgtcagtctgtt

SEQ ID NO: 50694 - DNA, 33 bp, Homo sapien
ttaatattctagtaaatgctttgtcagtctgtt

SEQ ID NO: 50695 - DNA, 33 bp, Homo sapien
gtccaagacggcagtaggttttgggctaaagta

SEQ ID NO: 50696 - DNA, 33 bp, Homo sapien
gtccaagacggcagtatgttttgggctaaagta

SEQ ID NO: 50697 - DNA, 33 bp, Homo sapien
ttttgctggctagaaacacaggcatcatagatg

SEQ ID NO: 50698 - DNA, 33 bp, Homo sapien
ttttgctggctagaaatacaggcatcatagatg

SEQ ID NO: 50699 - DNA, 33 bp, Homo sapien
gacctccacacataaacagtacctagcctgtgc

SEQ ID NO: 50700 - DNA, 33 bp, Homo sapien
gacctccacacataaatagtacctagcctgtgc

SEQ ID NO: 50701 - DNA, 33 bp, Homo sapien
ctggtgaactgtcaaacgctgcagacaagtcac

SEQ ID NO: 50702 - DNA, 33 bp, Homo sapien
ctggtgaactgtcaaatgctgcagacaagtcac

SEQ ID NO: 50703 - DNA, 33 bp, Homo sapien
tttgcacttttagtagccctttttccctgtgga

SEQ ID NO: 50704 - DNA, 33 bp, Homo sapien
tttgcacttttagtagtcctttttccctgtgga

SEQ ID NO: 50705 - DNA, 33 bp, Homo sapien
cctcagaaagatactaaggacaaggcagacaat

SEQ ID NO: 50706 - DNA, 33 bp, Homo sapien
cctcagaaagatactagggacaaggcagacaat

SEQ ID NO: 50707 - DNA, 33 bp, Homo sapien
cagagagttggtttgcaaagaagctcttttttt

SEQ ID NO: 50708 - DNA, 33 bp, Homo sapien
cagagagttggtttgctaagaagctcttttttt

SEQ ID NO: 50709 - DNA, 33 bp, Homo sapien
aaataacttaagataaaccagccagtatttggt

SEQ ID NO: 50710 - DNA, 33 bp, Homo sapien
aaataacttaagataacccagccagtatttggt

SEQ ID NO: 50711 - DNA, 33 bp, Homo sapien
acagccgagagtaagacatttgccggattagag

SEQ ID NO: 50712 - DNA, 33 bp, Homo sapien
acagccgagagtaagatatttgccggattagag

SEQ ID NO: 50713 - DNA, 33 bp, Homo sapien
atagattctttccaccacaatcacccggcactg

SEQ ID NO: 50714 - DNA, 33 bp, Homo sapien
atagattctttccaccgcaatcacccggcactg

SEQ ID NO: 50715 - DNA, 33 bp, Homo sapien
aaaaaggtgaagaaaacgctaaggaatatatag

SEQ ID NO: 50716 - DNA, 33 bp, Homo sapien
aaaaaggtgaagaaaatgctaaggaatatatag

SEQ ID NO: 50717 - DNA, 33 bp, Homo sapien
gtagtagtagtattaacgtgttatgatatgact

SEQ ID NO: 50718 - DNA, 33 bp, Homo sapien
gtagtagtagtattaatgtgttatgatatgact

SEQ ID NO: 50719 - DNA, 33 bp, Homo sapien
tcagaagggattcccacgagagctcctctgaac

SEQ ID NO: 50720 - DNA, 33 bp, Homo sapien
tcagaagggattcccatgagagctcctctgaac

SEQ ID NO: 50721 - DNA, 33 bp, Homo sapien
cccatagcatccagtaaagtgcctgacaaatgg

SEQ ID NO: 50722 - DNA, 33 bp, Homo sapien
cccatagcatccagtacagtgcctgacaaatgg

SEQ ID NO: 50723 - DNA, 33 bp, Homo sapien
caagatccttaacttaccacttctgcaaagtcc

SEQ ID NO: 50724 - DNA, 33 bp, Homo sapien
caagatccttaacttatcacttctgcaaagtcc

SEQ ID NO: 50725 - DNA, 33 bp, Homo sapien
tcacgcagttccatagccagtcctaagggaaaa

SEQ ID NO: 50726 - DNA, 33 bp, Homo sapien
tcacgcagttccatagtcagtcctaagggaaaa

SEQ ID NO: 50727 - DNA, 33 bp, Homo sapien
ctactggcgtcagtctcacttgccagctatgtt

SEQ ID NO: 50728 - DNA, 33 bp, Homo sapien
ctactggcgtcagtcttacttgccagctatgtt

SEQ ID NO: 50729 - DNA, 33 bp, Homo sapien
actgagggcaagataaaaaagtaaacacagacg

SEQ ID NO: 50730 - DNA, 33 bp, Homo sapien
actgagggcaagataacaaagtaaacacagacg

SEQ ID NO: 50731 - DNA, 33 bp, Homo sapien
tttaagctacattcagaagtttgtttcccaggc

SEQ ID NO: 50732 - DNA, 33 bp, Homo sapien
tttaagctacattcaggagtttgtttcccaggc

SEQ ID NO: 50733 - DNA, 33 bp, Homo sapien
ggaatacatgaatgaagttacagcaaatagaga

SEQ ID NO: 50734 - DNA, 33 bp, Homo sapien
ggaatacatgaatgaatttacagcaaatagaga

SEQ ID NO: 50735 - DNA, 33 bp, Homo sapien
ctaatttcagataacaaagaaaattatgagagt

SEQ ID NO: 50736 - DNA, 33 bp, Homo sapien
ctaatttcagataacagagaaaattatgagagt

SEQ ID NO: 50737 - DNA, 33 bp, Homo sapien
atgctattagttgctacgcattacttgcttttt

SEQ ID NO: 50738 - DNA, 33 bp, Homo sapien
atgctattagttgctatgcattacttgcttttt

SEQ ID NO: 50739 - DNA, 33 bp, Homo sapien
tatggtaaaagacaaacagattgcctcaggata

SEQ ID NO: 50740 - DNA, 33 bp, Homo sapien
tatggtaaaagacaaagagattgcctcaggata

SEQ ID NO: 50741 - DNA, 33 bp, Homo sapien
aaaattttgaaaacagcaatgcatgaacatcat

SEQ ID NO: 50742 - DNA, 33 bp, Homo sapien
aaaattttgaaaacaggaatgcatgaacatcat

SEQ ID NO: 50743 - DNA, 33 bp, Homo sapien
gatgatggaagtaaaactttggagtggtgcaag

SEQ ID NO: 50744 - DNA, 33 bp, Homo sapien
gatgatggaagtaaaagtttggagtggtgcaag

SEQ ID NO: 50745 - DNA, 33 bp, Homo sapien
atattgaattttggccaagtaagtccgtcatta

SEQ ID NO: 50746 - DNA, 33 bp, Homo sapien
atattgaattttggccgagtaagtccgtcatta

SEQ ID NO: 50747 - DNA, 33 bp, Homo sapien
ttttgattaagaaatgacacgaattcacaatca

SEQ ID NO: 50748 - DNA, 33 bp, Homo sapien
ttttgattaagaaatgtcacgaattcacaatca

SEQ ID NO: 50749 - DNA, 33 bp, Homo sapien
tgctgattacatattaaattgatctaaattagc

SEQ ID NO: 50750 - DNA, 33 bp, Homo sapien
tgctgattacatattatattgatctaaattagc

SEQ ID NO: 50751 - DNA, 33 bp, Homo sapien
gggctgactcaggacaaaaggccccgaagatga

SEQ ID NO: 50752 - DNA, 33 bp, Homo sapien
gggctgactcaggacacaaggccccgaagatga

SEQ ID NO: 50753 - DNA, 33 bp, Homo sapien
caaatcaactgagaaacgtcgaaatgtagttaa

SEQ ID NO: 50754 - DNA, 33 bp, Homo sapien
caaatcaactgagaaatgtcgaaatgtagttaa

SEQ ID NO: 50755 - DNA, 33 bp, Homo sapien
ataaatctggagtaaacagaaatgcttaaacat

SEQ ID NO: 50756 - DNA, 33 bp, Homo sapien
ataaatctggagtaaatagaaatgcttaaacat

SEQ ID NO: 50757 - DNA, 33 bp, Homo sapien
ttgtatgtaatacagggatatagaattcagatt

SEQ ID NO: 50758 - DNA, 33 bp, Homo sapien
ttgtatgtaatacaggtatatagaattcagatt

SEQ ID NO: 50759 - DNA, 33 bp, Homo sapien
aaataaatttaggtcccgagtgatttttctttt

SEQ ID NO: 50760 - DNA, 33 bp, Homo sapien
aaataaatttaggtcctgagtgatttttctttt

SEQ ID NO: 50761 - DNA, 33 bp, Homo sapien
aactttgatgtgaataacagtaatgtaaaaagt

SEQ ID NO: 50762 - DNA, 33 bp, Homo sapien
aactttgatgtgaatagcagtaatgtaaaaagt

SEQ ID NO: 50763 - DNA, 33 bp, Homo sapien
aattgctttttcaggaaaggatatgttaatctc

SEQ ID NO: 50764 - DNA, 33 bp, Homo sapien
aattgctttttcaggagaggatatgttaatctc

SEQ ID NO: 50765 - DNA, 33 bp, Homo sapien
agagaggaaaaaaagaatcaatagagcatttgt

SEQ ID NO: 50766 - DNA, 33 bp, Homo sapien
agagaggaaaaaaagagtcaatagagcatttgt

SEQ ID NO: 50767 - DNA, 33 bp, Homo sapien
cacctggatatcctgacagaagtctgctgcagg

SEQ ID NO: 50768 - DNA, 33 bp, Homo sapien
cacctggatatcctgatagaagtctgctgcagg

SEQ ID NO: 50769 - DNA, 33 bp, Homo sapien
cttcatgactttagtgaaggaagcacctgaaga

SEQ ID NO: 50770 - DNA, 33 bp, Homo sapien
cttcatgactttagtggaggaagcacctgaaga

SEQ ID NO: 50771 - DNA, 33 bp, Homo sapien
gtaagctactgaaaacaacagtgatatgaacca

SEQ ID NO: 50772 - DNA, 33 bp, Homo sapien
gtaagctactgaaaacgacagtgatatgaacca

SEQ ID NO: 50773 - DNA, 33 bp, Homo sapien
tttctagattctcaacaacaatttagacatttg

SEQ ID NO: 50774 - DNA, 33 bp, Homo sapien
tttctagattctcaacgacaatttagacatttg

SEQ ID NO: 50775 - DNA, 33 bp, Homo sapien
ggttgtttctgggactaacatcaaataaaaagt

SEQ ID NO: 50776 - DNA, 33 bp, Homo sapien
ggttgtttctgggactgacatcaaataaaaagt

SEQ ID NO: 50777 - DNA, 33 bp, Homo sapien
aacggagatgtgtaaaaagctgacaagcatctg

SEQ ID NO: 50778 - DNA, 33 bp, Homo sapien
aacggagatgtgtaaagagctgacaagcatctg

SEQ ID NO: 50779 - DNA, 33 bp, Homo sapien
tccttgaacttttaaaaggaacaatgatggcgt

SEQ ID NO: 50780 - DNA, 33 bp, Homo sapien
tccttgaacttttaaagggaacaatgatggcgt

SEQ ID NO: 50781 - DNA, 33 bp, Homo sapien
tgggccacaattctgacaatctatttctttagg

SEQ ID NO: 50782 - DNA, 33 bp, Homo sapien
tgggccacaattctgataatctatttctttagg

SEQ ID NO: 50783 - DNA, 33 bp, Homo sapien
tctctccctgtaaccacaaaaatagcagtagta

SEQ ID NO: 50784 - DNA, 33 bp, Homo sapien
tctctccctgtaaccagaaaaatagcagtagta

SEQ ID NO: 50785 - DNA, 33 bp, Homo sapien
ttctatttgcatctacaaccttattagccatct

SEQ ID NO: 50786 - DNA, 33 bp, Homo sapien
ttctatttgcatctaccaccttattagccatct

SEQ ID NO: 50787 - DNA, 33 bp, Homo sapien
ttggaataagttccttcaagccctatcaataaa

SEQ ID NO: 50788 - DNA, 33 bp, Homo sapien
ttggaataagttccttgaagccctatcaataaa

SEQ ID NO: 50789 - DNA, 33 bp, Homo sapien
aaattctggtaattatcaataaagttgctctaa

SEQ ID NO: 50790 - DNA, 33 bp, Homo sapien
aaattctggtaattatgaataaagttgctctaa

SEQ ID NO: 50791 - DNA, 33 bp, Homo sapien
cccagtaggcttgaacaacgctattaaccaact

SEQ ID NO: 50792 - DNA, 33 bp, Homo sapien
cccagtaggcttgaacgacgctattaaccaact

SEQ ID NO: 50793 - DNA, 33 bp, Homo sapien
tttagatgctggataaaaggcaatataggacag

SEQ ID NO: 50794 - DNA, 33 bp, Homo sapien
tttagatgctggataacaggcaatataggacag

SEQ ID NO: 50795 - DNA, 33 bp, Homo sapien
cagattgtagggtgcaatagggaactggtggga

SEQ ID NO: 50796 - DNA, 33 bp, Homo sapien
cagattgtagggtgcagtagggaactggtggga

SEQ ID NO: 50797 - DNA, 33 bp, Homo sapien
tttcaaagaaaccaccaacaattttagttcatt

SEQ ID NO: 50798 - DNA, 33 bp, Homo sapien
tttcaaagaaaccaccgacaattttagttcatt

SEQ ID NO: 50799 - DNA, 33 bp, Homo sapien
atattcactctagagaaaagctacagattagaa

SEQ ID NO: 50800 - DNA, 33 bp, Homo sapien
atattcactctagagagaagctacagattagaa

SEQ ID NO: 50801 - DNA, 33 bp, Homo sapien
tatgcaacaatttttcaaggcttttctctggga

SEQ ID NO: 50802 - DNA, 33 bp, Homo sapien
tatgcaacaatttttcgaggcttttctctggga

SEQ ID NO: 50803 - DNA, 33 bp, Homo sapien
accttgattcaggctacgttgtgatatctattt

SEQ ID NO: 50804 - DNA, 33 bp, Homo sapien
accttgattcaggctatgttgtgatatctattt

SEQ ID NO: 50805 - DNA, 33 bp, Homo sapien
cttcttttactttcacagtatttacggctggtc

SEQ ID NO: 50806 - DNA, 33 bp, Homo sapien
cttcttttactttcacggtatttacggctggtc

SEQ ID NO: 50807 - DNA, 33 bp, Homo sapien
ggagttggctaccacaatccccaatccctgtac

SEQ ID NO: 50808 - DNA, 33 bp, Homo sapien
ggagttggctaccacactccccaatccctgtac

SEQ ID NO: 50809 - DNA, 33 bp, Homo sapien
gatagacatctgacacacggtctcaatccagaa

SEQ ID NO: 50810 - DNA, 33 bp, Homo sapien
gatagacatctgacacgcggtctcaatccagaa

SEQ ID NO: 50811 - DNA, 33 bp, Homo sapien
tttattccattgaaaacagtgctggttactgtg

SEQ ID NO: 50812 - DNA, 33 bp, Homo sapien
tttattccattgaaaatagtgctggttactgtg

SEQ ID NO: 50813 - DNA, 33 bp, Homo sapien
attggagaggaacaaaacagtatctggtgggtg

SEQ ID NO: 50814 - DNA, 33 bp, Homo sapien
attggagaggaacaaagcagtatctggtgggtg

SEQ ID NO: 50815 - DNA, 33 bp, Homo sapien
tactgaagtcaaggtccatgtacaactttcatg

SEQ ID NO: 50816 - DNA, 33 bp, Homo sapien
tactgaagtcaaggtctatgtacaactttcatg

SEQ ID NO: 50817 - DNA, 33 bp, Homo sapien
gattatgtgcctttgacgcaaacaaccaataga

SEQ ID NO: 50818 - DNA, 33 bp, Homo sapien
gattatgtgcctttgatgcaaacaaccaataga

SEQ ID NO: 50819 - DNA, 33 bp, Homo sapien
atctaacattagaaaacgatatctgactggttt

SEQ ID NO: 50820 - DNA, 33 bp, Homo sapien
atctaacattagaaaatgatatctgactggttt

SEQ ID NO: 50821 - DNA, 33 bp, Homo sapien
gtatctcaggtgtttacgatgtaattaaaaata

SEQ ID NO: 50822 - DNA, 33 bp, Homo sapien
gtatctcaggtgtttatgatgtaattaaaaata

SEQ ID NO: 50823 - DNA, 33 bp, Homo sapien
taatttattttccttacgggctcatagtgtaat

SEQ ID NO: 50824 - DNA, 33 bp, Homo sapien
taatttattttccttatgggctcatagtgtaat

SEQ ID NO: 50825 - DNA, 33 bp, Homo sapien
gaacccacaagggaaaaagcagaacaaacatga

SEQ ID NO: 50826 - DNA, 33 bp, Homo sapien
gaacccacaagggaaagagcagaacaaacatga

SEQ ID NO: 50827 - DNA, 33 bp, Homo sapien
aaaagaaaggagaaagcccttccacttccatgc

SEQ ID NO: 50828 - DNA, 33 bp, Homo sapien
aaaagaaaggagaaagtccttccacttccatgc

SEQ ID NO: 50829 - DNA, 33 bp, Homo sapien
ggaatagagaagctaaaattagaaaggtaagag

SEQ ID NO: 50830 - DNA, 33 bp, Homo sapien
ggaatagagaagctaagattagaaaggtaagag

SEQ ID NO: 50831 - DNA, 33 bp, Homo sapien
aatctgaagggagcaaccatagttaggagtatg

SEQ ID NO: 50832 - DNA, 33 bp, Homo sapien
aatctgaagggagcaatcatagttaggagtatg

SEQ ID NO: 50833 - DNA, 33 bp, Homo sapien
cagtttaaaagtaaaaacctggctaggcatcat

SEQ ID NO: 50834 - DNA, 33 bp, Homo sapien
cagtttaaaagtaaaaccctggctaggcatcat

SEQ ID NO: 50835 - DNA, 33 bp, Homo sapien
gaagatgcatcagaaacaaaaaggttttatgtc

SEQ ID NO: 50836 - DNA, 33 bp, Homo sapien
gaagatgcatcagaaagaaaaaggttttatgtc

SEQ ID NO: 50837 - DNA, 33 bp, Homo sapien
taacaaagatttgccaatatagctgacaccttt

SEQ ID NO: 50838 - DNA, 33 bp, Homo sapien
taacaaagatttgccagtatagctgacaccttt

SEQ ID NO: 50839 - DNA, 33 bp, Homo sapien
aatgccaaagtatctcaacacaagcagatataa

SEQ ID NO: 50840 - DNA, 33 bp, Homo sapien
aatgccaaagtatctcgacacaagcagatataa

SEQ ID NO: 50841 - DNA, 33 bp, Homo sapien
ttgctatgtaatgtaaagtaattatggaagtat

SEQ ID NO: 50842 - DNA, 33 bp, Homo sapien
ttgctatgtaatgtaacgtaattatggaagtat

SEQ ID NO: 50843 - DNA, 33 bp, Homo sapien
ctttgaaaatagactaaggaatgccaacctatg

SEQ ID NO: 50844 - DNA, 33 bp, Homo sapien
ctttgaaaatagactagggaatgccaacctatg

SEQ ID NO: 50845 - DNA, 33 bp, Homo sapien
ataacatgaaaaaatgcacgtctgggctttcaa

SEQ ID NO: 50846 - DNA, 33 bp, Homo sapien
ataacatgaaaaaatgtacgtctgggctttcaa

SEQ ID NO: 50847 - DNA, 33 bp, Homo sapien
gaagttgagtcccataagagttaagtatagtgg

SEQ ID NO: 50848 - DNA, 33 bp, Homo sapien
gaagttgagtcccataggagttaagtatagtgg

SEQ ID NO: 50849 - DNA, 33 bp, Homo sapien
ttttggccataatgggcagccagttgactcagg

SEQ ID NO: 50850 - DNA, 33 bp, Homo sapien
ttttggccataatgggtagccagttgactcagg

SEQ ID NO: 50851 - DNA, 33 bp, Homo sapien
acctccctacaaaacccacattttggcagaaac

SEQ ID NO: 50852 - DNA, 33 bp, Homo sapien
acctccctacaaaacctacattttggcagaaac

SEQ ID NO: 50853 - DNA, 33 bp, Homo sapien
acactgcctttttggaataagatactaaggatt

SEQ ID NO: 50854 - DNA, 33 bp, Homo sapien
acactgcctttttggagtaagatactaaggatt

SEQ ID NO: 50855 - DNA, 33 bp, Homo sapien
tgaacacaatatacaaatgagtgaaaaaagtaa

SEQ ID NO: 50856 - DNA, 33 bp, Homo sapien
tgaacacaatatacaagtgagtgaaaaaagtaa

SEQ ID NO: 50857 - DNA, 33 bp, Homo sapien
tgcctgtactgtcaccgcaaaatgttctattgc

SEQ ID NO: 50858 - DNA, 33 bp, Homo sapien
tgcctgtactgtcacctcaaaatgttctattgc

SEQ ID NO: 50859 - DNA, 33 bp, Homo sapien
tcatttgtaccctaacacattgtttctgcctgc

SEQ ID NO: 50860 - DNA, 33 bp, Homo sapien
tcatttgtaccctaacgcattgtttctgcctgc

SEQ ID NO: 50861 - DNA, 33 bp, Homo sapien
gcaagctggagggaataaaaaaactcagtcggg

SEQ ID NO: 50862 - DNA, 33 bp, Homo sapien
gcaagctggagggaatcaaaaaactcagtcggg

SEQ ID NO: 50863 - DNA, 33 bp, Homo sapien
cagatcttagccaggcccagcattctagggaat

SEQ ID NO: 50864 - DNA, 33 bp, Homo sapien
cagatcttagccaggctcagcattctagggaat

SEQ ID NO: 50865 - DNA, 33 bp, Homo sapien
tcctcaacatgtaatgacaacaccagatcttag

SEQ ID NO: 50866 - DNA, 33 bp, Homo sapien
tcctcaacatgtaatgccaacaccagatcttag

SEQ ID NO: 50867 - DNA, 33 bp, Homo sapien
cttccattattcaacagaacactagtttggttt

SEQ ID NO: 50868 - DNA, 33 bp, Homo sapien
cttccattattcaacataacactagtttggttt

SEQ ID NO: 50869 - DNA, 33 bp, Homo sapien
gaggtaagttgattgaagatgttaacaagaaag

SEQ ID NO: 50870 - DNA, 33 bp, Homo sapien
gaggtaagttgattgaggatgttaacaagaaag

SEQ ID NO: 50871 - DNA, 33 bp, Homo sapien
gaagatatttacacaacagcaggaaaaaaatgt

SEQ ID NO: 50872 - DNA, 33 bp, Homo sapien
gaagatatttacacaatagcaggaaaaaaatgt

SEQ ID NO: 50873 - DNA, 33 bp, Homo sapien
gtcctaaaaagcattacggcttcttcagactac

SEQ ID NO: 50874 - DNA, 33 bp, Homo sapien
gtcctaaaaagcattatggcttcttcagactac

SEQ ID NO: 50875 - DNA, 33 bp, Homo sapien
atctgcagttaaacaccggccctttgaaatgaa

SEQ ID NO: 50876 - DNA, 33 bp, Homo sapien
atctgcagttaaacactggccctttgaaatgaa

SEQ ID NO: 50877 - DNA, 33 bp, Homo sapien
taattctaatttcataaagttgatgcttccttt

SEQ ID NO: 50878 - DNA, 33 bp, Homo sapien
taattctaatttcatagagttgatgcttccttt

SEQ ID NO: 50879 - DNA, 33 bp, Homo sapien
atagggatcagattaaaggctatgatagtccag

SEQ ID NO: 50880 - DNA, 33 bp, Homo sapien
atagggatcagattaacggctatgatagtccag

SEQ ID NO: 50881 - DNA, 33 bp, Homo sapien
cccacatcgattgtgaagcaagtgagaaataaa

SEQ ID NO: 50882 - DNA, 33 bp, Homo sapien
cccacatcgattgtgacgcaagtgagaaataaa

SEQ ID NO: 50883 - DNA, 33 bp, Homo sapien
aaaatggtacttggtaagaagtctctggagaaa

SEQ ID NO: 50884 - DNA, 33 bp, Homo sapien
aaaatggtacttggtaggaagtctctggagaaa

SEQ ID NO: 50885 - DNA, 33 bp, Homo sapien
tctagggcttaaaatgaaagctgataagaaaga

SEQ ID NO: 50886 - DNA, 33 bp, Homo sapien
tctagggcttaaaatggaagctgataagaaaga

SEQ ID NO: 50887 - DNA, 33 bp, Homo sapien
ttgctcttttacttacactacacatctatgctc

SEQ ID NO: 50888 - DNA, 33 bp, Homo sapien
ttgctcttttacttacgctacacatctatgctc

SEQ ID NO: 50889 - DNA, 33 bp, Homo sapien
caactaaacatcgggaaaaaagaatgaaagggg

SEQ ID NO: 50890 - DNA, 33 bp, Homo sapien
caactaaacatcgggagaaaagaatgaaagggg

SEQ ID NO: 50891 - DNA, 33 bp, Homo sapien
gtagctgagattacagaaacttgctatcacgcc

SEQ ID NO: 50892 - DNA, 33 bp, Homo sapien
gtagctgagattacaggaacttgctatcacgcc

SEQ ID NO: 50893 - DNA, 33 bp, Homo sapien
tgaaaataaaggggcaagactgggtctcatgtc

SEQ ID NO: 50894 - DNA, 33 bp, Homo sapien
tgaaaataaaggggcaggactgggtctcatgtc

SEQ ID NO: 50895 - DNA, 33 bp, Homo sapien
ctgcattaaaaaagaagacaaatctcacataaa

SEQ ID NO: 50896 - DNA, 33 bp, Homo sapien
ctgcattaaaaaagaatacaaatctcacataaa

SEQ ID NO: 50897 - DNA, 33 bp, Homo sapien
ttttatcctgcaaacacgttagcaggcttgaac

SEQ ID NO: 50898 - DNA, 33 bp, Homo sapien
ttttatcctgcaaacaggttagcaggcttgaac

SEQ ID NO: 50899 - DNA, 33 bp, Homo sapien
tagaaggcttgtagggcataacagcagatgatt

SEQ ID NO: 50900 - DNA, 33 bp, Homo sapien
tagaaggcttgtagggtataacagcagatgatt

SEQ ID NO: 50901 - DNA, 33 bp, Homo sapien
tcatcctaaactgtcaccttttgttttctctgc

SEQ ID NO: 50902 - DNA, 33 bp, Homo sapien
tcatcctaaactgtcatcttttgttttctctgc

SEQ ID NO: 50903 - DNA, 33 bp, Homo sapien
atgcagtatctttctaactggagtaaggaggag

SEQ ID NO: 50904 - DNA, 33 bp, Homo sapien
atgcagtatctttctacctggagtaaggaggag

SEQ ID NO: 50905 - DNA, 33 bp, Homo sapien
tgagagctggagaaaacaattggggagcatctc

SEQ ID NO: 50906 - DNA, 33 bp, Homo sapien
tgagagctggagaaaataattggggagcatctc

SEQ ID NO: 50907 - DNA, 33 bp, Homo sapien
aggaaatactccatcacagaattagtgagtaaa

SEQ ID NO: 50908 - DNA, 33 bp, Homo sapien
aggaaatactccatcatagaattagtgagtaaa

SEQ ID NO: 50909 - DNA, 33 bp, Homo sapien
ttcaatgagctatagaaatccagaaatattgtt

SEQ ID NO: 50910 - DNA, 33 bp, Homo sapien
ttcaatgagctatagagatccagaaatattgtt

SEQ ID NO: 50911 - DNA, 33 bp, Homo sapien
gctaatctcaccaccaaaagtcactgatgttgg

SEQ ID NO: 50912 - DNA, 33 bp, Homo sapien
gctaatctcaccaccagaagtcactgatgttgg

SEQ ID NO: 50913 - DNA, 33 bp, Homo sapien
aaaaacaaagcatgtccgaaatggtgatggaga

SEQ ID NO: 50914 - DNA, 33 bp, Homo sapien
aaaaacaaagcatgtcggaaatggtgatggaga

SEQ ID NO: 50915 - DNA, 33 bp, Homo sapien
ggtacatttaaaaggggcagaaagcacacctta

SEQ ID NO: 50916 - DNA, 33 bp, Homo sapien
ggtacatttaaaagggtcagaaagcacacctta

SEQ ID NO: 50917 - DNA, 33 bp, Homo sapien
aagatcagaataaaccacaaagaagtctgtctc

SEQ ID NO: 50918 - DNA, 33 bp, Homo sapien
aagatcagaataaaccgcaaagaagtctgtctc

SEQ ID NO: 50919 - DNA, 33 bp, Homo sapien
gaatcactatcagggaccatttaagtaatcagt

SEQ ID NO: 50920 - DNA, 33 bp, Homo sapien
gaatcactatcagggatcatttaagtaatcagt

SEQ ID NO: 50921 - DNA, 33 bp, Homo sapien
gcttcttaagaaccaaagatcaacgcagagtca

SEQ ID NO: 50922 - DNA, 33 bp, Homo sapien
gcttcttaagaaccaacgatcaacgcagagtca

SEQ ID NO: 50923 - DNA, 33 bp, Homo sapien
caagaggatgaagaagccatgccaaagggcaga

SEQ ID NO: 50924 - DNA, 33 bp, Homo sapien
caagaggatgaagaagtcatgccaaagggcaga

SEQ ID NO: 50925 - DNA, 33 bp, Homo sapien
agatgcctgaaattaactatagtgctgaaccca

SEQ ID NO: 50926 - DNA, 33 bp, Homo sapien
agatgcctgaaattaagtatagtgctgaaccca

SEQ ID NO: 50927 - DNA, 33 bp, Homo sapien
caagtcctagtataaacgtaggaggtgaatgaa

SEQ ID NO: 50928 - DNA, 33 bp, Homo sapien
caagtcctagtataaatgtaggaggtgaatgaa

SEQ ID NO: 50929 - DNA, 33 bp, Homo sapien
tctggtataaaaactacgcagtgcaactttcat

SEQ ID NO: 50930 - DNA, 33 bp, Homo sapien
tctggtataaaaactatgcagtgcaactttcat

SEQ ID NO: 50931 - DNA, 33 bp, Homo sapien
gccagatgaacaaatacggtttctgatcttcat

SEQ ID NO: 50932 - DNA, 33 bp, Homo sapien
gccagatgaacaaatatggtttctgatcttcat

SEQ ID NO: 50933 - DNA, 33 bp, Homo sapien
taaagacaatgcaatgcaacagagatagtcttt

SEQ ID NO: 50934 - DNA, 33 bp, Homo sapien
taaagacaatgcaatgtaacagagatagtcttt

SEQ ID NO: 50935 - DNA, 33 bp, Homo sapien
tacagtggctggtttacagtaagctatagctaa

SEQ ID NO: 50936 - DNA, 33 bp, Homo sapien
tacagtggctggtttatagtaagctatagctaa

SEQ ID NO: 50937 - DNA, 33 bp, Homo sapien
aacatggaaacctaacagtgcttgtggccagga

SEQ ID NO: 50938 - DNA, 33 bp, Homo sapien
aacatggaaacctaacggtgcttgtggccagga

SEQ ID NO: 50939 - DNA, 33 bp, Homo sapien
gaggaaattgagcaagaagtcataaacccaggc

SEQ ID NO: 50940 - DNA, 33 bp, Homo sapien
gaggaaattgagcaaggagtcataaacccaggc

SEQ ID NO: 50941 - DNA, 33 bp, Homo sapien
agtagtgtgtgagacacaacagtagttttcctg

SEQ ID NO: 50942 - DNA, 33 bp, Homo sapien
agtagtgtgtgagacataacagtagttttcctg

SEQ ID NO: 50943 - DNA, 33 bp, Homo sapien
cagaatatgaggtgaaagattaaagtttaaaag

SEQ ID NO: 50944 - DNA, 33 bp, Homo sapien
cagaatatgaggtgaatgattaaagtttaaaag

SEQ ID NO: 50945 - DNA, 33 bp, Homo sapien
gtgggagcattgtaaaaagctatctagtttata

SEQ ID NO: 50946 - DNA, 33 bp, Homo sapien
gtgggagcattgtaaagagctatctagtttata

SEQ ID NO: 50947 - DNA, 33 bp, Homo sapien
tgctaatttgaaattacgttgtaaaaggctatg

SEQ ID NO: 50948 - DNA, 33 bp, Homo sapien
tgctaatttgaaattatgttgtaaaaggctatg

SEQ ID NO: 50949 - DNA, 33 bp, Homo sapien
aatgaaggcagccaagaagaaactgatgaggtg

SEQ ID NO: 50950 - DNA, 33 bp, Homo sapien
aatgaaggcagccaaggagaaactgatgaggtg

SEQ ID NO: 50951 - DNA, 33 bp, Homo sapien
tcaattaaatagttcgaaattacactgaaataa

SEQ ID NO: 50952 - DNA, 33 bp, Homo sapien
tcaattaaatagttcggaattacactgaaataa

SEQ ID NO: 50953 - DNA, 33 bp, Homo sapien
ccaagtttgtaatatacaaggtgtgtttagaaa

SEQ ID NO: 50954 - DNA, 33 bp, Homo sapien
ccaagtttgtaatatataaggtgtgtttagaaa

SEQ ID NO: 50955 - DNA, 33 bp, Homo sapien
acagtgatgctattacaaaacaaaatatactct

SEQ ID NO: 50956 - DNA, 33 bp, Homo sapien
acagtgatgctattacgaaacaaaatatactct

SEQ ID NO: 50957 - DNA, 33 bp, Homo sapien
gatatctcctgaattacagacaaaatgtggcac

SEQ ID NO: 50958 - DNA, 33 bp, Homo sapien
gatatctcctgaattatagacaaaatgtggcac

SEQ ID NO: 50959 - DNA, 33 bp, Homo sapien
taagccacctagtccacgatgctttgttatgga

SEQ ID NO: 50960 - DNA, 33 bp, Homo sapien
taagccacctagtccatgatgctttgttatgga

SEQ ID NO: 50961 - DNA, 33 bp, Homo sapien
tgggttattttcatgccaggcagcttgagctct

SEQ ID NO: 50962 - DNA, 33 bp, Homo sapien
tgggttattttcatgcgaggcagcttgagctct

SEQ ID NO: 50963 - DNA, 33 bp, Homo sapien
ttaaccagtgccttcaagagttccctgttagtt

SEQ ID NO: 50964 - DNA, 33 bp, Homo sapien
ttaaccagtgccttcatgagttccctgttagtt

SEQ ID NO: 50965 - DNA, 33 bp, Homo sapien
atggaaaggtggacagaatacagaaacagaaga

SEQ ID NO: 50966 - DNA, 33 bp, Homo sapien
atggaaaggtggacagcatacagaaacagaaga

SEQ ID NO: 50967 - DNA, 33 bp, Homo sapien
agtagttgctatgaaacgtatttgcaatttgga

SEQ ID NO: 50968 - DNA, 33 bp, Homo sapien
agtagttgctatgaaatgtatttgcaatttgga

SEQ ID NO: 50969 - DNA, 33 bp, Homo sapien
tctgtaatttgcattacgttctgtaaatctggg

SEQ ID NO: 50970 - DNA, 33 bp, Homo sapien
tctgtaatttgcattatgttctgtaaatctggg

SEQ ID NO: 50971 - DNA, 33 bp, Homo sapien
atatctgaatggtaataaatttggcctaacgac

SEQ ID NO: 50972 - DNA, 33 bp, Homo sapien
atatctgaatggtaatcaatttggcctaacgac

SEQ ID NO: 50973 - DNA, 33 bp, Homo sapien
gggcacatgagaaccaaaaatctgaaactctat

SEQ ID NO: 50974 - DNA, 33 bp, Homo sapien
gggcacatgagaaccagaaatctgaaactctat

SEQ ID NO: 50975 - DNA, 33 bp, Homo sapien
tgagattgaagaagtcaaaattgaaattataaa

SEQ ID NO: 50976 - DNA, 33 bp, Homo sapien
tgagattgaagaagtcgaaattgaaattataaa

SEQ ID NO: 50977 - DNA, 33 bp, Homo sapien
ccaaattcaacttaacactcaaatttgctaatt

SEQ ID NO: 50978 - DNA, 33 bp, Homo sapien
ccaaattcaacttaacgctcaaatttgctaatt

SEQ ID NO: 50979 - DNA, 33 bp, Homo sapien
acatttgacctccttaagcatccctactcctct

SEQ ID NO: 50980 - DNA, 33 bp, Homo sapien
acatttgacctccttaggcatccctactcctct

SEQ ID NO: 50981 - DNA, 33 bp, Homo sapien
accctggtccagaaggcaaactgctgccttgaa

SEQ ID NO: 50982 - DNA, 33 bp, Homo sapien
accctggtccagaaggtaaactgctgccttgaa

SEQ ID NO: 50983 - DNA, 33 bp, Homo sapien
taaatgtctttgaagacgcaaggaaacatttca

SEQ ID NO: 50984 - DNA, 33 bp, Homo sapien
taaatgtctttgaagatgcaaggaaacatttca

SEQ ID NO: 50985 - DNA, 33 bp, Homo sapien
ctctgagacctcttcaagacccagctctgttct

SEQ ID NO: 50986 - DNA, 33 bp, Homo sapien
ctctgagacctcttcatgacccagctctgttct

SEQ ID NO: 50987 - DNA, 33 bp, Homo sapien
gagcacgaagaagctgcaacacaatttgtacag

SEQ ID NO: 50988 - DNA, 33 bp, Homo sapien
gagcacgaagaagctggaacacaatttgtacag

SEQ ID NO: 50989 - DNA, 33 bp, Homo sapien
attcctgtatagcataactgacagcccctgttg

SEQ ID NO: 50990 - DNA, 33 bp, Homo sapien
attcctgtatagcatatctgacagcccctgttg

SEQ ID NO: 50991 - DNA, 33 bp, Homo sapien
gggatgccagcccgacaattacattataccata

SEQ ID NO: 50992 - DNA, 33 bp, Homo sapien
gggatgccagcccgacgattacattataccata

SEQ ID NO: 50993 - DNA, 33 bp, Homo sapien
gtagtgaataagtacaagtcttggtacaatctc

SEQ ID NO: 50994 - DNA, 33 bp, Homo sapien
gtagtgaataagtacacgtcttggtacaatctc

SEQ ID NO: 50995 - DNA, 33 bp, Homo sapien
tacttacattaccacccgaggtctggctcctgt

SEQ ID NO: 50996 - DNA, 33 bp, Homo sapien
tacttacattaccacctgaggtctggctcctgt

SEQ ID NO: 50997 - DNA, 33 bp, Homo sapien
acagggcaattaagtacggactgcgtattaaga

SEQ ID NO: 50998 - DNA, 33 bp, Homo sapien
acagggcaattaagtatggactgcgtattaaga

SEQ ID NO: 50999 - DNA, 33 bp, Homo sapien
ttggctttagttttaactctgtatctggttagt

SEQ ID NO: 51000 - DNA, 33 bp, Homo sapien
ttggctttagttttaattctgtatctggttagt

SEQ ID NO: 51001 - DNA, 33 bp, Homo sapien
aaatttgttctttgccacacgaaaaatggatga

SEQ ID NO: 51002 - DNA, 33 bp, Homo sapien
aaatttgttctttgccgcacgaaaaatggatga

SEQ ID NO: 51003 - DNA, 33 bp, Homo sapien
cgccataataaaaaacaagaagaatgcttcgta

SEQ ID NO: 51004 - DNA, 33 bp, Homo sapien
cgccataataaaaaacgagaagaatgcttcgta

SEQ ID NO: 51005 - DNA, 33 bp, Homo sapien
actgctattgaagcaaacctgcattaatataca

SEQ ID NO: 51006 - DNA, 33 bp, Homo sapien
actgctattgaagcaagcctgcattaatataca

SEQ ID NO: 51007 - DNA, 33 bp, Homo sapien
gaaatccagattagtaagtacaatttctcagta

SEQ ID NO: 51008 - DNA, 33 bp, Homo sapien
gaaatccagattagtaggtacaatttctcagta

SEQ ID NO: 51009 - DNA, 33 bp, Homo sapien
aatcctttgggaaacactaggactcttcttcac

SEQ ID NO: 51010 - DNA, 33 bp, Homo sapien
aatcctttgggaaacattaggactcttcttcac

SEQ ID NO: 51011 - DNA, 33 bp, Homo sapien
tcattatcatttctgcaaacacagaaccacccc

SEQ ID NO: 51012 - DNA, 33 bp, Homo sapien
tcattatcatttctgcgaacacagaaccacccc

SEQ ID NO: 51013 - DNA, 33 bp, Homo sapien
agaccaggaattagcaatccagagctgagtagg

SEQ ID NO: 51014 - DNA, 33 bp, Homo sapien
agaccaggaattagcagtccagagctgagtagg

SEQ ID NO: 51015 - DNA, 33 bp, Homo sapien
aaaattcaaaaatgcaataattttgttatgaca

SEQ ID NO: 51016 - DNA, 33 bp, Homo sapien
aaaattcaaaaatgcagtaattttgttatgaca

SEQ ID NO: 51017 - DNA, 33 bp, Homo sapien
tctctgagggaaaaacacaatcaacaacacagc

SEQ ID NO: 51018 - DNA, 33 bp, Homo sapien
tctctgagggaaaaacgcaatcaacaacacagc

SEQ ID NO: 51019 - DNA, 33 bp, Homo sapien
ggagcagtgaagactaagttcaggtcgatggaa

SEQ ID NO: 51020 - DNA, 33 bp, Homo sapien
ggagcagtgaagactaggttcaggtcgatggaa

SEQ ID NO: 51021 - DNA, 33 bp, Homo sapien
atcggtagaaacagaaagtaggttgaggaatga

SEQ ID NO: 51022 - DNA, 33 bp, Homo sapien
atcggtagaaacagaaggtaggttgaggaatga

SEQ ID NO: 51023 - DNA, 33 bp, Homo sapien
ttcacacaggacttaacgatcctagtatctttt

SEQ ID NO: 51024 - DNA, 33 bp, Homo sapien
ttcacacaggacttaatgatcctagtatctttt

SEQ ID NO: 51025 - DNA, 33 bp, Homo sapien
atgcaattgcccctgaaagaagtagcatattaa

SEQ ID NO: 51026 - DNA, 33 bp, Homo sapien
atgcaattgcccctgagagaagtagcatattaa

SEQ ID NO: 51027 - DNA, 33 bp, Homo sapien
ttaaccaaaaaggctactacatatttcaggaaa

SEQ ID NO: 51028 - DNA, 33 bp, Homo sapien
ttaaccaaaaaggctagtacatatttcaggaaa

SEQ ID NO: 51029 - DNA, 33 bp, Homo sapien
gttcgtccacagctaaacttgctctattatacc

SEQ ID NO: 51030 - DNA, 33 bp, Homo sapien
gttcgtccacagctaaccttgctctattatacc

SEQ ID NO: 51031 - DNA, 33 bp, Homo sapien
gataaccaagaagactaagcctgttagacctct

SEQ ID NO: 51032 - DNA, 33 bp, Homo sapien
gataaccaagaagactgagcctgttagacctct

SEQ ID NO: 51033 - DNA, 33 bp, Homo sapien
tgagatcagaaacctaaagaccatgcattaaga

SEQ ID NO: 51034 - DNA, 33 bp, Homo sapien
tgagatcagaaacctagagaccatgcattaaga

SEQ ID NO: 51035 - DNA, 33 bp, Homo sapien
gaaagaaacttagagaaaaacagagaaaatcac

SEQ ID NO: 51036 - DNA, 33 bp, Homo sapien
gaaagaaacttagagataaacagagaaaatcac

SEQ ID NO: 51037 - DNA, 33 bp, Homo sapien
aagtgtagtcacaatgaaatccatggctaagca

SEQ ID NO: 51038 - DNA, 33 bp, Homo sapien
aagtgtagtcacaatgcaatccatggctaagca

SEQ ID NO: 51039 - DNA, 33 bp, Homo sapien
acataagggtgtgatacggaaagctgcaattta

SEQ ID NO: 51040 - DNA, 33 bp, Homo sapien
acataagggtgtgatatggaaagctgcaattta

SEQ ID NO: 51041 - DNA, 33 bp, Homo sapien
ggcaggtactcaaaaaatattcataagatgtac

SEQ ID NO: 51042 - DNA, 33 bp, Homo sapien
ggcaggtactcaaaaagtattcataagatgtac

SEQ ID NO: 51043 - DNA, 33 bp, Homo sapien
cctcttaatatgacacaagaaatgcgaagtcat

SEQ ID NO: 51044 - DNA, 33 bp, Homo sapien
cctcttaatatgacactagaaatgcgaagtcat

SEQ ID NO: 51045 - DNA, 33 bp, Homo sapien
gagagcaggatttgtaaagatgtgataggatgc

SEQ ID NO: 51046 - DNA, 33 bp, Homo sapien
gagagcaggatttgtagagatgtgataggatgc

SEQ ID NO: 51047 - DNA, 33 bp, Homo sapien
atctgtgaatgacatacgaacacctgctggaac

SEQ ID NO: 51048 - DNA, 33 bp, Homo sapien
atctgtgaatgacatatgaacacctgctggaac

SEQ ID NO: 51049 - DNA, 33 bp, Homo sapien
caaaatccgtttttccaccatacttccctaagt

SEQ ID NO: 51050 - DNA, 33 bp, Homo sapien
caaaatccgtttttccgccatacttccctaagt

SEQ ID NO: 51051 - DNA, 33 bp, Homo sapien
acaaatctctgaagaacttctaccttacagttt

SEQ ID NO: 51052 - DNA, 33 bp, Homo sapien
acaaatctctgaagaatttctaccttacagttt

SEQ ID NO: 51053 - DNA, 33 bp, Homo sapien
ctgccaaaagatctgcgaaaccactgttttctt

SEQ ID NO: 51054 - DNA, 33 bp, Homo sapien
ctgccaaaagatctgctaaaccactgttttctt

SEQ ID NO: 51055 - DNA, 33 bp, Homo sapien
ggagtattgcctgatacgtagcgaaaacactgc

SEQ ID NO: 51056 - DNA, 33 bp, Homo sapien
ggagtattgcctgatatgtagcgaaaacactgc

SEQ ID NO: 51057 - DNA, 33 bp, Homo sapien
ttttctgggtccccacagtaagctagaatccat

SEQ ID NO: 51058 - DNA, 33 bp, Homo sapien
ttttctgggtccccacggtaagctagaatccat

SEQ ID NO: 51059 - DNA, 33 bp, Homo sapien
gttctgccagcattctaaaggccatgctcaaaa

SEQ ID NO: 51060 - DNA, 33 bp, Homo sapien
gttctgccagcattctgaaggccatgctcaaaa

SEQ ID NO: 51061 - DNA, 33 bp, Homo sapien
attttctttctacaaacagagcaacctttccct

SEQ ID NO: 51062 - DNA, 33 bp, Homo sapien
attttctttctacaaagagagcaacctttccct

SEQ ID NO: 51063 - DNA, 33 bp, Homo sapien
ctagatttgagtgccacctcccaacctggaata

SEQ ID NO: 51064 - DNA, 33 bp, Homo sapien
ctagatttgagtgccatctcccaacctggaata

SEQ ID NO: 51065 - DNA, 33 bp, Homo sapien
gaggtagtgtctgtaaaccaaagtaatcaaagg

SEQ ID NO: 51066 - DNA, 33 bp, Homo sapien
gaggtagtgtctgtaagccaaagtaatcaaagg

SEQ ID NO: 51067 - DNA, 33 bp, Homo sapien
cagggtgaggaatagaactctttgccgatccat

SEQ ID NO: 51068 - DNA, 33 bp, Homo sapien
cagggtgaggaatagacctctttgccgatccat

SEQ ID NO: 51069 - DNA, 33 bp, Homo sapien
cataataatgcctaaacaataacagcactaatc

SEQ ID NO: 51070 - DNA, 33 bp, Homo sapien
cataataatgcctaaataataacagcactaatc

SEQ ID NO: 51071 - DNA, 33 bp, Homo sapien
ctaatttttcctggcaagttatttacactttct

SEQ ID NO: 51072 - DNA, 33 bp, Homo sapien
ctaatttttcctggcaggttatttacactttct

SEQ ID NO: 51073 - DNA, 33 bp, Homo sapien
atgtatgaagactacaataaaagtttcagaaga

SEQ ID NO: 51074 - DNA, 33 bp, Homo sapien
atgtatgaagactacagtaaaagtttcagaaga

SEQ ID NO: 51075 - DNA, 33 bp, Homo sapien
tcctaattagatccaacttgagctgtagctggt

SEQ ID NO: 51076 - DNA, 33 bp, Homo sapien
tcctaattagatccaagttgagctgtagctggt

SEQ ID NO: 51077 - DNA, 33 bp, Homo sapien
gaaaataagaaatacaaatagaggctctgtgtc

SEQ ID NO: 51078 - DNA, 33 bp, Homo sapien
gaaaataagaaatacagatagaggctctgtgtc

SEQ ID NO: 51079 - DNA, 33 bp, Homo sapien
ctcataagttcctgtacctacctcagctacata

SEQ ID NO: 51080 - DNA, 33 bp, Homo sapien
ctcataagttcctgtatctacctcagctacata

SEQ ID NO: 51081 - DNA, 33 bp, Homo sapien
tcaaggatctaagaaccgagattattgagggaa

SEQ ID NO: 51082 - DNA, 33 bp, Homo sapien
tcaaggatctaagaactgagattattgagggaa

SEQ ID NO: 51083 - DNA, 33 bp, Homo sapien
tttgtcacccgagtggaacttttttgactcatg

SEQ ID NO: 51084 - DNA, 33 bp, Homo sapien
tttgtcacccgagtgggacttttttgactcatg

SEQ ID NO: 51085 - DNA, 33 bp, Homo sapien
tgtttaggaagggtcaatagtctgagactttat

SEQ ID NO: 51086 - DNA, 33 bp, Homo sapien
tgtttaggaagggtcagtagtctgagactttat

SEQ ID NO: 51087 - DNA, 33 bp, Homo sapien
tgtgctgtaatgggcaatcctgtataacaagct

SEQ ID NO: 51088 - DNA, 33 bp, Homo sapien
tgtgctgtaatgggcagtcctgtataacaagct

SEQ ID NO: 51089 - DNA, 33 bp, Homo sapien
ttgaggctatagttgcggattagtcaatcaatc

SEQ ID NO: 51090 - DNA, 33 bp, Homo sapien
ttgaggctatagttgctgattagtcaatcaatc

SEQ ID NO: 51091 - DNA, 33 bp, Homo sapien
ttgcttgaggatatacacaaactggatgttatt

SEQ ID NO: 51092 - DNA, 33 bp, Homo sapien
ttgcttgaggatatactcaaactggatgttatt

SEQ ID NO: 51093 - DNA, 33 bp, Homo sapien
ttgaatttcaatacaactataacgcagaagtca

SEQ ID NO: 51094 - DNA, 33 bp, Homo sapien
ttgaatttcaatacaattataacgcagaagtca

SEQ ID NO: 51095 - DNA, 33 bp, Homo sapien
aaagtgatacctggctcaatagaataacgaatt

SEQ ID NO: 51096 - DNA, 33 bp, Homo sapien
aaagtgatacctggcttaatagaataacgaatt

SEQ ID NO: 51097 - DNA, 33 bp, Homo sapien
gctggttctgagtagacggttttttatttccta

SEQ ID NO: 51098 - DNA, 33 bp, Homo sapien
gctggttctgagtagatggttttttatttccta

SEQ ID NO: 51099 - DNA, 33 bp, Homo sapien
atattatgctctcaggaccatagttatttcacc

SEQ ID NO: 51100 - DNA, 33 bp, Homo sapien
atattatgctctcagggccatagttatttcacc

SEQ ID NO: 51101 - DNA, 33 bp, Homo sapien
atatggtttcagcaccacaatatagacacaccc

SEQ ID NO: 51102 - DNA, 33 bp, Homo sapien
atatggtttcagcaccgcaatatagacacaccc

SEQ ID NO: 51103 - DNA, 33 bp, Homo sapien
ttggtgctgacttagaaaaacagaaccactgac

SEQ ID NO: 51104 - DNA, 33 bp, Homo sapien
ttggtgctgacttagagaaacagaaccactgac

SEQ ID NO: 51105 - DNA, 33 bp, Homo sapien
agttagtgctagaagcaaccttagaaactattt

SEQ ID NO: 51106 - DNA, 33 bp, Homo sapien
agttagtgctagaagcgaccttagaaactattt

SEQ ID NO: 51107 - DNA, 33 bp, Homo sapien
aaaattgaggcacagactcctggaaagacacag

SEQ ID NO: 51108 - DNA, 33 bp, Homo sapien
aaaattgaggcacagagtcctggaaagacacag

SEQ ID NO: 51109 - DNA, 33 bp, Homo sapien
tcttatgaacagaatagggaaaggtaagaagct

SEQ ID NO: 51110 - DNA, 33 bp, Homo sapien
tcttatgaacagaatatggaaaggtaagaagct

SEQ ID NO: 51111 - DNA, 33 bp, Homo sapien
ttaatatgggtcctaaatgtcccttaacaggcc

SEQ ID NO: 51112 - DNA, 33 bp, Homo sapien
ttaatatgggtcctaattgtcccttaacaggcc

SEQ ID NO: 51113 - DNA, 33 bp, Homo sapien
ttaactcgtcatttaaacttaggtatatctcct

SEQ ID NO: 51114 - DNA, 33 bp, Homo sapien
ttaactcgtcatttaaccttaggtatatctcct

SEQ ID NO: 51115 - DNA, 33 bp, Homo sapien
acttgattaagatcacagctttagatgagtctc

SEQ ID NO: 51116 - DNA, 33 bp, Homo sapien
acttgattaagatcactgctttagatgagtctc

SEQ ID NO: 51117 - DNA, 33 bp, Homo sapien
tactaaagggcaaaaaaatatggctcttagctt

SEQ ID NO: 51118 - DNA, 33 bp, Homo sapien
tactaaagggcaaaaatatatggctcttagctt

SEQ ID NO: 51119 - DNA, 33 bp, Homo sapien
ctatattcagtcattccagagagcaatcactcc

SEQ ID NO: 51120 - DNA, 33 bp, Homo sapien
ctatattcagtcattctagagagcaatcactcc

SEQ ID NO: 51121 - DNA, 33 bp, Homo sapien
atactggtatgcattacgttcctaaaactgtat

SEQ ID NO: 51122 - DNA, 33 bp, Homo sapien
atactggtatgcattatgttcctaaaactgtat

SEQ ID NO: 51123 - DNA, 33 bp, Homo sapien
ctttatgctttttccaatcgtacctcactatca

SEQ ID NO: 51124 - DNA, 33 bp, Homo sapien
ctttatgctttttccagtcgtacctcactatca

SEQ ID NO: 51125 - DNA, 33 bp, Homo sapien
tgtaactagtactggaaggattttcttcacata

SEQ ID NO: 51126 - DNA, 33 bp, Homo sapien
tgtaactagtactggatggattttcttcacata

SEQ ID NO: 51127 - DNA, 33 bp, Homo sapien
gaggtttggggaaggaactacaccactgataaa

SEQ ID NO: 51128 - DNA, 33 bp, Homo sapien
gaggtttggggaaggagctacaccactgataaa

SEQ ID NO: 51129 - DNA, 33 bp, Homo sapien
ccaaggctttcacacaatcaaatgtaggagtca

SEQ ID NO: 51130 - DNA, 33 bp, Homo sapien
ccaaggctttcacacagtcaaatgtaggagtca

SEQ ID NO: 51131 - DNA, 33 bp, Homo sapien
gtttacagtttgaggcgaatataagattgctat

SEQ ID NO: 51132 - DNA, 33 bp, Homo sapien
gtttacagtttgaggctaatataagattgctat

SEQ ID NO: 51133 - DNA, 33 bp, Homo sapien
atatgtaaaagcaaaacgtatgacaataatagc

SEQ ID NO: 51134 - DNA, 33 bp, Homo sapien
atatgtaaaagcaaaatgtatgacaataatagc

SEQ ID NO: 51135 - DNA, 33 bp, Homo sapien
tcttctctggtactccactctataaacttgagc

SEQ ID NO: 51136 - DNA, 33 bp, Homo sapien
tcttctctggtactccgctctataaacttgagc

SEQ ID NO: 51137 - DNA, 33 bp, Homo sapien
cttcctttccttaatgaatgaactcctggcaac

SEQ ID NO: 51138 - DNA, 33 bp, Homo sapien
cttcctttccttaatgtatgaactcctggcaac

SEQ ID NO: 51139 - DNA, 33 bp, Homo sapien
agagtataatccacataaaaaccagtgttccag

SEQ ID NO: 51140 - DNA, 33 bp, Homo sapien
agagtataatccacatgaaaaccagtgttccag

SEQ ID NO: 51141 - DNA, 33 bp, Homo sapien
tctaacaaatcatcacaaacacaaagtaacaca

SEQ ID NO: 51142 - DNA, 33 bp, Homo sapien
tctaacaaatcatcacgaacacaaagtaacaca

SEQ ID NO: 51143 - DNA, 33 bp, Homo sapien
ccacctctcttatctccatctctaagcagacat

SEQ ID NO: 51144 - DNA, 33 bp, Homo sapien
ccacctctcttatctctatctctaagcagacat

SEQ ID NO: 51145 - DNA, 33 bp, Homo sapien
taatgggggaactggaaacttcttacatatcca

SEQ ID NO: 51146 - DNA, 33 bp, Homo sapien
taatgggggaactggagacttcttacatatcca

SEQ ID NO: 51147 - DNA, 33 bp, Homo sapien
tgtttcctggtatcaactcacaaatagactctg

SEQ ID NO: 51148 - DNA, 33 bp, Homo sapien
tgtttcctggtatcaattcacaaatagactctg

SEQ ID NO: 51149 - DNA, 33 bp, Homo sapien
gaaaaagatgaactcactcgggagaaaccagcc

SEQ ID NO: 51150 - DNA, 33 bp, Homo sapien
gaaaaagatgaactcattcgggagaaaccagcc

SEQ ID NO: 51151 - DNA, 33 bp, Homo sapien
aacaaactgagacagtcacatattacacaaatc

SEQ ID NO: 51152 - DNA, 33 bp, Homo sapien
aacaaactgagacagttacatattacacaaatc

SEQ ID NO: 51153 - DNA, 33 bp, Homo sapien
atcaattttgttaacacgaaaatctggatgatg

SEQ ID NO: 51154 - DNA, 33 bp, Homo sapien
atcaattttgttaacatgaaaatctggatgatg

SEQ ID NO: 51155 - DNA, 33 bp, Homo sapien
taggattattttataaacggattgaattcaaca

SEQ ID NO: 51156 - DNA, 33 bp, Homo sapien
taggattattttataaccggattgaattcaaca

SEQ ID NO: 51157 - DNA, 33 bp, Homo sapien
atatattagtgaagtccatgaaataaaggattg

SEQ ID NO: 51158 - DNA, 33 bp, Homo sapien
atatattagtgaagtcgatgaaataaaggattg

SEQ ID NO: 51159 - DNA, 33 bp, Homo sapien
ttatttaaatgcctccaagtgtaggtcataata

SEQ ID NO: 51160 - DNA, 33 bp, Homo sapien
ttatttaaatgcctccgagtgtaggtcataata

SEQ ID NO: 51161 - DNA, 33 bp, Homo sapien
aataatttataccgcaaagtaatttcagaccga

SEQ ID NO: 51162 - DNA, 33 bp, Homo sapien
aataatttataccgcagagtaatttcagaccga

SEQ ID NO: 51163 - DNA, 33 bp, Homo sapien
cgagaaatctttttcactctcggtctgaaatta

SEQ ID NO: 51164 - DNA, 33 bp, Homo sapien
cgagaaatctttttcattctcggtctgaaatta

SEQ ID NO: 51165 - DNA, 33 bp, Homo sapien
atatgttagattgatacattgttcaggggcttt

SEQ ID NO: 51166 - DNA, 33 bp, Homo sapien
atatgttagattgatagattgttcaggggcttt

SEQ ID NO: 51167 - DNA, 33 bp, Homo sapien
gtcctctttctcaaaaatagcaaagaactatcc

SEQ ID NO: 51168 - DNA, 33 bp, Homo sapien
gtcctctttctcaaaattagcaaagaactatcc

SEQ ID NO: 51169 - DNA, 33 bp, Homo sapien
tgtttctagtaaacctaaaatggctcataaata

SEQ ID NO: 51170 - DNA, 33 bp, Homo sapien
tgtttctagtaaacctgaaatggctcataaata

SEQ ID NO: 51171 - DNA, 33 bp, Homo sapien
tgtgccaagtaagtccccatattcctatcactg

SEQ ID NO: 51172 - DNA, 33 bp, Homo sapien
tgtgccaagtaagtcctcatattcctatcactg

SEQ ID NO: 51173 - DNA, 33 bp, Homo sapien
atttcacatatgcacaccttgaggacaagaatt

SEQ ID NO: 51174 - DNA, 33 bp, Homo sapien
atttcacatatgcacagcttgaggacaagaatt

SEQ ID NO: 51175 - DNA, 33 bp, Homo sapien
ttttcctgataaatgacgttctaatgacattta

SEQ ID NO: 51176 - DNA, 33 bp, Homo sapien
ttttcctgataaatgatgttctaatgacattta

SEQ ID NO: 51177 - DNA, 33 bp, Homo sapien
gtgggatttctgctaagtgacctcatttatcct

SEQ ID NO: 51178 - DNA, 33 bp, Homo sapien
gtgggatttctgctaattgacctcatttatcct

SEQ ID NO: 51179 - DNA, 33 bp, Homo sapien
gtgccttaaaggcaaactgaaaagtattcatta

SEQ ID NO: 51180 - DNA, 33 bp, Homo sapien
gtgccttaaaggcaaattgaaaagtattcatta

SEQ ID NO: 51181 - DNA, 33 bp, Homo sapien
ggagttgagttaataactgaaggaaccactgag

SEQ ID NO: 51182 - DNA, 33 bp, Homo sapien
ggagttgagttaataagtgaaggaaccactgag

SEQ ID NO: 51183 - DNA, 33 bp, Homo sapien
taagcagtcctttacactaaaatcagaagttac

SEQ ID NO: 51184 - DNA, 33 bp, Homo sapien
taagcagtcctttacagtaaaatcagaagttac

SEQ ID NO: 51185 - DNA, 33 bp, Homo sapien
cacattgttacctctacgggaaattttgataga

SEQ ID NO: 51186 - DNA, 33 bp, Homo sapien
cacattgttacctctatgggaaattttgataga

SEQ ID NO: 51187 - DNA, 33 bp, Homo sapien
gagcctcttcattgccaagatctgattgtgcaa

SEQ ID NO: 51188 - DNA, 33 bp, Homo sapien
gagcctcttcattgccgagatctgattgtgcaa

SEQ ID NO: 51189 - DNA, 33 bp, Homo sapien
atgaaaaacagcctatcagtaagacagtagaaa

SEQ ID NO: 51190 - DNA, 33 bp, Homo sapien
atgaaaaacagcctattagtaagacagtagaaa

SEQ ID NO: 51191 - DNA, 33 bp, Homo sapien
atcagaaacacattctcactgaaggcaattgag

SEQ ID NO: 51192 - DNA, 33 bp, Homo sapien
atcagaaacacattcttactgaaggcaattgag

SEQ ID NO: 51193 - DNA, 33 bp, Homo sapien
cacaatcaccattccactctgtgcttctataag

SEQ ID NO: 51194 - DNA, 33 bp, Homo sapien
cacaatcaccattccattctgtgcttctataag

SEQ ID NO: 51195 - DNA, 33 bp, Homo sapien
tccttaaattagtccaagaggatttcattttac

SEQ ID NO: 51196 - DNA, 33 bp, Homo sapien
tccttaaattagtccaggaggatttcattttac

SEQ ID NO: 51197 - DNA, 33 bp, Homo sapien
ttgtcaatatcattgactagtgatttcctgcct

SEQ ID NO: 51198 - DNA, 33 bp, Homo sapien
ttgtcaatatcattgattagtgatttcctgcct

SEQ ID NO: 51199 - DNA, 33 bp, Homo sapien
gttgacgtgtcctaaaaagaggaaggaatacac

SEQ ID NO: 51200 - DNA, 33 bp, Homo sapien
gttgacgtgtcctaaagagaggaaggaatacac

SEQ ID NO: 51201 - DNA, 33 bp, Homo sapien
aacctaggtctaatccaaattgaatgcctcttt

SEQ ID NO: 51202 - DNA, 33 bp, Homo sapien
aacctaggtctaatccgaattgaatgcctcttt

SEQ ID NO: 51203 - DNA, 33 bp, Homo sapien
ggaagcaataggagtacataggaggaatgtcag

SEQ ID NO: 51204 - DNA, 33 bp, Homo sapien
ggaagcaataggagtatataggaggaatgtcag

SEQ ID NO: 51205 - DNA, 33 bp, Homo sapien
agggcctagtttacctcaattcagtaggatcat

SEQ ID NO: 51206 - DNA, 33 bp, Homo sapien
agggcctagtttaccttaattcagtaggatcat

SEQ ID NO: 51207 - DNA, 33 bp, Homo sapien
gctggctagccacagaaggataattccatagtc

SEQ ID NO: 51208 - DNA, 33 bp, Homo sapien
gctggctagccacagagggataattccatagtc

SEQ ID NO: 51209 - DNA, 33 bp, Homo sapien
tagtcatctagcaaatcaaaataactgttcatt

SEQ ID NO: 51210 - DNA, 33 bp, Homo sapien
tagtcatctagcaaattaaaataactgttcatt

SEQ ID NO: 51211 - DNA, 33 bp, Homo sapien
tccatatgacattcacaattgttatctgctttg

SEQ ID NO: 51212 - DNA, 33 bp, Homo sapien
tccatatgacattcacgattgttatctgctttg

SEQ ID NO: 51213 - DNA, 33 bp, Homo sapien
cactatttagaaagacagtagactggagaatta

SEQ ID NO: 51214 - DNA, 33 bp, Homo sapien
cactatttagaaagactgtagactggagaatta

SEQ ID NO: 51215 - DNA, 33 bp, Homo sapien
ttcaaaaattcttgccaaactaactagaacaag

SEQ ID NO: 51216 - DNA, 33 bp, Homo sapien
ttcaaaaattcttgcccaactaactagaacaag

SEQ ID NO: 51217 - DNA, 33 bp, Homo sapien
tcttcttgctgttgacactaaaggtgagaaagg

SEQ ID NO: 51218 - DNA, 33 bp, Homo sapien
tcttcttgctgttgacgctaaaggtgagaaagg

SEQ ID NO: 51219 - DNA, 33 bp, Homo sapien
caaaaggttagtcagaaaggagaaagcaaaggg

SEQ ID NO: 51220 - DNA, 33 bp, Homo sapien
caaaaggttagtcagagaggagaaagcaaaggg

SEQ ID NO: 51221 - DNA, 33 bp, Homo sapien
attatgtatttttgcacgactgccagctacatg

SEQ ID NO: 51222 - DNA, 33 bp, Homo sapien
attatgtatttttgcatgactgccagctacatg

SEQ ID NO: 51223 - DNA, 33 bp, Homo sapien
gctaaactaatttaccacccactagaagtgtat

SEQ ID NO: 51224 - DNA, 33 bp, Homo sapien
gctaaactaatttaccgcccactagaagtgtat

SEQ ID NO: 51225 - DNA, 33 bp, Homo sapien
atggattgctccagaaacagatccagggcaaag

SEQ ID NO: 51226 - DNA, 33 bp, Homo sapien
atggattgctccagaaccagatccagggcaaag

SEQ ID NO: 51227 - DNA, 33 bp, Homo sapien
tcagagtccactgaagaaaattgctagcaactt

SEQ ID NO: 51228 - DNA, 33 bp, Homo sapien
tcagagtccactgaagcaaattgctagcaactt

SEQ ID NO: 51229 - DNA, 33 bp, Homo sapien
cctttgttgactgttgaagctggacagagcagg

SEQ ID NO: 51230 - DNA, 33 bp, Homo sapien
cctttgttgactgttggagctggacagagcagg

SEQ ID NO: 51231 - DNA, 33 bp, Homo sapien
acccaaattataccacaggcaaattctcaaggg

SEQ ID NO: 51232 - DNA, 33 bp, Homo sapien
acccaaattataccacgggcaaattctcaaggg

SEQ ID NO: 51233 - DNA, 33 bp, Homo sapien
gggaataccaaaggaccccaataatctgtccca

SEQ ID NO: 51234 - DNA, 33 bp, Homo sapien
gggaataccaaaggactccaataatctgtccca

SEQ ID NO: 51235 - DNA, 33 bp, Homo sapien
gttggtttgcagattacaagtatcatactcggg

SEQ ID NO: 51236 - DNA, 33 bp, Homo sapien
gttggtttgcagattataagtatcatactcggg

SEQ ID NO: 51237 - DNA, 33 bp, Homo sapien
catgtagtgatctgtacgtatttggaattcatt

SEQ ID NO: 51238 - DNA, 33 bp, Homo sapien
catgtagtgatctgtatgtatttggaattcatt

SEQ ID NO: 51239 - DNA, 33 bp, Homo sapien
tataagagtcccacaaagtaacttggagtgaca

SEQ ID NO: 51240 - DNA, 33 bp, Homo sapien
tataagagtcccacaaggtaacttggagtgaca

SEQ ID NO: 51241 - DNA, 33 bp, Homo sapien
tccaaaatctgtaggaaagaagacactgggaga

SEQ ID NO: 51242 - DNA, 33 bp, Homo sapien
tccaaaatctgtaggagagaagacactgggaga

SEQ ID NO: 51243 - DNA, 33 bp, Homo sapien
gtttatgccttttgcccagttttattgggttgt

SEQ ID NO: 51244 - DNA, 33 bp, Homo sapien
gtttatgccttttgcctagttttattgggttgt

SEQ ID NO: 51245 - DNA, 33 bp, Homo sapien
aataagtaggatagacaaacatcgatcccaggg

SEQ ID NO: 51246 - DNA, 33 bp, Homo sapien
aataagtaggatagacgaacatcgatcccaggg

SEQ ID NO: 51247 - DNA, 33 bp, Homo sapien
agcaaggtgaaagccactggatggtattaggaa

SEQ ID NO: 51248 - DNA, 33 bp, Homo sapien
agcaaggtgaaagccattggatggtattaggaa

SEQ ID NO: 51249 - DNA, 33 bp, Homo sapien
aggtctgttaggaaatcactacaataatttaga

SEQ ID NO: 51250 - DNA, 33 bp, Homo sapien
aggtctgttaggaaatgactacaataatttaga

SEQ ID NO: 51251 - DNA, 33 bp, Homo sapien
tctccagtccaacctaagagggtctcagaaaaa

SEQ ID NO: 51252 - DNA, 33 bp, Homo sapien
tctccagtccaacctacgagggtctcagaaaaa

SEQ ID NO: 51253 - DNA, 33 bp, Homo sapien
aatcatgactaaactcccaatttggtttgattc

SEQ ID NO: 51254 - DNA, 33 bp, Homo sapien
aatcatgactaaactctcaatttggtttgattc

SEQ ID NO: 51255 - DNA, 33 bp, Homo sapien
ctggtttgttcaggcccacagttactgcagacc

SEQ ID NO: 51256 - DNA, 33 bp, Homo sapien
ctggtttgttcaggcctacagttactgcagacc

SEQ ID NO: 51257 - DNA, 33 bp, Homo sapien
gctctttctagtttcccacaactgaacttcttc

SEQ ID NO: 51258 - DNA, 33 bp, Homo sapien
gctctttctagtttccgacaactgaacttcttc

SEQ ID NO: 51259 - DNA, 33 bp, Homo sapien
cactagaatggcaaaaattataaatactgacca

SEQ ID NO: 51260 - DNA, 33 bp, Homo sapien
cactagaatggcaaaagttataaatactgacca

SEQ ID NO: 51261 - DNA, 33 bp, Homo sapien
atactgaccatataaaatgttggtaagaatgca

SEQ ID NO: 51262 - DNA, 33 bp, Homo sapien
atactgaccatataaagtgttggtaagaatgca

SEQ ID NO: 51263 - DNA, 33 bp, Homo sapien
ttttgtttccatctgaaaagataaattacagaa

SEQ ID NO: 51264 - DNA, 33 bp, Homo sapien
ttttgtttccatctgagaagataaattacagaa

SEQ ID NO: 51265 - DNA, 33 bp, Homo sapien
caaaaccaagggtgaccgaaactggcttcacgt

SEQ ID NO: 51266 - DNA, 33 bp, Homo sapien
caaaaccaagggtgactgaaactggcttcacgt

SEQ ID NO: 51267 - DNA, 33 bp, Homo sapien
gctatgaattagaaaaatttgcagtaaagtgtg

SEQ ID NO: 51268 - DNA, 33 bp, Homo sapien
gctatgaattagaaaagtttgcagtaaagtgtg

SEQ ID NO: 51269 - DNA, 33 bp, Homo sapien
atagccaaacaatctcagaaaacaacaaagctg

SEQ ID NO: 51270 - DNA, 33 bp, Homo sapien
atagccaaacaatctcggaaaacaacaaagctg

SEQ ID NO: 51271 - DNA, 33 bp, Homo sapien
aaaaaatccatgctaaaagttatatggaatctc

SEQ ID NO: 51272 - DNA, 33 bp, Homo sapien
aaaaaatccatgctaacagttatatggaatctc

SEQ ID NO: 51273 - DNA, 33 bp, Homo sapien
taacaaagaactttcccgaattacgtttgtgcc

SEQ ID NO: 51274 - DNA, 33 bp, Homo sapien
taacaaagaactttcctgaattacgtttgtgcc

SEQ ID NO: 51275 - DNA, 33 bp, Homo sapien
tgtgaaggcgctgcatcacttctctttactgct

SEQ ID NO: 51276 - DNA, 33 bp, Homo sapien
tgtgaaggcgctgcattacttctctttactgct

SEQ ID NO: 51277 - DNA, 33 bp, Homo sapien
agctaaagaggtagacagggcataaatgaagaa

SEQ ID NO: 51278 - DNA, 33 bp, Homo sapien
agctaaagaggtagacggggcataaatgaagaa

SEQ ID NO: 51279 - DNA, 33 bp, Homo sapien
gagagaatgagagcacacacaggaaaaactgcc

SEQ ID NO: 51280 - DNA, 33 bp, Homo sapien
gagagaatgagagcacgcacaggaaaaactgcc

SEQ ID NO: 51281 - DNA, 33 bp, Homo sapien
atattctatatctatagatggtgatactagcgc

SEQ ID NO: 51282 - DNA, 33 bp, Homo sapien
atattctatatctatatatggtgatactagcgc

SEQ ID NO: 51283 - DNA, 33 bp, Homo sapien
catgtctgggtttttcaaagcatcctgtccaat

SEQ ID NO: 51284 - DNA, 33 bp, Homo sapien
catgtctgggtttttcgaagcatcctgtccaat

SEQ ID NO: 51285 - DNA, 33 bp, Homo sapien
taagcactggtaattacggaagtacatagaaaa

SEQ ID NO: 51286 - DNA, 33 bp, Homo sapien
taagcactggtaattatggaagtacatagaaaa

SEQ ID NO: 51287 - DNA, 33 bp, Homo sapien
aacgaaaccctggagaagacataaaaagcacag

SEQ ID NO: 51288 - DNA, 33 bp, Homo sapien
aacgaaaccctggagaggacataaaaagcacag

SEQ ID NO: 51289 - DNA, 33 bp, Homo sapien
aagagctcagttactcacagttttttttattct

SEQ ID NO: 51290 - DNA, 33 bp, Homo sapien
aagagctcagttactcccagttttttttattct

SEQ ID NO: 51291 - DNA, 33 bp, Homo sapien
acccaaagcatatgtacattctgaattaatagg

SEQ ID NO: 51292 - DNA, 33 bp, Homo sapien
acccaaagcatatgtatattctgaattaatagg

SEQ ID NO: 51293 - DNA, 33 bp, Homo sapien
actggttcctcctcccaagtctcttagttctgt

SEQ ID NO: 51294 - DNA, 33 bp, Homo sapien
actggttcctcctcccgagtctcttagttctgt

SEQ ID NO: 51295 - DNA, 33 bp, Homo sapien
tattaaggctgtcccaaataagctctaactttt

SEQ ID NO: 51296 - DNA, 33 bp, Homo sapien
tattaaggctgtcccagataagctctaactttt

SEQ ID NO: 51297 - DNA, 33 bp, Homo sapien
tgcagagctagactaaagttgtatttatttttt

SEQ ID NO: 51298 - DNA, 33 bp, Homo sapien
tgcagagctagactaaggttgtatttatttttt

SEQ ID NO: 51299 - DNA, 33 bp, Homo sapien
gttgccctggaagtcacgctgatttaaagaaaa

SEQ ID NO: 51300 - DNA, 33 bp, Homo sapien
gttgccctggaagtcatgctgatttaaagaaaa

SEQ ID NO: 51301 - DNA, 33 bp, Homo sapien
taaaagctgagctgaacgttgccctggaagtca

SEQ ID NO: 51302 - DNA, 33 bp, Homo sapien
taaaagctgagctgaatgttgccctggaagtca

SEQ ID NO: 51303 - DNA, 33 bp, Homo sapien
caatgaagtacaagcacgaccaaattctgcaat

SEQ ID NO: 51304 - DNA, 33 bp, Homo sapien
caatgaagtacaagcatgaccaaattctgcaat

SEQ ID NO: 51305 - DNA, 33 bp, Homo sapien
gactattctctgtcacaaactttttgtaaatga

SEQ ID NO: 51306 - DNA, 33 bp, Homo sapien
gactattctctgtcacgaactttttgtaaatga

SEQ ID NO: 51307 - DNA, 33 bp, Homo sapien
gactctcttttgactacaacccatcatgaggtc

SEQ ID NO: 51308 - DNA, 33 bp, Homo sapien
gactctcttttgactataacccatcatgaggtc

SEQ ID NO: 51309 - DNA, 33 bp, Homo sapien
gccatgttactagttacggacaaagaaaggtga

SEQ ID NO: 51310 - DNA, 33 bp, Homo sapien
gccatgttactagttatggacaaagaaaggtga

SEQ ID NO: 51311 - DNA, 33 bp, Homo sapien
ctgggatttgaaatgacattgatctaactccga

SEQ ID NO: 51312 - DNA, 33 bp, Homo sapien
ctgggatttgaaatgatattgatctaactccga

SEQ ID NO: 51313 - DNA, 33 bp, Homo sapien
gaccatagtgactggggacgttgtataacctga

SEQ ID NO: 51314 - DNA, 33 bp, Homo sapien
gaccatagtgactgggtacgttgtataacctga

SEQ ID NO: 51315 - DNA, 33 bp, Homo sapien
gaagcagtctaggataacaaatgcttttgagtg

SEQ ID NO: 51316 - DNA, 33 bp, Homo sapien
gaagcagtctaggatagcaaatgcttttgagtg

SEQ ID NO: 51317 - DNA, 33 bp, Homo sapien
gcacacgggaggtctcaattagccattcaggct

SEQ ID NO: 51318 - DNA, 33 bp, Homo sapien
gcacacgggaggtctccattagccattcaggct

SEQ ID NO: 51319 - DNA, 33 bp, Homo sapien
gaccccactgcttgaaaaggatgtggtaaagag

SEQ ID NO: 51320 - DNA, 33 bp, Homo sapien
gaccccactgcttgaataggatgtggtaaagag

SEQ ID NO: 51321 - DNA, 33 bp, Homo sapien
ccaacagagtaaagtgaaatcaagtttattaaa

SEQ ID NO: 51322 - DNA, 33 bp, Homo sapien
ccaacagagtaaagtgtaatcaagtttattaaa

SEQ ID NO: 51323 - DNA, 33 bp, Homo sapien
ttatatagaatcttggaaaaagaggttatggtg

SEQ ID NO: 51324 - DNA, 33 bp, Homo sapien
ttatatagaatcttgggaaaagaggttatggtg

SEQ ID NO: 51325 - DNA, 33 bp, Homo sapien
ctggacgtttggtggcaatatttacaaagttag

SEQ ID NO: 51326 - DNA, 33 bp, Homo sapien
ctggacgtttggtggcgatatttacaaagttag

SEQ ID NO: 51327 - DNA, 33 bp, Homo sapien
ttttaagacctagaccgccaggttacaactatt

SEQ ID NO: 51328 - DNA, 33 bp, Homo sapien
ttttaagacctagacctccaggttacaactatt

SEQ ID NO: 51329 - DNA, 33 bp, Homo sapien
gccaaatagacactaacgcagtgcacagcagca

SEQ ID NO: 51330 - DNA, 33 bp, Homo sapien
gccaaatagacactaatgcagtgcacagcagca

SEQ ID NO: 51331 - DNA, 33 bp, Homo sapien
tgattgatcatttagaaaaaaagaacatataag

SEQ ID NO: 51332 - DNA, 33 bp, Homo sapien
tgattgatcatttagagaaaaagaacatataag

SEQ ID NO: 51333 - DNA, 33 bp, Homo sapien
aacatagaggtaaacacggtaagatgactttgt

SEQ ID NO: 51334 - DNA, 33 bp, Homo sapien
aacatagaggtaaacatggtaagatgactttgt

SEQ ID NO: 51335 - DNA, 33 bp, Homo sapien
atggcgggactctgtacattaagtcatgaaaac

SEQ ID NO: 51336 - DNA, 33 bp, Homo sapien
atggcgggactctgtatattaagtcatgaaaac

SEQ ID NO: 51337 - DNA, 33 bp, Homo sapien
actggggaacctggcaatacaactttgatattc

SEQ ID NO: 51338 - DNA, 33 bp, Homo sapien
actggggaacctggcagtacaactttgatattc

SEQ ID NO: 51339 - DNA, 33 bp, Homo sapien
gagagaatcaggagctcaatctctcgagagcaa

SEQ ID NO: 51340 - DNA, 33 bp, Homo sapien
gagagaatcaggagctgaatctctcgagagcaa

SEQ ID NO: 51341 - DNA, 33 bp, Homo sapien
ctttatagaggctcaacgtccttatctctaaaa

SEQ ID NO: 51342 - DNA, 33 bp, Homo sapien
ctttatagaggctcaatgtccttatctctaaaa

SEQ ID NO: 51343 - DNA, 33 bp, Homo sapien
tttaaattctccttctaacttgctgtaggaaga

SEQ ID NO: 51344 - DNA, 33 bp, Homo sapien
tttaaattctccttctgacttgctgtaggaaga

SEQ ID NO: 51345 - DNA, 33 bp, Homo sapien
ttctcccaaggccacaatgaagaatcagtctca

SEQ ID NO: 51346 - DNA, 33 bp, Homo sapien
ttctcccaaggccacagtgaagaatcagtctca

SEQ ID NO: 51347 - DNA, 33 bp, Homo sapien
aacacctgaggggatacatggcatggcaggaca

SEQ ID NO: 51348 - DNA, 33 bp, Homo sapien
aacacctgaggggatagatggcatggcaggaca

SEQ ID NO: 51349 - DNA, 33 bp, Homo sapien
agaggatccagagaaacgtggaatgggaaagcc

SEQ ID NO: 51350 - DNA, 33 bp, Homo sapien
agaggatccagagaaatgtggaatgggaaagcc

SEQ ID NO: 51351 - DNA, 33 bp, Homo sapien
agaaaatcaaattaaacgtttgaccagcagaat

SEQ ID NO: 51352 - DNA, 33 bp, Homo sapien
agaaaatcaaattaaatgtttgaccagcagaat

SEQ ID NO: 51353 - DNA, 33 bp, Homo sapien
taaccaggatgctttaccacatctcatgagaca

SEQ ID NO: 51354 - DNA, 33 bp, Homo sapien
taaccaggatgctttatcacatctcatgagaca

SEQ ID NO: 51355 - DNA, 33 bp, Homo sapien
agaggcttgggagccacattttaggatgccggt

SEQ ID NO: 51356 - DNA, 33 bp, Homo sapien
agaggcttgggagccagattttaggatgccggt

SEQ ID NO: 51357 - DNA, 33 bp, Homo sapien
aatgttttctttccaagatgggatcagacatta

SEQ ID NO: 51358 - DNA, 33 bp, Homo sapien
aatgttttctttccaatatgggatcagacatta

SEQ ID NO: 51359 - DNA, 33 bp, Homo sapien
tcagacattattgccacgtatagtagtttaaaa

SEQ ID NO: 51360 - DNA, 33 bp, Homo sapien
tcagacattattgccatgtatagtagtttaaaa

SEQ ID NO: 51361 - DNA, 33 bp, Homo sapien
aggaccttttccctggaccaggattcttaaaaa

SEQ ID NO: 51362 - DNA, 33 bp, Homo sapien
aggaccttttccctgggccaggattcttaaaaa

SEQ ID NO: 51363 - DNA, 33 bp, Homo sapien
gtaactgagaaaagtacgttaattgctttttgg

SEQ ID NO: 51364 - DNA, 33 bp, Homo sapien
gtaactgagaaaagtatgttaattgctttttgg

SEQ ID NO: 51365 - DNA, 33 bp, Homo sapien
ctctttctccgagtccaaacagtcaccttgaca

SEQ ID NO: 51366 - DNA, 33 bp, Homo sapien
ctctttctccgagtccgaacagtcaccttgaca

SEQ ID NO: 51367 - DNA, 33 bp, Homo sapien
agtcagtaacatcatccattcaaggacattcta

SEQ ID NO: 51368 - DNA, 33 bp, Homo sapien
agtcagtaacatcatctattcaaggacattcta

SEQ ID NO: 51369 - DNA, 33 bp, Homo sapien
ttcaccagagttggaacgtgaagcacagtttct

SEQ ID NO: 51370 - DNA, 33 bp, Homo sapien
ttcaccagagttggaatgtgaagcacagtttct

SEQ ID NO: 51371 - DNA, 33 bp, Homo sapien
tctattaatgtttataagttccttcgaaattca

SEQ ID NO: 51372 - DNA, 33 bp, Homo sapien
tctattaatgtttatacgttccttcgaaattca

SEQ ID NO: 51373 - DNA, 33 bp, Homo sapien
tgtgcatggaacattgaaagcgtttggaacgga

SEQ ID NO: 51374 - DNA, 33 bp, Homo sapien
tgtgcatggaacattggaagcgtttggaacgga

SEQ ID NO: 51375 - DNA, 33 bp, Homo sapien
atcattgcaactttagcatatgtgctgccaaaa

SEQ ID NO: 51376 - DNA, 33 bp, Homo sapien
atcattgcaactttagtatatgtgctgccaaaa

SEQ ID NO: 51377 - DNA, 33 bp, Homo sapien
tatggagaagcatccaactatgtctcaatggtt

SEQ ID NO: 51378 - DNA, 33 bp, Homo sapien
tatggagaagcatccagctatgtctcaatggtt

SEQ ID NO: 51379 - DNA, 33 bp, Homo sapien
gagctccttgaaggcaaatagtttttgttctat

SEQ ID NO: 51380 - DNA, 33 bp, Homo sapien
gagctccttgaaggcagatagtttttgttctat

SEQ ID NO: 51381 - DNA, 33 bp, Homo sapien
ttaaaataaaacatcaactccatcacagcagac

SEQ ID NO: 51382 - DNA, 33 bp, Homo sapien
ttaaaataaaacatcacctccatcacagcagac

SEQ ID NO: 51383 - DNA, 33 bp, Homo sapien
tgtggactggctagaaagtgagccaaagagaat

SEQ ID NO: 51384 - DNA, 33 bp, Homo sapien
tgtggactggctagaaggtgagccaaagagaat

SEQ ID NO: 51385 - DNA, 33 bp, Homo sapien
catccctgcagcataccgtagcaaactttcaag

SEQ ID NO: 51386 - DNA, 33 bp, Homo sapien
catccctgcagcatactgtagcaaactttcaag

SEQ ID NO: 51387 - DNA, 33 bp, Homo sapien
ccaaatcctaacaaatcaattcttcccagactt

SEQ ID NO: 51388 - DNA, 33 bp, Homo sapien
ccaaatcctaacaaatgaattcttcccagactt

SEQ ID NO: 51389 - DNA, 33 bp, Homo sapien
accatcctaagacagacacgatgtcaggctcta

SEQ ID NO: 51390 - DNA, 33 bp, Homo sapien
accatcctaagacagatacgatgtcaggctcta

SEQ ID NO: 51391 - DNA, 33 bp, Homo sapien
agtttccacctgttcacacaatcctgcctctcg

SEQ ID NO: 51392 - DNA, 33 bp, Homo sapien
agtttccacctgttcatacaatcctgcctctcg

SEQ ID NO: 51393 - DNA, 33 bp, Homo sapien
ttcattgccaaatgaaatgtgtttggtaatctg

SEQ ID NO: 51394 - DNA, 33 bp, Homo sapien
ttcattgccaaatgaattgtgtttggtaatctg

SEQ ID NO: 51395 - DNA, 33 bp, Homo sapien
gtacttaggacaaacactgatcacccctcattt

SEQ ID NO: 51396 - DNA, 33 bp, Homo sapien
gtacttaggacaaacattgatcacccctcattt

SEQ ID NO: 51397 - DNA, 33 bp, Homo sapien
tcttatttggacaaagaagtgttgttggaaata

SEQ ID NO: 51398 - DNA, 33 bp, Homo sapien
tcttatttggacaaaggagtgttgttggaaata

SEQ ID NO: 51399 - DNA, 33 bp, Homo sapien
ttggaaatatcagtcacgtgaattaattaacaa

SEQ ID NO: 51400 - DNA, 33 bp, Homo sapien
ttggaaatatcagtcatgtgaattaattaacaa

SEQ ID NO: 51401 - DNA, 33 bp, Homo sapien
tccttatttcatatcaagtgttttcatttgatc

SEQ ID NO: 51402 - DNA, 33 bp, Homo sapien
tccttatttcatatcaggtgttttcatttgatc

SEQ ID NO: 51403 - DNA, 33 bp, Homo sapien
tctaccaccacccaagcaatcttaggcaaggca

SEQ ID NO: 51404 - DNA, 33 bp, Homo sapien
tctaccaccacccaagtaatcttaggcaaggca

SEQ ID NO: 51405 - DNA, 33 bp, Homo sapien
acagtggtaatcaccacaataataaggaacatc

SEQ ID NO: 51406 - DNA, 33 bp, Homo sapien
acagtggtaatcaccataataataaggaacatc

SEQ ID NO: 51407 - DNA, 33 bp, Homo sapien
tccaagaattacgaaacgtcaatgcatcactca

SEQ ID NO: 51408 - DNA, 33 bp, Homo sapien
tccaagaattacgaaaggtcaatgcatcactca

SEQ ID NO: 51409 - DNA, 33 bp, Homo sapien
tgtcttattggcaatacgaggtggaccagccat

SEQ ID NO: 51410 - DNA, 33 bp, Homo sapien
tgtcttattggcaatatgaggtggaccagccat

SEQ ID NO: 51411 - DNA, 33 bp, Homo sapien
agctacctcatggctcactagaaatgtatgtgg

SEQ ID NO: 51412 - DNA, 33 bp, Homo sapien
agctacctcatggctcgctagaaatgtatgtgg

SEQ ID NO: 51413 - DNA, 33 bp, Homo sapien
atctgatttcctgaacccttctttgcacacagc

SEQ ID NO: 51414 - DNA, 33 bp, Homo sapien
atctgatttcctgaactcttctttgcacacagc

SEQ ID NO: 51415 - DNA, 33 bp, Homo sapien
gatgctgatgaaaatcaaacaggttaacatata

SEQ ID NO: 51416 - DNA, 33 bp, Homo sapien
gatgctgatgaaaatcgaacaggttaacatata

SEQ ID NO: 51417 - DNA, 33 bp, Homo sapien
gcattgtaaagtgatcaagagttgttaaatctt

SEQ ID NO: 51418 - DNA, 33 bp, Homo sapien
gcattgtaaagtgatcgagagttgttaaatctt

SEQ ID NO: 51419 - DNA, 33 bp, Homo sapien
tagaacactctaaaacacagttaaaattatcac

SEQ ID NO: 51420 - DNA, 33 bp, Homo sapien
tagaacactctaaaacgcagttaaaattatcac

SEQ ID NO: 51421 - DNA, 33 bp, Homo sapien
ccctagcctagaagacacttcagcctcaggtgt

SEQ ID NO: 51422 - DNA, 33 bp, Homo sapien
ccctagcctagaagacgcttcagcctcaggtgt

SEQ ID NO: 51423 - DNA, 33 bp, Homo sapien
tgacagtggaccagaacaaaattatagtggaaa

SEQ ID NO: 51424 - DNA, 33 bp, Homo sapien
tgacagtggaccagaataaaattatagtggaaa

SEQ ID NO: 51425 - DNA, 33 bp, Homo sapien
atgggagtccatatcaactaagtggcaatatac

SEQ ID NO: 51426 - DNA, 33 bp, Homo sapien
atgggagtccatatcagctaagtggcaatatac

SEQ ID NO: 51427 - DNA, 33 bp, Homo sapien
acttcataatgtcagtgacgtggcagacacagg

SEQ ID NO: 51428 - DNA, 33 bp, Homo sapien
acttcataatgtcagttacgtggcagacacagg

SEQ ID NO: 51429 - DNA, 33 bp, Homo sapien
gaatattgatgagaagaatgaacagggatgact

SEQ ID NO: 51430 - DNA, 33 bp, Homo sapien
gaatattgatgagaaggatgaacagggatgact

SEQ ID NO: 51431 - DNA, 33 bp, Homo sapien
tggacattttgcattcaatacaaattagttcct

SEQ ID NO: 51432 - DNA, 33 bp, Homo sapien
tggacattttgcattcgatacaaattagttcct

SEQ ID NO: 51433 - DNA, 33 bp, Homo sapien
ctgtgccttcattgcaacaaattttaggttcat

SEQ ID NO: 51434 - DNA, 33 bp, Homo sapien
ctgtgccttcattgcagcaaattttaggttcat

SEQ ID NO: 51435 - DNA, 33 bp, Homo sapien
ttctgttcatttgcctaaaatgggctccacatt

SEQ ID NO: 51436 - DNA, 33 bp, Homo sapien
ttctgttcatttgccttaaatgggctccacatt

SEQ ID NO: 51437 - DNA, 33 bp, Homo sapien
taatttgagaaagctacggtaaatagttgtctt

SEQ ID NO: 51438 - DNA, 33 bp, Homo sapien
taatttgagaaagctatggtaaatagttgtctt

SEQ ID NO: 51439 - DNA, 33 bp, Homo sapien
ttttcttttcctctcaacttagtcaattccata

SEQ ID NO: 51440 - DNA, 33 bp, Homo sapien
ttttcttttcctctcatcttagtcaattccata

SEQ ID NO: 51441 - DNA, 33 bp, Homo sapien
ttctagattcccttcaacctagcatatactaat

SEQ ID NO: 51442 - DNA, 33 bp, Homo sapien
ttctagattcccttcaccctagcatatactaat

SEQ ID NO: 51443 - DNA, 33 bp, Homo sapien
tctaagtccaagcttgcattcttcccacacacc

SEQ ID NO: 51444 - DNA, 33 bp, Homo sapien
tctaagtccaagcttgtattcttcccacacacc

SEQ ID NO: 51445 - DNA, 33 bp, Homo sapien
acagtgaaaagagccccagttttcaagtgagag

SEQ ID NO: 51446 - DNA, 33 bp, Homo sapien
acagtgaaaagagccctagttttcaagtgagag

SEQ ID NO: 51447 - DNA, 33 bp, Homo sapien
aaaagttatagcagaaaatagagatgagccagt

SEQ ID NO: 51448 - DNA, 33 bp, Homo sapien
aaaagttatagcagaagatagagatgagccagt

SEQ ID NO: 51449 - DNA, 33 bp, Homo sapien
ataggtcagtaaaagacgcattcattccaaaga

SEQ ID NO: 51450 - DNA, 33 bp, Homo sapien
ataggtcagtaaaagatgcattcattccaaaga

SEQ ID NO: 51451 - DNA, 33 bp, Homo sapien
catttttcaaatagtacctggtcggaactgttc

SEQ ID NO: 51452 - DNA, 33 bp, Homo sapien
catttttcaaatagtagctggtcggaactgttc

SEQ ID NO: 51453 - DNA, 33 bp, Homo sapien
tgcaacaccgtttaccaactctgacaagccact

SEQ ID NO: 51454 - DNA, 33 bp, Homo sapien
tgcaacaccgtttaccgactctgacaagccact

SEQ ID NO: 51455 - DNA, 33 bp, Homo sapien
ggcctcttttccgaacacagaggaggattagca

SEQ ID NO: 51456 - DNA, 33 bp, Homo sapien
ggcctcttttccgaacgcagaggaggattagca

SEQ ID NO: 51457 - DNA, 33 bp, Homo sapien
gatggcacttcattgaaccccactctggttgta

SEQ ID NO: 51458 - DNA, 33 bp, Homo sapien
gatggcacttcattgagccccactctggttgta

SEQ ID NO: 51459 - DNA, 33 bp, Homo sapien
aggtgtctggctttcccgctcactgtgtaaagc

SEQ ID NO: 51460 - DNA, 33 bp, Homo sapien
aggtgtctggctttcctgctcactgtgtaaagc

SEQ ID NO: 51461 - DNA, 33 bp, Homo sapien
aaccacaacactaccacgtcatgatcttctctc

SEQ ID NO: 51462 - DNA, 33 bp, Homo sapien
aaccacaacactaccaggtcatgatcttctctc

SEQ ID NO: 51463 - DNA, 33 bp, Homo sapien
cactggcttccctgaaaccctggagacagcttg

SEQ ID NO: 51464 - DNA, 33 bp, Homo sapien
cactggcttccctgaatccctggagacagcttg

SEQ ID NO: 51465 - DNA, 33 bp, Homo sapien
ttgtccctctgtgtccaaagtgccatgtcttat

SEQ ID NO: 51466 - DNA, 33 bp, Homo sapien
ttgtccctctgtgtccgaagtgccatgtcttat

SEQ ID NO: 51467 - DNA, 33 bp, Homo sapien
agtgtaccatttcacaatctataattttgcctc

SEQ ID NO: 51468 - DNA, 33 bp, Homo sapien
agtgtaccatttcacagtctataattttgcctc

SEQ ID NO: 51469 - DNA, 33 bp, Homo sapien
tttgcctcttttcaatcagataaaacaatttat

SEQ ID NO: 51470 - DNA, 33 bp, Homo sapien
tttgcctcttttcaatgagataaaacaatttat

SEQ ID NO: 51471 - DNA, 33 bp, Homo sapien
agtgagctaatttaaaaatgaaggccacacaac

SEQ ID NO: 51472 - DNA, 33 bp, Homo sapien
agtgagctaatttaaagatgaaggccacacaac

SEQ ID NO: 51473 - DNA, 33 bp, Homo sapien
aagagcacaagggactatttcttcaattactgc

SEQ ID NO: 51474 - DNA, 33 bp, Homo sapien
aagagcacaagggactgtttcttcaattactgc

SEQ ID NO: 51475 - DNA, 33 bp, Homo sapien
aactgggatctccacactgaaactagttcaaca

SEQ ID NO: 51476 - DNA, 33 bp, Homo sapien
aactgggatctccacattgaaactagttcaaca

SEQ ID NO: 51477 - DNA, 33 bp, Homo sapien
gagatgtatttttagacggtggtattcgatgct

SEQ ID NO: 51478 - DNA, 33 bp, Homo sapien
gagatgtatttttagatggtggtattcgatgct

SEQ ID NO: 51479 - DNA, 33 bp, Homo sapien
ctctccataactcacacagtataggagatggtg

SEQ ID NO: 51480 - DNA, 33 bp, Homo sapien
ctctccataactcacatagtataggagatggtg

SEQ ID NO: 51481 - DNA, 33 bp, Homo sapien
aactgtagcaccatcaaagtgtgccctcctgcc

SEQ ID NO: 51482 - DNA, 33 bp, Homo sapien
aactgtagcaccatcatagtgtgccctcctgcc

SEQ ID NO: 51483 - DNA, 33 bp, Homo sapien
ttcaattttcaaaagacggggctgtgggacaat

SEQ ID NO: 51484 - DNA, 33 bp, Homo sapien
ttcaattttcaaaagatggggctgtgggacaat

SEQ ID NO: 51485 - DNA, 33 bp, Homo sapien
aattcatgggaatgtaaataattgtgttgatag

SEQ ID NO: 51486 - DNA, 33 bp, Homo sapien
aattcatgggaatgtacataattgtgttgatag

SEQ ID NO: 51487 - DNA, 33 bp, Homo sapien
cttctcaccaaatttacgacattgtagcctata

SEQ ID NO: 51488 - DNA, 33 bp, Homo sapien
cttctcaccaaatttaggacattgtagcctata

SEQ ID NO: 51489 - DNA, 33 bp, Homo sapien
ttaaagcattgaaatacaagtgtgctaaaatgc

SEQ ID NO: 51490 - DNA, 33 bp, Homo sapien
ttaaagcattgaaatataagtgtgctaaaatgc

SEQ ID NO: 51491 - DNA, 33 bp, Homo sapien
tctcgggctcaaaaggcatagtgctacagttat

SEQ ID NO: 51492 - DNA, 33 bp, Homo sapien
tctcgggctcaaaaggtatagtgctacagttat

SEQ ID NO: 51493 - DNA, 33 bp, Homo sapien
gctctgtaccccaggcaaatcttctgctagcac

SEQ ID NO: 51494 - DNA, 33 bp, Homo sapien
gctctgtaccccaggcgaatcttctgctagcac

SEQ ID NO: 51495 - DNA, 33 bp, Homo sapien
agatgctaattcacaactggtggctgatggatg

SEQ ID NO: 51496 - DNA, 33 bp, Homo sapien
agatgctaattcacaattggtggctgatggatg

SEQ ID NO: 51497 - DNA, 33 bp, Homo sapien
aagagctctttaggaaccagagagacagaagac

SEQ ID NO: 51498 - DNA, 33 bp, Homo sapien
aagagctctttaggaatcagagagacagaagac

SEQ ID NO: 51499 - DNA, 33 bp, Homo sapien
tagaatgagaataattaaagttacttgatcata

SEQ ID NO: 51500 - DNA, 33 bp, Homo sapien
tagaatgagaataattgaagttacttgatcata

SEQ ID NO: 51501 - DNA, 33 bp, Homo sapien
gtttacaatttttgtaaccttacttaggtgaat

SEQ ID NO: 51502 - DNA, 33 bp, Homo sapien
gtttacaatttttgtacccttacttaggtgaat

SEQ ID NO: 51503 - DNA, 33 bp, Homo sapien
cctgtactgatcaaaacatgaatgacttggatg

SEQ ID NO: 51504 - DNA, 33 bp, Homo sapien
cctgtactgatcaaaatatgaatgacttggatg

SEQ ID NO: 51505 - DNA, 33 bp, Homo sapien
cattttcctacctacaatgatctgtaacaattc

SEQ ID NO: 51506 - DNA, 33 bp, Homo sapien
cattttcctacctacattgatctgtaacaattc

SEQ ID NO: 51507 - DNA, 33 bp, Homo sapien
agcccccaactccaaacaggtgtttctcaaagg

SEQ ID NO: 51508 - DNA, 33 bp, Homo sapien
agcccccaactccaaataggtgtttctcaaagg

SEQ ID NO: 51509 - DNA, 33 bp, Homo sapien
tgggctcagttatcttcaaacacaactgcctgt

SEQ ID NO: 51510 - DNA, 33 bp, Homo sapien
tgggctcagttatcttgaaacacaactgcctgt

SEQ ID NO: 51511 - DNA, 33 bp, Homo sapien
gttttccatccctgtcaagaaagatgacaagaa

SEQ ID NO: 51512 - DNA, 33 bp, Homo sapien
gttttccatccctgtcgagaaagatgacaagaa

SEQ ID NO: 51513 - DNA, 33 bp, Homo sapien
tgcaaagctccaagaacgatttaaaagcactac

SEQ ID NO: 51514 - DNA, 33 bp, Homo sapien
tgcaaagctccaagaatgatttaaaagcactac

SEQ ID NO: 51515 - DNA, 33 bp, Homo sapien
tgctgttagtcaccaccgtggaaagaaaccttt

SEQ ID NO: 51516 - DNA, 33 bp, Homo sapien
tgctgttagtcaccactgtggaaagaaaccttt

SEQ ID NO: 51517 - DNA, 33 bp, Homo sapien
gaaaaataaaactagaagatccttggataccaa

SEQ ID NO: 51518 - DNA, 33 bp, Homo sapien
gaaaaataaaactagaggatccttggataccaa

SEQ ID NO: 51519 - DNA, 33 bp, Homo sapien
tcatcagtactggaatcaaggtctctaaatggt

SEQ ID NO: 51520 - DNA, 33 bp, Homo sapien
tcatcagtactggaattaaggtctctaaatggt

SEQ ID NO: 51521 - DNA, 33 bp, Homo sapien
ccacagctgttactcccgaagtattttgcccca

SEQ ID NO: 51522 - DNA, 33 bp, Homo sapien
ccacagctgttactcctgaagtattttgcccca

SEQ ID NO: 51523 - DNA, 33 bp, Homo sapien
ttcagtcacgcattcaatctctggacttgtttt

SEQ ID NO: 51524 - DNA, 33 bp, Homo sapien
ttcagtcacgcattcagtctctggacttgtttt

SEQ ID NO: 51525 - DNA, 33 bp, Homo sapien
caatggcaatcacataaaaggtccataattgtt

SEQ ID NO: 51526 - DNA, 33 bp, Homo sapien
caatggcaatcacatagaaggtccataattgtt

SEQ ID NO: 51527 - DNA, 33 bp, Homo sapien
agttttcccagaacacaggattgttgatgctag

SEQ ID NO: 51528 - DNA, 33 bp, Homo sapien
agttttcccagaacacgggattgttgatgctag

SEQ ID NO: 51529 - DNA, 33 bp, Homo sapien
gcacaagaaagcatgaacctgaaagtgttttgg

SEQ ID NO: 51530 - DNA, 33 bp, Homo sapien
gcacaagaaagcatgaccctgaaagtgttttgg

SEQ ID NO: 51531 - DNA, 33 bp, Homo sapien
caaaatctaaccactcgcataaccttcacttct

SEQ ID NO: 51532 - DNA, 33 bp, Homo sapien
caaaatctaaccactctcataaccttcacttct

SEQ ID NO: 51533 - DNA, 33 bp, Homo sapien
ctcttttaaaacagaaactttgtgcttctaagg

SEQ ID NO: 51534 - DNA, 33 bp, Homo sapien
ctcttttaaaacagaacctttgtgcttctaagg

SEQ ID NO: 51535 - DNA, 33 bp, Homo sapien
gctttcctctcattccaactagcctcttagcaa

SEQ ID NO: 51536 - DNA, 33 bp, Homo sapien
gctttcctctcattccgactagcctcttagcaa

SEQ ID NO: 51537 - DNA, 33 bp, Homo sapien
gcacgtgattcctctggatctttcaagctcctg

SEQ ID NO: 51538 - DNA, 33 bp, Homo sapien
gcacgtgattcctctgtatctttcaagctcctg

SEQ ID NO: 51539 - DNA, 33 bp, Homo sapien
ccccttgattgggtaaatggtgcccagtgatac

SEQ ID NO: 51540 - DNA, 33 bp, Homo sapien
ccccttgattgggtaattggtgcccagtgatac

SEQ ID NO: 51541 - DNA, 33 bp, Homo sapien
gacagctttctgtctccatccatggtctgtcag

SEQ ID NO: 51542 - DNA, 33 bp, Homo sapien
gacagctttctgtctctatccatggtctgtcag

SEQ ID NO: 51543 - DNA, 33 bp, Homo sapien
tactgaatggtaagtaggataccaaactactgc

SEQ ID NO: 51544 - DNA, 33 bp, Homo sapien
tactgaatggtaagtatgataccaaactactgc

SEQ ID NO: 51545 - DNA, 33 bp, Homo sapien
agtcccagttaacgcacatagtggttatgattt

SEQ ID NO: 51546 - DNA, 33 bp, Homo sapien
agtcccagttaacgcatatagtggttatgattt

SEQ ID NO: 51547 - DNA, 33 bp, Homo sapien
catcatggatgccagaagagactatgggtgctg

SEQ ID NO: 51548 - DNA, 33 bp, Homo sapien
catcatggatgccagaggagactatgggtgctg

SEQ ID NO: 51549 - DNA, 33 bp, Homo sapien
tctcctccatctctcaaggaactcagatttgct

SEQ ID NO: 51550 - DNA, 33 bp, Homo sapien
tctcctccatctctcagggaactcagatttgct

SEQ ID NO: 51551 - DNA, 33 bp, Homo sapien
agaaaggaacagaggacatttttctgaggtgct

SEQ ID NO: 51552 - DNA, 33 bp, Homo sapien
agaaaggaacagaggagatttttctgaggtgct

SEQ ID NO: 51553 - DNA, 33 bp, Homo sapien
ttgtttaaactgaaaccgaacaaatctgacact

SEQ ID NO: 51554 - DNA, 33 bp, Homo sapien
ttgtttaaactgaaactgaacaaatctgacact

SEQ ID NO: 51555 - DNA, 33 bp, Homo sapien
ttcctcagtacaagagcctagaatttttgtgta

SEQ ID NO: 51556 - DNA, 33 bp, Homo sapien
ttcctcagtacaagagtctagaatttttgtgta

SEQ ID NO: 51557 - DNA, 33 bp, Homo sapien
gagtgattccctgtgcagaataaccataaaaca

SEQ ID NO: 51558 - DNA, 33 bp, Homo sapien
gagtgattccctgtgcggaataaccataaaaca

SEQ ID NO: 51559 - DNA, 33 bp, Homo sapien
tcatcatgtcttttcccagagtgtaatgccaac

SEQ ID NO: 51560 - DNA, 33 bp, Homo sapien
tcatcatgtcttttcctagagtgtaatgccaac

SEQ ID NO: 51561 - DNA, 33 bp, Homo sapien
gggactagagaactaccggcaaatgctgaattc

SEQ ID NO: 51562 - DNA, 33 bp, Homo sapien
gggactagagaactactggcaaatgctgaattc

SEQ ID NO: 51563 - DNA, 33 bp, Homo sapien
agcctgggctcttttccagagtctctgaggaag

SEQ ID NO: 51564 - DNA, 33 bp, Homo sapien
agcctgggctcttttctagagtctctgaggaag

SEQ ID NO: 51565 - DNA, 33 bp, Homo sapien
tcgattggttggagaaaaaaaagaaatcacagt

SEQ ID NO: 51566 - DNA, 33 bp, Homo sapien
tcgattggttggagaataaaaagaaatcacagt

SEQ ID NO: 51567 - DNA, 33 bp, Homo sapien
ttgtttccgtgcaagaagctattatggataact

SEQ ID NO: 51568 - DNA, 33 bp, Homo sapien
ttgtttccgtgcaagatgctattatggataact

SEQ ID NO: 51569 - DNA, 33 bp, Homo sapien
gattaaattgaggttacgcattattggaaggtt

SEQ ID NO: 51570 - DNA, 33 bp, Homo sapien
gattaaattgaggttatgcattattggaaggtt

SEQ ID NO: 51571 - DNA, 33 bp, Homo sapien
ggccttcactaaaaaacgtcatggagccaggca

SEQ ID NO: 51572 - DNA, 33 bp, Homo sapien
ggccttcactaaaaaaggtcatggagccaggca

SEQ ID NO: 51573 - DNA, 33 bp, Homo sapien
ttggtcacttggctaaggagcatctgtccactc

SEQ ID NO: 51574 - DNA, 33 bp, Homo sapien
ttggtcacttggctaatgagcatctgtccactc

SEQ ID NO: 51575 - DNA, 33 bp, Homo sapien
ccgttgaattcatttgcaagtctgagtcccagg

SEQ ID NO: 51576 - DNA, 33 bp, Homo sapien
ccgttgaattcatttgtaagtctgagtcccagg

SEQ ID NO: 51577 - DNA, 33 bp, Homo sapien
ccaaaatctgtgcgtaactttcaagttttttac

SEQ ID NO: 51578 - DNA, 33 bp, Homo sapien
ccaaaatctgtgcgtatctttcaagttttttac

SEQ ID NO: 51579 - DNA, 33 bp, Homo sapien
gaacttattctttgccaataatgggggactact

SEQ ID NO: 51580 - DNA, 33 bp, Homo sapien
gaacttattctttgccgataatgggggactact

SEQ ID NO: 51581 - DNA, 33 bp, Homo sapien
gttgttgggtgaattaagtaaaaaagtatacca

SEQ ID NO: 51582 - DNA, 33 bp, Homo sapien
gttgttgggtgaattacgtaaaaaagtatacca

SEQ ID NO: 51583 - DNA, 33 bp, Homo sapien
tcactcccaaataagccaagaggtaagagttga

SEQ ID NO: 51584 - DNA, 33 bp, Homo sapien
tcactcccaaataagcgaagaggtaagagttga

SEQ ID NO: 51585 - DNA, 33 bp, Homo sapien
tttgagcaaatacttgaaaaagtaggacactct

SEQ ID NO: 51586 - DNA, 33 bp, Homo sapien
tttgagcaaatacttgcaaaagtaggacactct

SEQ ID NO: 51587 - DNA, 33 bp, Homo sapien
tttactcttccattccactatgtaacatgactt

SEQ ID NO: 51588 - DNA, 33 bp, Homo sapien
tttactcttccattccgctatgtaacatgactt

SEQ ID NO: 51589 - DNA, 33 bp, Homo sapien
gaaccataagaaaaacccaattcacgcaattac

SEQ ID NO: 51590 - DNA, 33 bp, Homo sapien
gaaccataagaaaaacgcaattcacgcaattac

SEQ ID NO: 51591 - DNA, 33 bp, Homo sapien
accttttgtagaagagactattttttcactatt

SEQ ID NO: 51592 - DNA, 33 bp, Homo sapien
accttttgtagaagagtctattttttcactatt

SEQ ID NO: 51593 - DNA, 33 bp, Homo sapien
gctatttctttaacaccgtgaatgcaagtcact

SEQ ID NO: 51594 - DNA, 33 bp, Homo sapien
gctatttctttaacactgtgaatgcaagtcact

SEQ ID NO: 51595 - DNA, 33 bp, Homo sapien
gtctcctatccataaacccagaacacaagattt

SEQ ID NO: 51596 - DNA, 33 bp, Homo sapien
gtctcctatccataaatccagaacacaagattt

SEQ ID NO: 51597 - DNA, 33 bp, Homo sapien
ctagactcactgttttcctgaagtgggaagagg

SEQ ID NO: 51598 - DNA, 33 bp, Homo sapien
ctagactcactgtttttctgaagtgggaagagg

SEQ ID NO: 51599 - DNA, 33 bp, Homo sapien
agggcacatttaaaaccaagaagtcgtcactac

SEQ ID NO: 51600 - DNA, 33 bp, Homo sapien
agggcacatttaaaacgaagaagtcgtcactac

SEQ ID NO: 51601 - DNA, 33 bp, Homo sapien
gaaaataatactaatcacacactgctgaaatga

SEQ ID NO: 51602 - DNA, 33 bp, Homo sapien
gaaaataatactaatctcacactgctgaaatga

SEQ ID NO: 51603 - DNA, 33 bp, Homo sapien
tgcagacaagtattcaatcactatcccagctga

SEQ ID NO: 51604 - DNA, 33 bp, Homo sapien
tgcagacaagtattcagtcactatcccagctga

SEQ ID NO: 51605 - DNA, 33 bp, Homo sapien
gtttggtcttccaaccacagttacatgcctcct

SEQ ID NO: 51606 - DNA, 33 bp, Homo sapien
gtttggtcttccaaccgcagttacatgcctcct

SEQ ID NO: 51607 - DNA, 33 bp, Homo sapien
agggcatttatcagtacccaggtgcacattatc

SEQ ID NO: 51608 - DNA, 33 bp, Homo sapien
agggcatttatcagtatccaggtgcacattatc

SEQ ID NO: 51609 - DNA, 33 bp, Homo sapien
attcagtctaaagaaacagttctgaaagtataa

SEQ ID NO: 51610 - DNA, 33 bp, Homo sapien
attcagtctaaagaaatagttctgaaagtataa

SEQ ID NO: 51611 - DNA, 33 bp, Homo sapien
cagactaaatgtgttacggctgtgacagatgtt

SEQ ID NO: 51612 - DNA, 33 bp, Homo sapien
cagactaaatgtgttatggctgtgacagatgtt

SEQ ID NO: 51613 - DNA, 33 bp, Homo sapien
gtgaagatcttagtccaactggttgctttgggt

SEQ ID NO: 51614 - DNA, 33 bp, Homo sapien
gtgaagatcttagtccgactggttgctttgggt

SEQ ID NO: 51615 - DNA, 33 bp, Homo sapien
tactttctgcatccataaagaatgatctcgttt

SEQ ID NO: 51616 - DNA, 33 bp, Homo sapien
tactttctgcatccatgaagaatgatctcgttt

SEQ ID NO: 51617 - DNA, 33 bp, Homo sapien
atgatgtcagggcccaaaataattgaattgaaa

SEQ ID NO: 51618 - DNA, 33 bp, Homo sapien
atgatgtcagggcccagaataattgaattgaaa

SEQ ID NO: 51619 - DNA, 33 bp, Homo sapien
ttggtggcaagtttgacgtccatctgttgtgac

SEQ ID NO: 51620 - DNA, 33 bp, Homo sapien
ttggtggcaagtttgatgtccatctgttgtgac

SEQ ID NO: 51621 - DNA, 33 bp, Homo sapien
gataacagacgacacactaaattggtaccagca

SEQ ID NO: 51622 - DNA, 33 bp, Homo sapien
gataacagacgacacagtaaattggtaccagca

SEQ ID NO: 51623 - DNA, 33 bp, Homo sapien
tactgaatttattcatcagttttgatagttttt

SEQ ID NO: 51624 - DNA, 33 bp, Homo sapien
tactgaatttattcattagttttgatagttttt

SEQ ID NO: 51625 - DNA, 33 bp, Homo sapien
attttctgaatggtaaataaacattggattgaa

SEQ ID NO: 51626 - DNA, 33 bp, Homo sapien
attttctgaatggtaagtaaacattggattgaa

SEQ ID NO: 51627 - DNA, 33 bp, Homo sapien
agcacagcttccagacacagtaaggagaaacgg

SEQ ID NO: 51628 - DNA, 33 bp, Homo sapien
agcacagcttccagacgcagtaaggagaaacgg

SEQ ID NO: 51629 - DNA, 33 bp, Homo sapien
cagccactgaacacaccatagctcttattaaag

SEQ ID NO: 51630 - DNA, 33 bp, Homo sapien
cagccactgaacacacgatagctcttattaaag

SEQ ID NO: 51631 - DNA, 33 bp, Homo sapien
ctcctgtcccctgaacaaccagaaatctctccc

SEQ ID NO: 51632 - DNA, 33 bp, Homo sapien
ctcctgtcccctgaactaccagaaatctctccc

SEQ ID NO: 51633 - DNA, 33 bp, Homo sapien
gatagaacagtgctagaagcagatacaggcctg

SEQ ID NO: 51634 - DNA, 33 bp, Homo sapien
gatagaacagtgctaggagcagatacaggcctg

SEQ ID NO: 51635 - DNA, 33 bp, Homo sapien
tttgggcacggagagaagcaagcttagacctgg

SEQ ID NO: 51636 - DNA, 33 bp, Homo sapien
tttgggcacggagagaggcaagcttagacctgg

SEQ ID NO: 51637 - DNA, 33 bp, Homo sapien
gctctcttgtgtctaaacattctgatgtcctca

SEQ ID NO: 51638 - DNA, 33 bp, Homo sapien
gctctcttgtgtctaatcattctgatgtcctca

SEQ ID NO: 51639 - DNA, 33 bp, Homo sapien
acacttttagtaggacaatttgcaaggtctgga

SEQ ID NO: 51640 - DNA, 33 bp, Homo sapien
acacttttagtaggactatttgcaaggtctgga

SEQ ID NO: 51641 - DNA, 33 bp, Homo sapien
cgataatgccaggtaaagaagagctttgtaaaa

SEQ ID NO: 51642 - DNA, 33 bp, Homo sapien
cgataatgccaggtaatgaagagctttgtaaaa

SEQ ID NO: 51643 - DNA, 33 bp, Homo sapien
ccctgggccacaggacactagcctttagctcgt

SEQ ID NO: 51644 - DNA, 33 bp, Homo sapien
ccctgggccacaggactctagcctttagctcgt

SEQ ID NO: 51645 - DNA, 33 bp, Homo sapien
ttctccaaagctcttgcaatcagaaagttaacc

SEQ ID NO: 51646 - DNA, 33 bp, Homo sapien
ttctccaaagctcttgtaatcagaaagttaacc

SEQ ID NO: 51647 - DNA, 33 bp, Homo sapien
gcaatgtcagagccaaactatcatcctggttaa

SEQ ID NO: 51648 - DNA, 33 bp, Homo sapien
gcaatgtcagagccaagctatcatcctggttaa

SEQ ID NO: 51649 - DNA, 33 bp, Homo sapien
acctacaaacaatgataagacactagataaaag

SEQ ID NO: 51650 - DNA, 33 bp, Homo sapien
acctacaaacaatgatgagacactagataaaag

SEQ ID NO: 51651 - DNA, 33 bp, Homo sapien
aataacttctgctacacgcagtttctcaagacc

SEQ ID NO: 51652 - DNA, 33 bp, Homo sapien
aataacttctgctacatgcagtttctcaagacc

SEQ ID NO: 51653 - DNA, 33 bp, Homo sapien
aataagagcaagtttacagagtgacctaagata

SEQ ID NO: 51654 - DNA, 33 bp, Homo sapien
aataagagcaagtttatagagtgacctaagata

SEQ ID NO: 51655 - DNA, 33 bp, Homo sapien
agagaatgcaggtagaagaccaaggactaaatc

SEQ ID NO: 51656 - DNA, 33 bp, Homo sapien
agagaatgcaggtagaggaccaaggactaaatc

SEQ ID NO: 51657 - DNA, 33 bp, Homo sapien
cagccatgctagactacctcctctcagctcccc

SEQ ID NO: 51658 - DNA, 33 bp, Homo sapien
cagccatgctagactatctcctctcagctcccc

SEQ ID NO: 51659 - DNA, 33 bp, Homo sapien
agtgggcaaatgtgtacgaacgtgtctgtcagt

SEQ ID NO: 51660 - DNA, 33 bp, Homo sapien
agtgggcaaatgtgtatgaacgtgtctgtcagt

SEQ ID NO: 51661 - DNA, 33 bp, Homo sapien
tcggatggttcttcaaacttgcactttagagaa

SEQ ID NO: 51662 - DNA, 33 bp, Homo sapien
tcggatggttcttcaagcttgcactttagagaa

SEQ ID NO: 51663 - DNA, 33 bp, Homo sapien
gtgtttacgtattttaagcatcccaagtttcaa

SEQ ID NO: 51664 - DNA, 33 bp, Homo sapien
gtgtttacgtattttatgcatcccaagtttcaa

SEQ ID NO: 51665 - DNA, 33 bp, Homo sapien
atccaaaggtcgttaaaatggaaataagtgtcc

SEQ ID NO: 51666 - DNA, 33 bp, Homo sapien
atccaaaggtcgttaagatggaaataagtgtcc

SEQ ID NO: 51667 - DNA, 33 bp, Homo sapien
acatggggacaaggaactgaactgacattggat

SEQ ID NO: 51668 - DNA, 33 bp, Homo sapien
acatggggacaaggaattgaactgacattggat

SEQ ID NO: 51669 - DNA, 33 bp, Homo sapien
gtcttccagacagaacaaccagcatgtgaaaag

SEQ ID NO: 51670 - DNA, 33 bp, Homo sapien
gtcttccagacagaacgaccagcatgtgaaaag

SEQ ID NO: 51671 - DNA, 33 bp, Homo sapien
tggtatatgagagacaacaaaaaggcttcaaag

SEQ ID NO: 51672 - DNA, 33 bp, Homo sapien
tggtatatgagagacagcaaaaaggcttcaaag

SEQ ID NO: 51673 - DNA, 33 bp, Homo sapien
agatattgatttttcacaaagactcaatgtctg

SEQ ID NO: 51674 - DNA, 33 bp, Homo sapien
agatattgatttttcataaagactcaatgtctg

SEQ ID NO: 51675 - DNA, 33 bp, Homo sapien
gtggaaaatgagcatacactgtgtgggaactac

SEQ ID NO: 51676 - DNA, 33 bp, Homo sapien
gtggaaaatgagcatatactgtgtgggaactac

SEQ ID NO: 51677 - DNA, 33 bp, Homo sapien
ctaggtaactcagacaacctctctgaaaataat

SEQ ID NO: 51678 - DNA, 33 bp, Homo sapien
ctaggtaactcagacagcctctctgaaaataat

SEQ ID NO: 51679 - DNA, 33 bp, Homo sapien
cagcaccagaatagtcagaccgagccctctagg

SEQ ID NO: 51680 - DNA, 33 bp, Homo sapien
cagcaccagaatagtcggaccgagccctctagg

SEQ ID NO: 51681 - DNA, 33 bp, Homo sapien
gtcatcaataatttttaaaaaagtaggtggatc

SEQ ID NO: 51682 - DNA, 33 bp, Homo sapien
gtcatcaataattttttaaaaagtaggtggatc

SEQ ID NO: 51683 - DNA, 33 bp, Homo sapien
accagtatgcaacaacgctttgccatgattctt

SEQ ID NO: 51684 - DNA, 33 bp, Homo sapien
accagtatgcaacaactctttgccatgattctt

SEQ ID NO: 51685 - DNA, 33 bp, Homo sapien
aataatgatgcgcaaaattgaccaagtccttgt

SEQ ID NO: 51686 - DNA, 33 bp, Homo sapien
aataatgatgcgcaaacttgaccaagtccttgt

SEQ ID NO: 51687 - DNA, 33 bp, Homo sapien
ggatgaaacaagaacaaccatatgctgagtcca

SEQ ID NO: 51688 - DNA, 33 bp, Homo sapien
ggatgaaacaagaacacccatatgctgagtcca

SEQ ID NO: 51689 - DNA, 33 bp, Homo sapien
tttagaatacatagatcatctaaaaagcacaga

SEQ ID NO: 51690 - DNA, 33 bp, Homo sapien
tttagaatacatagatgatctaaaaagcacaga

SEQ ID NO: 51691 - DNA, 33 bp, Homo sapien
gaagacagaagtgacacagaagaggaaaagaag

SEQ ID NO: 51692 - DNA, 33 bp, Homo sapien
gaagacagaagtgacatagaagaggaaaagaag

SEQ ID NO: 51693 - DNA, 33 bp, Homo sapien
cctttaattctgaagacattttgcactataaga

SEQ ID NO: 51694 - DNA, 33 bp, Homo sapien
cctttaattctgaagatattttgcactataaga

SEQ ID NO: 51695 - DNA, 33 bp, Homo sapien
tacatctagggaacttcaaagccaggtaatctc

SEQ ID NO: 51696 - DNA, 33 bp, Homo sapien
tacatctagggaactttaaagccaggtaatctc

SEQ ID NO: 51697 - DNA, 33 bp, Homo sapien
ctgtaccctcaagaatgaaaactgaatcataac

SEQ ID NO: 51698 - DNA, 33 bp, Homo sapien
ctgtaccctcaagaattaaaactgaatcataac

SEQ ID NO: 51699 - DNA, 33 bp, Homo sapien
tctgcaaagcctgtgcggaaggagacaccagct

SEQ ID NO: 51700 - DNA, 33 bp, Homo sapien
tctgcaaagcctgtgctgaaggagacaccagct

SEQ ID NO: 51701 - DNA, 33 bp, Homo sapien
ccacacccactggagaaataaggccttcaaggg

SEQ ID NO: 51702 - DNA, 33 bp, Homo sapien
ccacacccactggagagataaggccttcaaggg

SEQ ID NO: 51703 - DNA, 33 bp, Homo sapien
tcttttggcctcctcaagtattatataggagat

SEQ ID NO: 51704 - DNA, 33 bp, Homo sapien
tcttttggcctcctcatgtattatataggagat

SEQ ID NO: 51705 - DNA, 33 bp, Homo sapien
atgccaggaacattcaaatttgagaagcctcca

SEQ ID NO: 51706 - DNA, 33 bp, Homo sapien
atgccaggaacattcatatttgagaagcctcca

SEQ ID NO: 51707 - DNA, 33 bp, Homo sapien
ctggacgtctgagctgaagtgccctgcctctga

SEQ ID NO: 51708 - DNA, 33 bp, Homo sapien
ctggacgtctgagctggagtgccctgcctctga

SEQ ID NO: 51709 - DNA, 33 bp, Homo sapien
agacacagtagataaacgcactttgaaaaaagt

SEQ ID NO: 51710 - DNA, 33 bp, Homo sapien
agacacagtagataaatgcactttgaaaaaagt

SEQ ID NO: 51711 - DNA, 33 bp, Homo sapien
aaaataacatccatcactactgacttctccatc

SEQ ID NO: 51712 - DNA, 33 bp, Homo sapien
aaaataacatccatcattactgacttctccatc

SEQ ID NO: 51713 - DNA, 33 bp, Homo sapien
gctaacttagttttcaatatggctagtgaaatc

SEQ ID NO: 51714 - DNA, 33 bp, Homo sapien
gctaacttagttttcagtatggctagtgaaatc

SEQ ID NO: 51715 - DNA, 33 bp, Homo sapien
caaaaaaagtgaagtaccgggttggagattagc

SEQ ID NO: 51716 - DNA, 33 bp, Homo sapien
caaaaaaagtgaagtatcgggttggagattagc

SEQ ID NO: 51717 - DNA, 33 bp, Homo sapien
tagccatgaagactcacacaattgcatccatgg

SEQ ID NO: 51718 - DNA, 33 bp, Homo sapien
tagccatgaagactcagacaattgcatccatgg

SEQ ID NO: 51719 - DNA, 33 bp, Homo sapien
actccacatgacacttctgacaccagctgtgta

SEQ ID NO: 51720 - DNA, 33 bp, Homo sapien
actccacatgacacttttgacaccagctgtgta

SEQ ID NO: 51721 - DNA, 33 bp, Homo sapien
gatcttctgacagtggcaaaagtgcaagaaggc

SEQ ID NO: 51722 - DNA, 33 bp, Homo sapien
gatcttctgacagtggtaaaagtgcaagaaggc

SEQ ID NO: 51723 - DNA, 33 bp, Homo sapien
tgtcatagacttgtccactagtagtttctcagg

SEQ ID NO: 51724 - DNA, 33 bp, Homo sapien
tgtcatagacttgtccgctagtagtttctcagg

SEQ ID NO: 51725 - DNA, 33 bp, Homo sapien
cttcataggagaaacacgtagaaagatcaagca

SEQ ID NO: 51726 - DNA, 33 bp, Homo sapien
cttcataggagaaacatgtagaaagatcaagca

SEQ ID NO: 51727 - DNA, 33 bp, Homo sapien
attggttttcagaataaatttagttcctaatat

SEQ ID NO: 51728 - DNA, 33 bp, Homo sapien
attggttttcagaatacatttagttcctaatat

SEQ ID NO: 51729 - DNA, 33 bp, Homo sapien
gaatttcttcaactgtaaaatgggcttagtgac

SEQ ID NO: 51730 - DNA, 33 bp, Homo sapien
gaatttcttcaactgtcaaatgggcttagtgac

SEQ ID NO: 51731 - DNA, 33 bp, Homo sapien
aaaatattccttgaacacaaagattaaagtgca

SEQ ID NO: 51732 - DNA, 33 bp, Homo sapien
aaaatattccttgaacgcaaagattaaagtgca

SEQ ID NO: 51733 - DNA, 33 bp, Homo sapien
agaggattaaatacaacaaggcccagtgactga

SEQ ID NO: 51734 - DNA, 33 bp, Homo sapien
agaggattaaatacaataaggcccagtgactga

SEQ ID NO: 51735 - DNA, 33 bp, Homo sapien
aggattcataggttcacaggagctctggagtta

SEQ ID NO: 51736 - DNA, 33 bp, Homo sapien
aggattcataggttcataggagctctggagtta

SEQ ID NO: 51737 - DNA, 33 bp, Homo sapien
aatcccacctgaaagacagcagccagggaagag

SEQ ID NO: 51738 - DNA, 33 bp, Homo sapien
aatcccacctgaaagatagcagccagggaagag

SEQ ID NO: 51739 - DNA, 33 bp, Homo sapien
gagagggttatttgaacagccaggtcatgatag

SEQ ID NO: 51740 - DNA, 33 bp, Homo sapien
gagagggttatttgaatagccaggtcatgatag

SEQ ID NO: 51741 - DNA, 33 bp, Homo sapien
ggccaaactttccaaccatggctcacactgggc

SEQ ID NO: 51742 - DNA, 33 bp, Homo sapien
ggccaaactttccaactatggctcacactgggc

SEQ ID NO: 51743 - DNA, 33 bp, Homo sapien
tcagaaacctcaaaaaaatacagatcatttaaa

SEQ ID NO: 51744 - DNA, 33 bp, Homo sapien
tcagaaacctcaaaaacatacagatcatttaaa

SEQ ID NO: 51745 - DNA, 33 bp, Homo sapien
caaggtgatgtcattaggttatgtctccaatat

SEQ ID NO: 51746 - DNA, 33 bp, Homo sapien
caaggtgatgtcattatgttatgtctccaatat

SEQ ID NO: 51747 - DNA, 33 bp, Homo sapien
aggattcccccaactgccaggtctcagtcacat

SEQ ID NO: 51748 - DNA, 33 bp, Homo sapien
aggattcccccaactggcaggtctcagtcacat

SEQ ID NO: 51749 - DNA, 33 bp, Homo sapien
agaagcaaatcgaacagatgggcctggaatctg

SEQ ID NO: 51750 - DNA, 33 bp, Homo sapien
agaagcaaatcgaacatatgggcctggaatctg

SEQ ID NO: 51751 - DNA, 33 bp, Homo sapien
ggtggtctgagtgaagaataactgactgcaggc

SEQ ID NO: 51752 - DNA, 33 bp, Homo sapien
ggtggtctgagtgaaggataactgactgcaggc

SEQ ID NO: 51753 - DNA, 33 bp, Homo sapien
aagtccaggtgacccacagtctgaaacaaagtt

SEQ ID NO: 51754 - DNA, 33 bp, Homo sapien
aagtccaggtgacccatagtctgaaacaaagtt

SEQ ID NO: 51755 - DNA, 33 bp, Homo sapien
ggccaatgatgtaatacagagtgattcacacta

SEQ ID NO: 51756 - DNA, 33 bp, Homo sapien
ggccaatgatgtaatatagagtgattcacacta

SEQ ID NO: 51757 - DNA, 33 bp, Homo sapien
tactcaggttcctccactgcaaatggaaatggt

SEQ ID NO: 51758 - DNA, 33 bp, Homo sapien
tactcaggttcctccagtgcaaatggaaatggt

SEQ ID NO: 51759 - DNA, 33 bp, Homo sapien
tcatccacaggacaatgaaagaactttatatgc

SEQ ID NO: 51760 - DNA, 33 bp, Homo sapien
tcatccacaggacaattaaagaactttatatgc

SEQ ID NO: 51761 - DNA, 33 bp, Homo sapien
tgcctttaagatctgacaggagacagggtgcag

SEQ ID NO: 51762 - DNA, 33 bp, Homo sapien
tgcctttaagatctgagaggagacagggtgcag

SEQ ID NO: 51763 - DNA, 33 bp, Homo sapien
agaaaacagaaactgccagttttgcttaaagag

SEQ ID NO: 51764 - DNA, 33 bp, Homo sapien
agaaaacagaaactgctagttttgcttaaagag

SEQ ID NO: 51765 - DNA, 33 bp, Homo sapien
atgtcaagagagacaaacagtgcaactccagac

SEQ ID NO: 51766 - DNA, 33 bp, Homo sapien
atgtcaagagagacaagcagtgcaactccagac

SEQ ID NO: 51767 - DNA, 33 bp, Homo sapien
tccataatgccaattacagctgttagcacatac

SEQ ID NO: 51768 - DNA, 33 bp, Homo sapien
tccataatgccaattatagctgttagcacatac

SEQ ID NO: 51769 - DNA, 33 bp, Homo sapien
atgaggaggagttggaaagaagcccagcagccc

SEQ ID NO: 51770 - DNA, 33 bp, Homo sapien
atgaggaggagttggagagaagcccagcagccc

SEQ ID NO: 51771 - DNA, 33 bp, Homo sapien
ggcttgagaagaaagtaaactctccttcataca

SEQ ID NO: 51772 - DNA, 33 bp, Homo sapien
ggcttgagaagaaagtgaactctccttcataca

SEQ ID NO: 51773 - DNA, 33 bp, Homo sapien
aatacatatgctccaacgattccaactatggga

SEQ ID NO: 51774 - DNA, 33 bp, Homo sapien
aatacatatgctccaatgattccaactatggga

SEQ ID NO: 51775 - DNA, 33 bp, Homo sapien
tacaccacttttgtgaaatgaaaattcctgaag

SEQ ID NO: 51776 - DNA, 33 bp, Homo sapien
tacaccacttttgtgatatgaaaattcctgaag

SEQ ID NO: 51777 - DNA, 33 bp, Homo sapien
ggataatgaaatttgaataacactttgtagact

SEQ ID NO: 51778 - DNA, 33 bp, Homo sapien
ggataatgaaatttgagtaacactttgtagact

SEQ ID NO: 51779 - DNA, 33 bp, Homo sapien
tactagtgaataactgcagaaacagaactatac

SEQ ID NO: 51780 - DNA, 33 bp, Homo sapien
tactagtgaataactggagaaacagaactatac

SEQ ID NO: 51781 - DNA, 33 bp, Homo sapien
tttggaggaatcaatgaagacggaattctttta

SEQ ID NO: 51782 - DNA, 33 bp, Homo sapien
tttggaggaatcaatggagacggaattctttta

SEQ ID NO: 51783 - DNA, 33 bp, Homo sapien
acacacacagaacaaagaatcatatggcttaca

SEQ ID NO: 51784 - DNA, 33 bp, Homo sapien
acacacacagaacaaataatcatatggcttaca

SEQ ID NO: 51785 - DNA, 33 bp, Homo sapien
gagaaaccctactacacccaccatggctcaaca

SEQ ID NO: 51786 - DNA, 33 bp, Homo sapien
gagaaaccctactacatccaccatggctcaaca

SEQ ID NO: 51787 - DNA, 33 bp, Homo sapien
ataaaacatgaagcagaccttaattttccagtg

SEQ ID NO: 51788 - DNA, 33 bp, Homo sapien
ataaaacatgaagcagtccttaattttccagtg

SEQ ID NO: 51789 - DNA, 33 bp, Homo sapien
cccgccactgcaaaaaaaaaaaccttacagtga

SEQ ID NO: 51790 - DNA, 33 bp, Homo sapien
cccgccactgcaaaaagaaaaaccttacagtga

SEQ ID NO: 51791 - DNA, 33 bp, Homo sapien
tataaaataatttatacagttatagcacatcaa

SEQ ID NO: 51792 - DNA, 33 bp, Homo sapien
tataaaataatttatagagttatagcacatcaa

SEQ ID NO: 51793 - DNA, 33 bp, Homo sapien
cacaatctggtaaaaggcaggaatatgagctcc

SEQ ID NO: 51794 - DNA, 33 bp, Homo sapien
cacaatctggtaaaagtcaggaatatgagctcc

SEQ ID NO: 51795 - DNA, 33 bp, Homo sapien
aaagctcaaagattctaaaaacccactgttatc

SEQ ID NO: 51796 - DNA, 33 bp, Homo sapien
aaagctcaaagattctgaaaacccactgttatc

SEQ ID NO: 51797 - DNA, 33 bp, Homo sapien
agcaggctcaaaactacctcatcccaaagcatc

SEQ ID NO: 51798 - DNA, 33 bp, Homo sapien
agcaggctcaaaactatctcatcccaaagcatc

SEQ ID NO: 51799 - DNA, 33 bp, Homo sapien
ctggaaactagccaggacacaaagctttgggat

SEQ ID NO: 51800 - DNA, 33 bp, Homo sapien
ctggaaactagccagggcacaaagctttgggat

SEQ ID NO: 51801 - DNA, 33 bp, Homo sapien
atgaattaaggtgagacgttgggaatgaagagg

SEQ ID NO: 51802 - DNA, 33 bp, Homo sapien
atgaattaaggtgagaggttgggaatgaagagg

SEQ ID NO: 51803 - DNA, 33 bp, Homo sapien
catagtaatacagaaccaaggaatttagataac

SEQ ID NO: 51804 - DNA, 33 bp, Homo sapien
catagtaatacagaacgaaggaatttagataac

SEQ ID NO: 51805 - DNA, 33 bp, Homo sapien
atcaaaactccagccaaaaagaggagagaggag

SEQ ID NO: 51806 - DNA, 33 bp, Homo sapien
atcaaaactccagccacaaagaggagagaggag

SEQ ID NO: 51807 - DNA, 33 bp, Homo sapien
tccactaccttgataaaatgcagaattagttca

SEQ ID NO: 51808 - DNA, 33 bp, Homo sapien
tccactaccttgataagatgcagaattagttca

SEQ ID NO: 51809 - DNA, 33 bp, Homo sapien
gaagtttatcatgatcacttggattgctctgga

SEQ ID NO: 51810 - DNA, 33 bp, Homo sapien
gaagtttatcatgatcgcttggattgctctgga

SEQ ID NO: 51811 - DNA, 33 bp, Homo sapien
actgagatgaaattggcaggccgtttgacatgg

SEQ ID NO: 51812 - DNA, 33 bp, Homo sapien
actgagatgaaattggtaggccgtttgacatgg

SEQ ID NO: 51813 - DNA, 33 bp, Homo sapien
tccccagcatggcacaatgcttcacatactgaa

SEQ ID NO: 51814 - DNA, 33 bp, Homo sapien
tccccagcatggcacagtgcttcacatactgaa

SEQ ID NO: 51815 - DNA, 33 bp, Homo sapien
agacaacaaacattcacggagactcttcagtat

SEQ ID NO: 51816 - DNA, 33 bp, Homo sapien
agacaacaaacattcatggagactcttcagtat

SEQ ID NO: 51817 - DNA, 33 bp, Homo sapien
tcatccatacattcaccgcgtggtaactgagat

SEQ ID NO: 51818 - DNA, 33 bp, Homo sapien
tcatccatacattcactgcgtggtaactgagat

SEQ ID NO: 51819 - DNA, 33 bp, Homo sapien
gcacaagctggtcccactcaacatttccagcct

SEQ ID NO: 51820 - DNA, 33 bp, Homo sapien
gcacaagctggtcccattcaacatttccagcct

SEQ ID NO: 51821 - DNA, 33 bp, Homo sapien
gtaacacagatttaaaagagagcaagtttctct

SEQ ID NO: 51822 - DNA, 33 bp, Homo sapien
gtaacacagatttaaatgagagcaagtttctct

SEQ ID NO: 51823 - DNA, 33 bp, Homo sapien
ccagactctgtggacacatttgcagcttcctgg

SEQ ID NO: 51824 - DNA, 33 bp, Homo sapien
ccagactctgtggacatatttgcagcttcctgg

SEQ ID NO: 51825 - DNA, 33 bp, Homo sapien
gcaattgctccatttacggtaacctagtgttct

SEQ ID NO: 51826 - DNA, 33 bp, Homo sapien
gcaattgctccatttatggtaacctagtgttct

SEQ ID NO: 51827 - DNA, 33 bp, Homo sapien
acctctgtagcaagtcactccatgcagagagcg

SEQ ID NO: 51828 - DNA, 33 bp, Homo sapien
acctctgtagcaagtcgctccatgcagagagcg

SEQ ID NO: 51829 - DNA, 33 bp, Homo sapien
ttgctcgaggtacataagaatgctgtgtgagga

SEQ ID NO: 51830 - DNA, 33 bp, Homo sapien
ttgctcgaggtacataggaatgctgtgtgagga

SEQ ID NO: 51831 - DNA, 33 bp, Homo sapien
cccagaactgaatacccctgcactgggctttct

SEQ ID NO: 51832 - DNA, 33 bp, Homo sapien
cccagaactgaatacctctgcactgggctttct

SEQ ID NO: 51833 - DNA, 33 bp, Homo sapien
atcaaacggaccaacacaacagtgataccgtag

SEQ ID NO: 51834 - DNA, 33 bp, Homo sapien
atcaaacggaccaacagaacagtgataccgtag

SEQ ID NO: 51835 - DNA, 33 bp, Homo sapien
agaactggtgatcataaaaaaatgttccaattt

SEQ ID NO: 51836 - DNA, 33 bp, Homo sapien
agaactggtgatcatacaaaaatgttccaattt

SEQ ID NO: 51837 - DNA, 33 bp, Homo sapien
aacatgctcatgctaaatcctccatcagactgc

SEQ ID NO: 51838 - DNA, 33 bp, Homo sapien
aacatgctcatgctaactcctccatcagactgc

SEQ ID NO: 51839 - DNA, 33 bp, Homo sapien
agctttgcagtaagccagctagttctgtgtagg

SEQ ID NO: 51840 - DNA, 33 bp, Homo sapien
agctttgcagtaagccggctagttctgtgtagg

SEQ ID NO: 51841 - DNA, 33 bp, Homo sapien
tgtgggcttggttgaagaagaaactgcagcaat

SEQ ID NO: 51842 - DNA, 33 bp, Homo sapien
tgtgggcttggttgaataagaaactgcagcaat

SEQ ID NO: 51843 - DNA, 33 bp, Homo sapien
agggtgtgggactccaaaaacattcgtcagcct

SEQ ID NO: 51844 - DNA, 33 bp, Homo sapien
agggtgtgggactccagaaacattcgtcagcct

SEQ ID NO: 51845 - DNA, 33 bp, Homo sapien
agggacagaatcagaaaggtggtgtcctggagg

SEQ ID NO: 51846 - DNA, 33 bp, Homo sapien
agggacagaatcagaagggtggtgtcctggagg

SEQ ID NO: 51847 - DNA, 33 bp, Homo sapien
ggagaactggtaaagacgagaattaagttgaaa

SEQ ID NO: 51848 - DNA, 33 bp, Homo sapien
ggagaactggtaaagaggagaattaagttgaaa

SEQ ID NO: 51849 - DNA, 33 bp, Homo sapien
gggttgaacatttagcagataatagtcactatg

SEQ ID NO: 51850 - DNA, 33 bp, Homo sapien
gggttgaacatttagcggataatagtcactatg

SEQ ID NO: 51851 - DNA, 33 bp, Homo sapien
caagcttgtactagacgggttccactgtcttcc

SEQ ID NO: 51852 - DNA, 33 bp, Homo sapien
caagcttgtactagactggttccactgtcttcc

SEQ ID NO: 51853 - DNA, 33 bp, Homo sapien
tatcatgtgcttaatgaaaactgttactgttcc

SEQ ID NO: 51854 - DNA, 33 bp, Homo sapien
tatcatgtgcttaatggaaactgttactgttcc

SEQ ID NO: 51855 - DNA, 33 bp, Homo sapien
catctttgtcctcctacagtctcttcttagcac

SEQ ID NO: 51856 - DNA, 33 bp, Homo sapien
catctttgtcctcctatagtctcttcttagcac

SEQ ID NO: 51857 - DNA, 33 bp, Homo sapien
ttaaattcatcaaaacagcagcctgtgaaccca

SEQ ID NO: 51858 - DNA, 33 bp, Homo sapien
ttaaattcatcaaaacggcagcctgtgaaccca

SEQ ID NO: 51859 - DNA, 33 bp, Homo sapien
ttaaacacatctgtgccatctgtggagacagat

SEQ ID NO: 51860 - DNA, 33 bp, Homo sapien
ttaaacacatctgtgctatctgtggagacagat

SEQ ID NO: 51861 - DNA, 33 bp, Homo sapien
agtacactggttctcaaccctgggggctttgaa

SEQ ID NO: 51862 - DNA, 33 bp, Homo sapien
agtacactggttctcatccctgggggctttgaa

SEQ ID NO: 51863 - DNA, 33 bp, Homo sapien
cctggctgagtctgcaaaagggaagacgatcca

SEQ ID NO: 51864 - DNA, 33 bp, Homo sapien
cctggctgagtctgcagaagggaagacgatcca

SEQ ID NO: 51865 - DNA, 33 bp, Homo sapien
ggaataatctgcccagacgatccagagtccagc

SEQ ID NO: 51866 - DNA, 33 bp, Homo sapien
ggaataatctgcccagtcgatccagagtccagc

SEQ ID NO: 51867 - DNA, 33 bp, Homo sapien
gctttgctcggttaacaagatgacactggaaaa

SEQ ID NO: 51868 - DNA, 33 bp, Homo sapien
gctttgctcggttaacgagatgacactggaaaa

SEQ ID NO: 51869 - DNA, 33 bp, Homo sapien
aacctcatacattatgaagcatagggtatcaat

SEQ ID NO: 51870 - DNA, 33 bp, Homo sapien
aacctcatacattatgcagcatagggtatcaat

SEQ ID NO: 51871 - DNA, 33 bp, Homo sapien
cccactataatcagcaaggccattgatacccta

SEQ ID NO: 51872 - DNA, 33 bp, Homo sapien
cccactataatcagcagggccattgatacccta

SEQ ID NO: 51873 - DNA, 33 bp, Homo sapien
aggacagtgccttgcaggtagtaggcactcaag

SEQ ID NO: 51874 - DNA, 33 bp, Homo sapien
aggacagtgccttgcatgtagtaggcactcaag

SEQ ID NO: 51875 - DNA, 33 bp, Homo sapien
cattacacttagcacccactgatgttgcccaaa

SEQ ID NO: 51876 - DNA, 33 bp, Homo sapien
cattacacttagcacctactgatgttgcccaaa

SEQ ID NO: 51877 - DNA, 33 bp, Homo sapien
taccttatttccaagcacccttgagactattaa

SEQ ID NO: 51878 - DNA, 33 bp, Homo sapien
taccttatttccaagcgcccttgagactattaa

SEQ ID NO: 51879 - DNA, 33 bp, Homo sapien
gtgtagtccgtaaggcagaaattattcccatta

SEQ ID NO: 51880 - DNA, 33 bp, Homo sapien
gtgtagtccgtaaggcggaaattattcccatta

SEQ ID NO: 51881 - DNA, 33 bp, Homo sapien
cattttctagctataagaccttaagcaagttat

SEQ ID NO: 51882 - DNA, 33 bp, Homo sapien
cattttctagctataataccttaagcaagttat

SEQ ID NO: 51883 - DNA, 33 bp, Homo sapien
actgttaccattgttcccgtactccttttagag

SEQ ID NO: 51884 - DNA, 33 bp, Homo sapien
actgttaccattgttctcgtactccttttagag

SEQ ID NO: 51885 - DNA, 33 bp, Homo sapien
gaagtgatctctgtcaccaggaggtgttagacc

SEQ ID NO: 51886 - DNA, 33 bp, Homo sapien
gaagtgatctctgtcatcaggaggtgttagacc

SEQ ID NO: 51887 - DNA, 33 bp, Homo sapien
taggcaagctttagtcccaagccttcagatgaa

SEQ ID NO: 51888 - DNA, 33 bp, Homo sapien
taggcaagctttagtctcaagccttcagatgaa

SEQ ID NO: 51889 - DNA, 33 bp, Homo sapien
gcttctgttgtccaaaatatttcttattcatac

SEQ ID NO: 51890 - DNA, 33 bp, Homo sapien
gcttctgttgtccaaagtatttcttattcatac

SEQ ID NO: 51891 - DNA, 33 bp, Homo sapien
caaactatatcaaaccagaagttggaatgaaca

SEQ ID NO: 51892 - DNA, 33 bp, Homo sapien
caaactatatcaaaccggaagttggaatgaaca

SEQ ID NO: 51893 - DNA, 33 bp, Homo sapien
gggactggcctttaatcagcaagattttgatag

SEQ ID NO: 51894 - DNA, 33 bp, Homo sapien
gggactggcctttaatgagcaagattttgatag

SEQ ID NO: 51895 - DNA, 33 bp, Homo sapien
aaattcatgctgtaataaagaagtaagaatttt

SEQ ID NO: 51896 - DNA, 33 bp, Homo sapien
aaattcatgctgtaatgaagaagtaagaatttt

SEQ ID NO: 51897 - DNA, 33 bp, Homo sapien
tcttaaatgaaaaccaagccaaataatagacat

SEQ ID NO: 51898 - DNA, 33 bp, Homo sapien
tcttaaatgaaaaccaggccaaataatagacat

SEQ ID NO: 51899 - DNA, 33 bp, Homo sapien
catgatgtgagaatcaaggccttagagaatggt

SEQ ID NO: 51900 - DNA, 33 bp, Homo sapien
catgatgtgagaatcacggccttagagaatggt

SEQ ID NO: 51901 - DNA, 33 bp, Homo sapien
gcatcaacaaataatccctgatgctgtcatgtg

SEQ ID NO: 51902 - DNA, 33 bp, Homo sapien
gcatcaacaaataatctctgatgctgtcatgtg

SEQ ID NO: 51903 - DNA, 33 bp, Homo sapien
aaatgtctgtatcccactctgctgatgtgtcta

SEQ ID NO: 51904 - DNA, 33 bp, Homo sapien
aaatgtctgtatcccagtctgctgatgtgtcta

SEQ ID NO: 51905 - DNA, 33 bp, Homo sapien
cttattgaatttcttccctttttgcttttgctt

SEQ ID NO: 51906 - DNA, 33 bp, Homo sapien
cttattgaatttcttctctttttgcttttgctt

SEQ ID NO: 51907 - DNA, 33 bp, Homo sapien
ttgtttgagtacctaccatggacaaggcactgt

SEQ ID NO: 51908 - DNA, 33 bp, Homo sapien
ttgtttgagtacctactatggacaaggcactgt

SEQ ID NO: 51909 - DNA, 33 bp, Homo sapien
aaggctttcagatacaacccttctttcaatcct

SEQ ID NO: 51910 - DNA, 33 bp, Homo sapien
aaggctttcagatacaccccttctttcaatcct

SEQ ID NO: 51911 - DNA, 33 bp, Homo sapien
atgttattacacttcacgttttacaaaaggctt

SEQ ID NO: 51912 - DNA, 33 bp, Homo sapien
atgttattacacttcatgttttacaaaaggctt

SEQ ID NO: 51913 - DNA, 33 bp, Homo sapien
ttagtgctaaagaagacgaagcacagcagtgag

SEQ ID NO: 51914 - DNA, 33 bp, Homo sapien
ttagtgctaaagaagatgaagcacagcagtgag

SEQ ID NO: 51915 - DNA, 33 bp, Homo sapien
caaaatttacattaaaattgcattgactgaaga

SEQ ID NO: 51916 - DNA, 33 bp, Homo sapien
caaaatttacattaaagttgcattgactgaaga

SEQ ID NO: 51917 - DNA, 33 bp, Homo sapien
atgtcggcctctgcaccgaatgccccacatcac

SEQ ID NO: 51918 - DNA, 33 bp, Homo sapien
atgtcggcctctgcactgaatgccccacatcac

SEQ ID NO: 51919 - DNA, 33 bp, Homo sapien
aatgcgggaaaggttcaagcttatagagaagag

SEQ ID NO: 51920 - DNA, 33 bp, Homo sapien
aatgcgggaaaggttcgagcttatagagaagag

SEQ ID NO: 51921 - DNA, 33 bp, Homo sapien
ccgagattcatcctcacggcctggggattccag

SEQ ID NO: 51922 - DNA, 33 bp, Homo sapien
ccgagattcatcctcatggcctggggattccag

SEQ ID NO: 51923 - DNA, 33 bp, Homo sapien
cataaattgtgggtgacgataacacagacatta

SEQ ID NO: 51924 - DNA, 33 bp, Homo sapien
cataaattgtgggtgatgataacacagacatta

SEQ ID NO: 51925 - DNA, 33 bp, Homo sapien
gtattcagaatgcaagcatagattccccaagca

SEQ ID NO: 51926 - DNA, 33 bp, Homo sapien
gtattcagaatgcaagtatagattccccaagca

SEQ ID NO: 51927 - DNA, 33 bp, Homo sapien
ggccaggctgctaacccagactacgcgttgact

SEQ ID NO: 51928 - DNA, 33 bp, Homo sapien
ggccaggctgctaacctagactacgcgttgact

SEQ ID NO: 51929 - DNA, 33 bp, Homo sapien
aatatttagctgcaaccactaagtgctccaggc

SEQ ID NO: 51930 - DNA, 33 bp, Homo sapien
aatatttagctgcaactactaagtgctccaggc

SEQ ID NO: 51931 - DNA, 33 bp, Homo sapien
tatctagtgcaactggaaaggcttcaaatgacc

SEQ ID NO: 51932 - DNA, 33 bp, Homo sapien
tatctagtgcaactgggaaggcttcaaatgacc

SEQ ID NO: 51933 - DNA, 33 bp, Homo sapien
tagatattgcctgggaaatgagtaggaggcata

SEQ ID NO: 51934 - DNA, 33 bp, Homo sapien
tagatattgcctgggagatgagtaggaggcata

SEQ ID NO: 51935 - DNA, 33 bp, Homo sapien
ttagcacttacgttcaccaaaaaatgggggtag

SEQ ID NO: 51936 - DNA, 33 bp, Homo sapien
ttagcacttacgttcatcaaaaaatgggggtag

SEQ ID NO: 51937 - DNA, 33 bp, Homo sapien
tgtgaatttgcctagcaagggaaagggtttgca

SEQ ID NO: 51938 - DNA, 33 bp, Homo sapien
tgtgaatttgcctagccagggaaagggtttgca

SEQ ID NO: 51939 - DNA, 33 bp, Homo sapien
agacctcctagcttccagaaaagtaagaaataa

SEQ ID NO: 51940 - DNA, 33 bp, Homo sapien
agacctcctagcttccggaaaagtaagaaataa

SEQ ID NO: 51941 - DNA, 33 bp, Homo sapien
ccttcaggctataagaccagctctaaaaagccc

SEQ ID NO: 51942 - DNA, 33 bp, Homo sapien
ccttcaggctataagatcagctctaaaaagccc

SEQ ID NO: 51943 - DNA, 33 bp, Homo sapien
taaggaaagatacgtgaatgcaaatctgaccct

SEQ ID NO: 51944 - DNA, 33 bp, Homo sapien
taaggaaagatacgtggatgcaaatctgaccct

SEQ ID NO: 51945 - DNA, 33 bp, Homo sapien
caacccaccatatcaactggggttttacttttg

SEQ ID NO: 51946 - DNA, 33 bp, Homo sapien
caacccaccatatcaattggggttttacttttg

SEQ ID NO: 51947 - DNA, 33 bp, Homo sapien
tgcatcactgcttccagggggaatagtagtagt

SEQ ID NO: 51948 - DNA, 33 bp, Homo sapien
tgcatcactgcttccatggggaatagtagtagt

SEQ ID NO: 51949 - DNA, 33 bp, Homo sapien
aaatgggtgaattatacggtatatgaattatta

SEQ ID NO: 51950 - DNA, 33 bp, Homo sapien
aaatgggtgaattatatggtatatgaattatta

SEQ ID NO: 51951 - DNA, 33 bp, Homo sapien
atatgatgtatgtatcacccaaacaacgaataa

SEQ ID NO: 51952 - DNA, 33 bp, Homo sapien
atatgatgtatgtatcccccaaacaacgaataa

SEQ ID NO: 51953 - DNA, 33 bp, Homo sapien
atggtatggatggagaactctcctcagccctgt

SEQ ID NO: 51954 - DNA, 33 bp, Homo sapien
atggtatggatggagacctctcctcagccctgt

SEQ ID NO: 51955 - DNA, 33 bp, Homo sapien
tcccgactttcaatgcacatatgaatcaccagt

SEQ ID NO: 51956 - DNA, 33 bp, Homo sapien
tcccgactttcaatgcgcatatgaatcaccagt

SEQ ID NO: 51957 - DNA, 33 bp, Homo sapien
atagtagaagaggagacaactgtgacagaagaa

SEQ ID NO: 51958 - DNA, 33 bp, Homo sapien
atagtagaagaggagagaactgtgacagaagaa

SEQ ID NO: 51959 - DNA, 33 bp, Homo sapien
gatgagttaaaagcagactatttatagtgagta

SEQ ID NO: 51960 - DNA, 33 bp, Homo sapien
gatgagttaaaagcaggctatttatagtgagta

SEQ ID NO: 51961 - DNA, 33 bp, Homo sapien
cctctcatgctctaaaaaaaagaatcagagtca

SEQ ID NO: 51962 - DNA, 33 bp, Homo sapien
cctctcatgctctaaagaaaagaatcagagtca

SEQ ID NO: 51963 - DNA, 33 bp, Homo sapien
acacaatgctggattgcatgacactgtcatccc

SEQ ID NO: 51964 - DNA, 33 bp, Homo sapien
acacaatgctggattgtatgacactgtcatccc

SEQ ID NO: 51965 - DNA, 33 bp, Homo sapien
gcccaagtggctaacaaattaataggtatctgg

SEQ ID NO: 51966 - DNA, 33 bp, Homo sapien
gcccaagtggctaacagattaataggtatctgg

SEQ ID NO: 51967 - DNA, 33 bp, Homo sapien
tagatttggtggctctcaatatttcattaaatg

SEQ ID NO: 51968 - DNA, 33 bp, Homo sapien
tagatttggtggctctgaatatttcattaaatg

SEQ ID NO: 51969 - DNA, 33 bp, Homo sapien
gagctcagcgttctgaaataattacgattagtt

SEQ ID NO: 51970 - DNA, 33 bp, Homo sapien
gagctcagcgttctgagataattacgattagtt

SEQ ID NO: 51971 - DNA, 33 bp, Homo sapien
tacaaagaaagtcaagaaaggaaatatgatcaa

SEQ ID NO: 51972 - DNA, 33 bp, Homo sapien
tacaaagaaagtcaagtaaggaaatatgatcaa

SEQ ID NO: 51973 - DNA, 33 bp, Homo sapien
agaacgtttggagtcacgtacaccacaatggta

SEQ ID NO: 51974 - DNA, 33 bp, Homo sapien
agaacgtttggagtcatgtacaccacaatggta

SEQ ID NO: 51975 - DNA, 33 bp, Homo sapien
catatatcaggtgctcgctgatcattcaatgaa

SEQ ID NO: 51976 - DNA, 33 bp, Homo sapien
catatatcaggtgctctctgatcattcaatgaa

SEQ ID NO: 51977 - DNA, 33 bp, Homo sapien
ttgattgaggagaaagcctgtttctgatttctg

SEQ ID NO: 51978 - DNA, 33 bp, Homo sapien
ttgattgaggagaaaggctgtttctgatttctg

SEQ ID NO: 51979 - DNA, 33 bp, Homo sapien
cggggtagagccaagacgaattggaaagaggaa

SEQ ID NO: 51980 - DNA, 33 bp, Homo sapien
cggggtagagccaagatgaattggaaagaggaa

SEQ ID NO: 51981 - DNA, 33 bp, Homo sapien
gcaacaaaagcgaaagcatagatccaaaagctg

SEQ ID NO: 51982 - DNA, 33 bp, Homo sapien
gcaacaaaagcgaaagtatagatccaaaagctg

SEQ ID NO: 51983 - DNA, 33 bp, Homo sapien
cttcagaccagatcaaactactgtttttaatgt

SEQ ID NO: 51984 - DNA, 33 bp, Homo sapien
cttcagaccagatcaacctactgtttttaatgt

SEQ ID NO: 51985 - DNA, 33 bp, Homo sapien
aaatagagatgatgaaaattgcttttccagtgt

SEQ ID NO: 51986 - DNA, 33 bp, Homo sapien
aaatagagatgatgaatattgcttttccagtgt

SEQ ID NO: 51987 - DNA, 33 bp, Homo sapien
tagagtccaatctcccgagtggagactccggca

SEQ ID NO: 51988 - DNA, 33 bp, Homo sapien
tagagtccaatctccctagtggagactccggca

SEQ ID NO: 51989 - DNA, 33 bp, Homo sapien
agcagagtcagctagcacgattgtatgagacag

SEQ ID NO: 51990 - DNA, 33 bp, Homo sapien
agcagagtcagctagcgcgattgtatgagacag

SEQ ID NO: 51991 - DNA, 33 bp, Homo sapien
gaaattaataaagtcaaatggatttgtggctag

SEQ ID NO: 51992 - DNA, 33 bp, Homo sapien
gaaattaataaagtcagatggatttgtggctag

SEQ ID NO: 51993 - DNA, 33 bp, Homo sapien
cagtgttgccagaagaagatgggaaagggggtg

SEQ ID NO: 51994 - DNA, 33 bp, Homo sapien
cagtgttgccagaagatgatgggaaagggggtg

SEQ ID NO: 51995 - DNA, 33 bp, Homo sapien
cccatccaaatcaatacccaagaaaagacccac

SEQ ID NO: 51996 - DNA, 33 bp, Homo sapien
cccatccaaatcaatatccaagaaaagacccac

SEQ ID NO: 51997 - DNA, 33 bp, Homo sapien
ccaagaaaagacccacactgagaactgacctca

SEQ ID NO: 51998 - DNA, 33 bp, Homo sapien
ccaagaaaagacccacgctgagaactgacctca

SEQ ID NO: 51999 - DNA, 33 bp, Homo sapien
agtagatctttttcaccgcatattttccaagac

SEQ ID NO: 52000 - DNA, 33 bp, Homo sapien
agtagatctttttcactgcatattttccaagac

SEQ ID NO: 52001 - DNA, 33 bp, Homo sapien
gcaatatgagagtgcacatatattccttgaaaa

SEQ ID NO: 52002 - DNA, 33 bp, Homo sapien
gcaatatgagagtgcatatatattccttgaaaa

SEQ ID NO: 52003 - DNA, 33 bp, Homo sapien
aacagggcaggacaaacgaggccagcatgtgcc

SEQ ID NO: 52004 - DNA, 33 bp, Homo sapien
aacagggcaggacaaatgaggccagcatgtgcc

SEQ ID NO: 52005 - DNA, 33 bp, Homo sapien
aagaatttgtaacaacaacgacagctagcatta

SEQ ID NO: 52006 - DNA, 33 bp, Homo sapien
aagaatttgtaacaacgacgacagctagcatta

SEQ ID NO: 52007 - DNA, 33 bp, Homo sapien
aatccaatgcatccaactaaaacatagttaaga

SEQ ID NO: 52008 - DNA, 33 bp, Homo sapien
aatccaatgcatccaattaaaacatagttaaga

SEQ ID NO: 52009 - DNA, 33 bp, Homo sapien
tggcctatctaccctacgtgacctggcctcagt

SEQ ID NO: 52010 - DNA, 33 bp, Homo sapien
tggcctatctaccctatgtgacctggcctcagt

SEQ ID NO: 52011 - DNA, 33 bp, Homo sapien
agttctgtaacctaaaacacctgtaaagcacag

SEQ ID NO: 52012 - DNA, 33 bp, Homo sapien
agttctgtaacctaaaccacctgtaaagcacag

SEQ ID NO: 52013 - DNA, 33 bp, Homo sapien
actacaggtgcccagaagagatgattccctaga

SEQ ID NO: 52014 - DNA, 33 bp, Homo sapien
actacaggtgcccagaggagatgattccctaga

SEQ ID NO: 52015 - DNA, 33 bp, Homo sapien
ttacagatactatgagcataagaattttttgtc

SEQ ID NO: 52016 - DNA, 33 bp, Homo sapien
ttacagatactatgaggataagaattttttgtc

SEQ ID NO: 52017 - DNA, 33 bp, Homo sapien
atcccacttacgcaaaacaagctcacactggct

SEQ ID NO: 52018 - DNA, 33 bp, Homo sapien
atcccacttacgcaaagcaagctcacactggct

SEQ ID NO: 52019 - DNA, 33 bp, Homo sapien
ctcagcctcagcatggaagagtatatggagtta

SEQ ID NO: 52020 - DNA, 33 bp, Homo sapien
ctcagcctcagcatggcagagtatatggagtta

SEQ ID NO: 52021 - DNA, 33 bp, Homo sapien
gctactgtttatcactaagcactaaacagaata

SEQ ID NO: 52022 - DNA, 33 bp, Homo sapien
gctactgtttatcactgagcactaaacagaata

SEQ ID NO: 52023 - DNA, 33 bp, Homo sapien
gatcaaattatactcacgttcaagactcagatc

SEQ ID NO: 52024 - DNA, 33 bp, Homo sapien
gatcaaattatactcatgttcaagactcagatc

SEQ ID NO: 52025 - DNA, 33 bp, Homo sapien
gcatgtgactctaatcaccacttgccctccagt

SEQ ID NO: 52026 - DNA, 33 bp, Homo sapien
gcatgtgactctaatcgccacttgccctccagt

SEQ ID NO: 52027 - DNA, 33 bp, Homo sapien
caatcagggagctcacaaaagtggtaaatgttt

SEQ ID NO: 52028 - DNA, 33 bp, Homo sapien
caatcagggagctcacgaaagtggtaaatgttt

SEQ ID NO: 52029 - DNA, 33 bp, Homo sapien
gacttgaaagaggagaacattgaagctacaata

SEQ ID NO: 52030 - DNA, 33 bp, Homo sapien
gacttgaaagaggagagcattgaagctacaata

SEQ ID NO: 52031 - DNA, 33 bp, Homo sapien
cttgagggtacacttacggtgactagagttaag

SEQ ID NO: 52032 - DNA, 33 bp, Homo sapien
cttgagggtacacttatggtgactagagttaag

SEQ ID NO: 52033 - DNA, 33 bp, Homo sapien
cctcccaaccatcctacgaggattttacagatg

SEQ ID NO: 52034 - DNA, 33 bp, Homo sapien
cctcccaaccatcctatgaggattttacagatg

SEQ ID NO: 52035 - DNA, 33 bp, Homo sapien
aaaatgggttggtagaatcaggtggctcactgc

SEQ ID NO: 52036 - DNA, 33 bp, Homo sapien
aaaatgggttggtagactcaggtggctcactgc

SEQ ID NO: 52037 - DNA, 33 bp, Homo sapien
attctggatgtctgaaaagataataatattatc

SEQ ID NO: 52038 - DNA, 33 bp, Homo sapien
attctggatgtctgaagagataataatattatc

SEQ ID NO: 52039 - DNA, 33 bp, Homo sapien
aaatcccaaatgcttacgtttggtcatccactg

SEQ ID NO: 52040 - DNA, 33 bp, Homo sapien
aaatcccaaatgcttatgtttggtcatccactg

SEQ ID NO: 52041 - DNA, 33 bp, Homo sapien
gcctcagtcatttgctattctcattgcacatcc

SEQ ID NO: 52042 - DNA, 33 bp, Homo sapien
gcctcagtcatttgctgttctcattgcacatcc

SEQ ID NO: 52043 - DNA, 33 bp, Homo sapien
tcatatgcaaaatgaacgggactgggccaggtg

SEQ ID NO: 52044 - DNA, 33 bp, Homo sapien
tcatatgcaaaatgaaggggactgggccaggtg

SEQ ID NO: 52045 - DNA, 33 bp, Homo sapien
ctgtgcctggtcactccgaatctggaagagaca

SEQ ID NO: 52046 - DNA, 33 bp, Homo sapien
ctgtgcctggtcactctgaatctggaagagaca

SEQ ID NO: 52047 - DNA, 33 bp, Homo sapien
ccattctcttctggtacctttacatgatctacc

SEQ ID NO: 52048 - DNA, 33 bp, Homo sapien
ccattctcttctggtatctttacatgatctacc

SEQ ID NO: 52049 - DNA, 33 bp, Homo sapien
cagttttttctcagagaagatttcatcaggcat

SEQ ID NO: 52050 - DNA, 33 bp, Homo sapien
cagttttttctcagaggagatttcatcaggcat

SEQ ID NO: 52051 - DNA, 33 bp, Homo sapien
aaagtaactatccccccacaattgcattgcata

SEQ ID NO: 52052 - DNA, 33 bp, Homo sapien
aaagtaactatcccccgacaattgcattgcata

SEQ ID NO: 52053 - DNA, 33 bp, Homo sapien
ggaaagtcctctgcaacgttcaattgaaggcaa

SEQ ID NO: 52054 - DNA, 33 bp, Homo sapien
ggaaagtcctctgcaaggttcaattgaaggcaa

SEQ ID NO: 52055 - DNA, 33 bp, Homo sapien
cattctgtagcataataagcattacttttgaag

SEQ ID NO: 52056 - DNA, 33 bp, Homo sapien
cattctgtagcataatgagcattacttttgaag

SEQ ID NO: 52057 - DNA, 33 bp, Homo sapien
gtctgcataggtgcagaagcaatgcctgaaaag

SEQ ID NO: 52058 - DNA, 33 bp, Homo sapien
gtctgcataggtgcaggagcaatgcctgaaaag

SEQ ID NO: 52059 - DNA, 33 bp, Homo sapien
ttctcttatcttgccacctacctaccctagcct

SEQ ID NO: 52060 - DNA, 33 bp, Homo sapien
ttctcttatcttgccatctacctaccctagcct

SEQ ID NO: 52061 - DNA, 33 bp, Homo sapien
ctgagctgcatgcctaccccaaattctgtttta

SEQ ID NO: 52062 - DNA, 33 bp, Homo sapien
ctgagctgcatgcctatcccaaattctgtttta

SEQ ID NO: 52063 - DNA, 33 bp, Homo sapien
agctccactagaaagaaggggagcgcttctccc

SEQ ID NO: 52064 - DNA, 33 bp, Homo sapien
agctccactagaaagagggggagcgcttctccc

SEQ ID NO: 52065 - DNA, 33 bp, Homo sapien
aatctcatgctcagagacccatttgagaaaacg

SEQ ID NO: 52066 - DNA, 33 bp, Homo sapien
aatctcatgctcagaggcccatttgagaaaacg

SEQ ID NO: 52067 - DNA, 33 bp, Homo sapien
tgattgtggtgatgtaggtatagtcatgccaca

SEQ ID NO: 52068 - DNA, 33 bp, Homo sapien
tgattgtggtgatgtatgtatagtcatgccaca

SEQ ID NO: 52069 - DNA, 33 bp, Homo sapien
catttgtacgtaggcaatcagatctttgtttct

SEQ ID NO: 52070 - DNA, 33 bp, Homo sapien
catttgtacgtaggcagtcagatctttgtttct

SEQ ID NO: 52071 - DNA, 33 bp, Homo sapien
acactatatttcctataaaggtagtttatggcc

SEQ ID NO: 52072 - DNA, 33 bp, Homo sapien
acactatatttcctattaaggtagtttatggcc

SEQ ID NO: 52073 - DNA, 33 bp, Homo sapien
attaatttaaataaaaaagcagttcttcagttg

SEQ ID NO: 52074 - DNA, 33 bp, Homo sapien
attaatttaaataaaagagcagttcttcagttg

SEQ ID NO: 52075 - DNA, 33 bp, Homo sapien
ggaaggggacacgagcaaaagaatgcaaggaat

SEQ ID NO: 52076 - DNA, 33 bp, Homo sapien
ggaaggggacacgagcgaaagaatgcaaggaat

SEQ ID NO: 52077 - DNA, 33 bp, Homo sapien
tgagtcctctctcccaactggaaatatgaatca

SEQ ID NO: 52078 - DNA, 33 bp, Homo sapien
tgagtcctctctcccagctggaaatatgaatca

SEQ ID NO: 52079 - DNA, 33 bp, Homo sapien
ttttgtaaaattctgacgtttagaaccatgttt

SEQ ID NO: 52080 - DNA, 33 bp, Homo sapien
ttttgtaaaattctgatgtttagaaccatgttt

SEQ ID NO: 52081 - DNA, 33 bp, Homo sapien
attgagcacattaagcgctctaagacccaagat

SEQ ID NO: 52082 - DNA, 33 bp, Homo sapien
attgagcacattaagctctctaagacccaagat

SEQ ID NO: 52083 - DNA, 33 bp, Homo sapien; identical to SEQ ID NO: 52081

SEQ ID NO: 52084 - DNA, 33 bp, Homo sapien; identical to SEQ ID NO: 52082

SEQ ID NO: 52085 - DNA, 33 bp, Homo sapien
tgattgtgtacaacctaaactataagctccttg

SEQ ID NO: 52086 - DNA, 33 bp, Homo sapien
tgattgtgtacaaccttaactataagctccttg

SEQ ID NO: 52087 - DNA, 33 bp, Homo sapien
gaaaacaggagtaaagcaggatgcaggtctgtg

SEQ ID NO: 52088 - DNA, 33 bp, Homo sapien
gaaaacaggagtaaaggaggatgcaggtctgtg

SEQ ID NO: 52089 - DNA, 33 bp, Homo sapien
gaaaaaccagttttcacaagaatcggtttgtca

SEQ ID NO: 52090 - DNA, 33 bp, Homo sapien
gaaaaaccagttttcataagaatcggtttgtca

SEQ ID NO: 52091 - DNA, 33 bp, Homo sapien
actgccaggaaatgtcaatgtccaagcgggcct

SEQ ID NO: 52092 - DNA, 33 bp, Homo sapien
actgccaggaaatgtcgatgtccaagcgggcct

SEQ ID NO: 52093 - DNA, 33 bp, Homo sapien
ccctgctgaggggttcaaagtgaaagggagaag

SEQ ID NO: 52094 - DNA, 33 bp, Homo sapien
ccctgctgaggggttcgaagtgaaagggagaag

SEQ ID NO: 52095 - DNA, 33 bp, Homo sapien
cattgtaaaagcatgaggtgtgacagtatacac

SEQ ID NO: 52096 - DNA, 33 bp, Homo sapien
cattgtaaaagcatgatgtgtgacagtatacac

SEQ ID NO: 52097 - DNA, 33 bp, Homo sapien
aaaactttttaatccaatgcttaatgtgtgcta

SEQ ID NO: 52098 - DNA, 33 bp, Homo sapien
aaaactttttaatccagtgcttaatgtgtgcta

SEQ ID NO: 52099 - DNA, 33 bp, Homo sapien
tactactggattggtcaactataaggatgtcat

SEQ ID NO: 52100 - DNA, 33 bp, Homo sapien
tactactggattggtcgactataaggatgtcat

SEQ ID NO: 52101 - DNA, 33 bp, Homo sapien
acaacccttttgagcacacgctgctgtttctct

SEQ ID NO: 52102 - DNA, 33 bp, Homo sapien
acaacccttttgagcagacgctgctgtttctct

SEQ ID NO: 52103 - DNA, 33 bp, Homo sapien
ctcaagcttctcaataaacttccatgtaaaaac

SEQ ID NO: 52104 - DNA, 33 bp, Homo sapien
ctcaagcttctcaatatacttccatgtaaaaac

SEQ ID NO: 52105 - DNA, 33 bp, Homo sapien
tacaattagaataccaccacttttaatatctca

SEQ ID NO: 52106 - DNA, 33 bp, Homo sapien
tacaattagaataccatcacttttaatatctca

SEQ ID NO: 52107 - DNA, 33 bp, Homo sapien
tagagtgtatcagaataactagagccttgttag

SEQ ID NO: 52108 - DNA, 33 bp, Homo sapien
tagagtgtatcagaatcactagagccttgttag

SEQ ID NO: 52109 - DNA, 33 bp, Homo sapien
agttatttggatgacactctaggtccacagcat

SEQ ID NO: 52110 - DNA, 33 bp, Homo sapien
agttatttggatgacagtctaggtccacagcat

SEQ ID NO: 52111 - DNA, 33 bp, Homo sapien
ttctccttattacaaaatagtcaacgtgggtgg

SEQ ID NO: 52112 - DNA, 33 bp, Homo sapien
ttctccttattacaaagtagtcaacgtgggtgg

SEQ ID NO: 52113 - DNA, 33 bp, Homo sapien
gaattcaaccagtgtaaagcctaatagtccagg

SEQ ID NO: 52114 - DNA, 33 bp, Homo sapien
gaattcaaccagtgtagagcctaatagtccagg

SEQ ID NO: 52115 - DNA, 33 bp, Homo sapien
attctgtatttgcaatcaagacatttgttcaaa

SEQ ID NO: 52116 - DNA, 33 bp, Homo sapien
attctgtatttgcaattaagacatttgttcaaa

SEQ ID NO: 52117 - DNA, 33 bp, Homo sapien
tttatttatgtgatcaatcgacttatttgattg

SEQ ID NO: 52118 - DNA, 33 bp, Homo sapien
tttatttatgtgatcagtcgacttatttgattg

SEQ ID NO: 52119 - DNA, 33 bp, Homo sapien
gcaaggccatcagcatcatgaaggctaccatgg

SEQ ID NO: 52120 - DNA, 33 bp, Homo sapien
gcaaggccatcagcattatgaaggctaccatgg

SEQ ID NO: 52121 - DNA, 33 bp, Homo sapien
ttttatccaggaggaaaagtgtagaaactctca

SEQ ID NO: 52122 - DNA, 33 bp, Homo sapien
ttttatccaggaggaagagtgtagaaactctca

SEQ ID NO: 52123 - DNA, 33 bp, Homo sapien
gggaatagataatcaaatgctttaatgataaag

SEQ ID NO: 52124 - DNA, 33 bp, Homo sapien
gggaatagataatcaagtgctttaatgataaag

SEQ ID NO: 52125 - DNA, 33 bp, Homo sapien
gctaagggaacgaaccacgtgattacggtgtta

SEQ ID NO: 52126 - DNA, 33 bp, Homo sapien
gctaagggaacgaaccgcgtgattacggtgtta

SEQ ID NO: 52127 - DNA, 33 bp, Homo sapien
gaatacacctatatcaaaaagtgttcgtgctta

SEQ ID NO: 52128 - DNA, 33 bp, Homo sapien
gaatacacctatatcagaaagtgttcgtgctta

SEQ ID NO: 52129 - DNA, 33 bp, Homo sapien
ttctgtattgctagagaaccctgctagaggtta

SEQ ID NO: 52130 - DNA, 33 bp, Homo sapien
ttctgtattgctagagcaccctgctagaggtta

SEQ ID NO: 52131 - DNA, 33 bp, Homo sapien
tccatgagtctactaccaatattctgtattgct

SEQ ID NO: 52132 - DNA, 33 bp, Homo sapien
tccatgagtctactactaatattctgtattgct

SEQ ID NO: 52133 - DNA, 33 bp, Homo sapien
ctgatccgctttcccaaaccagttatttgttgt

SEQ ID NO: 52134 - DNA, 33 bp, Homo sapien
ctgatccgctttcccagaccagttatttgttgt

SEQ ID NO: 52135 - DNA, 33 bp, Homo sapien
tttcaaaaaaaatcaacagcttgcattactaac

SEQ ID NO: 52136 - DNA, 33 bp, Homo sapien
tttcaaaaaaaatcaatagcttgcattactaac

SEQ ID NO: 52137 - DNA, 33 bp, Homo sapien
ttattactgatacgaaaaaagtttggtctggat

SEQ ID NO: 52138 - DNA, 33 bp, Homo sapien
ttattactgatacgaagaaagtttggtctggat

SEQ ID NO: 52139 - DNA, 33 bp, Homo sapien; identical to SEQ ID NO: 52137

SEQ ID NO: 52140 - DNA, 33 bp, Homo sapien; identical to SEQ ID NO: 52138

SEQ ID NO: 52141 - DNA, 33 bp, Homo sapien
cattcacatattaaaactgtcatccagcaaatg

SEQ ID NO: 52142 - DNA, 33 bp, Homo sapien
cattcacatattaaaattgtcatccagcaaatg

SEQ ID NO: 52143 - DNA, 33 bp, Homo sapien
ggctgtggcaggaacactaactcttaaggaaat

SEQ ID NO: 52144 - DNA, 33 bp, Homo sapien
ggctgtggcaggaacagtaactcttaaggaaat

SEQ ID NO: 52145 - DNA, 33 bp, Homo sapien
gaaagaagctaatctgaaaaggtcacataatgt

SEQ ID NO: 52146 - DNA, 33 bp, Homo sapien
gaaagaagctaatctggaaaggtcacataatgt

SEQ ID NO: 52147 - DNA, 33 bp, Homo sapien
tgatagtgacagggaaagctactgccaagagta

SEQ ID NO: 52148 - DNA, 33 bp, Homo sapien
tgatagtgacagggaaggctactgccaagagta

SEQ ID NO: 52149 - DNA, 33 bp, Homo sapien
ctaaaacaacttaggaatatcccaaacaagagt

SEQ ID NO: 52150 - DNA, 33 bp, Homo sapien
ctaaaacaacttaggagtatcccaaacaagagt

SEQ ID NO: 52151 - DNA, 33 bp, Homo sapien
ctcaagctgaaatcacgatcccatccttcagag

SEQ ID NO: 52152 - DNA, 33 bp, Homo sapien
ctcaagctgaaatcactatcccatccttcagag

SEQ ID NO: 52153 - DNA, 33 bp, Homo sapien
aatagggagctacagacgggtctattgttgtag

SEQ ID NO: 52154 - DNA, 33 bp, Homo sapien
aatagggagctacagatgggtctattgttgtag

SEQ ID NO: 52155 - DNA, 33 bp, Homo sapien
ccagcaccattgtaggaattgctcctatttcac

SEQ ID NO: 52156 - DNA, 33 bp, Homo sapien
ccagcaccattgtaggtattgctcctatttcac

SEQ ID NO: 52157 - DNA, 33 bp, Homo sapien
tcactttcctgatggactcatgggacttttctg

SEQ ID NO: 52158 - DNA, 33 bp, Homo sapien
tcactttcctgatggattcatgggacttttctg

SEQ ID NO: 52159 - DNA, 33 bp, Homo sapien
cctgtaccctgtcctccgaaaaggcctgtcctg

SEQ ID NO: 52160 - DNA, 33 bp, Homo sapien
cctgtaccctgtcctctgaaaaggcctgtcctg

SEQ ID NO: 52161 - DNA, 33 bp, Homo sapien
ctataaaacagggacaataatggtaccttcctc

SEQ ID NO: 52162 - DNA, 33 bp, Homo sapien
ctataaaacagggacagtaatggtaccttcctc

SEQ ID NO: 52163 - DNA, 33 bp, Homo sapien
agcatcattagtgcccagctttctggaaatgtg

SEQ ID NO: 52164 - DNA, 33 bp, Homo sapien
agcatcattagtgcccggctttctggaaatgtg

SEQ ID NO: 52165 - DNA, 33 bp, Homo sapien
ggaatctctgaagacactgaagatttagagtaa

SEQ ID NO: 52166 - DNA, 33 bp, Homo sapien
ggaatctctgaagacattgaagatttagagtaa

SEQ ID NO: 52167 - DNA, 33 bp, Homo sapien
gttgctgtaaaagctactaacatccttaaagaa

SEQ ID NO: 52168 - DNA, 33 bp, Homo sapien
gttgctgtaaaagctagtaacatccttaaagaa

SEQ ID NO: 52169 - DNA, 33 bp, Homo sapien
aacctactcttgtaacccaatagtctccagggc

SEQ ID NO: 52170 - DNA, 33 bp, Homo sapien
aacctactcttgtaactcaatagtctccagggc

SEQ ID NO: 52171 - DNA, 33 bp, Homo sapien
gctctaaggagtaagacagacaatgcctaccac

SEQ ID NO: 52172 - DNA, 33 bp, Homo sapien
gctctaaggagtaagatagacaatgcctaccac

SEQ ID NO: 52173 - DNA, 33 bp, Homo sapien
gggaatggggttggaaaaccttgattgcctcct

SEQ ID NO: 52174 - DNA, 33 bp, Homo sapien
gggaatggggttggaacaccttgattgcctcct

SEQ ID NO: 52175 - DNA, 33 bp, Homo sapien
ccactgaggagaacaaatcttctgcattttctt

SEQ ID NO: 52176 - DNA, 33 bp, Homo sapien
ccactgaggagaacaagtcttctgcattttctt

SEQ ID NO: 52177 - DNA, 33 bp, Homo sapien
tactggaacaccctgaatagaggcggacactag

SEQ ID NO: 52178 - DNA, 33 bp, Homo sapien
tactggaacaccctgagtagaggcggacactag

SEQ ID NO: 52179 - DNA, 33 bp, Homo sapien
accccatctcccatcactatatcctctgaagcc

SEQ ID NO: 52180 - DNA, 33 bp, Homo sapien
accccatctcccatcagtatatcctctgaagcc

SEQ ID NO: 52181 - DNA, 33 bp, Homo sapien
atcatctaccccgagacgccaccctgacagctt

SEQ ID NO: 52182 - DNA, 33 bp, Homo sapien
atcatctaccccgagatgccaccctgacagctt

SEQ ID NO: 52183 - DNA, 33 bp, Homo sapien
catttgtagattgctcacttctgtcagtcctct

SEQ ID NO: 52184 - DNA, 33 bp, Homo sapien
catttgtagattgctcgcttctgtcagtcctct

SEQ ID NO: 52185 - DNA, 33 bp, Homo sapien
gacacatgagatacagaaaacacagttgctgac

SEQ ID NO: 52186 - DNA, 33 bp, Homo sapien
gacacatgagatacaggaaacacagttgctgac

SEQ ID NO: 52187 - DNA, 33 bp, Homo sapien
ttattcctctgaaacactgattcggtaaacata

SEQ ID NO: 52188 - DNA, 33 bp, Homo sapien
ttattcctctgaaacattgattcggtaaacata

SEQ ID NO: 52189 - DNA, 33 bp, Homo sapien
agtcacttcacctctcaaaaccttggtttacaa

SEQ ID NO: 52190 - DNA, 33 bp, Homo sapien
agtcacttcacctctcgaaaccttggtttacaa

SEQ ID NO: 52191 - DNA, 33 bp, Homo sapien
acagctaacaagcaaagaaaaatagctgtctgt

SEQ ID NO: 52192 - DNA, 33 bp, Homo sapien
acagctaacaagcaaataaaaatagctgtctgt

SEQ ID NO: 52193 - DNA, 33 bp, Homo sapien
ttacatcgacccacacagtgaatctgggatcat

SEQ ID NO: 52194 - DNA, 33 bp, Homo sapien
ttacatcgacccacacggtgaatctgggatcat

SEQ ID NO: 52195 - DNA, 33 bp, Homo sapien
tggcctttacatagccaccttttgctgaggtca

SEQ ID NO: 52196 - DNA, 33 bp, Homo sapien
tggcctttacatagccgccttttgctgaggtca

SEQ ID NO: 52197 - DNA, 33 bp, Homo sapien
ccaggcagatacataaaaggcctcacatgctcc

SEQ ID NO: 52198 - DNA, 33 bp, Homo sapien
ccaggcagatacataagaggcctcacatgctcc

SEQ ID NO: 52199 - DNA, 33 bp, Homo sapien
cagggatgatggtttacgttggggagaagacgg

SEQ ID NO: 52200 - DNA, 33 bp, Homo sapien
cagggatgatggtttatgttggggagaagacgg

SEQ ID NO: 52201 - DNA, 33 bp, Homo sapien
taagacacctctcaacaataaatgaccaaaaat

SEQ ID NO: 52202 - DNA, 33 bp, Homo sapien
taagacacctctcaaccataaatgaccaaaaat

SEQ ID NO: 52203 - DNA, 33 bp, Homo sapien
tcggtgttactggcgaccttccagaaggctcac

SEQ ID NO: 52204 - DNA, 33 bp, Homo sapien
tcggtgttactggcgatcttccagaaggctcac

SEQ ID NO: 52205 - DNA, 33 bp, Homo sapien
ttctggaggttgatagcagtaataattgcacaa

SEQ ID NO: 52206 - DNA, 33 bp, Homo sapien
ttctggaggttgatagtagtaataattgcacaa

SEQ ID NO: 52207 - DNA, 33 bp, Homo sapien
ggattagtgttagtatcacatgagtgggttggt

SEQ ID NO: 52208 - DNA, 33 bp, Homo sapien
ggattagtgttagtattacatgagtgggttggt

SEQ ID NO: 52209 - DNA, 33 bp, Homo sapien
cctatttggagtgtaccgctttggctctgaatt

SEQ ID NO: 52210 - DNA, 33 bp, Homo sapien
cctatttggagtgtactgctttggctctgaatt

SEQ ID NO: 52211 - DNA, 33 bp, Homo sapien
catacttacctaaagaaaaaggctggtgagggg

SEQ ID NO: 52212 - DNA, 33 bp, Homo sapien
catacttacctaaagagaaaggctggtgagggg

SEQ ID NO: 52213 - DNA, 33 bp, Homo sapien
ggtggtggcagcaataacataagcagcagcagt

SEQ ID NO: 52214 - DNA, 33 bp, Homo sapien
ggtggtggcagcaatagcataagcagcagcagt

SEQ ID NO: 52215 - DNA, 33 bp, Homo sapien
aagagttcacaaaggaaaattcagtgcaccgag

SEQ ID NO: 52216 - DNA, 33 bp, Homo sapien
aagagttcacaaaggagaattcagtgcaccgag

SEQ ID NO: 52217 - DNA, 33 bp, Homo sapien
gggttctcaatagccacagagagcaatgacagc

SEQ ID NO: 52218 - DNA, 33 bp, Homo sapien
gggttctcaatagccagagagagcaatgacagc

SEQ ID NO: 52219 - DNA, 33 bp, Homo sapien
tgaggcaccgtagttaactttcctgagacataa

SEQ ID NO: 52220 - DNA, 33 bp, Homo sapien
tgaggcaccgtagttatctttcctgagacataa

SEQ ID NO: 52221 - DNA, 33 bp, Homo sapien
aacatctgactaacagaaatcctacaaaaagaa

SEQ ID NO: 52222 - DNA, 33 bp, Homo sapien
aacatctgactaacaggaatcctacaaaaagaa

SEQ ID NO: 52223 - DNA, 33 bp, Homo sapien
ctgatgggcccagagaatctaacattatcccat

SEQ ID NO: 52224 - DNA, 33 bp, Homo sapien
ctgatgggcccagagagtctaacattatcccat

SEQ ID NO: 52225 - DNA, 33 bp, Homo sapien
agaatagatagaaccaaaattttttactcacat

SEQ ID NO: 52226 - DNA, 33 bp, Homo sapien
agaatagatagaaccataattttttactcacat

SEQ ID NO: 52227 - DNA, 33 bp, Homo sapien
tagtatggagataagaatacaacttttgtagag

SEQ ID NO: 52228 - DNA, 33 bp, Homo sapien
tagtatggagataagagtacaacttttgtagag

SEQ ID NO: 52229 - DNA, 33 bp, Homo sapien
attcttcatcactccccaactcccaattagaat

SEQ ID NO: 52230 - DNA, 33 bp, Homo sapien
attcttcatcactccctaactcccaattagaat

SEQ ID NO: 52231 - DNA, 33 bp, Homo sapien
ctctttctaaataccactgaagccccagggagt

SEQ ID NO: 52232 - DNA, 33 bp, Homo sapien
ctctttctaaataccattgaagccccagggagt

SEQ ID NO: 52233 - DNA, 33 bp, Homo sapien
gagggtataatgtaggcaagtgtgcttgcttgt

SEQ ID NO: 52234 - DNA, 33 bp, Homo sapien
gagggtataatgtaggtaagtgtgcttgcttgt

SEQ ID NO: 52235 - DNA, 33 bp, Homo sapien
tctgaaaatgggaataatactactcatcagtat

SEQ ID NO: 52236 - DNA, 33 bp, Homo sapien
tctgaaaatgggaatactactactcatcagtat

SEQ ID NO: 52237 - DNA, 33 bp, Homo sapien
aaggttttatgacacactaatacttctgcattt

SEQ ID NO: 52238 - DNA, 33 bp, Homo sapien
aaggttttatgacacattaatacttctgcattt

SEQ ID NO: 52239 - DNA, 33 bp, Homo sapien
tgtggctatctcaggagggaaggaaaataccct

SEQ ID NO: 52240 - DNA, 33 bp, Homo sapien
tgtggctatctcaggatggaaggaaaataccct

SEQ ID NO: 52241 - DNA, 33 bp, Homo sapien
cactttcttgctcaaaatgtttccatgcctcct

SEQ ID NO: 52242 - DNA, 33 bp, Homo sapien
cactttcttgctcaaagtgtttccatgcctcct

SEQ ID NO: 52243 - DNA, 33 bp, Homo sapien
ccattggcaagtccatcagctgtgagctttggg

SEQ ID NO: 52244 - DNA, 33 bp, Homo sapien
ccattggcaagtccattagctgtgagctttggg

SEQ ID NO: 52245 - DNA, 33 bp, Homo sapien
tccaggttgtaaagaaatgaaagaaaatggtcc

SEQ ID NO: 52246 - DNA, 33 bp, Homo sapien
tccaggttgtaaagaactgaaagaaaatggtcc

SEQ ID NO: 52247 - DNA, 33 bp, Homo sapien
acccagcgagtctacccggctccaggttggtac

SEQ ID NO: 52248 - DNA, 33 bp, Homo sapien
acccagcgagtctacctggctccaggttggtac

SEQ ID NO: 52249 - DNA, 33 bp, Homo sapien
atcacaagaaatgaaaacggctgggcttcatag

SEQ ID NO: 52250 - DNA, 33 bp, Homo sapien
atcacaagaaatgaaatcggctgggcttcatag

SEQ ID NO: 52251 - DNA, 33 bp, Homo sapien
tgactatggcaaattacataacctctctgcacc

SEQ ID NO: 52252 - DNA, 33 bp, Homo sapien
tgactatggcaaattatataacctctctgcacc

SEQ ID NO: 52253 - DNA, 33 bp, Homo sapien
ctttggctgaacagtgaaaggataattggtgtc

SEQ ID NO: 52254 - DNA, 33 bp, Homo sapien
ctttggctgaacagtggaaggataattggtgtc

SEQ ID NO: 52255 - DNA, 33 bp, Homo sapien
cctgtgcagaacataggctaatgcccatttaga

SEQ ID NO: 52256 - DNA, 33 bp, Homo sapien
cctgtgcagaacatagtctaatgcccatttaga

SEQ ID NO: 52257 - DNA, 33 bp, Homo sapien
ctcaagatgtgacagaaaacacctttggctgcc

SEQ ID NO: 52258 - DNA, 33 bp, Homo sapien
ctcaagatgtgacagagaacacctttggctgcc

SEQ ID NO: 52259 - DNA, 33 bp, Homo sapien
aagtggatgaaggggaaagtgttggaaacttag

SEQ ID NO: 52260 - DNA, 33 bp, Homo sapien
aagtggatgaaggggagagtgttggaaacttag

SEQ ID NO: 52261 - DNA, 33 bp, Homo sapien
tggctgttagaaaccccactcatctggggtgtt

SEQ ID NO: 52262 - DNA, 33 bp, Homo sapien
tggctgttagaaaccctactcatctggggtgtt

SEQ ID NO: 52263 - DNA, 33 bp, Homo sapien
taacagaatcaggtgaaatctcttggattcctt

SEQ ID NO: 52264 - DNA, 33 bp, Homo sapien
taacagaatcaggtgagatctcttggattcctt

SEQ ID NO: 52265 - DNA, 33 bp, Homo sapien
tttcaccaacattagcacattcagttgtcacag

SEQ ID NO: 52266 - DNA, 33 bp, Homo sapien
tttcaccaacattagcgcattcagttgtcacag

SEQ ID NO: 52267 - DNA, 33 bp, Homo sapien
acgataaatggattcaagaagcccatctctgca

SEQ ID NO: 52268 - DNA, 33 bp, Homo sapien
acgataaatggattcaggaagcccatctctgca

SEQ ID NO: 52269 - DNA, 33 bp, Homo sapien
agtgacccagggtagaaagcacataggattaga

SEQ ID NO: 52270 - DNA, 33 bp, Homo sapien
agtgacccagggtagagagcacataggattaga

SEQ ID NO: 52271 - DNA, 33 bp, Homo sapien
ggtgtcagagaggaagcacttcacagaggaggt

SEQ ID NO: 52272 - DNA, 33 bp, Homo sapien
ggtgtcagagaggaaggacttcacagaggaggt

SEQ ID NO: 52273 - DNA, 33 bp, Homo sapien
ctcacctttacagaaacaggatgacggcagtag

SEQ ID NO: 52274 - DNA, 33 bp, Homo sapien
ctcacctttacagaaagaggatgacggcagtag

SEQ ID NO: 52275 - DNA, 33 bp, Homo sapien
tagtggtgttagaataaagagatcacacatctt

SEQ ID NO: 52276 - DNA, 33 bp, Homo sapien
tagtggtgttagaatagagagatcacacatctt

SEQ ID NO: 52277 - DNA, 33 bp, Homo sapien
aacagaaacaattcaaaaacaaacacaatggag

SEQ ID NO: 52278 - DNA, 33 bp, Homo sapien
aacagaaacaattcaagaacaaacacaatggag

SEQ ID NO: 52279 - DNA, 33 bp, Homo sapien
ctggctatgaactccaagtaagttgccaggttc

SEQ ID NO: 52280 - DNA, 33 bp, Homo sapien
ctggctatgaactccaggtaagttgccaggttc

SEQ ID NO: 52281 - DNA, 33 bp, Homo sapien
aactggagtaaaacccacttagatttctatgtc

SEQ ID NO: 52282 - DNA, 33 bp, Homo sapien
aactggagtaaaacccgcttagatttctatgtc

SEQ ID NO: 52283 - DNA, 33 bp, Homo sapien
caaaactatgtgaagaatatacaagaagtagta

SEQ ID NO: 52284 - DNA, 33 bp, Homo sapien
caaaactatgtgaagagtatacaagaagtagta

SEQ ID NO: 52285 - DNA, 33 bp, Homo sapien
agtctccccacattcaaaaaaaggaggttggga

SEQ ID NO: 52286 - DNA, 33 bp, Homo sapien
agtctccccacattcagaaaaaggaggttggga

SEQ ID NO: 52287 - DNA, 33 bp, Homo sapien
actgagatgttccctaagactcattatctatga

SEQ ID NO: 52288 - DNA, 33 bp, Homo sapien
actgagatgttccctatgactcattatctatga

SEQ ID NO: 52289 - DNA, 33 bp, Homo sapien
ttcaactttaacaacaatgaatctctcactttt

SEQ ID NO: 52290 - DNA, 33 bp, Homo sapien
ttcaactttaacaacagtgaatctctcactttt

SEQ ID NO: 52291 - DNA, 33 bp, Homo sapien
gcttcacctgaaagagaaaaaggaacctcagat

SEQ ID NO: 52292 - DNA, 33 bp, Homo sapien
gcttcacctgaaagaggaaaaggaacctcagat

SEQ ID NO: 52293 - DNA, 33 bp, Homo sapien
cgtcaaagttgaacagaaggggagaggtagcat

SEQ ID NO: 52294 - DNA, 33 bp, Homo sapien
cgtcaaagttgaacagtaggggagaggtagcat

SEQ ID NO: 52295 - DNA, 33 bp, Homo sapien
tctcaaagacattttacaatcccagcagcccag

SEQ ID NO: 52296 - DNA, 33 bp, Homo sapien
tctcaaagacattttagaatcccagcagcccag

SEQ ID NO: 52297 - DNA, 33 bp, Homo sapien
aagtctgcagcagagaaggagtatgaaagaagc

SEQ ID NO: 52298 - DNA, 33 bp, Homo sapien
aagtctgcagcagagagggagtatgaaagaagc

SEQ ID NO: 52299 - DNA, 33 bp, Homo sapien
tctgggaatccagggcaatgtcatgtggtccac

SEQ ID NO: 52300 - DNA, 33 bp, Homo sapien
tctgggaatccagggcgatgtcatgtggtccac

SEQ ID NO: 52301 - DNA, 33 bp, Homo sapien
acagtgaccctgttgacgtgccatcctttattt

SEQ ID NO: 52302 - DNA, 33 bp, Homo sapien
acagtgaccctgttgatgtgccatcctttattt

SEQ ID NO: 52303 - DNA, 33 bp, Homo sapien
gaaaagttagtagttacggccgctgttactgtc

SEQ ID NO: 52304 - DNA, 33 bp, Homo sapien
gaaaagttagtagttatggccgctgttactgtc

SEQ ID NO: 52305 - DNA, 33 bp, Homo sapien
ttgttcctttctgcctcagatagaagcacatgc

SEQ ID NO: 52306 - DNA, 33 bp, Homo sapien
ttgttcctttctgccttagatagaagcacatgc

SEQ ID NO: 52307 - DNA, 33 bp, Homo sapien
ataatctaattcagcccctcattttactagtga

SEQ ID NO: 52308 - DNA, 33 bp, Homo sapien
ataatctaattcagcctctcattttactagtga

SEQ ID NO: 52309 - DNA, 33 bp, Homo sapien
ataagcccaggaaatacgtatctcacaaacaaa

SEQ ID NO: 52310 - DNA, 33 bp, Homo sapien
ataagcccaggaaatatgtatctcacaaacaaa

SEQ ID NO: 52311 - DNA, 33 bp, Homo sapien
gggcaagccacttacccactttgatcctcagtt

SEQ ID NO: 52312 - DNA, 33 bp, Homo sapien
gggcaagccacttaccgactttgatcctcagtt

SEQ ID NO: 52313 - DNA, 33 bp, Homo sapien
ttatattgtaatgctcaacaaacatttcacgaa

SEQ ID NO: 52314 - DNA, 33 bp, Homo sapien
ttatattgtaatgctcgacaaacatttcacgaa

SEQ ID NO: 52315 - DNA, 33 bp, Homo sapien
tttgttgtcttttctccccactggattccaagc

SEQ ID NO: 52316 - DNA, 33 bp, Homo sapien
tttgttgtcttttctcgccactggattccaagc

SEQ ID NO: 52317 - DNA, 33 bp, Homo sapien
cttaacagattcaaaaaataattgcataaaaga

SEQ ID NO: 52318 - DNA, 33 bp, Homo sapien
cttaacagattcaaaagataattgcataaaaga

SEQ ID NO: 52319 - DNA, 33 bp, Homo sapien
taagagaaaagggataacaaatacacattcata

SEQ ID NO: 52320 - DNA, 33 bp, Homo sapien
taagagaaaagggataccaaatacacattcata

SEQ ID NO: 52321 - DNA, 33 bp, Homo sapien
aaatcaacaaaaacagacactaaggaaaggaca

SEQ ID NO: 52322 - DNA, 33 bp, Homo sapien
aaatcaacaaaaacaggcactaaggaaaggaca

SEQ ID NO: 52323 - DNA, 33 bp, Homo sapien
ttttatactggtgccacgtgttttggttagtat

SEQ ID NO: 52324 - DNA, 33 bp, Homo sapien
ttttatactggtgccatgtgttttggttagtat

SEQ ID NO: 52325 - DNA, 33 bp, Homo sapien
ggaaaactgcaatacaatgatgaaagaaatcat

SEQ ID NO: 52326 - DNA, 33 bp, Homo sapien
ggaaaactgcaatacagtgatgaaagaaatcat

SEQ ID NO: 52327 - DNA, 33 bp, Homo sapien
ttgatcttccttctgaggcatattgtgaattct

SEQ ID NO: 52328 - DNA, 33 bp, Homo sapien
ttgatcttccttctgatgcatattgtgaattct

SEQ ID NO: 52329 - DNA, 33 bp, Homo sapien
gactttaatgctaagccgcacctttccctttgg

SEQ ID NO: 52330 - DNA, 33 bp, Homo sapien
gactttaatgctaagctgcacctttccctttgg

SEQ ID NO: 52331 - DNA, 33 bp, Homo sapien
atcttatcactaaagaatatcaaaaaaagacgt

SEQ ID NO: 52332 - DNA, 33 bp, Homo sapien
atcttatcactaaagactatcaaaaaaagacgt

SEQ ID NO: 52333 - DNA, 33 bp, Homo sapien
aagaggaataaagtcacgtatatcaatcattct

SEQ ID NO: 52334 - DNA, 33 bp, Homo sapien
aagaggaataaagtcatgtatatcaatcattct

SEQ ID NO: 52335 - DNA, 33 bp, Homo sapien
accatgaagatgggaaggtagtgcccacgcaaa

SEQ ID NO: 52336 - DNA, 33 bp, Homo sapien
accatgaagatgggaatgtagtgcccacgcaaa

SEQ ID NO: 52337 - DNA, 33 bp, Homo sapien
actgcacctacaagaccgcagaatggaaacaag

SEQ ID NO: 52338 - DNA, 33 bp, Homo sapien
actgcacctacaagactgcagaatggaaacaag

SEQ ID NO: 52339 - DNA, 33 bp, Homo sapien; identical to SEQ ID NO: 52337

SEQ ID NO: 52340 - DNA, 33 bp, Homo sapien; identical to SEQ ID NO: 52338

SEQ ID NO: 52341 - DNA, 33 bp, Homo sapien
tcagaacacatgatccaacaagcataaatgtcc

SEQ ID NO: 52342 - DNA, 33 bp, Homo sapien
tcagaacacatgatccgacaagcataaatgtcc

SEQ ID NO: 52343 - DNA, 33 bp, Homo sapien
tgggcatagttcaaaacgctttgtaaatatttt

SEQ ID NO: 52344 - DNA, 33 bp, Homo sapien
tgggcatagttcaaaatgctttgtaaatatttt

SEQ ID NO: 52345 - DNA, 33 bp, Homo sapien
ctaataaaaatagtgacgatacctggaatattt

SEQ ID NO: 52346 - DNA, 33 bp, Homo sapien
ctaataaaaatagtgatgatacctggaatattt

SEQ ID NO: 52347 - DNA, 33 bp, Homo sapien
ggacagcctaatctgaccatagctgatacacta

SEQ ID NO: 52348 - DNA, 33 bp, Homo sapien
ggacagcctaatctgatcatagctgatacacta

SEQ ID NO: 52349 - DNA, 33 bp, Homo sapien
aaatatagaaaatcacaacttatcagggcagaa

SEQ ID NO: 52350 - DNA, 33 bp, Homo sapien
aaatatagaaaatcacgacttatcagggcagaa

SEQ ID NO: 52351 - DNA, 33 bp, Homo sapien
aatagctccagtaaaaagatttaggatggcata

SEQ ID NO: 52352 - DNA, 33 bp, Homo sapien
aatagctccagtaaaatgatttaggatggcata

SEQ ID NO: 52353 - DNA, 33 bp, Homo sapien
tgcaggtgggaagtgacgagctctgcagaaaga

SEQ ID NO: 52354 - DNA, 33 bp, Homo sapien
tgcaggtgggaagtgatgagctctgcagaaaga

SEQ ID NO: 52355 - DNA, 33 bp, Homo sapien
caatgcaaatgatgtacagcagtattttctaag

SEQ ID NO: 52356 - DNA, 33 bp, Homo sapien
caatgcaaatgatgtatagcagtattttctaag

SEQ ID NO: 52357 - DNA, 33 bp, Homo sapien
tatagaaggtacatggaaaaaaaatttcatcta

SEQ ID NO: 52358 - DNA, 33 bp, Homo sapien
tatagaaggtacatgggaaaaaaatttcatcta

SEQ ID NO: 52359 - DNA, 33 bp, Homo sapien
gctagctaagatttgacgggtttgtttataaga

SEQ ID NO: 52360 - DNA, 33 bp, Homo sapien
gctagctaagatttgatgggtttgtttataaga

SEQ ID NO: 52361 - DNA, 33 bp, Homo sapien
atttaagtaaacaaagccttctcatttagaaaa

SEQ ID NO: 52362 - DNA, 33 bp, Homo sapien
atttaagtaaacaaaggcttctcatttagaaaa

SEQ ID NO: 52363 - DNA, 33 bp, Homo sapien
aggttaatgagtccaacgagtccaagacgtttg

SEQ ID NO: 52364 - DNA, 33 bp, Homo sapien
aggttaatgagtccaatgagtccaagacgtttg

SEQ ID NO: 52365 - DNA, 33 bp, Homo sapien
ctaaatggcaggtgtcacaaacccagaggctgg

SEQ ID NO: 52366 - DNA, 33 bp, Homo sapien
ctaaatggcaggtgtcgcaaacccagaggctgg

SEQ ID NO: 52367 - DNA, 33 bp, Homo sapien
ttgagctggactcagaagctaaagagagaggcc

SEQ ID NO: 52368 - DNA, 33 bp, Homo sapien
ttgagctggactcagacgctaaagagagaggcc

SEQ ID NO: 52369 - DNA, 33 bp, Homo sapien
ggtggtacacttggtacaggccggttggtcccc

SEQ ID NO: 52370 - DNA, 33 bp, Homo sapien
ggtggtacacttggtataggccggttggtcccc

SEQ ID NO: 52371 - DNA, 33 bp, Homo sapien
aggaaactgtcagccaccaaaaaaggcagtgaa

SEQ ID NO: 52372 - DNA, 33 bp, Homo sapien
aggaaactgtcagccatcaaaaaaggcagtgaa

SEQ ID NO: 52373 - DNA, 33 bp, Homo sapien
cacgttattagcacccagagtattttttcttcg

SEQ ID NO: 52374 - DNA, 33 bp, Homo sapien
cacgttattagcacccggagtattttttcttcg

SEQ ID NO: 52375 - DNA, 33 bp, Homo sapien
aaaccaaatgttggaaatctgaactaactcttt

SEQ ID NO: 52376 - DNA, 33 bp, Homo sapien
aaaccaaatgttggaattctgaactaactcttt

SEQ ID NO: 52377 - DNA, 33 bp, Homo sapien
cataaataggctactcaaatatacacattatta

SEQ ID NO: 52378 - DNA, 33 bp, Homo sapien
cataaataggctactcgaatatacacattatta

SEQ ID NO: 52379 - DNA, 33 bp, Homo sapien
ctcacagatagtgtcacatatcaccatggactg

SEQ ID NO: 52380 - DNA, 33 bp, Homo sapien
ctcacagatagtgtcatatatcaccatggactg

SEQ ID NO: 52381 - DNA, 33 bp, Homo sapien
ttcaaaacctattaaaggacattcatagtctca

SEQ ID NO: 52382 - DNA, 33 bp, Homo sapien
ttcaaaacctattaaatgacattcatagtctca

SEQ ID NO: 52383 - DNA, 33 bp, Homo sapien
gagatgcattatttccccatgtcaagaaaggcc

SEQ ID NO: 52384 - DNA, 33 bp, Homo sapien
gagatgcattatttcctcatgtcaagaaaggcc

SEQ ID NO: 52385 - DNA, 33 bp, Homo sapien
tagaggccactaaagaacaaatatgaagataca

SEQ ID NO: 52386 - DNA, 33 bp, Homo sapien
tagaggccactaaagagcaaatatgaagataca

SEQ ID NO: 52387 - DNA, 33 bp, Homo sapien
agagaaatgagagcagaaatttgggggaattct

SEQ ID NO: 52388 - DNA, 33 bp, Homo sapien
agagaaatgagagcaggaatttgggggaattct

SEQ ID NO: 52389 - DNA, 33 bp, Homo sapien
tgtgtcacgttaccacgctgctttctcaagtct

SEQ ID NO: 52390 - DNA, 33 bp, Homo sapien
tgtgtcacgttaccactctgctttctcaagtct

SEQ ID NO: 52391 - DNA, 33 bp, Homo sapien
gagcgacatgagaacaatcataaaagtataatc

SEQ ID NO: 52392 - DNA, 33 bp, Homo sapien
gagcgacatgagaacagtcataaaagtataatc

SEQ ID NO: 52393 - DNA, 33 bp, Homo sapien
agaggcaaaaccctatcaagacattctattaca

SEQ ID NO: 52394 - DNA, 33 bp, Homo sapien
agaggcaaaaccctatgaagacattctattaca

SEQ ID NO: 52395 - DNA, 33 bp, Homo sapien
tttactgacttctttcgctgaaaagcatcccaa

SEQ ID NO: 52396 - DNA, 33 bp, Homo sapien
tttactgacttctttctctgaaaagcatcccaa

SEQ ID NO: 52397 - DNA, 33 bp, Homo sapien
agaaattctcaaatgtgaatgttataggaatca

SEQ ID NO: 52398 - DNA, 33 bp, Homo sapien
agaaattctcaaatgttaatgttataggaatca

SEQ ID NO: 52399 - DNA, 33 bp, Homo sapien
aagcaatagagaagcaatgaatttgggattcca

SEQ ID NO: 52400 - DNA, 33 bp, Homo sapien
aagcaatagagaagcagtgaatttgggattcca

SEQ ID NO: 52401 - DNA, 33 bp, Homo sapien
ctgctgttcaactgcacggttattgctccagga

SEQ ID NO: 52402 - DNA, 33 bp, Homo sapien
ctgctgttcaactgcatggttattgctccagga

SEQ ID NO: 52403 - DNA, 33 bp, Homo sapien
ttccaatgccagtattcaactcccctaagcaag

SEQ ID NO: 52404 - DNA, 33 bp, Homo sapien
ttccaatgccagtattgaactcccctaagcaag

SEQ ID NO: 52405 - DNA, 33 bp, Homo sapien
aactagccaaactcaaagttctaattagacacc

SEQ ID NO: 52406 - DNA, 33 bp, Homo sapien
aactagccaaactcaaggttctaattagacacc

SEQ ID NO: 52407 - DNA, 33 bp, Homo sapien
atagatgtgtgcacgaataatatcaggggaaat

SEQ ID NO: 52408 - DNA, 33 bp, Homo sapien
atagatgtgtgcacgagtaatatcaggggaaat

SEQ ID NO: 52409 - DNA, 33 bp, Homo sapien
ttatggcatttttactaagcatttgctatgtgc

SEQ ID NO: 52410 - DNA, 33 bp, Homo sapien
ttatggcatttttactgagcatttgctatgtgc

SEQ ID NO: 52411 - DNA, 33 bp, Homo sapien
ggattgatattttaaaaattgccatcaaaacgt

SEQ ID NO: 52412 - DNA, 33 bp, Homo sapien
ggattgatattttaaagattgccatcaaaacgt

SEQ ID NO: 52413 - DNA, 33 bp, Homo sapien
cactgaaccagtgggcaaactattctactggag

SEQ ID NO: 52414 - DNA, 33 bp, Homo sapien
cactgaaccagtgggcgaactattctactggag

SEQ ID NO: 52415 - DNA, 33 bp, Homo sapien
gctagtcagttttctaagcactttacttaatta

SEQ ID NO: 52416 - DNA, 33 bp, Homo sapien
gctagtcagttttctacgcactttacttaatta

SEQ ID NO: 52417 - DNA, 33 bp, Homo sapien
cacctgttctctccaaagggggctagattctaa

SEQ ID NO: 52418 - DNA, 33 bp, Homo sapien
cacctgttctctccaaggggggctagattctaa

SEQ ID NO: 52419 - DNA, 33 bp, Homo sapien
actgagtccatctaggaagagtgtgtctcacct

SEQ ID NO: 52420 - DNA, 33 bp, Homo sapien
actgagtccatctaggcagagtgtgtctcacct

SEQ ID NO: 52421 - DNA, 33 bp, Homo sapien
gcattcacagaaaagaagacccagggaagacgt

SEQ ID NO: 52422 - DNA, 33 bp, Homo sapien
gcattcacagaaaagaggacccagggaagacgt

SEQ ID NO: 52423 - DNA, 33 bp, Homo sapien
aggtaatgaggtacacaaggagaatgattgagt

SEQ ID NO: 52424 - DNA, 33 bp, Homo sapien
aggtaatgaggtacacgaggagaatgattgagt

SEQ ID NO: 52425 - DNA, 33 bp, Homo sapien
tagaaacaattaggtcaaggtagaatgagataa

SEQ ID NO: 52426 - DNA, 33 bp, Homo sapien
tagaaacaattaggtcgaggtagaatgagataa

SEQ ID NO: 52427 - DNA, 33 bp, Homo sapien
agtactgcctacatataaagtctttagaaaagt

SEQ ID NO: 52428 - DNA, 33 bp, Homo sapien
agtactgcctacatatgaagtctttagaaaagt

SEQ ID NO: 52429 - DNA, 33 bp, Homo sapien
acatggcattgacatacgttccattaggtagtg

SEQ ID NO: 52430 - DNA, 33 bp, Homo sapien
acatggcattgacatatgttccattaggtagtg

SEQ ID NO: 52431 - DNA, 33 bp, Homo sapien
atttttaatattccccacagagaccttccacag

SEQ ID NO: 52432 - DNA, 33 bp, Homo sapien
atttttaatattccccccagagaccttccacag

SEQ ID NO: 52433 - DNA, 33 bp, Homo sapien
aactaaacattcaaataaggacaatgctttaga

SEQ ID NO: 52434 - DNA, 33 bp, Homo sapien
aactaaacattcaaatgaggacaatgctttaga

SEQ ID NO: 52435 - DNA, 33 bp, Homo sapien
agaaagagatggctccaaaaagggaattttaac

SEQ ID NO: 52436 - DNA, 33 bp, Homo sapien
agaaagagatggctccgaaaagggaattttaac

SEQ ID NO: 52437 - DNA, 33 bp, Homo sapien
cactaaccattaacagccattatcctcatttct

SEQ ID NO: 52438 - DNA, 33 bp, Homo sapien
cactaaccattaacagtcattatcctcatttct

SEQ ID NO: 52439 - DNA, 33 bp, Homo sapien
tttgtaccaggggagcgaagacaccaaggtaat

SEQ ID NO: 52440 - DNA, 33 bp, Homo sapien
tttgtaccaggggagctaagacaccaaggtaat

SEQ ID NO: 52441 - DNA, 33 bp, Homo sapien
aattgaaaggacctaaaagaagagttctagaaa

SEQ ID NO: 52442 - DNA, 33 bp, Homo sapien
aattgaaaggacctaagagaagagttctagaaa

SEQ ID NO: 52443 - DNA, 33 bp, Homo sapien
aaagggagaatgaagcaacaagctgggtggcag

SEQ ID NO: 52444 - DNA, 33 bp, Homo sapien
aaagggagaatgaagcgacaagctgggtggcag

SEQ ID NO: 52445 - DNA, 33 bp, Homo sapien
gccagtgttgtctgccgcctccatctttgcacg

SEQ ID NO: 52446 - DNA, 33 bp, Homo sapien
gccagtgttgtctgcctcctccatctttgcacg

SEQ ID NO: 52447 - DNA, 33 bp, Homo sapien
ccaaggtactgagagaagacaggttcccagggg

SEQ ID NO: 52448 - DNA, 33 bp, Homo sapien
ccaaggtactgagagaggacaggttcccagggg

SEQ ID NO: 52449 - DNA, 33 bp, Homo sapien
tatttcaaggagtttacctaaaacaggagcaga

SEQ ID NO: 52450 - DNA, 33 bp, Homo sapien
tatttcaaggagtttagctaaaacaggagcaga

SEQ ID NO: 52451 - DNA, 33 bp, Homo sapien
aactaaaataattacaaaaaagtgcaattatct

SEQ ID NO: 52452 - DNA, 33 bp, Homo sapien
aactaaaataattacagaaaagtgcaattatct

SEQ ID NO: 52453 - DNA, 33 bp, Homo sapien
caaaagactttggagactccacccatttctgaa

SEQ ID NO: 52454 - DNA, 33 bp, Homo sapien
caaaagactttggagattccacccatttctgaa

SEQ ID NO: 52455 - DNA, 33 bp, Homo sapien
ctatatacataaaacacattttctgccttatag

SEQ ID NO: 52456 - DNA, 33 bp, Homo sapien
ctatatacataaaacagattttctgccttatag

SEQ ID NO: 52457 - DNA, 33 bp, Homo sapien
ttaagaaggttgaagcccatcaaagtacactgt

SEQ ID NO: 52458 - DNA, 33 bp, Homo sapien
ttaagaaggttgaagctcatcaaagtacactgt

SEQ ID NO: 52459 - DNA, 33 bp, Homo sapien
tgtgtgggctacttcaataagcaagtctaaact

SEQ ID NO: 52460 - DNA, 33 bp, Homo sapien
tgtgtgggctacttcagtaagcaagtctaaact

SEQ ID NO: 52461 - DNA, 33 bp, Homo sapien
ccaaaataacattcagactatctttaaaatatt

SEQ ID NO: 52462 - DNA, 33 bp, Homo sapien
ccaaaataacattcaggctatctttaaaatatt

SEQ ID NO: 52463 - DNA, 33 bp, Homo sapien
taggaagagtctcagaccaaaaatcacttctat

SEQ ID NO: 52464 - DNA, 33 bp, Homo sapien
taggaagagtctcagatcaaaaatcacttctat

SEQ ID NO: 52465 - DNA, 33 bp, Homo sapien
ggcacttgtggcctacagataaatatatcaaat

SEQ ID NO: 52466 - DNA, 33 bp, Homo sapien
ggcacttgtggcctacggataaatatatcaaat

SEQ ID NO: 52467 - DNA, 33 bp, Homo sapien
ttctgtctgttcctcactagaattttttttgct

SEQ ID NO: 52468 - DNA, 33 bp, Homo sapien
ttctgtctgttcctcattagaattttttttgct

SEQ ID NO: 52469 - DNA, 33 bp, Homo sapien
gtgccttagcattctacatgacatacttggaaa

SEQ ID NO: 52470 - DNA, 33 bp, Homo sapien
gtgccttagcattctatatgacatacttggaaa

SEQ ID NO: 52471 - DNA, 33 bp, Homo sapien
ggtgcttgagcttccaaatagcagagcaataac

SEQ ID NO: 52472 - DNA, 33 bp, Homo sapien
ggtgcttgagcttccagatagcagagcaataac

SEQ ID NO: 52473 - DNA, 33 bp, Homo sapien
ttgaaccttcttcaaaacagtgtttcatcatat

SEQ ID NO: 52474 - DNA, 33 bp, Homo sapien
ttgaaccttcttcaaagcagtgtttcatcatat

SEQ ID NO: 52475 - DNA, 33 bp, Homo sapien
tttctgtatttatcagaatgccaatgatattta

SEQ ID NO: 52476 - DNA, 33 bp, Homo sapien
tttctgtatttatcaggatgccaatgatattta

SEQ ID NO: 52477 - DNA, 33 bp, Homo sapien
gcttaatgaaagagccacatttttgttttacag

SEQ ID NO: 52478 - DNA, 33 bp, Homo sapien
gcttaatgaaagagccgcatttttgttttacag

SEQ ID NO: 52479 - DNA, 33 bp, Homo sapien
atattttcctgaaaccacatcttctcaataaga

SEQ ID NO: 52480 - DNA, 33 bp, Homo sapien
atattttcctgaaaccgcatcttctcaataaga

SEQ ID NO: 52481 - DNA, 33 bp, Homo sapien
ttaaggttttaagcacaggaatgatgtgaccag

SEQ ID NO: 52482 - DNA, 33 bp, Homo sapien
ttaaggttttaagcacgggaatgatgtgaccag

SEQ ID NO: 52483 - DNA, 33 bp, Homo sapien
agtttgagtacagttccacagaccacaaagagt

SEQ ID NO: 52484 - DNA, 33 bp, Homo sapien
agtttgagtacagttctacagaccacaaagagt

SEQ ID NO: 52485 - DNA, 33 bp, Homo sapien
ccattgttggagaggactatttgtcagtgagag

SEQ ID NO: 52486 - DNA, 33 bp, Homo sapien
ccattgttggagaggattatttgtcagtgagag

SEQ ID NO: 52487 - DNA, 33 bp, Homo sapien
tgctttgcatttacaccgaactcctccagcata

SEQ ID NO: 52488 - DNA, 33 bp, Homo sapien
tgctttgcatttacactgaactcctccagcata

SEQ ID NO: 52489 - DNA, 33 bp, Homo sapien
taagagcttgagaataaagaaattgtaagaatg

SEQ ID NO: 52490 - DNA, 33 bp, Homo sapien
taagagcttgagaatagagaaattgtaagaatg

SEQ ID NO: 52491 - DNA, 33 bp, Homo sapien
aaaagccatctgcctaaactaaaatagattgta

SEQ ID NO: 52492 - DNA, 33 bp, Homo sapien
aaaagccatctgcctagactaaaatagattgta

SEQ ID NO: 52493 - DNA, 33 bp, Homo sapien
ttgagtagttgctgcacgactatataacccaca

SEQ ID NO: 52494 - DNA, 33 bp, Homo sapien
ttgagtagttgctgcaggactatataacccaca

SEQ ID NO: 52495 - DNA, 33 bp, Homo sapien
gcatagcttacagaacacttctgaaaacttcaa

SEQ ID NO: 52496 - DNA, 33 bp, Homo sapien
gcatagcttacagaacgcttctgaaaacttcaa

SEQ ID NO: 52497 - DNA, 33 bp, Homo sapien
aagtctatgtagaagaaaaaataaagtgacaca

SEQ ID NO: 52498 - DNA, 33 bp, Homo sapien
aagtctatgtagaagagaaaataaagtgacaca

SEQ ID NO: 52499 - DNA, 33 bp, Homo sapien
gtcaaataccaatttcaatgttgctgtgaaggt

SEQ ID NO: 52500 - DNA, 33 bp, Homo sapien
gtcaaataccaatttcgatgttgctgtgaaggt

SEQ ID NO: 52501 - DNA, 33 bp, Homo sapien
gtggggagagcataacaacttggtgattgcagt

SEQ ID NO: 52502 - DNA, 33 bp, Homo sapien
gtggggagagcataacgacttggtgattgcagt

SEQ ID NO: 52503 - DNA, 33 bp, Homo sapien
accatgaaattttgggcccagagagagccaata

SEQ ID NO: 52504 - DNA, 33 bp, Homo sapien
accatgaaattttgggtccagagagagccaata

SEQ ID NO: 52505 - DNA, 33 bp, Homo sapien
acttcacagggcagaactgggctaaagttttgt

SEQ ID NO: 52506 - DNA, 33 bp, Homo sapien
acttcacagggcagaattgggctaaagttttgt

SEQ ID NO: 52507 - DNA, 33 bp, Homo sapien
gtgaagtcaaccgtgacactgcttttagaaaat

SEQ ID NO: 52508 - DNA, 33 bp, Homo sapien
gtgaagtcaaccgtgatactgcttttagaaaat

SEQ ID NO: 52509 - DNA, 33 bp, Homo sapien
gtatattcattttcaaaaagctctgattattag

SEQ ID NO: 52510 - DNA, 33 bp, Homo sapien
gtatattcattttcaataagctctgattattag

SEQ ID NO: 52511 - DNA, 33 bp, Homo sapien
tgccccgggaatggaacgtcttggtataaaacc

SEQ ID NO: 52512 - DNA, 33 bp, Homo sapien
tgccccgggaatggaatgtcttggtataaaacc

SEQ ID NO: 52513 - DNA, 33 bp, Homo sapien
aagtgataaatgcagaagaatatggagaaacat

SEQ ID NO: 52514 - DNA, 33 bp, Homo sapien
aagtgataaatgcagaggaatatggagaaacat

SEQ ID NO: 52515 - DNA, 33 bp, Homo sapien
catctctggaaatttcaagtaagtttagatttc

SEQ ID NO: 52516 - DNA, 33 bp, Homo sapien
catctctggaaatttcgagtaagtttagatttc

SEQ ID NO: 52517 - DNA, 33 bp, Homo sapien
cgaattagattgacaacggacagaagacttgaa

SEQ ID NO: 52518 - DNA, 33 bp, Homo sapien
cgaattagattgacaatggacagaagacttgaa

SEQ ID NO: 52519 - DNA, 33 bp, Homo sapien
tattaaatgtggccagcaatcctgaatgtgaaa

SEQ ID NO: 52520 - DNA, 33 bp, Homo sapien
tattaaatgtggccagtaatcctgaatgtgaaa

SEQ ID NO: 52521 - DNA, 33 bp, Homo sapien
tcagatatcctgattaccgttacttatttgtct

SEQ ID NO: 52522 - DNA, 33 bp, Homo sapien
tcagatatcctgattatcgttacttatttgtct

SEQ ID NO: 52523 - DNA, 33 bp, Homo sapien
agctgaactgtctttaaggtaacttccctttta

SEQ ID NO: 52524 - DNA, 33 bp, Homo sapien
agctgaactgtctttagggtaacttccctttta

SEQ ID NO: 52525 - DNA, 33 bp, Homo sapien
tttccaagatctgccactctcccattctcatct

SEQ ID NO: 52526 - DNA, 33 bp, Homo sapien
tttccaagatctgccattctcccattctcatct

SEQ ID NO: 52527 - DNA, 33 bp, Homo sapien
cctcttcaccttttaccgcctgtagaacagcga

SEQ ID NO: 52528 - DNA, 33 bp, Homo sapien
cctcttcaccttttactgcctgtagaacagcga

SEQ ID NO: 52529 - DNA, 33 bp, Homo sapien
tttccatttaccgtaaggagtatatcgaaagta

SEQ ID NO: 52530 - DNA, 33 bp, Homo sapien
tttccatttaccgtaatgagtatatcgaaagta

SEQ ID NO: 52531 - DNA, 33 bp, Homo sapien
ctttaaaagatataacaatcaggatgagtagaa

SEQ ID NO: 52532 - DNA, 33 bp, Homo sapien
ctttaaaagatataacgatcaggatgagtagaa

SEQ ID NO: 52533 - DNA, 33 bp, Homo sapien
ataggctgagtctttgcaggatttcacatagtc

SEQ ID NO: 52534 - DNA, 33 bp, Homo sapien
ataggctgagtctttggaggatttcacatagtc

SEQ ID NO: 52535 - DNA, 33 bp, Homo sapien
gcaggcagcctctagaaaatagaaaaggaaagg

SEQ ID NO: 52536 - DNA, 33 bp, Homo sapien
gcaggcagcctctagagaatagaaaaggaaagg

SEQ ID NO: 52537 - DNA, 33 bp, Homo sapien
ttctcaactctgtctgcacattaagatcagcat

SEQ ID NO: 52538 - DNA, 33 bp, Homo sapien
ttctcaactctgtctgtacattaagatcagcat

SEQ ID NO: 52539 - DNA, 33 bp, Homo sapien
cctaggggagaggatgaaaagtgagacgagaac

SEQ ID NO: 52540 - DNA, 33 bp, Homo sapien
cctaggggagaggatgcaaagtgagacgagaac

SEQ ID NO: 52541 - DNA, 33 bp, Homo sapien
tccttctgtgactcccgctacatctactcatta

SEQ ID NO: 52542 - DNA, 33 bp, Homo sapien
tccttctgtgactccctctacatctactcatta

SEQ ID NO: 52543 - DNA, 33 bp, Homo sapien
gccaacactttaaatccctttgtagcctgttgg

SEQ ID NO: 52544 - DNA, 33 bp, Homo sapien
gccaacactttaaatctctttgtagcctgttgg

SEQ ID NO: 52545 - DNA, 33 bp, Homo sapien
ttttattgcctttttgaagattaaatatggttt

SEQ ID NO: 52546 - DNA, 33 bp, Homo sapien
ttttattgcctttttggagattaaatatggttt

SEQ ID NO: 52547 - DNA, 33 bp, Homo sapien
gagagagagaaaagaacacgcctttcctctgcc

SEQ ID NO: 52548 - DNA, 33 bp, Homo sapien
gagagagagaaaagaatacgcctttcctctgcc

SEQ ID NO: 52549 - DNA, 33 bp, Homo sapien
aaacgaataacaggcacgaagatactcaaataa

SEQ ID NO: 52550 - DNA, 33 bp, Homo sapien
aaacgaataacaggcaggaagatactcaaataa

SEQ ID NO: 52551 - DNA, 33 bp, Homo sapien
caaatagttgggataacgatcagggaaagggta

SEQ ID NO: 52552 - DNA, 33 bp, Homo sapien
caaatagttgggataatgatcagggaaagggta

SEQ ID NO: 52553 - DNA, 33 bp, Homo sapien
ttctttattcccagtcaaaggtgtgcagagtga

SEQ ID NO: 52554 - DNA, 33 bp, Homo sapien
ttctttattcccagtcgaaggtgtgcagagtga

SEQ ID NO: 52555 - DNA, 33 bp, Homo sapien
tatttccttcctactaataacttaaggtcattc

SEQ ID NO: 52556 - DNA, 33 bp, Homo sapien
tatttccttcctactagtaacttaaggtcattc

SEQ ID NO: 52557 - DNA, 33 bp, Homo sapien
gagtatgcaagacatcaaagaaacagacttgca

SEQ ID NO: 52558 - DNA, 33 bp, Homo sapien
gagtatgcaagacatcgaagaaacagacttgca

SEQ ID NO: 52559 - DNA, 33 bp, Homo sapien
atattaaatttatagacggaattggtctgtgat

SEQ ID NO: 52560 - DNA, 33 bp, Homo sapien
atattaaatttatagatggaattggtctgtgat

SEQ ID NO: 52561 - DNA, 33 bp, Homo sapien
agtagaagataatgaaatcaataaacgaagcag

SEQ ID NO: 52562 - DNA, 33 bp, Homo sapien
agtagaagataatgaagtcaataaacgaagcag

SEQ ID NO: 52563 - DNA, 33 bp, Homo sapien
atgtcaaaactactaaccttgtaatgtgttttc

SEQ ID NO: 52564 - DNA, 33 bp, Homo sapien
atgtcaaaactactaagcttgtaatgtgttttc

SEQ ID NO: 52565 - DNA, 33 bp, Homo sapien
gacccgtacaatctaccctggatgttactgggt

SEQ ID NO: 52566 - DNA, 33 bp, Homo sapien
gacccgtacaatctactctggatgttactgggt

SEQ ID NO: 52567 - DNA, 33 bp, Homo sapien
atagacgaaagtgaaaagaagtttgttaagaaa

SEQ ID NO: 52568 - DNA, 33 bp, Homo sapien
atagacgaaagtgaaaggaagtttgttaagaaa

SEQ ID NO: 52569 - DNA, 33 bp, Homo sapien
ggaaactccagtcaatcaggaaatacgtctatg

SEQ ID NO: 52570 - DNA, 33 bp, Homo sapien
ggaaactccagtcaattaggaaatacgtctatg

SEQ ID NO: 52571 - DNA, 33 bp, Homo sapien
ttgatgaaagtataaagctgctcgcaataagac

SEQ ID NO: 52572 - DNA, 33 bp, Homo sapien
ttgatgaaagtataaatctgctcgcaataagac

SEQ ID NO: 52573 - DNA, 33 bp, Homo sapien
aaacaatctgaggttggattttctatcataact

SEQ ID NO: 52574 - DNA, 33 bp, Homo sapien
aaacaatctgaggttgtattttctatcataact

SEQ ID NO: 52575 - DNA, 33 bp, Homo sapien
ctaccttcttctacgacctattttgtatttcct

SEQ ID NO: 52576 - DNA, 33 bp, Homo sapien
ctaccttcttctacgagctattttgtatttcct

SEQ ID NO: 52577 - DNA, 33 bp, Homo sapien
cagaaaattcagtaacaggattcttgagccccc

SEQ ID NO: 52578 - DNA, 33 bp, Homo sapien
cagaaaattcagtaacgggattcttgagccccc

SEQ ID NO: 52579 - DNA, 33 bp, Homo sapien
tttctctcacagttgcaatactgtttggctcca

SEQ ID NO: 52580 - DNA, 33 bp, Homo sapien
tttctctcacagttgccatactgtttggctcca

SEQ ID NO: 52581 - DNA, 33 bp, Homo sapien
attcccaaccaccatactaataatttattcagg

SEQ ID NO: 52582 - DNA, 33 bp, Homo sapien
attcccaaccaccatagtaataatttattcagg

SEQ ID NO: 52583 - DNA, 33 bp, Homo sapien
cactttttctaatcaactcagttagataaaaat

SEQ ID NO: 52584 - DNA, 33 bp, Homo sapien
cactttttctaatcaattcagttagataaaaat

SEQ ID NO: 52585 - DNA, 33 bp, Homo sapien
ctccaaaagatatcaacaagtggaaacagtaat

SEQ ID NO: 52586 - DNA, 33 bp, Homo sapien
ctccaaaagatatcaataagtggaaacagtaat

SEQ ID NO: 52587 - DNA, 33 bp, Homo sapien
tatagtttttgtctgacgcattattttaggttg

SEQ ID NO: 52588 - DNA, 33 bp, Homo sapien
tatagtttttgtctgatgcattattttaggttg

SEQ ID NO: 52589 - DNA, 33 bp, Homo sapien
attgccaagcaacactaaaggtggaaattggag

SEQ ID NO: 52590 - DNA, 33 bp, Homo sapien
attgccaagcaacactgaaggtggaaattggag

SEQ ID NO: 52591 - DNA, 33 bp, Homo sapien
tatcttcaactaccaaagaaagttcaggaactt

SEQ ID NO: 52592 - DNA, 33 bp, Homo sapien
tatcttcaactaccaaggaaagttcaggaactt

SEQ ID NO: 52593 - DNA, 33 bp, Homo sapien
acagcaaaatgagaaaccgtcactgtatccagt

SEQ ID NO: 52594 - DNA, 33 bp, Homo sapien
acagcaaaatgagaaatcgtcactgtatccagt

SEQ ID NO: 52595 - DNA, 33 bp, Homo sapien
aaaaataattactgaaaatgagatcataacaaa

SEQ ID NO: 52596 - DNA, 33 bp, Homo sapien
aaaaataattactgaagatgagatcataacaaa

SEQ ID NO: 52597 - DNA, 33 bp, Homo sapien
caacataggaccaaacagatctaatagacctct

SEQ ID NO: 52598 - DNA, 33 bp, Homo sapien
caacataggaccaaacggatctaatagacctct

SEQ ID NO: 52599 - DNA, 33 bp, Homo sapien
taaaaatagaagtgaaagctaagaaaattgctc

SEQ ID NO: 52600 - DNA, 33 bp, Homo sapien
taaaaatagaagtgaaggctaagaaaattgctc

SEQ ID NO: 52601 - DNA, 33 bp, Homo sapien
gattggtgtgctgagacattatgaattcctcag

SEQ ID NO: 52602 - DNA, 33 bp, Homo sapien
gattggtgtgctgagatattatgaattcctcag

SEQ ID NO: 52603 - DNA, 33 bp, Homo sapien
aaatgcattaaagcaggcagttcttgaaaaaaa

SEQ ID NO: 52604 - DNA, 33 bp, Homo sapien
aaatgcattaaagcagtcagttcttgaaaaaaa

SEQ ID NO: 52605 - DNA, 33 bp, Homo sapien
agtaggcaattgaagacatatttatggagttca

SEQ ID NO: 52606 - DNA, 33 bp, Homo sapien
agtaggcaattgaagatatatttatggagttca

SEQ ID NO: 52607 - DNA, 33 bp, Homo sapien
gagactagacttggaaataataatgtacaatgt

SEQ ID NO: 52608 - DNA, 33 bp, Homo sapien
gagactagacttggaagtaataatgtacaatgt

SEQ ID NO: 52609 - DNA, 33 bp, Homo sapien
ctatatttaatggtcaaaaacagcaaagctcaa

SEQ ID NO: 52610 - DNA, 33 bp, Homo sapien
ctatatttaatggtcacaaacagcaaagctcaa

SEQ ID NO: 52611 - DNA, 33 bp, Homo sapien
aacctcagtgtcccagaaggagtgctagggtgt

SEQ ID NO: 52612 - DNA, 33 bp, Homo sapien
aacctcagtgtcccaggaggagtgctagggtgt

SEQ ID NO: 52613 - DNA, 33 bp, Homo sapien
taaagcaatcacacaaaggaggaagacaaagga

SEQ ID NO: 52614 - DNA, 33 bp, Homo sapien
taaagcaatcacacaatggaggaagacaaagga

SEQ ID NO: 52615 - DNA, 33 bp, Homo sapien
aaggaactcaacaacaaaaacaattccaagtaa

SEQ ID NO: 52616 - DNA, 33 bp, Homo sapien
aaggaactcaacaacagaaacaattccaagtaa

SEQ ID NO: 52617 - DNA, 33 bp, Homo sapien
agatttctggactgaactgttgtatctttagtt

SEQ ID NO: 52618 - DNA, 33 bp, Homo sapien
agatttctggactgaattgttgtatctttagtt

SEQ ID NO: 52619 - DNA, 33 bp, Homo sapien
tggcactctgcgtgtcacccatatgcagggaca

SEQ ID NO: 52620 - DNA, 33 bp, Homo sapien
tggcactctgcgtgtcgcccatatgcagggaca

SEQ ID NO: 52621 - DNA, 33 bp, Homo sapien
ccaattgactcactaccccattgtcttgcataa

SEQ ID NO: 52622 - DNA, 33 bp, Homo sapien
ccaattgactcactactccattgtcttgcataa

SEQ ID NO: 52623 - DNA, 33 bp, Homo sapien
agatttaggtttgtcccagaatgcagagacagc

SEQ ID NO: 52624 - DNA, 33 bp, Homo sapien
agatttaggtttgtcctagaatgcagagacagc

SEQ ID NO: 52625 - DNA, 33 bp, Homo sapien
gtcaccattgtgtgtacaaaagggcccacaagt

SEQ ID NO: 52626 - DNA, 33 bp, Homo sapien
gtcaccattgtgtgtataaaagggcccacaagt

SEQ ID NO: 52627 - DNA, 33 bp, Homo sapien
agtatttactcattatcactggtggaaggtaca

SEQ ID NO: 52628 - DNA, 33 bp, Homo sapien
agtatttactcattattactggtggaaggtaca

SEQ ID NO: 52629 - DNA, 33 bp, Homo sapien
ctcaaattacttgcaaatggtacatctgtgagt

SEQ ID NO: 52630 - DNA, 33 bp, Homo sapien
ctcaaattacttgcaactggtacatctgtgagt

SEQ ID NO: 52631 - DNA, 33 bp, Homo sapien
ctagatcagctttagcaagaggaagcccatgct

SEQ ID NO: 52632 - DNA, 33 bp, Homo sapien
ctagatcagctttagcgagaggaagcccatgct

SEQ ID NO: 52633 - DNA, 33 bp, Homo sapien
caggacctcatgttggcaaatcaggagttctgt

SEQ ID NO: 52634 - DNA, 33 bp, Homo sapien
caggacctcatgttggtaaatcaggagttctgt

SEQ ID NO: 52635 - DNA, 33 bp, Homo sapien
tgcagacaagttattcactctaagcctcaatta

SEQ ID NO: 52636 - DNA, 33 bp, Homo sapien
tgcagacaagttattcgctctaagcctcaatta

SEQ ID NO: 52637 - DNA, 33 bp, Homo sapien
aacccaatcaatgttaagagtgtggtctcagag

SEQ ID NO: 52638 - DNA, 33 bp, Homo sapien
aacccaatcaatgttaggagtgtggtctcagag

SEQ ID NO: 52639 - DNA, 33 bp, Homo sapien
gtattgtgcggtgccacggggacgcctctattt

SEQ ID NO: 52640 - DNA, 33 bp, Homo sapien
gtattgtgcggtgccatggggacgcctctattt

SEQ ID NO: 52641 - DNA, 33 bp, Homo sapien
gatggaagcagtgaccaacattttttttttttt

SEQ ID NO: 52642 - DNA, 33 bp, Homo sapien
gatggaagcagtgaccgacattttttttttttt

SEQ ID NO: 52643 - DNA, 33 bp, Homo sapien
gttaataaggggatcaacaagatggtaaaactg

SEQ ID NO: 52644 - DNA, 33 bp, Homo sapien
gttaataaggggatcagcaagatggtaaaactg

SEQ ID NO: 52645 - DNA, 33 bp, Homo sapien
tgagagctgtaaagttaaaattatttggaccca

SEQ ID NO: 52646 - DNA, 33 bp, Homo sapien
tgagagctgtaaagtttaaattatttggaccca

SEQ ID NO: 52647 - DNA, 33 bp, Homo sapien
gagtgtagacctgaaacacatgaggcaaaggca

SEQ ID NO: 52648 - DNA, 33 bp, Homo sapien
gagtgtagacctgaaatacatgaggcaaaggca

SEQ ID NO: 52649 - DNA, 33 bp, Homo sapien
atgaccatctcgtaaccgataagctttccttct

SEQ ID NO: 52650 - DNA, 33 bp, Homo sapien
atgaccatctcgtaactgataagctttccttct

SEQ ID NO: 52651 - DNA, 33 bp, Homo sapien
taagaggagaaactcactataatccaaatagtt

SEQ ID NO: 52652 - DNA, 33 bp, Homo sapien
taagaggagaaactcattataatccaaatagtt

SEQ ID NO: 52653 - DNA, 33 bp, Homo sapien
caagcctatcacattcaacctgtaagattattt

SEQ ID NO: 52654 - DNA, 33 bp, Homo sapien
caagcctatcacattccacctgtaagattattt

SEQ ID NO: 52655 - DNA, 33 bp, Homo sapien
atagaataaactactacgcaaactaccattatt

SEQ ID NO: 52656 - DNA, 33 bp, Homo sapien
atagaataaactactatgcaaactaccattatt

SEQ ID NO: 52657 - DNA, 33 bp, Homo sapien
taagtaaaaataatgaaaactgataactgctaa

SEQ ID NO: 52658 - DNA, 33 bp, Homo sapien
taagtaaaaataatgacaactgataactgctaa

SEQ ID NO: 52659 - DNA, 33 bp, Homo sapien
atttctaatagtttaccggcagatttttcttag

SEQ ID NO: 52660 - DNA, 33 bp, Homo sapien
atttctaatagtttactggcagatttttcttag

SEQ ID NO: 52661 - DNA, 33 bp, Homo sapien
tcttttcacctctttcacaaatatagatgttta

SEQ ID NO: 52662 - DNA, 33 bp, Homo sapien
tcttttcacctctttcgcaaatatagatgttta

SEQ ID NO: 52663 - DNA, 33 bp, Homo sapien
gatgtatcattatcccccaaagttcatagttta

SEQ ID NO: 52664 - DNA, 33 bp, Homo sapien
gatgtatcattatccctcaaagttcatagttta

SEQ ID NO: 52665 - DNA, 33 bp, Homo sapien
atgtttggtatcaactgagccataaaacatgaa

SEQ ID NO: 52666 - DNA, 33 bp, Homo sapien
atgtttggtatcaacttagccataaaacatgaa

SEQ ID NO: 52667 - DNA, 33 bp, Homo sapien
gttcttggcagcaacaacaacgattgaaaataa

SEQ ID NO: 52668 - DNA, 33 bp, Homo sapien
gttcttggcagcaacaccaacgattgaaaataa

SEQ ID NO: 52669 - DNA, 33 bp, Homo sapien
aggttgatggggatccagccatctgttctcccc

SEQ ID NO: 52670 - DNA, 33 bp, Homo sapien
aggttgatggggatccggccatctgttctcccc

SEQ ID NO: 52671 - DNA, 33 bp, Homo sapien
tcacagaagattctaaaactgtctcccttttgg

SEQ ID NO: 52672 - DNA, 33 bp, Homo sapien
tcacagaagattctaagactgtctcccttttgg

SEQ ID NO: 52673 - DNA, 33 bp, Homo sapien
tatgtgagagttcagacgtaccctcaggctcac

SEQ ID NO: 52674 - DNA, 33 bp, Homo sapien
tatgtgagagttcagatgtaccctcaggctcac

SEQ ID NO: 52675 - DNA, 33 bp, Homo sapien
ttggtcaaatgagctgcaaagttgtgactctca

SEQ ID NO: 52676 - DNA, 33 bp, Homo sapien
ttggtcaaatgagctggaaagttgtgactctca

SEQ ID NO: 52677 - DNA, 33 bp, Homo sapien
ctggatagggaccaaacgatttccttcacatat

SEQ ID NO: 52678 - DNA, 33 bp, Homo sapien
ctggatagggaccaaaggatttccttcacatat

SEQ ID NO: 52679 - DNA, 33 bp, Homo sapien
ttgatagaggaagggaaaagtgaccaaccatga

SEQ ID NO: 52680 - DNA, 33 bp, Homo sapien
ttgatagaggaagggacaagtgaccaaccatga

SEQ ID NO: 52681 - DNA, 33 bp, Homo sapien
gaccaggcaataatcaatgatcaagaagtcaat

SEQ ID NO: 52682 - DNA, 33 bp, Homo sapien
gaccaggcaataatcagtgatcaagaagtcaat

SEQ ID NO: 52683 - DNA, 33 bp, Homo sapien
taactataaaaatccaaacattcaaggaggatg

SEQ ID NO: 52684 - DNA, 33 bp, Homo sapien
taactataaaaatccatacattcaaggaggatg

SEQ ID NO: 52685 - DNA, 33 bp, Homo sapien
aaaaatcaccttgctcaatatttaagaccaaga

SEQ ID NO: 52686 - DNA, 33 bp, Homo sapien
aaaaatcaccttgctcgatatttaagaccaaga

SEQ ID NO: 52687 - DNA, 33 bp, Homo sapien
aataacaccattttcccatcctctttccacctc

SEQ ID NO: 52688 - DNA, 33 bp, Homo sapien
aataacaccattttcctatcctctttccacctc

SEQ ID NO: 52689 - DNA, 33 bp, Homo sapien
cctttggagaccagaacagcattgacagccccc

SEQ ID NO: 52690 - DNA, 33 bp, Homo sapien
cctttggagaccagaagagcattgacagccccc

SEQ ID NO: 52691 - DNA, 33 bp, Homo sapien
tctgtactccttccccaattctgagtaggtgcc

SEQ ID NO: 52692 - DNA, 33 bp, Homo sapien
tctgtactccttccccgattctgagtaggtgcc

SEQ ID NO: 52693 - DNA, 33 bp, Homo sapien
gtgtgattttcaaccaagtacgtgttatgcaaa

SEQ ID NO: 52694 - DNA, 33 bp, Homo sapien
gtgtgattttcaaccaggtacgtgttatgcaaa

SEQ ID NO: 52695 - DNA, 33 bp, Homo sapien
ttacttaagtcctacacaaacagaacagctttc

SEQ ID NO: 52696 - DNA, 33 bp, Homo sapien
ttacttaagtcctacataaacagaacagctttc

SEQ ID NO: 52697 - DNA, 33 bp, Homo sapien
ttcggcttgaccatgaacattgtaaggggttcg

SEQ ID NO: 52698 - DNA, 33 bp, Homo sapien
ttcggcttgaccatgaccattgtaaggggttcg

SEQ ID NO: 52699 - DNA, 33 bp, Homo sapien
gcagaaaagtaagcctaaaaagagtgaaaacca

SEQ ID NO: 52700 - DNA, 33 bp, Homo sapien
gcagaaaagtaagcctgaaaagagtgaaaacca

SEQ ID NO: 52701 - DNA, 33 bp, Homo sapien
aaaaccagactcaaacggtttccaagtaacaga

SEQ ID NO: 52702 - DNA, 33 bp, Homo sapien
aaaaccagactcaaactgtttccaagtaacaga

SEQ ID NO: 52703 - DNA, 33 bp, Homo sapien
atgattcaatagaaaacgagtgaaagatattga

SEQ ID NO: 52704 - DNA, 33 bp, Homo sapien
atgattcaatagaaaatgagtgaaagatattga

SEQ ID NO: 52705 - DNA, 33 bp, Homo sapien
gccagtaacatcaagacaggatcttccaccagc

SEQ ID NO: 52706 - DNA, 33 bp, Homo sapien
gccagtaacatcaagataggatcttccaccagc

SEQ ID NO: 52707 - DNA, 33 bp, Homo sapien
cagagctctccatatgaactctgggcaagaccc

SEQ ID NO: 52708 - DNA, 33 bp, Homo sapien
cagagctctccatatgtactctgggcaagaccc

SEQ ID NO: 52709 - DNA, 33 bp, Homo sapien
tggcattgtatgtatgcagctcaaattcaaaag

SEQ ID NO: 52710 - DNA, 33 bp, Homo sapien
tggcattgtatgtatgtagctcaaattcaaaag

SEQ ID NO: 52711 - DNA, 33 bp, Homo sapien
acagtgcttggacataacgtgtgttcaacaaat

SEQ ID NO: 52712 - DNA, 33 bp, Homo sapien
acagtgcttggacatagcgtgtgttcaacaaat

SEQ ID NO: 52713 - DNA, 33 bp, Homo sapien
tcagcctgaatcaggacaataacatcatttctt

SEQ ID NO: 52714 - DNA, 33 bp, Homo sapien
tcagcctgaatcaggagaataacatcatttctt

SEQ ID NO: 52715 - DNA, 33 bp, Homo sapien
gccagttagagaaaagacagaacaagaagatga

SEQ ID NO: 52716 - DNA, 33 bp, Homo sapien
gccagttagagaaaagtcagaacaagaagatga

SEQ ID NO: 52717 - DNA, 33 bp, Homo sapien
aggagctgaatcagccaaaactctccctcccca

SEQ ID NO: 52718 - DNA, 33 bp, Homo sapien
aggagctgaatcagccgaaactctccctcccca

SEQ ID NO: 52719 - DNA, 33 bp, Homo sapien
ctgagggaataaagaaaagcgtagcatgcactt

SEQ ID NO: 52720 - DNA, 33 bp, Homo sapien
ctgagggaataaagaagagcgtagcatgcactt

SEQ ID NO: 52721 - DNA, 33 bp, Homo sapien
tgtctgattctgaagacgttgctctttctactt

SEQ ID NO: 52722 - DNA, 33 bp, Homo sapien
tgtctgattctgaagatgttgctctttctactt

SEQ ID NO: 52723 - DNA, 33 bp, Homo sapien
ccccttctcttgctcacgtaattatgtttctat

SEQ ID NO: 52724 - DNA, 33 bp, Homo sapien
ccccttctcttgctcatgtaattatgtttctat

SEQ ID NO: 52725 - DNA, 33 bp, Homo sapien
agggaaatcgagacccactgcattaattcaaca

SEQ ID NO: 52726 - DNA, 33 bp, Homo sapien
agggaaatcgagacccgctgcattaattcaaca

SEQ ID NO: 52727 - DNA, 33 bp, Homo sapien
cctggagggacaggtacgatattgacaggcaga

SEQ ID NO: 52728 - DNA, 33 bp, Homo sapien
cctggagggacaggtaggatattgacaggcaga

SEQ ID NO: 52729 - DNA, 33 bp, Homo sapien
accaaatctagcttaaagagctggctgggctga

SEQ ID NO: 52730 - DNA, 33 bp, Homo sapien
accaaatctagcttaatgagctggctgggctga

SEQ ID NO: 52731 - DNA, 33 bp, Homo sapien
accacaggcaacagacaaggttgaggcagacag

SEQ ID NO: 52732 - DNA, 33 bp, Homo sapien
accacaggcaacagaccaggttgaggcagacag

SEQ ID NO: 52733 - DNA, 33 bp, Homo sapien
actattctaaacaaagcacccatttcatgtcac

SEQ ID NO: 52734 - DNA, 33 bp, Homo sapien
actattctaaacaaagtacccatttcatgtcac

SEQ ID NO: 52735 - DNA, 33 bp, Homo sapien
ggaattggacagtaaccggagaagcagctggat

SEQ ID NO: 52736 - DNA, 33 bp, Homo sapien
ggaattggacagtaactggagaagcagctggat

SEQ ID NO: 52737 - DNA, 33 bp, Homo sapien
gactttggtgaccaatcatccgagagctctgag

SEQ ID NO: 52738 - DNA, 33 bp, Homo sapien
gactttggtgaccaattatccgagagctctgag

SEQ ID NO: 52739 - DNA, 33 bp, Homo sapien
tcataaaaccgactaaaagttggtctgctttgt

SEQ ID NO: 52740 - DNA, 33 bp, Homo sapien
tcataaaaccgactaagagttggtctgctttgt

SEQ ID NO: 52741 - DNA, 33 bp, Homo sapien
ctactccaaaggtcccaagaggagtcttcccta

SEQ ID NO: 52742 - DNA, 33 bp, Homo sapien
ctactccaaaggtcccgagaggagtcttcccta

SEQ ID NO: 52743 - DNA, 33 bp, Homo sapien
tatgtagattagacaaatccatgtgttactaac

SEQ ID NO: 52744 - DNA, 33 bp, Homo sapien
tatgtagattagacaactccatgtgttactaac

SEQ ID NO: 52745 - DNA, 33 bp, Homo sapien
ttagctatacactccactgcaaaactttctaac

SEQ ID NO: 52746 - DNA, 33 bp, Homo sapien
ttagctatacactccattgcaaaactttctaac

SEQ ID NO: 52747 - DNA, 33 bp, Homo sapien
tcttggaatttagctaccatgcttagagaaagc

SEQ ID NO: 52748 - DNA, 33 bp, Homo sapien
tcttggaatttagctatcatgcttagagaaagc

SEQ ID NO: 52749 - DNA, 33 bp, Homo sapien
aattaaaaagattgaccataccaaatgttggtg

SEQ ID NO: 52750 - DNA, 33 bp, Homo sapien
aattaaaaagattgacgataccaaatgttggtg

SEQ ID NO: 52751 - DNA, 33 bp, Homo sapien
aaggaggactgttcagaatggggacaaatatca

SEQ ID NO: 52752 - DNA, 33 bp, Homo sapien
aaggaggactgttcaggatggggacaaatatca

SEQ ID NO: 52753 - DNA, 33 bp, Homo sapien
ttggacaggacttgaccgggcagtttttctgtt

SEQ ID NO: 52754 - DNA, 33 bp, Homo sapien
ttggacaggacttgactgggcagtttttctgtt

SEQ ID NO: 52755 - DNA, 33 bp, Homo sapien
cacttccaccatgttgcattctattggtcagag

SEQ ID NO: 52756 - DNA, 33 bp, Homo sapien
cacttccaccatgttgtattctattggtcagag

SEQ ID NO: 52757 - DNA, 33 bp, Homo sapien
cagtgagctctataaaagtacagattaggtgga

SEQ ID NO: 52758 - DNA, 33 bp, Homo sapien
cagtgagctctataaaggtacagattaggtgga

SEQ ID NO: 52759 - DNA, 33 bp, Homo sapien
ctgggttcttagtgaccgtaagatgaatgcttc

SEQ ID NO: 52760 - DNA, 33 bp, Homo sapien
ctgggttcttagtgacggtaagatgaatgcttc

SEQ ID NO: 52761 - DNA, 33 bp, Homo sapien
tagttggcacttgctaagcactcagtaattact

SEQ ID NO: 52762 - DNA, 33 bp, Homo sapien
tagttggcacttgctaggcactcagtaattact

SEQ ID NO: 52763 - DNA, 33 bp, Homo sapien
aaagcactactctctaccttcccaactcggtct

SEQ ID NO: 52764 - DNA, 33 bp, Homo sapien
aaagcactactctctatcttcccaactcggtct

SEQ ID NO: 52765 - DNA, 33 bp, Homo sapien
gaagatgtctgagtacaaaatggaaaagctggc

SEQ ID NO: 52766 - DNA, 33 bp, Homo sapien
gaagatgtctgagtaccaaatggaaaagctggc

SEQ ID NO: 52767 - DNA, 33 bp, Homo sapien
aaatcattgactctgacagttggttttatgtag

SEQ ID NO: 52768 - DNA, 33 bp, Homo sapien
aaatcattgactctgatagttggttttatgtag

SEQ ID NO: 52769 - DNA, 33 bp, Homo sapien
agccagcctgatgcgaccccataggaaaggagg

SEQ ID NO: 52770 - DNA, 33 bp, Homo sapien
agccagcctgatgcgatcccataggaaaggagg

SEQ ID NO: 52771 - DNA, 33 bp, Homo sapien
atttttctggactcttaaaacttatttcttgtg

SEQ ID NO: 52772 - DNA, 33 bp, Homo sapien
atttttctggactcttgaaacttatttcttgtg

SEQ ID NO: 52773 - DNA, 33 bp, Homo sapien
cgagtgaatttcatgtaaaacctgtattttaag

SEQ ID NO: 52774 - DNA, 33 bp, Homo sapien
cgagtgaatttcatgtgaaacctgtattttaag

SEQ ID NO: 52775 - DNA, 33 bp, Homo sapien
tcccccaaaatacctgccagatgtagtgtaaac

SEQ ID NO: 52776 - DNA, 33 bp, Homo sapien
tcccccaaaatacctggcagatgtagtgtaaac

SEQ ID NO: 52777 - DNA, 33 bp, Homo sapien
agctcagcttgataaacgtttcttgaatgccaa

SEQ ID NO: 52778 - DNA, 33 bp, Homo sapien
agctcagcttgataaatgtttcttgaatgccaa

SEQ ID NO: 52779 - DNA, 33 bp, Homo sapien
ggccgagctgatggaggatctaaaaatggctga

SEQ ID NO: 52780 - DNA, 33 bp, Homo sapien
ggccgagctgatggagtatctaaaaatggctga

SEQ ID NO: 52781 - DNA, 33 bp, Homo sapien
aaccaaacttgcaggaaattggtgtacaaatct

SEQ ID NO: 52782 - DNA, 33 bp, Homo sapien
aaccaaacttgcaggagattggtgtacaaatct

SEQ ID NO: 52783 - DNA, 33 bp, Homo sapien
aaagggttgagaagcacggtcttacactagctt

SEQ ID NO: 52784 - DNA, 33 bp, Homo sapien
aaagggttgagaagcatggtcttacactagctt

SEQ ID NO: 52785 - DNA, 33 bp, Homo sapien
ctcataatattgaatcaccaatttaactgcagc

SEQ ID NO: 52786 - DNA, 33 bp, Homo sapien
ctcataatattgaatcgccaatttaactgcagc

SEQ ID NO: 52787 - DNA, 33 bp, Homo sapien
ccaaggtgaccaggtacgcatgacccttggact

SEQ ID NO: 52788 - DNA, 33 bp, Homo sapien
ccaaggtgaccaggtatgcatgacccttggact

SEQ ID NO: 52789 - DNA, 33 bp, Homo sapien
cataaaatacagatgtaaaaacaaagatgctca

SEQ ID NO: 52790 - DNA, 33 bp, Homo sapien
cataaaatacagatgtgaaaacaaagatgctca

SEQ ID NO: 52791 - DNA, 33 bp, Homo sapien
actgtgatgcaaaggaaaagggagagatgctcc

SEQ ID NO: 52792 - DNA, 33 bp, Homo sapien
actgtgatgcaaaggagaagggagagatgctcc

SEQ ID NO: 52793 - DNA, 33 bp, Homo sapien
gaactcttgggaaacacgaggcagcactacagg

SEQ ID NO: 52794 - DNA, 33 bp, Homo sapien
gaactcttgggaaacatgaggcagcactacagg

SEQ ID NO: 52795 - DNA, 33 bp, Homo sapien
tagataagagcccatcactaaccttgtgtacat

SEQ ID NO: 52796 - DNA, 33 bp, Homo sapien
tagataagagcccatcgctaaccttgtgtacat

SEQ ID NO: 52797 - DNA, 33 bp, Homo sapien
gggagatgaaagtgaggattaccattaagccat

SEQ ID NO: 52798 - DNA, 33 bp, Homo sapien
gggagatgaaagtgagtattaccattaagccat

SEQ ID NO: 52799 - DNA, 33 bp, Homo sapien
aacctaaggaattgtccctggttctgctctgct

SEQ ID NO: 52800 - DNA, 33 bp, Homo sapien
aacctaaggaattgtctctggttctgctctgct

SEQ ID NO: 52801 - DNA, 33 bp, Homo sapien
gcgttcacacccaaaccgtgaagaaggcggccc

SEQ ID NO: 52802 - DNA, 33 bp, Homo sapien
gcgttcacacccaaactgtgaagaaggcggccc

SEQ ID NO: 52803 - DNA, 33 bp, Homo sapien
cctcactattctttgacataggaaacaacaagg

SEQ ID NO: 52804 - DNA, 33 bp, Homo sapien
cctcactattctttgagataggaaacaacaagg

SEQ ID NO: 52805 - DNA, 33 bp, Homo sapien
cctccaagtacttttcactgatcttatctgctc

SEQ ID NO: 52806 - DNA, 33 bp, Homo sapien
cctccaagtacttttcgctgatcttatctgctc

SEQ ID NO: 52807 - DNA, 33 bp, Homo sapien
tgcaatggcttttctccagacagttcttgacct

SEQ ID NO: 52808 - DNA, 33 bp, Homo sapien
tgcaatggcttttctcgagacagttcttgacct

SEQ ID NO: 52809 - DNA, 33 bp, Homo sapien
tcatacaacggcgatacgtagcctgggtgtcac

SEQ ID NO: 52810 - DNA, 33 bp, Homo sapien
tcatacaacggcgatatgtagcctgggtgtcac

SEQ ID NO: 52811 - DNA, 33 bp, Homo sapien
gcctgatcttgtccagaaaatgctaaattttaa

SEQ ID NO: 52812 - DNA, 33 bp, Homo sapien
gcctgatcttgtccagcaaatgctaaattttaa

SEQ ID NO: 52813 - DNA, 33 bp, Homo sapien
agaggatgagaataaaaccagcgataatgggaa

SEQ ID NO: 52814 - DNA, 33 bp, Homo sapien
agaggatgagaataaatccagcgataatgggaa

SEQ ID NO: 52815 - DNA, 33 bp, Homo sapien
aatctggagctttttacggtgtctttagaaagg

SEQ ID NO: 52816 - DNA, 33 bp, Homo sapien
aatctggagctttttatggtgtctttagaaagg

SEQ ID NO: 52817 - DNA, 33 bp, Homo sapien
caaggaagtccaatgacagggaaactccccagg

SEQ ID NO: 52818 - DNA, 33 bp, Homo sapien
caaggaagtccaatgagagggaaactccccagg

SEQ ID NO: 52819 - DNA, 33 bp, Homo sapien
accactgggacgtcagaaggtatagagtttaat

SEQ ID NO: 52820 - DNA, 33 bp, Homo sapien
accactgggacgtcaggaggtatagagtttaat

SEQ ID NO: 52821 - DNA, 33 bp, Homo sapien
ttggatagtcagaggacagacagtcccattcca

SEQ ID NO: 52822 - DNA, 33 bp, Homo sapien
ttggatagtcagaggatagacagtcccattcca

SEQ ID NO: 52823 - DNA, 33 bp, Homo sapien
gagaaggaaaaggtgacggggcctcactaaggc

SEQ ID NO: 52824 - DNA, 33 bp, Homo sapien
gagaaggaaaaggtgatggggcctcactaaggc

SEQ ID NO: 52825 - DNA, 33 bp, Homo sapien
ttctgtggagaaagacaaagaatcagtccagtt

SEQ ID NO: 52826 - DNA, 33 bp, Homo sapien
ttctgtggagaaagacgaagaatcagtccagtt

SEQ ID NO: 52827 - DNA, 33 bp, Homo sapien
tggtttctgtaagatagccatgttttcttatta

SEQ ID NO: 52828 - DNA, 33 bp, Homo sapien
tggtttctgtaagatatccatgttttcttatta

SEQ ID NO: 52829 - DNA, 33 bp, Homo sapien
cattttaattagcaaccccactgaattttctaa

SEQ ID NO: 52830 - DNA, 33 bp, Homo sapien
cattttaattagcaactccactgaattttctaa

SEQ ID NO: 52831 - DNA, 33 bp, Homo sapien
agtcctatgctagcaacgtcccaaatgaattac

SEQ ID NO: 52832 - DNA, 33 bp, Homo sapien
agtcctatgctagcaatgtcccaaatgaattac

SEQ ID NO: 52833 - DNA, 33 bp, Homo sapien
atatatttaagtgcaacagcaaactgcagaacc

SEQ ID NO: 52834 - DNA, 33 bp, Homo sapien
atatatttaagtgcaatagcaaactgcagaacc

SEQ ID NO: 52835 - DNA, 33 bp, Homo sapien
tttctcatcaggagagaaataaattcaaatact

SEQ ID NO: 52836 - DNA, 33 bp, Homo sapien
tttctcatcaggagaggaataaattcaaatact

SEQ ID NO: 52837 - DNA, 33 bp, Homo sapien
tgcagagtctatgcaaattagtataaaatggta

SEQ ID NO: 52838 - DNA, 33 bp, Homo sapien
tgcagagtctatgcaacttagtataaaatggta

SEQ ID NO: 52839 - DNA, 33 bp, Homo sapien
aaagaatggactagaagagataagagacagcaa

SEQ ID NO: 52840 - DNA, 33 bp, Homo sapien
aaagaatggactagaatagataagagacagcaa

SEQ ID NO: 52841 - DNA, 33 bp, Homo sapien
acaattataggtggcaaaatagcaagatacaag

SEQ ID NO: 52842 - DNA, 33 bp, Homo sapien
acaattataggtggcataatagcaagatacaag

SEQ ID NO: 52843 - DNA, 33 bp, Homo sapien
acaacaaataagagaaagaggcttcaaaacaaa

SEQ ID NO: 52844 - DNA, 33 bp, Homo sapien
acaacaaataagagaaggaggcttcaaaacaaa

SEQ ID NO: 52845 - DNA, 33 bp, Homo sapien
ctgtcaagtagtttcccgcgtatttctaggaaa

SEQ ID NO: 52846 - DNA, 33 bp, Homo sapien
ctgtcaagtagtttcctgcgtatttctaggaaa

SEQ ID NO: 52847 - DNA, 33 bp, Homo sapien
aaattgatctactaatcaggctaagaaatgcaa

SEQ ID NO: 52848 - DNA, 33 bp, Homo sapien
aaattgatctactaattaggctaagaaatgcaa

SEQ ID NO: 52849 - DNA, 33 bp, Homo sapien
tcccaacatccctacacctgcttatggtaatgc

SEQ ID NO: 52850 - DNA, 33 bp, Homo sapien
tcccaacatccctacatctgcttatggtaatgc

SEQ ID NO: 52851 - DNA, 33 bp, Homo sapien
agataaataaggacaaaagttttcaagtcatga

SEQ ID NO: 52852 - DNA, 33 bp, Homo sapien
agataaataaggacaagagttttcaagtcatga

SEQ ID NO: 52853 - DNA, 33 bp, Homo sapien
gtacaacaactggcacaaagacttgataaatgt

SEQ ID NO: 52854 - DNA, 33 bp, Homo sapien
gtacaacaactggcacgaagacttgataaatgt

SEQ ID NO: 52855 - DNA, 33 bp, Homo sapien
agatgctgactataaacgtttttgaagttggtt

SEQ ID NO: 52856 - DNA, 33 bp, Homo sapien
agatgctgactataaatgtttttgaagttggtt

SEQ ID NO: 52857 - DNA, 33 bp, Homo sapien
agcaagtatataatagaatatgcactatgactc

SEQ ID NO: 52858 - DNA, 33 bp, Homo sapien
agcaagtatataataggatatgcactatgactc

SEQ ID NO: 52859 - DNA, 33 bp, Homo sapien
ttaaatattctctttccacgtgtgcctgcccca

SEQ ID NO: 52860 - DNA, 33 bp, Homo sapien
ttaaatattctctttcgacgtgtgcctgcccca

SEQ ID NO: 52861 - DNA, 33 bp, Homo sapien
gttttcagagtttcaaagccgcaattttgagtt

SEQ ID NO: 52862 - DNA, 33 bp, Homo sapien
gttttcagagtttcaaggccgcaattttgagtt

SEQ ID NO: 52863 - DNA, 33 bp, Homo sapien
ctatgtgtctataacacgaaacacattttccaa

SEQ ID NO: 52864 - DNA, 33 bp, Homo sapien
ctatgtgtctataacaggaaacacattttccaa

SEQ ID NO: 52865 - DNA, 33 bp, Homo sapien
aactgaggttaagtgactaactgaaagtcatgc

SEQ ID NO: 52866 - DNA, 33 bp, Homo sapien
aactgaggttaagtgagtaactgaaagtcatgc

SEQ ID NO: 52867 - DNA, 33 bp, Homo sapien
gctggtcatagatacacgagtaagcctggttaa

SEQ ID NO: 52868 - DNA, 33 bp, Homo sapien
gctggtcatagatacatgagtaagcctggttaa

SEQ ID NO: 52869 - DNA, 33 bp, Homo sapien
agaaaagcatcctaggcaaacgagacagcaagt

SEQ ID NO: 52870 - DNA, 33 bp, Homo sapien
agaaaagcatcctaggtaaacgagacagcaagt

SEQ ID NO: 52871 - DNA, 33 bp, Homo sapien
gttcagcaaatagatacgttttgaagaatggtt

SEQ ID NO: 52872 - DNA, 33 bp, Homo sapien
gttcagcaaatagatatgttttgaagaatggtt

SEQ ID NO: 52873 - DNA, 33 bp, Homo sapien
agttaggacagacatacagaatctgtaatttga

SEQ ID NO: 52874 - DNA, 33 bp, Homo sapien
agttaggacagacatatagaatctgtaatttga

SEQ ID NO: 52875 - DNA, 33 bp, Homo sapien
cttcccactgtagcaaagtgagcttttttttct

SEQ ID NO: 52876 - DNA, 33 bp, Homo sapien
cttcccactgtagcaatgtgagcttttttttct

SEQ ID NO: 52877 - DNA, 33 bp, Homo sapien
tgtctatcagacaaacgatgcagaagttaggaa

SEQ ID NO: 52878 - DNA, 33 bp, Homo sapien
tgtctatcagacaaactatgcagaagttaggaa

SEQ ID NO: 52879 - DNA, 33 bp, Homo sapien
tcccatactacaaggaactcacagttaggtttg

SEQ ID NO: 52880 - DNA, 33 bp, Homo sapien
tcccatactacaaggagctcacagttaggtttg

SEQ ID NO: 52881 - DNA, 33 bp, Homo sapien
agccacatatcaagtaagctgaaaaatagaaga

SEQ ID NO: 52882 - DNA, 33 bp, Homo sapien
agccacatatcaagtaggctgaaaaatagaaga

SEQ ID NO: 52883 - DNA, 33 bp, Homo sapien
cggcttctgaatgcaccgagagggactcagcat

SEQ ID NO: 52884 - DNA, 33 bp, Homo sapien
cggcttctgaatgcactgagagggactcagcat

SEQ ID NO: 52885 - DNA, 33 bp, Homo sapien
ccttataattaagcgaacttttatttcagaatc

SEQ ID NO: 52886 - DNA, 33 bp, Homo sapien
ccttataattaagcgaccttttatttcagaatc

SEQ ID NO: 52887 - DNA, 33 bp, Homo sapien
atgccacttttctgatcaaatctgtggtttagt

SEQ ID NO: 52888 - DNA, 33 bp, Homo sapien
atgccacttttctgattaaatctgtggtttagt

SEQ ID NO: 52889 - DNA, 33 bp, Homo sapien
ttaatgataggaaagaagtatctaggtataatg

SEQ ID NO: 52890 - DNA, 33 bp, Homo sapien
ttaatgataggaaagaggtatctaggtataatg

SEQ ID NO: 52891 - DNA, 33 bp, Homo sapien
agattttgcgcttgcaagagacctgtagaagaa

SEQ ID NO: 52892 - DNA, 33 bp, Homo sapien
agattttgcgcttgcaggagacctgtagaagaa

SEQ ID NO: 52893 - DNA, 33 bp, Homo sapien
gtattcagtttttcgtgaagtatgatgttggtt

SEQ ID NO: 52894 - DNA, 33 bp, Homo sapien
gtattcagtttttcgttaagtatgatgttggtt

SEQ ID NO: 52895 - DNA, 33 bp, Homo sapien
gaagaaaattgaaggactactgatgtcaagaat

SEQ ID NO: 52896 - DNA, 33 bp, Homo sapien
gaagaaaattgaaggattactgatgtcaagaat

SEQ ID NO: 52897 - DNA, 33 bp, Homo sapien
ctacaatttaaccaaccaatctactagagtgtc

SEQ ID NO: 52898 - DNA, 33 bp, Homo sapien
ctacaatttaaccaactaatctactagagtgtc

SEQ ID NO: 52899 - DNA, 33 bp, Homo sapien
gttcttgatctgttaccgataaaactataccag

SEQ ID NO: 52900 - DNA, 33 bp, Homo sapien
gttcttgatctgttactgataaaactataccag

SEQ ID NO: 52901 - DNA, 33 bp, Homo sapien
aaaagttaaatttgagcatcttagcttagaaga

SEQ ID NO: 52902 - DNA, 33 bp, Homo sapien
aaaagttaaatttgagtatcttagcttagaaga

SEQ ID NO: 52903 - DNA, 33 bp, Homo sapien
caggaggtctcactccacaggaaacgctctcct

SEQ ID NO: 52904 - DNA, 33 bp, Homo sapien
caggaggtctcactccgcaggaaacgctctcct

SEQ ID NO: 52905 - DNA, 33 bp, Homo sapien
agcactgtaaggcacaacatttgaggagctgag

SEQ ID NO: 52906 - DNA, 33 bp, Homo sapien
agcactgtaaggcacagcatttgaggagctgag

SEQ ID NO: 52907 - DNA, 33 bp, Homo sapien
catcctgagatgcacacacggtgacgccatctg

SEQ ID NO: 52908 - DNA, 33 bp, Homo sapien
catcctgagatgcacatacggtgacgccatctg

SEQ ID NO: 52909 - DNA, 33 bp, Homo sapien
ttcacgtctggatgaacggtactcctggcctga

SEQ ID NO: 52910 - DNA, 33 bp, Homo sapien
ttcacgtctggatgaatggtactcctggcctga

SEQ ID NO: 52911 - DNA, 33 bp, Homo sapien
agtgtttttatttggaacatcattgcactgtga

SEQ ID NO: 52912 - DNA, 33 bp, Homo sapien
agtgtttttatttggagcatcattgcactgtga

SEQ ID NO: 52913 - DNA, 33 bp, Homo sapien
caattcgcagagacagaaaaacagattacttac

SEQ ID NO: 52914 - DNA, 33 bp, Homo sapien
caattcgcagagacaggaaaacagattacttac

SEQ ID NO: 52915 - DNA, 33 bp, Homo sapien
caagccaaggagtggcacctcacgagtggtcat

SEQ ID NO: 52916 - DNA, 33 bp, Homo sapien
caagccaaggagtggcgcctcacgagtggtcat

SEQ ID NO: 52917 - DNA, 33 bp, Homo sapien
ggtatgatgtccccgaaagagtacacattaaca

SEQ ID NO: 52918 - DNA, 33 bp, Homo sapien
ggtatgatgtccccgagagagtacacattaaca

SEQ ID NO: 52919 - DNA, 33 bp, Homo sapien
tcaggagggagcacacccttgtctgtccatctg

SEQ ID NO: 52920 - DNA, 33 bp, Homo sapien
tcaggagggagcacacgcttgtctgtccatctg

SEQ ID NO: 52921 - DNA, 33 bp, Homo sapien
cagataattgagagaaagattgattgattagtg

SEQ ID NO: 52922 - DNA, 33 bp, Homo sapien
cagataattgagagaatgattgattgattagtg

SEQ ID NO: 52923 - DNA, 33 bp, Homo sapien
gcacagatctcagtatcactaccaatcacagca

SEQ ID NO: 52924 - DNA, 33 bp, Homo sapien
gcacagatctcagtattactaccaatcacagca

SEQ ID NO: 52925 - DNA, 33 bp, Homo sapien
aagaatgcagttgtgccaaattatttggtgcag

SEQ ID NO: 52926 - DNA, 33 bp, Homo sapien
aagaatgcagttgtgctaaattatttggtgcag

SEQ ID NO: 52927 - DNA, 33 bp, Homo sapien
tacatttcttgaggacagatgcagtaagttcat

SEQ ID NO: 52928 - DNA, 33 bp, Homo sapien
tacatttcttgaggaccgatgcagtaagttcat

SEQ ID NO: 52929 - DNA, 33 bp, Homo sapien
ccaactgccctggcgtcaaccacctagtaagcc

SEQ ID NO: 52930 - DNA, 33 bp, Homo sapien
ccaactgccctggcgttaaccacctagtaagcc

SEQ ID NO: 52931 - DNA, 33 bp, Homo sapien
ctatggagctgccaagaaggttgaacaaccagg

SEQ ID NO: 52932 - DNA, 33 bp, Homo sapien
ctatggagctgccaaggaggttgaacaaccagg

SEQ ID NO: 52933 - DNA, 33 bp, Homo sapien
agacactgaggggaaccggatattgaaggttga

SEQ ID NO: 52934 - DNA, 33 bp, Homo sapien
agacactgaggggaactggatattgaaggttga

SEQ ID NO: 52935 - DNA, 33 bp, Homo sapien
cgtgcgtgtttttatgccacgtacgtgagtatg

SEQ ID NO: 52936 - DNA, 33 bp, Homo sapien
cgtgcgtgtttttatgtcacgtacgtgagtatg

SEQ ID NO: 52937 - DNA, 33 bp, Homo sapien
tgagtatgttcttgtaactcagacagctccgaa

SEQ ID NO: 52938 - DNA, 33 bp, Homo sapien
tgagtatgttcttgtagctcagacagctccgaa

SEQ ID NO: 52939 - DNA, 33 bp, Homo sapien
aagtgttcccacatcaccttctttgaaaatatt

SEQ ID NO: 52940 - DNA, 33 bp, Homo sapien
aagtgttcccacatcatcttctttgaaaatatt

SEQ ID NO: 52941 - DNA, 33 bp, Homo sapien
cccagggtccccaagaccaagctatggcaccat

SEQ ID NO: 52942 - DNA, 33 bp, Homo sapien
cccagggtccccaagatcaagctatggcaccat

SEQ ID NO: 52943 - DNA, 33 bp, Homo sapien
gttttcgattactgtaaattttacaaaaatgaa

SEQ ID NO: 52944 - DNA, 33 bp, Homo sapien
gttttcgattactgtacattttacaaaaatgaa

SEQ ID NO: 52945 - DNA, 33 bp, Homo sapien
aataaggtgacattcaaagggtgttaggacttc

SEQ ID NO: 52946 - DNA, 33 bp, Homo sapien
aataaggtgacattcagagggtgttaggacttc

SEQ ID NO: 52947 - DNA, 33 bp, Homo sapien
taggcccgatagtgaaaaagcagcaaagctctg

SEQ ID NO: 52948 - DNA, 33 bp, Homo sapien
taggcccgatagtgaacaagcagcaaagctctg

SEQ ID NO: 52949 - DNA, 33 bp, Homo sapien
tattggctgtctactaggtattggacacattac

SEQ ID NO: 52950 - DNA, 33 bp, Homo sapien
tattggctgtctactatgtattggacacattac

SEQ ID NO: 52951 - DNA, 33 bp, Homo sapien
ttgctttgatcctaataatctgggcatttccaa

SEQ ID NO: 52952 - DNA, 33 bp, Homo sapien
ttgctttgatcctaatcatctgggcatttccaa

SEQ ID NO: 52953 - DNA, 33 bp, Homo sapien
ccggaggaaaggccgcacatagaatttcagtca

SEQ ID NO: 52954 - DNA, 33 bp, Homo sapien
ccggaggaaaggccgctcatagaatttcagtca

SEQ ID NO: 52955 - DNA, 33 bp, Homo sapien
aggaaattgccccagaaattctcttttttctct

SEQ ID NO: 52956 - DNA, 33 bp, Homo sapien
aggaaattgccccagatattctcttttttctct

SEQ ID NO: 52957 - DNA, 33 bp, Homo sapien
agtgtagggccaagcacaatataagcagccatg

SEQ ID NO: 52958 - DNA, 33 bp, Homo sapien
agtgtagggccaagcagaatataagcagccatg

SEQ ID NO: 52959 - DNA, 33 bp, Homo sapien
cttcagtaaattttaacggagcaccttttatgt

SEQ ID NO: 52960 - DNA, 33 bp, Homo sapien
cttcagtaaattttaatggagcaccttttatgt

SEQ ID NO: 52961 - DNA, 33 bp, Homo sapien
tccagctggttccagaagactaagtcagagaga

SEQ ID NO: 52962 - DNA, 33 bp, Homo sapien
tccagctggttccagatgactaagtcagagaga

SEQ ID NO: 52963 - DNA, 33 bp, Homo sapien
cttctcacttgttttaaaggtgcatcgtataga

SEQ ID NO: 52964 - DNA, 33 bp, Homo sapien
cttctcacttgttttagaggtgcatcgtataga

SEQ ID NO: 52965 - DNA, 33 bp, Homo sapien
ttttacgtattagctccaactttttcctacaaa

SEQ ID NO: 52966 - DNA, 33 bp, Homo sapien
ttttacgtattagctcgaactttttcctacaaa

SEQ ID NO: 52967 - DNA, 33 bp, Homo sapien
tgaacctggactagaacacagaataaactatga

SEQ ID NO: 52968 - DNA, 33 bp, Homo sapien
tgaacctggactagaagacagaataaactatga

SEQ ID NO: 52969 - DNA, 33 bp, Homo sapien
tccccacctaagtcgaaacagtattatcaaaac

SEQ ID NO: 52970 - DNA, 33 bp, Homo sapien
tccccacctaagtcgagacagtattatcaaaac

SEQ ID NO: 52971 - DNA, 33 bp, Homo sapien
ctcagaacaaaagaaactcataaaactcctgaa

SEQ ID NO: 52972 - DNA, 33 bp, Homo sapien
ctcagaacaaaagaaagtcataaaactcctgaa

SEQ ID NO: 52973 - DNA, 33 bp, Homo sapien
tggagcttcctactcacgttgatttatgtctca

SEQ ID NO: 52974 - DNA, 33 bp, Homo sapien
tggagcttcctactcatgttgatttatgtctca

SEQ ID NO: 52975 - DNA, 33 bp, Homo sapien
aaatcttgccaagatacacaaacaatgatgaaa

SEQ ID NO: 52976 - DNA, 33 bp, Homo sapien
aaatcttgccaagatagacaaacaatgatgaaa

SEQ ID NO: 52977 - DNA, 33 bp, Homo sapien
ggaaacatctttggaactgatgggacaaaactt

SEQ ID NO: 52978 - DNA, 33 bp, Homo sapien
ggaaacatctttggaattgatgggacaaaactt

SEQ ID NO: 52979 - DNA, 33 bp, Homo sapien
aagtatgattctgacacactgataaacgctact

SEQ ID NO: 52980 - DNA, 33 bp, Homo sapien
aagtatgattctgacagactgataaacgctact

SEQ ID NO: 52981 - DNA, 33 bp, Homo sapien
cctctggcgcacatccagatatttcctagcaaa

SEQ ID NO: 52982 - DNA, 33 bp, Homo sapien
cctctggcgcacatccggatatttcctagcaaa

SEQ ID NO: 52983 - DNA, 33 bp, Homo sapien
ctgtttcaggagattacggtgatgataactaag

SEQ ID NO: 52984 - DNA, 33 bp, Homo sapien
ctgtttcaggagattatggtgatgataactaag

SEQ ID NO: 52985 - DNA, 33 bp, Homo sapien
attccctcatttgaacccttagctaactccaaa

SEQ ID NO: 52986 - DNA, 33 bp, Homo sapien
attccctcatttgaacgcttagctaactccaaa

SEQ ID NO: 52987 - DNA, 33 bp, Homo sapien
gcagtgccctcttttagctaaggcagatacacc

SEQ ID NO: 52988 - DNA, 33 bp, Homo sapien
gcagtgccctcttttatctaaggcagatacacc

SEQ ID NO: 52989 - DNA, 33 bp, Homo sapien
cacaaagatagatactcaggtggcgtgcttaaa

SEQ ID NO: 52990 - DNA, 33 bp, Homo sapien
cacaaagatagatactgaggtggcgtgcttaaa

SEQ ID NO: 52991 - DNA, 33 bp, Homo sapien
gttgtctatcctgtccaccttcgtattcccaat

SEQ ID NO: 52992 - DNA, 33 bp, Homo sapien
gttgtctatcctgtccgccttcgtattcccaat

SEQ ID NO: 52993 - DNA, 33 bp, Homo sapien
aatcagcataagctaacaaccaggcgctccagc

SEQ ID NO: 52994 - DNA, 33 bp, Homo sapien
aatcagcataagctaataaccaggcgctccagc

SEQ ID NO: 52995 - DNA, 33 bp, Homo sapien
gcttaattaattcacaaataagcaaagagacaa

SEQ ID NO: 52996 - DNA, 33 bp, Homo sapien
gcttaattaattcacacataagcaaagagacaa

SEQ ID NO: 52997 - DNA, 33 bp, Homo sapien
ttgcactaatgacatcaaattatactttgtctc

SEQ ID NO: 52998 - DNA, 33 bp, Homo sapien
ttgcactaatgacatcgaattatactttgtctc

SEQ ID NO: 52999 - DNA, 33 bp, Homo sapien
tggcatgatatatttcccctacccagctgaaca

SEQ ID NO: 53000 - DNA, 33 bp, Homo sapien
tggcatgatatatttctcctacccagctgaaca

SEQ ID NO: 53001 - DNA, 33 bp, Homo sapien
atcttcaacagttgagaaggggtttggaaagaa

SEQ ID NO: 53002 - DNA, 33 bp, Homo sapien
atcttcaacagttgaggaggggtttggaaagaa

SEQ ID NO: 53003 - DNA, 33 bp, Homo sapien
cacatcaactctacgacataataccacaggtcc

SEQ ID NO: 53004 - DNA, 33 bp, Homo sapien
cacatcaactctacgatataataccacaggtcc

SEQ ID NO: 53005 - DNA, 33 bp, Homo sapien
gtgaaacataggaacacctgcggagcacaggat

SEQ ID NO: 53006 - DNA, 33 bp, Homo sapien
gtgaaacataggaacatctgcggagcacaggat

SEQ ID NO: 53007 - DNA, 33 bp, Homo sapien
caccaactcttggagaagcaggaaacatggcaa

SEQ ID NO: 53008 - DNA, 33 bp, Homo sapien
caccaactcttggagaggcaggaaacatggcaa

SEQ ID NO: 53009 - DNA, 33 bp, Homo sapien
atgaagtattgagagcacttattgagggttaaa

SEQ ID NO: 53010 - DNA, 33 bp, Homo sapien
atgaagtattgagagcgcttattgagggttaaa

SEQ ID NO: 53011 - DNA, 33 bp, Homo sapien
ctatggtaacgaatagcccttaaatctcagtga

SEQ ID NO: 53012 - DNA, 33 bp, Homo sapien
ctatggtaacgaatagtccttaaatctcagtga

SEQ ID NO: 53013 - DNA, 33 bp, Homo sapien
cctcaaacttctatgcacaatctgggaggaggg

SEQ ID NO: 53014 - DNA, 33 bp, Homo sapien
cctcaaacttctatgcgcaatctgggaggaggg

SEQ ID NO: 53015 - DNA, 33 bp, Homo sapien
atcacagaacagcacacatatattgtatggttt

SEQ ID NO: 53016 - DNA, 33 bp, Homo sapien
atcacagaacagcacatatatattgtatggttt

SEQ ID NO: 53017 - DNA, 33 bp, Homo sapien
tttgaaatgagaatcaaggtttatgtccagtcc

SEQ ID NO: 53018 - DNA, 33 bp, Homo sapien
tttgaaatgagaatcagggtttatgtccagtcc

SEQ ID NO: 53019 - DNA, 33 bp, Homo sapien
ggatccaagtgcagacccaaagcagaactcata

SEQ ID NO: 53020 - DNA, 33 bp, Homo sapien
ggatccaagtgcagactcaaagcagaactcata

SEQ ID NO: 53021 - DNA, 33 bp, Homo sapien
gaaagcccttagaggagattccgtttcagaccc

SEQ ID NO: 53022 - DNA, 33 bp, Homo sapien
gaaagcccttagaggatattccgtttcagaccc

SEQ ID NO: 53023 - DNA, 33 bp, Homo sapien
actccttcagcagatacaaagagaaagattttc

SEQ ID NO: 53024 - DNA, 33 bp, Homo sapien
actccttcagcagatagaaagagaaagattttc

SEQ ID NO: 53025 - DNA, 33 bp, Homo sapien
tgtattttatctggcaaccttatctgatgactc

SEQ ID NO: 53026 - DNA, 33 bp, Homo sapien
tgtattttatctggcagccttatctgatgactc

SEQ ID NO: 53027 - DNA, 33 bp, Homo sapien
cctaaatgctatggtaaaaaaggaagatggcct

SEQ ID NO: 53028 - DNA, 33 bp, Homo sapien
cctaaatgctatggtagaaaaggaagatggcct

SEQ ID NO: 53029 - DNA, 33 bp, Homo sapien
ttgacatttggtttagccagactttgtcatttc

SEQ ID NO: 53030 - DNA, 33 bp, Homo sapien
ttgacatttggtttagtcagactttgtcatttc

SEQ ID NO: 53031 - DNA, 33 bp, Homo sapien
gtttagatggtactggacataaattggtttata

SEQ ID NO: 53032 - DNA, 33 bp, Homo sapien
gtttagatggtactggtcataaattggtttata

SEQ ID NO: 53033 - DNA, 33 bp, Homo sapien
gtcctcctgttgaaacgcctccttcctccaatc

SEQ ID NO: 53034 - DNA, 33 bp, Homo sapien
gtcctcctgttgaaactcctccttcctccaatc

SEQ ID NO: 53035 - DNA, 33 bp, Homo sapien
ctttctgatttcaataacaaatgcacatgcttc

SEQ ID NO: 53036 - DNA, 33 bp, Homo sapien
ctttctgatttcaatagcaaatgcacatgcttc

SEQ ID NO: 53037 - DNA, 33 bp, Homo sapien
ttgacattgccaactaagttttatcatagtatc

SEQ ID NO: 53038 - DNA, 33 bp, Homo sapien
ttgacattgccaactaggttttatcatagtatc

SEQ ID NO: 53039 - DNA, 33 bp, Homo sapien
atctgcaatgtggaaccgtagcaggagctccag

SEQ ID NO: 53040 - DNA, 33 bp, Homo sapien
atctgcaatgtggaactgtagcaggagctccag

SEQ ID NO: 53041 - DNA, 33 bp, Homo sapien
aaacaattactcaagaaacaactgggacaggac

SEQ ID NO: 53042 - DNA, 33 bp, Homo sapien
aaacaattactcaagagacaactgggacaggac

SEQ ID NO: 53043 - DNA, 33 bp, Homo sapien
gagtggaaataccatacagaagacttggatatg

SEQ ID NO: 53044 - DNA, 33 bp, Homo sapien
gagtggaaataccatatagaagacttggatatg

SEQ ID NO: 53045 - DNA, 33 bp, Homo sapien
gtttatagatgaggaaagctaagctcagagaga

SEQ ID NO: 53046 - DNA, 33 bp, Homo sapien
gtttatagatgaggaacgctaagctcagagaga

SEQ ID NO: 53047 - DNA, 33 bp, Homo sapien
cctcctgctatggtcaataccgcactctggcac

SEQ ID NO: 53048 - DNA, 33 bp, Homo sapien
cctcctgctatggtcagtaccgcactctggcac

SEQ ID NO: 53049 - DNA, 33 bp, Homo sapien
catatggctgttggaaaagtttagtttattcat

SEQ ID NO: 53050 - DNA, 33 bp, Homo sapien
catatggctgttggaagagtttagtttattcat

SEQ ID NO: 53051 - DNA, 33 bp, Homo sapien
ctgcccctatggttaagtggagccatgtggata

SEQ ID NO: 53052 - DNA, 33 bp, Homo sapien
ctgcccctatggttaattggagccatgtggata

SEQ ID NO: 53053 - DNA, 33 bp, Homo sapien
gagtgcattccaatcaaaaggcgtagacaattc

SEQ ID NO: 53054 - DNA, 33 bp, Homo sapien
gagtgcattccaatcacaaggcgtagacaattc

SEQ ID NO: 53055 - DNA, 33 bp, Homo sapien
gaacagatacgggaaactactttgacaataaag

SEQ ID NO: 53056 - DNA, 33 bp, Homo sapien
gaacagatacgggaaagtactttgacaataaag

SEQ ID NO: 53057 - DNA, 33 bp, Homo sapien
gtcttccactctagtcacttagggcactcacag

SEQ ID NO: 53058 - DNA, 33 bp, Homo sapien
gtcttccactctagtcgcttagggcactcacag

SEQ ID NO: 53059 - DNA, 33 bp, Homo sapien
ctcctagatggaaaacacagtcattctgatcac

SEQ ID NO: 53060 - DNA, 33 bp, Homo sapien
ctcctagatggaaaacgcagtcattctgatcac

SEQ ID NO: 53061 - DNA, 33 bp, Homo sapien
ctggaggtgcattcgacgggcaaaaaaggtact

SEQ ID NO: 53062 - DNA, 33 bp, Homo sapien
ctggaggtgcattcgatgggcaaaaaaggtact

SEQ ID NO: 53063 - DNA, 33 bp, Homo sapien
taacagcaaatcaatacaaattcacaaagactg

SEQ ID NO: 53064 - DNA, 33 bp, Homo sapien
taacagcaaatcaatagaaattcacaaagactg

SEQ ID NO: 53065 - DNA, 33 bp, Homo sapien
gacataaaagtgaaaaattagaagccatctaaa

SEQ ID NO: 53066 - DNA, 33 bp, Homo sapien
gacataaaagtgaaaacttagaagccatctaaa

SEQ ID NO: 53067 - DNA, 33 bp, Homo sapien
aggcagatactgagaccggaccagagatgtgga

SEQ ID NO: 53068 - DNA, 33 bp, Homo sapien
aggcagatactgagactggaccagagatgtgga

SEQ ID NO: 53069 - DNA, 33 bp, Homo sapien
tcaacatctgtaaaatcaggtgggcaatacctg

SEQ ID NO: 53070 - DNA, 33 bp, Homo sapien
tcaacatctgtaaaatgaggtgggcaatacctg

SEQ ID NO: 53071 - DNA, 33 bp, Homo sapien
gaaaggtagagaaattcaaagatgtggcttgtc

SEQ ID NO: 53072 - DNA, 33 bp, Homo sapien
gaaaggtagagaaattgaaagatgtggcttgtc

SEQ ID NO: 53073 - DNA, 33 bp, Homo sapien
taaagtttcccatagacatcatgcccttccatg

SEQ ID NO: 53074 - DNA, 33 bp, Homo sapien
taaagtttcccatagatatcatgcccttccatg

SEQ ID NO: 53075 - DNA, 33 bp, Homo sapien
tcaagactctgcgtaaacatcacttcctctgtg

SEQ ID NO: 53076 - DNA, 33 bp, Homo sapien
tcaagactctgcgtaagcatcacttcctctgtg

SEQ ID NO: 53077 - DNA, 33 bp, Homo sapien
atggaagctcaggagaaggggtagttaacctgc

SEQ ID NO: 53078 - DNA, 33 bp, Homo sapien
atggaagctcaggagagggggtagttaacctgc

SEQ ID NO: 53079 - DNA, 33 bp, Homo sapien
taccatttgtcaccaagacacacagagtaagtc

SEQ ID NO: 53080 - DNA, 33 bp, Homo sapien
taccatttgtcaccaatacacacagagtaagtc

SEQ ID NO: 53081 - DNA, 33 bp, Homo sapien
tttgtggaattaataaataagtgacacgagagc

SEQ ID NO: 53082 - DNA, 33 bp, Homo sapien
tttgtggaattaataagtaagtgacacgagagc

SEQ ID NO: 53083 - DNA, 33 bp, Homo sapien
ttcccagagggggttacaaaagaggagcaaagt

SEQ ID NO: 53084 - DNA, 33 bp, Homo sapien
ttcccagagggggttagaaaagaggagcaaagt

SEQ ID NO: 53085 - DNA, 33 bp, Homo sapien
tcagaggaggaagagacgatgaatgtattacat

SEQ ID NO: 53086 - DNA, 33 bp, Homo sapien
tcagaggaggaagagatgatgaatgtattacat

SEQ ID NO: 53087 - DNA, 33 bp, Homo sapien
gaggcctctctaaagaagtgaaacttagagcct

SEQ ID NO: 53088 - DNA, 33 bp, Homo sapien
gaggcctctctaaagatgtgaaacttagagcct

SEQ ID NO: 53089 - DNA, 33 bp, Homo sapien
atgtcttaagtgtttacagagtggctttttagc

SEQ ID NO: 53090 - DNA, 33 bp, Homo sapien
atgtcttaagtgtttatagagtggctttttagc

SEQ ID NO: 53091 - DNA, 33 bp, Homo sapien
accacatagtcacaccagaagtttttcaggaaa

SEQ ID NO: 53092 - DNA, 33 bp, Homo sapien
accacatagtcacaccggaagtttttcaggaaa

SEQ ID NO: 53093 - DNA, 33 bp, Homo sapien
cttggagttgccttgaaggaagagtgggagttg

SEQ ID NO: 53094 - DNA, 33 bp, Homo sapien
cttggagttgccttgacggaagagtgggagttg

SEQ ID NO: 53095 - DNA, 33 bp, Homo sapien
gattaatactgccctccgaaagccattcctcat

SEQ ID NO: 53096 - DNA, 33 bp, Homo sapien
gattaatactgccctctgaaagccattcctcat

SEQ ID NO: 53097 - DNA, 33 bp, Homo sapien
accaaataaaggttaaatggaatactgtagttc

SEQ ID NO: 53098 - DNA, 33 bp, Homo sapien
accaaataaaggttaagtggaatactgtagttc

SEQ ID NO: 53099 - DNA, 33 bp, Homo sapien
tctcttggtgacctcactcagtttcaaatgctg

SEQ ID NO: 53100 - DNA, 33 bp, Homo sapien
tctcttggtgacctcattcagtttcaaatgctg

SEQ ID NO: 53101 - DNA, 33 bp, Homo sapien
atccctggctatctacacttttctctaatacta

SEQ ID NO: 53102 - DNA, 33 bp, Homo sapien
atccctggctatctacgcttttctctaatacta

SEQ ID NO: 53103 - DNA, 33 bp, Homo sapien
gcgtacccacaatagcaaggaactcttttgttt

SEQ ID NO: 53104 - DNA, 33 bp, Homo sapien
gcgtacccacaatagcgaggaactcttttgttt

SEQ ID NO: 53105 - DNA, 33 bp, Homo sapien
cagtgctgagaaacagcatcatgtagctcatcc

SEQ ID NO: 53106 - DNA, 33 bp, Homo sapien
cagtgctgagaaacagtatcatgtagctcatcc

SEQ ID NO: 53107 - DNA, 33 bp, Homo sapien
taaagactactgtcaccgtgaaaaggttcagcc

SEQ ID NO: 53108 - DNA, 33 bp, Homo sapien
taaagactactgtcactgtgaaaaggttcagcc

SEQ ID NO: 53109 - DNA, 33 bp, Homo sapien
aacaggttttatttggaagttagcatataatct

SEQ ID NO: 53110 - DNA, 33 bp, Homo sapien
aacaggttttatttgggagttagcatataatct

SEQ ID NO: 53111 - DNA, 33 bp, Homo sapien
tgtctcatttatctcaaagaaagtcataataca

SEQ ID NO: 53112 - DNA, 33 bp, Homo sapien
tgtctcatttatctcagagaaagtcataataca

SEQ ID NO: 53113 - DNA, 33 bp, Homo sapien
gatggagatgctatgacggaagcatacccaggg

SEQ ID NO: 53114 - DNA, 33 bp, Homo sapien
gatggagatgctatgatggaagcatacccaggg

SEQ ID NO: 53115 - DNA, 33 bp, Homo sapien
cacagaaataatagagaaagaaatgcaaagtgc

SEQ ID NO: 53116 - DNA, 33 bp, Homo sapien
cacagaaataatagaggaagaaatgcaaagtgc

SEQ ID NO: 53117 - DNA, 33 bp, Homo sapien
aaatttggctaggacccagagaatagcaaaagc

SEQ ID NO: 53118 - DNA, 33 bp, Homo sapien
aaatttggctaggacctagagaatagcaaaagc

SEQ ID NO: 53119 - DNA, 33 bp, Homo sapien
catactgaaaattgctgaaaacgttctggttgt

SEQ ID NO: 53120 - DNA, 33 bp, Homo sapien
catactgaaaattgcttaaaacgttctggttgt

SEQ ID NO: 53121 - DNA, 33 bp, Homo sapien
aatgtggacattttctcacataatcacaatatc

SEQ ID NO: 53122 - DNA, 33 bp, Homo sapien
aatgtggacattttcttacataatcacaatatc

SEQ ID NO: 53123 - DNA, 33 bp, Homo sapien
tttaaaccatttctgaacttctggataggttgt

SEQ ID NO: 53124 - DNA, 33 bp, Homo sapien
tttaaaccatttctgatcttctggataggttgt

SEQ ID NO: 53125 - DNA, 33 bp, Homo sapien
agacgcgttatagacaaacatctgggattctgc

SEQ ID NO: 53126 - DNA, 33 bp, Homo sapien
agacgcgttatagacagacatctgggattctgc

SEQ ID NO: 53127 - DNA, 33 bp, Homo sapien
tggggttacaggaagacgaaacaacactgcctc

SEQ ID NO: 53128 - DNA, 33 bp, Homo sapien
tggggttacaggaagatgaaacaacactgcctc

SEQ ID NO: 53129 - DNA, 33 bp, Homo sapien
gattccaggatatcaaattagtgcttagtaaca

SEQ ID NO: 53130 - DNA, 33 bp, Homo sapien
gattccaggatatcaatttagtgcttagtaaca

SEQ ID NO: 53131 - DNA, 33 bp, Homo sapien
ttggacagacccagatcataccacgaggttaac

SEQ ID NO: 53132 - DNA, 33 bp, Homo sapien
ttggacagacccagatgataccacgaggttaac

SEQ ID NO: 53133 - DNA, 33 bp, Homo sapien
aactcagttatgtgatcaggagaaaaaatgcac

SEQ ID NO: 53134 - DNA, 33 bp, Homo sapien
aactcagttatgtgattaggagaaaaaatgcac

SEQ ID NO: 53135 - DNA, 33 bp, Homo sapien
agaatactcaataatacggcctcctccccctaa

SEQ ID NO: 53136 - DNA, 33 bp, Homo sapien
agaatactcaataatatggcctcctccccctaa

SEQ ID NO: 53137 - DNA, 33 bp, Homo sapien
gtaaaaggagtaagaactacctgcacaaaggga

SEQ ID NO: 53138 - DNA, 33 bp, Homo sapien
gtaaaaggagtaagaagtacctgcacaaaggga

SEQ ID NO: 53139 - DNA, 33 bp, Homo sapien
caaacatctattcctacgagcaagctactacaa

SEQ ID NO: 53140 - DNA, 33 bp, Homo sapien
caaacatctattcctatgagcaagctactacaa

SEQ ID NO: 53141 - DNA, 33 bp, Homo sapien
tatctagcaattcatgccaaaggagatgcctcc

SEQ ID NO: 53142 - DNA, 33 bp, Homo sapien
tatctagcaattcatggcaaaggagatgcctcc

SEQ ID NO: 53143 - DNA, 33 bp, Homo sapien
gctcaatccctgctgaatcaacacttttctact

SEQ ID NO: 53144 - DNA, 33 bp, Homo sapien
gctcaatccctgctgattcaacacttttctact

SEQ ID NO: 53145 - DNA, 33 bp, Homo sapien
aaatgtctctgaataacgtctgctggtatccct

SEQ ID NO: 53146 - DNA, 33 bp, Homo sapien
aaatgtctctgaataatgtctgctggtatccct

SEQ ID NO: 53147 - DNA, 33 bp, Homo sapien
cagtgggtaaagaacacgactgagagagaatta

SEQ ID NO: 53148 - DNA, 33 bp, Homo sapien
cagtgggtaaagaacatgactgagagagaatta

SEQ ID NO: 53149 - DNA, 33 bp, Homo sapien
ggggtacaatctgacacgatgacatggtgtttc

SEQ ID NO: 53150 - DNA, 33 bp, Homo sapien
ggggtacaatctgacatgatgacatggtgtttc

SEQ ID NO: 53151 - DNA, 33 bp, Homo sapien
gtattgagtctagcgaaccaatctcactataac

SEQ ID NO: 53152 - DNA, 33 bp, Homo sapien
gtattgagtctagcgagccaatctcactataac

SEQ ID NO: 53153 - DNA, 33 bp, Homo sapien
ccaggcaccaatttggaactcattctttctgtc

SEQ ID NO: 53154 - DNA, 33 bp, Homo sapien
ccaggcaccaatttggcactcattctttctgtc

SEQ ID NO: 53155 - DNA, 33 bp, Homo sapien
gccctgcttctggaagaaagatgtcttgaacaa

SEQ ID NO: 53156 - DNA, 33 bp, Homo sapien
gccctgcttctggaaggaagatgtcttgaacaa

SEQ ID NO: 53157 - DNA, 33 bp, Homo sapien
ggtatttactctaggagctagtccttttttatc

SEQ ID NO: 53158 - DNA, 33 bp, Homo sapien
ggtatttactctaggatctagtccttttttatc

SEQ ID NO: 53159 - DNA, 33 bp, Homo sapien
acagtttctccacaaacgtaacatgaggtgaca

SEQ ID NO: 53160 - DNA, 33 bp, Homo sapien
acagtttctccacaaatgtaacatgaggtgaca

SEQ ID NO: 53161 - DNA, 33 bp, Homo sapien
gtggagttcaaaccacacagataaaaatccatt

SEQ ID NO: 53162 - DNA, 33 bp, Homo sapien
gtggagttcaaaccacgcagataaaaatccatt

SEQ ID NO: 53163 - DNA, 33 bp, Homo sapien
attcagtaaatttccaaagttgcagaccgttta

SEQ ID NO: 53164 - DNA, 33 bp, Homo sapien
attcagtaaatttccagagttgcagaccgttta

SEQ ID NO: 53165 - DNA, 33 bp, Homo sapien
taattatctatggctacgtttcgcttttcgcgg

SEQ ID NO: 53166 - DNA, 33 bp, Homo sapien
taattatctatggctatgtttcgcttttcgcgg

SEQ ID NO: 53167 - DNA, 33 bp, Homo sapien
aaaaaagaaatatccacataatgtgttctaatg

SEQ ID NO: 53168 - DNA, 33 bp, Homo sapien
aaaaaagaaatatccatataatgtgttctaatg

SEQ ID NO: 53169 - DNA, 33 bp, Homo sapien
tctatcccctgactcaagggtcgcaaacgccaa

SEQ ID NO: 53170 - DNA, 33 bp, Homo sapien
tctatcccctgactcacgggtcgcaaacgccaa

SEQ ID NO: 53171 - DNA, 33 bp, Homo sapien
ccaaaagaaggagaaacgagaaggtctgacttg

SEQ ID NO: 53172 - DNA, 33 bp, Homo sapien
ccaaaagaaggagaaaggagaaggtctgacttg

SEQ ID NO: 53173 - DNA, 33 bp, Homo sapien
gtctgagatgttcttcaaaagtacacagggtgg

SEQ ID NO: 53174 - DNA, 33 bp, Homo sapien
gtctgagatgttcttcgaaagtacacagggtgg

SEQ ID NO: 53175 - DNA, 33 bp, Homo sapien
tttttcacaaagtgtacgaccttcatgcattat

SEQ ID NO: 53176 - DNA, 33 bp, Homo sapien
tttttcacaaagtgtatgaccttcatgcattat

SEQ ID NO: 53177 - DNA, 33 bp, Homo sapien
tttaaccaagaataccacaaaaatgagatcgtg

SEQ ID NO: 53178 - DNA, 33 bp, Homo sapien
tttaaccaagaataccgcaaaaatgagatcgtg

SEQ ID NO: 53179 - DNA, 33 bp, Homo sapien
aaagcaatgagagaaacggttgttgggatggga

SEQ ID NO: 53180 - DNA, 33 bp, Homo sapien
aaagcaatgagagaaatggttgttgggatggga

SEQ ID NO: 53181 - DNA, 33 bp, Homo sapien
catggggctgagccaccatgttctactacttct

SEQ ID NO: 53182 - DNA, 33 bp, Homo sapien
catggggctgagccactatgttctactacttct

SEQ ID NO: 53183 - DNA, 33 bp, Homo sapien
gaagtcagtggcaagaacagccggcgccactga

SEQ ID NO: 53184 - DNA, 33 bp, Homo sapien
gaagtcagtggcaagaccagccggcgccactga

SEQ ID NO: 53185 - DNA, 33 bp, Homo sapien
agaaggctgaatttacaacaaagaacaataatt

SEQ ID NO: 53186 - DNA, 33 bp, Homo sapien
agaaggctgaatttacgacaaagaacaataatt

SEQ ID NO: 53187 - DNA, 33 bp, Homo sapien
agaagacaagacagggaaaatactttcaaaaga

SEQ ID NO: 53188 - DNA, 33 bp, Homo sapien
agaagacaagacaggggaaatactttcaaaaga

SEQ ID NO: 53189 - DNA, 33 bp, Homo sapien
aaagtgtaggaggagaagaagtgttctacaggc

SEQ ID NO: 53190 - DNA, 33 bp, Homo sapien
aaagtgtaggaggagaggaagtgttctacaggc

SEQ ID NO: 53191 - DNA, 33 bp, Homo sapien
gggagatacccgagaaagcaggtgatctcagaa

SEQ ID NO: 53192 - DNA, 33 bp, Homo sapien
gggagatacccgagaatgcaggtgatctcagaa

SEQ ID NO: 53193 - DNA, 33 bp, Homo sapien
atacgttaaggtggtccagttgtaacatctgtc

SEQ ID NO: 53194 - DNA, 33 bp, Homo sapien
atacgttaaggtggtctagttgtaacatctgtc

SEQ ID NO: 53195 - DNA, 33 bp, Homo sapien
ttatcaaatttttgtaggatagaagggactcca

SEQ ID NO: 53196 - DNA, 33 bp, Homo sapien
ttatcaaatttttgtatgatagaagggactcca

SEQ ID NO: 53197 - DNA, 33 bp, Homo sapien
gtttgagactcccccaaatgccctatcctcaaa

SEQ ID NO: 53198 - DNA, 33 bp, Homo sapien
gtttgagactcccccagatgccctatcctcaaa

SEQ ID NO: 53199 - DNA, 33 bp, Homo sapien
aaaactactgtgctctaaataatgtatgtcagg

SEQ ID NO: 53200 - DNA, 33 bp, Homo sapien
aaaactactgtgctcttaataatgtatgtcagg

SEQ ID NO: 53201 - DNA, 33 bp, Homo sapien
attgacagtaggaaaacgagtacttttcattgt

SEQ ID NO: 53202 - DNA, 33 bp, Homo sapien
attgacagtaggaaaatgagtacttttcattgt

SEQ ID NO: 53203 - DNA, 33 bp, Homo sapien
caacagtaggtacaggcagattaattaggagac

SEQ ID NO: 53204 - DNA, 33 bp, Homo sapien
caacagtaggtacagggagattaattaggagac

SEQ ID NO: 53205 - DNA, 33 bp, Homo sapien
aaataatttgtcaactaagttatttcaagatgg

SEQ ID NO: 53206 - DNA, 33 bp, Homo sapien
aaataatttgtcaacttagttatttcaagatgg

SEQ ID NO: 53207 - DNA, 33 bp, Homo sapien
aatcattagtcagagagatattcaaataggaaa

SEQ ID NO: 53208 - DNA, 33 bp, Homo sapien
aatcattagtcagagatatattcaaataggaaa

SEQ ID NO: 53209 - DNA, 33 bp, Homo sapien
ttcctgatattttgtcacatcctctgatgattc

SEQ ID NO: 53210 - DNA, 33 bp, Homo sapien
ttcctgatattttgtcgcatcctctgatgattc

SEQ ID NO: 53211 - DNA, 33 bp, Homo sapien
ggcctctttcagccacaatgtatagtcaccaat

SEQ ID NO: 53212 - DNA, 33 bp, Homo sapien
ggcctctttcagccaccatgtatagtcaccaat

SEQ ID NO: 53213 - DNA, 33 bp, Homo sapien
ctgagagaaatgaacacagctttgtgtattgca

SEQ ID NO: 53214 - DNA, 33 bp, Homo sapien
ctgagagaaatgaacatagctttgtgtattgca

SEQ ID NO: 53215 - DNA, 33 bp, Homo sapien
tcattctaatttgtccggaatgactatcaaaga

SEQ ID NO: 53216 - DNA, 33 bp, Homo sapien
tcattctaatttgtcctgaatgactatcaaaga

SEQ ID NO: 53217 - DNA, 33 bp, Homo sapien
ttattttttgatccccaaagaactctacatttt

SEQ ID NO: 53218 - DNA, 33 bp, Homo sapien
ttattttttgatccccgaagaactctacatttt

SEQ ID NO: 53219 - DNA, 33 bp, Homo sapien
ctctaactcccctacccatagcagcccacgggc

SEQ ID NO: 53220 - DNA, 33 bp, Homo sapien
ctctaactcccctacctatagcagcccacgggc

SEQ ID NO: 53221 - DNA, 33 bp, Homo sapien
gatggttgagagtgataagctgacccggaatag

SEQ ID NO: 53222 - DNA, 33 bp, Homo sapien
gatggttgagagtgatgagctgacccggaatag

SEQ ID NO: 53223 - DNA, 33 bp, Homo sapien
tcctctcctaccaacactggggtctggcgcccg

SEQ ID NO: 53224 - DNA, 33 bp, Homo sapien
tcctctcctaccaacattggggtctggcgcccg

SEQ ID NO: 53225 - DNA, 33 bp, Homo sapien
tggaatttcctggtctaaaaagaaagaaatggc

SEQ ID NO: 53226 - DNA, 33 bp, Homo sapien
tggaatttcctggtctgaaaagaaagaaatggc

SEQ ID NO: 53227 - DNA, 33 bp, Homo sapien
cagctgggggtccacacagctttctgtgacagc

SEQ ID NO: 53228 - DNA, 33 bp, Homo sapien
cagctgggggtccacatagctttctgtgacagc

SEQ ID NO: 53229 - DNA, 33 bp, Homo sapien
taagtgcagacaaatacgttttatactgaaaga

SEQ ID NO: 53230 - DNA, 33 bp, Homo sapien
taagtgcagacaaatatgttttatactgaaaga

SEQ ID NO: 53231 - DNA, 33 bp, Homo sapien
ccaaccaaatatacccacagctgtctgaagacc

SEQ ID NO: 53232 - DNA, 33 bp, Homo sapien
ccaaccaaatatacccccagctgtctgaagacc

SEQ ID NO: 53233 - DNA, 33 bp, Homo sapien
ggttctttcttgtggaaggacaagtgccagaca

SEQ ID NO: 53234 - DNA, 33 bp, Homo sapien
ggttctttcttgtggagggacaagtgccagaca

SEQ ID NO: 53235 - DNA, 33 bp, Homo sapien
atataaaagagcttgaatcaaatgttactttta

SEQ ID NO: 53236 - DNA, 33 bp, Homo sapien
atataaaagagcttgattcaaatgttactttta

SEQ ID NO: 53237 - DNA, 33 bp, Homo sapien
attttcctgagtacccaaatgaatgcccattta

SEQ ID NO: 53238 - DNA, 33 bp, Homo sapien
attttcctgagtacccgaatgaatgcccattta

SEQ ID NO: 53239 - DNA, 33 bp, Homo sapien
agatatttataatcatcaaagagactccctagt

SEQ ID NO: 53240 - DNA, 33 bp, Homo sapien
agatatttataatcattaaagagactccctagt

SEQ ID NO: 53241 - DNA, 33 bp, Homo sapien
gtagtaagatttgggaagacttcaagtaccttg

SEQ ID NO: 53242 - DNA, 33 bp, Homo sapien
gtagtaagatttgggaggacttcaagtaccttg

SEQ ID NO: 53243 - DNA, 33 bp, Homo sapien
tgtcttcacatcagaaatgacttcatcagagag

SEQ ID NO: 53244 - DNA, 33 bp, Homo sapien
tgtcttcacatcagaagtgacttcatcagagag

SEQ ID NO: 53245 - DNA, 33 bp, Homo sapien
taacacatgaggtaatcacactgctttgaggtc

SEQ ID NO: 53246 - DNA, 33 bp, Homo sapien
taacacatgaggtaattacactgctttgaggtc

SEQ ID NO: 53247 - DNA, 33 bp, Homo sapien
ctctttaaacacatcacagctttcactctccct

SEQ ID NO: 53248 - DNA, 33 bp, Homo sapien
ctctttaaacacatcatagctttcactctccct

SEQ ID NO: 53249 - DNA, 33 bp, Homo sapien
actattttctaccacacctaatttcactacaaa

SEQ ID NO: 53250 - DNA, 33 bp, Homo sapien
actattttctaccacatctaatttcactacaaa

SEQ ID NO: 53251 - DNA, 33 bp, Homo sapien
atagtaagtcttaaaccgaagagcattttttta

SEQ ID NO: 53252 - DNA, 33 bp, Homo sapien
atagtaagtcttaaactgaagagcattttttta

SEQ ID NO: 53253 - DNA, 33 bp, Homo sapien
cacctactttgcagcaatcaacatattttaact

SEQ ID NO: 53254 - DNA, 33 bp, Homo sapien
cacctactttgcagcagtcaacatattttaact

SEQ ID NO: 53255 - DNA, 33 bp, Homo sapien
attgagaagcacatcactattatttgacattac

SEQ ID NO: 53256 - DNA, 33 bp, Homo sapien
attgagaagcacatcattattatttgacattac

SEQ ID NO: 53257 - DNA, 33 bp, Homo sapien
cccagacagaagtacacactaagcgtgaaaaaa

SEQ ID NO: 53258 - DNA, 33 bp, Homo sapien
cccagacagaagtacatactaagcgtgaaaaaa

SEQ ID NO: 53259 - DNA, 33 bp, Homo sapien
tctgtctgggtatagaatatacttggaacagaa

SEQ ID NO: 53260 - DNA, 33 bp, Homo sapien
tctgtctgggtatagagtatacttggaacagaa

SEQ ID NO: 53261 - DNA, 33 bp, Homo sapien
agacagacagtacaaacagcagttgagtgaaac

SEQ ID NO: 53262 - DNA, 33 bp, Homo sapien
agacagacagtacaaatagcagttgagtgaaac

SEQ ID NO: 53263 - DNA, 33 bp, Homo sapien
gctctttctttctttacgtagctccaagtttct

SEQ ID NO: 53264 - DNA, 33 bp, Homo sapien
gctctttctttctttatgtagctccaagtttct

SEQ ID NO: 53265 - DNA, 33 bp, Homo sapien
accacaggttctcccaaatctccactttgccga

SEQ ID NO: 53266 - DNA, 33 bp, Homo sapien
accacaggttctcccagatctccactttgccga

SEQ ID NO: 53267 - DNA, 33 bp, Homo sapien
atgtcatatcccccaaaaatcacgtgttagaaa

SEQ ID NO: 53268 - DNA, 33 bp, Homo sapien
atgtcatatcccccaataatcacgtgttagaaa

SEQ ID NO: 53269 - DNA, 33 bp, Homo sapien
aagctgaaacagcctgcaagatgaagttagtcg

SEQ ID NO: 53270 - DNA, 33 bp, Homo sapien
aagctgaaacagcctggaagatgaagttagtcg

SEQ ID NO: 53271 - DNA, 33 bp, Homo sapien
tataaacacacccgtgaacaccaacttgaatac

SEQ ID NO: 53272 - DNA, 33 bp, Homo sapien
tataaacacacccgtggacaccaacttgaatac

SEQ ID NO: 53273 - DNA, 33 bp, Homo sapien
tagagcagcattggggcaatgtcaccgtggggt

SEQ ID NO: 53274 - DNA, 33 bp, Homo sapien
tagagcagcattggggtaatgtcaccgtggggt

SEQ ID NO: 53275 - DNA, 33 bp, Homo sapien
tccattatatcattcaatcataccagtagcttg

SEQ ID NO: 53276 - DNA, 33 bp, Homo sapien
tccattatatcattcagtcataccagtagcttg

SEQ ID NO: 53277 - DNA, 33 bp, Homo sapien
catgtggcaaaacctacgggaaatgggccacca

SEQ ID NO: 53278 - DNA, 33 bp, Homo sapien
catgtggcaaaacctatgggaaatgggccacca

SEQ ID NO: 53279 - DNA, 33 bp, Homo sapien
gctccggagaaaagaaaagagctcagaatctct

SEQ ID NO: 53280 - DNA, 33 bp, Homo sapien
gctccggagaaaagaagagagctcagaatctct

SEQ ID NO: 53281 - DNA, 33 bp, Homo sapien
ccacgctttcttcaaaaagtcccatggtgtaca

SEQ ID NO: 53282 - DNA, 33 bp, Homo sapien
ccacgctttcttcaaagagtcccatggtgtaca

SEQ ID NO: 53283 - DNA, 33 bp, Homo sapien
gttcctttcaagataaccataaattccacattt

SEQ ID NO: 53284 - DNA, 33 bp, Homo sapien
gttcctttcaagataatcataaattccacattt

SEQ ID NO: 53285 - DNA, 33 bp, Homo sapien
taacagcacaattccagggcacaattacatatg

SEQ ID NO: 53286 - DNA, 33 bp, Homo sapien
taacagcacaattccatggcacaattacatatg

SEQ ID NO: 53287 - DNA, 33 bp, Homo sapien
gacacattgctatgggaaccaactccaaaatta

SEQ ID NO: 53288 - DNA, 33 bp, Homo sapien
gacacattgctatggggaccaactccaaaatta

SEQ ID NO: 53289 - DNA, 33 bp, Homo sapien
tgtcctggcctttcacactcattagaaaccagg

SEQ ID NO: 53290 - DNA, 33 bp, Homo sapien
tgtcctggcctttcacgctcattagaaaccagg

SEQ ID NO: 53291 - DNA, 33 bp, Homo sapien
ctatagaaaagagccaagcgaaggtgatgagct

SEQ ID NO: 53292 - DNA, 33 bp, Homo sapien
ctatagaaaagagccatgcgaaggtgatgagct

SEQ ID NO: 53293 - DNA, 33 bp, Homo sapien
tcataacattgcgaaaagcatcacatggatggt

SEQ ID NO: 53294 - DNA, 33 bp, Homo sapien
tcataacattgcgaaaggcatcacatggatggt

SEQ ID NO: 53295 - DNA, 33 bp, Homo sapien
ttaacaaacttctgtcacctaagcatggcaaga

SEQ ID NO: 53296 - DNA, 33 bp, Homo sapien
ttaacaaacttctgtcgcctaagcatggcaaga

SEQ ID NO: 53297 - DNA, 33 bp, Homo sapien
tagtatctatcccatacgaaaactcatacatga

SEQ ID NO: 53298 - DNA, 33 bp, Homo sapien
tagtatctatcccatatgaaaactcatacatga

SEQ ID NO: 53299 - DNA, 33 bp, Homo sapien
gagaggttacactatacgtgggataagggtaga

SEQ ID NO: 53300 - DNA, 33 bp, Homo sapien
gagaggttacactataggtgggataagggtaga

SEQ ID NO: 53301 - DNA, 33 bp, Homo sapien
ctcactgagcctctacaatgtaatgggcatttg

SEQ ID NO: 53302 - DNA, 33 bp, Homo sapien
ctcactgagcctctacgatgtaatgggcatttg

SEQ ID NO: 53303 - DNA, 33 bp, Homo sapien
cctgcggaaaaccttccaaaattgacctcaaca

SEQ ID NO: 53304 - DNA, 33 bp, Homo sapien
cctgcggaaaaccttctaaaattgacctcaaca

SEQ ID NO: 53305 - DNA, 33 bp, Homo sapien
agaaaataaaggacccaaaattcttcagaaaca

SEQ ID NO: 53306 - DNA, 33 bp, Homo sapien
agaaaataaaggacccgaaattcttcagaaaca

SEQ ID NO: 53307 - DNA, 33 bp, Homo sapien
ctgcctgaggtccatacactgtctacgagatgc

SEQ ID NO: 53308 - DNA, 33 bp, Homo sapien
ctgcctgaggtccatatactgtctacgagatgc

SEQ ID NO: 53309 - DNA, 33 bp, Homo sapien
gtgttctgggccctaacgatccactcctgtttt

SEQ ID NO: 53310 - DNA, 33 bp, Homo sapien
gtgttctgggccctaatgatccactcctgtttt

SEQ ID NO: 53311 - DNA, 33 bp, Homo sapien
tcatctgagactgttacgcttgcaaaagtgatc

SEQ ID NO: 53312 - DNA, 33 bp, Homo sapien
tcatctgagactgttaggcttgcaaaagtgatc

SEQ ID NO: 53313 - DNA, 33 bp, Homo sapien
ctgcttagatgacagacagaaaaagacaacgta

SEQ ID NO: 53314 - DNA, 33 bp, Homo sapien
ctgcttagatgacagagagaaaaagacaacgta

SEQ ID NO: 53315 - DNA, 33 bp, Homo sapien
gaagtcccaggtatgcactcaaaaatatttgct

SEQ ID NO: 53316 - DNA, 33 bp, Homo sapien
gaagtcccaggtatgcgctcaaaaatatttgct

SEQ ID NO: 53317 - DNA, 33 bp, Homo sapien
tgaattgttaatgcaaagcatgagtcaataaga

SEQ ID NO: 53318 - DNA, 33 bp, Homo sapien
tgaattgttaatgcaacgcatgagtcaataaga

SEQ ID NO: 53319 - DNA, 33 bp, Homo sapien
ctggttattcttctaccgacagtgacttccttc

SEQ ID NO: 53320 - DNA, 33 bp, Homo sapien
ctggttattcttctacggacagtgacttccttc

SEQ ID NO: 53321 - DNA, 33 bp, Homo sapien
ttctcaggctgcccagaatgcttctcaggagag

SEQ ID NO: 53322 - DNA, 33 bp, Homo sapien
ttctcaggctgcccaggatgcttctcaggagag

SEQ ID NO: 53323 - DNA, 33 bp, Homo sapien
cgagatttcagaaaacagtttcctcttcttcaa

SEQ ID NO: 53324 - DNA, 33 bp, Homo sapien
cgagatttcagaaaacggtttcctcttcttcaa

SEQ ID NO: 53325 - DNA, 33 bp, Homo sapien
cacctgctcacttcccacttctgctgaaggcct

SEQ ID NO: 53326 - DNA, 33 bp, Homo sapien
cacctgctcacttccctcttctgctgaaggcct

SEQ ID NO: 53327 - DNA, 33 bp, Homo sapien
tttcaagtatttttgacctatggttggttgaat

SEQ ID NO: 53328 - DNA, 33 bp, Homo sapien
tttcaagtatttttgagctatggttggttgaat

SEQ ID NO: 53329 - DNA, 33 bp, Homo sapien
catagatctaaccatccgaaatcaggtgtcagt

SEQ ID NO: 53330 - DNA, 33 bp, Homo sapien
catagatctaaccatcggaaatcaggtgtcagt

SEQ ID NO: 53331 - DNA, 33 bp, Homo sapien
tacaagccaggtaataaatacttagagttttgc

SEQ ID NO: 53332 - DNA, 33 bp, Homo sapien
tacaagccaggtaatatatacttagagttttgc

SEQ ID NO: 53333 - DNA, 33 bp, Homo sapien
tttaggaggttgactacaatgctgagtcatgtt

SEQ ID NO: 53334 - DNA, 33 bp, Homo sapien
tttaggaggttgactagaatgctgagtcatgtt

SEQ ID NO: 53335 - DNA, 33 bp, Homo sapien
cactcaatcagattcactgaaaaaagtagtcct

SEQ ID NO: 53336 - DNA, 33 bp, Homo sapien
cactcaatcagattcattgaaaaaagtagtcct

SEQ ID NO: 53337 - DNA, 33 bp, Homo sapien
gttttccatatataaactcattacgcctccagt

SEQ ID NO: 53338 - DNA, 33 bp, Homo sapien
gttttccatatataaagtcattacgcctccagt

SEQ ID NO: 53339 - DNA, 33 bp, Homo sapien
atgaaaataatcctgcaaaggtggtgagattag

SEQ ID NO: 53340 - DNA, 33 bp, Homo sapien
atgaaaataatcctgcgaaggtggtgagattag

SEQ ID NO: 53341 - DNA, 33 bp, Homo sapien
gaacataggagagatacggatcccgccctccag

SEQ ID NO: 53342 - DNA, 33 bp, Homo sapien
gaacataggagagatatggatcccgccctccag

SEQ ID NO: 53343 - DNA, 33 bp, Homo sapien
tcacttctagcctttaacataatggtcacagga

SEQ ID NO: 53344 - DNA, 33 bp, Homo sapien
tcacttctagcctttagcataatggtcacagga

SEQ ID NO: 53345 - DNA, 33 bp, Homo sapien
aggaggtcatgagcagaatgtctgggtgtacac

SEQ ID NO: 53346 - DNA, 33 bp, Homo sapien
aggaggtcatgagcaggatgtctgggtgtacac

SEQ ID NO: 53347 - DNA, 33 bp, Homo sapien
ataaggatcacagtagacaggtattaaggcctt

SEQ ID NO: 53348 - DNA, 33 bp, Homo sapien
ataaggatcacagtaggcaggtattaaggcctt

SEQ ID NO: 53349 - DNA, 33 bp, Homo sapien
ttcaattttggtgagacgggaaggcattttgtc

SEQ ID NO: 53350 - DNA, 33 bp, Homo sapien
ttcaattttggtgagatgggaaggcattttgtc

SEQ ID NO: 53351 - DNA, 33 bp, Homo sapien
ccaaacactgttgtgaaaacctctctcctggga

SEQ ID NO: 53352 - DNA, 33 bp, Homo sapien
ccaaacactgttgtgataacctctctcctggga

SEQ ID NO: 53353 - DNA, 33 bp, Homo sapien
ctgcaataaagatgaacgagtacagtgactagt

SEQ ID NO: 53354 - DNA, 33 bp, Homo sapien
ctgcaataaagatgaatgagtacagtgactagt

SEQ ID NO: 53355 - DNA, 33 bp, Homo sapien
taggaatgaaggctcccgaatcctgtcttttct

SEQ ID NO: 53356 - DNA, 33 bp, Homo sapien
taggaatgaaggctcctgaatcctgtcttttct

SEQ ID NO: 53357 - DNA, 33 bp, Homo sapien
gtggttcattcagtatcaagtacaagcagagcc

SEQ ID NO: 53358 - DNA, 33 bp, Homo sapien
gtggttcattcagtatgaagtacaagcagagcc

SEQ ID NO: 53359 - DNA, 33 bp, Homo sapien
ggatggccaacggctcccttctgagtccgtcta

SEQ ID NO: 53360 - DNA, 33 bp, Homo sapien
ggatggccaacggctctcttctgagtccgtcta

SEQ ID NO: 53361 - DNA, 33 bp, Homo sapien
tctataaagattacccacagtggttggtgtgga

SEQ ID NO: 53362 - DNA, 33 bp, Homo sapien
tctataaagattacccccagtggttggtgtgga

SEQ ID NO: 53363 - DNA, 33 bp, Homo sapien
gagaggcaggctatcaaatagaatagcttttgg

SEQ ID NO: 53364 - DNA, 33 bp, Homo sapien
gagaggcaggctatcacatagaatagcttttgg

SEQ ID NO: 53365 - DNA, 33 bp, Homo sapien
caggccgccctattgaagattctgtttgcggga

SEQ ID NO: 53366 - DNA, 33 bp, Homo sapien
caggccgccctattgaggattctgtttgcggga

SEQ ID NO: 53367 - DNA, 33 bp, Homo sapien
gcctacagttaaggaaacagagcacattcccgc

SEQ ID NO: 53368 - DNA, 33 bp, Homo sapien
gcctacagttaaggaatcagagcacattcccgc

SEQ ID NO: 53369 - DNA, 33 bp, Homo sapien
gttgtttttgaactgggagtacctggctgtacc

SEQ ID NO: 53370 - DNA, 33 bp, Homo sapien
gttgtttttgaactggtagtacctggctgtacc

SEQ ID NO: 53371 - DNA, 33 bp, Homo sapien
ctgaaagagaccgagcaaagtggattaacacag

SEQ ID NO: 53372 - DNA, 33 bp, Homo sapien
ctgaaagagaccgagcgaagtggattaacacag

SEQ ID NO: 53373 - DNA, 33 bp, Homo sapien
agctggcacagtgtcaaccggcgggagaggagt

SEQ ID NO: 53374 - DNA, 33 bp, Homo sapien
agctggcacagtgtcagccggcgggagaggagt

SEQ ID NO: 53375 - DNA, 33 bp, Homo sapien
gtttttggaatgaccaacttgcagcacaattga

SEQ ID NO: 53376 - DNA, 33 bp, Homo sapien
gtttttggaatgaccagcttgcagcacaattga

SEQ ID NO: 53377 - DNA, 33 bp, Homo sapien
tactcctgtgctccagaaaattatcatacagaa

SEQ ID NO: 53378 - DNA, 33 bp, Homo sapien
tactcctgtgctccaggaaattatcatacagaa

SEQ ID NO: 53379 - DNA, 33 bp, Homo sapien
gaagtttgattgtagacggcaatatgataaagg

SEQ ID NO: 53380 - DNA, 33 bp, Homo sapien
gaagtttgattgtagagggcaatatgataaagg

SEQ ID NO: 53381 - DNA, 33 bp, Homo sapien
ggcaacaaagtctacaaagaatactggggaaaa

SEQ ID NO: 53382 - DNA, 33 bp, Homo sapien
ggcaacaaagtctacagagaatactggggaaaa

SEQ ID NO: 53383 - DNA, 33 bp, Homo sapien
ttccagccagcctggaaatctgtgctctccaat

SEQ ID NO: 53384 - DNA, 33 bp, Homo sapien
ttccagccagcctggacatctgtgctctccaat

SEQ ID NO: 53385 - DNA, 33 bp, Homo sapien
gaaagaggatgaggacaagaaagagaaagaaaa

SEQ ID NO: 53386 - DNA, 33 bp, Homo sapien
gaaagaggatgaggaccagaaagagaaagaaaa

SEQ ID NO: 53387 - DNA, 33 bp, Homo sapien
ctctcagttcatcagaaagctccattagctaag

SEQ ID NO: 53388 - DNA, 33 bp, Homo sapien
ctctcagttcatcagagagctccattagctaag

SEQ ID NO: 53389 - DNA, 33 bp, Homo sapien
tcttttgagagtatgacctcttagctaatggag

SEQ ID NO: 53390 - DNA, 33 bp, Homo sapien
tcttttgagagtatgatctcttagctaatggag

SEQ ID NO: 53391 - DNA, 33 bp, Homo sapien
taccttctgaattatcactcatctcaggcatat

SEQ ID NO: 53392 - DNA, 33 bp, Homo sapien
taccttctgaattatctctcatctcaggcatat

SEQ ID NO: 53393 - DNA, 33 bp, Homo sapien
gggagcgttgggtgtcaagggaagtcgtgatat

SEQ ID NO: 53394 - DNA, 33 bp, Homo sapien
gggagcgttgggtgtcgagggaagtcgtgatat

SEQ ID NO: 53395 - DNA, 33 bp, Homo sapien
ctctacactttatttacagttcagctttctgga

SEQ ID NO: 53396 - DNA, 33 bp, Homo sapien
ctctacactttatttagagttcagctttctgga

SEQ ID NO: 53397 - DNA, 33 bp, Homo sapien
aatcacatgatttaagacctcaaactcaccaca

SEQ ID NO: 53398 - DNA, 33 bp, Homo sapien
aatcacatgatttaaggcctcaaactcaccaca

SEQ ID NO: 53399 - DNA, 33 bp, Homo sapien
cttttctatttaacccaacggatttccagattc

SEQ ID NO: 53400 - DNA, 33 bp, Homo sapien
cttttctatttaacccgacggatttccagattc

SEQ ID NO: 53401 - DNA, 33 bp, Homo sapien
ccattcctttgacaacaaaattatcctgaaaat

SEQ ID NO: 53402 - DNA, 33 bp, Homo sapien
ccattcctttgacaacgaaattatcctgaaaat

SEQ ID NO: 53403 - DNA, 33 bp, Homo sapien
atggagaacattccagaccattaaattagatct

SEQ ID NO: 53404 - DNA, 33 bp, Homo sapien
atggagaacattccagcccattaaattagatct

SEQ ID NO: 53405 - DNA, 33 bp, Homo sapien
taattactttgtgacccacatgtatttagtaat

SEQ ID NO: 53406 - DNA, 33 bp, Homo sapien
taattactttgtgacctacatgtatttagtaat

SEQ ID NO: 53407 - DNA, 33 bp, Homo sapien
agagatctgggctggcagaaccgaaggaggagt

SEQ ID NO: 53408 - DNA, 33 bp, Homo sapien
agagatctgggctggcggaaccgaaggaggagt

SEQ ID NO: 53409 - DNA, 33 bp, Homo sapien
agtcgcagatttctgggattcagttccaatgat

SEQ ID NO: 53410 - DNA, 33 bp, Homo sapien
agtcgcagatttctggtattcagttccaatgat

SEQ ID NO: 53411 - DNA, 33 bp, Homo sapien
ggttaaatgtcaaggaagaaactaaagatcact

SEQ ID NO: 53412 - DNA, 33 bp, Homo sapien
ggttaaatgtcaaggaggaaactaaagatcact

SEQ ID NO: 53413 - DNA, 33 bp, Homo sapien
cattcacttttggctgcatggccagtgacagat

SEQ ID NO: 53414 - DNA, 33 bp, Homo sapien
cattcacttttggctgtatggccagtgacagat

SEQ ID NO: 53415 - DNA, 33 bp, Homo sapien
agggtacaggatgagccgagcctttagagacag

SEQ ID NO: 53416 - DNA, 33 bp, Homo sapien
agggtacaggatgagctgagcctttagagacag

SEQ ID NO: 53417 - DNA, 33 bp, Homo sapien
atataagtacccgttcacttggtcacacccaca

SEQ ID NO: 53418 - DNA, 33 bp, Homo sapien
atataagtacccgttcgcttggtcacacccaca

SEQ ID NO: 53419 - DNA, 33 bp, Homo sapien
caatgaggtgaagaaaaatattcagactgattc

SEQ ID NO: 53420 - DNA, 33 bp, Homo sapien
caatgaggtgaagaaacatattcagactgattc

SEQ ID NO: 53421 - DNA, 33 bp, Homo sapien
aatatagcatcttctccaaaaggaatcagtctg

SEQ ID NO: 53422 - DNA, 33 bp, Homo sapien
aatatagcatcttctctaaaaggaatcagtctg

SEQ ID NO: 53423 - DNA, 33 bp, Homo sapien
cacccaggtctcctaactcctaatccagtgtcc

SEQ ID NO: 53424 - DNA, 33 bp, Homo sapien
cacccaggtctcctaattcctaatccagtgtcc

SEQ ID NO: 53425 - DNA, 33 bp, Homo sapien
gtgtcacctctgaagagctccacttaagtagtc

SEQ ID NO: 53426 - DNA, 33 bp, Homo sapien
gtgtcacctctgaagatctccacttaagtagtc

SEQ ID NO: 53427 - DNA, 33 bp, Homo sapien
tgttcatactaacctaacgccttgtggccttta

SEQ ID NO: 53428 - DNA, 33 bp, Homo sapien
tgttcatactaacctatcgccttgtggccttta

SEQ ID NO: 53429 - DNA, 33 bp, Homo sapien
aaatcatatttggtagacaggatttatatgatc

SEQ ID NO: 53430 - DNA, 33 bp, Homo sapien
aaatcatatttggtaggcaggatttatatgatc

SEQ ID NO: 53431 - DNA, 33 bp, Homo sapien
agcatcagatactccaaagagagttattcaagg

SEQ ID NO: 53432 - DNA, 33 bp, Homo sapien
agcatcagatactccagagagagttattcaagg

SEQ ID NO: 53433 - DNA, 33 bp, Homo sapien
aatcacagaactcaaaaatgattggattattcc

SEQ ID NO: 53434 - DNA, 33 bp, Homo sapien
aatcacagaactcaaacatgattggattattcc

SEQ ID NO: 53435 - DNA, 33 bp, Homo sapien
attgtctttgtttctagtaataccacttcctca

SEQ ID NO: 53436 - DNA, 33 bp, Homo sapien
attgtctttgtttctattaataccacttcctca

SEQ ID NO: 53437 - DNA, 33 bp, Homo sapien
caaccactctttcaggaagctaaaactagtaag

SEQ ID NO: 53438 - DNA, 33 bp, Homo sapien
caaccactctttcagggagctaaaactagtaag

SEQ ID NO: 53439 - DNA, 33 bp, Homo sapien
gaattccactaaaaaccgtataatccaactgga

SEQ ID NO: 53440 - DNA, 33 bp, Homo sapien
gaattccactaaaaactgtataatccaactgga

SEQ ID NO: 53441 - DNA, 33 bp, Homo sapien
ttagtcgagtcatgcaatagcctcctaactgtt

SEQ ID NO: 53442 - DNA, 33 bp, Homo sapien
ttagtcgagtcatgcagtagcctcctaactgtt

SEQ ID NO: 53443 - DNA, 33 bp, Homo sapien
cactgctcaaatcataagccaattgcagtggac

SEQ ID NO: 53444 - DNA, 33 bp, Homo sapien
cactgctcaaatcataggccaattgcagtggac

SEQ ID NO: 53445 - DNA, 33 bp, Homo sapien
taaagagccagtttgaagtttagaatgaagtct

SEQ ID NO: 53446 - DNA, 33 bp, Homo sapien
taaagagccagtttgaggtttagaatgaagtct

SEQ ID NO: 53447 - DNA, 33 bp, Homo sapien; identical to SEQ ID NO: 53445

SEQ ID NO: 53448 - DNA, 33 bp, Homo sapien; identical to SEQ ID NO: 53446

SEQ ID NO: 53449 - DNA, 33 bp, Homo sapien
cttgcagggaaaccctaacatgggccagtcatc

SEQ ID NO: 53450 - DNA, 33 bp, Homo sapien
cttgcagggaaaccctgacatgggccagtcatc

SEQ ID NO: 53451 - DNA, 33 bp, Homo sapien
aagcatcaacacaatcaaacagaggaatttgct

SEQ ID NO: 53452 - DNA, 33 bp, Homo sapien
aagcatcaacacaatccaacagaggaatttgct

SEQ ID NO: 53453 - DNA, 33 bp, Homo sapien
agtgctagtaggtagaaactttaggtggcactg

SEQ ID NO: 53454 - DNA, 33 bp, Homo sapien
agtgctagtaggtagatactttaggtggcactg

SEQ ID NO: 53455 - DNA, 33 bp, Homo sapien
tcctcttgttgaagaaagatgcatgagtgatgt

SEQ ID NO: 53456 - DNA, 33 bp, Homo sapien
tcctcttgttgaagaaggatgcatgagtgatgt

SEQ ID NO: 53457 - DNA, 33 bp, Homo sapien
ccagtcctagtcacacaggtcttcttgctgctc

SEQ ID NO: 53458 - DNA, 33 bp, Homo sapien
ccagtcctagtcacacgggtcttcttgctgctc

SEQ ID NO: 53459 - DNA, 33 bp, Homo sapien
tacagcgagtatgaaaacagattaagcatcctc

SEQ ID NO: 53460 - DNA, 33 bp, Homo sapien
tacagcgagtatgaaatcagattaagcatcctc

SEQ ID NO: 53461 - DNA, 33 bp, Homo sapien
agaggatcatttttcaataaattccatagtccc

SEQ ID NO: 53462 - DNA, 33 bp, Homo sapien
agaggatcatttttcagtaaattccatagtccc

SEQ ID NO: 53463 - DNA, 33 bp, Homo sapien
cgggtaaaatgaaaaacgatagtgggacagcag

SEQ ID NO: 53464 - DNA, 33 bp, Homo sapien
cgggtaaaatgaaaaaggatagtgggacagcag

SEQ ID NO: 53465 - DNA, 33 bp, Homo sapien
taacaatctgacaggtaaagctgctgctcttct

SEQ ID NO: 53466 - DNA, 33 bp, Homo sapien
taacaatctgacaggtgaagctgctgctcttct

SEQ ID NO: 53467 - DNA, 33 bp, Homo sapien
taaaggtctgtatacaacataaaattgctcctt

SEQ ID NO: 53468 - DNA, 33 bp, Homo sapien
taaaggtctgtatacagcataaaattgctcctt

SEQ ID NO: 53469 - DNA, 33 bp, Homo sapien
agaatcaccctcagacactaaagaagctgtttc

SEQ ID NO: 53470 - DNA, 33 bp, Homo sapien
agaatcaccctcagacgctaaagaagctgtttc

SEQ ID NO: 53471 - DNA, 33 bp, Homo sapien
caaggaagcaaagaaactgagaaagagggaaat

SEQ ID NO: 53472 - DNA, 33 bp, Homo sapien
caaggaagcaaagaaattgagaaagagggaaat

SEQ ID NO: 53473 - DNA, 33 bp, Homo sapien
gggaaatgaagacaataaatataacctccatta

SEQ ID NO: 53474 - DNA, 33 bp, Homo sapien
gggaaatgaagacaatgaatataacctccatta

SEQ ID NO: 53475 - DNA, 33 bp, Homo sapien
aaaattaactagtgaaagaaaacagtgaaagat

SEQ ID NO: 53476 - DNA, 33 bp, Homo sapien
aaaattaactagtgaatgaaaacagtgaaagat

SEQ ID NO: 53477 - DNA, 33 bp, Homo sapien
cactctccttctcaaaaatctctgtacttcttt

SEQ ID NO: 53478 - DNA, 33 bp, Homo sapien
cactctccttctcaaacatctctgtacttcttt

SEQ ID NO: 53479 - DNA, 33 bp, Homo sapien
tagtaggtatattacaacatctctaattctctc

SEQ ID NO: 53480 - DNA, 33 bp, Homo sapien
tagtaggtatattacatcatctctaattctctc

SEQ ID NO: 53481 - DNA, 33 bp, Homo sapien
agtggaaggcaacttacagtgtttcaccatcag

SEQ ID NO: 53482 - DNA, 33 bp, Homo sapien
agtggaaggcaacttagagtgtttcaccatcag

SEQ ID NO: 53483 - DNA, 33 bp, Homo sapien
actctatgccaggcaacgtgctaagaattaagg

SEQ ID NO: 53484 - DNA, 33 bp, Homo sapien
actctatgccaggcaatgtgctaagaattaagg

SEQ ID NO: 53485 - DNA, 33 bp, Homo sapien
aagggggacaccatgacgaaaagcacaagacct

SEQ ID NO: 53486 - DNA, 33 bp, Homo sapien
aagggggacaccatgatgaaaagcacaagacct

SEQ ID NO: 53487 - DNA, 33 bp, Homo sapien
cctactcagtgcttagcagtgagagttgtaatt

SEQ ID NO: 53488 - DNA, 33 bp, Homo sapien
cctactcagtgcttagtagtgagagttgtaatt

SEQ ID NO: 53489 - DNA, 33 bp, Homo sapien
aaccaaatcctgccaactctcccagaccttact

SEQ ID NO: 53490 - DNA, 33 bp, Homo sapien
aaccaaatcctgccaattctcccagaccttact

SEQ ID NO: 53491 - DNA, 33 bp, Homo sapien
tgaagatgtcggccataactgtgcagtctccta

SEQ ID NO: 53492 - DNA, 33 bp, Homo sapien
tgaagatgtcggccatgactgtgcagtctccta

SEQ ID NO: 53493 - DNA, 33 bp, Homo sapien
gaggagttgtgagacgcaaaagatatcattgcc

SEQ ID NO: 53494 - DNA, 33 bp, Homo sapien
gaggagttgtgagacgtaaaagatatcattgcc

SEQ ID NO: 53495 - DNA, 33 bp, Homo sapien
tttctgcttttgaagccgactctatgacctgtg

SEQ ID NO: 53496 - DNA, 33 bp, Homo sapien
tttctgcttttgaagctgactctatgacctgtg

SEQ ID NO: 53497 - DNA, 33 bp, Homo sapien
atttacaagactggaaataaagcttgtagattt

SEQ ID NO: 53498 - DNA, 33 bp, Homo sapien
atttacaagactggaattaaagcttgtagattt

SEQ ID NO: 53499 - DNA, 33 bp, Homo sapien
gcacaaagtaggtgctcaaaaaatatctgaaaa

SEQ ID NO: 53500 - DNA, 33 bp, Homo sapien
gcacaaagtaggtgctgaaaaaatatctgaaaa

SEQ ID NO: 53501 - DNA, 33 bp, Homo sapien
aattaaaacaatcctccgagcagatttggaata

SEQ ID NO: 53502 - DNA, 33 bp, Homo sapien
aattaaaacaatcctctgagcagatttggaata

SEQ ID NO: 53503 - DNA, 33 bp, Homo sapien
ctggagccagaaaggacgttttcaaactttagg

SEQ ID NO: 53504 - DNA, 33 bp, Homo sapien
ctggagccagaaaggaggttttcaaactttagg

SEQ ID NO: 53505 - DNA, 33 bp, Homo sapien
catgcctagctcatagaaggaactaagaaattg

SEQ ID NO: 53506 - DNA, 33 bp, Homo sapien
catgcctagctcataggaggaactaagaaattg

SEQ ID NO: 53507 - DNA, 33 bp, Homo sapien
gagagtagggcaaggacatttaataaggagcac

SEQ ID NO: 53508 - DNA, 33 bp, Homo sapien
gagagtagggcaaggagatttaataaggagcac

SEQ ID NO: 53509 - DNA, 33 bp, Homo sapien
tgcaggcctcttttcactacaacatttacactg

SEQ ID NO: 53510 - DNA, 33 bp, Homo sapien
tgcaggcctcttttcattacaacatttacactg

SEQ ID NO: 53511 - DNA, 33 bp, Homo sapien
gattcatagcatcttcaatctcatagctggaag

SEQ ID NO: 53512 - DNA, 33 bp, Homo sapien
gattcatagcatcttcgatctcatagctggaag

SEQ ID NO: 53513 - DNA, 33 bp, Homo sapien
attatgacttgaggaaagttgcaagctcctttc

SEQ ID NO: 53514 - DNA, 33 bp, Homo sapien
attatgacttgaggaaggttgcaagctcctttc

SEQ ID NO: 53515 - DNA, 33 bp, Homo sapien
gatgcttaagaattacaaagaagatgatttaaa

SEQ ID NO: 53516 - DNA, 33 bp, Homo sapien
gatgcttaagaattaccaagaagatgatttaaa

SEQ ID NO: 53517 - DNA, 33 bp, Homo sapien
agaacatgtcggtaaacgccaatgactttattg

SEQ ID NO: 53518 - DNA, 33 bp, Homo sapien
agaacatgtcggtaaatgccaatgactttattg

SEQ ID NO: 53519 - DNA, 33 bp, Homo sapien
ggttcaggttcagggaaaaagatgtgtgctgac

SEQ ID NO: 53520 - DNA, 33 bp, Homo sapien
ggttcaggttcagggataaagatgtgtgctgac

SEQ ID NO: 53521 - DNA, 33 bp, Homo sapien
aacagatagtaaagtacgatattatgcaggaat

SEQ ID NO: 53522 - DNA, 33 bp, Homo sapien
aacagatagtaaagtatgatattatgcaggaat

SEQ ID NO: 53523 - DNA, 33 bp, Homo sapien
tgactcttcctttccaacagagttctatataac

SEQ ID NO: 53524 - DNA, 33 bp, Homo sapien
tgactcttcctttccagcagagttctatataac

SEQ ID NO: 53525 - DNA, 33 bp, Homo sapien
agcccaagacaggaaactgagctaagtgttcat

SEQ ID NO: 53526 - DNA, 33 bp, Homo sapien
agcccaagacaggaaattgagctaagtgttcat

SEQ ID NO: 53527 - DNA, 33 bp, Homo sapien
gtacaaagtacagttacgtaagaggaattagtt

SEQ ID NO: 53528 - DNA, 33 bp, Homo sapien
gtacaaagtacagttatgtaagaggaattagtt

SEQ ID NO: 53529 - DNA, 33 bp, Homo sapien
aaggaggagactagtgaacaatggtgagtaatc

SEQ ID NO: 53530 - DNA, 33 bp, Homo sapien
aaggaggagactagtggacaatggtgagtaatc

SEQ ID NO: 53531 - DNA, 33 bp, Homo sapien
gatttagtgctccaacaccttttgtagattgtg

SEQ ID NO: 53532 - DNA, 33 bp, Homo sapien
gatttagtgctccaacgccttttgtagattgtg

SEQ ID NO: 53533 - DNA, 33 bp, Homo sapien
tgattggttgcctgataaaacagttcagtcaca

SEQ ID NO: 53534 - DNA, 33 bp, Homo sapien
tgattggttgcctgatgaaacagttcagtcaca

SEQ ID NO: 53535 - DNA, 33 bp, Homo sapien
aaaataacagatttctaacacttaggcatttca

SEQ ID NO: 53536 - DNA, 33 bp, Homo sapien
aaaataacagatttctgacacttaggcatttca

SEQ ID NO: 53537 - DNA, 33 bp, Homo sapien
gcactgggtatgaagacacaatgagaacattta

SEQ ID NO: 53538 - DNA, 33 bp, Homo sapien
gcactgggtatgaagagacaatgagaacattta

SEQ ID NO: 53539 - DNA, 33 bp, Homo sapien
atgagtctatgaaaaaatggaatatgtgtggtc

SEQ ID NO: 53540 - DNA, 33 bp, Homo sapien
atgagtctatgaaaaactggaatatgtgtggtc

SEQ ID NO: 53541 - DNA, 33 bp, Homo sapien
acctgacagaggatataaccaagctcagatccc

SEQ ID NO: 53542 - DNA, 33 bp, Homo sapien
acctgacagaggatatcaccaagctcagatccc

SEQ ID NO: 53543 - DNA, 33 bp, Homo sapien
agaggaggagaaaaaacggaaagaggtggacaa

SEQ ID NO: 53544 - DNA, 33 bp, Homo sapien
agaggaggagaaaaaatggaaagaggtggacaa

SEQ ID NO: 53545 - DNA, 33 bp, Homo sapien
tctaatcttacacagccaccctctgtcagagcc

SEQ ID NO: 53546 - DNA, 33 bp, Homo sapien
tctaatcttacacagctaccctctgtcagagcc

SEQ ID NO: 53547 - DNA, 33 bp, Homo sapien
tctcgcaattctaagaatctctgaactctatca

SEQ ID NO: 53548 - DNA, 33 bp, Homo sapien
tctcgcaattctaagagtctctgaactctatca

SEQ ID NO: 53549 - DNA, 33 bp, Homo sapien
ctgcttttggtggggaacctacgtatcattcaa

SEQ ID NO: 53550 - DNA, 33 bp, Homo sapien
ctgcttttggtggggaccctacgtatcattcaa

SEQ ID NO: 53551 - DNA, 33 bp, Homo sapien
ctgaagggacacttaacctcactttgctcttag

SEQ ID NO: 53552 - DNA, 33 bp, Homo sapien
ctgaagggacacttaatctcactttgctcttag

SEQ ID NO: 53553 - DNA, 33 bp, Homo sapien
attcctattctattcaagtcaactaagacaatg

SEQ ID NO: 53554 - DNA, 33 bp, Homo sapien
attcctattctattcaggtcaactaagacaatg

SEQ ID NO: 53555 - DNA, 33 bp, Homo sapien
caaagtgtcctaataaatgaaagcccagtaata

SEQ ID NO: 53556 - DNA, 33 bp, Homo sapien
caaagtgtcctaataagtgaaagcccagtaata

SEQ ID NO: 53557 - DNA, 33 bp, Homo sapien
tttaaatatcccattcaaatgtcctgtgacatg

SEQ ID NO: 53558 - DNA, 33 bp, Homo sapien
tttaaatatcccattctaatgtcctgtgacatg

SEQ ID NO: 53559 - DNA, 33 bp, Homo sapien
acttggaaaagcattacgcaagaggattgatca

SEQ ID NO: 53560 - DNA, 33 bp, Homo sapien
acttggaaaagcattatgcaagaggattgatca

SEQ ID NO: 53561 - DNA, 33 bp, Homo sapien
atgtatcacaacacgaaggaataacagttccag

SEQ ID NO: 53562 - DNA, 33 bp, Homo sapien
atgtatcacaacacgagggaataacagttccag

SEQ ID NO: 53563 - DNA, 33 bp, Homo sapien
tagattctagaggcaaacattcttacttctatt

SEQ ID NO: 53564 - DNA, 33 bp, Homo sapien
tagattctagaggcaatcattcttacttctatt

SEQ ID NO: 53565 - DNA, 33 bp, Homo sapien
caaccaactttgaatcaaaaatattcagaaaaa

SEQ ID NO: 53566 - DNA, 33 bp, Homo sapien
caaccaactttgaatccaaaatattcagaaaaa

SEQ ID NO: 53567 - DNA, 33 bp, Homo sapien
ctgaacaaagaggctaagaattaaagattagct

SEQ ID NO: 53568 - DNA, 33 bp, Homo sapien
ctgaacaaagaggctaggaattaaagattagct

SEQ ID NO: 53569 - DNA, 33 bp, Homo sapien
agaaaagtaaaggttacctaaatggatgcatta

SEQ ID NO: 53570 - DNA, 33 bp, Homo sapien
agaaaagtaaaggttatctaaatggatgcatta

SEQ ID NO: 53571 - DNA, 33 bp, Homo sapien
gataatatcttttgaccgtaaaataatgcatcc

SEQ ID NO: 53572 - DNA, 33 bp, Homo sapien
gataatatcttttgactgtaaaataatgcatcc

SEQ ID NO: 53573 - DNA, 33 bp, Homo sapien
gcacgcagcctgacaccgtatgaactagctaag

SEQ ID NO: 53574 - DNA, 33 bp, Homo sapien
gcacgcagcctgacactgtatgaactagctaag

SEQ ID NO: 53575 - DNA, 33 bp, Homo sapien
ttttttaatctgaaaacgagccaggcatttctg

SEQ ID NO: 53576 - DNA, 33 bp, Homo sapien
ttttttaatctgaaaatgagccaggcatttctg

SEQ ID NO: 53577 - DNA, 33 bp, Homo sapien
aggccttgttgacacacaaattgtaacattatc

SEQ ID NO: 53578 - DNA, 33 bp, Homo sapien
aggccttgttgacacataaattgtaacattatc

SEQ ID NO: 53579 - DNA, 33 bp, Homo sapien
aagaccaaataagacaacgcatgtaaaattcct

SEQ ID NO: 53580 - DNA, 33 bp, Homo sapien
aagaccaaataagacagcgcatgtaaaattcct

SEQ ID NO: 53581 - DNA, 33 bp, Homo sapien
acaatagcacataggacctgctaaaaagaaaat

SEQ ID NO: 53582 - DNA, 33 bp, Homo sapien
acaatagcacataggatctgctaaaaagaaaat

SEQ ID NO: 53583 - DNA, 33 bp, Homo sapien
tatgtgctattgtcaaacctatattcgagactc

SEQ ID NO: 53584 - DNA, 33 bp, Homo sapien
tatgtgctattgtcaagcctatattcgagactc

SEQ ID NO: 53585 - DNA, 33 bp, Homo sapien
ggaaaagctgataggcaagatacctcttccacc

SEQ ID NO: 53586 - DNA, 33 bp, Homo sapien
ggaaaagctgataggcgagatacctcttccacc

SEQ ID NO: 53587 - DNA, 33 bp, Homo sapien
gtttgtactttgccacagtgacgggctcctgag

SEQ ID NO: 53588 - DNA, 33 bp, Homo sapien
gtttgtactttgccacggtgacgggctcctgag

SEQ ID NO: 53589 - DNA, 33 bp, Homo sapien
ctgttgtcattacttaaaggcccgctctctttc

SEQ ID NO: 53590 - DNA, 33 bp, Homo sapien
ctgttgtcattacttagaggcccgctctctttc

SEQ ID NO: 53591 - DNA, 33 bp, Homo sapien
gaactattgatttagaacaagtgaatggaaaag

SEQ ID NO: 53592 - DNA, 33 bp, Homo sapien
gaactattgatttagagcaagtgaatggaaaag

SEQ ID NO: 53593 - DNA, 33 bp, Homo sapien
taccgaaatcatagaccgaagtaacagagccat

SEQ ID NO: 53594 - DNA, 33 bp, Homo sapien
taccgaaatcatagactgaagtaacagagccat

SEQ ID NO: 53595 - DNA, 33 bp, Homo sapien
gtgctggagacagtcacattgtttcaggatctt

SEQ ID NO: 53596 - DNA, 33 bp, Homo sapien
gtgctggagacagtcatattgtttcaggatctt

SEQ ID NO: 53597 - DNA, 33 bp, Homo sapien
tgctaattttcccatcaaagcaatccttgtctc

SEQ ID NO: 53598 - DNA, 33 bp, Homo sapien
tgctaattttcccatcgaagcaatccttgtctc

SEQ ID NO: 53599 - DNA, 33 bp, Homo sapien
cagtaattttcctgaaaaacaagaactgacatt

SEQ ID NO: 53600 - DNA, 33 bp, Homo sapien
cagtaattttcctgaacaacaagaactgacatt

SEQ ID NO: 53601 - DNA, 33 bp, Homo sapien
gtatgagtacattttaagaacacactttctgag

SEQ ID NO: 53602 - DNA, 33 bp, Homo sapien
gtatgagtacattttaggaacacactttctgag

SEQ ID NO: 53603 - DNA, 33 bp, Homo sapien
tgaatcagtgcatagacgtattacattcctgga

SEQ ID NO: 53604 - DNA, 33 bp, Homo sapien
tgaatcagtgcatagatgtattacattcctgga

SEQ ID NO: 53605 - DNA, 33 bp, Homo sapien
gcaaattgtttgaaagccaatgctgtttctgat

SEQ ID NO: 53606 - DNA, 33 bp, Homo sapien
gcaaattgtttgaaagtcaatgctgtttctgat

SEQ ID NO: 53607 - DNA, 33 bp, Homo sapien
agggtaaggaaagaccagataggctcatcccaa

SEQ ID NO: 53608 - DNA, 33 bp, Homo sapien
agggtaaggaaagacccgataggctcatcccaa

SEQ ID NO: 53609 - DNA, 33 bp, Homo sapien
aggaaaaaaacattgcacaaagaactttctttc

SEQ ID NO: 53610 - DNA, 33 bp, Homo sapien
aggaaaaaaacattgcgcaaagaactttctttc

SEQ ID NO: 53611 - DNA, 33 bp, Homo sapien
gattattaactctcccgatatcaatgtcttctc

SEQ ID NO: 53612 - DNA, 33 bp, Homo sapien
gattattaactctccctatatcaatgtcttctc

SEQ ID NO: 53613 - DNA, 33 bp, Homo sapien
aaagaccctagagaaactcaaatgatgaatttg

SEQ ID NO: 53614 - DNA, 33 bp, Homo sapien
aaagaccctagagaaagtcaaatgatgaatttg

SEQ ID NO: 53615 - DNA, 33 bp, Homo sapien
atgagtgacacacaagaaggttaaaatccaaat

SEQ ID NO: 53616 - DNA, 33 bp, Homo sapien
atgagtgacacacaaggaggttaaaatccaaat

SEQ ID NO: 53617 - DNA, 33 bp, Homo sapien
aagcctttatttatgaaagcaagcaacaagcgg

SEQ ID NO: 53618 - DNA, 33 bp, Homo sapien
aagcctttatttatgagagcaagcaacaagcgg

SEQ ID NO: 53619 - DNA, 33 bp, Homo sapien
gcccctgcccgtactcgcaggctttctgtttct

SEQ ID NO: 53620 - DNA, 33 bp, Homo sapien
gcccctgcccgtactctcaggctttctgtttct

SEQ ID NO: 53621 - DNA, 33 bp, Homo sapien
gaaactgtaaactcaacgctaagaacttctaaa

SEQ ID NO: 53622 - DNA, 33 bp, Homo sapien
gaaactgtaaactcaatgctaagaacttctaaa

SEQ ID NO: 53623 - DNA, 33 bp, Homo sapien
aatgtttcctagagaaagtaatcactacaccga

SEQ ID NO: 53624 - DNA, 33 bp, Homo sapien
aatgtttcctagagaatgtaatcactacaccga

SEQ ID NO: 53625 - DNA, 33 bp, Homo sapien
gtggggctttagagaaaggcttcatgttacaca

SEQ ID NO: 53626 - DNA, 33 bp, Homo sapien
gtggggctttagagaacggcttcatgttacaca

SEQ ID NO: 53627 - DNA, 33 bp, Homo sapien
accagcctcaagatgaaatggatatcaaaattg

SEQ ID NO: 53628 - DNA, 33 bp, Homo sapien
accagcctcaagatgacatggatatcaaaattg

SEQ ID NO: 53629 - DNA, 33 bp, Homo sapien
taaaaaaaagtatttacgtggctactgggattt

SEQ ID NO: 53630 - DNA, 33 bp, Homo sapien
taaaaaaaagtatttatgtggctactgggattt

SEQ ID NO: 53631 - DNA, 33 bp, Homo sapien
gctaagatccttctcaatgaaaaagataaaaag

SEQ ID NO: 53632 - DNA, 33 bp, Homo sapien
gctaagatccttctcagtgaaaaagataaaaag

SEQ ID NO: 53633 - DNA, 33 bp, Homo sapien
tcgccataggcaagcaacaactaaacccaattc

SEQ ID NO: 53634 - DNA, 33 bp, Homo sapien
tcgccataggcaagcagcaactaaacccaattc

SEQ ID NO: 53635 - DNA, 33 bp, Homo sapien
gaatataatcttctcacatcctggtatgtcaat

SEQ ID NO: 53636 - DNA, 33 bp, Homo sapien
gaatataatcttctcatatcctggtatgtcaat

SEQ ID NO: 53637 - DNA, 33 bp, Homo sapien
gattatcttccagttacatttttggtcttaccc

SEQ ID NO: 53638 - DNA, 33 bp, Homo sapien
gattatcttccagttatatttttggtcttaccc

SEQ ID NO: 53639 - DNA, 33 bp, Homo sapien
tctaaatcttttctaactggtcactaagctttc

SEQ ID NO: 53640 - DNA, 33 bp, Homo sapien
tctaaatcttttctaattggtcactaagctttc

SEQ ID NO: 53641 - DNA, 33 bp, Homo sapien
tcactacataaaccacccttacaccatgattag

SEQ ID NO: 53642 - DNA, 33 bp, Homo sapien
tcactacataaaccactcttacaccatgattag

SEQ ID NO: 53643 - DNA, 33 bp, Homo sapien
ccatccacgctatggaaagaacataatctcatt

SEQ ID NO: 53644 - DNA, 33 bp, Homo sapien
ccatccacgctatggagagaacataatctcatt

SEQ ID NO: 53645 - DNA, 33 bp, Homo sapien
gaagaagcgcttgccaatgacaaggtaaaggca

SEQ ID NO: 53646 - DNA, 33 bp, Homo sapien
gaagaagcgcttgccagtgacaaggtaaaggca

SEQ ID NO: 53647 - DNA, 33 bp, Homo sapien
gaaaccgtggtcccaacagaaaagcagcagagc

SEQ ID NO: 53648 - DNA, 33 bp, Homo sapien
gaaaccgtggtcccaagagaaaagcagcagagc

SEQ ID NO: 53649 - DNA, 33 bp, Homo sapien
acctgcagtgcttcaagttcaatggttgtcagt

SEQ ID NO: 53650 - DNA, 33 bp, Homo sapien
acctgcagtgcttcaatttcaatggttgtcagt

SEQ ID NO: 53651 - DNA, 33 bp, Homo sapien
ctttcaaaggtaacaaacagagtgcaaaaaatg

SEQ ID NO: 53652 - DNA, 33 bp, Homo sapien
ctttcaaaggtaacaagcagagtgcaaaaaatg

SEQ ID NO: 53653 - DNA, 33 bp, Homo sapien
aagctgcaggaagaagacatcctttacagctag

SEQ ID NO: 53654 - DNA, 33 bp, Homo sapien
aagctgcaggaagaaggcatcctttacagctag

SEQ ID NO: 53655 - DNA, 33 bp, Homo sapien
aggatttttttgtaacaggaagtaggatcagga

SEQ ID NO: 53656 - DNA, 33 bp, Homo sapien
aggatttttttgtaacgggaagtaggatcagga

SEQ ID NO: 53657 - DNA, 33 bp, Homo sapien
ggtcttgccttctcataagcccagacccattat

SEQ ID NO: 53658 - DNA, 33 bp, Homo sapien
ggtcttgccttctcatgagcccagacccattat

SEQ ID NO: 53659 - DNA, 33 bp, Homo sapien
aagtatgctgaccaacaagttctcatttcagat

SEQ ID NO: 53660 - DNA, 33 bp, Homo sapien
aagtatgctgaccaacgagttctcatttcagat

SEQ ID NO: 53661 - DNA, 33 bp, Homo sapien
ggacgtgaaggtgtcaaagaagctgtttccacc

SEQ ID NO: 53662 - DNA, 33 bp, Homo sapien
ggacgtgaaggtgtcagagaagctgtttccacc

SEQ ID NO: 53663 - DNA, 33 bp, Homo sapien
tatcttcatcacttcaaaaagcaatgaactatc

SEQ ID NO: 53664 - DNA, 33 bp, Homo sapien
tatcttcatcacttcacaaagcaatgaactatc

SEQ ID NO: 53665 - DNA, 33 bp, Homo sapien
agaggacttgtgggaactggtggagatcagggg

SEQ ID NO: 53666 - DNA, 33 bp, Homo sapien
agaggacttgtgggaagtggtggagatcagggg

SEQ ID NO: 53667 - DNA, 33 bp, Homo sapien
atggaaactctgggaaaaatcctccagaatcct

SEQ ID NO: 53668 - DNA, 33 bp, Homo sapien
atggaaactctgggaataatcctccagaatcct

SEQ ID NO: 53669 - DNA, 33 bp, Homo sapien
atgtacaagtagggatcaaggttaagaatcttc

SEQ ID NO: 53670 - DNA, 33 bp, Homo sapien
atgtacaagtagggattaaggttaagaatcttc

SEQ ID NO: 53671 - DNA, 33 bp, Homo sapien
ttctgagttagtctgccagaagtcaagttctaa

SEQ ID NO: 53672 - DNA, 33 bp, Homo sapien
ttctgagttagtctgctagaagtcaagttctaa

SEQ ID NO: 53673 - DNA, 33 bp, Homo sapien
tgataattccctgaaactgtcctgctttcttag

SEQ ID NO: 53674 - DNA, 33 bp, Homo sapien
tgataattccctgaaattgtcctgctttcttag

SEQ ID NO: 53675 - DNA, 33 bp, Homo sapien
ttagccttgaatgccacacatactctttctaaa

SEQ ID NO: 53676 - DNA, 33 bp, Homo sapien
ttagccttgaatgccatacatactctttctaaa

SEQ ID NO: 53677 - DNA, 33 bp, Homo sapien
agtatcttggagctcaaaattgctctttggagt

SEQ ID NO: 53678 - DNA, 33 bp, Homo sapien
agtatcttggagctcagaattgctctttggagt

SEQ ID NO: 53679 - DNA, 33 bp, Homo sapien
ccagattattctgatgaatcgactgacaaattt

SEQ ID NO: 53680 - DNA, 33 bp, Homo sapien
ccagattattctgatgtatcgactgacaaattt

SEQ ID NO: 53681 - DNA, 33 bp, Homo sapien
aataattttcttgtcagtaaacagtaaagaaga

SEQ ID NO: 53682 - DNA, 33 bp, Homo sapien
aataattttcttgtcattaaacagtaaagaaga

SEQ ID NO: 53683 - DNA, 33 bp, Homo sapien
aaacaattcgcaaaacaaacgacgcatttggcc

SEQ ID NO: 53684 - DNA, 33 bp, Homo sapien
aaacaattcgcaaaaccaacgacgcatttggcc

SEQ ID NO: 53685 - DNA, 33 bp, Homo sapien
aaaattcatgcctccaaattcggcaaactcttg

SEQ ID NO: 53686 - DNA, 33 bp, Homo sapien
aaaattcatgcctccagattcggcaaactcttg

SEQ ID NO: 53687 - DNA, 33 bp, Homo sapien
actctgatgactcaacactatagacagaatggc

SEQ ID NO: 53688 - DNA, 33 bp, Homo sapien
actctgatgactcaacgctatagacagaatggc

SEQ ID NO: 53689 - DNA, 33 bp, Homo sapien
cttacaatctggtgaaagagacatagagagatg

SEQ ID NO: 53690 - DNA, 33 bp, Homo sapien
cttacaatctggtgaatgagacatagagagatg

SEQ ID NO: 53691 - DNA, 33 bp, Homo sapien
cttttgctcttcacacagcctccaatatttata

SEQ ID NO: 53692 - DNA, 33 bp, Homo sapien
cttttgctcttcacacggcctccaatatttata

SEQ ID NO: 53693 - DNA, 33 bp, Homo sapien
taaaaactattccagacactgtggaagtaaaga

SEQ ID NO: 53694 - DNA, 33 bp, Homo sapien
taaaaactattccagagactgtggaagtaaaga

SEQ ID NO: 53695 - DNA, 33 bp, Homo sapien
aagtgtgcagacactaacatctgagcagtcagc

SEQ ID NO: 53696 - DNA, 33 bp, Homo sapien
aagtgtgcagacactatcatctgagcagtcagc

SEQ ID NO: 53697 - DNA, 33 bp, Homo sapien
ctgcagactagattcaatccatgctacgcattc

SEQ ID NO: 53698 - DNA, 33 bp, Homo sapien
ctgcagactagattcagtccatgctacgcattc

SEQ ID NO: 53699 - DNA, 33 bp, Homo sapien
taaaaaaataatgtgactcaaaccatttatgta

SEQ ID NO: 53700 - DNA, 33 bp, Homo sapien
taaaaaaataatgtgagtcaaaccatttatgta

SEQ ID NO: 53701 - DNA, 33 bp, Homo sapien
aactgcaaggatattgcaacaatcttgatggcg

SEQ ID NO: 53702 - DNA, 33 bp, Homo sapien
aactgcaaggatattgtaacaatcttgatggcg

SEQ ID NO: 53703 - DNA, 33 bp, Homo sapien
tacttacacaggtcaaaagtcaatgggggtcag

SEQ ID NO: 53704 - DNA, 33 bp, Homo sapien
tacttacacaggtcaagagtcaatgggggtcag

SEQ ID NO: 53705 - DNA, 33 bp, Homo sapien
gcagtatttgaagaaaacagaacactagagaga

SEQ ID NO: 53706 - DNA, 33 bp, Homo sapien
gcagtatttgaagaaatcagaacactagagaga

SEQ ID NO: 53707 - DNA, 33 bp, Homo sapien
tttttaaagaaataaggccatgaggtttacaaa

SEQ ID NO: 53708 - DNA, 33 bp, Homo sapien
tttttaaagaaataagtccatgaggtttacaaa

SEQ ID NO: 53709 - DNA, 33 bp, Homo sapien
tatgtctaaatattcaatcttgctaatatagat

SEQ ID NO: 53710 - DNA, 33 bp, Homo sapien
tatgtctaaatattcagtcttgctaatatagat

SEQ ID NO: 53711 - DNA, 33 bp, Homo sapien
agtgactaacagtccacgtgaataactgtacca

SEQ ID NO: 53712 - DNA, 33 bp, Homo sapien
agtgactaacagtccaggtgaataactgtacca

SEQ ID NO: 53713 - DNA, 33 bp, Homo sapien
agtctcaagttcaggaaacaaatgatattgagt

SEQ ID NO: 53714 - DNA, 33 bp, Homo sapien
agtctcaagttcaggatacaaatgatattgagt

SEQ ID NO: 53715 - DNA, 33 bp, Homo sapien
tttttaattcatcagacgcccctcacataagtg

SEQ ID NO: 53716 - DNA, 33 bp, Homo sapien
tttttaattcatcagatgcccctcacataagtg

SEQ ID NO: 53717 - DNA, 33 bp, Homo sapien
tggagggtagatgaaccgagaaattttcaggtt

SEQ ID NO: 53718 - DNA, 33 bp, Homo sapien
tggagggtagatgaactgagaaattttcaggtt

SEQ ID NO: 53719 - DNA, 33 bp, Homo sapien
ctggatattatgaaacagtcattgtgagatgat

SEQ ID NO: 53720 - DNA, 33 bp, Homo sapien
ctggatattatgaaacggtcattgtgagatgat

SEQ ID NO: 53721 - DNA, 33 bp, Homo sapien
atacactgatcctctaaacatccctaccccatc

SEQ ID NO: 53722 - DNA, 33 bp, Homo sapien
atacactgatcctctagacatccctaccccatc

SEQ ID NO: 53723 - DNA, 33 bp, Homo sapien
gagaaagtttcgtaaacaactggggtgattgca

SEQ ID NO: 53724 - DNA, 33 bp, Homo sapien
gagaaagtttcgtaaagaactggggtgattgca

SEQ ID NO: 53725 - DNA, 33 bp, Homo sapien
atttctggcatggaaacatcattaaagaaccaa

SEQ ID NO: 53726 - DNA, 33 bp, Homo sapien
atttctggcatggaaagatcattaaagaaccaa

SEQ ID NO: 53727 - DNA, 33 bp, Homo sapien
ggatagtttatccaagacaccttaaagtcagtt

SEQ ID NO: 53728 - DNA, 33 bp, Homo sapien
ggatagtttatccaagccaccttaaagtcagtt

SEQ ID NO: 53729 - DNA, 33 bp, Homo sapien
ctgatgtcagaattccaaaattccaagttaggg

SEQ ID NO: 53730 - DNA, 33 bp, Homo sapien
ctgatgtcagaattccgaaattccaagttaggg

SEQ ID NO: 53731 - DNA, 33 bp, Homo sapien
aatacctgttttcaggaaaggattgtatctcct

SEQ ID NO: 53732 - DNA, 33 bp, Homo sapien
aatacctgttttcagggaaggattgtatctcct

SEQ ID NO: 53733 - DNA, 33 bp, Homo sapien
ttacacgatgccacataactttcaaaagtgaga

SEQ ID NO: 53734 - DNA, 33 bp, Homo sapien
ttacacgatgccacatgactttcaaaagtgaga

SEQ ID NO: 53735 - DNA, 33 bp, Homo sapien
agtgagctatcagagacgtaggacgatgtacaa

SEQ ID NO: 53736 - DNA, 33 bp, Homo sapien
agtgagctatcagagatgtaggacgatgtacaa

SEQ ID NO: 53737 - DNA, 33 bp, Homo sapien
tcatgtccatttcaaaaaccgggaagaatagcc

SEQ ID NO: 53738 - DNA, 33 bp, Homo sapien
tcatgtccatttcaaagaccgggaagaatagcc

SEQ ID NO: 53739 - DNA, 33 bp, Homo sapien
ctcatcttcctccccaatatggtctataaggtc

SEQ ID NO: 53740 - DNA, 33 bp, Homo sapien
ctcatcttcctccccagtatggtctataaggtc

SEQ ID NO: 53741 - DNA, 33 bp, Homo sapien
atgtttaaacctcataaggactaatatatgctg

SEQ ID NO: 53742 - DNA, 33 bp, Homo sapien
atgtttaaacctcatagggactaatatatgctg

SEQ ID NO: 53743 - DNA, 33 bp, Homo sapien
ggatccataggcttcaccaaactgccagtgtgg

SEQ ID NO: 53744 - DNA, 33 bp, Homo sapien
ggatccataggcttcatcaaactgccagtgtgg

SEQ ID NO: 53745 - DNA, 33 bp, Homo sapien
tttctgattctgatgaatacaaagtgctctgct

SEQ ID NO: 53746 - DNA, 33 bp, Homo sapien
tttctgattctgatgagtacaaagtgctctgct

SEQ ID NO: 53747 - DNA, 33 bp, Homo sapien
ttgcctttgaaagtagcaggagtcagtctctca

SEQ ID NO: 53748 - DNA, 33 bp, Homo sapien
ttgcctttgaaagtagtaggagtcagtctctca

SEQ ID NO: 53749 - DNA, 33 bp, Homo sapien
cacaagcagtgtttgaccaatggatgccggatt

SEQ ID NO: 53750 - DNA, 33 bp, Homo sapien
cacaagcagtgtttgatcaatggatgccggatt

SEQ ID NO: 53751 - DNA, 33 bp, Homo sapien
tctgattcagttctgacaataattagccaacag

SEQ ID NO: 53752 - DNA, 33 bp, Homo sapien
tctgattcagttctgataataattagccaacag

SEQ ID NO: 53753 - DNA, 33 bp, Homo sapien
atttaattctgctgccacttttgagaaatttga

SEQ ID NO: 53754 - DNA, 33 bp, Homo sapien
atttaattctgctgccgcttttgagaaatttga

SEQ ID NO: 53755 - DNA, 33 bp, Homo sapien
atcgctttagagtaaaagtcattaatagtttga

SEQ ID NO: 53756 - DNA, 33 bp, Homo sapien
atcgctttagagtaaatgtcattaatagtttga

SEQ ID NO: 53757 - DNA, 33 bp, Homo sapien
gcaagtgggggaggcaagttacagttacagtgc

SEQ ID NO: 53758 - DNA, 33 bp, Homo sapien
gcaagtgggggaggcaggttacagttacagtgc

SEQ ID NO: 53759 - DNA, 33 bp, Homo sapien
ttttgggaaatactgacgtccattctcaggagg

SEQ ID NO: 53760 - DNA, 33 bp, Homo sapien
ttttgggaaatactgatgtccattctcaggagg

SEQ ID NO: 53761 - DNA, 33 bp, Homo sapien
gttcattctccagccacaggtgttagacaatac

SEQ ID NO: 53762 - DNA, 33 bp, Homo sapien
gttcattctccagccataggtgttagacaatac

SEQ ID NO: 53763 - DNA, 33 bp, Homo sapien
aaagtcccaagagccaataacatctctctaatc

SEQ ID NO: 53764 - DNA, 33 bp, Homo sapien
aaagtcccaagagccagtaacatctctctaatc

SEQ ID NO: 53765 - DNA, 33 bp, Homo sapien
ttttttttcaagttacaaggtgacatgggtata

SEQ ID NO: 53766 - DNA, 33 bp, Homo sapien
ttttttttcaagttacgaggtgacatgggtata

SEQ ID NO: 53767 - DNA, 33 bp, Homo sapien
ggattcactagcaacaataatatttatttattt

SEQ ID NO: 53768 - DNA, 33 bp, Homo sapien
ggattcactagcaacagtaatatttatttattt

SEQ ID NO: 53769 - DNA, 33 bp, Homo sapien
cattagctaatacatacgttacataaaagtgta

SEQ ID NO: 53770 - DNA, 33 bp, Homo sapien
cattagctaatacataggttacataaaagtgta

SEQ ID NO: 53771 - DNA, 33 bp, Homo sapien
agaggtcagtgcaacacctaagtgaaaatggcc

SEQ ID NO: 53772 - DNA, 33 bp, Homo sapien
agaggtcagtgcaacatctaagtgaaaatggcc

SEQ ID NO: 53773 - DNA, 33 bp, Homo sapien
tatatacagcaagcaaatgtgtgtgttttaacc

SEQ ID NO: 53774 - DNA, 33 bp, Homo sapien
tatatacagcaagcaagtgtgtgtgttttaacc

SEQ ID NO: 53775 - DNA, 33 bp, Homo sapien
tcttcctgtttaatcacccagcaaagtttcagg

SEQ ID NO: 53776 - DNA, 33 bp, Homo sapien
tcttcctgtttaatcatccagcaaagtttcagg

SEQ ID NO: 53777 - DNA, 33 bp, Homo sapien
gctttgtctagatctacggagaatgtgaagcaa

SEQ ID NO: 53778 - DNA, 33 bp, Homo sapien
gctttgtctagatctatggagaatgtgaagcaa

SEQ ID NO: 53779 - DNA, 33 bp, Homo sapien
ccttggatcacaacaaactgccttcaactcttt

SEQ ID NO: 53780 - DNA, 33 bp, Homo sapien
ccttggatcacaacaagctgccttcaactcttt

SEQ ID NO: 53781 - DNA, 33 bp, Homo sapien
tacatagtttttagtaaatggaagcagggtagg

SEQ ID NO: 53782 - DNA, 33 bp, Homo sapien
tacatagtttttagtatatggaagcagggtagg

SEQ ID NO: 53783 - DNA, 33 bp, Homo sapien
cccatgtgacaggagacgggattcattgctgat

SEQ ID NO: 53784 - DNA, 33 bp, Homo sapien
cccatgtgacaggagatgggattcattgctgat

SEQ ID NO: 53785 - DNA, 33 bp, Homo sapien
cttgagctaatgctccggaaaaggctttatctc

SEQ ID NO: 53786 - DNA, 33 bp, Homo sapien
cttgagctaatgctcctgaaaaggctttatctc

SEQ ID NO: 53787 - DNA, 33 bp, Homo sapien
ctacttggacatttgcgatactagaagattttg

SEQ ID NO: 53788 - DNA, 33 bp, Homo sapien
ctacttggacatttgctatactagaagattttg

SEQ ID NO: 53789 - DNA, 33 bp, Homo sapien
cacatcctaatccagacaaatatcaagagtgaa

SEQ ID NO: 53790 - DNA, 33 bp, Homo sapien
cacatcctaatccagataaatatcaagagtgaa

SEQ ID NO: 53791 - DNA, 33 bp, Homo sapien
agtgctagaaaatgaaacataaagcatgaaggg

SEQ ID NO: 53792 - DNA, 33 bp, Homo sapien
agtgctagaaaatgaagcataaagcatgaaggg

SEQ ID NO: 53793 - DNA, 33 bp, Homo sapien
aaaagaggttggctcccactgaagttttacaca

SEQ ID NO: 53794 - DNA, 33 bp, Homo sapien
aaaagaggttggctcctactgaagttttacaca

SEQ ID NO: 53795 - DNA, 33 bp, Homo sapien
actaggatttaaataacaaatattgcagaaaac

SEQ ID NO: 53796 - DNA, 33 bp, Homo sapien
actaggatttaaataagaaatattgcagaaaac

SEQ ID NO: 53797 - DNA, 33 bp, Homo sapien
gaagaccttatcaaaacttcagttggggactta

SEQ ID NO: 53798 - DNA, 33 bp, Homo sapien
gaagaccttatcaaaagttcagttggggactta

SEQ ID NO: 53799 - DNA, 33 bp, Homo sapien
tgacactgaacagagcaagatgactaggagaca

SEQ ID NO: 53800 - DNA, 33 bp, Homo sapien
tgacactgaacagagcgagatgactaggagaca

SEQ ID NO: 53801 - DNA, 33 bp, Homo sapien
atgagcactggatgccagagaattgatgacttg

SEQ ID NO: 53802 - DNA, 33 bp, Homo sapien
atgagcactggatgccggagaattgatgacttg

SEQ ID NO: 53803 - DNA, 33 bp, Homo sapien
tattgtccattcttagcacaagttgcagccggg

SEQ ID NO: 53804 - DNA, 33 bp, Homo sapien
tattgtccattcttagtacaagttgcagccggg

SEQ ID NO: 53805 - DNA, 33 bp, Homo sapien
acttagagtggaaaaacagctggtgagcttggg

SEQ ID NO: 53806 - DNA, 33 bp, Homo sapien
acttagagtggaaaaatagctggtgagcttggg

SEQ ID NO: 53807 - DNA, 33 bp, Homo sapien
acatttcattagggtaaaatgagagaactcctt

SEQ ID NO: 53808 - DNA, 33 bp, Homo sapien
acatttcattagggtagaatgagagaactcctt

SEQ ID NO: 53809 - DNA, 33 bp, Homo sapien
aggtgcaacccaggtagctatgcatgtcctggc

SEQ ID NO: 53810 - DNA, 33 bp, Homo sapien
aggtgcaacccaggtatctatgcatgtcctggc

SEQ ID NO: 53811 - DNA, 33 bp, Homo sapien
aagagggtgtggaccacggggaactaagacaac

SEQ ID NO: 53812 - DNA, 33 bp, Homo sapien
aagagggtgtggaccatggggaactaagacaac

SEQ ID NO: 53813 - DNA, 33 bp, Homo sapien
catgttccacggtacaagtgctgggctaaaaat

SEQ ID NO: 53814 - DNA, 33 bp, Homo sapien
catgttccacggtacaggtgctgggctaaaaat

SEQ ID NO: 53815 - DNA, 33 bp, Homo sapien
atacaaataagagcaacggaaaaacaagtcatt

SEQ ID NO: 53816 - DNA, 33 bp, Homo sapien
atacaaataagagcaatggaaaaacaagtcatt

SEQ ID NO: 53817 - DNA, 33 bp, Homo sapien
ctccctttaacaaacccatgcttgttgggttag

SEQ ID NO: 53818 - DNA, 33 bp, Homo sapien
ctccctttaacaaacctatgcttgttgggttag

SEQ ID NO: 53819 - DNA, 33 bp, Homo sapien
cacggcatttagcttacacaggaggaatgattt

SEQ ID NO: 53820 - DNA, 33 bp, Homo sapien
cacggcatttagcttagacaggaggaatgattt

SEQ ID NO: 53821 - DNA, 33 bp, Homo sapien
tattccttgctaatctcagagcctgagtctggg

SEQ ID NO: 53822 - DNA, 33 bp, Homo sapien
tattccttgctaatcttagagcctgagtctggg

SEQ ID NO: 53823 - DNA, 33 bp, Homo sapien
gtaagttgataccaacccacagatgtaaaacaa

SEQ ID NO: 53824 - DNA, 33 bp, Homo sapien
gtaagttgataccaactcacagatgtaaaacaa

SEQ ID NO: 53825 - DNA, 33 bp, Homo sapien
taaggaagatcctccaggtttagctttagtaag

SEQ ID NO: 53826 - DNA, 33 bp, Homo sapien
taaggaagatcctccatgtttagctttagtaag

SEQ ID NO: 53827 - DNA, 33 bp, Homo sapien
agcagaacacccaatcactggcacgcaatttca

SEQ ID NO: 53828 - DNA, 33 bp, Homo sapien
agcagaacacccaatcgctggcacgcaatttca

SEQ ID NO: 53829 - DNA, 33 bp, Homo sapien
cttttcattccttcacaatgtcaagtccacggt

SEQ ID NO: 53830 - DNA, 33 bp, Homo sapien
cttttcattccttcacgatgtcaagtccacggt

SEQ ID NO: 53831 - DNA, 33 bp, Homo sapien
aggtcatgttgagagtaaacatggtaaaacctg

SEQ ID NO: 53832 - DNA, 33 bp, Homo sapien
aggtcatgttgagagttaacatggtaaaacctg

SEQ ID NO: 53833 - DNA, 33 bp, Homo sapien
aaacacccttggcttacaactgcttctctaggg

SEQ ID NO: 53834 - DNA, 33 bp, Homo sapien
aaacacccttggcttagaactgcttctctaggg

SEQ ID NO: 53835 - DNA, 33 bp, Homo sapien
tctttggatcttttaaactaaacgggaagaatt

SEQ ID NO: 53836 - DNA, 33 bp, Homo sapien
tctttggatcttttaacctaaacgggaagaatt

SEQ ID NO: 53837 - DNA, 33 bp, Homo sapien
ccaggcagagagaaaaacattagtaggaaggca

SEQ ID NO: 53838 - DNA, 33 bp, Homo sapien
ccaggcagagagaaaatcattagtaggaaggca

SEQ ID NO: 53839 - DNA, 33 bp, Homo sapien
aaacagtcatacttgaagctgtactgtttttca

SEQ ID NO: 53840 - DNA, 33 bp, Homo sapien
aaacagtcatacttgaggctgtactgtttttca

SEQ ID NO: 53841 - DNA, 33 bp, Homo sapien
atttacaatctactgaacataatgggttttatt

SEQ ID NO: 53842 - DNA, 33 bp, Homo sapien
atttacaatctactgatcataatgggttttatt

SEQ ID NO: 53843 - DNA, 33 bp, Homo sapien
taacactaaagatcaggagtgggaaataggttg

SEQ ID NO: 53844 - DNA, 33 bp, Homo sapien
taacactaaagatcagtagtgggaaataggttg

SEQ ID NO: 53845 - DNA, 33 bp, Homo sapien
agtgaaaaagctcttaaattggataaaagctga

SEQ ID NO: 53846 - DNA, 33 bp, Homo sapien
agtgaaaaagctcttagattggataaaagctga

SEQ ID NO: 53847 - DNA, 33 bp, Homo sapien
tcaagttttagtaaaacgatgcttgatgactta

SEQ ID NO: 53848 - DNA, 33 bp, Homo sapien
tcaagttttagtaaaatgatgcttgatgactta

SEQ ID NO: 53849 - DNA, 33 bp, Homo sapien
gagtaatgttctatacactaagccatgcaattt

SEQ ID NO: 53850 - DNA, 33 bp, Homo sapien
gagtaatgttctataccctaagccatgcaattt

SEQ ID NO: 53851 - DNA, 33 bp, Homo sapien
ttttaccattgaggaaagtgttgcccaaagaag

SEQ ID NO: 53852 - DNA, 33 bp, Homo sapien
ttttaccattgaggaatgtgttgcccaaagaag

SEQ ID NO: 53853 - DNA, 33 bp, Homo sapien
gtcactgactgaaaaacgaggcagggagcagac

SEQ ID NO: 53854 - DNA, 33 bp, Homo sapien
gtcactgactgaaaaatgaggcagggagcagac

SEQ ID NO: 53855 - DNA, 33 bp, Homo sapien
tatcacatttcataggccaaagaggaatgtaaa

SEQ ID NO: 53856 - DNA, 33 bp, Homo sapien
tatcacatttcataggtcaaagaggaatgtaaa

SEQ ID NO: 53857 - DNA, 33 bp, Homo sapien
aggcagttccaaacaacgtcagtgagaaaatac

SEQ ID NO: 53858 - DNA, 33 bp, Homo sapien
aggcagttccaaacaatgtcagtgagaaaatac

SEQ ID NO: 53859 - DNA, 33 bp, Homo sapien
tataaaatcatttgccaaagactctaggattat

SEQ ID NO: 53860 - DNA, 33 bp, Homo sapien
tataaaatcatttgccgaagactctaggattat

SEQ ID NO: 53861 - DNA, 33 bp, Homo sapien
taaaagaatcttggataaggagcaatttcacat

SEQ ID NO: 53862 - DNA, 33 bp, Homo sapien
taaaagaatcttggattaggagcaatttcacat

SEQ ID NO: 53863 - DNA, 33 bp, Homo sapien
tggtgtagccaagtcaaaatagctctgtactcc

SEQ ID NO: 53864 - DNA, 33 bp, Homo sapien
tggtgtagccaagtcagaatagctctgtactcc

SEQ ID NO: 53865 - DNA, 33 bp, Homo sapien
agaggtgacccacttacgaccttggcctctcaa

SEQ ID NO: 53866 - DNA, 33 bp, Homo sapien
agaggtgacccacttatgaccttggcctctcaa

SEQ ID NO: 53867 - DNA, 33 bp, Homo sapien
ctgtttagtattacaaaacttgttgcagaagaa

SEQ ID NO: 53868 - DNA, 33 bp, Homo sapien
ctgtttagtattacaagacttgttgcagaagaa

SEQ ID NO: 53869 - DNA, 33 bp, Homo sapien
gctagaattcttgcgacgtggaagtcctaaatg

SEQ ID NO: 53870 - DNA, 33 bp, Homo sapien
gctagaattcttgcgatgtggaagtcctaaatg

SEQ ID NO: 53871 - DNA, 33 bp, Homo sapien
cttgtatagcagtgaaattataaaagtaccatc

SEQ ID NO: 53872 - DNA, 33 bp, Homo sapien
cttgtatagcagtgaagttataaaagtaccatc

SEQ ID NO: 53873 - DNA, 33 bp, Homo sapien
gaaacaatgggtctaacaaactgatcttagtac

SEQ ID NO: 53874 - DNA, 33 bp, Homo sapien
gaaacaatgggtctaataaactgatcttagtac

SEQ ID NO: 53875 - DNA, 33 bp, Homo sapien
aagggctgagccaagactaataatatctgcagt

SEQ ID NO: 53876 - DNA, 33 bp, Homo sapien
aagggctgagccaagagtaataatatctgcagt

SEQ ID NO: 53877 - DNA, 33 bp, Homo sapien
atggcagcatgagaaacatggttagattgactg

SEQ ID NO: 53878 - DNA, 33 bp, Homo sapien
atggcagcatgagaaatatggttagattgactg

SEQ ID NO: 53879 - DNA, 33 bp, Homo sapien
ttaaagaacaggtataaaagattgcttaaggga

SEQ ID NO: 53880 - DNA, 33 bp, Homo sapien
ttaaagaacaggtatagaagattgcttaaggga

SEQ ID NO: 53881 - DNA, 33 bp, Homo sapien
gcgttttatttatatcccagtgaaacaatccta

SEQ ID NO: 53882 - DNA, 33 bp, Homo sapien
gcgttttatttatatcgcagtgaaacaatccta

SEQ ID NO: 53883 - DNA, 33 bp, Homo sapien
taaaacgccttagtaactacatcctgagaacac

SEQ ID NO: 53884 - DNA, 33 bp, Homo sapien
taaaacgccttagtaattacatcctgagaacac

SEQ ID NO: 53885 - DNA, 33 bp, Homo sapien
agtatttgtgcttgaaaatctcattctcaaaga

SEQ ID NO: 53886 - DNA, 33 bp, Homo sapien
agtatttgtgcttgaatatctcattctcaaaga

SEQ ID NO: 53887 - DNA, 33 bp, Homo sapien
acatggtcaaaagaaacggttgcgctttaaaca

SEQ ID NO: 53888 - DNA, 33 bp, Homo sapien
acatggtcaaaagaaatggttgcgctttaaaca

SEQ ID NO: 53889 - DNA, 33 bp, Homo sapien
ttattcaaactagccaatcctgaacttgttagc

SEQ ID NO: 53890 - DNA, 33 bp, Homo sapien
ttattcaaactagccagtcctgaacttgttagc

SEQ ID NO: 53891 - DNA, 33 bp, Homo sapien
acaccttcactatcacagaagcagaaggaaaaa

SEQ ID NO: 53892 - DNA, 33 bp, Homo sapien
acaccttcactatcacggaagcagaaggaaaaa

SEQ ID NO: 53893 - DNA, 33 bp, Homo sapien
tccaaatcagtgcaaagatctgatgcggtgggg

SEQ ID NO: 53894 - DNA, 33 bp, Homo sapien
tccaaatcagtgcaaatatctgatgcggtgggg

SEQ ID NO: 53895 - DNA, 33 bp, Homo sapien
cagttaattatactgaccttggaatttcaaaag

SEQ ID NO: 53896 - DNA, 33 bp, Homo sapien
cagttaattatactgatcttggaatttcaaaag

SEQ ID NO: 53897 - DNA, 33 bp, Homo sapien
gtataaagaatgagaaagtgctcttcaagataa

SEQ ID NO: 53898 - DNA, 33 bp, Homo sapien
gtataaagaatgagaacgtgctcttcaagataa

SEQ ID NO: 53899 - DNA, 33 bp, Homo sapien
aagaaacatttgtctaaccgagaaaaagaaaga

SEQ ID NO: 53900 - DNA, 33 bp, Homo sapien
aagaaacatttgtctagccgagaaaaagaaaga

SEQ ID NO: 53901 - DNA, 33 bp, Homo sapien
catggtaaataacacccgactatttctcaccat

SEQ ID NO: 53902 - DNA, 33 bp, Homo sapien
catggtaaataacacctgactatttctcaccat

SEQ ID NO: 53903 - DNA, 33 bp, Homo sapien
actcttcaataacttacggtcccagttagagta

SEQ ID NO: 53904 - DNA, 33 bp, Homo sapien
actcttcaataacttatggtcccagttagagta

SEQ ID NO: 53905 - DNA, 33 bp, Homo sapien
ctctgaccttatcttccaccttgctcattacat

SEQ ID NO: 53906 - DNA, 33 bp, Homo sapien
ctctgaccttatcttctaccttgctcattacat

SEQ ID NO: 53907 - DNA, 33 bp, Homo sapien
aaaaataagttgctaacctgatgctccactacc

SEQ ID NO: 53908 - DNA, 33 bp, Homo sapien
aaaaataagttgctaatctgatgctccactacc

SEQ ID NO: 53909 - DNA, 33 bp, Homo sapien
tacttctacttgtcacccccctacacctataca

SEQ ID NO: 53910 - DNA, 33 bp, Homo sapien
tacttctacttgtcactcccctacacctataca

SEQ ID NO: 53911 - DNA, 33 bp, Homo sapien
cttctgttgactttagaaacacttgtgatttct

SEQ ID NO: 53912 - DNA, 33 bp, Homo sapien
cttctgttgactttagtaacacttgtgatttct

SEQ ID NO: 53913 - DNA, 33 bp, Homo sapien
agtgggaaccaagatacgggtatgcaaaggcat

SEQ ID NO: 53914 - DNA, 33 bp, Homo sapien
agtgggaaccaagatatgggtatgcaaaggcat

SEQ ID NO: 53915 - DNA, 33 bp, Homo sapien
aaagtaaacagttggacggaattttatcaattg

SEQ ID NO: 53916 - DNA, 33 bp, Homo sapien
aaagtaaacagttggatggaattttatcaattg

SEQ ID NO: 53917 - DNA, 33 bp, Homo sapien
tagtggatgaactgcaggaaggaaatcaaatat

SEQ ID NO: 53918 - DNA, 33 bp, Homo sapien
tagtggatgaactgcatgaaggaaatcaaatat

SEQ ID NO: 53919 - DNA, 33 bp, Homo sapien
gtacattttgttaataagagagcaatgtttatt

SEQ ID NO: 53920 - DNA, 33 bp, Homo sapien
gtacattttgttaataggagagcaatgtttatt

SEQ ID NO: 53921 - DNA, 33 bp, Homo sapien
tataagtagactcgtgaagttcaaacctgtgtt

SEQ ID NO: 53922 - DNA, 33 bp, Homo sapien
tataagtagactcgtgcagttcaaacctgtgtt

SEQ ID NO: 53923 - DNA, 33 bp, Homo sapien
atgtgatctgtgcacacgcaggctcccttttac

SEQ ID NO: 53924 - DNA, 33 bp, Homo sapien
atgtgatctgtgcacatgcaggctcccttttac

SEQ ID NO: 53925 - DNA, 33 bp, Homo sapien
taactctaagctgtcacactaatttttttcatc

SEQ ID NO: 53926 - DNA, 33 bp, Homo sapien
taactctaagctgtcatactaatttttttcatc

SEQ ID NO: 53927 - DNA, 33 bp, Homo sapien
attttctacttttataagtgtacaggatgcaat

SEQ ID NO: 53928 - DNA, 33 bp, Homo sapien
attttctacttttatatgtgtacaggatgcaat

SEQ ID NO: 53929 - DNA, 33 bp, Homo sapien
tctctcatccaaagtacagagaagagatcctcc

SEQ ID NO: 53930 - DNA, 33 bp, Homo sapien
tctctcatccaaagtagagagaagagatcctcc

SEQ ID NO: 53931 - DNA, 33 bp, Homo sapien
gcagccaataagcatacgaaaaaacgctcaata

SEQ ID NO: 53932 - DNA, 33 bp, Homo sapien
gcagccaataagcatatgaaaaaacgctcaata

SEQ ID NO: 53933 - DNA, 33 bp, Homo sapien
tgagttggttctgaacaatgaataggaatggat

SEQ ID NO: 53934 - DNA, 33 bp, Homo sapien
tgagttggttctgaacgatgaataggaatggat

SEQ ID NO: 53935 - DNA, 33 bp, Homo sapien
tgtctacttcttgactcactaccttctattcct

SEQ ID NO: 53936 - DNA, 33 bp, Homo sapien
tgtctacttcttgacttactaccttctattcct

SEQ ID NO: 53937 - DNA, 33 bp, Homo sapien
atagcacatgaagaaaaatgctaaaaccagcaa

SEQ ID NO: 53938 - DNA, 33 bp, Homo sapien
atagcacatgaagaaagatgctaaaaccagcaa

SEQ ID NO: 53939 - DNA, 33 bp, Homo sapien
tgtgaaaagtctaaaactgacaaacagcttaaa

SEQ ID NO: 53940 - DNA, 33 bp, Homo sapien
tgtgaaaagtctaaaattgacaaacagcttaaa

SEQ ID NO: 53941 - DNA, 33 bp, Homo sapien
aatttaaaaataaagacagcacatgaagaaaca

SEQ ID NO: 53942 - DNA, 33 bp, Homo sapien
aatttaaaaataaagatagcacatgaagaaaca

SEQ ID NO: 53943 - DNA, 33 bp, Homo sapien
aatgttaactaaaagaaagccagtgcagctata

SEQ ID NO: 53944 - DNA, 33 bp, Homo sapien
aatgttaactaaaagagagccagtgcagctata

SEQ ID NO: 53945 - DNA, 33 bp, Homo sapien
tggttatttgtggcccgacctcttttttctcag

SEQ ID NO: 53946 - DNA, 33 bp, Homo sapien
tggttatttgtggccctacctcttttttctcag

SEQ ID NO: 53947 - DNA, 33 bp, Homo sapien
agaacaatacgctatcccttacttgtacactat

SEQ ID NO: 53948 - DNA, 33 bp, Homo sapien
agaacaatacgctatctcttacttgtacactat

SEQ ID NO: 53949 - DNA, 33 bp, Homo sapien
ggaatgaggattgctcaatgtaaatatgtggct

SEQ ID NO: 53950 - DNA, 33 bp, Homo sapien
ggaatgaggattgctccatgtaaatatgtggct

SEQ ID NO: 53951 - DNA, 33 bp, Homo sapien
tgggtataataataccacattgtccagttcaag

SEQ ID NO: 53952 - DNA, 33 bp, Homo sapien
tgggtataataatacctcattgtccagttcaag

SEQ ID NO: 53953 - DNA, 33 bp, Homo sapien
ttcatctagtttgttacagttgaggcttccaaa

SEQ ID NO: 53954 - DNA, 33 bp, Homo sapien
ttcatctagtttgttatagttgaggcttccaaa

SEQ ID NO: 53955 - DNA, 33 bp, Homo sapien
atatagctgttaaaaactttgcattaacattaa

SEQ ID NO: 53956 - DNA, 33 bp, Homo sapien
atatagctgttaaaaattttgcattaacattaa

SEQ ID NO: 53957 - DNA, 33 bp, Homo sapien
gccttccgaaggagcacagccttgttgacattt

SEQ ID NO: 53958 - DNA, 33 bp, Homo sapien
gccttccgaaggagcatagccttgttgacattt

SEQ ID NO: 53959 - DNA, 33 bp, Homo sapien
taactttatttctgtccatatcaacatccaaag

SEQ ID NO: 53960 - DNA, 33 bp, Homo sapien
taactttatttctgtctatatcaacatccaaag

SEQ ID NO: 53961 - DNA, 33 bp, Homo sapien
tcctaatttgcaaaacagagatcataacaactt

SEQ ID NO: 53962 - DNA, 33 bp, Homo sapien
tcctaatttgcaaaacggagatcataacaactt

SEQ ID NO: 53963 - DNA, 33 bp, Homo sapien
gttacctccggagtccaatctagaaagcatcat

SEQ ID NO: 53964 - DNA, 33 bp, Homo sapien
gttacctccggagtccgatctagaaagcatcat

SEQ ID NO: 53965 - DNA, 33 bp, Homo sapien
gagaacgtaatcaatacaacaagctcaaagtaa

SEQ ID NO: 53966 - DNA, 33 bp, Homo sapien
gagaacgtaatcaatataacaagctcaaagtaa

SEQ ID NO: 53967 - DNA, 33 bp, Homo sapien
agcttagacaatagcaaatgaatgggtgtggcc

SEQ ID NO: 53968 - DNA, 33 bp, Homo sapien
agcttagacaatagcacatgaatgggtgtggcc

SEQ ID NO: 53969 - DNA, 33 bp, Homo sapien
ggactctgtatatgcactgaagatagaaccaac

SEQ ID NO: 53970 - DNA, 33 bp, Homo sapien
ggactctgtatatgcagtgaagatagaaccaac

SEQ ID NO: 53971 - DNA, 33 bp, Homo sapien
ttcagaggtgaatttaaaatgtttgaaggctta

SEQ ID NO: 53972 - DNA, 33 bp, Homo sapien
ttcagaggtgaatttataatgtttgaaggctta

SEQ ID NO: 53973 - DNA, 33 bp, Homo sapien
gactggtctcacttaacactagacgtatagaaa

SEQ ID NO: 53974 - DNA, 33 bp, Homo sapien
gactggtctcacttaagactagacgtatagaaa

SEQ ID NO: 53975 - DNA, 33 bp, Homo sapien
aaggcatggtcttcaactactaaggcttttaac

SEQ ID NO: 53976 - DNA, 33 bp, Homo sapien
aaggcatggtcttcaagtactaaggcttttaac

SEQ ID NO: 53977 - DNA, 33 bp, Homo sapien
cagaaaagagaatccaaatgaaaacagaattat

SEQ ID NO: 53978 - DNA, 33 bp, Homo sapien
cagaaaagagaatccagatgaaaacagaattat

SEQ ID NO: 53979 - DNA, 33 bp, Homo sapien
acatttaagcaatctacgcctcatttttcttat

SEQ ID NO: 53980 - DNA, 33 bp, Homo sapien
acatttaagcaatctatgcctcatttttcttat

SEQ ID NO: 53981 - DNA, 33 bp, Homo sapien
ttgaggcaaaggagaccccggcacctgcctccg

SEQ ID NO: 53982 - DNA, 33 bp, Homo sapien
ttgaggcaaaggagacgccggcacctgcctccg

SEQ ID NO: 53983 - DNA, 33 bp, Homo sapien
ttttgtctcttctaacagcaagcagagacaaac

SEQ ID NO: 53984 - DNA, 33 bp, Homo sapien
ttttgtctcttctaacggcaagcagagacaaac

SEQ ID NO: 53985 - DNA, 33 bp, Homo sapien
atttgtgagtaacttacgtgctttatgctatta

SEQ ID NO: 53986 - DNA, 33 bp, Homo sapien
atttgtgagtaacttatgtgctttatgctatta

SEQ ID NO: 53987 - DNA, 33 bp, Homo sapien
tatagtctgtgaacataacttgtgtaatctcta

SEQ ID NO: 53988 - DNA, 33 bp, Homo sapien
tatagtctgtgaacatgacttgtgtaatctcta

SEQ ID NO: 53989 - DNA, 33 bp, Homo sapien
aaaactgcatacagtacaacttgcacattgagt

SEQ ID NO: 53990 - DNA, 33 bp, Homo sapien
aaaactgcatacagtataacttgcacattgagt

SEQ ID NO: 53991 - DNA, 33 bp, Homo sapien
ccttcactgtgttccacggagctttaagagttt

SEQ ID NO: 53992 - DNA, 33 bp, Homo sapien
ccttcactgtgttccatggagctttaagagttt

SEQ ID NO: 53993 - DNA, 33 bp, Homo sapien
actttggaggtcacgcactccaggaaaaaataa

SEQ ID NO: 53994 - DNA, 33 bp, Homo sapien
actttggaggtcacgcgctccaggaaaaaataa

SEQ ID NO: 53995 - DNA, 33 bp, Homo sapien
aagaaggtttgtagtaagatataaggctgtcaa

SEQ ID NO: 53996 - DNA, 33 bp, Homo sapien
aagaaggtttgtagtaggatataaggctgtcaa

SEQ ID NO: 53997 - DNA, 33 bp, Homo sapien
ggcacacagagggggacgaaagaaagcactgga

SEQ ID NO: 53998 - DNA, 33 bp, Homo sapien
ggcacacagagggggatgaaagaaagcactgga

SEQ ID NO: 53999 - DNA, 33 bp, Homo sapien
attaatctgtgaagaaatacaactggcagtatt

SEQ ID NO: 54000 - DNA, 33 bp, Homo sapien
attaatctgtgaagaagtacaactggcagtatt

SEQ ID NO: 54001 - DNA, 33 bp, Homo sapien
gtaaatcagcttaccaaaataacctagagagtt

SEQ ID NO: 54002 - DNA, 33 bp, Homo sapien
gtaaatcagcttaccagaataacctagagagtt

SEQ ID NO: 54003 - DNA, 33 bp, Homo sapien
gagatgaagtcaactcaattgtggtagataagc

SEQ ID NO: 54004 - DNA, 33 bp, Homo sapien
gagatgaagtcaactcgattgtggtagataagc

SEQ ID NO: 54005 - DNA, 33 bp, Homo sapien
tgctggcaaggccgtgaagaaataggaatgctt

SEQ ID NO: 54006 - DNA, 33 bp, Homo sapien
tgctggcaaggccgtggagaaataggaatgctt

SEQ ID NO: 54007 - DNA, 33 bp, Homo sapien
aggcatgattttgttagctactctgtgacaatg

SEQ ID NO: 54008 - DNA, 33 bp, Homo sapien
aggcatgattttgttatctactctgtgacaatg

SEQ ID NO: 54009 - DNA, 33 bp, Homo sapien
atgccaatagtccctacccctgagaaaaacata

SEQ ID NO: 54010 - DNA, 33 bp, Homo sapien
atgccaatagtccctatccctgagaaaaacata

SEQ ID NO: 54011 - DNA, 33 bp, Homo sapien
ctggttcaactgtactcagccagagttctgaag

SEQ ID NO: 54012 - DNA, 33 bp, Homo sapien
ctggttcaactgtacttagccagagttctgaag

SEQ ID NO: 54013 - DNA, 33 bp, Homo sapien
ttatttctctctctgaactcacttagatgaaat

SEQ ID NO: 54014 - DNA, 33 bp, Homo sapien
ttatttctctctctgatctcacttagatgaaat

SEQ ID NO: 54015 - DNA, 33 bp, Homo sapien
caagaggattacttgaaaggagtttaaggctgc

SEQ ID NO: 54016 - DNA, 33 bp, Homo sapien
caagaggattacttgagaggagtttaaggctgc

SEQ ID NO: 54017 - DNA, 33 bp, Homo sapien
ctgagaccaggcacctgaagaactaagatttag

SEQ ID NO: 54018 - DNA, 33 bp, Homo sapien
ctgagaccaggcaccttaagaactaagatttag

SEQ ID NO: 54019 - DNA, 33 bp, Homo sapien
gtaaaagaatgaagcaataaatctaaggcttgg

SEQ ID NO: 54020 - DNA, 33 bp, Homo sapien
gtaaaagaatgaagcattaaatctaaggcttgg

SEQ ID NO: 54021 - DNA, 33 bp, Homo sapien
aatgtgacctgtggtacaaataaatccaggtaa

SEQ ID NO: 54022 - DNA, 33 bp, Homo sapien
aatgtgacctgtggtataaataaatccaggtaa

SEQ ID NO: 54023 - DNA, 33 bp, Homo sapien
ggagctcatgctaaaaattggctaccaagactt

SEQ ID NO: 54024 - DNA, 33 bp, Homo sapien
ggagctcatgctaaaagttggctaccaagactt

SEQ ID NO: 54025 - DNA, 33 bp, Homo sapien
tatacattgcagaatgacagataaaggagtctt

SEQ ID NO: 54026 - DNA, 33 bp, Homo sapien
tatacattgcagaatgtcagataaaggagtctt

SEQ ID NO: 54027 - DNA, 33 bp, Homo sapien
atgtctgtttcagcaggagcttaaaagcttctt

SEQ ID NO: 54028 - DNA, 33 bp, Homo sapien
atgtctgtttcagcagtagcttaaaagcttctt

SEQ ID NO: 54029 - DNA, 33 bp, Homo sapien
tgcattgctggaacatcaaagatttcttggtga

SEQ ID NO: 54030 - DNA, 33 bp, Homo sapien
tgcattgctggaacattaaagatttcttggtga

SEQ ID NO: 54031 - DNA, 33 bp, Homo sapien
ggctcatgtctacctccattaccactcttagcc

SEQ ID NO: 54032 - DNA, 33 bp, Homo sapien
ggctcatgtctacctcgattaccactcttagcc

SEQ ID NO: 54033 - DNA, 33 bp, Homo sapien
aaatggtctataactgcattgttcaatatggta

SEQ ID NO: 54034 - DNA, 33 bp, Homo sapien
aaatggtctataactgtattgttcaatatggta

SEQ ID NO: 54035 - DNA, 33 bp, Homo sapien
ttccttttgttctgaaaatcttactgatcactt

SEQ ID NO: 54036 - DNA, 33 bp, Homo sapien
ttccttttgttctgaacatcttactgatcactt

SEQ ID NO: 54037 - DNA, 33 bp, Homo sapien
gacgtggacatcatgaaagacatcgcctctggg

SEQ ID NO: 54038 - DNA, 33 bp, Homo sapien
gacgtggacatcatgagagacatcgcctctggg

SEQ ID NO: 54039 - DNA, 33 bp, Homo sapien
cactgcagatagaagacgctcattagctttcct

SEQ ID NO: 54040 - DNA, 33 bp, Homo sapien
cactgcagatagaagatgctcattagctttcct

SEQ ID NO: 54041 - DNA, 33 bp, Homo sapien
acaagtatccatttcccccagtctcaatagaag

SEQ ID NO: 54042 - DNA, 33 bp, Homo sapien
acaagtatccatttcctccagtctcaatagaag

SEQ ID NO: 54043 - DNA, 33 bp, Homo sapien
aaagtcttttagaaagcatacagtagcctatac

SEQ ID NO: 54044 - DNA, 33 bp, Homo sapien
aaagtcttttagaaagtatacagtagcctatac

SEQ ID NO: 54045 - DNA, 33 bp, Homo sapien
agattcaacaactaaacgttggaatggtcagga

SEQ ID NO: 54046 - DNA, 33 bp, Homo sapien
agattcaacaactaaatgttggaatggtcagga

SEQ ID NO: 54047 - DNA, 33 bp, Homo sapien
accacacattccctgcagagaagatggacgacg

SEQ ID NO: 54048 - DNA, 33 bp, Homo sapien
accacacattccctgcggagaagatggacgacg

SEQ ID NO: 54049 - DNA, 33 bp, Homo sapien
tgctgttaacaaagtaacctggattgagtggct

SEQ ID NO: 54050 - DNA, 33 bp, Homo sapien
tgctgttaacaaagtaccctggattgagtggct

SEQ ID NO: 54051 - DNA, 33 bp, Homo sapien
aactaatcacttaaaaactgtcactaaagggtt

SEQ ID NO: 54052 - DNA, 33 bp, Homo sapien
aactaatcacttaaaagctgtcactaaagggtt

SEQ ID NO: 54053 - DNA, 33 bp, Homo sapien
ggaaatgagatgcaaacctagtaagcagatagt

SEQ ID NO: 54054 - DNA, 33 bp, Homo sapien
ggaaatgagatgcaaatctagtaagcagatagt

SEQ ID NO: 54055 - DNA, 33 bp, Homo sapien
agtgggcaagacttggccagaactatttctcct

SEQ ID NO: 54056 - DNA, 33 bp, Homo sapien
agtgggcaagacttggtcagaactatttctcct

SEQ ID NO: 54057 - DNA, 33 bp, Homo sapien
gaggccctatgggctacggtaagaacttgaatt

SEQ ID NO: 54058 - DNA, 33 bp, Homo sapien
gaggccctatgggctatggtaagaacttgaatt

SEQ ID NO: 54059 - DNA, 33 bp, Homo sapien
tccaaccactactcatcacgttctgctacatgt

SEQ ID NO: 54060 - DNA, 33 bp, Homo sapien
tccaaccactactcattacgttctgctacatgt

SEQ ID NO: 54061 - DNA, 33 bp, Homo sapien
cagaagtcaaggatgaactcaaggtgttttatc

SEQ ID NO: 54062 - DNA, 33 bp, Homo sapien
cagaagtcaaggatgacctcaaggtgttttatc

SEQ ID NO: 54063 - DNA, 33 bp, Homo sapien
gagggctgactatatacaattcctcaaattctg

SEQ ID NO: 54064 - DNA, 33 bp, Homo sapien
gagggctgactatatataattcctcaaattctg

SEQ ID NO: 54065 - DNA, 33 bp, Homo sapien
aggagaaggaagtcacagcactcatggagttca

SEQ ID NO: 54066 - DNA, 33 bp, Homo sapien
aggagaaggaagtcacggcactcatggagttca

SEQ ID NO: 54067 - DNA, 33 bp, Homo sapien
tggaggtgtagtataaagaagtggcttaaaagt

SEQ ID NO: 54068 - DNA, 33 bp, Homo sapien
tggaggtgtagtataatgaagtggcttaaaagt

SEQ ID NO: 54069 - DNA, 33 bp, Homo sapien
catataatattagcagaacaatgccttttaaag

SEQ ID NO: 54070 - DNA, 33 bp, Homo sapien
catataatattagcaggacaatgccttttaaag

SEQ ID NO: 54071 - DNA, 33 bp, Homo sapien
ttcgttcctctggtagcaattgttgagtcaaaa

SEQ ID NO: 54072 - DNA, 33 bp, Homo sapien
ttcgttcctctggtaggaattgttgagtcaaaa

SEQ ID NO: 54073 - DNA, 33 bp, Homo sapien
aaacttgaaaagaaggcagcatctaaccaatca

SEQ ID NO: 54074 - DNA, 33 bp, Homo sapien
aaacttgaaaagaaggtagcatctaaccaatca

SEQ ID NO: 54075 - DNA, 33 bp, Homo sapien
aacttagtgtgggtgcaaaatgcaatgcaaatt

SEQ ID NO: 54076 - DNA, 33 bp, Homo sapien
aacttagtgtgggtgcgaaatgcaatgcaaatt

SEQ ID NO: 54077 - DNA, 33 bp, Homo sapien
ttttcagactctttaccggagttgttcaccatg

SEQ ID NO: 54078 - DNA, 33 bp, Homo sapien
ttttcagactctttactggagttgttcaccatg

SEQ ID NO: 54079 - DNA, 33 bp, Homo sapien
actacacttcactaccagcactgatttcacctg

SEQ ID NO: 54080 - DNA, 33 bp, Homo sapien
actacacttcactaccggcactgatttcacctg

SEQ ID NO: 54081 - DNA, 33 bp, Homo sapien
gagcggtggcttctacaataggtctgataatgg

SEQ ID NO: 54082 - DNA, 33 bp, Homo sapien
gagcggtggcttctacgataggtctgataatgg

SEQ ID NO: 54083 - DNA, 33 bp, Homo sapien
gaactctaagatgtgcaatcaagtaggatcacc

SEQ ID NO: 54084 - DNA, 33 bp, Homo sapien
gaactctaagatgtgcgatcaagtaggatcacc

SEQ ID NO: 54085 - DNA, 33 bp, Homo sapien
tcctgaagagctatcgccctacacataaagcat

SEQ ID NO: 54086 - DNA, 33 bp, Homo sapien
tcctgaagagctatcgtcctacacataaagcat

SEQ ID NO: 54087 - DNA, 33 bp, Homo sapien
cgtgcaataaatgcaaaccttatctgttttcta

SEQ ID NO: 54088 - DNA, 33 bp, Homo sapien
cgtgcaataaatgcaacccttatctgttttcta

SEQ ID NO: 54089 - DNA, 33 bp, Homo sapien
ctatagaagaacaccaatgaatacccatatgtg

SEQ ID NO: 54090 - DNA, 33 bp, Homo sapien
ctatagaagaacaccagtgaatacccatatgtg

SEQ ID NO: 54091 - DNA, 33 bp, Homo sapien
tgtttttgatccacaacgagttgaatccgtaga

SEQ ID NO: 54092 - DNA, 33 bp, Homo sapien
tgtttttgatccacaatgagttgaatccgtaga

SEQ ID NO: 54093 - DNA, 33 bp, Homo sapien
cagatactgaggaacaactaggcagaggccaca

SEQ ID NO: 54094 - DNA, 33 bp, Homo sapien
cagatactgaggaacagctaggcagaggccaca

SEQ ID NO: 54095 - DNA, 33 bp, Homo sapien
atctgatgtatcctagaactctgcaaaacacca

SEQ ID NO: 54096 - DNA, 33 bp, Homo sapien
atctgatgtatcctagtactctgcaaaacacca

SEQ ID NO: 54097 - DNA, 33 bp, Homo sapien
gtttgcttcagctcaaaaacacttttatataaa

SEQ ID NO: 54098 - DNA, 33 bp, Homo sapien
gtttgcttcagctcaagaacacttttatataaa

SEQ ID NO: 54099 - DNA, 33 bp, Homo sapien
atctctaactggtgataaagcatcatgaaattc

SEQ ID NO: 54100 - DNA, 33 bp, Homo sapien
atctctaactggtgatgaagcatcatgaaattc

SEQ ID NO: 54101 - DNA, 33 bp, Homo sapien
gccaaaatttgggcgcagattccaccacttggt

SEQ ID NO: 54102 - DNA, 33 bp, Homo sapien
gccaaaatttgggcgccgattccaccacttggt

SEQ ID NO: 54103 - DNA, 33 bp, Homo sapien
gaatggaggttgctaacgaaaaatcctaccctc

SEQ ID NO: 54104 - DNA, 33 bp, Homo sapien
gaatggaggttgctaatgaaaaatcctaccctc

SEQ ID NO: 54105 - DNA, 33 bp, Homo sapien
tatagggaatagaggacattaagaatacagctt

SEQ ID NO: 54106 - DNA, 33 bp, Homo sapien
tatagggaatagaggatattaagaatacagctt

SEQ ID NO: 54107 - DNA, 33 bp, Homo sapien
tttccccaaacacaaacgcaggcagtttcagaa

SEQ ID NO: 54108 - DNA, 33 bp, Homo sapien
tttccccaaacacaaatgcaggcagtttcagaa

SEQ ID NO: 54109 - DNA, 33 bp, Homo sapien
gacacagagggacaaacggagccaatgacagat

SEQ ID NO: 54110 - DNA, 33 bp, Homo sapien
gacacagagggacaaatggagccaatgacagat

SEQ ID NO: 54111 - DNA, 33 bp, Homo sapien
gtcacgtattactgcactgaggttaggcaccag

SEQ ID NO: 54112 - DNA, 33 bp, Homo sapien
gtcacgtattactgcattgaggttaggcaccag

SEQ ID NO: 54113 - DNA, 33 bp, Homo sapien
ggtttgggctctaacactgtgcaagctgagctc

SEQ ID NO: 54114 - DNA, 33 bp, Homo sapien
ggtttgggctctaacattgtgcaagctgagctc

SEQ ID NO: 54115 - DNA, 33 bp, Homo sapien
gtctcataaaaatgtacagcaaagaatgtggta

SEQ ID NO: 54116 - DNA, 33 bp, Homo sapien
gtctcataaaaatgtagagcaaagaatgtggta

SEQ ID NO: 54117 - DNA, 33 bp, Homo sapien
gctgtggattttcctacacagccaattgtacta

SEQ ID NO: 54118 - DNA, 33 bp, Homo sapien
gctgtggattttcctagacagccaattgtacta

SEQ ID NO: 54119 - DNA, 33 bp, Homo sapien
ctttgaacaatgaagaaggaggaaaaggtgtca

SEQ ID NO: 54120 - DNA, 33 bp, Homo sapien
ctttgaacaatgaagagggaggaaaaggtgtca

SEQ ID NO: 54121 - DNA, 33 bp, Homo sapien
gatgatgtggaaagaacgtaggctttgaaatca

SEQ ID NO: 54122 - DNA, 33 bp, Homo sapien
gatgatgtggaaagaatgtaggctttgaaatca

SEQ ID NO: 54123 - DNA, 33 bp, Homo sapien
ccactgaggttaggcaagttagaggagaaagcc

SEQ ID NO: 54124 - DNA, 33 bp, Homo sapien
ccactgaggttaggcacgttagaggagaaagcc

SEQ ID NO: 54125 - DNA, 33 bp, Homo sapien
agacacagctgcaaacaattccccattaaatat

SEQ ID NO: 54126 - DNA, 33 bp, Homo sapien
agacacagctgcaaacgattccccattaaatat

SEQ ID NO: 54127 - DNA, 33 bp, Homo sapien
cattaaatcaccatatcaacagattagagaaga

SEQ ID NO: 54128 - DNA, 33 bp, Homo sapien
cattaaatcaccatattaacagattagagaaga

SEQ ID NO: 54129 - DNA, 33 bp, Homo sapien
acccttgtgcatacacagagacacagcccatcc

SEQ ID NO: 54130 - DNA, 33 bp, Homo sapien
acccttgtgcatacacggagacacagcccatcc

SEQ ID NO: 54131 - DNA, 33 bp, Homo sapien
gagttctaaaagcatacgcgttaagagcatgat

SEQ ID NO: 54132 - DNA, 33 bp, Homo sapien
gagttctaaaagcatatgcgttaagagcatgat

SEQ ID NO: 54133 - DNA, 33 bp, Homo sapien
ttacaataatcataaaactttatcaaatattaa

SEQ ID NO: 54134 - DNA, 33 bp, Homo sapien
ttacaataatcataaacctttatcaaatattaa

SEQ ID NO: 54135 - DNA, 33 bp, Homo sapien
tggtatggtagtgagaatatgaaagcatttttc

SEQ ID NO: 54136 - DNA, 33 bp, Homo sapien
tggtatggtagtgagactatgaaagcatttttc

SEQ ID NO: 54137 - DNA, 33 bp, Homo sapien
acctggggtcctcatcaaaatgaccagataagg

SEQ ID NO: 54138 - DNA, 33 bp, Homo sapien
acctggggtcctcatccaaatgaccagataagg

SEQ ID NO: 54139 - DNA, 33 bp, Homo sapien
ttaaggaagtagagaacgaatcagcagatgtgg

SEQ ID NO: 54140 - DNA, 33 bp, Homo sapien
ttaaggaagtagagaatgaatcagcagatgtgg

SEQ ID NO: 54141 - DNA, 33 bp, Homo sapien
tattaccttcaaggcaacttgctaggctgataa

SEQ ID NO: 54142 - DNA, 33 bp, Homo sapien
tattaccttcaaggcagcttgctaggctgataa

SEQ ID NO: 54143 - DNA, 33 bp, Homo sapien
gagttcctgaaaatgcacctaaaaatgttggca

SEQ ID NO: 54144 - DNA, 33 bp, Homo sapien
gagttcctgaaaatgcccctaaaaatgttggca

SEQ ID NO: 54145 - DNA, 33 bp, Homo sapien
atggagctaaatacaacgatgaccattcttgcc

SEQ ID NO: 54146 - DNA, 33 bp, Homo sapien
atggagctaaatacaatgatgaccattcttgcc

SEQ ID NO: 54147 - DNA, 33 bp, Homo sapien
tgtttcagagttccagacattgaacaagtccat

SEQ ID NO: 54148 - DNA, 33 bp, Homo sapien
tgtttcagagttccagtcattgaacaagtccat

SEQ ID NO: 54149 - DNA, 33 bp, Homo sapien
aatgatttcctttgacgggtgaattatccagtt

SEQ ID NO: 54150 - DNA, 33 bp, Homo sapien
aatgatttcctttgactggtgaattatccagtt

SEQ ID NO: 54151 - DNA, 33 bp, Homo sapien
actcttgtaagtgtaaactaagttcatttggga

SEQ ID NO: 54152 - DNA, 33 bp, Homo sapien
actcttgtaagtgtaagctaagttcatttggga

SEQ ID NO: 54153 - DNA, 33 bp, Homo sapien
atctgtctcctgatacgaacatttgaaggaatc

SEQ ID NO: 54154 - DNA, 33 bp, Homo sapien
atctgtctcctgatactaacatttgaaggaatc

SEQ ID NO: 54155 - DNA, 33 bp, Homo sapien
aaaactgaaatcttaacgatggagctgatggat

SEQ ID NO: 54156 - DNA, 33 bp, Homo sapien
aaaactgaaatcttaatgatggagctgatggat

SEQ ID NO: 54157 - DNA, 33 bp, Homo sapien
tacaaaagacaaaagccgagaaattatagtagt

SEQ ID NO: 54158 - DNA, 33 bp, Homo sapien
tacaaaagacaaaagctgagaaattatagtagt

SEQ ID NO: 54159 - DNA, 33 bp, Homo sapien
aagctgtcagggttacaataaggaattagcatg

SEQ ID NO: 54160 - DNA, 33 bp, Homo sapien
aagctgtcagggttaccataaggaattagcatg

SEQ ID NO: 54161 - DNA, 33 bp, Homo sapien
cagcatgaagtttcgactcacttctcaacaagt

SEQ ID NO: 54162 - DNA, 33 bp, Homo sapien
cagcatgaagtttcgattcacttctcaacaagt

SEQ ID NO: 54163 - DNA, 33 bp, Homo sapien
gaaagagacttaccaaactgacactggggccca

SEQ ID NO: 54164 - DNA, 33 bp, Homo sapien
gaaagagacttaccaagctgacactggggccca

SEQ ID NO: 54165 - DNA, 33 bp, Homo sapien
gtaacacttataggaaacttagtggcatacctt

SEQ ID NO: 54166 - DNA, 33 bp, Homo sapien
gtaacacttataggaagcttagtggcatacctt

SEQ ID NO: 54167 - DNA, 33 bp, Homo sapien
ccaaatttgctaaaacagtagagtccaatttat

SEQ ID NO: 54168 - DNA, 33 bp, Homo sapien
ccaaatttgctaaaacggtagagtccaatttat

SEQ ID NO: 54169 - DNA, 33 bp, Homo sapien
agggcagatgaataaacatatataagaggcact

SEQ ID NO: 54170 - DNA, 33 bp, Homo sapien
agggcagatgaataaagatatataagaggcact

SEQ ID NO: 54171 - DNA, 33 bp, Homo sapien
catccatggcacaaccaataccacagcccagat

SEQ ID NO: 54172 - DNA, 33 bp, Homo sapien
catccatggcacaacccataccacagcccagat

SEQ ID NO: 54173 - DNA, 33 bp, Homo sapien
agcctcaacctcgacaacacctaagactgtacc

SEQ ID NO: 54174 - DNA, 33 bp, Homo sapien
agcctcaacctcgacagcacctaagactgtacc

SEQ ID NO: 54175 - DNA, 33 bp, Homo sapien
agttggtaattgtttacatctacaccttagcag

SEQ ID NO: 54176 - DNA, 33 bp, Homo sapien
agttggtaattgtttatatctacaccttagcag

SEQ ID NO: 54177 - DNA, 33 bp, Homo sapien
aaagccttgaatcagacggaagctaccaaaagc

SEQ ID NO: 54178 - DNA, 33 bp, Homo sapien
aaagccttgaatcagatggaagctaccaaaagc

SEQ ID NO: 54179 - DNA, 33 bp, Homo sapien
gaattgtgcaatggaactgccatgatgagcact

SEQ ID NO: 54180 - DNA, 33 bp, Homo sapien
gaattgtgcaatggaagtgccatgatgagcact

SEQ ID NO: 54181 - DNA, 33 bp, Homo sapien
ttccgaagccagaggaaaaatggtgctaatgtc

SEQ ID NO: 54182 - DNA, 33 bp, Homo sapien
ttccgaagccagaggagaaatggtgctaatgtc

SEQ ID NO: 54183 - DNA, 33 bp, Homo sapien
gaaaggtcatgaggaaaaattgatgttaaagtc

SEQ ID NO: 54184 - DNA, 33 bp, Homo sapien
gaaaggtcatgaggaagaattgatgttaaagtc

SEQ ID NO: 54185 - DNA, 33 bp, Homo sapien
acaagagggagtgagaccaagagagcaagcaag

SEQ ID NO: 54186 - DNA, 33 bp, Homo sapien
acaagagggagtgagagcaagagagcaagcaag

SEQ ID NO: 54187 - DNA, 33 bp, Homo sapien
tcaacaatgaatgtaaagtgtaagcgctactta

SEQ ID NO: 54188 - DNA, 33 bp, Homo sapien
tcaacaatgaatgtaatgtgtaagcgctactta

SEQ ID NO: 54189 - DNA, 33 bp, Homo sapien
ggagggatttgaattacatggatcaactcaact

SEQ ID NO: 54190 - DNA, 33 bp, Homo sapien
ggagggatttgaattatatggatcaactcaact

SEQ ID NO: 54191 - DNA, 33 bp, Homo sapien
gtttgcatctccagcaatacgtttcccaaggta

SEQ ID NO: 54192 - DNA, 33 bp, Homo sapien
gtttgcatctccagcattacgtttcccaaggta

SEQ ID NO: 54193 - DNA, 33 bp, Homo sapien
ggttcactcaacaaacaccaagtactctctagt

SEQ ID NO: 54194 - DNA, 33 bp, Homo sapien
ggttcactcaacaaacgccaagtactctctagt

SEQ ID NO: 54195 - DNA, 33 bp, Homo sapien
caaccactgaggatttgaaagagcaccatgaat

SEQ ID NO: 54196 - DNA, 33 bp, Homo sapien
caaccactgaggattttaaagagcaccatgaat

SEQ ID NO: 54197 - DNA, 33 bp, Homo sapien
tgacataggactttggaatctaccctttgaagg

SEQ ID NO: 54198 - DNA, 33 bp, Homo sapien
tgacataggactttgggatctaccctttgaagg

SEQ ID NO: 54199 - DNA, 33 bp, Homo sapien
tagcatggagcaagtcacttgaatgaaatgagg

SEQ ID NO: 54200 - DNA, 33 bp, Homo sapien
tagcatggagcaagtcgcttgaatgaaatgagg

SEQ ID NO: 54201 - DNA, 33 bp, Homo sapien
atagtttaactctctaagtcagttttctcattg

SEQ ID NO: 54202 - DNA, 33 bp, Homo sapien
atagtttaactctctatgtcagttttctcattg

SEQ ID NO: 54203 - DNA, 33 bp, Homo sapien
ggcttggggatgaatcaactttcaagctcattc

SEQ ID NO: 54204 - DNA, 33 bp, Homo sapien
ggcttggggatgaatccactttcaagctcattc

SEQ ID NO: 54205 - DNA, 33 bp, Homo sapien
gggacatggatgaggcacccataatatctcctg

SEQ ID NO: 54206 - DNA, 33 bp, Homo sapien
gggacatggatgaggcgcccataatatctcctg

SEQ ID NO: 54207 - DNA, 33 bp, Homo sapien
aggtggctacaccaaacgacagatttttagggc

SEQ ID NO: 54208 - DNA, 33 bp, Homo sapien
aggtggctacaccaaatgacagatttttagggc

SEQ ID NO: 54209 - DNA, 33 bp, Homo sapien
gggcaccatgacccgaagcttcataaagtggga

SEQ ID NO: 54210 - DNA, 33 bp, Homo sapien
gggcaccatgacccgaggcttcataaagtggga

SEQ ID NO: 54211 - DNA, 33 bp, Homo sapien
tcttcccccagatacccaaaattatctctctca

SEQ ID NO: 54212 - DNA, 33 bp, Homo sapien
tcttcccccagataccgaaaattatctctctca

SEQ ID NO: 54213 - DNA, 33 bp, Homo sapien
gctgcttcccatcagaccaggaagattggagtc

SEQ ID NO: 54214 - DNA, 33 bp, Homo sapien
gctgcttcccatcagatcaggaagattggagtc

SEQ ID NO: 54215 - DNA, 33 bp, Homo sapien
tgttcttcacagaaagcctcaaaatatttgttc

SEQ ID NO: 54216 - DNA, 33 bp, Homo sapien
tgttcttcacagaaaggctcaaaatatttgttc

SEQ ID NO: 54217 - DNA, 33 bp, Homo sapien
taggatacgcaagcaccgtgaggagatcagcta

SEQ ID NO: 54218 - DNA, 33 bp, Homo sapien
taggatacgcaagcactgtgaggagatcagcta

SEQ ID NO: 54219 - DNA, 33 bp, Homo sapien
tgtcacctcagttctccacttctttttgctgat

SEQ ID NO: 54220 - DNA, 33 bp, Homo sapien
tgtcacctcagttctctacttctttttgctgat

SEQ ID NO: 54221 - DNA, 33 bp, Homo sapien
actcatatttggctcacagtaaacttctttaaa

SEQ ID NO: 54222 - DNA, 33 bp, Homo sapien
actcatatttggctcatagtaaacttctttaaa

SEQ ID NO: 54223 - DNA, 33 bp, Homo sapien
agaagcatcaggatcacgtgggacctattggaa

SEQ ID NO: 54224 - DNA, 33 bp, Homo sapien
agaagcatcaggatcatgtgggacctattggaa

SEQ ID NO: 54225 - DNA, 33 bp, Homo sapien
tgattgtctctaccaccatgagtcaccagcaat

SEQ ID NO: 54226 - DNA, 33 bp, Homo sapien
tgattgtctctaccactatgagtcaccagcaat

SEQ ID NO: 54227 - DNA, 33 bp, Homo sapien
tgcatggtcagttatacgcagattttcttccac

SEQ ID NO: 54228 - DNA, 33 bp, Homo sapien
tgcatggtcagttatatgcagattttcttccac

SEQ ID NO: 54229 - DNA, 33 bp, Homo sapien
gaggggaatgggatgaaagagagtggagattaa

SEQ ID NO: 54230 - DNA, 33 bp, Homo sapien
gaggggaatgggatgagagagagtggagattaa

SEQ ID NO: 54231 - DNA, 33 bp, Homo sapien
actgagcagtctaaaccctcttctgactagaag

SEQ ID NO: 54232 - DNA, 33 bp, Homo sapien
actgagcagtctaaactctcttctgactagaag

SEQ ID NO: 54233 - DNA, 33 bp, Homo sapien
tatgaattaaagtaaacttggctcttgagcttt

SEQ ID NO: 54234 - DNA, 33 bp, Homo sapien
tatgaattaaagtaaatttggctcttgagcttt

SEQ ID NO: 54235 - DNA, 33 bp, Homo sapien
tgcaaaccatgtccagcagttccattaactgct

SEQ ID NO: 54236 - DNA, 33 bp, Homo sapien
tgcaaaccatgtccagtagttccattaactgct

SEQ ID NO: 54237 - DNA, 33 bp, Homo sapien
tctgtgaagtaatttacgatacctccaaagtga

SEQ ID NO: 54238 - DNA, 33 bp, Homo sapien
tctgtgaagtaatttatgatacctccaaagtga

SEQ ID NO: 54239 - DNA, 33 bp, Homo sapien
ttagctctaaaaattaccttgagcctttgcaag

SEQ ID NO: 54240 - DNA, 33 bp, Homo sapien
ttagctctaaaaattatcttgagcctttgcaag

SEQ ID NO: 54241 - DNA, 33 bp, Homo sapien
agtttgttctccacaaagtagccaaagtaaatg

SEQ ID NO: 54242 - DNA, 33 bp, Homo sapien
agtttgttctccacaaggtagccaaagtaaatg

SEQ ID NO: 54243 - DNA, 33 bp, Homo sapien
ctttactaaatccttaacatatctttcacaaag

SEQ ID NO: 54244 - DNA, 33 bp, Homo sapien
ctttactaaatccttagcatatctttcacaaag

SEQ ID NO: 54245 - DNA, 33 bp, Homo sapien
ggacttgaggcaaaaaacctagtcagaaataac

SEQ ID NO: 54246 - DNA, 33 bp, Homo sapien
ggacttgaggcaaaaaccctagtcagaaataac

SEQ ID NO: 54247 - DNA, 33 bp, Homo sapien
accatcatatgaaaaaactatcagggaaatgca

SEQ ID NO: 54248 - DNA, 33 bp, Homo sapien
accatcatatgaaaaagctatcagggaaatgca

SEQ ID NO: 54249 - DNA, 33 bp, Homo sapien
aagacacacaagaggccaaccatcatatgaaaa

SEQ ID NO: 54250 - DNA, 33 bp, Homo sapien
aagacacacaagaggcgaaccatcatatgaaaa

SEQ ID NO: 54251 - DNA, 33 bp, Homo sapien
cattaggattttattacgctgatttgtgatctt

SEQ ID NO: 54252 - DNA, 33 bp, Homo sapien
cattaggattttattatgctgatttgtgatctt

SEQ ID NO: 54253 - DNA, 33 bp, Homo sapien
attaaagcaaacacatgatagacagtatctcag

SEQ ID NO: 54254 - DNA, 33 bp, Homo sapien
attaaagcaaacacattatagacagtatctcag

SEQ ID NO: 54255 - DNA, 33 bp, Homo sapien
tatactgcacatatcaccatgttgttattgttt

SEQ ID NO: 54256 - DNA, 33 bp, Homo sapien
tatactgcacatatcatcatgttgttattgttt

SEQ ID NO: 54257 - DNA, 33 bp, Homo sapien
tttgtttcgtcagtaaataaaaagggcagaatt

SEQ ID NO: 54258 - DNA, 33 bp, Homo sapien
tttgtttcgtcagtaagtaaaaagggcagaatt

SEQ ID NO: 54259 - DNA, 33 bp, Homo sapien
tccttattggtgtcaaattctgccttttaataa

SEQ ID NO: 54260 - DNA, 33 bp, Homo sapien
tccttattggtgtcaagttctgccttttaataa

SEQ ID NO: 54261 - DNA, 33 bp, Homo sapien
cattttctttacttccagaattgtcctggaaaa

SEQ ID NO: 54262 - DNA, 33 bp, Homo sapien
cattttctttacttccggaattgtcctggaaaa

SEQ ID NO: 54263 - DNA, 33 bp, Homo sapien
gcctttcttgtgatgacacttttggcggctcga

SEQ ID NO: 54264 - DNA, 33 bp, Homo sapien
gcctttcttgtgatgatacttttggcggctcga

SEQ ID NO: 54265 - DNA, 33 bp, Homo sapien
aaatcaagcttaccccaaaagattagccttgta

SEQ ID NO: 54266 - DNA, 33 bp, Homo sapien
aaatcaagcttaccccgaaagattagccttgta

SEQ ID NO: 54267 - DNA, 33 bp, Homo sapien
acattactcaagatcaacgatgtcacatgttat

SEQ ID NO: 54268 - DNA, 33 bp, Homo sapien
acattactcaagatcatcgatgtcacatgttat

SEQ ID NO: 54269 - DNA, 33 bp, Homo sapien
aataaggattgaatgcactagttattacttaca

SEQ ID NO: 54270 - DNA, 33 bp, Homo sapien
aataaggattgaatgcgctagttattacttaca

SEQ ID NO: 54271 - DNA, 33 bp, Homo sapien
aatatccaaacatacaatatattcacataaata

SEQ ID NO: 54272 - DNA, 33 bp, Homo sapien
aatatccaaacatacagtatattcacataaata

SEQ ID NO: 54273 - DNA, 33 bp, Homo sapien
aactcttttctgctaaatgtctccatgttacca

SEQ ID NO: 54274 - DNA, 33 bp, Homo sapien
aactcttttctgctaagtgtctccatgttacca

SEQ ID NO: 54275 - DNA, 33 bp, Homo sapien
ttttcttaccatttaaacaaaaatcctacacag

SEQ ID NO: 54276 - DNA, 33 bp, Homo sapien
ttttcttaccatttaagcaaaaatcctacacag

SEQ ID NO: 54277 - DNA, 33 bp, Homo sapien
tatatcatttgactgaatatgaccctcctacat

SEQ ID NO: 54278 - DNA, 33 bp, Homo sapien
tatatcatttgactgagtatgaccctcctacat

SEQ ID NO: 54279 - DNA, 33 bp, Homo sapien
ttgccacaatggaatcactagtatcacgcaggc

SEQ ID NO: 54280 - DNA, 33 bp, Homo sapien
ttgccacaatggaatcgctagtatcacgcaggc

SEQ ID NO: 54281 - DNA, 33 bp, Homo sapien
gtggaagacaatgaaacctctcattacttagga

SEQ ID NO: 54282 - DNA, 33 bp, Homo sapien
gtggaagacaatgaaagctctcattacttagga

SEQ ID NO: 54283 - DNA, 33 bp, Homo sapien
tagagaagatgagtcagatatttggtttatttc

SEQ ID NO: 54284 - DNA, 33 bp, Homo sapien
tagagaagatgagtcatatatttggtttatttc

SEQ ID NO: 54285 - DNA, 33 bp, Homo sapien
atgttaaatattgaggccataatcacagactac

SEQ ID NO: 54286 - DNA, 33 bp, Homo sapien
atgttaaatattgaggtcataatcacagactac

SEQ ID NO: 54287 - DNA, 33 bp, Homo sapien
aaaattcttttcaccaggcaaactaatgaaacc

SEQ ID NO: 54288 - DNA, 33 bp, Homo sapien
aaaattcttttcaccatgcaaactaatgaaacc

SEQ ID NO: 54289 - DNA, 33 bp, Homo sapien
actcaaatatctgaacaaaacattttacctctc

SEQ ID NO: 54290 - DNA, 33 bp, Homo sapien
actcaaatatctgaacgaaacattttacctctc

SEQ ID NO: 54291 - DNA, 33 bp, Homo sapien
ggtatttgcattctgaagcattaaggtctttgg

SEQ ID NO: 54292 - DNA, 33 bp, Homo sapien
ggtatttgcattctgaggcattaaggtctttgg

SEQ ID NO: 54293 - DNA, 33 bp, Homo sapien
tggaagggttagtcaacgttatttaagaatgca

SEQ ID NO: 54294 - DNA, 33 bp, Homo sapien
tggaagggttagtcaatgttatttaagaatgca

SEQ ID NO: 54295 - DNA, 33 bp, Homo sapien
acaatttagagtcctacgaaacagacatcaatg

SEQ ID NO: 54296 - DNA, 33 bp, Homo sapien
acaatttagagtcctatgaaacagacatcaatg

SEQ ID NO: 54297 - DNA, 33 bp, Homo sapien
gcatccttaatactcacagtgcaagccattatc

SEQ ID NO: 54298 - DNA, 33 bp, Homo sapien
gcatccttaatactcagagtgcaagccattatc

SEQ ID NO: 54299 - DNA, 33 bp, Homo sapien
ctttagtggcattactcactggattctggatct

SEQ ID NO: 54300 - DNA, 33 bp, Homo sapien
ctttagtggcattacttactggattctggatct

SEQ ID NO: 54301 - DNA, 33 bp, Homo sapien
ggagcgaattaaaataacaatcgtactttaagg

SEQ ID NO: 54302 - DNA, 33 bp, Homo sapien
ggagcgaattaaaatatcaatcgtactttaagg

SEQ ID NO: 54303 - DNA, 33 bp, Homo sapien
gtggtttgatgagtgaacaatgtcagtatcaac

SEQ ID NO: 54304 - DNA, 33 bp, Homo sapien
gtggtttgatgagtgagcaatgtcagtatcaac

SEQ ID NO: 54305 - DNA, 33 bp, Homo sapien
aacaaattttgtccagaatcgctcagtacaaat

SEQ ID NO: 54306 - DNA, 33 bp, Homo sapien
aacaaattttgtccaggatcgctcagtacaaat

SEQ ID NO: 54307 - DNA, 33 bp, Homo sapien
aagacaggtaataagcaaaagatgaagaaggaa

SEQ ID NO: 54308 - DNA, 33 bp, Homo sapien
aagacaggtaataagcgaaagatgaagaaggaa

SEQ ID NO: 54309 - DNA, 33 bp, Homo sapien
gggccagtctttcactgacttgggactgcaggt

SEQ ID NO: 54310 - DNA, 33 bp, Homo sapien
gggccagtctttcacttacttgggactgcaggt

SEQ ID NO: 54311 - DNA, 33 bp, Homo sapien
aaggcaataacaaataagacatagtccttgact

SEQ ID NO: 54312 - DNA, 33 bp, Homo sapien
aaggcaataacaaatacgacatagtccttgact

SEQ ID NO: 54313 - DNA, 33 bp, Homo sapien
gtacatgacagtacacaacaagcgctctaacag

SEQ ID NO: 54314 - DNA, 33 bp, Homo sapien
gtacatgacagtacacgacaagcgctctaacag

SEQ ID NO: 54315 - DNA, 33 bp, Homo sapien
catatgaacaaaaatcaaagagttaatacagcc

SEQ ID NO: 54316 - DNA, 33 bp, Homo sapien
catatgaacaaaaatcgaagagttaatacagcc

SEQ ID NO: 54317 - DNA, 33 bp, Homo sapien
ctgtaactaactttgacatgacttctttctttg

SEQ ID NO: 54318 - DNA, 33 bp, Homo sapien
ctgtaactaactttgatatgacttctttctttg

SEQ ID NO: 54319 - DNA, 33 bp, Homo sapien
ctatactcaggtttaccgccagtgttggcttct

SEQ ID NO: 54320 - DNA, 33 bp, Homo sapien
ctatactcaggtttactgccagtgttggcttct

SEQ ID NO: 54321 - DNA, 33 bp, Homo sapien
cttttcttcaccattaccctctctctccactgc

SEQ ID NO: 54322 - DNA, 33 bp, Homo sapien
cttttcttcaccattagcctctctctccactgc

SEQ ID NO: 54323 - DNA, 33 bp, Homo sapien
cccacatcatattccaactgcttcctgtttctc

SEQ ID NO: 54324 - DNA, 33 bp, Homo sapien
cccacatcatattccagctgcttcctgtttctc

SEQ ID NO: 54325 - DNA, 33 bp, Homo sapien
ctttaaaactgcttacagaagtatctaagacaa

SEQ ID NO: 54326 - DNA, 33 bp, Homo sapien
ctttaaaactgcttacggaagtatctaagacaa

SEQ ID NO: 54327 - DNA, 33 bp, Homo sapien
ggctcaggagcaactacgtctgggctcttggaa

SEQ ID NO: 54328 - DNA, 33 bp, Homo sapien
ggctcaggagcaactaggtctgggctcttggaa

SEQ ID NO: 54329 - DNA, 33 bp, Homo sapien
taaagtttacttagagaaccagtgtaatataat

SEQ ID NO: 54330 - DNA, 33 bp, Homo sapien
taaagtttacttagagtaccagtgtaatataat

SEQ ID NO: 54331 - DNA, 33 bp, Homo sapien
gtaaatcttcccctcccaaaatctgaactggtg

SEQ ID NO: 54332 - DNA, 33 bp, Homo sapien
gtaaatcttcccctcctaaaatctgaactggtg

SEQ ID NO: 54333 - DNA, 33 bp, Homo sapien
gtcttatggaaatacaaattaccccacttaatt

SEQ ID NO: 54334 - DNA, 33 bp, Homo sapien
gtcttatggaaatacagattaccccacttaatt

SEQ ID NO: 54335 - DNA, 33 bp, Homo sapien
tagctagttcaccaaaaagcccaatattatatt

SEQ ID NO: 54336 - DNA, 33 bp, Homo sapien
tagctagttcaccaaagagcccaatattatatt

SEQ ID NO: 54337 - DNA, 33 bp, Homo sapien
tatcaaaagttagtcaaggatgctcatggatat

SEQ ID NO: 54338 - DNA, 33 bp, Homo sapien
tatcaaaagttagtcatggatgctcatggatat

SEQ ID NO: 54339 - DNA, 33 bp, Homo sapien
actaggatgaatctaccacattggcaagcagag

SEQ ID NO: 54340 - DNA, 33 bp, Homo sapien
actaggatgaatctactacattggcaagcagag

SEQ ID NO: 54341 - DNA, 33 bp, Homo sapien
tttactagttaaccaccgaaacattatgaagcc

SEQ ID NO: 54342 - DNA, 33 bp, Homo sapien
tttactagttaaccactgaaacattatgaagcc

SEQ ID NO: 54343 - DNA, 33 bp, Homo sapien
tgccaattaaaagtgaacagcatttacccatgc

SEQ ID NO: 54344 - DNA, 33 bp, Homo sapien
tgccaattaaaagtgaccagcatttacccatgc

SEQ ID NO: 54345 - DNA, 33 bp, Homo sapien
attttaacactgttcaaaagcatatttggagtt

SEQ ID NO: 54346 - DNA, 33 bp, Homo sapien
attttaacactgttcagaagcatatttggagtt

SEQ ID NO: 54347 - DNA, 33 bp, Homo sapien
tctcctgataagcaaaacagtcctgccatctgt

SEQ ID NO: 54348 - DNA, 33 bp, Homo sapien
tctcctgataagcaaagcagtcctgccatctgt

SEQ ID NO: 54349 - DNA, 33 bp, Homo sapien
acttgtctgattgaacactattgcctcttcatc

SEQ ID NO: 54350 - DNA, 33 bp, Homo sapien
acttgtctgattgaacgctattgcctcttcatc

SEQ ID NO: 54351 - DNA, 33 bp, Homo sapien
gacttgacctggcccccaaattttacagaacag

SEQ ID NO: 54352 - DNA, 33 bp, Homo sapien
gacttgacctggcccctaaattttacagaacag

SEQ ID NO: 54353 - DNA, 33 bp, Homo sapien
atcaaagggagtgttccactttgaaagaagaag

SEQ ID NO: 54354 - DNA, 33 bp, Homo sapien
atcaaagggagtgttctactttgaaagaagaag

SEQ ID NO: 54355 - DNA, 33 bp, Homo sapien
aatacaaatacagtgaagttctgttgcaaaata

SEQ ID NO: 54356 - DNA, 33 bp, Homo sapien
aatacaaatacagtgaggttctgttgcaaaata

SEQ ID NO: 54357 - DNA, 33 bp, Homo sapien
tccttaagcaaattaaagtctctggtcctctcc

SEQ ID NO: 54358 - DNA, 33 bp, Homo sapien
tccttaagcaaattaatgtctctggtcctctcc

SEQ ID NO: 54359 - DNA, 33 bp, Homo sapien
ggagaggtaccgaaacaatcattctccttgctc

SEQ ID NO: 54360 - DNA, 33 bp, Homo sapien
ggagaggtaccgaaacgatcattctccttgctc

SEQ ID NO: 54361 - DNA, 33 bp, Homo sapien
attaaacaatatttcaaaacgtattacaataag

SEQ ID NO: 54362 - DNA, 33 bp, Homo sapien
attaaacaatatttcacaacgtattacaataag

SEQ ID NO: 54363 - DNA, 33 bp, Homo sapien
caccttatccaaatgtgaacccaagatggatta

SEQ ID NO: 54364 - DNA, 33 bp, Homo sapien
caccttatccaaatgttaacccaagatggatta

SEQ ID NO: 54365 - DNA, 33 bp, Homo sapien
ctgaagtacatccttacgttcctagatttcatg

SEQ ID NO: 54366 - DNA, 33 bp, Homo sapien
ctgaagtacatccttatgttcctagatttcatg

SEQ ID NO: 54367 - DNA, 33 bp, Homo sapien
ggtagaagtcatagtcaagcacattttgcatct

SEQ ID NO: 54368 - DNA, 33 bp, Homo sapien
ggtagaagtcatagtcgagcacattttgcatct

SEQ ID NO: 54369 - DNA, 33 bp, Homo sapien
atggcagcccacgttcccactgttaatacttgg

SEQ ID NO: 54370 - DNA, 33 bp, Homo sapien
atggcagcccacgttctcactgttaatacttgg

SEQ ID NO: 54371 - DNA, 33 bp, Homo sapien
cataatattcaaaataaccagttttcaacaaaa

SEQ ID NO: 54372 - DNA, 33 bp, Homo sapien
cataatattcaaaatacccagttttcaacaaaa

SEQ ID NO: 54373 - DNA, 33 bp, Homo sapien
ggtcagattatctccacaagttagagcttgtaa

SEQ ID NO: 54374 - DNA, 33 bp, Homo sapien
ggtcagattatctccataagttagagcttgtaa

SEQ ID NO: 54375 - DNA, 33 bp, Homo sapien
caccacagaataatgcaagtccaagtgctgaat

SEQ ID NO: 54376 - DNA, 33 bp, Homo sapien
caccacagaataatgcgagtccaagtgctgaat

SEQ ID NO: 54377 - DNA, 33 bp, Homo sapien
gaacatggtatttgaacatttcctgcaggcatg

SEQ ID NO: 54378 - DNA, 33 bp, Homo sapien
gaacatggtatttgaatatttcctgcaggcatg

SEQ ID NO: 54379 - DNA, 33 bp, Homo sapien
tggtctcttgactgaaacttatcataaaatttc

SEQ ID NO: 54380 - DNA, 33 bp, Homo sapien
tggtctcttgactgaaccttatcataaaatttc

SEQ ID NO: 54381 - DNA, 33 bp, Homo sapien
tgtcaactactatatccatgaggaatactatca

SEQ ID NO: 54382 - DNA, 33 bp, Homo sapien
tgtcaactactatatctatgaggaatactatca

SEQ ID NO: 54383 - DNA, 33 bp, Homo sapien
atctttcatatggagaacaatgtgcgggaacat

SEQ ID NO: 54384 - DNA, 33 bp, Homo sapien
atctttcatatggagatcaatgtgcgggaacat

SEQ ID NO: 54385 - DNA, 33 bp, Homo sapien
tttaagtcaaccaatccaccacccattgaattc

SEQ ID NO: 54386 - DNA, 33 bp, Homo sapien
tttaagtcaaccaatctaccacccattgaattc

SEQ ID NO: 54387 - DNA, 33 bp, Homo sapien
tgagtgcatggtggacaatccaactcttcgtgg

SEQ ID NO: 54388 - DNA, 33 bp, Homo sapien
tgagtgcatggtggaccatccaactcttcgtgg

SEQ ID NO: 54389 - DNA, 33 bp, Homo sapien
gagtaaacgagggataacttttcagcctcactt

SEQ ID NO: 54390 - DNA, 33 bp, Homo sapien
gagtaaacgagggatagcttttcagcctcactt

SEQ ID NO: 54391 - DNA, 33 bp, Homo sapien
atcctcttttttcacacagaacgacttatcagg

SEQ ID NO: 54392 - DNA, 33 bp, Homo sapien
atcctcttttttcacatagaacgacttatcagg

SEQ ID NO: 54393 - DNA, 33 bp, Homo sapien
aataaatcagagtcaaataattggaatccttac

SEQ ID NO: 54394 - DNA, 33 bp, Homo sapien
aataaatcagagtcaagtaattggaatccttac

SEQ ID NO: 54395 - DNA, 33 bp, Homo sapien
atagcctcccctccacaactccaataatgcatg

SEQ ID NO: 54396 - DNA, 33 bp, Homo sapien
atagcctcccctccacgactccaataatgcatg

SEQ ID NO: 54397 - DNA, 33 bp, Homo sapien
ggagccagtgtttgtaacctgaatcaccatgaa

SEQ ID NO: 54398 - DNA, 33 bp, Homo sapien
ggagccagtgtttgtaccctgaatcaccatgaa

SEQ ID NO: 54399 - DNA, 33 bp, Homo sapien
caaattttgattctgaaagttaaaaatccaaaa

SEQ ID NO: 54400 - DNA, 33 bp, Homo sapien
caaattttgattctgagagttaaaaatccaaaa

SEQ ID NO: 54401 - DNA, 33 bp, Homo sapien
cagaatcaaaatttggaattatgtaattgttca

SEQ ID NO: 54402 - DNA, 33 bp, Homo sapien
cagaatcaaaatttggcattatgtaattgttca

SEQ ID NO: 54403 - DNA, 33 bp, Homo sapien
tcagcaggaaggcaaaagtacgaatgagaatgg

SEQ ID NO: 54404 - DNA, 33 bp, Homo sapien
tcagcaggaaggcaaatgtacgaatgagaatgg

SEQ ID NO: 54405 - DNA, 33 bp, Homo sapien
ctacgtgtatatggcaactttgtacattcatta

SEQ ID NO: 54406 - DNA, 33 bp, Homo sapien
ctacgtgtatatggcacctttgtacattcatta

SEQ ID NO: 54407 - DNA, 33 bp, Homo sapien
ggataagtggataaggaaggtagagtctgggga

SEQ ID NO: 54408 - DNA, 33 bp, Homo sapien
ggataagtggataagggaggtagagtctgggga

SEQ ID NO: 54409 - DNA, 33 bp, Homo sapien
gaagggaatcaaggaagatttgaaggtttttga

SEQ ID NO: 54410 - DNA, 33 bp, Homo sapien
gaagggaatcaaggaatatttgaaggtttttga

SEQ ID NO: 54411 - DNA, 33 bp, Homo sapien
tcttcaacactggtgaagattccaagagatatt

SEQ ID NO: 54412 - DNA, 33 bp, Homo sapien
tcttcaacactggtgaggattccaagagatatt

SEQ ID NO: 54413 - DNA, 33 bp, Homo sapien
cacgtatttaacccaaaggtgcaggaaaattgc

SEQ ID NO: 54414 - DNA, 33 bp, Homo sapien
cacgtatttaacccaacggtgcaggaaaattgc

SEQ ID NO: 54415 - DNA, 33 bp, Homo sapien
ctagccattgtgtctacgtgctcggaatgaaac

SEQ ID NO: 54416 - DNA, 33 bp, Homo sapien
ctagccattgtgtctaggtgctcggaatgaaac

SEQ ID NO: 54417 - DNA, 33 bp, Homo sapien
caacaggaagaagacaaaagtgagcatggtgac

SEQ ID NO: 54418 - DNA, 33 bp, Homo sapien
caacaggaagaagacacaagtgagcatggtgac

SEQ ID NO: 54419 - DNA, 33 bp, Homo sapien
ttaaagtagagagaaaaggggtgcgtgggttgc

SEQ ID NO: 54420 - DNA, 33 bp, Homo sapien
ttaaagtagagagaaacggggtgcgtgggttgc

SEQ ID NO: 54421 - DNA, 33 bp, Homo sapien
caaaaggcagatcttacgtcggtgaatggatgt

SEQ ID NO: 54422 - DNA, 33 bp, Homo sapien
caaaaggcagatcttatgtcggtgaatggatgt

SEQ ID NO: 54423 - DNA, 33 bp, Homo sapien
aactttaaaagaaaacaagtgaggtctccttag

SEQ ID NO: 54424 - DNA, 33 bp, Homo sapien
aactttaaaagaaaacgagtgaggtctccttag

SEQ ID NO: 54425 - DNA, 33 bp, Homo sapien
agtcactgtttctcaaccaatagcatgaaatgc

SEQ ID NO: 54426 - DNA, 33 bp, Homo sapien
agtcactgtttctcaatcaatagcatgaaatgc

SEQ ID NO: 54427 - DNA, 33 bp, Homo sapien
actgtaactttccacaagatgctgtcttcttcc

SEQ ID NO: 54428 - DNA, 33 bp, Homo sapien
actgtaactttccacaggatgctgtcttcttcc

SEQ ID NO: 54429 - DNA, 33 bp, Homo sapien
agttcttataatgtagcagtttcttctgtttgt

SEQ ID NO: 54430 - DNA, 33 bp, Homo sapien
agttcttataatgtagtagtttcttctgtttgt

SEQ ID NO: 54431 - DNA, 33 bp, Homo sapien
tggagttccacagttccatctgaccattaggca

SEQ ID NO: 54432 - DNA, 33 bp, Homo sapien
tggagttccacagttctatctgaccattaggca

SEQ ID NO: 54433 - DNA, 33 bp, Homo sapien
tctgtggatgttaccactaggcaaacatttatg

SEQ ID NO: 54434 - DNA, 33 bp, Homo sapien
tctgtggatgttaccagtaggcaaacatttatg

SEQ ID NO: 54435 - DNA, 33 bp, Homo sapien
actccgacaccattaaccaaaacgactgactct

SEQ ID NO: 54436 - DNA, 33 bp, Homo sapien
actccgacaccattaatcaaaacgactgactct

SEQ ID NO: 54437 - DNA, 33 bp, Homo sapien
cccacatagccaaatactacagtgggagaaaag

SEQ ID NO: 54438 - DNA, 33 bp, Homo sapien
cccacatagccaaatattacagtgggagaaaag

SEQ ID NO: 54439 - DNA, 33 bp, Homo sapien
ctcattctatctcttggaatataagatcttcat

SEQ ID NO: 54440 - DNA, 33 bp, Homo sapien
ctcattctatctcttgtaatataagatcttcat

SEQ ID NO: 54441 - DNA, 33 bp, Homo sapien
cgaactagggcctaatgatagtcacagccaaac

SEQ ID NO: 54442 - DNA, 33 bp, Homo sapien
cgaactagggcctaattatagtcacagccaaac

SEQ ID NO: 54443 - DNA, 33 bp, Homo sapien
taaagggacagaaataaggtaatgaggaaagca

SEQ ID NO: 54444 - DNA, 33 bp, Homo sapien
taaagggacagaaatatggtaatgaggaaagca

SEQ ID NO: 54445 - DNA, 33 bp, Homo sapien
gtgatttagtagaacaatgtggtttctgattgg

SEQ ID NO: 54446 - DNA, 33 bp, Homo sapien
gtgatttagtagaacactgtggtttctgattgg

SEQ ID NO: 54447 - DNA, 33 bp, Homo sapien
tgctcctattgtcagaccttgtagcaactttgt

SEQ ID NO: 54448 - DNA, 33 bp, Homo sapien
tgctcctattgtcagatcttgtagcaactttgt

SEQ ID NO: 54449 - DNA, 33 bp, Homo sapien
tatttcatcttaactgaatctggaaatccagag

SEQ ID NO: 54450 - DNA, 33 bp, Homo sapien
tatttcatcttaactgcatctggaaatccagag

SEQ ID NO: 54451 - DNA, 33 bp, Homo sapien
taagtccctgcctcatcaatagacagaaatgac

SEQ ID NO: 54452 - DNA, 33 bp, Homo sapien
taagtccctgcctcatgaatagacagaaatgac

SEQ ID NO: 54453 - DNA, 33 bp, Homo sapien
tttctctactgctccaagtttgtggtctatcaa

SEQ ID NO: 54454 - DNA, 33 bp, Homo sapien
tttctctactgctccacgtttgtggtctatcaa

SEQ ID NO: 54455 - DNA, 33 bp, Homo sapien
ataaaacctgaccaccgatcatgctaagaaaag

SEQ ID NO: 54456 - DNA, 33 bp, Homo sapien
ataaaacctgaccacctatcatgctaagaaaag

SEQ ID NO: 54457 - DNA, 33 bp, Homo sapien
gggagaggatagttaacggatacaaaattacag

SEQ ID NO: 54458 - DNA, 33 bp, Homo sapien
gggagaggatagttaatggatacaaaattacag

SEQ ID NO: 54459 - DNA, 33 bp, Homo sapien
ttccattttgtatataccacatttctgtatcca

SEQ ID NO: 54460 - DNA, 33 bp, Homo sapien
ttccattttgtatatagcacatttctgtatcca

SEQ ID NO: 54461 - DNA, 33 bp, Homo sapien
ttagtttgatgacacacaggctgagtgaaaaat

SEQ ID NO: 54462 - DNA, 33 bp, Homo sapien
ttagtttgatgacacataggctgagtgaaaaat

SEQ ID NO: 54463 - DNA, 33 bp, Homo sapien
tgtaatttcctgctcccctttacaaaaacaact

SEQ ID NO: 54464 - DNA, 33 bp, Homo sapien
tgtaatttcctgctcctctttacaaaaacaact

SEQ ID NO: 54465 - DNA, 33 bp, Homo sapien
gtaggaatgagccatgaaagattagaagggagg

SEQ ID NO: 54466 - DNA, 33 bp, Homo sapien
gtaggaatgagccatggaagattagaagggagg

SEQ ID NO: 54467 - DNA, 33 bp, Homo sapien
ttggtatgataaacaacccctatgctttgtttc

SEQ ID NO: 54468 - DNA, 33 bp, Homo sapien
ttggtatgataaacaatccctatgctttgtttc

SEQ ID NO: 54469 - DNA, 33 bp, Homo sapien
taaacttggcccattgaaggggagagagtgatt

SEQ ID NO: 54470 - DNA, 33 bp, Homo sapien
taaacttggcccattggaggggagagagtgatt

SEQ ID NO: 54471 - DNA, 33 bp, Homo sapien
ggtttctagggttcaactgatcacagcctgaat

SEQ ID NO: 54472 - DNA, 33 bp, Homo sapien
ggtttctagggttcaattgatcacagcctgaat

SEQ ID NO: 54473 - DNA, 33 bp, Homo sapien
acaccagctgctgtaacgccaaaagtaatagaa

SEQ ID NO: 54474 - DNA, 33 bp, Homo sapien
acaccagctgctgtaatgccaaaagtaatagaa

SEQ ID NO: 54475 - DNA, 33 bp, Homo sapien
tctgccagaaatctgaaccaattgagaaataaa

SEQ ID NO: 54476 - DNA, 33 bp, Homo sapien
tctgccagaaatctgagccaattgagaaataaa

SEQ ID NO: 54477 - DNA, 33 bp, Homo sapien
ttttacaaaattttaactgtcactgctggagaa

SEQ ID NO: 54478 - DNA, 33 bp, Homo sapien
ttttacaaaattttaattgtcactgctggagaa

SEQ ID NO: 54479 - DNA, 33 bp, Homo sapien
aagtgtatgttcaatacggtcagtgcatgcagg

SEQ ID NO: 54480 - DNA, 33 bp, Homo sapien
aagtgtatgttcaatatggtcagtgcatgcagg

SEQ ID NO: 54481 - DNA, 33 bp, Homo sapien
agttaacttgaagcaaccaaggagtacaaatga

SEQ ID NO: 54482 - DNA, 33 bp, Homo sapien
agttaacttgaagcaatcaaggagtacaaatga

SEQ ID NO: 54483 - DNA, 33 bp, Homo sapien
aggactaaacctggcacattttaggcacttgaa

SEQ ID NO: 54484 - DNA, 33 bp, Homo sapien
aggactaaacctggcatattttaggcacttgaa

SEQ ID NO: 54485 - DNA, 33 bp, Homo sapien
agcctggattctttaacaggagctgacattctc

SEQ ID NO: 54486 - DNA, 33 bp, Homo sapien
agcctggattctttaagaggagctgacattctc

SEQ ID NO: 54487 - DNA, 33 bp, Homo sapien
aggacaggagacaagggttagagactattgaga

SEQ ID NO: 54488 - DNA, 33 bp, Homo sapien
aggacaggagacaaggtttagagactattgaga

SEQ ID NO: 54489 - DNA, 33 bp, Homo sapien
gttaacagtcttactcccattttacagtgaaag

SEQ ID NO: 54490 - DNA, 33 bp, Homo sapien
gttaacagtcttactctcattttacagtgaaag

SEQ ID NO: 54491 - DNA, 33 bp, Homo sapien
agtagctattattaccactattatttatcatca

SEQ ID NO: 54492 - DNA, 33 bp, Homo sapien
agtagctattattaccgctattatttatcatca

SEQ ID NO: 54493 - DNA, 33 bp, Homo sapien
gacattctgatgcagacggccctttggatgcac

SEQ ID NO: 54494 - DNA, 33 bp, Homo sapien
gacattctgatgcagatggccctttggatgcac

SEQ ID NO: 54495 - DNA, 33 bp, Homo sapien
tccacagaaaaagagaacagtttcaaaacatga

SEQ ID NO: 54496 - DNA, 33 bp, Homo sapien
tccacagaaaaagagaccagtttcaaaacatga

SEQ ID NO: 54497 - DNA, 33 bp, Homo sapien
aaccagtgttcacatacgaaatttggtttaaac

SEQ ID NO: 54498 - DNA, 33 bp, Homo sapien
aaccagtgttcacatatgaaatttggtttaaac

SEQ ID NO: 54499 - DNA, 33 bp, Homo sapien
aaggctagactggacgaaagtcatggacatctg

SEQ ID NO: 54500 - DNA, 33 bp, Homo sapien
aaggctagactggacggaagtcatggacatctg

SEQ ID NO: 54501 - DNA, 33 bp, Homo sapien
tgttaaccatcagtgactattagcaatctctaa

SEQ ID NO: 54502 - DNA, 33 bp, Homo sapien
tgttaaccatcagtgattattagcaatctctaa

SEQ ID NO: 54503 - DNA, 33 bp, Homo sapien
tctgaagactgtcatcactctagttcctggtga

SEQ ID NO: 54504 - DNA, 33 bp, Homo sapien
tctgaagactgtcatcgctctagttcctggtga

SEQ ID NO: 54505 - DNA, 33 bp, Homo sapien
aatgagagacaatgcccggactgtccaagtatt

SEQ ID NO: 54506 - DNA, 33 bp, Homo sapien
aatgagagacaatgcctggactgtccaagtatt

SEQ ID NO: 54507 - DNA, 33 bp, Homo sapien
aaggataccttgatccaaaagccattctcttta

SEQ ID NO: 54508 - DNA, 33 bp, Homo sapien
aaggataccttgatccgaaagccattctcttta

SEQ ID NO: 54509 - DNA, 33 bp, Homo sapien
tagtagcttctcagtacagaaattcagtgtcta

SEQ ID NO: 54510 - DNA, 33 bp, Homo sapien
tagtagcttctcagtatagaaattcagtgtcta

SEQ ID NO: 54511 - DNA, 33 bp, Homo sapien
gaagcataaagatgaccgggtgccctgaatgac

SEQ ID NO: 54512 - DNA, 33 bp, Homo sapien
gaagcataaagatgactgggtgccctgaatgac

SEQ ID NO: 54513 - DNA, 33 bp, Homo sapien
aattttaccgaattcacaggggagctcaggggc

SEQ ID NO: 54514 - DNA, 33 bp, Homo sapien
aattttaccgaattcataggggagctcaggggc

SEQ ID NO: 54515 - DNA, 33 bp, Homo sapien
ttcccacattccttgcgcctggtttcattagtt

SEQ ID NO: 54516 - DNA, 33 bp, Homo sapien
ttcccacattccttgctcctggtttcattagtt

SEQ ID NO: 54517 - DNA, 33 bp, Homo sapien
ttaaaattgggcataaacctatgtagcctttct

SEQ ID NO: 54518 - DNA, 33 bp, Homo sapien
ttaaaattgggcataagcctatgtagcctttct

SEQ ID NO: 54519 - DNA, 33 bp, Homo sapien
gttatttgagcccatcagaaaattacaatttca

SEQ ID NO: 54520 - DNA, 33 bp, Homo sapien
gttatttgagcccatcggaaaattacaatttca

SEQ ID NO: 54521 - DNA, 33 bp, Homo sapien
acatcttgcattagacaattgataaatatcagt

SEQ ID NO: 54522 - DNA, 33 bp, Homo sapien
acatcttgcattagactattgataaatatcagt

SEQ ID NO: 54523 - DNA, 33 bp, Homo sapien
gtccaaacatactggagaccaaatggagcttta

SEQ ID NO: 54524 - DNA, 33 bp, Homo sapien
gtccaaacatactggataccaaatggagcttta

SEQ ID NO: 54525 - DNA, 33 bp, Homo sapien
aaatttgcgccatgaaatattcctacagttatg

SEQ ID NO: 54526 - DNA, 33 bp, Homo sapien
aaatttgcgccatgaagtattcctacagttatg

SEQ ID NO: 54527 - DNA, 33 bp, Homo sapien
ctagggctcctactcaggcaaccagtatcaggc

SEQ ID NO: 54528 - DNA, 33 bp, Homo sapien
ctagggctcctactcatgcaaccagtatcaggc

SEQ ID NO: 54529 - DNA, 33 bp, Homo sapien
tagttggtgagaccataataacacagaaaactg

SEQ ID NO: 54530 - DNA, 33 bp, Homo sapien
tagttggtgagaccatcataacacagaaaactg

SEQ ID NO: 54531 - DNA, 33 bp, Homo sapien
ttttatgtcaaggctacgttgattcataaaatg

SEQ ID NO: 54532 - DNA, 33 bp, Homo sapien
ttttatgtcaaggctatgttgattcataaaatg

SEQ ID NO: 54533 - DNA, 33 bp, Homo sapien
ccttgacaaaattttaactaactgaatccatca

SEQ ID NO: 54534 - DNA, 33 bp, Homo sapien
ccttgacaaaattttagctaactgaatccatca

SEQ ID NO: 54535 - DNA, 33 bp, Homo sapien
ttacaacaccacattaccataatttctttttga

SEQ ID NO: 54536 - DNA, 33 bp, Homo sapien
ttacaacaccacattatcataatttctttttga

SEQ ID NO: 54537 - DNA, 33 bp, Homo sapien
accaagacacatttggccaatgatttttattta

SEQ ID NO: 54538 - DNA, 33 bp, Homo sapien
accaagacacatttggtcaatgatttttattta

SEQ ID NO: 54539 - DNA, 33 bp, Homo sapien
gtgactaagttagcagaaatatagtgtatattc

SEQ ID NO: 54540 - DNA, 33 bp, Homo sapien
gtgactaagttagcagcaatatagtgtatattc

SEQ ID NO: 54541 - DNA, 33 bp, Homo sapien
aatgtgagagacaaaaaatgaataagaaaaact

SEQ ID NO: 54542 - DNA, 33 bp, Homo sapien
aatgtgagagacaaaacatgaataagaaaaact

SEQ ID NO: 54543 - DNA, 33 bp, Homo sapien
aactgtctcctctccaagtggcttcagacaagg

SEQ ID NO: 54544 - DNA, 33 bp, Homo sapien
aactgtctcctctccaggtggcttcagacaagg

SEQ ID NO: 54545 - DNA, 33 bp, Homo sapien
caacaagcatgatgataaaacaactttggaaat

SEQ ID NO: 54546 - DNA, 33 bp, Homo sapien
caacaagcatgatgattaaacaactttggaaat

SEQ ID NO: 54547 - DNA, 33 bp, Homo sapien
gtatgttcatttccaccgctgtacagtagtcca

SEQ ID NO: 54548 - DNA, 33 bp, Homo sapien
gtatgttcatttccactgctgtacagtagtcca

SEQ ID NO: 54549 - DNA, 33 bp, Homo sapien
atagacatcaattcaacatgaagcctcaaattt

SEQ ID NO: 54550 - DNA, 33 bp, Homo sapien
atagacatcaattcaagatgaagcctcaaattt

SEQ ID NO: 54551 - DNA, 33 bp, Homo sapien
atatatgcaagagttacagggatgaagttgatt

SEQ ID NO: 54552 - DNA, 33 bp, Homo sapien
atatatgcaagagttatagggatgaagttgatt

SEQ ID NO: 54553 - DNA, 33 bp, Homo sapien
ttttataaggataccaatcatactgggttaggg

SEQ ID NO: 54554 - DNA, 33 bp, Homo sapien
ttttataaggataccactcatactgggttaggg

SEQ ID NO: 54555 - DNA, 33 bp, Homo sapien
gaacttctagtctccagaactgtaagctagtca

SEQ ID NO: 54556 - DNA, 33 bp, Homo sapien
gaacttctagtctccataactgtaagctagtca

SEQ ID NO: 54557 - DNA, 33 bp, Homo sapien
ggatctgtccttgttcacattcatttgctaggg

SEQ ID NO: 54558 - DNA, 33 bp, Homo sapien
ggatctgtccttgttcgcattcatttgctaggg

SEQ ID NO: 54559 - DNA, 33 bp, Homo sapien
ggggagaaatcatcagactctccttgattgcac

SEQ ID NO: 54560 - DNA, 33 bp, Homo sapien
ggggagaaatcatcaggctctccttgattgcac

SEQ ID NO: 54561 - DNA, 33 bp, Homo sapien
accccttttatgattcagaagtatccatttcag

SEQ ID NO: 54562 - DNA, 33 bp, Homo sapien
accccttttatgattcggaagtatccatttcag

SEQ ID NO: 54563 - DNA, 33 bp, Homo sapien
ctctgattgatatacacggacaaatgtgcgtct

SEQ ID NO: 54564 - DNA, 33 bp, Homo sapien
ctctgattgatatacatggacaaatgtgcgtct

SEQ ID NO: 54565 - DNA, 33 bp, Homo sapien
cagagaaatacctgtgaatgactaggaggaaga

SEQ ID NO: 54566 - DNA, 33 bp, Homo sapien
cagagaaatacctgtggatgactaggaggaaga

SEQ ID NO: 54567 - DNA, 33 bp, Homo sapien
agcccatgaggcaaaactgatgtctcaccttac

SEQ ID NO: 54568 - DNA, 33 bp, Homo sapien
agcccatgaggcaaaattgatgtctcaccttac

SEQ ID NO: 54569 - DNA, 33 bp, Homo sapien
gctcagtctgttccataaatgaaattaaggcat

SEQ ID NO: 54570 - DNA, 33 bp, Homo sapien
gctcagtctgttccatgaatgaaattaaggcat

SEQ ID NO: 54571 - DNA, 33 bp, Homo sapien
atctttactaaacacactaaacttctcttgcct

SEQ ID NO: 54572 - DNA, 33 bp, Homo sapien
atctttactaaacacattaaacttctcttgcct

SEQ ID NO: 54573 - DNA, 33 bp, Homo sapien
gatatgctgagcaaaaggatgattcacatctgg

SEQ ID NO: 54574 - DNA, 33 bp, Homo sapien
gatatgctgagcaaaatgatgattcacatctgg

SEQ ID NO: 54575 - DNA, 33 bp, Homo sapien
aagaattttcttggaaatctttgtgtgtttgga

SEQ ID NO: 54576 - DNA, 33 bp, Homo sapien
aagaattttcttggaagtctttgtgtgtttgga

SEQ ID NO: 54577 - DNA, 33 bp, Homo sapien
gacccgattggctgacgattccttagagcttta

SEQ ID NO: 54578 - DNA, 33 bp, Homo sapien
gacccgattggctgactattccttagagcttta

SEQ ID NO: 54579 - DNA, 33 bp, Homo sapien
aagggatgtacaagaacaaaaccagaagatgac

SEQ ID NO: 54580 - DNA, 33 bp, Homo sapien
aagggatgtacaagaagaaaaccagaagatgac

SEQ ID NO: 54581 - DNA, 33 bp, Homo sapien
ccaccttttctttcacagatatcatgaagtagg

SEQ ID NO: 54582 - DNA, 33 bp, Homo sapien
ccaccttttctttcactgatatcatgaagtagg

SEQ ID NO: 54583 - DNA, 33 bp, Homo sapien
agagtctaatttgagaaaggacatgatttcctt

SEQ ID NO: 54584 - DNA, 33 bp, Homo sapien
agagtctaatttgagacaggacatgatttcctt

SEQ ID NO: 54585 - DNA, 33 bp, Homo sapien
aagtgatgtcaggaaaaaggataaagcagatgc

SEQ ID NO: 54586 - DNA, 33 bp, Homo sapien
aagtgatgtcaggaaagaggataaagcagatgc

SEQ ID NO: 54587 - DNA, 33 bp, Homo sapien
tgcaggcagagcataaaataatttccagagaaa

SEQ ID NO: 54588 - DNA, 33 bp, Homo sapien
tgcaggcagagcataagataatttccagagaaa

SEQ ID NO: 54589 - DNA, 33 bp, Homo sapien
gctacctcaatcaggcactttgccctctgactt

SEQ ID NO: 54590 - DNA, 33 bp, Homo sapien
gctacctcaatcaggcgctttgccctctgactt

SEQ ID NO: 54591 - DNA, 33 bp, Homo sapien
agtccaggtatgtaagcagcaatggctttgtct

SEQ ID NO: 54592 - DNA, 33 bp, Homo sapien
agtccaggtatgtaagtagcaatggctttgtct

SEQ ID NO: 54593 - DNA, 33 bp, Homo sapien
acaatagttttcaagacacaggatatcaggcaa

SEQ ID NO: 54594 - DNA, 33 bp, Homo sapien
acaatagttttcaagagacaggatatcaggcaa

SEQ ID NO: 54595 - DNA, 33 bp, Homo sapien
caaagaagtgaagaacacaggaaattttatcta

SEQ ID NO: 54596 - DNA, 33 bp, Homo sapien
caaagaagtgaagaactcaggaaattttatcta

SEQ ID NO: 54597 - DNA, 33 bp, Homo sapien
ccctcagagagcttcacggtaacttgctgcatt

SEQ ID NO: 54598 - DNA, 33 bp, Homo sapien
ccctcagagagcttcatggtaacttgctgcatt

SEQ ID NO: 54599 - DNA, 33 bp, Homo sapien
ctgagggctaaaggccacaatcaaaataaaggt

SEQ ID NO: 54600 - DNA, 33 bp, Homo sapien
ctgagggctaaaggccgcaatcaaaataaaggt

SEQ ID NO: 54601 - DNA, 33 bp, Homo sapien
ctttagcccagcattccagtcttagctcttagt

SEQ ID NO: 54602 - DNA, 33 bp, Homo sapien
ctttagcccagcattctagtcttagctcttagt

SEQ ID NO: 54603 - DNA, 33 bp, Homo sapien
tgagcactgtgtgagactcaatttttctttcac

SEQ ID NO: 54604 - DNA, 33 bp, Homo sapien
tgagcactgtgtgagattcaatttttctttcac

SEQ ID NO: 54605 - DNA, 33 bp, Homo sapien
aacattcccattggaaacattcttcccatcccc

SEQ ID NO: 54606 - DNA, 33 bp, Homo sapien
aacattcccattggaatcattcttcccatcccc

SEQ ID NO: 54607 - DNA, 33 bp, Homo sapien
tttggattacttcttacggtagtcttaggaaac

SEQ ID NO: 54608 - DNA, 33 bp, Homo sapien
tttggattacttcttatggtagtcttaggaaac

SEQ ID NO: 54609 - DNA, 33 bp, Homo sapien
atagtgatgggctaccaactccagtacatttaa

SEQ ID NO: 54610 - DNA, 33 bp, Homo sapien
atagtgatgggctaccgactccagtacatttaa

SEQ ID NO: 54611 - DNA, 33 bp, Homo sapien
gaagccttgaccgaaacgggtacacatggtaaa

SEQ ID NO: 54612 - DNA, 33 bp, Homo sapien
gaagccttgaccgaaatgggtacacatggtaaa

SEQ ID NO: 54613 - DNA, 33 bp, Homo sapien
tattacactaagttgacgtaggcactcataaca

SEQ ID NO: 54614 - DNA, 33 bp, Homo sapien
tattacactaagttgatgtaggcactcataaca

SEQ ID NO: 54615 - DNA, 33 bp, Homo sapien
gacagctggtttccaactcagatgataatctct

SEQ ID NO: 54616 - DNA, 33 bp, Homo sapien
gacagctggtttccaagtcagatgataatctct

SEQ ID NO: 54617 - DNA, 33 bp, Homo sapien
ctgacccttggttccacaacaccctgaaaaatt

SEQ ID NO: 54618 - DNA, 33 bp, Homo sapien
ctgacccttggttccataacaccctgaaaaatt

SEQ ID NO: 54619 - DNA, 33 bp, Homo sapien
tcttttgttaaggcctcaaaaatatttaaggtg

SEQ ID NO: 54620 - DNA, 33 bp, Homo sapien
tcttttgttaaggcctgaaaaatatttaaggtg

SEQ ID NO: 54621 - DNA, 33 bp, Homo sapien
tacattccacttttgaagttccagaacaatgct

SEQ ID NO: 54622 - DNA, 33 bp, Homo sapien
tacattccacttttgaggttccagaacaatgct

SEQ ID NO: 54623 - DNA, 33 bp, Homo sapien
atctatatctgtgaagccatttacactaatctg

SEQ ID NO: 54624 - DNA, 33 bp, Homo sapien
atctatatctgtgaaggcatttacactaatctg

SEQ ID NO: 54625 - DNA, 33 bp, Homo sapien
aaaggggcaggaactgaaaaggtatagaatgta

SEQ ID NO: 54626 - DNA, 33 bp, Homo sapien
aaaggggcaggaactggaaaggtatagaatgta

SEQ ID NO: 54627 - DNA, 33 bp, Homo sapien
actatatcttggtaaaaaaaatgcattatttta

SEQ ID NO: 54628 - DNA, 33 bp, Homo sapien
actatatcttggtaaacaaaatgcattatttta

SEQ ID NO: 54629 - DNA, 33 bp, Homo sapien
ccactgcagctaagcaaagccactgtaaccaca

SEQ ID NO: 54630 - DNA, 33 bp, Homo sapien
ccactgcagctaagcagagccactgtaaccaca

SEQ ID NO: 54631 - DNA, 33 bp, Homo sapien
atggtattttggataacagatggacatctctaa

SEQ ID NO: 54632 - DNA, 33 bp, Homo sapien
atggtattttggataatagatggacatctctaa

SEQ ID NO: 54633 - DNA, 33 bp, Homo sapien
tattcttattctgtacactagcaacttaagatt

SEQ ID NO: 54634 - DNA, 33 bp, Homo sapien
tattcttattctgtacgctagcaacttaagatt

SEQ ID NO: 54635 - DNA, 33 bp, Homo sapien
gcttaactgagtattgcagagtattacataatt

SEQ ID NO: 54636 - DNA, 33 bp, Homo sapien
gcttaactgagtattggagagtattacataatt

SEQ ID NO: 54637 - DNA, 33 bp, Homo sapien
catttccttgattatacggagattgatttcctt

SEQ ID NO: 54638 - DNA, 33 bp, Homo sapien
catttccttgattatagggagattgatttcctt

SEQ ID NO: 54639 - DNA, 33 bp, Homo sapien
cttagcgaacaatcaaagttacagcaaagtgaa

SEQ ID NO: 54640 - DNA, 33 bp, Homo sapien
cttagcgaacaatcaaggttacagcaaagtgaa

SEQ ID NO: 54641 - DNA, 33 bp, Homo sapien
ttcactaactccaagaacttgtctccctacttc

SEQ ID NO: 54642 - DNA, 33 bp, Homo sapien
ttcactaactccaagagcttgtctccctacttc

SEQ ID NO: 54643 - DNA, 33 bp, Homo sapien
ataatggcttaatgagcattcgctatatgttaa

SEQ ID NO: 54644 - DNA, 33 bp, Homo sapien
ataatggcttaatgagtattcgctatatgttaa

SEQ ID NO: 54645 - DNA, 33 bp, Homo sapien
atctagtctaaagccaaattaagataccatcat

SEQ ID NO: 54646 - DNA, 33 bp, Homo sapien
atctagtctaaagccacattaagataccatcat

SEQ ID NO: 54647 - DNA, 33 bp, Homo sapien
agtgctatatttctccagagaggattcaaccta

SEQ ID NO: 54648 - DNA, 33 bp, Homo sapien
agtgctatatttctccggagaggattcaaccta

SEQ ID NO: 54649 - DNA, 33 bp, Homo sapien
acaggcaacaatttagcaactgtcccagtagta

SEQ ID NO: 54650 - DNA, 33 bp, Homo sapien
acaggcaacaatttagtaactgtcccagtagta

SEQ ID NO: 54651 - DNA, 33 bp, Homo sapien
tgagtctgaagtgcataagtcttgcatccacat

SEQ ID NO: 54652 - DNA, 33 bp, Homo sapien
tgagtctgaagtgcatgagtcttgcatccacat

SEQ ID NO: 54653 - DNA, 33 bp, Homo sapien
tgactgctatggacaacctggacaattatctca

SEQ ID NO: 54654 - DNA, 33 bp, Homo sapien
tgactgctatggacaatctggacaattatctca

SEQ ID NO: 54655 - DNA, 33 bp, Homo sapien
caaaacttgataatccacagcaactaatgggac

SEQ ID NO: 54656 - DNA, 33 bp, Homo sapien
caaaacttgataatccgcagcaactaatgggac

SEQ ID NO: 54657 - DNA, 33 bp, Homo sapien
acttgaattttatcagcaaggatccggacaggt

SEQ ID NO: 54658 - DNA, 33 bp, Homo sapien
acttgaattttatcagtaaggatccggacaggt

SEQ ID NO: 54659 - DNA, 33 bp, Homo sapien
aaagttgaatggaagacactagagatgcaagtt

SEQ ID NO: 54660 - DNA, 33 bp, Homo sapien
aaagttgaatggaagatactagagatgcaagtt

SEQ ID NO: 54661 - DNA, 33 bp, Homo sapien
gattgtaatttacagcaagacggggagtggagt

SEQ ID NO: 54662 - DNA, 33 bp, Homo sapien
gattgtaatttacagcgagacggggagtggagt

SEQ ID NO: 54663 - DNA, 33 bp, Homo sapien
tctgtgtggcattacaacaaaagaaattcaaag

SEQ ID NO: 54664 - DNA, 33 bp, Homo sapien
tctgtgtggcattacagcaaaagaaattcaaag

SEQ ID NO: 54665 - DNA, 33 bp, Homo sapien
actgctagtaaatagggaagccaggattcaaac

SEQ ID NO: 54666 - DNA, 33 bp, Homo sapien
actgctagtaaataggtaagccaggattcaaac

SEQ ID NO: 54667 - DNA, 33 bp, Homo sapien
tgtctacttaatcgtcccaaaatcaacctgtcc

SEQ ID NO: 54668 - DNA, 33 bp, Homo sapien
tgtctacttaatcgtctcaaaatcaacctgtcc

SEQ ID NO: 54669 - DNA, 33 bp, Homo sapien
ccctctgccgtcttcagcatactgacactcctt

SEQ ID NO: 54670 - DNA, 33 bp, Homo sapien
ccctctgccgtcttcatcatactgacactcctt

SEQ ID NO: 54671 - DNA, 33 bp, Homo sapien
cagtatggtactagcaggaaaacagacacacag

SEQ ID NO: 54672 - DNA, 33 bp, Homo sapien
cagtatggtactagcatgaaaacagacacacag

SEQ ID NO: 54673 - DNA, 33 bp, Homo sapien
tactgtggtgtctgacaaatggtgattttctgt

SEQ ID NO: 54674 - DNA, 33 bp, Homo sapien
tactgtggtgtctgacgaatggtgattttctgt

SEQ ID NO: 54675 - DNA, 33 bp, Homo sapien
ccacaaagtgctgcaagtataggtagggtgttt

SEQ ID NO: 54676 - DNA, 33 bp, Homo sapien
ccacaaagtgctgcaattataggtagggtgttt

SEQ ID NO: 54677 - DNA, 33 bp, Homo sapien
cactgggagaagccaaaggagaattgattactg

SEQ ID NO: 54678 - DNA, 33 bp, Homo sapien
cactgggagaagccaagggagaattgattactg

SEQ ID NO: 54679 - DNA, 33 bp, Homo sapien
attcccaagttccctgacagaataccatggctg

SEQ ID NO: 54680 - DNA, 33 bp, Homo sapien
attcccaagttccctgtcagaataccatggctg

SEQ ID NO: 54681 - DNA, 33 bp, Homo sapien
tctctctaacacttagaaagccatgaagggctg

SEQ ID NO: 54682 - DNA, 33 bp, Homo sapien
tctctctaacacttagtaagccatgaagggctg

SEQ ID NO: 54683 - DNA, 33 bp, Homo sapien
ggcttagatgaaataactgtatgtgaaaatgat

SEQ ID NO: 54684 - DNA, 33 bp, Homo sapien
ggcttagatgaaataattgtatgtgaaaatgat

SEQ ID NO: 54685 - DNA, 33 bp, Homo sapien
ccagtaggtgaaaatcccagtggtccttttctt

SEQ ID NO: 54686 - DNA, 33 bp, Homo sapien
ccagtaggtgaaaatctcagtggtccttttctt

SEQ ID NO: 54687 - DNA, 33 bp, Homo sapien
gcgtagagaataatcacattgttgttgagtaac

SEQ ID NO: 54688 - DNA, 33 bp, Homo sapien
gcgtagagaataatcatattgttgttgagtaac

SEQ ID NO: 54689 - DNA, 33 bp, Homo sapien
gtaacacatatagaaccctgccctgatgttttt

SEQ ID NO: 54690 - DNA, 33 bp, Homo sapien
gtaacacatatagaactctgccctgatgttttt

SEQ ID NO: 54691 - DNA, 33 bp, Homo sapien
ccatgcctattttcaacggttgagaggcaatgc

SEQ ID NO: 54692 - DNA, 33 bp, Homo sapien
ccatgcctattttcaatggttgagaggcaatgc

SEQ ID NO: 54693 - DNA, 33 bp, Homo sapien
caggtaaggagttcaactggataaggccactta

SEQ ID NO: 54694 - DNA, 33 bp, Homo sapien
caggtaaggagttcaattggataaggccactta

SEQ ID NO: 54695 - DNA, 33 bp, Homo sapien
gaaaagcagtgacctaagaatatgttcaatacc

SEQ ID NO: 54696 - DNA, 33 bp, Homo sapien
gaaaagcagtgacctaggaatatgttcaatacc

SEQ ID NO: 54697 - DNA, 33 bp, Homo sapien
ggggcaagataccaaaatacaaatgtcctgtca

SEQ ID NO: 54698 - DNA, 33 bp, Homo sapien
ggggcaagataccaaagtacaaatgtcctgtca

SEQ ID NO: 54699 - DNA, 33 bp, Homo sapien
gcaccaatcagcatcaacctgtgagatccagac

SEQ ID NO: 54700 - DNA, 33 bp, Homo sapien
gcaccaatcagcatcagcctgtgagatccagac

SEQ ID NO: 54701 - DNA, 33 bp, Homo sapien
tgttcctgattaacaacctgcttttgatctcac

SEQ ID NO: 54702 - DNA, 33 bp, Homo sapien
tgttcctgattaacaatctgcttttgatctcac

SEQ ID NO: 54703 - DNA, 33 bp, Homo sapien
gttaagaaagtaaaaacacgaaccatagactgg

SEQ ID NO: 54704 - DNA, 33 bp, Homo sapien
gttaagaaagtaaaaagacgaaccatagactgg

SEQ ID NO: 54705 - DNA, 33 bp, Homo sapien
atttatacagctttcagacattatggtgctatg

SEQ ID NO: 54706 - DNA, 33 bp, Homo sapien
atttatacagctttcatacattatggtgctatg

SEQ ID NO: 54707 - DNA, 33 bp, Homo sapien
aaaatactggaggtaaacagtgatcatcaatac

SEQ ID NO: 54708 - DNA, 33 bp, Homo sapien
aaaatactggaggtaatcagtgatcatcaatac

SEQ ID NO: 54709 - DNA, 33 bp, Homo sapien
tgggttggtaggtatacgtagatgtattataat

SEQ ID NO: 54710 - DNA, 33 bp, Homo sapien
tgggttggtaggtatatgtagatgtattataat

SEQ ID NO: 54711 - DNA, 33 bp, Homo sapien
tgagctttatgaaggaatatgcttccatagtgt

SEQ ID NO: 54712 - DNA, 33 bp, Homo sapien
tgagctttatgaaggagtatgcttccatagtgt

SEQ ID NO: 54713 - DNA, 33 bp, Homo sapien
ttcgtttagacatggcaaacgttagaaaagatt

SEQ ID NO: 54714 - DNA, 33 bp, Homo sapien
ttcgtttagacatggcgaacgttagaaaagatt

SEQ ID NO: 54715 - DNA, 33 bp, Homo sapien
caagagaattcagttacgttgatatccttatag

SEQ ID NO: 54716 - DNA, 33 bp, Homo sapien
caagagaattcagttatgttgatatccttatag

SEQ ID NO: 54717 - DNA, 33 bp, Homo sapien
gctgttgtaaaagagcaaaacaatgaccatctg

SEQ ID NO: 54718 - DNA, 33 bp, Homo sapien
gctgttgtaaaagagccaaacaatgaccatctg

SEQ ID NO: 54719 - DNA, 33 bp, Homo sapien
ttcctctgatagtgtgaataattaaaagtagct

SEQ ID NO: 54720 - DNA, 33 bp, Homo sapien
ttcctctgatagtgtggataattaaaagtagct

SEQ ID NO: 54721 - DNA, 33 bp, Homo sapien
ttgtgttactaaacttcaacctatcatacttct

SEQ ID NO: 54722 - DNA, 33 bp, Homo sapien
ttgtgttactaaactttaacctatcatacttct

SEQ ID NO: 54723 - DNA, 33 bp, Homo sapien
tatgcagtatttttgaccataccatgttagatg

SEQ ID NO: 54724 - DNA, 33 bp, Homo sapien
tatgcagtatttttgatcataccatgttagatg

SEQ ID NO: 54725 - DNA, 33 bp, Homo sapien
tagaagcccaatggtacatctttccaaaatcaa

SEQ ID NO: 54726 - DNA, 33 bp, Homo sapien
tagaagcccaatggtatatctttccaaaatcaa

SEQ ID NO: 54727 - DNA, 33 bp, Homo sapien
ccgaaaacaattcccaaactatggcactctcat

SEQ ID NO: 54728 - DNA, 33 bp, Homo sapien
ccgaaaacaattcccagactatggcactctcat

SEQ ID NO: 54729 - DNA, 33 bp, Homo sapien
acagagagccacaaaagtgtcattaactaaaaa

SEQ ID NO: 54730 - DNA, 33 bp, Homo sapien
acagagagccacaaaattgtcattaactaaaaa

SEQ ID NO: 54731 - DNA, 33 bp, Homo sapien
aagcaagcggcatcaaaaacatgtaacaacacg

SEQ ID NO: 54732 - DNA, 33 bp, Homo sapien
aagcaagcggcatcaagaacatgtaacaacacg

SEQ ID NO: 54733 - DNA, 33 bp, Homo sapien
atacttgtaagactcaaataagatcatatgtgt

SEQ ID NO: 54734 - DNA, 33 bp, Homo sapien
atacttgtaagactcagataagatcatatgtgt

SEQ ID NO: 54735 - DNA, 33 bp, Homo sapien
ttagaaggcttttaaacgaactggacaaagtga

SEQ ID NO: 54736 - DNA, 33 bp, Homo sapien
ttagaaggcttttaaatgaactggacaaagtga

SEQ ID NO: 54737 - DNA, 33 bp, Homo sapien
taggtcacagaataagccaataggagaagaagc

SEQ ID NO: 54738 - DNA, 33 bp, Homo sapien
taggtcacagaataagtcaataggagaagaagc

SEQ ID NO: 54739 - DNA, 33 bp, Homo sapien
ttatgaccaatatgaacctcttcctaaatatat

SEQ ID NO: 54740 - DNA, 33 bp, Homo sapien
ttatgaccaatatgaatctcttcctaaatatat

SEQ ID NO: 54741 - DNA, 33 bp, Homo sapien
ggttctaatttggtctgacagtgtcctaataag

SEQ ID NO: 54742 - DNA, 33 bp, Homo sapien
ggttctaatttggtcttacagtgtcctaataag

SEQ ID NO: 54743 - DNA, 33 bp, Homo sapien
agaagccatcatctagcaaattcctcaactcca

SEQ ID NO: 54744 - DNA, 33 bp, Homo sapien
agaagccatcatctaggaaattcctcaactcca

SEQ ID NO: 54745 - DNA, 33 bp, Homo sapien
aaaaacaatgtagataaagataagcatttgcct

SEQ ID NO: 54746 - DNA, 33 bp, Homo sapien
aaaaacaatgtagatacagataagcatttgcct

SEQ ID NO: 54747 - DNA, 33 bp, Homo sapien
ttgcagccctagaaaacttcatgaacctatgac

SEQ ID NO: 54748 - DNA, 33 bp, Homo sapien
ttgcagccctagaaaatttcatgaacctatgac

SEQ ID NO: 54749 - DNA, 33 bp, Homo sapien
ttaatgagtaaatcaacgattggaaaggttaag

SEQ ID NO: 54750 - DNA, 33 bp, Homo sapien
ttaatgagtaaatcaaggattggaaaggttaag

SEQ ID NO: 54751 - DNA, 33 bp, Homo sapien
ctgtcttcaaaaggcaagaagggtaattcctca

SEQ ID NO: 54752 - DNA, 33 bp, Homo sapien
ctgtcttcaaaaggcatgaagggtaattcctca

SEQ ID NO: 54753 - DNA, 33 bp, Homo sapien
aacctccttgcaagtcagaagtaaattagacaa

SEQ ID NO: 54754 - DNA, 33 bp, Homo sapien
aacctccttgcaagtccgaagtaaattagacaa

SEQ ID NO: 54755 - DNA, 33 bp, Homo sapien
caacacaatatcctaaacttctcattactgatc

SEQ ID NO: 54756 - DNA, 33 bp, Homo sapien
caacacaatatcctaaccttctcattactgatc

SEQ ID NO: 54757 - DNA, 33 bp, Homo sapien
gaactcatagttttcacagatttctatttgtat

SEQ ID NO: 54758 - DNA, 33 bp, Homo sapien
gaactcatagttttcagagatttctatttgtat

SEQ ID NO: 54759 - DNA, 33 bp, Homo sapien
gcattcatctgcttcacgtacaaccagtcagag

SEQ ID NO: 54760 - DNA, 33 bp, Homo sapien
gcattcatctgcttcatgtacaaccagtcagag

SEQ ID NO: 54761 - DNA, 33 bp, Homo sapien
aagagcctgtatttaacgatgagctcccagcaa

SEQ ID NO: 54762 - DNA, 33 bp, Homo sapien
aagagcctgtatttaatgatgagctcccagcaa

SEQ ID NO: 54763 - DNA, 33 bp, Homo sapien
aaaaatggccgaggtccctgtgaattccttcac

SEQ ID NO: 54764 - DNA, 33 bp, Homo sapien
aaaaatggccgaggtctctgtgaattccttcac

SEQ ID NO: 54765 - DNA, 33 bp, Homo sapien
ctataaaatgaacgaaaaatctaagtctcagag

SEQ ID NO: 54766 - DNA, 33 bp, Homo sapien
ctataaaatgaacgaagaatctaagtctcagag

SEQ ID NO: 54767 - DNA, 33 bp, Homo sapien
aagtatgaccccaagcaaagaagtgaggggagg

SEQ ID NO: 54768 - DNA, 33 bp, Homo sapien
aagtatgaccccaagcgaagaagtgaggggagg

SEQ ID NO: 54769 - DNA, 33 bp, Homo sapien
gagcactgaaaattcccattccaccagctgaca

SEQ ID NO: 54770 - DNA, 33 bp, Homo sapien
gagcactgaaaattccgattccaccagctgaca

SEQ ID NO: 54771 - DNA, 33 bp, Homo sapien
tgaagcttatgtctacaggagctatcctggcat

SEQ ID NO: 54772 - DNA, 33 bp, Homo sapien
tgaagcttatgtctacgggagctatcctggcat

SEQ ID NO: 54773 - DNA, 33 bp, Homo sapien
aatacttgccttataaagtacttttgaaaacaa

SEQ ID NO: 54774 - DNA, 33 bp, Homo sapien
aatacttgccttataaggtacttttgaaaacaa

SEQ ID NO: 54775 - DNA, 33 bp, Homo sapien
ttttacataccatgtcccagagtctgcactaga

SEQ ID NO: 54776 - DNA, 33 bp, Homo sapien
ttttacataccatgtctcagagtctgcactaga

SEQ ID NO: 54777 - DNA, 33 bp, Homo sapien
aatgcagtctcaatccagaaaatagatcccatc

SEQ ID NO: 54778 - DNA, 33 bp, Homo sapien
aatgcagtctcaatccggaaaatagatcccatc

SEQ ID NO: 54779 - DNA, 33 bp, Homo sapien
aggactgagtgtggtaaggataagagaagaaca

SEQ ID NO: 54780 - DNA, 33 bp, Homo sapien
aggactgagtgtggtagggataagagaagaaca

SEQ ID NO: 54781 - DNA, 33 bp, Homo sapien
gtcccttagagcattcaaaatgaggagtgattc

SEQ ID NO: 54782 - DNA, 33 bp, Homo sapien
gtcccttagagcattcgaaatgaggagtgattc

SEQ ID NO: 54783 - DNA, 33 bp, Homo sapien
cagccaattataacacaaggagagaagagtatg

SEQ ID NO: 54784 - DNA, 33 bp, Homo sapien
cagccaattataacaccaggagagaagagtatg

SEQ ID NO: 54785 - DNA, 33 bp, Homo sapien
atgctttataatcagacccaacatttgattact

SEQ ID NO: 54786 - DNA, 33 bp, Homo sapien
atgctttataatcagagccaacatttgattact

SEQ ID NO: 54787 - DNA, 33 bp, Homo sapien
tacttcattaccatccaaaagtggcaaacctca

SEQ ID NO: 54788 - DNA, 33 bp, Homo sapien
tacttcattaccatccgaaagtggcaaacctca

SEQ ID NO: 54789 - DNA, 33 bp, Homo sapien
tgtccataggccgaggaaaattaaagagtgaag

SEQ ID NO: 54790 - DNA, 33 bp, Homo sapien
tgtccataggccgaggcaaattaaagagtgaag

SEQ ID NO: 54791 - DNA, 33 bp, Homo sapien
actggtccaggcctaaatggaacatggcaagtt

SEQ ID NO: 54792 - DNA, 33 bp, Homo sapien
actggtccaggcctaagtggaacatggcaagtt

SEQ ID NO: 54793 - DNA, 33 bp, Homo sapien
aaggaagtacattccactgaatccagaagtaag

SEQ ID NO: 54794 - DNA, 33 bp, Homo sapien
aaggaagtacattccattgaatccagaagtaag

SEQ ID NO: 54795 - DNA, 33 bp, Homo sapien
tctgctgttgattgaaataatgttagtaaatac

SEQ ID NO: 54796 - DNA, 33 bp, Homo sapien
tctgctgttgattgaattaatgttagtaaatac

SEQ ID NO: 54797 - DNA, 33 bp, Homo sapien
caagtctggtagggaccagatgatccagtgagc

SEQ ID NO: 54798 - DNA, 33 bp, Homo sapien
caagtctggtagggactagatgatccagtgagc

SEQ ID NO: 54799 - DNA, 33 bp, Homo sapien
taaactcaaggtttcacaggtgacggaatatgc

SEQ ID NO: 54800 - DNA, 33 bp, Homo sapien
taaactcaaggtttcataggtgacggaatatgc

SEQ ID NO: 54801 - DNA, 33 bp, Homo sapien
aactttgaggactgaacaaactcaaattggttt

SEQ ID NO: 54802 - DNA, 33 bp, Homo sapien
aactttgaggactgaagaaactcaaattggttt

SEQ ID NO: 54803 - DNA, 33 bp, Homo sapien
tcatgctgatgtttaactgcttgatgttatttc

SEQ ID NO: 54804 - DNA, 33 bp, Homo sapien
tcatgctgatgtttaagtgcttgatgttatttc

SEQ ID NO: 54805 - DNA, 33 bp, Homo sapien
taaaatgaatgaaagaaagaatggcccacctac

SEQ ID NO: 54806 - DNA, 33 bp, Homo sapien
taaaatgaatgaaagacagaatggcccacctac

SEQ ID NO: 54807 - DNA, 33 bp, Homo sapien
tacagtctttgttgagaagaacatccctctagt

SEQ ID NO: 54808 - DNA, 33 bp, Homo sapien
tacagtctttgttgaggagaacatccctctagt

SEQ ID NO: 54809 - DNA, 33 bp, Homo sapien
ggaatgttgcttataaactctgtgtatttggtc

SEQ ID NO: 54810 - DNA, 33 bp, Homo sapien
ggaatgttgcttataacctctgtgtatttggtc

SEQ ID NO: 54811 - DNA, 33 bp, Homo sapien
tgtaattttttcataaggcatcacccagatcaa

SEQ ID NO: 54812 - DNA, 33 bp, Homo sapien
tgtaattttttcataatgcatcacccagatcaa

SEQ ID NO: 54813 - DNA, 33 bp, Homo sapien
gcaggagttgcccaaggctatggtggtagagat

SEQ ID NO: 54814 - DNA, 33 bp, Homo sapien
gcaggagttgcccaagtctatggtggtagagat

SEQ ID NO: 54815 - DNA, 33 bp, Homo sapien
ggcaaaagtgacagaaaaatcctgtatcagcaa

SEQ ID NO: 54816 - DNA, 33 bp, Homo sapien
ggcaaaagtgacagaataatcctgtatcagcaa

SEQ ID NO: 54817 - DNA, 33 bp, Homo sapien
actcagggaaggtaccaaaggtaattgatttct

SEQ ID NO: 54818 - DNA, 33 bp, Homo sapien
actcagggaaggtacccaaggtaattgatttct

SEQ ID NO: 54819 - DNA, 33 bp, Homo sapien
attataaaagtctgacaatatcatgtatcagat

SEQ ID NO: 54820 - DNA, 33 bp, Homo sapien
attataaaagtctgacgatatcatgtatcagat

SEQ ID NO: 54821 - DNA, 33 bp, Homo sapien
acaagtaaacaagcacaagaatgtttttgtatt

SEQ ID NO: 54822 - DNA, 33 bp, Homo sapien
acaagtaaacaagcacgagaatgtttttgtatt

SEQ ID NO: 54823 - DNA, 33 bp, Homo sapien
gatctcacaaaaacaacgagcaaaaaagcaagc

SEQ ID NO: 54824 - DNA, 33 bp, Homo sapien
gatctcacaaaaacaatgagcaaaaaagcaagc

SEQ ID NO: 54825 - DNA, 33 bp, Homo sapien
ttctctggtagctaagccaagcttatttccaca

SEQ ID NO: 54826 - DNA, 33 bp, Homo sapien
ttctctggtagctaaggcaagcttatttccaca

SEQ ID NO: 54827 - DNA, 33 bp, Homo sapien
ttgtgggaaggaataactgtaactccttatagc

SEQ ID NO: 54828 - DNA, 33 bp, Homo sapien
ttgtgggaaggaataattgtaactccttatagc

SEQ ID NO: 54829 - DNA, 33 bp, Homo sapien
cagcagagaccatataaagggctctcactgcag

SEQ ID NO: 54830 - DNA, 33 bp, Homo sapien
cagcagagaccatatagagggctctcactgcag

SEQ ID NO: 54831 - DNA, 33 bp, Homo sapien
gattcttctgtaagacaggtagctttgcaaaaa

SEQ ID NO: 54832 - DNA, 33 bp, Homo sapien
gattcttctgtaagacgggtagctttgcaaaaa

SEQ ID NO: 54833 - DNA, 33 bp, Homo sapien
aatatgttaagtaatcccagtaggagttgtgta

SEQ ID NO: 54834 - DNA, 33 bp, Homo sapien
aatatgttaagtaatctcagtaggagttgtgta

SEQ ID NO: 54835 - DNA, 33 bp, Homo sapien
tttagaattatgcaggaagtttggaaaatcttc

SEQ ID NO: 54836 - DNA, 33 bp, Homo sapien
tttagaattatgcagggagtttggaaaatcttc

SEQ ID NO: 54837 - DNA, 33 bp, Homo sapien
ccttattcagtattcaacacccttaacagatta

SEQ ID NO: 54838 - DNA, 33 bp, Homo sapien
ccttattcagtattcagcacccttaacagatta

SEQ ID NO: 54839 - DNA, 33 bp, Homo sapien
gatgcgttttccctcaaatccatctggatgctt

SEQ ID NO: 54840 - DNA, 33 bp, Homo sapien
gatgcgttttccctcagatccatctggatgctt

SEQ ID NO: 54841 - DNA, 33 bp, Homo sapien
gccatactggagaaccccagccatataatcgcg

SEQ ID NO: 54842 - DNA, 33 bp, Homo sapien
gccatactggagaacctcagccatataatcgcg

SEQ ID NO: 54843 - DNA, 33 bp, Homo sapien
cctcctagctctgtcaataaccagccatgaatc

SEQ ID NO: 54844 - DNA, 33 bp, Homo sapien
cctcctagctctgtcactaaccagccatgaatc

SEQ ID NO: 54845 - DNA, 33 bp, Homo sapien
aggctctttcatgctacgaatacccgcaaagcc

SEQ ID NO: 54846 - DNA, 33 bp, Homo sapien
aggctctttcatgctaggaatacccgcaaagcc

SEQ ID NO: 54847 - DNA, 33 bp, Homo sapien
cttaatattgaatctcacaccataagtcttcct

SEQ ID NO: 54848 - DNA, 33 bp, Homo sapien
cttaatattgaatctcgcaccataagtcttcct

SEQ ID NO: 54849 - DNA, 33 bp, Homo sapien
ggtagagggtgctgtaaccttatgaaggtgaat

SEQ ID NO: 54850 - DNA, 33 bp, Homo sapien
ggtagagggtgctgtatccttatgaaggtgaat

SEQ ID NO: 54851 - DNA, 33 bp, Homo sapien
attcagatgtgcacttgaagagaaagagaatca

SEQ ID NO: 54852 - DNA, 33 bp, Homo sapien
attcagatgtgcactttaagagaaagagaatca

SEQ ID NO: 54853 - DNA, 33 bp, Homo sapien
aacttcatggagacacaagaaagtctttgggct

SEQ ID NO: 54854 - DNA, 33 bp, Homo sapien
aacttcatggagacacgagaaagtctttgggct

SEQ ID NO: 54855 - DNA, 33 bp, Homo sapien
tgaagcagaagtgttacaagctgctccagaaag

SEQ ID NO: 54856 - DNA, 33 bp, Homo sapien
tgaagcagaagtgttataagctgctccagaaag

SEQ ID NO: 54857 - DNA, 33 bp, Homo sapien
ggatgagaccaatgcacgcgagggttgacttgt

SEQ ID NO: 54858 - DNA, 33 bp, Homo sapien
ggatgagaccaatgcatgcgagggttgacttgt

SEQ ID NO: 54859 - DNA, 33 bp, Homo sapien
acataggcatcatataaaactgaaatgaaatta

SEQ ID NO: 54860 - DNA, 33 bp, Homo sapien
acataggcatcatatacaactgaaatgaaatta

SEQ ID NO: 54861 - DNA, 33 bp, Homo sapien
agtccatgagttggaaacttaattcctccatgc

SEQ ID NO: 54862 - DNA, 33 bp, Homo sapien
agtccatgagttggaaccttaattcctccatgc

SEQ ID NO: 54863 - DNA, 33 bp, Homo sapien
acaacatttgacctagacattgtaggaaggatg

SEQ ID NO: 54864 - DNA, 33 bp, Homo sapien
acaacatttgacctaggcattgtaggaaggatg

SEQ ID NO: 54865 - DNA, 33 bp, Homo sapien
gtagtagaagaagcaacacacgatattcagaag

SEQ ID NO: 54866 - DNA, 33 bp, Homo sapien
gtagtagaagaagcaatacacgatattcagaag

SEQ ID NO: 54867 - DNA, 33 bp, Homo sapien
tagcagagatcaaaatgaatcagtatgagccag

SEQ ID NO: 54868 - DNA, 33 bp, Homo sapien
tagcagagatcaaaattaatcagtatgagccag

SEQ ID NO: 54869 - DNA, 33 bp, Homo sapien
atggcttcctagtaaaagcataggtgagtcaca

SEQ ID NO: 54870 - DNA, 33 bp, Homo sapien
atggcttcctagtaaatgcataggtgagtcaca

SEQ ID NO: 54871 - DNA, 33 bp, Homo sapien
ttttgttaaacatccaatatacagaagccttct

SEQ ID NO: 54872 - DNA, 33 bp, Homo sapien
ttttgttaaacatccagtatacagaagccttct

SEQ ID NO: 54873 - DNA, 33 bp, Homo sapien
ctgtaaacaatcaatcaagttagcgtactacct

SEQ ID NO: 54874 - DNA, 33 bp, Homo sapien
ctgtaaacaatcaatcgagttagcgtactacct

SEQ ID NO: 54875 - DNA, 33 bp, Homo sapien
gaacaccgagaggcaacagagtgcattgattaa

SEQ ID NO: 54876 - DNA, 33 bp, Homo sapien
gaacaccgagaggcaatagagtgcattgattaa

SEQ ID NO: 54877 - DNA, 33 bp, Homo sapien
tctatatgctggaaccacaatattacatagccc

SEQ ID NO: 54878 - DNA, 33 bp, Homo sapien
tctatatgctggaaccgcaatattacatagccc

SEQ ID NO: 54879 - DNA, 33 bp, Homo sapien
gttaaagaacctgcctaaaatcttaccactagc

SEQ ID NO: 54880 - DNA, 33 bp, Homo sapien
gttaaagaacctgcctgaaatcttaccactagc

SEQ ID NO: 54881 - DNA, 33 bp, Homo sapien
tcctttacctcttttacgcttggcctgatgaac

SEQ ID NO: 54882 - DNA, 33 bp, Homo sapien
tcctttacctcttttatgcttggcctgatgaac

SEQ ID NO: 54883 - DNA, 33 bp, Homo sapien
atgtcaaaatgttttacgtatttcctattttgc

SEQ ID NO: 54884 - DNA, 33 bp, Homo sapien
atgtcaaaatgttttatgtatttcctattttgc

SEQ ID NO: 54885 - DNA, 33 bp, Homo sapien
tccagcagaagtctaactggcgtcccttcccca

SEQ ID NO: 54886 - DNA, 33 bp, Homo sapien
tccagcagaagtctaattggcgtcccttcccca

SEQ ID NO: 54887 - DNA, 33 bp, Homo sapien
ttcacatctctcatctaaaaaaggcacaatgtc

SEQ ID NO: 54888 - DNA, 33 bp, Homo sapien
ttcacatctctcatcttaaaaaggcacaatgtc

SEQ ID NO: 54889 - DNA, 33 bp, Homo sapien
ctatttaaatagcctacgaaaagactggccctt

SEQ ID NO: 54890 - DNA, 33 bp, Homo sapien
ctatttaaatagcctatgaaaagactggccctt

SEQ ID NO: 54891 - DNA, 33 bp, Homo sapien
aaatgtgtttgagaaagcataaagctattttta

SEQ ID NO: 54892 - DNA, 33 bp, Homo sapien
aaatgtgtttgagaaatcataaagctattttta

SEQ ID NO: 54893 - DNA, 33 bp, Homo sapien
aatatactcatgactgacaaattgccatcattt

SEQ ID NO: 54894 - DNA, 33 bp, Homo sapien
aatatactcatgactgtcaaattgccatcattt

SEQ ID NO: 54895 - DNA, 33 bp, Homo sapien
taattacttcatttacaaaagaacttaccacag

SEQ ID NO: 54896 - DNA, 33 bp, Homo sapien
taattacttcatttacgaaagaacttaccacag

SEQ ID NO: 54897 - DNA, 33 bp, Homo sapien
agaagcaaaaacaaaccaagcttgcagcacatt

SEQ ID NO: 54898 - DNA, 33 bp, Homo sapien
agaagcaaaaacaaactaagcttgcagcacatt

SEQ ID NO: 54899 - DNA, 33 bp, Homo sapien
tgcagatgactgtaaacaggtcttcccacttct

SEQ ID NO: 54900 - DNA, 33 bp, Homo sapien
tgcagatgactgtaaataggtcttcccacttct

SEQ ID NO: 54901 - DNA, 33 bp, Homo sapien
cccattgcacttccaacaaaacccaagttcgtt

SEQ ID NO: 54902 - DNA, 33 bp, Homo sapien
cccattgcacttccaataaaacccaagttcgtt

SEQ ID NO: 54903 - DNA, 33 bp, Homo sapien
tgtttcctaccactacagatacttaatgccttc

SEQ ID NO: 54904 - DNA, 33 bp, Homo sapien
tgtttcctaccactacggatacttaatgccttc

SEQ ID NO: 54905 - DNA, 33 bp, Homo sapien
atacctttggcctagacgattctctaagctcat

SEQ ID NO: 54906 - DNA, 33 bp, Homo sapien
atacctttggcctagatgattctctaagctcat

SEQ ID NO: 54907 - DNA, 33 bp, Homo sapien
gaagaaactattctcaggctgacttggttcctc

SEQ ID NO: 54908 - DNA, 33 bp, Homo sapien
gaagaaactattctcatgctgacttggttcctc

SEQ ID NO: 54909 - DNA, 33 bp, Homo sapien
tcaagctattatggaacgtctgctttaatagga

SEQ ID NO: 54910 - DNA, 33 bp, Homo sapien
tcaagctattatggaatgtctgctttaatagga

SEQ ID NO: 54911 - DNA, 33 bp, Homo sapien
atttatgacagattaacctacagtcatccttga

SEQ ID NO: 54912 - DNA, 33 bp, Homo sapien
atttatgacagattaagctacagtcatccttga

SEQ ID NO: 54913 - DNA, 33 bp, Homo sapien
gtcattatttcttccacgcatttcaaagacttt

SEQ ID NO: 54914 - DNA, 33 bp, Homo sapien
gtcattatttcttccatgcatttcaaagacttt

SEQ ID NO: 54915 - DNA, 33 bp, Homo sapien
tttatgttttacctgacgtttttgtctcacagc

SEQ ID NO: 54916 - DNA, 33 bp, Homo sapien
tttatgttttacctgatgtttttgtctcacagc

SEQ ID NO: 54917 - DNA, 33 bp, Homo sapien
tactctcccagggcaaagtgaaataaaattgga

SEQ ID NO: 54918 - DNA, 33 bp, Homo sapien
tactctcccagggcaatgtgaaataaaattgga

SEQ ID NO: 54919 - DNA, 33 bp, Homo sapien
ggtttattaacagctcagaagtggccagattaa

SEQ ID NO: 54920 - DNA, 33 bp, Homo sapien
ggtttattaacagctcggaagtggccagattaa

SEQ ID NO: 54921 - DNA, 33 bp, Homo sapien
tttatcatggctagtaaaacaatagaacatttg

SEQ ID NO: 54922 - DNA, 33 bp, Homo sapien
tttatcatggctagtagaacaatagaacatttg

SEQ ID NO: 54923 - DNA, 33 bp, Homo sapien
gatgattaaaacatccacagaactgtgcagata

SEQ ID NO: 54924 - DNA, 33 bp, Homo sapien
gatgattaaaacatcctcagaactgtgcagata

SEQ ID NO: 54925 - DNA, 33 bp, Homo sapien
gagtgatcccaggcacgatcaccaggcacaatc

SEQ ID NO: 54926 - DNA, 33 bp, Homo sapien
gagtgatcccaggcactatcaccaggcacaatc

SEQ ID NO: 54927 - DNA, 33 bp, Homo sapien
atttcagaaaacttggaacatatcctacaaatt

SEQ ID NO: 54928 - DNA, 33 bp, Homo sapien
atttcagaaaacttgggacatatcctacaaatt

SEQ ID NO: 54929 - DNA, 33 bp, Homo sapien
agaatgccatcacaaaacctattggaaattgat

SEQ ID NO: 54930 - DNA, 33 bp, Homo sapien
agaatgccatcacaaagcctattggaaattgat

SEQ ID NO: 54931 - DNA, 33 bp, Homo sapien
tggacttgattagtaacgttcaacttttcacaa

SEQ ID NO: 54932 - DNA, 33 bp, Homo sapien
tggacttgattagtaatgttcaacttttcacaa

SEQ ID NO: 54933 - DNA, 33 bp, Homo sapien
ataacaccttttccccgaagcacgtctagaatg

SEQ ID NO: 54934 - DNA, 33 bp, Homo sapien
ataacaccttttcccctaagcacgtctagaatg

SEQ ID NO: 54935 - DNA, 33 bp, Homo sapien
gggatttttgttcaaactggattctatgaggac

SEQ ID NO: 54936 - DNA, 33 bp, Homo sapien
gggatttttgttcaaagtggattctatgaggac

SEQ ID NO: 54937 - DNA, 33 bp, Homo sapien
ttattttttaaattgaactgaggcttttgctat

SEQ ID NO: 54938 - DNA, 33 bp, Homo sapien
ttattttttaaattgagctgaggcttttgctat

SEQ ID NO: 54939 - DNA, 33 bp, Homo sapien
gcagtaggggttgagacaagtaggcagggctgg

SEQ ID NO: 54940 - DNA, 33 bp, Homo sapien
gcagtaggggttgagagaagtaggcagggctgg

SEQ ID NO: 54941 - DNA, 33 bp, Homo sapien
tgagtcatctatcttcacaacaggagaattttg

SEQ ID NO: 54942 - DNA, 33 bp, Homo sapien
tgagtcatctatcttctcaacaggagaattttg

SEQ ID NO: 54943 - DNA, 33 bp, Homo sapien
tttagtcctttttgtcactttgtgccagctgtt

SEQ ID NO: 54944 - DNA, 33 bp, Homo sapien
tttagtcctttttgtctctttgtgccagctgtt

SEQ ID NO: 54945 - DNA, 33 bp, Homo sapien
agctgttctgtctaccaattacttaatgaggtg

SEQ ID NO: 54946 - DNA, 33 bp, Homo sapien
agctgttctgtctaccgattacttaatgaggtg

SEQ ID NO: 54947 - DNA, 33 bp, Homo sapien
cctaaatcactgaaaactaccaatgaagaagca

SEQ ID NO: 54948 - DNA, 33 bp, Homo sapien
cctaaatcactgaaaattaccaatgaagaagca

SEQ ID NO: 54949 - DNA, 33 bp, Homo sapien
tccttaaccaatatcactgactcatacatggct

SEQ ID NO: 54950 - DNA, 33 bp, Homo sapien
tccttaaccaatatcattgactcatacatggct

SEQ ID NO: 54951 - DNA, 33 bp, Homo sapien
gcaggagtagaataatcagaggcagatttgtgg

SEQ ID NO: 54952 - DNA, 33 bp, Homo sapien
gcaggagtagaataattagaggcagatttgtgg

SEQ ID NO: 54953 - DNA, 33 bp, Homo sapien
tttacacaaagacttacgcatgaatgttcatag

SEQ ID NO: 54954 - DNA, 33 bp, Homo sapien
tttacacaaagacttatgcatgaatgttcatag

SEQ ID NO: 54955 - DNA, 33 bp, Homo sapien
atcatacatgaaacaacgtgcccacaatggaat

SEQ ID NO: 54956 - DNA, 33 bp, Homo sapien
atcatacatgaaacaatgtgcccacaatggaat

SEQ ID NO: 54957 - DNA, 33 bp, Homo sapien
ctggtgtcttattccccgaaatatccccaagag

SEQ ID NO: 54958 - DNA, 33 bp, Homo sapien
ctggtgtcttattcccggaaatatccccaagag

SEQ ID NO: 54959 - DNA, 33 bp, Homo sapien
agactggctctttgcacaattcaaccaagaact

SEQ ID NO: 54960 - DNA, 33 bp, Homo sapien
agactggctctttgcataattcaaccaagaact

SEQ ID NO: 54961 - DNA, 33 bp, Homo sapien
gtgaaactgttggcctcaaatggtcctcccact

SEQ ID NO: 54962 - DNA, 33 bp, Homo sapien
gtgaaactgttggcctgaaatggtcctcccact

SEQ ID NO: 54963 - DNA, 33 bp, Homo sapien
ttctccacagtgctgaccacgatgtttttttat

SEQ ID NO: 54964 - DNA, 33 bp, Homo sapien
ttctccacagtgctgatcacgatgtttttttat

SEQ ID NO: 54965 - DNA, 33 bp, Homo sapien
tctatagattatttccacaaagaagattttgtt

SEQ ID NO: 54966 - DNA, 33 bp, Homo sapien
tctatagattatttccgcaaagaagattttgtt

SEQ ID NO: 54967 - DNA, 33 bp, Homo sapien
gtgagtcaacagcctccagtgttcaaccaaaga

SEQ ID NO: 54968 - DNA, 33 bp, Homo sapien
gtgagtcaacagcctctagtgttcaaccaaaga

SEQ ID NO: 54969 - DNA, 33 bp, Homo sapien
atgtagagttaaaaacaaatgtccttcatggga

SEQ ID NO: 54970 - DNA, 33 bp, Homo sapien
atgtagagttaaaaacgaatgtccttcatggga

SEQ ID NO: 54971 - DNA, 33 bp, Homo sapien
ctcaggtaatatcaaaaacttcttccatcctgt

SEQ ID NO: 54972 - DNA, 33 bp, Homo sapien
ctcaggtaatatcaaagacttcttccatcctgt

SEQ ID NO: 54973 - DNA, 33 bp, Homo sapien
gctttaaatcttgaaacaagttgctttagacac

SEQ ID NO: 54974 - DNA, 33 bp, Homo sapien
gctttaaatcttgaaataagttgctttagacac

SEQ ID NO: 54975 - DNA, 33 bp, Homo sapien
atctcagtgaacagttcaaaaaccatcctccat

SEQ ID NO: 54976 - DNA, 33 bp, Homo sapien
atctcagtgaacagtttaaaaaccatcctccat

SEQ ID NO: 54977 - DNA, 33 bp, Homo sapien
tacctttaccagcatcccagctttccttgccta

SEQ ID NO: 54978 - DNA, 33 bp, Homo sapien
tacctttaccagcatcgcagctttccttgccta

SEQ ID NO: 54979 - DNA, 33 bp, Homo sapien
tcactcagattctctcccagcctaacctggtcc

SEQ ID NO: 54980 - DNA, 33 bp, Homo sapien
tcactcagattctctctcagcctaacctggtcc

SEQ ID NO: 54981 - DNA, 33 bp, Homo sapien
tgcacacttttttttgaaatagcaaagaagtaa

SEQ ID NO: 54982 - DNA, 33 bp, Homo sapien
tgcacacttttttttggaatagcaaagaagtaa

SEQ ID NO: 54983 - DNA, 33 bp, Homo sapien
ctgtggtagtctataaccaaacccacaatttct

SEQ ID NO: 54984 - DNA, 33 bp, Homo sapien
ctgtggtagtctataagcaaacccacaatttct

SEQ ID NO: 54985 - DNA, 33 bp, Homo sapien
tctactgatgttaaacagtggtctcggaggttg

SEQ ID NO: 54986 - DNA, 33 bp, Homo sapien
tctactgatgttaaacggtggtctcggaggttg

SEQ ID NO: 54987 - DNA, 33 bp, Homo sapien
agcctagaagttcaccggatttatgggcagtaa

SEQ ID NO: 54988 - DNA, 33 bp, Homo sapien
agcctagaagttcacctgatttatgggcagtaa

SEQ ID NO: 54989 - DNA, 33 bp, Homo sapien
agcagtgaaaggtgaaatatagtggaggctatg

SEQ ID NO: 54990 - DNA, 33 bp, Homo sapien
agcagtgaaaggtgaactatagtggaggctatg

SEQ ID NO: 54991 - DNA, 33 bp, Homo sapien
ataaaatagggcaagacctaaactagcaccact

SEQ ID NO: 54992 - DNA, 33 bp, Homo sapien
ataaaatagggcaagatctaaactagcaccact

SEQ ID NO: 54993 - DNA, 33 bp, Homo sapien
ttgcacaatcaactccgttaatttcagagctga

SEQ ID NO: 54994 - DNA, 33 bp, Homo sapien
ttgcacaatcaactcctttaatttcagagctga

SEQ ID NO: 54995 - DNA, 33 bp, Homo sapien
tgtttgacctcactgacatgtgcaaagctttct

SEQ ID NO: 54996 - DNA, 33 bp, Homo sapien
tgtttgacctcactgatatgtgcaaagctttct

SEQ ID NO: 54997 - DNA, 33 bp, Homo sapien
gtgccttttacactccaccatgattctgaggac

SEQ ID NO: 54998 - DNA, 33 bp, Homo sapien
gtgccttttacactccgccatgattctgaggac

SEQ ID NO: 54999 - DNA, 33 bp, Homo sapien
catgtttatatctccaacctagtcattactcct

SEQ ID NO: 55000 - DNA, 33 bp, Homo sapien
catgtttatatctccagcctagtcattactcct

SEQ ID NO: 55001 - DNA, 33 bp, Homo sapien
gaaagaaactctgtctcaaaactaactaactaa

SEQ ID NO: 55002 - DNA, 33 bp, Homo sapien
gaaagaaactctgtctgaaaactaactaactaa

SEQ ID NO: 55003 - DNA, 33 bp, Homo sapien
ttccttcccatggaaaaaataaaggcgctttcc

SEQ ID NO: 55004 - DNA, 33 bp, Homo sapien
ttccttcccatggaaagaataaaggcgctttcc

SEQ ID NO: 55005 - DNA, 33 bp, Homo sapien
tgagtcctttgctaaccgtaggaactggctacc

SEQ ID NO: 55006 - DNA, 33 bp, Homo sapien
tgagtcctttgctaactgtaggaactggctacc

SEQ ID NO: 55007 - DNA, 33 bp, Homo sapien
aagagctataaatgccaacaaaccatcttgttt

SEQ ID NO: 55008 - DNA, 33 bp, Homo sapien
aagagctataaatgccgacaaaccatcttgttt

SEQ ID NO: 55009 - DNA, 33 bp, Homo sapien
tcctcacagtcataccacctatggacgcaggac

SEQ ID NO: 55010 - DNA, 33 bp, Homo sapien
tcctcacagtcataccgcctatggacgcaggac

SEQ ID NO: 55011 - DNA, 33 bp, Homo sapien
agcaactatagatagaagtgaactccataggca

SEQ ID NO: 55012 - DNA, 33 bp, Homo sapien
agcaactatagatagacgtgaactccataggca

SEQ ID NO: 55013 - DNA, 33 bp, Homo sapien
atcagccagcggtaccagatgctcattaggtcc

SEQ ID NO: 55014 - DNA, 33 bp, Homo sapien
atcagccagcggtaccggatgctcattaggtcc

SEQ ID NO: 55015 - DNA, 33 bp, Homo sapien
tgtgcactggatacaacgacggtttctcatttt

SEQ ID NO: 55016 - DNA, 33 bp, Homo sapien
tgtgcactggatacaatgacggtttctcatttt

SEQ ID NO: 55017 - DNA, 33 bp, Homo sapien; identical to SEQ ID NO: 55015

SEQ ID NO: 55018 - DNA, 33 bp, Homo sapien; identical to SEQ ID NO: 55016

SEQ ID NO: 55019 - DNA, 33 bp, Homo sapien
caaggctcaagagagaagtttaatgatttgccc

SEQ ID NO: 55020 - DNA, 33 bp, Homo sapien
caaggctcaagagagaggtttaatgatttgccc

SEQ ID NO: 55021 - DNA, 33 bp, Homo sapien
ggaaacttgctgaggccgaaaattcatccttct

SEQ ID NO: 55022 - DNA, 33 bp, Homo sapien
ggaaacttgctgaggctgaaaattcatccttct

SEQ ID NO: 55023 - DNA, 33 bp, Homo sapien
gccattcattgctaaaatgttcacctctggtga

SEQ ID NO: 55024 - DNA, 33 bp, Homo sapien
gccattcattgctaaagtgttcacctctggtga

SEQ ID NO: 55025 - DNA, 33 bp, Homo sapien
aggcaaaatcttgactaaagtgttgaggagaat

SEQ ID NO: 55026 - DNA, 33 bp, Homo sapien
aggcaaaatcttgactgaagtgttgaggagaat

SEQ ID NO: 55027 - DNA, 33 bp, Homo sapien
aagaggagtaaagatacggagtggagccaggcg

SEQ ID NO: 55028 - DNA, 33 bp, Homo sapien
aagaggagtaaagatatggagtggagccaggcg

SEQ ID NO: 55029 - DNA, 33 bp, Homo sapien
taatgactgaaagtaaagaaaggtgactaagtt

SEQ ID NO: 55030 - DNA, 33 bp, Homo sapien
taatgactgaaagtaacgaaaggtgactaagtt

SEQ ID NO: 55031 - DNA, 33 bp, Homo sapien
ttaaaaagtatgttaaagtacctcctttgttag

SEQ ID NO: 55032 - DNA, 33 bp, Homo sapien
ttaaaaagtatgttaaggtacctcctttgttag

SEQ ID NO: 55033 - DNA, 33 bp, Homo sapien
taaggggtgcgtattgcagagcatgaatttgtt

SEQ ID NO: 55034 - DNA, 33 bp, Homo sapien
taaggggtgcgtattgtagagcatgaatttgtt

SEQ ID NO: 55035 - DNA, 33 bp, Homo sapien
tacaggcggaatggtagaaagtctgtttaagaa

SEQ ID NO: 55036 - DNA, 33 bp, Homo sapien
tacaggcggaatggtataaagtctgtttaagaa

SEQ ID NO: 55037 - DNA, 33 bp, Homo sapien
actctcaggaaagcaacgttaaagcaagcaaaa

SEQ ID NO: 55038 - DNA, 33 bp, Homo sapien
actctcaggaaagcaaggttaaagcaagcaaaa

SEQ ID NO: 55039 - DNA, 33 bp, Homo sapien
catggtaaagatattccaatagtacaaaacact

SEQ ID NO: 55040 - DNA, 33 bp, Homo sapien
catggtaaagatattcgaatagtacaaaacact

SEQ ID NO: 55041 - DNA, 33 bp, Homo sapien
catttttaaatatgtaccactgtaactgacttt

SEQ ID NO: 55042 - DNA, 33 bp, Homo sapien
catttttaaatatgtatcactgtaactgacttt

SEQ ID NO: 55043 - DNA, 33 bp, Homo sapien
ctacatgatatctgtacacttcttctccaaact

SEQ ID NO: 55044 - DNA, 33 bp, Homo sapien
ctacatgatatctgtatacttcttctccaaact

SEQ ID NO: 55045 - DNA, 33 bp, Homo sapien
ttaatgaatctggataaaggatttaaaagcatt

SEQ ID NO: 55046 - DNA, 33 bp, Homo sapien
ttaatgaatctggatagaggatttaaaagcatt

SEQ ID NO: 55047 - DNA, 33 bp, Homo sapien
acagttagaagagaaacaaagcacctccctgag

SEQ ID NO: 55048 - DNA, 33 bp, Homo sapien
acagttagaagagaaagaaagcacctccctgag

SEQ ID NO: 55049 - DNA, 33 bp, Homo sapien
caataaattaagatcacaaatggaaacaaatag

SEQ ID NO: 55050 - DNA, 33 bp, Homo sapien
caataaattaagatcataaatggaaacaaatag

SEQ ID NO: 55051 - DNA, 33 bp, Homo sapien
tccctgttcaccaaaccctttcttgctatacat

SEQ ID NO: 55052 - DNA, 33 bp, Homo sapien
tccctgttcaccaaacgctttcttgctatacat

SEQ ID NO: 55053 - DNA, 33 bp, Homo sapien
ctaggcctaaaggttaccatcctcataactctg

SEQ ID NO: 55054 - DNA, 33 bp, Homo sapien
ctaggcctaaaggttagcatcctcataactctg

SEQ ID NO: 55055 - DNA, 33 bp, Homo sapien
tactgtgttattgcccagcacttcctatcaagc

SEQ ID NO: 55056 - DNA, 33 bp, Homo sapien
tactgtgttattgcccggcacttcctatcaagc

SEQ ID NO: 55057 - DNA, 33 bp, Homo sapien
gtactgttctaaggagcccagcacaggcaatac

SEQ ID NO: 55058 - DNA, 33 bp, Homo sapien
gtactgttctaaggagtccagcacaggcaatac

SEQ ID NO: 55059 - DNA, 33 bp, Homo sapien
atgaaagcaaagctcacgagactctgccagaag

SEQ ID NO: 55060 - DNA, 33 bp, Homo sapien
atgaaagcaaagctcatgagactctgccagaag

SEQ ID NO: 55061 - DNA, 33 bp, Homo sapien
gtggacttgggaacacactaaagaagcctatgt

SEQ ID NO: 55062 - DNA, 33 bp, Homo sapien
gtggacttgggaacacgctaaagaagcctatgt

SEQ ID NO: 55063 - DNA, 33 bp, Homo sapien
ctccaatgccctgtaacaaggaagctgcttcag

SEQ ID NO: 55064 - DNA, 33 bp, Homo sapien
ctccaatgccctgtaataaggaagctgcttcag

SEQ ID NO: 55065 - DNA, 33 bp, Homo sapien
caggtccaagtctgaaatatcgattataaaatt

SEQ ID NO: 55066 - DNA, 33 bp, Homo sapien
caggtccaagtctgaagtatcgattataaaatt

SEQ ID NO: 55067 - DNA, 33 bp, Homo sapien
tgagaagtttaaaaatgaatgttctcctgtatc

SEQ ID NO: 55068 - DNA, 33 bp, Homo sapien
tgagaagtttaaaaattaatgttctcctgtatc

SEQ ID NO: 55069 - DNA, 33 bp, Homo sapien
agcctatctgctctccgcaatcagtatattcct

SEQ ID NO: 55070 - DNA, 33 bp, Homo sapien
agcctatctgctctcctcaatcagtatattcct

SEQ ID NO: 55071 - DNA, 33 bp, Homo sapien
tatggtcttggtgttaaggtaatttgtttcctg

SEQ ID NO: 55072 - DNA, 33 bp, Homo sapien
tatggtcttggtgttacggtaatttgtttcctg

SEQ ID NO: 55073 - DNA, 33 bp, Homo sapien
aaattaggaagaactgaagcccgcaatgagtag

SEQ ID NO: 55074 - DNA, 33 bp, Homo sapien
aaattaggaagaactggagcccgcaatgagtag

SEQ ID NO: 55075 - DNA, 33 bp, Homo sapien
ctgagggtataaatggaagagggccaaaacagc

SEQ ID NO: 55076 - DNA, 33 bp, Homo sapien
ctgagggtataaatgggagagggccaaaacagc

SEQ ID NO: 55077 - DNA, 33 bp, Homo sapien
cagcacggccttgctacgatgtcataatgtttg

SEQ ID NO: 55078 - DNA, 33 bp, Homo sapien
cagcacggccttgctatgatgtcataatgtttg

SEQ ID NO: 55079 - DNA, 33 bp, Homo sapien
tgccagagaatgaagaaatacaacgcacagtac

SEQ ID NO: 55080 - DNA, 33 bp, Homo sapien
tgccagagaatgaagagatacaacgcacagtac

SEQ ID NO: 55081 - DNA, 33 bp, Homo sapien
ctgtctgtacacacacaactttcctcacaatcc

SEQ ID NO: 55082 - DNA, 33 bp, Homo sapien
ctgtctgtacacacaccactttcctcacaatcc

SEQ ID NO: 55083 - DNA, 33 bp, Homo sapien
ctccccccatcctaaaaaagttctgtgacaatg

SEQ ID NO: 55084 - DNA, 33 bp, Homo sapien
ctccccccatcctaaacaagttctgtgacaatg

SEQ ID NO: 55085 - DNA, 33 bp, Homo sapien
caggcacctttctatcacactaggagtactgta

SEQ ID NO: 55086 - DNA, 33 bp, Homo sapien
caggcacctttctatcgcactaggagtactgta

SEQ ID NO: 55087 - DNA, 33 bp, Homo sapien
gaactcagacctcagaaagaaaaacgccttgat

SEQ ID NO: 55088 - DNA, 33 bp, Homo sapien
gaactcagacctcagagagaaaaacgccttgat

SEQ ID NO: 55089 - DNA, 33 bp, Homo sapien
ggagctatttatgccacaaatgtcttagaaaga

SEQ ID NO: 55090 - DNA, 33 bp, Homo sapien
ggagctatttatgccagaaatgtcttagaaaga

SEQ ID NO: 55091 - DNA, 33 bp, Homo sapien
gtgtctgtatcttacaagcatggttgcatctcc

SEQ ID NO: 55092 - DNA, 33 bp, Homo sapien
gtgtctgtatcttacaggcatggttgcatctcc

SEQ ID NO: 55093 - DNA, 33 bp, Homo sapien
aactgaactgaattccaaagggtcctggatttc

SEQ ID NO: 55094 - DNA, 33 bp, Homo sapien
aactgaactgaattccgaagggtcctggatttc

SEQ ID NO: 55095 - DNA, 33 bp, Homo sapien
aactagaatcagcaggccaaatttgtaattaag

SEQ ID NO: 55096 - DNA, 33 bp, Homo sapien
aactagaatcagcaggtcaaatttgtaattaag

SEQ ID NO: 55097 - DNA, 33 bp, Homo sapien
agcctatcattgtcaacatcattctacttagcc

SEQ ID NO: 55098 - DNA, 33 bp, Homo sapien
agcctatcattgtcaatatcattctacttagcc

SEQ ID NO: 55099 - DNA, 33 bp, Homo sapien
gtttttaagttttcaacgtcccatcatagagcc

SEQ ID NO: 55100 - DNA, 33 bp, Homo sapien
gtttttaagttttcaaggtcccatcatagagcc

SEQ ID NO: 55101 - DNA, 33 bp, Homo sapien
ttagcgtagtaaaaaacgcatatgccttcagaa

SEQ ID NO: 55102 - DNA, 33 bp, Homo sapien
ttagcgtagtaaaaaatgcatatgccttcagaa

SEQ ID NO: 55103 - DNA, 33 bp, Homo sapien
tagtcccacaccagtagcatttccacttacatt

SEQ ID NO: 55104 - DNA, 33 bp, Homo sapien
tagtcccacaccagtatcatttccacttacatt

SEQ ID NO: 55105 - DNA, 33 bp, Homo sapien
atcccaagagctcctaagagttatcaacttatc

SEQ ID NO: 55106 - DNA, 33 bp, Homo sapien
atcccaagagctcctacgagttatcaacttatc

SEQ ID NO: 55107 - DNA, 33 bp, Homo sapien
actttgactttgcctccaattctgcccttcact

SEQ ID NO: 55108 - DNA, 33 bp, Homo sapien
actttgactttgcctcgaattctgcccttcact

SEQ ID NO: 55109 - DNA, 33 bp, Homo sapien
ggtaataatctagacactaaatgcttgcttaga

SEQ ID NO: 55110 - DNA, 33 bp, Homo sapien
ggtaataatctagacagtaaatgcttgcttaga

SEQ ID NO: 55111 - DNA, 33 bp, Homo sapien
tcttctttactgcatcattaattttttcctctc

SEQ ID NO: 55112 - DNA, 33 bp, Homo sapien
tcttctttactgcatcgttaattttttcctctc

SEQ ID NO: 55113 - DNA, 33 bp, Homo sapien
ctgaacctggaaaaaaagtcaaactacagaccc

SEQ ID NO: 55114 - DNA, 33 bp, Homo sapien
ctgaacctggaaaaaacgtcaaactacagaccc

SEQ ID NO: 55115 - DNA, 33 bp, Homo sapien
gcccttttcagcagtacaagaagaacaacaaaa

SEQ ID NO: 55116 - DNA, 33 bp, Homo sapien
gcccttttcagcagtataagaagaacaacaaaa

SEQ ID NO: 55117 - DNA, 33 bp, Homo sapien
tacaaagaggcaaaaacgggctaagattggctt

SEQ ID NO: 55118 - DNA, 33 bp, Homo sapien
tacaaagaggcaaaaatgggctaagattggctt

SEQ ID NO: 55119 - DNA, 33 bp, Homo sapien
ctcagagattccataaaaatgactctacattag

SEQ ID NO: 55120 - DNA, 33 bp, Homo sapien
ctcagagattccataagaatgactctacattag

SEQ ID NO: 55121 - DNA, 33 bp, Homo sapien
agccataatcaggctacgttttgagagttcaaa

SEQ ID NO: 55122 - DNA, 33 bp, Homo sapien
agccataatcaggctatgttttgagagttcaaa

SEQ ID NO: 55123 - DNA, 33 bp, Homo sapien
gagtatgacagtctcaatctggggagaatcttg

SEQ ID NO: 55124 - DNA, 33 bp, Homo sapien
gagtatgacagtctcactctggggagaatcttg

SEQ ID NO: 55125 - DNA, 33 bp, Homo sapien
cttcagttccatgtcactgaaaacttcatgaac

SEQ ID NO: 55126 - DNA, 33 bp, Homo sapien
cttcagttccatgtcattgaaaacttcatgaac

SEQ ID NO: 55127 - DNA, 33 bp, Homo sapien
tatgagtctattgttacagtccagaagatgaat

SEQ ID NO: 55128 - DNA, 33 bp, Homo sapien
tatgagtctattgttatagtccagaagatgaat

SEQ ID NO: 55129 - DNA, 33 bp, Homo sapien
acacagaagaattatccagagtctgggctgtat

SEQ ID NO: 55130 - DNA, 33 bp, Homo sapien
acacagaagaattatcgagagtctgggctgtat

SEQ ID NO: 55131 - DNA, 33 bp, Homo sapien
actatcatttattgacaagtatattagacattt

SEQ ID NO: 55132 - DNA, 33 bp, Homo sapien
actatcatttattgacgagtatattagacattt

SEQ ID NO: 55133 - DNA, 33 bp, Homo sapien
attttccatttcttttatacatcataggtagcc

SEQ ID NO: 55134 - DNA, 33 bp, Homo sapien
attttccatttcttttgtacatcataggtagcc

SEQ ID NO: 55135 - DNA, 33 bp, Homo sapien
gggcacctactgtgagaaaggtatctgccctgg

SEQ ID NO: 55136 - DNA, 33 bp, Homo sapien
gggcacctactgtgagcaaggtatctgccctgg

SEQ ID NO: 55137 - DNA, 33 bp, Homo sapien
gagtaggtattaaagacaagacttccaactccc

SEQ ID NO: 55138 - DNA, 33 bp, Homo sapien
gagtaggtattaaagataagacttccaactccc

SEQ ID NO: 55139 - DNA, 33 bp, Homo sapien
aggctaatctcaaacccctagcattaaatgatc

SEQ ID NO: 55140 - DNA, 33 bp, Homo sapien
aggctaatctcaaacctctagcattaaatgatc

SEQ ID NO: 55141 - DNA, 33 bp, Homo sapien
tttcattttcttcttacgtaccatcctcatgag

SEQ ID NO: 55142 - DNA, 33 bp, Homo sapien
tttcattttcttcttatgtaccatcctcatgag

SEQ ID NO: 55143 - DNA, 33 bp, Homo sapien
aactcttgcgccacagaccaacacctatccatg

SEQ ID NO: 55144 - DNA, 33 bp, Homo sapien
aactcttgcgccacaggccaacacctatccatg

SEQ ID NO: 55145 - DNA, 33 bp, Homo sapien
tccttgattttctccacgtcccttactgtctta

SEQ ID NO: 55146 - DNA, 33 bp, Homo sapien
tccttgattttctccatgtcccttactgtctta

SEQ ID NO: 55147 - DNA, 33 bp, Homo sapien
attaatatgtgattcaagtacactggggaaggt

SEQ ID NO: 55148 - DNA, 33 bp, Homo sapien
attaatatgtgattcaggtacactggggaaggt

SEQ ID NO: 55149 - DNA, 33 bp, Homo sapien
aatgaagtacaagtaaaaaagagtttagtcttg

SEQ ID NO: 55150 - DNA, 33 bp, Homo sapien
aatgaagtacaagtaagaaagagtttagtcttg

SEQ ID NO: 55151 - DNA, 33 bp, Homo sapien
gatttagtatgtgaagaatggatgtaccagact

SEQ ID NO: 55152 - DNA, 33 bp, Homo sapien
gatttagtatgtgaaggatggatgtaccagact

SEQ ID NO: 55153 - DNA, 33 bp, Homo sapien
ttaatgttttcagtgcgaagaaattaagatact

SEQ ID NO: 55154 - DNA, 33 bp, Homo sapien
ttaatgttttcagtgctaagaaattaagatact

SEQ ID NO: 55155 - DNA, 33 bp, Homo sapien
actgagagaatagaaacgagctaccagagaggt

SEQ ID NO: 55156 - DNA, 33 bp, Homo sapien
actgagagaatagaaaggagctaccagagaggt

SEQ ID NO: 55157 - DNA, 33 bp, Homo sapien
tcattcagaaagaagacaataaatgtcaagtcc

SEQ ID NO: 55158 - DNA, 33 bp, Homo sapien
tcattcagaaagaagataataaatgtcaagtcc

SEQ ID NO: 55159 - DNA, 33 bp, Homo sapien
tctccattccaaactagcagtgcagctaaacac

SEQ ID NO: 55160 - DNA, 33 bp, Homo sapien
tctccattccaaactatcagtgcagctaaacac

SEQ ID NO: 55161 - DNA, 33 bp, Homo sapien
ttcagaatatggacacaaacaaagatcattgag

SEQ ID NO: 55162 - DNA, 33 bp, Homo sapien
ttcagaatatggacacgaacaaagatcattgag

SEQ ID NO: 55163 - DNA, 33 bp, Homo sapien
gtcagcttcaaagaacaaccctgcacaaagcct

SEQ ID NO: 55164 - DNA, 33 bp, Homo sapien
gtcagcttcaaagaacgaccctgcacaaagcct

SEQ ID NO: 55165 - DNA, 33 bp, Homo sapien
gatgagagtaacaggaaaacaactgaaacatgg

SEQ ID NO: 55166 - DNA, 33 bp, Homo sapien
gatgagagtaacaggacaacaactgaaacatgg

SEQ ID NO: 55167 - DNA, 33 bp, Homo sapien
ggaaccatatgttaaggcctagttataagttgc

SEQ ID NO: 55168 - DNA, 33 bp, Homo sapien
ggaaccatatgttaagtcctagttataagttgc

SEQ ID NO: 55169 - DNA, 33 bp, Homo sapien
gtaatcagccaagacactctaatcctcacccat

SEQ ID NO: 55170 - DNA, 33 bp, Homo sapien
gtaatcagccaagacattctaatcctcacccat

SEQ ID NO: 55171 - DNA, 33 bp, Homo sapien
tggtaatctgaccaaaacactaaacaactcctg

SEQ ID NO: 55172 - DNA, 33 bp, Homo sapien
tggtaatctgaccaaatcactaaacaactcctg

SEQ ID NO: 55173 - DNA, 33 bp, Homo sapien
aattatagtttctaccaaatgcatattgctttc

SEQ ID NO: 55174 - DNA, 33 bp, Homo sapien
aattatagtttctaccgaatgcatattgctttc

SEQ ID NO: 55175 - DNA, 33 bp, Homo sapien
tatctctctcctgataccatggaaggttagaga

SEQ ID NO: 55176 - DNA, 33 bp, Homo sapien
tatctctctcctgatatcatggaaggttagaga

SEQ ID NO: 55177 - DNA, 33 bp, Homo sapien
tgtcttcatccactggaatataagcaccatgag

SEQ ID NO: 55178 - DNA, 33 bp, Homo sapien
tgtcttcatccactggcatataagcaccatgag

SEQ ID NO: 55179 - DNA, 33 bp, Homo sapien
aatagtggatgggtccaagcagagactggatga

SEQ ID NO: 55180 - DNA, 33 bp, Homo sapien
aatagtggatgggtccgagcagagactggatga

SEQ ID NO: 55181 - DNA, 33 bp, Homo sapien
agataaattcttttcaagggtgacaagatggct

SEQ ID NO: 55182 - DNA, 33 bp, Homo sapien
agataaattcttttcacgggtgacaagatggct

SEQ ID NO: 55183 - DNA, 33 bp, Homo sapien
ctccaaattttgggaacagctaattgtctgtga

SEQ ID NO: 55184 - DNA, 33 bp, Homo sapien
ctccaaattttgggaagagctaattgtctgtga

SEQ ID NO: 55185 - DNA, 33 bp, Homo sapien
tcatctaatgaagaaaacaaatgacaaatatca

SEQ ID NO: 55186 - DNA, 33 bp, Homo sapien
tcatctaatgaagaaagcaaatgacaaatatca

SEQ ID NO: 55187 - DNA, 33 bp, Homo sapien
agtgccatcaccaaaaataaacttgtaagccac

SEQ ID NO: 55188 - DNA, 33 bp, Homo sapien
agtgccatcaccaaaagtaaacttgtaagccac

SEQ ID NO: 55189 - DNA, 33 bp, Homo sapien
gtggcccatatgctcaactgtactggatgttta

SEQ ID NO: 55190 - DNA, 33 bp, Homo sapien
gtggcccatatgctcagctgtactggatgttta

SEQ ID NO: 55191 - DNA, 33 bp, Homo sapien
gtgggaattgctttcaagaagggcagacatact

SEQ ID NO: 55192 - DNA, 33 bp, Homo sapien
gtgggaattgctttcatgaagggcagacatact

SEQ ID NO: 55193 - DNA, 33 bp, Homo sapien
ccatttagccagttgcacttattttaataatat

SEQ ID NO: 55194 - DNA, 33 bp, Homo sapien
ccatttagccagttgcgcttattttaataatat

SEQ ID NO: 55195 - DNA, 33 bp, Homo sapien
ctttctccgacttttccattttcagttgcatag

SEQ ID NO: 55196 - DNA, 33 bp, Homo sapien
ctttctccgacttttctattttcagttgcatag

SEQ ID NO: 55197 - DNA, 33 bp, Homo sapien
tcttaagaaatacgtacggaattctgttttgat

SEQ ID NO: 55198 - DNA, 33 bp, Homo sapien
tcttaagaaatacgtatggaattctgttttgat

SEQ ID NO: 55199 - DNA, 33 bp, Homo sapien
gtgggtgtttagagaagcatgatgatgcatcaa

SEQ ID NO: 55200 - DNA, 33 bp, Homo sapien
gtgggtgtttagagaatcatgatgatgcatcaa

SEQ ID NO: 55201 - DNA, 33 bp, Homo sapien
tctgagggtccagtgacagcacgaattctcttg

SEQ ID NO: 55202 - DNA, 33 bp, Homo sapien
tctgagggtccagtgatagcacgaattctcttg

SEQ ID NO: 55203 - DNA, 33 bp, Homo sapien
gaggatgcctgtgctcacaaaggtagatctttc

SEQ ID NO: 55204 - DNA, 33 bp, Homo sapien
gaggatgcctgtgctcgcaaaggtagatctttc

SEQ ID NO: 55205 - DNA, 33 bp, Homo sapien
atgcacagttaataaaacatgttggaattgttc

SEQ ID NO: 55206 - DNA, 33 bp, Homo sapien
atgcacagttaataaagcatgttggaattgttc

SEQ ID NO: 55207 - DNA, 33 bp, Homo sapien
aagtaccaaaagattaccaggtcagaccagggc

SEQ ID NO: 55208 - DNA, 33 bp, Homo sapien
aagtaccaaaagattatcaggtcagaccagggc

SEQ ID NO: 55209 - DNA, 33 bp, Homo sapien
gcttacaccctcaaaacctgacaagcatcatct

SEQ ID NO: 55210 - DNA, 33 bp, Homo sapien
gcttacaccctcaaaagctgacaagcatcatct

SEQ ID NO: 55211 - DNA, 33 bp, Homo sapien
gccactcaggaggagactacaaaagctatagag

SEQ ID NO: 55212 - DNA, 33 bp, Homo sapien
gccactcaggaggagagtacaaaagctatagag

SEQ ID NO: 55213 - DNA, 33 bp, Homo sapien
aaattccccacttaaaactaccattcccacggt

SEQ ID NO: 55214 - DNA, 33 bp, Homo sapien
aaattccccacttaaagctaccattcccacggt

SEQ ID NO: 55215 - DNA, 33 bp, Homo sapien
ttgatgcatatattgaagtatgggaaattaaca

SEQ ID NO: 55216 - DNA, 33 bp, Homo sapien
ttgatgcatatattgacgtatgggaaattaaca

SEQ ID NO: 55217 - DNA, 33 bp, Homo sapien
atttttttaccaataacctcaattccaacttca

SEQ ID NO: 55218 - DNA, 33 bp, Homo sapien
atttttttaccaataagctcaattccaacttca

SEQ ID NO: 55219 - DNA, 33 bp, Homo sapien
tatttgaaacataaagaccaaccatacaattgt

SEQ ID NO: 55220 - DNA, 33 bp, Homo sapien
tatttgaaacataaaggccaaccatacaattgt

SEQ ID NO: 55221 - DNA, 33 bp, Homo sapien
ctgcctgcatgataataaagtgcaaacaatata

SEQ ID NO: 55222 - DNA, 33 bp, Homo sapien
ctgcctgcatgataatcaagtgcaaacaatata

SEQ ID NO: 55223 - DNA, 33 bp, Homo sapien
cagactatatttaccacggcagtcttggacaat

SEQ ID NO: 55224 - DNA, 33 bp, Homo sapien
cagactatatttaccatggcagtcttggacaat

SEQ ID NO: 55225 - DNA, 33 bp, Homo sapien
tcaggctaagctgttaattgatgtgaacatcag

SEQ ID NO: 55226 - DNA, 33 bp, Homo sapien
tcaggctaagctgttatttgatgtgaacatcag

SEQ ID NO: 55227 - DNA, 33 bp, Homo sapien
atccataagacaaacacaatctgagagaaatgt

SEQ ID NO: 55228 - DNA, 33 bp, Homo sapien
atccataagacaaacagaatctgagagaaatgt

SEQ ID NO: 55229 - DNA, 33 bp, Homo sapien
tcctttaacttttcaaagcacgttcataccaat

SEQ ID NO: 55230 - DNA, 33 bp, Homo sapien
tcctttaacttttcaacgcacgttcataccaat

SEQ ID NO: 55231 - DNA, 33 bp, Homo sapien
atgcacctcattttacgcacaaggaaactaaag

SEQ ID NO: 55232 - DNA, 33 bp, Homo sapien
atgcacctcattttactcacaaggaaactaaag

SEQ ID NO: 55233 - DNA, 33 bp, Homo sapien
ctctgttatgtatatgcatgaaaatttgcccta

SEQ ID NO: 55234 - DNA, 33 bp, Homo sapien
ctctgttatgtatatgtatgaaaatttgcccta

SEQ ID NO: 55235 - DNA, 33 bp, Homo sapien
gcaagtctgtggagaaaattttattgaaatgag

SEQ ID NO: 55236 - DNA, 33 bp, Homo sapien
gcaagtctgtggagaacattttattgaaatgag

SEQ ID NO: 55237 - DNA, 33 bp, Homo sapien
aaagggagctaggtacagaaaggcactgtcctg

SEQ ID NO: 55238 - DNA, 33 bp, Homo sapien
aaagggagctaggtacggaaaggcactgtcctg

SEQ ID NO: 55239 - DNA, 33 bp, Homo sapien
ttttatttctgcaaaggagcgtgaggatcccta

SEQ ID NO: 55240 - DNA, 33 bp, Homo sapien
ttttatttctgcaaagtagcgtgaggatcccta

SEQ ID NO: 55241 - DNA, 33 bp, Homo sapien
aaatgtttaaagacaactctgtgtaaaatgtga

SEQ ID NO: 55242 - DNA, 33 bp, Homo sapien
aaatgtttaaagacaagtctgtgtaaaatgtga

SEQ ID NO: 55243 - DNA, 33 bp, Homo sapien
agaaaatagctctgtaacccaatgagaattaaa

SEQ ID NO: 55244 - DNA, 33 bp, Homo sapien
agaaaatagctctgtagcccaatgagaattaaa

SEQ ID NO: 55245 - DNA, 33 bp, Homo sapien
atatgcaagtccacaactccttatctgaagtcc

SEQ ID NO: 55246 - DNA, 33 bp, Homo sapien
atatgcaagtccacaattccttatctgaagtcc

SEQ ID NO: 55247 - DNA, 33 bp, Homo sapien
taacatgatatcccctaaaacttcaaatccaaa

SEQ ID NO: 55248 - DNA, 33 bp, Homo sapien
taacatgatatcccctcaaacttcaaatccaaa

SEQ ID NO: 55249 - DNA, 33 bp, Homo sapien
tgataggctattctgccattagaactcacaaca

SEQ ID NO: 55250 - DNA, 33 bp, Homo sapien
tgataggctattctgctattagaactcacaaca

SEQ ID NO: 55251 - DNA, 33 bp, Homo sapien
gatggtaaattgacccaagggaagcaaaaaaaa

SEQ ID NO: 55252 - DNA, 33 bp, Homo sapien
gatggtaaattgacccgagggaagcaaaaaaaa

SEQ ID NO: 55253 - DNA, 33 bp, Homo sapien
aatttcaaaacaagaacttaaagctaggaggaa

SEQ ID NO: 55254 - DNA, 33 bp, Homo sapien
aatttcaaaacaagaatttaaagctaggaggaa

SEQ ID NO: 55255 - DNA, 33 bp, Homo sapien
caccgatctgatcttcaacacctatttaataaa

SEQ ID NO: 55256 - DNA, 33 bp, Homo sapien
caccgatctgatcttcgacacctatttaataaa

SEQ ID NO: 55257 - DNA, 33 bp, Homo sapien
aggatgagtcctcttggattctgaatggacaca

SEQ ID NO: 55258 - DNA, 33 bp, Homo sapien
aggatgagtcctcttgtattctgaatggacaca

SEQ ID NO: 55259 - DNA, 33 bp, Homo sapien
ataccttctcagttcactctctgggttcttggt

SEQ ID NO: 55260 - DNA, 33 bp, Homo sapien
ataccttctcagttcattctctgggttcttggt

SEQ ID NO: 55261 - DNA, 33 bp, Homo sapien
aaggcgttcctggcaaatagaagacaacacaaa

SEQ ID NO: 55262 - DNA, 33 bp, Homo sapien
aaggcgttcctggcaattagaagacaacacaaa

SEQ ID NO: 55263 - DNA, 33 bp, Homo sapien
aacattgaagaggtaaggtctgcaaatgcgacc

SEQ ID NO: 55264 - DNA, 33 bp, Homo sapien
aacattgaagaggtaatgtctgcaaatgcgacc

SEQ ID NO: 55265 - DNA, 33 bp, Homo sapien
ctatgatgccatctttaaaagagccagaggaag

SEQ ID NO: 55266 - DNA, 33 bp, Homo sapien
ctatgatgccatctttgaaagagccagaggaag

SEQ ID NO: 55267 - DNA, 33 bp, Homo sapien
catactcaagaaattacgttgtctttcatgaga

SEQ ID NO: 55268 - DNA, 33 bp, Homo sapien
catactcaagaaattatgttgtctttcatgaga

SEQ ID NO: 55269 - DNA, 33 bp, Homo sapien
accacactggctaaaacgaagctgcagcacaca

SEQ ID NO: 55270 - DNA, 33 bp, Homo sapien
accacactggctaaaaggaagctgcagcacaca

SEQ ID NO: 55271 - DNA, 33 bp, Homo sapien
taatcaggtttttagcaataacatgtagaatat

SEQ ID NO: 55272 - DNA, 33 bp, Homo sapien
taatcaggtttttagcgataacatgtagaatat

SEQ ID NO: 55273 - DNA, 33 bp, Homo sapien
gaggtatagttaatggaaatttgatctatccaa

SEQ ID NO: 55274 - DNA, 33 bp, Homo sapien
gaggtatagttaatggtaatttgatctatccaa

SEQ ID NO: 55275 - DNA, 33 bp, Homo sapien
gtgtgtgttgaggaaacgattgatgctttgcca

SEQ ID NO: 55276 - DNA, 33 bp, Homo sapien
gtgtgtgttgaggaaaggattgatgctttgcca

SEQ ID NO: 55277 - DNA, 33 bp, Homo sapien
ttaaatggggatagtactaagagggttgtttta

SEQ ID NO: 55278 - DNA, 33 bp, Homo sapien
ttaaatggggatagtattaagagggttgtttta

SEQ ID NO: 55279 - DNA, 33 bp, Homo sapien
gcccttcatccctttaagacttttcatgcattg

SEQ ID NO: 55280 - DNA, 33 bp, Homo sapien
gcccttcatccctttaggacttttcatgcattg

SEQ ID NO: 55281 - DNA, 33 bp, Homo sapien
tggtactttgagacaacaggcaacggtcaacct

SEQ ID NO: 55282 - DNA, 33 bp, Homo sapien
tggtactttgagacaataggcaacggtcaacct

SEQ ID NO: 55283 - DNA, 33 bp, Homo sapien
acacaaagatcttacagtatcacaaattaatca

SEQ ID NO: 55284 - DNA, 33 bp, Homo sapien
acacaaagatcttacattatcacaaattaatca

SEQ ID NO: 55285 - DNA, 33 bp, Homo sapien
ttctagattttcttctaaagttccccacctaca

SEQ ID NO: 55286 - DNA, 33 bp, Homo sapien
ttctagattttcttctgaagttccccacctaca

SEQ ID NO: 55287 - DNA, 33 bp, Homo sapien
catccttcaaggcctacatcacctggtccctga

SEQ ID NO: 55288 - DNA, 33 bp, Homo sapien
catccttcaaggcctatatcacctggtccctga

SEQ ID NO: 55289 - DNA, 33 bp, Homo sapien
aacagcagaaacttagaacagttgccccctttc

SEQ ID NO: 55290 - DNA, 33 bp, Homo sapien
aacagcagaaacttaggacagttgccccctttc

SEQ ID NO: 55291 - DNA, 33 bp, Homo sapien
ttgtttgttatgaataagtgatagtttgtggaa

SEQ ID NO: 55292 - DNA, 33 bp, Homo sapien
ttgtttgttatgaatacgtgatagtttgtggaa

SEQ ID NO: 55293 - DNA, 33 bp, Homo sapien
tcgtatgtgagagaaaatagatagccactgaaa

SEQ ID NO: 55294 - DNA, 33 bp, Homo sapien
tcgtatgtgagagaaagtagatagccactgaaa

SEQ ID NO: 55295 - DNA, 33 bp, Homo sapien
tcctattaactagagacgtcacttcattttcga

SEQ ID NO: 55296 - DNA, 33 bp, Homo sapien
tcctattaactagagaggtcacttcattttcga

SEQ ID NO: 55297 - DNA, 33 bp, Homo sapien
taggtagccctaatgacgcctatcagggcctta

SEQ ID NO: 55298 - DNA, 33 bp, Homo sapien
taggtagccctaatgatgcctatcagggcctta

SEQ ID NO: 55299 - DNA, 33 bp, Homo sapien
taagatgccaggccacaaacaaattctgaatgt

SEQ ID NO: 55300 - DNA, 33 bp, Homo sapien
taagatgccaggccacgaacaaattctgaatgt

SEQ ID NO: 55301 - DNA, 33 bp, Homo sapien
ttcctgatgggtcactaacaaacatggtgcatt

SEQ ID NO: 55302 - DNA, 33 bp, Homo sapien
ttcctgatgggtcactgacaaacatggtgcatt

SEQ ID NO: 55303 - DNA, 33 bp, Homo sapien
tacatgttttcatttacaagtgagagtcaaata

SEQ ID NO: 55304 - DNA, 33 bp, Homo sapien
tacatgttttcatttataagtgagagtcaaata

SEQ ID NO: 55305 - DNA, 33 bp, Homo sapien
tgctgccattattagaccctttgcaggtacaga

SEQ ID NO: 55306 - DNA, 33 bp, Homo sapien
tgctgccattattagatcctttgcaggtacaga

SEQ ID NO: 55307 - DNA, 33 bp, Homo sapien
gagcgttcataaaatgaaaattcaagtttccga

SEQ ID NO: 55308 - DNA, 33 bp, Homo sapien
gagcgttcataaaatggaaattcaagtttccga

SEQ ID NO: 55309 - DNA, 33 bp, Homo sapien
gtttctgcacctaagaagtttaccctgtatttg

SEQ ID NO: 55310 - DNA, 33 bp, Homo sapien
gtttctgcacctaagacgtttaccctgtatttg

SEQ ID NO: 55311 - DNA, 33 bp, Homo sapien
agagaaatttgagggaaaatgtaaatacatgca

SEQ ID NO: 55312 - DNA, 33 bp, Homo sapien
agagaaatttgagggacaatgtaaatacatgca

SEQ ID NO: 55313 - DNA, 33 bp, Homo sapien
ttgttacattcacctcgaggaatatgaaacacc

SEQ ID NO: 55314 - DNA, 33 bp, Homo sapien
ttgttacattcacctctaggaatatgaaacacc

SEQ ID NO: 55315 - DNA, 33 bp, Homo sapien
tatatgggttgacaataacgatgatacccctgt

SEQ ID NO: 55316 - DNA, 33 bp, Homo sapien
tatatgggttgacaattacgatgatacccctgt

SEQ ID NO: 55317 - DNA, 33 bp, Homo sapien
tactgctaaacacaacagcaaaatctaaaatcc

SEQ ID NO: 55318 - DNA, 33 bp, Homo sapien
tactgctaaacacaacggcaaaatctaaaatcc

SEQ ID NO: 55319 - DNA, 33 bp, Homo sapien
gaggaaaggccagaacaccgcttttgatagacc

SEQ ID NO: 55320 - DNA, 33 bp, Homo sapien
gaggaaaggccagaacgccgcttttgatagacc

SEQ ID NO: 55321 - DNA, 33 bp, Homo sapien
tcagttgaatccataaccttctgacttgaagtc

SEQ ID NO: 55322 - DNA, 33 bp, Homo sapien
tcagttgaatccataatcttctgacttgaagtc

SEQ ID NO: 55323 - DNA, 33 bp, Homo sapien
tttatcaattggcacaaactaaataggactaaa

SEQ ID NO: 55324 - DNA, 33 bp, Homo sapien
tttatcaattggcacagactaaataggactaaa

SEQ ID NO: 55325 - DNA, 33 bp, Homo sapien
ctcctgttttctggtcaaagttatcagctcatg

SEQ ID NO: 55326 - DNA, 33 bp, Homo sapien
ctcctgttttctggtcgaagttatcagctcatg

SEQ ID NO: 55327 - DNA, 33 bp, Homo sapien
accttcatacctgatgaattaaaaggtcagttt

SEQ ID NO: 55328 - DNA, 33 bp, Homo sapien
accttcatacctgatggattaaaaggtcagttt

SEQ ID NO: 55329 - DNA, 33 bp, Homo sapien
tcatcttctgagactactaactaatcatttaag

SEQ ID NO: 55330 - DNA, 33 bp, Homo sapien
tcatcttctgagactattaactaatcatttaag

SEQ ID NO: 55331 - DNA, 33 bp, Homo sapien
aagattgtctttcttaccttcctcagtgcttct

SEQ ID NO: 55332 - DNA, 33 bp, Homo sapien
aagattgtctttcttatcttcctcagtgcttct

SEQ ID NO: 55333 - DNA, 33 bp, Homo sapien
aggagagaagagggaagagtgaaaaggactttg

SEQ ID NO: 55334 - DNA, 33 bp, Homo sapien
aggagagaagagggaatagtgaaaaggactttg

SEQ ID NO: 55335 - DNA, 33 bp, Homo sapien
cgaatgaggtagaatgaacacagacatgagata

SEQ ID NO: 55336 - DNA, 33 bp, Homo sapien
cgaatgaggtagaatggacacagacatgagata

SEQ ID NO: 55337 - DNA, 33 bp, Homo sapien; identical to SEQ ID NO: 55335

SEQ ID NO: 55338 - DNA, 33 bp, Homo sapien; identical to SEQ ID NO: 55336

SEQ ID NO: 55339 - DNA, 33 bp, Homo sapien
aatgagtaaagctggccaaacaggactgcaatg

SEQ ID NO: 55340 - DNA, 33 bp, Homo sapien
aatgagtaaagctggctaaacaggactgcaatg

SEQ ID NO: 55341 - DNA, 33 bp, Homo sapien
gagatgcaaatgagaaactcctgaacccaggtg

SEQ ID NO: 55342 - DNA, 33 bp, Homo sapien
gagatgcaaatgagaacctcctgaacccaggtg

SEQ ID NO: 55343 - DNA, 33 bp, Homo sapien
tgtgctgcagctggtaggtaccgagagtttagg

SEQ ID NO: 55344 - DNA, 33 bp, Homo sapien
tgtgctgcagctggtatgtaccgagagtttagg

SEQ ID NO: 55345 - DNA, 33 bp, Homo sapien
catggcaagtcttaggcccagtcggatgtgaaa

SEQ ID NO: 55346 - DNA, 33 bp, Homo sapien
catggcaagtcttaggtccagtcggatgtgaaa

SEQ ID NO: 55347 - DNA, 33 bp, Homo sapien
atacatgatatcataaacaccgataaaaagaaa

SEQ ID NO: 55348 - DNA, 33 bp, Homo sapien
atacatgatatcataagcaccgataaaaagaaa

SEQ ID NO: 55349 - DNA, 33 bp, Homo sapien
caaggttacataggaaaatgagtagttacataa

SEQ ID NO: 55350 - DNA, 33 bp, Homo sapien
caaggttacataggaatatgagtagttacataa

SEQ ID NO: 55351 - DNA, 33 bp, Homo sapien
tgaatgaactgtgctaaaggggctgcatcagaa

SEQ ID NO: 55352 - DNA, 33 bp, Homo sapien
tgaatgaactgtgctacaggggctgcatcagaa

SEQ ID NO: 55353 - DNA, 33 bp, Homo sapien
taggccaatattttgggatacataagaagcgat

SEQ ID NO: 55354 - DNA, 33 bp, Homo sapien
taggccaatattttggtatacataagaagcgat

SEQ ID NO: 55355 - DNA, 33 bp, Homo sapien
gaatgagagctagagacgttacaggatcacaaa

SEQ ID NO: 55356 - DNA, 33 bp, Homo sapien
gaatgagagctagagatgttacaggatcacaaa

SEQ ID NO: 55357 - DNA, 33 bp, Homo sapien
gttgatgaaaatggaagatggtaactgtctctc

SEQ ID NO: 55358 - DNA, 33 bp, Homo sapien
gttgatgaaaatggaatatggtaactgtctctc

SEQ ID NO: 55359 - DNA, 33 bp, Homo sapien
cttttagcattcttcaaatacagtcaggcagag

SEQ ID NO: 55360 - DNA, 33 bp, Homo sapien
cttttagcattcttcagatacagtcaggcagag

SEQ ID NO: 55361 - DNA, 33 bp, Homo sapien
tttaaaagctacagcacggcttttcctaaatac

SEQ ID NO: 55362 - DNA, 33 bp, Homo sapien
tttaaaagctacagcatggcttttcctaaatac

SEQ ID NO: 55363 - DNA, 33 bp, Homo sapien
cagcaaggctataaaggatttaggtattaggat

SEQ ID NO: 55364 - DNA, 33 bp, Homo sapien
cagcaaggctataaagtatttaggtattaggat

SEQ ID NO: 55365 - DNA, 33 bp, Homo sapien
taaatcatgatacggccccactgagaatccctg

SEQ ID NO: 55366 - DNA, 33 bp, Homo sapien
taaatcatgatacggctccactgagaatccctg

SEQ ID NO: 55367 - DNA, 33 bp, Homo sapien
gataatagccacctgaacaacttcattgtgtag

SEQ ID NO: 55368 - DNA, 33 bp, Homo sapien
gataatagccacctgaccaacttcattgtgtag

SEQ ID NO: 55369 - DNA, 33 bp, Homo sapien
acaaagtattgcacttaaaatttaaacccagag

SEQ ID NO: 55370 - DNA, 33 bp, Homo sapien
acaaagtattgcacttcaaatttaaacccagag

SEQ ID NO: 55371 - DNA, 33 bp, Homo sapien
gttctttgaggaaaaaggattgtctaaatgagc

SEQ ID NO: 55372 - DNA, 33 bp, Homo sapien
gttctttgaggaaaaatgattgtctaaatgagc

SEQ ID NO: 55373 - DNA, 33 bp, Homo sapien
atggaggccagattcaacaagacagtacaagga

SEQ ID NO: 55374 - DNA, 33 bp, Homo sapien
atggaggccagattcagcaagacagtacaagga

SEQ ID NO: 55375 - DNA, 33 bp, Homo sapien
tccattgctcactgaacggtgatgcttgggtag

SEQ ID NO: 55376 - DNA, 33 bp, Homo sapien
tccattgctcactgaagggtgatgcttgggtag

SEQ ID NO: 55377 - DNA, 33 bp, Homo sapien
gaagtttataaagtcaataaaatcagaacacta

SEQ ID NO: 55378 - DNA, 33 bp, Homo sapien
gaagtttataaagtcagtaaaatcagaacacta

SEQ ID NO: 55379 - DNA, 33 bp, Homo sapien
taatgttcagggtctgaaaggcctattagtttg

SEQ ID NO: 55380 - DNA, 33 bp, Homo sapien
taatgttcagggtctggaaggcctattagtttg

SEQ ID NO: 55381 - DNA, 33 bp, Homo sapien
agatacattagttccacctgaaaaggcaagata

SEQ ID NO: 55382 - DNA, 33 bp, Homo sapien
agatacattagttccatctgaaaaggcaagata

SEQ ID NO: 55383 - DNA, 33 bp, Homo sapien
taatgtatctcttccacgtattgatgtatgtct

SEQ ID NO: 55384 - DNA, 33 bp, Homo sapien
taatgtatctcttccatgtattgatgtatgtct

SEQ ID NO: 55385 - DNA, 33 bp, Homo sapien
agggaggcaggagttaaaggaaagacatacatc

SEQ ID NO: 55386 - DNA, 33 bp, Homo sapien
agggaggcaggagttacaggaaagacatacatc

SEQ ID NO: 55387 - DNA, 33 bp, Homo sapien
gagaggtcatttgtcaagagaggtgaggtggca

SEQ ID NO: 55388 - DNA, 33 bp, Homo sapien
gagaggtcatttgtcaggagaggtgaggtggca

SEQ ID NO: 55389 - DNA, 33 bp, Homo sapien
ttccttcaggcattagcagagtcatataaatga

SEQ ID NO: 55390 - DNA, 33 bp, Homo sapien
ttccttcaggcattagtagagtcatataaatga

SEQ ID NO: 55391 - DNA, 33 bp, Homo sapien
caaggaccgagtctccaagtgcatcccattcag

SEQ ID NO: 55392 - DNA, 33 bp, Homo sapien
caaggaccgagtctccgagtgcatcccattcag

SEQ ID NO: 55393 - DNA, 33 bp, Homo sapien
aagggatgagattcaaaaaaggagatggtgatt

SEQ ID NO: 55394 - DNA, 33 bp, Homo sapien
aagggatgagattcaagaaaggagatggtgatt

SEQ ID NO: 55395 - DNA, 33 bp, Homo sapien
aattaataaacctaacacctcaattgttcaaca

SEQ ID NO: 55396 - DNA, 33 bp, Homo sapien
aattaataaacctaactcctcaattgttcaaca

SEQ ID NO: 55397 - DNA, 33 bp, Homo sapien
tattttacataatagaatagtgacagataaatt

SEQ ID NO: 55398 - DNA, 33 bp, Homo sapien
tattttacataatagagtagtgacagataaatt

SEQ ID NO: 55399 - DNA, 33 bp, Homo sapien
tatgttattgcttagacatcattctatcttcca

SEQ ID NO: 55400 - DNA, 33 bp, Homo sapien
tatgttattgcttagagatcattctatcttcca

SEQ ID NO: 55401 - DNA, 33 bp, Homo sapien
ggcacgcccctttctacctaccaatcaacatct

SEQ ID NO: 55402 - DNA, 33 bp, Homo sapien
ggcacgcccctttctatctaccaatcaacatct

SEQ ID NO: 55403 - DNA, 33 bp, Homo sapien
tgttacaaaattccaaatacaagcaacaagaat

SEQ ID NO: 55404 - DNA, 33 bp, Homo sapien
tgttacaaaattccaactacaagcaacaagaat

SEQ ID NO: 55405 - DNA, 33 bp, Homo sapien
ttcaaggaaatagacaataatcttgtatacaaa

SEQ ID NO: 55406 - DNA, 33 bp, Homo sapien
ttcaaggaaatagacagtaatcttgtatacaaa

SEQ ID NO: 55407 - DNA, 33 bp, Homo sapien
tttcatggcatttcataaactaggaaagcactt

SEQ ID NO: 55408 - DNA, 33 bp, Homo sapien
tttcatggcatttcattaactaggaaagcactt

SEQ ID NO: 55409 - DNA, 33 bp, Homo sapien
gggagagcaaacaagactaatagtgacaacatg

SEQ ID NO: 55410 - DNA, 33 bp, Homo sapien
gggagagcaaacaagattaatagtgacaacatg

SEQ ID NO: 55411 - DNA, 33 bp, Homo sapien
aaggtgaaagtgagtacagataattcaaacttg

SEQ ID NO: 55412 - DNA, 33 bp, Homo sapien
aaggtgaaagtgagtatagataattcaaacttg

SEQ ID NO: 55413 - DNA, 33 bp, Homo sapien
gctttggatgcgactacgccctgagaggttcct

SEQ ID NO: 55414 - DNA, 33 bp, Homo sapien
gctttggatgcgactatgccctgagaggttcct

SEQ ID NO: 55415 - DNA, 33 bp, Homo sapien
gtgtttattggttagaagtctaggaagaggcag

SEQ ID NO: 55416 - DNA, 33 bp, Homo sapien
gtgtttattggttagaggtctaggaagaggcag

SEQ ID NO: 55417 - DNA, 33 bp, Homo sapien
taggaattccaagttgaagtttctcattctcac

SEQ ID NO: 55418 - DNA, 33 bp, Homo sapien
taggaattccaagttggagtttctcattctcac

SEQ ID NO: 55419 - DNA, 33 bp, Homo sapien
ttttaactatgaaggacggaaacaactggtgaa

SEQ ID NO: 55420 - DNA, 33 bp, Homo sapien
ttttaactatgaaggatggaaacaactggtgaa

SEQ ID NO: 55421 - DNA, 33 bp, Homo sapien
gcaaaactgagtctcccctgcattcctacaccg

SEQ ID NO: 55422 - DNA, 33 bp, Homo sapien
gcaaaactgagtctcctctgcattcctacaccg

SEQ ID NO: 55423 - DNA, 33 bp, Homo sapien
caggcacatattgaaactctacaagtgccagga

SEQ ID NO: 55424 - DNA, 33 bp, Homo sapien
caggcacatattgaaagtctacaagtgccagga

SEQ ID NO: 55425 - DNA, 33 bp, Homo sapien
atagtgtctgccactactaagccactctattag

SEQ ID NO: 55426 - DNA, 33 bp, Homo sapien
atagtgtctgccactattaagccactctattag

SEQ ID NO: 55427 - DNA, 33 bp, Homo sapien
tatctagaagggtccactagcaaaagaatcatg

SEQ ID NO: 55428 - DNA, 33 bp, Homo sapien
tatctagaagggtccattagcaaaagaatcatg

SEQ ID NO: 55429 - DNA, 33 bp, Homo sapien
gaattggaagggcaaggcataaactatacacta

SEQ ID NO: 55430 - DNA, 33 bp, Homo sapien
gaattggaagggcaagtcataaactatacacta

SEQ ID NO: 55431 - DNA, 33 bp, Homo sapien
tctaagagtgacaagaagctataagggaaatag

SEQ ID NO: 55432 - DNA, 33 bp, Homo sapien
tctaagagtgacaagaggctataagggaaatag

SEQ ID NO: 55433 - DNA, 33 bp, Homo sapien
gtgtgattaggtctaccgggagaatttcaggca

SEQ ID NO: 55434 - DNA, 33 bp, Homo sapien
gtgtgattaggtctactgggagaatttcaggca

SEQ ID NO: 55435 - DNA, 33 bp, Homo sapien
gttagtgccttgagttcaacctgtggtaattat

SEQ ID NO: 55436 - DNA, 33 bp, Homo sapien
gttagtgccttgagttgaacctgtggtaattat

SEQ ID NO: 55437 - DNA, 33 bp, Homo sapien
ttcataccattctccccgactttactgcatcat

SEQ ID NO: 55438 - DNA, 33 bp, Homo sapien
ttcataccattctccctgactttactgcatcat

SEQ ID NO: 55439 - DNA, 33 bp, Homo sapien
agatgatgattgcaaaatcagaaggcctccttg

SEQ ID NO: 55440 - DNA, 33 bp, Homo sapien
agatgatgattgcaaagtcagaaggcctccttg

SEQ ID NO: 55441 - DNA, 33 bp, Homo sapien
gtcttggagacaaacacagaattaaatttaaac

SEQ ID NO: 55442 - DNA, 33 bp, Homo sapien
gtcttggagacaaacagagaattaaatttaaac

SEQ ID NO: 55443 - DNA, 33 bp, Homo sapien
cctagtgggttgccgacgctcttcctctcaggc

SEQ ID NO: 55444 - DNA, 33 bp, Homo sapien
cctagtgggttgccgatgctcttcctctcaggc

SEQ ID NO: 55445 - DNA, 33 bp, Homo sapien
cgagtgaatttctttaggcagaaaagacaaaag

SEQ ID NO: 55446 - DNA, 33 bp, Homo sapien
cgagtgaatttctttatgcagaaaagacaaaag

SEQ ID NO: 55447 - DNA, 33 bp, Homo sapien
gtacttatagagatggaacacccagagatgggc

SEQ ID NO: 55448 - DNA, 33 bp, Homo sapien
gtacttatagagatggcacacccagagatgggc

SEQ ID NO: 55449 - DNA, 33 bp, Homo sapien
tgttttgtcaaagcaaagagtctgaaggttaac

SEQ ID NO: 55450 - DNA, 33 bp, Homo sapien
tgttttgtcaaagcaaggagtctgaaggttaac

SEQ ID NO: 55451 - DNA, 33 bp, Homo sapien
ttctctttactcataaactccatatgtggcttg

SEQ ID NO: 55452 - DNA, 33 bp, Homo sapien
ttctctttactcataagctccatatgtggcttg

SEQ ID NO: 55453 - DNA, 33 bp, Homo sapien
attcagatgctcacaacgccctaaggtctcttg

SEQ ID NO: 55454 - DNA, 33 bp, Homo sapien
attcagatgctcacaatgccctaaggtctcttg

SEQ ID NO: 55455 - DNA, 33 bp, Homo sapien
tgattccactctcccaactaggagttagcctta

SEQ ID NO: 55456 - DNA, 33 bp, Homo sapien
tgattccactctcccatctaggagttagcctta

SEQ ID NO: 55457 - DNA, 33 bp, Homo sapien
tcagattttgtcaatgaaagatgggtcctggca

SEQ ID NO: 55458 - DNA, 33 bp, Homo sapien
tcagattttgtcaatgcaagatgggtcctggca

SEQ ID NO: 55459 - DNA, 33 bp, Homo sapien
tcaaactttaacatgcaaaacacaaaactgatg

SEQ ID NO: 55460 - DNA, 33 bp, Homo sapien
tcaaactttaacatgcgaaacacaaaactgatg

SEQ ID NO: 55461 - DNA, 33 bp, Homo sapien
atggagataagatctacggcctgatctccagtg

SEQ ID NO: 55462 - DNA, 33 bp, Homo sapien
atggagataagatctatggcctgatctccagtg

SEQ ID NO: 55463 - DNA, 33 bp, Homo sapien
tgaagagaggggtgccaagctcctgcaccacca

SEQ ID NO: 55464 - DNA, 33 bp, Homo sapien
tgaagagaggggtgcccagctcctgcaccacca

SEQ ID NO: 55465 - DNA, 33 bp, Homo sapien
cttcccttgagagtgccctgtgttgcaggcgaa

SEQ ID NO: 55466 - DNA, 33 bp, Homo sapien
cttcccttgagagtgctctgtgttgcaggcgaa

SEQ ID NO: 55467 - DNA, 33 bp, Homo sapien
actgccagacctaagaaaagaaatggacagcaa

SEQ ID NO: 55468 - DNA, 33 bp, Homo sapien
actgccagacctaagagaagaaatggacagcaa

SEQ ID NO: 55469 - DNA, 33 bp, Homo sapien
cctattgccttggtaagtcatttgggcaattgg

SEQ ID NO: 55470 - DNA, 33 bp, Homo sapien
cctattgccttggtaattcatttgggcaattgg

SEQ ID NO: 55471 - DNA, 33 bp, Homo sapien
gttttttaactacccaaataaaatggcccaagt

SEQ ID NO: 55472 - DNA, 33 bp, Homo sapien
gttttttaactacccagataaaatggcccaagt

SEQ ID NO: 55473 - DNA, 33 bp, Homo sapien
cccagttctccctatacctagcattagaaaagg

SEQ ID NO: 55474 - DNA, 33 bp, Homo sapien
cccagttctccctatatctagcattagaaaagg

SEQ ID NO: 55475 - DNA, 33 bp, Homo sapien
tccacttgaactgaaacagtttgctttaggggg

SEQ ID NO: 55476 - DNA, 33 bp, Homo sapien
tccacttgaactgaaatagtttgctttaggggg

SEQ ID NO: 55477 - DNA, 33 bp, Homo sapien
gaccagttttccaaaacagtaaatcatggaaga

SEQ ID NO: 55478 - DNA, 33 bp, Homo sapien
gaccagttttccaaaagagtaaatcatggaaga

SEQ ID NO: 55479 - DNA, 33 bp, Homo sapien
caaattaaagtttccaaagctcatggtctgggc

SEQ ID NO: 55480 - DNA, 33 bp, Homo sapien
caaattaaagtttccacagctcatggtctgggc

SEQ ID NO: 55481 - DNA, 33 bp, Homo sapien
gatcactgctctgtaactccactcttgtgccct

SEQ ID NO: 55482 - DNA, 33 bp, Homo sapien
gatcactgctctgtaattccactcttgtgccct

SEQ ID NO: 55483 - DNA, 33 bp, Homo sapien
tacaattaaaaaacaaagcatggctacattgga

SEQ ID NO: 55484 - DNA, 33 bp, Homo sapien
tacaattaaaaaacaaggcatggctacattgga

SEQ ID NO: 55485 - DNA, 33 bp, Homo sapien
gtgagcttcatgaacactcttatttatttgacg

SEQ ID NO: 55486 - DNA, 33 bp, Homo sapien
gtgagcttcatgaacattcttatttatttgacg

SEQ ID NO: 55487 - DNA, 33 bp, Homo sapien
aacagtcttgaattgcggacactaccccttccc

SEQ ID NO: 55488 - DNA, 33 bp, Homo sapien
aacagtcttgaattgctgacactaccccttccc

SEQ ID NO: 55489 - DNA, 33 bp, Homo sapien
ctgggaaagttaagacacatattcataaaataa

SEQ ID NO: 55490 - DNA, 33 bp, Homo sapien
ctgggaaagttaagacccatattcataaaataa

SEQ ID NO: 55491 - DNA, 33 bp, Homo sapien
ataatgagaatcaaaaagcacaaagagaagaac

SEQ ID NO: 55492 - DNA, 33 bp, Homo sapien
ataatgagaatcaaaaggcacaaagagaagaac

SEQ ID NO: 55493 - DNA, 33 bp, Homo sapien
gagataagaagcagtaaataaaaagcagccact

SEQ ID NO: 55494 - DNA, 33 bp, Homo sapien
gagataagaagcagtacataaaaagcagccact

SEQ ID NO: 55495 - DNA, 33 bp, Homo sapien
tccagtaactacaataacccaggtttctaacat

SEQ ID NO: 55496 - DNA, 33 bp, Homo sapien
tccagtaactacaataccccaggtttctaacat

SEQ ID NO: 55497 - DNA, 33 bp, Homo sapien
taatctctggtttgggcaacaagatggttatgc

SEQ ID NO: 55498 - DNA, 33 bp, Homo sapien
taatctctggtttgggtaacaagatggttatgc

SEQ ID NO: 55499 - DNA, 33 bp, Homo sapien
tggaggctgggaagtacaaaaacatggtacctg

SEQ ID NO: 55500 - DNA, 33 bp, Homo sapien
tggaggctgggaagtagaaaaacatggtacctg

SEQ ID NO: 55501 - DNA, 33 bp, Homo sapien
atagttgtgtactctacgctgtttcaaaattgt

SEQ ID NO: 55502 - DNA, 33 bp, Homo sapien
atagttgtgtactctatgctgtttcaaaattgt

SEQ ID NO: 55503 - DNA, 33 bp, Homo sapien
aaggagaaacttgtaacggccactgcaaaaaca

SEQ ID NO: 55504 - DNA, 33 bp, Homo sapien
aaggagaaacttgtaatggccactgcaaaaaca

SEQ ID NO: 55505 - DNA, 33 bp, Homo sapien
ccaaattcattacatacaaatcctgctttccac

SEQ ID NO: 55506 - DNA, 33 bp, Homo sapien
ccaaattcattacatagaaatcctgctttccac

SEQ ID NO: 55507 - DNA, 33 bp, Homo sapien
actttcccaggtacgcagaatgtagcaatgaat

SEQ ID NO: 55508 - DNA, 33 bp, Homo sapien
actttcccaggtacgcggaatgtagcaatgaat

SEQ ID NO: 55509 - DNA, 33 bp, Homo sapien
tgtgctcactgtcccgcaaagcttagcctagct

SEQ ID NO: 55510 - DNA, 33 bp, Homo sapien
tgtgctcactgtcccgtaaagcttagcctagct

SEQ ID NO: 55511 - DNA, 33 bp, Homo sapien
aaagatattttcacagaagtctactaaagacac

SEQ ID NO: 55512 - DNA, 33 bp, Homo sapien
aaagatattttcacaggagtctactaaagacac

SEQ ID NO: 55513 - DNA, 33 bp, Homo sapien
ttttgaatgttagtcaactttactctccttgtt

SEQ ID NO: 55514 - DNA, 33 bp, Homo sapien
ttttgaatgttagtcagctttactctccttgtt

SEQ ID NO: 55515 - DNA, 33 bp, Homo sapien
gaaacatttctatcaacgttcaagataattgtt

SEQ ID NO: 55516 - DNA, 33 bp, Homo sapien
gaaacatttctatcaaggttcaagataattgtt

SEQ ID NO: 55517 - DNA, 33 bp, Homo sapien
ctgaaggaagttggccacaccatttaatggaag

SEQ ID NO: 55518 - DNA, 33 bp, Homo sapien
ctgaaggaagttggccgcaccatttaatggaag

SEQ ID NO: 55519 - DNA, 33 bp, Homo sapien
atgaagtcagccctagaaagcacagcagagaca

SEQ ID NO: 55520 - DNA, 33 bp, Homo sapien
atgaagtcagccctagcaagcacagcagagaca

SEQ ID NO: 55521 - DNA, 33 bp, Homo sapien
ttcctaaagtgagagacgttcttagtacatacg

SEQ ID NO: 55522 - DNA, 33 bp, Homo sapien
ttcctaaagtgagagatgttcttagtacatacg

SEQ ID NO: 55523 - DNA, 33 bp, Homo sapien
tatcacagctgattcacatttggaacgtatgta

SEQ ID NO: 55524 - DNA, 33 bp, Homo sapien
tatcacagctgattcatatttggaacgtatgta

SEQ ID NO: 55525 - DNA, 33 bp, Homo sapien
aatatatgctggtcataagagtgagaaataaat

SEQ ID NO: 55526 - DNA, 33 bp, Homo sapien
aatatatgctggtcatgagagtgagaaataaat

SEQ ID NO: 55527 - DNA, 33 bp, Homo sapien
ggatcagttctgaagaccttatagggaaccagg

SEQ ID NO: 55528 - DNA, 33 bp, Homo sapien
ggatcagttctgaagagcttatagggaaccagg

SEQ ID NO: 55529 - DNA, 33 bp, Homo sapien
aatctaaacacttttaacattgcattcaagtcc

SEQ ID NO: 55530 - DNA, 33 bp, Homo sapien
aatctaaacacttttagcattgcattcaagtcc

SEQ ID NO: 55531 - DNA, 33 bp, Homo sapien
catatcagcaggctcgacccatcagtttctttc

SEQ ID NO: 55532 - DNA, 33 bp, Homo sapien
catatcagcaggctcggcccatcagtttctttc

SEQ ID NO: 55533 - DNA, 33 bp, Homo sapien
aggtcaatgcctatgagaaacaacttaaatagt

SEQ ID NO: 55534 - DNA, 33 bp, Homo sapien
aggtcaatgcctatgataaacaacttaaatagt

SEQ ID NO: 55535 - DNA, 33 bp, Homo sapien
taagaagttcacaagcaataatgcctagctata

SEQ ID NO: 55536 - DNA, 33 bp, Homo sapien
taagaagttcacaagcgataatgcctagctata

SEQ ID NO: 55537 - DNA, 33 bp, Homo sapien
gaattttaacccaaaccaccacttcattcaaga

SEQ ID NO: 55538 - DNA, 33 bp, Homo sapien
gaattttaacccaaactaccacttcattcaaga

SEQ ID NO: 55539 - DNA, 33 bp, Homo sapien
aagttaagcagtcaagaaaagactttatcaagg

SEQ ID NO: 55540 - DNA, 33 bp, Homo sapien
aagttaagcagtcaagcaaagactttatcaagg

SEQ ID NO: 55541 - DNA, 33 bp, Homo sapien
actaggatctcaatcactaacatcattcaagtg

SEQ ID NO: 55542 - DNA, 33 bp, Homo sapien
actaggatctcaatcattaacatcattcaagtg

SEQ ID NO: 55543 - DNA, 33 bp, Homo sapien
ttctcttggacaaagcaatgacaataggaggga

SEQ ID NO: 55544 - DNA, 33 bp, Homo sapien
ttctcttggacaaagcgatgacaataggaggga

SEQ ID NO: 55545 - DNA, 33 bp, Homo sapien
attgctctataaattccctccattaagtcaaac

SEQ ID NO: 55546 - DNA, 33 bp, Homo sapien
attgctctataaattctctccattaagtcaaac

SEQ ID NO: 55547 - DNA, 33 bp, Homo sapien
caattggctggaataaagcagaagtcaaaaggc

SEQ ID NO: 55548 - DNA, 33 bp, Homo sapien
caattggctggaataaggcagaagtcaaaaggc

SEQ ID NO: 55549 - DNA, 33 bp, Homo sapien
cagggatattggcgaaacttgcataagaatgga

SEQ ID NO: 55550 - DNA, 33 bp, Homo sapien
cagggatattggcgaaccttgcataagaatgga

SEQ ID NO: 55551 - DNA, 33 bp, Homo sapien
acaacacaacactgtcacaaggcccttcccttc

SEQ ID NO: 55552 - DNA, 33 bp, Homo sapien
acaacacaacactgtcgcaaggcccttcccttc

SEQ ID NO: 55553 - DNA, 33 bp, Homo sapien
tcttcagctttatcaaatctgctgttgaagttc

SEQ ID NO: 55554 - DNA, 33 bp, Homo sapien
tcttcagctttatcaagtctgctgttgaagttc

SEQ ID NO: 55555 - DNA, 33 bp, Homo sapien
ataaagtggcaaaaaacttaactgaattatgtc

SEQ ID NO: 55556 - DNA, 33 bp, Homo sapien
ataaagtggcaaaaaagttaactgaattatgtc

SEQ ID NO: 55557 - DNA, 33 bp, Homo sapien
gtcaacaaaatagaaacgacctcagaaaatctg

SEQ ID NO: 55558 - DNA, 33 bp, Homo sapien
gtcaacaaaatagaaaggacctcagaaaatctg

SEQ ID NO: 55559 - DNA, 33 bp, Homo sapien
gtagagagcacaaacaatgacttggtattttat

SEQ ID NO: 55560 - DNA, 33 bp, Homo sapien
gtagagagcacaaacactgacttggtattttat

SEQ ID NO: 55561 - DNA, 33 bp, Homo sapien
atgtctatcttcttaccggactaccaacctctt

SEQ ID NO: 55562 - DNA, 33 bp, Homo sapien
atgtctatcttcttactggactaccaacctctt

SEQ ID NO: 55563 - DNA, 33 bp, Homo sapien
atcataactaaaacaaatgcttcaatattgtag

SEQ ID NO: 55564 - DNA, 33 bp, Homo sapien
atcataactaaaacaattgcttcaatattgtag

SEQ ID NO: 55565 - DNA, 33 bp, Homo sapien
ttcaatgttgcattcacaaagcagtgactctta

SEQ ID NO: 55566 - DNA, 33 bp, Homo sapien
ttcaatgttgcattcataaagcagtgactctta

SEQ ID NO: 55567 - DNA, 33 bp, Homo sapien
ttctcccttagtctgccatgattatcccaggaa

SEQ ID NO: 55568 - DNA, 33 bp, Homo sapien
ttctcccttagtctgctatgattatcccaggaa

SEQ ID NO: 55569 - DNA, 33 bp, Homo sapien
gtagagctttgtgagaacttactgttggtgtgt

SEQ ID NO: 55570 - DNA, 33 bp, Homo sapien
gtagagctttgtgagaccttactgttggtgtgt

SEQ ID NO: 55571 - DNA, 33 bp, Homo sapien
gcagccttcaacataaactttatcagggcatgg

SEQ ID NO: 55572 - DNA, 33 bp, Homo sapien
gcagccttcaacataagctttatcagggcatgg

SEQ ID NO: 55573 - DNA, 33 bp, Homo sapien
attcaatatagtgttgaaagttctggcgagggc

SEQ ID NO: 55574 - DNA, 33 bp, Homo sapien
attcaatatagtgttggaagttctggcgagggc

SEQ ID NO: 55575 - DNA, 33 bp, Homo sapien
gaatcagaatttatccaaaggcagtgaaaatcc

SEQ ID NO: 55576 - DNA, 33 bp, Homo sapien
gaatcagaatttatccgaaggcagtgaaaatcc

SEQ ID NO: 55577 - DNA, 33 bp, Homo sapien
cccaggagccgtaggaagtcggctatggttccc

SEQ ID NO: 55578 - DNA, 33 bp, Homo sapien
cccaggagccgtaggaggtcggctatggttccc

SEQ ID NO: 55579 - DNA, 33 bp, Homo sapien
agttgtcctgccacacaagcagtaaatggcaga

SEQ ID NO: 55580 - DNA, 33 bp, Homo sapien
agttgtcctgccacacgagcagtaaatggcaga

SEQ ID NO: 55581 - DNA, 33 bp, Homo sapien
ggccaaggagcagttaccttttcactttcaaga

SEQ ID NO: 55582 - DNA, 33 bp, Homo sapien
ggccaaggagcagttatcttttcactttcaaga

SEQ ID NO: 55583 - DNA, 33 bp, Homo sapien
tgttattggagtcaacagttcctgaacttgata

SEQ ID NO: 55584 - DNA, 33 bp, Homo sapien
tgttattggagtcaacggttcctgaacttgata

SEQ ID NO: 55585 - DNA, 33 bp, Homo sapien
ctatccaatgaagctaagtgcttttttaaactt

SEQ ID NO: 55586 - DNA, 33 bp, Homo sapien
ctatccaatgaagctacgtgcttttttaaactt

SEQ ID NO: 55587 - DNA, 33 bp, Homo sapien
ctctcaccatgctagagattggaaatctgaaac

SEQ ID NO: 55588 - DNA, 33 bp, Homo sapien
ctctcaccatgctagatattggaaatctgaaac

SEQ ID NO: 55589 - DNA, 33 bp, Homo sapien
caaaattttgatcgagcatttcaaatggtagtt

SEQ ID NO: 55590 - DNA, 33 bp, Homo sapien
caaaattttgatcgaggatttcaaatggtagtt

SEQ ID NO: 55591 - DNA, 33 bp, Homo sapien
ttctgaccagactccaacattaactaactgtgt

SEQ ID NO: 55592 - DNA, 33 bp, Homo sapien
ttctgaccagactccagcattaactaactgtgt

SEQ ID NO: 55593 - DNA, 33 bp, Homo sapien
atattaatcctagtaacgtcagaggcttcatcg

SEQ ID NO: 55594 - DNA, 33 bp, Homo sapien
atattaatcctagtaaggtcagaggcttcatcg

SEQ ID NO: 55595 - DNA, 33 bp, Homo sapien
gtccacagaagtaaaaaaccctcctatgtgtga

SEQ ID NO: 55596 - DNA, 33 bp, Homo sapien
gtccacagaagtaaaacaccctcctatgtgtga

SEQ ID NO: 55597 - DNA, 33 bp, Homo sapien
gaagtcaaaactgcaaatcttggggtcataata

SEQ ID NO: 55598 - DNA, 33 bp, Homo sapien
gaagtcaaaactgcaagtcttggggtcataata

SEQ ID NO: 55599 - DNA, 33 bp, Homo sapien
cacaccagttcttcaaaaagagttcttaaccag

SEQ ID NO: 55600 - DNA, 33 bp, Homo sapien
cacaccagttcttcaacaagagttcttaaccag

SEQ ID NO: 55601 - DNA, 33 bp, Homo sapien
ggatagtaagcatctgaaaaacaatctgaagtc

SEQ ID NO: 55602 - DNA, 33 bp, Homo sapien
ggatagtaagcatctggaaaacaatctgaagtc

SEQ ID NO: 55603 - DNA, 33 bp, Homo sapien
gtaacattgtagtataacacattactcacctga

SEQ ID NO: 55604 - DNA, 33 bp, Homo sapien
gtaacattgtagtatagcacattactcacctga

SEQ ID NO: 55605 - DNA, 33 bp, Homo sapien
attgaggtaactaataacaatcaacactgtgaa

SEQ ID NO: 55606 - DNA, 33 bp, Homo sapien
attgaggtaactaatagcaatcaacactgtgaa

SEQ ID NO: 55607 - DNA, 33 bp, Homo sapien
agctgatatcccctgcgctatgttcctgtttct

SEQ ID NO: 55608 - DNA, 33 bp, Homo sapien
agctgatatcccctgctctatgttcctgtttct

SEQ ID NO: 55609 - DNA, 33 bp, Homo sapien
ctagccaccattaataacattagtaagaacagt

SEQ ID NO: 55610 - DNA, 33 bp, Homo sapien
ctagccaccattaatatcattagtaagaacagt

SEQ ID NO: 55611 - DNA, 33 bp, Homo sapien
agagtggttgaaatccgcagggactacttcttg

SEQ ID NO: 55612 - DNA, 33 bp, Homo sapien
agagtggttgaaatcctcagggactacttcttg

SEQ ID NO: 55613 - DNA, 33 bp, Homo sapien
tgttgtatcctctattgaaaatgtcagggaaac

SEQ ID NO: 55614 - DNA, 33 bp, Homo sapien
tgttgtatcctctatttaaaatgtcagggaaac

SEQ ID NO: 55615 - DNA, 33 bp, Homo sapien
atggacaagtacaaagcaggctccccatgcagg

SEQ ID NO: 55616 - DNA, 33 bp, Homo sapien
atggacaagtacaaagtaggctccccatgcagg

SEQ ID NO: 55617 - DNA, 33 bp, Homo sapien
caggacaaatgtcaaaggggtttaaggtcgaca

SEQ ID NO: 55618 - DNA, 33 bp, Homo sapien
caggacaaatgtcaaatgggtttaaggtcgaca

SEQ ID NO: 55619 - DNA, 33 bp, Homo sapien
agcactggataaccaaagagggtacggttcttc

SEQ ID NO: 55620 - DNA, 33 bp, Homo sapien
agcactggataaccaaggagggtacggttcttc

SEQ ID NO: 55621 - DNA, 33 bp, Homo sapien
taaagcacttattcatcaacttattcagcaatg

SEQ ID NO: 55622 - DNA, 33 bp, Homo sapien
taaagcacttattcattaacttattcagcaatg

SEQ ID NO: 55623 - DNA, 33 bp, Homo sapien
agtagcagtatgttaacggaagcatgttcatgg

SEQ ID NO: 55624 - DNA, 33 bp, Homo sapien
agtagcagtatgttaatggaagcatgttcatgg

SEQ ID NO: 55625 - DNA, 33 bp, Homo sapien
tcttagcatttacaaaactgtgtatcaattaat

SEQ ID NO: 55626 - DNA, 33 bp, Homo sapien
tcttagcatttacaaagctgtgtatcaattaat

SEQ ID NO: 55627 - DNA, 33 bp, Homo sapien
tgaaaggaaagctgacagccaaatggagcttgg

SEQ ID NO: 55628 - DNA, 33 bp, Homo sapien
tgaaaggaaagctgacggccaaatggagcttgg

SEQ ID NO: 55629 - DNA, 33 bp, Homo sapien
taggcagaaataggaaaggacatttcaatgact

SEQ ID NO: 55630 - DNA, 33 bp, Homo sapien
taggcagaaataggaatggacatttcaatgact

SEQ ID NO: 55631 - DNA, 33 bp, Homo sapien
acccgagagcagattaacacagggcaaggggag

SEQ ID NO: 55632 - DNA, 33 bp, Homo sapien
acccgagagcagattagcacagggcaaggggag

SEQ ID NO: 55633 - DNA, 33 bp, Homo sapien
taagccggatggctatgaagtgactaacaggcg

SEQ ID NO: 55634 - DNA, 33 bp, Homo sapien
taagccggatggctattaagtgactaacaggcg

SEQ ID NO: 55635 - DNA, 33 bp, Homo sapien
aggagcagatttggggaaaaacatttagaagtt

SEQ ID NO: 55636 - DNA, 33 bp, Homo sapien
aggagcagatttgggggaaaacatttagaagtt

SEQ ID NO: 55637 - DNA, 33 bp, Homo sapien
agtcttctttgtaacacccttgacaacatttag

SEQ ID NO: 55638 - DNA, 33 bp, Homo sapien
agtcttctttgtaacatccttgacaacatttag

SEQ ID NO: 55639 - DNA, 33 bp, Homo sapien
ttgtaaattgagaagcaaattctaaaatgtata

SEQ ID NO: 55640 - DNA, 33 bp, Homo sapien
ttgtaaattgagaagcgaattctaaaatgtata

SEQ ID NO: 55641 - DNA, 33 bp, Homo sapien
gctttatatggctttacatgggatgatgcataa

SEQ ID NO: 55642 - DNA, 33 bp, Homo sapien
gctttatatggctttatatgggatgatgcataa

SEQ ID NO: 55643 - DNA, 33 bp, Homo sapien
cccagataacatggaaaagggatgagctgccct

SEQ ID NO: 55644 - DNA, 33 bp, Homo sapien
cccagataacatggaacagggatgagctgccct

SEQ ID NO: 55645 - DNA, 33 bp, Homo sapien
catcactcaatggagaaatatcaatgtcacatg

SEQ ID NO: 55646 - DNA, 33 bp, Homo sapien
catcactcaatggagagatatcaatgtcacatg

SEQ ID NO: 55647 - DNA, 33 bp, Homo sapien
acctaaaaccatgaaactactggaaaaaacaag

SEQ ID NO: 55648 - DNA, 33 bp, Homo sapien
acctaaaaccatgaaagtactggaaaaaacaag

SEQ ID NO: 55649 - DNA, 33 bp, Homo sapien
gtaaatgacacaacacaaacaaccagtaaagaa

SEQ ID NO: 55650 - DNA, 33 bp, Homo sapien
gtaaatgacacaacacgaacaaccagtaaagaa

SEQ ID NO: 55651 - DNA, 33 bp, Homo sapien
accctgtgtcaagtcacattgaaacatacagtt

SEQ ID NO: 55652 - DNA, 33 bp, Homo sapien
accctgtgtcaagtcatattgaaacatacagtt

SEQ ID NO: 55653 - DNA, 33 bp, Homo sapien
caacaacataatccacacgggactactaatgac

SEQ ID NO: 55654 - DNA, 33 bp, Homo sapien
caacaacataatccacgcgggactactaatgac

SEQ ID NO: 55655 - DNA, 33 bp, Homo sapien
tgagccagatcttgaacaatcagttgagttagg

SEQ ID NO: 55656 - DNA, 33 bp, Homo sapien
tgagccagatcttgaagaatcagttgagttagg

SEQ ID NO: 55657 - DNA, 33 bp, Homo sapien
taaccctttttcataccctcatggcattctaaa

SEQ ID NO: 55658 - DNA, 33 bp, Homo sapien
taaccctttttcatactctcatggcattctaaa

SEQ ID NO: 55659 - DNA, 33 bp, Homo sapien
agaccaagttcattacaagaggacaagagggaa

SEQ ID NO: 55660 - DNA, 33 bp, Homo sapien
agaccaagttcattacgagaggacaagagggaa

SEQ ID NO: 55661 - DNA, 33 bp, Homo sapien
gaggaagactcggtgcaatcccactggtacctg

SEQ ID NO: 55662 - DNA, 33 bp, Homo sapien
gaggaagactcggtgcgatcccactggtacctg

SEQ ID NO: 55663 - DNA, 33 bp, Homo sapien
ttgcatgttccctacccggaagctgaagttaca

SEQ ID NO: 55664 - DNA, 33 bp, Homo sapien
ttgcatgttccctacctggaagctgaagttaca

SEQ ID NO: 55665 - DNA, 33 bp, Homo sapien
ttctgggtgggcaggagattatattacatttcc

SEQ ID NO: 55666 - DNA, 33 bp, Homo sapien
ttctgggtgggcaggatattatattacatttcc

SEQ ID NO: 55667 - DNA, 33 bp, Homo sapien
ttatgtagccttcacacagaggaacttgatgca

SEQ ID NO: 55668 - DNA, 33 bp, Homo sapien
ttatgtagccttcacatagaggaacttgatgca

SEQ ID NO: 55669 - DNA, 33 bp, Homo sapien
accaccaaaatagtaacagcttaacagaacaaa

SEQ ID NO: 55670 - DNA, 33 bp, Homo sapien
accaccaaaatagtaagagcttaacagaacaaa

SEQ ID NO: 55671 - DNA, 33 bp, Homo sapien
ccatagcttctttcacaatccaagctatatgtc

SEQ ID NO: 55672 - DNA, 33 bp, Homo sapien
ccatagcttctttcacgatccaagctatatgtc

SEQ ID NO: 55673 - DNA, 33 bp, Homo sapien
tgagtctagcaatcaacagtataatttgttgct

SEQ ID NO: 55674 - DNA, 33 bp, Homo sapien
tgagtctagcaatcaatagtataatttgttgct

SEQ ID NO: 55675 - DNA, 33 bp, Homo sapien
agagaaataataggccaaatgggtccccagcta

SEQ ID NO: 55676 - DNA, 33 bp, Homo sapien
agagaaataataggccgaatgggtccccagcta

SEQ ID NO: 55677 - DNA, 33 bp, Homo sapien
agttcctgttgtgctaactccataccagccttt

SEQ ID NO: 55678 - DNA, 33 bp, Homo sapien
agttcctgttgtgctatctccataccagccttt

SEQ ID NO: 55679 - DNA, 33 bp, Homo sapien
ccatattgtagcttagcagacttttgaaagatg

SEQ ID NO: 55680 - DNA, 33 bp, Homo sapien
ccatattgtagcttagtagacttttgaaagatg

SEQ ID NO: 55681 - DNA, 33 bp, Homo sapien
gccttatggaatgagaactgtcaggaccaaagt

SEQ ID NO: 55682 - DNA, 33 bp, Homo sapien
gccttatggaatgagagctgtcaggaccaaagt

SEQ ID NO: 55683 - DNA, 33 bp, Homo sapien
attctgctctggtccaaatttgtagatccactc

SEQ ID NO: 55684 - DNA, 33 bp, Homo sapien
attctgctctggtccatatttgtagatccactc

SEQ ID NO: 55685 - DNA, 33 bp, Homo sapien
gaagttgtcattaataactccctcctctgacag

SEQ ID NO: 55686 - DNA, 33 bp, Homo sapien
gaagttgtcattaatacctccctcctctgacag

SEQ ID NO: 55687 - DNA, 33 bp, Homo sapien
agagaccaaagagtaccgaacactgttttctta

SEQ ID NO: 55688 - DNA, 33 bp, Homo sapien
agagaccaaagagtactgaacactgttttctta

SEQ ID NO: 55689 - DNA, 33 bp, Homo sapien
catcactattataccactaactgttcaagggga

SEQ ID NO: 55690 - DNA, 33 bp, Homo sapien
catcactattataccattaactgttcaagggga

SEQ ID NO: 55691 - DNA, 33 bp, Homo sapien
tttgcaacaacatagacggaagtgaaataagcc

SEQ ID NO: 55692 - DNA, 33 bp, Homo sapien
tttgcaacaacatagatggaagtgaaataagcc

SEQ ID NO: 55693 - DNA, 33 bp, Homo sapien
tcttgtgggctcctccagaatattgccatgcag

SEQ ID NO: 55694 - DNA, 33 bp, Homo sapien
tcttgtgggctcctccggaatattgccatgcag

SEQ ID NO: 55695 - DNA, 33 bp, Homo sapien
tcagattctggaaagacacactgtggttttggg

SEQ ID NO: 55696 - DNA, 33 bp, Homo sapien
tcagattctggaaagagacactgtggttttggg

SEQ ID NO: 55697 - DNA, 33 bp, Homo sapien
ttttcaaatgttccaacaaggtgcatatacact

SEQ ID NO: 55698 - DNA, 33 bp, Homo sapien
ttttcaaatgttccaataaggtgcatatacact

SEQ ID NO: 55699 - DNA, 33 bp, Homo sapien
tctggtagtagcatacacaaaatctctctggaa

SEQ ID NO: 55700 - DNA, 33 bp, Homo sapien
tctggtagtagcatacgcaaaatctctctggaa

SEQ ID NO: 55701 - DNA, 33 bp, Homo sapien
gaaattgacaatcacaataaagtatctggaaat

SEQ ID NO: 55702 - DNA, 33 bp, Homo sapien
gaaattgacaatcacagtaaagtatctggaaat

SEQ ID NO: 55703 - DNA, 33 bp, Homo sapien
cctgtgtattatgcagaatcatctgtaaacagt

SEQ ID NO: 55704 - DNA, 33 bp, Homo sapien
cctgtgtattatgcaggatcatctgtaaacagt

SEQ ID NO: 55705 - DNA, 33 bp, Homo sapien
gtcctctgttccctgcacttacataaagcatgg

SEQ ID NO: 55706 - DNA, 33 bp, Homo sapien
gtcctctgttccctgcgcttacataaagcatgg

SEQ ID NO: 55707 - DNA, 33 bp, Homo sapien
ataagatatataaggacaggctcattgcagagc

SEQ ID NO: 55708 - DNA, 33 bp, Homo sapien
ataagatatataaggataggctcattgcagagc

SEQ ID NO: 55709 - DNA, 33 bp, Homo sapien
atggctaatcctgggaaacataaaactaagtta

SEQ ID NO: 55710 - DNA, 33 bp, Homo sapien
atggctaatcctgggacacataaaactaagtta

SEQ ID NO: 55711 - DNA, 33 bp, Homo sapien
tctactaaaatgtgaaagtcatggaatcaagga

SEQ ID NO: 55712 - DNA, 33 bp, Homo sapien
tctactaaaatgtgaaggtcatggaatcaagga

SEQ ID NO: 55713 - DNA, 33 bp, Homo sapien
acagctttaaaccccaactttccagcactgacc

SEQ ID NO: 55714 - DNA, 33 bp, Homo sapien
acagctttaaaccccagctttccagcactgacc

SEQ ID NO: 55715 - DNA, 33 bp, Homo sapien
gacttgctttaagccacgctgctgcctactcag

SEQ ID NO: 55716 - DNA, 33 bp, Homo sapien
gacttgctttaagccatgctgctgcctactcag

SEQ ID NO: 55717 - DNA, 33 bp, Homo sapien
cagcctcacttaggcacattgcagttaaagaat

SEQ ID NO: 55718 - DNA, 33 bp, Homo sapien
cagcctcacttaggcatattgcagttaaagaat

SEQ ID NO: 55719 - DNA, 33 bp, Homo sapien
ttacagtcactacttacagttatgtgttgacta

SEQ ID NO: 55720 - DNA, 33 bp, Homo sapien
ttacagtcactacttatagttatgtgttgacta

SEQ ID NO: 55721 - DNA, 33 bp, Homo sapien
agctggcagatgagaagaattccctagacaaca

SEQ ID NO: 55722 - DNA, 33 bp, Homo sapien
agctggcagatgagaataattccctagacaaca

SEQ ID NO: 55723 - DNA, 33 bp, Homo sapien
ttattattaacacctacagacattaccaatggc

SEQ ID NO: 55724 - DNA, 33 bp, Homo sapien
ttattattaacacctagagacattaccaatggc

SEQ ID NO: 55725 - DNA, 33 bp, Homo sapien
ccactgcttggaatgcaccatcttctcagcctc

SEQ ID NO: 55726 - DNA, 33 bp, Homo sapien
ccactgcttggaatgcgccatcttctcagcctc

SEQ ID NO: 55727 - DNA, 33 bp, Homo sapien
gaggtgaggaaatacaagaaagaggggggccag

SEQ ID NO: 55728 - DNA, 33 bp, Homo sapien
gaggtgaggaaatacaggaaagaggggggccag

SEQ ID NO: 55729 - DNA, 33 bp, Homo sapien
acctaacagatgctacaagaattctggttactt

SEQ ID NO: 55730 - DNA, 33 bp, Homo sapien
acctaacagatgctacgagaattctggttactt

SEQ ID NO: 55731 - DNA, 33 bp, Homo sapien
cccaccatgtggcaaacaaatgaggcttcagag

SEQ ID NO: 55732 - DNA, 33 bp, Homo sapien
cccaccatgtggcaaataaatgaggcttcagag

SEQ ID NO: 55733 - DNA, 33 bp, Homo sapien
agctctgtatgccaacagccagaagctgtcatg

SEQ ID NO: 55734 - DNA, 33 bp, Homo sapien
agctctgtatgccaacggccagaagctgtcatg

SEQ ID NO: 55735 - DNA, 33 bp, Homo sapien
ttacttaataaataccaacagccatgaataaaa

SEQ ID NO: 55736 - DNA, 33 bp, Homo sapien
ttacttaataaataccgacagccatgaataaaa

SEQ ID NO: 55737 - DNA, 33 bp, Homo sapien
aaatggaatgacaaatcagcaaatataggaaaa

SEQ ID NO: 55738 - DNA, 33 bp, Homo sapien
aaatggaatgacaaatgagcaaatataggaaaa

SEQ ID NO: 55739 - DNA, 33 bp, Homo sapien
gtacagcttctggcaccgtaaattctaatgagt

SEQ ID NO: 55740 - DNA, 33 bp, Homo sapien
gtacagcttctggcactgtaaattctaatgagt

SEQ ID NO: 55741 - DNA, 33 bp, Homo sapien
tctttatggactcacaatggaaaaagaactcct

SEQ ID NO: 55742 - DNA, 33 bp, Homo sapien
tctttatggactcacagtggaaaaagaactcct

SEQ ID NO: 55743 - DNA, 33 bp, Homo sapien
aggacaaatcagaaaggccaagaatgtctcaga

SEQ ID NO: 55744 - DNA, 33 bp, Homo sapien
aggacaaatcagaaagtccaagaatgtctcaga

SEQ ID NO: 55745 - DNA, 33 bp, Homo sapien
gatactacattaattcaatgagagtagtctatc

SEQ ID NO: 55746 - DNA, 33 bp, Homo sapien
gatactacattaattccatgagagtagtctatc

SEQ ID NO: 55747 - DNA, 33 bp, Homo sapien
aagttagagttacaaacctagagtgtgtcctca

SEQ ID NO: 55748 - DNA, 33 bp, Homo sapien
aagttagagttacaaagctagagtgtgtcctca

SEQ ID NO: 55749 - DNA, 33 bp, Homo sapien
ggagagcagcttctgcaatgcactctgttgctg

SEQ ID NO: 55750 - DNA, 33 bp, Homo sapien
ggagagcagcttctgcgatgcactctgttgctg

SEQ ID NO: 55751 - DNA, 33 bp, Homo sapien
tgaacctagaggagaaaagtcaaaattagtcaa

SEQ ID NO: 55752 - DNA, 33 bp, Homo sapien
tgaacctagaggagaagagtcaaaattagtcaa

SEQ ID NO: 55753 - DNA, 33 bp, Homo sapien
tacttttactcctacactgatgctcaagggctc

SEQ ID NO: 55754 - DNA, 33 bp, Homo sapien
tacttttactcctacattgatgctcaagggctc

SEQ ID NO: 55755 - DNA, 33 bp, Homo sapien
aaggacttctgttcaacagccgtaaagaataac

SEQ ID NO: 55756 - DNA, 33 bp, Homo sapien
aaggacttctgttcaatagccgtaaagaataac

SEQ ID NO: 55757 - DNA, 33 bp, Homo sapien
cgataacattgcatcaatattgggaaggtgcca

SEQ ID NO: 55758 - DNA, 33 bp, Homo sapien
cgataacattgcatcagtattgggaaggtgcca

SEQ ID NO: 55759 - DNA, 33 bp, Homo sapien
attaatgttcaatccaataaaggtagatatctt

SEQ ID NO: 55760 - DNA, 33 bp, Homo sapien
attaatgttcaatccagtaaaggtagatatctt

SEQ ID NO: 55761 - DNA, 33 bp, Homo sapien
agagacataatttttacaccaatagaacatgcc

SEQ ID NO: 55762 - DNA, 33 bp, Homo sapien
agagacataatttttataccaatagaacatgcc

SEQ ID NO: 55763 - DNA, 33 bp, Homo sapien
cctgttttatcatataagcatctaacttttccc

SEQ ID NO: 55764 - DNA, 33 bp, Homo sapien
cctgttttatcatatatgcatctaacttttccc

SEQ ID NO: 55765 - DNA, 33 bp, Homo sapien
ttcaactgagttttaaagagaagtacaattatc

SEQ ID NO: 55766 - DNA, 33 bp, Homo sapien
ttcaactgagttttaaggagaagtacaattatc

SEQ ID NO: 55767 - DNA, 33 bp, Homo sapien
ctttagtcccagctacactcatgattttaacac

SEQ ID NO: 55768 - DNA, 33 bp, Homo sapien
ctttagtcccagctacgctcatgattttaacac

SEQ ID NO: 55769 - DNA, 33 bp, Homo sapien
cagctgccaaacctgcaagtgaggacatcctgg

SEQ ID NO: 55770 - DNA, 33 bp, Homo sapien
cagctgccaaacctgcgagtgaggacatcctgg

SEQ ID NO: 55771 - DNA, 33 bp, Homo sapien
ggggtggggcaatagactcaacctcttaatagt

SEQ ID NO: 55772 - DNA, 33 bp, Homo sapien
ggggtggggcaatagattcaacctcttaatagt

SEQ ID NO: 55773 - DNA, 33 bp, Homo sapien
aaatgtatataaaatacgaattgtgcccagaat

SEQ ID NO: 55774 - DNA, 33 bp, Homo sapien
aaatgtatataaaatatgaattgtgcccagaat

SEQ ID NO: 55775 - DNA, 33 bp, Homo sapien
tccaggattatcttaaacactgggagtatattc

SEQ ID NO: 55776 - DNA, 33 bp, Homo sapien
tccaggattatcttaaccactgggagtatattc

SEQ ID NO: 55777 - DNA, 33 bp, Homo sapien
ggaataccatgtggtacacatttaacaggtgct

SEQ ID NO: 55778 - DNA, 33 bp, Homo sapien
ggaataccatgtggtatacatttaacaggtgct

SEQ ID NO: 55779 - DNA, 33 bp, Homo sapien
gtaaatctagcacagaacaggctttgcacagaa

SEQ ID NO: 55780 - DNA, 33 bp, Homo sapien
gtaaatctagcacagagcaggctttgcacagaa

SEQ ID NO: 55781 - DNA, 33 bp, Homo sapien
tgagggcatagatacccgatttagcatgatgtc

SEQ ID NO: 55782 - DNA, 33 bp, Homo sapien
tgagggcatagatacctgatttagcatgatgtc

SEQ ID NO: 55783 - DNA, 33 bp, Homo sapien
agcccagagaatgtaaaaacctgcctagagtca

SEQ ID NO: 55784 - DNA, 33 bp, Homo sapien
agcccagagaatgtaagaacctgcctagagtca

SEQ ID NO: 55785 - DNA, 33 bp, Homo sapien
caggaaatagttttaaaatgctcttcaggtagt

SEQ ID NO: 55786 - DNA, 33 bp, Homo sapien
caggaaatagttttaacatgctcttcaggtagt

SEQ ID NO: 55787 - DNA, 33 bp, Homo sapien
gagtaatatttcattgaaagatgttccacgatt

SEQ ID NO: 55788 - DNA, 33 bp, Homo sapien
gagtaatatttcattgtaagatgttccacgatt

SEQ ID NO: 55789 - DNA, 33 bp, Homo sapien
aatgtagcttagtcaaatatagatatcacaaaa

SEQ ID NO: 55790 - DNA, 33 bp, Homo sapien
aatgtagcttagtcaattatagatatcacaaaa

SEQ ID NO: 55791 - DNA, 33 bp, Homo sapien
aatgtgtttccttcaagttccttgtttctatca

SEQ ID NO: 55792 - DNA, 33 bp, Homo sapien
aatgtgtttccttcaatttccttgtttctatca

SEQ ID NO: 55793 - DNA, 33 bp, Homo sapien
aattctttaaaatcacaggtccagttgcgttca

SEQ ID NO: 55794 - DNA, 33 bp, Homo sapien
aattctttaaaatcacgggtccagttgcgttca

SEQ ID NO: 55795 - DNA, 33 bp, Homo sapien
tgcaaaggcgatttcacggatacacataggtac

SEQ ID NO: 55796 - DNA, 33 bp, Homo sapien
tgcaaaggcgatttcatggatacacataggtac

SEQ ID NO: 55797 - DNA, 33 bp, Homo sapien
gtcatttataacactacctcttcctcactccat

SEQ ID NO: 55798 - DNA, 33 bp, Homo sapien
gtcatttataacactatctcttcctcactccat

SEQ ID NO: 55799 - DNA, 33 bp, Homo sapien
ttttctgagtttgacactgattttttagttcat

SEQ ID NO: 55800 - DNA, 33 bp, Homo sapien
ttttctgagtttgacattgattttttagttcat

SEQ ID NO: 55801 - DNA, 33 bp, Homo sapien
aagccctggtttcagccctgcaaaatacaatat

SEQ ID NO: 55802 - DNA, 33 bp, Homo sapien
aagccctggtttcagctctgcaaaatacaatat

SEQ ID NO: 55803 - DNA, 33 bp, Homo sapien
ggggaaaaatggttaaaaatcccagatgatttc

SEQ ID NO: 55804 - DNA, 33 bp, Homo sapien
ggggaaaaatggttaacaatcccagatgatttc

SEQ ID NO: 55805 - DNA, 33 bp, Homo sapien
actacctcctattgccacaagaacgaccactaa

SEQ ID NO: 55806 - DNA, 33 bp, Homo sapien
actacctcctattgccgcaagaacgaccactaa

SEQ ID NO: 55807 - DNA, 33 bp, Homo sapien
tttttctcattcaacacctttaatatctatttt

SEQ ID NO: 55808 - DNA, 33 bp, Homo sapien
tttttctcattcaacagctttaatatctatttt

SEQ ID NO: 55809 - DNA, 33 bp, Homo sapien
ttatctcataatcctacgtgaattggtatcatt

SEQ ID NO: 55810 - DNA, 33 bp, Homo sapien
ttatctcataatcctatgtgaattggtatcatt

SEQ ID NO: 55811 - DNA, 33 bp, Homo sapien
aagttctgatgccaaacgtgaatatgatgctct

SEQ ID NO: 55812 - DNA, 33 bp, Homo sapien
aagttctgatgccaaatgtgaatatgatgctct

SEQ ID NO: 55813 - DNA, 33 bp, Homo sapien
gccggtgcctcaacaaatggaaatacaatccaa

SEQ ID NO: 55814 - DNA, 33 bp, Homo sapien
gccggtgcctcaacaagtggaaatacaatccaa

SEQ ID NO: 55815 - DNA, 33 bp, Homo sapien
ttgttcctcaaccccaagacctaagagaatagc

SEQ ID NO: 55816 - DNA, 33 bp, Homo sapien
ttgttcctcaaccccatgacctaagagaatagc

SEQ ID NO: 55817 - DNA, 33 bp, Homo sapien
tgcccttattccttgcaaatggagcagagtcta

SEQ ID NO: 55818 - DNA, 33 bp, Homo sapien
tgcccttattccttgccaatggagcagagtcta

SEQ ID NO: 55819 - DNA, 33 bp, Homo sapien
tggttagtcttgcaatcagacctttttccccct

SEQ ID NO: 55820 - DNA, 33 bp, Homo sapien
tggttagtcttgcaatgagacctttttccccct

SEQ ID NO: 55821 - DNA, 33 bp, Homo sapien
gacataaagaggtagcactgatcgttatgaaat

SEQ ID NO: 55822 - DNA, 33 bp, Homo sapien
gacataaagaggtagcgctgatcgttatgaaat

SEQ ID NO: 55823 - DNA, 33 bp, Homo sapien
ctgtcaagaatctgtcgaatccagttccaagat

SEQ ID NO: 55824 - DNA, 33 bp, Homo sapien
ctgtcaagaatctgtctaatccagttccaagat

SEQ ID NO: 55825 - DNA, 33 bp, Homo sapien
tgtaatggtctgaagacagagatttaggagtca

SEQ ID NO: 55826 - DNA, 33 bp, Homo sapien
tgtaatggtctgaagatagagatttaggagtca

SEQ ID NO: 55827 - DNA, 33 bp, Homo sapien
gcttactaagactgaacagttcctataaccagt

SEQ ID NO: 55828 - DNA, 33 bp, Homo sapien
gcttactaagactgaagagttcctataaccagt

SEQ ID NO: 55829 - DNA, 33 bp, Homo sapien
aagagggagttcactcaaagttctcacataggg

SEQ ID NO: 55830 - DNA, 33 bp, Homo sapien
aagagggagttcactcgaagttctcacataggg

SEQ ID NO: 55831 - DNA, 33 bp, Homo sapien
gcaggataaatgttcaacatgaatgtctacaac

SEQ ID NO: 55832 - DNA, 33 bp, Homo sapien
gcaggataaatgttcaccatgaatgtctacaac

SEQ ID NO: 55833 - DNA, 33 bp, Homo sapien
acaaaagttactcacaagatcactaaatccagt

SEQ ID NO: 55834 - DNA, 33 bp, Homo sapien
acaaaagttactcacatgatcactaaatccagt

SEQ ID NO: 55835 - DNA, 33 bp, Homo sapien
ttttaaaacagctaaaactgacttaaccaataa

SEQ ID NO: 55836 - DNA, 33 bp, Homo sapien
ttttaaaacagctaaacctgacttaaccaataa

SEQ ID NO: 55837 - DNA, 33 bp, Homo sapien
ctttaagctcaaaaccaattagcacaggggcct

SEQ ID NO: 55838 - DNA, 33 bp, Homo sapien
ctttaagctcaaaaccgattagcacaggggcct

SEQ ID NO: 55839 - DNA, 33 bp, Homo sapien
aaaaaaaaatacttggaactgctatacctttgc

SEQ ID NO: 55840 - DNA, 33 bp, Homo sapien
aaaaaaaaatacttgggactgctatacctttgc

SEQ ID NO: 55841 - DNA, 33 bp, Homo sapien
ataaaaacgttaccagaagctggaatacaaatg

SEQ ID NO: 55842 - DNA, 33 bp, Homo sapien
ataaaaacgttaccaggagctggaatacaaatg

SEQ ID NO: 55843 - DNA, 33 bp, Homo sapien
ggccctgcatgcgcaactggtttagatggctca

SEQ ID NO: 55844 - DNA, 33 bp, Homo sapien
ggccctgcatgcgcaattggtttagatggctca

SEQ ID NO: 55845 - DNA, 33 bp, Homo sapien
gaaaaatatccataacacttttcttcagaatta

SEQ ID NO: 55846 - DNA, 33 bp, Homo sapien
gaaaaatatccataacgcttttcttcagaatta

SEQ ID NO: 55847 - DNA, 33 bp, Homo sapien
ctattttctttgcaaccctccttagcaactagt

SEQ ID NO: 55848 - DNA, 33 bp, Homo sapien
ctattttctttgcaactctccttagcaactagt

SEQ ID NO: 55849 - DNA, 33 bp, Homo sapien
aaagtcaagggttgaacactaagactgaggttt

SEQ ID NO: 55850 - DNA, 33 bp, Homo sapien
aaagtcaagggttgaatactaagactgaggttt

SEQ ID NO: 55851 - DNA, 33 bp, Homo sapien
tatatgtttaacaaagaataaagtaccaatgca

SEQ ID NO: 55852 - DNA, 33 bp, Homo sapien
tatatgtttaacaaaggataaagtaccaatgca

SEQ ID NO: 55853 - DNA, 33 bp, Homo sapien
gtacctttttagtggcagatcaaacagaaaatt

SEQ ID NO: 55854 - DNA, 33 bp, Homo sapien
gtacctttttagtggcggatcaaacagaaaatt

SEQ ID NO: 55855 - DNA, 33 bp, Homo sapien
cactttccagtgaaataagcctggattgtattt

SEQ ID NO: 55856 - DNA, 33 bp, Homo sapien
cactttccagtgaaatgagcctggattgtattt

SEQ ID NO: 55857 - DNA, 33 bp, Homo sapien
aaaatcttaggaatgactaagtaaccaaacctg

SEQ ID NO: 55858 - DNA, 33 bp, Homo sapien
aaaatcttaggaatgagtaagtaaccaaacctg

SEQ ID NO: 55859 - DNA, 33 bp, Homo sapien
cctccgctttagttagacaacagcatgataagg

SEQ ID NO: 55860 - DNA, 33 bp, Homo sapien
cctccgctttagttaggcaacagcatgataagg

SEQ ID NO: 55861 - DNA, 33 bp, Homo sapien
tttctagatcctcttaccataactctttttgtg

SEQ ID NO: 55862 - DNA, 33 bp, Homo sapien
tttctagatcctcttatcataactctttttgtg

SEQ ID NO: 55863 - DNA, 33 bp, Homo sapien
ctcctccctgtgacaacgactcaggtcacctgg

SEQ ID NO: 55864 - DNA, 33 bp, Homo sapien
ctcctccctgtgacaatgactcaggtcacctgg

SEQ ID NO: 55865 - DNA, 33 bp, Homo sapien
acgagtttaaataaggaatcctaaatctgacac

SEQ ID NO: 55866 - DNA, 33 bp, Homo sapien
acgagtttaaataaggcatcctaaatctgacac

SEQ ID NO: 55867 - DNA, 33 bp, Homo sapien
gaagccaagatgctaaaaaaggggtcactaata

SEQ ID NO: 55868 - DNA, 33 bp, Homo sapien
gaagccaagatgctaagaaaggggtcactaata

SEQ ID NO: 55869 - DNA, 33 bp, Homo sapien
ctcaattcaaagtgtacagtgggtcaaggctta

SEQ ID NO: 55870 - DNA, 33 bp, Homo sapien
ctcaattcaaagtgtatagtgggtcaaggctta

SEQ ID NO: 55871 - DNA, 33 bp, Homo sapien
tatgcaaaagaaagagcattctagagaaggaac

SEQ ID NO: 55872 - DNA, 33 bp, Homo sapien
tatgcaaaagaaagaggattctagagaaggaac

SEQ ID NO: 55873 - DNA, 33 bp, Homo sapien
tccccctactctcaacaaaagaaaagcattccc

SEQ ID NO: 55874 - DNA, 33 bp, Homo sapien
tccccctactctcaacgaaagaaaagcattccc

SEQ ID NO: 55875 - DNA, 33 bp, Homo sapien
cccaactaattgtagacctgagaagccattaaa

SEQ ID NO: 55876 - DNA, 33 bp, Homo sapien
cccaactaattgtagatctgagaagccattaaa

SEQ ID NO: 55877 - DNA, 33 bp, Homo sapien
agaaagttggcttcaacccacagatgggaattc

SEQ ID NO: 55878 - DNA, 33 bp, Homo sapien
agaaagttggcttcaatccacagatgggaattc

SEQ ID NO: 55879 - DNA, 33 bp, Homo sapien
ccccagaggtgctgcaagagtggctggatgaat

SEQ ID NO: 55880 - DNA, 33 bp, Homo sapien
ccccagaggtgctgcaggagtggctggatgaat

SEQ ID NO: 55881 - DNA, 33 bp, Homo sapien
gtcactacaatccaagaatggatacctttgatt

SEQ ID NO: 55882 - DNA, 33 bp, Homo sapien
gtcactacaatccaagcatggatacctttgatt

SEQ ID NO: 55883 - DNA, 33 bp, Homo sapien
ctctggagaaaagagaaattcagcaccaagctt

SEQ ID NO: 55884 - DNA, 33 bp, Homo sapien
ctctggagaaaagagagattcagcaccaagctt

SEQ ID NO: 55885 - DNA, 33 bp, Homo sapien
aaagcagggtgagactaaatctctctggagaaa

SEQ ID NO: 55886 - DNA, 33 bp, Homo sapien
aaagcagggtgagactgaatctctctggagaaa

SEQ ID NO: 55887 - DNA, 33 bp, Homo sapien
agagcacttgaaatgacgtcttccaaacaggtc

SEQ ID NO: 55888 - DNA, 33 bp, Homo sapien
agagcacttgaaatgatgtcttccaaacaggtc

SEQ ID NO: 55889 - DNA, 33 bp, Homo sapien
tgtgttacaaaaagcacagcatactataaacac

SEQ ID NO: 55890 - DNA, 33 bp, Homo sapien
tgtgttacaaaaagcatagcatactataaacac

SEQ ID NO: 55891 - DNA, 33 bp, Homo sapien
tgacaggggagaaaagaagaacgggtctgcagg

SEQ ID NO: 55892 - DNA, 33 bp, Homo sapien
tgacaggggagaaaaggagaacgggtctgcagg

SEQ ID NO: 55893 - DNA, 33 bp, Homo sapien
gtgttttgtcaagttccagaattaaagttcatt

SEQ ID NO: 55894 - DNA, 33 bp, Homo sapien
gtgttttgtcaagttcgagaattaaagttcatt

SEQ ID NO: 55895 - DNA, 33 bp, Homo sapien
aaatagactgacggaaaagaatagggtcaggaa

SEQ ID NO: 55896 - DNA, 33 bp, Homo sapien
aaatagactgacggaagagaatagggtcaggaa

SEQ ID NO: 55897 - DNA, 33 bp, Homo sapien
taaggttaaccactgtcaaataatataccagaa

SEQ ID NO: 55898 - DNA, 33 bp, Homo sapien
taaggttaaccactgtgaaataatataccagaa

SEQ ID NO: 55899 - DNA, 33 bp, Homo sapien
agatgtgcctgaataaactccaccgcaaggctt

SEQ ID NO: 55900 - DNA, 33 bp, Homo sapien
agatgtgcctgaataagctccaccgcaaggctt

SEQ ID NO: 55901 - DNA, 33 bp, Homo sapien
aagcatatataacagaagcaacctgaccaaatt

SEQ ID NO: 55902 - DNA, 33 bp, Homo sapien
aagcatatataacagaggcaacctgaccaaatt

SEQ ID NO: 55903 - DNA, 33 bp, Homo sapien
tgggaaaaggctgaccaaaatctgtgactgttt

SEQ ID NO: 55904 - DNA, 33 bp, Homo sapien
tgggaaaaggctgaccgaaatctgtgactgttt

SEQ ID NO: 55905 - DNA, 33 bp, Homo sapien
gatactgttctctttcaaataggatccattttt

SEQ ID NO: 55906 - DNA, 33 bp, Homo sapien
gatactgttctctttcgaataggatccattttt

SEQ ID NO: 55907 - DNA, 33 bp, Homo sapien
tttgtttctttccaacccattcttctcaaagta

SEQ ID NO: 55908 - DNA, 33 bp, Homo sapien
tttgtttctttccaacgcattcttctcaaagta

SEQ ID NO: 55909 - DNA, 33 bp, Homo sapien
tatgccttatagagaacgtgacaagttttgtta

SEQ ID NO: 55910 - DNA, 33 bp, Homo sapien
tatgccttatagagaatgtgacaagttttgtta

SEQ ID NO: 55911 - DNA, 33 bp, Homo sapien
gtgtgttttaggcaccacattgaaaagacaata

SEQ ID NO: 55912 - DNA, 33 bp, Homo sapien
gtgtgttttaggcaccgcattgaaaagacaata

SEQ ID NO: 55913 - DNA, 33 bp, Homo sapien
tttgtcttagataaaaggttcccattaaaatca

SEQ ID NO: 55914 - DNA, 33 bp, Homo sapien
tttgtcttagataaaatgttcccattaaaatca

SEQ ID NO: 55915 - DNA, 33 bp, Homo sapien
tttgactcacagctaaagagacaagcaacagtt

SEQ ID NO: 55916 - DNA, 33 bp, Homo sapien
tttgactcacagctaaggagacaagcaacagtt

SEQ ID NO: 55917 - DNA, 33 bp, Homo sapien
tctatggatctgagtacctttagtagcacattg

SEQ ID NO: 55918 - DNA, 33 bp, Homo sapien
tctatggatctgagtatctttagtagcacattg

SEQ ID NO: 55919 - DNA, 33 bp, Homo sapien
ccctcaagaggttttcccaacagtaggccggat

SEQ ID NO: 55920 - DNA, 33 bp, Homo sapien
ccctcaagaggttttctcaacagtaggccggat

SEQ ID NO: 55921 - DNA, 33 bp, Homo sapien
gagaacctagataaaagacaattaaggtgatct

SEQ ID NO: 55922 - DNA, 33 bp, Homo sapien
gagaacctagataaaatacaattaaggtgatct

SEQ ID NO: 55923 - DNA, 33 bp, Homo sapien
taagaatagcttccaactcagatctataaacaa

SEQ ID NO: 55924 - DNA, 33 bp, Homo sapien
taagaatagcttccaattcagatctataaacaa

SEQ ID NO: 55925 - DNA, 33 bp, Homo sapien
caagaacatataaagcagcagtaaagagtgcta

SEQ ID NO: 55926 - DNA, 33 bp, Homo sapien
caagaacatataaagcggcagtaaagagtgcta

SEQ ID NO: 55927 - DNA, 33 bp, Homo sapien
attcacacacattcctaagataaaacacagaat

SEQ ID NO: 55928 - DNA, 33 bp, Homo sapien
attcacacacattcctgagataaaacacagaat

SEQ ID NO: 55929 - DNA, 33 bp, Homo sapien
gttttcctccagttcacatatagacagttaata

SEQ ID NO: 55930 - DNA, 33 bp, Homo sapien
gttttcctccagttcagatatagacagttaata

SEQ ID NO: 55931 - DNA, 33 bp, Homo sapien
atataaaagtttataaagttagagcattggcta

SEQ ID NO: 55932 - DNA, 33 bp, Homo sapien
atataaaagtttataaggttagagcattggcta

SEQ ID NO: 55933 - DNA, 33 bp, Homo sapien
atatagctagtatctgcaaaagcccaaataatg

SEQ ID NO: 55934 - DNA, 33 bp, Homo sapien
atatagctagtatctgtaaaagcccaaataatg

SEQ ID NO: 55935 - DNA, 33 bp, Homo sapien
tgcaaagctgaattgaaaaccattgcctacaag

SEQ ID NO: 55936 - DNA, 33 bp, Homo sapien
tgcaaagctgaattgagaaccattgcctacaag

SEQ ID NO: 55937 - DNA, 33 bp, Homo sapien
gaacactattggtagaaatacaaattggtacaa

SEQ ID NO: 55938 - DNA, 33 bp, Homo sapien
gaacactattggtagatatacaaattggtacaa

SEQ ID NO: 55939 - DNA, 33 bp, Homo sapien
tccaatatagaaaccacgagtccaggagaaact

SEQ ID NO: 55940 - DNA, 33 bp, Homo sapien
tccaatatagaaaccatgagtccaggagaaact

SEQ ID NO: 55941 - DNA, 33 bp, Homo sapien
tcatctctcagaatcaagcatagtgctaaaaat

SEQ ID NO: 55942 - DNA, 33 bp, Homo sapien
tcatctctcagaatcacgcatagtgctaaaaat

SEQ ID NO: 55943 - DNA, 33 bp, Homo sapien
taattttaagtgtccacgttcatggtaacatta

SEQ ID NO: 55944 - DNA, 33 bp, Homo sapien
taattttaagtgtccaggttcatggtaacatta

SEQ ID NO: 55945 - DNA, 33 bp, Homo sapien
attattaggatgaaaaacattgctaatagaaac

SEQ ID NO: 55946 - DNA, 33 bp, Homo sapien
attattaggatgaaaagcattgctaatagaaac

SEQ ID NO: 55947 - DNA, 33 bp, Homo sapien
gtaaaccttgagggtagaaactatccttactca

SEQ ID NO: 55948 - DNA, 33 bp, Homo sapien
gtaaaccttgagggtataaactatccttactca

SEQ ID NO: 55949 - DNA, 33 bp, Homo sapien
gatgccctgcctggtgcgaccttagctcatttg

SEQ ID NO: 55950 - DNA, 33 bp, Homo sapien
gatgccctgcctggtgtgaccttagctcatttg

SEQ ID NO: 55951 - DNA, 33 bp, Homo sapien
tccccaacaagatgaacaggtttcctacaaaaa

SEQ ID NO: 55952 - DNA, 33 bp, Homo sapien
tccccaacaagatgaataggtttcctacaaaaa

SEQ ID NO: 55953 - DNA, 33 bp, Homo sapien
attctctcctctgtgaagtcttccctggctcac

SEQ ID NO: 55954 - DNA, 33 bp, Homo sapien
attctctcctctgtgacgtcttccctggctcac

SEQ ID NO: 55955 - DNA, 33 bp, Homo sapien
cacaggattaaaatgacgaaatgttggtgtata

SEQ ID NO: 55956 - DNA, 33 bp, Homo sapien
cacaggattaaaatgatgaaatgttggtgtata

SEQ ID NO: 55957 - DNA, 33 bp, Homo sapien
aagacttgaatgaagacaggtatggaattggta

SEQ ID NO: 55958 - DNA, 33 bp, Homo sapien
aagacttgaatgaagagaggtatggaattggta

SEQ ID NO: 55959 - DNA, 33 bp, Homo sapien
tgctagaagaaggtgcggagtaattttaaccac

SEQ ID NO: 55960 - DNA, 33 bp, Homo sapien
tgctagaagaaggtgctgagtaattttaaccac

SEQ ID NO: 55961 - DNA, 33 bp, Homo sapien
gtgagatatgggtatacagttgcaaaggtgaga

SEQ ID NO: 55962 - DNA, 33 bp, Homo sapien
gtgagatatgggtatatagttgcaaaggtgaga

SEQ ID NO: 55963 - DNA, 33 bp, Homo sapien
tgtataactgaaataacgtgaatttgtctccag

SEQ ID NO: 55964 - DNA, 33 bp, Homo sapien
tgtataactgaaataatgtgaatttgtctccag

SEQ ID NO: 55965 - DNA, 33 bp, Homo sapien
gttgaatgattggttgaactgtctttggcagtt

SEQ ID NO: 55966 - DNA, 33 bp, Homo sapien
gttgaatgattggttggactgtctttggcagtt

SEQ ID NO: 55967 - DNA, 33 bp, Homo sapien
gcactggatgagtccaaaatattattgttaact

SEQ ID NO: 55968 - DNA, 33 bp, Homo sapien
gcactggatgagtccacaatattattgttaact

SEQ ID NO: 55969 - DNA, 33 bp, Homo sapien
agcaaagcatatttaaagatattgtggcaaaca

SEQ ID NO: 55970 - DNA, 33 bp, Homo sapien
agcaaagcatatttaaggatattgtggcaaaca

SEQ ID NO: 55971 - DNA, 33 bp, Homo sapien
ggcaacagtcatcctaaaagtgctccaagtaaa

SEQ ID NO: 55972 - DNA, 33 bp, Homo sapien
ggcaacagtcatcctagaagtgctccaagtaaa

SEQ ID NO: 55973 - DNA, 33 bp, Homo sapien
tcttcaccatatcacaataacttaaataggatc

SEQ ID NO: 55974 - DNA, 33 bp, Homo sapien
tcttcaccatatcacattaacttaaataggatc

SEQ ID NO: 55975 - DNA, 33 bp, Homo sapien
ttcaaaacttcatataacaacttctttttacca

SEQ ID NO: 55976 - DNA, 33 bp, Homo sapien
ttcaaaacttcatatagcaacttctttttacca

SEQ ID NO: 55977 - DNA, 33 bp, Homo sapien
tgttacataagtagaacggacatgactttagtt

SEQ ID NO: 55978 - DNA, 33 bp, Homo sapien
tgttacataagtagaatggacatgactttagtt

SEQ ID NO: 55979 - DNA, 33 bp, Homo sapien
acagaatgaaggagatgaatttgatgatgttac

SEQ ID NO: 55980 - DNA, 33 bp, Homo sapien
acagaatgaaggagattaatttgatgatgttac

SEQ ID NO: 55981 - DNA, 33 bp, Homo sapien
tgttttatccgtagcaagtaaaacctatatgtc

SEQ ID NO: 55982 - DNA, 33 bp, Homo sapien
tgttttatccgtagcaggtaaaacctatatgtc

SEQ ID NO: 55983 - DNA, 33 bp, Homo sapien
ggaaataatcttatgacagctgagagtaagcca

SEQ ID NO: 55984 - DNA, 33 bp, Homo sapien
ggaaataatcttatgatagctgagagtaagcca

SEQ ID NO: 55985 - DNA, 33 bp, Homo sapien
gtgcagtctgcaggataaggaaacgtggtagaa

SEQ ID NO: 55986 - DNA, 33 bp, Homo sapien
gtgcagtctgcaggatgaggaaacgtggtagaa

SEQ ID NO: 55987 - DNA, 33 bp, Homo sapien
tactgtgataaccgaaaggttccaaaatcaact

SEQ ID NO: 55988 - DNA, 33 bp, Homo sapien
tactgtgataaccgaagggttccaaaatcaact

SEQ ID NO: 55989 - DNA, 33 bp, Homo sapien
tttcacctgacacgaagccttactaacaaagat

SEQ ID NO: 55990 - DNA, 33 bp, Homo sapien
tttcacctgacacgaatccttactaacaaagat

SEQ ID NO: 55991 - DNA, 33 bp, Homo sapien
caatttttttgaaatgaattagcgactggaatg

SEQ ID NO: 55992 - DNA, 33 bp, Homo sapien
caatttttttgaaatggattagcgactggaatg

SEQ ID NO: 55993 - DNA, 33 bp, Homo sapien
tgtgacagagcctcaacaaaaaatctgggcaac

SEQ ID NO: 55994 - DNA, 33 bp, Homo sapien
tgtgacagagcctcaataaaaaatctgggcaac

SEQ ID NO: 55995 - DNA, 33 bp, Homo sapien
gttgagagagaaccagaatacagaaaggtgatt

SEQ ID NO: 55996 - DNA, 33 bp, Homo sapien
gttgagagagaaccaggatacagaaaggtgatt

SEQ ID NO: 55997 - DNA, 33 bp, Homo sapien
accctagttttatcgaagcactctttaaaagtt

SEQ ID NO: 55998 - DNA, 33 bp, Homo sapien
accctagttttatcgaggcactctttaaaagtt

SEQ ID NO: 55999 - DNA, 33 bp, Homo sapien
ggttctcaggagcctaaccgtctattatcccct

SEQ ID NO: 56000 - DNA, 33 bp, Homo sapien
ggttctcaggagcctagccgtctattatcccct

SEQ ID NO: 56001 - DNA, 33 bp, Homo sapien
tattaggggttggaagaaggataaagagagaat

SEQ ID NO: 56002 - DNA, 33 bp, Homo sapien
tattaggggttggaagtaggataaagagagaat

SEQ ID NO: 56003 - DNA, 33 bp, Homo sapien
ctatattgtgaagataccattctccaaatttac

SEQ ID NO: 56004 - DNA, 33 bp, Homo sapien
ctatattgtgaagatatcattctccaaatttac

SEQ ID NO: 56005 - DNA, 33 bp, Homo sapien
ttgcacttctgtctcaacaatatcaagatttcc

SEQ ID NO: 56006 - DNA, 33 bp, Homo sapien
ttgcacttctgtctcagcaatatcaagatttcc

SEQ ID NO: 56007 - DNA, 33 bp, Homo sapien
gacgagtgagtgcttacaggaaaaagttttctt

SEQ ID NO: 56008 - DNA, 33 bp, Homo sapien
gacgagtgagtgcttataggaaaaagttttctt

SEQ ID NO: 56009 - DNA, 33 bp, Homo sapien
tgagggccacaggaaactttcaatcatagtgga

SEQ ID NO: 56010 - DNA, 33 bp, Homo sapien
tgagggccacaggaaagtttcaatcatagtgga

SEQ ID NO: 56011 - DNA, 33 bp, Homo sapien
caaatgttaaggttcaagcttcaagaccaaaaa

SEQ ID NO: 56012 - DNA, 33 bp, Homo sapien
caaatgttaaggttcaggcttcaagaccaaaaa

SEQ ID NO: 56013 - DNA, 33 bp, Homo sapien
attgctagtgtttatcaaatatttaccaaatac

SEQ ID NO: 56014 - DNA, 33 bp, Homo sapien
attgctagtgtttatcgaatatttaccaaatac

SEQ ID NO: 56015 - DNA, 33 bp, Homo sapien
gccatttttggtttgacaatttggtaatttggt

SEQ ID NO: 56016 - DNA, 33 bp, Homo sapien
gccatttttggtttgataatttggtaatttggt

SEQ ID NO: 56017 - DNA, 33 bp, Homo sapien
cacagtaaaatccaaacggaagccaataacttc

SEQ ID NO: 56018 - DNA, 33 bp, Homo sapien
cacagtaaaatccaaatggaagccaataacttc

SEQ ID NO: 56019 - DNA, 33 bp, Homo sapien
accaagtagaaacaaaatgactctctacagacc

SEQ ID NO: 56020 - DNA, 33 bp, Homo sapien
accaagtagaaacaaagtgactctctacagacc

SEQ ID NO: 56021 - DNA, 33 bp, Homo sapien
ctcctagggtgacaaactgtaggaaggcaaata

SEQ ID NO: 56022 - DNA, 33 bp, Homo sapien
ctcctagggtgacaaattgtaggaaggcaaata

SEQ ID NO: 56023 - DNA, 33 bp, Homo sapien
cctcctggttagctcagactacaggtgtgtgcc

SEQ ID NO: 56024 - DNA, 33 bp, Homo sapien
cctcctggttagctcatactacaggtgtgtgcc

SEQ ID NO: 56025 - DNA, 33 bp, Homo sapien
gaacaatcacagaacactcttcttttgaaatgg

SEQ ID NO: 56026 - DNA, 33 bp, Homo sapien
gaacaatcacagaacattcttcttttgaaatgg

SEQ ID NO: 56027 - DNA, 33 bp, Homo sapien
agttctagtagtttgacgatccctctgtgaatc

SEQ ID NO: 56028 - DNA, 33 bp, Homo sapien
agttctagtagtttgatgatccctctgtgaatc

SEQ ID NO: 56029 - DNA, 33 bp, Homo sapien
tgttagagcttttctacattgctttcagaacaa

SEQ ID NO: 56030 - DNA, 33 bp, Homo sapien
tgttagagcttttctatattgctttcagaacaa

SEQ ID NO: 56031 - DNA, 33 bp, Homo sapien
attagtctaaaatacaagtagtagtgctgttta

SEQ ID NO: 56032 - DNA, 33 bp, Homo sapien
attagtctaaaatacatgtagtagtgctgttta

SEQ ID NO: 56033 - DNA, 33 bp, Homo sapien
tgctcagtccaattaccggctatctcttccatt

SEQ ID NO: 56034 - DNA, 33 bp, Homo sapien
tgctcagtccaattactggctatctcttccatt

SEQ ID NO: 56035 - DNA, 33 bp, Homo sapien
taagttacattaggaacgttgggccattggatc

SEQ ID NO: 56036 - DNA, 33 bp, Homo sapien
taagttacattaggaaggttgggccattggatc

SEQ ID NO: 56037 - DNA, 33 bp, Homo sapien
agttgtgatcaaatggacattcttttctcattg

SEQ ID NO: 56038 - DNA, 33 bp, Homo sapien
agttgtgatcaaatgggcattcttttctcattg

SEQ ID NO: 56039 - DNA, 33 bp, Homo sapien
tggcaaatgcccagagaaaaaaaacacaggttt

SEQ ID NO: 56040 - DNA, 33 bp, Homo sapien
tggcaaatgcccagaggaaaaaaacacaggttt

SEQ ID NO: 56041 - DNA, 33 bp, Homo sapien
aaattcctaaaatgacggcatggttcagaatcc

SEQ ID NO: 56042 - DNA, 33 bp, Homo sapien
aaattcctaaaatgactgcatggttcagaatcc

SEQ ID NO: 56043 - DNA, 33 bp, Homo sapien
tgatgtgcctaaaataacacgctcttttactta

SEQ ID NO: 56044 - DNA, 33 bp, Homo sapien
tgatgtgcctaaaatagcacgctcttttactta

SEQ ID NO: 56045 - DNA, 33 bp, Homo sapien
agtgggaaggaaccaactggagagtcagaggga

SEQ ID NO: 56046 - DNA, 33 bp, Homo sapien
agtgggaaggaaccaagtggagagtcagaggga

SEQ ID NO: 56047 - DNA, 33 bp, Homo sapien
atactgactaaaatacacctcatgagaaaattg

SEQ ID NO: 56048 - DNA, 33 bp, Homo sapien
atactgactaaaatacgcctcatgagaaaattg

SEQ ID NO: 56049 - DNA, 33 bp, Homo sapien
aagcacacaaaatcttcaacagtgaaatcttaa

SEQ ID NO: 56050 - DNA, 33 bp, Homo sapien
aagcacacaaaatctttaacagtgaaatcttaa

SEQ ID NO: 56051 - DNA, 33 bp, Homo sapien
gaactccttactgtgccctataaggcccttcaa

SEQ ID NO: 56052 - DNA, 33 bp, Homo sapien
gaactccttactgtgctctataaggcccttcaa

SEQ ID NO: 56053 - DNA, 33 bp, Homo sapien
cgagatcctatctccacaagcaaattttaaaaa

SEQ ID NO: 56054 - DNA, 33 bp, Homo sapien
cgagatcctatctccagaagcaaattttaaaaa

SEQ ID NO: 56055 - DNA, 33 bp, Homo sapien
taagaattagaaagtaccagagcttattacttt

SEQ ID NO: 56056 - DNA, 33 bp, Homo sapien
taagaattagaaagtagcagagcttattacttt

SEQ ID NO: 56057 - DNA, 33 bp, Homo sapien
ataaaatgctaagaaacctgaagcattactttt

SEQ ID NO: 56058 - DNA, 33 bp, Homo sapien
ataaaatgctaagaaagctgaagcattactttt

SEQ ID NO: 56059 - DNA, 33 bp, Homo sapien
gaaataacagaatacacacgtaaagatttttca

SEQ ID NO: 56060 - DNA, 33 bp, Homo sapien
gaaataacagaatacatacgtaaagatttttca

SEQ ID NO: 56061 - DNA, 33 bp, Homo sapien
aaacttcatactttaactcaaatatcactgttg

SEQ ID NO: 56062 - DNA, 33 bp, Homo sapien
aaacttcatactttaagtcaaatatcactgttg

SEQ ID NO: 56063 - DNA, 33 bp, Homo sapien
attagtagaaacatacagagagtagatttggtt

SEQ ID NO: 56064 - DNA, 33 bp, Homo sapien
attagtagaaacatacggagagtagatttggtt

SEQ ID NO: 56065 - DNA, 33 bp, Homo sapien
aggtgaaaggttatgacgctcccataaatcata

SEQ ID NO: 56066 - DNA, 33 bp, Homo sapien
aggtgaaaggttatgatgctcccataaatcata

SEQ ID NO: 56067 - DNA, 33 bp, Homo sapien
cccttgaactgcttccgaagttcttaatttgca

SEQ ID NO: 56068 - DNA, 33 bp, Homo sapien
cccttgaactgcttcctaagttcttaatttgca

SEQ ID NO: 56069 - DNA, 33 bp, Homo sapien
tttgaaaagtgtcatacaagaaagagtgagagc

SEQ ID NO: 56070 - DNA, 33 bp, Homo sapien
tttgaaaagtgtcatataagaaagagtgagagc

SEQ ID NO: 56071 - DNA, 33 bp, Homo sapien
tgtgtgatgacctagaagaagaggattacaggt

SEQ ID NO: 56072 - DNA, 33 bp, Homo sapien
tgtgtgatgacctagaggaagaggattacaggt

SEQ ID NO: 56073 - DNA, 33 bp, Homo sapien
aaacaaaaaacaaataactgaattgtacacttt

SEQ ID NO: 56074 - DNA, 33 bp, Homo sapien
aaacaaaaaacaaatacctgaattgtacacttt

SEQ ID NO: 56075 - DNA, 33 bp, Homo sapien
agtagggattacagcaatagctagggctcaggt

SEQ ID NO: 56076 - DNA, 33 bp, Homo sapien
agtagggattacagcagtagctagggctcaggt

SEQ ID NO: 56077 - DNA, 33 bp, Homo sapien
tattgatccaattatgccactttgaggaattta

SEQ ID NO: 56078 - DNA, 33 bp, Homo sapien
tattgatccaattatggcactttgaggaattta

SEQ ID NO: 56079 - DNA, 33 bp, Homo sapien
attctaaggcagttaacctttgctgaggacctc

SEQ ID NO: 56080 - DNA, 33 bp, Homo sapien
attctaaggcagttaatctttgctgaggacctc

SEQ ID NO: 56081 - DNA, 33 bp, Homo sapien
gatgtgtgtacttgtgcaatataacagaagaat

SEQ ID NO: 56082 - DNA, 33 bp, Homo sapien
gatgtgtgtacttgtgtaatataacagaagaat

SEQ ID NO: 56083 - DNA, 33 bp, Homo sapien
tggcactcagaagccaaaactagtaggcaccag

SEQ ID NO: 56084 - DNA, 33 bp, Homo sapien
tggcactcagaagccacaactagtaggcaccag

SEQ ID NO: 56085 - DNA, 33 bp, Homo sapien
gcagagggacacaaagaaatttaggggagtact

SEQ ID NO: 56086 - DNA, 33 bp, Homo sapien
gcagagggacacaaagtaatttaggggagtact

SEQ ID NO: 56087 - DNA, 33 bp, Homo sapien
aaatagcaacctatgggcaagtaatgcatcaag

SEQ ID NO: 56088 - DNA, 33 bp, Homo sapien
aaatagcaacctatggtcaagtaatgcatcaag

SEQ ID NO: 56089 - DNA, 33 bp, Homo sapien
aggccagctgccaatacgtagccctgaccgagc

SEQ ID NO: 56090 - DNA, 33 bp, Homo sapien
aggccagctgccaatatgtagccctgaccgagc

SEQ ID NO: 56091 - DNA, 33 bp, Homo sapien
ccagtctgtgagcagaagttgctaagatctcag

SEQ ID NO: 56092 - DNA, 33 bp, Homo sapien
ccagtctgtgagcagaggttgctaagatctcag

SEQ ID NO: 56093 - DNA, 33 bp, Homo sapien
agatgactctcacaccaccgtgctagaaccctt

SEQ ID NO: 56094 - DNA, 33 bp, Homo sapien
agatgactctcacaccgccgtgctagaaccctt

SEQ ID NO: 56095 - DNA, 33 bp, Homo sapien
cccagggcccaagctgcagatcattagcaatat

SEQ ID NO: 56096 - DNA, 33 bp, Homo sapien
cccagggcccaagctgtagatcattagcaatat

SEQ ID NO: 56097 - DNA, 33 bp, Homo sapien
aatttgggagatggagaaaggagcttgttggat

SEQ ID NO: 56098 - DNA, 33 bp, Homo sapien
aatttgggagatggaggaaggagcttgttggat

SEQ ID NO: 56099 - DNA, 33 bp, Homo sapien
taatagcttctatcacagcgttgtttttaaggc

SEQ ID NO: 56100 - DNA, 33 bp, Homo sapien
taatagcttctatcaccgcgttgtttttaaggc

SEQ ID NO: 56101 - DNA, 33 bp, Homo sapien
atcatctttggagaaaggtacagaccacagatt

SEQ ID NO: 56102 - DNA, 33 bp, Homo sapien
atcatctttggagaaatgtacagaccacagatt

SEQ ID NO: 56103 - DNA, 33 bp, Homo sapien
gggtgggccacggaggccaagataaaagcatta

SEQ ID NO: 56104 - DNA, 33 bp, Homo sapien
gggtgggccacggaggtcaagataaaagcatta

SEQ ID NO: 56105 - DNA, 33 bp, Homo sapien
tgttaggaaaccccacaaacagtctggctacag

SEQ ID NO: 56106 - DNA, 33 bp, Homo sapien
tgttaggaaaccccacgaacagtctggctacag

SEQ ID NO: 56107 - DNA, 33 bp, Homo sapien
gggtttcctaacagaaagcttatctctgcaagt

SEQ ID NO: 56108 - DNA, 33 bp, Homo sapien
gggtttcctaacagaaggcttatctctgcaagt

SEQ ID NO: 56109 - DNA, 33 bp, Homo sapien
tctctccccatcctgtaacaactttctgtgcaa

SEQ ID NO: 56110 - DNA, 33 bp, Homo sapien
tctctccccatcctgttacaactttctgtgcaa

SEQ ID NO: 56111 - DNA, 33 bp, Homo sapien
cttgactgtcctcttacagcctgctggagcctc

SEQ ID NO: 56112 - DNA, 33 bp, Homo sapien
cttgactgtcctcttagagcctgctggagcctc

SEQ ID NO: 56113 - DNA, 33 bp, Homo sapien
gggggctttgaaaagaagaatgacctgatctga

SEQ ID NO: 56114 - DNA, 33 bp, Homo sapien
gggggctttgaaaagaggaatgacctgatctga

SEQ ID NO: 56115 - DNA, 33 bp, Homo sapien
tgacatttaagagttaccaatgagcaaaacagt

SEQ ID NO: 56116 - DNA, 33 bp, Homo sapien
tgacatttaagagttatcaatgagcaaaacagt

SEQ ID NO: 56117 - DNA, 33 bp, Homo sapien
ataggaaaggcgtcccaatccagacccttagaa

SEQ ID NO: 56118 - DNA, 33 bp, Homo sapien
ataggaaaggcgtcccgatccagacccttagaa

SEQ ID NO: 56119 - DNA, 33 bp, Homo sapien
gagaatggattttggcaaaaactagccatttct

SEQ ID NO: 56120 - DNA, 33 bp, Homo sapien
gagaatggattttggcgaaaactagccatttct

SEQ ID NO: 56121 - DNA, 33 bp, Homo sapien
ctctcctgtgtcatcaatctcttcttctctgtc

SEQ ID NO: 56122 - DNA, 33 bp, Homo sapien
ctctcctgtgtcatcattctcttcttctctgtc

SEQ ID NO: 56123 - DNA, 33 bp, Homo sapien
gaacacctcacacttaccaggagagaaccttcc

SEQ ID NO: 56124 - DNA, 33 bp, Homo sapien
gaacacctcacacttatcaggagagaaccttcc

SEQ ID NO: 56125 - DNA, 33 bp, Homo sapien
acactgggtatctgaactatgactttttaattc

SEQ ID NO: 56126 - DNA, 33 bp, Homo sapien
acactgggtatctgaattatgactttttaattc

SEQ ID NO: 56127 - DNA, 33 bp, Homo sapien
ctgagcaaaccacaaacatcatctactttatta

SEQ ID NO: 56128 - DNA, 33 bp, Homo sapien
ctgagcaaaccacaaatatcatctactttatta

SEQ ID NO: 56129 - DNA, 33 bp, Homo sapien
cacactaaggagtgcgaagaccacattctatgg

SEQ ID NO: 56130 - DNA, 33 bp, Homo sapien
cacactaaggagtgcggagaccacattctatgg

SEQ ID NO: 56131 - DNA, 33 bp, Homo sapien
atgggaagactagatcactgcctaaatgctgtg

SEQ ID NO: 56132 - DNA, 33 bp, Homo sapien
atgggaagactagatcgctgcctaaatgctgtg

SEQ ID NO: 56133 - DNA, 33 bp, Homo sapien
catgcaggtgggactcaaaatcagctgtaaatc

SEQ ID NO: 56134 - DNA, 33 bp, Homo sapien
catgcaggtgggactcgaaatcagctgtaaatc

SEQ ID NO: 56135 - DNA, 33 bp, Homo sapien
ctgccatgaacccctcaagtcctcattctcact

SEQ ID NO: 56136 - DNA, 33 bp, Homo sapien
ctgccatgaacccctccagtcctcattctcact

SEQ ID NO: 56137 - DNA, 33 bp, Homo sapien
caaacggggtcacggaacagcagaagggaattc

SEQ ID NO: 56138 - DNA, 33 bp, Homo sapien
caaacggggtcacggagcagcagaagggaattc

SEQ ID NO: 56139 - DNA, 33 bp, Homo sapien
tccttgctgccaagtcgcctgtacccgatgggc

SEQ ID NO: 56140 - DNA, 33 bp, Homo sapien
tccttgctgccaagtctcctgtacccgatgggc

SEQ ID NO: 56141 - DNA, 33 bp, Homo sapien
gtgctgggaatagaagaaacacacaattgcaat

SEQ ID NO: 56142 - DNA, 33 bp, Homo sapien
gtgctgggaatagaagcaacacacaattgcaat

SEQ ID NO: 56143 - DNA, 33 bp, Homo sapien
accacacaagtcttgcccattgcagtaagacta

SEQ ID NO: 56144 - DNA, 33 bp, Homo sapien
accacacaagtcttgcgcattgcagtaagacta

SEQ ID NO: 56145 - DNA, 33 bp, Homo sapien
atacctaatgttaagaaagtaaccatctgacta

SEQ ID NO: 56146 - DNA, 33 bp, Homo sapien
atacctaatgttaagagagtaaccatctgacta

SEQ ID NO: 56147 - DNA, 33 bp, Homo sapien
tttttctgtaaaattcaaacacacacaaaagaa

SEQ ID NO: 56148 - DNA, 33 bp, Homo sapien
tttttctgtaaaattcgaacacacacaaaagaa

SEQ ID NO: 56149 - DNA, 33 bp, Homo sapien
ccaagaaaaagaaacacggaatccattgagcaa

SEQ ID NO: 56150 - DNA, 33 bp, Homo sapien
ccaagaaaaagaaacatggaatccattgagcaa

SEQ ID NO: 56151 - DNA, 33 bp, Homo sapien
tagatcatatctgacactacgtctcagctgtca

SEQ ID NO: 56152 - DNA, 33 bp, Homo sapien
tagatcatatctgacattacgtctcagctgtca

SEQ ID NO: 56153 - DNA, 33 bp, Homo sapien
cttcacataacagaataacttgccatctgcctg

SEQ ID NO: 56154 - DNA, 33 bp, Homo sapien
cttcacataacagaatgacttgccatctgcctg

SEQ ID NO: 56155 - DNA, 33 bp, Homo sapien
ttgcatccttttgagcccaggacctgcttgtaa

SEQ ID NO: 56156 - DNA, 33 bp, Homo sapien
ttgcatccttttgagctcaggacctgcttgtaa

SEQ ID NO: 56157 - DNA, 33 bp, Homo sapien
ttgtacgcttgcaaaaactatgtaaataatgcc

SEQ ID NO: 56158 - DNA, 33 bp, Homo sapien
ttgtacgcttgcaaaatctatgtaaataatgcc

SEQ ID NO: 56159 - DNA, 33 bp, Homo sapien
tactaaaagttggctaaaattattattgtcatc

SEQ ID NO: 56160 - DNA, 33 bp, Homo sapien
tactaaaagttggctacaattattattgtcatc

SEQ ID NO: 56161 - DNA, 33 bp, Homo sapien
atttggctattccccagattaacttaaatgctt

SEQ ID NO: 56162 - DNA, 33 bp, Homo sapien
atttggctattccccatattaacttaaatgctt

SEQ ID NO: 56163 - DNA, 33 bp, Homo sapien
catacatgggtggataaaagtttgcgacagaaa

SEQ ID NO: 56164 - DNA, 33 bp, Homo sapien
catacatgggtggatagaagtttgcgacagaaa

SEQ ID NO: 56165 - DNA, 33 bp, Homo sapien
tttactgtgatcagacaatttttgtacaaaaca

SEQ ID NO: 56166 - DNA, 33 bp, Homo sapien
tttactgtgatcagaccatttttgtacaaaaca

SEQ ID NO: 56167 - DNA, 33 bp, Homo sapien
cctaatacaagtgacaaaaaagctaatgttggt

SEQ ID NO: 56168 - DNA, 33 bp, Homo sapien
cctaatacaagtgacagaaaagctaatgttggt

SEQ ID NO: 56169 - DNA, 33 bp, Homo sapien
cacctttcacaggaacaaggaatgatctgttga

SEQ ID NO: 56170 - DNA, 33 bp, Homo sapien
cacctttcacaggaacgaggaatgatctgttga

SEQ ID NO: 56171 - DNA, 33 bp, Homo sapien
atgtctttgggcgaatcacttaaatctctcata

SEQ ID NO: 56172 - DNA, 33 bp, Homo sapien
atgtctttgggcgaattacttaaatctctcata

SEQ ID NO: 56173 - DNA, 33 bp, Homo sapien
tgcagcctctgaccacagaccgatctaggcttg

SEQ ID NO: 56174 - DNA, 33 bp, Homo sapien
tgcagcctctgaccacggaccgatctaggcttg

SEQ ID NO: 56175 - DNA, 33 bp, Homo sapien
tagtgtcaggtacacacagaagagcttgagaac

SEQ ID NO: 56176 - DNA, 33 bp, Homo sapien
tagtgtcaggtacacatagaagagcttgagaac

SEQ ID NO: 56177 - DNA, 33 bp, Homo sapien
gaaggctttggtccaagtgtcttgcagggcaag

SEQ ID NO: 56178 - DNA, 33 bp, Homo sapien
gaaggctttggtccaattgtcttgcagggcaag

SEQ ID NO: 56179 - DNA, 33 bp, Homo sapien
taaacaaacgtccatccaaactttcttggctcc

SEQ ID NO: 56180 - DNA, 33 bp, Homo sapien
taaacaaacgtccatcgaaactttcttggctcc

SEQ ID NO: 56181 - DNA, 33 bp, Homo sapien
aaagtaaatgagcaagcatgtggtaggtttttc

SEQ ID NO: 56182 - DNA, 33 bp, Homo sapien
aaagtaaatgagcaagtatgtggtaggtttttc

SEQ ID NO: 56183 - DNA, 33 bp, Homo sapien
gcttaaagaggttgcaccatgtggccaaaccaa

SEQ ID NO: 56184 - DNA, 33 bp, Homo sapien
gcttaaagaggttgcatcatgtggccaaaccaa

SEQ ID NO: 56185 - DNA, 33 bp, Homo sapien
tcatctaatcccaccaactcattttacagataa

SEQ ID NO: 56186 - DNA, 33 bp, Homo sapien
tcatctaatcccaccagctcattttacagataa

SEQ ID NO: 56187 - DNA, 33 bp, Homo sapien
ctcttttctttgtgccaccatgtgtcgtcatac

SEQ ID NO: 56188 - DNA, 33 bp, Homo sapien
ctcttttctttgtgccgccatgtgtcgtcatac

SEQ ID NO: 56189 - DNA, 33 bp, Homo sapien
ttgggagtttacactcacagctagttctctctc

SEQ ID NO: 56190 - DNA, 33 bp, Homo sapien
ttgggagtttacactcgcagctagttctctctc

SEQ ID NO: 56191 - DNA, 33 bp, Homo sapien
ctccaactcatcaacaagtgaagggtgggaagg

SEQ ID NO: 56192 - DNA, 33 bp, Homo sapien
ctccaactcatcaacaggtgaagggtgggaagg

SEQ ID NO: 56193 - DNA, 33 bp, Homo sapien
aggctgcaagggtacaactccctaagttcacac

SEQ ID NO: 56194 - DNA, 33 bp, Homo sapien
aggctgcaagggtacagctccctaagttcacac

SEQ ID NO: 56195 - DNA, 33 bp, Homo sapien
gagttctgatggctgcactatgagcctctttct

SEQ ID NO: 56196 - DNA, 33 bp, Homo sapien
gagttctgatggctgccctatgagcctctttct

SEQ ID NO: 56197 - DNA, 33 bp, Homo sapien
tcccagagttgattcaaacccataagcctcagg

SEQ ID NO: 56198 - DNA, 33 bp, Homo sapien
tcccagagttgattcatacccataagcctcagg

SEQ ID NO: 56199 - DNA, 33 bp, Homo sapien
ggttacttcctttccaaaagattccgaatgcca

SEQ ID NO: 56200 - DNA, 33 bp, Homo sapien
ggttacttcctttccagaagattccgaatgcca

SEQ ID NO: 56201 - DNA, 33 bp, Homo sapien
tgtggctatcctctctcacaccttagaggagat

SEQ ID NO: 56202 - DNA, 33 bp, Homo sapien
tgtggctatcctctctgacaccttagaggagat

SEQ ID NO: 56203 - DNA, 33 bp, Homo sapien
agaggtgagctgacaacaggaatttgaagaaca

SEQ ID NO: 56204 - DNA, 33 bp, Homo sapien
agaggtgagctgacaataggaatttgaagaaca

SEQ ID NO: 56205 - DNA, 33 bp, Homo sapien
tccaggcagagggcacacttgaaaacttgcccc

SEQ ID NO: 56206 - DNA, 33 bp, Homo sapien
tccaggcagagggcacgcttgaaaacttgcccc

SEQ ID NO: 56207 - DNA, 33 bp, Homo sapien
tggctacagcccatgactcagtatataatcaca

SEQ ID NO: 56208 - DNA, 33 bp, Homo sapien
tggctacagcccatgattcagtatataatcaca

SEQ ID NO: 56209 - DNA, 33 bp, Homo sapien
tttctcaggagttataagtctgcaaaaatttaa

SEQ ID NO: 56210 - DNA, 33 bp, Homo sapien
tttctcaggagttatatgtctgcaaaaatttaa

SEQ ID NO: 56211 - DNA, 33 bp, Homo sapien
gatgatgccattcttccatgcaaaaatctctaa

SEQ ID NO: 56212 - DNA, 33 bp, Homo sapien
gatgatgccattcttctatgcaaaaatctctaa

SEQ ID NO: 56213 - DNA, 33 bp, Homo sapien
agcctatggaccataacagcaactttggttttt

SEQ ID NO: 56214 - DNA, 33 bp, Homo sapien
agcctatggaccataatagcaactttggttttt

SEQ ID NO: 56215 - DNA, 33 bp, Homo sapien
cctccaactgactttcaccccttcccttttcca

SEQ ID NO: 56216 - DNA, 33 bp, Homo sapien
cctccaactgactttctccccttcccttttcca

SEQ ID NO: 56217 - DNA, 33 bp, Homo sapien
accagggtcgggggcacgaaacggcagagcctg

SEQ ID NO: 56218 - DNA, 33 bp, Homo sapien
accagggtcgggggcatgaaacggcagagcctg

SEQ ID NO: 56219 - DNA, 33 bp, Homo sapien
atttctgttgtcatacgacctcccccagacagg

SEQ ID NO: 56220 - DNA, 33 bp, Homo sapien
atttctgttgtcatactacctcccccagacagg

SEQ ID NO: 56221 - DNA, 33 bp, Homo sapien
agtgcataatataagaacaactctcaccactgg

SEQ ID NO: 56222 - DNA, 33 bp, Homo sapien
agtgcataatataagatcaactctcaccactgg

SEQ ID NO: 56223 - DNA, 33 bp, Homo sapien
actttgtagctacaataagcttgaaaaagcgct

SEQ ID NO: 56224 - DNA, 33 bp, Homo sapien
actttgtagctacaatgagcttgaaaaagcgct

SEQ ID NO: 56225 - DNA, 33 bp, Homo sapien
ttgggggacactttccaccttccttgcatctca

SEQ ID NO: 56226 - DNA, 33 bp, Homo sapien
ttgggggacactttccgccttccttgcatctca

SEQ ID NO: 56227 - DNA, 33 bp, Homo sapien
aagaacactagatacaccaagctatgggtgttg

SEQ ID NO: 56228 - DNA, 33 bp, Homo sapien
aagaacactagatacatcaagctatgggtgttg

SEQ ID NO: 56229 - DNA, 33 bp, Homo sapien
aaggtagatccagtaaacaatactctcaaagca

SEQ ID NO: 56230 - DNA, 33 bp, Homo sapien
aaggtagatccagtaagcaatactctcaaagca

SEQ ID NO: 56231 - DNA, 33 bp, Homo sapien
gctcataactttcctcactgattcctgcttatc

SEQ ID NO: 56232 - DNA, 33 bp, Homo sapien
gctcataactttcctcgctgattcctgcttatc

SEQ ID NO: 56233 - DNA, 33 bp, Homo sapien
ccattagaaaattgccaacactaaggctcatcc

SEQ ID NO: 56234 - DNA, 33 bp, Homo sapien
ccattagaaaattgccgacactaaggctcatcc

SEQ ID NO: 56235 - DNA, 33 bp, Homo sapien
aatcctgatcctgctaaaagttttataaactgt

SEQ ID NO: 56236 - DNA, 33 bp, Homo sapien
aatcctgatcctgctataagttttataaactgt

SEQ ID NO: 56237 - DNA, 33 bp, Homo sapien
caagaaccacatagacagtcaggttttctgtgt

SEQ ID NO: 56238 - DNA, 33 bp, Homo sapien
caagaaccacatagacggtcaggttttctgtgt

SEQ ID NO: 56239 - DNA, 33 bp, Homo sapien
gtatgatttgcactaactcaaagatggttttcc

SEQ ID NO: 56240 - DNA, 33 bp, Homo sapien
gtatgatttgcactaattcaaagatggttttcc

SEQ ID NO: 56241 - DNA, 33 bp, Homo sapien
aacatagcaacctcaccgaaaaccctgagcacc

SEQ ID NO: 56242 - DNA, 33 bp, Homo sapien
aacatagcaacctcactgaaaaccctgagcacc

SEQ ID NO: 56243 - DNA, 33 bp, Homo sapien
tctgtatatagtaataagtaaggtcctgctgta

SEQ ID NO: 56244 - DNA, 33 bp, Homo sapien
tctgtatatagtaatatgtaaggtcctgctgta

SEQ ID NO: 56245 - DNA, 33 bp, Homo sapien
aaatgcctgcctatggaaggtggaagaagagaa

SEQ ID NO: 56246 - DNA, 33 bp, Homo sapien
aaatgcctgcctatgggaggtggaagaagagaa

SEQ ID NO: 56247 - DNA, 33 bp, Homo sapien
agaaaccaaagacttacatggctagtaaatagc

SEQ ID NO: 56248 - DNA, 33 bp, Homo sapien
agaaaccaaagacttatatggctagtaaatagc

SEQ ID NO: 56249 - DNA, 33 bp, Homo sapien
cagtagtaaaccctcaacattaaacctgcagct

SEQ ID NO: 56250 - DNA, 33 bp, Homo sapien
cagtagtaaaccctcagcattaaacctgcagct

SEQ ID NO: 56251 - DNA, 33 bp, Homo sapien
gaggtctatgatcttaaaacttttggaagtgag

SEQ ID NO: 56252 - DNA, 33 bp, Homo sapien
gaggtctatgatcttacaacttttggaagtgag

SEQ ID NO: 56253 - DNA, 33 bp, Homo sapien
atttcagccactccagacaagttatgagtcaga

SEQ ID NO: 56254 - DNA, 33 bp, Homo sapien
atttcagccactccagtcaagttatgagtcaga

SEQ ID NO: 56255 - DNA, 33 bp, Homo sapien
ctctgaaatccctgtacagtcaataggcagttt

SEQ ID NO: 56256 - DNA, 33 bp, Homo sapien
ctctgaaatccctgtatagtcaataggcagttt

SEQ ID NO: 56257 - DNA, 33 bp, Homo sapien
gtacttagcaaaatatgagataagtgtcagcaa

SEQ ID NO: 56258 - DNA, 33 bp, Homo sapien
gtacttagcaaaatattagataagtgtcagcaa

SEQ ID NO: 56259 - DNA, 33 bp, Homo sapien
caacagaagcgcaccaccctccaaccctgaggc

SEQ ID NO: 56260 - DNA, 33 bp, Homo sapien
caacagaagcgcaccatcctccaaccctgaggc

SEQ ID NO: 56261 - DNA, 33 bp, Homo sapien
acagaaaacctgggaacagaacacattaaattc

SEQ ID NO: 56262 - DNA, 33 bp, Homo sapien
acagaaaacctgggaagagaacacattaaattc

SEQ ID NO: 56263 - DNA, 33 bp, Homo sapien
ggagtaagcaacttggaattcgagagtgatttg

SEQ ID NO: 56264 - DNA, 33 bp, Homo sapien
ggagtaagcaacttggtattcgagagtgatttg

SEQ ID NO: 56265 - DNA, 33 bp, Homo sapien
ctgttctgaaaaggaaagaaccctgaacaaagt

SEQ ID NO: 56266 - DNA, 33 bp, Homo sapien
ctgttctgaaaaggaacgaaccctgaacaaagt

SEQ ID NO: 56267 - DNA, 33 bp, Homo sapien
gcgatgtctcggacaccgtggcttttgtggagt

SEQ ID NO: 56268 - DNA, 33 bp, Homo sapien
gcgatgtctcggacactgtggcttttgtggagt

SEQ ID NO: 56269 - DNA, 33 bp, Homo sapien
ctttcctgaggacatgcagtttgccttgattcc

SEQ ID NO: 56270 - DNA, 33 bp, Homo sapien
ctttcctgaggacatgtagtttgccttgattcc

SEQ ID NO: 56271 - DNA, 33 bp, Homo sapien
tcaaagtttcacatgaaaaaggagccttcagaa

SEQ ID NO: 56272 - DNA, 33 bp, Homo sapien
tcaaagtttcacatgacaaaggagccttcagaa

SEQ ID NO: 56273 - DNA, 33 bp, Homo sapien
ctctctgctgagataactctggggtctgatgag

SEQ ID NO: 56274 - DNA, 33 bp, Homo sapien
ctctctgctgagataattctggggtctgatgag

SEQ ID NO: 56275 - DNA, 33 bp, Homo sapien
gacaaatatgtggtaacgacctgctgacaagag

SEQ ID NO: 56276 - DNA, 33 bp, Homo sapien
gacaaatatgtggtaatgacctgctgacaagag

SEQ ID NO: 56277 - DNA, 33 bp, Homo sapien
aaactggtttgctccaaaactttagccagcttt

SEQ ID NO: 56278 - DNA, 33 bp, Homo sapien
aaactggtttgctccacaactttagccagcttt

SEQ ID NO: 56279 - DNA, 33 bp, Homo sapien
caggtcaccatctgccacttttcccaccttgct

SEQ ID NO: 56280 - DNA, 33 bp, Homo sapien
caggtcaccatctgccgcttttcccaccttgct

SEQ ID NO: 56281 - DNA, 33 bp, Homo sapien
gaaaaggtcaaggtagaaagatttagccttgaa

SEQ ID NO: 56282 - DNA, 33 bp, Homo sapien
gaaaaggtcaaggtaggaagatttagccttgaa

SEQ ID NO: 56283 - DNA, 33 bp, Homo sapien
ctcttctctcttcccacattttaatcagataca

SEQ ID NO: 56284 - DNA, 33 bp, Homo sapien
ctcttctctcttcccagattttaatcagataca

SEQ ID NO: 56285 - DNA, 33 bp, Homo sapien
gctgctctttgctggacgtgttgtagttggcaa

SEQ ID NO: 56286 - DNA, 33 bp, Homo sapien
gctgctctttgctggatgtgttgtagttggcaa

SEQ ID NO: 56287 - DNA, 33 bp, Homo sapien
ttgcagattcccacaactccatgctgtgtgctg

SEQ ID NO: 56288 - DNA, 33 bp, Homo sapien
ttgcagattcccacaattccatgctgtgtgctg

SEQ ID NO: 56289 - DNA, 33 bp, Homo sapien
atcgaacaagccatgcccttgcacatatcatag

SEQ ID NO: 56290 - DNA, 33 bp, Homo sapien
atcgaacaagccatgctcttgcacatatcatag

SEQ ID NO: 56291 - DNA, 33 bp, Homo sapien
gttttgaggagctaacccactataatatggcat

SEQ ID NO: 56292 - DNA, 33 bp, Homo sapien
gttttgaggagctaactcactataatatggcat

SEQ ID NO: 56293 - DNA, 33 bp, Homo sapien
agagaaagtgagaaaaatggagcacctcatgcc

SEQ ID NO: 56294 - DNA, 33 bp, Homo sapien
agagaaagtgagaaaagtggagcacctcatgcc

SEQ ID NO: 56295 - DNA, 33 bp, Homo sapien
gagcttagcaacactacaggcacattgattaag

SEQ ID NO: 56296 - DNA, 33 bp, Homo sapien
gagcttagcaacactagaggcacattgattaag

SEQ ID NO: 56297 - DNA, 33 bp, Homo sapien
caaagtgggtaggcagaaaatttgttacccaaa

SEQ ID NO: 56298 - DNA, 33 bp, Homo sapien
caaagtgggtaggcaggaaatttgttacccaaa

SEQ ID NO: 56299 - DNA, 33 bp, Homo sapien
ttaggttataagcataagaggagcagagcagag

SEQ ID NO: 56300 - DNA, 33 bp, Homo sapien
ttaggttataagcatatgaggagcagagcagag

SEQ ID NO: 56301 - DNA, 33 bp, Homo sapien
agctacacaatcagagaagtagagagaagacag

SEQ ID NO: 56302 - DNA, 33 bp, Homo sapien
agctacacaatcagaggagtagagagaagacag

SEQ ID NO: 56303 - DNA, 33 bp, Homo sapien
tatgctacagaatagaaaggatatttggtggac

SEQ ID NO: 56304 - DNA, 33 bp, Homo sapien
tatgctacagaatagagaggatatttggtggac

SEQ ID NO: 56305 - DNA, 33 bp, Homo sapien
tgtatatggccataaaagcaagctgattggtag

SEQ ID NO: 56306 - DNA, 33 bp, Homo sapien
tgtatatggccataaaggcaagctgattggtag

SEQ ID NO: 56307 - DNA, 33 bp, Homo sapien
catcagtttggctctgaatcacaaaagtggtag

SEQ ID NO: 56308 - DNA, 33 bp, Homo sapien
catcagtttggctctggatcacaaaagtggtag

SEQ ID NO: 56309 - DNA, 33 bp, Homo sapien
tatactttaatgcttgaaaagagaagagctaat

SEQ ID NO: 56310 - DNA, 33 bp, Homo sapien
tatactttaatgcttggaaagagaagagctaat

SEQ ID NO: 56311 - DNA, 33 bp, Homo sapien
ggtttctcaaagcaaacgtcaacatatcagaaa

SEQ ID NO: 56312 - DNA, 33 bp, Homo sapien
ggtttctcaaagcaaatgtcaacatatcagaaa

SEQ ID NO: 56313 - DNA, 33 bp, Homo sapien
ctcttgatttcgtgaccgagaaatctaagaccc

SEQ ID NO: 56314 - DNA, 33 bp, Homo sapien
ctcttgatttcgtgactgagaaatctaagaccc

SEQ ID NO: 56315 - DNA, 33 bp, Homo sapien
cctccatgccaaaaaacaggtctggtctgatcc

SEQ ID NO: 56316 - DNA, 33 bp, Homo sapien
cctccatgccaaaaaagaggtctggtctgatcc

SEQ ID NO: 56317 - DNA, 33 bp, Homo sapien
agtggcaggcccaggacctaaagccagatggta

SEQ ID NO: 56318 - DNA, 33 bp, Homo sapien
agtggcaggcccaggatctaaagccagatggta

SEQ ID NO: 56319 - DNA, 33 bp, Homo sapien
ctctgcctgtaatctgaatgaatgattctaaca

SEQ ID NO: 56320 - DNA, 33 bp, Homo sapien
ctctgcctgtaatctggatgaatgattctaaca

SEQ ID NO: 56321 - DNA, 33 bp, Homo sapien
agacatttgaatgacaccctgaaaagccagaag

SEQ ID NO: 56322 - DNA, 33 bp, Homo sapien
agacatttgaatgacatcctgaaaagccagaag

SEQ ID NO: 56323 - DNA, 33 bp, Homo sapien
acgtgccagctctaagacctgttgtacctgcct

SEQ ID NO: 56324 - DNA, 33 bp, Homo sapien
acgtgccagctctaaggcctgttgtacctgcct

SEQ ID NO: 56325 - DNA, 33 bp, Homo sapien
cacatgagtaatgcccagaaagattctataaat

SEQ ID NO: 56326 - DNA, 33 bp, Homo sapien
cacatgagtaatgcccggaaagattctataaat

SEQ ID NO: 56327 - DNA, 33 bp, Homo sapien
cactctaccttgggcacgtgtcactttgcttcc

SEQ ID NO: 56328 - DNA, 33 bp, Homo sapien
cactctaccttgggcaggtgtcactttgcttcc

SEQ ID NO: 56329 - DNA, 33 bp, Homo sapien
ccagttttcttttcaacgagaccttttccttct

SEQ ID NO: 56330 - DNA, 33 bp, Homo sapien
ccagttttcttttcaatgagaccttttccttct

SEQ ID NO: 56331 - DNA, 33 bp, Homo sapien
ctatttaagctcaagaacccccacttgtaggtc

SEQ ID NO: 56332 - DNA, 33 bp, Homo sapien
ctatttaagctcaagatcccccacttgtaggtc

SEQ ID NO: 56333 - DNA, 33 bp, Homo sapien
tggattataccaaccaggccagttagaaatctc

SEQ ID NO: 56334 - DNA, 33 bp, Homo sapien
tggattataccaaccatgccagttagaaatctc

SEQ ID NO: 56335 - DNA, 33 bp, Homo sapien
tgacttctcagccatggaggaaagccggtgaag

SEQ ID NO: 56336 - DNA, 33 bp, Homo sapien
tgacttctcagccatgtaggaaagccggtgaag

SEQ ID NO: 56337 - DNA, 33 bp, Homo sapien
cccacataaaagggaaacaagaatcaaagacaa

SEQ ID NO: 56338 - DNA, 33 bp, Homo sapien
cccacataaaagggaagcaagaatcaaagacaa

SEQ ID NO: 56339 - DNA, 33 bp, Homo sapien
aatgcacttcattaaaaccagcattttttatta

SEQ ID NO: 56340 - DNA, 33 bp, Homo sapien
aatgcacttcattaaacccagcattttttatta

SEQ ID NO: 56341 - DNA, 33 bp, Homo sapien
agtcctaactctcagaacctcagaatttgacca

SEQ ID NO: 56342 - DNA, 33 bp, Homo sapien
agtcctaactctcagagcctcagaatttgacca

SEQ ID NO: 56343 - DNA, 33 bp, Homo sapien
atcccttgtctgtaccagaaaattcctccaacg

SEQ ID NO: 56344 - DNA, 33 bp, Homo sapien
atcccttgtctgtacctgaaaattcctccaacg

SEQ ID NO: 56345 - DNA, 33 bp, Homo sapien
gggaatctagattgacacagaacttttctctaa

SEQ ID NO: 56346 - DNA, 33 bp, Homo sapien
gggaatctagattgacgcagaacttttctctaa

SEQ ID NO: 56347 - DNA, 33 bp, Homo sapien
gagtggtcttccttcaagaaacttttaaataat

SEQ ID NO: 56348 - DNA, 33 bp, Homo sapien
gagtggtcttccttcatgaaacttttaaataat

SEQ ID NO: 56349 - DNA, 33 bp, Homo sapien
cttcaaaaaaatcctacgtgggtgtgtgtggga

SEQ ID NO: 56350 - DNA, 33 bp, Homo sapien
cttcaaaaaaatcctatgtgggtgtgtgtggga

SEQ ID NO: 56351 - DNA, 33 bp, Homo sapien
caggtcttaagttgagccagaggtacgtgggaa

SEQ ID NO: 56352 - DNA, 33 bp, Homo sapien
caggtcttaagttgagtcagaggtacgtgggaa

SEQ ID NO: 56353 - DNA, 33 bp, Homo sapien
aaagctagggtgcagaatctgattgttccagaa

SEQ ID NO: 56354 - DNA, 33 bp, Homo sapien
aaagctagggtgcagagtctgattgttccagaa

SEQ ID NO: 56355 - DNA, 33 bp, Homo sapien
cttgtgcttgtcaaacaagttcaatcttagggg

SEQ ID NO: 56356 - DNA, 33 bp, Homo sapien
cttgtgcttgtcaaacgagttcaatcttagggg

SEQ ID NO: 56357 - DNA, 33 bp, Homo sapien
aactgaggcctcagtcaaccctacaggaagctc

SEQ ID NO: 56358 - DNA, 33 bp, Homo sapien
aactgaggcctcagtcgaccctacaggaagctc

SEQ ID NO: 56359 - DNA, 33 bp, Homo sapien
agaacatataagaaacaacagataaggccggac

SEQ ID NO: 56360 - DNA, 33 bp, Homo sapien
agaacatataagaaacgacagataaggccggac

SEQ ID NO: 56361 - DNA, 33 bp, Homo sapien
ccaaatgaagactttaaatacagcccatctgac

SEQ ID NO: 56362 - DNA, 33 bp, Homo sapien
ccaaatgaagactttacatacagcccatctgac

SEQ ID NO: 56363 - DNA, 33 bp, Homo sapien
tcttcaccctagaaagaagcatgtaaaagggcc

SEQ ID NO: 56364 - DNA, 33 bp, Homo sapien
tcttcaccctagaaaggagcatgtaaaagggcc

SEQ ID NO: 56365 - DNA, 33 bp, Homo sapien
ataaataacgcctacagcacagtgtagtgggga

SEQ ID NO: 56366 - DNA, 33 bp, Homo sapien
ataaataacgcctacatcacagtgtagtgggga

SEQ ID NO: 56367 - DNA, 33 bp, Homo sapien
gcatttaggtcccagaagcagagaacctgtgtt

SEQ ID NO: 56368 - DNA, 33 bp, Homo sapien
gcatttaggtcccagaggcagagaacctgtgtt

SEQ ID NO: 56369 - DNA, 33 bp, Homo sapien
actgcagtgcataccggcatttctgatcttcca

SEQ ID NO: 56370 - DNA, 33 bp, Homo sapien
actgcagtgcataccgtcatttctgatcttcca

SEQ ID NO: 56371 - DNA, 33 bp, Homo sapien
ggcattttcttcctcaagcctaacaaacaactt

SEQ ID NO: 56372 - DNA, 33 bp, Homo sapien
ggcattttcttcctcaggcctaacaaacaactt

SEQ ID NO: 56373 - DNA, 33 bp, Homo sapien
catcatgagaatagcaacatagaggtaaccgcc

SEQ ID NO: 56374 - DNA, 33 bp, Homo sapien
catcatgagaatagcagcatagaggtaaccgcc

SEQ ID NO: 56375 - DNA, 33 bp, Homo sapien
atgtttgaatcagcccagaacaccctcagtggc

SEQ ID NO: 56376 - DNA, 33 bp, Homo sapien
atgtttgaatcagcccggaacaccctcagtggc

SEQ ID NO: 56377 - DNA, 33 bp, Homo sapien
tttgtgcaataaaaaacggccacacctgtttga

SEQ ID NO: 56378 - DNA, 33 bp, Homo sapien
tttgtgcaataaaaaagggccacacctgtttga

SEQ ID NO: 56379 - DNA, 33 bp, Homo sapien
aaagtcaatataaaaacgtatgcagaagacgct

SEQ ID NO: 56380 - DNA, 33 bp, Homo sapien
aaagtcaatataaaaatgtatgcagaagacgct

SEQ ID NO: 56381 - DNA, 33 bp, Homo sapien
cccatatttgtctaagccagtggttttgcctct

SEQ ID NO: 56382 - DNA, 33 bp, Homo sapien
cccatatttgtctaagtcagtggttttgcctct

SEQ ID NO: 56383 - DNA, 33 bp, Homo sapien
tttaaggtctgaactgaagaagagaagagagga

SEQ ID NO: 56384 - DNA, 33 bp, Homo sapien
tttaaggtctgaactggagaagagaagagagga

SEQ ID NO: 56385 - DNA, 33 bp, Homo sapien
ttagcaaatattatagaaattcagtcattgaag

SEQ ID NO: 56386 - DNA, 33 bp, Homo sapien
ttagcaaatattataggaattcagtcattgaag

SEQ ID NO: 56387 - DNA, 33 bp, Homo sapien
atggttcagactaacactggtggtgatattaac

SEQ ID NO: 56388 - DNA, 33 bp, Homo sapien
atggttcagactaacattggtggtgatattaac

SEQ ID NO: 56389 - DNA, 33 bp, Homo sapien
atgcaaacattgacaaacaattttttcataatt

SEQ ID NO: 56390 - DNA, 33 bp, Homo sapien
atgcaaacattgacaagcaattttttcataatt

SEQ ID NO: 56391 - DNA, 33 bp, Homo sapien
tcctgccttcaggttccagtcaaggtttctgga

SEQ ID NO: 56392 - DNA, 33 bp, Homo sapien
tcctgccttcaggttctagtcaaggtttctgga

SEQ ID NO: 56393 - DNA, 33 bp, Homo sapien
ctgaatacaacaactaccactgggatctgccaa

SEQ ID NO: 56394 - DNA, 33 bp, Homo sapien
ctgaatacaacaactagcactgggatctgccaa

SEQ ID NO: 56395 - DNA, 33 bp, Homo sapien
ttgttgtaatgtctcaaacactgatattaaaaa

SEQ ID NO: 56396 - DNA, 33 bp, Homo sapien
ttgttgtaatgtctcagacactgatattaaaaa

SEQ ID NO: 56397 - DNA, 33 bp, Homo sapien
ttttaggagggagcagaaataactatgtatgtc

SEQ ID NO: 56398 - DNA, 33 bp, Homo sapien
ttttaggagggagcagtaataactatgtatgtc

SEQ ID NO: 56399 - DNA, 33 bp, Homo sapien
gtataccagtcctttacgcacttgaatatgctt

SEQ ID NO: 56400 - DNA, 33 bp, Homo sapien
gtataccagtcctttatgcacttgaatatgctt

SEQ ID NO: 56401 - DNA, 33 bp, Homo sapien
aaacagtctttgaaaccgaatagccatattgtt

SEQ ID NO: 56402 - DNA, 33 bp, Homo sapien
aaacagtctttgaaactgaatagccatattgtt

SEQ ID NO: 56403 - DNA, 33 bp, Homo sapien
tgacatcctgaaataacagtgaggcaagccaga

SEQ ID NO: 56404 - DNA, 33 bp, Homo sapien
tgacatcctgaaataagagtgaggcaagccaga

SEQ ID NO: 56405 - DNA, 33 bp, Homo sapien
taaaaatgcaagtgcacagctaatgaattaatt

SEQ ID NO: 56406 - DNA, 33 bp, Homo sapien
taaaaatgcaagtgcagagctaatgaattaatt

SEQ ID NO: 56407 - DNA, 33 bp, Homo sapien
ggctggcagccaggggaaaagaataaaaatgca

SEQ ID NO: 56408 - DNA, 33 bp, Homo sapien
ggctggcagccagggggaaagaataaaaatgca

SEQ ID NO: 56409 - DNA, 33 bp, Homo sapien
gaaggcaaagaaagccaataagttaaccctcta

SEQ ID NO: 56410 - DNA, 33 bp, Homo sapien
gaaggcaaagaaagccgataagttaaccctcta

SEQ ID NO: 56411 - DNA, 33 bp, Homo sapien
gggtagcgttttgccacctcctagagggttaac

SEQ ID NO: 56412 - DNA, 33 bp, Homo sapien
gggtagcgttttgccatctcctagagggttaac

SEQ ID NO: 56413 - DNA, 33 bp, Homo sapien
ctaggactcctatttacagaacttgaaggaaag

SEQ ID NO: 56414 - DNA, 33 bp, Homo sapien
ctaggactcctatttatagaacttgaaggaaag

SEQ ID NO: 56415 - DNA, 33 bp, Homo sapien
taccttctgaactaaaaacctttgtccgcaacc

SEQ ID NO: 56416 - DNA, 33 bp, Homo sapien
taccttctgaactaaacacctttgtccgcaacc

SEQ ID NO: 56417 - DNA, 33 bp, Homo sapien
acttggtcaatagcacaaatgacttctccagac

SEQ ID NO: 56418 - DNA, 33 bp, Homo sapien
acttggtcaatagcaccaatgacttctccagac

SEQ ID NO: 56419 - DNA, 33 bp, Homo sapien
aattgacttgctgtcaatcataactaccttttc

SEQ ID NO: 56420 - DNA, 33 bp, Homo sapien
aattgacttgctgtcagtcataactaccttttc

SEQ ID NO: 56421 - DNA, 33 bp, Homo sapien
tgcagcaataactacaatgagtcctagctcttg

SEQ ID NO: 56422 - DNA, 33 bp, Homo sapien
tgcagcaataactacagtgagtcctagctcttg

SEQ ID NO: 56423 - DNA, 33 bp, Homo sapien
tagctttgactgtggcaagaaaaggctgaagga

SEQ ID NO: 56424 - DNA, 33 bp, Homo sapien
tagctttgactgtggcgagaaaaggctgaagga

SEQ ID NO: 56425 - DNA, 33 bp, Homo sapien
cattcactcctctgtacgaatgcagactgggag

SEQ ID NO: 56426 - DNA, 33 bp, Homo sapien
cattcactcctctgtatgaatgcagactgggag

SEQ ID NO: 56427 - DNA, 33 bp, Homo sapien
aggaagaaagcatttaaccattgcatctctgac

SEQ ID NO: 56428 - DNA, 33 bp, Homo sapien
aggaagaaagcatttatccattgcatctctgac

SEQ ID NO: 56429 - DNA, 33 bp, Homo sapien
gtagggaactcatctcaaagtgtacttgcagag

SEQ ID NO: 56430 - DNA, 33 bp, Homo sapien
gtagggaactcatctcgaagtgtacttgcagag

SEQ ID NO: 56431 - DNA, 33 bp, Homo sapien
ctgaaaagtaaaggaaagcctctgaaaattcag

SEQ ID NO: 56432 - DNA, 33 bp, Homo sapien
ctgaaaagtaaaggaaggcctctgaaaattcag

SEQ ID NO: 56433 - DNA, 33 bp, Homo sapien
tctcacatggcttttaacattttatctccataa

SEQ ID NO: 56434 - DNA, 33 bp, Homo sapien
tctcacatggcttttagcattttatctccataa

SEQ ID NO: 56435 - DNA, 33 bp, Homo sapien
tggtctctgcagactgcaaggaataaatgaata

SEQ ID NO: 56436 - DNA, 33 bp, Homo sapien
tggtctctgcagactgtaaggaataaatgaata

SEQ ID NO: 56437 - DNA, 33 bp, Homo sapien
gagttttacctaagacacatgatcctggaaaac

SEQ ID NO: 56438 - DNA, 33 bp, Homo sapien
gagttttacctaagacccatgatcctggaaaac

SEQ ID NO: 56439 - DNA, 33 bp, Homo sapien
tggaaaaacaaagaacagacaagtaacagttga

SEQ ID NO: 56440 - DNA, 33 bp, Homo sapien
tggaaaaacaaagaaccgacaagtaacagttga

SEQ ID NO: 56441 - DNA, 33 bp, Homo sapien
ggctggttagatgacacgtggcttagagttcac

SEQ ID NO: 56442 - DNA, 33 bp, Homo sapien
ggctggttagatgacatgtggcttagagttcac

SEQ ID NO: 56443 - DNA, 33 bp, Homo sapien
gcatttctagattccaagggttctgttcagaag

SEQ ID NO: 56444 - DNA, 33 bp, Homo sapien
gcatttctagattccaggggttctgttcagaag

SEQ ID NO: 56445 - DNA, 33 bp, Homo sapien
tggctgaagcctttggaatattgataataacag

SEQ ID NO: 56446 - DNA, 33 bp, Homo sapien
tggctgaagcctttgggatattgataataacag

SEQ ID NO: 56447 - DNA, 33 bp, Homo sapien
gtttcactttctttcactatcaaagaatgttcc

SEQ ID NO: 56448 - DNA, 33 bp, Homo sapien
gtttcactttctttcagtatcaaagaatgttcc

SEQ ID NO: 56449 - DNA, 33 bp, Homo sapien
agcatcaatgcagacactacaaatcaacctggc

SEQ ID NO: 56450 - DNA, 33 bp, Homo sapien
agcatcaatgcagacagtacaaatcaacctggc

SEQ ID NO: 56451 - DNA, 33 bp, Homo sapien
cagagagtgcccataaatcaccaggagctagga

SEQ ID NO: 56452 - DNA, 33 bp, Homo sapien
cagagagtgcccataagtcaccaggagctagga

SEQ ID NO: 56453 - DNA, 33 bp, Homo sapien
gaccagaagactcctacgtcaattcttccccta

SEQ ID NO: 56454 - DNA, 33 bp, Homo sapien
gaccagaagactcctatgtcaattcttccccta

SEQ ID NO: 56455 - DNA, 33 bp, Homo sapien
ctcctctcctagcttacatggtggtacctctta

SEQ ID NO: 56456 - DNA, 33 bp, Homo sapien
ctcctctcctagcttatatggtggtacctctta

SEQ ID NO: 56457 - DNA, 33 bp, Homo sapien
acctgtagtgggactacctcttcacctcgtccc

SEQ ID NO: 56458 - DNA, 33 bp, Homo sapien
acctgtagtgggactatctcttcacctcgtccc

SEQ ID NO: 56459 - DNA, 33 bp, Homo sapien
agtgccagagaaacagaatatcatgaacgcaaa

SEQ ID NO: 56460 - DNA, 33 bp, Homo sapien
agtgccagagaaacaggatatcatgaacgcaaa

SEQ ID NO: 56461 - DNA, 33 bp, Homo sapien
atcctgcagagaccaaatacttctgtatatttg

SEQ ID NO: 56462 - DNA, 33 bp, Homo sapien
atcctgcagagaccaagtacttctgtatatttg

SEQ ID NO: 56463 - DNA, 33 bp, Homo sapien
gcattccacgctgaagaaagaggaaattcaaaa

SEQ ID NO: 56464 - DNA, 33 bp, Homo sapien
gcattccacgctgaaggaagaggaaattcaaaa

SEQ ID NO: 56465 - DNA, 33 bp, Homo sapien
attctgtggtcccagaactttatctgaatttaa

SEQ ID NO: 56466 - DNA, 33 bp, Homo sapien
attctgtggtcccagacctttatctgaatttaa

SEQ ID NO: 56467 - DNA, 33 bp, Homo sapien
gtaaatattctgaaagcatgtgctcaatgtttg

SEQ ID NO: 56468 - DNA, 33 bp, Homo sapien
gtaaatattctgaaaggatgtgctcaatgtttg

SEQ ID NO: 56469 - DNA, 33 bp, Homo sapien
gaatatttaccatgaactgtaagggcaatgagc

SEQ ID NO: 56470 - DNA, 33 bp, Homo sapien
gaatatttaccatgaattgtaagggcaatgagc

SEQ ID NO: 56471 - DNA, 33 bp, Homo sapien
tcctattttaggctcaatacttgcttttacata

SEQ ID NO: 56472 - DNA, 33 bp, Homo sapien
tcctattttaggctcagtacttgcttttacata

SEQ ID NO: 56473 - DNA, 33 bp, Homo sapien
tcagcaatacacaggcaatatcacagatggttg

SEQ ID NO: 56474 - DNA, 33 bp, Homo sapien
tcagcaatacacaggcgatatcacagatggttg

SEQ ID NO: 56475 - DNA, 33 bp, Homo sapien
atcacttaaacaatcacgatgcatcaaatgact

SEQ ID NO: 56476 - DNA, 33 bp, Homo sapien
atcacttaaacaatcaggatgcatcaaatgact

SEQ ID NO: 56477 - DNA, 33 bp, Homo sapien
cagggtcagtaaacaacttatgaaaatgtgcat

SEQ ID NO: 56478 - DNA, 33 bp, Homo sapien
cagggtcagtaaacaatttatgaaaatgtgcat

SEQ ID NO: 56479 - DNA, 33 bp, Homo sapien
atatggtccaggaatacagttttttgaagagcc

SEQ ID NO: 56480 - DNA, 33 bp, Homo sapien
atatggtccaggaatatagttttttgaagagcc

SEQ ID NO: 56481 - DNA, 33 bp, Homo sapien
aagaaagaaagtggaacaatacaagagaggggt

SEQ ID NO: 56482 - DNA, 33 bp, Homo sapien
aagaaagaaagtggaagaatacaagagaggggt

SEQ ID NO: 56483 - DNA, 33 bp, Homo sapien
aatgagtatcataacacattacaggtatcccaa

SEQ ID NO: 56484 - DNA, 33 bp, Homo sapien
aatgagtatcataacatattacaggtatcccaa

SEQ ID NO: 56485 - DNA, 33 bp, Homo sapien
agtcctcagcgtcaaaacagaagcatgggagtc

SEQ ID NO: 56486 - DNA, 33 bp, Homo sapien
agtcctcagcgtcaaagcagaagcatgggagtc

SEQ ID NO: 56487 - DNA, 33 bp, Homo sapien
aagtcaaaggaaagtaacacctcattcctgcac

SEQ ID NO: 56488 - DNA, 33 bp, Homo sapien
aagtcaaaggaaagtagcacctcattcctgcac

SEQ ID NO: 56489 - DNA, 33 bp, Homo sapien
gtgggtgaattcaagaacctctatgggagaata

SEQ ID NO: 56490 - DNA, 33 bp, Homo sapien
gtgggtgaattcaagaccctctatgggagaata

SEQ ID NO: 56491 - DNA, 33 bp, Homo sapien
cattctcaattacatcaacatttaggggggctt

SEQ ID NO: 56492 - DNA, 33 bp, Homo sapien
cattctcaattacatcgacatttaggggggctt

SEQ ID NO: 56493 - DNA, 33 bp, Homo sapien
aatcaatgaagaaaaactcaaagagattaaggt

SEQ ID NO: 56494 - DNA, 33 bp, Homo sapien
aatcaatgaagaaaaattcaaagagattaaggt

SEQ ID NO: 56495 - DNA, 33 bp, Homo sapien
agatgcagctccacacaggaacacaaagtgcca

SEQ ID NO: 56496 - DNA, 33 bp, Homo sapien
agatgcagctccacacgggaacacaaagtgcca

SEQ ID NO: 56497 - DNA, 33 bp, Homo sapien
gccacgatgctgagtgaagactggcatcaccat

SEQ ID NO: 56498 - DNA, 33 bp, Homo sapien
gccacgatgctgagtgtagactggcatcaccat

SEQ ID NO: 56499 - DNA, 33 bp, Homo sapien
aattagaaagaactgacagtgcagggcattttg

SEQ ID NO: 56500 - DNA, 33 bp, Homo sapien
aattagaaagaactgagagtgcagggcattttg

SEQ ID NO: 56501 - DNA, 33 bp, Homo sapien
aggccctgtttaatggacacctggttttagacc

SEQ ID NO: 56502 - DNA, 33 bp, Homo sapien
aggccctgtttaatgggcacctggttttagacc

SEQ ID NO: 56503 - DNA, 33 bp, Homo sapien
tttcctctctctgtcactcttgatcttccttct

SEQ ID NO: 56504 - DNA, 33 bp, Homo sapien
tttcctctctctgtcattcttgatcttccttct

SEQ ID NO: 56505 - DNA, 33 bp, Homo sapien
gaacagctcccaacaacgcatcagtgcaggagg

SEQ ID NO: 56506 - DNA, 33 bp, Homo sapien
gaacagctcccaacaatgcatcagtgcaggagg

SEQ ID NO: 56507 - DNA, 33 bp, Homo sapien
tggatgtgaccaaccccacaatctccaagtcag

SEQ ID NO: 56508 - DNA, 33 bp, Homo sapien
tggatgtgaccaaccctacaatctccaagtcag

SEQ ID NO: 56509 - DNA, 33 bp, Homo sapien
caggagatcagcttccaacagtgattaatttag

SEQ ID NO: 56510 - DNA, 33 bp, Homo sapien
caggagatcagcttccgacagtgattaatttag

SEQ ID NO: 56511 - DNA, 33 bp, Homo sapien
gcaccttggatttgtacagatgaaaacaatggg

SEQ ID NO: 56512 - DNA, 33 bp, Homo sapien
gcaccttggatttgtatagatgaaaacaatggg

SEQ ID NO: 56513 - DNA, 33 bp, Homo sapien
atcagcttcagagcctcaaacaggtactgactg

SEQ ID NO: 56514 - DNA, 33 bp, Homo sapien
atcagcttcagagccttaaacaggtactgactg

SEQ ID NO: 56515 - DNA, 33 bp, Homo sapien
attcctgtctcaagacgcatccaagcctcacct

SEQ ID NO: 56516 - DNA, 33 bp, Homo sapien
attcctgtctcaagactcatccaagcctcacct

SEQ ID NO: 56517 - DNA, 33 bp, Homo sapien
gaatgggtccactaacaggggagaggagaggaa

SEQ ID NO: 56518 - DNA, 33 bp, Homo sapien
gaatgggtccactaacgggggagaggagaggaa

SEQ ID NO: 56519 - DNA, 33 bp, Homo sapien
tggaaggcatagtcaacctgtggggggctgggc

SEQ ID NO: 56520 - DNA, 33 bp, Homo sapien
tggaaggcatagtcaatctgtggggggctgggc

SEQ ID NO: 56521 - DNA, 33 bp, Homo sapien
ggtgaggagcagcaagcaaatgtgagtaaatca

SEQ ID NO: 56522 - DNA, 33 bp, Homo sapien
ggtgaggagcagcaaggaaatgtgagtaaatca

SEQ ID NO: 56523 - DNA, 33 bp, Homo sapien
aagagagtcccagaaacattgatttttggatcc

SEQ ID NO: 56524 - DNA, 33 bp, Homo sapien
aagagagtcccagaaatattgatttttggatcc

SEQ ID NO: 56525 - DNA, 33 bp, Homo sapien
agggtccaaatcaaacagcatcattacccccac

SEQ ID NO: 56526 - DNA, 33 bp, Homo sapien
agggtccaaatcaaacggcatcattacccccac

SEQ ID NO: 56527 - DNA, 33 bp, Homo sapien
aaaagatgacaggaagacatcttaaaggtgtgt

SEQ ID NO: 56528 - DNA, 33 bp, Homo sapien
aaaagatgacaggaaggcatcttaaaggtgtgt

SEQ ID NO: 56529 - DNA, 33 bp, Homo sapien
agcataattagttcacccggatgcagagccttc

SEQ ID NO: 56530 - DNA, 33 bp, Homo sapien
agcataattagttcacgcggatgcagagccttc

SEQ ID NO: 56531 - DNA, 33 bp, Homo sapien
tccttcctgctattacgcctcttatcatctccc

SEQ ID NO: 56532 - DNA, 33 bp, Homo sapien
tccttcctgctattactcctcttatcatctccc

SEQ ID NO: 56533 - DNA, 33 bp, Homo sapien
tgggctcagagcttaacaaggagtttacacgta

SEQ ID NO: 56534 - DNA, 33 bp, Homo sapien
tgggctcagagcttaataaggagtttacacgta

SEQ ID NO: 56535 - DNA, 33 bp, Homo sapien
gccaagtacataaaaaatgcaatgagaaaaaag

SEQ ID NO: 56536 - DNA, 33 bp, Homo sapien
gccaagtacataaaaactgcaatgagaaaaaag

SEQ ID NO: 56537 - DNA, 33 bp, Homo sapien
caagatctgcatttgaagtttagacttttaaag

SEQ ID NO: 56538 - DNA, 33 bp, Homo sapien
caagatctgcatttgaggtttagacttttaaag

SEQ ID NO: 56539 - DNA, 33 bp, Homo sapien
ttgtgaatctttttagaaggtacacattgccta

SEQ ID NO: 56540 - DNA, 33 bp, Homo sapien
ttgtgaatctttttaggaggtacacattgccta

SEQ ID NO: 56541 - DNA, 33 bp, Homo sapien
gacagcatagtcattaagtacacagaatccctg

SEQ ID NO: 56542 - DNA, 33 bp, Homo sapien
gacagcatagtcattaggtacacagaatccctg

SEQ ID NO: 56543 - DNA, 33 bp, Homo sapien
atctacatgacaaaaactattttcaggcaatga

SEQ ID NO: 56544 - DNA, 33 bp, Homo sapien
atctacatgacaaaaattattttcaggcaatga

SEQ ID NO: 56545 - DNA, 33 bp, Homo sapien
ctgttccactgctttcactatttcttatgggag

SEQ ID NO: 56546 - DNA, 33 bp, Homo sapien
ctgttccactgctttcgctatttcttatgggag

SEQ ID NO: 56547 - DNA, 33 bp, Homo sapien
ctgcctgaaattcccaaaaaatgagttctctat

SEQ ID NO: 56548 - DNA, 33 bp, Homo sapien
ctgcctgaaattcccacaaaatgagttctctat

SEQ ID NO: 56549 - DNA, 33 bp, Homo sapien
agtgaaggggggttgggcatgagaacttagtgg

SEQ ID NO: 56550 - DNA, 33 bp, Homo sapien
agtgaaggggggttggtcatgagaacttagtgg

SEQ ID NO: 56551 - DNA, 33 bp, Homo sapien
agagaaatagatgtaaacctagtgccaaatgcc

SEQ ID NO: 56552 - DNA, 33 bp, Homo sapien
agagaaatagatgtaaccctagtgccaaatgcc

SEQ ID NO: 56553 - DNA, 33 bp, Homo sapien
attaccatccctgacactcactagttgtgtgat

SEQ ID NO: 56554 - DNA, 33 bp, Homo sapien
attaccatccctgacattcactagttgtgtgat

SEQ ID NO: 56555 - DNA, 33 bp, Homo sapien
ttacctgaatgcattacaacgtttcagctcttc

SEQ ID NO: 56556 - DNA, 33 bp, Homo sapien
ttacctgaatgcattataacgtttcagctcttc

SEQ ID NO: 56557 - DNA, 33 bp, Homo sapien
aaaaatgactaggataaaaaatacactctcaag

SEQ ID NO: 56558 - DNA, 33 bp, Homo sapien
aaaaatgactaggatataaaatacactctcaag

SEQ ID NO: 56559 - DNA, 33 bp, Homo sapien
ccgtgttaacagggaaaaaagcaggatgcattt

SEQ ID NO: 56560 - DNA, 33 bp, Homo sapien
ccgtgttaacagggaagaaagcaggatgcattt

SEQ ID NO: 56561 - DNA, 33 bp, Homo sapien
ctcacttggaatagcacagttggaaggtgtcaa

SEQ ID NO: 56562 - DNA, 33 bp, Homo sapien
ctcacttggaatagcagagttggaaggtgtcaa

SEQ ID NO: 56563 - DNA, 33 bp, Homo sapien
caccacactcttgacaccgatcacaggatacat

SEQ ID NO: 56564 - DNA, 33 bp, Homo sapien
caccacactcttgacagcgatcacaggatacat

SEQ ID NO: 56565 - DNA, 33 bp, Homo sapien
tgttagtacccgaaaagtaacagtgttgccact

SEQ ID NO: 56566 - DNA, 33 bp, Homo sapien
tgttagtacccgaaaattaacagtgttgccact

SEQ ID NO: 56567 - DNA, 33 bp, Homo sapien
aaaagaaaatggagccacagagattctctgttg

SEQ ID NO: 56568 - DNA, 33 bp, Homo sapien
aaaagaaaatggagccgcagagattctctgttg

SEQ ID NO: 56569 - DNA, 33 bp, Homo sapien
caagtgtgcaatgacaggcatctaccattacag

SEQ ID NO: 56570 - DNA, 33 bp, Homo sapien
caagtgtgcaatgacatgcatctaccattacag

SEQ ID NO: 56571 - DNA, 33 bp, Homo sapien
tgaatataagaagaggaatgaaagctggacagt

SEQ ID NO: 56572 - DNA, 33 bp, Homo sapien
tgaatataagaagagggatgaaagctggacagt

SEQ ID NO: 56573 - DNA, 33 bp, Homo sapien
gtgaaggtgtacaagtaaagtgcctggatcctc

SEQ ID NO: 56574 - DNA, 33 bp, Homo sapien
gtgaaggtgtacaagtgaagtgcctggatcctc

SEQ ID NO: 56575 - DNA, 33 bp, Homo sapien
gagttgggatggaacaatattcagtcagacgat

SEQ ID NO: 56576 - DNA, 33 bp, Homo sapien
gagttgggatggaacagtattcagtcagacgat

SEQ ID NO: 56577 - DNA, 33 bp, Homo sapien
ctgtttacagatgacacgattctaaatctagaa

SEQ ID NO: 56578 - DNA, 33 bp, Homo sapien
ctgtttacagatgacatgattctaaatctagaa

SEQ ID NO: 56579 - DNA, 33 bp, Homo sapien
ttgatccatggagcaaacattgagaagtaacaa

SEQ ID NO: 56580 - DNA, 33 bp, Homo sapien
ttgatccatggagcaagcattgagaagtaacaa

SEQ ID NO: 56581 - DNA, 33 bp, Homo sapien
tcttattcactcatcaaccagcaagccccagac

SEQ ID NO: 56582 - DNA, 33 bp, Homo sapien
tcttattcactcatcagccagcaagccccagac

SEQ ID NO: 56583 - DNA, 33 bp, Homo sapien
agattgggctctcaaccggcatgtccttgcaga

SEQ ID NO: 56584 - DNA, 33 bp, Homo sapien
agattgggctctcaactggcatgtccttgcaga

SEQ ID NO: 56585 - DNA, 33 bp, Homo sapien
ccctgtgaaaaggaaccaagtcaggtttgtatt

SEQ ID NO: 56586 - DNA, 33 bp, Homo sapien
ccctgtgaaaaggaacgaagtcaggtttgtatt

SEQ ID NO: 56587 - DNA, 33 bp, Homo sapien
agcctggctgccactagggctccgagagttctc

SEQ ID NO: 56588 - DNA, 33 bp, Homo sapien
agcctggctgccactatggctccgagagttctc

SEQ ID NO: 56589 - DNA, 33 bp, Homo sapien
caggagagggtattcaaactttcacatcattgc

SEQ ID NO: 56590 - DNA, 33 bp, Homo sapien
caggagagggtattcagactttcacatcattgc

SEQ ID NO: 56591 - DNA, 33 bp, Homo sapien
aaaccactaggtagcactgattttggaggtcaa

SEQ ID NO: 56592 - DNA, 33 bp, Homo sapien
aaaccactaggtagcattgattttggaggtcaa

SEQ ID NO: 56593 - DNA, 33 bp, Homo sapien
ttgggtggaagtttgcagaaccaaattactcag

SEQ ID NO: 56594 - DNA, 33 bp, Homo sapien
ttgggtggaagtttgcggaaccaaattactcag

SEQ ID NO: 56595 - DNA, 33 bp, Homo sapien
aaatccagagcaacaaattctcaggacaccagc

SEQ ID NO: 56596 - DNA, 33 bp, Homo sapien
aaatccagagcaacaacttctcaggacaccagc

SEQ ID NO: 56597 - DNA, 33 bp, Homo sapien
ggggagtttgactttcaagatgatgatactgaa

SEQ ID NO: 56598 - DNA, 33 bp, Homo sapien
ggggagtttgactttcgagatgatgatactgaa

SEQ ID NO: 56599 - DNA, 33 bp, Homo sapien
tgggttaagataagcaagtgtggagatcaaggt

SEQ ID NO: 56600 - DNA, 33 bp, Homo sapien
tgggttaagataagcaggtgtggagatcaaggt

SEQ ID NO: 56601 - DNA, 33 bp, Homo sapien
gtgaaaaagtcagccaaattatgctggattaat

SEQ ID NO: 56602 - DNA, 33 bp, Homo sapien
gtgaaaaagtcagccacattatgctggattaat

SEQ ID NO: 56603 - DNA, 33 bp, Homo sapien
ccatgagaaaggactcagagcctccagaatttc

SEQ ID NO: 56604 - DNA, 33 bp, Homo sapien
ccatgagaaaggactcggagcctccagaatttc

SEQ ID NO: 56605 - DNA, 33 bp, Homo sapien
ccattaaatagagatcaaggatttcaccttatg

SEQ ID NO: 56606 - DNA, 33 bp, Homo sapien
ccattaaatagagatccaggatttcaccttatg

SEQ ID NO: 56607 - DNA, 33 bp, Homo sapien
ggcaaaattacagaaacggagaacaggttagta

SEQ ID NO: 56608 - DNA, 33 bp, Homo sapien
ggcaaaattacagaaatggagaacaggttagta

SEQ ID NO: 56609 - DNA, 33 bp, Homo sapien
ctccgagaccttttagaccaccctgaagaacac

SEQ ID NO: 56610 - DNA, 33 bp, Homo sapien
ctccgagaccttttaggccaccctgaagaacac

SEQ ID NO: 56611 - DNA, 33 bp, Homo sapien
gctcagtgaatgcccacacaattcagtcatcaa

SEQ ID NO: 56612 - DNA, 33 bp, Homo sapien
gctcagtgaatgcccatacaattcagtcatcaa

SEQ ID NO: 56613 - DNA, 33 bp, Homo sapien
aggatttccagaatgaagcccctaaaatcagta

SEQ ID NO: 56614 - DNA, 33 bp, Homo sapien
aggatttccagaatgaggcccctaaaatcagta

SEQ ID NO: 56615 - DNA, 33 bp, Homo sapien
agggaatcaagcagagaatgaatacagtggaga

SEQ ID NO: 56616 - DNA, 33 bp, Homo sapien
agggaatcaagcagaggatgaatacagtggaga

SEQ ID NO: 56617 - DNA, 33 bp, Homo sapien
gcaaaaggggagagagaaaagcagtaacatagc

SEQ ID NO: 56618 - DNA, 33 bp, Homo sapien
gcaaaaggggagagaggaaagcagtaacatagc

SEQ ID NO: 56619 - DNA, 33 bp, Homo sapien
gattcaagaaactgacaaagaggcccagaggct

SEQ ID NO: 56620 - DNA, 33 bp, Homo sapien
gattcaagaaactgacgaagaggcccagaggct

SEQ ID NO: 56621 - DNA, 33 bp, Homo sapien
tttcttatggttatagaccctttcagcacaacc

SEQ ID NO: 56622 - DNA, 33 bp, Homo sapien
tttcttatggttataggccctttcagcacaacc

SEQ ID NO: 56623 - DNA, 33 bp, Homo sapien
tataggctttacattcccctcaacaatatagta

SEQ ID NO: 56624 - DNA, 33 bp, Homo sapien
tataggctttacattctcctcaacaatatagta

SEQ ID NO: 56625 - DNA, 33 bp, Homo sapien
agcttcttcacttcaccctgggaccatttctag

SEQ ID NO: 56626 - DNA, 33 bp, Homo sapien
agcttcttcacttcactctgggaccatttctag

SEQ ID NO: 56627 - DNA, 33 bp, Homo sapien
aaaacattttaaagacaagaatagcagtgatcc

SEQ ID NO: 56628 - DNA, 33 bp, Homo sapien
aaaacattttaaagacgagaatagcagtgatcc

SEQ ID NO: 56629 - DNA, 33 bp, Homo sapien
gggaaagaagcgtcaagaacttgaacagaaatc

SEQ ID NO: 56630 - DNA, 33 bp, Homo sapien
gggaaagaagcgtcaataacttgaacagaaatc

SEQ ID NO: 56631 - DNA, 33 bp, Homo sapien
ttttcttgacaaacaaccttatctcttgcctgc

SEQ ID NO: 56632 - DNA, 33 bp, Homo sapien
ttttcttgacaaacaatcttatctcttgcctgc

SEQ ID NO: 56633 - DNA, 33 bp, Homo sapien
gggtagagattcctcaagaatagcttggtgtct

SEQ ID NO: 56634 - DNA, 33 bp, Homo sapien
gggtagagattcctcaggaatagcttggtgtct

SEQ ID NO: 56635 - DNA, 33 bp, Homo sapien
agtttgtctaaataaacgccagtctggtcagaa

SEQ ID NO: 56636 - DNA, 33 bp, Homo sapien
agtttgtctaaataaatgccagtctggtcagaa

SEQ ID NO: 56637 - DNA, 33 bp, Homo sapien
ccctgcccaacattaccgaggtttaacaggaaa

SEQ ID NO: 56638 - DNA, 33 bp, Homo sapien
ccctgcccaacattactgaggtttaacaggaaa

SEQ ID NO: 56639 - DNA, 33 bp, Homo sapien
ctttatattttgtttacattgatatgtgtaatt

SEQ ID NO: 56640 - DNA, 33 bp, Homo sapien
ctttatattttgtttatattgatatgtgtaatt

SEQ ID NO: 56641 - DNA, 33 bp, Homo sapien
aaacagacttaaaatgccatagaggtcaggcca

SEQ ID NO: 56642 - DNA, 33 bp, Homo sapien
aaacagacttaaaatgtcatagaggtcaggcca

SEQ ID NO: 56643 - DNA, 33 bp, Homo sapien
gataagaaaggcttcacagattaggtcacaaat

SEQ ID NO: 56644 - DNA, 33 bp, Homo sapien
gataagaaaggcttcatagattaggtcacaaat

SEQ ID NO: 56645 - DNA, 33 bp, Homo sapien
ttaaaagtgaaattgacgctcagatttgcccaa

SEQ ID NO: 56646 - DNA, 33 bp, Homo sapien
ttaaaagtgaaattgaggctcagatttgcccaa

SEQ ID NO: 56647 - DNA, 33 bp, Homo sapien
ttcaggatgaagcccaaacatgtgataagctta

SEQ ID NO: 56648 - DNA, 33 bp, Homo sapien
ttcaggatgaagcccagacatgtgataagctta

SEQ ID NO: 56649 - DNA, 33 bp, Homo sapien
gtgataagtaaggtgaagtttcatttaggaccc

SEQ ID NO: 56650 - DNA, 33 bp, Homo sapien
gtgataagtaaggtgatgtttcatttaggaccc

SEQ ID NO: 56651 - DNA, 33 bp, Homo sapien
atcattttctctcttcacagtcgcttggtttgg

SEQ ID NO: 56652 - DNA, 33 bp, Homo sapien
atcattttctctcttcgcagtcgcttggtttgg

SEQ ID NO: 56653 - DNA, 33 bp, Homo sapien
atatacattttagaatcaagttgctagtaccta

SEQ ID NO: 56654 - DNA, 33 bp, Homo sapien
atatacattttagaatgaagttgctagtaccta

SEQ ID NO: 56655 - DNA, 33 bp, Homo sapien
gtgtaacacctatgcaataccaaatgctttttt

SEQ ID NO: 56656 - DNA, 33 bp, Homo sapien
gtgtaacacctatgcagtaccaaatgctttttt

SEQ ID NO: 56657 - DNA, 33 bp, Homo sapien
atgatcagcaagagagaagtgaataacgctgaa

SEQ ID NO: 56658 - DNA, 33 bp, Homo sapien
atgatcagcaagagaggagtgaataacgctgaa

SEQ ID NO: 56659 - DNA, 33 bp, Homo sapien
gcaaaatgttttagtaagtgaatgattaatgaa

SEQ ID NO: 56660 - DNA, 33 bp, Homo sapien
gcaaaatgttttagtaggtgaatgattaatgaa

SEQ ID NO: 56661 - DNA, 33 bp, Homo sapien
tacaaattgtaacaaactgatatgggagagggg

SEQ ID NO: 56662 - DNA, 33 bp, Homo sapien
tacaaattgtaacaaattgatatgggagagggg

SEQ ID NO: 56663 - DNA, 33 bp, Homo sapien
ttactttggagcaacagattagcattcttactt

SEQ ID NO: 56664 - DNA, 33 bp, Homo sapien
ttactttggagcaacatattagcattcttactt

SEQ ID NO: 56665 - DNA, 33 bp, Homo sapien
ctcctgaatccaagtaacacgtctggcctgttc

SEQ ID NO: 56666 - DNA, 33 bp, Homo sapien
ctcctgaatccaagtatcacgtctggcctgttc

SEQ ID NO: 56667 - DNA, 33 bp, Homo sapien
ggcaataaacttgaaaaatgttagcatataaat

SEQ ID NO: 56668 - DNA, 33 bp, Homo sapien
ggcaataaacttgaaagatgttagcatataaat

SEQ ID NO: 56669 - DNA, 33 bp, Homo sapien
gagtgaagcagtgcttgaaaatatgactcttac

SEQ ID NO: 56670 - DNA, 33 bp, Homo sapien
gagtgaagcagtgctttaaaatatgactcttac

SEQ ID NO: 56671 - DNA, 33 bp, Homo sapien
agcaaaacttttatggaactggcttctgtgtta

SEQ ID NO: 56672 - DNA, 33 bp, Homo sapien
agcaaaacttttatggtactggcttctgtgtta

SEQ ID NO: 56673 - DNA, 33 bp, Homo sapien
ttcaggtttcagtcaaccatacagacactttta

SEQ ID NO: 56674 - DNA, 33 bp, Homo sapien
ttcaggtttcagtcaatcatacagacactttta

SEQ ID NO: 56675 - DNA, 33 bp, Homo sapien
cactgaggtctaggatcatcaggagagcatgca

SEQ ID NO: 56676 - DNA, 33 bp, Homo sapien
cactgaggtctaggatgatcaggagagcatgca

SEQ ID NO: 56677 - DNA, 33 bp, Homo sapien
taaaaaaacctccagaagtgtagactatctttt

SEQ ID NO: 56678 - DNA, 33 bp, Homo sapien
taaaaaaacctccagaggtgtagactatctttt

SEQ ID NO: 56679 - DNA, 33 bp, Homo sapien
ttaaataagccttacacaaaaaactatcaacaa

SEQ ID NO: 56680 - DNA, 33 bp, Homo sapien
ttaaataagccttacataaaaaactatcaacaa

SEQ ID NO: 56681 - DNA, 33 bp, Homo sapien
gaattctttatatggtgaagttcttcaaaggct

SEQ ID NO: 56682 - DNA, 33 bp, Homo sapien
gaattctttatatggttaagttcttcaaaggct

SEQ ID NO: 56683 - DNA, 33 bp, Homo sapien
gccaggaagagttagcaagtagaatactataat

SEQ ID NO: 56684 - DNA, 33 bp, Homo sapien
gccaggaagagttagcgagtagaatactataat

SEQ ID NO: 56685 - DNA, 33 bp, Homo sapien
aaaactatatcctaccgaaggctttattatcta

SEQ ID NO: 56686 - DNA, 33 bp, Homo sapien
aaaactatatcctacctaaggctttattatcta

SEQ ID NO: 56687 - DNA, 33 bp, Homo sapien
ctcacatggtgaatgaagatttctctctcagca

SEQ ID NO: 56688 - DNA, 33 bp, Homo sapien
ctcacatggtgaatgaggatttctctctcagca

SEQ ID NO: 56689 - DNA, 33 bp, Homo sapien
cagggcacaagctggacgcagcaaatgggcaaa

SEQ ID NO: 56690 - DNA, 33 bp, Homo sapien
cagggcacaagctggaggcagcaaatgggcaaa

SEQ ID NO: 56691 - DNA, 33 bp, Homo sapien
ccaacctatccccacaagtgagtaattagtgct

SEQ ID NO: 56692 - DNA, 33 bp, Homo sapien
ccaacctatccccacaggtgagtaattagtgct

SEQ ID NO: 56693 - DNA, 33 bp, Homo sapien
gatggagaatctaataaaggacagtagtattta

SEQ ID NO: 56694 - DNA, 33 bp, Homo sapien
gatggagaatctaatacaggacagtagtattta

SEQ ID NO: 56695 - DNA, 33 bp, Homo sapien
agaagagtacaccatgccagtagtcatcaaaaa

SEQ ID NO: 56696 - DNA, 33 bp, Homo sapien
agaagagtacaccatgtcagtagtcatcaaaaa

SEQ ID NO: 56697 - DNA, 33 bp, Homo sapien
caaaccaaatagaaaacctttaaagcagctata

SEQ ID NO: 56698 - DNA, 33 bp, Homo sapien
caaaccaaatagaaaatctttaaagcagctata

SEQ ID NO: 56699 - DNA, 33 bp, Homo sapien
aggaaggcatagattaccaacgacgattactcc

SEQ ID NO: 56700 - DNA, 33 bp, Homo sapien
aggaaggcatagattagcaacgacgattactcc

SEQ ID NO: 56701 - DNA, 33 bp, Homo sapien
atgggtccagaaaatacagccttgttgtctagc

SEQ ID NO: 56702 - DNA, 33 bp, Homo sapien
atgggtccagaaaatatagccttgttgtctagc

SEQ ID NO: 56703 - DNA, 33 bp, Homo sapien
aaccttgctagaaaggccaatagtcaaattcag

SEQ ID NO: 56704 - DNA, 33 bp, Homo sapien
aaccttgctagaaaggtcaatagtcaaattcag

SEQ ID NO: 56705 - DNA, 33 bp, Homo sapien
aatgctaaatgatcacaagtgccagagagtagt

SEQ ID NO: 56706 - DNA, 33 bp, Homo sapien
aatgctaaatgatcacgagtgccagagagtagt

SEQ ID NO: 56707 - DNA, 33 bp, Homo sapien
aggggctgaggggaccaatattttggcacattt

SEQ ID NO: 56708 - DNA, 33 bp, Homo sapien
aggggctgaggggaccgatattttggcacattt

SEQ ID NO: 56709 - DNA, 33 bp, Homo sapien
gcttcagtgcctcacaacagtaacaagggtatt

SEQ ID NO: 56710 - DNA, 33 bp, Homo sapien
gcttcagtgcctcacagcagtaacaagggtatt

SEQ ID NO: 56711 - DNA, 33 bp, Homo sapien
ttctaaggaatcagacaatgacttactgcttca

SEQ ID NO: 56712 - DNA, 33 bp, Homo sapien
ttctaaggaatcagacgatgacttactgcttca

SEQ ID NO: 56713 - DNA, 33 bp, Homo sapien
tagtgctgtaataagaactcatttttttcttct

SEQ ID NO: 56714 - DNA, 33 bp, Homo sapien
tagtgctgtaataagagctcatttttttcttct

SEQ ID NO: 56715 - DNA, 33 bp, Homo sapien
ccagttttgcagaatacaccccaatgggctata

SEQ ID NO: 56716 - DNA, 33 bp, Homo sapien
ccagttttgcagaatataccccaatgggctata

SEQ ID NO: 56717 - DNA, 33 bp, Homo sapien
cactggaagtattttgaagaagtatcactgctc

SEQ ID NO: 56718 - DNA, 33 bp, Homo sapien
cactggaagtattttgtagaagtatcactgctc

SEQ ID NO: 56719 - DNA, 33 bp, Homo sapien
tgtactgatcgacataagtctgcacactcttcg

SEQ ID NO: 56720 - DNA, 33 bp, Homo sapien
tgtactgatcgacatacgtctgcacactcttcg

SEQ ID NO: 56721 - DNA, 33 bp, Homo sapien
taaggttcttaaaccaagaagttagagcttaac

SEQ ID NO: 56722 - DNA, 33 bp, Homo sapien
taaggttcttaaaccatgaagttagagcttaac

SEQ ID NO: 56723 - DNA, 33 bp, Homo sapien
atgaccaggagagtccaagggatagtcataaag

SEQ ID NO: 56724 - DNA, 33 bp, Homo sapien
atgaccaggagagtccgagggatagtcataaag

SEQ ID NO: 56725 - DNA, 33 bp, Homo sapien
tttataccctgaggaaaaaaagaagtaagtaat

SEQ ID NO: 56726 - DNA, 33 bp, Homo sapien
tttataccctgaggaagaaaagaagtaagtaat

SEQ ID NO: 56727 - DNA, 33 bp, Homo sapien
aacacagacaagaataaccatatcagacatcaa

SEQ ID NO: 56728 - DNA, 33 bp, Homo sapien
aacacagacaagaatagccatatcagacatcaa

SEQ ID NO: 56729 - DNA, 33 bp, Homo sapien
gacaatataatctgataagttacagtactaccg

SEQ ID NO: 56730 - DNA, 33 bp, Homo sapien
gacaatataatctgatgagttacagtactaccg

SEQ ID NO: 56731 - DNA, 33 bp, Homo sapien
aagtcctggtaactaaagtgcagaatacagcct

SEQ ID NO: 56732 - DNA, 33 bp, Homo sapien
aagtcctggtaactaacgtgcagaatacagcct

SEQ ID NO: 56733 - DNA, 33 bp, Homo sapien
actctctaaaactggggcaatgagtgtttcagt

SEQ ID NO: 56734 - DNA, 33 bp, Homo sapien
actctctaaaactgggtcaatgagtgtttcagt

SEQ ID NO: 56735 - DNA, 33 bp, Homo sapien
gccaggtcattgtccaccatatatcttcccgca

SEQ ID NO: 56736 - DNA, 33 bp, Homo sapien
gccaggtcattgtccatcatatatcttcccgca

SEQ ID NO: 56737 - DNA, 33 bp, Homo sapien
ctctgaacccaaaccaaggatatttttagagga

SEQ ID NO: 56738 - DNA, 33 bp, Homo sapien
ctctgaacccaaaccagggatatttttagagga

SEQ ID NO: 56739 - DNA, 33 bp, Homo sapien
catggctgaaaagggacagtgtgtttggatatg

SEQ ID NO: 56740 - DNA, 33 bp, Homo sapien
catggctgaaaagggatagtgtgtttggatatg

SEQ ID NO: 56741 - DNA, 33 bp, Homo sapien
ttattggtttttttgccacagtattcctgttca

SEQ ID NO: 56742 - DNA, 33 bp, Homo sapien
ttattggtttttttgcgacagtattcctgttca

SEQ ID NO: 56743 - DNA, 33 bp, Homo sapien
tgagccacttgtaggccatcaacaggtttgcta

SEQ ID NO: 56744 - DNA, 33 bp, Homo sapien
tgagccacttgtaggctatcaacaggtttgcta

SEQ ID NO: 56745 - DNA, 33 bp, Homo sapien
agtgctttttcagttaacatggtgtttttcaat

SEQ ID NO: 56746 - DNA, 33 bp, Homo sapien
agtgctttttcagttagcatggtgtttttcaat

SEQ ID NO: 56747 - DNA, 33 bp, Homo sapien
gcagaggaagctgccaacaacttggtagggatt

SEQ ID NO: 56748 - DNA, 33 bp, Homo sapien
gcagaggaagctgccagcaacttggtagggatt

SEQ ID NO: 56749 - DNA, 33 bp, Homo sapien
tatagcacatcaatctgaaagcatagaaagtta

SEQ ID NO: 56750 - DNA, 33 bp, Homo sapien
tatagcacatcaatcttaaagcatagaaagtta

SEQ ID NO: 56751 - DNA, 33 bp, Homo sapien
atggcactgatgatcacgtacgaggaggaatga

SEQ ID NO: 56752 - DNA, 33 bp, Homo sapien
atggcactgatgatcatgtacgaggaggaatga

SEQ ID NO: 56753 - DNA, 33 bp, Homo sapien
gatgggttggaccaggaaggtagtagtggatgt

SEQ ID NO: 56754 - DNA, 33 bp, Homo sapien
gatgggttggaccagggaggtagtagtggatgt

SEQ ID NO: 56755 - DNA, 33 bp, Homo sapien
gaactgcaaagcaaacagaaaaatggctgaaaa

SEQ ID NO: 56756 - DNA, 33 bp, Homo sapien
gaactgcaaagcaaaccgaaaaatggctgaaaa

SEQ ID NO: 56757 - DNA, 33 bp, Homo sapien
tttaagaaacgaccaaaaagaaatgctagaaat

SEQ ID NO: 56758 - DNA, 33 bp, Homo sapien
tttaagaaacgaccaagaagaaatgctagaaat

SEQ ID NO: 56759 - DNA, 33 bp, Homo sapien
atgagtctctatattcacctatcagtctctcca

SEQ ID NO: 56760 - DNA, 33 bp, Homo sapien
atgagtctctatattcgcctatcagtctctcca

SEQ ID NO: 56761 - DNA, 33 bp, Homo sapien
cttttaaggaattaatcatgggcagacaaatat

SEQ ID NO: 56762 - DNA, 33 bp, Homo sapien
cttttaaggaattaatgatgggcagacaaatat

SEQ ID NO: 56763 - DNA, 33 bp, Homo sapien
tttggaagaaaatgcacggcaacatataaccta

SEQ ID NO: 56764 - DNA, 33 bp, Homo sapien
tttggaagaaaatgcatggcaacatataaccta

SEQ ID NO: 56765 - DNA, 33 bp, Homo sapien
tgcctcactctccaaacaacttgaatgagttac

SEQ ID NO: 56766 - DNA, 33 bp, Homo sapien
tgcctcactctccaaataacttgaatgagttac

SEQ ID NO: 56767 - DNA, 33 bp, Homo sapien
catgggacttgtccacggtcacattactcaaga

SEQ ID NO: 56768 - DNA, 33 bp, Homo sapien
catgggacttgtccactgtcacattactcaaga

SEQ ID NO: 56769 - DNA, 33 bp, Homo sapien
tgtgaggtagtaaatacgctgtccccagaaaca

SEQ ID NO: 56770 - DNA, 33 bp, Homo sapien
tgtgaggtagtaaatatgctgtccccagaaaca

SEQ ID NO: 56771 - DNA, 33 bp, Homo sapien
tgaaagataagcacccaatttcattcttctgtg

SEQ ID NO: 56772 - DNA, 33 bp, Homo sapien
tgaaagataagcaccccatttcattcttctgtg

SEQ ID NO: 56773 - DNA, 33 bp, Homo sapien
ttttctaaatagagaaccgtatcatcagtgaag

SEQ ID NO: 56774 - DNA, 33 bp, Homo sapien
ttttctaaatagagaatcgtatcatcagtgaag

SEQ ID NO: 56775 - DNA, 33 bp, Homo sapien
aggaagagatcacagtaaatacgttggcctctg

SEQ ID NO: 56776 - DNA, 33 bp, Homo sapien
aggaagagatcacagtgaatacgttggcctctg

SEQ ID NO: 56777 - DNA, 33 bp, Homo sapien
atatattttaattctcccagttttactgatgtt

SEQ ID NO: 56778 - DNA, 33 bp, Homo sapien
atatattttaattctctcagttttactgatgtt

SEQ ID NO: 56779 - DNA, 33 bp, Homo sapien
ttcaactcattctcagactctgtagtctccagg

SEQ ID NO: 56780 - DNA, 33 bp, Homo sapien
ttcaactcattctcagtctctgtagtctccagg

SEQ ID NO: 56781 - DNA, 33 bp, Homo sapien
cagaaaccagagataacctgacagtctctgggc

SEQ ID NO: 56782 - DNA, 33 bp, Homo sapien
cagaaaccagagataatctgacagtctctgggc

SEQ ID NO: 56783 - DNA, 33 bp, Homo sapien
taattcttgcctttcaaatttttgtgaggaata

SEQ ID NO: 56784 - DNA, 33 bp, Homo sapien
taattcttgcctttcatatttttgtgaggaata

SEQ ID NO: 56785 - DNA, 33 bp, Homo sapien
ccaagttagattttccgctgaacaaggtctcat

SEQ ID NO: 56786 - DNA, 33 bp, Homo sapien
ccaagttagattttcctctgaacaaggtctcat

SEQ ID NO: 56787 - DNA, 33 bp, Homo sapien
cccttttcctttcacccacatgctaattccatg

SEQ ID NO: 56788 - DNA, 33 bp, Homo sapien
cccttttcctttcacctacatgctaattccatg

SEQ ID NO: 56789 - DNA, 33 bp, Homo sapien
ttcctcaatggtcaaaatttctcatggtttcat

SEQ ID NO: 56790 - DNA, 33 bp, Homo sapien
ttcctcaatggtcaaagtttctcatggtttcat

SEQ ID NO: 56791 - DNA, 33 bp, Homo sapien
caacatttttcagtgacaatttgaggcacatta

SEQ ID NO: 56792 - DNA, 33 bp, Homo sapien
caacatttttcagtgataatttgaggcacatta

SEQ ID NO: 56793 - DNA, 33 bp, Homo sapien
agtgggactttccctaactgctactgttggctg

SEQ ID NO: 56794 - DNA, 33 bp, Homo sapien
agtgggactttccctacctgctactgttggctg

SEQ ID NO: 56795 - DNA, 33 bp, Homo sapien
ccccccttcttcttcaataatccctcccctcac

SEQ ID NO: 56796 - DNA, 33 bp, Homo sapien
ccccccttcttcttcagtaatccctcccctcac

SEQ ID NO: 56797 - DNA, 33 bp, Homo sapien
ttctgcaaggactaaaatacagcaagaggagag

SEQ ID NO: 56798 - DNA, 33 bp, Homo sapien
ttctgcaaggactaaagtacagcaagaggagag

SEQ ID NO: 56799 - DNA, 33 bp, Homo sapien
ggtaattcctccagagccaaatgcatgtctgat

SEQ ID NO: 56800 - DNA, 33 bp, Homo sapien
ggtaattcctccagaggcaaatgcatgtctgat

SEQ ID NO: 56801 - DNA, 33 bp, Homo sapien
tccaggcaggaccagtcactctcagtagccagg

SEQ ID NO: 56802 - DNA, 33 bp, Homo sapien
tccaggcaggaccagttactctcagtagccagg

SEQ ID NO: 56803 - DNA, 33 bp, Homo sapien
gatatcaggcctaaagcaggtgcattggattta

SEQ ID NO: 56804 - DNA, 33 bp, Homo sapien
gatatcaggcctaaagtaggtgcattggattta

SEQ ID NO: 56805 - DNA, 33 bp, Homo sapien
aggaggagagtttgcacggactagaatgggtaa

SEQ ID NO: 56806 - DNA, 33 bp, Homo sapien
aggaggagagtttgcatggactagaatgggtaa

SEQ ID NO: 56807 - DNA, 33 bp, Homo sapien
tcttcttttgaatttaacttgtaatcacataac

SEQ ID NO: 56808 - DNA, 33 bp, Homo sapien
tcttcttttgaatttatcttgtaatcacataac

SEQ ID NO: 56809 - DNA, 33 bp, Homo sapien
ctgacggtccgtgcccagaatcttcatctcgag

SEQ ID NO: 56810 - DNA, 33 bp, Homo sapien
ctgacggtccgtgcccggaatcttcatctcgag

SEQ ID NO: 56811 - DNA, 33 bp, Homo sapien
tctaaggaattgacacaggttaagtaaggacta

SEQ ID NO: 56812 - DNA, 33 bp, Homo sapien
tctaaggaattgacacgggttaagtaaggacta

SEQ ID NO: 56813 - DNA, 33 bp, Homo sapien
agagtgtcatgtgacgcatcattgtttgagagg

SEQ ID NO: 56814 - DNA, 33 bp, Homo sapien
agagtgtcatgtgacgtatcattgtttgagagg

SEQ ID NO: 56815 - DNA, 33 bp, Homo sapien
gttgacagctggcaaaacctgccttgtacttct

SEQ ID NO: 56816 - DNA, 33 bp, Homo sapien
gttgacagctggcaaatcctgccttgtacttct

SEQ ID NO: 56817 - DNA, 33 bp, Homo sapien
gaggggctaatgggaacagcatacaacagaaaa

SEQ ID NO: 56818 - DNA, 33 bp, Homo sapien
gaggggctaatgggaagagcatacaacagaaaa

SEQ ID NO: 56819 - DNA, 33 bp, Homo sapien
catttagaatagctacagaagcaataaaatacc

SEQ ID NO: 56820 - DNA, 33 bp, Homo sapien
catttagaatagctacggaagcaataaaatacc

SEQ ID NO: 56821 - DNA, 33 bp, Homo sapien
ttttatacgtttgggcaactctcatactataac

SEQ ID NO: 56822 - DNA, 33 bp, Homo sapien
ttttatacgtttgggcgactctcatactataac

SEQ ID NO: 56823 - DNA, 33 bp, Homo sapien
tgggattgctggattaagtccatttttgagtaa

SEQ ID NO: 56824 - DNA, 33 bp, Homo sapien
tgggattgctggattaggtccatttttgagtaa

SEQ ID NO: 56825 - DNA, 33 bp, Homo sapien
tatcccattagtaccacctttcacatgtgtgcc

SEQ ID NO: 56826 - DNA, 33 bp, Homo sapien
tatcccattagtaccatctttcacatgtgtgcc

SEQ ID NO: 56827 - DNA, 33 bp, Homo sapien
gctgtctggacatcaaatctccagctgtcctcc

SEQ ID NO: 56828 - DNA, 33 bp, Homo sapien
gctgtctggacatcaagtctccagctgtcctcc

SEQ ID NO: 56829 - DNA, 33 bp, Homo sapien
tgagataatatcttacaccagctaaaacggctt

SEQ ID NO: 56830 - DNA, 33 bp, Homo sapien
tgagataatatcttaccccagctaaaacggctt

SEQ ID NO: 56831 - DNA, 33 bp, Homo sapien
ggttaccatataatgaaaaaggggacaattgag

SEQ ID NO: 56832 - DNA, 33 bp, Homo sapien
ggttaccatataatgacaaaggggacaattgag

SEQ ID NO: 56833 - DNA, 33 bp, Homo sapien
gcttaaagtaacagacaaagtgactaagaagtg

SEQ ID NO: 56834 - DNA, 33 bp, Homo sapien
gcttaaagtaacagactaagtgactaagaagtg

SEQ ID NO: 56835 - DNA, 33 bp, Homo sapien
attatgtggagatacaaaatgaatatcagctac

SEQ ID NO: 56836 - DNA, 33 bp, Homo sapien
attatgtggagatacagaatgaatatcagctac

SEQ ID NO: 56837 - DNA, 33 bp, Homo sapien
ggatgaactgcattaacctgcttaatttctgcc

SEQ ID NO: 56838 - DNA, 33 bp, Homo sapien
ggatgaactgcattaatctgcttaatttctgcc

SEQ ID NO: 56839 - DNA, 33 bp, Homo sapien
tttgagactcaagatgaaattatctgtttgtgt

SEQ ID NO: 56840 - DNA, 33 bp, Homo sapien
tttgagactcaagatggaattatctgtttgtgt

SEQ ID NO: 56841 - DNA, 33 bp, Homo sapien
cctgatgttcaatagggactccatagatttgtg

SEQ ID NO: 56842 - DNA, 33 bp, Homo sapien
cctgatgttcaataggtactccatagatttgtg

SEQ ID NO: 56843 - DNA, 33 bp, Homo sapien
agtgttatactagaggcccaggatagcaatgtt

SEQ ID NO: 56844 - DNA, 33 bp, Homo sapien
agtgttatactagaggtccaggatagcaatgtt

SEQ ID NO: 56845 - DNA, 33 bp, Homo sapien
attccacttgtgttcgaaaaatctgtttatagg

SEQ ID NO: 56846 - DNA, 33 bp, Homo sapien
attccacttgtgttcggaaaatctgtttatagg

SEQ ID NO: 56847 - DNA, 33 bp, Homo sapien
gaaataaatgagcaataacgttgattctggcag

SEQ ID NO: 56848 - DNA, 33 bp, Homo sapien
gaaataaatgagcaatgacgttgattctggcag

SEQ ID NO: 56849 - DNA, 33 bp, Homo sapien
aggaattggggcagtaataagactagcagaccc

SEQ ID NO: 56850 - DNA, 33 bp, Homo sapien
aggaattggggcagtattaagactagcagaccc

SEQ ID NO: 56851 - DNA, 33 bp, Homo sapien
tttcaaccagagcttacggtcaaatctgtctac

SEQ ID NO: 56852 - DNA, 33 bp, Homo sapien
tttcaaccagagcttatggtcaaatctgtctac

SEQ ID NO: 56853 - DNA, 33 bp, Homo sapien
ggacatggattcaagaggtgtgaatttcctctt

SEQ ID NO: 56854 - DNA, 33 bp, Homo sapien
ggacatggattcaagatgtgtgaatttcctctt

SEQ ID NO: 56855 - DNA, 33 bp, Homo sapien
aattcttaccacccaaaagcatccttattttgc

SEQ ID NO: 56856 - DNA, 33 bp, Homo sapien
aattcttaccacccaagagcatccttattttgc

SEQ ID NO: 56857 - DNA, 33 bp, Homo sapien
agtgggtactccctcaagaataataacaacaac

SEQ ID NO: 56858 - DNA, 33 bp, Homo sapien
agtgggtactccctcaggaataataacaacaac

SEQ ID NO: 56859 - DNA, 33 bp, Homo sapien
gatgtgaggtcttcgacaaattacttaacatcc

SEQ ID NO: 56860 - DNA, 33 bp, Homo sapien
gatgtgaggtcttcgagaaattacttaacatcc

SEQ ID NO: 56861 - DNA, 33 bp, Homo sapien
gcaacttcatcaattaaattgccatatcaacac

SEQ ID NO: 56862 - DNA, 33 bp, Homo sapien
gcaacttcatcaattatattgccatatcaacac

SEQ ID NO: 56863 - DNA, 33 bp, Homo sapien
cctggtactctacccactggattcttcttacct

SEQ ID NO: 56864 - DNA, 33 bp, Homo sapien
cctggtactctacccattggattcttcttacct

SEQ ID NO: 56865 - DNA, 33 bp, Homo sapien
aaagcaaatccttatgccaagagaatatgatgc

SEQ ID NO: 56866 - DNA, 33 bp, Homo sapien
aaagcaaatccttatgtcaagagaatatgatgc

SEQ ID NO: 56867 - DNA, 33 bp, Homo sapien
agatatttttagcagaagagacacaatagaaag

SEQ ID NO: 56868 - DNA, 33 bp, Homo sapien
agatatttttagcagaggagacacaatagaaag

SEQ ID NO: 56869 - DNA, 33 bp, Homo sapien
aggctgaaagacaaagacttatttactacctgc

SEQ ID NO: 56870 - DNA, 33 bp, Homo sapien
aggctgaaagacaaaggcttatttactacctgc

SEQ ID NO: 56871 - DNA, 33 bp, Homo sapien
atgccactttcactgaagttacaaggccttttg

SEQ ID NO: 56872 - DNA, 33 bp, Homo sapien
atgccactttcactgaggttacaaggccttttg

SEQ ID NO: 56873 - DNA, 33 bp, Homo sapien
agagagaggtccaagaaaacagagaagaaagaa

SEQ ID NO: 56874 - DNA, 33 bp, Homo sapien
agagagaggtccaagacaacagagaagaaagaa

SEQ ID NO: 56875 - DNA, 33 bp, Homo sapien
ggggtaattatttgaaatagatttgaagcataa

SEQ ID NO: 56876 - DNA, 33 bp, Homo sapien
ggggtaattatttgaagtagatttgaagcataa

SEQ ID NO: 56877 - DNA, 33 bp, Homo sapien
tccagtcctagcatcaagtttgaaatctagaat

SEQ ID NO: 56878 - DNA, 33 bp, Homo sapien
tccagtcctagcatcaggtttgaaatctagaat

SEQ ID NO: 56879 - DNA, 33 bp, Homo sapien
caaaattatgtctgcaataggatagtatttgtt

SEQ ID NO: 56880 - DNA, 33 bp, Homo sapien
caaaattatgtctgcagtaggatagtatttgtt

SEQ ID NO: 56881 - DNA, 33 bp, Homo sapien
tctttctcagcaatcaagtacattgagaggaat

SEQ ID NO: 56882 - DNA, 33 bp, Homo sapien
tctttctcagcaatcaggtacattgagaggaat

SEQ ID NO: 56883 - DNA, 33 bp, Homo sapien
actactcttcttatgacgtatgagcctaatgat

SEQ ID NO: 56884 - DNA, 33 bp, Homo sapien
actactcttcttatgatgtatgagcctaatgat

SEQ ID NO: 56885 - DNA, 33 bp, Homo sapien
gtcttcaacaagggtcacttctaatctcaagaa

SEQ ID NO: 56886 - DNA, 33 bp, Homo sapien
gtcttcaacaagggtcgcttctaatctcaagaa

SEQ ID NO: 56887 - DNA, 33 bp, Homo sapien
cctactgccactatgacgggggagactgctgct

SEQ ID NO: 56888 - DNA, 33 bp, Homo sapien
cctactgccactatgatgggggagactgctgct

SEQ ID NO: 56889 - DNA, 33 bp, Homo sapien
catggcttttctgaaagaatcactgaactgaca

SEQ ID NO: 56890 - DNA, 33 bp, Homo sapien
catggcttttctgaaataatcactgaactgaca

SEQ ID NO: 56891 - DNA, 33 bp, Homo sapien
gctcacgagacaatccagagagtgctcaggtgg

SEQ ID NO: 56892 - DNA, 33 bp, Homo sapien
gctcacgagacaatccggagagtgctcaggtgg

SEQ ID NO: 56893 - DNA, 33 bp, Homo sapien
actggctgacagccacacttggaacaggcatgt

SEQ ID NO: 56894 - DNA, 33 bp, Homo sapien
actggctgacagccacgcttggaacaggcatgt

SEQ ID NO: 56895 - DNA, 33 bp, Homo sapien
agtttttctactcttcccatcaacactagagca

SEQ ID NO: 56896 - DNA, 33 bp, Homo sapien
agtttttctactcttctcatcaacactagagca

SEQ ID NO: 56897 - DNA, 33 bp, Homo sapien
cagtggtgcttccctacacagaatccctgtgac

SEQ ID NO: 56898 - DNA, 33 bp, Homo sapien
cagtggtgcttccctatacagaatccctgtgac

SEQ ID NO: 56899 - DNA, 33 bp, Homo sapien
tggatatatattggtaagctggagaagtctatc

SEQ ID NO: 56900 - DNA, 33 bp, Homo sapien
tggatatatattggtaggctggagaagtctatc

SEQ ID NO: 56901 - DNA, 33 bp, Homo sapien
agtccacattcaagagaagacttggagtttatt

SEQ ID NO: 56902 - DNA, 33 bp, Homo sapien
agtccacattcaagaggagacttggagtttatt

SEQ ID NO: 56903 - DNA, 33 bp, Homo sapien
tatgaactgctggatcgccactgggtcattcag

SEQ ID NO: 56904 - DNA, 33 bp, Homo sapien
tatgaactgctggatctccactgggtcattcag

SEQ ID NO: 56905 - DNA, 33 bp, Homo sapien
ctcatttataaaacagacacattcgtattcatc

SEQ ID NO: 56906 - DNA, 33 bp, Homo sapien
ctcatttataaaacaggcacattcgtattcatc

SEQ ID NO: 56907 - DNA, 33 bp, Homo sapien
cttgccagaatcattaagcaattatctatatct

SEQ ID NO: 56908 - DNA, 33 bp, Homo sapien
cttgccagaatcattaggcaattatctatatct

SEQ ID NO: 56909 - DNA, 33 bp, Homo sapien
caaaggcaaaggtgaagaagcatgaaggtgagt

SEQ ID NO: 56910 - DNA, 33 bp, Homo sapien
caaaggcaaaggtgaataagcatgaaggtgagt

SEQ ID NO: 56911 - DNA, 33 bp, Homo sapien
agtagcaagaagaaaccggtaagaagccttggg

SEQ ID NO: 56912 - DNA, 33 bp, Homo sapien
agtagcaagaagaaactggtaagaagccttggg

SEQ ID NO: 56913 - DNA, 33 bp, Homo sapien
gctagtaagagggaagccttaacaaaatggaaa

SEQ ID NO: 56914 - DNA, 33 bp, Homo sapien
gctagtaagagggaaggcttaacaaaatggaaa

SEQ ID NO: 56915 - DNA, 33 bp, Homo sapien
attgaaaccacgtggacaattaagagatccata

SEQ ID NO: 56916 - DNA, 33 bp, Homo sapien
attgaaaccacgtggataattaagagatccata

SEQ ID NO: 56917 - DNA, 33 bp, Homo sapien
acattcccagaatccactcatcttgaaagaaac

SEQ ID NO: 56918 - DNA, 33 bp, Homo sapien
acattcccagaatccagtcatcttgaaagaaac

SEQ ID NO: 56919 - DNA, 33 bp, Homo sapien
gaagaaatcagaggaaagaggagaatgcagcac

SEQ ID NO: 56920 - DNA, 33 bp, Homo sapien
gaagaaatcagaggaaggaggagaatgcagcac

SEQ ID NO: 56921 - DNA, 33 bp, Homo sapien
ctttgcaaatagtagacgctcattatctgtttc

SEQ ID NO: 56922 - DNA, 33 bp, Homo sapien
ctttgcaaatagtagatgctcattatctgtttc

SEQ ID NO: 56923 - DNA, 33 bp, Homo sapien
ctgcgataataggtgacgcatgctataaaagat

SEQ ID NO: 56924 - DNA, 33 bp, Homo sapien
ctgcgataataggtgatgcatgctataaaagat

SEQ ID NO: 56925 - DNA, 33 bp, Homo sapien
gactgaactccagctaaggccacttgtctttgt

SEQ ID NO: 56926 - DNA, 33 bp, Homo sapien
gactgaactccagctagggccacttgtctttgt

SEQ ID NO: 56927 - DNA, 33 bp, Homo sapien
cctaattagccgggaaactcaaccagaccgtta

SEQ ID NO: 56928 - DNA, 33 bp, Homo sapien
cctaattagccgggaacctcaaccagaccgtta

SEQ ID NO: 56929 - DNA, 33 bp, Homo sapien
aaagcatctgctaagcacatatacgtgggggag

SEQ ID NO: 56930 - DNA, 33 bp, Homo sapien
aaagcatctgctaagcgcatatacgtgggggag

SEQ ID NO: 56931 - DNA, 33 bp, Homo sapien
cctctggactcaggcacaaagtaccagtagaat

SEQ ID NO: 56932 - DNA, 33 bp, Homo sapien
cctctggactcaggcagaaagtaccagtagaat

SEQ ID NO: 56933 - DNA, 33 bp, Homo sapien
gtgcctcaattgctgacggtttgttatagcagc

SEQ ID NO: 56934 - DNA, 33 bp, Homo sapien
gtgcctcaattgctgatggtttgttatagcagc

SEQ ID NO: 56935 - DNA, 33 bp, Homo sapien
gcattcatatagaaaccagtcaatcacttgcca

SEQ ID NO: 56936 - DNA, 33 bp, Homo sapien
gcattcatatagaaacgagtcaatcacttgcca

SEQ ID NO: 56937 - DNA, 33 bp, Homo sapien
ttaaatatggtcagaacgctttttataaatctt

SEQ ID NO: 56938 - DNA, 33 bp, Homo sapien
ttaaatatggtcagaatgctttttataaatctt

SEQ ID NO: 56939 - DNA, 33 bp, Homo sapien
gccattgtctggaggacagcattagatctggct

SEQ ID NO: 56940 - DNA, 33 bp, Homo sapien
gccattgtctggaggagagcattagatctggct

SEQ ID NO: 56941 - DNA, 33 bp, Homo sapien
tcctatgatcataacaacttccaccttcctcag

SEQ ID NO: 56942 - DNA, 33 bp, Homo sapien
tcctatgatcataacagcttccaccttcctcag

SEQ ID NO: 56943 - DNA, 33 bp, Homo sapien
ggtctctgacagcatcaagttgggtgcctgtgc

SEQ ID NO: 56944 - DNA, 33 bp, Homo sapien
ggtctctgacagcatcgagttgggtgcctgtgc

SEQ ID NO: 56945 - DNA, 33 bp, Homo sapien
tcaaataaaaatgcaaaactagcagaacagaat

SEQ ID NO: 56946 - DNA, 33 bp, Homo sapien
tcaaataaaaatgcaacactagcagaacagaat

SEQ ID NO: 56947 - DNA, 33 bp, Homo sapien
atttttccattgaaagccatttgggtggagata

SEQ ID NO: 56948 - DNA, 33 bp, Homo sapien
atttttccattgaaagtcatttgggtggagata

SEQ ID NO: 56949 - DNA, 33 bp, Homo sapien
ggttgtgttcgaataacggctggggctaggatt

SEQ ID NO: 56950 - DNA, 33 bp, Homo sapien
ggttgtgttcgaataatggctggggctaggatt

SEQ ID NO: 56951 - DNA, 33 bp, Homo sapien
actagttgaattcaccagaactcacagatttgc

SEQ ID NO: 56952 - DNA, 33 bp, Homo sapien
actagttgaattcaccggaactcacagatttgc

SEQ ID NO: 56953 - DNA, 33 bp, Homo sapien
atctaaggggaaaagtcaaggaggccattggat

SEQ ID NO: 56954 - DNA, 33 bp, Homo sapien
atctaaggggaaaagtgaaggaggccattggat

SEQ ID NO: 56955 - DNA, 33 bp, Homo sapien
tactgagtaggaagccaccaagaggaatgcacc

SEQ ID NO: 56956 - DNA, 33 bp, Homo sapien
tactgagtaggaagccgccaagaggaatgcacc

SEQ ID NO: 56957 - DNA, 33 bp, Homo sapien
gctctctaagggaagaagtaaaacagaccaaat

SEQ ID NO: 56958 - DNA, 33 bp, Homo sapien
gctctctaagggaagaggtaaaacagaccaaat

SEQ ID NO: 56959 - DNA, 33 bp, Homo sapien
caaatttatagaaatccaatgaagagtcaacaa

SEQ ID NO: 56960 - DNA, 33 bp, Homo sapien
caaatttatagaaatctaatgaagagtcaacaa

SEQ ID NO: 56961 - DNA, 33 bp, Homo sapien
atctgacctttgccaacgccttttcttgctatt

SEQ ID NO: 56962 - DNA, 33 bp, Homo sapien
atctgacctttgccaatgccttttcttgctatt

SEQ ID NO: 56963 - DNA, 33 bp, Homo sapien
atctcctccttcctacgctgcaagagctagctc

SEQ ID NO: 56964 - DNA, 33 bp, Homo sapien
atctcctccttcctactctgcaagagctagctc

SEQ ID NO: 56965 - DNA, 33 bp, Homo sapien
cacaccagtaataagacacgtggctctgtttaa

SEQ ID NO: 56966 - DNA, 33 bp, Homo sapien
cacaccagtaataagatacgtggctctgtttaa

SEQ ID NO: 56967 - DNA, 33 bp, Homo sapien
ctggcacaatcagaaaacatccacatacgtggg

SEQ ID NO: 56968 - DNA, 33 bp, Homo sapien
ctggcacaatcagaaagcatccacatacgtggg

SEQ ID NO: 56969 - DNA, 33 bp, Homo sapien
gtctagagagaagaagaaagacgtcaaaaaagg

SEQ ID NO: 56970 - DNA, 33 bp, Homo sapien
gtctagagagaagaagcaagacgtcaaaaaagg

SEQ ID NO: 56971 - DNA, 33 bp, Homo sapien
gttgccataataaatgaagttttcttcttaagc

SEQ ID NO: 56972 - DNA, 33 bp, Homo sapien
gttgccataataaatggagttttcttcttaagc

SEQ ID NO: 56973 - DNA, 33 bp, Homo sapien
ttccaattatatctgactcaagacaggggaagc

SEQ ID NO: 56974 - DNA, 33 bp, Homo sapien
ttccaattatatctgattcaagacaggggaagc

SEQ ID NO: 56975 - DNA, 33 bp, Homo sapien
ttgatcagcaaagtagcaggtaaaagaaaataa

SEQ ID NO: 56976 - DNA, 33 bp, Homo sapien
ttgatcagcaaagtagtaggtaaaagaaaataa

SEQ ID NO: 56977 - DNA, 33 bp, Homo sapien
gctaattccattgacacataagcacaaagtaca

SEQ ID NO: 56978 - DNA, 33 bp, Homo sapien
gctaattccattgacatataagcacaaagtaca

SEQ ID NO: 56979 - DNA, 33 bp, Homo sapien
actatgagctttttccggacttacatattattc

SEQ ID NO: 56980 - DNA, 33 bp, Homo sapien
actatgagctttttcctgacttacatattattc

SEQ ID NO: 56981 - DNA, 33 bp, Homo sapien
aatactgcccagtgatcaaaccacattttcctc

SEQ ID NO: 56982 - DNA, 33 bp, Homo sapien
aatactgcccagtgattaaaccacattttcctc

SEQ ID NO: 56983 - DNA, 33 bp, Homo sapien
cagggctgttggttggccatcagcttagcttgt

SEQ ID NO: 56984 - DNA, 33 bp, Homo sapien
cagggctgttggttgggcatcagcttagcttgt

SEQ ID NO: 56985 - DNA, 33 bp, Homo sapien
cccagcataacaatccaaaacttgataacattt

SEQ ID NO: 56986 - DNA, 33 bp, Homo sapien
cccagcataacaatccgaaacttgataacattt

SEQ ID NO: 56987 - DNA, 33 bp, Homo sapien
agtacaggggcactgaaatgcaaaaagcagaaa

SEQ ID NO: 56988 - DNA, 33 bp, Homo sapien
agtacaggggcactgagatgcaaaaagcagaaa

SEQ ID NO: 56989 - DNA, 33 bp, Homo sapien
gagccaccaggtagcaacaaacagcaaagggga

SEQ ID NO: 56990 - DNA, 33 bp, Homo sapien
gagccaccaggtagcagcaaacagcaaagggga

SEQ ID NO: 56991 - DNA, 33 bp, Homo sapien
agtatgagggtagttgaatgtaacaccttacag

SEQ ID NO: 56992 - DNA, 33 bp, Homo sapien
agtatgagggtagttggatgtaacaccttacag

SEQ ID NO: 56993 - DNA, 33 bp, Homo sapien
cattgaatgaatcagcaaatggttgcatataag

SEQ ID NO: 56994 - DNA, 33 bp, Homo sapien
cattgaatgaatcagcgaatggttgcatataag

SEQ ID NO: 56995 - DNA, 33 bp, Homo sapien
tgccagacacataaaaacatcaaatcttgtgag

SEQ ID NO: 56996 - DNA, 33 bp, Homo sapien
tgccagacacataaaaccatcaaatcttgtgag

SEQ ID NO: 56997 - DNA, 33 bp, Homo sapien
tgcaggaactgttgtcaaaaaggcaaagtgtat

SEQ ID NO: 56998 - DNA, 33 bp, Homo sapien
tgcaggaactgttgtcgaaaaggcaaagtgtat

SEQ ID NO: 56999 - DNA, 33 bp, Homo sapien
ttagagaccactaaaaagacaaagaccacatct

SEQ ID NO: 57000 - DNA, 33 bp, Homo sapien
ttagagaccactaaaaggacaaagaccacatct

SEQ ID NO: 57001 - DNA, 33 bp, Homo sapien
agcataccctggaccacaataggtaatggggtg

SEQ ID NO: 57002 - DNA, 33 bp, Homo sapien
agcataccctggaccataataggtaatggggtg

SEQ ID NO: 57003 - DNA, 33 bp, Homo sapien
ctagatatcaaatgtgaaagagaactcccattt

SEQ ID NO: 57004 - DNA, 33 bp, Homo sapien
ctagatatcaaatgtggaagagaactcccattt

SEQ ID NO: 57005 - DNA, 33 bp, Homo sapien
aggatccttcatggagcagagcagaccaggatg

SEQ ID NO: 57006 - DNA, 33 bp, Homo sapien
aggatccttcatggaggagagcagaccaggatg

SEQ ID NO: 57007 - DNA, 33 bp, Homo sapien
gaaagcaatgggaggcaaaaaaggagaaagtaa

SEQ ID NO: 57008 - DNA, 33 bp, Homo sapien
gaaagcaatgggaggcgaaaaaggagaaagtaa

SEQ ID NO: 57009 - DNA, 33 bp, Homo sapien
gaattgaaataagacaccagcaaactgagagac

SEQ ID NO: 57010 - DNA, 33 bp, Homo sapien
gaattgaaataagacatcagcaaactgagagac

SEQ ID NO: 57011 - DNA, 33 bp, Homo sapien
agaggtcagacaatacagaatggcgcagactgt

SEQ ID NO: 57012 - DNA, 33 bp, Homo sapien
agaggtcagacaatacggaatggcgcagactgt

SEQ ID NO: 57013 - DNA, 33 bp, Homo sapien
gggcccacccacataaagctaggtcaagagtat

SEQ ID NO: 57014 - DNA, 33 bp, Homo sapien
gggcccacccacataaggctaggtcaagagtat

SEQ ID NO: 57015 - DNA, 33 bp, Homo sapien
agaatccagaggacaactgttgctcccaataag

SEQ ID NO: 57016 - DNA, 33 bp, Homo sapien
agaatccagaggacaattgttgctcccaataag

SEQ ID NO: 57017 - DNA, 33 bp, Homo sapien
ggaaagcctttccacacgattaaagacttcaga

SEQ ID NO: 57018 - DNA, 33 bp, Homo sapien
ggaaagcctttccacatgattaaagacttcaga

SEQ ID NO: 57019 - DNA, 33 bp, Homo sapien
gctttccagttgccacaggccactaagttaatt

SEQ ID NO: 57020 - DNA, 33 bp, Homo sapien
gctttccagttgccacgggccactaagttaatt

SEQ ID NO: 57021 - DNA, 33 bp, Homo sapien
accagatctcacggcaatcatgaaaatcaagtt

SEQ ID NO: 57022 - DNA, 33 bp, Homo sapien
accagatctcacggcactcatgaaaatcaagtt

SEQ ID NO: 57023 - DNA, 33 bp, Homo sapien
agaggtaaagatcacacagctgatggttagttt

SEQ ID NO: 57024 - DNA, 33 bp, Homo sapien
agaggtaaagatcacatagctgatggttagttt

SEQ ID NO: 57025 - DNA, 33 bp, Homo sapien
taaatttggcttaacaagagaaccaaacactgt

SEQ ID NO: 57026 - DNA, 33 bp, Homo sapien
taaatttggcttaacaggagaaccaaacactgt

SEQ ID NO: 57027 - DNA, 33 bp, Homo sapien
ctgggcaaagccaacaactcctcattttcctgt

SEQ ID NO: 57028 - DNA, 33 bp, Homo sapien
ctgggcaaagccaacagctcctcattttcctgt

SEQ ID NO: 57029 - DNA, 33 bp, Homo sapien
gagggagtcatggggcaaaactgaattttaaaa

SEQ ID NO: 57030 - DNA, 33 bp, Homo sapien
gagggagtcatggggcgaaactgaattttaaaa

SEQ ID NO: 57031 - DNA, 33 bp, Homo sapien
tgagaatatgaacacaaacattcaaacacaagc

SEQ ID NO: 57032 - DNA, 33 bp, Homo sapien
tgagaatatgaacacagacattcaaacacaagc

SEQ ID NO: 57033 - DNA, 33 bp, Homo sapien
tctgagctctgcttccacttatttatgcctgat

SEQ ID NO: 57034 - DNA, 33 bp, Homo sapien
tctgagctctgcttccgcttatttatgcctgat

SEQ ID NO: 57035 - DNA, 33 bp, Homo sapien
ttctttccaagagcaaacccttaaaccactctt

SEQ ID NO: 57036 - DNA, 33 bp, Homo sapien
ttctttccaagagcaagcccttaaaccactctt

SEQ ID NO: 57037 - DNA, 33 bp, Homo sapien
ttcacttcttaacccactgacatctgtttctgc

SEQ ID NO: 57038 - DNA, 33 bp, Homo sapien
ttcacttcttaacccattgacatctgtttctgc

SEQ ID NO: 57039 - DNA, 33 bp, Homo sapien
atgttaccacctgggcggcattttgccaagtga

SEQ ID NO: 57040 - DNA, 33 bp, Homo sapien
atgttaccacctgggctgcattttgccaagtga

SEQ ID NO: 57041 - DNA, 33 bp, Homo sapien
ttgttggcacagaggaagcatgcgtacatgtgt

SEQ ID NO: 57042 - DNA, 33 bp, Homo sapien
ttgttggcacagaggaggcatgcgtacatgtgt

SEQ ID NO: 57043 - DNA, 33 bp, Homo sapien
cagagaactagaaaacagcatctattctcaaac

SEQ ID NO: 57044 - DNA, 33 bp, Homo sapien
cagagaactagaaaacggcatctattctcaaac

SEQ ID NO: 57045 - DNA, 33 bp, Homo sapien
tcagagagaccttaacgccgaacttcactcagt

SEQ ID NO: 57046 - DNA, 33 bp, Homo sapien
tcagagagaccttaactccgaacttcactcagt

SEQ ID NO: 57047 - DNA, 33 bp, Homo sapien
tagggttgagaaagaacccagaggacccagcat

SEQ ID NO: 57048 - DNA, 33 bp, Homo sapien
tagggttgagaaagaatccagaggacccagcat

SEQ ID NO: 57049 - DNA, 33 bp, Homo sapien
ataaaaaattagttaacacagatgatgacaata

SEQ ID NO: 57050 - DNA, 33 bp, Homo sapien
ataaaaaattagttaatacagatgatgacaata

SEQ ID NO: 57051 - DNA, 33 bp, Homo sapien
cctggcgtgcagtaacgcatccaacaagcactt

SEQ ID NO: 57052 - DNA, 33 bp, Homo sapien
cctggcgtgcagtaactcatccaacaagcactt

SEQ ID NO: 57053 - DNA, 33 bp, Homo sapien
ccaccaacatcctaacaagcagagcatggcagc

SEQ ID NO: 57054 - DNA, 33 bp, Homo sapien
ccaccaacatcctaactagcagagcatggcagc

SEQ ID NO: 57055 - DNA, 33 bp, Homo sapien
tagtggtgatcaagaaaggataacagtaaggcc

SEQ ID NO: 57056 - DNA, 33 bp, Homo sapien
tagtggtgatcaagaagggataacagtaaggcc

SEQ ID NO: 57057 - DNA, 33 bp, Homo sapien
gagtgttgtcatataaacccccatcagtgagga

SEQ ID NO: 57058 - DNA, 33 bp, Homo sapien
gagtgttgtcatataatcccccatcagtgagga

SEQ ID NO: 57059 - DNA, 33 bp, Homo sapien
gggtaatgaggtctgacgggagaaatggcttca

SEQ ID NO: 57060 - DNA, 33 bp, Homo sapien
gggtaatgaggtctgatgggagaaatggcttca

SEQ ID NO: 57061 - DNA, 33 bp, Homo sapien
aaagaatccaggaaacagcttcctcctcaatct

SEQ ID NO: 57062 - DNA, 33 bp, Homo sapien
aaagaatccaggaaacggcttcctcctcaatct

SEQ ID NO: 57063 - DNA, 33 bp, Homo sapien
tgctgggattctgaggaagatatctaggcactg

SEQ ID NO: 57064 - DNA, 33 bp, Homo sapien
tgctgggattctgagggagatatctaggcactg

SEQ ID NO: 57065 - DNA, 33 bp, Homo sapien
acaccagtttttcacccatgtcacaatactttc

SEQ ID NO: 57066 - DNA, 33 bp, Homo sapien
acaccagtttttcacctatgtcacaatactttc

SEQ ID NO: 57067 - DNA, 33 bp, Homo sapien
gcccctttcattccccactgaataatagtaaga

SEQ ID NO: 57068 - DNA, 33 bp, Homo sapien
gcccctttcattccccgctgaataatagtaaga

SEQ ID NO: 57069 - DNA, 33 bp, Homo sapien
ctggtgaagacaggagaaaggatcaagacagac

SEQ ID NO: 57070 - DNA, 33 bp, Homo sapien
ctggtgaagacaggaggaaggatcaagacagac

SEQ ID NO: 57071 - DNA, 33 bp, Homo sapien
tggagttgagtagacccaatgaatgtcacctct

SEQ ID NO: 57072 - DNA, 33 bp, Homo sapien
tggagttgagtagacctaatgaatgtcacctct

SEQ ID NO: 57073 - DNA, 33 bp, Homo sapien
ggtggcaccttcatcaatgacatattatctagc

SEQ ID NO: 57074 - DNA, 33 bp, Homo sapien
ggtggcaccttcatcagtgacatattatctagc

SEQ ID NO: 57075 - DNA, 33 bp, Homo sapien
catggaaacatggctacctgaacctgaaaacta

SEQ ID NO: 57076 - DNA, 33 bp, Homo sapien
catggaaacatggctagctgaacctgaaaacta

SEQ ID NO: 57077 - DNA, 33 bp, Homo sapien
tgccaggtaagtactacgaagaagtatattagg

SEQ ID NO: 57078 - DNA, 33 bp, Homo sapien
tgccaggtaagtactatgaagaagtatattagg

SEQ ID NO: 57079 - DNA, 33 bp, Homo sapien
tctctacttggaattaaaccacacgcaaaactg

SEQ ID NO: 57080 - DNA, 33 bp, Homo sapien
tctctacttggaattataccacacgcaaaactg

SEQ ID NO: 57081 - DNA, 33 bp, Homo sapien
agtgaatatggaaatgacatgcatatggcatag

SEQ ID NO: 57082 - DNA, 33 bp, Homo sapien
agtgaatatggaaatggcatgcatatggcatag

SEQ ID NO: 57083 - DNA, 33 bp, Homo sapien
tttctttccattgaaagtagcaatcctttgttc

SEQ ID NO: 57084 - DNA, 33 bp, Homo sapien
tttctttccattgaaattagcaatcctttgttc

SEQ ID NO: 57085 - DNA, 33 bp, Homo sapien
gcaggagcataggaaaaagagtaatagttgaag

SEQ ID NO: 57086 - DNA, 33 bp, Homo sapien
gcaggagcataggaaagagagtaatagttgaag

SEQ ID NO: 57087 - DNA, 33 bp, Homo sapien
agcgagcatggtcagaaagagtcacttcaacat

SEQ ID NO: 57088 - DNA, 33 bp, Homo sapien
agcgagcatggtcagagagagtcacttcaacat

SEQ ID NO: 57089 - DNA, 33 bp, Homo sapien
tcaaaattatcttctacgtgctcctttctggcc

SEQ ID NO: 57090 - DNA, 33 bp, Homo sapien
tcaaaattatcttctaggtgctcctttctggcc

SEQ ID NO: 57091 - DNA, 33 bp, Homo sapien
ctaattaatcctcacacggcttattgtctcatt

SEQ ID NO: 57092 - DNA, 33 bp, Homo sapien
ctaattaatcctcacatggcttattgtctcatt

SEQ ID NO: 57093 - DNA, 33 bp, Homo sapien
ttcaaactggggactacggtgaaccaatctcgt

SEQ ID NO: 57094 - DNA, 33 bp, Homo sapien
ttcaaactggggactatggtgaaccaatctcgt

SEQ ID NO: 57095 - DNA, 33 bp, Homo sapien
tttctctttttatgtcaccaactcctcctattt

SEQ ID NO: 57096 - DNA, 33 bp, Homo sapien
tttctctttttatgtcgccaactcctcctattt

SEQ ID NO: 57097 - DNA, 33 bp, Homo sapien
taaataagataaaataagtaaggtgccaaacat

SEQ ID NO: 57098 - DNA, 33 bp, Homo sapien
taaataagataaaataggtaaggtgccaaacat

SEQ ID NO: 57099 - DNA, 33 bp, Homo sapien
agaaagcagagcccagaacaatttacatttctt

SEQ ID NO: 57100 - DNA, 33 bp, Homo sapien
agaaagcagagcccaggacaatttacatttctt

SEQ ID NO: 57101 - DNA, 33 bp, Homo sapien
agtctttttaagtcaccgccaaatccattttgc

SEQ ID NO: 57102 - DNA, 33 bp, Homo sapien
agtctttttaagtcactgccaaatccattttgc

SEQ ID NO: 57103 - DNA, 33 bp, Homo sapien
aacttgttgctctagacccagaccttttggcaa

SEQ ID NO: 57104 - DNA, 33 bp, Homo sapien
aacttgttgctctagatccagaccttttggcaa

SEQ ID NO: 57105 - DNA, 33 bp, Homo sapien
cggtatgtcgacttccactcttgttctgctctt

SEQ ID NO: 57106 - DNA, 33 bp, Homo sapien
cggtatgtcgacttccgctcttgttctgctctt

SEQ ID NO: 57107 - DNA, 33 bp, Homo sapien
ttaaattctacctgagaaacgctttagtggcat

SEQ ID NO: 57108 - DNA, 33 bp, Homo sapien
ttaaattctacctgaggaacgctttagtggcat

SEQ ID NO: 57109 - DNA, 33 bp, Homo sapien
gataatgttgaatgaaatgtgcattttaacgga

SEQ ID NO: 57110 - DNA, 33 bp, Homo sapien
gataatgttgaatgaagtgtgcattttaacgga

SEQ ID NO: 57111 - DNA, 33 bp, Homo sapien
gcattctttcatccaacaactgtggaatgactg

SEQ ID NO: 57112 - DNA, 33 bp, Homo sapien
gcattctttcatccaagaactgtggaatgactg

SEQ ID NO: 57113 - DNA, 33 bp, Homo sapien
gctgtctcaaaaaccacaggttaggcgtactcc

SEQ ID NO: 57114 - DNA, 33 bp, Homo sapien
gctgtctcaaaaaccataggttaggcgtactcc

SEQ ID NO: 57115 - DNA, 33 bp, Homo sapien
tccagtcagggggatcactagcaaatagaaaga

SEQ ID NO: 57116 - DNA, 33 bp, Homo sapien
tccagtcagggggatcgctagcaaatagaaaga

SEQ ID NO: 57117 - DNA, 33 bp, Homo sapien
taaataagttttcaagccatataagtggttaat

SEQ ID NO: 57118 - DNA, 33 bp, Homo sapien
taaataagttttcaagtcatataagtggttaat

SEQ ID NO: 57119 - DNA, 33 bp, Homo sapien
ttttcataaaggaactcacttagccattacttt

SEQ ID NO: 57120 - DNA, 33 bp, Homo sapien
ttttcataaaggaactgacttagccattacttt

SEQ ID NO: 57121 - DNA, 33 bp, Homo sapien
tgcctgaattcagtgccgactgctcctctcaaa

SEQ ID NO: 57122 - DNA, 33 bp, Homo sapien
tgcctgaattcagtgctgactgctcctctcaaa

SEQ ID NO: 57123 - DNA, 33 bp, Homo sapien
gtgagcctttagaagaaagtgaagcgtcaagct

SEQ ID NO: 57124 - DNA, 33 bp, Homo sapien
gtgagcctttagaagacagtgaagcgtcaagct

SEQ ID NO: 57125 - DNA, 33 bp, Homo sapien
aaagaggtagctagaaatagatgtgataatgac

SEQ ID NO: 57126 - DNA, 33 bp, Homo sapien
aaagaggtagctagaagtagatgtgataatgac

SEQ ID NO: 57127 - DNA, 33 bp, Homo sapien
aattcatcaggataaaaaataagacttggcaat

SEQ ID NO: 57128 - DNA, 33 bp, Homo sapien
aattcatcaggataaacaataagacttggcaat

SEQ ID NO: 57129 - DNA, 33 bp, Homo sapien
aggaaataagctcccccctcacaagtgagtgat

SEQ ID NO: 57130 - DNA, 33 bp, Homo sapien
aggaaataagctcccctctcacaagtgagtgat

SEQ ID NO: 57131 - DNA, 33 bp, Homo sapien
gatttcaagagaaaggccatgattgaagatgga

SEQ ID NO: 57132 - DNA, 33 bp, Homo sapien
gatttcaagagaaaggtcatgattgaagatgga

SEQ ID NO: 57133 - DNA, 33 bp, Homo sapien
agctgataaaacttacaactatgctgactggtc

SEQ ID NO: 57134 - DNA, 33 bp, Homo sapien
agctgataaaacttacgactatgctgactggtc

SEQ ID NO: 57135 - DNA, 33 bp, Homo sapien
tacttacagatccatacagcaaaggccaatagc

SEQ ID NO: 57136 - DNA, 33 bp, Homo sapien
tacttacagatccatatagcaaaggccaatagc

SEQ ID NO: 57137 - DNA, 33 bp, Homo sapien
aattggagataggcagaactccctcgtgctcag

SEQ ID NO: 57138 - DNA, 33 bp, Homo sapien
aattggagataggcaggactccctcgtgctcag

SEQ ID NO: 57139 - DNA, 33 bp, Homo sapien
gctgggagagtacagtaaagccagtccaggaga

SEQ ID NO: 57140 - DNA, 33 bp, Homo sapien
gctgggagagtacagtgaagccagtccaggaga

SEQ ID NO: 57141 - DNA, 33 bp, Homo sapien
aaggatcatggaagccagagtgtgtagatgaga

SEQ ID NO: 57142 - DNA, 33 bp, Homo sapien
aaggatcatggaagccggagtgtgtagatgaga

SEQ ID NO: 57143 - DNA, 33 bp, Homo sapien
aggtcacatttagttgcgttgaactcaaaatct

SEQ ID NO: 57144 - DNA, 33 bp, Homo sapien
aggtcacatttagttgggttgaactcaaaatct

SEQ ID NO: 57145 - DNA, 33 bp, Homo sapien
attgactggctgcgcacggacaagtgtcatctt

SEQ ID NO: 57146 - DNA, 33 bp, Homo sapien
attgactggctgcgcatggacaagtgtcatctt

SEQ ID NO: 57147 - DNA, 33 bp, Homo sapien
aactgcttttgaattagctagctgtttctgtaa

SEQ ID NO: 57148 - DNA, 33 bp, Homo sapien
aactgcttttgaattatctagctgtttctgtaa

SEQ ID NO: 57149 - DNA, 33 bp, Homo sapien
tgtgctaatgtcattccatctgtctccactggg

SEQ ID NO: 57150 - DNA, 33 bp, Homo sapien
tgtgctaatgtcattctatctgtctccactggg

SEQ ID NO: 57151 - DNA, 33 bp, Homo sapien
tttctaatctctcttcaagaacaaattttttta

SEQ ID NO: 57152 - DNA, 33 bp, Homo sapien
tttctaatctctcttcgagaacaaattttttta

SEQ ID NO: 57153 - DNA, 33 bp, Homo sapien
tctatcctattagataaatctgtgaaaggttct

SEQ ID NO: 57154 - DNA, 33 bp, Homo sapien
tctatcctattagatagatctgtgaaaggttct

SEQ ID NO: 57155 - DNA, 33 bp, Homo sapien
ggcacagttttcttcccctacaattgaaaatga

SEQ ID NO: 57156 - DNA, 33 bp, Homo sapien
ggcacagttttcttcctctacaattgaaaatga

SEQ ID NO: 57157 - DNA, 33 bp, Homo sapien
tctgggtaaactactaacctagctttttccaaa

SEQ ID NO: 57158 - DNA, 33 bp, Homo sapien
tctgggtaaactactagcctagctttttccaaa

SEQ ID NO: 57159 - DNA, 33 bp, Homo sapien
gacactgaggttcaaaatcagaaagtagtgtac

SEQ ID NO: 57160 - DNA, 33 bp, Homo sapien
gacactgaggttcaaagtcagaaagtagtgtac

SEQ ID NO: 57161 - DNA, 33 bp, Homo sapien
taccccaaaccttaaaagctcaaagcaaccacc

SEQ ID NO: 57162 - DNA, 33 bp, Homo sapien
taccccaaaccttaaaggctcaaagcaaccacc

SEQ ID NO: 57163 - DNA, 33 bp, Homo sapien
tcaggcagtatttaagaccctagagatgtagca

SEQ ID NO: 57164 - DNA, 33 bp, Homo sapien
tcaggcagtatttaaggccctagagatgtagca

SEQ ID NO: 57165 - DNA, 33 bp, Homo sapien
cttagcccttgtgtccactgacttgatctctcc

SEQ ID NO: 57166 - DNA, 33 bp, Homo sapien
cttagcccttgtgtcccctgacttgatctctcc

SEQ ID NO: 57167 - DNA, 33 bp, Homo sapien
gtgctagggtataaagaccataatcattgcttg

SEQ ID NO: 57168 - DNA, 33 bp, Homo sapien
gtgctagggtataaaggccataatcattgcttg

SEQ ID NO: 57169 - DNA, 33 bp, Homo sapien
atgccactgacagttcaaatacttcttcattag

SEQ ID NO: 57170 - DNA, 33 bp, Homo sapien
atgccactgacagttccaatacttcttcattag

SEQ ID NO: 57171 - DNA, 33 bp, Homo sapien
tcaatagcactggtcactacaaaagtgtaaatc

SEQ ID NO: 57172 - DNA, 33 bp, Homo sapien
tcaatagcactggtcattacaaaagtgtaaatc

SEQ ID NO: 57173 - DNA, 33 bp, Homo sapien
aatgatggagctgaaagtggtcatctggcccag

SEQ ID NO: 57174 - DNA, 33 bp, Homo sapien
aatgatggagctgaaattggtcatctggcccag

SEQ ID NO: 57175 - DNA, 33 bp, Homo sapien
ttcctctggaagagacagcattgcgattctaac

SEQ ID NO: 57176 - DNA, 33 bp, Homo sapien
ttcctctggaagagacggcattgcgattctaac

SEQ ID NO: 57177 - DNA, 33 bp, Homo sapien
agaccctctcttcttagcttctaccagcatttt

SEQ ID NO: 57178 - DNA, 33 bp, Homo sapien
agaccctctcttcttatcttctaccagcatttt

SEQ ID NO: 57179 - DNA, 33 bp, Homo sapien
ctaaaaagccaagataaaaatggctgcacatga

SEQ ID NO: 57180 - DNA, 33 bp, Homo sapien
ctaaaaagccaagatagaaatggctgcacatga

SEQ ID NO: 57181 - DNA, 33 bp, Homo sapien
gtctgactatatccaaatctataagagtttaat

SEQ ID NO: 57182 - DNA, 33 bp, Homo sapien
gtctgactatatccaagtctataagagtttaat

SEQ ID NO: 57183 - DNA, 33 bp, Homo sapien
ccataagtgatgccatcagaagaacatacatat

SEQ ID NO: 57184 - DNA, 33 bp, Homo sapien
ccataagtgatgccattagaagaacatacatat

SEQ ID NO: 57185 - DNA, 33 bp, Homo sapien
gtggtgtgaattttcccatgtcagtaaatattc

SEQ ID NO: 57186 - DNA, 33 bp, Homo sapien
gtggtgtgaattttcctatgtcagtaaatattc

SEQ ID NO: 57187 - DNA, 33 bp, Homo sapien
tgcacttctagtaatacccattctctaaatttt

SEQ ID NO: 57188 - DNA, 33 bp, Homo sapien
tgcacttctagtaatatccattctctaaatttt

SEQ ID NO: 57189 - DNA, 33 bp, Homo sapien
cctggcatgcataggcgataataggtgctcaat

SEQ ID NO: 57190 - DNA, 33 bp, Homo sapien
cctggcatgcataggctataataggtgctcaat

SEQ ID NO: 57191 - DNA, 33 bp, Homo sapien
catggaaaaatatgtaacaacgatttctttctc

SEQ ID NO: 57192 - DNA, 33 bp, Homo sapien
catggaaaaatatgtagcaacgatttctttctc

SEQ ID NO: 57193 - DNA, 33 bp, Homo sapien
tgaattgagttgaggccgccaagtggaaaggag

SEQ ID NO: 57194 - DNA, 33 bp, Homo sapien
tgaattgagttgaggctgccaagtggaaaggag

SEQ ID NO: 57195 - DNA, 33 bp, Homo sapien
atcagagcccaggaagaagtaagcaagaaagta

SEQ ID NO: 57196 - DNA, 33 bp, Homo sapien
atcagagcccaggaaggagtaagcaagaaagta

SEQ ID NO: 57197 - DNA, 33 bp, Homo sapien
ccatgctgctatctacaacgtccacccagattc

SEQ ID NO: 57198 - DNA, 33 bp, Homo sapien
ccatgctgctatctacgacgtccacccagattc

SEQ ID NO: 57199 - DNA, 33 bp, Homo sapien
agtggcctttcttcaccacatcacagttgtctc

SEQ ID NO: 57200 - DNA, 33 bp, Homo sapien
agtggcctttcttcactacatcacagttgtctc

SEQ ID NO: 57201 - DNA, 33 bp, Homo sapien
cagacttgcttaaaagccagtttctagttcgac

SEQ ID NO: 57202 - DNA, 33 bp, Homo sapien
cagacttgcttaaaagtcagtttctagttcgac

SEQ ID NO: 57203 - DNA, 33 bp, Homo sapien
caggtcattctcacccaaagactgaggggaatt

SEQ ID NO: 57204 - DNA, 33 bp, Homo sapien
caggtcattctcacccgaagactgaggggaatt

SEQ ID NO: 57205 - DNA, 33 bp, Homo sapien
tggagtcctacaagaaatgagtcttaaacaggt

SEQ ID NO: 57206 - DNA, 33 bp, Homo sapien
tggagtcctacaagaagtgagtcttaaacaggt

SEQ ID NO: 57207 - DNA, 33 bp, Homo sapien
agccttgctccagctaaggaactcaaacagttt

SEQ ID NO: 57208 - DNA, 33 bp, Homo sapien
agccttgctccagctagggaactcaaacagttt

SEQ ID NO: 57209 - DNA, 33 bp, Homo sapien
gtaaatcacatgcactaaaatccatgactcaga

SEQ ID NO: 57210 - DNA, 33 bp, Homo sapien
gtaaatcacatgcactgaaatccatgactcaga

SEQ ID NO: 57211 - DNA, 33 bp, Homo sapien
ccatacataagaaacactgtggctgatacagag

SEQ ID NO: 57212 - DNA, 33 bp, Homo sapien
ccatacataagaaacattgtggctgatacagag

SEQ ID NO: 57213 - DNA, 33 bp, Homo sapien
tttaaatggtgagaaccgcaattatagaatctc

SEQ ID NO: 57214 - DNA, 33 bp, Homo sapien
tttaaatggtgagaactgcaattatagaatctc

SEQ ID NO: 57215 - DNA, 33 bp, Homo sapien
atttaaatttgaacccactcctggttctctctg

SEQ ID NO: 57216 - DNA, 33 bp, Homo sapien
atttaaatttgaacccgctcctggttctctctg

SEQ ID NO: 57217 - DNA, 33 bp, Homo sapien
cactggggtcatataagatagcacaccttatag

SEQ ID NO: 57218 - DNA, 33 bp, Homo sapien
cactggggtcatataatatagcacaccttatag

SEQ ID NO: 57219 - DNA, 33 bp, Homo sapien
tctgggtaacaatagacgagggtaggcttctct

SEQ ID NO: 57220 - DNA, 33 bp, Homo sapien
tctgggtaacaatagatgagggtaggcttctct

SEQ ID NO: 57221 - DNA, 33 bp, Homo sapien
aaaagacatggtggggccactgaggcacaagat

SEQ ID NO: 57222 - DNA, 33 bp, Homo sapien
aaaagacatggtggggtcactgaggcacaagat

SEQ ID NO: 57223 - DNA, 33 bp, Homo sapien
gctaaatctagtagaccattcactgttgtctta

SEQ ID NO: 57224 - DNA, 33 bp, Homo sapien
gctaaatctagtagacgattcactgttgtctta

SEQ ID NO: 57225 - DNA, 33 bp, Homo sapien
aagcatatccataaggccaagcatagttccaga

SEQ ID NO: 57226 - DNA, 33 bp, Homo sapien
aagcatatccataaggtcaagcatagttccaga

SEQ ID NO: 57227 - DNA, 33 bp, Homo sapien
gctgtgttctaactccaagattttgaacctttg

SEQ ID NO: 57228 - DNA, 33 bp, Homo sapien
gctgtgttctaactccgagattttgaacctttg

SEQ ID NO: 57229 - DNA, 33 bp, Homo sapien
aagaagcagtaatacccagatgagatacaacac

SEQ ID NO: 57230 - DNA, 33 bp, Homo sapien
aagaagcagtaatacctagatgagatacaacac

SEQ ID NO: 57231 - DNA, 33 bp, Homo sapien
ctggaaaagcctgaagcctggctacaacttgcc

SEQ ID NO: 57232 - DNA, 33 bp, Homo sapien
ctggaaaagcctgaagtctggctacaacttgcc

SEQ ID NO: 57233 - DNA, 33 bp, Homo sapien
aagtaagtgagaaataggtagtgtagttgaatt

SEQ ID NO: 57234 - DNA, 33 bp, Homo sapien
aagtaagtgagaaatatgtagtgtagttgaatt

SEQ ID NO: 57235 - DNA, 33 bp, Homo sapien
aattatcaatttcaacactaataccacatagac

SEQ ID NO: 57236 - DNA, 33 bp, Homo sapien
aattatcaatttcaacgctaataccacatagac

SEQ ID NO: 57237 - DNA, 33 bp, Homo sapien
ctccaacctttctcaccgaagtcagggaactat

SEQ ID NO: 57238 - DNA, 33 bp, Homo sapien
ctccaacctttctcactgaagtcagggaactat

SEQ ID NO: 57239 - DNA, 33 bp, Homo sapien
tttacagaagaggacactgggtacagaaagagt

SEQ ID NO: 57240 - DNA, 33 bp, Homo sapien
tttacagaagaggacattgggtacagaaagagt

SEQ ID NO: 57241 - DNA, 33 bp, Homo sapien
ctcttactctggactacctcagaatgcctcctc

SEQ ID NO: 57242 - DNA, 33 bp, Homo sapien
ctcttactctggactatctcagaatgcctcctc

SEQ ID NO: 57243 - DNA, 33 bp, Homo sapien
atccctcaagcaaaaaattgcctaaacttccat

SEQ ID NO: 57244 - DNA, 33 bp, Homo sapien
atccctcaagcaaaaagttgcctaaacttccat

SEQ ID NO: 57245 - DNA, 33 bp, Homo sapien
ctatatggagagaagtcaatttcccaagcttct

SEQ ID NO: 57246 - DNA, 33 bp, Homo sapien
ctatatggagagaagttaatttcccaagcttct

SEQ ID NO: 57247 - DNA, 33 bp, Homo sapien
gctactgtttgtatataaaatctcttgacataa

SEQ ID NO: 57248 - DNA, 33 bp, Homo sapien
gctactgtttgtatatcaaatctcttgacataa

SEQ ID NO: 57249 - DNA, 33 bp, Homo sapien
tcaaacggtggtgtcaactggagtatgcattaa

SEQ ID NO: 57250 - DNA, 33 bp, Homo sapien
tcaaacggtggtgtcatctggagtatgcattaa

SEQ ID NO: 57251 - DNA, 33 bp, Homo sapien
accgtttgacaccataacgatgctggcaatggt

SEQ ID NO: 57252 - DNA, 33 bp, Homo sapien
accgtttgacaccataccgatgctggcaatggt

SEQ ID NO: 57253 - DNA, 33 bp, Homo sapien
tacatagggaatgttccaacagtggtagatgaa

SEQ ID NO: 57254 - DNA, 33 bp, Homo sapien
tacatagggaatgttctaacagtggtagatgaa

SEQ ID NO: 57255 - DNA, 33 bp, Homo sapien
atagcctttgtttctaaccatcccacatacttt

SEQ ID NO: 57256 - DNA, 33 bp, Homo sapien
atagcctttgtttctacccatcccacatacttt

SEQ ID NO: 57257 - DNA, 33 bp, Homo sapien
caaactcagtcactcaagagcttctcagtcctt

SEQ ID NO: 57258 - DNA, 33 bp, Homo sapien
caaactcagtcactcaggagcttctcagtcctt

SEQ ID NO: 57259 - DNA, 33 bp, Homo sapien
aaacatatgcaaatggaaatggtaataaactca

SEQ ID NO: 57260 - DNA, 33 bp, Homo sapien
aaacatatgcaaatggcaatggtaataaactca

SEQ ID NO: 57261 - DNA, 33 bp, Homo sapien
actagatagaaagtgaaaggaacatcacactta

SEQ ID NO: 57262 - DNA, 33 bp, Homo sapien
actagatagaaagtgagaggaacatcacactta

SEQ ID NO: 57263 - DNA, 33 bp, Homo sapien
atatatgtttgtttcaactcttgcttggtgtta

SEQ ID NO: 57264 - DNA, 33 bp, Homo sapien
atatatgtttgtttcacctcttgcttggtgtta

SEQ ID NO: 57265 - DNA, 33 bp, Homo sapien
cttagaagttgagttacgagaactataatttat

SEQ ID NO: 57266 - DNA, 33 bp, Homo sapien
cttagaagttgagttatgagaactataatttat

SEQ ID NO: 57267 - DNA, 33 bp, Homo sapien
cttatatgtgcagatacgatgaggaagagtaga

SEQ ID NO: 57268 - DNA, 33 bp, Homo sapien
cttatatgtgcagatatgatgaggaagagtaga

SEQ ID NO: 57269 - DNA, 33 bp, Homo sapien
atgagaaaatccttcaagagtaggcttccacta

SEQ ID NO: 57270 - DNA, 33 bp, Homo sapien
atgagaaaatccttcaggagtaggcttccacta

SEQ ID NO: 57271 - DNA, 33 bp, Homo sapien
gagtctgttaaagtagaagacagggtgagaagg

SEQ ID NO: 57272 - DNA, 33 bp, Homo sapien
gagtctgttaaagtaggagacagggtgagaagg

SEQ ID NO: 57273 - DNA, 33 bp, Homo sapien
aacaacaacaaaaactgaaggagagtggagaag

SEQ ID NO: 57274 - DNA, 33 bp, Homo sapien
aacaacaacaaaaacttaaggagagtggagaag

SEQ ID NO: 57275 - DNA, 33 bp, Homo sapien
tgggcaagatggtagcacatttctttgattagt

SEQ ID NO: 57276 - DNA, 33 bp, Homo sapien
tgggcaagatggtagcgcatttctttgattagt

SEQ ID NO: 57277 - DNA, 33 bp, Homo sapien
accactctatgcttcaaagacctgatctgcttt

SEQ ID NO: 57278 - DNA, 33 bp, Homo sapien
accactctatgcttcagagacctgatctgcttt

SEQ ID NO: 57279 - DNA, 33 bp, Homo sapien
ttattagtaatcacaggattgtaaattaaagca

SEQ ID NO: 57280 - DNA, 33 bp, Homo sapien
ttattagtaatcacagtattgtaaattaaagca

SEQ ID NO: 57281 - DNA, 33 bp, Homo sapien
gggtgggccacgaaacaaagagggggctagcta

SEQ ID NO: 57282 - DNA, 33 bp, Homo sapien
gggtgggccacgaaacgaagagggggctagcta

SEQ ID NO: 57283 - DNA, 33 bp, Homo sapien
gtttagtctaaagcatcaaaagatctcagctgg

SEQ ID NO: 57284 - DNA, 33 bp, Homo sapien
gtttagtctaaagcattaaaagatctcagctgg

SEQ ID NO: 57285 - DNA, 33 bp, Homo sapien
ttttcaagagagcaaaaaaggttcaagccagat

SEQ ID NO: 57286 - DNA, 33 bp, Homo sapien
ttttcaagagagcaaagaaggttcaagccagat

SEQ ID NO: 57287 - DNA, 33 bp, Homo sapien
gggggactatataatacgagcaggaaaagtaaa

SEQ ID NO: 57288 - DNA, 33 bp, Homo sapien
gggggactatataatatgagcaggaaaagtaaa

SEQ ID NO: 57289 - DNA, 33 bp, Homo sapien
attatatagtcccccaaaaaaagctttctcaaa

SEQ ID NO: 57290 - DNA, 33 bp, Homo sapien
attatatagtcccccacaaaaagctttctcaaa

SEQ ID NO: 57291 - DNA, 33 bp, Homo sapien
ggaaagccattgtctggaatgctggagagaata

SEQ ID NO: 57292 - DNA, 33 bp, Homo sapien
ggaaagccattgtctgtaatgctggagagaata

SEQ ID NO: 57293 - DNA, 33 bp, Homo sapien
ctaggagtccactctaataagcagaaccgtagc

SEQ ID NO: 57294 - DNA, 33 bp, Homo sapien
ctaggagtccactctactaagcagaaccgtagc

SEQ ID NO: 57295 - DNA, 33 bp, Homo sapien
tttagcattttcattacgtctaggagtccactc

SEQ ID NO: 57296 - DNA, 33 bp, Homo sapien
tttagcattttcattaggtctaggagtccactc

SEQ ID NO: 57297 - DNA, 33 bp, Homo sapien
ctaaatattaattacacgcttattgtgtaccag

SEQ ID NO: 57298 - DNA, 33 bp, Homo sapien
ctaaatattaattacatgcttattgtgtaccag

SEQ ID NO: 57299 - DNA, 33 bp, Homo sapien
gcaagacccaaggcaccaagagaagacagcttt

SEQ ID NO: 57300 - DNA, 33 bp, Homo sapien
gcaagacccaaggcacgaagagaagacagcttt

SEQ ID NO: 57301 - DNA, 33 bp, Homo sapien
actaatcagtcctttaactgaagcaaccagtga

SEQ ID NO: 57302 - DNA, 33 bp, Homo sapien
actaatcagtcctttagctgaagcaaccagtga

SEQ ID NO: 57303 - DNA, 33 bp, Homo sapien
acagattatctgatcacgcaggtatttagccta

SEQ ID NO: 57304 - DNA, 33 bp, Homo sapien
acagattatctgatcatgcaggtatttagccta

SEQ ID NO: 57305 - DNA, 33 bp, Homo sapien
taatattagaatcagaagaatatgaatatatcc

SEQ ID NO: 57306 - DNA, 33 bp, Homo sapien
taatattagaatcagaggaatatgaatatatcc

SEQ ID NO: 57307 - DNA, 33 bp, Homo sapien
ttggaaaaccagtgatgaaattgtcttctaggt

SEQ ID NO: 57308 - DNA, 33 bp, Homo sapien
ttggaaaaccagtgattaaattgtcttctaggt

SEQ ID NO: 57309 - DNA, 33 bp, Homo sapien
cataaaacccttcacacggcaccacatcatctt

SEQ ID NO: 57310 - DNA, 33 bp, Homo sapien
cataaaacccttcacatggcaccacatcatctt

SEQ ID NO: 57311 - DNA, 33 bp, Homo sapien
agatttttataaatccacaacagttactaggaa

SEQ ID NO: 57312 - DNA, 33 bp, Homo sapien
agatttttataaatccgcaacagttactaggaa

SEQ ID NO: 57313 - DNA, 33 bp, Homo sapien
gcttggtggtaggtgcaaagataatactgaatc

SEQ ID NO: 57314 - DNA, 33 bp, Homo sapien
gcttggtggtaggtgccaagataatactgaatc

SEQ ID NO: 57315 - DNA, 33 bp, Homo sapien
agaatcaaatcctgtgaatacagacttatattc

SEQ ID NO: 57316 - DNA, 33 bp, Homo sapien
agaatcaaatcctgtggatacagacttatattc

SEQ ID NO: 57317 - DNA, 33 bp, Homo sapien
tgaaaagagcagttggaatattcactcctaaag

SEQ ID NO: 57318 - DNA, 33 bp, Homo sapien
tgaaaagagcagttgggatattcactcctaaag

SEQ ID NO: 57319 - DNA, 33 bp, Homo sapien
agcaagagtgcaagtaggaataaatacctccag

SEQ ID NO: 57320 - DNA, 33 bp, Homo sapien
agcaagagtgcaagtatgaataaatacctccag

SEQ ID NO: 57321 - DNA, 33 bp, Homo sapien
atgtgaacactattaaagtcactgggagcacaa

SEQ ID NO: 57322 - DNA, 33 bp, Homo sapien
atgtgaacactattaaggtcactgggagcacaa

SEQ ID NO: 57323 - DNA, 33 bp, Homo sapien
tatagaaaggttatgaaatttgttcctagatcc

SEQ ID NO: 57324 - DNA, 33 bp, Homo sapien
tatagaaaggttatgagatttgttcctagatcc

SEQ ID NO: 57325 - DNA, 33 bp, Homo sapien
gaagcataatggaaaccctattgtcactcaggg

SEQ ID NO: 57326 - DNA, 33 bp, Homo sapien
gaagcataatggaaactctattgtcactcaggg

SEQ ID NO: 57327 - DNA, 33 bp, Homo sapien
accaacttgtatgctgaagtcctcagaatttaa

SEQ ID NO: 57328 - DNA, 33 bp, Homo sapien
accaacttgtatgctggagtcctcagaatttaa

SEQ ID NO: 57329 - DNA, 33 bp, Homo sapien
atcaacatttctattacgtggtgttactgccca

SEQ ID NO: 57330 - DNA, 33 bp, Homo sapien
atcaacatttctattatgtggtgttactgccca

SEQ ID NO: 57331 - DNA, 33 bp, Homo sapien
cagactgacttggaaacccacactctcaactgc

SEQ ID NO: 57332 - DNA, 33 bp, Homo sapien
cagactgacttggaaatccacactctcaactgc

SEQ ID NO: 57333 - DNA, 33 bp, Homo sapien
ggaagaggaatgtgtacggcttagcagttgaga

SEQ ID NO: 57334 - DNA, 33 bp, Homo sapien
ggaagaggaatgtgtatggcttagcagttgaga

SEQ ID NO: 57335 - DNA, 33 bp, Homo sapien
taaaaatgtggctacaatggaaaatgaagctgt

SEQ ID NO: 57336 - DNA, 33 bp, Homo sapien
taaaaatgtggctacagtggaaaatgaagctgt

SEQ ID NO: 57337 - DNA, 33 bp, Homo sapien
ttgggaaattgtatcaaccgcttagggcacatg

SEQ ID NO: 57338 - DNA, 33 bp, Homo sapien
ttgggaaattgtatcagccgcttagggcacatg

SEQ ID NO: 57339 - DNA, 33 bp, Homo sapien
tggccaagataggaaacgaagagctgtttgggg

SEQ ID NO: 57340 - DNA, 33 bp, Homo sapien
tggccaagataggaaatgaagagctgtttgggg

SEQ ID NO: 57341 - DNA, 33 bp, Homo sapien
gaagagctgtttggggaagaagataatgagttt

SEQ ID NO: 57342 - DNA, 33 bp, Homo sapien
gaagagctgtttgggggagaagataatgagttt

SEQ ID NO: 57343 - DNA, 33 bp, Homo sapien
ataaaatgagatagtgcacataaattgttctgt

SEQ ID NO: 57344 - DNA, 33 bp, Homo sapien
ataaaatgagatagtgtacataaattgttctgt

SEQ ID NO: 57345 - DNA, 33 bp, Homo sapien
tcatgggtcaaggtcaaagtggtcctggggtag

SEQ ID NO: 57346 - DNA, 33 bp, Homo sapien
tcatgggtcaaggtcagagtggtcctggggtag

SEQ ID NO: 57347 - DNA, 33 bp, Homo sapien
cttaaattctaggacaacattaccttgagcttc

SEQ ID NO: 57348 - DNA, 33 bp, Homo sapien
cttaaattctaggacagcattaccttgagcttc

SEQ ID NO: 57349 - DNA, 33 bp, Homo sapien
acagtgtattaatagcgcttttagtcctgctct

SEQ ID NO: 57350 - DNA, 33 bp, Homo sapien
acagtgtattaatagctcttttagtcctgctct

SEQ ID NO: 57351 - DNA, 33 bp, Homo sapien
tatctgccctccttaccctttgtttgtcagcat

SEQ ID NO: 57352 - DNA, 33 bp, Homo sapien
tatctgccctccttactctttgtttgtcagcat

SEQ ID NO: 57353 - DNA, 33 bp, Homo sapien
tcactggcagattttaagcctgggattgacatg

SEQ ID NO: 57354 - DNA, 33 bp, Homo sapien
tcactggcagattttaggcctgggattgacatg

SEQ ID NO: 57355 - DNA, 33 bp, Homo sapien
tgtgggtaaaagacacaatcaggaggctggatc

SEQ ID NO: 57356 - DNA, 33 bp, Homo sapien
tgtgggtaaaagacaccatcaggaggctggatc

SEQ ID NO: 57357 - DNA, 33 bp, Homo sapien
agaggagagttagtagaatgaggctgcagcaag

SEQ ID NO: 57358 - DNA, 33 bp, Homo sapien
agaggagagttagtaggatgaggctgcagcaag

SEQ ID NO: 57359 - DNA, 33 bp, Homo sapien
gtagctttttgtgttaagcagctttgcaagttc

SEQ ID NO: 57360 - DNA, 33 bp, Homo sapien
gtagctttttgtgttacgcagctttgcaagttc

SEQ ID NO: 57361 - DNA, 33 bp, Homo sapien
aggaatttggtgaacaactagatatggattctg

SEQ ID NO: 57362 - DNA, 33 bp, Homo sapien
aggaatttggtgaacatctagatatggattctg

SEQ ID NO: 57363 - DNA, 33 bp, Homo sapien
aagatcaaagtacaggcatagcatcatgttgtg

SEQ ID NO: 57364 - DNA, 33 bp, Homo sapien
aagatcaaagtacagggatagcatcatgttgtg

SEQ ID NO: 57365 - DNA, 33 bp, Homo sapien
gctatgtggcacatgcaacagggtgggaaagga

SEQ ID NO: 57366 - DNA, 33 bp, Homo sapien
gctatgtggcacatgcgacagggtgggaaagga

SEQ ID NO: 57367 - DNA, 33 bp, Homo sapien
tggataagctgggataaaattccatgtttgtct

SEQ ID NO: 57368 - DNA, 33 bp, Homo sapien
tggataagctgggatacaattccatgtttgtct

SEQ ID NO: 57369 - DNA, 33 bp, Homo sapien
ccctgcccactgcccaataaacttgtggcttta

SEQ ID NO: 57370 - DNA, 33 bp, Homo sapien
ccctgcccactgcccagtaaacttgtggcttta

SEQ ID NO: 57371 - DNA, 33 bp, Homo sapien
actttgtaacatctaaagtggaaaggggatcac

SEQ ID NO: 57372 - DNA, 33 bp, Homo sapien
actttgtaacatctaaggtggaaaggggatcac

SEQ ID NO: 57373 - DNA, 33 bp, Homo sapien
atcactttggttcccactcagttggccaaagca

SEQ ID NO: 57374 - DNA, 33 bp, Homo sapien
atcactttggttcccattcagttggccaaagca

SEQ ID NO: 57375 - DNA, 33 bp, Homo sapien
atgtatttccttcctcaacaccaaggacagcat

SEQ ID NO: 57376 - DNA, 33 bp, Homo sapien
atgtatttccttcctcgacaccaaggacagcat

SEQ ID NO: 57377 - DNA, 33 bp, Homo sapien
gatgcaacaggtcacaccttatttatctctgaa

SEQ ID NO: 57378 - DNA, 33 bp, Homo sapien
gatgcaacaggtcacatcttatttatctctgaa

SEQ ID NO: 57379 - DNA, 33 bp, Homo sapien
gatcccagggccccagaaggaactgacattgtg

SEQ ID NO: 57380 - DNA, 33 bp, Homo sapien
gatcccagggccccagcaggaactgacattgtg

SEQ ID NO: 57381 - DNA, 33 bp, Homo sapien
cagaaataggcagtagaaaaaatctggaggagg

SEQ ID NO: 57382 - DNA, 33 bp, Homo sapien
cagaaataggcagtaggaaaaatctggaggagg

SEQ ID NO: 57383 - DNA, 33 bp, Homo sapien
gaagaagagaggtccgacaattgggaaaagcag

SEQ ID NO: 57384 - DNA, 33 bp, Homo sapien
gaagaagagaggtccggcaattgggaaaagcag

SEQ ID NO: 57385 - DNA, 33 bp, Homo sapien
ccaacaaactatccttcaaaaactctagtcttc

SEQ ID NO: 57386 - DNA, 33 bp, Homo sapien
ccaacaaactatccttgaaaaactctagtcttc

SEQ ID NO: 57387 - DNA, 33 bp, Homo sapien
gggatttactgtgatacgtcatttaatctgtac

SEQ ID NO: 57388 - DNA, 33 bp, Homo sapien
gggatttactgtgatatgtcatttaatctgtac

SEQ ID NO: 57389 - DNA, 33 bp, Homo sapien
tgtaagacagtagttaaatggttatatatgtaa

SEQ ID NO: 57390 - DNA, 33 bp, Homo sapien
tgtaagacagtagttacatggttatatatgtaa

SEQ ID NO: 57391 - DNA, 33 bp, Homo sapien
aataacactgaacaagacagttttgctttccag

SEQ ID NO: 57392 - DNA, 33 bp, Homo sapien
aataacactgaacaagccagttttgctttccag

SEQ ID NO: 57393 - DNA, 33 bp, Homo sapien
aagctaaaatgtagcacgcagtgtagaaatacc

SEQ ID NO: 57394 - DNA, 33 bp, Homo sapien
aagctaaaatgtagcatgcagtgtagaaatacc

SEQ ID NO: 57395 - DNA, 33 bp, Homo sapien
tgagcagggaaatatcacccaagaagtctatca

SEQ ID NO: 57396 - DNA, 33 bp, Homo sapien
tgagcagggaaatatcgcccaagaagtctatca

SEQ ID NO: 57397 - DNA, 33 bp, Homo sapien
gtatggtactgcactgaacacatgcagatcttt

SEQ ID NO: 57398 - DNA, 33 bp, Homo sapien
gtatggtactgcactggacacatgcagatcttt

SEQ ID NO: 57399 - DNA, 33 bp, Homo sapien
cttgtcagaagttagaccatacgttgttaaacg

SEQ ID NO: 57400 - DNA, 33 bp, Homo sapien
cttgtcagaagttagagcatacgttgttaaacg

SEQ ID NO: 57401 - DNA, 33 bp, Homo sapien
agtgaaaggggcttcaatattctctgggatgta

SEQ ID NO: 57402 - DNA, 33 bp, Homo sapien
agtgaaaggggcttcagtattctctgggatgta

SEQ ID NO: 57403 - DNA, 33 bp, Homo sapien
tttcagaggcttatggcacctaacgcttcttaa

SEQ ID NO: 57404 - DNA, 33 bp, Homo sapien
tttcagaggcttatggtacctaacgcttcttaa

SEQ ID NO: 57405 - DNA, 33 bp, Homo sapien
aattcttaatcctctcactcacgtccagggtat

SEQ ID NO: 57406 - DNA, 33 bp, Homo sapien
aattcttaatcctctctctcacgtccagggtat

SEQ ID NO: 57407 - DNA, 33 bp, Homo sapien
atcacctctggacgagccattaggagtcagtgt

SEQ ID NO: 57408 - DNA, 33 bp, Homo sapien
atcacctctggacgagtcattaggagtcagtgt

SEQ ID NO: 57409 - DNA, 33 bp, Homo sapien
atgaggtgtgttcatacgcaggatgagtgcttt

SEQ ID NO: 57410 - DNA, 33 bp, Homo sapien
atgaggtgtgttcatatgcaggatgagtgcttt

SEQ ID NO: 57411 - DNA, 33 bp, Homo sapien
gctaagctgtcttctacggaataaaaaccttgg

SEQ ID NO: 57412 - DNA, 33 bp, Homo sapien
gctaagctgtcttctatggaataaaaaccttgg

SEQ ID NO: 57413 - DNA, 33 bp, Homo sapien
atcatttggtgataaaactggatttgtaacaat

SEQ ID NO: 57414 - DNA, 33 bp, Homo sapien
atcatttggtgataaacctggatttgtaacaat

SEQ ID NO: 57415 - DNA, 33 bp, Homo sapien
ctagtcttctctgcatcagctgtcagtgcaagg

SEQ ID NO: 57416 - DNA, 33 bp, Homo sapien
ctagtcttctctgcatgagctgtcagtgcaagg

SEQ ID NO: 57417 - DNA, 33 bp, Homo sapien
ttctggtgatacagtcactcagaatttctttaa

SEQ ID NO: 57418 - DNA, 33 bp, Homo sapien
ttctggtgatacagtcgctcagaatttctttaa

SEQ ID NO: 57419 - DNA, 33 bp, Homo sapien
aatgggtagttagggacagcgttccagtttaaa

SEQ ID NO: 57420 - DNA, 33 bp, Homo sapien
aatgggtagttagggatagcgttccagtttaaa

SEQ ID NO: 57421 - DNA, 33 bp, Homo sapien
ttgatgctgcagaaacagagacaaagaaggcag

SEQ ID NO: 57422 - DNA, 33 bp, Homo sapien
ttgatgctgcagaaacggagacaaagaaggcag

SEQ ID NO: 57423 - DNA, 33 bp, Homo sapien
gattactacacgatcaccttctttttaacctga

SEQ ID NO: 57424 - DNA, 33 bp, Homo sapien
gattactacacgatcagcttctttttaacctga

SEQ ID NO: 57425 - DNA, 33 bp, Homo sapien
cagaaatctgaaatcccgaacaatgaacaccag

SEQ ID NO: 57426 - DNA, 33 bp, Homo sapien
cagaaatctgaaatcctgaacaatgaacaccag

SEQ ID NO: 57427 - DNA, 33 bp, Homo sapien
ggacttgctgaatcaacaaacatttatttagga

SEQ ID NO: 57428 - DNA, 33 bp, Homo sapien
ggacttgctgaatcaagaaacatttatttagga

SEQ ID NO: 57429 - DNA, 33 bp, Homo sapien
cagtctcttaagattaacttcacaatgatggaa

SEQ ID NO: 57430 - DNA, 33 bp, Homo sapien
cagtctcttaagattagcttcacaatgatggaa

SEQ ID NO: 57431 - DNA, 33 bp, Homo sapien
cttgagcaattatttaacctctccaagtctcag

SEQ ID NO: 57432 - DNA, 33 bp, Homo sapien
cttgagcaattatttagcctctccaagtctcag

SEQ ID NO: 57433 - DNA, 33 bp, Homo sapien
ttggggaagaagccaacctgcaggtcataaaat

SEQ ID NO: 57434 - DNA, 33 bp, Homo sapien
ttggggaagaagccaatctgcaggtcataaaat

SEQ ID NO: 57435 - DNA, 33 bp, Homo sapien
cgctactttcataaaaccaatttcgtcatgcca

SEQ ID NO: 57436 - DNA, 33 bp, Homo sapien
cgctactttcataaaatcaatttcgtcatgcca

SEQ ID NO: 57437 - DNA, 33 bp, Homo sapien
tccaatcagagctagacggaatgattcaccaga

SEQ ID NO: 57438 - DNA, 33 bp, Homo sapien
tccaatcagagctagatggaatgattcaccaga

SEQ ID NO: 57439 - DNA, 33 bp, Homo sapien
tcagaggtaacagagacctgagaggccaaaacg

SEQ ID NO: 57440 - DNA, 33 bp, Homo sapien
tcagaggtaacagagatctgagaggccaaaacg

SEQ ID NO: 57441 - DNA, 33 bp, Homo sapien
ctacctcacaggattcaaaacaatacacaagaa

SEQ ID NO: 57442 - DNA, 33 bp, Homo sapien
ctacctcacaggattcgaaacaatacacaagaa

SEQ ID NO: 57443 - DNA, 33 bp, Homo sapien
tgatagtgatgctgaagtctgaaatatagcaat

SEQ ID NO: 57444 - DNA, 33 bp, Homo sapien
tgatagtgatgctgaattctgaaatatagcaat

SEQ ID NO: 57445 - DNA, 33 bp, Homo sapien
aggactctctcctcaaaaaagatgccctgagtt

SEQ ID NO: 57446 - DNA, 33 bp, Homo sapien
aggactctctcctcaacaaagatgccctgagtt

SEQ ID NO: 57447 - DNA, 33 bp, Homo sapien
agcagcccttgttgaactgcacagcatggaggt

SEQ ID NO: 57448 - DNA, 33 bp, Homo sapien
agcagcccttgttgaattgcacagcatggaggt

SEQ ID NO: 57449 - DNA, 33 bp, Homo sapien
gggaaagtcagccttacgatggatcattgtcca

SEQ ID NO: 57450 - DNA, 33 bp, Homo sapien
gggaaagtcagccttatgatggatcattgtcca

SEQ ID NO: 57451 - DNA, 33 bp, Homo sapien
actatcatggacacccacagtggctgcaggaag

SEQ ID NO: 57452 - DNA, 33 bp, Homo sapien
actatcatggacaccctcagtggctgcaggaag

SEQ ID NO: 57453 - DNA, 33 bp, Homo sapien
aagagagaaaccaatgaagaacttgacaaacta

SEQ ID NO: 57454 - DNA, 33 bp, Homo sapien
aagagagaaaccaatggagaacttgacaaacta

SEQ ID NO: 57455 - DNA, 33 bp, Homo sapien
aggatctagaattaaccgtggctttcaagcaga

SEQ ID NO: 57456 - DNA, 33 bp, Homo sapien
aggatctagaattaactgtggctttcaagcaga

SEQ ID NO: 57457 - DNA, 33 bp, Homo sapien
agggagacagataacaataataggtacagctaa

SEQ ID NO: 57458 - DNA, 33 bp, Homo sapien
agggagacagataacagtaataggtacagctaa

SEQ ID NO: 57459 - DNA, 33 bp, Homo sapien
aatcacttctacagcacatggaaattacggaag

SEQ ID NO: 57460 - DNA, 33 bp, Homo sapien
aatcacttctacagcatatggaaattacggaag

SEQ ID NO: 57461 - DNA, 33 bp, Homo sapien
caatttccatagaagccacttatgatgccaaaa

SEQ ID NO: 57462 - DNA, 33 bp, Homo sapien
caatttccatagaagctacttatgatgccaaaa

SEQ ID NO: 57463 - DNA, 33 bp, Homo sapien
atgatgccaaaaaaccaaattcaaatttcaggt

SEQ ID NO: 57464 - DNA, 33 bp, Homo sapien
atgatgccaaaaaaccgaattcaaatttcaggt

SEQ ID NO: 57465 - DNA, 33 bp, Homo sapien
gttttggtttagtgaagtctgagctaatacttc

SEQ ID NO: 57466 - DNA, 33 bp, Homo sapien
gttttggtttagtgaattctgagctaatacttc

SEQ ID NO: 57467 - DNA, 33 bp, Homo sapien
cctatttcccatacatgaaccactcttcttgtt

SEQ ID NO: 57468 - DNA, 33 bp, Homo sapien
cctatttcccatacattaaccactcttcttgtt

SEQ ID NO: 57469 - DNA, 33 bp, Homo sapien
tctcaggagctgatgacctaaatgtaataataa

SEQ ID NO: 57470 - DNA, 33 bp, Homo sapien
tctcaggagctgatgagctaaatgtaataataa

SEQ ID NO: 57471 - DNA, 33 bp, Homo sapien
gaaatgcaaagcaggaaacgtgcaagggctagt

SEQ ID NO: 57472 - DNA, 33 bp, Homo sapien
gaaatgcaaagcaggagacgtgcaagggctagt

SEQ ID NO: 57473 - DNA, 33 bp, Homo sapien
attgaaggacaggactaacatatacaatgcagc

SEQ ID NO: 57474 - DNA, 33 bp, Homo sapien
attgaaggacaggactgacatatacaatgcagc

SEQ ID NO: 57475 - DNA, 33 bp, Homo sapien
taagggagttctgagacagaaagatcaatataa

SEQ ID NO: 57476 - DNA, 33 bp, Homo sapien
taagggagttctgagagagaaagatcaatataa

SEQ ID NO: 57477 - DNA, 33 bp, Homo sapien
ttgtatccattcagggcccagttgaaggctcat

SEQ ID NO: 57478 - DNA, 33 bp, Homo sapien
ttgtatccattcagggtccagttgaaggctcat

SEQ ID NO: 57479 - DNA, 33 bp, Homo sapien
cgagcataggaactacagacgactttaacattt

SEQ ID NO: 57480 - DNA, 33 bp, Homo sapien
cgagcataggaactacggacgactttaacattt

SEQ ID NO: 57481 - DNA, 33 bp, Homo sapien
catcgctcacaaagaacgctctctaccctcttg

SEQ ID NO: 57482 - DNA, 33 bp, Homo sapien
catcgctcacaaagaatgctctctaccctcttg

SEQ ID NO: 57483 - DNA, 33 bp, Homo sapien
attaggagcaattagtaaacagaatcaaaggtg

SEQ ID NO: 57484 - DNA, 33 bp, Homo sapien
attaggagcaattagtgaacagaatcaaaggtg

SEQ ID NO: 57485 - DNA, 33 bp, Homo sapien
ccttgtacttcctaaaaaatgattcaagataga

SEQ ID NO: 57486 - DNA, 33 bp, Homo sapien
ccttgtacttcctaaacaatgattcaagataga

SEQ ID NO: 57487 - DNA, 33 bp, Homo sapien
gccactttacgccttaccagtttggcaaaattc

SEQ ID NO: 57488 - DNA, 33 bp, Homo sapien
gccactttacgccttatcagtttggcaaaattc

SEQ ID NO: 57489 - DNA, 33 bp, Homo sapien
agcaccgactgagttacatgaaacagaacaagg

SEQ ID NO: 57490 - DNA, 33 bp, Homo sapien
agcaccgactgagttatatgaaacagaacaagg

SEQ ID NO: 57491 - DNA, 33 bp, Homo sapien
cataggacatagaaacagaaacagaattgtttc

SEQ ID NO: 57492 - DNA, 33 bp, Homo sapien
cataggacatagaaaccgaaacagaattgtttc

SEQ ID NO: 57493 - DNA, 33 bp, Homo sapien
aacctcacagatctgaacttatttattatttaa

SEQ ID NO: 57494 - DNA, 33 bp, Homo sapien
aacctcacagatctgagcttatttattatttaa

SEQ ID NO: 57495 - DNA, 33 bp, Homo sapien
ggtcatattagtatcaactatcaaggttaaatc

SEQ ID NO: 57496 - DNA, 33 bp, Homo sapien
ggtcatattagtatcacctatcaaggttaaatc

SEQ ID NO: 57497 - DNA, 33 bp, Homo sapien
cacagtgcagagatgaacaaacatatagactgc

SEQ ID NO: 57498 - DNA, 33 bp, Homo sapien
cacagtgcagagatgagcaaacatatagactgc

SEQ ID NO: 57499 - DNA, 33 bp, Homo sapien
gtaagataattgccgcagagacactttggaagc

SEQ ID NO: 57500 - DNA, 33 bp, Homo sapien
gtaagataattgccgcggagacactttggaagc

SEQ ID NO: 57501 - DNA, 33 bp, Homo sapien
ttagagtcaccacttaaaaaaatcataactcca

SEQ ID NO: 57502 - DNA, 33 bp, Homo sapien
ttagagtcaccacttacaaaaatcataactcca

SEQ ID NO: 57503 - DNA, 33 bp, Homo sapien
ttgttcccagtctacccctagatcctgcacatg

SEQ ID NO: 57504 - DNA, 33 bp, Homo sapien
ttgttcccagtctacctctagatcctgcacatg

SEQ ID NO: 57505 - DNA, 33 bp, Homo sapien
ctgtgttggtcttcgaatcaacaatcatttatt

SEQ ID NO: 57506 - DNA, 33 bp, Homo sapien
ctgtgttggtcttcgagtcaacaatcatttatt

SEQ ID NO: 57507 - DNA, 33 bp, Homo sapien
acactttgatgctgtcgatcggggctctttcta

SEQ ID NO: 57508 - DNA, 33 bp, Homo sapien
acactttgatgctgtctatcggggctctttcta

SEQ ID NO: 57509 - DNA, 33 bp, Homo sapien
aatgtatggatcagtgcacaaaattaatgtgga

SEQ ID NO: 57510 - DNA, 33 bp, Homo sapien
aatgtatggatcagtgtacaaaattaatgtgga

SEQ ID NO: 57511 - DNA, 33 bp, Homo sapien
agctttgacttgtaaaacagcagctaaattgtc

SEQ ID NO: 57512 - DNA, 33 bp, Homo sapien
agctttgacttgtaaagcagcagctaaattgtc

SEQ ID NO: 57513 - DNA, 33 bp, Homo sapien
tcaatatatctcttaaatgtttcctgcttttct

SEQ ID NO: 57514 - DNA, 33 bp, Homo sapien
tcaatatatctcttaagtgtttcctgcttttct

SEQ ID NO: 57515 - DNA, 33 bp, Homo sapien
aagctcacaagggagaactaggccagaattata

SEQ ID NO: 57516 - DNA, 33 bp, Homo sapien
aagctcacaagggagatctaggccagaattata

SEQ ID NO: 57517 - DNA, 33 bp, Homo sapien
aatgttgatgtgataaaccctttctaacctgta

SEQ ID NO: 57518 - DNA, 33 bp, Homo sapien
aatgttgatgtgataagccctttctaacctgta

SEQ ID NO: 57519 - DNA, 33 bp, Homo sapien
atctgaaaaaggcagccaggttgtaaagtgtac

SEQ ID NO: 57520 - DNA, 33 bp, Homo sapien
atctgaaaaaggcagctaggttgtaaagtgtac

SEQ ID NO: 57521 - DNA, 33 bp, Homo sapien
tagaagtcaatgaccaaaggcccagagtgacaa

SEQ ID NO: 57522 - DNA, 33 bp, Homo sapien
tagaagtcaatgaccacaggcccagagtgacaa

SEQ ID NO: 57523 - DNA, 33 bp, Homo sapien
tggaaagtatacaccaaacctaatttaacattc

SEQ ID NO: 57524 - DNA, 33 bp, Homo sapien
tggaaagtatacaccagacctaatttaacattc

SEQ ID NO: 57525 - DNA, 33 bp, Homo sapien
ttttccttgctgattcaagttgtttgtagatac

SEQ ID NO: 57526 - DNA, 33 bp, Homo sapien
ttttccttgctgattcgagttgtttgtagatac

SEQ ID NO: 57527 - DNA, 33 bp, Homo sapien
agcatggcaattttaaatctcaggcagtatcac

SEQ ID NO: 57528 - DNA, 33 bp, Homo sapien
agcatggcaattttaattctcaggcagtatcac

SEQ ID NO: 57529 - DNA, 33 bp, Homo sapien
ctttaatcccaactcaaagatcaattcctcaga

SEQ ID NO: 57530 - DNA, 33 bp, Homo sapien
ctttaatcccaactcagagatcaattcctcaga

SEQ ID NO: 57531 - DNA, 33 bp, Homo sapien
ctttaacaacattcccacaaagtaggataagac

SEQ ID NO: 57532 - DNA, 33 bp, Homo sapien
ctttaacaacattcccgcaaagtaggataagac

SEQ ID NO: 57533 - DNA, 33 bp, Homo sapien
gcttttgttacctagaagaggtcctcagaaact

SEQ ID NO: 57534 - DNA, 33 bp, Homo sapien
gcttttgttacctagacgaggtcctcagaaact

SEQ ID NO: 57535 - DNA, 33 bp, Homo sapien
tgaagcaagctacataagaatactcaaaataca

SEQ ID NO: 57536 - DNA, 33 bp, Homo sapien
tgaagcaagctacataggaatactcaaaataca

SEQ ID NO: 57537 - DNA, 33 bp, Homo sapien
agaattaaggttgctgcaggcctgtatgggtgc

SEQ ID NO: 57538 - DNA, 33 bp, Homo sapien
agaattaaggttgctgtaggcctgtatgggtgc

SEQ ID NO: 57539 - DNA, 33 bp, Homo sapien
tggaataagatgtccacatgtgttgaggctggg

SEQ ID NO: 57540 - DNA, 33 bp, Homo sapien
tggaataagatgtccagatgtgttgaggctggg

SEQ ID NO: 57541 - DNA, 33 bp, Homo sapien
atcactgctttctgtaaaatttttgtcttttgt

SEQ ID NO: 57542 - DNA, 33 bp, Homo sapien
atcactgctttctgtagaatttttgtcttttgt

SEQ ID NO: 57543 - DNA, 33 bp, Homo sapien
actatttaggatgttaaaattcttaattctgat

SEQ ID NO: 57544 - DNA, 33 bp, Homo sapien
actatttaggatgttacaattcttaattctgat

SEQ ID NO: 57545 - DNA, 33 bp, Homo sapien
tactggtgttgtcttacatgatgtaatattaga

SEQ ID NO: 57546 - DNA, 33 bp, Homo sapien
tactggtgttgtcttatatgatgtaatattaga

SEQ ID NO: 57547 - DNA, 33 bp, Homo sapien
gtggtcctggcccagcaccaaacttaataaatg

SEQ ID NO: 57548 - DNA, 33 bp, Homo sapien
gtggtcctggcccagcgccaaacttaataaatg

SEQ ID NO: 57549 - DNA, 33 bp, Homo sapien
tggctgatgtggcaaactatatgaaagataaaa

SEQ ID NO: 57550 - DNA, 33 bp, Homo sapien
tggctgatgtggcaaattatatgaaagataaaa

SEQ ID NO: 57551 - DNA, 33 bp, Homo sapien
aacctaattgcatttccatagatcaacaataaa

SEQ ID NO: 57552 - DNA, 33 bp, Homo sapien
aacctaattgcatttctatagatcaacaataaa

SEQ ID NO: 57553 - DNA, 33 bp, Homo sapien
ttgtgataaaggactgaaagcaagaataactag

SEQ ID NO: 57554 - DNA, 33 bp, Homo sapien
ttgtgataaaggactggaagcaagaataactag

SEQ ID NO: 57555 - DNA, 33 bp, Homo sapien
gttgaagttagaaaaaactctcattgacaaata

SEQ ID NO: 57556 - DNA, 33 bp, Homo sapien
gttgaagttagaaaaatctctcattgacaaata

SEQ ID NO: 57557 - DNA, 33 bp, Homo sapien
attattaaatcagttacagaaaaggtttaaata

SEQ ID NO: 57558 - DNA, 33 bp, Homo sapien
attattaaatcagttatagaaaaggtttaaata

SEQ ID NO: 57559 - DNA, 33 bp, Homo sapien
ctgaaatgtatatccacctagtgccaaaaggac

SEQ ID NO: 57560 - DNA, 33 bp, Homo sapien
ctgaaatgtatatccagctagtgccaaaaggac

SEQ ID NO: 57561 - DNA, 33 bp, Homo sapien
atattaaaatttctcactcagacacggtagctc

SEQ ID NO: 57562 - DNA, 33 bp, Homo sapien
atattaaaatttctcagtcagacacggtagctc

SEQ ID NO: 57563 - DNA, 33 bp, Homo sapien
ggtgggcccaataatagaggactctgttcttaa

SEQ ID NO: 57564 - DNA, 33 bp, Homo sapien
ggtgggcccaataatataggactctgttcttaa

SEQ ID NO: 57565 - DNA, 33 bp, Homo sapien
ttgtgctagggaatgaagatacaaagattgtat

SEQ ID NO: 57566 - DNA, 33 bp, Homo sapien
ttgtgctagggaatgaggatacaaagattgtat

SEQ ID NO: 57567 - DNA, 33 bp, Homo sapien
tagacttttagtctcaaaattgccataaaagta

SEQ ID NO: 57568 - DNA, 33 bp, Homo sapien
tagacttttagtctcataattgccataaaagta

SEQ ID NO: 57569 - DNA, 33 bp, Homo sapien
taatcttcaaaatgtaacgtctagaacttttca

SEQ ID NO: 57570 - DNA, 33 bp, Homo sapien
taatcttcaaaatgtagcgtctagaacttttca

SEQ ID NO: 57571 - DNA, 33 bp, Homo sapien
ttgcatttttcaacctcaaatgacatatcatat

SEQ ID NO: 57572 - DNA, 33 bp, Homo sapien
ttgcatttttcaaccttaaatgacatatcatat

SEQ ID NO: 57573 - DNA, 33 bp, Homo sapien
tgtagcctgaataaagccatgattggtgtgttg

SEQ ID NO: 57574 - DNA, 33 bp, Homo sapien
tgtagcctgaataaagtcatgattggtgtgttg

SEQ ID NO: 57575 - DNA, 33 bp, Homo sapien
agggcatatagttaacacttgtagcagtcttag

SEQ ID NO: 57576 - DNA, 33 bp, Homo sapien
agggcatatagttaacgcttgtagcagtcttag

SEQ ID NO: 57577 - DNA, 33 bp, Homo sapien
atgtttccctcgaaaacttggaaatcacataaa

SEQ ID NO: 57578 - DNA, 33 bp, Homo sapien
atgtttccctcgaaaatttggaaatcacataaa

SEQ ID NO: 57579 - DNA, 33 bp, Homo sapien
ttattgtaatttcatagaaccaactgaatctta

SEQ ID NO: 57580 - DNA, 33 bp, Homo sapien
ttattgtaatttcatataaccaactgaatctta

SEQ ID NO: 57581 - DNA, 33 bp, Homo sapien
gcacttgagttgctacaccatcatctttcagaa

SEQ ID NO: 57582 - DNA, 33 bp, Homo sapien
gcacttgagttgctacgccatcatctttcagaa

SEQ ID NO: 57583 - DNA, 33 bp, Homo sapien
cacggtagatgtacaacaactgcgccctcctga

SEQ ID NO: 57584 - DNA, 33 bp, Homo sapien
cacggtagatgtacaataactgcgccctcctga

SEQ ID NO: 57585 - DNA, 33 bp, Homo sapien
cacagggacagaacaaggacaatggctcccgtc

SEQ ID NO: 57586 - DNA, 33 bp, Homo sapien
cacagggacagaacaatgacaatggctcccgtc

SEQ ID NO: 57587 - DNA, 33 bp, Homo sapien
gaatgtgaacacaccacagtagcagaggaaggg

SEQ ID NO: 57588 - DNA, 33 bp, Homo sapien
gaatgtgaacacaccatagtagcagaggaaggg

SEQ ID NO: 57589 - DNA, 33 bp, Homo sapien
aagcataaaaacgaacaatgtctccctctatca

SEQ ID NO: 57590 - DNA, 33 bp, Homo sapien
aagcataaaaacgaaccatgtctccctctatca

SEQ ID NO: 57591 - DNA, 33 bp, Homo sapien
acacaatcatcagcaggaaatcatttttatcca

SEQ ID NO: 57592 - DNA, 33 bp, Homo sapien
acacaatcatcagcagtaaatcatttttatcca

SEQ ID NO: 57593 - DNA, 33 bp, Homo sapien
atgctgcataccaaatcagccctctgtctgctc

SEQ ID NO: 57594 - DNA, 33 bp, Homo sapien
atgctgcataccaaatgagccctctgtctgctc

SEQ ID NO: 57595 - DNA, 33 bp, Homo sapien
agttcttctatcatccgggaagagggttgggac

SEQ ID NO: 57596 - DNA, 33 bp, Homo sapien
agttcttctatcatcctggaagagggttgggac

SEQ ID NO: 57597 - DNA, 33 bp, Homo sapien
tcagaggcatcagaaaacatcctgctgagactg

SEQ ID NO: 57598 - DNA, 33 bp, Homo sapien
tcagaggcatcagaaaccatcctgctgagactg

SEQ ID NO: 57599 - DNA, 33 bp, Homo sapien
tcgaagtgcaaggcacacgtcagaagcagtggc

SEQ ID NO: 57600 - DNA, 33 bp, Homo sapien
tcgaagtgcaaggcacgcgtcagaagcagtggc

SEQ ID NO: 57601 - DNA, 33 bp, Homo sapien
tggagaaagcactttaagataactagaagcaag

SEQ ID NO: 57602 - DNA, 33 bp, Homo sapien
tggagaaagcactttaggataactagaagcaag

SEQ ID NO: 57603 - DNA, 33 bp, Homo sapien
atccgattcctaacaaatcacatcttgtcgtgc

SEQ ID NO: 57604 - DNA, 33 bp, Homo sapien
atccgattcctaacaactcacatcttgtcgtgc

SEQ ID NO: 57605 - DNA, 33 bp, Homo sapien
tggtgtcatcacggacacttgcctctcaagact

SEQ ID NO: 57606 - DNA, 33 bp, Homo sapien
tggtgtcatcacggacgcttgcctctcaagact

SEQ ID NO: 57607 - DNA, 33 bp, Homo sapien
gtccaaaacatcagagccaaaatgtcccatatt

SEQ ID NO: 57608 - DNA, 33 bp, Homo sapien
gtccaaaacatcagagtcaaaatgtcccatatt

SEQ ID NO: 57609 - DNA, 33 bp, Homo sapien
attttcaaataacttaaagcgtaactggattgt

SEQ ID NO: 57610 - DNA, 33 bp, Homo sapien
attttcaaataacttagagcgtaactggattgt

SEQ ID NO: 57611 - DNA, 33 bp, Homo sapien
aaactgacaatctgcacggagaggaaagacata

SEQ ID NO: 57612 - DNA, 33 bp, Homo sapien
aaactgacaatctgcatggagaggaaagacata

SEQ ID NO: 57613 - DNA, 33 bp, Homo sapien
gggaagcaattgtgtcaatggaaacaatagaac

SEQ ID NO: 57614 - DNA, 33 bp, Homo sapien
gggaagcaattgtgtcgatggaaacaatagaac

SEQ ID NO: 57615 - DNA, 33 bp, Homo sapien
caattcagaaaggcgaagatggggcccaggaat

SEQ ID NO: 57616 - DNA, 33 bp, Homo sapien
caattcagaaaggcgaggatggggcccaggaat

SEQ ID NO: 57617 - DNA, 33 bp, Homo sapien
taggctagactggagcacttgtctacactgctt

SEQ ID NO: 57618 - DNA, 33 bp, Homo sapien
taggctagactggagcgcttgtctacactgctt

SEQ ID NO: 57619 - DNA, 33 bp, Homo sapien
gttcatttaattaagaatctgatgttgcggaag

SEQ ID NO: 57620 - DNA, 33 bp, Homo sapien
gttcatttaattaagactctgatgttgcggaag

SEQ ID NO: 57621 - DNA, 33 bp, Homo sapien
gagcaaatatcacaaacgttgtctttattctgt

SEQ ID NO: 57622 - DNA, 33 bp, Homo sapien
gagcaaatatcacaaatgttgtctttattctgt

SEQ ID NO: 57623 - DNA, 33 bp, Homo sapien
tgattctgacagttggcagaccttatcaaacac

SEQ ID NO: 57624 - DNA, 33 bp, Homo sapien
tgattctgacagttgggagaccttatcaaacac

SEQ ID NO: 57625 - DNA, 33 bp, Homo sapien
aacctagactctctagaaaaaaaagtccttgag

SEQ ID NO: 57626 - DNA, 33 bp, Homo sapien
aacctagactctctaggaaaaaaagtccttgag

SEQ ID NO: 57627 - DNA, 33 bp, Homo sapien
ttgtgttaccgagaacacaagcatctgtcagaa

SEQ ID NO: 57628 - DNA, 33 bp, Homo sapien
ttgtgttaccgagaacccaagcatctgtcagaa

SEQ ID NO: 57629 - DNA, 33 bp, Homo sapien
tgtttaactcaccgagaaagtcagtcacagaac

SEQ ID NO: 57630 - DNA, 33 bp, Homo sapien
tgtttaactcaccgaggaagtcagtcacagaac

SEQ ID NO: 57631 - DNA, 33 bp, Homo sapien
aaagcgcgggacaaagccagagctggagctgtt

SEQ ID NO: 57632 - DNA, 33 bp, Homo sapien
aaagcgcgggacaaaggcagagctggagctgtt

SEQ ID NO: 57633 - DNA, 33 bp, Homo sapien
tgtgagagaaatctgaaattgttggcagaaaac

SEQ ID NO: 57634 - DNA, 33 bp, Homo sapien
tgtgagagaaatctgacattgttggcagaaaac

SEQ ID NO: 57635 - DNA, 33 bp, Homo sapien
gagtgacatagaaagacaggcttctttttctct

SEQ ID NO: 57636 - DNA, 33 bp, Homo sapien
gagtgacatagaaagagaggcttctttttctct

SEQ ID NO: 57637 - DNA, 33 bp, Homo sapien
tcactccctggaagaactcagagtcctgatgtc

SEQ ID NO: 57638 - DNA, 33 bp, Homo sapien
tcactccctggaagaattcagagtcctgatgtc

SEQ ID NO: 57639 - DNA, 33 bp, Homo sapien
gaaccccagcattaaaccactttccgcaccaat

SEQ ID NO: 57640 - DNA, 33 bp, Homo sapien
gaaccccagcattaaatcactttccgcaccaat

SEQ ID NO: 57641 - DNA, 33 bp, Homo sapien
ttccttggcttttccaagtttgcatagctccat

SEQ ID NO: 57642 - DNA, 33 bp, Homo sapien
ttccttggcttttccacgtttgcatagctccat

SEQ ID NO: 57643 - DNA, 33 bp, Homo sapien
atcgtccatttttcacccctcagttccagccca

SEQ ID NO: 57644 - DNA, 33 bp, Homo sapien
atcgtccatttttcactcctcagttccagccca

SEQ ID NO: 57645 - DNA, 33 bp, Homo sapien
gaaaaatggcaagatacaggactcactacctaa

SEQ ID NO: 57646 - DNA, 33 bp, Homo sapien
gaaaaatggcaagatataggactcactacctaa

SEQ ID NO: 57647 - DNA, 33 bp, Homo sapien
tgtttttcttctccaaatctcagtggccacact

SEQ ID NO: 57648 - DNA, 33 bp, Homo sapien
tgtttttcttctccaactctcagtggccacact

SEQ ID NO: 57649 - DNA, 33 bp, Homo sapien
cagaaactcctttttacctgccatctgcaatca

SEQ ID NO: 57650 - DNA, 33 bp, Homo sapien
cagaaactcctttttatctgccatctgcaatca

SEQ ID NO: 57651 - DNA, 33 bp, Homo sapien
agatgccaaatttccacatagtagaacattaaa

SEQ ID NO: 57652 - DNA, 33 bp, Homo sapien
agatgccaaatttccatatagtagaacattaaa

SEQ ID NO: 57653 - DNA, 33 bp, Homo sapien
acacagataggattagaactcaggctttgcttc

SEQ ID NO: 57654 - DNA, 33 bp, Homo sapien
acacagataggattagtactcaggctttgcttc

SEQ ID NO: 57655 - DNA, 33 bp, Homo sapien
tgaagagacatgacaactacatctgtttgaatc

SEQ ID NO: 57656 - DNA, 33 bp, Homo sapien
tgaagagacatgacaattacatctgtttgaatc

SEQ ID NO: 57657 - DNA, 33 bp, Homo sapien
acattgaagaaaccaactgatgcataattacgt

SEQ ID NO: 57658 - DNA, 33 bp, Homo sapien
acattgaagaaaccaagtgatgcataattacgt

SEQ ID NO: 57659 - DNA, 33 bp, Homo sapien
tgttagtaatagcaacaagatctgccacatcag

SEQ ID NO: 57660 - DNA, 33 bp, Homo sapien
tgttagtaatagcaacgagatctgccacatcag

SEQ ID NO: 57661 - DNA, 33 bp, Homo sapien
tatgtagacattgacacagatgttgacataggt

SEQ ID NO: 57662 - DNA, 33 bp, Homo sapien
tatgtagacattgacatagatgttgacataggt

SEQ ID NO: 57663 - DNA, 33 bp, Homo sapien
tcaatctgaaaaccaacgcaactactaagtgac

SEQ ID NO: 57664 - DNA, 33 bp, Homo sapien
tcaatctgaaaaccaatgcaactactaagtgac

SEQ ID NO: 57665 - DNA, 33 bp, Homo sapien
cagcaaactgggacgcaactgctggggtagcta

SEQ ID NO: 57666 - DNA, 33 bp, Homo sapien
cagcaaactgggacgcgactgctggggtagcta

SEQ ID NO: 57667 - DNA, 33 bp, Homo sapien
tgtgttcatgattggacacatttgcctacagag

SEQ ID NO: 57668 - DNA, 33 bp, Homo sapien
tgtgttcatgattggatacatttgcctacagag

SEQ ID NO: 57669 - DNA, 33 bp, Homo sapien
tctgtaaattggtgataataagcctcttgcatg

SEQ ID NO: 57670 - DNA, 33 bp, Homo sapien
tctgtaaattggtgatgataagcctcttgcatg

SEQ ID NO: 57671 - DNA, 33 bp, Homo sapien
gtccaaatatgtgggacacctcaaaggccacat

SEQ ID NO: 57672 - DNA, 33 bp, Homo sapien
gtccaaatatgtgggatacctcaaaggccacat

SEQ ID NO: 57673 - DNA, 33 bp, Homo sapien
ttcttctttttttttcacctactcaaatatttc

SEQ ID NO: 57674 - DNA, 33 bp, Homo sapien
ttcttctttttttttcgcctactcaaatatttc

SEQ ID NO: 57675 - DNA, 33 bp, Homo sapien
tggatggctgccaaatcattgttgctatggggg

SEQ ID NO: 57676 - DNA, 33 bp, Homo sapien
tggatggctgccaaattattgttgctatggggg

SEQ ID NO: 57677 - DNA, 33 bp, Homo sapien
gtagctgggacttcagacatacatcaccttgcc

SEQ ID NO: 57678 - DNA, 33 bp, Homo sapien
gtagctgggacttcaggcatacatcaccttgcc

SEQ ID NO: 57679 - DNA, 33 bp, Homo sapien
aagttcataatgaaacacttaaatgataggtgt

SEQ ID NO: 57680 - DNA, 33 bp, Homo sapien
aagttcataatgaaacgcttaaatgataggtgt

SEQ ID NO: 57681 - DNA, 33 bp, Homo sapien
gagatctctgccctctcagaacttgtgtcatgt

SEQ ID NO: 57682 - DNA, 33 bp, Homo sapien
gagatctctgccctcttagaacttgtgtcatgt

SEQ ID NO: 57683 - DNA, 33 bp, Homo sapien
gcaactgaaaatatcccgactgatatgtgtgag

SEQ ID NO: 57684 - DNA, 33 bp, Homo sapien
gcaactgaaaatatcctgactgatatgtgtgag

SEQ ID NO: 57685 - DNA, 33 bp, Homo sapien
ctgggaacctggtaagcaggtcactgacaaact

SEQ ID NO: 57686 - DNA, 33 bp, Homo sapien
ctgggaacctggtaagtaggtcactgacaaact

SEQ ID NO: 57687 - DNA, 33 bp, Homo sapien
tagtttaattttgacacgtgtatttaacaaatt

SEQ ID NO: 57688 - DNA, 33 bp, Homo sapien
tagtttaattttgacatgtgtatttaacaaatt

SEQ ID NO: 57689 - DNA, 33 bp, Homo sapien
gaacacagctcatgcacccccaagaggcctctg

SEQ ID NO: 57690 - DNA, 33 bp, Homo sapien
gaacacagctcatgcatccccaagaggcctctg

SEQ ID NO: 57691 - DNA, 33 bp, Homo sapien
tcttatctatttgcaacgggagatgtactttct

SEQ ID NO: 57692 - DNA, 33 bp, Homo sapien
tcttatctatttgcaatgggagatgtactttct

SEQ ID NO: 57693 - DNA, 33 bp, Homo sapien
catcttatcctatctaacagggcctggatgtga

SEQ ID NO: 57694 - DNA, 33 bp, Homo sapien
catcttatcctatctatcagggcctggatgtga

SEQ ID NO: 57695 - DNA, 33 bp, Homo sapien
tgaaggtaagtggaacaaaagagaaagaaggtt

SEQ ID NO: 57696 - DNA, 33 bp, Homo sapien
tgaaggtaagtggaacgaaagagaaagaaggtt

SEQ ID NO: 57697 - DNA, 33 bp, Homo sapien
tgaatgcctattcaaactgcgagttttctccca

SEQ ID NO: 57698 - DNA, 33 bp, Homo sapien
tgaatgcctattcaaattgcgagttttctccca

SEQ ID NO: 57699 - DNA, 33 bp, Homo sapien
gctgccatttctaccaaacattcaaggaacaca

SEQ ID NO: 57700 - DNA, 33 bp, Homo sapien
gctgccatttctaccatacattcaaggaacaca

SEQ ID NO: 57701 - DNA, 33 bp, Homo sapien
gcaagtgccatgaaccaattcaaactatctgta

SEQ ID NO: 57702 - DNA, 33 bp, Homo sapien
gcaagtgccatgaaccgattcaaactatctgta

SEQ ID NO: 57703 - DNA, 33 bp, Homo sapien
agcctggactcttaacggctgtgttatcctgcc

SEQ ID NO: 57704 - DNA, 33 bp, Homo sapien
agcctggactcttaactgctgtgttatcctgcc

SEQ ID NO: 57705 - DNA, 33 bp, Homo sapien
atgccaaatgtaaaaacgaacatgaggaacatg

SEQ ID NO: 57706 - DNA, 33 bp, Homo sapien
atgccaaatgtaaaaatgaacatgaggaacatg

SEQ ID NO: 57707 - DNA, 33 bp, Homo sapien
aatgttaacagcatacacattgaacctaaaata

SEQ ID NO: 57708 - DNA, 33 bp, Homo sapien
aatgttaacagcatactcattgaacctaaaata

SEQ ID NO: 57709 - DNA, 33 bp, Homo sapien
tgaaaacctcaacaggaatttggagaagggaga

SEQ ID NO: 57710 - DNA, 33 bp, Homo sapien
tgaaaacctcaacagggatttggagaagggaga

SEQ ID NO: 57711 - DNA, 33 bp, Homo sapien
tctactccttcctagaagatgtgctgattgata

SEQ ID NO: 57712 - DNA, 33 bp, Homo sapien
tctactccttcctagaggatgtgctgattgata

SEQ ID NO: 57713 - DNA, 33 bp, Homo sapien
cagtttctttaggatcggacttaagacccacct

SEQ ID NO: 57714 - DNA, 33 bp, Homo sapien
cagtttctttaggatctgacttaagacccacct

SEQ ID NO: 57715 - DNA, 33 bp, Homo sapien
cctgccgtaattcccaatcgacagagatatgtc

SEQ ID NO: 57716 - DNA, 33 bp, Homo sapien
cctgccgtaattcccagtcgacagagatatgtc

SEQ ID NO: 57717 - DNA, 33 bp, Homo sapien
aaaaacacacacaaaaatatattactcacatat

SEQ ID NO: 57718 - DNA, 33 bp, Homo sapien
aaaaacacacacaaaagtatattactcacatat

SEQ ID NO: 57719 - DNA, 33 bp, Homo sapien
ggtgtcagacatttgacattagaattctggctt

SEQ ID NO: 57720 - DNA, 33 bp, Homo sapien
ggtgtcagacatttgatattagaattctggctt

SEQ ID NO: 57721 - DNA, 33 bp, Homo sapien
agtataaattatttcaatcttcttagaatcatt

SEQ ID NO: 57722 - DNA, 33 bp, Homo sapien
agtataaattatttcagtcttcttagaatcatt

SEQ ID NO: 57723 - DNA, 33 bp, Homo sapien
aacagtattcaatagaagttattgttatgttct

SEQ ID NO: 57724 - DNA, 33 bp, Homo sapien
aacagtattcaatagatgttattgttatgttct

SEQ ID NO: 57725 - DNA, 33 bp, Homo sapien
aggcagagagtcagaacagaagggtttaaggga

SEQ ID NO: 57726 - DNA, 33 bp, Homo sapien
aggcagagagtcagaatagaagggtttaaggga

SEQ ID NO: 57727 - DNA, 33 bp, Homo sapien
agtagtcaaccacaagcaatagctttctgtagg

SEQ ID NO: 57728 - DNA, 33 bp, Homo sapien
agtagtcaaccacaagtaatagctttctgtagg

SEQ ID NO: 57729 - DNA, 33 bp, Homo sapien
ggattagtcctttgtacgataccatgtaggatt

SEQ ID NO: 57730 - DNA, 33 bp, Homo sapien
ggattagtcctttgtatgataccatgtaggatt

SEQ ID NO: 57731 - DNA, 33 bp, Homo sapien
tcgagtgcttcatcatcagagtacctcaagtta

SEQ ID NO: 57732 - DNA, 33 bp, Homo sapien
tcgagtgcttcatcattagagtacctcaagtta

SEQ ID NO: 57733 - DNA, 33 bp, Homo sapien; identical to SEQ ID NO: 57731

SEQ ID NO: 57734 - DNA, 33 bp, Homo sapien; identical to SEQ ID NO: 57732

SEQ ID NO: 57735 - DNA, 33 bp, Homo sapien
acaatagcctacaggaaactccacacaggtatt

SEQ ID NO: 57736 - DNA, 33 bp, Homo sapien
acaatagcctacaggagactccacacaggtatt

SEQ ID NO: 57737 - DNA, 33 bp, Homo sapien
gcaatggactgtgtaacgctgccaagtgagatg

SEQ ID NO: 57738 - DNA, 33 bp, Homo sapien
gcaatggactgtgtaatgctgccaagtgagatg

SEQ ID NO: 57739 - DNA, 33 bp, Homo sapien
accttctccatgcagaactaaataagaagccat

SEQ ID NO: 57740 - DNA, 33 bp, Homo sapien
accttctccatgcagacctaaataagaagccat

SEQ ID NO: 57741 - DNA, 33 bp, Homo sapien
cccaggaggtgggactaagagagagggctgacc

SEQ ID NO: 57742 - DNA, 33 bp, Homo sapien
cccaggaggtgggactcagagagagggctgacc

SEQ ID NO: 57743 - DNA, 33 bp, Homo sapien
gaggatgttctctaaacgccgaagaggaatttc

SEQ ID NO: 57744 - DNA, 33 bp, Homo sapien
gaggatgttctctaaatgccgaagaggaatttc

SEQ ID NO: 57745 - DNA, 33 bp, Homo sapien
aattgtataaatgtagacagggaagagggcaaa

SEQ ID NO: 57746 - DNA, 33 bp, Homo sapien
aattgtataaatgtaggcagggaagagggcaaa

SEQ ID NO: 57747 - DNA, 33 bp, Homo sapien
gttgaaacatccagaaaagaatgttcacagcag

SEQ ID NO: 57748 - DNA, 33 bp, Homo sapien
gttgaaacatccagaagagaatgttcacagcag

SEQ ID NO: 57749 - DNA, 33 bp, Homo sapien
cagactggcaattcacaagtaaatgcaaggttt

SEQ ID NO: 57750 - DNA, 33 bp, Homo sapien
cagactggcaattcacgagtaaatgcaaggttt

SEQ ID NO: 57751 - DNA, 33 bp, Homo sapien
tccagtggggcttagacatacagaagcctgtgg

SEQ ID NO: 57752 - DNA, 33 bp, Homo sapien
tccagtggggcttagatatacagaagcctgtgg

SEQ ID NO: 57753 - DNA, 33 bp, Homo sapien
atttttcgtccctcctcacactcttaaagtaac

SEQ ID NO: 57754 - DNA, 33 bp, Homo sapien
atttttcgtccctccttacactcttaaagtaac

SEQ ID NO: 57755 - DNA, 33 bp, Homo sapien
tatgaaatggaaatacaatgtgctctccaaata

SEQ ID NO: 57756 - DNA, 33 bp, Homo sapien
tatgaaatggaaatactatgtgctctccaaata

SEQ ID NO: 57757 - DNA, 33 bp, Homo sapien
gcctcacttgcagcacagaaggtttctactgga

SEQ ID NO: 57758 - DNA, 33 bp, Homo sapien
gcctcacttgcagcacggaaggtttctactgga

SEQ ID NO: 57759 - DNA, 33 bp, Homo sapien
caagaggatccttagacgttaatccttagacgt

SEQ ID NO: 57760 - DNA, 33 bp, Homo sapien
caagaggatccttagatgttaatccttagacgt

SEQ ID NO: 57761 - DNA, 33 bp, Homo sapien
ccgtttgataatgagaagttttatgtaccttgt

SEQ ID NO: 57762 - DNA, 33 bp, Homo sapien
ccgtttgataatgagaggttttatgtaccttgt

SEQ ID NO: 57763 - DNA, 33 bp, Homo sapien
tatatttaatagttaactccatttttgcagctt

SEQ ID NO: 57764 - DNA, 33 bp, Homo sapien
tatatttaatagttaattccatttttgcagctt

SEQ ID NO: 57765 - DNA, 33 bp, Homo sapien
tctttagcaagcattacggtgctactcaagggc

SEQ ID NO: 57766 - DNA, 33 bp, Homo sapien
tctttagcaagcattatggtgctactcaagggc

SEQ ID NO: 57767 - DNA, 33 bp, Homo sapien
tcttgactaggtttgcaactttcaagtgctggg

SEQ ID NO: 57768 - DNA, 33 bp, Homo sapien
tcttgactaggtttgcgactttcaagtgctggg

SEQ ID NO: 57769 - DNA, 33 bp, Homo sapien
taaatgaggcccaccccagatatttaggtcact

SEQ ID NO: 57770 - DNA, 33 bp, Homo sapien
taaatgaggcccacccgagatatttaggtcact

SEQ ID NO: 57771 - DNA, 33 bp, Homo sapien
cggggaaagcctggctaagcaactgaccttgag

SEQ ID NO: 57772 - DNA, 33 bp, Homo sapien
cggggaaagcctggctgagcaactgaccttgag

SEQ ID NO: 57773 - DNA, 33 bp, Homo sapien
acctaccagtatattaactcacatctttgctca

SEQ ID NO: 57774 - DNA, 33 bp, Homo sapien
acctaccagtatattagctcacatctttgctca

SEQ ID NO: 57775 - DNA, 33 bp, Homo sapien
aatttggtgagtaaaagcatggggaatcgaagc

SEQ ID NO: 57776 - DNA, 33 bp, Homo sapien
aatttggtgagtaaaatcatggggaatcgaagc

SEQ ID NO: 57777 - DNA, 33 bp, Homo sapien
tgagaggccacccttgcagatttgtgccttcaa

SEQ ID NO: 57778 - DNA, 33 bp, Homo sapien
tgagaggccacccttggagatttgtgccttcaa

SEQ ID NO: 57779 - DNA, 33 bp, Homo sapien
ttcgatatcctttttcgagtaggtcatagacct

SEQ ID NO: 57780 - DNA, 33 bp, Homo sapien
ttcgatatcctttttctagtaggtcatagacct

SEQ ID NO: 57781 - DNA, 33 bp, Homo sapien
tatgtttcctcttgaccaaacagaacagaatca

SEQ ID NO: 57782 - DNA, 33 bp, Homo sapien
tatgtttcctcttgactaaacagaacagaatca

SEQ ID NO: 57783 - DNA, 33 bp, Homo sapien
ggggaacaagataaggaataaaggcaaaaacaa

SEQ ID NO: 57784 - DNA, 33 bp, Homo sapien
ggggaacaagataagggataaaggcaaaaacaa

SEQ ID NO: 57785 - DNA, 33 bp, Homo sapien
ctgatctctgccataactattaggtggaaggag

SEQ ID NO: 57786 - DNA, 33 bp, Homo sapien
ctgatctctgccataagtattaggtggaaggag

SEQ ID NO: 57787 - DNA, 33 bp, Homo sapien
acacttcttcaaaccaataccaaatgtgtgttc

SEQ ID NO: 57788 - DNA, 33 bp, Homo sapien
acacttcttcaaaccagtaccaaatgtgtgttc

SEQ ID NO: 57789 - DNA, 33 bp, Homo sapien
tgtgtgtgtgaaatcgccctctgttacacgtga

SEQ ID NO: 57790 - DNA, 33 bp, Homo sapien
tgtgtgtgtgaaatcgtcctctgttacacgtga

SEQ ID NO: 57791 - DNA, 33 bp, Homo sapien
gatagctagacagcaacgtacagtttcacaaag

SEQ ID NO: 57792 - DNA, 33 bp, Homo sapien
gatagctagacagcaaggtacagtttcacaaag

SEQ ID NO: 57793 - DNA, 33 bp, Homo sapien
gtagaggaaggtaagcaaattttataacgaaag

SEQ ID NO: 57794 - DNA, 33 bp, Homo sapien
gtagaggaaggtaagcgaattttataacgaaag

SEQ ID NO: 57795 - DNA, 33 bp, Homo sapien
ggcccacatcaataataaactatcactacacta

SEQ ID NO: 57796 - DNA, 33 bp, Homo sapien
ggcccacatcaataattaactatcactacacta

SEQ ID NO: 57797 - DNA, 33 bp, Homo sapien
tgtgtgttaagcactaaacttatcgagggacag

SEQ ID NO: 57798 - DNA, 33 bp, Homo sapien
tgtgtgttaagcactacacttatcgagggacag

SEQ ID NO: 57799 - DNA, 33 bp, Homo sapien
ttttctgatatgcccaaatcaattcaccagcaa

SEQ ID NO: 57800 - DNA, 33 bp, Homo sapien
ttttctgatatgcccagatcaattcaccagcaa

SEQ ID NO: 57801 - DNA, 33 bp, Homo sapien
tcagtaggccaactcccctacacataaaggaaa

SEQ ID NO: 57802 - DNA, 33 bp, Homo sapien
tcagtaggccaactcctctacacataaaggaaa

SEQ ID NO: 57803 - DNA, 33 bp, Homo sapien
atgttcatacataaaacttcccaactcagtgga

SEQ ID NO: 57804 - DNA, 33 bp, Homo sapien
atgttcatacataaaagttcccaactcagtgga

SEQ ID NO: 57805 - DNA, 33 bp, Homo sapien
aaaaacatatttttccgctgacaaaacttaagt

SEQ ID NO: 57806 - DNA, 33 bp, Homo sapien
aaaaacatatttttcctctgacaaaacttaagt

SEQ ID NO: 57807 - DNA, 33 bp, Homo sapien
aaggaataggaaaaaaaatactcattccaagaa

SEQ ID NO: 57808 - DNA, 33 bp, Homo sapien
aaggaataggaaaaaacatactcattccaagaa

SEQ ID NO: 57809 - DNA, 33 bp, Homo sapien
tgttctgtcagttaaaatctactgttgaggtcc

SEQ ID NO: 57810 - DNA, 33 bp, Homo sapien
tgttctgtcagttaaagtctactgttgaggtcc

SEQ ID NO: 57811 - DNA, 33 bp, Homo sapien
gtgtggatacttgtaacggtgcaattgtgactg

SEQ ID NO: 57812 - DNA, 33 bp, Homo sapien
gtgtggatacttgtaagggtgcaattgtgactg

SEQ ID NO: 57813 - DNA, 33 bp, Homo sapien
agaggataatgggtgtcaaggccccgatgctga

SEQ ID NO: 57814 - DNA, 33 bp, Homo sapien
agaggataatgggtgtgaaggccccgatgctga

SEQ ID NO: 57815 - DNA, 33 bp, Homo sapien
cctctaatcgctaaaccgcctccaactcaccct

SEQ ID NO: 57816 - DNA, 33 bp, Homo sapien
cctctaatcgctaaactgcctccaactcaccct

SEQ ID NO: 57817 - DNA, 33 bp, Homo sapien
ctgtcttttgatgatacccttccagccaacaga

SEQ ID NO: 57818 - DNA, 33 bp, Homo sapien
ctgtcttttgatgatagccttccagccaacaga

SEQ ID NO: 57819 - DNA, 33 bp, Homo sapien
tggatttagaaagaccacctttaatacctcaaa

SEQ ID NO: 57820 - DNA, 33 bp, Homo sapien
tggatttagaaagaccgcctttaatacctcaaa

SEQ ID NO: 57821 - DNA, 33 bp, Homo sapien
tagacgattacagatgcattttactatcttatc

SEQ ID NO: 57822 - DNA, 33 bp, Homo sapien
tagacgattacagatggattttactatcttatc

SEQ ID NO: 57823 - DNA, 33 bp, Homo sapien
taaggaatactaagcaatgactaataaccaatt

SEQ ID NO: 57824 - DNA, 33 bp, Homo sapien
taaggaatactaagcagtgactaataaccaatt

SEQ ID NO: 57825 - DNA, 33 bp, Homo sapien
atagtgatatctttagaaaaaacggaaatgtgg

SEQ ID NO: 57826 - DNA, 33 bp, Homo sapien
atagtgatatctttagcaaaaacggaaatgtgg

SEQ ID NO: 57827 - DNA, 33 bp, Homo sapien
gacagcatcctccttgaactcaaacagtactga

SEQ ID NO: 57828 - DNA, 33 bp, Homo sapien
gacagcatcctccttggactcaaacagtactga

SEQ ID NO: 57829 - DNA, 33 bp, Homo sapien
ttgcttttactcctgcaaactcactatgtcttt

SEQ ID NO: 57830 - DNA, 33 bp, Homo sapien
ttgcttttactcctgcgaactcactatgtcttt

SEQ ID NO: 57831 - DNA, 33 bp, Homo sapien
tccttagcaccaagtacagtgcctggacaaaca

SEQ ID NO: 57832 - DNA, 33 bp, Homo sapien
tccttagcaccaagtagagtgcctggacaaaca

SEQ ID NO: 57833 - DNA, 33 bp, Homo sapien
atatgtaaagccagcacctatttccatcctact

SEQ ID NO: 57834 - DNA, 33 bp, Homo sapien
atatgtaaagccagcatctatttccatcctact

SEQ ID NO: 57835 - DNA, 33 bp, Homo sapien
aagtaggttcttgagaaaatttgagtgatgatt

SEQ ID NO: 57836 - DNA, 33 bp, Homo sapien
aagtaggttcttgagagaatttgagtgatgatt

SEQ ID NO: 57837 - DNA, 33 bp, Homo sapien
tgttccatcatcctgacagcagctcattcagat

SEQ ID NO: 57838 - DNA, 33 bp, Homo sapien
tgttccatcatcctgagagcagctcattcagat

SEQ ID NO: 57839 - DNA, 33 bp, Homo sapien
tcctttccttcagtatcaggttaaaatatattc

SEQ ID NO: 57840 - DNA, 33 bp, Homo sapien
tcctttccttcagtatgaggttaaaatatattc

SEQ ID NO: 57841 - DNA, 33 bp, Homo sapien
aataatgcttccccccaaaaaaaattctatata

SEQ ID NO: 57842 - DNA, 33 bp, Homo sapien
aataatgcttcccccccaaaaaaattctatata

SEQ ID NO: 57843 - DNA, 33 bp, Homo sapien
aggttaagtaggcttaagattggattgtttgga

SEQ ID NO: 57844 - DNA, 33 bp, Homo sapien
aggttaagtaggcttaggattggattgtttgga

SEQ ID NO: 57845 - DNA, 33 bp, Homo sapien
agattttataagactacgcatgaaatgtttgag

SEQ ID NO: 57846 - DNA, 33 bp, Homo sapien
agattttataagactatgcatgaaatgtttgag

SEQ ID NO: 57847 - DNA, 33 bp, Homo sapien
ggtatatccttatagcactgtgagaatggacta

SEQ ID NO: 57848 - DNA, 33 bp, Homo sapien
ggtatatccttatagcgctgtgagaatggacta

SEQ ID NO: 57849 - DNA, 33 bp, Homo sapien
tggaatggttaaaggcaaaggttcttctgtttc

SEQ ID NO: 57850 - DNA, 33 bp, Homo sapien
tggaatggttaaaggccaaggttcttctgtttc

SEQ ID NO: 57851 - DNA, 33 bp, Homo sapien
ttcagttaagaatgtcgacctatttcaggctat

SEQ ID NO: 57852 - DNA, 33 bp, Homo sapien
ttcagttaagaatgtctacctatttcaggctat

SEQ ID NO: 57853 - DNA, 33 bp, Homo sapien
accgcacctggccgtacacattctttttatcat

SEQ ID NO: 57854 - DNA, 33 bp, Homo sapien
accgcacctggccgtagacattctttttatcat

SEQ ID NO: 57855 - DNA, 33 bp, Homo sapien
gatgcagtctggactaaatttctttttttaaat

SEQ ID NO: 57856 - DNA, 33 bp, Homo sapien
gatgcagtctggactagatttctttttttaaat

SEQ ID NO: 57857 - DNA, 33 bp, Homo sapien
aagtgctgattgtaaacttggcattccggacct

SEQ ID NO: 57858 - DNA, 33 bp, Homo sapien
aagtgctgattgtaaagttggcattccggacct

SEQ ID NO: 57859 - DNA, 33 bp, Homo sapien
aaatagagagtattcaaataggaagggtagagg

SEQ ID NO: 57860 - DNA, 33 bp, Homo sapien
aaatagagagtattcacataggaagggtagagg

SEQ ID NO: 57861 - DNA, 33 bp, Homo sapien
ctttggttatattctaagttggtgacacaaata

SEQ ID NO: 57862 - DNA, 33 bp, Homo sapien
ctttggttatattctacgttggtgacacaaata

SEQ ID NO: 57863 - DNA, 33 bp, Homo sapien
ttttacctaatacatacggagcgctgtgtaaag

SEQ ID NO: 57864 - DNA, 33 bp, Homo sapien
ttttacctaatacatatggagcgctgtgtaaag

SEQ ID NO: 57865 - DNA, 33 bp, Homo sapien
gtaaaagagatagcgacaaaggggggcggtgat

SEQ ID NO: 57866 - DNA, 33 bp, Homo sapien
gtaaaagagatagcgagaaaggggggcggtgat

SEQ ID NO: 57867 - DNA, 33 bp, Homo sapien
ggactcaaattctgacgctgccacttacctttt

SEQ ID NO: 57868 - DNA, 33 bp, Homo sapien
ggactcaaattctgactctgccacttacctttt

SEQ ID NO: 57869 - DNA, 33 bp, Homo sapien
ctacactgtctccccacgctaattactcttatt

SEQ ID NO: 57870 - DNA, 33 bp, Homo sapien
ctacactgtctccccatgctaattactcttatt

SEQ ID NO: 57871 - DNA, 33 bp, Homo sapien
aatgttacttcacagaataatatctcagatagg

SEQ ID NO: 57872 - DNA, 33 bp, Homo sapien
aatgttacttcacagactaatatctcagatagg

SEQ ID NO: 57873 - DNA, 33 bp, Homo sapien
tttgcaccagtagctccaatcaaatttggagaa

SEQ ID NO: 57874 - DNA, 33 bp, Homo sapien
tttgcaccagtagctctaatcaaatttggagaa

SEQ ID NO: 57875 - DNA, 33 bp, Homo sapien
gagcttagaaacaagcaacgagagcctgagaag

SEQ ID NO: 57876 - DNA, 33 bp, Homo sapien
gagcttagaaacaagcgacgagagcctgagaag

SEQ ID NO: 57877 - DNA, 33 bp, Homo sapien
ttttgcttgttaaggaagggagccctgtaatac

SEQ ID NO: 57878 - DNA, 33 bp, Homo sapien
ttttgcttgttaaggaggggagccctgtaatac

SEQ ID NO: 57879 - DNA, 33 bp, Homo sapien
tgttggctgcataaatgatctattgttttcaat

SEQ ID NO: 57880 - DNA, 33 bp, Homo sapien
tgttggctgcataaattatctattgttttcaat

SEQ ID NO: 57881 - DNA, 33 bp, Homo sapien
tactatgtgagaagaacgaattttaaaatcctc

SEQ ID NO: 57882 - DNA, 33 bp, Homo sapien
tactatgtgagaagaatgaattttaaaatcctc

SEQ ID NO: 57883 - DNA, 33 bp, Homo sapien
tcatgttaaatatatacgcttggagtaccctga

SEQ ID NO: 57884 - DNA, 33 bp, Homo sapien
tcatgttaaatatatatgcttggagtaccctga

SEQ ID NO: 57885 - DNA, 33 bp, Homo sapien
tttatgtattttcacaaagaagcagcagggaca

SEQ ID NO: 57886 - DNA, 33 bp, Homo sapien
tttatgtattttcacagagaagcagcagggaca

SEQ ID NO: 57887 - DNA, 33 bp, Homo sapien
gcttcttgattcagacaggaaggttgttaatga

SEQ ID NO: 57888 - DNA, 33 bp, Homo sapien
gcttcttgattcagacgggaaggttgttaatga

SEQ ID NO: 57889 - DNA, 33 bp, Homo sapien
gaacctctgcatgacaatatttgctgaggctag

SEQ ID NO: 57890 - DNA, 33 bp, Homo sapien
gaacctctgcatgacagtatttgctgaggctag

SEQ ID NO: 57891 - DNA, 33 bp, Homo sapien
gtaggtaggttcaaaccgcttactaaatattta

SEQ ID NO: 57892 - DNA, 33 bp, Homo sapien
gtaggtaggttcaaactgcttactaaatattta

SEQ ID NO: 57893 - DNA, 33 bp, Homo sapien
cgggcgaggtgcctcccgctagaactcagggga

SEQ ID NO: 57894 - DNA, 33 bp, Homo sapien
cgggcgaggtgcctcctgctagaactcagggga

SEQ ID NO: 57895 - DNA, 33 bp, Homo sapien
tagtttgactttcttacgatacattttcatatc

SEQ ID NO: 57896 - DNA, 33 bp, Homo sapien
tagtttgactttcttatgatacattttcatatc

SEQ ID NO: 57897 - DNA, 33 bp, Homo sapien
atgcccttaacataaaaataatgcttgcttata

SEQ ID NO: 57898 - DNA, 33 bp, Homo sapien
atgcccttaacataaacataatgcttgcttata

SEQ ID NO: 57899 - DNA, 33 bp, Homo sapien
aaaccattactactgcaactactgctattacta

SEQ ID NO: 57900 - DNA, 33 bp, Homo sapien
aaaccattactactgctactactgctattacta

SEQ ID NO: 57901 - DNA, 33 bp, Homo sapien
tgtaaaatagagaggacaggggctcaactaagt

SEQ ID NO: 57902 - DNA, 33 bp, Homo sapien
tgtaaaatagagaggagaggggctcaactaagt

SEQ ID NO: 57903 - DNA, 33 bp, Homo sapien
gaattattaacagagaaagtgatatttaaaggc

SEQ ID NO: 57904 - DNA, 33 bp, Homo sapien
gaattattaacagagacagtgatatttaaaggc

SEQ ID NO: 57905 - DNA, 33 bp, Homo sapien
atataaatttagttacaatatgctaggaaaaca

SEQ ID NO: 57906 - DNA, 33 bp, Homo sapien
atataaatttagttacgatatgctaggaaaaca

SEQ ID NO: 57907 - DNA, 33 bp, Homo sapien
catttattgctactgaagtaaaaccagaataat

SEQ ID NO: 57908 - DNA, 33 bp, Homo sapien
catttattgctactgaggtaaaaccagaataat

SEQ ID NO: 57909 - DNA, 33 bp, Homo sapien
attctggcttttgcacagtagctgagctgagca

SEQ ID NO: 57910 - DNA, 33 bp, Homo sapien
attctggcttttgcacggtagctgagctgagca

SEQ ID NO: 57911 - DNA, 33 bp, Homo sapien
gtcattctgccaatacacctgcattccacatcc

SEQ ID NO: 57912 - DNA, 33 bp, Homo sapien
gtcattctgccaatacgcctgcattccacatcc

SEQ ID NO: 57913 - DNA, 33 bp, Homo sapien
ttgataagaaggaaataatagcgataagttgct

SEQ ID NO: 57914 - DNA, 33 bp, Homo sapien
ttgataagaaggaaatcatagcgataagttgct

SEQ ID NO: 57915 - DNA, 33 bp, Homo sapien
caacattctactttggaaagaattttgagtcta

SEQ ID NO: 57916 - DNA, 33 bp, Homo sapien
caacattctactttgggaagaattttgagtcta

SEQ ID NO: 57917 - DNA, 33 bp, Homo sapien
cattacatcatttcaccgtcttctcatggatgg

SEQ ID NO: 57918 - DNA, 33 bp, Homo sapien
cattacatcatttcactgtcttctcatggatgg

SEQ ID NO: 57919 - DNA, 33 bp, Homo sapien
atcttaagtgaccagacctgagagcctttccca

SEQ ID NO: 57920 - DNA, 33 bp, Homo sapien
atcttaagtgaccagatctgagagcctttccca

SEQ ID NO: 57921 - DNA, 33 bp, Homo sapien
gttgtatcttgtggcaatcatgcaggtgctcag

SEQ ID NO: 57922 - DNA, 33 bp, Homo sapien
gttgtatcttgtggcagtcatgcaggtgctcag

SEQ ID NO: 57923 - DNA, 33 bp, Homo sapien
ttaggatagccattcccgctctactttagttac

SEQ ID NO: 57924 - DNA, 33 bp, Homo sapien
ttaggatagccattcctgctctactttagttac

SEQ ID NO: 57925 - DNA, 33 bp, Homo sapien
ggcaggtactgttataggagagatggttaaggt

SEQ ID NO: 57926 - DNA, 33 bp, Homo sapien
ggcaggtactgttatatgagagatggttaaggt

SEQ ID NO: 57927 - DNA, 33 bp, Homo sapien
accatgaagggatagaagacttgagaaagatgg

SEQ ID NO: 57928 - DNA, 33 bp, Homo sapien
accatgaagggatagaggacttgagaaagatgg

SEQ ID NO: 57929 - DNA, 33 bp, Homo sapien
agataattttggtcacaacaactagggatgaag

SEQ ID NO: 57930 - DNA, 33 bp, Homo sapien
agataattttggtcaccacaactagggatgaag

SEQ ID NO: 57931 - DNA, 33 bp, Homo sapien
aggatcttgcaaaaaacaaaccaggataagaca

SEQ ID NO: 57932 - DNA, 33 bp, Homo sapien
aggatcttgcaaaaaataaaccaggataagaca

SEQ ID NO: 57933 - DNA, 33 bp, Homo sapien
ttgtcaccccattaccagcactaaatcagatcc

SEQ ID NO: 57934 - DNA, 33 bp, Homo sapien
ttgtcaccccattaccggcactaaatcagatcc

SEQ ID NO: 57935 - DNA, 33 bp, Homo sapien
ggtacaatttgcttgtcaaaattgagaaaaaat

SEQ ID NO: 57936 - DNA, 33 bp, Homo sapien
ggtacaatttgcttgttaaaattgagaaaaaat

SEQ ID NO: 57937 - DNA, 33 bp, Homo sapien
aattttgcagaggttccaattttgcccacaacc

SEQ ID NO: 57938 - DNA, 33 bp, Homo sapien
aattttgcagaggttctaattttgcccacaacc

SEQ ID NO: 57939 - DNA, 33 bp, Homo sapien
gtatttattctggaccaagatctcatcggcgag

SEQ ID NO: 57940 - DNA, 33 bp, Homo sapien
gtatttattctggaccgagatctcatcggcgag

SEQ ID NO: 57941 - DNA, 33 bp, Homo sapien
gtcaagggagatactacccagatggtcacactg

SEQ ID NO: 57942 - DNA, 33 bp, Homo sapien
gtcaagggagatactatccagatggtcacactg

SEQ ID NO: 57943 - DNA, 33 bp, Homo sapien
caagatatcctgatgacagaagtaggaaccatg

SEQ ID NO: 57944 - DNA, 33 bp, Homo sapien
caagatatcctgatgatagaagtaggaaccatg

SEQ ID NO: 57945 - DNA, 33 bp, Homo sapien
ttgtcattgtattgaactggaaaaatttacata

SEQ ID NO: 57946 - DNA, 33 bp, Homo sapien
ttgtcattgtattgaattggaaaaatttacata

SEQ ID NO: 57947 - DNA, 33 bp, Homo sapien
caggactatatatgacaaagatattataaagct

SEQ ID NO: 57948 - DNA, 33 bp, Homo sapien
caggactatatatgactaagatattataaagct

SEQ ID NO: 57949 - DNA, 33 bp, Homo sapien
agttgataatgacaatcaacaaccatgttatgg

SEQ ID NO: 57950 - DNA, 33 bp, Homo sapien
agttgataatgacaatgaacaaccatgttatgg

SEQ ID NO: 57951 - DNA, 33 bp, Homo sapien
tttacattcagttatcaactttaatgtcgattg

SEQ ID NO: 57952 - DNA, 33 bp, Homo sapien
tttacattcagttatctactttaatgtcgattg

SEQ ID NO: 57953 - DNA, 33 bp, Homo sapien
ttttaaaaatgatccacgttgcagagcagattt

SEQ ID NO: 57954 - DNA, 33 bp, Homo sapien
ttttaaaaatgatccatgttgcagagcagattt

SEQ ID NO: 57955 - DNA, 33 bp, Homo sapien
ggcagtctggcttcagaatcctaactcttaact

SEQ ID NO: 57956 - DNA, 33 bp, Homo sapien
ggcagtctggcttcaggatcctaactcttaact

SEQ ID NO: 57957 - DNA, 33 bp, Homo sapien
tgtttctcgtaacgtgaacacaaaagtctatta

SEQ ID NO: 57958 - DNA, 33 bp, Homo sapien
tgtttctcgtaacgtggacacaaaagtctatta

SEQ ID NO: 57959 - DNA, 33 bp, Homo sapien
atactaaagtgttgaacatcacctgcaatttat

SEQ ID NO: 57960 - DNA, 33 bp, Homo sapien
atactaaagtgttgaatatcacctgcaatttat

SEQ ID NO: 57961 - DNA, 33 bp, Homo sapien; identical to SEQ ID NO: 57959

SEQ ID NO: 57962 - DNA, 33 bp, Homo sapien; identical to SEQ ID NO: 57960

SEQ ID NO: 57963 - DNA, 33 bp, Homo sapien
atattgacctctttcaccacactgtggaaattt

SEQ ID NO: 57964 - DNA, 33 bp, Homo sapien
atattgacctctttcatcacactgtggaaattt

SEQ ID NO: 57965 - DNA, 33 bp, Homo sapien
tatatatgcaacataaatgaattccatgttaga

SEQ ID NO: 57966 - DNA, 33 bp, Homo sapien
tatatatgcaacataagtgaattccatgttaga

SEQ ID NO: 57967 - DNA, 33 bp, Homo sapien
atccttgctatctaccaattttgttgattactg

SEQ ID NO: 57968 - DNA, 33 bp, Homo sapien
atccttgctatctaccgattttgttgattactg

SEQ ID NO: 57969 - DNA, 33 bp, Homo sapien
taccaacaatttaagaatactccagtttgtcca

SEQ ID NO: 57970 - DNA, 33 bp, Homo sapien
taccaacaatttaagagtactccagtttgtcca

SEQ ID NO: 57971 - DNA, 33 bp, Homo sapien
atttgtcgaaactcaaagaactatacacttgac

SEQ ID NO: 57972 - DNA, 33 bp, Homo sapien
atttgtcgaaactcaacgaactatacacttgac

SEQ ID NO: 57973 - DNA, 33 bp, Homo sapien
attatggctgtgatgacgagactatcaatttgt

SEQ ID NO: 57974 - DNA, 33 bp, Homo sapien
attatggctgtgatgatgagactatcaatttgt

SEQ ID NO: 57975 - DNA, 33 bp, Homo sapien
ctcaccagccataatgcaaagacatcctaacac

SEQ ID NO: 57976 - DNA, 33 bp, Homo sapien
ctcaccagccataatggaaagacatcctaacac

SEQ ID NO: 57977 - DNA, 33 bp, Homo sapien
gtatagtccactgctgcaaacccttcaaattgg

SEQ ID NO: 57978 - DNA, 33 bp, Homo sapien
gtatagtccactgctggaaacccttcaaattgg

SEQ ID NO: 57979 - DNA, 33 bp, Homo sapien
ggaatatataatgcaacggaaaggagcaaaagc

SEQ ID NO: 57980 - DNA, 33 bp, Homo sapien
ggaatatataatgcaatggaaaggagcaaaagc

SEQ ID NO: 57981 - DNA, 33 bp, Homo sapien
cctctgtttcaacttacgataaatatctgaaca

SEQ ID NO: 57982 - DNA, 33 bp, Homo sapien
cctctgtttcaacttatgataaatatctgaaca

SEQ ID NO: 57983 - DNA, 33 bp, Homo sapien
cttctgccctgtcccaccaaactgtgagatccc

SEQ ID NO: 57984 - DNA, 33 bp, Homo sapien
cttctgccctgtcccatcaaactgtgagatccc

SEQ ID NO: 57985 - DNA, 33 bp, Homo sapien
aatggaactaactcacagctctttcattatttc

SEQ ID NO: 57986 - DNA, 33 bp, Homo sapien
aatggaactaactcactgctctttcattatttc

SEQ ID NO: 57987 - DNA, 33 bp, Homo sapien
taatgaaggcctaaagcaagacataggggatag

SEQ ID NO: 57988 - DNA, 33 bp, Homo sapien
taatgaaggcctaaagtaagacataggggatag

SEQ ID NO: 57989 - DNA, 33 bp, Homo sapien
cattttctgagtgagacctttggactctttctt

SEQ ID NO: 57990 - DNA, 33 bp, Homo sapien
cattttctgagtgagatctttggactctttctt

SEQ ID NO: 57991 - DNA, 33 bp, Homo sapien
ggtctattcagagaacagtatccattggcattt

SEQ ID NO: 57992 - DNA, 33 bp, Homo sapien
ggtctattcagagaaccgtatccattggcattt

SEQ ID NO: 57993 - DNA, 33 bp, Homo sapien
gcagcaatccaaagaacgtttagtcaagaaaaa

SEQ ID NO: 57994 - DNA, 33 bp, Homo sapien
gcagcaatccaaagaatgtttagtcaagaaaaa

SEQ ID NO: 57995 - DNA, 33 bp, Homo sapien
cttgctcacaacctcactcttggcaagtattag

SEQ ID NO: 57996 - DNA, 33 bp, Homo sapien
cttgctcacaacctcagtcttggcaagtattag

SEQ ID NO: 57997 - DNA, 33 bp, Homo sapien
atttatgatcttcttacctcagtaatgactccc

SEQ ID NO: 57998 - DNA, 33 bp, Homo sapien
atttatgatcttcttatctcagtaatgactccc

SEQ ID NO: 57999 - DNA, 33 bp, Homo sapien
gcccaagacagatttaggatggtatatgcctgt

SEQ ID NO: 58000 - DNA, 33 bp, Homo sapien
gcccaagacagatttatgatggtatatgcctgt

SEQ ID NO: 58001 - DNA, 33 bp, Homo sapien
tctataattaagcagccgataacttcgcaggga

SEQ ID NO: 58002 - DNA, 33 bp, Homo sapien
tctataattaagcagctgataacttcgcaggga

SEQ ID NO: 58003 - DNA, 33 bp, Homo sapien
taagagactgaccacactggatcttgagagcag

SEQ ID NO: 58004 - DNA, 33 bp, Homo sapien
taagagactgaccacattggatcttgagagcag

SEQ ID NO: 58005 - DNA, 33 bp, Homo sapien
atacgttaaataggtgcagtttacatggatgag

SEQ ID NO: 58006 - DNA, 33 bp, Homo sapien
atacgttaaataggtgtagtttacatggatgag

SEQ ID NO: 58007 - DNA, 33 bp, Homo sapien
tgtttctgctattcaacagcctgtcccatcacc

SEQ ID NO: 58008 - DNA, 33 bp, Homo sapien
tgtttctgctattcaagagcctgtcccatcacc

SEQ ID NO: 58009 - DNA, 33 bp, Homo sapien
tcaacaggtattgacaacaggcatgtgaaatca

SEQ ID NO: 58010 - DNA, 33 bp, Homo sapien
tcaacaggtattgacagcaggcatgtgaaatca

SEQ ID NO: 58011 - DNA, 33 bp, Homo sapien
aggccatctttgtgcacgttgaaactttccagg

SEQ ID NO: 58012 - DNA, 33 bp, Homo sapien
aggccatctttgtgcatgttgaaactttccagg

SEQ ID NO: 58013 - DNA, 33 bp, Homo sapien
ccaactcttctccactcactgagaactttagca

SEQ ID NO: 58014 - DNA, 33 bp, Homo sapien
ccaactcttctccactgactgagaactttagca

SEQ ID NO: 58015 - DNA, 33 bp, Homo sapien
cagttcaaatctttcacgaatcaattctgtttt

SEQ ID NO: 58016 - DNA, 33 bp, Homo sapien
cagttcaaatctttcatgaatcaattctgtttt

SEQ ID NO: 58017 - DNA, 33 bp, Homo sapien
attagcttcccttccacgacttcaacacctcat

SEQ ID NO: 58018 - DNA, 33 bp, Homo sapien
attagcttcccttccatgacttcaacacctcat

SEQ ID NO: 58019 - DNA, 33 bp, Homo sapien
tttggggaatcataacaactctcaggtgaaata

SEQ ID NO: 58020 - DNA, 33 bp, Homo sapien
tttggggaatcataacgactctcaggtgaaata

SEQ ID NO: 58021 - DNA, 33 bp, Homo sapien
acaagtcccagctctgcaacacatccctgtcac

SEQ ID NO: 58022 - DNA, 33 bp, Homo sapien
acaagtcccagctctggaacacatccctgtcac

SEQ ID NO: 58023 - DNA, 33 bp, Homo sapien
aaaaaaaattcccaaagctcaattccttaacca

SEQ ID NO: 58024 - DNA, 33 bp, Homo sapien
aaaaaaaattcccaaatctcaattccttaacca

SEQ ID NO: 58025 - DNA, 33 bp, Homo sapien
tctggaaaataaagtaacacagccattgggcag

SEQ ID NO: 58026 - DNA, 33 bp, Homo sapien
tctggaaaataaagtaccacagccattgggcag

SEQ ID NO: 58027 - DNA, 33 bp, Homo sapien
tgcttgggaagcacctgactgctaggtcatgaa

SEQ ID NO: 58028 - DNA, 33 bp, Homo sapien
tgcttgggaagcaccttactgctaggtcatgaa

SEQ ID NO: 58029 - DNA, 33 bp, Homo sapien
atgctctcagtgtacactcatatcaaaaaatga

SEQ ID NO: 58030 - DNA, 33 bp, Homo sapien
atgctctcagtgtacattcatatcaaaaaatga

SEQ ID NO: 58031 - DNA, 33 bp, Homo sapien
gcctgctttaaccacaaactgaaggcatgatcc

SEQ ID NO: 58032 - DNA, 33 bp, Homo sapien
gcctgctttaaccacagactgaaggcatgatcc

SEQ ID NO: 58033 - DNA, 33 bp, Homo sapien
gacatgaccctgagagcattgctataatattag

SEQ ID NO: 58034 - DNA, 33 bp, Homo sapien
gacatgaccctgagagtattgctataatattag

SEQ ID NO: 58035 - DNA, 33 bp, Homo sapien
gcacagcaccacagtgcacatagacggcggcaa

SEQ ID NO: 58036 - DNA, 33 bp, Homo sapien
gcacagcaccacagtggacatagacggcggcaa

SEQ ID NO: 58037 - DNA, 33 bp, Homo sapien
tctccatatcttaaacagaaggcccagtctcag

SEQ ID NO: 58038 - DNA, 33 bp, Homo sapien
tctccatatcttaaacggaaggcccagtctcag

SEQ ID NO: 58039 - DNA, 33 bp, Homo sapien
cactgttgagtatgggacattatttgtgttatt

SEQ ID NO: 58040 - DNA, 33 bp, Homo sapien
cactgttgagtatggggcattatttgtgttatt

SEQ ID NO: 58041 - DNA, 33 bp, Homo sapien
aggatgtgctgattctaaactgcagcttctcac

SEQ ID NO: 58042 - DNA, 33 bp, Homo sapien
aggatgtgctgattctcaactgcagcttctcac

SEQ ID NO: 58043 - DNA, 33 bp, Homo sapien
tttgagcataaatcacacaaagtgcttgttact

SEQ ID NO: 58044 - DNA, 33 bp, Homo sapien
tttgagcataaatcacgcaaagtgcttgttact

SEQ ID NO: 58045 - DNA, 33 bp, Homo sapien
gcaaatgctggcaataactccttacacccaaac

SEQ ID NO: 58046 - DNA, 33 bp, Homo sapien
gcaaatgctggcaatatctccttacacccaaac

SEQ ID NO: 58047 - DNA, 33 bp, Homo sapien
tttgaaaagtgtacaaatagtgtcccttagcac

SEQ ID NO: 58048 - DNA, 33 bp, Homo sapien
tttgaaaagtgtacaagtagtgtcccttagcac

SEQ ID NO: 58049 - DNA, 33 bp, Homo sapien
tttgaaagctggttccaaaaggagtcagaagac

SEQ ID NO: 58050 - DNA, 33 bp, Homo sapien
tttgaaagctggttccgaaaggagtcagaagac

SEQ ID NO: 58051 - DNA, 33 bp, Homo sapien
catgggatgtaagcgactatctgatggttaggg

SEQ ID NO: 58052 - DNA, 33 bp, Homo sapien
catgggatgtaagcgattatctgatggttaggg

SEQ ID NO: 58053 - DNA, 33 bp, Homo sapien
ctgtcttcactgtctaaaaaatgctttgatcaa

SEQ ID NO: 58054 - DNA, 33 bp, Homo sapien
ctgtcttcactgtctacaaaatgctttgatcaa

SEQ ID NO: 58055 - DNA, 33 bp, Homo sapien
cacccagtttttactccccatcagactacagct

SEQ ID NO: 58056 - DNA, 33 bp, Homo sapien
cacccagtttttactctccatcagactacagct

SEQ ID NO: 58057 - DNA, 33 bp, Homo sapien
ctccgtatgtcattaggatagctgatgttcaac

SEQ ID NO: 58058 - DNA, 33 bp, Homo sapien
ctccgtatgtcattagtatagctgatgttcaac

SEQ ID NO: 58059 - DNA, 33 bp, Homo sapien
agctacgagttctccacgtgaggctcaccaggt

SEQ ID NO: 58060 - DNA, 33 bp, Homo sapien
agctacgagttctccatgtgaggctcaccaggt

SEQ ID NO: 58061 - DNA, 33 bp, Homo sapien
accattgattaagtgaaaaaacatcttagaaga

SEQ ID NO: 58062 - DNA, 33 bp, Homo sapien
accattgattaagtgacaaaacatcttagaaga

SEQ ID NO: 58063 - DNA, 33 bp, Homo sapien
tgaacaatttacagcagtgattttcaaactgtg

SEQ ID NO: 58064 - DNA, 33 bp, Homo sapien
tgaacaatttacagcattgattttcaaactgtg

SEQ ID NO: 58065 - DNA, 33 bp, Homo sapien
gaagaaagataccttccaaatatagcacatcac

SEQ ID NO: 58066 - DNA, 33 bp, Homo sapien
gaagaaagataccttctaaatatagcacatcac

SEQ ID NO: 58067 - DNA, 33 bp, Homo sapien
caatagtaaggacttacagtaatggaaaaatac

SEQ ID NO: 58068 - DNA, 33 bp, Homo sapien
caatagtaaggacttatagtaatggaaaaatac

SEQ ID NO: 58069 - DNA, 33 bp, Homo sapien
tcactctgtagtgacaaaaaatggaatactttc

SEQ ID NO: 58070 - DNA, 33 bp, Homo sapien
tcactctgtagtgacagaaaatggaatactttc

SEQ ID NO: 58071 - DNA, 33 bp, Homo sapien
tctcacttttacagacagctatgacatgtggac

SEQ ID NO: 58072 - DNA, 33 bp, Homo sapien
tctcacttttacagaccgctatgacatgtggac

SEQ ID NO: 58073 - DNA, 33 bp, Homo sapien
caaatcaatacctaagcagtacctgtgagagct

SEQ ID NO: 58074 - DNA, 33 bp, Homo sapien
caaatcaatacctaagtagtacctgtgagagct

SEQ ID NO: 58075 - DNA, 33 bp, Homo sapien
gggcgatcatatattaccataaattttgcacag

SEQ ID NO: 58076 - DNA, 33 bp, Homo sapien
gggcgatcatatattatcataaattttgcacag

SEQ ID NO: 58077 - DNA, 33 bp, Homo sapien
gtggactgcacgttcaccataataaacattact

SEQ ID NO: 58078 - DNA, 33 bp, Homo sapien
gtggactgcacgttcagcataataaacattact

SEQ ID NO: 58079 - DNA, 33 bp, Homo sapien
tcagtagtcttcattacaccaatttacttaact

SEQ ID NO: 58080 - DNA, 33 bp, Homo sapien
tcagtagtcttcattataccaatttacttaact

SEQ ID NO: 58081 - DNA, 33 bp, Homo sapien
cacaggtaaaggcctaaggctcaagatgagtga

SEQ ID NO: 58082 - DNA, 33 bp, Homo sapien
cacaggtaaaggcctacggctcaagatgagtga

SEQ ID NO: 58083 - DNA, 33 bp, Homo sapien
ctatcatcactagttcacaacagttgtcactta

SEQ ID NO: 58084 - DNA, 33 bp, Homo sapien
ctatcatcactagttcgcaacagttgtcactta

SEQ ID NO: 58085 - DNA, 33 bp, Homo sapien
tattacaaggtgcttaaaaaaatgctctagcaa

SEQ ID NO: 58086 - DNA, 33 bp, Homo sapien
tattacaaggtgcttataaaaatgctctagcaa

SEQ ID NO: 58087 - DNA, 33 bp, Homo sapien
acacatataagctcatgacaataatctagttat

SEQ ID NO: 58088 - DNA, 33 bp, Homo sapien
acacatataagctcattacaataatctagttat

SEQ ID NO: 58089 - DNA, 33 bp, Homo sapien
taatgttttctgtagaatcaatagcaactatgg

SEQ ID NO: 58090 - DNA, 33 bp, Homo sapien
taatgttttctgtagactcaatagcaactatgg

SEQ ID NO: 58091 - DNA, 33 bp, Homo sapien
cagtgatgtgtcatcaatatatgcaccgtggca

SEQ ID NO: 58092 - DNA, 33 bp, Homo sapien
cagtgatgtgtcatcagtatatgcaccgtggca

SEQ ID NO: 58093 - DNA, 33 bp, Homo sapien
ccccagatactaagcacaaagtgatagactaaa

SEQ ID NO: 58094 - DNA, 33 bp, Homo sapien
ccccagatactaagcataaagtgatagactaaa

SEQ ID NO: 58095 - DNA, 33 bp, Homo sapien
cctactcaaaattctccagactcggtttgtgca

SEQ ID NO: 58096 - DNA, 33 bp, Homo sapien
cctactcaaaattctctagactcggtttgtgca

SEQ ID NO: 58097 - DNA, 33 bp, Homo sapien
agattaactgtgagtcaacattgcagtaaattt

SEQ ID NO: 58098 - DNA, 33 bp, Homo sapien
agattaactgtgagtcgacattgcagtaaattt

SEQ ID NO: 58099 - DNA, 33 bp, Homo sapien
agtgaggttgattaaggatgggagtaggatggt

SEQ ID NO: 58100 - DNA, 33 bp, Homo sapien
agtgaggttgattaagtatgggagtaggatggt

SEQ ID NO: 58101 - DNA, 33 bp, Homo sapien
agtaagttgaacaggaaaagtttggaagtaagg

SEQ ID NO: 58102 - DNA, 33 bp, Homo sapien
agtaagttgaacaggagaagtttggaagtaagg

SEQ ID NO: 58103 - DNA, 33 bp, Homo sapien
atgctgcagatagcaaaatatttctggcgcctt

SEQ ID NO: 58104 - DNA, 33 bp, Homo sapien
atgctgcagatagcaacatatttctggcgcctt

SEQ ID NO: 58105 - DNA, 33 bp, Homo sapien
tacaaggaccacaacaacatgtgccaatccttg

SEQ ID NO: 58106 - DNA, 33 bp, Homo sapien
tacaaggaccacaacaccatgtgccaatccttg

SEQ ID NO: 58107 - DNA, 33 bp, Homo sapien
ccaggtattcctaatcccaattgtttaagtctt

SEQ ID NO: 58108 - DNA, 33 bp, Homo sapien
ccaggtattcctaatcgcaattgtttaagtctt

SEQ ID NO: 58109 - DNA, 33 bp, Homo sapien
ccactggagccagtccccggaatctccccaaat

SEQ ID NO: 58110 - DNA, 33 bp, Homo sapien
ccactggagccagtccgcggaatctccccaaat

SEQ ID NO: 58111 - DNA, 33 bp, Homo sapien
cttttaaaactcttcaaatacagggcaggaggt

SEQ ID NO: 58112 - DNA, 33 bp, Homo sapien
cttttaaaactcttcacatacagggcaggaggt

SEQ ID NO: 58113 - DNA, 33 bp, Homo sapien
tctgaatcatttgaaccgtcagtgcattaaatt

SEQ ID NO: 58114 - DNA, 33 bp, Homo sapien
tctgaatcatttgaactgtcagtgcattaaatt

SEQ ID NO: 58115 - DNA, 33 bp, Homo sapien
gtatgtagagatggcaagttgtatatgtaaaaa

SEQ ID NO: 58116 - DNA, 33 bp, Homo sapien
gtatgtagagatggcaggttgtatatgtaaaaa

SEQ ID NO: 58117 - DNA, 33 bp, Homo sapien
tatagaagcacaccaaaaactgatgtcagttat

SEQ ID NO: 58118 - DNA, 33 bp, Homo sapien
tatagaagcacaccaacaactgatgtcagttat

SEQ ID NO: 58119 - DNA, 33 bp, Homo sapien
cattttctgtatgtaacgaatttgggagcagct

SEQ ID NO: 58120 - DNA, 33 bp, Homo sapien
cattttctgtatgtaaggaatttgggagcagct

SEQ ID NO: 58121 - DNA, 33 bp, Homo sapien
cagagaccaagattcgaacacctgatgggaaag

SEQ ID NO: 58122 - DNA, 33 bp, Homo sapien
cagagaccaagattcgcacacctgatgggaaag

SEQ ID NO: 58123 - DNA, 33 bp, Homo sapien
gccattgtactttcgacagctacctttggatat

SEQ ID NO: 58124 - DNA, 33 bp, Homo sapien
gccattgtactttcgagagctacctttggatat

SEQ ID NO: 58125 - DNA, 33 bp, Homo sapien
tggcttaaatttgctccataggcctacggagat

SEQ ID NO: 58126 - DNA, 33 bp, Homo sapien
tggcttaaatttgctctataggcctacggagat

SEQ ID NO: 58127 - DNA, 33 bp, Homo sapien
actcattgagctaaaaatcttcagggggtggaa

SEQ ID NO: 58128 - DNA, 33 bp, Homo sapien
actcattgagctaaaagtcttcagggggtggaa

SEQ ID NO: 58129 - DNA, 33 bp, Homo sapien
caacaaagatttcaaaacactttaagtcattag

SEQ ID NO: 58130 - DNA, 33 bp, Homo sapien
caacaaagatttcaaagcactttaagtcattag

SEQ ID NO: 58131 - DNA, 33 bp, Homo sapien
gactgaaactgtgttccagtgttttggaatgta

SEQ ID NO: 58132 - DNA, 33 bp, Homo sapien
gactgaaactgtgttctagtgttttggaatgta

SEQ ID NO: 58133 - DNA, 33 bp, Homo sapien
taaatggttgtggataggttctctcaaagatat

SEQ ID NO: 58134 - DNA, 33 bp, Homo sapien
taaatggttgtggatatgttctctcaaagatat

SEQ ID NO: 58135 - DNA, 33 bp, Homo sapien
ttcttcaaggtcagtacaaatagagcagtgatt

SEQ ID NO: 58136 - DNA, 33 bp, Homo sapien
ttcttcaaggtcagtataaatagagcagtgatt

SEQ ID NO: 58137 - DNA, 33 bp, Homo sapien
agaaagaactggaggaccagagaacagaacaga

SEQ ID NO: 58138 - DNA, 33 bp, Homo sapien
agaaagaactggaggatcagagaacagaacaga

SEQ ID NO: 58139 - DNA, 33 bp, Homo sapien
ttggaagcacataagtaaatattgagccttgcc

SEQ ID NO: 58140 - DNA, 33 bp, Homo sapien
ttggaagcacataagtgaatattgagccttgcc

SEQ ID NO: 58141 - DNA, 33 bp, Homo sapien
tgctgcttcaaaattacaatgagatatcttcaa

SEQ ID NO: 58142 - DNA, 33 bp, Homo sapien
tgctgcttcaaaattataatgagatatcttcaa

SEQ ID NO: 58143 - DNA, 33 bp, Homo sapien
ttagcactcagcgttcaatttatttgcaagatg

SEQ ID NO: 58144 - DNA, 33 bp, Homo sapien
ttagcactcagcgttcgatttatttgcaagatg

SEQ ID NO: 58145 - DNA, 33 bp, Homo sapien
ttcacatctcagacctaaagcttgtatctgctg

SEQ ID NO: 58146 - DNA, 33 bp, Homo sapien
ttcacatctcagacctgaagcttgtatctgctg

SEQ ID NO: 58147 - DNA, 33 bp, Homo sapien
cctggggcaatagtaacatgaatccacatagag

SEQ ID NO: 58148 - DNA, 33 bp, Homo sapien
cctggggcaatagtaatatgaatccacatagag

SEQ ID NO: 58149 - DNA, 33 bp, Homo sapien
aagaacttttacaggaaactcacattggaagac

SEQ ID NO: 58150 - DNA, 33 bp, Homo sapien
aagaacttttacaggagactcacattggaagac

SEQ ID NO: 58151 - DNA, 33 bp, Homo sapien
ctcccagtgaaaagcaagagtcagggagctcaa

SEQ ID NO: 58152 - DNA, 33 bp, Homo sapien
ctcccagtgaaaagcaggagtcagggagctcaa

SEQ ID NO: 58153 - DNA, 33 bp, Homo sapien
gatgcccaagtgtcaaagaagtccagaaaccaa

SEQ ID NO: 58154 - DNA, 33 bp, Homo sapien
gatgcccaagtgtcaacgaagtccagaaaccaa

SEQ ID NO: 58155 - DNA, 33 bp, Homo sapien
tgtttcaggtagtaagacaaagttaggaagagg

SEQ ID NO: 58156 - DNA, 33 bp, Homo sapien
tgtttcaggtagtaaggcaaagttaggaagagg

SEQ ID NO: 58157 - DNA, 33 bp, Homo sapien
gcttaaagtttccccaaataaatcttataatag

SEQ ID NO: 58158 - DNA, 33 bp, Homo sapien
gcttaaagtttccccacataaatcttataatag

SEQ ID NO: 58159 - DNA, 33 bp, Homo sapien
gatacaagactatagaatcaagaagaccttgtt

SEQ ID NO: 58160 - DNA, 33 bp, Homo sapien
gatacaagactatagactcaagaagaccttgtt

SEQ ID NO: 58161 - DNA, 33 bp, Homo sapien
ctgtgtttgaaaaaggccaaaggagtggttcag

SEQ ID NO: 58162 - DNA, 33 bp, Homo sapien
ctgtgtttgaaaaaggtcaaaggagtggttcag

SEQ ID NO: 58163 - DNA, 33 bp, Homo sapien
gagggctaatctgatcaccagaggccttcatgc

SEQ ID NO: 58164 - DNA, 33 bp, Homo sapien
gagggctaatctgatccccagaggccttcatgc

SEQ ID NO: 58165 - DNA, 33 bp, Homo sapien
aggcatgagttggtgaccgcatagtgctgacta

SEQ ID NO: 58166 - DNA, 33 bp, Homo sapien
aggcatgagttggtgatcgcatagtgctgacta

SEQ ID NO: 58167 - DNA, 33 bp, Homo sapien
tgtatggcatagagaacataattgggtctgtaa

SEQ ID NO: 58168 - DNA, 33 bp, Homo sapien
tgtatggcatagagaatataattgggtctgtaa

SEQ ID NO: 58169 - DNA, 33 bp, Homo sapien
tcagatccacagaaagaaaagatcatttggtgg

SEQ ID NO: 58170 - DNA, 33 bp, Homo sapien
tcagatccacagaaaggaaagatcatttggtgg

SEQ ID NO: 58171 - DNA, 33 bp, Homo sapien
aatggcatctagaaaaccagtttcttctgtagc

SEQ ID NO: 58172 - DNA, 33 bp, Homo sapien
aatggcatctagaaaagcagtttcttctgtagc

SEQ ID NO: 58173 - DNA, 33 bp, Homo sapien
aagcaacacactcccaaagtcttaattgcctgc

SEQ ID NO: 58174 - DNA, 33 bp, Homo sapien
aagcaacacactcccagagtcttaattgcctgc

SEQ ID NO: 58175 - DNA, 33 bp, Homo sapien
aagttgacaaatgctcaccatgggaagacaaag

SEQ ID NO: 58176 - DNA, 33 bp, Homo sapien
aagttgacaaatgctcgccatgggaagacaaag

SEQ ID NO: 58177 - DNA, 33 bp, Homo sapien
ggttcggagcagttgacgcgttgcccaaggtca

SEQ ID NO: 58178 - DNA, 33 bp, Homo sapien
ggttcggagcagttgatgcgttgcccaaggtca

SEQ ID NO: 58179 - DNA, 33 bp, Homo sapien
tgtagtgtacggtgccacatctcttagtctcct

SEQ ID NO: 58180 - DNA, 33 bp, Homo sapien
tgtagtgtacggtgccgcatctcttagtctcct

SEQ ID NO: 58181 - DNA, 33 bp, Homo sapien
gaaatttgttaccataggtatttgaacgcaata

SEQ ID NO: 58182 - DNA, 33 bp, Homo sapien
gaaatttgttaccatatgtatttgaacgcaata

SEQ ID NO: 58183 - DNA, 33 bp, Homo sapien
tcccctccaccaactccgagagaggagacaatg

SEQ ID NO: 58184 - DNA, 33 bp, Homo sapien
tcccctccaccaactcggagagaggagacaatg

SEQ ID NO: 58185 - DNA, 33 bp, Homo sapien
aaaatagcaggtttgagcacagctgagagatgc

SEQ ID NO: 58186 - DNA, 33 bp, Homo sapien
aaaatagcaggtttgatcacagctgagagatgc

SEQ ID NO: 58187 - DNA, 33 bp, Homo sapien
aagatgtcaaagagaaaaccaaatcggattgag

SEQ ID NO: 58188 - DNA, 33 bp, Homo sapien
aagatgtcaaagagaagaccaaatcggattgag

SEQ ID NO: 58189 - DNA, 33 bp, Homo sapien
aatcctttctctggaaagccctgcaggaaaaac

SEQ ID NO: 58190 - DNA, 33 bp, Homo sapien
aatcctttctctggaaggccctgcaggaaaaac

SEQ ID NO: 58191 - DNA, 33 bp, Homo sapien
gtttcaaaatgcaaataatgaaaggggccttga

SEQ ID NO: 58192 - DNA, 33 bp, Homo sapien
gtttcaaaatgcaaatgatgaaaggggccttga

SEQ ID NO: 58193 - DNA, 33 bp, Homo sapien
aaatccagtcttttaactctcaacctggtgttc

SEQ ID NO: 58194 - DNA, 33 bp, Homo sapien
aaatccagtcttttaagtctcaacctggtgttc

SEQ ID NO: 58195 - DNA, 33 bp, Homo sapien
gttgacacgaaaacacgcaaagaataactgtag

SEQ ID NO: 58196 - DNA, 33 bp, Homo sapien
gttgacacgaaaacactcaaagaataactgtag

SEQ ID NO: 58197 - DNA, 33 bp, Homo sapien
aatctccaatgccttccatgaaaacatcttagc

SEQ ID NO: 58198 - DNA, 33 bp, Homo sapien
aatctccaatgccttctatgaaaacatcttagc

SEQ ID NO: 58199 - DNA, 33 bp, Homo sapien
cagtctgggtctagccacagatgtttaactgca

SEQ ID NO: 58200 - DNA, 33 bp, Homo sapien
cagtctgggtctagccgcagatgtttaactgca

SEQ ID NO: 58201 - DNA, 33 bp, Homo sapien
agagacaaaacttgcagccaaattaattgaaag

SEQ ID NO: 58202 - DNA, 33 bp, Homo sapien
agagacaaaacttgcatccaaattaattgaaag

SEQ ID NO: 58203 - DNA, 33 bp, Homo sapien
atggagtggaaatagacgtgtctacaacatttc

SEQ ID NO: 58204 - DNA, 33 bp, Homo sapien
atggagtggaaatagatgtgtctacaacatttc

SEQ ID NO: 58205 - DNA, 33 bp, Homo sapien
ttgggaaataatgaagcatgaagtaattttgat

SEQ ID NO: 58206 - DNA, 33 bp, Homo sapien
ttgggaaataatgaagtatgaagtaattttgat

SEQ ID NO: 58207 - DNA, 33 bp, Homo sapien
acctgagctcagatccgaattccaccctgtatg

SEQ ID NO: 58208 - DNA, 33 bp, Homo sapien
acctgagctcagatcctaattccaccctgtatg

SEQ ID NO: 58209 - DNA, 33 bp, Homo sapien
tacacactcaagccctcacgtggctcataacag

SEQ ID NO: 58210 - DNA, 33 bp, Homo sapien
tacacactcaagccctgacgtggctcataacag

SEQ ID NO: 58211 - DNA, 33 bp, Homo sapien
ctctgggctgcccaaactagaagtcctcacaga

SEQ ID NO: 58212 - DNA, 33 bp, Homo sapien
ctctgggctgcccaaattagaagtcctcacaga

SEQ ID NO: 58213 - DNA, 33 bp, Homo sapien
cttggctcctgggcaaaaggggccacagattcc

SEQ ID NO: 58214 - DNA, 33 bp, Homo sapien
cttggctcctgggcaagaggggccacagattcc

SEQ ID NO: 58215 - DNA, 33 bp, Homo sapien
tgtgtgacccgggtccagcagaatgctaggtgc

SEQ ID NO: 58216 - DNA, 33 bp, Homo sapien
tgtgtgacccgggtcccgcagaatgctaggtgc

SEQ ID NO: 58217 - DNA, 33 bp, Homo sapien
accagcgttttttagcaattgaagcaattttcc

SEQ ID NO: 58218 - DNA, 33 bp, Homo sapien
accagcgttttttagccattgaagcaattttcc

SEQ ID NO: 58219 - DNA, 33 bp, Homo sapien
gtgttctgttcgcctcgcagactgtgggctcct

SEQ ID NO: 58220 - DNA, 33 bp, Homo sapien
gtgttctgttcgcctctcagactgtgggctcct

SEQ ID NO: 58221 - DNA, 33 bp, Homo sapien
taacatattttaagacgaattttcctgtaggaa

SEQ ID NO: 58222 - DNA, 33 bp, Homo sapien
taacatattttaagactaattttcctgtaggaa

SEQ ID NO: 58223 - DNA, 33 bp, Homo sapien
acctctgttggagagagaaattctttcaagtgg

SEQ ID NO: 58224 - DNA, 33 bp, Homo sapien
acctctgttggagagataaattctttcaagtgg

SEQ ID NO: 58225 - DNA, 33 bp, Homo sapien
cgtgtaatccagcccactgagcaaaggagcgtg

SEQ ID NO: 58226 - DNA, 33 bp, Homo sapien
cgtgtaatccagcccattgagcaaaggagcgtg

SEQ ID NO: 58227 - DNA, 33 bp, Homo sapien
tgagcttgcaagtctacccctctgaaagctttc

SEQ ID NO: 58228 - DNA, 33 bp, Homo sapien
tgagcttgcaagtctatccctctgaaagctttc

SEQ ID NO: 58229 - DNA, 33 bp, Homo sapien
gcccactctccctaacaagactctatgagcacc

SEQ ID NO: 58230 - DNA, 33 bp, Homo sapien
gcccactctccctaacgagactctatgagcacc

SEQ ID NO: 58231 - DNA, 33 bp, Homo sapien
caactgtttttgagtacagcaggttcattggac

SEQ ID NO: 58232 - DNA, 33 bp, Homo sapien
caactgtttttgagtatagcaggttcattggac

SEQ ID NO: 58233 - DNA, 33 bp, Homo sapien
gaaaacaagtttaccaagagacagagaaactcc

SEQ ID NO: 58234 - DNA, 33 bp, Homo sapien
gaaaacaagtttaccacgagacagagaaactcc

SEQ ID NO: 58235 - DNA, 33 bp, Homo sapien
catgcagaggaatagaaaggctaataaaacaag

SEQ ID NO: 58236 - DNA, 33 bp, Homo sapien
catgcagaggaatagagaggctaataaaacaag

SEQ ID NO: 58237 - DNA, 33 bp, Homo sapien
caagacttcatgttaacaaatggtatgtcattt

SEQ ID NO: 58238 - DNA, 33 bp, Homo sapien
caagacttcatgttaataaatggtatgtcattt

SEQ ID NO: 58239 - DNA, 33 bp, Homo sapien
tacttattgagtatcaactacgtgttaggcact

SEQ ID NO: 58240 - DNA, 33 bp, Homo sapien
tacttattgagtatcagctacgtgttaggcact

SEQ ID NO: 58241 - DNA, 33 bp, Homo sapien
agggggccttaaaaagcagatggcatttgagac

SEQ ID NO: 58242 - DNA, 33 bp, Homo sapien
agggggccttaaaaagtagatggcatttgagac

SEQ ID NO: 58243 - DNA, 33 bp, Homo sapien
ataagtaaagaaacggcaagtcttgagatatta

SEQ ID NO: 58244 - DNA, 33 bp, Homo sapien
ataagtaaagaaacggtaagtcttgagatatta

SEQ ID NO: 58245 - DNA, 33 bp, Homo sapien
ggagagaaaatgtaacaggcaaagcaaagactg

SEQ ID NO: 58246 - DNA, 33 bp, Homo sapien
ggagagaaaatgtaacgggcaaagcaaagactg

SEQ ID NO: 58247 - DNA, 33 bp, Homo sapien
ataaatggtgccaggaaaacaggtaagccactt

SEQ ID NO: 58248 - DNA, 33 bp, Homo sapien
ataaatggtgccaggacaacaggtaagccactt

SEQ ID NO: 58249 - DNA, 33 bp, Homo sapien
ttatatattctgataaagctcttacttgatttc

SEQ ID NO: 58250 - DNA, 33 bp, Homo sapien
ttatatattctgataatgctcttacttgatttc

SEQ ID NO: 58251 - DNA, 33 bp, Homo sapien
aagctgactgatacacacaagtacaatccacag

SEQ ID NO: 58252 - DNA, 33 bp, Homo sapien
aagctgactgatacacgcaagtacaatccacag

SEQ ID NO: 58253 - DNA, 33 bp, Homo sapien
cccatttcaaaagcacaggcagaatagattaag

SEQ ID NO: 58254 - DNA, 33 bp, Homo sapien
cccatttcaaaagcacgggcagaatagattaag

SEQ ID NO: 58255 - DNA, 33 bp, Homo sapien
tcaggaatgacaaggcgattaaagcgaagagat

SEQ ID NO: 58256 - DNA, 33 bp, Homo sapien
tcaggaatgacaaggctattaaagcgaagagat

SEQ ID NO: 58257 - DNA, 33 bp, Homo sapien
gatggtatccaagccacagcgatcagacaagaa

SEQ ID NO: 58258 - DNA, 33 bp, Homo sapien
gatggtatccaagccagagcgatcagacaagaa

SEQ ID NO: 58259 - DNA, 33 bp, Homo sapien
ttactgtttcatccagaaattttagccatgcat

SEQ ID NO: 58260 - DNA, 33 bp, Homo sapien
ttactgtttcatccagtaattttagccatgcat

SEQ ID NO: 58261 - DNA, 33 bp, Homo sapien
tagttcctctttctaacgcaactgcacaaatac

SEQ ID NO: 58262 - DNA, 33 bp, Homo sapien
tagttcctctttctaatgcaactgcacaaatac

SEQ ID NO: 58263 - DNA, 33 bp, Homo sapien
tctttacaaacaaacacattttataacatcaca

SEQ ID NO: 58264 - DNA, 33 bp, Homo sapien
tctttacaaacaaacatattttataacatcaca

SEQ ID NO: 58265 - DNA, 33 bp, Homo sapien
gtgggagcagaaaagagaattattgggtattga

SEQ ID NO: 58266 - DNA, 33 bp, Homo sapien
gtgggagcagaaaagataattattgggtattga

SEQ ID NO: 58267 - DNA, 33 bp, Homo sapien
taccatgtgcaggttaacattcactaatatcct

SEQ ID NO: 58268 - DNA, 33 bp, Homo sapien
taccatgtgcaggttatcattcactaatatcct

SEQ ID NO: 58269 - DNA, 33 bp, Homo sapien
cttaaattggaaaaatcaaccaacaatgttaat

SEQ ID NO: 58270 - DNA, 33 bp, Homo sapien
cttaaattggaaaaatgaaccaacaatgttaat

SEQ ID NO: 58271 - DNA, 33 bp, Homo sapien
attttgaataatttgccataccaaccatacttg

SEQ ID NO: 58272 - DNA, 33 bp, Homo sapien
attttgaataatttgctataccaaccatacttg

SEQ ID NO: 58273 - DNA, 33 bp, Homo sapien
gtatcctgagtttaccaggaaaaacacattcta

SEQ ID NO: 58274 - DNA, 33 bp, Homo sapien
gtatcctgagtttaccgggaaaaacacattcta

SEQ ID NO: 58275 - DNA, 33 bp, Homo sapien
atatctatttgtgttgaaaaactagggggtgac

SEQ ID NO: 58276 - DNA, 33 bp, Homo sapien
atatctatttgtgttgcaaaactagggggtgac

SEQ ID NO: 58277 - DNA, 33 bp, Homo sapien
gtttttaggtaaaaagccagaaagattctatta

SEQ ID NO: 58278 - DNA, 33 bp, Homo sapien
gtttttaggtaaaaagtcagaaagattctatta

SEQ ID NO: 58279 - DNA, 33 bp, Homo sapien
tgaggtaacgtatctccatcccctgacaacaat

SEQ ID NO: 58280 - DNA, 33 bp, Homo sapien
tgaggtaacgtatctctatcccctgacaacaat

SEQ ID NO: 58281 - DNA, 33 bp, Homo sapien
agtacatccagtttaacaacacagtggggctgg

SEQ ID NO: 58282 - DNA, 33 bp, Homo sapien
agtacatccagtttaagaacacagtggggctgg

SEQ ID NO: 58283 - DNA, 33 bp, Homo sapien
tttatttttgcttgcactctgttgctctgctcg

SEQ ID NO: 58284 - DNA, 33 bp, Homo sapien
tttatttttgcttgcagtctgttgctctgctcg

SEQ ID NO: 58285 - DNA, 33 bp, Homo sapien
tagtccttgaaaacaccgcatggaattaccttt

SEQ ID NO: 58286 - DNA, 33 bp, Homo sapien
tagtccttgaaaacactgcatggaattaccttt

SEQ ID NO: 58287 - DNA, 33 bp, Homo sapien
ttctcccatgcattaaagttaagtgatcatgcc

SEQ ID NO: 58288 - DNA, 33 bp, Homo sapien
ttctcccatgcattaaggttaagtgatcatgcc

SEQ ID NO: 58289 - DNA, 33 bp, Homo sapien
agggccatgctcaaaccgaaacgcggaggagag

SEQ ID NO: 58290 - DNA, 33 bp, Homo sapien
agggccatgctcaaactgaaacgcggaggagag

SEQ ID NO: 58291 - DNA, 33 bp, Homo sapien
tctttgttgcaaaaccaatgagtagcaatcaag

SEQ ID NO: 58292 - DNA, 33 bp, Homo sapien
tctttgttgcaaaaccgatgagtagcaatcaag

SEQ ID NO: 58293 - DNA, 33 bp, Homo sapien
aaaagctcctcctgctcaaatattttggaggcc

SEQ ID NO: 58294 - DNA, 33 bp, Homo sapien
aaaagctcctcctgctgaaatattttggaggcc

SEQ ID NO: 58295 - DNA, 33 bp, Homo sapien
acttcagcgcaaaggaaatcagagtgaatatga

SEQ ID NO: 58296 - DNA, 33 bp, Homo sapien
acttcagcgcaaaggagatcagagtgaatatga

SEQ ID NO: 58297 - DNA, 33 bp, Homo sapien
actgtgcccagcccaaatatgtatttcttacac

SEQ ID NO: 58298 - DNA, 33 bp, Homo sapien
actgtgcccagcccaagtatgtatttcttacac

SEQ ID NO: 58299 - DNA, 33 bp, Homo sapien
tgcttaaaagttatgaaagcctatctatcatat

SEQ ID NO: 58300 - DNA, 33 bp, Homo sapien
tgcttaaaagttatgacagcctatctatcatat

SEQ ID NO: 58301 - DNA, 33 bp, Homo sapien
tcctactatgatagccacacctccatgggtcag

SEQ ID NO: 58302 - DNA, 33 bp, Homo sapien
tcctactatgatagccccacctccatgggtcag

SEQ ID NO: 58303 - DNA, 33 bp, Homo sapien
gccccatgtcacccaccatagttgcactgagtt

SEQ ID NO: 58304 - DNA, 33 bp, Homo sapien
gccccatgtcacccacgatagttgcactgagtt

SEQ ID NO: 58305 - DNA, 33 bp, Homo sapien
tttcctttcagacccaccaagtggccatcctat

SEQ ID NO: 58306 - DNA, 33 bp, Homo sapien
tttcctttcagacccatcaagtggccatcctat

SEQ ID NO: 58307 - DNA, 33 bp, Homo sapien
ggactgtttactcagacgttatgtgagaaagaa

SEQ ID NO: 58308 - DNA, 33 bp, Homo sapien
ggactgtttactcagatgttatgtgagaaagaa

SEQ ID NO: 58309 - DNA, 33 bp, Homo sapien
tctcagacctcacggaacttctggactgtttac

SEQ ID NO: 58310 - DNA, 33 bp, Homo sapien
tctcagacctcacggagcttctggactgtttac

SEQ ID NO: 58311 - DNA, 33 bp, Homo sapien
tgtctatgggaatcgcacttgctagagctgctc

SEQ ID NO: 58312 - DNA, 33 bp, Homo sapien
tgtctatgggaatcgcgcttgctagagctgctc

SEQ ID NO: 58313 - DNA, 33 bp, Homo sapien
ccacacccatatagtcaattgtctcctggacac

SEQ ID NO: 58314 - DNA, 33 bp, Homo sapien
ccacacccatatagtctattgtctcctggacac

SEQ ID NO: 58315 - DNA, 33 bp, Homo sapien
cgtatccttagacaaaactgaatctccttggct

SEQ ID NO: 58316 - DNA, 33 bp, Homo sapien
cgtatccttagacaaagctgaatctccttggct

SEQ ID NO: 58317 - DNA, 33 bp, Homo sapien
ccttgtggcaccaaagaacaaacattttacatt

SEQ ID NO: 58318 - DNA, 33 bp, Homo sapien
ccttgtggcaccaaagtacaaacattttacatt

SEQ ID NO: 58319 - DNA, 33 bp, Homo sapien
ggcacgtttcaagatacgctaggcctagactgc

SEQ ID NO: 58320 - DNA, 33 bp, Homo sapien
ggcacgtttcaagatatgctaggcctagactgc

SEQ ID NO: 58321 - DNA, 33 bp, Homo sapien
tctctccttatgaaccaattctgttccaaactt

SEQ ID NO: 58322 - DNA, 33 bp, Homo sapien
tctctccttatgaaccgattctgttccaaactt

SEQ ID NO: 58323 - DNA, 33 bp, Homo sapien
ggttcaagtgattctccagcttcgacctcccaa

SEQ ID NO: 58324 - DNA, 33 bp, Homo sapien
ggttcaagtgattctctagcttcgacctcccaa

SEQ ID NO: 58325 - DNA, 33 bp, Homo sapien
ggccaaattcaagtcgacaaataaaaacttagc

SEQ ID NO: 58326 - DNA, 33 bp, Homo sapien
ggccaaattcaagtcggcaaataaaaacttagc

SEQ ID NO: 58327 - DNA, 33 bp, Homo sapien
taatagccatcataccaggggaaaagagaagtg

SEQ ID NO: 58328 - DNA, 33 bp, Homo sapien
taatagccatcataccgggggaaaagagaagtg

SEQ ID NO: 58329 - DNA, 33 bp, Homo sapien
caacagttattgatgacaagcctcatgctgtgg

SEQ ID NO: 58330 - DNA, 33 bp, Homo sapien
caacagttattgatgataagcctcatgctgtgg

SEQ ID NO: 58331 - DNA, 33 bp, Homo sapien
gttgtcttctgttctaccccctagatgcagagt

SEQ ID NO: 58332 - DNA, 33 bp, Homo sapien
gttgtcttctgttctatcccctagatgcagagt

SEQ ID NO: 58333 - DNA, 33 bp, Homo sapien
gaaggcttaataatgaaaaaaagacggcttcca

SEQ ID NO: 58334 - DNA, 33 bp, Homo sapien
gaaggcttaataatgagaaaaagacggcttcca

SEQ ID NO: 58335 - DNA, 33 bp, Homo sapien
gcaagtagagagtcatcagtaacctcagaaaaa

SEQ ID NO: 58336 - DNA, 33 bp, Homo sapien
gcaagtagagagtcattagtaacctcagaaaaa

SEQ ID NO: 58337 - DNA, 33 bp, Homo sapien
agagacgagcagtttaccttcaaggacctcata

SEQ ID NO: 58338 - DNA, 33 bp, Homo sapien
agagacgagcagtttatcttcaaggacctcata

SEQ ID NO: 58339 - DNA, 33 bp, Homo sapien
attactaagtatttgaaggttctatcagtaaaa

SEQ ID NO: 58340 - DNA, 33 bp, Homo sapien
attactaagtatttgatggttctatcagtaaaa

SEQ ID NO: 58341 - DNA, 33 bp, Homo sapien
taaagacaggaagctacaactattctttatcat

SEQ ID NO: 58342 - DNA, 33 bp, Homo sapien
taaagacaggaagctataactattctttatcat

SEQ ID NO: 58343 - DNA, 33 bp, Homo sapien
cagtacatactgtgatcaggagaccacccaaat

SEQ ID NO: 58344 - DNA, 33 bp, Homo sapien
cagtacatactgtgattaggagaccacccaaat

SEQ ID NO: 58345 - DNA, 33 bp, Homo sapien
ccctttcccctcttcactatgtgttaacatcat

SEQ ID NO: 58346 - DNA, 33 bp, Homo sapien
ccctttcccctcttcattatgtgttaacatcat

SEQ ID NO: 58347 - DNA, 33 bp, Homo sapien
tgtgatccttacagcaagcctgttgacataggt

SEQ ID NO: 58348 - DNA, 33 bp, Homo sapien
tgtgatccttacagcaggcctgttgacataggt

SEQ ID NO: 58349 - DNA, 33 bp, Homo sapien
cttgatgtatgaattaactgttactggatagca

SEQ ID NO: 58350 - DNA, 33 bp, Homo sapien
cttgatgtatgaattatctgttactggatagca

SEQ ID NO: 58351 - DNA, 33 bp, Homo sapien
tgcctgggttgggagcaatacatccaagtcaca

SEQ ID NO: 58352 - DNA, 33 bp, Homo sapien
tgcctgggttgggagccatacatccaagtcaca

SEQ ID NO: 58353 - DNA, 33 bp, Homo sapien
tgtatttggttcctgacagcattatttaatttt

SEQ ID NO: 58354 - DNA, 33 bp, Homo sapien
tgtatttggttcctgatagcattatttaatttt

SEQ ID NO: 58355 - DNA, 33 bp, Homo sapien
gtaaggttttgtaccactgacagaatgtaaatt

SEQ ID NO: 58356 - DNA, 33 bp, Homo sapien
gtaaggttttgtaccattgacagaatgtaaatt

SEQ ID NO: 58357 - DNA, 33 bp, Homo sapien
tgaaaagataaactgcaatgattttaagcatta

SEQ ID NO: 58358 - DNA, 33 bp, Homo sapien
tgaaaagataaactgcgatgattttaagcatta

SEQ ID NO: 58359 - DNA, 33 bp, Homo sapien
tgtttcagagtaaataaaggcatctcaacctca

SEQ ID NO: 58360 - DNA, 33 bp, Homo sapien
tgtttcagagtaaatataggcatctcaacctca

SEQ ID NO: 58361 - DNA, 33 bp, Homo sapien
agaacatattttggaactgcacagcaattgtgg

SEQ ID NO: 58362 - DNA, 33 bp, Homo sapien
agaacatattttggaagtgcacagcaattgtgg

SEQ ID NO: 58363 - DNA, 33 bp, Homo sapien
acagaaaaaacaggaacgtgaaaataataaatc

SEQ ID NO: 58364 - DNA, 33 bp, Homo sapien
acagaaaaaacaggaatgtgaaaataataaatc

SEQ ID NO: 58365 - DNA, 33 bp, Homo sapien
aaggtagaatctctcaagtccaaaggacagcag

SEQ ID NO: 58366 - DNA, 33 bp, Homo sapien
aaggtagaatctctcacgtccaaaggacagcag

SEQ ID NO: 58367 - DNA, 33 bp, Homo sapien
acattggtgaaatccaggttgaatattagtgtt

SEQ ID NO: 58368 - DNA, 33 bp, Homo sapien
acattggtgaaatccatgttgaatattagtgtt

SEQ ID NO: 58369 - DNA, 33 bp, Homo sapien
cagagaggaggttccaaaagagttgaagacagg

SEQ ID NO: 58370 - DNA, 33 bp, Homo sapien
cagagaggaggttccagaagagttgaagacagg

SEQ ID NO: 58371 - DNA, 33 bp, Homo sapien
tactatgaatttgatacattttctcatggttat

SEQ ID NO: 58372 - DNA, 33 bp, Homo sapien
tactatgaatttgatatattttctcatggttat

SEQ ID NO: 58373 - DNA, 33 bp, Homo sapien
aaatccatctctctgaacaactaaaattaggag

SEQ ID NO: 58374 - DNA, 33 bp, Homo sapien
aaatccatctctctgaccaactaaaattaggag

SEQ ID NO: 58375 - DNA, 33 bp, Homo sapien
taaaggatgggaactgaaactagaagaccgtca

SEQ ID NO: 58376 - DNA, 33 bp, Homo sapien
taaaggatgggaactgcaactagaagaccgtca

SEQ ID NO: 58377 - DNA, 33 bp, Homo sapien
aattagaagtatgtaaacaatgtgaagaagaaa

SEQ ID NO: 58378 - DNA, 33 bp, Homo sapien
aattagaagtatgtaagcaatgtgaagaagaaa

SEQ ID NO: 58379 - DNA, 33 bp, Homo sapien
atgtcgtagaaattcaacaaataataaagtaga

SEQ ID NO: 58380 - DNA, 33 bp, Homo sapien
atgtcgtagaaattcagcaaataataaagtaga

SEQ ID NO: 58381 - DNA, 33 bp, Homo sapien
tttcattagcattataaacttgttctggtatct

SEQ ID NO: 58382 - DNA, 33 bp, Homo sapien
tttcattagcattatagacttgttctggtatct

SEQ ID NO: 58383 - DNA, 33 bp, Homo sapien
aatgcattcacggtaaaaacacagtagcatcac

SEQ ID NO: 58384 - DNA, 33 bp, Homo sapien
aatgcattcacggtaacaacacagtagcatcac

SEQ ID NO: 58385 - DNA, 33 bp, Homo sapien
taataattttgcgcataaaacagcttgtgtaca

SEQ ID NO: 58386 - DNA, 33 bp, Homo sapien
taataattttgcgcattaaacagcttgtgtaca

SEQ ID NO: 58387 - DNA, 33 bp, Homo sapien
aaataaaaccattataataggaagctgagttta

SEQ ID NO: 58388 - DNA, 33 bp, Homo sapien
aaataaaaccattatagtaggaagctgagttta

SEQ ID NO: 58389 - DNA, 33 bp, Homo sapien
aggccaatcttctcaaaaaccatttatttaaaa

SEQ ID NO: 58390 - DNA, 33 bp, Homo sapien
aggccaatcttctcaataaccatttatttaaaa

SEQ ID NO: 58391 - DNA, 33 bp, Homo sapien
taaatggccaatgaacaaatgaaaggatgccag

SEQ ID NO: 58392 - DNA, 33 bp, Homo sapien
taaatggccaatgaaccaatgaaaggatgccag

SEQ ID NO: 58393 - DNA, 33 bp, Homo sapien
cagctattaggctgtaaatctggcggtgtaaca

SEQ ID NO: 58394 - DNA, 33 bp, Homo sapien
cagctattaggctgtatatctggcggtgtaaca

SEQ ID NO: 58395 - DNA, 33 bp, Homo sapien
aaattggtcagaaaatgaaaatatagttacgtg

SEQ ID NO: 58396 - DNA, 33 bp, Homo sapien
aaattggtcagaaaattaaaatatagttacgtg

SEQ ID NO: 58397 - DNA, 33 bp, Homo sapien
tcttctagaaattctaagggagcaaatgggaat

SEQ ID NO: 58398 - DNA, 33 bp, Homo sapien
tcttctagaaattctaggggagcaaatgggaat

SEQ ID NO: 58399 - DNA, 33 bp, Homo sapien
gactgaggtagaactcactgaaggccagtttaa

SEQ ID NO: 58400 - DNA, 33 bp, Homo sapien
gactgaggtagaactcgctgaaggccagtttaa

SEQ ID NO: 58401 - DNA, 33 bp, Homo sapien
attttataatgactccaaacaaaagctgctagg

SEQ ID NO: 58402 - DNA, 33 bp, Homo sapien
attttataatgactccgaacaaaagctgctagg

SEQ ID NO: 58403 - DNA, 33 bp, Homo sapien
tatataaagaactccaatactcaatagaaggaa

SEQ ID NO: 58404 - DNA, 33 bp, Homo sapien
tatataaagaactccagtactcaatagaaggaa

SEQ ID NO: 58405 - DNA, 33 bp, Homo sapien
ctgttgcataatggacagcatagccatcatagc

SEQ ID NO: 58406 - DNA, 33 bp, Homo sapien
ctgttgcataatggacggcatagccatcatagc

SEQ ID NO: 58407 - DNA, 33 bp, Homo sapien
tattttcctcctgagagcgagtatcaggtggcc

SEQ ID NO: 58408 - DNA, 33 bp, Homo sapien
tattttcctcctgagatcgagtatcaggtggcc

SEQ ID NO: 58409 - DNA, 33 bp, Homo sapien
atggagtcttattacacaaagctgattttcttt

SEQ ID NO: 58410 - DNA, 33 bp, Homo sapien
atggagtcttattacagaaagctgattttcttt

SEQ ID NO: 58411 - DNA, 33 bp, Homo sapien
aggccagaaagccagacgaaaagctatgcagta

SEQ ID NO: 58412 - DNA, 33 bp, Homo sapien
aggccagaaagccagatgaaaagctatgcagta

SEQ ID NO: 58413 - DNA, 33 bp, Homo sapien
agtgaaatcggtgttaccattcctgccttacag

SEQ ID NO: 58414 - DNA, 33 bp, Homo sapien
agtgaaatcggtgttatcattcctgccttacag

SEQ ID NO: 58415 - DNA, 33 bp, Homo sapien
ctactttccaatcttacaaatgaccatcataac

SEQ ID NO: 58416 - DNA, 33 bp, Homo sapien
ctactttccaatcttagaaatgaccatcataac

SEQ ID NO: 58417 - DNA, 33 bp, Homo sapien
ggaggctcttcttgtacgggccaacagcatgga

SEQ ID NO: 58418 - DNA, 33 bp, Homo sapien
ggaggctcttcttgtatgggccaacagcatgga

SEQ ID NO: 58419 - DNA, 33 bp, Homo sapien
ctgaagacatagctaaagtgccagatcaaaggc

SEQ ID NO: 58420 - DNA, 33 bp, Homo sapien
ctgaagacatagctaaggtgccagatcaaaggc

SEQ ID NO: 58421 - DNA, 33 bp, Homo sapien
ctcccacggctgctaccacagtggaatggggca

SEQ ID NO: 58422 - DNA, 33 bp, Homo sapien
ctcccacggctgctactacagtggaatggggca

SEQ ID NO: 58423 - DNA, 33 bp, Homo sapien
tgaagtgttttggtccgcgatcactcacaggga

SEQ ID NO: 58424 - DNA, 33 bp, Homo sapien
tgaagtgttttggtcctcgatcactcacaggga

SEQ ID NO: 58425 - DNA, 33 bp, Homo sapien
tttaggatacttaacacgctcccagtgtctcac

SEQ ID NO: 58426 - DNA, 33 bp, Homo sapien
tttaggatacttaacatgctcccagtgtctcac

SEQ ID NO: 58427 - DNA, 33 bp, Homo sapien
ttattatgaaagtcgaaccacttgctggcttgg

SEQ ID NO: 58428 - DNA, 33 bp, Homo sapien
ttattatgaaagtcgagccacttgctggcttgg

SEQ ID NO: 58429 - DNA, 33 bp, Homo sapien
atgagcagcagagataaattttcaagaactgaa

SEQ ID NO: 58430 - DNA, 33 bp, Homo sapien
atgagcagcagagatacattttcaagaactgaa

SEQ ID NO: 58431 - DNA, 33 bp, Homo sapien
ctatgtgttatagatacgggggatacagcagta

SEQ ID NO: 58432 - DNA, 33 bp, Homo sapien
ctatgtgttatagatatgggggatacagcagta

SEQ ID NO: 58433 - DNA, 33 bp, Homo sapien
gtggaatggagttagaccatggaggaggcgcac

SEQ ID NO: 58434 - DNA, 33 bp, Homo sapien
gtggaatggagttagatcatggaggaggcgcac

SEQ ID NO: 58435 - DNA, 33 bp, Homo sapien
ctcctgccagaccacaagttctgattttggttt

SEQ ID NO: 58436 - DNA, 33 bp, Homo sapien
ctcctgccagaccacacgttctgattttggttt

SEQ ID NO: 58437 - DNA, 33 bp, Homo sapien
cacaggcagatgggacactctgaactacaccaa

SEQ ID NO: 58438 - DNA, 33 bp, Homo sapien
cacaggcagatgggacgctctgaactacaccaa

SEQ ID NO: 58439 - DNA, 33 bp, Homo sapien
gaagtgagacacagaacgggcaaatttagaatg

SEQ ID NO: 58440 - DNA, 33 bp, Homo sapien
gaagtgagacacagaatgggcaaatttagaatg

SEQ ID NO: 58441 - DNA, 33 bp, Homo sapien
gaagacacacgctctacaaggtgacaattctgg

SEQ ID NO: 58442 - DNA, 33 bp, Homo sapien
gaagacacacgctctagaaggtgacaattctgg

SEQ ID NO: 58443 - DNA, 33 bp, Homo sapien
tttggataagtaacaaggtatgtggttgctgaa

SEQ ID NO: 58444 - DNA, 33 bp, Homo sapien
tttggataagtaacaatgtatgtggttgctgaa

SEQ ID NO: 58445 - DNA, 33 bp, Homo sapien
ctgagatgctccttgaggtaatctgaatgttcc

SEQ ID NO: 58446 - DNA, 33 bp, Homo sapien
ctgagatgctccttgatgtaatctgaatgttcc

SEQ ID NO: 58447 - DNA, 33 bp, Homo sapien
tacttattctcagcataatgagagaccagtgga

SEQ ID NO: 58448 - DNA, 33 bp, Homo sapien
tacttattctcagcatgatgagagaccagtgga

SEQ ID NO: 58449 - DNA, 33 bp, Homo sapien
tgctatattgaacagacacgttttgctttgaat

SEQ ID NO: 58450 - DNA, 33 bp, Homo sapien
tgctatattgaacagatacgttttgctttgaat

SEQ ID NO: 58451 - DNA, 33 bp, Homo sapien
acttattgccacagggaatcctttcgtttgtcc

SEQ ID NO: 58452 - DNA, 33 bp, Homo sapien
acttattgccacagggcatcctttcgtttgtcc

SEQ ID NO: 58453 - DNA, 33 bp, Homo sapien
acctgcagactatgaaagagaagtatagagagc

SEQ ID NO: 58454 - DNA, 33 bp, Homo sapien
acctgcagactatgaacgagaagtatagagagc

SEQ ID NO: 58455 - DNA, 33 bp, Homo sapien
atcctataccctctgacgtttcaagtattggaa

SEQ ID NO: 58456 - DNA, 33 bp, Homo sapien
atcctataccctctgatgtttcaagtattggaa

SEQ ID NO: 58457 - DNA, 33 bp, Homo sapien
agatacatagtatacacaactctgagctcttcg

SEQ ID NO: 58458 - DNA, 33 bp, Homo sapien
agatacatagtatacataactctgagctcttcg

SEQ ID NO: 58459 - DNA, 33 bp, Homo sapien
tctgcagtgtatcaggaaatcccatctcaatag

SEQ ID NO: 58460 - DNA, 33 bp, Homo sapien
tctgcagtgtatcagggaatcccatctcaatag

SEQ ID NO: 58461 - DNA, 33 bp, Homo sapien
gtttggtgatgtaccagattgggaggttgtatg

SEQ ID NO: 58462 - DNA, 33 bp, Homo sapien
gtttggtgatgtaccatattgggaggttgtatg

SEQ ID NO: 58463 - DNA, 33 bp, Homo sapien
gcatctttcatcttggaacacaagtataggcta

SEQ ID NO: 58464 - DNA, 33 bp, Homo sapien
gcatctttcatcttgggacacaagtataggcta

SEQ ID NO: 58465 - DNA, 33 bp, Homo sapien
ttcatctttcctcacactgatgcatccaacact

SEQ ID NO: 58466 - DNA, 33 bp, Homo sapien
ttcatctttcctcacattgatgcatccaacact

SEQ ID NO: 58467 - DNA, 33 bp, Homo sapien
tgcctgattcacccacacagctttctggagtca

SEQ ID NO: 58468 - DNA, 33 bp, Homo sapien
tgcctgattcacccacgcagctttctggagtca

SEQ ID NO: 58469 - DNA, 33 bp, Homo sapien
ttattgtgaggattcaatgaaatcagcagtggt

SEQ ID NO: 58470 - DNA, 33 bp, Homo sapien
ttattgtgaggattcagtgaaatcagcagtggt

SEQ ID NO: 58471 - DNA, 33 bp, Homo sapien
cactttaaatgcccacccaaaaatatattacat

SEQ ID NO: 58472 - DNA, 33 bp, Homo sapien
cactttaaatgcccactcaaaaatatattacat

SEQ ID NO: 58473 - DNA, 33 bp, Homo sapien
tctcaggaactctccacgtaatctctctgtgtg

SEQ ID NO: 58474 - DNA, 33 bp, Homo sapien
tctcaggaactctccatgtaatctctctgtgtg

SEQ ID NO: 58475 - DNA, 33 bp, Homo sapien
gccaaaggaatctgtgaaattttggagagtttg

SEQ ID NO: 58476 - DNA, 33 bp, Homo sapien
gccaaaggaatctgtggaattttggagagtttg

SEQ ID NO: 58477 - DNA, 33 bp, Homo sapien
gtttacttgaactaaccgaaagctctgttgttt

SEQ ID NO: 58478 - DNA, 33 bp, Homo sapien
gtttacttgaactaactgaaagctctgttgttt

SEQ ID NO: 58479 - DNA, 33 bp, Homo sapien
agtctgtgaagctgcactagtttacagatcttt

SEQ ID NO: 58480 - DNA, 33 bp, Homo sapien
agtctgtgaagctgcattagtttacagatcttt

SEQ ID NO: 58481 - DNA, 33 bp, Homo sapien
tgagaattttcagtcacgtaagtagatgatggt

SEQ ID NO: 58482 - DNA, 33 bp, Homo sapien
tgagaattttcagtcatgtaagtagatgatggt

SEQ ID NO: 58483 - DNA, 33 bp, Homo sapien
caaagtaccccacttacctccaactttacaaag

SEQ ID NO: 58484 - DNA, 33 bp, Homo sapien
caaagtaccccacttatctccaactttacaaag

SEQ ID NO: 58485 - DNA, 33 bp, Homo sapien
tatcttcttccattcaatcacaatctcagtaga

SEQ ID NO: 58486 - DNA, 33 bp, Homo sapien
tatcttcttccattcagtcacaatctcagtaga

SEQ ID NO: 58487 - DNA, 33 bp, Homo sapien
cccattttttactgaccctcccaagatctttcc

SEQ ID NO: 58488 - DNA, 33 bp, Homo sapien
cccattttttactgactctcccaagatctttcc

SEQ ID NO: 58489 - DNA, 33 bp, Homo sapien
tactaagacaagtaagccctcatccactggtgc

SEQ ID NO: 58490 - DNA, 33 bp, Homo sapien
tactaagacaagtaaggcctcatccactggtgc

SEQ ID NO: 58491 - DNA, 33 bp, Homo sapien
tcactttggagtaaagacggtatcttaacagtg

SEQ ID NO: 58492 - DNA, 33 bp, Homo sapien
tcactttggagtaaaggcggtatcttaacagtg

SEQ ID NO: 58493 - DNA, 33 bp, Homo sapien
ctaaatttccttgcaagatacctaaagggaatt

SEQ ID NO: 58494 - DNA, 33 bp, Homo sapien
ctaaatttccttgcaatatacctaaagggaatt

SEQ ID NO: 58495 - DNA, 33 bp, Homo sapien
gcaggaataccgaagacctgactcacttgctga

SEQ ID NO: 58496 - DNA, 33 bp, Homo sapien
gcaggaataccgaagatctgactcacttgctga

SEQ ID NO: 58497 - DNA, 33 bp, Homo sapien
ctgaggtcacagtcccaagtagctttttcttag

SEQ ID NO: 58498 - DNA, 33 bp, Homo sapien
ctgaggtcacagtcccgagtagctttttcttag

SEQ ID NO: 58499 - DNA, 33 bp, Homo sapien
gcaaaaaagtgtaatgaagcatctcccagcact

SEQ ID NO: 58500 - DNA, 33 bp, Homo sapien
gcaaaaaagtgtaatggagcatctcccagcact

SEQ ID NO: 58501 - DNA, 33 bp, Homo sapien
ttcagtgtcagaaactcaagttgaggtatatgg

SEQ ID NO: 58502 - DNA, 33 bp, Homo sapien
ttcagtgtcagaaactgaagttgaggtatatgg

SEQ ID NO: 58503 - DNA, 33 bp, Homo sapien
aagacaaaggagcaaacgatcacaatctaatag

SEQ ID NO: 58504 - DNA, 33 bp, Homo sapien
aagacaaaggagcaaatgatcacaatctaatag

SEQ ID NO: 58505 - DNA, 33 bp, Homo sapien
tttttctctgcagcaaaaagacgccacccggga

SEQ ID NO: 58506 - DNA, 33 bp, Homo sapien
tttttctctgcagcaacaagacgccacccggga

SEQ ID NO: 58507 - DNA, 33 bp, Homo sapien
ctcactaacaactacaacagaggcatccagaaa

SEQ ID NO: 58508 - DNA, 33 bp, Homo sapien
ctcactaacaactacagcagaggcatccagaaa

SEQ ID NO: 58509 - DNA, 33 bp, Homo sapien
tcaataaatcaaggcaactccaagaactttctc

SEQ ID NO: 58510 - DNA, 33 bp, Homo sapien
tcaataaatcaaggcagctccaagaactttctc

SEQ ID NO: 58511 - DNA, 33 bp, Homo sapien
gtataaaataaagataacggcacctacctccca

SEQ ID NO: 58512 - DNA, 33 bp, Homo sapien
gtataaaataaagataccggcacctacctccca

SEQ ID NO: 58513 - DNA, 33 bp, Homo sapien
aggccattgcctaacccgagagaacaggttata

SEQ ID NO: 58514 - DNA, 33 bp, Homo sapien
aggccattgcctaaccggagagaacaggttata

SEQ ID NO: 58515 - DNA, 33 bp, Homo sapien
tctaataattctaaaccggcatgggctgaacca

SEQ ID NO: 58516 - DNA, 33 bp, Homo sapien
tctaataattctaaactggcatgggctgaacca

SEQ ID NO: 58517 - DNA, 33 bp, Homo sapien
tctgctaagaggattcaaaccagtatctgtcca

SEQ ID NO: 58518 - DNA, 33 bp, Homo sapien
tctgctaagaggattccaaccagtatctgtcca

SEQ ID NO: 58519 - DNA, 33 bp, Homo sapien
tgctgctatgatgcaccgaatgtgtctgtgtgt

SEQ ID NO: 58520 - DNA, 33 bp, Homo sapien
tgctgctatgatgcactgaatgtgtctgtgtgt

SEQ ID NO: 58521 - DNA, 33 bp, Homo sapien
tgtagtaatgagagtaaaaattctgaagccaga

SEQ ID NO: 58522 - DNA, 33 bp, Homo sapien
tgtagtaatgagagtataaattctgaagccaga

SEQ ID NO: 58523 - DNA, 33 bp, Homo sapien
gcttgcttcaggccccacattttgatagcctcg

SEQ ID NO: 58524 - DNA, 33 bp, Homo sapien
gcttgcttcaggccccgcattttgatagcctcg

SEQ ID NO: 58525 - DNA, 33 bp, Homo sapien
tacagggtcggcactaagtaatgattaaaaccc

SEQ ID NO: 58526 - DNA, 33 bp, Homo sapien
tacagggtcggcactaggtaatgattaaaaccc

SEQ ID NO: 58527 - DNA, 33 bp, Homo sapien
ccttccccataaaacaatggctttctcttctta

SEQ ID NO: 58528 - DNA, 33 bp, Homo sapien
ccttccccataaaacagtggctttctcttctta

SEQ ID NO: 58529 - DNA, 33 bp, Homo sapien
tgcaggtccgttcacaagccagggacacaaaat

SEQ ID NO: 58530 - DNA, 33 bp, Homo sapien
tgcaggtccgttcacaggccagggacacaaaat

SEQ ID NO: 58531 - DNA, 33 bp, Homo sapien
gggagccataaggggaactcttgagtggggatt

SEQ ID NO: 58532 - DNA, 33 bp, Homo sapien
gggagccataaggggagctcttgagtggggatt

SEQ ID NO: 58533 - DNA, 33 bp, Homo sapien
gtgtcctcattccttcaacagatgtgctctaag

SEQ ID NO: 58534 - DNA, 33 bp, Homo sapien
gtgtcctcattccttccacagatgtgctctaag

SEQ ID NO: 58535 - DNA, 33 bp, Homo sapien
gttgcattaaacctgacgtggagagtgcgtggg

SEQ ID NO: 58536 - DNA, 33 bp, Homo sapien
gttgcattaaacctgatgtggagagtgcgtggg

SEQ ID NO: 58537 - DNA, 33 bp, Homo sapien
tggaaggaagggcgtaacaccgaagggactgct

SEQ ID NO: 58538 - DNA, 33 bp, Homo sapien
tggaaggaagggcgtatcaccgaagggactgct

SEQ ID NO: 58539 - DNA, 33 bp, Homo sapien
aagctgaaatctcaacaagccatgcaggctcct

SEQ ID NO: 58540 - DNA, 33 bp, Homo sapien
aagctgaaatctcaaccagccatgcaggctcct

SEQ ID NO: 58541 - DNA, 33 bp, Homo sapien
ggtgatgacatcattaccttggtgttccctaca

SEQ ID NO: 58542 - DNA, 33 bp, Homo sapien
ggtgatgacatcattatcttggtgttccctaca

SEQ ID NO: 58543 - DNA, 33 bp, Homo sapien
aaacagctacagggacaccacttaccagctgtt

SEQ ID NO: 58544 - DNA, 33 bp, Homo sapien
aaacagctacagggacgccacttaccagctgtt

SEQ ID NO: 58545 - DNA, 33 bp, Homo sapien
tagtggtgctagacaacggacaagtgaaataca

SEQ ID NO: 58546 - DNA, 33 bp, Homo sapien
tagtggtgctagacaatggacaagtgaaataca

SEQ ID NO: 58547 - DNA, 33 bp, Homo sapien
actcctctgctagcaactgtccagcaaaggctt

SEQ ID NO: 58548 - DNA, 33 bp, Homo sapien
actcctctgctagcaagtgtccagcaaaggctt

SEQ ID NO: 58549 - DNA, 33 bp, Homo sapien
atctcaccatgcccccagagctagaggccaaac

SEQ ID NO: 58550 - DNA, 33 bp, Homo sapien
atctcaccatgcccccggagctagaggccaaac

SEQ ID NO: 58551 - DNA, 33 bp, Homo sapien
accagcgagaaatgaaaagagtggttttaatat

SEQ ID NO: 58552 - DNA, 33 bp, Homo sapien
accagcgagaaatgaagagagtggttttaatat

SEQ ID NO: 58553 - DNA, 33 bp, Homo sapien
cttggtgacagtcatcactcttctgggtatttt

SEQ ID NO: 58554 - DNA, 33 bp, Homo sapien
cttggtgacagtcatcgctcttctgggtatttt

SEQ ID NO: 58555 - DNA, 33 bp, Homo sapien
acctcatgaagctcaacactagagaggaaacag

SEQ ID NO: 58556 - DNA, 33 bp, Homo sapien
acctcatgaagctcaagactagagaggaaacag

SEQ ID NO: 58557 - DNA, 33 bp, Homo sapien
ccagtctttcaggtggaaacatgttaggctctt

SEQ ID NO: 58558 - DNA, 33 bp, Homo sapien
ccagtctttcaggtgggaacatgttaggctctt

SEQ ID NO: 58559 - DNA, 33 bp, Homo sapien
gcttccttgttcagaacagaaaagctccaacag

SEQ ID NO: 58560 - DNA, 33 bp, Homo sapien
gcttccttgttcagaagagaaaagctccaacag

SEQ ID NO: 58561 - DNA, 33 bp, Homo sapien
ccctgaataaatcagacactaactcccggcttt

SEQ ID NO: 58562 - DNA, 33 bp, Homo sapien
ccctgaataaatcagagactaactcccggcttt

SEQ ID NO: 58563 - DNA, 33 bp, Homo sapien
gtgctagattctaggaagcctgtggtctgagag

SEQ ID NO: 58564 - DNA, 33 bp, Homo sapien
gtgctagattctaggaggcctgtggtctgagag

SEQ ID NO: 58565 - DNA, 33 bp, Homo sapien
agaactgaggggaactaaactggctgaaggagg

SEQ ID NO: 58566 - DNA, 33 bp, Homo sapien
agaactgaggggaactgaactggctgaaggagg

SEQ ID NO: 58567 - DNA, 33 bp, Homo sapien
ctgggctgctgggataacttttgcatttggcct

SEQ ID NO: 58568 - DNA, 33 bp, Homo sapien
ctgggctgctgggataccttttgcatttggcct

SEQ ID NO: 58569 - DNA, 33 bp, Homo sapien
gttgggagtttaaatccaatgtgcttgagatgg

SEQ ID NO: 58570 - DNA, 33 bp, Homo sapien
gttgggagtttaaatctaatgtgcttgagatgg

SEQ ID NO: 58571 - DNA, 33 bp, Homo sapien
gcttccctgggcattacaccggggccatgcctg

SEQ ID NO: 58572 - DNA, 33 bp, Homo sapien
gcttccctgggcattataccggggccatgcctg

SEQ ID NO: 58573 - DNA, 33 bp, Homo sapien
tggccatgtttttccacagggcatagttgcaag

SEQ ID NO: 58574 - DNA, 33 bp, Homo sapien
tggccatgtttttccagagggcatagttgcaag

SEQ ID NO: 58575 - DNA, 33 bp, Homo sapien
ggagcctgctgaataactggaagagctcagggc

SEQ ID NO: 58576 - DNA, 33 bp, Homo sapien
ggagcctgctgaataattggaagagctcagggc

SEQ ID NO: 58577 - DNA, 33 bp, Homo sapien
taaggaatcaccaaaagaggcatttctgtgtct

SEQ ID NO: 58578 - DNA, 33 bp, Homo sapien
taaggaatcaccaaaataggcatttctgtgtct

SEQ ID NO: 58579 - DNA, 33 bp, Homo sapien
cttagaccctgctactcaggaagacacagaaat

SEQ ID NO: 58580 - DNA, 33 bp, Homo sapien
cttagaccctgctacttaggaagacacagaaat

SEQ ID NO: 58581 - DNA, 33 bp, Homo sapien
cacgtttgcaacccaccgtactgactgacctct

SEQ ID NO: 58582 - DNA, 33 bp, Homo sapien
cacgtttgcaacccactgtactgactgacctct

SEQ ID NO: 58583 - DNA, 33 bp, Homo sapien
cattaccaccctcaagccaccattaaagctacc

SEQ ID NO: 58584 - DNA, 33 bp, Homo sapien
cattaccaccctcaagtcaccattaaagctacc

SEQ ID NO: 58585 - DNA, 33 bp, Homo sapien
accacatccacattggcagtccacattttactc

SEQ ID NO: 58586 - DNA, 33 bp, Homo sapien
accacatccacattggtagtccacattttactc

SEQ ID NO: 58587 - DNA, 33 bp, Homo sapien
gcgctgatctactgataactggaagcactccgg

SEQ ID NO: 58588 - DNA, 33 bp, Homo sapien
gcgctgatctactgatgactggaagcactccgg

SEQ ID NO: 58589 - DNA, 33 bp, Homo sapien
tttgcttggaattcataaggctttatctccagg

SEQ ID NO: 58590 - DNA, 33 bp, Homo sapien
tttgcttggaattcatgaggctttatctccagg

SEQ ID NO: 58591 - DNA, 33 bp, Homo sapien
aggtgagacaattagacaccattttacataaat

SEQ ID NO: 58592 - DNA, 33 bp, Homo sapien
aggtgagacaattagagaccattttacataaat

SEQ ID NO: 58593 - DNA, 33 bp, Homo sapien
gtctcaaaagccaagacgtcagccggactgtga

SEQ ID NO: 58594 - DNA, 33 bp, Homo sapien
gtctcaaaagccaagatgtcagccggactgtga

SEQ ID NO: 58595 - DNA, 33 bp, Homo sapien
cttctgctactagtcaacctagttttatctcga

SEQ ID NO: 58596 - DNA, 33 bp, Homo sapien
cttctgctactagtcaccctagttttatctcga

SEQ ID NO: 58597 - DNA, 33 bp, Homo sapien
taaatcagtatgagggcaaactggtgagacaga

SEQ ID NO: 58598 - DNA, 33 bp, Homo sapien
taaatcagtatgaggggaaactggtgagacaga

SEQ ID NO: 58599 - DNA, 33 bp, Homo sapien
caagaaccactttcccactgctaagttctcctt

SEQ ID NO: 58600 - DNA, 33 bp, Homo sapien
caagaaccactttcccgctgctaagttctcctt

SEQ ID NO: 58601 - DNA, 33 bp, Homo sapien
aggagtttgtttcctgcaccagcgcagttccct

SEQ ID NO: 58602 - DNA, 33 bp, Homo sapien
aggagtttgtttcctgtaccagcgcagttccct

SEQ ID NO: 58603 - DNA, 33 bp, Homo sapien
aatggaattgaagtgaaggtccagaaatagatt

SEQ ID NO: 58604 - DNA, 33 bp, Homo sapien
aatggaattgaagtgagggtccagaaatagatt

SEQ ID NO: 58605 - DNA, 33 bp, Homo sapien
cacactattaagctaaaggtggggagcaaatag

SEQ ID NO: 58606 - DNA, 33 bp, Homo sapien
cacactattaagctaatggtggggagcaaatag

SEQ ID NO: 58607 - DNA, 33 bp, Homo sapien
gaataaaagatgaataaaagactctagacataa

SEQ ID NO: 58608 - DNA, 33 bp, Homo sapien
gaataaaagatgaatagaagactctagacataa

SEQ ID NO: 58609 - DNA, 33 bp, Homo sapien
gatttttatgactgtaagagtgtttgaacatta

SEQ ID NO: 58610 - DNA, 33 bp, Homo sapien
gatttttatgactgtaggagtgtttgaacatta

SEQ ID NO: 58611 - DNA, 33 bp, Homo sapien
agcagaagaaaaattaagcaagtctgttctgca

SEQ ID NO: 58612 - DNA, 33 bp, Homo sapien
agcagaagaaaaattatgcaagtctgttctgca

SEQ ID NO: 58613 - DNA, 33 bp, Homo sapien
ctaaccatcattaacccggaaagaagccttggg

SEQ ID NO: 58614 - DNA, 33 bp, Homo sapien
ctaaccatcattaacctggaaagaagccttggg

SEQ ID NO: 58615 - DNA, 33 bp, Homo sapien
agcaagacaatgtaaacagtatatcctgttagg

SEQ ID NO: 58616 - DNA, 33 bp, Homo sapien
agcaagacaatgtaaatagtatatcctgttagg

SEQ ID NO: 58617 - DNA, 33 bp, Homo sapien
aaaatcctgaagccaacgagaatttgctaccat

SEQ ID NO: 58618 - DNA, 33 bp, Homo sapien
aaaatcctgaagccaatgagaatttgctaccat

SEQ ID NO: 58619 - DNA, 33 bp, Homo sapien
ctgcatcccttgggccaaagcaagttacatggc

SEQ ID NO: 58620 - DNA, 33 bp, Homo sapien
ctgcatcccttgggccgaagcaagttacatggc

SEQ ID NO: 58621 - DNA, 33 bp, Homo sapien
gggaactgaaataaagcccattagaaatctgag

SEQ ID NO: 58622 - DNA, 33 bp, Homo sapien
gggaactgaaataaagtccattagaaatctgag

SEQ ID NO: 58623 - DNA, 33 bp, Homo sapien
tgtgttattgctgtggaagattcagtctctgaa

SEQ ID NO: 58624 - DNA, 33 bp, Homo sapien
tgtgttattgctgtggcagattcagtctctgaa

SEQ ID NO: 58625 - DNA, 33 bp, Homo sapien
tggccatcggtgcagccctagatttttttaccc

SEQ ID NO: 58626 - DNA, 33 bp, Homo sapien
tggccatcggtgcagctctagatttttttaccc

SEQ ID NO: 58627 - DNA, 33 bp, Homo sapien
ttagcactaagagcaccaagatgttactgatta

SEQ ID NO: 58628 - DNA, 33 bp, Homo sapien
ttagcactaagagcactaagatgttactgatta

SEQ ID NO: 58629 - DNA, 33 bp, Homo sapien
ctcatcctgattcctcaatccctttgggctgtc

SEQ ID NO: 58630 - DNA, 33 bp, Homo sapien
ctcatcctgattcctcgatccctttgggctgtc

SEQ ID NO: 58631 - DNA, 33 bp, Homo sapien
tggggtcattgtgctcaccaactatgactttga

SEQ ID NO: 58632 - DNA, 33 bp, Homo sapien
tggggtcattgtgctcgccaactatgactttga

SEQ ID NO: 58633 - DNA, 33 bp, Homo sapien
cccatgtaatagttgacattatacacacttaac

SEQ ID NO: 58634 - DNA, 33 bp, Homo sapien
cccatgtaatagttgatattatacacacttaac

SEQ ID NO: 58635 - DNA, 33 bp, Homo sapien
acctctaggaatgacaaactctcctcactgctg

SEQ ID NO: 58636 - DNA, 33 bp, Homo sapien
acctctaggaatgacagactctcctcactgctg

SEQ ID NO: 58637 - DNA, 33 bp, Homo sapien
aactctctttccactaacactgcttgctaaatc

SEQ ID NO: 58638 - DNA, 33 bp, Homo sapien
aactctctttccactagcactgcttgctaaatc

SEQ ID NO: 58639 - DNA, 33 bp, Homo sapien
agcttcccaggagcacagcaatggttaatgaga

SEQ ID NO: 58640 - DNA, 33 bp, Homo sapien
agcttcccaggagcacggcaatggttaatgaga

SEQ ID NO: 58641 - DNA, 33 bp, Homo sapien
cttaagcatgatttcacacacttccaggttcca

SEQ ID NO: 58642 - DNA, 33 bp, Homo sapien
cttaagcatgatttcatacacttccaggttcca

SEQ ID NO: 58643 - DNA, 33 bp, Homo sapien
ccaaaattcctgttagacccacaaccactctct

SEQ ID NO: 58644 - DNA, 33 bp, Homo sapien
ccaaaattcctgttagtcccacaaccactctct

SEQ ID NO: 58645 - DNA, 33 bp, Homo sapien
tccctctcttctggtgcacgggaatcataaggg

SEQ ID NO: 58646 - DNA, 33 bp, Homo sapien
tccctctcttctggtgtacgggaatcataaggg

SEQ ID NO: 58647 - DNA, 33 bp, Homo sapien
gaatccatgtttgaaaatagtggaaactaaatt

SEQ ID NO: 58648 - DNA, 33 bp, Homo sapien
gaatccatgtttgaaagtagtggaaactaaatt

SEQ ID NO: 58649 - DNA, 33 bp, Homo sapien
actaggtctcgtgcaaactgcaaagcaagtaaa

SEQ ID NO: 58650 - DNA, 33 bp, Homo sapien
actaggtctcgtgcaacctgcaaagcaagtaaa

SEQ ID NO: 58651 - DNA, 33 bp, Homo sapien
atggggttgtttttcacctattgatttgtttaa

SEQ ID NO: 58652 - DNA, 33 bp, Homo sapien
atggggttgtttttcagctattgatttgtttaa

SEQ ID NO: 58653 - DNA, 33 bp, Homo sapien
agacttcattatgaaaactttgccaaggcctat

SEQ ID NO: 58654 - DNA, 33 bp, Homo sapien
agacttcattatgaaatctttgccaaggcctat

SEQ ID NO: 58655 - DNA, 33 bp, Homo sapien
attgtcaactttgtggaaaatcagatggttgta

SEQ ID NO: 58656 - DNA, 33 bp, Homo sapien
attgtcaactttgtgggaaatcagatggttgta

SEQ ID NO: 58657 - DNA, 33 bp, Homo sapien
ttatttctaaagcagtaaaaaatagatgaatta

SEQ ID NO: 58658 - DNA, 33 bp, Homo sapien
ttatttctaaagcagtcaaaaatagatgaatta

SEQ ID NO: 58659 - DNA, 33 bp, Homo sapien
aagttgctgtcctatagctcacactcaacactc

SEQ ID NO: 58660 - DNA, 33 bp, Homo sapien
aagttgctgtcctatatctcacactcaacactc

SEQ ID NO: 58661 - DNA, 33 bp, Homo sapien
ttggtggccaagtaccgagtgttggctaccatg

SEQ ID NO: 58662 - DNA, 33 bp, Homo sapien
ttggtggccaagtacctagtgttggctaccatg

SEQ ID NO: 58663 - DNA, 33 bp, Homo sapien
caacgctgattgaatacgtacgtctttcagagg

SEQ ID NO: 58664 - DNA, 33 bp, Homo sapien
caacgctgattgaatatgtacgtctttcagagg

SEQ ID NO: 58665 - DNA, 33 bp, Homo sapien
ggaggctccagcagaaataagagagtgaagggg

SEQ ID NO: 58666 - DNA, 33 bp, Homo sapien
ggaggctccagcagaagtaagagagtgaagggg

SEQ ID NO: 58667 - DNA, 33 bp, Homo sapien
aaatcactaagaactgacagcagctgaagacgt

SEQ ID NO: 58668 - DNA, 33 bp, Homo sapien
aaatcactaagaactgccagcagctgaagacgt

SEQ ID NO: 58669 - DNA, 33 bp, Homo sapien
agcttctcctgacttacgttctttagacaggat

SEQ ID NO: 58670 - DNA, 33 bp, Homo sapien
agcttctcctgacttatgttctttagacaggat

SEQ ID NO: 58671 - DNA, 33 bp, Homo sapien
cagaaaccaaaacatacgccagtggaacacaga

SEQ ID NO: 58672 - DNA, 33 bp, Homo sapien
cagaaaccaaaacatatgccagtggaacacaga

SEQ ID NO: 58673 - DNA, 33 bp, Homo sapien
acttgaccctacagaaatgaaagtgcacatcct

SEQ ID NO: 58674 - DNA, 33 bp, Homo sapien
acttgaccctacagaagtgaaagtgcacatcct

SEQ ID NO: 58675 - DNA, 33 bp, Homo sapien
acataaccacagtaacacgaacaagagaagctg

SEQ ID NO: 58676 - DNA, 33 bp, Homo sapien
acataaccacagtaacccgaacaagagaagctg

SEQ ID NO: 58677 - DNA, 33 bp, Homo sapien
gctgcagctgcacagacaagcaagtaaggccca

SEQ ID NO: 58678 - DNA, 33 bp, Homo sapien
gctgcagctgcacagataagcaagtaaggccca

SEQ ID NO: 58679 - DNA, 33 bp, Homo sapien
agatgtgatgacagagaaaacttggaatttcca

SEQ ID NO: 58680 - DNA, 33 bp, Homo sapien
agatgtgatgacagagcaaacttggaatttcca

SEQ ID NO: 58681 - DNA, 33 bp, Homo sapien
gaggttgaaattgagactatggagttcgtgtca

SEQ ID NO: 58682 - DNA, 33 bp, Homo sapien
gaggttgaaattgagattatggagttcgtgtca

SEQ ID NO: 58683 - DNA, 33 bp, Homo sapien
tttgtcttggttcaaacgctgtctgctcaatcc

SEQ ID NO: 58684 - DNA, 33 bp, Homo sapien
tttgtcttggttcaaatgctgtctgctcaatcc

SEQ ID NO: 58685 - DNA, 33 bp, Homo sapien
cagaaggagcaggaaacacgttctccctgagag

SEQ ID NO: 58686 - DNA, 33 bp, Homo sapien
cagaaggagcaggaaatacgttctccctgagag

SEQ ID NO: 58687 - DNA, 33 bp, Homo sapien
cctgggaaaagagagacaactgataaagtgaag

SEQ ID NO: 58688 - DNA, 33 bp, Homo sapien
cctgggaaaagagagataactgataaagtgaag

SEQ ID NO: 58689 - DNA, 33 bp, Homo sapien
gtaaagcctttgagtgcatgaaagtcttcagga

SEQ ID NO: 58690 - DNA, 33 bp, Homo sapien
gtaaagcctttgagtggatgaaagtcttcagga

SEQ ID NO: 58691 - DNA, 33 bp, Homo sapien
ccctgcttaaaatacaatattggctccccactt

SEQ ID NO: 58692 - DNA, 33 bp, Homo sapien
ccctgcttaaaatacattattggctccccactt

SEQ ID NO: 58693 - DNA, 33 bp, Homo sapien
ccctaaaccctcctccaaagttggtgtgaattc

SEQ ID NO: 58694 - DNA, 33 bp, Homo sapien
ccctaaaccctcctccgaagttggtgtgaattc

SEQ ID NO: 58695 - DNA, 33 bp, Homo sapien
gttttgctagatcttgcatgtggttaagcacag

SEQ ID NO: 58696 - DNA, 33 bp, Homo sapien
gttttgctagatcttgtatgtggttaagcacag

SEQ ID NO: 58697 - DNA, 33 bp, Homo sapien
ctaggcagttctcagcaagggaaactacagaaa

SEQ ID NO: 58698 - DNA, 33 bp, Homo sapien
ctaggcagttctcagccagggaaactacagaaa

SEQ ID NO: 58699 - DNA, 33 bp, Homo sapien
caagtaagaccagtcacagtaatgtctcagact

SEQ ID NO: 58700 - DNA, 33 bp, Homo sapien
caagtaagaccagtcatagtaatgtctcagact

SEQ ID NO: 58701 - DNA, 33 bp, Homo sapien
gaacgaatgtctgaggccaggaataggaaaaat

SEQ ID NO: 58702 - DNA, 33 bp, Homo sapien
gaacgaatgtctgaggtcaggaataggaaaaat

SEQ ID NO: 58703 - DNA, 33 bp, Homo sapien
aagcaagactgaaaggaactaagtaacttccct

SEQ ID NO: 58704 - DNA, 33 bp, Homo sapien
aagcaagactgaaagggactaagtaacttccct

SEQ ID NO: 58705 - DNA, 33 bp, Homo sapien
ataattacaaagaaaaatataggtgatgctgtt

SEQ ID NO: 58706 - DNA, 33 bp, Homo sapien
ataattacaaagaaaagtataggtgatgctgtt

SEQ ID NO: 58707 - DNA, 33 bp, Homo sapien
tttcagacaggcttaacacagtacattcaaatg

SEQ ID NO: 58708 - DNA, 33 bp, Homo sapien
tttcagacaggcttaatacagtacattcaaatg

SEQ ID NO: 58709 - DNA, 33 bp, Homo sapien
acctcatactatggtacgtgaggagatagtgtt

SEQ ID NO: 58710 - DNA, 33 bp, Homo sapien
acctcatactatggtatgtgaggagatagtgtt

SEQ ID NO: 58711 - DNA, 33 bp, Homo sapien
gagaagaaactatacaatgacactaagcctatg

SEQ ID NO: 58712 - DNA, 33 bp, Homo sapien
gagaagaaactatacagtgacactaagcctatg

SEQ ID NO: 58713 - DNA, 33 bp, Homo sapien
tcctttttggctgcaccctccaagaattatccc

SEQ ID NO: 58714 - DNA, 33 bp, Homo sapien
tcctttttggctgcactctccaagaattatccc

SEQ ID NO: 58715 - DNA, 33 bp, Homo sapien
ttcttatgggaagaaacgctcaagataacccag

SEQ ID NO: 58716 - DNA, 33 bp, Homo sapien
ttcttatgggaagaaatgctcaagataacccag

SEQ ID NO: 58717 - DNA, 33 bp, Homo sapien
catcacattttaaatcacattagcatttttaaa

SEQ ID NO: 58718 - DNA, 33 bp, Homo sapien
catcacattttaaatcgcattagcatttttaaa

SEQ ID NO: 58719 - DNA, 33 bp, Homo sapien
attgtacctaaggacacatttggatttacaatc

SEQ ID NO: 58720 - DNA, 33 bp, Homo sapien
attgtacctaaggacatatttggatttacaatc

SEQ ID NO: 58721 - DNA, 33 bp, Homo sapien
atatgataaaaagacacgaaggtaagataaaaa

SEQ ID NO: 58722 - DNA, 33 bp, Homo sapien
atatgataaaaagacatgaaggtaagataaaaa

SEQ ID NO: 58723 - DNA, 33 bp, Homo sapien
accatcttgatatcaccgaacatggagtctaga

SEQ ID NO: 58724 - DNA, 33 bp, Homo sapien
accatcttgatatcactgaacatggagtctaga

SEQ ID NO: 58725 - DNA, 33 bp, Homo sapien
ttcttttcaggatacagatagctttaattgatt

SEQ ID NO: 58726 - DNA, 33 bp, Homo sapien
ttcttttcaggatacatatagctttaattgatt

SEQ ID NO: 58727 - DNA, 33 bp, Homo sapien
aagttagaagcttgaaagtcatcatctcaagta

SEQ ID NO: 58728 - DNA, 33 bp, Homo sapien
aagttagaagcttgaaggtcatcatctcaagta

SEQ ID NO: 58729 - DNA, 33 bp, Homo sapien
aatcattcttttggaaatgaatatagtatgagg

SEQ ID NO: 58730 - DNA, 33 bp, Homo sapien
aatcattcttttggaagtgaatatagtatgagg

SEQ ID NO: 58731 - DNA, 33 bp, Homo sapien
aacagaccagtttctccacctcctctcagccat

SEQ ID NO: 58732 - DNA, 33 bp, Homo sapien
aacagaccagtttctctacctcctctcagccat

SEQ ID NO: 58733 - DNA, 33 bp, Homo sapien
cttcatcttgtcctcaaaatgccatagaaaaga

SEQ ID NO: 58734 - DNA, 33 bp, Homo sapien
cttcatcttgtcctcataatgccatagaaaaga

SEQ ID NO: 58735 - DNA, 33 bp, Homo sapien
tgagtgaatgagtgaaaaaacaagccatttaag

SEQ ID NO: 58736 - DNA, 33 bp, Homo sapien
tgagtgaatgagtgaacaaacaagccatttaag

SEQ ID NO: 58737 - DNA, 33 bp, Homo sapien
ttacacatgggacccactcaatgaaaggaggat

SEQ ID NO: 58738 - DNA, 33 bp, Homo sapien
ttacacatgggacccattcaatgaaaggaggat

SEQ ID NO: 58739 - DNA, 33 bp, Homo sapien
tgaaaccacattcccaatgatcttccatctctt

SEQ ID NO: 58740 - DNA, 33 bp, Homo sapien
tgaaaccacattcccagtgatcttccatctctt

SEQ ID NO: 58741 - DNA, 33 bp, Homo sapien
caaagcttgatcaagacaggtggcaacaacagt

SEQ ID NO: 58742 - DNA, 33 bp, Homo sapien
caaagcttgatcaagagaggtggcaacaacagt

SEQ ID NO: 58743 - DNA, 33 bp, Homo sapien
tctgtagtctagtaaaacagaggatcaggagcc

SEQ ID NO: 58744 - DNA, 33 bp, Homo sapien
tctgtagtctagtaaagcagaggatcaggagcc

SEQ ID NO: 58745 - DNA, 33 bp, Homo sapien
ctatttgttgtagttgcacacagttcataacta

SEQ ID NO: 58746 - DNA, 33 bp, Homo sapien
ctatttgttgtagttgtacacagttcataacta

SEQ ID NO: 58747 - DNA, 33 bp, Homo sapien
gaagccatgtcataaactgcaacaagcagcaac

SEQ ID NO: 58748 - DNA, 33 bp, Homo sapien
gaagccatgtcataaattgcaacaagcagcaac

SEQ ID NO: 58749 - DNA, 33 bp, Homo sapien
cgtccatgttcactcaaactttgcccagggtgt

SEQ ID NO: 58750 - DNA, 33 bp, Homo sapien
cgtccatgttcactcatactttgcccagggtgt

SEQ ID NO: 58751 - DNA, 33 bp, Homo sapien
tagcacacaattcaagaaaccacaagtagtcca

SEQ ID NO: 58752 - DNA, 33 bp, Homo sapien
tagcacacaattcaaggaaccacaagtagtcca

SEQ ID NO: 58753 - DNA, 33 bp, Homo sapien
ctagtcaacgagtaacagaaaatagaaggaaat

SEQ ID NO: 58754 - DNA, 33 bp, Homo sapien
ctagtcaacgagtaacggaaaatagaaggaaat

SEQ ID NO: 58755 - DNA, 33 bp, Homo sapien
catttggccttaaaggcatccttgaaatatttt

SEQ ID NO: 58756 - DNA, 33 bp, Homo sapien
catttggccttaaaggtatccttgaaatatttt

SEQ ID NO: 58757 - DNA, 33 bp, Homo sapien
taaggccaaatgaagaaatggaaggttgatcca

SEQ ID NO: 58758 - DNA, 33 bp, Homo sapien
taaggccaaatgaagagatggaaggttgatcca

SEQ ID NO: 58759 - DNA, 33 bp, Homo sapien
agctcttactcaggaaactgaaaccctagtgaa

SEQ ID NO: 58760 - DNA, 33 bp, Homo sapien
agctcttactcaggaacctgaaaccctagtgaa

SEQ ID NO: 58761 - DNA, 33 bp, Homo sapien
tacaacatagtggatcacatcttccaaatgcca

SEQ ID NO: 58762 - DNA, 33 bp, Homo sapien
tacaacatagtggatctcatcttccaaatgcca

SEQ ID NO: 58763 - DNA, 33 bp, Homo sapien
gcttctggaattattcgcttctccaggcctatg

SEQ ID NO: 58764 - DNA, 33 bp, Homo sapien
gcttctggaattattctcttctccaggcctatg

SEQ ID NO: 58765 - DNA, 33 bp, Homo sapien
agaaaatacccagttccccatacttgcaaagaa

SEQ ID NO: 58766 - DNA, 33 bp, Homo sapien
agaaaatacccagttctccatacttgcaaagaa

SEQ ID NO: 58767 - DNA, 33 bp, Homo sapien
tgaatgaacagatctgaagagactgggaaatgt

SEQ ID NO: 58768 - DNA, 33 bp, Homo sapien
tgaatgaacagatctggagagactgggaaatgt

SEQ ID NO: 58769 - DNA, 33 bp, Homo sapien
ccttccctgacctttcacttatcataattgaga

SEQ ID NO: 58770 - DNA, 33 bp, Homo sapien
ccttccctgacctttcgcttatcataattgaga

SEQ ID NO: 58771 - DNA, 33 bp, Homo sapien
taattttaataagttagcaaaggcttggtgcag

SEQ ID NO: 58772 - DNA, 33 bp, Homo sapien
taattttaataagttatcaaaggcttggtgcag

SEQ ID NO: 58773 - DNA, 33 bp, Homo sapien
tgatgcatttcaattaaatgtgtagactcacct

SEQ ID NO: 58774 - DNA, 33 bp, Homo sapien
tgatgcatttcaattatatgtgtagactcacct

SEQ ID NO: 58775 - DNA, 33 bp, Homo sapien
gagaccttggagtcaagctccctttgctatctc

SEQ ID NO: 58776 - DNA, 33 bp, Homo sapien
gagaccttggagtcaatctccctttgctatctc

SEQ ID NO: 58777 - DNA, 33 bp, Homo sapien
catgagaaaaagtatacgaaagtgctttgaaaa

SEQ ID NO: 58778 - DNA, 33 bp, Homo sapien
catgagaaaaagtatatgaaagtgctttgaaaa

SEQ ID NO: 58779 - DNA, 33 bp, Homo sapien
tgtattgtaaatctcaataatagaaatcttcct

SEQ ID NO: 58780 - DNA, 33 bp, Homo sapien
tgtattgtaaatctcagtaatagaaatcttcct

SEQ ID NO: 58781 - DNA, 33 bp, Homo sapien
caatagtcatgaaataatagacatccctgcacc

SEQ ID NO: 58782 - DNA, 33 bp, Homo sapien
caatagtcatgaaatagtagacatccctgcacc

SEQ ID NO: 58783 - DNA, 33 bp, Homo sapien
cttcttatgacatctcgaactgggctatctcat

SEQ ID NO: 58784 - DNA, 33 bp, Homo sapien
cttcttatgacatctctaactgggctatctcat

SEQ ID NO: 58785 - DNA, 33 bp, Homo sapien
tgagtgaatctatctcaaacacttttgtgccta

SEQ ID NO: 58786 - DNA, 33 bp, Homo sapien
tgagtgaatctatctcgaacacttttgtgccta

SEQ ID NO: 58787 - DNA, 33 bp, Homo sapien
aaaaaataaaaggaaccgacaggcaaatccaaa

SEQ ID NO: 58788 - DNA, 33 bp, Homo sapien
aaaaaataaaaggaactgacaggcaaatccaaa

SEQ ID NO: 58789 - DNA, 33 bp, Homo sapien
aatatttcctaaataactagatggatatttgac

SEQ ID NO: 58790 - DNA, 33 bp, Homo sapien
aatatttcctaaataagtagatggatatttgac

SEQ ID NO: 58791 - DNA, 33 bp, Homo sapien
gcatgactgtatcacacgagttttttttactac

SEQ ID NO: 58792 - DNA, 33 bp, Homo sapien
gcatgactgtatcacatgagttttttttactac

SEQ ID NO: 58793 - DNA, 33 bp, Homo sapien
acagcagaaagcagaactctctaacctggcttt

SEQ ID NO: 58794 - DNA, 33 bp, Homo sapien
acagcagaaagcagaattctctaacctggcttt

SEQ ID NO: 58795 - DNA, 33 bp, Homo sapien
tagttcaatagctttcccttctgtgaaacatct

SEQ ID NO: 58796 - DNA, 33 bp, Homo sapien
tagttcaatagctttctcttctgtgaaacatct

SEQ ID NO: 58797 - DNA, 33 bp, Homo sapien
caaaactgggtatctaactggacaggttatctc

SEQ ID NO: 58798 - DNA, 33 bp, Homo sapien
caaaactgggtatctacctggacaggttatctc

SEQ ID NO: 58799 - DNA, 33 bp, Homo sapien
ctggttctctagatggaaagactggtcaaggct

SEQ ID NO: 58800 - DNA, 33 bp, Homo sapien
ctggttctctagatggcaagactggtcaaggct

SEQ ID NO: 58801 - DNA, 33 bp, Homo sapien
agattctgctttctcaaatagctacagtctcag

SEQ ID NO: 58802 - DNA, 33 bp, Homo sapien
agattctgctttctcatatagctacagtctcag

SEQ ID NO: 58803 - DNA, 33 bp, Homo sapien
ctccacttattgggtacggaagtagaaccagaa

SEQ ID NO: 58804 - DNA, 33 bp, Homo sapien
ctccacttattgggtatggaagtagaaccagaa

SEQ ID NO: 58805 - DNA, 33 bp, Homo sapien
tggttgtcaggaatcaatccttctggtcgccat

SEQ ID NO: 58806 - DNA, 33 bp, Homo sapien
tggttgtcaggaatcagtccttctggtcgccat

SEQ ID NO: 58807 - DNA, 33 bp, Homo sapien
tcacaatcagtttctacggaatttgatttaagg

SEQ ID NO: 58808 - DNA, 33 bp, Homo sapien
tcacaatcagtttctagggaatttgatttaagg

SEQ ID NO: 58809 - DNA, 33 bp, Homo sapien
catcccccagctgctacgtaactgttggctgct

SEQ ID NO: 58810 - DNA, 33 bp, Homo sapien
catcccccagctgctatgtaactgttggctgct

SEQ ID NO: 58811 - DNA, 33 bp, Homo sapien
cagccaacataggctaacaaaaaagccaggcca

SEQ ID NO: 58812 - DNA, 33 bp, Homo sapien
cagccaacataggctagcaaaaaagccaggcca

SEQ ID NO: 58813 - DNA, 33 bp, Homo sapien
agctttactggtgaaccatcagagctagccagc

SEQ ID NO: 58814 - DNA, 33 bp, Homo sapien
agctttactggtgaacgatcagagctagccagc

SEQ ID NO: 58815 - DNA, 33 bp, Homo sapien
tttatgttgctgatgccgaattttgatatagcc

SEQ ID NO: 58816 - DNA, 33 bp, Homo sapien
tttatgttgctgatgctgaattttgatatagcc

SEQ ID NO: 58817 - DNA, 33 bp, Homo sapien
agccttatagttctaacgagtgcccaataatgg

SEQ ID NO: 58818 - DNA, 33 bp, Homo sapien
agccttatagttctaatgagtgcccaataatgg

SEQ ID NO: 58819 - DNA, 33 bp, Homo sapien
atttgtgggataaaaacgatattgaatatgaga

SEQ ID NO: 58820 - DNA, 33 bp, Homo sapien
atttgtgggataaaaaggatattgaatatgaga

SEQ ID NO: 58821 - DNA, 33 bp, Homo sapien
ctgtgtagaattctgcacagcagcgaaagtgaa

SEQ ID NO: 58822 - DNA, 33 bp, Homo sapien
ctgtgtagaattctgctcagcagcgaaagtgaa

SEQ ID NO: 58823 - DNA, 33 bp, Homo sapien
gtcactacctgggcaacaggatcattcatatcc

SEQ ID NO: 58824 - DNA, 33 bp, Homo sapien
gtcactacctgggcaagaggatcattcatatcc

SEQ ID NO: 58825 - DNA, 33 bp, Homo sapien
ccaatcgtttcccaatcacaccaagtaaaactc

SEQ ID NO: 58826 - DNA, 33 bp, Homo sapien
ccaatcgtttcccaatgacaccaagtaaaactc

SEQ ID NO: 58827 - DNA, 33 bp, Homo sapien
gaattgaagcaggctacgaccggaggaacatga

SEQ ID NO: 58828 - DNA, 33 bp, Homo sapien
gaattgaagcaggctatgaccggaggaacatga

SEQ ID NO: 58829 - DNA, 33 bp, Homo sapien
ctcactggccctggtcactcttcattttgactc

SEQ ID NO: 58830 - DNA, 33 bp, Homo sapien
ctcactggccctggtcgctcttcattttgactc

SEQ ID NO: 58831 - DNA, 33 bp, Homo sapien
gtagggaaaggcacaccggaaggacaaattctc

SEQ ID NO: 58832 - DNA, 33 bp, Homo sapien
gtagggaaaggcacactggaaggacaaattctc

SEQ ID NO: 58833 - DNA, 33 bp, Homo sapien
gtatcctttataatacagtatggttttgccaaa

SEQ ID NO: 58834 - DNA, 33 bp, Homo sapien
gtatcctttataataccgtatggttttgccaaa

SEQ ID NO: 58835 - DNA, 33 bp, Homo sapien
tctgtgcccatagctgaaagagtaacatcgaca

SEQ ID NO: 58836 - DNA, 33 bp, Homo sapien
tctgtgcccatagctgtaagagtaacatcgaca

SEQ ID NO: 58837 - DNA, 33 bp, Homo sapien
tgtctgtaccttgttcaccctgagcagcttcag

SEQ ID NO: 58838 - DNA, 33 bp, Homo sapien
tgtctgtaccttgttcgccctgagcagcttcag

SEQ ID NO: 58839 - DNA, 33 bp, Homo sapien
acgtttataatgtaaacctggaaaattccatta

SEQ ID NO: 58840 - DNA, 33 bp, Homo sapien
acgtttataatgtaaagctggaaaattccatta

SEQ ID NO: 58841 - DNA, 33 bp, Homo sapien
ttttcttgagacctcaaagtacagaaggcacag

SEQ ID NO: 58842 - DNA, 33 bp, Homo sapien
ttttcttgagacctcagagtacagaaggcacag

SEQ ID NO: 58843 - DNA, 33 bp, Homo sapien
atctgtgtagtggttacgtgacctccctacaag

SEQ ID NO: 58844 - DNA, 33 bp, Homo sapien
atctgtgtagtggttatgtgacctccctacaag

SEQ ID NO: 58845 - DNA, 33 bp, Homo sapien
cactgagccagacaggccatccagtgcccctgt

SEQ ID NO: 58846 - DNA, 33 bp, Homo sapien
cactgagccagacaggtcatccagtgcccctgt

SEQ ID NO: 58847 - DNA, 33 bp, Homo sapien
ggatgagctcttcaagaaccttaattgaggcac

SEQ ID NO: 58848 - DNA, 33 bp, Homo sapien
ggatgagctcttcaagtaccttaattgaggcac

SEQ ID NO: 58849 - DNA, 33 bp, Homo sapien
ctgggtaagatacctaataaaggtcctggcaat

SEQ ID NO: 58850 - DNA, 33 bp, Homo sapien
ctgggtaagatacctagtaaaggtcctggcaat

SEQ ID NO: 58851 - DNA, 33 bp, Homo sapien
aaccagcttagaagccagcccttaatctcatga

SEQ ID NO: 58852 - DNA, 33 bp, Homo sapien
aaccagcttagaagccggcccttaatctcatga

SEQ ID NO: 58853 - DNA, 33 bp, Homo sapien
gagaggcacaagagccaactgagccccagcgat

SEQ ID NO: 58854 - DNA, 33 bp, Homo sapien
gagaggcacaagagccgactgagccccagcgat

SEQ ID NO: 58855 - DNA, 33 bp, Homo sapien
tgtgagtgttgattacaggggctgcttttggtc

SEQ ID NO: 58856 - DNA, 33 bp, Homo sapien
tgtgagtgttgattacgggggctgcttttggtc

SEQ ID NO: 58857 - DNA, 33 bp, Homo sapien
gaaactgtgtgattcaatctgtccatatgcccc

SEQ ID NO: 58858 - DNA, 33 bp, Homo sapien
gaaactgtgtgattcagtctgtccatatgcccc

SEQ ID NO: 58859 - DNA, 33 bp, Homo sapien
ctgtcttgattgtgcacatcatgaatcccagga

SEQ ID NO: 58860 - DNA, 33 bp, Homo sapien
ctgtcttgattgtgcatatcatgaatcccagga

SEQ ID NO: 58861 - DNA, 33 bp, Homo sapien
gcccacaaagggaaaaccctgtcacagaaggaa

SEQ ID NO: 58862 - DNA, 33 bp, Homo sapien
gcccacaaagggaaaatcctgtcacagaaggaa

SEQ ID NO: 58863 - DNA, 33 bp, Homo sapien
ccagttaaggacacaacaatgcagtcatctgaa

SEQ ID NO: 58864 - DNA, 33 bp, Homo sapien
ccagttaaggacacaataatgcagtcatctgaa

SEQ ID NO: 58865 - DNA, 33 bp, Homo sapien
ggtatttgagtcctgaataaagtgttggaaagc

SEQ ID NO: 58866 - DNA, 33 bp, Homo sapien
ggtatttgagtcctgactaaagtgttggaaagc

SEQ ID NO: 58867 - DNA, 33 bp, Homo sapien
cttaaaaaaaatcaaacgcttatagcaatgctg

SEQ ID NO: 58868 - DNA, 33 bp, Homo sapien
cttaaaaaaaatcaaatgcttatagcaatgctg

SEQ ID NO: 58869 - DNA, 33 bp, Homo sapien
gggaaaatgggaagaacagagtgaaattaaagc

SEQ ID NO: 58870 - DNA, 33 bp, Homo sapien
gggaaaatgggaagaatagagtgaaattaaagc

SEQ ID NO: 58871 - DNA, 33 bp, Homo sapien
ctggttgtagaatgtacacagcaatccattctc

SEQ ID NO: 58872 - DNA, 33 bp, Homo sapien
ctggttgtagaatgtagacagcaatccattctc

SEQ ID NO: 58873 - DNA, 33 bp, Homo sapien
atgaatgagtgaacaacaataatagcagtcatg

SEQ ID NO: 58874 - DNA, 33 bp, Homo sapien
atgaatgagtgaacaataataatagcagtcatg

SEQ ID NO: 58875 - DNA, 33 bp, Homo sapien
ctttatttttatgacgcacaccacattgaacaa

SEQ ID NO: 58876 - DNA, 33 bp, Homo sapien
ctttatttttatgacgtacaccacattgaacaa

SEQ ID NO: 58877 - DNA, 33 bp, Homo sapien
ggacttcacagcctccgcaactccaagaaataa

SEQ ID NO: 58878 - DNA, 33 bp, Homo sapien
ggacttcacagcctcctcaactccaagaaataa

SEQ ID NO: 58879 - DNA, 33 bp, Homo sapien
gccaacatggatcttacctggcaaaggtcaaca

SEQ ID NO: 58880 - DNA, 33 bp, Homo sapien
gccaacatggatcttatctggcaaaggtcaaca

SEQ ID NO: 58881 - DNA, 33 bp, Homo sapien
taggagaaagttatcacggtaggccagcaaact

SEQ ID NO: 58882 - DNA, 33 bp, Homo sapien
taggagaaagttatcatggtaggccagcaaact

SEQ ID NO: 58883 - DNA, 33 bp, Homo sapien
tgattacattgggctcactcaaatcaacccaaa

SEQ ID NO: 58884 - DNA, 33 bp, Homo sapien
tgattacattgggctcgctcaaatcaacccaaa

SEQ ID NO: 58885 - DNA, 33 bp, Homo sapien
agcaactggatgccaccaagttggataacttac

SEQ ID NO: 58886 - DNA, 33 bp, Homo sapien
agcaactggatgccactaagttggataacttac

SEQ ID NO: 58887 - DNA, 33 bp, Homo sapien
aaacaacctgaataaaaaatggtcaaagtcttg

SEQ ID NO: 58888 - DNA, 33 bp, Homo sapien
aaacaacctgaataaagaatggtcaaagtcttg

SEQ ID NO: 58889 - DNA, 33 bp, Homo sapien
atagaggaggttcttaaggctgtattaaaataa

SEQ ID NO: 58890 - DNA, 33 bp, Homo sapien
atagaggaggttcttagggctgtattaaaataa

SEQ ID NO: 58891 - DNA, 33 bp, Homo sapien
ttatttgcttgcagtgaatgctgtttttatttg

SEQ ID NO: 58892 - DNA, 33 bp, Homo sapien
ttatttgcttgcagtggatgctgtttttatttg

SEQ ID NO: 58893 - DNA, 33 bp, Homo sapien
aagagataatactcaaattgaaattgaagcacc

SEQ ID NO: 58894 - DNA, 33 bp, Homo sapien
aagagataatactcaagttgaaattgaagcacc

SEQ ID NO: 58895 - DNA, 33 bp, Homo sapien
gtataatttgcagttacgttggaacaataagaa

SEQ ID NO: 58896 - DNA, 33 bp, Homo sapien
gtataatttgcagttatgttggaacaataagaa

SEQ ID NO: 58897 - DNA, 33 bp, Homo sapien
aggcgcccattgaaaaaaaaccataataagcgt

SEQ ID NO: 58898 - DNA, 33 bp, Homo sapien
aggcgcccattgaaaagaaaccataataagcgt

SEQ ID NO: 58899 - DNA, 33 bp, Homo sapien
tctgattgacacttgaatatgtcctaaatttat

SEQ ID NO: 58900 - DNA, 33 bp, Homo sapien
tctgattgacacttgactatgtcctaaatttat

SEQ ID NO: 58901 - DNA, 33 bp, Homo sapien
agaatcccacagataaaaagcatcatttgtgac

SEQ ID NO: 58902 - DNA, 33 bp, Homo sapien
agaatcccacagataacaagcatcatttgtgac

SEQ ID NO: 58903 - DNA, 33 bp, Homo sapien
gatgttctcttttgccactaaaacttcaccaca

SEQ ID NO: 58904 - DNA, 33 bp, Homo sapien
gatgttctcttttgccgctaaaacttcaccaca

SEQ ID NO: 58905 - DNA, 33 bp, Homo sapien
accctgagataacatcaaacagctatgatcttg

SEQ ID NO: 58906 - DNA, 33 bp, Homo sapien
accctgagataacatccaacagctatgatcttg

SEQ ID NO: 58907 - DNA, 33 bp, Homo sapien
tttcctgatattgttaggtgctaggtgcaaaaa

SEQ ID NO: 58908 - DNA, 33 bp, Homo sapien
tttcctgatattgttatgtgctaggtgcaaaaa

SEQ ID NO: 58909 - DNA, 33 bp, Homo sapien
ctgtgaatctgcctaccggaactttgtcctggg

SEQ ID NO: 58910 - DNA, 33 bp, Homo sapien
ctgtgaatctgcctactggaactttgtcctggg

SEQ ID NO: 58911 - DNA, 33 bp, Homo sapien
tggctttgttattgaacgtcacatttcctataa

SEQ ID NO: 58912 - DNA, 33 bp, Homo sapien
tggctttgttattgaatgtcacatttcctataa

SEQ ID NO: 58913 - DNA, 33 bp, Homo sapien
actattccagctaaccagcatctcactttgtac

SEQ ID NO: 58914 - DNA, 33 bp, Homo sapien
actattccagctaaccggcatctcactttgtac

SEQ ID NO: 58915 - DNA, 33 bp, Homo sapien
tcaagcacttaatccacgtgaaataatgatact

SEQ ID NO: 58916 - DNA, 33 bp, Homo sapien
tcaagcacttaatccatgtgaaataatgatact

SEQ ID NO: 58917 - DNA, 33 bp, Homo sapien
agacacttcagacctgcacatttcaagcactta

SEQ ID NO: 58918 - DNA, 33 bp, Homo sapien
agacacttcagacctgtacatttcaagcactta

SEQ ID NO: 58919 - DNA, 33 bp, Homo sapien
agacaaaaggcaatgcacttgggagttctaggg

SEQ ID NO: 58920 - DNA, 33 bp, Homo sapien
agacaaaaggcaatgctcttgggagttctaggg

SEQ ID NO: 58921 - DNA, 33 bp, Homo sapien; identical to SEQ ID NO: 58919

SEQ ID NO: 58922 - DNA, 33 bp, Homo sapien; identical to SEQ ID NO: 58920

SEQ ID NO: 58923 - DNA, 33 bp, Homo sapien
tttccagagagcatcacctataatcgtatggag

SEQ ID NO: 58924 - DNA, 33 bp, Homo sapien
tttccagagagcatcagctataatcgtatggag

SEQ ID NO: 58925 - DNA, 33 bp, Homo sapien; identical to SEQ ID NO: 58923

SEQ ID NO: 58926 - DNA, 33 bp, Homo sapien; identical to SEQ ID NO: 58924

SEQ ID NO: 58927 - DNA, 33 bp, Homo sapien
atacaccatggaacaccgcgctgccagaaagaa

SEQ ID NO: 58928 - DNA, 33 bp, Homo sapien
atacaccatggaacactgcgctgccagaaagaa

SEQ ID NO: 58929 - DNA, 33 bp, Homo sapien
caacaagaaaagctaaatatcctaagtacatac

SEQ ID NO: 58930 - DNA, 33 bp, Homo sapien
caacaagaaaagctaactatcctaagtacatac

SEQ ID NO: 58931 - DNA, 33 bp, Homo sapien
aagacagactcccacaaaataataatggcagac

SEQ ID NO: 58932 - DNA, 33 bp, Homo sapien
aagacagactcccacacaataataatggcagac

SEQ ID NO: 58933 - DNA, 33 bp, Homo sapien
tgggaggcgctgagagaccactcatggctggag

SEQ ID NO: 58934 - DNA, 33 bp, Homo sapien
tgggaggcgctgagagtccactcatggctggag

SEQ ID NO: 58935 - DNA, 33 bp, Homo sapien
caaatatatttgagacaagttgctttccatcac

SEQ ID NO: 58936 - DNA, 33 bp, Homo sapien
caaatatatttgagaccagttgctttccatcac

SEQ ID NO: 58937 - DNA, 33 bp, Homo sapien
aattgctaaagtcctgaatcaatcagcaaatat

SEQ ID NO: 58938 - DNA, 33 bp, Homo sapien
aattgctaaagtcctggatcaatcagcaaatat

SEQ ID NO: 58939 - DNA, 33 bp, Homo sapien
ttcttaaaaggctgaacggctttcttagtccta

SEQ ID NO: 58940 - DNA, 33 bp, Homo sapien
ttcttaaaaggctgaatggctttcttagtccta

SEQ ID NO: 58941 - DNA, 33 bp, Homo sapien
agaataaatgcaaaaccaagactttggaaccct

SEQ ID NO: 58942 - DNA, 33 bp, Homo sapien
agaataaatgcaaaacgaagactttggaaccct

SEQ ID NO: 58943 - DNA, 33 bp, Homo sapien
ttccccttgatagtcactgaactcggatttcac

SEQ ID NO: 58944 - DNA, 33 bp, Homo sapien
ttccccttgatagtcattgaactcggatttcac

SEQ ID NO: 58945 - DNA, 33 bp, Homo sapien
aaaattgaagagaggtcaataactggccaacat

SEQ ID NO: 58946 - DNA, 33 bp, Homo sapien
aaaattgaagagaggttaataactggccaacat

SEQ ID NO: 58947 - DNA, 33 bp, Homo sapien
ggctggattctgaggtaaaaatttgggagtcct

SEQ ID NO: 58948 - DNA, 33 bp, Homo sapien
ggctggattctgaggtgaaaatttgggagtcct

SEQ ID NO: 58949 - DNA, 33 bp, Homo sapien
aaactcagtcatccaaactaagcatacagcata

SEQ ID NO: 58950 - DNA, 33 bp, Homo sapien
aaactcagtcatccaagctaagcatacagcata

SEQ ID NO: 58951 - DNA, 33 bp, Homo sapien
aaattaagcggtaatgccaagaccaagtcatct

SEQ ID NO: 58952 - DNA, 33 bp, Homo sapien
aaattaagcggtaatgtcaagaccaagtcatct

SEQ ID NO: 58953 - DNA, 33 bp, Homo sapien
tctgtatcaatatctagcaacaccaagagggga

SEQ ID NO: 58954 - DNA, 33 bp, Homo sapien
tctgtatcaatatctatcaacaccaagagggga

SEQ ID NO: 58955 - DNA, 33 bp, Homo sapien
cctgatgtctgaatttcaaattatgcaccagag

SEQ ID NO: 58956 - DNA, 33 bp, Homo sapien
cctgatgtctgaattttaaattatgcaccagag

SEQ ID NO: 58957 - DNA, 33 bp, Homo sapien
ccagattgtctcatagcccactggaaaaattcc

SEQ ID NO: 58958 - DNA, 33 bp, Homo sapien
ccagattgtctcataggccactggaaaaattcc

SEQ ID NO: 58959 - DNA, 33 bp, Homo sapien
tttgttatatgggcaaattgcatatcacggcgg

SEQ ID NO: 58960 - DNA, 33 bp, Homo sapien
tttgttatatgggcaagttgcatatcacggcgg

SEQ ID NO: 58961 - DNA, 33 bp, Homo sapien
ttttgtttaatgtctacgaaccttttgaaggct

SEQ ID NO: 58962 - DNA, 33 bp, Homo sapien
ttttgtttaatgtctatgaaccttttgaaggct

SEQ ID NO: 58963 - DNA, 33 bp, Homo sapien
taaaacgtcccaaaaaaatgtctgtatgatgac

SEQ ID NO: 58964 - DNA, 33 bp, Homo sapien
taaaacgtcccaaaaagatgtctgtatgatgac

SEQ ID NO: 58965 - DNA, 33 bp, Homo sapien
ttgaatgtatccctccccatttttctatcctat

SEQ ID NO: 58966 - DNA, 33 bp, Homo sapien
ttgaatgtatccctcctcatttttctatcctat

SEQ ID NO: 58967 - DNA, 33 bp, Homo sapien
caatgaactataagcaatcttcagcttctgggc

SEQ ID NO: 58968 - DNA, 33 bp, Homo sapien
caatgaactataagcactcttcagcttctgggc

SEQ ID NO: 58969 - DNA, 33 bp, Homo sapien
gttctcctttatctggaactcagagatgcaagc

SEQ ID NO: 58970 - DNA, 33 bp, Homo sapien
gttctcctttatctgggactcagagatgcaagc

SEQ ID NO: 58971 - DNA, 33 bp, Homo sapien
taggccactgagttacaaaatgctttttagtta

SEQ ID NO: 58972 - DNA, 33 bp, Homo sapien
taggccactgagttacgaaatgctttttagtta

SEQ ID NO: 58973 - DNA, 33 bp, Homo sapien
gccaggtccctatgagaaagaatgctgcaacac

SEQ ID NO: 58974 - DNA, 33 bp, Homo sapien
gccaggtccctatgaggaagaatgctgcaacac

SEQ ID NO: 58975 - DNA, 33 bp, Homo sapien
agtcattgagaatcatcataataagctccacaa

SEQ ID NO: 58976 - DNA, 33 bp, Homo sapien
agtcattgagaatcattataataagctccacaa

SEQ ID NO: 58977 - DNA, 33 bp, Homo sapien
attttccaggtttctaagtgatgagcacagtct

SEQ ID NO: 58978 - DNA, 33 bp, Homo sapien
attttccaggtttctacgtgatgagcacagtct

SEQ ID NO: 58979 - DNA, 33 bp, Homo sapien
gggtctattggcataactccatgaagcattttg

SEQ ID NO: 58980 - DNA, 33 bp, Homo sapien
gggtctattggcataattccatgaagcattttg

SEQ ID NO: 58981 - DNA, 33 bp, Homo sapien
ttcctttgagcgccacaccaaaactaaaaacgt

SEQ ID NO: 58982 - DNA, 33 bp, Homo sapien
ttcctttgagcgccacgccaaaactaaaaacgt

SEQ ID NO: 58983 - DNA, 33 bp, Homo sapien
actgctctaagattacacgaaagccttttaaat

SEQ ID NO: 58984 - DNA, 33 bp, Homo sapien
actgctctaagattacgcgaaagccttttaaat

SEQ ID NO: 58985 - DNA, 33 bp, Homo sapien
tttctgatatgagtcaatatttgatcctacatc

SEQ ID NO: 58986 - DNA, 33 bp, Homo sapien
tttctgatatgagtcagtatttgatcctacatc

SEQ ID NO: 58987 - DNA, 33 bp, Homo sapien
cataagccgaatgctacaatgaagctgtgggat

SEQ ID NO: 58988 - DNA, 33 bp, Homo sapien
cataagccgaatgctataatgaagctgtgggat

SEQ ID NO: 58989 - DNA, 33 bp, Homo sapien
ttcccaggtaagcaaccgtctgtgtgtgagcca

SEQ ID NO: 58990 - DNA, 33 bp, Homo sapien
ttcccaggtaagcaactgtctgtgtgtgagcca

SEQ ID NO: 58991 - DNA, 33 bp, Homo sapien
ctgcaaagccagaggcaaggggttctgggagga

SEQ ID NO: 58992 - DNA, 33 bp, Homo sapien
ctgcaaagccagaggcgaggggttctgggagga

SEQ ID NO: 58993 - DNA, 33 bp, Homo sapien
agggggctggcaatacagaggacaataaagcaa

SEQ ID NO: 58994 - DNA, 33 bp, Homo sapien
agggggctggcaatacggaggacaataaagcaa

SEQ ID NO: 58995 - DNA, 33 bp, Homo sapien
aagggagtccctcatccaaggggcaacgctgcc

SEQ ID NO: 58996 - DNA, 33 bp, Homo sapien
aagggagtccctcatctaaggggcaacgctgcc

SEQ ID NO: 58997 - DNA, 33 bp, Homo sapien
agaaagtggtcaaagacagtgaagcccggggga

SEQ ID NO: 58998 - DNA, 33 bp, Homo sapien
agaaagtggtcaaagagagtgaagcccggggga

SEQ ID NO: 58999 - DNA, 33 bp, Homo sapien
ctcaaaatagcgcagcactgactctacttaaga

SEQ ID NO: 59000 - DNA, 33 bp, Homo sapien
ctcaaaatagcgcagctctgactctacttaaga

SEQ ID NO: 59001 - DNA, 33 bp, Homo sapien
ggacaatttctaaataaaagaatgagcttcatc

SEQ ID NO: 59002 - DNA, 33 bp, Homo sapien
ggacaatttctaaatacaagaatgagcttcatc

SEQ ID NO: 59003 - DNA, 33 bp, Homo sapien
cccagcaacaaaaacacaggagtgtcatctata

SEQ ID NO: 59004 - DNA, 33 bp, Homo sapien
cccagcaacaaaaacataggagtgtcatctata

SEQ ID NO: 59005 - DNA, 33 bp, Homo sapien
tgaactatataacttacctaccaaagagtacac

SEQ ID NO: 59006 - DNA, 33 bp, Homo sapien
tgaactatataacttatctaccaaagagtacac

SEQ ID NO: 59007 - DNA, 33 bp, Homo sapien
tttctggtcctcacataagaacaggctgcagaa

SEQ ID NO: 59008 - DNA, 33 bp, Homo sapien
tttctggtcctcacatgagaacaggctgcagaa

SEQ ID NO: 59009 - DNA, 33 bp, Homo sapien
cttgactcttcatcaggctcagtgttgagaggc

SEQ ID NO: 59010 - DNA, 33 bp, Homo sapien
cttgactcttcatcagtctcagtgttgagaggc

SEQ ID NO: 59011 - DNA, 33 bp, Homo sapien
gactcttggctaagaacggccccagagaggggg

SEQ ID NO: 59012 - DNA, 33 bp, Homo sapien
gactcttggctaagaatggccccagagaggggg

SEQ ID NO: 59013 - DNA, 33 bp, Homo sapien
tgggttagagcctaagaatggagactggaaacc

SEQ ID NO: 59014 - DNA, 33 bp, Homo sapien
tgggttagagcctaaggatggagactggaaacc

SEQ ID NO: 59015 - DNA, 33 bp, Homo sapien
catgtcagtgatacccaaagcttcttttttttt

SEQ ID NO: 59016 - DNA, 33 bp, Homo sapien
catgtcagtgatacccgaagcttcttttttttt

SEQ ID NO: 59017 - DNA, 33 bp, Homo sapien
cacttgcctcctccgacctgcagtctgaattcc

SEQ ID NO: 59018 - DNA, 33 bp, Homo sapien
cacttgcctcctccgatctgcagtctgaattcc

SEQ ID NO: 59019 - DNA, 33 bp, Homo sapien
ccttcttatacccctcacgtgattgtcaatagg

SEQ ID NO: 59020 - DNA, 33 bp, Homo sapien
ccttcttatacccctcgcgtgattgtcaatagg

SEQ ID NO: 59021 - DNA, 33 bp, Homo sapien
agaaatgcttggggtcgctttgcttgcagaggt

SEQ ID NO: 59022 - DNA, 33 bp, Homo sapien
agaaatgcttggggtctctttgcttgcagaggt

SEQ ID NO: 59023 - DNA, 33 bp, Homo sapien
tctgcctgaataattacggttcagttcatctgt

SEQ ID NO: 59024 - DNA, 33 bp, Homo sapien
tctgcctgaataattatggttcagttcatctgt

SEQ ID NO: 59025 - DNA, 33 bp, Homo sapien
gagattgcaatatacacgtttttcatttccctg

SEQ ID NO: 59026 - DNA, 33 bp, Homo sapien
gagattgcaatatacatgtttttcatttccctg

SEQ ID NO: 59027 - DNA, 33 bp, Homo sapien
aggagcttgaatgacacacctacctctcaagat

SEQ ID NO: 59028 - DNA, 33 bp, Homo sapien
aggagcttgaatgacatacctacctctcaagat

SEQ ID NO: 59029 - DNA, 33 bp, Homo sapien
tccacccattgcaacacaggacccgagagccaa

SEQ ID NO: 59030 - DNA, 33 bp, Homo sapien
tccacccattgcaacataggacccgagagccaa

SEQ ID NO: 59031 - DNA, 33 bp, Homo sapien
tcacatagtaaaaccaatctttcagaaatgtgt

SEQ ID NO: 59032 - DNA, 33 bp, Homo sapien
tcacatagtaaaaccagtctttcagaaatgtgt

SEQ ID NO: 59033 - DNA, 33 bp, Homo sapien
actgcccagctctgacagatgaaaggaaggctt

SEQ ID NO: 59034 - DNA, 33 bp, Homo sapien
actgcccagctctgacggatgaaaggaaggctt

SEQ ID NO: 59035 - DNA, 33 bp, Homo sapien
ttgattggatttattccacacacaaggtattag

SEQ ID NO: 59036 - DNA, 33 bp, Homo sapien
ttgattggatttattctacacacaaggtattag

SEQ ID NO: 59037 - DNA, 33 bp, Homo sapien
atggagtgtcagaatacgtccagttaaatctgg

SEQ ID NO: 59038 - DNA, 33 bp, Homo sapien
atggagtgtcagaatatgtccagttaaatctgg

SEQ ID NO: 59039 - DNA, 33 bp, Homo sapien
tacactgtcactcccacgaggccgaggagtttg

SEQ ID NO: 59040 - DNA, 33 bp, Homo sapien
tacactgtcactcccatgaggccgaggagtttg

SEQ ID NO: 59041 - DNA, 33 bp, Homo sapien
cttcctttagtatgaaagctctggtctctgaag

SEQ ID NO: 59042 - DNA, 33 bp, Homo sapien
cttcctttagtatgaaggctctggtctctgaag

SEQ ID NO: 59043 - DNA, 33 bp, Homo sapien
tggagccctctgttaccagtctttcagaagcac

SEQ ID NO: 59044 - DNA, 33 bp, Homo sapien
tggagccctctgttactagtctttcagaagcac

SEQ ID NO: 59045 - DNA, 33 bp, Homo sapien
ctctgtgtacttgtagcattgagtggcctgggt

SEQ ID NO: 59046 - DNA, 33 bp, Homo sapien
ctctgtgtacttgtagtattgagtggcctgggt

SEQ ID NO: 59047 - DNA, 33 bp, Homo sapien
gagttatgttgatcacactgaaatcatagcatt

SEQ ID NO: 59048 - DNA, 33 bp, Homo sapien
gagttatgttgatcacgctgaaatcatagcatt

SEQ ID NO: 59049 - DNA, 33 bp, Homo sapien
gtgtgggggctactaccaagttcaaaaagagac

SEQ ID NO: 59050 - DNA, 33 bp, Homo sapien
gtgtgggggctactactaagttcaaaaagagac

SEQ ID NO: 59051 - DNA, 33 bp, Homo sapien
atgtggaggtaggcccaggacacagtagagcac

SEQ ID NO: 59052 - DNA, 33 bp, Homo sapien
atgtggaggtaggcccgggacacagtagagcac

SEQ ID NO: 59053 - DNA, 33 bp, Homo sapien
agagggtgtttcccaactgtttgaagagagagt

SEQ ID NO: 59054 - DNA, 33 bp, Homo sapien
agagggtgtttcccaattgtttgaagagagagt

SEQ ID NO: 59055 - DNA, 33 bp, Homo sapien
gcaattatggctaaagaaagtgatacggtttga

SEQ ID NO: 59056 - DNA, 33 bp, Homo sapien
gcaattatggctaaaggaagtgatacggtttga

SEQ ID NO: 59057 - DNA, 33 bp, Homo sapien
gataaaatgtacctgccattctgattcaaggct

SEQ ID NO: 59058 - DNA, 33 bp, Homo sapien
gataaaatgtacctgctattctgattcaaggct

SEQ ID NO: 59059 - DNA, 33 bp, Homo sapien
aataaactcaacagaagagcttaaaaaacgctc

SEQ ID NO: 59060 - DNA, 33 bp, Homo sapien
aataaactcaacagaatagcttaaaaaacgctc

SEQ ID NO: 59061 - DNA, 33 bp, Homo sapien
cattcagaaagtacacagcttttgtcattggca

SEQ ID NO: 59062 - DNA, 33 bp, Homo sapien
cattcagaaagtacacggcttttgtcattggca

SEQ ID NO: 59063 - DNA, 33 bp, Homo sapien
gcaagactggatgccacgccaagctctcccagg

SEQ ID NO: 59064 - DNA, 33 bp, Homo sapien
gcaagactggatgccatgccaagctctcccagg

SEQ ID NO: 59065 - DNA, 33 bp, Homo sapien
tcacacagttaataagcaaacccaggaatgtct

SEQ ID NO: 59066 - DNA, 33 bp, Homo sapien
tcacacagttaataagtaaacccaggaatgtct

SEQ ID NO: 59067 - DNA, 33 bp, Homo sapien
aacatccttatttgaaagttggaactagtaagg

SEQ ID NO: 59068 - DNA, 33 bp, Homo sapien
aacatccttatttgaaggttggaactagtaagg

SEQ ID NO: 59069 - DNA, 33 bp, Homo sapien
caggcagattctaaatgatcttgattccattta

SEQ ID NO: 59070 - DNA, 33 bp, Homo sapien
caggcagattctaaattatcttgattccattta

SEQ ID NO: 59071 - DNA, 33 bp, Homo sapien
catctccctaattgacacttcttgggaagccca

SEQ ID NO: 59072 - DNA, 33 bp, Homo sapien
catctccctaattgacgcttcttgggaagccca

SEQ ID NO: 59073 - DNA, 33 bp, Homo sapien
actaagttctcatcaacggagtgtaagtagatg

SEQ ID NO: 59074 - DNA, 33 bp, Homo sapien
actaagttctcatcaatggagtgtaagtagatg

SEQ ID NO: 59075 - DNA, 33 bp, Homo sapien
ttcaggtcaacttaaaaccctaatgaaataata

SEQ ID NO: 59076 - DNA, 33 bp, Homo sapien
ttcaggtcaacttaaacccctaatgaaataata

SEQ ID NO: 59077 - DNA, 33 bp, Homo sapien
aattttggagttttcactaagcatagatcctag

SEQ ID NO: 59078 - DNA, 33 bp, Homo sapien
aattttggagttttcattaagcatagatcctag

SEQ ID NO: 59079 - DNA, 33 bp, Homo sapien
tagtagttaagaaagaaaattccaggaagtact

SEQ ID NO: 59080 - DNA, 33 bp, Homo sapien
tagtagttaagaaagagaattccaggaagtact

SEQ ID NO: 59081 - DNA, 33 bp, Homo sapien
tcttgtcttaatccccaatacatcagtgtagtt

SEQ ID NO: 59082 - DNA, 33 bp, Homo sapien
tcttgtcttaatccccgatacatcagtgtagtt

SEQ ID NO: 59083 - DNA, 33 bp, Homo sapien
gtgaggagtggtacaagctatgcaaggccaggt

SEQ ID NO: 59084 - DNA, 33 bp, Homo sapien
gtgaggagtggtacaatctatgcaaggccaggt

SEQ ID NO: 59085 - DNA, 33 bp, Homo sapien
agaagggctgaaggagcaggttctaggctgggg

SEQ ID NO: 59086 - DNA, 33 bp, Homo sapien
agaagggctgaaggagtaggttctaggctgggg

SEQ ID NO: 59087 - DNA, 33 bp, Homo sapien
aagctggagaatggaccctggaactctgatgca

SEQ ID NO: 59088 - DNA, 33 bp, Homo sapien
aagctggagaatggactctggaactctgatgca

SEQ ID NO: 59089 - DNA, 33 bp, Homo sapien
atgggcctaatgagaactgattgattcgctcga

SEQ ID NO: 59090 - DNA, 33 bp, Homo sapien
atgggcctaatgagaattgattgattcgctcga

SEQ ID NO: 59091 - DNA, 33 bp, Homo sapien
ctcctttaggtttcatcaggaatcctcaggaat

SEQ ID NO: 59092 - DNA, 33 bp, Homo sapien
ctcctttaggtttcattaggaatcctcaggaat

SEQ ID NO: 59093 - DNA, 33 bp, Homo sapien
acatcaccaagctaccaggaaagcataatataa

SEQ ID NO: 59094 - DNA, 33 bp, Homo sapien
acatcaccaagctaccgggaaagcataatataa

SEQ ID NO: 59095 - DNA, 33 bp, Homo sapien
tcaacattcaacttgcacacgagtaccaagcca

SEQ ID NO: 59096 - DNA, 33 bp, Homo sapien
tcaacattcaacttgcgcacgagtaccaagcca

SEQ ID NO: 59097 - DNA, 33 bp, Homo sapien
ctcacgggagtcatcacaaggatcagagtagat

SEQ ID NO: 59098 - DNA, 33 bp, Homo sapien
ctcacgggagtcatcataaggatcagagtagat

SEQ ID NO: 59099 - DNA, 33 bp, Homo sapien
gtttggtattcatacactgagggcttacagaaa

SEQ ID NO: 59100 - DNA, 33 bp, Homo sapien
gtttggtattcatacattgagggcttacagaaa

SEQ ID NO: 59101 - DNA, 33 bp, Homo sapien
ggccctcactgtcctcagaatttggacctccca

SEQ ID NO: 59102 - DNA, 33 bp, Homo sapien
ggccctcactgtcctcggaatttggacctccca

SEQ ID NO: 59103 - DNA, 33 bp, Homo sapien
gagattaagttgctcaagaatacattagaagag

SEQ ID NO: 59104 - DNA, 33 bp, Homo sapien
gagattaagttgctcaggaatacattagaagag

SEQ ID NO: 59105 - DNA, 33 bp, Homo sapien
ttgacagcagctgaaccatcgctaatactgtct

SEQ ID NO: 59106 - DNA, 33 bp, Homo sapien
ttgacagcagctgaactatcgctaatactgtct

SEQ ID NO: 59107 - DNA, 33 bp, Homo sapien
gaggtctactatctgactcacggagcggacttc

SEQ ID NO: 59108 - DNA, 33 bp, Homo sapien
gaggtctactatctgattcacggagcggacttc

SEQ ID NO: 59109 - DNA, 33 bp, Homo sapien
gtctggcatgtttgtcaagcagttatcaacctg

SEQ ID NO: 59110 - DNA, 33 bp, Homo sapien
gtctggcatgtttgtcgagcagttatcaacctg

SEQ ID NO: 59111 - DNA, 33 bp, Homo sapien
tctgcaagtctgtgtaacagaaggaaagaaagt

SEQ ID NO: 59112 - DNA, 33 bp, Homo sapien
tctgcaagtctgtgtatcagaaggaaagaaagt

SEQ ID NO: 59113 - DNA, 33 bp, Homo sapien
ggtcttagataattcaacttagcaattcaacca

SEQ ID NO: 59114 - DNA, 33 bp, Homo sapien
ggtcttagataattcagcttagcaattcaacca

SEQ ID NO: 59115 - DNA, 33 bp, Homo sapien
cttcattccttttatcacttcaagcattagcta

SEQ ID NO: 59116 - DNA, 33 bp, Homo sapien
cttcattccttttatcgcttcaagcattagcta

SEQ ID NO: 59117 - DNA, 33 bp, Homo sapien
caggccagcttatacccaatgattggagcatgc

SEQ ID NO: 59118 - DNA, 33 bp, Homo sapien
caggccagcttatacctaatgattggagcatgc

SEQ ID NO: 59119 - DNA, 33 bp, Homo sapien
gccatcagaggtagtgcaagcttgatgtggttc

SEQ ID NO: 59120 - DNA, 33 bp, Homo sapien
gccatcagaggtagtggaagcttgatgtggttc

SEQ ID NO: 59121 - DNA, 33 bp, Homo sapien
tcagtcatatcacacaacttcagtgattctgct

SEQ ID NO: 59122 - DNA, 33 bp, Homo sapien
tcagtcatatcacacaccttcagtgattctgct

SEQ ID NO: 59123 - DNA, 33 bp, Homo sapien
tgattctgctcaggcaataagccactgggatac

SEQ ID NO: 59124 - DNA, 33 bp, Homo sapien
tgattctgctcaggcagtaagccactgggatac

SEQ ID NO: 59125 - DNA, 33 bp, Homo sapien
agcaagctctgggggcacatttaggttggggca

SEQ ID NO: 59126 - DNA, 33 bp, Homo sapien
agcaagctctgggggcgcatttaggttggggca

SEQ ID NO: 59127 - DNA, 33 bp, Homo sapien
ttatcaattctcccagaaggaattacccacaac

SEQ ID NO: 59128 - DNA, 33 bp, Homo sapien
ttatcaattctcccagtaggaattacccacaac

SEQ ID NO: 59129 - DNA, 33 bp, Homo sapien
tctggagaaagaactcaataacaaattcagaaa

SEQ ID NO: 59130 - DNA, 33 bp, Homo sapien
tctggagaaagaactcgataacaaattcagaaa

SEQ ID NO: 59131 - DNA, 33 bp, Homo sapien
gtcaaaaacaagaataacatttcatgccacatg

SEQ ID NO: 59132 - DNA, 33 bp, Homo sapien
gtcaaaaacaagaatagcatttcatgccacatg

SEQ ID NO: 59133 - DNA, 33 bp, Homo sapien
gtaaaaggccggatagcagatattctaggcttt

SEQ ID NO: 59134 - DNA, 33 bp, Homo sapien
gtaaaaggccggatagtagatattctaggcttt

SEQ ID NO: 59135 - DNA, 33 bp, Homo sapien
aagcagaggtgttttccaagacagacaattggt

SEQ ID NO: 59136 - DNA, 33 bp, Homo sapien
aagcagaggtgttttctaagacagacaattggt

SEQ ID NO: 59137 - DNA, 33 bp, Homo sapien
aacagttaaaaagtaaataatacaggccgggca

SEQ ID NO: 59138 - DNA, 33 bp, Homo sapien
aacagttaaaaagtaagtaatacaggccgggca

SEQ ID NO: 59139 - DNA, 33 bp, Homo sapien
acaactatcggatatgcagcttcttaggtccct

SEQ ID NO: 59140 - DNA, 33 bp, Homo sapien
acaactatcggatatgtagcttcttaggtccct

SEQ ID NO: 59141 - DNA, 33 bp, Homo sapien
tacagccagtatggcacaagagctgagttagaa

SEQ ID NO: 59142 - DNA, 33 bp, Homo sapien
tacagccagtatggcataagagctgagttagaa

SEQ ID NO: 59143 - DNA, 33 bp, Homo sapien
tattgtaagttcgctacccagaacctccactct

SEQ ID NO: 59144 - DNA, 33 bp, Homo sapien
tattgtaagttcgctatccagaacctccactct

SEQ ID NO: 59145 - DNA, 33 bp, Homo sapien
catcagcaaaggggtcaaaagagtggaggttct

SEQ ID NO: 59146 - DNA, 33 bp, Homo sapien
catcagcaaaggggtcgaaagagtggaggttct

SEQ ID NO: 59147 - DNA, 33 bp, Homo sapien
actccatgtccttttccccttcaccctgggctg

SEQ ID NO: 59148 - DNA, 33 bp, Homo sapien
actccatgtccttttctccttcaccctgggctg

SEQ ID NO: 59149 - DNA, 33 bp, Homo sapien
gaggctaagagaaatcaagagaggtatgggtaa

SEQ ID NO: 59150 - DNA, 33 bp, Homo sapien
gaggctaagagaaatcgagagaggtatgggtaa

SEQ ID NO: 59151 - DNA, 33 bp, Homo sapien
gatatcatctatcagacaaactagcaggaaaca

SEQ ID NO: 59152 - DNA, 33 bp, Homo sapien
gatatcatctatcagataaactagcaggaaaca

SEQ ID NO: 59153 - DNA, 33 bp, Homo sapien
ttcgtatttttaaccacgtgattgtatgcgtat

SEQ ID NO: 59154 - DNA, 33 bp, Homo sapien
ttcgtatttttaaccatgtgattgtatgcgtat

SEQ ID NO: 59155 - DNA, 33 bp, Homo sapien
atcttgataagtgatgcagtcaaggaaaaaagg

SEQ ID NO: 59156 - DNA, 33 bp, Homo sapien
atcttgataagtgatggagtcaaggaaaaaagg

SEQ ID NO: 59157 - DNA, 33 bp, Homo sapien
tctggttgctgttgggaaattaattaaagatta

SEQ ID NO: 59158 - DNA, 33 bp, Homo sapien
tctggttgctgttggggaattaattaaagatta

SEQ ID NO: 59159 - DNA, 33 bp, Homo sapien
ttttatgacaccacacaattgaatggatttcta

SEQ ID NO: 59160 - DNA, 33 bp, Homo sapien
ttttatgacaccacaccattgaatggatttcta

SEQ ID NO: 59161 - DNA, 33 bp, Homo sapien
atggggagtggtaagacgtagaaggtataattg

SEQ ID NO: 59162 - DNA, 33 bp, Homo sapien
atggggagtggtaagatgtagaaggtataattg

SEQ ID NO: 59163 - DNA, 33 bp, Homo sapien
tctctgtaaaattagagaaacagcacgttgatt

SEQ ID NO: 59164 - DNA, 33 bp, Homo sapien
tctctgtaaaattagataaacagcacgttgatt

SEQ ID NO: 59165 - DNA, 33 bp, Homo sapien
cagattaacaagaagccgcacttgataaagcaa

SEQ ID NO: 59166 - DNA, 33 bp, Homo sapien
cagattaacaagaagctgcacttgataaagcaa

SEQ ID NO: 59167 - DNA, 33 bp, Homo sapien
atgatgaaattagggcacagatgagtccaagaa

SEQ ID NO: 59168 - DNA, 33 bp, Homo sapien
atgatgaaattagggcgcagatgagtccaagaa

SEQ ID NO: 59169 - DNA, 33 bp, Homo sapien
acaggaaacaggcagccaagtgtttgtgctttt

SEQ ID NO: 59170 - DNA, 33 bp, Homo sapien
acaggaaacaggcagctaagtgtttgtgctttt

SEQ ID NO: 59171 - DNA, 33 bp, Homo sapien
tttaatgtaagtgcccaagagttccaaaacaag

SEQ ID NO: 59172 - DNA, 33 bp, Homo sapien
tttaatgtaagtgcccgagagttccaaaacaag

SEQ ID NO: 59173 - DNA, 33 bp, Homo sapien
atgggtagccagagacaggtctgtatagaataa

SEQ ID NO: 59174 - DNA, 33 bp, Homo sapien
atgggtagccagagacgggtctgtatagaataa

SEQ ID NO: 59175 - DNA, 33 bp, Homo sapien
aagatgagcagagaataaacgtgcagctccacc

SEQ ID NO: 59176 - DNA, 33 bp, Homo sapien
aagatgagcagagaatgaacgtgcagctccacc

SEQ ID NO: 59177 - DNA, 33 bp, Homo sapien
gactgaagcgtgaagaacaatactcaggacctc

SEQ ID NO: 59178 - DNA, 33 bp, Homo sapien
gactgaagcgtgaagagcaatactcaggacctc

SEQ ID NO: 59179 - DNA, 33 bp, Homo sapien
taagtagatccaacaaactgcttatattttaat

SEQ ID NO: 59180 - DNA, 33 bp, Homo sapien
taagtagatccaacaagctgcttatattttaat

SEQ ID NO: 59181 - DNA, 33 bp, Homo sapien
gcttaggggagaggaagttcatcatagaacata

SEQ ID NO: 59182 - DNA, 33 bp, Homo sapien
gcttaggggagaggaatttcatcatagaacata

SEQ ID NO: 59183 - DNA, 33 bp, Homo sapien
ctcttaattagcaaagactttatttccgttaga

SEQ ID NO: 59184 - DNA, 33 bp, Homo sapien
ctcttaattagcaaagcctttatttccgttaga

SEQ ID NO: 59185 - DNA, 33 bp, Homo sapien
tggtgtcccgtcccccaccttggccaggcatca

SEQ ID NO: 59186 - DNA, 33 bp, Homo sapien
tggtgtcccgtccccctccttggccaggcatca

SEQ ID NO: 59187 - DNA, 33 bp, Homo sapien
acagctccagaatctaaacacagagtactggga

SEQ ID NO: 59188 - DNA, 33 bp, Homo sapien
acagctccagaatctagacacagagtactggga

SEQ ID NO: 59189 - DNA, 33 bp, Homo sapien
aggcatttagtggtacagactctaggactactc

SEQ ID NO: 59190 - DNA, 33 bp, Homo sapien
aggcatttagtggtacggactctaggactactc

SEQ ID NO: 59191 - DNA, 33 bp, Homo sapien
agcactggcaggaaagaccagggaatgttctgg

SEQ ID NO: 59192 - DNA, 33 bp, Homo sapien
agcactggcaggaaagtccagggaatgttctgg

SEQ ID NO: 59193 - DNA, 33 bp, Homo sapien
tagtctgaagaatttcaaaatgatggcatcctc

SEQ ID NO: 59194 - DNA, 33 bp, Homo sapien
tagtctgaagaatttcgaaatgatggcatcctc

SEQ ID NO: 59195 - DNA, 33 bp, Homo sapien
agttcaggcagaccaagtccagaccccagcccc

SEQ ID NO: 59196 - DNA, 33 bp, Homo sapien
agttcaggcagaccaattccagaccccagcccc

SEQ ID NO: 59197 - DNA, 33 bp, Homo sapien
gtctaccaaaagggtgacaaataagcctttgtg

SEQ ID NO: 59198 - DNA, 33 bp, Homo sapien
gtctaccaaaagggtggcaaataagcctttgtg

SEQ ID NO: 59199 - DNA, 33 bp, Homo sapien
acatcaggcaagagaggacatagttatttttcc

SEQ ID NO: 59200 - DNA, 33 bp, Homo sapien
acatcaggcaagagagtacatagttatttttcc

SEQ ID NO: 59201 - DNA, 33 bp, Homo sapien
ttgctttttcctttggaagcctcatctgcttgt

SEQ ID NO: 59202 - DNA, 33 bp, Homo sapien
ttgctttttcctttgggagcctcatctgcttgt

SEQ ID NO: 59203 - DNA, 33 bp, Homo sapien
aatcctagcttctagaatatgagacaataactt

SEQ ID NO: 59204 - DNA, 33 bp, Homo sapien
aatcctagcttctagattatgagacaataactt

SEQ ID NO: 59205 - DNA, 33 bp, Homo sapien
accgtgtatacatggggagaatcacagagcaac

SEQ ID NO: 59206 - DNA, 33 bp, Homo sapien
accgtgtatacatgggtagaatcacagagcaac

SEQ ID NO: 59207 - DNA, 33 bp, Homo sapien
aattggtatgcccttcgattaatctgcatcttg

SEQ ID NO: 59208 - DNA, 33 bp, Homo sapien
aattggtatgcccttctattaatctgcatcttg

SEQ ID NO: 59209 - DNA, 33 bp, Homo sapien
gctatctttccatgaccgaaatactcatgcctg

SEQ ID NO: 59210 - DNA, 33 bp, Homo sapien
gctatctttccatgactgaaatactcatgcctg

SEQ ID NO: 59211 - DNA, 33 bp, Homo sapien
acatgcataggaaaaacacagcaggtaaaggaa

SEQ ID NO: 59212 - DNA, 33 bp, Homo sapien
acatgcataggaaaaatacagcaggtaaaggaa

SEQ ID NO: 59213 - DNA, 33 bp, Homo sapien
agtgatattgtcaggactagagatcagaactgg

SEQ ID NO: 59214 - DNA, 33 bp, Homo sapien
agtgatattgtcaggagtagagatcagaactgg

SEQ ID NO: 59215 - DNA, 33 bp, Homo sapien
gatgaagagactatgacatgagagttcaaacct

SEQ ID NO: 59216 - DNA, 33 bp, Homo sapien
gatgaagagactatgatatgagagttcaaacct

SEQ ID NO: 59217 - DNA, 33 bp, Homo sapien
agctgtgagtcaaatacgcttttgttctttata

SEQ ID NO: 59218 - DNA, 33 bp, Homo sapien
agctgtgagtcaaatatgcttttgttctttata

SEQ ID NO: 59219 - DNA, 33 bp, Homo sapien
ggaagacagatatatcaatggataaaaacagtc

SEQ ID NO: 59220 - DNA, 33 bp, Homo sapien
ggaagacagatatatcgatggataaaaacagtc

SEQ ID NO: 59221 - DNA, 33 bp, Homo sapien
agaaaacatttgaagcaatgggaatatgggaac

SEQ ID NO: 59222 - DNA, 33 bp, Homo sapien
agaaaacatttgaagcgatgggaatatgggaac

SEQ ID NO: 59223 - DNA, 33 bp, Homo sapien
gaatttctgcaggacaaggactgaggattattt

SEQ ID NO: 59224 - DNA, 33 bp, Homo sapien
gaatttctgcaggacacggactgaggattattt

SEQ ID NO: 59225 - DNA, 33 bp, Homo sapien
cccttgaaataaaagaaccatggaacctccctt

SEQ ID NO: 59226 - DNA, 33 bp, Homo sapien
cccttgaaataaaagagccatggaacctccctt

SEQ ID NO: 59227 - DNA, 33 bp, Homo sapien
gcaagagcaaaagcaaagagacaaattaagaga

SEQ ID NO: 59228 - DNA, 33 bp, Homo sapien
gcaagagcaaaagcaaggagacaaattaagaga

SEQ ID NO: 59229 - DNA, 33 bp, Homo sapien
tctatgactttgactaccctaagtacctcatat

SEQ ID NO: 59230 - DNA, 33 bp, Homo sapien
tctatgactttgactatcctaagtacctcatat

SEQ ID NO: 59231 - DNA, 33 bp, Homo sapien
ctcactcattccattccagtcacattggcctcc

SEQ ID NO: 59232 - DNA, 33 bp, Homo sapien
ctcactcattccattctagtcacattggcctcc

SEQ ID NO: 59233 - DNA, 33 bp, Homo sapien
ccaagaggaagatgtgccaattggtagatcctg

SEQ ID NO: 59234 - DNA, 33 bp, Homo sapien
ccaagaggaagatgtggcaattggtagatcctg

SEQ ID NO: 59235 - DNA, 33 bp, Homo sapien
gtgactcctccgtcaaacgtacacacaccaatg

SEQ ID NO: 59236 - DNA, 33 bp, Homo sapien
gtgactcctccgtcaagcgtacacacaccaatg

SEQ ID NO: 59237 - DNA, 33 bp, Homo sapien
gattattttgtaggcaatgaattgttgatagta

SEQ ID NO: 59238 - DNA, 33 bp, Homo sapien
gattattttgtaggcattgaattgttgatagta

SEQ ID NO: 59239 - DNA, 33 bp, Homo sapien
tttagtttccaggcaaacgaggagtgaaggcta

SEQ ID NO: 59240 - DNA, 33 bp, Homo sapien
tttagtttccaggcaagcgaggagtgaaggcta

SEQ ID NO: 59241 - DNA, 33 bp, Homo sapien
catgatgacagcagccaatattgtaatgcaggt

SEQ ID NO: 59242 - DNA, 33 bp, Homo sapien
catgatgacagcagcccatattgtaatgcaggt

SEQ ID NO: 59243 - DNA, 33 bp, Homo sapien
atagtaggaaatgatgacacagaaaatggcaaa

SEQ ID NO: 59244 - DNA, 33 bp, Homo sapien
atagtaggaaatgatgtcacagaaaatggcaaa

SEQ ID NO: 59245 - DNA, 33 bp, Homo sapien
ggaatctataattccaaatttgcttgcatctaa

SEQ ID NO: 59246 - DNA, 33 bp, Homo sapien
ggaatctataattccatatttgcttgcatctaa

SEQ ID NO: 59247 - DNA, 33 bp, Homo sapien
aaaaagatgggataaaaggtaatgactatcaaa

SEQ ID NO: 59248 - DNA, 33 bp, Homo sapien
aaaaagatgggataaatggtaatgactatcaaa

SEQ ID NO: 59249 - DNA, 33 bp, Homo sapien
atttacttaagcatgaataccacagaagtctta

SEQ ID NO: 59250 - DNA, 33 bp, Homo sapien
atttacttaagcatgagtaccacagaagtctta

SEQ ID NO: 59251 - DNA, 33 bp, Homo sapien
gggtttttttgctagaatccaggctgccgcagg

SEQ ID NO: 59252 - DNA, 33 bp, Homo sapien
gggtttttttgctagactccaggctgccgcagg

SEQ ID NO: 59253 - DNA, 33 bp, Homo sapien
ttctggttgtttttgaactcctctcttcctttc

SEQ ID NO: 59254 - DNA, 33 bp, Homo sapien
ttctggttgtttttgagctcctctcttcctttc

SEQ ID NO: 59255 - DNA, 33 bp, Homo sapien
ctgtggttcactcttaccttcttgtgagaaacc

SEQ ID NO: 59256 - DNA, 33 bp, Homo sapien
ctgtggttcactcttagcttcttgtgagaaacc

SEQ ID NO: 59257 - DNA, 33 bp, Homo sapien
gtatggccagagtgtccgaagggcttttgctca

SEQ ID NO: 59258 - DNA, 33 bp, Homo sapien
gtatggccagagtgtctgaagggcttttgctca

SEQ ID NO: 59259 - DNA, 33 bp, Homo sapien
cactgatggttccagaaagaagccccaacaaac

SEQ ID NO: 59260 - DNA, 33 bp, Homo sapien
cactgatggttccagagagaagccccaacaaac

SEQ ID NO: 59261 - DNA, 33 bp, Homo sapien
cagatcatcctctccacgtaccctcagcataga

SEQ ID NO: 59262 - DNA, 33 bp, Homo sapien
cagatcatcctctccatgtaccctcagcataga

SEQ ID NO: 59263 - DNA, 33 bp, Homo sapien
tcttctcatttccaggcatgacgtatgatgttt

SEQ ID NO: 59264 - DNA, 33 bp, Homo sapien
tcttctcatttccaggtatgacgtatgatgttt

SEQ ID NO: 59265 - DNA, 33 bp, Homo sapien
ggcatgaaactagagaagatgttaggccagcaa

SEQ ID NO: 59266 - DNA, 33 bp, Homo sapien
ggcatgaaactagagaggatgttaggccagcaa

SEQ ID NO: 59267 - DNA, 33 bp, Homo sapien
gatggggacaagggcccgacaaaagcagtgcca

SEQ ID NO: 59268 - DNA, 33 bp, Homo sapien
gatggggacaagggcctgacaaaagcagtgcca

SEQ ID NO: 59269 - DNA, 33 bp, Homo sapien
aagctttcacgctgagaaaatgagcaggtcaga

SEQ ID NO: 59270 - DNA, 33 bp, Homo sapien
aagctttcacgctgaggaaatgagcaggtcaga

SEQ ID NO: 59271 - DNA, 33 bp, Homo sapien
tggtcctttttgtacacctgcttttatgacaga

SEQ ID NO: 59272 - DNA, 33 bp, Homo sapien
tggtcctttttgtacatctgcttttatgacaga

SEQ ID NO: 59273 - DNA, 33 bp, Homo sapien
aaggaaaatgtgtaaacaatcttggatacttta

SEQ ID NO: 59274 - DNA, 33 bp, Homo sapien
aaggaaaatgtgtaaataatcttggatacttta

SEQ ID NO: 59275 - DNA, 33 bp, Homo sapien
taattttatctaagtaaaaatgcagcatcagaa

SEQ ID NO: 59276 - DNA, 33 bp, Homo sapien
taattttatctaagtacaaatgcagcatcagaa

SEQ ID NO: 59277 - DNA, 33 bp, Homo sapien
tgggtaaagaacagcaaaaccttcctctggagg

SEQ ID NO: 59278 - DNA, 33 bp, Homo sapien
tgggtaaagaacagcacaaccttcctctggagg

SEQ ID NO: 59279 - DNA, 33 bp, Homo sapien
tccttattcattctgcaatagaaatcaagcgag

SEQ ID NO: 59280 - DNA, 33 bp, Homo sapien
tccttattcattctgcgatagaaatcaagcgag

SEQ ID NO: 59281 - DNA, 33 bp, Homo sapien
aagccacaccactacacgaagctgtgatggcat

SEQ ID NO: 59282 - DNA, 33 bp, Homo sapien
aagccacaccactacatgaagctgtgatggcat

SEQ ID NO: 59283 - DNA, 33 bp, Homo sapien
atgactctttactaaacgaatgtctatcaaact

SEQ ID NO: 59284 - DNA, 33 bp, Homo sapien
atgactctttactaaatgaatgtctatcaaact

SEQ ID NO: 59285 - DNA, 33 bp, Homo sapien
tgggcctagcacataactggtattgtatagatg

SEQ ID NO: 59286 - DNA, 33 bp, Homo sapien
tgggcctagcacataattggtattgtatagatg

SEQ ID NO: 59287 - DNA, 33 bp, Homo sapien
aaggctgttcttgcctaaaaggtctaagcagag

SEQ ID NO: 59288 - DNA, 33 bp, Homo sapien
aaggctgttcttgcctgaaaggtctaagcagag

SEQ ID NO: 59289 - DNA, 33 bp, Homo sapien
aacatccactgttaccactatgctaccaccctg

SEQ ID NO: 59290 - DNA, 33 bp, Homo sapien
aacatccactgttaccgctatgctaccaccctg

SEQ ID NO: 59291 - DNA, 33 bp, Homo sapien
tgcctactgtatacaaatcactgtgctaagtac

SEQ ID NO: 59292 - DNA, 33 bp, Homo sapien
tgcctactgtatacaagtcactgtgctaagtac

SEQ ID NO: 59293 - DNA, 33 bp, Homo sapien
tgtgtgtcaggattaaagctggactttatttta

SEQ ID NO: 59294 - DNA, 33 bp, Homo sapien
tgtgtgtcaggattaacgctggactttatttta

SEQ ID NO: 59295 - DNA, 33 bp, Homo sapien
aaatggctcatgccgaatcccagccaggtgggc

SEQ ID NO: 59296 - DNA, 33 bp, Homo sapien
aaatggctcatgccgagtcccagccaggtgggc

SEQ ID NO: 59297 - DNA, 33 bp, Homo sapien
ttcccctgacccacacagcacttgaagacagga

SEQ ID NO: 59298 - DNA, 33 bp, Homo sapien
ttcccctgacccacacggcacttgaagacagga

SEQ ID NO: 59299 - DNA, 33 bp, Homo sapien
agctagtactttctccggctctgataaagaaag

SEQ ID NO: 59300 - DNA, 33 bp, Homo sapien
agctagtactttctcctgctctgataaagaaag

SEQ ID NO: 59301 - DNA, 33 bp, Homo sapien
gatatgttgagttttcaaagaaatgagggtggt

SEQ ID NO: 59302 - DNA, 33 bp, Homo sapien
gatatgttgagttttccaagaaatgagggtggt

SEQ ID NO: 59303 - DNA, 33 bp, Homo sapien
cactgcataattcagccctcctgggacccgttt

SEQ ID NO: 59304 - DNA, 33 bp, Homo sapien
cactgcataattcagctctcctgggacccgttt

SEQ ID NO: 59305 - DNA, 33 bp, Homo sapien
ctaccatttttagggccctccatgatccaacgc

SEQ ID NO: 59306 - DNA, 33 bp, Homo sapien
ctaccatttttagggcgctccatgatccaacgc

SEQ ID NO: 59307 - DNA, 33 bp, Homo sapien
gctctatccagaaagagggagacaactcaaacc

SEQ ID NO: 59308 - DNA, 33 bp, Homo sapien
gctctatccagaaagatggagacaactcaaacc

SEQ ID NO: 59309 - DNA, 33 bp, Homo sapien
gagtctgccttgacacaggaggaaccaagtggc

SEQ ID NO: 59310 - DNA, 33 bp, Homo sapien
gagtctgccttgacacgggaggaaccaagtggc

SEQ ID NO: 59311 - DNA, 33 bp, Homo sapien
cactgcaagaggttcacacagaccaagagaaat

SEQ ID NO: 59312 - DNA, 33 bp, Homo sapien
cactgcaagaggttcatacagaccaagagaaat

SEQ ID NO: 59313 - DNA, 33 bp, Homo sapien
tcatttataactaatacgaatgccagaaaaaac

SEQ ID NO: 59314 - DNA, 33 bp, Homo sapien
tcatttataactaataggaatgccagaaaaaac

SEQ ID NO: 59315 - DNA, 33 bp, Homo sapien
actgaccgggctaccaagcgctcagctcatatt

SEQ ID NO: 59316 - DNA, 33 bp, Homo sapien
actgaccgggctaccacgcgctcagctcatatt

SEQ ID NO: 59317 - DNA, 33 bp, Homo sapien
caggtttagacttatcaaacatcttgccagacc

SEQ ID NO: 59318 - DNA, 33 bp, Homo sapien
caggtttagacttatcgaacatcttgccagacc

SEQ ID NO: 59319 - DNA, 33 bp, Homo sapien
atgtgaaatataaatgacaaccaaaaagagtgc

SEQ ID NO: 59320 - DNA, 33 bp, Homo sapien
atgtgaaatataaatggcaaccaaaaagagtgc

SEQ ID NO: 59321 - DNA, 33 bp, Homo sapien
cttccaggttgtggaccgtcaacttcttgttat

SEQ ID NO: 59322 - DNA, 33 bp, Homo sapien
cttccaggttgtggacggtcaacttcttgttat

SEQ ID NO: 59323 - DNA, 33 bp, Homo sapien
gcccctgatcttttgccgagggatggattctca

SEQ ID NO: 59324 - DNA, 33 bp, Homo sapien
gcccctgatcttttgctgagggatggattctca

SEQ ID NO: 59325 - DNA, 33 bp, Homo sapien
agaagcaagagaggtgacaaagtctccctggca

SEQ ID NO: 59326 - DNA, 33 bp, Homo sapien
agaagcaagagaggtggcaaagtctccctggca

SEQ ID NO: 59327 - DNA, 33 bp, Homo sapien
ggatgagtagcaaatgcagaggcagggtggtct

SEQ ID NO: 59328 - DNA, 33 bp, Homo sapien
ggatgagtagcaaatgtagaggcagggtggtct

SEQ ID NO: 59329 - DNA, 33 bp, Homo sapien
aaaggagaaagtcagacgcagagggcatagagg

SEQ ID NO: 59330 - DNA, 33 bp, Homo sapien
aaaggagaaagtcagatgcagagggcatagagg

SEQ ID NO: 59331 - DNA, 33 bp, Homo sapien
ccaactattgaggaaacgaaggctgcagatggt

SEQ ID NO: 59332 - DNA, 33 bp, Homo sapien
ccaactattgaggaaatgaaggctgcagatggt

SEQ ID NO: 59333 - DNA, 33 bp, Homo sapien
tcaccccttaaaaggaaaatggttcagcccagt

SEQ ID NO: 59334 - DNA, 33 bp, Homo sapien
tcaccccttaaaaggagaatggttcagcccagt

SEQ ID NO: 59335 - DNA, 33 bp, Homo sapien
atcacagagttgagcccaagtctttcagctatt

SEQ ID NO: 59336 - DNA, 33 bp, Homo sapien
atcacagagttgagcctaagtctttcagctatt

SEQ ID NO: 59337 - DNA, 33 bp, Homo sapien
ctctcatgttctgaaaagtaggtacgcttttac

SEQ ID NO: 59338 - DNA, 33 bp, Homo sapien
ctctcatgttctgaaaggtaggtacgcttttac

SEQ ID NO: 59339 - DNA, 33 bp, Homo sapien
cacacatctggagagaacttgctttggagtcat

SEQ ID NO: 59340 - DNA, 33 bp, Homo sapien
cacacatctggagagaccttgctttggagtcat

SEQ ID NO: 59341 - DNA, 33 bp, Homo sapien
cttatttataaaacacactttgctaagagctaa

SEQ ID NO: 59342 - DNA, 33 bp, Homo sapien
cttatttataaaacacgctttgctaagagctaa

SEQ ID NO: 59343 - DNA, 33 bp, Homo sapien
gagcagatgctattagaacctgcatcttacaag

SEQ ID NO: 59344 - DNA, 33 bp, Homo sapien
gagcagatgctattaggacctgcatcttacaag

SEQ ID NO: 59345 - DNA, 33 bp, Homo sapien
agaacatcagactccaagaaggatcacaaaact

SEQ ID NO: 59346 - DNA, 33 bp, Homo sapien
agaacatcagactccaggaaggatcacaaaact

SEQ ID NO: 59347 - DNA, 33 bp, Homo sapien
ctggcctattcttgacacgaagcaggaaggaca

SEQ ID NO: 59348 - DNA, 33 bp, Homo sapien
ctggcctattcttgacgcgaagcaggaaggaca

SEQ ID NO: 59349 - DNA, 33 bp, Homo sapien
gttcttcaaatctgtaagaacaaacaatccaga

SEQ ID NO: 59350 - DNA, 33 bp, Homo sapien
gttcttcaaatctgtaggaacaaacaatccaga

SEQ ID NO: 59351 - DNA, 33 bp, Homo sapien
ggtcaggacctacaaaaacttgcaagccaggtt

SEQ ID NO: 59352 - DNA, 33 bp, Homo sapien
ggtcaggacctacaaacacttgcaagccaggtt

SEQ ID NO: 59353 - DNA, 33 bp, Homo sapien
ccccactgccatgctacagttgtgagatgctgt

SEQ ID NO: 59354 - DNA, 33 bp, Homo sapien
ccccactgccatgctatagttgtgagatgctgt

SEQ ID NO: 59355 - DNA, 33 bp, Homo sapien
ccatgtacacccgccacaggttggaacagtgag

SEQ ID NO: 59356 - DNA, 33 bp, Homo sapien
ccatgtacacccgccagaggttggaacagtgag

SEQ ID NO: 59357 - DNA, 33 bp, Homo sapien
gaagttgggaatagaacggtggttgccataggc

SEQ ID NO: 59358 - DNA, 33 bp, Homo sapien
gaagttgggaatagaatggtggttgccataggc

SEQ ID NO: 59359 - DNA, 33 bp, Homo sapien
cttctagttttaatgaaccagcctttatctgca

SEQ ID NO: 59360 - DNA, 33 bp, Homo sapien
cttctagttttaatgatccagcctttatctgca

SEQ ID NO: 59361 - DNA, 33 bp, Homo sapien
attaatgacaaggtaccgagtatgttacaaaac

SEQ ID NO: 59362 - DNA, 33 bp, Homo sapien
attaatgacaaggtactgagtatgttacaaaac

SEQ ID NO: 59363 - DNA, 33 bp, Homo sapien
tatgagccagaagacacgaacttcttatttcct

SEQ ID NO: 59364 - DNA, 33 bp, Homo sapien
tatgagccagaagacatgaacttcttatttcct

SEQ ID NO: 59365 - DNA, 33 bp, Homo sapien
gatgaacacacaataacgggtctcaggcaggac

SEQ ID NO: 59366 - DNA, 33 bp, Homo sapien
gatgaacacacaataatgggtctcaggcaggac

SEQ ID NO: 59367 - DNA, 33 bp, Homo sapien
aaattctgacttgctacgttttaccgggccaag

SEQ ID NO: 59368 - DNA, 33 bp, Homo sapien
aaattctgacttgctatgttttaccgggccaag

SEQ ID NO: 59369 - DNA, 33 bp, Homo sapien
tcagtgataaagtctacgttcaggcgacagagc

SEQ ID NO: 59370 - DNA, 33 bp, Homo sapien
tcagtgataaagtctatgttcaggcgacagagc

SEQ ID NO: 59371 - DNA, 33 bp, Homo sapien
aatgacttcctaataactgatcatggataatgg

SEQ ID NO: 59372 - DNA, 33 bp, Homo sapien
aatgacttcctaataattgatcatggataatgg

SEQ ID NO: 59373 - DNA, 33 bp, Homo sapien
ttgggtgttacaaaaagttatcactgcatggaa

SEQ ID NO: 59374 - DNA, 33 bp, Homo sapien
ttgggtgttacaaaaatttatcactgcatggaa

SEQ ID NO: 59375 - DNA, 33 bp, Homo sapien
cacataacacattcacactaatgtaagaattca

SEQ ID NO: 59376 - DNA, 33 bp, Homo sapien
cacataacacattcacgctaatgtaagaattca

SEQ ID NO: 59377 - DNA, 33 bp, Homo sapien
ctatttagatgcagtaaatgctatgttcattat

SEQ ID NO: 59378 - DNA, 33 bp, Homo sapien
ctatttagatgcagtagatgctatgttcattat

SEQ ID NO: 59379 - DNA, 33 bp, Homo sapien
acaacccaaagtagacagagtagctttagaaga

SEQ ID NO: 59380 - DNA, 33 bp, Homo sapien
acaacccaaagtagacggagtagctttagaaga

SEQ ID NO: 59381 - DNA, 33 bp, Homo sapien
tgtttctgattagcaactgttgagtgctctggt

SEQ ID NO: 59382 - DNA, 33 bp, Homo sapien
tgtttctgattagcaattgttgagtgctctggt

SEQ ID NO: 59383 - DNA, 33 bp, Homo sapien
gatctacaaacccatcaaatcaagtagaggaaa

SEQ ID NO: 59384 - DNA, 33 bp, Homo sapien
gatctacaaacccatcgaatcaagtagaggaaa

SEQ ID NO: 59385 - DNA, 33 bp, Homo sapien
tggcaaataatattcacagcctgtattagttca

SEQ ID NO: 59386 - DNA, 33 bp, Homo sapien
tggcaaataatattcatagcctgtattagttca

SEQ ID NO: 59387 - DNA, 33 bp, Homo sapien
aagtgagggaatgctgaaaaggaaacagccaga

SEQ ID NO: 59388 - DNA, 33 bp, Homo sapien
aagtgagggaatgctggaaaggaaacagccaga

SEQ ID NO: 59389 - DNA, 33 bp, Homo sapien
atggagacaaagtagaacctattcaagggtcag

SEQ ID NO: 59390 - DNA, 33 bp, Homo sapien
atggagacaaagtagatcctattcaagggtcag

SEQ ID NO: 59391 - DNA, 33 bp, Homo sapien
ccacttagcttggagcaaagaaataaagtaggc

SEQ ID NO: 59392 - DNA, 33 bp, Homo sapien
ccacttagcttggagccaagaaataaagtaggc

SEQ ID NO: 59393 - DNA, 33 bp, Homo sapien
tgtatacgcctttgatcaattggattaaattcc

SEQ ID NO: 59394 - DNA, 33 bp, Homo sapien
tgtatacgcctttgattaattggattaaattcc

SEQ ID NO: 59395 - DNA, 33 bp, Homo sapien
aggtgacaaagcaatcgctgagtaccagtagca

SEQ ID NO: 59396 - DNA, 33 bp, Homo sapien
aggtgacaaagcaatctctgagtaccagtagca

SEQ ID NO: 59397 - DNA, 33 bp, Homo sapien
ctgaactatgtatgtgcatttgtaagttccttc

SEQ ID NO: 59398 - DNA, 33 bp, Homo sapien
ctgaactatgtatgtgtatttgtaagttccttc

SEQ ID NO: 59399 - DNA, 33 bp, Homo sapien
gaaaagctgcacaggaataataagcagattggg

SEQ ID NO: 59400 - DNA, 33 bp, Homo sapien
gaaaagctgcacaggagtaataagcagattggg

SEQ ID NO: 59401 - DNA, 33 bp, Homo sapien
gaactgactagagttgccaaatgcctcaattgg

SEQ ID NO: 59402 - DNA, 33 bp, Homo sapien
gaactgactagagttgtcaaatgcctcaattgg

SEQ ID NO: 59403 - DNA, 33 bp, Homo sapien
taatgtataagaggaagattggaaggagattac

SEQ ID NO: 59404 - DNA, 33 bp, Homo sapien
taatgtataagaggaatattggaaggagattac

SEQ ID NO: 59405 - DNA, 33 bp, Homo sapien
aaacactagagtaaaacatttgtgtgtgtgtgt

SEQ ID NO: 59406 - DNA, 33 bp, Homo sapien
aaacactagagtaaaatatttgtgtgtgtgtgt

SEQ ID NO: 59407 - DNA, 33 bp, Homo sapien
ctccgtatctgcaaagaattcaaccaaccagat

SEQ ID NO: 59408 - DNA, 33 bp, Homo sapien
ctccgtatctgcaaaggattcaaccaaccagat

SEQ ID NO: 59409 - DNA, 33 bp, Homo sapien
cagtgtgtggcttatcaaatctctgatttctcc

SEQ ID NO: 59410 - DNA, 33 bp, Homo sapien
cagtgtgtggcttatcgaatctctgatttctcc

SEQ ID NO: 59411 - DNA, 33 bp, Homo sapien
gcttccgaaatgccgtcaatgccttgtttaaaa

SEQ ID NO: 59412 - DNA, 33 bp, Homo sapien
gcttccgaaatgccgttaatgccttgtttaaaa

SEQ ID NO: 59413 - DNA, 33 bp, Homo sapien
tttcttcaccaacgaacggacttttgcaaaagc

SEQ ID NO: 59414 - DNA, 33 bp, Homo sapien
tttcttcaccaacgaatggacttttgcaaaagc

SEQ ID NO: 59415 - DNA, 33 bp, Homo sapien
ataatgctttggatcactactttacagtgtact

SEQ ID NO: 59416 - DNA, 33 bp, Homo sapien
ataatgctttggatcattactttacagtgtact

SEQ ID NO: 59417 - DNA, 33 bp, Homo sapien
ccatttgaaaaatatggaatgcttcacgaattt

SEQ ID NO: 59418 - DNA, 33 bp, Homo sapien
ccatttgaaaaatatgtaatgcttcacgaattt

SEQ ID NO: 59419 - DNA, 33 bp, Homo sapien
taggtttttgtcatccccataaactttgtgtca

SEQ ID NO: 59420 - DNA, 33 bp, Homo sapien
taggtttttgtcatcctcataaactttgtgtca

SEQ ID NO: 59421 - DNA, 33 bp, Homo sapien
gctatacgtggacataagaatgggaagaataga

SEQ ID NO: 59422 - DNA, 33 bp, Homo sapien
gctatacgtggacataggaatgggaagaataga

SEQ ID NO: 59423 - DNA, 33 bp, Homo sapien
agatgaaacatacttcagaaaatcatctagagc

SEQ ID NO: 59424 - DNA, 33 bp, Homo sapien
agatgaaacatacttctgaaaatcatctagagc

SEQ ID NO: 59425 - DNA, 33 bp, Homo sapien
aaagagataaaaattaagtgtggactatggaaa

SEQ ID NO: 59426 - DNA, 33 bp, Homo sapien
aaagagataaaaattacgtgtggactatggaaa

SEQ ID NO: 59427 - DNA, 33 bp, Homo sapien
aacacatctgttataaactccatggcctcttct

SEQ ID NO: 59428 - DNA, 33 bp, Homo sapien
aacacatctgttataacctccatggcctcttct

SEQ ID NO: 59429 - DNA, 33 bp, Homo sapien
caccctcatctacagaacagaatacaacctctt

SEQ ID NO: 59430 - DNA, 33 bp, Homo sapien
caccctcatctacagatcagaatacaacctctt

SEQ ID NO: 59431 - DNA, 33 bp, Homo sapien
gcaagaatctctgccacaaatatgaaatgggag

SEQ ID NO: 59432 - DNA, 33 bp, Homo sapien
gcaagaatctctgccagaaatatgaaatgggag

SEQ ID NO: 59433 - DNA, 33 bp, Homo sapien
tcttgctcctcattgaatagagtcttttgatgc

SEQ ID NO: 59434 - DNA, 33 bp, Homo sapien
tcttgctcctcattgagtagagtcttttgatgc

SEQ ID NO: 59435 - DNA, 33 bp, Homo sapien
aataagccttgtctccacagcatatttatgaag

SEQ ID NO: 59436 - DNA, 33 bp, Homo sapien
aataagccttgtctccgcagcatatttatgaag

SEQ ID NO: 59437 - DNA, 33 bp, Homo sapien
attctgtggcaaaaatgaatcactgttgtagat

SEQ ID NO: 59438 - DNA, 33 bp, Homo sapien
attctgtggcaaaaattaatcactgttgtagat

SEQ ID NO: 59439 - DNA, 33 bp, Homo sapien
agtgagaaaacagaggcataggaagatttagta

SEQ ID NO: 59440 - DNA, 33 bp, Homo sapien
agtgagaaaacagagggataggaagatttagta

SEQ ID NO: 59441 - DNA, 33 bp, Homo sapien
acctaagtgtccattaacgatggattggataaa

SEQ ID NO: 59442 - DNA, 33 bp, Homo sapien
acctaagtgtccattagcgatggattggataaa

SEQ ID NO: 59443 - DNA, 33 bp, Homo sapien
acatactagtgcagaaaactttttgataaaagt

SEQ ID NO: 59444 - DNA, 33 bp, Homo sapien
acatactagtgcagaagactttttgataaaagt

SEQ ID NO: 59445 - DNA, 33 bp, Homo sapien
tacctgagctcgccacaaaagataccttatctt

SEQ ID NO: 59446 - DNA, 33 bp, Homo sapien
tacctgagctcgccacgaaagataccttatctt

SEQ ID NO: 59447 - DNA, 33 bp, Homo sapien
cctggaaatgtgagaacgctcttcccttatcct

SEQ ID NO: 59448 - DNA, 33 bp, Homo sapien
cctggaaatgtgagaatgctcttcccttatcct

SEQ ID NO: 59449 - DNA, 33 bp, Homo sapien
tctagcttttcaggaacttaatgataaagtgcg

SEQ ID NO: 59450 - DNA, 33 bp, Homo sapien
tctagcttttcaggaatttaatgataaagtgcg

SEQ ID NO: 59451 - DNA, 33 bp, Homo sapien
actgctcacccaaggcaactacgcctaccttaa

SEQ ID NO: 59452 - DNA, 33 bp, Homo sapien
actgctcacccaaggctactacgcctaccttaa

SEQ ID NO: 59453 - DNA, 33 bp, Homo sapien
cacggagctatttcctcaagatttaagacatcc

SEQ ID NO: 59454 - DNA, 33 bp, Homo sapien
cacggagctatttcctgaagatttaagacatcc

SEQ ID NO: 59455 - DNA, 33 bp, Homo sapien
gtctcagtgtgagaaaatctgctaccctaaaaa

SEQ ID NO: 59456 - DNA, 33 bp, Homo sapien
gtctcagtgtgagaaactctgctaccctaaaaa

SEQ ID NO: 59457 - DNA, 33 bp, Homo sapien
cttatttatcatctgaaaaaggattgcatttaa

SEQ ID NO: 59458 - DNA, 33 bp, Homo sapien
cttatttatcatctgagaaaggattgcatttaa

SEQ ID NO: 59459 - DNA, 33 bp, Homo sapien
ttatattgagaagaaaccaggggtaaataaggt

SEQ ID NO: 59460 - DNA, 33 bp, Homo sapien
ttatattgagaagaaagcaggggtaaataaggt

SEQ ID NO: 59461 - DNA, 33 bp, Homo sapien
atttggtaaggtcatacagggaagaaacagaaa

SEQ ID NO: 59462 - DNA, 33 bp, Homo sapien
atttggtaaggtcatagagggaagaaacagaaa

SEQ ID NO: 59463 - DNA, 33 bp, Homo sapien
tttcatttaccacttacaaactacgtgcatcag

SEQ ID NO: 59464 - DNA, 33 bp, Homo sapien
tttcatttaccacttataaactacgtgcatcag

SEQ ID NO: 59465 - DNA, 33 bp, Homo sapien
gacaaatcagagtagaaagttcaggatttaggc

SEQ ID NO: 59466 - DNA, 33 bp, Homo sapien
gacaaatcagagtagagagttcaggatttaggc

SEQ ID NO: 59467 - DNA, 33 bp, Homo sapien
tggtgcctgtacttggccatagtttaagagtca

SEQ ID NO: 59468 - DNA, 33 bp, Homo sapien
tggtgcctgtacttggtcatagtttaagagtca

SEQ ID NO: 59469 - DNA, 33 bp, Homo sapien
acagtaagaatcacaccggaacgagttgccagc

SEQ ID NO: 59470 - DNA, 33 bp, Homo sapien
acagtaagaatcacactggaacgagttgccagc

SEQ ID NO: 59471 - DNA, 33 bp, Homo sapien
tgaatcattgactgaaataaccaaacagcaagt

SEQ ID NO: 59472 - DNA, 33 bp, Homo sapien
tgaatcattgactgaattaaccaaacagcaagt

SEQ ID NO: 59473 - DNA, 33 bp, Homo sapien
acattgagagcaaacactaaacagtgatatcag

SEQ ID NO: 59474 - DNA, 33 bp, Homo sapien
acattgagagcaaacattaaacagtgatatcag

SEQ ID NO: 59475 - DNA, 33 bp, Homo sapien
ccacttcgtttttcaccgtcatctgacacacag

SEQ ID NO: 59476 - DNA, 33 bp, Homo sapien
ccacttcgtttttcactgtcatctgacacacag

SEQ ID NO: 59477 - DNA, 33 bp, Homo sapien
aatcgtgccagacaaacctaatcaaaattttct

SEQ ID NO: 59478 - DNA, 33 bp, Homo sapien
aatcgtgccagacaaatctaatcaaaattttct

SEQ ID NO: 59479 - DNA, 33 bp, Homo sapien
ttctcaaacagggaaaggtttctatcacaatgt

SEQ ID NO: 59480 - DNA, 33 bp, Homo sapien
ttctcaaacagggaaatgtttctatcacaatgt

SEQ ID NO: 59481 - DNA, 33 bp, Homo sapien
gcttgttacgtctccaaaggtgattttgttgtg

SEQ ID NO: 59482 - DNA, 33 bp, Homo sapien
gcttgttacgtctccagaggtgattttgttgtg

SEQ ID NO: 59483 - DNA, 33 bp, Homo sapien
agacttaaaatggaaacgctgtctttgagtggt

SEQ ID NO: 59484 - DNA, 33 bp, Homo sapien
agacttaaaatggaaatgctgtctttgagtggt

SEQ ID NO: 59485 - DNA, 33 bp, Homo sapien
aataaatcattacttaagcttgaaccaatagga

SEQ ID NO: 59486 - DNA, 33 bp, Homo sapien
aataaatcattacttaggcttgaaccaatagga

SEQ ID NO: 59487 - DNA, 33 bp, Homo sapien
agcatctctgatccaaatgtggtgccccatgag

SEQ ID NO: 59488 - DNA, 33 bp, Homo sapien
agcatctctgatccaagtgtggtgccccatgag

SEQ ID NO: 59489 - DNA, 33 bp, Homo sapien
aataagaattcactaaatgtgtggatttgacaa

SEQ ID NO: 59490 - DNA, 33 bp, Homo sapien
aataagaattcactaagtgtgtggatttgacaa

SEQ ID NO: 59491 - DNA, 33 bp, Homo sapien
ttcatgtgtaagatccaagaaggtcaggacttc

SEQ ID NO: 59492 - DNA, 33 bp, Homo sapien
ttcatgtgtaagatccgagaaggtcaggacttc

SEQ ID NO: 59493 - DNA, 33 bp, Homo sapien
ttctcttccctcaagacgccctagcttatccct

SEQ ID NO: 59494 - DNA, 33 bp, Homo sapien
ttctcttccctcaagatgccctagcttatccct

SEQ ID NO: 59495 - DNA, 33 bp, Homo sapien
cctattcaatgaaaaacggataaaacaatcaga

SEQ ID NO: 59496 - DNA, 33 bp, Homo sapien
cctattcaatgaaaaatggataaaacaatcaga

SEQ ID NO: 59497 - DNA, 33 bp, Homo sapien
catcttcctgtttcaacattacattcatctatg

SEQ ID NO: 59498 - DNA, 33 bp, Homo sapien
catcttcctgtttcaatattacattcatctatg

SEQ ID NO: 59499 - DNA, 33 bp, Homo sapien
aagactggaggagaaacaaagggtcgaagaaaa

SEQ ID NO: 59500 - DNA, 33 bp, Homo sapien
aagactggaggagaaataaagggtcgaagaaaa

SEQ ID NO: 59501 - DNA, 33 bp, Homo sapien
accacaggtgtcagccaccatgactgtccttct

SEQ ID NO: 59502 - DNA, 33 bp, Homo sapien
accacaggtgtcagccgccatgactgtccttct

SEQ ID NO: 59503 - DNA, 33 bp, Homo sapien
tagtaccttgcatacaaattatcacaaaacgtg

SEQ ID NO: 59504 - DNA, 33 bp, Homo sapien
tagtaccttgcatacacattatcacaaaacgtg

SEQ ID NO: 59505 - DNA, 33 bp, Homo sapien
ctccctccttttacacgcgcagacaagcttgtg

SEQ ID NO: 59506 - DNA, 33 bp, Homo sapien
ctccctccttttacactcgcagacaagcttgtg

SEQ ID NO: 59507 - DNA, 33 bp, Homo sapien
aaaagccaaaagccccaactaggaattcaaaca

SEQ ID NO: 59508 - DNA, 33 bp, Homo sapien
aaaagccaaaagccccgactaggaattcaaaca

SEQ ID NO: 59509 - DNA, 33 bp, Homo sapien
ggaattcaaacattagaaacatcaacatttcaa

SEQ ID NO: 59510 - DNA, 33 bp, Homo sapien
ggaattcaaacattaggaacatcaacatttcaa

SEQ ID NO: 59511 - DNA, 33 bp, Homo sapien
cactcaggttgtatgacagtgaaaaggtagcct

SEQ ID NO: 59512 - DNA, 33 bp, Homo sapien
cactcaggttgtatgatagtgaaaaggtagcct

SEQ ID NO: 59513 - DNA, 33 bp, Homo sapien
gttgagagagcagaacactgttaggagttgaga

SEQ ID NO: 59514 - DNA, 33 bp, Homo sapien
gttgagagagcagaacgctgttaggagttgaga

SEQ ID NO: 59515 - DNA, 33 bp, Homo sapien
tgcctgtcagtcagtcgcaggcagaatggctcc

SEQ ID NO: 59516 - DNA, 33 bp, Homo sapien
tgcctgtcagtcagtctcaggcagaatggctcc

SEQ ID NO: 59517 - DNA, 33 bp, Homo sapien
gaataataattctagaaagaggtatcggtgtgg

SEQ ID NO: 59518 - DNA, 33 bp, Homo sapien
gaataataattctagagagaggtatcggtgtgg

SEQ ID NO: 59519 - DNA, 33 bp, Homo sapien
tgctagaagttggactcaaaatatggtatctgc

SEQ ID NO: 59520 - DNA, 33 bp, Homo sapien
tgctagaagttggactgaaaatatggtatctgc

SEQ ID NO: 59521 - DNA, 33 bp, Homo sapien
ttgtagagtttttgaaaggatgaacaattactg

SEQ ID NO: 59522 - DNA, 33 bp, Homo sapien
ttgtagagtttttgaagggatgaacaattactg

SEQ ID NO: 59523 - DNA, 33 bp, Homo sapien
aaagagataagaaagagactagaaacgtagcca

SEQ ID NO: 59524 - DNA, 33 bp, Homo sapien
aaagagataagaaagatactagaaacgtagcca

SEQ ID NO: 59525 - DNA, 33 bp, Homo sapien
gaaaggtcactcactcaagggcttagagaatga

SEQ ID NO: 59526 - DNA, 33 bp, Homo sapien
gaaaggtcactcactcgagggcttagagaatga

SEQ ID NO: 59527 - DNA, 33 bp, Homo sapien
tcaaaactcacctgacagctaaatccagcagtg

SEQ ID NO: 59528 - DNA, 33 bp, Homo sapien
tcaaaactcacctgacggctaaatccagcagtg

SEQ ID NO: 59529 - DNA, 33 bp, Homo sapien
aattgttcttccagaacggcgaattcagaatcc

SEQ ID NO: 59530 - DNA, 33 bp, Homo sapien
aattgttcttccagaatggcgaattcagaatcc

SEQ ID NO: 59531 - DNA, 33 bp, Homo sapien
atgagagtattccagaatctatggagctcctat

SEQ ID NO: 59532 - DNA, 33 bp, Homo sapien
atgagagtattccagattctatggagctcctat

SEQ ID NO: 59533 - DNA, 33 bp, Homo sapien
ctccagcactgatctagggaagaacctgagtct

SEQ ID NO: 59534 - DNA, 33 bp, Homo sapien
ctccagcactgatctatggaagaacctgagtct

SEQ ID NO: 59535 - DNA, 33 bp, Homo sapien
ccctcacctgatacaaaagaagggaaagactca

SEQ ID NO: 59536 - DNA, 33 bp, Homo sapien
ccctcacctgatacaacagaagggaaagactca

SEQ ID NO: 59537 - DNA, 33 bp, Homo sapien
gtatctccgcattagaaaagaatcaaattgcag

SEQ ID NO: 59538 - DNA, 33 bp, Homo sapien
gtatctccgcattagagaagaatcaaattgcag

SEQ ID NO: 59539 - DNA, 33 bp, Homo sapien
ttcctacctataaaagaatgaaacatgctggag

SEQ ID NO: 59540 - DNA, 33 bp, Homo sapien
ttcctacctataaaaggatgaaacatgctggag

SEQ ID NO: 59541 - DNA, 33 bp, Homo sapien
agcctgaattttcattgaaactaatcttcaagc

SEQ ID NO: 59542 - DNA, 33 bp, Homo sapien
agcctgaattttcatttaaactaatcttcaagc

SEQ ID NO: 59543 - DNA, 33 bp, Homo sapien
tgccttttggagataactgaagtataaaccatg

SEQ ID NO: 59544 - DNA, 33 bp, Homo sapien
tgccttttggagataattgaagtataaaccatg

SEQ ID NO: 59545 - DNA, 33 bp, Homo sapien
aaagatttgatgtctcagaaagagaatgaggga

SEQ ID NO: 59546 - DNA, 33 bp, Homo sapien
aaagatttgatgtctcggaaagagaatgaggga

SEQ ID NO: 59547 - DNA, 33 bp, Homo sapien
caggcaaatctctgcactcaactttgcagttct

SEQ ID NO: 59548 - DNA, 33 bp, Homo sapien
caggcaaatctctgcattcaactttgcagttct

SEQ ID NO: 59549 - DNA, 33 bp, Homo sapien
ctagtagcgagagtaaataataaatggttttag

SEQ ID NO: 59550 - DNA, 33 bp, Homo sapien
ctagtagcgagagtaagtaataaatggttttag

SEQ ID NO: 59551 - DNA, 33 bp, Homo sapien
ttttgggaaatcgatacaaagtccaaaattggt

SEQ ID NO: 59552 - DNA, 33 bp, Homo sapien
ttttgggaaatcgatataaagtccaaaattggt

SEQ ID NO: 59553 - DNA, 33 bp, Homo sapien
tagaaagagaactctacagcagtctgcaggatg

SEQ ID NO: 59554 - DNA, 33 bp, Homo sapien
tagaaagagaactctagagcagtctgcaggatg

SEQ ID NO: 59555 - DNA, 33 bp, Homo sapien
taaagtagatagcccaaatgatgtactctcaaa

SEQ ID NO: 59556 - DNA, 33 bp, Homo sapien
taaagtagatagcccacatgatgtactctcaaa

SEQ ID NO: 59557 - DNA, 33 bp, Homo sapien
agttgcctgatgttaccggtgaggctggaccta

SEQ ID NO: 59558 - DNA, 33 bp, Homo sapien
agttgcctgatgttactggtgaggctggaccta

SEQ ID NO: 59559 - DNA, 33 bp, Homo sapien
tgccaagagagtatgacaacttgggaccttgac

SEQ ID NO: 59560 - DNA, 33 bp, Homo sapien
tgccaagagagtatgagaacttgggaccttgac

SEQ ID NO: 59561 - DNA, 33 bp, Homo sapien
cgtattcagcatctaccgggtgctcagaaccgg

SEQ ID NO: 59562 - DNA, 33 bp, Homo sapien
cgtattcagcatctactgggtgctcagaaccgg

SEQ ID NO: 59563 - DNA, 33 bp, Homo sapien
gaagcatgaagtcggcaataggagtgcagtgag

SEQ ID NO: 59564 - DNA, 33 bp, Homo sapien
gaagcatgaagtcggcgataggagtgcagtgag

SEQ ID NO: 59565 - DNA, 33 bp, Homo sapien
attcagagtggctcaactgagagtggttaggtg

SEQ ID NO: 59566 - DNA, 33 bp, Homo sapien
attcagagtggctcaattgagagtggttaggtg

SEQ ID NO: 59567 - DNA, 33 bp, Homo sapien
gcatttccacagtgaagaggattgagtgtaata

SEQ ID NO: 59568 - DNA, 33 bp, Homo sapien
gcatttccacagtgaataggattgagtgtaata

SEQ ID NO: 59569 - DNA, 33 bp, Homo sapien
cacatgttatattttaaaggcaagttcagttct

SEQ ID NO: 59570 - DNA, 33 bp, Homo sapien
cacatgttatattttagaggcaagttcagttct

SEQ ID NO: 59571 - DNA, 33 bp, Homo sapien
ccgctccgggactccaatgattatgccataaac

SEQ ID NO: 59572 - DNA, 33 bp, Homo sapien
ccgctccgggactccagtgattatgccataaac

SEQ ID NO: 59573 - DNA, 33 bp, Homo sapien
agttcaagcgtacacaaaagaatctgggaaact

SEQ ID NO: 59574 - DNA, 33 bp, Homo sapien
agttcaagcgtacacagaagaatctgggaaact

SEQ ID NO: 59575 - DNA, 33 bp, Homo sapien
ccagattaaaagactagggtagcaaagacgcat

SEQ ID NO: 59576 - DNA, 33 bp, Homo sapien
ccagattaaaagactatggtagcaaagacgcat

SEQ ID NO: 59577 - DNA, 33 bp, Homo sapien
gtgaagctgccataaagatttctcaactgaggt

SEQ ID NO: 59578 - DNA, 33 bp, Homo sapien
gtgaagctgccataaatatttctcaactgaggt

SEQ ID NO: 59579 - DNA, 33 bp, Homo sapien
tccaggactccacttacgactattatgaggcaa

SEQ ID NO: 59580 - DNA, 33 bp, Homo sapien
tccaggactccacttatgactattatgaggcaa

SEQ ID NO: 59581 - DNA, 33 bp, Homo sapien
gtaaatactttcccaaaatttgctttgctggta

SEQ ID NO: 59582 - DNA, 33 bp, Homo sapien
gtaaatactttcccaacatttgctttgctggta

SEQ ID NO: 59583 - DNA, 33 bp, Homo sapien
ggtcatctacgcaagcagctgaggaaacaattc

SEQ ID NO: 59584 - DNA, 33 bp, Homo sapien
ggtcatctacgcaagcggctgaggaaacaattc

SEQ ID NO: 59585 - DNA, 33 bp, Homo sapien
gtctcttccaagtgtaagattagacagtacatg

SEQ ID NO: 59586 - DNA, 33 bp, Homo sapien
gtctcttccaagtgtaggattagacagtacatg

SEQ ID NO: 59587 - DNA, 33 bp, Homo sapien
agaaaaccgactattcacagactcgtgtcccag

SEQ ID NO: 59588 - DNA, 33 bp, Homo sapien
agaaaaccgactattcgcagactcgtgtcccag

SEQ ID NO: 59589 - DNA, 33 bp, Homo sapien
gttctgtattaggaaaagccctcttgcctccac

SEQ ID NO: 59590 - DNA, 33 bp, Homo sapien
gttctgtattaggaaaggccctcttgcctccac

SEQ ID NO: 59591 - DNA, 33 bp, Homo sapien
ccctcgagcagaaaaagagttcagttccagagg

SEQ ID NO: 59592 - DNA, 33 bp, Homo sapien
ccctcgagcagaaaaatagttcagttccagagg

SEQ ID NO: 59593 - DNA, 33 bp, Homo sapien
agagttcctgaacctactaaacattccataaat

SEQ ID NO: 59594 - DNA, 33 bp, Homo sapien
agagttcctgaacctagtaaacattccataaat

SEQ ID NO: 59595 - DNA, 33 bp, Homo sapien
gtcatcccattagtcaaataattagatttctgg

SEQ ID NO: 59596 - DNA, 33 bp, Homo sapien
gtcatcccattagtcatataattagatttctgg

SEQ ID NO: 59597 - DNA, 33 bp, Homo sapien
ggttcaagaatccaaaatgaaagaaagagcaaa

SEQ ID NO: 59598 - DNA, 33 bp, Homo sapien
ggttcaagaatccaaagtgaaagaaagagcaaa

SEQ ID NO: 59599 - DNA, 33 bp, Homo sapien
gaacgcaggtaaagcacgagcatcatttgggca

SEQ ID NO: 59600 - DNA, 33 bp, Homo sapien
gaacgcaggtaaagcatgagcatcatttgggca

SEQ ID NO: 59601 - DNA, 33 bp, Homo sapien
tttcttttctggtggtaaagtaataaatggagg

SEQ ID NO: 59602 - DNA, 33 bp, Homo sapien
tttcttttctggtggtgaagtaataaatggagg

SEQ ID NO: 59603 - DNA, 33 bp, Homo sapien
cctcttaacattgtaactcctgatcttctgggg

SEQ ID NO: 59604 - DNA, 33 bp, Homo sapien
cctcttaacattgtaagtcctgatcttctgggg

SEQ ID NO: 59605 - DNA, 33 bp, Homo sapien
tcatggctcattccaggccacttggaaccaggt

SEQ ID NO: 59606 - DNA, 33 bp, Homo sapien
tcatggctcattccagtccacttggaaccaggt

SEQ ID NO: 59607 - DNA, 33 bp, Homo sapien
aagtgcctaacactgcacctaacacagagcaga

SEQ ID NO: 59608 - DNA, 33 bp, Homo sapien
aagtgcctaacactgcgcctaacacagagcaga

SEQ ID NO: 59609 - DNA, 33 bp, Homo sapien
tccattagaaagatggaaagaagaggatggatt

SEQ ID NO: 59610 - DNA, 33 bp, Homo sapien
tccattagaaagatgggaagaagaggatggatt

SEQ ID NO: 59611 - DNA, 33 bp, Homo sapien
tgtttgctatttctaccgacttgctacctctgc

SEQ ID NO: 59612 - DNA, 33 bp, Homo sapien
tgtttgctatttctactgacttgctacctctgc

SEQ ID NO: 59613 - DNA, 33 bp, Homo sapien
gatgatgatcttaggacggccttatggctggac

SEQ ID NO: 59614 - DNA, 33 bp, Homo sapien
gatgatgatcttaggatggccttatggctggac

SEQ ID NO: 59615 - DNA, 33 bp, Homo sapien
cctcatttaatccactcaactgttgcattattc

SEQ ID NO: 59616 - DNA, 33 bp, Homo sapien
cctcatttaatccactgaactgttgcattattc

SEQ ID NO: 59617 - DNA, 33 bp, Homo sapien
ccactcagaaggcagaaataaaaaggctctctc

SEQ ID NO: 59618 - DNA, 33 bp, Homo sapien
ccactcagaaggcagagataaaaaggctctctc

SEQ ID NO: 59619 - DNA, 33 bp, Homo sapien
atatgcttacatctaaatcaagcaagtttttgc

SEQ ID NO: 59620 - DNA, 33 bp, Homo sapien
atatgcttacatctaagtcaagcaagtttttgc

SEQ ID NO: 59621 - DNA, 33 bp, Homo sapien
gtgatgttagtagaagaaagtcagctaggggga

SEQ ID NO: 59622 - DNA, 33 bp, Homo sapien
gtgatgttagtagaagcaagtcagctaggggga

SEQ ID NO: 59623 - DNA, 33 bp, Homo sapien
gctttttatctgttggcaattcttcttgtcaaa

SEQ ID NO: 59624 - DNA, 33 bp, Homo sapien
gctttttatctgttggtaattcttcttgtcaaa

SEQ ID NO: 59625 - DNA, 33 bp, Homo sapien
tatatttttgttgtaaactcctggaaaggagaa

SEQ ID NO: 59626 - DNA, 33 bp, Homo sapien
tatatttttgttgtaacctcctggaaaggagaa

SEQ ID NO: 59627 - DNA, 33 bp, Homo sapien
aatcactcacctgtcaacgcatcatggcaatat

SEQ ID NO: 59628 - DNA, 33 bp, Homo sapien
aatcactcacctgtcatcgcatcatggcaatat

SEQ ID NO: 59629 - DNA, 33 bp, Homo sapien
gtcagtattcactcaaacactccagagaacagc

SEQ ID NO: 59630 - DNA, 33 bp, Homo sapien
gtcagtattcactcaagcactccagagaacagc

SEQ ID NO: 59631 - DNA, 33 bp, Homo sapien
ccacatcagaatgcagcatcatgaattgaattg

SEQ ID NO: 59632 - DNA, 33 bp, Homo sapien
ccacatcagaatgcagtatcatgaattgaattg

SEQ ID NO: 59633 - DNA, 33 bp, Homo sapien
tagaaaggacaatcttaaaaaaagtgcaattgt

SEQ ID NO: 59634 - DNA, 33 bp, Homo sapien
tagaaaggacaatcttgaaaaaagtgcaattgt

SEQ ID NO: 59635 - DNA, 33 bp, Homo sapien
gaggtgagaatgaggtaaagtgggaacatggag

SEQ ID NO: 59636 - DNA, 33 bp, Homo sapien
gaggtgagaatgaggttaagtgggaacatggag

SEQ ID NO: 59637 - DNA, 33 bp, Homo sapien
gggaataggaagaaaaaccaacttcatctgaat

SEQ ID NO: 59638 - DNA, 33 bp, Homo sapien
gggaataggaagaaaagccaacttcatctgaat

SEQ ID NO: 59639 - DNA, 33 bp, Homo sapien
gatttgaaccaagacaaagaaactgaggtcagc

SEQ ID NO: 59640 - DNA, 33 bp, Homo sapien
gatttgaaccaagacacagaaactgaggtcagc

SEQ ID NO: 59641 - DNA, 33 bp, Homo sapien
taagactaatgggtggccatacagctatttgag

SEQ ID NO: 59642 - DNA, 33 bp, Homo sapien
taagactaatgggtggtcatacagctatttgag

SEQ ID NO: 59643 - DNA, 33 bp, Homo sapien
cgaagcacctagtttccaagttacatagaagca

SEQ ID NO: 59644 - DNA, 33 bp, Homo sapien
cgaagcacctagtttctaagttacatagaagca

SEQ ID NO: 59645 - DNA, 33 bp, Homo sapien
taatgatccacagataatatcccttgagaagtt

SEQ ID NO: 59646 - DNA, 33 bp, Homo sapien
taatgatccacagatagtatcccttgagaagtt

SEQ ID NO: 59647 - DNA, 33 bp, Homo sapien
gaataaatacctagaggcatatggtaagattat

SEQ ID NO: 59648 - DNA, 33 bp, Homo sapien
gaataaatacctagagtcatatggtaagattat

SEQ ID NO: 59649 - DNA, 33 bp, Homo sapien
tgctctggacggaagactcctggtgaccgtttg

SEQ ID NO: 59650 - DNA, 33 bp, Homo sapien
tgctctggacggaagattcctggtgaccgtttg

SEQ ID NO: 59651 - DNA, 33 bp, Homo sapien
ttttaaacttagatgactcagcccaactgagag

SEQ ID NO: 59652 - DNA, 33 bp, Homo sapien
ttttaaacttagatgattcagcccaactgagag

SEQ ID NO: 59653 - DNA, 33 bp, Homo sapien
aggcaaagagaaaaaacgctctgaaatgcaaag

SEQ ID NO: 59654 - DNA, 33 bp, Homo sapien
aggcaaagagaaaaaaggctctgaaatgcaaag

SEQ ID NO: 59655 - DNA, 33 bp, Homo sapien
tttctgtcactaggaccccaagagctcccctct

SEQ ID NO: 59656 - DNA, 33 bp, Homo sapien
tttctgtcactaggactccaagagctcccctct

SEQ ID NO: 59657 - DNA, 33 bp, Homo sapien
gtgtactacagtatctcagagaagcagctgggg

SEQ ID NO: 59658 - DNA, 33 bp, Homo sapien
gtgtactacagtatcttagagaagcagctgggg

SEQ ID NO: 59659 - DNA, 33 bp, Homo sapien
ggtgggctttggagatcatacctaagttgtctg

SEQ ID NO: 59660 - DNA, 33 bp, Homo sapien
ggtgggctttggagattatacctaagttgtctg

SEQ ID NO: 59661 - DNA, 33 bp, Homo sapien
cattgagcaggagcaacgggagaaatttgaata

SEQ ID NO: 59662 - DNA, 33 bp, Homo sapien
cattgagcaggagcaatgggagaaatttgaata

SEQ ID NO: 59663 - DNA, 33 bp, Homo sapien
cattaggtagggaaaccatgtctcaggaagaaa

SEQ ID NO: 59664 - DNA, 33 bp, Homo sapien
cattaggtagggaaacgatgtctcaggaagaaa

SEQ ID NO: 59665 - DNA, 33 bp, Homo sapien
aggcaacagggagcgacggtcagaaccttcatt

SEQ ID NO: 59666 - DNA, 33 bp, Homo sapien
aggcaacagggagcgatggtcagaaccttcatt

SEQ ID NO: 59667 - DNA, 33 bp, Homo sapien
acattttgattactcactcatcagttgatagat

SEQ ID NO: 59668 - DNA, 33 bp, Homo sapien
acattttgattactcattcatcagttgatagat

SEQ ID NO: 59669 - DNA, 33 bp, Homo sapien
gtgatccctgtgggcaagctgtttcgaccaaat

SEQ ID NO: 59670 - DNA, 33 bp, Homo sapien
gtgatccctgtgggcaggctgtttcgaccaaat

SEQ ID NO: 59671 - DNA, 33 bp, Homo sapien
gaagtcaaaacttcagacatctttgggatgctg

SEQ ID NO: 59672 - DNA, 33 bp, Homo sapien
gaagtcaaaacttcaggcatctttgggatgctg

SEQ ID NO: 59673 - DNA, 33 bp, Homo sapien
tcaggggctatagatacgaagtccgtatgtgaa

SEQ ID NO: 59674 - DNA, 33 bp, Homo sapien
tcaggggctatagatatgaagtccgtatgtgaa

SEQ ID NO: 59675 - DNA, 33 bp, Homo sapien
aaagaggaactagcacaagtcgcacagatgcag

SEQ ID NO: 59676 - DNA, 33 bp, Homo sapien
aaagaggaactagcacgagtcgcacagatgcag

SEQ ID NO: 59677 - DNA, 33 bp, Homo sapien
ctttctagatccatgaacttgctatgtgcacgg

SEQ ID NO: 59678 - DNA, 33 bp, Homo sapien
ctttctagatccatgaccttgctatgtgcacgg

SEQ ID NO: 59679 - DNA, 33 bp, Homo sapien
ggaataattttgaaaacatcgagatgaaactga

SEQ ID NO: 59680 - DNA, 33 bp, Homo sapien
ggaataattttgaaaatatcgagatgaaactga

SEQ ID NO: 59681 - DNA, 33 bp, Homo sapien
acacacacaaaaactaccctgagacaggaatct

SEQ ID NO: 59682 - DNA, 33 bp, Homo sapien
acacacacaaaaactatcctgagacaggaatct

SEQ ID NO: 59683 - DNA, 33 bp, Homo sapien
cctgtagtgtccctaacgaccgtgtctggacat

SEQ ID NO: 59684 - DNA, 33 bp, Homo sapien
cctgtagtgtccctaatgaccgtgtctggacat

SEQ ID NO: 59685 - DNA, 33 bp, Homo sapien
gtatacatattttcaacgagaggtcttaataat

SEQ ID NO: 59686 - DNA, 33 bp, Homo sapien
gtatacatattttcaatgagaggtcttaataat

SEQ ID NO: 59687 - DNA, 33 bp, Homo sapien
atgctgaacaataaaacggacaaagaatgtatt

SEQ ID NO: 59688 - DNA, 33 bp, Homo sapien
atgctgaacaataaaatggacaaagaatgtatt

SEQ ID NO: 59689 - DNA, 33 bp, Homo sapien
cccctcatagccttgactagatattgccctttt

SEQ ID NO: 59690 - DNA, 33 bp, Homo sapien
cccctcatagccttgagtagatattgccctttt

SEQ ID NO: 59691 - DNA, 33 bp, Homo sapien
atgataacaatatcaaaattactgttaactgca

SEQ ID NO: 59692 - DNA, 33 bp, Homo sapien
atgataacaatatcaagattactgttaactgca

SEQ ID NO: 59693 - DNA, 33 bp, Homo sapien
gtccttcttgaagtgaaaaaagtcttgttaata

SEQ ID NO: 59694 - DNA, 33 bp, Homo sapien
gtccttcttgaagtgagaaaagtcttgttaata

SEQ ID NO: 59695 - DNA, 33 bp, Homo sapien
ccagtgtttattctaacgagagggaaaccatct

SEQ ID NO: 59696 - DNA, 33 bp, Homo sapien
ccagtgtttattctaatgagagggaaaccatct

SEQ ID NO: 59697 - DNA, 33 bp, Homo sapien
tggcaaatagaaaacaagaagggaataccaagc

SEQ ID NO: 59698 - DNA, 33 bp, Homo sapien
tggcaaatagaaaacaggaagggaataccaagc

SEQ ID NO: 59699 - DNA, 33 bp, Homo sapien
ttctagtttacatttgaagcagcaattgttgaa

SEQ ID NO: 59700 - DNA, 33 bp, Homo sapien
ttctagtttacatttggagcagcaattgttgaa

SEQ ID NO: 59701 - DNA, 33 bp, Homo sapien
gcaggtgcctcttgtacgattccagatatggag

SEQ ID NO: 59702 - DNA, 33 bp, Homo sapien
gcaggtgcctcttgtatgattccagatatggag

SEQ ID NO: 59703 - DNA, 33 bp, Homo sapien
taacataagaattctaaatggtgcaaattatta

SEQ ID NO: 59704 - DNA, 33 bp, Homo sapien
taacataagaattctagatggtgcaaattatta

SEQ ID NO: 59705 - DNA, 33 bp, Homo sapien
atgatacacattagcaatctctcaatattgatg

SEQ ID NO: 59706 - DNA, 33 bp, Homo sapien
atgatacacattagcagtctctcaatattgatg

SEQ ID NO: 59707 - DNA, 33 bp, Homo sapien
agttcacttgttcctcaaactctagtaccccac

SEQ ID NO: 59708 - DNA, 33 bp, Homo sapien
agttcacttgttcctccaactctagtaccccac

SEQ ID NO: 59709 - DNA, 33 bp, Homo sapien
gtatctacaaaacaaaatttgtaaaggcagcac

SEQ ID NO: 59710 - DNA, 33 bp, Homo sapien
gtatctacaaaacaaagtttgtaaaggcagcac

SEQ ID NO: 59711 - DNA, 33 bp, Homo sapien
gccttcttatagcagacggagctgaaaggaacc

SEQ ID NO: 59712 - DNA, 33 bp, Homo sapien
gccttcttatagcagatggagctgaaaggaacc

SEQ ID NO: 59713 - DNA, 33 bp, Homo sapien
atggtaaataattcaaagtttgcttttagtgca

SEQ ID NO: 59714 - DNA, 33 bp, Homo sapien
atggtaaataattcaaggtttgcttttagtgca

SEQ ID NO: 59715 - DNA, 33 bp, Homo sapien
aaagttcaaatgaacgaatagacacaaactgtg

SEQ ID NO: 59716 - DNA, 33 bp, Homo sapien
aaagttcaaatgaacggatagacacaaactgtg

SEQ ID NO: 59717 - DNA, 33 bp, Homo sapien
ggtctgctttgggatccatctgtttccttaaaa

SEQ ID NO: 59718 - DNA, 33 bp, Homo sapien
ggtctgctttgggatctatctgtttccttaaaa

SEQ ID NO: 59719 - DNA, 33 bp, Homo sapien
caaagtgctgggattacatggacatttttattg

SEQ ID NO: 59720 - DNA, 33 bp, Homo sapien
caaagtgctgggattatatggacatttttattg

SEQ ID NO: 59721 - DNA, 33 bp, Homo sapien
gacttcaggaaatttacgattatggcagaagag

SEQ ID NO: 59722 - DNA, 33 bp, Homo sapien
gacttcaggaaatttatgattatggcagaagag

SEQ ID NO: 59723 - DNA, 33 bp, Homo sapien
tattatgaaaaaagccactctgaacattcatgt

SEQ ID NO: 59724 - DNA, 33 bp, Homo sapien
tattatgaaaaaagccgctctgaacattcatgt

SEQ ID NO: 59725 - DNA, 33 bp, Homo sapien
tacgatttggaataagcaaatctgaggttctgt

SEQ ID NO: 59726 - DNA, 33 bp, Homo sapien
tacgatttggaataaggaaatctgaggttctgt

SEQ ID NO: 59727 - DNA, 33 bp, Homo sapien
tctaggatggcacacaactgaggaaaatattaa

SEQ ID NO: 59728 - DNA, 33 bp, Homo sapien
tctaggatggcacacagctgaggaaaatattaa

SEQ ID NO: 59729 - DNA, 33 bp, Homo sapien
tataaaccctctctggaaaaccccattgggtaa

SEQ ID NO: 59730 - DNA, 33 bp, Homo sapien
tataaaccctctctggtaaaccccattgggtaa

SEQ ID NO: 59731 - DNA, 33 bp, Homo sapien
ttccctggtcaatgtcacatcaccatgagttag

SEQ ID NO: 59732 - DNA, 33 bp, Homo sapien
ttccctggtcaatgtcgcatcaccatgagttag

SEQ ID NO: 59733 - DNA, 33 bp, Homo sapien
ttgcttttcctcatacaaatgaaagaatatgtg

SEQ ID NO: 59734 - DNA, 33 bp, Homo sapien
ttgcttttcctcatacgaatgaaagaatatgtg

SEQ ID NO: 59735 - DNA, 33 bp, Homo sapien
catattttgctttttacgttatcaacacatatt

SEQ ID NO: 59736 - DNA, 33 bp, Homo sapien
catattttgctttttatgttatcaacacatatt

SEQ ID NO: 59737 - DNA, 33 bp, Homo sapien
aataaaaaggtaatagaatagcacataatggtg

SEQ ID NO: 59738 - DNA, 33 bp, Homo sapien
aataaaaaggtaataggatagcacataatggtg

SEQ ID NO: 59739 - DNA, 33 bp, Homo sapien
ttggagaggtaaatgacacaggaatggaaacat

SEQ ID NO: 59740 - DNA, 33 bp, Homo sapien
ttggagaggtaaatgatacaggaatggaaacat

SEQ ID NO: 59741 - DNA, 33 bp, Homo sapien
ttggaacagtttgcacagaggaatggttcctga

SEQ ID NO: 59742 - DNA, 33 bp, Homo sapien
ttggaacagtttgcacggaggaatggttcctga

SEQ ID NO: 59743 - DNA, 33 bp, Homo sapien
caaccctacattgctaagttaatctaattgagt

SEQ ID NO: 59744 - DNA, 33 bp, Homo sapien
caaccctacattgctaggttaatctaattgagt

SEQ ID NO: 59745 - DNA, 33 bp, Homo sapien
ccacagcttctgtcaaatgattccatcctagtg

SEQ ID NO: 59746 - DNA, 33 bp, Homo sapien
ccacagcttctgtcaagtgattccatcctagtg

SEQ ID NO: 59747 - DNA, 33 bp, Homo sapien
gggaagaaaggaattgcaggctgatgatagtag

SEQ ID NO: 59748 - DNA, 33 bp, Homo sapien
gggaagaaaggaattgtaggctgatgatagtag

SEQ ID NO: 59749 - DNA, 33 bp, Homo sapien
caaaagtaaggattcactaagatacatagcaga

SEQ ID NO: 59750 - DNA, 33 bp, Homo sapien
caaaagtaaggattcattaagatacatagcaga

SEQ ID NO: 59751 - DNA, 33 bp, Homo sapien
tttgaggtttagttataaggtgaatacacattt

SEQ ID NO: 59752 - DNA, 33 bp, Homo sapien
tttgaggtttagttattaggtgaatacacattt

SEQ ID NO: 59753 - DNA, 33 bp, Homo sapien
tcttagggcaaaagcactcaggttaaatactaa

SEQ ID NO: 59754 - DNA, 33 bp, Homo sapien
tcttagggcaaaagcattcaggttaaatactaa

SEQ ID NO: 59755 - DNA, 33 bp, Homo sapien
attttcatttccctaacgatgaatgatattgag

SEQ ID NO: 59756 - DNA, 33 bp, Homo sapien
attttcatttccctaatgatgaatgatattgag

SEQ ID NO: 59757 - DNA, 33 bp, Homo sapien
acaagagagatccatgaagtagtgttgcctaac

SEQ ID NO: 59758 - DNA, 33 bp, Homo sapien
acaagagagatccatggagtagtgttgcctaac

SEQ ID NO: 59759 - DNA, 33 bp, Homo sapien
gggctggttccagtcccgatctttctatttatc

SEQ ID NO: 59760 - DNA, 33 bp, Homo sapien
gggctggttccagtcctgatctttctatttatc

SEQ ID NO: 59761 - DNA, 33 bp, Homo sapien
agcccaatatctcaaactttctctcaggtttta

SEQ ID NO: 59762 - DNA, 33 bp, Homo sapien
agcccaatatctcaaattttctctcaggtttta

SEQ ID NO: 59763 - DNA, 33 bp, Homo sapien
tgctgtctgttacccacgaaagacatcatctgt

SEQ ID NO: 59764 - DNA, 33 bp, Homo sapien
tgctgtctgttacccatgaaagacatcatctgt

SEQ ID NO: 59765 - DNA, 33 bp, Homo sapien
tttctcatttctgcccgcttaaagtgaaatagg

SEQ ID NO: 59766 - DNA, 33 bp, Homo sapien
tttctcatttctgccctcttaaagtgaaatagg

SEQ ID NO: 59767 - DNA, 33 bp, Homo sapien
aagcagttctctgagtaaagtcaatcaaacaat

SEQ ID NO: 59768 - DNA, 33 bp, Homo sapien
aagcagttctctgagtgaagtcaatcaaacaat

SEQ ID NO: 59769 - DNA, 33 bp, Homo sapien
tttgagaggaaggaacaatcatggcagggttta

SEQ ID NO: 59770 - DNA, 33 bp, Homo sapien
tttgagaggaaggaacgatcatggcagggttta

SEQ ID NO: 59771 - DNA, 33 bp, Homo sapien
ttgattagcttatacaatgcctgagccccactg

SEQ ID NO: 59772 - DNA, 33 bp, Homo sapien
ttgattagcttatacagtgcctgagccccactg

SEQ ID NO: 59773 - DNA, 33 bp, Homo sapien
aaagctattctgggacccttcaactagaccaga

SEQ ID NO: 59774 - DNA, 33 bp, Homo sapien
aaagctattctgggactcttcaactagaccaga

SEQ ID NO: 59775 - DNA, 33 bp, Homo sapien
ggtagactgaaaacaacggatgggtagttctgc

SEQ ID NO: 59776 - DNA, 33 bp, Homo sapien
ggtagactgaaaacaatggatgggtagttctgc

SEQ ID NO: 59777 - DNA, 33 bp, Homo sapien
agaatccctgtttctaataatgataccactgtt

SEQ ID NO: 59778 - DNA, 33 bp, Homo sapien
agaatccctgtttctactaatgataccactgtt

SEQ ID NO: 59779 - DNA, 33 bp, Homo sapien
agtggtgttaaggaggaagtaaagctgaaatgg

SEQ ID NO: 59780 - DNA, 33 bp, Homo sapien
agtggtgttaaggaggtagtaaagctgaaatgg

SEQ ID NO: 59781 - DNA, 33 bp, Homo sapien
ggatttaagagttgcacggagggagaggagttt

SEQ ID NO: 59782 - DNA, 33 bp, Homo sapien
ggatttaagagttgcatggagggagaggagttt

SEQ ID NO: 59783 - DNA, 33 bp, Homo sapien
aaaatgtggtcggcaaacttcttaaaatccact

SEQ ID NO: 59784 - DNA, 33 bp, Homo sapien
aaaatgtggtcggcaagcttcttaaaatccact

SEQ ID NO: 59785 - DNA, 33 bp, Homo sapien
catgtgtatgacaaaccaatgtgctctgaaaaa

SEQ ID NO: 59786 - DNA, 33 bp, Homo sapien
catgtgtatgacaaacgaatgtgctctgaaaaa

SEQ ID NO: 59787 - DNA, 33 bp, Homo sapien
aatggtgtcacctataagaaagaaaattgaggg

SEQ ID NO: 59788 - DNA, 33 bp, Homo sapien
aatggtgtcacctatacgaaagaaaattgaggg

SEQ ID NO: 59789 - DNA, 33 bp, Homo sapien
gagaaacaagcattaaaaaagtcatgaaaacgc

SEQ ID NO: 59790 - DNA, 33 bp, Homo sapien
gagaaacaagcattaacaaagtcatgaaaacgc

SEQ ID NO: 59791 - DNA, 33 bp, Homo sapien
tttactgacaagatcacggtactgtgaccacaa

SEQ ID NO: 59792 - DNA, 33 bp, Homo sapien
tttactgacaagatcatggtactgtgaccacaa

SEQ ID NO: 59793 - DNA, 33 bp, Homo sapien
ttgactatccctaaccactgagaagccattcct

SEQ ID NO: 59794 - DNA, 33 bp, Homo sapien
ttgactatccctaaccgctgagaagccattcct

SEQ ID NO: 59795 - DNA, 33 bp, Homo sapien
cagatgggtactacaaggtttgttctaaaacta

SEQ ID NO: 59796 - DNA, 33 bp, Homo sapien
cagatgggtactacaatgtttgttctaaaacta

SEQ ID NO: 59797 - DNA, 33 bp, Homo sapien
ggagagagatatgtgaagaaagattaacgggaa

SEQ ID NO: 59798 - DNA, 33 bp, Homo sapien
ggagagagatatgtgaggaaagattaacgggaa

SEQ ID NO: 59799 - DNA, 33 bp, Homo sapien
tgagctccacacttcaaacatattagcacattt

SEQ ID NO: 59800 - DNA, 33 bp, Homo sapien
tgagctccacacttcacacatattagcacattt

SEQ ID NO: 59801 - DNA, 33 bp, Homo sapien
acaattgtttggctgacagctttcttcctccca

SEQ ID NO: 59802 - DNA, 33 bp, Homo sapien
acaattgtttggctgatagctttcttcctccca

SEQ ID NO: 59803 - DNA, 33 bp, Homo sapien
tgcaccataagcaagcaaatttaagtcagataa

SEQ ID NO: 59804 - DNA, 33 bp, Homo sapien
tgcaccataagcaagcgaatttaagtcagataa

SEQ ID NO: 59805 - DNA, 33 bp, Homo sapien
gaggtgacactgagaccataactcacctgtagg

SEQ ID NO: 59806 - DNA, 33 bp, Homo sapien
gaggtgacactgagactataactcacctgtagg

SEQ ID NO: 59807 - DNA, 33 bp, Homo sapien
tttgtaagctataggcaaaaaagaaaagtattc

SEQ ID NO: 59808 - DNA, 33 bp, Homo sapien
tttgtaagctataggcgaaaaagaaaagtattc

SEQ ID NO: 59809 - DNA, 33 bp, Homo sapien
ttgcagaaattggacacgacatcgttgacaggt

SEQ ID NO: 59810 - DNA, 33 bp, Homo sapien
ttgcagaaattggacatgacatcgttgacaggt

SEQ ID NO: 59811 - DNA, 33 bp, Homo sapien
aggagatgggttgaagaatgtgaggaaacaaga

SEQ ID NO: 59812 - DNA, 33 bp, Homo sapien
aggagatgggttgaaggatgtgaggaaacaaga

SEQ ID NO: 59813 - DNA, 33 bp, Homo sapien
gtagtgacagatgctacgaggcacaaggaacag

SEQ ID NO: 59814 - DNA, 33 bp, Homo sapien
gtagtgacagatgctatgaggcacaaggaacag

SEQ ID NO: 59815 - DNA, 33 bp, Homo sapien
gaatgaaccttcacaacgcaggacaaagcagga

SEQ ID NO: 59816 - DNA, 33 bp, Homo sapien
gaatgaaccttcacaatgcaggacaaagcagga

SEQ ID NO: 59817 - DNA, 33 bp, Homo sapien
gacaccagaaactggaagcaatatgggttccca

SEQ ID NO: 59818 - DNA, 33 bp, Homo sapien
gacaccagaaactggaggcaatatgggttccca

SEQ ID NO: 59819 - DNA, 33 bp, Homo sapien
ccgataggcatctaccactgatggggactcaga

SEQ ID NO: 59820 - DNA, 33 bp, Homo sapien
ccgataggcatctaccgctgatggggactcaga

SEQ ID NO: 59821 - DNA, 33 bp, Homo sapien
gactctgtgattgacacaatggagagaaagatc

SEQ ID NO: 59822 - DNA, 33 bp, Homo sapien
gactctgtgattgacataatggagagaaagatc

SEQ ID NO: 59823 - DNA, 33 bp, Homo sapien
catccttatgctgataaactgaattagcactca

SEQ ID NO: 59824 - DNA, 33 bp, Homo sapien
catccttatgctgatagactgaattagcactca

SEQ ID NO: 59825 - DNA, 33 bp, Homo sapien
aaagcgatgctgaatcaaacttatgattacaat

SEQ ID NO: 59826 - DNA, 33 bp, Homo sapien
aaagcgatgctgaatcgaacttatgattacaat

SEQ ID NO: 59827 - DNA, 33 bp, Homo sapien
cccctgaaatcaggacacgtaaagcagtattgt

SEQ ID NO: 59828 - DNA, 33 bp, Homo sapien
cccctgaaatcaggacgcgtaaagcagtattgt

SEQ ID NO: 59829 - DNA, 33 bp, Homo sapien
aactaaacagaggaaacaaatgatccagaagtg

SEQ ID NO: 59830 - DNA, 33 bp, Homo sapien
aactaaacagaggaaagaaatgatccagaagtg

SEQ ID NO: 59831 - DNA, 33 bp, Homo sapien
gcggaaaggagacttacggaacagggacaaaga

SEQ ID NO: 59832 - DNA, 33 bp, Homo sapien
gcggaaaggagacttatggaacagggacaaaga

SEQ ID NO: 59833 - DNA, 33 bp, Homo sapien
acgaatgctgctccatcaatgaatttaggaatc

SEQ ID NO: 59834 - DNA, 33 bp, Homo sapien
acgaatgctgctccattaatgaatttaggaatc

SEQ ID NO: 59835 - DNA, 33 bp, Homo sapien
acaccttttgataagcactaggtcagggtaagc

SEQ ID NO: 59836 - DNA, 33 bp, Homo sapien
acaccttttgataagcgctaggtcagggtaagc

SEQ ID NO: 59837 - DNA, 33 bp, Homo sapien
aatttttctcctctgccatttccttacagttat

SEQ ID NO: 59838 - DNA, 33 bp, Homo sapien
aatttttctcctctgctatttccttacagttat

SEQ ID NO: 59839 - DNA, 33 bp, Homo sapien
attcctgcctagtggacggttttcaagacggaa

SEQ ID NO: 59840 - DNA, 33 bp, Homo sapien
attcctgcctagtggatggttttcaagacggaa

SEQ ID NO: 59841 - DNA, 33 bp, Homo sapien
atacatacctgaaaacagagaattgatcataaa

SEQ ID NO: 59842 - DNA, 33 bp, Homo sapien
atacatacctgaaaacggagaattgatcataaa

SEQ ID NO: 59843 - DNA, 33 bp, Homo sapien
tatgtttgctcatgaacaaaatgcatatactaa

SEQ ID NO: 59844 - DNA, 33 bp, Homo sapien
tatgtttgctcatgaataaaatgcatatactaa

SEQ ID NO: 59845 - DNA, 33 bp, Homo sapien
tgcaatgttgagaagaccaaataaaagactata

SEQ ID NO: 59846 - DNA, 33 bp, Homo sapien
tgcaatgttgagaagagcaaataaaagactata

SEQ ID NO: 59847 - DNA, 33 bp, Homo sapien
ggagaatcagatttcaagacttcagtttcttca

SEQ ID NO: 59848 - DNA, 33 bp, Homo sapien
ggagaatcagatttcaggacttcagtttcttca

SEQ ID NO: 59849 - DNA, 33 bp, Homo sapien
gcactgaacccaaagccagaataatgggcttga

SEQ ID NO: 59850 - DNA, 33 bp, Homo sapien
gcactgaacccaaagcgagaataatgggcttga

SEQ ID NO: 59851 - DNA, 33 bp, Homo sapien
aagattataaacaacacgaacaggagagtcagt

SEQ ID NO: 59852 - DNA, 33 bp, Homo sapien
aagattataaacaacatgaacaggagagtcagt

SEQ ID NO: 59853 - DNA, 33 bp, Homo sapien
agccatagatgtcccactcatcagttgtagatt

SEQ ID NO: 59854 - DNA, 33 bp, Homo sapien
agccatagatgtcccattcatcagttgtagatt

SEQ ID NO: 59855 - DNA, 33 bp, Homo sapien
ataaaagtgtattttacgttgacttatgattaa

SEQ ID NO: 59856 - DNA, 33 bp, Homo sapien
ataaaagtgtattttatgttgacttatgattaa

SEQ ID NO: 59857 - DNA, 33 bp, Homo sapien
agctgcagctgctccacagtttttggggattca

SEQ ID NO: 59858 - DNA, 33 bp, Homo sapien
agctgcagctgctccatagtttttggggattca

SEQ ID NO: 59859 - DNA, 33 bp, Homo sapien
ccttgatgttgtctggccaatgaacaggaatta

SEQ ID NO: 59860 - DNA, 33 bp, Homo sapien
ccttgatgttgtctgggcaatgaacaggaatta

SEQ ID NO: 59861 - DNA, 33 bp, Homo sapien
ggataaaaatgtgctaagcaaaatatgttggcc

SEQ ID NO: 59862 - DNA, 33 bp, Homo sapien
ggataaaaatgtgctaggcaaaatatgttggcc

SEQ ID NO: 59863 - DNA, 33 bp, Homo sapien
aaatgaataatttccaagaagagagtaaacagg

SEQ ID NO: 59864 - DNA, 33 bp, Homo sapien
aaatgaataatttccatgaagagagtaaacagg

SEQ ID NO: 59865 - DNA, 33 bp, Homo sapien
catgttaggaccaagacggggtaggaggagccc

SEQ ID NO: 59866 - DNA, 33 bp, Homo sapien
catgttaggaccaagatggggtaggaggagccc

SEQ ID NO: 59867 - DNA, 33 bp, Homo sapien
tttttccacagccaagcagtaaagcgtctcatc

SEQ ID NO: 59868 - DNA, 33 bp, Homo sapien
tttttccacagccaagtagtaaagcgtctcatc

SEQ ID NO: 59869 - DNA, 33 bp, Homo sapien
tcagcaggtgggacacagaaactgaggacacag

SEQ ID NO: 59870 - DNA, 33 bp, Homo sapien
tcagcaggtgggacacggaaactgaggacacag

SEQ ID NO: 59871 - DNA, 33 bp, Homo sapien
tatagaagaggtctgcaattggtggagtagcag

SEQ ID NO: 59872 - DNA, 33 bp, Homo sapien
tatagaagaggtctgcgattggtggagtagcag

SEQ ID NO: 59873 - DNA, 33 bp, Homo sapien
attgagcaagatgtaactaattctctcaaccca

SEQ ID NO: 59874 - DNA, 33 bp, Homo sapien
attgagcaagatgtaagtaattctctcaaccca

SEQ ID NO: 59875 - DNA, 33 bp, Homo sapien
atgagtgcttcattgactatatttctgaggcat

SEQ ID NO: 59876 - DNA, 33 bp, Homo sapien
atgagtgcttcattgattatatttctgaggcat

SEQ ID NO: 59877 - DNA, 33 bp, Homo sapien
aaaaagtaggaggtaaacagtaacacaaaggat

SEQ ID NO: 59878 - DNA, 33 bp, Homo sapien
aaaaagtaggaggtaaccagtaacacaaaggat

SEQ ID NO: 59879 - DNA, 33 bp, Homo sapien
tattgtgtgctttaccaaatctcccacaatgct

SEQ ID NO: 59880 - DNA, 33 bp, Homo sapien
tattgtgtgctttaccgaatctcccacaatgct

SEQ ID NO: 59881 - DNA, 33 bp, Homo sapien
atcagtctgagatataagttagaggaatctctg

SEQ ID NO: 59882 - DNA, 33 bp, Homo sapien
atcagtctgagatatatgttagaggaatctctg

SEQ ID NO: 59883 - DNA, 33 bp, Homo sapien
aaagtttccttgccaagatcaccatttaatgag

SEQ ID NO: 59884 - DNA, 33 bp, Homo sapien
aaagtttccttgccaatatcaccatttaatgag

SEQ ID NO: 59885 - DNA, 33 bp, Homo sapien
ggtttctgaggccatacacagttaataaaatgt

SEQ ID NO: 59886 - DNA, 33 bp, Homo sapien
ggtttctgaggccatatacagttaataaaatgt

SEQ ID NO: 59887 - DNA, 33 bp, Homo sapien
cactgccattgatgacagaagagccaagaaaaa

SEQ ID NO: 59888 - DNA, 33 bp, Homo sapien
cactgccattgatgacggaagagccaagaaaaa

SEQ ID NO: 59889 - DNA, 33 bp, Homo sapien
catgctattctgaaggaaaatctgacctaagtc

SEQ ID NO: 59890 - DNA, 33 bp, Homo sapien
catgctattctgaaggcaaatctgacctaagtc

SEQ ID NO: 59891 - DNA, 33 bp, Homo sapien
tgaaacagccagcatacgaaaatattttagaaa

SEQ ID NO: 59892 - DNA, 33 bp, Homo sapien
tgaaacagccagcatatgaaaatattttagaaa

SEQ ID NO: 59893 - DNA, 33 bp, Homo sapien
agccacatacattcaaaggcctgtaaagaaacc

SEQ ID NO: 59894 - DNA, 33 bp, Homo sapien
agccacatacattcaagggcctgtaaagaaacc

SEQ ID NO: 59895 - DNA, 33 bp, Homo sapien
ataaatagttttcaaacgatcatcatatgtgta

SEQ ID NO: 59896 - DNA, 33 bp, Homo sapien
ataaatagttttcaaatgatcatcatatgtgta

SEQ ID NO: 59897 - DNA, 33 bp, Homo sapien
cttcatagcatgttgaagaaagatcctaagagt

SEQ ID NO: 59898 - DNA, 33 bp, Homo sapien
cttcatagcatgttgacgaaagatcctaagagt

SEQ ID NO: 59899 - DNA, 33 bp, Homo sapien
aagctgctaagaactccaacttagttttgccta

SEQ ID NO: 59900 - DNA, 33 bp, Homo sapien
aagctgctaagaactctaacttagttttgccta

SEQ ID NO: 59901 - DNA, 33 bp, Homo sapien
attaaagatattaacaaaaagcagctctcacct

SEQ ID NO: 59902 - DNA, 33 bp, Homo sapien
attaaagatattaacagaaagcagctctcacct

SEQ ID NO: 59903 - DNA, 33 bp, Homo sapien
ctccagtcttccgagaaacaaggagagcaataa

SEQ ID NO: 59904 - DNA, 33 bp, Homo sapien
ctccagtcttccgagagacaaggagagcaataa

SEQ ID NO: 59905 - DNA, 33 bp, Homo sapien
ctcatctttgcaacctaagcacccagagtagat

SEQ ID NO: 59906 - DNA, 33 bp, Homo sapien
ctcatctttgcaacctgagcacccagagtagat

SEQ ID NO: 59907 - DNA, 33 bp, Homo sapien
cagaatcagatgatataaattgaagtttctaat

SEQ ID NO: 59908 - DNA, 33 bp, Homo sapien
cagaatcagatgatatgaattgaagtttctaat

SEQ ID NO: 59909 - DNA, 33 bp, Homo sapien
ataggtttcgtaatccacagctaagctttttac

SEQ ID NO: 59910 - DNA, 33 bp, Homo sapien
ataggtttcgtaatcctcagctaagctttttac

SEQ ID NO: 59911 - DNA, 33 bp, Homo sapien
tattgagaaattagtaagggaccagctcatcaa

SEQ ID NO: 59912 - DNA, 33 bp, Homo sapien
tattgagaaattagtaggggaccagctcatcaa

SEQ ID NO: 59913 - DNA, 33 bp, Homo sapien
cactatgattaggcaaagaagggatgttatatg

SEQ ID NO: 59914 - DNA, 33 bp, Homo sapien
cactatgattaggcaacgaagggatgttatatg

SEQ ID NO: 59915 - DNA, 33 bp, Homo sapien
gtcattacacaggtcaatagatccattatactt

SEQ ID NO: 59916 - DNA, 33 bp, Homo sapien
gtcattacacaggtcagtagatccattatactt

SEQ ID NO: 59917 - DNA, 33 bp, Homo sapien
cttcttggctccagtacattcttaatgctgagg

SEQ ID NO: 59918 - DNA, 33 bp, Homo sapien
cttcttggctccagtagattcttaatgctgagg

SEQ ID NO: 59919 - DNA, 33 bp, Homo sapien
tagtgaggaatgaaaaaggtggacttaacacaa

SEQ ID NO: 59920 - DNA, 33 bp, Homo sapien
tagtgaggaatgaaaagggtggacttaacacaa

SEQ ID NO: 59921 - DNA, 33 bp, Homo sapien
tcttctacgcgtcttcgaagctgtgtctccctt

SEQ ID NO: 59922 - DNA, 33 bp, Homo sapien
tcttctacgcgtcttctaagctgtgtctccctt

SEQ ID NO: 59923 - DNA, 33 bp, Homo sapien
cacaaatattcagataaagcagtgtcctttaaa

SEQ ID NO: 59924 - DNA, 33 bp, Homo sapien
cacaaatattcagatatagcagtgtcctttaaa

SEQ ID NO: 59925 - DNA, 33 bp, Homo sapien
ctataaaactgggtaacgcacaagcagttctgg

SEQ ID NO: 59926 - DNA, 33 bp, Homo sapien
ctataaaactgggtaatgcacaagcagttctgg

SEQ ID NO: 59927 - DNA, 33 bp, Homo sapien
acttgtaatttccacaaccattgaagtaactta

SEQ ID NO: 59928 - DNA, 33 bp, Homo sapien
acttgtaatttccacatccattgaagtaactta

SEQ ID NO: 59929 - DNA, 33 bp, Homo sapien
ccatcctttttcttcaaatattttcaatacacg

SEQ ID NO: 59930 - DNA, 33 bp, Homo sapien
ccatcctttttcttcagatattttcaatacacg

SEQ ID NO: 59931 - DNA, 33 bp, Homo sapien
aaggctcagaagctaactcaatgaggttcacct

SEQ ID NO: 59932 - DNA, 33 bp, Homo sapien
aaggctcagaagctaattcaatgaggttcacct

SEQ ID NO: 59933 - DNA, 33 bp, Homo sapien
tttataagccataacacactacctagatgccaa

SEQ ID NO: 59934 - DNA, 33 bp, Homo sapien
tttataagccataacatactacctagatgccaa

SEQ ID NO: 59935 - DNA, 33 bp, Homo sapien
ttttaggtctccttacggacaaactcactacca

SEQ ID NO: 59936 - DNA, 33 bp, Homo sapien
ttttaggtctccttactgacaaactcactacca

SEQ ID NO: 59937 - DNA, 33 bp, Homo sapien
acctcatgatttattaactgctactggtggcca

SEQ ID NO: 59938 - DNA, 33 bp, Homo sapien
acctcatgatttattagctgctactggtggcca

SEQ ID NO: 59939 - DNA, 33 bp, Homo sapien
ttttggtgctgacatggattctttggcagatct

SEQ ID NO: 59940 - DNA, 33 bp, Homo sapien
ttttggtgctgacatgtattctttggcagatct

SEQ ID NO: 59941 - DNA, 33 bp, Homo sapien
gaaatctgtgtattagaaaaattgctcataagg

SEQ ID NO: 59942 - DNA, 33 bp, Homo sapien
gaaatctgtgtattagcaaaattgctcataagg

SEQ ID NO: 59943 - DNA, 33 bp, Homo sapien
aaaaataattaaaacaccgcttctactatttcc

SEQ ID NO: 59944 - DNA, 33 bp, Homo sapien
aaaaataattaaaacatcgcttctactatttcc

SEQ ID NO: 59945 - DNA, 33 bp, Homo sapien
taggacaccttttgtacaaagtttgaaagcata

SEQ ID NO: 59946 - DNA, 33 bp, Homo sapien
taggacaccttttgtataaagtttgaaagcata

SEQ ID NO: 59947 - DNA, 33 bp, Homo sapien
gcctgccattaatctacagcatcagtgttacgc

SEQ ID NO: 59948 - DNA, 33 bp, Homo sapien
gcctgccattaatctatagcatcagtgttacgc

SEQ ID NO: 59949 - DNA, 33 bp, Homo sapien
gagggccgcaacattcccttaacggattcattc

SEQ ID NO: 59950 - DNA, 33 bp, Homo sapien
gagggccgcaacattctcttaacggattcattc

SEQ ID NO: 59951 - DNA, 33 bp, Homo sapien
gagggttggaaaagccgagccgattgtgggtgg

SEQ ID NO: 59952 - DNA, 33 bp, Homo sapien
gagggttggaaaagcctagccgattgtgggtgg

SEQ ID NO: 59953 - DNA, 33 bp, Homo sapien
ttatatgtttaatggaagagaaaacgaggttca

SEQ ID NO: 59954 - DNA, 33 bp, Homo sapien
ttatatgtttaatggaggagaaaacgaggttca

SEQ ID NO: 59955 - DNA, 33 bp, Homo sapien
tgaatgtgctgaatgacaccactccatgccaat

SEQ ID NO: 59956 - DNA, 33 bp, Homo sapien
tgaatgtgctgaatgagaccactccatgccaat

SEQ ID NO: 59957 - DNA, 33 bp, Homo sapien
taatcctcacaaaacactgcaagatatttacta

SEQ ID NO: 59958 - DNA, 33 bp, Homo sapien
taatcctcacaaaacattgcaagatatttacta

SEQ ID NO: 59959 - DNA, 33 bp, Homo sapien
cagaaatagtgaaaataatgctgctctcagtct

SEQ ID NO: 59960 - DNA, 33 bp, Homo sapien
cagaaatagtgaaaatgatgctgctctcagtct

SEQ ID NO: 59961 - DNA, 33 bp, Homo sapien
atcaggtaggatagggaatcaagtctatattca

SEQ ID NO: 59962 - DNA, 33 bp, Homo sapien
atcaggtaggatagggcatcaagtctatattca

SEQ ID NO: 59963 - DNA, 33 bp, Homo sapien
tagttgctacggtgacaatggtaattatcaaga

SEQ ID NO: 59964 - DNA, 33 bp, Homo sapien
tagttgctacggtgacgatggtaattatcaaga

SEQ ID NO: 59965 - DNA, 33 bp, Homo sapien
gagttgttttgatccaataaatttgtagtaatt

SEQ ID NO: 59966 - DNA, 33 bp, Homo sapien
gagttgttttgatccagtaaatttgtagtaatt

SEQ ID NO: 59967 - DNA, 33 bp, Homo sapien
ttatcctgaatgtgatgaccaccactatgttta

SEQ ID NO: 59968 - DNA, 33 bp, Homo sapien
ttatcctgaatgtgattaccaccactatgttta

SEQ ID NO: 59969 - DNA, 33 bp, Homo sapien
gaggaaagagctaaacagaaaggagactcaaaa

SEQ ID NO: 59970 - DNA, 33 bp, Homo sapien
gaggaaagagctaaacggaaaggagactcaaaa

SEQ ID NO: 59971 - DNA, 33 bp, Homo sapien
tgggtacccagatgagacaccaaaaaggacctg

SEQ ID NO: 59972 - DNA, 33 bp, Homo sapien
tgggtacccagatgaggcaccaaaaaggacctg

SEQ ID NO: 59973 - DNA, 33 bp, Homo sapien
aattaatagtgttaaacagtccagtgcttccct

SEQ ID NO: 59974 - DNA, 33 bp, Homo sapien
aattaatagtgttaaatagtccagtgcttccct

SEQ ID NO: 59975 - DNA, 33 bp, Homo sapien
cccagtgcatataaaaatttggctaggtgcagt

SEQ ID NO: 59976 - DNA, 33 bp, Homo sapien
cccagtgcatataaaagtttggctaggtgcagt

SEQ ID NO: 59977 - DNA, 33 bp, Homo sapien
atcttgccacaaaatcagaaaattgtatgcagt

SEQ ID NO: 59978 - DNA, 33 bp, Homo sapien
atcttgccacaaaatcggaaaattgtatgcagt

SEQ ID NO: 59979 - DNA, 33 bp, Homo sapien
tattccaggctttagaccaggagctccaggccc

SEQ ID NO: 59980 - DNA, 33 bp, Homo sapien
tattccaggctttagatcaggagctccaggccc

SEQ ID NO: 59981 - DNA, 33 bp, Homo sapien
tttagtctcttttctcaaaccaattttgcaatc

SEQ ID NO: 59982 - DNA, 33 bp, Homo sapien
tttagtctcttttctccaaccaattttgcaatc

SEQ ID NO: 59983 - DNA, 33 bp, Homo sapien
cttgctctcgccttgcacttgctcaagaatcta

SEQ ID NO: 59984 - DNA, 33 bp, Homo sapien
cttgctctcgccttgcgcttgctcaagaatcta

SEQ ID NO: 59985 - DNA, 33 bp, Homo sapien
aactatgaacaaatcaacaaagaatctctggct

SEQ ID NO: 59986 - DNA, 33 bp, Homo sapien
aactatgaacaaatcagcaaagaatctctggct

SEQ ID NO: 59987 - DNA, 33 bp, Homo sapien
agctaaagatagcagaataatctataaaaataa

SEQ ID NO: 59988 - DNA, 33 bp, Homo sapien
agctaaagatagcagactaatctataaaaataa

SEQ ID NO: 59989 - DNA, 33 bp, Homo sapien
ttcctcaaactatcaaactcatcaaaaacgacg

SEQ ID NO: 59990 - DNA, 33 bp, Homo sapien
ttcctcaaactatcaagctcatcaaaaacgacg

SEQ ID NO: 59991 - DNA, 33 bp, Homo sapien
cccggccattagacccaaacatctcgatggaag

SEQ ID NO: 59992 - DNA, 33 bp, Homo sapien
cccggccattagacccgaacatctcgatggaag

SEQ ID NO: 59993 - DNA, 33 bp, Homo sapien
gagtagaacaaaaaagccttctttcctatcttt

SEQ ID NO: 59994 - DNA, 33 bp, Homo sapien
gagtagaacaaaaaaggcttctttcctatcttt

SEQ ID NO: 59995 - DNA, 33 bp, Homo sapien
tgggatgaaaaagctcaagaactgctggcctaa

SEQ ID NO: 59996 - DNA, 33 bp, Homo sapien
tgggatgaaaaagctccagaactgctggcctaa

SEQ ID NO: 59997 - DNA, 33 bp, Homo sapien
agatggctctggattgaaagtaactatatataa

SEQ ID NO: 59998 - DNA, 33 bp, Homo sapien
agatggctctggattgcaagtaactatatataa

SEQ ID NO: 59999 - DNA, 33 bp, Homo sapien
agttattttcttcccccactacactggttctta

SEQ ID NO: 60000 - DNA, 33 bp, Homo sapien
agttattttcttcccctactacactggttctta

SEQ ID NO: 60001 - DNA, 33 bp, Homo sapien
agttctaatgacattaactacacagaaccatgc

SEQ ID NO: 60002 - DNA, 33 bp, Homo sapien
agttctaatgacattagctacacagaaccatgc

SEQ ID NO: 60003 - DNA, 33 bp, Homo sapien
cgtggctgcacacctcaccgttactgcttcctc

SEQ ID NO: 60004 - DNA, 33 bp, Homo sapien
cgtggctgcacacctcgccgttactgcttcctc

SEQ ID NO: 60005 - DNA, 33 bp, Homo sapien
caattatagaggcctacaagttccaagatctgc

SEQ ID NO: 60006 - DNA, 33 bp, Homo sapien
caattatagaggcctagaagttccaagatctgc

SEQ ID NO: 60007 - DNA, 33 bp, Homo sapien
aagtgttaggtagagagtcaagccactctgctg

SEQ ID NO: 60008 - DNA, 33 bp, Homo sapien
aagtgttaggtagagattcaagccactctgctg

SEQ ID NO: 60009 - DNA, 33 bp, Homo sapien
ttgaaatggaactaaaccattctgtaacagtga

SEQ ID NO: 60010 - DNA, 33 bp, Homo sapien
ttgaaatggaactaaatcattctgtaacagtga

SEQ ID NO: 60011 - DNA, 33 bp, Homo sapien
atttcatgtcaggatacctaatgggtgatatta

SEQ ID NO: 60012 - DNA, 33 bp, Homo sapien
atttcatgtcaggatatctaatgggtgatatta

SEQ ID NO: 60013 - DNA, 33 bp, Homo sapien
gggtttgagtagtctacgcagagggaaggataa

SEQ ID NO: 60014 - DNA, 33 bp, Homo sapien
gggtttgagtagtctatgcagagggaaggataa

SEQ ID NO: 60015 - DNA, 33 bp, Homo sapien
tcaaatagtttttggacattagtgtattaagca

SEQ ID NO: 60016 - DNA, 33 bp, Homo sapien
tcaaatagtttttggatattagtgtattaagca

SEQ ID NO: 60017 - DNA, 33 bp, Homo sapien
tcccttgggtttttacgccctgcctgaaacttt

SEQ ID NO: 60018 - DNA, 33 bp, Homo sapien
tcccttgggtttttactccctgcctgaaacttt

SEQ ID NO: 60019 - DNA, 33 bp, Homo sapien
tttgtctaaaggagacaccaaaggctgggagag

SEQ ID NO: 60020 - DNA, 33 bp, Homo sapien
tttgtctaaaggagacgccaaaggctgggagag

SEQ ID NO: 60021 - DNA, 33 bp, Homo sapien
cctacctctccttgaccctctcagtggagtccg

SEQ ID NO: 60022 - DNA, 33 bp, Homo sapien
cctacctctccttgactctctcagtggagtccg

SEQ ID NO: 60023 - DNA, 33 bp, Homo sapien
gtcccttcatgttccaataccctactgttttaa

SEQ ID NO: 60024 - DNA, 33 bp, Homo sapien
gtcccttcatgttccagtaccctactgttttaa

SEQ ID NO: 60025 - DNA, 33 bp, Homo sapien
tttattaagtggcatacaggatcataactggga

SEQ ID NO: 60026 - DNA, 33 bp, Homo sapien
tttattaagtggcatagaggatcataactggga

SEQ ID NO: 60027 - DNA, 33 bp, Homo sapien
ccaagaatgctccccacgtattcagttgatatc

SEQ ID NO: 60028 - DNA, 33 bp, Homo sapien
ccaagaatgctccccatgtattcagttgatatc

SEQ ID NO: 60029 - DNA, 33 bp, Homo sapien
attgtattaaactttacgttgccagcacctacc

SEQ ID NO: 60030 - DNA, 33 bp, Homo sapien
attgtattaaactttatgttgccagcacctacc

SEQ ID NO: 60031 - DNA, 33 bp, Homo sapien
agctttgtttacagcactgatatagaccttatc

SEQ ID NO: 60032 - DNA, 33 bp, Homo sapien
agctttgtttacagcattgatatagaccttatc

SEQ ID NO: 60033 - DNA, 33 bp, Homo sapien
gcccctggtggataaaatgggcccagacaggga

SEQ ID NO: 60034 - DNA, 33 bp, Homo sapien
gcccctggtggataaagtgggcccagacaggga

SEQ ID NO: 60035 - DNA, 33 bp, Homo sapien
cacagcaggtgaaaaagtctatccacctatgtc

SEQ ID NO: 60036 - DNA, 33 bp, Homo sapien
cacagcaggtgaaaaattctatccacctatgtc

SEQ ID NO: 60037 - DNA, 33 bp, Homo sapien
tgacactatgaatgcacgacatgttttaaacca

SEQ ID NO: 60038 - DNA, 33 bp, Homo sapien
tgacactatgaatgcatgacatgttttaaacca

SEQ ID NO: 60039 - DNA, 33 bp, Homo sapien
gcatctatcccatataccctaccttcctccaac

SEQ ID NO: 60040 - DNA, 33 bp, Homo sapien
gcatctatcccatatatcctaccttcctccaac

SEQ ID NO: 60041 - DNA, 33 bp, Homo sapien
ttaatcttcaccattaaccctatgtaacatttt

SEQ ID NO: 60042 - DNA, 33 bp, Homo sapien
ttaatcttcaccattatccctatgtaacatttt

SEQ ID NO: 60043 - DNA, 33 bp, Homo sapien
tcttgctttatactagacattcttggcctgtgg

SEQ ID NO: 60044 - DNA, 33 bp, Homo sapien
tcttgctttatactaggcattcttggcctgtgg

SEQ ID NO: 60045 - DNA, 33 bp, Homo sapien
catatgcagacaaagcactatatatttcagagg

SEQ ID NO: 60046 - DNA, 33 bp, Homo sapien
catatgcagacaaagcgctatatatttcagagg

SEQ ID NO: 60047 - DNA, 33 bp, Homo sapien
ctgtcctgaataatcacgtttcatggctttttc

SEQ ID NO: 60048 - DNA, 33 bp, Homo sapien
ctgtcctgaataatcatgtttcatggctttttc

SEQ ID NO: 60049 - DNA, 33 bp, Homo sapien
ttaagtcttccaagaacggttttagttggaaaa

SEQ ID NO: 60050 - DNA, 33 bp, Homo sapien
ttaagtcttccaagaatggttttagttggaaaa

SEQ ID NO: 60051 - DNA, 33 bp, Homo sapien
agagtaattaactttccctgggtctcatagttg

SEQ ID NO: 60052 - DNA, 33 bp, Homo sapien
agagtaattaactttctctgggtctcatagttg

SEQ ID NO: 60053 - DNA, 33 bp, Homo sapien
ttaaacgttatttaacacttctatgtagattgc

SEQ ID NO: 60054 - DNA, 33 bp, Homo sapien
ttaaacgttatttaacccttctatgtagattgc

SEQ ID NO: 60055 - DNA, 33 bp, Homo sapien
ttgttatactcatcccaaaaaaacagatataca

SEQ ID NO: 60056 - DNA, 33 bp, Homo sapien
ttgttatactcatccccaaaaaacagatataca

SEQ ID NO: 60057 - DNA, 33 bp, Homo sapien
gctcctgttttattccaatttgatttgtttgct

SEQ ID NO: 60058 - DNA, 33 bp, Homo sapien
gctcctgttttattccgatttgatttgtttgct

SEQ ID NO: 60059 - DNA, 33 bp, Homo sapien
aattgatattggccaacgagaaaaaaaatcaca

SEQ ID NO: 60060 - DNA, 33 bp, Homo sapien
aattgatattggccaatgagaaaaaaaatcaca

SEQ ID NO: 60061 - DNA, 33 bp, Homo sapien
agaattggatagaatcaaagacatcaaaaccat

SEQ ID NO: 60062 - DNA, 33 bp, Homo sapien
agaattggatagaatcgaagacatcaaaaccat

SEQ ID NO: 60063 - DNA, 33 bp, Homo sapien
cttcaaggtccagaacaagtcttatcacctcta

SEQ ID NO: 60064 - DNA, 33 bp, Homo sapien
cttcaaggtccagaactagtcttatcacctcta

SEQ ID NO: 60065 - DNA, 33 bp, Homo sapien
ccatttgaagtagcgccattagtgaacatggtg

SEQ ID NO: 60066 - DNA, 33 bp, Homo sapien
ccatttgaagtagcgctattagtgaacatggtg

SEQ ID NO: 60067 - DNA, 33 bp, Homo sapien
agcatttgctgatggacagtatagtgaaacaga

SEQ ID NO: 60068 - DNA, 33 bp, Homo sapien
agcatttgctgatggagagtatagtgaaacaga

SEQ ID NO: 60069 - DNA, 33 bp, Homo sapien
actagatatcctaaagacattttgattcaacag

SEQ ID NO: 60070 - DNA, 33 bp, Homo sapien
actagatatcctaaagtcattttgattcaacag

SEQ ID NO: 60071 - DNA, 33 bp, Homo sapien
tgccagctcttttgaagaaatttgaggttttat

SEQ ID NO: 60072 - DNA, 33 bp, Homo sapien
tgccagctcttttgaataaatttgaggttttat

SEQ ID NO: 60073 - DNA, 33 bp, Homo sapien
attttctcttaaaagtcaagcgtttcaggatga

SEQ ID NO: 60074 - DNA, 33 bp, Homo sapien
attttctcttaaaagttaagcgtttcaggatga

SEQ ID NO: 60075 - DNA, 33 bp, Homo sapien
tgatattaagtccaaaccaacatttgctcagaa

SEQ ID NO: 60076 - DNA, 33 bp, Homo sapien
tgatattaagtccaaagcaacatttgctcagaa

SEQ ID NO: 60077 - DNA, 33 bp, Homo sapien
ttccttcggctcccccaagcttccttgcacctg

SEQ ID NO: 60078 - DNA, 33 bp, Homo sapien
ttccttcggctccccccagcttccttgcacctg

SEQ ID NO: 60079 - DNA, 33 bp, Homo sapien
gctcacaaatgaagtcaacaggaagagatgctt

SEQ ID NO: 60080 - DNA, 33 bp, Homo sapien
gctcacaaatgaagtcgacaggaagagatgctt

SEQ ID NO: 60081 - DNA, 33 bp, Homo sapien
ctccattaaaaccttcaaaattttccatttgct

SEQ ID NO: 60082 - DNA, 33 bp, Homo sapien
ctccattaaaaccttcgaaattttccatttgct

SEQ ID NO: 60083 - DNA, 33 bp, Homo sapien
agattgactttgatgacctttggttatatatta

SEQ ID NO: 60084 - DNA, 33 bp, Homo sapien
agattgactttgatgatctttggttatatatta

SEQ ID NO: 60085 - DNA, 33 bp, Homo sapien
aaaagatacgcaaatgaagaaactcggggctca

SEQ ID NO: 60086 - DNA, 33 bp, Homo sapien
aaaagatacgcaaatgtagaaactcggggctca

SEQ ID NO: 60087 - DNA, 33 bp, Homo sapien
ttcctgttcctgtcacggctagggccttcagca

SEQ ID NO: 60088 - DNA, 33 bp, Homo sapien
ttcctgttcctgtcactgctagggccttcagca

SEQ ID NO: 60089 - DNA, 33 bp, Homo sapien
acagggagcactgctacgaaaagtgaaattagc

SEQ ID NO: 60090 - DNA, 33 bp, Homo sapien
acagggagcactgctatgaaaagtgaaattagc

SEQ ID NO: 60091 - DNA, 33 bp, Homo sapien
ttagaagaaaacagagaagactatcactatgac

SEQ ID NO: 60092 - DNA, 33 bp, Homo sapien
ttagaagaaaacagaggagactatcactatgac

SEQ ID NO: 60093 - DNA, 33 bp, Homo sapien
gtagggaagaattttgaatataagacacaaagg

SEQ ID NO: 60094 - DNA, 33 bp, Homo sapien
gtagggaagaattttgcatataagacacaaagg

SEQ ID NO: 60095 - DNA, 33 bp, Homo sapien
ttataactctgagataagggaagcattttaaaa

SEQ ID NO: 60096 - DNA, 33 bp, Homo sapien
ttataactctgagatatgggaagcattttaaaa

SEQ ID NO: 60097 - DNA, 33 bp, Homo sapien
acgaatgcagatttaccatgacctttttcacca

SEQ ID NO: 60098 - DNA, 33 bp, Homo sapien
acgaatgcagatttactatgacctttttcacca

SEQ ID NO: 60099 - DNA, 33 bp, Homo sapien
ataatattgcactgtacgaatatggaggatttt

SEQ ID NO: 60100 - DNA, 33 bp, Homo sapien
ataatattgcactgtatgaatatggaggatttt

SEQ ID NO: 60101 - DNA, 33 bp, Homo sapien
accactagacataagaactagtaatattttgta

SEQ ID NO: 60102 - DNA, 33 bp, Homo sapien
accactagacataagacctagtaatattttgta

SEQ ID NO: 60103 - DNA, 33 bp, Homo sapien
ccaactggtccaacagaaaataaaactgtctag

SEQ ID NO: 60104 - DNA, 33 bp, Homo sapien
ccaactggtccaacaggaaataaaactgtctag

SEQ ID NO: 60105 - DNA, 33 bp, Homo sapien
tttggggcttggtaaaactgtcatgccttgaag

SEQ ID NO: 60106 - DNA, 33 bp, Homo sapien
tttggggcttggtaaagctgtcatgccttgaag

SEQ ID NO: 60107 - DNA, 33 bp, Homo sapien
caattttaccactcaaaccaggagctactactg

SEQ ID NO: 60108 - DNA, 33 bp, Homo sapien
caattttaccactcaacccaggagctactactg

SEQ ID NO: 60109 - DNA, 33 bp, Homo sapien
acatcttggtggtcaaatcaaaaataatattca

SEQ ID NO: 60110 - DNA, 33 bp, Homo sapien
acatcttggtggtcaagtcaaaaataatattca

SEQ ID NO: 60111 - DNA, 33 bp, Homo sapien
aacaaatggtattaaccatggatagatgctaaa

SEQ ID NO: 60112 - DNA, 33 bp, Homo sapien
aacaaatggtattaactatggatagatgctaaa

SEQ ID NO: 60113 - DNA, 33 bp, Homo sapien
acccaggccaagaggacggaatggttactcatg

SEQ ID NO: 60114 - DNA, 33 bp, Homo sapien
acccaggccaagaggatggaatggttactcatg

SEQ ID NO: 60115 - DNA, 33 bp, Homo sapien
ctggtggactcctctccagcagtgggtgggaag

SEQ ID NO: 60116 - DNA, 33 bp, Homo sapien
ctggtggactcctctctagcagtgggtgggaag

SEQ ID NO: 60117 - DNA, 33 bp, Homo sapien
aacaaacagaaacccaagaatatgcaaagcaca

SEQ ID NO: 60118 - DNA, 33 bp, Homo sapien
aacaaacagaaacccaggaatatgcaaagcaca

SEQ ID NO: 60119 - DNA, 33 bp, Homo sapien
attttatacctagaaaattcaagaaatatcata

SEQ ID NO: 60120 - DNA, 33 bp, Homo sapien
attttatacctagaaagttcaagaaatatcata

SEQ ID NO: 60121 - DNA, 33 bp, Homo sapien
tgtagattcagagtaaagcatcatttttccttg

SEQ ID NO: 60122 - DNA, 33 bp, Homo sapien
tgtagattcagagtaaggcatcatttttccttg

SEQ ID NO: 60123 - DNA, 33 bp, Homo sapien
ctcaccatcaaaaacgaacattgcacaactcat

SEQ ID NO: 60124 - DNA, 33 bp, Homo sapien
ctcaccatcaaaaacggacattgcacaactcat

SEQ ID NO: 60125 - DNA, 33 bp, Homo sapien
agggaaatatgctgaccaaaataggaagaaaca

SEQ ID NO: 60126 - DNA, 33 bp, Homo sapien
agggaaatatgctgactaaaataggaagaaaca

SEQ ID NO: 60127 - DNA, 33 bp, Homo sapien
agtgatggttaatataataaattctgcaataaa

SEQ ID NO: 60128 - DNA, 33 bp, Homo sapien
agtgatggttaatatactaaattctgcaataaa

SEQ ID NO: 60129 - DNA, 33 bp, Homo sapien
tccttctttggctctccatgtcagtaaaaccta

SEQ ID NO: 60130 - DNA, 33 bp, Homo sapien
tccttctttggctctctatgtcagtaaaaccta

SEQ ID NO: 60131 - DNA, 33 bp, Homo sapien
actgataggtgagcaaagaaatggtagattagt

SEQ ID NO: 60132 - DNA, 33 bp, Homo sapien
actgataggtgagcaaggaaatggtagattagt

SEQ ID NO: 60133 - DNA, 33 bp, Homo sapien
aatgccctgcctcacaaataactttctaagatg

SEQ ID NO: 60134 - DNA, 33 bp, Homo sapien
aatgccctgcctcacagataactttctaagatg

SEQ ID NO: 60135 - DNA, 33 bp, Homo sapien
tctctgataggagagacgggatatctataagtc

SEQ ID NO: 60136 - DNA, 33 bp, Homo sapien
tctctgataggagagatgggatatctataagtc

SEQ ID NO: 60137 - DNA, 33 bp, Homo sapien
acctaagtcttttaacaagatggtctctgatta

SEQ ID NO: 60138 - DNA, 33 bp, Homo sapien
acctaagtcttttaacgagatggtctctgatta

SEQ ID NO: 60139 - DNA, 33 bp, Homo sapien
ataagcaaaattaaaacgagactgattttccac

SEQ ID NO: 60140 - DNA, 33 bp, Homo sapien
ataagcaaaattaaaatgagactgattttccac

SEQ ID NO: 60141 - DNA, 33 bp, Homo sapien
aataccgctccaaagagatcccactatttcttt

SEQ ID NO: 60142 - DNA, 33 bp, Homo sapien
aataccgctccaaagatatcccactatttcttt

SEQ ID NO: 60143 - DNA, 33 bp, Homo sapien
aaattacaaatacaaaagagaccatacttatta

SEQ ID NO: 60144 - DNA, 33 bp, Homo sapien
aaattacaaatacaaaggagaccatacttatta

SEQ ID NO: 60145 - DNA, 33 bp, Homo sapien
tgctgcttcatagccaagtagaaaagtggaagg

SEQ ID NO: 60146 - DNA, 33 bp, Homo sapien
tgctgcttcatagccaggtagaaaagtggaagg

SEQ ID NO: 60147 - DNA, 33 bp, Homo sapien
acacctgaagtcataacacactcaatgaaggaa

SEQ ID NO: 60148 - DNA, 33 bp, Homo sapien
acacctgaagtcataatacactcaatgaaggaa

SEQ ID NO: 60149 - DNA, 33 bp, Homo sapien
aaactcaatttcctgcaaccaaacaaataacga

SEQ ID NO: 60150 - DNA, 33 bp, Homo sapien
aaactcaatttcctgccaccaaacaaataacga

SEQ ID NO: 60151 - DNA, 33 bp, Homo sapien
gcaccttaggttctgaccccatctgcctcagtg

SEQ ID NO: 60152 - DNA, 33 bp, Homo sapien
gcaccttaggttctgatcccatctgcctcagtg

SEQ ID NO: 60153 - DNA, 33 bp, Homo sapien
gagggtctcactacccagaactcctggcagaat

SEQ ID NO: 60154 - DNA, 33 bp, Homo sapien
gagggtctcactacccggaactcctggcagaat

SEQ ID NO: 60155 - DNA, 33 bp, Homo sapien
ttccaggcaagagaccacaaatcccatggctaa

SEQ ID NO: 60156 - DNA, 33 bp, Homo sapien
ttccaggcaagagaccgcaaatcccatggctaa

SEQ ID NO: 60157 - DNA, 33 bp, Homo sapien
cagaacgtgtcctcccacaacatgatggctaaa

SEQ ID NO: 60158 - DNA, 33 bp, Homo sapien
cagaacgtgtcctcccgcaacatgatggctaaa

SEQ ID NO: 60159 - DNA, 33 bp, Homo sapien
tgatggctaaagagacacgacgtatttccctga

SEQ ID NO: 60160 - DNA, 33 bp, Homo sapien
tgatggctaaagagacgcgacgtatttccctga

SEQ ID NO: 60161 - DNA, 33 bp, Homo sapien
ggcatccgtggtggatgagggtaaagagagagc

SEQ ID NO: 60162 - DNA, 33 bp, Homo sapien
ggcatccgtggtggattagggtaaagagagagc

SEQ ID NO: 60163 - DNA, 33 bp, Homo sapien
taagcaatcaaatgcaagttgttaaagtgaatc

SEQ ID NO: 60164 - DNA, 33 bp, Homo sapien
taagcaatcaaatgcatgttgttaaagtgaatc

SEQ ID NO: 60165 - DNA, 33 bp, Homo sapien
attaaaaatacactaacggaaacataaaatttg

SEQ ID NO: 60166 - DNA, 33 bp, Homo sapien
attaaaaatacactaatggaaacataaaatttg

SEQ ID NO: 60167 - DNA, 33 bp, Homo sapien
atataagtacatttacaatagtgctagtaacat

SEQ ID NO: 60168 - DNA, 33 bp, Homo sapien
atataagtacatttacgatagtgctagtaacat

SEQ ID NO: 60169 - DNA, 33 bp, Homo sapien
cttatgctaaaattctaaccagtctctgcaaaa

SEQ ID NO: 60170 - DNA, 33 bp, Homo sapien
cttatgctaaaattctgaccagtctctgcaaaa

SEQ ID NO: 60171 - DNA, 33 bp, Homo sapien
attggcaagacaaacaccattaggtttcgaaca

SEQ ID NO: 60172 - DNA, 33 bp, Homo sapien
attggcaagacaaacatcattaggtttcgaaca

SEQ ID NO: 60173 - DNA, 33 bp, Homo sapien
gtaatggggctggttcccgtaagaattatcatt

SEQ ID NO: 60174 - DNA, 33 bp, Homo sapien
gtaatggggctggttctcgtaagaattatcatt

SEQ ID NO: 60175 - DNA, 33 bp, Homo sapien
agttcttatatttttaaactttcaactagacca

SEQ ID NO: 60176 - DNA, 33 bp, Homo sapien
agttcttatatttttatactttcaactagacca

SEQ ID NO: 60177 - DNA, 33 bp, Homo sapien
aaaatataagaactcaccctgagaatataaaac

SEQ ID NO: 60178 - DNA, 33 bp, Homo sapien
aaaatataagaactcatcctgagaatataaaac

SEQ ID NO: 60179 - DNA, 33 bp, Homo sapien
ttcgcatttatgaggcccaaccttacatgcttt

SEQ ID NO: 60180 - DNA, 33 bp, Homo sapien
ttcgcatttatgaggctcaaccttacatgcttt

SEQ ID NO: 60181 - DNA, 33 bp, Homo sapien
ctggtaagtgtttggcaaaagaaggcataatga

SEQ ID NO: 60182 - DNA, 33 bp, Homo sapien
ctggtaagtgtttggcgaaagaaggcataatga

SEQ ID NO: 60183 - DNA, 33 bp, Homo sapien
agacacacattatcacacccaagtaatttgtgc

SEQ ID NO: 60184 - DNA, 33 bp, Homo sapien
agacacacattatcacccccaagtaatttgtgc

SEQ ID NO: 60185 - DNA, 33 bp, Homo sapien
aaaaattatgagcaaaaaaagcagtgaaggaga

SEQ ID NO: 60186 - DNA, 33 bp, Homo sapien
aaaaattatgagcaaagaaagcagtgaaggaga

SEQ ID NO: 60187 - DNA, 33 bp, Homo sapien
gaaaaatttagcatagcaaaaaatccacagagg

SEQ ID NO: 60188 - DNA, 33 bp, Homo sapien
gaaaaatttagcatagtaaaaaatccacagagg

SEQ ID NO: 60189 - DNA, 33 bp, Homo sapien
aatatacaataatctccccagtccaaatctgtg

SEQ ID NO: 60190 - DNA, 33 bp, Homo sapien
aatatacaataatctctccagtccaaatctgtg

SEQ ID NO: 60191 - DNA, 33 bp, Homo sapien
ctctgtctgatttgaactgtaaggtcctttgtt

SEQ ID NO: 60192 - DNA, 33 bp, Homo sapien
ctctgtctgatttgaattgtaaggtcctttgtt

SEQ ID NO: 60193 - DNA, 33 bp, Homo sapien
tcatccactgcctacactgcagccattgtgacc

SEQ ID NO: 60194 - DNA, 33 bp, Homo sapien
tcatccactgcctacattgcagccattgtgacc

SEQ ID NO: 60195 - DNA, 33 bp, Homo sapien
aagtggttaagtggcaccttgtgaaagcctgtt

SEQ ID NO: 60196 - DNA, 33 bp, Homo sapien
aagtggttaagtggcagcttgtgaaagcctgtt

SEQ ID NO: 60197 - DNA, 33 bp, Homo sapien
aaatgccaaacaagtgaattactttaacaaaac

SEQ ID NO: 60198 - DNA, 33 bp, Homo sapien
aaatgccaaacaagtgtattactttaacaaaac

SEQ ID NO: 60199 - DNA, 33 bp, Homo sapien
attgataaaatgattacgtttttctccataaat

SEQ ID NO: 60200 - DNA, 33 bp, Homo sapien
attgataaaatgattatgtttttctccataaat

SEQ ID NO: 60201 - DNA, 33 bp, Homo sapien
gtcaccatatcttaacaatttgaacaggttcag

SEQ ID NO: 60202 - DNA, 33 bp, Homo sapien
gtcaccatatcttaacgatttgaacaggttcag

SEQ ID NO: 60203 - DNA, 33 bp, Homo sapien
aaaatagatgtaaactcagtgacatgtaaaaga

SEQ ID NO: 60204 - DNA, 33 bp, Homo sapien
aaaatagatgtaaacttagtgacatgtaaaaga

SEQ ID NO: 60205 - DNA, 33 bp, Homo sapien
tctgcctcacagaatcaagaccagagctcaggt

SEQ ID NO: 60206 - DNA, 33 bp, Homo sapien
tctgcctcacagaatcgagaccagagctcaggt

SEQ ID NO: 60207 - DNA, 33 bp, Homo sapien
tcagcctcactagtaaatgcaaatgaaggcacc

SEQ ID NO: 60208 - DNA, 33 bp, Homo sapien
tcagcctcactagtaagtgcaaatgaaggcacc

SEQ ID NO: 60209 - DNA, 33 bp, Homo sapien
tgcccagctatttctgaatattagtgttacccc

SEQ ID NO: 60210 - DNA, 33 bp, Homo sapien
tgcccagctatttctgcatattagtgttacccc

SEQ ID NO: 60211 - DNA, 33 bp, Homo sapien
actgacctcatccaaacataactgtgttcccag

SEQ ID NO: 60212 - DNA, 33 bp, Homo sapien
actgacctcatccaaatataactgtgttcccag

SEQ ID NO: 60213 - DNA, 33 bp, Homo sapien
cagatttcaaaagaatcagcagaaacagcatca

SEQ ID NO: 60214 - DNA, 33 bp, Homo sapien
cagatttcaaaagaattagcagaaacagcatca

SEQ ID NO: 60215 - DNA, 33 bp, Homo sapien
tggtttagcccttaaaacctcaaacgtcatgga

SEQ ID NO: 60216 - DNA, 33 bp, Homo sapien
tggtttagcccttaaagcctcaaacgtcatgga

SEQ ID NO: 60217 - DNA, 33 bp, Homo sapien
tcaggagtttctcgtgaaagtgccaaataatga

SEQ ID NO: 60218 - DNA, 33 bp, Homo sapien
tcaggagtttctcgtggaagtgccaaataatga

SEQ ID NO: 60219 - DNA, 33 bp, Homo sapien
catgttgcaaagccataaaggattttgtgagtt

SEQ ID NO: 60220 - DNA, 33 bp, Homo sapien
catgttgcaaagccatgaaggattttgtgagtt

SEQ ID NO: 60221 - DNA, 33 bp, Homo sapien
acaaatttagagctgaaacaaatactataatct

SEQ ID NO: 60222 - DNA, 33 bp, Homo sapien
acaaatttagagctgagacaaatactataatct

SEQ ID NO: 60223 - DNA, 33 bp, Homo sapien
cacactaagtagactacagatgtgtacagctct

SEQ ID NO: 60224 - DNA, 33 bp, Homo sapien
cacactaagtagactatagatgtgtacagctct

SEQ ID NO: 60225 - DNA, 33 bp, Homo sapien
gcttttggaggaagccactgggccctttatata

SEQ ID NO: 60226 - DNA, 33 bp, Homo sapien
gcttttggaggaagccgctgggccctttatata

SEQ ID NO: 60227 - DNA, 33 bp, Homo sapien
gcttaggagcacctaacgtggacgcatggccaa

SEQ ID NO: 60228 - DNA, 33 bp, Homo sapien
gcttaggagcacctaatgtggacgcatggccaa

SEQ ID NO: 60229 - DNA, 33 bp, Homo sapien
cagccttgtgatatagcagtagaaattctgtaa

SEQ ID NO: 60230 - DNA, 33 bp, Homo sapien
cagccttgtgatataggagtagaaattctgtaa

SEQ ID NO: 60231 - DNA, 33 bp, Homo sapien
aattgataagtgcacacggtagtttacatcatt

SEQ ID NO: 60232 - DNA, 33 bp, Homo sapien
aattgataagtgcacatggtagtttacatcatt

SEQ ID NO: 60233 - DNA, 33 bp, Homo sapien
gggaaatatgtttccgaaagaaaaatgtgttta

SEQ ID NO: 60234 - DNA, 33 bp, Homo sapien
gggaaatatgtttccgtaagaaaaatgtgttta

SEQ ID NO: 60235 - DNA, 33 bp, Homo sapien
atgacaactctagaaccaaggagacgtttagat

SEQ ID NO: 60236 - DNA, 33 bp, Homo sapien
atgacaactctagaacgaaggagacgtttagat

SEQ ID NO: 60237 - DNA, 33 bp, Homo sapien
acagaaatccaattcaaacttgcttaacaaaca

SEQ ID NO: 60238 - DNA, 33 bp, Homo sapien
acagaaatccaattcacacttgcttaacaaaca

SEQ ID NO: 60239 - DNA, 33 bp, Homo sapien
ttacaagcgtgtgtcaaaaacataattcatggt

SEQ ID NO: 60240 - DNA, 33 bp, Homo sapien
ttacaagcgtgtgtcacaaacataattcatggt

SEQ ID NO: 60241 - DNA, 33 bp, Homo sapien
attctaactgctctcacatatcttgttgcttca

SEQ ID NO: 60242 - DNA, 33 bp, Homo sapien
attctaactgctctcagatatcttgttgcttca

SEQ ID NO: 60243 - DNA, 33 bp, Homo sapien
tttccgggctagtttacagggaagatatgtatc

SEQ ID NO: 60244 - DNA, 33 bp, Homo sapien
tttccgggctagtttatagggaagatatgtatc

SEQ ID NO: 60245 - DNA, 33 bp, Homo sapien
cattcaaagaacctgaaaaaactgacaaaatac

SEQ ID NO: 60246 - DNA, 33 bp, Homo sapien
cattcaaagaacctgagaaaactgacaaaatac

SEQ ID NO: 60247 - DNA, 33 bp, Homo sapien
tttgaatagcgtaaaccagtctggctcagaaag

SEQ ID NO: 60248 - DNA, 33 bp, Homo sapien
tttgaatagcgtaaactagtctggctcagaaag

SEQ ID NO: 60249 - DNA, 33 bp, Homo sapien
tactaagtgactaatgaacgagtagcatataca

SEQ ID NO: 60250 - DNA, 33 bp, Homo sapien
tactaagtgactaatggacgagtagcatataca

SEQ ID NO: 60251 - DNA, 33 bp, Homo sapien
gcccgaaaggtctaggaatttctttctgcactg

SEQ ID NO: 60252 - DNA, 33 bp, Homo sapien
gcccgaaaggtctaggtatttctttctgcactg

SEQ ID NO: 60253 - DNA, 33 bp, Homo sapien
acagagaactgggtttgaaaaatgtttctcttt

SEQ ID NO: 60254 - DNA, 33 bp, Homo sapien
acagagaactgggttttaaaaatgtttctcttt

SEQ ID NO: 60255 - DNA, 33 bp, Homo sapien
aattcaagattcctaacaacattgtgacaagaa

SEQ ID NO: 60256 - DNA, 33 bp, Homo sapien
aattcaagattcctaagaacattgtgacaagaa

SEQ ID NO: 60257 - DNA, 33 bp, Homo sapien
ttccagcaataatgtacaataggcagctggcaa

SEQ ID NO: 60258 - DNA, 33 bp, Homo sapien
ttccagcaataatgtataataggcagctggcaa

SEQ ID NO: 60259 - DNA, 33 bp, Homo sapien
tcatataagatatcataacgtctgccttgttct

SEQ ID NO: 60260 - DNA, 33 bp, Homo sapien
tcatataagatatcatgacgtctgccttgttct

SEQ ID NO: 60261 - DNA, 33 bp, Homo sapien
tctttccactgtcataaaaatagttagaaacag

SEQ ID NO: 60262 - DNA, 33 bp, Homo sapien
tctttccactgtcatacaaatagttagaaacag

SEQ ID NO: 60263 - DNA, 33 bp, Homo sapien
tgtttctaacattttagcacctttctggccttt

SEQ ID NO: 60264 - DNA, 33 bp, Homo sapien
tgtttctaacattttatcacctttctggccttt

SEQ ID NO: 60265 - DNA, 33 bp, Homo sapien
gtagataaaaagctcaccaaaaactactaagat

SEQ ID NO: 60266 - DNA, 33 bp, Homo sapien
gtagataaaaagctcatcaaaaactactaagat

SEQ ID NO: 60267 - DNA, 33 bp, Homo sapien
ctctattaagaaatcaagttgggcgtagtggct

SEQ ID NO: 60268 - DNA, 33 bp, Homo sapien
ctctattaagaaatcaggttgggcgtagtggct

SEQ ID NO: 60269 - DNA, 33 bp, Homo sapien
gcgccttgccaagctgaatcttaagtaataaat

SEQ ID NO: 60270 - DNA, 33 bp, Homo sapien
gcgccttgccaagctgcatcttaagtaataaat

SEQ ID NO: 60271 - DNA, 33 bp, Homo sapien
attcttttttttgagcaaacagatatttatttt

SEQ ID NO: 60272 - DNA, 33 bp, Homo sapien
attcttttttttgagctaacagatatttatttt

SEQ ID NO: 60273 - DNA, 33 bp, Homo sapien
tgaggtgtctagttgccatcttccatctgtttt

SEQ ID NO: 60274 - DNA, 33 bp, Homo sapien
tgaggtgtctagttgcgatcttccatctgtttt

SEQ ID NO: 60275 - DNA, 33 bp, Homo sapien
ttagtggagcagttgtcggtatggttatatatt

SEQ ID NO: 60276 - DNA, 33 bp, Homo sapien
ttagtggagcagttgttggtatggttatatatt

SEQ ID NO: 60277 - DNA, 33 bp, Homo sapien
acactgtcctgagttaaaatcaaacttttctta

SEQ ID NO: 60278 - DNA, 33 bp, Homo sapien
acactgtcctgagttagaatcaaacttttctta

SEQ ID NO: 60279 - DNA, 33 bp, Homo sapien
acaatttggctggagaaaatatatagctacatg

SEQ ID NO: 60280 - DNA, 33 bp, Homo sapien
acaatttggctggagagaatatatagctacatg

SEQ ID NO: 60281 - DNA, 33 bp, Homo sapien
ttgggatgagctcacaaagggaaagtggagtat

SEQ ID NO: 60282 - DNA, 33 bp, Homo sapien
ttgggatgagctcacagagggaaagtggagtat

SEQ ID NO: 60283 - DNA, 33 bp, Homo sapien
caggtgacacaagacacatctgaagctctattt

SEQ ID NO: 60284 - DNA, 33 bp, Homo sapien
caggtgacacaagacagatctgaagctctattt

SEQ ID NO: 60285 - DNA, 33 bp, Homo sapien
tttctggctaaaattacgttacttcctttggtc

SEQ ID NO: 60286 - DNA, 33 bp, Homo sapien
tttctggctaaaattatgttacttcctttggtc

SEQ ID NO: 60287 - DNA, 33 bp, Homo sapien
ccacacttctggtcaacttaataaaacactcta

SEQ ID NO: 60288 - DNA, 33 bp, Homo sapien
ccacacttctggtcaatttaataaaacactcta

SEQ ID NO: 60289 - DNA, 33 bp, Homo sapien
ttttctattcctgaaggctaacatgtgtccctc

SEQ ID NO: 60290 - DNA, 33 bp, Homo sapien
ttttctattcctgaagtctaacatgtgtccctc

SEQ ID NO: 60291 - DNA, 33 bp, Homo sapien
attgtttttctgaagacggatgtcgagtacagt

SEQ ID NO: 60292 - DNA, 33 bp, Homo sapien
attgtttttctgaagatggatgtcgagtacagt

SEQ ID NO: 60293 - DNA, 33 bp, Homo sapien
aagaataataattcaactggactagctagccaa

SEQ ID NO: 60294 - DNA, 33 bp, Homo sapien
aagaataataattcaattggactagctagccaa

SEQ ID NO: 60295 - DNA, 33 bp, Homo sapien
ctaaagatgagcagagaaaagtacaaggagaaa

SEQ ID NO: 60296 - DNA, 33 bp, Homo sapien
ctaaagatgagcagagtaaagtacaaggagaaa

SEQ ID NO: 60297 - DNA, 33 bp, Homo sapien
gctagacagccagaaaaaataaatttccaccat

SEQ ID NO: 60298 - DNA, 33 bp, Homo sapien
gctagacagccagaaacaataaatttccaccat

SEQ ID NO: 60299 - DNA, 33 bp, Homo sapien
ttaggagtaggtctccaaagagatgtttattac

SEQ ID NO: 60300 - DNA, 33 bp, Homo sapien
ttaggagtaggtctccgaagagatgtttattac

SEQ ID NO: 60301 - DNA, 33 bp, Homo sapien
ggccaaggagcaggcaatgaggaatcagccagg

SEQ ID NO: 60302 - DNA, 33 bp, Homo sapien
ggccaaggagcaggcagtgaggaatcagccagg

SEQ ID NO: 60303 - DNA, 33 bp, Homo sapien
atgtacagaatacacaatacaagaattttctca

SEQ ID NO: 60304 - DNA, 33 bp, Homo sapien
atgtacagaatacacactacaagaattttctca

SEQ ID NO: 60305 - DNA, 33 bp, Homo sapien
ataatgattaaatcaggattagttagcatgtag

SEQ ID NO: 60306 - DNA, 33 bp, Homo sapien
ataatgattaaatcagtattagttagcatgtag

SEQ ID NO: 60307 - DNA, 33 bp, Homo sapien
cctggggctgaaaggacagaaagttggaaatcc

SEQ ID NO: 60308 - DNA, 33 bp, Homo sapien
cctggggctgaaaggagagaaagttggaaatcc

SEQ ID NO: 60309 - DNA, 33 bp, Homo sapien
ttgaacagtgatgaaaagatactctatctagct

SEQ ID NO: 60310 - DNA, 33 bp, Homo sapien
ttgaacagtgatgaaaggatactctatctagct

SEQ ID NO: 60311 - DNA, 33 bp, Homo sapien
ctgtgagagaaaccacaggataattagtacaca

SEQ ID NO: 60312 - DNA, 33 bp, Homo sapien
ctgtgagagaaaccacgggataattagtacaca

SEQ ID NO: 60313 - DNA, 33 bp, Homo sapien
ggcacctcaaaagacaatgcatctgaatccctg

SEQ ID NO: 60314 - DNA, 33 bp, Homo sapien
ggcacctcaaaagacagtgcatctgaatccctg

SEQ ID NO: 60315 - DNA, 33 bp, Homo sapien
acagtaacaatatagacagtgactctggctggc

SEQ ID NO: 60316 - DNA, 33 bp, Homo sapien
acagtaacaatatagagagtgactctggctggc

SEQ ID NO: 60317 - DNA, 33 bp, Homo sapien
atatacagtttcttcacggccagccactatctt

SEQ ID NO: 60318 - DNA, 33 bp, Homo sapien
atatacagtttcttcatggccagccactatctt

SEQ ID NO: 60319 - DNA, 33 bp, Homo sapien
tctgaatgcagaaaaagaatcaagatcataaca

SEQ ID NO: 60320 - DNA, 33 bp, Homo sapien
tctgaatgcagaaaaataatcaagatcataaca

SEQ ID NO: 60321 - DNA, 33 bp, Homo sapien
tcaaagcttttagaaaaaatgcaggttgagtac

SEQ ID NO: 60322 - DNA, 33 bp, Homo sapien
tcaaagcttttagaaacaatgcaggttgagtac

SEQ ID NO: 60323 - DNA, 33 bp, Homo sapien
tcatagggcctagagaacatggtttgcattgga

SEQ ID NO: 60324 - DNA, 33 bp, Homo sapien
tcatagggcctagagagcatggtttgcattgga

SEQ ID NO: 60325 - DNA, 33 bp, Homo sapien
gagaaattatgtaaaactttgagattcaaataa

SEQ ID NO: 60326 - DNA, 33 bp, Homo sapien
gagaaattatgtaaaattttgagattcaaataa

SEQ ID NO: 60327 - DNA, 33 bp, Homo sapien
gacacggaaatgcaaaacaaggcattgaagagc

SEQ ID NO: 60328 - DNA, 33 bp, Homo sapien
gacacggaaatgcaaagcaaggcattgaagagc

SEQ ID NO: 60329 - DNA, 33 bp, Homo sapien
tagatgtcattgtaaaccggctttctgaaggtc

SEQ ID NO: 60330 - DNA, 33 bp, Homo sapien
tagatgtcattgtaaagcggctttctgaaggtc

SEQ ID NO: 60331 - DNA, 33 bp, Homo sapien
acttgtggcttgggataaaaattgcaatggcag

SEQ ID NO: 60332 - DNA, 33 bp, Homo sapien
acttgtggcttgggatgaaaattgcaatggcag

SEQ ID NO: 60333 - DNA, 33 bp, Homo sapien
cattggccccactgaacgccaaatttgctgagc

SEQ ID NO: 60334 - DNA, 33 bp, Homo sapien
cattggccccactgaatgccaaatttgctgagc

SEQ ID NO: 60335 - DNA, 33 bp, Homo sapien
aggcaagcttggaactaaaagggagaagtcagc

SEQ ID NO: 60336 - DNA, 33 bp, Homo sapien
aggcaagcttggaactgaaagggagaagtcagc

SEQ ID NO: 60337 - DNA, 33 bp, Homo sapien
ctgacttctagacactgaaaaaatctctttcat

SEQ ID NO: 60338 - DNA, 33 bp, Homo sapien
ctgacttctagacacttaaaaaatctctttcat

SEQ ID NO: 60339 - DNA, 33 bp, Homo sapien
gatgggaagtgtcagacatcagttccacaactc

SEQ ID NO: 60340 - DNA, 33 bp, Homo sapien
gatgggaagtgtcagatatcagttccacaactc

SEQ ID NO: 60341 - DNA, 33 bp, Homo sapien
ccctaggttccatctaaccttgctgctctaacc

SEQ ID NO: 60342 - DNA, 33 bp, Homo sapien
ccctaggttccatctagccttgctgctctaacc

SEQ ID NO: 60343 - DNA, 33 bp, Homo sapien
aagtttccctggtagacgtggactgtgatctga

SEQ ID NO: 60344 - DNA, 33 bp, Homo sapien
aagtttccctggtagaggtggactgtgatctga

SEQ ID NO: 60345 - DNA, 33 bp, Homo sapien
ttataaatttgctgaacaattgaaacactcagg

SEQ ID NO: 60346 - DNA, 33 bp, Homo sapien
ttataaatttgctgaataattgaaacactcagg

SEQ ID NO: 60347 - DNA, 33 bp, Homo sapien
cacctaagtgttaattcaagcccaatgcttgtc

SEQ ID NO: 60348 - DNA, 33 bp, Homo sapien
cacctaagtgttaatttaagcccaatgcttgtc

SEQ ID NO: 60349 - DNA, 33 bp, Homo sapien
ttctgtttgtgtcaaaccttcttttgtctctct

SEQ ID NO: 60350 - DNA, 33 bp, Homo sapien
ttctgtttgtgtcaaatcttcttttgtctctct

SEQ ID NO: 60351 - DNA, 33 bp, Homo sapien
agcaaggttatgtttacagtacagagagaagag

SEQ ID NO: 60352 - DNA, 33 bp, Homo sapien
agcaaggttatgtttatagtacagagagaagag

SEQ ID NO: 60353 - DNA, 33 bp, Homo sapien
ttaagattgtcttacccactgaacatatattcc

SEQ ID NO: 60354 - DNA, 33 bp, Homo sapien
ttaagattgtcttaccgactgaacatatattcc

SEQ ID NO: 60355 - DNA, 33 bp, Homo sapien
catatttgttttgcaggacaattgtgaaagatt

SEQ ID NO: 60356 - DNA, 33 bp, Homo sapien
catatttgttttgcagtacaattgtgaaagatt

SEQ ID NO: 60357 - DNA, 33 bp, Homo sapien
tggtggtcactcttcacatatagagtaagtatg

SEQ ID NO: 60358 - DNA, 33 bp, Homo sapien
tggtggtcactcttcatatatagagtaagtatg

SEQ ID NO: 60359 - DNA, 33 bp, Homo sapien
caaaaagcatgatttcacaaggactagtgtttt

SEQ ID NO: 60360 - DNA, 33 bp, Homo sapien
caaaaagcatgatttcgcaaggactagtgtttt

SEQ ID NO: 60361 - DNA, 33 bp, Homo sapien
tgctcaaaactcctaaccatgtatctcttatgc

SEQ ID NO: 60362 - DNA, 33 bp, Homo sapien
tgctcaaaactcctaatcatgtatctcttatgc

SEQ ID NO: 60363 - DNA, 33 bp, Homo sapien
tatttctaaaagacaaatctgattctcttcctc

SEQ ID NO: 60364 - DNA, 33 bp, Homo sapien
tatttctaaaagacaattctgattctcttcctc

SEQ ID NO: 60365 - DNA, 33 bp, Homo sapien
gatgacagcatatttaagcttgtttggatgggg

SEQ ID NO: 60366 - DNA, 33 bp, Homo sapien
gatgacagcatatttaggcttgtttggatgggg

SEQ ID NO: 60367 - DNA, 33 bp, Homo sapien
aagtatcttaggcattaaaagaatctggtctat

SEQ ID NO: 60368 - DNA, 33 bp, Homo sapien
aagtatcttaggcattcaaagaatctggtctat

SEQ ID NO: 60369 - DNA, 33 bp, Homo sapien
ctctaacacttagcaccgtctaaatctaatact

SEQ ID NO: 60370 - DNA, 33 bp, Homo sapien
ctctaacacttagcactgtctaaatctaatact

SEQ ID NO: 60371 - DNA, 33 bp, Homo sapien
atctgtagtaacaggagcatatgtcagtaagta

SEQ ID NO: 60372 - DNA, 33 bp, Homo sapien
atctgtagtaacaggatcatatgtcagtaagta

SEQ ID NO: 60373 - DNA, 33 bp, Homo sapien
tatataactctccaaacggacccaggttgtgag

SEQ ID NO: 60374 - DNA, 33 bp, Homo sapien
tatataactctccaaatggacccaggttgtgag

SEQ ID NO: 60375 - DNA, 33 bp, Homo sapien
ctggtattacaagcacagtctgatagtgaatcc

SEQ ID NO: 60376 - DNA, 33 bp, Homo sapien
ctggtattacaagcaccgtctgatagtgaatcc

SEQ ID NO: 60377 - DNA, 33 bp, Homo sapien
atgagtaacttaatagccaggaaaatgacaact

SEQ ID NO: 60378 - DNA, 33 bp, Homo sapien
atgagtaacttaatagtcaggaaaatgacaact

SEQ ID NO: 60379 - DNA, 33 bp, Homo sapien
atgacctacattcctaacaatctgccttacctg

SEQ ID NO: 60380 - DNA, 33 bp, Homo sapien
atgacctacattcctagcaatctgccttacctg

SEQ ID NO: 60381 - DNA, 33 bp, Homo sapien
gattttggatcaaaaacgggaaataaaaaccag

SEQ ID NO: 60382 - DNA, 33 bp, Homo sapien
gattttggatcaaaaatgggaaataaaaaccag

SEQ ID NO: 60383 - DNA, 33 bp, Homo sapien
ttgattctatgttttacacactttctttgctct

SEQ ID NO: 60384 - DNA, 33 bp, Homo sapien
ttgattctatgttttatacactttctttgctct

SEQ ID NO: 60385 - DNA, 33 bp, Homo sapien
ggttgaagggtatacactgagtgctactataac

SEQ ID NO: 60386 - DNA, 33 bp, Homo sapien
ggttgaagggtatacattgagtgctactataac

SEQ ID NO: 60387 - DNA, 33 bp, Homo sapien
ggtttggtcttgaacaagaaaagacacacctct

SEQ ID NO: 60388 - DNA, 33 bp, Homo sapien
ggtttggtcttgaacaggaaaagacacacctct

SEQ ID NO: 60389 - DNA, 33 bp, Homo sapien
ggaaggcaataatgaaagaaacattgagaatca

SEQ ID NO: 60390 - DNA, 33 bp, Homo sapien
ggaaggcaataatgaaggaaacattgagaatca

SEQ ID NO: 60391 - DNA, 33 bp, Homo sapien
ttttagcctatgactcagaaactcagtagctgt

SEQ ID NO: 60392 - DNA, 33 bp, Homo sapien
ttttagcctatgactcggaaactcagtagctgt

SEQ ID NO: 60393 - DNA, 33 bp, Homo sapien
tttggctcttttcagaaatgtgaatgtatatta

SEQ ID NO: 60394 - DNA, 33 bp, Homo sapien
tttggctcttttcagagatgtgaatgtatatta

SEQ ID NO: 60395 - DNA, 33 bp, Homo sapien
tgtccggccaaataaaatcttattctgctgcca

SEQ ID NO: 60396 - DNA, 33 bp, Homo sapien
tgtccggccaaataaagtcttattctgctgcca

SEQ ID NO: 60397 - DNA, 33 bp, Homo sapien
acttctgagatgagatcacaaaaagactcgggc

SEQ ID NO: 60398 - DNA, 33 bp, Homo sapien
acttctgagatgagattacaaaaagactcgggc

SEQ ID NO: 60399 - DNA, 33 bp, Homo sapien
cataaatcttaaatacagataggacttggaggt

SEQ ID NO: 60400 - DNA, 33 bp, Homo sapien
cataaatcttaaataccgataggacttggaggt

SEQ ID NO: 60401 - DNA, 33 bp, Homo sapien
tatcaagaaatccaaccgaacaggtaagttgag

SEQ ID NO: 60402 - DNA, 33 bp, Homo sapien
tatcaagaaatccaactgaacaggtaagttgag

SEQ ID NO: 60403 - DNA, 33 bp, Homo sapien
gtgtgatcttggggaaagtttctcaaatttttg

SEQ ID NO: 60404 - DNA, 33 bp, Homo sapien
gtgtgatcttggggaacgtttctcaaatttttg

SEQ ID NO: 60405 - DNA, 33 bp, Homo sapien
ctctgtgcctttactgaagccattctcctccca

SEQ ID NO: 60406 - DNA, 33 bp, Homo sapien
ctctgtgcctttactggagccattctcctccca

SEQ ID NO: 60407 - DNA, 33 bp, Homo sapien
atgtgactaagctctgcaccttgagatgcatat

SEQ ID NO: 60408 - DNA, 33 bp, Homo sapien
atgtgactaagctctggaccttgagatgcatat

SEQ ID NO: 60409 - DNA, 33 bp, Homo sapien
tatctggcagccctaaatggaaccccactatgg

SEQ ID NO: 60410 - DNA, 33 bp, Homo sapien
tatctggcagccctaactggaaccccactatgg

SEQ ID NO: 60411 - DNA, 33 bp, Homo sapien
atcatatttttctgtcacttacaaccaaataga

SEQ ID NO: 60412 - DNA, 33 bp, Homo sapien
atcatatttttctgtcgcttacaaccaaataga

SEQ ID NO: 60413 - DNA, 33 bp, Homo sapien
gcagaaaaagaggccaacctatgtcttctcata

SEQ ID NO: 60414 - DNA, 33 bp, Homo sapien
gcagaaaaagaggccaccctatgtcttctcata

SEQ ID NO: 60415 - DNA, 33 bp, Homo sapien
ggatgagaaattctggaaaaagtaacagaagtg

SEQ ID NO: 60416 - DNA, 33 bp, Homo sapien
ggatgagaaattctgggaaaagtaacagaagtg

SEQ ID NO: 60417 - DNA, 33 bp, Homo sapien
catacctcacatatagacccttaagacactctc

SEQ ID NO: 60418 - DNA, 33 bp, Homo sapien
catacctcacatatagtcccttaagacactctc

SEQ ID NO: 60419 - DNA, 33 bp, Homo sapien
tgaacttcagctttgccccttaactctcctctg

SEQ ID NO: 60420 - DNA, 33 bp, Homo sapien
tgaacttcagctttgctccttaactctcctctg

SEQ ID NO: 60421 - DNA, 33 bp, Homo sapien
gaacggaatgagaagaaccttacagtagccaac

SEQ ID NO: 60422 - DNA, 33 bp, Homo sapien
gaacggaatgagaagacccttacagtagccaac

SEQ ID NO: 60423 - DNA, 33 bp, Homo sapien
gcaaaacgtagcataaactagacaaaaccccca

SEQ ID NO: 60424 - DNA, 33 bp, Homo sapien
gcaaaacgtagcataatctagacaaaaccccca

SEQ ID NO: 60425 - DNA, 33 bp, Homo sapien
agtttcagactaggctcaatttaccccttttct

SEQ ID NO: 60426 - DNA, 33 bp, Homo sapien
agtttcagactaggcttaatttaccccttttct

SEQ ID NO: 60427 - DNA, 33 bp, Homo sapien
agggctgggtatcataaggctaaagggattgcc

SEQ ID NO: 60428 - DNA, 33 bp, Homo sapien
agggctgggtatcatagggctaaagggattgcc

SEQ ID NO: 60429 - DNA, 33 bp, Homo sapien
tgtagagtacgctagaagggattttcagaccaa

SEQ ID NO: 60430 - DNA, 33 bp, Homo sapien
tgtagagtacgctagaggggattttcagaccaa

SEQ ID NO: 60431 - DNA, 33 bp, Homo sapien
agtgaggcttgaggaaaacattcatgataggca

SEQ ID NO: 60432 - DNA, 33 bp, Homo sapien
agtgaggcttgaggaagacattcatgataggca

SEQ ID NO: 60433 - DNA, 33 bp, Homo sapien
tgtgtattttttacgacagaggtatatagactt

SEQ ID NO: 60434 - DNA, 33 bp, Homo sapien
tgtgtattttttacgatagaggtatatagactt

SEQ ID NO: 60435 - DNA, 33 bp, Homo sapien; identical to SEQ ID NO: 60433

SEQ ID NO: 60436 - DNA, 33 bp, Homo sapien; identical to SEQ ID NO: 60434

SEQ ID NO: 60437 - DNA, 33 bp, Homo sapien
aagcagaaaaaattccagaggcactcaaacact

SEQ ID NO: 60438 - DNA, 33 bp, Homo sapien
aagcagaaaaaattccggaggcactcaaacact

SEQ ID NO: 60439 - DNA, 33 bp, Homo sapien
ctgcatcagagggcaccaggacatgatacctac

SEQ ID NO: 60440 - DNA, 33 bp, Homo sapien
ctgcatcagagggcactaggacatgatacctac

SEQ ID NO: 60441 - DNA, 33 bp, Homo sapien
ataagaaaagtttcacagagtggctggaatttc

SEQ ID NO: 60442 - DNA, 33 bp, Homo sapien
ataagaaaagtttcacggagtggctggaatttc

SEQ ID NO: 60443 - DNA, 33 bp, Homo sapien
tacattccatagcgaccctcacattcatgatct

SEQ ID NO: 60444 - DNA, 33 bp, Homo sapien
tacattccatagcgactctcacattcatgatct

SEQ ID NO: 60445 - DNA, 33 bp, Homo sapien
taaaattctctagggaatcaacaaaaatgcaaa

SEQ ID NO: 60446 - DNA, 33 bp, Homo sapien
taaaattctctagggagtcaacaaaaatgcaaa

SEQ ID NO: 60447 - DNA, 33 bp, Homo sapien
atactgttaggatggcagcatttttaaagtgtg

SEQ ID NO: 60448 - DNA, 33 bp, Homo sapien
atactgttaggatggctgcatttttaaagtgtg

SEQ ID NO: 60449 - DNA, 33 bp, Homo sapien
ggatcataattctgagaccaggaagcatcaact

SEQ ID NO: 60450 - DNA, 33 bp, Homo sapien
ggatcataattctgaggccaggaagcatcaact

SEQ ID NO: 60451 - DNA, 33 bp, Homo sapien
tgagaacaccaaataccagtgaagatgtagagt

SEQ ID NO: 60452 - DNA, 33 bp, Homo sapien
tgagaacaccaaatactagtgaagatgtagagt

SEQ ID NO: 60453 - DNA, 33 bp, Homo sapien
gagaatgagattagaaacttaatatgcctcccc

SEQ ID NO: 60454 - DNA, 33 bp, Homo sapien
gagaatgagattagaaccttaatatgcctcccc

SEQ ID NO: 60455 - DNA, 33 bp, Homo sapien
atccacttatccaaagaatgtttaaaaggctaa

SEQ ID NO: 60456 - DNA, 33 bp, Homo sapien
atccacttatccaaagcatgtttaaaaggctaa

SEQ ID NO: 60457 - DNA, 33 bp, Homo sapien
ggcatttcttctctgagctcaacttgacaatct

SEQ ID NO: 60458 - DNA, 33 bp, Homo sapien
ggcatttcttctctgatctcaacttgacaatct

SEQ ID NO: 60459 - DNA, 33 bp, Homo sapien
cgaaaatcttgagttcaagccataaatgcctgt

SEQ ID NO: 60460 - DNA, 33 bp, Homo sapien
cgaaaatcttgagttctagccataaatgcctgt

SEQ ID NO: 60461 - DNA, 33 bp, Homo sapien
taatatgccatagttacattttggtttaagact

SEQ ID NO: 60462 - DNA, 33 bp, Homo sapien
taatatgccatagttatattttggtttaagact

SEQ ID NO: 60463 - DNA, 33 bp, Homo sapien
tggaattactccataaaccaacaattgtatttc

SEQ ID NO: 60464 - DNA, 33 bp, Homo sapien
tggaattactccataagccaacaattgtatttc

SEQ ID NO: 60465 - DNA, 33 bp, Homo sapien
acaatgctgtaaactacggctgtcatcagttag

SEQ ID NO: 60466 - DNA, 33 bp, Homo sapien
acaatgctgtaaactatggctgtcatcagttag

SEQ ID NO: 60467 - DNA, 33 bp, Homo sapien
ttagaaagtgaaaaatcatttagcaacatgaat

SEQ ID NO: 60468 - DNA, 33 bp, Homo sapien
ttagaaagtgaaaaattatttagcaacatgaat

SEQ ID NO: 60469 - DNA, 33 bp, Homo sapien
aagagcagaaagtacactgactcagattttgac

SEQ ID NO: 60470 - DNA, 33 bp, Homo sapien
aagagcagaaagtacagtgactcagattttgac

SEQ ID NO: 60471 - DNA, 33 bp, Homo sapien
ctatctccttcacaaaaacttttctgcgtaagg

SEQ ID NO: 60472 - DNA, 33 bp, Homo sapien
ctatctccttcacaaagacttttctgcgtaagg

SEQ ID NO: 60473 - DNA, 33 bp, Homo sapien
ccatgcacaacaacttaaagcatattcttagca

SEQ ID NO: 60474 - DNA, 33 bp, Homo sapien
ccatgcacaacaactttaagcatattcttagca

SEQ ID NO: 60475 - DNA, 33 bp, Homo sapien
agcaatcatctgcaaagatctaaaggtttatat

SEQ ID NO: 60476 - DNA, 33 bp, Homo sapien
agcaatcatctgcaaatatctaaaggtttatat

SEQ ID NO: 60477 - DNA, 33 bp, Homo sapien
ttgattttgatgttaacggtggttaagatggat

SEQ ID NO: 60478 - DNA, 33 bp, Homo sapien
ttgattttgatgttaatggtggttaagatggat

SEQ ID NO: 60479 - DNA, 33 bp, Homo sapien
ataatgaaaattaacaagggatttgatttatct

SEQ ID NO: 60480 - DNA, 33 bp, Homo sapien
ataatgaaaattaacaggggatttgatttatct

SEQ ID NO: 60481 - DNA, 33 bp, Homo sapien
catttatcagtacacaaaactggttttatcctt

SEQ ID NO: 60482 - DNA, 33 bp, Homo sapien
catttatcagtacacagaactggttttatcctt

SEQ ID NO: 60483 - DNA, 33 bp, Homo sapien
taatccaactcttcctaaaaaaatagcatcaga

SEQ ID NO: 60484 - DNA, 33 bp, Homo sapien
taatccaactcttcctgaaaaaatagcatcaga

SEQ ID NO: 60485 - DNA, 33 bp, Homo sapien
agtgtgaggccactcaaggcaatgggcttaaca

SEQ ID NO: 60486 - DNA, 33 bp, Homo sapien
agtgtgaggccactcacggcaatgggcttaaca

SEQ ID NO: 60487 - DNA, 33 bp, Homo sapien
ggctaagctttggattaaaattggcatctgggc

SEQ ID NO: 60488 - DNA, 33 bp, Homo sapien
ggctaagctttggattcaaattggcatctgggc

SEQ ID NO: 60489 - DNA, 33 bp, Homo sapien
tacatttttaagagggcatttgcagctagtaaa

SEQ ID NO: 60490 - DNA, 33 bp, Homo sapien
tacatttttaagagggtatttgcagctagtaaa

SEQ ID NO: 60491 - DNA, 33 bp, Homo sapien
gacttttctaacctccagaatgctagaaagcag

SEQ ID NO: 60492 - DNA, 33 bp, Homo sapien
gacttttctaacctccggaatgctagaaagcag

SEQ ID NO: 60493 - DNA, 33 bp, Homo sapien
caatgatgaaggccaaatatcatgtctctcttg

SEQ ID NO: 60494 - DNA, 33 bp, Homo sapien
caatgatgaaggccaagtatcatgtctctcttg

SEQ ID NO: 60495 - DNA, 33 bp, Homo sapien
tagtctacatttgtaccgaaatgtccctaaatc

SEQ ID NO: 60496 - DNA, 33 bp, Homo sapien
tagtctacatttgtactgaaatgtccctaaatc

SEQ ID NO: 60497 - DNA, 33 bp, Homo sapien
tggtaatgattagagcacatattttgtctgcac

SEQ ID NO: 60498 - DNA, 33 bp, Homo sapien
tggtaatgattagagcgcatattttgtctgcac

SEQ ID NO: 60499 - DNA, 33 bp, Homo sapien
tagttcacctcattaactgagacaatctcaaaa

SEQ ID NO: 60500 - DNA, 33 bp, Homo sapien
tagttcacctcattaattgagacaatctcaaaa

SEQ ID NO: 60501 - DNA, 33 bp, Homo sapien
ggcaaaggaaatcaagcatgcacatttttggag

SEQ ID NO: 60502 - DNA, 33 bp, Homo sapien
ggcaaaggaaatcaagtatgcacatttttggag

SEQ ID NO: 60503 - DNA, 33 bp, Homo sapien
cattataaatgagtaaagatggagaaatatgga

SEQ ID NO: 60504 - DNA, 33 bp, Homo sapien
cattataaatgagtaaggatggagaaatatgga

SEQ ID NO: 60505 - DNA, 33 bp, Homo sapien
aagagagaaatttctacggctaggtagagtctt

SEQ ID NO: 60506 - DNA, 33 bp, Homo sapien
aagagagaaatttctatggctaggtagagtctt

SEQ ID NO: 60507 - DNA, 33 bp, Homo sapien
tctacatcaaatgatgaaccagagagacccaag

SEQ ID NO: 60508 - DNA, 33 bp, Homo sapien
tctacatcaaatgatggaccagagagacccaag

SEQ ID NO: 60509 - DNA, 33 bp, Homo sapien
ttcaattacgtcatcagcaaaaacaattgaata

SEQ ID NO: 60510 - DNA, 33 bp, Homo sapien
ttcaattacgtcatcatcaaaaacaattgaata

SEQ ID NO: 60511 - DNA, 33 bp, Homo sapien
tacatattggagaacacacatgtggatagatag

SEQ ID NO: 60512 - DNA, 33 bp, Homo sapien
tacatattggagaacatacatgtggatagatag

SEQ ID NO: 60513 - DNA, 33 bp, Homo sapien
aagtgtgtcctgggaacgtgactccatttatat

SEQ ID NO: 60514 - DNA, 33 bp, Homo sapien
aagtgtgtcctgggaatgtgactccatttatat

SEQ ID NO: 60515 - DNA, 33 bp, Homo sapien
cctacatttattttaaagaatcggctctgaaca

SEQ ID NO: 60516 - DNA, 33 bp, Homo sapien
cctacatttattttaaggaatcggctctgaaca

SEQ ID NO: 60517 - DNA, 33 bp, Homo sapien
caaaggacagtctgaacataggatgatggctga

SEQ ID NO: 60518 - DNA, 33 bp, Homo sapien
caaaggacagtctgaatataggatgatggctga

SEQ ID NO: 60519 - DNA, 33 bp, Homo sapien
gcttaccttttgcatgcacagattgttatttag

SEQ ID NO: 60520 - DNA, 33 bp, Homo sapien
gcttaccttttgcatgtacagattgttatttag

SEQ ID NO: 60521 - DNA, 33 bp, Homo sapien
gctctttgcacttttcgccttcagtcccccatg

SEQ ID NO: 60522 - DNA, 33 bp, Homo sapien
gctctttgcacttttctccttcagtcccccatg

SEQ ID NO: 60523 - DNA, 33 bp, Homo sapien
caatcctttgatacgaccaatgccattctttaa

SEQ ID NO: 60524 - DNA, 33 bp, Homo sapien
caatcctttgatacgatcaatgccattctttaa

SEQ ID NO: 60525 - DNA, 33 bp, Homo sapien
gtatagttacaaataacagaagacgtatactct

SEQ ID NO: 60526 - DNA, 33 bp, Homo sapien
gtatagttacaaataatagaagacgtatactct

SEQ ID NO: 60527 - DNA, 33 bp, Homo sapien
cacctagttatagacaaacagtgatgtttataa

SEQ ID NO: 60528 - DNA, 33 bp, Homo sapien
cacctagttatagacatacagtgatgtttataa

SEQ ID NO: 60529 - DNA, 33 bp, Homo sapien
atgaagacttgggcaagagagctgacattggag

SEQ ID NO: 60530 - DNA, 33 bp, Homo sapien
atgaagacttgggcaatagagctgacattggag

SEQ ID NO: 60531 - DNA, 33 bp, Homo sapien
cgccaagaaaaatgaccacagtattgctctcag

SEQ ID NO: 60532 - DNA, 33 bp, Homo sapien
cgccaagaaaaatgactacagtattgctctcag

SEQ ID NO: 60533 - DNA, 33 bp, Homo sapien
ataacttataaattgccacatttggtttgttcc

SEQ ID NO: 60534 - DNA, 33 bp, Homo sapien
ataacttataaattgctacatttggtttgttcc

SEQ ID NO: 60535 - DNA, 33 bp, Homo sapien
aggaatacaaaatgaacgagtgtacctgctatt

SEQ ID NO: 60536 - DNA, 33 bp, Homo sapien
aggaatacaaaatgaatgagtgtacctgctatt

SEQ ID NO: 60537 - DNA, 33 bp, Homo sapien
ggtagcaatttaaaccaagacagaaaaagaaga

SEQ ID NO: 60538 - DNA, 33 bp, Homo sapien
ggtagcaatttaaaccgagacagaaaaagaaga

SEQ ID NO: 60539 - DNA, 33 bp, Homo sapien
atgagttaaatatcacaagaggggaccttatct

SEQ ID NO: 60540 - DNA, 33 bp, Homo sapien
atgagttaaatatcacgagaggggaccttatct

SEQ ID NO: 60541 - DNA, 33 bp, Homo sapien
aatttagtacagtctacgatctggtttttaggt

SEQ ID NO: 60542 - DNA, 33 bp, Homo sapien
aatttagtacagtctaggatctggtttttaggt

SEQ ID NO: 60543 - DNA, 33 bp, Homo sapien
tggagaaatgtgtgataaggaaatgtatccaaa

SEQ ID NO: 60544 - DNA, 33 bp, Homo sapien
tggagaaatgtgtgattaggaaatgtatccaaa

SEQ ID NO: 60545 - DNA, 33 bp, Homo sapien
ttactaaaaatgttgacgcatgaattctgacac

SEQ ID NO: 60546 - DNA, 33 bp, Homo sapien
ttactaaaaatgttgatgcatgaattctgacac

SEQ ID NO: 60547 - DNA, 33 bp, Homo sapien
gtataccactaggccacgataacagcttgccta

SEQ ID NO: 60548 - DNA, 33 bp, Homo sapien
gtataccactaggccatgataacagcttgccta

SEQ ID NO: 60549 - DNA, 33 bp, Homo sapien
acaactctaatgtaccaattatcaatttcaaac

SEQ ID NO: 60550 - DNA, 33 bp, Homo sapien
acaactctaatgtaccgattatcaatttcaaac

SEQ ID NO: 60551 - DNA, 33 bp, Homo sapien
gtgcaagcaatagagccgaccattttcagattt

SEQ ID NO: 60552 - DNA, 33 bp, Homo sapien
gtgcaagcaatagagctgaccattttcagattt

SEQ ID NO: 60553 - DNA, 33 bp, Homo sapien
tgttgagaacatcagagcagagcctcagttttt

SEQ ID NO: 60554 - DNA, 33 bp, Homo sapien
tgttgagaacatcagatcagagcctcagttttt

SEQ ID NO: 60555 - DNA, 33 bp, Homo sapien
acacacagagtactaaaattctgagtttaggta

SEQ ID NO: 60556 - DNA, 33 bp, Homo sapien
acacacagagtactaacattctgagtttaggta

SEQ ID NO: 60557 - DNA, 33 bp, Homo sapien
gtctttccttcaagaaatgctgtgtagatccac

SEQ ID NO: 60558 - DNA, 33 bp, Homo sapien
gtctttccttcaagaagtgctgtgtagatccac

SEQ ID NO: 60559 - DNA, 33 bp, Homo sapien
agaaagatctaacagcaaatatggaaatagtta

SEQ ID NO: 60560 - DNA, 33 bp, Homo sapien
agaaagatctaacagcgaatatggaaatagtta

SEQ ID NO: 60561 - DNA, 33 bp, Homo sapien
atttgtgactataccacagaactttataaacag

SEQ ID NO: 60562 - DNA, 33 bp, Homo sapien
atttgtgactataccatagaactttataaacag

SEQ ID NO: 60563 - DNA, 33 bp, Homo sapien
atctcaatttttctaccggtcaacagtcactta

SEQ ID NO: 60564 - DNA, 33 bp, Homo sapien
atctcaatttttctactggtcaacagtcactta

SEQ ID NO: 60565 - DNA, 33 bp, Homo sapien
ggctaggacactaatgaagaagttttcctgttc

SEQ ID NO: 60566 - DNA, 33 bp, Homo sapien
ggctaggacactaatggagaagttttcctgttc

SEQ ID NO: 60567 - DNA, 33 bp, Homo sapien
tatttatctcaaccagacagaggtataattagg

SEQ ID NO: 60568 - DNA, 33 bp, Homo sapien
tatttatctcaaccaggcagaggtataattagg

SEQ ID NO: 60569 - DNA, 33 bp, Homo sapien
gaaaggaatggaactcaatagacctgtagtgct

SEQ ID NO: 60570 - DNA, 33 bp, Homo sapien
gaaaggaatggaactcgatagacctgtagtgct

SEQ ID NO: 60571 - DNA, 33 bp, Homo sapien
taagctcaataatccacgtaaagtatctagcat

SEQ ID NO: 60572 - DNA, 33 bp, Homo sapien
taagctcaataatccaggtaaagtatctagcat

SEQ ID NO: 60573 - DNA, 33 bp, Homo sapien
agtaagcctcctgagagaaaaatgattctatcg

SEQ ID NO: 60574 - DNA, 33 bp, Homo sapien
agtaagcctcctgagataaaaatgattctatcg

SEQ ID NO: 60575 - DNA, 33 bp, Homo sapien
tcagatttcattctggaaaaggtggagagccat

SEQ ID NO: 60576 - DNA, 33 bp, Homo sapien
tcagatttcattctgggaaaggtggagagccat

SEQ ID NO: 60577 - DNA, 33 bp, Homo sapien
actgaactatgaagtaagtgatgaaaatttaag

SEQ ID NO: 60578 - DNA, 33 bp, Homo sapien
actgaactatgaagtacgtgatgaaaatttaag

SEQ ID NO: 60579 - DNA, 33 bp, Homo sapien
cacgtcatgatcaagaaaagaggaacattctca

SEQ ID NO: 60580 - DNA, 33 bp, Homo sapien
cacgtcatgatcaagagaagaggaacattctca

SEQ ID NO: 60581 - DNA, 33 bp, Homo sapien
ttccctgcaacattcccgagtctcctttaagcc

SEQ ID NO: 60582 - DNA, 33 bp, Homo sapien
ttccctgcaacattcctgagtctcctttaagcc

SEQ ID NO: 60583 - DNA, 33 bp, Homo sapien
taattacatagcatccacattgttttgggaatt

SEQ ID NO: 60584 - DNA, 33 bp, Homo sapien
taattacatagcatccgcattgttttgggaatt

SEQ ID NO: 60585 - DNA, 33 bp, Homo sapien
gaaacctcatggttacagaggcacaatactact

SEQ ID NO: 60586 - DNA, 33 bp, Homo sapien
gaaacctcatggttacggaggcacaatactact

SEQ ID NO: 60587 - DNA, 33 bp, Homo sapien
ccttgctgaaataagcacatattagatattctt

SEQ ID NO: 60588 - DNA, 33 bp, Homo sapien
ccttgctgaaataagcgcatattagatattctt

SEQ ID NO: 60589 - DNA, 33 bp, Homo sapien
taagagtgatgaaataactgtctgttggtatgt

SEQ ID NO: 60590 - DNA, 33 bp, Homo sapien
taagagtgatgaaatacctgtctgttggtatgt

SEQ ID NO: 60591 - DNA, 33 bp, Homo sapien
taaaatataacgaggaactgaactagagcatta

SEQ ID NO: 60592 - DNA, 33 bp, Homo sapien
taaaatataacgaggagctgaactagagcatta

SEQ ID NO: 60593 - DNA, 33 bp, Homo sapien
ccactggatgatttcaacctaaaaaaacaaaaa

SEQ ID NO: 60594 - DNA, 33 bp, Homo sapien
ccactggatgatttcagcctaaaaaaacaaaaa

SEQ ID NO: 60595 - DNA, 33 bp, Homo sapien
tcactgtgctaagaaccggaattaaaaagataa

SEQ ID NO: 60596 - DNA, 33 bp, Homo sapien
tcactgtgctaagaacgggaattaaaaagataa

SEQ ID NO: 60597 - DNA, 33 bp, Homo sapien
tgccttgagcaatcagaaaaactaatcagtatt

SEQ ID NO: 60598 - DNA, 33 bp, Homo sapien
tgccttgagcaatcaggaaaactaatcagtatt

SEQ ID NO: 60599 - DNA, 33 bp, Homo sapien
gcatcttgtaaataccccaattgtagcagttcc

SEQ ID NO: 60600 - DNA, 33 bp, Homo sapien
gcatcttgtaaatacctcaattgtagcagttcc

SEQ ID NO: 60601 - DNA, 33 bp, Homo sapien
catcatgatatgctaacaacaattggacatatt

SEQ ID NO: 60602 - DNA, 33 bp, Homo sapien
catcatgatatgctaagaacaattggacatatt

SEQ ID NO: 60603 - DNA, 33 bp, Homo sapien
ctatattatcttcctaaatgttggcattcagct

SEQ ID NO: 60604 - DNA, 33 bp, Homo sapien
ctatattatcttcctagatgttggcattcagct

SEQ ID NO: 60605 - DNA, 33 bp, Homo sapien
ttcagacaatccttccaacaattacttcctgta

SEQ ID NO: 60606 - DNA, 33 bp, Homo sapien
ttcagacaatccttcccacaattacttcctgta

SEQ ID NO: 60607 - DNA, 33 bp, Homo sapien
atgagtctgactctgcaaagtaagctgcttaat

SEQ ID NO: 60608 - DNA, 33 bp, Homo sapien
atgagtctgactctgcgaagtaagctgcttaat

SEQ ID NO: 60609 - DNA, 33 bp, Homo sapien
ctgtggattagataacaagattagataatgaaa

SEQ ID NO: 60610 - DNA, 33 bp, Homo sapien
ctgtggattagataaccagattagataatgaaa

SEQ ID NO: 60611 - DNA, 33 bp, Homo sapien
agtaactatttgcaccagaaagtaaggaagtac

SEQ ID NO: 60612 - DNA, 33 bp, Homo sapien
agtaactatttgcaccggaaagtaaggaagtac

SEQ ID NO: 60613 - DNA, 33 bp, Homo sapien
gcaaaatattataactcaatttgttacactatg

SEQ ID NO: 60614 - DNA, 33 bp, Homo sapien
gcaaaatattataactgaatttgttacactatg

SEQ ID NO: 60615 - DNA, 33 bp, Homo sapien
agcaagttccctgaaaacaaaaatatgacctgg

SEQ ID NO: 60616 - DNA, 33 bp, Homo sapien
agcaagttccctgaaagcaaaaatatgacctgg

SEQ ID NO: 60617 - DNA, 33 bp, Homo sapien
gtataatgttgactcactatttccaacactcac

SEQ ID NO: 60618 - DNA, 33 bp, Homo sapien
gtataatgttgactcagtatttccaacactcac

SEQ ID NO: 60619 - DNA, 33 bp, Homo sapien
actgtaagcatcatgaagagttagcatgcaggg

SEQ ID NO: 60620 - DNA, 33 bp, Homo sapien
actgtaagcatcatgaggagttagcatgcaggg

SEQ ID NO: 60621 - DNA, 33 bp, Homo sapien
tcctgtatttgtgtgactcaatttaacatacat

SEQ ID NO: 60622 - DNA, 33 bp, Homo sapien
tcctgtatttgtgtgattcaatttaacatacat

SEQ ID NO: 60623 - DNA, 33 bp, Homo sapien
atcatggccacaaaccaatggtcttagctctct

SEQ ID NO: 60624 - DNA, 33 bp, Homo sapien
atcatggccacaaaccgatggtcttagctctct

SEQ ID NO: 60625 - DNA, 33 bp, Homo sapien
aaaggagtcaagttataaattcaggagagatgg

SEQ ID NO: 60626 - DNA, 33 bp, Homo sapien
aaaggagtcaagttatgaattcaggagagatgg

SEQ ID NO: 60627 - DNA, 33 bp, Homo sapien
gtcatgtctgaaaaaacggatggtggattctag

SEQ ID NO: 60628 - DNA, 33 bp, Homo sapien
gtcatgtctgaaaaaatggatggtggattctag

SEQ ID NO: 60629 - DNA, 33 bp, Homo sapien
atgaaaagtccagaaaaggaaagtctatataga

SEQ ID NO: 60630 - DNA, 33 bp, Homo sapien
atgaaaagtccagaaagggaaagtctatataga

SEQ ID NO: 60631 - DNA, 33 bp, Homo sapien
caccagatagaaacacaaactgttaatctttag

SEQ ID NO: 60632 - DNA, 33 bp, Homo sapien
caccagatagaaacaccaactgttaatctttag

SEQ ID NO: 60633 - DNA, 33 bp, Homo sapien
agattttggaccttggacatttttctgaacttc

SEQ ID NO: 60634 - DNA, 33 bp, Homo sapien
agattttggaccttgggcatttttctgaacttc

SEQ ID NO: 60635 - DNA, 33 bp, Homo sapien
accaggcagtgagaaaagtattggtaaagccct

SEQ ID NO: 60636 - DNA, 33 bp, Homo sapien
accaggcagtgagaaaggtattggtaaagccct

SEQ ID NO: 60637 - DNA, 33 bp, Homo sapien
actttatctcctaggcaacaaaacagctgatcc

SEQ ID NO: 60638 - DNA, 33 bp, Homo sapien
actttatctcctaggcgacaaaacagctgatcc

SEQ ID NO: 60639 - DNA, 33 bp, Homo sapien
gaattgttggttactccagtttgtcacacatgt

SEQ ID NO: 60640 - DNA, 33 bp, Homo sapien
gaattgttggttactctagtttgtcacacatgt

SEQ ID NO: 60641 - DNA, 33 bp, Homo sapien
cctccgttttcctttccagaggcaagcgctatt

SEQ ID NO: 60642 - DNA, 33 bp, Homo sapien
cctccgttttcctttctagaggcaagcgctatt

SEQ ID NO: 60643 - DNA, 33 bp, Homo sapien
ggggaggtagttaaacaagtacataatacatac

SEQ ID NO: 60644 - DNA, 33 bp, Homo sapien
ggggaggtagttaaacgagtacataatacatac

SEQ ID NO: 60645 - DNA, 33 bp, Homo sapien
gcaaagacataaggaggaatattccacgcaaag

SEQ ID NO: 60646 - DNA, 33 bp, Homo sapien
gcaaagacataaggagtaatattccacgcaaag

SEQ ID NO: 60647 - DNA, 33 bp, Homo sapien
cttggatctcacataaaaaagaattcagggcga

SEQ ID NO: 60648 - DNA, 33 bp, Homo sapien
cttggatctcacataagaaagaattcagggcga

SEQ ID NO: 60649 - DNA, 33 bp, Homo sapien
cagacccaatgttctccgactttgaccactgca

SEQ ID NO: 60650 - DNA, 33 bp, Homo sapien
cagacccaatgttctctgactttgaccactgca

SEQ ID NO: 60651 - DNA, 33 bp, Homo sapien
aagtcgtccttgatgagcttactggtcaaagat

SEQ ID NO: 60652 - DNA, 33 bp, Homo sapien
aagtcgtccttgatgatcttactggtcaaagat

SEQ ID NO: 60653 - DNA, 33 bp, Homo sapien
ccagtctaggtttccactaggattcttactggg

SEQ ID NO: 60654 - DNA, 33 bp, Homo sapien
ccagtctaggtttccagtaggattcttactggg

SEQ ID NO: 60655 - DNA, 33 bp, Homo sapien
agaactgaaatgcgtgaagaacagactggtttt

SEQ ID NO: 60656 - DNA, 33 bp, Homo sapien
agaactgaaatgcgtggagaacagactggtttt

SEQ ID NO: 60657 - DNA, 33 bp, Homo sapien
cctacctgtcaacgtgaaatagagaaaagtcag

SEQ ID NO: 60658 - DNA, 33 bp, Homo sapien
cctacctgtcaacgtggaatagagaaaagtcag

SEQ ID NO: 60659 - DNA, 33 bp, Homo sapien
tggcttccctaggaacagcagagataggctagc

SEQ ID NO: 60660 - DNA, 33 bp, Homo sapien
tggcttccctaggaacggcagagataggctagc

SEQ ID NO: 60661 - DNA, 33 bp, Homo sapien
aacagaggctgtggagaatagtctttgtgtcca

SEQ ID NO: 60662 - DNA, 33 bp, Homo sapien
aacagaggctgtggaggatagtctttgtgtcca

SEQ ID NO: 60663 - DNA, 33 bp, Homo sapien
caatctgctttactaaatctacccacttaaatg

SEQ ID NO: 60664 - DNA, 33 bp, Homo sapien
caatctgctttactaagtctacccacttaaatg

SEQ ID NO: 60665 - DNA, 33 bp, Homo sapien
atctaagatgtccagaaagtggtgatttggggg

SEQ ID NO: 60666 - DNA, 33 bp, Homo sapien
atctaagatgtccagagagtggtgatttggggg

SEQ ID NO: 60667 - DNA, 33 bp, Homo sapien
tgtacaatttcatatacgccctgatactaagcc

SEQ ID NO: 60668 - DNA, 33 bp, Homo sapien
tgtacaatttcatatatgccctgatactaagcc

SEQ ID NO: 60669 - DNA, 33 bp, Homo sapien
ttcctgttgggaaagactcagtggaagaaataa

SEQ ID NO: 60670 - DNA, 33 bp, Homo sapien
ttcctgttgggaaagattcagtggaagaaataa

SEQ ID NO: 60671 - DNA, 33 bp, Homo sapien
tcttcttttcagaaagaccttatttaatgatca

SEQ ID NO: 60672 - DNA, 33 bp, Homo sapien
tcttcttttcagaaaggccttatttaatgatca

SEQ ID NO: 60673 - DNA, 33 bp, Homo sapien
ggaaacgcttagctacaagagtgactaggaatg

SEQ ID NO: 60674 - DNA, 33 bp, Homo sapien
ggaaacgcttagctacgagagtgactaggaatg

SEQ ID NO: 60675 - DNA, 33 bp, Homo sapien
tctagctggatgggaacgaatacagccctcagg

SEQ ID NO: 60676 - DNA, 33 bp, Homo sapien
tctagctggatgggaatgaatacagccctcagg

SEQ ID NO: 60677 - DNA, 33 bp, Homo sapien
gcccagaatggagggggatcctggaatacaaga

SEQ ID NO: 60678 - DNA, 33 bp, Homo sapien
gcccagaatggaggggtatcctggaatacaaga

SEQ ID NO: 60679 - DNA, 33 bp, Homo sapien
ttgcattttgtgaataaataagaagcagctagg

SEQ ID NO: 60680 - DNA, 33 bp, Homo sapien
ttgcattttgtgaatagataagaagcagctagg

SEQ ID NO: 60681 - DNA, 33 bp, Homo sapien
tgcatggctttctaaactttaagatgtgattca

SEQ ID NO: 60682 - DNA, 33 bp, Homo sapien
tgcatggctttctaaattttaagatgtgattca

SEQ ID NO: 60683 - DNA, 33 bp, Homo sapien
ctaggcagaagcaagacaagaggagttccggag

SEQ ID NO: 60684 - DNA, 33 bp, Homo sapien
ctaggcagaagcaagataagaggagttccggag

SEQ ID NO: 60685 - DNA, 33 bp, Homo sapien
ttcacttcttataggacgataacaaaaacatat

SEQ ID NO: 60686 - DNA, 33 bp, Homo sapien
ttcacttcttataggatgataacaaaaacatat

SEQ ID NO: 60687 - DNA, 33 bp, Homo sapien
tgtgtgatggtgtgataaaacattttaaatggt

SEQ ID NO: 60688 - DNA, 33 bp, Homo sapien
tgtgtgatggtgtgatgaaacattttaaatggt

SEQ ID NO: 60689 - DNA, 33 bp, Homo sapien
cagtgaaagagtcacaataatttttctccataa

SEQ ID NO: 60690 - DNA, 33 bp, Homo sapien
cagtgaaagagtcacactaatttttctccataa

SEQ ID NO: 60691 - DNA, 33 bp, Homo sapien
atcacttttttgcaataattacattcagaggaa

SEQ ID NO: 60692 - DNA, 33 bp, Homo sapien
atcacttttttgcaatgattacattcagaggaa

SEQ ID NO: 60693 - DNA, 33 bp, Homo sapien
caaacacctgtagagcaagtaccttctaatgca

SEQ ID NO: 60694 - DNA, 33 bp, Homo sapien
caaacacctgtagagcgagtaccttctaatgca

SEQ ID NO: 60695 - DNA, 33 bp, Homo sapien
ttacatatgagaaaaaatagccccagtcctgag

SEQ ID NO: 60696 - DNA, 33 bp, Homo sapien
ttacatatgagaaaaagtagccccagtcctgag

SEQ ID NO: 60697 - DNA, 33 bp, Homo sapien
tttccttgtgggtaaggaaagcagtttgttcag

SEQ ID NO: 60698 - DNA, 33 bp, Homo sapien
tttccttgtgggtaagtaaagcagtttgttcag

SEQ ID NO: 60699 - DNA, 33 bp, Homo sapien
ttaagtcatgtgaaaacttcagtacaaaatgac

SEQ ID NO: 60700 - DNA, 33 bp, Homo sapien
ttaagtcatgtgaaaatttcagtacaaaatgac

SEQ ID NO: 60701 - DNA, 33 bp, Homo sapien
caactaataccttagccacgaataaatgtgtat

SEQ ID NO: 60702 - DNA, 33 bp, Homo sapien
caactaataccttagcgacgaataaatgtgtat

SEQ ID NO: 60703 - DNA, 33 bp, Homo sapien
gcttttagataccgaaatcgtgtaagcatatat

SEQ ID NO: 60704 - DNA, 33 bp, Homo sapien
gcttttagataccgaactcgtgtaagcatatat

SEQ ID NO: 60705 - DNA, 33 bp, Homo sapien
aggtatatggaaagaaaccttaaatcatatata

SEQ ID NO: 60706 - DNA, 33 bp, Homo sapien
aggtatatggaaagaagccttaaatcatatata

SEQ ID NO: 60707 - DNA, 33 bp, Homo sapien
ctacagtaatatacccacacctctagaaggaag

SEQ ID NO: 60708 - DNA, 33 bp, Homo sapien
ctacagtaatatacccccacctctagaaggaag

SEQ ID NO: 60709 - DNA, 33 bp, Homo sapien
tattcaaaacctttcacatttgattatcaacta

SEQ ID NO: 60710 - DNA, 33 bp, Homo sapien
tattcaaaacctttcatatttgattatcaacta

SEQ ID NO: 60711 - DNA, 33 bp, Homo sapien
ctcaaaacaagtacgaacaatgtggaacaatat

SEQ ID NO: 60712 - DNA, 33 bp, Homo sapien
ctcaaaacaagtacgagcaatgtggaacaatat

SEQ ID NO: 60713 - DNA, 33 bp, Homo sapien
tctagcactgttaggaacacatagatttttttt

SEQ ID NO: 60714 - DNA, 33 bp, Homo sapien
tctagcactgttaggaccacatagatttttttt

SEQ ID NO: 60715 - DNA, 33 bp, Homo sapien
ttatctattgaatgctgactgtagtccaggtat

SEQ ID NO: 60716 - DNA, 33 bp, Homo sapien
ttatctattgaatgcttactgtagtccaggtat

SEQ ID NO: 60717 - DNA, 33 bp, Homo sapien
tgtattcagcaaaacccagattagcactttgct

SEQ ID NO: 60718 - DNA, 33 bp, Homo sapien
tgtattcagcaaaaccgagattagcactttgct

SEQ ID NO: 60719 - DNA, 33 bp, Homo sapien
tatacaacctaaataacgcatacaaactcatat

SEQ ID NO: 60720 - DNA, 33 bp, Homo sapien
tatacaacctaaataatgcatacaaactcatat

SEQ ID NO: 60721 - DNA, 33 bp, Homo sapien
ttcccattgaagatgtcaaatagagcttttttt

SEQ ID NO: 60722 - DNA, 33 bp, Homo sapien
ttcccattgaagatgtgaaatagagcttttttt

SEQ ID NO: 60723 - DNA, 33 bp, Homo sapien
cactctgacatcaaaacaatgactagttgcttg

SEQ ID NO: 60724 - DNA, 33 bp, Homo sapien
cactctgacatcaaaagaatgactagttgcttg

SEQ ID NO: 60725 - DNA, 33 bp, Homo sapien
ccttagacattgcttgaattacactagacatca

SEQ ID NO: 60726 - DNA, 33 bp, Homo sapien
ccttagacattgcttggattacactagacatca

SEQ ID NO: 60727 - DNA, 33 bp, Homo sapien
cagttgaagtgaaacacagaagtagtacaggtt

SEQ ID NO: 60728 - DNA, 33 bp, Homo sapien
cagttgaagtgaaacatagaagtagtacaggtt

SEQ ID NO: 60729 - DNA, 33 bp, Homo sapien
ctacacaagttacacaagtggctttatattata

SEQ ID NO: 60730 - DNA, 33 bp, Homo sapien
ctacacaagttacacaggtggctttatattata

SEQ ID NO: 60731 - DNA, 33 bp, Homo sapien
gttatcctcagcacaaattcagtaaagagacta

SEQ ID NO: 60732 - DNA, 33 bp, Homo sapien
gttatcctcagcacaacttcagtaaagagacta

SEQ ID NO: 60733 - DNA, 33 bp, Homo sapien
cagctgttataggtgaaagcctcaagtaaagat

SEQ ID NO: 60734 - DNA, 33 bp, Homo sapien
cagctgttataggtgagagcctcaagtaaagat

SEQ ID NO: 60735 - DNA, 33 bp, Homo sapien
agttgtggaacttaaccgaagctttctctggat

SEQ ID NO: 60736 - DNA, 33 bp, Homo sapien
agttgtggaacttaactgaagctttctctggat

SEQ ID NO: 60737 - DNA, 33 bp, Homo sapien
acaaaagatagtgaagaaccacctattaacagg

SEQ ID NO: 60738 - DNA, 33 bp, Homo sapien
acaaaagatagtgaagcaccacctattaacagg

SEQ ID NO: 60739 - DNA, 33 bp, Homo sapien
tctcttttgagagacaaaattgtaaaggaaaga

SEQ ID NO: 60740 - DNA, 33 bp, Homo sapien
tctcttttgagagacacaattgtaaaggaaaga

SEQ ID NO: 60741 - DNA, 33 bp, Homo sapien
tgaccaatgataatgacgataatgaaatgttta

SEQ ID NO: 60742 - DNA, 33 bp, Homo sapien
tgaccaatgataatgatgataatgaaatgttta

SEQ ID NO: 60743 - DNA, 33 bp, Homo sapien
acattgttggcttaccagggtttacagtttctt

SEQ ID NO: 60744 - DNA, 33 bp, Homo sapien
acattgttggcttaccggggtttacagtttctt

SEQ ID NO: 60745 - DNA, 33 bp, Homo sapien
taaatcttaagctttccatttgtacttccccct

SEQ ID NO: 60746 - DNA, 33 bp, Homo sapien
taaatcttaagctttctatttgtacttccccct

SEQ ID NO: 60747 - DNA, 33 bp, Homo sapien
ggtcttctagctccagaaagtttaagctctttt

SEQ ID NO: 60748 - DNA, 33 bp, Homo sapien
ggtcttctagctccaggaagtttaagctctttt

SEQ ID NO: 60749 - DNA, 33 bp, Homo sapien
ctcatcacgcccttcaatcttaggcagaattca

SEQ ID NO: 60750 - DNA, 33 bp, Homo sapien
ctcatcacgcccttcagtcttaggcagaattca

SEQ ID NO: 60751 - DNA, 33 bp, Homo sapien
aaaagtcttttaataaatcactgtcatattctt

SEQ ID NO: 60752 - DNA, 33 bp, Homo sapien
aaaagtcttttaataagtcactgtcatattctt

SEQ ID NO: 60753 - DNA, 33 bp, Homo sapien
ttaagctccgaattaaactcaatagttgaatag

SEQ ID NO: 60754 - DNA, 33 bp, Homo sapien
ttaagctccgaattaagctcaatagttgaatag

SEQ ID NO: 60755 - DNA, 33 bp, Homo sapien
ttgcctgtttgcttcaccttgactcttaaccct

SEQ ID NO: 60756 - DNA, 33 bp, Homo sapien
ttgcctgtttgcttcatcttgactcttaaccct

SEQ ID NO: 60757 - DNA, 33 bp, Homo sapien
gaggcccatggcaagaaaagatgccctagccaa

SEQ ID NO: 60758 - DNA, 33 bp, Homo sapien
gaggcccatggcaagagaagatgccctagccaa

SEQ ID NO: 60759 - DNA, 33 bp, Homo sapien
ctctggaaaggtctcaatgaaaaaacctatatt

SEQ ID NO: 60760 - DNA, 33 bp, Homo sapien
ctctggaaaggtctcagtgaaaaaacctatatt

SEQ ID NO: 60761 - DNA, 33 bp, Homo sapien
taagaaatctagaagcagcctttaaggaggaaa

SEQ ID NO: 60762 - DNA, 33 bp, Homo sapien
taagaaatctagaagcggcctttaaggaggaaa

SEQ ID NO: 60763 - DNA, 33 bp, Homo sapien
taccagcaatcctgaccgtattatacctgatct

SEQ ID NO: 60764 - DNA, 33 bp, Homo sapien
taccagcaatcctgactgtattatacctgatct

SEQ ID NO: 60765 - DNA, 33 bp, Homo sapien
attggtcagtggttaggatcaccagatatttta

SEQ ID NO: 60766 - DNA, 33 bp, Homo sapien
attggtcagtggttagtatcaccagatatttta

SEQ ID NO: 60767 - DNA, 33 bp, Homo sapien
gtcataaatattttaacatgtcaactaatactt

SEQ ID NO: 60768 - DNA, 33 bp, Homo sapien
gtcataaatattttaagatgtcaactaatactt

SEQ ID NO: 60769 - DNA, 33 bp, Homo sapien
cagagagagtaaggtaaagactcaatacatatg

SEQ ID NO: 60770 - DNA, 33 bp, Homo sapien
cagagagagtaaggtagagactcaatacatatg

SEQ ID NO: 60771 - DNA, 33 bp, Homo sapien
cctgtgacttccttcccaataaaagtatttgga

SEQ ID NO: 60772 - DNA, 33 bp, Homo sapien
cctgtgacttccttcctaataaaagtatttgga

SEQ ID NO: 60773 - DNA, 33 bp, Homo sapien
cacattcagtgagtcacagaagccctttacctg

SEQ ID NO: 60774 - DNA, 33 bp, Homo sapien
cacattcagtgagtcatagaagccctttacctg

SEQ ID NO: 60775 - DNA, 33 bp, Homo sapien
ttgtcactgccataccacatagccatttcagtc

SEQ ID NO: 60776 - DNA, 33 bp, Homo sapien
ttgtcactgccatacctcatagccatttcagtc

SEQ ID NO: 60777 - DNA, 33 bp, Homo sapien
tgaggatatgacttaccaccagaccagtcttac

SEQ ID NO: 60778 - DNA, 33 bp, Homo sapien
tgaggatatgacttactaccagaccagtcttac

SEQ ID NO: 60779 - DNA, 33 bp, Homo sapien
agagaagaatccctgacgtatcaaaaatggtaa

SEQ ID NO: 60780 - DNA, 33 bp, Homo sapien
agagaagaatccctgatgtatcaaaaatggtaa

SEQ ID NO: 60781 - DNA, 33 bp, Homo sapien
cagtttattacggataacattactaaccaaaat

SEQ ID NO: 60782 - DNA, 33 bp, Homo sapien
cagtttattacggatagcattactaaccaaaat

SEQ ID NO: 60783 - DNA, 33 bp, Homo sapien
cttccataagtcaataatattcagttgatatgt

SEQ ID NO: 60784 - DNA, 33 bp, Homo sapien
cttccataagtcaatactattcagttgatatgt

SEQ ID NO: 60785 - DNA, 33 bp, Homo sapien
attttcttgtatatcacgaagctttgaaacaac

SEQ ID NO: 60786 - DNA, 33 bp, Homo sapien
attttcttgtatatcaggaagctttgaaacaac

SEQ ID NO: 60787 - DNA, 33 bp, Homo sapien
acttgaaggttttggcaaaagaactgttgaggg

SEQ ID NO: 60788 - DNA, 33 bp, Homo sapien
acttgaaggttttggcgaaagaactgttgaggg

SEQ ID NO: 60789 - DNA, 33 bp, Homo sapien
ccacgaggagtttcaaaaagcagtctggaagga

SEQ ID NO: 60790 - DNA, 33 bp, Homo sapien
ccacgaggagtttcaacaagcagtctggaagga

SEQ ID NO: 60791 - DNA, 33 bp, Homo sapien
ggaggagttaggcaaagggtacagaagactcta

SEQ ID NO: 60792 - DNA, 33 bp, Homo sapien
ggaggagttaggcaaatggtacagaagactcta

SEQ ID NO: 60793 - DNA, 33 bp, Homo sapien
tacacccagcaatcagaagaatgaaaatacctt

SEQ ID NO: 60794 - DNA, 33 bp, Homo sapien
tacacccagcaatcaggagaatgaaaatacctt

SEQ ID NO: 60795 - DNA, 33 bp, Homo sapien
tgaaggaagatgaaaacgtggggagagcctctg

SEQ ID NO: 60796 - DNA, 33 bp, Homo sapien
tgaaggaagatgaaaaggtggggagagcctctg

SEQ ID NO: 60797 - DNA, 33 bp, Homo sapien
atctgcactaatcactaacactgatcacaaaca

SEQ ID NO: 60798 - DNA, 33 bp, Homo sapien
atctgcactaatcactgacactgatcacaaaca

SEQ ID NO: 60799 - DNA, 33 bp, Homo sapien
agctgtgcttgaataacgatatgttttctcaga

SEQ ID NO: 60800 - DNA, 33 bp, Homo sapien
agctgtgcttgaataatgatatgttttctcaga

SEQ ID NO: 60801 - DNA, 33 bp, Homo sapien
ttctcgttttggaacacagttggatgaggaatt

SEQ ID NO: 60802 - DNA, 33 bp, Homo sapien
ttctcgttttggaacatagttggatgaggaatt

SEQ ID NO: 60803 - DNA, 33 bp, Homo sapien
caaagatgaaattccaactgtcaaaatctccct

SEQ ID NO: 60804 - DNA, 33 bp, Homo sapien
caaagatgaaattccagctgtcaaaatctccct

SEQ ID NO: 60805 - DNA, 33 bp, Homo sapien
caacacaatatgctggaatttttattgaaatta

SEQ ID NO: 60806 - DNA, 33 bp, Homo sapien
caacacaatatgctgggatttttattgaaatta

SEQ ID NO: 60807 - DNA, 33 bp, Homo sapien
tagttcaatgaaagaaacacgtaatttgaagca

SEQ ID NO: 60808 - DNA, 33 bp, Homo sapien
tagttcaatgaaagaagcacgtaatttgaagca

SEQ ID NO: 60809 - DNA, 33 bp, Homo sapien
aagctttctctaaaaagcgattgagatccaaag

SEQ ID NO: 60810 - DNA, 33 bp, Homo sapien
aagctttctctaaaaatcgattgagatccaaag

SEQ ID NO: 60811 - DNA, 33 bp, Homo sapien
tacacctgtaaaactgcagacactcaactccag

SEQ ID NO: 60812 - DNA, 33 bp, Homo sapien
tacacctgtaaaactgtagacactcaactccag

SEQ ID NO: 60813 - DNA, 33 bp, Homo sapien
gtgtaatttaattcaaacacttctgcacacttg

SEQ ID NO: 60814 - DNA, 33 bp, Homo sapien
gtgtaatttaattcaatcacttctgcacacttg

SEQ ID NO: 60815 - DNA, 33 bp, Homo sapien
actggctgtccctttaccttaaacaatcatctc

SEQ ID NO: 60816 - DNA, 33 bp, Homo sapien
actggctgtccctttatcttaaacaatcatctc

SEQ ID NO: 60817 - DNA, 33 bp, Homo sapien
tcatggcaatctgcaactgaaaacacagggtat

SEQ ID NO: 60818 - DNA, 33 bp, Homo sapien
tcatggcaatctgcaattgaaaacacagggtat

SEQ ID NO: 60819 - DNA, 33 bp, Homo sapien
gaggcaggcccccacaacaagtcacaggtagag

SEQ ID NO: 60820 - DNA, 33 bp, Homo sapien
gaggcaggcccccacagcaagtcacaggtagag

SEQ ID NO: 60821 - DNA, 33 bp, Homo sapien
tacagaaaagtacctaagatgaactactgaaaa

SEQ ID NO: 60822 - DNA, 33 bp, Homo sapien
tacagaaaagtacctaggatgaactactgaaaa

SEQ ID NO: 60823 - DNA, 33 bp, Homo sapien
ttctttcacctaataacttataattttctctca

SEQ ID NO: 60824 - DNA, 33 bp, Homo sapien
ttctttcacctaataagttataattttctctca

SEQ ID NO: 60825 - DNA, 33 bp, Homo sapien
atcaatagagttaacagtaagactgatatttaa

SEQ ID NO: 60826 - DNA, 33 bp, Homo sapien
atcaatagagttaacattaagactgatatttaa

SEQ ID NO: 60827 - DNA, 33 bp, Homo sapien
gccacacataaaatacactaatactaatgatag

SEQ ID NO: 60828 - DNA, 33 bp, Homo sapien
gccacacataaaatacgctaatactaatgatag

SEQ ID NO: 60829 - DNA, 33 bp, Homo sapien
taaggtcttggccaaagcttctactttaaagtc

SEQ ID NO: 60830 - DNA, 33 bp, Homo sapien
taaggtcttggccaaatcttctactttaaagtc

SEQ ID NO: 60831 - DNA, 33 bp, Homo sapien
tagaatgtatgacatacggttcacattcaatga

SEQ ID NO: 60832 - DNA, 33 bp, Homo sapien
tagaatgtatgacatatggttcacattcaatga

SEQ ID NO: 60833 - DNA, 33 bp, Homo sapien
tgggcctgaaatacaacgagaaaatgctcttga

SEQ ID NO: 60834 - DNA, 33 bp, Homo sapien
tgggcctgaaatacaatgagaaaatgctcttga

SEQ ID NO: 60835 - DNA, 33 bp, Homo sapien
catttcttgtctctaaagtgaaaaattgaaaat

SEQ ID NO: 60836 - DNA, 33 bp, Homo sapien
catttcttgtctctaaggtgaaaaattgaaaat

SEQ ID NO: 60837 - DNA, 33 bp, Homo sapien
tgtttactaaaccacactggattcttcactaac

SEQ ID NO: 60838 - DNA, 33 bp, Homo sapien
tgtttactaaaccacattggattcttcactaac

SEQ ID NO: 60839 - DNA, 33 bp, Homo sapien
aggcagagtgccacagaacttgtttacatgtag

SEQ ID NO: 60840 - DNA, 33 bp, Homo sapien
aggcagagtgccacaggacttgtttacatgtag

SEQ ID NO: 60841 - DNA, 33 bp, Homo sapien
aacagtctccactcaaacttcattttactcttt

SEQ ID NO: 60842 - DNA, 33 bp, Homo sapien
aacagtctccactcaagcttcattttactcttt

SEQ ID NO: 60843 - DNA, 33 bp, Homo sapien
tccaagagtctcacataaagtctgagatatagg

SEQ ID NO: 60844 - DNA, 33 bp, Homo sapien
tccaagagtctcacatgaagtctgagatatagg

SEQ ID NO: 60845 - DNA, 33 bp, Homo sapien
tgaatgaacttgctcaactcactaaatgcctct

SEQ ID NO: 60846 - DNA, 33 bp, Homo sapien
tgaatgaacttgctcagctcactaaatgcctct

SEQ ID NO: 60847 - DNA, 33 bp, Homo sapien
ccatataaataactgcaatcattcctttgcaac

SEQ ID NO: 60848 - DNA, 33 bp, Homo sapien
ccatataaataactgcgatcattcctttgcaac

SEQ ID NO: 60849 - DNA, 33 bp, Homo sapien
caactgctattctaaacatggagttttacttct

SEQ ID NO: 60850 - DNA, 33 bp, Homo sapien
caactgctattctaaatatggagttttacttct

SEQ ID NO: 60851 - DNA, 33 bp, Homo sapien
ctcacttcctcattgcacaagtgggtcacccac

SEQ ID NO: 60852 - DNA, 33 bp, Homo sapien
ctcacttcctcattgcccaagtgggtcacccac

SEQ ID NO: 60853 - DNA, 33 bp, Homo sapien
ccttttgcttactcataaaattcagcactgaga

SEQ ID NO: 60854 - DNA, 33 bp, Homo sapien
ccttttgcttactcatgaaattcagcactgaga

SEQ ID NO: 60855 - DNA, 33 bp, Homo sapien
catcctgccagagagaaaatttttgtgtaaagg

SEQ ID NO: 60856 - DNA, 33 bp, Homo sapien
catcctgccagagagacaatttttgtgtaaagg

SEQ ID NO: 60857 - DNA, 33 bp, Homo sapien
cttgtctaatggatgcccccctctaacaaagaa

SEQ ID NO: 60858 - DNA, 33 bp, Homo sapien
cttgtctaatggatgctcccctctaacaaagaa

SEQ ID NO: 60859 - DNA, 33 bp, Homo sapien
gtaagtcctctctataaaaggcacagaaagaga

SEQ ID NO: 60860 - DNA, 33 bp, Homo sapien
gtaagtcctctctatacaaggcacagaaagaga

SEQ ID NO: 60861 - DNA, 33 bp, Homo sapien
cctccttttgtggaaaagattagtaagtcttcc

SEQ ID NO: 60862 - DNA, 33 bp, Homo sapien
cctccttttgtggaaaggattagtaagtcttcc

SEQ ID NO: 60863 - DNA, 33 bp, Homo sapien
atatgagcatgttattcaaatttcccaatgctc

SEQ ID NO: 60864 - DNA, 33 bp, Homo sapien
atatgagcatgttatttaaatttcccaatgctc

SEQ ID NO: 60865 - DNA, 33 bp, Homo sapien
acaattaaccaacacaatgcccagaatatagta

SEQ ID NO: 60866 - DNA, 33 bp, Homo sapien
acaattaaccaacacagtgcccagaatatagta

SEQ ID NO: 60867 - DNA, 33 bp, Homo sapien
attaatgaaaagataaccaacaagtaaaacaat

SEQ ID NO: 60868 - DNA, 33 bp, Homo sapien
attaatgaaaagataatcaacaagtaaaacaat

SEQ ID NO: 60869 - DNA, 33 bp, Homo sapien
agaagcttaacaatgaaggttaatgatgcacca

SEQ ID NO: 60870 - DNA, 33 bp, Homo sapien
agaagcttaacaatgagggttaatgatgcacca

SEQ ID NO: 60871 - DNA, 33 bp, Homo sapien
aatgaagagtcatctcaaaggtggcacaactgg

SEQ ID NO: 60872 - DNA, 33 bp, Homo sapien
aatgaagagtcatctcgaaggtggcacaactgg

SEQ ID NO: 60873 - DNA, 33 bp, Homo sapien
tgacttcgaagttttacaggaattaggagtcaa

SEQ ID NO: 60874 - DNA, 33 bp, Homo sapien
tgacttcgaagttttataggaattaggagtcaa

SEQ ID NO: 60875 - DNA, 33 bp, Homo sapien
attttgattttatagaataagaagtggcaattc

SEQ ID NO: 60876 - DNA, 33 bp, Homo sapien
attttgattttatagattaagaagtggcaattc

SEQ ID NO: 60877 - DNA, 33 bp, Homo sapien
ggaagaagctcctacacaaatatttgaaacaat

SEQ ID NO: 60878 - DNA, 33 bp, Homo sapien
ggaagaagctcctacataaatatttgaaacaat

SEQ ID NO: 60879 - DNA, 33 bp, Homo sapien
acatttttagttatcacacactagagcacatga

SEQ ID NO: 60880 - DNA, 33 bp, Homo sapien
acatttttagttatcagacactagagcacatga

SEQ ID NO: 60881 - DNA, 33 bp, Homo sapien
tgtagtctttcccagcagatcaagttcccattg

SEQ ID NO: 60882 - DNA, 33 bp, Homo sapien
tgtagtctttcccagcggatcaagttcccattg

SEQ ID NO: 60883 - DNA, 33 bp, Homo sapien
gtaagagatttaaagacgatataacgcccatga

SEQ ID NO: 60884 - DNA, 33 bp, Homo sapien
gtaagagatttaaagatgatataacgcccatga

SEQ ID NO: 60885 - DNA, 33 bp, Homo sapien
tgtttggggaacactaagaaataaggctgcttg

SEQ ID NO: 60886 - DNA, 33 bp, Homo sapien
tgtttggggaacactacgaaataaggctgcttg

SEQ ID NO: 60887 - DNA, 33 bp, Homo sapien
gtagaaaaaacggaccaaagtgcctgcctaagg

SEQ ID NO: 60888 - DNA, 33 bp, Homo sapien
gtagaaaaaacggaccgaagtgcctgcctaagg

SEQ ID NO: 60889 - DNA, 33 bp, Homo sapien
aaaaatgctaatctaacctaatcacaaattgcc

SEQ ID NO: 60890 - DNA, 33 bp, Homo sapien
aaaaatgctaatctaatctaatcacaaattgcc

SEQ ID NO: 60891 - DNA, 33 bp, Homo sapien
taccaccaagggaagcaataggaggagctcata

SEQ ID NO: 60892 - DNA, 33 bp, Homo sapien
taccaccaagggaagccataggaggagctcata

SEQ ID NO: 60893 - DNA, 33 bp, Homo sapien
tccacatctgtaacaaagtaaattcatgttgtt

SEQ ID NO: 60894 - DNA, 33 bp, Homo sapien
tccacatctgtaacaacgtaaattcatgttgtt

SEQ ID NO: 60895 - DNA, 33 bp, Homo sapien
ttgtcattaatgtgaaagtgttaagcatattgc

SEQ ID NO: 60896 - DNA, 33 bp, Homo sapien
ttgtcattaatgtgaatgtgttaagcatattgc

SEQ ID NO: 60897 - DNA, 33 bp, Homo sapien
tgatttggccttcaaagcatagccttagaaatt

SEQ ID NO: 60898 - DNA, 33 bp, Homo sapien
tgatttggccttcaaatcatagccttagaaatt

SEQ ID NO: 60899 - DNA, 33 bp, Homo sapien
gaccaggagaaaatccaataatatattcagagt

SEQ ID NO: 60900 - DNA, 33 bp, Homo sapien
gaccaggagaaaatccgataatatattcagagt

SEQ ID NO: 60901 - DNA, 33 bp, Homo sapien
gtttaaagtcaccttaacctgttacataatttc

SEQ ID NO: 60902 - DNA, 33 bp, Homo sapien
gtttaaagtcaccttatcctgttacataatttc

SEQ ID NO: 60903 - DNA, 33 bp, Homo sapien
ggactgctgtgcccacaggatgaaaagcctatc

SEQ ID NO: 60904 - DNA, 33 bp, Homo sapien
ggactgctgtgcccacgggatgaaaagcctatc

SEQ ID NO: 60905 - DNA, 33 bp, Homo sapien
actacaagtgtctaacaggttcttcacttacaa

SEQ ID NO: 60906 - DNA, 33 bp, Homo sapien
actacaagtgtctaactggttcttcacttacaa

SEQ ID NO: 60907 - DNA, 33 bp, Homo sapien
aggataaatgtttttacaagctcattaaaagag

SEQ ID NO: 60908 - DNA, 33 bp, Homo sapien
aggataaatgtttttagaagctcattaaaagag

SEQ ID NO: 60909 - DNA, 33 bp, Homo sapien
tagaagtatctttgaactcacgttgtcgaagac

SEQ ID NO: 60910 - DNA, 33 bp, Homo sapien
tagaagtatctttgaattcacgttgtcgaagac

SEQ ID NO: 60911 - DNA, 33 bp, Homo sapien
tggttttgatttaacacgacaaattgaataaca

SEQ ID NO: 60912 - DNA, 33 bp, Homo sapien
tggttttgatttaacaggacaaattgaataaca

SEQ ID NO: 60913 - DNA, 33 bp, Homo sapien
acacactaaagggaaacgctgtcacataccaga

SEQ ID NO: 60914 - DNA, 33 bp, Homo sapien
acacactaaagggaaatgctgtcacataccaga

SEQ ID NO: 60915 - DNA, 33 bp, Homo sapien
ataccatgctagaagacggtcgacattttagat

SEQ ID NO: 60916 - DNA, 33 bp, Homo sapien
ataccatgctagaagatggtcgacattttagat

SEQ ID NO: 60917 - DNA, 33 bp, Homo sapien
aagtctacattccaaccgagaatgacaggtaag

SEQ ID NO: 60918 - DNA, 33 bp, Homo sapien
aagtctacattccaactgagaatgacaggtaag

SEQ ID NO: 60919 - DNA, 33 bp, Homo sapien
tgagatacataaacggaatcagtgataaccttg

SEQ ID NO: 60920 - DNA, 33 bp, Homo sapien
tgagatacataaacgggatcagtgataaccttg

SEQ ID NO: 60921 - DNA, 33 bp, Homo sapien
ttactatggttctaaaagggaaagtaaatcatt

SEQ ID NO: 60922 - DNA, 33 bp, Homo sapien
ttactatggttctaaacgggaaagtaaatcatt

SEQ ID NO: 60923 - DNA, 33 bp, Homo sapien
tgagtttcaaaacgtaactttgatgtatcgttt

SEQ ID NO: 60924 - DNA, 33 bp, Homo sapien
tgagtttcaaaacgtacctttgatgtatcgttt

SEQ ID NO: 60925 - DNA, 33 bp, Homo sapien
aagactaatccatgtaataaaatgcaggaggtg

SEQ ID NO: 60926 - DNA, 33 bp, Homo sapien
aagactaatccatgtactaaaatgcaggaggtg

SEQ ID NO: 60927 - DNA, 33 bp, Homo sapien
agtctgtattgctcacccctatgtcaccatcat

SEQ ID NO: 60928 - DNA, 33 bp, Homo sapien
agtctgtattgctcacgcctatgtcaccatcat

SEQ ID NO: 60929 - DNA, 33 bp, Homo sapien
agatgagctaacaaaagaagtcaaccttctaga

SEQ ID NO: 60930 - DNA, 33 bp, Homo sapien
agatgagctaacaaaataagtcaaccttctaga

SEQ ID NO: 60931 - DNA, 33 bp, Homo sapien
cactagactcattagaaggtggaggtgagactt

SEQ ID NO: 60932 - DNA, 33 bp, Homo sapien
cactagactcattagagggtggaggtgagactt

SEQ ID NO: 60933 - DNA, 33 bp, Homo sapien
tggtcattatttacaactgttgtcactgaggtg

SEQ ID NO: 60934 - DNA, 33 bp, Homo sapien
tggtcattatttacaattgttgtcactgaggtg

SEQ ID NO: 60935 - DNA, 33 bp, Homo sapien
cattttagaaagctaactagcagcactgcagat

SEQ ID NO: 60936 - DNA, 33 bp, Homo sapien
cattttagaaagctaagtagcagcactgcagat

SEQ ID NO: 60937 - DNA, 33 bp, Homo sapien
gttaatatatcaaaaacggaactaataagctcc

SEQ ID NO: 60938 - DNA, 33 bp, Homo sapien
gttaatatatcaaaaatggaactaataagctcc

SEQ ID NO: 60939 - DNA, 33 bp, Homo sapien
atagtcaatgataaaaattgcactctggacagt

SEQ ID NO: 60940 - DNA, 33 bp, Homo sapien
atagtcaatgataaaagttgcactctggacagt

SEQ ID NO: 60941 - DNA, 33 bp, Homo sapien
tactcctctccttgctcactctattctggccat

SEQ ID NO: 60942 - DNA, 33 bp, Homo sapien
tactcctctccttgcttactctattctggccat

SEQ ID NO: 60943 - DNA, 33 bp, Homo sapien
actgtttgttttacccaagatcattattgtttt

SEQ ID NO: 60944 - DNA, 33 bp, Homo sapien
actgtttgttttacccgagatcattattgtttt

SEQ ID NO: 60945 - DNA, 33 bp, Homo sapien
ctaagttatccattgccatgacatacatttttt

SEQ ID NO: 60946 - DNA, 33 bp, Homo sapien
ctaagttatccattgctatgacatacatttttt

SEQ ID NO: 60947 - DNA, 33 bp, Homo sapien
tcctccacgaaatcacaataaccatgttcagga

SEQ ID NO: 60948 - DNA, 33 bp, Homo sapien
tcctccacgaaatcactataaccatgttcagga

SEQ ID NO: 60949 - DNA, 33 bp, Homo sapien
atgagggaaacataaacaatacaatttctcaaa

SEQ ID NO: 60950 - DNA, 33 bp, Homo sapien
atgagggaaacataaagaatacaatttctcaaa

SEQ ID NO: 60951 - DNA, 33 bp, Homo sapien
agtagggtagtgtcaggcctccgacattttttt

SEQ ID NO: 60952 - DNA, 33 bp, Homo sapien
agtagggtagtgtcagtcctccgacattttttt

SEQ ID NO: 60953 - DNA, 33 bp, Homo sapien
gattggtgccatctcccgctctggctgagctgg

SEQ ID NO: 60954 - DNA, 33 bp, Homo sapien
gattggtgccatctcctgctctggctgagctgg

SEQ ID NO: 60955 - DNA, 33 bp, Homo sapien
tgaaagctgttcttaccataattgtcgtgaaat

SEQ ID NO: 60956 - DNA, 33 bp, Homo sapien
tgaaagctgttcttactataattgtcgtgaaat

SEQ ID NO: 60957 - DNA, 33 bp, Homo sapien
cttagacaaatgactcagaaacagaaactctga

SEQ ID NO: 60958 - DNA, 33 bp, Homo sapien
cttagacaaatgactcggaaacagaaactctga

SEQ ID NO: 60959 - DNA, 33 bp, Homo sapien
aagaactctgcatagaaatggaaggattactca

SEQ ID NO: 60960 - DNA, 33 bp, Homo sapien
aagaactctgcatagatatggaaggattactca

SEQ ID NO: 60961 - DNA, 33 bp, Homo sapien
gtatcagcatgtggaacataaagtgcttagaat

SEQ ID NO: 60962 - DNA, 33 bp, Homo sapien
gtatcagcatgtggaatataaagtgcttagaat

SEQ ID NO: 60963 - DNA, 33 bp, Homo sapien
actaaaagtctggcaccagattccaggcaatga

SEQ ID NO: 60964 - DNA, 33 bp, Homo sapien
actaaaagtctggcacgagattccaggcaatga

SEQ ID NO: 60965 - DNA, 33 bp, Homo sapien
agacaatgggacagaaaatgagaatatttatta

SEQ ID NO: 60966 - DNA, 33 bp, Homo sapien
agacaatgggacagaagatgagaatatttatta

SEQ ID NO: 60967 - DNA, 33 bp, Homo sapien
ttatgaaaagccaacaggaaatcttaataataa

SEQ ID NO: 60968 - DNA, 33 bp, Homo sapien
ttatgaaaagccaacatgaaatcttaataataa

SEQ ID NO: 60969 - DNA, 33 bp, Homo sapien
tgctcattgctacatacattgatccacaattgt

SEQ ID NO: 60970 - DNA, 33 bp, Homo sapien
tgctcattgctacatatattgatccacaattgt

SEQ ID NO: 60971 - DNA, 33 bp, Homo sapien
caaaagacaccagagacgaaaatgcacaaaggg

SEQ ID NO: 60972 - DNA, 33 bp, Homo sapien
caaaagacaccagagatgaaaatgcacaaaggg

SEQ ID NO: 60973 - DNA, 33 bp, Homo sapien
agatatggtcacagaagaaaatggcaaaagaca

SEQ ID NO: 60974 - DNA, 33 bp, Homo sapien
agatatggtcacagaataaaatggcaaaagaca

SEQ ID NO: 60975 - DNA, 33 bp, Homo sapien
aactagcacatctatcacctcaaacacttgtca

SEQ ID NO: 60976 - DNA, 33 bp, Homo sapien
aactagcacatctatcgcctcaaacacttgtca

SEQ ID NO: 60977 - DNA, 33 bp, Homo sapien
atgcaaggtcctgaaaagttagaacacattgca

SEQ ID NO: 60978 - DNA, 33 bp, Homo sapien
atgcaaggtcctgaaaggttagaacacattgca

SEQ ID NO: 60979 - DNA, 33 bp, Homo sapien
ttcttaaaaacacccacgaactgactcttgcag

SEQ ID NO: 60980 - DNA, 33 bp, Homo sapien
ttcttaaaaacacccatgaactgactcttgcag

SEQ ID NO: 60981 - DNA, 33 bp, Homo sapien
ccacatttgaatttggaaaaaatggtttcagtt

SEQ ID NO: 60982 - DNA, 33 bp, Homo sapien
ccacatttgaatttgggaaaaatggtttcagtt

SEQ ID NO: 60983 - DNA, 33 bp, Homo sapien
tacgtttctccaaatacactgtcagcacaatga

SEQ ID NO: 60984 - DNA, 33 bp, Homo sapien
tacgtttctccaaatatactgtcagcacaatga

SEQ ID NO: 60985 - DNA, 33 bp, Homo sapien
ctttatttccctctctcaagcactactaaagga

SEQ ID NO: 60986 - DNA, 33 bp, Homo sapien
ctttatttccctctctgaagcactactaaagga

SEQ ID NO: 60987 - DNA, 33 bp, Homo sapien
ttgttttttaatccaaattcagtctggtccttg

SEQ ID NO: 60988 - DNA, 33 bp, Homo sapien
ttgttttttaatccaagttcagtctggtccttg

SEQ ID NO: 60989 - DNA, 33 bp, Homo sapien
aggatgcatgatcagcaaagtttttaagcaatg

SEQ ID NO: 60990 - DNA, 33 bp, Homo sapien
aggatgcatgatcagcgaagtttttaagcaatg

SEQ ID NO: 60991 - DNA, 33 bp, Homo sapien
ggggcttagctcggaagagttcttggcttcacc

SEQ ID NO: 60992 - DNA, 33 bp, Homo sapien
ggggcttagctcggaatagttcttggcttcacc

SEQ ID NO: 60993 - DNA, 33 bp, Homo sapien
tcagagaattgaaatgaacgataacaatgtatc

SEQ ID NO: 60994 - DNA, 33 bp, Homo sapien
tcagagaattgaaatgcacgataacaatgtatc

SEQ ID NO: 60995 - DNA, 33 bp, Homo sapien
tttgtccactccattacctcaagaattcctact

SEQ ID NO: 60996 - DNA, 33 bp, Homo sapien
tttgtccactccattagctcaagaattcctact

SEQ ID NO: 60997 - DNA, 33 bp, Homo sapien
agtgcagtaagttctacagcatcagcaatggag

SEQ ID NO: 60998 - DNA, 33 bp, Homo sapien
agtgcagtaagttctagagcatcagcaatggag

SEQ ID NO: 60999 - DNA, 33 bp, Homo sapien
ctaaaatgtcaagttacagaaatggaattgctt

SEQ ID NO: 61000 - DNA, 33 bp, Homo sapien
ctaaaatgtcaagttagagaaatggaattgctt

SEQ ID NO: 61001 - DNA, 33 bp, Homo sapien
ataagatggatagagaagaatctggaaacacaa

SEQ ID NO: 61002 - DNA, 33 bp, Homo sapien
ataagatggatagagaggaatctggaaacacaa

SEQ ID NO: 61003 - DNA, 33 bp, Homo sapien
ctaaaattggacagaaagcaaatgcacttgaaa

SEQ ID NO: 61004 - DNA, 33 bp, Homo sapien
ctaaaattggacagaatgcaaatgcacttgaaa

SEQ ID NO: 61005 - DNA, 33 bp, Homo sapien
tacatttcattctctgcaaccaatgtgtagaac

SEQ ID NO: 61006 - DNA, 33 bp, Homo sapien
tacatttcattctctgtaaccaatgtgtagaac

SEQ ID NO: 61007 - DNA, 33 bp, Homo sapien
gatttactgtctcatcaattgcagaatgaatag

SEQ ID NO: 61008 - DNA, 33 bp, Homo sapien
gatttactgtctcatcgattgcagaatgaatag

SEQ ID NO: 61009 - DNA, 33 bp, Homo sapien
ctgtgtccctctgctacgtccaaccacatcccc

SEQ ID NO: 61010 - DNA, 33 bp, Homo sapien
ctgtgtccctctgctatgtccaaccacatcccc

SEQ ID NO: 61011 - DNA, 33 bp, Homo sapien
catctttttcttgcacactggccaaaagtcacc

SEQ ID NO: 61012 - DNA, 33 bp, Homo sapien
catctttttcttgcacgctggccaaaagtcacc

SEQ ID NO: 61013 - DNA, 33 bp, Homo sapien
ataacaacccttgaggacatgaaatgcgtcttc

SEQ ID NO: 61014 - DNA, 33 bp, Homo sapien
ataacaacccttgaggtcatgaaatgcgtcttc

SEQ ID NO: 61015 - DNA, 33 bp, Homo sapien
atcaggtcacattcaaaaattggcttttctctt

SEQ ID NO: 61016 - DNA, 33 bp, Homo sapien
atcaggtcacattcaacaattggcttttctctt

SEQ ID NO: 61017 - DNA, 33 bp, Homo sapien
tctcaaaatttgagacagaattttctcaaattg

SEQ ID NO: 61018 - DNA, 33 bp, Homo sapien
tctcaaaatttgagaccgaattttctcaaattg

SEQ ID NO: 61019 - DNA, 33 bp, Homo sapien
aaacatttgctaagaaaactctccctgtatgga

SEQ ID NO: 61020 - DNA, 33 bp, Homo sapien
aaacatttgctaagaatactctccctgtatgga

SEQ ID NO: 61021 - DNA, 33 bp, Homo sapien
gataatcgggttcaaccgtctctcccctactat

SEQ ID NO: 61022 - DNA, 33 bp, Homo sapien
gataatcgggttcaactgtctctcccctactat

SEQ ID NO: 61023 - DNA, 33 bp, Homo sapien
gttgtcttccgtgaacaatgccttcaggtcccc

SEQ ID NO: 61024 - DNA, 33 bp, Homo sapien
gttgtcttccgtgaacgatgccttcaggtcccc

SEQ ID NO: 61025 - DNA, 33 bp, Homo sapien
atgtcactgaaaacaaaagtcagtttgaattag

SEQ ID NO: 61026 - DNA, 33 bp, Homo sapien
atgtcactgaaaacaagagtcagtttgaattag

SEQ ID NO: 61027 - DNA, 33 bp, Homo sapien
agctaagccatcataaatattgttgtcatgatt

SEQ ID NO: 61028 - DNA, 33 bp, Homo sapien
agctaagccatcataagtattgttgtcatgatt

SEQ ID NO: 61029 - DNA, 33 bp, Homo sapien
ctgaagctgggctttaaatggcttttggcactc

SEQ ID NO: 61030 - DNA, 33 bp, Homo sapien
ctgaagctgggctttatatggcttttggcactc

SEQ ID NO: 61031 - DNA, 33 bp, Homo sapien
ggcagcattgcagcccagatatagacaggagtg

SEQ ID NO: 61032 - DNA, 33 bp, Homo sapien
ggcagcattgcagcccggatatagacaggagtg

SEQ ID NO: 61033 - DNA, 33 bp, Homo sapien
ggtattatcagactacaaactccctgcaggtta

SEQ ID NO: 61034 - DNA, 33 bp, Homo sapien
ggtattatcagactaccaactccctgcaggtta

SEQ ID NO: 61035 - DNA, 33 bp, Homo sapien
tcttggttcctcttatgacaactggtgtctggt

SEQ ID NO: 61036 - DNA, 33 bp, Homo sapien
tcttggttcctcttattacaactggtgtctggt

SEQ ID NO: 61037 - DNA, 33 bp, Homo sapien
cctcaccagtgcacaaatgagctggcaacatct

SEQ ID NO: 61038 - DNA, 33 bp, Homo sapien
cctcaccagtgcacaagtgagctggcaacatct

SEQ ID NO: 61039 - DNA, 33 bp, Homo sapien
ctctttaatttgcacaaaggcagctgaacagga

SEQ ID NO: 61040 - DNA, 33 bp, Homo sapien
ctctttaatttgcacagaggcagctgaacagga

SEQ ID NO: 61041 - DNA, 33 bp, Homo sapien
gactaatctgactgacaataaaactctggtctc

SEQ ID NO: 61042 - DNA, 33 bp, Homo sapien
gactaatctgactgacgataaaactctggtctc

SEQ ID NO: 61043 - DNA, 33 bp, Homo sapien
taaagttaatgagacaacaccaggctaggtgga

SEQ ID NO: 61044 - DNA, 33 bp, Homo sapien
taaagttaatgagacaccaccaggctaggtgga

SEQ ID NO: 61045 - DNA, 33 bp, Homo sapien
ttcttagtagacaagacaaaggagatttagaac

SEQ ID NO: 61046 - DNA, 33 bp, Homo sapien
ttcttagtagacaagagaaaggagatttagaac

SEQ ID NO: 61047 - DNA, 33 bp, Homo sapien
attaaaatctcgtacaaaccaaaaataaatgat

SEQ ID NO: 61048 - DNA, 33 bp, Homo sapien
attaaaatctcgtacagaccaaaaataaatgat

SEQ ID NO: 61049 - DNA, 33 bp, Homo sapien
tgcttattaatgcacaatactgaatacataaag

SEQ ID NO: 61050 - DNA, 33 bp, Homo sapien
tgcttattaatgcacattactgaatacataaag

SEQ ID NO: 61051 - DNA, 33 bp, Homo sapien
tatgaagtctataagcaagtaataatggcagtt

SEQ ID NO: 61052 - DNA, 33 bp, Homo sapien
tatgaagtctataagcgagtaataatggcagtt

SEQ ID NO: 61053 - DNA, 33 bp, Homo sapien
catgcaagagatgagaggaacgttaaacaaaca

SEQ ID NO: 61054 - DNA, 33 bp, Homo sapien
catgcaagagatgagatgaacgttaaacaaaca

SEQ ID NO: 61055 - DNA, 33 bp, Homo sapien
ctttcgctctcctctagagtgtacatttctaaa

SEQ ID NO: 61056 - DNA, 33 bp, Homo sapien
ctttcgctctcctctatagtgtacatttctaaa

SEQ ID NO: 61057 - DNA, 33 bp, Homo sapien
ttgttagtgatagaatcaggacacaaggcaaaa

SEQ ID NO: 61058 - DNA, 33 bp, Homo sapien
ttgttagtgatagaattaggacacaaggcaaaa

SEQ ID NO: 61059 - DNA, 33 bp, Homo sapien
ctcggaatctaatacgcatctgctatcattttc

SEQ ID NO: 61060 - DNA, 33 bp, Homo sapien
ctcggaatctaatacgtatctgctatcattttc

SEQ ID NO: 61061 - DNA, 33 bp, Homo sapien
tgtgacactattcaccacatcctccctattgaa

SEQ ID NO: 61062 - DNA, 33 bp, Homo sapien
tgtgacactattcaccgcatcctccctattgaa

SEQ ID NO: 61063 - DNA, 33 bp, Homo sapien
agattcctatactctacgacctcataaaattgt

SEQ ID NO: 61064 - DNA, 33 bp, Homo sapien
agattcctatactctatgacctcataaaattgt

SEQ ID NO: 61065 - DNA, 33 bp, Homo sapien
ctaaggctgaagaaaggccagtctattgaaagg

SEQ ID NO: 61066 - DNA, 33 bp, Homo sapien
ctaaggctgaagaaagtccagtctattgaaagg

SEQ ID NO: 61067 - DNA, 33 bp, Homo sapien
tttctggggcttgcacacaaaatctacaagcgg

SEQ ID NO: 61068 - DNA, 33 bp, Homo sapien
tttctggggcttgcacgcaaaatctacaagcgg

SEQ ID NO: 61069 - DNA, 33 bp, Homo sapien
acgtactgagttgtgtcaaatgaattgaatcca

SEQ ID NO: 61070 - DNA, 33 bp, Homo sapien
acgtactgagttgtgtgaaatgaattgaatcca

SEQ ID NO: 61071 - DNA, 33 bp, Homo sapien
atgctttgggtacaaagttattcaccacatatt

SEQ ID NO: 61072 - DNA, 33 bp, Homo sapien
atgctttgggtacaaatttattcaccacatatt

SEQ ID NO: 61073 - DNA, 33 bp, Homo sapien
ctgaaaacgcattaaccctttctctagaagtgg

SEQ ID NO: 61074 - DNA, 33 bp, Homo sapien
ctgaaaacgcattaactctttctctagaagtgg

SEQ ID NO: 61075 - DNA, 33 bp, Homo sapien
gattttttccagtatacgaaagccatttattgt

SEQ ID NO: 61076 - DNA, 33 bp, Homo sapien
gattttttccagtatatgaaagccatttattgt

SEQ ID NO: 61077 - DNA, 33 bp, Homo sapien
aagtctctccaaatcaacttcactcttaatgat

SEQ ID NO: 61078 - DNA, 33 bp, Homo sapien
aagtctctccaaatcaccttcactcttaatgat

SEQ ID NO: 61079 - DNA, 33 bp, Homo sapien
atccattgagggctccaatagaacaaaacaggc

SEQ ID NO: 61080 - DNA, 33 bp, Homo sapien
atccattgagggctccgatagaacaaaacaggc

SEQ ID NO: 61081 - DNA, 33 bp, Homo sapien
gtttaccccaatctaacagagtttagaggagac

SEQ ID NO: 61082 - DNA, 33 bp, Homo sapien
gtttaccccaatctaatagagtttagaggagac

SEQ ID NO: 61083 - DNA, 33 bp, Homo sapien
ttgggaaaaatccttacgcagtgaaatacagtg

SEQ ID NO: 61084 - DNA, 33 bp, Homo sapien
ttgggaaaaatccttatgcagtgaaatacagtg

SEQ ID NO: 61085 - DNA, 33 bp, Homo sapien
ttaatgatcacaaaaacgttaatgaaattgtag

SEQ ID NO: 61086 - DNA, 33 bp, Homo sapien
ttaatgatcacaaaaatgttaatgaaattgtag

SEQ ID NO: 61087 - DNA, 33 bp, Homo sapien
ttagtttcagcaagaacttagttaaatatgact

SEQ ID NO: 61088 - DNA, 33 bp, Homo sapien
ttagtttcagcaagaagttagttaaatatgact

SEQ ID NO: 61089 - DNA, 33 bp, Homo sapien
ttcatagttaagctcacggtaggtaaaataaag

SEQ ID NO: 61090 - DNA, 33 bp, Homo sapien
ttcatagttaagctcatggtaggtaaaataaag

SEQ ID NO: 61091 - DNA, 33 bp, Homo sapien
tgttgttgcctcatagaaaaataaagtgcaagc

SEQ ID NO: 61092 - DNA, 33 bp, Homo sapien
tgttgttgcctcatagcaaaataaagtgcaagc

SEQ ID NO: 61093 - DNA, 33 bp, Homo sapien
ttaataagacaacacaatgtgattactcatatc

SEQ ID NO: 61094 - DNA, 33 bp, Homo sapien
ttaataagacaacacagtgtgattactcatatc

SEQ ID NO: 61095 - DNA, 33 bp, Homo sapien
ttcaggcagagggaacagtatttgtgaaaccac

SEQ ID NO: 61096 - DNA, 33 bp, Homo sapien
ttcaggcagagggaacggtatttgtgaaaccac

SEQ ID NO: 61097 - DNA, 33 bp, Homo sapien
ctagctggatgaaaggaattgaagggttagaga

SEQ ID NO: 61098 - DNA, 33 bp, Homo sapien
ctagctggatgaaagggattgaagggttagaga

SEQ ID NO: 61099 - DNA, 33 bp, Homo sapien
tgcaggctataaacaaggaccaggaaacaagag

SEQ ID NO: 61100 - DNA, 33 bp, Homo sapien
tgcaggctataaacaatgaccaggaaacaagag

SEQ ID NO: 61101 - DNA, 33 bp, Homo sapien
caaaaaaaagaataaaagcctgttgatgccccc

SEQ ID NO: 61102 - DNA, 33 bp, Homo sapien
caaaaaaaagaataaaggcctgttgatgccccc

SEQ ID NO: 61103 - DNA, 33 bp, Homo sapien
taattttcttcacaaaagaatggactctggatt

SEQ ID NO: 61104 - DNA, 33 bp, Homo sapien
taattttcttcacaaaggaatggactctggatt

SEQ ID NO: 61105 - DNA, 33 bp, Homo sapien
aacaacaaactggttaagaagattgacttttta

SEQ ID NO: 61106 - DNA, 33 bp, Homo sapien
aacaacaaactggttaggaagattgacttttta

SEQ ID NO: 61107 - DNA, 33 bp, Homo sapien
agaagcagagcccctgaaaaatagccctaagaa

SEQ ID NO: 61108 - DNA, 33 bp, Homo sapien
agaagcagagcccctggaaaatagccctaagaa

SEQ ID NO: 61109 - DNA, 33 bp, Homo sapien
ttctacagtagaaaaaatattagttcccaagtt

SEQ ID NO: 61110 - DNA, 33 bp, Homo sapien
ttctacagtagaaaaattattagttcccaagtt

SEQ ID NO: 61111 - DNA, 33 bp, Homo sapien
aagtatccttataagcacaaggcagaaagaaat

SEQ ID NO: 61112 - DNA, 33 bp, Homo sapien
aagtatccttataagcgcaaggcagaaagaaat

SEQ ID NO: 61113 - DNA, 33 bp, Homo sapien
atgcagagagagaaaaaagtgtactggaaattg

SEQ ID NO: 61114 - DNA, 33 bp, Homo sapien
atgcagagagagaaaagagtgtactggaaattg

SEQ ID NO: 61115 - DNA, 33 bp, Homo sapien
cctgctatgtatggccagaagccttccttgcta

SEQ ID NO: 61116 - DNA, 33 bp, Homo sapien
cctgctatgtatggccggaagccttccttgcta

SEQ ID NO: 61117 - DNA, 33 bp, Homo sapien
ctgaaacagtgtctagccaagttagggagacag

SEQ ID NO: 61118 - DNA, 33 bp, Homo sapien
ctgaaacagtgtctagtcaagttagggagacag

SEQ ID NO: 61119 - DNA, 33 bp, Homo sapien
tttgtatcaaattcaccattggcttatgtcaat

SEQ ID NO: 61120 - DNA, 33 bp, Homo sapien
tttgtatcaaattcactattggcttatgtcaat

SEQ ID NO: 61121 - DNA, 33 bp, Homo sapien
tctatgagcagcagtcaacccaataatgatgaa

SEQ ID NO: 61122 - DNA, 33 bp, Homo sapien
tctatgagcagcagtcgacccaataatgatgaa

SEQ ID NO: 61123 - DNA, 33 bp, Homo sapien
ctgtgcacctatggaaaaagtaaataatgacac

SEQ ID NO: 61124 - DNA, 33 bp, Homo sapien
ctgtgcacctatggaagaagtaaataatgacac

SEQ ID NO: 61125 - DNA, 33 bp, Homo sapien
aaacttggatttctacactttcaaaaacagatt

SEQ ID NO: 61126 - DNA, 33 bp, Homo sapien
aaacttggatttctacgctttcaaaaacagatt

SEQ ID NO: 61127 - DNA, 33 bp, Homo sapien
ttatttaaacttgatacatgagaacaaaaagtg

SEQ ID NO: 61128 - DNA, 33 bp, Homo sapien
ttatttaaacttgatatatgagaacaaaaagtg

SEQ ID NO: 61129 - DNA, 33 bp, Homo sapien
agttcggaactgggaaaatgaagacttttatga

SEQ ID NO: 61130 - DNA, 33 bp, Homo sapien
agttcggaactgggaagatgaagacttttatga

SEQ ID NO: 61131 - DNA, 33 bp, Homo sapien
ctgattctaatggaaagatgagcctgaaaagga

SEQ ID NO: 61132 - DNA, 33 bp, Homo sapien
ctgattctaatggaaatatgagcctgaaaagga

SEQ ID NO: 61133 - DNA, 33 bp, Homo sapien
caaaaagctacacatgaagtcacctttctatat

SEQ ID NO: 61134 - DNA, 33 bp, Homo sapien
caaaaagctacacatggagtcacctttctatat

SEQ ID NO: 61135 - DNA, 33 bp, Homo sapien
agtttcaagaagcaaaagtggagtatttcttca

SEQ ID NO: 61136 - DNA, 33 bp, Homo sapien
agtttcaagaagcaaaggtggagtatttcttca

SEQ ID NO: 61137 - DNA, 33 bp, Homo sapien
ataacgtgtagcctaccatacagaatgttagag

SEQ ID NO: 61138 - DNA, 33 bp, Homo sapien
ataacgtgtagcctactatacagaatgttagag

SEQ ID NO: 61139 - DNA, 33 bp, Homo sapien
atctaatcagctgccaatgcaactagaattaag

SEQ ID NO: 61140 - DNA, 33 bp, Homo sapien
atctaatcagctgccagtgcaactagaattaag

SEQ ID NO: 61141 - DNA, 33 bp, Homo sapien
tcagactaatccaccactggcttcctggctcct

SEQ ID NO: 61142 - DNA, 33 bp, Homo sapien
tcagactaatccaccattggcttcctggctcct

SEQ ID NO: 61143 - DNA, 33 bp, Homo sapien
cattggtaccaagaaacgaggctgttgccataa

SEQ ID NO: 61144 - DNA, 33 bp, Homo sapien
cattggtaccaagaaatgaggctgttgccataa

SEQ ID NO: 61145 - DNA, 33 bp, Homo sapien
agagtcagcttacaaccaaatgcacggtatgat

SEQ ID NO: 61146 - DNA, 33 bp, Homo sapien
agagtcagcttacaactaaatgcacggtatgat

SEQ ID NO: 61147 - DNA, 33 bp, Homo sapien
tccaaatagctagaaaaccattatttttgggta

SEQ ID NO: 61148 - DNA, 33 bp, Homo sapien
tccaaatagctagaaagccattatttttgggta

SEQ ID NO: 61149 - DNA, 33 bp, Homo sapien
aacaagcaaaaacttcgagttagaccagggaac

SEQ ID NO: 61150 - DNA, 33 bp, Homo sapien
aacaagcaaaaacttctagttagaccagggaac

SEQ ID NO: 61151 - DNA, 33 bp, Homo sapien
agaaacttcatcaaaaagataaaattcaccttt

SEQ ID NO: 61152 - DNA, 33 bp, Homo sapien
agaaacttcatcaaaacgataaaattcaccttt

SEQ ID NO: 61153 - DNA, 33 bp, Homo sapien
aaggaaaaccatagaacataatataatgtcact

SEQ ID NO: 61154 - DNA, 33 bp, Homo sapien
aaggaaaaccatagaagataatataatgtcact

SEQ ID NO: 61155 - DNA, 33 bp, Homo sapien
cttgggagatagattaactgggtgaaaatctct

SEQ ID NO: 61156 - DNA, 33 bp, Homo sapien
cttgggagatagattacctgggtgaaaatctct

SEQ ID NO: 61157 - DNA, 33 bp, Homo sapien
agtgatcagacataaccagctgtggtagagtaa

SEQ ID NO: 61158 - DNA, 33 bp, Homo sapien
agtgatcagacataactagctgtggtagagtaa

SEQ ID NO: 61159 - DNA, 33 bp, Homo sapien
gggagattcatacaccacatagatactatgctg

SEQ ID NO: 61160 - DNA, 33 bp, Homo sapien
gggagattcatacacctcatagatactatgctg

SEQ ID NO: 61161 - DNA, 33 bp, Homo sapien
aatgtgtgatggttaaagttaaatgtcaactta

SEQ ID NO: 61162 - DNA, 33 bp, Homo sapien
aatgtgtgatggttaatgttaaatgtcaactta

SEQ ID NO: 61163 - DNA, 33 bp, Homo sapien
ttgaaattataatggaagaaacttactgcctag

SEQ ID NO: 61164 - DNA, 33 bp, Homo sapien
ttgaaattataatggaggaaacttactgcctag

SEQ ID NO: 61165 - DNA, 33 bp, Homo sapien
atcccacttccatgaaacctcaaacatgagttg

SEQ ID NO: 61166 - DNA, 33 bp, Homo sapien
atcccacttccatgaagcctcaaacatgagttg

SEQ ID NO: 61167 - DNA, 33 bp, Homo sapien
tggaaagctctatagaaagtaaaatgtagagga

SEQ ID NO: 61168 - DNA, 33 bp, Homo sapien
tggaaagctctatagagagtaaaatgtagagga

SEQ ID NO: 61169 - DNA, 33 bp, Homo sapien
acacagccgagttttaccaattagcaagcacat

SEQ ID NO: 61170 - DNA, 33 bp, Homo sapien
acacagccgagttttatcaattagcaagcacat

SEQ ID NO: 61171 - DNA, 33 bp, Homo sapien
taaatatatccacgtacagagatacataaatgt

SEQ ID NO: 61172 - DNA, 33 bp, Homo sapien
taaatatatccacgtagagagatacataaatgt

SEQ ID NO: 61173 - DNA, 33 bp, Homo sapien
gaaaaattcttcatgcaaattaaacaatcaaac

SEQ ID NO: 61174 - DNA, 33 bp, Homo sapien
gaaaaattcttcatgctaattaaacaatcaaac

SEQ ID NO: 61175 - DNA, 33 bp, Homo sapien
aatagattgaatttaaaatctggcaagatgaag

SEQ ID NO: 61176 - DNA, 33 bp, Homo sapien
aatagattgaatttaacatctggcaagatgaag

SEQ ID NO: 61177 - DNA, 33 bp, Homo sapien
ttctttgtcctttgataacttctatagaatgcc

SEQ ID NO: 61178 - DNA, 33 bp, Homo sapien
ttctttgtcctttgatgacttctatagaatgcc

SEQ ID NO: 61179 - DNA, 33 bp, Homo sapien
cacataaattgcagtgaaaggaatgtttgatgt

SEQ ID NO: 61180 - DNA, 33 bp, Homo sapien
cacataaattgcagtggaaggaatgtttgatgt

SEQ ID NO: 61181 - DNA, 33 bp, Homo sapien
aagcttgcataaatgtcaactggtgtgtggaga

SEQ ID NO: 61182 - DNA, 33 bp, Homo sapien
aagcttgcataaatgtgaactggtgtgtggaga

SEQ ID NO: 61183 - DNA, 33 bp, Homo sapien
attttatatttgtgaacccatttgcaaattcct

SEQ ID NO: 61184 - DNA, 33 bp, Homo sapien
attttatatttgtgaatccatttgcaaattcct

SEQ ID NO: 61185 - DNA, 33 bp, Homo sapien
gagaacaccacatcaaagaatggccctctggga

SEQ ID NO: 61186 - DNA, 33 bp, Homo sapien
gagaacaccacatcaaggaatggccctctggga

SEQ ID NO: 61187 - DNA, 33 bp, Homo sapien
acaaatggctatcaaaagtcaatatatattttg

SEQ ID NO: 61188 - DNA, 33 bp, Homo sapien
acaaatggctatcaaaggtcaatatatattttg

SEQ ID NO: 61189 - DNA, 33 bp, Homo sapien
ttatgcaaattatcaacgtccacagaacaatag

SEQ ID NO: 61190 - DNA, 33 bp, Homo sapien
ttatgcaaattatcaatgtccacagaacaatag

SEQ ID NO: 61191 - DNA, 33 bp, Homo sapien
ccctctaacacatgacgagaatttgggatcatt

SEQ ID NO: 61192 - DNA, 33 bp, Homo sapien
ccctctaacacatgactagaatttgggatcatt

SEQ ID NO: 61193 - DNA, 33 bp, Homo sapien
ataccacaaaagtgccagctcattgagagtttt

SEQ ID NO: 61194 - DNA, 33 bp, Homo sapien
ataccacaaaagtgccggctcattgagagtttt

SEQ ID NO: 61195 - DNA, 33 bp, Homo sapien
agcggggtccttacaccatgttatgtagtcata

SEQ ID NO: 61196 - DNA, 33 bp, Homo sapien
agcggggtccttacactatgttatgtagtcata

SEQ ID NO: 61197 - DNA, 33 bp, Homo sapien
atcccatctggtgtataagcaggagccatcttg

SEQ ID NO: 61198 - DNA, 33 bp, Homo sapien
atcccatctggtgtatgagcaggagccatcttg

SEQ ID NO: 61199 - DNA, 33 bp, Homo sapien
ttaacaaatggcaagcagccaagtatgcatttg

SEQ ID NO: 61200 - DNA, 33 bp, Homo sapien
ttaacaaatggcaagccgccaagtatgcatttg

SEQ ID NO: 61201 - DNA, 33 bp, Homo sapien
gaggtgactgaatcataaaagcagacttccccc

SEQ ID NO: 61202 - DNA, 33 bp, Homo sapien
gaggtgactgaatcatgaaagcagacttccccc

SEQ ID NO: 61203 - DNA, 33 bp, Homo sapien
atactactcaacggaccatcacataaatgacaa

SEQ ID NO: 61204 - DNA, 33 bp, Homo sapien
atactactcaacggactatcacataaatgacaa

SEQ ID NO: 61205 - DNA, 33 bp, Homo sapien
acccaatgtgtgaccacagtacaagcaaacagt

SEQ ID NO: 61206 - DNA, 33 bp, Homo sapien
acccaatgtgtgaccatagtacaagcaaacagt

SEQ ID NO: 61207 - DNA, 33 bp, Homo sapien
ctgttactcttttcacaccattaattctggcct

SEQ ID NO: 61208 - DNA, 33 bp, Homo sapien
ctgttactcttttcactccattaattctggcct

SEQ ID NO: 61209 - DNA, 33 bp, Homo sapien
caaatatcttgttcaaacaccacttaacttagt

SEQ ID NO: 61210 - DNA, 33 bp, Homo sapien
caaatatcttgttcaagcaccacttaacttagt

SEQ ID NO: 61211 - DNA, 33 bp, Homo sapien
ataaagcagagctatcacacaaaagatattagt

SEQ ID NO: 61212 - DNA, 33 bp, Homo sapien
ataaagcagagctatcgcacaaaagatattagt

SEQ ID NO: 61213 - DNA, 33 bp, Homo sapien
gaagcactgatggaaacattttggtgcaaggaa

SEQ ID NO: 61214 - DNA, 33 bp, Homo sapien
gaagcactgatggaaatattttggtgcaaggaa

SEQ ID NO: 61215 - DNA, 33 bp, Homo sapien
tagcaggactttcaaacggggactttgtgagaa

SEQ ID NO: 61216 - DNA, 33 bp, Homo sapien
tagcaggactttcaaatggggactttgtgagaa

SEQ ID NO: 61217 - DNA, 33 bp, Homo sapien
tcctataaccacatacgacacatggagatagag

SEQ ID NO: 61218 - DNA, 33 bp, Homo sapien
tcctataaccacatactacacatggagatagag

SEQ ID NO: 61219 - DNA, 33 bp, Homo sapien
tctttgggcttaggaaattaatgatctattaag

SEQ ID NO: 61220 - DNA, 33 bp, Homo sapien
tctttgggcttaggaatttaatgatctattaag

SEQ ID NO: 61221 - DNA, 33 bp, Homo sapien
gtataccttaccaaaaatccttgggaccagaag

SEQ ID NO: 61222 - DNA, 33 bp, Homo sapien
gtataccttaccaaaattccttgggaccagaag

SEQ ID NO: 61223 - DNA, 33 bp, Homo sapien
catacacacctctgtaacataggcgacccccat

SEQ ID NO: 61224 - DNA, 33 bp, Homo sapien
catacacacctctgtagcataggcgacccccat

SEQ ID NO: 61225 - DNA, 33 bp, Homo sapien
agtttattagaatcccaacagagaatatcatat

SEQ ID NO: 61226 - DNA, 33 bp, Homo sapien
agtttattagaatcccgacagagaatatcatat

SEQ ID NO: 61227 - DNA, 33 bp, Homo sapien
tgtattgtctcaactgcatttgaaatgacaact

SEQ ID NO: 61228 - DNA, 33 bp, Homo sapien
tgtattgtctcaactgtatttgaaatgacaact

SEQ ID NO: 61229 - DNA, 33 bp, Homo sapien
ttcaaatacccatttcaaaaactcaaattcaat

SEQ ID NO: 61230 - DNA, 33 bp, Homo sapien
ttcaaatacccatttcgaaaactcaaattcaat

SEQ ID NO: 61231 - DNA, 33 bp, Homo sapien
ttcttaaataccaatacgttgtcttcagctttg

SEQ ID NO: 61232 - DNA, 33 bp, Homo sapien
ttcttaaataccaatatgttgtcttcagctttg

SEQ ID NO: 61233 - DNA, 33 bp, Homo sapien
aattccaaggtcgcaaattctctacacacttta

SEQ ID NO: 61234 - DNA, 33 bp, Homo sapien
aattccaaggtcgcaacttctctacacacttta

SEQ ID NO: 61235 - DNA, 33 bp, Homo sapien
tcttcattaaaccaaccgatttcagattaataa

SEQ ID NO: 61236 - DNA, 33 bp, Homo sapien
tcttcattaaaccaactgatttcagattaataa

SEQ ID NO: 61237 - DNA, 33 bp, Homo sapien
tcagtattttaaagcagaaagtaactggccata

SEQ ID NO: 61238 - DNA, 33 bp, Homo sapien
tcagtattttaaagcataaagtaactggccata

SEQ ID NO: 61239 - DNA, 33 bp, Homo sapien
cacttgattagttcaccaagagactgaaagtcc

SEQ ID NO: 61240 - DNA, 33 bp, Homo sapien
cacttgattagttcactaagagactgaaagtcc

SEQ ID NO: 61241 - DNA, 33 bp, Homo sapien
attatctatgaaaactcacgaggcttagatgca

SEQ ID NO: 61242 - DNA, 33 bp, Homo sapien
attatctatgaaaacttacgaggcttagatgca

SEQ ID NO: 61243 - DNA, 33 bp, Homo sapien
ttgcaggtatcttgcaacattaaagttctgagg

SEQ ID NO: 61244 - DNA, 33 bp, Homo sapien
ttgcaggtatcttgcagcattaaagttctgagg

SEQ ID NO: 61245 - DNA, 33 bp, Homo sapien
ctaaggacctgagaacaaggatcattggtgtcc

SEQ ID NO: 61246 - DNA, 33 bp, Homo sapien
ctaaggacctgagaaccaggatcattggtgtcc

SEQ ID NO: 61247 - DNA, 33 bp, Homo sapien
atgcttttgtgcttgacctatacatttttatat

SEQ ID NO: 61248 - DNA, 33 bp, Homo sapien
atgcttttgtgcttgagctatacatttttatat

SEQ ID NO: 61249 - DNA, 33 bp, Homo sapien
tagcacataataaacactggtaatccttacttt

SEQ ID NO: 61250 - DNA, 33 bp, Homo sapien
tagcacataataaacattggtaatccttacttt

SEQ ID NO: 61251 - DNA, 33 bp, Homo sapien
tgtttgattgaaatgtgacaactccttttacag

SEQ ID NO: 61252 - DNA, 33 bp, Homo sapien
tgtttgattgaaatgttacaactccttttacag

SEQ ID NO: 61253 - DNA, 33 bp, Homo sapien
ttatatatggtgcccaacgaatgcaaagaatgt

SEQ ID NO: 61254 - DNA, 33 bp, Homo sapien
ttatatatggtgcccatcgaatgcaaagaatgt

SEQ ID NO: 61255 - DNA, 33 bp, Homo sapien
ttttttctactccttgaaatgaaactgatcaga

SEQ ID NO: 61256 - DNA, 33 bp, Homo sapien
ttttttctactccttgcaatgaaactgatcaga

SEQ ID NO: 61257 - DNA, 33 bp, Homo sapien
tgcaacttgaggaaggaaaatgtgttaagaaga

SEQ ID NO: 61258 - DNA, 33 bp, Homo sapien
tgcaacttgaggaagggaaatgtgttaagaaga

SEQ ID NO: 61259 - DNA, 33 bp, Homo sapien
ctaactcccaaactaaagctgacattaaatcta

SEQ ID NO: 61260 - DNA, 33 bp, Homo sapien
ctaactcccaaactaaggctgacattaaatcta

SEQ ID NO: 61261 - DNA, 33 bp, Homo sapien
ggctacaattcctaaaccccagcaagagtcaaa

SEQ ID NO: 61262 - DNA, 33 bp, Homo sapien
ggctacaattcctaaatcccagcaagagtcaaa

SEQ ID NO: 61263 - DNA, 33 bp, Homo sapien
tgtgaccttgtgagaccatctatgtgcagcagc

SEQ ID NO: 61264 - DNA, 33 bp, Homo sapien
tgtgaccttgtgagactatctatgtgcagcagc

SEQ ID NO: 61265 - DNA, 33 bp, Homo sapien
aaatcaaaagctgacagtgctaggctagaaccc

SEQ ID NO: 61266 - DNA, 33 bp, Homo sapien
aaatcaaaagctgacattgctaggctagaaccc

SEQ ID NO: 61267 - DNA, 33 bp, Homo sapien
tcagaaattcacattaaggaaaacttcagaaaa

SEQ ID NO: 61268 - DNA, 33 bp, Homo sapien
tcagaaattcacattacggaaaacttcagaaaa

SEQ ID NO: 61269 - DNA, 33 bp, Homo sapien
tcccctcactctctaaacctaattttcttatta

SEQ ID NO: 61270 - DNA, 33 bp, Homo sapien
tcccctcactctctaatcctaattttcttatta

SEQ ID NO: 61271 - DNA, 33 bp, Homo sapien
agtgatgcaagatgaacagacctagagcctaga

SEQ ID NO: 61272 - DNA, 33 bp, Homo sapien
agtgatgcaagatgaatagacctagagcctaga

SEQ ID NO: 61273 - DNA, 33 bp, Homo sapien
ttcaagatttctgctacaggagccagggaaaca

SEQ ID NO: 61274 - DNA, 33 bp, Homo sapien
ttcaagatttctgctataggagccagggaaaca

SEQ ID NO: 61275 - DNA, 33 bp, Homo sapien
tgaactccttgccatggaatttatcagatctga

SEQ ID NO: 61276 - DNA, 33 bp, Homo sapien
tgaactccttgccatgtaatttatcagatctga

SEQ ID NO: 61277 - DNA, 33 bp, Homo sapien
taaacaaacagtcacccaatcaaaaacttgaaa

SEQ ID NO: 61278 - DNA, 33 bp, Homo sapien
taaacaaacagtcaccgaatcaaaaacttgaaa

SEQ ID NO: 61279 - DNA, 33 bp, Homo sapien
tgaatgtattagcatacgagaaggacatgagtt

SEQ ID NO: 61280 - DNA, 33 bp, Homo sapien
tgaatgtattagcatatgagaaggacatgagtt

SEQ ID NO: 61281 - DNA, 33 bp, Homo sapien
tgcatctttaggattgaaggtaaatatcacaaa

SEQ ID NO: 61282 - DNA, 33 bp, Homo sapien
tgcatctttaggattgcaggtaaatatcacaaa

SEQ ID NO: 61283 - DNA, 33 bp, Homo sapien
tacaccatctgtccaacgatttacactgcccaa

SEQ ID NO: 61284 - DNA, 33 bp, Homo sapien
tacaccatctgtccaatgatttacactgcccaa

SEQ ID NO: 61285 - DNA, 33 bp, Homo sapien
ttacatgaacgagcaacctgaggtgccccacct

SEQ ID NO: 61286 - DNA, 33 bp, Homo sapien
ttacatgaacgagcaatctgaggtgccccacct

SEQ ID NO: 61287 - DNA, 33 bp, Homo sapien
caaaataccctacacaacattctacacagtcat

SEQ ID NO: 61288 - DNA, 33 bp, Homo sapien
caaaataccctacacagcattctacacagtcat

SEQ ID NO: 61289 - DNA, 33 bp, Homo sapien
attctggcactttgaaagatctgaatatagtga

SEQ ID NO: 61290 - DNA, 33 bp, Homo sapien
attctggcactttgaaggatctgaatatagtga

SEQ ID NO: 61291 - DNA, 33 bp, Homo sapien
aaacttgctttaaaccaacaacagtgaaaaatg

SEQ ID NO: 61292 - DNA, 33 bp, Homo sapien
aaacttgctttaaacccacaacagtgaaaaatg

SEQ ID NO: 61293 - DNA, 33 bp, Homo sapien
taaggtgttgtctgataaaaaatggaataaaac

SEQ ID NO: 61294 - DNA, 33 bp, Homo sapien
taaggtgttgtctgattaaaaatggaataaaac

SEQ ID NO: 61295 - DNA, 33 bp, Homo sapien
ttctgattccctgagagctagtatttgctcctt

SEQ ID NO: 61296 - DNA, 33 bp, Homo sapien
ttctgattccctgagatctagtatttgctcctt

SEQ ID NO: 61297 - DNA, 33 bp, Homo sapien
tttatttgttgacataaattgaaccaaaaattc

SEQ ID NO: 61298 - DNA, 33 bp, Homo sapien
tttatttgttgacatatattgaaccaaaaattc

SEQ ID NO: 61299 - DNA, 33 bp, Homo sapien
atatgttactcaaactaaacttgagtgaatgaa

SEQ ID NO: 61300 - DNA, 33 bp, Homo sapien
atatgttactcaaactgaacttgagtgaatgaa

SEQ ID NO: 61301 - DNA, 33 bp, Homo sapien
tcaggctacaatggtacgggatgggtcctgtca

SEQ ID NO: 61302 - DNA, 33 bp, Homo sapien
tcaggctacaatggtatgggatgggtcctgtca

SEQ ID NO: 61303 - DNA, 33 bp, Homo sapien
tatgttgcttccaaacgccaattttcaacttta

SEQ ID NO: 61304 - DNA, 33 bp, Homo sapien
tatgttgcttccaaactccaattttcaacttta

SEQ ID NO: 61305 - DNA, 33 bp, Homo sapien
aaacttctaaacttcacgaggaagcaaagacct

SEQ ID NO: 61306 - DNA, 33 bp, Homo sapien
aaacttctaaacttcaggaggaagcaaagacct

SEQ ID NO: 61307 - DNA, 33 bp, Homo sapien
ctttctcagcattgaagatttcttctctttgtt

SEQ ID NO: 61308 - DNA, 33 bp, Homo sapien
ctttctcagcattgaatatttcttctctttgtt

SEQ ID NO: 61309 - DNA, 33 bp, Homo sapien
tgaagaaattccactaaaaacctcattcttttt

SEQ ID NO: 61310 - DNA, 33 bp, Homo sapien
tgaagaaattccactacaaacctcattcttttt

SEQ ID NO: 61311 - DNA, 33 bp, Homo sapien
agagcatctgccaaagaacaaaggtttccaaag

SEQ ID NO: 61312 - DNA, 33 bp, Homo sapien
agagcatctgccaaaggacaaaggtttccaaag

SEQ ID NO: 61313 - DNA, 33 bp, Homo sapien
acatcatgtaaaattaacaaaggcattatttgc

SEQ ID NO: 61314 - DNA, 33 bp, Homo sapien
acatcatgtaaaattagcaaaggcattatttgc

SEQ ID NO: 61315 - DNA, 33 bp, Homo sapien
atgttttgttgtcagacgcattttagtatttat

SEQ ID NO: 61316 - DNA, 33 bp, Homo sapien
atgttttgttgtcagatgcattttagtatttat

SEQ ID NO: 61317 - DNA, 33 bp, Homo sapien
gaaaaatttatgttcacaagaaatccagaaaca

SEQ ID NO: 61318 - DNA, 33 bp, Homo sapien
gaaaaatttatgttcagaagaaatccagaaaca

SEQ ID NO: 61319 - DNA, 33 bp, Homo sapien
aaaacacttgagaacaccaaaaggaaatcaaaa

SEQ ID NO: 61320 - DNA, 33 bp, Homo sapien
aaaacacttgagaacatcaaaaggaaatcaaaa

SEQ ID NO: 61321 - DNA, 33 bp, Homo sapien
tcatgtgtaaacctcaaagtgtaaagtaatggc

SEQ ID NO: 61322 - DNA, 33 bp, Homo sapien
tcatgtgtaaacctcatagtgtaaagtaatggc

SEQ ID NO: 61323 - DNA, 33 bp, Homo sapien
atcagtaacctattaaccaccttccactgatac

SEQ ID NO: 61324 - DNA, 33 bp, Homo sapien
atcagtaacctattaatcaccttccactgatac

SEQ ID NO: 61325 - DNA, 33 bp, Homo sapien
agggaattaataatgtaaaggctctggagtaag

SEQ ID NO: 61326 - DNA, 33 bp, Homo sapien
agggaattaataatgtgaaggctctggagtaag

SEQ ID NO: 61327 - DNA, 33 bp, Homo sapien
tgtctccaaccttataccttcactagagagttt

SEQ ID NO: 61328 - DNA, 33 bp, Homo sapien
tgtctccaaccttatatcttcactagagagttt

SEQ ID NO: 61329 - DNA, 33 bp, Homo sapien
tgtaaaattgtcatcaggaaaatgcagttcctt

SEQ ID NO: 61330 - DNA, 33 bp, Homo sapien
tgtaaaattgtcatcatgaaaatgcagttcctt

SEQ ID NO: 61331 - DNA, 33 bp, Homo sapien
tattgagctcatttgcactggattgctcttaca

SEQ ID NO: 61332 - DNA, 33 bp, Homo sapien
tattgagctcatttgcgctggattgctcttaca

SEQ ID NO: 61333 - DNA, 33 bp, Homo sapien
tgggcctgcaaaggaaataattggctactccta

SEQ ID NO: 61334 - DNA, 33 bp, Homo sapien
tgggcctgcaaaggaattaattggctactccta

SEQ ID NO: 61335 - DNA, 33 bp, Homo sapien
gcaacaacaggcattaaataatctaagaggagg

SEQ ID NO: 61336 - DNA, 33 bp, Homo sapien
gcaacaacaggcattagataatctaagaggagg

SEQ ID NO: 61337 - DNA, 33 bp, Homo sapien
gctttcaaagcaattacgtccatatgtaggggc

SEQ ID NO: 61338 - DNA, 33 bp, Homo sapien
gctttcaaagcaattaggtccatatgtaggggc

SEQ ID NO: 61339 - DNA, 33 bp, Homo sapien
cctgctgccgattgcaacctaacccagtaagta

SEQ ID NO: 61340 - DNA, 33 bp, Homo sapien
cctgctgccgattgcagcctaacccagtaagta

SEQ ID NO: 61341 - DNA, 33 bp, Homo sapien
aatgataccatacacaataagaaatcccagcct

SEQ ID NO: 61342 - DNA, 33 bp, Homo sapien
aatgataccatacacagtaagaaatcccagcct

SEQ ID NO: 61343 - DNA, 33 bp, Homo sapien
tcagtcattagattgaggttccacccagaaaca

SEQ ID NO: 61344 - DNA, 33 bp, Homo sapien
tcagtcattagattgatgttccacccagaaaca

SEQ ID NO: 61345 - DNA, 33 bp, Homo sapien
cagagtagtaactggtaaaatcctgtaaaaact

SEQ ID NO: 61346 - DNA, 33 bp, Homo sapien
cagagtagtaactggtgaaatcctgtaaaaact

SEQ ID NO: 61347 - DNA, 33 bp, Homo sapien
agaaaatttctgcagagtattagaacaaatttc

SEQ ID NO: 61348 - DNA, 33 bp, Homo sapien
agaaaatttctgcagattattagaacaaatttc

SEQ ID NO: 61349 - DNA, 33 bp, Homo sapien
taacacaggacaaaagcagcctcaagagttaca

SEQ ID NO: 61350 - DNA, 33 bp, Homo sapien
taacacaggacaaaaggagcctcaagagttaca

SEQ ID NO: 61351 - DNA, 33 bp, Homo sapien
ttcttgtagttataaacgaattggatcgacagg

SEQ ID NO: 61352 - DNA, 33 bp, Homo sapien
ttcttgtagttataaatgaattggatcgacagg

SEQ ID NO: 61353 - DNA, 33 bp, Homo sapien
ctgaagattggctgtgcatctatgagaatggaa

SEQ ID NO: 61354 - DNA, 33 bp, Homo sapien
ctgaagattggctgtgtatctatgagaatggaa

SEQ ID NO: 61355 - DNA, 33 bp, Homo sapien
aaaacaaaaaggagtgcacacaatttcacatgg

SEQ ID NO: 61356 - DNA, 33 bp, Homo sapien
aaaacaaaaaggagtggacacaatttcacatgg

SEQ ID NO: 61357 - DNA, 33 bp, Homo sapien
cagtgtacacattgcaatatttcttgaataaat

SEQ ID NO: 61358 - DNA, 33 bp, Homo sapien
cagtgtacacattgcagtatttcttgaataaat

SEQ ID NO: 61359 - DNA, 33 bp, Homo sapien
agcacagatcaggtacagaaattatgctaggag

SEQ ID NO: 61360 - DNA, 33 bp, Homo sapien
agcacagatcaggtacggaaattatgctaggag

SEQ ID NO: 61361 - DNA, 33 bp, Homo sapien
gaaaggcaaagtccaacgcaaggcagtccaaaa

SEQ ID NO: 61362 - DNA, 33 bp, Homo sapien
gaaaggcaaagtccaatgcaaggcagtccaaaa

SEQ ID NO: 61363 - DNA, 33 bp, Homo sapien
agaggtcacttctgaacgcactggatgttccat

SEQ ID NO: 61364 - DNA, 33 bp, Homo sapien
agaggtcacttctgaatgcactggatgttccat

SEQ ID NO: 61365 - DNA, 33 bp, Homo sapien
acctggattgtgtaccacagtgactcattaatc

SEQ ID NO: 61366 - DNA, 33 bp, Homo sapien
acctggattgtgtaccgcagtgactcattaatc

SEQ ID NO: 61367 - DNA, 33 bp, Homo sapien
ggtgagtgacttgttacgtggtatgaggagaca

SEQ ID NO: 61368 - DNA, 33 bp, Homo sapien
ggtgagtgacttgttatgtggtatgaggagaca

SEQ ID NO: 61369 - DNA, 33 bp, Homo sapien
atgagactctggacatcagtatagtaaaaacca

SEQ ID NO: 61370 - DNA, 33 bp, Homo sapien
atgagactctggacattagtatagtaaaaacca

SEQ ID NO: 61371 - DNA, 33 bp, Homo sapien
actctgggaggagggaaagttacattcaaaggg

SEQ ID NO: 61372 - DNA, 33 bp, Homo sapien
actctgggaggagggagagttacattcaaaggg

SEQ ID NO: 61373 - DNA, 33 bp, Homo sapien
ctttaaattgcataaacccaatattgtatatta

SEQ ID NO: 61374 - DNA, 33 bp, Homo sapien
ctttaaattgcataaagccaatattgtatatta

SEQ ID NO: 61375 - DNA, 33 bp, Homo sapien
agcatgtaagtcaataacatcaacaagaaatta

SEQ ID NO: 61376 - DNA, 33 bp, Homo sapien
agcatgtaagtcaatagcatcaacaagaaatta

SEQ ID NO: 61377 - DNA, 33 bp, Homo sapien
aattatctctcaaaaaatggtagtttcccatgg

SEQ ID NO: 61378 - DNA, 33 bp, Homo sapien
aattatctctcaaaaagtggtagtttcccatgg

SEQ ID NO: 61379 - DNA, 33 bp, Homo sapien
tcctgcatatttaaaactattgaggcaatttaa

SEQ ID NO: 61380 - DNA, 33 bp, Homo sapien
tcctgcatatttaaaattattgaggcaatttaa

SEQ ID NO: 61381 - DNA, 33 bp, Homo sapien
agaaatgggtgagtacaaggctataaagaaaaa

SEQ ID NO: 61382 - DNA, 33 bp, Homo sapien
agaaatgggtgagtaccaggctataaagaaaaa

SEQ ID NO: 61383 - DNA, 33 bp, Homo sapien
ttgtagactatgtacaccttaatgaatgaatag

SEQ ID NO: 61384 - DNA, 33 bp, Homo sapien
ttgtagactatgtacagcttaatgaatgaatag

SEQ ID NO: 61385 - DNA, 33 bp, Homo sapien
ctctaatatctggaacactacgaggatgttcac

SEQ ID NO: 61386 - DNA, 33 bp, Homo sapien
ctctaatatctggaacgctacgaggatgttcac

SEQ ID NO: 61387 - DNA, 33 bp, Homo sapien
tgttcttagatatcagcccattagctcgacagg

SEQ ID NO: 61388 - DNA, 33 bp, Homo sapien
tgttcttagatatcaggccattagctcgacagg

SEQ ID NO: 61389 - DNA, 33 bp, Homo sapien
aattatctggaaacataaaacaatctgtgtttc

SEQ ID NO: 61390 - DNA, 33 bp, Homo sapien
aattatctggaaacattaaacaatctgtgtttc

SEQ ID NO: 61391 - DNA, 33 bp, Homo sapien
gacaggttcttaggtggaaaggagcaggtctct

SEQ ID NO: 61392 - DNA, 33 bp, Homo sapien
gacaggttcttaggtgtaaaggagcaggtctct

SEQ ID NO: 61393 - DNA, 33 bp, Homo sapien
gatgggcttgagcaagacaatttattgggacat

SEQ ID NO: 61394 - DNA, 33 bp, Homo sapien
gatgggcttgagcaaggcaatttattgggacat

SEQ ID NO: 61395 - DNA, 33 bp, Homo sapien
gttttgcctggaggaaatccaaagaaaataaaa

SEQ ID NO: 61396 - DNA, 33 bp, Homo sapien
gttttgcctggaggaagtccaaagaaaataaaa

SEQ ID NO: 61397 - DNA, 33 bp, Homo sapien
agaaaccacgcaggtgcaactgacagaccactc

SEQ ID NO: 61398 - DNA, 33 bp, Homo sapien
agaaaccacgcaggtgtaactgacagaccactc

SEQ ID NO: 61399 - DNA, 33 bp, Homo sapien
gagaatagtgaaaatcacccacaggtagaagaa

SEQ ID NO: 61400 - DNA, 33 bp, Homo sapien
gagaatagtgaaaatcgcccacaggtagaagaa

SEQ ID NO: 61401 - DNA, 33 bp, Homo sapien
caatcttcaaggaaggaaagcgtgacctaagac

SEQ ID NO: 61402 - DNA, 33 bp, Homo sapien
caatcttcaaggaagggaagcgtgacctaagac

SEQ ID NO: 61403 - DNA, 33 bp, Homo sapien
tctcctcctagccacaaaactatgttcctctct

SEQ ID NO: 61404 - DNA, 33 bp, Homo sapien
tctcctcctagccacacaactatgttcctctct

SEQ ID NO: 61405 - DNA, 33 bp, Homo sapien
gaagaattatagtgcaacctgatgaatgttata

SEQ ID NO: 61406 - DNA, 33 bp, Homo sapien
gaagaattatagtgcatcctgatgaatgttata

SEQ ID NO: 61407 - DNA, 33 bp, Homo sapien
tatacctgtactccccactatgtagtaggctaa

SEQ ID NO: 61408 - DNA, 33 bp, Homo sapien
tatacctgtactccccgctatgtagtaggctaa

SEQ ID NO: 61409 - DNA, 33 bp, Homo sapien
ttttgctcaatacaaaatcttgattcttgacaa

SEQ ID NO: 61410 - DNA, 33 bp, Homo sapien
ttttgctcaatacaaagtcttgattcttgacaa

SEQ ID NO: 61411 - DNA, 33 bp, Homo sapien
acgctttatagcatgaaaaaaggtaaaatgtta

SEQ ID NO: 61412 - DNA, 33 bp, Homo sapien
acgctttatagcatgacaaaaggtaaaatgtta

SEQ ID NO: 61413 - DNA, 33 bp, Homo sapien
aaagtgaacaggtcataagggttgagctcttat

SEQ ID NO: 61414 - DNA, 33 bp, Homo sapien
aaagtgaacaggtcatgagggttgagctcttat

SEQ ID NO: 61415 - DNA, 33 bp, Homo sapien
ggccttcatatgttacaaactgacctcagatct

SEQ ID NO: 61416 - DNA, 33 bp, Homo sapien
ggccttcatatgttacgaactgacctcagatct

SEQ ID NO: 61417 - DNA, 33 bp, Homo sapien
atgtttaaagtagaaacaacaatggtcaaacaa

SEQ ID NO: 61418 - DNA, 33 bp, Homo sapien
atgtttaaagtagaaagaacaatggtcaaacaa

SEQ ID NO: 61419 - DNA, 33 bp, Homo sapien
agcctagttgtgaatacctgttacacctttctc

SEQ ID NO: 61420 - DNA, 33 bp, Homo sapien
agcctagttgtgaatagctgttacacctttctc

SEQ ID NO: 61421 - DNA, 33 bp, Homo sapien
cataagttcacacaagaatctccatgtgatgat

SEQ ID NO: 61422 - DNA, 33 bp, Homo sapien
cataagttcacacaagcatctccatgtgatgat

SEQ ID NO: 61423 - DNA, 33 bp, Homo sapien
ttgtccgtcatatctaaaatgaaaagtgtatgg

SEQ ID NO: 61424 - DNA, 33 bp, Homo sapien
ttgtccgtcatatctacaatgaaaagtgtatgg

SEQ ID NO: 61425 - DNA, 33 bp, Homo sapien
atgttcacaagtaaagccatctaggcctcacag

SEQ ID NO: 61426 - DNA, 33 bp, Homo sapien
atgttcacaagtaaagtcatctaggcctcacag

SEQ ID NO: 61427 - DNA, 33 bp, Homo sapien
taggtgtccaggaatacataaacagttccccat

SEQ ID NO: 61428 - DNA, 33 bp, Homo sapien
taggtgtccaggaatatataaacagttccccat

SEQ ID NO: 61429 - DNA, 33 bp, Homo sapien
atatgccgaaaccatacaagactttggcatatc

SEQ ID NO: 61430 - DNA, 33 bp, Homo sapien
atatgccgaaaccatataagactttggcatatc

SEQ ID NO: 61431 - DNA, 33 bp, Homo sapien
atatataaacatttggaaaaatacacagatata

SEQ ID NO: 61432 - DNA, 33 bp, Homo sapien
atatataaacatttgggaaaatacacagatata

SEQ ID NO: 61433 - DNA, 33 bp, Homo sapien
gaaatacaaagggtcactctcactgtaatatgt

SEQ ID NO: 61434 - DNA, 33 bp, Homo sapien
gaaatacaaagggtcattctcactgtaatatgt

SEQ ID NO: 61435 - DNA, 33 bp, Homo sapien
cactgtcttaatccaagacatgaacgttctgtt

SEQ ID NO: 61436 - DNA, 33 bp, Homo sapien
cactgtcttaatccaatacatgaacgttctgtt

SEQ ID NO: 61437 - DNA, 33 bp, Homo sapien
cacacactgatcaatagatttttaaaattccat

SEQ ID NO: 61438 - DNA, 33 bp, Homo sapien
cacacactgatcaatatatttttaaaattccat

SEQ ID NO: 61439 - DNA, 33 bp, Homo sapien
tttaaattgaatggtacgctaataggtgtaaat

SEQ ID NO: 61440 - DNA, 33 bp, Homo sapien
tttaaattgaatggtatgctaataggtgtaaat

SEQ ID NO: 61441 - DNA, 33 bp, Homo sapien
tttgtaaaaggctaaaaatcaaacacaataaaa

SEQ ID NO: 61442 - DNA, 33 bp, Homo sapien
tttgtaaaaggctaaatatcaaacacaataaaa

SEQ ID NO: 61443 - DNA, 33 bp, Homo sapien
agaattggggaaccaaaaagcttactatgtata

SEQ ID NO: 61444 - DNA, 33 bp, Homo sapien
agaattggggaaccaagaagcttactatgtata

SEQ ID NO: 61445 - DNA, 33 bp, Homo sapien
ttcagatatttcctaactgaggtccttgatact

SEQ ID NO: 61446 - DNA, 33 bp, Homo sapien
ttcagatatttcctaattgaggtccttgatact

SEQ ID NO: 61447 - DNA, 33 bp, Homo sapien
aacttaaaggacttgactattacagcagatcgt

SEQ ID NO: 61448 - DNA, 33 bp, Homo sapien
aacttaaaggacttgattattacagcagatcgt

SEQ ID NO: 61449 - DNA, 33 bp, Homo sapien
aaaagaagtgtaagtaccaatggaatatcaact

SEQ ID NO: 61450 - DNA, 33 bp, Homo sapien
aaaagaagtgtaagtatcaatggaatatcaact

SEQ ID NO: 61451 - DNA, 33 bp, Homo sapien
agagtaaagctaacacacaactatacatatctt

SEQ ID NO: 61452 - DNA, 33 bp, Homo sapien
agagtaaagctaacacgcaactatacatatctt

SEQ ID NO: 61453 - DNA, 33 bp, Homo sapien
agcacattctctacaactggcctaataatgttt

SEQ ID NO: 61454 - DNA, 33 bp, Homo sapien
agcacattctctacaattggcctaataatgttt

SEQ ID NO: 61455 - DNA, 33 bp, Homo sapien
agattaataactacccacaaatgtcttatgaat

SEQ ID NO: 61456 - DNA, 33 bp, Homo sapien
agattaataactacccccaaatgtcttatgaat

SEQ ID NO: 61457 - DNA, 33 bp, Homo sapien
aggagaaggtgacttacagagggaaacccatca

SEQ ID NO: 61458 - DNA, 33 bp, Homo sapien
aggagaaggtgacttatagagggaaacccatca

SEQ ID NO: 61459 - DNA, 33 bp, Homo sapien
tatagtggttaacctacgttgactaataaatga

SEQ ID NO: 61460 - DNA, 33 bp, Homo sapien
tatagtggttaacctatgttgactaataaatga

SEQ ID NO: 61461 - DNA, 33 bp, Homo sapien
tacaaacttaacaataaaaatcgtgaacaagtg

SEQ ID NO: 61462 - DNA, 33 bp, Homo sapien
tacaaacttaacaatacaaatcgtgaacaagtg

SEQ ID NO: 61463 - DNA, 33 bp, Homo sapien
atcttagcagtaagtaaaaattgacagtctcta

SEQ ID NO: 61464 - DNA, 33 bp, Homo sapien
atcttagcagtaagtataaattgacagtctcta

SEQ ID NO: 61465 - DNA, 33 bp, Homo sapien
gagtagcgttttataaatcttgtgactaaagaa

SEQ ID NO: 61466 - DNA, 33 bp, Homo sapien
gagtagcgttttataattcttgtgactaaagaa

SEQ ID NO: 61467 - DNA, 33 bp, Homo sapien
aaaatgcctccattgaaaaaataaaagaatctc

SEQ ID NO: 61468 - DNA, 33 bp, Homo sapien
aaaatgcctccattgagaaaataaaagaatctc

SEQ ID NO: 61469 - DNA, 33 bp, Homo sapien
taaaatacctgtagaaattacacacaaaaaaag

SEQ ID NO: 61470 - DNA, 33 bp, Homo sapien
taaaatacctgtagaagttacacacaaaaaaag

SEQ ID NO: 61471 - DNA, 33 bp, Homo sapien
aaatgctggcagttataaggacagtgaaggcca

SEQ ID NO: 61472 - DNA, 33 bp, Homo sapien
aaatgctggcagttatgaggacagtgaaggcca

SEQ ID NO: 61473 - DNA, 33 bp, Homo sapien
gcccaaagcacaaatacccagaggtactagctt

SEQ ID NO: 61474 - DNA, 33 bp, Homo sapien
gcccaaagcacaaatatccagaggtactagctt

SEQ ID NO: 61475 - DNA, 33 bp, Homo sapien
gctgcttctacaaaacaccttggacatttccac

SEQ ID NO: 61476 - DNA, 33 bp, Homo sapien
gctgcttctacaaaacgccttggacatttccac

SEQ ID NO: 61477 - DNA, 33 bp, Homo sapien
aggccagaacagtttcacatgattcaaaatcaa

SEQ ID NO: 61478 - DNA, 33 bp, Homo sapien
aggccagaacagtttcgcatgattcaaaatcaa

SEQ ID NO: 61479 - DNA, 33 bp, Homo sapien
ttactcaaccatttatcaagatgagactactta

SEQ ID NO: 61480 - DNA, 33 bp, Homo sapien
ttactcaaccatttatgaagatgagactactta

SEQ ID NO: 61481 - DNA, 33 bp, Homo sapien
tatggtggttaccagcaatctttggcattatgt

SEQ ID NO: 61482 - DNA, 33 bp, Homo sapien
tatggtggttaccagcgatctttggcattatgt

SEQ ID NO: 61483 - DNA, 33 bp, Homo sapien
ttcctacgtagggacaagagacacaaagggaag

SEQ ID NO: 61484 - DNA, 33 bp, Homo sapien
ttcctacgtagggacaggagacacaaagggaag

SEQ ID NO: 61485 - DNA, 33 bp, Homo sapien
attagctgggctaccactatggtgttgcttctt

SEQ ID NO: 61486 - DNA, 33 bp, Homo sapien
attagctgggctaccattatggtgttgcttctt

SEQ ID NO: 61487 - DNA, 33 bp, Homo sapien
attctggagtccttcacagtaaccatagcatta

SEQ ID NO: 61488 - DNA, 33 bp, Homo sapien
attctggagtccttcagagtaaccatagcatta

SEQ ID NO: 61489 - DNA, 33 bp, Homo sapien
attactaaaacttacaatatcaaaacttacacg

SEQ ID NO: 61490 - DNA, 33 bp, Homo sapien
attactaaaacttacattatcaaaacttacacg

SEQ ID NO: 61491 - DNA, 33 bp, Homo sapien
ggaattttaaagcaaacgtagatgaggactaag

SEQ ID NO: 61492 - DNA, 33 bp, Homo sapien
ggaattttaaagcaaaggtagatgaggactaag

SEQ ID NO: 61493 - DNA, 33 bp, Homo sapien
tttgactttgtatttagatgagcaaatcaatta

SEQ ID NO: 61494 - DNA, 33 bp, Homo sapien
tttgactttgtatttatatgagcaaatcaatta

SEQ ID NO: 61495 - DNA, 33 bp, Homo sapien
ctgtaacactattgagcaaagtgaagatttttt

SEQ ID NO: 61496 - DNA, 33 bp, Homo sapien
ctgtaacactattgaggaaagtgaagatttttt

SEQ ID NO: 61497 - DNA, 33 bp, Homo sapien
aagaaccagtatccccaaaaaagtgaataaacc

SEQ ID NO: 61498 - DNA, 33 bp, Homo sapien
aagaaccagtatcccccaaaaagtgaataaacc

SEQ ID NO: 61499 - DNA, 33 bp, Homo sapien
gcaattagtaaagacaaacaagccaaagaacca

SEQ ID NO: 61500 - DNA, 33 bp, Homo sapien
gcaattagtaaagacatacaagccaaagaacca

SEQ ID NO: 61501 - DNA, 33 bp, Homo sapien
cctcatcgtataactgaatgttttctgctgcac

SEQ ID NO: 61502 - DNA, 33 bp, Homo sapien
cctcatcgtataactggatgttttctgctgcac

SEQ ID NO: 61503 - DNA, 33 bp, Homo sapien
cagtttattaatcttaactgagaacaaactaac

SEQ ID NO: 61504 - DNA, 33 bp, Homo sapien
cagtttattaatcttagctgagaacaaactaac

SEQ ID NO: 61505 - DNA, 33 bp, Homo sapien
tgcccactccaggtatcaacagaagcaaaacag

SEQ ID NO: 61506 - DNA, 33 bp, Homo sapien
tgcccactccaggtatgaacagaagcaaaacag

SEQ ID NO: 61507 - DNA, 33 bp, Homo sapien
tgggtaatagtaaggcaaaacaacaggttaatc

SEQ ID NO: 61508 - DNA, 33 bp, Homo sapien
tgggtaatagtaaggcgaaacaacaggttaatc

SEQ ID NO: 61509 - DNA, 33 bp, Homo sapien
ttttaaaatgctccaaaatattcctggcaatat

SEQ ID NO: 61510 - DNA, 33 bp, Homo sapien
ttttaaaatgctccaacatattcctggcaatat

SEQ ID NO: 61511 - DNA, 33 bp, Homo sapien
agtctccaacctcataccacatacaaaattaac

SEQ ID NO: 61512 - DNA, 33 bp, Homo sapien
agtctccaacctcatatcacatacaaaattaac

SEQ ID NO: 61513 - DNA, 33 bp, Homo sapien
tcattcagcatttgaactaaattggaaaggtga

SEQ ID NO: 61514 - DNA, 33 bp, Homo sapien
tcattcagcatttgaagtaaattggaaaggtga

SEQ ID NO: 61515 - DNA, 33 bp, Homo sapien
tcctcttacaactacacgaaagttgccaaagaa

SEQ ID NO: 61516 - DNA, 33 bp, Homo sapien
tcctcttacaactacatgaaagttgccaaagaa

SEQ ID NO: 61517 - DNA, 33 bp, Homo sapien
gccactacatggcacaaggttgatactctcacc

SEQ ID NO: 61518 - DNA, 33 bp, Homo sapien
gccactacatggcacagggttgatactctcacc

SEQ ID NO: 61519 - DNA, 33 bp, Homo sapien
tgaaacagacataactaacaacaaattgtagac

SEQ ID NO: 61520 - DNA, 33 bp, Homo sapien
tgaaacagacataactgacaacaaattgtagac

SEQ ID NO: 61521 - DNA, 33 bp, Homo sapien
tagagagctttgattacgatttagaatataaac

SEQ ID NO: 61522 - DNA, 33 bp, Homo sapien
tagagagctttgattaggatttagaatataaac

SEQ ID NO: 61523 - DNA, 33 bp, Homo sapien
atttagctggtaaaataattctagctccttaat

SEQ ID NO: 61524 - DNA, 33 bp, Homo sapien
atttagctggtaaaatcattctagctccttaat

SEQ ID NO: 61525 - DNA, 33 bp, Homo sapien
ttgttaaaatagctttcaaaatgttgactatat

SEQ ID NO: 61526 - DNA, 33 bp, Homo sapien
ttgttaaaatagctttgaaaatgttgactatat

SEQ ID NO: 61527 - DNA, 33 bp, Homo sapien
acaaggtgaaagcaacggctgaagagacttccc

SEQ ID NO: 61528 - DNA, 33 bp, Homo sapien
acaaggtgaaagcaactgctgaagagacttccc

SEQ ID NO: 61529 - DNA, 33 bp, Homo sapien
tatatggtatttggaccaaatgattttgaaatg

SEQ ID NO: 61530 - DNA, 33 bp, Homo sapien
tatatggtatttggactaaatgattttgaaatg

SEQ ID NO: 61531 - DNA, 33 bp, Homo sapien
tacatcagtctataataaaaagcttccacacag

SEQ ID NO: 61532 - DNA, 33 bp, Homo sapien
tacatcagtctataatgaaaagcttccacacag

SEQ ID NO: 61533 - DNA, 33 bp, Homo sapien
gtgcttaatatagaaactactaagcagtatggt

SEQ ID NO: 61534 - DNA, 33 bp, Homo sapien
gtgcttaatatagaaagtactaagcagtatggt

SEQ ID NO: 61535 - DNA, 33 bp, Homo sapien
aaaaaacctaatgctagagtcacaacttgcccg

SEQ ID NO: 61536 - DNA, 33 bp, Homo sapien
aaaaaacctaatgctatagtcacaacttgcccg

SEQ ID NO: 61537 - DNA, 33 bp, Homo sapien
aaggcatttagctctcaaaaatcatttcaagcc

SEQ ID NO: 61538 - DNA, 33 bp, Homo sapien
aaggcatttagctctcgaaaatcatttcaagcc

SEQ ID NO: 61539 - DNA, 33 bp, Homo sapien
aattctaataatctaaaaagtgcattatcaata

SEQ ID NO: 61540 - DNA, 33 bp, Homo sapien
aattctaataatctaagaagtgcattatcaata

SEQ ID NO: 61541 - DNA, 33 bp, Homo sapien
gaatcatatttgaaccaacacacaggacttaac

SEQ ID NO: 61542 - DNA, 33 bp, Homo sapien
gaatcatatttgaaccgacacacaggacttaac

SEQ ID NO: 61543 - DNA, 33 bp, Homo sapien
tgaatcagaattaaaacgtcttcacagtgcata

SEQ ID NO: 61544 - DNA, 33 bp, Homo sapien
tgaatcagaattaaaatgtcttcacagtgcata

SEQ ID NO: 61545 - DNA, 33 bp, Homo sapien
acaggactcctattaacatctttggggccttga

SEQ ID NO: 61546 - DNA, 33 bp, Homo sapien
acaggactcctattaatatctttggggccttga

SEQ ID NO: 61547 - DNA, 33 bp, Homo sapien
catacctgaaagcatccgagtcaaggccccaaa

SEQ ID NO: 61548 - DNA, 33 bp, Homo sapien
catacctgaaagcatctgagtcaaggccccaaa

SEQ ID NO: 61549 - DNA, 33 bp, Homo sapien
ttgtaattccaaataacgagacatacctgaaag

SEQ ID NO: 61550 - DNA, 33 bp, Homo sapien
ttgtaattccaaataatgagacatacctgaaag

SEQ ID NO: 61551 - DNA, 33 bp, Homo sapien
cccagccaataacatgaaattttggggagctga

SEQ ID NO: 61552 - DNA, 33 bp, Homo sapien
cccagccaataacatggaattttggggagctga

SEQ ID NO: 61553 - DNA, 33 bp, Homo sapien
gggatttcataaaataaacaagcaaccacaaca

SEQ ID NO: 61554 - DNA, 33 bp, Homo sapien
gggatttcataaaatatacaagcaaccacaaca

SEQ ID NO: 61555 - DNA, 33 bp, Homo sapien
caggtttcatcggacacagcctgggtcaatgat

SEQ ID NO: 61556 - DNA, 33 bp, Homo sapien
caggtttcatcggacagagcctgggtcaatgat

SEQ ID NO: 61557 - DNA, 33 bp, Homo sapien
gcagtacaaggtgttaaatgaggaggggcctgg

SEQ ID NO: 61558 - DNA, 33 bp, Homo sapien
gcagtacaaggtgttatatgaggaggggcctgg

SEQ ID NO: 61559 - DNA, 33 bp, Homo sapien
aataggaatacctatgccaggcttgtactatca

SEQ ID NO: 61560 - DNA, 33 bp, Homo sapien
aataggaatacctatgtcaggcttgtactatca

SEQ ID NO: 61561 - DNA, 33 bp, Homo sapien
aaataggcaaaagaaactaggaacagtccccaa

SEQ ID NO: 61562 - DNA, 33 bp, Homo sapien
aaataggcaaaagaaagtaggaacagtccccaa

SEQ ID NO: 61563 - DNA, 33 bp, Homo sapien
actgtatccaatagaaacattttcagtgcacac

SEQ ID NO: 61564 - DNA, 33 bp, Homo sapien
actgtatccaatagaagcattttcagtgcacac

SEQ ID NO: 61565 - DNA, 33 bp, Homo sapien
agctccaggataataaaggtgaaccacaattga

SEQ ID NO: 61566 - DNA, 33 bp, Homo sapien
agctccaggataataacggtgaaccacaattga

SEQ ID NO: 61567 - DNA, 33 bp, Homo sapien
atgggcactactggaaagcattataagtaaagc

SEQ ID NO: 61568 - DNA, 33 bp, Homo sapien
atgggcactactggaaggcattataagtaaagc

SEQ ID NO: 61569 - DNA, 33 bp, Homo sapien
agtataatctctccaagtcaataatttaatcac

SEQ ID NO: 61570 - DNA, 33 bp, Homo sapien
agtataatctctccaattcaataatttaatcac

SEQ ID NO: 61571 - DNA, 33 bp, Homo sapien
agtggttatttggagacgatcctcaatcctaat

SEQ ID NO: 61572 - DNA, 33 bp, Homo sapien
agtggttatttggagatgatcctcaatcctaat

SEQ ID NO: 61573 - DNA, 33 bp, Homo sapien
gttagacttttcctaacggattcaacacatccc

SEQ ID NO: 61574 - DNA, 33 bp, Homo sapien
gttagacttttcctaatggattcaacacatccc

SEQ ID NO: 61575 - DNA, 33 bp, Homo sapien
ctggatttcatgaagcgacaattaaggtgtcag

SEQ ID NO: 61576 - DNA, 33 bp, Homo sapien
ctggatttcatgaagctacaattaaggtgtcag

SEQ ID NO: 61577 - DNA, 33 bp, Homo sapien
aataataaagaaatgactaggtttctggttcta

SEQ ID NO: 61578 - DNA, 33 bp, Homo sapien
aataataaagaaatgagtaggtttctggttcta

SEQ ID NO: 61579 - DNA, 33 bp, Homo sapien
agccaaacattgacaaataagcacttttaatac

SEQ ID NO: 61580 - DNA, 33 bp, Homo sapien
agccaaacattgacaagtaagcacttttaatac

SEQ ID NO: 61581 - DNA, 33 bp, Homo sapien
ttagaccttttatatgaatttatccactttact

SEQ ID NO: 61582 - DNA, 33 bp, Homo sapien
ttagaccttttatatggatttatccactttact

SEQ ID NO: 61583 - DNA, 33 bp, Homo sapien
caggtgagtttgtgaaaatacaatctggtcagg

SEQ ID NO: 61584 - DNA, 33 bp, Homo sapien
caggtgagtttgtgaagatacaatctggtcagg

SEQ ID NO: 61585 - DNA, 33 bp, Homo sapien
ttaacacgtttgtttccataatacaggaaatac

SEQ ID NO: 61586 - DNA, 33 bp, Homo sapien
ttaacacgtttgtttctataatacaggaaatac

SEQ ID NO: 61587 - DNA, 33 bp, Homo sapien
gtcctccacccttgtcaatccttctctcctccc

SEQ ID NO: 61588 - DNA, 33 bp, Homo sapien
gtcctccacccttgtcgatccttctctcctccc

SEQ ID NO: 61589 - DNA, 33 bp, Homo sapien
gagagggatggtccaactgggagcagaggtgga

SEQ ID NO: 61590 - DNA, 33 bp, Homo sapien
gagagggatggtccaattgggagcagaggtgga

SEQ ID NO: 61591 - DNA, 33 bp, Homo sapien
tatgcctggtcaatcacataagtttcaaaaatt

SEQ ID NO: 61592 - DNA, 33 bp, Homo sapien
tatgcctggtcaatcatataagtttcaaaaatt

SEQ ID NO: 61593 - DNA, 33 bp, Homo sapien
actccttcagtctcataaaatccacttatccca

SEQ ID NO: 61594 - DNA, 33 bp, Homo sapien
actccttcagtctcatgaaatccacttatccca

SEQ ID NO: 61595 - DNA, 33 bp, Homo sapien
gaatttgtagaatagaccatttaaaggaatgga

SEQ ID NO: 61596 - DNA, 33 bp, Homo sapien
gaatttgtagaatagatcatttaaaggaatgga

SEQ ID NO: 61597 - DNA, 33 bp, Homo sapien
ttcccaatgtgatctacatttcttcgcttacat

SEQ ID NO: 61598 - DNA, 33 bp, Homo sapien
ttcccaatgtgatctatatttcttcgcttacat

SEQ ID NO: 61599 - DNA, 33 bp, Homo sapien
tgcagaacagtaacagcccaaaacttttgtcaa

SEQ ID NO: 61600 - DNA, 33 bp, Homo sapien
tgcagaacagtaacagtccaaaacttttgtcaa

SEQ ID NO: 61601 - DNA, 33 bp, Homo sapien
gcattttgaataagacaatcattggctgtatgg

SEQ ID NO: 61602 - DNA, 33 bp, Homo sapien
gcattttgaataagacgatcattggctgtatgg

SEQ ID NO: 61603 - DNA, 33 bp, Homo sapien
gcataaagatatcacaagtttttacccattctc

SEQ ID NO: 61604 - DNA, 33 bp, Homo sapien
gcataaagatatcacaggtttttacccattctc

SEQ ID NO: 61605 - DNA, 33 bp, Homo sapien
caaaaggtcataactcacaactgatttagctcc

SEQ ID NO: 61606 - DNA, 33 bp, Homo sapien
caaaaggtcataactcgcaactgatttagctcc

SEQ ID NO: 61607 - DNA, 33 bp, Homo sapien
gatgtttttcttctaaagtacaaagcaataaac

SEQ ID NO: 61608 - DNA, 33 bp, Homo sapien
gatgtttttcttctaaggtacaaagcaataaac

SEQ ID NO: 61609 - DNA, 33 bp, Homo sapien
agtatacactggagaccgaaaccatgatgaagt

SEQ ID NO: 61610 - DNA, 33 bp, Homo sapien
agtatacactggagactgaaaccatgatgaagt

SEQ ID NO: 61611 - DNA, 33 bp, Homo sapien
tgccacttactcattcacctttgttgcccccct

SEQ ID NO: 61612 - DNA, 33 bp, Homo sapien
tgccacttactcattcgcctttgttgcccccct

SEQ ID NO: 61613 - DNA, 33 bp, Homo sapien
tgttcagtctgtgtaaacaaaagaaggtaacaa

SEQ ID NO: 61614 - DNA, 33 bp, Homo sapien
tgttcagtctgtgtaaccaaaagaaggtaacaa

SEQ ID NO: 61615 - DNA, 33 bp, Homo sapien
ccgagaggaatcaagaccttcagctaacaacca

SEQ ID NO: 61616 - DNA, 33 bp, Homo sapien
ccgagaggaatcaagatcttcagctaacaacca

SEQ ID NO: 61617 - DNA, 33 bp, Homo sapien
atttaatattctgcaaatctgtgcttaagatat

SEQ ID NO: 61618 - DNA, 33 bp, Homo sapien
atttaatattctgcaactctgtgcttaagatat

SEQ ID NO: 61619 - DNA, 33 bp, Homo sapien
caatattctgtctaaaatctgtaatctgaataa

SEQ ID NO: 61620 - DNA, 33 bp, Homo sapien
caatattctgtctaaagtctgtaatctgaataa

SEQ ID NO: 61621 - DNA, 33 bp, Homo sapien
gtttacgcaatcaaagactttaatatgacatac

SEQ ID NO: 61622 - DNA, 33 bp, Homo sapien
gtttacgcaatcaaagcctttaatatgacatac

SEQ ID NO: 61623 - DNA, 33 bp, Homo sapien
ggttagactccttacactgaagattattgatct

SEQ ID NO: 61624 - DNA, 33 bp, Homo sapien
ggttagactccttacattgaagattattgatct

SEQ ID NO: 61625 - DNA, 33 bp, Homo sapien
cacatcctgtccatcaactgttatttcctgact

SEQ ID NO: 61626 - DNA, 33 bp, Homo sapien
cacatcctgtccatcatctgttatttcctgact

SEQ ID NO: 61627 - DNA, 33 bp, Homo sapien
taacacatttaaaaacaaattatatcgctgcat

SEQ ID NO: 61628 - DNA, 33 bp, Homo sapien
taacacatttaaaaacgaattatatcgctgcat

SEQ ID NO: 61629 - DNA, 33 bp, Homo sapien
actcgacttcgtaataaaacatcagaacttaat

SEQ ID NO: 61630 - DNA, 33 bp, Homo sapien
actcgacttcgtaatagaacatcagaacttaat

SEQ ID NO: 61631 - DNA, 33 bp, Homo sapien
cctctcatgaggttatcagaactttcgttttcc

SEQ ID NO: 61632 - DNA, 33 bp, Homo sapien
cctctcatgaggttatgagaactttcgttttcc

SEQ ID NO: 61633 - DNA, 33 bp, Homo sapien
agcatagaaacgaatgcaattggctatattcct

SEQ ID NO: 61634 - DNA, 33 bp, Homo sapien
agcatagaaacgaatggaattggctatattcct

SEQ ID NO: 61635 - DNA, 33 bp, Homo sapien
aacctttcctagacagactcaacattatatagc

SEQ ID NO: 61636 - DNA, 33 bp, Homo sapien
aacctttcctagacaggctcaacattatatagc

SEQ ID NO: 61637 - DNA, 33 bp, Homo sapien
accactgcttagcataataattggcatttgtta

SEQ ID NO: 61638 - DNA, 33 bp, Homo sapien
accactgcttagcatagtaattggcatttgtta

SEQ ID NO: 61639 - DNA, 33 bp, Homo sapien
gtattagattctcatcagaaggcctggcacggt

SEQ ID NO: 61640 - DNA, 33 bp, Homo sapien
gtattagattctcatcggaaggcctggcacggt

SEQ ID NO: 61641 - DNA, 33 bp, Homo sapien
aaatatgtacaccttacggaatgataaatcaag

SEQ ID NO: 61642 - DNA, 33 bp, Homo sapien
aaatatgtacaccttatggaatgataaatcaag

SEQ ID NO: 61643 - DNA, 33 bp, Homo sapien
tgggaaccactgttcaaaggttagggtaagcta

SEQ ID NO: 61644 - DNA, 33 bp, Homo sapien
tgggaaccactgttcagaggttagggtaagcta

SEQ ID NO: 61645 - DNA, 33 bp, Homo sapien
ctcctctcaagataggccaaattttaagatgta

SEQ ID NO: 61646 - DNA, 33 bp, Homo sapien
ctcctctcaagataggtcaaattttaagatgta

SEQ ID NO: 61647 - DNA, 33 bp, Homo sapien
aaagagagatgaaatcaccaggaactttacatt

SEQ ID NO: 61648 - DNA, 33 bp, Homo sapien
aaagagagatgaaatcgccaggaactttacatt

SEQ ID NO: 61649 - DNA, 33 bp, Homo sapien
ggtttgcatcaaactcacatccacaatatgctt

SEQ ID NO: 61650 - DNA, 33 bp, Homo sapien
ggtttgcatcaaactcgcatccacaatatgctt

SEQ ID NO: 61651 - DNA, 33 bp, Homo sapien
ccatagaacaagaactaagacctagctagctga

SEQ ID NO: 61652 - DNA, 33 bp, Homo sapien
ccatagaacaagaactcagacctagctagctga

SEQ ID NO: 61653 - DNA, 33 bp, Homo sapien
gtaggatttgttaagcaaaatgatagctttcag

SEQ ID NO: 61654 - DNA, 33 bp, Homo sapien
gtaggatttgttaagcgaaatgatagctttcag

SEQ ID NO: 61655 - DNA, 33 bp, Homo sapien
aaaattcaaatggtgacgcagatggaatcccat

SEQ ID NO: 61656 - DNA, 33 bp, Homo sapien
aaaattcaaatggtgatgcagatggaatcccat

SEQ ID NO: 61657 - DNA, 33 bp, Homo sapien
acaaggaggtttaatacgcagggtccaaaaagc

SEQ ID NO: 61658 - DNA, 33 bp, Homo sapien
acaaggaggtttaatatgcagggtccaaaaagc

SEQ ID NO: 61659 - DNA, 33 bp, Homo sapien
gagatctcttaacaagacctgcccaagcaagta

SEQ ID NO: 61660 - DNA, 33 bp, Homo sapien
gagatctcttaacaaggcctgcccaagcaagta

SEQ ID NO: 61661 - DNA, 33 bp, Homo sapien
acaaagtcctctctagcaagcctgtcctctgag

SEQ ID NO: 61662 - DNA, 33 bp, Homo sapien
acaaagtcctctctagtaagcctgtcctctgag

SEQ ID NO: 61663 - DNA, 33 bp, Homo sapien
tatcagccctaccgtagtacagataacttcatt

SEQ ID NO: 61664 - DNA, 33 bp, Homo sapien
tatcagccctaccgtattacagataacttcatt

SEQ ID NO: 61665 - DNA, 33 bp, Homo sapien
aacataggacactgtcaagaatcggttgtttat

SEQ ID NO: 61666 - DNA, 33 bp, Homo sapien
aacataggacactgtcgagaatcggttgtttat

SEQ ID NO: 61667 - DNA, 33 bp, Homo sapien
gttatgacataaggaagaaataggactgcatag

SEQ ID NO: 61668 - DNA, 33 bp, Homo sapien
gttatgacataaggaataaataggactgcatag

SEQ ID NO: 61669 - DNA, 33 bp, Homo sapien
taattttgcctgcccaagcacaagcctggaaac

SEQ ID NO: 61670 - DNA, 33 bp, Homo sapien
taattttgcctgcccacgcacaagcctggaaac

SEQ ID NO: 61671 - DNA, 33 bp, Homo sapien
aaaaattagccggccccggaggctcacctctgt

SEQ ID NO: 61672 - DNA, 33 bp, Homo sapien
aaaaattagccggccctggaggctcacctctgt

SEQ ID NO: 61673 - DNA, 33 bp, Homo sapien
atcaactgtatttccacatgttagcaacaggca

SEQ ID NO: 61674 - DNA, 33 bp, Homo sapien
atcaactgtatttccatatgttagcaacaggca

SEQ ID NO: 61675 - DNA, 33 bp, Homo sapien
tatgtgacaggctgaacaagctcccatcaaaat

SEQ ID NO: 61676 - DNA, 33 bp, Homo sapien
tatgtgacaggctgaataagctcccatcaaaat

SEQ ID NO: 61677 - DNA, 33 bp, Homo sapien
aaaggaatagatttcacccttcagttgcatttt

SEQ ID NO: 61678 - DNA, 33 bp, Homo sapien
aaaggaatagatttcatccttcagttgcatttt

SEQ ID NO: 61679 - DNA, 33 bp, Homo sapien
cagttagccacaaaaactgcttaattctacatt

SEQ ID NO: 61680 - DNA, 33 bp, Homo sapien
cagttagccacaaaaattgcttaattctacatt

SEQ ID NO: 61681 - DNA, 33 bp, Homo sapien
ttaacagggtctataaaaatcctcatatcacca

SEQ ID NO: 61682 - DNA, 33 bp, Homo sapien
ttaacagggtctataagaatcctcatatcacca

SEQ ID NO: 61683 - DNA, 33 bp, Homo sapien
aattttgtgtaacacacagagatattaacctta

SEQ ID NO: 61684 - DNA, 33 bp, Homo sapien
aattttgtgtaacacatagagatattaacctta

SEQ ID NO: 61685 - DNA, 33 bp, Homo sapien
cacttatgtcagagctgaagtcagtgaaccaaa

SEQ ID NO: 61686 - DNA, 33 bp, Homo sapien
cacttatgtcagagcttaagtcagtgaaccaaa

SEQ ID NO: 61687 - DNA, 33 bp, Homo sapien
gagagaacagacactactaagatgccaaataaa

SEQ ID NO: 61688 - DNA, 33 bp, Homo sapien
gagagaacagacactattaagatgccaaataaa

SEQ ID NO: 61689 - DNA, 33 bp, Homo sapien
cactttcaggtacagcaatcaaaagcagatttg

SEQ ID NO: 61690 - DNA, 33 bp, Homo sapien
cactttcaggtacagcgatcaaaagcagatttg

SEQ ID NO: 61691 - DNA, 33 bp, Homo sapien
atgaactaaaaacatcaatatggtatgatttaa

SEQ ID NO: 61692 - DNA, 33 bp, Homo sapien
atgaactaaaaacatcgatatggtatgatttaa

SEQ ID NO: 61693 - DNA, 33 bp, Homo sapien
ttttaaaagagcaagaaaaatatgaagtaaaat

SEQ ID NO: 61694 - DNA, 33 bp, Homo sapien
ttttaaaagagcaagagaaatatgaagtaaaat

SEQ ID NO: 61695 - DNA, 33 bp, Homo sapien
ttacttagagcaacaccgggtattttctcttta

SEQ ID NO: 61696 - DNA, 33 bp, Homo sapien
ttacttagagcaacactgggtattttctcttta

SEQ ID NO: 61697 - DNA, 33 bp, Homo sapien
aagcaccatatttgtccagaaaaaccacctctc

SEQ ID NO: 61698 - DNA, 33 bp, Homo sapien
aagcaccatatttgtctagaaaaaccacctctc

SEQ ID NO: 61699 - DNA, 33 bp, Homo sapien
tttttagatgtggttacaattctgccatacaaa

SEQ ID NO: 61700 - DNA, 33 bp, Homo sapien
tttttagatgtggttataattctgccatacaaa

SEQ ID NO: 61701 - DNA, 33 bp, Homo sapien
ttttggaattggatcactgaagaacatggggta

SEQ ID NO: 61702 - DNA, 33 bp, Homo sapien
ttttggaattggatcattgaagaacatggggta

SEQ ID NO: 61703 - DNA, 33 bp, Homo sapien
attagctatttatcccaatgctatctctcttcc

SEQ ID NO: 61704 - DNA, 33 bp, Homo sapien
attagctatttatcccgatgctatctctcttcc

SEQ ID NO: 61705 - DNA, 33 bp, Homo sapien
gagaactaaactagaaaaatatgaagcagacta

SEQ ID NO: 61706 - DNA, 33 bp, Homo sapien
gagaactaaactagaagaatatgaagcagacta

SEQ ID NO: 61707 - DNA, 33 bp, Homo sapien
ttttcatatcagcagggcattgataatgtgtat

SEQ ID NO: 61708 - DNA, 33 bp, Homo sapien
ttttcatatcagcaggtcattgataatgtgtat

SEQ ID NO: 61709 - DNA, 33 bp, Homo sapien
tgttccatttggataagtactagtgctttatct

SEQ ID NO: 61710 - DNA, 33 bp, Homo sapien
tgttccatttggataattactagtgctttatct

SEQ ID NO: 61711 - DNA, 33 bp, Homo sapien
tacagaaggttgatgaagtggtgctatagattt

SEQ ID NO: 61712 - DNA, 33 bp, Homo sapien
tacagaaggttgatgaggtggtgctatagattt

SEQ ID NO: 61713 - DNA, 33 bp, Homo sapien
ggaggatattaaagacggaactaccacaatttc

SEQ ID NO: 61714 - DNA, 33 bp, Homo sapien
ggaggatattaaagactgaactaccacaatttc

SEQ ID NO: 61715 - DNA, 33 bp, Homo sapien
aagaaaaattcagtcacacaaaacaaagaaaat

SEQ ID NO: 61716 - DNA, 33 bp, Homo sapien
aagaaaaattcagtcatacaaaacaaagaaaat

SEQ ID NO: 61717 - DNA, 33 bp, Homo sapien
ctctcatgcttttcaacgttatttctcttgctt

SEQ ID NO: 61718 - DNA, 33 bp, Homo sapien
ctctcatgcttttcaatgttatttctcttgctt

SEQ ID NO: 61719 - DNA, 33 bp, Homo sapien
caaaatggaacatagccaaccgggatcattttc

SEQ ID NO: 61720 - DNA, 33 bp, Homo sapien
caaaatggaacatagctaaccgggatcattttc

SEQ ID NO: 61721 - DNA, 33 bp, Homo sapien
ggcctgtcaaatgcaaatgcgtatgtgaatgtg

SEQ ID NO: 61722 - DNA, 33 bp, Homo sapien
ggcctgtcaaatgcaagtgcgtatgtgaatgtg

SEQ ID NO: 61723 - DNA, 33 bp, Homo sapien
tgtcaaaaattgatccacactagtggaaataag

SEQ ID NO: 61724 - DNA, 33 bp, Homo sapien
tgtcaaaaattgatccccactagtggaaataag

SEQ ID NO: 61725 - DNA, 33 bp, Homo sapien
cttctggtccctttaaactgacagagataagga

SEQ ID NO: 61726 - DNA, 33 bp, Homo sapien
cttctggtccctttaagctgacagagataagga

SEQ ID NO: 61727 - DNA, 33 bp, Homo sapien
tttgtaaggaactgccacacagtcttcaaagta

SEQ ID NO: 61728 - DNA, 33 bp, Homo sapien
tttgtaaggaactgccgcacagtcttcaaagta

SEQ ID NO: 61729 - DNA, 33 bp, Homo sapien
acgtggatgtgaggtacgttaccaaataacttc

SEQ ID NO: 61730 - DNA, 33 bp, Homo sapien
acgtggatgtgaggtatgttaccaaataacttc

SEQ ID NO: 61731 - DNA, 33 bp, Homo sapien
aaaacaaataaggcaacagaaagaaacaaacag

SEQ ID NO: 61732 - DNA, 33 bp, Homo sapien
aaaacaaataaggcaatagaaagaaacaaacag

SEQ ID NO: 61733 - DNA, 33 bp, Homo sapien
ttttttgataatgtcaaattcgtccaaatctag

SEQ ID NO: 61734 - DNA, 33 bp, Homo sapien
ttttttgataatgtcacattcgtccaaatctag

SEQ ID NO: 61735 - DNA, 33 bp, Homo sapien
ataacgacagaggaaaaaaagagtggcaggtgc

SEQ ID NO: 61736 - DNA, 33 bp, Homo sapien
ataacgacagaggaaagaaagagtggcaggtgc

SEQ ID NO: 61737 - DNA, 33 bp, Homo sapien
tcagaattagtcaatgaagattgtgactgctat

SEQ ID NO: 61738 - DNA, 33 bp, Homo sapien
tcagaattagtcaatgtagattgtgactgctat

SEQ ID NO: 61739 - DNA, 33 bp, Homo sapien
aaccctcgacctaccacaattgatatctagacc

SEQ ID NO: 61740 - DNA, 33 bp, Homo sapien
aaccctcgacctaccagaattgatatctagacc

SEQ ID NO: 61741 - DNA, 33 bp, Homo sapien
agcattggaaattacacggcattaccaagtgtc

SEQ ID NO: 61742 - DNA, 33 bp, Homo sapien
agcattggaaattacatggcattaccaagtgtc

SEQ ID NO: 61743 - DNA, 33 bp, Homo sapien
taagtatgggtgtaaacgtgtaaagtaccatgt

SEQ ID NO: 61744 - DNA, 33 bp, Homo sapien
taagtatgggtgtaaatgtgtaaagtaccatgt

SEQ ID NO: 61745 - DNA, 33 bp, Homo sapien
aaatattgtacatgcacatctgttattgcccca

SEQ ID NO: 61746 - DNA, 33 bp, Homo sapien
aaatattgtacatgcatatctgttattgcccca

SEQ ID NO: 61747 - DNA, 33 bp, Homo sapien
tttctcttcagaaaacaggttttgattttctac

SEQ ID NO: 61748 - DNA, 33 bp, Homo sapien
tttctcttcagaaaacgggttttgattttctac

SEQ ID NO: 61749 - DNA, 33 bp, Homo sapien
aattgacattgtagacaatcatgcagaatgggt

SEQ ID NO: 61750 - DNA, 33 bp, Homo sapien
aattgacattgtagacgatcatgcagaatgggt

SEQ ID NO: 61751 - DNA, 33 bp, Homo sapien
cttctgacatcataacaattacaatgccgacat

SEQ ID NO: 61752 - DNA, 33 bp, Homo sapien
cttctgacatcataacgattacaatgccgacat

SEQ ID NO: 61753 - DNA, 33 bp, Homo sapien
gattaaacaaattaaaatgataccacttcatcg

SEQ ID NO: 61754 - DNA, 33 bp, Homo sapien
gattaaacaaattaaactgataccacttcatcg

SEQ ID NO: 61755 - DNA, 33 bp, Homo sapien
tgttagtaaacttcaacagatcaagaattctac

SEQ ID NO: 61756 - DNA, 33 bp, Homo sapien
tgttagtaaacttcaatagatcaagaattctac

SEQ ID NO: 61757 - DNA, 33 bp, Homo sapien
cctagaaatacaagaaaacgtagcataatttcc

SEQ ID NO: 61758 - DNA, 33 bp, Homo sapien
cctagaaatacaagaagacgtagcataatttcc

SEQ ID NO: 61759 - DNA, 33 bp, Homo sapien
tttgtggtacagataaagttctgcttctcagcc

SEQ ID NO: 61760 - DNA, 33 bp, Homo sapien
tttgtggtacagataaggttctgcttctcagcc

SEQ ID NO: 61761 - DNA, 33 bp, Homo sapien
ggctctaccgtatcaccgaagtaagacttttgt

SEQ ID NO: 61762 - DNA, 33 bp, Homo sapien
ggctctaccgtatcactgaagtaagacttttgt

SEQ ID NO: 61763 - DNA, 33 bp, Homo sapien
cataacagtcataaaactgcatcttttgagatt

SEQ ID NO: 61764 - DNA, 33 bp, Homo sapien
cataacagtcataaaattgcatcttttgagatt

SEQ ID NO: 61765 - DNA, 33 bp, Homo sapien
ggaaaaatgaaactcacgtggtattgcaattaa

SEQ ID NO: 61766 - DNA, 33 bp, Homo sapien
ggaaaaatgaaactcatgtggtattgcaattaa

SEQ ID NO: 61767 - DNA, 33 bp, Homo sapien
aaataagccaaaaaaaatcaagcagcaaataca

SEQ ID NO: 61768 - DNA, 33 bp, Homo sapien
aaataagccaaaaaaactcaagcagcaaataca

SEQ ID NO: 61769 - DNA, 33 bp, Homo sapien
ttttgaaagtggaagaactttatgcacagaaaa

SEQ ID NO: 61770 - DNA, 33 bp, Homo sapien
ttttgaaagtggaagagctttatgcacagaaaa

SEQ ID NO: 61771 - DNA, 33 bp, Homo sapien
ttatatcgaaacaataataagagtatataggag

SEQ ID NO: 61772 - DNA, 33 bp, Homo sapien
ttatatcgaaacaatagtaagagtatataggag

SEQ ID NO: 61773 - DNA, 33 bp, Homo sapien
ctatggtattaggtgaaaatttctataaagtta

SEQ ID NO: 61774 - DNA, 33 bp, Homo sapien
ctatggtattaggtgacaatttctataaagtta

SEQ ID NO: 61775 - DNA, 33 bp, Homo sapien
tttagttgttaaaccaccaataagagtttgaat

SEQ ID NO: 61776 - DNA, 33 bp, Homo sapien
tttagttgttaaaccatcaataagagtttgaat

SEQ ID NO: 61777 - DNA, 33 bp, Homo sapien
tttgtgaaaatcatcagatattgaccaaatact

SEQ ID NO: 61778 - DNA, 33 bp, Homo sapien
tttgtgaaaatcatcatatattgaccaaatact

SEQ ID NO: 61779 - DNA, 33 bp, Homo sapien
gggaggcagagtaggcaataagaaccttgtctt

SEQ ID NO: 61780 - DNA, 33 bp, Homo sapien
gggaggcagagtaggcgataagaaccttgtctt

SEQ ID NO: 61781 - DNA, 33 bp, Homo sapien
tgagacagtttggcaaatgaataggcacttagc

SEQ ID NO: 61782 - DNA, 33 bp, Homo sapien
tgagacagtttggcaattgaataggcacttagc

SEQ ID NO: 61783 - DNA, 33 bp, Homo sapien
cttatagtatactttgaaatcaggtaatgtagt

SEQ ID NO: 61784 - DNA, 33 bp, Homo sapien
cttatagtatactttggaatcaggtaatgtagt

SEQ ID NO: 61785 - DNA, 33 bp, Homo sapien
tatgagcatagtaaaaatttcatgaatgctaac

SEQ ID NO: 61786 - DNA, 33 bp, Homo sapien
tatgagcatagtaaaagtttcatgaatgctaac

SEQ ID NO: 61787 - DNA, 33 bp, Homo sapien
gagaactagttaacaacgttttagaggctactg

SEQ ID NO: 61788 - DNA, 33 bp, Homo sapien
gagaactagttaacaatgttttagaggctactg

SEQ ID NO: 61789 - DNA, 33 bp, Homo sapien
agtcatctagtgttccaaaatattttacataag

SEQ ID NO: 61790 - DNA, 33 bp, Homo sapien
agtcatctagtgttccgaaatattttacataag

SEQ ID NO: 61791 - DNA, 33 bp, Homo sapien
cactataaaaacactgaaatggggagcccactg

SEQ ID NO: 61792 - DNA, 33 bp, Homo sapien
cactataaaaacactggaatggggagcccactg

SEQ ID NO: 61793 - DNA, 33 bp, Homo sapien
aaaagtcacacaggaacaggttgtttaatatac

SEQ ID NO: 61794 - DNA, 33 bp, Homo sapien
aaaagtcacacaggaataggttgtttaatatac

SEQ ID NO: 61795 - DNA, 33 bp, Homo sapien
aaacccatgttcaaccaaataatttactgaata

SEQ ID NO: 61796 - DNA, 33 bp, Homo sapien
aaacccatgttcaaccgaataatttactgaata

SEQ ID NO: 61797 - DNA, 33 bp, Homo sapien
ctattctgtgaaaaagccagtgtggcctactga

SEQ ID NO: 61798 - DNA, 33 bp, Homo sapien
ctattctgtgaaaaagtcagtgtggcctactga

SEQ ID NO: 61799 - DNA, 33 bp, Homo sapien
taacagtatgattaaaactgtcaaatatagcac

SEQ ID NO: 61800 - DNA, 33 bp, Homo sapien
taacagtatgattaaagctgtcaaatatagcac

SEQ ID NO: 61801 - DNA, 33 bp, Homo sapien
acaacaacattggtaaaacaaacattcaaaaat

SEQ ID NO: 61802 - DNA, 33 bp, Homo sapien
acaacaacattggtaatacaaacattcaaaaat

SEQ ID NO: 61803 - DNA, 33 bp, Homo sapien
cataagcattggcaaagattccataacgaagac

SEQ ID NO: 61804 - DNA, 33 bp, Homo sapien
cataagcattggcaaatattccataacgaagac

SEQ ID NO: 61805 - DNA, 33 bp, Homo sapien
aacaggtaatctgcccactgaaggtcttaaggt

SEQ ID NO: 61806 - DNA, 33 bp, Homo sapien
aacaggtaatctgcccgctgaaggtcttaaggt

SEQ ID NO: 61807 - DNA, 33 bp, Homo sapien
tccttccaattcaagacctaatttccgagtgat

SEQ ID NO: 61808 - DNA, 33 bp, Homo sapien
tccttccaattcaagagctaatttccgagtgat

SEQ ID NO: 61809 - DNA, 33 bp, Homo sapien
tacaactcagctctgaatacttttcctcaggca

SEQ ID NO: 61810 - DNA, 33 bp, Homo sapien
tacaactcagctctgactacttttcctcaggca

SEQ ID NO: 61811 - DNA, 33 bp, Homo sapien
ttaaacctctattttgaagatgatatagctaag

SEQ ID NO: 61812 - DNA, 33 bp, Homo sapien
ttaaacctctattttggagatgatatagctaag

SEQ ID NO: 61813 - DNA, 33 bp, Homo sapien
gaccggaaatgatttgcatgtgtatgataagag

SEQ ID NO: 61814 - DNA, 33 bp, Homo sapien
gaccggaaatgatttgtatgtgtatgataagag

SEQ ID NO: 61815 - DNA, 33 bp, Homo sapien
atttcttgcaagactcacagtgtttccaagaat

SEQ ID NO: 61816 - DNA, 33 bp, Homo sapien
atttcttgcaagactcgcagtgtttccaagaat

SEQ ID NO: 61817 - DNA, 33 bp, Homo sapien
cttgtttcaaagaagactcccttcatatttctt

SEQ ID NO: 61818 - DNA, 33 bp, Homo sapien
cttgtttcaaagaagattcccttcatatttctt

SEQ ID NO: 61819 - DNA, 33 bp, Homo sapien
aatggtgtaagatgatcaactagatatggtcag

SEQ ID NO: 61820 - DNA, 33 bp, Homo sapien
aatggtgtaagatgatgaactagatatggtcag

SEQ ID NO: 61821 - DNA, 33 bp, Homo sapien
gagctctgtctcttgtcaattttctgggcagtt

SEQ ID NO: 61822 - DNA, 33 bp, Homo sapien
gagctctgtctcttgttaattttctgggcagtt

SEQ ID NO: 61823 - DNA, 33 bp, Homo sapien
cagtcgttccttcgcccagctctgttggctctg

SEQ ID NO: 61824 - DNA, 33 bp, Homo sapien
cagtcgttccttcgcctagctctgttggctctg

SEQ ID NO: 61825 - DNA, 33 bp, Homo sapien
ggataaactttaagccgatggaatatcatatgt

SEQ ID NO: 61826 - DNA, 33 bp, Homo sapien
ggataaactttaagcctatggaatatcatatgt

SEQ ID NO: 61827 - DNA, 33 bp, Homo sapien
agtttgacttttgtcacaagtacgatttctgta

SEQ ID NO: 61828 - DNA, 33 bp, Homo sapien
agtttgacttttgtcagaagtacgatttctgta

SEQ ID NO: 61829 - DNA, 33 bp, Homo sapien
atgttaattttgtacaatacaggatgaatttat

SEQ ID NO: 61830 - DNA, 33 bp, Homo sapien
atgttaattttgtacattacaggatgaatttat

SEQ ID NO: 61831 - DNA, 33 bp, Homo sapien
tcttttaataaggttacgatatcagccaaatat

SEQ ID NO: 61832 - DNA, 33 bp, Homo sapien
tcttttaataaggttatgatatcagccaaatat

SEQ ID NO: 61833 - DNA, 33 bp, Homo sapien
ctacagattacttctacctatccaacgtatgca

SEQ ID NO: 61834 - DNA, 33 bp, Homo sapien
ctacagattacttctatctatccaacgtatgca

SEQ ID NO: 61835 - DNA, 33 bp, Homo sapien
ggtccctagtaaagtaccaaaggctcctggaaa

SEQ ID NO: 61836 - DNA, 33 bp, Homo sapien
ggtccctagtaaagtatcaaaggctcctggaaa

SEQ ID NO: 61837 - DNA, 33 bp, Homo sapien
acaattttaatttttacgaagaacgtgtgtgta

SEQ ID NO: 61838 - DNA, 33 bp, Homo sapien
acaattttaatttttatgaagaacgtgtgtgta

SEQ ID NO: 61839 - DNA, 33 bp, Homo sapien
acagataattttcaacactcattctcatcccat

SEQ ID NO: 61840 - DNA, 33 bp, Homo sapien
acagataattttcaacgctcattctcatcccat

SEQ ID NO: 61841 - DNA, 33 bp, Homo sapien
actgtgatggataaaaacagtagacaatgggga

SEQ ID NO: 61842 - DNA, 33 bp, Homo sapien
actgtgatggataaaagcagtagacaatgggga

SEQ ID NO: 61843 - DNA, 33 bp, Homo sapien
atctacatatgtgccacaaggtagaacgcttac

SEQ ID NO: 61844 - DNA, 33 bp, Homo sapien
atctacatatgtgccataaggtagaacgcttac

SEQ ID NO: 61845 - DNA, 33 bp, Homo sapien
tatcacagtcagcaccgggatcatgaggacctg

SEQ ID NO: 61846 - DNA, 33 bp, Homo sapien
tatcacagtcagcacctggatcatgaggacctg

SEQ ID NO: 61847 - DNA, 33 bp, Homo sapien
gcagcttaaatgattaaataggggcagggcagc

SEQ ID NO: 61848 - DNA, 33 bp, Homo sapien
gcagcttaaatgattagataggggcagggcagc

SEQ ID NO: 61849 - DNA, 33 bp, Homo sapien
tttctgagaattttccaaagagcatgttggagg

SEQ ID NO: 61850 - DNA, 33 bp, Homo sapien
tttctgagaattttccgaagagcatgttggagg

SEQ ID NO: 61851 - DNA, 33 bp, Homo sapien
tttgctttaggtggtacagtaaggaacttacaa

SEQ ID NO: 61852 - DNA, 33 bp, Homo sapien
tttgctttaggtggtagagtaaggaacttacaa

SEQ ID NO: 61853 - DNA, 33 bp, Homo sapien
atgaatccacaaaaaaattccatcactattgcc

SEQ ID NO: 61854 - DNA, 33 bp, Homo sapien
atgaatccacaaaaaacttccatcactattgcc

SEQ ID NO: 61855 - DNA, 33 bp, Homo sapien
agaatcataagttaagaaaatggtgattgttat

SEQ ID NO: 61856 - DNA, 33 bp, Homo sapien
agaatcataagttaagtaaatggtgattgttat

SEQ ID NO: 61857 - DNA, 33 bp, Homo sapien
agctgcaacaaaatataacatcaaaacggcttg

SEQ ID NO: 61858 - DNA, 33 bp, Homo sapien
agctgcaacaaaatatgacatcaaaacggcttg

SEQ ID NO: 61859 - DNA, 33 bp, Homo sapien
tatctctgcattagtcaatgacctaactgaaca

SEQ ID NO: 61860 - DNA, 33 bp, Homo sapien
tatctctgcattagtccatgacctaactgaaca

SEQ ID NO: 61861 - DNA, 33 bp, Homo sapien
aagttaacaacctatcacacaactaaaagaact

SEQ ID NO: 61862 - DNA, 33 bp, Homo sapien
aagttaacaacctatcgcacaactaaaagaact

SEQ ID NO: 61863 - DNA, 33 bp, Homo sapien
cataaaactgttttcaatctgttgggagagtta

SEQ ID NO: 61864 - DNA, 33 bp, Homo sapien
cataaaactgttttcagtctgttgggagagtta

SEQ ID NO: 61865 - DNA, 33 bp, Homo sapien
gttgctcattgcagtacatttcctaatcatgac

SEQ ID NO: 61866 - DNA, 33 bp, Homo sapien
gttgctcattgcagtatatttcctaatcatgac

SEQ ID NO: 61867 - DNA, 33 bp, Homo sapien
aatactcaataaatgacgttgggaagtgtttag

SEQ ID NO: 61868 - DNA, 33 bp, Homo sapien
aatactcaataaatgatgttgggaagtgtttag

SEQ ID NO: 61869 - DNA, 33 bp, Homo sapien
tcactcctattcaagacagtaccagaagtccaa

SEQ ID NO: 61870 - DNA, 33 bp, Homo sapien
tcactcctattcaagatagtaccagaagtccaa

SEQ ID NO: 61871 - DNA, 33 bp, Homo sapien
cataaatggtactcaacgtagagctctctgctg

SEQ ID NO: 61872 - DNA, 33 bp, Homo sapien
cataaatggtactcaatgtagagctctctgctg

SEQ ID NO: 61873 - DNA, 33 bp, Homo sapien
cacttccaaaatgaaactagaacattagaactt

SEQ ID NO: 61874 - DNA, 33 bp, Homo sapien
cacttccaaaatgaaagtagaacattagaactt

SEQ ID NO: 61875 - DNA, 33 bp, Homo sapien
gaacatcacctatttcccttagcaaaagtttct

SEQ ID NO: 61876 - DNA, 33 bp, Homo sapien
gaacatcacctatttcgcttagcaaaagtttct

SEQ ID NO: 61877 - DNA, 33 bp, Homo sapien
acttcatgaacactggcatacattgcgaatatg

SEQ ID NO: 61878 - DNA, 33 bp, Homo sapien
acttcatgaacactgggatacattgcgaatatg

SEQ ID NO: 61879 - DNA, 33 bp, Homo sapien
ttgtgctgcaccctataagagcaactgttactt

SEQ ID NO: 61880 - DNA, 33 bp, Homo sapien
ttgtgctgcaccctattagagcaactgttactt

SEQ ID NO: 61881 - DNA, 33 bp, Homo sapien
gattggaatgtaggcaggaatgacttaatttgc

SEQ ID NO: 61882 - DNA, 33 bp, Homo sapien
gattggaatgtaggcatgaatgacttaatttgc

SEQ ID NO: 61883 - DNA, 33 bp, Homo sapien
tcctctgcagatgctacctcggtaatagctgct

SEQ ID NO: 61884 - DNA, 33 bp, Homo sapien
tcctctgcagatgctatctcggtaatagctgct

SEQ ID NO: 61885 - DNA, 33 bp, Homo sapien
tgtagagactttgaaacgtgtataatgctgaaa

SEQ ID NO: 61886 - DNA, 33 bp, Homo sapien
tgtagagactttgaaatgtgtataatgctgaaa

SEQ ID NO: 61887 - DNA, 33 bp, Homo sapien
gatatgcattgtagataatcaggtggtctgaat

SEQ ID NO: 61888 - DNA, 33 bp, Homo sapien
gatatgcattgtagatgatcaggtggtctgaat

SEQ ID NO: 61889 - DNA, 33 bp, Homo sapien
ggtaaaaggagacttccctgttataactgcagc

SEQ ID NO: 61890 - DNA, 33 bp, Homo sapien
ggtaaaaggagacttctctgttataactgcagc

SEQ ID NO: 61891 - DNA, 33 bp, Homo sapien
aaaaggatatcttcaggagaatcatgattacac

SEQ ID NO: 61892 - DNA, 33 bp, Homo sapien
aaaaggatatcttcagtagaatcatgattacac

SEQ ID NO: 61893 - DNA, 33 bp, Homo sapien
tgaaaagcctcagcagaataacttcttcctgaa

SEQ ID NO: 61894 - DNA, 33 bp, Homo sapien
tgaaaagcctcagcaggataacttcttcctgaa

SEQ ID NO: 61895 - DNA, 33 bp, Homo sapien
caacactggtgagctgaaatatgtcgagaggat

SEQ ID NO: 61896 - DNA, 33 bp, Homo sapien
caacactggtgagctgcaatatgtcgagaggat

SEQ ID NO: 61897 - DNA, 33 bp, Homo sapien
gttctgaaaattgcaaattcaagatgaaggtac

SEQ ID NO: 61898 - DNA, 33 bp, Homo sapien
gttctgaaaattgcaagttcaagatgaaggtac

SEQ ID NO: 61899 - DNA, 33 bp, Homo sapien
atttccctgtaggctacatcttttttctataat

SEQ ID NO: 61900 - DNA, 33 bp, Homo sapien
atttccctgtaggctatatcttttttctataat

SEQ ID NO: 61901 - DNA, 33 bp, Homo sapien
gcattccatggcattaagaattacctctcataa

SEQ ID NO: 61902 - DNA, 33 bp, Homo sapien
gcattccatggcattaggaattacctctcataa

SEQ ID NO: 61903 - DNA, 33 bp, Homo sapien
atagaatatgattttacagtcgaggtttgcttt

SEQ ID NO: 61904 - DNA, 33 bp, Homo sapien
atagaatatgattttatagtcgaggtttgcttt

SEQ ID NO: 61905 - DNA, 33 bp, Homo sapien
cagaggtgagtagttacaaaagaaatcatatgg

SEQ ID NO: 61906 - DNA, 33 bp, Homo sapien
cagaggtgagtagttagaaaagaaatcatatgg

SEQ ID NO: 61907 - DNA, 33 bp, Homo sapien
tctgttaaaagtaagaaagttaacgcttatggc

SEQ ID NO: 61908 - DNA, 33 bp, Homo sapien
tctgttaaaagtaagagagttaacgcttatggc

SEQ ID NO: 61909 - DNA, 33 bp, Homo sapien
tgacatatgatctggaacatcttttaatatgct

SEQ ID NO: 61910 - DNA, 33 bp, Homo sapien
tgacatatgatctggagcatcttttaatatgct

SEQ ID NO: 61911 - DNA, 33 bp, Homo sapien
acacttgttacaactaacgaacctacattgatg

SEQ ID NO: 61912 - DNA, 33 bp, Homo sapien
acacttgttacaactagcgaacctacattgatg

SEQ ID NO: 61913 - DNA, 33 bp, Homo sapien
tactactttgaagaaagtttagaggttgtgtct

SEQ ID NO: 61914 - DNA, 33 bp, Homo sapien
tactactttgaagaaattttagaggttgtgtct

SEQ ID NO: 61915 - DNA, 33 bp, Homo sapien
tgtaggtgataattaaaaaggtacttggtgaaa

SEQ ID NO: 61916 - DNA, 33 bp, Homo sapien
tgtaggtgataattaagaaggtacttggtgaaa

SEQ ID NO: 61917 - DNA, 33 bp, Homo sapien
taaattagccatactcgagatgaggcttggttt

SEQ ID NO: 61918 - DNA, 33 bp, Homo sapien
taaattagccatactctagatgaggcttggttt

SEQ ID NO: 61919 - DNA, 33 bp, Homo sapien
aaacctttacagctcaagtcctctgtcagtgtc

SEQ ID NO: 61920 - DNA, 33 bp, Homo sapien
aaacctttacagctcaggtcctctgtcagtgtc

SEQ ID NO: 61921 - DNA, 33 bp, Homo sapien
tattccacgtcatgcaagttattcataatcatc

SEQ ID NO: 61922 - DNA, 33 bp, Homo sapien
tattccacgtcatgcaggttattcataatcatc

SEQ ID NO: 61923 - DNA, 33 bp, Homo sapien
agttaatttagtaacaatgatagtcctataaca

SEQ ID NO: 61924 - DNA, 33 bp, Homo sapien
agttaatttagtaacagtgatagtcctataaca

SEQ ID NO: 61925 - DNA, 33 bp, Homo sapien
tgtgaggtgcagacagaaagatgcctaactgtg

SEQ ID NO: 61926 - DNA, 33 bp, Homo sapien
tgtgaggtgcagacaggaagatgcctaactgtg

SEQ ID NO: 61927 - DNA, 33 bp, Homo sapien
cctgtaccaaagcaaaggtatgctatataaacg

SEQ ID NO: 61928 - DNA, 33 bp, Homo sapien
cctgtaccaaagcaaatgtatgctatataaacg

SEQ ID NO: 61929 - DNA, 33 bp, Homo sapien
tttctgccattctgatcagcaagataaaatctt

SEQ ID NO: 61930 - DNA, 33 bp, Homo sapien
tttctgccattctgattagcaagataaaatctt

SEQ ID NO: 61931 - DNA, 33 bp, Homo sapien
cctcttttctttagaactgccaccttgtcttct

SEQ ID NO: 61932 - DNA, 33 bp, Homo sapien
cctcttttctttagaattgccaccttgtcttct

SEQ ID NO: 61933 - DNA, 33 bp, Homo sapien
cttgtgcaacattctaaagaaacgctttatatt

SEQ ID NO: 61934 - DNA, 33 bp, Homo sapien
cttgtgcaacattctagagaaacgctttatatt

SEQ ID NO: 61935 - DNA, 33 bp, Homo sapien
ccaaaatatttgagccaaaggaagaagaagcaa

SEQ ID NO: 61936 - DNA, 33 bp, Homo sapien
ccaaaatatttgagccgaaggaagaagaagcaa

SEQ ID NO: 61937 - DNA, 33 bp, Homo sapien
cttcttatttttccaccctaaggcttgatgaga

SEQ ID NO: 61938 - DNA, 33 bp, Homo sapien
cttcttatttttccacgctaaggcttgatgaga

SEQ ID NO: 61939 - DNA, 33 bp, Homo sapien
atagtctctgaataagcctcaattaaacaattc

SEQ ID NO: 61940 - DNA, 33 bp, Homo sapien
atagtctctgaataaggctcaattaaacaattc

SEQ ID NO: 61941 - DNA, 33 bp, Homo sapien
agtatgtaaggtccaaataatttatgacaaggg

SEQ ID NO: 61942 - DNA, 33 bp, Homo sapien
agtatgtaaggtccaagtaatttatgacaaggg

SEQ ID NO: 61943 - DNA, 33 bp, Homo sapien
gagaagtgtctgtacacaattattttgagaagt

SEQ ID NO: 61944 - DNA, 33 bp, Homo sapien
gagaagtgtctgtacataattattttgagaagt

SEQ ID NO: 61945 - DNA, 33 bp, Homo sapien
tcccattcattagtggacacctaagttgattcc

SEQ ID NO: 61946 - DNA, 33 bp, Homo sapien
tcccattcattagtgggcacctaagttgattcc

SEQ ID NO: 61947 - DNA, 33 bp, Homo sapien
atgcttccagatgacacattttacccatatttc

SEQ ID NO: 61948 - DNA, 33 bp, Homo sapien
atgcttccagatgacatattttacccatatttc

SEQ ID NO: 61949 - DNA, 33 bp, Homo sapien
cattagcttgaataaactgacttatttagcttg

SEQ ID NO: 61950 - DNA, 33 bp, Homo sapien
cattagcttgaataaagtgacttatttagcttg

SEQ ID NO: 61951 - DNA, 33 bp, Homo sapien
tagccactttttgttaaaagcaaaagcaaaaga

SEQ ID NO: 61952 - DNA, 33 bp, Homo sapien
tagccactttttgttacaagcaaaagcaaaaga

SEQ ID NO: 61953 - DNA, 33 bp, Homo sapien
taattccttgagccaactcatctcccactgtaa

SEQ ID NO: 61954 - DNA, 33 bp, Homo sapien
taattccttgagccaattcatctcccactgtaa

SEQ ID NO: 61955 - DNA, 33 bp, Homo sapien
gtggcaaaactaaaaccagggagcatatttcta

SEQ ID NO: 61956 - DNA, 33 bp, Homo sapien
gtggcaaaactaaaacgagggagcatatttcta

SEQ ID NO: 61957 - DNA, 33 bp, Homo sapien
taattgattttctgcagggttcatttgattatc

SEQ ID NO: 61958 - DNA, 33 bp, Homo sapien
taattgattttctgcatggttcatttgattatc

SEQ ID NO: 61959 - DNA, 33 bp, Homo sapien
tttaacagcatcttgaaaggattaattcccata

SEQ ID NO: 61960 - DNA, 33 bp, Homo sapien
tttaacagcatcttgataggattaattcccata

SEQ ID NO: 61961 - DNA, 33 bp, Homo sapien
tctttgggttttcctacgactctcttgtctgca

SEQ ID NO: 61962 - DNA, 33 bp, Homo sapien
tctttgggttttcctatgactctcttgtctgca

SEQ ID NO: 61963 - DNA, 33 bp, Homo sapien
aagtgcacactaacacacacgcactgagacgtg

SEQ ID NO: 61964 - DNA, 33 bp, Homo sapien
aagtgcacactaacacgcacgcactgagacgtg

SEQ ID NO: 61965 - DNA, 33 bp, Homo sapien
gtactaataaataataagatgtcgtactaaaca

SEQ ID NO: 61966 - DNA, 33 bp, Homo sapien
gtactaataaataatatgatgtcgtactaaaca

SEQ ID NO: 61967 - DNA, 33 bp, Homo sapien
acacaaattttgacccacgctataacccttagt

SEQ ID NO: 61968 - DNA, 33 bp, Homo sapien
acacaaattttgaccctcgctataacccttagt

SEQ ID NO: 61969 - DNA, 33 bp, Homo sapien
tcagaagtttatgataactgaacatacgacaat

SEQ ID NO: 61970 - DNA, 33 bp, Homo sapien
tcagaagtttatgatagctgaacatacgacaat

SEQ ID NO: 61971 - DNA, 33 bp, Homo sapien
tcttttattccagacactgaagaggtttgcaaa

SEQ ID NO: 61972 - DNA, 33 bp, Homo sapien
tcttttattccagacattgaagaggtttgcaaa

SEQ ID NO: 61973 - DNA, 33 bp, Homo sapien
agaggacaggtctagaatctacatggtgtgtaa

SEQ ID NO: 61974 - DNA, 33 bp, Homo sapien
agaggacaggtctagactctacatggtgtgtaa

SEQ ID NO: 61975 - DNA, 33 bp, Homo sapien
cgttgcaccatataacaacaagaaagctagaaa

SEQ ID NO: 61976 - DNA, 33 bp, Homo sapien
cgttgcaccatataaccacaagaaagctagaaa

SEQ ID NO: 61977 - DNA, 33 bp, Homo sapien
atatttttttgctacaactccaattgactacta

SEQ ID NO: 61978 - DNA, 33 bp, Homo sapien
atatttttttgctacatctccaattgactacta

SEQ ID NO: 61979 - DNA, 33 bp, Homo sapien
tgtgacttagcaatcaatctaacttgtcacatt

SEQ ID NO: 61980 - DNA, 33 bp, Homo sapien
tgtgacttagcaatcagtctaacttgtcacatt

SEQ ID NO: 61981 - DNA, 33 bp, Homo sapien
atttggtctgttgtgaaagtatacgtaattttt

SEQ ID NO: 61982 - DNA, 33 bp, Homo sapien
atttggtctgttgtgagagtatacgtaattttt

SEQ ID NO: 61983 - DNA, 33 bp, Homo sapien
attgcagtcccagaaacctaggagaaaactgtg

SEQ ID NO: 61984 - DNA, 33 bp, Homo sapien
attgcagtcccagaaatctaggagaaaactgtg

SEQ ID NO: 61985 - DNA, 33 bp, Homo sapien
tattgctgcttaggtggaaatcttacctatggt

SEQ ID NO: 61986 - DNA, 33 bp, Homo sapien
tattgctgcttaggtgtaaatcttacctatggt

SEQ ID NO: 61987 - DNA, 33 bp, Homo sapien
gaccatcaacttacaaaagcctgtgagtggtga

SEQ ID NO: 61988 - DNA, 33 bp, Homo sapien
gaccatcaacttacaagagcctgtgagtggtga

SEQ ID NO: 61989 - DNA, 33 bp, Homo sapien
gttccatgcactgaagaaaagaatgtatattct

SEQ ID NO: 61990 - DNA, 33 bp, Homo sapien
gttccatgcactgaaggaaagaatgtatattct

SEQ ID NO: 61991 - DNA, 33 bp, Homo sapien
tagaaaagtagagaaaaacctcagaggtatcag

SEQ ID NO: 61992 - DNA, 33 bp, Homo sapien
tagaaaagtagagaaagacctcagaggtatcag

SEQ ID NO: 61993 - DNA, 33 bp, Homo sapien
ttgagtactagaggaaagttcatgaaaatacaa

SEQ ID NO: 61994 - DNA, 33 bp, Homo sapien
ttgagtactagaggaaggttcatgaaaatacaa

SEQ ID NO: 61995 - DNA, 33 bp, Homo sapien
ttctcaggtcgtaaaaatctcaaacaactgtga

SEQ ID NO: 61996 - DNA, 33 bp, Homo sapien
ttctcaggtcgtaaaattctcaaacaactgtga

SEQ ID NO: 61997 - DNA, 33 bp, Homo sapien
ttcatctgtgcaaataaactttacgattgtttt

SEQ ID NO: 61998 - DNA, 33 bp, Homo sapien
ttcatctgtgcaaatagactttacgattgtttt

SEQ ID NO: 61999 - DNA, 33 bp, Homo sapien
gcaattgagagaagagaatctgtagccacactt

SEQ ID NO: 62000 - DNA, 33 bp, Homo sapien
gcaattgagagaagagcatctgtagccacactt

SEQ ID NO: 62001 - DNA, 33 bp, Homo sapien
aaggatggatttagataaaggtgcgatatttga

SEQ ID NO: 62002 - DNA, 33 bp, Homo sapien
aaggatggatttagatgaaggtgcgatatttga

SEQ ID NO: 62003 - DNA, 33 bp, Homo sapien
agagttgagtcagcagacagggaagaattaatc

SEQ ID NO: 62004 - DNA, 33 bp, Homo sapien
agagttgagtcagcaggcagggaagaattaatc

SEQ ID NO: 62005 - DNA, 33 bp, Homo sapien
ggtaaatatgagaaaaaaatagttagcgtttgg

SEQ ID NO: 62006 - DNA, 33 bp, Homo sapien
ggtaaatatgagaaaagaatagttagcgtttgg

SEQ ID NO: 62007 - DNA, 33 bp, Homo sapien
ttgctgtttcaacttacgctcctacttatgatt

SEQ ID NO: 62008 - DNA, 33 bp, Homo sapien
ttgctgtttcaacttatgctcctacttatgatt

SEQ ID NO: 62009 - DNA, 33 bp, Homo sapien
acaagcattgaacaaggataatcaagaaacttt

SEQ ID NO: 62010 - DNA, 33 bp, Homo sapien
acaagcattgaacaagtataatcaagaaacttt

SEQ ID NO: 62011 - DNA, 33 bp, Homo sapien
taaaagataccacactgactacagattcggcag

SEQ ID NO: 62012 - DNA, 33 bp, Homo sapien
taaaagataccacacttactacagattcggcag

SEQ ID NO: 62013 - DNA, 33 bp, Homo sapien
tggtaagaattcaccaagagcaaaatgttagga

SEQ ID NO: 62014 - DNA, 33 bp, Homo sapien
tggtaagaattcaccaggagcaaaatgttagga

SEQ ID NO: 62015 - DNA, 33 bp, Homo sapien
accccaaaatgtagaagtaactttggaactgga

SEQ ID NO: 62016 - DNA, 33 bp, Homo sapien
accccaaaatgtagaattaactttggaactgga

SEQ ID NO: 62017 - DNA, 33 bp, Homo sapien
ggatgagagcagattcattttcagaccagaata

SEQ ID NO: 62018 - DNA, 33 bp, Homo sapien
ggatgagagcagattcgttttcagaccagaata

SEQ ID NO: 62019 - DNA, 33 bp, Homo sapien
atacacatattgcataagaccatttattccttg

SEQ ID NO: 62020 - DNA, 33 bp, Homo sapien
atacacatattgcatacgaccatttattccttg

SEQ ID NO: 62021 - DNA, 33 bp, Homo sapien
gttttcaaaaattgtccagttaggcaaaatcaa

SEQ ID NO: 62022 - DNA, 33 bp, Homo sapien
gttttcaaaaattgtcgagttaggcaaaatcaa

SEQ ID NO: 62023 - DNA, 33 bp, Homo sapien
cattgattcagaaacactggttttagataaaca

SEQ ID NO: 62024 - DNA, 33 bp, Homo sapien
cattgattcagaaacattggttttagataaaca

SEQ ID NO: 62025 - DNA, 33 bp, Homo sapien
ggagcacagttctgtcaacccttgatttcaatc

SEQ ID NO: 62026 - DNA, 33 bp, Homo sapien
ggagcacagttctgtccacccttgatttcaatc

SEQ ID NO: 62027 - DNA, 33 bp, Homo sapien
caaacacatcagggaaaaacttttatctaaata

SEQ ID NO: 62028 - DNA, 33 bp, Homo sapien
caaacacatcagggaacaacttttatctaaata

SEQ ID NO: 62029 - DNA, 33 bp, Homo sapien
ctaatgaaaactatgaggaaacaaaattatttg

SEQ ID NO: 62030 - DNA, 33 bp, Homo sapien
ctaatgaaaactatgatgaaacaaaattatttg

SEQ ID NO: 62031 - DNA, 33 bp, Homo sapien
aagagaactagaaaccaggtattttcacaagta

SEQ ID NO: 62032 - DNA, 33 bp, Homo sapien
aagagaactagaaaccgggtattttcacaagta

SEQ ID NO: 62033 - DNA, 33 bp, Homo sapien
catactggggttgtacactacactgcccttggg

SEQ ID NO: 62034 - DNA, 33 bp, Homo sapien
catactggggttgtacgctacactgcccttggg

SEQ ID NO: 62035 - DNA, 33 bp, Homo sapien
tttaaatgtgtagccacgttacaaaaatcagaa

SEQ ID NO: 62036 - DNA, 33 bp, Homo sapien
tttaaatgtgtagccatgttacaaaaatcagaa

SEQ ID NO: 62037 - DNA, 33 bp, Homo sapien
atatgtttgttctcaaatatctatatagtcttt

SEQ ID NO: 62038 - DNA, 33 bp, Homo sapien
atatgtttgttctcaactatctatatagtcttt

SEQ ID NO: 62039 - DNA, 33 bp, Homo sapien
tgtgttacatacaagcaatttttgttttgaaaa

SEQ ID NO: 62040 - DNA, 33 bp, Homo sapien
tgtgttacatacaagccatttttgttttgaaaa

SEQ ID NO: 62041 - DNA, 33 bp, Homo sapien
gggtgaaaggcctttgaagttcatgagacacta

SEQ ID NO: 62042 - DNA, 33 bp, Homo sapien
gggtgaaaggcctttggagttcatgagacacta

SEQ ID NO: 62043 - DNA, 33 bp, Homo sapien
agagaaagatcatgctaaacagctgcttttgga

SEQ ID NO: 62044 - DNA, 33 bp, Homo sapien
agagaaagatcatgctgaacagctgcttttgga

SEQ ID NO: 62045 - DNA, 33 bp, Homo sapien
taacttttcactgatacagttaaaacaataaag

SEQ ID NO: 62046 - DNA, 33 bp, Homo sapien
taacttttcactgatatagttaaaacaataaag

SEQ ID NO: 62047 - DNA, 33 bp, Homo sapien
gttggcaatcagtaagccacattttgttacatg

SEQ ID NO: 62048 - DNA, 33 bp, Homo sapien
gttggcaatcagtaagtcacattttgttacatg

SEQ ID NO: 62049 - DNA, 33 bp, Homo sapien
atgctgctatctgctacaggaacaaaaatctag

SEQ ID NO: 62050 - DNA, 33 bp, Homo sapien
atgctgctatctgctataggaacaaaaatctag

SEQ ID NO: 62051 - DNA, 33 bp, Homo sapien
tgaactagacaggtcaataaatgccttgggata

SEQ ID NO: 62052 - DNA, 33 bp, Homo sapien
tgaactagacaggtcagtaaatgccttgggata

SEQ ID NO: 62053 - DNA, 33 bp, Homo sapien
cagtctataaagcagaaaaaaggtagcataact

SEQ ID NO: 62054 - DNA, 33 bp, Homo sapien
cagtctataaagcagagaaaaggtagcataact

SEQ ID NO: 62055 - DNA, 33 bp, Homo sapien
tgatgcttgttaaagacgaaaaggaagacttta

SEQ ID NO: 62056 - DNA, 33 bp, Homo sapien
tgatgcttgttaaagaggaaaaggaagacttta

SEQ ID NO: 62057 - DNA, 33 bp, Homo sapien
atagcagggatcttaacaatacagccatattga

SEQ ID NO: 62058 - DNA, 33 bp, Homo sapien
atagcagggatcttaataatacagccatattga

SEQ ID NO: 62059 - DNA, 33 bp, Homo sapien
tgttcaccaacaaataccatttcttctctcatc

SEQ ID NO: 62060 - DNA, 33 bp, Homo sapien
tgttcaccaacaaatatcatttcttctctcatc

SEQ ID NO: 62061 - DNA, 33 bp, Homo sapien
tactctttggcaaaaaactacttatttctaagc

SEQ ID NO: 62062 - DNA, 33 bp, Homo sapien
tactctttggcaaaaatctacttatttctaagc

SEQ ID NO: 62063 - DNA, 33 bp, Homo sapien
atgtatcatgagcaaacgtgttttatttcagaa

SEQ ID NO: 62064 - DNA, 33 bp, Homo sapien
atgtatcatgagcaaatgtgttttatttcagaa

SEQ ID NO: 62065 - DNA, 33 bp, Homo sapien
tatataactgttaatcggagtgtatgttccatc

SEQ ID NO: 62066 - DNA, 33 bp, Homo sapien
tatataactgttaatctgagtgtatgttccatc

SEQ ID NO: 62067 - DNA, 33 bp, Homo sapien
ggttggattcatgacacattaagactattcatt

SEQ ID NO: 62068 - DNA, 33 bp, Homo sapien
ggttggattcatgacatattaagactattcatt

SEQ ID NO: 62069 - DNA, 33 bp, Homo sapien
tggttttggagaaggaagatggctaggaactaa

SEQ ID NO: 62070 - DNA, 33 bp, Homo sapien
tggttttggagaaggaggatggctaggaactaa

SEQ ID NO: 62071 - DNA, 33 bp, Homo sapien
taaagtcgccagaaaacttggaaagtatccaag

SEQ ID NO: 62072 - DNA, 33 bp, Homo sapien
taaagtcgccagaaaatttggaaagtatccaag

SEQ ID NO: 62073 - DNA, 33 bp, Homo sapien
acatagctaaaaatgagatcaaggactaaatcc

SEQ ID NO: 62074 - DNA, 33 bp, Homo sapien
acatagctaaaaatgatatcaaggactaaatcc

SEQ ID NO: 62075 - DNA, 33 bp, Homo sapien
catgcttaaccatcaaatctcagtacacaatgg

SEQ ID NO: 62076 - DNA, 33 bp, Homo sapien
catgcttaaccatcaagtctcagtacacaatgg

SEQ ID NO: 62077 - DNA, 33 bp, Homo sapien
agatgcagggaaatcagaaaggaacctattttt

SEQ ID NO: 62078 - DNA, 33 bp, Homo sapien
agatgcagggaaatcataaaggaacctattttt

SEQ ID NO: 62079 - DNA, 33 bp, Homo sapien
tgtgcacttgatggtacctctacctggaatttc

SEQ ID NO: 62080 - DNA, 33 bp, Homo sapien
tgtgcacttgatggtatctctacctggaatttc

SEQ ID NO: 62081 - DNA, 33 bp, Homo sapien
ttgcaaagcatggttaagtttatcaatgacctc

SEQ ID NO: 62082 - DNA, 33 bp, Homo sapien
ttgcaaagcatggttatgtttatcaatgacctc

SEQ ID NO: 62083 - DNA, 33 bp, Homo sapien
tcatagattttgagacccttttgccttgaaata

SEQ ID NO: 62084 - DNA, 33 bp, Homo sapien
tcatagattttgagactcttttgccttgaaata

SEQ ID NO: 62085 - DNA, 33 bp, Homo sapien
cagaaactactcacaacttctatgtatgtatgc

SEQ ID NO: 62086 - DNA, 33 bp, Homo sapien
cagaaactactcacaatttctatgtatgtatgc

SEQ ID NO: 62087 - DNA, 33 bp, Homo sapien
tcaactatgtcacataagcattaaactgggctt

SEQ ID NO: 62088 - DNA, 33 bp, Homo sapien
tcaactatgtcacataggcattaaactgggctt

SEQ ID NO: 62089 - DNA, 33 bp, Homo sapien
actggcttgaggaagcagcatctaatttacata

SEQ ID NO: 62090 - DNA, 33 bp, Homo sapien
actggcttgaggaagcggcatctaatttacata

SEQ ID NO: 62091 - DNA, 33 bp, Homo sapien
ttgccccaacaggtaaaccaaggaaggcttttc

SEQ ID NO: 62092 - DNA, 33 bp, Homo sapien
ttgccccaacaggtaatccaaggaaggcttttc

SEQ ID NO: 62093 - DNA, 33 bp, Homo sapien
ggaaaagacccgctaactggcataaactaaaag

SEQ ID NO: 62094 - DNA, 33 bp, Homo sapien
ggaaaagacccgctaattggcataaactaaaag

SEQ ID NO: 62095 - DNA, 33 bp, Homo sapien
aaggcaccagaggaaacataagtcaatgtatta

SEQ ID NO: 62096 - DNA, 33 bp, Homo sapien
aaggcaccagaggaaagataagtcaatgtatta

SEQ ID NO: 62097 - DNA, 33 bp, Homo sapien
attcaactggagaaaaataaccagtaggtgaaa

SEQ ID NO: 62098 - DNA, 33 bp, Homo sapien
attcaactggagaaaagtaaccagtaggtgaaa

SEQ ID NO: 62099 - DNA, 33 bp, Homo sapien
ttcctggaacaagaggaccatgtgttttggatg

SEQ ID NO: 62100 - DNA, 33 bp, Homo sapien
ttcctggaacaagagggccatgtgttttggatg

SEQ ID NO: 62101 - DNA, 33 bp, Homo sapien
ttcaaagactgtatccaagttgagattcatcag

SEQ ID NO: 62102 - DNA, 33 bp, Homo sapien
ttcaaagactgtatcccagttgagattcatcag

SEQ ID NO: 62103 - DNA, 33 bp, Homo sapien
tcttctaatgaatgtacgggttagcagggctca

SEQ ID NO: 62104 - DNA, 33 bp, Homo sapien
tcttctaatgaatgtatgggttagcagggctca

SEQ ID NO: 62105 - DNA, 33 bp, Homo sapien
aatgtaagaatgtaaacgcagttgcagaagaat

SEQ ID NO: 62106 - DNA, 33 bp, Homo sapien
aatgtaagaatgtaaatgcagttgcagaagaat

SEQ ID NO: 62107 - DNA, 33 bp, Homo sapien
ccaaggccattttatcaacaatgacattttcaa

SEQ ID NO: 62108 - DNA, 33 bp, Homo sapien
ccaaggccattttatcgacaatgacattttcaa

SEQ ID NO: 62109 - DNA, 33 bp, Homo sapien
aagctagtatctgccactaggttgaaaatagct

SEQ ID NO: 62110 - DNA, 33 bp, Homo sapien
aagctagtatctgccagtaggttgaaaatagct

SEQ ID NO: 62111 - DNA, 33 bp, Homo sapien
ataaccattctgaccaagcccttaaagatatac

SEQ ID NO: 62112 - DNA, 33 bp, Homo sapien
ataaccattctgaccaggcccttaaagatatac

SEQ ID NO: 62113 - DNA, 33 bp, Homo sapien
gatccagcagatctaaaggtgcttgatgtgtca

SEQ ID NO: 62114 - DNA, 33 bp, Homo sapien
gatccagcagatctaatggtgcttgatgtgtca

SEQ ID NO: 62115 - DNA, 33 bp, Homo sapien
tcagaggtgttaaaaacgcagaaaaatgtacat

SEQ ID NO: 62116 - DNA, 33 bp, Homo sapien
tcagaggtgttaaaaatgcagaaaaatgtacat

SEQ ID NO: 62117 - DNA, 33 bp, Homo sapien
gaatttggcatctttgaaagccaaaaagggggg

SEQ ID NO: 62118 - DNA, 33 bp, Homo sapien
gaatttggcatctttgcaagccaaaaagggggg

SEQ ID NO: 62119 - DNA, 33 bp, Homo sapien
aaaaaaatgaagtcaaacttatgtccaaactga

SEQ ID NO: 62120 - DNA, 33 bp, Homo sapien
aaaaaaatgaagtcaagcttatgtccaaactga

SEQ ID NO: 62121 - DNA, 33 bp, Homo sapien
aagccactgtaatgaacagagctagaatgatga

SEQ ID NO: 62122 - DNA, 33 bp, Homo sapien
aagccactgtaatgaatagagctagaatgatga

SEQ ID NO: 62123 - DNA, 33 bp, Homo sapien
gtgtcattgtgcgaaaatgtcctaaacctacac

SEQ ID NO: 62124 - DNA, 33 bp, Homo sapien
gtgtcattgtgcgaaattgtcctaaacctacac

SEQ ID NO: 62125 - DNA, 33 bp, Homo sapien
atactgcacttacaccacaaatctataccacag

SEQ ID NO: 62126 - DNA, 33 bp, Homo sapien
atactgcacttacaccgcaaatctataccacag

SEQ ID NO: 62127 - DNA, 33 bp, Homo sapien
tagaataaatatggaaaatgtagtaatcaaaaa

SEQ ID NO: 62128 - DNA, 33 bp, Homo sapien
tagaataaatatggaagatgtagtaatcaaaaa

SEQ ID NO: 62129 - DNA, 33 bp, Homo sapien
ttatttgtccttaataccaacgctccttgagta

SEQ ID NO: 62130 - DNA, 33 bp, Homo sapien
ttatttgtccttaatatcaacgctccttgagta

SEQ ID NO: 62131 - DNA, 33 bp, Homo sapien
cttatgagataccaccactactctagaaacccc

SEQ ID NO: 62132 - DNA, 33 bp, Homo sapien
cttatgagataccaccgctactctagaaacccc

SEQ ID NO: 62133 - DNA, 33 bp, Homo sapien
gagatggtgggcagagaagttacagtcttgctc

SEQ ID NO: 62134 - DNA, 33 bp, Homo sapien
gagatggtgggcagaggagttacagtcttgctc

SEQ ID NO: 62135 - DNA, 33 bp, Homo sapien
tttcttttcaatttcagagtctctttgtctatg

SEQ ID NO: 62136 - DNA, 33 bp, Homo sapien
tttcttttcaatttcatagtctctttgtctatg

SEQ ID NO: 62137 - DNA, 33 bp, Homo sapien
tttaagcacaccagcaatattgaattaggacca

SEQ ID NO: 62138 - DNA, 33 bp, Homo sapien
tttaagcacaccagcagtattgaattaggacca

SEQ ID NO: 62139 - DNA, 33 bp, Homo sapien
ttacacttatgcatgaacttaaaaataacaagg

SEQ ID NO: 62140 - DNA, 33 bp, Homo sapien
ttacacttatgcatgagcttaaaaataacaagg

SEQ ID NO: 62141 - DNA, 33 bp, Homo sapien
ttatagatagcattaactcactgatttctttgc

SEQ ID NO: 62142 - DNA, 33 bp, Homo sapien
ttatagatagcattaattcactgatttctttgc

SEQ ID NO: 62143 - DNA, 33 bp, Homo sapien
aaggaaggagtgatccaattcacataaaataat

SEQ ID NO: 62144 - DNA, 33 bp, Homo sapien
aaggaaggagtgatccgattcacataaaataat

SEQ ID NO: 62145 - DNA, 33 bp, Homo sapien
cagtttatttggcttaaggttttgcaagctgta

SEQ ID NO: 62146 - DNA, 33 bp, Homo sapien
cagtttatttggcttacggttttgcaagctgta

SEQ ID NO: 62147 - DNA, 33 bp, Homo sapien
tgtatataaagaagaaatgcagtctcttaaaga

SEQ ID NO: 62148 - DNA, 33 bp, Homo sapien
tgtatataaagaagaagtgcagtctcttaaaga

SEQ ID NO: 62149 - DNA, 33 bp, Homo sapien
tgttggaaaatactgacggttgatttttaattc

SEQ ID NO: 62150 - DNA, 33 bp, Homo sapien
tgttggaaaatactgatggttgatttttaattc

SEQ ID NO: 62151 - DNA, 33 bp, Homo sapien
tgtggcattagattgaacaattttttttttgag

SEQ ID NO: 62152 - DNA, 33 bp, Homo sapien
tgtggcattagattgaccaattttttttttgag

SEQ ID NO: 62153 - DNA, 33 bp, Homo sapien
ggattaaccttaggtcaaggagaaaactattag

SEQ ID NO: 62154 - DNA, 33 bp, Homo sapien
ggattaaccttaggtcgaggagaaaactattag

SEQ ID NO: 62155 - DNA, 33 bp, Homo sapien
tcatgcagacttgtaacatttgtgaatacagtc

SEQ ID NO: 62156 - DNA, 33 bp, Homo sapien
tcatgcagacttgtaatatttgtgaatacagtc

SEQ ID NO: 62157 - DNA, 33 bp, Homo sapien
tttttattttcaaagacggttttgtcactacat

SEQ ID NO: 62158 - DNA, 33 bp, Homo sapien
tttttattttcaaagatggttttgtcactacat

SEQ ID NO: 62159 - DNA, 33 bp, Homo sapien
tgttttcttctgtggtcaattgagatcgttgta

SEQ ID NO: 62160 - DNA, 33 bp, Homo sapien
tgttttcttctgtggttaattgagatcgttgta

SEQ ID NO: 62161 - DNA, 33 bp, Homo sapien
ccaccactgtggtgaaaaccagcacagaggcag

SEQ ID NO: 62162 - DNA, 33 bp, Homo sapien
ccaccactgtggtgaacaccagcacagaggcag

SEQ ID NO: 62163 - DNA, 33 bp, Homo sapien
tgttctccaagttgctaaaactctcccaatctc

SEQ ID NO: 62164 - DNA, 33 bp, Homo sapien
tgttctccaagttgcttaaactctcccaatctc

SEQ ID NO: 62165 - DNA, 33 bp, Homo sapien; identical to SEQ ID NO: 62163

SEQ ID NO: 62166 - DNA, 33 bp, Homo sapien; identical to SEQ ID NO: 62164

SEQ ID NO: 62167 - DNA, 33 bp, Homo sapien
gcatttctgattggtaagctatttactactgat

SEQ ID NO: 62168 - DNA, 33 bp, Homo sapien
gcatttctgattggtaggctatttactactgat

SEQ ID NO: 62169 - DNA, 33 bp, Homo sapien
caaacttgtgaacttacagagttggctaaaata

SEQ ID NO: 62170 - DNA, 33 bp, Homo sapien
caaacttgtgaacttatagagttggctaaaata

SEQ ID NO: 62171 - DNA, 33 bp, Homo sapien
caccaagtaaatttccaaacataaaaaatgaat

SEQ ID NO: 62172 - DNA, 33 bp, Homo sapien
caccaagtaaatttccgaacataaaaaatgaat

SEQ ID NO: 62173 - DNA, 33 bp, Homo sapien
tgcaacagaaacaaaaattgagtagtgggaact

SEQ ID NO: 62174 - DNA, 33 bp, Homo sapien
tgcaacagaaacaaaagttgagtagtgggaact

SEQ ID NO: 62175 - DNA, 33 bp, Homo sapien
gatggtagctacatgacgaataaataatacaat

SEQ ID NO: 62176 - DNA, 33 bp, Homo sapien
gatggtagctacatgatgaataaataatacaat

SEQ ID NO: 62177 - DNA, 33 bp, Homo sapien
tatatatatgcaaaaaatacattcatgtaaaac

SEQ ID NO: 62178 - DNA, 33 bp, Homo sapien
tatatatatgcaaaaactacattcatgtaaaac

SEQ ID NO: 62179 - DNA, 33 bp, Homo sapien
acctgggaagataataataatcaacattccaaa

SEQ ID NO: 62180 - DNA, 33 bp, Homo sapien
acctgggaagataatactaatcaacattccaaa

SEQ ID NO: 62181 - DNA, 33 bp, Homo sapien
aatatatgcaagttcactagatagggtcacaag

SEQ ID NO: 62182 - DNA, 33 bp, Homo sapien
aatatatgcaagttcattagatagggtcacaag

SEQ ID NO: 62183 - DNA, 33 bp, Homo sapien
taagtcatttctttgacgctgctttgagcatag

SEQ ID NO: 62184 - DNA, 33 bp, Homo sapien
taagtcatttctttgatgctgctttgagcatag

SEQ ID NO: 62185 - DNA, 33 bp, Homo sapien
tttgaaaacaataggcaatagctaggcccttag

SEQ ID NO: 62186 - DNA, 33 bp, Homo sapien
tttgaaaacaataggcgatagctaggcccttag

SEQ ID NO: 62187 - DNA, 33 bp, Homo sapien
taccaaacaaagaaagaaatgtataagcttgtg

SEQ ID NO: 62188 - DNA, 33 bp, Homo sapien
taccaaacaaagaaagtaatgtataagcttgtg

SEQ ID NO: 62189 - DNA, 33 bp, Homo sapien
tcctttgttttaatcaagagaagctaacctgtg

SEQ ID NO: 62190 - DNA, 33 bp, Homo sapien
tcctttgttttaatcaggagaagctaacctgtg

SEQ ID NO: 62191 - DNA, 33 bp, Homo sapien
attattaataactgccagaatgaacaaaactta

SEQ ID NO: 62192 - DNA, 33 bp, Homo sapien
attattaataactgccggaatgaacaaaactta

SEQ ID NO: 62193 - DNA, 33 bp, Homo sapien
tgtgatgtgataaaaacgacacctcatctctgt

SEQ ID NO: 62194 - DNA, 33 bp, Homo sapien
tgtgatgtgataaaaatgacacctcatctctgt

SEQ ID NO: 62195 - DNA, 33 bp, Homo sapien
aactactgatcccaaaatattacaagggtaaaa

SEQ ID NO: 62196 - DNA, 33 bp, Homo sapien
aactactgatcccaaactattacaagggtaaaa

SEQ ID NO: 62197 - DNA, 33 bp, Homo sapien
agcctattatttcagaaagccttgaggaagctg

SEQ ID NO: 62198 - DNA, 33 bp, Homo sapien
agcctattatttcagatagccttgaggaagctg

SEQ ID NO: 62199 - DNA, 33 bp, Homo sapien
ggtagatgtttgattgcatcatagtttcttcac

SEQ ID NO: 62200 - DNA, 33 bp, Homo sapien
ggtagatgtttgattgtatcatagtttcttcac

SEQ ID NO: 62201 - DNA, 33 bp, Homo sapien
tatccctgctattgagaaaaagaaaattcaaaa

SEQ ID NO: 62202 - DNA, 33 bp, Homo sapien
tatccctgctattgagcaaaagaaaattcaaaa

SEQ ID NO: 62203 - DNA, 33 bp, Homo sapien
cctgaagttgccaactaaggtagctaaatcctc

SEQ ID NO: 62204 - DNA, 33 bp, Homo sapien
cctgaagttgccaactgaggtagctaaatcctc

SEQ ID NO: 62205 - DNA, 33 bp, Homo sapien
caatgtccaggaaatacagtctcatgaaagtta

SEQ ID NO: 62206 - DNA, 33 bp, Homo sapien
caatgtccaggaaatatagtctcatgaaagtta

SEQ ID NO: 62207 - DNA, 33 bp, Homo sapien
tatatcataacctcagaccattacttaatttca

SEQ ID NO: 62208 - DNA, 33 bp, Homo sapien
tatatcataacctcaggccattacttaatttca

SEQ ID NO: 62209 - DNA, 33 bp, Homo sapien
tttagaatccaaacaaattgccatgtttctatt

SEQ ID NO: 62210 - DNA, 33 bp, Homo sapien
tttagaatccaaacaagttgccatgtttctatt

SEQ ID NO: 62211 - DNA, 33 bp, Homo sapien
taaagcaaaagtcataagaaggtagaaaaccac

SEQ ID NO: 62212 - DNA, 33 bp, Homo sapien
taaagcaaaagtcataggaaggtagaaaaccac

SEQ ID NO: 62213 - DNA, 33 bp, Homo sapien
ttgcacaggtaaatacaaatggtggactcagga

SEQ ID NO: 62214 - DNA, 33 bp, Homo sapien
ttgcacaggtaaatacgaatggtggactcagga

SEQ ID NO: 62215 - DNA, 33 bp, Homo sapien
cagcacaaatcacctaacttttactactaagaa

SEQ ID NO: 62216 - DNA, 33 bp, Homo sapien
cagcacaaatcacctagcttttactactaagaa

SEQ ID NO: 62217 - DNA, 33 bp, Homo sapien
ttagcgtatctgataaaaaaatttctaagggga

SEQ ID NO: 62218 - DNA, 33 bp, Homo sapien
ttagcgtatctgataacaaaatttctaagggga

SEQ ID NO: 62219 - DNA, 33 bp, Homo sapien
tgtaaaatcctaggaaatagaaacagcaaacat

SEQ ID NO: 62220 - DNA, 33 bp, Homo sapien
tgtaaaatcctaggaagtagaaacagcaaacat

SEQ ID NO: 62221 - DNA, 33 bp, Homo sapien
taaccttaaaaacttaaaatcactgaacaatcg

SEQ ID NO: 62222 - DNA, 33 bp, Homo sapien
taaccttaaaaacttacaatcactgaacaatcg

SEQ ID NO: 62223 - DNA, 33 bp, Homo sapien
cacaattatagaaataacatcctgctgcatatg

SEQ ID NO: 62224 - DNA, 33 bp, Homo sapien
cacaattatagaaatagcatcctgctgcatatg

SEQ ID NO: 62225 - DNA, 33 bp, Homo sapien
gcatgaggcttatgcacacaactttactgacct

SEQ ID NO: 62226 - DNA, 33 bp, Homo sapien
gcatgaggcttatgcagacaactttactgacct

SEQ ID NO: 62227 - DNA, 33 bp, Homo sapien
agagacttcagagaaactgtggccttacacaca

SEQ ID NO: 62228 - DNA, 33 bp, Homo sapien
agagacttcagagaaagtgtggccttacacaca

SEQ ID NO: 62229 - DNA, 33 bp, Homo sapien
ctcccacaaaatgctacaacagaaaaacaattc

SEQ ID NO: 62230 - DNA, 33 bp, Homo sapien
ctcccacaaaatgctagaacagaaaaacaattc

SEQ ID NO: 62231 - DNA, 33 bp, Homo sapien
tttattaccgtatgtcaaattttagttcctcat

SEQ ID NO: 62232 - DNA, 33 bp, Homo sapien
tttattaccgtatgtctaattttagttcctcat

SEQ ID NO: 62233 - DNA, 33 bp, Homo sapien
caatatttcttttaaaatgttggcatcacctaa

SEQ ID NO: 62234 - DNA, 33 bp, Homo sapien
caatatttcttttaaagtgttggcatcacctaa

SEQ ID NO: 62235 - DNA, 33 bp, Homo sapien
cttgtgtgagccaatcactctgatatttcatta

SEQ ID NO: 62236 - DNA, 33 bp, Homo sapien
cttgtgtgagccaatctctctgatatttcatta

SEQ ID NO: 62237 - DNA, 33 bp, Homo sapien
ttatcaaaaaagcaaaggataagctgagaatgt

SEQ ID NO: 62238 - DNA, 33 bp, Homo sapien
ttatcaaaaaagcaaatgataagctgagaatgt

SEQ ID NO: 62239 - DNA, 33 bp, Homo sapien
aaactcctatgctgaagagcaaaaacaataaaa

SEQ ID NO: 62240 - DNA, 33 bp, Homo sapien
aaactcctatgctgaatagcaaaaacaataaaa

SEQ ID NO: 62241 - DNA, 33 bp, Homo sapien
aggtaatatgaggaccaccattgatacataaga

SEQ ID NO: 62242 - DNA, 33 bp, Homo sapien
aggtaatatgaggaccgccattgatacataaga

SEQ ID NO: 62243 - DNA, 33 bp, Homo sapien
cacaatcaatgaatgaagttttctctttattaa

SEQ ID NO: 62244 - DNA, 33 bp, Homo sapien
cacaatcaatgaatgacgttttctctttattaa

SEQ ID NO: 62245 - DNA, 33 bp, Homo sapien
agtgtctgtatagtgtaaaaaagtgaagacaaa

SEQ ID NO: 62246 - DNA, 33 bp, Homo sapien
agtgtctgtatagtgtgaaaaagtgaagacaaa

SEQ ID NO: 62247 - DNA, 33 bp, Homo sapien
ggacagggttttatacagtaacaagtgctttga

SEQ ID NO: 62248 - DNA, 33 bp, Homo sapien
ggacagggttttatacggtaacaagtgctttga

SEQ ID NO: 62249 - DNA, 33 bp, Homo sapien
tcatcttatccatctacgagaattgtattcatc

SEQ ID NO: 62250 - DNA, 33 bp, Homo sapien
tcatcttatccatctatgagaattgtattcatc

SEQ ID NO: 62251 - DNA, 33 bp, Homo sapien
atacaataaaatgcacagctattgagtgacagg

SEQ ID NO: 62252 - DNA, 33 bp, Homo sapien
atacaataaaatgcacggctattgagtgacagg

SEQ ID NO: 62253 - DNA, 33 bp, Homo sapien
atagaatgtgactcaaaaagccataatgtgaag

SEQ ID NO: 62254 - DNA, 33 bp, Homo sapien
atagaatgtgactcaacaagccataatgtgaag

SEQ ID NO: 62255 - DNA, 33 bp, Homo sapien
caaatagaagcagaaacgtcaacaaagtaagcc

SEQ ID NO: 62256 - DNA, 33 bp, Homo sapien
caaatagaagcagaaatgtcaacaaagtaagcc

SEQ ID NO: 62257 - DNA, 33 bp, Homo sapien
cagagatgattgcttcacttgaacattttagtt

SEQ ID NO: 62258 - DNA, 33 bp, Homo sapien
cagagatgattgcttctcttgaacattttagtt

SEQ ID NO: 62259 - DNA, 33 bp, Homo sapien
agtcctgaaaatgtaaataaagcaaatgaagcg

SEQ ID NO: 62260 - DNA, 33 bp, Homo sapien
agtcctgaaaatgtaagtaaagcaaatgaagcg

SEQ ID NO: 62261 - DNA, 33 bp, Homo sapien
tttcaactgtataagcaccttttcatttaacat

SEQ ID NO: 62262 - DNA, 33 bp, Homo sapien
tttcaactgtataagcgccttttcatttaacat

SEQ ID NO: 62263 - DNA, 33 bp, Homo sapien
aaggcaaagcttctgcaattttctcttcctggc

SEQ ID NO: 62264 - DNA, 33 bp, Homo sapien
aaggcaaagcttctgctattttctcttcctggc

SEQ ID NO: 62265 - DNA, 33 bp, Homo sapien
tctaaagacaaagctcagaaaacctggaggccc

SEQ ID NO: 62266 - DNA, 33 bp, Homo sapien
tctaaagacaaagctcggaaaacctggaggccc

SEQ ID NO: 62267 - DNA, 33 bp, Homo sapien
agcttctgtaaaatgaagtttagcaagatgaga

SEQ ID NO: 62268 - DNA, 33 bp, Homo sapien
agcttctgtaaaatgaggtttagcaagatgaga

SEQ ID NO: 62269 - DNA, 33 bp, Homo sapien
cttcatataaagcatcacatttacctgttgatt

SEQ ID NO: 62270 - DNA, 33 bp, Homo sapien
cttcatataaagcatcgcatttacctgttgatt

SEQ ID NO: 62271 - DNA, 33 bp, Homo sapien
ctcactttgaaatccaccttttaatactgtcac

SEQ ID NO: 62272 - DNA, 33 bp, Homo sapien
ctcactttgaaatccatcttttaatactgtcac

SEQ ID NO: 62273 - DNA, 33 bp, Homo sapien
ggagcctcatggcctgcaacggctaacaaagga

SEQ ID NO: 62274 - DNA, 33 bp, Homo sapien
ggagcctcatggcctggaacggctaacaaagga

SEQ ID NO: 62275 - DNA, 33 bp, Homo sapien
gtataggaagtagaacgggtctttctctgactg

SEQ ID NO: 62276 - DNA, 33 bp, Homo sapien
gtataggaagtagaactggtctttctctgactg

SEQ ID NO: 62277 - DNA, 33 bp, Homo sapien
caatgcctctgtgtatcagtaaatgctttctca

SEQ ID NO: 62278 - DNA, 33 bp, Homo sapien
caatgcctctgtgtatgagtaaatgctttctca

SEQ ID NO: 62279 - DNA, 33 bp, Homo sapien
ctaagaattttgtttccataggacctgtgactc

SEQ ID NO: 62280 - DNA, 33 bp, Homo sapien
ctaagaattttgtttctataggacctgtgactc

SEQ ID NO: 62281 - DNA, 33 bp, Homo sapien
gacttatgcacttacaaaaattgaggtaattca

SEQ ID NO: 62282 - DNA, 33 bp, Homo sapien
gacttatgcacttacagaaattgaggtaattca

SEQ ID NO: 62283 - DNA, 33 bp, Homo sapien
aaatatcattattcaacggtcaactataaacat

SEQ ID NO: 62284 - DNA, 33 bp, Homo sapien
aaatatcattattcaagggtcaactataaacat

SEQ ID NO: 62285 - DNA, 33 bp, Homo sapien
cagtactgcattaatcactctcaagtaactgct

SEQ ID NO: 62286 - DNA, 33 bp, Homo sapien
cagtactgcattaatcgctctcaagtaactgct

SEQ ID NO: 62287 - DNA, 33 bp, Homo sapien
tggcgtgacccatggaaaggaaagaagagcaat

SEQ ID NO: 62288 - DNA, 33 bp, Homo sapien
tggcgtgacccatggagaggaaagaagagcaat

SEQ ID NO: 62289 - DNA, 33 bp, Homo sapien
caaaatattttatttgaacagagccatgatatt

SEQ ID NO: 62290 - DNA, 33 bp, Homo sapien
caaaatattttatttggacagagccatgatatt

SEQ ID NO: 62291 - DNA, 33 bp, Homo sapien
aatataagatgttgaactgtcattaccaagttt

SEQ ID NO: 62292 - DNA, 33 bp, Homo sapien
aatataagatgttgaattgtcattaccaagttt

SEQ ID NO: 62293 - DNA, 33 bp, Homo sapien
gacaggaagcctactaaactcctacttaattta

SEQ ID NO: 62294 - DNA, 33 bp, Homo sapien
gacaggaagcctactacactcctacttaattta

SEQ ID NO: 62295 - DNA, 33 bp, Homo sapien
tgatgcagctgtttcaaaaaaacggtttggcag

SEQ ID NO: 62296 - DNA, 33 bp, Homo sapien
tgatgcagctgtttcacaaaaacggtttggcag

SEQ ID NO: 62297 - DNA, 33 bp, Homo sapien
tgaaacataaaaaacaagtttggagcacttgcc

SEQ ID NO: 62298 - DNA, 33 bp, Homo sapien
tgaaacataaaaaacaggtttggagcacttgcc

SEQ ID NO: 62299 - DNA, 33 bp, Homo sapien
aaaccagttatacacagagaatacaggctggat

SEQ ID NO: 62300 - DNA, 33 bp, Homo sapien
aaaccagttatacacatagaatacaggctggat

SEQ ID NO: 62301 - DNA, 33 bp, Homo sapien
gtctgaacaagttaagaacaacacataataaaa

SEQ ID NO: 62302 - DNA, 33 bp, Homo sapien
gtctgaacaagttaagtacaacacataataaaa

SEQ ID NO: 62303 - DNA, 33 bp, Homo sapien
gtagacatagcatttaagtagatgcatatccaa

SEQ ID NO: 62304 - DNA, 33 bp, Homo sapien
gtagacatagcatttaggtagatgcatatccaa

SEQ ID NO: 62305 - DNA, 33 bp, Homo sapien
tgggtatctcatggtaggtcatcataattttga

SEQ ID NO: 62306 - DNA, 33 bp, Homo sapien
tgggtatctcatggtatgtcatcataattttga

SEQ ID NO: 62307 - DNA, 33 bp, Homo sapien
tgtcccgcagccttccacggtattgatgtatca

SEQ ID NO: 62308 - DNA, 33 bp, Homo sapien
tgtcccgcagccttccgcggtattgatgtatca

SEQ ID NO: 62309 - DNA, 33 bp, Homo sapien
aatggtttagttttcagagttacagagtagaag

SEQ ID NO: 62310 - DNA, 33 bp, Homo sapien
aatggtttagttttcatagttacagagtagaag

SEQ ID NO: 62311 - DNA, 33 bp, Homo sapien
tagtcagacattcatgaatcgacaactatatat

SEQ ID NO: 62312 - DNA, 33 bp, Homo sapien
tagtcagacattcatggatcgacaactatatat

SEQ ID NO: 62313 - DNA, 33 bp, Homo sapien
atttctttttcatctacacaaagtcagaaagta

SEQ ID NO: 62314 - DNA, 33 bp, Homo sapien
atttctttttcatctatacaaagtcagaaagta

SEQ ID NO: 62315 - DNA, 33 bp, Homo sapien
aatatagttgggaaaaaagtctacagagttcca

SEQ ID NO: 62316 - DNA, 33 bp, Homo sapien
aatatagttgggaaaagagtctacagagttcca

SEQ ID NO: 62317 - DNA, 33 bp, Homo sapien
cttaggtgaccttaaaatacagattatcttgga

SEQ ID NO: 62318 - DNA, 33 bp, Homo sapien
cttaggtgaccttaaagtacagattatcttgga

SEQ ID NO: 62319 - DNA, 33 bp, Homo sapien
tcttgcaggtatgctaaactccttatggtaagt

SEQ ID NO: 62320 - DNA, 33 bp, Homo sapien
tcttgcaggtatgctacactccttatggtaagt

SEQ ID NO: 62321 - DNA, 33 bp, Homo sapien
aatcatatcaaattgccacgtacttatattacc

SEQ ID NO: 62322 - DNA, 33 bp, Homo sapien
aatcatatcaaattgctacgtacttatattacc

SEQ ID NO: 62323 - DNA, 33 bp, Homo sapien
tttagcatgagccaaaattatttatgacatttc

SEQ ID NO: 62324 - DNA, 33 bp, Homo sapien
tttagcatgagccaaatttatttatgacatttc

SEQ ID NO: 62325 - DNA, 33 bp, Homo sapien
agatccacagtgtctactaaacgttaccaatag

SEQ ID NO: 62326 - DNA, 33 bp, Homo sapien
agatccacagtgtctattaaacgttaccaatag

SEQ ID NO: 62327 - DNA, 33 bp, Homo sapien
agaaattcaaatatgcagattaaggttaagtaa

SEQ ID NO: 62328 - DNA, 33 bp, Homo sapien
agaaattcaaatatgcggattaaggttaagtaa

SEQ ID NO: 62329 - DNA, 33 bp, Homo sapien
tgaaaccctgtctctaaaacaaacgaacaaaac

SEQ ID NO: 62330 - DNA, 33 bp, Homo sapien
tgaaaccctgtctctagaacaaacgaacaaaac

SEQ ID NO: 62331 - DNA, 33 bp, Homo sapien
gcctgacttgagagaacgcttttgttgaggtaa

SEQ ID NO: 62332 - DNA, 33 bp, Homo sapien
gcctgacttgagagaatgcttttgttgaggtaa

SEQ ID NO: 62333 - DNA, 33 bp, Homo sapien
aaaaaaagagtccagacagtcaaagcaatccta

SEQ ID NO: 62334 - DNA, 33 bp, Homo sapien
aaaaaaagagtccagatagtcaaagcaatccta

SEQ ID NO: 62335 - DNA, 33 bp, Homo sapien
aaggcattgagtcatgccaatttcgccaacgct

SEQ ID NO: 62336 - DNA, 33 bp, Homo sapien
aaggcattgagtcatgtcaatttcgccaacgct

SEQ ID NO: 62337 - DNA, 33 bp, Homo sapien
attttgaaatcaaggaacatcatacctctaact

SEQ ID NO: 62338 - DNA, 33 bp, Homo sapien
attttgaaatcaaggagcatcatacctctaact

SEQ ID NO: 62339 - DNA, 33 bp, Homo sapien
gagaaataagtaatcacaataggcatatctata

SEQ ID NO: 62340 - DNA, 33 bp, Homo sapien
gagaaataagtaatcagaataggcatatctata

SEQ ID NO: 62341 - DNA, 33 bp, Homo sapien
tatttttcaccaaaagcctagtaggtacactag

SEQ ID NO: 62342 - DNA, 33 bp, Homo sapien
tatttttcaccaaaaggctagtaggtacactag

SEQ ID NO: 62343 - DNA, 33 bp, Homo sapien
tatactatagtctacccataagcgttgtatcca

SEQ ID NO: 62344 - DNA, 33 bp, Homo sapien
tatactatagtctacctataagcgttgtatcca

SEQ ID NO: 62345 - DNA, 33 bp, Homo sapien
aaccattgcaattatgcagaaatgcacctgtct

SEQ ID NO: 62346 - DNA, 33 bp, Homo sapien
aaccattgcaattatgtagaaatgcacctgtct

SEQ ID NO: 62347 - DNA, 33 bp, Homo sapien
ggtctggcatatagtaagaaatcaataaatgct

SEQ ID NO: 62348 - DNA, 33 bp, Homo sapien
ggtctggcatatagtaggaaatcaataaatgct

SEQ ID NO: 62349 - DNA, 33 bp, Homo sapien
atggttgctttctttacgcaaggagaaaattcc

SEQ ID NO: 62350 - DNA, 33 bp, Homo sapien
atggttgctttctttatgcaaggagaaaattcc

SEQ ID NO: 62351 - DNA, 33 bp, Homo sapien
tgctcaggaaaattcacgctcaatcaaaatatt

SEQ ID NO: 62352 - DNA, 33 bp, Homo sapien
tgctcaggaaaattcatgctcaatcaaaatatt

SEQ ID NO: 62353 - DNA, 33 bp, Homo sapien
aaattaacccagtctgcattccaggccctaact

SEQ ID NO: 62354 - DNA, 33 bp, Homo sapien
aaattaacccagtctgtattccaggccctaact

SEQ ID NO: 62355 - DNA, 33 bp, Homo sapien
aatcattaacaatacacaagtgagttttaattt

SEQ ID NO: 62356 - DNA, 33 bp, Homo sapien
aatcattaacaatacagaagtgagttttaattt

SEQ ID NO: 62357 - DNA, 33 bp, Homo sapien
atatgtaatacccataccagtttcaatcattaa

SEQ ID NO: 62358 - DNA, 33 bp, Homo sapien
atatgtaatacccatatcagtttcaatcattaa

SEQ ID NO: 62359 - DNA, 33 bp, Homo sapien
taatgcttatataccaacagtagaatatttagc

SEQ ID NO: 62360 - DNA, 33 bp, Homo sapien
taatgcttatataccagcagtagaatatttagc

SEQ ID NO: 62361 - DNA, 33 bp, Homo sapien
ttgttagaggtaaaaacgtgccagactgttaat

SEQ ID NO: 62362 - DNA, 33 bp, Homo sapien
ttgttagaggtaaaaaggtgccagactgttaat

SEQ ID NO: 62363 - DNA, 33 bp, Homo sapien
gggcctgagaatatgcaccaaggtggctgggtt

SEQ ID NO: 62364 - DNA, 33 bp, Homo sapien
gggcctgagaatatgcgccaaggtggctgggtt

SEQ ID NO: 62365 - DNA, 33 bp, Homo sapien
tcttgagacaatctaggcaactttggaattctc

SEQ ID NO: 62366 - DNA, 33 bp, Homo sapien
tcttgagacaatctagtcaactttggaattctc

SEQ ID NO: 62367 - DNA, 33 bp, Homo sapien
gtgtggctcttacagaaaggactgaaagggaag

SEQ ID NO: 62368 - DNA, 33 bp, Homo sapien
gtgtggctcttacagagaggactgaaagggaag

SEQ ID NO: 62369 - DNA, 33 bp, Homo sapien
ttctcagataaattgaaacatacccgtgtcact

SEQ ID NO: 62370 - DNA, 33 bp, Homo sapien
ttctcagataaattgagacatacccgtgtcact

SEQ ID NO: 62371 - DNA, 33 bp, Homo sapien
gggctatgagacaataataaatgacataatgtg

SEQ ID NO: 62372 - DNA, 33 bp, Homo sapien
gggctatgagacaatagtaaatgacataatgtg

SEQ ID NO: 62373 - DNA, 33 bp, Homo sapien
ggcaataggcagtggaccgctctgaggaagcag

SEQ ID NO: 62374 - DNA, 33 bp, Homo sapien
ggcaataggcagtggatcgctctgaggaagcag

SEQ ID NO: 62375 - DNA, 33 bp, Homo sapien
ctacatcatccacataatatcagtaaaaatgat

SEQ ID NO: 62376 - DNA, 33 bp, Homo sapien
ctacatcatccacatagtatcagtaaaaatgat

SEQ ID NO: 62377 - DNA, 33 bp, Homo sapien
acatcaccatttccacaaagacaaagcagagtc

SEQ ID NO: 62378 - DNA, 33 bp, Homo sapien
acatcaccatttccaccaagacaaagcagagtc

SEQ ID NO: 62379 - DNA, 33 bp, Homo sapien
atgcatttgtagctaccacttacttgacaaatt

SEQ ID NO: 62380 - DNA, 33 bp, Homo sapien
atgcatttgtagctactacttacttgacaaatt

SEQ ID NO: 62381 - DNA, 33 bp, Homo sapien
agaacagcgacttatagccaagaagcaggggtc

SEQ ID NO: 62382 - DNA, 33 bp, Homo sapien
agaacagcgacttatatccaagaagcaggggtc

SEQ ID NO: 62383 - DNA, 33 bp, Homo sapien
tctggctgaatcaacccaacaggattcctgctg

SEQ ID NO: 62384 - DNA, 33 bp, Homo sapien
tctggctgaatcaacctaacaggattcctgctg

SEQ ID NO: 62385 - DNA, 33 bp, Homo sapien
tgaccaggatttttcacaccctgtgtttgatac

SEQ ID NO: 62386 - DNA, 33 bp, Homo sapien
tgaccaggatttttcataccctgtgtttgatac

SEQ ID NO: 62387 - DNA, 33 bp, Homo sapien
cttaaattcaaatttaactctgctgtgtatttt

SEQ ID NO: 62388 - DNA, 33 bp, Homo sapien
cttaaattcaaatttatctctgctgtgtatttt

SEQ ID NO: 62389 - DNA, 33 bp, Homo sapien
agggaagaatgatgggaaaaaagtgagcctata

SEQ ID NO: 62390 - DNA, 33 bp, Homo sapien
agggaagaatgatggggaaaaagtgagcctata

SEQ ID NO: 62391 - DNA, 33 bp, Homo sapien
aaatgctgtgctccaaggttgaccaaaacaccc

SEQ ID NO: 62392 - DNA, 33 bp, Homo sapien
aaatgctgtgctccaatgttgaccaaaacaccc

SEQ ID NO: 62393 - DNA, 33 bp, Homo sapien
tttgtaagagtgaaaaagattggaaacccgaaa

SEQ ID NO: 62394 - DNA, 33 bp, Homo sapien
tttgtaagagtgaaaatgattggaaacccgaaa

SEQ ID NO: 62395 - DNA, 33 bp, Homo sapien
cagctagacaggaggaataagctttagcaatct

SEQ ID NO: 62396 - DNA, 33 bp, Homo sapien
cagctagacaggaggagtaagctttagcaatct

SEQ ID NO: 62397 - DNA, 33 bp, Homo sapien
aggcaaattgaaaagaacatcatacatagctta

SEQ ID NO: 62398 - DNA, 33 bp, Homo sapien
aggcaaattgaaaagagcatcatacatagctta

SEQ ID NO: 62399 - DNA, 33 bp, Homo sapien
aagatagagacagagacgttcctgcaggattgc

SEQ ID NO: 62400 - DNA, 33 bp, Homo sapien
aagatagagacagagatgttcctgcaggattgc

SEQ ID NO: 62401 - DNA, 33 bp, Homo sapien
ttggtaggttaacgaacgctggtattttggggg

SEQ ID NO: 62402 - DNA, 33 bp, Homo sapien
ttggtaggttaacgaatgctggtattttggggg

SEQ ID NO: 62403 - DNA, 33 bp, Homo sapien
aacaagctatcttggaagttggtggaaaaacgt

SEQ ID NO: 62404 - DNA, 33 bp, Homo sapien
aacaagctatcttggacgttggtggaaaaacgt

SEQ ID NO: 62405 - DNA, 33 bp, Homo sapien
tcaaactgaatgaactaaggacatacaactgac

SEQ ID NO: 62406 - DNA, 33 bp, Homo sapien
tcaaactgaatgaactgaggacatacaactgac

SEQ ID NO: 62407 - DNA, 33 bp, Homo sapien
gatgcccgttccactgcaactggaaggtagggg

SEQ ID NO: 62408 - DNA, 33 bp, Homo sapien
gatgcccgttccactgtaactggaaggtagggg

SEQ ID NO: 62409 - DNA, 33 bp, Homo sapien
tacttgcttagaatccaaaaggcaaagagcaga

SEQ ID NO: 62410 - DNA, 33 bp, Homo sapien
tacttgcttagaatcccaaaggcaaagagcaga

SEQ ID NO: 62411 - DNA, 33 bp, Homo sapien
tttctttttccaaatcaattaactggaatagaa

SEQ ID NO: 62412 - DNA, 33 bp, Homo sapien
tttctttttccaaatcgattaactggaatagaa

SEQ ID NO: 62413 - DNA, 33 bp, Homo sapien
gcactgccacggacccaaataaacatacttatt

SEQ ID NO: 62414 - DNA, 33 bp, Homo sapien
gcactgccacggacccgaataaacatacttatt

SEQ ID NO: 62415 - DNA, 33 bp, Homo sapien
tctggggtctgaaagacgatggccagtggccct

SEQ ID NO: 62416 - DNA, 33 bp, Homo sapien
tctggggtctgaaagatgatggccagtggccct

SEQ ID NO: 62417 - DNA, 33 bp, Homo sapien
gaacaaacgttatgacacagttaatatcatgcc

SEQ ID NO: 62418 - DNA, 33 bp, Homo sapien
gaacaaacgttatgacgcagttaatatcatgcc

SEQ ID NO: 62419 - DNA, 33 bp, Homo sapien
taaggagagaaagacaaatgtccatcaaactct

SEQ ID NO: 62420 - DNA, 33 bp, Homo sapien
taaggagagaaagacagatgtccatcaaactct

SEQ ID NO: 62421 - DNA, 33 bp, Homo sapien
atgcagataatggcccaaaaatattccctttct

SEQ ID NO: 62422 - DNA, 33 bp, Homo sapien
atgcagataatggccccaaaatattccctttct

SEQ ID NO: 62423 - DNA, 33 bp, Homo sapien
tagtgttcaagacacagtactaaaacacaacag

SEQ ID NO: 62424 - DNA, 33 bp, Homo sapien
tagtgttcaagacacattactaaaacacaacag

SEQ ID NO: 62425 - DNA, 33 bp, Homo sapien
cctcctccagagacataagttaggtcatgaacc

SEQ ID NO: 62426 - DNA, 33 bp, Homo sapien
cctcctccagagacatgagttaggtcatgaacc

SEQ ID NO: 62427 - DNA, 33 bp, Homo sapien
tttcagaggaatcacacagataggtctgggggg

SEQ ID NO: 62428 - DNA, 33 bp, Homo sapien
tttcagaggaatcacagagataggtctgggggg

SEQ ID NO: 62429 - DNA, 33 bp, Homo sapien
aggagcagaatctccacctccaggaaaagaaca

SEQ ID NO: 62430 - DNA, 33 bp, Homo sapien
aggagcagaatctccatctccaggaaaagaaca

SEQ ID NO: 62431 - DNA, 33 bp, Homo sapien
gctctgatatcaatcaaccagttacacattaat

SEQ ID NO: 62432 - DNA, 33 bp, Homo sapien
gctctgatatcaatcatccagttacacattaat

SEQ ID NO: 62433 - DNA, 33 bp, Homo sapien
tacattccagatgatccattcaggacttgtaaa

SEQ ID NO: 62434 - DNA, 33 bp, Homo sapien
tacattccagatgatcgattcaggacttgtaaa

SEQ ID NO: 62435 - DNA, 33 bp, Homo sapien
agaagcatggcaacatcagcagatatgtaagaa

SEQ ID NO: 62436 - DNA, 33 bp, Homo sapien
agaagcatggcaacatgagcagatatgtaagaa

SEQ ID NO: 62437 - DNA, 33 bp, Homo sapien
atttgatgtttgcaatgagtaaggtaaaaactt

SEQ ID NO: 62438 - DNA, 33 bp, Homo sapien
atttgatgtttgcaattagtaaggtaaaaactt

SEQ ID NO: 62439 - DNA, 33 bp, Homo sapien
catctgtatagattcacagacaagaattaaagt

SEQ ID NO: 62440 - DNA, 33 bp, Homo sapien
catctgtatagattcagagacaagaattaaagt

SEQ ID NO: 62441 - DNA, 33 bp, Homo sapien
ataaaacaccaagtacagatgctgacaggtatg

SEQ ID NO: 62442 - DNA, 33 bp, Homo sapien
ataaaacaccaagtacggatgctgacaggtatg

SEQ ID NO: 62443 - DNA, 33 bp, Homo sapien
tagaagagtcaggtaaacaataaaagtaagtac

SEQ ID NO: 62444 - DNA, 33 bp, Homo sapien
tagaagagtcaggtaaccaataaaagtaagtac

SEQ ID NO: 62445 - DNA, 33 bp, Homo sapien
atataatttttcatccaaagttcaatacatttg

SEQ ID NO: 62446 - DNA, 33 bp, Homo sapien
atataatttttcatccgaagttcaatacatttg

SEQ ID NO: 62447 - DNA, 33 bp, Homo sapien
tctctaggccaagacaaaattgagttgaggatc

SEQ ID NO: 62448 - DNA, 33 bp, Homo sapien
tctctaggccaagacataattgagttgaggatc

SEQ ID NO: 62449 - DNA, 33 bp, Homo sapien
tctgcttttattaagcagagcaaaaacacttgg

SEQ ID NO: 62450 - DNA, 33 bp, Homo sapien
tctgcttttattaagcggagcaaaaacacttgg

SEQ ID NO: 62451 - DNA, 33 bp, Homo sapien
ctattgtttcagctacgggtctgtatgtagggg

SEQ ID NO: 62452 - DNA, 33 bp, Homo sapien
ctattgtttcagctactggtctgtatgtagggg

SEQ ID NO: 62453 - DNA, 33 bp, Homo sapien
acgtggacaacaattacgctagtcagtttggca

SEQ ID NO: 62454 - DNA, 33 bp, Homo sapien
acgtggacaacaattatgctagtcagtttggca

SEQ ID NO: 62455 - DNA, 33 bp, Homo sapien
gatagtttgggaatgcaacccaagactaaacat

SEQ ID NO: 62456 - DNA, 33 bp, Homo sapien
gatagtttgggaatgcgacccaagactaaacat

SEQ ID NO: 62457 - DNA, 33 bp, Homo sapien
gatatgcaattaagaacgatgcaatttccatgt

SEQ ID NO: 62458 - DNA, 33 bp, Homo sapien
gatatgcaattaagaatgatgcaatttccatgt

SEQ ID NO: 62459 - DNA, 33 bp, Homo sapien
cccacaagaagccgaacgctgtctataaccaca

SEQ ID NO: 62460 - DNA, 33 bp, Homo sapien
cccacaagaagccgaatgctgtctataaccaca

SEQ ID NO: 62461 - DNA, 33 bp, Homo sapien
tgatttctggagaacacaggaataaagtgctgc

SEQ ID NO: 62462 - DNA, 33 bp, Homo sapien
tgatttctggagaacataggaataaagtgctgc

SEQ ID NO: 62463 - DNA, 33 bp, Homo sapien
ttcatagaccctagcaaattagtgtccaaactt

SEQ ID NO: 62464 - DNA, 33 bp, Homo sapien
ttcatagaccctagcagattagtgtccaaactt

SEQ ID NO: 62465 - DNA, 33 bp, Homo sapien
taggagagatttttgaatagaaataaacatggg

SEQ ID NO: 62466 - DNA, 33 bp, Homo sapien
taggagagatttttgactagaaataaacatggg

SEQ ID NO: 62467 - DNA, 33 bp, Homo sapien
tggtttccggagaaaactgttccacttcagatc

SEQ ID NO: 62468 - DNA, 33 bp, Homo sapien
tggtttccggagaaaattgttccacttcagatc

SEQ ID NO: 62469 - DNA, 33 bp, Homo sapien
atttggtttaattttaagacgcagtggctggca

SEQ ID NO: 62470 - DNA, 33 bp, Homo sapien
atttggtttaattttatgacgcagtggctggca

SEQ ID NO: 62471 - DNA, 33 bp, Homo sapien
tcattctaaatgcctacggtgtgccaaattgat

SEQ ID NO: 62472 - DNA, 33 bp, Homo sapien
tcattctaaatgcctatggtgtgccaaattgat

SEQ ID NO: 62473 - DNA, 33 bp, Homo sapien
tagtagatgagtaaaccgagatacatcagctta

SEQ ID NO: 62474 - DNA, 33 bp, Homo sapien
tagtagatgagtaaactgagatacatcagctta

SEQ ID NO: 62475 - DNA, 33 bp, Homo sapien
caagacaagaaattaaatgatggagataatgtc

SEQ ID NO: 62476 - DNA, 33 bp, Homo sapien
caagacaagaaattaagtgatggagataatgtc

SEQ ID NO: 62477 - DNA, 33 bp, Homo sapien
ccccagcccagatgaaagagtaagagtagaccc

SEQ ID NO: 62478 - DNA, 33 bp, Homo sapien
ccccagcccagatgaaggagtaagagtagaccc

SEQ ID NO: 62479 - DNA, 33 bp, Homo sapien
tgagataattcctctcaactcttaacttgctga

SEQ ID NO: 62480 - DNA, 33 bp, Homo sapien
tgagataattcctctctactcttaacttgctga

SEQ ID NO: 62481 - DNA, 33 bp, Homo sapien
agttatccataatacaacgaaaaataatgaaaa

SEQ ID NO: 62482 - DNA, 33 bp, Homo sapien
agttatccataatacatcgaaaaataatgaaaa

SEQ ID NO: 62483 - DNA, 33 bp, Homo sapien
tcacttatgaacaaaaaatccagtaatcttaag

SEQ ID NO: 62484 - DNA, 33 bp, Homo sapien
tcacttatgaacaaaagatccagtaatcttaag

SEQ ID NO: 62485 - DNA, 33 bp, Homo sapien
gtgtagatttaccttcaattttttctccctaac

SEQ ID NO: 62486 - DNA, 33 bp, Homo sapien
gtgtagatttaccttcgattttttctccctaac

SEQ ID NO: 62487 - DNA, 33 bp, Homo sapien
agggaaaagttgataactgtccaaaatagatga

SEQ ID NO: 62488 - DNA, 33 bp, Homo sapien
agggaaaagttgataattgtccaaaatagatga

SEQ ID NO: 62489 - DNA, 33 bp, Homo sapien
caatgccttgccttcaatcagtacaactctaat

SEQ ID NO: 62490 - DNA, 33 bp, Homo sapien
caatgccttgccttcattcagtacaactctaat

SEQ ID NO: 62491 - DNA, 33 bp, Homo sapien
acataaacaagcctgaataataaccagctaaca

SEQ ID NO: 62492 - DNA, 33 bp, Homo sapien
acataaacaagcctgagtaataaccagctaaca

SEQ ID NO: 62493 - DNA, 33 bp, Homo sapien
ggagaaaaattataaaactcagtgtcattcagg

SEQ ID NO: 62494 - DNA, 33 bp, Homo sapien
ggagaaaaattataaacctcagtgtcattcagg

SEQ ID NO: 62495 - DNA, 33 bp, Homo sapien
gaagaatcaaccagagcatggaataataagctt

SEQ ID NO: 62496 - DNA, 33 bp, Homo sapien
gaagaatcaaccagagtatggaataataagctt

SEQ ID NO: 62497 - DNA, 33 bp, Homo sapien
tactgtgaacggtgtaaccttttctaagaagaa

SEQ ID NO: 62498 - DNA, 33 bp, Homo sapien
tactgtgaacggtgtacccttttctaagaagaa

SEQ ID NO: 62499 - DNA, 33 bp, Homo sapien
cctagtaaccttaacaagagtgccttttgaaca

SEQ ID NO: 62500 - DNA, 33 bp, Homo sapien
cctagtaaccttaacaggagtgccttttgaaca

SEQ ID NO: 62501 - DNA, 33 bp, Homo sapien
caatgaaattctgataataaccacccagtgttg

SEQ ID NO: 62502 - DNA, 33 bp, Homo sapien
caatgaaattctgatactaaccacccagtgttg

SEQ ID NO: 62503 - DNA, 33 bp, Homo sapien
atggctgcttgtcacaccagaaaagccaaactt

SEQ ID NO: 62504 - DNA, 33 bp, Homo sapien
atggctgcttgtcacatcagaaaagccaaactt

SEQ ID NO: 62505 - DNA, 33 bp, Homo sapien
ctattatcttcccaaagtcttgcattattatct

SEQ ID NO: 62506 - DNA, 33 bp, Homo sapien
ctattatcttcccaaattcttgcattattatct

SEQ ID NO: 62507 - DNA, 33 bp, Homo sapien
aatcattttattactcaaaggcttccaataaac

SEQ ID NO: 62508 - DNA, 33 bp, Homo sapien
aatcattttattactcgaaggcttccaataaac

SEQ ID NO: 62509 - DNA, 33 bp, Homo sapien
acttggtacacagaaactcaattagttggcctc

SEQ ID NO: 62510 - DNA, 33 bp, Homo sapien
acttggtacacagaaagtcaattagttggcctc

SEQ ID NO: 62511 - DNA, 33 bp, Homo sapien
tgtttattgaaggtgaaagaaattagctaagtg

SEQ ID NO: 62512 - DNA, 33 bp, Homo sapien
tgtttattgaaggtgatagaaattagctaagtg

SEQ ID NO: 62513 - DNA, 33 bp, Homo sapien
gtggagcttcagtaaggatcaaagacaaaggaa

SEQ ID NO: 62514 - DNA, 33 bp, Homo sapien
gtggagcttcagtaagtatcaaagacaaaggaa

SEQ ID NO: 62515 - DNA, 33 bp, Homo sapien
cctcaagaaacaaagaacctaaactaattgcaa

SEQ ID NO: 62516 - DNA, 33 bp, Homo sapien
cctcaagaaacaaagagcctaaactaattgcaa

SEQ ID NO: 62517 - DNA, 33 bp, Homo sapien
ccctgtttgttctccaatctgcatgggctcctt

SEQ ID NO: 62518 - DNA, 33 bp, Homo sapien
ccctgtttgttctccagtctgcatgggctcctt

SEQ ID NO: 62519 - DNA, 33 bp, Homo sapien
tgtttacccaagtgcccggaagtgtctacttga

SEQ ID NO: 62520 - DNA, 33 bp, Homo sapien
tgtttacccaagtgcctggaagtgtctacttga

SEQ ID NO: 62521 - DNA, 33 bp, Homo sapien
taggctgtgtcctataaccttgctgtgtggtag

SEQ ID NO: 62522 - DNA, 33 bp, Homo sapien
taggctgtgtcctatagccttgctgtgtggtag

SEQ ID NO: 62523 - DNA, 33 bp, Homo sapien
agtggaagctgtaacacagggaaaagcaacgac

SEQ ID NO: 62524 - DNA, 33 bp, Homo sapien
agtggaagctgtaacatagggaaaagcaacgac

SEQ ID NO: 62525 - DNA, 33 bp, Homo sapien
caacatttccttcagacagccaaagtgaaggtt

SEQ ID NO: 62526 - DNA, 33 bp, Homo sapien
caacatttccttcagagagccaaagtgaaggtt

SEQ ID NO: 62527 - DNA, 33 bp, Homo sapien
cttgaaatcccgatctcaaatgatccacccgcc

SEQ ID NO: 62528 - DNA, 33 bp, Homo sapien
cttgaaatcccgatctgaaatgatccacccgcc

SEQ ID NO: 62529 - DNA, 33 bp, Homo sapien
agatgtagtgagataaaaaaagaggaaagatat

SEQ ID NO: 62530 - DNA, 33 bp, Homo sapien
agatgtagtgagataacaaaagaggaaagatat

SEQ ID NO: 62531 - DNA, 33 bp, Homo sapien
gctgattagcccctaaagaagtcagacttctca

SEQ ID NO: 62532 - DNA, 33 bp, Homo sapien
gctgattagcccctaaggaagtcagacttctca

SEQ ID NO: 62533 - DNA, 33 bp, Homo sapien
atgtatactgacttcaaaaaagggaccttgttc

SEQ ID NO: 62534 - DNA, 33 bp, Homo sapien
atgtatactgacttcacaaaagggaccttgttc

SEQ ID NO: 62535 - DNA, 33 bp, Homo sapien
aactgtctctctgaccaaagtactcttatatct

SEQ ID NO: 62536 - DNA, 33 bp, Homo sapien
aactgtctctctgaccgaagtactcttatatct

SEQ ID NO: 62537 - DNA, 33 bp, Homo sapien
gtttgccttgcagtaactggattttaagtttgg

SEQ ID NO: 62538 - DNA, 33 bp, Homo sapien
gtttgccttgcagtaattggattttaagtttgg

SEQ ID NO: 62539 - DNA, 33 bp, Homo sapien
atagatcatctcaatacaatgtgttaagggttc

SEQ ID NO: 62540 - DNA, 33 bp, Homo sapien
atagatcatctcaatataatgtgttaagggttc

SEQ ID NO: 62541 - DNA, 33 bp, Homo sapien
agaactaatgaaagcacatggcttataggaaaa

SEQ ID NO: 62542 - DNA, 33 bp, Homo sapien
agaactaatgaaagcagatggcttataggaaaa

SEQ ID NO: 62543 - DNA, 33 bp, Homo sapien
gcatcttctgttctacaaaagaataggctgtca

SEQ ID NO: 62544 - DNA, 33 bp, Homo sapien
gcatcttctgttctacgaaagaataggctgtca

SEQ ID NO: 62545 - DNA, 33 bp, Homo sapien
taagtttgagtaaagactacaaggaaatgcata

SEQ ID NO: 62546 - DNA, 33 bp, Homo sapien
taagtttgagtaaagattacaaggaaatgcata

SEQ ID NO: 62547 - DNA, 33 bp, Homo sapien
atgcctgtcctgcccactaatctccatattcct

SEQ ID NO: 62548 - DNA, 33 bp, Homo sapien
atgcctgtcctgcccattaatctccatattcct

SEQ ID NO: 62549 - DNA, 33 bp, Homo sapien
aatgtccagaataggcacatttatagagacagc

SEQ ID NO: 62550 - DNA, 33 bp, Homo sapien
aatgtccagaataggcgcatttatagagacagc

SEQ ID NO: 62551 - DNA, 33 bp, Homo sapien
tgtttacaggcaagccactactctaaaaactac

SEQ ID NO: 62552 - DNA, 33 bp, Homo sapien
tgtttacaggcaagccgctactctaaaaactac

SEQ ID NO: 62553 - DNA, 33 bp, Homo sapien
aatcacagctaaccaggagtagaatctcacatc

SEQ ID NO: 62554 - DNA, 33 bp, Homo sapien
aatcacagctaaccagtagtagaatctcacatc

SEQ ID NO: 62555 - DNA, 33 bp, Homo sapien
taagactgcctttaaacttcatgcaatactgtt

SEQ ID NO: 62556 - DNA, 33 bp, Homo sapien
taagactgcctttaaagttcatgcaatactgtt

SEQ ID NO: 62557 - DNA, 33 bp, Homo sapien
ttcaatgagtactagcaatatcagtgagaaggt

SEQ ID NO: 62558 - DNA, 33 bp, Homo sapien
ttcaatgagtactagcgatatcagtgagaaggt

SEQ ID NO: 62559 - DNA, 33 bp, Homo sapien
gaccaactcaggctgaataaaatttcggaatca

SEQ ID NO: 62560 - DNA, 33 bp, Homo sapien
gaccaactcaggctgagtaaaatttcggaatca

SEQ ID NO: 62561 - DNA, 33 bp, Homo sapien
aaaagccagtcaaagaatccactgattgacatt

SEQ ID NO: 62562 - DNA, 33 bp, Homo sapien
aaaagccagtcaaagattccactgattgacatt

SEQ ID NO: 62563 - DNA, 33 bp, Homo sapien
atacaggtcacttagagtataggcatggaacaa

SEQ ID NO: 62564 - DNA, 33 bp, Homo sapien
atacaggtcacttagattataggcatggaacaa

SEQ ID NO: 62565 - DNA, 33 bp, Homo sapien; identical to SEQ ID NO: 62563

SEQ ID NO: 62566 - DNA, 33 bp, Homo sapien; identical to SEQ ID NO: 62564

SEQ ID NO: 62567 - DNA, 33 bp, Homo sapien
aaactatctttccaaactcaggccaaaccaaag

SEQ ID NO: 62568 - DNA, 33 bp, Homo sapien
aaactatctttccaaattcaggccaaaccaaag

SEQ ID NO: 62569 - DNA, 33 bp, Homo sapien
gaaatatgagtaaaaaggctcaaagtcaaaaca

SEQ ID NO: 62570 - DNA, 33 bp, Homo sapien
gaaatatgagtaaaaatgctcaaagtcaaaaca

SEQ ID NO: 62571 - DNA, 33 bp, Homo sapien
tctacaatcctgaccaaagatggattagtcata

SEQ ID NO: 62572 - DNA, 33 bp, Homo sapien
tctacaatcctgaccagagatggattagtcata

SEQ ID NO: 62573 - DNA, 33 bp, Homo sapien
atagcttacatttattaaactctcaccaggtgt

SEQ ID NO: 62574 - DNA, 33 bp, Homo sapien
atagcttacatttattgaactctcaccaggtgt

SEQ ID NO: 62575 - DNA, 33 bp, Homo sapien
tcaagcgttccttaaccattaagacacctgaac

SEQ ID NO: 62576 - DNA, 33 bp, Homo sapien
tcaagcgttccttaactattaagacacctgaac

SEQ ID NO: 62577 - DNA, 33 bp, Homo sapien
tcatctagaatgatgacggttttgccgaaggtt

SEQ ID NO: 62578 - DNA, 33 bp, Homo sapien
tcatctagaatgatgatggttttgccgaaggtt

SEQ ID NO: 62579 - DNA, 33 bp, Homo sapien
ccccagtggtcgtgagaattggcaagaaaatct

SEQ ID NO: 62580 - DNA, 33 bp, Homo sapien
ccccagtggtcgtgagtattggcaagaaaatct

SEQ ID NO: 62581 - DNA, 33 bp, Homo sapien
aatgttcaaaacttaactcatgccatccctctt

SEQ ID NO: 62582 - DNA, 33 bp, Homo sapien
aatgttcaaaacttaattcatgccatccctctt

SEQ ID NO: 62583 - DNA, 33 bp, Homo sapien
ggtcagttcaataacaggagacaaagattttgg

SEQ ID NO: 62584 - DNA, 33 bp, Homo sapien
ggtcagttcaataacatgagacaaagattttgg

SEQ ID NO: 62585 - DNA, 33 bp, Homo sapien
gagtggagcaagcaaaaagttgtgtaatgggaa

SEQ ID NO: 62586 - DNA, 33 bp, Homo sapien
gagtggagcaagcaaatagttgtgtaatgggaa

SEQ ID NO: 62587 - DNA, 33 bp, Homo sapien
tccagtgagaggcaaaagatattggaaatggaa

SEQ ID NO: 62588 - DNA, 33 bp, Homo sapien
tccagtgagaggcaaaggatattggaaatggaa

SEQ ID NO: 62589 - DNA, 33 bp, Homo sapien
tcaacccttcttctgaacttattatcatttcca

SEQ ID NO: 62590 - DNA, 33 bp, Homo sapien
tcaacccttcttctgagcttattatcatttcca

SEQ ID NO: 62591 - DNA, 33 bp, Homo sapien
aatgacagtagcctccaaaaaagcatcagaaaa

SEQ ID NO: 62592 - DNA, 33 bp, Homo sapien
aatgacagtagcctccgaaaaagcatcagaaaa

SEQ ID NO: 62593 - DNA, 33 bp, Homo sapien
gttatatgctattacactcaagatcaaatacag

SEQ ID NO: 62594 - DNA, 33 bp, Homo sapien
gttatatgctattacagtcaagatcaaatacag

SEQ ID NO: 62595 - DNA, 33 bp, Homo sapien
aatgtatcttgacaaaagattgccatatagata

SEQ ID NO: 62596 - DNA, 33 bp, Homo sapien
aatgtatcttgacaaaggattgccatatagata

SEQ ID NO: 62597 - DNA, 33 bp, Homo sapien
attgcctacctcagaaatgttaattcaatgaga

SEQ ID NO: 62598 - DNA, 33 bp, Homo sapien
attgcctacctcagaagtgttaattcaatgaga

SEQ ID NO: 62599 - DNA, 33 bp, Homo sapien
cacctctaaactttcaaccagttcaatatctaa

SEQ ID NO: 62600 - DNA, 33 bp, Homo sapien
cacctctaaactttcatccagttcaatatctaa

SEQ ID NO: 62601 - DNA, 33 bp, Homo sapien
tttgtgtagccttttcacctttgttggagatca

SEQ ID NO: 62602 - DNA, 33 bp, Homo sapien
tttgtgtagccttttcgcctttgttggagatca

SEQ ID NO: 62603 - DNA, 33 bp, Homo sapien
atagataaaaacttcaagactttgtatttggca

SEQ ID NO: 62604 - DNA, 33 bp, Homo sapien
atagataaaaacttcatgactttgtatttggca

SEQ ID NO: 62605 - DNA, 33 bp, Homo sapien
catgaaagctgtccaaataaatgacacggtccc

SEQ ID NO: 62606 - DNA, 33 bp, Homo sapien
catgaaagctgtccaagtaaatgacacggtccc

SEQ ID NO: 62607 - DNA, 33 bp, Homo sapien
ccgttatctgggcagaccataagaaagccaggt

SEQ ID NO: 62608 - DNA, 33 bp, Homo sapien
ccgttatctgggcagatcataagaaagccaggt

SEQ ID NO: 62609 - DNA, 33 bp, Homo sapien
gtggtgtcattagtctcaacatccagaccaaat

SEQ ID NO: 62610 - DNA, 33 bp, Homo sapien
gtggtgtcattagtcttaacatccagaccaaat

SEQ ID NO: 62611 - DNA, 33 bp, Homo sapien
tcacggcttctgtaataagttatatacggctct

SEQ ID NO: 62612 - DNA, 33 bp, Homo sapien
tcacggcttctgtaatgagttatatacggctct

SEQ ID NO: 62613 - DNA, 33 bp, Homo sapien
atttaatagctattgacgttagctccagaaaag

SEQ ID NO: 62614 - DNA, 33 bp, Homo sapien
atttaatagctattgatgttagctccagaaaag

SEQ ID NO: 62615 - DNA, 33 bp, Homo sapien
aaggatgatacctagacgaggaaagatcagctg

SEQ ID NO: 62616 - DNA, 33 bp, Homo sapien
aaggatgatacctagatgaggaaagatcagctg

SEQ ID NO: 62617 - DNA, 33 bp, Homo sapien
agtaccatgctatcagaatgaataatctgataa

SEQ ID NO: 62618 - DNA, 33 bp, Homo sapien
agtaccatgctatcaggatgaataatctgataa

SEQ ID NO: 62619 - DNA, 33 bp, Homo sapien
aatctgtgaaaccacccatgcgtactcagggac

SEQ ID NO: 62620 - DNA, 33 bp, Homo sapien
aatctgtgaaaccacctatgcgtactcagggac

SEQ ID NO: 62621 - DNA, 33 bp, Homo sapien
atttcacagtttccacagattagaagttcaatg

SEQ ID NO: 62622 - DNA, 33 bp, Homo sapien
atttcacagtttccacggattagaagttcaatg

SEQ ID NO: 62623 - DNA, 33 bp, Homo sapien
gctgaccctctaaatacggcaacctaatgggaa

SEQ ID NO: 62624 - DNA, 33 bp, Homo sapien
gctgaccctctaaatatggcaacctaatgggaa

SEQ ID NO: 62625 - DNA, 33 bp, Homo sapien
attcgttgaatgaatacgaatgttttggtgact

SEQ ID NO: 62626 - DNA, 33 bp, Homo sapien
attcgttgaatgaatatgaatgttttggtgact

SEQ ID NO: 62627 - DNA, 33 bp, Homo sapien
ttgtaaacctagtggcaaatgatatttccgatc

SEQ ID NO: 62628 - DNA, 33 bp, Homo sapien
ttgtaaacctagtggcgaatgatatttccgatc

SEQ ID NO: 62629 - DNA, 33 bp, Homo sapien
atattctgtggtatcacggctaaattcaagata

SEQ ID NO: 62630 - DNA, 33 bp, Homo sapien
atattctgtggtatcatggctaaattcaagata

SEQ ID NO: 62631 - DNA, 33 bp, Homo sapien
tgaagacattgagggtaaaggggttaagcgact

SEQ ID NO: 62632 - DNA, 33 bp, Homo sapien
tgaagacattgagggttaaggggttaagcgact

SEQ ID NO: 62633 - DNA, 33 bp, Homo sapien
tctgcttcctttttgaaattataccagtcacaa

SEQ ID NO: 62634 - DNA, 33 bp, Homo sapien
tctgcttcctttttgagattataccagtcacaa

SEQ ID NO: 62635 - DNA, 33 bp, Homo sapien
ctcactacatctgttacacaatgatttatctct

SEQ ID NO: 62636 - DNA, 33 bp, Homo sapien
ctcactacatctgttatacaatgatttatctct

SEQ ID NO: 62637 - DNA, 33 bp, Homo sapien
caatgtctgttatttcaatacaatgttaaaacc

SEQ ID NO: 62638 - DNA, 33 bp, Homo sapien
caatgtctgttatttcgatacaatgttaaaacc

SEQ ID NO: 62639 - DNA, 33 bp, Homo sapien
aggaaaatcaatctgcaatagtaaccaaatacc

SEQ ID NO: 62640 - DNA, 33 bp, Homo sapien
aggaaaatcaatctgccatagtaaccaaatacc

SEQ ID NO: 62641 - DNA, 33 bp, Homo sapien
gttctgacgggggtgaagcctgttgtgtttgag

SEQ ID NO: 62642 - DNA, 33 bp, Homo sapien
gttctgacgggggtgaggcctgttgtgtttgag

SEQ ID NO: 62643 - DNA, 33 bp, Homo sapien
ctcagtggctaataaaccagttgttgaaaagtt

SEQ ID NO: 62644 - DNA, 33 bp, Homo sapien
ctcagtggctaataaatcagttgttgaaaagtt

SEQ ID NO: 62645 - DNA, 33 bp, Homo sapien
caatcaagagtaaacacagtaaactcatagaac

SEQ ID NO: 62646 - DNA, 33 bp, Homo sapien
caatcaagagtaaacatagtaaactcatagaac

SEQ ID NO: 62647 - DNA, 33 bp, Homo sapien
cagcaggggcctcatgaaggaagcagcatttaa

SEQ ID NO: 62648 - DNA, 33 bp, Homo sapien
cagcaggggcctcatggaggaagcagcatttaa

SEQ ID NO: 62649 - DNA, 33 bp, Homo sapien
ctctcattggcctagacctaattcctatagcaa

SEQ ID NO: 62650 - DNA, 33 bp, Homo sapien
ctctcattggcctagatctaattcctatagcaa

SEQ ID NO: 62651 - DNA, 33 bp, Homo sapien
gttagtacattatgcaaactattgaaagcaatg

SEQ ID NO: 62652 - DNA, 33 bp, Homo sapien
gttagtacattatgcacactattgaaagcaatg

SEQ ID NO: 62653 - DNA, 33 bp, Homo sapien
aaagtgaaaaatgtgaaaagagactttgaaggc

SEQ ID NO: 62654 - DNA, 33 bp, Homo sapien
aaagtgaaaaatgtgagaagagactttgaaggc

SEQ ID NO: 62655 - DNA, 33 bp, Homo sapien
aacatataccaatttcaccttcttacatggttg

SEQ ID NO: 62656 - DNA, 33 bp, Homo sapien
aacatataccaatttccccttcttacatggttg

SEQ ID NO: 62657 - DNA, 33 bp, Homo sapien
gacaagaatatttataagaatgtgaagtaccta

SEQ ID NO: 62658 - DNA, 33 bp, Homo sapien
gacaagaatatttataggaatgtgaagtaccta

SEQ ID NO: 62659 - DNA, 33 bp, Homo sapien
tggggaatgaatgctacagtcctgaagtggggg

SEQ ID NO: 62660 - DNA, 33 bp, Homo sapien
tggggaatgaatgctatagtcctgaagtggggg

SEQ ID NO: 62661 - DNA, 33 bp, Homo sapien
ttaggggaagtaggtcccttcagctgtgcttag

SEQ ID NO: 62662 - DNA, 33 bp, Homo sapien
ttaggggaagtaggtctcttcagctgtgcttag

SEQ ID NO: 62663 - DNA, 33 bp, Homo sapien
tttgtttctctgaaccgcagtataaccctgtct

SEQ ID NO: 62664 - DNA, 33 bp, Homo sapien
tttgtttctctgaacctcagtataaccctgtct

SEQ ID NO: 62665 - DNA, 33 bp, Homo sapien
taagcagtgctttttcaaaataacagtacaata

SEQ ID NO: 62666 - DNA, 33 bp, Homo sapien
taagcagtgctttttccaaataacagtacaata

SEQ ID NO: 62667 - DNA, 33 bp, Homo sapien
tagagttttatcggcagagtctgaaaccccact

SEQ ID NO: 62668 - DNA, 33 bp, Homo sapien
tagagttttatcggcatagtctgaaaccccact

SEQ ID NO: 62669 - DNA, 33 bp, Homo sapien
gctgactatagccttcaactgggttcaagtgat

SEQ ID NO: 62670 - DNA, 33 bp, Homo sapien
gctgactatagccttcgactgggttcaagtgat

SEQ ID NO: 62671 - DNA, 33 bp, Homo sapien
ttaaaatagaatacaaataagatggcagacaag

SEQ ID NO: 62672 - DNA, 33 bp, Homo sapien
ttaaaatagaatacaagtaagatggcagacaag

SEQ ID NO: 62673 - DNA, 33 bp, Homo sapien
tggtgtcagacttaccagacatttgtttgtagt

SEQ ID NO: 62674 - DNA, 33 bp, Homo sapien
tggtgtcagacttaccggacatttgtttgtagt

SEQ ID NO: 62675 - DNA, 33 bp, Homo sapien
gtctcttactagagaccagtttctccattgcag

SEQ ID NO: 62676 - DNA, 33 bp, Homo sapien
gtctcttactagagacgagtttctccattgcag

SEQ ID NO: 62677 - DNA, 33 bp, Homo sapien
gaaaattaaacatacaaaggtacacacacatat

SEQ ID NO: 62678 - DNA, 33 bp, Homo sapien
gaaaattaaacatacagaggtacacacacatat

SEQ ID NO: 62679 - DNA, 33 bp, Homo sapien
tccagtgtgacttcaaggtaggaaggataccca

SEQ ID NO: 62680 - DNA, 33 bp, Homo sapien
tccagtgtgacttcaatgtaggaaggataccca

SEQ ID NO: 62681 - DNA, 33 bp, Homo sapien
acaaaaccttgaagaactgctttaactttgaaa

SEQ ID NO: 62682 - DNA, 33 bp, Homo sapien
acaaaaccttgaagaattgctttaactttgaaa

SEQ ID NO: 62683 - DNA, 33 bp, Homo sapien
aagaagacataattgacgaaggaaacccaaata

SEQ ID NO: 62684 - DNA, 33 bp, Homo sapien
aagaagacataattgaggaaggaaacccaaata

SEQ ID NO: 62685 - DNA, 33 bp, Homo sapien
ccacattctatttccaaattgtttaatgagcat

SEQ ID NO: 62686 - DNA, 33 bp, Homo sapien
ccacattctatttccacattgtttaatgagcat

SEQ ID NO: 62687 - DNA, 33 bp, Homo sapien
tttttcagttcaatcacctttgccttaactcct

SEQ ID NO: 62688 - DNA, 33 bp, Homo sapien
tttttcagttcaatcatctttgccttaactcct

SEQ ID NO: 62689 - DNA, 33 bp, Homo sapien
ggagaccagaccttccacgtaatatggaggatt

SEQ ID NO: 62690 - DNA, 33 bp, Homo sapien
ggagaccagaccttccgcgtaatatggaggatt

SEQ ID NO: 62691 - DNA, 33 bp, Homo sapien
ttttagttgtatcattaaaaaaatgtcactggt

SEQ ID NO: 62692 - DNA, 33 bp, Homo sapien
ttttagttgtatcattgaaaaaatgtcactggt

SEQ ID NO: 62693 - DNA, 33 bp, Homo sapien
atagcaaccacatcaaacctgaacactttcttc

SEQ ID NO: 62694 - DNA, 33 bp, Homo sapien
atagcaaccacatcaagcctgaacactttcttc

SEQ ID NO: 62695 - DNA, 33 bp, Homo sapien
ttcggtactgagaaataaaattgaatgacaaac

SEQ ID NO: 62696 - DNA, 33 bp, Homo sapien
ttcggtactgagaaatcaaattgaatgacaaac

SEQ ID NO: 62697 - DNA, 33 bp, Homo sapien
ccaccctgaaacagaaccaatagcggctgatct

SEQ ID NO: 62698 - DNA, 33 bp, Homo sapien
ccaccctgaaacagaatcaatagcggctgatct

SEQ ID NO: 62699 - DNA, 33 bp, Homo sapien
tgttttagtttctaaacgcatgaggaattttta

SEQ ID NO: 62700 - DNA, 33 bp, Homo sapien
tgttttagtttctaaatgcatgaggaattttta

SEQ ID NO: 62701 - DNA, 33 bp, Homo sapien
ctatctaaaagagtcaaacttctaaaggcagag

SEQ ID NO: 62702 - DNA, 33 bp, Homo sapien
ctatctaaaagagtcagacttctaaaggcagag

SEQ ID NO: 62703 - DNA, 33 bp, Homo sapien
cttcatgagagttaaactgtcctggcatccttg

SEQ ID NO: 62704 - DNA, 33 bp, Homo sapien
cttcatgagagttaaagtgtcctggcatccttg

SEQ ID NO: 62705 - DNA, 33 bp, Homo sapien
atggtgaacagagaaaatggtacacgtggagtt

SEQ ID NO: 62706 - DNA, 33 bp, Homo sapien
atggtgaacagagaaagtggtacacgtggagtt

SEQ ID NO: 62707 - DNA, 33 bp, Homo sapien
acactgttgctgtcaactcaaggagattgtaaa

SEQ ID NO: 62708 - DNA, 33 bp, Homo sapien
acactgttgctgtcaattcaaggagattgtaaa

SEQ ID NO: 62709 - DNA, 33 bp, Homo sapien
agagaagggaaaaaaagtctgagtagcagcaag

SEQ ID NO: 62710 - DNA, 33 bp, Homo sapien
agagaagggaaaaaaattctgagtagcagcaag

SEQ ID NO: 62711 - DNA, 33 bp, Homo sapien
agcttagcactgtggaaaaagctgttgccatag

SEQ ID NO: 62712 - DNA, 33 bp, Homo sapien
agcttagcactgtggataaagctgttgccatag

SEQ ID NO: 62713 - DNA, 33 bp, Homo sapien
ggatattgccacttgacaaaggattatttactg

SEQ ID NO: 62714 - DNA, 33 bp, Homo sapien
ggatattgccacttgagaaaggattatttactg

SEQ ID NO: 62715 - DNA, 33 bp, Homo sapien
tgttgagattcacaagccaggagtaatgaggtg

SEQ ID NO: 62716 - DNA, 33 bp, Homo sapien
tgttgagattcacaaggcaggagtaatgaggtg

SEQ ID NO: 62717 - DNA, 33 bp, Homo sapien
gaaatgggaatgtgagaattagaagaccttcca

SEQ ID NO: 62718 - DNA, 33 bp, Homo sapien
gaaatgggaatgtgaggattagaagaccttcca

SEQ ID NO: 62719 - DNA, 33 bp, Homo sapien
caacggggaccgagacacaagaaggatgacttt

SEQ ID NO: 62720 - DNA, 33 bp, Homo sapien
caacggggaccgagacgcaagaaggatgacttt

SEQ ID NO: 62721 - DNA, 33 bp, Homo sapien
actctgtcaacttgcacgagctgtgggaagccc

SEQ ID NO: 62722 - DNA, 33 bp, Homo sapien
actctgtcaacttgcaggagctgtgggaagccc

SEQ ID NO: 62723 - DNA, 33 bp, Homo sapien
gatatgtttgtgtgcacagttaggttctagatg

SEQ ID NO: 62724 - DNA, 33 bp, Homo sapien
gatatgtttgtgtgcatagttaggttctagatg

SEQ ID NO: 62725 - DNA, 33 bp, Homo sapien
aaaaaaattctagcaaataggagactgagaaaa

SEQ ID NO: 62726 - DNA, 33 bp, Homo sapien
aaaaaaattctagcaagtaggagactgagaaaa

SEQ ID NO: 62727 - DNA, 33 bp, Homo sapien
aggtagtgcctcaggactatgacaacccccatg

SEQ ID NO: 62728 - DNA, 33 bp, Homo sapien
aggtagtgcctcaggagtatgacaacccccatg

SEQ ID NO: 62729 - DNA, 33 bp, Homo sapien
cttttgtctcttcatcacatttcaatgttctaa

SEQ ID NO: 62730 - DNA, 33 bp, Homo sapien
cttttgtctcttcatcccatttcaatgttctaa

SEQ ID NO: 62731 - DNA, 33 bp, Homo sapien
aggaagcactaaagaccacaggtttatatctga

SEQ ID NO: 62732 - DNA, 33 bp, Homo sapien
aggaagcactaaagacgacaggtttatatctga

SEQ ID NO: 62733 - DNA, 33 bp, Homo sapien
cattcggtttccccaactccaatgcctccttag

SEQ ID NO: 62734 - DNA, 33 bp, Homo sapien
cattcggtttccccaattccaatgcctccttag

SEQ ID NO: 62735 - DNA, 33 bp, Homo sapien
tagaatatgtccacaacgtaggcttgccctgta

SEQ ID NO: 62736 - DNA, 33 bp, Homo sapien
tagaatatgtccacaatgtaggcttgccctgta

SEQ ID NO: 62737 - DNA, 33 bp, Homo sapien
aaaccaagtattttccagacaagagttctagaa

SEQ ID NO: 62738 - DNA, 33 bp, Homo sapien
aaaccaagtattttccggacaagagttctagaa

SEQ ID NO: 62739 - DNA, 33 bp, Homo sapien
tcacttctcatgatgcagattttgatgcaattt

SEQ ID NO: 62740 - DNA, 33 bp, Homo sapien
tcacttctcatgatgcggattttgatgcaattt

SEQ ID NO: 62741 - DNA, 33 bp, Homo sapien
tatataactcactacccaatatgtgcttttcac

SEQ ID NO: 62742 - DNA, 33 bp, Homo sapien
tatataactcactacctaatatgtgcttttcac

SEQ ID NO: 62743 - DNA, 33 bp, Homo sapien
aaatagtcacagaaatcatgttatcagactggc

SEQ ID NO: 62744 - DNA, 33 bp, Homo sapien
aaatagtcacagaaattatgttatcagactggc

SEQ ID NO: 62745 - DNA, 33 bp, Homo sapien
aaacctgtgtgtaataagcaaagggtatataaa

SEQ ID NO: 62746 - DNA, 33 bp, Homo sapien
aaacctgtgtgtaataggcaaagggtatataaa

SEQ ID NO: 62747 - DNA, 33 bp, Homo sapien
gaaatctctgtgtaagacctaaattccatcatg

SEQ ID NO: 62748 - DNA, 33 bp, Homo sapien
gaaatctctgtgtaaggcctaaattccatcatg

SEQ ID NO: 62749 - DNA, 33 bp, Homo sapien
aagacagaaggtactcaataataaaatacgctt

SEQ ID NO: 62750 - DNA, 33 bp, Homo sapien
aagacagaaggtactcgataataaaatacgctt

SEQ ID NO: 62751 - DNA, 33 bp, Homo sapien
aggtcacacggaagaacaaggatagccctgtcc

SEQ ID NO: 62752 - DNA, 33 bp, Homo sapien
aggtcacacggaagaataaggatagccctgtcc

SEQ ID NO: 62753 - DNA, 33 bp, Homo sapien
aattggagtgatgtaacactgaagacattttct

SEQ ID NO: 62754 - DNA, 33 bp, Homo sapien
aattggagtgatgtaatactgaagacattttct

SEQ ID NO: 62755 - DNA, 33 bp, Homo sapien
acaagggaaatgtaaaagtggaacaaagcagta

SEQ ID NO: 62756 - DNA, 33 bp, Homo sapien
acaagggaaatgtaaaggtggaacaaagcagta

SEQ ID NO: 62757 - DNA, 33 bp, Homo sapien
ttcctttcttccttcaaagatgggtatctgaga

SEQ ID NO: 62758 - DNA, 33 bp, Homo sapien
ttcctttcttccttcacagatgggtatctgaga

SEQ ID NO: 62759 - DNA, 33 bp, Homo sapien
atggtaactatgcagacatttccaagcaattga

SEQ ID NO: 62760 - DNA, 33 bp, Homo sapien
atggtaactatgcagagatttccaagcaattga

SEQ ID NO: 62761 - DNA, 33 bp, Homo sapien
gcaattatttcttcacagagtgttaacatttta

SEQ ID NO: 62762 - DNA, 33 bp, Homo sapien
gcaattatttcttcacggagtgttaacatttta

SEQ ID NO: 62763 - DNA, 33 bp, Homo sapien
tacagtgatttcatctaaaagctgaagtcagag

SEQ ID NO: 62764 - DNA, 33 bp, Homo sapien
tacagtgatttcatcttaaagctgaagtcagag

SEQ ID NO: 62765 - DNA, 33 bp, Homo sapien
cttctctgtgaaagacaatatcaagggaatgaa

SEQ ID NO: 62766 - DNA, 33 bp, Homo sapien
cttctctgtgaaagacgatatcaagggaatgaa

SEQ ID NO: 62767 - DNA, 33 bp, Homo sapien
acaaatggtgcacaaacaactggactgccacat

SEQ ID NO: 62768 - DNA, 33 bp, Homo sapien
acaaatggtgcacaaataactggactgccacat

SEQ ID NO: 62769 - DNA, 33 bp, Homo sapien
gattttattctaagcacgatgggaaaccactgg

SEQ ID NO: 62770 - DNA, 33 bp, Homo sapien
gattttattctaagcatgatgggaaaccactgg

SEQ ID NO: 62771 - DNA, 33 bp, Homo sapien
tcttggcttgttggtccaggtctcaatgtttag

SEQ ID NO: 62772 - DNA, 33 bp, Homo sapien
tcttggcttgttggtctaggtctcaatgtttag

SEQ ID NO: 62773 - DNA, 33 bp, Homo sapien
gcttctgcatattaatcagttgagcatttacag

SEQ ID NO: 62774 - DNA, 33 bp, Homo sapien
gcttctgcatattaattagttgagcatttacag

SEQ ID NO: 62775 - DNA, 33 bp, Homo sapien
agctacagtgacttggaacaaacacagctgaga

SEQ ID NO: 62776 - DNA, 33 bp, Homo sapien
agctacagtgacttgggacaaacacagctgaga

SEQ ID NO: 62777 - DNA, 33 bp, Homo sapien
tcatttgttcctctgccgaggcttgttttcatg

SEQ ID NO: 62778 - DNA, 33 bp, Homo sapien
tcatttgttcctctgctgaggcttgttttcatg

SEQ ID NO: 62779 - DNA, 33 bp, Homo sapien
gagatatttgggctaaatcaccttcttaatcca

SEQ ID NO: 62780 - DNA, 33 bp, Homo sapien
gagatatttgggctaagtcaccttcttaatcca

SEQ ID NO: 62781 - DNA, 33 bp, Homo sapien
agcagccagaggtctaaatgtcatttgttcatt

SEQ ID NO: 62782 - DNA, 33 bp, Homo sapien
agcagccagaggtctagatgtcatttgttcatt

SEQ ID NO: 62783 - DNA, 33 bp, Homo sapien
ggcggcctacagtgaacctgaatatagttactg

SEQ ID NO: 62784 - DNA, 33 bp, Homo sapien
ggcggcctacagtgaagctgaatatagttactg

SEQ ID NO: 62785 - DNA, 33 bp, Homo sapien
aggactgaatgatataccatcccgaaatatgct

SEQ ID NO: 62786 - DNA, 33 bp, Homo sapien
aggactgaatgatatagcatcccgaaatatgct

SEQ ID NO: 62787 - DNA, 33 bp, Homo sapien
ccagggagggttcatactaggagtcatccttct

SEQ ID NO: 62788 - DNA, 33 bp, Homo sapien
ccagggagggttcatagtaggagtcatccttct

SEQ ID NO: 62789 - DNA, 33 bp, Homo sapien
agtgaaatgactcagactagagttcagaaaaaa

SEQ ID NO: 62790 - DNA, 33 bp, Homo sapien
agtgaaatgactcagattagagttcagaaaaaa

SEQ ID NO: 62791 - DNA, 33 bp, Homo sapien
ataaggaagaagacacgaaataatgccataact

SEQ ID NO: 62792 - DNA, 33 bp, Homo sapien
ataaggaagaagacactaaataatgccataact

SEQ ID NO: 62793 - DNA, 33 bp, Homo sapien
tccttgtaggtctttaaggagtctccacactgt

SEQ ID NO: 62794 - DNA, 33 bp, Homo sapien
tccttgtaggtctttacggagtctccacactgt

SEQ ID NO: 62795 - DNA, 33 bp, Homo sapien
tagcatagagatcaagacagaggcactaaaaga

SEQ ID NO: 62796 - DNA, 33 bp, Homo sapien
tagcatagagatcaaggcagaggcactaaaaga

SEQ ID NO: 62797 - DNA, 33 bp, Homo sapien
aggagtatagtacaaaatctcatgaggtcatat

SEQ ID NO: 62798 - DNA, 33 bp, Homo sapien
aggagtatagtacaaagtctcatgaggtcatat

SEQ ID NO: 62799 - DNA, 33 bp, Homo sapien
tatatctttgatttgacaagccctcaattatga

SEQ ID NO: 62800 - DNA, 33 bp, Homo sapien
tatatctttgatttgataagccctcaattatga

SEQ ID NO: 62801 - DNA, 33 bp, Homo sapien
agagacgttagtaatgcaatcaactcccttaca

SEQ ID NO: 62802 - DNA, 33 bp, Homo sapien
agagacgttagtaatggaatcaactcccttaca

SEQ ID NO: 62803 - DNA, 33 bp, Homo sapien
gaagtctcaacaaagacgtagaagagataagca

SEQ ID NO: 62804 - DNA, 33 bp, Homo sapien
gaagtctcaacaaagatgtagaagagataagca

SEQ ID NO: 62805 - DNA, 33 bp, Homo sapien
gagagggtacctggaaattagaaagccaacgtg

SEQ ID NO: 62806 - DNA, 33 bp, Homo sapien
gagagggtacctggaagttagaaagccaacgtg

SEQ ID NO: 62807 - DNA, 33 bp, Homo sapien
atgtagccctactccacagcaaagtcttcttga

SEQ ID NO: 62808 - DNA, 33 bp, Homo sapien
atgtagccctactccatagcaaagtcttcttga

SEQ ID NO: 62809 - DNA, 33 bp, Homo sapien
atgacagttcataggaagtcctgtaaaccctac

SEQ ID NO: 62810 - DNA, 33 bp, Homo sapien
atgacagttcataggatgtcctgtaaaccctac

SEQ ID NO: 62811 - DNA, 33 bp, Homo sapien
ttggcagtgaaactgaaagctaatactgtgagt

SEQ ID NO: 62812 - DNA, 33 bp, Homo sapien
ttggcagtgaaactgacagctaatactgtgagt

SEQ ID NO: 62813 - DNA, 33 bp, Homo sapien
tgaatgatgttgacttcaagcatacattacaaa

SEQ ID NO: 62814 - DNA, 33 bp, Homo sapien
tgaatgatgttgactttaagcatacattacaaa

SEQ ID NO: 62815 - DNA, 33 bp, Homo sapien
tttttctcataaaagacagctttgcaagcccac

SEQ ID NO: 62816 - DNA, 33 bp, Homo sapien
tttttctcataaaagatagctttgcaagcccac

SEQ ID NO: 62817 - DNA, 33 bp, Homo sapien
ctctagtatcacatgacgtaacaggccctaaag

SEQ ID NO: 62818 - DNA, 33 bp, Homo sapien
ctctagtatcacatgatgtaacaggccctaaag

SEQ ID NO: 62819 - DNA, 33 bp, Homo sapien
cttttactctcatgacacgaactagtttttcag

SEQ ID NO: 62820 - DNA, 33 bp, Homo sapien
cttttactctcatgactcgaactagtttttcag

SEQ ID NO: 62821 - DNA, 33 bp, Homo sapien
accactttaaccttaaaagcaaaagatggtcaa

SEQ ID NO: 62822 - DNA, 33 bp, Homo sapien
accactttaaccttaagagcaaaagatggtcaa

SEQ ID NO: 62823 - DNA, 33 bp, Homo sapien
aaacacatagaagcatcaatatatgaaagtgtt

SEQ ID NO: 62824 - DNA, 33 bp, Homo sapien
aaacacatagaagcatgaatatatgaaagtgtt

SEQ ID NO: 62825 - DNA, 33 bp, Homo sapien
tggcctggcattcaaaatcctgtgtaataaggc

SEQ ID NO: 62826 - DNA, 33 bp, Homo sapien
tggcctggcattcaaagtcctgtgtaataaggc

SEQ ID NO: 62827 - DNA, 33 bp, Homo sapien
attgcaaaatgtgtcaagtacagaaaaattcca

SEQ ID NO: 62828 - DNA, 33 bp, Homo sapien
attgcaaaatgtgtcaggtacagaaaaattcca

SEQ ID NO: 62829 - DNA, 33 bp, Homo sapien
attatctggagggaggaaaaccatatttagaag

SEQ ID NO: 62830 - DNA, 33 bp, Homo sapien
attatctggagggagggaaaccatatttagaag

SEQ ID NO: 62831 - DNA, 33 bp, Homo sapien
gtttgctaagtgagaacaccgtgtacaatggaa

SEQ ID NO: 62832 - DNA, 33 bp, Homo sapien
gtttgctaagtgagaataccgtgtacaatggaa

SEQ ID NO: 62833 - DNA, 33 bp, Homo sapien
gagagactgtcataatcatctctgtactcctag

SEQ ID NO: 62834 - DNA, 33 bp, Homo sapien
gagagactgtcataattatctctgtactcctag

SEQ ID NO: 62835 - DNA, 33 bp, Homo sapien
gggtcagtaacaactcacttttcaacactaagc

SEQ ID NO: 62836 - DNA, 33 bp, Homo sapien
gggtcagtaacaactctcttttcaacactaagc

SEQ ID NO: 62837 - DNA, 33 bp, Homo sapien
cctcaaaaagaattagaacaccaactgattata

SEQ ID NO: 62838 - DNA, 33 bp, Homo sapien
cctcaaaaagaattaggacaccaactgattata

SEQ ID NO: 62839 - DNA, 33 bp, Homo sapien
cctgattaggagtaagcatcctaaggtcagaaa

SEQ ID NO: 62840 - DNA, 33 bp, Homo sapien
cctgattaggagtaagtatcctaaggtcagaaa

SEQ ID NO: 62841 - DNA, 33 bp, Homo sapien
atatttcctatacaaaatgtggacaaaagaata

SEQ ID NO: 62842 - DNA, 33 bp, Homo sapien
atatttcctatacaaagtgtggacaaaagaata

SEQ ID NO: 62843 - DNA, 33 bp, Homo sapien
ttaagtttcaaggataaatagataagtctacac

SEQ ID NO: 62844 - DNA, 33 bp, Homo sapien
ttaagtttcaaggatagatagataagtctacac

SEQ ID NO: 62845 - DNA, 33 bp, Homo sapien
agatgagaagataggactatatgtttttcaaag

SEQ ID NO: 62846 - DNA, 33 bp, Homo sapien
agatgagaagataggagtatatgtttttcaaag

SEQ ID NO: 62847 - DNA, 33 bp, Homo sapien
actggaagctcacttaacaaatacaatctcatt

SEQ ID NO: 62848 - DNA, 33 bp, Homo sapien
actggaagctcacttaccaaatacaatctcatt

SEQ ID NO: 62849 - DNA, 33 bp, Homo sapien
aaatagatacaaacaaatggtaaggcagcaaat

SEQ ID NO: 62850 - DNA, 33 bp, Homo sapien
aaatagatacaaacaagtggtaaggcagcaaat

SEQ ID NO: 62851 - DNA, 33 bp, Homo sapien
atttaaaacaaaatatcagaagactgatcccaa

SEQ ID NO: 62852 - DNA, 33 bp, Homo sapien
atttaaaacaaaatattagaagactgatcccaa

SEQ ID NO: 62853 - DNA, 33 bp, Homo sapien
tgtgagcttaattcaaagaaacttgcttctgaa

SEQ ID NO: 62854 - DNA, 33 bp, Homo sapien
tgtgagcttaattcaaggaaacttgcttctgaa

SEQ ID NO: 62855 - DNA, 33 bp, Homo sapien
ttttcctgccactgcactcttactaaatttttt

SEQ ID NO: 62856 - DNA, 33 bp, Homo sapien
ttttcctgccactgcattcttactaaatttttt

SEQ ID NO: 62857 - DNA, 33 bp, Homo sapien
acctagcccttttgcaccccatggtactcatca

SEQ ID NO: 62858 - DNA, 33 bp, Homo sapien
acctagcccttttgcatcccatggtactcatca

SEQ ID NO: 62859 - DNA, 33 bp, Homo sapien
tttgtgcccttcactcccctcggtctcatacag

SEQ ID NO: 62860 - DNA, 33 bp, Homo sapien
tttgtgcccttcactctcctcggtctcatacag

SEQ ID NO: 62861 - DNA, 33 bp, Homo sapien
tttctgtaaatcttgaagcaggcccctccaagg

SEQ ID NO: 62862 - DNA, 33 bp, Homo sapien
tttctgtaaatcttgacgcaggcccctccaagg

SEQ ID NO: 62863 - DNA, 33 bp, Homo sapien
gtgtaagttccctgtaagtctgaaccaagccta

SEQ ID NO: 62864 - DNA, 33 bp, Homo sapien
gtgtaagttccctgtaggtctgaaccaagccta

SEQ ID NO: 62865 - DNA, 33 bp, Homo sapien
aaagcctgggaaagtgaaatgtccctgaggaaa

SEQ ID NO: 62866 - DNA, 33 bp, Homo sapien
aaagcctgggaaagtggaatgtccctgaggaaa

SEQ ID NO: 62867 - DNA, 33 bp, Homo sapien
tcactttactgtaaaaaatccttcaatggaaaa

SEQ ID NO: 62868 - DNA, 33 bp, Homo sapien
tcactttactgtaaaacatccttcaatggaaaa

SEQ ID NO: 62869 - DNA, 33 bp, Homo sapien
catgctaagaagtttaaacataaaatcaatagc

SEQ ID NO: 62870 - DNA, 33 bp, Homo sapien
catgctaagaagtttagacataaaatcaatagc

SEQ ID NO: 62871 - DNA, 33 bp, Homo sapien
agacaagataacaaagaagtcagatcaaagaat

SEQ ID NO: 62872 - DNA, 33 bp, Homo sapien
agacaagataacaaaggagtcagatcaaagaat

SEQ ID NO: 62873 - DNA, 33 bp, Homo sapien
catatcatgacagtacgcaaatgccaggactag

SEQ ID NO: 62874 - DNA, 33 bp, Homo sapien
catatcatgacagtactcaaatgccaggactag

SEQ ID NO: 62875 - DNA, 33 bp, Homo sapien
acatggaaaatgcaaccgaacacattagaaggt

SEQ ID NO: 62876 - DNA, 33 bp, Homo sapien
acatggaaaatgcaactgaacacattagaaggt

SEQ ID NO: 62877 - DNA, 33 bp, Homo sapien
ctcaagtggtattgtaactaataggaattcaat

SEQ ID NO: 62878 - DNA, 33 bp, Homo sapien
ctcaagtggtattgtatctaataggaattcaat

SEQ ID NO: 62879 - DNA, 33 bp, Homo sapien
cagatcagtgaaagaacaagctcctgttgtttt

SEQ ID NO: 62880 - DNA, 33 bp, Homo sapien
cagatcagtgaaagaataagctcctgttgtttt

SEQ ID NO: 62881 - DNA, 33 bp, Homo sapien
aaaggaatgaccaacccgaagaagagtgttttc

SEQ ID NO: 62882 - DNA, 33 bp, Homo sapien
aaaggaatgaccaaccggaagaagagtgttttc

SEQ ID NO: 62883 - DNA, 33 bp, Homo sapien
tgttacatttgcaaaacttttagcatggccacc

SEQ ID NO: 62884 - DNA, 33 bp, Homo sapien
tgttacatttgcaaaatttttagcatggccacc

SEQ ID NO: 62885 - DNA, 33 bp, Homo sapien
cacaggtgaaacattacccaaactgttgagaac

SEQ ID NO: 62886 - DNA, 33 bp, Homo sapien
cacaggtgaaacattatccaaactgttgagaac

SEQ ID NO: 62887 - DNA, 33 bp, Homo sapien
acctgaaactgtacaagtactagacaaaaacat

SEQ ID NO: 62888 - DNA, 33 bp, Homo sapien
acctgaaactgtacaattactagacaaaaacat

SEQ ID NO: 62889 - DNA, 33 bp, Homo sapien
acttgtactaagttaactgacattttaattgcc

SEQ ID NO: 62890 - DNA, 33 bp, Homo sapien
acttgtactaagttaattgacattttaattgcc

SEQ ID NO: 62891 - DNA, 33 bp, Homo sapien
tttaccaggatctcaaatagttaagggctgggt

SEQ ID NO: 62892 - DNA, 33 bp, Homo sapien
tttaccaggatctcaagtagttaagggctgggt

SEQ ID NO: 62893 - DNA, 33 bp, Homo sapien
actatatatgccacagaaatgattaggttaggc

SEQ ID NO: 62894 - DNA, 33 bp, Homo sapien
actatatatgccacagtaatgattaggttaggc

SEQ ID NO: 62895 - DNA, 33 bp, Homo sapien
aactcaaaagtgagatgaggaggatgcagctga

SEQ ID NO: 62896 - DNA, 33 bp, Homo sapien
aactcaaaagtgagattaggaggatgcagctga

SEQ ID NO: 62897 - DNA, 33 bp, Homo sapien
caggctttacagtgaccagtgagttgatgtatt

SEQ ID NO: 62898 - DNA, 33 bp, Homo sapien
caggctttacagtgacgagtgagttgatgtatt

SEQ ID NO: 62899 - DNA, 33 bp, Homo sapien
taagtcagaatcagacacattttattccgctta

SEQ ID NO: 62900 - DNA, 33 bp, Homo sapien
taagtcagaatcagacgcattttattccgctta

SEQ ID NO: 62901 - DNA, 33 bp, Homo sapien
acggcactactaaagcaaagaaatcctttacta

SEQ ID NO: 62902 - DNA, 33 bp, Homo sapien
acggcactactaaagcgaagaaatcctttacta

SEQ ID NO: 62903 - DNA, 33 bp, Homo sapien
aaaggccaacatgaccaggatgtacaaagcaaa

SEQ ID NO: 62904 - DNA, 33 bp, Homo sapien
aaaggccaacatgaccgggatgtacaaagcaaa

SEQ ID NO: 62905 - DNA, 33 bp, Homo sapien
aggcgttctgctttgaataaccagaatctcgag

SEQ ID NO: 62906 - DNA, 33 bp, Homo sapien
aggcgttctgctttgactaaccagaatctcgag

SEQ ID NO: 62907 - DNA, 33 bp, Homo sapien
aggggcagtgcaaaggacaatacgtgcttaaga

SEQ ID NO: 62908 - DNA, 33 bp, Homo sapien
aggggcagtgcaaagggcaatacgtgcttaaga

SEQ ID NO: 62909 - DNA, 33 bp, Homo sapien
tttccacagtaatttgaagagccacaccacgag

SEQ ID NO: 62910 - DNA, 33 bp, Homo sapien
tttccacagtaatttgtagagccacaccacgag

SEQ ID NO: 62911 - DNA, 33 bp, Homo sapien
tggtaacatattccacaagtgcaaataaaacat

SEQ ID NO: 62912 - DNA, 33 bp, Homo sapien
tggtaacatattccacgagtgcaaataaaacat

SEQ ID NO: 62913 - DNA, 33 bp, Homo sapien
tatgtgtaagctacctcagacggccataataaa

SEQ ID NO: 62914 - DNA, 33 bp, Homo sapien
tatgtgtaagctaccttagacggccataataaa

SEQ ID NO: 62915 - DNA, 33 bp, Homo sapien
tacaatacccactttagctatttttgacaagaa

SEQ ID NO: 62916 - DNA, 33 bp, Homo sapien
tacaatacccactttatctatttttgacaagaa

SEQ ID NO: 62917 - DNA, 33 bp, Homo sapien
ttggcagcacgtacaccgaaaaggccatcgaac

SEQ ID NO: 62918 - DNA, 33 bp, Homo sapien
ttggcagcacgtacactgaaaaggccatcgaac

SEQ ID NO: 62919 - DNA, 33 bp, Homo sapien
attcgaaagggtaaaacaccagaaactcagaat

SEQ ID NO: 62920 - DNA, 33 bp, Homo sapien
attcgaaagggtaaaataccagaaactcagaat

SEQ ID NO: 62921 - DNA, 33 bp, Homo sapien
tctcaatgctcttctacaaatttttaggatgct

SEQ ID NO: 62922 - DNA, 33 bp, Homo sapien
tctcaatgctcttctataaatttttaggatgct

SEQ ID NO: 62923 - DNA, 33 bp, Homo sapien
gtaagtgagctgtcaaacaacttcaagtagagt

SEQ ID NO: 62924 - DNA, 33 bp, Homo sapien
gtaagtgagctgtcaatcaacttcaagtagagt

SEQ ID NO: 62925 - DNA, 33 bp, Homo sapien
tattttaacacattgcaagccttaaaatctgtc

SEQ ID NO: 62926 - DNA, 33 bp, Homo sapien
tattttaacacattgcgagccttaaaatctgtc

SEQ ID NO: 62927 - DNA, 33 bp, Homo sapien
caggatcaagaaagaactagcctctgctgaaca

SEQ ID NO: 62928 - DNA, 33 bp, Homo sapien
caggatcaagaaagaattagcctctgctgaaca

SEQ ID NO: 62929 - DNA, 33 bp, Homo sapien
gattcgccaggaacaacgtaataaagaatcacc

SEQ ID NO: 62930 - DNA, 33 bp, Homo sapien
gattcgccaggaacaatgtaataaagaatcacc

SEQ ID NO: 62931 - DNA, 33 bp, Homo sapien
gcaaaagtaatcacttaaaggcacaaataggat

SEQ ID NO: 62932 - DNA, 33 bp, Homo sapien
gcaaaagtaatcacttgaaggcacaaataggat

SEQ ID NO: 62933 - DNA, 33 bp, Homo sapien
taatactactaatagccgcagagcctggacaaa

SEQ ID NO: 62934 - DNA, 33 bp, Homo sapien
taatactactaatagctgcagagcctggacaaa

SEQ ID NO: 62935 - DNA, 33 bp, Homo sapien
gttaattaatctggtcaccctccgctggagaga

SEQ ID NO: 62936 - DNA, 33 bp, Homo sapien
gttaattaatctggtcgccctccgctggagaga

SEQ ID NO: 62937 - DNA, 33 bp, Homo sapien
aaataaatatttgatgaaatgagaaataaaaat

SEQ ID NO: 62938 - DNA, 33 bp, Homo sapien
aaataaatatttgatgcaatgagaaataaaaat

SEQ ID NO: 62939 - DNA, 33 bp, Homo sapien
gaatttctatacactaataatgtccaagctgag

SEQ ID NO: 62940 - DNA, 33 bp, Homo sapien
gaatttctatacactagtaatgtccaagctgag

SEQ ID NO: 62941 - DNA, 33 bp, Homo sapien
acagaactgatgaaaccaggaattgccatcact

SEQ ID NO: 62942 - DNA, 33 bp, Homo sapien
acagaactgatgaaactaggaattgccatcact

SEQ ID NO: 62943 - DNA, 33 bp, Homo sapien
tgatgttttttatttcaatcctcaagatcatca

SEQ ID NO: 62944 - DNA, 33 bp, Homo sapien
tgatgttttttatttctatcctcaagatcatca

SEQ ID NO: 62945 - DNA, 33 bp, Homo sapien
ctggccggcctacataacctttaataaacctat

SEQ ID NO: 62946 - DNA, 33 bp, Homo sapien
ctggccggcctacatagcctttaataaacctat

SEQ ID NO: 62947 - DNA, 33 bp, Homo sapien
gaggagagaaactccaatataaactgagctcag

SEQ ID NO: 62948 - DNA, 33 bp, Homo sapien
gaggagagaaactccagtataaactgagctcag

SEQ ID NO: 62949 - DNA, 33 bp, Homo sapien
aacaaatggaaaatcaataacttcttagatctg

SEQ ID NO: 62950 - DNA, 33 bp, Homo sapien
aacaaatggaaaatcagtaacttcttagatctg

SEQ ID NO: 62951 - DNA, 33 bp, Homo sapien
ttctgatgtacaagaaaatgtggttagtgtttt

SEQ ID NO: 62952 - DNA, 33 bp, Homo sapien
ttctgatgtacaagaagatgtggttagtgtttt

SEQ ID NO: 62953 - DNA, 33 bp, Homo sapien
gcaaaagagatagatcaatgtaggtaaaagacc

SEQ ID NO: 62954 - DNA, 33 bp, Homo sapien
gcaaaagagatagatccatgtaggtaaaagacc

SEQ ID NO: 62955 - DNA, 33 bp, Homo sapien
taaactctcccaaagtcacctaccatagacctg

SEQ ID NO: 62956 - DNA, 33 bp, Homo sapien
taaactctcccaaagttacctaccatagacctg

SEQ ID NO: 62957 - DNA, 33 bp, Homo sapien
atatcaaaagaaaagaaaaccacagactaatgt

SEQ ID NO: 62958 - DNA, 33 bp, Homo sapien
atatcaaaagaaaagataaccacagactaatgt

SEQ ID NO: 62959 - DNA, 33 bp, Homo sapien
ttgtacgtcatcttaccacaattctctttataa

SEQ ID NO: 62960 - DNA, 33 bp, Homo sapien
ttgtacgtcatcttactacaattctctttataa

SEQ ID NO: 62961 - DNA, 33 bp, Homo sapien
ttctgtaaagtgaagacgagcttttaaatctac

SEQ ID NO: 62962 - DNA, 33 bp, Homo sapien
ttctgtaaagtgaagatgagcttttaaatctac

SEQ ID NO: 62963 - DNA, 33 bp, Homo sapien
ttacggactgatcaacaacttctattgctctgt

SEQ ID NO: 62964 - DNA, 33 bp, Homo sapien
ttacggactgatcaacgacttctattgctctgt

SEQ ID NO: 62965 - DNA, 33 bp, Homo sapien
tccattgaagtacaaacttctgaatcatgttcc

SEQ ID NO: 62966 - DNA, 33 bp, Homo sapien
tccattgaagtacaaatttctgaatcatgttcc

SEQ ID NO: 62967 - DNA, 33 bp, Homo sapien
acccaactaacctgaacgattccaaaattctcc

SEQ ID NO: 62968 - DNA, 33 bp, Homo sapien
acccaactaacctgaatgattccaaaattctcc

SEQ ID NO: 62969 - DNA, 33 bp, Homo sapien
gaaggtgctgtgccaacataacttggagatatt

SEQ ID NO: 62970 - DNA, 33 bp, Homo sapien
gaaggtgctgtgccaatataacttggagatatt

SEQ ID NO: 62971 - DNA, 33 bp, Homo sapien
aatgtatttatccaagaaagattttggtgcatg

SEQ ID NO: 62972 - DNA, 33 bp, Homo sapien
aatgtatttatccaaggaagattttggtgcatg

SEQ ID NO: 62973 - DNA, 33 bp, Homo sapien
gtcttccttgttccaactgaagatataaattgc

SEQ ID NO: 62974 - DNA, 33 bp, Homo sapien
gtcttccttgttccaattgaagatataaattgc

SEQ ID NO: 62975 - DNA, 33 bp, Homo sapien
atctatatgtaaattcaagaaaccactattaat

SEQ ID NO: 62976 - DNA, 33 bp, Homo sapien
atctatatgtaaattccagaaaccactattaat

SEQ ID NO: 62977 - DNA, 33 bp, Homo sapien
ttgagaagtactgatagggaccatgcacgataa

SEQ ID NO: 62978 - DNA, 33 bp, Homo sapien
ttgagaagtactgatatggaccatgcacgataa

SEQ ID NO: 62979 - DNA, 33 bp, Homo sapien
cctgtgacttgtgaatgatagcactagaactca

SEQ ID NO: 62980 - DNA, 33 bp, Homo sapien
cctgtgacttgtgaattatagcactagaactca

SEQ ID NO: 62981 - DNA, 33 bp, Homo sapien
tctctgtaaatgaaataacttgagactgtccac

SEQ ID NO: 62982 - DNA, 33 bp, Homo sapien
tctctgtaaatgaaatcacttgagactgtccac

SEQ ID NO: 62983 - DNA, 33 bp, Homo sapien
acttgtgttctttgacactttagcagggtctta

SEQ ID NO: 62984 - DNA, 33 bp, Homo sapien
acttgtgttctttgacgctttagcagggtctta

SEQ ID NO: 62985 - DNA, 33 bp, Homo sapien
caccccaagtggtctcaccatccctagtggtag

SEQ ID NO: 62986 - DNA, 33 bp, Homo sapien
caccccaagtggtctctccatccctagtggtag

SEQ ID NO: 62987 - DNA, 33 bp, Homo sapien
ctttctttctgtaaagcctccccaagaacataa

SEQ ID NO: 62988 - DNA, 33 bp, Homo sapien
ctttctttctgtaaaggctccccaagaacataa

SEQ ID NO: 62989 - DNA, 33 bp, Homo sapien
gcatagcaaagctaggaaagccaaaataaggat

SEQ ID NO: 62990 - DNA, 33 bp, Homo sapien
gcatagcaaagctagggaagccaaaataaggat

SEQ ID NO: 62991 - DNA, 33 bp, Homo sapien
gggctaggaagacctacaatggtgcacgtgaag

SEQ ID NO: 62992 - DNA, 33 bp, Homo sapien
gggctaggaagacctataatggtgcacgtgaag

SEQ ID NO: 62993 - DNA, 33 bp, Homo sapien
gtgccctattcaacctcactctgcacaacactc

SEQ ID NO: 62994 - DNA, 33 bp, Homo sapien
gtgccctattcaaccttactctgcacaacactc

SEQ ID NO: 62995 - DNA, 33 bp, Homo sapien
ctgtaggacttgttgacggcttggaaagaatgg

SEQ ID NO: 62996 - DNA, 33 bp, Homo sapien
ctgtaggacttgttgatggcttggaaagaatgg

SEQ ID NO: 62997 - DNA, 33 bp, Homo sapien
tgcttgggttgatttccatggaactggacttac

SEQ ID NO: 62998 - DNA, 33 bp, Homo sapien
tgcttgggttgatttctatggaactggacttac

SEQ ID NO: 62999 - DNA, 33 bp, Homo sapien
aaaagtcttaaccccaacactgagttttctcat

SEQ ID NO: 63000 - DNA, 33 bp, Homo sapien
aaaagtcttaaccccagcactgagttttctcat

SEQ ID NO: 63001 - DNA, 33 bp, Homo sapien
tcttctttttgaaatacgcccctctctctgctt

SEQ ID NO: 63002 - DNA, 33 bp, Homo sapien
tcttctttttgaaatatgcccctctctctgctt

SEQ ID NO: 63003 - DNA, 33 bp, Homo sapien
aaatgatgagttaatacgctttgtaccctagag

SEQ ID NO: 63004 - DNA, 33 bp, Homo sapien
aaatgatgagttaatatgctttgtaccctagag

SEQ ID NO: 63005 - DNA, 33 bp, Homo sapien
aattaaagaaattgtacgagtcagaaatcaact

SEQ ID NO: 63006 - DNA, 33 bp, Homo sapien
aattaaagaaattgtatgagtcagaaatcaact

SEQ ID NO: 63007 - DNA, 33 bp, Homo sapien
tagttgagaatgaaccgagtacattaaatatac

SEQ ID NO: 63008 - DNA, 33 bp, Homo sapien
tagttgagaatgaacctagtacattaaatatac

SEQ ID NO: 63009 - DNA, 33 bp, Homo sapien
attcattctggagctaccaactagagccaagta

SEQ ID NO: 63010 - DNA, 33 bp, Homo sapien
attcattctggagctatcaactagagccaagta

SEQ ID NO: 63011 - DNA, 33 bp, Homo sapien
ttcattttgaaaaacagatttctggaccatttt

SEQ ID NO: 63012 - DNA, 33 bp, Homo sapien
ttcattttgaaaaacatatttctggaccatttt

SEQ ID NO: 63013 - DNA, 33 bp, Homo sapien
gtaatgtacactggaaagaacaatttatagttt

SEQ ID NO: 63014 - DNA, 33 bp, Homo sapien
gtaatgtacactggaaggaacaatttatagttt

SEQ ID NO: 63015 - DNA, 33 bp, Homo sapien
caagactgtaccctagaacagccaaaatgattc

SEQ ID NO: 63016 - DNA, 33 bp, Homo sapien
caagactgtaccctaggacagccaaaatgattc

SEQ ID NO: 63017 - DNA, 33 bp, Homo sapien
tataattattctaacactgggctttgctttctc

SEQ ID NO: 63018 - DNA, 33 bp, Homo sapien
tataattattctaacattgggctttgctttctc

SEQ ID NO: 63019 - DNA, 33 bp, Homo sapien
gaatctttccatgtccaaaaatgttactttttt

SEQ ID NO: 63020 - DNA, 33 bp, Homo sapien
gaatctttccatgtccgaaaatgttactttttt

SEQ ID NO: 63021 - DNA, 33 bp, Homo sapien
tcttgtacttgttctaaccttaggatcagttgc

SEQ ID NO: 63022 - DNA, 33 bp, Homo sapien
tcttgtacttgttctagccttaggatcagttgc

SEQ ID NO: 63023 - DNA, 33 bp, Homo sapien
atgttggcattcctaaacactaacgcacataat

SEQ ID NO: 63024 - DNA, 33 bp, Homo sapien
atgttggcattcctaagcactaacgcacataat

SEQ ID NO: 63025 - DNA, 33 bp, Homo sapien
ttccatcacttagcaaaggttcaataaatattt

SEQ ID NO: 63026 - DNA, 33 bp, Homo sapien
ttccatcacttagcaagggttcaataaatattt

SEQ ID NO: 63027 - DNA, 33 bp, Homo sapien
agcctcgaagtctagaaaggcttgttaatagtc

SEQ ID NO: 63028 - DNA, 33 bp, Homo sapien
agcctcgaagtctagacaggcttgttaatagtc

SEQ ID NO: 63029 - DNA, 33 bp, Homo sapien
ctgtctttctccacctaacattagcatcacttg

SEQ ID NO: 63030 - DNA, 33 bp, Homo sapien
ctgtctttctccacctcacattagcatcacttg

SEQ ID NO: 63031 - DNA, 33 bp, Homo sapien
caatcagtttatgcaactctcttcattgtagca

SEQ ID NO: 63032 - DNA, 33 bp, Homo sapien
caatcagtttatgcaattctcttcattgtagca

SEQ ID NO: 63033 - DNA, 33 bp, Homo sapien
ggctcaaactcttaccactcgcatcagcagcta

SEQ ID NO: 63034 - DNA, 33 bp, Homo sapien
ggctcaaactcttaccgctcgcatcagcagcta

SEQ ID NO: 63035 - DNA, 33 bp, Homo sapien
ctctcccatgatttcccaagtaggctcaatgcc

SEQ ID NO: 63036 - DNA, 33 bp, Homo sapien
ctctcccatgatttccgaagtaggctcaatgcc

SEQ ID NO: 63037 - DNA, 33 bp, Homo sapien
gtcaaactaggaatcaactcttctaggacacct

SEQ ID NO: 63038 - DNA, 33 bp, Homo sapien
gtcaaactaggaatcatctcttctaggacacct

SEQ ID NO: 63039 - DNA, 33 bp, Homo sapien
gactgattcaaagataataagtacaacaacatg

SEQ ID NO: 63040 - DNA, 33 bp, Homo sapien
gactgattcaaagatagtaagtacaacaacatg

SEQ ID NO: 63041 - DNA, 33 bp, Homo sapien
cagtaagtagcaaaggcaagatgtatatctagg

SEQ ID NO: 63042 - DNA, 33 bp, Homo sapien
cagtaagtagcaaaggtaagatgtatatctagg

SEQ ID NO: 63043 - DNA, 33 bp, Homo sapien
gcaagtcagataaatcaaagcataatgaatcct

SEQ ID NO: 63044 - DNA, 33 bp, Homo sapien
gcaagtcagataaatcgaagcataatgaatcct

SEQ ID NO: 63045 - DNA, 33 bp, Homo sapien
acctccaaagccttctcaaattgtaagaaatcg

SEQ ID NO: 63046 - DNA, 33 bp, Homo sapien
acctccaaagccttcttaaattgtaagaaatcg

SEQ ID NO: 63047 - DNA, 33 bp, Homo sapien
ttatgatctgtgcatacagagtttttaggaaca

SEQ ID NO: 63048 - DNA, 33 bp, Homo sapien
ttatgatctgtgcatatagagtttttaggaaca

SEQ ID NO: 63049 - DNA, 33 bp, Homo sapien
actgggtctgattccaccacagcactaccactt

SEQ ID NO: 63050 - DNA, 33 bp, Homo sapien
actgggtctgattccagcacagcactaccactt

SEQ ID NO: 63051 - DNA, 33 bp, Homo sapien
accagaatgatacaacaataccaattccttttc

SEQ ID NO: 63052 - DNA, 33 bp, Homo sapien
accagaatgatacaacgataccaattccttttc

SEQ ID NO: 63053 - DNA, 33 bp, Homo sapien
aggaagtaatggctcacgctcctgataagacct

SEQ ID NO: 63054 - DNA, 33 bp, Homo sapien
aggaagtaatggctcatgctcctgataagacct

SEQ ID NO: 63055 - DNA, 33 bp, Homo sapien
gaatcttggatctgaagatttggtagtggtatg

SEQ ID NO: 63056 - DNA, 33 bp, Homo sapien
gaatcttggatctgaatatttggtagtggtatg

SEQ ID NO: 63057 - DNA, 33 bp, Homo sapien
aaaccaaggtgataaacccccatcaaaataact

SEQ ID NO: 63058 - DNA, 33 bp, Homo sapien
aaaccaaggtgataaatccccatcaaaataact

SEQ ID NO: 63059 - DNA, 33 bp, Homo sapien
cacaactttgtaagtgcactgaatagctcctga

SEQ ID NO: 63060 - DNA, 33 bp, Homo sapien
cacaactttgtaagtgtactgaatagctcctga

SEQ ID NO: 63061 - DNA, 33 bp, Homo sapien
aataaagttaccattaaagacatgcaagttaga

SEQ ID NO: 63062 - DNA, 33 bp, Homo sapien
aataaagttaccattagagacatgcaagttaga

SEQ ID NO: 63063 - DNA, 33 bp, Homo sapien
gagggagtagcaagtacaggataaatagcaatt

SEQ ID NO: 63064 - DNA, 33 bp, Homo sapien
gagggagtagcaagtagaggataaatagcaatt

SEQ ID NO: 63065 - DNA, 33 bp, Homo sapien
tcttatcaattcccgaccataaccatatatacc

SEQ ID NO: 63066 - DNA, 33 bp, Homo sapien
tcttatcaattcccgatcataaccatatatacc

SEQ ID NO: 63067 - DNA, 33 bp, Homo sapien
tttcccccaccagtcaagactctatgttcaata

SEQ ID NO: 63068 - DNA, 33 bp, Homo sapien
tttcccccaccagtcaggactctatgttcaata

SEQ ID NO: 63069 - DNA, 33 bp, Homo sapien
ggtcttgtgcctttctgaaactctgttacacat

SEQ ID NO: 63070 - DNA, 33 bp, Homo sapien
ggtcttgtgcctttcttaaactctgttacacat

SEQ ID NO: 63071 - DNA, 33 bp, Homo sapien
caagttctttttcaccacggtattgttcaccca

SEQ ID NO: 63072 - DNA, 33 bp, Homo sapien
caagttctttttcaccgcggtattgttcaccca

SEQ ID NO: 63073 - DNA, 33 bp, Homo sapien
tgttgaggtaatgcaaaaaggattcaatccttt

SEQ ID NO: 63074 - DNA, 33 bp, Homo sapien
tgttgaggtaatgcaacaaggattcaatccttt

SEQ ID NO: 63075 - DNA, 33 bp, Homo sapien
agagtaactgtttccacgcaaatgccctttcca

SEQ ID NO: 63076 - DNA, 33 bp, Homo sapien
agagtaactgtttccatgcaaatgccctttcca

SEQ ID NO: 63077 - DNA, 33 bp, Homo sapien
tcatagagaatggtgacgattatgaaaagcagc

SEQ ID NO: 63078 - DNA, 33 bp, Homo sapien
tcatagagaatggtgatgattatgaaaagcagc

SEQ ID NO: 63079 - DNA, 33 bp, Homo sapien
ctccagaggtttctcaataactatgtgcaaaaa

SEQ ID NO: 63080 - DNA, 33 bp, Homo sapien
ctccagaggtttctcagtaactatgtgcaaaaa

SEQ ID NO: 63081 - DNA, 33 bp, Homo sapien
catgagctctggcttccaatgagagacagttat

SEQ ID NO: 63082 - DNA, 33 bp, Homo sapien
catgagctctggcttctaatgagagacagttat

SEQ ID NO: 63083 - DNA, 33 bp, Homo sapien
tcaacagcgtggtggacgaccatcgtgttccat

SEQ ID NO: 63084 - DNA, 33 bp, Homo sapien
tcaacagcgtggtggatgaccatcgtgttccat

SEQ ID NO: 63085 - DNA, 33 bp, Homo sapien
taatcgcttttaaaggccccaactcaatactgt

SEQ ID NO: 63086 - DNA, 33 bp, Homo sapien
taatcgcttttaaaggtcccaactcaatactgt

SEQ ID NO: 63087 - DNA, 33 bp, Homo sapien
aagccaaagaaatagacctcctgacactatggt

SEQ ID NO: 63088 - DNA, 33 bp, Homo sapien
aagccaaagaaatagatctcctgacactatggt

SEQ ID NO: 63089 - DNA, 33 bp, Homo sapien
gtagttatttggagaccggagataaatgagaat

SEQ ID NO: 63090 - DNA, 33 bp, Homo sapien
gtagttatttggagactggagataaatgagaat

SEQ ID NO: 63091 - DNA, 33 bp, Homo sapien
tctgtatctccactaactgaacaaatggctctc

SEQ ID NO: 63092 - DNA, 33 bp, Homo sapien
tctgtatctccactaattgaacaaatggctctc

SEQ ID NO: 63093 - DNA, 33 bp, Homo sapien
tttgcctatttctaatcactgaaaagaacttaa

SEQ ID NO: 63094 - DNA, 33 bp, Homo sapien
tttgcctatttctaatgactgaaaagaacttaa

SEQ ID NO: 63095 - DNA, 33 bp, Homo sapien
tatggctgtgagactacaaagaacgaagttaaa

SEQ ID NO: 63096 - DNA, 33 bp, Homo sapien
tatggctgtgagactagaaagaacgaagttaaa

SEQ ID NO: 63097 - DNA, 33 bp, Homo sapien
aatgccactgctgatcaaacagtaagtgaaact

SEQ ID NO: 63098 - DNA, 33 bp, Homo sapien
aatgccactgctgatcgaacagtaagtgaaact

SEQ ID NO: 63099 - DNA, 33 bp, Homo sapien
tacattcaatacttcacataaacacaaacatga

SEQ ID NO: 63100 - DNA, 33 bp, Homo sapien
tacattcaatacttcatataaacacaaacatga

SEQ ID NO: 63101 - DNA, 33 bp, Homo sapien
agatttacaagattcacaagaaactgtaggata

SEQ ID NO: 63102 - DNA, 33 bp, Homo sapien
agatttacaagattcataagaaactgtaggata

SEQ ID NO: 63103 - DNA, 33 bp, Homo sapien
atatgataaagctggaagaacagaacctctcca

SEQ ID NO: 63104 - DNA, 33 bp, Homo sapien
atatgataaagctggaggaacagaacctctcca

SEQ ID NO: 63105 - DNA, 33 bp, Homo sapien
aaataataaactgttcacaattgcaaaagaaaa

SEQ ID NO: 63106 - DNA, 33 bp, Homo sapien
aaataataaactgttcccaattgcaaaagaaaa

SEQ ID NO: 63107 - DNA, 33 bp, Homo sapien
ttctctaataaccagccatggtgagcttgtttt

SEQ ID NO: 63108 - DNA, 33 bp, Homo sapien
ttctctaataaccagcgatggtgagcttgtttt

SEQ ID NO: 63109 - DNA, 33 bp, Homo sapien
ctctagaaggctttcaatcatttcaaacagcaa

SEQ ID NO: 63110 - DNA, 33 bp, Homo sapien
ctctagaaggctttcagtcatttcaaacagcaa

SEQ ID NO: 63111 - DNA, 33 bp, Homo sapien
gttttatagatgtttacaccaggatggcctgac

SEQ ID NO: 63112 - DNA, 33 bp, Homo sapien
gttttatagatgtttataccaggatggcctgac

SEQ ID NO: 63113 - DNA, 33 bp, Homo sapien
agtgttagagaattcaaatctacatagagaaag

SEQ ID NO: 63114 - DNA, 33 bp, Homo sapien
agtgttagagaattcagatctacatagagaaag

SEQ ID NO: 63115 - DNA, 33 bp, Homo sapien
cagcacagtcatggagcaggaagctgtgactga

SEQ ID NO: 63116 - DNA, 33 bp, Homo sapien
cagcacagtcatggagtaggaagctgtgactga

SEQ ID NO: 63117 - DNA, 33 bp, Homo sapien
ttcatttccataaaaaaaattctgctggttacc

SEQ ID NO: 63118 - DNA, 33 bp, Homo sapien
ttcatttccataaaaacaattctgctggttacc

SEQ ID NO: 63119 - DNA, 33 bp, Homo sapien
cattaaatgtagccaaatatacaaggggcaagg

SEQ ID NO: 63120 - DNA, 33 bp, Homo sapien
cattaaatgtagccaagtatacaaggggcaagg

SEQ ID NO: 63121 - DNA, 33 bp, Homo sapien
tagttgcaggaaaatacggtccaaccagtttca

SEQ ID NO: 63122 - DNA, 33 bp, Homo sapien
tagttgcaggaaaatatggtccaaccagtttca

SEQ ID NO: 63123 - DNA, 33 bp, Homo sapien
agttaactaatgaagacgcagcattctggagaa

SEQ ID NO: 63124 - DNA, 33 bp, Homo sapien
agttaactaatgaagatgcagcattctggagaa

SEQ ID NO: 63125 - DNA, 33 bp, Homo sapien
catgtgtttgcttaaacattcaggaaacttgag

SEQ ID NO: 63126 - DNA, 33 bp, Homo sapien
catgtgtttgcttaaatattcaggaaacttgag

SEQ ID NO: 63127 - DNA, 33 bp, Homo sapien
tattcataaatgaataaattggcattcaggttg

SEQ ID NO: 63128 - DNA, 33 bp, Homo sapien
tattcataaatgaatacattggcattcaggttg

SEQ ID NO: 63129 - DNA, 33 bp, Homo sapien
acccctcatgtcaaatcattcttggtcatccat

SEQ ID NO: 63130 - DNA, 33 bp, Homo sapien
acccctcatgtcaaattattcttggtcatccat

SEQ ID NO: 63131 - DNA, 33 bp, Homo sapien
tttgtatctataatcacaggggccttgtaatta

SEQ ID NO: 63132 - DNA, 33 bp, Homo sapien
tttgtatctataatcataggggccttgtaatta

SEQ ID NO: 63133 - DNA, 33 bp, Homo sapien
gtaagctaacaaaaacaacagtgatagttttat

SEQ ID NO: 63134 - DNA, 33 bp, Homo sapien
gtaagctaacaaaaacgacagtgatagttttat

SEQ ID NO: 63135 - DNA, 33 bp, Homo sapien
agaggcatctctgtgacagttttcctttcccat

SEQ ID NO: 63136 - DNA, 33 bp, Homo sapien
agaggcatctctgtgatagttttcctttcccat

SEQ ID NO: 63137 - DNA, 33 bp, Homo sapien
attttctggttgccaaagatttgttaagatact

SEQ ID NO: 63138 - DNA, 33 bp, Homo sapien
attttctggttgccaaggatttgttaagatact

SEQ ID NO: 63139 - DNA, 33 bp, Homo sapien
tagtttgcctccactcccatagcttcttttgaa

SEQ ID NO: 63140 - DNA, 33 bp, Homo sapien
tagtttgcctccactctcatagcttcttttgaa

SEQ ID NO: 63141 - DNA, 33 bp, Homo sapien
gataatcttttgttcacgtctatatccaaacta

SEQ ID NO: 63142 - DNA, 33 bp, Homo sapien
gataatcttttgttcatgtctatatccaaacta

SEQ ID NO: 63143 - DNA, 33 bp, Homo sapien
aatatattactatgaaccaggtcaggtagagaa

SEQ ID NO: 63144 - DNA, 33 bp, Homo sapien
aatatattactatgaatcaggtcaggtagagaa

SEQ ID NO: 63145 - DNA, 33 bp, Homo sapien
acaaagaagtcaagatgagagctgatattaaag

SEQ ID NO: 63146 - DNA, 33 bp, Homo sapien
acaaagaagtcaagattagagctgatattaaag

SEQ ID NO: 63147 - DNA, 33 bp, Homo sapien
ttagtacagtaaccaaccgtaggtaatttgata

SEQ ID NO: 63148 - DNA, 33 bp, Homo sapien
ttagtacagtaaccaatcgtaggtaatttgata

SEQ ID NO: 63149 - DNA, 33 bp, Homo sapien
gtacaagaaaaactgacgataaaaatgcacagg

SEQ ID NO: 63150 - DNA, 33 bp, Homo sapien
gtacaagaaaaactgatgataaaaatgcacagg

SEQ ID NO: 63151 - DNA, 33 bp, Homo sapien
attcttgacttcctaagtgagatagtagaaaat

SEQ ID NO: 63152 - DNA, 33 bp, Homo sapien
attcttgacttcctaattgagatagtagaaaat

SEQ ID NO: 63153 - DNA, 33 bp, Homo sapien
ggatacgtttcattaaagttttctgcagatgtt

SEQ ID NO: 63154 - DNA, 33 bp, Homo sapien
ggatacgtttcattaaggttttctgcagatgtt

SEQ ID NO: 63155 - DNA, 33 bp, Homo sapien
gtcattagctaagactaaagtatgaagtaacat

SEQ ID NO: 63156 - DNA, 33 bp, Homo sapien
gtcattagctaagactgaagtatgaagtaacat

SEQ ID NO: 63157 - DNA, 33 bp, Homo sapien
attcccaacttgcctacattattagtttttctt

SEQ ID NO: 63158 - DNA, 33 bp, Homo sapien
attcccaacttgcctatattattagtttttctt

SEQ ID NO: 63159 - DNA, 33 bp, Homo sapien
tttcttcaaaaatgccaataaactgacttaact

SEQ ID NO: 63160 - DNA, 33 bp, Homo sapien
tttcttcaaaaatgccgataaactgacttaact

SEQ ID NO: 63161 - DNA, 33 bp, Homo sapien
atacagtggtttcaagacctatatctgcagaaa

SEQ ID NO: 63162 - DNA, 33 bp, Homo sapien
atacagtggtttcaaggcctatatctgcagaaa

SEQ ID NO: 63163 - DNA, 33 bp, Homo sapien
gaagattctagtggcaaaagttatctaatcagt

SEQ ID NO: 63164 - DNA, 33 bp, Homo sapien
gaagattctagtggcagaagttatctaatcagt

SEQ ID NO: 63165 - DNA, 33 bp, Homo sapien
agctcttgtcaaattaacatggaataccataat

SEQ ID NO: 63166 - DNA, 33 bp, Homo sapien
agctcttgtcaaattatcatggaataccataat

SEQ ID NO: 63167 - DNA, 33 bp, Homo sapien
ttgtcatgtacttgcacgatttgagttccttgc

SEQ ID NO: 63168 - DNA, 33 bp, Homo sapien
ttgtcatgtacttgcatgatttgagttccttgc

SEQ ID NO: 63169 - DNA, 33 bp, Homo sapien
ggcaagctgaaaagaaagcccacattcattctc

SEQ ID NO: 63170 - DNA, 33 bp, Homo sapien
ggcaagctgaaaagaaggcccacattcattctc

SEQ ID NO: 63171 - DNA, 33 bp, Homo sapien
ttctgctacaaaataactgtaggaaacaactca

SEQ ID NO: 63172 - DNA, 33 bp, Homo sapien
ttctgctacaaaataagtgtaggaaacaactca

SEQ ID NO: 63173 - DNA, 33 bp, Homo sapien
aggatggaatcttgaaagtagggaaaggaatca

SEQ ID NO: 63174 - DNA, 33 bp, Homo sapien
aggatggaatcttgaaggtagggaaaggaatca

SEQ ID NO: 63175 - DNA, 33 bp, Homo sapien
gagtgaaactcaggcaccttaattttcataaat

SEQ ID NO: 63176 - DNA, 33 bp, Homo sapien
gagtgaaactcaggcagcttaattttcataaat

SEQ ID NO: 63177 - DNA, 33 bp, Homo sapien
tgagaaatgacataaaattacatctctacccca

SEQ ID NO: 63178 - DNA, 33 bp, Homo sapien
tgagaaatgacataaacttacatctctacccca

SEQ ID NO: 63179 - DNA, 33 bp, Homo sapien
cttctgtgatggacagcctcctaaggtttttgt

SEQ ID NO: 63180 - DNA, 33 bp, Homo sapien
cttctgtgatggacaggctcctaaggtttttgt

SEQ ID NO: 63181 - DNA, 33 bp, Homo sapien
tggtacaatttttcttgaacaatgcacatagaa

SEQ ID NO: 63182 - DNA, 33 bp, Homo sapien
tggtacaatttttctttaacaatgcacatagaa

SEQ ID NO: 63183 - DNA, 33 bp, Homo sapien
taatcaggctgcaaaagatcagtcacaatgttt

SEQ ID NO: 63184 - DNA, 33 bp, Homo sapien
taatcaggctgcaaaatatcagtcacaatgttt

SEQ ID NO: 63185 - DNA, 33 bp, Homo sapien
tgagagacaccatgaagagaatgaaaactatga

SEQ ID NO: 63186 - DNA, 33 bp, Homo sapien
tgagagacaccatgaatagaatgaaaactatga

SEQ ID NO: 63187 - DNA, 33 bp, Homo sapien
aaaaacttctcagtcaactgaactctgtttaac

SEQ ID NO: 63188 - DNA, 33 bp, Homo sapien
aaaaacttctcagtcagctgaactctgtttaac

SEQ ID NO: 63189 - DNA, 33 bp, Homo sapien
gtggcaacaaaaaagccagcatggattacagca

SEQ ID NO: 63190 - DNA, 33 bp, Homo sapien
gtggcaacaaaaaagctagcatggattacagca

SEQ ID NO: 63191 - DNA, 33 bp, Homo sapien
tgttagattataaggccctgatttcccagtatt

SEQ ID NO: 63192 - DNA, 33 bp, Homo sapien
tgttagattataaggctctgatttcccagtatt

SEQ ID NO: 63193 - DNA, 33 bp, Homo sapien
gtctcctctcatatgcaactggagtgcctgaat

SEQ ID NO: 63194 - DNA, 33 bp, Homo sapien
gtctcctctcatatgcgactggagtgcctgaat

SEQ ID NO: 63195 - DNA, 33 bp, Homo sapien
aataagaaatacacaaacatgaaggcatctaaa

SEQ ID NO: 63196 - DNA, 33 bp, Homo sapien
aataagaaatacacaagcatgaaggcatctaaa

SEQ ID NO: 63197 - DNA, 33 bp, Homo sapien
gagcctttgcttatcaatgaatgtagttccaat

SEQ ID NO: 63198 - DNA, 33 bp, Homo sapien
gagcctttgcttatcagtgaatgtagttccaat

SEQ ID NO: 63199 - DNA, 33 bp, Homo sapien
aataagcatttgcatcaagaaagtagaaagagc

SEQ ID NO: 63200 - DNA, 33 bp, Homo sapien
aataagcatttgcatccagaaagtagaaagagc

SEQ ID NO: 63201 - DNA, 33 bp, Homo sapien
tagttaaaggattgtcaattttgcttatcttat

SEQ ID NO: 63202 - DNA, 33 bp, Homo sapien
tagttaaaggattgtcgattttgcttatcttat

SEQ ID NO: 63203 - DNA, 33 bp, Homo sapien
tcctgcatattgagtacgaatatttgaaatgaa

SEQ ID NO: 63204 - DNA, 33 bp, Homo sapien
tcctgcatattgagtatgaatatttgaaatgaa

SEQ ID NO: 63205 - DNA, 33 bp, Homo sapien
aaaacctatttctataactgatacattctttat

SEQ ID NO: 63206 - DNA, 33 bp, Homo sapien
aaaacctatttctatacctgatacattctttat

SEQ ID NO: 63207 - DNA, 33 bp, Homo sapien
ctccaattccaagattcaatagtaaagcgcagt

SEQ ID NO: 63208 - DNA, 33 bp, Homo sapien
ctccaattccaagatttaatagtaaagcgcagt

SEQ ID NO: 63209 - DNA, 33 bp, Homo sapien
tgtgatccagaccacaatgacctcaattgaaat

SEQ ID NO: 63210 - DNA, 33 bp, Homo sapien
tgtgatccagaccacagtgacctcaattgaaat

SEQ ID NO: 63211 - DNA, 33 bp, Homo sapien
tggtcaatagagtcaaatagtgtagtaggtttg

SEQ ID NO: 63212 - DNA, 33 bp, Homo sapien
tggtcaatagagtcaagtagtgtagtaggtttg

SEQ ID NO: 63213 - DNA, 33 bp, Homo sapien
atatagcaatacatcaatacatatttattacat

SEQ ID NO: 63214 - DNA, 33 bp, Homo sapien
atatagcaatacatcagtacatatttattacat

SEQ ID NO: 63215 - DNA, 33 bp, Homo sapien
ctccttatcagagggacgcaggaagagtccgtc

SEQ ID NO: 63216 - DNA, 33 bp, Homo sapien
ctccttatcagagggatgcaggaagagtccgtc

SEQ ID NO: 63217 - DNA, 33 bp, Homo sapien
tagaaattgtaaacaccgtgcaaaacctctatg

SEQ ID NO: 63218 - DNA, 33 bp, Homo sapien
tagaaattgtaaacactgtgcaaaacctctatg

SEQ ID NO: 63219 - DNA, 33 bp, Homo sapien
tagcaagctagtacagaaataaaatcatctaaa

SEQ ID NO: 63220 - DNA, 33 bp, Homo sapien
tagcaagctagtacaggaataaaatcatctaaa

SEQ ID NO: 63221 - DNA, 33 bp, Homo sapien
aggaagtcacaggcaagggttacagatgaatag

SEQ ID NO: 63222 - DNA, 33 bp, Homo sapien
aggaagtcacaggcaatggttacagatgaatag

SEQ ID NO: 63223 - DNA, 33 bp, Homo sapien
attcaagtgatgcatcgctagcttgttgttgac

SEQ ID NO: 63224 - DNA, 33 bp, Homo sapien
attcaagtgatgcatctctagcttgttgttgac

SEQ ID NO: 63225 - DNA, 33 bp, Homo sapien
actctggttgctctcacgtaatgactaaggtac

SEQ ID NO: 63226 - DNA, 33 bp, Homo sapien
actctggttgctctcatgtaatgactaaggtac

SEQ ID NO: 63227 - DNA, 33 bp, Homo sapien
cagttatgatggacccaatggcaggtggagatt

SEQ ID NO: 63228 - DNA, 33 bp, Homo sapien
cagttatgatggaccccatggcaggtggagatt

SEQ ID NO: 63229 - DNA, 33 bp, Homo sapien
gaaaatgaataggtggcccaaatccctaaatga

SEQ ID NO: 63230 - DNA, 33 bp, Homo sapien
gaaaatgaataggtggtccaaatccctaaatga

SEQ ID NO: 63231 - DNA, 33 bp, Homo sapien
cagttccttcatgtgacatcctatatacttgtc

SEQ ID NO: 63232 - DNA, 33 bp, Homo sapien
cagttccttcatgtgatatcctatatacttgtc

SEQ ID NO: 63233 - DNA, 33 bp, Homo sapien
gagagctgatccttcagggtctaatcatctctt

SEQ ID NO: 63234 - DNA, 33 bp, Homo sapien
gagagctgatccttcatggtctaatcatctctt

SEQ ID NO: 63235 - DNA, 33 bp, Homo sapien
agaactcacttttcataaaggacactagcagca

SEQ ID NO: 63236 - DNA, 33 bp, Homo sapien
agaactcacttttcattaaggacactagcagca

SEQ ID NO: 63237 - DNA, 33 bp, Homo sapien
tattaaaatctgacgcaaccagacttctagttc

SEQ ID NO: 63238 - DNA, 33 bp, Homo sapien
tattaaaatctgacgcgaccagacttctagttc

SEQ ID NO: 63239 - DNA, 33 bp, Homo sapien
ggtttgagcctgtattgaagtgaattgaagaat

SEQ ID NO: 63240 - DNA, 33 bp, Homo sapien
ggtttgagcctgtatttaagtgaattgaagaat

SEQ ID NO: 63241 - DNA, 33 bp, Homo sapien
gctgttaggtaaagtcaaagataggagacgaaa

SEQ ID NO: 63242 - DNA, 33 bp, Homo sapien
gctgttaggtaaagtcgaagataggagacgaaa

SEQ ID NO: 63243 - DNA, 33 bp, Homo sapien
ctaaagtaatggaagcactctgtactttgaatg

SEQ ID NO: 63244 - DNA, 33 bp, Homo sapien
ctaaagtaatggaagcgctctgtactttgaatg

SEQ ID NO: 63245 - DNA, 33 bp, Homo sapien
tagttatgcgtacttacgtgtgcttttttagga

SEQ ID NO: 63246 - DNA, 33 bp, Homo sapien
tagttatgcgtacttatgtgtgcttttttagga

SEQ ID NO: 63247 - DNA, 33 bp, Homo sapien
gctgtcagaagattaccgggctataaaagcaaa

SEQ ID NO: 63248 - DNA, 33 bp, Homo sapien
gctgtcagaagattactgggctataaaagcaaa

SEQ ID NO: 63249 - DNA, 33 bp, Homo sapien
cagctagctgttaccaataagtgccacctactg

SEQ ID NO: 63250 - DNA, 33 bp, Homo sapien
cagctagctgttaccagtaagtgccacctactg

SEQ ID NO: 63251 - DNA, 33 bp, Homo sapien
ggtggctgcaccaacccatgtcctagagaggca

SEQ ID NO: 63252 - DNA, 33 bp, Homo sapien
ggtggctgcaccaacctatgtcctagagaggca

SEQ ID NO: 63253 - DNA, 33 bp, Homo sapien
tgctcaggcagcagcaaaatgctcaggcagtgg

SEQ ID NO: 63254 - DNA, 33 bp, Homo sapien
tgctcaggcagcagcagaatgctcaggcagtgg

SEQ ID NO: 63255 - DNA, 33 bp, Homo sapien
acattgaagagaaaacgagatgcagaagtgttt

SEQ ID NO: 63256 - DNA, 33 bp, Homo sapien
acattgaagagaaaactagatgcagaagtgttt

SEQ ID NO: 63257 - DNA, 33 bp, Homo sapien
agcagtggctcttaccacacaatggaatctcag

SEQ ID NO: 63258 - DNA, 33 bp, Homo sapien
agcagtggctcttaccgcacaatggaatctcag

SEQ ID NO: 63259 - DNA, 33 bp, Homo sapien
attagagccttcagcaaggttcaataactgagt

SEQ ID NO: 63260 - DNA, 33 bp, Homo sapien
attagagccttcagcatggttcaataactgagt

SEQ ID NO: 63261 - DNA, 33 bp, Homo sapien
tgagagagagactgaagaaaattttagttgcac

SEQ ID NO: 63262 - DNA, 33 bp, Homo sapien
tgagagagagactgaataaaattttagttgcac

SEQ ID NO: 63263 - DNA, 33 bp, Homo sapien
ttctgagacctatcaaaaactaagatgcttcta

SEQ ID NO: 63264 - DNA, 33 bp, Homo sapien
ttctgagacctatcaacaactaagatgcttcta

SEQ ID NO: 63265 - DNA, 33 bp, Homo sapien
ttaaatgtgacaattgaacaaattaaaacagcc

SEQ ID NO: 63266 - DNA, 33 bp, Homo sapien
ttaaatgtgacaattggacaaattaaaacagcc

SEQ ID NO: 63267 - DNA, 33 bp, Homo sapien
agaatcaatttcctcaagtgtgtagaactgaaa

SEQ ID NO: 63268 - DNA, 33 bp, Homo sapien
agaatcaatttcctcacgtgtgtagaactgaaa

SEQ ID NO: 63269 - DNA, 33 bp, Homo sapien
aatgcctccgtgaacactctcttacagatattt

SEQ ID NO: 63270 - DNA, 33 bp, Homo sapien
aatgcctccgtgaacattctcttacagatattt

SEQ ID NO: 63271 - DNA, 33 bp, Homo sapien
atttatgtaagtgtaaagaaattggaatgttca

SEQ ID NO: 63272 - DNA, 33 bp, Homo sapien
atttatgtaagtgtaaggaaattggaatgttca

SEQ ID NO: 63273 - DNA, 33 bp, Homo sapien
gctgatgctattttaccatttaaagaaaggtta

SEQ ID NO: 63274 - DNA, 33 bp, Homo sapien
gctgatgctattttactatttaaagaaaggtta

SEQ ID NO: 63275 - DNA, 33 bp, Homo sapien
cttatgatccaatatacaagtatgaggaatgtc

SEQ ID NO: 63276 - DNA, 33 bp, Homo sapien
cttatgatccaatatagaagtatgaggaatgtc

SEQ ID NO: 63277 - DNA, 33 bp, Homo sapien
gttttcttctctcagaacaaaagcaaagttgct

SEQ ID NO: 63278 - DNA, 33 bp, Homo sapien
gttttcttctctcagagcaaaagcaaagttgct

SEQ ID NO: 63279 - DNA, 33 bp, Homo sapien
catagtcaacctcatgaaactaaattgattttt

SEQ ID NO: 63280 - DNA, 33 bp, Homo sapien
catagtcaacctcatgcaactaaattgattttt

SEQ ID NO: 63281 - DNA, 33 bp, Homo sapien
aatactgtatgcttcacgaatattttccatata

SEQ ID NO: 63282 - DNA, 33 bp, Homo sapien
aatactgtatgcttcatgaatattttccatata

SEQ ID NO: 63283 - DNA, 33 bp, Homo sapien
aatcacagtatttgaacgtagtagtgatgagaa

SEQ ID NO: 63284 - DNA, 33 bp, Homo sapien
aatcacagtatttgaatgtagtagtgatgagaa

SEQ ID NO: 63285 - DNA, 33 bp, Homo sapien
gtctctttagctcaccactttatagggtctcat

SEQ ID NO: 63286 - DNA, 33 bp, Homo sapien
gtctctttagctcaccgctttatagggtctcat

SEQ ID NO: 63287 - DNA, 33 bp, Homo sapien
gagcaaaggtgaccaccataccaggtttgagaa

SEQ ID NO: 63288 - DNA, 33 bp, Homo sapien
gagcaaaggtgaccactataccaggtttgagaa

SEQ ID NO: 63289 - DNA, 33 bp, Homo sapien
gtaaaatcttcagaagaaaaggaaaatgttttg

SEQ ID NO: 63290 - DNA, 33 bp, Homo sapien
gtaaaatcttcagaaggaaaggaaaatgttttg

SEQ ID NO: 63291 - DNA, 33 bp, Homo sapien
gggcatatgtgggctgcataacttgacttttta

SEQ ID NO: 63292 - DNA, 33 bp, Homo sapien
gggcatatgtgggctggataacttgacttttta

SEQ ID NO: 63293 - DNA, 33 bp, Homo sapien
aagagtgtatatgacaaagtttcattattcagc

SEQ ID NO: 63294 - DNA, 33 bp, Homo sapien
aagagtgtatatgacagagtttcattattcagc

SEQ ID NO: 63295 - DNA, 33 bp, Homo sapien
agtaattactgcagacagaaaggcctgacattt

SEQ ID NO: 63296 - DNA, 33 bp, Homo sapien
agtaattactgcagacggaaaggcctgacattt

SEQ ID NO: 63297 - DNA, 33 bp, Homo sapien
aaagaaaatgtcattaagaaaatcataaggaag

SEQ ID NO: 63298 - DNA, 33 bp, Homo sapien
aaagaaaatgtcattaggaaaatcataaggaag

SEQ ID NO: 63299 - DNA, 33 bp, Homo sapien
agcataaatcaaaaaggcaataggctgttttta

SEQ ID NO: 63300 - DNA, 33 bp, Homo sapien
agcataaatcaaaaagtcaataggctgttttta

SEQ ID NO: 63301 - DNA, 33 bp, Homo sapien
tacaggtctcttttgcaatagtactggtatatt

SEQ ID NO: 63302 - DNA, 33 bp, Homo sapien
tacaggtctcttttgctatagtactggtatatt

SEQ ID NO: 63303 - DNA, 33 bp, Homo sapien
tttccagtcgtttgtacagggaaattatcccat

SEQ ID NO: 63304 - DNA, 33 bp, Homo sapien
tttccagtcgtttgtatagggaaattatcccat

SEQ ID NO: 63305 - DNA, 33 bp, Homo sapien
tgcattgcccctgttacgcagctagcagatgga

SEQ ID NO: 63306 - DNA, 33 bp, Homo sapien
tgcattgcccctgttatgcagctagcagatgga

SEQ ID NO: 63307 - DNA, 33 bp, Homo sapien
taccaattgtctagtactaagaatgacctcatt

SEQ ID NO: 63308 - DNA, 33 bp, Homo sapien
taccaattgtctagtagtaagaatgacctcatt

SEQ ID NO: 63309 - DNA, 33 bp, Homo sapien
aatgtttgtatactccactttccctcctgcccc

SEQ ID NO: 63310 - DNA, 33 bp, Homo sapien
aatgtttgtatactccgctttccctcctgcccc

SEQ ID NO: 63311 - DNA, 33 bp, Homo sapien
agggtctgcaaaaccacagactaaatataatgc

SEQ ID NO: 63312 - DNA, 33 bp, Homo sapien
agggtctgcaaaaccatagactaaatataatgc

SEQ ID NO: 63313 - DNA, 33 bp, Homo sapien
ctttctgtaacaaacaatagcaaatatctgaga

SEQ ID NO: 63314 - DNA, 33 bp, Homo sapien
ctttctgtaacaaacagtagcaaatatctgaga

SEQ ID NO: 63315 - DNA, 33 bp, Homo sapien
gactacattttcaacaatgattatcagcattag

SEQ ID NO: 63316 - DNA, 33 bp, Homo sapien
gactacattttcaacagtgattatcagcattag

SEQ ID NO: 63317 - DNA, 33 bp, Homo sapien
ggaaataatttgattgaagtagacttaaggcaa

SEQ ID NO: 63318 - DNA, 33 bp, Homo sapien
ggaaataatttgattgcagtagacttaaggcaa

SEQ ID NO: 63319 - DNA, 33 bp, Homo sapien
cattcccccttctaaacgtgtctgctttcctct

SEQ ID NO: 63320 - DNA, 33 bp, Homo sapien
cattcccccttctaaatgtgtctgctttcctct

SEQ ID NO: 63321 - DNA, 33 bp, Homo sapien
atagatttttctctggcatatcatgaatgtgtg

SEQ ID NO: 63322 - DNA, 33 bp, Homo sapien
atagatttttctctggtatatcatgaatgtgtg

SEQ ID NO: 63323 - DNA, 33 bp, Homo sapien
caatcaggaataataaagtttcaggcatcccaa

SEQ ID NO: 63324 - DNA, 33 bp, Homo sapien
caatcaggaataataatgtttcaggcatcccaa

SEQ ID NO: 63325 - DNA, 33 bp, Homo sapien
attctggttgaacatacgataaataatcctttg

SEQ ID NO: 63326 - DNA, 33 bp, Homo sapien
attctggttgaacatatgataaataatcctttg

SEQ ID NO: 63327 - DNA, 33 bp, Homo sapien
aaggaaatgaaagaaaataaagcgacataccaa

SEQ ID NO: 63328 - DNA, 33 bp, Homo sapien
aaggaaatgaaagaaattaaagcgacataccaa

SEQ ID NO: 63329 - DNA, 33 bp, Homo sapien
acagatatacctaataactttcttcatctttta

SEQ ID NO: 63330 - DNA, 33 bp, Homo sapien
acagatatacctaatagctttcttcatctttta

SEQ ID NO: 63331 - DNA, 33 bp, Homo sapien
aatttatattcaagaacgattagacagtgaact

SEQ ID NO: 63332 - DNA, 33 bp, Homo sapien
aatttatattcaagaatgattagacagtgaact

SEQ ID NO: 63333 - DNA, 33 bp, Homo sapien
taaactccaatagcgacgtgttatatgttcctt

SEQ ID NO: 63334 - DNA, 33 bp, Homo sapien
taaactccaatagcgatgtgttatatgttcctt

SEQ ID NO: 63335 - DNA, 33 bp, Homo sapien
atacacaagaatagacaatgggtaacaagagat

SEQ ID NO: 63336 - DNA, 33 bp, Homo sapien
atacacaagaatagacgatgggtaacaagagat

SEQ ID NO: 63337 - DNA, 33 bp, Homo sapien
aatttaatggaaataaaaaagccacgccgggcg

SEQ ID NO: 63338 - DNA, 33 bp, Homo sapien
aatttaatggaaataagaaagccacgccgggcg

SEQ ID NO: 63339 - DNA, 33 bp, Homo sapien
ttttctcattgtaaaaagaggctacataatcac

SEQ ID NO: 63340 - DNA, 33 bp, Homo sapien
ttttctcattgtaaaaggaggctacataatcac

SEQ ID NO: 63341 - DNA, 33 bp, Homo sapien
ccagtaggcaccattaactgttgttcccctctt

SEQ ID NO: 63342 - DNA, 33 bp, Homo sapien
ccagtaggcaccattacctgttgttcccctctt

SEQ ID NO: 63343 - DNA, 33 bp, Homo sapien
aagaaggagaggataacgactaaagatgcagca

SEQ ID NO: 63344 - DNA, 33 bp, Homo sapien
aagaaggagaggataatgactaaagatgcagca

SEQ ID NO: 63345 - DNA, 33 bp, Homo sapien
agagagaaaatagtcaatactagaggatttaga

SEQ ID NO: 63346 - DNA, 33 bp, Homo sapien
agagagaaaatagtcagtactagaggatttaga

SEQ ID NO: 63347 - DNA, 33 bp, Homo sapien
ttagtttactaagaataatggcctctaactcca

SEQ ID NO: 63348 - DNA, 33 bp, Homo sapien
ttagtttactaagaatcatggcctctaactcca

SEQ ID NO: 63349 - DNA, 33 bp, Homo sapien
atacaaaaagggaaagcatgagaggctgtttta

SEQ ID NO: 63350 - DNA, 33 bp, Homo sapien
atacaaaaagggaaagtatgagaggctgtttta

SEQ ID NO: 63351 - DNA, 33 bp, Homo sapien
tcggcccaaaactgataatacacatgaatggtt

SEQ ID NO: 63352 - DNA, 33 bp, Homo sapien
tcggcccaaaactgatgatacacatgaatggtt

SEQ ID NO: 63353 - DNA, 33 bp, Homo sapien
tcttgcaaattttccactaataattactttcta

SEQ ID NO: 63354 - DNA, 33 bp, Homo sapien
tcttgcaaattttccattaataattactttcta

SEQ ID NO: 63355 - DNA, 33 bp, Homo sapien
tgctgcttctattcaacgttatactggttgaat

SEQ ID NO: 63356 - DNA, 33 bp, Homo sapien
tgctgcttctattcaatgttatactggttgaat

SEQ ID NO: 63357 - DNA, 33 bp, Homo sapien
aaggattccactgaaaactattgaactaataaa

SEQ ID NO: 63358 - DNA, 33 bp, Homo sapien
aaggattccactgaaacctattgaactaataaa

SEQ ID NO: 63359 - DNA, 33 bp, Homo sapien
ttatttattgacaagccgatccacctaggaaca

SEQ ID NO: 63360 - DNA, 33 bp, Homo sapien
ttatttattgacaagctgatccacctaggaaca

SEQ ID NO: 63361 - DNA, 33 bp, Homo sapien
tttgtgtatgatgtaaagaaagggtccaacttc

SEQ ID NO: 63362 - DNA, 33 bp, Homo sapien
tttgtgtatgatgtaaggaaagggtccaacttc

SEQ ID NO: 63363 - DNA, 33 bp, Homo sapien
atggctacagagtcaaacaactttttactggga

SEQ ID NO: 63364 - DNA, 33 bp, Homo sapien
atggctacagagtcaaccaactttttactggga

SEQ ID NO: 63365 - DNA, 33 bp, Homo sapien
gcatagacaggcatccaggaaactgtaattact

SEQ ID NO: 63366 - DNA, 33 bp, Homo sapien
gcatagacaggcatccgggaaactgtaattact

SEQ ID NO: 63367 - DNA, 33 bp, Homo sapien
aaacgactactagatcaaaccaaaagtgtctta

SEQ ID NO: 63368 - DNA, 33 bp, Homo sapien
aaacgactactagatccaaccaaaagtgtctta

SEQ ID NO: 63369 - DNA, 33 bp, Homo sapien
cctcatttcacagtaaatgttgcatcaagcagg

SEQ ID NO: 63370 - DNA, 33 bp, Homo sapien
cctcatttcacagtaattgttgcatcaagcagg

SEQ ID NO: 63371 - DNA, 33 bp, Homo sapien
tgtccttgttggaagacgagtatcagagaaaaa

SEQ ID NO: 63372 - DNA, 33 bp, Homo sapien
tgtccttgttggaagatgagtatcagagaaaaa

SEQ ID NO: 63373 - DNA, 33 bp, Homo sapien
ctgtctcattcagcaagatcagcaactatcctc

SEQ ID NO: 63374 - DNA, 33 bp, Homo sapien
ctgtctcattcagcaatatcagcaactatcctc

SEQ ID NO: 63375 - DNA, 33 bp, Homo sapien
catctatggttatagaaatatgatgtggtagaa

SEQ ID NO: 63376 - DNA, 33 bp, Homo sapien
catctatggttatagagatatgatgtggtagaa

SEQ ID NO: 63377 - DNA, 33 bp, Homo sapien
aattggagaagaattgcaactcactctctcaaa

SEQ ID NO: 63378 - DNA, 33 bp, Homo sapien
aattggagaagaattgtaactcactctctcaaa

SEQ ID NO: 63379 - DNA, 33 bp, Homo sapien
cttttttgcagtatcaaattcaattcatcatct

SEQ ID NO: 63380 - DNA, 33 bp, Homo sapien
cttttttgcagtatcagattcaattcatcatct

SEQ ID NO: 63381 - DNA, 33 bp, Homo sapien
aaaaattacacacagaaaaagtgacattaatag

SEQ ID NO: 63382 - DNA, 33 bp, Homo sapien
aaaaattacacacagagaaagtgacattaatag

SEQ ID NO: 63383 - DNA, 33 bp, Homo sapien
attattaagcattttggaagtgtgaacaaactg

SEQ ID NO: 63384 - DNA, 33 bp, Homo sapien
attattaagcattttgtaagtgtgaacaaactg

SEQ ID NO: 63385 - DNA, 33 bp, Homo sapien
agatagtcactgagaacttattatgtagtgtga

SEQ ID NO: 63386 - DNA, 33 bp, Homo sapien
agatagtcactgagaagttattatgtagtgtga

SEQ ID NO: 63387 - DNA, 33 bp, Homo sapien
gaactccttctagaaacatggtcaataatcata

SEQ ID NO: 63388 - DNA, 33 bp, Homo sapien
gaactccttctagaaagatggtcaataatcata

SEQ ID NO: 63389 - DNA, 33 bp, Homo sapien
actaagactgggttcaccattctgtgtttcttt

SEQ ID NO: 63390 - DNA, 33 bp, Homo sapien
actaagactgggttcatcattctgtgtttcttt

SEQ ID NO: 63391 - DNA, 33 bp, Homo sapien
tatccttttaacctgcactttaataaatgttaa

SEQ ID NO: 63392 - DNA, 33 bp, Homo sapien
tatccttttaacctgcgctttaataaatgttaa

SEQ ID NO: 63393 - DNA, 33 bp, Homo sapien
cacaaactacacctaaacacagtgcctcagaca

SEQ ID NO: 63394 - DNA, 33 bp, Homo sapien
cacaaactacacctaagcacagtgcctcagaca

SEQ ID NO: 63395 - DNA, 33 bp, Homo sapien
cagctctagaacaccaataaatcacagcttctc

SEQ ID NO: 63396 - DNA, 33 bp, Homo sapien
cagctctagaacaccagtaaatcacagcttctc

SEQ ID NO: 63397 - DNA, 33 bp, Homo sapien
ataaagcatataactaagggtttcagaactggc

SEQ ID NO: 63398 - DNA, 33 bp, Homo sapien
ataaagcatataactacgggtttcagaactggc

SEQ ID NO: 63399 - DNA, 33 bp, Homo sapien
taatgtaggataattgcagttcattatgaaaat

SEQ ID NO: 63400 - DNA, 33 bp, Homo sapien
taatgtaggataattgtagttcattatgaaaat

SEQ ID NO: 63401 - DNA, 33 bp, Homo sapien
agagaattgtttatgaccaggaatttgaggcca

SEQ ID NO: 63402 - DNA, 33 bp, Homo sapien
agagaattgtttatgatcaggaatttgaggcca

SEQ ID NO: 63403 - DNA, 33 bp, Homo sapien
acattgctattatgaacaacgttttgtaaaaat

SEQ ID NO: 63404 - DNA, 33 bp, Homo sapien
acattgctattatgaagaacgttttgtaaaaat

SEQ ID NO: 63405 - DNA, 33 bp, Homo sapien
acacttgggagcaaaaggattaagggcggctct

SEQ ID NO: 63406 - DNA, 33 bp, Homo sapien
acacttgggagcaaaatgattaagggcggctct

SEQ ID NO: 63407 - DNA, 33 bp, Homo sapien
gcctattttgctttgccctttatggtccaatta

SEQ ID NO: 63408 - DNA, 33 bp, Homo sapien
gcctattttgctttgctctttatggtccaatta

SEQ ID NO: 63409 - DNA, 33 bp, Homo sapien
ggattttggtccctgaaatacttgttatgctgg

SEQ ID NO: 63410 - DNA, 33 bp, Homo sapien
ggattttggtccctgacatacttgttatgctgg

SEQ ID NO: 63411 - DNA, 33 bp, Homo sapien
atctccagaataagcaactttaaaatgtattca

SEQ ID NO: 63412 - DNA, 33 bp, Homo sapien
atctccagaataagcagctttaaaatgtattca

SEQ ID NO: 63413 - DNA, 33 bp, Homo sapien
gctaagtaataactaaacgaggaattgaggatg

SEQ ID NO: 63414 - DNA, 33 bp, Homo sapien
gctaagtaataactaagcgaggaattgaggatg

SEQ ID NO: 63415 - DNA, 33 bp, Homo sapien
caggtgtctatgcaaaatagtaaaagcacattt

SEQ ID NO: 63416 - DNA, 33 bp, Homo sapien
caggtgtctatgcaaagtagtaaaagcacattt

SEQ ID NO: 63417 - DNA, 33 bp, Homo sapien
gacaaatgacttataactggtatgtaaaaacct

SEQ ID NO: 63418 - DNA, 33 bp, Homo sapien
gacaaatgacttataagtggtatgtaaaaacct

SEQ ID NO: 63419 - DNA, 33 bp, Homo sapien
aataaagttctgttgaaaacacctgaatctaca

SEQ ID NO: 63420 - DNA, 33 bp, Homo sapien
aataaagttctgttgataacacctgaatctaca

SEQ ID NO: 63421 - DNA, 33 bp, Homo sapien
aagtttctggttgcaacattagcggagtaagaa

SEQ ID NO: 63422 - DNA, 33 bp, Homo sapien
aagtttctggttgcaatattagcggagtaagaa

SEQ ID NO: 63423 - DNA, 33 bp, Homo sapien
attttacactgaaaacgctgtcaatgtaattta

SEQ ID NO: 63424 - DNA, 33 bp, Homo sapien
attttacactgaaaactctgtcaatgtaattta

SEQ ID NO: 63425 - DNA, 33 bp, Homo sapien
aaaagaacaaaaaagaatcatctaagtagatgt

SEQ ID NO: 63426 - DNA, 33 bp, Homo sapien
aaaagaacaaaaaagattcatctaagtagatgt

SEQ ID NO: 63427 - DNA, 33 bp, Homo sapien
atggattataagagcccaaagatgatggaatat

SEQ ID NO: 63428 - DNA, 33 bp, Homo sapien
atggattataagagcctaaagatgatggaatat

SEQ ID NO: 63429 - DNA, 33 bp, Homo sapien
tactgagtatatgtgcgctctctgaaaggtata

SEQ ID NO: 63430 - DNA, 33 bp, Homo sapien
tactgagtatatgtgctctctctgaaaggtata

SEQ ID NO: 63431 - DNA, 33 bp, Homo sapien
tccatggttattagaactgtgaaatggtagtac

SEQ ID NO: 63432 - DNA, 33 bp, Homo sapien
tccatggttattagaattgtgaaatggtagtac

SEQ ID NO: 63433 - DNA, 33 bp, Homo sapien
cttcttttaaggcctggatcctatgaatatcct

SEQ ID NO: 63434 - DNA, 33 bp, Homo sapien
cttcttttaaggcctgtatcctatgaatatcct

SEQ ID NO: 63435 - DNA, 33 bp, Homo sapien
aatatgtccaaatcaaagtaaaactacagtaaa

SEQ ID NO: 63436 - DNA, 33 bp, Homo sapien
aatatgtccaaatcaaggtaaaactacagtaaa

SEQ ID NO: 63437 - DNA, 33 bp, Homo sapien
tcttgaagggcagttaagttcctgaatgttcaa

SEQ ID NO: 63438 - DNA, 33 bp, Homo sapien
tcttgaagggcagttacgttcctgaatgttcaa

SEQ ID NO: 63439 - DNA, 33 bp, Homo sapien
atgatgtccaaaagaaagtacagagtgaaagta

SEQ ID NO: 63440 - DNA, 33 bp, Homo sapien
atgatgtccaaaagaaggtacagagtgaaagta

SEQ ID NO: 63441 - DNA, 33 bp, Homo sapien
tttcacttagctcttaacagatgagtaagaggc

SEQ ID NO: 63442 - DNA, 33 bp, Homo sapien
tttcacttagctcttatcagatgagtaagaggc

SEQ ID NO: 63443 - DNA, 33 bp, Homo sapien
tgaagcggtaatactacggctcaattttagcac

SEQ ID NO: 63444 - DNA, 33 bp, Homo sapien
tgaagcggtaatactatggctcaattttagcac

SEQ ID NO: 63445 - DNA, 33 bp, Homo sapien
cactgagaaaggaacacataacttgattcaaat

SEQ ID NO: 63446 - DNA, 33 bp, Homo sapien
cactgagaaaggaacagataacttgattcaaat

SEQ ID NO: 63447 - DNA, 33 bp, Homo sapien
atatcacttaccaattaaatcgtcactcctgca

SEQ ID NO: 63448 - DNA, 33 bp, Homo sapien
atatcacttaccaattgaatcgtcactcctgca

SEQ ID NO: 63449 - DNA, 33 bp, Homo sapien
tcacaggaccatcagtaaatcatgtcgtatcat

SEQ ID NO: 63450 - DNA, 33 bp, Homo sapien
tcacaggaccatcagttaatcatgtcgtatcat

SEQ ID NO: 63451 - DNA, 33 bp, Homo sapien
gttctcaaaagaagacactaatcattaatcatc

SEQ ID NO: 63452 - DNA, 33 bp, Homo sapien
gttctcaaaagaagaccctaatcattaatcatc

SEQ ID NO: 63453 - DNA, 33 bp, Homo sapien
ttggtggtagataaaagttagctagtcacgtgt

SEQ ID NO: 63454 - DNA, 33 bp, Homo sapien
ttggtggtagataaaatttagctagtcacgtgt

SEQ ID NO: 63455 - DNA, 33 bp, Homo sapien
gtctctcaaattcccaaatatttatcaaaatgt

SEQ ID NO: 63456 - DNA, 33 bp, Homo sapien
gtctctcaaattcccacatatttatcaaaatgt

SEQ ID NO: 63457 - DNA, 33 bp, Homo sapien
acatattaatgcaaaccggcaggtaagaagaaa

SEQ ID NO: 63458 - DNA, 33 bp, Homo sapien
acatattaatgcaaactggcaggtaagaagaaa

SEQ ID NO: 63459 - DNA, 33 bp, Homo sapien
agaccaagatttttgccgatatctgtaggaaga

SEQ ID NO: 63460 - DNA, 33 bp, Homo sapien
agaccaagatttttgctgatatctgtaggaaga

SEQ ID NO: 63461 - DNA, 33 bp, Homo sapien
atattctcacctattgcataaactcaaatcatt

SEQ ID NO: 63462 - DNA, 33 bp, Homo sapien
atattctcacctattgtataaactcaaatcatt

SEQ ID NO: 63463 - DNA, 33 bp, Homo sapien
aattggtgtaaacacactggaaaactgttcatt

SEQ ID NO: 63464 - DNA, 33 bp, Homo sapien
aattggtgtaaacacattggaaaactgttcatt

SEQ ID NO: 63465 - DNA, 33 bp, Homo sapien
gtgaagatgtagaacaaatgaaacattcaccat

SEQ ID NO: 63466 - DNA, 33 bp, Homo sapien
gtgaagatgtagaacagatgaaacattcaccat

SEQ ID NO: 63467 - DNA, 33 bp, Homo sapien
gttttcactgtggatacgtagtggggctgaggt

SEQ ID NO: 63468 - DNA, 33 bp, Homo sapien
gttttcactgtggataggtagtggggctgaggt

SEQ ID NO: 63469 - DNA, 33 bp, Homo sapien
aattcaagttcaaacaatgaatagcttacggta

SEQ ID NO: 63470 - DNA, 33 bp, Homo sapien
aattcaagttcaaacagtgaatagcttacggta

SEQ ID NO: 63471 - DNA, 33 bp, Homo sapien
gtgagttcaaaggagcactagtttttacctgaa

SEQ ID NO: 63472 - DNA, 33 bp, Homo sapien
gtgagttcaaaggagcgctagtttttacctgaa

SEQ ID NO: 63473 - DNA, 33 bp, Homo sapien
gtggcatagaatgaaacaggcatagaatgaaaa

SEQ ID NO: 63474 - DNA, 33 bp, Homo sapien
gtggcatagaatgaaagaggcatagaatgaaaa

SEQ ID NO: 63475 - DNA, 33 bp, Homo sapien
agtctcatctctcacactgggggagtactagcg

SEQ ID NO: 63476 - DNA, 33 bp, Homo sapien
agtctcatctctcacattgggggagtactagcg

SEQ ID NO: 63477 - DNA, 33 bp, Homo sapien
ggcttataggtggaaaaaactcatctctagatg

SEQ ID NO: 63478 - DNA, 33 bp, Homo sapien
ggcttataggtggaaagaactcatctctagatg

SEQ ID NO: 63479 - DNA, 33 bp, Homo sapien
gaaagcaatatattcccgaattcaacaatgtgt

SEQ ID NO: 63480 - DNA, 33 bp, Homo sapien
gaaagcaatatattcctgaattcaacaatgtgt

SEQ ID NO: 63481 - DNA, 33 bp, Homo sapien
tcaccagaaacaagacactgaattgactggcac

SEQ ID NO: 63482 - DNA, 33 bp, Homo sapien
tcaccagaaacaagacgctgaattgactggcac

SEQ ID NO: 63483 - DNA, 33 bp, Homo sapien
atatgacaaaaagctcaacatcagtgatcatta

SEQ ID NO: 63484 - DNA, 33 bp, Homo sapien
atatgacaaaaagctccacatcagtgatcatta

SEQ ID NO: 63485 - DNA, 33 bp, Homo sapien
ttgtgagccagttaaacctcctctctttacaaa

SEQ ID NO: 63486 - DNA, 33 bp, Homo sapien
ttgtgagccagttaaatctcctctctttacaaa

SEQ ID NO: 63487 - DNA, 33 bp, Homo sapien
taattttaaggacaacaggattaagaagttatt

SEQ ID NO: 63488 - DNA, 33 bp, Homo sapien
taattttaaggacaactggattaagaagttatt

SEQ ID NO: 63489 - DNA, 33 bp, Homo sapien
gacacagaaatactgaagtaaatgtacgtggag

SEQ ID NO: 63490 - DNA, 33 bp, Homo sapien
gacacagaaatactgaggtaaatgtacgtggag

SEQ ID NO: 63491 - DNA, 33 bp, Homo sapien
gaacaacctgattaaaaatgggcaaaacacctg

SEQ ID NO: 63492 - DNA, 33 bp, Homo sapien
gaacaacctgattaaagatgggcaaaacacctg

SEQ ID NO: 63493 - DNA, 33 bp, Homo sapien
attagtgagagttagcaccccaatcaaatctaa

SEQ ID NO: 63494 - DNA, 33 bp, Homo sapien
attagtgagagttagccccccaatcaaatctaa

SEQ ID NO: 63495 - DNA, 33 bp, Homo sapien
acaaatgaaaggaagacgcaatctcatatccac

SEQ ID NO: 63496 - DNA, 33 bp, Homo sapien
acaaatgaaaggaagatgcaatctcatatccac

SEQ ID NO: 63497 - DNA, 33 bp, Homo sapien
gaatttatccttactcagaaaatcatgatggcc

SEQ ID NO: 63498 - DNA, 33 bp, Homo sapien
gaatttatccttactcggaaaatcatgatggcc

SEQ ID NO: 63499 - DNA, 33 bp, Homo sapien
gaatgaaaacaaaagaagagcatatcaaaatgt

SEQ ID NO: 63500 - DNA, 33 bp, Homo sapien
gaatgaaaacaaaagaggagcatatcaaaatgt

SEQ ID NO: 63501 - DNA, 33 bp, Homo sapien
agcaatacgagcttaccagttttactttgtttg

SEQ ID NO: 63502 - DNA, 33 bp, Homo sapien
agcaatacgagcttactagttttactttgtttg

SEQ ID NO: 63503 - DNA, 33 bp, Homo sapien
atgcttcataaaacgaaacacaaagctaaattt

SEQ ID NO: 63504 - DNA, 33 bp, Homo sapien
atgcttcataaaacgagacacaaagctaaattt

SEQ ID NO: 63505 - DNA, 33 bp, Homo sapien
tgagaaatgcattccactatgatggctgcaaca

SEQ ID NO: 63506 - DNA, 33 bp, Homo sapien
tgagaaatgcattccattatgatggctgcaaca

SEQ ID NO: 63507 - DNA, 33 bp, Homo sapien
ttcaagctaccaaagccgaaattacccagtact

SEQ ID NO: 63508 - DNA, 33 bp, Homo sapien
ttcaagctaccaaagctgaaattacccagtact

SEQ ID NO: 63509 - DNA, 33 bp, Homo sapien
tatagcagcagtgtaccaggctgtaaatgcaaa

SEQ ID NO: 63510 - DNA, 33 bp, Homo sapien
tatagcagcagtgtacgaggctgtaaatgcaaa

SEQ ID NO: 63511 - DNA, 33 bp, Homo sapien
gaatctcaggatatacaaggatttgaataaatg

SEQ ID NO: 63512 - DNA, 33 bp, Homo sapien
gaatctcaggatataccaggatttgaataaatg

SEQ ID NO: 63513 - DNA, 33 bp, Homo sapien
tgaaaaacaacagatactactgaggcagtggag

SEQ ID NO: 63514 - DNA, 33 bp, Homo sapien
tgaaaaacaacagatattactgaggcagtggag

SEQ ID NO: 63515 - DNA, 33 bp, Homo sapien
caaggtgaatttagacagagattacacttttca

SEQ ID NO: 63516 - DNA, 33 bp, Homo sapien
caaggtgaatttagactgagattacacttttca

SEQ ID NO: 63517 - DNA, 33 bp, Homo sapien
aaatgtttgcaaaatacgtgtctgataaaagac

SEQ ID NO: 63518 - DNA, 33 bp, Homo sapien
aaatgtttgcaaaatatgtgtctgataaaagac

SEQ ID NO: 63519 - DNA, 33 bp, Homo sapien
gaaaaactgggcaaaagacagacatttctcaaa

SEQ ID NO: 63520 - DNA, 33 bp, Homo sapien
gaaaaactgggcaaaatacagacatttctcaaa

SEQ ID NO: 63521 - DNA, 33 bp, Homo sapien
ttctctatgcattaaacacaactgtgcaaaatg

SEQ ID NO: 63522 - DNA, 33 bp, Homo sapien
ttctctatgcattaaatacaactgtgcaaaatg

SEQ ID NO: 63523 - DNA, 33 bp, Homo sapien
gttttaggaataatgacaacgaaataatatctg

SEQ ID NO: 63524 - DNA, 33 bp, Homo sapien
gttttaggaataatgagaacgaaataatatctg

SEQ ID NO: 63525 - DNA, 33 bp, Homo sapien
atatgaccagacattaagattcataggatgaaa

SEQ ID NO: 63526 - DNA, 33 bp, Homo sapien
atatgaccagacattatgattcataggatgaaa

SEQ ID NO: 63527 - DNA, 33 bp, Homo sapien
tccatgcactcagaaggctctaggtgatgatca

SEQ ID NO: 63528 - DNA, 33 bp, Homo sapien
tccatgcactcagaagtctctaggtgatgatca

SEQ ID NO: 63529 - DNA, 33 bp, Homo sapien
gaaaatgaagtttcccagacagaaaaggtcatt

SEQ ID NO: 63530 - DNA, 33 bp, Homo sapien
gaaaatgaagtttcccggacagaaaaggtcatt

SEQ ID NO: 63531 - DNA, 33 bp, Homo sapien
aaaacatctgtacaaaatttgactatgttgaac

SEQ ID NO: 63532 - DNA, 33 bp, Homo sapien
aaaacatctgtacaaattttgactatgttgaac

SEQ ID NO: 63533 - DNA, 33 bp, Homo sapien
tgcatgtgatgataaacacatcgtctaaactta

SEQ ID NO: 63534 - DNA, 33 bp, Homo sapien
tgcatgtgatgataaatacatcgtctaaactta

SEQ ID NO: 63535 - DNA, 33 bp, Homo sapien
tgatgccacatatttcaaaattaataaattatg

SEQ ID NO: 63536 - DNA, 33 bp, Homo sapien
tgatgccacatatttcgaaattaataaattatg

SEQ ID NO: 63537 - DNA, 33 bp, Homo sapien
tctgttcaggaagtacaaatattaccattgtgc

SEQ ID NO: 63538 - DNA, 33 bp, Homo sapien
tctgttcaggaagtacgaatattaccattgtgc

SEQ ID NO: 63539 - DNA, 33 bp, Homo sapien
cagtcctcagttctcaagcaaatgggcctctca

SEQ ID NO: 63540 - DNA, 33 bp, Homo sapien
cagtcctcagttctcaggcaaatgggcctctca

SEQ ID NO: 63541 - DNA, 33 bp, Homo sapien
gaagatttcagagaaaaataaggacaaacaaat

SEQ ID NO: 63542 - DNA, 33 bp, Homo sapien
gaagatttcagagaaagataaggacaaacaaat

SEQ ID NO: 63543 - DNA, 33 bp, Homo sapien
tgccaattgttgcttacagaaattgggcttcta

SEQ ID NO: 63544 - DNA, 33 bp, Homo sapien
tgccaattgttgcttatagaaattgggcttcta

SEQ ID NO: 63545 - DNA, 33 bp, Homo sapien
gtctagatggccacaactatagactagagcaag

SEQ ID NO: 63546 - DNA, 33 bp, Homo sapien
gtctagatggccacaattatagactagagcaag

SEQ ID NO: 63547 - DNA, 33 bp, Homo sapien
taatgtcaagaaagtaacaggacctcaaacaaa

SEQ ID NO: 63548 - DNA, 33 bp, Homo sapien
taatgtcaagaaagtaccaggacctcaaacaaa

SEQ ID NO: 63549 - DNA, 33 bp, Homo sapien
taccagaccttcaaaaattaatggtattaatcc

SEQ ID NO: 63550 - DNA, 33 bp, Homo sapien
taccagaccttcaaaatttaatggtattaatcc

SEQ ID NO: 63551 - DNA, 33 bp, Homo sapien
tggccatttgaatgcaagactagaagagtattg

SEQ ID NO: 63552 - DNA, 33 bp, Homo sapien
tggccatttgaatgcatgactagaagagtattg

SEQ ID NO: 63553 - DNA, 33 bp, Homo sapien
ggccaagaagacacaactgtacaatatcctata

SEQ ID NO: 63554 - DNA, 33 bp, Homo sapien
ggccaagaagacacaattgtacaatatcctata

SEQ ID NO: 63555 - DNA, 33 bp, Homo sapien
taatgtgaaacagttccaacatgagttgaaagc

SEQ ID NO: 63556 - DNA, 33 bp, Homo sapien
taatgtgaaacagttctaacatgagttgaaagc

SEQ ID NO: 63557 - DNA, 33 bp, Homo sapien
taactcttgaatctcaaaaaattgtatttagtt

SEQ ID NO: 63558 - DNA, 33 bp, Homo sapien
taactcttgaatctcataaaattgtatttagtt

SEQ ID NO: 63559 - DNA, 33 bp, Homo sapien
tttcataggatagtcactcaggtacattcatag

SEQ ID NO: 63560 - DNA, 33 bp, Homo sapien
tttcataggatagtcagtcaggtacattcatag

SEQ ID NO: 63561 - DNA, 33 bp, Homo sapien
attatggtttgtggagccctttattactaaaca

SEQ ID NO: 63562 - DNA, 33 bp, Homo sapien
attatggtttgtggagtcctttattactaaaca

SEQ ID NO: 63563 - DNA, 33 bp, Homo sapien
cccaaaaggtctttgtaaaatatgcatagtatc

SEQ ID NO: 63564 - DNA, 33 bp, Homo sapien
cccaaaaggtctttgtgaaatatgcatagtatc

SEQ ID NO: 63565 - DNA, 33 bp, Homo sapien
atattggtatatgtgaaaattttgatggcaaag

SEQ ID NO: 63566 - DNA, 33 bp, Homo sapien
atattggtatatgtgacaattttgatggcaaag

SEQ ID NO: 63567 - DNA, 33 bp, Homo sapien
gtctaaaatgccttaaaaatctggcctcctgct

SEQ ID NO: 63568 - DNA, 33 bp, Homo sapien
gtctaaaatgccttaacaatctggcctcctgct

SEQ ID NO: 63569 - DNA, 33 bp, Homo sapien
aagcaaacagaaagtcaaaatatgtcctaagaa

SEQ ID NO: 63570 - DNA, 33 bp, Homo sapien
aagcaaacagaaagtcgaaatatgtcctaagaa

SEQ ID NO: 63571 - DNA, 33 bp, Homo sapien
agaaacatgatactcaagttttacattacatac

SEQ ID NO: 63572 - DNA, 33 bp, Homo sapien
agaaacatgatactcaggttttacattacatac

SEQ ID NO: 63573 - DNA, 33 bp, Homo sapien
tatattcagaattaatcagaggcattatcctca

SEQ ID NO: 63574 - DNA, 33 bp, Homo sapien
tatattcagaattaattagaggcattatcctca

SEQ ID NO: 63575 - DNA, 33 bp, Homo sapien
tgaaaaactctataccaagttcatttccctttc

SEQ ID NO: 63576 - DNA, 33 bp, Homo sapien
tgaaaaactctataccgagttcatttccctttc

SEQ ID NO: 63577 - DNA, 33 bp, Homo sapien
cagacaggaatgagaaagtgaatcactccatag

SEQ ID NO: 63578 - DNA, 33 bp, Homo sapien
cagacaggaatgagaaggtgaatcactccatag

SEQ ID NO: 63579 - DNA, 33 bp, Homo sapien
cagctataagtcaacaaacatagtaatttgcct

SEQ ID NO: 63580 - DNA, 33 bp, Homo sapien
cagctataagtcaacacacatagtaatttgcct

SEQ ID NO: 63581 - DNA, 33 bp, Homo sapien
cttattcctagaccaacggtcaagacaaaactg

SEQ ID NO: 63582 - DNA, 33 bp, Homo sapien
cttattcctagaccaatggtcaagacaaaactg

SEQ ID NO: 63583 - DNA, 33 bp, Homo sapien
cacctgtttgctggtaagacaaaggagattggt

SEQ ID NO: 63584 - DNA, 33 bp, Homo sapien
cacctgtttgctggtaggacaaaggagattggt

SEQ ID NO: 63585 - DNA, 33 bp, Homo sapien
agttttgcctctgttacgagcatcttaaaaata

SEQ ID NO: 63586 - DNA, 33 bp, Homo sapien
agttttgcctctgttatgagcatcttaaaaata

SEQ ID NO: 63587 - DNA, 33 bp, Homo sapien
taattgtcctctccaaatgctcacatcatcctg

SEQ ID NO: 63588 - DNA, 33 bp, Homo sapien
taattgtcctctccaagtgctcacatcatcctg

SEQ ID NO: 63589 - DNA, 33 bp, Homo sapien
tgagaaagttagaagacagtgatgatgatgtaa

SEQ ID NO: 63590 - DNA, 33 bp, Homo sapien
tgagaaagttagaagatagtgatgatgatgtaa

SEQ ID NO: 63591 - DNA, 33 bp, Homo sapien
tctgttctaccatcaactacatcattcgcaaac

SEQ ID NO: 63592 - DNA, 33 bp, Homo sapien
tctgttctaccatcaattacatcattcgcaaac

SEQ ID NO: 63593 - DNA, 33 bp, Homo sapien
agcctactcgatcatcaaggattacatttttga

SEQ ID NO: 63594 - DNA, 33 bp, Homo sapien
agcctactcgatcatccaggattacatttttga

SEQ ID NO: 63595 - DNA, 33 bp, Homo sapien
acaactaatgacagaagtacttatttccaatct

SEQ ID NO: 63596 - DNA, 33 bp, Homo sapien
acaactaatgacagaattacttatttccaatct

SEQ ID NO: 63597 - DNA, 33 bp, Homo sapien
agaatagagtcccaaacattcacatgaactcat

SEQ ID NO: 63598 - DNA, 33 bp, Homo sapien
agaatagagtcccaaatattcacatgaactcat

SEQ ID NO: 63599 - DNA, 33 bp, Homo sapien
caaggaagtatagaaaacctctgattctctgaa

SEQ ID NO: 63600 - DNA, 33 bp, Homo sapien
caaggaagtatagaaaccctctgattctctgaa

SEQ ID NO: 63601 - DNA, 33 bp, Homo sapien
ctctctctgtgatgtacgaagagaagtttttcc

SEQ ID NO: 63602 - DNA, 33 bp, Homo sapien
ctctctctgtgatgtatgaagagaagtttttcc

SEQ ID NO: 63603 - DNA, 33 bp, Homo sapien
atgctgacatttgaagacgttaaaaagcatcca

SEQ ID NO: 63604 - DNA, 33 bp, Homo sapien
atgctgacatttgaaggcgttaaaaagcatcca

SEQ ID NO: 63605 - DNA, 33 bp, Homo sapien
aattattagttaaagcaaacatttcacagaagg

SEQ ID NO: 63606 - DNA, 33 bp, Homo sapien
aattattagttaaagcgaacatttcacagaagg

SEQ ID NO: 63607 - DNA, 33 bp, Homo sapien
tgttgtattgggttgactacaatctcattaatg

SEQ ID NO: 63608 - DNA, 33 bp, Homo sapien
tgttgtattgggttgattacaatctcattaatg

SEQ ID NO: 63609 - DNA, 33 bp, Homo sapien
aagaaatgaagttcaacatgggaatagctggta

SEQ ID NO: 63610 - DNA, 33 bp, Homo sapien
aagaaatgaagttcaatatgggaatagctggta

SEQ ID NO: 63611 - DNA, 33 bp, Homo sapien
cggaactgcatttaaacaaagggtgggagagct

SEQ ID NO: 63612 - DNA, 33 bp, Homo sapien
cggaactgcatttaaagaaagggtgggagagct

SEQ ID NO: 63613 - DNA, 33 bp, Homo sapien
ttgcagtgaggtggaaaatagaccctctgcatt

SEQ ID NO: 63614 - DNA, 33 bp, Homo sapien
ttgcagtgaggtggaagatagaccctctgcatt

SEQ ID NO: 63615 - DNA, 33 bp, Homo sapien
ggtctctatctgcaagcaactgaagctgtttct

SEQ ID NO: 63616 - DNA, 33 bp, Homo sapien
ggtctctatctgcaagtaactgaagctgtttct

SEQ ID NO: 63617 - DNA, 33 bp, Homo sapien
gctcagagagtgaagagagtaaggccatggagg

SEQ ID NO: 63618 - DNA, 33 bp, Homo sapien
gctcagagagtgaagatagtaaggccatggagg

SEQ ID NO: 63619 - DNA, 33 bp, Homo sapien
ctaagatatttggaaacgtaactgtctagaatt

SEQ ID NO: 63620 - DNA, 33 bp, Homo sapien
ctaagatatttggaaatgtaactgtctagaatt

SEQ ID NO: 63621 - DNA, 33 bp, Homo sapien
gcattttctgtcactacctattatttaccagta

SEQ ID NO: 63622 - DNA, 33 bp, Homo sapien
gcattttctgtcactatctattatttaccagta

SEQ ID NO: 63623 - DNA, 33 bp, Homo sapien
aaagatacactccagaaacaacctagtgatata

SEQ ID NO: 63624 - DNA, 33 bp, Homo sapien
aaagatacactccagagacaacctagtgatata

SEQ ID NO: 63625 - DNA, 33 bp, Homo sapien; identical to SEQ ID NO: 63623

SEQ ID NO: 63626 - DNA, 33 bp, Homo sapien; identical to SEQ ID NO: 63624

SEQ ID NO: 63627 - DNA, 33 bp, Homo sapien
agtggaagacgttgcaatctgtaatgcactgaa

SEQ ID NO: 63628 - DNA, 33 bp, Homo sapien
agtggaagacgttgcagtctgtaatgcactgaa

SEQ ID NO: 63629 - DNA, 33 bp, Homo sapien
ctctagaggaaagagcagagatgaaggatcatg

SEQ ID NO: 63630 - DNA, 33 bp, Homo sapien
ctctagaggaaagagccgagatgaaggatcatg

SEQ ID NO: 63631 - DNA, 33 bp, Homo sapien
caagggcaaatcacaaatggtcagaatatcaga

SEQ ID NO: 63632 - DNA, 33 bp, Homo sapien
caagggcaaatcacaagtggtcagaatatcaga

SEQ ID NO: 63633 - DNA, 33 bp, Homo sapien
ttcttctaccagcttccctgaaatcgtggcaaa

SEQ ID NO: 63634 - DNA, 33 bp, Homo sapien
ttcttctaccagcttctctgaaatcgtggcaaa

SEQ ID NO: 63635 - DNA, 33 bp, Homo sapien
gtaaaaaaatttatcaaatggactcaacataat

SEQ ID NO: 63636 - DNA, 33 bp, Homo sapien
gtaaaaaaatttatcagatggactcaacataat

SEQ ID NO: 63637 - DNA, 33 bp, Homo sapien
tttctgcactatcataacaatctctaacaagga

SEQ ID NO: 63638 - DNA, 33 bp, Homo sapien
tttctgcactatcatagcaatctctaacaagga

SEQ ID NO: 63639 - DNA, 33 bp, Homo sapien
tatttgtatcagagtccataactgtgctatttt

SEQ ID NO: 63640 - DNA, 33 bp, Homo sapien
tatttgtatcagagtctataactgtgctatttt

SEQ ID NO: 63641 - DNA, 33 bp, Homo sapien
tagaattgtgcttttaaaggcaatatttcaatg

SEQ ID NO: 63642 - DNA, 33 bp, Homo sapien
tagaattgtgcttttagaggcaatatttcaatg

SEQ ID NO: 63643 - DNA, 33 bp, Homo sapien
gtatctggatatgtgacgaggattgcctttttt

SEQ ID NO: 63644 - DNA, 33 bp, Homo sapien
gtatctggatatgtgatgaggattgcctttttt

SEQ ID NO: 63645 - DNA, 33 bp, Homo sapien
aatgaggctggtttcactaacatacatatcttc

SEQ ID NO: 63646 - DNA, 33 bp, Homo sapien
aatgaggctggtttcattaacatacatatcttc

SEQ ID NO: 63647 - DNA, 33 bp, Homo sapien
ttgaaacctcagatctaaaaagcagtagattca

SEQ ID NO: 63648 - DNA, 33 bp, Homo sapien
ttgaaacctcagatctgaaaagcagtagattca

SEQ ID NO: 63649 - DNA, 33 bp, Homo sapien
acattccacatttctacgctgttgataagtgtt

SEQ ID NO: 63650 - DNA, 33 bp, Homo sapien
acattccacatttctatgctgttgataagtgtt

SEQ ID NO: 63651 - DNA, 33 bp, Homo sapien
atccctcctagtgacaaggtttggagacattta

SEQ ID NO: 63652 - DNA, 33 bp, Homo sapien
atccctcctagtgacagggtttggagacattta

SEQ ID NO: 63653 - DNA, 33 bp, Homo sapien
aacaaaatacacaaaaatgcagaagaaagtgac

SEQ ID NO: 63654 - DNA, 33 bp, Homo sapien
aacaaaatacacaaaagtgcagaagaaagtgac

SEQ ID NO: 63655 - DNA, 33 bp, Homo sapien
caaggaaaataaactaaagcagtgaggttccct

SEQ ID NO: 63656 - DNA, 33 bp, Homo sapien
caaggaaaataaactagagcagtgaggttccct

SEQ ID NO: 63657 - DNA, 33 bp, Homo sapien
tgcagtgtttactttacgctgtgctgaactgat

SEQ ID NO: 63658 - DNA, 33 bp, Homo sapien
tgcagtgtttactttaggctgtgctgaactgat

SEQ ID NO: 63659 - DNA, 33 bp, Homo sapien
taggtatgaattactacgagcagaaagcctagt

SEQ ID NO: 63660 - DNA, 33 bp, Homo sapien
taggtatgaattactatgagcagaaagcctagt

SEQ ID NO: 63661 - DNA, 33 bp, Homo sapien
tcaacaacttttaaggcatctggcaggtttcaa

SEQ ID NO: 63662 - DNA, 33 bp, Homo sapien
tcaacaacttttaaggtatctggcaggtttcaa

SEQ ID NO: 63663 - DNA, 33 bp, Homo sapien
tgaaggctaaggaagaccagtttctacttgaag

SEQ ID NO: 63664 - DNA, 33 bp, Homo sapien
tgaaggctaaggaagatcagtttctacttgaag

SEQ ID NO: 63665 - DNA, 33 bp, Homo sapien
ttcacattttattacaccgaatgttatcaaaag

SEQ ID NO: 63666 - DNA, 33 bp, Homo sapien
ttcacattttattacatcgaatgttatcaaaag

SEQ ID NO: 63667 - DNA, 33 bp, Homo sapien
ttttctattttttttcccataaacaaactcatt

SEQ ID NO: 63668 - DNA, 33 bp, Homo sapien
ttttctattttttttctcataaacaaactcatt

SEQ ID NO: 63669 - DNA, 33 bp, Homo sapien
ctaaagatcacttctaactccttgtaacttctc

SEQ ID NO: 63670 - DNA, 33 bp, Homo sapien
ctaaagatcacttctagctccttgtaacttctc

SEQ ID NO: 63671 - DNA, 33 bp, Homo sapien
tcatttagaactttcaaaaatggataaaataat

SEQ ID NO: 63672 - DNA, 33 bp, Homo sapien
tcatttagaactttcagaaatggataaaataat

SEQ ID NO: 63673 - DNA, 33 bp, Homo sapien
aaagcttccaaacaataatgcagacataataaa

SEQ ID NO: 63674 - DNA, 33 bp, Homo sapien
aaagcttccaaacaatgatgcagacataataaa

SEQ ID NO: 63675 - DNA, 33 bp, Homo sapien
tactacaagtccaaaccaaaacaggatagtact

SEQ ID NO: 63676 - DNA, 33 bp, Homo sapien
tactacaagtccaaactaaaacaggatagtact

SEQ ID NO: 63677 - DNA, 33 bp, Homo sapien
catgtccacggaatataaatagaactgtttaca

SEQ ID NO: 63678 - DNA, 33 bp, Homo sapien
catgtccacggaatatcaatagaactgtttaca

SEQ ID NO: 63679 - DNA, 33 bp, Homo sapien
actaaggaagggaagaaagcaatcgtgatgaat

SEQ ID NO: 63680 - DNA, 33 bp, Homo sapien
actaaggaagggaagacagcaatcgtgatgaat

SEQ ID NO: 63681 - DNA, 33 bp, Homo sapien
ttgaatagctgttatgcagcctaacttccagaa

SEQ ID NO: 63682 - DNA, 33 bp, Homo sapien
ttgaatagctgttatgtagcctaacttccagaa

SEQ ID NO: 63683 - DNA, 33 bp, Homo sapien
ttcatttttgtctaaacgaatgtggcttgagcg

SEQ ID NO: 63684 - DNA, 33 bp, Homo sapien
ttcatttttgtctaaaggaatgtggcttgagcg

SEQ ID NO: 63685 - DNA, 33 bp, Homo sapien
tatttggttagcataacagactggtaaattcat

SEQ ID NO: 63686 - DNA, 33 bp, Homo sapien
tatttggttagcataatagactggtaaattcat

SEQ ID NO: 63687 - DNA, 33 bp, Homo sapien
tagtcaagttgcacctaaagaggtatgagtcta

SEQ ID NO: 63688 - DNA, 33 bp, Homo sapien
tagtcaagttgcacctgaagaggtatgagtcta

SEQ ID NO: 63689 - DNA, 33 bp, Homo sapien
accagaaactttacagaccagatggaatgacat

SEQ ID NO: 63690 - DNA, 33 bp, Homo sapien
accagaaactttacagcccagatggaatgacat

SEQ ID NO: 63691 - DNA, 33 bp, Homo sapien
aagcagaactaaaacacatggaaaaagatagtc

SEQ ID NO: 63692 - DNA, 33 bp, Homo sapien
aagcagaactaaaacatatggaaaaagatagtc

SEQ ID NO: 63693 - DNA, 33 bp, Homo sapien
gtggccattcattttccctttcaccctctgaac

SEQ ID NO: 63694 - DNA, 33 bp, Homo sapien
gtggccattcattttctctttcaccctctgaac

SEQ ID NO: 63695 - DNA, 33 bp, Homo sapien
cttatttattttgtaaagccagaaacccacact

SEQ ID NO: 63696 - DNA, 33 bp, Homo sapien
cttatttattttgtaaggccagaaacccacact

SEQ ID NO: 63697 - DNA, 33 bp, Homo sapien
ttgtactatagcttgaagtctggtcatgtgatt

SEQ ID NO: 63698 - DNA, 33 bp, Homo sapien
ttgtactatagcttgacgtctggtcatgtgatt

SEQ ID NO: 63699 - DNA, 33 bp, Homo sapien
ttgatttatatttgaacgacaatggtttcagag

SEQ ID NO: 63700 - DNA, 33 bp, Homo sapien
ttgatttatatttgaatgacaatggtttcagag

SEQ ID NO: 63701 - DNA, 33 bp, Homo sapien
aaagtgtgaagctagcagagcttaattaatgag

SEQ ID NO: 63702 - DNA, 33 bp, Homo sapien
aaagtgtgaagctagcggagcttaattaatgag

SEQ ID NO: 63703 - DNA, 33 bp, Homo sapien
agtataaaaactcaaccaattaggaacagaaga

SEQ ID NO: 63704 - DNA, 33 bp, Homo sapien
agtataaaaactcaacgaattaggaacagaaga

SEQ ID NO: 63705 - DNA, 33 bp, Homo sapien
gaacttacttgatcgaagattatcactatacaa

SEQ ID NO: 63706 - DNA, 33 bp, Homo sapien
gaacttacttgatcgaggattatcactatacaa

SEQ ID NO: 63707 - DNA, 33 bp, Homo sapien
tgcactctttcactgcccagaatttgtctgacc

SEQ ID NO: 63708 - DNA, 33 bp, Homo sapien
tgcactctttcactgctcagaatttgtctgacc

SEQ ID NO: 63709 - DNA, 33 bp, Homo sapien
aaatgcttatatgaaaaaattagtagccgagaa

SEQ ID NO: 63710 - DNA, 33 bp, Homo sapien
aaatgcttatatgaaacaattagtagccgagaa

SEQ ID NO: 63711 - DNA, 33 bp, Homo sapien
gtctttccagttcaagaacaatataataaaaca

SEQ ID NO: 63712 - DNA, 33 bp, Homo sapien
gtctttccagttcaaggacaatataataaaaca

SEQ ID NO: 63713 - DNA, 33 bp, Homo sapien
ttcattctcaccctaaggtatgatgctagctgt

SEQ ID NO: 63714 - DNA, 33 bp, Homo sapien
ttcattctcaccctaatgtatgatgctagctgt

SEQ ID NO: 63715 - DNA, 33 bp, Homo sapien
tgaaatgatgaattaactaacaaaaaggagatt

SEQ ID NO: 63716 - DNA, 33 bp, Homo sapien
tgaaatgatgaattaattaacaaaaaggagatt

SEQ ID NO: 63717 - DNA, 33 bp, Homo sapien
tttttgaagagtaagacgctcctgattgtttaa

SEQ ID NO: 63718 - DNA, 33 bp, Homo sapien
tttttgaagagtaagatgctcctgattgtttaa

SEQ ID NO: 63719 - DNA, 33 bp, Homo sapien
aacaagtttagagtgacaaaccaaacattaaac

SEQ ID NO: 63720 - DNA, 33 bp, Homo sapien
aacaagtttagagtgataaaccaaacattaaac

SEQ ID NO: 63721 - DNA, 33 bp, Homo sapien
ccttttataaattgcccagttataccatttacc

SEQ ID NO: 63722 - DNA, 33 bp, Homo sapien
ccttttataaattgcctagttataccatttacc

SEQ ID NO: 63723 - DNA, 33 bp, Homo sapien
agcacttgtgaccagaagagtctgcatctgctg

SEQ ID NO: 63724 - DNA, 33 bp, Homo sapien
agcacttgtgaccagaggagtctgcatctgctg

SEQ ID NO: 63725 - DNA, 33 bp, Homo sapien
tagaatcttatttgcccactgtttaaaaccgaa

SEQ ID NO: 63726 - DNA, 33 bp, Homo sapien
tagaatcttatttgcctactgtttaaaaccgaa

SEQ ID NO: 63727 - DNA, 33 bp, Homo sapien
tacttaagctcttaccaggaccgaaacaggtgg

SEQ ID NO: 63728 - DNA, 33 bp, Homo sapien
tacttaagctcttaccgggaccgaaacaggtgg

SEQ ID NO: 63729 - DNA, 33 bp, Homo sapien
ttgctttactgtcatacagcttgtactgttttg

SEQ ID NO: 63730 - DNA, 33 bp, Homo sapien
ttgctttactgtcatatagcttgtactgttttg

SEQ ID NO: 63731 - DNA, 33 bp, Homo sapien
gataataacaataaaaagtagaactatgcattg

SEQ ID NO: 63732 - DNA, 33 bp, Homo sapien
gataataacaataaaaggtagaactatgcattg

SEQ ID NO: 63733 - DNA, 33 bp, Homo sapien
tttatatgcacatttcaatttttcataagatca

SEQ ID NO: 63734 - DNA, 33 bp, Homo sapien
tttatatgcacatttcgatttttcataagatca

SEQ ID NO: 63735 - DNA, 33 bp, Homo sapien
tattgatctattgggaacagttgcagcagactg

SEQ ID NO: 63736 - DNA, 33 bp, Homo sapien
tattgatctattgggagcagttgcagcagactg

SEQ ID NO: 63737 - DNA, 33 bp, Homo sapien
gctttgcatttaggtaagttaactcattttagg

SEQ ID NO: 63738 - DNA, 33 bp, Homo sapien
gctttgcatttaggtaggttaactcattttagg

SEQ ID NO: 63739 - DNA, 33 bp, Homo sapien
tgttacttaaacaccactaatttgcatctgaaa

SEQ ID NO: 63740 - DNA, 33 bp, Homo sapien
tgttacttaaacaccattaatttgcatctgaaa

SEQ ID NO: 63741 - DNA, 33 bp, Homo sapien
tcttcagctttatctggatttccatcttaccaa

SEQ ID NO: 63742 - DNA, 33 bp, Homo sapien
tcttcagctttatctgtatttccatcttaccaa

SEQ ID NO: 63743 - DNA, 33 bp, Homo sapien
tagcctgacacagaataagaagccttagaattg

SEQ ID NO: 63744 - DNA, 33 bp, Homo sapien
tagcctgacacagaatgagaagccttagaattg

SEQ ID NO: 63745 - DNA, 33 bp, Homo sapien
ttcacaggattctcaaagtattgcttcaccagc

SEQ ID NO: 63746 - DNA, 33 bp, Homo sapien
ttcacaggattctcaaggtattgcttcaccagc

SEQ ID NO: 63747 - DNA, 33 bp, Homo sapien
attacaataatccaagcatgagacagcagagac

SEQ ID NO: 63748 - DNA, 33 bp, Homo sapien
attacaataatccaagtatgagacagcagagac

SEQ ID NO: 63749 - DNA, 33 bp, Homo sapien
aagcctggtcaaattactaaagaagtgcaagca

SEQ ID NO: 63750 - DNA, 33 bp, Homo sapien
aagcctggtcaaattattaaagaagtgcaagca

SEQ ID NO: 63751 - DNA, 33 bp, Homo sapien
ctagctacattgcaaaattcttgaaatcagaac

SEQ ID NO: 63752 - DNA, 33 bp, Homo sapien
ctagctacattgcaaatttcttgaaatcagaac

SEQ ID NO: 63753 - DNA, 33 bp, Homo sapien
ggcatggtaataggcccgaaaggagtcttctgg

SEQ ID NO: 63754 - DNA, 33 bp, Homo sapien
ggcatggtaataggcctgaaaggagtcttctgg

SEQ ID NO: 63755 - DNA, 33 bp, Homo sapien
aatccttcattatagaaagagaaattcacccag

SEQ ID NO: 63756 - DNA, 33 bp, Homo sapien
aatccttcattatagacagagaaattcacccag

SEQ ID NO: 63757 - DNA, 33 bp, Homo sapien
ctgaaagctgaaattcactttagtatgatttag

SEQ ID NO: 63758 - DNA, 33 bp, Homo sapien
ctgaaagctgaaattcgctttagtatgatttag

SEQ ID NO: 63759 - DNA, 33 bp, Homo sapien
gatgtggaacttcagtaactaccaagtgataga

SEQ ID NO: 63760 - DNA, 33 bp, Homo sapien
gatgtggaacttcagtgactaccaagtgataga

SEQ ID NO: 63761 - DNA, 33 bp, Homo sapien
aacatccaaatggctacgaccttcatgctaaag

SEQ ID NO: 63762 - DNA, 33 bp, Homo sapien
aacatccaaatggctatgaccttcatgctaaag

SEQ ID NO: 63763 - DNA, 33 bp, Homo sapien
aatactggttatatgcacaaagaaaaataaatt

SEQ ID NO: 63764 - DNA, 33 bp, Homo sapien
aatactggttatatgcgcaaagaaaaataaatt

SEQ ID NO: 63765 - DNA, 33 bp, Homo sapien
aggttaatttctgccaccaatgtaaatgagttg

SEQ ID NO: 63766 - DNA, 33 bp, Homo sapien
aggttaatttctgccatcaatgtaaatgagttg

SEQ ID NO: 63767 - DNA, 33 bp, Homo sapien
cacttcaattaaatcacaaatctctgttcaaag

SEQ ID NO: 63768 - DNA, 33 bp, Homo sapien
cacttcaattaaatcataaatctctgttcaaag

SEQ ID NO: 63769 - DNA, 33 bp, Homo sapien
acattgtatagcagaaaaggtaagtgcttgcac

SEQ ID NO: 63770 - DNA, 33 bp, Homo sapien
acattgtatagcagaacaggtaagtgcttgcac

SEQ ID NO: 63771 - DNA, 33 bp, Homo sapien
gcattctaagattttacatgaggaaatccatca

SEQ ID NO: 63772 - DNA, 33 bp, Homo sapien
gcattctaagattttatatgaggaaatccatca

SEQ ID NO: 63773 - DNA, 33 bp, Homo sapien
tgactataaccatctccattgaacaggttggta

SEQ ID NO: 63774 - DNA, 33 bp, Homo sapien
tgactataaccatctctattgaacaggttggta

SEQ ID NO: 63775 - DNA, 33 bp, Homo sapien
ggaaggttttgaagagaaaagccaaagtgaaag

SEQ ID NO: 63776 - DNA, 33 bp, Homo sapien
ggaaggttttgaagaggaaagccaaagtgaaag

SEQ ID NO: 63777 - DNA, 33 bp, Homo sapien
tctgcatcattggataaggtgaaatttacctat

SEQ ID NO: 63778 - DNA, 33 bp, Homo sapien
tctgcatcattggatacggtgaaatttacctat

SEQ ID NO: 63779 - DNA, 33 bp, Homo sapien
tggtattctgaagggaacctagtacaggaaaat

SEQ ID NO: 63780 - DNA, 33 bp, Homo sapien
tggtattctgaagggatcctagtacaggaaaat

SEQ ID NO: 63781 - DNA, 33 bp, Homo sapien
atcaatattgatatgcaaaaccgcagaaactgc

SEQ ID NO: 63782 - DNA, 33 bp, Homo sapien
atcaatattgatatgcgaaaccgcagaaactgc

SEQ ID NO: 63783 - DNA, 33 bp, Homo sapien
ttctggatatgtatcaaaataaactgaaagcag

SEQ ID NO: 63784 - DNA, 33 bp, Homo sapien
ttctggatatgtatcagaataaactgaaagcag

SEQ ID NO: 63785 - DNA, 33 bp, Homo sapien
agtcatgatctgataactctggataaactaaag

SEQ ID NO: 63786 - DNA, 33 bp, Homo sapien
agtcatgatctgataattctggataaactaaag

SEQ ID NO: 63787 - DNA, 33 bp, Homo sapien
tatatacccctttccacagtcatcaagaaacta

SEQ ID NO: 63788 - DNA, 33 bp, Homo sapien
tatatacccctttccatagtcatcaagaaacta

SEQ ID NO: 63789 - DNA, 33 bp, Homo sapien
tcttactgcaagcaataactgcctctactttct

SEQ ID NO: 63790 - DNA, 33 bp, Homo sapien
tcttactgcaagcaatgactgcctctactttct

SEQ ID NO: 63791 - DNA, 33 bp, Homo sapien
gagccaaggatggaatcataagaagtctgagga

SEQ ID NO: 63792 - DNA, 33 bp, Homo sapien
gagccaaggatggaattataagaagtctgagga

SEQ ID NO: 63793 - DNA, 33 bp, Homo sapien
tcctttatccctactacatctgcgacacctcta

SEQ ID NO: 63794 - DNA, 33 bp, Homo sapien
tcctttatccctactatatctgcgacacctcta

SEQ ID NO: 63795 - DNA, 33 bp, Homo sapien
ttcaatgactacataaagttgcattcctccatg

SEQ ID NO: 63796 - DNA, 33 bp, Homo sapien
ttcaatgactacataaggttgcattcctccatg

SEQ ID NO: 63797 - DNA, 33 bp, Homo sapien
cgaatgctaaggagtaggagatagcacaggcaa

SEQ ID NO: 63798 - DNA, 33 bp, Homo sapien
cgaatgctaaggagtatgagatagcacaggcaa

SEQ ID NO: 63799 - DNA, 33 bp, Homo sapien
atgacaaggtttccaactgattttcactaaaaa

SEQ ID NO: 63800 - DNA, 33 bp, Homo sapien
atgacaaggtttccaattgattttcactaaaaa

SEQ ID NO: 63801 - DNA, 33 bp, Homo sapien
ctcactcaaggcaaaacggatatgttactaatg

SEQ ID NO: 63802 - DNA, 33 bp, Homo sapien
ctcactcaaggcaaaatggatatgttactaatg

SEQ ID NO: 63803 - DNA, 33 bp, Homo sapien
ttttgtccagcatgataaaatagtttctacttc

SEQ ID NO: 63804 - DNA, 33 bp, Homo sapien
ttttgtccagcatgatgaaatagtttctacttc

SEQ ID NO: 63805 - DNA, 33 bp, Homo sapien
gacaaaacatcaataaaataaaggtagcagaaa

SEQ ID NO: 63806 - DNA, 33 bp, Homo sapien
gacaaaacatcaataagataaaggtagcagaaa

SEQ ID NO: 63807 - DNA, 33 bp, Homo sapien
gacacagccagaccacacaagggagaaaactca

SEQ ID NO: 63808 - DNA, 33 bp, Homo sapien
gacacagccagaccacgcaagggagaaaactca

SEQ ID NO: 63809 - DNA, 33 bp, Homo sapien
ccagaccatcaccacactagaaccactgcctgt

SEQ ID NO: 63810 - DNA, 33 bp, Homo sapien
ccagaccatcaccacattagaaccactgcctgt

SEQ ID NO: 63811 - DNA, 33 bp, Homo sapien
atccccagtgtctacaatggaaaccacaatgca

SEQ ID NO: 63812 - DNA, 33 bp, Homo sapien
atccccagtgtctacagtggaaaccacaatgca

SEQ ID NO: 63813 - DNA, 33 bp, Homo sapien
atatgattccattccaatagtaagaagccatga

SEQ ID NO: 63814 - DNA, 33 bp, Homo sapien
atatgattccattccagtagtaagaagccatga

SEQ ID NO: 63815 - DNA, 33 bp, Homo sapien
tcatattggtaaatcaaataatcaattcatttt

SEQ ID NO: 63816 - DNA, 33 bp, Homo sapien
tcatattggtaaatcagataatcaattcatttt

SEQ ID NO: 63817 - DNA, 33 bp, Homo sapien
tattctgcaaattaagacctacagttgagacca

SEQ ID NO: 63818 - DNA, 33 bp, Homo sapien
tattctgcaaattaagtcctacagttgagacca

SEQ ID NO: 63819 - DNA, 33 bp, Homo sapien
aacttcttcctcccccagacgcaggctcatggg

SEQ ID NO: 63820 - DNA, 33 bp, Homo sapien
aacttcttcctccccccgacgcaggctcatggg

SEQ ID NO: 63821 - DNA, 33 bp, Homo sapien
acagttaggccgctaacacagacaaaatacaag

SEQ ID NO: 63822 - DNA, 33 bp, Homo sapien
acagttaggccgctaatacagacaaaatacaag

SEQ ID NO: 63823 - DNA, 33 bp, Homo sapien
tcatcacaatgggaagacagtgtttcctacata

SEQ ID NO: 63824 - DNA, 33 bp, Homo sapien
tcatcacaatgggaagtcagtgtttcctacata

SEQ ID NO: 63825 - DNA, 33 bp, Homo sapien
gatgaaattatatttgcatattgctatggtctg

SEQ ID NO: 63826 - DNA, 33 bp, Homo sapien
gatgaaattatatttgtatattgctatggtctg

SEQ ID NO: 63827 - DNA, 33 bp, Homo sapien
gatgcttacctcaacgaaagtatagagacttta

SEQ ID NO: 63828 - DNA, 33 bp, Homo sapien
gatgcttacctcaacggaagtatagagacttta

SEQ ID NO: 63829 - DNA, 33 bp, Homo sapien
taacataagtcacccaactaacaaactgaaaaa

SEQ ID NO: 63830 - DNA, 33 bp, Homo sapien
taacataagtcacccatctaacaaactgaaaaa

SEQ ID NO: 63831 - DNA, 33 bp, Homo sapien
ctgtactggctaagacagagcatttgatacagg

SEQ ID NO: 63832 - DNA, 33 bp, Homo sapien
ctgtactggctaagacggagcatttgatacagg

SEQ ID NO: 63833 - DNA, 33 bp, Homo sapien
aaattattccaaaataaagtcatcaaccaagga

SEQ ID NO: 63834 - DNA, 33 bp, Homo sapien
aaattattccaaaatagagtcatcaaccaagga

SEQ ID NO: 63835 - DNA, 33 bp, Homo sapien
aatatagttttattaacatcaaccaacaagctg

SEQ ID NO: 63836 - DNA, 33 bp, Homo sapien
aatatagttttattaatatcaaccaacaagctg

SEQ ID NO: 63837 - DNA, 33 bp, Homo sapien
ttggtatgataataagaatgagggaaccaaagt

SEQ ID NO: 63838 - DNA, 33 bp, Homo sapien
ttggtatgataataaggatgagggaaccaaagt

SEQ ID NO: 63839 - DNA, 33 bp, Homo sapien
gtatcaaaagtaagcaagaatgaaaatatgggt

SEQ ID NO: 63840 - DNA, 33 bp, Homo sapien
gtatcaaaagtaagcatgaatgaaaatatgggt

SEQ ID NO: 63841 - DNA, 33 bp, Homo sapien
gagtccagagttagacacatagaaggcacttaa

SEQ ID NO: 63842 - DNA, 33 bp, Homo sapien
gagtccagagttagacgcatagaaggcacttaa

SEQ ID NO: 63843 - DNA, 33 bp, Homo sapien
ggtcataaccatttagcaagtctatagaaaatt

SEQ ID NO: 63844 - DNA, 33 bp, Homo sapien
ggtcataaccatttaggaagtctatagaaaatt

SEQ ID NO: 63845 - DNA, 33 bp, Homo sapien
gggatggagctgcctacggtattgggaacccac

SEQ ID NO: 63846 - DNA, 33 bp, Homo sapien
gggatggagctgcctatggtattgggaacccac

SEQ ID NO: 63847 - DNA, 33 bp, Homo sapien
tcattgttggaagccactcattggtatatatgt

SEQ ID NO: 63848 - DNA, 33 bp, Homo sapien
tcattgttggaagccagtcattggtatatatgt

SEQ ID NO: 63849 - DNA, 33 bp, Homo sapien
tctgcctttaaaagcacctataaacaacattta

SEQ ID NO: 63850 - DNA, 33 bp, Homo sapien
tctgcctttaaaagcagctataaacaacattta

SEQ ID NO: 63851 - DNA, 33 bp, Homo sapien
agctacttaaaagttacattgccactgtagggt

SEQ ID NO: 63852 - DNA, 33 bp, Homo sapien
agctacttaaaagttatattgccactgtagggt

SEQ ID NO: 63853 - DNA, 33 bp, Homo sapien
agctaattctacacaacgaagcaaggtatgatg

SEQ ID NO: 63854 - DNA, 33 bp, Homo sapien
agctaattctacacaaggaagcaaggtatgatg

SEQ ID NO: 63855 - DNA, 33 bp, Homo sapien
ttctcatcaaggtatacaggattttccaaaata

SEQ ID NO: 63856 - DNA, 33 bp, Homo sapien
ttctcatcaaggtatataggattttccaaaata

SEQ ID NO: 63857 - DNA, 33 bp, Homo sapien
ttttaacttccagagcaaattgttttttctgcc

SEQ ID NO: 63858 - DNA, 33 bp, Homo sapien
ttttaacttccagagccaattgttttttctgcc

SEQ ID NO: 63859 - DNA, 33 bp, Homo sapien
tttggcttatctgtaactatgaagtgctgtact

SEQ ID NO: 63860 - DNA, 33 bp, Homo sapien
tttggcttatctgtaattatgaagtgctgtact

SEQ ID NO: 63861 - DNA, 33 bp, Homo sapien
aaataagtagacctacaataattgaagattcct

SEQ ID NO: 63862 - DNA, 33 bp, Homo sapien
aaataagtagacctaccataattgaagattcct

SEQ ID NO: 63863 - DNA, 33 bp, Homo sapien
tacctggactgctgttcccccagatagcattgt

SEQ ID NO: 63864 - DNA, 33 bp, Homo sapien
tacctggactgctgtttccccagatagcattgt

SEQ ID NO: 63865 - DNA, 33 bp, Homo sapien
aacttgatagcagccaatcggcctgggctcagg

SEQ ID NO: 63866 - DNA, 33 bp, Homo sapien
aacttgatagcagccagtcggcctgggctcagg

SEQ ID NO: 63867 - DNA, 33 bp, Homo sapien
agtgtggaagtacagaagattgattcaaaagat

SEQ ID NO: 63868 - DNA, 33 bp, Homo sapien
agtgtggaagtacagatgattgattcaaaagat

SEQ ID NO: 63869 - DNA, 33 bp, Homo sapien
ttcctatcagcataaacattttatctcatatta

SEQ ID NO: 63870 - DNA, 33 bp, Homo sapien
ttcctatcagcataaagattttatctcatatta

SEQ ID NO: 63871 - DNA, 33 bp, Homo sapien
gttgaatattgcgtgccctgaggttggattttg

SEQ ID NO: 63872 - DNA, 33 bp, Homo sapien
gttgaatattgcgtgctctgaggttggattttg

SEQ ID NO: 63873 - DNA, 33 bp, Homo sapien
atgactgaactgtacaaagtagagaattcttgg

SEQ ID NO: 63874 - DNA, 33 bp, Homo sapien
atgactgaactgtacagagtagagaattcttgg

SEQ ID NO: 63875 - DNA, 33 bp, Homo sapien
tctgctggcgatatacagtaaggatgccattgc

SEQ ID NO: 63876 - DNA, 33 bp, Homo sapien
tctgctggcgatatacggtaaggatgccattgc

SEQ ID NO: 63877 - DNA, 33 bp, Homo sapien
ataagtgcccaaaaaccaggagatcacggacct

SEQ ID NO: 63878 - DNA, 33 bp, Homo sapien
ataagtgcccaaaaacgaggagatcacggacct

SEQ ID NO: 63879 - DNA, 33 bp, Homo sapien
tggccaagatcctaaccatgtggccaggccatt

SEQ ID NO: 63880 - DNA, 33 bp, Homo sapien
tggccaagatcctaactatgtggccaggccatt

SEQ ID NO: 63881 - DNA, 33 bp, Homo sapien
ggcctggaaataaagaatcacttttccacattt

SEQ ID NO: 63882 - DNA, 33 bp, Homo sapien
ggcctggaaataaagattcacttttccacattt

SEQ ID NO: 63883 - DNA, 33 bp, Homo sapien
ttgtcatcagtgggacacttcttgttcaagtaa

SEQ ID NO: 63884 - DNA, 33 bp, Homo sapien
ttgtcatcagtgggacgcttcttgttcaagtaa

SEQ ID NO: 63885 - DNA, 33 bp, Homo sapien
ggaaattgagttaataccattatgcagttaacg

SEQ ID NO: 63886 - DNA, 33 bp, Homo sapien
ggaaattgagttaatatcattatgcagttaacg

SEQ ID NO: 63887 - DNA, 33 bp, Homo sapien
gaaagcagtggccatacaggatgcaatacttgt

SEQ ID NO: 63888 - DNA, 33 bp, Homo sapien
gaaagcagtggccatagaggatgcaatacttgt

SEQ ID NO: 63889 - DNA, 33 bp, Homo sapien
cacaggtggaaaagacacagaaaggcaggttta

SEQ ID NO: 63890 - DNA, 33 bp, Homo sapien
cacaggtggaaaagacgcagaaaggcaggttta

SEQ ID NO: 63891 - DNA, 33 bp, Homo sapien
tgtgtgttctgttcccagactcaggcaattggt

SEQ ID NO: 63892 - DNA, 33 bp, Homo sapien
tgtgtgttctgttcccggactcaggcaattggt

SEQ ID NO: 63893 - DNA, 33 bp, Homo sapien
aagaagaggtctttacaaaaacaatagatgaga

SEQ ID NO: 63894 - DNA, 33 bp, Homo sapien
aagaagaggtctttacgaaaacaatagatgaga

SEQ ID NO: 63895 - DNA, 33 bp, Homo sapien
aaataattgttttttccctcacttcttcactat

SEQ ID NO: 63896 - DNA, 33 bp, Homo sapien
aaataattgttttttctctcacttcttcactat

SEQ ID NO: 63897 - DNA, 33 bp, Homo sapien
ctaacttattaaacaaatgtcgtcattagcaaa

SEQ ID NO: 63898 - DNA, 33 bp, Homo sapien
ctaacttattaaacaactgtcgtcattagcaaa

SEQ ID NO: 63899 - DNA, 33 bp, Homo sapien
gtatggcaaaccttcaagagtgagacacagcga

SEQ ID NO: 63900 - DNA, 33 bp, Homo sapien
gtatggcaaaccttcacgagtgagacacagcga

SEQ ID NO: 63901 - DNA, 33 bp, Homo sapien
tgattaaaattaaccaatataaggcacatagag

SEQ ID NO: 63902 - DNA, 33 bp, Homo sapien
tgattaaaattaaccagtataaggcacatagag

SEQ ID NO: 63903 - DNA, 33 bp, Homo sapien
ttcatcaaataacaaaacaagagtatgaccatc

SEQ ID NO: 63904 - DNA, 33 bp, Homo sapien
ttcatcaaataacaaatcaagagtatgaccatc

SEQ ID NO: 63905 - DNA, 33 bp, Homo sapien
attgtttttggagatccagcctacacctttcca

SEQ ID NO: 63906 - DNA, 33 bp, Homo sapien
attgtttttggagatctagcctacacctttcca

SEQ ID NO: 63907 - DNA, 33 bp, Homo sapien
tcagacagaacataaaaaagaaataagccaatc

SEQ ID NO: 63908 - DNA, 33 bp, Homo sapien
tcagacagaacataaagaagaaataagccaatc

SEQ ID NO: 63909 - DNA, 33 bp, Homo sapien
aaaatttggaacagaaatcatcatactgaaaca

SEQ ID NO: 63910 - DNA, 33 bp, Homo sapien
aaaatttggaacagaattcatcatactgaaaca

SEQ ID NO: 63911 - DNA, 33 bp, Homo sapien
tgagcaaagctactgcccagtgttttactcagt

SEQ ID NO: 63912 - DNA, 33 bp, Homo sapien
tgagcaaagctactgctcagtgttttactcagt

SEQ ID NO: 63913 - DNA, 33 bp, Homo sapien
ctctatatattttttgcaagtatttgcctgttc

SEQ ID NO: 63914 - DNA, 33 bp, Homo sapien
ctctatatattttttgtaagtatttgcctgttc

SEQ ID NO: 63915 - DNA, 33 bp, Homo sapien
agttgccctttagtccacatatcaaaggaataa

SEQ ID NO: 63916 - DNA, 33 bp, Homo sapien
agttgccctttagtccgcatatcaaaggaataa

SEQ ID NO: 63917 - DNA, 33 bp, Homo sapien
taaacataccagctataacgatgagaccagttg

SEQ ID NO: 63918 - DNA, 33 bp, Homo sapien
taaacataccagctatgacgatgagaccagttg

SEQ ID NO: 63919 - DNA, 33 bp, Homo sapien
ataagacaagagaacacaagtagatgctttctt

SEQ ID NO: 63920 - DNA, 33 bp, Homo sapien
ataagacaagagaacagaagtagatgctttctt

SEQ ID NO: 63921 - DNA, 33 bp, Homo sapien
tagcaatggcaaaatacgggttatttctttttc

SEQ ID NO: 63922 - DNA, 33 bp, Homo sapien
tagcaatggcaaaatatgggttatttctttttc

SEQ ID NO: 63923 - DNA, 33 bp, Homo sapien
ttcacagacaaaaaaaattgagaaagtcagcat

SEQ ID NO: 63924 - DNA, 33 bp, Homo sapien
ttcacagacaaaaaaatttgagaaagtcagcat

SEQ ID NO: 63925 - DNA, 33 bp, Homo sapien
taagacttacatctaaggtttagagctcttcct

SEQ ID NO: 63926 - DNA, 33 bp, Homo sapien
taagacttacatctaatgtttagagctcttcct

SEQ ID NO: 63927 - DNA, 33 bp, Homo sapien
tacaataaaaatgctcacacttgctacaatcaa

SEQ ID NO: 63928 - DNA, 33 bp, Homo sapien
tacaataaaaatgctcgcacttgctacaatcaa

SEQ ID NO: 63929 - DNA, 33 bp, Homo sapien
cctccatgctagactaaacaaactctctagaca

SEQ ID NO: 63930 - DNA, 33 bp, Homo sapien
cctccatgctagactacacaaactctctagaca

SEQ ID NO: 63931 - DNA, 33 bp, Homo sapien
accaaattgttggaaaagctgaagttaccttag

SEQ ID NO: 63932 - DNA, 33 bp, Homo sapien
accaaattgttggaaatgctgaagttaccttag

SEQ ID NO: 63933 - DNA, 33 bp, Homo sapien
acataaaacgggccaacgctttgaacagcgctt

SEQ ID NO: 63934 - DNA, 33 bp, Homo sapien
acataaaacgggccaatgctttgaacagcgctt

SEQ ID NO: 63935 - DNA, 33 bp, Homo sapien
gtaaatctagtgacacagtgagctggatttgag

SEQ ID NO: 63936 - DNA, 33 bp, Homo sapien
gtaaatctagtgacacggtgagctggatttgag

SEQ ID NO: 63937 - DNA, 33 bp, Homo sapien
cagctggatcacagtaagtaaaaattccttctt

SEQ ID NO: 63938 - DNA, 33 bp, Homo sapien
cagctggatcacagtatgtaaaaattccttctt

SEQ ID NO: 63939 - DNA, 33 bp, Homo sapien
acagcaaagatttagaaccaactgaaatgccca

SEQ ID NO: 63940 - DNA, 33 bp, Homo sapien
acagcaaagatttagatccaactgaaatgccca

SEQ ID NO: 63941 - DNA, 33 bp, Homo sapien
tgcttcagaattaggcaaaattacccagagaca

SEQ ID NO: 63942 - DNA, 33 bp, Homo sapien
tgcttcagaattaggctaaattacccagagaca

SEQ ID NO: 63943 - DNA, 33 bp, Homo sapien
ttcacctccaattcaacgtctctttatttgatt

SEQ ID NO: 63944 - DNA, 33 bp, Homo sapien
ttcacctccaattcaatgtctctttatttgatt

SEQ ID NO: 63945 - DNA, 33 bp, Homo sapien
gtcctactccattacactctccctcattttctt

SEQ ID NO: 63946 - DNA, 33 bp, Homo sapien
gtcctactccattacattctccctcattttctt

SEQ ID NO: 63947 - DNA, 33 bp, Homo sapien
gtcaagcctgatatgacgagtctgatatgatga

SEQ ID NO: 63948 - DNA, 33 bp, Homo sapien
gtcaagcctgatatgatgagtctgatatgatga

SEQ ID NO: 63949 - DNA, 33 bp, Homo sapien
attctgccatcaagtcacttaaagtcaagcctg

SEQ ID NO: 63950 - DNA, 33 bp, Homo sapien
attctgccatcaagtcgcttaaagtcaagcctg

SEQ ID NO: 63951 - DNA, 33 bp, Homo sapien
catcatttgattgtcaagaaagaaaattaaatg

SEQ ID NO: 63952 - DNA, 33 bp, Homo sapien
catcatttgattgtcaggaaagaaaattaaatg

SEQ ID NO: 63953 - DNA, 33 bp, Homo sapien
gtgcctcaagaggaaactggtaactttaggcag

SEQ ID NO: 63954 - DNA, 33 bp, Homo sapien
gtgcctcaagaggaaattggtaactttaggcag

SEQ ID NO: 63955 - DNA, 33 bp, Homo sapien
ttggtcaaataagtcaaaggccagagtcaaggg

SEQ ID NO: 63956 - DNA, 33 bp, Homo sapien
ttggtcaaataagtcataggccagagtcaaggg

SEQ ID NO: 63957 - DNA, 33 bp, Homo sapien
attgcgtgatgtttccaaatatgccagaccacc

SEQ ID NO: 63958 - DNA, 33 bp, Homo sapien
attgcgtgatgtttccgaatatgccagaccacc

SEQ ID NO: 63959 - DNA, 33 bp, Homo sapien
aaaatccaagttacatcatatcattcccttgag

SEQ ID NO: 63960 - DNA, 33 bp, Homo sapien
aaaatccaagttacattatatcattcccttgag

SEQ ID NO: 63961 - DNA, 33 bp, Homo sapien
gggcaaacaactaacaccaactatctagagaga

SEQ ID NO: 63962 - DNA, 33 bp, Homo sapien
gggcaaacaactaacagcaactatctagagaga

SEQ ID NO: 63963 - DNA, 33 bp, Homo sapien
ttgaagtccatattgccgagcccatgcgtaacc

SEQ ID NO: 63964 - DNA, 33 bp, Homo sapien
ttgaagtccatattgctgagcccatgcgtaacc

SEQ ID NO: 63965 - DNA, 33 bp, Homo sapien
tttaagttaaaaggcaaatagctgaatggttca

SEQ ID NO: 63966 - DNA, 33 bp, Homo sapien
tttaagttaaaaggcatatagctgaatggttca

SEQ ID NO: 63967 - DNA, 33 bp, Homo sapien
atgcatgtggcaactaacagtacaaataaagaa

SEQ ID NO: 63968 - DNA, 33 bp, Homo sapien
atgcatgtggcaactagcagtacaaataaagaa

SEQ ID NO: 63969 - DNA, 33 bp, Homo sapien
catacagcaatggtcacacagttgtaattggtc

SEQ ID NO: 63970 - DNA, 33 bp, Homo sapien
catacagcaatggtcagacagttgtaattggtc

SEQ ID NO: 63971 - DNA, 33 bp, Homo sapien
aggaatattgtccgtaagatagctattgccttt

SEQ ID NO: 63972 - DNA, 33 bp, Homo sapien
aggaatattgtccgtaggatagctattgccttt

SEQ ID NO: 63973 - DNA, 33 bp, Homo sapien
gaatgcctcactttgccattgtcagtcatgaag

SEQ ID NO: 63974 - DNA, 33 bp, Homo sapien
gaatgcctcactttgctattgtcagtcatgaag

SEQ ID NO: 63975 - DNA, 33 bp, Homo sapien
tcctataggttttccaccaactctttcacactg

SEQ ID NO: 63976 - DNA, 33 bp, Homo sapien
tcctataggttttccatcaactctttcacactg

SEQ ID NO: 63977 - DNA, 33 bp, Homo sapien
cttttctcctcaagcaatagactctttccatgt

SEQ ID NO: 63978 - DNA, 33 bp, Homo sapien
cttttctcctcaagcagtagactctttccatgt

SEQ ID NO: 63979 - DNA, 33 bp, Homo sapien
tgaggccttctggtgacagccacctaagtgacc

SEQ ID NO: 63980 - DNA, 33 bp, Homo sapien
tgaggccttctggtgagagccacctaagtgacc

SEQ ID NO: 63981 - DNA, 33 bp, Homo sapien
tttgaaatactgcttcacgcactgtgtcacaga

SEQ ID NO: 63982 - DNA, 33 bp, Homo sapien
tttgaaatactgcttcgcgcactgtgtcacaga

SEQ ID NO: 63983 - DNA, 33 bp, Homo sapien
aacagataatctataaatatggcatatggtgta

SEQ ID NO: 63984 - DNA, 33 bp, Homo sapien
aacagataatctataagtatggcatatggtgta

SEQ ID NO: 63985 - DNA, 33 bp, Homo sapien
aaactttgtcgaatgaatcaagcaaacactaat

SEQ ID NO: 63986 - DNA, 33 bp, Homo sapien
aaactttgtcgaatgagtcaagcaaacactaat

SEQ ID NO: 63987 - DNA, 33 bp, Homo sapien
tattggaacagttaccaccaggaactctacatg

SEQ ID NO: 63988 - DNA, 33 bp, Homo sapien
tattggaacagttaccgccaggaactctacatg

SEQ ID NO: 63989 - DNA, 33 bp, Homo sapien
catgctatgatttacaaaaatagcaggaggatt

SEQ ID NO: 63990 - DNA, 33 bp, Homo sapien
catgctatgatttacagaaatagcaggaggatt

SEQ ID NO: 63991 - DNA, 33 bp, Homo sapien
aaatttgaaaaaatgcaccattttaattagaga

SEQ ID NO: 63992 - DNA, 33 bp, Homo sapien
aaatttgaaaaaatgcgccattttaattagaga

SEQ ID NO: 63993 - DNA, 33 bp, Homo sapien
gagcaaaaagtcttaaatcacaataaataagcc

SEQ ID NO: 63994 - DNA, 33 bp, Homo sapien
gagcaaaaagtcttaagtcacaataaataagcc

SEQ ID NO: 63995 - DNA, 33 bp, Homo sapien
tctccaaacaggaccccgactgatacataatgc

SEQ ID NO: 63996 - DNA, 33 bp, Homo sapien
tctccaaacaggaccctgactgatacataatgc

SEQ ID NO: 63997 - DNA, 33 bp, Homo sapien
cctctggcaccttagacggtggaattccagcaa

SEQ ID NO: 63998 - DNA, 33 bp, Homo sapien
cctctggcaccttagagggtggaattccagcaa

SEQ ID NO: 63999 - DNA, 33 bp, Homo sapien
catataaatcaggcaaaataaatacctgtatcc

SEQ ID NO: 64000 - DNA, 33 bp, Homo sapien
catataaatcaggcaacataaatacctgtatcc

SEQ ID NO: 64001 - DNA, 33 bp, Homo sapien
ccttgggccactataacccctaccaaataaata

SEQ ID NO: 64002 - DNA, 33 bp, Homo sapien
ccttgggccactataatccctaccaaataaata

SEQ ID NO: 64003 - DNA, 33 bp, Homo sapien
ggtttctgtaaccaaaaggttcattttatgtct

SEQ ID NO: 64004 - DNA, 33 bp, Homo sapien
ggtttctgtaaccaaagggttcattttatgtct

SEQ ID NO: 64005 - DNA, 33 bp, Homo sapien
aaattgtgttgacatacgtaaaaagttctcatc

SEQ ID NO: 64006 - DNA, 33 bp, Homo sapien
aaattgtgttgacatatgtaaaaagttctcatc

SEQ ID NO: 64007 - DNA, 33 bp, Homo sapien
aagccatgatatgttaaacccaaattaaaggga

SEQ ID NO: 64008 - DNA, 33 bp, Homo sapien
aagccatgatatgttagacccaaattaaaggga

SEQ ID NO: 64009 - DNA, 33 bp, Homo sapien
gttatctgtacttctaccaaagtcttaggcctt

SEQ ID NO: 64010 - DNA, 33 bp, Homo sapien
gttatctgtacttctatcaaagtcttaggcctt

SEQ ID NO: 64011 - DNA, 33 bp, Homo sapien
ttgaaaaattctgctcaaaactattcagtctag

SEQ ID NO: 64012 - DNA, 33 bp, Homo sapien
ttgaaaaattctgctcgaaactattcagtctag

SEQ ID NO: 64013 - DNA, 33 bp, Homo sapien
aggatagggcagtcgaagataagagtgactgga

SEQ ID NO: 64014 - DNA, 33 bp, Homo sapien
aggatagggcagtcgaggataagagtgactgga

SEQ ID NO: 64015 - DNA, 33 bp, Homo sapien
atcctgatgaaggataactaaggtaagtggtct

SEQ ID NO: 64016 - DNA, 33 bp, Homo sapien
atcctgatgaaggatatctaaggtaagtggtct

SEQ ID NO: 64017 - DNA, 33 bp, Homo sapien
gacagatttaactacagagctcattacaaacag

SEQ ID NO: 64018 - DNA, 33 bp, Homo sapien
gacagatttaactacatagctcattacaaacag

SEQ ID NO: 64019 - DNA, 33 bp, Homo sapien
tgcaactaaaatgtaaagtaaagtgtgtagtat

SEQ ID NO: 64020 - DNA, 33 bp, Homo sapien
tgcaactaaaatgtaaggtaaagtgtgtagtat

SEQ ID NO: 64021 - DNA, 33 bp, Homo sapien
aggtaatcacaggaaaagaaaataatagtaata

SEQ ID NO: 64022 - DNA, 33 bp, Homo sapien
aggtaatcacaggaaaggaaaataatagtaata

SEQ ID NO: 64023 - DNA, 33 bp, Homo sapien
gagtgctatcataatgaaaatggggagtgagaa

SEQ ID NO: 64024 - DNA, 33 bp, Homo sapien
gagtgctatcataatggaaatggggagtgagaa

SEQ ID NO: 64025 - DNA, 33 bp, Homo sapien
attggcaaattttcacccacaagtaggagtaaa

SEQ ID NO: 64026 - DNA, 33 bp, Homo sapien
attggcaaattttcactcacaagtaggagtaaa

SEQ ID NO: 64027 - DNA, 33 bp, Homo sapien
gaacaagcatacaaagaccctagtaaacgaact

SEQ ID NO: 64028 - DNA, 33 bp, Homo sapien
gaacaagcatacaaaggccctagtaaacgaact

SEQ ID NO: 64029 - DNA, 33 bp, Homo sapien
gtggagaaattcaaaaacttgtgcactggttgt

SEQ ID NO: 64030 - DNA, 33 bp, Homo sapien
gtggagaaattcaaaaccttgtgcactggttgt

SEQ ID NO: 64031 - DNA, 33 bp, Homo sapien
catattttacattttaccaagacagttaagtag

SEQ ID NO: 64032 - DNA, 33 bp, Homo sapien
catattttacattttatcaagacagttaagtag

SEQ ID NO: 64033 - DNA, 33 bp, Homo sapien
catatcttcatgtttacccttgagttgtcctgc

SEQ ID NO: 64034 - DNA, 33 bp, Homo sapien
catatcttcatgtttatccttgagttgtcctgc

SEQ ID NO: 64035 - DNA, 33 bp, Homo sapien
taggagttactcttaccataacacacaaggcca

SEQ ID NO: 64036 - DNA, 33 bp, Homo sapien
taggagttactcttactataacacacaaggcca

SEQ ID NO: 64037 - DNA, 33 bp, Homo sapien
tacagtagccattaacagaggaaagtgaaaggt

SEQ ID NO: 64038 - DNA, 33 bp, Homo sapien
tacagtagccattaacggaggaaagtgaaaggt

SEQ ID NO: 64039 - DNA, 33 bp, Homo sapien
aagattcacagatctaagtaaaataactaatat

SEQ ID NO: 64040 - DNA, 33 bp, Homo sapien
aagattcacagatctaggtaaaataactaatat

SEQ ID NO: 64041 - DNA, 33 bp, Homo sapien
agatatatatggcaagcaagtaaaaattatctg

SEQ ID NO: 64042 - DNA, 33 bp, Homo sapien
agatatatatggcaaggaagtaaaaattatctg

SEQ ID NO: 64043 - DNA, 33 bp, Homo sapien
tgttatggctacataaacaaatttgagaggaca

SEQ ID NO: 64044 - DNA, 33 bp, Homo sapien
tgttatggctacataagcaaatttgagaggaca

SEQ ID NO: 64045 - DNA, 33 bp, Homo sapien
ttgaaagtataactcaatctctgcctttgtctt

SEQ ID NO: 64046 - DNA, 33 bp, Homo sapien
ttgaaagtataactcagtctctgcctttgtctt

SEQ ID NO: 64047 - DNA, 33 bp, Homo sapien
gcatggacaaaactcaatatggcccttgccctt

SEQ ID NO: 64048 - DNA, 33 bp, Homo sapien
gcatggacaaaactcagtatggcccttgccctt

SEQ ID NO: 64049 - DNA, 33 bp, Homo sapien
ttgaattaggtgctgagcatacagttataagca

SEQ ID NO: 64050 - DNA, 33 bp, Homo sapien
ttgaattaggtgctgatcatacagttataagca

SEQ ID NO: 64051 - DNA, 33 bp, Homo sapien
aaacagggaaaaagtacgtgatatttacaattt

SEQ ID NO: 64052 - DNA, 33 bp, Homo sapien
aaacagggaaaaagtaggtgatatttacaattt

SEQ ID NO: 64053 - DNA, 33 bp, Homo sapien
cactcaataattcttaagtcttctattgtggtt

SEQ ID NO: 64054 - DNA, 33 bp, Homo sapien
cactcaataattcttatgtcttctattgtggtt

SEQ ID NO: 64055 - DNA, 33 bp, Homo sapien
catcaagtaaggccatcatgatgtattcaccat

SEQ ID NO: 64056 - DNA, 33 bp, Homo sapien
catcaagtaaggccattatgatgtattcaccat

SEQ ID NO: 64057 - DNA, 33 bp, Homo sapien
atgagccggcctgtacacaatctgtgggtgcaa

SEQ ID NO: 64058 - DNA, 33 bp, Homo sapien
atgagccggcctgtacgcaatctgtgggtgcaa

SEQ ID NO: 64059 - DNA, 33 bp, Homo sapien
atagtaattactctacaccttcaaccttcagtc

SEQ ID NO: 64060 - DNA, 33 bp, Homo sapien
atagtaattactctacgccttcaaccttcagtc

SEQ ID NO: 64061 - DNA, 33 bp, Homo sapien
tctacagattcattgagatccatattaaaattc

SEQ ID NO: 64062 - DNA, 33 bp, Homo sapien
tctacagattcattgatatccatattaaaattc

SEQ ID NO: 64063 - DNA, 33 bp, Homo sapien
gggacaacttgcagaacagtgaattgaattctt

SEQ ID NO: 64064 - DNA, 33 bp, Homo sapien
gggacaacttgcagaagagtgaattgaattctt

SEQ ID NO: 64065 - DNA, 33 bp, Homo sapien
accctttctgtggaagaatttctgcatgtctag

SEQ ID NO: 64066 - DNA, 33 bp, Homo sapien
accctttctgtggaaggatttctgcatgtctag

SEQ ID NO: 64067 - DNA, 33 bp, Homo sapien
ccatatgccagtacaacgccaacttttttagga

SEQ ID NO: 64068 - DNA, 33 bp, Homo sapien
ccatatgccagtacaatgccaacttttttagga

SEQ ID NO: 64069 - DNA, 33 bp, Homo sapien
gatgtagtttggttgacgaagtaaaacatggtt

SEQ ID NO: 64070 - DNA, 33 bp, Homo sapien
gatgtagtttggttgatgaagtaaaacatggtt

SEQ ID NO: 64071 - DNA, 33 bp, Homo sapien
acccgtttctaaatggaagaaagctgccaaggt

SEQ ID NO: 64072 - DNA, 33 bp, Homo sapien
acccgtttctaaatgggagaaagctgccaaggt

SEQ ID NO: 64073 - DNA, 33 bp, Homo sapien
gaattcaacttctcccaccagagcagagagaca

SEQ ID NO: 64074 - DNA, 33 bp, Homo sapien
gaattcaacttctcccgccagagcagagagaca

SEQ ID NO: 64075 - DNA, 33 bp, Homo sapien
agtagccttttctaagcaggtacagatatgcca

SEQ ID NO: 64076 - DNA, 33 bp, Homo sapien
agtagccttttctaagtaggtacagatatgcca

SEQ ID NO: 64077 - DNA, 33 bp, Homo sapien
ggcttctaactacagaatatttaaggttttctg

SEQ ID NO: 64078 - DNA, 33 bp, Homo sapien
ggcttctaactacagagtatttaaggttttctg

SEQ ID NO: 64079 - DNA, 33 bp, Homo sapien
ggaggaaagaaaaatcagagagggagtggcgat

SEQ ID NO: 64080 - DNA, 33 bp, Homo sapien
ggaggaaagaaaaatcggagagggagtggcgat

SEQ ID NO: 64081 - DNA, 33 bp, Homo sapien
tcaacggttgtacttaggtgaaatcgtgggcat

SEQ ID NO: 64082 - DNA, 33 bp, Homo sapien
tcaacggttgtacttatgtgaaatcgtgggcat

SEQ ID NO: 64083 - DNA, 33 bp, Homo sapien
aacagtgtacaatttaacagatttcttcctttc

SEQ ID NO: 64084 - DNA, 33 bp, Homo sapien
aacagtgtacaatttaccagatttcttcctttc

SEQ ID NO: 64085 - DNA, 33 bp, Homo sapien
ctcagaaaatactgtgcaaccctctctactccc

SEQ ID NO: 64086 - DNA, 33 bp, Homo sapien
ctcagaaaatactgtgtaaccctctctactccc

SEQ ID NO: 64087 - DNA, 33 bp, Homo sapien
tttatcaaatctactaaaagttggtcatgtacc

SEQ ID NO: 64088 - DNA, 33 bp, Homo sapien
tttatcaaatctactacaagttggtcatgtacc

SEQ ID NO: 64089 - DNA, 33 bp, Homo sapien
gatggattccattacaatcagagaaaggagaat

SEQ ID NO: 64090 - DNA, 33 bp, Homo sapien
gatggattccattacagtcagagaaaggagaat

SEQ ID NO: 64091 - DNA, 33 bp, Homo sapien
tcttaaaactaaaagaaatagccatctcatttt

SEQ ID NO: 64092 - DNA, 33 bp, Homo sapien
tcttaaaactaaaagatatagccatctcatttt

SEQ ID NO: 64093 - DNA, 33 bp, Homo sapien
tgggagtggacaatgaaaattactactttcaat

SEQ ID NO: 64094 - DNA, 33 bp, Homo sapien
tgggagtggacaatgagaattactactttcaat

SEQ ID NO: 64095 - DNA, 33 bp, Homo sapien
cattatctgcctaaacaattttttctcaactcc

SEQ ID NO: 64096 - DNA, 33 bp, Homo sapien
cattatctgcctaaacgattttttctcaactcc

SEQ ID NO: 64097 - DNA, 33 bp, Homo sapien
gacatttatgcagtcaacaaatacatgaaaaca

SEQ ID NO: 64098 - DNA, 33 bp, Homo sapien
gacatttatgcagtcagcaaatacatgaaaaca

SEQ ID NO: 64099 - DNA, 33 bp, Homo sapien
catttatctggtgataactgatgcttatacatt

SEQ ID NO: 64100 - DNA, 33 bp, Homo sapien
catttatctggtgatacctgatgcttatacatt

SEQ ID NO: 64101 - DNA, 33 bp, Homo sapien
tttttctctgttcacccctttagtggcctgctc

SEQ ID NO: 64102 - DNA, 33 bp, Homo sapien
tttttctctgttcacctctttagtggcctgctc

SEQ ID NO: 64103 - DNA, 33 bp, Homo sapien
tttgggacacacttaaagaagactatccaaaaa

SEQ ID NO: 64104 - DNA, 33 bp, Homo sapien
tttgggacacacttaaggaagactatccaaaaa

SEQ ID NO: 64105 - DNA, 33 bp, Homo sapien
catatgtcttcttgacaactacaatagttactt

SEQ ID NO: 64106 - DNA, 33 bp, Homo sapien
catatgtcttcttgactactacaatagttactt

SEQ ID NO: 64107 - DNA, 33 bp, Homo sapien
atgttagcatggcatagaatgtctagaaaatct

SEQ ID NO: 64108 - DNA, 33 bp, Homo sapien
atgttagcatggcatataatgtctagaaaatct

SEQ ID NO: 64109 - DNA, 33 bp, Homo sapien
caatagaccaatacgcggagacagtagggtttg

SEQ ID NO: 64110 - DNA, 33 bp, Homo sapien
caatagaccaatacgctgagacagtagggtttg

SEQ ID NO: 64111 - DNA, 33 bp, Homo sapien
attgccagaagatctaaaataggcaagattaaa

SEQ ID NO: 64112 - DNA, 33 bp, Homo sapien
attgccagaagatctacaataggcaagattaaa

SEQ ID NO: 64113 - DNA, 33 bp, Homo sapien
tgtttgactgacggggaagtttagaagcatctg

SEQ ID NO: 64114 - DNA, 33 bp, Homo sapien
tgtttgactgacgggggagtttagaagcatctg

SEQ ID NO: 64115 - DNA, 33 bp, Homo sapien
cacaaattttctgccaatggaatctgattagcc

SEQ ID NO: 64116 - DNA, 33 bp, Homo sapien
cacaaattttctgccagtggaatctgattagcc

SEQ ID NO: 64117 - DNA, 33 bp, Homo sapien
tctctcttgtttacacaaagcacaagagaatat

SEQ ID NO: 64118 - DNA, 33 bp, Homo sapien
tctctcttgtttacacgaagcacaagagaatat

SEQ ID NO: 64119 - DNA, 33 bp, Homo sapien
aggtcttcacaagaaagttatgcacatgggact

SEQ ID NO: 64120 - DNA, 33 bp, Homo sapien
aggtcttcacaagaaatttatgcacatgggact

SEQ ID NO: 64121 - DNA, 33 bp, Homo sapien
actggagtaaaggtcactcctgctatgcaaaga

SEQ ID NO: 64122 - DNA, 33 bp, Homo sapien
actggagtaaaggtcattcctgctatgcaaaga

SEQ ID NO: 64123 - DNA, 33 bp, Homo sapien
aacagcagcagaggaaaaatcgccctcatgatt

SEQ ID NO: 64124 - DNA, 33 bp, Homo sapien
aacagcagcagaggaataatcgccctcatgatt

SEQ ID NO: 64125 - DNA, 33 bp, Homo sapien
cagagatgagaagtctaagaatatacatcagag

SEQ ID NO: 64126 - DNA, 33 bp, Homo sapien
cagagatgagaagtctgagaatatacatcagag

SEQ ID NO: 64127 - DNA, 33 bp, Homo sapien
gaaatgatattagaagactgaagaaatattggt

SEQ ID NO: 64128 - DNA, 33 bp, Homo sapien
gaaatgatattagaagcctgaagaaatattggt

SEQ ID NO: 64129 - DNA, 33 bp, Homo sapien
tcacccgccttatacaaatccttcttctctccc

SEQ ID NO: 64130 - DNA, 33 bp, Homo sapien
tcacccgccttatacacatccttcttctctccc

SEQ ID NO: 64131 - DNA, 33 bp, Homo sapien
aaagcaccatattaaaacctggaaaactaacgg

SEQ ID NO: 64132 - DNA, 33 bp, Homo sapien
aaagcaccatattaaatcctggaaaactaacgg

SEQ ID NO: 64133 - DNA, 33 bp, Homo sapien
tcctgcattttcaagaacatagaataaacaggg

SEQ ID NO: 64134 - DNA, 33 bp, Homo sapien
tcctgcattttcaagagcatagaataaacaggg

SEQ ID NO: 64135 - DNA, 33 bp, Homo sapien
aggctttttagaggaaaccttacaggagtgata

SEQ ID NO: 64136 - DNA, 33 bp, Homo sapien
aggctttttagaggaatccttacaggagtgata

SEQ ID NO: 64137 - DNA, 33 bp, Homo sapien
atggagcaccaatacacctggtagcaggctttt

SEQ ID NO: 64138 - DNA, 33 bp, Homo sapien
atggagcaccaatacatctggtagcaggctttt

SEQ ID NO: 64139 - DNA, 33 bp, Homo sapien
tctgtgtcttcccccaatccatagtctctgagc

SEQ ID NO: 64140 - DNA, 33 bp, Homo sapien
tctgtgtcttcccccagtccatagtctctgagc

SEQ ID NO: 64141 - DNA, 33 bp, Homo sapien
tagtttatttagagacacaatgcatggtaggta

SEQ ID NO: 64142 - DNA, 33 bp, Homo sapien
tagtttatttagagacgcaatgcatggtaggta

SEQ ID NO: 64143 - DNA, 33 bp, Homo sapien
tttcctcatgaagcctaaaagagatagatgttc

SEQ ID NO: 64144 - DNA, 33 bp, Homo sapien
tttcctcatgaagcctgaaagagatagatgttc

SEQ ID NO: 64145 - DNA, 33 bp, Homo sapien
aacatggcaatatggcaaaacaatgaaacattt

SEQ ID NO: 64146 - DNA, 33 bp, Homo sapien
aacatggcaatatggcgaaacaatgaaacattt

SEQ ID NO: 64147 - DNA, 33 bp, Homo sapien
aaatctttcagtggcaaaagttgattttttttc

SEQ ID NO: 64148 - DNA, 33 bp, Homo sapien
aaatctttcagtggcagaagttgattttttttc

SEQ ID NO: 64149 - DNA, 33 bp, Homo sapien
agtctgatgtctgttacagtgaaataccttgtc

SEQ ID NO: 64150 - DNA, 33 bp, Homo sapien
agtctgatgtctgttagagtgaaataccttgtc

SEQ ID NO: 64151 - DNA, 33 bp, Homo sapien
atacattaatgcaccaaaactgatgaaatgtag

SEQ ID NO: 64152 - DNA, 33 bp, Homo sapien
atacattaatgcaccagaactgatgaaatgtag

SEQ ID NO: 64153 - DNA, 33 bp, Homo sapien
aataaataacatacaacggagcaccaatacatc

SEQ ID NO: 64154 - DNA, 33 bp, Homo sapien
aataaataacatacaatggagcaccaatacatc

SEQ ID NO: 64155 - DNA, 33 bp, Homo sapien
ctttgatatcatcgtccctcaaccaaattcttc

SEQ ID NO: 64156 - DNA, 33 bp, Homo sapien
ctttgatatcatcgtctctcaaccaaattcttc

SEQ ID NO: 64157 - DNA, 33 bp, Homo sapien; identical to SEQ ID NO: 64155

SEQ ID NO: 64158 - DNA, 33 bp, Homo sapien; identical to SEQ ID NO: 64156

SEQ ID NO: 64159 - DNA, 33 bp, Homo sapien
aactgaacttctgcaaatgtggtattccctttc

SEQ ID NO: 64160 - DNA, 33 bp, Homo sapien
aactgaacttctgcaattgtggtattccctttc

SEQ ID NO: 64161 - DNA, 33 bp, Homo sapien
tagctggggagcttgagagagatactgaagaaa

SEQ ID NO: 64162 - DNA, 33 bp, Homo sapien
tagctggggagcttgatagagatactgaagaaa

SEQ ID NO: 64163 - DNA, 33 bp, Homo sapien
gcaccatgtctactagaaagtccagaagctgat

SEQ ID NO: 64164 - DNA, 33 bp, Homo sapien
gcaccatgtctactaggaagtccagaagctgat

SEQ ID NO: 64165 - DNA, 33 bp, Homo sapien
ggattctcagctagagcaaggtaatttaaagca

SEQ ID NO: 64166 - DNA, 33 bp, Homo sapien
ggattctcagctagagtaaggtaatttaaagca

SEQ ID NO: 64167 - DNA, 33 bp, Homo sapien
tctccaggctgtatgaagattccagattatgct

SEQ ID NO: 64168 - DNA, 33 bp, Homo sapien
tctccaggctgtatgaggattccagattatgct

SEQ ID NO: 64169 - DNA, 33 bp, Homo sapien
cttacagattttccagacatcctataccatgct

SEQ ID NO: 64170 - DNA, 33 bp, Homo sapien
cttacagattttccaggcatcctataccatgct

SEQ ID NO: 64171 - DNA, 33 bp, Homo sapien
gggagcctgtagaaaaagatccacagttcaatt

SEQ ID NO: 64172 - DNA, 33 bp, Homo sapien
gggagcctgtagaaaaggatccacagttcaatt

SEQ ID NO: 64173 - DNA, 33 bp, Homo sapien
gtatacactaactgggccatgatcagaaactta

SEQ ID NO: 64174 - DNA, 33 bp, Homo sapien
gtatacactaactgggtcatgatcagaaactta

SEQ ID NO: 64175 - DNA, 33 bp, Homo sapien
aagagaaaatcaagtgcagctccattgttaaga

SEQ ID NO: 64176 - DNA, 33 bp, Homo sapien
aagagaaaatcaagtgtagctccattgttaaga

SEQ ID NO: 64177 - DNA, 33 bp, Homo sapien
tttctcttggctttaccgaggggagtctgtaca

SEQ ID NO: 64178 - DNA, 33 bp, Homo sapien
tttctcttggctttactgaggggagtctgtaca

SEQ ID NO: 64179 - DNA, 33 bp, Homo sapien
gggaaaagctcaaaaaactagtcagacttaggg

SEQ ID NO: 64180 - DNA, 33 bp, Homo sapien
gggaaaagctcaaaaagctagtcagacttaggg

SEQ ID NO: 64181 - DNA, 33 bp, Homo sapien
agcttctttttgctgacaaggggcacagtcaga

SEQ ID NO: 64182 - DNA, 33 bp, Homo sapien
agcttctttttgctgataaggggcacagtcaga

SEQ ID NO: 64183 - DNA, 33 bp, Homo sapien
ggccttaaggaatgcacatctagcagactctca

SEQ ID NO: 64184 - DNA, 33 bp, Homo sapien
ggccttaaggaatgcagatctagcagactctca

SEQ ID NO: 64185 - DNA, 33 bp, Homo sapien
ttgatacaaattattacggtctgattctcctga

SEQ ID NO: 64186 - DNA, 33 bp, Homo sapien
ttgatacaaattattatggtctgattctcctga

SEQ ID NO: 64187 - DNA, 33 bp, Homo sapien
gtgatagagagagagacaattgacagatattga

SEQ ID NO: 64188 - DNA, 33 bp, Homo sapien
gtgatagagagagagataattgacagatattga

SEQ ID NO: 64189 - DNA, 33 bp, Homo sapien
tgacttctgtgaaccaaaatctcaacatcacat

SEQ ID NO: 64190 - DNA, 33 bp, Homo sapien
tgacttctgtgaaccacaatctcaacatcacat

SEQ ID NO: 64191 - DNA, 33 bp, Homo sapien
cctttacacaaccacccacttcaaaagtagaaa

SEQ ID NO: 64192 - DNA, 33 bp, Homo sapien
cctttacacaaccaccgacttcaaaagtagaaa

SEQ ID NO: 64193 - DNA, 33 bp, Homo sapien
gagaaaatctttgtgacctggggtttgatggaa

SEQ ID NO: 64194 - DNA, 33 bp, Homo sapien
gagaaaatctttgtgatctggggtttgatggaa

SEQ ID NO: 64195 - DNA, 33 bp, Homo sapien
agtcctctgtcagatacgttatttgcaaatatt

SEQ ID NO: 64196 - DNA, 33 bp, Homo sapien
agtcctctgtcagatatgttatttgcaaatatt

SEQ ID NO: 64197 - DNA, 33 bp, Homo sapien
tcttgttccactagaaagtctttagggcagtaa

SEQ ID NO: 64198 - DNA, 33 bp, Homo sapien
tcttgttccactagaaggtctttagggcagtaa

SEQ ID NO: 64199 - DNA, 33 bp, Homo sapien
tcctatgataacaaagccttcttctggaatagt

SEQ ID NO: 64200 - DNA, 33 bp, Homo sapien
tcctatgataacaaaggcttcttctggaatagt

SEQ ID NO: 64201 - DNA, 33 bp, Homo sapien
tacatgggtaagtctgcaggaagcaaagcatca

SEQ ID NO: 64202 - DNA, 33 bp, Homo sapien
tacatgggtaagtctgtaggaagcaaagcatca

SEQ ID NO: 64203 - DNA, 33 bp, Homo sapien
acaacaaagcagatatcaatgctaacagagatg

SEQ ID NO: 64204 - DNA, 33 bp, Homo sapien
acaacaaagcagatattaatgctaacagagatg

SEQ ID NO: 64205 - DNA, 33 bp, Homo sapien
atccccaggacagttacgtgacatgttcagtac

SEQ ID NO: 64206 - DNA, 33 bp, Homo sapien
atccccaggacagttatgtgacatgttcagtac

SEQ ID NO: 64207 - DNA, 33 bp, Homo sapien
tttttgatgcttgtagaactctcttatttcaga

SEQ ID NO: 64208 - DNA, 33 bp, Homo sapien
tttttgatgcttgtaggactctcttatttcaga

SEQ ID NO: 64209 - DNA, 33 bp, Homo sapien
tttctgatacctcgaaatgcttcctgtttttca

SEQ ID NO: 64210 - DNA, 33 bp, Homo sapien
tttctgatacctcgaattgcttcctgtttttca

SEQ ID NO: 64211 - DNA, 33 bp, Homo sapien
ggtgcagcaaatttacactctaagatttattac

SEQ ID NO: 64212 - DNA, 33 bp, Homo sapien
ggtgcagcaaatttacgctctaagatttattac

SEQ ID NO: 64213 - DNA, 33 bp, Homo sapien
ttaaggagaaactttacctattcctgaactgta

SEQ ID NO: 64214 - DNA, 33 bp, Homo sapien
ttaaggagaaactttatctattcctgaactgta

SEQ ID NO: 64215 - DNA, 33 bp, Homo sapien
tggattcttcatcctacggcctgataatattga

SEQ ID NO: 64216 - DNA, 33 bp, Homo sapien
tggattcttcatcctatggcctgataatattga

SEQ ID NO: 64217 - DNA, 33 bp, Homo sapien
ccctctgaagaaagtacattgctcctgcatgac

SEQ ID NO: 64218 - DNA, 33 bp, Homo sapien
ccctctgaagaaagtatattgctcctgcatgac

SEQ ID NO: 64219 - DNA, 33 bp, Homo sapien
tctaacatttgttttacgaaaattcctcaactt

SEQ ID NO: 64220 - DNA, 33 bp, Homo sapien
tctaacatttgttttatgaaaattcctcaactt

SEQ ID NO: 64221 - DNA, 33 bp, Homo sapien
gaaggacttgttagcacatagctgttaagtgac

SEQ ID NO: 64222 - DNA, 33 bp, Homo sapien
gaaggacttgttagcatatagctgttaagtgac

SEQ ID NO: 64223 - DNA, 33 bp, Homo sapien
caactcattacacagacgcaaaactcttcaata

SEQ ID NO: 64224 - DNA, 33 bp, Homo sapien
caactcattacacagatgcaaaactcttcaata

SEQ ID NO: 64225 - DNA, 33 bp, Homo sapien
cctaggtggttttacactggcatttattttgtg

SEQ ID NO: 64226 - DNA, 33 bp, Homo sapien
cctaggtggttttacattggcatttattttgtg

SEQ ID NO: 64227 - DNA, 33 bp, Homo sapien
ctattttccaaagcaacctgagagttttttctc

SEQ ID NO: 64228 - DNA, 33 bp, Homo sapien
ctattttccaaagcaatctgagagttttttctc

SEQ ID NO: 64229 - DNA, 33 bp, Homo sapien
gactaacagactaacaatacctcatatagtcaa

SEQ ID NO: 64230 - DNA, 33 bp, Homo sapien
gactaacagactaacagtacctcatatagtcaa

SEQ ID NO: 64231 - DNA, 33 bp, Homo sapien
cagttttcagtttacaccaaatgctactcagtt

SEQ ID NO: 64232 - DNA, 33 bp, Homo sapien
cagttttcagtttacatcaaatgctactcagtt

SEQ ID NO: 64233 - DNA, 33 bp, Homo sapien
cacttagcagctagaaaaagattataaatacag

SEQ ID NO: 64234 - DNA, 33 bp, Homo sapien
cacttagcagctagaagaagattataaatacag

SEQ ID NO: 64235 - DNA, 33 bp, Homo sapien
gaagcttcattagtaaaaaggtacagaatacta

SEQ ID NO: 64236 - DNA, 33 bp, Homo sapien
gaagcttcattagtaagaaggtacagaatacta

SEQ ID NO: 64237 - DNA, 33 bp, Homo sapien
gtattttgtatctaaaattctaccttgctcagc

SEQ ID NO: 64238 - DNA, 33 bp, Homo sapien
gtattttgtatctaaagttctaccttgctcagc

SEQ ID NO: 64239 - DNA, 33 bp, Homo sapien
ggggagtacgtgaaaacaaaataggagccaact

SEQ ID NO: 64240 - DNA, 33 bp, Homo sapien
ggggagtacgtgaaaagaaaataggagccaact

SEQ ID NO: 64241 - DNA, 33 bp, Homo sapien
gaaagggattgtagagccataaaggaagaaaat

SEQ ID NO: 64242 - DNA, 33 bp, Homo sapien
gaaagggattgtagaggcataaaggaagaaaat

SEQ ID NO: 64243 - DNA, 33 bp, Homo sapien
gaagagtagtcatccccaagaaatggaaaacaa

SEQ ID NO: 64244 - DNA, 33 bp, Homo sapien
gaagagtagtcatccctaagaaatggaaaacaa

SEQ ID NO: 64245 - DNA, 33 bp, Homo sapien
ctacatgatttaaaaccggattcagtctagaat

SEQ ID NO: 64246 - DNA, 33 bp, Homo sapien
ctacatgatttaaaactggattcagtctagaat

SEQ ID NO: 64247 - DNA, 33 bp, Homo sapien
ttcaatgtatgttgaaacaaatcaatgtagaaa

SEQ ID NO: 64248 - DNA, 33 bp, Homo sapien
ttcaatgtatgttgaagcaaatcaatgtagaaa

SEQ ID NO: 64249 - DNA, 33 bp, Homo sapien
tgcaatagtattgggaagtgggaactaagagga

SEQ ID NO: 64250 - DNA, 33 bp, Homo sapien
tgcaatagtattgggaggtgggaactaagagga

SEQ ID NO: 64251 - DNA, 33 bp, Homo sapien
gttagagggtaataacggcatggagaaaagtaa

SEQ ID NO: 64252 - DNA, 33 bp, Homo sapien
gttagagggtaataactgcatggagaaaagtaa

SEQ ID NO: 64253 - DNA, 33 bp, Homo sapien
agatttttccctgtgacgttttcacataagcga

SEQ ID NO: 64254 - DNA, 33 bp, Homo sapien
agatttttccctgtgatgttttcacataagcga

SEQ ID NO: 64255 - DNA, 33 bp, Homo sapien
aacaggtgatcattctaacagaagtcagaaaga

SEQ ID NO: 64256 - DNA, 33 bp, Homo sapien
aacaggtgatcattctcacagaagtcagaaaga

SEQ ID NO: 64257 - DNA, 33 bp, Homo sapien
cacggactaaacaccacaagctgttgtatgcaa

SEQ ID NO: 64258 - DNA, 33 bp, Homo sapien
cacggactaaacaccataagctgttgtatgcaa

SEQ ID NO: 64259 - DNA, 33 bp, Homo sapien
ctgatctcaatatgaccaagagttgacatgaaa

SEQ ID NO: 64260 - DNA, 33 bp, Homo sapien
ctgatctcaatatgactaagagttgacatgaaa

SEQ ID NO: 64261 - DNA, 33 bp, Homo sapien
agtatagcagtaaatacgtgtgagcactgaaga

SEQ ID NO: 64262 - DNA, 33 bp, Homo sapien
agtatagcagtaaatatgtgtgagcactgaaga

SEQ ID NO: 64263 - DNA, 33 bp, Homo sapien
tgccccgcatctgctgaaaggaggccctgctgt

SEQ ID NO: 64264 - DNA, 33 bp, Homo sapien
tgccccgcatctgctgcaaggaggccctgctgt

SEQ ID NO: 64265 - DNA, 33 bp, Homo sapien
attaatgtatgtataacgtggtatacctgtcct

SEQ ID NO: 64266 - DNA, 33 bp, Homo sapien
attaatgtatgtataatgtggtatacctgtcct

SEQ ID NO: 64267 - DNA, 33 bp, Homo sapien
gcaacgtatctgtgacagctgagtcaaggagta

SEQ ID NO: 64268 - DNA, 33 bp, Homo sapien
gcaacgtatctgtgactgctgagtcaaggagta

SEQ ID NO: 64269 - DNA, 33 bp, Homo sapien
ggagagctagaaacaaacaaggcaccatataag

SEQ ID NO: 64270 - DNA, 33 bp, Homo sapien
ggagagctagaaacaaccaaggcaccatataag

SEQ ID NO: 64271 - DNA, 33 bp, Homo sapien
ggtgatttgctagatgaatggtgtacctgcagt

SEQ ID NO: 64272 - DNA, 33 bp, Homo sapien
ggtgatttgctagatggatggtgtacctgcagt

SEQ ID NO: 64273 - DNA, 33 bp, Homo sapien
cattatgcattgggagaataagagaatttttca

SEQ ID NO: 64274 - DNA, 33 bp, Homo sapien
cattatgcattgggaggataagagaatttttca

SEQ ID NO: 64275 - DNA, 33 bp, Homo sapien
caaattatctgagttacctttatagtatcagtt

SEQ ID NO: 64276 - DNA, 33 bp, Homo sapien
caaattatctgagttatctttatagtatcagtt

SEQ ID NO: 64277 - DNA, 33 bp, Homo sapien
ataacatttttattcaacagggagtctaaacca

SEQ ID NO: 64278 - DNA, 33 bp, Homo sapien
ataacatttttattcagcagggagtctaaacca

SEQ ID NO: 64279 - DNA, 33 bp, Homo sapien
cttttcctagcagccaggtacattagaggaggc

SEQ ID NO: 64280 - DNA, 33 bp, Homo sapien
cttttcctagcagccatgtacattagaggaggc

SEQ ID NO: 64281 - DNA, 33 bp, Homo sapien
tcatcacaaagaaaccaaagaagtagaaagtgt

SEQ ID NO: 64282 - DNA, 33 bp, Homo sapien
tcatcacaaagaaaccgaagaagtagaaagtgt

SEQ ID NO: 64283 - DNA, 33 bp, Homo sapien
cagctgtatactttaacgtactgttttcgggat

SEQ ID NO: 64284 - DNA, 33 bp, Homo sapien
cagctgtatactttaatgtactgttttcgggat

SEQ ID NO: 64285 - DNA, 33 bp, Homo sapien
cggtgttggacacacactgggtgttcatggact

SEQ ID NO: 64286 - DNA, 33 bp, Homo sapien
cggtgttggacacacattgggtgttcatggact

SEQ ID NO: 64287 - DNA, 33 bp, Homo sapien
caggactgtaaggcatcactatttgttactctg

SEQ ID NO: 64288 - DNA, 33 bp, Homo sapien
caggactgtaaggcatgactatttgttactctg

SEQ ID NO: 64289 - DNA, 33 bp, Homo sapien
tagagctttgcataggaatgtatgtccaaatac

SEQ ID NO: 64290 - DNA, 33 bp, Homo sapien
tagagctttgcataggtatgtatgtccaaatac

SEQ ID NO: 64291 - DNA, 33 bp, Homo sapien
actttccctactgctcccagtgctgcaattgtg

SEQ ID NO: 64292 - DNA, 33 bp, Homo sapien
actttccctactgctctcagtgctgcaattgtg

SEQ ID NO: 64293 - DNA, 33 bp, Homo sapien
cttctcacatgggaacacagcatggatgcactt

SEQ ID NO: 64294 - DNA, 33 bp, Homo sapien
cttctcacatgggaacgcagcatggatgcactt

SEQ ID NO: 64295 - DNA, 33 bp, Homo sapien
ttcatcatatcaaagaagtaatcatttgtgact

SEQ ID NO: 64296 - DNA, 33 bp, Homo sapien
ttcatcatatcaaagaggtaatcatttgtgact

SEQ ID NO: 64297 - DNA, 33 bp, Homo sapien
gcttgaaaaaaacataacattctggatataaag

SEQ ID NO: 64298 - DNA, 33 bp, Homo sapien
gcttgaaaaaaacatagcattctggatataaag

SEQ ID NO: 64299 - DNA, 33 bp, Homo sapien
gtccatttgctttatcaacatcacggcttcaga

SEQ ID NO: 64300 - DNA, 33 bp, Homo sapien
gtccatttgctttatcgacatcacggcttcaga

SEQ ID NO: 64301 - DNA, 33 bp, Homo sapien
tttgaatgaaaatcgacgtgtatagacaaagac

SEQ ID NO: 64302 - DNA, 33 bp, Homo sapien
tttgaatgaaaatcgatgtgtatagacaaagac

SEQ ID NO: 64303 - DNA, 33 bp, Homo sapien
gcatcccttgttatacaaatgttcacttcatga

SEQ ID NO: 64304 - DNA, 33 bp, Homo sapien
gcatcccttgttatacgaatgttcacttcatga

SEQ ID NO: 64305 - DNA, 33 bp, Homo sapien
tcagttagctttcctggatagccaggcaccaca

SEQ ID NO: 64306 - DNA, 33 bp, Homo sapien
tcagttagctttcctgtatagccaggcaccaca

SEQ ID NO: 64307 - DNA, 33 bp, Homo sapien
ccatagaacaaccaaaaaaaacgcagaggctga

SEQ ID NO: 64308 - DNA, 33 bp, Homo sapien
ccatagaacaaccaaacaaaacgcagaggctga

SEQ ID NO: 64309 - DNA, 33 bp, Homo sapien
atgcatactgacttgacatgcatgaggttattt

SEQ ID NO: 64310 - DNA, 33 bp, Homo sapien
atgcatactgacttgatatgcatgaggttattt

SEQ ID NO: 64311 - DNA, 33 bp, Homo sapien
tggtttctgtcctacccaattgttcatccactc

SEQ ID NO: 64312 - DNA, 33 bp, Homo sapien
tggtttctgtcctacctaattgttcatccactc

SEQ ID NO: 64313 - DNA, 33 bp, Homo sapien
ctaagggttgacattcaaactattatagccact

SEQ ID NO: 64314 - DNA, 33 bp, Homo sapien
ctaagggttgacattcgaactattatagccact

SEQ ID NO: 64315 - DNA, 33 bp, Homo sapien
ttgtatattctataccacaatgtagctatggca

SEQ ID NO: 64316 - DNA, 33 bp, Homo sapien
ttgtatattctataccgcaatgtagctatggca

SEQ ID NO: 64317 - DNA, 33 bp, Homo sapien
aaagagctacagatgacctttaaattacatatt

SEQ ID NO: 64318 - DNA, 33 bp, Homo sapien
aaagagctacagatgatctttaaattacatatt

SEQ ID NO: 64319 - DNA, 33 bp, Homo sapien
gcagatcactctcaggaaaaaggtattaaagaa

SEQ ID NO: 64320 - DNA, 33 bp, Homo sapien
gcagatcactctcagggaaaaggtattaaagaa

SEQ ID NO: 64321 - DNA, 33 bp, Homo sapien
gttttaatctgattaccggttcatgaggcaatg

SEQ ID NO: 64322 - DNA, 33 bp, Homo sapien
gttttaatctgattactggttcatgaggcaatg

SEQ ID NO: 64323 - DNA, 33 bp, Homo sapien
ataaaatgttctccaaattactctagaagctga

SEQ ID NO: 64324 - DNA, 33 bp, Homo sapien
ataaaatgttctccaagttactctagaagctga

SEQ ID NO: 64325 - DNA, 33 bp, Homo sapien
tttcagtaaatggtcccagctccatctcagaac

SEQ ID NO: 64326 - DNA, 33 bp, Homo sapien
tttcagtaaatggtcctagctccatctcagaac

SEQ ID NO: 64327 - DNA, 33 bp, Homo sapien
gtaatcctacctccataaagtatttctgttttt

SEQ ID NO: 64328 - DNA, 33 bp, Homo sapien
gtaatcctacctccatgaagtatttctgttttt

SEQ ID NO: 64329 - DNA, 33 bp, Homo sapien
aatgttgtggttttcaaataccctgctgctccc

SEQ ID NO: 64330 - DNA, 33 bp, Homo sapien
aatgttgtggttttcagataccctgctgctccc

SEQ ID NO: 64331 - DNA, 33 bp, Homo sapien
agggctgttttataaactcacctcatcctttgg

SEQ ID NO: 64332 - DNA, 33 bp, Homo sapien
agggctgttttataaattcacctcatcctttgg

SEQ ID NO: 64333 - DNA, 33 bp, Homo sapien
aagtccaagaagccaagagtaaattttctgata

SEQ ID NO: 64334 - DNA, 33 bp, Homo sapien
aagtccaagaagccaatagtaaattttctgata

SEQ ID NO: 64335 - DNA, 33 bp, Homo sapien
ataaaaagataaacaacgcttgtaagttctatt

SEQ ID NO: 64336 - DNA, 33 bp, Homo sapien
ataaaaagataaacaatgcttgtaagttctatt

SEQ ID NO: 64337 - DNA, 33 bp, Homo sapien
ggttaccaaaggcctcactttatttaaataagg

SEQ ID NO: 64338 - DNA, 33 bp, Homo sapien
ggttaccaaaggcctctctttatttaaataagg

SEQ ID NO: 64339 - DNA, 33 bp, Homo sapien
aaatagcttttatggaacctcttagcaatagta

SEQ ID NO: 64340 - DNA, 33 bp, Homo sapien
aaatagcttttatggatcctcttagcaatagta

SEQ ID NO: 64341 - DNA, 33 bp, Homo sapien
gctaagaaaaaatctgaactcatgtaaaacgac

SEQ ID NO: 64342 - DNA, 33 bp, Homo sapien
gctaagaaaaaatctggactcatgtaaaacgac

SEQ ID NO: 64343 - DNA, 33 bp, Homo sapien
ctaacagacttctggaaggcaagaaccacatcg

SEQ ID NO: 64344 - DNA, 33 bp, Homo sapien
ctaacagacttctggagggcaagaaccacatcg

SEQ ID NO: 64345 - DNA, 33 bp, Homo sapien
tctaagtacacagaaacaataagagtatattta

SEQ ID NO: 64346 - DNA, 33 bp, Homo sapien
tctaagtacacagaaagaataagagtatattta

SEQ ID NO: 64347 - DNA, 33 bp, Homo sapien
tcattgggatatggaaatagaattatagtatca

SEQ ID NO: 64348 - DNA, 33 bp, Homo sapien
tcattgggatatggaactagaattatagtatca

SEQ ID NO: 64349 - DNA, 33 bp, Homo sapien
atctcataagtactgacgaattgcttgtctacc

SEQ ID NO: 64350 - DNA, 33 bp, Homo sapien
atctcataagtactgaggaattgcttgtctacc

SEQ ID NO: 64351 - DNA, 33 bp, Homo sapien
gttcagttccagatcaactcaataaaatgagta

SEQ ID NO: 64352 - DNA, 33 bp, Homo sapien
gttcagttccagatcacctcaataaaatgagta

SEQ ID NO: 64353 - DNA, 33 bp, Homo sapien
agcctaccaggccagacgctgtttgttcctaaa

SEQ ID NO: 64354 - DNA, 33 bp, Homo sapien
agcctaccaggccagatgctgtttgttcctaaa

SEQ ID NO: 64355 - DNA, 33 bp, Homo sapien
taatagaagatgtcaaaaacacaatcatcgtat

SEQ ID NO: 64356 - DNA, 33 bp, Homo sapien
taatagaagatgtcaacaacacaatcatcgtat

SEQ ID NO: 64357 - DNA, 33 bp, Homo sapien
ttatgtttccttccagaaaattctaatgacatt

SEQ ID NO: 64358 - DNA, 33 bp, Homo sapien
ttatgtttccttccagtaaattctaatgacatt

SEQ ID NO: 64359 - DNA, 33 bp, Homo sapien
aataatgagatagagcaatgggcagaagactat

SEQ ID NO: 64360 - DNA, 33 bp, Homo sapien
aataatgagatagagcgatgggcagaagactat

SEQ ID NO: 64361 - DNA, 33 bp, Homo sapien
ctttgtctatcctagccaaaatagtcttctgcc

SEQ ID NO: 64362 - DNA, 33 bp, Homo sapien
ctttgtctatcctagctaaaatagtcttctgcc

SEQ ID NO: 64363 - DNA, 33 bp, Homo sapien
tacttcttatcatttgaactgcaagtataatcc

SEQ ID NO: 64364 - DNA, 33 bp, Homo sapien
tacttcttatcatttgcactgcaagtataatcc

SEQ ID NO: 64365 - DNA, 33 bp, Homo sapien
atcttccaagctgggccctacatccctatacta

SEQ ID NO: 64366 - DNA, 33 bp, Homo sapien
atcttccaagctgggctctacatccctatacta

SEQ ID NO: 64367 - DNA, 33 bp, Homo sapien
gataaagaatataatacagaatggcatcagcaa

SEQ ID NO: 64368 - DNA, 33 bp, Homo sapien
gataaagaatataatagagaatggcatcagcaa

SEQ ID NO: 64369 - DNA, 33 bp, Homo sapien
ctcccagaggcaaccaaaagtccctcctctaca

SEQ ID NO: 64370 - DNA, 33 bp, Homo sapien
ctcccagaggcaaccagaagtccctcctctaca

SEQ ID NO: 64371 - DNA, 33 bp, Homo sapien
atataaaggatcataacgatggcagtggtgggc

SEQ ID NO: 64372 - DNA, 33 bp, Homo sapien
atataaaggatcataatgatggcagtggtgggc

SEQ ID NO: 64373 - DNA, 33 bp, Homo sapien
cacaaatgaacccgacactctcagggctggccc

SEQ ID NO: 64374 - DNA, 33 bp, Homo sapien
cacaaatgaacccgacgctctcagggctggccc

SEQ ID NO: 64375 - DNA, 33 bp, Homo sapien
tgcttcttagtgctaaccattttttggtacata

SEQ ID NO: 64376 - DNA, 33 bp, Homo sapien
tgcttcttagtgctaatcattttttggtacata

SEQ ID NO: 64377 - DNA, 33 bp, Homo sapien
ctagacgagtcatctacaggggcaaatagaaga

SEQ ID NO: 64378 - DNA, 33 bp, Homo sapien
ctagacgagtcatctagaggggcaaatagaaga

SEQ ID NO: 64379 - DNA, 33 bp, Homo sapien
ggcatagccagtaatcgctaaattgagttatca

SEQ ID NO: 64380 - DNA, 33 bp, Homo sapien
ggcatagccagtaatctctaaattgagttatca

SEQ ID NO: 64381 - DNA, 33 bp, Homo sapien
tcctatggttctgaacggcaagccctgactccc

SEQ ID NO: 64382 - DNA, 33 bp, Homo sapien
tcctatggttctgaactgcaagccctgactccc

SEQ ID NO: 64383 - DNA, 33 bp, Homo sapien
agtttaatacttgaaaatggaaatgtttaaacc

SEQ ID NO: 64384 - DNA, 33 bp, Homo sapien
agtttaatacttgaaagtggaaatgtttaaacc

SEQ ID NO: 64385 - DNA, 33 bp, Homo sapien
aattggtgatgagctggaactgagatttggaac

SEQ ID NO: 64386 - DNA, 33 bp, Homo sapien
aattggtgatgagctgtaactgagatttggaac

SEQ ID NO: 64387 - DNA, 33 bp, Homo sapien
actccatgctttaaatcattgtgttcatgaggt

SEQ ID NO: 64388 - DNA, 33 bp, Homo sapien
actccatgctttaaattattgtgttcatgaggt

SEQ ID NO: 64389 - DNA, 33 bp, Homo sapien
aaggtcacattgataaaggtagaacatatactt

SEQ ID NO: 64390 - DNA, 33 bp, Homo sapien
aaggtcacattgataagggtagaacatatactt

SEQ ID NO: 64391 - DNA, 33 bp, Homo sapien
caaccttcactagggacctctgctaccataaga

SEQ ID NO: 64392 - DNA, 33 bp, Homo sapien
caaccttcactagggatctctgctaccataaga

SEQ ID NO: 64393 - DNA, 33 bp, Homo sapien
taaaaatttgaggatacgttcttccaatatttg

SEQ ID NO: 64394 - DNA, 33 bp, Homo sapien
taaaaatttgaggatatgttcttccaatatttg

SEQ ID NO: 64395 - DNA, 33 bp, Homo sapien
ccttcatgcaatgtgacaacaaatgtgttaaat

SEQ ID NO: 64396 - DNA, 33 bp, Homo sapien
ccttcatgcaatgtgataacaaatgtgttaaat

SEQ ID NO: 64397 - DNA, 33 bp, Homo sapien
tgtcagaatagtttaaaccacaaatgaacatgt

SEQ ID NO: 64398 - DNA, 33 bp, Homo sapien
tgtcagaatagtttaatccacaaatgaacatgt

SEQ ID NO: 64399 - DNA, 33 bp, Homo sapien
ataaaagtgtgtttaaaggaagccaaagaaaaa

SEQ ID NO: 64400 - DNA, 33 bp, Homo sapien
ataaaagtgtgtttaatggaagccaaagaaaaa

SEQ ID NO: 64401 - DNA, 33 bp, Homo sapien
tattaagtataacagcaaaatctccaggaacat

SEQ ID NO: 64402 - DNA, 33 bp, Homo sapien
tattaagtataacagcgaaatctccaggaacat

SEQ ID NO: 64403 - DNA, 33 bp, Homo sapien
ttttaagcatttcctacgaacttgtgctactgg

SEQ ID NO: 64404 - DNA, 33 bp, Homo sapien
ttttaagcatttcctatgaacttgtgctactgg

SEQ ID NO: 64405 - DNA, 33 bp, Homo sapien
ctagattacttcatatcatatagctcatctata

SEQ ID NO: 64406 - DNA, 33 bp, Homo sapien
ctagattacttcatattatatagctcatctata

SEQ ID NO: 64407 - DNA, 33 bp, Homo sapien
aagatcttatccccgacgcaggctagagagaac

SEQ ID NO: 64408 - DNA, 33 bp, Homo sapien
aagatcttatccccgatgcaggctagagagaac

SEQ ID NO: 64409 - DNA, 33 bp, Homo sapien
taaagtccagaagggtaaagatttctagccaaa

SEQ ID NO: 64410 - DNA, 33 bp, Homo sapien
taaagtccagaagggtgaagatttctagccaaa

SEQ ID NO: 64411 - DNA, 33 bp, Homo sapien
tgaatatgattcccaaactgactatataatcat

SEQ ID NO: 64412 - DNA, 33 bp, Homo sapien
tgaatatgattcccaacctgactatataatcat

SEQ ID NO: 64413 - DNA, 33 bp, Homo sapien
gatgttatttgcacagaccgtggctttatcgat

SEQ ID NO: 64414 - DNA, 33 bp, Homo sapien
gatgttatttgcacaggccgtggctttatcgat

SEQ ID NO: 64415 - DNA, 33 bp, Homo sapien
tttcctaaactcatcacggcaagaacatataac

SEQ ID NO: 64416 - DNA, 33 bp, Homo sapien
tttcctaaactcatcatggcaagaacatataac

SEQ ID NO: 64417 - DNA, 33 bp, Homo sapien
gttgcacagtgcatgaccgtacttgttaatttt

SEQ ID NO: 64418 - DNA, 33 bp, Homo sapien
gttgcacagtgcatgatcgtacttgttaatttt

SEQ ID NO: 64419 - DNA, 33 bp, Homo sapien
gcatcatcctggttgaaaattgctttgtaaaag

SEQ ID NO: 64420 - DNA, 33 bp, Homo sapien
gcatcatcctggttgagaattgctttgtaaaag

SEQ ID NO: 64421 - DNA, 33 bp, Homo sapien
gagcagctctgaaaagcaggaattgaaacatga

SEQ ID NO: 64422 - DNA, 33 bp, Homo sapien
gagcagctctgaaaagtaggaattgaaacatga

SEQ ID NO: 64423 - DNA, 33 bp, Homo sapien
tttattaggaagaaaacgtaaagctacatgtag

SEQ ID NO: 64424 - DNA, 33 bp, Homo sapien
tttattaggaagaaaatgtaaagctacatgtag

SEQ ID NO: 64425 - DNA, 33 bp, Homo sapien
agtgagaggacttggactataacaaacagtgta

SEQ ID NO: 64426 - DNA, 33 bp, Homo sapien
agtgagaggacttggagtataacaaacagtgta

SEQ ID NO: 64427 - DNA, 33 bp, Homo sapien
ctatgcactttcttcacgaccacagtaaaacaa

SEQ ID NO: 64428 - DNA, 33 bp, Homo sapien
ctatgcactttcttcatgaccacagtaaaacaa

SEQ ID NO: 64429 - DNA, 33 bp, Homo sapien
gaacttatcataatacccatctgacctatcatg

SEQ ID NO: 64430 - DNA, 33 bp, Homo sapien
gaacttatcataatacgcatctgacctatcatg

SEQ ID NO: 64431 - DNA, 33 bp, Homo sapien
caccttgtacatatgaaatccgaatttaaaatt

SEQ ID NO: 64432 - DNA, 33 bp, Homo sapien
caccttgtacatatgacatccgaatttaaaatt

SEQ ID NO: 64433 - DNA, 33 bp, Homo sapien
tggttttcacctggaaaagaggtagagaaagac

SEQ ID NO: 64434 - DNA, 33 bp, Homo sapien
tggttttcacctggaagagaggtagagaaagac

SEQ ID NO: 64435 - DNA, 33 bp, Homo sapien
tttacacatctaatcacgtcctatcctcttccc

SEQ ID NO: 64436 - DNA, 33 bp, Homo sapien
tttacacatctaatcatgtcctatcctcttccc

SEQ ID NO: 64437 - DNA, 33 bp, Homo sapien
acttagtatactatacagcctcttcggttaaca

SEQ ID NO: 64438 - DNA, 33 bp, Homo sapien
acttagtatactatactgcctcttcggttaaca

SEQ ID NO: 64439 - DNA, 33 bp, Homo sapien
tctgccctcttataaactatcatgtgttacctg

SEQ ID NO: 64440 - DNA, 33 bp, Homo sapien
tctgccctcttataaattatcatgtgttacctg

SEQ ID NO: 64441 - DNA, 33 bp, Homo sapien
taattagttaagtatcactgacctaaagtcagt

SEQ ID NO: 64442 - DNA, 33 bp, Homo sapien
taattagttaagtatcgctgacctaaagtcagt

SEQ ID NO: 64443 - DNA, 33 bp, Homo sapien
tgtcacagagcagccccgaagtgacacaatttc

SEQ ID NO: 64444 - DNA, 33 bp, Homo sapien
tgtcacagagcagccctgaagtgacacaatttc

SEQ ID NO: 64445 - DNA, 33 bp, Homo sapien
aatagtgcaatgtatgaatgtattgtatataat

SEQ ID NO: 64446 - DNA, 33 bp, Homo sapien
aatagtgcaatgtatgtatgtattgtatataat

SEQ ID NO: 64447 - DNA, 33 bp, Homo sapien
ggattccacattctcaacatctgtctcatatat

SEQ ID NO: 64448 - DNA, 33 bp, Homo sapien
ggattccacattctcagcatctgtctcatatat

SEQ ID NO: 64449 - DNA, 33 bp, Homo sapien
atattttagtgacccacgaatccacacctccta

SEQ ID NO: 64450 - DNA, 33 bp, Homo sapien
atattttagtgacccatgaatccacacctccta

SEQ ID NO: 64451 - DNA, 33 bp, Homo sapien
tgtaaaactccagtgaggccaatggtaatatag

SEQ ID NO: 64452 - DNA, 33 bp, Homo sapien
tgtaaaactccagtgatgccaatggtaatatag

SEQ ID NO: 64453 - DNA, 33 bp, Homo sapien
atactattctccatcacgttaattggccatgtt

SEQ ID NO: 64454 - DNA, 33 bp, Homo sapien
atactattctccatcaggttaattggccatgtt

SEQ ID NO: 64455 - DNA, 33 bp, Homo sapien
gaatacaactgaagcaactatacaacagttaga

SEQ ID NO: 64456 - DNA, 33 bp, Homo sapien
gaatacaactgaagcacctatacaacagttaga

SEQ ID NO: 64457 - DNA, 33 bp, Homo sapien
gaggcaggcagtatccagatcacggttgaattt

SEQ ID NO: 64458 - DNA, 33 bp, Homo sapien
gaggcaggcagtatccggatcacggttgaattt

SEQ ID NO: 64459 - DNA, 33 bp, Homo sapien
ttacaactttacaaaacgttacaaatgctcatg

SEQ ID NO: 64460 - DNA, 33 bp, Homo sapien
ttacaactttacaaaatgttacaaatgctcatg

SEQ ID NO: 64461 - DNA, 33 bp, Homo sapien
ttttcttatcttaaggccacagttttgaaatct

SEQ ID NO: 64462 - DNA, 33 bp, Homo sapien
ttttcttatcttaagggcacagttttgaaatct

SEQ ID NO: 64463 - DNA, 33 bp, Homo sapien
tgtacaattatcatacaatttctctgaccctag

SEQ ID NO: 64464 - DNA, 33 bp, Homo sapien
tgtacaattatcatacgatttctctgaccctag

SEQ ID NO: 64465 - DNA, 33 bp, Homo sapien
catggaaaatctttcacgtggctttgagctctg

SEQ ID NO: 64466 - DNA, 33 bp, Homo sapien
catggaaaatctttcatgtggctttgagctctg

SEQ ID NO: 64467 - DNA, 33 bp, Homo sapien
catctgaggtttccaccaacctatgaaccaatt

SEQ ID NO: 64468 - DNA, 33 bp, Homo sapien
catctgaggtttccactaacctatgaaccaatt

SEQ ID NO: 64469 - DNA, 33 bp, Homo sapien
gcaactggaaacttgaaacatgattgtgacact

SEQ ID NO: 64470 - DNA, 33 bp, Homo sapien
gcaactggaaacttgatacatgattgtgacact

SEQ ID NO: 64471 - DNA, 33 bp, Homo sapien
tttcttatactgagataaaactgaagctcaaaa

SEQ ID NO: 64472 - DNA, 33 bp, Homo sapien
tttcttatactgagatgaaactgaagctcaaaa

SEQ ID NO: 64473 - DNA, 33 bp, Homo sapien
atgggttggtgcagtcaatagcgttcccaaatt

SEQ ID NO: 64474 - DNA, 33 bp, Homo sapien
atgggttggtgcagtcgatagcgttcccaaatt

SEQ ID NO: 64475 - DNA, 33 bp, Homo sapien
ctgcatggcatttcataacctagcctcagaagt

SEQ ID NO: 64476 - DNA, 33 bp, Homo sapien
ctgcatggcatttcatcacctagcctcagaagt

SEQ ID NO: 64477 - DNA, 33 bp, Homo sapien
atgaaacatgttttcaaacctgagtagctgggt

SEQ ID NO: 64478 - DNA, 33 bp, Homo sapien
atgaaacatgttttcagacctgagtagctgggt

SEQ ID NO: 64479 - DNA, 33 bp, Homo sapien
cgagaattaaaatccagatctgtcttacttgaa

SEQ ID NO: 64480 - DNA, 33 bp, Homo sapien
cgagaattaaaatccatatctgtcttacttgaa

SEQ ID NO: 64481 - DNA, 33 bp, Homo sapien
ctaacttccaaaggtcaaggataaagaaaggat

SEQ ID NO: 64482 - DNA, 33 bp, Homo sapien
ctaacttccaaaggtcgaggataaagaaaggat

SEQ ID NO: 64483 - DNA, 33 bp, Homo sapien
aagaactgagaggaaacacctaaagcaagaaag

SEQ ID NO: 64484 - DNA, 33 bp, Homo sapien
aagaactgagaggaaatacctaaagcaagaaag

SEQ ID NO: 64485 - DNA, 33 bp, Homo sapien
tatgtgtagagcattacgatgtttgcaactttc

SEQ ID NO: 64486 - DNA, 33 bp, Homo sapien
tatgtgtagagcattatgatgtttgcaactttc

SEQ ID NO: 64487 - DNA, 33 bp, Homo sapien
aatggtttataaatgaacattgatatcgtttgg

SEQ ID NO: 64488 - DNA, 33 bp, Homo sapien
aatggtttataaatgagcattgatatcgtttgg

SEQ ID NO: 64489 - DNA, 33 bp, Homo sapien
aattggttcgaaaacacaggtgaaagttctgcc

SEQ ID NO: 64490 - DNA, 33 bp, Homo sapien
aattggttcgaaaacataggtgaaagttctgcc

SEQ ID NO: 64491 - DNA, 33 bp, Homo sapien
tccctacaaggctgccacagggttagctaaaca

SEQ ID NO: 64492 - DNA, 33 bp, Homo sapien
tccctacaaggctgccgcagggttagctaaaca

SEQ ID NO: 64493 - DNA, 33 bp, Homo sapien
caaccattcgtctgacccagtttcacattatgg

SEQ ID NO: 64494 - DNA, 33 bp, Homo sapien
caaccattcgtctgacgcagtttcacattatgg

SEQ ID NO: 64495 - DNA, 33 bp, Homo sapien
aaaaagagaagatggagcatttgcccaaagccc

SEQ ID NO: 64496 - DNA, 33 bp, Homo sapien
aaaaagagaagatggatcatttgcccaaagccc

SEQ ID NO: 64497 - DNA, 33 bp, Homo sapien
ctattgaaagtgactaagtctattggtaggtct

SEQ ID NO: 64498 - DNA, 33 bp, Homo sapien
ctattgaaagtgactatgtctattggtaggtct

SEQ ID NO: 64499 - DNA, 33 bp, Homo sapien
tccacgattccagacacgggaagctggtgttag

SEQ ID NO: 64500 - DNA, 33 bp, Homo sapien
tccacgattccagacaggggaagctggtgttag

SEQ ID NO: 64501 - DNA, 33 bp, Homo sapien
tggaattgtgtcatacaaatgggaactgtgatt

SEQ ID NO: 64502 - DNA, 33 bp, Homo sapien
tggaattgtgtcatacgaatgggaactgtgatt

SEQ ID NO: 64503 - DNA, 33 bp, Homo sapien
ttatagaacagtgacccgacacattgttgttct

SEQ ID NO: 64504 - DNA, 33 bp, Homo sapien
ttatagaacagtgacctgacacattgttgttct

SEQ ID NO: 64505 - DNA, 33 bp, Homo sapien
aaatgacaagatgtcaaacaacagatgctaaaa

SEQ ID NO: 64506 - DNA, 33 bp, Homo sapien
aaatgacaagatgtcagacaacagatgctaaaa

SEQ ID NO: 64507 - DNA, 33 bp, Homo sapien
ctcttattggtcatcaaataagagtggcaaact

SEQ ID NO: 64508 - DNA, 33 bp, Homo sapien
ctcttattggtcatcagataagagtggcaaact

SEQ ID NO: 64509 - DNA, 33 bp, Homo sapien
catatttatatttcaacacagcatgataacctc

SEQ ID NO: 64510 - DNA, 33 bp, Homo sapien
catatttatatttcaagacagcatgataacctc

SEQ ID NO: 64511 - DNA, 33 bp, Homo sapien
tttactgggatggaaacgaactcgaaattgtcc

SEQ ID NO: 64512 - DNA, 33 bp, Homo sapien
tttactgggatggaaatgaactcgaaattgtcc

SEQ ID NO: 64513 - DNA, 33 bp, Homo sapien
tcccctcaattattgcgcatttactgaaatata

SEQ ID NO: 64514 - DNA, 33 bp, Homo sapien
tcccctcaattattgctcatttactgaaatata

SEQ ID NO: 64515 - DNA, 33 bp, Homo sapien
gattactgtttgctcccaattgttttatcagca

SEQ ID NO: 64516 - DNA, 33 bp, Homo sapien
gattactgtttgctccgaattgttttatcagca

SEQ ID NO: 64517 - DNA, 33 bp, Homo sapien
ttttgaataaagagcaacacttgaatgcaaagg

SEQ ID NO: 64518 - DNA, 33 bp, Homo sapien
ttttgaataaagagcatcacttgaatgcaaagg

SEQ ID NO: 64519 - DNA, 33 bp, Homo sapien
agtaagggaatgcccagaacaattgagctgttg

SEQ ID NO: 64520 - DNA, 33 bp, Homo sapien
agtaagggaatgcccataacaattgagctgttg

SEQ ID NO: 64521 - DNA, 33 bp, Homo sapien
gaccgtaggggatgacagataacaatgtagggg

SEQ ID NO: 64522 - DNA, 33 bp, Homo sapien
gaccgtaggggatgacggataacaatgtagggg

SEQ ID NO: 64523 - DNA, 33 bp, Homo sapien
tcacagagcaaaagacacattttgtgtagaaac

SEQ ID NO: 64524 - DNA, 33 bp, Homo sapien
tcacagagcaaaagactcattttgtgtagaaac

SEQ ID NO: 64525 - DNA, 33 bp, Homo sapien
tgctatgcattagttaactcccagagcagagcc

SEQ ID NO: 64526 - DNA, 33 bp, Homo sapien
tgctatgcattagttacctcccagagcagagcc

SEQ ID NO: 64527 - DNA, 33 bp, Homo sapien
tctttctacccacgggaaagacttcaggaagaa

SEQ ID NO: 64528 - DNA, 33 bp, Homo sapien
tctttctacccacggggaagacttcaggaagaa

SEQ ID NO: 64529 - DNA, 33 bp, Homo sapien
ctcagcctgagtcctaaaaccaatcatctctcc

SEQ ID NO: 64530 - DNA, 33 bp, Homo sapien
ctcagcctgagtcctagaaccaatcatctctcc

SEQ ID NO: 64531 - DNA, 33 bp, Homo sapien
atttctatcaaaatggaaaactgcaccctaaaa

SEQ ID NO: 64532 - DNA, 33 bp, Homo sapien
atttctatcaaaatggcaaactgcaccctaaaa

SEQ ID NO: 64533 - DNA, 33 bp, Homo sapien
aggctattttgatatacgggcaacactttgcat

SEQ ID NO: 64534 - DNA, 33 bp, Homo sapien
aggctattttgatatatgggcaacactttgcat

SEQ ID NO: 64535 - DNA, 33 bp, Homo sapien
tgaatgccatcaggaacgtaaaaggtgatattc

SEQ ID NO: 64536 - DNA, 33 bp, Homo sapien
tgaatgccatcaggaatgtaaaaggtgatattc

SEQ ID NO: 64537 - DNA, 33 bp, Homo sapien
aaagcaaagttggtacagagaatttcaaaattg

SEQ ID NO: 64538 - DNA, 33 bp, Homo sapien
aaagcaaagttggtacggagaatttcaaaattg

SEQ ID NO: 64539 - DNA, 33 bp, Homo sapien
taggaaagaggcttcacagagttcgtgagctgg

SEQ ID NO: 64540 - DNA, 33 bp, Homo sapien
taggaaagaggcttcatagagttcgtgagctgg

SEQ ID NO: 64541 - DNA, 33 bp, Homo sapien
tctaaatttgctaggaaccttaaaactcttttt

SEQ ID NO: 64542 - DNA, 33 bp, Homo sapien
tctaaatttgctaggagccttaaaactcttttt

SEQ ID NO: 64543 - DNA, 33 bp, Homo sapien
cagaacttgttggttcacttaaacatattgcag

SEQ ID NO: 64544 - DNA, 33 bp, Homo sapien
cagaacttgttggttctcttaaacatattgcag

SEQ ID NO: 64545 - DNA, 33 bp, Homo sapien
gcccctccgttctggacaaggactcacgctgac

SEQ ID NO: 64546 - DNA, 33 bp, Homo sapien
gcccctccgttctggataaggactcacgctgac

SEQ ID NO: 64547 - DNA, 33 bp, Homo sapien
aatgttaatctcataacagttctggctgtagtc

SEQ ID NO: 64548 - DNA, 33 bp, Homo sapien
aatgttaatctcataagagttctggctgtagtc

SEQ ID NO: 64549 - DNA, 33 bp, Homo sapien
taaatatattatctgcccaaataagccaatgtt

SEQ ID NO: 64550 - DNA, 33 bp, Homo sapien
taaatatattatctgctcaaataagccaatgtt

SEQ ID NO: 64551 - DNA, 33 bp, Homo sapien
gttcatatccttttggcaaaccatgctcaagag

SEQ ID NO: 64552 - DNA, 33 bp, Homo sapien
gttcatatccttttgggaaaccatgctcaagag

SEQ ID NO: 64553 - DNA, 33 bp, Homo sapien
agaaaaccaattgcaaataagattaggtttaac

SEQ ID NO: 64554 - DNA, 33 bp, Homo sapien
agaaaaccaattgcaattaagattaggtttaac

SEQ ID NO: 64555 - DNA, 33 bp, Homo sapien
tgaataattttcagccaaagagcgacttgacct

SEQ ID NO: 64556 - DNA, 33 bp, Homo sapien
tgaataattttcagccgaagagcgacttgacct

SEQ ID NO: 64557 - DNA, 33 bp, Homo sapien
cttgccatggcagagaatattttactaaatgaa

SEQ ID NO: 64558 - DNA, 33 bp, Homo sapien
cttgccatggcagagagtattttactaaatgaa

SEQ ID NO: 64559 - DNA, 33 bp, Homo sapien
atcactgtgctaaataagggtaagaggactcca

SEQ ID NO: 64560 - DNA, 33 bp, Homo sapien
atcactgtgctaaataggggtaagaggactcca

SEQ ID NO: 64561 - DNA, 33 bp, Homo sapien
cttaatagcacctggaacagattgcataacttt

SEQ ID NO: 64562 - DNA, 33 bp, Homo sapien
cttaatagcacctggagcagattgcataacttt

SEQ ID NO: 64563 - DNA, 33 bp, Homo sapien
taatgactggtaacccccaaccaaaacattcac

SEQ ID NO: 64564 - DNA, 33 bp, Homo sapien
taatgactggtaaccctcaaccaaaacattcac

SEQ ID NO: 64565 - DNA, 33 bp, Homo sapien
aagtgtaccactgtaacagaaggaacttagaga

SEQ ID NO: 64566 - DNA, 33 bp, Homo sapien
aagtgtaccactgtaagagaaggaacttagaga

SEQ ID NO: 64567 - DNA, 33 bp, Homo sapien
gaaaattaggagtatgaaagcagctaattaatt

SEQ ID NO: 64568 - DNA, 33 bp, Homo sapien
gaaaattaggagtatgcaagcagctaattaatt

SEQ ID NO: 64569 - DNA, 33 bp, Homo sapien
agccaaagttatcaagaagctcggctgaggcgg

SEQ ID NO: 64570 - DNA, 33 bp, Homo sapien
agccaaagttatcaagcagctcggctgaggcgg

SEQ ID NO: 64571 - DNA, 33 bp, Homo sapien
atacattaatagttcccggaaattctgcagtaa

SEQ ID NO: 64572 - DNA, 33 bp, Homo sapien
atacattaatagttcctggaaattctgcagtaa

SEQ ID NO: 64573 - DNA, 33 bp, Homo sapien
agaaccagaacataaacctgcattcttgtgtcc

SEQ ID NO: 64574 - DNA, 33 bp, Homo sapien
agaaccagaacataaatctgcattcttgtgtcc

SEQ ID NO: 64575 - DNA, 33 bp, Homo sapien
ccaggctgatatctaccccttcttcttatttcc

SEQ ID NO: 64576 - DNA, 33 bp, Homo sapien
ccaggctgatatctactccttcttcttatttcc

SEQ ID NO: 64577 - DNA, 33 bp, Homo sapien
caatggcaaaaatggcaattattttacaccaac

SEQ ID NO: 64578 - DNA, 33 bp, Homo sapien
caatggcaaaaatggcgattattttacaccaac

SEQ ID NO: 64579 - DNA, 33 bp, Homo sapien
ttctttctttcttccacgcactattagttctag

SEQ ID NO: 64580 - DNA, 33 bp, Homo sapien
ttctttctttcttccatgcactattagttctag

SEQ ID NO: 64581 - DNA, 33 bp, Homo sapien
tacggaataaatgaccacacaacttcaacaagt

SEQ ID NO: 64582 - DNA, 33 bp, Homo sapien
tacggaataaatgaccgcacaacttcaacaagt

SEQ ID NO: 64583 - DNA, 33 bp, Homo sapien
tatcttctttgaaaaaatgtgaatcaactcatg

SEQ ID NO: 64584 - DNA, 33 bp, Homo sapien
tatcttctttgaaaaagtgtgaatcaactcatg

SEQ ID NO: 64585 - DNA, 33 bp, Homo sapien
ttctctggtttaaataggttccatgttcttttc

SEQ ID NO: 64586 - DNA, 33 bp, Homo sapien
ttctctggtttaaatatgttccatgttcttttc

SEQ ID NO: 64587 - DNA, 33 bp, Homo sapien
tgaaattatggtaaacagacctcccaaggagag

SEQ ID NO: 64588 - DNA, 33 bp, Homo sapien
tgaaattatggtaaacggacctcccaaggagag

SEQ ID NO: 64589 - DNA, 33 bp, Homo sapien
agaagaaaaatgttcccattctgaaagtaatag

SEQ ID NO: 64590 - DNA, 33 bp, Homo sapien
agaagaaaaatgttcctattctgaaagtaatag

SEQ ID NO: 64591 - DNA, 33 bp, Homo sapien
tctaggtatttattacactggagtataagcaaa

SEQ ID NO: 64592 - DNA, 33 bp, Homo sapien
tctaggtatttattaccctggagtataagcaaa

SEQ ID NO: 64593 - DNA, 33 bp, Homo sapien
tgtgaaggatttgagaagttaccatatgcacag

SEQ ID NO: 64594 - DNA, 33 bp, Homo sapien
tgtgaaggatttgagatgttaccatatgcacag

SEQ ID NO: 64595 - DNA, 33 bp, Homo sapien
tgtaatgttaccaaaactgtgatacaagtctgt

SEQ ID NO: 64596 - DNA, 33 bp, Homo sapien
tgtaatgttaccaaaattgtgatacaagtctgt

SEQ ID NO: 64597 - DNA, 33 bp, Homo sapien
tactatagacacatgaaaaaacagcaaactgca

SEQ ID NO: 64598 - DNA, 33 bp, Homo sapien
tactatagacacatgataaaacagcaaactgca

SEQ ID NO: 64599 - DNA, 33 bp, Homo sapien
atttgagcctgctgtaagtgacaccttgcagat

SEQ ID NO: 64600 - DNA, 33 bp, Homo sapien
atttgagcctgctgtatgtgacaccttgcagat

SEQ ID NO: 64601 - DNA, 33 bp, Homo sapien
ctaaaggactaatttccctaattttgaagggct

SEQ ID NO: 64602 - DNA, 33 bp, Homo sapien
ctaaaggactaatttctctaattttgaagggct

SEQ ID NO: 64603 - DNA, 33 bp, Homo sapien
tccaatgaactctgagacctttaaggacaaggg

SEQ ID NO: 64604 - DNA, 33 bp, Homo sapien
tccaatgaactctgagccctttaaggacaaggg

SEQ ID NO: 64605 - DNA, 33 bp, Homo sapien
cacctgcaatatgctaagcctgtacaatatatg

SEQ ID NO: 64606 - DNA, 33 bp, Homo sapien
cacctgcaatatgctatgcctgtacaatatatg

SEQ ID NO: 64607 - DNA, 33 bp, Homo sapien
tttagaattgcatatgcagttattaccgaataa

SEQ ID NO: 64608 - DNA, 33 bp, Homo sapien
tttagaattgcatatgtagttattaccgaataa

SEQ ID NO: 64609 - DNA, 33 bp, Homo sapien
ttgtaaacaggatgtcaaaaatcagagtatctt

SEQ ID NO: 64610 - DNA, 33 bp, Homo sapien
ttgtaaacaggatgtcgaaaatcagagtatctt

SEQ ID NO: 64611 - DNA, 33 bp, Homo sapien
ctttgacatgacgcaacctgtgatttttctaca

SEQ ID NO: 64612 - DNA, 33 bp, Homo sapien
ctttgacatgacgcaatctgtgatttttctaca

SEQ ID NO: 64613 - DNA, 33 bp, Homo sapien
tgtaaagatagtacagaaaggtctcatatatct

SEQ ID NO: 64614 - DNA, 33 bp, Homo sapien
tgtaaagatagtacaggaaggtctcatatatct

SEQ ID NO: 64615 - DNA, 33 bp, Homo sapien
tccccaaaactcataaacccaacctaaccatga

SEQ ID NO: 64616 - DNA, 33 bp, Homo sapien
tccccaaaactcataaccccaacctaaccatga

SEQ ID NO: 64617 - DNA, 33 bp, Homo sapien
taaaacctatactatgaaacaatttttaactga

SEQ ID NO: 64618 - DNA, 33 bp, Homo sapien
taaaacctatactatggaacaatttttaactga

SEQ ID NO: 64619 - DNA, 33 bp, Homo sapien
tgtctttataagaagcagaagagaagaatatgt

SEQ ID NO: 64620 - DNA, 33 bp, Homo sapien
tgtctttataagaagcggaagagaagaatatgt

SEQ ID NO: 64621 - DNA, 33 bp, Homo sapien
gacagttcaattcctcaacacttattctggttt

SEQ ID NO: 64622 - DNA, 33 bp, Homo sapien
gacagttcaattcctcgacacttattctggttt

SEQ ID NO: 64623 - DNA, 33 bp, Homo sapien
tctactcacacattgaatagaaagactaaaaat

SEQ ID NO: 64624 - DNA, 33 bp, Homo sapien
tctactcacacattgagtagaaagactaaaaat

SEQ ID NO: 64625 - DNA, 33 bp, Homo sapien
aaccaaagcattataactgatacccttcaaatt

SEQ ID NO: 64626 - DNA, 33 bp, Homo sapien
aaccaaagcattataattgatacccttcaaatt

SEQ ID NO: 64627 - DNA, 33 bp, Homo sapien
cttccaggttgttacaagtcaaaacagagtcca

SEQ ID NO: 64628 - DNA, 33 bp, Homo sapien
cttccaggttgttacaggtcaaaacagagtcca

SEQ ID NO: 64629 - DNA, 33 bp, Homo sapien
tgccaactcgcatacgcaggtggactctgtttt

SEQ ID NO: 64630 - DNA, 33 bp, Homo sapien
tgccaactcgcatacgtaggtggactctgtttt

SEQ ID NO: 64631 - DNA, 33 bp, Homo sapien
ggataacaactgtaaaatgaaagatggaactaa

SEQ ID NO: 64632 - DNA, 33 bp, Homo sapien
ggataacaactgtaaagtgaaagatggaactaa

SEQ ID NO: 64633 - DNA, 33 bp, Homo sapien
tagcacacaaatacacacaaagtcaggaattgt

SEQ ID NO: 64634 - DNA, 33 bp, Homo sapien
tagcacacaaatacacgcaaagtcaggaattgt

SEQ ID NO: 64635 - DNA, 33 bp, Homo sapien
aatgcagagagataaacagtttcgactaaaaca

SEQ ID NO: 64636 - DNA, 33 bp, Homo sapien
aatgcagagagataaagagtttcgactaaaaca

SEQ ID NO: 64637 - DNA, 33 bp, Homo sapien
caacagcttactcacagaagcgatctatggcaa

SEQ ID NO: 64638 - DNA, 33 bp, Homo sapien
caacagcttactcacataagcgatctatggcaa

SEQ ID NO: 64639 - DNA, 33 bp, Homo sapien
ggtggaagtgaagaaaataataggagcagctat

SEQ ID NO: 64640 - DNA, 33 bp, Homo sapien
ggtggaagtgaagaaactaataggagcagctat

SEQ ID NO: 64641 - DNA, 33 bp, Homo sapien
aactccagtagctaatgatgatggacaaccaca

SEQ ID NO: 64642 - DNA, 33 bp, Homo sapien
aactccagtagctaattatgatggacaaccaca

SEQ ID NO: 64643 - DNA, 33 bp, Homo sapien
aatgacagcttaccagaattggaaatgacaaat

SEQ ID NO: 64644 - DNA, 33 bp, Homo sapien
aatgacagcttaccaggattggaaatgacaaat

SEQ ID NO: 64645 - DNA, 33 bp, Homo sapien
tactcatggcaacccaatgaagtgaaggaagca

SEQ ID NO: 64646 - DNA, 33 bp, Homo sapien
tactcatggcaacccattgaagtgaaggaagca

SEQ ID NO: 64647 - DNA, 33 bp, Homo sapien
catttgatcagaaccccatccacagaccacagt

SEQ ID NO: 64648 - DNA, 33 bp, Homo sapien
catttgatcagaaccctatccacagaccacagt

SEQ ID NO: 64649 - DNA, 33 bp, Homo sapien
acgcaaaacaaagagcaaatgaaaataaaactg

SEQ ID NO: 64650 - DNA, 33 bp, Homo sapien
acgcaaaacaaagagcgaatgaaaataaaactg

SEQ ID NO: 64651 - DNA, 33 bp, Homo sapien
tgctttggacttccatcatcatttccttttgta

SEQ ID NO: 64652 - DNA, 33 bp, Homo sapien
tgctttggacttccattatcatttccttttgta

SEQ ID NO: 64653 - DNA, 33 bp, Homo sapien
aaaccatagatcttacaaccaattgaatacaaa

SEQ ID NO: 64654 - DNA, 33 bp, Homo sapien
aaaccatagatcttacgaccaattgaatacaaa

SEQ ID NO: 64655 - DNA, 33 bp, Homo sapien
atgcatatatgtaaaccgtattcaagatactga

SEQ ID NO: 64656 - DNA, 33 bp, Homo sapien
atgcatatatgtaaactgtattcaagatactga

SEQ ID NO: 64657 - DNA, 33 bp, Homo sapien
actaaagtaagcaccacagtcataatcagaaag

SEQ ID NO: 64658 - DNA, 33 bp, Homo sapien
actaaagtaagcaccatagtcataatcagaaag

SEQ ID NO: 64659 - DNA, 33 bp, Homo sapien
aggatttaatagatcaaatagtaagtgctcaat

SEQ ID NO: 64660 - DNA, 33 bp, Homo sapien
aggatttaatagatcacatagtaagtgctcaat

SEQ ID NO: 64661 - DNA, 33 bp, Homo sapien
gttataatggctataacgtcactaggtgttaga

SEQ ID NO: 64662 - DNA, 33 bp, Homo sapien
gttataatggctataatgtcactaggtgttaga

SEQ ID NO: 64663 - DNA, 33 bp, Homo sapien
gacttgttattgccaacaagaagtgagtgaaag

SEQ ID NO: 64664 - DNA, 33 bp, Homo sapien
gacttgttattgccaataagaagtgagtgaaag

SEQ ID NO: 64665 - DNA, 33 bp, Homo sapien
aattgtatatgaaagcagcctttggtaaaagtg

SEQ ID NO: 64666 - DNA, 33 bp, Homo sapien
aattgtatatgaaagcggcctttggtaaaagtg

SEQ ID NO: 64667 - DNA, 33 bp, Homo sapien
ttttagtcagaagcaaataatggatttttgttg

SEQ ID NO: 64668 - DNA, 33 bp, Homo sapien
ttttagtcagaagcaactaatggatttttgttg

SEQ ID NO: 64669 - DNA, 33 bp, Homo sapien
caatttacctctggccaagtgatctatttagtt

SEQ ID NO: 64670 - DNA, 33 bp, Homo sapien
caatttacctctggccgagtgatctatttagtt

SEQ ID NO: 64671 - DNA, 33 bp, Homo sapien
ataactgcctttcagaacttttatgtgttggac

SEQ ID NO: 64672 - DNA, 33 bp, Homo sapien
ataactgcctttcagagcttttatgtgttggac

SEQ ID NO: 64673 - DNA, 33 bp, Homo sapien
ctttattttgtccatgcactcacaatgtgtctc

SEQ ID NO: 64674 - DNA, 33 bp, Homo sapien
ctttattttgtccatgtactcacaatgtgtctc

SEQ ID NO: 64675 - DNA, 33 bp, Homo sapien
tgagtaaaaacaacccaaagttcatttcaggcc

SEQ ID NO: 64676 - DNA, 33 bp, Homo sapien
tgagtaaaaacaacccgaagttcatttcaggcc

SEQ ID NO: 64677 - DNA, 33 bp, Homo sapien
tgggaatggctactgaaagatcaaaggcaagtg

SEQ ID NO: 64678 - DNA, 33 bp, Homo sapien
tgggaatggctactgagagatcaaaggcaagtg

SEQ ID NO: 64679 - DNA, 33 bp, Homo sapien
tgctctatgccaaggaacagaagacaaatttgt

SEQ ID NO: 64680 - DNA, 33 bp, Homo sapien
tgctctatgccaaggagcagaagacaaatttgt

SEQ ID NO: 64681 - DNA, 33 bp, Homo sapien
actgtctgaggaaatccacagtgtgtgtttaat

SEQ ID NO: 64682 - DNA, 33 bp, Homo sapien
actgtctgaggaaatcgacagtgtgtgtttaat

SEQ ID NO: 64683 - DNA, 33 bp, Homo sapien
tttaggtgaatagatacgtatcgaagggaaatt

SEQ ID NO: 64684 - DNA, 33 bp, Homo sapien
tttaggtgaatagatatgtatcgaagggaaatt

SEQ ID NO: 64685 - DNA, 33 bp, Homo sapien
gaatccaaagctcctgcattttctcctaactcc

SEQ ID NO: 64686 - DNA, 33 bp, Homo sapien
gaatccaaagctcctgtattttctcctaactcc

SEQ ID NO: 64687 - DNA, 33 bp, Homo sapien
gctccaccaatgtccaaagaatttcaacatccc

SEQ ID NO: 64688 - DNA, 33 bp, Homo sapien
gctccaccaatgtccagagaatttcaacatccc

SEQ ID NO: 64689 - DNA, 33 bp, Homo sapien
caaccatttccttctcaaaacaccctctactct

SEQ ID NO: 64690 - DNA, 33 bp, Homo sapien
caaccatttccttctcgaaacaccctctactct

SEQ ID NO: 64691 - DNA, 33 bp, Homo sapien
tttccatttcctgaaaagttgatctaaaattca

SEQ ID NO: 64692 - DNA, 33 bp, Homo sapien
tttccatttcctgaaaggttgatctaaaattca

SEQ ID NO: 64693 - DNA, 33 bp, Homo sapien
ggaatgtcatttagaaaattctacagttatcag

SEQ ID NO: 64694 - DNA, 33 bp, Homo sapien
ggaatgtcatttagaagattctacagttatcag

SEQ ID NO: 64695 - DNA, 33 bp, Homo sapien
ccaataaacttcatcagtaaggtactcaaaata

SEQ ID NO: 64696 - DNA, 33 bp, Homo sapien
ccaataaacttcatcattaaggtactcaaaata

SEQ ID NO: 64697 - DNA, 33 bp, Homo sapien
cattgtgccacaaaaaaaaattctctggtcaat

SEQ ID NO: 64698 - DNA, 33 bp, Homo sapien
cattgtgccacaaaaataaattctctggtcaat

SEQ ID NO: 64699 - DNA, 33 bp, Homo sapien
tttgggctttctctaccggttaacattgtaaat

SEQ ID NO: 64700 - DNA, 33 bp, Homo sapien
tttgggctttctctactggttaacattgtaaat

SEQ ID NO: 64701 - DNA, 33 bp, Homo sapien
ggacattcacgtttgactatatgcattttatag

SEQ ID NO: 64702 - DNA, 33 bp, Homo sapien
ggacattcacgtttgattatatgcattttatag

SEQ ID NO: 64703 - DNA, 33 bp, Homo sapien
tgtttgcacattccatgatcttatatttggaaa

SEQ ID NO: 64704 - DNA, 33 bp, Homo sapien
tgtttgcacattccattatcttatatttggaaa

SEQ ID NO: 64705 - DNA, 33 bp, Homo sapien
aatagagaacccataaataagattgcacagcta

SEQ ID NO: 64706 - DNA, 33 bp, Homo sapien
aatagagaacccataagtaagattgcacagcta

SEQ ID NO: 64707 - DNA, 33 bp, Homo sapien
aggaggatcacaaaaacggaggagactggaaaa

SEQ ID NO: 64708 - DNA, 33 bp, Homo sapien
aggaggatcacaaaaatggaggagactggaaaa

SEQ ID NO: 64709 - DNA, 33 bp, Homo sapien
tttttcagtttttcacaggacttacaattatgt

SEQ ID NO: 64710 - DNA, 33 bp, Homo sapien
tttttcagtttttcactggacttacaattatgt

SEQ ID NO: 64711 - DNA, 33 bp, Homo sapien
catttgtgtcagccaaaagcttgtcacaacaac

SEQ ID NO: 64712 - DNA, 33 bp, Homo sapien
catttgtgtcagccaacagcttgtcacaacaac

SEQ ID NO: 64713 - DNA, 33 bp, Homo sapien
tttcttgctgtggttacaaaatggttgtgtttc

SEQ ID NO: 64714 - DNA, 33 bp, Homo sapien
tttcttgctgtggttataaaatggttgtgtttc

SEQ ID NO: 64715 - DNA, 33 bp, Homo sapien
ttctactgatcagagacggaccccacatatttt

SEQ ID NO: 64716 - DNA, 33 bp, Homo sapien
ttctactgatcagagatggaccccacatatttt

SEQ ID NO: 64717 - DNA, 33 bp, Homo sapien
catgtacagaccttgccgagaagagagcttgtg

SEQ ID NO: 64718 - DNA, 33 bp, Homo sapien
catgtacagaccttgctgagaagagagcttgtg

SEQ ID NO: 64719 - DNA, 33 bp, Homo sapien
tcagtgaactaagtaccaagaatgtgagtagga

SEQ ID NO: 64720 - DNA, 33 bp, Homo sapien
tcagtgaactaagtacgaagaatgtgagtagga

SEQ ID NO: 64721 - DNA, 33 bp, Homo sapien
aaactcaagatctctaaaattgaatgagaaaaa

SEQ ID NO: 64722 - DNA, 33 bp, Homo sapien
aaactcaagatctctacaattgaatgagaaaaa

SEQ ID NO: 64723 - DNA, 33 bp, Homo sapien
agtcagtgcttgctaaaagctcacgggaaataa

SEQ ID NO: 64724 - DNA, 33 bp, Homo sapien
agtcagtgcttgctaagagctcacgggaaataa

SEQ ID NO: 64725 - DNA, 33 bp, Homo sapien
actaaagtcaggtttgaatagcttaaaggcaaa

SEQ ID NO: 64726 - DNA, 33 bp, Homo sapien
actaaagtcaggtttggatagcttaaaggcaaa

SEQ ID NO: 64727 - DNA, 33 bp, Homo sapien
ataaaacgtatgggtacaagtggaaactggaaa

SEQ ID NO: 64728 - DNA, 33 bp, Homo sapien
ataaaacgtatgggtataagtggaaactggaaa

SEQ ID NO: 64729 - DNA, 33 bp, Homo sapien
actttaatgtagatcccatcaaaaccatcattt

SEQ ID NO: 64730 - DNA, 33 bp, Homo sapien
actttaatgtagatcctatcaaaaccatcattt

SEQ ID NO: 64731 - DNA, 33 bp, Homo sapien
ttatttgtagcataaccataggtcaaggctgga

SEQ ID NO: 64732 - DNA, 33 bp, Homo sapien
ttatttgtagcataactataggtcaaggctgga

SEQ ID NO: 64733 - DNA, 33 bp, Homo sapien
gctctttacatctggcagaatcttacttggtaa

SEQ ID NO: 64734 - DNA, 33 bp, Homo sapien
gctctttacatctggcggaatcttacttggtaa

SEQ ID NO: 64735 - DNA, 33 bp, Homo sapien
atggtctgctattgcaactctaaccttttttcc

SEQ ID NO: 64736 - DNA, 33 bp, Homo sapien
atggtctgctattgcatctctaaccttttttcc

SEQ ID NO: 64737 - DNA, 33 bp, Homo sapien
gttaagtttgcaatgacaaaattcagggtaaaa

SEQ ID NO: 64738 - DNA, 33 bp, Homo sapien
gttaagtttgcaatgataaaattcagggtaaaa

SEQ ID NO: 64739 - DNA, 33 bp, Homo sapien
aacaaaaaagaccgaaataatagacactgacta

SEQ ID NO: 64740 - DNA, 33 bp, Homo sapien
aacaaaaaagaccgaattaatagacactgacta

SEQ ID NO: 64741 - DNA, 33 bp, Homo sapien
aatgacttggcatacaaaactcacagaataaag

SEQ ID NO: 64742 - DNA, 33 bp, Homo sapien
aatgacttggcatacacaactcacagaataaag

SEQ ID NO: 64743 - DNA, 33 bp, Homo sapien
agagagtatattatagacctcaataaatgtgac

SEQ ID NO: 64744 - DNA, 33 bp, Homo sapien
agagagtatattatagccctcaataaatgtgac

SEQ ID NO: 64745 - DNA, 33 bp, Homo sapien
ttaatttaccactttaggtaaggcagaatgtcc

SEQ ID NO: 64746 - DNA, 33 bp, Homo sapien
ttaatttaccactttatgtaaggcagaatgtcc

SEQ ID NO: 64747 - DNA, 33 bp, Homo sapien
tttatattaatatagcacttgatacatctcaaa

SEQ ID NO: 64748 - DNA, 33 bp, Homo sapien
tttatattaatatagcgcttgatacatctcaaa

SEQ ID NO: 64749 - DNA, 33 bp, Homo sapien
tactcattgtaaattcagaacggttaagaaacg

SEQ ID NO: 64750 - DNA, 33 bp, Homo sapien
tactcattgtaaattcggaacggttaagaaacg

SEQ ID NO: 64751 - DNA, 33 bp, Homo sapien
aagagaagataggcaaactcccaatttccagtg

SEQ ID NO: 64752 - DNA, 33 bp, Homo sapien
aagagaagataggcaatctcccaatttccagtg

SEQ ID NO: 64753 - DNA, 33 bp, Homo sapien
atggcagttatcttccactggtctgaatttaat

SEQ ID NO: 64754 - DNA, 33 bp, Homo sapien
atggcagttatcttccgctggtctgaatttaat

SEQ ID NO: 64755 - DNA, 33 bp, Homo sapien
agtctagttggccagaaagtaataagagagagt

SEQ ID NO: 64756 - DNA, 33 bp, Homo sapien
agtctagttggccagagagtaataagagagagt

SEQ ID NO: 64757 - DNA, 33 bp, Homo sapien
tcaaaccactctcaacgagatttttacagtgaa

SEQ ID NO: 64758 - DNA, 33 bp, Homo sapien
tcaaaccactctcaactagatttttacagtgaa

SEQ ID NO: 64759 - DNA, 33 bp, Homo sapien
aatgtaatgttcaaaaaggaaattcaagtttct

SEQ ID NO: 64760 - DNA, 33 bp, Homo sapien
aatgtaatgttcaaaagggaaattcaagtttct

SEQ ID NO: 64761 - DNA, 33 bp, Homo sapien
acaggaagttgcacagcaaaagccagggtcaga

SEQ ID NO: 64762 - DNA, 33 bp, Homo sapien
acaggaagttgcacaggaaaagccagggtcaga

SEQ ID NO: 64763 - DNA, 33 bp, Homo sapien
cagacaacaggggaatcatgaggctaaatactg

SEQ ID NO: 64764 - DNA, 33 bp, Homo sapien
cagacaacaggggaatgatgaggctaaatactg

SEQ ID NO: 64765 - DNA, 33 bp, Homo sapien
caactataaaaagaaaggctgactaccaattaa

SEQ ID NO: 64766 - DNA, 33 bp, Homo sapien
caactataaaaagaaatgctgactaccaattaa

SEQ ID NO: 64767 - DNA, 33 bp, Homo sapien
atatggaggctatctaaggatagtattgagtga

SEQ ID NO: 64768 - DNA, 33 bp, Homo sapien
atatggaggctatctagggatagtattgagtga

SEQ ID NO: 64769 - DNA, 33 bp, Homo sapien
aagcatgatgaagcacacataacagaacaatat

SEQ ID NO: 64770 - DNA, 33 bp, Homo sapien
aagcatgatgaagcactcataacagaacaatat

SEQ ID NO: 64771 - DNA, 33 bp, Homo sapien
tttagtcctgttttaacattgagctttcattca

SEQ ID NO: 64772 - DNA, 33 bp, Homo sapien
tttagtcctgttttaagattgagctttcattca

SEQ ID NO: 64773 - DNA, 33 bp, Homo sapien
atactatttatcactcactattgctgccctgag

SEQ ID NO: 64774 - DNA, 33 bp, Homo sapien
atactatttatcactcgctattgctgccctgag

SEQ ID NO: 64775 - DNA, 33 bp, Homo sapien
tcttgtggaacaatgcactcagactggactgca

SEQ ID NO: 64776 - DNA, 33 bp, Homo sapien
tcttgtggaacaatgcgctcagactggactgca

SEQ ID NO: 64777 - DNA, 33 bp, Homo sapien
aaatctgatagctgcacagactaagggcagaac

SEQ ID NO: 64778 - DNA, 33 bp, Homo sapien
aaatctgatagctgcatagactaagggcagaac

SEQ ID NO: 64779 - DNA, 33 bp, Homo sapien
aaggaaaacaggaaacccttactgctggtctac

SEQ ID NO: 64780 - DNA, 33 bp, Homo sapien
aaggaaaacaggaaactcttactgctggtctac

SEQ ID NO: 64781 - DNA, 33 bp, Homo sapien
taaataaataaataaaaacaactgcatagaatt

SEQ ID NO: 64782 - DNA, 33 bp, Homo sapien
taaataaataaataaatacaactgcatagaatt

SEQ ID NO: 64783 - DNA, 33 bp, Homo sapien
cctgtataacaagcctaaacatttatccctgaa

SEQ ID NO: 64784 - DNA, 33 bp, Homo sapien
cctgtataacaagcctgaacatttatccctgaa

SEQ ID NO: 64785 - DNA, 33 bp, Homo sapien
catagtacctgacagacagatttttcaatcccc

SEQ ID NO: 64786 - DNA, 33 bp, Homo sapien
catagtacctgacagagagatttttcaatcccc

SEQ ID NO: 64787 - DNA, 33 bp, Homo sapien
gtagttctaccagatggcagtggcagcctggaa

SEQ ID NO: 64788 - DNA, 33 bp, Homo sapien
gtagttctaccagatgtcagtggcagcctggaa

SEQ ID NO: 64789 - DNA, 33 bp, Homo sapien
acctaatgctaagttaaaaatgcaaatcactaa

SEQ ID NO: 64790 - DNA, 33 bp, Homo sapien
acctaatgctaagttataaatgcaaatcactaa

SEQ ID NO: 64791 - DNA, 33 bp, Homo sapien
gaattctcaacaataaccattccttacttttga

SEQ ID NO: 64792 - DNA, 33 bp, Homo sapien
gaattctcaacaataatcattccttacttttga

SEQ ID NO: 64793 - DNA, 33 bp, Homo sapien
tcattatcaggtaagccatattatgatgcctac

SEQ ID NO: 64794 - DNA, 33 bp, Homo sapien
tcattatcaggtaagctatattatgatgcctac

SEQ ID NO: 64795 - DNA, 33 bp, Homo sapien
gtgtatttgactactcgactaactatgtctaga

SEQ ID NO: 64796 - DNA, 33 bp, Homo sapien
gtgtatttgactactctactaactatgtctaga

SEQ ID NO: 64797 - DNA, 33 bp, Homo sapien
ttttggtcatttaacactgaaaaagtcataacc

SEQ ID NO: 64798 - DNA, 33 bp, Homo sapien
ttttggtcatttaacattgaaaaagtcataacc

SEQ ID NO: 64799 - DNA, 33 bp, Homo sapien
ttcagtcatgcttaaacgattatacctgttcag

SEQ ID NO: 64800 - DNA, 33 bp, Homo sapien
ttcagtcatgcttaaatgattatacctgttcag

SEQ ID NO: 64801 - DNA, 33 bp, Homo sapien
gtgttttagtggcagacgaaactattgaattct

SEQ ID NO: 64802 - DNA, 33 bp, Homo sapien
gtgttttagtggcagatgaaactattgaattct

SEQ ID NO: 64803 - DNA, 33 bp, Homo sapien
acacatggaaaagcagaaacccagatgtatttg

SEQ ID NO: 64804 - DNA, 33 bp, Homo sapien
acacatggaaaagcaggaacccagatgtatttg

SEQ ID NO: 64805 - DNA, 33 bp, Homo sapien
aaaataaaagcaggagcccatacatatgaactg

SEQ ID NO: 64806 - DNA, 33 bp, Homo sapien
aaaataaaagcaggagtccatacatatgaactg

SEQ ID NO: 64807 - DNA, 33 bp, Homo sapien
catttccagaaccctacctttgacatttgatgt

SEQ ID NO: 64808 - DNA, 33 bp, Homo sapien
catttccagaaccctatctttgacatttgatgt

SEQ ID NO: 64809 - DNA, 33 bp, Homo sapien
agttcctagcccttcacgcatgtgcttctgata

SEQ ID NO: 64810 - DNA, 33 bp, Homo sapien
agttcctagcccttcatgcatgtgcttctgata

SEQ ID NO: 64811 - DNA, 33 bp, Homo sapien
tacttcaagtataaaacttctgaggtttccttt

SEQ ID NO: 64812 - DNA, 33 bp, Homo sapien
tacttcaagtataaaatttctgaggtttccttt

SEQ ID NO: 64813 - DNA, 33 bp, Homo sapien
caaaatgttgcttttaagtcgagatcaggtaaa

SEQ ID NO: 64814 - DNA, 33 bp, Homo sapien
caaaatgttgcttttaggtcgagatcaggtaaa

SEQ ID NO: 64815 - DNA, 33 bp, Homo sapien
tcatgaatcattttgcaatcatccctcacatat

SEQ ID NO: 64816 - DNA, 33 bp, Homo sapien
tcatgaatcattttgcgatcatccctcacatat

SEQ ID NO: 64817 - DNA, 33 bp, Homo sapien
tagaaggttgtatcaactctgctttctctgtac

SEQ ID NO: 64818 - DNA, 33 bp, Homo sapien
tagaaggttgtatcaagtctgctttctctgtac

SEQ ID NO: 64819 - DNA, 33 bp, Homo sapien
aacgatgacaggtgtaactgaaatctggaatgc

SEQ ID NO: 64820 - DNA, 33 bp, Homo sapien
aacgatgacaggtgtagctgaaatctggaatgc

SEQ ID NO: 64821 - DNA, 33 bp, Homo sapien
cacagtgcattatatacagcctactacataatc

SEQ ID NO: 64822 - DNA, 33 bp, Homo sapien
cacagtgcattatatagagcctactacataatc

SEQ ID NO: 64823 - DNA, 33 bp, Homo sapien
ccactgaggtgtctaaacacactgactcttgaa

SEQ ID NO: 64824 - DNA, 33 bp, Homo sapien
ccactgaggtgtctaaccacactgactcttgaa

SEQ ID NO: 64825 - DNA, 33 bp, Homo sapien
tgttatgacctatttgaaagtagcctcaaagaa

SEQ ID NO: 64826 - DNA, 33 bp, Homo sapien
tgttatgacctatttggaagtagcctcaaagaa

SEQ ID NO: 64827 - DNA, 33 bp, Homo sapien
aaaataaaacaataaagatcgtgcattttacat

SEQ ID NO: 64828 - DNA, 33 bp, Homo sapien
aaaataaaacaataaatatcgtgcattttacat

SEQ ID NO: 64829 - DNA, 33 bp, Homo sapien
tttgtatttgaagggaaatgagtgtttctgatg

SEQ ID NO: 64830 - DNA, 33 bp, Homo sapien
tttgtatttgaagggagatgagtgtttctgatg

SEQ ID NO: 64831 - DNA, 33 bp, Homo sapien
aagtgccttgaataccacactaattcaggtaat

SEQ ID NO: 64832 - DNA, 33 bp, Homo sapien
aagtgccttgaataccgcactaattcaggtaat

SEQ ID NO: 64833 - DNA, 33 bp, Homo sapien
acccctcctgggaaataaggccctgatgtagcc

SEQ ID NO: 64834 - DNA, 33 bp, Homo sapien
acccctcctgggaaatgaggccctgatgtagcc

SEQ ID NO: 64835 - DNA, 33 bp, Homo sapien
atacactgatataatggaccttcctggtcttat

SEQ ID NO: 64836 - DNA, 33 bp, Homo sapien
atacactgatataatgtaccttcctggtcttat

SEQ ID NO: 64837 - DNA, 33 bp, Homo sapien
tattgatgaagatcaaaggctgtaatattgaaa

SEQ ID NO: 64838 - DNA, 33 bp, Homo sapien
tattgatgaagatcaagggctgtaatattgaaa

SEQ ID NO: 64839 - DNA, 33 bp, Homo sapien
aaatttcatgaatagaagattgacattaaagca

SEQ ID NO: 64840 - DNA, 33 bp, Homo sapien
aaatttcatgaatagacgattgacattaaagca

SEQ ID NO: 64841 - DNA, 33 bp, Homo sapien
attaacactttagatgaatttcctcatataagc

SEQ ID NO: 64842 - DNA, 33 bp, Homo sapien
attaacactttagatgcatttcctcatataagc

SEQ ID NO: 64843 - DNA, 33 bp, Homo sapien
gatcagatgacaataacaactaagcagaaaatt

SEQ ID NO: 64844 - DNA, 33 bp, Homo sapien
gatcagatgacaataagaactaagcagaaaatt

SEQ ID NO: 64845 - DNA, 33 bp, Homo sapien
acaaccttccttgactcacataaccaggcagct

SEQ ID NO: 64846 - DNA, 33 bp, Homo sapien
acaaccttccttgacttacataaccaggcagct

SEQ ID NO: 64847 - DNA, 33 bp, Homo sapien
ttttcttgaccactcaatataaaaagtcccaat

SEQ ID NO: 64848 - DNA, 33 bp, Homo sapien
ttttcttgaccactcagtataaaaagtcccaat

SEQ ID NO: 64849 - DNA, 33 bp, Homo sapien
taaacaatgcagttaactatataatcttttagg

SEQ ID NO: 64850 - DNA, 33 bp, Homo sapien
taaacaatgcagttaagtatataatcttttagg

SEQ ID NO: 64851 - DNA, 33 bp, Homo sapien
gtctattactgatgaacctaatgaactagaaat

SEQ ID NO: 64852 - DNA, 33 bp, Homo sapien
gtctattactgatgaatctaatgaactagaaat

SEQ ID NO: 64853 - DNA, 33 bp, Homo sapien
tcatagaaaacagtcacgtgaaccaatggaaca

SEQ ID NO: 64854 - DNA, 33 bp, Homo sapien
tcatagaaaacagtcatgtgaaccaatggaaca

SEQ ID NO: 64855 - DNA, 33 bp, Homo sapien
gaatcggctattaggaaaaagttcctattccaa

SEQ ID NO: 64856 - DNA, 33 bp, Homo sapien
gaatcggctattaggataaagttcctattccaa

SEQ ID NO: 64857 - DNA, 33 bp, Homo sapien
gggtttcagttggtgacataatcagtaggatct

SEQ ID NO: 64858 - DNA, 33 bp, Homo sapien
gggtttcagttggtgatataatcagtaggatct

SEQ ID NO: 64859 - DNA, 33 bp, Homo sapien
aaggaattataagacacagtaactgccttggaa

SEQ ID NO: 64860 - DNA, 33 bp, Homo sapien
aaggaattataagacatagtaactgccttggaa

SEQ ID NO: 64861 - DNA, 33 bp, Homo sapien
tctcactacttgtttcaatctagcctaaattac

SEQ ID NO: 64862 - DNA, 33 bp, Homo sapien
tctcactacttgtttcgatctagcctaaattac

SEQ ID NO: 64863 - DNA, 33 bp, Homo sapien
aataagccagtatatacagtgtagtaataagaa

SEQ ID NO: 64864 - DNA, 33 bp, Homo sapien
aataagccagtatatagagtgtagtaataagaa

SEQ ID NO: 64865 - DNA, 33 bp, Homo sapien
gtcttgctttgcccagcacttgcctcatctgca

SEQ ID NO: 64866 - DNA, 33 bp, Homo sapien
gtcttgctttgcccaggacttgcctcatctgca

SEQ ID NO: 64867 - DNA, 33 bp, Homo sapien
tgtcatttcaggaaaacttttcataggtctcaa

SEQ ID NO: 64868 - DNA, 33 bp, Homo sapien
tgtcatttcaggaaaatttttcataggtctcaa

SEQ ID NO: 64869 - DNA, 33 bp, Homo sapien
agaacagtgtagaaacggaatgaatgttgccta

SEQ ID NO: 64870 - DNA, 33 bp, Homo sapien
agaacagtgtagaaactgaatgaatgttgccta

SEQ ID NO: 64871 - DNA, 33 bp, Homo sapien
tttattgagttcttaccatttgctaggaagttt

SEQ ID NO: 64872 - DNA, 33 bp, Homo sapien
tttattgagttcttactatttgctaggaagttt

SEQ ID NO: 64873 - DNA, 33 bp, Homo sapien
aaatctgcatttgttacgtcacctaattcttat

SEQ ID NO: 64874 - DNA, 33 bp, Homo sapien
aaatctgcatttgttaggtcacctaattcttat

SEQ ID NO: 64875 - DNA, 33 bp, Homo sapien
gcagacctaagacacagggagtgcattgctgat

SEQ ID NO: 64876 - DNA, 33 bp, Homo sapien
gcagacctaagacacatggagtgcattgctgat

SEQ ID NO: 64877 - DNA, 33 bp, Homo sapien
agggcagaaaataacacaattgtcaacttagaa

SEQ ID NO: 64878 - DNA, 33 bp, Homo sapien
agggcagaaaataacataattgtcaacttagaa

SEQ ID NO: 64879 - DNA, 33 bp, Homo sapien
agacttatcatacttaccatgctggaaatatcc

SEQ ID NO: 64880 - DNA, 33 bp, Homo sapien
agacttatcatacttatcatgctggaaatatcc

SEQ ID NO: 64881 - DNA, 33 bp, Homo sapien
agatttgatgatattaaactgtcattttattct

SEQ ID NO: 64882 - DNA, 33 bp, Homo sapien
agatttgatgatattagactgtcattttattct

SEQ ID NO: 64883 - DNA, 33 bp, Homo sapien
agaacgcattcactaaatgggataaaattctgc

SEQ ID NO: 64884 - DNA, 33 bp, Homo sapien
agaacgcattcactaagtgggataaaattctgc

SEQ ID NO: 64885 - DNA, 33 bp, Homo sapien
aagcatggtttcttaccgaattctaaagaatca

SEQ ID NO: 64886 - DNA, 33 bp, Homo sapien
aagcatggtttcttactgaattctaaagaatca

SEQ ID NO: 64887 - DNA, 33 bp, Homo sapien
tccctaaatcagggaaccatcatccatggctta

SEQ ID NO: 64888 - DNA, 33 bp, Homo sapien
tccctaaatcagggaagcatcatccatggctta

SEQ ID NO: 64889 - DNA, 33 bp, Homo sapien
agcctcaccgggaaacagccatatcttatcttt

SEQ ID NO: 64890 - DNA, 33 bp, Homo sapien
agcctcaccgggaaacggccatatcttatcttt

SEQ ID NO: 64891 - DNA, 33 bp, Homo sapien
atagtgagctttctgagacacaaagaacttgaa

SEQ ID NO: 64892 - DNA, 33 bp, Homo sapien
atagtgagctttctgatacacaaagaacttgaa

SEQ ID NO: 64893 - DNA, 33 bp, Homo sapien
ttcttggagctttaaaaaatgatcctgctatta

SEQ ID NO: 64894 - DNA, 33 bp, Homo sapien
ttcttggagctttaaagaatgatcctgctatta

SEQ ID NO: 64895 - DNA, 33 bp, Homo sapien
tctggtcctggtaacacgagcaaggagaatttg

SEQ ID NO: 64896 - DNA, 33 bp, Homo sapien
tctggtcctggtaacatgagcaaggagaatttg

SEQ ID NO: 64897 - DNA, 33 bp, Homo sapien
gcctcttttggcacagaaaacaacacattcccc

SEQ ID NO: 64898 - DNA, 33 bp, Homo sapien
gcctcttttggcacaggaaacaacacattcccc

SEQ ID NO: 64899 - DNA, 33 bp, Homo sapien
agagcaaaagtgtgtacgcagaaaagaaaaagc

SEQ ID NO: 64900 - DNA, 33 bp, Homo sapien
agagcaaaagtgtgtaggcagaaaagaaaaagc

SEQ ID NO: 64901 - DNA, 33 bp, Homo sapien
taaatacacccacagaaatgtctaatattcatc

SEQ ID NO: 64902 - DNA, 33 bp, Homo sapien
taaatacacccacagagatgtctaatattcatc

SEQ ID NO: 64903 - DNA, 33 bp, Homo sapien
tgttgcagagtcttaacgtatgtattttttact

SEQ ID NO: 64904 - DNA, 33 bp, Homo sapien
tgttgcagagtcttaaggtatgtattttttact

SEQ ID NO: 64905 - DNA, 33 bp, Homo sapien
actacaataaaccgaacattgcaatgaaataat

SEQ ID NO: 64906 - DNA, 33 bp, Homo sapien
actacaataaaccgaatattgcaatgaaataat

SEQ ID NO: 64907 - DNA, 33 bp, Homo sapien
ctttcttatctattcaacctatctgttggtcac

SEQ ID NO: 64908 - DNA, 33 bp, Homo sapien
ctttcttatctattcagcctatctgttggtcac

SEQ ID NO: 64909 - DNA, 33 bp, Homo sapien
cagtgtcagagcaatacaaagtatatccaatat

SEQ ID NO: 64910 - DNA, 33 bp, Homo sapien
cagtgtcagagcaatataaagtatatccaatat

SEQ ID NO: 64911 - DNA, 33 bp, Homo sapien
aactgaacaacccaaacgcctgctagagatttt

SEQ ID NO: 64912 - DNA, 33 bp, Homo sapien
aactgaacaacccaaatgcctgctagagatttt

SEQ ID NO: 64913 - DNA, 33 bp, Homo sapien
ttagaagcctcaagaaggtctattttggaacta

SEQ ID NO: 64914 - DNA, 33 bp, Homo sapien
ttagaagcctcaagaatgtctattttggaacta

SEQ ID NO: 64915 - DNA, 33 bp, Homo sapien
acccctaaaagccacaatggaaagtgaataaaa

SEQ ID NO: 64916 - DNA, 33 bp, Homo sapien
acccctaaaagccacagtggaaagtgaataaaa

SEQ ID NO: 64917 - DNA, 33 bp, Homo sapien
gatgtggctgtaatcaggtttttgataaagtct

SEQ ID NO: 64918 - DNA, 33 bp, Homo sapien
gatgtggctgtaatcatgtttttgataaagtct

SEQ ID NO: 64919 - DNA, 33 bp, Homo sapien
atctccaagaatgggcagagccatgagcatgtc

SEQ ID NO: 64920 - DNA, 33 bp, Homo sapien
atctccaagaatgggccgagccatgagcatgtc

SEQ ID NO: 64921 - DNA, 33 bp, Homo sapien
gtgtgtccatgtgttaccctttaagtcccactt

SEQ ID NO: 64922 - DNA, 33 bp, Homo sapien
gtgtgtccatgtgttatcctttaagtcccactt

SEQ ID NO: 64923 - DNA, 33 bp, Homo sapien
acatacatttaagacaactagtggtatgaaaaa

SEQ ID NO: 64924 - DNA, 33 bp, Homo sapien
acatacatttaagacatctagtggtatgaaaaa

SEQ ID NO: 64925 - DNA, 33 bp, Homo sapien
cctcattagatggaaacatggtacccaaattcc

SEQ ID NO: 64926 - DNA, 33 bp, Homo sapien
cctcattagatggaaatatggtacccaaattcc

SEQ ID NO: 64927 - DNA, 33 bp, Homo sapien
agactgagagcaaagacgaaaatagcaactgct

SEQ ID NO: 64928 - DNA, 33 bp, Homo sapien
agactgagagcaaagatgaaaatagcaactgct

SEQ ID NO: 64929 - DNA, 33 bp, Homo sapien
tcaggtaaaaacagtcacagtccattattcaat

SEQ ID NO: 64930 - DNA, 33 bp, Homo sapien
tcaggtaaaaacagtcgcagtccattattcaat

SEQ ID NO: 64931 - DNA, 33 bp, Homo sapien
caggttagctttggaacgctcttagctgagagg

SEQ ID NO: 64932 - DNA, 33 bp, Homo sapien
caggttagctttggaatgctcttagctgagagg

SEQ ID NO: 64933 - DNA, 33 bp, Homo sapien
caaaccttgataacaacgtacacagcaaagatt

SEQ ID NO: 64934 - DNA, 33 bp, Homo sapien
caaaccttgataacaatgtacacagcaaagatt

SEQ ID NO: 64935 - DNA, 33 bp, Homo sapien
aggaggagcatgatcacatttgggttttaaaaa

SEQ ID NO: 64936 - DNA, 33 bp, Homo sapien
aggaggagcatgatcagatttgggttttaaaaa

SEQ ID NO: 64937 - DNA, 33 bp, Homo sapien
tagacgaattggcctaagtaaataatttatgac

SEQ ID NO: 64938 - DNA, 33 bp, Homo sapien
tagacgaattggcctaggtaaataatttatgac

SEQ ID NO: 64939 - DNA, 33 bp, Homo sapien
caataaaggcctactacgcagaatctacccaaa

SEQ ID NO: 64940 - DNA, 33 bp, Homo sapien
caataaaggcctactatgcagaatctacccaaa

SEQ ID NO: 64941 - DNA, 33 bp, Homo sapien
tataccatgttgtaaaaattcaactgtatacca

SEQ ID NO: 64942 - DNA, 33 bp, Homo sapien
tataccatgttgtaaagattcaactgtatacca

SEQ ID NO: 64943 - DNA, 33 bp, Homo sapien
aaaaattgatagcaacacagtaatagtaagaga

SEQ ID NO: 64944 - DNA, 33 bp, Homo sapien
aaaaattgatagcaacgcagtaatagtaagaga

SEQ ID NO: 64945 - DNA, 33 bp, Homo sapien
atgtagtcttacagtaccttataagaaagtcac

SEQ ID NO: 64946 - DNA, 33 bp, Homo sapien
atgtagtcttacagtatcttataagaaagtcac

SEQ ID NO: 64947 - DNA, 33 bp, Homo sapien
tattcatctagaagcacgtggattaaaaagaag

SEQ ID NO: 64948 - DNA, 33 bp, Homo sapien
tattcatctagaagcaggtggattaaaaagaag

SEQ ID NO: 64949 - DNA, 33 bp, Homo sapien
aggcacaatctgctccggcttacaggcttcacc

SEQ ID NO: 64950 - DNA, 33 bp, Homo sapien
aggcacaatctgctcctgcttacaggcttcacc

SEQ ID NO: 64951 - DNA, 33 bp, Homo sapien
ttcttccagtcttccacgctgtttttaaacagt

SEQ ID NO: 64952 - DNA, 33 bp, Homo sapien
ttcttccagtcttccatgctgtttttaaacagt

SEQ ID NO: 64953 - DNA, 33 bp, Homo sapien
gattttgttgattccaaactacctttcttcttc

SEQ ID NO: 64954 - DNA, 33 bp, Homo sapien
gattttgttgattccagactacctttcttcttc

SEQ ID NO: 64955 - DNA, 33 bp, Homo sapien
ggagccactaaggttaaggaatgtaagtacctt

SEQ ID NO: 64956 - DNA, 33 bp, Homo sapien
ggagccactaaggttagggaatgtaagtacctt

SEQ ID NO: 64957 - DNA, 33 bp, Homo sapien
gccaaaataacagattcaaaaaatgcatatgaa

SEQ ID NO: 64958 - DNA, 33 bp, Homo sapien
gccaaaataacagattgaaaaaatgcatatgaa

SEQ ID NO: 64959 - DNA, 33 bp, Homo sapien
tttattgctgaaagcacaggccacaaggggaca

SEQ ID NO: 64960 - DNA, 33 bp, Homo sapien
tttattgctgaaagcagaggccacaaggggaca

SEQ ID NO: 64961 - DNA, 33 bp, Homo sapien
cttctccagtttgagcacttggccattaaactt

SEQ ID NO: 64962 - DNA, 33 bp, Homo sapien
cttctccagtttgagcgcttggccattaaactt

SEQ ID NO: 64963 - DNA, 33 bp, Homo sapien
atatgctgaaaacaaaatgttctataaatagtt

SEQ ID NO: 64964 - DNA, 33 bp, Homo sapien
atatgctgaaaacaaagtgttctataaatagtt

SEQ ID NO: 64965 - DNA, 33 bp, Homo sapien
tgactcttgttttatcaccctactccacatctc

SEQ ID NO: 64966 - DNA, 33 bp, Homo sapien
tgactcttgttttatcgccctactccacatctc

SEQ ID NO: 64967 - DNA, 33 bp, Homo sapien
tctctgtgtcttcataaaaatttaagatgattt

SEQ ID NO: 64968 - DNA, 33 bp, Homo sapien
tctctgtgtcttcatacaaatttaagatgattt

SEQ ID NO: 64969 - DNA, 33 bp, Homo sapien
tgtgttccaaaggaaaccagcatgctctggccg

SEQ ID NO: 64970 - DNA, 33 bp, Homo sapien
tgtgttccaaaggaaatcagcatgctctggccg

SEQ ID NO: 64971 - DNA, 33 bp, Homo sapien
ttgtacttttgtcaaaactaatcaacgggtata

SEQ ID NO: 64972 - DNA, 33 bp, Homo sapien
ttgtacttttgtcaaagctaatcaacgggtata

SEQ ID NO: 64973 - DNA, 33 bp, Homo sapien
agagcctagaaatagacgccattagctgatttt

SEQ ID NO: 64974 - DNA, 33 bp, Homo sapien
agagcctagaaatagatgccattagctgatttt

SEQ ID NO: 64975 - DNA, 33 bp, Homo sapien
ataatatcccgctgtacagttgtgccacagttt

SEQ ID NO: 64976 - DNA, 33 bp, Homo sapien
ataatatcccgctgtatagttgtgccacagttt

SEQ ID NO: 64977 - DNA, 33 bp, Homo sapien
taaagattcacaccaacagtgaagtggcaagag

SEQ ID NO: 64978 - DNA, 33 bp, Homo sapien
taaagattcacaccaatagtgaagtggcaagag

SEQ ID NO: 64979 - DNA, 33 bp, Homo sapien
gatccccaatgcctgacagagtccttggtacat

SEQ ID NO: 64980 - DNA, 33 bp, Homo sapien
gatccccaatgcctgagagagtccttggtacat

SEQ ID NO: 64981 - DNA, 33 bp, Homo sapien
ttaagaaagttgtcctaaatatctgtagcctaa

SEQ ID NO: 64982 - DNA, 33 bp, Homo sapien
ttaagaaagttgtcctgaatatctgtagcctaa

SEQ ID NO: 64983 - DNA, 33 bp, Homo sapien
gagaggaaaaaacataagcaatgggtcttgaag

SEQ ID NO: 64984 - DNA, 33 bp, Homo sapien
gagaggaaaaaacatacgcaatgggtcttgaag

SEQ ID NO: 64985 - DNA, 33 bp, Homo sapien
cacagcctatggagccaagtaggaagcagaagc

SEQ ID NO: 64986 - DNA, 33 bp, Homo sapien
cacagcctatggagccgagtaggaagcagaagc

SEQ ID NO: 64987 - DNA, 33 bp, Homo sapien
actgcaataccataaactgacatctggattggg

SEQ ID NO: 64988 - DNA, 33 bp, Homo sapien
actgcaataccataaattgacatctggattggg

SEQ ID NO: 64989 - DNA, 33 bp, Homo sapien
cctcatggtaggatgagatcagtttcagagtaa

SEQ ID NO: 64990 - DNA, 33 bp, Homo sapien
cctcatggtaggatgatatcagtttcagagtaa

SEQ ID NO: 64991 - DNA, 33 bp, Homo sapien
caaatgagctatgtgtcaatagagtgtaaatat

SEQ ID NO: 64992 - DNA, 33 bp, Homo sapien
caaatgagctatgtgtgaatagagtgtaaatat

SEQ ID NO: 64993 - DNA, 33 bp, Homo sapien
tggcaataaatcaaaagaggtcgctagtaagaa

SEQ ID NO: 64994 - DNA, 33 bp, Homo sapien
tggcaataaatcaaaataggtcgctagtaagaa

SEQ ID NO: 64995 - DNA, 33 bp, Homo sapien
tgattatagaaggaaaatctttgaatactgtta

SEQ ID NO: 64996 - DNA, 33 bp, Homo sapien
tgattatagaaggaaagtctttgaatactgtta

SEQ ID NO: 64997 - DNA, 33 bp, Homo sapien
ttaacacacattatcaaaagagaaagtgagagc

SEQ ID NO: 64998 - DNA, 33 bp, Homo sapien
ttaacacacattatcataagagaaagtgagagc

SEQ ID NO: 64999 - DNA, 33 bp, Homo sapien
ttgaccacactatccaatactgctccctgtctt

SEQ ID NO: 65000 - DNA, 33 bp, Homo sapien
ttgaccacactatccagtactgctccctgtctt

SEQ ID NO: 65001 - DNA, 33 bp, Homo sapien
accacaaaccagaagcaaatgtccttttcccct

SEQ ID NO: 65002 - DNA, 33 bp, Homo sapien
accacaaaccagaagcgaatgtccttttcccct

SEQ ID NO: 65003 - DNA, 33 bp, Homo sapien
tactttttgggtttgtcaagaggataaatgaga

SEQ ID NO: 65004 - DNA, 33 bp, Homo sapien
tactttttgggtttgtgaagaggataaatgaga

SEQ ID NO: 65005 - DNA, 33 bp, Homo sapien
ctccattaaggtgtccaatgggccaaaatcctt

SEQ ID NO: 65006 - DNA, 33 bp, Homo sapien
ctccattaaggtgtccgatgggccaaaatcctt

SEQ ID NO: 65007 - DNA, 33 bp, Homo sapien
tgagagaaagatttagaccattgcaaaaagccc

SEQ ID NO: 65008 - DNA, 33 bp, Homo sapien
tgagagaaagatttaggccattgcaaaaagccc

SEQ ID NO: 65009 - DNA, 33 bp, Homo sapien
caggaatcatcctagaacactctcccctctctt

SEQ ID NO: 65010 - DNA, 33 bp, Homo sapien
caggaatcatcctagaccactctcccctctctt

SEQ ID NO: 65011 - DNA, 33 bp, Homo sapien
tcctaatttctcatacacatttgtacaaaggct

SEQ ID NO: 65012 - DNA, 33 bp, Homo sapien
tcctaatttctcatacgcatttgtacaaaggct

SEQ ID NO: 65013 - DNA, 33 bp, Homo sapien
tgtttctatgatatgcccggacttgtaagtcct

SEQ ID NO: 65014 - DNA, 33 bp, Homo sapien
tgtttctatgatatgctcggacttgtaagtcct

SEQ ID NO: 65015 - DNA, 33 bp, Homo sapien
aattaaaagccacagaacggcaaattgtataaa

SEQ ID NO: 65016 - DNA, 33 bp, Homo sapien
aattaaaagccacagaccggcaaattgtataaa

SEQ ID NO: 65017 - DNA, 33 bp, Homo sapien
tctctattataaatgaagcactttggctgagaa

SEQ ID NO: 65018 - DNA, 33 bp, Homo sapien
tctctattataaatgaggcactttggctgagaa

SEQ ID NO: 65019 - DNA, 33 bp, Homo sapien
ttatctaataattaacagagtttgaggatgaga

SEQ ID NO: 65020 - DNA, 33 bp, Homo sapien
ttatctaataattaacggagtttgaggatgaga

SEQ ID NO: 65021 - DNA, 33 bp, Homo sapien
aaaatgttgaaaatcactacaatccatgtaaca

SEQ ID NO: 65022 - DNA, 33 bp, Homo sapien
aaaatgttgaaaatcagtacaatccatgtaaca

SEQ ID NO: 65023 - DNA, 33 bp, Homo sapien
atattaacgtctttaaaatgatttgccttccat

SEQ ID NO: 65024 - DNA, 33 bp, Homo sapien
atattaacgtctttaacatgatttgccttccat

SEQ ID NO: 65025 - DNA, 33 bp, Homo sapien
cctgaggatgagcctcacttatttgttttacta

SEQ ID NO: 65026 - DNA, 33 bp, Homo sapien
cctgaggatgagcctcgcttatttgttttacta

SEQ ID NO: 65027 - DNA, 33 bp, Homo sapien
tgttatctcaattaagaccaccagttaaagaag

SEQ ID NO: 65028 - DNA, 33 bp, Homo sapien
tgttatctcaattaaggccaccagttaaagaag

SEQ ID NO: 65029 - DNA, 33 bp, Homo sapien
caaatctcgtgtcccaaagcaatcttcttctaa

SEQ ID NO: 65030 - DNA, 33 bp, Homo sapien
caaatctcgtgtcccacagcaatcttcttctaa

SEQ ID NO: 65031 - DNA, 33 bp, Homo sapien
tggaaactcattagcacgtgaatgtttttattt

SEQ ID NO: 65032 - DNA, 33 bp, Homo sapien
tggaaactcattagcatgtgaatgtttttattt

SEQ ID NO: 65033 - DNA, 33 bp, Homo sapien
tttctcctatcatccaatagcatctgttttctg

SEQ ID NO: 65034 - DNA, 33 bp, Homo sapien
tttctcctatcatccagtagcatctgttttctg

SEQ ID NO: 65035 - DNA, 33 bp, Homo sapien
atgagtaaatgtttggaaagatttggaaataaa

SEQ ID NO: 65036 - DNA, 33 bp, Homo sapien
atgagtaaatgtttgggaagatttggaaataaa

SEQ ID NO: 65037 - DNA, 33 bp, Homo sapien
ttatatatttaaattgaaaccaaaggattaatc

SEQ ID NO: 65038 - DNA, 33 bp, Homo sapien
ttatatatttaaattggaaccaaaggattaatc

SEQ ID NO: 65039 - DNA, 33 bp, Homo sapien
ctgccttcccagaaacagtaagcaccttatatg

SEQ ID NO: 65040 - DNA, 33 bp, Homo sapien
ctgccttcccagaaacggtaagcaccttatatg

SEQ ID NO: 65041 - DNA, 33 bp, Homo sapien
tctcaatccagttcaaagtgttaattgtcaccg

SEQ ID NO: 65042 - DNA, 33 bp, Homo sapien
tctcaatccagttcaatgtgttaattgtcaccg

SEQ ID NO: 65043 - DNA, 33 bp, Homo sapien
agataactctggaagagaaatccttgacttgca

SEQ ID NO: 65044 - DNA, 33 bp, Homo sapien
agataactctggaagataaatccttgacttgca

SEQ ID NO: 65045 - DNA, 33 bp, Homo sapien
gcactcccacttaaaacgagatcgtctttgaag

SEQ ID NO: 65046 - DNA, 33 bp, Homo sapien
gcactcccacttaaaatgagatcgtctttgaag

SEQ ID NO: 65047 - DNA, 33 bp, Homo sapien
tcagttcatgcatctaagactccctggaactat

SEQ ID NO: 65048 - DNA, 33 bp, Homo sapien
tcagttcatgcatctaggactccctggaactat

SEQ ID NO: 65049 - DNA, 33 bp, Homo sapien
agtcccttcaactctaacaagcttgagaaactt

SEQ ID NO: 65050 - DNA, 33 bp, Homo sapien
agtcccttcaactctatcaagcttgagaaactt

SEQ ID NO: 65051 - DNA, 33 bp, Homo sapien
gacactgcttttatcacgcctatgttctggtac

SEQ ID NO: 65052 - DNA, 33 bp, Homo sapien
gacactgcttttatcaggcctatgttctggtac

SEQ ID NO: 65053 - DNA, 33 bp, Homo sapien
tgaattttccatacaccacaaacctgcacatgt

SEQ ID NO: 65054 - DNA, 33 bp, Homo sapien
tgaattttccatacactacaaacctgcacatgt

SEQ ID NO: 65055 - DNA, 33 bp, Homo sapien
cagatgaagatagttacaacagctccaagcaaa

SEQ ID NO: 65056 - DNA, 33 bp, Homo sapien
cagatgaagatagttagaacagctccaagcaaa

SEQ ID NO: 65057 - DNA, 33 bp, Homo sapien
ccttcatattttatcacgcagctttccttctct

SEQ ID NO: 65058 - DNA, 33 bp, Homo sapien
ccttcatattttatcatgcagctttccttctct

SEQ ID NO: 65059 - DNA, 33 bp, Homo sapien
ccctaccttgatctacagattcattgagctcta

SEQ ID NO: 65060 - DNA, 33 bp, Homo sapien
ccctaccttgatctacggattcattgagctcta

SEQ ID NO: 65061 - DNA, 33 bp, Homo sapien
ttttaccactgaacctaaaccatctaaataaga

SEQ ID NO: 65062 - DNA, 33 bp, Homo sapien
ttttaccactgaacctgaaccatctaaataaga

SEQ ID NO: 65063 - DNA, 33 bp, Homo sapien
catatctcttgtgtcacatttaatgtataacat

SEQ ID NO: 65064 - DNA, 33 bp, Homo sapien
catatctcttgtgtcagatttaatgtataacat

SEQ ID NO: 65065 - DNA, 33 bp, Homo sapien
aaaagtactgaaatcacgcaattacattctcaa

SEQ ID NO: 65066 - DNA, 33 bp, Homo sapien
aaaagtactgaaatcatgcaattacattctcaa

SEQ ID NO: 65067 - DNA, 33 bp, Homo sapien
aagtttgtagagtaccacagagtcagacagtta

SEQ ID NO: 65068 - DNA, 33 bp, Homo sapien
aagtttgtagagtaccgcagagtcagacagtta

SEQ ID NO: 65069 - DNA, 33 bp, Homo sapien
caagtacaaacgcaccaagaagggatagcgtta

SEQ ID NO: 65070 - DNA, 33 bp, Homo sapien
caagtacaaacgcaccgagaagggatagcgtta

SEQ ID NO: 65071 - DNA, 33 bp, Homo sapien
catgtgtttgtcttgcaagtgtgtcggaaggag

SEQ ID NO: 65072 - DNA, 33 bp, Homo sapien
catgtgtttgtcttgctagtgtgtcggaaggag

SEQ ID NO: 65073 - DNA, 33 bp, Homo sapien
cgtggagtagatccataaacaaatgtgggcaat

SEQ ID NO: 65074 - DNA, 33 bp, Homo sapien
cgtggagtagatccatgaacaaatgtgggcaat

SEQ ID NO: 65075 - DNA, 33 bp, Homo sapien
gttacggtaatgcaagaaagtctgtgaaatgct

SEQ ID NO: 65076 - DNA, 33 bp, Homo sapien
gttacggtaatgcaaggaagtctgtgaaatgct

SEQ ID NO: 65077 - DNA, 33 bp, Homo sapien
ttttcttttttcagctcaagatactgaatatgc

SEQ ID NO: 65078 - DNA, 33 bp, Homo sapien
ttttcttttttcagctgaagatactgaatatgc

SEQ ID NO: 65079 - DNA, 33 bp, Homo sapien
gtattttcaggaaaagcatacagcatctactaa

SEQ ID NO: 65080 - DNA, 33 bp, Homo sapien
gtattttcaggaaaagtatacagcatctactaa

SEQ ID NO: 65081 - DNA, 33 bp, Homo sapien
cactggccatcctacaccacataggttgaatga

SEQ ID NO: 65082 - DNA, 33 bp, Homo sapien
cactggccatcctacagcacataggttgaatga

SEQ ID NO: 65083 - DNA, 33 bp, Homo sapien
tttagctactggacaccgattaaagaataatgg

SEQ ID NO: 65084 - DNA, 33 bp, Homo sapien
tttagctactggacactgattaaagaataatgg

SEQ ID NO: 65085 - DNA, 33 bp, Homo sapien
gatcttaggacgtaaaattgaataagaattcca

SEQ ID NO: 65086 - DNA, 33 bp, Homo sapien
gatcttaggacgtaaacttgaataagaattcca

SEQ ID NO: 65087 - DNA, 33 bp, Homo sapien
ttctgaggctcttgaacgcaagaaactttccag

SEQ ID NO: 65088 - DNA, 33 bp, Homo sapien
ttctgaggctcttgaatgcaagaaactttccag

SEQ ID NO: 65089 - DNA, 33 bp, Homo sapien
cagtagtatgataaggaccaggacagaattaaa

SEQ ID NO: 65090 - DNA, 33 bp, Homo sapien
cagtagtatgataagggccaggacagaattaaa

SEQ ID NO: 65091 - DNA, 33 bp, Homo sapien
tctgctcagagctctaaaattacattattcctt

SEQ ID NO: 65092 - DNA, 33 bp, Homo sapien
tctgctcagagctctagaattacattattcctt

SEQ ID NO: 65093 - DNA, 33 bp, Homo sapien
gacctttggtcctgtccaagctgctgaatttga

SEQ ID NO: 65094 - DNA, 33 bp, Homo sapien
gacctttggtcctgtcgaagctgctgaatttga

SEQ ID NO: 65095 - DNA, 33 bp, Homo sapien
ctcaaaaaaaaaatgaagtcagatgggtttagg

SEQ ID NO: 65096 - DNA, 33 bp, Homo sapien
ctcaaaaaaaaaatgaggtcagatgggtttagg

SEQ ID NO: 65097 - DNA, 33 bp, Homo sapien
gaagaggactataacaatatcaaagaatattat

SEQ ID NO: 65098 - DNA, 33 bp, Homo sapien
gaagaggactataacagtatcaaagaatattat

SEQ ID NO: 65099 - DNA, 33 bp, Homo sapien
ttctggaaatttccaggcaagtggctgaaccaa

SEQ ID NO: 65100 - DNA, 33 bp, Homo sapien
ttctggaaatttccagtcaagtggctgaaccaa

SEQ ID NO: 65101 - DNA, 33 bp, Homo sapien
ttttaggactttattacggtggatttcgtccac

SEQ ID NO: 65102 - DNA, 33 bp, Homo sapien
ttttaggactttattatggtggatttcgtccac

SEQ ID NO: 65103 - DNA, 33 bp, Homo sapien
tcttagctgaacataacactgggcagtctagtt

SEQ ID NO: 65104 - DNA, 33 bp, Homo sapien
tcttagctgaacataatactgggcagtctagtt

SEQ ID NO: 65105 - DNA, 33 bp, Homo sapien
atgcataaacatttgacagcagctagaaaaaaa

SEQ ID NO: 65106 - DNA, 33 bp, Homo sapien
atgcataaacatttgatagcagctagaaaaaaa

SEQ ID NO: 65107 - DNA, 33 bp, Homo sapien
ccttgtgcttctgccaactaccctgagaacatg

SEQ ID NO: 65108 - DNA, 33 bp, Homo sapien
ccttgtgcttctgccatctaccctgagaacatg

SEQ ID NO: 65109 - DNA, 33 bp, Homo sapien
gctatataatccataactggaagaagtgagaag

SEQ ID NO: 65110 - DNA, 33 bp, Homo sapien
gctatataatccataattggaagaagtgagaag

SEQ ID NO: 65111 - DNA, 33 bp, Homo sapien
gaaaatgagcaaggtaaggaaagagatagcagc

SEQ ID NO: 65112 - DNA, 33 bp, Homo sapien
gaaaatgagcaaggtagggaaagagatagcagc

SEQ ID NO: 65113 - DNA, 33 bp, Homo sapien
attgcagttacttcaaagtgagtcagtcattaa

SEQ ID NO: 65114 - DNA, 33 bp, Homo sapien
attgcagttacttcaacgtgagtcagtcattaa

SEQ ID NO: 65115 - DNA, 33 bp, Homo sapien
gctatttataaggaaaacactagttgaccaact

SEQ ID NO: 65116 - DNA, 33 bp, Homo sapien
gctatttataaggaaagcactagttgaccaact

SEQ ID NO: 65117 - DNA, 33 bp, Homo sapien
attgtactgcacgttaacaccagactaattttc

SEQ ID NO: 65118 - DNA, 33 bp, Homo sapien
attgtactgcacgttatcaccagactaattttc

SEQ ID NO: 65119 - DNA, 33 bp, Homo sapien
tcttcaggatgaactccatattatttccacatg

SEQ ID NO: 65120 - DNA, 33 bp, Homo sapien
tcttcaggatgaactctatattatttccacatg

SEQ ID NO: 65121 - DNA, 33 bp, Homo sapien
cttactatctgccacaaacagaatatttaatta

SEQ ID NO: 65122 - DNA, 33 bp, Homo sapien
cttactatctgccacagacagaatatttaatta

SEQ ID NO: 65123 - DNA, 33 bp, Homo sapien
cctcaaccattggaccactctttcctgctgctg

SEQ ID NO: 65124 - DNA, 33 bp, Homo sapien
cctcaaccattggaccgctctttcctgctgctg

SEQ ID NO: 65125 - DNA, 33 bp, Homo sapien
acaggaccagagactacggtggagtccaagctc

SEQ ID NO: 65126 - DNA, 33 bp, Homo sapien
acaggaccagagactatggtggagtccaagctc

SEQ ID NO: 65127 - DNA, 33 bp, Homo sapien
tccctgtgtgtgtcaacctatgttctcactaaa

SEQ ID NO: 65128 - DNA, 33 bp, Homo sapien
tccctgtgtgtgtcaatctatgttctcactaaa

SEQ ID NO: 65129 - DNA, 33 bp, Homo sapien
tttgccaaaacaatgacggaaccatggtgttag

SEQ ID NO: 65130 - DNA, 33 bp, Homo sapien
tttgccaaaacaatgatggaaccatggtgttag

SEQ ID NO: 65131 - DNA, 33 bp, Homo sapien
atcaacattcctcgcccgcaaatgacatagtga

SEQ ID NO: 65132 - DNA, 33 bp, Homo sapien
atcaacattcctcgcctgcaaatgacatagtga

SEQ ID NO: 65133 - DNA, 33 bp, Homo sapien
caggaagccatcaagaagaaaattggcattgtc

SEQ ID NO: 65134 - DNA, 33 bp, Homo sapien
caggaagccatcaagaggaaaattggcattgtc

SEQ ID NO: 65135 - DNA, 33 bp, Homo sapien
tatccatatgaagtaactctgatttatgctgac

SEQ ID NO: 65136 - DNA, 33 bp, Homo sapien
tatccatatgaagtaattctgatttatgctgac

SEQ ID NO: 65137 - DNA, 33 bp, Homo sapien
tagtccttcgaattcaactggagacatttcata

SEQ ID NO: 65138 - DNA, 33 bp, Homo sapien
tagtccttcgaattcagctggagacatttcata

SEQ ID NO: 65139 - DNA, 33 bp, Homo sapien
ctatgcctccggctataaactgatgacctgagg

SEQ ID NO: 65140 - DNA, 33 bp, Homo sapien
ctatgcctccggctatgaactgatgacctgagg

SEQ ID NO: 65141 - DNA, 33 bp, Homo sapien
gaatcccctgtcttcaatagtcttaagcttacc

SEQ ID NO: 65142 - DNA, 33 bp, Homo sapien
gaatcccctgtcttcagtagtcttaagcttacc

SEQ ID NO: 65143 - DNA, 33 bp, Homo sapien
gatggcaaggggtacacatttgggaatgttctc

SEQ ID NO: 65144 - DNA, 33 bp, Homo sapien
gatggcaaggggtacatatttgggaatgttctc

SEQ ID NO: 65145 - DNA, 33 bp, Homo sapien
ccccaattctctaatccaccctgcattcacctt

SEQ ID NO: 65146 - DNA, 33 bp, Homo sapien
ccccaattctctaatctaccctgcattcacctt

SEQ ID NO: 65147 - DNA, 33 bp, Homo sapien
atttgggaaatgaaaacataggagaatctggct

SEQ ID NO: 65148 - DNA, 33 bp, Homo sapien
atttgggaaatgaaaagataggagaatctggct

SEQ ID NO: 65149 - DNA, 33 bp, Homo sapien
attttatgttatcctcacagtaaccccatgtgg

SEQ ID NO: 65150 - DNA, 33 bp, Homo sapien
attttatgttatcctcccagtaaccccatgtgg

SEQ ID NO: 65151 - DNA, 33 bp, Homo sapien
ttctgtcttgatttctcacaggttgatgctcag

SEQ ID NO: 65152 - DNA, 33 bp, Homo sapien
ttctgtcttgatttcttacaggttgatgctcag

SEQ ID NO: 65153 - DNA, 33 bp, Homo sapien
aagcttcactgtaaaaactggactctttcaaga

SEQ ID NO: 65154 - DNA, 33 bp, Homo sapien
aagcttcactgtaaaagctggactctttcaaga

SEQ ID NO: 65155 - DNA, 33 bp, Homo sapien
agattaaaaacatgggcagaacagatgctccaa

SEQ ID NO: 65156 - DNA, 33 bp, Homo sapien
agattaaaaacatgggtagaacagatgctccaa

SEQ ID NO: 65157 - DNA, 33 bp, Homo sapien
tctttgacaggctcaagcttcctaaaagaagcc

SEQ ID NO: 65158 - DNA, 33 bp, Homo sapien
tctttgacaggctcaatcttcctaaaagaagcc

SEQ ID NO: 65159 - DNA, 33 bp, Homo sapien
gataaaacagaataccaaataccctaatttctt

SEQ ID NO: 65160 - DNA, 33 bp, Homo sapien
gataaaacagaataccgaataccctaatttctt

SEQ ID NO: 65161 - DNA, 33 bp, Homo sapien
tctcttgaagcctatacatttgggattgtacaa

SEQ ID NO: 65162 - DNA, 33 bp, Homo sapien
tctcttgaagcctatatatttgggattgtacaa

SEQ ID NO: 65163 - DNA, 33 bp, Homo sapien
tttatttcagtgataacctccagcaagctctgt

SEQ ID NO: 65164 - DNA, 33 bp, Homo sapien
tttatttcagtgataatctccagcaagctctgt

SEQ ID NO: 65165 - DNA, 33 bp, Homo sapien
ggttagggtgacataacggctatcacactttcc

SEQ ID NO: 65166 - DNA, 33 bp, Homo sapien
ggttagggtgacataatggctatcacactttcc

SEQ ID NO: 65167 - DNA, 33 bp, Homo sapien
aggtcactaaaactggaaagtctgtcgcttaga

SEQ ID NO: 65168 - DNA, 33 bp, Homo sapien
aggtcactaaaactgggaagtctgtcgcttaga

SEQ ID NO: 65169 - DNA, 33 bp, Homo sapien
ggtgcagccgaagtagacgtttggggaggcgaa

SEQ ID NO: 65170 - DNA, 33 bp, Homo sapien
ggtgcagccgaagtaggcgtttggggaggcgaa

SEQ ID NO: 65171 - DNA, 33 bp, Homo sapien
gaaaataatgttaccacgctataagtacaatgt

SEQ ID NO: 65172 - DNA, 33 bp, Homo sapien
gaaaataatgttaccatgctataagtacaatgt

SEQ ID NO: 65173 - DNA, 33 bp, Homo sapien
gactcagactattctgcagatgaaacatagaaa

SEQ ID NO: 65174 - DNA, 33 bp, Homo sapien
gactcagactattctgtagatgaaacatagaaa

SEQ ID NO: 65175 - DNA, 33 bp, Homo sapien
ctcatgtaggatattacctttgatagtgtagaa

SEQ ID NO: 65176 - DNA, 33 bp, Homo sapien
ctcatgtaggatattatctttgatagtgtagaa

SEQ ID NO: 65177 - DNA, 33 bp, Homo sapien
tatgggtttcttgttacgtatgcttgtcgagat

SEQ ID NO: 65178 - DNA, 33 bp, Homo sapien
tatgggtttcttgttatgtatgcttgtcgagat

SEQ ID NO: 65179 - DNA, 33 bp, Homo sapien
tctgttgagtgacctacgctcttgactgtttcc

SEQ ID NO: 65180 - DNA, 33 bp, Homo sapien
tctgttgagtgacctatgctcttgactgtttcc

SEQ ID NO: 65181 - DNA, 33 bp, Homo sapien
agaagtaactaatgcacgggagttttgaggtga

SEQ ID NO: 65182 - DNA, 33 bp, Homo sapien
agaagtaactaatgcatgggagttttgaggtga

SEQ ID NO: 65183 - DNA, 33 bp, Homo sapien
ttgaagaattctgttgccaacacttctgcacaa

SEQ ID NO: 65184 - DNA, 33 bp, Homo sapien
ttgaagaattctgttgtcaacacttctgcacaa

SEQ ID NO: 65185 - DNA, 33 bp, Homo sapien
gcttttcatcactcaacggaaaacttttgaaga

SEQ ID NO: 65186 - DNA, 33 bp, Homo sapien
gcttttcatcactcaatggaaaacttttgaaga

SEQ ID NO: 65187 - DNA, 33 bp, Homo sapien
cagcaccctgtagttaccttttctgctgtctcc

SEQ ID NO: 65188 - DNA, 33 bp, Homo sapien
cagcaccctgtagttatcttttctgctgtctcc

SEQ ID NO: 65189 - DNA, 33 bp, Homo sapien
ataattctggccttagccatctgttggtatgaa

SEQ ID NO: 65190 - DNA, 33 bp, Homo sapien
ataattctggccttaggcatctgttggtatgaa

SEQ ID NO: 65191 - DNA, 33 bp, Homo sapien
acaaaaacaaacaaaccggcaattaattttgca

SEQ ID NO: 65192 - DNA, 33 bp, Homo sapien
acaaaaacaaacaaactggcaattaattttgca

SEQ ID NO: 65193 - DNA, 33 bp, Homo sapien
ctgctagagaacagaagtcaaagccctaaacta

SEQ ID NO: 65194 - DNA, 33 bp, Homo sapien
ctgctagagaacagaattcaaagccctaaacta

SEQ ID NO: 65195 - DNA, 33 bp, Homo sapien
tgttgggtctagaaaacgaacaagactttaaca

SEQ ID NO: 65196 - DNA, 33 bp, Homo sapien
tgttgggtctagaaaatgaacaagactttaaca

SEQ ID NO: 65197 - DNA, 33 bp, Homo sapien
ggtgacctcagtgacacaacagagaaaaatatc

SEQ ID NO: 65198 - DNA, 33 bp, Homo sapien
ggtgacctcagtgacataacagagaaaaatatc

SEQ ID NO: 65199 - DNA, 33 bp, Homo sapien
ccacacagacttaaaaaaattgtctcctagcat

SEQ ID NO: 65200 - DNA, 33 bp, Homo sapien
ccacacagacttaaaacaattgtctcctagcat

SEQ ID NO: 65201 - DNA, 33 bp, Homo sapien
ctgatatgtggtaacaacccttctctaggcctg

SEQ ID NO: 65202 - DNA, 33 bp, Homo sapien
ctgatatgtggtaacagcccttctctaggcctg

SEQ ID NO: 65203 - DNA, 33 bp, Homo sapien
gactcatgtcaaacaagaaggtaattcagccaa

SEQ ID NO: 65204 - DNA, 33 bp, Homo sapien
gactcatgtcaaacaataaggtaattcagccaa

SEQ ID NO: 65205 - DNA, 33 bp, Homo sapien
ctccctttcttcttaaccctactatgccaagga

SEQ ID NO: 65206 - DNA, 33 bp, Homo sapien
ctccctttcttcttaatcctactatgccaagga

SEQ ID NO: 65207 - DNA, 33 bp, Homo sapien
aaataaaataaaagaaatccaggtgtgcagcag

SEQ ID NO: 65208 - DNA, 33 bp, Homo sapien
aaataaaataaaagaattccaggtgtgcagcag

SEQ ID NO: 65209 - DNA, 33 bp, Homo sapien
atcgtgtataccatgcagatggatgttctggat

SEQ ID NO: 65210 - DNA, 33 bp, Homo sapien
atcgtgtataccatgcggatggatgttctggat

SEQ ID NO: 65211 - DNA, 33 bp, Homo sapien
ctgttcctttggacaaccacctcttccaaattc

SEQ ID NO: 65212 - DNA, 33 bp, Homo sapien
ctgttcctttggacaatcacctcttccaaattc

SEQ ID NO: 65213 - DNA, 33 bp, Homo sapien
tgttaactgaaagtccgattgtgctggactgaa

SEQ ID NO: 65214 - DNA, 33 bp, Homo sapien
tgttaactgaaagtcctattgtgctggactgaa

SEQ ID NO: 65215 - DNA, 33 bp, Homo sapien
aaaagaattcatataaaagaaaattagcattac

SEQ ID NO: 65216 - DNA, 33 bp, Homo sapien
aaaagaattcatataagagaaaattagcattac

SEQ ID NO: 65217 - DNA, 33 bp, Homo sapien
agggtagccactggaccggatgaaaaaagtgaa

SEQ ID NO: 65218 - DNA, 33 bp, Homo sapien
agggtagccactggactggatgaaaaaagtgaa

SEQ ID NO: 65219 - DNA, 33 bp, Homo sapien
cagatatcttaaagcacggtcatatacatgtac

SEQ ID NO: 65220 - DNA, 33 bp, Homo sapien
cagatatcttaaagcagggtcatatacatgtac

SEQ ID NO: 65221 - DNA, 33 bp, Homo sapien
acaatgatgagtggaaagaaaggaatatattaa

SEQ ID NO: 65222 - DNA, 33 bp, Homo sapien
acaatgatgagtggaaggaaaggaatatattaa

SEQ ID NO: 65223 - DNA, 33 bp, Homo sapien
catggtctgcactagtaaagaaaatatactcta

SEQ ID NO: 65224 - DNA, 33 bp, Homo sapien
catggtctgcactagtgaagaaaatatactcta

SEQ ID NO: 65225 - DNA, 33 bp, Homo sapien
agaggaggaagtgcaaagagaataagatgggtg

SEQ ID NO: 65226 - DNA, 33 bp, Homo sapien
agaggaggaagtgcaaggagaataagatgggtg

SEQ ID NO: 65227 - DNA, 33 bp, Homo sapien
tttgtaagttgaggaaaacaccattgcttaaaa

SEQ ID NO: 65228 - DNA, 33 bp, Homo sapien
tttgtaagttgaggaagacaccattgcttaaaa

SEQ ID NO: 65229 - DNA, 33 bp, Homo sapien
tattcttgaaacaacagtcagatctccaacttc

SEQ ID NO: 65230 - DNA, 33 bp, Homo sapien
tattcttgaaacaacattcagatctccaacttc

SEQ ID NO: 65231 - DNA, 33 bp, Homo sapien
cttaagagacaacagagatttgtaggaatagca

SEQ ID NO: 65232 - DNA, 33 bp, Homo sapien
cttaagagacaacagatatttgtaggaatagca

SEQ ID NO: 65233 - DNA, 33 bp, Homo sapien
aatagtacttcctatcagacaaaaaggaagggt

SEQ ID NO: 65234 - DNA, 33 bp, Homo sapien
aatagtacttcctatcggacaaaaaggaagggt

SEQ ID NO: 65235 - DNA, 33 bp, Homo sapien
ctgtgaaagtcatagaaatgaaggctgcttatc

SEQ ID NO: 65236 - DNA, 33 bp, Homo sapien
ctgtgaaagtcatagacatgaaggctgcttatc

SEQ ID NO: 65237 - DNA, 33 bp, Homo sapien
gatttgcacactttagacatcaaagtctaggtt

SEQ ID NO: 65238 - DNA, 33 bp, Homo sapien
gatttgcacactttagtcatcaaagtctaggtt

SEQ ID NO: 65239 - DNA, 33 bp, Homo sapien
ctttctgtttctttgaagtacctgtttatcaat

SEQ ID NO: 65240 - DNA, 33 bp, Homo sapien
ctttctgtttctttgaggtacctgtttatcaat

SEQ ID NO: 65241 - DNA, 33 bp, Homo sapien
ttgaactccagacaaacggaaacgtgaaggatc

SEQ ID NO: 65242 - DNA, 33 bp, Homo sapien
ttgaactccagacaaatggaaacgtgaaggatc

SEQ ID NO: 65243 - DNA, 33 bp, Homo sapien
acgcatcagttattgcaacccacactcatcagc

SEQ ID NO: 65244 - DNA, 33 bp, Homo sapien
acgcatcagttattgcgacccacactcatcagc

SEQ ID NO: 65245 - DNA, 33 bp, Homo sapien
aatgacttggatattaacattactgcatggagg

SEQ ID NO: 65246 - DNA, 33 bp, Homo sapien
aatgacttggatattatcattactgcatggagg

SEQ ID NO: 65247 - DNA, 33 bp, Homo sapien
gtaagtaggaagtctaacacaggaaataacacc

SEQ ID NO: 65248 - DNA, 33 bp, Homo sapien
gtaagtaggaagtctagcacaggaaataacacc

SEQ ID NO: 65249 - DNA, 33 bp, Homo sapien
gcaggtgccagaagagaagacgtgggtagatag

SEQ ID NO: 65250 - DNA, 33 bp, Homo sapien
gcaggtgccagaagaggagacgtgggtagatag

SEQ ID NO: 65251 - DNA, 33 bp, Homo sapien
aagtattattctcagaaattacaattcacaatt

SEQ ID NO: 65252 - DNA, 33 bp, Homo sapien
aagtattattctcagagattacaattcacaatt

SEQ ID NO: 65253 - DNA, 33 bp, Homo sapien
tggataagaagtttaaagaatgcctttctgtgg

SEQ ID NO: 65254 - DNA, 33 bp, Homo sapien
tggataagaagtttaaggaatgcctttctgtgg

SEQ ID NO: 65255 - DNA, 33 bp, Homo sapien
ttctgaatggaaatcaaatacaaagtgatgctc

SEQ ID NO: 65256 - DNA, 33 bp, Homo sapien
ttctgaatggaaatcacatacaaagtgatgctc

SEQ ID NO: 65257 - DNA, 33 bp, Homo sapien
ctctaggtgcctcttaaaagtggactcataagc

SEQ ID NO: 65258 - DNA, 33 bp, Homo sapien
ctctaggtgcctcttataagtggactcataagc

SEQ ID NO: 65259 - DNA, 33 bp, Homo sapien
tatacatggtttagaaaaaaagctcccacggat

SEQ ID NO: 65260 - DNA, 33 bp, Homo sapien
tatacatggtttagaagaaaagctcccacggat

SEQ ID NO: 65261 - DNA, 33 bp, Homo sapien
ccttcaaaatctcaaacattaagttgtgttaca

SEQ ID NO: 65262 - DNA, 33 bp, Homo sapien
ccttcaaaatctcaaatattaagttgtgttaca

SEQ ID NO: 65263 - DNA, 33 bp, Homo sapien
acttccctcgggcggaccaggaatctgaaccct

SEQ ID NO: 65264 - DNA, 33 bp, Homo sapien
acttccctcgggcggagcaggaatctgaaccct

SEQ ID NO: 65265 - DNA, 33 bp, Homo sapien
ctccctcattcttactaactttgagatcctggg

SEQ ID NO: 65266 - DNA, 33 bp, Homo sapien
ctccctcattcttactgactttgagatcctggg

SEQ ID NO: 65267 - DNA, 33 bp, Homo sapien
attaatttgcctatgaaagcacaaaattataca

SEQ ID NO: 65268 - DNA, 33 bp, Homo sapien
attaatttgcctatgacagcacaaaattataca

SEQ ID NO: 65269 - DNA, 33 bp, Homo sapien
aataggcaagggaaaacggtatgctggaatttc

SEQ ID NO: 65270 - DNA, 33 bp, Homo sapien
aataggcaagggaaaatggtatgctggaatttc

SEQ ID NO: 65271 - DNA, 33 bp, Homo sapien
aaaggcatttcattccacctaactcctgatgac

SEQ ID NO: 65272 - DNA, 33 bp, Homo sapien
aaaggcatttcattccgcctaactcctgatgac

SEQ ID NO: 65273 - DNA, 33 bp, Homo sapien
gcgaatattctgttggcagtcactggagtgtac

SEQ ID NO: 65274 - DNA, 33 bp, Homo sapien
gcgaatattctgttggtagtcactggagtgtac

SEQ ID NO: 65275 - DNA, 33 bp, Homo sapien
tctgaactgctccaagcaacgctaattaaaaac

SEQ ID NO: 65276 - DNA, 33 bp, Homo sapien
tctgaactgctccaagtaacgctaattaaaaac

SEQ ID NO: 65277 - DNA, 33 bp, Homo sapien
attgtcctttgagccacgaagataacacgggtg

SEQ ID NO: 65278 - DNA, 33 bp, Homo sapien
attgtcctttgagccatgaagataacacgggtg

SEQ ID NO: 65279 - DNA, 33 bp, Homo sapien
acaagtaactgacttcacactctaaacattgca

SEQ ID NO: 65280 - DNA, 33 bp, Homo sapien
acaagtaactgacttcgcactctaaacattgca

SEQ ID NO: 65281 - DNA, 33 bp, Homo sapien
cttgcacaaaaggattcgatacactagtcagag

SEQ ID NO: 65282 - DNA, 33 bp, Homo sapien
cttgcacaaaaggatttgatacactagtcagag

SEQ ID NO: 65283 - DNA, 33 bp, Homo sapien
ttacaaaatagtgtaacagccacaaaacactta

SEQ ID NO: 65284 - DNA, 33 bp, Homo sapien
ttacaaaatagtgtaagagccacaaaacactta

SEQ ID NO: 65285 - DNA, 33 bp, Homo sapien
acatggcctcagtatccaagccctaccagttac

SEQ ID NO: 65286 - DNA, 33 bp, Homo sapien
acatggcctcagtatcgaagccctaccagttac

SEQ ID NO: 65287 - DNA, 33 bp, Homo sapien
tttccacaaaagaatcaaagtttcccgagttgt

SEQ ID NO: 65288 - DNA, 33 bp, Homo sapien
tttccacaaaagaatcgaagtttcccgagttgt

SEQ ID NO: 65289 - DNA, 33 bp, Homo sapien
acgccattcatatgaaatgtttagcgtcattac

SEQ ID NO: 65290 - DNA, 33 bp, Homo sapien
acgccattcatatgaagtgtttagcgtcattac

SEQ ID NO: 65291 - DNA, 33 bp, Homo sapien
ctaagattccagcaggaccaacaaaacagacag

SEQ ID NO: 65292 - DNA, 33 bp, Homo sapien
ctaagattccagcagggccaacaaaacagacag

SEQ ID NO: 65293 - DNA, 33 bp, Homo sapien
tggcgagatactgagaagcacaatccaaccaac

SEQ ID NO: 65294 - DNA, 33 bp, Homo sapien
tggcgagatactgagaggcacaatccaaccaac

SEQ ID NO: 65295 - DNA, 33 bp, Homo sapien
tttccaaaaggtagacacattttcagaatgcta

SEQ ID NO: 65296 - DNA, 33 bp, Homo sapien
tttccaaaaggtagacgcattttcagaatgcta

SEQ ID NO: 65297 - DNA, 33 bp, Homo sapien
attttcatgaaatctccctagtatgtgttcttt

SEQ ID NO: 65298 - DNA, 33 bp, Homo sapien
attttcatgaaatctctctagtatgtgttcttt

SEQ ID NO: 65299 - DNA, 33 bp, Homo sapien
tgagtgcgatatgctacggcagacagttatctc

SEQ ID NO: 65300 - DNA, 33 bp, Homo sapien
tgagtgcgatatgctatggcagacagttatctc

SEQ ID NO: 65301 - DNA, 33 bp, Homo sapien
cttattgtccccggtcaatcctagctcacaggt

SEQ ID NO: 65302 - DNA, 33 bp, Homo sapien
cttattgtccccggtcgatcctagctcacaggt

SEQ ID NO: 65303 - DNA, 33 bp, Homo sapien
ctttatgaaaataaacacaaacattctgaggat

SEQ ID NO: 65304 - DNA, 33 bp, Homo sapien
ctttatgaaaataaacgcaaacattctgaggat

SEQ ID NO: 65305 - DNA, 33 bp, Homo sapien
acctcttttactgtgaaactctacatctgattc

SEQ ID NO: 65306 - DNA, 33 bp, Homo sapien
acctcttttactgtgagactctacatctgattc

SEQ ID NO: 65307 - DNA, 33 bp, Homo sapien
accatcctgaaaaaaacggcatgtgagttgtgc

SEQ ID NO: 65308 - DNA, 33 bp, Homo sapien
accatcctgaaaaaaatggcatgtgagttgtgc

SEQ ID NO: 65309 - DNA, 33 bp, Homo sapien
aaccatataccacaacacaaggtgtattattat

SEQ ID NO: 65310 - DNA, 33 bp, Homo sapien
aaccatataccacaacccaaggtgtattattat

SEQ ID NO: 65311 - DNA, 33 bp, Homo sapien
ggcggaaggcatcaccaacccagaaatcagtgt

SEQ ID NO: 65312 - DNA, 33 bp, Homo sapien
ggcggaaggcatcaccgacccagaaatcagtgt

SEQ ID NO: 65313 - DNA, 33 bp, Homo sapien
cactgaatctaaaaccagagttatgctttctgt

SEQ ID NO: 65314 - DNA, 33 bp, Homo sapien
cactgaatctaaaaccggagttatgctttctgt

SEQ ID NO: 65315 - DNA, 33 bp, Homo sapien
tatgaggatacaatgaaaagacggctttctgca

SEQ ID NO: 65316 - DNA, 33 bp, Homo sapien
tatgaggatacaatgagaagacggctttctgca

SEQ ID NO: 65317 - DNA, 33 bp, Homo sapien
ctcaaattaagataagccctgactgaactggcc

SEQ ID NO: 65318 - DNA, 33 bp, Homo sapien
ctcaaattaagataagtcctgactgaactggcc

SEQ ID NO: 65319 - DNA, 33 bp, Homo sapien
aataatgttattatcaataggtgtcatgtaaac

SEQ ID NO: 65320 - DNA, 33 bp, Homo sapien
aataatgttattatcagtaggtgtcatgtaaac

SEQ ID NO: 65321 - DNA, 33 bp, Homo sapien
gtggttgttatagataaaaatattggagactag

SEQ ID NO: 65322 - DNA, 33 bp, Homo sapien
gtggttgttatagatacaaatattggagactag

SEQ ID NO: 65323 - DNA, 33 bp, Homo sapien
aggaactctgaaatccacacagtatcttgcctt

SEQ ID NO: 65324 - DNA, 33 bp, Homo sapien
aggaactctgaaatccgcacagtatcttgcctt

SEQ ID NO: 65325 - DNA, 33 bp, Homo sapien
tgtaccttctacatcactaatccattgttacca

SEQ ID NO: 65326 - DNA, 33 bp, Homo sapien
tgtaccttctacatcattaatccattgttacca

SEQ ID NO: 65327 - DNA, 33 bp, Homo sapien
gttgtagtgttcacaaatcaattcttagaaatg

SEQ ID NO: 65328 - DNA, 33 bp, Homo sapien
gttgtagtgttcacaagtcaattcttagaaatg

SEQ ID NO: 65329 - DNA, 33 bp, Homo sapien
cttttgaactatcgaacacggttttttgcttaa

SEQ ID NO: 65330 - DNA, 33 bp, Homo sapien
cttttgaactatcgaatacggttttttgcttaa

SEQ ID NO: 65331 - DNA, 33 bp, Homo sapien
tcttccaacgaagatacatagaaccttttattc

SEQ ID NO: 65332 - DNA, 33 bp, Homo sapien
tcttccaacgaagatatatagaaccttttattc

SEQ ID NO: 65333 - DNA, 33 bp, Homo sapien
gtctcttcagcctggcagacaatccagttttga

SEQ ID NO: 65334 - DNA, 33 bp, Homo sapien
gtctcttcagcctggcggacaatccagttttga

SEQ ID NO: 65335 - DNA, 33 bp, Homo sapien
agttcatcctggataacagattgacaggacaaa

SEQ ID NO: 65336 - DNA, 33 bp, Homo sapien
agttcatcctggataagagattgacaggacaaa

SEQ ID NO: 65337 - DNA, 33 bp, Homo sapien
tgaagaaggccatccaacatcctatagaccaca

SEQ ID NO: 65338 - DNA, 33 bp, Homo sapien
tgaagaaggccatccagcatcctatagaccaca

SEQ ID NO: 65339 - DNA, 33 bp, Homo sapien
gctcttcaggtagccacgctaatatactgtgga

SEQ ID NO: 65340 - DNA, 33 bp, Homo sapien
gctcttcaggtagccaggctaatatactgtgga

SEQ ID NO: 65341 - DNA, 33 bp, Homo sapien
atcagtcaggaaacccaaatgctgattccaact

SEQ ID NO: 65342 - DNA, 33 bp, Homo sapien
atcagtcaggaaacccgaatgctgattccaact

SEQ ID NO: 65343 - DNA, 33 bp, Homo sapien
aaatcatttcaccaacagagtgtattagtccgt

SEQ ID NO: 65344 - DNA, 33 bp, Homo sapien
aaatcatttcaccaacggagtgtattagtccgt

SEQ ID NO: 65345 - DNA, 33 bp, Homo sapien
tcaaatttgtgacatacacagtaagcaatgaac

SEQ ID NO: 65346 - DNA, 33 bp, Homo sapien
tcaaatttgtgacatatacagtaagcaatgaac

SEQ ID NO: 65347 - DNA, 33 bp, Homo sapien
ccagagcagaactcacagggttggtgcttgttc

SEQ ID NO: 65348 - DNA, 33 bp, Homo sapien
ccagagcagaactcacggggttggtgcttgttc

SEQ ID NO: 65349 - DNA, 33 bp, Homo sapien
tatctatagctttaaaacagaatattattgcac

SEQ ID NO: 65350 - DNA, 33 bp, Homo sapien
tatctatagctttaaagcagaatattattgcac

SEQ ID NO: 65351 - DNA, 33 bp, Homo sapien
atgacttctcgcattcgaaataaattaatcttg

SEQ ID NO: 65352 - DNA, 33 bp, Homo sapien
atgacttctcgcattctaaataaattaatcttg

SEQ ID NO: 65353 - DNA, 33 bp, Homo sapien
tccatggactccttcaactcctgaacaagacaa

SEQ ID NO: 65354 - DNA, 33 bp, Homo sapien
tccatggactccttcacctcctgaacaagacaa

SEQ ID NO: 65355 - DNA, 33 bp, Homo sapien
gcatcctctaatgatcccccaaaacagaagtca

SEQ ID NO: 65356 - DNA, 33 bp, Homo sapien
gcatcctctaatgatctcccaaaacagaagtca

SEQ ID NO: 65357 - DNA, 33 bp, Homo sapien
gtcttacgacagagccaaggaggggggaaactg

SEQ ID NO: 65358 - DNA, 33 bp, Homo sapien
gtcttacgacagagccgaggaggggggaaactg

SEQ ID NO: 65359 - DNA, 33 bp, Homo sapien
gttagatcttcatgccaagagcaattggaagcc

SEQ ID NO: 65360 - DNA, 33 bp, Homo sapien
gttagatcttcatgccgagagcaattggaagcc

SEQ ID NO: 65361 - DNA, 33 bp, Homo sapien
tgtgtttttccaacttaaagttctatgacactg

SEQ ID NO: 65362 - DNA, 33 bp, Homo sapien
tgtgtttttccaacttgaagttctatgacactg

SEQ ID NO: 65363 - DNA, 33 bp, Homo sapien
tgaaggatgtggccaaatgaagtccgacgggag

SEQ ID NO: 65364 - DNA, 33 bp, Homo sapien
tgaaggatgtggccaagtgaagtccgacgggag

SEQ ID NO: 65365 - DNA, 33 bp, Homo sapien
ttcctggtaagagaccagagacccaatttcagg

SEQ ID NO: 65366 - DNA, 33 bp, Homo sapien
ttcctggtaagagaccggagacccaatttcagg

SEQ ID NO: 65367 - DNA, 33 bp, Homo sapien
ttcaagtaactggaccaaagtaccttaatcctt

SEQ ID NO: 65368 - DNA, 33 bp, Homo sapien
ttcaagtaactggaccgaagtaccttaatcctt

SEQ ID NO: 65369 - DNA, 33 bp, Homo sapien
gcctcacaaggacaaacgtaaactcttgaacac

SEQ ID NO: 65370 - DNA, 33 bp, Homo sapien
gcctcacaaggacaaatgtaaactcttgaacac

SEQ ID NO: 65371 - DNA, 33 bp, Homo sapien
ggctctttgacttgggacaaatgattacctgct

SEQ ID NO: 65372 - DNA, 33 bp, Homo sapien
ggctctttgacttggggcaaatgattacctgct

SEQ ID NO: 65373 - DNA, 33 bp, Homo sapien
gcttctccaaagcggccaccattgaaagccata

SEQ ID NO: 65374 - DNA, 33 bp, Homo sapien
gcttctccaaagcggcgaccattgaaagccata

SEQ ID NO: 65375 - DNA, 33 bp, Homo sapien
tgtaatctggtcttgaagctccaggaatctgtc

SEQ ID NO: 65376 - DNA, 33 bp, Homo sapien
tgtaatctggtcttgacgctccaggaatctgtc

SEQ ID NO: 65377 - DNA, 33 bp, Homo sapien
aagagaaatccaaggaagtatctcagggtttca

SEQ ID NO: 65378 - DNA, 33 bp, Homo sapien
aagagaaatccaaggaggtatctcagggtttca

SEQ ID NO: 65379 - DNA, 33 bp, Homo sapien
tcagagctgacggtcacggtctctctctaggtg

SEQ ID NO: 65380 - DNA, 33 bp, Homo sapien
tcagagctgacggtcatggtctctctctaggtg

SEQ ID NO: 65381 - DNA, 33 bp, Homo sapien
atctactgtgtgccaaggaccgtgctaagtgct

SEQ ID NO: 65382 - DNA, 33 bp, Homo sapien
atctactgtgtgccaatgaccgtgctaagtgct

SEQ ID NO: 65383 - DNA, 33 bp, Homo sapien
tttccatctttggaaccgaagctttgaggagtg

SEQ ID NO: 65384 - DNA, 33 bp, Homo sapien
tttccatctttggaactgaagctttgaggagtg

SEQ ID NO: 65385 - DNA, 33 bp, Homo sapien
tcaaagtgctatggcaaatgaggtccagtgtct

SEQ ID NO: 65386 - DNA, 33 bp, Homo sapien
tcaaagtgctatggcagatgaggtccagtgtct

SEQ ID NO: 65387 - DNA, 33 bp, Homo sapien
agtaaaattttgcagacgatactacagagccta

SEQ ID NO: 65388 - DNA, 33 bp, Homo sapien
agtaaaattttgcagatgatactacagagccta

SEQ ID NO: 65389 - DNA, 33 bp, Homo sapien
tagaatcatctgaccacaaaatcacaagctaaa

SEQ ID NO: 65390 - DNA, 33 bp, Homo sapien
tagaatcatctgaccataaaatcacaagctaaa

SEQ ID NO: 65391 - DNA, 33 bp, Homo sapien
taaacattgttctgaacagtgagcacactgacc

SEQ ID NO: 65392 - DNA, 33 bp, Homo sapien
taaacattgttctgaatagtgagcacactgacc

SEQ ID NO: 65393 - DNA, 33 bp, Homo sapien
tggcttgtcattaccactgataactgaaggaaa

SEQ ID NO: 65394 - DNA, 33 bp, Homo sapien
tggcttgtcattaccattgataactgaaggaaa

SEQ ID NO: 65395 - DNA, 33 bp, Homo sapien
cttaatatctcagctacaaaacaaggtaagaac

SEQ ID NO: 65396 - DNA, 33 bp, Homo sapien
cttaatatctcagctataaaacaaggtaagaac

SEQ ID NO: 65397 - DNA, 33 bp, Homo sapien
actcctctgcctactacatcacacccatttcct

SEQ ID NO: 65398 - DNA, 33 bp, Homo sapien
actcctctgcctactatatcacacccatttcct

SEQ ID NO: 65399 - DNA, 33 bp, Homo sapien
taatcttccccaaatagatctcccttactagca

SEQ ID NO: 65400 - DNA, 33 bp, Homo sapien
taatcttccccaaatatatctcccttactagca

SEQ ID NO: 65401 - DNA, 33 bp, Homo sapien
gcaggcatggtttcagcctcaattgtttacaag

SEQ ID NO: 65402 - DNA, 33 bp, Homo sapien
gcaggcatggtttcagtctcaattgtttacaag

SEQ ID NO: 65403 - DNA, 33 bp, Homo sapien
catgttgtgctaaggacacctaccagaatttgt

SEQ ID NO: 65404 - DNA, 33 bp, Homo sapien
catgttgtgctaaggatacctaccagaatttgt

SEQ ID NO: 65405 - DNA, 33 bp, Homo sapien
tttgttcaaaatgaaacctctgattcaggattt

SEQ ID NO: 65406 - DNA, 33 bp, Homo sapien
tttgttcaaaatgaaagctctgattcaggattt

SEQ ID NO: 65407 - DNA, 33 bp, Homo sapien
tattcctttctatacaataaaccagcacataaa

SEQ ID NO: 65408 - DNA, 33 bp, Homo sapien
tattcctttctatacagtaaaccagcacataaa

SEQ ID NO: 65409 - DNA, 33 bp, Homo sapien
gctactctgctactcacatgggcttcctctctg

SEQ ID NO: 65410 - DNA, 33 bp, Homo sapien
gctactctgctactcagatgggcttcctctctg

SEQ ID NO: 65411 - DNA, 33 bp, Homo sapien
ccttagaagctgaaagaaaagcaatacagagag

SEQ ID NO: 65412 - DNA, 33 bp, Homo sapien
ccttagaagctgaaaggaaagcaatacagagag

SEQ ID NO: 65413 - DNA, 33 bp, Homo sapien
tttaaaagcaaaaaatgatttccatgacaattc

SEQ ID NO: 65414 - DNA, 33 bp, Homo sapien
tttaaaagcaaaaaattatttccatgacaattc

SEQ ID NO: 65415 - DNA, 33 bp, Homo sapien
tttcttagtttccccaataaatgcgcatttatt

SEQ ID NO: 65416 - DNA, 33 bp, Homo sapien
tttcttagtttccccagtaaatgcgcatttatt

SEQ ID NO: 65417 - DNA, 33 bp, Homo sapien
aaggcatttctacaacaaacccatgctaatgtg

SEQ ID NO: 65418 - DNA, 33 bp, Homo sapien
aaggcatttctacaacgaacccatgctaatgtg

SEQ ID NO: 65419 - DNA, 33 bp, Homo sapien
ctcaatcgtaaaagtccgacacggctggtcaca

SEQ ID NO: 65420 - DNA, 33 bp, Homo sapien
ctcaatcgtaaaagtctgacacggctggtcaca

SEQ ID NO: 65421 - DNA, 33 bp, Homo sapien
taggaaccaggccacacgacaggagtgagtgca

SEQ ID NO: 65422 - DNA, 33 bp, Homo sapien
taggaaccaggccacatgacaggagtgagtgca

SEQ ID NO: 65423 - DNA, 33 bp, Homo sapien
aatacccagtccccacaaatgaacacttacact

SEQ ID NO: 65424 - DNA, 33 bp, Homo sapien
aatacccagtccccactaatgaacacttacact

SEQ ID NO: 65425 - DNA, 33 bp, Homo sapien
ggtttgggttttctgaccttggacaagtctcct

SEQ ID NO: 65426 - DNA, 33 bp, Homo sapien
ggtttgggttttctgatcttggacaagtctcct

SEQ ID NO: 65427 - DNA, 33 bp, Homo sapien
ggctcctccgaactgacatttggagatgttttt

SEQ ID NO: 65428 - DNA, 33 bp, Homo sapien
ggctcctccgaactgatatttggagatgttttt

SEQ ID NO: 65429 - DNA, 33 bp, Homo sapien
tcactcagttcagacccgcagaaatgtttttgt

SEQ ID NO: 65430 - DNA, 33 bp, Homo sapien
tcactcagttcagacctgcagaaatgtttttgt

SEQ ID NO: 65431 - DNA, 33 bp, Homo sapien
gagattccagttgaaccgtcaggctctgagaag

SEQ ID NO: 65432 - DNA, 33 bp, Homo sapien
gagattccagttgaactgtcaggctctgagaag

SEQ ID NO: 65433 - DNA, 33 bp, Homo sapien
ttttttttgtgttacaagtttagagataccata

SEQ ID NO: 65434 - DNA, 33 bp, Homo sapien
ttttttttgtgttacaggtttagagataccata

SEQ ID NO: 65435 - DNA, 33 bp, Homo sapien
ctcacagctgtaataactgagcttcagatttgc

SEQ ID NO: 65436 - DNA, 33 bp, Homo sapien
ctcacagctgtaataattgagcttcagatttgc

SEQ ID NO: 65437 - DNA, 33 bp, Homo sapien
ctttgaatctttcttacacacaggactttgagg

SEQ ID NO: 65438 - DNA, 33 bp, Homo sapien
ctttgaatctttcttagacacaggactttgagg

SEQ ID NO: 65439 - DNA, 33 bp, Homo sapien
ggaatttctgggtctaaatatgcatgcacttta

SEQ ID NO: 65440 - DNA, 33 bp, Homo sapien
ggaatttctgggtctacatatgcatgcacttta

SEQ ID NO: 65441 - DNA, 33 bp, Homo sapien
taatacccatagaagcgcttttgtggccaggca

SEQ ID NO: 65442 - DNA, 33 bp, Homo sapien
taatacccatagaagctcttttgtggccaggca

SEQ ID NO: 65443 - DNA, 33 bp, Homo sapien
ccctgttgcaaagtaccacttattactattgtg

SEQ ID NO: 65444 - DNA, 33 bp, Homo sapien
ccctgttgcaaagtactacttattactattgtg

SEQ ID NO: 65445 - DNA, 33 bp, Homo sapien
attagtagatgccttaaaacctactagaaagtt

SEQ ID NO: 65446 - DNA, 33 bp, Homo sapien
attagtagatgccttagaacctactagaaagtt

SEQ ID NO: 65447 - DNA, 33 bp, Homo sapien
tcctgacccccagatacgtatgtgaactatttc

SEQ ID NO: 65448 - DNA, 33 bp, Homo sapien
tcctgacccccagatatgtatgtgaactatttc

SEQ ID NO: 65449 - DNA, 33 bp, Homo sapien
catctgctgccactcccgcatgtactcagcttg

SEQ ID NO: 65450 - DNA, 33 bp, Homo sapien
catctgctgccactcctgcatgtactcagcttg

SEQ ID NO: 65451 - DNA, 33 bp, Homo sapien
cctctggagagatttacagtaattgcaaacaat

SEQ ID NO: 65452 - DNA, 33 bp, Homo sapien
cctctggagagatttatagtaattgcaaacaat

SEQ ID NO: 65453 - DNA, 33 bp, Homo sapien
gttgccatgagacaaacaggtgcaagctggtcc

SEQ ID NO: 65454 - DNA, 33 bp, Homo sapien
gttgccatgagacaaagaggtgcaagctggtcc

SEQ ID NO: 65455 - DNA, 33 bp, Homo sapien
attcatggcttcatgacggtatagagagtgaca

SEQ ID NO: 65456 - DNA, 33 bp, Homo sapien
attcatggcttcatgatggtatagagagtgaca

SEQ ID NO: 65457 - DNA, 33 bp, Homo sapien
atttattgaatgcccacccaccgtaataggagc

SEQ ID NO: 65458 - DNA, 33 bp, Homo sapien
atttattgaatgcccatccaccgtaataggagc

SEQ ID NO: 65459 - DNA, 33 bp, Homo sapien
caacaaaagtagtatgaaggtcatttgattatt

SEQ ID NO: 65460 - DNA, 33 bp, Homo sapien
caacaaaagtagtatggaggtcatttgattatt

SEQ ID NO: 65461 - DNA, 33 bp, Homo sapien
gaatattcaaaaacaaccattcatacaaattta

SEQ ID NO: 65462 - DNA, 33 bp, Homo sapien
gaatattcaaaaacaagcattcatacaaattta

SEQ ID NO: 65463 - DNA, 33 bp, Homo sapien
aagcaccttactgtcaatattttgggccattct

SEQ ID NO: 65464 - DNA, 33 bp, Homo sapien
aagcaccttactgtcagtattttgggccattct

SEQ ID NO: 65465 - DNA, 33 bp, Homo sapien
agcgattagaaatggaaacattggctacaaaac

SEQ ID NO: 65466 - DNA, 33 bp, Homo sapien
agcgattagaaatggagacattggctacaaaac

SEQ ID NO: 65467 - DNA, 33 bp, Homo sapien
aagaatctgtaaaaacagttgtacagggtagtg

SEQ ID NO: 65468 - DNA, 33 bp, Homo sapien
aagaatctgtaaaaactgttgtacagggtagtg

SEQ ID NO: 65469 - DNA, 33 bp, Homo sapien
gtatttagattttttcaccaagtgacaacaact

SEQ ID NO: 65470 - DNA, 33 bp, Homo sapien
gtatttagattttttctccaagtgacaacaact

SEQ ID NO: 65471 - DNA, 33 bp, Homo sapien
attcttattgagatcacctaatacctctctgta

SEQ ID NO: 65472 - DNA, 33 bp, Homo sapien
attcttattgagatcatctaatacctctctgta

SEQ ID NO: 65473 - DNA, 33 bp, Homo sapien
catcaggtacatataaaatcaggttattgtaga

SEQ ID NO: 65474 - DNA, 33 bp, Homo sapien
catcaggtacatataagatcaggttattgtaga

SEQ ID NO: 65475 - DNA, 33 bp, Homo sapien
taataggtagaattgcagaaaataatgaggaaa

SEQ ID NO: 65476 - DNA, 33 bp, Homo sapien
taataggtagaattgcggaaaataatgaggaaa

SEQ ID NO: 65477 - DNA, 33 bp, Homo sapien
agaaaaatcaggagagaagatgtctgggtgcag

SEQ ID NO: 65478 - DNA, 33 bp, Homo sapien
agaaaaatcaggagaggagatgtctgggtgcag

SEQ ID NO: 65479 - DNA, 33 bp, Homo sapien
aatgaatcctgttgcactgaattggaattggaa

SEQ ID NO: 65480 - DNA, 33 bp, Homo sapien
aatgaatcctgttgcattgaattggaattggaa

SEQ ID NO: 65481 - DNA, 33 bp, Homo sapien
tcatgttttctcttccccttctaaggatgtgtg

SEQ ID NO: 65482 - DNA, 33 bp, Homo sapien
tcatgttttctcttcctcttctaaggatgtgtg

SEQ ID NO: 65483 - DNA, 33 bp, Homo sapien
tcttttgttaattgtaggtgttgcagatatctt

SEQ ID NO: 65484 - DNA, 33 bp, Homo sapien
tcttttgttaattgtatgtgttgcagatatctt

SEQ ID NO: 65485 - DNA, 33 bp, Homo sapien
gtgtgattgaaaatgaacatgacgggagaagtt

SEQ ID NO: 65486 - DNA, 33 bp, Homo sapien
gtgtgattgaaaatgatcatgacgggagaagtt

SEQ ID NO: 65487 - DNA, 33 bp, Homo sapien
tcagtaaaatatctaaagctcgttgcagtgctg

SEQ ID NO: 65488 - DNA, 33 bp, Homo sapien
tcagtaaaatatctaaggctcgttgcagtgctg

SEQ ID NO: 65489 - DNA, 33 bp, Homo sapien
taggaggtaactcaaaatgggtacatacaaaag

SEQ ID NO: 65490 - DNA, 33 bp, Homo sapien
taggaggtaactcaaactgggtacatacaaaag

SEQ ID NO: 65491 - DNA, 33 bp, Homo sapien
gtacatacaaaagcacactgtagtttgagtggt

SEQ ID NO: 65492 - DNA, 33 bp, Homo sapien
gtacatacaaaagcacgctgtagtttgagtggt

SEQ ID NO: 65493 - DNA, 33 bp, Homo sapien
cactatggccctactcaaatgctcagacttgag

SEQ ID NO: 65494 - DNA, 33 bp, Homo sapien
cactatggccctactcgaatgctcagacttgag

SEQ ID NO: 65495 - DNA, 33 bp, Homo sapien
ttgagagtctaatgaaatctgtggatacttcca

SEQ ID NO: 65496 - DNA, 33 bp, Homo sapien
ttgagagtctaatgaattctgtggatacttcca

SEQ ID NO: 65497 - DNA, 33 bp, Homo sapien
ccagcaaggcctcacacggttactttacatcga

SEQ ID NO: 65498 - DNA, 33 bp, Homo sapien
ccagcaaggcctcacatggttactttacatcga

SEQ ID NO: 65499 - DNA, 33 bp, Homo sapien
atatgaaagcattgtcaaaattagggattttct

SEQ ID NO: 65500 - DNA, 33 bp, Homo sapien
atatgaaagcattgtcgaaattagggattttct

SEQ ID NO: 65501 - DNA, 33 bp, Homo sapien
ccactttcctattaaggatacaagctgaaagtt

SEQ ID NO: 65502 - DNA, 33 bp, Homo sapien
ccactttcctattaagtatacaagctgaaagtt

SEQ ID NO: 65503 - DNA, 33 bp, Homo sapien
gaatcacttctactcacgtctcattggttataa

SEQ ID NO: 65504 - DNA, 33 bp, Homo sapien
gaatcacttctactcatgtctcattggttataa

SEQ ID NO: 65505 - DNA, 33 bp, Homo sapien
gtattttttttccagacggatagacagtccacc

SEQ ID NO: 65506 - DNA, 33 bp, Homo sapien
gtattttttttccagatggatagacagtccacc

SEQ ID NO: 65507 - DNA, 33 bp, Homo sapien
ctcaatgaatttttaccaggtacattttgataa

SEQ ID NO: 65508 - DNA, 33 bp, Homo sapien
ctcaatgaatttttacgaggtacattttgataa

SEQ ID NO: 65509 - DNA, 33 bp, Homo sapien
gactatacaggtataaaaagctagctctgttta

SEQ ID NO: 65510 - DNA, 33 bp, Homo sapien
gactatacaggtataagaagctagctctgttta

SEQ ID NO: 65511 - DNA, 33 bp, Homo sapien
ttttgttctgttcttgaataaaaatcaatgaca

SEQ ID NO: 65512 - DNA, 33 bp, Homo sapien
ttttgttctgttcttgcataaaaatcaatgaca

SEQ ID NO: 65513 - DNA, 33 bp, Homo sapien
tgggctgctcaggccaaaggatttccaagtttt

SEQ ID NO: 65514 - DNA, 33 bp, Homo sapien
tgggctgctcaggccataggatttccaagtttt

SEQ ID NO: 65515 - DNA, 33 bp, Homo sapien
tcaaggtgattaggcacgatttctggccctgag

SEQ ID NO: 65516 - DNA, 33 bp, Homo sapien
tcaaggtgattaggcatgatttctggccctgag

SEQ ID NO: 65517 - DNA, 33 bp, Homo sapien
gtcgtagcatctgtcacatcgtgtggcaataat

SEQ ID NO: 65518 - DNA, 33 bp, Homo sapien
gtcgtagcatctgtcatatcgtgtggcaataat

SEQ ID NO: 65519 - DNA, 33 bp, Homo sapien
ctagaccccgaggctcccaaaggaacagagtga

SEQ ID NO: 65520 - DNA, 33 bp, Homo sapien
ctagaccccgaggctctcaaaggaacagagtga

SEQ ID NO: 65521 - DNA, 33 bp, Homo sapien
ggcttgggaggaaagccgcccacaattaaccta

SEQ ID NO: 65522 - DNA, 33 bp, Homo sapien
ggcttgggaggaaagctgcccacaattaaccta

SEQ ID NO: 65523 - DNA, 33 bp, Homo sapien
gggtataacagcagtacgtctggaacaacaatg

SEQ ID NO: 65524 - DNA, 33 bp, Homo sapien
gggtataacagcagtatgtctggaacaacaatg

SEQ ID NO: 65525 - DNA, 33 bp, Homo sapien
cccagggtcatgcaacaaagaattgaattatgt

SEQ ID NO: 65526 - DNA, 33 bp, Homo sapien
cccagggtcatgcaacgaagaattgaattatgt

SEQ ID NO: 65527 - DNA, 33 bp, Homo sapien
tttggttatctgggataaaaacagtctgcctct

SEQ ID NO: 65528 - DNA, 33 bp, Homo sapien
tttggttatctgggatcaaaacagtctgcctct

SEQ ID NO: 65529 - DNA, 33 bp, Homo sapien
gagaattctctaaaaaatttccatggcatttgg

SEQ ID NO: 65530 - DNA, 33 bp, Homo sapien
gagaattctctaaaaagtttccatggcatttgg

SEQ ID NO: 65531 - DNA, 33 bp, Homo sapien
gtatttctgacttaggaatgttatttttattat

SEQ ID NO: 65532 - DNA, 33 bp, Homo sapien
gtatttctgacttaggtatgttatttttattat

SEQ ID NO: 65533 - DNA, 33 bp, Homo sapien
agtggaatggcttagaataagtatacacttgaa

SEQ ID NO: 65534 - DNA, 33 bp, Homo sapien
agtggaatggcttagattaagtatacacttgaa

SEQ ID NO: 65535 - DNA, 33 bp, Homo sapien
aagatgagagaatggaaaaactgcaaaagtggt

SEQ ID NO: 65536 - DNA, 33 bp, Homo sapien
aagatgagagaatggagaaactgcaaaagtggt

SEQ ID NO: 65537 - DNA, 33 bp, Homo sapien
ggagccaggaggcatcaatctgtgttttgaaaa

SEQ ID NO: 65538 - DNA, 33 bp, Homo sapien
ggagccaggaggcatcgatctgtgttttgaaaa

SEQ ID NO: 65539 - DNA, 33 bp, Homo sapien
agttaacaaatagcaacgaagctaccaaagcac

SEQ ID NO: 65540 - DNA, 33 bp, Homo sapien
agttaacaaatagcaaggaagctaccaaagcac

SEQ ID NO: 65541 - DNA, 33 bp, Homo sapien
tcaatcagcttcttaccgatctagcttccaaat

SEQ ID NO: 65542 - DNA, 33 bp, Homo sapien
tcaatcagcttcttactgatctagcttccaaat

SEQ ID NO: 65543 - DNA, 33 bp, Homo sapien
cctgaggattgtgaaactggaccaggatagctc

SEQ ID NO: 65544 - DNA, 33 bp, Homo sapien
cctgaggattgtgaaattggaccaggatagctc

SEQ ID NO: 65545 - DNA, 33 bp, Homo sapien
tgatcagtaacacataccaatcgtcaaaccctt

SEQ ID NO: 65546 - DNA, 33 bp, Homo sapien
tgatcagtaacacatagcaatcgtcaaaccctt

SEQ ID NO: 65547 - DNA, 33 bp, Homo sapien
cattccctcccggttccctctgaggcagccagg

SEQ ID NO: 65548 - DNA, 33 bp, Homo sapien
cattccctcccggttctctctgaggcagccagg

SEQ ID NO: 65549 - DNA, 33 bp, Homo sapien
aggcgctgcaaccaacaggcatatctcaccacc

SEQ ID NO: 65550 - DNA, 33 bp, Homo sapien
aggcgctgcaaccaacgggcatatctcaccacc

SEQ ID NO: 65551 - DNA, 33 bp, Homo sapien
ggtaaacaaaagataaatgcagacatggtacca

SEQ ID NO: 65552 - DNA, 33 bp, Homo sapien
ggtaaacaaaagataactgcagacatggtacca

SEQ ID NO: 65553 - DNA, 33 bp, Homo sapien
ctcttcataatcaaaaatccagtccaaatcagc

SEQ ID NO: 65554 - DNA, 33 bp, Homo sapien
ctcttcataatcaaaagtccagtccaaatcagc

SEQ ID NO: 65555 - DNA, 33 bp, Homo sapien
ccagaatggaagactactaggcaaatcaggagg

SEQ ID NO: 65556 - DNA, 33 bp, Homo sapien
ccagaatggaagactagtaggcaaatcaggagg

SEQ ID NO: 65557 - DNA, 33 bp, Homo sapien
tagaggaggtgtcactcaaagtctcaggcaatg

SEQ ID NO: 65558 - DNA, 33 bp, Homo sapien
tagaggaggtgtcactgaaagtctcaggcaatg

SEQ ID NO: 65559 - DNA, 33 bp, Homo sapien
ggtagcagctctgggcaacctaatggttcaagg

SEQ ID NO: 65560 - DNA, 33 bp, Homo sapien
ggtagcagctctgggcgacctaatggttcaagg

SEQ ID NO: 65561 - DNA, 33 bp, Homo sapien
aaagtaggtgactttcaatcccacaagtacatg

SEQ ID NO: 65562 - DNA, 33 bp, Homo sapien
aaagtaggtgactttcgatcccacaagtacatg

SEQ ID NO: 65563 - DNA, 33 bp, Homo sapien
aatccaggtctgtggacccagatgtgtgtttta

SEQ ID NO: 65564 - DNA, 33 bp, Homo sapien
aatccaggtctgtggatccagatgtgtgtttta

SEQ ID NO: 65565 - DNA, 33 bp, Homo sapien
tggtgtcttgttggaaagtgtccactgctagag

SEQ ID NO: 65566 - DNA, 33 bp, Homo sapien
tggtgtcttgttggaaggtgtccactgctagag

SEQ ID NO: 65567 - DNA, 33 bp, Homo sapien
agagcagtaattgggaaccctggctgcgtatca

SEQ ID NO: 65568 - DNA, 33 bp, Homo sapien
agagcagtaattgggagccctggctgcgtatca

SEQ ID NO: 65569 - DNA, 33 bp, Homo sapien
gatatgtatcactgaaacttggagaacagggct

SEQ ID NO: 65570 - DNA, 33 bp, Homo sapien
gatatgtatcactgaagcttggagaacagggct

SEQ ID NO: 65571 - DNA, 33 bp, Homo sapien
tgtcccttgcttctctcaaggattctaagcaaa

SEQ ID NO: 65572 - DNA, 33 bp, Homo sapien
tgtcccttgcttctctgaaggattctaagcaaa

SEQ ID NO: 65573 - DNA, 33 bp, Homo sapien
ggggtagagccacttgcaagccgccttcttgcc

SEQ ID NO: 65574 - DNA, 33 bp, Homo sapien
ggggtagagccacttgtaagccgccttcttgcc

SEQ ID NO: 65575 - DNA, 33 bp, Homo sapien
gccctgagtgtcgacaactggtttactgtgaat

SEQ ID NO: 65576 - DNA, 33 bp, Homo sapien
gccctgagtgtcgacatctggtttactgtgaat

SEQ ID NO: 65577 - DNA, 33 bp, Homo sapien
agactctactgcctaacggtgtggtttatgtta

SEQ ID NO: 65578 - DNA, 33 bp, Homo sapien
agactctactgcctaatggtgtggtttatgtta

SEQ ID NO: 65579 - DNA, 33 bp, Homo sapien
tgagctggccaggacacgatggggtaccctgca

SEQ ID NO: 65580 - DNA, 33 bp, Homo sapien
tgagctggccaggacatgatggggtaccctgca

SEQ ID NO: 65581 - DNA, 33 bp, Homo sapien
aatctacatcagccaccactgcattgcctctct

SEQ ID NO: 65582 - DNA, 33 bp, Homo sapien
aatctacatcagccacgactgcattgcctctct

SEQ ID NO: 65583 - DNA, 33 bp, Homo sapien
tcagagatataaggaaatacaaggatcaactgg

SEQ ID NO: 65584 - DNA, 33 bp, Homo sapien
tcagagatataaggaagtacaaggatcaactgg

SEQ ID NO: 65585 - DNA, 33 bp, Homo sapien
ccagaagtaggtttaacatggaaagatttataa

SEQ ID NO: 65586 - DNA, 33 bp, Homo sapien
ccagaagtaggtttaatatggaaagatttataa

SEQ ID NO: 65587 - DNA, 33 bp, Homo sapien
gcagggagagagagcaagagcaaccttagaagg

SEQ ID NO: 65588 - DNA, 33 bp, Homo sapien
gcagggagagagagcaggagcaaccttagaagg

SEQ ID NO: 65589 - DNA, 33 bp, Homo sapien
caagaatttcttacaaatatggtgcatgatctg

SEQ ID NO: 65590 - DNA, 33 bp, Homo sapien
caagaatttcttacaagtatggtgcatgatctg

SEQ ID NO: 65591 - DNA, 33 bp, Homo sapien
cagctggactagaatcacctttcagatggccaa

SEQ ID NO: 65592 - DNA, 33 bp, Homo sapien
cagctggactagaatcgcctttcagatggccaa

SEQ ID NO: 65593 - DNA, 33 bp, Homo sapien
ttttgcaggcacctctaagaagatctatacaat

SEQ ID NO: 65594 - DNA, 33 bp, Homo sapien
ttttgcaggcacctctgagaagatctatacaat

SEQ ID NO: 65595 - DNA, 33 bp, Homo sapien
aaactatagtgtcagaaagcagatcattggttg

SEQ ID NO: 65596 - DNA, 33 bp, Homo sapien
aaactatagtgtcagacagcagatcattggttg

SEQ ID NO: 65597 - DNA, 33 bp, Homo sapien
tcccttcaaaccttcagtccggctgcatttctg

SEQ ID NO: 65598 - DNA, 33 bp, Homo sapien
tcccttcaaaccttcattccggctgcatttctg

SEQ ID NO: 65599 - DNA, 33 bp, Homo sapien
tcaggacagcctttctaaagcttggttgaggga

SEQ ID NO: 65600 - DNA, 33 bp, Homo sapien
tcaggacagcctttctgaagcttggttgaggga

SEQ ID NO: 65601 - DNA, 33 bp, Homo sapien
gagcagagacttcaaaaggttatatgaactgcc

SEQ ID NO: 65602 - DNA, 33 bp, Homo sapien
gagcagagacttcaaagggttatatgaactgcc

SEQ ID NO: 65603 - DNA, 33 bp, Homo sapien
acacagagagaacaaacgtaacttgcctaacca

SEQ ID NO: 65604 - DNA, 33 bp, Homo sapien
acacagagagaacaaatgtaacttgcctaacca

SEQ ID NO: 65605 - DNA, 33 bp, Homo sapien
gagctgaagataccccactccgtctctccactt

SEQ ID NO: 65606 - DNA, 33 bp, Homo sapien
gagctgaagataccccgctccgtctctccactt

SEQ ID NO: 65607 - DNA, 33 bp, Homo sapien
aaacaagtaagccatacgaagcggttctagcca

SEQ ID NO: 65608 - DNA, 33 bp, Homo sapien
aaacaagtaagccataggaagcggttctagcca

SEQ ID NO: 65609 - DNA, 33 bp, Homo sapien
ccggaagttcatgaaacgccaagaggagtatta

SEQ ID NO: 65610 - DNA, 33 bp, Homo sapien
ccggaagttcatgaaatgccaagaggagtatta

SEQ ID NO: 65611 - DNA, 33 bp, Homo sapien
atcccatatctgagggaatgcgccaaaggagag

SEQ ID NO: 65612 - DNA, 33 bp, Homo sapien
atcccatatctgagggcatgcgccaaaggagag

SEQ ID NO: 65613 - DNA, 33 bp, Homo sapien
aagcaaggcagggtcagatgtcacagaggcctc

SEQ ID NO: 65614 - DNA, 33 bp, Homo sapien
aagcaaggcagggtcatatgtcacagaggcctc

SEQ ID NO: 65615 - DNA, 33 bp, Homo sapien
gaagaagtgtctcctccagtcacattcagccag

SEQ ID NO: 65616 - DNA, 33 bp, Homo sapien
gaagaagtgtctcctctagtcacattcagccag

SEQ ID NO: 65617 - DNA, 33 bp, Homo sapien
ggctaggtcttaaagaggctaaatcaggcttga

SEQ ID NO: 65618 - DNA, 33 bp, Homo sapien
ggctaggtcttaaagatgctaaatcaggcttga

SEQ ID NO: 65619 - DNA, 33 bp, Homo sapien
tcaggatcttcaccacagagatggcactggacc

SEQ ID NO: 65620 - DNA, 33 bp, Homo sapien
tcaggatcttcaccacggagatggcactggacc

SEQ ID NO: 65621 - DNA, 33 bp, Homo sapien
aaacgctgcttcagaagaagagacctgggtcct

SEQ ID NO: 65622 - DNA, 33 bp, Homo sapien
aaacgctgcttcagaataagagacctgggtcct

SEQ ID NO: 65623 - DNA, 33 bp, Homo sapien
atggataagaaacaaccgtggataaaccacaaa

SEQ ID NO: 65624 - DNA, 33 bp, Homo sapien
atggataagaaacaactgtggataaaccacaaa

SEQ ID NO: 65625 - DNA, 33 bp, Homo sapien
aaagatatgaagacgtaaaacagtttagtaaat

SEQ ID NO: 65626 - DNA, 33 bp, Homo sapien
aaagatatgaagacgttaaacagtttagtaaat

SEQ ID NO: 65627 - DNA, 33 bp, Homo sapien
ttctacaaaaacaacaatctttcaccaactatt

SEQ ID NO: 65628 - DNA, 33 bp, Homo sapien
ttctacaaaaacaacagtctttcaccaactatt

SEQ ID NO: 65629 - DNA, 33 bp, Homo sapien
ccacaggttgtgcagaagaggtcaattagatat

SEQ ID NO: 65630 - DNA, 33 bp, Homo sapien
ccacaggttgtgcagaggaggtcaattagatat

SEQ ID NO: 65631 - DNA, 33 bp, Homo sapien
ggcttcactccgttccacctcaccttgcaaacg

SEQ ID NO: 65632 - DNA, 33 bp, Homo sapien
ggcttcactccgttccgcctcaccttgcaaacg

SEQ ID NO: 65633 - DNA, 33 bp, Homo sapien
actttgggtgctgaacaggggtgaggtatgtgt

SEQ ID NO: 65634 - DNA, 33 bp, Homo sapien
actttgggtgctgaacgggggtgaggtatgtgt

SEQ ID NO: 65635 - DNA, 33 bp, Homo sapien
tccaaatacttctaacagcagaactccctggga

SEQ ID NO: 65636 - DNA, 33 bp, Homo sapien
tccaaatacttctaacggcagaactccctggga

SEQ ID NO: 65637 - DNA, 33 bp, Homo sapien
aacagctctgtgaaaaccaatagaacataatgg

SEQ ID NO: 65638 - DNA, 33 bp, Homo sapien
aacagctctgtgaaaagcaatagaacataatgg

SEQ ID NO: 65639 - DNA, 33 bp, Homo sapien
gtcactctccaaagaaaccctctcggagttgct

SEQ ID NO: 65640 - DNA, 33 bp, Homo sapien
gtcactctccaaagaagccctctcggagttgct

SEQ ID NO: 65641 - DNA, 33 bp, Homo sapien
tcatctcagagtgatagcgacggtgtgcagccg

SEQ ID NO: 65642 - DNA, 33 bp, Homo sapien
tcatctcagagtgatatcgacggtgtgcagccg

SEQ ID NO: 65643 - DNA, 33 bp, Homo sapien
aggctgcacctggttcaaaggtgagcagaaatt

SEQ ID NO: 65644 - DNA, 33 bp, Homo sapien
aggctgcacctggttcgaaggtgagcagaaatt

SEQ ID NO: 65645 - DNA, 33 bp, Homo sapien
agggctaacgcagtaacagaagaatgaatgaat

SEQ ID NO: 65646 - DNA, 33 bp, Homo sapien
agggctaacgcagtaatagaagaatgaatgaat

SEQ ID NO: 65647 - DNA, 33 bp, Homo sapien
catggagtctggaatcaaactgtctatacatat

SEQ ID NO: 65648 - DNA, 33 bp, Homo sapien
catggagtctggaatccaactgtctatacatat

SEQ ID NO: 65649 - DNA, 33 bp, Homo sapien
tttatgatttgtaagtcaagtccattgggacaa

SEQ ID NO: 65650 - DNA, 33 bp, Homo sapien
tttatgatttgtaagtgaagtccattgggacaa

SEQ ID NO: 65651 - DNA, 33 bp, Homo sapien
gtttcaggatggaagacgacataaccattaaga

SEQ ID NO: 65652 - DNA, 33 bp, Homo sapien
gtttcaggatggaagatgacataaccattaaga

SEQ ID NO: 65653 - DNA, 33 bp, Homo sapien
tttgatgtgggcgatacaccgcctggccgagag

SEQ ID NO: 65654 - DNA, 33 bp, Homo sapien
tttgatgtgggcgatataccgcctggccgagag

SEQ ID NO: 65655 - DNA, 33 bp, Homo sapien
ctcactcgctaagtcccgatcatcttttatgaa

SEQ ID NO: 65656 - DNA, 33 bp, Homo sapien
ctcactcgctaagtcctgatcatcttttatgaa

SEQ ID NO: 65657 - DNA, 33 bp, Homo sapien
ggggatgtcccgctgaagattccaattataatg

SEQ ID NO: 65658 - DNA, 33 bp, Homo sapien
ggggatgtcccgctgaggattccaattataatg

SEQ ID NO: 65659 - DNA, 33 bp, Homo sapien
ttccactgtttcagagccacatttttatctagt

SEQ ID NO: 65660 - DNA, 33 bp, Homo sapien
ttccactgtttcagagtcacatttttatctagt

SEQ ID NO: 65661 - DNA, 33 bp, Homo sapien
tgtcacataacctgtaaatatttctagaaggat

SEQ ID NO: 65662 - DNA, 33 bp, Homo sapien
tgtcacataacctgtacatatttctagaaggat

SEQ ID NO: 65663 - DNA, 33 bp, Homo sapien
ccgaaaggcaaagtacagagcagttttatctga

SEQ ID NO: 65664 - DNA, 33 bp, Homo sapien
ccgaaaggcaaagtacggagcagttttatctga

SEQ ID NO: 65665 - DNA, 33 bp, Homo sapien
gacccaagaagacaacagagatcagagaccaca

SEQ ID NO: 65666 - DNA, 33 bp, Homo sapien
gacccaagaagacaacggagatcagagaccaca

SEQ ID NO: 65667 - DNA, 33 bp, Homo sapien
caaagttaaataacacacatataaagcacttac

SEQ ID NO: 65668 - DNA, 33 bp, Homo sapien
caaagttaaataacacgcatataaagcacttac

SEQ ID NO: 65669 - DNA, 33 bp, Homo sapien
ccactattcaaacatccctaccctatccttgca

SEQ ID NO: 65670 - DNA, 33 bp, Homo sapien
ccactattcaaacatctctaccctatccttgca

SEQ ID NO: 65671 - DNA, 33 bp, Homo sapien
gaaagccggatgcatacactgagcaactgcaca

SEQ ID NO: 65672 - DNA, 33 bp, Homo sapien
gaaagccggatgcatatactgagcaactgcaca

SEQ ID NO: 65673 - DNA, 33 bp, Homo sapien
ttaaacaggcgtgaacacggtgccccaatcagg

SEQ ID NO: 65674 - DNA, 33 bp, Homo sapien
ttaaacaggcgtgaacgcggtgccccaatcagg

SEQ ID NO: 65675 - DNA, 33 bp, Homo sapien
acacatactaccttcccacggcagccaagtggt

SEQ ID NO: 65676 - DNA, 33 bp, Homo sapien
acacatactaccttcctacggcagccaagtggt

SEQ ID NO: 65677 - DNA, 33 bp, Homo sapien
gcacatatggtcataaactctcaacactaggtg

SEQ ID NO: 65678 - DNA, 33 bp, Homo sapien
gcacatatggtcataatctctcaacactaggtg

SEQ ID NO: 65679 - DNA, 33 bp, Homo sapien
aggacccagtgacactcaccttgactgggagtc

SEQ ID NO: 65680 - DNA, 33 bp, Homo sapien
aggacccagtgacactgaccttgactgggagtc

SEQ ID NO: 65681 - DNA, 33 bp, Homo sapien
tccaggacaatgtgctaaaacttcccttcaccg

SEQ ID NO: 65682 - DNA, 33 bp, Homo sapien
tccaggacaatgtgctgaaacttcccttcaccg

SEQ ID NO: 65683 - DNA, 33 bp, Homo sapien
ttccacagacagttgaaaactatgaaattggtt

SEQ ID NO: 65684 - DNA, 33 bp, Homo sapien
ttccacagacagttgacaactatgaaattggtt

SEQ ID NO: 65685 - DNA, 33 bp, Homo sapien
cacatcgctcattgctcaatccctggtagcaag

SEQ ID NO: 65686 - DNA, 33 bp, Homo sapien
cacatcgctcattgcttaatccctggtagcaag

SEQ ID NO: 65687 - DNA, 33 bp, Homo sapien
tggaacattgtcctggaaaagaaaaatcttggt

SEQ ID NO: 65688 - DNA, 33 bp, Homo sapien
tggaacattgtcctgggaaagaaaaatcttggt

SEQ ID NO: 65689 - DNA, 33 bp, Homo sapien
ctactactggtaaaaactgagcatccagatgag

SEQ ID NO: 65690 - DNA, 33 bp, Homo sapien
ctactactggtaaaaattgagcatccagatgag

SEQ ID NO: 65691 - DNA, 33 bp, Homo sapien
aattccagtatcaccagaattttctctctccag

SEQ ID NO: 65692 - DNA, 33 bp, Homo sapien
aattccagtatcaccataattttctctctccag

SEQ ID NO: 65693 - DNA, 33 bp, Homo sapien
ccctctgctccatccactccaggctcatggcct

SEQ ID NO: 65694 - DNA, 33 bp, Homo sapien
ccctctgctccatccattccaggctcatggcct

SEQ ID NO: 65695 - DNA, 33 bp, Homo sapien
acccaggtttaatttaagagagacccaggttta

SEQ ID NO: 65696 - DNA, 33 bp, Homo sapien
acccaggtttaatttaggagagacccaggttta

SEQ ID NO: 65697 - DNA, 33 bp, Homo sapien
gtaagaagggatgacaatattattagtggaagg

SEQ ID NO: 65698 - DNA, 33 bp, Homo sapien
gtaagaagggatgacattattattagtggaagg

SEQ ID NO: 65699 - DNA, 33 bp, Homo sapien
cctgagatagtctccacgacaattcttctagag

SEQ ID NO: 65700 - DNA, 33 bp, Homo sapien
cctgagatagtctccatgacaattcttctagag

SEQ ID NO: 65701 - DNA, 33 bp, Homo sapien
gctatggtagaaatgaaaattgtgaggaatttg

SEQ ID NO: 65702 - DNA, 33 bp, Homo sapien
gctatggtagaaatgagaattgtgaggaatttg

SEQ ID NO: 65703 - DNA, 33 bp, Homo sapien
tgacccacataaatcaaaaatggtgtcttgagc

SEQ ID NO: 65704 - DNA, 33 bp, Homo sapien
tgacccacataaatcacaaatggtgtcttgagc

SEQ ID NO: 65705 - DNA, 33 bp, Homo sapien
ggacacaagactgaaccaagaatggatctccag

SEQ ID NO: 65706 - DNA, 33 bp, Homo sapien
ggacacaagactgaactaagaatggatctccag

SEQ ID NO: 65707 - DNA, 33 bp, Homo sapien
ctcagttctgtgaagccactgtactggcgcgct

SEQ ID NO: 65708 - DNA, 33 bp, Homo sapien
ctcagttctgtgaagctactgtactggcgcgct

SEQ ID NO: 65709 - DNA, 33 bp, Homo sapien
atagattatttaccaccgtgacttgattttaag

SEQ ID NO: 65710 - DNA, 33 bp, Homo sapien
atagattatttaccactgtgacttgattttaag

SEQ ID NO: 65711 - DNA, 33 bp, Homo sapien
ccctttaagtaaaagacagtcctggctaaacat

SEQ ID NO: 65712 - DNA, 33 bp, Homo sapien
ccctttaagtaaaagagagtcctggctaaacat

SEQ ID NO: 65713 - DNA, 33 bp, Homo sapien
taacaacagtatttaaccctgatagagttcttg

SEQ ID NO: 65714 - DNA, 33 bp, Homo sapien
taacaacagtatttaatcctgatagagttcttg

SEQ ID NO: 65715 - DNA, 33 bp, Homo sapien
ggtgaggtgagaaagacatgaactaaggctgac

SEQ ID NO: 65716 - DNA, 33 bp, Homo sapien
ggtgaggtgagaaagatatgaactaaggctgac

SEQ ID NO: 65717 - DNA, 33 bp, Homo sapien
ctcttctgcgcaagtacgtgtatgtgtgtgcat

SEQ ID NO: 65718 - DNA, 33 bp, Homo sapien
ctcttctgcgcaagtatgtgtatgtgtgtgcat

SEQ ID NO: 65719 - DNA, 33 bp, Homo sapien
ggcaactttgagtcacaagatggagttgaatgg

SEQ ID NO: 65720 - DNA, 33 bp, Homo sapien
ggcaactttgagtcacgagatggagttgaatgg

SEQ ID NO: 65721 - DNA, 33 bp, Homo sapien
tacttctaacgaacatcagttgaacacctaccg

SEQ ID NO: 65722 - DNA, 33 bp, Homo sapien
tacttctaacgaacattagttgaacacctaccg

SEQ ID NO: 65723 - DNA, 33 bp, Homo sapien
gtatgaagtctctggaaagaaagctcagatgga

SEQ ID NO: 65724 - DNA, 33 bp, Homo sapien
gtatgaagtctctggagagaaagctcagatgga

SEQ ID NO: 65725 - DNA, 33 bp, Homo sapien
ccccagctgcaaaagaaaattgggagagggaca

SEQ ID NO: 65726 - DNA, 33 bp, Homo sapien
ccccagctgcaaaagacaattgggagagggaca

SEQ ID NO: 65727 - DNA, 33 bp, Homo sapien
gacttggcgtaggcaaactgattaggggatgag

SEQ ID NO: 65728 - DNA, 33 bp, Homo sapien
gacttggcgtaggcaacctgattaggggatgag

SEQ ID NO: 65729 - DNA, 33 bp, Homo sapien
actctaagagcttagaatccagaataaaaacac

SEQ ID NO: 65730 - DNA, 33 bp, Homo sapien
actctaagagcttagagtccagaataaaaacac

SEQ ID NO: 65731 - DNA, 33 bp, Homo sapien
cctctggatctcctgaagcgaagaagaaagaaa

SEQ ID NO: 65732 - DNA, 33 bp, Homo sapien
cctctggatctcctgatgcgaagaagaaagaaa

SEQ ID NO: 65733 - DNA, 33 bp, Homo sapien
tctcactcttcagaaacagatttttggcattaa

SEQ ID NO: 65734 - DNA, 33 bp, Homo sapien
tctcactcttcagaaatagatttttggcattaa

SEQ ID NO: 65735 - DNA, 33 bp, Homo sapien
tcctggagttgaaggaaggcagggcctcaggcc

SEQ ID NO: 65736 - DNA, 33 bp, Homo sapien
tcctggagttgaaggagggcagggcctcaggcc

SEQ ID NO: 65737 - DNA, 33 bp, Homo sapien
aggttaaagatcttgcacaactagttagtagtg

SEQ ID NO: 65738 - DNA, 33 bp, Homo sapien
aggttaaagatcttgcgcaactagttagtagtg

SEQ ID NO: 65739 - DNA, 33 bp, Homo sapien
gtacgaaaaggaatcacggagtttataaaaatt

SEQ ID NO: 65740 - DNA, 33 bp, Homo sapien
gtacgaaaaggaatcagggagtttataaaaatt

SEQ ID NO: 65741 - DNA, 33 bp, Homo sapien
tattgacactagaatcacaaggagagcacaaag

SEQ ID NO: 65742 - DNA, 33 bp, Homo sapien
tattgacactagaatcccaaggagagcacaaag

SEQ ID NO: 65743 - DNA, 33 bp, Homo sapien
ataccctccgtggtagaacagataaaaacataa

SEQ ID NO: 65744 - DNA, 33 bp, Homo sapien
ataccctccgtggtaggacagataaaaacataa

SEQ ID NO: 65745 - DNA, 33 bp, Homo sapien
ttaaaggaacttgctcaatatcacatagctggt

SEQ ID NO: 65746 - DNA, 33 bp, Homo sapien
ttaaaggaacttgctccatatcacatagctggt

SEQ ID NO: 65747 - DNA, 33 bp, Homo sapien
acagccaatcgacaaaaagccatgaactttacc

SEQ ID NO: 65748 - DNA, 33 bp, Homo sapien
acagccaatcgacaaagagccatgaactttacc

SEQ ID NO: 65749 - DNA, 33 bp, Homo sapien
ctagaggagaatgaagcaggttccttgtttctg

SEQ ID NO: 65750 - DNA, 33 bp, Homo sapien
ctagaggagaatgaagtaggttccttgtttctg

SEQ ID NO: 65751 - DNA, 33 bp, Homo sapien
ctctaattgtcagaaactggggatatatcaggt

SEQ ID NO: 65752 - DNA, 33 bp, Homo sapien
ctctaattgtcagaaattggggatatatcaggt

SEQ ID NO: 65753 - DNA, 33 bp, Homo sapien
acctgctactaacttacactaatttacagtggc

SEQ ID NO: 65754 - DNA, 33 bp, Homo sapien
acctgctactaacttatactaatttacagtggc

SEQ ID NO: 65755 - DNA, 33 bp, Homo sapien
taactgcaaaaggagacgtgaaaacacgcttgt

SEQ ID NO: 65756 - DNA, 33 bp, Homo sapien
taactgcaaaaggagatgtgaaaacacgcttgt

SEQ ID NO: 65757 - DNA, 33 bp, Homo sapien
gctgactagtgacaagaaactggtctggaggag

SEQ ID NO: 65758 - DNA, 33 bp, Homo sapien
gctgactagtgacaagcaactggtctggaggag

SEQ ID NO: 65759 - DNA, 33 bp, Homo sapien
ggcaggctgccacgtcaagggtccaaggccagc

SEQ ID NO: 65760 - DNA, 33 bp, Homo sapien
ggcaggctgccacgtcgagggtccaaggccagc

SEQ ID NO: 65761 - DNA, 33 bp, Homo sapien
gatcaggattctgcgacgaggacgagcttatcc

SEQ ID NO: 65762 - DNA, 33 bp, Homo sapien
gatcaggattctgcgatgaggacgagcttatcc

SEQ ID NO: 65763 - DNA, 33 bp, Homo sapien
ctcttcttcccatcaccgccagactcccttgta

SEQ ID NO: 65764 - DNA, 33 bp, Homo sapien
ctcttcttcccatcactgccagactcccttgta

SEQ ID NO: 65765 - DNA, 33 bp, Homo sapien
gtggactcggaacataagaagcacctttgaggc

SEQ ID NO: 65766 - DNA, 33 bp, Homo sapien
gtggactcggaacataggaagcacctttgaggc

SEQ ID NO: 65767 - DNA, 33 bp, Homo sapien
gagcacgtgatgtgtaccagtgtgaacagtgag

SEQ ID NO: 65768 - DNA, 33 bp, Homo sapien
gagcacgtgatgtgtagcagtgtgaacagtgag

SEQ ID NO: 65769 - DNA, 33 bp, Homo sapien
aggtaaaccagcataaaaaagagggagcagagt

SEQ ID NO: 65770 - DNA, 33 bp, Homo sapien
aggtaaaccagcataagaaagagggagcagagt

SEQ ID NO: 65771 - DNA, 33 bp, Homo sapien
agcttgttccattggcaaaacataccaattaaa

SEQ ID NO: 65772 - DNA, 33 bp, Homo sapien
agcttgttccattggcgaaacataccaattaaa

SEQ ID NO: 65773 - DNA, 33 bp, Homo sapien
tgttgtaacaggccaacggaaattctggctaaa

SEQ ID NO: 65774 - DNA, 33 bp, Homo sapien
tgttgtaacaggccaatggaaattctggctaaa

SEQ ID NO: 65775 - DNA, 33 bp, Homo sapien
acatgaagatatctaacattcgtccattttatt

SEQ ID NO: 65776 - DNA, 33 bp, Homo sapien
acatgaagatatctaatattcgtccattttatt

SEQ ID NO: 65777 - DNA, 33 bp, Homo sapien
gtgggctttattcaaaagtagaatatgctagaa

SEQ ID NO: 65778 - DNA, 33 bp, Homo sapien
gtgggctttattcaaatgtagaatatgctagaa

SEQ ID NO: 65779 - DNA, 33 bp, Homo sapien
ctttcctgatgaatgacgcctactcccatctcc

SEQ ID NO: 65780 - DNA, 33 bp, Homo sapien
ctttcctgatgaatgatgcctactcccatctcc

SEQ ID NO: 65781 - DNA, 33 bp, Homo sapien
aggtctgttgacttggccattgtttcataggtg

SEQ ID NO: 65782 - DNA, 33 bp, Homo sapien
aggtctgttgacttgggcattgtttcataggtg

SEQ ID NO: 65783 - DNA, 33 bp, Homo sapien
gtgtctacttcactcacgggttgatatcagatg

SEQ ID NO: 65784 - DNA, 33 bp, Homo sapien
gtgtctacttcactcatgggttgatatcagatg

SEQ ID NO: 65785 - DNA, 33 bp, Homo sapien
aaatacaacaaaatacaataattgagacatgtc

SEQ ID NO: 65786 - DNA, 33 bp, Homo sapien
aaatacaacaaaatacgataattgagacatgtc

SEQ ID NO: 65787 - DNA, 33 bp, Homo sapien
ggcaaccctctgtcaccatgtctccccactcat

SEQ ID NO: 65788 - DNA, 33 bp, Homo sapien
ggcaaccctctgtcactatgtctccccactcat

SEQ ID NO: 65789 - DNA, 33 bp, Homo sapien
acagactgtccttaccaatccgcagtcaacaga

SEQ ID NO: 65790 - DNA, 33 bp, Homo sapien
acagactgtccttaccgatccgcagtcaacaga

SEQ ID NO: 65791 - DNA, 33 bp, Homo sapien
aaagcacagccaaggactcacttagggttgcat

SEQ ID NO: 65792 - DNA, 33 bp, Homo sapien
aaagcacagccaaggattcacttagggttgcat

SEQ ID NO: 65793 - DNA, 33 bp, Homo sapien
atgtggagaaaaggaacaaacattggtctgagg

SEQ ID NO: 65794 - DNA, 33 bp, Homo sapien
atgtggagaaaaggaagaaacattggtctgagg

SEQ ID NO: 65795 - DNA, 33 bp, Homo sapien
ttccagtgaacaaatgaaagtggtgtcctccaa

SEQ ID NO: 65796 - DNA, 33 bp, Homo sapien
ttccagtgaacaaatgcaagtggtgtcctccaa

SEQ ID NO: 65797 - DNA, 33 bp, Homo sapien
aaggggtgaatcacagactgccgaactgccgaa

SEQ ID NO: 65798 - DNA, 33 bp, Homo sapien
aaggggtgaatcacaggctgccgaactgccgaa

SEQ ID NO: 65799 - DNA, 33 bp, Homo sapien
gtttagagtaccactaagggtggctggagagga

SEQ ID NO: 65800 - DNA, 33 bp, Homo sapien
gtttagagtaccactacgggtggctggagagga

SEQ ID NO: 65801 - DNA, 33 bp, Homo sapien
actgtgagcatacttcaatcatgccagtattaa

SEQ ID NO: 65802 - DNA, 33 bp, Homo sapien
actgtgagcatacttccatcatgccagtattaa

SEQ ID NO: 65803 - DNA, 33 bp, Homo sapien
ctttgggaagattctcaaccgcctggagccctg

SEQ ID NO: 65804 - DNA, 33 bp, Homo sapien
ctttgggaagattctcgaccgcctggagccctg

SEQ ID NO: 65805 - DNA, 33 bp, Homo sapien
ttgttgggagaatccaatgaactaatgttagta

SEQ ID NO: 65806 - DNA, 33 bp, Homo sapien
ttgttgggagaatccagtgaactaatgttagta

SEQ ID NO: 65807 - DNA, 33 bp, Homo sapien
ctttgctctttcagaacatggatagagatttac

SEQ ID NO: 65808 - DNA, 33 bp, Homo sapien
ctttgctctttcagaatatggatagagatttac

SEQ ID NO: 65809 - DNA, 33 bp, Homo sapien
agtttcccagagtcccagataagtttgtatgca

SEQ ID NO: 65810 - DNA, 33 bp, Homo sapien
agtttcccagagtcccggataagtttgtatgca

SEQ ID NO: 65811 - DNA, 33 bp, Homo sapien
cttggagtcttctaacactgtctcttttccatc

SEQ ID NO: 65812 - DNA, 33 bp, Homo sapien
cttggagtcttctaacgctgtctcttttccatc

SEQ ID NO: 65813 - DNA, 33 bp, Homo sapien
gttatgttctatgcaccggctgaatgttggctg

SEQ ID NO: 65814 - DNA, 33 bp, Homo sapien
gttatgttctatgcactggctgaatgttggctg

SEQ ID NO: 65815 - DNA, 33 bp, Homo sapien
acactaggccctgtgaaaagtgctttctctgta

SEQ ID NO: 65816 - DNA, 33 bp, Homo sapien
acactaggccctgtgataagtgctttctctgta

SEQ ID NO: 65817 - DNA, 33 bp, Homo sapien
gagaagttccagaagccgagagtgcgtggagag

SEQ ID NO: 65818 - DNA, 33 bp, Homo sapien
gagaagttccagaagctgagagtgcgtggagag

SEQ ID NO: 65819 - DNA, 33 bp, Homo sapien
acaaagacagcgtctacgtgaaaatgaatgtga

SEQ ID NO: 65820 - DNA, 33 bp, Homo sapien
acaaagacagcgtctatgtgaaaatgaatgtga

SEQ ID NO: 65821 - DNA, 33 bp, Homo sapien
actatggttatattcacaaagacacatcagatg

SEQ ID NO: 65822 - DNA, 33 bp, Homo sapien
actatggttatattcataaagacacatcagatg

SEQ ID NO: 65823 - DNA, 33 bp, Homo sapien
gctgtgtatggccaagcccagaatgacatattc

SEQ ID NO: 65824 - DNA, 33 bp, Homo sapien
gctgtgtatggccaagtccagaatgacatattc

SEQ ID NO: 65825 - DNA, 33 bp, Homo sapien
atgacaacaaaggaggcccctgaaacctatgcc

SEQ ID NO: 65826 - DNA, 33 bp, Homo sapien
atgacaacaaaggaggtccctgaaacctatgcc

SEQ ID NO: 65827 - DNA, 33 bp, Homo sapien
caatgcccaaaataagaagttccaatttggggc

SEQ ID NO: 65828 - DNA, 33 bp, Homo sapien
caatgcccaaaataaggagttccaatttggggc

SEQ ID NO: 65829 - DNA, 33 bp, Homo sapien
aaatttacaatcaacaaatgtttagattgctaa

SEQ ID NO: 65830 - DNA, 33 bp, Homo sapien
aaatttacaatcaacagatgtttagattgctaa

SEQ ID NO: 65831 - DNA, 33 bp, Homo sapien
tgaatagcacccagaccgagaaacagaacatta

SEQ ID NO: 65832 - DNA, 33 bp, Homo sapien
tgaatagcacccagactgagaaacagaacatta

SEQ ID NO: 65833 - DNA, 33 bp, Homo sapien
tttctacacctctctcagaaaggaaatgtcaac

SEQ ID NO: 65834 - DNA, 33 bp, Homo sapien
tttctacacctctctctgaaaggaaatgtcaac

SEQ ID NO: 65835 - DNA, 33 bp, Homo sapien
ttggttggttgtccaccgcctttgaagctcttc

SEQ ID NO: 65836 - DNA, 33 bp, Homo sapien
ttggttggttgtccacggcctttgaagctcttc

SEQ ID NO: 65837 - DNA, 33 bp, Homo sapien
cagtgagtggaagttgcaggaacccagaagcca

SEQ ID NO: 65838 - DNA, 33 bp, Homo sapien
cagtgagtggaagttgtaggaacccagaagcca

SEQ ID NO: 65839 - DNA, 33 bp, Homo sapien
tttatcccgaagctgacctatcggctctggaga

SEQ ID NO: 65840 - DNA, 33 bp, Homo sapien
tttatcccgaagctgatctatcggctctggaga

SEQ ID NO: 65841 - DNA, 33 bp, Homo sapien
atgtccaccgcattgacgactgcttgctggaag

SEQ ID NO: 65842 - DNA, 33 bp, Homo sapien
atgtccaccgcattgatgactgcttgctggaag

SEQ ID NO: 65843 - DNA, 33 bp, Homo sapien
cagcatctccatctcacactcctcctggttcac

SEQ ID NO: 65844 - DNA, 33 bp, Homo sapien
cagcatctccatctcagactcctcctggttcac

SEQ ID NO: 65845 - DNA, 33 bp, Homo sapien
aagctggtgagaggtgaaagagattagttaggc

SEQ ID NO: 65846 - DNA, 33 bp, Homo sapien
aagctggtgagaggtggaagagattagttaggc

SEQ ID NO: 65847 - DNA, 33 bp, Homo sapien
tcagacccacgtcctagtaaacccggctgacta

SEQ ID NO: 65848 - DNA, 33 bp, Homo sapien
tcagacccacgtcctattaaacccggctgacta

SEQ ID NO: 65849 - DNA, 33 bp, Homo sapien
ggtacctgcagtgacccacctccaacattcctc

SEQ ID NO: 65850 - DNA, 33 bp, Homo sapien
ggtacctgcagtgacctacctccaacattcctc

SEQ ID NO: 65851 - DNA, 33 bp, Homo sapien
aatgaggcttgatcccccattatagcacctcgc

SEQ ID NO: 65852 - DNA, 33 bp, Homo sapien
aatgaggcttgatcccgcattatagcacctcgc

SEQ ID NO: 65853 - DNA, 33 bp, Homo sapien
agtcaagaacctggcaaggcaaggaaccagaat

SEQ ID NO: 65854 - DNA, 33 bp, Homo sapien
agtcaagaacctggcagggcaaggaaccagaat

SEQ ID NO: 65855 - DNA, 33 bp, Homo sapien
cctttcttggggagtaaagcaaagacaatagaa

SEQ ID NO: 65856 - DNA, 33 bp, Homo sapien
cctttcttggggagtagagcaaagacaatagaa

SEQ ID NO: 65857 - DNA, 33 bp, Homo sapien
taaatgtagttcaaatcatacgtctatcaaatt

SEQ ID NO: 65858 - DNA, 33 bp, Homo sapien
taaatgtagttcaaattatacgtctatcaaatt

SEQ ID NO: 65859 - DNA, 33 bp, Homo sapien
gtacagctgttgaaaccccagtaataaattaaa

SEQ ID NO: 65860 - DNA, 33 bp, Homo sapien
gtacagctgttgaaactccagtaataaattaaa

SEQ ID NO: 65861 - DNA, 33 bp, Homo sapien
agatcacactggaagggagacagcttagggggc

SEQ ID NO: 65862 - DNA, 33 bp, Homo sapien
agatcacactggaaggtagacagcttagggggc

SEQ ID NO: 65863 - DNA, 33 bp, Homo sapien
tcctgactcagcttccaaatgttactcttggca

SEQ ID NO: 65864 - DNA, 33 bp, Homo sapien
tcctgactcagcttcctaatgttactcttggca

SEQ ID NO: 65865 - DNA, 33 bp, Homo sapien
aaacacatagcttttacgattttcaaaggattt

SEQ ID NO: 65866 - DNA, 33 bp, Homo sapien
aaacacatagcttttatgattttcaaaggattt

SEQ ID NO: 65867 - DNA, 33 bp, Homo sapien
tatcttctgggccataagcggtcacttctcatt

SEQ ID NO: 65868 - DNA, 33 bp, Homo sapien
tatcttctgggccataggcggtcacttctcatt

SEQ ID NO: 65869 - DNA, 33 bp, Homo sapien
caaagcagggtgaacaaaagccaagaaagtagg

SEQ ID NO: 65870 - DNA, 33 bp, Homo sapien
caaagcagggtgaacacaagccaagaaagtagg

SEQ ID NO: 65871 - DNA, 33 bp, Homo sapien
caatccaatgcaaagacaaatatggtaccccca

SEQ ID NO: 65872 - DNA, 33 bp, Homo sapien
caatccaatgcaaagataaatatggtaccccca

SEQ ID NO: 65873 - DNA, 33 bp, Homo sapien
ttggtctatggcagaaatgctctatattctaaa

SEQ ID NO: 65874 - DNA, 33 bp, Homo sapien
ttggtctatggcagaagtgctctatattctaaa

SEQ ID NO: 65875 - DNA, 33 bp, Homo sapien
acactaaagtgtaagtaacaagacctggctttt

SEQ ID NO: 65876 - DNA, 33 bp, Homo sapien
acactaaagtgtaagtgacaagacctggctttt

SEQ ID NO: 65877 - DNA, 33 bp, Homo sapien
gtctttattagaggaaagcacatggagattata

SEQ ID NO: 65878 - DNA, 33 bp, Homo sapien
gtctttattagaggaaggcacatggagattata

SEQ ID NO: 65879 - DNA, 33 bp, Homo sapien
agtcttttggtgactcacgtggactccaagacc

SEQ ID NO: 65880 - DNA, 33 bp, Homo sapien
agtcttttggtgactcgcgtggactccaagacc

SEQ ID NO: 65881 - DNA, 33 bp, Homo sapien
tgagaaggcaaactgccaaatctggggaaaggt

SEQ ID NO: 65882 - DNA, 33 bp, Homo sapien
tgagaaggcaaactgctaaatctggggaaaggt

SEQ ID NO: 65883 - DNA, 33 bp, Homo sapien
acaacacaaataagcaggtagcaaaaagtaaac

SEQ ID NO: 65884 - DNA, 33 bp, Homo sapien
acaacacaaataagcatgtagcaaaaagtaaac

SEQ ID NO: 65885 - DNA, 33 bp, Homo sapien
ggaccctggcatgtgacgctaagtggatgtata

SEQ ID NO: 65886 - DNA, 33 bp, Homo sapien
ggaccctggcatgtgaggctaagtggatgtata

SEQ ID NO: 65887 - DNA, 33 bp, Homo sapien
tcagggtacgaaaaaccatggctgctgtcctgg

SEQ ID NO: 65888 - DNA, 33 bp, Homo sapien
tcagggtacgaaaaactatggctgctgtcctgg

SEQ ID NO: 65889 - DNA, 33 bp, Homo sapien
gacaggaggccttgtaaaacccatcctcatgat

SEQ ID NO: 65890 - DNA, 33 bp, Homo sapien
gacaggaggccttgtacaacccatcctcatgat

SEQ ID NO: 65891 - DNA, 33 bp, Homo sapien
ctcaggccaatacagcaacaaggttctgaacct

SEQ ID NO: 65892 - DNA, 33 bp, Homo sapien
ctcaggccaatacagcgacaaggttctgaacct

SEQ ID NO: 65893 - DNA, 33 bp, Homo sapien
ggtcaatatcttgcacagagtaaacactatata

SEQ ID NO: 65894 - DNA, 33 bp, Homo sapien
ggtcaatatcttgcacggagtaaacactatata

SEQ ID NO: 65895 - DNA, 33 bp, Homo sapien
ccattctcacccttgcaacaggctcactcttgc

SEQ ID NO: 65896 - DNA, 33 bp, Homo sapien
ccattctcacccttgcgacaggctcactcttgc

SEQ ID NO: 65897 - DNA, 33 bp, Homo sapien
tacaacagaacttttagaaatatgtcacttact

SEQ ID NO: 65898 - DNA, 33 bp, Homo sapien
tacaacagaacttttataaatatgtcacttact

SEQ ID NO: 65899 - DNA, 33 bp, Homo sapien
ttgaacagccctcaccagaaagacctctctgcc

SEQ ID NO: 65900 - DNA, 33 bp, Homo sapien
ttgaacagccctcaccggaaagacctctctgcc

SEQ ID NO: 65901 - DNA, 33 bp, Homo sapien
tcaacatttcttgagccaggcaatagaaaggtg

SEQ ID NO: 65902 - DNA, 33 bp, Homo sapien
tcaacatttcttgagcgaggcaatagaaaggtg

SEQ ID NO: 65903 - DNA, 33 bp, Homo sapien
aaatgggtttgaagaggctaaatggcccaaagt

SEQ ID NO: 65904 - DNA, 33 bp, Homo sapien
aaatgggtttgaagagtctaaatggcccaaagt

SEQ ID NO: 65905 - DNA, 33 bp, Homo sapien
ttaacatttcttgatcaattcccctatcccatt

SEQ ID NO: 65906 - DNA, 33 bp, Homo sapien
ttaacatttcttgatccattcccctatcccatt

SEQ ID NO: 65907 - DNA, 33 bp, Homo sapien
gaaacagacaggttcccatgaaactttgtatat

SEQ ID NO: 65908 - DNA, 33 bp, Homo sapien
gaaacagacaggttcctatgaaactttgtatat

SEQ ID NO: 65909 - DNA, 33 bp, Homo sapien
ctaggtcaccaatttaaaagttctggaatccac

SEQ ID NO: 65910 - DNA, 33 bp, Homo sapien
ctaggtcaccaatttacaagttctggaatccac

SEQ ID NO: 65911 - DNA, 33 bp, Homo sapien
gcagagagaattgcgcactgctctggcatgaga

SEQ ID NO: 65912 - DNA, 33 bp, Homo sapien
gcagagagaattgcgcgctgctctggcatgaga

SEQ ID NO: 65913 - DNA, 33 bp, Homo sapien
tattctggatagctggacatagctcccctctga

SEQ ID NO: 65914 - DNA, 33 bp, Homo sapien
tattctggatagctgggcatagctcccctctga

SEQ ID NO: 65915 - DNA, 33 bp, Homo sapien
caactgagatgctgaactccaatatttaaggaa

SEQ ID NO: 65916 - DNA, 33 bp, Homo sapien
caactgagatgctgaagtccaatatttaaggaa

SEQ ID NO: 65917 - DNA, 33 bp, Homo sapien
ggaattttcagttcaactgggatcttacaggaa

SEQ ID NO: 65918 - DNA, 33 bp, Homo sapien
ggaattttcagttcaattgggatcttacaggaa

SEQ ID NO: 65919 - DNA, 33 bp, Homo sapien
gacgctggtgtcagaaagtgtgcaaggcttccg

SEQ ID NO: 65920 - DNA, 33 bp, Homo sapien
gacgctggtgtcagaacgtgtgcaaggcttccg

SEQ ID NO: 65921 - DNA, 33 bp, Homo sapien
gtgattaagcaacatccgagagcaaagagaggg

SEQ ID NO: 65922 - DNA, 33 bp, Homo sapien
gtgattaagcaacatctgagagcaaagagaggg

SEQ ID NO: 65923 - DNA, 33 bp, Homo sapien
accagagctgggaaaacgcaagtccatttgtag

SEQ ID NO: 65924 - DNA, 33 bp, Homo sapien
accagagctgggaaaatgcaagtccatttgtag

SEQ ID NO: 65925 - DNA, 33 bp, Homo sapien
gaaaatctgctcaggacgtctcttagccaggct

SEQ ID NO: 65926 - DNA, 33 bp, Homo sapien
gaaaatctgctcaggatgtctcttagccaggct

SEQ ID NO: 65927 - DNA, 33 bp, Homo sapien
ttgactgagtgatcagcaaacatttgatgaatg

SEQ ID NO: 65928 - DNA, 33 bp, Homo sapien
ttgactgagtgatcagtaaacatttgatgaatg

SEQ ID NO: 65929 - DNA, 33 bp, Homo sapien
gtgctaagacagaccacaggcaaataggccaca

SEQ ID NO: 65930 - DNA, 33 bp, Homo sapien
gtgctaagacagaccagaggcaaataggccaca

SEQ ID NO: 65931 - DNA, 33 bp, Homo sapien
tttccctcttgtgaaagaactgcatggaaacct

SEQ ID NO: 65932 - DNA, 33 bp, Homo sapien
tttccctcttgtgaaataactgcatggaaacct

SEQ ID NO: 65933 - DNA, 33 bp, Homo sapien
tactacccaccaagcacgatacatttcctaaga

SEQ ID NO: 65934 - DNA, 33 bp, Homo sapien
tactacccaccaagcatgatacatttcctaaga

SEQ ID NO: 65935 - DNA, 33 bp, Homo sapien
ttttagagtcaaatcacgaactgaattccttca

SEQ ID NO: 65936 - DNA, 33 bp, Homo sapien
ttttagagtcaaatcatgaactgaattccttca

SEQ ID NO: 65937 - DNA, 33 bp, Homo sapien
tgtgacccaccctggcaatgagaaggactaaag

SEQ ID NO: 65938 - DNA, 33 bp, Homo sapien
tgtgacccaccctggcgatgagaaggactaaag

SEQ ID NO: 65939 - DNA, 33 bp, Homo sapien
tgcctaagcacccggacctggcagacaagaatg

SEQ ID NO: 65940 - DNA, 33 bp, Homo sapien
tgcctaagcacccggagctggcagacaagaatg

SEQ ID NO: 65941 - DNA, 33 bp, Homo sapien
caaattccagttcagacatggatttggttgtgg

SEQ ID NO: 65942 - DNA, 33 bp, Homo sapien
caaattccagttcagagatggatttggttgtgg

SEQ ID NO: 65943 - DNA, 33 bp, Homo sapien; identical to SEQ ID NO: 65941

SEQ ID NO: 65944 - DNA, 33 bp, Homo sapien; identical to SEQ ID NO: 65942

SEQ ID NO: 65945 - DNA, 33 bp, Homo sapien
tcttcctacccatttgcaatcaatctcaccctc

SEQ ID NO: 65946 - DNA, 33 bp, Homo sapien
tcttcctacccatttgtaatcaatctcaccctc

SEQ ID NO: 65947 - DNA, 33 bp, Homo sapien
ggcctaaatagaacgaaaaaggctgactctccc

SEQ ID NO: 65948 - DNA, 33 bp, Homo sapien
ggcctaaatagaacgagaaaggctgactctccc

SEQ ID NO: 65949 - DNA, 33 bp, Homo sapien
ataatgaatgaatagacgttaaaatgtcagatg

SEQ ID NO: 65950 - DNA, 33 bp, Homo sapien
ataatgaatgaatagatgttaaaatgtcagatg

SEQ ID NO: 65951 - DNA, 33 bp, Homo sapien
actttccactcgaggcacaggaatatcattgtc

SEQ ID NO: 65952 - DNA, 33 bp, Homo sapien
actttccactcgaggcgcaggaatatcattgtc

SEQ ID NO: 65953 - DNA, 33 bp, Homo sapien
catagagatgggaagtaaaatggcggttgccgg

SEQ ID NO: 65954 - DNA, 33 bp, Homo sapien
catagagatgggaagtcaaatggcggttgccgg

SEQ ID NO: 65955 - DNA, 33 bp, Homo sapien
gagctctgcataaagactatcagtaaatgtcat

SEQ ID NO: 65956 - DNA, 33 bp, Homo sapien
gagctctgcataaagattatcagtaaatgtcat

SEQ ID NO: 65957 - DNA, 33 bp, Homo sapien
cctccagaactgacaccatagatttctgtttca

SEQ ID NO: 65958 - DNA, 33 bp, Homo sapien
cctccagaactgacactatagatttctgtttca

SEQ ID NO: 65959 - DNA, 33 bp, Homo sapien
gtgtccggtgctttccaacaatccttgtcatcc

SEQ ID NO: 65960 - DNA, 33 bp, Homo sapien
gtgtccggtgctttccgacaatccttgtcatcc

SEQ ID NO: 65961 - DNA, 33 bp, Homo sapien
ggattgaaggagataacgcgtataacaccttta

SEQ ID NO: 65962 - DNA, 33 bp, Homo sapien
ggattgaaggagataatgcgtataacaccttta

SEQ ID NO: 65963 - DNA, 33 bp, Homo sapien
gacactccattaacaaataggctttgggtgtta

SEQ ID NO: 65964 - DNA, 33 bp, Homo sapien
gacactccattaacaagtaggctttgggtgtta

SEQ ID NO: 65965 - DNA, 33 bp, Homo sapien
acgtgagtttgataccaactgtggcaattaggc

SEQ ID NO: 65966 - DNA, 33 bp, Homo sapien
acgtgagtttgataccgactgtggcaattaggc

SEQ ID NO: 65967 - DNA, 33 bp, Homo sapien
agctccctttcctacacagtcatggcttaatac

SEQ ID NO: 65968 - DNA, 33 bp, Homo sapien
agctccctttcctacatagtcatggcttaatac

SEQ ID NO: 65969 - DNA, 33 bp, Homo sapien
ccttcataataaactcaagaaacactttatcaa

SEQ ID NO: 65970 - DNA, 33 bp, Homo sapien
ccttcataataaactcgagaaacactttatcaa

SEQ ID NO: 65971 - DNA, 33 bp, Homo sapien
agcctggacccttagcagattagatggtggctg

SEQ ID NO: 65972 - DNA, 33 bp, Homo sapien
agcctggacccttagcggattagatggtggctg

SEQ ID NO: 65973 - DNA, 33 bp, Homo sapien
cacagaacaggtgttcaagaaaaattctggaag

SEQ ID NO: 65974 - DNA, 33 bp, Homo sapien
cacagaacaggtgttcgagaaaaattctggaag

SEQ ID NO: 65975 - DNA, 33 bp, Homo sapien
ccacctcctttaagcccccagaatatctcatat

SEQ ID NO: 65976 - DNA, 33 bp, Homo sapien
ccacctcctttaagcctccagaatatctcatat

SEQ ID NO: 65977 - DNA, 33 bp, Homo sapien
aggcttgagttttgacaagtggaagcactattg

SEQ ID NO: 65978 - DNA, 33 bp, Homo sapien
aggcttgagttttgaccagtggaagcactattg

SEQ ID NO: 65979 - DNA, 33 bp, Homo sapien; identical to SEQ ID NO: 65977

SEQ ID NO: 65980 - DNA, 33 bp, Homo sapien; identical to SEQ ID NO: 65978

SEQ ID NO: 65981 - DNA, 33 bp, Homo sapien
attctagaaacagactcaggagggctttcataa

SEQ ID NO: 65982 - DNA, 33 bp, Homo sapien
attctagaaacagactgaggagggctttcataa

SEQ ID NO: 65983 - DNA, 33 bp, Homo sapien; identical to SEQ ID NO: 65981

SEQ ID NO: 65984 - DNA, 33 bp, Homo sapien; identical to SEQ ID NO: 65982

SEQ ID NO: 65985 - DNA, 33 bp, Homo sapien
aagatgataagctttacgttatgtgtagtttac

SEQ ID NO: 65986 - DNA, 33 bp, Homo sapien
aagatgataagctttatgttatgtgtagtttac

SEQ ID NO: 65987 - DNA, 33 bp, Homo sapien
tagatggtgctaagtacgctgaacgataaaatg

SEQ ID NO: 65988 - DNA, 33 bp, Homo sapien
tagatggtgctaagtatgctgaacgataaaatg

SEQ ID NO: 65989 - DNA, 33 bp, Homo sapien
aggcagcactttgcccacttattccatgtaagg

SEQ ID NO: 65990 - DNA, 33 bp, Homo sapien
aggcagcactttgcccgcttattccatgtaagg

SEQ ID NO: 65991 - DNA, 33 bp, Homo sapien
tcagaggattgcagaacctaatccagaaggaag

SEQ ID NO: 65992 - DNA, 33 bp, Homo sapien
tcagaggattgcagaatctaatccagaaggaag

SEQ ID NO: 65993 - DNA, 33 bp, Homo sapien
aattagctaaggataagcttgaaacctcgtggt

SEQ ID NO: 65994 - DNA, 33 bp, Homo sapien
aattagctaaggataatcttgaaacctcgtggt

SEQ ID NO: 65995 - DNA, 33 bp, Homo sapien
tttccatttcatcgcacagcctttcaattctag

SEQ ID NO: 65996 - DNA, 33 bp, Homo sapien
tttccatttcatcgcatagcctttcaattctag

SEQ ID NO: 65997 - DNA, 33 bp, Homo sapien
agggaaacctggatggaacagggattgtcttca

SEQ ID NO: 65998 - DNA, 33 bp, Homo sapien
agggaaacctggatgggacagggattgtcttca

SEQ ID NO: 65999 - DNA, 33 bp, Homo sapien
ccctttgtaagtgcaacgttcttttgaaacaga

SEQ ID NO: 66000 - DNA, 33 bp, Homo sapien
ccctttgtaagtgcaatgttcttttgaaacaga

SEQ ID NO: 66001 - DNA, 33 bp, Homo sapien
tcccttctgggagctacattggtgagataatcc

SEQ ID NO: 66002 - DNA, 33 bp, Homo sapien
tcccttctgggagctatattggtgagataatcc

SEQ ID NO: 66003 - DNA, 33 bp, Homo sapien
tgcctgcaaagtgcaccgatgcttcttttccta

SEQ ID NO: 66004 - DNA, 33 bp, Homo sapien
tgcctgcaaagtgcactgatgcttcttttccta

SEQ ID NO: 66005 - DNA, 33 bp, Homo sapien
aactcccacctatcacaccaatgaatactctta

SEQ ID NO: 66006 - DNA, 33 bp, Homo sapien
aactcccacctatcacgccaatgaatactctta

SEQ ID NO: 66007 - DNA, 33 bp, Homo sapien
tcattttctcagttggcacttctgtgctttatt

SEQ ID NO: 66008 - DNA, 33 bp, Homo sapien
tcattttctcagttggtacttctgtgctttatt

SEQ ID NO: 66009 - DNA, 33 bp, Homo sapien
cttagatgaccagctgcatatattctcttaagg

SEQ ID NO: 66010 - DNA, 33 bp, Homo sapien
cttagatgaccagctgtatatattctcttaagg

SEQ ID NO: 66011 - DNA, 33 bp, Homo sapien
ttgccatcaagcaaaacgggaaggcttcaggag

SEQ ID NO: 66012 - DNA, 33 bp, Homo sapien
ttgccatcaagcaaaatgggaaggcttcaggag

SEQ ID NO: 66013 - DNA, 33 bp, Homo sapien
gaatacacctcacgtaccgaacgtcacagctca

SEQ ID NO: 66014 - DNA, 33 bp, Homo sapien
gaatacacctcacgtatcgaacgtcacagctca

SEQ ID NO: 66015 - DNA, 33 bp, Homo sapien
ccggtgagtttgtttacatgcactgatccatgt

SEQ ID NO: 66016 - DNA, 33 bp, Homo sapien
ccggtgagtttgtttatatgcactgatccatgt

SEQ ID NO: 66017 - DNA, 33 bp, Homo sapien
agttgccatgccctggaaattgattaggcccta

SEQ ID NO: 66018 - DNA, 33 bp, Homo sapien
agttgccatgccctgggaattgattaggcccta

SEQ ID NO: 66019 - DNA, 33 bp, Homo sapien
cttaaaggaacagagaaagatgaaggtttgagt

SEQ ID NO: 66020 - DNA, 33 bp, Homo sapien
cttaaaggaacagagagagatgaaggtttgagt

SEQ ID NO: 66021 - DNA, 33 bp, Homo sapien
tgggcaggatgacaggaaggccatgctgtaaat

SEQ ID NO: 66022 - DNA, 33 bp, Homo sapien
tgggcaggatgacagggaggccatgctgtaaat

SEQ ID NO: 66023 - DNA, 33 bp, Homo sapien
cctgtcaagcagcaagaaaaccccactgggcag

SEQ ID NO: 66024 - DNA, 33 bp, Homo sapien
cctgtcaagcagcaagcaaaccccactgggcag

SEQ ID NO: 66025 - DNA, 33 bp, Homo sapien
tgcacttttaccactacctgtgtttaattctgc

SEQ ID NO: 66026 - DNA, 33 bp, Homo sapien
tgcacttttaccactatctgtgtttaattctgc

SEQ ID NO: 66027 - DNA, 33 bp, Homo sapien
gggtgggtcaatcagacaccgttccccttcgcc

SEQ ID NO: 66028 - DNA, 33 bp, Homo sapien
gggtgggtcaatcagagaccgttccccttcgcc

SEQ ID NO: 66029 - DNA, 33 bp, Homo sapien
ccagggtacaggtaggcaacatcttccaggcag

SEQ ID NO: 66030 - DNA, 33 bp, Homo sapien
ccagggtacaggtaggtaacatcttccaggcag

SEQ ID NO: 66031 - DNA, 33 bp, Homo sapien
aggctttgtactcaaacgggagtgagctttgct

SEQ ID NO: 66032 - DNA, 33 bp, Homo sapien
aggctttgtactcaaatgggagtgagctttgct

SEQ ID NO: 66033 - DNA, 33 bp, Homo sapien
gggctgcatcgacccacgcccagcaccacctct

SEQ ID NO: 66034 - DNA, 33 bp, Homo sapien
gggctgcatcgacccatgcccagcaccacctct

SEQ ID NO: 66035 - DNA, 33 bp, Homo sapien
caggagtgaccccaacacagctaatgaagatgc

SEQ ID NO: 66036 - DNA, 33 bp, Homo sapien
caggagtgaccccaacgcagctaatgaagatgc

SEQ ID NO: 66037 - DNA, 33 bp, Homo sapien
aaacagcttgtaatcactgagaaggtgtccatt

SEQ ID NO: 66038 - DNA, 33 bp, Homo sapien
aaacagcttgtaatcattgagaaggtgtccatt

SEQ ID NO: 66039 - DNA, 33 bp, Homo sapien
gaaaagcccgcaaaaaaggattcctggttttga

SEQ ID NO: 66040 - DNA, 33 bp, Homo sapien
gaaaagcccgcaaaaagggattcctggttttga

SEQ ID NO: 66041 - DNA, 33 bp, Homo sapien
cctccttgcttccaaacgtagagggacagtaga

SEQ ID NO: 66042 - DNA, 33 bp, Homo sapien
cctccttgcttccaaatgtagagggacagtaga

SEQ ID NO: 66043 - DNA, 33 bp, Homo sapien
acttcctttcgcagaacctaccagtggccaagt

SEQ ID NO: 66044 - DNA, 33 bp, Homo sapien
acttcctttcgcagaatctaccagtggccaagt

SEQ ID NO: 66045 - DNA, 33 bp, Homo sapien
cagggccaaagtttccaagaggctccagctggc

SEQ ID NO: 66046 - DNA, 33 bp, Homo sapien
cagggccaaagtttccgagaggctccagctggc

SEQ ID NO: 66047 - DNA, 33 bp, Homo sapien
aagggtctttgggaaacgactagcaatcaaata

SEQ ID NO: 66048 - DNA, 33 bp, Homo sapien
aagggtctttgggaaaggactagcaatcaaata

SEQ ID NO: 66049 - DNA, 33 bp, Homo sapien
cctgaaaatggagcaaatggggagagaatgtgt

SEQ ID NO: 66050 - DNA, 33 bp, Homo sapien
cctgaaaatggagcaactggggagagaatgtgt

SEQ ID NO: 66051 - DNA, 33 bp, Homo sapien
ctgttgtataggaggcacttaggctgcaagcag

SEQ ID NO: 66052 - DNA, 33 bp, Homo sapien
ctgttgtataggaggcgcttaggctgcaagcag

SEQ ID NO: 66053 - DNA, 33 bp, Homo sapien
aggtccacagtaaacacaaaaaccagctccggg

SEQ ID NO: 66054 - DNA, 33 bp, Homo sapien
aggtccacagtaaacagaaaaaccagctccggg

SEQ ID NO: 66055 - DNA, 33 bp, Homo sapien
tataaaccaaagcctacgagaggaagtggctct

SEQ ID NO: 66056 - DNA, 33 bp, Homo sapien
tataaaccaaagcctatgagaggaagtggctct

SEQ ID NO: 66057 - DNA, 33 bp, Homo sapien
atcattgttttggctaccagtgtggaacaggaa

SEQ ID NO: 66058 - DNA, 33 bp, Homo sapien
atcattgttttggctatcagtgtggaacaggaa

SEQ ID NO: 66059 - DNA, 33 bp, Homo sapien
acttaaccatgaaaacacataatcgaggagtga

SEQ ID NO: 66060 - DNA, 33 bp, Homo sapien
acttaaccatgaaaacccataatcgaggagtga

SEQ ID NO: 66061 - DNA, 33 bp, Homo sapien
catcactgtgcctatgcaagccaaggatgaaag

SEQ ID NO: 66062 - DNA, 33 bp, Homo sapien
catcactgtgcctatgtaagccaaggatgaaag

SEQ ID NO: 66063 - DNA, 33 bp, Homo sapien
agatgcctggacttcacgcttggaagacactga

SEQ ID NO: 66064 - DNA, 33 bp, Homo sapien
agatgcctggacttcatgcttggaagacactga

SEQ ID NO: 66065 - DNA, 33 bp, Homo sapien
tgaagtcattcccagaagcaagagtctctccca

SEQ ID NO: 66066 - DNA, 33 bp, Homo sapien
tgaagtcattcccagaggcaagagtctctccca

SEQ ID NO: 66067 - DNA, 33 bp, Homo sapien
agctctgtctgggatccgagaaggaattagaaa

SEQ ID NO: 66068 - DNA, 33 bp, Homo sapien
agctctgtctgggatctgagaaggaattagaaa

SEQ ID NO: 66069 - DNA, 33 bp, Homo sapien
cagcctctaactaaaactgaactaagaatgcaa

SEQ ID NO: 66070 - DNA, 33 bp, Homo sapien
cagcctctaactaaaattgaactaagaatgcaa

SEQ ID NO: 66071 - DNA, 33 bp, Homo sapien
agccttgttgttaagacgagagtgatagtgtag

SEQ ID NO: 66072 - DNA, 33 bp, Homo sapien
agccttgttgttaagatgagagtgatagtgtag

SEQ ID NO: 66073 - DNA, 33 bp, Homo sapien
tgtgtactcagtgaagccctcatgagaacgatt

SEQ ID NO: 66074 - DNA, 33 bp, Homo sapien
tgtgtactcagtgaaggcctcatgagaacgatt

SEQ ID NO: 66075 - DNA, 33 bp, Homo sapien
gtcagtaacagagagccaatgaaggttttgcta

SEQ ID NO: 66076 - DNA, 33 bp, Homo sapien
gtcagtaacagagagctaatgaaggttttgcta

SEQ ID NO: 66077 - DNA, 33 bp, Homo sapien
aacacatcattgattgcattaccactttccttt

SEQ ID NO: 66078 - DNA, 33 bp, Homo sapien
aacacatcattgattgtattaccactttccttt

SEQ ID NO: 66079 - DNA, 33 bp, Homo sapien
gaagttaattcctaccagcacaaacaaatactc

SEQ ID NO: 66080 - DNA, 33 bp, Homo sapien
gaagttaattcctaccggcacaaacaaatactc

SEQ ID NO: 66081 - DNA, 33 bp, Homo sapien
acttctatgcagatgggagactggatagctgac

SEQ ID NO: 66082 - DNA, 33 bp, Homo sapien
acttctatgcagatggtagactggatagctgac

SEQ ID NO: 66083 - DNA, 33 bp, Homo sapien
ctcttcttagtggtcagtaacccataggatgat

SEQ ID NO: 66084 - DNA, 33 bp, Homo sapien
ctcttcttagtggtcattaacccataggatgat

SEQ ID NO: 66085 - DNA, 33 bp, Homo sapien
aatgggactgctggtacgtatgaaaaatcatat

SEQ ID NO: 66086 - DNA, 33 bp, Homo sapien
aatgggactgctggtatgtatgaaaaatcatat

SEQ ID NO: 66087 - DNA, 33 bp, Homo sapien
acaagtttgcacatggaaatcatgcacttacct

SEQ ID NO: 66088 - DNA, 33 bp, Homo sapien
acaagtttgcacatgggaatcatgcacttacct

SEQ ID NO: 66089 - DNA, 33 bp, Homo sapien
gaaagggaggtggaaaggtaggatcgactggag

SEQ ID NO: 66090 - DNA, 33 bp, Homo sapien
gaaagggaggtggaaatgtaggatcgactggag

SEQ ID NO: 66091 - DNA, 33 bp, Homo sapien
tgagttctagtcctaaatcttacgtcaattatg

SEQ ID NO: 66092 - DNA, 33 bp, Homo sapien
tgagttctagtcctaagtcttacgtcaattatg

SEQ ID NO: 66093 - DNA, 33 bp, Homo sapien
catcagtctgacagcacctttagaaatttacta

SEQ ID NO: 66094 - DNA, 33 bp, Homo sapien
catcagtctgacagcatctttagaaatttacta

SEQ ID NO: 66095 - DNA, 33 bp, Homo sapien
tggtccatgataaagcccggagtaactcttcta

SEQ ID NO: 66096 - DNA, 33 bp, Homo sapien
tggtccatgataaagctcggagtaactcttcta

SEQ ID NO: 66097 - DNA, 33 bp, Homo sapien
gtggagccatgagccacaacttgtgagtagtat

SEQ ID NO: 66098 - DNA, 33 bp, Homo sapien
gtggagccatgagccagaacttgtgagtagtat

SEQ ID NO: 66099 - DNA, 33 bp, Homo sapien
cacatacaacactcaccctggaagaaactccct

SEQ ID NO: 66100 - DNA, 33 bp, Homo sapien
cacatacaacactcactctggaagaaactccct

SEQ ID NO: 66101 - DNA, 33 bp, Homo sapien
caccttaattggattccactgaaatagccatcc

SEQ ID NO: 66102 - DNA, 33 bp, Homo sapien
caccttaattggattctactgaaatagccatcc

SEQ ID NO: 66103 - DNA, 33 bp, Homo sapien
aacagtgtattcatgacagacaataaaaaataa

SEQ ID NO: 66104 - DNA, 33 bp, Homo sapien
aacagtgtattcatgatagacaataaaaaataa

SEQ ID NO: 66105 - DNA, 33 bp, Homo sapien
ttggcattcacaactaagcaagaatacatatca

SEQ ID NO: 66106 - DNA, 33 bp, Homo sapien
ttggcattcacaactaggcaagaatacatatca

SEQ ID NO: 66107 - DNA, 33 bp, Homo sapien
gaaatgaaattcgagactcagaaattctaaaat

SEQ ID NO: 66108 - DNA, 33 bp, Homo sapien
gaaatgaaattcgagattcagaaattctaaaat

SEQ ID NO: 66109 - DNA, 33 bp, Homo sapien
ggaactggccagtcagataagaaatacagtcta

SEQ ID NO: 66110 - DNA, 33 bp, Homo sapien
ggaactggccagtcaggtaagaaatacagtcta

SEQ ID NO: 66111 - DNA, 33 bp, Homo sapien
gggcaccagatgtgggaactaccaaaaaaaggg

SEQ ID NO: 66112 - DNA, 33 bp, Homo sapien
gggcaccagatgtgggcactaccaaaaaaaggg

SEQ ID NO: 66113 - DNA, 33 bp, Homo sapien
ctttcctacactaaaacctccatgactgcaggg

SEQ ID NO: 66114 - DNA, 33 bp, Homo sapien
ctttcctacactaaaagctccatgactgcaggg

SEQ ID NO: 66115 - DNA, 33 bp, Homo sapien
tccctcggcgaagagcagaggttgaagaaatgc

SEQ ID NO: 66116 - DNA, 33 bp, Homo sapien
tccctcggcgaagagcggaggttgaagaaatgc

SEQ ID NO: 66117 - DNA, 33 bp, Homo sapien
ctgctaaggcctgcaaacttgaggatgtccagg

SEQ ID NO: 66118 - DNA, 33 bp, Homo sapien
ctgctaaggcctgcaaccttgaggatgtccagg

SEQ ID NO: 66119 - DNA, 33 bp, Homo sapien
aaagggtgaagatggacaataaaatggctgtca

SEQ ID NO: 66120 - DNA, 33 bp, Homo sapien
aaagggtgaagatggagaataaaatggctgtca

SEQ ID NO: 66121 - DNA, 33 bp, Homo sapien
cctcctagctctctgacagctcctttaggcctc

SEQ ID NO: 66122 - DNA, 33 bp, Homo sapien
cctcctagctctctgatagctcctttaggcctc

SEQ ID NO: 66123 - DNA, 33 bp, Homo sapien
gggtgtttagaggagccacttgcccagataggg

SEQ ID NO: 66124 - DNA, 33 bp, Homo sapien
gggtgtttagaggagcgacttgcccagataggg

SEQ ID NO: 66125 - DNA, 33 bp, Homo sapien
gtaacgagggagtatagaataggtcgatttccc

SEQ ID NO: 66126 - DNA, 33 bp, Homo sapien
gtaacgagggagtatataataggtcgatttccc

SEQ ID NO: 66127 - DNA, 33 bp, Homo sapien
cttcctttctggtgccccttgatggctcttggc

SEQ ID NO: 66128 - DNA, 33 bp, Homo sapien
cttcctttctggtgcctcttgatggctcttggc

SEQ ID NO: 66129 - DNA, 33 bp, Homo sapien
ttttctgtttagaaggaacaggagaggggctgt

SEQ ID NO: 66130 - DNA, 33 bp, Homo sapien
ttttctgtttagaagggacaggagaggggctgt

SEQ ID NO: 66131 - DNA, 33 bp, Homo sapien
ccttcctaacatagctcagattagcttcctcac

SEQ ID NO: 66132 - DNA, 33 bp, Homo sapien
ccttcctaacatagctgagattagcttcctcac

SEQ ID NO: 66133 - DNA, 33 bp, Homo sapien
tctgtgtcagaaagccaatttggtcctgttatt

SEQ ID NO: 66134 - DNA, 33 bp, Homo sapien
tctgtgtcagaaagcccatttggtcctgttatt

SEQ ID NO: 66135 - DNA, 33 bp, Homo sapien
tcatcagttctcccaacggcttgttagtgtctg

SEQ ID NO: 66136 - DNA, 33 bp, Homo sapien
tcatcagttctcccaatggcttgttagtgtctg

SEQ ID NO: 66137 - DNA, 33 bp, Homo sapien
gaccatgaagctcccaaaatccctgaagcctcc

SEQ ID NO: 66138 - DNA, 33 bp, Homo sapien
gaccatgaagctcccagaatccctgaagcctcc

SEQ ID NO: 66139 - DNA, 33 bp, Homo sapien
tgggttccttgactcaaatgaagtaataatttc

SEQ ID NO: 66140 - DNA, 33 bp, Homo sapien
tgggttccttgactcagatgaagtaataatttc

SEQ ID NO: 66141 - DNA, 33 bp, Homo sapien
ctaggataccagagtaataatttaaggtcctgg

SEQ ID NO: 66142 - DNA, 33 bp, Homo sapien
ctaggataccagagtagtaatttaaggtcctgg

SEQ ID NO: 66143 - DNA, 33 bp, Homo sapien
attgcggctgacccaaccatggccactggtcca

SEQ ID NO: 66144 - DNA, 33 bp, Homo sapien
attgcggctgacccaatcatggccactggtcca

SEQ ID NO: 66145 - DNA, 33 bp, Homo sapien
atattttaccacagtcaaaaattcccaaattat

SEQ ID NO: 66146 - DNA, 33 bp, Homo sapien
atattttaccacagtcgaaaattcccaaattat

SEQ ID NO: 66147 - DNA, 33 bp, Homo sapien
ggtattaacatcacaccgcctacttcccagagg

SEQ ID NO: 66148 - DNA, 33 bp, Homo sapien
ggtattaacatcacactgcctacttcccagagg

SEQ ID NO: 66149 - DNA, 33 bp, Homo sapien
tttctcctaccactcacctgctaaaagtcatct

SEQ ID NO: 66150 - DNA, 33 bp, Homo sapien
tttctcctaccactcatctgctaaaagtcatct

SEQ ID NO: 66151 - DNA, 33 bp, Homo sapien
tggtcgttcttaaggacgatttggccccatcgc

SEQ ID NO: 66152 - DNA, 33 bp, Homo sapien
tggtcgttcttaaggatgatttggccccatcgc

SEQ ID NO: 66153 - DNA, 33 bp, Homo sapien
cattcattttgttgaccgtagacgtccccatgt

SEQ ID NO: 66154 - DNA, 33 bp, Homo sapien
cattcattttgttgactgtagacgtccccatgt

SEQ ID NO: 66155 - DNA, 33 bp, Homo sapien
ccatcattgcgtggtacagcggaagtgtatact

SEQ ID NO: 66156 - DNA, 33 bp, Homo sapien
ccatcattgcgtggtagagcggaagtgtatact

SEQ ID NO: 66157 - DNA, 33 bp, Homo sapien
tcggatttaggttatcaaacaggcttcctccct

SEQ ID NO: 66158 - DNA, 33 bp, Homo sapien
tcggatttaggttatcgaacaggcttcctccct

SEQ ID NO: 66159 - DNA, 33 bp, Homo sapien
gggcctattggtgctacaggtttttgtacagag

SEQ ID NO: 66160 - DNA, 33 bp, Homo sapien
gggcctattggtgctataggtttttgtacagag

SEQ ID NO: 66161 - DNA, 33 bp, Homo sapien
caaatccaagtctttcccacttatctcaagctg

SEQ ID NO: 66162 - DNA, 33 bp, Homo sapien
caaatccaagtctttctcacttatctcaagctg

SEQ ID NO: 66163 - DNA, 33 bp, Homo sapien
aattgcagagggtggccccatccatgtcacatc

SEQ ID NO: 66164 - DNA, 33 bp, Homo sapien
aattgcagagggtggcgccatccatgtcacatc

SEQ ID NO: 66165 - DNA, 33 bp, Homo sapien
gcaagaaacctctgaccctgaaagattaaaact

SEQ ID NO: 66166 - DNA, 33 bp, Homo sapien
gcaagaaacctctgactctgaaagattaaaact

SEQ ID NO: 66167 - DNA, 33 bp, Homo sapien
tctgtccaaagattcacagcaaactgtagtgtt

SEQ ID NO: 66168 - DNA, 33 bp, Homo sapien
tctgtccaaagattcatagcaaactgtagtgtt

SEQ ID NO: 66169 - DNA, 33 bp, Homo sapien
tctaactagcagccaggcctcactcaatggtgc

SEQ ID NO: 66170 - DNA, 33 bp, Homo sapien
tctaactagcagccagtcctcactcaatggtgc

SEQ ID NO: 66171 - DNA, 33 bp, Homo sapien
agttgctattggatacaaatgttatcttagaga

SEQ ID NO: 66172 - DNA, 33 bp, Homo sapien
agttgctattggatacgaatgttatcttagaga

SEQ ID NO: 66173 - DNA, 33 bp, Homo sapien
tctagagggagcaagacctgtacagagggcttc

SEQ ID NO: 66174 - DNA, 33 bp, Homo sapien
tctagagggagcaagagctgtacagagggcttc

SEQ ID NO: 66175 - DNA, 33 bp, Homo sapien
ccagcttaagaaagaacgatggagcaataagtg

SEQ ID NO: 66176 - DNA, 33 bp, Homo sapien
ccagcttaagaaagaaggatggagcaataagtg

SEQ ID NO: 66177 - DNA, 33 bp, Homo sapien
cacagaagtcatgtaccctgcattgtagctgac

SEQ ID NO: 66178 - DNA, 33 bp, Homo sapien
cacagaagtcatgtactctgcattgtagctgac

SEQ ID NO: 66179 - DNA, 33 bp, Homo sapien
aagtctggggaaccaaacaatctcattgccagc

SEQ ID NO: 66180 - DNA, 33 bp, Homo sapien
aagtctggggaaccaaccaatctcattgccagc

SEQ ID NO: 66181 - DNA, 33 bp, Homo sapien
attagcagcttttccagtctcattgtgacttct

SEQ ID NO: 66182 - DNA, 33 bp, Homo sapien
attagcagcttttccattctcattgtgacttct

SEQ ID NO: 66183 - DNA, 33 bp, Homo sapien
aggtcatgctgggtctcaccctagagctttgtc

SEQ ID NO: 66184 - DNA, 33 bp, Homo sapien
aggtcatgctgggtcttaccctagagctttgtc

SEQ ID NO: 66185 - DNA, 33 bp, Homo sapien
acgctcccttggttgccattctgaccttgccag

SEQ ID NO: 66186 - DNA, 33 bp, Homo sapien
acgctcccttggttgcgattctgaccttgccag

SEQ ID NO: 66187 - DNA, 33 bp, Homo sapien
gtgcattgcattgaacactgcatttattcatat

SEQ ID NO: 66188 - DNA, 33 bp, Homo sapien
gtgcattgcattgaactctgcatttattcatat

SEQ ID NO: 66189 - DNA, 33 bp, Homo sapien
tgactttgctagtccacggtcttcattagcata

SEQ ID NO: 66190 - DNA, 33 bp, Homo sapien
tgactttgctagtccatggtcttcattagcata

SEQ ID NO: 66191 - DNA, 33 bp, Homo sapien
ggacagagacagggaggaaaagatgagaggaga

SEQ ID NO: 66192 - DNA, 33 bp, Homo sapien
ggacagagacagggagtaaaagatgagaggaga

SEQ ID NO: 66193 - DNA, 33 bp, Homo sapien
ttctggaagtgccatccgaactgactggcaaca

SEQ ID NO: 66194 - DNA, 33 bp, Homo sapien
ttctggaagtgccatctgaactgactggcaaca

SEQ ID NO: 66195 - DNA, 33 bp, Homo sapien
gcaaaagagaaaaggacattgcaagagacctaa

SEQ ID NO: 66196 - DNA, 33 bp, Homo sapien
gcaaaagagaaaaggatattgcaagagacctaa

SEQ ID NO: 66197 - DNA, 33 bp, Homo sapien
tgaacattaaattatgaaacttgagtggtgcat

SEQ ID NO: 66198 - DNA, 33 bp, Homo sapien
tgaacattaaattatgtaacttgagtggtgcat

SEQ ID NO: 66199 - DNA, 33 bp, Homo sapien
aactctagccttcatcagaatccctggaggact

SEQ ID NO: 66200 - DNA, 33 bp, Homo sapien
aactctagccttcatcggaatccctggaggact

SEQ ID NO: 66201 - DNA, 33 bp, Homo sapien
ctgggggaagcatagacagtctgacccaccaga

SEQ ID NO: 66202 - DNA, 33 bp, Homo sapien
ctgggggaagcatagatagtctgacccaccaga

SEQ ID NO: 66203 - DNA, 33 bp, Homo sapien
gacccctctaaaataacttagttgagtcattgt

SEQ ID NO: 66204 - DNA, 33 bp, Homo sapien
gacccctctaaaataagttagttgagtcattgt

SEQ ID NO: 66205 - DNA, 33 bp, Homo sapien
ggatggagttccaggcactcttcaggtagtagc

SEQ ID NO: 66206 - DNA, 33 bp, Homo sapien
ggatggagttccaggcgctcttcaggtagtagc

SEQ ID NO: 66207 - DNA, 33 bp, Homo sapien
aatgcacacatcagtacgtttctgcagtgtttt

SEQ ID NO: 66208 - DNA, 33 bp, Homo sapien
aatgcacacatcagtatgtttctgcagtgtttt

SEQ ID NO: 66209 - DNA, 33 bp, Homo sapien
tgcatggagtgtaatggagtgactgtggtctcc

SEQ ID NO: 66210 - DNA, 33 bp, Homo sapien
tgcatggagtgtaatgtagtgactgtggtctcc

SEQ ID NO: 66211 - DNA, 33 bp, Homo sapien
aaccacacaaaattcaagacagtggtgactttg

SEQ ID NO: 66212 - DNA, 33 bp, Homo sapien
aaccacacaaaattcaggacagtggtgactttg

SEQ ID NO: 66213 - DNA, 33 bp, Homo sapien
ataagcagacgatatacagtgtaggttatcctt

SEQ ID NO: 66214 - DNA, 33 bp, Homo sapien
ataagcagacgatatagagtgtaggttatcctt

SEQ ID NO: 66215 - DNA, 33 bp, Homo sapien
attccaggcaaggcccacagccttcttggtgct

SEQ ID NO: 66216 - DNA, 33 bp, Homo sapien
attccaggcaaggcccgcagccttcttggtgct

SEQ ID NO: 66217 - DNA, 33 bp, Homo sapien
cacggcctgagtgtaggccagcccagcaggaag

SEQ ID NO: 66218 - DNA, 33 bp, Homo sapien
cacggcctgagtgtagtccagcccagcaggaag

SEQ ID NO: 66219 - DNA, 33 bp, Homo sapien
ataagctacgtttagactcattatgcatagatc

SEQ ID NO: 66220 - DNA, 33 bp, Homo sapien
ataagctacgtttagattcattatgcatagatc

SEQ ID NO: 66221 - DNA, 33 bp, Homo sapien
ccctgctctcccacagcctgaagcctggccttg

SEQ ID NO: 66222 - DNA, 33 bp, Homo sapien
ccctgctctcccacagtctgaagcctggccttg

SEQ ID NO: 66223 - DNA, 33 bp, Homo sapien
tgtgccggcttcattccctatgcactgggccac

SEQ ID NO: 66224 - DNA, 33 bp, Homo sapien
tgtgccggcttcattctctatgcactgggccac

SEQ ID NO: 66225 - DNA, 33 bp, Homo sapien
gggccagtggagaagaatatcactctaggccct

SEQ ID NO: 66226 - DNA, 33 bp, Homo sapien
gggccagtggagaagattatcactctaggccct

SEQ ID NO: 66227 - DNA, 33 bp, Homo sapien
gagcaagaaggaatcccattagcaggctgcctc

SEQ ID NO: 66228 - DNA, 33 bp, Homo sapien
gagcaagaaggaatcctattagcaggctgcctc

SEQ ID NO: 66229 - DNA, 33 bp, Homo sapien
gtgaattcgtaagaaaacaatcagcagtctgaa

SEQ ID NO: 66230 - DNA, 33 bp, Homo sapien
gtgaattcgtaagaaagcaatcagcagtctgaa

SEQ ID NO: 66231 - DNA, 33 bp, Homo sapien
tgtacttcatctccacaacctgttctgtcccac

SEQ ID NO: 66232 - DNA, 33 bp, Homo sapien
tgtacttcatctccacgacctgttctgtcccac

SEQ ID NO: 66233 - DNA, 33 bp, Homo sapien
tccatctcctacagaaatgcttttacctagttt

SEQ ID NO: 66234 - DNA, 33 bp, Homo sapien
tccatctcctacagaactgcttttacctagttt

SEQ ID NO: 66235 - DNA, 33 bp, Homo sapien
ctgcctcatgcttaacacacacaatggtaattt

SEQ ID NO: 66236 - DNA, 33 bp, Homo sapien
ctgcctcatgcttaacgcacacaatggtaattt

SEQ ID NO: 66237 - DNA, 33 bp, Homo sapien
agatggcaccttcttaccagagatgacttgaat

SEQ ID NO: 66238 - DNA, 33 bp, Homo sapien
agatggcaccttcttatcagagatgacttgaat

SEQ ID NO: 66239 - DNA, 33 bp, Homo sapien
tctcttgttgacagaaaaattcagcaagtgttc

SEQ ID NO: 66240 - DNA, 33 bp, Homo sapien
tctcttgttgacagaagaattcagcaagtgttc

SEQ ID NO: 66241 - DNA, 33 bp, Homo sapien
gttgctcacagcgctcactgttctcttaattag

SEQ ID NO: 66242 - DNA, 33 bp, Homo sapien
gttgctcacagcgctccctgttctcttaattag

SEQ ID NO: 66243 - DNA, 33 bp, Homo sapien
agccggcacccaatcaatgaaggctgttgctca

SEQ ID NO: 66244 - DNA, 33 bp, Homo sapien
agccggcacccaatcagtgaaggctgttgctca

SEQ ID NO: 66245 - DNA, 33 bp, Homo sapien
gtgtgtctgataggagcatttaagatctgcttt

SEQ ID NO: 66246 - DNA, 33 bp, Homo sapien
gtgtgtctgataggagtatttaagatctgcttt

SEQ ID NO: 66247 - DNA, 33 bp, Homo sapien
tagagcctggtagacacctcaaagggcagtgaa

SEQ ID NO: 66248 - DNA, 33 bp, Homo sapien
tagagcctggtagacatctcaaagggcagtgaa

SEQ ID NO: 66249 - DNA, 33 bp, Homo sapien
taacctggattacccaccgcctgctctcaactg

SEQ ID NO: 66250 - DNA, 33 bp, Homo sapien
taacctggattacccatcgcctgctctcaactg

SEQ ID NO: 66251 - DNA, 33 bp, Homo sapien
atgtgaagtattaaacacatcgtagatttcaat

SEQ ID NO: 66252 - DNA, 33 bp, Homo sapien
atgtgaagtattaaacgcatcgtagatttcaat

SEQ ID NO: 66253 - DNA, 33 bp, Homo sapien
aaagttttgaggatagcactcgaaagcgcaggg

SEQ ID NO: 66254 - DNA, 33 bp, Homo sapien
aaagttttgaggatagtactcgaaagcgcaggg

SEQ ID NO: 66255 - DNA, 33 bp, Homo sapien
ctcttttcctgaaatacgcataggagtgtacac

SEQ ID NO: 66256 - DNA, 33 bp, Homo sapien
ctcttttcctgaaatatgcataggagtgtacac

SEQ ID NO: 66257 - DNA, 33 bp, Homo sapien
ccattgcacagtaaggcaaactgagacccagag

SEQ ID NO: 66258 - DNA, 33 bp, Homo sapien
ccattgcacagtaagggaaactgagacccagag

SEQ ID NO: 66259 - DNA, 33 bp, Homo sapien
ctagctcagtgctttaaaaacattaacgtgctg

SEQ ID NO: 66260 - DNA, 33 bp, Homo sapien
ctagctcagtgctttagaaacattaacgtgctg

SEQ ID NO: 66261 - DNA, 33 bp, Homo sapien
ttacacatgtgcccagaccacgacagcctttat

SEQ ID NO: 66262 - DNA, 33 bp, Homo sapien
ttacacatgtgcccaggccacgacagcctttat

SEQ ID NO: 66263 - DNA, 33 bp, Homo sapien
acctactggtgcgggagcaaagctgatagagaa

SEQ ID NO: 66264 - DNA, 33 bp, Homo sapien
acctactggtgcgggatcaaagctgatagagaa

SEQ ID NO: 66265 - DNA, 33 bp, Homo sapien
aggcgccaacacatagccagtgtatgtaccccc

SEQ ID NO: 66266 - DNA, 33 bp, Homo sapien
aggcgccaacacatagtcagtgtatgtaccccc

SEQ ID NO: 66267 - DNA, 33 bp, Homo sapien
aacacaaactcattggccagctcaattttctgc

SEQ ID NO: 66268 - DNA, 33 bp, Homo sapien
aacacaaactcattgggcagctcaattttctgc

SEQ ID NO: 66269 - DNA, 33 bp, Homo sapien
tatattaaaatagtcactctggttgttgtgttg

SEQ ID NO: 66270 - DNA, 33 bp, Homo sapien
tatattaaaatagtcattctggttgttgtgttg

SEQ ID NO: 66271 - DNA, 33 bp, Homo sapien
tgttgtgccttcacccaaagagaagaaacactc

SEQ ID NO: 66272 - DNA, 33 bp, Homo sapien
tgttgtgccttcaccccaagagaagaaacactc

SEQ ID NO: 66273 - DNA, 33 bp, Homo sapien
tcagcttgcaaaaaccccacatgcaagcaacat

SEQ ID NO: 66274 - DNA, 33 bp, Homo sapien
tcagcttgcaaaaaccgcacatgcaagcaacat

SEQ ID NO: 66275 - DNA, 33 bp, Homo sapien
caagtgactggccggaactgggaagcagagctc

SEQ ID NO: 66276 - DNA, 33 bp, Homo sapien
caagtgactggccggagctgggaagcagagctc

SEQ ID NO: 66277 - DNA, 33 bp, Homo sapien
tgctccagccagattccatttcctcctcgtttg

SEQ ID NO: 66278 - DNA, 33 bp, Homo sapien
tgctccagccagattcgatttcctcctcgtttg

SEQ ID NO: 66279 - DNA, 33 bp, Homo sapien
attagtcagggctctacgtcctctccagtcagc

SEQ ID NO: 66280 - DNA, 33 bp, Homo sapien
attagtcagggctctatgtcctctccagtcagc

SEQ ID NO: 66281 - DNA, 33 bp, Homo sapien
ttgtgagtcaaacaaaactctttcctttataaa

SEQ ID NO: 66282 - DNA, 33 bp, Homo sapien
ttgtgagtcaaacaaatctctttcctttataaa

SEQ ID NO: 66283 - DNA, 33 bp, Homo sapien
ccatatccaaatgataacaacagtaaaatctta

SEQ ID NO: 66284 - DNA, 33 bp, Homo sapien
ccatatccaaatgatagcaacagtaaaatctta

SEQ ID NO: 66285 - DNA, 33 bp, Homo sapien
atttactgtacttgagacaatttacctccgaaa

SEQ ID NO: 66286 - DNA, 33 bp, Homo sapien
atttactgtacttgaggcaatttacctccgaaa

SEQ ID NO: 66287 - DNA, 33 bp, Homo sapien
attctcagtatccaaaatagagcaaactccttc

SEQ ID NO: 66288 - DNA, 33 bp, Homo sapien
attctcagtatccaaagtagagcaaactccttc

SEQ ID NO: 66289 - DNA, 33 bp, Homo sapien
tttggcctatcgtagaaaaggaaatttggctag

SEQ ID NO: 66290 - DNA, 33 bp, Homo sapien
tttggcctatcgtagagaaggaaatttggctag

SEQ ID NO: 66291 - DNA, 33 bp, Homo sapien
tcatgcagagagcttcacgtctgaagagagagc

SEQ ID NO: 66292 - DNA, 33 bp, Homo sapien
tcatgcagagagcttcgcgtctgaagagagagc

SEQ ID NO: 66293 - DNA, 33 bp, Homo sapien
tcgcagggtcaaaggcgcatctgtaggagactg

SEQ ID NO: 66294 - DNA, 33 bp, Homo sapien
tcgcagggtcaaaggctcatctgtaggagactg

SEQ ID NO: 66295 - DNA, 33 bp, Homo sapien
aatacttgagttagaccgggataagaagtatct

SEQ ID NO: 66296 - DNA, 33 bp, Homo sapien
aatacttgagttagactgggataagaagtatct

SEQ ID NO: 66297 - DNA, 33 bp, Homo sapien
gacaaaggcttattcaactacaaactgaattcc

SEQ ID NO: 66298 - DNA, 33 bp, Homo sapien
gacaaaggcttattcacctacaaactgaattcc

SEQ ID NO: 66299 - DNA, 33 bp, Homo sapien
tttgtcaaaactcatacgatgctacactacaaa

SEQ ID NO: 66300 - DNA, 33 bp, Homo sapien
tttgtcaaaactcataggatgctacactacaaa

SEQ ID NO: 66301 - DNA, 33 bp, Homo sapien
gacaaggtcttgattaacttaaaacatacaaag

SEQ ID NO: 66302 - DNA, 33 bp, Homo sapien
gacaaggtcttgattatcttaaaacatacaaag

SEQ ID NO: 66303 - DNA, 33 bp, Homo sapien
tcaggaggtaagaagaagatctgaggggaaaaa

SEQ ID NO: 66304 - DNA, 33 bp, Homo sapien
tcaggaggtaagaagaggatctgaggggaaaaa

SEQ ID NO: 66305 - DNA, 33 bp, Homo sapien
tatgtataaaaatcccagaatgctattgagata

SEQ ID NO: 66306 - DNA, 33 bp, Homo sapien
tatgtataaaaatcccggaatgctattgagata

SEQ ID NO: 66307 - DNA, 33 bp, Homo sapien
aagtctaagcaaaggggcacaacactcttggca

SEQ ID NO: 66308 - DNA, 33 bp, Homo sapien
aagtctaagcaaagggtcacaacactcttggca

SEQ ID NO: 66309 - DNA, 33 bp, Homo sapien
tttgggcttgaggacactctataaatgagacag

SEQ ID NO: 66310 - DNA, 33 bp, Homo sapien
tttgggcttgaggacattctataaatgagacag

SEQ ID NO: 66311 - DNA, 33 bp, Homo sapien; identical to SEQ ID NO: 66309

SEQ ID NO: 66312 - DNA, 33 bp, Homo sapien; identical to SEQ ID NO: 66310

SEQ ID NO: 66313 - DNA, 33 bp, Homo sapien
agttgttcagatttctaaagtcttaatctctag

SEQ ID NO: 66314 - DNA, 33 bp, Homo sapien
agttgttcagatttctcaagtcttaatctctag

SEQ ID NO: 66315 - DNA, 33 bp, Homo sapien
ccatattaaataatccaaaagtgagcctagaga

SEQ ID NO: 66316 - DNA, 33 bp, Homo sapien
ccatattaaataatcctaaagtgagcctagaga

SEQ ID NO: 66317 - DNA, 33 bp, Homo sapien
ttgccatactgagaaactggaactttaccctac

SEQ ID NO: 66318 - DNA, 33 bp, Homo sapien
ttgccatactgagaaattggaactttaccctac

SEQ ID NO: 66319 - DNA, 33 bp, Homo sapien
ttgttacatgaataaacggaaatgcacattaca

SEQ ID NO: 66320 - DNA, 33 bp, Homo sapien
ttgttacatgaataaatggaaatgcacattaca

SEQ ID NO: 66321 - DNA, 33 bp, Homo sapien
tgtgtgtgtggctttgcagtatttgtaggaata

SEQ ID NO: 66322 - DNA, 33 bp, Homo sapien
tgtgtgtgtggctttgtagtatttgtaggaata

SEQ ID NO: 66323 - DNA, 33 bp, Homo sapien
taactggactcttccaatatttcatatttcacc

SEQ ID NO: 66324 - DNA, 33 bp, Homo sapien
taactggactcttccagtatttcatatttcacc

SEQ ID NO: 66325 - DNA, 33 bp, Homo sapien
cactattacagatagagagaatgaccacagcct

SEQ ID NO: 66326 - DNA, 33 bp, Homo sapien
cactattacagatagatagaatgaccacagcct

SEQ ID NO: 66327 - DNA, 33 bp, Homo sapien
tggaagaaaggcttaaatcttcttgaaaaggtc

SEQ ID NO: 66328 - DNA, 33 bp, Homo sapien
tggaagaaaggcttaagtcttcttgaaaaggtc

SEQ ID NO: 66329 - DNA, 33 bp, Homo sapien
tcacacagtgctcctaactgacagggttgttct

SEQ ID NO: 66330 - DNA, 33 bp, Homo sapien
tcacacagtgctcctacctgacagggttgttct

SEQ ID NO: 66331 - DNA, 33 bp, Homo sapien
ggatagcatggtagaacgttactgtgaaagtac

SEQ ID NO: 66332 - DNA, 33 bp, Homo sapien
ggatagcatggtagaatgttactgtgaaagtac

SEQ ID NO: 66333 - DNA, 33 bp, Homo sapien
aaatatggtacctagacacaaacataaaggcag

SEQ ID NO: 66334 - DNA, 33 bp, Homo sapien
aaatatggtacctagatacaaacataaaggcag

SEQ ID NO: 66335 - DNA, 33 bp, Homo sapien; identical to SEQ ID NO: 66333

SEQ ID NO: 66336 - DNA, 33 bp, Homo sapien; identical to SEQ ID NO: 66334

SEQ ID NO: 66337 - DNA, 33 bp, Homo sapien
agaagaaatggtcagtaaattcaatgaggagga

SEQ ID NO: 66338 - DNA, 33 bp, Homo sapien
agaagaaatggtcagtgaattcaatgaggagga

SEQ ID NO: 66339 - DNA, 33 bp, Homo sapien
aaagcaggtcaagctacctcagacacaccttgc

SEQ ID NO: 66340 - DNA, 33 bp, Homo sapien
aaagcaggtcaagctatctcagacacaccttgc

SEQ ID NO: 66341 - DNA, 33 bp, Homo sapien
gtactctgtgtttggaggctaactccagtgtgc

SEQ ID NO: 66342 - DNA, 33 bp, Homo sapien
gtactctgtgtttggatgctaactccagtgtgc

SEQ ID NO: 66343 - DNA, 33 bp, Homo sapien; identical to SEQ ID NO: 66341

SEQ ID NO: 66344 - DNA, 33 bp, Homo sapien; identical to SEQ ID NO: 66342

SEQ ID NO: 66345 - DNA, 33 bp, Homo sapien
tgttgagtaggcctgcaaaacctgaaagattta

SEQ ID NO: 66346 - DNA, 33 bp, Homo sapien
tgttgagtaggcctgcgaaacctgaaagattta

SEQ ID NO: 66347 - DNA, 33 bp, Homo sapien
actcaagaacataaagaatttgaacagcataat

SEQ ID NO: 66348 - DNA, 33 bp, Homo sapien
actcaagaacataaaggatttgaacagcataat

SEQ ID NO: 66349 - DNA, 33 bp, Homo sapien
agtccattgtatcactgacaccttttcgtcctc

SEQ ID NO: 66350 - DNA, 33 bp, Homo sapien
agtccattgtatcacttacaccttttcgtcctc

SEQ ID NO: 66351 - DNA, 33 bp, Homo sapien; identical to SEQ ID NO: 66349

SEQ ID NO: 66352 - DNA, 33 bp, Homo sapien; identical to SEQ ID NO: 66350

SEQ ID NO: 66353 - DNA, 33 bp, Homo sapien
gaattgggtttgctaacggaaacaggcagtcac

SEQ ID NO: 66354 - DNA, 33 bp, Homo sapien
gaattgggtttgctaatggaaacaggcagtcac

SEQ ID NO: 66355 - DNA, 33 bp, Homo sapien; identical to SEQ ID NO: 66353

SEQ ID NO: 66356 - DNA, 33 bp, Homo sapien; identical to SEQ ID NO: 66354

SEQ ID NO: 66357 - DNA, 33 bp, Homo sapien
ctgtaagatagtaatacggtcacgagtccctta

SEQ ID NO: 66358 - DNA, 33 bp, Homo sapien
ctgtaagatagtaatatggtcacgagtccctta

SEQ ID NO: 66359 - DNA, 33 bp, Homo sapien
gacagcacctgatccaacattcttcaaaacgga

SEQ ID NO: 66360 - DNA, 33 bp, Homo sapien
gacagcacctgatccagcattcttcaaaacgga

SEQ ID NO: 66361 - DNA, 33 bp, Homo sapien
agaatattttggacaccgtaccctttgtcaaat

SEQ ID NO: 66362 - DNA, 33 bp, Homo sapien
agaatattttggacactgtaccctttgtcaaat

SEQ ID NO: 66363 - DNA, 33 bp, Homo sapien; identical to SEQ ID NO: 66361

SEQ ID NO: 66364 - DNA, 33 bp, Homo sapien; identical to SEQ ID NO: 66362

SEQ ID NO: 66365 - DNA, 33 bp, Homo sapien
agactgtcagtgttgacaattattttttgcatg

SEQ ID NO: 66366 - DNA, 33 bp, Homo sapien
agactgtcagtgttgataattattttttgcatg

SEQ ID NO: 66367 - DNA, 33 bp, Homo sapien; identical to SEQ ID NO: 66365

SEQ ID NO: 66368 - DNA, 33 bp, Homo sapien; identical to SEQ ID NO: 66366

SEQ ID NO: 66369 - DNA, 33 bp, Homo sapien
gcacctggcctaatacaatattcttacaattta

SEQ ID NO: 66370 - DNA, 33 bp, Homo sapien
gcacctggcctaatacgatattcttacaattta

SEQ ID NO: 66371 - DNA, 33 bp, Homo sapien
attagctaacaagccactagagagacagatcat

SEQ ID NO: 66372 - DNA, 33 bp, Homo sapien
attagctaacaagccagtagagagacagatcat

SEQ ID NO: 66373 - DNA, 33 bp, Homo sapien; identical to SEQ ID NO: 66371

SEQ ID NO: 66374 - DNA, 33 bp, Homo sapien; identical to SEQ ID NO: 66372

SEQ ID NO: 66375 - DNA, 33 bp, Homo sapien
taagatttaagtcagcgcataggtccaaaccac

SEQ ID NO: 66376 - DNA, 33 bp, Homo sapien
taagatttaagtcagctcataggtccaaaccac

SEQ ID NO: 66377 - DNA, 33 bp, Homo sapien
tctgccagcgttcccaaacctcagggctaaact

SEQ ID NO: 66378 - DNA, 33 bp, Homo sapien
tctgccagcgttcccagacctcagggctaaact

SEQ ID NO: 66379 - DNA, 33 bp, Homo sapien
ctgataattcagtgaacaattcctgatggtctg

SEQ ID NO: 66380 - DNA, 33 bp, Homo sapien
ctgataattcagtgaataattcctgatggtctg

SEQ ID NO: 66381 - DNA, 33 bp, Homo sapien
aatggttaaataagaaaatatgtgaaagtacga

SEQ ID NO: 66382 - DNA, 33 bp, Homo sapien
aatggttaaataagaacatatgtgaaagtacga

SEQ ID NO: 66383 - DNA, 33 bp, Homo sapien
gccaggctctaactcaactttccctctgtcacc

SEQ ID NO: 66384 - DNA, 33 bp, Homo sapien
gccaggctctaactcacctttccctctgtcacc

SEQ ID NO: 66385 - DNA, 33 bp, Homo sapien
ggtccctgtgacacaacaatagaaagctggacc

SEQ ID NO: 66386 - DNA, 33 bp, Homo sapien
ggtccctgtgacacaataatagaaagctggacc

SEQ ID NO: 66387 - DNA, 33 bp, Homo sapien
atttctttaataaggagacgcagttcattacaa

SEQ ID NO: 66388 - DNA, 33 bp, Homo sapien
atttctttaataaggatacgcagttcattacaa

SEQ ID NO: 66389 - DNA, 33 bp, Homo sapien
ctgtggtgaaaaaatgacaagggcctgagggct

SEQ ID NO: 66390 - DNA, 33 bp, Homo sapien
ctgtggtgaaaaaatggcaagggcctgagggct

SEQ ID NO: 66391 - DNA, 33 bp, Homo sapien
ctgagtcttcttccaaaccttcagcctggacaa

SEQ ID NO: 66392 - DNA, 33 bp, Homo sapien
ctgagtcttcttccaatccttcagcctggacaa

SEQ ID NO: 66393 - DNA, 33 bp, Homo sapien
aaacttacaacatgaagtgataaaggttatgct

SEQ ID NO: 66394 - DNA, 33 bp, Homo sapien
aaacttacaacatgaattgataaaggttatgct

SEQ ID NO: 66395 - DNA, 33 bp, Homo sapien
cagactctttctcacaaggccttacttagactc

SEQ ID NO: 66396 - DNA, 33 bp, Homo sapien
cagactctttctcacagggccttacttagactc

SEQ ID NO: 66397 - DNA, 33 bp, Homo sapien
gggaatcaaatgaggcagaagagtgaccctgag

SEQ ID NO: 66398 - DNA, 33 bp, Homo sapien
gggaatcaaatgaggcggaagagtgaccctgag

SEQ ID NO: 66399 - DNA, 33 bp, Homo sapien
aggaactccatacatactaacagtcaccctcga

SEQ ID NO: 66400 - DNA, 33 bp, Homo sapien
aggaactccatacatattaacagtcaccctcga

SEQ ID NO: 66401 - DNA, 33 bp, Homo sapien
gtaacaagtgtttaagaaacttagccaaagtcc

SEQ ID NO: 66402 - DNA, 33 bp, Homo sapien
gtaacaagtgtttaagtaacttagccaaagtcc

SEQ ID NO: 66403 - DNA, 33 bp, Homo sapien
aggttgcctgtattcaaatgccagctcctccag

SEQ ID NO: 66404 - DNA, 33 bp, Homo sapien
aggttgcctgtattcagatgccagctcctccag

SEQ ID NO: 66405 - DNA, 33 bp, Homo sapien
gacaatgacagcctgacaatcttaatttcactt

SEQ ID NO: 66406 - DNA, 33 bp, Homo sapien
gacaatgacagcctgataatcttaatttcactt

SEQ ID NO: 66407 - DNA, 33 bp, Homo sapien; identical to SEQ ID NO: 66405

SEQ ID NO: 66408 - DNA, 33 bp, Homo sapien; identical to SEQ ID NO: 66406

SEQ ID NO: 66409 - DNA, 33 bp, Homo sapien
ctctccaggtctgccgcccaagcacaggattct

SEQ ID NO: 66410 - DNA, 33 bp, Homo sapien
ctctccaggtctgccgtccaagcacaggattct

SEQ ID NO: 66411 - DNA, 33 bp, Homo sapien
gggtatgtaaactgcaacctgaggaactctacc

SEQ ID NO: 66412 - DNA, 33 bp, Homo sapien
gggtatgtaaactgcagcctgaggaactctacc

SEQ ID NO: 66413 - DNA, 33 bp, Homo sapien
aaggcccttctccaaacggccccacctgatcac

SEQ ID NO: 66414 - DNA, 33 bp, Homo sapien
aaggcccttctccaaatggccccacctgatcac

SEQ ID NO: 66415 - DNA, 33 bp, Homo sapien
gatatatagattcacacgcttacctagagcacc

SEQ ID NO: 66416 - DNA, 33 bp, Homo sapien
gatatatagattcacatgcttacctagagcacc

SEQ ID NO: 66417 - DNA, 33 bp, Homo sapien
acatatgtggagggcccaacctcgtgccacagc

SEQ ID NO: 66418 - DNA, 33 bp, Homo sapien
acatatgtggagggccgaacctcgtgccacagc

SEQ ID NO: 66419 - DNA, 33 bp, Homo sapien
aacttaaatgcttgccagattggagagcttctc

SEQ ID NO: 66420 - DNA, 33 bp, Homo sapien
aacttaaatgcttgccggattggagagcttctc

SEQ ID NO: 66421 - DNA, 33 bp, Homo sapien
tgctgtggagtgacaccgggggctctttgctga

SEQ ID NO: 66422 - DNA, 33 bp, Homo sapien
tgctgtggagtgacactgggggctctttgctga

SEQ ID NO: 66423 - DNA, 33 bp, Homo sapien
ggtgatcagtggaccacctttatttttttattt

SEQ ID NO: 66424 - DNA, 33 bp, Homo sapien
ggtgatcagtggaccatctttatttttttattt

SEQ ID NO: 66425 - DNA, 33 bp, Homo sapien
tgtccacaagaggcccaccctccaatgaggaga

SEQ ID NO: 66426 - DNA, 33 bp, Homo sapien
tgtccacaagaggcccgccctccaatgaggaga

SEQ ID NO: 66427 - DNA, 33 bp, Homo sapien
aacatcaacaggtcccaaattcctgaaggcttg

SEQ ID NO: 66428 - DNA, 33 bp, Homo sapien
aacatcaacaggtcccgaattcctgaaggcttg

SEQ ID NO: 66429 - DNA, 33 bp, Homo sapien
actgtaaaacgtgccacatgatagtttgaaaac

SEQ ID NO: 66430 - DNA, 33 bp, Homo sapien
actgtaaaacgtgccatatgatagtttgaaaac

SEQ ID NO: 66431 - DNA, 33 bp, Homo sapien
cattcagtccatagcactgcatttgtcaattat

SEQ ID NO: 66432 - DNA, 33 bp, Homo sapien
cattcagtccatagcattgcatttgtcaattat

SEQ ID NO: 66433 - DNA, 33 bp, Homo sapien
tcattcaggcttctaacggcaaatgagatcaga

SEQ ID NO: 66434 - DNA, 33 bp, Homo sapien
tcattcaggcttctaatggcaaatgagatcaga

SEQ ID NO: 66435 - DNA, 33 bp, Homo sapien
atatacctgtgctctcccattgttcagaaattc

SEQ ID NO: 66436 - DNA, 33 bp, Homo sapien
atatacctgtgctctctcattgttcagaaattc

SEQ ID NO: 66437 - DNA, 33 bp, Homo sapien
ggaactgtgagttgatgaaatctctcttcttca

SEQ ID NO: 66438 - DNA, 33 bp, Homo sapien
ggaactgtgagttgattaaatctctcttcttca

SEQ ID NO: 66439 - DNA, 33 bp, Homo sapien
ggtttatccacattgacgtgttgtatttccttg

SEQ ID NO: 66440 - DNA, 33 bp, Homo sapien
ggtttatccacattgatgtgttgtatttccttg

SEQ ID NO: 66441 - DNA, 33 bp, Homo sapien
ccaagcatggcttctaacactatagaaaaggtt

SEQ ID NO: 66442 - DNA, 33 bp, Homo sapien
ccaagcatggcttctagcactatagaaaaggtt

SEQ ID NO: 66443 - DNA, 33 bp, Homo sapien
cataagaatggcctaacacaaccctgttaacac

SEQ ID NO: 66444 - DNA, 33 bp, Homo sapien
cataagaatggcctaatacaaccctgttaacac

SEQ ID NO: 66445 - DNA, 33 bp, Homo sapien
ggtttccagaattgcaagggtgctacggaggat

SEQ ID NO: 66446 - DNA, 33 bp, Homo sapien
ggtttccagaattgcacgggtgctacggaggat

SEQ ID NO: 66447 - DNA, 33 bp, Homo sapien
gatcattggaatgaagcaaaaagtgcttaatac

SEQ ID NO: 66448 - DNA, 33 bp, Homo sapien
gatcattggaatgaagtaaaaagtgcttaatac

SEQ ID NO: 66449 - DNA, 33 bp, Homo sapien
ggcatacctggcataacggggagcacacgtctc

SEQ ID NO: 66450 - DNA, 33 bp, Homo sapien
ggcatacctggcataatggggagcacacgtctc

SEQ ID NO: 66451 - DNA, 33 bp, Homo sapien
tggcaccttaccatgaatcaaggtaatagtatc

SEQ ID NO: 66452 - DNA, 33 bp, Homo sapien
tggcaccttaccatgagtcaaggtaatagtatc

SEQ ID NO: 66453 - DNA, 33 bp, Homo sapien
cttggcatgtttaaaacaagactggtttacaag

SEQ ID NO: 66454 - DNA, 33 bp, Homo sapien
cttggcatgtttaaaataagactggtttacaag

SEQ ID NO: 66455 - DNA, 33 bp, Homo sapien
gcttctgaagccatccgaatccactggccagtt

SEQ ID NO: 66456 - DNA, 33 bp, Homo sapien
gcttctgaagccatcctaatccactggccagtt

SEQ ID NO: 66457 - DNA, 33 bp, Homo sapien
aaacatggctctctaccgatttgggttgtactc

SEQ ID NO: 66458 - DNA, 33 bp, Homo sapien
aaacatggctctctactgatttgggttgtactc

SEQ ID NO: 66459 - DNA, 33 bp, Homo sapien
aagaattcagatgtaccgggatagatcggcctc

SEQ ID NO: 66460 - DNA, 33 bp, Homo sapien
aagaattcagatgtacggggatagatcggcctc

SEQ ID NO: 66461 - DNA, 33 bp, Homo sapien
tacccttctaaattcactcatctcattggttcc

SEQ ID NO: 66462 - DNA, 33 bp, Homo sapien
tacccttctaaattcattcatctcattggttcc

SEQ ID NO: 66463 - DNA, 33 bp, Homo sapien
atttcccctctgtggacctactataatctcttt

SEQ ID NO: 66464 - DNA, 33 bp, Homo sapien
atttcccctctgtggatctactataatctcttt

SEQ ID NO: 66465 - DNA, 33 bp, Homo sapien
gaaataagtatagatacagcaagtgccattata

SEQ ID NO: 66466 - DNA, 33 bp, Homo sapien
gaaataagtatagatatagcaagtgccattata

SEQ ID NO: 66467 - DNA, 33 bp, Homo sapien
ggctagtcaatggagaaaacagaaaggactttc

SEQ ID NO: 66468 - DNA, 33 bp, Homo sapien
ggctagtcaatggagacaacagaaaggactttc

SEQ ID NO: 66469 - DNA, 33 bp, Homo sapien
tttcctctttcaggacaagcactatgccctcag

SEQ ID NO: 66470 - DNA, 33 bp, Homo sapien
tttcctctttcaggacgagcactatgccctcag

SEQ ID NO: 66471 - DNA, 33 bp, Homo sapien
ggaaaattacttatcaccctttgccttcagatt

SEQ ID NO: 66472 - DNA, 33 bp, Homo sapien
ggaaaattacttatcatcctttgccttcagatt

SEQ ID NO: 66473 - DNA, 33 bp, Homo sapien
actgtacagttgacaaaagcacagtaataaggt

SEQ ID NO: 66474 - DNA, 33 bp, Homo sapien
actgtacagttgacaacagcacagtaataaggt

SEQ ID NO: 66475 - DNA, 33 bp, Homo sapien
tacattgctctcagacaggtccagtgaaaagaa

SEQ ID NO: 66476 - DNA, 33 bp, Homo sapien
tacattgctctcagacgggtccagtgaaaagaa

SEQ ID NO: 66477 - DNA, 33 bp, Homo sapien
aactgtatattttgacagaatattagatgagga

SEQ ID NO: 66478 - DNA, 33 bp, Homo sapien
aactgtatattttgacggaatattagatgagga

SEQ ID NO: 66479 - DNA, 33 bp, Homo sapien
tattgcattaatcatactaaatcagtaactggt

SEQ ID NO: 66480 - DNA, 33 bp, Homo sapien
tattgcattaatcatagtaaatcagtaactggt

SEQ ID NO: 66481 - DNA, 33 bp, Homo sapien
cccattaccctcacaaaattggcgttgtttaat

SEQ ID NO: 66482 - DNA, 33 bp, Homo sapien
cccattaccctcacaagattggcgttgtttaat

SEQ ID NO: 66483 - DNA, 33 bp, Homo sapien
tgttattctcttcctacctctctacagcacaga

SEQ ID NO: 66484 - DNA, 33 bp, Homo sapien
tgttattctcttcctatctctctacagcacaga

SEQ ID NO: 66485 - DNA, 33 bp, Homo sapien
tttactgagtgtttaagtctttgtctgtcacgt

SEQ ID NO: 66486 - DNA, 33 bp, Homo sapien
tttactgagtgtttaattctttgtctgtcacgt

SEQ ID NO: 66487 - DNA, 33 bp, Homo sapien
ttacattaggaatgtacgattattatggtatta

SEQ ID NO: 66488 - DNA, 33 bp, Homo sapien
ttacattaggaatgtatgattattatggtatta

SEQ ID NO: 66489 - DNA, 33 bp, Homo sapien
atgaccctcattctcactctacacacctatttc

SEQ ID NO: 66490 - DNA, 33 bp, Homo sapien
atgaccctcattctcattctacacacctatttc

SEQ ID NO: 66491 - DNA, 33 bp, Homo sapien
tgaggccacagagctggaatgggcctgaccagc

SEQ ID NO: 66492 - DNA, 33 bp, Homo sapien
tgaggccacagagctgtaatgggcctgaccagc

SEQ ID NO: 66493 - DNA, 33 bp, Homo sapien
tcctagcatgtgacataaagctacattactaca

SEQ ID NO: 66494 - DNA, 33 bp, Homo sapien
tcctagcatgtgacatgaagctacattactaca

SEQ ID NO: 66495 - DNA, 33 bp, Homo sapien
cagacttgagaggggcaaaagacttgaaataat

SEQ ID NO: 66496 - DNA, 33 bp, Homo sapien
cagacttgagaggggcgaaagacttgaaataat

SEQ ID NO: 66497 - DNA, 33 bp, Homo sapien
agaatacatgataaaactactgggaggctggaa

SEQ ID NO: 66498 - DNA, 33 bp, Homo sapien
agaatacatgataaaagtactgggaggctggaa

SEQ ID NO: 66499 - DNA, 33 bp, Homo sapien
ggcagctttgggaagacgacaacaattgacaac

SEQ ID NO: 66500 - DNA, 33 bp, Homo sapien
ggcagctttgggaagatgacaacaattgacaac

SEQ ID NO: 66501 - DNA, 33 bp, Homo sapien
agtaaagtttgagaagaactaagctaggtgatg

SEQ ID NO: 66502 - DNA, 33 bp, Homo sapien
agtaaagtttgagaagtactaagctaggtgatg

SEQ ID NO: 66503 - DNA, 33 bp, Homo sapien
gcagcccctgtagacacgagaatgaggcctcag

SEQ ID NO: 66504 - DNA, 33 bp, Homo sapien
gcagcccctgtagacatgagaatgaggcctcag

SEQ ID NO: 66505 - DNA, 33 bp, Homo sapien
gtctgaagcttcctaacaaagaaggagcccaga

SEQ ID NO: 66506 - DNA, 33 bp, Homo sapien
gtctgaagcttcctaataaagaaggagcccaga

SEQ ID NO: 66507 - DNA, 33 bp, Homo sapien
gccctgatggttcctcactttgccaggtctgtc

SEQ ID NO: 66508 - DNA, 33 bp, Homo sapien
gccctgatggttcctcgctttgccaggtctgtc

SEQ ID NO: 66509 - DNA, 33 bp, Homo sapien
caggtgaatttgatggacactcctgccacttaa

SEQ ID NO: 66510 - DNA, 33 bp, Homo sapien
caggtgaatttgatggtcactcctgccacttaa

SEQ ID NO: 66511 - DNA, 33 bp, Homo sapien
gtatgtactgagagcccattaggtgtgagggaa

SEQ ID NO: 66512 - DNA, 33 bp, Homo sapien
gtatgtactgagagcctattaggtgtgagggaa

SEQ ID NO: 66513 - DNA, 33 bp, Homo sapien
cctattcaagtcgctacatatttttttgttgtt

SEQ ID NO: 66514 - DNA, 33 bp, Homo sapien
cctattcaagtcgctatatatttttttgttgtt

SEQ ID NO: 66515 - DNA, 33 bp, Homo sapien
gccaggagattagctacaacatccggaatgtaa

SEQ ID NO: 66516 - DNA, 33 bp, Homo sapien
gccaggagattagctataacatccggaatgtaa

SEQ ID NO: 66517 - DNA, 33 bp, Homo sapien
catggtgattgcttgacgaatatatgcagtgga

SEQ ID NO: 66518 - DNA, 33 bp, Homo sapien
catggtgattgcttgatgaatatatgcagtgga

SEQ ID NO: 66519 - DNA, 33 bp, Homo sapien
ccacaatggtatgttccacagaaaaatcaacac

SEQ ID NO: 66520 - DNA, 33 bp, Homo sapien
ccacaatggtatgttctacagaaaaatcaacac

SEQ ID NO: 66521 - DNA, 33 bp, Homo sapien
gtaaatattttactgacgagaatctccaaagtg

SEQ ID NO: 66522 - DNA, 33 bp, Homo sapien
gtaaatattttactgatgagaatctccaaagtg

SEQ ID NO: 66523 - DNA, 33 bp, Homo sapien
atgatataaacagataagttgagcagtatttcc

SEQ ID NO: 66524 - DNA, 33 bp, Homo sapien
atgatataaacagatatgttgagcagtatttcc

SEQ ID NO: 66525 - DNA, 33 bp, Homo sapien
tatagtgtcatttcacaaaatgtttgaatgttg

SEQ ID NO: 66526 - DNA, 33 bp, Homo sapien
tatagtgtcatttcacgaaatgtttgaatgttg

SEQ ID NO: 66527 - DNA, 33 bp, Homo sapien
tccacctttccccatccaaatcactcaccaagc

SEQ ID NO: 66528 - DNA, 33 bp, Homo sapien
tccacctttccccatctaaatcactcaccaagc

SEQ ID NO: 66529 - DNA, 33 bp, Homo sapien
ggtacaacctcctttacgctacttgaaatttca

SEQ ID NO: 66530 - DNA, 33 bp, Homo sapien
ggtacaacctcctttaggctacttgaaatttca

SEQ ID NO: 66531 - DNA, 33 bp, Homo sapien
aggtatggatagaggccacccatagactctcta

SEQ ID NO: 66532 - DNA, 33 bp, Homo sapien
aggtatggatagaggctacccatagactctcta

SEQ ID NO: 66533 - DNA, 33 bp, Homo sapien
gggagaatgggaaactaacaaggccaatttcag

SEQ ID NO: 66534 - DNA, 33 bp, Homo sapien
gggagaatgggaaactgacaaggccaatttcag

SEQ ID NO: 66535 - DNA, 33 bp, Homo sapien
gtgcagatcgcgagacaacatagggtagtgcag

SEQ ID NO: 66536 - DNA, 33 bp, Homo sapien
gtgcagatcgcgagacgacatagggtagtgcag

SEQ ID NO: 66537 - DNA, 33 bp, Homo sapien
agtattattttattcccacttttcagatgaggt

SEQ ID NO: 66538 - DNA, 33 bp, Homo sapien
agtattattttattcctacttttcagatgaggt

SEQ ID NO: 66539 - DNA, 33 bp, Homo sapien
taagtactttcttctccccatacttcagattgg

SEQ ID NO: 66540 - DNA, 33 bp, Homo sapien
taagtactttcttctctccatacttcagattgg

SEQ ID NO: 66541 - DNA, 33 bp, Homo sapien
acagcttggctatggtaaccagtcttcagaggg

SEQ ID NO: 66542 - DNA, 33 bp, Homo sapien
acagcttggctatggttaccagtcttcagaggg

SEQ ID NO: 66543 - DNA, 33 bp, Homo sapien
ccccattgtccctcaactatattattgtcaggg

SEQ ID NO: 66544 - DNA, 33 bp, Homo sapien
ccccattgtccctcaagtatattattgtcaggg

SEQ ID NO: 66545 - DNA, 33 bp, Homo sapien
agttcagcgccacacaatgtatcagctgcttct

SEQ ID NO: 66546 - DNA, 33 bp, Homo sapien
agttcagcgccacacagtgtatcagctgcttct

SEQ ID NO: 66547 - DNA, 33 bp, Homo sapien
ccatgacttattcgtcaaactagtggttttgcc

SEQ ID NO: 66548 - DNA, 33 bp, Homo sapien
ccatgacttattcgtcgaactagtggttttgcc

SEQ ID NO: 66549 - DNA, 33 bp, Homo sapien
gcttagcagtatgaaccaaaagtatccaagaca

SEQ ID NO: 66550 - DNA, 33 bp, Homo sapien
gcttagcagtatgaacgaaaagtatccaagaca

SEQ ID NO: 66551 - DNA, 33 bp, Homo sapien
ggcaaattgtgaggaaagtatgtagcttcaaaa

SEQ ID NO: 66552 - DNA, 33 bp, Homo sapien
ggcaaattgtgaggaaggtatgtagcttcaaaa

SEQ ID NO: 66553 - DNA, 33 bp, Homo sapien
ggttgtcacagctagaagatactattgacatct

SEQ ID NO: 66554 - DNA, 33 bp, Homo sapien
ggttgtcacagctagaggatactattgacatct

SEQ ID NO: 66555 - DNA, 33 bp, Homo sapien
aacattgatgacagcaataagggacttaacagc

SEQ ID NO: 66556 - DNA, 33 bp, Homo sapien
aacattgatgacagcagtaagggacttaacagc

SEQ ID NO: 66557 - DNA, 33 bp, Homo sapien
cgaaattcagagagaaacaagtgagtaggagtg

SEQ ID NO: 66558 - DNA, 33 bp, Homo sapien
cgaaattcagagagaagcaagtgagtaggagtg

SEQ ID NO: 66559 - DNA, 33 bp, Homo sapien
tcaccagcagcttcccggccctaatctgtggtg

SEQ ID NO: 66560 - DNA, 33 bp, Homo sapien
tcaccagcagcttccctgccctaatctgtggtg

SEQ ID NO: 66561 - DNA, 33 bp, Homo sapien
agctatttccaagctacgtcctccttttccttc

SEQ ID NO: 66562 - DNA, 33 bp, Homo sapien
agctatttccaagctatgtcctccttttccttc

SEQ ID NO: 66563 - DNA, 33 bp, Homo sapien
gtggggctcagggaaccactttccccacctcat

SEQ ID NO: 66564 - DNA, 33 bp, Homo sapien
gtggggctcagggaacgactttccccacctcat

SEQ ID NO: 66565 - DNA, 33 bp, Homo sapien
ggaagaagctcaagagcaataaggatataattg

SEQ ID NO: 66566 - DNA, 33 bp, Homo sapien
ggaagaagctcaagaggaataaggatataattg

SEQ ID NO: 66567 - DNA, 33 bp, Homo sapien
gtgataccttgaagtacgaacagaaagggaaag

SEQ ID NO: 66568 - DNA, 33 bp, Homo sapien
gtgataccttgaagtaggaacagaaagggaaag

SEQ ID NO: 66569 - DNA, 33 bp, Homo sapien
aggaggagatataagacgtgataccaggagagt

SEQ ID NO: 66570 - DNA, 33 bp, Homo sapien
aggaggagatataagaggtgataccaggagagt

SEQ ID NO: 66571 - DNA, 33 bp, Homo sapien
ttttctatttcccacaatacttattagacataa

SEQ ID NO: 66572 - DNA, 33 bp, Homo sapien
ttttctatttcccacagtacttattagacataa

SEQ ID NO: 66573 - DNA, 33 bp, Homo sapien
agtaatcatgcaagacacagtctaccatgtcta

SEQ ID NO: 66574 - DNA, 33 bp, Homo sapien
agtaatcatgcaagacgcagtctaccatgtcta

SEQ ID NO: 66575 - DNA, 33 bp, Homo sapien
aacttatggtacaacaaaaagacctgggtcaga

SEQ ID NO: 66576 - DNA, 33 bp, Homo sapien
aacttatggtacaacagaaagacctgggtcaga

SEQ ID NO: 66577 - DNA, 33 bp, Homo sapien
ctgaagccaagataaccactggtaacacatttt

SEQ ID NO: 66578 - DNA, 33 bp, Homo sapien
ctgaagccaagataacgactggtaacacatttt

SEQ ID NO: 66579 - DNA, 33 bp, Homo sapien
gacagagcaaaatcacagtatataacctgtagt

SEQ ID NO: 66580 - DNA, 33 bp, Homo sapien
gacagagcaaaatcacggtatataacctgtagt

SEQ ID NO: 66581 - DNA, 33 bp, Homo sapien
atgtggggtctagatccgaggaaagttagtgca

SEQ ID NO: 66582 - DNA, 33 bp, Homo sapien
atgtggggtctagatctgaggaaagttagtgca

SEQ ID NO: 66583 - DNA, 33 bp, Homo sapien
ttgtgaacaccttgaccaagagagcaggcaaga

SEQ ID NO: 66584 - DNA, 33 bp, Homo sapien
ttgtgaacaccttgacgaagagagcaggcaaga

SEQ ID NO: 66585 - DNA, 33 bp, Homo sapien
ttacagttgtggaaacaaaggcacatagaggtt

SEQ ID NO: 66586 - DNA, 33 bp, Homo sapien
ttacagttgtggaaacgaaggcacatagaggtt

SEQ ID NO: 66587 - DNA, 33 bp, Homo sapien
gcatggggattatttacagtctcttgaactgct

SEQ ID NO: 66588 - DNA, 33 bp, Homo sapien
gcatggggattatttatagtctcttgaactgct

SEQ ID NO: 66589 - DNA, 33 bp, Homo sapien
actcattaaaaaggcaagacaaagtgaaggttt

SEQ ID NO: 66590 - DNA, 33 bp, Homo sapien
actcattaaaaaggcaggacaaagtgaaggttt

SEQ ID NO: 66591 - DNA, 33 bp, Homo sapien
aagagatgtgtttctaagctccagtgggacaga

SEQ ID NO: 66592 - DNA, 33 bp, Homo sapien
aagagatgtgtttctatgctccagtgggacaga

SEQ ID NO: 66593 - DNA, 33 bp, Homo sapien
cctcccgcagtgctgcccaggacctggaccgaa

SEQ ID NO: 66594 - DNA, 33 bp, Homo sapien
cctcccgcagtgctgctcaggacctggaccgaa

SEQ ID NO: 66595 - DNA, 33 bp, Homo sapien
gatggaaatcaacctccattgaacttgttttcc

SEQ ID NO: 66596 - DNA, 33 bp, Homo sapien
gatggaaatcaacctctattgaacttgttttcc

SEQ ID NO: 66597 - DNA, 33 bp, Homo sapien
cttcacagtggaccaaagcttaaaccagcggct

SEQ ID NO: 66598 - DNA, 33 bp, Homo sapien
cttcacagtggaccaaggcttaaaccagcggct

SEQ ID NO: 66599 - DNA, 33 bp, Homo sapien
gtccctcccaactctacctgcttttgactctta

SEQ ID NO: 66600 - DNA, 33 bp, Homo sapien
gtccctcccaactctatctgcttttgactctta

SEQ ID NO: 66601 - DNA, 33 bp, Homo sapien
gatacagggagagactaaagttgactgattaaa

SEQ ID NO: 66602 - DNA, 33 bp, Homo sapien
gatacagggagagactcaagttgactgattaaa

SEQ ID NO: 66603 - DNA, 33 bp, Homo sapien
tgctggaagtacaacacatgggccttcagcttt

SEQ ID NO: 66604 - DNA, 33 bp, Homo sapien
tgctggaagtacaacatatgggccttcagcttt

SEQ ID NO: 66605 - DNA, 33 bp, Homo sapien
tggctgccttcaccaacattggatttcctggac

SEQ ID NO: 66606 - DNA, 33 bp, Homo sapien
tggctgccttcaccaagattggatttcctggac

SEQ ID NO: 66607 - DNA, 33 bp, Homo sapien
atggtggcagctgggcagatcttaggaattccg

SEQ ID NO: 66608 - DNA, 33 bp, Homo sapien
atggtggcagctgggcggatcttaggaattccg

SEQ ID NO: 66609 - DNA, 33 bp, Homo sapien
ggtgttaagaagagaaatctgtgcaaacagtga

SEQ ID NO: 66610 - DNA, 33 bp, Homo sapien
ggtgttaagaagagaactctgtgcaaacagtga

SEQ ID NO: 66611 - DNA, 33 bp, Homo sapien
tttcaagaaattgcacagaagcggtgtgctccc

SEQ ID NO: 66612 - DNA, 33 bp, Homo sapien
tttcaagaaattgcaccgaagcggtgtgctccc

SEQ ID NO: 66613 - DNA, 33 bp, Homo sapien
ctctgtgttccaggtacattccaggtgtttcac

SEQ ID NO: 66614 - DNA, 33 bp, Homo sapien
ctctgtgttccaggtatattccaggtgtttcac

SEQ ID NO: 66615 - DNA, 33 bp, Homo sapien
ctggggcctaaatacacacccataccacgtaca

SEQ ID NO: 66616 - DNA, 33 bp, Homo sapien
ctggggcctaaatacatacccataccacgtaca

SEQ ID NO: 66617 - DNA, 33 bp, Homo sapien
attaggaaagaaatgcgaaggacaaccttgctt

SEQ ID NO: 66618 - DNA, 33 bp, Homo sapien
attaggaaagaaatgctaaggacaaccttgctt

SEQ ID NO: 66619 - DNA, 33 bp, Homo sapien
ttattgtcactattaaaatatggctcaagtgtg

SEQ ID NO: 66620 - DNA, 33 bp, Homo sapien
ttattgtcactattaacatatggctcaagtgtg

SEQ ID NO: 66621 - DNA, 33 bp, Homo sapien
gtgcctcaaggcagcaaccacatcttatctatt

SEQ ID NO: 66622 - DNA, 33 bp, Homo sapien
gtgcctcaaggcagcatccacatcttatctatt

SEQ ID NO: 66623 - DNA, 33 bp, Homo sapien
tgacatgccagtcaaaagtagatgtggccctgg

SEQ ID NO: 66624 - DNA, 33 bp, Homo sapien
tgacatgccagtcaaaggtagatgtggccctgg

SEQ ID NO: 66625 - DNA, 33 bp, Homo sapien
tgctggctatcaccaaatggggcatggtttggt

SEQ ID NO: 66626 - DNA, 33 bp, Homo sapien
tgctggctatcaccaagtggggcatggtttggt

SEQ ID NO: 66627 - DNA, 33 bp, Homo sapien
tatagacaattctttacctaaattgagggctga

SEQ ID NO: 66628 - DNA, 33 bp, Homo sapien
tatagacaattctttagctaaattgagggctga

SEQ ID NO: 66629 - DNA, 33 bp, Homo sapien
cctactgacaacttcacagaaactcctccaaaa

SEQ ID NO: 66630 - DNA, 33 bp, Homo sapien
cctactgacaacttcatagaaactcctccaaaa

SEQ ID NO: 66631 - DNA, 33 bp, Homo sapien
ccattttcgtagtgaactgggaagcaaggtcac

SEQ ID NO: 66632 - DNA, 33 bp, Homo sapien
ccattttcgtagtgaattgggaagcaaggtcac

SEQ ID NO: 66633 - DNA, 33 bp, Homo sapien
catcagggctgggctaaatctgacacttggtga

SEQ ID NO: 66634 - DNA, 33 bp, Homo sapien
catcagggctgggctagatctgacacttggtga

SEQ ID NO: 66635 - DNA, 33 bp, Homo sapien
gtaacagccccacttacggagtgcctactatgt

SEQ ID NO: 66636 - DNA, 33 bp, Homo sapien
gtaacagccccacttatggagtgcctactatgt

SEQ ID NO: 66637 - DNA, 33 bp, Homo sapien
ccaggagagaagctcacctatccttacacgtgg

SEQ ID NO: 66638 - DNA, 33 bp, Homo sapien
ccaggagagaagctcatctatccttacacgtgg

SEQ ID NO: 66639 - DNA, 33 bp, Homo sapien
gcatcattcccagttagcttgggagtgcagagc

SEQ ID NO: 66640 - DNA, 33 bp, Homo sapien
gcatcattcccagttatcttgggagtgcagagc

SEQ ID NO: 66641 - DNA, 33 bp, Homo sapien
aacatttgacgcaagaaggtcaggtgcctgtgt

SEQ ID NO: 66642 - DNA, 33 bp, Homo sapien
aacatttgacgcaagagggtcaggtgcctgtgt

SEQ ID NO: 66643 - DNA, 33 bp, Homo sapien
ggggtcaaatgagcaacttcagctactcacaga

SEQ ID NO: 66644 - DNA, 33 bp, Homo sapien
ggggtcaaatgagcaagttcagctactcacaga

SEQ ID NO: 66645 - DNA, 33 bp, Homo sapien
ggaccaggttagaaagacctgaaccctggaccc

SEQ ID NO: 66646 - DNA, 33 bp, Homo sapien
ggaccaggttagaaagccctgaaccctggaccc

SEQ ID NO: 66647 - DNA, 33 bp, Homo sapien
ggctgcatgcatcacacaagtttatacaaacca

SEQ ID NO: 66648 - DNA, 33 bp, Homo sapien
ggctgcatgcatcacataagtttatacaaacca

SEQ ID NO: 66649 - DNA, 33 bp, Homo sapien
aacttgtaacccacccagaatggcagtcctgtg

SEQ ID NO: 66650 - DNA, 33 bp, Homo sapien
aacttgtaacccacccggaatggcagtcctgtg

SEQ ID NO: 66651 - DNA, 33 bp, Homo sapien
cctctttagtattcaccgagcgtgattctggac

SEQ ID NO: 66652 - DNA, 33 bp, Homo sapien
cctctttagtattcactgagcgtgattctggac

SEQ ID NO: 66653 - DNA, 33 bp, Homo sapien
tcactgtaaagcatcaatatcatgtggctctgg

SEQ ID NO: 66654 - DNA, 33 bp, Homo sapien
tcactgtaaagcatcactatcatgtggctctgg

SEQ ID NO: 66655 - DNA, 33 bp, Homo sapien
ggtcatcagagtcacaacgtatcctcagacttc

SEQ ID NO: 66656 - DNA, 33 bp, Homo sapien
ggtcatcagagtcacagcgtatcctcagacttc

SEQ ID NO: 66657 - DNA, 33 bp, Homo sapien
tctggaatagaaagagaaatcactgaagtgagg

SEQ ID NO: 66658 - DNA, 33 bp, Homo sapien
tctggaatagaaagaggaatcactgaagtgagg

SEQ ID NO: 66659 - DNA, 33 bp, Homo sapien
aaaataagtttgataaagctaaaatcaagatgt

SEQ ID NO: 66660 - DNA, 33 bp, Homo sapien
aaaataagtttgataaggctaaaatcaagatgt

SEQ ID NO: 66661 - DNA, 33 bp, Homo sapien
gtgccagctcctcaataaaaacatgctcgaggc

SEQ ID NO: 66662 - DNA, 33 bp, Homo sapien
gtgccagctcctcaattaaaacatgctcgaggc

SEQ ID NO: 66663 - DNA, 33 bp, Homo sapien
tgaaacacagtgggacaataggacagaacagtt

SEQ ID NO: 66664 - DNA, 33 bp, Homo sapien
tgaaacacagtgggaccataggacagaacagtt

SEQ ID NO: 66665 - DNA, 33 bp, Homo sapien
ctgaccgtgttcttacacccgtggtcctcagtc

SEQ ID NO: 66666 - DNA, 33 bp, Homo sapien
ctgaccgtgttcttacccccgtggtcctcagtc

SEQ ID NO: 66667 - DNA, 33 bp, Homo sapien
taaactaaagagctcacaggagtctgccaggga

SEQ ID NO: 66668 - DNA, 33 bp, Homo sapien
taaactaaagagctcagaggagtctgccaggga

SEQ ID NO: 66669 - DNA, 33 bp, Homo sapien
acccagaaggtacaacagcaactatatcattca

SEQ ID NO: 66670 - DNA, 33 bp, Homo sapien
acccagaaggtacaacggcaactatatcattca

SEQ ID NO: 66671 - DNA, 33 bp, Homo sapien
tcaccctgatcccccaaccagaagactccttgc

SEQ ID NO: 66672 - DNA, 33 bp, Homo sapien
tcaccctgatcccccatccagaagactccttgc

SEQ ID NO: 66673 - DNA, 33 bp, Homo sapien
tgccccctggacaagtcacttctcatcccaagt

SEQ ID NO: 66674 - DNA, 33 bp, Homo sapien
tgccccctggacaagtgacttctcatcccaagt

SEQ ID NO: 66675 - DNA, 33 bp, Homo sapien
aacccagagctacttcacccaaccctggagtat

SEQ ID NO: 66676 - DNA, 33 bp, Homo sapien
aacccagagctacttcgcccaaccctggagtat

SEQ ID NO: 66677 - DNA, 33 bp, Homo sapien
tctgagatgcagaatgaaaaaggtgacaaagca

SEQ ID NO: 66678 - DNA, 33 bp, Homo sapien
tctgagatgcagaatggaaaaggtgacaaagca

SEQ ID NO: 66679 - DNA, 33 bp, Homo sapien
tgttcaggaactcttacgaatccctcacccagg

SEQ ID NO: 66680 - DNA, 33 bp, Homo sapien
tgttcaggaactcttatgaatccctcacccagg

SEQ ID NO: 66681 - DNA, 33 bp, Homo sapien
cctgctggaaccccagacaaatttggctccccc

SEQ ID NO: 66682 - DNA, 33 bp, Homo sapien
cctgctggaaccccaggcaaatttggctccccc

SEQ ID NO: 66683 - DNA, 33 bp, Homo sapien
aaaacaaaaaatcaacccagagagaaggtacag

SEQ ID NO: 66684 - DNA, 33 bp, Homo sapien
aaaacaaaaaatcaacgcagagagaaggtacag

SEQ ID NO: 66685 - DNA, 33 bp, Homo sapien
acagtcccaccagctgaaaacaccatgagggca

SEQ ID NO: 66686 - DNA, 33 bp, Homo sapien
acagtcccaccagctggaaacaccatgagggca

SEQ ID NO: 66687 - DNA, 33 bp, Homo sapien
acttcttctgtgtccagccatacactaatattc

SEQ ID NO: 66688 - DNA, 33 bp, Homo sapien
acttcttctgtgtccatccatacactaatattc

SEQ ID NO: 66689 - DNA, 33 bp, Homo sapien
tcttcatatgtctgtaaaatttgtatggtattt

SEQ ID NO: 66690 - DNA, 33 bp, Homo sapien
tcttcatatgtctgtagaatttgtatggtattt

SEQ ID NO: 66691 - DNA, 33 bp, Homo sapien
agggtaaaactaagacaacaatcatgataacga

SEQ ID NO: 66692 - DNA, 33 bp, Homo sapien
agggtaaaactaagacgacaatcatgataacga

SEQ ID NO: 66693 - DNA, 33 bp, Homo sapien
aaccaggtgctcattaaaattatggactctcag

SEQ ID NO: 66694 - DNA, 33 bp, Homo sapien
aaccaggtgctcattagaattatggactctcag

SEQ ID NO: 66695 - DNA, 33 bp, Homo sapien
gagggctgcgagtccacatgctgtactttgagg

SEQ ID NO: 66696 - DNA, 33 bp, Homo sapien
gagggctgcgagtccatatgctgtactttgagg

SEQ ID NO: 66697 - DNA, 33 bp, Homo sapien
caaacattaattgaagaccccctgtatgcttgg

SEQ ID NO: 66698 - DNA, 33 bp, Homo sapien
caaacattaattgaaggccccctgtatgcttgg

SEQ ID NO: 66699 - DNA, 33 bp, Homo sapien
agatctgactcactccagatggatagtgtcaga

SEQ ID NO: 66700 - DNA, 33 bp, Homo sapien
agatctgactcactccggatggatagtgtcaga

SEQ ID NO: 66701 - DNA, 33 bp, Homo sapien
tgatgtgagaagtgcaaaccaccccttaagacc

SEQ ID NO: 66702 - DNA, 33 bp, Homo sapien
tgatgtgagaagtgcataccaccccttaagacc

SEQ ID NO: 66703 - DNA, 33 bp, Homo sapien
tggaaacaggaaacagcctgatgtttagacatg

SEQ ID NO: 66704 - DNA, 33 bp, Homo sapien
tggaaacaggaaacaggctgatgtttagacatg

SEQ ID NO: 66705 - DNA, 33 bp, Homo sapien
tgtggcagattgagcacaggtatttatctccac

SEQ ID NO: 66706 - DNA, 33 bp, Homo sapien
tgtggcagattgagcataggtatttatctccac

SEQ ID NO: 66707 - DNA, 33 bp, Homo sapien
ctcagagggttgcaccactcaggggatttgcct

SEQ ID NO: 66708 - DNA, 33 bp, Homo sapien
ctcagagggttgcaccgctcaggggatttgcct

SEQ ID NO: 66709 - DNA, 33 bp, Homo sapien
aagagctctcccatccccagtggagttggctaa

SEQ ID NO: 66710 - DNA, 33 bp, Homo sapien
aagagctctcccatcctcagtggagttggctaa

SEQ ID NO: 66711 - DNA, 33 bp, Homo sapien
caggaacatcttagtgcaatagtgaggtgtgga

SEQ ID NO: 66712 - DNA, 33 bp, Homo sapien
caggaacatcttagtgtaatagtgaggtgtgga

SEQ ID NO: 66713 - DNA, 33 bp, Homo sapien
tcatagcaactttgtaaggcagacaagtggacc

SEQ ID NO: 66714 - DNA, 33 bp, Homo sapien
tcatagcaactttgtacggcagacaagtggacc

SEQ ID NO: 66715 - DNA, 33 bp, Homo sapien
gactgagaaatccttcaagaaaggctggctcca

SEQ ID NO: 66716 - DNA, 33 bp, Homo sapien
gactgagaaatccttcgagaaaggctggctcca

SEQ ID NO: 66717 - DNA, 33 bp, Homo sapien
atctgattcgctccacacccccttggtaactgc

SEQ ID NO: 66718 - DNA, 33 bp, Homo sapien
atctgattcgctccactcccccttggtaactgc

SEQ ID NO: 66719 - DNA, 33 bp, Homo sapien
ctgctggattatttcacgttagcctttatgata

SEQ ID NO: 66720 - DNA, 33 bp, Homo sapien
ctgctggattatttcatgttagcctttatgata

SEQ ID NO: 66721 - DNA, 33 bp, Homo sapien
gctcccttgaagcttacattctaccagggaaga

SEQ ID NO: 66722 - DNA, 33 bp, Homo sapien
gctcccttgaagcttatattctaccagggaaga

SEQ ID NO: 66723 - DNA, 33 bp, Homo sapien
gaagccttttagaggaagatttgcagagaagga

SEQ ID NO: 66724 - DNA, 33 bp, Homo sapien
gaagccttttagaggatgatttgcagagaagga

SEQ ID NO: 66725 - DNA, 33 bp, Homo sapien
acaagaggcaaactccagatgactttatttaca

SEQ ID NO: 66726 - DNA, 33 bp, Homo sapien
acaagaggcaaactccggatgactttatttaca

SEQ ID NO: 66727 - DNA, 33 bp, Homo sapien
aagagtgaccctggagcacaaagtagcagcaac

SEQ ID NO: 66728 - DNA, 33 bp, Homo sapien
aagagtgaccctggagtacaaagtagcagcaac

SEQ ID NO: 66729 - DNA, 33 bp, Homo sapien
cggagtgactgggaaacgatggtatcgctgaca

SEQ ID NO: 66730 - DNA, 33 bp, Homo sapien
cggagtgactgggaaatgatggtatcgctgaca

SEQ ID NO: 66731 - DNA, 33 bp, Homo sapien
gcttttctcatctgcacagtctgtcctcctgtc

SEQ ID NO: 66732 - DNA, 33 bp, Homo sapien
gcttttctcatctgcatagtctgtcctcctgtc

SEQ ID NO: 66733 - DNA, 33 bp, Homo sapien
ggggcattcatgcctgaacttaaacaatactat

SEQ ID NO: 66734 - DNA, 33 bp, Homo sapien
ggggcattcatgcctggacttaaacaatactat

SEQ ID NO: 66735 - DNA, 33 bp, Homo sapien
aatgaatgaaatgaacaactatcaaaaacaaga

SEQ ID NO: 66736 - DNA, 33 bp, Homo sapien
aatgaatgaaatgaacgactatcaaaaacaaga

SEQ ID NO: 66737 - DNA, 33 bp, Homo sapien
aaaggtcatggaggtaagaaatgaagttggggg

SEQ ID NO: 66738 - DNA, 33 bp, Homo sapien
aaaggtcatggaggtatgaaatgaagttggggg

SEQ ID NO: 66739 - DNA, 33 bp, Homo sapien
cctggatcctgataagcagttctgggtggagga

SEQ ID NO: 66740 - DNA, 33 bp, Homo sapien
cctggatcctgataaggagttctgggtggagga

SEQ ID NO: 66741 - DNA, 33 bp, Homo sapien
gtttcttttttgtgtacatgtcatatttcaatt

SEQ ID NO: 66742 - DNA, 33 bp, Homo sapien
gtttcttttttgtgtatatgtcatatttcaatt

SEQ ID NO: 66743 - DNA, 33 bp, Homo sapien
gagcacctcacaaaaaccaatcctcccaacaat

SEQ ID NO: 66744 - DNA, 33 bp, Homo sapien
gagcacctcacaaaaatcaatcctcccaacaat

SEQ ID NO: 66745 - DNA, 33 bp, Homo sapien
agaaccggtcctcttgccaacccagtctaacac

SEQ ID NO: 66746 - DNA, 33 bp, Homo sapien
agaaccggtcctcttggcaacccagtctaacac

SEQ ID NO: 66747 - DNA, 33 bp, Homo sapien
gaggattgccaacaaaatttcagtataacttct

SEQ ID NO: 66748 - DNA, 33 bp, Homo sapien
gaggattgccaacaaagtttcagtataacttct

SEQ ID NO: 66749 - DNA, 33 bp, Homo sapien
tggaaaactatctaaacgtccttcaaaaggaga

SEQ ID NO: 66750 - DNA, 33 bp, Homo sapien
tggaaaactatctaaatgtccttcaaaaggaga

SEQ ID NO: 66751 - DNA, 33 bp, Homo sapien
ctttctctatttatgacagccagtgacccacaa

SEQ ID NO: 66752 - DNA, 33 bp, Homo sapien
ctttctctatttatgagagccagtgacccacaa

SEQ ID NO: 66753 - DNA, 33 bp, Homo sapien
tgacccacaagcctcccgcatacacctaataat

SEQ ID NO: 66754 - DNA, 33 bp, Homo sapien
tgacccacaagcctcctgcatacacctaataat

SEQ ID NO: 66755 - DNA, 33 bp, Homo sapien
catgagcatcccaaccaagacagagcagggaga

SEQ ID NO: 66756 - DNA, 33 bp, Homo sapien
catgagcatcccaaccgagacagagcagggaga

SEQ ID NO: 66757 - DNA, 33 bp, Homo sapien
tcctctctacacattcacttccatatggtcccc

SEQ ID NO: 66758 - DNA, 33 bp, Homo sapien
tcctctctacacattcccttccatatggtcccc

SEQ ID NO: 66759 - DNA, 33 bp, Homo sapien
aatgactccactcttgcagatgcaatcataaaa

SEQ ID NO: 66760 - DNA, 33 bp, Homo sapien
aatgactccactcttgtagatgcaatcataaaa

SEQ ID NO: 66761 - DNA, 33 bp, Homo sapien
ggggatctttggactacgttcttggctccagac

SEQ ID NO: 66762 - DNA, 33 bp, Homo sapien
ggggatctttggactaggttcttggctccagac

SEQ ID NO: 66763 - DNA, 33 bp, Homo sapien
tgacaccatcatgtacagcctaaactctttttt

SEQ ID NO: 66764 - DNA, 33 bp, Homo sapien
tgacaccatcatgtacggcctaaactctttttt

SEQ ID NO: 66765 - DNA, 33 bp, Homo sapien
tgctgagatagaaccgcaccatcaaagcgctga

SEQ ID NO: 66766 - DNA, 33 bp, Homo sapien
tgctgagatagaaccgtaccatcaaagcgctga

SEQ ID NO: 66767 - DNA, 33 bp, Homo sapien
ggatttgtaactgctgcatgaagaccctgtccc

SEQ ID NO: 66768 - DNA, 33 bp, Homo sapien
ggatttgtaactgctgtatgaagaccctgtccc

SEQ ID NO: 66769 - DNA, 33 bp, Homo sapien
ccttgagcatacacaaaagtttccaatctctag

SEQ ID NO: 66770 - DNA, 33 bp, Homo sapien
ccttgagcatacacaagagtttccaatctctag

SEQ ID NO: 66771 - DNA, 33 bp, Homo sapien
ggaaggtaagagactaagggtggcctgggtacc

SEQ ID NO: 66772 - DNA, 33 bp, Homo sapien
ggaaggtaagagactaggggtggcctgggtacc

SEQ ID NO: 66773 - DNA, 33 bp, Homo sapien
cagagaaaccttagaacctttcttggcctggaa

SEQ ID NO: 66774 - DNA, 33 bp, Homo sapien
cagagaaaccttagaatctttcttggcctggaa

SEQ ID NO: 66775 - DNA, 33 bp, Homo sapien
acacacacacattctaaacaaaagtttccccct

SEQ ID NO: 66776 - DNA, 33 bp, Homo sapien
acacacacacattctacacaaaagtttccccct

SEQ ID NO: 66777 - DNA, 33 bp, Homo sapien
caagtatgggttgtaaggcaggtctcagggcaa

SEQ ID NO: 66778 - DNA, 33 bp, Homo sapien
caagtatgggttgtaatgcaggtctcagggcaa

SEQ ID NO: 66779 - DNA, 33 bp, Homo sapien
ctggatgccactccaactacagaggaccacctc

SEQ ID NO: 66780 - DNA, 33 bp, Homo sapien
ctggatgccactccaagtacagaggaccacctc

SEQ ID NO: 66781 - DNA, 33 bp, Homo sapien
aggtcacagaccctaacgaacctagataaattg

SEQ ID NO: 66782 - DNA, 33 bp, Homo sapien
aggtcacagaccctaatgaacctagataaattg

SEQ ID NO: 66783 - DNA, 33 bp, Homo sapien
ttgggagccaccggacactaggaagaagcaaga

SEQ ID NO: 66784 - DNA, 33 bp, Homo sapien
ttgggagccaccggacgctaggaagaagcaaga

SEQ ID NO: 66785 - DNA, 33 bp, Homo sapien
ttgcccagggacagaaaatcccaattagatatc

SEQ ID NO: 66786 - DNA, 33 bp, Homo sapien
ttgcccagggacagaagatcccaattagatatc

SEQ ID NO: 66787 - DNA, 33 bp, Homo sapien
tgggattgaaggtgctcaagcccagtgctctgg

SEQ ID NO: 66788 - DNA, 33 bp, Homo sapien
tgggattgaaggtgctgaagcccagtgctctgg

SEQ ID NO: 66789 - DNA, 33 bp, Homo sapien
agttaagataacactaactgctataataaacct

SEQ ID NO: 66790 - DNA, 33 bp, Homo sapien
agttaagataacactagctgctataataaacct

SEQ ID NO: 66791 - DNA, 33 bp, Homo sapien
gtaaagtgggttcttcaatatctcagttgtgtg

SEQ ID NO: 66792 - DNA, 33 bp, Homo sapien
gtaaagtgggttcttcgatatctcagttgtgtg

SEQ ID NO: 66793 - DNA, 33 bp, Homo sapien
aaaggcttggcgcaaactgataggtgcaaaatg

SEQ ID NO: 66794 - DNA, 33 bp, Homo sapien
aaaggcttggcgcaaagtgataggtgcaaaatg

SEQ ID NO: 66795 - DNA, 33 bp, Homo sapien
cctgaatctaatcacacgaaaacaaacaaaccc

SEQ ID NO: 66796 - DNA, 33 bp, Homo sapien
cctgaatctaatcacatgaaaacaaacaaaccc

SEQ ID NO: 66797 - DNA, 33 bp, Homo sapien
caattccagtttgtcccattactgaagatgttt

SEQ ID NO: 66798 - DNA, 33 bp, Homo sapien
caattccagtttgtcctattactgaagatgttt

SEQ ID NO: 66799 - DNA, 33 bp, Homo sapien
ttatagcattggttaacaccaaattgttgaatt

SEQ ID NO: 66800 - DNA, 33 bp, Homo sapien
ttatagcattggttaagaccaaattgttgaatt

SEQ ID NO: 66801 - DNA, 33 bp, Homo sapien
aaatcaagaaatgtaacgcttcagaatgccttc

SEQ ID NO: 66802 - DNA, 33 bp, Homo sapien
aaatcaagaaatgtaatgcttcagaatgccttc

SEQ ID NO: 66803 - DNA, 33 bp, Homo sapien
aattatggatgtcgcaactgtcagtcccagtgc

SEQ ID NO: 66804 - DNA, 33 bp, Homo sapien
aattatggatgtcgcatctgtcagtcccagtgc

SEQ ID NO: 66805 - DNA, 33 bp, Homo sapien
tttgcaagtgtattcccgctcctgcaaactgca

SEQ ID NO: 66806 - DNA, 33 bp, Homo sapien
tttgcaagtgtattcctgctcctgcaaactgca

SEQ ID NO: 66807 - DNA, 33 bp, Homo sapien
ggtagacaagtacagacggggtgtagctaaagc

SEQ ID NO: 66808 - DNA, 33 bp, Homo sapien
ggtagacaagtacagagggggtgtagctaaagc

SEQ ID NO: 66809 - DNA, 33 bp, Homo sapien
cgaagagccatcaccccgagggaacctgttttg

SEQ ID NO: 66810 - DNA, 33 bp, Homo sapien
cgaagagccatcaccctgagggaacctgttttg

SEQ ID NO: 66811 - DNA, 33 bp, Homo sapien
ctcccaggaagatacaaattggagccttttcat

SEQ ID NO: 66812 - DNA, 33 bp, Homo sapien
ctcccaggaagatacagattggagccttttcat

SEQ ID NO: 66813 - DNA, 33 bp, Homo sapien
tttggggaagtggatcaagagttctgtgtccaa

SEQ ID NO: 66814 - DNA, 33 bp, Homo sapien
tttggggaagtggatcgagagttctgtgtccaa

SEQ ID NO: 66815 - DNA, 33 bp, Homo sapien
ccttccacaacactcacctatttataaagcctg

SEQ ID NO: 66816 - DNA, 33 bp, Homo sapien
ccttccacaacactcatctatttataaagcctg

SEQ ID NO: 66817 - DNA, 33 bp, Homo sapien
gctcttttagctcatacgattgaacccaggtaa

SEQ ID NO: 66818 - DNA, 33 bp, Homo sapien
gctcttttagctcataggattgaacccaggtaa

SEQ ID NO: 66819 - DNA, 33 bp, Homo sapien
acaactgggggatgctaaataagacaactcagg

SEQ ID NO: 66820 - DNA, 33 bp, Homo sapien
acaactgggggatgctgaataagacaactcagg

SEQ ID NO: 66821 - DNA, 33 bp, Homo sapien
cagaaatgaaattggcccttcagctatacaaat

SEQ ID NO: 66822 - DNA, 33 bp, Homo sapien
cagaaatgaaattggctcttcagctatacaaat

SEQ ID NO: 66823 - DNA, 33 bp, Homo sapien
atctctcatcaccacacctgagtgccagatggg

SEQ ID NO: 66824 - DNA, 33 bp, Homo sapien
atctctcatcaccacagctgagtgccagatggg

SEQ ID NO: 66825 - DNA, 33 bp, Homo sapien
gggctcatctagccaaatggaatcatgccactc

SEQ ID NO: 66826 - DNA, 33 bp, Homo sapien
gggctcatctagccaagtggaatcatgccactc

SEQ ID NO: 66827 - DNA, 33 bp, Homo sapien
agtaaagacaggaaggaaaaaacaactgataga

SEQ ID NO: 66828 - DNA, 33 bp, Homo sapien
agtaaagacaggaagggaaaaacaactgataga

SEQ ID NO: 66829 - DNA, 33 bp, Homo sapien
aaaaaggatacttcaggctcaagaatcagaaag

SEQ ID NO: 66830 - DNA, 33 bp, Homo sapien
aaaaaggatacttcagtctcaagaatcagaaag

SEQ ID NO: 66831 - DNA, 33 bp, Homo sapien
gaatttctctttcttcccatatctcctgttata

SEQ ID NO: 66832 - DNA, 33 bp, Homo sapien
gaatttctctttcttctcatatctcctgttata

SEQ ID NO: 66833 - DNA, 33 bp, Homo sapien
gggcctgatagatacacaaattttgctccagcc

SEQ ID NO: 66834 - DNA, 33 bp, Homo sapien
gggcctgatagatacataaattttgctccagcc

SEQ ID NO: 66835 - DNA, 33 bp, Homo sapien
ataagttagaaacacaaaggcagattctggaac

SEQ ID NO: 66836 - DNA, 33 bp, Homo sapien
ataagttagaaacacagaggcagattctggaac

SEQ ID NO: 66837 - DNA, 33 bp, Homo sapien
gggagagtcccgcctgaagaaacctggatcttt

SEQ ID NO: 66838 - DNA, 33 bp, Homo sapien
gggagagtcccgcctggagaaacctggatcttt

SEQ ID NO: 66839 - DNA, 33 bp, Homo sapien
ttttgattttcttctgacaaagaccacagcagt

SEQ ID NO: 66840 - DNA, 33 bp, Homo sapien
ttttgattttcttctgtcaaagaccacagcagt

SEQ ID NO: 66841 - DNA, 33 bp, Homo sapien
attggtaggaaggtcaaggactctcagctaggt

SEQ ID NO: 66842 - DNA, 33 bp, Homo sapien
attggtaggaaggtcagggactctcagctaggt

SEQ ID NO: 66843 - DNA, 33 bp, Homo sapien
tggataaattcctagaagtaggattgctgggta

SEQ ID NO: 66844 - DNA, 33 bp, Homo sapien
tggataaattcctagacgtaggattgctgggta

SEQ ID NO: 66845 - DNA, 33 bp, Homo sapien
atgaagacaatgctaacatcgacctcactgttc

SEQ ID NO: 66846 - DNA, 33 bp, Homo sapien
atgaagacaatgctaatatcgacctcactgttc

SEQ ID NO: 66847 - DNA, 33 bp, Homo sapien
atgaacatctttatcaggtggaaaatgaagaca

SEQ ID NO: 66848 - DNA, 33 bp, Homo sapien
atgaacatctttatcatgtggaaaatgaagaca

SEQ ID NO: 66849 - DNA, 33 bp, Homo sapien
atattttatctgcagcaatatttttaaagaaaa

SEQ ID NO: 66850 - DNA, 33 bp, Homo sapien
atattttatctgcagctatatttttaaagaaaa

SEQ ID NO: 66851 - DNA, 33 bp, Homo sapien
aaacaaaaaaacatacacaatatactgcatctg

SEQ ID NO: 66852 - DNA, 33 bp, Homo sapien
aaacaaaaaaacatactcaatatactgcatctg

SEQ ID NO: 66853 - DNA, 33 bp, Homo sapien
gtatgtagcagctctgaaaagagaaggttcccc

SEQ ID NO: 66854 - DNA, 33 bp, Homo sapien
gtatgtagcagctctggaaagagaaggttcccc

SEQ ID NO: 66855 - DNA, 33 bp, Homo sapien
aatacctagcaccaaactatttccacctcccca

SEQ ID NO: 66856 - DNA, 33 bp, Homo sapien
aatacctagcaccaaattatttccacctcccca

SEQ ID NO: 66857 - DNA, 33 bp, Homo sapien
gcaaaacctggaagaacggtgggatggtggtcg

SEQ ID NO: 66858 - DNA, 33 bp, Homo sapien
gcaaaacctggaagaatggtgggatggtggtcg

SEQ ID NO: 66859 - DNA, 33 bp, Homo sapien
catgacatgattctgccgaaattcgtttctaaa

SEQ ID NO: 66860 - DNA, 33 bp, Homo sapien
catgacatgattctgctgaaattcgtttctaaa

SEQ ID NO: 66861 - DNA, 33 bp, Homo sapien
actctcttggactacacagactgtctttcttgg

SEQ ID NO: 66862 - DNA, 33 bp, Homo sapien
actctcttggactacatagactgtctttcttgg

SEQ ID NO: 66863 - DNA, 33 bp, Homo sapien
tgggttggatcttagcagaccaggtgatcagga

SEQ ID NO: 66864 - DNA, 33 bp, Homo sapien
tgggttggatcttagccgaccaggtgatcagga

SEQ ID NO: 66865 - DNA, 33 bp, Homo sapien
gagaaagcttttgtcacctatgggtcctacctt

SEQ ID NO: 66866 - DNA, 33 bp, Homo sapien
gagaaagcttttgtcatctatgggtcctacctt

SEQ ID NO: 66867 - DNA, 33 bp, Homo sapien
tggaagatgtagccagaactagatgactgggtc

SEQ ID NO: 66868 - DNA, 33 bp, Homo sapien
tggaagatgtagccaggactagatgactgggtc

SEQ ID NO: 66869 - DNA, 33 bp, Homo sapien
cttcttcaattccaccaaaaaaggtagtactag

SEQ ID NO: 66870 - DNA, 33 bp, Homo sapien
cttcttcaattccaccgaaaaaggtagtactag

SEQ ID NO: 66871 - DNA, 33 bp, Homo sapien
ggctcaagagaaggagcaaagtgtaacaaaaag

SEQ ID NO: 66872 - DNA, 33 bp, Homo sapien
ggctcaagagaaggagtaaagtgtaacaaaaag

SEQ ID NO: 66873 - DNA, 33 bp, Homo sapien
tagaaggtgaacaaagaagcacaagaaccatca

SEQ ID NO: 66874 - DNA, 33 bp, Homo sapien
tagaaggtgaacaaagcagcacaagaaccatca

SEQ ID NO: 66875 - DNA, 33 bp, Homo sapien
gcctcaccagtttgtagtaatgtaagagttacc

SEQ ID NO: 66876 - DNA, 33 bp, Homo sapien
gcctcaccagtttgtattaatgtaagagttacc

SEQ ID NO: 66877 - DNA, 33 bp, Homo sapien
gagcagtctcacagagaatcttagctaaagcac

SEQ ID NO: 66878 - DNA, 33 bp, Homo sapien
gagcagtctcacagagtatcttagctaaagcac

SEQ ID NO: 66879 - DNA, 33 bp, Homo sapien
caaggaacacaagccactatcaaaacattgggc

SEQ ID NO: 66880 - DNA, 33 bp, Homo sapien
caaggaacacaagccagtatcaaaacattgggc

SEQ ID NO: 66881 - DNA, 33 bp, Homo sapien
cctccaattctttttcaacaacattcaactaat

SEQ ID NO: 66882 - DNA, 33 bp, Homo sapien
cctccaattctttttcgacaacattcaactaat

SEQ ID NO: 66883 - DNA, 33 bp, Homo sapien
ttcaactaatacttaaaaactgctaggtgctag

SEQ ID NO: 66884 - DNA, 33 bp, Homo sapien
ttcaactaatacttaataactgctaggtgctag

SEQ ID NO: 66885 - DNA, 33 bp, Homo sapien
gctgtgaccttgaatcaactgctttatctctag

SEQ ID NO: 66886 - DNA, 33 bp, Homo sapien
gctgtgaccttgaatcgactgctttatctctag

SEQ ID NO: 66887 - DNA, 33 bp, Homo sapien
gcgtcctctgtatctacgttggcatccagtggc

SEQ ID NO: 66888 - DNA, 33 bp, Homo sapien
gcgtcctctgtatctaggttggcatccagtggc

SEQ ID NO: 66889 - DNA, 33 bp, Homo sapien
tagcatataataggacacattcatttattgttt

SEQ ID NO: 66890 - DNA, 33 bp, Homo sapien
tagcatataataggacgcattcatttattgttt

SEQ ID NO: 66891 - DNA, 33 bp, Homo sapien
tatgagggcaaaccaaaacatcagatattaaag

SEQ ID NO: 66892 - DNA, 33 bp, Homo sapien
tatgagggcaaaccaagacatcagatattaaag

SEQ ID NO: 66893 - DNA, 33 bp, Homo sapien
cagcagaatcttaagacaatgacaaaaatggta

SEQ ID NO: 66894 - DNA, 33 bp, Homo sapien
cagcagaatcttaagagaatgacaaaaatggta

SEQ ID NO: 66895 - DNA, 33 bp, Homo sapien
gtgataccataccatcaactcatttttctacct

SEQ ID NO: 66896 - DNA, 33 bp, Homo sapien
gtgataccataccatcgactcatttttctacct

SEQ ID NO: 66897 - DNA, 33 bp, Homo sapien
tcaaaggtgtcggaataacatgggcttaagtga

SEQ ID NO: 66898 - DNA, 33 bp, Homo sapien
tcaaaggtgtcggaatgacatgggcttaagtga

SEQ ID NO: 66899 - DNA, 33 bp, Homo sapien
actccttatcttgtccagaaagaactgactgac

SEQ ID NO: 66900 - DNA, 33 bp, Homo sapien
actccttatcttgtccggaaagaactgactgac

SEQ ID NO: 66901 - DNA, 33 bp, Homo sapien
gcaagacaacaaatagaaaagtggaaaagaggc

SEQ ID NO: 66902 - DNA, 33 bp, Homo sapien
gcaagacaacaaataggaaagtggaaaagaggc

SEQ ID NO: 66903 - DNA, 33 bp, Homo sapien
tttttcctctaccacaatattttctttctttcc

SEQ ID NO: 66904 - DNA, 33 bp, Homo sapien
tttttcctctaccacagtattttctttctttcc

SEQ ID NO: 66905 - DNA, 33 bp, Homo sapien
ctggtttcactgcaaaaaaacagcatgcccttt

SEQ ID NO: 66906 - DNA, 33 bp, Homo sapien
ctggtttcactgcaaacaaacagcatgcccttt

SEQ ID NO: 66907 - DNA, 33 bp, Homo sapien
ctggcattgccatgtcaacagacctaataagca

SEQ ID NO: 66908 - DNA, 33 bp, Homo sapien
ctggcattgccatgtcgacagacctaataagca

SEQ ID NO: 66909 - DNA, 33 bp, Homo sapien
ttgtcagaaacaatgaagctagggataaggaaa

SEQ ID NO: 66910 - DNA, 33 bp, Homo sapien
ttgtcagaaacaatgaggctagggataaggaaa

SEQ ID NO: 66911 - DNA, 33 bp, Homo sapien
aaccaattactagttcaatctaccaggaagaaa

SEQ ID NO: 66912 - DNA, 33 bp, Homo sapien
aaccaattactagttccatctaccaggaagaaa

SEQ ID NO: 66913 - DNA, 33 bp, Homo sapien
gtacatgtttagtacccatgttcagtgtcagac

SEQ ID NO: 66914 - DNA, 33 bp, Homo sapien
gtacatgtttagtacctatgttcagtgtcagac

SEQ ID NO: 66915 - DNA, 33 bp, Homo sapien
caaaagcatataacaaaagcacatacgagaata

SEQ ID NO: 66916 - DNA, 33 bp, Homo sapien
caaaagcatataacaagagcacatacgagaata

SEQ ID NO: 66917 - DNA, 33 bp, Homo sapien
tagtcgtcttcattaacgtaagctagatcgata

SEQ ID NO: 66918 - DNA, 33 bp, Homo sapien
tagtcgtcttcattaatgtaagctagatcgata

SEQ ID NO: 66919 - DNA, 33 bp, Homo sapien
tgaaatcaaagataaccgtctgaatctctatta

SEQ ID NO: 66920 - DNA, 33 bp, Homo sapien
tgaaatcaaagataacggtctgaatctctatta

SEQ ID NO: 66921 - DNA, 33 bp, Homo sapien
ggaaaataatgctatcccaagtcaaaaaatttg

SEQ ID NO: 66922 - DNA, 33 bp, Homo sapien
ggaaaataatgctatcgcaagtcaaaaaatttg

SEQ ID NO: 66923 - DNA, 33 bp, Homo sapien
agatagttatattggacagttaacatcggagta

SEQ ID NO: 66924 - DNA, 33 bp, Homo sapien
agatagttatattggagagttaacatcggagta

SEQ ID NO: 66925 - DNA, 33 bp, Homo sapien
agtgcataagcaaaagcatagtttcagctttat

SEQ ID NO: 66926 - DNA, 33 bp, Homo sapien
agtgcataagcaaaaggatagtttcagctttat

SEQ ID NO: 66927 - DNA, 33 bp, Homo sapien
aatctgtcttatactcaactgctattaataatt

SEQ ID NO: 66928 - DNA, 33 bp, Homo sapien
aatctgtcttatactcgactgctattaataatt

SEQ ID NO: 66929 - DNA, 33 bp, Homo sapien
atttgacttagagtcacggttgtctagcctgtg

SEQ ID NO: 66930 - DNA, 33 bp, Homo sapien
atttgacttagagtcatggttgtctagcctgtg

SEQ ID NO: 66931 - DNA, 33 bp, Homo sapien
ctttactcaggggcttaaagattcaatgaaata

SEQ ID NO: 66932 - DNA, 33 bp, Homo sapien
ctttactcaggggcttgaagattcaatgaaata

SEQ ID NO: 66933 - DNA, 33 bp, Homo sapien
taaatactgactcccaaatttgtttgtctgggc

SEQ ID NO: 66934 - DNA, 33 bp, Homo sapien
taaatactgactcccagatttgtttgtctgggc

SEQ ID NO: 66935 - DNA, 33 bp, Homo sapien
aaactggtgccattcaataaggcaggaaataat

SEQ ID NO: 66936 - DNA, 33 bp, Homo sapien
aaactggtgccattcattaaggcaggaaataat

SEQ ID NO: 66937 - DNA, 33 bp, Homo sapien
aagcaaagggatgacacatgttcagactggtgt

SEQ ID NO: 66938 - DNA, 33 bp, Homo sapien
aagcaaagggatgacatatgttcagactggtgt

SEQ ID NO: 66939 - DNA, 33 bp, Homo sapien
gtgaatgggatgttaacagaaatgattcagtgt

SEQ ID NO: 66940 - DNA, 33 bp, Homo sapien
gtgaatgggatgttaatagaaatgattcagtgt

SEQ ID NO: 66941 - DNA, 33 bp, Homo sapien
gcctaaataaacctcaagtgaatgggatgttaa

SEQ ID NO: 66942 - DNA, 33 bp, Homo sapien
gcctaaataaacctcacgtgaatgggatgttaa

SEQ ID NO: 66943 - DNA, 33 bp, Homo sapien
ttaatggcggctcccacgctgcttggcattcgt

SEQ ID NO: 66944 - DNA, 33 bp, Homo sapien
ttaatggcggctcccatgctgcttggcattcgt

SEQ ID NO: 66945 - DNA, 33 bp, Homo sapien
tggctgggaagcatgaagatgatgtgtcgcaca

SEQ ID NO: 66946 - DNA, 33 bp, Homo sapien
tggctgggaagcatgaggatgatgtgtcgcaca

SEQ ID NO: 66947 - DNA, 33 bp, Homo sapien
agacagcatcaccactaaggtcaaggaccagta

SEQ ID NO: 66948 - DNA, 33 bp, Homo sapien
agacagcatcaccactgaggtcaaggaccagta

SEQ ID NO: 66949 - DNA, 33 bp, Homo sapien; identical to SEQ ID NO: 66947

SEQ ID NO: 66950 - DNA, 33 bp, Homo sapien; identical to SEQ ID NO: 66948

SEQ ID NO: 66951 - DNA, 33 bp, Homo sapien
atagagtcggaaatcacgtcagtggttactagg

SEQ ID NO: 66952 - DNA, 33 bp, Homo sapien
atagagtcggaaatcaggtcagtggttactagg

SEQ ID NO: 66953 - DNA, 33 bp, Homo sapien
aacatttattatctcacccgatttctgaaagtc

SEQ ID NO: 66954 - DNA, 33 bp, Homo sapien
aacatttattatctcatccgatttctgaaagtc

SEQ ID NO: 66955 - DNA, 33 bp, Homo sapien
atattggtgagcatataaagaattggaaactta

SEQ ID NO: 66956 - DNA, 33 bp, Homo sapien
atattggtgagcatatgaagaattggaaactta

SEQ ID NO: 66957 - DNA, 33 bp, Homo sapien
gacttgaatgcttttccactcattgaacagttt

SEQ ID NO: 66958 - DNA, 33 bp, Homo sapien
gacttgaatgcttttctactcattgaacagttt

SEQ ID NO: 66959 - DNA, 33 bp, Homo sapien
cctctcattcttaagcactattgattgccagct

SEQ ID NO: 66960 - DNA, 33 bp, Homo sapien
cctctcattcttaagctctattgattgccagct

SEQ ID NO: 66961 - DNA, 33 bp, Homo sapien
gacagacacaattgccagctgattgtgcaggta

SEQ ID NO: 66962 - DNA, 33 bp, Homo sapien
gacagacacaattgccggctgattgtgcaggta

SEQ ID NO: 66963 - DNA, 33 bp, Homo sapien
aaagtcatatctgccacctttgagctcagttct

SEQ ID NO: 66964 - DNA, 33 bp, Homo sapien
aaagtcatatctgccatctttgagctcagttct

SEQ ID NO: 66965 - DNA, 33 bp, Homo sapien
agggttcatggactaccctttgacgacatctgt

SEQ ID NO: 66966 - DNA, 33 bp, Homo sapien
agggttcatggactactctttgacgacatctgt

SEQ ID NO: 66967 - DNA, 33 bp, Homo sapien
cgaacaaaacaacctcacactctgcactgcccg

SEQ ID NO: 66968 - DNA, 33 bp, Homo sapien
cgaacaaaacaacctcgcactctgcactgcccg

SEQ ID NO: 66969 - DNA, 33 bp, Homo sapien
gatctgagaacttgaaaacagaataattgagga

SEQ ID NO: 66970 - DNA, 33 bp, Homo sapien
gatctgagaacttgaagacagaataattgagga

SEQ ID NO: 66971 - DNA, 33 bp, Homo sapien
acttcaggatagaatacgtattaggcctaaaac

SEQ ID NO: 66972 - DNA, 33 bp, Homo sapien
acttcaggatagaatatgtattaggcctaaaac

SEQ ID NO: 66973 - DNA, 33 bp, Homo sapien
ctaccttttctctttaagaattggcccttctgg

SEQ ID NO: 66974 - DNA, 33 bp, Homo sapien
ctaccttttctctttatgaattggcccttctgg

SEQ ID NO: 66975 - DNA, 33 bp, Homo sapien
aaatcctaagactaaagcatcaaaggcttcagt

SEQ ID NO: 66976 - DNA, 33 bp, Homo sapien
aaatcctaagactaaatcatcaaaggcttcagt

SEQ ID NO: 66977 - DNA, 33 bp, Homo sapien
tagaaaaccgtagacaatgcattcctaattttc

SEQ ID NO: 66978 - DNA, 33 bp, Homo sapien
tagaaaaccgtagacattgcattcctaattttc

SEQ ID NO: 66979 - DNA, 33 bp, Homo sapien
gagtgtggtctgaggaataggacaggtatagcc

SEQ ID NO: 66980 - DNA, 33 bp, Homo sapien
gagtgtggtctgaggagtaggacaggtatagcc

SEQ ID NO: 66981 - DNA, 33 bp, Homo sapien
tggctcatatctactcacttgcctttctgcctt

SEQ ID NO: 66982 - DNA, 33 bp, Homo sapien
tggctcatatctactctcttgcctttctgcctt

SEQ ID NO: 66983 - DNA, 33 bp, Homo sapien
ggagaggtctgggctaaaagtttagatttggga

SEQ ID NO: 66984 - DNA, 33 bp, Homo sapien
ggagaggtctgggctagaagtttagatttggga

SEQ ID NO: 66985 - DNA, 33 bp, Homo sapien
ataggaatctaataaaattgtagcacagttcac

SEQ ID NO: 66986 - DNA, 33 bp, Homo sapien
ataggaatctaataaagttgtagcacagttcac

SEQ ID NO: 66987 - DNA, 33 bp, Homo sapien
gttcccaagtacagagcaatctggctcccaggg

SEQ ID NO: 66988 - DNA, 33 bp, Homo sapien
gttcccaagtacagaggaatctggctcccaggg

SEQ ID NO: 66989 - DNA, 33 bp, Homo sapien
tctttcacagttaaagacattgctctggagctc

SEQ ID NO: 66990 - DNA, 33 bp, Homo sapien
tctttcacagttaaaggcattgctctggagctc

SEQ ID NO: 66991 - DNA, 33 bp, Homo sapien
ttgctcacattactgacgggcctacccttgctg

SEQ ID NO: 66992 - DNA, 33 bp, Homo sapien
ttgctcacattactgatgggcctacccttgctg

SEQ ID NO: 66993 - DNA, 33 bp, Homo sapien
tatagggccaaaccagcaagcaaatatccctct

SEQ ID NO: 66994 - DNA, 33 bp, Homo sapien
tatagggccaaaccaggaagcaaatatccctct

SEQ ID NO: 66995 - DNA, 33 bp, Homo sapien
ttagccataggagaacagaccttcagaacattt

SEQ ID NO: 66996 - DNA, 33 bp, Homo sapien
ttagccataggagaacggaccttcagaacattt

SEQ ID NO: 66997 - DNA, 33 bp, Homo sapien
catggatcagagggccagaaagcctgggttcag

SEQ ID NO: 66998 - DNA, 33 bp, Homo sapien
catggatcagagggccggaaagcctgggttcag

SEQ ID NO: 66999 - DNA, 33 bp, Homo sapien
accaccggaaaaagtgaaattcaaatgcagctg

SEQ ID NO: 67000 - DNA, 33 bp, Homo sapien
accaccggaaaaagtggaattcaaatgcagctg

SEQ ID NO: 67001 - DNA, 33 bp, Homo sapien
tttgcctcggtgactaccccccttttgactggc

SEQ ID NO: 67002 - DNA, 33 bp, Homo sapien
tttgcctcggtgactatcccccttttgactggc

SEQ ID NO: 67003 - DNA, 33 bp, Homo sapien
tctactatgccacacaaattccgctcccccaaa

SEQ ID NO: 67004 - DNA, 33 bp, Homo sapien
tctactatgccacacacattccgctcccccaaa

SEQ ID NO: 67005 - DNA, 33 bp, Homo sapien
atagtagaggaaaagaaggaagaagtggggaca

SEQ ID NO: 67006 - DNA, 33 bp, Homo sapien
atagtagaggaaaagagggaagaagtggggaca

SEQ ID NO: 67007 - DNA, 33 bp, Homo sapien
agggactctaaagcaacatcccagtgtgggctg

SEQ ID NO: 67008 - DNA, 33 bp, Homo sapien
agggactctaaagcaagatcccagtgtgggctg

SEQ ID NO: 67009 - DNA, 33 bp, Homo sapien
tgcttctttgactgaacgggggtcactccaaaa

SEQ ID NO: 67010 - DNA, 33 bp, Homo sapien
tgcttctttgactgaatgggggtcactccaaaa

SEQ ID NO: 67011 - DNA, 33 bp, Homo sapien
ttcttccagtgaacaaagcgttccgttcttttt

SEQ ID NO: 67012 - DNA, 33 bp, Homo sapien
ttcttccagtgaacaacgcgttccgttcttttt

SEQ ID NO: 67013 - DNA, 33 bp, Homo sapien
caggggttcttggtggaatgacactcatgcctc

SEQ ID NO: 67014 - DNA, 33 bp, Homo sapien
caggggttcttggtgggatgacactcatgcctc

SEQ ID NO: 67015 - DNA, 33 bp, Homo sapien
cagccttgaatgcaaacagtcagcaaacaactt

SEQ ID NO: 67016 - DNA, 33 bp, Homo sapien
cagccttgaatgcaaatagtcagcaaacaactt

SEQ ID NO: 67017 - DNA, 33 bp, Homo sapien
ccatagagatagagaacactgaatatgatggtg

SEQ ID NO: 67018 - DNA, 33 bp, Homo sapien
ccatagagatagagaagactgaatatgatggtg

SEQ ID NO: 67019 - DNA, 33 bp, Homo sapien
tggctcaaagcatggcccttatatgacaaagcc

SEQ ID NO: 67020 - DNA, 33 bp, Homo sapien
tggctcaaagcatggcgcttatatgacaaagcc

SEQ ID NO: 67021 - DNA, 33 bp, Homo sapien
gagatgttgagttcacacagcttttggggcagc

SEQ ID NO: 67022 - DNA, 33 bp, Homo sapien
gagatgttgagttcacgcagcttttggggcagc

SEQ ID NO: 67023 - DNA, 33 bp, Homo sapien
gtctggccagttgttaccatttctgagataggg

SEQ ID NO: 67024 - DNA, 33 bp, Homo sapien
gtctggccagttgttatcatttctgagataggg

SEQ ID NO: 67025 - DNA, 33 bp, Homo sapien
tttttctgtgggttcacaagtaagcttgccctt

SEQ ID NO: 67026 - DNA, 33 bp, Homo sapien
tttttctgtgggttcataagtaagcttgccctt

SEQ ID NO: 67027 - DNA, 33 bp, Homo sapien
tctgggcagaagtttacgactggggactcacct

SEQ ID NO: 67028 - DNA, 33 bp, Homo sapien
tctgggcagaagtttatgactggggactcacct

SEQ ID NO: 67029 - DNA, 33 bp, Homo sapien
atggggaggactttgacgagaagaggagtgagg

SEQ ID NO: 67030 - DNA, 33 bp, Homo sapien
atggggaggactttgatgagaagaggagtgagg

SEQ ID NO: 67031 - DNA, 33 bp, Homo sapien
cactggagtccaacacagtatggaatatcacca

SEQ ID NO: 67032 - DNA, 33 bp, Homo sapien
cactggagtccaacactgtatggaatatcacca

SEQ ID NO: 67033 - DNA, 33 bp, Homo sapien
aggaactgcagtatggccatgggctgagcaggc

SEQ ID NO: 67034 - DNA, 33 bp, Homo sapien
aggaactgcagtatggtcatgggctgagcaggc

SEQ ID NO: 67035 - DNA, 33 bp, Homo sapien
gaatgatcactaaaaaacttagcaagaggaagg

SEQ ID NO: 67036 - DNA, 33 bp, Homo sapien
gaatgatcactaaaaatcttagcaagaggaagg

SEQ ID NO: 67037 - DNA, 33 bp, Homo sapien
tagttacacagaagtaagagcttgatattctgt

SEQ ID NO: 67038 - DNA, 33 bp, Homo sapien
tagttacacagaagtatgagcttgatattctgt

SEQ ID NO: 67039 - DNA, 33 bp, Homo sapien
gcagacccagcttagacgattgctgcagcttgg

SEQ ID NO: 67040 - DNA, 33 bp, Homo sapien
gcagacccagcttagatgattgctgcagcttgg

SEQ ID NO: 67041 - DNA, 33 bp, Homo sapien
ggagtgatgaggctcaaattcagggctcttgag

SEQ ID NO: 67042 - DNA, 33 bp, Homo sapien
ggagtgatgaggctcagattcagggctcttgag

SEQ ID NO: 67043 - DNA, 33 bp, Homo sapien
ggtggaagagctctcaaatcctcttcttctaag

SEQ ID NO: 67044 - DNA, 33 bp, Homo sapien
ggtggaagagctctcagatcctcttcttctaag

SEQ ID NO: 67045 - DNA, 33 bp, Homo sapien
tcttctgccagtctgaactccttcctggctcct

SEQ ID NO: 67046 - DNA, 33 bp, Homo sapien
tcttctgccagtctgagctccttcctggctcct

SEQ ID NO: 67047 - DNA, 33 bp, Homo sapien
caggacccaagtcagacgggctgggttccagtc

SEQ ID NO: 67048 - DNA, 33 bp, Homo sapien
caggacccaagtcagatgggctgggttccagtc

SEQ ID NO: 67049 - DNA, 33 bp, Homo sapien
cttctgtgagctgggacaactttctgacccaca

SEQ ID NO: 67050 - DNA, 33 bp, Homo sapien
cttctgtgagctgggagaactttctgacccaca

SEQ ID NO: 67051 - DNA, 33 bp, Homo sapien
catcaaatactcccaagaatcctatgctcctat

SEQ ID NO: 67052 - DNA, 33 bp, Homo sapien
catcaaatactcccaataatcctatgctcctat

SEQ ID NO: 67053 - DNA, 33 bp, Homo sapien
tacagttctaacatgacctgtgcattgtaatct

SEQ ID NO: 67054 - DNA, 33 bp, Homo sapien
tacagttctaacatgatctgtgcattgtaatct

SEQ ID NO: 67055 - DNA, 33 bp, Homo sapien
tccttgtctgctgagacgtcttccatactcaag

SEQ ID NO: 67056 - DNA, 33 bp, Homo sapien
tccttgtctgctgagatgtcttccatactcaag

SEQ ID NO: 67057 - DNA, 33 bp, Homo sapien
gctccagggtacagaaatcggggtaagagtatt

SEQ ID NO: 67058 - DNA, 33 bp, Homo sapien
gctccagggtacagaagtcggggtaagagtatt

SEQ ID NO: 67059 - DNA, 33 bp, Homo sapien
tgtgtttgacgaaggcactgagtagcacgtgag

SEQ ID NO: 67060 - DNA, 33 bp, Homo sapien
tgtgtttgacgaaggcgctgagtagcacgtgag

SEQ ID NO: 67061 - DNA, 33 bp, Homo sapien
tctagctccagtgtccagcacagtgaggcacaa

SEQ ID NO: 67062 - DNA, 33 bp, Homo sapien
tctagctccagtgtccggcacagtgaggcacaa

SEQ ID NO: 67063 - DNA, 33 bp, Homo sapien
tgggtcccgacataaaagctgccaaagcccaga

SEQ ID NO: 67064 - DNA, 33 bp, Homo sapien
tgggtcccgacataaaggctgccaaagcccaga

SEQ ID NO: 67065 - DNA, 33 bp, Homo sapien
ctttcccatacacacaaagattccctctttctt

SEQ ID NO: 67066 - DNA, 33 bp, Homo sapien
ctttcccatacacacagagattccctctttctt

SEQ ID NO: 67067 - DNA, 33 bp, Homo sapien
aggctgttgtgagtaaacagtgggaaatgcaac

SEQ ID NO: 67068 - DNA, 33 bp, Homo sapien
aggctgttgtgagtaatcagtgggaaatgcaac

SEQ ID NO: 67069 - DNA, 33 bp, Homo sapien
gaaaccagcttctataaatctaatgcccaagag

SEQ ID NO: 67070 - DNA, 33 bp, Homo sapien
gaaaccagcttctatagatctaatgcccaagag

SEQ ID NO: 67071 - DNA, 33 bp, Homo sapien
caaatcatacataggaaccaattgataactcca

SEQ ID NO: 67072 - DNA, 33 bp, Homo sapien
caaatcatacataggatccaattgataactcca

SEQ ID NO: 67073 - DNA, 33 bp, Homo sapien
gtgctgctgcgaaacaagcatggatttattctt

SEQ ID NO: 67074 - DNA, 33 bp, Homo sapien
gtgctgctgcgaaacaggcatggatttattctt

SEQ ID NO: 67075 - DNA, 33 bp, Homo sapien
gcctcagtgagtccaacttctacctctttacca

SEQ ID NO: 67076 - DNA, 33 bp, Homo sapien
gcctcagtgagtccaagttctacctctttacca

SEQ ID NO: 67077 - DNA, 33 bp, Homo sapien
cctccttccctcatcacgcttcactccccatcg

SEQ ID NO: 67078 - DNA, 33 bp, Homo sapien
cctccttccctcatcatgcttcactccccatcg

SEQ ID NO: 67079 - DNA, 33 bp, Homo sapien
agaacgatactagaggaagaaatctccctgcat

SEQ ID NO: 67080 - DNA, 33 bp, Homo sapien
agaacgatactagaggcagaaatctccctgcat

SEQ ID NO: 67081 - DNA, 33 bp, Homo sapien
ccacactgcccagggacatagggttgttggctc

SEQ ID NO: 67082 - DNA, 33 bp, Homo sapien
ccacactgcccagggatatagggttgttggctc

SEQ ID NO: 67083 - DNA, 33 bp, Homo sapien
gtctccaaaaggttaacaggtatcaaatatctg

SEQ ID NO: 67084 - DNA, 33 bp, Homo sapien
gtctccaaaaggttaataggtatcaaatatctg

SEQ ID NO: 67085 - DNA, 33 bp, Homo sapien
tgccgatgttgagaagaaacttcatatgcaacc

SEQ ID NO: 67086 - DNA, 33 bp, Homo sapien
tgccgatgttgagaaggaacttcatatgcaacc

SEQ ID NO: 67087 - DNA, 33 bp, Homo sapien
attcagctttaactacactgtgtaaagagtctc

SEQ ID NO: 67088 - DNA, 33 bp, Homo sapien
attcagctttaactacgctgtgtaaagagtctc

SEQ ID NO: 67089 - DNA, 33 bp, Homo sapien
ggagcctctgaggtgacgagaccacctggctgg

SEQ ID NO: 67090 - DNA, 33 bp, Homo sapien
ggagcctctgaggtgatgagaccacctggctgg

SEQ ID NO: 67091 - DNA, 33 bp, Homo sapien
catcctcagagacaacacattgagaatctagag

SEQ ID NO: 67092 - DNA, 33 bp, Homo sapien
catcctcagagacaacgcattgagaatctagag

SEQ ID NO: 67093 - DNA, 33 bp, Homo sapien
tggcaggcataagccaacaacagatattttata

SEQ ID NO: 67094 - DNA, 33 bp, Homo sapien
tggcaggcataagccagcaacagatattttata

SEQ ID NO: 67095 - DNA, 33 bp, Homo sapien
agtgtccaggagttttaaaaaccacaccagagc

SEQ ID NO: 67096 - DNA, 33 bp, Homo sapien
agtgtccaggagtttttaaaaccacaccagagc

SEQ ID NO: 67097 - DNA, 33 bp, Homo sapien
gtatcacctactgatcagaactgttttcaatca

SEQ ID NO: 67098 - DNA, 33 bp, Homo sapien
gtatcacctactgatcggaactgttttcaatca

SEQ ID NO: 67099 - DNA, 33 bp, Homo sapien
aaggagggaaactgaaaacaccgtggcccctcg

SEQ ID NO: 67100 - DNA, 33 bp, Homo sapien
aaggagggaaactgaagacaccgtggcccctcg

SEQ ID NO: 67101 - DNA, 33 bp, Homo sapien
aaaataattagcaaaacgacaaatggtttctat

SEQ ID NO: 67102 - DNA, 33 bp, Homo sapien
aaaataattagcaaaatgacaaatggtttctat

SEQ ID NO: 67103 - DNA, 33 bp, Homo sapien
ctgtcaccactactacagcacgcgagcatgtat

SEQ ID NO: 67104 - DNA, 33 bp, Homo sapien
ctgtcaccactactacggcacgcgagcatgtat

SEQ ID NO: 67105 - DNA, 33 bp, Homo sapien
acactggcagagaagcgagagcaggtgtgcagg

SEQ ID NO: 67106 - DNA, 33 bp, Homo sapien
acactggcagagaagctagagcaggtgtgcagg

SEQ ID NO: 67107 - DNA, 33 bp, Homo sapien
ggctccttgatttacccactgtctctcctctcc

SEQ ID NO: 67108 - DNA, 33 bp, Homo sapien
ggctccttgatttacctactgtctctcctctcc

SEQ ID NO: 67109 - DNA, 33 bp, Homo sapien
atgtgttatagcagcaaccccttcccagtatca

SEQ ID NO: 67110 - DNA, 33 bp, Homo sapien
atgtgttatagcagcacccccttcccagtatca

SEQ ID NO: 67111 - DNA, 33 bp, Homo sapien
cagtcccctgggataccgaggcataactctatt

SEQ ID NO: 67112 - DNA, 33 bp, Homo sapien
cagtcccctgggatactgaggcataactctatt

SEQ ID NO: 67113 - DNA, 33 bp, Homo sapien
ctttgtatttcatcaaagcacattatgataatt

SEQ ID NO: 67114 - DNA, 33 bp, Homo sapien
ctttgtatttcatcaacgcacattatgataatt

SEQ ID NO: 67115 - DNA, 33 bp, Homo sapien
gtttcatgagtccctggagtataaggatacagg

SEQ ID NO: 67116 - DNA, 33 bp, Homo sapien
gtttcatgagtccctgtagtataaggatacagg

SEQ ID NO: 67117 - DNA, 33 bp, Homo sapien
tatcactcagtccccactggctggtcatgttgg

SEQ ID NO: 67118 - DNA, 33 bp, Homo sapien
tatcactcagtccccattggctggtcatgttgg

SEQ ID NO: 67119 - DNA, 33 bp, Homo sapien
gacagcatgcatttcacaagaatttaaatctag

SEQ ID NO: 67120 - DNA, 33 bp, Homo sapien
gacagcatgcatttcagaagaatttaaatctag

SEQ ID NO: 67121 - DNA, 33 bp, Homo sapien
aagacggtagatggaaatgatactgttgtccct

SEQ ID NO: 67122 - DNA, 33 bp, Homo sapien
aagacggtagatggaactgatactgttgtccct

SEQ ID NO: 67123 - DNA, 33 bp, Homo sapien
tggtgacagccaaacactagccttacaagagat

SEQ ID NO: 67124 - DNA, 33 bp, Homo sapien
tggtgacagccaaacattagccttacaagagat

SEQ ID NO: 67125 - DNA, 33 bp, Homo sapien
agaattcagaagcgtccccggatccagtaaatg

SEQ ID NO: 67126 - DNA, 33 bp, Homo sapien
agaattcagaagcgtctccggatccagtaaatg

SEQ ID NO: 67127 - DNA, 33 bp, Homo sapien
ctggaactctgcctgaaacctagcaagcattgt

SEQ ID NO: 67128 - DNA, 33 bp, Homo sapien
ctggaactctgcctgagacctagcaagcattgt

SEQ ID NO: 67129 - DNA, 33 bp, Homo sapien
ctttgtagggaagtaacgaaaaccgggaggagc

SEQ ID NO: 67130 - DNA, 33 bp, Homo sapien
ctttgtagggaagtaatgaaaaccgggaggagc

SEQ ID NO: 67131 - DNA, 33 bp, Homo sapien
tctctaaaactcaatacggcactccaaattaat

SEQ ID NO: 67132 - DNA, 33 bp, Homo sapien
tctctaaaactcaatatggcactccaaattaat

SEQ ID NO: 67133 - DNA, 33 bp, Homo sapien
agaagggctttgcagtcactcacctcggttctg

SEQ ID NO: 67134 - DNA, 33 bp, Homo sapien
agaagggctttgcagtgactcacctcggttctg

SEQ ID NO: 67135 - DNA, 33 bp, Homo sapien
atccagtaagcggtgactacttggcaagaatgt

SEQ ID NO: 67136 - DNA, 33 bp, Homo sapien
atccagtaagcggtgagtacttggcaagaatgt

SEQ ID NO: 67137 - DNA, 33 bp, Homo sapien
ttcctacctattgctgccacataaagaagaggt

SEQ ID NO: 67138 - DNA, 33 bp, Homo sapien
ttcctacctattgctgtcacataaagaagaggt

SEQ ID NO: 67139 - DNA, 33 bp, Homo sapien
cacagttatttccaaactgtcaagaagatggta

SEQ ID NO: 67140 - DNA, 33 bp, Homo sapien
cacagttatttccaaagtgtcaagaagatggta

SEQ ID NO: 67141 - DNA, 33 bp, Homo sapien
actaagctaaaaagaaaggaaaatctgctgtca

SEQ ID NO: 67142 - DNA, 33 bp, Homo sapien
actaagctaaaaagaagggaaaatctgctgtca

SEQ ID NO: 67143 - DNA, 33 bp, Homo sapien
ctttgaactataaacaataactgtggttgcata

SEQ ID NO: 67144 - DNA, 33 bp, Homo sapien
ctttgaactataaacagtaactgtggttgcata

SEQ ID NO: 67145 - DNA, 33 bp, Homo sapien
taaatctataaaaaagaaaagccttcaattgag

SEQ ID NO: 67146 - DNA, 33 bp, Homo sapien
taaatctataaaaaaggaaagccttcaattgag

SEQ ID NO: 67147 - DNA, 33 bp, Homo sapien
agggtccatctttccaatgatgtgttaacagca

SEQ ID NO: 67148 - DNA, 33 bp, Homo sapien
agggtccatctttccagtgatgtgttaacagca

SEQ ID NO: 67149 - DNA, 33 bp, Homo sapien
gatcatgagccctgggcaagcttgagagtgatg

SEQ ID NO: 67150 - DNA, 33 bp, Homo sapien
gatcatgagccctgggtaagcttgagagtgatg

SEQ ID NO: 67151 - DNA, 33 bp, Homo sapien
ttgcatggctggagaactgttcccttgagtggg

SEQ ID NO: 67152 - DNA, 33 bp, Homo sapien
ttgcatggctggagaagtgttcccttgagtggg

SEQ ID NO: 67153 - DNA, 33 bp, Homo sapien
ggaagatgaacatttacgcaatattcttatttg

SEQ ID NO: 67154 - DNA, 33 bp, Homo sapien
ggaagatgaacatttatgcaatattcttatttg

SEQ ID NO: 67155 - DNA, 33 bp, Homo sapien
ccactggaggaacagtaaatactacaggcaatt

SEQ ID NO: 67156 - DNA, 33 bp, Homo sapien
ccactggaggaacagtgaatactacaggcaatt

SEQ ID NO: 67157 - DNA, 33 bp, Homo sapien
atgctgagcactgtacaaagtaaactatggatg

SEQ ID NO: 67158 - DNA, 33 bp, Homo sapien
atgctgagcactgtacgaagtaaactatggatg

SEQ ID NO: 67159 - DNA, 33 bp, Homo sapien
catcctaagatctaaactgaatccctcgtgcaa

SEQ ID NO: 67160 - DNA, 33 bp, Homo sapien
catcctaagatctaaattgaatccctcgtgcaa

SEQ ID NO: 67161 - DNA, 33 bp, Homo sapien
tgtcatgtagcaccaaattaatgcctatagtag

SEQ ID NO: 67162 - DNA, 33 bp, Homo sapien
tgtcatgtagcaccaacttaatgcctatagtag

SEQ ID NO: 67163 - DNA, 33 bp, Homo sapien
gagtggtggccagttacgatcagtcttgtcgtt

SEQ ID NO: 67164 - DNA, 33 bp, Homo sapien
gagtggtggccagttaggatcagtcttgtcgtt

SEQ ID NO: 67165 - DNA, 33 bp, Homo sapien
cctagaagaaagacaagcttgactcagggaagg

SEQ ID NO: 67166 - DNA, 33 bp, Homo sapien
cctagaagaaagacaatcttgactcagggaagg

SEQ ID NO: 67167 - DNA, 33 bp, Homo sapien
ctcatggtcatctcaaaccagttcaatggaatc

SEQ ID NO: 67168 - DNA, 33 bp, Homo sapien
ctcatggtcatctcaagccagttcaatggaatc

SEQ ID NO: 67169 - DNA, 33 bp, Homo sapien
agcactcttggagctcaatctctagggtatgtg

SEQ ID NO: 67170 - DNA, 33 bp, Homo sapien
agcactcttggagctcgatctctagggtatgtg

SEQ ID NO: 67171 - DNA, 33 bp, Homo sapien
ccccatagcttcaaccactgtcactattatcca

SEQ ID NO: 67172 - DNA, 33 bp, Homo sapien
ccccatagcttcaaccgctgtcactattatcca

SEQ ID NO: 67173 - DNA, 33 bp, Homo sapien
tccagagctatcagccactgggattctttcctt

SEQ ID NO: 67174 - DNA, 33 bp, Homo sapien
tccagagctatcagccgctgggattctttcctt

SEQ ID NO: 67175 - DNA, 33 bp, Homo sapien
tgattatggctggtgcagagtagaccacaggag

SEQ ID NO: 67176 - DNA, 33 bp, Homo sapien
tgattatggctggtgcggagtagaccacaggag

SEQ ID NO: 67177 - DNA, 33 bp, Homo sapien
tagctttctttcttccgaaatgtccatttggct

SEQ ID NO: 67178 - DNA, 33 bp, Homo sapien
tagctttctttcttcctaaatgtccatttggct

SEQ ID NO: 67179 - DNA, 33 bp, Homo sapien
ctcctagctatgatgaagtgcagtaaaagtcca

SEQ ID NO: 67180 - DNA, 33 bp, Homo sapien
ctcctagctatgatgaggtgcagtaaaagtcca

SEQ ID NO: 67181 - DNA, 33 bp, Homo sapien
cttcaaaatcccttcacgatccatagccctgac

SEQ ID NO: 67182 - DNA, 33 bp, Homo sapien
cttcaaaatcccttcatgatccatagccctgac

SEQ ID NO: 67183 - DNA, 33 bp, Homo sapien
atctatttatggggtaaaatgcgatggtttgat

SEQ ID NO: 67184 - DNA, 33 bp, Homo sapien
atctatttatggggtacaatgcgatggtttgat

SEQ ID NO: 67185 - DNA, 33 bp, Homo sapien
gtagtgaagacaacaactgagcatgagatgagg

SEQ ID NO: 67186 - DNA, 33 bp, Homo sapien
gtagtgaagacaacaagtgagcatgagatgagg

SEQ ID NO: 67187 - DNA, 33 bp, Homo sapien
ggaggcacgtaccacaatagtcatatgtatgct

SEQ ID NO: 67188 - DNA, 33 bp, Homo sapien
ggaggcacgtaccacagtagtcatatgtatgct

SEQ ID NO: 67189 - DNA, 33 bp, Homo sapien
acacactttgtatgtgcatttaacagagcaggc

SEQ ID NO: 67190 - DNA, 33 bp, Homo sapien
acacactttgtatgtgtatttaacagagcaggc

SEQ ID NO: 67191 - DNA, 33 bp, Homo sapien
acatatgtggatggaacatttcagaacaacttg

SEQ ID NO: 67192 - DNA, 33 bp, Homo sapien
acatatgtggatggaatatttcagaacaacttg

SEQ ID NO: 67193 - DNA, 33 bp, Homo sapien
accatcctgaagtaccaattctccttatcagaa

SEQ ID NO: 67194 - DNA, 33 bp, Homo sapien
accatcctgaagtaccgattctccttatcagaa

SEQ ID NO: 67195 - DNA, 33 bp, Homo sapien
gggctcctgctcagcacctacaaccttcagacg

SEQ ID NO: 67196 - DNA, 33 bp, Homo sapien
gggctcctgctcagcatctacaaccttcagacg

SEQ ID NO: 67197 - DNA, 33 bp, Homo sapien
ccactggatatcacagacaaccctatcacaccc

SEQ ID NO: 67198 - DNA, 33 bp, Homo sapien
ccactggatatcacagtcaaccctatcacaccc

SEQ ID NO: 67199 - DNA, 33 bp, Homo sapien
atacctgaggggctcacggaaattcacattcta

SEQ ID NO: 67200 - DNA, 33 bp, Homo sapien
atacctgaggggctcatggaaattcacattcta

SEQ ID NO: 67201 - DNA, 33 bp, Homo sapien
gatgttttcattgagacaggaaattctgaaagg

SEQ ID NO: 67202 - DNA, 33 bp, Homo sapien
gatgttttcattgagataggaaattctgaaagg

SEQ ID NO: 67203 - DNA, 33 bp, Homo sapien
tcaatgtgacttgaacagtgataaaaaagtata

SEQ ID NO: 67204 - DNA, 33 bp, Homo sapien
tcaatgtgacttgaacggtgataaaaaagtata

SEQ ID NO: 67205 - DNA, 33 bp, Homo sapien
gttctcctataagaaacagcccctacttctggg

SEQ ID NO: 67206 - DNA, 33 bp, Homo sapien
gttctcctataagaaagagcccctacttctggg

SEQ ID NO: 67207 - DNA, 33 bp, Homo sapien
acttaatagcaaaagaagagcacaattgccaga

SEQ ID NO: 67208 - DNA, 33 bp, Homo sapien
acttaatagcaaaagacgagcacaattgccaga

SEQ ID NO: 67209 - DNA, 33 bp, Homo sapien
tgccagtcagcttgccaatggaaggactttttg

SEQ ID NO: 67210 - DNA, 33 bp, Homo sapien
tgccagtcagcttgccgatggaaggactttttg

SEQ ID NO: 67211 - DNA, 33 bp, Homo sapien
cagtgcagtgtgatacagacaaggtggcataag

SEQ ID NO: 67212 - DNA, 33 bp, Homo sapien
cagtgcagtgtgatacggacaaggtggcataag

SEQ ID NO: 67213 - DNA, 33 bp, Homo sapien
cactaggtcccatcaaatactttgtctatgggg

SEQ ID NO: 67214 - DNA, 33 bp, Homo sapien
cactaggtcccatcaagtactttgtctatgggg

SEQ ID NO: 67215 - DNA, 33 bp, Homo sapien
aactgtagcaaaaaggaatgcaatcagatatcc

SEQ ID NO: 67216 - DNA, 33 bp, Homo sapien
aactgtagcaaaaagggatgcaatcagatatcc

SEQ ID NO: 67217 - DNA, 33 bp, Homo sapien
cttctgtgaaccccaacagtgtctcacatctgc

SEQ ID NO: 67218 - DNA, 33 bp, Homo sapien
cttctgtgaaccccaatagtgtctcacatctgc

SEQ ID NO: 67219 - DNA, 33 bp, Homo sapien
tgaaaaaggatttagacgaattctgcatggccc

SEQ ID NO: 67220 - DNA, 33 bp, Homo sapien
tgaaaaaggatttagatgaattctgcatggccc

SEQ ID NO: 67221 - DNA, 33 bp, Homo sapien
atgatgactatttaacaagagaaggaaggaaat

SEQ ID NO: 67222 - DNA, 33 bp, Homo sapien
atgatgactatttaacgagagaaggaaggaaat

SEQ ID NO: 67223 - DNA, 33 bp, Homo sapien
cctcaaccttactccaaagatttctcccttgac

SEQ ID NO: 67224 - DNA, 33 bp, Homo sapien
cctcaaccttactccagagatttctcccttgac

SEQ ID NO: 67225 - DNA, 33 bp, Homo sapien
catgtggtgattaatactaccttgtgcttttgg

SEQ ID NO: 67226 - DNA, 33 bp, Homo sapien
catgtggtgattaatattaccttgtgcttttgg

SEQ ID NO: 67227 - DNA, 33 bp, Homo sapien
agatctgtatgatggacagagtgagctgacgga

SEQ ID NO: 67228 - DNA, 33 bp, Homo sapien
agatctgtatgatggatagagtgagctgacgga

SEQ ID NO: 67229 - DNA, 33 bp, Homo sapien
gcttgctggtagggtaaagggacaagaccatta

SEQ ID NO: 67230 - DNA, 33 bp, Homo sapien
gcttgctggtagggtagagggacaagaccatta

SEQ ID NO: 67231 - DNA, 33 bp, Homo sapien
atatccacaagccccagggacccaaagcagaga

SEQ ID NO: 67232 - DNA, 33 bp, Homo sapien
atatccacaagccccatggacccaaagcagaga

SEQ ID NO: 67233 - DNA, 33 bp, Homo sapien
ggggggactctcttagcagaagcggaggaagga

SEQ ID NO: 67234 - DNA, 33 bp, Homo sapien
ggggggactctcttaggagaagcggaggaagga

SEQ ID NO: 67235 - DNA, 33 bp, Homo sapien
ctctcctttctttccaccctttgactctgaacc

SEQ ID NO: 67236 - DNA, 33 bp, Homo sapien
ctctcctttctttccatcctttgactctgaacc

SEQ ID NO: 67237 - DNA, 33 bp, Homo sapien
cctttctcagatgtccaaaaggttctctctggt

SEQ ID NO: 67238 - DNA, 33 bp, Homo sapien
cctttctcagatgtccgaaaggttctctctggt

SEQ ID NO: 67239 - DNA, 33 bp, Homo sapien
tggggagtccataccacgctgtacgtgcaggtg

SEQ ID NO: 67240 - DNA, 33 bp, Homo sapien
tggggagtccataccatgctgtacgtgcaggtg

SEQ ID NO: 67241 - DNA, 33 bp, Homo sapien
ctctcctgcttccatccgaattcaagatcctca

SEQ ID NO: 67242 - DNA, 33 bp, Homo sapien
ctctcctgcttccatctgaattcaagatcctca

SEQ ID NO: 67243 - DNA, 33 bp, Homo sapien
gtggctcacaactgcaatcccagcattttggga

SEQ ID NO: 67244 - DNA, 33 bp, Homo sapien
gtggctcacaactgcagtcccagcattttggga

SEQ ID NO: 67245 - DNA, 33 bp, Homo sapien
ctcatattggggtgtgaacaagtgatagcagct

SEQ ID NO: 67246 - DNA, 33 bp, Homo sapien
ctcatattggggtgtggacaagtgatagcagct

SEQ ID NO: 67247 - DNA, 33 bp, Homo sapien
cagccatttgctccctcaccagtaatctactta

SEQ ID NO: 67248 - DNA, 33 bp, Homo sapien
cagccatttgctccctgaccagtaatctactta

SEQ ID NO: 67249 - DNA, 33 bp, Homo sapien
tgtatgttagatccccaaaatttattcatctta

SEQ ID NO: 67250 - DNA, 33 bp, Homo sapien
tgtatgttagatccccgaaatttattcatctta

SEQ ID NO: 67251 - DNA, 33 bp, Homo sapien
atactttttaggaatcaattttgatgcagtaaa

SEQ ID NO: 67252 - DNA, 33 bp, Homo sapien
atactttttaggaatccattttgatgcagtaaa

SEQ ID NO: 67253 - DNA, 33 bp, Homo sapien
tccccaatggttatcaagtagagcactctctag

SEQ ID NO: 67254 - DNA, 33 bp, Homo sapien
tccccaatggttatcaggtagagcactctctag

SEQ ID NO: 67255 - DNA, 33 bp, Homo sapien
tagggaattttctgcactagaatagatgttata

SEQ ID NO: 67256 - DNA, 33 bp, Homo sapien
tagggaattttctgcattagaatagatgttata

SEQ ID NO: 67257 - DNA, 33 bp, Homo sapien
ttcttgacctctaacactctaaatcccacccac

SEQ ID NO: 67258 - DNA, 33 bp, Homo sapien
ttcttgacctctaacattctaaatcccacccac

SEQ ID NO: 67259 - DNA, 33 bp, Homo sapien
caagtaatgacactacaaacagatcatcgttta

SEQ ID NO: 67260 - DNA, 33 bp, Homo sapien
caagtaatgacactacgaacagatcatcgttta

SEQ ID NO: 67261 - DNA, 33 bp, Homo sapien
atcacatgcatacagaaggtatttaacgccata

SEQ ID NO: 67262 - DNA, 33 bp, Homo sapien
atcacatgcatacagatggtatttaacgccata

SEQ ID NO: 67263 - DNA, 33 bp, Homo sapien
ctccaaaacaaaaagcaaatggatcctactgga

SEQ ID NO: 67264 - DNA, 33 bp, Homo sapien
ctccaaaacaaaaagcgaatggatcctactgga

SEQ ID NO: 67265 - DNA, 33 bp, Homo sapien
cacgtttaacaatttgcagcttttctactctga

SEQ ID NO: 67266 - DNA, 33 bp, Homo sapien
cacgtttaacaatttggagcttttctactctga

SEQ ID NO: 67267 - DNA, 33 bp, Homo sapien
aatgtggtaagtgaacggaataaatgcattttt

SEQ ID NO: 67268 - DNA, 33 bp, Homo sapien
aatgtggtaagtgaactgaataaatgcattttt

SEQ ID NO: 67269 - DNA, 33 bp, Homo sapien
taggcactgggggataccgtgatgaagatgaac

SEQ ID NO: 67270 - DNA, 33 bp, Homo sapien
taggcactgggggatatcgtgatgaagatgaac

SEQ ID NO: 67271 - DNA, 33 bp, Homo sapien
gtgtcttgaagatggacgagagttcccagacaa

SEQ ID NO: 67272 - DNA, 33 bp, Homo sapien
gtgtcttgaagatggatgagagttcccagacaa

SEQ ID NO: 67273 - DNA, 33 bp, Homo sapien
gaactatgaagggtacaccgttgagatagacag

SEQ ID NO: 67274 - DNA, 33 bp, Homo sapien
gaactatgaagggtacgccgttgagatagacag

SEQ ID NO: 67275 - DNA, 33 bp, Homo sapien
aagtctgtaacaaggccccggatgtggccagag

SEQ ID NO: 67276 - DNA, 33 bp, Homo sapien
aagtctgtaacaaggctccggatgtggccagag

SEQ ID NO: 67277 - DNA, 33 bp, Homo sapien
atccaattgtaatgtcgaaaaggaattttcccc

SEQ ID NO: 67278 - DNA, 33 bp, Homo sapien
atccaattgtaatgtctaaaaggaattttcccc

SEQ ID NO: 67279 - DNA, 33 bp, Homo sapien
gcaaagctgagaaataaccacgttgtaccctca

SEQ ID NO: 67280 - DNA, 33 bp, Homo sapien
gcaaagctgagaaatatccacgttgtaccctca

SEQ ID NO: 67281 - DNA, 33 bp, Homo sapien
aataaccaagtcttgacacattcatgctttgca

SEQ ID NO: 67282 - DNA, 33 bp, Homo sapien
aataaccaagtcttgatacattcatgctttgca

SEQ ID NO: 67283 - DNA, 33 bp, Homo sapien
atgatgcttcgggagcacaaatgcctgtgatga

SEQ ID NO: 67284 - DNA, 33 bp, Homo sapien
atgatgcttcgggagcgcaaatgcctgtgatga

SEQ ID NO: 67285 - DNA, 33 bp, Homo sapien
atagacatgcaatggaacaggccatgtggcaga

SEQ ID NO: 67286 - DNA, 33 bp, Homo sapien
atagacatgcaatggaccaggccatgtggcaga

SEQ ID NO: 67287 - DNA, 33 bp, Homo sapien
agattaaggggaatgcagattaacagttcagaa

SEQ ID NO: 67288 - DNA, 33 bp, Homo sapien
agattaaggggaatgcggattaacagttcagaa

SEQ ID NO: 67289 - DNA, 33 bp, Homo sapien
cacacatgcaaatacaggggctgtgttcacaca

SEQ ID NO: 67290 - DNA, 33 bp, Homo sapien
cacacatgcaaatacatgggctgtgttcacaca

SEQ ID NO: 67291 - DNA, 33 bp, Homo sapien
ggctcaaataccattacctctattcattttaca

SEQ ID NO: 67292 - DNA, 33 bp, Homo sapien
ggctcaaataccattatctctattcattttaca

SEQ ID NO: 67293 - DNA, 33 bp, Homo sapien
gctcctataatccccaatggcgtaagcgatgcc

SEQ ID NO: 67294 - DNA, 33 bp, Homo sapien
gctcctataatccccagtggcgtaagcgatgcc

SEQ ID NO: 67295 - DNA, 33 bp, Homo sapien
gtctgtaacagggccacggaaggtcaataagag

SEQ ID NO: 67296 - DNA, 33 bp, Homo sapien
gtctgtaacagggccatggaaggtcaataagag

SEQ ID NO: 67297 - DNA, 33 bp, Homo sapien
gtagctattgactgaccaggggctcttcggtaa

SEQ ID NO: 67298 - DNA, 33 bp, Homo sapien
gtagctattgactgacgaggggctcttcggtaa

SEQ ID NO: 67299 - DNA, 33 bp, Homo sapien
cattgcaaattataccaaaatgaaatggacaga

SEQ ID NO: 67300 - DNA, 33 bp, Homo sapien
cattgcaaattataccgaaatgaaatggacaga

SEQ ID NO: 67301 - DNA, 33 bp, Homo sapien
taagggcaactttttcaaggctgcagaagcacc

SEQ ID NO: 67302 - DNA, 33 bp, Homo sapien
taagggcaactttttcgaggctgcagaagcacc

SEQ ID NO: 67303 - DNA, 33 bp, Homo sapien
aggcttctcgtggccccactcttgctagcttgg

SEQ ID NO: 67304 - DNA, 33 bp, Homo sapien
aggcttctcgtggccctactcttgctagcttgg

SEQ ID NO: 67305 - DNA, 33 bp, Homo sapien
ggcaggggaccattcacaagaagagtctggagt

SEQ ID NO: 67306 - DNA, 33 bp, Homo sapien
ggcaggggaccattcataagaagagtctggagt

SEQ ID NO: 67307 - DNA, 33 bp, Homo sapien
tgataagtttccagaaattcctctggcagtgta

SEQ ID NO: 67308 - DNA, 33 bp, Homo sapien
tgataagtttccagaagttcctctggcagtgta

SEQ ID NO: 67309 - DNA, 33 bp, Homo sapien
gaactgtgaatcacaacccattagtaggtcatg

SEQ ID NO: 67310 - DNA, 33 bp, Homo sapien
gaactgtgaatcacaatccattagtaggtcatg

SEQ ID NO: 67311 - DNA, 33 bp, Homo sapien
gctgtgagagagcctacgggatgttgcatttga

SEQ ID NO: 67312 - DNA, 33 bp, Homo sapien
gctgtgagagagcctatgggatgttgcatttga

SEQ ID NO: 67313 - DNA, 33 bp, Homo sapien
gtccatagcttttatcaacttttgagaggggtc

SEQ ID NO: 67314 - DNA, 33 bp, Homo sapien
gtccatagcttttatcgacttttgagaggggtc

SEQ ID NO: 67315 - DNA, 33 bp, Homo sapien
tatggagctgtcacaacgggaaaaatgaggcga

SEQ ID NO: 67316 - DNA, 33 bp, Homo sapien
tatggagctgtcacaatgggaaaaatgaggcga

SEQ ID NO: 67317 - DNA, 33 bp, Homo sapien
gctttcgccagctatccagtactttctccacct

SEQ ID NO: 67318 - DNA, 33 bp, Homo sapien
gctttcgccagctatctagtactttctccacct

SEQ ID NO: 67319 - DNA, 33 bp, Homo sapien
aagttttgtcaggtcaagtatttctgatctaaa

SEQ ID NO: 67320 - DNA, 33 bp, Homo sapien
aagttttgtcaggtcatgtatttctgatctaaa

SEQ ID NO: 67321 - DNA, 33 bp, Homo sapien
ggtgagcccagctacaaccactgaagacaagat

SEQ ID NO: 67322 - DNA, 33 bp, Homo sapien
ggtgagcccagctacagccactgaagacaagat

SEQ ID NO: 67323 - DNA, 33 bp, Homo sapien
agggcaccgaaacgcaagataattgtgttcaga

SEQ ID NO: 67324 - DNA, 33 bp, Homo sapien
agggcaccgaaacgcaggataattgtgttcaga

SEQ ID NO: 67325 - DNA, 33 bp, Homo sapien
gcttatgctttcttaacattagacacctccctt

SEQ ID NO: 67326 - DNA, 33 bp, Homo sapien
gcttatgctttcttaatattagacacctccctt

SEQ ID NO: 67327 - DNA, 33 bp, Homo sapien
ccaagaggctctaagaagaagtgagagagagag

SEQ ID NO: 67328 - DNA, 33 bp, Homo sapien
ccaagaggctctaagacgaagtgagagagagag

SEQ ID NO: 67329 - DNA, 33 bp, Homo sapien
cctcgtttcctgctaccgcttttgctgtcctca

SEQ ID NO: 67330 - DNA, 33 bp, Homo sapien
cctcgtttcctgctactgcttttgctgtcctca

SEQ ID NO: 67331 - DNA, 33 bp, Homo sapien
gactgagctggaaaaaaaaaggcctcagaaggg

SEQ ID NO: 67332 - DNA, 33 bp, Homo sapien
gactgagctggaaaaagaaaggcctcagaaggg

SEQ ID NO: 67333 - DNA, 33 bp, Homo sapien
agccccctggaaatgaactatttgaggaaacat

SEQ ID NO: 67334 - DNA, 33 bp, Homo sapien
agccccctggaaatgagctatttgaggaaacat

SEQ ID NO: 67335 - DNA, 33 bp, Homo sapien
cccctgggagtcttcacggctcctctggcagaa

SEQ ID NO: 67336 - DNA, 33 bp, Homo sapien
cccctgggagtcttcatggctcctctggcagaa

SEQ ID NO: 67337 - DNA, 33 bp, Homo sapien
tggttgacttggccggaaaggagttaacacaca

SEQ ID NO: 67338 - DNA, 33 bp, Homo sapien
tggttgacttggccgggaaggagttaacacaca

SEQ ID NO: 67339 - DNA, 33 bp, Homo sapien
ggatgcagcaaagtcaacagtgcatgtgctccc

SEQ ID NO: 67340 - DNA, 33 bp, Homo sapien
ggatgcagcaaagtcagcagtgcatgtgctccc

SEQ ID NO: 67341 - DNA, 33 bp, Homo sapien
tcattgagagccaggacggaatcttccagaatg

SEQ ID NO: 67342 - DNA, 33 bp, Homo sapien
tcattgagagccaggatggaatcttccagaatg

SEQ ID NO: 67343 - DNA, 33 bp, Homo sapien
tgtttgaaaggagataagaaaaagagtgagacg

SEQ ID NO: 67344 - DNA, 33 bp, Homo sapien
tgtttgaaaggagataggaaaaagagtgagacg

SEQ ID NO: 67345 - DNA, 33 bp, Homo sapien
aaaatgccagagcatcaaaagacaaagtggctc

SEQ ID NO: 67346 - DNA, 33 bp, Homo sapien
aaaatgccagagcatcgaaagacaaagtggctc

SEQ ID NO: 67347 - DNA, 33 bp, Homo sapien
acatacctctttataccggcactaatcctgcct

SEQ ID NO: 67348 - DNA, 33 bp, Homo sapien
acatacctctttatactggcactaatcctgcct

SEQ ID NO: 67349 - DNA, 33 bp, Homo sapien
agaacattgggaaagactaaatgacttgcaaca

SEQ ID NO: 67350 - DNA, 33 bp, Homo sapien
agaacattgggaaagattaaatgacttgcaaca

SEQ ID NO: 67351 - DNA, 33 bp, Homo sapien
actgtggactggcccacgagtgatgagaaaggg

SEQ ID NO: 67352 - DNA, 33 bp, Homo sapien
actgtggactggcccatgagtgatgagaaaggg

SEQ ID NO: 67353 - DNA, 33 bp, Homo sapien
ctcagtcctgaggctcagacacagacaggggca

SEQ ID NO: 67354 - DNA, 33 bp, Homo sapien
ctcagtcctgaggctcggacacagacaggggca

SEQ ID NO: 67355 - DNA, 33 bp, Homo sapien
ggaactatctaggtagcattttgtccaatctaa

SEQ ID NO: 67356 - DNA, 33 bp, Homo sapien
ggaactatctaggtagtattttgtccaatctaa

SEQ ID NO: 67357 - DNA, 33 bp, Homo sapien
atatctctgtttggggcaatctatgtaggtaca

SEQ ID NO: 67358 - DNA, 33 bp, Homo sapien
atatctctgtttgggggaatctatgtaggtaca

SEQ ID NO: 67359 - DNA, 33 bp, Homo sapien
ggcccacgcaaagccaaacagtgccttctctga

SEQ ID NO: 67360 - DNA, 33 bp, Homo sapien
ggcccacgcaaagccagacagtgccttctctga

SEQ ID NO: 67361 - DNA, 33 bp, Homo sapien
tgagtcagaattctccactgcaagtcccactaa

SEQ ID NO: 67362 - DNA, 33 bp, Homo sapien
tgagtcagaattctccgctgcaagtcccactaa

SEQ ID NO: 67363 - DNA, 33 bp, Homo sapien
cagcagcgctggaagaaactttcgagatcatta

SEQ ID NO: 67364 - DNA, 33 bp, Homo sapien
cagcagcgctggaagagactttcgagatcatta

SEQ ID NO: 67365 - DNA, 33 bp, Homo sapien
agcagacgttccaagcggatcctcagaggagca

SEQ ID NO: 67366 - DNA, 33 bp, Homo sapien
agcagacgttccaagctgatcctcagaggagca

SEQ ID NO: 67367 - DNA, 33 bp, Homo sapien
tttatatgtgtattgccacagaaaggtggtttt

SEQ ID NO: 67368 - DNA, 33 bp, Homo sapien
tttatatgtgtattgctacagaaaggtggtttt

SEQ ID NO: 67369 - DNA, 33 bp, Homo sapien
tttatgggcttatataacttgtgtcatcaaatg

SEQ ID NO: 67370 - DNA, 33 bp, Homo sapien
tttatgggcttatataccttgtgtcatcaaatg

SEQ ID NO: 67371 - DNA, 33 bp, Homo sapien
tcaaaacagcaaaaaagttaaaggttgttgttc

SEQ ID NO: 67372 - DNA, 33 bp, Homo sapien
tcaaaacagcaaaaaatttaaaggttgttgttc

SEQ ID NO: 67373 - DNA, 33 bp, Homo sapien
ctatgagcttctggataacagggacaagatttt

SEQ ID NO: 67374 - DNA, 33 bp, Homo sapien
ctatgagcttctggatgacagggacaagatttt

SEQ ID NO: 67375 - DNA, 33 bp, Homo sapien
ctgcttgttgcttaaacgagatactgctggaag

SEQ ID NO: 67376 - DNA, 33 bp, Homo sapien
ctgcttgttgcttaaatgagatactgctggaag

SEQ ID NO: 67377 - DNA, 33 bp, Homo sapien
atgatctgtatgtaaactgatgcatttatttat

SEQ ID NO: 67378 - DNA, 33 bp, Homo sapien
atgatctgtatgtaaattgatgcatttatttat

SEQ ID NO: 67379 - DNA, 33 bp, Homo sapien
ctgtatccaatgtataaggagagagaatcctag

SEQ ID NO: 67380 - DNA, 33 bp, Homo sapien
ctgtatccaatgtatagggagagagaatcctag

SEQ ID NO: 67381 - DNA, 33 bp, Homo sapien
atgcaataagaaatacagatttggtctctgtcc

SEQ ID NO: 67382 - DNA, 33 bp, Homo sapien
atgcaataagaaatacggatttggtctctgtcc

SEQ ID NO: 67383 - DNA, 33 bp, Homo sapien
tttctctccatcaacccctttcacatggcgcct

SEQ ID NO: 67384 - DNA, 33 bp, Homo sapien
tttctctccatcaacctctttcacatggcgcct

SEQ ID NO: 67385 - DNA, 33 bp, Homo sapien
cttcccacatccatcactaatatgcaagacaac

SEQ ID NO: 67386 - DNA, 33 bp, Homo sapien
cttcccacatccatcattaatatgcaagacaac

SEQ ID NO: 67387 - DNA, 33 bp, Homo sapien
tctcagtttgaggagcaccaagagatcatggaa

SEQ ID NO: 67388 - DNA, 33 bp, Homo sapien
tctcagtttgaggagcgccaagagatcatggaa

SEQ ID NO: 67389 - DNA, 33 bp, Homo sapien
tcccagaaatttccacagtcataaaatttggat

SEQ ID NO: 67390 - DNA, 33 bp, Homo sapien
tcccagaaatttccacggtcataaaatttggat

SEQ ID NO: 67391 - DNA, 33 bp, Homo sapien
agcaatgtcctggttacgaataagtggctggtt

SEQ ID NO: 67392 - DNA, 33 bp, Homo sapien
agcaatgtcctggttatgaataagtggctggtt

SEQ ID NO: 67393 - DNA, 33 bp, Homo sapien; identical to SEQ ID NO: 67391

SEQ ID NO: 67394 - DNA, 33 bp, Homo sapien; identical to SEQ ID NO: 67392

SEQ ID NO: 67395 - DNA, 33 bp, Homo sapien
cactgctcatttccctcaccctggagatttgac

SEQ ID NO: 67396 - DNA, 33 bp, Homo sapien
cactgctcatttccctgaccctggagatttgac

SEQ ID NO: 67397 - DNA, 33 bp, Homo sapien
ctgacctgtaatctgaaagatgaccacgaaaaa

SEQ ID NO: 67398 - DNA, 33 bp, Homo sapien
ctgacctgtaatctgacagatgaccacgaaaaa

SEQ ID NO: 67399 - DNA, 33 bp, Homo sapien
ctaacaaaaaggtcacagtctgacatcaagaaa

SEQ ID NO: 67400 - DNA, 33 bp, Homo sapien
ctaacaaaaaggtcacggtctgacatcaagaaa

SEQ ID NO: 67401 - DNA, 33 bp, Homo sapien
ctgctcatggattggacgtgagaagagcagcaa

SEQ ID NO: 67402 - DNA, 33 bp, Homo sapien
ctgctcatggattggatgtgagaagagcagcaa

SEQ ID NO: 67403 - DNA, 33 bp, Homo sapien
caaggaagctaatgaccgaattctattcttact

SEQ ID NO: 67404 - DNA, 33 bp, Homo sapien
caaggaagctaatgactgaattctattcttact

SEQ ID NO: 67405 - DNA, 33 bp, Homo sapien
aacatggctgtgtatacgaaatggtttggattt

SEQ ID NO: 67406 - DNA, 33 bp, Homo sapien
aacatggctgtgtatatgaaatggtttggattt

SEQ ID NO: 67407 - DNA, 33 bp, Homo sapien
ccatcttaattagcaaaaacaatcagaagcagt

SEQ ID NO: 67408 - DNA, 33 bp, Homo sapien
ccatcttaattagcaagaacaatcagaagcagt

SEQ ID NO: 67409 - DNA, 33 bp, Homo sapien
gttaccaggagaacccagaatctcttactgggc

SEQ ID NO: 67410 - DNA, 33 bp, Homo sapien
gttaccaggagaacccggaatctcttactgggc

SEQ ID NO: 67411 - DNA, 33 bp, Homo sapien
agtgcatgctttatcacggccttatcatctggc

SEQ ID NO: 67412 - DNA, 33 bp, Homo sapien
agtgcatgctttatcatggccttatcatctggc

SEQ ID NO: 67413 - DNA, 33 bp, Homo sapien
tggtctctgcctttgaagcttatggactacaca

SEQ ID NO: 67414 - DNA, 33 bp, Homo sapien
tggtctctgcctttgaggcttatggactacaca

SEQ ID NO: 67415 - DNA, 33 bp, Homo sapien
cagccatctatgaaacactctatccaacaacag

SEQ ID NO: 67416 - DNA, 33 bp, Homo sapien
cagccatctatgaaactctctatccaacaacag

SEQ ID NO: 67417 - DNA, 33 bp, Homo sapien
gactgggcctcaagtacgagactgggcctgctc

SEQ ID NO: 67418 - DNA, 33 bp, Homo sapien
gactgggcctcaagtatgagactgggcctgctc

SEQ ID NO: 67419 - DNA, 33 bp, Homo sapien
tgttctctcctggcccagccttatgtgtgtaat

SEQ ID NO: 67420 - DNA, 33 bp, Homo sapien
tgttctctcctggcccggccttatgtgtgtaat

SEQ ID NO: 67421 - DNA, 33 bp, Homo sapien
gagcaaagacagtaccaaggctgacaaataggc

SEQ ID NO: 67422 - DNA, 33 bp, Homo sapien
gagcaaagacagtaccgaggctgacaaataggc

SEQ ID NO: 67423 - DNA, 33 bp, Homo sapien
tgtctgagaggatatgacaccacttatttcagt

SEQ ID NO: 67424 - DNA, 33 bp, Homo sapien
tgtctgagaggatatggcaccacttatttcagt

SEQ ID NO: 67425 - DNA, 33 bp, Homo sapien
aaacaatctcttttccagaaagcccttactcac

SEQ ID NO: 67426 - DNA, 33 bp, Homo sapien
aaacaatctcttttccggaaagcccttactcac

SEQ ID NO: 67427 - DNA, 33 bp, Homo sapien
gagagtgattgtgcccagctaaccacaaaggca

SEQ ID NO: 67428 - DNA, 33 bp, Homo sapien
gagagtgattgtgcccggctaaccacaaaggca

SEQ ID NO: 67429 - DNA, 33 bp, Homo sapien
caacccacctagaagaccagtcctcaaagtcct

SEQ ID NO: 67430 - DNA, 33 bp, Homo sapien
caacccacctagaagatcagtcctcaaagtcct

SEQ ID NO: 67431 - DNA, 33 bp, Homo sapien
aggtttcatatgtttacagagagagtttgcagt

SEQ ID NO: 67432 - DNA, 33 bp, Homo sapien
aggtttcatatgtttatagagagagtttgcagt

SEQ ID NO: 67433 - DNA, 33 bp, Homo sapien
cctgcccttctgccatcagtaaaattccctgag

SEQ ID NO: 67434 - DNA, 33 bp, Homo sapien
cctgcccttctgccatgagtaaaattccctgag

SEQ ID NO: 67435 - DNA, 33 bp, Homo sapien
caggaatggaatttcacctacgtacagtggaag

SEQ ID NO: 67436 - DNA, 33 bp, Homo sapien
caggaatggaatttcatctacgtacagtggaag

SEQ ID NO: 67437 - DNA, 33 bp, Homo sapien
tgagggagagatgagagaagagatcaaagagtc

SEQ ID NO: 67438 - DNA, 33 bp, Homo sapien
tgagggagagatgagataagagatcaaagagtc

SEQ ID NO: 67439 - DNA, 33 bp, Homo sapien
agaaactaaggtcaaccacttggatggtcagcc

SEQ ID NO: 67440 - DNA, 33 bp, Homo sapien
agaaactaaggtcaactacttggatggtcagcc

SEQ ID NO: 67441 - DNA, 33 bp, Homo sapien
aggtactgaaccaaacagttctttacaaatgtt

SEQ ID NO: 67442 - DNA, 33 bp, Homo sapien
aggtactgaaccaaactgttctttacaaatgtt

SEQ ID NO: 67443 - DNA, 33 bp, Homo sapien
ggtggaggtgcaaacaagcgatcctgttggggc

SEQ ID NO: 67444 - DNA, 33 bp, Homo sapien
ggtggaggtgcaaacacgcgatcctgttggggc

SEQ ID NO: 67445 - DNA, 33 bp, Homo sapien
acagctctatagagtcagaatctttgacctttg

SEQ ID NO: 67446 - DNA, 33 bp, Homo sapien
acagctctatagagtcggaatctttgacctttg

SEQ ID NO: 67447 - DNA, 33 bp, Homo sapien
catagcaagcctaagaacagagacacaggaaat

SEQ ID NO: 67448 - DNA, 33 bp, Homo sapien
catagcaagcctaagaccagagacacaggaaat

SEQ ID NO: 67449 - DNA, 33 bp, Homo sapien
gcagctctggatccccactaccgcctttgtctt

SEQ ID NO: 67450 - DNA, 33 bp, Homo sapien
gcagctctggatccccgctaccgcctttgtctt

SEQ ID NO: 67451 - DNA, 33 bp, Homo sapien
tgcctgaccaaccataaaggcagctctgtcact

SEQ ID NO: 67452 - DNA, 33 bp, Homo sapien
tgcctgaccaaccatagaggcagctctgtcact

SEQ ID NO: 67453 - DNA, 33 bp, Homo sapien
ctttcttcataaatcaactagtctcagatagtt

SEQ ID NO: 67454 - DNA, 33 bp, Homo sapien
ctttcttcataaatcacctagtctcagatagtt

SEQ ID NO: 67455 - DNA, 33 bp, Homo sapien
attggaaggagcattaacgatcatctgatccca

SEQ ID NO: 67456 - DNA, 33 bp, Homo sapien
attggaaggagcattagcgatcatctgatccca

SEQ ID NO: 67457 - DNA, 33 bp, Homo sapien
caagcacatgtacttacgtgttcatagcagcac

SEQ ID NO: 67458 - DNA, 33 bp, Homo sapien
caagcacatgtacttatgtgttcatagcagcac

SEQ ID NO: 67459 - DNA, 33 bp, Homo sapien
tgcctctcagtagaagacaataaagtgggttat

SEQ ID NO: 67460 - DNA, 33 bp, Homo sapien
tgcctctcagtagaaggcaataaagtgggttat

SEQ ID NO: 67461 - DNA, 33 bp, Homo sapien
ctgcagacagtgcagaactaagcagtgatagga

SEQ ID NO: 67462 - DNA, 33 bp, Homo sapien
ctgcagacagtgcagagctaagcagtgatagga

SEQ ID NO: 67463 - DNA, 33 bp, Homo sapien
aggactgtgattcaggaactttcaagcctcagg

SEQ ID NO: 67464 - DNA, 33 bp, Homo sapien
aggactgtgattcagggactttcaagcctcagg

SEQ ID NO: 67465 - DNA, 33 bp, Homo sapien
ttgcctgcctgggcaacgtgcctcttcatctct

SEQ ID NO: 67466 - DNA, 33 bp, Homo sapien
ttgcctgcctgggcaatgtgcctcttcatctct

SEQ ID NO: 67467 - DNA, 33 bp, Homo sapien
cgtctgcagaataccaagaagtgatctagcagc

SEQ ID NO: 67468 - DNA, 33 bp, Homo sapien
cgtctgcagaataccacgaagtgatctagcagc

SEQ ID NO: 67469 - DNA, 33 bp, Homo sapien
gaagtcctgccccaaacctgaaagcacctacat

SEQ ID NO: 67470 - DNA, 33 bp, Homo sapien
gaagtcctgccccaaatctgaaagcacctacat

SEQ ID NO: 67471 - DNA, 33 bp, Homo sapien
tatctttggcagagataaaaaaaatatttgtca

SEQ ID NO: 67472 - DNA, 33 bp, Homo sapien
tatctttggcagagattaaaaaaatatttgtca

SEQ ID NO: 67473 - DNA, 33 bp, Homo sapien
tgtgcaagagtcgttacgctttttctacttcca

SEQ ID NO: 67474 - DNA, 33 bp, Homo sapien
tgtgcaagagtcgttatgctttttctacttcca

SEQ ID NO: 67475 - DNA, 33 bp, Homo sapien
tataactcagtaaaccacatttggaagaaaaaa

SEQ ID NO: 67476 - DNA, 33 bp, Homo sapien
tataactcagtaaacctcatttggaagaaaaaa

SEQ ID NO: 67477 - DNA, 33 bp, Homo sapien
cagcaataagaaggaacggactatttatactag

SEQ ID NO: 67478 - DNA, 33 bp, Homo sapien
cagcaataagaaggaatggactatttatactag

SEQ ID NO: 67479 - DNA, 33 bp, Homo sapien
ctggccaaccagttaccagtttgttgtataccc

SEQ ID NO: 67480 - DNA, 33 bp, Homo sapien
ctggccaaccagttactagtttgttgtataccc

SEQ ID NO: 67481 - DNA, 33 bp, Homo sapien
gaggcacatgaaccacaagtcaggagaattttg

SEQ ID NO: 67482 - DNA, 33 bp, Homo sapien
gaggcacatgaaccacgagtcaggagaattttg

SEQ ID NO: 67483 - DNA, 33 bp, Homo sapien
accagtgcttttatcaccagtcataggacttta

SEQ ID NO: 67484 - DNA, 33 bp, Homo sapien
accagtgcttttatcatcagtcataggacttta

SEQ ID NO: 67485 - DNA, 33 bp, Homo sapien
ccaaaaaaagtgtctgaaggaaatggtataatc

SEQ ID NO: 67486 - DNA, 33 bp, Homo sapien
ccaaaaaaagtgtctgcaggaaatggtataatc

SEQ ID NO: 67487 - DNA, 33 bp, Homo sapien
gtgtctggatcccaagcccatgtcgtcggcact

SEQ ID NO: 67488 - DNA, 33 bp, Homo sapien
gtgtctggatcccaagtccatgtcgtcggcact

SEQ ID NO: 67489 - DNA, 33 bp, Homo sapien
ccttccttgaccactcacttcactttattacat

SEQ ID NO: 67490 - DNA, 33 bp, Homo sapien
ccttccttgaccactcgcttcactttattacat

SEQ ID NO: 67491 - DNA, 33 bp, Homo sapien
tttcttaccatactaaagtgttcgttacagtcg

SEQ ID NO: 67492 - DNA, 33 bp, Homo sapien
tttcttaccatactaacgtgttcgttacagtcg

SEQ ID NO: 67493 - DNA, 33 bp, Homo sapien
caaaaatccagtagcaataagtgcaacggagaa

SEQ ID NO: 67494 - DNA, 33 bp, Homo sapien
caaaaatccagtagcagtaagtgcaacggagaa

SEQ ID NO: 67495 - DNA, 33 bp, Homo sapien
gtggctgtaataatgacgcatccatggtcacag

SEQ ID NO: 67496 - DNA, 33 bp, Homo sapien
gtggctgtaataatgatgcatccatggtcacag

SEQ ID NO: 67497 - DNA, 33 bp, Homo sapien
aggtcttctaccaggcagatcattagcaaactc

SEQ ID NO: 67498 - DNA, 33 bp, Homo sapien
aggtcttctaccaggcggatcattagcaaactc

SEQ ID NO: 67499 - DNA, 33 bp, Homo sapien
aaagatggtggattcactccttcctttgacttg

SEQ ID NO: 67500 - DNA, 33 bp, Homo sapien
aaagatggtggattcattccttcctttgacttg

SEQ ID NO: 67501 - DNA, 33 bp, Homo sapien
gggactcttgatagaactaggaagccagaagct

SEQ ID NO: 67502 - DNA, 33 bp, Homo sapien
gggactcttgatagaattaggaagccagaagct

SEQ ID NO: 67503 - DNA, 33 bp, Homo sapien
tgtgagagtgtgcatacgagttgaggccatcct

SEQ ID NO: 67504 - DNA, 33 bp, Homo sapien
tgtgagagtgtgcatatgagttgaggccatcct

SEQ ID NO: 67505 - DNA, 33 bp, Homo sapien
cgagtaaagaaacctcacagaccgagcaggcat

SEQ ID NO: 67506 - DNA, 33 bp, Homo sapien
cgagtaaagaaacctcgcagaccgagcaggcat

SEQ ID NO: 67507 - DNA, 33 bp, Homo sapien
ggcttgaagtcttgaacaggcaaaggaggtccc

SEQ ID NO: 67508 - DNA, 33 bp, Homo sapien
ggcttgaagtcttgaataggcaaaggaggtccc

SEQ ID NO: 67509 - DNA, 33 bp, Homo sapien
agaaatcatgcttctcaatgggaggctccagag

SEQ ID NO: 67510 - DNA, 33 bp, Homo sapien
agaaatcatgcttctcgatgggaggctccagag

SEQ ID NO: 67511 - DNA, 33 bp, Homo sapien
gagtggattggaaacactgctgcagagcaaagc

SEQ ID NO: 67512 - DNA, 33 bp, Homo sapien
gagtggattggaaacattgctgcagagcaaagc

SEQ ID NO: 67513 - DNA, 33 bp, Homo sapien
ctctcttgattgtgaaaccttgagttaaacttg

SEQ ID NO: 67514 - DNA, 33 bp, Homo sapien
ctctcttgattgtgaagccttgagttaaacttg

SEQ ID NO: 67515 - DNA, 33 bp, Homo sapien
ttcatattttctgctacgggtttcttatacaaa

SEQ ID NO: 67516 - DNA, 33 bp, Homo sapien
ttcatattttctgctatgggtttcttatacaaa

SEQ ID NO: 67517 - DNA, 33 bp, Homo sapien
atttggaaaggcaatacgctcagtgaagaacaa

SEQ ID NO: 67518 - DNA, 33 bp, Homo sapien
atttggaaaggcaatatgctcagtgaagaacaa

SEQ ID NO: 67519 - DNA, 33 bp, Homo sapien
agtctcccttcatccactcttgattcctaagct

SEQ ID NO: 67520 - DNA, 33 bp, Homo sapien
agtctcccttcatccattcttgattcctaagct

SEQ ID NO: 67521 - DNA, 33 bp, Homo sapien
aaactcagagtccatacgctaaagctcatatct

SEQ ID NO: 67522 - DNA, 33 bp, Homo sapien
aaactcagagtccatatgctaaagctcatatct

SEQ ID NO: 67523 - DNA, 33 bp, Homo sapien
gtgacacatcacaaacaggaatgcaaaacgaaa

SEQ ID NO: 67524 - DNA, 33 bp, Homo sapien
gtgacacatcacaaacgggaatgcaaaacgaaa

SEQ ID NO: 67525 - DNA, 33 bp, Homo sapien
caaatatactcagaacaatttcccaccgtgaga

SEQ ID NO: 67526 - DNA, 33 bp, Homo sapien
caaatatactcagaaccatttcccaccgtgaga

SEQ ID NO: 67527 - DNA, 33 bp, Homo sapien
attcccagagaagcaaactcgagtgccaagtct

SEQ ID NO: 67528 - DNA, 33 bp, Homo sapien
attcccagagaagcaatctcgagtgccaagtct

SEQ ID NO: 67529 - DNA, 33 bp, Homo sapien
tctagaacacctttaacgctggataacctgcta

SEQ ID NO: 67530 - DNA, 33 bp, Homo sapien
tctagaacacctttaatgctggataacctgcta

SEQ ID NO: 67531 - DNA, 33 bp, Homo sapien
agcaaatgcgggctataagatatttgaaagaaa

SEQ ID NO: 67532 - DNA, 33 bp, Homo sapien
agcaaatgcgggctatgagatatttgaaagaaa

SEQ ID NO: 67533 - DNA, 33 bp, Homo sapien
tctcttaaatagcagactctgagctatgtttgt

SEQ ID NO: 67534 - DNA, 33 bp, Homo sapien
tctcttaaatagcagagtctgagctatgtttgt

SEQ ID NO: 67535 - DNA, 33 bp, Homo sapien
ggagttgaccgtgaaccctgaatgccagttggc

SEQ ID NO: 67536 - DNA, 33 bp, Homo sapien
ggagttgaccgtgaactctgaatgccagttggc

SEQ ID NO: 67537 - DNA, 33 bp, Homo sapien
tgtcaagcccaggcaaagactcaggtggttaac

SEQ ID NO: 67538 - DNA, 33 bp, Homo sapien
tgtcaagcccaggcaaggactcaggtggttaac

SEQ ID NO: 67539 - DNA, 33 bp, Homo sapien
acccaaacccgatgacagagagggaacaatctc

SEQ ID NO: 67540 - DNA, 33 bp, Homo sapien
acccaaacccgatgacggagagggaacaatctc

SEQ ID NO: 67541 - DNA, 33 bp, Homo sapien
tacgggactgagcatccagtcacgggtgagttt

SEQ ID NO: 67542 - DNA, 33 bp, Homo sapien
tacgggactgagcatctagtcacgggtgagttt

SEQ ID NO: 67543 - DNA, 33 bp, Homo sapien
atcccagggctggtacactgagccacgagaatg

SEQ ID NO: 67544 - DNA, 33 bp, Homo sapien
atcccagggctggtacgctgagccacgagaatg

SEQ ID NO: 67545 - DNA, 33 bp, Homo sapien
atcaggatgatgacccagaagcactaaaaagtt

SEQ ID NO: 67546 - DNA, 33 bp, Homo sapien
atcaggatgatgacccggaagcactaaaaagtt

SEQ ID NO: 67547 - DNA, 33 bp, Homo sapien
tgtttaaacagtctggccaccaatatgaaattg

SEQ ID NO: 67548 - DNA, 33 bp, Homo sapien
tgtttaaacagtctggtcaccaatatgaaattg

SEQ ID NO: 67549 - DNA, 33 bp, Homo sapien
tcatattaagtgagggaccaagaaagtgattcc

SEQ ID NO: 67550 - DNA, 33 bp, Homo sapien
tcatattaagtgaggggccaagaaagtgattcc

SEQ ID NO: 67551 - DNA, 33 bp, Homo sapien
ccctcagtggtccagacaccagaagaatcctgt

SEQ ID NO: 67552 - DNA, 33 bp, Homo sapien
ccctcagtggtccagataccagaagaatcctgt

SEQ ID NO: 67553 - DNA, 33 bp, Homo sapien
gttatctttaagagccacgagtcttgatgagat

SEQ ID NO: 67554 - DNA, 33 bp, Homo sapien
gttatctttaagagccgcgagtcttgatgagat

SEQ ID NO: 67555 - DNA, 33 bp, Homo sapien
gggggagttcacaggagctctttaatggcatct

SEQ ID NO: 67556 - DNA, 33 bp, Homo sapien
gggggagttcacaggatctctttaatggcatct

SEQ ID NO: 67557 - DNA, 33 bp, Homo sapien
ttcctgcccaggatgaaggttctgaatagcccc

SEQ ID NO: 67558 - DNA, 33 bp, Homo sapien
ttcctgcccaggatgagggttctgaatagcccc

SEQ ID NO: 67559 - DNA, 33 bp, Homo sapien
cttcacactagacatactataacctacttcctt

SEQ ID NO: 67560 - DNA, 33 bp, Homo sapien
cttcacactagacatattataacctacttcctt

SEQ ID NO: 67561 - DNA, 33 bp, Homo sapien
ccctctcctgaagttcgctttcctcaccacagt

SEQ ID NO: 67562 - DNA, 33 bp, Homo sapien
ccctctcctgaagttctctttcctcaccacagt

SEQ ID NO: 67563 - DNA, 33 bp, Homo sapien
aggcttccaatggtgccacctttcattactctc

SEQ ID NO: 67564 - DNA, 33 bp, Homo sapien
aggcttccaatggtgctacctttcattactctc

SEQ ID NO: 67565 - DNA, 33 bp, Homo sapien
tgtgtcctttttgagacacaaggtagataatca

SEQ ID NO: 67566 - DNA, 33 bp, Homo sapien
tgtgtcctttttgagatacaaggtagataatca

SEQ ID NO: 67567 - DNA, 33 bp, Homo sapien
gattgcagcctagtcaaaggaacttctagagtt

SEQ ID NO: 67568 - DNA, 33 bp, Homo sapien
gattgcagcctagtcagaggaacttctagagtt

SEQ ID NO: 67569 - DNA, 33 bp, Homo sapien
ctgttagcttaaattcaaccatctcctcaaaag

SEQ ID NO: 67570 - DNA, 33 bp, Homo sapien
ctgttagcttaaattccaccatctcctcaaaag

SEQ ID NO: 67571 - DNA, 33 bp, Homo sapien
gtttcaagtaaaggaacgacatgatcagatttg

SEQ ID NO: 67572 - DNA, 33 bp, Homo sapien
gtttcaagtaaaggaatgacatgatcagatttg

SEQ ID NO: 67573 - DNA, 33 bp, Homo sapien
ctttccctgacagcaaaaaaattctcacacttc

SEQ ID NO: 67574 - DNA, 33 bp, Homo sapien
ctttccctgacagcaacaaaattctcacacttc

SEQ ID NO: 67575 - DNA, 33 bp, Homo sapien
tcatgagagaaagtcaagtaaacaaaagcgaca

SEQ ID NO: 67576 - DNA, 33 bp, Homo sapien
tcatgagagaaagtcaggtaaacaaaagcgaca

SEQ ID NO: 67577 - DNA, 33 bp, Homo sapien
cagggccagtactttacgcctcttgtacctttg

SEQ ID NO: 67578 - DNA, 33 bp, Homo sapien
cagggccagtactttatgcctcttgtacctttg

SEQ ID NO: 67579 - DNA, 33 bp, Homo sapien
gcaggcaggtcctgggaaaaatgccacaacccc

SEQ ID NO: 67580 - DNA, 33 bp, Homo sapien
gcaggcaggtcctggggaaaatgccacaacccc

SEQ ID NO: 67581 - DNA, 33 bp, Homo sapien
ctactaacccatgtaactgtatacacgaaaata

SEQ ID NO: 67582 - DNA, 33 bp, Homo sapien
ctactaacccatgtaattgtatacacgaaaata

SEQ ID NO: 67583 - DNA, 33 bp, Homo sapien
ttgggagaggaggccgaaactgttgcccagacg

SEQ ID NO: 67584 - DNA, 33 bp, Homo sapien
ttgggagaggaggccggaactgttgcccagacg

SEQ ID NO: 67585 - DNA, 33 bp, Homo sapien
tgagccactggagatcaagtgcagcaaaaggtg

SEQ ID NO: 67586 - DNA, 33 bp, Homo sapien
tgagccactggagatcgagtgcagcaaaaggtg

SEQ ID NO: 67587 - DNA, 33 bp, Homo sapien
aatcatcaaactaagaaaggacttactctagga

SEQ ID NO: 67588 - DNA, 33 bp, Homo sapien
aatcatcaaactaagagaggacttactctagga

SEQ ID NO: 67589 - DNA, 33 bp, Homo sapien
ccaggatccctgggccagattattcgtgattac

SEQ ID NO: 67590 - DNA, 33 bp, Homo sapien
ccaggatccctgggccggattattcgtgattac

SEQ ID NO: 67591 - DNA, 33 bp, Homo sapien
tgctcagaggctatcccggagtctccagcccct

SEQ ID NO: 67592 - DNA, 33 bp, Homo sapien
tgctcagaggctatcctggagtctccagcccct

SEQ ID NO: 67593 - DNA, 33 bp, Homo sapien
tgatttcccctgaccagatacgctgctgaccct

SEQ ID NO: 67594 - DNA, 33 bp, Homo sapien
tgatttcccctgaccatatacgctgctgaccct

SEQ ID NO: 67595 - DNA, 33 bp, Homo sapien
cctcatatccacttcccattgacaggcagggtg

SEQ ID NO: 67596 - DNA, 33 bp, Homo sapien
cctcatatccacttccgattgacaggcagggtg

SEQ ID NO: 67597 - DNA, 33 bp, Homo sapien
tcccagcaaatggaccaagcatagaacaggatc

SEQ ID NO: 67598 - DNA, 33 bp, Homo sapien
tcccagcaaatggaccgagcatagaacaggatc

SEQ ID NO: 67599 - DNA, 33 bp, Homo sapien
aagagatgcggcagacaagggagctgaggttct

SEQ ID NO: 67600 - DNA, 33 bp, Homo sapien
aagagatgcggcagacgagggagctgaggttct

SEQ ID NO: 67601 - DNA, 33 bp, Homo sapien
gcgagacccagtgaaaactcatgaaggctgggg

SEQ ID NO: 67602 - DNA, 33 bp, Homo sapien
gcgagacccagtgaaagctcatgaaggctgggg

SEQ ID NO: 67603 - DNA, 33 bp, Homo sapien
cactcactggacagtaactctctgggtgaggca

SEQ ID NO: 67604 - DNA, 33 bp, Homo sapien
cactcactggacagtacctctctgggtgaggca

SEQ ID NO: 67605 - DNA, 33 bp, Homo sapien
aggggactactttgcaatacaaataagcatttt

SEQ ID NO: 67606 - DNA, 33 bp, Homo sapien
aggggactactttgcagtacaaataagcatttt

SEQ ID NO: 67607 - DNA, 33 bp, Homo sapien
ggcctcagaacctggacactagatcatgagcac

SEQ ID NO: 67608 - DNA, 33 bp, Homo sapien
ggcctcagaacctggagactagatcatgagcac

SEQ ID NO: 67609 - DNA, 33 bp, Homo sapien
cgggacaacttgctgacacattcaggagatagc

SEQ ID NO: 67610 - DNA, 33 bp, Homo sapien
cgggacaacttgctgagacattcaggagatagc

SEQ ID NO: 67611 - DNA, 33 bp, Homo sapien
cagacagctaagctcaaattccttgccaatgag

SEQ ID NO: 67612 - DNA, 33 bp, Homo sapien
cagacagctaagctcagattccttgccaatgag

SEQ ID NO: 67613 - DNA, 33 bp, Homo sapien
cagacattctaagcgccgagtctgacatttcct

SEQ ID NO: 67614 - DNA, 33 bp, Homo sapien
cagacattctaagcgctgagtctgacatttcct

SEQ ID NO: 67615 - DNA, 33 bp, Homo sapien
tggtgttgctttactaactatcgttgttaataa

SEQ ID NO: 67616 - DNA, 33 bp, Homo sapien
tggtgttgctttactatctatcgttgttaataa

SEQ ID NO: 67617 - DNA, 33 bp, Homo sapien
aaggtcacttagagcactgaatgatatactgta

SEQ ID NO: 67618 - DNA, 33 bp, Homo sapien
aaggtcacttagagcattgaatgatatactgta

SEQ ID NO: 67619 - DNA, 33 bp, Homo sapien
ttctgccatctttccacgtgtgaagtagcttgg

SEQ ID NO: 67620 - DNA, 33 bp, Homo sapien
ttctgccatctttccatgtgtgaagtagcttgg

SEQ ID NO: 67621 - DNA, 33 bp, Homo sapien
ttggtggatgctcctacaggtagccaaacacat

SEQ ID NO: 67622 - DNA, 33 bp, Homo sapien
ttggtggatgctcctataggtagccaaacacat

SEQ ID NO: 67623 - DNA, 33 bp, Homo sapien
gcccatcctttgcacacaatatggaaatatagg

SEQ ID NO: 67624 - DNA, 33 bp, Homo sapien
gcccatcctttgcacagaatatggaaatatagg

SEQ ID NO: 67625 - DNA, 33 bp, Homo sapien
gaaattttgctactggaatcctaggaaagcttt

SEQ ID NO: 67626 - DNA, 33 bp, Homo sapien
gaaattttgctactggtatcctaggaaagcttt

SEQ ID NO: 67627 - DNA, 33 bp, Homo sapien
tgcaagttatctaataccacaaaagtgaggacc

SEQ ID NO: 67628 - DNA, 33 bp, Homo sapien
tgcaagttatctaatatcacaaaagtgaggacc

SEQ ID NO: 67629 - DNA, 33 bp, Homo sapien
attaaaaagcaactacaggaaggataaaaatat

SEQ ID NO: 67630 - DNA, 33 bp, Homo sapien
attaaaaagcaactacgggaaggataaaaatat

SEQ ID NO: 67631 - DNA, 33 bp, Homo sapien
ataaaaatatcaacaccagaggtcagaaatctg

SEQ ID NO: 67632 - DNA, 33 bp, Homo sapien
ataaaaatatcaacacgagaggtcagaaatctg

SEQ ID NO: 67633 - DNA, 33 bp, Homo sapien
ttttctgtaaagtaaccgcctgataacctccag

SEQ ID NO: 67634 - DNA, 33 bp, Homo sapien
ttttctgtaaagtaactgcctgataacctccag

SEQ ID NO: 67635 - DNA, 33 bp, Homo sapien
cggcaggaaatgttataaactcgaaaaccagat

SEQ ID NO: 67636 - DNA, 33 bp, Homo sapien
cggcaggaaatgttatgaactcgaaaaccagat

SEQ ID NO: 67637 - DNA, 33 bp, Homo sapien
ttttattatcttaacacagacaggcctaacata

SEQ ID NO: 67638 - DNA, 33 bp, Homo sapien
ttttattatcttaacatagacaggcctaacata

SEQ ID NO: 67639 - DNA, 33 bp, Homo sapien
tccaattctttttcacagtctttttcacagcgt

SEQ ID NO: 67640 - DNA, 33 bp, Homo sapien
tccaattctttttcactgtctttttcacagcgt

SEQ ID NO: 67641 - DNA, 33 bp, Homo sapien
aacatcaaaaactgtaaaatggctatatcctga

SEQ ID NO: 67642 - DNA, 33 bp, Homo sapien
aacatcaaaaactgtagaatggctatatcctga

SEQ ID NO: 67643 - DNA, 33 bp, Homo sapien
acacagtagtaacctacggatgggagaaaggca

SEQ ID NO: 67644 - DNA, 33 bp, Homo sapien
acacagtagtaacctagggatgggagaaaggca

SEQ ID NO: 67645 - DNA, 33 bp, Homo sapien
gaactggcatatgggaaaatcacacaggggctt

SEQ ID NO: 67646 - DNA, 33 bp, Homo sapien
gaactggcatatgggagaatcacacaggggctt

SEQ ID NO: 67647 - DNA, 33 bp, Homo sapien
tagtaactccagccacacttcatagttaaatat

SEQ ID NO: 67648 - DNA, 33 bp, Homo sapien
tagtaactccagccacgcttcatagttaaatat

SEQ ID NO: 67649 - DNA, 33 bp, Homo sapien
cccctgtgttcagccccagagtttgtaaaacag

SEQ ID NO: 67650 - DNA, 33 bp, Homo sapien
cccctgtgttcagcccgagagtttgtaaaacag

SEQ ID NO: 67651 - DNA, 33 bp, Homo sapien
ccttaagcaataacaaagctcagactcctcaaa

SEQ ID NO: 67652 - DNA, 33 bp, Homo sapien
ccttaagcaataacaaggctcagactcctcaaa

SEQ ID NO: 67653 - DNA, 33 bp, Homo sapien
atttggtaactcaacaccccatccaagtagtct

SEQ ID NO: 67654 - DNA, 33 bp, Homo sapien
atttggtaactcaacatcccatccaagtagtct

SEQ ID NO: 67655 - DNA, 33 bp, Homo sapien
aacataagctaaaaccacatatggtagataatt

SEQ ID NO: 67656 - DNA, 33 bp, Homo sapien
aacataagctaaaaccgcatatggtagataatt

SEQ ID NO: 67657 - DNA, 33 bp, Homo sapien
tgtataacagtttataagcattaccaatgatcc

SEQ ID NO: 67658 - DNA, 33 bp, Homo sapien
tgtataacagtttatacgcattaccaatgatcc

SEQ ID NO: 67659 - DNA, 33 bp, Homo sapien
tcttgtaacctagctgcatttgtgatagggcct

SEQ ID NO: 67660 - DNA, 33 bp, Homo sapien
tcttgtaacctagctggatttgtgatagggcct

SEQ ID NO: 67661 - DNA, 33 bp, Homo sapien
tctgtcccacattccagctttctgttcctctca

SEQ ID NO: 67662 - DNA, 33 bp, Homo sapien
tctgtcccacattccatctttctgttcctctca

SEQ ID NO: 67663 - DNA, 33 bp, Homo sapien
gtgactgtgtgtgtcaatgaaagtcctccatat

SEQ ID NO: 67664 - DNA, 33 bp, Homo sapien
gtgactgtgtgtgtcagtgaaagtcctccatat

SEQ ID NO: 67665 - DNA, 33 bp, Homo sapien
aatttacttcagccaaacagctactttctaaac

SEQ ID NO: 67666 - DNA, 33 bp, Homo sapien
aatttacttcagccaagcagctactttctaaac

SEQ ID NO: 67667 - DNA, 33 bp, Homo sapien
tatgtgatgtcttcacaaatggcttagggaggg

SEQ ID NO: 67668 - DNA, 33 bp, Homo sapien
tatgtgatgtcttcacgaatggcttagggaggg

SEQ ID NO: 67669 - DNA, 33 bp, Homo sapien
aagaaaccaaaggtgcaagtgtttattgagagc

SEQ ID NO: 67670 - DNA, 33 bp, Homo sapien
aagaaaccaaaggtgccagtgtttattgagagc

SEQ ID NO: 67671 - DNA, 33 bp, Homo sapien
ttgggtcagagaatgcgcaaaaggttggacctt

SEQ ID NO: 67672 - DNA, 33 bp, Homo sapien
ttgggtcagagaatgctcaaaaggttggacctt

SEQ ID NO: 67673 - DNA, 33 bp, Homo sapien
caggaaatctatgcaactgaaggggaaatggca

SEQ ID NO: 67674 - DNA, 33 bp, Homo sapien
caggaaatctatgcaattgaaggggaaatggca

SEQ ID NO: 67675 - DNA, 33 bp, Homo sapien
caccagatttatccaaaaagatttcttctctgc

SEQ ID NO: 67676 - DNA, 33 bp, Homo sapien
caccagatttatccaacaagatttcttctctgc

SEQ ID NO: 67677 - DNA, 33 bp, Homo sapien
cagatccagggaagaacgtgctgggtagccggg

SEQ ID NO: 67678 - DNA, 33 bp, Homo sapien
cagatccagggaagaatgtgctgggtagccggg

SEQ ID NO: 67679 - DNA, 33 bp, Homo sapien
gggctttctctgtataccccacagagcagaggg

SEQ ID NO: 67680 - DNA, 33 bp, Homo sapien
gggctttctctgtatatcccacagagcagaggg

SEQ ID NO: 67681 - DNA, 33 bp, Homo sapien
gcataccatgagctgacgtgactaaacgagaaa

SEQ ID NO: 67682 - DNA, 33 bp, Homo sapien
gcataccatgagctgaggtgactaaacgagaaa

SEQ ID NO: 67683 - DNA, 33 bp, Homo sapien
tattcactttcagatcaagccagaaggtgcatc

SEQ ID NO: 67684 - DNA, 33 bp, Homo sapien
tattcactttcagatccagccagaaggtgcatc

SEQ ID NO: 67685 - DNA, 33 bp, Homo sapien
gatccacagcttaagacacctttggctgggaga

SEQ ID NO: 67686 - DNA, 33 bp, Homo sapien
gatccacagcttaagatacctttggctgggaga

SEQ ID NO: 67687 - DNA, 33 bp, Homo sapien
ctccctccgccaggtacgagcggctggaggagc

SEQ ID NO: 67688 - DNA, 33 bp, Homo sapien
ctccctccgccaggtatgagcggctggaggagc

SEQ ID NO: 67689 - DNA, 33 bp, Homo sapien
agcctggaaactccaaatactcatttgcgaagc

SEQ ID NO: 67690 - DNA, 33 bp, Homo sapien
agcctggaaactccaattactcatttgcgaagc

SEQ ID NO: 67691 - DNA, 33 bp, Homo sapien
gcctgtgtttgccttaccatgacaacgtgtcta

SEQ ID NO: 67692 - DNA, 33 bp, Homo sapien
gcctgtgtttgccttatcatgacaacgtgtcta

SEQ ID NO: 67693 - DNA, 33 bp, Homo sapien
cttgggtcaaataggccgaatccagtcctctct

SEQ ID NO: 67694 - DNA, 33 bp, Homo sapien
cttgggtcaaataggctgaatccagtcctctct

SEQ ID NO: 67695 - DNA, 33 bp, Homo sapien
gaagttcagtgggaagactccttgaagagcatg

SEQ ID NO: 67696 - DNA, 33 bp, Homo sapien
gaagttcagtgggaagtctccttgaagagcatg

SEQ ID NO: 67697 - DNA, 33 bp, Homo sapien
atggtggccgggctcacctgaagacctgtttgc

SEQ ID NO: 67698 - DNA, 33 bp, Homo sapien
atggtggccgggctcatctgaagacctgtttgc

SEQ ID NO: 67699 - DNA, 33 bp, Homo sapien
cttccccagaggtctcaacattggacatacggt

SEQ ID NO: 67700 - DNA, 33 bp, Homo sapien
cttccccagaggtctcgacattggacatacggt

SEQ ID NO: 67701 - DNA, 33 bp, Homo sapien
tgcagaaggggtctgaaatgttgtcaatcgcat

SEQ ID NO: 67702 - DNA, 33 bp, Homo sapien
tgcagaaggggtctgagatgttgtcaatcgcat

SEQ ID NO: 67703 - DNA, 33 bp, Homo sapien
accttcagattcaacaaacataagaacatcata

SEQ ID NO: 67704 - DNA, 33 bp, Homo sapien
accttcagattcaacagacataagaacatcata

SEQ ID NO: 67705 - DNA, 33 bp, Homo sapien
gccacacaactggtaacaaagtggcgggattta

SEQ ID NO: 67706 - DNA, 33 bp, Homo sapien
gccacacaactggtaataaagtggcgggattta

SEQ ID NO: 67707 - DNA, 33 bp, Homo sapien
ccaaatttgggagcgacacattggtttcctgtg

SEQ ID NO: 67708 - DNA, 33 bp, Homo sapien
ccaaatttgggagcgatacattggtttcctgtg

SEQ ID NO: 67709 - DNA, 33 bp, Homo sapien
tcatccagatgattagaattctcaaaaggaagt

SEQ ID NO: 67710 - DNA, 33 bp, Homo sapien
tcatccagatgattaggattctcaaaaggaagt

SEQ ID NO: 67711 - DNA, 33 bp, Homo sapien
tacagatgagcttaacacttcttttaaggctta

SEQ ID NO: 67712 - DNA, 33 bp, Homo sapien
tacagatgagcttaacgcttcttttaaggctta

SEQ ID NO: 67713 - DNA, 33 bp, Homo sapien
aatgatctaagctgctaaaactcatatctcaaa

SEQ ID NO: 67714 - DNA, 33 bp, Homo sapien
aatgatctaagctgctgaaactcatatctcaaa

SEQ ID NO: 67715 - DNA, 33 bp, Homo sapien
agctctacggtaagggcaatagcaagggaggtc

SEQ ID NO: 67716 - DNA, 33 bp, Homo sapien
agctctacggtaaggggaatagcaagggaggtc

SEQ ID NO: 67717 - DNA, 33 bp, Homo sapien
tttgggccacaatctgcatttggtgggagtggt

SEQ ID NO: 67718 - DNA, 33 bp, Homo sapien
tttgggccacaatctgtatttggtgggagtggt

SEQ ID NO: 67719 - DNA, 33 bp, Homo sapien
caaagagttagttaaaacactggcccaaggtga

SEQ ID NO: 67720 - DNA, 33 bp, Homo sapien
caaagagttagttaaaccactggcccaaggtga

SEQ ID NO: 67721 - DNA, 33 bp, Homo sapien
cagatggaaaccaacacgcatttgctgtgggct

SEQ ID NO: 67722 - DNA, 33 bp, Homo sapien
cagatggaaaccaacaggcatttgctgtgggct

SEQ ID NO: 67723 - DNA, 33 bp, Homo sapien
caccctgccgccgcccccgaaatagacacatcc

SEQ ID NO: 67724 - DNA, 33 bp, Homo sapien
caccctgccgccgccctcgaaatagacacatcc

SEQ ID NO: 67725 - DNA, 33 bp, Homo sapien
tttgaaattgatcggtaaagatacaatataatt

SEQ ID NO: 67726 - DNA, 33 bp, Homo sapien
tttgaaattgatcggtcaagatacaatataatt

SEQ ID NO: 67727 - DNA, 33 bp, Homo sapien
gatttgacatgaggaaaaactttctgaccagga

SEQ ID NO: 67728 - DNA, 33 bp, Homo sapien
gatttgacatgaggaagaactttctgaccagga

SEQ ID NO: 67729 - DNA, 33 bp, Homo sapien
aagagaaacaccggctcaatgttacgcaagatt

SEQ ID NO: 67730 - DNA, 33 bp, Homo sapien
aagagaaacaccggcttaatgttacgcaagatt

SEQ ID NO: 67731 - DNA, 33 bp, Homo sapien
caggactagagaggaacaaaggacacactggat

SEQ ID NO: 67732 - DNA, 33 bp, Homo sapien
caggactagagaggaagaaaggacacactggat

SEQ ID NO: 67733 - DNA, 33 bp, Homo sapien
tccttgccaactcttaagtgtttttgaagttat

SEQ ID NO: 67734 - DNA, 33 bp, Homo sapien
tccttgccaactcttacgtgtttttgaagttat

SEQ ID NO: 67735 - DNA, 33 bp, Homo sapien
cttcctgaaatttatacctttctttgaggacat

SEQ ID NO: 67736 - DNA, 33 bp, Homo sapien
cttcctgaaatttatagctttctttgaggacat

SEQ ID NO: 67737 - DNA, 33 bp, Homo sapien
acaaactgtgggcaaacaaaatacatctgcagg

SEQ ID NO: 67738 - DNA, 33 bp, Homo sapien
acaaactgtgggcaaataaaatacatctgcagg

SEQ ID NO: 67739 - DNA, 33 bp, Homo sapien
aaaaataaaacacctcactggcaaggagtttgc

SEQ ID NO: 67740 - DNA, 33 bp, Homo sapien
aaaaataaaacacctcgctggcaaggagtttgc

SEQ ID NO: 67741 - DNA, 33 bp, Homo sapien
gatttgagtatgaaaaaagtgatgtcagtggat

SEQ ID NO: 67742 - DNA, 33 bp, Homo sapien
gatttgagtatgaaaatagtgatgtcagtggat

SEQ ID NO: 67743 - DNA, 33 bp, Homo sapien
ccttagcatctgtagaacactctgcctgaatca

SEQ ID NO: 67744 - DNA, 33 bp, Homo sapien
ccttagcatctgtagagcactctgcctgaatca

SEQ ID NO: 67745 - DNA, 33 bp, Homo sapien
actgaggcaaagcagaagttgagtcctcaaagg

SEQ ID NO: 67746 - DNA, 33 bp, Homo sapien
actgaggcaaagcagaggttgagtcctcaaagg

SEQ ID NO: 67747 - DNA, 33 bp, Homo sapien
catagagaaaacagaaaaccacaaagagggaag

SEQ ID NO: 67748 - DNA, 33 bp, Homo sapien
catagagaaaacagaagaccacaaagagggaag

SEQ ID NO: 67749 - DNA, 33 bp, Homo sapien
aaacatgtaatgcaaacatttaccaacatccaa

SEQ ID NO: 67750 - DNA, 33 bp, Homo sapien
aaacatgtaatgcaaatatttaccaacatccaa

SEQ ID NO: 67751 - DNA, 33 bp, Homo sapien
tctatatcatgctaaactcctgcactgaggttc

SEQ ID NO: 67752 - DNA, 33 bp, Homo sapien
tctatatcatgctaaattcctgcactgaggttc

SEQ ID NO: 67753 - DNA, 33 bp, Homo sapien
gaggtaggtgttatcacgaccattttacagatg

SEQ ID NO: 67754 - DNA, 33 bp, Homo sapien
gaggtaggtgttatcatgaccattttacagatg

SEQ ID NO: 67755 - DNA, 33 bp, Homo sapien
tcctcagatgtccatcactatccctgttgctct

SEQ ID NO: 67756 - DNA, 33 bp, Homo sapien
tcctcagatgtccatctctatccctgttgctct

SEQ ID NO: 67757 - DNA, 33 bp, Homo sapien
ctatgtggcaggaatgcagtagaaatatggaga

SEQ ID NO: 67758 - DNA, 33 bp, Homo sapien
ctatgtggcaggaatgtagtagaaatatggaga

SEQ ID NO: 67759 - DNA, 33 bp, Homo sapien
cagtgttgggtttggacgcccagcagcaaagtg

SEQ ID NO: 67760 - DNA, 33 bp, Homo sapien
cagtgttgggtttggatgcccagcagcaaagtg

SEQ ID NO: 67761 - DNA, 33 bp, Homo sapien
ccacccaactactacaaggtcgaggtaggattc

SEQ ID NO: 67762 - DNA, 33 bp, Homo sapien
ccacccaactactacagggtcgaggtaggattc

SEQ ID NO: 67763 - DNA, 33 bp, Homo sapien
tgcaggaaacagaaaacctctctacctaacagg

SEQ ID NO: 67764 - DNA, 33 bp, Homo sapien
tgcaggaaacagaaaagctctctacctaacagg

SEQ ID NO: 67765 - DNA, 33 bp, Homo sapien
ggactgatggagcaacgcagggatgtcacatag

SEQ ID NO: 67766 - DNA, 33 bp, Homo sapien
ggactgatggagcaactcagggatgtcacatag

SEQ ID NO: 67767 - DNA, 33 bp, Homo sapien
tcggtggtcggaaaagactttgtggctgaggag

SEQ ID NO: 67768 - DNA, 33 bp, Homo sapien
tcggtggtcggaaaagtctttgtggctgaggag

SEQ ID NO: 67769 - DNA, 33 bp, Homo sapien
tctagctgttgcttataagaaatcagagtgagc

SEQ ID NO: 67770 - DNA, 33 bp, Homo sapien
tctagctgttgcttatgagaaatcagagtgagc

SEQ ID NO: 67771 - DNA, 33 bp, Homo sapien
gaaacccagaccaccaacttgagaggacaagga

SEQ ID NO: 67772 - DNA, 33 bp, Homo sapien
gaaacccagaccaccagcttgagaggacaagga

SEQ ID NO: 67773 - DNA, 33 bp, Homo sapien
actgaacctgatccaaaatttactcctggaaag

SEQ ID NO: 67774 - DNA, 33 bp, Homo sapien
actgaacctgatccaatatttactcctggaaag

SEQ ID NO: 67775 - DNA, 33 bp, Homo sapien
tgagtggctgtttagaacagggtcctgagctac

SEQ ID NO: 67776 - DNA, 33 bp, Homo sapien
tgagtggctgtttagagcagggtcctgagctac

SEQ ID NO: 67777 - DNA, 33 bp, Homo sapien
cttgtgctcattcacaaactcccttatggcata

SEQ ID NO: 67778 - DNA, 33 bp, Homo sapien
cttgtgctcattcacagactcccttatggcata

SEQ ID NO: 67779 - DNA, 33 bp, Homo sapien
agggagtccatgatacccagtcatacacatcag

SEQ ID NO: 67780 - DNA, 33 bp, Homo sapien
agggagtccatgatacgcagtcatacacatcag

SEQ ID NO: 67781 - DNA, 33 bp, Homo sapien
tgggcacataagatgaatataacccagtccctg

SEQ ID NO: 67782 - DNA, 33 bp, Homo sapien
tgggcacataagatgagtataacccagtccctg

SEQ ID NO: 67783 - DNA, 33 bp, Homo sapien
taattccaaaaggacaagttgaattatccttcg

SEQ ID NO: 67784 - DNA, 33 bp, Homo sapien
taattccaaaaggacacgttgaattatccttcg

SEQ ID NO: 67785 - DNA, 33 bp, Homo sapien
accagatctgaggagcaaataggttcttggtct

SEQ ID NO: 67786 - DNA, 33 bp, Homo sapien
accagatctgaggagctaataggttcttggtct

SEQ ID NO: 67787 - DNA, 33 bp, Homo sapien
accgggaagagtcaagccgggctctgccctaca

SEQ ID NO: 67788 - DNA, 33 bp, Homo sapien
accgggaagagtcaagtcgggctctgccctaca

SEQ ID NO: 67789 - DNA, 33 bp, Homo sapien
tctgtgtaaacatcagcatcgtataaggaagaa

SEQ ID NO: 67790 - DNA, 33 bp, Homo sapien
tctgtgtaaacatcagtatcgtataaggaagaa

SEQ ID NO: 67791 - DNA, 33 bp, Homo sapien
gcaagtcatctgggcaactgtttacaatctctg

SEQ ID NO: 67792 - DNA, 33 bp, Homo sapien
gcaagtcatctgggcagctgtttacaatctctg

SEQ ID NO: 67793 - DNA, 33 bp, Homo sapien
ttcatgtttgtattcactcatattttcattcac

SEQ ID NO: 67794 - DNA, 33 bp, Homo sapien
ttcatgtttgtattcattcatattttcattcac

SEQ ID NO: 67795 - DNA, 33 bp, Homo sapien
ccagaaaggagacaccaccatgaagagaggact

SEQ ID NO: 67796 - DNA, 33 bp, Homo sapien
ccagaaaggagacaccgccatgaagagaggact

SEQ ID NO: 67797 - DNA, 33 bp, Homo sapien
gctcttcctttgtgcccatgtagccaactgttt

SEQ ID NO: 67798 - DNA, 33 bp, Homo sapien
gctcttcctttgtgcctatgtagccaactgttt

SEQ ID NO: 67799 - DNA, 33 bp, Homo sapien
gtgagatgacccggaaacatcttagagttagac

SEQ ID NO: 67800 - DNA, 33 bp, Homo sapien
gtgagatgacccggaagcatcttagagttagac

SEQ ID NO: 67801 - DNA, 33 bp, Homo sapien
aatgtggaagagtcacagatggaagtgtcccta

SEQ ID NO: 67802 - DNA, 33 bp, Homo sapien
aatgtggaagagtcacggatggaagtgtcccta

SEQ ID NO: 67803 - DNA, 33 bp, Homo sapien
gctttctttcccaagcacttaggctcctgggac

SEQ ID NO: 67804 - DNA, 33 bp, Homo sapien
gctttctttcccaagcgcttaggctcctgggac

SEQ ID NO: 67805 - DNA, 33 bp, Homo sapien
gaacacgggcctttgaacttcagccaggcctgc

SEQ ID NO: 67806 - DNA, 33 bp, Homo sapien
gaacacgggcctttgaccttcagccaggcctgc

SEQ ID NO: 67807 - DNA, 33 bp, Homo sapien
accagctgtggaacccagaagtagctgattgct

SEQ ID NO: 67808 - DNA, 33 bp, Homo sapien
accagctgtggaacccggaagtagctgattgct

SEQ ID NO: 67809 - DNA, 33 bp, Homo sapien
agttggtgtacagggaaagtcagggcagttaga

SEQ ID NO: 67810 - DNA, 33 bp, Homo sapien
agttggtgtacagggagagtcagggcagttaga

SEQ ID NO: 67811 - DNA, 33 bp, Homo sapien
gatggagcagggaggacgttccaggcagagggt

SEQ ID NO: 67812 - DNA, 33 bp, Homo sapien
gatggagcagggaggatgttccaggcagagggt

SEQ ID NO: 67813 - DNA, 33 bp, Homo sapien
cattgaaatgatgtgacatctgggacttgcttt

SEQ ID NO: 67814 - DNA, 33 bp, Homo sapien
cattgaaatgatgtgatatctgggacttgcttt

SEQ ID NO: 67815 - DNA, 33 bp, Homo sapien
tctggaaccttctgacaatctctatcatcactg

SEQ ID NO: 67816 - DNA, 33 bp, Homo sapien
tctggaaccttctgacgatctctatcatcactg

SEQ ID NO: 67817 - DNA, 33 bp, Homo sapien
tccgatacaccttccacgtgaagttttaattgt

SEQ ID NO: 67818 - DNA, 33 bp, Homo sapien
tccgatacaccttccatgtgaagttttaattgt

SEQ ID NO: 67819 - DNA, 33 bp, Homo sapien
catcaggtaaggaaagaatctgtttctacacaa

SEQ ID NO: 67820 - DNA, 33 bp, Homo sapien
catcaggtaaggaaagtatctgtttctacacaa

SEQ ID NO: 67821 - DNA, 33 bp, Homo sapien
atatctacatatagcaatgatcatggagcttta

SEQ ID NO: 67822 - DNA, 33 bp, Homo sapien
atatctacatatagcagtgatcatggagcttta

SEQ ID NO: 67823 - DNA, 33 bp, Homo sapien
taagtaactgggtacaagatgaagccatttaac

SEQ ID NO: 67824 - DNA, 33 bp, Homo sapien
taagtaactgggtacatgatgaagccatttaac

SEQ ID NO: 67825 - DNA, 33 bp, Homo sapien
ctaaaaatcaaaaccacctgagaaaccacttca

SEQ ID NO: 67826 - DNA, 33 bp, Homo sapien
ctaaaaatcaaaaccatctgagaaaccacttca

SEQ ID NO: 67827 - DNA, 33 bp, Homo sapien
ccagagttcacagaagacaggataaaggttagg

SEQ ID NO: 67828 - DNA, 33 bp, Homo sapien
ccagagttcacagaagtcaggataaaggttagg

SEQ ID NO: 67829 - DNA, 33 bp, Homo sapien
tgtaggacactggaaacggatccagagttcaca

SEQ ID NO: 67830 - DNA, 33 bp, Homo sapien
tgtaggacactggaaatggatccagagttcaca

SEQ ID NO: 67831 - DNA, 33 bp, Homo sapien
caaagaattggctcacacttattgaaggctgac

SEQ ID NO: 67832 - DNA, 33 bp, Homo sapien
caaagaattggctcacgcttattgaaggctgac

SEQ ID NO: 67833 - DNA, 33 bp, Homo sapien
agtcttagccaaagccaaatagcagctgaacag

SEQ ID NO: 67834 - DNA, 33 bp, Homo sapien
agtcttagccaaagccgaatagcagctgaacag

SEQ ID NO: 67835 - DNA, 33 bp, Homo sapien
aaattgaaaagagcacagaaaaattcctttctc

SEQ ID NO: 67836 - DNA, 33 bp, Homo sapien
aaattgaaaagagcaccgaaaaattcctttctc

SEQ ID NO: 67837 - DNA, 33 bp, Homo sapien
aaagccttacaggccaatgagtttgaaacccta

SEQ ID NO: 67838 - DNA, 33 bp, Homo sapien
aaagccttacaggccactgagtttgaaacccta

SEQ ID NO: 67839 - DNA, 33 bp, Homo sapien
cagtgtctctccttcccgcaggcctggatggat

SEQ ID NO: 67840 - DNA, 33 bp, Homo sapien
cagtgtctctccttcctgcaggcctggatggat

SEQ ID NO: 67841 - DNA, 33 bp, Homo sapien
aaatgtgaggcgcttacggaagtgctttgaaaa

SEQ ID NO: 67842 - DNA, 33 bp, Homo sapien
aaatgtgaggcgcttatggaagtgctttgaaaa

SEQ ID NO: 67843 - DNA, 33 bp, Homo sapien
cataaattgcagaatcaattcccttcctgccca

SEQ ID NO: 67844 - DNA, 33 bp, Homo sapien
cataaattgcagaatcgattcccttcctgccca

SEQ ID NO: 67845 - DNA, 33 bp, Homo sapien
catgtgaacaagctacaatctatgtgcacacac

SEQ ID NO: 67846 - DNA, 33 bp, Homo sapien
catgtgaacaagctacgatctatgtgcacacac

SEQ ID NO: 67847 - DNA, 33 bp, Homo sapien
ggaatttaaatgcaaacgcaaaggctctgtcct

SEQ ID NO: 67848 - DNA, 33 bp, Homo sapien
ggaatttaaatgcaaatgcaaaggctctgtcct

SEQ ID NO: 67849 - DNA, 33 bp, Homo sapien
tgcacttaagggaagcaataagacctctaatat

SEQ ID NO: 67850 - DNA, 33 bp, Homo sapien
tgcacttaagggaagccataagacctctaatat

SEQ ID NO: 67851 - DNA, 33 bp, Homo sapien
gttaaacaactgaggccgaagttttaaaagagc

SEQ ID NO: 67852 - DNA, 33 bp, Homo sapien
gttaaacaactgaggctgaagttttaaaagagc

SEQ ID NO: 67853 - DNA, 33 bp, Homo sapien
cagaattaccatgatagaatgattaaagaattt

SEQ ID NO: 67854 - DNA, 33 bp, Homo sapien
cagaattaccatgatataatgattaaagaattt

SEQ ID NO: 67855 - DNA, 33 bp, Homo sapien
aagaatagtaaacatacctggaaagtaatgaga

SEQ ID NO: 67856 - DNA, 33 bp, Homo sapien
aagaatagtaaacatatctggaaagtaatgaga

SEQ ID NO: 67857 - DNA, 33 bp, Homo sapien
tggtaaactgaaggaacgggacttaagttcttt

SEQ ID NO: 67858 - DNA, 33 bp, Homo sapien
tggtaaactgaaggaatgggacttaagttcttt

SEQ ID NO: 67859 - DNA, 33 bp, Homo sapien
aaaagggatcacttgcaaaagtagtttgtagac

SEQ ID NO: 67860 - DNA, 33 bp, Homo sapien
aaaagggatcacttgcgaaagtagtttgtagac

SEQ ID NO: 67861 - DNA, 33 bp, Homo sapien
tggatgtccacaagctcaatttatttatgtcaa

SEQ ID NO: 67862 - DNA, 33 bp, Homo sapien
tggatgtccacaagcttaatttatttatgtcaa

SEQ ID NO: 67863 - DNA, 33 bp, Homo sapien
agttataagatgaacaagttttggagacctaat

SEQ ID NO: 67864 - DNA, 33 bp, Homo sapien
agttataagatgaacaggttttggagacctaat

SEQ ID NO: 67865 - DNA, 33 bp, Homo sapien
cttatgccttctatgacgctgttctttctttgt

SEQ ID NO: 67866 - DNA, 33 bp, Homo sapien
cttatgccttctatgatgctgttctttctttgt

SEQ ID NO: 67867 - DNA, 33 bp, Homo sapien
tggcaaatgttctgcaaccagtatctgctcaat

SEQ ID NO: 67868 - DNA, 33 bp, Homo sapien
tggcaaatgttctgcacccagtatctgctcaat

SEQ ID NO: 67869 - DNA, 33 bp, Homo sapien
ggaagccagagatgacgcttcacattctccctt

SEQ ID NO: 67870 - DNA, 33 bp, Homo sapien
ggaagccagagatgactcttcacattctccctt

SEQ ID NO: 67871 - DNA, 33 bp, Homo sapien
aggggatcaagtgtcacgctctggccctccaca

SEQ ID NO: 67872 - DNA, 33 bp, Homo sapien
aggggatcaagtgtcatgctctggccctccaca

SEQ ID NO: 67873 - DNA, 33 bp, Homo sapien
gtatctgttcaggcccagaatcgtcacggctca

SEQ ID NO: 67874 - DNA, 33 bp, Homo sapien
gtatctgttcaggcccggaatcgtcacggctca

SEQ ID NO: 67875 - DNA, 33 bp, Homo sapien
ctgaggacttgcaaaaaggtttaggattgtgtc

SEQ ID NO: 67876 - DNA, 33 bp, Homo sapien
ctgaggacttgcaaaagggtttaggattgtgtc

SEQ ID NO: 67877 - DNA, 33 bp, Homo sapien
cccttctctactgaaagagcagaaatagctaca

SEQ ID NO: 67878 - DNA, 33 bp, Homo sapien
cccttctctactgaaatagcagaaatagctaca

SEQ ID NO: 67879 - DNA, 33 bp, Homo sapien
ctgaatttactgagtacagctgggaagccttga

SEQ ID NO: 67880 - DNA, 33 bp, Homo sapien
ctgaatttactgagtatagctgggaagccttga

SEQ ID NO: 67881 - DNA, 33 bp, Homo sapien
gaagctgagacttcaaagttgagtaagagttag

SEQ ID NO: 67882 - DNA, 33 bp, Homo sapien
gaagctgagacttcaaggttgagtaagagttag

SEQ ID NO: 67883 - DNA, 33 bp, Homo sapien
attcttgcatgaaatactatctaccagtagtgc

SEQ ID NO: 67884 - DNA, 33 bp, Homo sapien
attcttgcatgaaatattatctaccagtagtgc

SEQ ID NO: 67885 - DNA, 33 bp, Homo sapien
gaactcacgaagaacactgtggctgataacaga

SEQ ID NO: 67886 - DNA, 33 bp, Homo sapien
gaactcacgaagaacattgtggctgataacaga

SEQ ID NO: 67887 - DNA, 33 bp, Homo sapien
gcaaaggggtcatcaaagtgtattctcacttct

SEQ ID NO: 67888 - DNA, 33 bp, Homo sapien
gcaaaggggtcatcaacgtgtattctcacttct

SEQ ID NO: 67889 - DNA, 33 bp, Homo sapien
cttaaagcagagacaccccttcagctctgaata

SEQ ID NO: 67890 - DNA, 33 bp, Homo sapien
cttaaagcagagacacgccttcagctctgaata

SEQ ID NO: 67891 - DNA, 33 bp, Homo sapien
cctgttgtattaatcacctggatctttagtctg

SEQ ID NO: 67892 - DNA, 33 bp, Homo sapien
cctgttgtattaatcatctggatctttagtctg

SEQ ID NO: 67893 - DNA, 33 bp, Homo sapien
tgtcacctagcttatccagtttactgtcactat

SEQ ID NO: 67894 - DNA, 33 bp, Homo sapien
tgtcacctagcttatctagtttactgtcactat

SEQ ID NO: 67895 - DNA, 33 bp, Homo sapien
accatatgtagggcaaagattgagagttcatcc

SEQ ID NO: 67896 - DNA, 33 bp, Homo sapien
accatatgtagggcaacgattgagagttcatcc

SEQ ID NO: 67897 - DNA, 33 bp, Homo sapien
tgtggctatagcccagcaatagtcagggcagca

SEQ ID NO: 67898 - DNA, 33 bp, Homo sapien
tgtggctatagcccaggaatagtcagggcagca

SEQ ID NO: 67899 - DNA, 33 bp, Homo sapien
aaaaggtgcaatggaacaataaagaaagcatgt

SEQ ID NO: 67900 - DNA, 33 bp, Homo sapien
aaaaggtgcaatggaataataaagaaagcatgt

SEQ ID NO: 67901 - DNA, 33 bp, Homo sapien
gccccctgaactgtcacggatgccgagttttgg

SEQ ID NO: 67902 - DNA, 33 bp, Homo sapien
gccccctgaactgtcatggatgccgagttttgg

SEQ ID NO: 67903 - DNA, 33 bp, Homo sapien
caaagacaaacaataccgattaaaagcacaatc

SEQ ID NO: 67904 - DNA, 33 bp, Homo sapien
caaagacaaacaatactgattaaaagcacaatc

SEQ ID NO: 67905 - DNA, 33 bp, Homo sapien
tagggcaaggcagctacgtgaattcctggtagc

SEQ ID NO: 67906 - DNA, 33 bp, Homo sapien
tagggcaaggcagctatgtgaattcctggtagc

SEQ ID NO: 67907 - DNA, 33 bp, Homo sapien
cgagtgttcttagttacagtaggatgcctatta

SEQ ID NO: 67908 - DNA, 33 bp, Homo sapien
cgagtgttcttagttatagtaggatgcctatta

SEQ ID NO: 67909 - DNA, 33 bp, Homo sapien
ggggtgctacccttacaggagtgagagtctggt

SEQ ID NO: 67910 - DNA, 33 bp, Homo sapien
ggggtgctacccttacgggagtgagagtctggt

SEQ ID NO: 67911 - DNA, 33 bp, Homo sapien
tgccctctgccgtccaaaactgatattgcactg

SEQ ID NO: 67912 - DNA, 33 bp, Homo sapien
tgccctctgccgtccagaactgatattgcactg

SEQ ID NO: 67913 - DNA, 33 bp, Homo sapien
atgggaagatcggcgtaaaggtcttcttggtga

SEQ ID NO: 67914 - DNA, 33 bp, Homo sapien
atgggaagatcggcgtgaaggtcttcttggtga

SEQ ID NO: 67915 - DNA, 33 bp, Homo sapien
ttgaatcctttcatgaagtaggcattattattc

SEQ ID NO: 67916 - DNA, 33 bp, Homo sapien
ttgaatcctttcatgaggtaggcattattattc

SEQ ID NO: 67917 - DNA, 33 bp, Homo sapien
gggggcaacattgggtaaagttttgatagttgc

SEQ ID NO: 67918 - DNA, 33 bp, Homo sapien
gggggcaacattgggtgaagttttgatagttgc

SEQ ID NO: 67919 - DNA, 33 bp, Homo sapien
ccatatgaacctaaggaaataccaccatagcgg

SEQ ID NO: 67920 - DNA, 33 bp, Homo sapien
ccatatgaacctaagggaataccaccatagcgg

SEQ ID NO: 67921 - DNA, 33 bp, Homo sapien
aatgagatcccagtggaaaaacaccgcatgagc

SEQ ID NO: 67922 - DNA, 33 bp, Homo sapien
aatgagatcccagtgggaaaacaccgcatgagc

SEQ ID NO: 67923 - DNA, 33 bp, Homo sapien
agtgccactgttgtcacacttagtctcaaccac

SEQ ID NO: 67924 - DNA, 33 bp, Homo sapien
agtgccactgttgtcatacttagtctcaaccac

SEQ ID NO: 67925 - DNA, 33 bp, Homo sapien
aagccatggattggaaataaatcaagagcaaaa

SEQ ID NO: 67926 - DNA, 33 bp, Homo sapien
aagccatggattggaagtaaatcaagagcaaaa

SEQ ID NO: 67927 - DNA, 33 bp, Homo sapien
taggttcattctcccaacttcgcttctgctggg

SEQ ID NO: 67928 - DNA, 33 bp, Homo sapien
taggttcattctcccaccttcgcttctgctggg

SEQ ID NO: 67929 - DNA, 33 bp, Homo sapien
gcctcttaaaccgtacgaaacagccagactgac

SEQ ID NO: 67930 - DNA, 33 bp, Homo sapien
gcctcttaaaccgtactaaacagccagactgac

SEQ ID NO: 67931 - DNA, 33 bp, Homo sapien
ccttcctgtcttcctcaccagattgtgagatat

SEQ ID NO: 67932 - DNA, 33 bp, Homo sapien
ccttcctgtcttcctctccagattgtgagatat

SEQ ID NO: 67933 - DNA, 33 bp, Homo sapien
tataaactctaagtgccctacaaatgcaaggaa

SEQ ID NO: 67934 - DNA, 33 bp, Homo sapien
tataaactctaagtgctctacaaatgcaaggaa

SEQ ID NO: 67935 - DNA, 33 bp, Homo sapien
tctgccaacttaaagcaagattgtctggtctag

SEQ ID NO: 67936 - DNA, 33 bp, Homo sapien
tctgccaacttaaagcgagattgtctggtctag

SEQ ID NO: 67937 - DNA, 33 bp, Homo sapien
tgagcagacacaaagacatttctgagctctctc

SEQ ID NO: 67938 - DNA, 33 bp, Homo sapien
tgagcagacacaaagatatttctgagctctctc

SEQ ID NO: 67939 - DNA, 33 bp, Homo sapien
attttatcttcctgaccatcttaggaaaacttc

SEQ ID NO: 67940 - DNA, 33 bp, Homo sapien
attttatcttcctgactatcttaggaaaacttc

SEQ ID NO: 67941 - DNA, 33 bp, Homo sapien
caccactgcccttgcacagagttaactgagttt

SEQ ID NO: 67942 - DNA, 33 bp, Homo sapien
caccactgcccttgcatagagttaactgagttt

SEQ ID NO: 67943 - DNA, 33 bp, Homo sapien
aggatgggtagggctacgaaagaagaaggaaac

SEQ ID NO: 67944 - DNA, 33 bp, Homo sapien
aggatgggtagggctatgaaagaagaaggaaac

SEQ ID NO: 67945 - DNA, 33 bp, Homo sapien
tcatgccaacaatttaagatttctctctccata

SEQ ID NO: 67946 - DNA, 33 bp, Homo sapien
tcatgccaacaatttaggatttctctctccata

SEQ ID NO: 67947 - DNA, 33 bp, Homo sapien
gatgtgtcctcttcaaactcctggtcattgtag

SEQ ID NO: 67948 - DNA, 33 bp, Homo sapien
gatgtgtcctcttcaagctcctggtcattgtag

SEQ ID NO: 67949 - DNA, 33 bp, Homo sapien
ctgagagtcctgagtcaaagctctgtggaagat

SEQ ID NO: 67950 - DNA, 33 bp, Homo sapien
ctgagagtcctgagtcgaagctctgtggaagat

SEQ ID NO: 67951 - DNA, 33 bp, Homo sapien
tggcttgatggaatacaaaagctaatcagttgg

SEQ ID NO: 67952 - DNA, 33 bp, Homo sapien
tggcttgatggaatacgaaagctaatcagttgg

SEQ ID NO: 67953 - DNA, 33 bp, Homo sapien
agggaacattactaccgcagactgtgtgggagg

SEQ ID NO: 67954 - DNA, 33 bp, Homo sapien
agggaacattactacctcagactgtgtgggagg

SEQ ID NO: 67955 - DNA, 33 bp, Homo sapien
gggtggagccaaataacgtgcatttctaaccag

SEQ ID NO: 67956 - DNA, 33 bp, Homo sapien
gggtggagccaaataatgtgcatttctaaccag

SEQ ID NO: 67957 - DNA, 33 bp, Homo sapien
attaaaccagaggtgaagaactaggcctttcat

SEQ ID NO: 67958 - DNA, 33 bp, Homo sapien
attaaaccagaggtgaggaactaggcctttcat

SEQ ID NO: 67959 - DNA, 33 bp, Homo sapien
agagaaaataacttgcccaatcaactttccaag

SEQ ID NO: 67960 - DNA, 33 bp, Homo sapien
agagaaaataacttgctcaatcaactttccaag

SEQ ID NO: 67961 - DNA, 33 bp, Homo sapien
ataatgcttaaaaatacagtatggcaagtttga

SEQ ID NO: 67962 - DNA, 33 bp, Homo sapien
ataatgcttaaaaatatagtatggcaagtttga

SEQ ID NO: 67963 - DNA, 33 bp, Homo sapien
aaagaccctatggacaagtaactgacaggtagc

SEQ ID NO: 67964 - DNA, 33 bp, Homo sapien
aaagaccctatggacaggtaactgacaggtagc

SEQ ID NO: 67965 - DNA, 33 bp, Homo sapien
ttcccgtagcgcaaggcagattgcagccaagag

SEQ ID NO: 67966 - DNA, 33 bp, Homo sapien
ttcccgtagcgcaaggtagattgcagccaagag

SEQ ID NO: 67967 - DNA, 33 bp, Homo sapien
gagctctgccgagaagaactctcctcctatcgg

SEQ ID NO: 67968 - DNA, 33 bp, Homo sapien
gagctctgccgagaaggactctcctcctatcgg

SEQ ID NO: 67969 - DNA, 33 bp, Homo sapien
gagatttcagagaggacagaagggatatgaact

SEQ ID NO: 67970 - DNA, 33 bp, Homo sapien
gagatttcagagaggagagaagggatatgaact

SEQ ID NO: 67971 - DNA, 33 bp, Homo sapien
acacgtgtccattttcaaagaagccctgttgaa

SEQ ID NO: 67972 - DNA, 33 bp, Homo sapien
acacgtgtccattttcgaagaagccctgttgaa

SEQ ID NO: 67973 - DNA, 33 bp, Homo sapien
gatttcctgggattccagctatgataaaaccca

SEQ ID NO: 67974 - DNA, 33 bp, Homo sapien
gatttcctgggattccggctatgataaaaccca

SEQ ID NO: 67975 - DNA, 33 bp, Homo sapien
gtgcaaagacacagcacagtttttgaacagggc

SEQ ID NO: 67976 - DNA, 33 bp, Homo sapien
gtgcaaagacacagcatagtttttgaacagggc

SEQ ID NO: 67977 - DNA, 33 bp, Homo sapien
tttctgaactagaaaacgggtatgttgataaga

SEQ ID NO: 67978 - DNA, 33 bp, Homo sapien
tttctgaactagaaaatgggtatgttgataaga

SEQ ID NO: 67979 - DNA, 33 bp, Homo sapien
tgtctttggaatctcacgggtctccccaatccc

SEQ ID NO: 67980 - DNA, 33 bp, Homo sapien
tgtctttggaatctcatgggtctccccaatccc

SEQ ID NO: 67981 - DNA, 33 bp, Homo sapien
gtgctcttccaaaggacacttggatctgtatat

SEQ ID NO: 67982 - DNA, 33 bp, Homo sapien
gtgctcttccaaaggagacttggatctgtatat

SEQ ID NO: 67983 - DNA, 33 bp, Homo sapien
tctcttggcagatatacgtgggctggtgtgcat

SEQ ID NO: 67984 - DNA, 33 bp, Homo sapien
tctcttggcagatataggtgggctggtgtgcat

SEQ ID NO: 67985 - DNA, 33 bp, Homo sapien
agatgggacggcctagccagggtaagaatgaag

SEQ ID NO: 67986 - DNA, 33 bp, Homo sapien
agatgggacggcctagtcagggtaagaatgaag

SEQ ID NO: 67987 - DNA, 33 bp, Homo sapien
tctcataataaccacacgcctgaaattatagtc

SEQ ID NO: 67988 - DNA, 33 bp, Homo sapien
tctcataataaccacatgcctgaaattatagtc

SEQ ID NO: 67989 - DNA, 33 bp, Homo sapien
gctccaccattaactaacagtgtggatatgtgc

SEQ ID NO: 67990 - DNA, 33 bp, Homo sapien
gctccaccattaactagcagtgtggatatgtgc

SEQ ID NO: 67991 - DNA, 33 bp, Homo sapien
cctgtctgaacctctgaacctcttccctatgaa

SEQ ID NO: 67992 - DNA, 33 bp, Homo sapien
cctgtctgaacctctggacctcttccctatgaa

SEQ ID NO: 67993 - DNA, 33 bp, Homo sapien
ttgaatccaccttgtaacttgaggcctctgtat

SEQ ID NO: 67994 - DNA, 33 bp, Homo sapien
ttgaatccaccttgtatcttgaggcctctgtat

SEQ ID NO: 67995 - DNA, 33 bp, Homo sapien
ctcagtaagaccatcacagttacctcaatctaa

SEQ ID NO: 67996 - DNA, 33 bp, Homo sapien
ctcagtaagaccatcatagttacctcaatctaa

SEQ ID NO: 67997 - DNA, 33 bp, Homo sapien
caaagggccttgaaataagagttcagcttgtgg

SEQ ID NO: 67998 - DNA, 33 bp, Homo sapien
caaagggccttgaaatgagagttcagcttgtgg

SEQ ID NO: 67999 - DNA, 33 bp, Homo sapien
tcatgtgccatcaagagctcaaagggccttgaa

SEQ ID NO: 68000 - DNA, 33 bp, Homo sapien
tcatgtgccatcaagatctcaaagggccttgaa

SEQ ID NO: 68001 - DNA, 33 bp, Homo sapien
ctgtgcccatgtactcaattctggaggtttttc

SEQ ID NO: 68002 - DNA, 33 bp, Homo sapien
ctgtgcccatgtactcgattctggaggtttttc

SEQ ID NO: 68003 - DNA, 33 bp, Homo sapien
ggatggtctacttggaagttaatataagtagcc

SEQ ID NO: 68004 - DNA, 33 bp, Homo sapien
ggatggtctacttggaggttaatataagtagcc

SEQ ID NO: 68005 - DNA, 33 bp, Homo sapien
agtggtgagcagtgaaaaagtaaagtcgtggcg

SEQ ID NO: 68006 - DNA, 33 bp, Homo sapien
agtggtgagcagtgaataagtaaagtcgtggcg

SEQ ID NO: 68007 - DNA, 33 bp, Homo sapien
cagagtgagtgtataacagtaaccagacaacgg

SEQ ID NO: 68008 - DNA, 33 bp, Homo sapien
cagagtgagtgtataatagtaaccagacaacgg

SEQ ID NO: 68009 - DNA, 33 bp, Homo sapien
acaggctttggtttaacagctgctcatcccagc

SEQ ID NO: 68010 - DNA, 33 bp, Homo sapien
acaggctttggtttaagagctgctcatcccagc

SEQ ID NO: 68011 - DNA, 33 bp, Homo sapien
aggtagaaggatgtccgcttgtccgtggtagcc

SEQ ID NO: 68012 - DNA, 33 bp, Homo sapien
aggtagaaggatgtcctcttgtccgtggtagcc

SEQ ID NO: 68013 - DNA, 33 bp, Homo sapien
gtggttccagcatcaccgtcaagatctcggctg

SEQ ID NO: 68014 - DNA, 33 bp, Homo sapien
gtggttccagcatcactgtcaagatctcggctg

SEQ ID NO: 68015 - DNA, 33 bp, Homo sapien
ggaatgacattgtgagacaacggggactggtgg

SEQ ID NO: 68016 - DNA, 33 bp, Homo sapien
ggaatgacattgtgaggcaacggggactggtgg

SEQ ID NO: 68017 - DNA, 33 bp, Homo sapien
gtctggagctcattgacaagcgtaaggctagtt

SEQ ID NO: 68018 - DNA, 33 bp, Homo sapien
gtctggagctcattgataagcgtaaggctagtt

SEQ ID NO: 68019 - DNA, 33 bp, Homo sapien
ttgtcccagatttgtcccaaagtcacacaggca

SEQ ID NO: 68020 - DNA, 33 bp, Homo sapien
ttgtcccagatttgtcgcaaagtcacacaggca

SEQ ID NO: 68021 - DNA, 33 bp, Homo sapien
gatttctgggcgtccacggctgcttattggtgc

SEQ ID NO: 68022 - DNA, 33 bp, Homo sapien
gatttctgggcgtccatggctgcttattggtgc

SEQ ID NO: 68023 - DNA, 33 bp, Homo sapien
gtgagtctccgcacccagcacccaaggaatact

SEQ ID NO: 68024 - DNA, 33 bp, Homo sapien
gtgagtctccgcacccggcacccaaggaatact

SEQ ID NO: 68025 - DNA, 33 bp, Homo sapien
atttctgtaaagaagaaaactgagattttgata

SEQ ID NO: 68026 - DNA, 33 bp, Homo sapien
atttctgtaaagaagacaactgagattttgata

SEQ ID NO: 68027 - DNA, 33 bp, Homo sapien
attgtattggtatcaactattaaaacgatcaca

SEQ ID NO: 68028 - DNA, 33 bp, Homo sapien
attgtattggtatcaagtattaaaacgatcaca

SEQ ID NO: 68029 - DNA, 33 bp, Homo sapien
ttttagaaattattccccagtacatggacatct

SEQ ID NO: 68030 - DNA, 33 bp, Homo sapien
ttttagaaattattccgcagtacatggacatct

SEQ ID NO: 68031 - DNA, 33 bp, Homo sapien
tgattcttaatatagcccacccatcgctaagtc

SEQ ID NO: 68032 - DNA, 33 bp, Homo sapien
tgattcttaatatagctcacccatcgctaagtc

SEQ ID NO: 68033 - DNA, 33 bp, Homo sapien
gggataacttttaaagcctgagggaattgagta

SEQ ID NO: 68034 - DNA, 33 bp, Homo sapien
gggataacttttaaagtctgagggaattgagta

SEQ ID NO: 68035 - DNA, 33 bp, Homo sapien
tgtggtactttcctcaccaacaggatctgagca

SEQ ID NO: 68036 - DNA, 33 bp, Homo sapien
tgtggtactttcctcagcaacaggatctgagca

SEQ ID NO: 68037 - DNA, 33 bp, Homo sapien
ctgtgccatgttgatccataaagttgaaagcct

SEQ ID NO: 68038 - DNA, 33 bp, Homo sapien
ctgtgccatgttgatcgataaagttgaaagcct

SEQ ID NO: 68039 - DNA, 33 bp, Homo sapien
atgtttttcccaacccaaaattccaataatcta

SEQ ID NO: 68040 - DNA, 33 bp, Homo sapien
atgtttttcccaaccccaaattccaataatcta

SEQ ID NO: 68041 - DNA, 33 bp, Homo sapien
catgtaacagaataaacgcctagtggatgaata

SEQ ID NO: 68042 - DNA, 33 bp, Homo sapien
catgtaacagaataaatgcctagtggatgaata

SEQ ID NO: 68043 - DNA, 33 bp, Homo sapien
actttcggggctgagaaagaataaaatgaaata

SEQ ID NO: 68044 - DNA, 33 bp, Homo sapien
actttcggggctgagagagaataaaatgaaata

SEQ ID NO: 68045 - DNA, 33 bp, Homo sapien
cggggataggaaaacaccttcactccactactt

SEQ ID NO: 68046 - DNA, 33 bp, Homo sapien
cggggataggaaaacatcttcactccactactt

SEQ ID NO: 68047 - DNA, 33 bp, Homo sapien
agagagtatttgatagacaccttacttactatt

SEQ ID NO: 68048 - DNA, 33 bp, Homo sapien
agagagtatttgataggcaccttacttactatt

SEQ ID NO: 68049 - DNA, 33 bp, Homo sapien
ccagggcaggttactacatatgctcattttctc

SEQ ID NO: 68050 - DNA, 33 bp, Homo sapien
ccagggcaggttactatatatgctcattttctc

SEQ ID NO: 68051 - DNA, 33 bp, Homo sapien
ccgaaagcctttcatcactgttgttgcatccgc

SEQ ID NO: 68052 - DNA, 33 bp, Homo sapien
ccgaaagcctttcatcgctgttgttgcatccgc

SEQ ID NO: 68053 - DNA, 33 bp, Homo sapien
cagttttgagactccaccattagtcaactaagg

SEQ ID NO: 68054 - DNA, 33 bp, Homo sapien
cagttttgagactccagcattagtcaactaagg

SEQ ID NO: 68055 - DNA, 33 bp, Homo sapien
aacaggccctgaaccacgctctgaggactggag

SEQ ID NO: 68056 - DNA, 33 bp, Homo sapien
aacaggccctgaaccatgctctgaggactggag

SEQ ID NO: 68057 - DNA, 33 bp, Homo sapien
cattgcttctgagtaaatctgacaactttgatt

SEQ ID NO: 68058 - DNA, 33 bp, Homo sapien
cattgcttctgagtaagtctgacaactttgatt

SEQ ID NO: 68059 - DNA, 33 bp, Homo sapien
tcactcatgctcatctcaaaacctctggggccc

SEQ ID NO: 68060 - DNA, 33 bp, Homo sapien
tcactcatgctcatctgaaaacctctggggccc

SEQ ID NO: 68061 - DNA, 33 bp, Homo sapien
ccgaagtcctaagcaccgggcatgacacagagg

SEQ ID NO: 68062 - DNA, 33 bp, Homo sapien
ccgaagtcctaagcactgggcatgacacagagg

SEQ ID NO: 68063 - DNA, 33 bp, Homo sapien
tggttctcccaggaaccggtgcgtcttcacatc

SEQ ID NO: 68064 - DNA, 33 bp, Homo sapien
tggttctcccaggaacgggtgcgtcttcacatc

SEQ ID NO: 68065 - DNA, 33 bp, Homo sapien
atagcctcagacttcacgtgtctattttgtaca

SEQ ID NO: 68066 - DNA, 33 bp, Homo sapien
atagcctcagacttcatgtgtctattttgtaca

SEQ ID NO: 68067 - DNA, 33 bp, Homo sapien
ttattcctcaaaatgacaccacctccaaaaatc

SEQ ID NO: 68068 - DNA, 33 bp, Homo sapien
ttattcctcaaaatgataccacctccaaaaatc

SEQ ID NO: 68069 - DNA, 33 bp, Homo sapien
attttatattttgtgcaagaaaatagaatacac

SEQ ID NO: 68070 - DNA, 33 bp, Homo sapien
attttatattttgtgcgagaaaatagaatacac

SEQ ID NO: 68071 - DNA, 33 bp, Homo sapien
gatacacacttattcaatcagaacttattatgc

SEQ ID NO: 68072 - DNA, 33 bp, Homo sapien
gatacacacttattcactcagaacttattatgc

SEQ ID NO: 68073 - DNA, 33 bp, Homo sapien
ccatttactctttccgcccagaaatggtggtag

SEQ ID NO: 68074 - DNA, 33 bp, Homo sapien
ccatttactctttccgtccagaaatggtggtag

SEQ ID NO: 68075 - DNA, 33 bp, Homo sapien
tgagtaaacactagtccccctcacgctctgcct

SEQ ID NO: 68076 - DNA, 33 bp, Homo sapien
tgagtaaacactagtctccctcacgctctgcct

SEQ ID NO: 68077 - DNA, 33 bp, Homo sapien
gcagctgcaagggaaaaaactgatctgctactt

SEQ ID NO: 68078 - DNA, 33 bp, Homo sapien
gcagctgcaagggaaagaactgatctgctactt

SEQ ID NO: 68079 - DNA, 33 bp, Homo sapien
gactggcttcctacaggacaggcggggtcacag

SEQ ID NO: 68080 - DNA, 33 bp, Homo sapien
gactggcttcctacagtacaggcggggtcacag

SEQ ID NO: 68081 - DNA, 33 bp, Homo sapien
agttcacaatcctaaaagtgtgggaaggagtca

SEQ ID NO: 68082 - DNA, 33 bp, Homo sapien
agttcacaatcctaaaggtgtgggaaggagtca

SEQ ID NO: 68083 - DNA, 33 bp, Homo sapien
gttcacatcctgtcccacagcaaagtctctaca

SEQ ID NO: 68084 - DNA, 33 bp, Homo sapien
gttcacatcctgtcccgcagcaaagtctctaca

SEQ ID NO: 68085 - DNA, 33 bp, Homo sapien
gacagagactaacagaacagcttaggtcagttg

SEQ ID NO: 68086 - DNA, 33 bp, Homo sapien
gacagagactaacagatcagcttaggtcagttg

SEQ ID NO: 68087 - DNA, 33 bp, Homo sapien
tagaaagcaatacatgccaagaagagaaagtgc

SEQ ID NO: 68088 - DNA, 33 bp, Homo sapien
tagaaagcaatacatgtcaagaagagaaagtgc

SEQ ID NO: 68089 - DNA, 33 bp, Homo sapien
agagctggaaagagacaaggaccaggtgccaat

SEQ ID NO: 68090 - DNA, 33 bp, Homo sapien
agagctggaaagagacgaggaccaggtgccaat

SEQ ID NO: 68091 - DNA, 33 bp, Homo sapien
tctgactcaggtgggacggagaagcctttatag

SEQ ID NO: 68092 - DNA, 33 bp, Homo sapien
tctgactcaggtgggatggagaagcctttatag

SEQ ID NO: 68093 - DNA, 33 bp, Homo sapien
ctggtgcctacagtaactcagtaggttgtgaga

SEQ ID NO: 68094 - DNA, 33 bp, Homo sapien
ctggtgcctacagtaagtcagtaggttgtgaga

SEQ ID NO: 68095 - DNA, 33 bp, Homo sapien
cttgagatattggccaggccccttatttctttg

SEQ ID NO: 68096 - DNA, 33 bp, Homo sapien
cttgagatattggccatgccccttatttctttg

SEQ ID NO: 68097 - DNA, 33 bp, Homo sapien
ttaggaactcctgttacgtgtaggttagctctt

SEQ ID NO: 68098 - DNA, 33 bp, Homo sapien
ttaggaactcctgttatgtgtaggttagctctt

SEQ ID NO: 68099 - DNA, 33 bp, Homo sapien
gtgattagtggtctgaaataagggtgccaaaaa

SEQ ID NO: 68100 - DNA, 33 bp, Homo sapien
gtgattagtggtctgagataagggtgccaaaaa

SEQ ID NO: 68101 - DNA, 33 bp, Homo sapien
accataccaaacaaaaaatattgactgatgtga

SEQ ID NO: 68102 - DNA, 33 bp, Homo sapien
accataccaaacaaaagatattgactgatgtga

SEQ ID NO: 68103 - DNA, 33 bp, Homo sapien
aacctctgggcatctaactagttttaggaaaac

SEQ ID NO: 68104 - DNA, 33 bp, Homo sapien
aacctctgggcatctatctagttttaggaaaac

SEQ ID NO: 68105 - DNA, 33 bp, Homo sapien
atccattacagtggtagaagtgctttgaaaagg

SEQ ID NO: 68106 - DNA, 33 bp, Homo sapien
atccattacagtggtataagtgctttgaaaagg

SEQ ID NO: 68107 - DNA, 33 bp, Homo sapien
tttccctctgaagacacggcgatcctgctaaaa

SEQ ID NO: 68108 - DNA, 33 bp, Homo sapien
tttccctctgaagacatggcgatcctgctaaaa

SEQ ID NO: 68109 - DNA, 33 bp, Homo sapien
atcttttgccaagaaaaggtcctgagtgttttg

SEQ ID NO: 68110 - DNA, 33 bp, Homo sapien
atcttttgccaagaaatggtcctgagtgttttg

SEQ ID NO: 68111 - DNA, 33 bp, Homo sapien
gctgcatcaaaggcaaatcaatcattttgactc

SEQ ID NO: 68112 - DNA, 33 bp, Homo sapien
gctgcatcaaaggcaattcaatcattttgactc

SEQ ID NO: 68113 - DNA, 33 bp, Homo sapien
aggtgtggccagtttggatttccttaagtcctc

SEQ ID NO: 68114 - DNA, 33 bp, Homo sapien
aggtgtggccagtttgtatttccttaagtcctc

SEQ ID NO: 68115 - DNA, 33 bp, Homo sapien
ggtgacataactctcccaagccatgctgttctg

SEQ ID NO: 68116 - DNA, 33 bp, Homo sapien
ggtgacataactctcctaagccatgctgttctg

SEQ ID NO: 68117 - DNA, 33 bp, Homo sapien
gagtggtgggagatgaagtgaaaaaataccctg

SEQ ID NO: 68118 - DNA, 33 bp, Homo sapien
gagtggtgggagatgaggtgaaaaaataccctg

SEQ ID NO: 68119 - DNA, 33 bp, Homo sapien
tgttttagaaagacaaactggtgctgttcttac

SEQ ID NO: 68120 - DNA, 33 bp, Homo sapien
tgttttagaaagacaatctggtgctgttcttac

SEQ ID NO: 68121 - DNA, 33 bp, Homo sapien
actccaagcaccatataaggaggccgatggggg

SEQ ID NO: 68122 - DNA, 33 bp, Homo sapien
actccaagcaccatatcaggaggccgatggggg

SEQ ID NO: 68123 - DNA, 33 bp, Homo sapien
tatctccactttacaacagaggacactgagtct

SEQ ID NO: 68124 - DNA, 33 bp, Homo sapien
tatctccactttacaatagaggacactgagtct

SEQ ID NO: 68125 - DNA, 33 bp, Homo sapien
tctcccaagttaagaactcctgcattagagggt

SEQ ID NO: 68126 - DNA, 33 bp, Homo sapien
tctcccaagttaagaattcctgcattagagggt

SEQ ID NO: 68127 - DNA, 33 bp, Homo sapien
cccatgtgcttccctgcaaagtgatgcaactgg

SEQ ID NO: 68128 - DNA, 33 bp, Homo sapien
cccatgtgcttccctgtaaagtgatgcaactgg

SEQ ID NO: 68129 - DNA, 33 bp, Homo sapien
ctcacatttggaatcactaagttcatcatcagc

SEQ ID NO: 68130 - DNA, 33 bp, Homo sapien
ctcacatttggaatcattaagttcatcatcagc

SEQ ID NO: 68131 - DNA, 33 bp, Homo sapien
aatgtgattaaggcaaaacgttcatgcagggag

SEQ ID NO: 68132 - DNA, 33 bp, Homo sapien
aatgtgattaaggcaagacgttcatgcagggag

SEQ ID NO: 68133 - DNA, 33 bp, Homo sapien
aaaggatatatgataaagttctgaatcataagt

SEQ ID NO: 68134 - DNA, 33 bp, Homo sapien
aaaggatatatgataaggttctgaatcataagt

SEQ ID NO: 68135 - DNA, 33 bp, Homo sapien
tattgtgacagtcggacgcgctggacaaaggga

SEQ ID NO: 68136 - DNA, 33 bp, Homo sapien
tattgtgacagtcggatgcgctggacaaaggga

SEQ ID NO: 68137 - DNA, 33 bp, Homo sapien
agtcacaaggacatgactattcaaataaataca

SEQ ID NO: 68138 - DNA, 33 bp, Homo sapien
agtcacaaggacatgagtattcaaataaataca

SEQ ID NO: 68139 - DNA, 33 bp, Homo sapien
ctcatctctgcctctgcagcacgaaagcaatta

SEQ ID NO: 68140 - DNA, 33 bp, Homo sapien
ctcatctctgcctctgtagcacgaaagcaatta

SEQ ID NO: 68141 - DNA, 33 bp, Homo sapien
taaacatttcatttcccacccacactcgccagc

SEQ ID NO: 68142 - DNA, 33 bp, Homo sapien
taaacatttcatttccgacccacactcgccagc

SEQ ID NO: 68143 - DNA, 33 bp, Homo sapien
ctcagactacccagaaaatgtttcacttgggaa

SEQ ID NO: 68144 - DNA, 33 bp, Homo sapien
ctcagactacccagaatatgtttcacttgggaa

SEQ ID NO: 68145 - DNA, 33 bp, Homo sapien
tggattcagttgtgaaccaacacctagggcagg

SEQ ID NO: 68146 - DNA, 33 bp, Homo sapien
tggattcagttgtgaagcaacacctagggcagg

SEQ ID NO: 68147 - DNA, 33 bp, Homo sapien
gaaaattggtgataagcctcttttatcctgaag

SEQ ID NO: 68148 - DNA, 33 bp, Homo sapien
gaaaattggtgataaggctcttttatcctgaag

SEQ ID NO: 68149 - DNA, 33 bp, Homo sapien
ccatcttattctgagcagagaatggaaggagtt

SEQ ID NO: 68150 - DNA, 33 bp, Homo sapien
ccatcttattctgagcggagaatggaaggagtt

SEQ ID NO: 68151 - DNA, 33 bp, Homo sapien
ctaaatagaaaccaaaattagctagcatgcacc

SEQ ID NO: 68152 - DNA, 33 bp, Homo sapien
ctaaatagaaaccaaacttagctagcatgcacc

SEQ ID NO: 68153 - DNA, 33 bp, Homo sapien
ctggtgaaagagtgaaagtagaaactgtggtaa

SEQ ID NO: 68154 - DNA, 33 bp, Homo sapien
ctggtgaaagagtgaaggtagaaactgtggtaa

SEQ ID NO: 68155 - DNA, 33 bp, Homo sapien
tctccttcctccaaacagctctaatactttcat

SEQ ID NO: 68156 - DNA, 33 bp, Homo sapien
tctccttcctccaaacggctctaatactttcat

SEQ ID NO: 68157 - DNA, 33 bp, Homo sapien
cattcctgaatgtttgaaaatagaagaggcttc

SEQ ID NO: 68158 - DNA, 33 bp, Homo sapien
cattcctgaatgtttgcaaatagaagaggcttc

SEQ ID NO: 68159 - DNA, 33 bp, Homo sapien
ctagagccagcaaggacaggagggagatgacaa

SEQ ID NO: 68160 - DNA, 33 bp, Homo sapien
ctagagccagcaaggataggagggagatgacaa

SEQ ID NO: 68161 - DNA, 33 bp, Homo sapien
tgcttccactccaggaaccagcaagactacagc

SEQ ID NO: 68162 - DNA, 33 bp, Homo sapien
tgcttccactccaggacccagcaagactacagc

SEQ ID NO: 68163 - DNA, 33 bp, Homo sapien
cctgcatttaacacagaaagtacacctgtgtcc

SEQ ID NO: 68164 - DNA, 33 bp, Homo sapien
cctgcatttaacacaggaagtacacctgtgtcc

SEQ ID NO: 68165 - DNA, 33 bp, Homo sapien
ttcagacatcctaaagacagaacagactgatag

SEQ ID NO: 68166 - DNA, 33 bp, Homo sapien
ttcagacatcctaaaggcagaacagactgatag

SEQ ID NO: 68167 - DNA, 33 bp, Homo sapien
taacagtagtgaggaacgtattagagtaggaag

SEQ ID NO: 68168 - DNA, 33 bp, Homo sapien
taacagtagtgaggaatgtattagagtaggaag

SEQ ID NO: 68169 - DNA, 33 bp, Homo sapien
acacacagctgtgcacacagttaccagcacaca

SEQ ID NO: 68170 - DNA, 33 bp, Homo sapien
acacacagctgtgcacgcagttaccagcacaca

SEQ ID NO: 68171 - DNA, 33 bp, Homo sapien
ttacaaagtgggtacaccgagcagaaagctacc

SEQ ID NO: 68172 - DNA, 33 bp, Homo sapien
ttacaaagtgggtacagcgagcagaaagctacc

SEQ ID NO: 68173 - DNA, 33 bp, Homo sapien
gttcagatccagaaaaggccaaaggatcatgac

SEQ ID NO: 68174 - DNA, 33 bp, Homo sapien
gttcagatccagaaaatgccaaaggatcatgac

SEQ ID NO: 68175 - DNA, 33 bp, Homo sapien
gaatttgactcaatgacaccaatggtgatgata

SEQ ID NO: 68176 - DNA, 33 bp, Homo sapien
gaatttgactcaatgataccaatggtgatgata

SEQ ID NO: 68177 - DNA, 33 bp, Homo sapien
gagacatggattattaagagaacactaagggtt

SEQ ID NO: 68178 - DNA, 33 bp, Homo sapien
gagacatggattattaggagaacactaagggtt

SEQ ID NO: 68179 - DNA, 33 bp, Homo sapien
ccctaccctggaaagcaagaaaacactcgtcgg

SEQ ID NO: 68180 - DNA, 33 bp, Homo sapien
ccctaccctggaaagcgagaaaacactcgtcgg

SEQ ID NO: 68181 - DNA, 33 bp, Homo sapien
agcagggatgaggtgacattgccaagatatttt

SEQ ID NO: 68182 - DNA, 33 bp, Homo sapien
agcagggatgaggtgatattgccaagatatttt

SEQ ID NO: 68183 - DNA, 33 bp, Homo sapien
atgagggtagggagaaccaaggacatctgagca

SEQ ID NO: 68184 - DNA, 33 bp, Homo sapien
atgagggtagggagaatcaaggacatctgagca

SEQ ID NO: 68185 - DNA, 33 bp, Homo sapien
aggacccgcgtgtatgcatagtggggggcagat

SEQ ID NO: 68186 - DNA, 33 bp, Homo sapien
aggacccgcgtgtatgtatagtggggggcagat

SEQ ID NO: 68187 - DNA, 33 bp, Homo sapien
ttgcctgagattacccagaatcagcataacagg

SEQ ID NO: 68188 - DNA, 33 bp, Homo sapien
ttgcctgagattaccctgaatcagcataacagg

SEQ ID NO: 68189 - DNA, 33 bp, Homo sapien
gagctaagatgtgaaaaacaacagcagaagcca

SEQ ID NO: 68190 - DNA, 33 bp, Homo sapien
gagctaagatgtgaaacacaacagcagaagcca

SEQ ID NO: 68191 - DNA, 33 bp, Homo sapien
tgcagaacttgtcaatcagcaggcttcactgtt

SEQ ID NO: 68192 - DNA, 33 bp, Homo sapien
tgcagaacttgtcaattagcaggcttcactgtt

SEQ ID NO: 68193 - DNA, 33 bp, Homo sapien
atgtaattagttaagaagagatcatattggaat

SEQ ID NO: 68194 - DNA, 33 bp, Homo sapien
atgtaattagttaagatgagatcatattggaat

SEQ ID NO: 68195 - DNA, 33 bp, Homo sapien
attatcccagttttgcagataaagaagctggag

SEQ ID NO: 68196 - DNA, 33 bp, Homo sapien
attatcccagttttgccgataaagaagctggag

SEQ ID NO: 68197 - DNA, 33 bp, Homo sapien
gcccctgcctaaaggacgggggcaggagagtca

SEQ ID NO: 68198 - DNA, 33 bp, Homo sapien
gcccctgcctaaaggatgggggcaggagagtca

SEQ ID NO: 68199 - DNA, 33 bp, Homo sapien
tcctcttacgtgaagaaagttgctgcgccaaac

SEQ ID NO: 68200 - DNA, 33 bp, Homo sapien
tcctcttacgtgaagagagttgctgcgccaaac

SEQ ID NO: 68201 - DNA, 33 bp, Homo sapien
taattccaggctgtcactctctcttactcatta

SEQ ID NO: 68202 - DNA, 33 bp, Homo sapien
taattccaggctgtcattctctcttactcatta

SEQ ID NO: 68203 - DNA, 33 bp, Homo sapien
aagattgttgagataaataagtgatataaaaca

SEQ ID NO: 68204 - DNA, 33 bp, Homo sapien
aagattgttgagataactaagtgatataaaaca

SEQ ID NO: 68205 - DNA, 33 bp, Homo sapien
atttgagccagatctacatgctccatcatcact

SEQ ID NO: 68206 - DNA, 33 bp, Homo sapien
atttgagccagatctatatgctccatcatcact

SEQ ID NO: 68207 - DNA, 33 bp, Homo sapien
ggaaacagtctcaaccaggtacacacaacccca

SEQ ID NO: 68208 - DNA, 33 bp, Homo sapien
ggaaacagtctcaaccgggtacacacaacccca

SEQ ID NO: 68209 - DNA, 33 bp, Homo sapien
tatttaagtaaaagctcacagttataggttaga

SEQ ID NO: 68210 - DNA, 33 bp, Homo sapien
tatttaagtaaaagctgacagttataggttaga

SEQ ID NO: 68211 - DNA, 33 bp, Homo sapien
gacccttagatctacactgactttttgacaaca

SEQ ID NO: 68212 - DNA, 33 bp, Homo sapien
gacccttagatctacattgactttttgacaaca

SEQ ID NO: 68213 - DNA, 33 bp, Homo sapien
ccagtcctggcaactgaagatttaggcttgagc

SEQ ID NO: 68214 - DNA, 33 bp, Homo sapien
ccagtcctggcaactggagatttaggcttgagc

SEQ ID NO: 68215 - DNA, 33 bp, Homo sapien
tattccacatcaccaagtcttggagatcctatc

SEQ ID NO: 68216 - DNA, 33 bp, Homo sapien
tattccacatcaccaattcttggagatcctatc

SEQ ID NO: 68217 - DNA, 33 bp, Homo sapien
taaagtttaaactgccccaaggacaaacagcta

SEQ ID NO: 68218 - DNA, 33 bp, Homo sapien
taaagtttaaactgcctcaaggacaaacagcta

SEQ ID NO: 68219 - DNA, 33 bp, Homo sapien
ggtgacgagaaaatgccgcaaagattaacgctc

SEQ ID NO: 68220 - DNA, 33 bp, Homo sapien
ggtgacgagaaaatgctgcaaagattaacgctc

SEQ ID NO: 68221 - DNA, 33 bp, Homo sapien
tcataaacctgtggagcaaaggttcagcaagtc

SEQ ID NO: 68222 - DNA, 33 bp, Homo sapien
tcataaacctgtggaggaaaggttcagcaagtc

SEQ ID NO: 68223 - DNA, 33 bp, Homo sapien
ttaacacagagctagacgcagtgagcaagaaca

SEQ ID NO: 68224 - DNA, 33 bp, Homo sapien
ttaacacagagctagatgcagtgagcaagaaca

SEQ ID NO: 68225 - DNA, 33 bp, Homo sapien
cttctatcaaggcagaaaagatgttttagggac

SEQ ID NO: 68226 - DNA, 33 bp, Homo sapien
cttctatcaaggcagagaagatgttttagggac

SEQ ID NO: 68227 - DNA, 33 bp, Homo sapien
ctacttttctgtctagcccacattcccaaccac

SEQ ID NO: 68228 - DNA, 33 bp, Homo sapien
ctacttttctgtctagtccacattcccaaccac

SEQ ID NO: 68229 - DNA, 33 bp, Homo sapien
gagtgccatttatatcacgtgagtaagtcaaga

SEQ ID NO: 68230 - DNA, 33 bp, Homo sapien
gagtgccatttatatcgcgtgagtaagtcaaga

SEQ ID NO: 68231 - DNA, 33 bp, Homo sapien
ctagaagtattttgcaccatccaaccttcattc

SEQ ID NO: 68232 - DNA, 33 bp, Homo sapien
ctagaagtattttgcatcatccaaccttcattc

SEQ ID NO: 68233 - DNA, 33 bp, Homo sapien
tatattcccctcctccacttaaatagtatcaaa

SEQ ID NO: 68234 - DNA, 33 bp, Homo sapien
tatattcccctcctccgcttaaatagtatcaaa

SEQ ID NO: 68235 - DNA, 33 bp, Homo sapien
cacgttcttaaatatcacagtgtgcagtaaaaa

SEQ ID NO: 68236 - DNA, 33 bp, Homo sapien
cacgttcttaaatatcccagtgtgcagtaaaaa

SEQ ID NO: 68237 - DNA, 33 bp, Homo sapien
tctataggagagtttccctgcaattaagcaaaa

SEQ ID NO: 68238 - DNA, 33 bp, Homo sapien
tctataggagagtttctctgcaattaagcaaaa

SEQ ID NO: 68239 - DNA, 33 bp, Homo sapien
ctgccttagtaggtaactgaaacattgtagcag

SEQ ID NO: 68240 - DNA, 33 bp, Homo sapien
ctgccttagtaggtaattgaaacattgtagcag

SEQ ID NO: 68241 - DNA, 33 bp, Homo sapien
tggggagaagaaaggcacttacaagaaaacaga

SEQ ID NO: 68242 - DNA, 33 bp, Homo sapien
tggggagaagaaaggcgcttacaagaaaacaga

SEQ ID NO: 68243 - DNA, 33 bp, Homo sapien
aaatgttcttctcttccccatccattactactg

SEQ ID NO: 68244 - DNA, 33 bp, Homo sapien
aaatgttcttctcttctccatccattactactg

SEQ ID NO: 68245 - DNA, 33 bp, Homo sapien
cccaaacaactcctggaaattcttcttgctttc

SEQ ID NO: 68246 - DNA, 33 bp, Homo sapien
cccaaacaactcctggcaattcttcttgctttc

SEQ ID NO: 68247 - DNA, 33 bp, Homo sapien
acagtcccctgagagaaacgagtatagaagtca

SEQ ID NO: 68248 - DNA, 33 bp, Homo sapien
acagtcccctgagagagacgagtatagaagtca

SEQ ID NO: 68249 - DNA, 33 bp, Homo sapien
tggatcctaaggtgaaattatttccttcaaaat

SEQ ID NO: 68250 - DNA, 33 bp, Homo sapien
tggatcctaaggtgaagttatttccttcaaaat

SEQ ID NO: 68251 - DNA, 33 bp, Homo sapien
aagtatggactgtgacagaatttcaatgtttgg

SEQ ID NO: 68252 - DNA, 33 bp, Homo sapien
aagtatggactgtgacggaatttcaatgtttgg

SEQ ID NO: 68253 - DNA, 33 bp, Homo sapien
ccatgctgtggaagtcaaatattgaatcggtgc

SEQ ID NO: 68254 - DNA, 33 bp, Homo sapien
ccatgctgtggaagtcgaatattgaatcggtgc

SEQ ID NO: 68255 - DNA, 33 bp, Homo sapien
tgagtagatagttgtactaatttaccagacatt

SEQ ID NO: 68256 - DNA, 33 bp, Homo sapien
tgagtagatagttgtattaatttaccagacatt

SEQ ID NO: 68257 - DNA, 33 bp, Homo sapien
cttctcattagcacacaaaatattcatctatga

SEQ ID NO: 68258 - DNA, 33 bp, Homo sapien
cttctcattagcacacgaaatattcatctatga

SEQ ID NO: 68259 - DNA, 33 bp, Homo sapien
aaaatgcaaagtcaaaatactcaaggattgctt

SEQ ID NO: 68260 - DNA, 33 bp, Homo sapien
aaaatgcaaagtcaaactactcaaggattgctt

SEQ ID NO: 68261 - DNA, 33 bp, Homo sapien
tcacctttttcgtaccccagaaagaatggaagc

SEQ ID NO: 68262 - DNA, 33 bp, Homo sapien
tcacctttttcgtacctcagaaagaatggaagc

SEQ ID NO: 68263 - DNA, 33 bp, Homo sapien
ggcagagatgcctgagaagtcccagttgttcta

SEQ ID NO: 68264 - DNA, 33 bp, Homo sapien
ggcagagatgcctgaggagtcccagttgttcta

SEQ ID NO: 68265 - DNA, 33 bp, Homo sapien
tgcctcagagattgccgacctgtggattaagaa

SEQ ID NO: 68266 - DNA, 33 bp, Homo sapien
tgcctcagagattgcctacctgtggattaagaa

SEQ ID NO: 68267 - DNA, 33 bp, Homo sapien
cattagttcacttataacaatggcctctagctc

SEQ ID NO: 68268 - DNA, 33 bp, Homo sapien
cattagttcacttatagcaatggcctctagctc

SEQ ID NO: 68269 - DNA, 33 bp, Homo sapien
cagcatattgcccttacgatggtagtgcttttt

SEQ ID NO: 68270 - DNA, 33 bp, Homo sapien
cagcatattgcccttatgatggtagtgcttttt

SEQ ID NO: 68271 - DNA, 33 bp, Homo sapien
gccctgctacagcaaacggggctatcgataccc

SEQ ID NO: 68272 - DNA, 33 bp, Homo sapien
gccctgctacagcaaatggggctatcgataccc

SEQ ID NO: 68273 - DNA, 33 bp, Homo sapien
gttttgctttggtaagaccgcttataaaaatgc

SEQ ID NO: 68274 - DNA, 33 bp, Homo sapien
gttttgctttggtaaggccgcttataaaaatgc

SEQ ID NO: 68275 - DNA, 33 bp, Homo sapien
ttcgtgattgccataaacattgtggtaaactga

SEQ ID NO: 68276 - DNA, 33 bp, Homo sapien
ttcgtgattgccataaccattgtggtaaactga

SEQ ID NO: 68277 - DNA, 33 bp, Homo sapien
cataggtgaatagatacggatgcatttttgaga

SEQ ID NO: 68278 - DNA, 33 bp, Homo sapien
cataggtgaatagatatggatgcatttttgaga

SEQ ID NO: 68279 - DNA, 33 bp, Homo sapien
tatactttacacttaaatcttagatctcataga

SEQ ID NO: 68280 - DNA, 33 bp, Homo sapien
tatactttacacttaattcttagatctcataga

SEQ ID NO: 68281 - DNA, 33 bp, Homo sapien
aaattgataaattggaactcgttaaaagtactc

SEQ ID NO: 68282 - DNA, 33 bp, Homo sapien
aaattgataaattggatctcgttaaaagtactc

SEQ ID NO: 68283 - DNA, 33 bp, Homo sapien
aaaaacaaggaatttacagcgttcgttagatga

SEQ ID NO: 68284 - DNA, 33 bp, Homo sapien
aaaaacaaggaatttagagcgttcgttagatga

SEQ ID NO: 68285 - DNA, 33 bp, Homo sapien
cgcaacgggaatccaaactccccagccaaaata

SEQ ID NO: 68286 - DNA, 33 bp, Homo sapien
cgcaacgggaatccaagctccccagccaaaata

SEQ ID NO: 68287 - DNA, 33 bp, Homo sapien
tatatacaacagaaaaactcaagcagttttata

SEQ ID NO: 68288 - DNA, 33 bp, Homo sapien
tatatacaacagaaaacctcaagcagttttata

SEQ ID NO: 68289 - DNA, 33 bp, Homo sapien
cttgagataattggaaaacatggtatttctatt

SEQ ID NO: 68290 - DNA, 33 bp, Homo sapien
cttgagataattggaagacatggtatttctatt

SEQ ID NO: 68291 - DNA, 33 bp, Homo sapien
ctccatcctttcacaagtcaaatctacttgagg

SEQ ID NO: 68292 - DNA, 33 bp, Homo sapien
ctccatcctttcacaattcaaatctacttgagg

SEQ ID NO: 68293 - DNA, 33 bp, Homo sapien
gccatttaaagccacaactgtttttaatgccaa

SEQ ID NO: 68294 - DNA, 33 bp, Homo sapien
gccatttaaagccacagctgtttttaatgccaa

SEQ ID NO: 68295 - DNA, 33 bp, Homo sapien
gtaacaacatagtcaaattcagttgttaccaaa

SEQ ID NO: 68296 - DNA, 33 bp, Homo sapien
gtaacaacatagtcaagttcagttgttaccaaa

SEQ ID NO: 68297 - DNA, 33 bp, Homo sapien
ttccatcttcacacatcagtactttcgttcttc

SEQ ID NO: 68298 - DNA, 33 bp, Homo sapien
ttccatcttcacacattagtactttcgttcttc

SEQ ID NO: 68299 - DNA, 33 bp, Homo sapien
ccctcaattgctatcaatctaaactagcggttt

SEQ ID NO: 68300 - DNA, 33 bp, Homo sapien
ccctcaattgctatcagtctaaactagcggttt

SEQ ID NO: 68301 - DNA, 33 bp, Homo sapien
tgcttttgaaagacgaaaaatatggctctgttc

SEQ ID NO: 68302 - DNA, 33 bp, Homo sapien
tgcttttgaaagacgagaaatatggctctgttc

SEQ ID NO: 68303 - DNA, 33 bp, Homo sapien
aaacagcccttcaatcagatgcaaaaccattag

SEQ ID NO: 68304 - DNA, 33 bp, Homo sapien
aaacagcccttcaatccgatgcaaaaccattag

SEQ ID NO: 68305 - DNA, 33 bp, Homo sapien
aggcgagggagtctcaaattgctttataatcta

SEQ ID NO: 68306 - DNA, 33 bp, Homo sapien
aggcgagggagtctcagattgctttataatcta

SEQ ID NO: 68307 - DNA, 33 bp, Homo sapien
cagccagctggtccaactaaatgcttccttggc

SEQ ID NO: 68308 - DNA, 33 bp, Homo sapien
cagccagctggtccaattaaatgcttccttggc

SEQ ID NO: 68309 - DNA, 33 bp, Homo sapien
attgtacatgtaatcaactgacaggaagagaac

SEQ ID NO: 68310 - DNA, 33 bp, Homo sapien
attgtacatgtaatcagctgacaggaagagaac

SEQ ID NO: 68311 - DNA, 33 bp, Homo sapien
atctgaggaaccagtccatttcatatttacatt

SEQ ID NO: 68312 - DNA, 33 bp, Homo sapien
atctgaggaaccagtctatttcatatttacatt

SEQ ID NO: 68313 - DNA, 33 bp, Homo sapien
tggggaaacaggttgaataacacagtagggagt

SEQ ID NO: 68314 - DNA, 33 bp, Homo sapien
tggggaaacaggttgagtaacacagtagggagt

SEQ ID NO: 68315 - DNA, 33 bp, Homo sapien
tcttcctaacactgtacctcttgaacgaactag

SEQ ID NO: 68316 - DNA, 33 bp, Homo sapien
tcttcctaacactgtatctcttgaacgaactag

SEQ ID NO: 68317 - DNA, 33 bp, Homo sapien
tacaatgagaaaaaaaaggtagtagtatgacat

SEQ ID NO: 68318 - DNA, 33 bp, Homo sapien
tacaatgagaaaaaaatggtagtagtatgacat

SEQ ID NO: 68319 - DNA, 33 bp, Homo sapien
catccaccataacttggatccaccctccattgt

SEQ ID NO: 68320 - DNA, 33 bp, Homo sapien
catccaccataacttgtatccaccctccattgt

SEQ ID NO: 68321 - DNA, 33 bp, Homo sapien
cctgtcctacgacttcgcctccattccagaaca

SEQ ID NO: 68322 - DNA, 33 bp, Homo sapien
cctgtcctacgacttctcctccattccagaaca

SEQ ID NO: 68323 - DNA, 33 bp, Homo sapien
cctactgcttgacactcaggtcttgccttcatg

SEQ ID NO: 68324 - DNA, 33 bp, Homo sapien
cctactgcttgacacttaggtcttgccttcatg

SEQ ID NO: 68325 - DNA, 33 bp, Homo sapien
gcctttagattatgtgaaaccattgaatttttt

SEQ ID NO: 68326 - DNA, 33 bp, Homo sapien
gcctttagattatgtggaaccattgaatttttt

SEQ ID NO: 68327 - DNA, 33 bp, Homo sapien
ttgtttgtttttgctacgagtggttttattttt

SEQ ID NO: 68328 - DNA, 33 bp, Homo sapien
ttgtttgtttttgctaggagtggttttattttt

SEQ ID NO: 68329 - DNA, 33 bp, Homo sapien
gggtcacttatacaaaatcccctgttgaggcag

SEQ ID NO: 68330 - DNA, 33 bp, Homo sapien
gggtcacttatacaaagtcccctgttgaggcag

SEQ ID NO: 68331 - DNA, 33 bp, Homo sapien
tacttgtagggaatcacggcaccttaattgtcc

SEQ ID NO: 68332 - DNA, 33 bp, Homo sapien
tacttgtagggaatcatggcaccttaattgtcc

SEQ ID NO: 68333 - DNA, 33 bp, Homo sapien
gtgtgtttccatttcactcattgttaacaacat

SEQ ID NO: 68334 - DNA, 33 bp, Homo sapien
gtgtgtttccatttcattcattgttaacaacat

SEQ ID NO: 68335 - DNA, 33 bp, Homo sapien
tcgcatttgatgatgacgcacctattactgcag

SEQ ID NO: 68336 - DNA, 33 bp, Homo sapien
tcgcatttgatgatgaggcacctattactgcag

SEQ ID NO: 68337 - DNA, 33 bp, Homo sapien
aggcttgagtacattacagtgaaggagaaaaag

SEQ ID NO: 68338 - DNA, 33 bp, Homo sapien
aggcttgagtacattagagtgaaggagaaaaag

SEQ ID NO: 68339 - DNA, 33 bp, Homo sapien
agttaccaggttacagaccagagagccagcagt

SEQ ID NO: 68340 - DNA, 33 bp, Homo sapien
agttaccaggttacagcccagagagccagcagt

SEQ ID NO: 68341 - DNA, 33 bp, Homo sapien
taagcctgacccataaacattgggcacgcaggc

SEQ ID NO: 68342 - DNA, 33 bp, Homo sapien
taagcctgacccataagcattgggcacgcaggc

SEQ ID NO: 68343 - DNA, 33 bp, Homo sapien
tgccaagatgcaggaaagcaggtttcaccttca

SEQ ID NO: 68344 - DNA, 33 bp, Homo sapien
tgccaagatgcaggaacgcaggtttcaccttca

SEQ ID NO: 68345 - DNA, 33 bp, Homo sapien
attccatcactaagggaaggactttggtcaatt

SEQ ID NO: 68346 - DNA, 33 bp, Homo sapien
attccatcactaagggtaggactttggtcaatt

SEQ ID NO: 68347 - DNA, 33 bp, Homo sapien
ccttcactttcaataaacccattacacaattac

SEQ ID NO: 68348 - DNA, 33 bp, Homo sapien
ccttcactttcaataagcccattacacaattac

SEQ ID NO: 68349 - DNA, 33 bp, Homo sapien
tcactttcaccatgccactaccagtacttccca

SEQ ID NO: 68350 - DNA, 33 bp, Homo sapien
tcactttcaccatgccgctaccagtacttccca

SEQ ID NO: 68351 - DNA, 33 bp, Homo sapien
accaggaatgtgaaaaaagtttcggggagaaaa

SEQ ID NO: 68352 - DNA, 33 bp, Homo sapien
accaggaatgtgaaaacagtttcggggagaaaa

SEQ ID NO: 68353 - DNA, 33 bp, Homo sapien
gaattgctgggtttaaccatttgagaaactacc

SEQ ID NO: 68354 - DNA, 33 bp, Homo sapien
gaattgctgggtttaatcatttgagaaactacc

SEQ ID NO: 68355 - DNA, 33 bp, Homo sapien
cagcaacacaaaaactcaactcctctgtagatg

SEQ ID NO: 68356 - DNA, 33 bp, Homo sapien
cagcaacacaaaaacttaactcctctgtagatg

SEQ ID NO: 68357 - DNA, 33 bp, Homo sapien
caataaaagggaaatgacacttctctccatcac

SEQ ID NO: 68358 - DNA, 33 bp, Homo sapien
caataaaagggaaatgtcacttctctccatcac

SEQ ID NO: 68359 - DNA, 33 bp, Homo sapien
ttgttccatctccttcacccttacaagtaaaaa

SEQ ID NO: 68360 - DNA, 33 bp, Homo sapien
ttgttccatctccttcgcccttacaagtaaaaa

SEQ ID NO: 68361 - DNA, 33 bp, Homo sapien
tctgtttgctgaggatcaagaaaaaggtaagaa

SEQ ID NO: 68362 - DNA, 33 bp, Homo sapien
tctgtttgctgaggatgaagaaaaaggtaagaa

SEQ ID NO: 68363 - DNA, 33 bp, Homo sapien
gaacatatgttgcagaccagctttgggtaattt

SEQ ID NO: 68364 - DNA, 33 bp, Homo sapien
gaacatatgttgcagatcagctttgggtaattt

SEQ ID NO: 68365 - DNA, 33 bp, Homo sapien
taagttttctcagctacccatataaaccatcat

SEQ ID NO: 68366 - DNA, 33 bp, Homo sapien
taagttttctcagctagccatataaaccatcat

SEQ ID NO: 68367 - DNA, 33 bp, Homo sapien
tttactttgaagggcaatagtcagattcgttgc

SEQ ID NO: 68368 - DNA, 33 bp, Homo sapien
tttactttgaagggcagtagtcagattcgttgc

SEQ ID NO: 68369 - DNA, 33 bp, Homo sapien
gagaaatggtgagggcagaattggtaatattat

SEQ ID NO: 68370 - DNA, 33 bp, Homo sapien
gagaaatggtgagggccgaattggtaatattat

SEQ ID NO: 68371 - DNA, 33 bp, Homo sapien
aatatactcaactttacaatcagagatttctca

SEQ ID NO: 68372 - DNA, 33 bp, Homo sapien
aatatactcaactttataatcagagatttctca

SEQ ID NO: 68373 - DNA, 33 bp, Homo sapien
taaatgctgaattcctcaataatcatagttgag

SEQ ID NO: 68374 - DNA, 33 bp, Homo sapien
taaatgctgaattcctgaataatcatagttgag

SEQ ID NO: 68375 - DNA, 33 bp, Homo sapien
gaaatagaagtcatgcaaaaagaggaatgacca

SEQ ID NO: 68376 - DNA, 33 bp, Homo sapien
gaaatagaagtcatgcgaaaagaggaatgacca

SEQ ID NO: 68377 - DNA, 33 bp, Homo sapien
atgcaaagcaaatggtcaatatttgggagtttt

SEQ ID NO: 68378 - DNA, 33 bp, Homo sapien
atgcaaagcaaatggttaatatttgggagtttt

SEQ ID NO: 68379 - DNA, 33 bp, Homo sapien
gatacaaactatccacaaatcctactgtcactg

SEQ ID NO: 68380 - DNA, 33 bp, Homo sapien
gatacaaactatccacgaatcctactgtcactg

SEQ ID NO: 68381 - DNA, 33 bp, Homo sapien
ctccttgttatgtacaaccacatgatgacaaag

SEQ ID NO: 68382 - DNA, 33 bp, Homo sapien
ctccttgttatgtacatccacatgatgacaaag

SEQ ID NO: 68383 - DNA, 33 bp, Homo sapien
tagcctctttcacttcccggagatcttattcag

SEQ ID NO: 68384 - DNA, 33 bp, Homo sapien
tagcctctttcacttctcggagatcttattcag

SEQ ID NO: 68385 - DNA, 33 bp, Homo sapien
ataacatgctctggaacaaataactacatttta

SEQ ID NO: 68386 - DNA, 33 bp, Homo sapien
ataacatgctctggaataaataactacatttta

SEQ ID NO: 68387 - DNA, 33 bp, Homo sapien
gtcttccagaatcacactgaactatgggaaaga

SEQ ID NO: 68388 - DNA, 33 bp, Homo sapien
gtcttccagaatcacattgaactatgggaaaga

SEQ ID NO: 68389 - DNA, 33 bp, Homo sapien
aataatgcttagcacacagaaggagctccataa

SEQ ID NO: 68390 - DNA, 33 bp, Homo sapien
aataatgcttagcacatagaaggagctccataa

SEQ ID NO: 68391 - DNA, 33 bp, Homo sapien
cttactgaaataagaaatatggatgtaggactg

SEQ ID NO: 68392 - DNA, 33 bp, Homo sapien
cttactgaaataagaagtatggatgtaggactg

SEQ ID NO: 68393 - DNA, 33 bp, Homo sapien
atgcttccagtgtgcacggtcctttggaatttt

SEQ ID NO: 68394 - DNA, 33 bp, Homo sapien
atgcttccagtgtgcatggtcctttggaatttt

SEQ ID NO: 68395 - DNA, 33 bp, Homo sapien
cctcaattgcgaaaaacgtaccaccctggtgaa

SEQ ID NO: 68396 - DNA, 33 bp, Homo sapien
cctcaattgcgaaaaatgtaccaccctggtgaa

SEQ ID NO: 68397 - DNA, 33 bp, Homo sapien
tttctctgtctctgcccatgtaagtgatacctt

SEQ ID NO: 68398 - DNA, 33 bp, Homo sapien
tttctctgtctctgcctatgtaagtgatacctt

SEQ ID NO: 68399 - DNA, 33 bp, Homo sapien
acagaggagaaggcgacgagaagatggagacag

SEQ ID NO: 68400 - DNA, 33 bp, Homo sapien
acagaggagaaggcgatgagaagatggagacag

SEQ ID NO: 68401 - DNA, 33 bp, Homo sapien
agaataagaaaaagaaatagaagagctggaaac

SEQ ID NO: 68402 - DNA, 33 bp, Homo sapien
agaataagaaaaagaagtagaagagctggaaac

SEQ ID NO: 68403 - DNA, 33 bp, Homo sapien
ggactgtcttatttaagggcttgtgtttttgat

SEQ ID NO: 68404 - DNA, 33 bp, Homo sapien
ggactgtcttatttaatggcttgtgtttttgat

SEQ ID NO: 68405 - DNA, 33 bp, Homo sapien
aatctgcattgatccactccttaatttacatgt

SEQ ID NO: 68406 - DNA, 33 bp, Homo sapien
aatctgcattgatccattccttaatttacatgt

SEQ ID NO: 68407 - DNA, 33 bp, Homo sapien
ttaatttacatgtaaccgaaatgggtttacagc

SEQ ID NO: 68408 - DNA, 33 bp, Homo sapien
ttaatttacatgtaactgaaatgggtttacagc

SEQ ID NO: 68409 - DNA, 33 bp, Homo sapien
tttacagatttcccccaatttctctgattgcac

SEQ ID NO: 68410 - DNA, 33 bp, Homo sapien
tttacagatttcccccgatttctctgattgcac

SEQ ID NO: 68411 - DNA, 33 bp, Homo sapien
ctaggaaggtaatcccaatttgtaccattgtta

SEQ ID NO: 68412 - DNA, 33 bp, Homo sapien
ctaggaaggtaatcccgatttgtaccattgtta

SEQ ID NO: 68413 - DNA, 33 bp, Homo sapien
tggcatcatcaagaaaaattaaatcactgatat

SEQ ID NO: 68414 - DNA, 33 bp, Homo sapien
tggcatcatcaagaaagattaaatcactgatat

SEQ ID NO: 68415 - DNA, 33 bp, Homo sapien
gtgctggtcagtatccacttccacatatcctaa

SEQ ID NO: 68416 - DNA, 33 bp, Homo sapien
gtgctggtcagtatccgcttccacatatcctaa

SEQ ID NO: 68417 - DNA, 33 bp, Homo sapien
gcaaggaaagagtagcccaaagaaaagagtagg

SEQ ID NO: 68418 - DNA, 33 bp, Homo sapien
gcaaggaaagagtagcgcaaagaaaagagtagg

SEQ ID NO: 68419 - DNA, 33 bp, Homo sapien
ccatttgccagtcctacgatcccaattaatgac

SEQ ID NO: 68420 - DNA, 33 bp, Homo sapien
ccatttgccagtcctatgatcccaattaatgac

SEQ ID NO: 68421 - DNA, 33 bp, Homo sapien
gagtttgatggaggtccactccagagtttttaa

SEQ ID NO: 68422 - DNA, 33 bp, Homo sapien
gagtttgatggaggtctactccagagtttttaa

SEQ ID NO: 68423 - DNA, 33 bp, Homo sapien
acaagacctgtgcactaaaaactcagtaactga

SEQ ID NO: 68424 - DNA, 33 bp, Homo sapien
acaagacctgtgcactgaaaactcagtaactga

SEQ ID NO: 68425 - DNA, 33 bp, Homo sapien
gagctctgtctttgaaacagctgaatgagctct

SEQ ID NO: 68426 - DNA, 33 bp, Homo sapien
gagctctgtctttgaagcagctgaatgagctct

SEQ ID NO: 68427 - DNA, 33 bp, Homo sapien
gaataacaatcgctaacgatcctcaagtgcatg

SEQ ID NO: 68428 - DNA, 33 bp, Homo sapien
gaataacaatcgctaatgatcctcaagtgcatg

SEQ ID NO: 68429 - DNA, 33 bp, Homo sapien
tatcagtttactatacaaagttttcaaggcatg

SEQ ID NO: 68430 - DNA, 33 bp, Homo sapien
tatcagtttactatacgaagttttcaaggcatg

SEQ ID NO: 68431 - DNA, 33 bp, Homo sapien
agatgggaattgctcacacatttgctaccactt

SEQ ID NO: 68432 - DNA, 33 bp, Homo sapien
agatgggaattgctcatacatttgctaccactt

SEQ ID NO: 68433 - DNA, 33 bp, Homo sapien; identical to SEQ ID NO: 68431

SEQ ID NO: 68434 - DNA, 33 bp, Homo sapien; identical to SEQ ID NO: 68432

SEQ ID NO: 68435 - DNA, 33 bp, Homo sapien
catgtgtagaaaaagcaatgaatagtgaatgaa

SEQ ID NO: 68436 - DNA, 33 bp, Homo sapien
catgtgtagaaaaagcgatgaatagtgaatgaa

SEQ ID NO: 68437 - DNA, 33 bp, Homo sapien
ccaagtgaatgacaaacgggttatagataggca

SEQ ID NO: 68438 - DNA, 33 bp, Homo sapien
ccaagtgaatgacaaatgggttatagataggca

SEQ ID NO: 68439 - DNA, 33 bp, Homo sapien
tactttgaaaacattccctactaaatctggacc

SEQ ID NO: 68440 - DNA, 33 bp, Homo sapien
tactttgaaaacattctctactaaatctggacc

SEQ ID NO: 68441 - DNA, 33 bp, Homo sapien
ccacctctactactacaagttatctttatcctg

SEQ ID NO: 68442 - DNA, 33 bp, Homo sapien
ccacctctactactacgagttatctttatcctg

SEQ ID NO: 68443 - DNA, 33 bp, Homo sapien
atgttgaggtgaaggaccaaacaaacatagtca

SEQ ID NO: 68444 - DNA, 33 bp, Homo sapien
atgttgaggtgaaggatcaaacaaacatagtca

SEQ ID NO: 68445 - DNA, 33 bp, Homo sapien
agcttccattctaaaacccctaataccaactca

SEQ ID NO: 68446 - DNA, 33 bp, Homo sapien
agcttccattctaaaatccctaataccaactca

SEQ ID NO: 68447 - DNA, 33 bp, Homo sapien
ttcctaccttacttaaaatagtgcctcatttat

SEQ ID NO: 68448 - DNA, 33 bp, Homo sapien
ttcctaccttacttaacatagtgcctcatttat

SEQ ID NO: 68449 - DNA, 33 bp, Homo sapien
ttatacactaagcatccaattcctcactatcct

SEQ ID NO: 68450 - DNA, 33 bp, Homo sapien
ttatacactaagcatctaattcctcactatcct

SEQ ID NO: 68451 - DNA, 33 bp, Homo sapien
cattcaatgaaatacaaaacagtgggataggcc

SEQ ID NO: 68452 - DNA, 33 bp, Homo sapien
cattcaatgaaatacagaacagtgggataggcc

SEQ ID NO: 68453 - DNA, 33 bp, Homo sapien
gtctgttattacctaccagtgtaacagcaccag

SEQ ID NO: 68454 - DNA, 33 bp, Homo sapien
gtctgttattacctactagtgtaacagcaccag

SEQ ID NO: 68455 - DNA, 33 bp, Homo sapien
tctcatgattactacactcttaatgctttcaac

SEQ ID NO: 68456 - DNA, 33 bp, Homo sapien
tctcatgattactacattcttaatgctttcaac

SEQ ID NO: 68457 - DNA, 33 bp, Homo sapien
gagttaaagtagggctcacagaaatgagaaata

SEQ ID NO: 68458 - DNA, 33 bp, Homo sapien
gagttaaagtagggctgacagaaatgagaaata

SEQ ID NO: 68459 - DNA, 33 bp, Homo sapien
agaaatgaaaagtatacaagacactcctaaata

SEQ ID NO: 68460 - DNA, 33 bp, Homo sapien
agaaatgaaaagtatagaagacactcctaaata

SEQ ID NO: 68461 - DNA, 33 bp, Homo sapien
gcaccctccattcacggaaaaattgtcttccac

SEQ ID NO: 68462 - DNA, 33 bp, Homo sapien
gcaccctccattcacgtaaaaattgtcttccac

SEQ ID NO: 68463 - DNA, 33 bp, Homo sapien
tatttaatttgggatccgaactggatgtctttg

SEQ ID NO: 68464 - DNA, 33 bp, Homo sapien
tatttaatttgggatctgaactggatgtctttg

SEQ ID NO: 68465 - DNA, 33 bp, Homo sapien
caggctgcatagccacagtcttctcatggctca

SEQ ID NO: 68466 - DNA, 33 bp, Homo sapien
caggctgcatagccacggtcttctcatggctca

SEQ ID NO: 68467 - DNA, 33 bp, Homo sapien
atctatgtgccttgaaacaggtggttgggttag

SEQ ID NO: 68468 - DNA, 33 bp, Homo sapien
atctatgtgccttgaaccaggtggttgggttag

SEQ ID NO: 68469 - DNA, 33 bp, Homo sapien
tttacatcctaccctacctttttggatctcctg

SEQ ID NO: 68470 - DNA, 33 bp, Homo sapien
tttacatcctaccctatctttttggatctcctg

SEQ ID NO: 68471 - DNA, 33 bp, Homo sapien
acattctgaatgagaaaagttcaaaccattatt

SEQ ID NO: 68472 - DNA, 33 bp, Homo sapien
acattctgaatgagaatagttcaaaccattatt

SEQ ID NO: 68473 - DNA, 33 bp, Homo sapien
ctgtaaactctctatacccaaatcctggtaaat

SEQ ID NO: 68474 - DNA, 33 bp, Homo sapien
ctgtaaactctctatatccaaatcctggtaaat

SEQ ID NO: 68475 - DNA, 33 bp, Homo sapien
tccttgtccttctccccacctgagtaaaaacaa

SEQ ID NO: 68476 - DNA, 33 bp, Homo sapien
tccttgtccttctccctacctgagtaaaaacaa

SEQ ID NO: 68477 - DNA, 33 bp, Homo sapien
gcagtgcacacataaagagtatgccgttcactg

SEQ ID NO: 68478 - DNA, 33 bp, Homo sapien
gcagtgcacacataaatagtatgccgttcactg

SEQ ID NO: 68479 - DNA, 33 bp, Homo sapien; identical to SEQ ID NO: 68477

SEQ ID NO: 68480 - DNA, 33 bp, Homo sapien; identical to SEQ ID NO: 68478

SEQ ID NO: 68481 - DNA, 33 bp, Homo sapien
aaggtagtgaaagaatgatgacaaggccgagca

SEQ ID NO: 68482 - DNA, 33 bp, Homo sapien
aaggtagtgaaagaattatgacaaggccgagca

SEQ ID NO: 68483 - DNA, 33 bp, Homo sapien
tcccccataactaacaagtactctggaactgtc

SEQ ID NO: 68484 - DNA, 33 bp, Homo sapien
tcccccataactaacaggtactctggaactgtc

SEQ ID NO: 68485 - DNA, 33 bp, Homo sapien
ttaggtttgtatctgacattgagttgtatgtgc

SEQ ID NO: 68486 - DNA, 33 bp, Homo sapien
ttaggtttgtatctgatattgagttgtatgtgc

SEQ ID NO: 68487 - DNA, 33 bp, Homo sapien
actattacagattccactattgactggttttaa

SEQ ID NO: 68488 - DNA, 33 bp, Homo sapien
actattacagattccattattgactggttttaa

SEQ ID NO: 68489 - DNA, 33 bp, Homo sapien
tgtgtcttggctggaacgaaagccctttggaat

SEQ ID NO: 68490 - DNA, 33 bp, Homo sapien
tgtgtcttggctggaatgaaagccctttggaat

SEQ ID NO: 68491 - DNA, 33 bp, Homo sapien; identical to SEQ ID NO: 68489

SEQ ID NO: 68492 - DNA, 33 bp, Homo sapien; identical to SEQ ID NO: 68490

SEQ ID NO: 68493 - DNA, 33 bp, Homo sapien
acttttacaactagtaccacaaccaccactact

SEQ ID NO: 68494 - DNA, 33 bp, Homo sapien
acttttacaactagtatcacaaccaccactact

SEQ ID NO: 68495 - DNA, 33 bp, Homo sapien
tctgtagagactgtgcactttaacaataaataa

SEQ ID NO: 68496 - DNA, 33 bp, Homo sapien
tctgtagagactgtgctctttaacaataaataa

SEQ ID NO: 68497 - DNA, 33 bp, Homo sapien
ttctgcagggaaatgcagaaactatcttaggat

SEQ ID NO: 68498 - DNA, 33 bp, Homo sapien
ttctgcagggaaatgcggaaactatcttaggat

SEQ ID NO: 68499 - DNA, 33 bp, Homo sapien
tcatttggtgaaaaaaaagcaggattcaatatt

SEQ ID NO: 68500 - DNA, 33 bp, Homo sapien
tcatttggtgaaaaaagagcaggattcaatatt

SEQ ID NO: 68501 - DNA, 33 bp, Homo sapien
aatgtagccgaattcaactttaaagcaactatt

SEQ ID NO: 68502 - DNA, 33 bp, Homo sapien
aatgtagccgaattcacctttaaagcaactatt

SEQ ID NO: 68503 - DNA, 33 bp, Homo sapien
ccataagattagaaaccgtggcttaggggtcat

SEQ ID NO: 68504 - DNA, 33 bp, Homo sapien
ccataagattagaaactgtggcttaggggtcat

SEQ ID NO: 68505 - DNA, 33 bp, Homo sapien
tattggatgaaataaacggttcttgtggtcaag

SEQ ID NO: 68506 - DNA, 33 bp, Homo sapien
tattggatgaaataaatggttcttgtggtcaag

SEQ ID NO: 68507 - DNA, 33 bp, Homo sapien; identical to SEQ ID NO: 68505

SEQ ID NO: 68508 - DNA, 33 bp, Homo sapien; identical to SEQ ID NO: 68506

SEQ ID NO: 68509 - DNA, 33 bp, Homo sapien
gcgtcatgtgtatctacgtccaaattatattta

SEQ ID NO: 68510 - DNA, 33 bp, Homo sapien
gcgtcatgtgtatctatgtccaaattatattta

SEQ ID NO: 68511 - DNA, 33 bp, Homo sapien
catattgaattcacaaacagcttgtagaaaccc

SEQ ID NO: 68512 - DNA, 33 bp, Homo sapien
catattgaattcacaaccagcttgtagaaaccc

SEQ ID NO: 68513 - DNA, 33 bp, Homo sapien; identical to SEQ ID NO: 68511

SEQ ID NO: 68514 - DNA, 33 bp, Homo sapien; identical to SEQ ID NO: 68512

SEQ ID NO: 68515 - DNA, 33 bp, Homo sapien
aaataactaaagtttacgtcacacttttagtat

SEQ ID NO: 68516 - DNA, 33 bp, Homo sapien
aaataactaaagtttatgtcacacttttagtat

SEQ ID NO: 68517 - DNA, 33 bp, Homo sapien
ttctctttgggaaaacaacaagactacagtgtt

SEQ ID NO: 68518 - DNA, 33 bp, Homo sapien
ttctctttgggaaaacgacaagactacagtgtt

SEQ ID NO: 68519 - DNA, 33 bp, Homo sapien
tgccttgaggaagatacgattggaaaatcaaga

SEQ ID NO: 68520 - DNA, 33 bp, Homo sapien
tgccttgaggaagatatgattggaaaatcaaga

SEQ ID NO: 68521 - DNA, 33 bp, Homo sapien
atactgactacataacacgttatacttaggggg

SEQ ID NO: 68522 - DNA, 33 bp, Homo sapien
atactgactacataacgcgttatacttaggggg

SEQ ID NO: 68523 - DNA, 33 bp, Homo sapien
tcctgcccaagccctccgagcatttgaatgtgc

SEQ ID NO: 68524 - DNA, 33 bp, Homo sapien
tcctgcccaagccctctgagcatttgaatgtgc

SEQ ID NO: 68525 - DNA, 33 bp, Homo sapien
cacttccttcagccaccgggaagtaactaacag

SEQ ID NO: 68526 - DNA, 33 bp, Homo sapien
cacttccttcagccactgggaagtaactaacag

SEQ ID NO: 68527 - DNA, 33 bp, Homo sapien
tggaactacatcacgccacagggtgtgcccagt

SEQ ID NO: 68528 - DNA, 33 bp, Homo sapien
tggaactacatcacgctacagggtgtgcccagt

SEQ ID NO: 68529 - DNA, 33 bp, Homo sapien
tcactcagctaagaagaaggatcacaatgaaaa

SEQ ID NO: 68530 - DNA, 33 bp, Homo sapien
tcactcagctaagaaggaggatcacaatgaaaa

SEQ ID NO: 68531 - DNA, 33 bp, Homo sapien
gagaaagttaatgacactgtcaaggaacagctg

SEQ ID NO: 68532 - DNA, 33 bp, Homo sapien
gagaaagttaatgacagtgtcaaggaacagctg

SEQ ID NO: 68533 - DNA, 33 bp, Homo sapien
ggaagtaggcttggtacagagctggcccatcac

SEQ ID NO: 68534 - DNA, 33 bp, Homo sapien
ggaagtaggcttggtatagagctggcccatcac

SEQ ID NO: 68535 - DNA, 33 bp, Homo sapien
tgtggccactctgctaaccactggtcacagctc

SEQ ID NO: 68536 - DNA, 33 bp, Homo sapien
tgtggccactctgctacccactggtcacagctc

SEQ ID NO: 68537 - DNA, 33 bp, Homo sapien
aaagacagaagattacacttagaagatttctcc

SEQ ID NO: 68538 - DNA, 33 bp, Homo sapien
aaagacagaagattacccttagaagatttctcc

SEQ ID NO: 68539 - DNA, 33 bp, Homo sapien
ggctaggtacccaaaaatcaggatttagccttt

SEQ ID NO: 68540 - DNA, 33 bp, Homo sapien
ggctaggtacccaaaagtcaggatttagccttt

SEQ ID NO: 68541 - DNA, 33 bp, Homo sapien
ccacattctgtacctacccttaataccttgctt

SEQ ID NO: 68542 - DNA, 33 bp, Homo sapien
ccacattctgtacctatccttaataccttgctt

SEQ ID NO: 68543 - DNA, 33 bp, Homo sapien
aacgctggaatcaggcactgtagagtttttccc

SEQ ID NO: 68544 - DNA, 33 bp, Homo sapien
aacgctggaatcaggccctgtagagtttttccc

SEQ ID NO: 68545 - DNA, 33 bp, Homo sapien
cccagaaacttagccacgtagatggtatttgta

SEQ ID NO: 68546 - DNA, 33 bp, Homo sapien
cccagaaacttagccaggtagatggtatttgta

SEQ ID NO: 68547 - DNA, 33 bp, Homo sapien
tgcagagtgagaagggccactgatcccaggaag

SEQ ID NO: 68548 - DNA, 33 bp, Homo sapien
tgcagagtgagaagggtcactgatcccaggaag

SEQ ID NO: 68549 - DNA, 33 bp, Homo sapien
atactcatctttactacgtactacgcaatctaa

SEQ ID NO: 68550 - DNA, 33 bp, Homo sapien
atactcatctttactatgtactacgcaatctaa

SEQ ID NO: 68551 - DNA, 33 bp, Homo sapien
ctgtttctctaatatcacaaaagctttcaatac

SEQ ID NO: 68552 - DNA, 33 bp, Homo sapien
ctgtttctctaatatcgcaaaagctttcaatac

SEQ ID NO: 68553 - DNA, 33 bp, Homo sapien
acagtttgatctggaaagtttatgggcagctga

SEQ ID NO: 68554 - DNA, 33 bp, Homo sapien
acagtttgatctggaaggtttatgggcagctga

SEQ ID NO: 68555 - DNA, 33 bp, Homo sapien
gagactgtggtgaatgaaaggaggatgagtata

SEQ ID NO: 68556 - DNA, 33 bp, Homo sapien
gagactgtggtgaatggaaggaggatgagtata

SEQ ID NO: 68557 - DNA, 33 bp, Homo sapien
atcttgtgatgaaaaccgtgattcattcattca

SEQ ID NO: 68558 - DNA, 33 bp, Homo sapien
atcttgtgatgaaaactgtgattcattcattca

SEQ ID NO: 68559 - DNA, 33 bp, Homo sapien
acacatatatctctggccaccttcagagcaacc

SEQ ID NO: 68560 - DNA, 33 bp, Homo sapien
acacatatatctctggtcaccttcagagcaacc

SEQ ID NO: 68561 - DNA, 33 bp, Homo sapien
ttggctggttcaatcaagccttttccttctctt

SEQ ID NO: 68562 - DNA, 33 bp, Homo sapien
ttggctggttcaatcaggccttttccttctctt

SEQ ID NO: 68563 - DNA, 33 bp, Homo sapien
gtgcttagagctggaaagggaatatgaggttca

SEQ ID NO: 68564 - DNA, 33 bp, Homo sapien
gtgcttagagctggaaggggaatatgaggttca

SEQ ID NO: 68565 - DNA, 33 bp, Homo sapien
gctccatttccagtgacattcttgaatccctta

SEQ ID NO: 68566 - DNA, 33 bp, Homo sapien
gctccatttccagtgatattcttgaatccctta

SEQ ID NO: 68567 - DNA, 33 bp, Homo sapien
aactcttcccagaaacagtaatgaatgtaggtg

SEQ ID NO: 68568 - DNA, 33 bp, Homo sapien
aactcttcccagaaacggtaatgaatgtaggtg

SEQ ID NO: 68569 - DNA, 33 bp, Homo sapien
caggaggattttgccacatattagcaatgtgac

SEQ ID NO: 68570 - DNA, 33 bp, Homo sapien
caggaggattttgccatatattagcaatgtgac

SEQ ID NO: 68571 - DNA, 33 bp, Homo sapien
gaactgcccgttttcccgcgggagctggctgcc

SEQ ID NO: 68572 - DNA, 33 bp, Homo sapien
gaactgcccgttttcctgcgggagctggctgcc

SEQ ID NO: 68573 - DNA, 33 bp, Homo sapien
aaacagagatggaagacgagacaaaaatgccat

SEQ ID NO: 68574 - DNA, 33 bp, Homo sapien
aaacagagatggaagatgagacaaaaatgccat

SEQ ID NO: 68575 - DNA, 33 bp, Homo sapien
gtagctctggcctctgaagtctcttcacgcctc

SEQ ID NO: 68576 - DNA, 33 bp, Homo sapien
gtagctctggcctctggagtctcttcacgcctc

SEQ ID NO: 68577 - DNA, 33 bp, Homo sapien
aatatctatttagtcaacacaacaacctagtgt

SEQ ID NO: 68578 - DNA, 33 bp, Homo sapien
aatatctatttagtcaccacaacaacctagtgt

SEQ ID NO: 68579 - DNA, 33 bp, Homo sapien
gctcccgattatgtccaagatgacctttccttg

SEQ ID NO: 68580 - DNA, 33 bp, Homo sapien
gctcccgattatgtccgagatgacctttccttg

SEQ ID NO: 68581 - DNA, 33 bp, Homo sapien
tttccccctgcaaccccatcgacttggtggagc

SEQ ID NO: 68582 - DNA, 33 bp, Homo sapien
tttccccctgcaaccctatcgacttggtggagc

SEQ ID NO: 68583 - DNA, 33 bp, Homo sapien
actgaattaaaggatcaccttctcaagacacca

SEQ ID NO: 68584 - DNA, 33 bp, Homo sapien
actgaattaaaggatcgccttctcaagacacca

SEQ ID NO: 68585 - DNA, 33 bp, Homo sapien
atgagaacaagactgccatgactagaggtagct

SEQ ID NO: 68586 - DNA, 33 bp, Homo sapien
atgagaacaagactgctatgactagaggtagct

SEQ ID NO: 68587 - DNA, 33 bp, Homo sapien
tctgaagggaagtaacccattccgacggactcc

SEQ ID NO: 68588 - DNA, 33 bp, Homo sapien
tctgaagggaagtaactcattccgacggactcc

SEQ ID NO: 68589 - DNA, 33 bp, Homo sapien
agctgcagagtcctacaaaaacaaatgaaaatg

SEQ ID NO: 68590 - DNA, 33 bp, Homo sapien
agctgcagagtcctacgaaaacaaatgaaaatg

SEQ ID NO: 68591 - DNA, 33 bp, Homo sapien
gtgtgttttatcagccaaacagaaatgctgctg

SEQ ID NO: 68592 - DNA, 33 bp, Homo sapien
gtgtgttttatcagccgaacagaaatgctgctg

SEQ ID NO: 68593 - DNA, 33 bp, Homo sapien
cacaagcaaatagtgacaattttatgtttcctt

SEQ ID NO: 68594 - DNA, 33 bp, Homo sapien
cacaagcaaatagtgataattttatgtttcctt

SEQ ID NO: 68595 - DNA, 33 bp, Homo sapien
acagagtccatataaaatgagttggagagtatt

SEQ ID NO: 68596 - DNA, 33 bp, Homo sapien
acagagtccatataaagtgagttggagagtatt

SEQ ID NO: 68597 - DNA, 33 bp, Homo sapien
ttcagtttcgtcctcactccagtatgcaacaca

SEQ ID NO: 68598 - DNA, 33 bp, Homo sapien
ttcagtttcgtcctcattccagtatgcaacaca

SEQ ID NO: 68599 - DNA, 33 bp, Homo sapien
gtcacctcaggagtcacaacgggagccagtccc

SEQ ID NO: 68600 - DNA, 33 bp, Homo sapien
gtcacctcaggagtcagaacgggagccagtccc

SEQ ID NO: 68601 - DNA, 33 bp, Homo sapien
ttcccaatgtcatggacgatgaaaagaactggc

SEQ ID NO: 68602 - DNA, 33 bp, Homo sapien
ttcccaatgtcatggatgatgaaaagaactggc

SEQ ID NO: 68603 - DNA, 33 bp, Homo sapien
gagaacaaagccaaaaattgatgttttgagatt

SEQ ID NO: 68604 - DNA, 33 bp, Homo sapien
gagaacaaagccaaaagttgatgttttgagatt

SEQ ID NO: 68605 - DNA, 33 bp, Homo sapien
taattttaaaatagtaaatgcgaaataaagatt

SEQ ID NO: 68606 - DNA, 33 bp, Homo sapien
taattttaaaatagtagatgcgaaataaagatt

SEQ ID NO: 68607 - DNA, 33 bp, Homo sapien
ttctatttgaccaattaaaaaaattcctctgga

SEQ ID NO: 68608 - DNA, 33 bp, Homo sapien
ttctatttgaccaattgaaaaaattcctctgga

SEQ ID NO: 68609 - DNA, 33 bp, Homo sapien
aaagctctcaaaattcgctggtgaaacactatt

SEQ ID NO: 68610 - DNA, 33 bp, Homo sapien
aaagctctcaaaattctctggtgaaacactatt

SEQ ID NO: 68611 - DNA, 33 bp, Homo sapien
atcaaactgattggcacacgtgggcaataaact

SEQ ID NO: 68612 - DNA, 33 bp, Homo sapien
atcaaactgattggcatacgtgggcaataaact

SEQ ID NO: 68613 - DNA, 33 bp, Homo sapien
cttaatgacattgttccaggcaaagaagccaaa

SEQ ID NO: 68614 - DNA, 33 bp, Homo sapien
cttaatgacattgttcgaggcaaagaagccaaa

SEQ ID NO: 68615 - DNA, 33 bp, Homo sapien
gggctcggctctggaaactactgtgactttctc

SEQ ID NO: 68616 - DNA, 33 bp, Homo sapien
gggctcggctctggaagctactgtgactttctc

SEQ ID NO: 68617 - DNA, 33 bp, Homo sapien
tggccatactacggggaaagtattattagacat

SEQ ID NO: 68618 - DNA, 33 bp, Homo sapien
tggccatactacgggggaagtattattagacat

SEQ ID NO: 68619 - DNA, 33 bp, Homo sapien
tgtgattctctaagaacaagttgtcacgggagt

SEQ ID NO: 68620 - DNA, 33 bp, Homo sapien
tgtgattctctaagaataagttgtcacgggagt

SEQ ID NO: 68621 - DNA, 33 bp, Homo sapien
cccaacaaagtgctgcactgcgaagcgtttcac

SEQ ID NO: 68622 - DNA, 33 bp, Homo sapien
cccaacaaagtgctgcgctgcgaagcgtttcac

SEQ ID NO: 68623 - DNA, 33 bp, Homo sapien
ttctctctataatctcaaattcaggtttccaag

SEQ ID NO: 68624 - DNA, 33 bp, Homo sapien
ttctctctataatctcgaattcaggtttccaag

SEQ ID NO: 68625 - DNA, 33 bp, Homo sapien
ccatctcaggagttcccagttccgagtgtttca

SEQ ID NO: 68626 - DNA, 33 bp, Homo sapien
ccatctcaggagttcctagttccgagtgtttca

SEQ ID NO: 68627 - DNA, 33 bp, Homo sapien
tagctctatcctttaacccagtcaatgtcagtc

SEQ ID NO: 68628 - DNA, 33 bp, Homo sapien
tagctctatcctttaatccagtcaatgtcagtc

SEQ ID NO: 68629 - DNA, 33 bp, Homo sapien
taaaatattagaaagcaatggaaattttagggc

SEQ ID NO: 68630 - DNA, 33 bp, Homo sapien
taaaatattagaaagcgatggaaattttagggc

SEQ ID NO: 68631 - DNA, 33 bp, Homo sapien
tttaaggagcccttcaagagattctctgatgca

SEQ ID NO: 68632 - DNA, 33 bp, Homo sapien
tttaaggagcccttcaggagattctctgatgca

SEQ ID NO: 68633 - DNA, 33 bp, Homo sapien
ggaagaaatgtgtcagaaaataacttctttact

SEQ ID NO: 68634 - DNA, 33 bp, Homo sapien
ggaagaaatgtgtcaggaaataacttctttact

SEQ ID NO: 68635 - DNA, 33 bp, Homo sapien
ctttggttaaaaaaaaactctcatttctgtggg

SEQ ID NO: 68636 - DNA, 33 bp, Homo sapien
ctttggttaaaaaaaacctctcatttctgtggg

SEQ ID NO: 68637 - DNA, 33 bp, Homo sapien
ttctctcttggtagaaagtggggcctgaataaa

SEQ ID NO: 68638 - DNA, 33 bp, Homo sapien
ttctctcttggtagaaggtggggcctgaataaa

SEQ ID NO: 68639 - DNA, 33 bp, Homo sapien
taaatgacgacataaaaccagctgaacttagtg

SEQ ID NO: 68640 - DNA, 33 bp, Homo sapien
taaatgacgacataaagccagctgaacttagtg

SEQ ID NO: 68641 - DNA, 33 bp, Homo sapien
ttcactccatataggaccaattgttcggtgtgt

SEQ ID NO: 68642 - DNA, 33 bp, Homo sapien
ttcactccatataggatcaattgttcggtgtgt

SEQ ID NO: 68643 - DNA, 33 bp, Homo sapien
tgtatttgactaaacaactgggtatcgtagcct

SEQ ID NO: 68644 - DNA, 33 bp, Homo sapien
tgtatttgactaaacagctgggtatcgtagcct

SEQ ID NO: 68645 - DNA, 33 bp, Homo sapien
agtctgaatggacggaagaagaggcaatgacaa

SEQ ID NO: 68646 - DNA, 33 bp, Homo sapien
agtctgaatggacggaggaagaggcaatgacaa

SEQ ID NO: 68647 - DNA, 33 bp, Homo sapien
atgtcattttcccgaacggtaggactgaatagt

SEQ ID NO: 68648 - DNA, 33 bp, Homo sapien
atgtcattttcccgaatggtaggactgaatagt

SEQ ID NO: 68649 - DNA, 33 bp, Homo sapien
tgacaatgtgtgcttccattctccctcagcatc

SEQ ID NO: 68650 - DNA, 33 bp, Homo sapien
tgacaatgtgtgcttctattctccctcagcatc

SEQ ID NO: 68651 - DNA, 33 bp, Homo sapien
agcccaagttccccaactctctcatggaatcct

SEQ ID NO: 68652 - DNA, 33 bp, Homo sapien
agcccaagttccccaagtctctcatggaatcct

SEQ ID NO: 68653 - DNA, 33 bp, Homo sapien
gtctctttgtttggaaactacactcaggagaat

SEQ ID NO: 68654 - DNA, 33 bp, Homo sapien
gtctctttgtttggaatctacactcaggagaat

SEQ ID NO: 68655 - DNA, 33 bp, Homo sapien
tctctcttaatgaatcaaactattctttgcatt

SEQ ID NO: 68656 - DNA, 33 bp, Homo sapien
tctctcttaatgaatcgaactattctttgcatt

SEQ ID NO: 68657 - DNA, 33 bp, Homo sapien
gcccgcctgctgcatccactcagaataaactca

SEQ ID NO: 68658 - DNA, 33 bp, Homo sapien
gcccgcctgctgcatcgactcagaataaactca

SEQ ID NO: 68659 - DNA, 33 bp, Homo sapien
taatgagagtttctaacgctcagattggcagga

SEQ ID NO: 68660 - DNA, 33 bp, Homo sapien
taatgagagtttctaatgctcagattggcagga

SEQ ID NO: 68661 - DNA, 33 bp, Homo sapien
tctttactaaacggccaaatcatgatacttttt

SEQ ID NO: 68662 - DNA, 33 bp, Homo sapien
tctttactaaacggcccaatcatgatacttttt

SEQ ID NO: 68663 - DNA, 33 bp, Homo sapien
atctccgtgtttttcaagtcaccatagtgagga

SEQ ID NO: 68664 - DNA, 33 bp, Homo sapien
atctccgtgtttttcaggtcaccatagtgagga

SEQ ID NO: 68665 - DNA, 33 bp, Homo sapien
aggaagcaaaccacaactgaatcggcttggcaa

SEQ ID NO: 68666 - DNA, 33 bp, Homo sapien
aggaagcaaaccacaattgaatcggcttggcaa

SEQ ID NO: 68667 - DNA, 33 bp, Homo sapien
tttcaggagacagttacgtgtaaaatattaatt

SEQ ID NO: 68668 - DNA, 33 bp, Homo sapien
tttcaggagacagttatgtgtaaaatattaatt

SEQ ID NO: 68669 - DNA, 33 bp, Homo sapien
tcggttaaagggccccacttagtcctgcaatca

SEQ ID NO: 68670 - DNA, 33 bp, Homo sapien
tcggttaaagggccccgcttagtcctgcaatca

SEQ ID NO: 68671 - DNA, 33 bp, Homo sapien
tgactgacttaaagaaacgaggaagcagtgtaa

SEQ ID NO: 68672 - DNA, 33 bp, Homo sapien
tgactgacttaaagaaccgaggaagcagtgtaa

SEQ ID NO: 68673 - DNA, 33 bp, Homo sapien
tacatcttgagagacccggattctgctattctg

SEQ ID NO: 68674 - DNA, 33 bp, Homo sapien
tacatcttgagagacctggattctgctattctg

SEQ ID NO: 68675 - DNA, 33 bp, Homo sapien
tctgcagccaacttgccgagagaccgggagtct

SEQ ID NO: 68676 - DNA, 33 bp, Homo sapien
tctgcagccaacttgcggagagaccgggagtct

SEQ ID NO: 68677 - DNA, 33 bp, Homo sapien
actagtcacttgctctaaaaaccttccatggct

SEQ ID NO: 68678 - DNA, 33 bp, Homo sapien
actagtcacttgctctgaaaaccttccatggct

SEQ ID NO: 68679 - DNA, 33 bp, Homo sapien
taacacttaccttaaaacacatacattgtacag

SEQ ID NO: 68680 - DNA, 33 bp, Homo sapien
taacacttaccttaaagcacatacattgtacag

SEQ ID NO: 68681 - DNA, 33 bp, Homo sapien
gagaaaggagctggcacctagctcttcctcaag

SEQ ID NO: 68682 - DNA, 33 bp, Homo sapien
gagaaaggagctggcatctagctcttcctcaag

SEQ ID NO: 68683 - DNA, 33 bp, Homo sapien
caatgtcacttcaagaaagttatcagacctcat

SEQ ID NO: 68684 - DNA, 33 bp, Homo sapien
caatgtcacttcaagagagttatcagacctcat

SEQ ID NO: 68685 - DNA, 33 bp, Homo sapien
cctcccactcataggagtaagtgtggacctcat

SEQ ID NO: 68686 - DNA, 33 bp, Homo sapien
cctcccactcataggattaagtgtggacctcat

SEQ ID NO: 68687 - DNA, 33 bp, Homo sapien
acaggggccgttaagacacacgcgagaggtttc

SEQ ID NO: 68688 - DNA, 33 bp, Homo sapien
acaggggccgttaagatacacgcgagaggtttc

SEQ ID NO: 68689 - DNA, 33 bp, Homo sapien
cttgaggattaggctgaatcttactcacctcca

SEQ ID NO: 68690 - DNA, 33 bp, Homo sapien
cttgaggattaggctgcatcttactcacctcca

SEQ ID NO: 68691 - DNA, 33 bp, Homo sapien
ctgaccttgaataagtcaaagtccactgattct

SEQ ID NO: 68692 - DNA, 33 bp, Homo sapien
ctgaccttgaataagtgaaagtccactgattct

SEQ ID NO: 68693 - DNA, 33 bp, Homo sapien
catctttccagaaggcagatggaccaattccat

SEQ ID NO: 68694 - DNA, 33 bp, Homo sapien
catctttccagaaggcggatggaccaattccat

SEQ ID NO: 68695 - DNA, 33 bp, Homo sapien
cttagctatctctttaagggttcctagaatatc

SEQ ID NO: 68696 - DNA, 33 bp, Homo sapien
cttagctatctctttaggggttcctagaatatc

SEQ ID NO: 68697 - DNA, 33 bp, Homo sapien
cccaaactacatgaaaatatcagctgggacgcc

SEQ ID NO: 68698 - DNA, 33 bp, Homo sapien
cccaaactacatgaaactatcagctgggacgcc

SEQ ID NO: 68699 - DNA, 33 bp, Homo sapien
tccccattgccctgagaaggaatggtgtacggc

SEQ ID NO: 68700 - DNA, 33 bp, Homo sapien
tccccattgccctgagtaggaatggtgtacggc

SEQ ID NO: 68701 - DNA, 33 bp, Homo sapien
tcttctctaaccctaaaccacagacatcaagga

SEQ ID NO: 68702 - DNA, 33 bp, Homo sapien
tcttctctaaccctaagccacagacatcaagga

SEQ ID NO: 68703 - DNA, 33 bp, Homo sapien
gcttcagctgcaggtcactttcaggcttggctt

SEQ ID NO: 68704 - DNA, 33 bp, Homo sapien
gcttcagctgcaggtcgctttcaggcttggctt

SEQ ID NO: 68705 - DNA, 33 bp, Homo sapien
cacatcttcctcttgcactagactacaagctcc

SEQ ID NO: 68706 - DNA, 33 bp, Homo sapien
cacatcttcctcttgcgctagactacaagctcc

SEQ ID NO: 68707 - DNA, 33 bp, Homo sapien
tggggctctagctagacgtggctcttccgctgg

SEQ ID NO: 68708 - DNA, 33 bp, Homo sapien
tggggctctagctagatgtggctcttccgctgg

SEQ ID NO: 68709 - DNA, 33 bp, Homo sapien
aataggtaagaaaggcaactggtttcctctgcc

SEQ ID NO: 68710 - DNA, 33 bp, Homo sapien
aataggtaagaaaggcgactggtttcctctgcc

SEQ ID NO: 68711 - DNA, 33 bp, Homo sapien
gagcctggggacagagaatcaacactgcatctc

SEQ ID NO: 68712 - DNA, 33 bp, Homo sapien
gagcctggggacagagcatcaacactgcatctc

SEQ ID NO: 68713 - DNA, 33 bp, Homo sapien
ttttctgctttcacctcaggcgtttctccagaa

SEQ ID NO: 68714 - DNA, 33 bp, Homo sapien
ttttctgctttcaccttaggcgtttctccagaa

SEQ ID NO: 68715 - DNA, 33 bp, Homo sapien
gctcagtagatgtttaaggactaaatgggcctc

SEQ ID NO: 68716 - DNA, 33 bp, Homo sapien
gctcagtagatgtttatggactaaatgggcctc

SEQ ID NO: 68717 - DNA, 33 bp, Homo sapien
agctcaagaaagtccaacatcttacttagtgtc

SEQ ID NO: 68718 - DNA, 33 bp, Homo sapien
agctcaagaaagtccagcatcttacttagtgtc

SEQ ID NO: 68719 - DNA, 33 bp, Homo sapien
cagataaccattagagcagagtcattcttttac

SEQ ID NO: 68720 - DNA, 33 bp, Homo sapien
cagataaccattagaggagagtcattcttttac

SEQ ID NO: 68721 - DNA, 33 bp, Homo sapien
cctgtccggatctatccatgtggtgtcttcccc

SEQ ID NO: 68722 - DNA, 33 bp, Homo sapien
cctgtccggatctatctatgtggtgtcttcccc

SEQ ID NO: 68723 - DNA, 33 bp, Homo sapien
ctaactcttatggtaaaactgcctgtccggatc

SEQ ID NO: 68724 - DNA, 33 bp, Homo sapien
ctaactcttatggtaatactgcctgtccggatc

SEQ ID NO: 68725 - DNA, 33 bp, Homo sapien
cagactgtttgctaagccaccaacagctgatga

SEQ ID NO: 68726 - DNA, 33 bp, Homo sapien
cagactgtttgctaagtcaccaacagctgatga

SEQ ID NO: 68727 - DNA, 33 bp, Homo sapien
ttggctttggcagtcacgcagtcggtctgcttg

SEQ ID NO: 68728 - DNA, 33 bp, Homo sapien
ttggctttggcagtcatgcagtcggtctgcttg

SEQ ID NO: 68729 - DNA, 33 bp, Homo sapien
cagcttcactgacagcaaatcagcagatgttat

SEQ ID NO: 68730 - DNA, 33 bp, Homo sapien
cagcttcactgacagcgaatcagcagatgttat

SEQ ID NO: 68731 - DNA, 33 bp, Homo sapien
tctaggcctggccccacctctgacttcaagggt

SEQ ID NO: 68732 - DNA, 33 bp, Homo sapien
tctaggcctggccccatctctgacttcaagggt

SEQ ID NO: 68733 - DNA, 33 bp, Homo sapien
atggagctgtgattacaaggcaaagtctgaggg

SEQ ID NO: 68734 - DNA, 33 bp, Homo sapien
atggagctgtgattacgaggcaaagtctgaggg

SEQ ID NO: 68735 - DNA, 33 bp, Homo sapien
gaaataaacactgaccgatcattccgatgaaac

SEQ ID NO: 68736 - DNA, 33 bp, Homo sapien
gaaataaacactgacctatcattccgatgaaac

SEQ ID NO: 68737 - DNA, 33 bp, Homo sapien
ctttgaggtcagcattcaacataagggcctaga

SEQ ID NO: 68738 - DNA, 33 bp, Homo sapien
ctttgaggtcagcattgaacataagggcctaga

SEQ ID NO: 68739 - DNA, 33 bp, Homo sapien
gacaagattagctccactaatttttataagtct

SEQ ID NO: 68740 - DNA, 33 bp, Homo sapien
gacaagattagctccagtaatttttataagtct

SEQ ID NO: 68741 - DNA, 33 bp, Homo sapien
taaatgtagtttttagccctaatgtaggcattg

SEQ ID NO: 68742 - DNA, 33 bp, Homo sapien
taaatgtagtttttagtcctaatgtaggcattg

SEQ ID NO: 68743 - DNA, 33 bp, Homo sapien
attcttttcttttctacggcctgagattgccct

SEQ ID NO: 68744 - DNA, 33 bp, Homo sapien
attcttttcttttctatggcctgagattgccct

SEQ ID NO: 68745 - DNA, 33 bp, Homo sapien
gtagaatagattagaacaagaatatgctggagg

SEQ ID NO: 68746 - DNA, 33 bp, Homo sapien
gtagaatagattagaataagaatatgctggagg

SEQ ID NO: 68747 - DNA, 33 bp, Homo sapien
aaaacagaggcctagaaaaatgaagacccaaga

SEQ ID NO: 68748 - DNA, 33 bp, Homo sapien
aaaacagaggcctagagaaatgaagacccaaga

SEQ ID NO: 68749 - DNA, 33 bp, Homo sapien
atccagtgggctcaacagtaggcaaagtgcagc

SEQ ID NO: 68750 - DNA, 33 bp, Homo sapien
atccagtgggctcaacggtaggcaaagtgcagc

SEQ ID NO: 68751 - DNA, 33 bp, Homo sapien
tatagctcctttcagcactttttaaggagcata

SEQ ID NO: 68752 - DNA, 33 bp, Homo sapien
tatagctcctttcagcgctttttaaggagcata

SEQ ID NO: 68753 - DNA, 33 bp, Homo sapien
gtttgtttctatcaccaaatttttcttttttga

SEQ ID NO: 68754 - DNA, 33 bp, Homo sapien
gtttgtttctatcacctaatttttcttttttga

SEQ ID NO: 68755 - DNA, 33 bp, Homo sapien
tataaaaaatgtgaaaactaacttagagaaggc

SEQ ID NO: 68756 - DNA, 33 bp, Homo sapien
tataaaaaatgtgaaagctaacttagagaaggc

SEQ ID NO: 68757 - DNA, 33 bp, Homo sapien
cagcactggggacaccaaactcaacaaaacaaa

SEQ ID NO: 68758 - DNA, 33 bp, Homo sapien
cagcactggggacaccgaactcaacaaaacaaa

SEQ ID NO: 68759 - DNA, 33 bp, Homo sapien
aacacaccttctctccaagagatttctggctta

SEQ ID NO: 68760 - DNA, 33 bp, Homo sapien
aacacaccttctctccgagagatttctggctta

SEQ ID NO: 68761 - DNA, 33 bp, Homo sapien
tttctcacctgttgaacatgctgtctcttttct

SEQ ID NO: 68762 - DNA, 33 bp, Homo sapien
tttctcacctgttgaagatgctgtctcttttct

SEQ ID NO: 68763 - DNA, 33 bp, Homo sapien
gcacctgaggaaagaacccatgtcctattgtcc

SEQ ID NO: 68764 - DNA, 33 bp, Homo sapien
gcacctgaggaaagaatccatgtcctattgtcc

SEQ ID NO: 68765 - DNA, 33 bp, Homo sapien
tgtcctttacacctaccgtagcccaaacctaca

SEQ ID NO: 68766 - DNA, 33 bp, Homo sapien
tgtcctttacacctactgtagcccaaacctaca

SEQ ID NO: 68767 - DNA, 33 bp, Homo sapien
tctgagacttacattacccaacattttacagct

SEQ ID NO: 68768 - DNA, 33 bp, Homo sapien
tctgagacttacattatccaacattttacagct

SEQ ID NO: 68769 - DNA, 33 bp, Homo sapien
tcttgtatggcacaaccaaaccccaaaactaga

SEQ ID NO: 68770 - DNA, 33 bp, Homo sapien
tcttgtatggcacaacgaaaccccaaaactaga

SEQ ID NO: 68771 - DNA, 33 bp, Homo sapien
cacaggatttgcattcacttctgttgtctgccc

SEQ ID NO: 68772 - DNA, 33 bp, Homo sapien
cacaggatttgcattcgcttctgttgtctgccc

SEQ ID NO: 68773 - DNA, 33 bp, Homo sapien
aatgggtggaaaataaagtggtattcagaagaa

SEQ ID NO: 68774 - DNA, 33 bp, Homo sapien
aatgggtggaaaataatgtggtattcagaagaa

SEQ ID NO: 68775 - DNA, 33 bp, Homo sapien
aagattgacgctatcaagcaagatcaagagtgt

SEQ ID NO: 68776 - DNA, 33 bp, Homo sapien
aagattgacgctatcaggcaagatcaagagtgt

SEQ ID NO: 68777 - DNA, 33 bp, Homo sapien
caagcgtgggaattccagatttgttattaaagc

SEQ ID NO: 68778 - DNA, 33 bp, Homo sapien
caagcgtgggaattccggatttgttattaaagc

SEQ ID NO: 68779 - DNA, 33 bp, Homo sapien
cctgagaccgcccatccgataccctaactcgcc

SEQ ID NO: 68780 - DNA, 33 bp, Homo sapien
cctgagaccgcccatctgataccctaactcgcc

SEQ ID NO: 68781 - DNA, 33 bp, Homo sapien
tcagccagggtcaccacatccagttgagcaaat

SEQ ID NO: 68782 - DNA, 33 bp, Homo sapien
tcagccagggtcaccatatccagttgagcaaat

SEQ ID NO: 68783 - DNA, 33 bp, Homo sapien
ttgactcaatttggcaaaatcgtatttcaaatc

SEQ ID NO: 68784 - DNA, 33 bp, Homo sapien
ttgactcaatttggcagaatcgtatttcaaatc

SEQ ID NO: 68785 - DNA, 33 bp, Homo sapien
acgggtatgagagctactaacaggaactttgac

SEQ ID NO: 68786 - DNA, 33 bp, Homo sapien
acgggtatgagagctattaacaggaactttgac

SEQ ID NO: 68787 - DNA, 33 bp, Homo sapien
ctgttggttcagaaaaacactagagagaaagaa

SEQ ID NO: 68788 - DNA, 33 bp, Homo sapien
ctgttggttcagaaaagcactagagagaaagaa

SEQ ID NO: 68789 - DNA, 33 bp, Homo sapien
caagagagggtatgcaagcaaatcatcgtccta

SEQ ID NO: 68790 - DNA, 33 bp, Homo sapien
caagagagggtatgcacgcaaatcatcgtccta

SEQ ID NO: 68791 - DNA, 33 bp, Homo sapien
ggctggggcaaacaaacatcctagcaattggag

SEQ ID NO: 68792 - DNA, 33 bp, Homo sapien
ggctggggcaaacaaatatcctagcaattggag

SEQ ID NO: 68793 - DNA, 33 bp, Homo sapien
cttcatgtcccttgtgcactttctactggtgtg

SEQ ID NO: 68794 - DNA, 33 bp, Homo sapien
cttcatgtcccttgtgtactttctactggtgtg

SEQ ID NO: 68795 - DNA, 33 bp, Homo sapien
agtctctataatgccaatcatggtctagatgcc

SEQ ID NO: 68796 - DNA, 33 bp, Homo sapien
agtctctataatgccagtcatggtctagatgcc

SEQ ID NO: 68797 - DNA, 33 bp, Homo sapien
ctaaacatctaattaccataacatgctctgaga

SEQ ID NO: 68798 - DNA, 33 bp, Homo sapien
ctaaacatctaattactataacatgctctgaga

SEQ ID NO: 68799 - DNA, 33 bp, Homo sapien
tagatgtagtgcaacacatttgtgagcaggctg

SEQ ID NO: 68800 - DNA, 33 bp, Homo sapien
tagatgtagtgcaacatatttgtgagcaggctg

SEQ ID NO: 68801 - DNA, 33 bp, Homo sapien
aatggggaaatgtttaccttatgccaaatcctc

SEQ ID NO: 68802 - DNA, 33 bp, Homo sapien
aatggggaaatgtttatcttatgccaaatcctc

SEQ ID NO: 68803 - DNA, 33 bp, Homo sapien
tgacaatatttcctgacgtttcaaaggccaaga

SEQ ID NO: 68804 - DNA, 33 bp, Homo sapien
tgacaatatttcctgatgtttcaaaggccaaga

SEQ ID NO: 68805 - DNA, 33 bp, Homo sapien
agagaaggtaaagagacactacgggattgtcct

SEQ ID NO: 68806 - DNA, 33 bp, Homo sapien
agagaaggtaaagagatactacgggattgtcct

SEQ ID NO: 68807 - DNA, 33 bp, Homo sapien
ttatgagaaagtttgaaagatggcctttagccc

SEQ ID NO: 68808 - DNA, 33 bp, Homo sapien
ttatgagaaagtttgagagatggcctttagccc

SEQ ID NO: 68809 - DNA, 33 bp, Homo sapien
tggatccatccgataacaggacattcaccacct

SEQ ID NO: 68810 - DNA, 33 bp, Homo sapien
tggatccatccgataataggacattcaccacct

SEQ ID NO: 68811 - DNA, 33 bp, Homo sapien
gattagcatccctataggactctttgccttcaa

SEQ ID NO: 68812 - DNA, 33 bp, Homo sapien
gattagcatccctatatgactctttgccttcaa

SEQ ID NO: 68813 - DNA, 33 bp, Homo sapien
gtttcacagccctcaccgtcaggaaagtcccct

SEQ ID NO: 68814 - DNA, 33 bp, Homo sapien
gtttcacagccctcactgtcaggaaagtcccct

SEQ ID NO: 68815 - DNA, 33 bp, Homo sapien
gatggataagatggaaaggacggtaggtgagga

SEQ ID NO: 68816 - DNA, 33 bp, Homo sapien
gatggataagatggaagggacggtaggtgagga

SEQ ID NO: 68817 - DNA, 33 bp, Homo sapien
ttacacgtagaccataagttagtgatagttgca

SEQ ID NO: 68818 - DNA, 33 bp, Homo sapien
ttacacgtagaccataggttagtgatagttgca

SEQ ID NO: 68819 - DNA, 33 bp, Homo sapien
gccataatccaggataaaccaattaatgcaaat

SEQ ID NO: 68820 - DNA, 33 bp, Homo sapien
gccataatccaggatagaccaattaatgcaaat

SEQ ID NO: 68821 - DNA, 33 bp, Homo sapien
tgcaaccgcagcaatgcatatctgtggctcacc

SEQ ID NO: 68822 - DNA, 33 bp, Homo sapien
tgcaaccgcagcaatgtatatctgtggctcacc

SEQ ID NO: 68823 - DNA, 33 bp, Homo sapien
aatactagagtagacaatgaatactggcaggtg

SEQ ID NO: 68824 - DNA, 33 bp, Homo sapien
aatactagagtagacactgaatactggcaggtg

SEQ ID NO: 68825 - DNA, 33 bp, Homo sapien
atatctgcacaaacaccgagttctaggctttcc

SEQ ID NO: 68826 - DNA, 33 bp, Homo sapien
atatctgcacaaacactgagttctaggctttcc

SEQ ID NO: 68827 - DNA, 33 bp, Homo sapien
tgctatgaacactaagccaagaaatttcaccta

SEQ ID NO: 68828 - DNA, 33 bp, Homo sapien
tgctatgaacactaaggcaagaaatttcaccta

SEQ ID NO: 68829 - DNA, 33 bp, Homo sapien
cttaaacagagagcaaaaaagtgaggataacgg

SEQ ID NO: 68830 - DNA, 33 bp, Homo sapien
cttaaacagagagcaagaaagtgaggataacgg

SEQ ID NO: 68831 - DNA, 33 bp, Homo sapien
tcccaccttgatacaacttcttattaaagtccc

SEQ ID NO: 68832 - DNA, 33 bp, Homo sapien
tcccaccttgatacaatttcttattaaagtccc

SEQ ID NO: 68833 - DNA, 33 bp, Homo sapien
tgcctggatgaaatgacgtggtagcaccttttt

SEQ ID NO: 68834 - DNA, 33 bp, Homo sapien
tgcctggatgaaatgatgtggtagcaccttttt

SEQ ID NO: 68835 - DNA, 33 bp, Homo sapien
caactgtgaaatttcaacgtccacattaatcac

SEQ ID NO: 68836 - DNA, 33 bp, Homo sapien
caactgtgaaatttcagcgtccacattaatcac

SEQ ID NO: 68837 - DNA, 33 bp, Homo sapien
aacactttcatttatcaagccgagattaggtag

SEQ ID NO: 68838 - DNA, 33 bp, Homo sapien
aacactttcatttatcgagccgagattaggtag

SEQ ID NO: 68839 - DNA, 33 bp, Homo sapien
ttccatgaagttttaacgtgatgcccttctgct

SEQ ID NO: 68840 - DNA, 33 bp, Homo sapien
ttccatgaagttttaatgtgatgcccttctgct

SEQ ID NO: 68841 - DNA, 33 bp, Homo sapien
atctttctgagaagaaaagcaatgttagaaaag

SEQ ID NO: 68842 - DNA, 33 bp, Homo sapien
atctttctgagaagaagagcaatgttagaaaag

SEQ ID NO: 68843 - DNA, 33 bp, Homo sapien
gagatactccttctcacatctaccaggatgcat

SEQ ID NO: 68844 - DNA, 33 bp, Homo sapien
gagatactccttctcatatctaccaggatgcat

SEQ ID NO: 68845 - DNA, 33 bp, Homo sapien
aaattgaggtccaaagacatagaacttgtccaa

SEQ ID NO: 68846 - DNA, 33 bp, Homo sapien
aaattgaggtccaaagtcatagaacttgtccaa

SEQ ID NO: 68847 - DNA, 33 bp, Homo sapien
ccttaggctatcaggaagtctgttctcctgact

SEQ ID NO: 68848 - DNA, 33 bp, Homo sapien
ccttaggctatcaggatgtctgttctcctgact

SEQ ID NO: 68849 - DNA, 33 bp, Homo sapien
tctgtgcatttggtcagaagctcttggttgatt

SEQ ID NO: 68850 - DNA, 33 bp, Homo sapien
tctgtgcatttggtcataagctcttggttgatt

SEQ ID NO: 68851 - DNA, 33 bp, Homo sapien
agtttccggaaatacaataaaggcagagtttga

SEQ ID NO: 68852 - DNA, 33 bp, Homo sapien
agtttccggaaatacagtaaaggcagagtttga

SEQ ID NO: 68853 - DNA, 33 bp, Homo sapien
gggaatcagaaaacacaatgatggaaatggaga

SEQ ID NO: 68854 - DNA, 33 bp, Homo sapien
gggaatcagaaaacacgatgatggaaatggaga

SEQ ID NO: 68855 - DNA, 33 bp, Homo sapien
gatacatagtgaattccattgtggacagccaat

SEQ ID NO: 68856 - DNA, 33 bp, Homo sapien
gatacatagtgaattctattgtggacagccaat

SEQ ID NO: 68857 - DNA, 33 bp, Homo sapien
agaaccagtgctgacaaaataaaatggtaccca

SEQ ID NO: 68858 - DNA, 33 bp, Homo sapien
agaaccagtgctgacagaataaaatggtaccca

SEQ ID NO: 68859 - DNA, 33 bp, Homo sapien
agtgggtatgattatccctaattcccagctgaa

SEQ ID NO: 68860 - DNA, 33 bp, Homo sapien
agtgggtatgattatctctaattcccagctgaa

SEQ ID NO: 68861 - DNA, 33 bp, Homo sapien
aggaaggggtgtgcagacaggaaagagaggggt

SEQ ID NO: 68862 - DNA, 33 bp, Homo sapien
aggaaggggtgtgcagccaggaaagagaggggt

SEQ ID NO: 68863 - DNA, 33 bp, Homo sapien
ctcctgcttccaccacaaaattggaaagaatca

SEQ ID NO: 68864 - DNA, 33 bp, Homo sapien
ctcctgcttccaccacgaaattggaaagaatca

SEQ ID NO: 68865 - DNA, 33 bp, Homo sapien
tttaaagcatccactcaaaaaagaataccttcc

SEQ ID NO: 68866 - DNA, 33 bp, Homo sapien
tttaaagcatccactctaaaaagaataccttcc

SEQ ID NO: 68867 - DNA, 33 bp, Homo sapien
tgacctcctcacattcaacgagctgttcagcct

SEQ ID NO: 68868 - DNA, 33 bp, Homo sapien
tgacctcctcacattcgacgagctgttcagcct

SEQ ID NO: 68869 - DNA, 33 bp, Homo sapien
gactatgggaaagcaaaatcattattcaaagaa

SEQ ID NO: 68870 - DNA, 33 bp, Homo sapien
gactatgggaaagcaacatcattattcaaagaa

SEQ ID NO: 68871 - DNA, 33 bp, Homo sapien
acatatggtgttacaccgggcttatcaatggat

SEQ ID NO: 68872 - DNA, 33 bp, Homo sapien
acatatggtgttacacggggcttatcaatggat

SEQ ID NO: 68873 - DNA, 33 bp, Homo sapien
actacaaatgacaagcaaaatgcttcaagactg

SEQ ID NO: 68874 - DNA, 33 bp, Homo sapien
actacaaatgacaagctaaatgcttcaagactg

SEQ ID NO: 68875 - DNA, 33 bp, Homo sapien
gagtcaaagagaaagaacaaagggacctagagt

SEQ ID NO: 68876 - DNA, 33 bp, Homo sapien
gagtcaaagagaaagaccaaagggacctagagt

SEQ ID NO: 68877 - DNA, 33 bp, Homo sapien
actttgaacatggtgagtacttttaataaatgt

SEQ ID NO: 68878 - DNA, 33 bp, Homo sapien
actttgaacatggtgattacttttaataaatgt

SEQ ID NO: 68879 - DNA, 33 bp, Homo sapien
ttgcaaggctagtgaccgatgataaatcacttg

SEQ ID NO: 68880 - DNA, 33 bp, Homo sapien
ttgcaaggctagtgactgatgataaatcacttg

SEQ ID NO: 68881 - DNA, 33 bp, Homo sapien
ctccattaaacgttcccgaaggctctggcaaaa

SEQ ID NO: 68882 - DNA, 33 bp, Homo sapien
ctccattaaacgttcctgaaggctctggcaaaa

SEQ ID NO: 68883 - DNA, 33 bp, Homo sapien
attctcttcttccaaactacgtaaaacctgtca

SEQ ID NO: 68884 - DNA, 33 bp, Homo sapien
attctcttcttccaaattacgtaaaacctgtca

SEQ ID NO: 68885 - DNA, 33 bp, Homo sapien
gagaaggcatgcctacacaacagatactcaagg

SEQ ID NO: 68886 - DNA, 33 bp, Homo sapien
gagaaggcatgcctacgcaacagatactcaagg

SEQ ID NO: 68887 - DNA, 33 bp, Homo sapien
attctttacttgttacaaacattttacagtttt

SEQ ID NO: 68888 - DNA, 33 bp, Homo sapien
attctttacttgttacgaacattttacagtttt

SEQ ID NO: 68889 - DNA, 33 bp, Homo sapien
atacaagacagacaaacggtagagctgtcataa

SEQ ID NO: 68890 - DNA, 33 bp, Homo sapien
atacaagacagacaaatggtagagctgtcataa

SEQ ID NO: 68891 - DNA, 33 bp, Homo sapien
aacctaaacatccctaagcaaatctaagcagta

SEQ ID NO: 68892 - DNA, 33 bp, Homo sapien
aacctaaacatccctaggcaaatctaagcagta

SEQ ID NO: 68893 - DNA, 33 bp, Homo sapien
agcagactgtgatcagcaagtaaataaataact

SEQ ID NO: 68894 - DNA, 33 bp, Homo sapien
agcagactgtgatcagtaagtaaataaataact

SEQ ID NO: 68895 - DNA, 33 bp, Homo sapien
tcttccatctgcaagaagaagattgctgactct

SEQ ID NO: 68896 - DNA, 33 bp, Homo sapien
tcttccatctgcaagacgaagattgctgactct

SEQ ID NO: 68897 - DNA, 33 bp, Homo sapien
gggcttctagtctcatcacctaatcaccagacg

SEQ ID NO: 68898 - DNA, 33 bp, Homo sapien
gggcttctagtctcattacctaatcaccagacg

SEQ ID NO: 68899 - DNA, 33 bp, Homo sapien
actttactgaactgaacagtaagagaaagcaag

SEQ ID NO: 68900 - DNA, 33 bp, Homo sapien
actttactgaactgaatagtaagagaaagcaag

SEQ ID NO: 68901 - DNA, 33 bp, Homo sapien
catctcctttcatccaatctaatgtcaacaaaa

SEQ ID NO: 68902 - DNA, 33 bp, Homo sapien
catctcctttcatccattctaatgtcaacaaaa

SEQ ID NO: 68903 - DNA, 33 bp, Homo sapien
ttagtgcagcaggtaaactttgagttgtccact

SEQ ID NO: 68904 - DNA, 33 bp, Homo sapien
ttagtgcagcaggtaacctttgagttgtccact

SEQ ID NO: 68905 - DNA, 33 bp, Homo sapien
gaaaacatgacacacaaagataaggagtaggaa

SEQ ID NO: 68906 - DNA, 33 bp, Homo sapien
gaaaacatgacacacagagataaggagtaggaa

SEQ ID NO: 68907 - DNA, 33 bp, Homo sapien
tgggaggtcatggtaccctagctcggcattttc

SEQ ID NO: 68908 - DNA, 33 bp, Homo sapien
tgggaggtcatggtactctagctcggcattttc

SEQ ID NO: 68909 - DNA, 33 bp, Homo sapien
ctgccttagctctctccatggatcaggtgggca

SEQ ID NO: 68910 - DNA, 33 bp, Homo sapien
ctgccttagctctctctatggatcaggtgggca

SEQ ID NO: 68911 - DNA, 33 bp, Homo sapien
taagttcctacctaacacagatgtgaaaagaat

SEQ ID NO: 68912 - DNA, 33 bp, Homo sapien
taagttcctacctaactcagatgtgaaaagaat

SEQ ID NO: 68913 - DNA, 33 bp, Homo sapien
tattttcccactaagcagaagttcaggagaaaa

SEQ ID NO: 68914 - DNA, 33 bp, Homo sapien
tattttcccactaagcggaagttcaggagaaaa

SEQ ID NO: 68915 - DNA, 33 bp, Homo sapien
gggtgcacgtcacttgaaatgatgcagacatat

SEQ ID NO: 68916 - DNA, 33 bp, Homo sapien
gggtgcacgtcacttggaatgatgcagacatat

SEQ ID NO: 68917 - DNA, 33 bp, Homo sapien
aatctcagtggcttaacgcaaaggcttatttct

SEQ ID NO: 68918 - DNA, 33 bp, Homo sapien
aatctcagtggcttaatgcaaaggcttatttct

SEQ ID NO: 68919 - DNA, 33 bp, Homo sapien
ctggtgatatagaaacaaggaagacagagcttc

SEQ ID NO: 68920 - DNA, 33 bp, Homo sapien
ctggtgatatagaaacgaggaagacagagcttc

SEQ ID NO: 68921 - DNA, 33 bp, Homo sapien
ggtgaaagaaaagggacatttcagacagaggga

SEQ ID NO: 68922 - DNA, 33 bp, Homo sapien
ggtgaaagaaaagggatatttcagacagaggga

SEQ ID NO: 68923 - DNA, 33 bp, Homo sapien
gagcccactgtgctgcaataaaactgtcagtct

SEQ ID NO: 68924 - DNA, 33 bp, Homo sapien
gagcccactgtgctgcgataaaactgtcagtct

SEQ ID NO: 68925 - DNA, 33 bp, Homo sapien
tggtgtagcataatgactcaacttttatttgcc

SEQ ID NO: 68926 - DNA, 33 bp, Homo sapien
tggtgtagcataatgattcaacttttatttgcc

SEQ ID NO: 68927 - DNA, 33 bp, Homo sapien
cctcagttttctcaacagtaaaatggaacgata

SEQ ID NO: 68928 - DNA, 33 bp, Homo sapien
cctcagttttctcaacggtaaaatggaacgata

SEQ ID NO: 68929 - DNA, 33 bp, Homo sapien
gctctctttttgttcaatccttatgggtgttta

SEQ ID NO: 68930 - DNA, 33 bp, Homo sapien
gctctctttttgttcactccttatgggtgttta

SEQ ID NO: 68931 - DNA, 33 bp, Homo sapien
ttcttctggccaactgcatcacaatatggtaac

SEQ ID NO: 68932 - DNA, 33 bp, Homo sapien
ttcttctggccaactgtatcacaatatggtaac

SEQ ID NO: 68933 - DNA, 33 bp, Homo sapien
tatggaaaataaaagcagaagtttcctgttacc

SEQ ID NO: 68934 - DNA, 33 bp, Homo sapien
tatggaaaataaaagcggaagtttcctgttacc

SEQ ID NO: 68935 - DNA, 33 bp, Homo sapien
caaaataaatgtagtgaataattgagtgaaatt

SEQ ID NO: 68936 - DNA, 33 bp, Homo sapien
caaaataaatgtagtggataattgagtgaaatt

SEQ ID NO: 68937 - DNA, 33 bp, Homo sapien
ttctctcctgccagaactatccagaagtccatg

SEQ ID NO: 68938 - DNA, 33 bp, Homo sapien
ttctctcctgccagaagtatccagaagtccatg

SEQ ID NO: 68939 - DNA, 33 bp, Homo sapien
tacttcaagaagccaacgtgtagtagagaattc

SEQ ID NO: 68940 - DNA, 33 bp, Homo sapien
tacttcaagaagccaatgtgtagtagagaattc

SEQ ID NO: 68941 - DNA, 33 bp, Homo sapien
aatttcatatggatcaccctgaaatatatgtga

SEQ ID NO: 68942 - DNA, 33 bp, Homo sapien
aatttcatatggatcagcctgaaatatatgtga

SEQ ID NO: 68943 - DNA, 33 bp, Homo sapien
tgtcacaaatgatagcaacatttcttcaaggtt

SEQ ID NO: 68944 - DNA, 33 bp, Homo sapien
tgtcacaaatgatagcgacatttcttcaaggtt

SEQ ID NO: 68945 - DNA, 33 bp, Homo sapien
aagtctatgttgctaccaggtttttctgacttg

SEQ ID NO: 68946 - DNA, 33 bp, Homo sapien
aagtctatgttgctactaggtttttctgacttg

SEQ ID NO: 68947 - DNA, 33 bp, Homo sapien
agttaggtctgaaacactgataactaatctata

SEQ ID NO: 68948 - DNA, 33 bp, Homo sapien
agttaggtctgaaacattgataactaatctata

SEQ ID NO: 68949 - DNA, 33 bp, Homo sapien
aatgacttttccaggaccatacaatgaattaaa

SEQ ID NO: 68950 - DNA, 33 bp, Homo sapien
aatgacttttccaggatcatacaatgaattaaa

SEQ ID NO: 68951 - DNA, 33 bp, Homo sapien
tcttgcagacattctacgagtttatctcagcat

SEQ ID NO: 68952 - DNA, 33 bp, Homo sapien
tcttgcagacattctatgagtttatctcagcat

SEQ ID NO: 68953 - DNA, 33 bp, Homo sapien
agttgctagccacatacacctgttaagctatca

SEQ ID NO: 68954 - DNA, 33 bp, Homo sapien
agttgctagccacatatacctgttaagctatca

SEQ ID NO: 68955 - DNA, 33 bp, Homo sapien
ctttgtcttggctgaaatatctttgttctggct

SEQ ID NO: 68956 - DNA, 33 bp, Homo sapien
ctttgtcttggctgaactatctttgttctggct

SEQ ID NO: 68957 - DNA, 33 bp, Homo sapien
gaaaataagtccataaggttctccctgactacc

SEQ ID NO: 68958 - DNA, 33 bp, Homo sapien
gaaaataagtccataatgttctccctgactacc

SEQ ID NO: 68959 - DNA, 33 bp, Homo sapien
aagtttatcttcttaccagctgagggcatgaaa

SEQ ID NO: 68960 - DNA, 33 bp, Homo sapien
aagtttatcttcttactagctgagggcatgaaa

SEQ ID NO: 68961 - DNA, 33 bp, Homo sapien
gaggagcaaatgcttaccaaccattctgaggta

SEQ ID NO: 68962 - DNA, 33 bp, Homo sapien
gaggagcaaatgcttatcaaccattctgaggta

SEQ ID NO: 68963 - DNA, 33 bp, Homo sapien
tacctctcctttcagacgtagttactattatct

SEQ ID NO: 68964 - DNA, 33 bp, Homo sapien
tacctctcctttcagatgtagttactattatct

SEQ ID NO: 68965 - DNA, 33 bp, Homo sapien
gtattcttgaagctgaatacagaattctggtca

SEQ ID NO: 68966 - DNA, 33 bp, Homo sapien
gtattcttgaagctgagtacagaattctggtca

SEQ ID NO: 68967 - DNA, 33 bp, Homo sapien
atggaaaaataaagacacatatccagttagaag

SEQ ID NO: 68968 - DNA, 33 bp, Homo sapien
atggaaaaataaagactcatatccagttagaag

SEQ ID NO: 68969 - DNA, 33 bp, Homo sapien
agatctactgtgaaccaaatgtcaaaaagtacc

SEQ ID NO: 68970 - DNA, 33 bp, Homo sapien
agatctactgtgaacccaatgtcaaaaagtacc

SEQ ID NO: 68971 - DNA, 33 bp, Homo sapien
tgacttttccatttaaagatgtgtccagatttg

SEQ ID NO: 68972 - DNA, 33 bp, Homo sapien
tgacttttccatttaatgatgtgtccagatttg

SEQ ID NO: 68973 - DNA, 33 bp, Homo sapien
aggaattcagcactaggaaattcagagccttct

SEQ ID NO: 68974 - DNA, 33 bp, Homo sapien
aggaattcagcactagtaaattcagagccttct

SEQ ID NO: 68975 - DNA, 33 bp, Homo sapien
ataaccagccttgagagctgttagaggggacaa

SEQ ID NO: 68976 - DNA, 33 bp, Homo sapien
ataaccagccttgagatctgttagaggggacaa

SEQ ID NO: 68977 - DNA, 33 bp, Homo sapien
ggtgagacagaatacactcacatgcaacgagtt

SEQ ID NO: 68978 - DNA, 33 bp, Homo sapien
ggtgagacagaatacagtcacatgcaacgagtt

SEQ ID NO: 68979 - DNA, 33 bp, Homo sapien
agcttcacttgataaggcacatggttcctgaag

SEQ ID NO: 68980 - DNA, 33 bp, Homo sapien
agcttcacttgataagtcacatggttcctgaag

SEQ ID NO: 68981 - DNA, 33 bp, Homo sapien
taatgtcacacctagaaacgacaagaaaagaag

SEQ ID NO: 68982 - DNA, 33 bp, Homo sapien
taatgtcacacctagagacgacaagaaaagaag

SEQ ID NO: 68983 - DNA, 33 bp, Homo sapien
ataatgaacagccaccaaacacccagacgtgtg

SEQ ID NO: 68984 - DNA, 33 bp, Homo sapien
ataatgaacagccaccgaacacccagacgtgtg

SEQ ID NO: 68985 - DNA, 33 bp, Homo sapien
acccacaagtgccctgaaatatttgaacaactc

SEQ ID NO: 68986 - DNA, 33 bp, Homo sapien
acccacaagtgccctgcaatatttgaacaactc

SEQ ID NO: 68987 - DNA, 33 bp, Homo sapien
ccagaacactttcttacgtgctgaagagttatt

SEQ ID NO: 68988 - DNA, 33 bp, Homo sapien
ccagaacactttcttatgtgctgaagagttatt

SEQ ID NO: 68989 - DNA, 33 bp, Homo sapien
tgcccagcagagcccacgtacacaaaaaagtca

SEQ ID NO: 68990 - DNA, 33 bp, Homo sapien
tgcccagcagagcccatgtacacaaaaaagtca

SEQ ID NO: 68991 - DNA, 33 bp, Homo sapien
atgtttagacctttcacgttcagtgtaaatatt

SEQ ID NO: 68992 - DNA, 33 bp, Homo sapien
atgtttagacctttcatgttcagtgtaaatatt

SEQ ID NO: 68993 - DNA, 33 bp, Homo sapien
atgtttgttgacttaaagtagaggagaaaccag

SEQ ID NO: 68994 - DNA, 33 bp, Homo sapien
atgtttgttgacttaaggtagaggagaaaccag

SEQ ID NO: 68995 - DNA, 33 bp, Homo sapien
ggaaaagaaaagatgacggagtgacaaggtttt

SEQ ID NO: 68996 - DNA, 33 bp, Homo sapien
ggaaaagaaaagatgatggagtgacaaggtttt

SEQ ID NO: 68997 - DNA, 33 bp, Homo sapien
gaacaagctctgaccacgtgttattgaaaatta

SEQ ID NO: 68998 - DNA, 33 bp, Homo sapien
gaacaagctctgaccatgtgttattgaaaatta

SEQ ID NO: 68999 - DNA, 33 bp, Homo sapien
tgcttgcttttctgccccatcgaccctgccttg

SEQ ID NO: 69000 - DNA, 33 bp, Homo sapien
tgcttgcttttctgcctcatcgaccctgccttg

SEQ ID NO: 69001 - DNA, 33 bp, Homo sapien
ttttaaagaattaacaaactgaagaacaggagc

SEQ ID NO: 69002 - DNA, 33 bp, Homo sapien
ttttaaagaattaacagactgaagaacaggagc

SEQ ID NO: 69003 - DNA, 33 bp, Homo sapien
aggggctgccaatcacacctctttccccaagca

SEQ ID NO: 69004 - DNA, 33 bp, Homo sapien
aggggctgccaatcacgcctctttccccaagca

SEQ ID NO: 69005 - DNA, 33 bp, Homo sapien
aggaacatgaggcagaactaataactgtcaaca

SEQ ID NO: 69006 - DNA, 33 bp, Homo sapien
aggaacatgaggcagagctaataactgtcaaca

SEQ ID NO: 69007 - DNA, 33 bp, Homo sapien
ctacattgcctggaacaaaatccttccaggggt

SEQ ID NO: 69008 - DNA, 33 bp, Homo sapien
ctacattgcctggaacgaaatccttccaggggt

SEQ ID NO: 69009 - DNA, 33 bp, Homo sapien
taaatgcctttgcagacggatttgatcaaacag

SEQ ID NO: 69010 - DNA, 33 bp, Homo sapien
taaatgcctttgcagatggatttgatcaaacag

SEQ ID NO: 69011 - DNA, 33 bp, Homo sapien
tgctgcagccggcatccagcatgagtgaggttc

SEQ ID NO: 69012 - DNA, 33 bp, Homo sapien
tgctgcagccggcatcgagcatgagtgaggttc

SEQ ID NO: 69013 - DNA, 33 bp, Homo sapien
gttacaaacaacataacgtcaggaaaggtaagt

SEQ ID NO: 69014 - DNA, 33 bp, Homo sapien
gttacaaacaacataatgtcaggaaaggtaagt

SEQ ID NO: 69015 - DNA, 33 bp, Homo sapien
cctacagtgcctttcaatagatttggtagaatc

SEQ ID NO: 69016 - DNA, 33 bp, Homo sapien
cctacagtgcctttcagtagatttggtagaatc

SEQ ID NO: 69017 - DNA, 33 bp, Homo sapien
cacaccagaagctttccctcaggtctccattat

SEQ ID NO: 69018 - DNA, 33 bp, Homo sapien
cacaccagaagctttctctcaggtctccattat

SEQ ID NO: 69019 - DNA, 33 bp, Homo sapien
gcttttactgaaacctaactacaattactagcc

SEQ ID NO: 69020 - DNA, 33 bp, Homo sapien
gcttttactgaaaccttactacaattactagcc

SEQ ID NO: 69021 - DNA, 33 bp, Homo sapien
tgaacaagagtgagtcagaattgccttattcct

SEQ ID NO: 69022 - DNA, 33 bp, Homo sapien
tgaacaagagtgagtcggaattgccttattcct

SEQ ID NO: 69023 - DNA, 33 bp, Homo sapien
tgtagacctgcttcaccggaaagatcatcatga

SEQ ID NO: 69024 - DNA, 33 bp, Homo sapien
tgtagacctgcttcactggaaagatcatcatga

SEQ ID NO: 69025 - DNA, 33 bp, Homo sapien
gtgataacatattgcactaggagaacattatct

SEQ ID NO: 69026 - DNA, 33 bp, Homo sapien
gtgataacatattgcagtaggagaacattatct

SEQ ID NO: 69027 - DNA, 33 bp, Homo sapien
tgaaaagtatcctacaagttgaatagcatatga

SEQ ID NO: 69028 - DNA, 33 bp, Homo sapien
tgaaaagtatcctacatgttgaatagcatatga

SEQ ID NO: 69029 - DNA, 33 bp, Homo sapien
ctgagcttttggcagccaagtgtagatctatgc

SEQ ID NO: 69030 - DNA, 33 bp, Homo sapien
ctgagcttttggcagctaagtgtagatctatgc

SEQ ID NO: 69031 - DNA, 33 bp, Homo sapien
aagtcactacatatacaccacacttctacttca

SEQ ID NO: 69032 - DNA, 33 bp, Homo sapien
aagtcactacatatacgccacacttctacttca

SEQ ID NO: 69033 - DNA, 33 bp, Homo sapien
ctgtgaaagcactgcaaggtttgtacagaagca

SEQ ID NO: 69034 - DNA, 33 bp, Homo sapien
ctgtgaaagcactgcagggtttgtacagaagca

SEQ ID NO: 69035 - DNA, 33 bp, Homo sapien
ccatgatgctgaatctcacctgttaggtacatg

SEQ ID NO: 69036 - DNA, 33 bp, Homo sapien
ccatgatgctgaatcttacctgttaggtacatg

SEQ ID NO: 69037 - DNA, 33 bp, Homo sapien
agaaagaggaaaaatgaaggaataaatgataga

SEQ ID NO: 69038 - DNA, 33 bp, Homo sapien
agaaagaggaaaaatggaggaataaatgataga

SEQ ID NO: 69039 - DNA, 33 bp, Homo sapien
acatgaattgactaggacacacatttatcaatt

SEQ ID NO: 69040 - DNA, 33 bp, Homo sapien
acatgaattgactaggccacacatttatcaatt

SEQ ID NO: 69041 - DNA, 33 bp, Homo sapien
aacagaacaggagctacgagtgttactgaaggc

SEQ ID NO: 69042 - DNA, 33 bp, Homo sapien
aacagaacaggagctatgagtgttactgaaggc

SEQ ID NO: 69043 - DNA, 33 bp, Homo sapien
agagagcacaaagtgactaattttcatctgact

SEQ ID NO: 69044 - DNA, 33 bp, Homo sapien
agagagcacaaagtgattaattttcatctgact

SEQ ID NO: 69045 - DNA, 33 bp, Homo sapien
tataaaaaattcatagccacataaattggcagt

SEQ ID NO: 69046 - DNA, 33 bp, Homo sapien
tataaaaaattcatagtcacataaattggcagt

SEQ ID NO: 69047 - DNA, 33 bp, Homo sapien
aaggtgctgatatacaaactctgtcccacccga

SEQ ID NO: 69048 - DNA, 33 bp, Homo sapien
aaggtgctgatatacacactctgtcccacccga

SEQ ID NO: 69049 - DNA, 33 bp, Homo sapien
tctctgccagtattctaaagatttgggagaatg

SEQ ID NO: 69050 - DNA, 33 bp, Homo sapien
tctctgccagtattctcaagatttgggagaatg

SEQ ID NO: 69051 - DNA, 33 bp, Homo sapien
ggagaatgctgttgcaataacacaggagatgag

SEQ ID NO: 69052 - DNA, 33 bp, Homo sapien
ggagaatgctgttgcagtaacacaggagatgag

SEQ ID NO: 69053 - DNA, 33 bp, Homo sapien
tgtgtttgccttttcacgctctgtgatccccat

SEQ ID NO: 69054 - DNA, 33 bp, Homo sapien
tgtgtttgccttttcatgctctgtgatccccat

SEQ ID NO: 69055 - DNA, 33 bp, Homo sapien
gttgaccagccaaaaaatttgtgatactgaatt

SEQ ID NO: 69056 - DNA, 33 bp, Homo sapien
gttgaccagccaaaaagtttgtgatactgaatt

SEQ ID NO: 69057 - DNA, 33 bp, Homo sapien
ctaaattggaatgataagcaacttgaggtgagg

SEQ ID NO: 69058 - DNA, 33 bp, Homo sapien
ctaaattggaatgataggcaacttgaggtgagg

SEQ ID NO: 69059 - DNA, 33 bp, Homo sapien
tacttcacatagatgcaacagcacacacatctt

SEQ ID NO: 69060 - DNA, 33 bp, Homo sapien
tacttcacatagatgcgacagcacacacatctt

SEQ ID NO: 69061 - DNA, 33 bp, Homo sapien
agcagtgtgtaatgagaaaattggcatgcatcc

SEQ ID NO: 69062 - DNA, 33 bp, Homo sapien
agcagtgtgtaatgaggaaattggcatgcatcc

SEQ ID NO: 69063 - DNA, 33 bp, Homo sapien
cgcctgagattctgagaaagtttttaccttagg

SEQ ID NO: 69064 - DNA, 33 bp, Homo sapien
cgcctgagattctgaggaagtttttaccttagg

SEQ ID NO: 69065 - DNA, 33 bp, Homo sapien
gcactgattctgcattcaagatgtgtttctaga

SEQ ID NO: 69066 - DNA, 33 bp, Homo sapien
gcactgattctgcattgaagatgtgtttctaga

SEQ ID NO: 69067 - DNA, 33 bp, Homo sapien
atgcacgactggtaaccggcaaaggattgaggg

SEQ ID NO: 69068 - DNA, 33 bp, Homo sapien
atgcacgactggtaactggcaaaggattgaggg

SEQ ID NO: 69069 - DNA, 33 bp, Homo sapien
agctgtctgcatacacaagaaaagctgaagttc

SEQ ID NO: 69070 - DNA, 33 bp, Homo sapien
agctgtctgcatacacgagaaaagctgaagttc

SEQ ID NO: 69071 - DNA, 33 bp, Homo sapien
tatgtgcaaaggttcacgtaggatgcctggtgc

SEQ ID NO: 69072 - DNA, 33 bp, Homo sapien
tatgtgcaaaggttcatgtaggatgcctggtgc

SEQ ID NO: 69073 - DNA, 33 bp, Homo sapien
tgataaaataatcttacaatatctgatttagtt

SEQ ID NO: 69074 - DNA, 33 bp, Homo sapien
tgataaaataatcttagaatatctgatttagtt

SEQ ID NO: 69075 - DNA, 33 bp, Homo sapien
tcatgagactagagataacccagctctcacatg

SEQ ID NO: 69076 - DNA, 33 bp, Homo sapien
tcatgagactagagatgacccagctctcacatg

SEQ ID NO: 69077 - DNA, 33 bp, Homo sapien
acaaactttcaaacaacgtactctgagcgagaa

SEQ ID NO: 69078 - DNA, 33 bp, Homo sapien
acaaactttcaaacaatgtactctgagcgagaa

SEQ ID NO: 69079 - DNA, 33 bp, Homo sapien
agtttgtcatggggtaacgttcaagagtctgaa

SEQ ID NO: 69080 - DNA, 33 bp, Homo sapien
agtttgtcatggggtaccgttcaagagtctgaa

SEQ ID NO: 69081 - DNA, 33 bp, Homo sapien
aattctggggaatggacagaacattgatcttat

SEQ ID NO: 69082 - DNA, 33 bp, Homo sapien
aattctggggaatggagagaacattgatcttat

SEQ ID NO: 69083 - DNA, 33 bp, Homo sapien
ttgcaaactggagaacactgagaaatgtgaacg

SEQ ID NO: 69084 - DNA, 33 bp, Homo sapien
ttgcaaactggagaaccctgagaaatgtgaacg

SEQ ID NO: 69085 - DNA, 33 bp, Homo sapien
cttggctgcaatttaacgtaggttttgatggct

SEQ ID NO: 69086 - DNA, 33 bp, Homo sapien
cttggctgcaatttaatgtaggttttgatggct

SEQ ID NO: 69087 - DNA, 33 bp, Homo sapien
gtctttttttaaacaactggtgcattatagtca

SEQ ID NO: 69088 - DNA, 33 bp, Homo sapien
gtctttttttaaacaattggtgcattatagtca

SEQ ID NO: 69089 - DNA, 33 bp, Homo sapien
atggaggttataggaaatgggcctagagttggg

SEQ ID NO: 69090 - DNA, 33 bp, Homo sapien
atggaggttataggaattgggcctagagttggg

SEQ ID NO: 69091 - DNA, 33 bp, Homo sapien
gtggttcacttcactgacaagcaacacagcatg

SEQ ID NO: 69092 - DNA, 33 bp, Homo sapien
gtggttcacttcactgtcaagcaacacagcatg

SEQ ID NO: 69093 - DNA, 33 bp, Homo sapien
ataggtaaggtgatgccatcatagtttggaagg

SEQ ID NO: 69094 - DNA, 33 bp, Homo sapien
ataggtaaggtgatgctatcatagtttggaagg

SEQ ID NO: 69095 - DNA, 33 bp, Homo sapien
ttttaaaagactggcaaatctaattgttgatga

SEQ ID NO: 69096 - DNA, 33 bp, Homo sapien
ttttaaaagactggcagatctaattgttgatga

SEQ ID NO: 69097 - DNA, 33 bp, Homo sapien
aatgaatactaatgacaacatggatgcatctca

SEQ ID NO: 69098 - DNA, 33 bp, Homo sapien
aatgaatactaatgacgacatggatgcatctca

SEQ ID NO: 69099 - DNA, 33 bp, Homo sapien
catcttttggggctaggatgagttttggaagat

SEQ ID NO: 69100 - DNA, 33 bp, Homo sapien
catcttttggggctagtatgagttttggaagat

SEQ ID NO: 69101 - DNA, 33 bp, Homo sapien
agaactgggaaataaacagacgagttatctgta

SEQ ID NO: 69102 - DNA, 33 bp, Homo sapien
agaactgggaaataaagagacgagttatctgta

SEQ ID NO: 69103 - DNA, 33 bp, Homo sapien
cagctaataacctaaactgtgtgacaagcatga

SEQ ID NO: 69104 - DNA, 33 bp, Homo sapien
cagctaataacctaaattgtgtgacaagcatga

SEQ ID NO: 69105 - DNA, 33 bp, Homo sapien
gcaagggcatgtgttcaaatgcccatatctgtg

SEQ ID NO: 69106 - DNA, 33 bp, Homo sapien
gcaagggcatgtgttccaatgcccatatctgtg

SEQ ID NO: 69107 - DNA, 33 bp, Homo sapien
atcaccattggacaggaacaggcatcccttggc

SEQ ID NO: 69108 - DNA, 33 bp, Homo sapien
atcaccattggacagggacaggcatcccttggc

SEQ ID NO: 69109 - DNA, 33 bp, Homo sapien
cctctataatctcacaaatttttttcactgagg

SEQ ID NO: 69110 - DNA, 33 bp, Homo sapien
cctctataatctcacacatttttttcactgagg

SEQ ID NO: 69111 - DNA, 33 bp, Homo sapien
tgtcctttgagtttcaaaagaccatcagtgggt

SEQ ID NO: 69112 - DNA, 33 bp, Homo sapien
tgtcctttgagtttcagaagaccatcagtgggt

SEQ ID NO: 69113 - DNA, 33 bp, Homo sapien
catacagaccacatttgaaagaaacactaggta

SEQ ID NO: 69114 - DNA, 33 bp, Homo sapien
catacagaccacattttaaagaaacactaggta

SEQ ID NO: 69115 - DNA, 33 bp, Homo sapien
taatgttttatccacaataacacacattatgtt

SEQ ID NO: 69116 - DNA, 33 bp, Homo sapien
taatgttttatccacagtaacacacattatgtt

SEQ ID NO: 69117 - DNA, 33 bp, Homo sapien
ctcattaagtcactccccagttttggaagacat

SEQ ID NO: 69118 - DNA, 33 bp, Homo sapien
ctcattaagtcactcctcagttttggaagacat

SEQ ID NO: 69119 - DNA, 33 bp, Homo sapien
gcacctctgaccttacaaagctatccatgaatc

SEQ ID NO: 69120 - DNA, 33 bp, Homo sapien
gcacctctgaccttacgaagctatccatgaatc

SEQ ID NO: 69121 - DNA, 33 bp, Homo sapien
aggtcttcgtcagttacacagtagttactgggt

SEQ ID NO: 69122 - DNA, 33 bp, Homo sapien
aggtcttcgtcagttatacagtagttactgggt

SEQ ID NO: 69123 - DNA, 33 bp, Homo sapien
ctttgacatgattagccatattagattatgatg

SEQ ID NO: 69124 - DNA, 33 bp, Homo sapien
ctttgacatgattagctatattagattatgatg

SEQ ID NO: 69125 - DNA, 33 bp, Homo sapien
gcatgtgaaggagagagaatctgtttccatcag

SEQ ID NO: 69126 - DNA, 33 bp, Homo sapien
gcatgtgaaggagagataatctgtttccatcag

SEQ ID NO: 69127 - DNA, 33 bp, Homo sapien
aggactagagtgcaatgaaggagaaacagtcat

SEQ ID NO: 69128 - DNA, 33 bp, Homo sapien
aggactagagtgcaattaaggagaaacagtcat

SEQ ID NO: 69129 - DNA, 33 bp, Homo sapien
gaagacttctaaaaacaattcaagtactgacag

SEQ ID NO: 69130 - DNA, 33 bp, Homo sapien
gaagacttctaaaaacgattcaagtactgacag

SEQ ID NO: 69131 - DNA, 33 bp, Homo sapien
gattaggaggtagacaatcaggctcctatgtgt

SEQ ID NO: 69132 - DNA, 33 bp, Homo sapien
gattaggaggtagacagtcaggctcctatgtgt

SEQ ID NO: 69133 - DNA, 33 bp, Homo sapien
catttcagagcagtcactctgaaaagctatgta

SEQ ID NO: 69134 - DNA, 33 bp, Homo sapien
catttcagagcagtcagtctgaaaagctatgta

SEQ ID NO: 69135 - DNA, 33 bp, Homo sapien
ttgtgagcattccaggaacctctgaaaacaagc

SEQ ID NO: 69136 - DNA, 33 bp, Homo sapien
ttgtgagcattccaggcacctctgaaaacaagc

SEQ ID NO: 69137 - DNA, 33 bp, Homo sapien
tttgcccagcagcagacacagttttatccactt

SEQ ID NO: 69138 - DNA, 33 bp, Homo sapien
tttgcccagcagcagagacagttttatccactt

SEQ ID NO: 69139 - DNA, 33 bp, Homo sapien
atttgtattgcatatgaaaggtcttctcatacc

SEQ ID NO: 69140 - DNA, 33 bp, Homo sapien
atttgtattgcatatggaaggtcttctcatacc

SEQ ID NO: 69141 - DNA, 33 bp, Homo sapien
acctacgtctgtcaaaatttaagcttccctact

SEQ ID NO: 69142 - DNA, 33 bp, Homo sapien
acctacgtctgtcaaattttaagcttccctact

SEQ ID NO: 69143 - DNA, 33 bp, Homo sapien
gagatttaacacacataaaagagaaagccaggt

SEQ ID NO: 69144 - DNA, 33 bp, Homo sapien
gagatttaacacacattaaagagaaagccaggt

SEQ ID NO: 69145 - DNA, 33 bp, Homo sapien
agatcccaatgttatacggactctttctcttcc

SEQ ID NO: 69146 - DNA, 33 bp, Homo sapien
agatcccaatgttatatggactctttctcttcc

SEQ ID NO: 69147 - DNA, 33 bp, Homo sapien
aactcctccaaaagaacggatgtctagatgaag

SEQ ID NO: 69148 - DNA, 33 bp, Homo sapien
aactcctccaaaagaatggatgtctagatgaag

SEQ ID NO: 69149 - DNA, 33 bp, Homo sapien
tgggcatagtcattgcccctcttacacaccaga

SEQ ID NO: 69150 - DNA, 33 bp, Homo sapien
tgggcatagtcattgctcctcttacacaccaga

SEQ ID NO: 69151 - DNA, 33 bp, Homo sapien
cataaaaaagcttacccatctgatgaggctcct

SEQ ID NO: 69152 - DNA, 33 bp, Homo sapien
cataaaaaagcttacctatctgatgaggctcct

SEQ ID NO: 69153 - DNA, 33 bp, Homo sapien
gaagatagtgcagttggaagcaagctcctcttc

SEQ ID NO: 69154 - DNA, 33 bp, Homo sapien
gaagatagtgcagttgtaagcaagctcctcttc

SEQ ID NO: 69155 - DNA, 33 bp, Homo sapien
caggacagagcaccaaattgctggcagaggccg

SEQ ID NO: 69156 - DNA, 33 bp, Homo sapien
caggacagagcaccaagttgctggcagaggccg

SEQ ID NO: 69157 - DNA, 33 bp, Homo sapien
tttcaacctgtttggacgagatgccagcacttg

SEQ ID NO: 69158 - DNA, 33 bp, Homo sapien
tttcaacctgtttggatgagatgccagcacttg

SEQ ID NO: 69159 - DNA, 33 bp, Homo sapien
tgggtaactgtcacagaccgtatataacccaaa

SEQ ID NO: 69160 - DNA, 33 bp, Homo sapien
tgggtaactgtcacagtccgtatataacccaaa

SEQ ID NO: 69161 - DNA, 33 bp, Homo sapien
accatcctttagataaatgaaagacttaagata

SEQ ID NO: 69162 - DNA, 33 bp, Homo sapien
accatcctttagataactgaaagacttaagata

SEQ ID NO: 69163 - DNA, 33 bp, Homo sapien
gtcatacagttgctaacaggagctgcttaaact

SEQ ID NO: 69164 - DNA, 33 bp, Homo sapien
gtcatacagttgctaataggagctgcttaaact

SEQ ID NO: 69165 - DNA, 33 bp, Homo sapien
tcatgtcagctacttccagacaccagaccctca

SEQ ID NO: 69166 - DNA, 33 bp, Homo sapien
tcatgtcagctacttctagacaccagaccctca

SEQ ID NO: 69167 - DNA, 33 bp, Homo sapien
acccatatttatcagaagtgaagtaggttgaag

SEQ ID NO: 69168 - DNA, 33 bp, Homo sapien
acccatatttatcagacgtgaagtaggttgaag

SEQ ID NO: 69169 - DNA, 33 bp, Homo sapien
cacatggttagatacacggttagaacatttatc

SEQ ID NO: 69170 - DNA, 33 bp, Homo sapien
cacatggttagatacatggttagaacatttatc

SEQ ID NO: 69171 - DNA, 33 bp, Homo sapien
cgtgaacttgtaaatgaattttctcctatgtac

SEQ ID NO: 69172 - DNA, 33 bp, Homo sapien
cgtgaacttgtaaatgtattttctcctatgtac

SEQ ID NO: 69173 - DNA, 33 bp, Homo sapien
caacttgttagtcagcaccacaagggcatttaa

SEQ ID NO: 69174 - DNA, 33 bp, Homo sapien
caacttgttagtcagcgccacaagggcatttaa

SEQ ID NO: 69175 - DNA, 33 bp, Homo sapien
tttagcatctttgaacaggagacaaaagcatat

SEQ ID NO: 69176 - DNA, 33 bp, Homo sapien
tttagcatctttgaaccggagacaaaagcatat

SEQ ID NO: 69177 - DNA, 33 bp, Homo sapien
ctaaatggaattcctgaacaaagtagggcaggt

SEQ ID NO: 69178 - DNA, 33 bp, Homo sapien
ctaaatggaattcctggacaaagtagggcaggt

SEQ ID NO: 69179 - DNA, 33 bp, Homo sapien
cctttcccttagaccacgaaacatctcataggc

SEQ ID NO: 69180 - DNA, 33 bp, Homo sapien
cctttcccttagaccatgaaacatctcataggc

SEQ ID NO: 69181 - DNA, 33 bp, Homo sapien
cctttgtgtcaatctaagttgccattatcattt

SEQ ID NO: 69182 - DNA, 33 bp, Homo sapien
cctttgtgtcaatctaggttgccattatcattt

SEQ ID NO: 69183 - DNA, 33 bp, Homo sapien
caatagctttgtaacgaaactctagtgtgatca

SEQ ID NO: 69184 - DNA, 33 bp, Homo sapien
caatagctttgtaacgtaactctagtgtgatca

SEQ ID NO: 69185 - DNA, 33 bp, Homo sapien
agagaattgtttattcaaccttgtttcttgggt

SEQ ID NO: 69186 - DNA, 33 bp, Homo sapien
agagaattgtttattccaccttgtttcttgggt

SEQ ID NO: 69187 - DNA, 33 bp, Homo sapien
tgtgtcagaacctactaagtacacaataaacat

SEQ ID NO: 69188 - DNA, 33 bp, Homo sapien
tgtgtcagaacctactgagtacacaataaacat

SEQ ID NO: 69189 - DNA, 33 bp, Homo sapien
aatcaaccatacctgaggtaacactgtaaccaa

SEQ ID NO: 69190 - DNA, 33 bp, Homo sapien
aatcaaccatacctgatgtaacactgtaaccaa

SEQ ID NO: 69191 - DNA, 33 bp, Homo sapien
cccagaaaacattttacggtcatgtctatatct

SEQ ID NO: 69192 - DNA, 33 bp, Homo sapien
cccagaaaacattttatggtcatgtctatatct

SEQ ID NO: 69193 - DNA, 33 bp, Homo sapien
cagtggtgaaagactaacagagggattccctcg

SEQ ID NO: 69194 - DNA, 33 bp, Homo sapien
cagtggtgaaagactagcagagggattccctcg

SEQ ID NO: 69195 - DNA, 33 bp, Homo sapien
caaccttagctgaaggcacaatagagtttaagg

SEQ ID NO: 69196 - DNA, 33 bp, Homo sapien
caaccttagctgaagggacaatagagtttaagg

SEQ ID NO: 69197 - DNA, 33 bp, Homo sapien
ataaaattaggaattaagattcagaaaggtaag

SEQ ID NO: 69198 - DNA, 33 bp, Homo sapien
ataaaattaggaattacgattcagaaaggtaag

SEQ ID NO: 69199 - DNA, 33 bp, Homo sapien
aagagaggaaaatggaaagacattggaataatt

SEQ ID NO: 69200 - DNA, 33 bp, Homo sapien
aagagaggaaaatggagagacattggaataatt

SEQ ID NO: 69201 - DNA, 33 bp, Homo sapien
tcaggtaatacaaagaaatgggattaacctttg

SEQ ID NO: 69202 - DNA, 33 bp, Homo sapien
tcaggtaatacaaagagatgggattaacctttg

SEQ ID NO: 69203 - DNA, 33 bp, Homo sapien
gaacttcattcaggaaataaagtgtgaggggaa

SEQ ID NO: 69204 - DNA, 33 bp, Homo sapien
gaacttcattcaggaagtaaagtgtgaggggaa

SEQ ID NO: 69205 - DNA, 33 bp, Homo sapien
ttgcttccaattgctaaattcacggccaagtct

SEQ ID NO: 69206 - DNA, 33 bp, Homo sapien
ttgcttccaattgctacattcacggccaagtct

SEQ ID NO: 69207 - DNA, 33 bp, Homo sapien
ggataaaaagaaaacacggcagcctctctatag

SEQ ID NO: 69208 - DNA, 33 bp, Homo sapien
ggataaaaagaaaacatggcagcctctctatag

SEQ ID NO: 69209 - DNA, 33 bp, Homo sapien
ccattagatatgtccacgtcacctgaggaagaa

SEQ ID NO: 69210 - DNA, 33 bp, Homo sapien
ccattagatatgtccatgtcacctgaggaagaa

SEQ ID NO: 69211 - DNA, 33 bp, Homo sapien
ggaactgaatgctttacgtgcagcatagactgg

SEQ ID NO: 69212 - DNA, 33 bp, Homo sapien
ggaactgaatgctttatgtgcagcatagactgg

SEQ ID NO: 69213 - DNA, 33 bp, Homo sapien
acaccaacagctgggactatacagcatcagaaa

SEQ ID NO: 69214 - DNA, 33 bp, Homo sapien
acaccaacagctgggattatacagcatcagaaa

SEQ ID NO: 69215 - DNA, 33 bp, Homo sapien
acttaacttccgaagaatactgcattaatcatt

SEQ ID NO: 69216 - DNA, 33 bp, Homo sapien
acttaacttccgaagagtactgcattaatcatt

SEQ ID NO: 69217 - DNA, 33 bp, Homo sapien
agctacctttgcaacacaaaagacacttaactt

SEQ ID NO: 69218 - DNA, 33 bp, Homo sapien
agctacctttgcaacagaaaagacacttaactt

SEQ ID NO: 69219 - DNA, 33 bp, Homo sapien
tccatttcatgcaaaaagtgaagatacaattgg

SEQ ID NO: 69220 - DNA, 33 bp, Homo sapien
tccatttcatgcaaaacgtgaagatacaattgg

SEQ ID NO: 69221 - DNA, 33 bp, Homo sapien
tattttaaatgctaaaatgatgtgtaaaatata

SEQ ID NO: 69222 - DNA, 33 bp, Homo sapien
tattttaaatgctaaagtgatgtgtaaaatata

SEQ ID NO: 69223 - DNA, 33 bp, Homo sapien
ttgtattgccatgtgacattcaccttttacatc

SEQ ID NO: 69224 - DNA, 33 bp, Homo sapien
ttgtattgccatgtgatattcaccttttacatc

SEQ ID NO: 69225 - DNA, 33 bp, Homo sapien
ctgcactgtgaagagcaagtggtttgggaagca

SEQ ID NO: 69226 - DNA, 33 bp, Homo sapien
ctgcactgtgaagagcgagtggtttgggaagca

SEQ ID NO: 69227 - DNA, 33 bp, Homo sapien
tgccaattataccttcacatggtgttagctctc

SEQ ID NO: 69228 - DNA, 33 bp, Homo sapien
tgccaattataccttcgcatggtgttagctctc

SEQ ID NO: 69229 - DNA, 33 bp, Homo sapien
tagttatgttgtattacggtgtgttacattata

SEQ ID NO: 69230 - DNA, 33 bp, Homo sapien
tagttatgttgtattatggtgtgttacattata

SEQ ID NO: 69231 - DNA, 33 bp, Homo sapien
agaaaaggaagtagccactaccacatacattta

SEQ ID NO: 69232 - DNA, 33 bp, Homo sapien
agaaaaggaagtagccgctaccacatacattta

SEQ ID NO: 69233 - DNA, 33 bp, Homo sapien
tcaaattaaaatctgccaggagagttacaatga

SEQ ID NO: 69234 - DNA, 33 bp, Homo sapien
tcaaattaaaatctgctaggagagttacaatga

SEQ ID NO: 69235 - DNA, 33 bp, Homo sapien
cagcctctagaagcacaatacacaatctcaggg

SEQ ID NO: 69236 - DNA, 33 bp, Homo sapien
cagcctctagaagcacgatacacaatctcaggg

SEQ ID NO: 69237 - DNA, 33 bp, Homo sapien
cctcctttacttccaacagaggagagccagtgt

SEQ ID NO: 69238 - DNA, 33 bp, Homo sapien
cctcctttacttccaatagaggagagccagtgt

SEQ ID NO: 69239 - DNA, 33 bp, Homo sapien
tttctgatgcatgaacccttccaggagctggaa

SEQ ID NO: 69240 - DNA, 33 bp, Homo sapien
tttctgatgcatgaacgcttccaggagctggaa

SEQ ID NO: 69241 - DNA, 33 bp, Homo sapien
aaaaaatctcttcccactcattaagtaactgca

SEQ ID NO: 69242 - DNA, 33 bp, Homo sapien
aaaaaatctcttcccattcattaagtaactgca

SEQ ID NO: 69243 - DNA, 33 bp, Homo sapien
ccaaggaagaggtcaacaaacaatagtcattat

SEQ ID NO: 69244 - DNA, 33 bp, Homo sapien
ccaaggaagaggtcaagaaacaatagtcattat

SEQ ID NO: 69245 - DNA, 33 bp, Homo sapien
caatagacagttgacacacaacctctaagaagg

SEQ ID NO: 69246 - DNA, 33 bp, Homo sapien
caatagacagttgacatacaacctctaagaagg

SEQ ID NO: 69247 - DNA, 33 bp, Homo sapien
aagctgggtatcttcaggtgtgtttcttcccca

SEQ ID NO: 69248 - DNA, 33 bp, Homo sapien
aagctgggtatcttcatgtgtgtttcttcccca

SEQ ID NO: 69249 - DNA, 33 bp, Homo sapien
gtaccacttgaacaaaaccccagagtaggaggt

SEQ ID NO: 69250 - DNA, 33 bp, Homo sapien
gtaccacttgaacaaacccccagagtaggaggt

SEQ ID NO: 69251 - DNA, 33 bp, Homo sapien
taaagtcatgggttacagaacagtccctccagg

SEQ ID NO: 69252 - DNA, 33 bp, Homo sapien
taaagtcatgggttacggaacagtccctccagg

SEQ ID NO: 69253 - DNA, 33 bp, Homo sapien
gggtagatggtatcaacgagtctatcatagcaa

SEQ ID NO: 69254 - DNA, 33 bp, Homo sapien
gggtagatggtatcaatgagtctatcatagcaa

SEQ ID NO: 69255 - DNA, 33 bp, Homo sapien
agatatatgagaaagacatgcgagagacatgaa

SEQ ID NO: 69256 - DNA, 33 bp, Homo sapien
agatatatgagaaagatatgcgagagacatgaa

SEQ ID NO: 69257 - DNA, 33 bp, Homo sapien
atagtgggcctggaacaccctctacaacacaac

SEQ ID NO: 69258 - DNA, 33 bp, Homo sapien
atagtgggcctggaaccccctctacaacacaac

SEQ ID NO: 69259 - DNA, 33 bp, Homo sapien
gtggaatgcaaaccaaacactgtgtgggcctct

SEQ ID NO: 69260 - DNA, 33 bp, Homo sapien
gtggaatgcaaaccaagcactgtgtgggcctct

SEQ ID NO: 69261 - DNA, 33 bp, Homo sapien
actaagaccttaacaaagagaatctggaagtag

SEQ ID NO: 69262 - DNA, 33 bp, Homo sapien
actaagaccttaacaaggagaatctggaagtag

SEQ ID NO: 69263 - DNA, 33 bp, Homo sapien
gttattaatatacaggaatggacatttttaatt

SEQ ID NO: 69264 - DNA, 33 bp, Homo sapien
gttattaatatacaggtatggacatttttaatt

SEQ ID NO: 69265 - DNA, 33 bp, Homo sapien
ctgtgtcaccctccaccggcaggacttctatca

SEQ ID NO: 69266 - DNA, 33 bp, Homo sapien
ctgtgtcaccctccactggcaggacttctatca

SEQ ID NO: 69267 - DNA, 33 bp, Homo sapien
taaaacttgccaaatcggaagtaatttaaagac

SEQ ID NO: 69268 - DNA, 33 bp, Homo sapien
taaaacttgccaaatctgaagtaatttaaagac

SEQ ID NO: 69269 - DNA, 33 bp, Homo sapien
catacctaatgactaacacagtgactggtgcaa

SEQ ID NO: 69270 - DNA, 33 bp, Homo sapien
catacctaatgactaatacagtgactggtgcaa

SEQ ID NO: 69271 - DNA, 33 bp, Homo sapien
ttaaagatggtattccaatatggtaaggagcca

SEQ ID NO: 69272 - DNA, 33 bp, Homo sapien
ttaaagatggtattccgatatggtaaggagcca

SEQ ID NO: 69273 - DNA, 33 bp, Homo sapien
ttttttttcaggtcaaagattaggtgcattagc

SEQ ID NO: 69274 - DNA, 33 bp, Homo sapien
ttttttttcaggtcaacgattaggtgcattagc

SEQ ID NO: 69275 - DNA, 33 bp, Homo sapien
cagctagcttgcactgcattagacctagcaaac

SEQ ID NO: 69276 - DNA, 33 bp, Homo sapien
cagctagcttgcactgtattagacctagcaaac

SEQ ID NO: 69277 - DNA, 33 bp, Homo sapien
gtgggtctctgagtcacggcttaagtattttgg

SEQ ID NO: 69278 - DNA, 33 bp, Homo sapien
gtgggtctctgagtcatggcttaagtattttgg

SEQ ID NO: 69279 - DNA, 33 bp, Homo sapien
ctgaagcaagaacataaatggaaacttgggagt

SEQ ID NO: 69280 - DNA, 33 bp, Homo sapien
ctgaagcaagaacatacatggaaacttgggagt

SEQ ID NO: 69281 - DNA, 33 bp, Homo sapien
atctcccgttaagtaaagtaattgatgacccct

SEQ ID NO: 69282 - DNA, 33 bp, Homo sapien
atctcccgttaagtaaggtaattgatgacccct

SEQ ID NO: 69283 - DNA, 33 bp, Homo sapien
gatgcaagctatcttgaagctaactaagcatga

SEQ ID NO: 69284 - DNA, 33 bp, Homo sapien
gatgcaagctatcttggagctaactaagcatga

SEQ ID NO: 69285 - DNA, 33 bp, Homo sapien
ctgcggaggcaagcgcagaagaagtcattagtc

SEQ ID NO: 69286 - DNA, 33 bp, Homo sapien
ctgcggaggcaagcgcggaagaagtcattagtc

SEQ ID NO: 69287 - DNA, 33 bp, Homo sapien
tgctgcagacaaagcaaaatgtgttaggcaggg

SEQ ID NO: 69288 - DNA, 33 bp, Homo sapien
tgctgcagacaaagcagaatgtgttaggcaggg

SEQ ID NO: 69289 - DNA, 33 bp, Homo sapien
gtcaatgctacaccttaaaaattaattgttcaa

SEQ ID NO: 69290 - DNA, 33 bp, Homo sapien
gtcaatgctacaccttgaaaattaattgttcaa

SEQ ID NO: 69291 - DNA, 33 bp, Homo sapien
gaatgatttaagtcagaaagtctcagtttggac

SEQ ID NO: 69292 - DNA, 33 bp, Homo sapien
gaatgatttaagtcaggaagtctcagtttggac

SEQ ID NO: 69293 - DNA, 33 bp, Homo sapien
ctggattttcatcagaatctaactgacctcaag

SEQ ID NO: 69294 - DNA, 33 bp, Homo sapien
ctggattttcatcagagtctaactgacctcaag

SEQ ID NO: 69295 - DNA, 33 bp, Homo sapien
gtgggaggtatagagcaaaaactgattgattgg

SEQ ID NO: 69296 - DNA, 33 bp, Homo sapien
gtgggaggtatagagcgaaaactgattgattgg

SEQ ID NO: 69297 - DNA, 33 bp, Homo sapien
gcccagagtaagaaaggcaaattaatgaagtgg

SEQ ID NO: 69298 - DNA, 33 bp, Homo sapien
gcccagagtaagaaagtcaaattaatgaagtgg

SEQ ID NO: 69299 - DNA, 33 bp, Homo sapien
ccaagttcttttggtgaaaggactctcacattc

SEQ ID NO: 69300 - DNA, 33 bp, Homo sapien
ccaagttcttttggtggaaggactctcacattc

SEQ ID NO: 69301 - DNA, 33 bp, Homo sapien
agttactggatcattcaaaatctgttgtcggag

SEQ ID NO: 69302 - DNA, 33 bp, Homo sapien
agttactggatcattcgaaatctgttgtcggag

SEQ ID NO: 69303 - DNA, 33 bp, Homo sapien
tgacaggatccatcaacattaggtttcttcctt

SEQ ID NO: 69304 - DNA, 33 bp, Homo sapien
tgacaggatccatcaatattaggtttcttcctt

SEQ ID NO: 69305 - DNA, 33 bp, Homo sapien
tggttgtaaacatttacggatcctgagcacttt

SEQ ID NO: 69306 - DNA, 33 bp, Homo sapien
tggttgtaaacatttatggatcctgagcacttt

SEQ ID NO: 69307 - DNA, 33 bp, Homo sapien
aaagtttgcataactaacttaaacttcacttaa

SEQ ID NO: 69308 - DNA, 33 bp, Homo sapien
aaagtttgcataactagcttaaacttcacttaa

SEQ ID NO: 69309 - DNA, 33 bp, Homo sapien
tttcatctccccagaaatcaaaatgcactaacc

SEQ ID NO: 69310 - DNA, 33 bp, Homo sapien
tttcatctccccagaagtcaaaatgcactaacc

SEQ ID NO: 69311 - DNA, 33 bp, Homo sapien
tgggtcccatgttcaaaaaaatggtggcaagca

SEQ ID NO: 69312 - DNA, 33 bp, Homo sapien
tgggtcccatgttcaagaaaatggtggcaagca

SEQ ID NO: 69313 - DNA, 33 bp, Homo sapien
tttatgaaaaagtaccaagtcccattttggtca

SEQ ID NO: 69314 - DNA, 33 bp, Homo sapien
tttatgaaaaagtaccgagtcccattttggtca

SEQ ID NO: 69315 - DNA, 33 bp, Homo sapien
aatctcccaagcaagccagagtcataagttgtt

SEQ ID NO: 69316 - DNA, 33 bp, Homo sapien
aatctcccaagcaagcgagagtcataagttgtt

SEQ ID NO: 69317 - DNA, 33 bp, Homo sapien
agctatcacaaaataaggtctggcacagagtag

SEQ ID NO: 69318 - DNA, 33 bp, Homo sapien
agctatcacaaaataatgtctggcacagagtag

SEQ ID NO: 69319 - DNA, 33 bp, Homo sapien
tacaatatacattgaccattgtgtcatttgact

SEQ ID NO: 69320 - DNA, 33 bp, Homo sapien
tacaatatacattgactattgtgtcatttgact

SEQ ID NO: 69321 - DNA, 33 bp, Homo sapien
gttgtgattatgaatccctgaatggcagacatt

SEQ ID NO: 69322 - DNA, 33 bp, Homo sapien
gttgtgattatgaatctctgaatggcagacatt

SEQ ID NO: 69323 - DNA, 33 bp, Homo sapien
actagagcttggcgaaaactctgagtgtaatat

SEQ ID NO: 69324 - DNA, 33 bp, Homo sapien
actagagcttggcgaagactctgagtgtaatat

SEQ ID NO: 69325 - DNA, 33 bp, Homo sapien
tttcctgagctcccaactgtggtcttcacttta

SEQ ID NO: 69326 - DNA, 33 bp, Homo sapien
tttcctgagctcccaattgtggtcttcacttta

SEQ ID NO: 69327 - DNA, 33 bp, Homo sapien
caaccttttcataattaaacaaggaagaaaatt

SEQ ID NO: 69328 - DNA, 33 bp, Homo sapien
caaccttttcataattcaacaaggaagaaaatt

SEQ ID NO: 69329 - DNA, 33 bp, Homo sapien
caaaaccccttcattccctgctactattcctat

SEQ ID NO: 69330 - DNA, 33 bp, Homo sapien
caaaaccccttcattcgctgctactattcctat

SEQ ID NO: 69331 - DNA, 33 bp, Homo sapien
caagaccagaaaaagaagcaacatgagctgcct

SEQ ID NO: 69332 - DNA, 33 bp, Homo sapien
caagaccagaaaaagaggcaacatgagctgcct

SEQ ID NO: 69333 - DNA, 33 bp, Homo sapien
acctctcatttaaagaatatgtgttctgtgaga

SEQ ID NO: 69334 - DNA, 33 bp, Homo sapien
acctctcatttaaagagtatgtgttctgtgaga

SEQ ID NO: 69335 - DNA, 33 bp, Homo sapien
gtgaacaacaaagcagaaagattgcaaggatat

SEQ ID NO: 69336 - DNA, 33 bp, Homo sapien
gtgaacaacaaagcaggaagattgcaaggatat

SEQ ID NO: 69337 - DNA, 33 bp, Homo sapien
gggtaagattacgtaccagtgaaactaccacct

SEQ ID NO: 69338 - DNA, 33 bp, Homo sapien
gggtaagattacgtacgagtgaaactaccacct

SEQ ID NO: 69339 - DNA, 33 bp, Homo sapien
caagattagtaaaatgcatggaaaggtgggtag

SEQ ID NO: 69340 - DNA, 33 bp, Homo sapien
caagattagtaaaatgtatggaaaggtgggtag

SEQ ID NO: 69341 - DNA, 33 bp, Homo sapien
ttgcccccatatcccacgtaaacacagtgtcgt

SEQ ID NO: 69342 - DNA, 33 bp, Homo sapien
ttgcccccatatcccatgtaaacacagtgtcgt

SEQ ID NO: 69343 - DNA, 33 bp, Homo sapien
gccaggtgcaataaacaaccctcttcatttcta

SEQ ID NO: 69344 - DNA, 33 bp, Homo sapien
gccaggtgcaataaaccaccctcttcatttcta

SEQ ID NO: 69345 - DNA, 33 bp, Homo sapien
ttatcttttgcaaactaaagagctcaagggaga

SEQ ID NO: 69346 - DNA, 33 bp, Homo sapien
ttatcttttgcaaactgaagagctcaagggaga

SEQ ID NO: 69347 - DNA, 33 bp, Homo sapien
tatcaaccacagaatcacgtcaatgttccagaa

SEQ ID NO: 69348 - DNA, 33 bp, Homo sapien
tatcaaccacagaatcgcgtcaatgttccagaa

SEQ ID NO: 69349 - DNA, 33 bp, Homo sapien
taatctcacagaaatacgaaagacccgcagaga

SEQ ID NO: 69350 - DNA, 33 bp, Homo sapien
taatctcacagaaatatgaaagacccgcagaga

SEQ ID NO: 69351 - DNA, 33 bp, Homo sapien
ttggcaaaagtgttacaagcctggactaaaata

SEQ ID NO: 69352 - DNA, 33 bp, Homo sapien
ttggcaaaagtgttacgagcctggactaaaata

SEQ ID NO: 69353 - DNA, 33 bp, Homo sapien
gatgaagtctcggagaaggtagtgattctctgc

SEQ ID NO: 69354 - DNA, 33 bp, Homo sapien
gatgaagtctcggagagggtagtgattctctgc

SEQ ID NO: 69355 - DNA, 33 bp, Homo sapien
ttagagctttaagagcaacactaatctctgcca

SEQ ID NO: 69356 - DNA, 33 bp, Homo sapien
ttagagctttaagagcgacactaatctctgcca

SEQ ID NO: 69357 - DNA, 33 bp, Homo sapien
tcctatggtggctttagaagtatttaatgtgta

SEQ ID NO: 69358 - DNA, 33 bp, Homo sapien
tcctatggtggctttataagtatttaatgtgta

SEQ ID NO: 69359 - DNA, 33 bp, Homo sapien
gcaaggccaggggaggaccagtgaaactgagaa

SEQ ID NO: 69360 - DNA, 33 bp, Homo sapien
gcaaggccaggggagggccagtgaaactgagaa

SEQ ID NO: 69361 - DNA, 33 bp, Homo sapien
tgagggccaagtgccagattttgtttttgtttc

SEQ ID NO: 69362 - DNA, 33 bp, Homo sapien
tgagggccaagtgccatattttgtttttgtttc

SEQ ID NO: 69363 - DNA, 33 bp, Homo sapien
aaaaaaatgttcccaaccttccactaatttcca

SEQ ID NO: 69364 - DNA, 33 bp, Homo sapien
aaaaaaatgttcccaatcttccactaatttcca

SEQ ID NO: 69365 - DNA, 33 bp, Homo sapien
cttgttaaaatatcaaaataattctttggtggt

SEQ ID NO: 69366 - DNA, 33 bp, Homo sapien
cttgttaaaatatcaacataattctttggtggt

SEQ ID NO: 69367 - DNA, 33 bp, Homo sapien
gaagaggaagactaaaagcaggctgtttgctaa

SEQ ID NO: 69368 - DNA, 33 bp, Homo sapien
gaagaggaagactaaaggcaggctgtttgctaa

SEQ ID NO: 69369 - DNA, 33 bp, Homo sapien
aactccacatgggtaacgttcctgaactctctc

SEQ ID NO: 69370 - DNA, 33 bp, Homo sapien
aactccacatgggtaatgttcctgaactctctc

SEQ ID NO: 69371 - DNA, 33 bp, Homo sapien
ctttgtaaaccacccaatgaaagagctttaaag

SEQ ID NO: 69372 - DNA, 33 bp, Homo sapien
ctttgtaaaccacccagtgaaagagctttaaag

SEQ ID NO: 69373 - DNA, 33 bp, Homo sapien
agggagagagtgaagacgtggagaagggatatg

SEQ ID NO: 69374 - DNA, 33 bp, Homo sapien
agggagagagtgaagatgtggagaagggatatg

SEQ ID NO: 69375 - DNA, 33 bp, Homo sapien
atgtgaaattgttcaacgatcaggccttatgca

SEQ ID NO: 69376 - DNA, 33 bp, Homo sapien
atgtgaaattgttcaatgatcaggccttatgca

SEQ ID NO: 69377 - DNA, 33 bp, Homo sapien
agtgagtggcaagctcaaatttaaactctagca

SEQ ID NO: 69378 - DNA, 33 bp, Homo sapien
agtgagtggcaagctctaatttaaactctagca

SEQ ID NO: 69379 - DNA, 33 bp, Homo sapien
cttggagaatcatacaatacaggagtatattaa

SEQ ID NO: 69380 - DNA, 33 bp, Homo sapien
cttggagaatcatacactacaggagtatattaa

SEQ ID NO: 69381 - DNA, 33 bp, Homo sapien
taaaaattgacaaatacgatatgctccaataaa

SEQ ID NO: 69382 - DNA, 33 bp, Homo sapien
taaaaattgacaaatatgatatgctccaataaa

SEQ ID NO: 69383 - DNA, 33 bp, Homo sapien
gtgcaaagacactaggaagaaggctgtgtgatg

SEQ ID NO: 69384 - DNA, 33 bp, Homo sapien
gtgcaaagacactaggtagaaggctgtgtgatg

SEQ ID NO: 69385 - DNA, 33 bp, Homo sapien
agaaatcctaagtgaaggataagtgaagctttc

SEQ ID NO: 69386 - DNA, 33 bp, Homo sapien
agaaatcctaagtgaatgataagtgaagctttc

SEQ ID NO: 69387 - DNA, 33 bp, Homo sapien
atctctataattcaccagattgcagatacaagt

SEQ ID NO: 69388 - DNA, 33 bp, Homo sapien
atctctataattcacccgattgcagatacaagt

SEQ ID NO: 69389 - DNA, 33 bp, Homo sapien
ttgcagcgttcttctacgtggcttctgggaagg

SEQ ID NO: 69390 - DNA, 33 bp, Homo sapien
ttgcagcgttcttctatgtggcttctgggaagg

SEQ ID NO: 69391 - DNA, 33 bp, Homo sapien
tacatggacataactaaagactagtgcttgtag

SEQ ID NO: 69392 - DNA, 33 bp, Homo sapien
tacatggacataactatagactagtgcttgtag

SEQ ID NO: 69393 - DNA, 33 bp, Homo sapien
gaggaaccagaaggggcaatacagtcagatacc

SEQ ID NO: 69394 - DNA, 33 bp, Homo sapien
gaggaaccagaaggggtaatacagtcagatacc

SEQ ID NO: 69395 - DNA, 33 bp, Homo sapien
cttatggttccatataccttgctgtattttcat

SEQ ID NO: 69396 - DNA, 33 bp, Homo sapien
cttatggttccatatatcttgctgtattttcat

SEQ ID NO: 69397 - DNA, 33 bp, Homo sapien
tccagaggacaaaaaaagggataagctcagaca

SEQ ID NO: 69398 - DNA, 33 bp, Homo sapien
tccagaggacaaaaaaggggataagctcagaca

SEQ ID NO: 69399 - DNA, 33 bp, Homo sapien
agtcaggctaaatttcaaatcctcttcctctgc

SEQ ID NO: 69400 - DNA, 33 bp, Homo sapien
agtcaggctaaatttcgaatcctcttcctctgc

SEQ ID NO: 69401 - DNA, 33 bp, Homo sapien
tcctgctggtgacaaaccctcctgtacagctgg

SEQ ID NO: 69402 - DNA, 33 bp, Homo sapien
tcctgctggtgacaaatcctcctgtacagctgg

SEQ ID NO: 69403 - DNA, 33 bp, Homo sapien
gagattcagagaggataaatgctttgttggaaa

SEQ ID NO: 69404 - DNA, 33 bp, Homo sapien
gagattcagagaggatgaatgctttgttggaaa

SEQ ID NO: 69405 - DNA, 33 bp, Homo sapien
gtatgggtctctctgactaaattctgcttataa

SEQ ID NO: 69406 - DNA, 33 bp, Homo sapien
gtatgggtctctctgattaaattctgcttataa

SEQ ID NO: 69407 - DNA, 33 bp, Homo sapien
tcaaagaatgaaaccacgtcctaaattttccag

SEQ ID NO: 69408 - DNA, 33 bp, Homo sapien
tcaaagaatgaaaccaggtcctaaattttccag

SEQ ID NO: 69409 - DNA, 33 bp, Homo sapien
tggtaggaggaaatgacgccaggaaggcaagat

SEQ ID NO: 69410 - DNA, 33 bp, Homo sapien
tggtaggaggaaatgatgccaggaaggcaagat

SEQ ID NO: 69411 - DNA, 33 bp, Homo sapien
gcctggaaaatgattcaactatttctttgttgg

SEQ ID NO: 69412 - DNA, 33 bp, Homo sapien
gcctggaaaatgattctactatttctttgttgg

SEQ ID NO: 69413 - DNA, 33 bp, Homo sapien
agaaaggaccaaccacaccgagctcagttatgg

SEQ ID NO: 69414 - DNA, 33 bp, Homo sapien
agaaaggaccaaccacgccgagctcagttatgg

SEQ ID NO: 69415 - DNA, 33 bp, Homo sapien
catccccagaactcaaagctctgcgtatataaa

SEQ ID NO: 69416 - DNA, 33 bp, Homo sapien
catccccagaactcaaggctctgcgtatataaa

SEQ ID NO: 69417 - DNA, 33 bp, Homo sapien
gtcacaggtaaattaacgagaagccaggtgctt

SEQ ID NO: 69418 - DNA, 33 bp, Homo sapien
gtcacaggtaaattaatgagaagccaggtgctt

SEQ ID NO: 69419 - DNA, 33 bp, Homo sapien
attttcttgcaactgaaacaagcactgttttaa

SEQ ID NO: 69420 - DNA, 33 bp, Homo sapien
attttcttgcaactgagacaagcactgttttaa

SEQ ID NO: 69421 - DNA, 33 bp, Homo sapien
tgttgagaatgttcaaaccaataggtaactaag

SEQ ID NO: 69422 - DNA, 33 bp, Homo sapien
tgttgagaatgttcaacccaataggtaactaag

SEQ ID NO: 69423 - DNA, 33 bp, Homo sapien
catctttcccctttgacggtgaagatcctcttc

SEQ ID NO: 69424 - DNA, 33 bp, Homo sapien
catctttcccctttgatggtgaagatcctcttc

SEQ ID NO: 69425 - DNA, 33 bp, Homo sapien
aaaaataaaaacaacaaagtctcttgatctgaa

SEQ ID NO: 69426 - DNA, 33 bp, Homo sapien
aaaaataaaaacaacagagtctcttgatctgaa

SEQ ID NO: 69427 - DNA, 33 bp, Homo sapien
cacattatatccgagaagaacttgtgaagagcc

SEQ ID NO: 69428 - DNA, 33 bp, Homo sapien
cacattatatccgagacgaacttgtgaagagcc

SEQ ID NO: 69429 - DNA, 33 bp, Homo sapien
ctgaacagattttctaaggaatggatagagcca

SEQ ID NO: 69430 - DNA, 33 bp, Homo sapien
ctgaacagattttctagggaatggatagagcca

SEQ ID NO: 69431 - DNA, 33 bp, Homo sapien
tcttcataactcttaactggaagagactcctgt

SEQ ID NO: 69432 - DNA, 33 bp, Homo sapien
tcttcataactcttaattggaagagactcctgt

SEQ ID NO: 69433 - DNA, 33 bp, Homo sapien
actgtggccaattttgaaaaatatgattagcca

SEQ ID NO: 69434 - DNA, 33 bp, Homo sapien
actgtggccaattttggaaaatatgattagcca

SEQ ID NO: 69435 - DNA, 33 bp, Homo sapien
caaatatgttgtaccactcaggataagctgaag

SEQ ID NO: 69436 - DNA, 33 bp, Homo sapien
caaatatgttgtaccagtcaggataagctgaag

SEQ ID NO: 69437 - DNA, 33 bp, Homo sapien
gttaggcaaagcaagtcacatggtaaaaactgc

SEQ ID NO: 69438 - DNA, 33 bp, Homo sapien
gttaggcaaagcaagttacatggtaaaaactgc

SEQ ID NO: 69439 - DNA, 33 bp, Homo sapien
gtggagcagggaggtacaaccttttccagggag

SEQ ID NO: 69440 - DNA, 33 bp, Homo sapien
gtggagcagggaggtagaaccttttccagggag

SEQ ID NO: 69441 - DNA, 33 bp, Homo sapien
atttggaacattggcaccttaatccttctcttc

SEQ ID NO: 69442 - DNA, 33 bp, Homo sapien
atttggaacattggcagcttaatccttctcttc

SEQ ID NO: 69443 - DNA, 33 bp, Homo sapien
tgtgggaaggtaaatacatgggtgacactcaat

SEQ ID NO: 69444 - DNA, 33 bp, Homo sapien
tgtgggaaggtaaatatatgggtgacactcaat

SEQ ID NO: 69445 - DNA, 33 bp, Homo sapien
gagataatacttagagccatctttcttgcctaa

SEQ ID NO: 69446 - DNA, 33 bp, Homo sapien
gagataatacttagaggcatctttcttgcctaa

SEQ ID NO: 69447 - DNA, 33 bp, Homo sapien
ggaggtagggctactgaaaagaactagggcaat

SEQ ID NO: 69448 - DNA, 33 bp, Homo sapien
ggaggtagggctactgcaaagaactagggcaat

SEQ ID NO: 69449 - DNA, 33 bp, Homo sapien
caatcaagagaaactaagccataccttcaagac

SEQ ID NO: 69450 - DNA, 33 bp, Homo sapien
caatcaagagaaactaggccataccttcaagac

SEQ ID NO: 69451 - DNA, 33 bp, Homo sapien
cctaactaatcaattcaaccttgtgacattcct

SEQ ID NO: 69452 - DNA, 33 bp, Homo sapien
cctaactaatcaattcgaccttgtgacattcct

SEQ ID NO: 69453 - DNA, 33 bp, Homo sapien
ggctgcatgggtagtacgtttactgaagatgtg

SEQ ID NO: 69454 - DNA, 33 bp, Homo sapien
ggctgcatgggtagtatgtttactgaagatgtg

SEQ ID NO: 69455 - DNA, 33 bp, Homo sapien
gaagactagagaggtacatgaaaaacctttgca

SEQ ID NO: 69456 - DNA, 33 bp, Homo sapien
gaagactagagaggtatatgaaaaacctttgca

SEQ ID NO: 69457 - DNA, 33 bp, Homo sapien
tttccgaagttccccaacatatccattgaggca

SEQ ID NO: 69458 - DNA, 33 bp, Homo sapien
tttccgaagttccccaccatatccattgaggca

SEQ ID NO: 69459 - DNA, 33 bp, Homo sapien
gaatcaggaaatggaagttagatgctgggaaga

SEQ ID NO: 69460 - DNA, 33 bp, Homo sapien
gaatcaggaaatggaatttagatgctgggaaga

SEQ ID NO: 69461 - DNA, 33 bp, Homo sapien
aatatccctctgttacgccaaagatcccttctc

SEQ ID NO: 69462 - DNA, 33 bp, Homo sapien
aatatccctctgttactccaaagatcccttctc

SEQ ID NO: 69463 - DNA, 33 bp, Homo sapien
atgtccgacattttgacctcttctaacgaggcg

SEQ ID NO: 69464 - DNA, 33 bp, Homo sapien
atgtccgacattttgagctcttctaacgaggcg

SEQ ID NO: 69465 - DNA, 33 bp, Homo sapien
gctttttacagaggaacgtacattagctttcgg

SEQ ID NO: 69466 - DNA, 33 bp, Homo sapien
gctttttacagaggaaggtacattagctttcgg

SEQ ID NO: 69467 - DNA, 33 bp, Homo sapien
tccttcaccatcctgacacagaggtaattactg

SEQ ID NO: 69468 - DNA, 33 bp, Homo sapien
tccttcaccatcctgatacagaggtaattactg

SEQ ID NO: 69469 - DNA, 33 bp, Homo sapien
catgttctgactgatacatgagtgttaaataaa

SEQ ID NO: 69470 - DNA, 33 bp, Homo sapien
catgttctgactgatatatgagtgttaaataaa

SEQ ID NO: 69471 - DNA, 33 bp, Homo sapien
aaaagaaatgaagtaccgacaccttttacaaca

SEQ ID NO: 69472 - DNA, 33 bp, Homo sapien
aaaagaaatgaagtactgacaccttttacaaca

SEQ ID NO: 69473 - DNA, 33 bp, Homo sapien
tagctcagagtagggaatcaaagtaggcggggc

SEQ ID NO: 69474 - DNA, 33 bp, Homo sapien
tagctcagagtagggactcaaagtaggcggggc

SEQ ID NO: 69475 - DNA, 33 bp, Homo sapien
catccagacaccactcagaatatccatccccag

SEQ ID NO: 69476 - DNA, 33 bp, Homo sapien
catccagacaccactcggaatatccatccccag

SEQ ID NO: 69477 - DNA, 33 bp, Homo sapien
ggggatgaatattctaaaaatggcccccaggat

SEQ ID NO: 69478 - DNA, 33 bp, Homo sapien
ggggatgaatattctacaaatggcccccaggat

SEQ ID NO: 69479 - DNA, 33 bp, Homo sapien
atcttagtcctaccagcattagctaatgtaacc

SEQ ID NO: 69480 - DNA, 33 bp, Homo sapien
atcttagtcctaccagtattagctaatgtaacc

SEQ ID NO: 69481 - DNA, 33 bp, Homo sapien
gctccgctttcactcaagtttgcagtggcagag

SEQ ID NO: 69482 - DNA, 33 bp, Homo sapien
gctccgctttcactcacgtttgcagtggcagag

SEQ ID NO: 69483 - DNA, 33 bp, Homo sapien
tcctaagtacagaatacggttcctggccactgc

SEQ ID NO: 69484 - DNA, 33 bp, Homo sapien
tcctaagtacagaatatggttcctggccactgc

SEQ ID NO: 69485 - DNA, 33 bp, Homo sapien
ggcacatgattatacaacaagggaggggcagag

SEQ ID NO: 69486 - DNA, 33 bp, Homo sapien
ggcacatgattatacatcaagggaggggcagag

SEQ ID NO: 69487 - DNA, 33 bp, Homo sapien
tactactattattttccatgcctgggaagcttt

SEQ ID NO: 69488 - DNA, 33 bp, Homo sapien
tactactattattttctatgcctgggaagcttt

SEQ ID NO: 69489 - DNA, 33 bp, Homo sapien
ttctatacaacatatacagtttgctgctaggct

SEQ ID NO: 69490 - DNA, 33 bp, Homo sapien
ttctatacaacatatatagtttgctgctaggct

SEQ ID NO: 69491 - DNA, 33 bp, Homo sapien
aaaatcacatctctccaagtctcctagaaggaa

SEQ ID NO: 69492 - DNA, 33 bp, Homo sapien
aaaatcacatctctcccagtctcctagaaggaa

SEQ ID NO: 69493 - DNA, 33 bp, Homo sapien
agttaccataataaaacatctgttcccatcaac

SEQ ID NO: 69494 - DNA, 33 bp, Homo sapien
agttaccataataaaatatctgttcccatcaac

SEQ ID NO: 69495 - DNA, 33 bp, Homo sapien
ccattactacttgttcaatgtattcaatggaat

SEQ ID NO: 69496 - DNA, 33 bp, Homo sapien
ccattactacttgttcgatgtattcaatggaat

SEQ ID NO: 69497 - DNA, 33 bp, Homo sapien
tggtctgtataacagtgaatgtggtccctggtt

SEQ ID NO: 69498 - DNA, 33 bp, Homo sapien
tggtctgtataacagttaatgtggtccctggtt

SEQ ID NO: 69499 - DNA, 33 bp, Homo sapien
gtccaggaatgcctccaaaatgtctagttgatg

SEQ ID NO: 69500 - DNA, 33 bp, Homo sapien
gtccaggaatgcctccgaaatgtctagttgatg

SEQ ID NO: 69501 - DNA, 33 bp, Homo sapien
gcatattgcacccacaactcctgaagggcaccc

SEQ ID NO: 69502 - DNA, 33 bp, Homo sapien
gcatattgcacccacagctcctgaagggcaccc

SEQ ID NO: 69503 - DNA, 33 bp, Homo sapien
ggtagttaaagccacagaatctactctaagggc

SEQ ID NO: 69504 - DNA, 33 bp, Homo sapien
ggtagttaaagccacataatctactctaagggc

SEQ ID NO: 69505 - DNA, 33 bp, Homo sapien
gagaaaagggagatgcactcatgaggacagagc

SEQ ID NO: 69506 - DNA, 33 bp, Homo sapien
gagaaaagggagatgcgctcatgaggacagagc

SEQ ID NO: 69507 - DNA, 33 bp, Homo sapien
cttaatatgcagattcaactttttctataaaac

SEQ ID NO: 69508 - DNA, 33 bp, Homo sapien
cttaatatgcagattctactttttctataaaac

SEQ ID NO: 69509 - DNA, 33 bp, Homo sapien
ctatttatagcccaaagtgtacacaggaagtac

SEQ ID NO: 69510 - DNA, 33 bp, Homo sapien
ctatttatagcccaaattgtacacaggaagtac

SEQ ID NO: 69511 - DNA, 33 bp, Homo sapien
gatttatacgctacaacggacaaattcaaactt

SEQ ID NO: 69512 - DNA, 33 bp, Homo sapien
gatttatacgctacaatggacaaattcaaactt

SEQ ID NO: 69513 - DNA, 33 bp, Homo sapien
ctctacttcaaagtggcattttatgttgtaagg

SEQ ID NO: 69514 - DNA, 33 bp, Homo sapien
ctctacttcaaagtggtattttatgttgtaagg

SEQ ID NO: 69515 - DNA, 33 bp, Homo sapien
tgcagcctgggaataccggtcttcatcctgagc

SEQ ID NO: 69516 - DNA, 33 bp, Homo sapien
tgcagcctgggaatactggtcttcatcctgagc

SEQ ID NO: 69517 - DNA, 33 bp, Homo sapien
gtctaggatccagggagattagggcaaagaaag

SEQ ID NO: 69518 - DNA, 33 bp, Homo sapien
gtctaggatccagggatattagggcaaagaaag

SEQ ID NO: 69519 - DNA, 33 bp, Homo sapien
caaatactgttgatacaaggcaataataagaaa

SEQ ID NO: 69520 - DNA, 33 bp, Homo sapien
caaatactgttgataccaggcaataataagaaa

SEQ ID NO: 69521 - DNA, 33 bp, Homo sapien
tacttgaaaggtgcacaggaaaggctgttattc

SEQ ID NO: 69522 - DNA, 33 bp, Homo sapien
tacttgaaaggtgcacgggaaaggctgttattc

SEQ ID NO: 69523 - DNA, 33 bp, Homo sapien
tttcccaaaatgagaaaagaaatcttgatataa

SEQ ID NO: 69524 - DNA, 33 bp, Homo sapien
tttcccaaaatgagaagagaaatcttgatataa

SEQ ID NO: 69525 - DNA, 33 bp, Homo sapien
ctctgggagctcctaacctaatgggggtgactc

SEQ ID NO: 69526 - DNA, 33 bp, Homo sapien
ctctgggagctcctaatctaatgggggtgactc

SEQ ID NO: 69527 - DNA, 33 bp, Homo sapien
ccccagacctcttctccaagcctggccttcagc

SEQ ID NO: 69528 - DNA, 33 bp, Homo sapien
ccccagacctcttctctaagcctggccttcagc

SEQ ID NO: 69529 - DNA, 33 bp, Homo sapien
ccgtttcttcatagaacggggggtatccacaga

SEQ ID NO: 69530 - DNA, 33 bp, Homo sapien
ccgtttcttcatagaatggggggtatccacaga

SEQ ID NO: 69531 - DNA, 33 bp, Homo sapien
ccaggagactttcatgcagcctaaagtacagcc

SEQ ID NO: 69532 - DNA, 33 bp, Homo sapien
ccaggagactttcatgtagcctaaagtacagcc

SEQ ID NO: 69533 - DNA, 33 bp, Homo sapien
tgactctagttcccagaagcccctgttctcctt

SEQ ID NO: 69534 - DNA, 33 bp, Homo sapien
tgactctagttcccaggagcccctgttctcctt

SEQ ID NO: 69535 - DNA, 33 bp, Homo sapien
cctatgtcagaacataccttgttggggcttccc

SEQ ID NO: 69536 - DNA, 33 bp, Homo sapien
cctatgtcagaacatatcttgttggggcttccc

SEQ ID NO: 69537 - DNA, 33 bp, Homo sapien
gggcggtttccaatacagaagacacagtcatgc

SEQ ID NO: 69538 - DNA, 33 bp, Homo sapien
gggcggtttccaatacggaagacacagtcatgc

SEQ ID NO: 69539 - DNA, 33 bp, Homo sapien
gacaggatagatcccccgggcaagtcagagttc

SEQ ID NO: 69540 - DNA, 33 bp, Homo sapien
gacaggatagatcccctgggcaagtcagagttc

SEQ ID NO: 69541 - DNA, 33 bp, Homo sapien
cttgcttccagacctacgatgcggacctccggg

SEQ ID NO: 69542 - DNA, 33 bp, Homo sapien
cttgcttccagacctatgatgcggacctccggg

SEQ ID NO: 69543 - DNA, 33 bp, Homo sapien
tccatgaaaaactcacccccagaggacacacat

SEQ ID NO: 69544 - DNA, 33 bp, Homo sapien
tccatgaaaaactcactcccagaggacacacat

SEQ ID NO: 69545 - DNA, 33 bp, Homo sapien
tgtctgattgatggtccagagaggttaagtgac

SEQ ID NO: 69546 - DNA, 33 bp, Homo sapien
tgtctgattgatggtcgagagaggttaagtgac

SEQ ID NO: 69547 - DNA, 33 bp, Homo sapien
agcagctagaagttcagcttgctatgctgtcag

SEQ ID NO: 69548 - DNA, 33 bp, Homo sapien
agcagctagaagttcatcttgctatgctgtcag

SEQ ID NO: 69549 - DNA, 33 bp, Homo sapien
ggcccagaagtggaaaaaagaatgccagctgag

SEQ ID NO: 69550 - DNA, 33 bp, Homo sapien
ggcccagaagtggaaagaagaatgccagctgag

SEQ ID NO: 69551 - DNA, 33 bp, Homo sapien
ccctaagtcctcccaaagtgggtcaaattcttt

SEQ ID NO: 69552 - DNA, 33 bp, Homo sapien
ccctaagtcctcccaacgtgggtcaaattcttt

SEQ ID NO: 69553 - DNA, 33 bp, Homo sapien
tacagcctccacaggaaaagacggatggaaggt

SEQ ID NO: 69554 - DNA, 33 bp, Homo sapien
tacagcctccacaggataagacggatggaaggt

SEQ ID NO: 69555 - DNA, 33 bp, Homo sapien
aaaatacttgagtatacgatattgccttgcaga

SEQ ID NO: 69556 - DNA, 33 bp, Homo sapien
aaaatacttgagtatatgatattgccttgcaga

SEQ ID NO: 69557 - DNA, 33 bp, Homo sapien
tgtaggtagggaatacagaacctgagaaagatc

SEQ ID NO: 69558 - DNA, 33 bp, Homo sapien
tgtaggtagggaataccgaacctgagaaagatc

SEQ ID NO: 69559 - DNA, 33 bp, Homo sapien
tcacagtaacatagccaaaggaggaatttacct

SEQ ID NO: 69560 - DNA, 33 bp, Homo sapien
tcacagtaacatagccgaaggaggaatttacct

SEQ ID NO: 69561 - DNA, 33 bp, Homo sapien
taagactggtccacaaaaaggaagccacacttg

SEQ ID NO: 69562 - DNA, 33 bp, Homo sapien
taagactggtccacaagaaggaagccacacttg

SEQ ID NO: 69563 - DNA, 33 bp, Homo sapien
attctgggatgcaacaaggagagatgtatggct

SEQ ID NO: 69564 - DNA, 33 bp, Homo sapien
attctgggatgcaacagggagagatgtatggct

SEQ ID NO: 69565 - DNA, 33 bp, Homo sapien
gcactggatgaaagtcagaagatgggtctctct

SEQ ID NO: 69566 - DNA, 33 bp, Homo sapien
gcactggatgaaagtcggaagatgggtctctct

SEQ ID NO: 69567 - DNA, 33 bp, Homo sapien
ctcccggcaaagtccacgaagctgtttatgcag

SEQ ID NO: 69568 - DNA, 33 bp, Homo sapien
ctcccggcaaagtccaggaagctgtttatgcag

SEQ ID NO: 69569 - DNA, 33 bp, Homo sapien
ttggaacaagggcacaaagaggaggttttttgt

SEQ ID NO: 69570 - DNA, 33 bp, Homo sapien
ttggaacaagggcacagagaggaggttttttgt

SEQ ID NO: 69571 - DNA, 33 bp, Homo sapien
catggtaaacacatagcatcgtccaccacaacc

SEQ ID NO: 69572 - DNA, 33 bp, Homo sapien
catggtaaacacataggatcgtccaccacaacc

SEQ ID NO: 69573 - DNA, 33 bp, Homo sapien
cctggacttgaggcaaactttactttctcagat

SEQ ID NO: 69574 - DNA, 33 bp, Homo sapien
cctggacttgaggcaacctttactttctcagat

SEQ ID NO: 69575 - DNA, 33 bp, Homo sapien
tcagactcccagaacaactaaaaggataacagg

SEQ ID NO: 69576 - DNA, 33 bp, Homo sapien
tcagactcccagaacagctaaaaggataacagg

SEQ ID NO: 69577 - DNA, 33 bp, Homo sapien
gacttttcatacataactagagttgagaaccat

SEQ ID NO: 69578 - DNA, 33 bp, Homo sapien
gacttttcatacataattagagttgagaaccat

SEQ ID NO: 69579 - DNA, 33 bp, Homo sapien
ataggatagtcacagccattttagtaagttact

SEQ ID NO: 69580 - DNA, 33 bp, Homo sapien
ataggatagtcacagctattttagtaagttact

SEQ ID NO: 69581 - DNA, 33 bp, Homo sapien
tagagtacaagccccaaaggcaactgaaattca

SEQ ID NO: 69582 - DNA, 33 bp, Homo sapien
tagagtacaagccccacaggcaactgaaattca

SEQ ID NO: 69583 - DNA, 33 bp, Homo sapien
tggtttgaccatcatcactataacctgtatctt

SEQ ID NO: 69584 - DNA, 33 bp, Homo sapien
tggtttgaccatcatcgctataacctgtatctt

SEQ ID NO: 69585 - DNA, 33 bp, Homo sapien
atcaacttctgagctacagtgagtaggagataa

SEQ ID NO: 69586 - DNA, 33 bp, Homo sapien
atcaacttctgagctagagtgagtaggagataa

SEQ ID NO: 69587 - DNA, 33 bp, Homo sapien
gtgatgtggtatgagactcaggctgtacggcct

SEQ ID NO: 69588 - DNA, 33 bp, Homo sapien
gtgatgtggtatgagattcaggctgtacggcct

SEQ ID NO: 69589 - DNA, 33 bp, Homo sapien
ggtttgtgtgagttcaccagagtcggaagctga

SEQ ID NO: 69590 - DNA, 33 bp, Homo sapien
ggtttgtgtgagttcatcagagtcggaagctga

SEQ ID NO: 69591 - DNA, 33 bp, Homo sapien
agagctcataaacaccgcagctgctgactaaat

SEQ ID NO: 69592 - DNA, 33 bp, Homo sapien
agagctcataaacacctcagctgctgactaaat

SEQ ID NO: 69593 - DNA, 33 bp, Homo sapien
cattttggaggcaactcaggtagcctgaatggc

SEQ ID NO: 69594 - DNA, 33 bp, Homo sapien
cattttggaggcaacttaggtagcctgaatggc

SEQ ID NO: 69595 - DNA, 33 bp, Homo sapien
gaactacagatacatacggatgttttcaaaaac

SEQ ID NO: 69596 - DNA, 33 bp, Homo sapien
gaactacagatacatatggatgttttcaaaaac

SEQ ID NO: 69597 - DNA, 33 bp, Homo sapien
aacttggtggggttcaaatggataaatcatccc

SEQ ID NO: 69598 - DNA, 33 bp, Homo sapien
aacttggtggggttcacatggataaatcatccc

SEQ ID NO: 69599 - DNA, 33 bp, Homo sapien
aaatacagcattttacccacagtgattaggctg

SEQ ID NO: 69600 - DNA, 33 bp, Homo sapien
aaatacagcattttactcacagtgattaggctg

SEQ ID NO: 69601 - DNA, 33 bp, Homo sapien
tgcccataccaccatcaaaaatccaaaaacaaa

SEQ ID NO: 69602 - DNA, 33 bp, Homo sapien
tgcccataccaccatcgaaaatccaaaaacaaa

SEQ ID NO: 69603 - DNA, 33 bp, Homo sapien
gttgcagctgtttccaccgtaaggcccacaggg

SEQ ID NO: 69604 - DNA, 33 bp, Homo sapien
gttgcagctgtttccatcgtaaggcccacaggg

SEQ ID NO: 69605 - DNA, 33 bp, Homo sapien
ttcagctaatgtgaaacgctggccagagatcag

SEQ ID NO: 69606 - DNA, 33 bp, Homo sapien
ttcagctaatgtgaaatgctggccagagatcag

SEQ ID NO: 69607 - DNA, 33 bp, Homo sapien
atacacattccttgacccagaattttacttcca

SEQ ID NO: 69608 - DNA, 33 bp, Homo sapien
atacacattccttgactcagaattttacttcca

SEQ ID NO: 69609 - DNA, 33 bp, Homo sapien
aatgctacaaatcagcaaattaaggctttgttt

SEQ ID NO: 69610 - DNA, 33 bp, Homo sapien
aatgctacaaatcagcgaattaaggctttgttt

SEQ ID NO: 69611 - DNA, 33 bp, Homo sapien
gagaagcagggagatacagtcagagcagaagga

SEQ ID NO: 69612 - DNA, 33 bp, Homo sapien
gagaagcagggagatatagtcagagcagaagga

SEQ ID NO: 69613 - DNA, 33 bp, Homo sapien
gcaaggtactacttggacaccacagttctacct

SEQ ID NO: 69614 - DNA, 33 bp, Homo sapien
gcaaggtactacttgggcaccacagttctacct

SEQ ID NO: 69615 - DNA, 33 bp, Homo sapien
tgtaactcatgggtaccgcattctgaaagagac

SEQ ID NO: 69616 - DNA, 33 bp, Homo sapien
tgtaactcatgggtactgcattctgaaagagac

SEQ ID NO: 69617 - DNA, 33 bp, Homo sapien
gagatcagccacattacgagcagtgggggcagg

SEQ ID NO: 69618 - DNA, 33 bp, Homo sapien
gagatcagccacattatgagcagtgggggcagg

SEQ ID NO: 69619 - DNA, 33 bp, Homo sapien
ttcactgctggattgaactcaataatgggaatg

SEQ ID NO: 69620 - DNA, 33 bp, Homo sapien
ttcactgctggattgatctcaataatgggaatg

SEQ ID NO: 69621 - DNA, 33 bp, Homo sapien
ccttgcccagtgcgtaccaggttctaccccagg

SEQ ID NO: 69622 - DNA, 33 bp, Homo sapien
ccttgcccagtgcgtatcaggttctaccccagg

SEQ ID NO: 69623 - DNA, 33 bp, Homo sapien
catagggctcttttgaggatttaaattagttaa

SEQ ID NO: 69624 - DNA, 33 bp, Homo sapien
catagggctcttttgatgatttaaattagttaa

SEQ ID NO: 69625 - DNA, 33 bp, Homo sapien
caaggaagacccagaaacaaaagtggcaagaat

SEQ ID NO: 69626 - DNA, 33 bp, Homo sapien
caaggaagacccagaaccaaaagtggcaagaat

SEQ ID NO: 69627 - DNA, 33 bp, Homo sapien
aatttgttggaaggaacgaaggaagatcccaat

SEQ ID NO: 69628 - DNA, 33 bp, Homo sapien
aatttgttggaaggaatgaaggaagatcccaat

SEQ ID NO: 69629 - DNA, 33 bp, Homo sapien
ttcttctctggagtcactcattccttcttgtat

SEQ ID NO: 69630 - DNA, 33 bp, Homo sapien
ttcttctctggagtcattcattccttcttgtat

SEQ ID NO: 69631 - DNA, 33 bp, Homo sapien
cataccttctaaggataagccagacattgctaa

SEQ ID NO: 69632 - DNA, 33 bp, Homo sapien
cataccttctaaggatgagccagacattgctaa

SEQ ID NO: 69633 - DNA, 33 bp, Homo sapien
gaacaccatgaaccctaagaaaagctacctaat

SEQ ID NO: 69634 - DNA, 33 bp, Homo sapien
gaacaccatgaaccctgagaaaagctacctaat

SEQ ID NO: 69635 - DNA, 33 bp, Homo sapien
attagtagaagttaaccggctgtaggcagaaga

SEQ ID NO: 69636 - DNA, 33 bp, Homo sapien
attagtagaagttaactggctgtaggcagaaga

SEQ ID NO: 69637 - DNA, 33 bp, Homo sapien
tacaaggttaccatgcaagagtgtttggcttgt

SEQ ID NO: 69638 - DNA, 33 bp, Homo sapien
tacaaggttaccatgccagagtgtttggcttgt

SEQ ID NO: 69639 - DNA, 33 bp, Homo sapien
agggattctgtggaagaataggttgtcaggcat

SEQ ID NO: 69640 - DNA, 33 bp, Homo sapien
agggattctgtggaagtataggttgtcaggcat

SEQ ID NO: 69641 - DNA, 33 bp, Homo sapien
atagaagcagaagacccagcaagaaagataaag

SEQ ID NO: 69642 - DNA, 33 bp, Homo sapien
atagaagcagaagaccgagcaagaaagataaag

SEQ ID NO: 69643 - DNA, 33 bp, Homo sapien
gcagccaggtggtactaaaaagacaatgaaaaa

SEQ ID NO: 69644 - DNA, 33 bp, Homo sapien
gcagccaggtggtactgaaaagacaatgaaaaa

SEQ ID NO: 69645 - DNA, 33 bp, Homo sapien
actgtacttggcctgaaggaaattggcaaaatg

SEQ ID NO: 69646 - DNA, 33 bp, Homo sapien
actgtacttggcctgacggaaattggcaaaatg

SEQ ID NO: 69647 - DNA, 33 bp, Homo sapien
tagaacatctttggaaacttatgtgctaattca

SEQ ID NO: 69648 - DNA, 33 bp, Homo sapien
tagaacatctttggaagcttatgtgctaattca

SEQ ID NO: 69649 - DNA, 33 bp, Homo sapien
acactgcccttaggaccaggcaagacaggtgcc

SEQ ID NO: 69650 - DNA, 33 bp, Homo sapien
acactgcccttaggacgaggcaagacaggtgcc

SEQ ID NO: 69651 - DNA, 33 bp, Homo sapien
tgcaatggaaattctcaaaagctctttactaga

SEQ ID NO: 69652 - DNA, 33 bp, Homo sapien
tgcaatggaaattctcgaaagctctttactaga

SEQ ID NO: 69653 - DNA, 33 bp, Homo sapien
gaagcactcttcctacgcttattctatgtctct

SEQ ID NO: 69654 - DNA, 33 bp, Homo sapien
gaagcactcttcctactcttattctatgtctct

SEQ ID NO: 69655 - DNA, 33 bp, Homo sapien
tgttccagaatcttgcactttgaaggaaaagtt

SEQ ID NO: 69656 - DNA, 33 bp, Homo sapien
tgttccagaatcttgcgctttgaaggaaaagtt

SEQ ID NO: 69657 - DNA, 33 bp, Homo sapien
tgaagtaataccccagaatgtgaacatgtgtga

SEQ ID NO: 69658 - DNA, 33 bp, Homo sapien
tgaagtaataccccaggatgtgaacatgtgtga

SEQ ID NO: 69659 - DNA, 33 bp, Homo sapien
ctatccatgctggtcactatgcgaatatggtta

SEQ ID NO: 69660 - DNA, 33 bp, Homo sapien
ctatccatgctggtcattatgcgaatatggtta

SEQ ID NO: 69661 - DNA, 33 bp, Homo sapien
tttgataacaaggtcacatagtttcaagatatg

SEQ ID NO: 69662 - DNA, 33 bp, Homo sapien
tttgataacaaggtcatatagtttcaagatatg

SEQ ID NO: 69663 - DNA, 33 bp, Homo sapien
agaactgacaagaatcacattctaatggtttta

SEQ ID NO: 69664 - DNA, 33 bp, Homo sapien
agaactgacaagaatcgcattctaatggtttta

SEQ ID NO: 69665 - DNA, 33 bp, Homo sapien
tgtgactgtggattcacattagcttcttaatta

SEQ ID NO: 69666 - DNA, 33 bp, Homo sapien
tgtgactgtggattcatattagcttcttaatta

SEQ ID NO: 69667 - DNA, 33 bp, Homo sapien
aatagagaaagctctaaataaaacagtggtctt

SEQ ID NO: 69668 - DNA, 33 bp, Homo sapien
aatagagaaagctctacataaaacagtggtctt

SEQ ID NO: 69669 - DNA, 33 bp, Homo sapien
tcctatttttagatcaacaatttagctataatg

SEQ ID NO: 69670 - DNA, 33 bp, Homo sapien
tcctatttttagatcagcaatttagctataatg

SEQ ID NO: 69671 - DNA, 33 bp, Homo sapien
ttctggtgttgagccaagccctgcgcaaagcgg

SEQ ID NO: 69672 - DNA, 33 bp, Homo sapien
ttctggtgttgagccaggccctgcgcaaagcgg

SEQ ID NO: 69673 - DNA, 33 bp, Homo sapien
ttttattaactcacaacgggtgcattttctcag

SEQ ID NO: 69674 - DNA, 33 bp, Homo sapien
ttttattaactcacaatgggtgcattttctcag

SEQ ID NO: 69675 - DNA, 33 bp, Homo sapien
gcttgctttcatttgtaaagatgatagaaagct

SEQ ID NO: 69676 - DNA, 33 bp, Homo sapien
gcttgctttcatttgtcaagatgatagaaagct

SEQ ID NO: 69677 - DNA, 33 bp, Homo sapien
atgctttgttttcagtgactcctacaaacacag

SEQ ID NO: 69678 - DNA, 33 bp, Homo sapien
atgctttgttttcagttactcctacaaacacag

SEQ ID NO: 69679 - DNA, 33 bp, Homo sapien
gtatccagagtggcaaaaaaagactaatgggag

SEQ ID NO: 69680 - DNA, 33 bp, Homo sapien
gtatccagagtggcaagaaaagactaatgggag

SEQ ID NO: 69681 - DNA, 33 bp, Homo sapien
acagcagcacaattacaccagtaaccacagggc

SEQ ID NO: 69682 - DNA, 33 bp, Homo sapien
acagcagcacaattacgccagtaaccacagggc

SEQ ID NO: 69683 - DNA, 33 bp, Homo sapien
tgtttttcactatttcacttgtatttgtggaat

SEQ ID NO: 69684 - DNA, 33 bp, Homo sapien
tgtttttcactatttcccttgtatttgtggaat

SEQ ID NO: 69685 - DNA, 33 bp, Homo sapien
agaaggaagaaagtccaaacgcatccgaacttc

SEQ ID NO: 69686 - DNA, 33 bp, Homo sapien
agaaggaagaaagtccgaacgcatccgaacttc

SEQ ID NO: 69687 - DNA, 33 bp, Homo sapien
tgtattactaatagagactacgcatttactatc

SEQ ID NO: 69688 - DNA, 33 bp, Homo sapien
tgtattactaatagagcctacgcatttactatc

SEQ ID NO: 69689 - DNA, 33 bp, Homo sapien
aagctccatgaaccaccggtaagaactaccttt

SEQ ID NO: 69690 - DNA, 33 bp, Homo sapien
aagctccatgaaccactggtaagaactaccttt

SEQ ID NO: 69691 - DNA, 33 bp, Homo sapien
ggttgccctctctgtacacctccagcttttctc

SEQ ID NO: 69692 - DNA, 33 bp, Homo sapien
ggttgccctctctgtagacctccagcttttctc

SEQ ID NO: 69693 - DNA, 33 bp, Homo sapien
tgccagcttatccctcaactattgctcagtcct

SEQ ID NO: 69694 - DNA, 33 bp, Homo sapien
tgccagcttatccctcgactattgctcagtcct

SEQ ID NO: 69695 - DNA, 33 bp, Homo sapien
gagcaagagacaaggaagccctaaattggatta

SEQ ID NO: 69696 - DNA, 33 bp, Homo sapien
gagcaagagacaaggaggccctaaattggatta

SEQ ID NO: 69697 - DNA, 33 bp, Homo sapien
ttcttttgtaatcctaccaaagaatggctccca

SEQ ID NO: 69698 - DNA, 33 bp, Homo sapien
ttcttttgtaatcctatcaaagaatggctccca

SEQ ID NO: 69699 - DNA, 33 bp, Homo sapien
atacagcttttttgaagactcacttgtctcatc

SEQ ID NO: 69700 - DNA, 33 bp, Homo sapien
atacagcttttttgaatactcacttgtctcatc

SEQ ID NO: 69701 - DNA, 33 bp, Homo sapien
ttagcatttgagcctacgttgccttcagggtgt

SEQ ID NO: 69702 - DNA, 33 bp, Homo sapien
ttagcatttgagcctatgttgccttcagggtgt

SEQ ID NO: 69703 - DNA, 33 bp, Homo sapien
aatttcattttgcatgaaaggaaatgtaatcat

SEQ ID NO: 69704 - DNA, 33 bp, Homo sapien
aatttcattttgcatggaaggaaatgtaatcat

SEQ ID NO: 69705 - DNA, 33 bp, Homo sapien
taatttccacctgttacgctcaacctacttctt

SEQ ID NO: 69706 - DNA, 33 bp, Homo sapien
taatttccacctgttatgctcaacctacttctt

SEQ ID NO: 69707 - DNA, 33 bp, Homo sapien
tctttctgaatccttaaaaaatgttccataatt

SEQ ID NO: 69708 - DNA, 33 bp, Homo sapien
tctttctgaatccttacaaaatgttccataatt

SEQ ID NO: 69709 - DNA, 33 bp, Homo sapien
acactcagctgtgaaaaaaggttttaaatatag

SEQ ID NO: 69710 - DNA, 33 bp, Homo sapien
acactcagctgtgaaagaaggttttaaatatag

SEQ ID NO: 69711 - DNA, 33 bp, Homo sapien
tagtgttcagccaggaactaagaaagaagatta

SEQ ID NO: 69712 - DNA, 33 bp, Homo sapien
tagtgttcagccaggatctaagaaagaagatta

SEQ ID NO: 69713 - DNA, 33 bp, Homo sapien
taccaaaacgtgacacagagacacaaggtgagc

SEQ ID NO: 69714 - DNA, 33 bp, Homo sapien
taccaaaacgtgacacggagacacaaggtgagc

SEQ ID NO: 69715 - DNA, 33 bp, Homo sapien
cagttatttcttttggaaacatagtagaaaagt

SEQ ID NO: 69716 - DNA, 33 bp, Homo sapien
cagttatttcttttgggaacatagtagaaaagt

SEQ ID NO: 69717 - DNA, 33 bp, Homo sapien
ccagaataagtatacactgtacccattaagtaa

SEQ ID NO: 69718 - DNA, 33 bp, Homo sapien
ccagaataagtatacagtgtacccattaagtaa

SEQ ID NO: 69719 - DNA, 33 bp, Homo sapien
caggttcaatgctatcactattaaactaccaat

SEQ ID NO: 69720 - DNA, 33 bp, Homo sapien
caggttcaatgctatcgctattaaactaccaat

SEQ ID NO: 69721 - DNA, 33 bp, Homo sapien
agtatccaacgttccaaacgaaatttagaatag

SEQ ID NO: 69722 - DNA, 33 bp, Homo sapien
agtatccaacgttccatacgaaatttagaatag

SEQ ID NO: 69723 - DNA, 33 bp, Homo sapien
cccactaggaaaaggtaaaatatgcctgctgta

SEQ ID NO: 69724 - DNA, 33 bp, Homo sapien
cccactaggaaaaggtgaaatatgcctgctgta

SEQ ID NO: 69725 - DNA, 33 bp, Homo sapien
aagatatttaccattaataaagcctggcacctg

SEQ ID NO: 69726 - DNA, 33 bp, Homo sapien
aagatatttaccattagtaaagcctggcacctg

SEQ ID NO: 69727 - DNA, 33 bp, Homo sapien
gacctttaccagaacaacatactcatatttccc

SEQ ID NO: 69728 - DNA, 33 bp, Homo sapien
gacctttaccagaacatcatactcatatttccc

SEQ ID NO: 69729 - DNA, 33 bp, Homo sapien
taaacccctttgtccaatagaagttgagcaatc

SEQ ID NO: 69730 - DNA, 33 bp, Homo sapien
taaacccctttgtccagtagaagttgagcaatc

SEQ ID NO: 69731 - DNA, 33 bp, Homo sapien
gaacaaagcctttgagaagtatcaagttatgta

SEQ ID NO: 69732 - DNA, 33 bp, Homo sapien
gaacaaagcctttgaggagtatcaagttatgta

SEQ ID NO: 69733 - DNA, 33 bp, Homo sapien
cccatactgcatccaaacttgttaattctggtt

SEQ ID NO: 69734 - DNA, 33 bp, Homo sapien
cccatactgcatccaagcttgttaattctggtt

SEQ ID NO: 69735 - DNA, 33 bp, Homo sapien
gtgctgcagccaagcagtatatcacacttctca

SEQ ID NO: 69736 - DNA, 33 bp, Homo sapien
gtgctgcagccaagcattatatcacacttctca

SEQ ID NO: 69737 - DNA, 33 bp, Homo sapien
gaccttaccttagatcacattgcctaaccttaa

SEQ ID NO: 69738 - DNA, 33 bp, Homo sapien
gaccttaccttagatcgcattgcctaaccttaa

SEQ ID NO: 69739 - DNA, 33 bp, Homo sapien
atgcatacacacagcagatataatacaagcaca

SEQ ID NO: 69740 - DNA, 33 bp, Homo sapien
atgcatacacacagcatatataatacaagcaca

SEQ ID NO: 69741 - DNA, 33 bp, Homo sapien
ctttccgtttcttataaatctctttagaaggct

SEQ ID NO: 69742 - DNA, 33 bp, Homo sapien
ctttccgtttcttatagatctctttagaaggct

SEQ ID NO: 69743 - DNA, 33 bp, Homo sapien
aagcacatgaaaagacacctaacaccattagtc

SEQ ID NO: 69744 - DNA, 33 bp, Homo sapien
aagcacatgaaaagacgcctaacaccattagtc

SEQ ID NO: 69745 - DNA, 33 bp, Homo sapien
ataatctttccaaaacaacaaaagatgccttcc

SEQ ID NO: 69746 - DNA, 33 bp, Homo sapien
ataatctttccaaaacgacaaaagatgccttcc

SEQ ID NO: 69747 - DNA, 33 bp, Homo sapien
agagtgcctatgtttgcatcaataccttatgct

SEQ ID NO: 69748 - DNA, 33 bp, Homo sapien
agagtgcctatgtttgtatcaataccttatgct

SEQ ID NO: 69749 - DNA, 33 bp, Homo sapien
cacttagaatctcagacacaagtaggagagttt

SEQ ID NO: 69750 - DNA, 33 bp, Homo sapien
cacttagaatctcagagacaagtaggagagttt

SEQ ID NO: 69751 - DNA, 33 bp, Homo sapien
agttacaatatgacccagcaatttgacttgtac

SEQ ID NO: 69752 - DNA, 33 bp, Homo sapien
agttacaatatgaccctgcaatttgacttgtac

SEQ ID NO: 69753 - DNA, 33 bp, Homo sapien
cagggcctagataggacgatgagggcacccaat

SEQ ID NO: 69754 - DNA, 33 bp, Homo sapien
cagggcctagataggatgatgagggcacccaat

SEQ ID NO: 69755 - DNA, 33 bp, Homo sapien
atctaggacctgataaacatttttattgcctga

SEQ ID NO: 69756 - DNA, 33 bp, Homo sapien
atctaggacctgataatcatttttattgcctga

SEQ ID NO: 69757 - DNA, 33 bp, Homo sapien
aacctagccctcttgaaaattatccctctccag

SEQ ID NO: 69758 - DNA, 33 bp, Homo sapien
aacctagccctcttgacaattatccctctccag

SEQ ID NO: 69759 - DNA, 33 bp, Homo sapien
cacacttgttggttgccgacagtgaagggatta

SEQ ID NO: 69760 - DNA, 33 bp, Homo sapien
cacacttgttggttgctgacagtgaagggatta

SEQ ID NO: 69761 - DNA, 33 bp, Homo sapien
taacaaatgttttatgaaaagagaatactactt

SEQ ID NO: 69762 - DNA, 33 bp, Homo sapien
taacaaatgttttatggaaagagaatactactt

SEQ ID NO: 69763 - DNA, 33 bp, Homo sapien
ctaccatttttggtaacgatatcctctgatctt

SEQ ID NO: 69764 - DNA, 33 bp, Homo sapien
ctaccatttttggtaatgatatcctctgatctt

SEQ ID NO: 69765 - DNA, 33 bp, Homo sapien
ctttagttcaaacttccacatgctgacttgcaa

SEQ ID NO: 69766 - DNA, 33 bp, Homo sapien
ctttagttcaaacttctacatgctgacttgcaa

SEQ ID NO: 69767 - DNA, 33 bp, Homo sapien
ttgcatcagaatcttacggaatacgaacagtgt

SEQ ID NO: 69768 - DNA, 33 bp, Homo sapien
ttgcatcagaatcttatggaatacgaacagtgt

SEQ ID NO: 69769 - DNA, 33 bp, Homo sapien
atcatcttagactttacagagggactgtcgagg

SEQ ID NO: 69770 - DNA, 33 bp, Homo sapien
atcatcttagactttatagagggactgtcgagg

SEQ ID NO: 69771 - DNA, 33 bp, Homo sapien
tggtgtacagatttacaaaagctcctagacagt

SEQ ID NO: 69772 - DNA, 33 bp, Homo sapien
tggtgtacagatttacgaaagctcctagacagt

SEQ ID NO: 69773 - DNA, 33 bp, Homo sapien
accatatcactcactacctacttttttgtcttc

SEQ ID NO: 69774 - DNA, 33 bp, Homo sapien
accatatcactcactatctacttttttgtcttc

SEQ ID NO: 69775 - DNA, 33 bp, Homo sapien
gacagaaagtctctaacagaaatattcatatag

SEQ ID NO: 69776 - DNA, 33 bp, Homo sapien
gacagaaagtctctaatagaaatattcatatag

SEQ ID NO: 69777 - DNA, 33 bp, Homo sapien
catgaatgacagtagacgcaagagaaagatgtg

SEQ ID NO: 69778 - DNA, 33 bp, Homo sapien
catgaatgacagtagatgcaagagaaagatgtg

SEQ ID NO: 69779 - DNA, 33 bp, Homo sapien
aggaagagctacaataaaagtagaaaatgatca

SEQ ID NO: 69780 - DNA, 33 bp, Homo sapien
aggaagagctacaatagaagtagaaaatgatca

SEQ ID NO: 69781 - DNA, 33 bp, Homo sapien
tgccacaactctaccaacattgaattgacagtt

SEQ ID NO: 69782 - DNA, 33 bp, Homo sapien
tgccacaactctaccagcattgaattgacagtt

SEQ ID NO: 69783 - DNA, 33 bp, Homo sapien
atggaaatgaaaactacgaggtaacgctacaca

SEQ ID NO: 69784 - DNA, 33 bp, Homo sapien
atggaaatgaaaactatgaggtaacgctacaca

SEQ ID NO: 69785 - DNA, 33 bp, Homo sapien
tttcatccaacctagcaaaaatgcccagggctg

SEQ ID NO: 69786 - DNA, 33 bp, Homo sapien
tttcatccaacctagcgaaaatgcccagggctg

SEQ ID NO: 69787 - DNA, 33 bp, Homo sapien
agtatttttcaagatccctctccagctatgaat

SEQ ID NO: 69788 - DNA, 33 bp, Homo sapien
agtatttttcaagatctctctccagctatgaat

SEQ ID NO: 69789 - DNA, 33 bp, Homo sapien
ccatttgaaaaagggaagaatgagaaacatagc

SEQ ID NO: 69790 - DNA, 33 bp, Homo sapien
ccatttgaaaaagggacgaatgagaaacatagc

SEQ ID NO: 69791 - DNA, 33 bp, Homo sapien
ccctcaaacatttctcacctagatgactgcaat

SEQ ID NO: 69792 - DNA, 33 bp, Homo sapien
ccctcaaacatttctctcctagatgactgcaat

SEQ ID NO: 69793 - DNA, 33 bp, Homo sapien
gtagtcgcagagggaacgtagaaaaggagaaag

SEQ ID NO: 69794 - DNA, 33 bp, Homo sapien
gtagtcgcagagggaatgtagaaaaggagaaag

SEQ ID NO: 69795 - DNA, 33 bp, Homo sapien
ttaatttccaatccaccctattagagaaaagcc

SEQ ID NO: 69796 - DNA, 33 bp, Homo sapien
ttaatttccaatccactctattagagaaaagcc

SEQ ID NO: 69797 - DNA, 33 bp, Homo sapien
tagacatatttctgcaacattattgattggctg

SEQ ID NO: 69798 - DNA, 33 bp, Homo sapien
tagacatatttctgcagcattattgattggctg

SEQ ID NO: 69799 - DNA, 33 bp, Homo sapien
aaaataggaaatgtcccgaatgcagacaataat

SEQ ID NO: 69800 - DNA, 33 bp, Homo sapien
aaaataggaaatgtcctgaatgcagacaataat

SEQ ID NO: 69801 - DNA, 33 bp, Homo sapien
agtatgtacatctttaagccttctgacaaatta

SEQ ID NO: 69802 - DNA, 33 bp, Homo sapien
agtatgtacatctttacgccttctgacaaatta

SEQ ID NO: 69803 - DNA, 33 bp, Homo sapien
atataaatgcaatagacaagctatcctaaatct

SEQ ID NO: 69804 - DNA, 33 bp, Homo sapien
atataaatgcaatagataagctatcctaaatct

SEQ ID NO: 69805 - DNA, 33 bp, Homo sapien
actaaaagccaggtacacctaatatggcaattc

SEQ ID NO: 69806 - DNA, 33 bp, Homo sapien
actaaaagccaggtacgcctaatatggcaattc

SEQ ID NO: 69807 - DNA, 33 bp, Homo sapien
atccatgtttagaatgcatgtagagtaaaccga

SEQ ID NO: 69808 - DNA, 33 bp, Homo sapien
atccatgtttagaatgtatgtagagtaaaccga

SEQ ID NO: 69809 - DNA, 33 bp, Homo sapien
tcagtcagttgttcaaacaatcattatatattt

SEQ ID NO: 69810 - DNA, 33 bp, Homo sapien
tcagtcagttgttcaatcaatcattatatattt

SEQ ID NO: 69811 - DNA, 33 bp, Homo sapien
tttagccatgtcaagagaatataccttgcttag

SEQ ID NO: 69812 - DNA, 33 bp, Homo sapien
tttagccatgtcaagataatataccttgcttag

SEQ ID NO: 69813 - DNA, 33 bp, Homo sapien
agcatgttttattaaactcacttgctgatgcac

SEQ ID NO: 69814 - DNA, 33 bp, Homo sapien
agcatgttttattaaagtcacttgctgatgcac

SEQ ID NO: 69815 - DNA, 33 bp, Homo sapien
ttctttgttgttgatcaaatttgttaactttga

SEQ ID NO: 69816 - DNA, 33 bp, Homo sapien
ttctttgttgttgatccaatttgttaactttga

SEQ ID NO: 69817 - DNA, 33 bp, Homo sapien
tttgatacttctagacacagtgctttttcttca

SEQ ID NO: 69818 - DNA, 33 bp, Homo sapien
tttgatacttctagacgcagtgctttttcttca

SEQ ID NO: 69819 - DNA, 33 bp, Homo sapien
tagaattacttttcaactagaatcatagttttg

SEQ ID NO: 69820 - DNA, 33 bp, Homo sapien
tagaattacttttcaattagaatcatagttttg

SEQ ID NO: 69821 - DNA, 33 bp, Homo sapien
atgaaatccaattaaccagctggaaggccatcg

SEQ ID NO: 69822 - DNA, 33 bp, Homo sapien
atgaaatccaattaacgagctggaaggccatcg

SEQ ID NO: 69823 - DNA, 33 bp, Homo sapien
ggcagaagagatttcccgagaatagtaaccatg

SEQ ID NO: 69824 - DNA, 33 bp, Homo sapien
ggcagaagagatttcctgagaatagtaaccatg

SEQ ID NO: 69825 - DNA, 33 bp, Homo sapien
ggatctctgctctgcactccactgtgacagttc

SEQ ID NO: 69826 - DNA, 33 bp, Homo sapien
ggatctctgctctgcattccactgtgacagttc

SEQ ID NO: 69827 - DNA, 33 bp, Homo sapien
ctccagcaactaaaaagagactcttgcacacag

SEQ ID NO: 69828 - DNA, 33 bp, Homo sapien
ctccagcaactaaaaatagactcttgcacacag

SEQ ID NO: 69829 - DNA, 33 bp, Homo sapien
taattcctgttaaaaaaaaaagtagcacgtatt

SEQ ID NO: 69830 - DNA, 33 bp, Homo sapien
taattcctgttaaaaagaaaagtagcacgtatt

SEQ ID NO: 69831 - DNA, 33 bp, Homo sapien
aaatggggcgagggctaaccatagaaaaggaaa

SEQ ID NO: 69832 - DNA, 33 bp, Homo sapien
aaatggggcgagggctgaccatagaaaaggaaa

SEQ ID NO: 69833 - DNA, 33 bp, Homo sapien
ggatgctctttcattcaatcccacagttaagat

SEQ ID NO: 69834 - DNA, 33 bp, Homo sapien
ggatgctctttcattctatcccacagttaagat

SEQ ID NO: 69835 - DNA, 33 bp, Homo sapien
gttcctcgagcataaaagtgttttattgttttt

SEQ ID NO: 69836 - DNA, 33 bp, Homo sapien
gttcctcgagcataaatgtgttttattgttttt

SEQ ID NO: 69837 - DNA, 33 bp, Homo sapien
acagcaaagagacaaccgagagaagagtgtaat

SEQ ID NO: 69838 - DNA, 33 bp, Homo sapien
acagcaaagagacaactgagagaagagtgtaat

SEQ ID NO: 69839 - DNA, 33 bp, Homo sapien
gggactagaatcctggcaggataaatgcccgtc

SEQ ID NO: 69840 - DNA, 33 bp, Homo sapien
gggactagaatcctggtaggataaatgcccgtc

SEQ ID NO: 69841 - DNA, 33 bp, Homo sapien
agtctttgataaacaccagccactccctcttag

SEQ ID NO: 69842 - DNA, 33 bp, Homo sapien
agtctttgataaacactagccactccctcttag

SEQ ID NO: 69843 - DNA, 33 bp, Homo sapien
cagcacaaaatcgacaccattcgcccaggagat

SEQ ID NO: 69844 - DNA, 33 bp, Homo sapien
cagcacaaaatcgacagcattcgcccaggagat

SEQ ID NO: 69845 - DNA, 33 bp, Homo sapien
cttggaaaaatctaaaaatgttgtactctaagt

SEQ ID NO: 69846 - DNA, 33 bp, Homo sapien
cttggaaaaatctaaacatgttgtactctaagt

SEQ ID NO: 69847 - DNA, 33 bp, Homo sapien
aggccctggacaagccaaaaggatccaaaggag

SEQ ID NO: 69848 - DNA, 33 bp, Homo sapien
aggccctggacaagccgaaaggatccaaaggag

SEQ ID NO: 69849 - DNA, 33 bp, Homo sapien
ccagtccagaacatacaaggataattctcactg

SEQ ID NO: 69850 - DNA, 33 bp, Homo sapien
ccagtccagaacatacgaggataattctcactg

SEQ ID NO: 69851 - DNA, 33 bp, Homo sapien
taatggattgatttcactatagattttggaaaa

SEQ ID NO: 69852 - DNA, 33 bp, Homo sapien
taatggattgatttcattatagattttggaaaa

SEQ ID NO: 69853 - DNA, 33 bp, Homo sapien
tagtctctggaacctcaacttcaggctgaagga

SEQ ID NO: 69854 - DNA, 33 bp, Homo sapien
tagtctctggaacctcgacttcaggctgaagga

SEQ ID NO: 69855 - DNA, 33 bp, Homo sapien
acccactcatactcacacccccacactcgttac

SEQ ID NO: 69856 - DNA, 33 bp, Homo sapien
acccactcatactcactcccccacactcgttac

SEQ ID NO: 69857 - DNA, 33 bp, Homo sapien
ctttgcggatagtacaaaacttttctgcacctt

SEQ ID NO: 69858 - DNA, 33 bp, Homo sapien
ctttgcggatagtacagaacttttctgcacctt

SEQ ID NO: 69859 - DNA, 33 bp, Homo sapien
gctcctgtatcatgtgaaacttacattaactac

SEQ ID NO: 69860 - DNA, 33 bp, Homo sapien
gctcctgtatcatgtggaacttacattaactac

SEQ ID NO: 69861 - DNA, 33 bp, Homo sapien
tagaagcaccctggaccgaaatggaaactctca

SEQ ID NO: 69862 - DNA, 33 bp, Homo sapien
tagaagcaccctggactgaaatggaaactctca

SEQ ID NO: 69863 - DNA, 33 bp, Homo sapien
ccgctgtttctatacactggcaaaactccaatc

SEQ ID NO: 69864 - DNA, 33 bp, Homo sapien
ccgctgtttctatacattggcaaaactccaatc

SEQ ID NO: 69865 - DNA, 33 bp, Homo sapien
aatagaattgcaccagcctcagaaggaacttcc

SEQ ID NO: 69866 - DNA, 33 bp, Homo sapien
aatagaattgcaccaggctcagaaggaacttcc

SEQ ID NO: 69867 - DNA, 33 bp, Homo sapien
ccaaatgaggagtccacaaagagtgagttagca

SEQ ID NO: 69868 - DNA, 33 bp, Homo sapien
ccaaatgaggagtccagaaagagtgagttagca

SEQ ID NO: 69869 - DNA, 33 bp, Homo sapien
tcatttgtagatgtaaacttctgagctgatagc

SEQ ID NO: 69870 - DNA, 33 bp, Homo sapien
tcatttgtagatgtaagcttctgagctgatagc

SEQ ID NO: 69871 - DNA, 33 bp, Homo sapien
agaagagaaacagaaaactctggagattgagac

SEQ ID NO: 69872 - DNA, 33 bp, Homo sapien
agaagagaaacagaaacctctggagattgagac

SEQ ID NO: 69873 - DNA, 33 bp, Homo sapien
gaagataggaaatcccaacagcatattaacttc

SEQ ID NO: 69874 - DNA, 33 bp, Homo sapien
gaagataggaaatcccgacagcatattaacttc

SEQ ID NO: 69875 - DNA, 33 bp, Homo sapien
gagtttacttatttcacctttctgcatcttgtt

SEQ ID NO: 69876 - DNA, 33 bp, Homo sapien
gagtttacttatttcagctttctgcatcttgtt

SEQ ID NO: 69877 - DNA, 33 bp, Homo sapien
tgcctcctttcatgaacgccaactgtggcctca

SEQ ID NO: 69878 - DNA, 33 bp, Homo sapien
tgcctcctttcatgaatgccaactgtggcctca

SEQ ID NO: 69879 - DNA, 33 bp, Homo sapien
aactggaataataacaatatctccttcatgggg

SEQ ID NO: 69880 - DNA, 33 bp, Homo sapien
aactggaataataacagtatctccttcatgggg

SEQ ID NO: 69881 - DNA, 33 bp, Homo sapien
atggttgagagttccacacagactctgccttta

SEQ ID NO: 69882 - DNA, 33 bp, Homo sapien
atggttgagagttccatacagactctgccttta

SEQ ID NO: 69883 - DNA, 33 bp, Homo sapien
atgttttccaagctgcacaactctcaggctggc

SEQ ID NO: 69884 - DNA, 33 bp, Homo sapien
atgttttccaagctgcgcaactctcaggctggc

SEQ ID NO: 69885 - DNA, 33 bp, Homo sapien
aatgatgtggggctagcattttaagcacgtatg

SEQ ID NO: 69886 - DNA, 33 bp, Homo sapien
aatgatgtggggctaggattttaagcacgtatg

SEQ ID NO: 69887 - DNA, 33 bp, Homo sapien
attttactccccgatactaacattttattgtat

SEQ ID NO: 69888 - DNA, 33 bp, Homo sapien
attttactccccgatattaacattttattgtat

SEQ ID NO: 69889 - DNA, 33 bp, Homo sapien
atgagaactaatagtacgtgttgtaaatctgtg

SEQ ID NO: 69890 - DNA, 33 bp, Homo sapien
atgagaactaatagtatgtgttgtaaatctgtg

SEQ ID NO: 69891 - DNA, 33 bp, Homo sapien
ggctggcaaactgagaataattcaaaagttcac

SEQ ID NO: 69892 - DNA, 33 bp, Homo sapien
ggctggcaaactgagactaattcaaaagttcac

SEQ ID NO: 69893 - DNA, 33 bp, Homo sapien
agaaaaagtaatgtgaccttacaatgttgtgaa

SEQ ID NO: 69894 - DNA, 33 bp, Homo sapien
agaaaaagtaatgtgatcttacaatgttgtgaa

SEQ ID NO: 69895 - DNA, 33 bp, Homo sapien
agttttcatgaccatacaatattgaggtacaca

SEQ ID NO: 69896 - DNA, 33 bp, Homo sapien
agttttcatgaccatataatattgaggtacaca

SEQ ID NO: 69897 - DNA, 33 bp, Homo sapien
gataactgaggccacaagagtaaaaggacttcc

SEQ ID NO: 69898 - DNA, 33 bp, Homo sapien
gataactgaggccacaggagtaaaaggacttcc

SEQ ID NO: 69899 - DNA, 33 bp, Homo sapien
gaaaaggagtcagtaacgaatgagaaggaatgt

SEQ ID NO: 69900 - DNA, 33 bp, Homo sapien
gaaaaggagtcagtaatgaatgagaaggaatgt

SEQ ID NO: 69901 - DNA, 33 bp, Homo sapien
gatgacttaactgccacgtagtcttagatggcc

SEQ ID NO: 69902 - DNA, 33 bp, Homo sapien
gatgacttaactgccatgtagtcttagatggcc

SEQ ID NO: 69903 - DNA, 33 bp, Homo sapien
aataacagatgctggtcaagatgtaaagaaagg

SEQ ID NO: 69904 - DNA, 33 bp, Homo sapien
aataacagatgctggtgaagatgtaaagaaagg

SEQ ID NO: 69905 - DNA, 33 bp, Homo sapien
aaatgaacagctgcaaccttatatgtgagatgg

SEQ ID NO: 69906 - DNA, 33 bp, Homo sapien
aaatgaacagctgcaatcttatatgtgagatgg

SEQ ID NO: 69907 - DNA, 33 bp, Homo sapien
cagatgccttaataagcatgagcatatcagaaa

SEQ ID NO: 69908 - DNA, 33 bp, Homo sapien
cagatgccttaataagtatgagcatatcagaaa

SEQ ID NO: 69909 - DNA, 33 bp, Homo sapien
caacacatttctgagacgcttgtgctcccctca

SEQ ID NO: 69910 - DNA, 33 bp, Homo sapien
caacacatttctgagatgcttgtgctcccctca

SEQ ID NO: 69911 - DNA, 33 bp, Homo sapien
aattctgtgacgttggaaaaaccacttatcatc

SEQ ID NO: 69912 - DNA, 33 bp, Homo sapien
aattctgtgacgttgggaaaaccacttatcatc

SEQ ID NO: 69913 - DNA, 33 bp, Homo sapien
caatcaagtgcgcaccaaaatacatgtttctaa

SEQ ID NO: 69914 - DNA, 33 bp, Homo sapien
caatcaagtgcgcaccgaaatacatgtttctaa

SEQ ID NO: 69915 - DNA, 33 bp, Homo sapien
gagatctaggttacaacttccataccctacttt

SEQ ID NO: 69916 - DNA, 33 bp, Homo sapien
gagatctaggttacaagttccataccctacttt

SEQ ID NO: 69917 - DNA, 33 bp, Homo sapien
ggctgggccggcctcaaagggttcgggctacta

SEQ ID NO: 69918 - DNA, 33 bp, Homo sapien
ggctgggccggcctcagagggttcgggctacta

SEQ ID NO: 69919 - DNA, 33 bp, Homo sapien
atgcatacactgttcagaggagatcttgctgaa

SEQ ID NO: 69920 - DNA, 33 bp, Homo sapien
atgcatacactgttcataggagatcttgctgaa

SEQ ID NO: 69921 - DNA, 33 bp, Homo sapien
ggtgaaggtgagaattcaatctttctgtataaa

SEQ ID NO: 69922 - DNA, 33 bp, Homo sapien
ggtgaaggtgagaatttaatctttctgtataaa

SEQ ID NO: 69923 - DNA, 33 bp, Homo sapien
accttgttctaccccaaatgaacttccaatagc

SEQ ID NO: 69924 - DNA, 33 bp, Homo sapien
accttgttctaccccatatgaacttccaatagc

SEQ ID NO: 69925 - DNA, 33 bp, Homo sapien
gggatactgacaccaacgtccaaagtgtgctgg

SEQ ID NO: 69926 - DNA, 33 bp, Homo sapien
gggatactgacaccaaggtccaaagtgtgctgg

SEQ ID NO: 69927 - DNA, 33 bp, Homo sapien
gggtcattgctggctacgtgcagagtaagatga

SEQ ID NO: 69928 - DNA, 33 bp, Homo sapien
gggtcattgctggctatgtgcagagtaagatga

SEQ ID NO: 69929 - DNA, 33 bp, Homo sapien
ttagaagttagcctgacgtataggaaacactgt

SEQ ID NO: 69930 - DNA, 33 bp, Homo sapien
ttagaagttagcctgatgtataggaaacactgt

SEQ ID NO: 69931 - DNA, 33 bp, Homo sapien
gtcctggtaaccatcaacttctatgtttgcatt

SEQ ID NO: 69932 - DNA, 33 bp, Homo sapien
gtcctggtaaccatcagcttctatgtttgcatt

SEQ ID NO: 69933 - DNA, 33 bp, Homo sapien
atctcagcagttaatacctgctctatgttaaga

SEQ ID NO: 69934 - DNA, 33 bp, Homo sapien
atctcagcagttaatagctgctctatgttaaga

SEQ ID NO: 69935 - DNA, 33 bp, Homo sapien
tctggaaaatcttgaccaccataagacccatag

SEQ ID NO: 69936 - DNA, 33 bp, Homo sapien
tctggaaaatcttgactaccataagacccatag

SEQ ID NO: 69937 - DNA, 33 bp, Homo sapien
tatttgactctgtaaccctgacatccaatccca

SEQ ID NO: 69938 - DNA, 33 bp, Homo sapien
tatttgactctgtaacgctgacatccaatccca

SEQ ID NO: 69939 - DNA, 33 bp, Homo sapien
aaactttactctttctaacccatgaatactgat

SEQ ID NO: 69940 - DNA, 33 bp, Homo sapien
aaactttactctttctcacccatgaatactgat

SEQ ID NO: 69941 - DNA, 33 bp, Homo sapien
tttatactcttgtaaaatccctctcatgcagta

SEQ ID NO: 69942 - DNA, 33 bp, Homo sapien
tttatactcttgtaaagtccctctcatgcagta

SEQ ID NO: 69943 - DNA, 33 bp, Homo sapien
cctctcccatttgcaaacttcagtcttttatca

SEQ ID NO: 69944 - DNA, 33 bp, Homo sapien
cctctcccatttgcaatcttcagtcttttatca

SEQ ID NO: 69945 - DNA, 33 bp, Homo sapien
aaattctggtaacatgaaactagacctctggtt

SEQ ID NO: 69946 - DNA, 33 bp, Homo sapien
aaattctggtaacatggaactagacctctggtt

SEQ ID NO: 69947 - DNA, 33 bp, Homo sapien
cttgtgtatattctacccatatcttgtagtcat

SEQ ID NO: 69948 - DNA, 33 bp, Homo sapien
cttgtgtatattctactcatatcttgtagtcat

SEQ ID NO: 69949 - DNA, 33 bp, Homo sapien
tttcagtgccttcctccgaccccactatatact

SEQ ID NO: 69950 - DNA, 33 bp, Homo sapien
tttcagtgccttcctctgaccccactatatact

SEQ ID NO: 69951 - DNA, 33 bp, Homo sapien
aagagagctacaaataaagaggtgagatccacc

SEQ ID NO: 69952 - DNA, 33 bp, Homo sapien
aagagagctacaaatacagaggtgagatccacc

SEQ ID NO: 69953 - DNA, 33 bp, Homo sapien
aatggaagggccttgacgattatgttccacatt

SEQ ID NO: 69954 - DNA, 33 bp, Homo sapien
aatggaagggccttgatgattatgttccacatt

SEQ ID NO: 69955 - DNA, 33 bp, Homo sapien
atcagatgatttttagcatctaccatgggcaag

SEQ ID NO: 69956 - DNA, 33 bp, Homo sapien
atcagatgatttttaggatctaccatgggcaag

SEQ ID NO: 69957 - DNA, 33 bp, Homo sapien
gcagtgagcaaaaagacatgcaattcctaccgt

SEQ ID NO: 69958 - DNA, 33 bp, Homo sapien
gcagtgagcaaaaagatatgcaattcctaccgt

SEQ ID NO: 69959 - DNA, 33 bp, Homo sapien
ctacatggaaagaaaacaggtagtgcagatttg

SEQ ID NO: 69960 - DNA, 33 bp, Homo sapien
ctacatggaaagaaaataggtagtgcagatttg

SEQ ID NO: 69961 - DNA, 33 bp, Homo sapien
acacctgtgggtgcaccatatacaaatgctgcc

SEQ ID NO: 69962 - DNA, 33 bp, Homo sapien
acacctgtgggtgcactatatacaaatgctgcc

SEQ ID NO: 69963 - DNA, 33 bp, Homo sapien
attggggatctttaaacgggttctgtagtcctg

SEQ ID NO: 69964 - DNA, 33 bp, Homo sapien
attggggatctttaaatgggttctgtagtcctg

SEQ ID NO: 69965 - DNA, 33 bp, Homo sapien
cagcctcctgcctaacaccatcttccacagtga

SEQ ID NO: 69966 - DNA, 33 bp, Homo sapien
cagcctcctgcctaacgccatcttccacagtga

SEQ ID NO: 69967 - DNA, 33 bp, Homo sapien
gctagcagtactcccactgaaggcaaagagaga

SEQ ID NO: 69968 - DNA, 33 bp, Homo sapien
gctagcagtactcccattgaaggcaaagagaga

SEQ ID NO: 69969 - DNA, 33 bp, Homo sapien
tccttcatccacctaacctggagtctctgatgc

SEQ ID NO: 69970 - DNA, 33 bp, Homo sapien
tccttcatccacctaatctggagtctctgatgc

SEQ ID NO: 69971 - DNA, 33 bp, Homo sapien
gtacagttcaaaacccaacatgacattttatct

SEQ ID NO: 69972 - DNA, 33 bp, Homo sapien
gtacagttcaaaacccgacatgacattttatct

SEQ ID NO: 69973 - DNA, 33 bp, Homo sapien
acctggcagcctttaactgaaaacattgcttga

SEQ ID NO: 69974 - DNA, 33 bp, Homo sapien
acctggcagcctttaattgaaaacattgcttga

SEQ ID NO: 69975 - DNA, 33 bp, Homo sapien
taaagaagtgcgaaggcattggattgctctgtg

SEQ ID NO: 69976 - DNA, 33 bp, Homo sapien
taaagaagtgcgaagggattggattgctctgtg

SEQ ID NO: 69977 - DNA, 33 bp, Homo sapien
tgctacctgggagaaaagctgttgcggaacatc

SEQ ID NO: 69978 - DNA, 33 bp, Homo sapien
tgctacctgggagaaaggctgttgcggaacatc

SEQ ID NO: 69979 - DNA, 33 bp, Homo sapien
ggagcggaaggacacccataagagaaccaaacc

SEQ ID NO: 69980 - DNA, 33 bp, Homo sapien
ggagcggaaggacacctataagagaaccaaacc

SEQ ID NO: 69981 - DNA, 33 bp, Homo sapien
atcttcaaagcattgggaatcactggagtattt

SEQ ID NO: 69982 - DNA, 33 bp, Homo sapien
atcttcaaagcattggtaatcactggagtattt

SEQ ID NO: 69983 - DNA, 33 bp, Homo sapien
ccaaaagaaaactcatgaggctgaatgctaaga

SEQ ID NO: 69984 - DNA, 33 bp, Homo sapien
ccaaaagaaaactcattaggctgaatgctaaga

SEQ ID NO: 69985 - DNA, 33 bp, Homo sapien
aaattacagaagcatacggaattcctgttaaga

SEQ ID NO: 69986 - DNA, 33 bp, Homo sapien
aaattacagaagcatatggaattcctgttaaga

SEQ ID NO: 69987 - DNA, 33 bp, Homo sapien
ggcatacgctaccacccccagataatttgtatt

SEQ ID NO: 69988 - DNA, 33 bp, Homo sapien
ggcatacgctaccacctccagataatttgtatt

SEQ ID NO: 69989 - DNA, 33 bp, Homo sapien
ccataataaatgcccccatgaacctcaaagtgt

SEQ ID NO: 69990 - DNA, 33 bp, Homo sapien
ccataataaatgcccctatgaacctcaaagtgt

SEQ ID NO: 69991 - DNA, 33 bp, Homo sapien
ctgcctgtggaaagcacatttattcttccctat

SEQ ID NO: 69992 - DNA, 33 bp, Homo sapien
ctgcctgtggaaagcatatttattcttccctat

SEQ ID NO: 69993 - DNA, 33 bp, Homo sapien
ctaattccatgagtcactaattgatatcactat

SEQ ID NO: 69994 - DNA, 33 bp, Homo sapien
ctaattccatgagtcagtaattgatatcactat

SEQ ID NO: 69995 - DNA, 33 bp, Homo sapien
gcctgaggctcagaacagataaacttggctcgg

SEQ ID NO: 69996 - DNA, 33 bp, Homo sapien
gcctgaggctcagaacggataaacttggctcgg

SEQ ID NO: 69997 - DNA, 33 bp, Homo sapien
gtgattccgcctgtggcaagtacctagagggaa

SEQ ID NO: 69998 - DNA, 33 bp, Homo sapien
gtgattccgcctgtggtaagtacctagagggaa

SEQ ID NO: 69999 - DNA, 33 bp, Homo sapien
tggacttcactccaccacaatgttgaagaaccc

SEQ ID NO: 70000 - DNA, 33 bp, Homo sapien
tggacttcactccaccgcaatgttgaagaaccc

SEQ ID NO: 70001 - DNA, 33 bp, Homo sapien
gaagtatcaaaaccaaattctctccttcacacc

SEQ ID NO: 70002 - DNA, 33 bp, Homo sapien
gaagtatcaaaaccaagttctctccttcacacc

SEQ ID NO: 70003 - DNA, 33 bp, Homo sapien
ttttttctgagaaagtcaagaccatcatatgag

SEQ ID NO: 70004 - DNA, 33 bp, Homo sapien
ttttttctgagaaagtgaagaccatcatatgag

SEQ ID NO: 70005 - DNA, 33 bp, Homo sapien
cacagctttaccttaaaccccgtgctttgcagc

SEQ ID NO: 70006 - DNA, 33 bp, Homo sapien
cacagctttaccttaacccccgtgctttgcagc

SEQ ID NO: 70007 - DNA, 33 bp, Homo sapien
ctgttcccagttgtaaatcaaaaaccaggaaag

SEQ ID NO: 70008 - DNA, 33 bp, Homo sapien
ctgttcccagttgtaagtcaaaaaccaggaaag

SEQ ID NO: 70009 - DNA, 33 bp, Homo sapien
gagatagacagaagtgcagtaggtactgactta

SEQ ID NO: 70010 - DNA, 33 bp, Homo sapien
gagatagacagaagtgtagtaggtactgactta

SEQ ID NO: 70011 - DNA, 33 bp, Homo sapien
aatgtgattttccttgaatgaagtatgctgctg

SEQ ID NO: 70012 - DNA, 33 bp, Homo sapien
aatgtgattttccttggatgaagtatgctgctg

SEQ ID NO: 70013 - DNA, 33 bp, Homo sapien
catagatgcaagaacactcaacaaaatactagc

SEQ ID NO: 70014 - DNA, 33 bp, Homo sapien
catagatgcaagaacattcaacaaaatactagc

SEQ ID NO: 70015 - DNA, 33 bp, Homo sapien
gaaccccccacctgcaatatctgatcatgctcc

SEQ ID NO: 70016 - DNA, 33 bp, Homo sapien
gaaccccccacctgcagtatctgatcatgctcc

SEQ ID NO: 70017 - DNA, 33 bp, Homo sapien
aattctgtatactaaacttctttaccgtcatcc

SEQ ID NO: 70018 - DNA, 33 bp, Homo sapien
aattctgtatactaaatttctttaccgtcatcc

SEQ ID NO: 70019 - DNA, 33 bp, Homo sapien
gggaaggatgcagtcccgacaaaataaatcacc

SEQ ID NO: 70020 - DNA, 33 bp, Homo sapien
gggaaggatgcagtcctgacaaaataaatcacc

SEQ ID NO: 70021 - DNA, 33 bp, Homo sapien
caagtatttgcgtgaacgttcagctctcagtct

SEQ ID NO: 70022 - DNA, 33 bp, Homo sapien
caagtatttgcgtgaatgttcagctctcagtct

SEQ ID NO: 70023 - DNA, 33 bp, Homo sapien
aacatttctgtcaccacaggagttctatcagac

SEQ ID NO: 70024 - DNA, 33 bp, Homo sapien
aacatttctgtcaccataggagttctatcagac

SEQ ID NO: 70025 - DNA, 33 bp, Homo sapien
cttaatacctaggagacgagatgatctgtgcag

SEQ ID NO: 70026 - DNA, 33 bp, Homo sapien
cttaatacctaggagatgagatgatctgtgcag

SEQ ID NO: 70027 - DNA, 33 bp, Homo sapien
ttctgcccttgttgagaatcatttggccttgtt

SEQ ID NO: 70028 - DNA, 33 bp, Homo sapien
ttctgcccttgttgaggatcatttggccttgtt

SEQ ID NO: 70029 - DNA, 33 bp, Homo sapien
gctaaatctcctactacacttgtggatcccagt

SEQ ID NO: 70030 - DNA, 33 bp, Homo sapien
gctaaatctcctactatacttgtggatcccagt

SEQ ID NO: 70031 - DNA, 33 bp, Homo sapien
taggagacaaaatagacgatgatcaaggaatcc

SEQ ID NO: 70032 - DNA, 33 bp, Homo sapien
taggagacaaaatagatgatgatcaaggaatcc

SEQ ID NO: 70033 - DNA, 33 bp, Homo sapien
tttgattctgtgactacccccatattctaagct

SEQ ID NO: 70034 - DNA, 33 bp, Homo sapien
tttgattctgtgactatccccatattctaagct

SEQ ID NO: 70035 - DNA, 33 bp, Homo sapien
aagagtgtaggacaatcagtgtgagccgagcct

SEQ ID NO: 70036 - DNA, 33 bp, Homo sapien
aagagtgtaggacaatgagtgtgagccgagcct

SEQ ID NO: 70037 - DNA, 33 bp, Homo sapien
tttccttctattatccgatctattttggcaagc

SEQ ID NO: 70038 - DNA, 33 bp, Homo sapien
tttccttctattatcctatctattttggcaagc

SEQ ID NO: 70039 - DNA, 33 bp, Homo sapien
tgaattcactaataagacatttacctaacactt

SEQ ID NO: 70040 - DNA, 33 bp, Homo sapien
tgaattcactaataaggcatttacctaacactt

SEQ ID NO: 70041 - DNA, 33 bp, Homo sapien
tgaagttggatccatacctcacatcatatacaa

SEQ ID NO: 70042 - DNA, 33 bp, Homo sapien
tgaagttggatccatatctcacatcatatacaa

SEQ ID NO: 70043 - DNA, 33 bp, Homo sapien
gtgtcttcttgtcttacgggcttttgtcttgac

SEQ ID NO: 70044 - DNA, 33 bp, Homo sapien
gtgtcttcttgtcttatgggcttttgtcttgac

SEQ ID NO: 70045 - DNA, 33 bp, Homo sapien
ttgtccagaggcatccccactgtctcccctggt

SEQ ID NO: 70046 - DNA, 33 bp, Homo sapien
ttgtccagaggcatcctcactgtctcccctggt

SEQ ID NO: 70047 - DNA, 33 bp, Homo sapien
gcttcattgagacatactaaatgcatcattcaa

SEQ ID NO: 70048 - DNA, 33 bp, Homo sapien
gcttcattgagacatagtaaatgcatcattcaa

SEQ ID NO: 70049 - DNA, 33 bp, Homo sapien
ctttctctaccaagatcagagtgacaacaggga

SEQ ID NO: 70050 - DNA, 33 bp, Homo sapien
ctttctctaccaagattagagtgacaacaggga

SEQ ID NO: 70051 - DNA, 33 bp, Homo sapien
tgttaaaagaaacgaacgactgtgaaatgtagg

SEQ ID NO: 70052 - DNA, 33 bp, Homo sapien
tgttaaaagaaacgaatgactgtgaaatgtagg

SEQ ID NO: 70053 - DNA, 33 bp, Homo sapien
tgtcccgagctagttacaaatgacaactacagg

SEQ ID NO: 70054 - DNA, 33 bp, Homo sapien
tgtcccgagctagttataaatgacaactacagg

SEQ ID NO: 70055 - DNA, 33 bp, Homo sapien
tccggaagatcagcgacgtgaaacgtgaagagg

SEQ ID NO: 70056 - DNA, 33 bp, Homo sapien
tccggaagatcagcgatgtgaaacgtgaagagg

SEQ ID NO: 70057 - DNA, 33 bp, Homo sapien
tggtgacaatacttcacgcagaggatggaccat

SEQ ID NO: 70058 - DNA, 33 bp, Homo sapien
tggtgacaatacttcatgcagaggatggaccat

SEQ ID NO: 70059 - DNA, 33 bp, Homo sapien
agatttcaatgactcacacctcagcccctgctc

SEQ ID NO: 70060 - DNA, 33 bp, Homo sapien
agatttcaatgactcatacctcagcccctgctc

SEQ ID NO: 70061 - DNA, 33 bp, Homo sapien
gtaggtatatggatagacagtttgtggattgct

SEQ ID NO: 70062 - DNA, 33 bp, Homo sapien
gtaggtatatggatagccagtttgtggattgct

SEQ ID NO: 70063 - DNA, 33 bp, Homo sapien
ctcctatcagttgaaacgtagagttgatgtttt

SEQ ID NO: 70064 - DNA, 33 bp, Homo sapien
ctcctatcagttgaaatgtagagttgatgtttt

SEQ ID NO: 70065 - DNA, 33 bp, Homo sapien
atagaaaaggtagagtaaaaacacaatataaaa

SEQ ID NO: 70066 - DNA, 33 bp, Homo sapien
atagaaaaggtagagtgaaaacacaatataaaa

SEQ ID NO: 70067 - DNA, 33 bp, Homo sapien
ctgcttgccctcaaacactggctccttttacca

SEQ ID NO: 70068 - DNA, 33 bp, Homo sapien
ctgcttgccctcaaacgctggctccttttacca

SEQ ID NO: 70069 - DNA, 33 bp, Homo sapien
agagagatgaaggagaacctggcttgggcccct

SEQ ID NO: 70070 - DNA, 33 bp, Homo sapien
agagagatgaaggagaccctggcttgggcccct

SEQ ID NO: 70071 - DNA, 33 bp, Homo sapien
tcctggctcgctgtcaagaatgggccctgtggg

SEQ ID NO: 70072 - DNA, 33 bp, Homo sapien
tcctggctcgctgtcaggaatgggccctgtggg

SEQ ID NO: 70073 - DNA, 33 bp, Homo sapien
taatcacgagttgctaagattttttggggctaa

SEQ ID NO: 70074 - DNA, 33 bp, Homo sapien
taatcacgagttgctatgattttttggggctaa

SEQ ID NO: 70075 - DNA, 33 bp, Homo sapien
tgagtcagatgtttgaacctctttgtctcactt

SEQ ID NO: 70076 - DNA, 33 bp, Homo sapien
tgagtcagatgtttgaccctctttgtctcactt

SEQ ID NO: 70077 - DNA, 33 bp, Homo sapien
aggaatataggaaagacgggagggacacacaga

SEQ ID NO: 70078 - DNA, 33 bp, Homo sapien
aggaatataggaaagatgggagggacacacaga

SEQ ID NO: 70079 - DNA, 33 bp, Homo sapien
ggtcaaaataatgcaaggaagtcctcaattccc

SEQ ID NO: 70080 - DNA, 33 bp, Homo sapien
ggtcaaaataatgcaatgaagtcctcaattccc

SEQ ID NO: 70081 - DNA, 33 bp, Homo sapien
ccctttgtcttcagcacagattccttccacatt

SEQ ID NO: 70082 - DNA, 33 bp, Homo sapien
ccctttgtcttcagcatagattccttccacatt

SEQ ID NO: 70083 - DNA, 33 bp, Homo sapien
aggcctggaatctaacgctactgcttactggat

SEQ ID NO: 70084 - DNA, 33 bp, Homo sapien
aggcctggaatctaactctactgcttactggat

SEQ ID NO: 70085 - DNA, 33 bp, Homo sapien
agtcagggagatgggacgttctgttccacatag

SEQ ID NO: 70086 - DNA, 33 bp, Homo sapien
agtcagggagatgggatgttctgttccacatag

SEQ ID NO: 70087 - DNA, 33 bp, Homo sapien
tgcacttttaaatgaacagaggagagtagtcca

SEQ ID NO: 70088 - DNA, 33 bp, Homo sapien
tgcacttttaaatgaatagaggagagtagtcca

SEQ ID NO: 70089 - DNA, 33 bp, Homo sapien
cacgagttcctcataccgtaggagaaactattc

SEQ ID NO: 70090 - DNA, 33 bp, Homo sapien
cacgagttcctcatactgtaggagaaactattc

SEQ ID NO: 70091 - DNA, 33 bp, Homo sapien
ctttaaaagaaaaaaccctgaagcacatctcct

SEQ ID NO: 70092 - DNA, 33 bp, Homo sapien
ctttaaaagaaaaaacgctgaagcacatctcct

SEQ ID NO: 70093 - DNA, 33 bp, Homo sapien
attaacttattggagagtaaaggtgaaagagaa

SEQ ID NO: 70094 - DNA, 33 bp, Homo sapien
attaacttattggagattaaaggtgaaagagaa

SEQ ID NO: 70095 - DNA, 33 bp, Homo sapien
catagacttcaaaactcaaaattgacatatcta

SEQ ID NO: 70096 - DNA, 33 bp, Homo sapien
catagacttcaaaacttaaaattgacatatcta

SEQ ID NO: 70097 - DNA, 33 bp, Homo sapien
ctaggaatgatcctcaatctaaagttctacaat

SEQ ID NO: 70098 - DNA, 33 bp, Homo sapien
ctaggaatgatcctcagtctaaagttctacaat

SEQ ID NO: 70099 - DNA, 33 bp, Homo sapien
agaggccatatctggccatggaaagtcctcaga

SEQ ID NO: 70100 - DNA, 33 bp, Homo sapien
agaggccatatctggctatggaaagtcctcaga

SEQ ID NO: 70101 - DNA, 33 bp, Homo sapien
gtcactaggatccttcaaatgactggagtacgt

SEQ ID NO: 70102 - DNA, 33 bp, Homo sapien
gtcactaggatccttcgaatgactggagtacgt

SEQ ID NO: 70103 - DNA, 33 bp, Homo sapien
tctactcattgacccccaaaatatcaagtgcct

SEQ ID NO: 70104 - DNA, 33 bp, Homo sapien
tctactcattgaccccgaaaatatcaagtgcct

SEQ ID NO: 70105 - DNA, 33 bp, Homo sapien
cagtaatatagtcagaatagaccgttcattacc

SEQ ID NO: 70106 - DNA, 33 bp, Homo sapien
cagtaatatagtcagagtagaccgttcattacc

SEQ ID NO: 70107 - DNA, 33 bp, Homo sapien
caagttatttctataaactggtgtctcttaacc

SEQ ID NO: 70108 - DNA, 33 bp, Homo sapien
caagttatttctataacctggtgtctcttaacc

SEQ ID NO: 70109 - DNA, 33 bp, Homo sapien
cccggtatctgctctgcatagacaaacttcttg

SEQ ID NO: 70110 - DNA, 33 bp, Homo sapien
cccggtatctgctctgtatagacaaacttcttg

SEQ ID NO: 70111 - DNA, 33 bp, Homo sapien
aagagtgggaatatgacaaccatgaatctaagg

SEQ ID NO: 70112 - DNA, 33 bp, Homo sapien
aagagtgggaatatgataaccatgaatctaagg

SEQ ID NO: 70113 - DNA, 33 bp, Homo sapien
aatatatcaccttccaacaacctcctcagtgca

SEQ ID NO: 70114 - DNA, 33 bp, Homo sapien
aatatatcaccttccaccaacctcctcagtgca

SEQ ID NO: 70115 - DNA, 33 bp, Homo sapien
aattggattaaaagacaaggggcttcatctaga

SEQ ID NO: 70116 - DNA, 33 bp, Homo sapien
aattggattaaaagaccaggggcttcatctaga

SEQ ID NO: 70117 - DNA, 33 bp, Homo sapien
aagcaaaggctagaataaaaacctccatgactt

SEQ ID NO: 70118 - DNA, 33 bp, Homo sapien
aagcaaaggctagaatgaaaacctccatgactt

SEQ ID NO: 70119 - DNA, 33 bp, Homo sapien
ggttttactgagtcaacgtgaataggatacatg

SEQ ID NO: 70120 - DNA, 33 bp, Homo sapien
ggttttactgagtcaatgtgaataggatacatg

SEQ ID NO: 70121 - DNA, 33 bp, Homo sapien
atcatctattctttcaatatgagtttcggggct

SEQ ID NO: 70122 - DNA, 33 bp, Homo sapien
atcatctattctttcagtatgagtttcggggct

SEQ ID NO: 70123 - DNA, 33 bp, Homo sapien
actgtagcagataaaacaaggtcacatactgcc

SEQ ID NO: 70124 - DNA, 33 bp, Homo sapien
actgtagcagataaaataaggtcacatactgcc

SEQ ID NO: 70125 - DNA, 33 bp, Homo sapien
gttgaactgggctgaactgcgtggagagagatg

SEQ ID NO: 70126 - DNA, 33 bp, Homo sapien
gttgaactgggctgaattgcgtggagagagatg

SEQ ID NO: 70127 - DNA, 33 bp, Homo sapien
tttttcccctatccaaatagtactagtagcatc

SEQ ID NO: 70128 - DNA, 33 bp, Homo sapien
tttttcccctatccaagtagtactagtagcatc

SEQ ID NO: 70129 - DNA, 33 bp, Homo sapien
caccattttgcaatcacgtgcttctttctttgc

SEQ ID NO: 70130 - DNA, 33 bp, Homo sapien
caccattttgcaatcatgtgcttctttctttgc

SEQ ID NO: 70131 - DNA, 33 bp, Homo sapien
tgcagttactttggaaatcaattctgcaatttc

SEQ ID NO: 70132 - DNA, 33 bp, Homo sapien
tgcagttactttggaagtcaattctgcaatttc

SEQ ID NO: 70133 - DNA, 33 bp, Homo sapien
ctacttcttggcatcccatgtggtagaagattg

SEQ ID NO: 70134 - DNA, 33 bp, Homo sapien
ctacttcttggcatcctatgtggtagaagattg

SEQ ID NO: 70135 - DNA, 33 bp, Homo sapien
gagaatttcatcaacaacaacactattaacaga

SEQ ID NO: 70136 - DNA, 33 bp, Homo sapien
gagaatttcatcaacagcaacactattaacaga

SEQ ID NO: 70137 - DNA, 33 bp, Homo sapien
agcaattttctgcacaactgggaatcagttctc

SEQ ID NO: 70138 - DNA, 33 bp, Homo sapien
agcaattttctgcacagctgggaatcagttctc

SEQ ID NO: 70139 - DNA, 33 bp, Homo sapien
atcagcttttaaaatccctttatgactatgtat

SEQ ID NO: 70140 - DNA, 33 bp, Homo sapien
atcagcttttaaaatcgctttatgactatgtat

SEQ ID NO: 70141 - DNA, 33 bp, Homo sapien
ttcatgtgtgccagaactccatgagctctaatt

SEQ ID NO: 70142 - DNA, 33 bp, Homo sapien
ttcatgtgtgccagaattccatgagctctaatt

SEQ ID NO: 70143 - DNA, 33 bp, Homo sapien
cttggcccttcatttaaccacctcaaagactga

SEQ ID NO: 70144 - DNA, 33 bp, Homo sapien
cttggcccttcatttagccacctcaaagactga

SEQ ID NO: 70145 - DNA, 33 bp, Homo sapien
cctgtaagatccagtgaactgtaagctatcaac

SEQ ID NO: 70146 - DNA, 33 bp, Homo sapien
cctgtaagatccagtggactgtaagctatcaac

SEQ ID NO: 70147 - DNA, 33 bp, Homo sapien
ggatcccagaaactcaaggctagaaggaactag

SEQ ID NO: 70148 - DNA, 33 bp, Homo sapien
ggatcccagaaactcatggctagaaggaactag

SEQ ID NO: 70149 - DNA, 33 bp, Homo sapien
aagaacaaggtacccaaacacactagaccaaga

SEQ ID NO: 70150 - DNA, 33 bp, Homo sapien
aagaacaaggtacccagacacactagaccaaga

SEQ ID NO: 70151 - DNA, 33 bp, Homo sapien
cttctctggttagttgcacccaatcaggctggg

SEQ ID NO: 70152 - DNA, 33 bp, Homo sapien
cttctctggttagttgtacccaatcaggctggg

SEQ ID NO: 70153 - DNA, 33 bp, Homo sapien
cctgattaacagaggcggaagctgttagcagag

SEQ ID NO: 70154 - DNA, 33 bp, Homo sapien
cctgattaacagaggctgaagctgttagcagag

SEQ ID NO: 70155 - DNA, 33 bp, Homo sapien
aacaagcaaattccaacgagtggctgtcaactg

SEQ ID NO: 70156 - DNA, 33 bp, Homo sapien
aacaagcaaattccaatgagtggctgtcaactg

SEQ ID NO: 70157 - DNA, 33 bp, Homo sapien
aataaatttctgttgaacatcttgtatttctga

SEQ ID NO: 70158 - DNA, 33 bp, Homo sapien
aataaatttctgttgagcatcttgtatttctga

SEQ ID NO: 70159 - DNA, 33 bp, Homo sapien
actggggatctgtcaacggcaaaaaaatatgcc

SEQ ID NO: 70160 - DNA, 33 bp, Homo sapien
actggggatctgtcaagggcaaaaaaatatgcc

SEQ ID NO: 70161 - DNA, 33 bp, Homo sapien
aaatatccgactatgaccctattttatagaacc

SEQ ID NO: 70162 - DNA, 33 bp, Homo sapien
aaatatccgactatgatcctattttatagaacc

SEQ ID NO: 70163 - DNA, 33 bp, Homo sapien
cgggtcagtaatttcacatggagcaagcagcag

SEQ ID NO: 70164 - DNA, 33 bp, Homo sapien
cgggtcagtaatttcatatggagcaagcagcag

SEQ ID NO: 70165 - DNA, 33 bp, Homo sapien
gaagaacaagcacctacggtcacccagagttgc

SEQ ID NO: 70166 - DNA, 33 bp, Homo sapien
gaagaacaagcacctatggtcacccagagttgc

SEQ ID NO: 70167 - DNA, 33 bp, Homo sapien
ggtaggaagaacaaaaagagcagaaggctttaa

SEQ ID NO: 70168 - DNA, 33 bp, Homo sapien
ggtaggaagaacaaaaggagcagaaggctttaa

SEQ ID NO: 70169 - DNA, 33 bp, Homo sapien
actacttaatagtcagcaaggtacttaagtcct

SEQ ID NO: 70170 - DNA, 33 bp, Homo sapien
actacttaatagtcaggaaggtacttaagtcct

SEQ ID NO: 70171 - DNA, 33 bp, Homo sapien
tataagtttacaaggacaattaccaacgcatta

SEQ ID NO: 70172 - DNA, 33 bp, Homo sapien
tataagtttacaaggataattaccaacgcatta

SEQ ID NO: 70173 - DNA, 33 bp, Homo sapien
ttttgtatccaataaccgaactctccctattcc

SEQ ID NO: 70174 - DNA, 33 bp, Homo sapien
ttttgtatccaataactgaactctccctattcc

SEQ ID NO: 70175 - DNA, 33 bp, Homo sapien
aattcacatggcacaacattcaaaagagcatat

SEQ ID NO: 70176 - DNA, 33 bp, Homo sapien
aattcacatggcacaatattcaaaagagcatat

SEQ ID NO: 70177 - DNA, 33 bp, Homo sapien
cttgactgtagagaaacgagtacgaatatggca

SEQ ID NO: 70178 - DNA, 33 bp, Homo sapien
cttgactgtagagaaatgagtacgaatatggca

SEQ ID NO: 70179 - DNA, 33 bp, Homo sapien
gacattgatgcagttagccacgcccttaatttg

SEQ ID NO: 70180 - DNA, 33 bp, Homo sapien
gacattgatgcagttatccacgcccttaatttg

SEQ ID NO: 70181 - DNA, 33 bp, Homo sapien
aaaagcacacattccccccacaaacataatcca

SEQ ID NO: 70182 - DNA, 33 bp, Homo sapien
aaaagcacacattccctccacaaacataatcca

SEQ ID NO: 70183 - DNA, 33 bp, Homo sapien
agaaacagaggactcacagggaaacagtgcaat

SEQ ID NO: 70184 - DNA, 33 bp, Homo sapien
agaaacagaggactcatagggaaacagtgcaat

SEQ ID NO: 70185 - DNA, 33 bp, Homo sapien
ttacagtcattcattcaattctcacaactatcc

SEQ ID NO: 70186 - DNA, 33 bp, Homo sapien
ttacagtcattcattcgattctcacaactatcc

SEQ ID NO: 70187 - DNA, 33 bp, Homo sapien
aatattgacttgaagccatgacagtgaacattg

SEQ ID NO: 70188 - DNA, 33 bp, Homo sapien
aatattgacttgaagctatgacagtgaacattg

SEQ ID NO: 70189 - DNA, 33 bp, Homo sapien
cacaggcaagattagcaatatcaaaagttgatt

SEQ ID NO: 70190 - DNA, 33 bp, Homo sapien
cacaggcaagattagccatatcaaaagttgatt

SEQ ID NO: 70191 - DNA, 33 bp, Homo sapien
tctactttcatctttagcttcctcctactttta

SEQ ID NO: 70192 - DNA, 33 bp, Homo sapien
tctactttcatctttatcttcctcctactttta

SEQ ID NO: 70193 - DNA, 33 bp, Homo sapien
aataatagttaacaggaactcaacagggatatc

SEQ ID NO: 70194 - DNA, 33 bp, Homo sapien
aataatagttaacagggactcaacagggatatc

SEQ ID NO: 70195 - DNA, 33 bp, Homo sapien
agcatggtaacacttacaggaaagaaggagacc

SEQ ID NO: 70196 - DNA, 33 bp, Homo sapien
agcatggtaacacttagaggaaagaaggagacc

SEQ ID NO: 70197 - DNA, 33 bp, Homo sapien
ccatttgaacagaaaaagcaacaaatagcatgg

SEQ ID NO: 70198 - DNA, 33 bp, Homo sapien
ccatttgaacagaaaaggcaacaaatagcatgg

SEQ ID NO: 70199 - DNA, 33 bp, Homo sapien
acataaacttgatgaccagaactggagcagcca

SEQ ID NO: 70200 - DNA, 33 bp, Homo sapien
acataaacttgatgactagaactggagcagcca

SEQ ID NO: 70201 - DNA, 33 bp, Homo sapien
ctgtgactgcatgaaagaatgagagaatcacag

SEQ ID NO: 70202 - DNA, 33 bp, Homo sapien
ctgtgactgcatgaaataatgagagaatcacag

SEQ ID NO: 70203 - DNA, 33 bp, Homo sapien
aggggtttattttttcccacagcattagaatcc

SEQ ID NO: 70204 - DNA, 33 bp, Homo sapien
aggggtttattttttctcacagcattagaatcc

SEQ ID NO: 70205 - DNA, 33 bp, Homo sapien
catttctctgcaaaaacattcctatgcttgagg

SEQ ID NO: 70206 - DNA, 33 bp, Homo sapien
catttctctgcaaaaatattcctatgcttgagg

SEQ ID NO: 70207 - DNA, 33 bp, Homo sapien
aaaatgttttgggccccaggatggtgtatatat

SEQ ID NO: 70208 - DNA, 33 bp, Homo sapien
aaaatgttttgggccctaggatggtgtatatat

SEQ ID NO: 70209 - DNA, 33 bp, Homo sapien
tcccggcaaaaaatgaaccctcccactacacca

SEQ ID NO: 70210 - DNA, 33 bp, Homo sapien
tcccggcaaaaaatgagccctcccactacacca

SEQ ID NO: 70211 - DNA, 33 bp, Homo sapien
acaataagcttctggaagtaagactaatgcaga

SEQ ID NO: 70212 - DNA, 33 bp, Homo sapien
acaataagcttctggaggtaagactaatgcaga

SEQ ID NO: 70213 - DNA, 33 bp, Homo sapien
aatggttgcctccaaactcattttagcaaagaa

SEQ ID NO: 70214 - DNA, 33 bp, Homo sapien
aatggttgcctccaaattcattttagcaaagaa

SEQ ID NO: 70215 - DNA, 33 bp, Homo sapien
ttaattggctatgaaacagccaaaagtcagcag

SEQ ID NO: 70216 - DNA, 33 bp, Homo sapien
ttaattggctatgaaagagccaaaagtcagcag

SEQ ID NO: 70217 - DNA, 33 bp, Homo sapien
agaacagttccgggcacagagcaataaatatat

SEQ ID NO: 70218 - DNA, 33 bp, Homo sapien
agaacagttccgggcatagagcaataaatatat

SEQ ID NO: 70219 - DNA, 33 bp, Homo sapien
ccaatgggtttcatccacattagtcaaaggcaa

SEQ ID NO: 70220 - DNA, 33 bp, Homo sapien
ccaatgggtttcatcctcattagtcaaaggcaa

SEQ ID NO: 70221 - DNA, 33 bp, Homo sapien
ctcctgctacaacatcaaatgccaggctttgtc

SEQ ID NO: 70222 - DNA, 33 bp, Homo sapien
ctcctgctacaacatccaatgccaggctttgtc

SEQ ID NO: 70223 - DNA, 33 bp, Homo sapien
gtctcagtgtagatctcacatgtgctctttgag

SEQ ID NO: 70224 - DNA, 33 bp, Homo sapien
gtctcagtgtagatcttacatgtgctctttgag

SEQ ID NO: 70225 - DNA, 33 bp, Homo sapien
gagttgtctttaaaagaatcacaaatcctcaca

SEQ ID NO: 70226 - DNA, 33 bp, Homo sapien
gagttgtctttaaaagcatcacaaatcctcaca

SEQ ID NO: 70227 - DNA, 33 bp, Homo sapien
ctctctctttgcactacgtcatcctgtctctaa

SEQ ID NO: 70228 - DNA, 33 bp, Homo sapien
ctctctctttgcactatgtcatcctgtctctaa

SEQ ID NO: 70229 - DNA, 33 bp, Homo sapien
gagcattttggaaaaaagatactcaatttgcaa

SEQ ID NO: 70230 - DNA, 33 bp, Homo sapien
gagcattttggaaaaaggatactcaatttgcaa

SEQ ID NO: 70231 - DNA, 33 bp, Homo sapien
gtatcctttctatcataagccaagcccacatca

SEQ ID NO: 70232 - DNA, 33 bp, Homo sapien
gtatcctttctatcatcagccaagcccacatca

SEQ ID NO: 70233 - DNA, 33 bp, Homo sapien
tggtaggggccaaaccaagaagaacctggacag

SEQ ID NO: 70234 - DNA, 33 bp, Homo sapien
tggtaggggccaaacccagaagaacctggacag

SEQ ID NO: 70235 - DNA, 33 bp, Homo sapien
gtttatgatggaagcacatgataattctctagg

SEQ ID NO: 70236 - DNA, 33 bp, Homo sapien
gtttatgatggaagcagatgataattctctagg

SEQ ID NO: 70237 - DNA, 33 bp, Homo sapien
aaaaaatagtaaataaccccagagtcatttatg

SEQ ID NO: 70238 - DNA, 33 bp, Homo sapien
aaaaaatagtaaataatcccagagtcatttatg

SEQ ID NO: 70239 - DNA, 33 bp, Homo sapien
agcaaaggctagcttacggttcagttttataag

SEQ ID NO: 70240 - DNA, 33 bp, Homo sapien
agcaaaggctagcttatggttcagttttataag

SEQ ID NO: 70241 - DNA, 33 bp, Homo sapien
ttttccactgttccacggaatcctctccagaac

SEQ ID NO: 70242 - DNA, 33 bp, Homo sapien
ttttccactgttccactgaatcctctccagaac

SEQ ID NO: 70243 - DNA, 33 bp, Homo sapien
cttaggatatttggaccatacttttcttgtttt

SEQ ID NO: 70244 - DNA, 33 bp, Homo sapien
cttaggatatttggacgatacttttcttgtttt

SEQ ID NO: 70245 - DNA, 33 bp, Homo sapien
acttgtctctaagggcaaatgctcaggagaggg

SEQ ID NO: 70246 - DNA, 33 bp, Homo sapien
acttgtctctaagggcgaatgctcaggagaggg

SEQ ID NO: 70247 - DNA, 33 bp, Homo sapien
catgttctgtggcttacataaaaaaggaaacag

SEQ ID NO: 70248 - DNA, 33 bp, Homo sapien
catgttctgtggcttagataaaaaaggaaacag

SEQ ID NO: 70249 - DNA, 33 bp, Homo sapien
tctctgaccttaaatacctaaattctggttgag

SEQ ID NO: 70250 - DNA, 33 bp, Homo sapien
tctctgaccttaaatagctaaattctggttgag

SEQ ID NO: 70251 - DNA, 33 bp, Homo sapien
tctaataacgtcaccaaagtgttgaagccacta

SEQ ID NO: 70252 - DNA, 33 bp, Homo sapien
tctaataacgtcaccagagtgttgaagccacta

SEQ ID NO: 70253 - DNA, 33 bp, Homo sapien
tcttacagtttgtaccccctgaagcagcagccc

SEQ ID NO: 70254 - DNA, 33 bp, Homo sapien
tcttacagtttgtacctcctgaagcagcagccc

SEQ ID NO: 70255 - DNA, 33 bp, Homo sapien
atccttggaccagatcaagaacccaccttccca

SEQ ID NO: 70256 - DNA, 33 bp, Homo sapien
atccttggaccagatcgagaacccaccttccca

SEQ ID NO: 70257 - DNA, 33 bp, Homo sapien
cctactgattccctgtaaagccagaataatcaa

SEQ ID NO: 70258 - DNA, 33 bp, Homo sapien
cctactgattccctgtgaagccagaataatcaa

SEQ ID NO: 70259 - DNA, 33 bp, Homo sapien
gtttttgtgagtgcataaagttgtttaggtaca

SEQ ID NO: 70260 - DNA, 33 bp, Homo sapien
gtttttgtgagtgcatgaagttgtttaggtaca

SEQ ID NO: 70261 - DNA, 33 bp, Homo sapien
cctacaacttgaatgcccttatgacactgagtg

SEQ ID NO: 70262 - DNA, 33 bp, Homo sapien
cctacaacttgaatgctcttatgacactgagtg

SEQ ID NO: 70263 - DNA, 33 bp, Homo sapien
agtaaaacttcccacacctatgtgtcatgtggg

SEQ ID NO: 70264 - DNA, 33 bp, Homo sapien
agtaaaacttcccacatctatgtgtcatgtggg

SEQ ID NO: 70265 - DNA, 33 bp, Homo sapien
aacttatctaagttcaccctatgagtacctatg

SEQ ID NO: 70266 - DNA, 33 bp, Homo sapien
aacttatctaagttcatcctatgagtacctatg

SEQ ID NO: 70267 - DNA, 33 bp, Homo sapien
tatctgctaaggcagaacatcacaagtggctgc

SEQ ID NO: 70268 - DNA, 33 bp, Homo sapien
tatctgctaaggcagagcatcacaagtggctgc

SEQ ID NO: 70269 - DNA, 33 bp, Homo sapien
catgctgtacaacacacatctctagaacttatt

SEQ ID NO: 70270 - DNA, 33 bp, Homo sapien
catgctgtacaacacatatctctagaacttatt

SEQ ID NO: 70271 - DNA, 33 bp, Homo sapien
ctgcacttcagataaacttaaaggattttcaaa

SEQ ID NO: 70272 - DNA, 33 bp, Homo sapien
ctgcacttcagataaatttaaaggattttcaaa

SEQ ID NO: 70273 - DNA, 33 bp, Homo sapien
aatagctacacattcaagtccaatttgaagtgg

SEQ ID NO: 70274 - DNA, 33 bp, Homo sapien
aatagctacacattcacgtccaatttgaagtgg

SEQ ID NO: 70275 - DNA, 33 bp, Homo sapien
gggaaagagccatgtcagaactccttcaggcta

SEQ ID NO: 70276 - DNA, 33 bp, Homo sapien
gggaaagagccatgtcggaactccttcaggcta

SEQ ID NO: 70277 - DNA, 33 bp, Homo sapien
cagcttctgataaaaaatccaatgccactgaat

SEQ ID NO: 70278 - DNA, 33 bp, Homo sapien
cagcttctgataaaaagtccaatgccactgaat

SEQ ID NO: 70279 - DNA, 33 bp, Homo sapien
acgctactgttctcaacaacttttctttgaaag

SEQ ID NO: 70280 - DNA, 33 bp, Homo sapien
acgctactgttctcaataacttttctttgaaag

SEQ ID NO: 70281 - DNA, 33 bp, Homo sapien
gtaggcactaaataaaagttgggaagatctagt

SEQ ID NO: 70282 - DNA, 33 bp, Homo sapien
gtaggcactaaataaacgttgggaagatctagt

SEQ ID NO: 70283 - DNA, 33 bp, Homo sapien
ggctcaattcagcagcaagataaaacaatttgt

SEQ ID NO: 70284 - DNA, 33 bp, Homo sapien
ggctcaattcagcagcgagataaaacaatttgt

SEQ ID NO: 70285 - DNA, 33 bp, Homo sapien
atttatatagtggtcacaagtgtgtcttataaa

SEQ ID NO: 70286 - DNA, 33 bp, Homo sapien
atttatatagtggtcagaagtgtgtcttataaa

SEQ ID NO: 70287 - DNA, 33 bp, Homo sapien
ttaataaacaattgtccactttaaaccaagtaa

SEQ ID NO: 70288 - DNA, 33 bp, Homo sapien
ttaataaacaattgtctactttaaaccaagtaa

SEQ ID NO: 70289 - DNA, 33 bp, Homo sapien
gaagtggagagatctaagaacagtcttcacaat

SEQ ID NO: 70290 - DNA, 33 bp, Homo sapien
gaagtggagagatctaggaacagtcttcacaat

SEQ ID NO: 70291 - DNA, 33 bp, Homo sapien
aataaaacagatttggaaaacaaaaatacaagc

SEQ ID NO: 70292 - DNA, 33 bp, Homo sapien
aataaaacagatttgggaaacaaaaatacaagc

SEQ ID NO: 70293 - DNA, 33 bp, Homo sapien
ctcctgtactaaggcggatggcttagaacagcc

SEQ ID NO: 70294 - DNA, 33 bp, Homo sapien
ctcctgtactaaggcgtatggcttagaacagcc

SEQ ID NO: 70295 - DNA, 33 bp, Homo sapien
tcatgcagaaacatcaataagtaagagtataca

SEQ ID NO: 70296 - DNA, 33 bp, Homo sapien
tcatgcagaaacatcagtaagtaagagtataca

SEQ ID NO: 70297 - DNA, 33 bp, Homo sapien
gtactgaggctatgtccaagcacagagacagct

SEQ ID NO: 70298 - DNA, 33 bp, Homo sapien
gtactgaggctatgtcgaagcacagagacagct

SEQ ID NO: 70299 - DNA, 33 bp, Homo sapien
atcatttagcttcaggaaaacatctctgtgcat

SEQ ID NO: 70300 - DNA, 33 bp, Homo sapien
atcatttagcttcagggaaacatctctgtgcat

SEQ ID NO: 70301 - DNA, 33 bp, Homo sapien
tgtcctttgtttatcacgctgtgccacatttgt

SEQ ID NO: 70302 - DNA, 33 bp, Homo sapien
tgtcctttgtttatcatgctgtgccacatttgt

SEQ ID NO: 70303 - DNA, 33 bp, Homo sapien
gacatcttgtatccacgagaccttaattgtgtg

SEQ ID NO: 70304 - DNA, 33 bp, Homo sapien
gacatcttgtatccactagaccttaattgtgtg

SEQ ID NO: 70305 - DNA, 33 bp, Homo sapien
acttcttaggctacacagaaggccactgcaatc

SEQ ID NO: 70306 - DNA, 33 bp, Homo sapien
acttcttaggctacacggaaggccactgcaatc

SEQ ID NO: 70307 - DNA, 33 bp, Homo sapien
gagagagtatcaagagaccttctgaggttgtaa

SEQ ID NO: 70308 - DNA, 33 bp, Homo sapien
gagagagtatcaagaggccttctgaggttgtaa

SEQ ID NO: 70309 - DNA, 33 bp, Homo sapien
atgtgctggccaagtaaggaaattatagggcct

SEQ ID NO: 70310 - DNA, 33 bp, Homo sapien
atgtgctggccaagtatggaaattatagggcct

SEQ ID NO: 70311 - DNA, 33 bp, Homo sapien
gaagaatgaaaaataacgagaagactcagggag

SEQ ID NO: 70312 - DNA, 33 bp, Homo sapien
gaagaatgaaaaataatgagaagactcagggag

SEQ ID NO: 70313 - DNA, 33 bp, Homo sapien
ttataaattctggggccatagagtctatgcgtg

SEQ ID NO: 70314 - DNA, 33 bp, Homo sapien
ttataaattctggggctatagagtctatgcgtg

SEQ ID NO: 70315 - DNA, 33 bp, Homo sapien
agaaatcaggaatcatgaaattgctagcaactg

SEQ ID NO: 70316 - DNA, 33 bp, Homo sapien
agaaatcaggaatcattaaattgctagcaactg

SEQ ID NO: 70317 - DNA, 33 bp, Homo sapien
tgaacacttgtataccaaccatctagctttatc

SEQ ID NO: 70318 - DNA, 33 bp, Homo sapien
tgaacacttgtataccgaccatctagctttatc

SEQ ID NO: 70319 - DNA, 33 bp, Homo sapien
gccgatttctttagtacattggcgcccaaatgg

SEQ ID NO: 70320 - DNA, 33 bp, Homo sapien
gccgatttctttagtagattggcgcccaaatgg

SEQ ID NO: 70321 - DNA, 33 bp, Homo sapien
aactgtaaggaataaaaaagttgtgctagaaag

SEQ ID NO: 70322 - DNA, 33 bp, Homo sapien
aactgtaaggaataaacaagttgtgctagaaag

SEQ ID NO: 70323 - DNA, 33 bp, Homo sapien
gttaagtatagttaacacttcaacaacatggtt

SEQ ID NO: 70324 - DNA, 33 bp, Homo sapien
gttaagtatagttaacccttcaacaacatggtt

SEQ ID NO: 70325 - DNA, 33 bp, Homo sapien
gattttcctgttcctgaagagcctagtttccac

SEQ ID NO: 70326 - DNA, 33 bp, Homo sapien
gattttcctgttcctggagagcctagtttccac

SEQ ID NO: 70327 - DNA, 33 bp, Homo sapien; identical to SEQ ID NO: 70325

SEQ ID NO: 70328 - DNA, 33 bp, Homo sapien; identical to SEQ ID NO: 70326

SEQ ID NO: 70329 - DNA, 33 bp, Homo sapien
ccatcccctagtcccacgctgcacaactcacac

SEQ ID NO: 70330 - DNA, 33 bp, Homo sapien
ccatcccctagtcccatgctgcacaactcacac

SEQ ID NO: 70331 - DNA, 33 bp, Homo sapien
ttctcaagcagaaggaaggggttccttgtggag

SEQ ID NO: 70332 - DNA, 33 bp, Homo sapien
ttctcaagcagaaggacggggttccttgtggag

SEQ ID NO: 70333 - DNA, 33 bp, Homo sapien
aaaagtaggctgactacagtgacttgcttgatt

SEQ ID NO: 70334 - DNA, 33 bp, Homo sapien
aaaagtaggctgactatagtgacttgcttgatt

SEQ ID NO: 70335 - DNA, 33 bp, Homo sapien
tggaaatgccatgtaactgtgagttcagcagaa

SEQ ID NO: 70336 - DNA, 33 bp, Homo sapien
tggaaatgccatgtaattgtgagttcagcagaa

SEQ ID NO: 70337 - DNA, 33 bp, Homo sapien
cagtaggtactttacaaatgcacttaacagata

SEQ ID NO: 70338 - DNA, 33 bp, Homo sapien
cagtaggtactttacagatgcacttaacagata

SEQ ID NO: 70339 - DNA, 33 bp, Homo sapien
ccgctctacgacctaactcagctttgtggccag

SEQ ID NO: 70340 - DNA, 33 bp, Homo sapien
ccgctctacgacctaagtcagctttgtggccag

SEQ ID NO: 70341 - DNA, 33 bp, Homo sapien
cttagaccctccatacacagagaaaagaggtca

SEQ ID NO: 70342 - DNA, 33 bp, Homo sapien
cttagaccctccatacgcagagaaaagaggtca

SEQ ID NO: 70343 - DNA, 33 bp, Homo sapien
attgtggcatttattaaacttgctactaggttt

SEQ ID NO: 70344 - DNA, 33 bp, Homo sapien
attgtggcatttattagacttgctactaggttt

SEQ ID NO: 70345 - DNA, 33 bp, Homo sapien
gagacagaacgtgcgaaggcttccccatcatcc

SEQ ID NO: 70346 - DNA, 33 bp, Homo sapien
gagacagaacgtgcgagggcttccccatcatcc

SEQ ID NO: 70347 - DNA, 33 bp, Homo sapien
tggtgtcactcacccacgcccgttatcttccat

SEQ ID NO: 70348 - DNA, 33 bp, Homo sapien
tggtgtcactcacccatgcccgttatcttccat

SEQ ID NO: 70349 - DNA, 33 bp, Homo sapien
cctggagtctttccaggctatttcaaaccattt

SEQ ID NO: 70350 - DNA, 33 bp, Homo sapien
cctggagtctttccagtctatttcaaaccattt

SEQ ID NO: 70351 - DNA, 33 bp, Homo sapien
ataagtcaccagtttacggtattctgtaataga

SEQ ID NO: 70352 - DNA, 33 bp, Homo sapien
ataagtcaccagtttatggtattctgtaataga

SEQ ID NO: 70353 - DNA, 33 bp, Homo sapien
ggttctgactgtcttacgcctccactgcttgga

SEQ ID NO: 70354 - DNA, 33 bp, Homo sapien
ggttctgactgtcttatgcctccactgcttgga

SEQ ID NO: 70355 - DNA, 33 bp, Homo sapien
gagaggtgttcactgcacctgcacagcatggta

SEQ ID NO: 70356 - DNA, 33 bp, Homo sapien
gagaggtgttcactgcgcctgcacagcatggta

SEQ ID NO: 70357 - DNA, 33 bp, Homo sapien
ctcgacaagggtaagcacttttatctggaggag

SEQ ID NO: 70358 - DNA, 33 bp, Homo sapien
ctcgacaagggtaagcgcttttatctggaggag

SEQ ID NO: 70359 - DNA, 33 bp, Homo sapien
cattttggcagtcttccaaatgacagcttgttc

SEQ ID NO: 70360 - DNA, 33 bp, Homo sapien
cattttggcagtcttctaaatgacagcttgttc

SEQ ID NO: 70361 - DNA, 33 bp, Homo sapien
tctcaacgctgcctgcaacgtggcttctgtttg

SEQ ID NO: 70362 - DNA, 33 bp, Homo sapien
tctcaacgctgcctgcgacgtggcttctgtttg

SEQ ID NO: 70363 - DNA, 33 bp, Homo sapien
tcctccttgacaaaataaggatagtaagaacac

SEQ ID NO: 70364 - DNA, 33 bp, Homo sapien
tcctccttgacaaaatgaggatagtaagaacac

SEQ ID NO: 70365 - DNA, 33 bp, Homo sapien
tgaggtgggatagccaagagagtgtgcaatgtg

SEQ ID NO: 70366 - DNA, 33 bp, Homo sapien
tgaggtgggatagccaggagagtgtgcaatgtg

SEQ ID NO: 70367 - DNA, 33 bp, Homo sapien
acccagtgctctttccacagttccatgctgctt

SEQ ID NO: 70368 - DNA, 33 bp, Homo sapien
acccagtgctctttccgcagttccatgctgctt

SEQ ID NO: 70369 - DNA, 33 bp, Homo sapien
aataacacacttaaagccttccactcaaggtct

SEQ ID NO: 70370 - DNA, 33 bp, Homo sapien
aataacacacttaaagtcttccactcaaggtct

SEQ ID NO: 70371 - DNA, 33 bp, Homo sapien
cagctgccttcaactcactttacagcttgtcac

SEQ ID NO: 70372 - DNA, 33 bp, Homo sapien
cagctgccttcaactcgctttacagcttgtcac

SEQ ID NO: 70373 - DNA, 33 bp, Homo sapien
ggacctcatgcccaagcaacggcgcgcaggaat

SEQ ID NO: 70374 - DNA, 33 bp, Homo sapien
ggacctcatgcccaaggaacggcgcgcaggaat

SEQ ID NO: 70375 - DNA, 33 bp, Homo sapien
tgccctctcagcctcaaactgataatttggaaa

SEQ ID NO: 70376 - DNA, 33 bp, Homo sapien
tgccctctcagcctcatactgataatttggaaa

SEQ ID NO: 70377 - DNA, 33 bp, Homo sapien
tccaagtatcactctccaccacctcatcacctt

SEQ ID NO: 70378 - DNA, 33 bp, Homo sapien
tccaagtatcactctctaccacctcatcacctt

SEQ ID NO: 70379 - DNA, 33 bp, Homo sapien
catcttataacttgtgcaaaaggctggatccct

SEQ ID NO: 70380 - DNA, 33 bp, Homo sapien
catcttataacttgtgtaaaaggctggatccct

SEQ ID NO: 70381 - DNA, 33 bp, Homo sapien
gtggtagagagtgataagtgcctcgttgcatgg

SEQ ID NO: 70382 - DNA, 33 bp, Homo sapien
gtggtagagagtgatacgtgcctcgttgcatgg

SEQ ID NO: 70383 - DNA, 33 bp, Homo sapien
ttccattctggatatgcattttttgacaaagaa

SEQ ID NO: 70384 - DNA, 33 bp, Homo sapien
ttccattctggatatgtattttttgacaaagaa

SEQ ID NO: 70385 - DNA, 33 bp, Homo sapien
ttctccatttcctgtaccatcaccctatggcaa

SEQ ID NO: 70386 - DNA, 33 bp, Homo sapien
ttctccatttcctgtatcatcaccctatggcaa

SEQ ID NO: 70387 - DNA, 33 bp, Homo sapien
cactgtaagagaaccaaccaggctaaggagaag

SEQ ID NO: 70388 - DNA, 33 bp, Homo sapien
cactgtaagagaaccagccaggctaaggagaag

SEQ ID NO: 70389 - DNA, 33 bp, Homo sapien
tgagcacatgaggatgaaatattgcccaaactt

SEQ ID NO: 70390 - DNA, 33 bp, Homo sapien
tgagcacatgaggatggaatattgcccaaactt

SEQ ID NO: 70391 - DNA, 33 bp, Homo sapien
ttcttagctcttggccaggacccaggagaggga

SEQ ID NO: 70392 - DNA, 33 bp, Homo sapien
ttcttagctcttggccgggacccaggagaggga

SEQ ID NO: 70393 - DNA, 33 bp, Homo sapien
ccccacacagcatgaaaggggaggctttattat

SEQ ID NO: 70394 - DNA, 33 bp, Homo sapien
ccccacacagcatgaagggggaggctttattat

SEQ ID NO: 70395 - DNA, 33 bp, Homo sapien
gagaccagtccctgcccgcaaagaaattgagtc

SEQ ID NO: 70396 - DNA, 33 bp, Homo sapien
gagaccagtccctgcctgcaaagaaattgagtc

SEQ ID NO: 70397 - DNA, 33 bp, Homo sapien
ccttgcagttattagacgtttgggttccccaag

SEQ ID NO: 70398 - DNA, 33 bp, Homo sapien
ccttgcagttattagatgtttgggttccccaag

SEQ ID NO: 70399 - DNA, 33 bp, Homo sapien
aggggccactgggagaccagcagaagacgccct

SEQ ID NO: 70400 - DNA, 33 bp, Homo sapien
aggggccactgggagatcagcagaagacgccct

SEQ ID NO: 70401 - DNA, 33 bp, Homo sapien
tgaaattcaaatttaagctggtgtactgctttt

SEQ ID NO: 70402 - DNA, 33 bp, Homo sapien
tgaaattcaaatttaatctggtgtactgctttt

SEQ ID NO: 70403 - DNA, 33 bp, Homo sapien
gctgaactttgcttgaagactgaatgggacttg

SEQ ID NO: 70404 - DNA, 33 bp, Homo sapien
gctgaactttgcttgaggactgaatgggacttg

SEQ ID NO: 70405 - DNA, 33 bp, Homo sapien
caggcagttaggtatacgagtcaggattatggg

SEQ ID NO: 70406 - DNA, 33 bp, Homo sapien
caggcagttaggtataggagtcaggattatggg

SEQ ID NO: 70407 - DNA, 33 bp, Homo sapien
tttctccccaaaatccacttttcctgtagtctc

SEQ ID NO: 70408 - DNA, 33 bp, Homo sapien
tttctccccaaaatccgcttttcctgtagtctc

SEQ ID NO: 70409 - DNA, 33 bp, Homo sapien
ccatctctgtaagtaacgaatccatccttccaa

SEQ ID NO: 70410 - DNA, 33 bp, Homo sapien
ccatctctgtaagtaatgaatccatccttccaa

SEQ ID NO: 70411 - DNA, 33 bp, Homo sapien
cgtcttgagtgtgcacagagggaacatgctgtg

SEQ ID NO: 70412 - DNA, 33 bp, Homo sapien
cgtcttgagtgtgcacggagggaacatgctgtg

SEQ ID NO: 70413 - DNA, 33 bp, Homo sapien
atatacccagtgcttaacataaggtgctcagta

SEQ ID NO: 70414 - DNA, 33 bp, Homo sapien
atatacccagtgcttagcataaggtgctcagta

SEQ ID NO: 70415 - DNA, 33 bp, Homo sapien
actaccccatttgccccattgtgtgtaaactgt

SEQ ID NO: 70416 - DNA, 33 bp, Homo sapien
actaccccatttgccctattgtgtgtaaactgt

SEQ ID NO: 70417 - DNA, 33 bp, Homo sapien
tgcagcctgtaaagacagccaagtgcgggtgtg

SEQ ID NO: 70418 - DNA, 33 bp, Homo sapien
tgcagcctgtaaagacggccaagtgcgggtgtg

SEQ ID NO: 70419 - DNA, 33 bp, Homo sapien
cccctggtttgcaacacaggaagatggaagaga

SEQ ID NO: 70420 - DNA, 33 bp, Homo sapien
cccctggtttgcaacataggaagatggaagaga

SEQ ID NO: 70421 - DNA, 33 bp, Homo sapien
aaatccctttcagctacagtgtcctttgattct

SEQ ID NO: 70422 - DNA, 33 bp, Homo sapien
aaatccctttcagctatagtgtcctttgattct

SEQ ID NO: 70423 - DNA, 33 bp, Homo sapien
atccagctttggcttcccttcagagctttcatt

SEQ ID NO: 70424 - DNA, 33 bp, Homo sapien
atccagctttggcttctcttcagagctttcatt

SEQ ID NO: 70425 - DNA, 33 bp, Homo sapien
tttagggggcctcttcaagaaaaagaattttaa

SEQ ID NO: 70426 - DNA, 33 bp, Homo sapien
tttagggggcctcttccagaaaaagaattttaa

SEQ ID NO: 70427 - DNA, 33 bp, Homo sapien
aaatctgaccgcctacaggcacccgggcagctg

SEQ ID NO: 70428 - DNA, 33 bp, Homo sapien
aaatctgaccgcctacgggcacccgggcagctg

SEQ ID NO: 70429 - DNA, 33 bp, Homo sapien
tgctctgtctatggaggagtcaaaaataataat

SEQ ID NO: 70430 - DNA, 33 bp, Homo sapien
tgctctgtctatggagtagtcaaaaataataat

SEQ ID NO: 70431 - DNA, 33 bp, Homo sapien
aagtgttcatagaacaaattggtcggtgaggac

SEQ ID NO: 70432 - DNA, 33 bp, Homo sapien
aagtgttcatagaacacattggtcggtgaggac

SEQ ID NO: 70433 - DNA, 33 bp, Homo sapien
gcccactttacagatgaagagatgaaggcagac

SEQ ID NO: 70434 - DNA, 33 bp, Homo sapien
gcccactttacagatggagagatgaaggcagac

SEQ ID NO: 70435 - DNA, 33 bp, Homo sapien
cagacctgcgtggcccgaaataagttgtctgcc

SEQ ID NO: 70436 - DNA, 33 bp, Homo sapien
cagacctgcgtggccctaaataagttgtctgcc

SEQ ID NO: 70437 - DNA, 33 bp, Homo sapien
gatggaagaggaagcacagattcagctgacagt

SEQ ID NO: 70438 - DNA, 33 bp, Homo sapien
gatggaagaggaagcagagattcagctgacagt

SEQ ID NO: 70439 - DNA, 33 bp, Homo sapien
tcccccttctcttcccgcaacctgtttgtctac

SEQ ID NO: 70440 - DNA, 33 bp, Homo sapien
tcccccttctcttccctcaacctgtttgtctac

SEQ ID NO: 70441 - DNA, 33 bp, Homo sapien
accccaaatacactggccaggggtgtccaagct

SEQ ID NO: 70442 - DNA, 33 bp, Homo sapien
accccaaatacactggtcaggggtgtccaagct

SEQ ID NO: 70443 - DNA, 33 bp, Homo sapien
ctacgtctaacacacaagatttccttaataaag

SEQ ID NO: 70444 - DNA, 33 bp, Homo sapien
ctacgtctaacacacaggatttccttaataaag

SEQ ID NO: 70445 - DNA, 33 bp, Homo sapien
aagaaaggaagttatccacaccggtctaagcac

SEQ ID NO: 70446 - DNA, 33 bp, Homo sapien
aagaaaggaagttatctacaccggtctaagcac

SEQ ID NO: 70447 - DNA, 33 bp, Homo sapien
cagatccttatgagtacagacaaggctttccag

SEQ ID NO: 70448 - DNA, 33 bp, Homo sapien
cagatccttatgagtagagacaaggctttccag

SEQ ID NO: 70449 - DNA, 33 bp, Homo sapien
cctccgagctacggcaaaatttggtagaaaatg

SEQ ID NO: 70450 - DNA, 33 bp, Homo sapien
cctccgagctacggcacaatttggtagaaaatg

SEQ ID NO: 70451 - DNA, 33 bp, Homo sapien
tattacaaaggatatcacagaggatacaaacga

SEQ ID NO: 70452 - DNA, 33 bp, Homo sapien
tattacaaaggatatcgcagaggatacaaacga

SEQ ID NO: 70453 - DNA, 33 bp, Homo sapien
cagggagcttttatccagatagctgaacacagg

SEQ ID NO: 70454 - DNA, 33 bp, Homo sapien
cagggagcttttatccggatagctgaacacagg

SEQ ID NO: 70455 - DNA, 33 bp, Homo sapien
tttcataacaccacaccgggtgtccctatgttg

SEQ ID NO: 70456 - DNA, 33 bp, Homo sapien
tttcataacaccacactgggtgtccctatgttg

SEQ ID NO: 70457 - DNA, 33 bp, Homo sapien
agcaagccgagaggctcagattcagattcatac

SEQ ID NO: 70458 - DNA, 33 bp, Homo sapien
agcaagccgagaggctgagattcagattcatac

SEQ ID NO: 70459 - DNA, 33 bp, Homo sapien
atcagcctgatttacaaaacagaaaagtcactt

SEQ ID NO: 70460 - DNA, 33 bp, Homo sapien
atcagcctgatttacagaacagaaaagtcactt

SEQ ID NO: 70461 - DNA, 33 bp, Homo sapien
attcctggtacatagaaagcaccaaatacatgt

SEQ ID NO: 70462 - DNA, 33 bp, Homo sapien
attcctggtacatagagagcaccaaatacatgt

SEQ ID NO: 70463 - DNA, 33 bp, Homo sapien
ctataatgctgcttaacgaatagtccttactgg

SEQ ID NO: 70464 - DNA, 33 bp, Homo sapien
ctataatgctgcttaatgaatagtccttactgg

SEQ ID NO: 70465 - DNA, 33 bp, Homo sapien
gctaaggagaacacgccgccaggatgtgctgca

SEQ ID NO: 70466 - DNA, 33 bp, Homo sapien
gctaaggagaacacgctgccaggatgtgctgca

SEQ ID NO: 70467 - DNA, 33 bp, Homo sapien
ccaccccctagagccacctcattcaggactgcc

SEQ ID NO: 70468 - DNA, 33 bp, Homo sapien
ccaccccctagagccatctcattcaggactgcc

SEQ ID NO: 70469 - DNA, 33 bp, Homo sapien
atcttcgcagattcaacgaaaagaattacaaat

SEQ ID NO: 70470 - DNA, 33 bp, Homo sapien
atcttcgcagattcaaggaaaagaattacaaat

SEQ ID NO: 70471 - DNA, 33 bp, Homo sapien; identical to SEQ ID NO: 70469

SEQ ID NO: 70472 - DNA, 33 bp, Homo sapien; identical to SEQ ID NO: 70470

SEQ ID NO: 70473 - DNA, 33 bp, Homo sapien
gaaaatctgttgaagaactacagcttgctaaag

SEQ ID NO: 70474 - DNA, 33 bp, Homo sapien
gaaaatctgttgaagagctacagcttgctaaag

SEQ ID NO: 70475 - DNA, 33 bp, Homo sapien; identical to SEQ ID NO: 70473

SEQ ID NO: 70476 - DNA, 33 bp, Homo sapien; identical to SEQ ID NO: 70474

SEQ ID NO: 70477 - DNA, 33 bp, Homo sapien
gactatgatgcattaaactcaaggattacaaaa

SEQ ID NO: 70478 - DNA, 33 bp, Homo sapien
gactatgatgcattaagctcaaggattacaaaa

SEQ ID NO: 70479 - DNA, 33 bp, Homo sapien
tgaacccagtgagagacgacaaacggcgcaaac

SEQ ID NO: 70480 - DNA, 33 bp, Homo sapien
tgaacccagtgagagatgacaaacggcgcaaac

SEQ ID NO: 70481 - DNA, 33 bp, Homo sapien
ctagatattactaaacaaacagaaaactcaatt

SEQ ID NO: 70482 - DNA, 33 bp, Homo sapien
ctagatattactaaacgaacagaaaactcaatt

SEQ ID NO: 70483 - DNA, 33 bp, Homo sapien
atacatttactgcttacaactggaggaagatta

SEQ ID NO: 70484 - DNA, 33 bp, Homo sapien
atacatttactgcttagaactggaggaagatta

SEQ ID NO: 70485 - DNA, 33 bp, Homo sapien
agctgagggcaatgaaatatggctttgttcatt

SEQ ID NO: 70486 - DNA, 33 bp, Homo sapien
agctgagggcaatgaagtatggctttgttcatt

SEQ ID NO: 70487 - DNA, 33 bp, Homo sapien
atgccagatgttgcagaaagagcaaataaggta

SEQ ID NO: 70488 - DNA, 33 bp, Homo sapien
atgccagatgttgcaggaagagcaaataaggta

SEQ ID NO: 70489 - DNA, 33 bp, Homo sapien
atttgatccattttaaccaggcagttgcatctt

SEQ ID NO: 70490 - DNA, 33 bp, Homo sapien
atttgatccattttaagcaggcagttgcatctt

SEQ ID NO: 70491 - DNA, 33 bp, Homo sapien
gcttgtgggctagacactcaccacagaaaaaag

SEQ ID NO: 70492 - DNA, 33 bp, Homo sapien
gcttgtgggctagacagtcaccacagaaaaaag

SEQ ID NO: 70493 - DNA, 33 bp, Homo sapien
tccctcggtgctttaacagtattttttctacac

SEQ ID NO: 70494 - DNA, 33 bp, Homo sapien
tccctcggtgctttaagagtattttttctacac

SEQ ID NO: 70495 - DNA, 33 bp, Homo sapien
tttggcttataaagtaccaagcatttttccatt

SEQ ID NO: 70496 - DNA, 33 bp, Homo sapien
tttggcttataaagtatcaagcatttttccatt

SEQ ID NO: 70497 - DNA, 33 bp, Homo sapien
caaactgtcatcacaacaccagacagttcaaaa

SEQ ID NO: 70498 - DNA, 33 bp, Homo sapien
caaactgtcatcacaataccagacagttcaaaa

SEQ ID NO: 70499 - DNA, 33 bp, Homo sapien
aactggcctatggttacatagttagttggtggg

SEQ ID NO: 70500 - DNA, 33 bp, Homo sapien
aactggcctatggttatatagttagttggtggg

SEQ ID NO: 70501 - DNA, 33 bp, Homo sapien
tagctggttagaaatacgagccagctataatcc

SEQ ID NO: 70502 - DNA, 33 bp, Homo sapien
tagctggttagaaatatgagccagctataatcc

SEQ ID NO: 70503 - DNA, 33 bp, Homo sapien
aaatgcattcataaaccagatccacgtgtgacc

SEQ ID NO: 70504 - DNA, 33 bp, Homo sapien
aaatgcattcataaacgagatccacgtgtgacc

SEQ ID NO: 70505 - DNA, 33 bp, Homo sapien
cttattatcactgtaccagaacattatactaga

SEQ ID NO: 70506 - DNA, 33 bp, Homo sapien
cttattatcactgtactagaacattatactaga

SEQ ID NO: 70507 - DNA, 33 bp, Homo sapien
cccttctgtctagaaccgtaatgtattagctaa

SEQ ID NO: 70508 - DNA, 33 bp, Homo sapien
cccttctgtctagaactgtaatgtattagctaa

SEQ ID NO: 70509 - DNA, 33 bp, Homo sapien
atgactatgtatgtaaacagctcaatggttttt

SEQ ID NO: 70510 - DNA, 33 bp, Homo sapien
atgactatgtatgtaaccagctcaatggttttt

SEQ ID NO: 70511 - DNA, 33 bp, Homo sapien
tgctttcaagtttataaggccagtattgcccag

SEQ ID NO: 70512 - DNA, 33 bp, Homo sapien
tgctttcaagtttatacggccagtattgcccag

SEQ ID NO: 70513 - DNA, 33 bp, Homo sapien
cagactaaaaccatcaggaatagaggcaaaaat

SEQ ID NO: 70514 - DNA, 33 bp, Homo sapien
cagactaaaaccatcatgaatagaggcaaaaat

SEQ ID NO: 70515 - DNA, 33 bp, Homo sapien
aaaacagagatcaatacatacgtttccccctaa

SEQ ID NO: 70516 - DNA, 33 bp, Homo sapien
aaaacagagatcaatatatacgtttccccctaa

SEQ ID NO: 70517 - DNA, 33 bp, Homo sapien
gctttatttggatctaagataaatcagtacccc

SEQ ID NO: 70518 - DNA, 33 bp, Homo sapien
gctttatttggatctaggataaatcagtacccc

SEQ ID NO: 70519 - DNA, 33 bp, Homo sapien
tctgagaatgcaaactaaagtataagaatgttc

SEQ ID NO: 70520 - DNA, 33 bp, Homo sapien
tctgagaatgcaaactgaagtataagaatgttc

SEQ ID NO: 70521 - DNA, 33 bp, Homo sapien
tatgttatgaaaatgcaagtttaaatctgaact

SEQ ID NO: 70522 - DNA, 33 bp, Homo sapien
tatgttatgaaaatgccagtttaaatctgaact

SEQ ID NO: 70523 - DNA, 33 bp, Homo sapien
gccattagcataagagaaatgaactgccatata

SEQ ID NO: 70524 - DNA, 33 bp, Homo sapien
gccattagcataagaggaatgaactgccatata

SEQ ID NO: 70525 - DNA, 33 bp, Homo sapien
attatgttgagctctaaaacaaaacactcagaa

SEQ ID NO: 70526 - DNA, 33 bp, Homo sapien
attatgttgagctctagaacaaaacactcagaa

SEQ ID NO: 70527 - DNA, 33 bp, Homo sapien
taaaccatctgtgctccaaaccatcatatccca

SEQ ID NO: 70528 - DNA, 33 bp, Homo sapien
taaaccatctgtgctctaaaccatcatatccca

SEQ ID NO: 70529 - DNA, 33 bp, Homo sapien
ttacttgcaaaagtagacctatgcttgttagtt

SEQ ID NO: 70530 - DNA, 33 bp, Homo sapien
ttacttgcaaaagtaggcctatgcttgttagtt

SEQ ID NO: 70531 - DNA, 33 bp, Homo sapien
tgattgaattaggagcaaaatctaggttctagt

SEQ ID NO: 70532 - DNA, 33 bp, Homo sapien
tgattgaattaggagccaaatctaggttctagt

SEQ ID NO: 70533 - DNA, 33 bp, Homo sapien
ttcgttcccattaacaagacctgataacattag

SEQ ID NO: 70534 - DNA, 33 bp, Homo sapien
ttcgttcccattaacaggacctgataacattag

SEQ ID NO: 70535 - DNA, 33 bp, Homo sapien
tacacaatactggttacagagaaatatgaagga

SEQ ID NO: 70536 - DNA, 33 bp, Homo sapien
tacacaatactggttatagagaaatatgaagga

SEQ ID NO: 70537 - DNA, 33 bp, Homo sapien
tgagatgtagtgagaactctaaagtctggtgag

SEQ ID NO: 70538 - DNA, 33 bp, Homo sapien
tgagatgtagtgagaagtctaaagtctggtgag

SEQ ID NO: 70539 - DNA, 33 bp, Homo sapien
cagtagtgtttccttacctgcagtttttgcttt

SEQ ID NO: 70540 - DNA, 33 bp, Homo sapien
cagtagtgtttccttatctgcagtttttgcttt

SEQ ID NO: 70541 - DNA, 33 bp, Homo sapien
caatgaataaatgaacgacactgtaactttaat

SEQ ID NO: 70542 - DNA, 33 bp, Homo sapien
caatgaataaatgaactacactgtaactttaat

SEQ ID NO: 70543 - DNA, 33 bp, Homo sapien
agctgatataataagccgagtaataacatgatt

SEQ ID NO: 70544 - DNA, 33 bp, Homo sapien
agctgatataataagctgagtaataacatgatt

SEQ ID NO: 70545 - DNA, 33 bp, Homo sapien
aggattatctacacaacgaagtcactgtgctat

SEQ ID NO: 70546 - DNA, 33 bp, Homo sapien
aggattatctacacaatgaagtcactgtgctat

SEQ ID NO: 70547 - DNA, 33 bp, Homo sapien
tggactcagaggaccacaagggacttcaggctg

SEQ ID NO: 70548 - DNA, 33 bp, Homo sapien
tggactcagaggaccataagggacttcaggctg

SEQ ID NO: 70549 - DNA, 33 bp, Homo sapien
aaccactggacaattgaaacagaaagaacaggg

SEQ ID NO: 70550 - DNA, 33 bp, Homo sapien
aaccactggacaattgcaacagaaagaacaggg

SEQ ID NO: 70551 - DNA, 33 bp, Homo sapien
gcaccaacattggacactgaaggtctttttaat

SEQ ID NO: 70552 - DNA, 33 bp, Homo sapien
gcaccaacattggacattgaaggtctttttaat

SEQ ID NO: 70553 - DNA, 33 bp, Homo sapien
cttcaaagatcgaaggaccatcagcccacaaag

SEQ ID NO: 70554 - DNA, 33 bp, Homo sapien
cttcaaagatcgaaggcccatcagcccacaaag

SEQ ID NO: 70555 - DNA, 33 bp, Homo sapien
agaagcacaataaaatcatacaggagccaaaag

SEQ ID NO: 70556 - DNA, 33 bp, Homo sapien
agaagcacaataaaattatacaggagccaaaag

SEQ ID NO: 70557 - DNA, 33 bp, Homo sapien
caactaacttgagaaaactgctgatatgaaata

SEQ ID NO: 70558 - DNA, 33 bp, Homo sapien
caactaacttgagaaacctgctgatatgaaata

SEQ ID NO: 70559 - DNA, 33 bp, Homo sapien
agtctagaactttagcccaaaatacaggaagta

SEQ ID NO: 70560 - DNA, 33 bp, Homo sapien
agtctagaactttagctcaaaatacaggaagta

SEQ ID NO: 70561 - DNA, 33 bp, Homo sapien
aagctgaaaactgttacatcttaggtaaaaatg

SEQ ID NO: 70562 - DNA, 33 bp, Homo sapien
aagctgaaaactgttatatcttaggtaaaaatg

SEQ ID NO: 70563 - DNA, 33 bp, Homo sapien
atgcagaaaaagaataaattgaaagcaccctag

SEQ ID NO: 70564 - DNA, 33 bp, Homo sapien
atgcagaaaaagaatacattgaaagcaccctag

SEQ ID NO: 70565 - DNA, 33 bp, Homo sapien
ctatttatccttacaacagtcattatgggagcc

SEQ ID NO: 70566 - DNA, 33 bp, Homo sapien
ctatttatccttacaatagtcattatgggagcc

SEQ ID NO: 70567 - DNA, 33 bp, Homo sapien
ccatactaccccaaccaagggctgttgctaagt

SEQ ID NO: 70568 - DNA, 33 bp, Homo sapien
ccatactaccccaacccagggctgttgctaagt

SEQ ID NO: 70569 - DNA, 33 bp, Homo sapien
gtatatgtttccttcaacggttatttgagatgc

SEQ ID NO: 70570 - DNA, 33 bp, Homo sapien
gtatatgtttccttcagcggttatttgagatgc

SEQ ID NO: 70571 - DNA, 33 bp, Homo sapien
taacttattttcttacactaaaacattggcaat

SEQ ID NO: 70572 - DNA, 33 bp, Homo sapien
taacttattttcttacgctaaaacattggcaat

SEQ ID NO: 70573 - DNA, 33 bp, Homo sapien
tttaagtactaccctcaatttagcccttctcta

SEQ ID NO: 70574 - DNA, 33 bp, Homo sapien
tttaagtactaccctcgatttagcccttctcta

SEQ ID NO: 70575 - DNA, 33 bp, Homo sapien
cctggctctttgtaagacaagtaatttaagatt

SEQ ID NO: 70576 - DNA, 33 bp, Homo sapien
cctggctctttgtaagtcaagtaatttaagatt

SEQ ID NO: 70577 - DNA, 33 bp, Homo sapien
agaatgataaataaccagaggctggaaagtgag

SEQ ID NO: 70578 - DNA, 33 bp, Homo sapien
agaatgataaataaccggaggctggaaagtgag

SEQ ID NO: 70579 - DNA, 33 bp, Homo sapien
atgtaccactcaggcacaggatgttgtcagtgg

SEQ ID NO: 70580 - DNA, 33 bp, Homo sapien
atgtaccactcaggcataggatgttgtcagtgg

SEQ ID NO: 70581 - DNA, 33 bp, Homo sapien
tgtaaagcacaattcacctaacttatgaaatca

SEQ ID NO: 70582 - DNA, 33 bp, Homo sapien
tgtaaagcacaattcagctaacttatgaaatca

SEQ ID NO: 70583 - DNA, 33 bp, Homo sapien
ctcactactgcccagcaaagaggaaatataata

SEQ ID NO: 70584 - DNA, 33 bp, Homo sapien
ctcactactgcccagcgaagaggaaatataata

SEQ ID NO: 70585 - DNA, 33 bp, Homo sapien
tttgataagtatttcccaagcactactatgttt

SEQ ID NO: 70586 - DNA, 33 bp, Homo sapien
tttgataagtatttccgaagcactactatgttt

SEQ ID NO: 70587 - DNA, 33 bp, Homo sapien
gggagggttcagtacacctggccaagtccagta

SEQ ID NO: 70588 - DNA, 33 bp, Homo sapien
gggagggttcagtacagctggccaagtccagta

SEQ ID NO: 70589 - DNA, 33 bp, Homo sapien
tttcctccagcctgcaatatgcccagagacagc

SEQ ID NO: 70590 - DNA, 33 bp, Homo sapien
tttcctccagcctgcagtatgcccagagacagc

SEQ ID NO: 70591 - DNA, 33 bp, Homo sapien
aaaagggacccatgaaaatgacaatgtggccct

SEQ ID NO: 70592 - DNA, 33 bp, Homo sapien
aaaagggacccatgaagatgacaatgtggccct

SEQ ID NO: 70593 - DNA, 33 bp, Homo sapien
tttcttccacttcataaacaagaaatgtgaggc

SEQ ID NO: 70594 - DNA, 33 bp, Homo sapien
tttcttccacttcatagacaagaaatgtgaggc

SEQ ID NO: 70595 - DNA, 33 bp, Homo sapien
gtgaaggtgaaacttagggtcacattgaagctc

SEQ ID NO: 70596 - DNA, 33 bp, Homo sapien
gtgaaggtgaaacttatggtcacattgaagctc

SEQ ID NO: 70597 - DNA, 33 bp, Homo sapien
atcctctgtacatttacatatttgcccaatctt

SEQ ID NO: 70598 - DNA, 33 bp, Homo sapien
atcctctgtacatttatatatttgcccaatctt

SEQ ID NO: 70599 - DNA, 33 bp, Homo sapien
ctgataatctgtaaaccagatgtgacaggaaga

SEQ ID NO: 70600 - DNA, 33 bp, Homo sapien
ctgataatctgtaaactagatgtgacaggaaga

SEQ ID NO: 70601 - DNA, 33 bp, Homo sapien
tctatacctttgcatacagctttcccccactta

SEQ ID NO: 70602 - DNA, 33 bp, Homo sapien
tctatacctttgcatatagctttcccccactta

SEQ ID NO: 70603 - DNA, 33 bp, Homo sapien
tttcagtgtttcgccaactacaaacaatgcagc

SEQ ID NO: 70604 - DNA, 33 bp, Homo sapien
tttcagtgtttcgccagctacaaacaatgcagc

SEQ ID NO: 70605 - DNA, 33 bp, Homo sapien
tacatacatacatacacaaaagaggcttcagag

SEQ ID NO: 70606 - DNA, 33 bp, Homo sapien
tacatacatacatacataaaagaggcttcagag

SEQ ID NO: 70607 - DNA, 33 bp, Homo sapien
tcagtattatttgtgactattcttgtatgagaa

SEQ ID NO: 70608 - DNA, 33 bp, Homo sapien
tcagtattatttgtgagtattcttgtatgagaa

SEQ ID NO: 70609 - DNA, 33 bp, Homo sapien
ctggaagttttattcacgtgctcttagctacta

SEQ ID NO: 70610 - DNA, 33 bp, Homo sapien
ctggaagttttattcatgtgctcttagctacta

SEQ ID NO: 70611 - DNA, 33 bp, Homo sapien
tatattttcttccacaataagccttatagctgg

SEQ ID NO: 70612 - DNA, 33 bp, Homo sapien
tatattttcttccacagtaagccttatagctgg

SEQ ID NO: 70613 - DNA, 33 bp, Homo sapien
aggcacttcattgtccacctgatttgccctctc

SEQ ID NO: 70614 - DNA, 33 bp, Homo sapien
aggcacttcattgtccgcctgatttgccctctc

SEQ ID NO: 70615 - DNA, 33 bp, Homo sapien
gcttgttttatgggccaacctgcatttcatttg

SEQ ID NO: 70616 - DNA, 33 bp, Homo sapien
gcttgttttatgggccgacctgcatttcatttg

SEQ ID NO: 70617 - DNA, 33 bp, Homo sapien
atatgttgtgtttacacagtccacaaatgaaat

SEQ ID NO: 70618 - DNA, 33 bp, Homo sapien
atatgttgtgtttacatagtccacaaatgaaat

SEQ ID NO: 70619 - DNA, 33 bp, Homo sapien
attctcgatgaatcctaaaagatgggtagattg

SEQ ID NO: 70620 - DNA, 33 bp, Homo sapien
attctcgatgaatcctgaaagatgggtagattg

SEQ ID NO: 70621 - DNA, 33 bp, Homo sapien
agatctgtttctcgtccacagaaataaagaaag

SEQ ID NO: 70622 - DNA, 33 bp, Homo sapien
agatctgtttctcgtctacagaaataaagaaag

SEQ ID NO: 70623 - DNA, 33 bp, Homo sapien
aaaataggtaaatgtaacccacgcaagaaagta

SEQ ID NO: 70624 - DNA, 33 bp, Homo sapien
aaaataggtaaatgtagcccacgcaagaaagta

SEQ ID NO: 70625 - DNA, 33 bp, Homo sapien
aatatgtgccacagaaattaatgtgctggagac

SEQ ID NO: 70626 - DNA, 33 bp, Homo sapien
aatatgtgccacagaagttaatgtgctggagac

SEQ ID NO: 70627 - DNA, 33 bp, Homo sapien
gtattgaagtccatcagacctgagtgttgagca

SEQ ID NO: 70628 - DNA, 33 bp, Homo sapien
gtattgaagtccatcatacctgagtgttgagca

SEQ ID NO: 70629 - DNA, 33 bp, Homo sapien
gatcaccatcttttccccaacacaaactccaga

SEQ ID NO: 70630 - DNA, 33 bp, Homo sapien
gatcaccatcttttccgcaacacaaactccaga

SEQ ID NO: 70631 - DNA, 33 bp, Homo sapien
aataaagagtggaaaacctccttcctcctcaac

SEQ ID NO: 70632 - DNA, 33 bp, Homo sapien
aataaagagtggaaaatctccttcctcctcaac

SEQ ID NO: 70633 - DNA, 33 bp, Homo sapien
agtttgtttctaacaccacccataatcataaaa

SEQ ID NO: 70634 - DNA, 33 bp, Homo sapien
agtttgtttctaacactacccataatcataaaa

SEQ ID NO: 70635 - DNA, 33 bp, Homo sapien
cccagctgaaagagaacgtccaaagtctagatt

SEQ ID NO: 70636 - DNA, 33 bp, Homo sapien
cccagctgaaagagaatgtccaaagtctagatt

SEQ ID NO: 70637 - DNA, 33 bp, Homo sapien
taaattaggtcctgccgatgcttgtatgttgtc

SEQ ID NO: 70638 - DNA, 33 bp, Homo sapien
taaattaggtcctgcctatgcttgtatgttgtc

SEQ ID NO: 70639 - DNA, 33 bp, Homo sapien
cactaatgaaggctgaaaaaaaccacagctgaa

SEQ ID NO: 70640 - DNA, 33 bp, Homo sapien
cactaatgaaggctgagaaaaaccacagctgaa

SEQ ID NO: 70641 - DNA, 33 bp, Homo sapien
caagaaaggctcttagaatggttgtttgcacgc

SEQ ID NO: 70642 - DNA, 33 bp, Homo sapien
caagaaaggctcttaggatggttgtttgcacgc

SEQ ID NO: 70643 - DNA, 33 bp, Homo sapien
ccacacagaatagaagcaatagtttgatcctga

SEQ ID NO: 70644 - DNA, 33 bp, Homo sapien
ccacacagaatagaagtaatagtttgatcctga

SEQ ID NO: 70645 - DNA, 33 bp, Homo sapien
agtgtgtatttgtgacaaggaaagggttcagtg

SEQ ID NO: 70646 - DNA, 33 bp, Homo sapien
agtgtgtatttgtgacgaggaaagggttcagtg

SEQ ID NO: 70647 - DNA, 33 bp, Homo sapien
tgagccacccagtctacggtattgtgttacagc

SEQ ID NO: 70648 - DNA, 33 bp, Homo sapien
tgagccacccagtctatggtattgtgttacagc

SEQ ID NO: 70649 - DNA, 33 bp, Homo sapien
gttggatctgaagtacccaatagtccgtgttcg

SEQ ID NO: 70650 - DNA, 33 bp, Homo sapien
gttggatctgaagtactcaatagtccgtgttcg

SEQ ID NO: 70651 - DNA, 33 bp, Homo sapien
tgcctgatgcttagccaacatttaatcaatgta

SEQ ID NO: 70652 - DNA, 33 bp, Homo sapien
tgcctgatgcttagccgacatttaatcaatgta

SEQ ID NO: 70653 - DNA, 33 bp, Homo sapien
gtcaatctttgagaaccattactatcagacatg

SEQ ID NO: 70654 - DNA, 33 bp, Homo sapien
gtcaatctttgagaacgattactatcagacatg

SEQ ID NO: 70655 - DNA, 33 bp, Homo sapien
tgtgtggctgaagaacaacacggagcattaagc

SEQ ID NO: 70656 - DNA, 33 bp, Homo sapien
tgtgtggctgaagaacgacacggagcattaagc

SEQ ID NO: 70657 - DNA, 33 bp, Homo sapien
cacaggcagcactcctaactttgaccaacggtt

SEQ ID NO: 70658 - DNA, 33 bp, Homo sapien
cacaggcagcactcctgactttgaccaacggtt

SEQ ID NO: 70659 - DNA, 33 bp, Homo sapien
ttttatataagggttgaaactcttgcccatcca

SEQ ID NO: 70660 - DNA, 33 bp, Homo sapien
ttttatataagggttgtaactcttgcccatcca

SEQ ID NO: 70661 - DNA, 33 bp, Homo sapien
atctcagtgaatcccaatccctgaaaggacaag

SEQ ID NO: 70662 - DNA, 33 bp, Homo sapien
atctcagtgaatcccagtccctgaaaggacaag

SEQ ID NO: 70663 - DNA, 33 bp, Homo sapien
tgaggtcacgacacacaacgttctcatcaggtg

SEQ ID NO: 70664 - DNA, 33 bp, Homo sapien
tgaggtcacgacacaccacgttctcatcaggtg

SEQ ID NO: 70665 - DNA, 33 bp, Homo sapien
tctctgagacaaaagcaaaatcttaatgttcag

SEQ ID NO: 70666 - DNA, 33 bp, Homo sapien
tctctgagacaaaagcgaaatcttaatgttcag

SEQ ID NO: 70667 - DNA, 33 bp, Homo sapien
tgccctcccaccattacgtacacaatgttttgg

SEQ ID NO: 70668 - DNA, 33 bp, Homo sapien
tgccctcccaccattatgtacacaatgttttgg

SEQ ID NO: 70669 - DNA, 33 bp, Homo sapien
tgcctagtgggaacagactaactttgaataaaa

SEQ ID NO: 70670 - DNA, 33 bp, Homo sapien
tgcctagtgggaacaggctaactttgaataaaa

SEQ ID NO: 70671 - DNA, 33 bp, Homo sapien
tttgaaaattgcacagaatttcagtgggtagct

SEQ ID NO: 70672 - DNA, 33 bp, Homo sapien
tttgaaaattgcacagtatttcagtgggtagct

SEQ ID NO: 70673 - DNA, 33 bp, Homo sapien
ctaccatcagcataaacgggctttgggatggtg

SEQ ID NO: 70674 - DNA, 33 bp, Homo sapien
ctaccatcagcataaatgggctttgggatggtg

SEQ ID NO: 70675 - DNA, 33 bp, Homo sapien
aatagtgcagccactacggaaaaaactgtggca

SEQ ID NO: 70676 - DNA, 33 bp, Homo sapien
aatagtgcagccactatggaaaaaactgtggca

SEQ ID NO: 70677 - DNA, 33 bp, Homo sapien
ttggagtgggatggtaaactcttcagcaagtcc

SEQ ID NO: 70678 - DNA, 33 bp, Homo sapien
ttggagtgggatggtagactcttcagcaagtcc

SEQ ID NO: 70679 - DNA, 33 bp, Homo sapien
tgccctggagtaattacgaagcataggcattct

SEQ ID NO: 70680 - DNA, 33 bp, Homo sapien
tgccctggagtaattatgaagcataggcattct

SEQ ID NO: 70681 - DNA, 33 bp, Homo sapien
tgtcatcagaaaaccacggacgtaagaagacaa

SEQ ID NO: 70682 - DNA, 33 bp, Homo sapien
tgtcatcagaaaaccatggacgtaagaagacaa

SEQ ID NO: 70683 - DNA, 33 bp, Homo sapien
tggttttctgatgacaagttagccattaatctt

SEQ ID NO: 70684 - DNA, 33 bp, Homo sapien
tggttttctgatgacaggttagccattaatctt

SEQ ID NO: 70685 - DNA, 33 bp, Homo sapien
tttaagatctttcagcacattagagcttacaga

SEQ ID NO: 70686 - DNA, 33 bp, Homo sapien
tttaagatctttcagcccattagagcttacaga

SEQ ID NO: 70687 - DNA, 33 bp, Homo sapien
tagcaagctctgaaccgcatcagaagttcttat

SEQ ID NO: 70688 - DNA, 33 bp, Homo sapien
tagcaagctctgaacctcatcagaagttcttat

SEQ ID NO: 70689 - DNA, 33 bp, Homo sapien
ctgaaaagttgtgcagaatataggagtacactg

SEQ ID NO: 70690 - DNA, 33 bp, Homo sapien
ctgaaaagttgtgcagcatataggagtacactg

SEQ ID NO: 70691 - DNA, 33 bp, Homo sapien
cccaagagatcaataccagcctgggcatcatgg

SEQ ID NO: 70692 - DNA, 33 bp, Homo sapien
cccaagagatcaatacgagcctgggcatcatgg

SEQ ID NO: 70693 - DNA, 33 bp, Homo sapien
agattttgggaaaataccattccattgggagga

SEQ ID NO: 70694 - DNA, 33 bp, Homo sapien
agattttgggaaaatatcattccattgggagga

SEQ ID NO: 70695 - DNA, 33 bp, Homo sapien
acatgcacacttgggaccactgtgtctagtctc

SEQ ID NO: 70696 - DNA, 33 bp, Homo sapien
acatgcacacttgggatcactgtgtctagtctc

SEQ ID NO: 70697 - DNA, 33 bp, Homo sapien
cagccctgttgaggcaatcacaatttggagagg

SEQ ID NO: 70698 - DNA, 33 bp, Homo sapien
cagccctgttgaggcagtcacaatttggagagg

SEQ ID NO: 70699 - DNA, 33 bp, Homo sapien
agtccccttttctttcacacattaggaacttta

SEQ ID NO: 70700 - DNA, 33 bp, Homo sapien
agtccccttttctttcgcacattaggaacttta

SEQ ID NO: 70701 - DNA, 33 bp, Homo sapien
caggaatccctgagcaatactcagcaaaggctg

SEQ ID NO: 70702 - DNA, 33 bp, Homo sapien
caggaatccctgagcattactcagcaaaggctg

SEQ ID NO: 70703 - DNA, 33 bp, Homo sapien
aatttagcagagagaaaatttacagcacttaaa

SEQ ID NO: 70704 - DNA, 33 bp, Homo sapien
aatttagcagagagaacatttacagcacttaaa

SEQ ID NO: 70705 - DNA, 33 bp, Homo sapien
gagacagctctgggtacggatttgagccctgcc

SEQ ID NO: 70706 - DNA, 33 bp, Homo sapien
gagacagctctgggtatggatttgagccctgcc

SEQ ID NO: 70707 - DNA, 33 bp, Homo sapien
ttggctccttcttctacgagtggtgaggaaatc

SEQ ID NO: 70708 - DNA, 33 bp, Homo sapien
ttggctccttcttctatgagtggtgaggaaatc

SEQ ID NO: 70709 - DNA, 33 bp, Homo sapien
tttacaaagggagatacgtacagcagtaactat

SEQ ID NO: 70710 - DNA, 33 bp, Homo sapien
tttacaaagggagatatgtacagcagtaactat

SEQ ID NO: 70711 - DNA, 33 bp, Homo sapien
cctgcctgacaaggcccatgaaagcagaaagga

SEQ ID NO: 70712 - DNA, 33 bp, Homo sapien
cctgcctgacaaggcctatgaaagcagaaagga

SEQ ID NO: 70713 - DNA, 33 bp, Homo sapien
aatgacagggttggaacagaattctctggttcc

SEQ ID NO: 70714 - DNA, 33 bp, Homo sapien
aatgacagggttggaatagaattctctggttcc

SEQ ID NO: 70715 - DNA, 33 bp, Homo sapien
tataggactgaggtagacagtggaatgttacag

SEQ ID NO: 70716 - DNA, 33 bp, Homo sapien
tataggactgaggtaggcagtggaatgttacag

SEQ ID NO: 70717 - DNA, 33 bp, Homo sapien
cagctgtgtttagctacggctttggcttgaagc

SEQ ID NO: 70718 - DNA, 33 bp, Homo sapien
cagctgtgtttagctatggctttggcttgaagc

SEQ ID NO: 70719 - DNA, 33 bp, Homo sapien
aaagaggttgtagggggactattctcattttat

SEQ ID NO: 70720 - DNA, 33 bp, Homo sapien
aaagaggttgtaggggtactattctcattttat

SEQ ID NO: 70721 - DNA, 33 bp, Homo sapien
cttcaggcttgaagtccaggttagggctgccat

SEQ ID NO: 70722 - DNA, 33 bp, Homo sapien
cttcaggcttgaagtctaggttagggctgccat

SEQ ID NO: 70723 - DNA, 33 bp, Homo sapien
attccatgtgacacccaccacagacatcagggg

SEQ ID NO: 70724 - DNA, 33 bp, Homo sapien
attccatgtgacacccgccacagacatcagggg

SEQ ID NO: 70725 - DNA, 33 bp, Homo sapien
gacagtcctgccaccaagctgtgagaagttacc

SEQ ID NO: 70726 - DNA, 33 bp, Homo sapien
gacagtcctgccaccatgctgtgagaagttacc

SEQ ID NO: 70727 - DNA, 33 bp, Homo sapien
acctgctctgaagcccaaaggaaaataatgggc

SEQ ID NO: 70728 - DNA, 33 bp, Homo sapien
acctgctctgaagcccgaaggaaaataatgggc

SEQ ID NO: 70729 - DNA, 33 bp, Homo sapien
tcctgtggacggtttgcagccagcttggcaatg

SEQ ID NO: 70730 - DNA, 33 bp, Homo sapien
tcctgtggacggtttgtagccagcttggcaatg

SEQ ID NO: 70731 - DNA, 33 bp, Homo sapien
gctccctggaaggctcaatcttgaagcacaaca

SEQ ID NO: 70732 - DNA, 33 bp, Homo sapien
gctccctggaaggctcgatcttgaagcacaaca

SEQ ID NO: 70733 - DNA, 33 bp, Homo sapien
tcagggatcctgagtagtaagagattcctcaat

SEQ ID NO: 70734 - DNA, 33 bp, Homo sapien
tcagggatcctgagtattaagagattcctcaat

SEQ ID NO: 70735 - DNA, 33 bp, Homo sapien
aactttgaaacggccaatctgcatcttatttct

SEQ ID NO: 70736 - DNA, 33 bp, Homo sapien
aactttgaaacggccagtctgcatcttatttct

SEQ ID NO: 70737 - DNA, 33 bp, Homo sapien
cgtctctggtccatcccgatttacttgaaggac

SEQ ID NO: 70738 - DNA, 33 bp, Homo sapien
cgtctctggtccatcctgatttacttgaaggac

SEQ ID NO: 70739 - DNA, 33 bp, Homo sapien
ccccagagtggccataggtctgagagccccaca

SEQ ID NO: 70740 - DNA, 33 bp, Homo sapien
ccccagagtggccatatgtctgagagccccaca

SEQ ID NO: 70741 - DNA, 33 bp, Homo sapien
gcacccattaaccttccgaaaatacagacacta

SEQ ID NO: 70742 - DNA, 33 bp, Homo sapien
gcacccattaaccttctgaaaatacagacacta

SEQ ID NO: 70743 - DNA, 33 bp, Homo sapien
ctaataggactgtttccatatgtgccctgcccc

SEQ ID NO: 70744 - DNA, 33 bp, Homo sapien
ctaataggactgtttctatatgtgccctgcccc

SEQ ID NO: 70745 - DNA, 33 bp, Homo sapien
tggggtcagatgcgaacagatgggtgatgtaca

SEQ ID NO: 70746 - DNA, 33 bp, Homo sapien
tggggtcagatgcgaagagatgggtgatgtaca

SEQ ID NO: 70747 - DNA, 33 bp, Homo sapien
gtttatcctatagatacattacctgcacataac

SEQ ID NO: 70748 - DNA, 33 bp, Homo sapien
gtttatcctatagatatattacctgcacataac

SEQ ID NO: 70749 - DNA, 33 bp, Homo sapien
tgcacagggggatctaacctctatttctactgc

SEQ ID NO: 70750 - DNA, 33 bp, Homo sapien
tgcacagggggatctagcctctatttctactgc

SEQ ID NO: 70751 - DNA, 33 bp, Homo sapien
tgtacaactcgactacagagatacttttattac

SEQ ID NO: 70752 - DNA, 33 bp, Homo sapien
tgtacaactcgactacggagatacttttattac

SEQ ID NO: 70753 - DNA, 33 bp, Homo sapien
gatatattatgtaacaatggataacatccttcc

SEQ ID NO: 70754 - DNA, 33 bp, Homo sapien
gatatattatgtaacagtggataacatccttcc

SEQ ID NO: 70755 - DNA, 33 bp, Homo sapien
tccctcatgtgcacaacgaggataatgcttaac

SEQ ID NO: 70756 - DNA, 33 bp, Homo sapien
tccctcatgtgcacaaggaggataatgcttaac

SEQ ID NO: 70757 - DNA, 33 bp, Homo sapien
agtatataatttatagccagcttacagtcatgt

SEQ ID NO: 70758 - DNA, 33 bp, Homo sapien
agtatataatttatagtcagcttacagtcatgt

SEQ ID NO: 70759 - DNA, 33 bp, Homo sapien
acagtaattttattcaacagaaaagcatgaggc

SEQ ID NO: 70760 - DNA, 33 bp, Homo sapien
acagtaattttattcagcagaaaagcatgaggc

SEQ ID NO: 70761 - DNA, 33 bp, Homo sapien
aatggattcttttcccagaagatggccctgaga

SEQ ID NO: 70762 - DNA, 33 bp, Homo sapien
aatggattcttttcccggaagatggccctgaga

SEQ ID NO: 70763 - DNA, 33 bp, Homo sapien
aataaaaaattcataacgagatgttttatagcc

SEQ ID NO: 70764 - DNA, 33 bp, Homo sapien
aataaaaaattcataaggagatgttttatagcc

SEQ ID NO: 70765 - DNA, 33 bp, Homo sapien
gactataggtatatacaaccatgccaagctaat

SEQ ID NO: 70766 - DNA, 33 bp, Homo sapien
gactataggtatataccaccatgccaagctaat

SEQ ID NO: 70767 - DNA, 33 bp, Homo sapien
aagaagaaaccagctaggtaaagatcacagagg

SEQ ID NO: 70768 - DNA, 33 bp, Homo sapien
aagaagaaaccagctatgtaaagatcacagagg

SEQ ID NO: 70769 - DNA, 33 bp, Homo sapien
gtgaaagaagaacatcaaatcccagtgtggtta

SEQ ID NO: 70770 - DNA, 33 bp, Homo sapien
gtgaaagaagaacatcgaatcccagtgtggtta

SEQ ID NO: 70771 - DNA, 33 bp, Homo sapien
acagactcagagaagacagataacttgctagag

SEQ ID NO: 70772 - DNA, 33 bp, Homo sapien
acagactcagagaagatagataacttgctagag

SEQ ID NO: 70773 - DNA, 33 bp, Homo sapien
tgtggggcagcgagacacacatagcctgggccc

SEQ ID NO: 70774 - DNA, 33 bp, Homo sapien
tgtggggcagcgagacgcacatagcctgggccc

SEQ ID NO: 70775 - DNA, 33 bp, Homo sapien
cactctgaggaaggcaatacaatctctataaag

SEQ ID NO: 70776 - DNA, 33 bp, Homo sapien
cactctgaggaaggcattacaatctctataaag

SEQ ID NO: 70777 - DNA, 33 bp, Homo sapien
aaagataaaatgacaacagcaaatatcaacaat

SEQ ID NO: 70778 - DNA, 33 bp, Homo sapien
aaagataaaatgacaatagcaaatatcaacaat

SEQ ID NO: 70779 - DNA, 33 bp, Homo sapien
aaggcttgggcttccgacccctgcactgagcac

SEQ ID NO: 70780 - DNA, 33 bp, Homo sapien
aaggcttgggcttccgtcccctgcactgagcac

SEQ ID NO: 70781 - DNA, 33 bp, Homo sapien
gcctgaatagtgaggcagatccacaggatggtg

SEQ ID NO: 70782 - DNA, 33 bp, Homo sapien
gcctgaatagtgaggccgatccacaggatggtg

SEQ ID NO: 70783 - DNA, 33 bp, Homo sapien
gaatcctgtgtgtgaaggtagaagaggcatggc

SEQ ID NO: 70784 - DNA, 33 bp, Homo sapien
gaatcctgtgtgtgaatgtagaagaggcatggc

SEQ ID NO: 70785 - DNA, 33 bp, Homo sapien
tcctacaataataataccgtgcttaaattatac

SEQ ID NO: 70786 - DNA, 33 bp, Homo sapien
tcctacaataataatatcgtgcttaaattatac

SEQ ID NO: 70787 - DNA, 33 bp, Homo sapien
ttgtatgaaattctgaagccctgatttaaatct

SEQ ID NO: 70788 - DNA, 33 bp, Homo sapien
ttgtatgaaattctgaggccctgatttaaatct

SEQ ID NO: 70789 - DNA, 33 bp, Homo sapien; identical to SEQ ID NO: 70787

SEQ ID NO: 70790 - DNA, 33 bp, Homo sapien; identical to SEQ ID NO: 70788

SEQ ID NO: 70791 - DNA, 33 bp, Homo sapien
aatctgatttcttttacctcgtgcatatattac

SEQ ID NO: 70792 - DNA, 33 bp, Homo sapien
aatctgatttcttttatctcgtgcatatattac

SEQ ID NO: 70793 - DNA, 33 bp, Homo sapien
aaattgcacatttcccaggcaccactttgaatg

SEQ ID NO: 70794 - DNA, 33 bp, Homo sapien
aaattgcacatttcccgggcaccactttgaatg

SEQ ID NO: 70795 - DNA, 33 bp, Homo sapien
aacatcacagattgaaaagggactttggggagt

SEQ ID NO: 70796 - DNA, 33 bp, Homo sapien
aacatcacagattgaacagggactttggggagt

SEQ ID NO: 70797 - DNA, 33 bp, Homo sapien
actttttaaatctgacaccagtaggactctgtt

SEQ ID NO: 70798 - DNA, 33 bp, Homo sapien
actttttaaatctgacgccagtaggactctgtt

SEQ ID NO: 70799 - DNA, 33 bp, Homo sapien
agctttaactttcacaccccccacagcactctt

SEQ ID NO: 70800 - DNA, 33 bp, Homo sapien
agctttaactttcacatcccccacagcactctt

SEQ ID NO: 70801 - DNA, 33 bp, Homo sapien
tcttcagataagaaaacagacattaagtgttgg

SEQ ID NO: 70802 - DNA, 33 bp, Homo sapien
tcttcagataagaaaatagacattaagtgttgg

SEQ ID NO: 70803 - DNA, 33 bp, Homo sapien
tcagttttaataaagcaatcctgaattttgcaa

SEQ ID NO: 70804 - DNA, 33 bp, Homo sapien
tcagttttaataaagccatcctgaattttgcaa

SEQ ID NO: 70805 - DNA, 33 bp, Homo sapien
ccttggggttacaaggacaatataagagcattt

SEQ ID NO: 70806 - DNA, 33 bp, Homo sapien
ccttggggttacaagggcaatataagagcattt

SEQ ID NO: 70807 - DNA, 33 bp, Homo sapien
ttgttgaaaatgagcaccctcgctttaccaaag

SEQ ID NO: 70808 - DNA, 33 bp, Homo sapien
ttgttgaaaatgagcatcctcgctttaccaaag

SEQ ID NO: 70809 - DNA, 33 bp, Homo sapien
tgtcacaacaatcttacgcattaggtgctattg

SEQ ID NO: 70810 - DNA, 33 bp, Homo sapien
tgtcacaacaatcttatgcattaggtgctattg

SEQ ID NO: 70811 - DNA, 33 bp, Homo sapien
gcccctgaggtttgtaaggatctctgttcaaga

SEQ ID NO: 70812 - DNA, 33 bp, Homo sapien
gcccctgaggtttgtacggatctctgttcaaga

SEQ ID NO: 70813 - DNA, 33 bp, Homo sapien
cagtattattttgctacaaacattctcatggct

SEQ ID NO: 70814 - DNA, 33 bp, Homo sapien
cagtattattttgctataaacattctcatggct

SEQ ID NO: 70815 - DNA, 33 bp, Homo sapien
cacctccttgatccaacctcttgcctttccacc

SEQ ID NO: 70816 - DNA, 33 bp, Homo sapien
cacctccttgatccaatctcttgcctttccacc

SEQ ID NO: 70817 - DNA, 33 bp, Homo sapien
caggagcagatgagagccaccttccttaaagag

SEQ ID NO: 70818 - DNA, 33 bp, Homo sapien
caggagcagatgagaggcaccttccttaaagag

SEQ ID NO: 70819 - DNA, 33 bp, Homo sapien
gacattggcatagccccagaaccctgtcttaaa

SEQ ID NO: 70820 - DNA, 33 bp, Homo sapien
gacattggcatagcccgagaaccctgtcttaaa

SEQ ID NO: 70821 - DNA, 33 bp, Homo sapien
gctaatttatgcaaacaaaatgcaaacgaatat

SEQ ID NO: 70822 - DNA, 33 bp, Homo sapien
gctaatttatgcaaaccaaatgcaaacgaatat

SEQ ID NO: 70823 - DNA, 33 bp, Homo sapien
aacaggtacatctctacctgggcatgtggtgta

SEQ ID NO: 70824 - DNA, 33 bp, Homo sapien
aacaggtacatctctatctgggcatgtggtgta

SEQ ID NO: 70825 - DNA, 33 bp, Homo sapien
cttctgccatccttcactcttccttcctgctgg

SEQ ID NO: 70826 - DNA, 33 bp, Homo sapien
cttctgccatccttcagtcttccttcctgctgg

SEQ ID NO: 70827 - DNA, 33 bp, Homo sapien
accagcctggcagcaaggtcctcttcctctcat

SEQ ID NO: 70828 - DNA, 33 bp, Homo sapien
accagcctggcagcaatgtcctcttcctctcat

SEQ ID NO: 70829 - DNA, 33 bp, Homo sapien
cagaggaaatcagcacacttcctgtacacctgt

SEQ ID NO: 70830 - DNA, 33 bp, Homo sapien
cagaggaaatcagcactcttcctgtacacctgt

SEQ ID NO: 70831 - DNA, 33 bp, Homo sapien
gaatgaaaacaaataaaagctagatgcagatct

SEQ ID NO: 70832 - DNA, 33 bp, Homo sapien
gaatgaaaacaaataacagctagatgcagatct

SEQ ID NO: 70833 - DNA, 33 bp, Homo sapien
tttctgctttgcttaaaaaaacttgctgaatga

SEQ ID NO: 70834 - DNA, 33 bp, Homo sapien
tttctgctttgcttaacaaaacttgctgaatga

SEQ ID NO: 70835 - DNA, 33 bp, Homo sapien
acactaccacttgctcagagagaaccagccctt

SEQ ID NO: 70836 - DNA, 33 bp, Homo sapien
acactaccacttgctccgagagaaccagccctt

SEQ ID NO: 70837 - DNA, 33 bp, Homo sapien
ggtagctgattcaaaacttcaacattacatctt

SEQ ID NO: 70838 - DNA, 33 bp, Homo sapien
ggtagctgattcaaaatttcaacattacatctt

SEQ ID NO: 70839 - DNA, 33 bp, Homo sapien
aagggcctgttcacacgggcttcaaagttactc

SEQ ID NO: 70840 - DNA, 33 bp, Homo sapien
aagggcctgttcacactggcttcaaagttactc

SEQ ID NO: 70841 - DNA, 33 bp, Homo sapien
cctttatcctctttaaataaactgcagaacaca

SEQ ID NO: 70842 - DNA, 33 bp, Homo sapien
cctttatcctctttaagtaaactgcagaacaca

SEQ ID NO: 70843 - DNA, 33 bp, Homo sapien
gaaagtcagggcatgaagtattgactgtgtaat

SEQ ID NO: 70844 - DNA, 33 bp, Homo sapien
gaaagtcagggcatgatgtattgactgtgtaat

SEQ ID NO: 70845 - DNA, 33 bp, Homo sapien
agtacgaatagaaccacgcaaatccagtcctca

SEQ ID NO: 70846 - DNA, 33 bp, Homo sapien
agtacgaatagaaccaggcaaatccagtcctca

SEQ ID NO: 70847 - DNA, 33 bp, Homo sapien
tttgaataaagttctcaatcacagataaagcaa

SEQ ID NO: 70848 - DNA, 33 bp, Homo sapien
tttgaataaagttctcgatcacagataaagcaa

SEQ ID NO: 70849 - DNA, 33 bp, Homo sapien
gaatggatgattttaacgtctcttgttctaaaa

SEQ ID NO: 70850 - DNA, 33 bp, Homo sapien
gaatggatgattttaatgtctcttgttctaaaa

SEQ ID NO: 70851 - DNA, 33 bp, Homo sapien
ggaagtaaggacgtgaaggaagaaaagaaatgg

SEQ ID NO: 70852 - DNA, 33 bp, Homo sapien
ggaagtaaggacgtgagggaagaaaagaaatgg

SEQ ID NO: 70853 - DNA, 33 bp, Homo sapien
tgactgaatttggttaaatcttacatatagcta

SEQ ID NO: 70854 - DNA, 33 bp, Homo sapien
tgactgaatttggttatatcttacatatagcta

SEQ ID NO: 70855 - DNA, 33 bp, Homo sapien
tttgatgattcaataaagaggaaggatggatca

SEQ ID NO: 70856 - DNA, 33 bp, Homo sapien
tttgatgattcaataatgaggaaggatggatca

SEQ ID NO: 70857 - DNA, 33 bp, Homo sapien
cccattacatggaaagactgaattatctttcta

SEQ ID NO: 70858 - DNA, 33 bp, Homo sapien
cccattacatggaaagcctgaattatctttcta

SEQ ID NO: 70859 - DNA, 33 bp, Homo sapien
atgtgtttttgctaaaatcatgtaatgctggtt

SEQ ID NO: 70860 - DNA, 33 bp, Homo sapien
atgtgtttttgctaaagtcatgtaatgctggtt

SEQ ID NO: 70861 - DNA, 33 bp, Homo sapien
gaattaaaaatataccgccactctggaaaacac

SEQ ID NO: 70862 - DNA, 33 bp, Homo sapien
gaattaaaaatatacctccactctggaaaacac

SEQ ID NO: 70863 - DNA, 33 bp, Homo sapien
gatgaaggatgtcaaacatataaataaagaaga

SEQ ID NO: 70864 - DNA, 33 bp, Homo sapien
gatgaaggatgtcaaagatataaataaagaaga

SEQ ID NO: 70865 - DNA, 33 bp, Homo sapien
atccctttacccagagacaactgctgataacat

SEQ ID NO: 70866 - DNA, 33 bp, Homo sapien
atccctttacccagaggcaactgctgataacat

SEQ ID NO: 70867 - DNA, 33 bp, Homo sapien
tttgtttttcttttaacgaaggactctgcactg

SEQ ID NO: 70868 - DNA, 33 bp, Homo sapien
tttgtttttcttttaatgaaggactctgcactg

SEQ ID NO: 70869 - DNA, 33 bp, Homo sapien
aaacgcaaagaactgccgatcatccgtgttgtt

SEQ ID NO: 70870 - DNA, 33 bp, Homo sapien
aaacgcaaagaactgctgatcatccgtgttgtt

SEQ ID NO: 70871 - DNA, 33 bp, Homo sapien
aataatgtgtgtcaccaaacagagaataccaat

SEQ ID NO: 70872 - DNA, 33 bp, Homo sapien
aataatgtgtgtcaccgaacagagaataccaat

SEQ ID NO: 70873 - DNA, 33 bp, Homo sapien
catataagacatcctcaatcagattaacagcca

SEQ ID NO: 70874 - DNA, 33 bp, Homo sapien
catataagacatcctcgatcagattaacagcca

SEQ ID NO: 70875 - DNA, 33 bp, Homo sapien
atggtgttaaaggagcaaaactattccatataa

SEQ ID NO: 70876 - DNA, 33 bp, Homo sapien
atggtgttaaaggagccaaactattccatataa

SEQ ID NO: 70877 - DNA, 33 bp, Homo sapien
acagattgggaggcgaagttatggtatatttca

SEQ ID NO: 70878 - DNA, 33 bp, Homo sapien
acagattgggaggcgaggttatggtatatttca

SEQ ID NO: 70879 - DNA, 33 bp, Homo sapien
acaatttaaaacaataaggttagagctacggca

SEQ ID NO: 70880 - DNA, 33 bp, Homo sapien
acaatttaaaacaatacggttagagctacggca

SEQ ID NO: 70881 - DNA, 33 bp, Homo sapien
agcgaatatggtgacacggataagagcaggaga

SEQ ID NO: 70882 - DNA, 33 bp, Homo sapien
agcgaatatggtgacatggataagagcaggaga

SEQ ID NO: 70883 - DNA, 33 bp, Homo sapien
acagaaggcttccaaactggaaatgaggaagtc

SEQ ID NO: 70884 - DNA, 33 bp, Homo sapien
acagaaggcttccaaagtggaaatgaggaagtc

SEQ ID NO: 70885 - DNA, 33 bp, Homo sapien
tacattctgaccaacaatgtctaaaagttccct

SEQ ID NO: 70886 - DNA, 33 bp, Homo sapien
tacattctgaccaacagtgtctaaaagttccct

SEQ ID NO: 70887 - DNA, 33 bp, Homo sapien
aggctattgtgaaacactgaatgaggtaaagtc

SEQ ID NO: 70888 - DNA, 33 bp, Homo sapien
aggctattgtgaaacattgaatgaggtaaagtc

SEQ ID NO: 70889 - DNA, 33 bp, Homo sapien
tggatctttgatattagaaactggatgtcataa

SEQ ID NO: 70890 - DNA, 33 bp, Homo sapien
tggatctttgatattataaactggatgtcataa

SEQ ID NO: 70891 - DNA, 33 bp, Homo sapien
gctcatatggctagagaaagagaggaagtgata

SEQ ID NO: 70892 - DNA, 33 bp, Homo sapien
gctcatatggctagaggaagagaggaagtgata

SEQ ID NO: 70893 - DNA, 33 bp, Homo sapien
gtgagaagtaccaagacgtaatttatgttttaa

SEQ ID NO: 70894 - DNA, 33 bp, Homo sapien
gtgagaagtaccaagatgtaatttatgttttaa

SEQ ID NO: 70895 - DNA, 33 bp, Homo sapien
gcctacaataacaaaaagagatactaacagcaa

SEQ ID NO: 70896 - DNA, 33 bp, Homo sapien
gcctacaataacaaaaggagatactaacagcaa

SEQ ID NO: 70897 - DNA, 33 bp, Homo sapien
atatgctcactaaaggacaaggctattggtgct

SEQ ID NO: 70898 - DNA, 33 bp, Homo sapien
atatgctcactaaaggtcaaggctattggtgct

SEQ ID NO: 70899 - DNA, 33 bp, Homo sapien
tttatgaactattcaagatccttcagtaaattc

SEQ ID NO: 70900 - DNA, 33 bp, Homo sapien
tttatgaactattcaatatccttcagtaaattc

SEQ ID NO: 70901 - DNA, 33 bp, Homo sapien
agatgtgaattactaactaggactggtgggaga

SEQ ID NO: 70902 - DNA, 33 bp, Homo sapien
agatgtgaattactaattaggactggtgggaga

SEQ ID NO: 70903 - DNA, 33 bp, Homo sapien
cttctattaatagtgacgtgaagactaggaaag

SEQ ID NO: 70904 - DNA, 33 bp, Homo sapien
cttctattaatagtgatgtgaagactaggaaag

SEQ ID NO: 70905 - DNA, 33 bp, Homo sapien
ttatcactatctgatcggacatttacttccttt

SEQ ID NO: 70906 - DNA, 33 bp, Homo sapien
ttatcactatctgatctgacatttacttccttt

SEQ ID NO: 70907 - DNA, 33 bp, Homo sapien
tgggtaagggattataaagtgttgaggagtgct

SEQ ID NO: 70908 - DNA, 33 bp, Homo sapien
tgggtaagggattatagagtgttgaggagtgct

SEQ ID NO: 70909 - DNA, 33 bp, Homo sapien
ctcctagaaagaatacagccggcccctaactta

SEQ ID NO: 70910 - DNA, 33 bp, Homo sapien
ctcctagaaagaatacggccggcccctaactta

SEQ ID NO: 70911 - DNA, 33 bp, Homo sapien
ttttgtactatatacacctagtttgaacttaaa

SEQ ID NO: 70912 - DNA, 33 bp, Homo sapien
ttttgtactatatacagctagtttgaacttaaa

SEQ ID NO: 70913 - DNA, 33 bp, Homo sapien
aggaccattcactagtaaacattttcagatcca

SEQ ID NO: 70914 - DNA, 33 bp, Homo sapien
aggaccattcactagtcaacattttcagatcca

SEQ ID NO: 70915 - DNA, 33 bp, Homo sapien
gcaagaatctgaattcaaacaaaaaataaggct

SEQ ID NO: 70916 - DNA, 33 bp, Homo sapien
gcaagaatctgaattcgaacaaaaaataaggct

SEQ ID NO: 70917 - DNA, 33 bp, Homo sapien
caggaaagtattttaactgacacatgagttaaa

SEQ ID NO: 70918 - DNA, 33 bp, Homo sapien
caggaaagtattttaattgacacatgagttaaa

SEQ ID NO: 70919 - DNA, 33 bp, Homo sapien
tgataagttttagttacatcacagttaatgtgt

SEQ ID NO: 70920 - DNA, 33 bp, Homo sapien
tgataagttttagttatatcacagttaatgtgt

SEQ ID NO: 70921 - DNA, 33 bp, Homo sapien
gataacaacacaagataagttgtatggcaagtg

SEQ ID NO: 70922 - DNA, 33 bp, Homo sapien
gataacaacacaagatgagttgtatggcaagtg

SEQ ID NO: 70923 - DNA, 33 bp, Homo sapien
aaaggctgaagaaagcagaaacaaggaacaaag

SEQ ID NO: 70924 - DNA, 33 bp, Homo sapien
aaaggctgaagaaagcggaaacaaggaacaaag

SEQ ID NO: 70925 - DNA, 33 bp, Homo sapien
aaatgccttctgtaaccacaccagtttataaga

SEQ ID NO: 70926 - DNA, 33 bp, Homo sapien
aaatgccttctgtaacgacaccagtttataaga

SEQ ID NO: 70927 - DNA, 33 bp, Homo sapien
tcctatctgagcattcgatatggtgtggttttc

SEQ ID NO: 70928 - DNA, 33 bp, Homo sapien
tcctatctgagcattctatatggtgtggttttc

SEQ ID NO: 70929 - DNA, 33 bp, Homo sapien
tgctatcattcctcctaaacacatctgatactt

SEQ ID NO: 70930 - DNA, 33 bp, Homo sapien
tgctatcattcctccttaacacatctgatactt

SEQ ID NO: 70931 - DNA, 33 bp, Homo sapien
atacaattgagtgagcaaccttaggtagttgtg

SEQ ID NO: 70932 - DNA, 33 bp, Homo sapien
atacaattgagtgagcgaccttaggtagttgtg

SEQ ID NO: 70933 - DNA, 33 bp, Homo sapien
tcaaggcaaaatatacaatgtgatacatgaaat

SEQ ID NO: 70934 - DNA, 33 bp, Homo sapien
tcaaggcaaaatatacgatgtgatacatgaaat

SEQ ID NO: 70935 - DNA, 33 bp, Homo sapien
gcccactacccatgaacaactcacttttcttgt

SEQ ID NO: 70936 - DNA, 33 bp, Homo sapien
gcccactacccatgaataactcacttttcttgt

SEQ ID NO: 70937 - DNA, 33 bp, Homo sapien
actcattctcaccttccagtttgtcaaaatact

SEQ ID NO: 70938 - DNA, 33 bp, Homo sapien
actcattctcaccttctagtttgtcaaaatact

SEQ ID NO: 70939 - DNA, 33 bp, Homo sapien
ttgggctatacctaaacgtttgaaatgtctatt

SEQ ID NO: 70940 - DNA, 33 bp, Homo sapien
ttgggctatacctaaatgtttgaaatgtctatt

SEQ ID NO: 70941 - DNA, 33 bp, Homo sapien
agcctcactcaaccaaccattttgcagaaaagt

SEQ ID NO: 70942 - DNA, 33 bp, Homo sapien
agcctcactcaaccaatcattttgcagaaaagt

SEQ ID NO: 70943 - DNA, 33 bp, Homo sapien
cttaccaaaagatgcacggctagaaaagaatgg

SEQ ID NO: 70944 - DNA, 33 bp, Homo sapien
cttaccaaaagatgcatggctagaaaagaatgg

SEQ ID NO: 70945 - DNA, 33 bp, Homo sapien
cggaacgagggccccactcttgagattcccagg

SEQ ID NO: 70946 - DNA, 33 bp, Homo sapien
cggaacgagggccccattcttgagattcccagg

SEQ ID NO: 70947 - DNA, 33 bp, Homo sapien
ccccaatcatctgaaaatcttgttcaaatgctt

SEQ ID NO: 70948 - DNA, 33 bp, Homo sapien
ccccaatcatctgaaagtcttgttcaaatgctt

SEQ ID NO: 70949 - DNA, 33 bp, Homo sapien
aggcgcctgtggcataagactgagttctggttg

SEQ ID NO: 70950 - DNA, 33 bp, Homo sapien
aggcgcctgtggcatacgactgagttctggttg

SEQ ID NO: 70951 - DNA, 33 bp, Homo sapien
gctggcacatgatcaacgctcagtttgtggtga

SEQ ID NO: 70952 - DNA, 33 bp, Homo sapien
gctggcacatgatcaatgctcagtttgtggtga

SEQ ID NO: 70953 - DNA, 33 bp, Homo sapien
tggtataattcagcccaagtcggaaggcctgag

SEQ ID NO: 70954 - DNA, 33 bp, Homo sapien
tggtataattcagcccgagtcggaaggcctgag

SEQ ID NO: 70955 - DNA, 33 bp, Homo sapien
ccttatctgagtctcaacaggcttttccacgat

SEQ ID NO: 70956 - DNA, 33 bp, Homo sapien
ccttatctgagtctcagcaggcttttccacgat

SEQ ID NO: 70957 - DNA, 33 bp, Homo sapien
gcaaataggttagaagcctacgaaatttgtaag

SEQ ID NO: 70958 - DNA, 33 bp, Homo sapien
gcaaataggttagaaggctacgaaatttgtaag

SEQ ID NO: 70959 - DNA, 33 bp, Homo sapien
acttcagatgtgtccacagaagaaccagagagc

SEQ ID NO: 70960 - DNA, 33 bp, Homo sapien
acttcagatgtgtccatagaagaaccagagagc

SEQ ID NO: 70961 - DNA, 33 bp, Homo sapien
taaatctcatgatttacagaatattagtgttga

SEQ ID NO: 70962 - DNA, 33 bp, Homo sapien
taaatctcatgatttagagaatattagtgttga

SEQ ID NO: 70963 - DNA, 33 bp, Homo sapien
ttgactccttcctcatcaactcctgcgtctggt

SEQ ID NO: 70964 - DNA, 33 bp, Homo sapien
ttgactccttcctcattaactcctgcgtctggt

SEQ ID NO: 70965 - DNA, 33 bp, Homo sapien
aagtgtttgtcacactaacttaagcagctaagg

SEQ ID NO: 70966 - DNA, 33 bp, Homo sapien
aagtgtttgtcacactgacttaagcagctaagg

SEQ ID NO: 70967 - DNA, 33 bp, Homo sapien
taagacactagcttcacagtattttcaagttgt

SEQ ID NO: 70968 - DNA, 33 bp, Homo sapien
taagacactagcttcatagtattttcaagttgt

SEQ ID NO: 70969 - DNA, 33 bp, Homo sapien
gtgttaattagcatcacgtgtatgacccagtcg

SEQ ID NO: 70970 - DNA, 33 bp, Homo sapien
gtgttaattagcatcatgtgtatgacccagtcg

SEQ ID NO: 70971 - DNA, 33 bp, Homo sapien
aaaattagtctaaaaaccaaggagcgggtgtgg

SEQ ID NO: 70972 - DNA, 33 bp, Homo sapien
aaaattagtctaaaaatcaaggagcgggtgtgg

SEQ ID NO: 70973 - DNA, 33 bp, Homo sapien
aaatgtttgggaaatacaagccagcataacgtg

SEQ ID NO: 70974 - DNA, 33 bp, Homo sapien
aaatgtttgggaaatataagccagcataacgtg

SEQ ID NO: 70975 - DNA, 33 bp, Homo sapien
tagagctcacttgtcacgaaaatatttttcatt

SEQ ID NO: 70976 - DNA, 33 bp, Homo sapien
tagagctcacttgtcaggaaaatatttttcatt

SEQ ID NO: 70977 - DNA, 33 bp, Homo sapien
ggaggccatcgaaatacatagattccagaatga

SEQ ID NO: 70978 - DNA, 33 bp, Homo sapien
ggaggccatcgaaatatatagattccagaatga

SEQ ID NO: 70979 - DNA, 33 bp, Homo sapien
gttattagggagtggacatagttgctctgctca

SEQ ID NO: 70980 - DNA, 33 bp, Homo sapien
gttattagggagtggatatagttgctctgctca

SEQ ID NO: 70981 - DNA, 33 bp, Homo sapien
acaactctttttgcaactccattttttaaacaa

SEQ ID NO: 70982 - DNA, 33 bp, Homo sapien
acaactctttttgcaattccattttttaaacaa

SEQ ID NO: 70983 - DNA, 33 bp, Homo sapien
agaagagacttccttacgatgactcagttagac

SEQ ID NO: 70984 - DNA, 33 bp, Homo sapien
agaagagacttccttatgatgactcagttagac

SEQ ID NO: 70985 - DNA, 33 bp, Homo sapien
atcatgtgacctttcaaactgacttattagttc

SEQ ID NO: 70986 - DNA, 33 bp, Homo sapien
atcatgtgacctttcacactgacttattagttc

SEQ ID NO: 70987 - DNA, 33 bp, Homo sapien
aactttcagttcctgacggctaataggctaaag

SEQ ID NO: 70988 - DNA, 33 bp, Homo sapien
aactttcagttcctgatggctaataggctaaag

SEQ ID NO: 70989 - DNA, 33 bp, Homo sapien
atcttgaagggccgtcactcaatttgattctat

SEQ ID NO: 70990 - DNA, 33 bp, Homo sapien
atcttgaagggccgtcgctcaatttgattctat

SEQ ID NO: 70991 - DNA, 33 bp, Homo sapien
cctgcaaatgaaagccaaaagtaagcaggagta

SEQ ID NO: 70992 - DNA, 33 bp, Homo sapien
cctgcaaatgaaagccgaaagtaagcaggagta

SEQ ID NO: 70993 - DNA, 33 bp, Homo sapien
acaaggagaactgtaaaccattgctcaaataaa

SEQ ID NO: 70994 - DNA, 33 bp, Homo sapien
acaaggagaactgtaagccattgctcaaataaa

SEQ ID NO: 70995 - DNA, 33 bp, Homo sapien
cccaccatccacatcacagtgactcaaactgct

SEQ ID NO: 70996 - DNA, 33 bp, Homo sapien
cccaccatccacatcatagtgactcaaactgct

SEQ ID NO: 70997 - DNA, 33 bp, Homo sapien
aggtaaaagatatttaaatcagacagtagatga

SEQ ID NO: 70998 - DNA, 33 bp, Homo sapien
aggtaaaagatatttacatcagacagtagatga

SEQ ID NO: 70999 - DNA, 33 bp, Homo sapien
agtttgaggtggtaaaagaatacaggtaaaaga

SEQ ID NO: 71000 - DNA, 33 bp, Homo sapien
agtttgaggtggtaaaggaatacaggtaaaaga

SEQ ID NO: 71001 - DNA, 33 bp, Homo sapien
tataagattatcttaccgaaatcctcacaagtg

SEQ ID NO: 71002 - DNA, 33 bp, Homo sapien
tataagattatcttactgaaatcctcacaagtg

SEQ ID NO: 71003 - DNA, 33 bp, Homo sapien
gatggagtttaaaataccttgaggctatcagaa

SEQ ID NO: 71004 - DNA, 33 bp, Homo sapien
gatggagtttaaaatatcttgaggctatcagaa

SEQ ID NO: 71005 - DNA, 33 bp, Homo sapien
acttttttcaaggtgcaaacactgagtgctctg

SEQ ID NO: 71006 - DNA, 33 bp, Homo sapien
acttttttcaaggtgcgaacactgagtgctctg

SEQ ID NO: 71007 - DNA, 33 bp, Homo sapien
tatagaaatcaaataacgaaagcatatgtaatc

SEQ ID NO: 71008 - DNA, 33 bp, Homo sapien
tatagaaatcaaataatgaaagcatatgtaatc

SEQ ID NO: 71009 - DNA, 33 bp, Homo sapien
gtagcttcagagttgcgatttaagccaggctta

SEQ ID NO: 71010 - DNA, 33 bp, Homo sapien
gtagcttcagagttgctatttaagccaggctta

SEQ ID NO: 71011 - DNA, 33 bp, Homo sapien
aattgaccttacagcaacttcgctaacttgatt

SEQ ID NO: 71012 - DNA, 33 bp, Homo sapien
aattgaccttacagcatcttcgctaacttgatt

SEQ ID NO: 71013 - DNA, 33 bp, Homo sapien
ccttcaaggtcaatgacgtgttaactttaatcc

SEQ ID NO: 71014 - DNA, 33 bp, Homo sapien
ccttcaaggtcaatgatgtgttaactttaatcc

SEQ ID NO: 71015 - DNA, 33 bp, Homo sapien
gctccacacaaaatggaccaagtcattgccctc

SEQ ID NO: 71016 - DNA, 33 bp, Homo sapien
gctccacacaaaatgggccaagtcattgccctc

SEQ ID NO: 71017 - DNA, 33 bp, Homo sapien
tattaaaatccaccctcagactcggtaaagaga

SEQ ID NO: 71018 - DNA, 33 bp, Homo sapien
tattaaaatccacccttagactcggtaaagaga

SEQ ID NO: 71019 - DNA, 33 bp, Homo sapien
tgggatgctttagaaaatatcgtctctggggct

SEQ ID NO: 71020 - DNA, 33 bp, Homo sapien
tgggatgctttagaaactatcgtctctggggct

SEQ ID NO: 71021 - DNA, 33 bp, Homo sapien
tccctcggcttttccacatcatttttccatgtc

SEQ ID NO: 71022 - DNA, 33 bp, Homo sapien
tccctcggcttttccatatcatttttccatgtc

SEQ ID NO: 71023 - DNA, 33 bp, Homo sapien
gaagctgctagccctgcagtttacatcctgcca

SEQ ID NO: 71024 - DNA, 33 bp, Homo sapien
gaagctgctagccctggagtttacatcctgcca

SEQ ID NO: 71025 - DNA, 33 bp, Homo sapien
atgagtttcaaatacccagagtaggagatggac

SEQ ID NO: 71026 - DNA, 33 bp, Homo sapien
atgagtttcaaatacctagagtaggagatggac

SEQ ID NO: 71027 - DNA, 33 bp, Homo sapien
tactggagtatgttcaagaagaccctccaggat

SEQ ID NO: 71028 - DNA, 33 bp, Homo sapien
tactggagtatgttcatgaagaccctccaggat

SEQ ID NO: 71029 - DNA, 33 bp, Homo sapien
agaagaaataaaaaagaagcctattgcaccttc

SEQ ID NO: 71030 - DNA, 33 bp, Homo sapien
agaagaaataaaaaagtagcctattgcaccttc

SEQ ID NO: 71031 - DNA, 33 bp, Homo sapien
attcagcattcacctcaaaatctaccaccttaa

SEQ ID NO: 71032 - DNA, 33 bp, Homo sapien
attcagcattcacctcgaaatctaccaccttaa

SEQ ID NO: 71033 - DNA, 33 bp, Homo sapien
aagcacttagggataccgaaaggagaggccctc

SEQ ID NO: 71034 - DNA, 33 bp, Homo sapien
aagcacttagggatactgaaaggagaggccctc

SEQ ID NO: 71035 - DNA, 33 bp, Homo sapien
acacaggacatatgcaccctacaaatccccact

SEQ ID NO: 71036 - DNA, 33 bp, Homo sapien
acacaggacatatgcatcctacaaatccccact

SEQ ID NO: 71037 - DNA, 33 bp, Homo sapien
ctgctaaccatgtaggaacgagagaggcttttg

SEQ ID NO: 71038 - DNA, 33 bp, Homo sapien
ctgctaaccatgtaggcacgagagaggcttttg

SEQ ID NO: 71039 - DNA, 33 bp, Homo sapien
agacaaagcctaatgcagaagcctgtgccatct

SEQ ID NO: 71040 - DNA, 33 bp, Homo sapien
agacaaagcctaatgcggaagcctgtgccatct

SEQ ID NO: 71041 - DNA, 33 bp, Homo sapien
aatcatccctgacatcaacaaccacaatttgga

SEQ ID NO: 71042 - DNA, 33 bp, Homo sapien
aatcatccctgacatccacaaccacaatttgga

SEQ ID NO: 71043 - DNA, 33 bp, Homo sapien
tgctcatggttgtatacgtggcccttagagtac

SEQ ID NO: 71044 - DNA, 33 bp, Homo sapien
tgctcatggttgtatatgtggcccttagagtac

SEQ ID NO: 71045 - DNA, 33 bp, Homo sapien
agaacgttgaccaaagcctgctgaatttaagaa

SEQ ID NO: 71046 - DNA, 33 bp, Homo sapien
agaacgttgaccaaaggctgctgaatttaagaa

SEQ ID NO: 71047 - DNA, 33 bp, Homo sapien
cacacagcaatttaaccggtctgaagcatgagg

SEQ ID NO: 71048 - DNA, 33 bp, Homo sapien
cacacagcaatttaactggtctgaagcatgagg

SEQ ID NO: 71049 - DNA, 33 bp, Homo sapien
tctcagagagtatgtagccttcaggttagagtt

SEQ ID NO: 71050 - DNA, 33 bp, Homo sapien
tctcagagagtatgtatccttcaggttagagtt

SEQ ID NO: 71051 - DNA, 33 bp, Homo sapien
gtccttatcagaagggaaaatttgcatacagag

SEQ ID NO: 71052 - DNA, 33 bp, Homo sapien
gtccttatcagaaggggaaatttgcatacagag

SEQ ID NO: 71053 - DNA, 33 bp, Homo sapien
gagaattgaaactgcaatgagatacagtatgcc

SEQ ID NO: 71054 - DNA, 33 bp, Homo sapien
gagaattgaaactgcagtgagatacagtatgcc

SEQ ID NO: 71055 - DNA, 33 bp, Homo sapien
gcacccaaggtctgtcacagcactatgtacaat

SEQ ID NO: 71056 - DNA, 33 bp, Homo sapien
gcacccaaggtctgtcgcagcactatgtacaat

SEQ ID NO: 71057 - DNA, 33 bp, Homo sapien
taatttggaaaagaaaaccaggcaattctgaca

SEQ ID NO: 71058 - DNA, 33 bp, Homo sapien
taatttggaaaagaaagccaggcaattctgaca

SEQ ID NO: 71059 - DNA, 33 bp, Homo sapien
tatggcagctcaaaagacaaagggaaagcacca

SEQ ID NO: 71060 - DNA, 33 bp, Homo sapien
tatggcagctcaaaaggcaaagggaaagcacca

SEQ ID NO: 71061 - DNA, 33 bp, Homo sapien
cagcttaactggggccactctaccccacatcag

SEQ ID NO: 71062 - DNA, 33 bp, Homo sapien
cagcttaactggggccgctctaccccacatcag

SEQ ID NO: 71063 - DNA, 33 bp, Homo sapien
attggtgatttgctaaaggctgcaggaaaagaa

SEQ ID NO: 71064 - DNA, 33 bp, Homo sapien
attggtgatttgctaagggctgcaggaaaagaa

SEQ ID NO: 71065 - DNA, 33 bp, Homo sapien
atttttaagaaccagaatcctcatcaatactcc

SEQ ID NO: 71066 - DNA, 33 bp, Homo sapien
atttttaagaaccagattcctcatcaatactcc

SEQ ID NO: 71067 - DNA, 33 bp, Homo sapien
gtgtgggccacaataacgagggtgtggcttcct

SEQ ID NO: 71068 - DNA, 33 bp, Homo sapien
gtgtgggccacaataatgagggtgtggcttcct

SEQ ID NO: 71069 - DNA, 33 bp, Homo sapien
cttgttcatctggaagcctcgccttctcctgga

SEQ ID NO: 71070 - DNA, 33 bp, Homo sapien
cttgttcatctggaagtctcgccttctcctgga

SEQ ID NO: 71071 - DNA, 33 bp, Homo sapien
gaaactaattctgtaccaagttctttcattatt

SEQ ID NO: 71072 - DNA, 33 bp, Homo sapien
gaaactaattctgtacgaagttctttcattatt

SEQ ID NO: 71073 - DNA, 33 bp, Homo sapien
tggaatataagctacaaaggagattaaggagac

SEQ ID NO: 71074 - DNA, 33 bp, Homo sapien
tggaatataagctacagaggagattaaggagac

SEQ ID NO: 71075 - DNA, 33 bp, Homo sapien
cacaggctgggttcaccgaagcaggtgtagcag

SEQ ID NO: 71076 - DNA, 33 bp, Homo sapien
cacaggctgggttcactgaagcaggtgtagcag

SEQ ID NO: 71077 - DNA, 33 bp, Homo sapien
caaaggcatatttactaagaggggcttgcataa

SEQ ID NO: 71078 - DNA, 33 bp, Homo sapien
caaaggcatatttactgagaggggcttgcataa

SEQ ID NO: 71079 - DNA, 33 bp, Homo sapien
ttaaactttttactccaaatacagaatgttata

SEQ ID NO: 71080 - DNA, 33 bp, Homo sapien
ttaaactttttactccgaatacagaatgttata

SEQ ID NO: 71081 - DNA, 33 bp, Homo sapien
ggacctgacaggcaaaaaaaggtgatgtttgag

SEQ ID NO: 71082 - DNA, 33 bp, Homo sapien
ggacctgacaggcaaagaaaggtgatgtttgag

SEQ ID NO: 71083 - DNA, 33 bp, Homo sapien
atcttctgttcttgaacatagtatcttgatgaa

SEQ ID NO: 71084 - DNA, 33 bp, Homo sapien
atcttctgttcttgaatatagtatcttgatgaa

SEQ ID NO: 71085 - DNA, 33 bp, Homo sapien
agtgtgaagagtgttacagaagaaagatatagg

SEQ ID NO: 71086 - DNA, 33 bp, Homo sapien
agtgtgaagagtgttatagaagaaagatatagg

SEQ ID NO: 71087 - DNA, 33 bp, Homo sapien
tccaaataaattggtaagcaaatactgacatac

SEQ ID NO: 71088 - DNA, 33 bp, Homo sapien
tccaaataaattggtaggcaaatactgacatac

SEQ ID NO: 71089 - DNA, 33 bp, Homo sapien
gggtttgtggatgatgacagagatctaagaatg

SEQ ID NO: 71090 - DNA, 33 bp, Homo sapien
gggtttgtggatgatgtcagagatctaagaatg

SEQ ID NO: 71091 - DNA, 33 bp, Homo sapien
tcacgaaaggtgagagaaaacacttacctcctt

SEQ ID NO: 71092 - DNA, 33 bp, Homo sapien
tcacgaaaggtgagagtaaacacttacctcctt

SEQ ID NO: 71093 - DNA, 33 bp, Homo sapien
caagggcaatagcactaacggcgcggccatctc

SEQ ID NO: 71094 - DNA, 33 bp, Homo sapien
caagggcaatagcactgacggcgcggccatctc

SEQ ID NO: 71095 - DNA, 33 bp, Homo sapien
tttcagaagaaaggacagcaatgccaagagtct

SEQ ID NO: 71096 - DNA, 33 bp, Homo sapien
tttcagaagaaaggacggcaatgccaagagtct

SEQ ID NO: 71097 - DNA, 33 bp, Homo sapien
actatctcctttatcaatatctaccatctatat

SEQ ID NO: 71098 - DNA, 33 bp, Homo sapien
actatctcctttatcagtatctaccatctatat

SEQ ID NO: 71099 - DNA, 33 bp, Homo sapien
gagtttatttaggaaaagatgattgtaggtgag

SEQ ID NO: 71100 - DNA, 33 bp, Homo sapien
gagtttatttaggaaaggatgattgtaggtgag

SEQ ID NO: 71101 - DNA, 33 bp, Homo sapien
taggtcctcaatgacaaaagaaggggttccaag

SEQ ID NO: 71102 - DNA, 33 bp, Homo sapien
taggtcctcaatgacagaagaaggggttccaag

SEQ ID NO: 71103 - DNA, 33 bp, Homo sapien
ctgtggtttatttgtcactctggcttctcaatc

SEQ ID NO: 71104 - DNA, 33 bp, Homo sapien
ctgtggtttatttgtcgctctggcttctcaatc

SEQ ID NO: 71105 - DNA, 33 bp, Homo sapien
ctgggtctcctgtggacctcaaagctagatttt

SEQ ID NO: 71106 - DNA, 33 bp, Homo sapien
ctgggtctcctgtggatctcaaagctagatttt

SEQ ID NO: 71107 - DNA, 33 bp, Homo sapien
tgtgcatttctttccaatattttgctgctgctt

SEQ ID NO: 71108 - DNA, 33 bp, Homo sapien
tgtgcatttctttccagtattttgctgctgctt

SEQ ID NO: 71109 - DNA, 33 bp, Homo sapien
ttagggcagttactcaaggaaatgccttgggca

SEQ ID NO: 71110 - DNA, 33 bp, Homo sapien
ttagggcagttactcagggaaatgccttgggca

SEQ ID NO: 71111 - DNA, 33 bp, Homo sapien
aggtttctgcttactaagaaccgtcttcctccc

SEQ ID NO: 71112 - DNA, 33 bp, Homo sapien
aggtttctgcttactacgaaccgtcttcctccc

SEQ ID NO: 71113 - DNA, 33 bp, Homo sapien
ccactacagaaagttacagttatccatgttcct

SEQ ID NO: 71114 - DNA, 33 bp, Homo sapien
ccactacagaaagttatagttatccatgttcct

SEQ ID NO: 71115 - DNA, 33 bp, Homo sapien
cctaaaagagagccacaggaagagacggtctct

SEQ ID NO: 71116 - DNA, 33 bp, Homo sapien
cctaaaagagagccacgggaagagacggtctct

SEQ ID NO: 71117 - DNA, 33 bp, Homo sapien
gctagaggcatatgtaagatgaagccaaagaat

SEQ ID NO: 71118 - DNA, 33 bp, Homo sapien
gctagaggcatatgtacgatgaagccaaagaat

SEQ ID NO: 71119 - DNA, 33 bp, Homo sapien
agtgtcccttctattacggaatttatgcattgg

SEQ ID NO: 71120 - DNA, 33 bp, Homo sapien
agtgtcccttctattatggaatttatgcattgg

SEQ ID NO: 71121 - DNA, 33 bp, Homo sapien
gcaaataagtaaatgaacaaaacaatttcaaag

SEQ ID NO: 71122 - DNA, 33 bp, Homo sapien
gcaaataagtaaatgagcaaaacaatttcaaag

SEQ ID NO: 71123 - DNA, 33 bp, Homo sapien
aacacctctgtcctcaggcagtttatattcatt

SEQ ID NO: 71124 - DNA, 33 bp, Homo sapien
aacacctctgtcctcatgcagtttatattcatt

SEQ ID NO: 71125 - DNA, 33 bp, Homo sapien
aacacacacactcaacagctcaccttttatcaa

SEQ ID NO: 71126 - DNA, 33 bp, Homo sapien
aacacacacactcaacggctcaccttttatcaa

SEQ ID NO: 71127 - DNA, 33 bp, Homo sapien
ctcaggaactcctccacgaagctttggccccaa

SEQ ID NO: 71128 - DNA, 33 bp, Homo sapien
ctcaggaactcctccatgaagctttggccccaa

SEQ ID NO: 71129 - DNA, 33 bp, Homo sapien
taaggatcctcctaacaccaattattagccatc

SEQ ID NO: 71130 - DNA, 33 bp, Homo sapien
taaggatcctcctaaccccaattattagccatc

SEQ ID NO: 71131 - DNA, 33 bp, Homo sapien
aaacagagtaaaaacaaatcacataaggttaag

SEQ ID NO: 71132 - DNA, 33 bp, Homo sapien
aaacagagtaaaaacatatcacataaggttaag

SEQ ID NO: 71133 - DNA, 33 bp, Homo sapien
tgccctgagctggcaacggcaacagagacacat

SEQ ID NO: 71134 - DNA, 33 bp, Homo sapien
tgccctgagctggcaatggcaacagagacacat

SEQ ID NO: 71135 - DNA, 33 bp, Homo sapien
acatggtgtgcaaggacaacctatatgtagctc

SEQ ID NO: 71136 - DNA, 33 bp, Homo sapien
acatggtgtgcaaggataacctatatgtagctc

SEQ ID NO: 71137 - DNA, 33 bp, Homo sapien
gagaatggactccactaaatgatcagctttgtg

SEQ ID NO: 71138 - DNA, 33 bp, Homo sapien
gagaatggactccactgaatgatcagctttgtg

SEQ ID NO: 71139 - DNA, 33 bp, Homo sapien
gatggaatcgcagtaacgctcatcttggttaac

SEQ ID NO: 71140 - DNA, 33 bp, Homo sapien
gatggaatcgcagtaatgctcatcttggttaac

SEQ ID NO: 71141 - DNA, 33 bp, Homo sapien
attatggctttccccacgacagtttcagcgttc

SEQ ID NO: 71142 - DNA, 33 bp, Homo sapien
attatggctttccccatgacagtttcagcgttc

SEQ ID NO: 71143 - DNA, 33 bp, Homo sapien
accagtcaggcctcaaggaatttgaactgaaaa

SEQ ID NO: 71144 - DNA, 33 bp, Homo sapien
accagtcaggcctcaatgaatttgaactgaaaa

SEQ ID NO: 71145 - DNA, 33 bp, Homo sapien
cacctgggtcaagataccaacattcatggagag

SEQ ID NO: 71146 - DNA, 33 bp, Homo sapien
cacctgggtcaagatatcaacattcatggagag

SEQ ID NO: 71147 - DNA, 33 bp, Homo sapien
attgtctccatagttacgctttgtccagaatgt

SEQ ID NO: 71148 - DNA, 33 bp, Homo sapien
attgtctccatagttatgctttgtccagaatgt

SEQ ID NO: 71149 - DNA, 33 bp, Homo sapien
cagagccactgcctagaattacatgaagtcttc

SEQ ID NO: 71150 - DNA, 33 bp, Homo sapien
cagagccactgcctagtattacatgaagtcttc

SEQ ID NO: 71151 - DNA, 33 bp, Homo sapien
atttgaaggtatttataaggcatgaggatacaa

SEQ ID NO: 71152 - DNA, 33 bp, Homo sapien
atttgaaggtatttatgaggcatgaggatacaa

SEQ ID NO: 71153 - DNA, 33 bp, Homo sapien
gtaactctctgcagtaaacaatatcatgcccat

SEQ ID NO: 71154 - DNA, 33 bp, Homo sapien
gtaactctctgcagtagacaatatcatgcccat

SEQ ID NO: 71155 - DNA, 33 bp, Homo sapien
ttgaaacaacatttacaatgcaacagacaggca

SEQ ID NO: 71156 - DNA, 33 bp, Homo sapien
ttgaaacaacatttacgatgcaacagacaggca

SEQ ID NO: 71157 - DNA, 33 bp, Homo sapien
cacagttctctctcagaattcatgtgggattgg

SEQ ID NO: 71158 - DNA, 33 bp, Homo sapien
cacagttctctctcaggattcatgtgggattgg

SEQ ID NO: 71159 - DNA, 33 bp, Homo sapien
tgaaaattcagaaaaaggagacatgatgtttca

SEQ ID NO: 71160 - DNA, 33 bp, Homo sapien
tgaaaattcagaaaaatgagacatgatgtttca

SEQ ID NO: 71161 - DNA, 33 bp, Homo sapien
tcaaaacccatcaaacagtgcatttaaaatgag

SEQ ID NO: 71162 - DNA, 33 bp, Homo sapien
tcaaaacccatcaaacggtgcatttaaaatgag

SEQ ID NO: 71163 - DNA, 33 bp, Homo sapien
gtcatatgaaagctgtgaagtttgagatggaaa

SEQ ID NO: 71164 - DNA, 33 bp, Homo sapien
gtcatatgaaagctgttaagtttgagatggaaa

SEQ ID NO: 71165 - DNA, 33 bp, Homo sapien
ctaggaagaaggttgggcagtcaaggactcttc

SEQ ID NO: 71166 - DNA, 33 bp, Homo sapien
ctaggaagaaggttggtcagtcaaggactcttc

SEQ ID NO: 71167 - DNA, 33 bp, Homo sapien
tttgtttccccacttacagaagtaggagaagag

SEQ ID NO: 71168 - DNA, 33 bp, Homo sapien
tttgtttccccacttatagaagtaggagaagag

SEQ ID NO: 71169 - DNA, 33 bp, Homo sapien
catcagttatggtcccaagactagctgcggtgg

SEQ ID NO: 71170 - DNA, 33 bp, Homo sapien
catcagttatggtcccgagactagctgcggtgg

SEQ ID NO: 71171 - DNA, 33 bp, Homo sapien
ataaccatgtgagaaaacatatctttgtccttc

SEQ ID NO: 71172 - DNA, 33 bp, Homo sapien
ataaccatgtgagaaagcatatctttgtccttc

SEQ ID NO: 71173 - DNA, 33 bp, Homo sapien
ccctcatcagacacccaaagcttcagaggtact

SEQ ID NO: 71174 - DNA, 33 bp, Homo sapien
ccctcatcagacacccgaagcttcagaggtact

SEQ ID NO: 71175 - DNA, 33 bp, Homo sapien
aaaaaatcaatcattcaaagataggagatgaag

SEQ ID NO: 71176 - DNA, 33 bp, Homo sapien
aaaaaatcaatcattcgaagataggagatgaag

SEQ ID NO: 71177 - DNA, 33 bp, Homo sapien
atttctagttagaataaggtatctggctggacc

SEQ ID NO: 71178 - DNA, 33 bp, Homo sapien
atttctagttagaatagggtatctggctggacc

SEQ ID NO: 71179 - DNA, 33 bp, Homo sapien
tgcaaggattcagccaatcaagtcaattggagt

SEQ ID NO: 71180 - DNA, 33 bp, Homo sapien
tgcaaggattcagccagtcaagtcaattggagt

SEQ ID NO: 71181 - DNA, 33 bp, Homo sapien
tcatatggtctcaaaacttctaaagtcctttaa

SEQ ID NO: 71182 - DNA, 33 bp, Homo sapien
tcatatggtctcaaaatttctaaagtcctttaa

SEQ ID NO: 71183 - DNA, 33 bp, Homo sapien
gaactacatgaatagaagtagtagagggaaaag

SEQ ID NO: 71184 - DNA, 33 bp, Homo sapien
gaactacatgaatagaggtagtagagggaaaag

SEQ ID NO: 71185 - DNA, 33 bp, Homo sapien
cccttcagatccttgccagattcattcgttgct

SEQ ID NO: 71186 - DNA, 33 bp, Homo sapien
cccttcagatccttgctagattcattcgttgct

SEQ ID NO: 71187 - DNA, 33 bp, Homo sapien
taggataaaccataccacgtcatgatgaatttc

SEQ ID NO: 71188 - DNA, 33 bp, Homo sapien
taggataaaccataccgcgtcatgatgaatttc

SEQ ID NO: 71189 - DNA, 33 bp, Homo sapien
ctacactctgcctcacacttccaaacaacactc

SEQ ID NO: 71190 - DNA, 33 bp, Homo sapien
ctacactctgcctcacgcttccaaacaacactc

SEQ ID NO: 71191 - DNA, 33 bp, Homo sapien
tcatgcaaccattcataatacagtatgtccact

SEQ ID NO: 71192 - DNA, 33 bp, Homo sapien
tcatgcaaccattcatgatacagtatgtccact

SEQ ID NO: 71193 - DNA, 33 bp, Homo sapien
aaggttaaattcagtgaacaaaagcaatggaga

SEQ ID NO: 71194 - DNA, 33 bp, Homo sapien
aaggttaaattcagtggacaaaagcaatggaga

SEQ ID NO: 71195 - DNA, 33 bp, Homo sapien
ttagctttgggcatatcagcttggctacaggag

SEQ ID NO: 71196 - DNA, 33 bp, Homo sapien
ttagctttgggcatattagcttggctacaggag

SEQ ID NO: 71197 - DNA, 33 bp, Homo sapien
tgcctgggacagtcaacgaaaacaggctggcca

SEQ ID NO: 71198 - DNA, 33 bp, Homo sapien
tgcctgggacagtcaatgaaaacaggctggcca

SEQ ID NO: 71199 - DNA, 33 bp, Homo sapien
acactctcaagagaacactttcattttaaaggc

SEQ ID NO: 71200 - DNA, 33 bp, Homo sapien
acactctcaagagaacgctttcattttaaaggc

SEQ ID NO: 71201 - DNA, 33 bp, Homo sapien
ctgacctggaagctgcaaagtgcacctgctctt

SEQ ID NO: 71202 - DNA, 33 bp, Homo sapien
ctgacctggaagctgcgaagtgcacctgctctt

SEQ ID NO: 71203 - DNA, 33 bp, Homo sapien
agtataaaacgagccaagtaaagtgctgcagtc

SEQ ID NO: 71204 - DNA, 33 bp, Homo sapien
agtataaaacgagccaggtaaagtgctgcagtc

SEQ ID NO: 71205 - DNA, 33 bp, Homo sapien
agatcacattgccaacaagtgctaagagggcaa

SEQ ID NO: 71206 - DNA, 33 bp, Homo sapien
agatcacattgccaacgagtgctaagagggcaa

SEQ ID NO: 71207 - DNA, 33 bp, Homo sapien
catgtctggttttttcccatgcagatcagggcc

SEQ ID NO: 71208 - DNA, 33 bp, Homo sapien
catgtctggttttttctcatgcagatcagggcc

SEQ ID NO: 71209 - DNA, 33 bp, Homo sapien
gtataaatccttcaaaatccattcttctccgtc

SEQ ID NO: 71210 - DNA, 33 bp, Homo sapien
gtataaatccttcaaagtccattcttctccgtc

SEQ ID NO: 71211 - DNA, 33 bp, Homo sapien
agtctgcttactattccctgtacacaccctact

SEQ ID NO: 71212 - DNA, 33 bp, Homo sapien
agtctgcttactattctctgtacacaccctact

SEQ ID NO: 71213 - DNA, 33 bp, Homo sapien
aaatgcaactcaaaccagcattcgggaactggc

SEQ ID NO: 71214 - DNA, 33 bp, Homo sapien
aaatgcaactcaaaccggcattcgggaactggc

SEQ ID NO: 71215 - DNA, 33 bp, Homo sapien
atgcctggtaactaccaaatgaaatgatgcagt

SEQ ID NO: 71216 - DNA, 33 bp, Homo sapien
atgcctggtaactaccgaatgaaatgatgcagt

SEQ ID NO: 71217 - DNA, 33 bp, Homo sapien
ggtgcccagtgtgagaacggcacagtagaggca

SEQ ID NO: 71218 - DNA, 33 bp, Homo sapien
ggtgcccagtgtgagagcggcacagtagaggca

SEQ ID NO: 71219 - DNA, 33 bp, Homo sapien
cagaacctgggcttcacggaacgtacattccgt

SEQ ID NO: 71220 - DNA, 33 bp, Homo sapien
cagaacctgggcttcatggaacgtacattccgt

SEQ ID NO: 71221 - DNA, 33 bp, Homo sapien
gaacagatgagagtgacacttgagatgaacctt

SEQ ID NO: 71222 - DNA, 33 bp, Homo sapien
gaacagatgagagtgagacttgagatgaacctt

SEQ ID NO: 71223 - DNA, 33 bp, Homo sapien
catcgtacattgaggactatctgtaattctcac

SEQ ID NO: 71224 - DNA, 33 bp, Homo sapien
catcgtacattgaggagtatctgtaattctcac

SEQ ID NO: 71225 - DNA, 33 bp, Homo sapien
taaatgtataagacccaatgtttgatagcacaa

SEQ ID NO: 71226 - DNA, 33 bp, Homo sapien
taaatgtataagacccgatgtttgatagcacaa

SEQ ID NO: 71227 - DNA, 33 bp, Homo sapien
gaccctctgatactcacccttgtactccggttc

SEQ ID NO: 71228 - DNA, 33 bp, Homo sapien
gaccctctgatactcatccttgtactccggttc

SEQ ID NO: 71229 - DNA, 33 bp, Homo sapien
aggtggtatcccggtcaagagcaggatgatgaa

SEQ ID NO: 71230 - DNA, 33 bp, Homo sapien
aggtggtatcccggtcgagagcaggatgatgaa

SEQ ID NO: 71231 - DNA, 33 bp, Homo sapien
attaatggagtcgtcaaattttccttttgttta

SEQ ID NO: 71232 - DNA, 33 bp, Homo sapien
attaatggagtcgtcagattttccttttgttta

SEQ ID NO: 71233 - DNA, 33 bp, Homo sapien
tagtcctctggtaagacgttaagctggcagctt

SEQ ID NO: 71234 - DNA, 33 bp, Homo sapien
tagtcctctggtaagatgttaagctggcagctt

SEQ ID NO: 71235 - DNA, 33 bp, Homo sapien
gacactctgagcttaggagcaacattgccagca

SEQ ID NO: 71236 - DNA, 33 bp, Homo sapien
gacactctgagcttagtagcaacattgccagca

SEQ ID NO: 71237 - DNA, 33 bp, Homo sapien
acacagtttcttgccaagaggccttttccaaca

SEQ ID NO: 71238 - DNA, 33 bp, Homo sapien
acacagtttcttgccacgaggccttttccaaca

SEQ ID NO: 71239 - DNA, 33 bp, Homo sapien
tctacaacaccatccaaatgagttgagcatttc

SEQ ID NO: 71240 - DNA, 33 bp, Homo sapien
tctacaacaccatccagatgagttgagcatttc

SEQ ID NO: 71241 - DNA, 33 bp, Homo sapien
tcccaaatgagcataccgagcttcccagtcacc

SEQ ID NO: 71242 - DNA, 33 bp, Homo sapien
tcccaaatgagcatactgagcttcccagtcacc

SEQ ID NO: 71243 - DNA, 33 bp, Homo sapien
tctccatgttctccacaagtgctcctagattat

SEQ ID NO: 71244 - DNA, 33 bp, Homo sapien
tctccatgttctccacgagtgctcctagattat

SEQ ID NO: 71245 - DNA, 33 bp, Homo sapien
aataccatgtgttctcacttacaaaggagctga

SEQ ID NO: 71246 - DNA, 33 bp, Homo sapien
aataccatgtgttctcgcttacaaaggagctga

SEQ ID NO: 71247 - DNA, 33 bp, Homo sapien
aatactagaagatgaaagaaaggagagaggaat

SEQ ID NO: 71248 - DNA, 33 bp, Homo sapien
aatactagaagatgaaggaaaggagagaggaat

SEQ ID NO: 71249 - DNA, 33 bp, Homo sapien
caaaggcagcttcaaaatgtgtctccctattgc

SEQ ID NO: 71250 - DNA, 33 bp, Homo sapien
caaaggcagcttcaaagtgtgtctccctattgc

SEQ ID NO: 71251 - DNA, 33 bp, Homo sapien
ttaacatgcctaagacgcaactcaagatcttcc

SEQ ID NO: 71252 - DNA, 33 bp, Homo sapien
ttaacatgcctaagactcaactcaagatcttcc

SEQ ID NO: 71253 - DNA, 33 bp, Homo sapien
cctcaccttccccctccgacgcatccagtggta

SEQ ID NO: 71254 - DNA, 33 bp, Homo sapien
cctcaccttccccctctgacgcatccagtggta

SEQ ID NO: 71255 - DNA, 33 bp, Homo sapien
tgttaggggtaaaataagaatttcacttgtgga

SEQ ID NO: 71256 - DNA, 33 bp, Homo sapien
tgttaggggtaaaataggaatttcacttgtgga

SEQ ID NO: 71257 - DNA, 33 bp, Homo sapien
cgagtgtctttctccaatcttggtcaagtcagg

SEQ ID NO: 71258 - DNA, 33 bp, Homo sapien
cgagtgtctttctccagtcttggtcaagtcagg

SEQ ID NO: 71259 - DNA, 33 bp, Homo sapien
atttgcataggtcagaagaggggaagagtattt

SEQ ID NO: 71260 - DNA, 33 bp, Homo sapien
atttgcataggtcagaggaggggaagagtattt

SEQ ID NO: 71261 - DNA, 33 bp, Homo sapien
tgaacaatgaactccactatggcaggcattaaa

SEQ ID NO: 71262 - DNA, 33 bp, Homo sapien
tgaacaatgaactccattatggcaggcattaaa

SEQ ID NO: 71263 - DNA, 33 bp, Homo sapien
aggccaaatgaaatcacaatgaaagtatttgat

SEQ ID NO: 71264 - DNA, 33 bp, Homo sapien
aggccaaatgaaatcagaatgaaagtatttgat

SEQ ID NO: 71265 - DNA, 33 bp, Homo sapien
aagacacaaagtctgcaatctcggaaaggtgaa

SEQ ID NO: 71266 - DNA, 33 bp, Homo sapien
aagacacaaagtctgcgatctcggaaaggtgaa

SEQ ID NO: 71267 - DNA, 33 bp, Homo sapien
agccgggaggaagtcacagaatcaatgtggatc

SEQ ID NO: 71268 - DNA, 33 bp, Homo sapien
agccgggaggaagtcatagaatcaatgtggatc

SEQ ID NO: 71269 - DNA, 33 bp, Homo sapien
agaaggaaaaatgcaacgcagaaagaagaatca

SEQ ID NO: 71270 - DNA, 33 bp, Homo sapien
agaaggaaaaatgcaatgcagaaagaagaatca

SEQ ID NO: 71271 - DNA, 33 bp, Homo sapien
attgcttgttaagtcacacatctactagaacag

SEQ ID NO: 71272 - DNA, 33 bp, Homo sapien
attgcttgttaagtcatacatctactagaacag

SEQ ID NO: 71273 - DNA, 33 bp, Homo sapien
ggggcgtctaatccaccgaaaccattaggcacc

SEQ ID NO: 71274 - DNA, 33 bp, Homo sapien
ggggcgtctaatccactgaaaccattaggcacc

SEQ ID NO: 71275 - DNA, 33 bp, Homo sapien
tttcccaagcacataccatagagaaagcatcta

SEQ ID NO: 71276 - DNA, 33 bp, Homo sapien
tttcccaagcacatactatagagaaagcatcta

SEQ ID NO: 71277 - DNA, 33 bp, Homo sapien
tgactactaagtatcaaattcaaccagaaaaca

SEQ ID NO: 71278 - DNA, 33 bp, Homo sapien
tgactactaagtatcagattcaaccagaaaaca

SEQ ID NO: 71279 - DNA, 33 bp, Homo sapien
gagatgtctggtgcaacacaataggcactaaat

SEQ ID NO: 71280 - DNA, 33 bp, Homo sapien
gagatgtctggtgcaatacaataggcactaaat

SEQ ID NO: 71281 - DNA, 33 bp, Homo sapien
agagggcaatatttaaagacagaattttgggtg

SEQ ID NO: 71282 - DNA, 33 bp, Homo sapien
agagggcaatatttaatgacagaattttgggtg

SEQ ID NO: 71283 - DNA, 33 bp, Homo sapien
gtctgttcaactgaggcccaatatcactggtgt

SEQ ID NO: 71284 - DNA, 33 bp, Homo sapien
gtctgttcaactgaggtccaatatcactggtgt

SEQ ID NO: 71285 - DNA, 33 bp, Homo sapien
catgtagtgttttcaacgaaatcttgattaaat

SEQ ID NO: 71286 - DNA, 33 bp, Homo sapien
catgtagtgttttcaatgaaatcttgattaaat

SEQ ID NO: 71287 - DNA, 33 bp, Homo sapien
aggaatgtagcatagaagataggaatgttagtc

SEQ ID NO: 71288 - DNA, 33 bp, Homo sapien
aggaatgtagcatagaggataggaatgttagtc

SEQ ID NO: 71289 - DNA, 33 bp, Homo sapien
taataccgcaataaaacgggtcacacgaatttt

SEQ ID NO: 71290 - DNA, 33 bp, Homo sapien
taataccgcaataaaatgggtcacacgaatttt

SEQ ID NO: 71291 - DNA, 33 bp, Homo sapien
tacttcctgagatgtcaaaatatacccaagagt

SEQ ID NO: 71292 - DNA, 33 bp, Homo sapien
tacttcctgagatgtcgaaatatacccaagagt

SEQ ID NO: 71293 - DNA, 33 bp, Homo sapien
gacatctgtacttgtcaacattgaaatgaacag

SEQ ID NO: 71294 - DNA, 33 bp, Homo sapien
gacatctgtacttgtcgacattgaaatgaacag

SEQ ID NO: 71295 - DNA, 33 bp, Homo sapien
tttttctctaagcaaaatgtgggctaaggtaaa

SEQ ID NO: 71296 - DNA, 33 bp, Homo sapien
tttttctctaagcaaactgtgggctaaggtaaa

SEQ ID NO: 71297 - DNA, 33 bp, Homo sapien
aaattcctttttgtcacaatggatcagagtcat

SEQ ID NO: 71298 - DNA, 33 bp, Homo sapien
aaattcctttttgtcagaatggatcagagtcat

SEQ ID NO: 71299 - DNA, 33 bp, Homo sapien
accttttcatccccccaatggataaacttatta

SEQ ID NO: 71300 - DNA, 33 bp, Homo sapien
accttttcatccccccgatggataaacttatta

SEQ ID NO: 71301 - DNA, 33 bp, Homo sapien
tgtcctcaccacaaataaccctggtttgttcaa

SEQ ID NO: 71302 - DNA, 33 bp, Homo sapien
tgtcctcaccacaaatgaccctggtttgttcaa

SEQ ID NO: 71303 - DNA, 33 bp, Homo sapien
atacacataaaatttacagccattgcaaagcca

SEQ ID NO: 71304 - DNA, 33 bp, Homo sapien
atacacataaaatttatagccattgcaaagcca

SEQ ID NO: 71305 - DNA, 33 bp, Homo sapien
ctgtgctgctgtcatagcgtgcagccacaggct

SEQ ID NO: 71306 - DNA, 33 bp, Homo sapien
ctgtgctgctgtcatatcgtgcagccacaggct

SEQ ID NO: 71307 - DNA, 33 bp, Homo sapien
tcaagtatgaaagacaatggcttcaagtgctaa

SEQ ID NO: 71308 - DNA, 33 bp, Homo sapien
tcaagtatgaaagacagtggcttcaagtgctaa

SEQ ID NO: 71309 - DNA, 33 bp, Homo sapien
tacctatgtattcgacaaggatgatgatgtaat

SEQ ID NO: 71310 - DNA, 33 bp, Homo sapien
tacctatgtattcgacgaggatgatgatgtaat

SEQ ID NO: 71311 - DNA, 33 bp, Homo sapien
ctggaaatagcccctccagaattttgaatggtc

SEQ ID NO: 71312 - DNA, 33 bp, Homo sapien
ctggaaatagcccctctagaattttgaatggtc

SEQ ID NO: 71313 - DNA, 33 bp, Homo sapien
cctttgagaaaaatcccacaactctggttcaaa

SEQ ID NO: 71314 - DNA, 33 bp, Homo sapien
cctttgagaaaaatcctacaactctggttcaaa

SEQ ID NO: 71315 - DNA, 33 bp, Homo sapien
ctgaagatgggtaatggcaaagtgtctttgtcg

SEQ ID NO: 71316 - DNA, 33 bp, Homo sapien
ctgaagatgggtaatgtcaaagtgtctttgtcg

SEQ ID NO: 71317 - DNA, 33 bp, Homo sapien
aaggccctcatagtcaactgctttgtaaaatag

SEQ ID NO: 71318 - DNA, 33 bp, Homo sapien
aaggccctcatagtcagctgctttgtaaaatag

SEQ ID NO: 71319 - DNA, 33 bp, Homo sapien
tcagaactaaggcttcaaagagtcaaatcactg

SEQ ID NO: 71320 - DNA, 33 bp, Homo sapien
tcagaactaaggcttcgaagagtcaaatcactg

SEQ ID NO: 71321 - DNA, 33 bp, Homo sapien
atgcttttaagggacacgactagaagtggctta

SEQ ID NO: 71322 - DNA, 33 bp, Homo sapien
atgcttttaagggacatgactagaagtggctta

SEQ ID NO: 71323 - DNA, 33 bp, Homo sapien
atattttcactgtaaaatgagccagaagaaatc

SEQ ID NO: 71324 - DNA, 33 bp, Homo sapien
atattttcactgtaaagtgagccagaagaaatc

SEQ ID NO: 71325 - DNA, 33 bp, Homo sapien
tgctctttccagaagccaagtgactaactgata

SEQ ID NO: 71326 - DNA, 33 bp, Homo sapien
tgctctttccagaagctaagtgactaactgata

SEQ ID NO: 71327 - DNA, 33 bp, Homo sapien
tttatccactaaacccaatggtccctacattca

SEQ ID NO: 71328 - DNA, 33 bp, Homo sapien
tttatccactaaacccgatggtccctacattca

SEQ ID NO: 71329 - DNA, 33 bp, Homo sapien
gaagatctcacaggggaataggctgttgatttt

SEQ ID NO: 71330 - DNA, 33 bp, Homo sapien
gaagatctcacagggggataggctgttgatttt

SEQ ID NO: 71331 - DNA, 33 bp, Homo sapien
cccttcctgataattcactagccttctggaccc

SEQ ID NO: 71332 - DNA, 33 bp, Homo sapien
cccttcctgataattcgctagccttctggaccc

SEQ ID NO: 71333 - DNA, 33 bp, Homo sapien
cttcctttgcctatgaacttctttaagttggat

SEQ ID NO: 71334 - DNA, 33 bp, Homo sapien
cttcctttgcctatgaccttctttaagttggat

SEQ ID NO: 71335 - DNA, 33 bp, Homo sapien
tgcatatagtttttctcacaagacaggaaacgt

SEQ ID NO: 71336 - DNA, 33 bp, Homo sapien
tgcatatagtttttcttacaagacaggaaacgt

SEQ ID NO: 71337 - DNA, 33 bp, Homo sapien
aagatagcatttaacacccagaagatccactgc

SEQ ID NO: 71338 - DNA, 33 bp, Homo sapien
aagatagcatttaacatccagaagatccactgc

SEQ ID NO: 71339 - DNA, 33 bp, Homo sapien
gggtatcatgagggaaatctcttaacttctctc

SEQ ID NO: 71340 - DNA, 33 bp, Homo sapien
gggtatcatgagggaactctcttaacttctctc

SEQ ID NO: 71341 - DNA, 33 bp, Homo sapien
ggaatcctatagcacacattcttcttttacacc

SEQ ID NO: 71342 - DNA, 33 bp, Homo sapien
ggaatcctatagcacatattcttcttttacacc

SEQ ID NO: 71343 - DNA, 33 bp, Homo sapien
attcagtaatagaaagaaagaaaccactgacaa

SEQ ID NO: 71344 - DNA, 33 bp, Homo sapien
attcagtaatagaaaggaagaaaccactgacaa

SEQ ID NO: 71345 - DNA, 33 bp, Homo sapien
tttaataacagttaaaagagacaattcatgcaa

SEQ ID NO: 71346 - DNA, 33 bp, Homo sapien
tttaataacagttaaaggagacaattcatgcaa

SEQ ID NO: 71347 - DNA, 33 bp, Homo sapien
gtgccagagattgtgccaagtgtttttacacat

SEQ ID NO: 71348 - DNA, 33 bp, Homo sapien
gtgccagagattgtgcgaagtgtttttacacat

SEQ ID NO: 71349 - DNA, 33 bp, Homo sapien
gtgtcctgaagccaccagctaacttcatcgaat

SEQ ID NO: 71350 - DNA, 33 bp, Homo sapien
gtgtcctgaagccaccggctaacttcatcgaat

SEQ ID NO: 71351 - DNA, 33 bp, Homo sapien
atgaatgccctgatcaactagatgtgacagcaa

SEQ ID NO: 71352 - DNA, 33 bp, Homo sapien
atgaatgccctgatcagctagatgtgacagcaa

SEQ ID NO: 71353 - DNA, 33 bp, Homo sapien
agaagggtactttgtgaaattttgcatggcctg

SEQ ID NO: 71354 - DNA, 33 bp, Homo sapien
agaagggtactttgtggaattttgcatggcctg

SEQ ID NO: 71355 - DNA, 33 bp, Homo sapien
tccttccttttcctaaatggcacttgcacatct

SEQ ID NO: 71356 - DNA, 33 bp, Homo sapien
tccttccttttcctaagtggcacttgcacatct

SEQ ID NO: 71357 - DNA, 33 bp, Homo sapien
caaagatggctgccctcaaattaatccctgatg

SEQ ID NO: 71358 - DNA, 33 bp, Homo sapien
caaagatggctgccctgaaattaatccctgatg

SEQ ID NO: 71359 - DNA, 33 bp, Homo sapien
caattttgccataaaaagtaacatttacaggtt

SEQ ID NO: 71360 - DNA, 33 bp, Homo sapien
caattttgccataaaaggtaacatttacaggtt

SEQ ID NO: 71361 - DNA, 33 bp, Homo sapien
aagaatgcaatagaccaattcttaattcacact

SEQ ID NO: 71362 - DNA, 33 bp, Homo sapien
aagaatgcaatagaccgattcttaattcacact

SEQ ID NO: 71363 - DNA, 33 bp, Homo sapien
attataccttgagaaaaaatggattagagagat

SEQ ID NO: 71364 - DNA, 33 bp, Homo sapien
attataccttgagaaacaatggattagagagat

SEQ ID NO: 71365 - DNA, 33 bp, Homo sapien
ttttccaatccgataacgaacaaaaatgttgta

SEQ ID NO: 71366 - DNA, 33 bp, Homo sapien
ttttccaatccgataatgaacaaaaatgttgta

SEQ ID NO: 71367 - DNA, 33 bp, Homo sapien
tctatagctctttcaggcatagctgttctttgt

SEQ ID NO: 71368 - DNA, 33 bp, Homo sapien
tctatagctctttcagtcatagctgttctttgt

SEQ ID NO: 71369 - DNA, 33 bp, Homo sapien
tcgatcctgtttgtggcagtatttgccaatttg

SEQ ID NO: 71370 - DNA, 33 bp, Homo sapien
tcgatcctgtttgtgggagtatttgccaatttg

SEQ ID NO: 71371 - DNA, 33 bp, Homo sapien
agccttacaagagtcaaaaaacattacacaaac

SEQ ID NO: 71372 - DNA, 33 bp, Homo sapien
agccttacaagagtcataaaacattacacaaac

SEQ ID NO: 71373 - DNA, 33 bp, Homo sapien
taaactatctgatgaacgaataggaatcaattt

SEQ ID NO: 71374 - DNA, 33 bp, Homo sapien
taaactatctgatgaatgaataggaatcaattt

SEQ ID NO: 71375 - DNA, 33 bp, Homo sapien
ttcatattcccgaaaacgaaattctggttcact

SEQ ID NO: 71376 - DNA, 33 bp, Homo sapien
ttcatattcccgaaaaggaaattctggttcact

SEQ ID NO: 71377 - DNA, 33 bp, Homo sapien
ctctctgattcctggccgagacttctaggactc

SEQ ID NO: 71378 - DNA, 33 bp, Homo sapien
ctctctgattcctggctgagacttctaggactc

SEQ ID NO: 71379 - DNA, 33 bp, Homo sapien
tttgtaatctcagaaagatcatagtctaccctg

SEQ ID NO: 71380 - DNA, 33 bp, Homo sapien
tttgtaatctcagaaatatcatagtctaccctg

SEQ ID NO: 71381 - DNA, 33 bp, Homo sapien
tagcataaaacatatcaaacaagtatgtgctgg

SEQ ID NO: 71382 - DNA, 33 bp, Homo sapien
tagcataaaacatatcgaacaagtatgtgctgg

SEQ ID NO: 71383 - DNA, 33 bp, Homo sapien
tgcatgggggctgaaactgaattcgttgactca

SEQ ID NO: 71384 - DNA, 33 bp, Homo sapien
tgcatgggggctgaaattgaattcgttgactca

SEQ ID NO: 71385 - DNA, 33 bp, Homo sapien
tacccacagagttgtccaattttctgatagtct

SEQ ID NO: 71386 - DNA, 33 bp, Homo sapien
tacccacagagttgtctaattttctgatagtct

SEQ ID NO: 71387 - DNA, 33 bp, Homo sapien
tgagcaatcatctaataaatacggtcaagatgg

SEQ ID NO: 71388 - DNA, 33 bp, Homo sapien
tgagcaatcatctaatgaatacggtcaagatgg

SEQ ID NO: 71389 - DNA, 33 bp, Homo sapien
tgttttactgtgttcccaaaagcagtcaatagc

SEQ ID NO: 71390 - DNA, 33 bp, Homo sapien
tgttttactgtgttcctaaaagcagtcaatagc

SEQ ID NO: 71391 - DNA, 33 bp, Homo sapien
ctttttatctttgctcaaaaaccagttaattat

SEQ ID NO: 71392 - DNA, 33 bp, Homo sapien
ctttttatctttgctcgaaaaccagttaattat

SEQ ID NO: 71393 - DNA, 33 bp, Homo sapien
gagctctagaagtagaggcttgttctttttatc

SEQ ID NO: 71394 - DNA, 33 bp, Homo sapien
gagctctagaagtagatgcttgttctttttatc

SEQ ID NO: 71395 - DNA, 33 bp, Homo sapien
ttggcaaagggtcctaataaagtcacagcatcc

SEQ ID NO: 71396 - DNA, 33 bp, Homo sapien
ttggcaaagggtcctagtaaagtcacagcatcc

SEQ ID NO: 71397 - DNA, 33 bp, Homo sapien
agcttctcatgcccaacttcagaatgcttacat

SEQ ID NO: 71398 - DNA, 33 bp, Homo sapien
agcttctcatgcccaatttcagaatgcttacat

SEQ ID NO: 71399 - DNA, 33 bp, Homo sapien
aaattgtcttaaagtaacaaaaagcatctcact

SEQ ID NO: 71400 - DNA, 33 bp, Homo sapien
aaattgtcttaaagtaccaaaaagcatctcact

SEQ ID NO: 71401 - DNA, 33 bp, Homo sapien
tgaaatgataaacaaccgcacattcctatcaaa

SEQ ID NO: 71402 - DNA, 33 bp, Homo sapien
tgaaatgataaacaactgcacattcctatcaaa

SEQ ID NO: 71403 - DNA, 33 bp, Homo sapien
aatcagtcaataattaaccatagctccattaac

SEQ ID NO: 71404 - DNA, 33 bp, Homo sapien
aatcagtcaataattatccatagctccattaac

SEQ ID NO: 71405 - DNA, 33 bp, Homo sapien
tgagccagctcctgacagaaagataaggtaaat

SEQ ID NO: 71406 - DNA, 33 bp, Homo sapien
tgagccagctcctgacggaaagataaggtaaat

SEQ ID NO: 71407 - DNA, 33 bp, Homo sapien
agtttggtgaatatcaagggagttatatcttgt

SEQ ID NO: 71408 - DNA, 33 bp, Homo sapien
agtttggtgaatatcaggggagttatatcttgt

SEQ ID NO: 71409 - DNA, 33 bp, Homo sapien
ggaggggaaacagtagaacatatcaggcaaagc

SEQ ID NO: 71410 - DNA, 33 bp, Homo sapien
ggaggggaaacagtaggacatatcaggcaaagc

SEQ ID NO: 71411 - DNA, 33 bp, Homo sapien
atttacctcttacccaagtggaagtcatttgtg

SEQ ID NO: 71412 - DNA, 33 bp, Homo sapien
atttacctcttacccaggtggaagtcatttgtg

SEQ ID NO: 71413 - DNA, 33 bp, Homo sapien
tggatctcttatgctaggtacttagtaaattat

SEQ ID NO: 71414 - DNA, 33 bp, Homo sapien
tggatctcttatgctatgtacttagtaaattat

SEQ ID NO: 71415 - DNA, 33 bp, Homo sapien
atctctgcctctgtcagaagcttgctagtggca

SEQ ID NO: 71416 - DNA, 33 bp, Homo sapien
atctctgcctctgtcataagcttgctagtggca

SEQ ID NO: 71417 - DNA, 33 bp, Homo sapien
tttagtttgtgctaaacggcagaagcttggcca

SEQ ID NO: 71418 - DNA, 33 bp, Homo sapien
tttagtttgtgctaaagggcagaagcttggcca

SEQ ID NO: 71419 - DNA, 33 bp, Homo sapien
ttagcttaaaagatcaactataaagatgatttc

SEQ ID NO: 71420 - DNA, 33 bp, Homo sapien
ttagcttaaaagatcagctataaagatgatttc

SEQ ID NO: 71421 - DNA, 33 bp, Homo sapien
caggcaacactgggaaatatgtcctaagaaatg

SEQ ID NO: 71422 - DNA, 33 bp, Homo sapien
caggcaacactgggaattatgtcctaagaaatg

SEQ ID NO: 71423 - DNA, 33 bp, Homo sapien
atgggggttcatggtaagtaatcagaaaagaaa

SEQ ID NO: 71424 - DNA, 33 bp, Homo sapien
atgggggttcatggtacgtaatcagaaaagaaa

SEQ ID NO: 71425 - DNA, 33 bp, Homo sapien
attgagatcagatgaacagggccgaggaagctg

SEQ ID NO: 71426 - DNA, 33 bp, Homo sapien
attgagatcagatgaatagggccgaggaagctg

SEQ ID NO: 71427 - DNA, 33 bp, Homo sapien
cacaagaaaggcatcaagtaaattctcaattac

SEQ ID NO: 71428 - DNA, 33 bp, Homo sapien
cacaagaaaggcatcaggtaaattctcaattac

SEQ ID NO: 71429 - DNA, 33 bp, Homo sapien
gaatagcaagttcaaagggtctgaggctgggat

SEQ ID NO: 71430 - DNA, 33 bp, Homo sapien
gaatagcaagttcaaatggtctgaggctgggat

SEQ ID NO: 71431 - DNA, 33 bp, Homo sapien
tgcatttctttctcaacacatttgtgtgcctgt

SEQ ID NO: 71432 - DNA, 33 bp, Homo sapien
tgcatttctttctcaatacatttgtgtgcctgt

SEQ ID NO: 71433 - DNA, 33 bp, Homo sapien
ctcatggttttacttcaccatttgttcaaacac

SEQ ID NO: 71434 - DNA, 33 bp, Homo sapien
ctcatggttttacttcgccatttgttcaaacac

SEQ ID NO: 71435 - DNA, 33 bp, Homo sapien
gagcggccgcttccaaacaggagagagggaagg

SEQ ID NO: 71436 - DNA, 33 bp, Homo sapien
gagcggccgcttccaagcaggagagagggaagg

SEQ ID NO: 71437 - DNA, 33 bp, Homo sapien
tgtacctgtgattagacaccactgataaaaaag

SEQ ID NO: 71438 - DNA, 33 bp, Homo sapien
tgtacctgtgattagataccactgataaaaaag

SEQ ID NO: 71439 - DNA, 33 bp, Homo sapien
tgttagttacctatgccatatgtcctgctaggt

SEQ ID NO: 71440 - DNA, 33 bp, Homo sapien
tgttagttacctatgctatatgtcctgctaggt

SEQ ID NO: 71441 - DNA, 33 bp, Homo sapien
tgtaattaaatatgaacgaaagtatgctacttt

SEQ ID NO: 71442 - DNA, 33 bp, Homo sapien
tgtaattaaatatgaatgaaagtatgctacttt

SEQ ID NO: 71443 - DNA, 33 bp, Homo sapien
acagggccatcctgtacgcacatcctaatctat

SEQ ID NO: 71444 - DNA, 33 bp, Homo sapien
acagggccatcctgtatgcacatcctaatctat

SEQ ID NO: 71445 - DNA, 33 bp, Homo sapien
gttttccaacactttaaaatcgtcatatgtgca

SEQ ID NO: 71446 - DNA, 33 bp, Homo sapien
gttttccaacactttagaatcgtcatatgtgca

SEQ ID NO: 71447 - DNA, 33 bp, Homo sapien
tggagtgatttggagaaaaatcaaccggtgtgg

SEQ ID NO: 71448 - DNA, 33 bp, Homo sapien
tggagtgatttggagagaaatcaaccggtgtgg

SEQ ID NO: 71449 - DNA, 33 bp, Homo sapien
tattataaaagcctcccagttggtgtccttgat

SEQ ID NO: 71450 - DNA, 33 bp, Homo sapien
tattataaaagcctcctagttggtgtccttgat

SEQ ID NO: 71451 - DNA, 33 bp, Homo sapien
tggaggttgaactacaagaacttctctcggtct

SEQ ID NO: 71452 - DNA, 33 bp, Homo sapien
tggaggttgaactacacgaacttctctcggtct

SEQ ID NO: 71453 - DNA, 33 bp, Homo sapien
aaacatataggctggacgaaagctccaagtttc

SEQ ID NO: 71454 - DNA, 33 bp, Homo sapien
aaacatataggctggatgaaagctccaagtttc

SEQ ID NO: 71455 - DNA, 33 bp, Homo sapien
catttagcagtgttggcaatgaaaatagcagct

SEQ ID NO: 71456 - DNA, 33 bp, Homo sapien
catttagcagtgttggtaatgaaaatagcagct

SEQ ID NO: 71457 - DNA, 33 bp, Homo sapien
attgagtcctaccataggccaaagcactattct

SEQ ID NO: 71458 - DNA, 33 bp, Homo sapien
attgagtcctaccatatgccaaagcactattct

SEQ ID NO: 71459 - DNA, 33 bp, Homo sapien
atgatcgttgttgtcaccgcactaagtaagaac

SEQ ID NO: 71460 - DNA, 33 bp, Homo sapien
atgatcgttgttgtcatcgcactaagtaagaac

SEQ ID NO: 71461 - DNA, 33 bp, Homo sapien
tggactgtatttaggacaattaatttggcagtg

SEQ ID NO: 71462 - DNA, 33 bp, Homo sapien
tggactgtatttaggagaattaatttggcagtg

SEQ ID NO: 71463 - DNA, 33 bp, Homo sapien
tgcctttctgcaaataaattccttactaaggat

SEQ ID NO: 71464 - DNA, 33 bp, Homo sapien
tgcctttctgcaaatacattccttactaaggat

SEQ ID NO: 71465 - DNA, 33 bp, Homo sapien
atgttcatgtgagagaaatatatacttacttga

SEQ ID NO: 71466 - DNA, 33 bp, Homo sapien
atgttcatgtgagagagatatatacttacttga

SEQ ID NO: 71467 - DNA, 33 bp, Homo sapien
cgtgaattatttgccaccgctaacaataatact

SEQ ID NO: 71468 - DNA, 33 bp, Homo sapien
cgtgaattatttgccatcgctaacaataatact

SEQ ID NO: 71469 - DNA, 33 bp, Homo sapien
aaaaataagtgtgtgaagtgatggatatgttaa

SEQ ID NO: 71470 - DNA, 33 bp, Homo sapien
aaaaataagtgtgtgaggtgatggatatgttaa

SEQ ID NO: 71471 - DNA, 33 bp, Homo sapien
gggcctaatcaaggaacattttctattggcaat

SEQ ID NO: 71472 - DNA, 33 bp, Homo sapien
gggcctaatcaaggaatattttctattggcaat

SEQ ID NO: 71473 - DNA, 33 bp, Homo sapien
ttgttgttataacgcaaatagctgctgtaaacc

SEQ ID NO: 71474 - DNA, 33 bp, Homo sapien
ttgttgttataacgcagatagctgctgtaaacc

SEQ ID NO: 71475 - DNA, 33 bp, Homo sapien
tgaaagattttcaggcaagactggagtgtatag

SEQ ID NO: 71476 - DNA, 33 bp, Homo sapien
tgaaagattttcaggcgagactggagtgtatag

SEQ ID NO: 71477 - DNA, 33 bp, Homo sapien
agctatatcatgttcacagtactctcctgtcat

SEQ ID NO: 71478 - DNA, 33 bp, Homo sapien
agctatatcatgttcatagtactctcctgtcat

SEQ ID NO: 71479 - DNA, 33 bp, Homo sapien
ggtgatttgagcagacacagagctaaaacataa

SEQ ID NO: 71480 - DNA, 33 bp, Homo sapien
ggtgatttgagcagacgcagagctaaaacataa

SEQ ID NO: 71481 - DNA, 33 bp, Homo sapien
aatggttgggttgcagaaatctgaaaaagagac

SEQ ID NO: 71482 - DNA, 33 bp, Homo sapien
aatggttgggttgcaggaatctgaaaaagagac

SEQ ID NO: 71483 - DNA, 33 bp, Homo sapien
tattttataagcatcccatgttttggctgcagg

SEQ ID NO: 71484 - DNA, 33 bp, Homo sapien
tattttataagcatccgatgttttggctgcagg

SEQ ID NO: 71485 - DNA, 33 bp, Homo sapien
aaacagaactgtactaaaaaaataaaagatggg

SEQ ID NO: 71486 - DNA, 33 bp, Homo sapien
aaacagaactgtactagaaaaataaaagatggg

SEQ ID NO: 71487 - DNA, 33 bp, Homo sapien
ggaaatctgacctgaactcttttgatccctggc

SEQ ID NO: 71488 - DNA, 33 bp, Homo sapien
ggaaatctgacctgaattcttttgatccctggc

SEQ ID NO: 71489 - DNA, 33 bp, Homo sapien
ttactggataaaatgaatagtgattagcgatag

SEQ ID NO: 71490 - DNA, 33 bp, Homo sapien
ttactggataaaatgattagtgattagcgatag

SEQ ID NO: 71491 - DNA, 33 bp, Homo sapien
tggattcactttctaccataggcatgggtcaag

SEQ ID NO: 71492 - DNA, 33 bp, Homo sapien
tggattcactttctactataggcatgggtcaag

SEQ ID NO: 71493 - DNA, 33 bp, Homo sapien
agtgaaccttttagccaaagatgaggaagaaat

SEQ ID NO: 71494 - DNA, 33 bp, Homo sapien
agtgaaccttttagccgaagatgaggaagaaat

SEQ ID NO: 71495 - DNA, 33 bp, Homo sapien
tttgggttgatgatataaagaattaaaagtgaa

SEQ ID NO: 71496 - DNA, 33 bp, Homo sapien
tttgggttgatgatatgaagaattaaaagtgaa

SEQ ID NO: 71497 - DNA, 33 bp, Homo sapien
cttcaggctcaatgcaagcttacgaagtccatg

SEQ ID NO: 71498 - DNA, 33 bp, Homo sapien
cttcaggctcaatgcacgcttacgaagtccatg

SEQ ID NO: 71499 - DNA, 33 bp, Homo sapien
atctaaagtacaaaacaagcactctaccataaa

SEQ ID NO: 71500 - DNA, 33 bp, Homo sapien
atctaaagtacaaaacgagcactctaccataaa

SEQ ID NO: 71501 - DNA, 33 bp, Homo sapien
tcccttgtgtcagaaaccatatctcagatttgt

SEQ ID NO: 71502 - DNA, 33 bp, Homo sapien
tcccttgtgtcagaaagcatatctcagatttgt

SEQ ID NO: 71503 - DNA, 33 bp, Homo sapien
tctgtctagaattaaaatacaaagtgatgaaag

SEQ ID NO: 71504 - DNA, 33 bp, Homo sapien
tctgtctagaattaaactacaaagtgatgaaag

SEQ ID NO: 71505 - DNA, 33 bp, Homo sapien
aggaagaggaaacccaatgaaccctgaactcaa

SEQ ID NO: 71506 - DNA, 33 bp, Homo sapien
aggaagaggaaacccagtgaaccctgaactcaa

SEQ ID NO: 71507 - DNA, 33 bp, Homo sapien
agtttgtagaccagaaatggcaagctcaaaagt

SEQ ID NO: 71508 - DNA, 33 bp, Homo sapien
agtttgtagaccagaagtggcaagctcaaaagt

SEQ ID NO: 71509 - DNA, 33 bp, Homo sapien
agactagaaagtaacaagaaggaaggcaacaaa

SEQ ID NO: 71510 - DNA, 33 bp, Homo sapien
agactagaaagtaacatgaaggaaggcaacaaa

SEQ ID NO: 71511 - DNA, 33 bp, Homo sapien
gccacacttctgaagacgtgtttaggccttcat

SEQ ID NO: 71512 - DNA, 33 bp, Homo sapien
gccacacttctgaagatgtgtttaggccttcat

SEQ ID NO: 71513 - DNA, 33 bp, Homo sapien
atgctctgcagtttcaagcgggcggcgaccgga

SEQ ID NO: 71514 - DNA, 33 bp, Homo sapien
atgctctgcagtttcaggcgggcggcgaccgga

SEQ ID NO: 71515 - DNA, 33 bp, Homo sapien
tcaccaatcttaaataacttctaggttcagaat

SEQ ID NO: 71516 - DNA, 33 bp, Homo sapien
tcaccaatcttaaataccttctaggttcagaat

SEQ ID NO: 71517 - DNA, 33 bp, Homo sapien
caattgacccactgcaagccaaagttttcctgt

SEQ ID NO: 71518 - DNA, 33 bp, Homo sapien
caattgacccactgcaggccaaagttttcctgt

SEQ ID NO: 71519 - DNA, 33 bp, Homo sapien
agggttattgggaagagcaaatgagacaatgct

SEQ ID NO: 71520 - DNA, 33 bp, Homo sapien
agggttattgggaagatcaaatgagacaatgct

SEQ ID NO: 71521 - DNA, 33 bp, Homo sapien
aggtatacggcctgaccgaactggttagccata

SEQ ID NO: 71522 - DNA, 33 bp, Homo sapien
aggtatacggcctgactgaactggttagccata

SEQ ID NO: 71523 - DNA, 33 bp, Homo sapien
actttccttgaaatgacatgaggctttagtatt

SEQ ID NO: 71524 - DNA, 33 bp, Homo sapien
actttccttgaaatgatatgaggctttagtatt

SEQ ID NO: 71525 - DNA, 33 bp, Homo sapien
ttagatctgtctgaatcagaatttttctggggt

SEQ ID NO: 71526 - DNA, 33 bp, Homo sapien
ttagatctgtctgaatgagaatttttctggggt

SEQ ID NO: 71527 - DNA, 33 bp, Homo sapien
aacacttctctgtcacggatgttgtttgaatga

SEQ ID NO: 71528 - DNA, 33 bp, Homo sapien
aacacttctctgtcactgatgttgtttgaatga

SEQ ID NO: 71529 - DNA, 33 bp, Homo sapien
tttttcctgttacttacagcagatttagaacaa

SEQ ID NO: 71530 - DNA, 33 bp, Homo sapien
tttttcctgttacttagagcagatttagaacaa

SEQ ID NO: 71531 - DNA, 33 bp, Homo sapien
atattagttattgttaacatctgcggctggacc

SEQ ID NO: 71532 - DNA, 33 bp, Homo sapien
atattagttattgttatcatctgcggctggacc

SEQ ID NO: 71533 - DNA, 33 bp, Homo sapien
ggctcactatgtgctagggttgtactgacttag

SEQ ID NO: 71534 - DNA, 33 bp, Homo sapien
ggctcactatgtgctatggttgtactgacttag

SEQ ID NO: 71535 - DNA, 33 bp, Homo sapien
taaaacataaaaagaacatgaggctttggtcct

SEQ ID NO: 71536 - DNA, 33 bp, Homo sapien
taaaacataaaaagaatatgaggctttggtcct

SEQ ID NO: 71537 - DNA, 33 bp, Homo sapien
ctccctgctttcttcaagacaagttccctacta

SEQ ID NO: 71538 - DNA, 33 bp, Homo sapien
ctccctgctttcttcaggacaagttccctacta

SEQ ID NO: 71539 - DNA, 33 bp, Homo sapien
cacacacacacacaaacagaaaaagataaagct

SEQ ID NO: 71540 - DNA, 33 bp, Homo sapien
cacacacacacacaaagagaaaaagataaagct

SEQ ID NO: 71541 - DNA, 33 bp, Homo sapien
cccacacgacctggaactgagagcagaaagcta

SEQ ID NO: 71542 - DNA, 33 bp, Homo sapien
cccacacgacctggaattgagagcagaaagcta

SEQ ID NO: 71543 - DNA, 33 bp, Homo sapien
gcatctcccaccgttacctatttcctgacacac

SEQ ID NO: 71544 - DNA, 33 bp, Homo sapien
gcatctcccaccgttatctatttcctgacacac

SEQ ID NO: 71545 - DNA, 33 bp, Homo sapien
aattgtgtcattatgaagcggccacctgtacag

SEQ ID NO: 71546 - DNA, 33 bp, Homo sapien
aattgtgtcattatgaggcggccacctgtacag

SEQ ID NO: 71547 - DNA, 33 bp, Homo sapien
cccactgctgaaggaaaaggctaatgaccatta

SEQ ID NO: 71548 - DNA, 33 bp, Homo sapien
cccactgctgaaggaagaggctaatgaccatta

SEQ ID NO: 71549 - DNA, 33 bp, Homo sapien
atcacttcttagctccacaacctttctacccgg

SEQ ID NO: 71550 - DNA, 33 bp, Homo sapien
atcacttcttagctccgcaacctttctacccgg

SEQ ID NO: 71551 - DNA, 33 bp, Homo sapien
agtatttgggctgaataagtcagagggaatagg

SEQ ID NO: 71552 - DNA, 33 bp, Homo sapien
agtatttgggctgaatgagtcagagggaatagg

SEQ ID NO: 71553 - DNA, 33 bp, Homo sapien
tcatctttgcattcagactaccctcctggtgcc

SEQ ID NO: 71554 - DNA, 33 bp, Homo sapien
tcatctttgcattcagtctaccctcctggtgcc

SEQ ID NO: 71555 - DNA, 33 bp, Homo sapien
gtcagtcgaaatctcacgtcccaagtgacttct

SEQ ID NO: 71556 - DNA, 33 bp, Homo sapien
gtcagtcgaaatctcatgtcccaagtgacttct

SEQ ID NO: 71557 - DNA, 33 bp, Homo sapien
ctccatctcacaagtacaagtatatttgtggtg

SEQ ID NO: 71558 - DNA, 33 bp, Homo sapien
ctccatctcacaagtagaagtatatttgtggtg

SEQ ID NO: 71559 - DNA, 33 bp, Homo sapien
tgcttgtgtttcttcaagagctaaggctcccat

SEQ ID NO: 71560 - DNA, 33 bp, Homo sapien
tgcttgtgtttcttcatgagctaaggctcccat

SEQ ID NO: 71561 - DNA, 33 bp, Homo sapien
acagacattgactaacaaccattaaccaatgac

SEQ ID NO: 71562 - DNA, 33 bp, Homo sapien
acagacattgactaacgaccattaaccaatgac

SEQ ID NO: 71563 - DNA, 33 bp, Homo sapien
gctatttaatacttccacaagatggttttagaa

SEQ ID NO: 71564 - DNA, 33 bp, Homo sapien
gctatttaatacttccgcaagatggttttagaa

SEQ ID NO: 71565 - DNA, 33 bp, Homo sapien
aacacagagcatactacagcaatccatcaggcc

SEQ ID NO: 71566 - DNA, 33 bp, Homo sapien
aacacagagcatactatagcaatccatcaggcc

SEQ ID NO: 71567 - DNA, 33 bp, Homo sapien
aaacagataattgcagccagtcagaatgcagtc

SEQ ID NO: 71568 - DNA, 33 bp, Homo sapien
aaacagataattgcaggcagtcagaatgcagtc

SEQ ID NO: 71569 - DNA, 33 bp, Homo sapien
tctggaagcttccgcacgttgcactgtgagtca

SEQ ID NO: 71570 - DNA, 33 bp, Homo sapien
tctggaagcttccgcatgttgcactgtgagtca

SEQ ID NO: 71571 - DNA, 33 bp, Homo sapien
agatctgggagaacataagggcaaaaggaaact

SEQ ID NO: 71572 - DNA, 33 bp, Homo sapien
agatctgggagaacatgagggcaaaaggaaact

SEQ ID NO: 71573 - DNA, 33 bp, Homo sapien
aaataaggggaaataaaatcatacaactccaac

SEQ ID NO: 71574 - DNA, 33 bp, Homo sapien
aaataaggggaaataagatcatacaactccaac

SEQ ID NO: 71575 - DNA, 33 bp, Homo sapien
gggccgccatcaaaccaaaggcgaatgctgccc

SEQ ID NO: 71576 - DNA, 33 bp, Homo sapien
gggccgccatcaaaccgaaggcgaatgctgccc

SEQ ID NO: 71577 - DNA, 33 bp, Homo sapien
ttcatgacatcgtttcaccagctggatattttt

SEQ ID NO: 71578 - DNA, 33 bp, Homo sapien
ttcatgacatcgtttctccagctggatattttt

SEQ ID NO: 71579 - DNA, 33 bp, Homo sapien
ttaaagcagagagatccaacttaaagttaccct

SEQ ID NO: 71580 - DNA, 33 bp, Homo sapien
ttaaagcagagagatctaacttaaagttaccct

SEQ ID NO: 71581 - DNA, 33 bp, Homo sapien
agtttcagtggctttcaatttcctgtttgatct

SEQ ID NO: 71582 - DNA, 33 bp, Homo sapien
agtttcagtggctttccatttcctgtttgatct

SEQ ID NO: 71583 - DNA, 33 bp, Homo sapien
acttcagatgccagtcacaagttattcaggttc

SEQ ID NO: 71584 - DNA, 33 bp, Homo sapien
acttcagatgccagtcccaagttattcaggttc

SEQ ID NO: 71585 - DNA, 33 bp, Homo sapien
ccttgtgcttgctataaaatgtttcatatgtgc

SEQ ID NO: 71586 - DNA, 33 bp, Homo sapien
ccttgtgcttgctatagaatgtttcatatgtgc

SEQ ID NO: 71587 - DNA, 33 bp, Homo sapien
taggtgatccatgcgaatactgtctatttgcag

SEQ ID NO: 71588 - DNA, 33 bp, Homo sapien
taggtgatccatgcgagtactgtctatttgcag

SEQ ID NO: 71589 - DNA, 33 bp, Homo sapien
tcttattgtttagctccgactgaatattgcagc

SEQ ID NO: 71590 - DNA, 33 bp, Homo sapien
tcttattgtttagctctgactgaatattgcagc

SEQ ID NO: 71591 - DNA, 33 bp, Homo sapien
tcaaatccaaactgcaacaatagacactgacag

SEQ ID NO: 71592 - DNA, 33 bp, Homo sapien
tcaaatccaaactgcagcaatagacactgacag

SEQ ID NO: 71593 - DNA, 33 bp, Homo sapien
attttgtacactaatgaatattcccgtagcata

SEQ ID NO: 71594 - DNA, 33 bp, Homo sapien
attttgtacactaatgtatattcccgtagcata

SEQ ID NO: 71595 - DNA, 33 bp, Homo sapien
tggagtgacatcaaatcaaccagaaaaagtatg

SEQ ID NO: 71596 - DNA, 33 bp, Homo sapien
tggagtgacatcaaatgaaccagaaaaagtatg

SEQ ID NO: 71597 - DNA, 33 bp, Homo sapien
catctttttagctcacaggggacaaaagcagca

SEQ ID NO: 71598 - DNA, 33 bp, Homo sapien
catctttttagctcacgggggacaaaagcagca

SEQ ID NO: 71599 - DNA, 33 bp, Homo sapien
tctaccttttcttgagcacagctttgatatgca

SEQ ID NO: 71600 - DNA, 33 bp, Homo sapien
tctaccttttcttgagtacagctttgatatgca

SEQ ID NO: 71601 - DNA, 33 bp, Homo sapien
tggcattttgtagataacctggttttattgtgg

SEQ ID NO: 71602 - DNA, 33 bp, Homo sapien
tggcattttgtagatagcctggttttattgtgg

SEQ ID NO: 71603 - DNA, 33 bp, Homo sapien
catgttgcctccagaaagggggttcatcttggg

SEQ ID NO: 71604 - DNA, 33 bp, Homo sapien
catgttgcctccagaatgggggttcatcttggg

SEQ ID NO: 71605 - DNA, 33 bp, Homo sapien
aatataaccacattctaaaagtacacatacaca

SEQ ID NO: 71606 - DNA, 33 bp, Homo sapien
aatataaccacattctgaaagtacacatacaca

SEQ ID NO: 71607 - DNA, 33 bp, Homo sapien
atcacggctgtccagaagatgtccaaggatttt

SEQ ID NO: 71608 - DNA, 33 bp, Homo sapien
atcacggctgtccagaggatgtccaaggatttt

SEQ ID NO: 71609 - DNA, 33 bp, Homo sapien
aaaaccttattaataggagcataaattcaaggg

SEQ ID NO: 71610 - DNA, 33 bp, Homo sapien
aaaaccttattaatagtagcataaattcaaggg

SEQ ID NO: 71611 - DNA, 33 bp, Homo sapien
cattattttcttctaacggactgtgctgagaag

SEQ ID NO: 71612 - DNA, 33 bp, Homo sapien
cattattttcttctaatggactgtgctgagaag

SEQ ID NO: 71613 - DNA, 33 bp, Homo sapien
aattctagacaaggccaaaaacaggtttctaag

SEQ ID NO: 71614 - DNA, 33 bp, Homo sapien
aattctagacaaggccgaaaacaggtttctaag

SEQ ID NO: 71615 - DNA, 33 bp, Homo sapien
ttcattgactaatgtgacaaatctttcaagatt

SEQ ID NO: 71616 - DNA, 33 bp, Homo sapien
ttcattgactaatgtggcaaatctttcaagatt

SEQ ID NO: 71617 - DNA, 33 bp, Homo sapien
agactacagagaatgaatcacattgacaagcct

SEQ ID NO: 71618 - DNA, 33 bp, Homo sapien
agactacagagaatgagtcacattgacaagcct

SEQ ID NO: 71619 - DNA, 33 bp, Homo sapien
acttcaagcaagccacaaagggcctttcctaaa

SEQ ID NO: 71620 - DNA, 33 bp, Homo sapien
acttcaagcaagccacgaagggcctttcctaaa

SEQ ID NO: 71621 - DNA, 33 bp, Homo sapien
tttgagagaagaatctcagatcaaaccaagaaa

SEQ ID NO: 71622 - DNA, 33 bp, Homo sapien
tttgagagaagaatctgagatcaaaccaagaaa

SEQ ID NO: 71623 - DNA, 33 bp, Homo sapien
gttacactgatgaaccagcatgtctttatgtaa

SEQ ID NO: 71624 - DNA, 33 bp, Homo sapien
gttacactgatgaaccggcatgtctttatgtaa

SEQ ID NO: 71625 - DNA, 33 bp, Homo sapien
ttctactgttataacacggctctccattataac

SEQ ID NO: 71626 - DNA, 33 bp, Homo sapien
ttctactgttataacatggctctccattataac

SEQ ID NO: 71627 - DNA, 33 bp, Homo sapien
acaggttatttccaggcatattttgggttgccg

SEQ ID NO: 71628 - DNA, 33 bp, Homo sapien
acaggttatttccaggtatattttgggttgccg

SEQ ID NO: 71629 - DNA, 33 bp, Homo sapien
tatcagtgatggcataggggagaaagtagagtg

SEQ ID NO: 71630 - DNA, 33 bp, Homo sapien
tatcagtgatggcatatgggagaaagtagagtg

SEQ ID NO: 71631 - DNA, 33 bp, Homo sapien
catgtaagcaccactacatgaatttttagaaat

SEQ ID NO: 71632 - DNA, 33 bp, Homo sapien
catgtaagcaccactatatgaatttttagaaat

SEQ ID NO: 71633 - DNA, 33 bp, Homo sapien
gaatcacctggtccaacgtacatcgtaatcgcc

SEQ ID NO: 71634 - DNA, 33 bp, Homo sapien
gaatcacctggtccaatgtacatcgtaatcgcc

SEQ ID NO: 71635 - DNA, 33 bp, Homo sapien
atctgatgcaactttcaaaactgaagtaaattc

SEQ ID NO: 71636 - DNA, 33 bp, Homo sapien
atctgatgcaactttcgaaactgaagtaaattc

SEQ ID NO: 71637 - DNA, 33 bp, Homo sapien
aattaatgctagagaaatgtgattgttgtcgtt

SEQ ID NO: 71638 - DNA, 33 bp, Homo sapien
aattaatgctagagaagtgtgattgttgtcgtt

SEQ ID NO: 71639 - DNA, 33 bp, Homo sapien
agttaccaggagcaaaaggattgttagcattta

SEQ ID NO: 71640 - DNA, 33 bp, Homo sapien
agttaccaggagcaaagggattgttagcattta

SEQ ID NO: 71641 - DNA, 33 bp, Homo sapien
taattggttactggtcaactcccaaaggtattc

SEQ ID NO: 71642 - DNA, 33 bp, Homo sapien
taattggttactggtctactcccaaaggtattc

SEQ ID NO: 71643 - DNA, 33 bp, Homo sapien
ggtagctgtagatgaaagttggaagcagcagat

SEQ ID NO: 71644 - DNA, 33 bp, Homo sapien
ggtagctgtagatgaaggttggaagcagcagat

SEQ ID NO: 71645 - DNA, 33 bp, Homo sapien
agaagcatgaacagaactgcaagtaaaacacag

SEQ ID NO: 71646 - DNA, 33 bp, Homo sapien
agaagcatgaacagaattgcaagtaaaacacag

SEQ ID NO: 71647 - DNA, 33 bp, Homo sapien
tctggtcctggcagacagagaacagcatgggcc

SEQ ID NO: 71648 - DNA, 33 bp, Homo sapien
tctggtcctggcagaccgagaacagcatgggcc

SEQ ID NO: 71649 - DNA, 33 bp, Homo sapien
aggccttaactagtgaaaaaaagccaatgatag

SEQ ID NO: 71650 - DNA, 33 bp, Homo sapien
aggccttaactagtgagaaaaagccaatgatag

SEQ ID NO: 71651 - DNA, 33 bp, Homo sapien
ttcagccagtatgtaactgactgtcttttaaat

SEQ ID NO: 71652 - DNA, 33 bp, Homo sapien
ttcagccagtatgtaattgactgtcttttaaat

SEQ ID NO: 71653 - DNA, 33 bp, Homo sapien
gttcatgaaaccagcacaaaatgtattgaatag

SEQ ID NO: 71654 - DNA, 33 bp, Homo sapien
gttcatgaaaccagcataaaatgtattgaatag

SEQ ID NO: 71655 - DNA, 33 bp, Homo sapien
atgttcaaagctttaaatgaagttctaatcata

SEQ ID NO: 71656 - DNA, 33 bp, Homo sapien
atgttcaaagctttaagtgaagttctaatcata

SEQ ID NO: 71657 - DNA, 33 bp, Homo sapien
ttaaatggaagacaaccgtatcctgatgtcttt

SEQ ID NO: 71658 - DNA, 33 bp, Homo sapien
ttaaatggaagacaactgtatcctgatgtcttt

SEQ ID NO: 71659 - DNA, 33 bp, Homo sapien
aaccattccagaaccaccttaagagccaggctt

SEQ ID NO: 71660 - DNA, 33 bp, Homo sapien
aaccattccagaaccagcttaagagccaggctt
